United States Patent Application Publication US 2014/0057251 A1 - sequence listing, part 177

SEQ ID NO: 356708 - DNA, 871 bp, Cannabis indica
ggagaccgcctccttgtacaaagacagcttccggagggatcccaataagagatgcgaataccataacgaaattaggcacagtaccaatgaatgcaaaaatctcaaagacgagattgaaaatttgatccggttgggacacctctactagtggatcaagaatcggttgcctcatctcaacccaggtcaggcggctggggctttgtcgcaaggagcaccaaggggtgcagtaggagtattggctccagttattccctccggagatgcccagcatattcccggcctgccacctagacccaacgggagagtggctatgatctcgggaggaccccacatcggaggaacacccgcaaggagctaaaacggtacgcaggggccgtgaaacacgatgaggtttgggaagttactcaattcccagctcaaaggcccggctaatggatcaacccattacattcacagaagaagacgctaaaacagtgcgctttcctcaccatgacccgttagtcatagagacccccattgccaataagatcgtggccagagtcctgatcgacaatgggagttctgtgaacctgctgttcaaagaggccttcactacaataggcctaacggaccgagacctttcaccaagtggttcccaactcacaaggttcaatggaacaacacttatcccaatgggaaaagtgaggcttccagtcaccttgtgcccggacacaccccatagaactttcaagtactgcacgtttgtggtggtggactgcccaatagcctataacgcaatcctcggtcgatcggccttggtaaactttggtgcagtcacgtcaatatggcacttgtgcctgaaattcccaacccaggaggctgggatagggac

SEQ ID NO: 356709 - DNA, 659 bp, Cannabis indica
gtggtttttgtgtgtgagtttttatcttagttgctttacggaaccatttttttgtcttcaattttttactagttgataactataaacggtttctttatattacatttgagttattgtatgctattatttgtgtttatttattttgttatggaacttgttcttttcatatttatgcctcaatattttttgaaattgatctctatttttttaaaaaatattataatcggttttatgaggtattatgtgttttgagatctttaattgtagagctagttttgtttttaatttttgttttgttaacgcagattatcgttaaccgaatttgagcctcacagtagtgatttcacatagtttaaataaaagctataaaagtaaaagtatgaacacagggttttttaagtggttttgcagttaaaattctgcatagtccatgagtcaatcttattcaaatttctgattattttttagggcctcttttgtatgagtttttccgtcccttttttgatcttgtttgccactatttataattacatagtgacaagttaattacaaagtttattgtaatctatttacaacgatcatcccttaaaatcacggggtatgattacatatcacatagtgtaaatgcggttatgatttgaaaaatcatatagctttga

SEQ ID NO: 356710 - DNA, 922 bp, Cannabis indica
ctagtctaaagcatttccatatgtccaattgaggcaaggccttatatgtcacatggaaataaatttgacttccaaaaccgttagtagctattttattggttattcagaacaatctagggctataaattttatgatcccacagtcaaaaatattttagagacgggaactacaactttttttgaggatgttcaatttaaggggagaaataaggaagaaatgaattcaaacttagtccctactatcatttttgacaatgttcaggcttaattattcctatttatattgtaattatccttatttttttttttttgtatttttatgaaaattcatatatcaattcacatagaaactaatagagcaacctaaatcataataaaaattcacataaaaactatcagaacaattcaaaccgtaatttttttaaaaaaagtaatatataaaataattcttctaaatataattaccgtagaatgtttctttctttttatgaacttggttttggggttggaacttggagagttaagtgagttcatcccacacgtgacacgcacagtgttgttttctacaattaaaacattaatttgataaatattataaccgttaatttcattatatgatatataaaaagcaatatttctgtaattcatgatattaactaacgagagtcctatagtaattctttattttcatatatatatgttccaatattgatgttaaatatgatgaaaaacaaaagtccatatattacttcaatattagtttaaattaatatgataaaactatacatataattaataaagtaattaactagtaattcttgtttctcacagtactagccgaaaatcataatattttcatcgaatttacatgactagaaaacattaaaattttataattatataaatatatatcttttatatat

SEQ ID NO: 356711 - DNA, 1394 bp, Cannabis indica
atgtagaactgataaaacagtaaaattgcaaaagcgaggcccatatccacaagccatggccggccacatgcatagggtttatcccaagtaattcaaacctaaccctatgtggtattcttaaataagaaagtgatggcttcaggaaagtaagaatgcatctcattcctttcagagaaaaacttgagccatctttctaaacctagtcgccacctatctttcttcttcttctttgactgtttcgaaatccctttgtgataaagtagtacccacacacagcaagtagtacctcaatcatagtgtggaagatcgtgaagaatccagattcaacaaagaaggatattcgggctcaactttatatgtgtttacttataatcgttttgaagttcatatttagggtgttaatcaacatacttgtgagtacatctaagatcctggtaaaataattctaacactgggtcccaagtccgaatttgggttcgggaccgagactggggtgcggttctaggtgcgggccccaattttgtgtcccgagtctggttccatgttttggtctgagtttgggtctaggttcggcactgagtctaggtatgtgttgggatctaggtttgggtcccgattcgggtctaggtcttggttggagtctggcacctggtccggttacagttctgggtctaggtttaagtccggttacggttctaggtctaagtccaagttctagttacagttccagtcccattcccgggtccccgcctacttcctgtttcggttaaaatttttggtcaccgggtacggattcggctccaagtttgggtttgggactagttttggtccgggtcttggttcgggtcctggtcttgttctagttcgggtctcgggtcttgggtcgggtcctaagtttaggatagggtccgagttcggggttgtgtcccaatagtcaagtccttgtttctgggtccagggttaggtcccgtctctcgagtttgggtcgagttttgggtcttcatcccagttccggtgcctagtttctagtccaagttctaggtccaagttcaggttcgggtttgaatcttaagtttgggtccgagtctaggtcccagtacggggttcaggtgttagtttgggtctggatccacaatgagtccaagtccctatttgggtccaggtcggggtcccaaaccggggcccagtcaaggtctaggtcacgaaccaggttttggtccgggtttaggtcttgagtttgggtctaggtttgggtcttgatctgggtctgggtcttggtcctgggttccaatctcagtttgggtatgggtctgggcccgtgtccaggtttgggtttagggtttagtatttagggcttagggcttagggtttaggggtaagtgtaacgagtttag

SEQ ID NO: 356712 - DNA, 501 bp, Cannabis indica
taataggaaaacaaatattataggcatcgtgattttgtcatctgttgtttgattgtttattggacaatttataattattcgttccatttttttttttttttgcttttatttttacatataaatttaaacaactgctattactatttatatactatgaaatattattgcaaagaaaatttcaccactcactagttgatcaacgttttttttttcttgttttttttttcggtgaatcaaataagtttaaattatcagattgagtaaaacttcaatgattatattgtgtattttttcatcttttttaagttacattaatatttcaaaatattcatattacagtatattcatattttagtattgtaatgaccgctctagtaatatggattagaaaaggcaattagcaccaaattttattattttattattatttgtgaattaaatttaaatgtggaccccaatatttagaaataaatattagagttataatttctcaatttcgga

SEQ ID NO: 356713 - DNA, 742 bp, Cannabis indica
gaaggaagttcttctgattccgtacccagccataggatgatggctcgtacgaagaaaactacgcgtctggctgaggcttctgacccccaagcggctcggcttgccactctgcccgatgccgaacaggatttggcggtcccaatggaggaggaccatgagggagacgctgaagtccaagaggttgaggagctggacgaggcatgtccgggcagtcctcccgctgaggagggagaggaagaggttgaaccccctaattcggggagtacaatgaggctgggcaaacagtcgatgctgacggggacgttctggttgagggcattgactacgtcagtgaggagcttgctgaggcagttcctcacaggaggcagggtgccttgggcgccaggtgggtaagtcctccatccaagattttggaggcacgcctctgcactcttgaccaggacgggtacctgggcgagctagactgctacattcccgcccacgacaatcgtcccacaaacactaataaggggatgtgtacttgggcgctgatgcccttgcataagtactcccggatgtggcggccttcttcggcctttgcccggcccagattactcccaagggcattaagtatttgtccgctctcttcgtcctctgcgcttcccagggatgggatgctccttctccccacgaggtcgcttctgttggaaattattttaccaggatcttagatctactcataagtatgttgattaacacccta

SEQ ID NO: 356714 - DNA, 883 bp, Cannabis indica
ccaatgtcttcttcagacatagagaaaatggtgcgagagctcgctgagccggggaccattgatattcgagacagcaagtccacggtgtcagcccgtgactaccttattcattcgaggcacgcgcctgatgtcgaggtcgaggagacagacgacgactggacggccccagctcgcgaatcaggcgatgaagaggaagaggcagaaggtagcggtactgactcggtcgatgatgcccagatgaacgagcctttctcgtgcgaggattttggtttcgagggttaccaaatcagaccttaccacctttacgaggctgaacctgctgcgacttgcgtctttacgtcctaagccaactcagagggcgcaccttccttttacaaatcctgcgattatccccacagaggatgtggtaatctcaatacccattctccgatgtgggatatcagtccctttccatccctttatcccggctatcctcaaatgatatgatgtatcacctttccagctaactcccaatagttattgcacaccctggctttttacgcgacgtactatggagtacgttcatagggctccctcggtagaagagttcagctacttctactatataaaaagcgtaggccttcacaatggtttctactgctttagcaaatgggcgacttttgaaattaatggggtagaaggaatggtatctaatatgggagattggaaatcaaagtggttttacatcttcaaagtcccagggattagaactgattttaactgtagacctagtacgtcgcatgttttctaacttagacatttttttttgaattattttgagacctcatgctaactcgctcttttttgttttcgcagatagaccagctcgacctgcactcgacgc

SEQ ID NO: 356715 - DNA, 805 bp, Cannabis indica
agaaatcttgggactcaacctaggacaagtggattaccaccgagacaccgtcaatgtccttcttgcactgatagggaggaggcgtatacacaccctagcaggggacatgtatcaaacatttcccaaaggagaaggcatgtacatgacgaggtaagttctagctcgggatgttcaagatctcgtgatcacaatagatctacgcgaggaggggatagacctcgacgtagtaatgatcgtgaaagtatgagtcatacaaggagtagtcaatttgagagttactcatacacgaggtccatgagtaaccatgaatgaagatagtcagatctttgtgaacatttgattagagacaatctgatttgcgcgagcgcttaattaaaatgctcctgatttatgccaacaactcaatgacaatcaaaagtaagaggatccaatccaattgcgaatcagttagaaaacaaattcaagaaataccaagatggggaatatgggaaactgcttggttacaactcagatgaagagcttgaaccttttcatccaatcattatgaactctgaattcccccaaggatttaaaaacccctacgtctcgccgccgtatgatgggactacagatccggtcgctcatctcaacaattttaatactataatgcaagccaacaatgtcacgaataatttatgttgtattttattccccacctcgctgattggggcagcgagcagctgttgggttttatgccctaaataaaactcatttcaatataatcagttttacttattaatatagatcagaaataacatttaatgtt

SEQ ID NO: 356716 - DNA, 905 bp, Cannabis indica
caatcttccgtactagttgagtttgcaaggctatcaatctttcctttgagttctttggacttggcaaacatttcctttttttgttgtatgttccaagtatttaaatattttccacaactctgtagcagccgagagatgtgaagcaccggttccctcctagttttgtttgcccacacctttgcaatgatcttttgacattcttcgttgttcgcccaagcttgttcaaagtgaaatctagtgccccattttttgttgaaagtgtccaccatctttcccggacttgcttgaatcaaaagtggtctatgatccgaattccaccaacttaagagggaaactttcttctttcgaaagctgtccttccaatcgggattgcaaaaaactctatcaagtttctcgaaaatcaaatttgtggccctcccattgcaccaagtaaaatcatcctcttccggcttaatttctcttagccaacaatccgagatagctgttctgaaattcctcataagataatcgggtttgtgcccccctcccttcttttcgtttctatgaagaatttcattaaagtctccaccacatatccatgcaccattgaacatcggtttgagcctttttaaaagcttccaactttctagtcttccccccgggtcggggctgccatagaagcctgtaaaacgccaagtaaatcccaagtcattttccacaagggcatcaatatgagacctcgtgaaagatttaatctgaaccatgtattcatccgaccaaagaagcgccaaaccaccacttttacccttagcatcgactgaaaaacaaccaacaaaacccaattggattctaatgtgctccattcgaacactattcagtcgcgtttccgacaagaaaatcatcccgggatgataatctttaacatg

SEQ ID NO: 356717 - DNA, 1302 bp, Cannabis indica
aattcataatgaaaacctcttaattttttttttattaatattatcaaaaatgtcataatgaattgtctgccaaaatatgaaatagggattaaaatcccaaactaacaattaaaatttatttgttcagtaactaaaataattaattcaaaaattaaataaaagacgagcttcatcttcaacttggacaatcttcacccttctatccaaccattcgactcaactcgctaggatagcaatccaagtttaagcagctggaactaaaataagaagaaaataacatggttagtagatccagaagtaataaccaaaggggataataattctctaaaatacattagtttaaaacaaagataaaaatatcttgtttccttgccaaaaacttaggacactggggtttccagtgtcccttttcgttgcaatagaaacacttttctttttcttttgacttaagattagtagtctttttcttattagctgtgttaacagctttaaaaggctttttgttattcttctattttctctgctttccaggttttgaagtagaggcaatgtttgcctcaggcttggtcgtaccatttgtagtagtattagaactaggagctttgttttttcctttctgcagtcctccaagcaaattttcaaatgtcttaaggttgttgattaacttgtgaaagtccaaagtcaacttgttcatgacataatttgatgtgaagggcagaaaagctggagtcaaactatttaatatcaaactcacttgagtttcttggtttataatagctccatgattctcagcttccgggaagtaactttccatctgaagcaggtgatcactcacgttctgatgaggcttcatccgtgcatttataaaatttttggttgcctcaaaacgagcttgatctgatgccatcctgaaaaagttcagttaactggttcatgatatcagcagccgtgagagtgtttgcaaaccttgtcttcaaggtgtcaaccatgctagacaacataaattatcgagctttgttgttagattctaccaacgctcgaacttttccttaactgccttggttgcattctcaccaggctgctcaagagcttcttcagttaacacaaacagggcgttttcacctatgagagcaatattaatgttcgatttccatttgacaaagttagctccagagagcttgttgtcagttaatggtgtcacaatggggatatttgtagtcatattgggtactacaaatatcaacaaatagaaatcaaataaggttcaatacaaaatcatacacattcaaaaattattaagca

SEQ ID NO: 356718 - DNA, 695 bp, Cannabis indica
ttttaataaaaaaaatataaaataagataaaatgttaaaactaacatattcctaatcttgtaattttaattaataaaatatatatcaaaaataacaaatttgaaaaaaaaaatatgatatggttagcaaattttaaaattaaaaaataatattttaatacgaaaataagatcattcaaatttaataacaaaaatgtaatatctgatcttataattaaaataaataaaataatctaaaatttcaaaatcaaccataaggctatttttgtgagaaatcaaactttcaaaattcaaagcctactaatatttaaaactaatttttattaaaattaatacaagttaattttattctgacaattagatttttgatagaaaatttgaattctacacaaaattctaccaaaatttgatttttgtttcaatgaaaaacgattttttaatcaaaagatatcacaaaaacaagattgatgcattgcatactccccgtgcgcacaagaggctgcacatgcgcgagggagagactgcatgtactacccggaattaagaaaaatagattagcaaaaccctaactagataattatgtataattgaggaattatattattatatagttcaatatatatctgaaattatatgaattttaatatggtaagaccccgttggtgagccaggggcattttggtaattatgacccga

SEQ ID NO: 356719 - DNA, 671 bp, Cannabis indica
gtgcacaacagccatagaatcagattcaattctaacatgatctatccctttgttccttgccatctgcagagccaaagcaataccattcaactcattttcgagcacactaaaaactggcccaaaatccacagcaacccaagaatcttcaatcccttgcgcatttgctgtaagtaagggtgtgcataaattgatccaatccaatgcaaaccgacctatctaattataactcactgctaaacattagatatccaattgtgatcggatcagattggatgttatttttaaatatccaattggatcgaatcggatgtcggatgaagtgcctaaaaatctaatacatccaacatctaatcgaactaattaatattttcatttagtttggaagagtaattagattttatattattatacgtaaaatatatatgtatatatgaaaattaacattaatatttgggatattggcggctaaaccacctaaattttacggtttgtaacacttaaccaccaaaactaaatttttggcagctaaactacctaaactctggttccgttttgctctgcacacctccgtccaaaaatcagcgttaagtgccacagtggactgtccacgtgtacacacttgtacacgtggcaaatttttagtggtccacctaatattaattttaaaaaat

SEQ ID NO: 356720 - DNA, 570 bp, Cannabis indica
cttgatcaaagttctttacctccttgaaaaaaaattatgttttccaattgaagagcttttgccaaactttatctctgacatgttggaatagagtcttcttggtccttcccatgaaacatgacagacctagatgtttctcatgtagaagactctccaaatttgaagtatgttatatatctcccttatcaagtccttggtattcccatggcttatacagaaagtcgacttagcaaaattatccacttgacttaaagctttagcataaatatatagtgtcatccaaaattttgtccacctaacgtggcatgtccacgtaagccaagacagagtacatgtggaatacagccgtgccaatagcaagacaaagtctccttacaaggtatggtaaaactgtcaagtagcaagcgaaaggagttaagtgacttgtcgaggagttataccaccatgtctggtcggtcaaggggagtctatagaccggccaggatgagtttatatggccgaccagagtttgagcacaagctagccagccaaaaggttatttttagaccaaggaaggatctgtctgaccaa

SEQ ID NO: 356721 - DNA, 661 bp, Cannabis indica
tactttaaatggtggtcatcctgacctgagtacttttttctcttttgtcggaacctttgagcgtagtccgcccagcaggccattcacttaaaagtaaatgttctttcagttagtatggtcgcctgaccttgtactttattggtagtattttcttaaatgctcatcattcaataccagggtactagaaaaagttgcattttttcatcatacttacctaatttgtatgctccggattcaagaacttcgaccacttgatatggtcattcccagttaggtccgagtacacctgccgtactgtctttggtgtttagaaatacccttcttaggaccatatctcccacgaaaaatttccaagccttcaattgtttgttgaaataccgagctactttttgttgatgggctatcaactttaagtttgctgtgtttcgcttcacttcgatttcatcaagtgattcggccaagagtacgttattgatatcttggttgtacgtcaatcttctgtgggatggtggctcgagttctacaggcatcatagcttcatatccatatgccatagcaaatggggtatgtcgattgccgttttctcagttgtccggtatgaccatagaacttcaggaagttcttccggccaatttcctttggcatcttcgatttttttctt

SEQ ID NO: 356722 - DNA, 524 bp, Cannabis indica
ttttggggttttggaaaagtggtcatatatttttaatgtaaataagtattagtttagggaaaaaatattaggtatatgtaaatatagaaaatcaaatttccctttgaattttcttgccttcttttttttttttttctatgtgtatctacattttatttataaaaaaaaatgaagtataaggtttaaattaggatcaaagttgtgaccactagaataggaggatgttgctaaaccatcattcaacttaaatttagctagttatttattgttttgaattatattaagggaaaatagcgtcaaaacccctaatactttcgctttggtttcactaaaccccccaaatccaaatttgtgcgggtaaacccccaaaagtcgtattgtgttagcaatttaccctttccgtccaaatttagctgttatgtgtcaggttggcttgtccacgtggacacaatatacacgtggcacaattttattggtccacgtaaataattatattaaaaaaattaaaataaaattaatttaaa

SEQ ID NO: 356723 - DNA, 545 bp, Cannabis indica
ttcatggccaagaaacaacaatcaaataaaatgaaactcacttgaatgaacaaaggcaaaaatactaaagtaagcataaaaattaatcatacccagcttaaaagttcatagccattcaagcctcaaaagtctagctcatattcaagttagaaaataaaatccaaggaaaaaagttgtcttccatggctgctgcccttattacaaattatcaagttttcggtatttaaagacaagaaagaaaagaacaaagtataaaagaaaagggaagagaaatacaaacaaatagagcttttatccttctcttctcttgcacttgggtcccccttctcttttcttcctctatgtactttctgcaattagttcccctcaaaaatggcagctgccctcatgttagagagaagatgatgggtgtacttggcttttctccccttttttagttgttgggtccttagggtacagaattggggtaatttgaaaaataccactttgatttatcaattaatcaaatttacctctaattttatatttaattgaaacatacctct

SEQ ID NO: 356724 - DNA, 729 bp, Cannabis indica
gctttagggaaataagatagcaaactgttaatttctgtaacaaaagtattgagatgcagattgtgagtatcattattacgaatataatccactaaaaccttgcaatccgaaacaatactatcccgataaagggaatgagcatgacaccaagaaagagcaaagtgtaaggcttgtgcttccattaacaaaggtgtgttaattccacgccatggcattgccaaatttaaaagaacctcccatgtgtttgtttgaatggacataccaaagcccattttgttgagttgtgtatcttgagcagcatctactgaaagctgtatggtgtaagtaggagcagatggtacacttccattggacaacaacgaaacatcttgaagctgtctaatagtggaaacctttttgttgcagctttggtattggtcgatgtagtctgttagctcaagcagaacctgagctggagatgaagagaaaccagcatgtagccaactattcctgcagttccaaatcttccacaacaagcatacaaagaagtgataatttccaacagtaaacaaagtggcagcaaggtgtaataaatccaaacaagttagtgaaatatttttagtaataaaatcatgaatactagttaattcccatacctcctggacagcggggcatctgaaaagagcgtgctctagggtctcatcatgatagtgacatcggcagcaatgtggagaatggaggatttttcgt

SEQ ID NO: 356725 - DNA, 933 bp, Cannabis indica
ttctaaatttgttgattttaatttttggttgaaaaaagaaagaaaaaaaaagtttatatttatttcgacaattcatctcgtaaaatctcaacatgcagaggactatgtcactcacttgcaagcaatgttcgagatactgtgacgatataaaatgtgacttaatcctctcaagtgtctttggtgtcgatcaggaaaattcctcaggtttatggtgaaccagcgagtaattgaagctaaccccgcgaagattaaagctttggtggaaatgcgatctccgaccaaaccaaaggaggtccaaagctttacaggtaaagtctctactttaaatcgctttatatcacgttcctctaataagtgcaaagaattttttttaaattttaaaaggcaataagaagtttcagtgggctgagatgtgcgaagaggcttttcaagctcttaagtcacatttggggcaacccccaatcctttcaaaaccgatgtccggagaaatcttatccatctacctcgcagtgtccgaatacacgattagctcagtattaattcgcgaagaccaaggaaaacagtacccggtgtattatgtcagtaagcgtctcttagacgctgaaactcgttatctgcagatggagaaactggcatttcccctggtaattgcgtcaagaaaattgcgaccttatttccaagctcatagcattgaagttttaacaaactaccctttaaggcaagttttggcgaaaccagaggcctcaggaagattgttaaaatggtcagtagagctgagtcagttcaacatcaggtacaagcctagatctgcgatcaaggggcaagccctggcggactttatacttgagttcccgagcactgaggtggcacttatagaagaaaaaattgatcctaatgtaccaaacagtgaaagatggactttatatgttgacg

SEQ ID NO: 356726 - DNA, 823 bp, Cannabis indica
ttcttttattttgtacttgatatggtcattcgacctggtacttttattggtagtattttctcaaatgttccccattccaataccttggtaccagaacgagttgcattttttcatcatacttacccaacttgtatactcctgattctagaacttcgaccacttgatatggtccttcccagttaggtctgagcacacctgtcgtactgtctttggtgtttaaaaatacccttcttaggaccatatctcccacaaagaatttttgagctttaacttgtttgttgaaatatcgagctactttttgttgatgggctatcaattttaagtttgctatggtgcgtttttcttcaatttcatcaagtgattctgcaaggagtacatgattggcctcttggctatatattaatcttctgtgggatggtggttcagttctacgggcagcatattcatatccatatgccatggcaaatggagtctgtccgtttgctgtcttctcagttgtgcggtacgaccatagaacttcaggaagttcctccggccgatttcctttagcatcctcaagtctcttctttagggtgtctttcaatgtcttcttgaccatttgcctcaacttgaccatttgcttggggatgcgccattggggagaaacttttgatgatcccatgattcgcacagaaatcagtgaaagattgactgtcaaattgtttgccattattcgaaactatcttgtacggcaatccgaactcgaaaattatattcttcacaatgaagtcttgcacttttttggacgtgatggttgctaatggctcggcctccgtccacttgg

SEQ ID NO: 356727 - DNA, 625 bp, Cannabis indica
gcacacatttggatggatcttattgttgactggatttttagccaaccgacgcggagtcgtaataaatgagatttaaaccaaaatcacaataagaaatgtaattaataacgccggaattcataataaatgtaaataaaagacactggaatttaaagaggttcggccccggaggtgggtaataggctactccccttgagttttgttgatctgagttgcaatagtcaagaacaagctctcgattgccaagaatgagaaatctttaattttctaagtgtttcagattctggatccccttcccaggtcatgggtgaccccttatataggggagggggtcggtgcttctcgcttcaggagacgcgaccaacgcgaagctatctcaaccgtctccttaattttcggaggcggctggagtctgatatttaggataatatcccgctatttcgtgggttgacaactgtctttgagcctttcgcgggatttgaacatttgaaggagtcattgatgacaagggtcccttatgggtgtgacatggtcgtcaaccacctttgaggattaagcccatacttgggggtaacacccccgagactctcgctgagggggggtgaccaccatcatagttaggtga

SEQ ID NO: 356728 - DNA, 537 bp, Cannabis indica
cataaaccaacatgaacacatccgaacaacacaattaacatattcatcgttttaaatccatatttcataaaagtaatcattaccatggctctgaggctagttgttagaaatattttactaggatctagattactaacaaataagttgaattaacatcctaaatatgaatatctctaatacgatgaaattaaacacataagagttttagataaccttacattgattgcaatggaataatatgactccttcgtattatcaagatctgagcctagatctctttctctccttcagattcggttaccaccgtcttccacactatgattgaatacttaacttactatgtgtgggcatggcactctatcactataggagaattggatgaaatacaattaaggaggtttcaaaatactatagaaggtgtctctcatctactaattgtctgacagagaaaattatgcttgatttagttgaaaagtgttggatgagatgagagcatcatgttccttttatagtgtttcaactagggcttaggtttga

SEQ ID NO: 356729 - DNA, 663 bp, Cannabis indica
catagatttataaaatatgtggttgtggtcttaagatgacttaggtctagttacattaaagagctcttagaatagtgcaagtggatcctggtcacacaatactaaactcatattcgatacacattaacatacagtttgaatccattgacagaaaaggatattaatgacttacgaaagtagaactatattgtattctggaaacagaaatataaaatttctatttggaatctaaaatttaaagtcaaaacttaaatttataccaaatgtacaatgagttttaatctagcttggaccaccactactaatctaactctaagtctgatttgcctatagtaagcatatacaagtagaagatttctaagatcgaggatttatatcatttcgggatagaatgtcgggaatatagtcatctgtgccattcaatttcataaaagaaaacagaatgacatcataagcaaatgatatataaaccattcatctaatgatatattatataagctaattcgaaacgaataagcaaaaaggaaaaaataaaggataatttcgaattcaaaataagaatccaacgatgtctcgattggcgagagtcaaagttattcttattttattaacttctttattgttttatattgtaaatacatgtctaaggtgtcatctattgat

SEQ ID NO: 356730 - DNA, 643 bp, Cannabis indica
cacaagttcaatcccaatagatattttttttattttttttatagcgtactatatctatccttagaactcaacaatatctatcttatgtattacatattattctaaaattactctaagtatttaaggattatctaaatatatataaaaaaacatttttataaaagtaggttaaagaaagtataccttataccaaaaattatgtacttgtcttccgataaaatcctaacaaccaagtttaagataaattaaaatcaaatattttcttaattctaccgaaatttcgacagcataacggctataattgaacgtttccaaaaaatccaaacctattaataacaacaaaacacaattcaaaccaatataaaataatcacaacaacatttagcaatataaaaatttactacccattcgactgcagtacatgtattcacagaacctacttcactacgaatgaatatttaagatattgaaactctactaagcattcataattaatttataataaaatttagtgaatgtatacctcgagctagctagaaaccgatcaacaccaaataagtcagatccttgcaaattaacctcacaacctacaacataaagaaatactacaaaattacttttttttttatttacctacttacta

SEQ ID NO: 356731 - DNA, 551 bp, Cannabis indica
aactaacttgaagacaattcctaacacgaatatataaatgcagaaaatgtaaccataatacatctagatcggattattataaggttttattttgaccaaaaaacagtttaaggtactataaaatccaaagtcatttaacttattagacatatgatccaataacaattagtaattttttcaaaacatataatccaaaatagtattcatcccaaaataaataaaattctgtattttaatagggaaatttgattttctatacttaaaaaatcttaaaattttttccctaaatacatacttaataatattggtcatatatgaccacattcctaatatcccacaaatacccctcccatttgaaaaaaatcaaaaactcaaatcatccatccatggctgcctcatcccgaacctctctctccctctcgctgaccacggcttcagcgcccgaccaccacgcccggccaccgacgactacccaccaccccgactacgcacgaccaccgtccgaaccacgcacgacccagccccttctctcggacccagcccctctctct

SEQ ID NO: 356732 - DNA, 765 bp, Cannabis indica
aatgtattttttttaaaaaaaaaaaatagtgtcttatgtaattatccctataatatacgttaatatataaaaagaattaagatataatgtatttataaataaaaaataaaaaaaaacacgactattgaaaaaacaaaagtaataatcatacataaaaatttataaatatattatatacaaattttgcattggttccaacaataaatatacctttagtttatttttttggctgaaaaatatcatttatagtttttatttatttaagggtaaatagcggcacaagtatacaaaattttaaggttgtaagcggcataaattcaatatttatttttagcagcataagtacccaatatttgtaaaactgtaattttcttctagttttgtcaatacataccccattttaaatttattaaaagaacatttagaagtaactgatactacatgtttctatctagacctaatgatctagaattcaggccttatatgtgccctgtttaagataataatagagtctgtactgacaaaattagagaaaaattactgttttacaaatattgggtacttatgccgctaaaaataaacattaggtttatgtcacttacaaatttaaaactttgggtacttatgctgctatttaccatttatttaacttgtgttgtttagagtatctctaatggtgtattatttcacactatttaactccaatgacacactaaattaagtactaaattggtgtacactaaattctacaccattaatgatttt

SEQ ID NO: 356733 - DNA, 592 bp, Cannabis indica
cacttatgtacgacctaaggaagatttttaacgtggtataagggttggaggtccctgttttgagtttcggcattgttgaagcttcgaacatacggttcttgaaacgaacctagatttgaacgtgtttaagttgtttcggagatcaaaggaggttgtgtttaagtttatgggaccccaaagatcagttttaacttgaagaatcgaagctttaaggtctgaaacgaaattttccgttttgactttattaacaacggtacaccggagttggagaagacgactccgatccgacgcatggggttgttatcttgggtagttctttattgttttgaggtcctaagcactctgggaagctttcccaatcgaaaggacacatcaagagcaatcggggacaaagtcacatcttgccagcgacggaaccgacgtgaacgccggtggtcgcgttctgggcatatctgaggtctttttcccattttattttgtagatttagattctacatattattctagggtgtttggtgaagtttcataattttcttgcaattattttatttattataaattatttagtttatttattaaattaattaaaaaa

SEQ ID NO: 356734 - DNA, 758 bp, Cannabis indica
tactatttggcaactatatatgttttatcaggaagtagcactagtagttaatctatgactagaataatgccaaaaattatatagaacttcccataggctgaataattatctagtagccttctaggccacttaaatattcagtcttactggtagagttagagactccagattggttcttacacttctccaaaaaaaactgctccatccctagactattcaccatctcataagtagactttctagcaataacacaagtctagcaacttgatttggtgtagcctaggagtattaaaagaccacccttattgactaacatatagttcctctttttatcttaagatttatatgattgtcttccaatgttcttttccaagattaaactgatacatactcataactcccactcatagcaagtgtctggtctaatgcatacaagagcatacacgagacctctcactatcgatgcttaaggaattcttttcatgacctttatcttttctgaaatagttcaaaatgttcgttagataaaatctatgtctagaatccgaaagaatttctttagagttagccattagaaaatgctccaacatcttactaaagtaatttgcttgcactagagtaagtaaattaccaggtatactacaatcctatgatactaggatcgggaagttttgttaagtcaattcaatatacttattatcaaaattttccttcttgtccctgtaatagaaaacgtttggttactctatatgaatggt

SEQ ID NO: 356735 - DNA, 574 bp, Cannabis indica
atgtatgattcattatgggtcatagtggatcaattcacaaagtcagctcattttctgccagtgaaaattacctacacggtggatcagtaggctgaactgtatgtaaaggagatagttggtctccatggagctcctaaatccattgttacagatacggatctaaagtttacatcaaaattttgggtgaatctttagagggctatgggtaccaagctcaagtatatagtacagcttttaaccctcggagtgatgggaaatcagagagaactattcagatactggaagatttattacgagcatgtgtcatggactttgagggttcatggagtaagtacttgcctttaattgaattcacctacaacaacagttaccaaagtacaatggggatggctccctatgagatgatatatggtaggaaatgtcgttcccctattcattgggacgaaattggagaaaggaagtagttaggtccagaattagttcaaaggaccaatgaagctatagacaatttcaacgcctggatgcttgcttcccaaagcaggcagaaaatttatgctgattcgaagcacagaga

SEQ ID NO: 356736 - DNA, 584 bp, Cannabis indica
tcttgatgaattcttgagaatgcacattgagcttgcaaactcaggggaaaatgaggctctcagtgaagaaaatcaagccatcatcatacttaactcattgccagaaacttacagagaagttaaaactgcaattaagtatggtagaacctcaatcactcttgatgaggttatctctgccttaaaatctaaggatttagagatgaagtcagaaagaaatggtggctctaatggtgaactaaatctgagtagaggtagatctactcagaagaagccttggcatggaaaagggaggagtcaaagccatagcaggggtccaaacagaggacagaacaaagggagatcaaattctaaagggccacaagacacagaaggatgctataattgtgggaaacctggacacttcaagaaagattgttatttcttgaacaagaacagaaagaacaagtttaatggacaaagaactgactacaactcagattctagaaaccctaagagtaaaacagatcaccaaaatgcaaattttagtgactgttatgaaaatgggaagtttatgttgcaggatcatcttttaaagatgattggat

SEQ ID NO: 356737 - DNA, 767 bp, Cannabis indica
acatcctcaattacagtttcagttttcgagcccgtcttagtgcaaagtggccaaaatatgcattagcacatcaacgaaacataccacatacatatttgaggcatcacaattagaatcagagtaagttgatttttgagcacccaaggccccaaggccccgagcaccctgggcctgggttgacaatttgtcaatgtgggtgccttcctagtatttgatcaaagatccaacttttgaattgaatttgtcttcatcaaaaataggaaaacaggtccttctggaggaaaaacaacaattattgggcacaaataacaaggcccagcccccatgttgacgcatgggactagccctatgccgaggttgacagtttgcaaacttgggccacaaatattgaagtttttcaagaattcttttgagcatcatgtatgtcttcaaaaaatattaagattcaattatttctagggaccaaacagaattttggaacgggcaaaactatgacccatcgcctaggttggcattttgtcaacttgagctgtttccaattcagtttagcaaaaagtgctctgggaatttttaccatcataagaaataaggaagattcaagtaaactttgggagaaaacaacaaacccaaatcctttgaaaaagggcccagctctagcttaacaatcaacctatgacactaccttcaattgcccaaatgccaaattcaatgtgaccattgaatctgacttgtgggctttgtgccctaaacaaaactctatttcaatg

SEQ ID NO: 356738 - DNA, 1013 bp, Cannabis indica
  modified_base (931)..(931): a, c, t, g, unknown or other
aaaaggaataaagggagtatctatttatagtttttgtataccactatcaatattgaatatttgggcaactttccctcaatttaagggactggtagggaagaccttatgaagaaattatcaatcatatataacagggccatcattggtgtcaaatcttatatacaaacaaaataatgccttgttgttttttatgttctaaacttggattaaagtttttcaactgtgattttaattatatattgagatttttttttttttaattatcgtattgattacaatattatctttgatttaaattttttatcactgcaaaaaacagttacttttagtgataaattttttgtcacagtatatattttttgtaattaaacatgacttttagtcacaataaaaagttacttgtaattaaaacatagtatttagatgcaacgttgtcaataatttaattttaatcacaacaagtattgtgactgaaaatatatttagtctcaataaattgtgtttttttgtaactaatacctttagctaaagaccttttagtcacaacatagaatttatgatttataattagctacaattttttatttttaatgaaaaattttattgtaactagaagttagatttttttgtgtgtggtgtattaaggtagtacatataattgtaattaacaatacatagtatgtattggaattaaataattagtctctgactatctccgattcaaaaaaagaaaatatgataggaaatgtcaaagatgtgtagaatgaaaaaaaaatgaattacataacatattcctggaaggatggatcattggttggagaatttttgttaagaaaaattaataaataatagaataaaaaatttatatatatacatgatataaaacacaataaataatagaaaatgattaagtatgtgtagggttttttgngtaaattataagtttcagtaaatcgttttttaatagaaaaaaacaaaaaatctaataattacgaataaaaataatattttaa

SEQ ID NO: 356739 - DNA, 1422 bp, Cannabis indica
ttctatacagttctagtttttcactaataattttcgtcccttttttagtgtaacctgctcctatttataattacataggagggcagttaattacaaatttgactaatttacaacaataatcccctgaaattttggaatttgattacatcccacataaaataaatgcagttattatttgaaaattacacagctatgattggtccacttttactgggtcaattcaaacgtgtattaattatgttgtaaagcgtatcgttctgggacgtctcgctgtgaacatagcaacaataaccctggtatcgagctagagcttttcccatgtctttccaaggttgataatgtaaacctcgttgtttctacgcctaaagacataatgctccatctgacaatcgcagttcttggtgacaaggtgaacttcagcagtcagtatcatttgaatgttagcttctatctgagagagctgactcgacggggctgtagatttcattgaaagatgttaggagctgattagtgaaggtaccacaagtgtgctttcctatagcgagatggatgcctcgctattagttgtttagattcactcgactgctatactgagtttgtataatgtgtattatacactaaatgccttaacactcaccgtctcgtctatgtctctccatgtgtagcgaggttgatgcctcgccttgcactactgatgtcgtatggtttctcgtcaatgcgtgagttaatagtctatatatccttgtctcgcttatgactttacatttagcgagttatagatatactctaccgatttagtatttaatgagttattccattttaacatctaaaaatataactaatattatatttgttggttcgtattctcgcaagttgacacgtgtccttctctgaagtgccaaccgaatttcaggtataacaattgccccttagaaagctcttttttaataaaaagtgttttttaatgattacagagggtatatttgtcataatcctttttgaaaatacgcacgtctttgattttgggagttttatggttccaatacacatcaatagcattaatggactgtcttttccacttctattttcatccattagatcttccatgttatgatctcatggttgaaaaatatagagtataaaacggtaagaatcaaactttctaccattttcatcttctccaaaaaatttaagctttcaagaaatcccactcaagctttctgtacccgtgcatgccatccctatctttgacattcttcctacgaatttacttagacttgcttttcgaatccttgtgttgttaggctatttttagcataagttacgagtcaatttcataagctttttctcagttaatgtttccttttggaatggttttatgcttggttttccttgtttcaggttcccgatgcattacagttc

SEQ ID NO: 356740 - DNA, 593 bp, Cannabis indica
ttgtaataacagacgctatatatctttatatataacctctccagctattgtcttctccaaactctaaaataactagcaacccttcttcctgtcaaacccatgaaactcgcccaaccacctctttcttccccccatttctttatttttcatctattttttacccattttttttaaaaaaaaaaaaaaaaaaaaatacttgcattttttatacccaaagtttgatcatcttttgtttggttttttagggtaagtcgagcttagaggtagtagttgtggtggttgtagctccggccgccgcttttggtggagaaatcgttgaatctcaacgtccattaaggtataaattatctaatctctaataattttattaatgtaaattgcttttatttttttatttttgatttttttaggaatttttttttggttaagattgtgttcttgtagttgtgcatgatggctggattttggtaataagataaaaatctaaactttaatagtacatatatatgtattttgtattttattaaatgtacgtattgtatgtatatatattttataattgtatatgtatatgtattgtatgtatacatatg

SEQ ID NO: 356741 - DNA, 558 bp, Cannabis indica
agaatcgccaaactaggaacctagaataagactaggaccgtgaccatgacccaaacccagacctagaacctaacacagacctagcctcagacccaaactgagacatgaattcttgcccggacacggtcgtgtaccagaccggaactaagatccggacctggacctcaatctcgggcccgatcccaaacagagacttggacctagataaggatccagatacacctagactcggactaagacccagactaagatggaaattctttacatagatctggaccgagatcctgaccaagacccaaacttggacccgaacttgggacccgaacatggacctaaactccaacctagaccgagatcggggtttagacctcgacacaaacccggacacagactcagacacgaactaaaacacccacacctagaatcagacccaaactcgaacccagaccaggatcagaagcaaggacttagacccagaactatatccagactcatatcaggattggaactgggttcttggacccaacctagaccaagacccaggacgcgaacccacac

SEQ ID NO: 356742 - DNA, 642 bp, Cannabis indica
accaccacacttcggcgacccaccttccaccgcccggccccacgcgccgaaaaaattggaagcccaagtgccggcgacctcacccaagtggcgtcgctcctttcgccgccgttagctcgggatcgcaagtcaaagtttggggtttcaaactttgaacggatttttcggtcacctccggcgtctgtttgacgagacgttttcaccactaaactcagctcgtcgaggtgaacaacctacagtaaaccatttttcccggttcgctactttttccggtgacatttttatagctccgcccctttccggcgactttccggtgacatcgtgtaccgttttgacaaacggttggcatgggtgtgatctactcatcgaggtggtcgttttgatatacactactcctattttcggcgacatttccggtccattaatttttaccggcaacgattgttaatgtgcaccgcttaggtgaggtttcggaaccccaaattttaaatatagtcatattatatgtcgttggactcagttttgaatgtagaatgcgatgatgataattatttaaccaattgatggtataggtgagaataatatgtaagattggactaaacaattggagctcaggacttgagagcttaagattgttttttg

SEQ ID NO: 356743 - DNA, 997 bp, Cannabis indica
atgagtgatttccttgaccgtgtcgaaggcttcatcaagcttgaagaagccattcaacgagcaaaaggtgagcaaaagcctgccaagtcaaaggctccttttactggaacatccgctcaacttccgcattacaagaataattcaagttcaaggggtaaacgttccaacaacaaccacaagcaagggaatgggaaaaagggaaagttcaccggaaaatccgaacaagctctcggggagaatcatgccaagtacactgcattcactattctgactaaagatatagaaagtatttacatggcaactcagtcgctggtcccataggagaagcccggacccatgaagaaagatgccaacaagagggacatgataaagttttgtcggttccacggagactacggccacgacactaatgaatgcaacaacttgaagcaggaaattgaattcctgataaggaaaaataacccacacctgcagaagtatgtcaagactgatcagggtcagaggaccgacaataaccaggatttactacctccaccggtagatgggcatctgcaacttattattggaggcccgcacatcgctggagatttgggcaaagttcaagagaggtatgctcgaacagcacagcacgagcaagaagaagttatcctggtcgtggaagaaagaagtcccgaaattccactagcaggagaaccgagcataaccttcaacgatgaagacgctgtcaaaattaaatttccgcacaacaacccgctggtcgtggaagtccagatagccaataaaatggtggccagaaccatgattgataatggagccttttccaatatcttgttcaaaactgcttatgaaaagatgggactccaactcaaggatctaaccccatgcctccaaactgtctatggtttctcaggtgaaggagttgcacctctaggaaaaattcgtctacccctcactgttggacaagctcgacgtgcatgactatcatgacacagttcct

SEQ ID NO: 356744 - DNA, 551 bp, Cannabis indica
ccaccacatctactggtacaacaggaagtgtcggtagtacaaaagcagacacaagatgagcttattgttctttcaaatctcagctctgttttccccttattgtcttatcatatcctgcatagcagaatttacatgttcccaacattatggcaataaagaattctcttctttaccgtttgccttgagcccagatagctcgctaatcagactgttcgattgcctttactgcataacttataacacatttagttaacatcttctaactatttagaactcagacagatatcagtatcaatatgcaaatatcatacacatattcttatcacaatcatcactatgctacttttcccaacatactttataatagcctaggcatgtaatccaatagcaaataatataaacacttactataccatgagtcgacttgtcctcacagcaaatgtacatattagactagttttcaggacctttaaaaccatggctgctctgttacaaaaatgtaacaccctaatctatagggacaccacgtgtgtgattttataaactagttt

SEQ ID NO: 356745 - DNA, 740 bp, Cannabis indica
acacttgagatcgaacctaaccatatcaggattaagatcttttgatctaagatcaaccaagtgatattgacttaaaaagatacaacggtaagtttatgatatctttaccaagttcaatatcggtccaatatgatgtatactccatacattcaatactagcatactttaccaatgccctagaaaggacataacacttattcaaggtgtaagtaaactttatcgctgattatcatgtcagtataaatccagtgtactgacaaatcacgggataaaaactttgaaacatataatcatgattatattctgctatgtcgacaccactataatcatgaataactaaatgttcttgatttaatagaatttatacattaaacatataatcataaaaataatcatgtgagccatgcaacttaaaaagattttcgatattttattaattagtaaatctgattatattgaaatgattttcgatattttattaattagtaaatctgattatattgaaataatttttcgatattttattaattagtaaatctgattatattgaaataagttttatttagggcataaaatctcaataaaaattgtaattggactcacaccaatgtcttccaaatcatcccaccattcataaggaataatgtggcctataaggataaagtgtataggcttgttcttgttgagttctgaacacatgagcaagaatagatgagagaaaaaataatttctttttcttt

SEQ ID NO: 356746 - DNA, 402 bp, Cannabis indica
aaatattaattaaaaaaaatttaaaaaaaaatattaaaagtgactttttttgtttttaaaatattgattctcaattaaaaaattaaaaaagtgaaaacagttttatagaacatgcttttgaaaaatatttttactttttcaattttaaaaacagaaaactgattaaaaagtgttaccaaacgccaccctaattaagggtctatttgttttaacttaatagactctttgttttttaaaatttttttaatcattttttgccacttaatacttcttaccaaaatagatgtgtaatggactcttaatatttttaatatatatccctctccttctttttcttttgggctatttacaaaaatatggggaaaaaaatataagttatgatatagggtgattctacaatgc

SEQ ID NO: 356747 - DNA, 842 bp, Cannabis indica
tcttggcatacttactttgagatgcgaatgttcctccttccatctgtctgacttgaagccccaaaaagaaagtaagttcacataccatgctcatttcaaactcatttttcatttgattaacaaacacttgcacttcatggttagatgtagactcaaacactatatcatcaacataatttgaataatgataaaatcaaattttatgtgtttgatgaaaagagttttgtctacactacctctttaataatcatgagaaattaaaaattgagttaacctttcatacaaggcacggggagtctgtttcagaccatagaaaactttttctaatttatatacatggtctggaaaccaaggatcttcaaatccctttggctgctcaacataaacttcctcactcaaaattacattcaaaaaggctgacttcacatccatttgatacaatttgatatcaaaaacacaagaaatacacaatagcaaacgaatagattcaaattttgctactggagcaaaggtttcatcaaagtcaataccttctacctgtgtatagccttgtgccaccaatcgagccatgttcctcacaattgtaccgaattcatcacttttatttttaaagatccactttgttccaatcacattgatacattttggtctttgaattaaaatccaaaccttgttgcgaacaaactgattaagctcttgcattgcattaagctattcttcataagtcatgacttctttcacatttttcggttcaaattgtgagacaaaacaaagaaaactaatcaaattaacataacttttcttgttaccatgctttcttcaagatttccaagaatgagatc

SEQ ID NO: 356748 - DNA, 720 bp, Cannabis indica
aaggggaagaaagtcatcatcgagccaactatccaagcccgcaattttctgacaatgcaggagaagttcgttggcgaggagttcatatccaaggcggagaggatcccttctgaagagcttgttccacgctctgtggagtttgcttcgcagcagatgactctgttcatgaaagtcttgctgctggttctaaggaagctgaactgctgaagaggaaaaaatgcccagctccaggagagcataaagaaactaaaacaggacgcgggtgataaggacagggagctcgaagaccttcgcaagtctaaggagcagatcgagctcgaggccaagaactcttagatgaagatcgaggagatgtctcgcgacttggagattgagaaggagaatgggaagaagcagtacgactaggcggtttctaactacatttacaccactctttccaaaattccagatttcgacttttcaatccttggagcagaagccgctgaactggctgaggcttttcgcgtcatgtcgcccacacaaactcaaggcggtggagggaatcttcttgaggaggctgaggctgtggatgctgaagaagtcgagaatgaagccgtcagcaaagtcgcggatggatctgctcctactggtccaaatgcttgatttttcctttaatatttgcttgtgttaaactctacccttttttttgtttatgcggtacaagggtactcgcaccttgta

SEQ ID NO: 356749 - DNA, 679 bp, Cannabis indica
aaataaattaataaaaaaattgagtgggacatgtgtccccacatgatcccatgtccttccgccaatggtggtggttacttcccaataggataagttgtatttaaaatgacttataatgtgactagtgctgtaaatacgagcgagagtttgatatgatacggaatttgatacaagttcaaaaagtatgatagggctgtgtatccgattcaattcactacttttttagtcaaacaacattatattcacactaagtacgaatttcatatttctgattcatccaattcgcataacagtttaaatctaattagatccgcaatagtatggataggatcggttacttttttttaatgataaattatttaacatttcattaaaatgcaaaaaaaaaaaaaacagaagactattttaatctctaacaatcatttctttccattatacatacaaatcaaaccaatacatatatgtcaatatatatgtactcctcagataaaaaaaataaaaaaatcattacaatatatactagatttacactagtatatatacatgtatctattactaacataaataagttagtatatatatacatacatagatttatatatatatataaatttatgtgtatgtctctatgtgaatatgaatgatttttttttccgtgtctgattataaacagataaaa

SEQ ID NO: 356750 - DNA, 522 bp, Cannabis indica
tttttatttttttttaaaaatagaattcattcaaaccaaacaattacaaaagaaatggttcatcaactcgaacatcttgacaaacataaggatgtgcaaccccaattcacatagtgcaagctttagattggctaaagtgtgagccacatgattgacctctctaaaaatcaaaacaacccataacataaggttgcaaaagtaattctctaatttgattgaacaacccaataatgtcgcgacaaccatcttcacctgcttgaatcaattgaactacatgcagatagtcagtttcgagaacaaacacactacaagaaatatcacttttgccagcacacaaaagtgggttggcaaaagtggtaaaatagaatttacttgtgatgtgttggcaaaagtgggttggcaaatcaacgttggtattagaacttttgccaacataaaatgaaaagcactggaaaaaataacttttcccagcgcgtaaatgcgctggtaaaagttagattttagccactgtaaatgtacgct

SEQ ID NO: 356751 - DNA, 643 bp, Cannabis indica
gtttttttttttttctaagaaaagtaaaagataatagtagaattggatgaagatgaatgggaggatattgatggtggaaatgagagtgagaatgatgagagaaatttacactataattcgtcaagagatgatgacttagataatttctaattatcattgcatttaacattaatgttttagttcgagttttagaagtcaagtgtgttcgtgatatgctatttttatgagatattttatggtatatttaaaatgtatgtgacattttattcatccttaggtgttctaaaatttatttcaatataatttttgaggcttacgtctcaagacttatttatgttattttaaatattgtaactaacaagtaactaatcttttcctaaattactaactagtaactaattatagtatactaaattactaagtaagaactagtcctagttctactaaaatttcagcagcataacgactataactgaacgttttcaaaatatttaaagctatcaataacaacaaaatacaatctaaaataatataaataatcacaataacattaacaatgtaaaaattatccacacatccgatcgcagtacatgtatttacaaaatctactttactgatgaatatttaagatatttaaactcat

SEQ ID NO: 356752 - DNA, 507 bp, Cannabis indica
acaagcagggttacctctttttgtcatatcatggttgttgcaaaagcaacctccccattactcccctagctacatagctaagggtaacacacctctccttgactctcatccagcatcaacattgattttatgatgcacaactactagctgaattcaacacccagtctcacggtctttagaaactttctccttcccccattagcgtccttatattaatgcagaaacttaccataccattctaccatatctcccactctaggacaagtaccaccatgatggatactattttgaacattccacaagttcaaggccacaacaatgaagaaatctgaagtatcgatagaccatacattagccattctactcaagaaagtgattaaatctctggtgcagtgtggaatacctagggatgcacattttctccatggggatggggccccgcggggacccgcccctaatggggcggggattccccgtctaaatggggaacggagcggggacggggat

SEQ ID NO: 356753 - DNA, 641 bp, Cannabis indica
aaatttgaaaaaaaaaaaaagttaaaaaatgatatacaaagtaattctccttgtttttatttattttgtcatggaaccggctttgtttagatttatgcttccgtgtttttagaattgatccccaccatttttagataaaagttataactggtttatgaggtattatgtgttattcacttttactcattttattgtgtaactaattttatttttaatttatgttttagtattttaagaattgattttttctttgtttttttaattataactggtttgagttgttgtgtgttacttatttttattttatactatataagatgttctattttaatttttatctgaaatatctaactccggtgactttgacatgtaaaagtaaactttaaatttttttttcatacgaaaaaggggttttttcataaatatggaaaaatatagtatagtttattttatatggcataaataaataataccatggggttatgagttttttttattatttttttatatttatatgagttttttatgccatatttttgtaaaaaaagtagaaatttcgtatttgtaaaacaataataagtttcaccagaaaagttatcggtgtcggaaaagtcgccgaaaaagtcatcggtgccgaaaaa

SEQ ID NO: 356754 - DNA, 448 bp, Cannabis indica
aaaatatgacatttgtgaaaataaagaggagttaaataaatagcaaaattgaaacttgtgggggccataatatggcccgccccttaagttcaataaagctattattttatcttttttaattccatttaaattctaaacctaacccgaatcctataaatagaataagatgactcttattttcataacctacattagtctcttttgttagacaattagaaaataaagcgagagctttttcttcttctattttgaatttccttttcttcttcctcaatatttttgaatcctgaagtgaattgagagtatgcccactcatatcaaagcaatacctgacatagtgaggaagactgtgtataactaaattgaatgagagaagatctaggtgcatatttgttggaatttattttaccaggatcttagatctactcacaagtatgttgtgtaaaca

SEQ ID NO: 356755 - DNA, 587 bp, Cannabis indica
taaactattgtgctcttcaaaatcaaatactagctagaaacatttaataatgatatatacaattacactgagacataagaggatataatgccttctaacttgacacatgagaaaccttttgatttatgatctcttttcttggtcttaatttagctagaaaacttaacatgacctttggctacgaattttttgcggtgacataatgtggtgacgtggtattccgtaaagattcaattccatagataaacatattacatataattataagtgtataactatagatctaaagaatacctttgttgattcaaagagaagaattcaaatggcggaagcgtaccttaattcgtagatagtgatgatcttaatccatcttgtagagataatctttgtggtgattttgggtaatgatcttccaagaaaacaagacttagggttttctaattttctctcttgatgggggaagatgagaatagaaatttactcttgtttcttggggaccactaccaatttataacctcatagctaggttattaattttaagtatttctaatttagcccctcaataaattagaaatatcgcttagggt

SEQ ID NO: 356756 - DNA, 693 bp, Cannabis indica
cttctgaagaccccaatctgcacttatcaaactccatgaagttatgtcagactttcaaagtcaatggggttgtgatgacgccatccgtttgagactgtttccattctcactgaaagaaagagccaagagctggttaatctccttgccaccaaattctatagtaacatggacaaacttagcaacaaaatttctgtctaaattcttccctccagcaaagtctgctaagctgtgaggagaaatcaacaatttttgtcagcaagagaataagtctctccatgaatcttgggagaggtttaaggatctaatcagaaagtgtcatcatcatggtattgagaagtggatgctggtccacaacttctacaacgggctgattactaatactagaacacttatagatgctgcagctggtgggacatttatgaggaaaagtgcaaacgaggcctatgaaatgatagaagagatggccatgaataatcaacaatggccaactgagagaagtcagacaaagaaggtagctggtatgcatgaggtagatgccatcacaaaactgacagcccaggtagaggccctgacaaaactgatagctgttcaagtaaaataagctcaggtggtctgtgagctatgtggaggtcctcacccctatgaggaatgtccggtggatgtgaacagtttaccaatggatcaagaaaaagc

SEQ ID NO: 356757 - DNA, 634 bp, Cannabis indica
tggcattaatttcaaagtagaagcttcatatgggacatcattgagaaattttctaatttttgagttgggatatgatttggtgtttggatctgtttatacaccaaaaaaatattgtaaattaaatatttattatgtgcttattttcaaatgaaaacttagtatataaacttaaataatttatatgtaaataaaaattagttacctgcattaattgttgatagttgtgtagacgtttcacaaatattattcatgacattagcaactttcttacttctcattgtattattattggcctcgtgtaagtgattttggatgcttgatgatgattcatctatagaaattgcattatttcttccaattttttttttttagcatatctttctctttttcttcgacaaattgtttctttcatttcttctgaaagatctgtataaagcttctttttttttttttcattttcttatcctggtttacaaatacaaaaactattaaattaattttttattatttaaactgcaaaatgaagatatgagaagttaaaagttataaggtttagttcttacatatttaaatgataataatataaattatgatagttttctaaatacttgagttagtcttttttttttttttt

SEQ ID NO: 356758 - DNA, 738 bp, Cannabis indica
aaaacctttctccatggctgataacgggaaaaatggtgatactcatcctaaagagactactcacaatccaggaaaagagccaatggtctcacggaggcctcccaattcacacacaacacgatctacacagtccacacgttccaaaaggacccagtgtgaaggtggccaaaaccaagaaacacggaatgaagtacccaacacaagtgttggtggtgcttaacccatggatgattgtgcctatgatcccatgagatacgtatggattgtcgagttggaaaattgtcatctcaggcaacgtgtggaggaggcaaaccaacgaaatgctgatttggaatgggaggcagctacagccaagacgacacaggaaaacaacgcaccaaaccaacctggtcctagagtgagggaaccacaaggaaaacctcgcggctcacgaaccaggaggcaagagacggctcaaaaggaccctcaaaacgcttaggaagaacaaccttgggaaattgaggatccccctgaaaatcaacaaccaaatggccaaccccagcagggggcatgcaacaacctgtacccaaaggagaaggtcggtacgtgacgaggaaatttctagcttgggacgcacaagaacccgtagtcgatcaatgtgaggaggggactaaaatcgttgcagtactgatcgagagactacaggcacaagtagaacgaaaaattactcaaggaggaggtccatgagtaggacgaggt

SEQ ID NO: 356759 - DNA, 501 bp, Cannabis indica
acattgtggttctgtatagtagctgtaaatacatataatatagagcagagataattaaattaaagagaacaggccataagtatttctacttcttactttcctaaatatatatatatatatatatatagatatattttggagctgagaatctgaaatcgatatagaggtgatatatatggggagtcaaagtgatagtggtcatagtagcagcagtactactacttttgggaatattatgccaaccgtaaaattcaccaagctgttcatcaatggagaatttgttgactcactttcaggttataaatttcttcaatttataattattattcctatatatatatataaaaaaaattctttaagttgtataaagaacttatctcaaagatcgatatctttatatattaaaagtgcctatctaacgacatttcttggtttaacagaatatacttaaaaataaaagaatattctgttaaatttaacgattaggtttgatctcccgtt

SEQ ID NO: 356760 - DNA, 779 bp, Cannabis indica
atagctcgagaaagaccgtctactcatagctcgagaacgatcgtctacacatagctcaagaaagaatgtctacatgtagcctgagaaagaccgtctacacgtaaaaggtttcgaccgctgcatagacctcattcttcgcaccaaaagatcccatttcctacagctaagaccccattcctcacctcaggttatttttcaacaccagagattggctggtccaaaggtcttcttatgcaagcttgggtcttgggcaagttgggttctttagtagaatccatgatcacgccaactgggattaccttcttcttggattccttgtcagcctgagcaggacctctgaacttaccctcaaaaatctcttgtgaggttcgctcgtaacaactaactgcatctccttagttttgattggtcagaagatactcagtcttgaaatccttcgtttccaatttaaactgtgggtcaaagtttttaggaacatatggagtggaaaagtggttggtatattctggtgtttcaaattttgagtaataagtttccgaacttggatcggacatcttagcaagagaatgacaatccaatttctggatgaaacataccaaaaaccgggagtttatggaatatggcaagcctaagccaccattttatactcggaacctagtaaacagaaaggccaaaggctgggaaatctaacggttgcgagtgagggaggagatgaaaggatggttcatttatactaataatgaccctcaaaactgtaccgcaaaaatcaaaggacacat

SEQ ID NO: 356761 - DNA, 722 bp, Cannabis indica
atccattcccagtataatatcaaaatctgccaagatcatttctattaggtcagcacttaactccctatcgtcaatcctgattggcatagagctaatccaccttttggagataactaactctccgccaggtaaaagggttccaaaccctgattcataactatcatacggtctatccaatttactaaagattttggctgccacataaaaatttgtggccccagagtcaaacagtacagagaagtaagagttgttgaccgagatctgacctgttaccactgaagggctggcttctacatcagcctgagtgatggcgaacacccttgctggagtgggttccgctagagtcttcggtgcttcggttctgagttgaaagaaatccctcttgtaatgccctggcatgccacactaaaagcacccttgccctctacactaccctagatggtgccttttacaactggggcactatgggtaagtgtatcgggtttcggtgccactctagcgattgcttcgactctggttcccctggaacctcttgttctgacctgatccactggttgcagtggatgccttccttttctggtccatttccgatccactacctcccctgctaaaacctgatgcaggaggggtaagagccccgccaacagctggagtcccacttgactctatcatgcatcccactgcgccctcagctcgcagtgccttatccaccatttcagcat

SEQ ID NO: 356762 - DNA, 537 bp, Cannabis indica
cttgcaattgatcaaagagatcgtcaatccttggcaaaggatacttattcttgatggtcaccttgttgagctcacggtagtctacgcacatcctcatacttccatctttcttcttgacaaagagtaccggcgcaccccaaggcgagtaactcggcctaatgaaccctttgtctaacagctcatgtagttgtattttaagctcttttaactcattaggtgccattctgtatggagcctttgaaattggattagtccctagggttaattcgatgatgaactccacctctctgtctggaggtagtcccggtaaatcttctggaaagacctctggaaattcacagactatgtgcacattctccacatttagttgcgtctctattgctcgatccactacgctcaccaagaatgccagacaccccaccttcattagttgactagcttttagggaagagattaatggagtcctcaaggccagcttgtcgcccttgaaaataaaccgatccccagcctttgtttcaaaaacgaccagtttctttc

SEQ ID NO: 356763 - DNA, 686 bp, Cannabis indica
agagggtaaaaataaaagaggacaatataaaaagagtatagagagtaatttcctcataaaataatatttagggccaagatgcaaaatggccctaaatctaacaattaagttaataaatgtcccttttttaaaaaaaattaacaaaatgtccttttagttaaaaatttgatgataaaattacaattataaccttgaataattaagtgtttggtatagttattttgcacaatagtatatcgtttttatgtgcaataatatattaaaaaaaactgaaaggtagtatatatatatattttgaaataactgaaaggtagtatattagtttaagattgtagtatattattttaatgtgctatggtatataatgaacgaaagacggaaattaaaaaatatggaatattagtttaagtttgaggtatagttatatttcactaggaaatattgtctttatgttcattagtatatcatgaaggaaagaaaaagaaaaaaaaacatgtggaatattaaattaagtttttagtatatatatattttccactatattggtggtatattaatttttcactatagtatttatgcttatgattgcagaatatagtttttatatgctattatatatcgtggaaaaaaaatcatttaatagtatattagtttaagtttatggtatatttatattggtctaaggt

SEQ ID NO: 356764 - DNA, 565 bp, Cannabis indica
catgttcgagccaactagaccacggttgggtcacagttatgtattttgtattctcggttttttgtcgcttaggtcgacatgataaaatgacttgtaatattttgtaaaacttttatggaatcccgaaacatgtgtaaccttttacaatggttgttaattaaatagttacaaattacattttcactctgtacttgatttaaagatttaagtttcctactcttattttatagtaatctcggtttagcaagattaagttatattaatggttgttagtagcgtgcctaattgatagggcgttactaatgatttgagtcattttactagtgattttcttgagatttttacacctcatgtcaaaattgacaccttttttacatttttatccatacacggttttttaaacttttttaacttttacatttttcaattttacttttcaaaaagtttaataattacaattttaccttttcccttcttccttacacacatacacgcacgccacctcataactcctttcttattttttttttttgaaatttttcatttatccattcttacactccac

SEQ ID NO: 356765 - DNA, 593 bp, Cannabis indica
aataattttcagaatatattttactttattttagtaatcattttcccacgtaattttgaattgcatttatttattttaaatggagatatttcaatttttcaatgggcagtactcaagtgaagttcagttcctaaggcctgttgcaaggccttccaaaaccatgatgtaaatggaggatctttatcagaaactatgcttgaaggcactccatgcattcgaactatattgtccacataaagtcgagctagcctagtaagcttgtaatcctttctgattggaataaaatgggcagacttagttaaacaatcaagaatcacccaaacagcgtcatgcttctaaggtgtcaatggcaacctagtaacaaaatccattgtaatcttgtcccacttccattctggtataggcaaaggttcaagtaaacctgaaggtctttgatcctcagcctttacttgctgacaaactatacacttagctacaaagctggccacatctcttttcataccttcccaccaatattgtctctttaaatcttggtacatctttctacttccacgatgtacatcaaattttgatctatgggcctcaatcaaaat

SEQ ID NO: 356766 - DNA, 1326 bp, Cannabis indica
tttcccagtaattcaagtcattcgatgctagttgttagtgagtgatctaaagccaaggtataatcttttaaacttctactaattgttttcttgaattttaagaaatggatttttgcatgaaatggtgatttagctactgttgttgctttagttgttagatgttgttttcagaagttaaattatgttagattatgttgatttaagcttgaaatgttgcctgttggtagatttaaccagtttttgagtttagaagtcaaactttgagctttaatggtggattttgttcctaagcttgtagaagtgttttattgcatggaagatgtttattgggatgtttagaataggtctgaagatcgtcacaacatgttcaatcatcatcagcagtcagcttgttccacggttcagtaagtttttattgcttagtagtttatttaatagtatgatttaagaaaagcctattaggaagcatgttagtagcctgatagtacaatagatgcatgtttttaatttccaaataagcgacatcagtaagtttttctttgatcacgatctgacctgactagctcttcgttacgcaggatgttcagattagtatggacgccaggcgaaacaccaggagccagggcaattcggttggatcaagcggtggtcagggagctcagattccccttaatatccgaggcctaggtagaggtctcagaggtagggcacgtggtcggggtgatgattaccggccacaggctgcccaagttacccaagaatgggaaaataggtttgcagaaatgcaagctagaatcaatgagcaagaggaagtgattcggcagttaagacagcagggtgttcccgcactccctgctctaggaataccattagctcctgcccctactgtgtaggtcgaaccggttgttgtaatgatccggatggaacccctgtatgaaaggttctgtaagcaggcacctctagttttcctgggatgtcgtgatgttgtgaaagccgagcaatggctaactgtgatcgccaggatcttgaactttatgggcgtcactattaatgatagggtggcctgtgccactttccaatttcaagaagacgctttggtttggtgggacatggtgtccatgattcataatgttaccacaatgacctgggagaaatttcaggagctgctcaatgccaagtactataacgaggcagtcagaagtgccaaaagaaaagaatttacttagctgactcagaaagagaacatgagtgttactgaatacatgactcagtttgattgcttggtaaagttggcctctggaattgtgccaaccgatttcagtaaga

SEQ ID NO: 356767 - DNA, 623 bp, Cannabis indica
attaaattaatgaaatttttagcttaagaaaagataaaagtggaggagtcttccatcatacattttaattttttttttttctaaaatacatagtccaaaaattattttttttgaaacacgggcgttaaatagataataatgcacaaatcaaaaaagattaattttcttgttgtaaaatgagtagctaaaaaggatgacattcaaatatattgtcaatgtagtgcagttcaattaaaattgtatttagacgaggtaaatttaaaatgttaaatatataaaaaattatatatattatattttcgtaaataaaagtataatgattctaatcttaatctttataaaaataattttaataataatatttatttatatgaatagtaattattttcatatatatattagtagattttcatattcctctcttcataaaaataattttaataataatatttatttatatgaatattaattattttcatatatatatattagtagattttcatattcctctcttcacagtattcatcttcaattgtgtatgaaaatctactaaaatttaaattgtgtatgctttatttttcgaacattgatttttaatttatttttggattaacttaagaata

SEQ ID NO: 356768 - DNA, 1030 bp, Cannabis indica
aacatttcatacggtgccataccaatagtactctgataactattgttctatgaaaactcaattagaggaaggtacttgctccaagaaccttcaaagtccaatacacacgcccgtagcatatcctcaagtatctaaatagtcctctcagactgaccatcagtctgaggatgaaaagttgtaatgaactttaatttagtacccattgctcgttgtaaactctcccagaacttggatgtaaactttggatctcaatctgagatgatcgattttggagcaccatgaagtcgagttatctccttaatatatagattagcatactgacctactatatacgtagtccacgctggtaaaaagtgtggtgactttgtatatcgatctacaattacccaaatggaatcataggaccttgttgtccttggtaaaccaaccacaaagtccatggttatatcctcccatttctactcaggaatcttcagaggttgaagtaatctcgctggtctctgatgctctgccttgacttgctgacaagttaggtattttgacacgtattctactatatcacctttcatatctagccaccagtaaagtgctttcacataatcttggtatatttttgttgttctcgagtgtaatgaatatggggtggtatgagactcatccaaaatctcctatttgataccatcatcagatggaacacaaactctgcctttatatctgaataacctatctgatgaaattgaaaaatcctttgttgatccaacttcaaacttctctttatactcttataacacaggatcactttgttgggttatcttaattctctctaacaaatcagactgtaacgtaatgttagctaatttcccaattacaaacacgattcttactctggtcatatctttagccgattccagtgagatcttcttcaattcatatacttgccccagaccttttcgacttagagcatctactaccacatttgcttttccaagatggtagaggatctcgcagtcatagtccttaaccaattcca

SEQ ID NO: 356769 - DNA, 893 bp, Cannabis indica
aaaaaaaaaaaaaaaacatccaggtaagccatctagacttggagcgtttagaggatggatactaaatactatttcacgaatttcttcacaagaaggaattttaaccaggaaatcatttgcagccgtgtctaattttttaacaaacaaatcattgatttctgaaggaatttcagtattattagaagagtacaagtcactaaaatattgactaataatacttgaaattttctttttgtcctcccacatctttcctttggtgtctagaagagaccgaatttggtttctccttctacagatagtagctgaagcatgaaagaatctagttgcccttcatcttgatctctgcagctggagttaattttgtgaatgttccttctgccatttttttctgtttttgcatgtccattcttggattaaagtccccaaagcttccattagtgttgttattggtagttttctagttgttaggtttggtgtatttgatgtcatggtattgtatcttttgtttttagaatataatcttgaccatttctcatatctaatcttttgtagatatggttaaacctgtttgtctaaagcaacaagctctttcctgtgatattcaaattttttagcagtgtatacctttgctgcacgagaaaatggcttttcaaagaaccttgcacttttcttgaatgttatctttaggttgttgagtatgtgatacacacaatatccatgttacacttcagggaagatttgttgagctaccttgattgtactttcatgtctattagatataacacactgttcttgtctaacaccaaatgtgactattaattttttaaagaacaatttccatgagatatcattttatgaatctgccacacaaaaagctagtgagaatattttac

SEQ ID NO: 356770 - DNA, 547 bp, Cannabis indica
gaatttcatgcataatattgaaattccacatggtacttcaattccacggaaaatcccataattttctcaaaatatagtttttttttctttggaaaatcaaaatatatcattttaatccaatataatatgttaaaaaaaaatccaatattatatatttgttttttgaaagtaacatagtgtatattgttttctataaaagtgggataaattaaacaatttaccaaaactattgttcacaaaaaaaatacaattcaccataaaaaatatataaactgaccctattaccatctagaaatcgtctagaagactatagctgattaattaatttataaaatatacattaaacaaaagtgaagaaaagtaatttttggtagatgggatcagcaacacctaagaaatttgggaataattggaattaggtaagttttataaatgatttcattgactacacaacttcctgagagaatgctattcaatccactcttaataacacatattatttacatttgcatttttttttttttggaaagatctttcaactgatgaa

SEQ ID NO: 356771 - DNA, 529 bp, Cannabis indica
atgtcctacttgtgttttcatcggcgccgagtcatgactcaatgcggataatattagaccattcccaagataatttttgccaaatttagttcaaaatatgcactaaactaaagttatatttagcataatttttataattgtgagtcaatgcacaaagagtaaaatagcaaaaaaaaaaaaaaaaaaaaaataaaaaaaaataaaaaaaattaagcacattctaaatttaaatcatagttgtaaataggtggccggtctgattcatattttaaaaagtcatatcaatattttacagggtaaattcgatatgacctgtaaatctataattttgtgttgtgctcgaacttgtacagtactttattcgaactgacctattttttataattaagtcagtctattttcttatatttgaactcgagctctacttatccactattttcttacaactagatagttaatcattaaggtgacatttggttgagaggaatgaaaatataagaatagaaatgagaatgagaatgagaatgag

SEQ ID NO: 356772 - DNA, 660 bp, Cannabis indica
aagtaaatttcatttttaccagcaataccaaacttttgctaacacaaaaatgtactggcaaaagtgacattttggagtgtcatctcgccagaattaatagttgttttccagctgttctggtgttgctgtgatgattctgtccgtgggtgtagaagatggagacctcgtttttttattattatgtttatagtataaaagaagaaaaaaaaaagaccagagcagtaaaaatctaatttttgtcatgtgacagtataaatgtaaaaccttcacccaaaatttaatatttttgtaaaaactccaatcaaatcctataataaaagtaaaaactaataaattaccataaaaatacacaaacttaaaaataccatatttatcaaacaaagttttaaaatcccatttatttaatataattttcactattatgatttggagtgactaaaaattaaaatgtactagatactaaactagcaaatgtaacagaataaaattctctgcttctctctatattattattttctaaagaaatgaagtggcaggaaagtactctcagtatcaactatatatgtaaataaatgaggctaatttctgattaattaacttgaacatatataactaggcaatatagtcgctcttcatacggctaatttaatttttttttag

SEQ ID NO: 356773 - DNA, 888 bp, Cannabis indica
tgaaaagcttcttcgcatttctcggtccattggaacttcttgttgccttttaaaatctgaaaaaactctttgcatttatcagaggatcgtgatataaaacgatttagagcggcgactttacctgtgagactttggacttcttttggcttagtcggtgatcgcatttctactaatgctttgatcttcgtagggtttgcctctattcctcgctgattaaccataaacccgaggaatttccctgaaccgactccaaagacacacttaagaggatttagtcgcattttatatcgtcgcagtatttcaaacattgcttgtaaatggttgacatggtcttctgcatgttgagattttacgagcatatcgtcaacatacacttccatggtgtctccaatcaaatctgcgaacatcatatttactagcctctgatatgtcgcacctgcgtttatcaaaccaaagggcattaccttataacaatacaaacctcgatctgtaatgaacgaggtatgttcctgatctggttcatacatcgggatttgattatatcccgagtatgcatccatgaagctgagaagctcatgacctgcagtggcatcgacaagttggtcaatgctaggaagtgggaagctgtctttgggacaagctttatttaaatcagtgaaatcaacgcatgtgcgccatgagccattaggcttgggcacgagtacgggatttgataaccagtctgggtagaacgactctcttatgaagccgcatgccaagaggcggtcgacctcttgcttcagcgcttggtacctcgcggggtccattttgcaacgcttctgtcgaacacctcgcactttggggtcaatgttcaatcaatgacacatgacctgtggagatattccgacc

SEQ ID NO: 356774 - DNA, 629 bp, Cannabis indica
aaatttgaaaatatttttttaagaataatttatgtttttaatttagcttaattttgtttttttttcttggaaaaggaatttatcatagataatcaacttgcatctacaattacaatatctcgtaaagaggaaggagcattatgctcatagaacgtacgatctgacaaaaaacaagaccccctagcaacacaatgggcaaccttattagcagaacgattaagaaaagaaatttggacattatttaaagtagataaaattaaacgacagtcttccaccaacaaaccgaactgagatggcatatgaattgaacttgttattgcttggacaacaactaatgcatctcattcaacaaccaccttatcacagcctttactcttaatccaactcaacgcttccttgataccaattacctcagtaattttaggaagaacacaaccccacctactccctgaaacagcttcaataagagtgccattgctatctcgtgccacccaaccaaaaccaaacttctgctgcgcttcaaagatgactccatcgacattcaccttgatagtaaaaagatcttgtttaacccaaagattgctattagtaacatcacccgtagcaaaataagcatgaggcgactcaaa

SEQ ID NO: 356775 - DNA, 533 bp, Cannabis indica
aaaataagtaagggtgcatctatacattgattataataatattatctaattattataaatttttcattttaaatataaagtactaaaaaatattattttattgtataattattatctattttgtcaaatataatatttaaaattcatgtgtaactaacatcttatatccaaacacatcttgtattttaaaatgtaatgtaattattaaactgtgtaattatttatttaataattacactgcccagtaattaaatattttttttagcaacagtaattatcttattacttctaaaaactctattaatactgactttctttaaaatagagaaattatacgttacatctcaaaagtaggtatactaatgtattcgttatttttagagcatgtttaagaaaggcaaaagaaattagatttttttaatagaaacttattgtattattaaataatggtgcatttggtaatattttcttaattaattttttgtttttaaaattaaaaaagtgaatttttttttctaaaatcatgttctata

SEQ ID NO: 356776 - DNA, 511 bp, Cannabis indica
ctcctgtactgggtgtatgtggagtgtatcccctcttttgtcacttctcctctgtccaggtgctgcctttggaggatcgtttactcctcgagccctgggaaggacctaccaggctggtggttggagcagagtgcgagggagcttgtccatttatccttgagggatttccaaaatgggacgatgcaggggccaaggcctggccttgactgtatccgtgagtagcagagaattgtatgccgctcattggtggagccgcggtcgggacagttcccgacggcgcggctccgagcatataccctgctatcctggtgggatagtatcctccataggccactatttaagcctcttcaaggttgatgtatttttggactcttttctggaagtcctgaaggtttgcagctccttcctgttgtagttcattccagaatggagtccctgtacggatgcctgcctggagaagggcaagctgttgtccgtcatcaactttcttggtcttcgaggcttcctctcg

SEQ ID NO: 356777 - DNA, 805 bp, Cannabis indica
aattgctgaggaggccgagcagcaagtaattaaagagcaggctgtaagggatgccgtcacggtatcaaatcctcctgctagtggtaatatcagttaggggacctagagtggcaaccctgagcacaaacggaaggttgaggcttctggggcattagggggaaatagaaagtttcggggaaacagaggtggccgtcagggtcgcgggtcctcaatctgatcatatcctgagtgtcctaaacgcaagaagcaccatcctggtgagtgtcgagccaaagcatgcttttagtgtggcgtagtgggccactttatcagagattgtccccaggccaagaaaaaggagcctaagaagaacactgctcagaacccgaggcaacttttcaccatgactcaggctgacgttgatgctagtccgtcagtcgtgacaggtcagttgtctattaatggttgttcttatattgtattgtttgattctggagccacacactcttatgtgtcgagtagagtaattgaaagttttcacaagccatgtgatatttatgcttcggggtttggaacactgttaccctcgagagacctcatagtatccactaggtggattcagtccttgtctttttggattgacggttgtgagttgaccgccaatctaattgagttacaactgtctgactttgatataattctgggaatggatttcctatttaaatatggagcgactattgactataagcggaagatggtggtgtttgaccccgatagtgccaacccagcggtgttcgtgggtaagattctgttggaaattatttta

SEQ ID NO: 356778 - DNA, 780 bp, Cannabis indica
gtgttgatctccctgcacgactcgttgaatatttcattctggatgtgccagtgaggcgtcctgctcggcctatcgttccgagcagatgctccaagtggagtccacgtgtcaccattctcgtgatgccacctaaaagtgccaaatttgggataacattttccccctaagtctgtacgggacctctaaggttgcgtgtagacttattccgagctgtctttgcctttgaatggggacacgtgtcgagcattaccgttcgagactcaatgtgaagctgactaggcgtccctttggttttcggctaattaatgctctgacaattaatattttgaaaatccaaatttctctctccacagctgacggttgcacttgattacttttgatttcccatattcgcttttgaggcaggaagtcgaggcgtctaaaattcctttggatagagttccccctttgcctataaatactcatcgtactggcacataacccattttatcacccttcattgttaagtaaactccagagcgaaaagagagttttctagcttcagagttgccgaagttccttcaaacgattgttggtttgcttgaacttagacatttgaatctttgagtaagtttctgatttcctttatgcttttctttgcatgtttacgctttgaatgcaactatgctgtaggaagaatgcttaggaaaccctagtgttagaaacttctgcgactcttcttttccatgtcttcatgtgggctttcagccgtagagcttatttttgaaccgcattgtgtct

SEQ ID NO: 356779 - DNA, 826 bp, Cannabis indica
tagtgcaataaaacccacactcacatataagtcctcataaggagccatgcctacactagcttggtagctattgttgtatgtgaattccaccagtgacaagtgttctcccaaactacctccaaaatccaaaagacaagagcgaagcatgtctttcaaagtctgtatggtcctctcagactatccatctgtatgtggatgatgggcagtactcaagtgaagttcagttcctagggcttgttgcaaggccttccaaaaccttaatgtaaattgaggatttctatcataaataatttttgaaggcactccatatgtagttgagttagtctggtaagcttgtaatcctttttgattagaataaaatgggcagacttagtcaaactatcaacaatcacctaaacagggtcatgcttaaaaggtttcaatggtaatccagtaacaaagtccattgtaatcttgtcccacttccattctggtatagacaaaagttgaagtaaacctgaaggtctctgattcttagccttaacttgttgataaactatacacttagctacaaagcgagccacatctcttttcataccgtcccaccagtattgtctcttcaaatccttgtacatctttgtacttccaggatatacaacaaacttggatctttgggcctcaattaaaatagactctttgagatcagggatatctgcaacaaccagtcttcccctatggtataggtatccttcacgattaactgcctacccatctagttgctcaccatcctggattcggttccaaataagtcttagcttttcatcttgccactaacgttgcttaactt

SEQ ID NO: 356780 - DNA, 819 bp, Cannabis indica
acaacaacaatagcaacaaaaataacaacaactaaaacaacaatgacaaccacaacaacaaaaacaactcttgccacactcatcatctgtgcaagcatcccagacccaccaacaacaatctttgtctcctcaccatttgcaaatagtggcctctcaaccaaccccacttccagcatagcctcaatctaggccaaccgatgctaatccgcctcagcccatcataagagttaaggctcctttactgggattctcttttcccgtgacgccacctgttggccctgaatgtcttatgaaggtagccatcttgaagaagagtcatgggagagaacaagttgtcctctaaaagagggctactgaccaaactctagttacaattttgccactttattccaccacttattcctctttcaataataccatattttctaattcaatactataaatgccaaaaaaatgatttatttaataattaattaattatcatataaaattgtcacttatataatttattaattaaaccatctaaagtctcttaattaacaaattgaccccaaaacctctgttcttcacaattaagcctttgcttattgaaaattagtaaataagacatagtctaattttagaattataattgattaattaaaatcaaataactgagtctccatacagtattatctcaattagtgacgggaccatgggcttatataaccgagtttttaataagtagatctagaattcaccaagtaaattccctaacttattaattccgccttgcaccactatatatttagaatttaatagtactctcaattatataga

SEQ ID NO: 356781 - DNA, 680 bp, Cannabis indica
attattattattattattgacacactaacaacctttgtctatcccattttccaattttccttcaccacattactaaaggcttcaaagcatttattaagctcctatttttatagttagagctggcccactacactaataagtaattacagtgtcataattaatgttaattatattaattagtgatgaaatattggggcccatgattaaaagaataccctatacctagctatatatcgttgacaagacaatgtttacaagatcatccatcatcactacatgctaattaaagaaataaaataattgattaactaattaagtaatttgaaatatgaaatgataattgggattgaatactaggggagcataatggtcaagttttgggatcactacaaaaaattagaattttagtcgcaacaaaaattaaagacttatttatacaatttctaattatatatgttttgataagtttgtttctaaatatatatatttatatatatatatttttttttgaataaactagtttccaaactatataaatttttgcaagttgatcaccaaattttatattttgataaattagtccccaaacttttctttctttagcaatattaagttccactattaaatattgacatttttattatttattttacatactttaatttattttttgtgttaaa

SEQ ID NO: 356782 - DNA, 689 bp, Cannabis indica
gaaaagtcgtcgaagtagctatcagtgccgggaaaatcgtcgaagttgctgtcggcgccaaaaagtcatcggaattggcattgttgtcgaaaaaatcaccaaaaattaccaagaaactggtttctactggtttcttcatcaagaaactagtttctcgaaaaccagtttcttagtcatttttctggcgacaatgccatttctggcgacttttttggagtttgctgtcagtattagaaaagtcgccggagttgttgctgatgtcaaaaaagtcgtcggagttactgctggcactagaaaagttatcagaattggcattatcgtcgaaaaatcactgaaaaaatcactaaaaaactgatcttcatcaaatcagagcttgaattgaatggtcttctggggaggggtaccaggttggaattagccttggttacaactccaagcatcaatactaatcatgtggtggacatcaaattggttagtttactttgtcaaattcattgttatggaattattcattaaatgaaacgatttactattttccactttacctgtttgcttgatatcaatcaatgtaaagactctcaaatctaaaagcactaaaactagcaaatagggaaaacacaatacatttccaaggctgggtttaacctattatgtaaagaatcctaataaattgagcatggtttgctttt

SEQ ID NO: 356783 - DNA, 630 bp, Cannabis indica
gtaaagggttttatttagggcacaaaacccaacaaatctttctagcgtactttgtcctcacttgtatgctttttgagatgactccctggaatatttctcatcttgagattaccccaagttaagtatgcttaactcgaagctaagctcatggtaggttattaaaaagtagatgcttcttcgtcgttcctacttatatttcttgttttcatcctttcattatttaaatgcgaatttcttgaattcatagctaataacaattaatcagagatcatcccttgatctcaaagcttcgtatctatgttaggtagaaatcctaaaattctccttttaacacacccagaaatatacatacctcaattatattctttggtttatcgacaatcccttagcattaactactatgcctacttatagtgagtccctcgttgatgatgctaattcatcaacatctaagaacctcgtatacttttcccgtctctaccactaaggttttactccttagttcatatgctaccattgccccccttgcaatcatcactatcttcatacttggttaaccactctaaaactcattttacccttaataatgtattccattgtttaataaacaacctactttgtgatccaaca

SEQ ID NO: 356784 - DNA, 849 bp, Cannabis indica
ttagtaagctctcgttgatcatgatcttatatgccaactcttggttacgcaggctgttcagactagatggacgacaggcgaaataccaggagtcagggcaattcagtcgggtcaaatgaaggtcagggagctcagtttcccccaaatgctcggggccgaggtagaggtcccaggggcagggctcgtggtcgaggtgatgctaacccgccacaggctgcccaggctgcccaatctactcaggaagcccagaattgggaaaataggttcgcagaaatgcaagccagaattgaggaacaagataatgagatccagcgattgagacagcagggtgctcctgcagtgcctgttccagaagttccaatggcacctgcccctgttgtctaggccgaactagtgttagcggcgactagaatggaacctctgtatgaaaggttccgcaagcaggcacctccggtttttctgggaggtccggacgtcatgaaagctgagcagtggctaactgtgatcaccaagatattgaatttcatgggcgtcaccgggaatgacagagtggtgtgtgccacatttcagtttcaagaggacgcattggtatggtgggacatggtgtctatgatacacgatgtcaccacaatgacctgggaaaagttccaggaacttttcaatgcaaagtactataatgaggccgtcagaagtgccaagagaaaagagttcagcaacttaacccagaaagaaaatatgagcgttactgagtacacaatccagtttgatcggttggagaggttggcctcgggaattgtgccaaccaatttcagtaaaaaggaaaagtatctggatggacttaatgcaaag

SEQ ID NO: 356785 - DNA, 527 bp, Cannabis indica
ttttattaaagccaaaattacaccaatatatgacgggataagttgaagaatacatattttttatattcattaattaaaaatacatttatattatatttcgttaaaatctacctacttttgggagtgtgttgcctaataaactctcgccctccacttaagtgtagcacatgatttacattaacctaagggctataatggggacatcatatataaaagtgagtatatctcaaagaatatgaaaataaaggtaaaaattaaaactaataaagtaaagtgggtatacaatacaattttctcatattggaccctctttaatttttatggggcttggaacaaaatcttcaaaattgatttttatatgaaaaataaattcaaataattttttaagtttaaataccattttggaccttctgttttacaaaagttaccaattggaccctgtgttttgttaaatgacaaaatggaccttgtattttataaaatagtacaaataggaccctgaattgattttttgtcaaaataaagtt

SEQ ID NO: 356786 - DNA, 472 bp, Cannabis indica
ggaaaacagtctttggggcacgcgttgttgaggtcggtgaagtcaatacatactagccatttttcatttggcttgggcactagtacggggtaagctaccaaggccgggtagaaagcctcaattatgaaattattgttgcgcaacttttttacctcttcttttaatgctaaggcttgttctttgtccaatagtcttcttttttgttgaatgggccggaagtttagatcgatgttgagggcatgtgaaattaaagaaggatcaattccgaccatgtcctcatgtgacccagcaaaaatgtcaaggttcgctcttagaaattttatcagagctaattttgagttttctggtccaaacacttgggtcaatttcaatttcttctaattcttccaccgacccaacatttgtatttggttccccaagtcggggatccacatcttcgtccctgctttgggcggttccttatttggcaatg

SEQ ID NO: 356787 - DNA, 760 bp, Cannabis indica
aagaggcttttcaagctaatttaaaacgctagtttggggcacgcccccaatcctgtacaaaacccataaccggtgaagtcttatcaatttatctagcggtgtcaggatatgcgattagttcggtactaatccgtgaagatcaaggacgacaatacccggtgtactatgtcagtaaacgcctgttagatgctgagacccgctaccctcaaatggaaaaattagcgtttgctctggtaatgtcgtcaagaaagttgcgaccttatttccaggcccacagcatcgaagttttaacaaactaccctttgaggcaagtcttggcaaaactagagacatcgagaggattgttgaaatggtcggtagaattaagccagttcgacatcaagtacaaaccaagaactgcgatcaaggggcaagccttggcagatttcattctcgagttcccaagtactgaagtggcactcataaacgaagaaatcaacaccgctataccaaaaggagaaggatggacgttgtacgtcgatggggcttctaatagccaaggttccgacagcggaatcatactaatcagtcccaacaattttaaggtacacgctgatttatgttttgagttttccgcatctaacaatgaagccgagtatgaggctttaatcgcaggattgaagctcactctcgagatgagaatcgagtacttgcaggctttcagcgattcccaaatcgtcgtgtgccaggtgaatggagaatatctggccagaggcgggcg

SEQ ID NO: 356788 - DNA, 587 bp, Cannabis indica
ttaacataggcctttgaatcctcaatcattatcggccagaactaaccttgccttagaattttcttagataaactctgcccggcggcatgatttccacaaaatccatcatgcacctcagatagaagtcgtccagcttcttcttgagtaacacatctaaccaatggcatggagaaccctcttgtgtacataattccctatattatgatatattgtgcaaccttccttctcatcttttgagcttcatttcgattatctgggagttcctcagtattgaggtaggctgctattggtgtcatctagtttggggaagtattaatcatttcgatttcttccgtgccagtaatgctaggctctttgaggaactggatagggacgaacttcgctttatcacgtacattactgctcgccaatcacgctaacacgtctgcagtcgtgttttcttcccttggaatttgtctgagaccgtagcttttgaattgtgcgaataggtcttgtattttgctcagatatgctatcatcttttctccccgagcctcgtattctcctaatacatgatttaccaccagctgtcaatcactgcagatttc

SEQ ID NO: 356789 - DNA, 918 bp, Cannabis indica
ataaagtgaaccaaaacatacacaaatgaatgaaaaatacttctgtttttttattgatgttaaataaaatcgattacattgaaatggagttttatttagggcataaaacccaacaaattttatatgacaaaagacaatttaagtaataaatatcaaatgtaacgacattaacagtaaacaatctttaatactattttatcacaaacttatttttgagtaattataatattagaggttattcttttttataaatcacaaaaattgagacttatgttttttttttatataaaagttagtggttattatcgaataaagtattttttagaggttatcctcatttataactcacacaaattaggactaaagtttttttaatataaaaattagaggttattatttaatcaggtggggatgctcgcataaagcaaacccccccgccataagcaaggaagtacccccgcatgaacatgctctcatgagaaggagaacagctacgttcagtggcattcggggctctgtgtagtcgtcccacaccaagttgagcttgtgagctctaaggcaatcgctaacttggaacatgctttgaaaagaagaagcgatacggctcgtctgaaaataaatccccatagatttggtccttgattacagagcaggtttactggtattagtggagggttgattagtagcatattcttgtatattctcgagatttttacgcaacaacatagttttgggttccacaactctctttttgttcctgaataaattaacaaaaataaaaaggagattgggacgtgaggaagaaatcatggcaaggaggttatttattttttcttcaaaaaaaaaaaaaacatgcctattaaactaagagaaggcagtataaaaaaaaaaaaaaaaaaagggaaaagtgtctttatt

SEQ ID NO: 356790 - DNA, 747 bp, Cannabis indica
cataaacaatcactgaaacagtaaaaatgaatgaaattaaacaaaagtctttaaatttaacaatctcaacagttcagggggaatttttaacggccaaaaaagttcaggggacacgatttagtacatgtcaaagtttaggggaaaaaattactaattagcctttttatttaaaattaaattaactataattaactattttttaaaaaataaataatttttaatttgaatatttaatatgactcttttaaacaattaatattaataattctatttttatatttaaatctctatcataatttttttaatagttacgctatttaattataatatatctttacaacaaaactctattactttagaaaaataaaacttccattccttctaaaataaattttaaataattaattactaagtttgaaactacgacaaaatactagaatatgagaattcatagtttatacatcatatctaaactctcatttcatgtgtatatcttcaagttacatgttttaaagacaacttgaaaataaccaacaactttatatatgtatattttattagtaacacatattcgagatcaattactaatatattatgtactaactttgttgacgatacatagtctttttttttttttgcttaacttaaacattcattaaaaaaaggcaaaggccaaccaaaaatacaaagtcttaagtggaaacaagaggttccacctcctcagaagacaaaaaaaaaagaaaaaaa

SEQ ID NO: 356791 - DNA, 577 bp, Cannabis indica
gaagtggcctagattgatagattttcaacttgggcactgggtgctgggcaccgggtgtctgggtgctcaaaaataaaaattctctgaatctgattctgatgcctcaaatatgttcatgttatgtctagttcatatttcaatgaaaagtttgacccattttcactaagacgatactggaaattgaagctctagttaaggatgtcaacttgggtgctgggtgaaaccctaagtgctcaagttgacttctgaggtgctagttcatgtattttcagctctcgaggcctggacttgattgctccatatctttatggtacaaaatactgaaagatagtgagttgaaaatgacttatctgaatccaaacttctatttcagagctcccatagtcaacctgggcacagggctagggaccccttttaggttgattgttgtggctcgggactactcaactttgagataccatctttcttgccacatgtcaaacattgatatccacgtcacgagggaaaatttctaggttaacattttccctcccaagttaactttacacttgtgtggagttgacttgatgacgtgacc

SEQ ID NO: 356792 - DNA, 612 bp, Cannabis indica
gatggtaaaatttaacatctaatatattatttgatcgaatctgaatatgcataaaaatattagatgtagtccagtgaacactaactatttctttgaaaaaaattataagtaaaatctctctaaaaagcttattattggttgtgtcaatcctcaaatttacataaatatccactctaaaagactttcaggcaattgatagcttttcaggcatgtttgagcatcttctctagttgtagattcatctagatcatcttgtgtttcatctagttgtagatccaattaatttcagtcttccaattgatccaatatctgttagaagctgaattggtcggttctatccattggatatatttcatgtatatttattgctttagtttaggtttattcaatattttagacctagtattttttggatcggatcacatccatccaaatttttagatctaatgtttattagattggattagatccatccaatccaagaaatgagagtaaaattttgataactctatggtatagagttattctttatgcttttaaactaaaattattgtgagaagagtagtgaaaatgcgtttgtttgcttaattttagttagttttagtttcattt

SEQ ID NO: 356793 - DNA, 473 bp, Cannabis indica
tttgtaaaaaaatgacaaaattaaagttagtatactatgtaaatttcccgagataaatctaaggcaacgcatcctgagataagcccaaaaggctcaaattcgagataagccaagaccataaattaaccgatatggctaaaaagtcttccaacggaagaagcatgagtcagatcagaggaatgacgaatacccagaacaacactactcaagtcgggggaaaggaaaaattgctcaaaaccaagataggacaggctcaaccttacgtcgaaaaaagccgaggacgatctcggattaaagaagggaaagcctaacccttagacgagataaaatgttccattcgaaaaaagaccgccttaaacagagaactacatcgaataagacaataacatggtctaaaaaggaaataaacaaaattcagataatcaatcacaactaggaaggacgcgtgtgttgggttttgtgctctaaataaa

SEQ ID NO: 356794 - DNA, 684 bp, Cannabis indica
aatagaattttatttagggcacaaagcccaacagactacaagagagatacaatgatgacatcattaaatgtaatagtgactataagtgagatacgatgataacaattattttaaaattatatgatgagttttcaataaatttatgatcttctttctgttttctatctatttatgtgagtattgttcaatttttaatttttcttcactataatatatatttgatgatgttttattttatatatgagaaattgtatgatgaatttttttatattcagaattttttatataaaattttaataaatatatactttaaaattatgcataaaaataaagttaaaattatttaatacgattttattatttaataaatattcatacatataatttaaaatgtctataaacagtcgcacgcaaagagcagcatattaactagttatatatatttctattataaggtatatattttctgttatatggtatataaatttgattgtatagtatatcattttattttagataaggcatgtttagtttttattttattatacataaatgtgatatataattttgttaatatgatatatacaatttttttaataatattatattattttattttattttttattgtaggtatataatttttcttctatggtatatagtttttgttgtctatagtatatc

SEQ ID NO: 356795 - DNA, 503 bp, Cannabis indica
catggagagtatcttgaagtgaggggcaaaattggtataatattttaaaaaagaggtaaaaatgatagattttaaaaaagagggtaaaaataaaagatgacaatataaaaagggtatagagtgtaatttcctcttaatttgaccttattggtgcccaatcccttaatttattactaggaaaaatatacctaggtttttctaatagcacaaccaagattatcccaaaagatcaatgtgattgtttaaaatatatatattacaaaaataacaaaataagttcataaaatacagttgtacagaattttaaatattttataatttctaaaattttatttacgtaaaatacaactttttaagaaaaatttcataaatactcttcttttatgttttatttataattttacagcgggatattggcggctaaaccacccgaactttacggtttgtaacacttaaccacacaaaccgaatttttggcggctaaactacctaaactcccattc

SEQ ID NO: 356796 - DNA, 924 bp, Cannabis indica
gaagctatagatttcgtacctataattagcgctcccactcaattaaactaccatgtctttaatttatacgtcacgagaagatccatcgatagggatatttttagtttttattttaagttcccgaaaactgttatagcgtgtctctcattaaagttacaaatattgtgatatagggccctgtaaagcgttgagttgctattccactcaagctgaccggcacacctgagcacggaaacgaggtaagattagcataaagtatatatgagaatgaatgaatgcatgttattatttgttaacactactagcactggacggttgtaatatcaagggtgttagtacagtgtagagttttaagggaggttacggtattaccaatacgggtaccaagggatacggagtgcatgtgatacaacactcagtaactcccggaagtacaagaaaggccctactaacactagtacggagtcggtacttcagtgcatgtggtacaccagtcgtacttccattgagaatgttcttactacattttgtggttgccctgtaatttgttaaaaaaatattatgtaactttatatatatagtatatatgtattttaacgacggttttaaactcgggatcccggtcttcaaggttttataaatataataaaataagtttaaatccgaataagtcaattttcaaatacgggcattacaatgatatttcagtgaactaatataatcattgaaatgagtactcaaccatttatctatattaagccaagcttgaaagaaatcattgtttcacttttatgtctagatagaagctatagattccgtatttatgattagtgttctcactcaattgaactatcatgtccttaatctatatgtcacgagaagatctattggtcgactttaacgaacagattgaagaacataaat

SEQ ID NO: 356797 - DNA, 375 bp, Cannabis indica
ttgggcgacgccaaggacatgtacctcgagtactgcgcgacccaagttgcctatggtgggaaagaggtggctgcttctacttccggccaagcttctgaccaggctgctgatgcttctcctgctacaaacaacagatcctcctgctctagtcggctcagaagaaccaaatccagagccttgggactccagccgtttgaacattgatctttttaatgtctcctgtatatatatatatatattatatggccgtaaggcctttaagacatcatgatcggccaagcgatctttaaacttggaataaattttcattttttggacaacgggctgattgggtagctttgaatctcggtatttatgttcttgttatccttaatg

SEQ ID NO: 356798 - DNA, 825 bp, Cannabis indica
aaaaaataaaaagtagggttacaagtcaggtcataatacgataatactacacgaatacgatatgaattaatacgggttataaggtcataattaaaaattagatgtggttgaacttgaatgaaacgattactgttttggttaggttagagtcaacgcatgacacgaaatcaacacgtattgactcatttacatccaatatattattgaaattattatttattttgatataaaaatatataaattagaaagaaaaaaaattacttataagaatataagatagataatttatatttaatatcaagaattttaggtattattgttgctcttaatttcccccaaaatacgtggaccaatatgacaacgacacgtgaatctaaaaagcacgactattagataaatcgactaagacttcttgcatcaggaatgtcaacgagaatatgcctcccggaggagaggtgaaggctccacatactcccggaaaccaagggaacgctaaggtatctctaggttgtactggatcttatttgaaaagtcacctctcatttaatgtcgcatgggagaaaacgtattggaactgccataagcaatgtgtctgacggcataaccctcttttacagctattacgctatgattaataaggctagtgacaactactttatgagggatcacatcaatcaagaagggataaagaattatatccacctaacccctaagatgcctacactataggccatgtctttcctattttgcatcgactaggaatatgttgttggaaataattttaccaggatctagatttactaacaagtatgttggattaacaac

SEQ ID NO: 356799 - DNA, 454 bp, Cannabis indica
aacttaataagtccagccgggccataccatttcatgtgaatccatagatgagatgttcacagggctccaaatcctttgctcacaaacccatcctttctaatgaggacttgaagaggatattggctgacgacccattatcaatcattgtccttgccacaatcatattggcgatttgtacttctactaccaaggggtcgttgtgcgggtatcgaacgtgtttggtgttgtctttagagaacgtgattgactcatgttcataccgaggttgcttgggagctcgctcctgaacagccaacacatcgtcaccgggttcatggaccaagcatatttctcccgggatttttcggagttcccggcaaggtgaggtcctccaaatataacgtccaaacggccggcaacggggggaggtaacaattgttggtcatccccaacttcttgttgttgttgttgtcgt

SEQ ID NO: 356800 - DNA, 848 bp, Cannabis indica
caaacgcttacagtttttatattttcttatatataactgacacaaaaacacggtttttcatatttttatcatttgattttgatccatatatggtttttaaattggaaaattttcacaaatgcacaaaagcaataaaaacttaacaaatatacgtacacacgcgaaaaaaatatataccacaactatatattaaattacataaaatacggtgtcatcatcctagacaccttcaacactcttcccacaaaaaagaatcacagcagtcattattccctcgtcgaggaagctttctgacacaaaaattcaacaactaaaaatccacaaaaaaaaaactcacattttggattattcatgttgacaaaaacaaaaaacaaacatcaacaaatgtcggttgatcaacaacaaaatctcatagaacaaatatgctttcatatccatttctcatgcaaaattatatctgtatcatacaccaaacaggatttattatgaaaataaagtcataacatctaagacagccattgcttaaccattttctgagaaatcaagttcttattattgaagacagtcctcatttggcttggctaatccttcaagcaattaatgatgatttagatgatgaatgtttcctggaagaaacaaattaatacgaaattgcgatatttgtaccttgaaaaacttagttcactcagctgatcatatccgataatgctcttgctcttgtgtttctcttcttactgttgaaacagtcactctttcaattgcacatcctcctcagtatccttacattccttcatactttgcttcctcttgctccttcacttaaaaataatttagaatcaattaattaa

SEQ ID NO: 356801 - DNA, 1121 bp, Cannabis indica
tagcaactgtgagtcaaaagactcagtaagaaaagtataacataaaccataataatatcccgggttatagtcaggcacccatacacccaaccataaccctatcctcgtgtcccacacggtactgagtctttaaggttcatatgaaaatactatcgaccataatgtcagcctatactcaatatgccactcatactctagctatattgatgtgacagtatcgatcaatattttagccaatatacatttatcagtaatcaatacaactctatgtatactattactgctatcaatgtattctaacaggcataaacaacatgtctgctaaacatgtaaatacatatgcatgacattatgctaatcttaccttattttaaaattcaagtgcgttggccaacctgagtggaataaccgctcggcaaattataggcccctaaatcacttcgatcataacatggataattgacacgctaaatcacaaccggggtcttaggttttaaaccaaaaacctacctacagtaagttaacatggcaataccctaaacagagaattcaccaaccaaagctctaaaactaacaggaatcgacaacacaaaattttcggggaacgcagcagcaaattcggttaaccgattttacaaggcctgtaaaaccagttaaccgatttacaccaaaaaaccccaaaaattctgaaacctaaccaaatcgattcaaatctttaccaaaccttccagacctacatattataccccaatagacatattccaagcaataaaacaactacacaagctcagaataataatcaccattaaagagtcaagcttgagttataaaactcaaagcttgctcaaataacactacagccactcaaaccagccaaaaacaacatatctaaacataattcaactttagaaaacaatatcaaactccaacagcaaccacagaactgtaaactaacaattcatgcaaaatttcttacttaaagttcaagaaaactaaagaagatgatgctaagaccttacctagagcttgagatcactaaactcttactgtaaattgcttgaattgatgaagaagactctaaacccttgctgctctagggattgggagagagagagagagag

SEQ ID NO: 356802 - DNA, 1245 bp, Cannabis indica
ctagtcatactctagccctaccaatgtgatacagtgtcagcctacactcggtacactagtcatactccagcttccagtcacactctaaccttaccgatgtgacacagtcggatggtacgaagccaacatacatatccaatgtaatctaacaggcttcctaacatgcacgctaaacatgtaatacatatgcatactgttatactaatcttacctcgattctgaattcaggtgtgccggtaaacctgagtggaacgaactgcacggcgatttacaggctcctaaaccataacaatcacaacactgataagtgataagctaaatcacttcccggggacttaaactagaaactagaagtttccatatcgataaaaagcatagaaataccctaaacaacataaaaatgggaagaactagggttcgtaatttttccccaaccggtagaccagttcagcaactggaatttcggttctgggaattcctaaaacacaatctgaaattccggttgctgaaccggaattccggttctgagcaggaaacaaagaaaatatcataactcgctcaattcatccccaaatcacaccaaaacttccagacctattttaataacccaataaacatttctaaagcatcaaaacaacccagaaatcacagatatgaaaaatgccatgtgagctccaagctttgagttcaaaactcaaacttggctaaagctcacctaaatgcattaaaacctgatttaaactactcaaataagcataatataatctctgaaaacaacactaaacaattacaacaactacagccacgaaaatcatcaaattaccttgaaaatcatagttttgggtttaaaattctacacttagtaaaaatcaacaaacaccaacacaatcttgcatgaatcaacatattaaatcatattctaactttagaaataaacaacaaacaaccacaaccaccacaacaactaaactccacaaaacatgcatgaaccatttccttaaaaatcaagaaatcaaaagggaagttgataaaaaccttaccttgacttggagattacaaacaatagaagaaaatcacttgaatcacaatgaaaactcccgaccctagctggccaagagagtttcgaaagagagagggcaagaggaatagaacctttcttcaaaaataaagcttttgattttttataaaacgggagaaggaaatggtgtaacaccctaactagtataggcgtattacgtgattttt

SEQ ID NO: 356803 - DNA, 647 bp, Cannabis indica
tatttataagatctattgacaattagactatgattaaaatcaaataaaagaagtaaaaaatttacttgtatttatcaaattaaattaaatatctaatatgataaaaatttagaaataaccaaatagatattttcaatatcattttctaatcttataatttaataaaattattatctaattttaatcatagtccatttgtcaattgatcttataaataattttacctgtatgagcttatatgtttgcttttgggattagatgcatataggaaccccatttatttctagatattcaaatggactaggttgcttaaataaaatgtcacctatgacagttttatttaggcctaattagtattgggctcattcaatgaataacaattatttaatgaaatgttaaatttctctcctttgggccttgtgtgagagttaggggccattagtagtgggtacgacatactgaacccaatcctccctcacatgaacaaccccaattgtgaagacacatttgccttattcaaataattttattaggctaattatactaggttaacctaaataaaattgacttagcaacataattaattttgaaataaataaaattaattttttattagattattttaaaattaatttagaataaataca

SEQ ID NO: 356804 - DNA, 602 bp, Cannabis indica
ctctcagaagaaaaatgtggcctaatctcatgaaactcttgagccttcactgactggaacaacattccaacccttggagtattttgatggcgtttttcaaaagaggcctaaagctggtgctgctgctgctgctccaaactcgagttctgctgctgcagaaatccaggaggtcaagaatgaggttcagctggtgaacaatcatcttgctgccatggaggaagttcagcacgacatgtcaaagcaactggccaccttggtcaagctttacagagactaagttttttctttctttgcttttgttggacatattgctattttttttcttgtttgttatctttggcccttagataaacaaaaagggggagtaatatttgacatataactgttatatttgatttttaaatgtttgtttggaccaactctaggaagttgtgtttggtacttgtgaccttatttggattaaaagttagcatgttattttgttgtttttgtttttcgagtgtgatactcagggggagttgttatttgttcttgctaactttattttacaggtactttgtgttaaaaaatattttgttcatctaaagtgccaaagggggaga

SEQ ID NO: 356805 - DNA, 516 bp, Cannabis indica
aagctggtgactgcacaagccaacagctcagttgttgtagtgtgtggaggatctcatgccactgacacttgccctatagatgtcgatagtttgctaatagagccaggccatgccattggaaactatccaaataattatggtcgtcagtagaacttccagaagcagttttatcctcaacaaaatcaatctcagcaaagccaatagtatccacaacaacaataagcctcgagtggagggtctaatcctcaattagacacgttactaacattcatgacggagattaagtcttccattgaggtcttggaaactcaggtggggcagttggttgctcaaaacactaacagggcttaaggtaacttgcctagcactactaaagtcaatccaaaggagaattgtaatgcaattaccttgagaagtggtaagacctatgatgtgccaaacaaagccaagccaaaggaggaagatgagaatattcatatcatcttgggaagaccattcctagcaacgggaagagca

SEQ ID NO: 356806 - DNA, 753 bp, Cannabis indica
gttaccaccagcacccgtgccagtggtgggtaaccagggggttttattatgccgcaccgagattccatgttcgagcgatttgtgaagctgcaacctcaaaactttttgggaagtattgacattataaaggctgagcagtggatgagcactgttacctgtatcctcgacaatatgggggtgacgggaactgagagagctaattgtgcaaccttcatgttacaagaccatgcccgcgtctggtgggacatagtgggtcagacccgggatgtcagtgtaatgacctgggaagaattcaagaaactattcgaagaaaagttttataacgttactgtgaggacttcacgtcaggatgattttgtgaagttgactcaggggaagatgtctgtggtcaagtatactctggaatttgatcgggtgtctaaatttgctagtgatctggtgcatacagatttcactaggatacagaagtatgtttgaggactgaatgccacaatcagttgagacttgaaaattatcccatcacatgacactctgtataagagagtggtatacttggccttaattgctgaggaggctgagcaacaagtaataaaagagcaggctgcaaaggatgccgtcacgacatcaaatcctctcgtcagtggtaatatcagtaaggggaccgacagtggcaaccatgatcacaaacggaaggctgaggcttctggagcatcagggggaaatagaaagtttcggggaaatagaggtggccgt

SEQ ID NO: 356807 - DNA, 706 bp, Cannabis indica
tcccgggagggcttcctccagcgccccttcgggcactattgtcttggtggacgaggaggaggtacttcttgaggaagctgaagaaggtgaagaagagcaagaggccgccctcatgcgcaagtgcaagggaaagatggtggaggaggagccttctaagcgtcacaggagggtggacactccagccccgagccatgactccgggattccctccgcggaggaatacacagtgcctcatggcatagggttgaccctgatccctggagaggaggagaggcagaacctccgggtagccaaatacaactacgcctttgacgagtatacccgggggcatgctgaggtggtggccttggagagggtcttacgaaaggagcagcaaaacactctcaacgtggaggacttccgaaatccgtgggacctaaatatggacccgctgacggactggttcaaccgtttccttgggccaaccttggccccttttgcctcagagctgaccagtgagtacgtctcccatctaactcaattcccgcccaaacggtatgctgcttgtgcatccttgaactctgtctaccaggttcaagatattagcaacaccatggctgcggtaagtacttgtgatttatttctcccctcgatattttacctaaggcacttattctcactcttatctcttttttcagattaccgcggagaccagccgcctttccaa

SEQ ID NO: 356808 - DNA, 1367 bp, Cannabis indica
cggggatccaactcgtcttcttctgccatttctggctcaataatttcacgatccattaggacgggtaggtgtgtagcaatgttgtaacactgcctggcctccccttggtttcctgtcaccgtccctatcccagcttcttgagtggggaactttaggcacaagtgccgtattgacgtgactgcaccaaaatccaccagggtcggttgaccgaggattgcattataagctgttgggcagtccaccaccacaaatgtgcattatttgaaagtgctttagggtgtgtccgggcacaaggtgactgggagcctcacctttcccattgggataagtgttgttccgttaaaccctgtcagttgggaaccgcttggtgagagatcccggtccgttaggcctattgcagtgaaggcctctttgaataataaattcacagaactcccattgtcgatcaagactctggccacgatcttattggcaatgggagtttctatgactaaggggtcatggtgaggaaaacgcactgtcttagcgtcttcttctgttaatgtaatggggtggtccattagccggggcctttgagctgggagttgagtaacctcccaaacctcatcgtgtttcatggcccctgcgtaacgtttgagctccttacggggtagttcccccggatgtgagttcctcccgagatcatagccactctcccattgggtctcactggcaggccagggatatgctaggcatctccggggggagcaactagggctaatgctccggccacacccactggtgctccttgaggcaaagctcccgctgcctgaaccggattgaggtgaggcaaccggttcttgatccactcgtacggatgtcccaatcggatcaagttttcaatctcatccttgagattcttgcattcattggtgttgtgcccaatgtcgttgtggtactcacatcttctattggggtcgcttcgggagctgtccttgtacagaggaggtggtctccggtagtgcgtattttgcctggtagcaaaatacacacgctcttgggagtccgttagctccgtgtattgggtatattggggagtattccccttttctgtcgcttatcctccgtccggttgctgccttttgaggatcttttattccgagagccttgagaaggaccggctaagcttgtggccggagcggagtgcgacggggcttgtccattcatccccgaggaatttccaaagtgagaagatgcaggggccaaggcctggccttgactatatccgggagtagcagaaaattatatgccgctcatcggtggagcggctgttggcaaagttcctgggagctgagctccgggtacatatcctgctatcccggtgggat

SEQ ID NO: 356809 - DNA, 546 bp, Cannabis indica
ataacatctcataggaagccatttctataatactctggtagttattattgtaggagaactcaattaaaggcaagtacttactccatgaaccttcaaagttcatgacacatgctcacagtaagttttccaatatctgaattgttctttcccactagctatcagtctgagggtgaaaggatgtactaaactttaacttgatatccatagccttttgaagttttggatccctgtctgacacaataaatttaggggctctatggagacgaacgatccccttacatacaactcagcatactaatccactgaatatgtagctgtcactggtagaaagtgagctgatttttgtgaatccgtccactatgttccttgctgaatcatacattcccgtagttctaggtattctagttacaaaatctattgcaatgtcctcccactcccacttggaaaggctaaagattgcagtaaccccgcggcctctggtgttcagctttaatttgctggcaggttaacatttgaaccataatccaccacttctcttttcatccc

SEQ ID NO: 356810 - DNA, 1030 bp, Cannabis indica
aagaaaaataaaacataaacatataaccgacctgtgattaagtgcccatatacctatcaacaagtcataaaccatgtcaaacatgtataattgagtctcaaacgttcttgaccatagtatgattaaccataataccatatgcactcagtactctagtcatatgagtgttggtagcatcaatccatactataagtacaactaaccataataccacatgcactcagtactctggtgtactaatgttggtagcactagttcatgcttttagaagtattaccaattataataccacatgcactcagtactggcgtactagtgtcgatagccttagttcatactttttgaattgccaaacacatatattcacaatatcaagatgccatcatatatacaccaactatcgttctaactaatatgtcatacatctagcaaacataaacataaacatgtacatatgtatgtgtgttatactagtcttatctcaattttgatttcaggcgtgctgatcaacttgagtggaaatagttgctggtaattggaggccctaagtcacatttccataaaaaaaaacaataagtgttgccctaacacttttggggacttaaattcacaacaaaaagttttcctattaataaataacatggaaatatcctagttattgagaaaacactcaatcgaggtcctaggaaaagtcttaaaatggacccccaaattttgcctaaatcggacggtttgaaactccattgccttattttaaaacttccataactcatttaattctaagccaaaccttaccgaattttgcaaggtacccaaaaacattgtaataaatattttttatggagaaacctcaatcaaattctcaacataaatcaaactaaatggccgtcataaaactgcctaaataggatggctcgaaacctctctgtccaagtttggaaatctcataactcatccattcctgatccaaacattaccaaattttgtaaagcacctaaaaacatcataatgaacatatttcatgaagaaa

SEQ ID NO: 356811 - DNA, 864 bp, Cannabis indica
ggagggtatctccggtttttccttcctctctttccaggctcctggtgcatgctctttcagtcctctcgatcctgagggccaagactcgctttagggagcttgcccctttgcggacctttccctttcaggaaatctaagcggactttttgcggatcctgcacctttttctttcttttggggattgaagtgggatttttcccagggttttcctcgaaagggtaccgtatagggcttggttccctggtcttaggtttctgagtgcttggtgaagactctttcgatatttctttgagtcctgtcgggatggcattagggtgtatatgaatccctgccgtctccatggctttgcatggtgaccaacacctcttgcatttttctattttgctccttttgggctacgatcttagcttcatgatcagcagccttttacctcaagaccagcaactctgtatagctaccctcatcgtaagcgtcatactcgtcaaagttctcttcgtattcctcgtcattggcctcatctcgctcctcagggcccacatttaccctggaagctacttcttcgtcctttgggtttttagcatcctgaggaggacggggctgacgtgtattgttgcgagtttccaccattgttgatctaacttttctgattgttgtctgtttaaagacgctttcttcagctctcaaagaaagtaccaaaatattgatcgagattttcggcaaccaattaaataatatataagaagagcagtagaaagtttaatgcaggagatttttacatggttggggcattaatgagccttagtccacaagtcttttttattaatgggagtatttattacagagaatgttcttggtggatttctc

SEQ ID NO: 356812 - DNA, 670 bp, Cannabis indica
agtggaacaatctgctcggcgaattacaggctcctaaatcataataatcacaacactgataagtgacacgctaaatcacttcccggggactaaaacttgaaactagaagtttccctatcgataaataacatggcaataccctaaataacacaaaatgggaaaaactagggttaccaaatttgacgcaaccggtagaccggttcctacaggcctccctgaaccggaatttcggttcagtgcagcaaaggttcaaaatttcataactcatgcaattcaaccccaactcaaaccaaactctccagacctgctatttaaaccccaatgaacattttccaagtgacaaaacaaagcttcatacacagaaatgaatttcaccattaaaggttcaagattgagttcaaaaactcaaaacttgactaacccttcaaacagcctctaattcatgcatttaacaacatatgaactcatatttaaacttcagaacacaataacaactaaccacggcagctacaacaagctaaacaacataacactcataaaaacaaaagtttgagttcaaaactccatacttggttaaatccaactaacatgcatcaaaacctgctctaacccactcaattaaacatatttaaactacagaaaacatcacataaacacagcagcaacaaca

SEQ ID NO: 356813 - DNA, 1231 bp, Cannabis indica
gaccattgtgcatcacttttctgctagttatattaagagaaaaagtagttttcaagcagtaataatcattccaattgaaatagttaaaattttacatttctaatagtggtaccccttcgttaaatgtggcccggacccatctcgaaatatttttctcattagtcacaatgaattcgtactactaacacgtgagtatgaagattggtttgaagttaaattttgttaaaatgactcctatttcaaaaattgaaatattcttttgtttaggataaatttcaacaagttttttccttactcttaaagtcgttagtgttctttcaaaatctcaccctacacatcttaaaaaattgtgaaatttcatagggacgaagcgaagaccgttgtctataacttttctattggggtttgggtttggggtttggggtttggggtttggggatttacgatttggagttttgggtataggattcggggtttgtggtttgtggtttttaggtttgggggtttggggttaagttgttttacattaggtgtttggggtttgggtttggagttttgagtttggggttttgggtttttaggtttttgatttagggttttggggttttggattaggggtttgagttttggtgtttagagtctttggattttggggttttggtgtttgaggtttagggtttggggttttatgactagggtctagggtttaggatattggaccaagtatttggggtatgaggttttaagtctggggtttggtgttttagggttagggtaaatatgaagattgctttcacgtaaaattttgtgaaaatagccccttaattcaaaaatttaaaatattattctttacagggtaaattttaacaagttctttctttactcttacactcgttaatgttctgttaaaatctcaccctacacatctcgaataataataaaatttcacaaggatgaagccaagaccgttgtgcatcatttttctatgggacacattcagagataaagtagttttcatgaactaacaatcattttaatcaaaatagtgaaaatctcaaatttttgatagtggtacccgtttgggaattgtggctcggacccatctcggaatttttttcgccattagtcacaatgaattcgtactactaagtcgtgaatataaagattggatttgcattaattttggttaaaatatcccccctattaaaaaaaattgaatatatccttcttt

SEQ ID NO: 356814 - DNA, 611 bp, Cannabis indica
gtgaaaaagctcagaaaaaaccgtcccttcttatgaagaaaaactacgtccttcatggctgaaaatccataaaatgctaataccgaacatgaggtaactaatcatcgttctgggaaagagctcatgggctccagaaagtctaccaaccagcggtccagatggcccaccctttccaggaggactcaacctcaaggtggccctagtacacggaccacatgttcccgaagagcctaacccgacgttggtcctagtacgcggacaacacgcacgaggaaaactcagcgtaggagtggccagaacctcgggaagagggatgagcagctcaatcggggaggtgccaagtctatgggggaaggtacttatgaaatgaaaaactgccacctgagacgccatctggaagtggcgcagcatcagaacgctgagttagagcgtgatgtagcctcggccagggtggcataggggacgaatgctcaaaatcaacctgaacctagagtgagaagaccacgaggaaaaccttgtggctcacgaaccaggggataggaatgcccgggaagaacaacccagggaaaatgaggtaccccctgaaaatcagaatgaacagccagatggga

SEQ ID NO: 356815 - DNA, 398 bp, Cannabis indica
tcatattaggttgttaatcaaacatacttgttagtaaatctagatcctggtaaataatttccaacactgctccacgaggtcacggactacaaagtggaaagaatccccagggaaaagaatgctcacgtggactgtctggctaaattagcttcagacagcgaaatcgagaaactaggggtggtacctatggaacgcttagtagagccaagcatcaaagtaaaaaatgccatactaacagttgagcaagagcccagctggatgggtcccatcatcgaatacataataaaaggggaaatgccccaagagaaggcactatccagaaggatacagtatcaagcgcaccgttatgtgatgaggacaaaaattctctatcaaagaggactcagcatgccttattt

SEQ ID NO: 356816 - DNA, 345 bp, Cannabis indica
cccatcaaaatataattgccatgatgacgtatcgactgtgaagacttcttcgttaggaagatcttctcacaactccatatcacctggaactgggtgttctgccagaaaatcagccaaagcttgtccttttattgtttttgtgggacaaagttgatttcaaattctaagagcatcatggaccatttggcaagacgtctagaaaacacgggcttggataggatatatcttaaaggtcagcttttgacactaaagtcacaagatgtgagagaaaatagtgtcgtagttttgtgacggcaaaaattatagccagacacactttcaagattggagggtagttttgttctg

SEQ ID NO: 356817 - DNA, 887 bp, Cannabis indica
gaactccatttcgattttatttgaattagttatgattttttgaagatttgaaaaaaatgataagggtgatcacctatcccacgcgcgcgcggatggcccattccctcggccagcagcgtgttcggacaggatattgtcgaagcaacacgcacgtggggtgtctgaaaccccattccgtgcgtggaaattatgctgggacaccccagcgccgagttttctcggccgtgacaccctgtggcgcacgcggatgagtatgcaacaacataccatctgtacaacgcacagttttttcgttttttcatactttttcatggaattaacttccgattttttgtgtagttttgtatttagatatttactattcctatttcaattctaattatcagaattaatttatgatattagtgtaatttgaacttgaaaataagtaaatatctaattttttacttaattatctatcttatttttaaatttaattatttttatcctatttttaaatttaaggtcagatattaatttttttttaaaaaaattactctattttttaaattatttgaccttatttaaatttaaaataagataattataatcatgatattttaaatagatataagatattttgctaacttttaaatttttttatttttttatttaaattatattataagtcaaatttttttttttgaatatttaatttttaaaataacatgaaatttaaaaggtagttagcaaaaatttttttgaaatgatttttaggttagatgaaacctaatttttcaaaattataggtttaattttaaatattattttatttcatttattttatttaaaactattttttttatttatttattattttcgaaattaattattttaaattaaataaa

SEQ ID NO: 356818 - DNA, 751 bp, Cannabis indica
acatatacaaaagttttgtcgcccatcgactaaccagcgaagccttgttgtcccaaagatcgtacgctccatgcctaacctccccgacatgtacaatcttcatctgctcgttctcacggctcctcagctttagccttatccttacctacacatgaaaatagcattgtgagcgacaaactcagtaagaaaagcataacgtaaaacatacaaatatctcgggttatcacctggtgcccatacacccgatcataaccctaatccctgtgtcccacacggtattgagtctagaacattcatacgacaatactatcgacataatgttagcctatactcaatatgctagtcatactctaggcatattgatgtgacagcatcgattagtattttagccaatatacatttatcagtaatcagtacaacttactattactgctatcaatgtaatctaacaggcataaacaacatgtatgctaagcatttaatagcatatgcatggcattatactaatcttacctcaatttcgaattcaggtgtgccggtgaacctgagtggaacgactgtttcggcgaattataggctcctaaatcacattgataacaacacaaataagtgactcgctaaatcacaactgggacttaggtttcaaccaaaaccttttctactgcaacttaatatggtaataccttaaactagtagggaattaaccaactcgaaacctgaaactaacacgaatcaacaagctgaatttttc

SEQ ID NO: 356819 - DNA, 748 bp, Cannabis indica
tactactccaactgcataagaaatatctggtcgagtcaatgtaaggtagtaacggtgtaagagaattgtaacattaggtatttttgccaccaaaaataaacattaggtatttaagtgtataaaattagaaacattaggtatttatgccgcaatttaccctttttcgtaaatatcttcaatattgtccagatcaggacgagacttggtattggccatttatttaggtctatgaatacaatgacacaatcagatttgagaaactttatgatttggtatatggtgatgaccatatgtctacagagcaaaaatcatatatgttcttagtagaaggctaagagcttagaatactctttaaggggggagtacttggtgtcagctctccatcacccctgacaccttggtgctaagtgagccactacttgtaatgcactgtttcacaagaacgccacgtgtgtgtgtgctttttacaaaattaatcttttattaattatataaatatacaaaaaaaatatataaatatacaaaaagtgtgtctaactaaaaatttattgtcaaaacaaacgcacaacttttataaaaggtatctgttaatattttatggggacaccctgctactaaaatatttacattcagaaccaaaagtatttttataaaataagtttatactccaaaaaacattctgttggaaatttattttaccaggatcttagatctactcacaagtatattgtttaaacatcctaaatat

SEQ ID NO: 356820 - DNA, 482 bp, Cannabis indica
atgtcccggatgcttctttattgtgtaaagacttagcaaatattttggattataagttgcttgatccacgtgtccttgtctggttggtccacgtatattgggcaaaatcaggggcaacaccttccttctgattcagtttgtcaaacaagagagagtctaaagtgttggtctcttgtatcaaaagactacaacattatatttatagagagacattaggtttagggttaaaattaaattggttgaacaaaagataaaaattgtatttaaaaaaaaaaaaccttagtggaattctcatgtaaggctcatggtttgaattttaacacttttacttttaaaagtgagataatctttttatcttcaaaaataccatttatctattataattattacttaaatgttaactcaaatatgtcactccttcataaataagacatagtcattatttagaatcataattgattaaataaatcaattaattgaga

SEQ ID NO: 356821 - DNA, 1032 bp, Cannabis indica
atctaatcttaactacaatattagtatgtatttaaaaatagttaagaattctacaaattattaattttacttcataaattatcaaaataaatataaaaaatttagtgctaaagacattaagaatttaaggaatgctaaagacacatcaaaattgcattgttaagtattttttttaaaattgtattattaagtatttaacatttttaatgcttgtttatgaaaaaaataattaattaaaaaatatagaaaaattaataattcagtatcacatatttttatttatttgacatactctcataggaaaaaaagacaaaaaaaagaaatgcactataggaactgtaatagatttttatatagtgaacggatcaatatgttgatcagttcagacttggtactcttgataataggaactaaggctttagtaaggaaaataaatagaaaaacttacattaatcttaacaaattaatatgatcatcaatcaaatataaatatatctttgtatctatctaataatatcaataatatatatgtatacatcgtgataaaaataaaaataatatgaacaatacttaaatatataaattgaaaaaaagcaaaaaaatctaattataaaataagcatatatattagttaacgctttacaatataactcacaataaaaattgatattcctcttttataatttgtatatgataattaaaatttagttctatcgaaaattgaaaattttaacttacatgataattaatgacaaaagggaagatcctcttgttatataaaattgtaaagttgtccataaatgagataggtaagaacaatcacataaaaagtgtttgagagcaaaaaaaaaaagaaaaaaaaataatatattgaaggttgaaaggaaggggaaagaacaataaaagttctaatacacacatgtctatatatatattgtcttttgaattttattattaacaatgaattaattattgtcttttcaattttttaattgaacaacaattacagttaacaatgaattaattattgtc

SEQ ID NO: 356822 - DNA, 642 bp, Cannabis indica
ggatgttaattcaacatacttgttagtaaatctagatcatggtaaaatattcccaacatgtagcaactagcattatcttcttggtgagttctcactacatgttccctaaccctagcatcgttcaactctaatttggaggtgggttttgaagggatgggtttatacgagatggctgattctgtaggaaactcaagttttaaatcttctaaacgataaattcttgaactagagtgggacattgctgcaagtagaaagcggtcccaatccctggagagaattttatcagacccaaaggtggtgagttggagattctgaaaaaatctacgtattgcctgaaccctagtatcgacctaaatacaatttaactcttaaaaactacaaaaaccgaatgagatggcaacgatacaaataaattaagcagcaattaaacacaatgtaacaagcatgtaaaggaggaaagcaacttactgtttgaaattagggcttggggcagtgaatggttgttcggtctgtaaatcttcgaatgcagcaaggatcactttgagaagatgaagtcagaggaaaatcgtagaaaaaatgtcaaggacagggatggcatgcaaatcctcaggcaaacccaatggtgattcttagcaaagaagc

SEQ ID NO: 356823 - DNA, 973 bp, Cannabis indica
aattataattaaatttaaatatatattcatcagattgaaataatttcaagaactctctacgtttttttttcttgtttatttatgttatacccgaaaatttggctggaggacacatgtcaagataaagagaatatgaattggtgcaatatctttttatggaataactcattaatcacgtaagtatcagagtatatttataactcgtcaactataaagtcttaggcgatgaatcaatgtacaaactggcacttagtgtattagcgagaaaccatatgtcgctaaaggtgaatagcgaggcactagagaaaagtgacacataccttagcttgcaataagcaaactaagtataaaaatcggattggctcaaagaacaagtatgcgagatgaccatctcgctatgagaagacttcctatagcttcatccaactaacaaagcgaggctcataatcctggcaattcagaaaatttctgtatacccgcgatcgacgtaagacatatcttgtcgacctcggaaagaagaatggtcccagctcgctattgggatcactacaatcaagtttttgtcgagacatctccagattagacaattatagacgtgtttaatacacgatatttttgacccagtaacagtgggaaaattacagctatatgattttcaaaatcatacactgcatttacattttgtgatatgtattcagatcccacgattttagggataatggctgtaaacatattttggtcagctttgtaattaactgccactatgcaattataaatagcggctctcaatgaaagcaccaaactgttaacgcagatttttgttaaccaaacttgagcctcatgatgataattcaacactgaaaaaataaaagctatagaaaaataaaatatgagcctcatgatgataattcgagaagcttctatagatgtagccattagaaaaaaaactacaccagcatcttactaaagtaag

SEQ ID NO: 356824 - DNA, 840 bp, Cannabis indica
tttaaaaaaaataataatttatttgcgtgggccaatgaaactgtgccacgtgtacaatatgtacacatggatagtccaacctagcacttaacagctaaatttggatgggaattgtaaattgctaactgtattatgatttttggaactttaccgctaaaatttgaattttaaaagttaattgctagtaaaataaaaatattaggaattttaccgcaattaaccctaaaaaaatatgcttattaatcacatttacaacattcaagcaatcacacacactcaacattgactcagttataaccaagtctaacacaaaggccaaagctaaagcacccaaactagttatactctcatccatattaatacaagcatcacaattgagtttaacattatcctgctgcatctatgatccaccaaacatgtcttagcattagcattatgaaatctgtccagatactccatacacatactccacttaacaacaacaagtctattaggcaagccaaactcttgattcataaaggtattccttctaaatcaaattctccacaaactgacaaaatacttctctaacaaaatagatttcagttcatccataactaaaagcaggaactaataaaaatttggatgaagtggaatagccaaatttacaaaaatactagatttttgataaatttacaattttattgccacaaataatttttttacaaaaatattgtctttttataaaataacctaaaacaacaaaacaaagcaattaaaaacaacagtagaacaactaaaaaacaaccgtgaaaaacagtgaaaacttaacacataaaacttacacaatatttttttttt

SEQ ID NO: 356825 - DNA, 1013 bp, Cannabis indica
tatatgtaatgacaactaaataaaatattgggtaaaactatgctagtaaaaaaacaaaagtaaaactatgctggaaaatatttcttttatagtgtttcaactagggcttagttttgaattatataaattaaaaaaaaaatattagggtaataaatagagtggccggccactaaaagaccattatctagttacaattttgccaatttatttcagcaagttattctttttttaataataccatattttccaattcaatcttataaatgccaaaactatttatttaataattataactaattatcaaataaaattgtcatttatattatttattaattagaccatacaaagtctcttaattaataaatagaccccaaaacttcttttcttcacaattaagcccttacctagtgaaaattcataaataagatatagtctaattttagaattgttagaccgaaattaaaaacaatgaagctggaacgaattacggatagaaaattcttgctgagtcgcggacaatgtcgcttcattaagacgtttcgcgacactgaccgaagtgtgcacgacagtctagcgaccacgacgtccccaggataaaacaacctttgtatacgtacgatatgttctccaacgaactatattggtctattacacctttaattttgctgtgagaaaaatcgtaaggaagaaaaaaaattgatgttgaaaaggatgtatattcttcatttttctgatacgacttatatagagaaatcgatctaggaataaacggtaagaaaacagtaatattatcgtggaggaggagttggatcatggcagtaaaaactgaatcattatgtaacgccctaatctataggaacgccacgtgtgtgaatttataaaactagtttaatactaatatagtaattaattattaaaaactgtgaggataataaaaacttgactaaaataaaatactaaaaacggacattataacggcagtaaaaaggggttccggaaatccctgttataaa

SEQ ID NO: 356826 - DNA, 758 bp, Cannabis indica
ggttgatcatttggttgttcgtttttaaggggacccacagtttccccaggttgttcttcctgagtgttttgaggattctcctaagccgtctcctccctcatggttcgtgagccacgaggtttgcctcgtggtcttctcactccagggtcaggttgattttgagcgttgttctcctgtgccgccttggctgcggctgcctcacgttccagctcagcattctgtcagtttgcctcttccagacggcacctaagatggcagttttctaactcgacgattggcacgtatcttgtaggatcataagcgccatcattatcatgtttagtaggttgggggcctccaagatcgagttcttcatcccctactcctgggttctggccattctcatgctgagtccttattgaacgtgtggaccgtgaacaaaggccaccttcaggttggctcctcctggaacgagtggaccgtgtacttgggccaccttcaggttgagtcctcctagaacgagtggtccgcgtagaccgcgagttgggaggcctccgggagtccatgggctcttttctggcacgacgttgggtggtctcttcaggatgcgtatccacattttctccattgtcagctatggagaaagtttttttttttatcaggagggttttttttttctgagcttttttcacgaagactctcaatgaaagcaccaaactgtttacgtaaattttcgttaactaaatttaaagacctatttcgtgatggatttgcacaaa

SEQ ID NO: 356827 - DNA, 1323 bp, Cannabis indica
aaagcgacttagtatgccttaagtgtctcacctaactgctgctttatattggttagcgaggccgcttcgggtcgtctatccctagcagcctggaactgtttcttgaaatctttggacagctgttcccaggaagttattgaatggtgggtaaacttgttaaaacagctgctcgctgctcccacaagcgaggtggggaacaaaatacagcataaattattcgtgacattacttgctcgcattattgtattaaagttgttcaaatgcgagaccgaatctgtggttccatcatatgacgagacatgcggatttttgaatcccgaaggaaaaggggtactcatgatatctggatgatacggctcaagttcctcgtctaagtcgtatccaaattgtctccctagttccccccacttgatatctcctgaacttgtcctctagcttgtttattcgcaattggatgtgatcctcttgctttggatcgagctattagcgaaggtcaggcttctttggattcaagtgctctcgcagattcggttgggagtaattgcttacacacctcgtcttactcacagatcacgtcctacttatagactttgtccaacttatagacttcgtcttagagtgactcgtggatttactggttcccatactttctcgatcattagcttgttgaatactttctccttttcgagttgatcgactgtgggtccttgactgcctcgaggtcacacttgcttcttcacgctttgttctttccccctgagtgtgatttgttgtatttctcctattaggatctgtacgagccttcgctctatgggttcgggaagaacgttggtgattcctagcaggtgaccttcgttctctaggctaatccccaagattttcctcattttcatgaggaatttctcattcatcagtttctggttgcctcccattcacattttcgtgagagggttctggctggtcattctaattgttagggggtatctcattttcctgtctcctaattcgtgagtcacggcttctgcctcgtggtcttctcactctaggtttaggttgattttgagcatttgtcccctgtgccgtcctggccgcagctgcatcacgttctaattcagcattccgccgctgcgcctcttccagacggcgtcttaagcggcaatttttcgtttcataagtaccttctcccataggctgggcaaccccacgatcgggctcttaatccctcgtcccagggtacaaactcacaggaaaaaataaaggttgtataaggaaaaatatgaacacacaggattttttacatagttttacagttaaaactctgca

SEQ ID NO: 356828 - DNA, 676 bp, Cannabis indica
ttttttacatagttttacagttaaaactctgcacactccacgagtcaatcttattcagatttctaattatttctcagagcctcttttgtatgagttttttcgtccctttttggatcttacttgccactatttataattacatagtgggcagttaattacaaagttgattgcgatcgttttacaacaattattctctaaaatcatgagttttgattacatatcacgtagtgtaaatgcggttgctatttgaaaatcatatagctatgattttttccgcttttactgggtcaaaatgattgtgtatttaaacacgtctttaattgttgtatctgggaatgtctcaacagaagcttggttctagtgatcatactagcgagctagggccatttttccttccgaggtcgacgatgcacatcttgtgatgatcgcaattctgacttacaaagatttctttgaggctcgttagaatgttaactactgactcgtcagtattgtgagcctcactgagaagatgtctgagtttaactgggtgaagtgtcaggaagtcttcccataacgagataggcacctcgcttattaggtctcgagccaacccgactgttatacttagtttgtacattatacactaagtgctttcgcagtcgaaacgtgtcgttttcgtcttcctaaatgtaac

SEQ ID NO: 356829 - DNA, 775 bp, Cannabis indica
tcgttggtgtcgtggccgtagtctccgtggaaccgaaaattttgtcatgtcccttttgttggtatctttcttcatggacccgggcttcttgtacgggattaacgactgagttgccatatacacactctctatatcttcagttagaatagtgaacacagtgtgcttggcatgatcacggggagtctgtccggatttatcggtgaactttcccttcttcccgtttccttgcttgtggttgttgcttgaacgcttgccacttgaattgttggaatagttgggaagttgggcagatgttccagtgcaagggcctttattttgcccggcttttgctcaccttctgctcgttgaatggcttcttcgagcttgatgaagccttcggctcggtcaaggaaatcactcattgagtcaaccggcccgttcctccttatatccttccatagttcaccaaggacttcaatgccccccagtatcgcggataactttccatcctcagttaccctcgagactttggtctcttctgccatgaatctgctaatgtatgcccagagtggctcgcctggtcgttgctttacttggaccgaatctcccagatgcaatgggagctgacgcgaggaagagaattgtgtatggaattccgaagaaaaggttttccatgaactaaactttccaggagccaacttgaaataccattgctgtgcggcctccgacagagtggcggggaagattctgcagcatacgtcccctcgtactccttgtaaatccatttgcatctcaa

SEQ ID NO: 356830 - DNA, 722 bp, Cannabis indica
aattcaacacagaaaaaataaaagctatagaaaaataatatatgaacacagggttttttgcgtggttttgcagttaaaattctgcatagtccacgagtctatcttattcagatttctgattattttttcagggtctctttcataagatttttttcatcccttttttgagattgtttgccactatttatagttccatagttatagttaattacaaagctgaccaaaatatgattacaaccattatcctaaaatcgtgggatctgattacatatcacaaaatgtaaatgtggtgtatgattttgaaaatcatatggctgtgattttcccgcttttactgggtcaaaaatatcgtgtattcaacacgtctttaattgtggaatctagagatgtctcgatagaaacttgattgtagtgatcctaatgacgagttggaaccattcttctttctgaggttaacgagatatgtcttacgtcgatcgcgggtatacaagaatcttctgaattgctagggttatgagcctcacttccattaattggatataggaagtttccccgtagcgagaaggtcatctcgcattcttgttctttgagtcgatccgacttttacacttagtttgcttatcgtaagctaaggtatgtgttacttttctccagggcctcgctattctccttcagcgacatatggtttctcattaatacattaagtgccagtttgtacattg

SEQ ID NO: 356831 - DNA, 1166 bp, Cannabis indica
accaacatcacttttagcatcaaaatttccaatatgctcatgatctctagaaacatagcaaacacatccaaagacatgaaaatgatttacatttggacgcttacctttccagatttcataggatgttttggaagtacgtggacgaataaacactctgtttattgtatagcaagttgtgtttatagcttctacccaaaaccattttttcggcttcttgctatttaacatcactcttgccatctcctgcaaactttgattctttctctcaataactccattttgttgaggagttttattgagaattcatgagttatacttgaagacttacaaaaatcatcatatatagagttttcaaactcctcaccatgatcactcggaattcaaacaattttacaaatgttacatcatttttcaagtctttatctcaaacaaagagttttaaaagcatcaaatgtgtcagatttttaagttaaaaaatctaccgaggtaaatcgagagaaatcatcaaaacacacaataaatatatcgcttaccattcagactttcaacttgaattagacctataagaaccatgggaagcaattccaatatttttgtgatattgatatctaatagacttttgtgagtgattttcaattgcttaccaagtttagaaggttcgcacttaccaacactttctttacctagtttaggtagaccatgaacaacacttgcatttgacaattttttcaaatttttataattaatatgtccaagttttgcatgccacaaatcagtggtgttgttgatagctgaatgataagtgaacacaggggttaggatatagtaagtatcattagatcgacatcattgcaagatacattgattatcatcattaagtacataacaatgatcactgtcaaatgagatagtatacccttggtcacaaattttactaatgctaagtaaattagcccttaactctcaaccaacatcacattatttaatctgggcaacccttcaaaattaagagttcccattctaatgacatttccagctaagccattcccaaatgtgactttgccacactgcattggcctgatgttaatcaaaaagttgttgtcacctgtcatatgtctagagcaaccactgtcaaagtaccacaaagcaagacttttattagaaaa

SEQ ID NO: 356832 - DNA, 510 bp, Cannabis indica
taatttatgtaagttttaaaaatgtgattttaactttttttgtattatgtatttactattatatagagttattctaaaatttgataatgcaggtagggaaaattgcataaaaaatttacaattttccattacttatatttgtgcttcattttataagtgacacaatatgttgaaaaaaaaaagtattttcgtaatagatatgacatttttgaacagacataataaggtttttgtgactgttttaaaatgtcataaactatttagcgttatttctaaatcgacgcataagataaaagggaaaagtaaatcttttgtgtcgtttcataaatgtcgaaaattggtttttgcatcgttttgaaaatgacgctaataaaaaactttttgcgactacggtacatacgtcagttttataaaccgacgtgaattctttaaatgacactttaaaaccgacgtgaattatactttttatagtagtgaatgtacgtatcactctgacccaaaagtaggctt

SEQ ID NO: 356833 - DNA, 618 bp, Cannabis indica
ttatttgttttatttattataacactgttatagaaccggttctattttaattataactggtttaagttattttgtgttatttgtttaactagttatatttcaattataatcgatttgagttatttgtttatattcattatcttatagaacttgttctatttttatttatatttgagacatctacttttagtgacttttccaatgactttttcggggacgatgacttttttgacaacttttcctgtgaatgtgacttttcgagcaacttttccaccgataataacttttcagtaacttttccgacaccaatgaatttttaggtgaaacttattattagaagttttattaaatttattttttattttttcccatattttaaacgttaattattttttaatctcatattttttattttttgcattatttatttttttcttttgcattatttatttatgctatatataaaattaaactctaccccattttctcataggggagttctatttgtaccccataaacttataaatacacccaattattaaaaaaatataaatttatatattttttaaaaattactcttaatatttttttaaaattttttcttcacattattttatg

SEQ ID NO: 356834 - DNA, 672 bp, Cannabis indica
tgttgtattttctgaggactttgaagcattcatccaggtcagctatatgaccccagccttcgtggattttacaagcatgtcatccatgtatacttccatttttcgtcaaatctggtctttgaacattttgtttaccaatcttttgtaggtagctccagcgttctttagaccaaatggcatgactttataacagtatagacccatatctgttcagaaacttgtatgttcttggtcttatggatgcatttaaacaggatgttgtgaacaggatgtttgttgaggcttgattgtctatcatagtctgggccactattttgtgtgctatctgcacttccacgactaatggatcgttgtgcgagaagcaaacattgatagcatcttcttcagtgaaggttatggtaggttcccctacccgtggtatttttggcttcctattctacggctacaactacttccttttgttcgtgttgtaaatttcgggcatacctctcccgagctttgcccaaatctccagcaatatgtgggccccctatgatgactttttaatgcacgtctactggtggaggcattaatagatcttggttgttgtttgcttgggtggctcgttgattgtggtcggccttgacatacttctggatgtgcaggtttatttttccttatcaggaattcaat

SEQ ID NO: 356835 - DNA, 632 bp, Cannabis indica
ggtcggggtggggtggtgtgaaacgtagtggggaaatggaaaatgttttctgagttatggggggattatatagaaatttattaccggcgggacctgccagtattaataggggttccgccggtattaataaaacggtcagaatcccttactaataccggcggaacccgccggtaataatccgccggtattagtctttttaaaatttgggcggtcaaaatcccgcccaaactattagaggcggattttttgccggcaatactaaaattccgtcgggaatactaaaattaaataaatatttaattgttttttaattattcaaaagtaataccggcggaatgccttttccgtcggtaataaacccattaataccggcggtttggctccgccggtattactcccaccggtattgagtcaaaatgttgtagtgtatgatgtataattgttaattttttttggatgaatgagtgaatttcattactccaacagattttgtacaacactatagcattctccaacaagagaatctaaataatctctaatatttacaaggtttcaaaccatattctatctctattggtcacttttttttggccaaatacaagagattcgacactttgtaatattctttactt

SEQ ID NO: 356836 - DNA, 550 bp, Cannabis indica
atatcaaagtaagatcatttaaaatttaataaaaaaaaatctgatcttataattaaaataaataaaataatctaaaatttcaaaaataaccataaggctcctttgtgagaaatcaaattttcaaaattcaaagcctactaatatcagaaactaattttaattaattaaaaaattaataaaaattaattttattctgaaaattagatttttaattgaaaatttagattctacacaaaattctaccaaaatttggcttttgtttcaatgaaaaacgatttttgaatcaaaagttatgacgaaaacaagtttgaggcacaggggtatgcaatgcatacccctgcgcgcgcggagagcaggacgtgggcgagaaacaagggtgcacgcagccttcttgactgaagaagctcgatgcatgcagcctgttcagacaggacatgtccgagaaaatgcggtcatttttgtctgaatggccgtgcgcgtccgagcatgtccaaggagtgtgtgcgcgcgtgtgtgcattcaaatcccgatattttcattcaaattcaaa

SEQ ID NO: 356837 - DNA, 1103 bp, Cannabis indica
taacattttcaatttgataatagtttttatttaaaaaagaattagaacatcattaatatcatagatatgataataggtataatttaatatgcatgtaaactgttttggtattgtgtttgtgatttttgtgtaggtgttataaatttgggaatgctcaattgtaaagtgttatgctgtcgaattttcggtagcataacattttcaatttgataataggttatattcaaaaaataattagaacatcactaatattatagatatgataataggttaaatttaaaaaattagttaatagtttattaattataataaaaatattggtaatagtttatttttgaaaaataattacaacatcactaagtaaatttaaattaaaaattaataatttaattagttaagacttcaattgtaacacaaattcatttaaataacttggtaattttaaaatgtcacaaatttacttattactaaataataattagaaactttattaagttaaaaattgataaattaaaaacttattaattaatttgaaaattttcatttatattagttataatgttacataaattgttaatttaaagaaattagataattgaaaaaataattaaagttgtgacaaaaaaactatgtttatcactaataggtgaaattcattaattaagttaagttttcataaattaaaaagaccataattaaaatgaaaaaaattagaattaaaaataacattcaacattgaattaataataacattaataaaaatacataggtggtacataatatagcacaaaataacattgaattaataataacattaataaaagtacataggtggtatacataaaatagcataagacattataagataccataagacattttaatatagcataaaataaaattcttatcctaaattgatttctttggttataaacaaaagataggatagaacaattttatttgtattatcacatagtgataatttatttcacacacacatttttccttagacccgtttggagaggctgagtcagaaggactcttaaatacgcttctccaaattagccaggactatttatgtccacatggatagtttgggcttg

SEQ ID NO: 356838 - DNA, 658 bp, Cannabis indica
gccaaattcccattttcaagcatataagggtaaaaaatataattctcacattgcatacacaaataataaatttcagatttcttatataaaaataaaatgtcaattaaacatcccaaaattgtatttcggccctaaaacccagttcggcccgaaatacccggttgtgactataccgcgccaacttgttggaacacacctgaaaaaggacacaccagatatactatataataatatagttcataagcacataaataaattaaattcacagttttacccttctttgcttaaaattactaaaatgccccgagctcaccaacggggtctgaacatgtcattgctcaaattaattcgcatataataaattatataataatataattctactgtaatactcaattaactagttaggattttgctaatccatttcattaatcacagggtattacaattaccccctccttatagaaatttcgtcccaaaatttacctaaataactttgaatatttctgttgcatatacgtctcgagttgccaggttgccgcttctactttactgttcctccataacactttcaccagtgcaatcgtcttgtttctcaagactttctcccttctgtcaagtatttgcactggttcttcctcatatgataaatttgact

SEQ ID NO: 356839 - DNA, 541 bp, Cannabis indica
ctaaaataccattagagagctaggtttgagttatcaaactcaatccttgaccaaaaaccttaaaacaaatccacaaagatagctgcaaacaacttaatctattaccaataaggttcagaacttaaattagaatgacaattatactcacaacacaaaaattcccaaaattaagctttaaacctaatttttcttactaaaatcaaatagaaaaggctaggagttaataccttagattgaatctccttaaacaggttacaacactacaatttcagcaacaaaatcccttcccttgctggttctttgggttgcacgaaagagagaggaagagagagatgcttctaagttacttcaatctatcctttttttcctttctttccttcttcttctaatattattaatattaactaaggataagcttaataaaaggcagcttctaatacccactaaaagccaaaatataccttgtaaaatgacctttgcccattcaattaaaaccaaagattaaacaacgtaaggacaatttggtcatttcaaatcccga

SEQ ID NO: 356840 - DNA, 649 bp, Cannabis indica
gtcaaagttcgggagaaaaattgctaattagcctatcaaaaatactggaaattctatttatatctcacaaaatgataaatacatcctataattaaaaaaatatatatataaacttaaataatttttaaaaattactcttaatatttttttaaatttttgtccttgcaatatttttatgttaattttaataattatttaaattttattttcataatttttaaaacttatgtatatatttttttttctaaaataatttcatataattttttattataattataatatttaaaatataatttatttttgtttaataggtattttatattttaagaatatgaattggaagagaaaattttaaaaaatttaatacaattaaatatataaattttatataaaataaaaattattaaaattgggtgtttttagaaatttttggggtgtaaataaaatttctcaaaaatacatgtctattaaaaaagaaatttttacatgaaaaatacaaattgacactttatttacaaaaatacctccataaggtgcgggcaataattttatctttaatgagcttttatgtaccaaaataccacttacacatatctgtaaagtcctttttttggcaagttagttgacaaaatattttttcttttat

SEQ ID NO: 356841 - DNA, 1685 bp, Cannabis indica
ttttaaggtacatgctgctttacgttttgaattttctgcatctaacaatgaagccgaatatgaggcattaatcgcaggattgaaactcgctctcgagatgaaagtcgagtatcttcaggcttttagcgactcccaaatcgtggtgtgccaggtgaatggagaatatctggcaagaggcgggagattggttaaatacttagccattgtatgcgaactaatgcagaaattcaaaaaagtaattgtgtctcgagtaccgcgtgctcaaaattcacacgcagacgcactggcccgtttggcctcaactagagaagccgaattgctcgatgtaattccggtagatgtattggctcacccaactataaatcaagaagtgatcatggaaatagataccgttcaggaggtcacctggataactccaatagtcgcatacctggaaaagggcgttttacccgatgacaaggtagaagcaagaaagctgcgacaacgagccgcccgatatgtaatgtacgatcaaaggttgtatcgcagaagttttagtcaaccgctactcaaatgcatcagcggggaagattgcggttatatacttcgtgaggtacatgggggaatttgcggcaatcatacagggggtaactcccttgcattaaaaatcatgcgacaagggtattactggccaaccttgcgacaggatgctctcgcttttgcgaagaaatgcgacaggtgtcagcgaatagccacatatacccaccaacctccgagtaacctacattctatcacaagtccatggcccttcgcagtatgggggatcgacttaataggcgagctacctaaagggaaaggtggagtcaaatatgcggtagtcgcagtagactatttcacgaaatgggccgaagccaaagcactcgcaaccatcacagcaactaaattgcgcgagtttgtctataactccataatttgtcgatttggtattccatacaaactcatctcagacaatggaaagcagttcgattgtaaagagatgcgacaattatgtgacgatctgggaattaagaaggcattctccgcagttgcttacccgcaaagcaacggacagactgaagctgttaacaaaataataaaacacaccattaaagggaaactagaagaacgcaaggggacttggccagacgagctctcgcaagttctttggtcttacaatacaactcctcgatccacgactggcgaaacacccttctcgctttcctacgggtgcgaggccatggtaccagttgaaattggggcaggttccctacgcagagatgttttcaacatctcgcagaatgaagaaaaacagtcactctacctcgatcttctggaagaaaaacgcgatcaagcacacttaaaaaatgcggcttaccaacggcgaactgcaagatacttcaattctaaggtcaaggcaaaagtcctgcgaacaggagacttggtccttagaagagtaatgccaaataccaagaacccagcgcatggggtctttggggataattgggaaggaccgtatctcatcgcggaaaaaattggtgacgctacataccgactcgcagcactcgatggtactgcggttccacgagcttggaatggcgaaagcctaaaattatattatcaatagtactcgcattatttaaattgtgttcgctttgtacttatactta

SEQ ID NO: 356842 - DNA, 971 bp, Cannabis indica
taccatttattccatgtgggacattgtccacaatagtggcatcacgagaatggtgacacgtggagtttacttggaacatctgctcgggaagataggtcgagcaggatgcctcactggcatgtccagagtaagatattcagcgatccgtgcagagcaatcaacacttagcgaattcagctttcgcatcatgagtcatcagctcaatccctataacccagggatcaatttacgtggatatggcatacacacgatctcactatcagtgtattcagcctcaatcccacgatccttgcattcagcattgatcccacgatctttctgcttatacgcattgtaacgagagatgaaactcttcctcctcaagtttcccagccctataaatagtgatgcatgttcacttggcaagggaagagagttgaaacacagctaagctaagactatattattatctaagaattatatattcagagatactgttgtaagatctataagaaaaggaatcttctttcttgatcttaagtcaatacaaataatgaggattaggctattaccgaactgctcagggctgaacctctacaaaattcttgtgtcttattattgttttattatatatctgttactacatatcgtttatcgcttataaaatatactcattgtcgttggctaaaaacgaagtgaacattttggtgctttcattgagagaaggatcacaaattgctctttatttgacattcaaccgccaacacgatggtgcaaactcgtagaggcctgtttgacctagcaaattcacaaatgctggatacagcattacaggacccagtgagttcaagggttccgcctgctattaatcccggacagacgggaagcgtggggaatggtggaacaactcctattactggaattgcgcctggtgtgcaagagactgggaataatagttctgcacccaatcagggcatccataatacgattgt

SEQ ID NO: 356843 - DNA, 692 bp, Cannabis indica
aatagagaaaattctgcaagaaaataaagctgaaacttcaagcttaaatttgactatattacattcagattttggaaaaagttaaaacagaaaagttttagtttctttttcttcttgccaacgcatcttgaatcaactcatttggagtttgtatgtaaaagttatgcacattttactgaaagatgctgaagctgtaaaatttgcttcagtagtcgcgaccaccactttccatggtcgcgacccttcttcatggtcacgaccacggtcgcgactaggagccacgcagcgagcttatttttgtattttgcctatggtcacgactaggctttatgtagttgtgactaggggtgaaagacgagatttttgggcagtttttgactttttcagaggtagcaaccctaatttttatttaaggggctcgtgttttagaacaaggggagacataaattggaccctaaagtgaaagaaggaggaagaggaagcaattgtggcgatctggaatgcaatcaccaactagttctttcttaaactcttaatttttatgttaaattctgttttagttttgattatggatgttattatgaattttatgaactaaactcctatttagagagatgatgaatgttgattgaaattacttttggttaacgataattgctattcctcttttcttaattgtgaatttatccata

SEQ ID NO: 356844 - DNA, 663 bp, Cannabis indica
attttaaacctaaccttagaagcaatcttataaatagaataggatgctcttattttctaagccaatacaagataacttaattgtctctctttattagaagaataaaaaataaaaaagagcctctttgatattcgaaatcctcttcttcttcttctataatttgaaccctaagtaaattgaggaatcacccacacaattcaagtcaatactcagacttttgtggaagattgtgtaaaaatctaccaactgaagaagatccatattcaaatcttgatgatactctgcgacataaaggattaatggttaaagatctgaacagaaagagacataattttcttctgccactaatgtaagattttctataactttatactgtttattcattattttaggaaattcatatttaggatgttagattatagtcttataatcaatatatatgttagtaaatgagaaatttgattttctatacttaaatatacctaatattttattcctaaactaatgcatatcaccattgaaaatatatgaccactttatctgaaacccaaaaatacccctctcataactcaaccccattttttcccaacccgcacatgcatcggaccccccatcgagccccatcggacccgttggactcccccatcggacccgtcggaccca

SEQ ID NO: 356845 - DNA, 639 bp, Cannabis indica
cgttgtgatatttgcatctcttgctgggatcccgccgcgaactgtccctgtacagaggaggaggcttccggtaccgtatattttgccttgtggcaaaatacactccctcttgcgtgtccattagctctgtgtattgggtatattgaggagtatagccccttcgttgtcgcttgtcttctgtccggttgctaccctttgaggatctcttactccgggagctttgaggaggtcttgtcaagcttgcggtaggagcagagtgagacggggcttgtctagtaatccccgaggggttgctttggggattcccaaaatgcgatgatgtgggagccaaggctaggctctgattatatcttcgtgtagcggagaactgtatgccgctcatttgaggagtggccggtggtagggctcccaagagctaagcccaggtacatatcttgacactccagttggaaagtatcttccataggccactctctgggcctcttccaagttgatgtatttttggaccctcttctggaaatcttggagattagtcgctccttcctgttgtaattcattctagaatggggttcccgtacggatcccagcttgaaggagtgcaagctgttgtccgtcatccactttcttggtctttgaggc

SEQ ID NO: 356846 - DNA, 1232 bp, Cannabis indica
tgaccattcatccccgaggggttgcccacgggcgtcccaaagtgtaatgatgcggtagccaaggataggctttgattatatcctggggtagcaaagaattatataccgctcatttgaggagtggctggaggcatggctcccgagagttgaactccgggtgcgtatcttgacactccggttgggtagtatcctccgtaagccactatttgggcttcttccaaattgatgtacttttggaccgtcttctggaaatcttggagattgggtgctccctcctattgtagttcgttccagaaaggagtccccatacggatctcagcttggaggagggcaagctgttgttcgccatccaccttctatgtctttgaagcctcttctttgaatcttttcataaagttctttaaagttttcacgggcaattgctttatggtagttagggcactgacttccatgttaatctttctctctgccacaaactgtctccgaaagttgacttgtaatttgttccagtagtcttctaatccgggttccaactttttgaaccattcttcagtggaaccactcagcgttaacggaaagtataaacactttgcatcattgttgaccctcataacagtcattacccggttgaaataggataaatggtcactggggtccgagtctccagtgtatgcttccatctcgggcatcttaaaatttttgaggagctttgcatctgggagaccctagcaatgtctttgcgtagtaacgctaactgattaaggttcaaatttgtatattttaagctgttaattgcgtatataaaattaagttaattaaatatttttatggttttaattataaaaatattttaattgaaaatatttaatttaatttaattttgtgttatttttcagatttgagcaaagtgttgcaaataaaattgggattcaaatccaatcaaaagttgaatggcccaaaactcacttgcaattcgaacgtattacatatgttgggtcatgttgggtcttcacctgattctcttaaaggcctattaatttaaggatttgaagatcaatttttcattatgctaaggctcattgaaagaagcccatcattcacatataacagcccatcattcatatacagtaaagactcacatcccatattgttctccaagacgctgacacaagtaaccgcccactactactgctatctttacgtggaactacttgcctgccaacaatcgtggg

SEQ ID NO: 356847 - DNA, 816 bp, Cannabis indica
aggagcggagtgagacgagacttgtccactcatccccgaaggattcccatagtgcgaagatgcgggagccaatgcctggctctgattatatcctggggtagcggagaattgtatgccgcttattggtggagtagccgaagttaaggttctcgggagttggactccggacacatatcccgccactccggtcggattgtatcccccataagccactatttgggcctcttctaagttgatgtatttttggactgtcttctggaaatcttggaggttcgaagctccttcttgttgtaattcgttccagaatggagttcctgtacggatccccgcttgaagaagtgcaagctgttatccgtcatcaactttcttagtcttcgagacttcttccttaaacctctttatgaaatttttcaatgtctccgtgggtaattgcttgatgttagtcaaggcgctgacttcgagatttatctttcttgcggcgacgaattatctccgaaaactaacttgcagcttgttccaacagtccactgatcctggttccaacttcttgaaccattcctccgcggacccactcaacgttagcgggaagcataaacatttgacgtcattgcttactctcatgaccgtcattactcggttgaatcgtgataagtgatcgctggggtccaagtccccggtataagctgccatttcgggcatcttaaagtttttggggagttccgcctccaaaatgtgtctggtgcacggttctcggtcttcgcagtcagagtttgagtcatcacctttttgcctctgggggacccgagcaatctcttt

SEQ ID NO: 356848 - DNA, 759 bp, Cannabis indica
cggtttctattttattttatatctctatgtttttattttaaactgattccatcttaattatttttcaattataactggtttctgacttattgtgtgttatttatttttagtcattttgttgttgaaccgagtctattttaatttatgtcatctggttttgtaggattttaccaatttaacctataccaacaaaacttattaatatcaatatacaaggtcaaaattgacctttccttgtctaacttagctttagacaataaacggcaacgtttaaacaacacgacaccaactcttgtgtcatttggttcccagggttaaagactcttcaagaacttgctcgattctaagcacaaaacccagaatcgcacccacacacacaaatttaggtttagaaaaatgaaaaacaaagtaagggagagaaaacaccaagaaatttgtttcagagttcacccaaaactgggctacatctctgtcaagctcatctcagagattttagcttgatatccactatcaataatgtcgatttacaagttttggagcttcctgtcacataagatcgaccaggtaaactcagttttctcttttgtacacttttgcttttgttttctttctaatttgttctcgatctaactcagtttctgtttgttgtgcatgtacttccttccctctgattcctcaccacgagaactccattctcgtctctggatcttggagctgaggtcttcagaacactagggtttactccttctctctctctct

SEQ ID NO: 356849 - DNA, 561 bp, Cannabis indica
aatcacaaaacaccattaaagaccaatctttgagttacaaaactcaaactttgttagaatcaactaacatgcaatcaaactagattaaacctacatagtcatgcataattaaccctcagaaaatgaaatctaccaactacaacaagcaaataacagattcacacatttctttaaaaattcatgtttttgagctaaaaattccaagcttgaaacaaggaaaataacatgcgttactaacagcttaattaacttcaaattaacatgcttacatctctgaaattatcaacaaaacacagcagcaacaacatagcaaaaatcaagcatgcattaaactattttcatcaaaattcaacaattttttaaaagaaaagaagaagggctaacctagcttgaattgaaccttaaggagagatgaaatcacaagcaaaatttcaaggaaaaggccagctccttgctctccaagagggccgaaagtgaagaggaaaaagagagagtgttttgaaaatttttttctatttttttttaagtgttgattttttgtaaaatgaaataaaagctact

SEQ ID NO: 356850 - DNA, 517 bp, Cannabis indica
agaaaagaagatccagattcagatcttgattatgctctgctacagaaagtaatcaagggttagagatctgaatggaaggagtcataatattctgctgcacccactgtaaggttttctaactttatatgtgtttattttcattgttttagaattcatattaggttgtcaaacaaacatacttgttagtaaatctagatccttgtaaaataatttccaacacgaagcactcatcaccaagacttgtcttattttatccaggtatctgcgttttgatcaaatttcttcgataggaatttccttgtggtcatcacacggcattataattccctctccaaatcctcggccttctctgagttcttcatccccttccagttcttctttaaacatgtttcttttttttacctttctagaattttgattactgtttggtttcaacattattttttcaaattttgcatgcttgccttgagttgttgatgaataggatctgtaaagtccttttttggcaagttaggtg

SEQ ID NO: 356851 - DNA, 971 bp, Cannabis indica
ttcaggaatttaaggtgtatgcgccgtcaaggacaaggagtcatattgccagttgatcctaaaattaagaaaacttgtaggagaaacagaaggaacaagaggcaagaaagagttttagcaattgctgaaacacaagaaatcatggcagagaatgctaacgctgctaataatggaggcaacaacgctaataatggaggtgtcgttgaagatcaagcaaatggccgcagtctgagagattatattcttccaactcttacgggggttcagtcttgcatcatgccgcctgtcatagatgccaacaacttcgaaattaagcctgcaatactccaaatggtgcagtcttcagtccactttggtggaatcccctctgaagaccccaatctgcacttttcaaacttcatggagctatgtctgactttcaaagtcaatggggttagtgatgatgccattcgtttgagaccttttccattctcgttgagagagcgagccaagagttggttgatctccttgccaccgaattctatagcaacatggactgatttggcaacgaagtttctatctaagttctttcctacagcaaagtgtgctaagctacgaggagagattaatagtttctgtcaacaggatagtgaatctctccatgaggctcgggagatgttcaagtatcaggaagtgtcctcatcatggtattgagaagtggatgctggttcataatttttacaatgggctggtgggtaacactagatcacttatagatgctgcagcaggtggtgcatttatgaggaaaagtgcaaataacaaggcctatgatttactagaggagatggccctgaataatcagcagtggccaactggaagaagtcagacaaagaaggtggttggtatgcatgaggtagatgccattactaaattaacagcccaggtagaggccctaacaaaactgatagctgtgcaagcaaaacaagctcagg

SEQ ID NO: 356852 - DNA, 745 bp, Cannabis indica
atttcatgtccttgacttgcttgatgaagtgccttgttaccgtttgctggtaggcctccagcttaaggttggcttgatctcttctttcttctatttcattaagggattcaaccaacagtatgttttttgtatccttgtcatagttcatcctcttgtgagacggtggcatcagctctacaggcaacatcggctcatagccataatctagcatgaatttggtttgcccggcggccgtcttctcactagtgctatgtgaccataagagctctgggagtagttcgggcaaattgccttttgcctcttccaggtgcttacttcaaggtgtccttgagtagtcttataacagcttttacctgcccatttgcctgaggatgggccatggtagagaagcttttgatgatgccatgtttgtagtagaaatcagtgaacatgtcactgtcaaactactttccattgtctgaattaatcttttatggaagtttgaattgacatatgatgttcttgacaatgaagtcaatgaatttcttgaaggtgattattgttaggggttcagcttctgcccactcggaaaagtagtctatagcgactacgacaaaatgcacccctccttttcccattgggagttgaccaattaggtctctcccccatacttcgaacggtccaaggagactgcattatcatgagctcattgggtggagctctaaggttttttaagaatctctggcacttgtcacatttttttaca

SEQ ID NO: 356853 - DNA, 563 bp, Cannabis indica
aaatgaaatttacctaactttgatattgcagaaaggatgatgcagaggtacgaaatcgccggtggtggaaggggctggcgacgaaggaggagggctgaaatcgtagggtggaaggggctggcgatgttgaatggaggaatgaaagtggtgaggaatggctactgttctggtgaggaaggttattagagagggtatattgggaatgtgacaaataaatgaaggtataaataaaatagatagataaggaaggtaaaaatgaaagtagttaacccaaaatgggtataggatgcaatttcctctttatttttagaattataaatctatttatataatgaaacacggttaaaaatttactgattaatgttgtcgagtgaatttcgcaacaccaaactatatagtattactaataatcaataaaaaatttaggtgaaaagacaaatgcgagtattcaatctagaatggcgagtactcgactggaaatgagaaacaatcaacgaaggctagaaaataacaattaaacagagaattatagtggttcagttagattatgatctgcttagtcc

SEQ ID NO: 356854 - DNA, 707 bp, Cannabis indica
taagccatatttctactagtatttgatatttttttttatctcttctccaagatagcattttctatgtttagccttttttttttgcctagagttattgtttgtaattcattttagccaaaaaaaaaaaatcaatagctaaatgtataaacttatttttcaaaaaagaaaattaattaaactagcagtgttcatagaatgcctaattcatgaatccaatccacacgatcaaatttattccattccgtaaagtgcatatatccacacttgtgcggatcagatgctaattcacatgtaaaagtaatcgatctaatctaatccacacatatttatatataattttatgaattatatatacaataaatattttaattaaaaaattgtactttaaaaaacatctaatacatatgatacaaatatatttaaaagtttaataaattaaatgtatattttatttttatttttaaacaaatataatccaaaataaaattaaatattatttagttatacatatatttttttcttcttcttccttttaatttgttgttttttttattaattttaatttgttgttggagacataagactacaatataataatttgatttattttgttgttagtaatatgagaaaaaaagttattttttcataattattattaaataattcaatattaaaaaataacgaatttaaaatatttgatccaatcc

SEQ ID NO: 356855 - DNA, 762 bp, Cannabis indica
ataaaaaaaaaaaccctaaaaaacgattgtatcattcactggcttatgttttaacatttaaaattttaaatagttttaattagggtaaatagtgatataagtacccaaaattttaagtttgtaggtgacataaattcaatgatttttttagtggtgtaagcaccatatatttataaaactgtaattttcctcttattttatcagtatagactctgttattgtcttaaatagggcacatataaggctcaaattctaaattattgggtctaaacagaaatatgcagtatcaattacttttgaatcttcttttaatacattcaaaatggagtctgtactgacaaaaatagaaaaaaaaattatagttttataaacattaggtatctatgtcgctaaacaaaattattgagtttatgccagttgcaaactcaaaatattgagtacttatactactatttacccaaataataataaaaacaacaaccaaatcttaataataaaataaataaataaaaataaatacaagtttgtaataaagaaaaaaattaagatatagaaacaataaagagaaagagaaaaagaattatattgtacccactttactttatctattttagtttttaccttcatttctatattctttataatatacccacttttatagatgatggccccattatacctcttaagttaatgtaaatcatgtgctacacttaagtagaggacaaagtagggctgtacaaaaaaatttgtaaaccgcctaaa

SEQ ID NO: 356856 - DNA, 857 bp, Cannabis indica
tgcatgatccccacaaaagccttatgaatctatctgatgatttcattcgcttctacagggagaacacaccgaagtaggggcatcgaataccctcttctatatagtttgccttcaattatggtgtcgcgaggcactggatacaataattttttcacctcatttttgtcatttggaagttgccggtcgagtaagtaactgataataggagtcatccatgcaggagaactttctatcatcttgatgtcttccgtttcacatatgcctggctcgcttagtatctccactagaactaagtattattcttccaagttgttttgcgaggccagttttgctaaggcatcggcgttggagttttgctctcttggaatctattcgattttaaagtaatcgaatctttcgaagttctttcgaactttctctaaatagttcgctattttcaaacctttggtctggtattccctgaggacctagttcacaatcagttacaaatcactatggcagatgaggtttttgactttcaacgcctcaactatctttaagccagcgatcagggcttcatactcagcctcactatttgatgcgtcaaattaaaatctcagagcatagtgaaacttaaagccttctggtgatattaatattaccctggcacccgaaccctactcgttgcatgcaccatccacatataacttccaagtttccgcatctcgttgaacaggcagaatttcttctggagttataccttctatcaagaagtcagccaaggcttggcccttgatggatgttcgagggtggtatgttatgtcgaactgccccagttcgattaactattttatcaatcttctagaagcatctagttt

SEQ ID NO: 356857 - DNA, 636 bp, Cannabis indica
gcaatctgtgaatcaacgaacggagtgaagatccctccgaatgcttgaaggcaaaaattaaataagatgaaactcgtagaaaaaatattaatgacagagatggcatgcaaactttcgagcaaatctggtaatgattttttgacggagaagctgaaaaaattctcagggtttctaaaatgaccaatgtaaagcaaaatggttcctttttccattttatactcttgggttaatctccggtagatcacggagataattgatcctacgggtagaatttgaaaaataagtggaaaagatggttattaaatgttgatgtacctcaaaactacaaaaccgccaaaatcagaggacatgcgttttttcaaaagggattatgacaaatatactctctgtaatcatttaaaaagcactttttattaaaaagaacattttaaggggtaattgttatacctgaaatttagctagtcttcatagaaggacacgtgtcaacttgggagaatacgaatcaacaaatataatagtaattatattaaaagatgttaaaatagaatactcattaaatactgaactggtggagtatatctataactcgctgactgtagagtcttggacgagacacagatgtacaaactattaatt

SEQ ID NO: 356858 - DNA, 809 bp, Cannabis indica
gaaattatttatgataatgcatgattaaggtgttttatgaaatgctgagattgttgattatgtatagctataaatactcttaattttgtaatgagttgctcgtatagacgttgaattgtaaatatacgttgaaagagtgcaatctactggtatgaataatctgttgaaaagaaatctactatcactttccataattttcttttgtctaatagctttcttgctgagtcattatgactcacgggtgcttcatgatgcaggtaagaagattagcggttctttttggccacgagtcagaggtctcccagcaatgtacatatcaatcgtgttgtcttggcttccaggaagcaggatcacccctttttctatgattggatgtataacctactcttgtattaatggttttataattggttataaaagaattttattagcaggggatccccatattacgacagtattttgaactaaagtttctattttaaatttaattaaagataatatatttttttttgaattaaaccacacttttcctaaactaatagattattgataataagattataaaagcacacacgtggcgttcctgaggttcagggcgttacattaatcaacgaggttatcgaaaatcgtgaattatttaaaattttgcttatttaataaaaaacgtaaaatagcatacaaataaaattatgtgatcccaattacaaaaacatttataaaaatttaactatagatatacaaaagtctatcgtctagatacaaatagaataagccttgatgtcccaaaaatcgtacgctccaggcctaac

SEQ ID NO: 356859 - DNA, 1108 bp, Cannabis indica
aagcagtccctgttgagacattgtttggtttacctcctaagcctggtttcaacaagttcatttcctttcgggcttcttccttccgaacaaacacctaagctctctcattgaactcagtgatgtttcttaccaggcgtgcttgtagatcatcccataactcgcccctagcgattaatggatcagtggagatcctcgcccgaagggctgtaagttgcatgttatcatccaagtttctaaccatagcggcagctctgctaaaacaacttaagtaaaccttaagtgttttgtcaggctgctactttatattggttagcgaggctgcttcgggtcgcctatccctagcggcttgaaattgcttcttgaaatcgctggacagctactcccaagaaattattgaatgacgagtgaacttgttaaaccagctacttgctgctccaacaagcgaggtggggaacaaaatatagcgtaaatttttcctcacgttactcgctcgcattatcctattaaagttatttaaatgcgagactggatctgtggttccgtcataggacgagacatgctggtttttgaatcccaaaggaaaacggtattcataatatctgggtgatacaactctagttcctcgtcagatttgtatcaagatgatttccctacttcccccacttgatatctcctgaacatgtcctccaactcatttatccgcaattggattggatcctcttgctttggaccaagctgttggcgaaggtcaggttaattccgattcaagtgtttggttttatgccctaaataaaactctatttcaatgtaatctttatcctttaaatatcaatatagaaactgaagtatttttcatcactttgtgtgtcatttggttcatgttatcatttacttgtttatctgatttataaattcatccaaacccatatcacatttgtattcttatttattgtgtcgtcagcacagtggaaagtaatcaagattatgtgattaaatatatattcctaaatttattagtacacagggtttaactgatatgtgaatctacaacatagtttacttgcaccttggataagtgctatgttctttccaaagcattggttaaagt

SEQ ID NO: 356860 - DNA, 395 bp, Cannabis indica
atcgtgaagaatccaaattcaacagaaggacattcgggctcagggtaaaatatttccaacagctttgagattcaaaactcaagctcactcaactctcactatagcagctaacactcaaaaacaatagccacaaaaaagttaaaaacaagctcccaagacaacttctaaacaaaccaaaccctaacagaaatgaaacctcaaaatcaattctcaaaaccaaccttaggctcaaaaaattcaaaaagatgaaggagctagggtttaccttcagttctaccaagcaatcaccttggaattcgttgctgaatttctcttgaaatggtttgaagttgaaaaagggttggggttcttttggtgttcaaaactgagtgagtgagagagagagagagagagag

SEQ ID NO: 356861 - DNA, 811 bp, Cannabis indica
attattattatataaaaaaattataattaaaagtctagaaagatatctttaaaaaaaagaaaaagaagtaaaaatcatggaattgtggtcttatgtacaaaacttttttttttttttttatatatatatatataaaaagtttaatttaatcttttgcacatgactcccaaaatatttaggccgatattaaggaaggtcctaaacaccgataatagtttttagtattcttttaatataataactacttaaaaaataattttttatatttttttaatttagtaatcaagtaagaattttattactgaaaatgtatacaatcaccaattacacagccgcaaaagcctatgtacaacgttactatgagatctaatcaggaccgaccttagattcaggtgggttagatctgcatttagagctcactcattttaagggccaaaataaaaaaaatattttttaaaaatatacatatttattttaataattattaaaaatactatttatctttataataaaatctaaaaaaaattattttaaaatgtacatgttgtttatcagtagttgatcagttgatcagttgatatatattagtaaactgaataattgtaaagaccgcatacgaataatacgttgaattatttaataattaaagtttatgtatgagattttattattatcaataatattatgattatgggaatttatttgagcgcatatatatttatcatgctatttatgtaatttctccattgttgtgttggtgttcggaagcggtggacagcggcgttgggcctttagagagtcatatgttgta

SEQ ID NO: 356862 - DNA, 538 bp, Cannabis indica
aattactaaaactctattatagaaaatacttttttttttgagataaaatgctattatattaaaacaaagggttaaaatacaataggcataattggcggaggaacttcctccaaccatgaacatttagttcccgccgaaagagcatatctagccagcaagtgagcggcattattagcagatcgataaatatgagagacctgagccccagggaagttggaaactaaaagggaaatgtcattaagcaaactatggaaatcagaaactagctcctgcgaagataataaacctttaaccactgccaaagaatccgtctcaatgaagtgcactggtagttgaaggtctttgatccactgtagactatgcataagagctaaagcttccataatgtcgggtttaaaacagcctttgaaggggcaagacattgcagcaataatgtcaccagagctatttctgagaacagcaccaaacccagacatttgattccttgcgttgatagcagcgtctgtattcagtttcaggcgacccgaaggaggattga

SEQ ID NO: 356863 - DNA, 640 bp, Cannabis indica
tctcgtttttgccatggcgccagttgaggtagctgcgagaaccaggagctagagagagaactgcagacggtctttctccgtgctatatgtagaagatctttctcgagtttatcaacccctcttgtatttttcgtttaggaagatggcttaatggtttgccctagtggcatctttgtaaagacaagtttataaaccaacttgggttttctcttatcttaaatgccttgtactcttttcatttgaacctaatgtaattgtgtttgcttgcgtttttattcacaatgtaaacaactatattttgatcaaatgtaaagtacttttaggtttttccattgcttgtaatctttcctgtttaagtaggtagttatctaccaaacttcttaactttcgagcagtttccaattctgcctcgctatggcagttataatctgccttaagcaaacttgaatatacttttaatgattttatcactttgtatattttctatttgctagtatgaatagttagattatctatctattttctaggttcaagtacttttatcaagacgtcttgatgtctcgtttagtactttcctagctcgcgcaaactgttaatattcagctttatacgcgagttatgagttatatctcatttataa

SEQ ID NO: 356864 - DNA, 686 bp, Cannabis indica
tcaccacttctcaaatcccgaaattggtggttcggaatgagtccacaacaccacttccagaaagtatccaacaattgctcatccggtggcgccaggggatcaaacgtcgaagaaggcctctgtttcttcttcatctccgtgtagtcacggaaccatacaggaggatttctcttcctcttccgactcttaacccctgcaggttgtgcctctatcgccaaaatgtcaccctgggactccctgtcatgtacatggataacacctgtatcgatgggagtcactggagctccctcataaggatcgtacccgtcagggaagatctcctcctcttgtagtgggggtgatgcagctggtagtagggtagatggatctgctggggccttcggtgctgaagctgtcgttggcggatgattcaacatagccaatatgttttggagctgctccataatcacgttttgaccacccttcagctctacatggctggtctcatatgccttcttcagctcggcatgacaaacgtacatacccttctggtcagcctcaatcctatccaacctccccactaaatcactgtactcggcaccacgaacgcctgatgaagatggtgcactgggctgagggtctgaaccagtggcctgaacaaatatataccaaaaaaatcggtaggcatacaataattccacaatgta

SEQ ID NO: 356865 - DNA, 661 bp, Cannabis indica
cgtcacccttcttcttttcctctggcttccaggccatggaccgcccggagcttcttacagagtgggtcaggatcccatctcacatgcggaccgtgcctacccgattgttcctccagcgggccaagactttctccacttacgacaagaaggccctcgacgttggggagttggtcacgacggagaactgtcgaaaggccaagctgatattggagaatcagtcggtggatgactttaatatctccaaggtcatctgcctgaatgtgaggactccggctgtggaaagggcactccaggtggagataatcgcctcggcggaggaccgataccagaagtacctctttaagagggaacaggagctggcctacatcaaggcccaggcggcagctgagaggtcccttcgtctggaggctcctccgtagcggaggcccctaggcccaagcctgtggtcccggtccccaatactggtgcttctgcagcagcacttcaggttctggtaagtctcctttaataatacattatgttcctcccgtctgagagtatacccaccttagacctatagggttcgatgaacgccttcataggtttacaatgccttctacccggtgggggaatcacgccaaagaatattacttttcccacttaggccattttttgggtcgat

SEQ ID NO: 356866 - DNA, 1105 bp, Cannabis indica
ggccggccggccaaaaaactcactgatctcgagctggaccgagcacgcgaatcatccttcactcccaagatcaacgtcttggagctaccccttaagttcaaaatgttgacctggaagatgtacacatggaaggaggatcccttgtcacatcttaaatattttaaaatgcaaatggatttgtaaggggttcgaggtgatgtgcgatgtaaagtattccctgccaccctttcagaggccgcacagtagtggtattttaagttaccaccaggttggtttaattcatggaaagccttctcctcagaattccatgcgcagttctttttttctcgccaaatcccattacatttagaagatctggtcgaagtgaaacaaagaccaggagagcctctcagagcctacataagcagattcatgacataaactacgaaaatagcaacgttaactgaagaggggaggctggccaccatactgggggggcattgatatacttggagaactatggaaagacataaagaaaagtggccatggatctatggctgagttcttagactaagaagatggatttatcaagctcaaagaggccattcaacgagcaaatgtcgaacctaggctgggctaacactggtcccctcagcatgagcacccgctcaaagcccgcaatatcctagtggctcgactttgagtgataaaagatccaataacaacgacatgcaagggaatgggaagaagagaaagttcgcaagcaaagccgaacaaaccctagagaaaatgcctccaaatttactgccttctctgtcctaactgacgacctagagacaatctacatggtaacccagtctatggtcccatacaataaacctgttcccatgaaaaaggacataagcaaaagggacatgtctaaattttgccattttcatggagactatggacacgacacgaatgagtgtaacaacctgaagctggaaattgaattcttgataaggaaaaataacctgcatgtgcagaaatacgtcaaggccgatctgaatcaatgggccgcccaagcagataataatcaagacctactaatgcctccactagtggacgggcatttacaagtcattat

SEQ ID NO: 356867 - DNA, 851 bp, Cannabis indica
ttgattttaaaatatagaaaacctatttgtctccataattactatcatctcatataacatacacataatattaatatacatcacaactatatatatgttacatatctcgtataacatatagtcatcataatatatatcatctccacataatatatgttatatatgtattatatacataaatattctcatcataaaatatatattatcatatgctcaacatatataatatatatatataattcatatacatgttatatattatgcatatctcacatatacatattaacatgtaatatattcaaatatcatattatttatcactatattaatatgacatatacactcatacatatataactcatatatatacatatatttcaatccatatctcaatataaaaaaatatgtgaatatataatatttactattataaaaatagtaaataacaaaatatcacaattcttacccttgtattatcacatgttgatttcttacctttcattgaagcaatgtaggaaaggataagcttttgacggttggaaaattattgtgctccaatagaaatatcaaaccaacaagattacaattctatgacaaataattaaaggacaaaacatatataaataatgttacaacactaaacaaaatatacgcataaaataagaatagagatgaagagagggattacaactcaaagcaaaaagctacacatgagacaatatataaattacatatatatatataagagatgtgagagcaatatcaacaccgcatacaccacaagtgtataataggggaatcacaaaacttgaacaaggttttacacttttgtccaaaagcttatttcccct

SEQ ID NO: 356868 - DNA, 761 bp, Cannabis indica
gttagaaatgaaaaaccatagtttcgtctcactcgtagtcaagaaagaataattttttattactttatatgaaactaataaaatggcgggaactaattgtaaggtgtatttgactttaaattttcattcatcctacttgggccattagagtcgaacccaatatgaggcccatttaggctctcaagcccctaggccctaactcataaatagaaatgggataattttaaaagaaaaattttatttacaccccaacaatttctaagtacaccttattttaataatttttattttatataaaatttatatcttttattgtactaagtatttttaactttcttctttcaagttatattcttaaaaaatatacctatcaaacaaaattaaattatatttttaaaaattatgacaaaaaaattaaaataaaaaattatatgaaattttcttagaaaaaaataaaaaatatatatatactgagttagaaaaaattataaaaataaaatcaaaataagtattaaaattaacataaaataatgtgaggaaaaaattttaaaaaaatattaagagtaattttttaaaaattatttaagtttatatttttttttaataatggggtgtatttataatttcatagggtgcaaatataaaaaatacaaaaacaacacaaattacaaaaatactgtacaaaaattttaatatttttacgaatttttagattttatttacatagagtacagtcttttggagtatttttatgttgtact

SEQ ID NO: 356869 - DNA, 1082 bp, Cannabis indica
gatatttggtaagatcaatatcactgaaaagaaaaaaaataaaaaaaaagaaaaaaaataatgaaattctagtgaatgttgggaaaaagaaagaaaaccaattttctacaatcatggttagttagtgttgtgggaacactttgggaaatttgaaattagaagaagcttgtgggttatttttgtgcttatgatatctttagccaaaattgtttttcattttccaaatatctaagccatactttctaaacctcaaaaagccctattgattctgaaaggatgttgtcaacattagtggagagaggtaagcatgcaagcatatgagttatcgggtagtggaatggttggaaagagtaaaaccattataacattgtttcgattgtgaagtcatcttgtgtttgtgcagtatgtgacaaactgagcatctaaattaattgttagagttggtggaattgaaattctagtttgagcagtggaagaaaacagaacatgaggcagtagtattgtgattatctgatagcgtagttagtggattagtagttagtagtatttatcttactcgagggcgagtaagaatctagtttgggggaatttgttaggctaaaattagtctaagtttcgggtcgtattttcggttagttttcactctttgtttctagttttaggactattttacgcttgattcttttgtttcaggtcctcgggtgtttaaagaaagtatgtacaagaattgaggacaagtggtgaaagaatcgagaagaaaaaccaaaaattgtgtcgctgcctgttccagtcgcgacggggaacatgccagtcgcgacgggaactggcagagaaaatcttgaagtttcaaagtttaaccctgtcgcaatggggcacattgcccatcgcgacgaggaccccagtgacgggatttttgggcagttttgtaattttacgaattttaaagatgagacttggtttaaatagaaagagctcgtgaaaattagggatgattcagatttggagccctagaaacaaaggaggaggatagaagatcggcttgtggcgacccgaatcaattgcttcaactagttctttctctt

SEQ ID NO: 356870 - DNA, 702 bp, Cannabis indica
ttactttagtgataccactactccccctgatattcttttaaacattaccctagtaatgtccccgcttcaaacctaaattgggccccttacacccacagaataatgactcttatacaagagtgcatcaccttagctacttcctaaactgacgactagccctacagaccgatccaagtgttttcaatgtgctctattctaactcgcacacttcatggggaaacttcctaaatgtaatcaccccaagtcaaggacacttaactgtgcagttcctttatgatgggctaccaaaacaggatactttttgctaatataggtagtcccaaataattcattcaagtcctcaacaccatgtaatctcgtgcatacataatctcaaaatcactacatgcagcctttccccaggcaacgtggattatatagctcctggtctttccttcgcggatcacgggactctaattgtcacagcttgactcatgccctctggtagtgaatacatccactcacataattgtcgcctttaattcacctggggtttcgaacaatactcataatttgttccacttatactaacactagatcactttatattaaaagattctgttctccaaatcaattagatggatactcccattatctactcagaccctatgttctacttgggaatatcaacaaatttaactcatattgccatttttctaatct

SEQ ID NO: 356871 - DNA, 511 bp, Cannabis indica
attaaattatatgtgatctgatatttaattacaccaacaagcgatatgacaacaaaaaaagtactgcgcactacgagtaccttttagcacttctcttaatttaattctgaacttctttttaataataacctgttagtaacctatattatagcacgtcataaaaaatataaccattatagttatatttttaatgtaaccattgaatagacacctctctctatatataacacatatatttaagatctgatttatcttaaaaagaaagaaaaaaaatgatacctacattatatacgaaaaatctataatacacccctcaaatgagattgttctggtacagctcctatttcgtcattcagaagaatatataccattatagttatatttttaatgtaaccattaaatagacacctctctcgatatatataacacatatatttaagatatgatatatcttagaaagaaagaaaaaaagtaatacctatattatttacgaaaaatctataatacaccc

SEQ ID NO: 356872 - DNA, 1240 bp, Cannabis indica
atcaaggaaagattggtcaagaaaattagatgatgcattgtgggcatacagaactgctttcaaaacaccgattgacatgtctccatatcggttggtgtttggaaaggcttgtcatctgccggtggagttagagcataaagctttctgggccatgaagactcttaacatggaattaaaagctgcaggagagaaaaggctactacaattaaatgaactagaggagttttgaaacgaagcctatgagaatgcaaaaatctacaaggagagaactaagaagtggcatgacaaaggtttagtaaggaaggagtttcaacctgggcagcaagtgttactattcaattcaaggttgaagctgtttcctggaaagttgaagtcaaggtggtcaggaccattcacagtagtcaaggtgtttccctatggagctgtggagttaaaaggtgacggtccagcaactttcaaagttaatggacagcgtttaaagctctacttgggaggtcaatttgaccaagccaagtccgccattattctggcgcctctctagacacagctcagcgtccggctatatgacgataaagacagcgctcttgggaggcaacccaagtgttttctttaatttttcagactttttgattatgttttagttttatttattttcaatttttagctaagtaccaaacattattttttcttgttgaatcgtgaaaaacgtgaaaaaaaaataaaaaataataattttcgagactgggaacccagtggtcgcgacgaccatgttcctgggtcgcgaccctttttggtagtcgcgaccctggtcgcgacctcgggttttatagaaacgagaaaatttgtatgttccaaaagtcgcgacttgggcctttggaagttgcaacccttttttccaagtcgcgacaccagtcgcgactagccttttttccagaaatgcctaaaattcgactctaagctagtcgcgaccagctttagcccaagttgcgactagctaacaggatttctataaatatcctattttccccctcattcaaccctaaacccaattcaaagtttttcaaattctcctcagccgcccaagccattctctcttccaaaaattcaaattttcatcaccaatcttcaattttctcatcttttcttcaatttctcaaacccaatccaatcaaaaatccaattttactcatcaatctacacataccatcaaaaaccaccccaaaaatcactcataataccc

SEQ ID NO: 356873 - DNA, 583 bp, Cannabis indica
tgaatggacttaatgaatggatgagttcggcttagctagatagatcgtacagtgcacgcgtgactggtagaaaggaggattttgagtcagcatcgcccatgccttacactataatatatgaatttggatcaatatagaatcgtgtcaagttgtgtctctatgtcctgatctttagaccttacacattcttttttatttttttctttatttctttttactgtttacattctttggtattctaacattttaatctacccccacttcagctacgataggtaaatattaaataagcagtacttataaaatctctaacaataaatgaagttcatcacattttttagttttcaaagttgaacaaccactttattataaatataaagaaattaaaatgaaactcttaatggccaattttatgtaatcctaaaaaagacttaaaagacagatagtttaattattcttacaaattgagcaaaactctaatgaaaatctaaaactaatctagagataccctgcatatctctttgcatctatagtagttcattcaagaccttgatggaatagaaaagcaaaactttccatatca

SEQ ID NO: 356874 - DNA, 633 bp, Cannabis indica
catgggttaaaatcagatcattggatctgttaacaagttaaccatgccaatttagataaagcaataataggttttataaaacttacaaacaagctgaaaacacatactcctacaataagttggatagtttggaggtaggataaggatttatttaattttaagttaattaatttattaaaaaaaattcgaaaataataaataataaaaaaatattttcggtttttaaataaatttaaataataaaataaattaaaaataaaacctacaattttgaaaaattaggtttcaactaacctaaatatcatttcaaaaaaaaaaaatgctaactatcttttaaatttcatgttattttgtaaattaatattcaatacaataaaatgataatttaatatctttaatctcattttataatttaatttaaataaaaaaataaaaaaatttaaaagttagcataatatcctatctctattcaaaatatcaagattataataatcttattttaaatttaaataaggtcaatttatttaaaaatagaataattttaaaaaaaattaatatctgaccttaaattttaaaataagataaaataatcaaattttaaaaataagataattaattaagcaaaaagataga

SEQ ID NO: 356875 - DNA, 585 bp, Cannabis indica
attgataattaaatgataaagattacattgtaatagagttttctttagggcacaaagcccaacagatatcaaggtgttgagattatttgaaatgcactttttgttttatattagtgcaagtgggagttttttttggggggttttgtgccctaaataaaacacattttaatataatcaaatttactaattaatataagatcagaaatcgtttttatgttgtatggttcacataatttattttatgattatgtttaattaagtcctattcatatataaatatatatatatatatatttgttcatgattatagtgttgtcagcataatagaatataatcatatgattatatgttcaaaagtttaattcttatgatttgtcagttcagtgaatttagactgacatcataattggtgataaggtatgcttacaccttggataagtgtcatatcatttccaaggtattgggaaagtttaccagtatcgaatgtatagagtatacattggaagggaccgatattgatcttggttaagatatcataaacttaccgatatatttttctaagtcaatatcaatggttgatcttag

SEQ ID NO: 356876 - DNA, 737 bp, Cannabis indica
aaacttattttttattacatttccaactaggttgcttgtagcttgaggattgtctccaaaagtaatgtccaatgaacatgtatgtgtatgctctatttttcttatgataaacatgtcaatcttgccatgttttgatgctaagaaagtccagttgtagtcatcatcaaaatagactagtttatagtcaagttttggagatctttttaccttgaaaggttgattgtattttgttgagtgaaggcttattgcttgtttaagagtttccttatttgcaaacacttggccaatgtgtatttcagcaacatgaggatttgaaatcagttgatttggttcgtagctttcttccattgatttttgagtttgttcaatcatatattctgccatctttcttgcacattctgttcttgttggtagcagttctcttgtttgtaaactagtttccccaatataggtatagttgattctagcattgtgttctgttgttgatgttgagatgttaaccaaaataggatatttagtttcatcatcattttttcttcgtatttgttcataaaacttgcatccaccatcatctttgaatcttattggaggtatgtcttctcttacttgaaattggagatcaatcttatacttatttttgtccaacttcaaagcttcgtatattatgggagaaagttcataatgtaaacaatcagatggaattagtataccttcaacttcatagtcaacgtatgttg

SEQ ID NO: 356877 - DNA, 687 bp, Cannabis indica
tatttcaaggggagtgggacactcccagcctaaaagcctaaaatattgtacaaaactttaaggctagccagaattctgtaagaacttggaatcaactaaaagggggcaattccaagataattacaaaattctttgaagtactttctcagggggagaattactccaaccctgatgtgctcgaggctccaagaacctatccaagacgagctactagtactggcctcaccacattcctcacgaataactcgttctggtagaaagcaactgaattctccaggagcaaaagatctaatgcggcatctcgtctctgcgtaatgccacaagtttttaatacacctccaacataatctccgatggcccgtactttagatttaatgagctcggcttcaaaagtcacagtggtgtcctgtgggatcttttatttacacctccaacataatccactagtggaaatgatttcaaaatcaaggtcacttgatgaaaaagtaacagtgactttgggtaaaaacaaaggtttagctaggggaatagaagataaagacaaaggttcaggccaggctgcatctcccaagtaacaacgtttacctcaattatctgttgtagaaaatgcctatagcgactagaaacttcatcctgatttgtttttattaaatggtccctattttttgcatcatttatctcaagttt

SEQ ID NO: 356878 - DNA, 521 bp, Cannabis indica
tctggccgtctaccgtttggcccgaaggtacctgtggccgtggattggacggctgaccattgtgagtttgggcagtatgcccaacatcatactcttctgtaacactcagagggatactagacgcggtaactggctattgattgacgacttggtaggccctccttatcagtacggtggcttgcctcgtacgatcatcaatggctgcttgttgagcccttaaagtttccatcttcttgtccctccattctataaactaacatttcttctcgtcgaatgtaaagtttatatcgacacggaggtcctcctgatcatggtgcaaagcgttattatgatcttgcataagtccaagggctgttcggaggttttgaatctcagtatcctctctgactgtcctctgagcattagtgggatgggactttgagttgggagtggattgatcggctgttgaacttgtgttccaagtctcttgcacgcatcgtgtgatcccaaccagaggggaagtcacaccatggcccacagta

SEQ ID NO: 356879 - DNA, 519 bp, Cannabis indica
gatatttgtgttattgtatttatcgacaacatccttgtgtactcttaatcagaagatgagcatgagcaacatcttcagatagttctgcagtgacttcgggagcataagttatatgccaaattcaagaagtgcaaattttggttgtctcaggtgtcttttcttgcacacattgttagtaaagatgggatcaaagtgaatccaggaaagatagaatccgccagggattggccaagaccgaaaacagtgatagaagttagaagtttcttggatctggctggttgttgtcgtcggttcgtagaagggttctctaaaatttcaacacccttaactgagctcaccaaaaagaatcaacgttttgtatggacggataagtgtgaatcaagttttcaggaattgaagtagaggttaattacaactccagtgttagctcttccttctgacagagagaagttcgtggtttattgtgatgcatccagacaaggtctgggggtgtgttttgatgcaagccgatcaagttat

SEQ ID NO: 356880 - DNA, 744 bp, Cannabis indica
tttggagagcagttcgggtatcctcccaacttgtttgcaacttctcaagcgtcatgtggttattagccccatttttccggtatgtcatgaggctgaggaatctatttttcatgctctagtgagttgttcttttgctagagcctgttggaatagatctttggttagtatttctagttggtcagctgatagttttggctcttggtttcaatctctttcggcaaggatcaatcctcaagcattggaggaagcggcgatggtcgcatggagtatctggaaggcccgtaatgaggttgtttggcaacaaaaatcttctactgctgcatcagttgttttgtcggcaagatcactccttaatcaatttctttttgcacaatcacggacgacaaattcgttgtctaatagttcggtggggctgtcttcgcgtgtggattggactacaccaatttctgatcagatcaaggttaatgttgacagagctctatttaatgatgttagccattttgggatgggttgcttagcccgtaaccatgctggccaagttcttgaggccttcactactagcaggaggggaattgttaggccaaagattgcagaaatcatcgggatcaaggaagctttaagctggatccagcaacataattggcaaaatgttctgctggaaactgatagtttggtctgtgttcaggctatccagagtgagttgcatatgctgtctgagtttggtttattggttaatgattgcag

SEQ ID NO: 356881 - DNA, 917 bp, Cannabis indica
cttgctttggaccgagttattgggaaagattaggttttctgattcaagtgctctcgtagatccggtttggaataattacttgtgggaatatgttttaccaggatctagatttactaccatgtatgttgtttaacatcctaaataagaatttctaaaacaatgtgaattaaacacatataaagtttgagaaaccttacattgagtgtagcggaattaaaatgactccttccgctcagatctctaacccttgtatcctgtctgtagcagagtatcaccaagatctgagcccgaatctccttctcttgaatttggattcttcactaccttacacgctatgattgagtaccacttgatatgtgtgggcacttactctatcacttactctatcttttgatttgaagtcatcactatctatttataggaaaccacctacgtttaggcttgaattatttgacattaaaaaaaataaaataaatggtaaaatagagcaatagtggccggccacaggatgcgggcccccactttgtaattttgcaatttttccaactatttatcttattttctcaaaaatgccatttttccaattcaaccacttacatgccaaaactatttatttaataattaaaattaattatcaaataaaattgtcatttaacatatttattaattagacttaataaagtctcttaattaacgaataaaccctataatctcttttctttacaattaagccctagcttagtgaaaattcataaactagacatagtctaattttagaattatatttgattaattaaaatcaattaactgcgtcttacaagcagtattgtctcaagtagtatggggactatgggcctatacaaccgagcttccaataaggaaaactagaatttaccaagtaaattccttaacttatt

SEQ ID NO: 356882 - DNA, 605 bp, Cannabis indica
cactcctcctttgcctttgggaatttttccgatcagttcaattccccaaatgtcaaagggccacaaactttgcatctgagttaacttgttaggaggtgctcgaggtatcattgaaaatctctggcatttgtcacatttcttaacataggcctttgaatcttcaatcatcgttggccagaaataaccttgccttagaattttcttagataaactctgcccgacagcatgatttccacagaatttgttgtgcacctcagataggagtcgtgcagcttcttcttgagtaacacatctaagaaatggcatagagaatcctcttctgtacataattccctctactatgatataatgtgtagcctttcttctcatctttcgagcttcattccgattatctaggagttccccagtgttgaggtaggcgactatcggtgtcatccagtttggggaagtatcaatcattttgatctcttctgttccagtgatgctaggctctttgaggaactggacaggaaccaagttcgccttatcacttacattactgcttgccattcgagctaacgcgtctgcagttgtgtttctccttggaatttttctgagaccgtagc

SEQ ID NO: 356883 - DNA, 513 bp, Cannabis indica
cataaaaaatgtaaaaaaattaaagaaaaataatatattatataaatatgtgtttaattgttagaaaatatatatatgcatacacaaataatgtgatgttatgttcttttcctagtattaaataaactatgtcatatttttcatggaagcaatgaaagaattttagtaatgaatatgaggatgatgagagttataagctaaagtgggctaagctcacaattcaaacaaatattaaaaaaaaaaaatacacaattttttttttcttttacatatctttgtgattacttacgttatgagcaatgataaataatcccccaactaaatttgccaatgccaaagttacaatgttcactgcaaaaatgaaaaaatttgttgattaagaataaatattatatttggtgtgattttattaaaaaaatattaaatatataattaagggttcgtttgtaataccgtattaggtcgtattgtattgtattatattgaattgtattttatgcaatatttttatgt

SEQ ID NO: 356884 - DNA, 110 bp, Cannabis indica
gtcaaagcccaaggtggttatgagtatttcatcactttcattgacaatttctctagatataatttcctttacctaaagcaaaagaaatctgaaacgtttgaaaagtttca

SEQ ID NO: 356885 - DNA, 1238 bp, Cannabis indica
gcattgtagtcactggtgagactattaaagatcggtttaatgtgttcaaaaggagagataatgtggccaatagatgctaaaagatcgactaatcttttgattttgagaaggtaatcacacagggaaccttgcattttggcattttgaagcagagtacggtactgtactatgcgttcagcaacaccattttattcatgagtgtgtggacaagagaccttgtgtgtagtgccatgttcttgtaataagttggtaaaagcttgatattcacccctcaatccgattgaatgctttttattttgtgacccagttgaagctcagcttgagctttaaagctagtgaatgtggttaaggcttcacatttagttctaagcatgtaaatccaagtatgtctagaataggcatcaacaaaactaatgtagtatttgtaaccactagatgaattgataggggcaggaccccacaaatcagagtgtaagagttttaatggttgagtgtaattggttgttgatgtggggaaggggagtttatgatgtttacccaaacaacaagcatgacataaatttgaaaaaccaacacttgtttatggctaattttgatattacaagaagacaaggcatggtgaacaatcctagcagtaggatgtccaagcctattatgtcaaagagagtattcatcattgataggtagaacaatgtgtgtattacattgtggagcagaatttattgagctagagtgcagagtacttgaggatgaataaggctgagtagaaggagacaaggtatggagttgaatgacatcaaacttgtatagaccttgatcaagcctccaaaccagcaaggtcttcttagtatccaagtccttgacaagacaataagtggggtgaaattcaaaccaaacattgttatcatgcacaaaatgagatacacttaacaaattgttggtgatagatggaacatgtagtaaattgttaagaacaagattttttggctgaaatggtaaaataaaggatgtttttcctatagtatgaataggcacacctgaaccaacacccatttgaatttgctgatctccttggtagtcatgtgtgaatgacatgttctgagcattggaggttaaatgatgggtggctcttgtgtttggataccagctagagtcaccaagcatttcaggtgaggcatagagttgtgcagcttcagcaatattggcactcatgcaaaagattgcagagtttctggtcc

SEQ ID NO: 356886 - DNA, 729 bp, Cannabis indica
ttcagggggcatttttaacaaccttaaaagttcagggagcatgatttggttcatgtcaaagttcagagggcaaaaatcctaattagcttaaaaaaaattaaacattttaccactacaccaaacaatttttattatattttcttcttatttaaaattttatttatatattaatattttttttcataatttcggggccctgagcgttcgggggcccgaggcgcacgcctagcctgcctaccctcagggccggccctgcgggcgggttgactgagtttcgggtttgcaggtttcaggttcaaaaaattatacccggacccgacctgtgaaatggttcgggttcgcgggtttcgagctcacgagtttgcaggtttgcgagttcgggttgactaggtcaacgggttaacccaatcaactcattaatgttattttttttaaaaaaaaaatcaaattttatgtgattttttctatatatttaattaaacatataagttataaacttataacaccataatctatattcgttagattaaaaataaaataaaaaatgcattaatttcaagtttaaaatacaaaagtgaagttccaaactatacataatatattatatattgttatttttaatatattatctatgtgataaaaataaaatgattagattttagatatttttttatttttaatatattataaatgtaataaaaataaaaataaataaaaagtgaccgggtt

SEQ ID NO: 356887 - DNA, 723 bp, Cannabis indica
gactgatacccattaaatgcaccagatcattgacgggaagcgaatcgttgcctccaaaaagcaataaattttaatgatgattgtcataaatgcaacccacgtgcccaaagcacgtgccaggtaatcaataagatagccggaggcacctaagcaagcctcgtttacttcccaccaaacaaggctttggggttaaatgttgcccttaatttttcccaaaatacgtggaccaatgcgactaggacacgtggatctgagaaacatgactcttgagataaatcaactaagtatttttggatcaggagtatcaacgagaaaatacctctcagagaagatatgaaggctccacatactcccggaggtcagagccatggtaaggcacctccaggagataccagactacatttgaacagtcacctcgcatttaatgccgcatgggagaagacgtattaaaactgccataagaaataagtctgacggcgtaacccctctgttgcagctattacgctatgattaataagcctagggacagctactttatgaggggtcacatcaatcaagaagggataaaggattatatccacctaaccccctaagatacctatggtataggtcatgcatttcccattttgatctgctaggaatgtgtgcccctactgaaactacacaaaaaagcaagtagttcggtctagggatcactccagaaaaacactataaactaccccc

SEQ ID NO: 356888 - DNA, 556 bp, Cannabis indica
caaaacttctagactaaaagtaaaaaattgtgactaattataaattatcatttttatgttgtgactaaaaagtctgtggctaaaagtattagtcacaaaaattacaatttattgtgactaaatatgtttttagtcacaatacttcttgtgactaaaattaaatcaataacaacttatagctaaatactatattttagtcacaagtaacttttgttgtgactaaaactcacacttagttacagaaaacttatgttgtgattaaaaaattgtcactaaaaataactattttttatagtgactatttattcatataataaaaaagcttattttttgttcctcttttctttcaagtcaggatcagccttaaaagagataatattggtaaataattattatagggaaatttaaaaaaatatgcataaaatatcttaatattttatgcctaaactaatacaattcaaaattgaaaatatatgaccattttatcaaaaatccaagaatatccctctcataacaataccccaactctctctctcttcctctatctctctcggtt

SEQ ID NO: 356889 - DNA, 559 bp, Cannabis indica
cttgaatcaaagcaaaaaatcatgcattactagcagctcaattcaactcaattaaacatgcttaaatctctgtaaacaacaacaaaatcacagcaacaacaacaacctaaactaagcatgcaacatcatctttttcatcaaaattaaagaaacttaaagagtaagatacaaaggtcttaccaagcacttgaagaacacttagattgaaagaaaaagagcttgaaaatcaaagaaatcccagccctagaacaccataccagccgagagagagagagagaggaaaagagagagctttttgagaatttttctaacttttttctaagtttagaaaaatgaaataaaagcaaataatcaagtaataacctatttcagccaatacatttcaattaaagtcaaataatttaaccaaataaagtccactaaaggacaaaataacaatggggcaaaatgaccattttgccccttcaactaaaatagcataaaaagcactaaatgggtatttttgggaaattctaaattcccggtcattcccgacattcccaatgtctaataaaccgtc

SEQ ID NO: 356890 - DNA, 477 bp, Cannabis indica
gtttgggttcgggatcgagactggggtgcggttctaggtctcgattctggtactgtgtccctagtctagttccgtgtttgggtttgagatcaggtttgagttcgggtcccgagtcaaggtttgggttgggattcgagtccggctcccaattcgggtctaagtctaatttggagtccgggtccttgtccagttacggttctggagaaaggtccaatttctgttattattcaaattccaagtcctacttccagtcccagtcaactttcgattttggtacgagttctggtccacttttgggtttgggacttggttcaggtccgggtgtgggttcgggtccttaacagggtttgggtcccaaatcaagacaccgactacgggttttgtccaagcactgggtccaaattcagatcccaatctcgagtcgcagtctggttcaatttctagtgtcgggtttgggttgggtactaggtcccggtc

SEQ ID NO: 356891 - DNA, 460 bp, Cannabis indica
tcctattttgtcacttcttccttgattttgttattctctatattcctaaaatagataaaactattaatagaaataaaaactttataaatggaattgttatttcaaaaataaaacacactaaaaaaactaacaaactatttttttaataaaaatcattttaatgattaaaaagaaaaaaagtagtatatttatcttttattaaatttacttcgaactaaaattactaaattagcattatgagaacaaaaaaaattaataattttaagtctttaagctataatacatataaaatagtataagatttttttaaaccttaaaatactttaatttcataataattaacaattatttatatttttaaaaaataacttgaacttaccaaatactataagaacaaaaccaaataaagaaaattttaaactaaaaaaaaataagaacgaagaaaaaagtagtcataaac

SEQ ID NO: 356892 - DNA, 674 bp, Cannabis indica
tagtggttttgacaagatcattctctgtaaagagtaatatgtttgtatccacttgaaagtaagatcatctatattcaaatatggatgtacattcaggggtggatattagttttcgtaatgttcttaagataatcactctagattttaccttatgcacagaaattttaaatgtttgagaaatttcatgactttttagcaatggtgaaaacattaaggtaagtggttgacgatcttgcgagctcataggggttgagaaatatttggtggatatgcagttcaaagatcattaagttgaattttgaattgtattcaaacttacctcccgagaaattcgatttgcatattgatgatagtataaggtttatgattagttactaggtgtttcctaagtccttctagggaaatacactagtgataggaaaatttcagaatgatgaaatggttatgtacttagtgtaaaccattactagaatcatggatgtcctgattgtgaccttaagaacagccagaactattaaccaaggtttgcatgtttgatagctattccaagtgattaggggttgaccatcctatagtcattagataagaaagtgtttgtttcaacaaatactacttttctaagaaaatgactaagtctaaaaaacaaagtagcaaggtagaggagataatttttt

SEQ ID NO: 356893 - DNA, 73 bp, Cannabis indica
tttggcattaaaataatgaaaatatcaaatgataaatgctataaaagtggccggccctggcaatatggaattg

SEQ ID NO: 356894 - DNA, 693 bp, Cannabis indica
ttgtcgttggctaaaagtgaagtcaacattttggtgctttcattgagagtagaatcgtagatcgctctttttgacattcgacactatggtgtaaactcgtagaggcttgtctgacccagcaaactcacagacgctagatccgacattgcaggacccagggagttcaagggttttgcccgctatcaatcctggacagacgggaaacacggtgaatggtgggacaactcctgttactgaaactgcgcctggtgtgcaagagactgggaataacagttccggacacagctagggcgttcataacacgactattccaccaggcatcaacgcccaaacgaccatcggagacgcaactgaattgcaaaatctccgtgctgcactcgaactcatgcagggtcatagcaatactcagaaccatgatcaggaggaactgcgtgccacagtaaatctcgcgtttgatgaagagaggtgtatgttcgctgaatggacagacaaagagatggaggcattaagggctcgccatgcagagatcgaagatcgtagtcggcaagctactgtgctgatacgaagagcctacaagactgtaggccagcaaacgccgagcgtcattcccttgggagaaacggaggatgacccgacgattaatgcctcccagacaaccaacgctcagctgtccaatccccggtcacgagttcc

SEQ ID NO: 356895 - DNA, 584 bp, Cannabis indica
cgttacccaactcatgatttagagctcgctgctgtggtttttgctttaaagatatggcgacattatctttacggtgaaaagtgtgaaatttatacagatcataagagtcttaaatactttttcacccagaaagatctgaatatgaggcagagaaggtggttggagttggttaaagactacgattgtgaaatactgtatcaccccgggaaagccaatgttgtggccgatgctttaagcagaaaaggtcccggccaagtttgtactacggttatgatagctcctcaactagcctcggaaatggttagtgcaggaattgagttcgtggtcgggaaattacataatttaacactccaatctgatctgttggagagaatcagaaaggcacaactggaagatcccgagctagttaaagttcgagacgaagtagtggctggtcggcctagaggtttttcagtctcgagcagtggaatgttgttatataaagctcgagtttgtgttcctagtgttgatgagcttaagaaagaaatactggatgaagctcacaccacgccttattcgttgcatccgggaaccaccaagatgta

SEQ ID NO: 356896 - DNA, 913 bp, Cannabis indica
tcttaggaaagaaagatggaaaattagaaaattgaactaagtttgcatgtttgttggaaattctaaggagactaggggtggactataatagtcgcaaggatgataaagtgttcatttctacaagcgccactttccttgaagatgactatattaagaatttcaagctgcaaagcaaagtagtattggaggaaatagtttcagatataactctaaacaatgttccatcttcttctactcaattagaggataatcccattcccttggttgaacaaatgcaagttgatacaactgcgcaatctaccactaatgttcttattcagaaggtcacgactcctcgtcgtagtgggagggtttccactaaaccaactggttatggcttggatggtgaaatcaatatggacgttggtgacagtattgatggcttacaaagtacttctcagcaccttgtgttgttcttggaatggaaaaatcactggttttactttgtgacaacactggtgcaataaccaacagtaaagagcctcaaagccacaagagaagcaaacacatagagaggaaataccacatcattagggaatatgtggcaagaggggacgtactggtggagaaagtggatactaaagacaacttagctgatccattcaccaaagttttgattgtaactatatttgaaaaatacaaactgaatctaggattaattgaaatgtactgattgttttatgtaagtgcaagtgggagtttgttgggctttgtgtcctaaataaaactctatttcagtgtaatcttttctattcaattatcaataaagctagtggtggttatgagtaatttgttactatcattgacgattactctagatatggtcatatttaccttacgcataagaaatctgaaacttttaagaagtttcagg

SEQ ID NO: 356897 - DNA, 374 bp, Cannabis indica
aagtcatactgtaatgtgtaatgggttctaggaaatagatatataaaatttctatttggaatctaaaatttaaagtcaaagatttaaatttaaccaaatattcatgagtaattattctctctttgaccaccactactaatctaaatataagtttaaattacctatagtaaacatatatacaatatgagattcaagatcgagggtttagatcatttcaagatataatgttgggaatataatcatatgcaccattcaatttcttaagagaaaatagaatgacatcataaggaaatgatttataaatcattcatccaatgatatattatttaagctaattggatgaaaattcattaggatttttcccatttaaaaca

SEQ ID NO: 356898 - DNA, 753 bp, Cannabis indica
tgttattcaagaccagggtttgtcttccaagtagtgcggaacttagaaatgaaattcttgaagaggctcataccactccatattccttgcatcccgacaccaccaagatgtatcaagatcttaaaccctacttcgagtggagcgaaatgaagaagaatgtggtagaatttgtatcgcaatgcctaacctgtcagcagatcaaggctgaacatcagagaccgactagtttgttacagcctttaacactacctgagtggaagtgggaggatatcacgatggattttgtggtggattacctaaaaccacgagtttatttgattcaagttggttgtagtagatcgattcatgagtctacacattttctaccagttaaaacaacctttacaatggatcaatatgtggatctatacgtcaaggagatagtaagattgcatggtgtaccaaaatctatagtttcggatagagatccgaagtttacctctaaattctagcagagtttccaatgggctatgggtaccaaactgaagttcagtacaattttccatcctcagactaatggacagtccgaaaggacaattcagatactggaagatatgttacaagcctgtgttatggatttcaagggctcctggagtaagtacctaccattgatagaactttcctacaataacagttatcaaagtgcaatagggatggctccctatgaattgttatatggcagaaagtgtagatctcccatccactgggatgaga

SEQ ID NO: 356899 - DNA, 669 bp, Cannabis indica
cattctcctataaaagcaacaattatacaaacagacatggatagagtcataacacaagcctaatttcttcaatctcttttatgcctcgtagtaagttgctggaatattattttccttcggaaatgcaaactttaaaagcttcaacaattcttcaaagatgttattaggaatttttcctctaacttttaaatgcaatagctttgctaaaaagttgagagacgaaatccaatcacaaccgggatacaattcagcttcaatttcctcaaataaatcatcaaaatgtgggtttgtggttggttgttcatcttctccttgtacatcctctgttgtcgagggaaagaagtcttctagaataagaatcatttcatcctctgattcaacatcgccaactgctacatcatcgacagcatcctcaggctcaccgtgataaatccacttctcatatccttgcataaaacctcaatcaaatacgtgcgctctaaccctatctattttttcaaacctactatttatacatctcacacaaggacatcgaattcttccatcacaatccttatgttctcatgccattgctaaaaaaggcttgtagaccattccaaaattcatggtaatcacgatttctgattgtggtccaagacttatcgattgtcgtccatctacaaattttag

SEQ ID NO: 356900 - DNA, 581 bp, Cannabis indica
aaaacaaaaacataaaaaaaaaaatagtaaatggtacaaaaatattcataaaaaattaataactaattaataattatttaccaaaaataatagtaaatagtacaaagatcatccacacaaatgaaaaaaatacaagagacaaaaaaattacaaaccacttattgagtatcataccgatatgacactaagtacattaaaaatattaatagcaagtacaaaaaattatttaaaaaaaattaaatgatttttttttaaaaaaaagtacaaaaaaatgggactacactgttatggcattaaacacattaacgataagacagtaaatatattaagagtatcaataataagtaaaataaattattaccaaaaataaataaaaagacaaaatttttaaaaaaaaataaagaaacgaacttataaaaaaaaaagacacaaaataaaataaaatattataaaaaaattgttaaataaatattataaaaaattgtaagaaaaacattcacaaaaagacaaaacaagtctttttttttttttttagtcattttgtggagatccattcttctattcacgttaaatacaatatg

SEQ ID NO: 356901 - DNA, 585 bp, Cannabis indica
tatgaagctatgttgcctgtagaactcgaaccgcccccccatagaagattgacatacagccaggaagttaatcgtgcactccttgcagaatcacttgatgaagttgaagaaaaatgaaccgcagcaaacttgaaattgataggtcatcaacaaaaggtagctcggtattttaacaaacaagtgagagcatggaaattctttatgggagatatggtcttaagaagagtatttttgaacaccaaagacagtatgaccagtgtgctcggaccaaactgggaagggccatatcaggtggtcgaagttatagaatcaggagcatacaaattgggtaattatgacaaaaaaatgcaactcgttctagtaccaaggtattggaatggggaagatttaagaaaatactaccagtaaaagtaccaggttggctgaccacgttaagtacgaaacaaaagaacatttactcttaagtgaatggccttctgggcggaccccgcctaaaggttcagataaaattacaaagtactcaggtcgaatgaccacttatgaaaaaacaatttttatttctgcaatttgttttgtttatgctaa

SEQ ID NO: 356902 - DNA, 686 bp, Cannabis indica
tcttgatttatcgttgggtgagcaagtacatctacccgaatgacatcgagcaattcgacttctctagttgagccaaacgggccagtgcgtctgcgtgtgaatttcgagcacgcggtactcgagacacgattactttcttgaatttctgcatcatctcgcatacaatggctaaataattaactaatctcccgcctctgcccagatattctccattcacctggcacaccacgatttaggaatcgctaaaagcctgtagatactcgattttcatctcgagagcgagcttaaaattgctgggactgattaataagatcccgccaccagagccttcgctatttgaggctccgtcgacgtataacgtccacacctctccattggttatggcagtgtcgactttgtcatctatgagtgccacttcagtgctggggaattcaaggataaaatctgctaaggcttgccccttgattgcagttcttggtttatacttgatgtcgaattagcttaactccatcgcccatttcaacaacctccctgatgtctctggttttgctaagacttgcctcaaaggatagtttgttaagacctcgatactgtgagcctggaaataaggtcgcaattttctcgatgatattaccaaggcaaacgccaatttttccatttggagatagcgggtctcagcatccagt

SEQ ID NO: 356903 - DNA, 557 bp, Cannabis indica
tgattgttttatttttaccagatgctttgtacaggtataggtgccccccaagtggtcgagcagacgtatgacccttggtaacttgtcttcgcaaatatattgcttatctgttcggtgttttgggtttgaccaaactttttgtacgcactttaggtaaattataaccatgctgattcttttgactcaattgaattttgaaatactatctttattcatctattgatcgaaagtgtatttgttaccgtagtaacttacattagagctatttgatctaatctgatcttttagcttcgtagtaacttacatcagagctatttgatctaatctgatcttttagcttaacatgaaacaaaacaaattgcagacataagaaactgtactttaaagtggtcagcccgacctgagtactttgtttctgaaacctttgcgcttagtccacccagaaggccattcacttagaagcgaatgttcatttagtactttaaaatggtcaacctgacctgagtactttgaaatggtcaactcgacgtggtactttattggtagtatttccttaa

SEQ ID NO: 356904 - DNA, 757 bp, Cannabis indica
aatataaaaacacataaataggattgtaaaaaaattaaatttaatatgtaaataaaataaaacaaataaaagacctatttttttttcatcttacatttacatctattattgaaaaaaaaaataacatatacatatataataaattatacctcactaaaaaaatttcaaaaatctaatttctaaactattttcttagaagctagtttataaacttttattttaaaactctctcatctcattctcattcacaatatttaaagtgactattagtttataatatatagatatacaatacataaaatatatacaataaaattgcagtatttttataaatagaatacatatacaacacaattataaaatacatatacacataatacatattcaatacaagaaaacacatataaattctattaaagtttaaatttttaccttattactggaatcagccaccaatactgatcaaaatttggccaccacacacaaccacaagaacacaatcttaataacataggaaaaccctcaaaaattttacaaaattaaaaataaagtaatgtatattactaaatattattagagattagatttatactttaatatatgttgagattcaacatttgcaacaccaaaatcagtgaccggagctacaatcatcacaaccacaacaaccactaactcttctcggtttacactaaaatacgaagaaaaatatgatctaatactgaggatatgtttttgggtatgaaaaatgcaagat

SEQ ID NO: 356905 - DNA, 805 bp, Cannabis indica
acttgactactttgctcttctacatgtcttttagttgattactgtgtggcaagtgaaggagtggtcctacagaaactatttaagtctttcgggggaaaactctcttcactttacccctttcattctctcactagaaatagaaactttgaagaagctcttttttctctctaaaaattgaacccacatagcttcattctcctaggatatttatgccattttgacgatccaagcttcccatcttcttcatcaacaatttcttgttgctagtaagctttctattcctgctattcacttgatttagtttattttttccgtggatgcatgaaccattttctttactttgaatgtctttagattcccatgttagattgtaattctttcgttatattttgatccacatggttgtcctgtacacttcctggccggtcaaggaggtcttgttcaagacctggccatccaagggtggtctccatggggtctagtcggacaagggtggtaccctatgggctggccggcctatgcctggaagtgaagctcctggctagccctaggctaggttatgggacatggccagtcctctagggcttgggaaccttggttggccaaggccaaggtttcaagtgggcagccaattttttatcctctgttgacctcggctaggatctcgtgacggccttggaggcatatacaattgtaatctcatgcatggtcccccttgggaactttgtatgagactcgatagtgagtctattatagtcaagtgcacaacttgtaatcactatttgtctatgtaaaatgtacttga

SEQ ID NO: 356906 - DNA, 892 bp, Cannabis indica
gcaagcagatcatgtattttgctcagatatgctatcatcttttctccttgagcctcgtattcttcggatacatgatttaccaccacctgtgaatcattgcagcttttcaatgtgttcggctttcatctcccgggctagttttaggccagcaattagagcttcatactcggctttgttataagatgctttaaatccaaatttgaccgtagcatgcacgtgttgccctacacgcgttacaagggaaattcctgcaccaaatagctgaatagtaactgacccgtctacatgtagtttctaggtcagcttatcttcattgttatttggctgagatgtttgtaccggctcggggttgctttctagtatgctttctttcatgcctgtgcattctacgacaaagtctgctaaggcttggcctttgattgcttttcgaggttggaaagtaatttcgtatcggcccaactccaccgcccacttgagtagccgtgcagaggaatttggcatttgtagtatttggcgtaatggtttgtcagtgtacaccaggacaggatgagcttgaaaatatggccttaacattcttgttgctaaaataaggcaggtaagcgagtttctctatcaatgggtatcgaccatcggcctcaatgagtctttcactgatgtaatagacttggtgtggtatgctgttctcttctctgattagcacgacacttgcagcatgttccgtgacagctaagtatattccaagttcttctccgtccagaggttttgacagtacggaaggttttgcaagttgtgcttttagctcttggaaagctttttcacattcctccgtccactttaactgcttttttcctcgcaggatattgaagaatgggacacacttatctgttgattt

SEQ ID NO: 356907 - DNA, 590 bp, Cannabis indica
tcgtgcggtctatccaatttactaaagattctggctgccacataagaatgagtggccctagagtcaaacagtacaaagtaaaaagagttattgaccgagagctgacctgttaccactgaaggactggcttttgcaacagcctgagtaatggcgaacaccctttttggagtgggtttcactggagccttcggtgcctcggttctgagttgagggtaatccctcttgtaatgccctagcatgccacactgaaagtacccttgtcctctacactcccccagatggtgccttttataactggggcattctgggtaagtgtatcgggtcttagaactaccccggcgactccctcgaccctagttcccccggaacctcttgttctgacctgagccaccggttgtagtggatgctttccttcatggccgaaccactacctcgcctgctaaagcttaatgcgagaggggtaggagttccgccaaccactgaagtcctagcagactctgtcatgcatccaactgcgccctcagctcgcagtgccttatctaccatttcagcataggtggttttgtcgtcggtggtaatcatcaaatcat

SEQ ID NO: 356908 - DNA, 493 bp, Cannabis indica
tttttttgccttaggaaaaaattagatgaatctgtcttggttcaaaaaattgttcgagttcttcctgataggtttgacacaaaattgcttgcaatggaagaggcaaaagactttggcaaaatgaaggttgaggaactcatggggtcattaagaacatttgagttgagtcaacagatcaagaaaaagagtaagcaaagtctctcaaatgagaaaagtaaaggtattgcctttaatgcttctgaaaaaattatttatgatgatgaaatggttttattggcaaaaaatttccaaaaatacttgaaatctttcggaaataaagagaacttttcaaagagctcaaaaggtaacatttctgataataatccctctaaacctttttcatctaacaataaaaaaggtattaaatgcagagaatgtgaaggatttggtcacactcaatccgaatgtgccaataccttaaagaaaaataaaaagggattgaatgttacttgga

SEQ ID NO: 356909 - DNA, 706 bp, Cannabis indica
aaagagttttatttagggcataaaacccaatagaggacccctctttttctcacgtaatgacattcaagggtttagagtagactttgtcttctcaatttttatcacttttcttttacttattcgtaatgtcaccatctgtgggattcttgcacccgactcttgtcaaggaaaacattctggggctttctttttgacaagtgtccggaaggggcctctctccaggggttaggggacccccattcctttttttgaatcagggtttggtttggggcctgactgctggattttttcaatctttttcagaaccaaaatgtctgcatccggttctaaatcctcttagaaaggagggaaatgtctggccaccctggaggaagttatgaagggtctggtggcccaagaagggcataggtccctcgccaacaagtgggaagcggtcgagcttcactccaccttaacttgccctcaccagctggaacatatcgtggttgtggtaggtatcaagcctgcgacctccgggacctaccaccggccacctcgggactcggagacgcacaaccacaactacgggggcttcggagcctggagccaaacgcacttgatggccggggccatgcttccccttcaaataacttaataattttcttgtatttgtcggccctccgccataccaactcattcctcaagcttaccgcctgctttcaggctt

SEQ ID NO: 356910 - DNA, 818 bp, Cannabis indica
ctgaactattttatttatttatttacttttttaaaaaaaaacttaaattaaaataaaaatatataataataataaatagaaataattaattcgcaacaaagaaataaaaataaataaattataaataaaataatatatcatgtataatcaaatatataataaaataatttatcatatttttatttaataaataattaaaattgtaaaataaaaatacttgaataatataaattatttatgctaaacactaatttaatacaaatattaattttttgaaatattaatataatttttttagtaatttaaaaggaatatataattttattgtcatattatttcttttagaatcaatttaagtaactattgtttaaataatattattttaaattttgataggttatgtatgataattcaaaattatacatttttaataattttaatgaataagtttttgataaaaaatttataataaatttgtaataattcttccatttaaattcttattaaatttaaaatatattaacaaaatcaagattaaaaaaaccataaaaaatcttacctgtatggattagggaattttgattatatatacttataaaataaaaaaaatttattattaaaccaaaacttaaacctaaaaaactatacctttttttcaaaacccaaaaatacccccttctctctctgcatcatctctctctctatctcacatcccagccgccaccctcaccaccacctccattctccgacctccgaccctcaccgccacctccgaccacccgcaccaacaccccgacccagccccactctctcagacc

SEQ ID NO: 356911 - DNA, 493 bp, Cannabis indica
tgtagtcgataagggttgtattttttaatagactacaccaaatcaggtttgtagacttgccttgatgctataaagtctactgatgagatggtgattactctcggggtggagcaatgattttggaggagtgtaaaaagtaatatggaatctctaactctaccaatgagactgaatactaaagttacaggaatgatacttattcagtctatggaaagttctatacagtttttggcattgtacgaattatttattaactactagtgttacttcatgactaacatagaagtagttgccaaaaagtaaagaatccagtatccctagaggagtagacatatagagagggaaatttcacaatatcaaggattttgtgattgaagaaatataatggtggagaaaggttgtattgaatacaacgtgtcagatcctattacaaagataatattacattctaaacttgatcatgatatcaagctgttgagattatttgaaatgc

SEQ ID NO: 356912 - DNA, 1175 bp, Cannabis indica
tttgtcatttggaagttgtccattgagtaaataattgataataggtgtcatccatgttggagagctatcttcatctcgacctcttcagtttcacatatacttggctcgctcagcatctccactgggactagattcaattcatccaggtcattctgcgagcccagttttgctaaggcattggcgttggagttttgttctctcagaatttttttgattttaaagtaatcaaaccttttcgagttcttttgaactttctctaaatactttgccatacttggcctggtattccccgaggacctagttcacgatcaactgcgaatcactatgacaaatgagatttttgactttcaatgcctctgctatctttaagccgacgatcaaggcttcatattcagtctcgttattagatgcttccaattggaatctcagagcatagtgaaacttaaagcctttggtgatattaatattacccctgcacccaaaccctgttcgttggatgcgccatccacatataacttccaggcttccgcgtctcgctgatcaggtggaatttcttctggagttataccttttatcaagaagtcatctaaagcttggcccttgatggacgaattgccccagttcaatcgaccatttaatcaatcttccaaaagcatctgattttgataaaacttgtctcaagggctgatcggttaaaacttttatagggtgagcctagaagtatggtcgtagtttacaagatgcatggactaggcacaacgcaagtttttctagagggggatatctggattcttcccctagtaaccttttacttacatagtaaacaagttgctggtgcttgccctcttctcgcactatagctgcactaatcgcatctttcgagatggctaaacagagaaataacgtctctccagttattggttttgccaaaactacaggcgttactagatgcctttttatgttttgaaaggcctctttgcactcttttttccactcgaactttttgttgcctcgcaatatgttgaagaacggcacacacttattagttgacttcgaaatgaacctgttaagtgccatcattcttcctgttagggcctgtacttccttaggctttgtgggtgatggcataactattaatgccttaattttttcaggatttgcctcaatacccctcg

SEQ ID NO: 356913 - DNA, 504 bp, Cannabis indica
cacattttgaaccactttccagtcttgacctctcaccaaatcatcaagataaaaaacttattttgcttggttggcaaggatatatggctcatctttataccatgtactgctggtgtttatactagtgatattattttcagtaaatattttcttctttgttggattagtgttgaaccatttacatcgaaataataccaccgaatatgagccattaaatgacatgggcaaaatttcttcaagttgcctataaaagttgaaaccatctgtcccagcgactaacactccactattttaagtggtgcgatctttatctcgattgtatgcaacaaatcgaaccacattgactatacctacctcatagctatatgccaaatgatctgacccagatgctaaaatgttactaaaatcatattaataataaataaaaaataattttaggagcgacaaaagtcgtccctaaaaatttaaaaagacacccctaataacaattatttccacaaagtc

SEQ ID NO: 356914 - DNA, 702 bp, Cannabis indica
gacaaagaacgagcgcaagcactgaaagaagatgtagaaagactgcgcaaaaacgagttcatcattgaagctttctatccgacttgggtagctaaccctgtactgctacccaagcctaacaaaaaatggcgagtatgtattgatttcactgacctcaacaaggcgtgccccaaggactgtttcccacttccaagaattgatcagctcgtggatgcaaaagtcgggcatgaaatcctgagcttcatggacgttattcgcggtataatcaaatcagaatacatctaccagaccaagaacatacaagtttccgaacaaatatgggtctgtactattacaaggttatgccgttcagtctgaagaacgctggagctacctaccagagactagtaaataagatgcttcaagaccagatcagacgaaatatggaggtactgtagaacctctatccaagaatacacttgggactaagaaaattatattctaattgagaggttataactaaatagagttacactaaaagaaattcaaaatatcaaaaaatatcaatgtaacaacaatgacattaaacaatccttaatattatattataatagaattatttttgagtaaatataatatttatacatgtattacaatttggaataaaattactaattctacctaaataattttataaaatatatatgtatatattttattaag

SEQ ID NO: 356915 - DNA, 1335 bp, Cannabis indica
gcgggtcgtgtttgttcgtcagacccatataacaggtacatgctcgacccgaacacaacccgtttaataatcgtgtcaaaaaaatgaaacccgaacacgaccgtttataaacgggttgacatgacacgacccgtgcaacccgtttatatgtatattttttgtttaaacatgtcaatcaataacacgtttatgaagtattcaacatgtttgtaacccatttataacacgttaaagtactaaaataactttaaataggtcattaacgagtcaatttcgtgttagccgtgtcaactcgaacacgacacgtttattaaacgggttagacgagtcaacctgaacacgacccgaacccatttaaggcaaacccaaacccgctaactctcgtgcgggtttcaagtcgtgtcatcgtgtctaacccgttttgccggccctacctcaaaccctgctctcctttaaaagtaccctgaaatcttccattcataagtaaggtataggatgtctttctcacacaagtcacaacccaacttatgaatttagcaggaaaacaataagagatcagcagctgctcaagaaagtcccagttgactgtatcataagctttgttgatatcaattttaatagtgcacaacaatttttcctcttttaattcttcaaaaggtcttgaagaattaaaatgttgtaaacaattgaccttcctttgacaaaaccaccctagttctgagtcgtacattcctgtggttctaggcaaaccaaccacaaagtccattgcaatgtcttcccacttccattctgggagtgttaatggctgaagtaatcctgccggccgttgatgctcagctttgatttgctgacaggttaagcatttagtgacgtagtccactacatccctcttcatcccataccaccaaaaatagggcttcaagtcttgatacattttggtggttcctggatgcaatgagtaaggggtagtatgagcttcttctagaatttctttcttaagctcattgatatcagggacacacacccgtgctttaaacaatagcattccactgtcagaaattgaaaaatccttagctttgcccgctaagacatcttctcgaatcttaaccaattcaggatcttctaactgggccattctgattctttccaacaaatctgactgaagtgtcagattaaataatttctcagtcaccaactcaatgtttgccctagtcatttccgaggctaactgagaggaaatcatgaccatgttggatatctgatcaggtccctttctgcttaaggcatcagccacaacgtttgcctttccaggatgatacaggatttcacagtcat

SEQ ID NO: 356916 - DNA, 529 bp, Cannabis indica
ctagtcttaagttcaataggtaataacaagtcaatatagtggaaaaatactactcaacttgtccgtcctatgaaagagtactaatggtaaaatttggagggttaaacccgaaaggttttataatggaatgatgtgtctaaagagaagttgtgagacattaatttccacctatatggactagaggtggtacagcctcttatgagaattgggagttattctatagagagtccatgaaatggatgttgcacatggccattaacggtgcacaagcgagatataatgaggtctcaagtgaactctagcaaggatatgtgtgttatcaccaatttgtattaaaagaatagtggttcaatgctatgacaaccaaaatttcaaaaaaatttgtggtaactacactaaggtaaaattcaagtcgaaagacatttcactttatgtatctaagcaagatctctataaaagtgtttgatttattcaatcaaagtgggggatatatgtaagatttgatcgattaaataatgttacaatagtg

SEQ ID NO: 356917 - DNA, 695 bp, Cannabis indica
tgtaatctttacaacgttttttccctgaaatcatgaggtttgattacatatcacgtagtataaatgcggttattatttgaaaatcacacagatgtgattttcccgcttttactgggtcaaaatgatcgtgtatttaaacacgtcttcaattgtagcgttctgggatacctcgacaggaacttggttccagtgatcttgatatcaagctggaccctttttttcctatctcttcgaggtcgataatgtacacctcgttgcttctttgtttaattaaaagcttaacgcttcattgtgacaatcgcagtttttatcaacaaagagtttctcgaggctcatttgaatgtttagcttttgactcgtcaagattgtaagtctcactgaaaagatgtctgaagttaaattgtggaagttacagggatgagccttcctatagcaaaataggcacctcgcttactcagtccactcgactgttatacttggtttatgcattttgcactaagtgttttcacagtagatatgcgttgttttttgccttcccagatgtaacgaggttgatgcctcgctttatgcatatggtttctcgttaatattctaaataacagtttgtatatcttttcctcgcgtaagaccttatagtcagggagttgcaagtatactctgttacttatgcaattaatgagttattccattagaag

SEQ ID NO: 356918 - DNA, 514 bp, Cannabis indica
aaatcaaataaacatataaattataacatgaaccaaatgacacactaaataagtgatgaaaatacttctgtctttttattgataattaaatgataaagattacattgaaatggagttttatttagggcacaaagcccaacaaagctttgaacttctttagtttttgtaggcaatttcatatccaggaagcttaaattttctctggattggcttcgatacctcgggcattgaccataaaaccaagaacttacccgacctcactccaaaggagcactttaagggattgagtttcatgttgcattttctaaggactttgaagcattcgtccaggtcatctatatgccccccagccttcttggatttgacgagcatgtcatcaacgtatacctccatattttgtctgatctgatctttgaacattttgtttaccaatctttggtaggtagctccagcgttctttagaccaaacgacatgaccttataatagtatggacccatatctgttcgaaaactt

SEQ ID NO: 356919 - DNA, 596 bp, Cannabis indica
gaatatttccttctccacgatcctaactctattttttctctttttttttgttcttcaattttatttttttcaactcccattaactgaatctcatgataatcattttctctcttttaatttttctcttaatccatatatagatatgcctgtaacttcttcttcatcaactccttcccctattcaaacaaaaaactctaaaatggagttgaaatctttagctaataggaacaagggtaaacgacctgttgttgaggtggatgactctgatttcgctcctccattgtcgaaacgtgggcgagctcctccaaagaagaaatcaaaggtggctacccatgaaaaaattcctcaagatgatgctcaaaaaaaataatcaagatggagttgatcttcggtataaagtttgattttagtttcttgttggtttcgcccctatttgaaatttgtttgtatttgccatttgtgtgtcttgtgtttttcgcttgtactattctaggtttttcaatttagcatttcgtttggttttgtttggttttttagggcttctagtttaatttatttgtttatttatgggtttttcattttcgtttgtttagtct

SEQ ID NO: 356920 - DNA, 906 bp, Cannabis indica
tgaagtccacccccaaacaaggcaggtcagggtacttctatttctctcagccaggcttcaagtggtcgaccaacacggatgataaggccatcagcaaaatagggcattttgctgatggtgaaggatccgagcattacccggactcagtttcagtagattccgacatatcaccgtcctccccgcactcttgctcttagggatagagctcaaaaacttgcccggttgcccggggaagatcggaatattatccagttgacctccaatgacaatcttgtgaggtacgagcttcatcccgaggactttactcctaagttcgtggctgggaagaagaggaaatctggtgctggccggactgacgaactcatccggagaatgagttgattcaactgaagcatgaagctaagttgaaagaaggtgccagggccaaacaatatgctcagtagcctttgagtcctgaagatgaagctgaggaagagcaggtgactccactgaagaggaagaagaaactcccggcctcgcccaggcctattgaccatgcaattcgcataagggagcccatttcatctgctcgaccatcccctccagtgtttggaaaagggaaagctgtcatgtctgagataagattgatgttaggtgatgatggacttctgagtcttatgcgggcggtcactttgcgttttactttaccttgttcttgagcttcttgattttcatgccttgtgtttctaatgactgttttctaaccatactatctttgttctatgcagacatatctcggcagatgatcgacgctttgaggaagagaatgggcggaagctctagcgcctctcctccggccaagaagtctaagggcggtgaggggtcctttacacaggaaaagagaccttccggggaggttattgatct

SEQ ID NO: 356921 - DNA, 1220 bp, Cannabis indica
ggtggagaaatatttggtggatatgcagttcaaagataattaagttgaatttttgaattgtattcaaacttacctctccaaaaattcgatatgcatattgatgatagtatatggtctatgattagttactagcagttgcctaagtccttctggggaaatatttcagaatgatagaatggttgtgtacttagtgtataccattactagattcagggatttcctaatcgtgaactttagaaaaggtagaattgttaactaaggtttgcatatttgatagcgattcttagtgactaggggtggaccatcctatggtcattaagataagaaagtgtttgcttttcaacaaatactacttttctaagaaaatgactatatttgaaaacaaagaagcgaagtagaggaaatattttttatcttaattctaaatttttctatcatcttattctatataagatggtcccactgcctctgttgtcttgatacaaccgatgaggacaataccattagtgttcttagacagagtcacggtaccttatcgtagtggtagggtttcaatgaatttaccctgttatgacttggaagacaccggtgacaaaatccattgttagtttaaacaaaatccattgttagtttaaacaagtaatggatagtcacaataaggaactgtggttaaaaccattcatatacagtaacccaaagttttctattacaagaacaagaaaggaaattttgaaaataagtctattcaatggacttaacaaaacttcataatcctagtattaaaggtttgagtttatctaaacttatggctaatggtattcctagtaatttacttactctagtgctagcaacttactttagcaagttgctggagcttttttttttctaatggctacatctatagaagtttttcgacttctagacatagattttatgtatctaatgaatagtttccactattttagaaaagattaaggctaaggaaaggattccttaggatcaacagtgagaggtctcaaatatgctttgtatgcattagaccagacacctgctattgagtgggagtaataagtaggtatcagaataatacagaaaaggaacattagaagataataaagtgaatcttaagataaagaaaaggaactatatgttagttgataagggtggttttttaatactcttagactacaccaaatcaggtttctagacttgcgttagtg

SEQ ID NO: 356922 - DNA, 540 bp, Cannabis indica
ctttgctcgacctcctcctggatcgcccgtcttttagaggacaagtcccgtaggatcctcacggcctcgtctatgcccctgaattcggacatgacgaagccctgattgacgatggtctaggaaaggcggctggtctccgcagtaatctaaaaaaggagataagagtgaggtcaaatgccttagacaaaatatcgaggaaagaaataaacaacaagtacttaccgtagccatggctttgctgatgtcttgaacttggtagacggagttcaaggaggcacaagcagcgtaccatttggccgggaattgagtcagatgggagacatactcgctggtcatctccgaggcaaaaggagccaaggtgggcccaagaaaacgattgaaccagtccatcaacgggtccatgttcaggtcccacggatttctgaagtcctccacgttgagagcgttttgctgctcctctcgtaagaccctcttcaaggcctccacctcagcatgcccccgggtgtactcgtcaagggcatagttgtacttggccacccg

SEQ ID NO: 356923 - DNA, 1204 bp, Cannabis indica
aagagctgacctgttacaactgaagggctggcttctgcatcagcctgcgtaatggtgaacaccctagctggagtgggtctcgccagagcccttagtgcctctgatctaagctggggacaatccctcttgtcatgtccgggcatgccacactgaaagtatccctgacctctgcactcacccagatgatgccttttacaactggggcactctgggtaaaaaaaccgggtctcagcaccaccttgacgactgcctctactctcggttcccccgaaacctcttgttttgccccgaggcaccggatgctgtggacgttttcctcttctggtccatggccgaaccactacctcccctgctgaagcctgatacaggaggggtaggagccccgccactcactggagtcctaaccgactccgacatacatccaaatacttttcctttttactgaagtcggttggcacgattcccgaggccaaccttgccaaccgatcaaactgtgtagtgtattctgtcacactcatattttccttcagggtcaggtgggtgaactcttttctcttggcacttctgacggcctcattgtattatttcgcattaaagagctcctggaacctttccaaggtcatggttgtgacgtcgtgaatctgggacaccatgtcccaccagactagagcgtcttcttggaactgaaaggtggcacacaccaccctgtcattcccggtgacacccataaaattcaatattcttgtaatcaccgttagccactgctcggctttcatgacgtccggacctcccagaaaaaccggaggtgcctgcttccggaacctttcatacaagggttccattctatttcccgctaccactatttcggcctgagcaacaggggcaggtgccacaggaacttctggcaccggcaccgcaggagcaccctgctgcctcaatctctgaatctcattgtcttgctcctctattctggcttgcatttcagcaaacctagtttcccaattctgggcttcctgattggcttgggcagcctgggcagcctgtggcgggttatcatcaccccgaccacgggccctgcccctgggacctctaccacggcccctaacattcgggggaaactgagctccttgaccctgatttgacccgaccgaagttgccctgactcctggtgttttgcctggcgtccatctagcctgaacagcct

SEQ ID NO: 356924 - DNA, 508 bp, Cannabis indica
aacacaacacaagttagtgatgacaaagaatgatgtgtttcgtaagccacaacaaatttactatttttttttaattccaatacttccaattattttagtataatcgtaagggtcgatcccatgaagactatgtttattaattattcacaaattaataacaagaattagaaaaaggagattttgaagattagaataaaaattgcaataattaaaattaaagaaaagaacaaatttaaataaagaatacgatacgagaaactagctaaaggttattcgccaccctcaacaatcattcctaattcccattaaagaatgtaattttcaatttctaatcaaactattaatcccgcagataacgttgaaccagtcaattattttaatctccctatggtatgtaatcaaggcgaagcgctcaataattaactcttttacctaaatcagtaaatccatgaagcatgcaatttatttaatttagataaaacattgagttttatggagatagactaat

SEQ ID NO: 356925 - DNA, 632 bp, Cannabis indica
agacgcattggcccgtttggcctcaaccagagaagccgaattgcccgatgtaattccggtagatgtattagctcacccaactataaatcatgaagtgatcatggagatagataccgttcaggaggtcacctggataactccaatcgtcgcatatctggaaaagggcatcttacccgatgacaaagtagaagcaagaaagctgcaacaacaagccgcccgttatgtaatgtatgatcaaaggttgtatcgcagaagttttagtcaaccgctactcaaatgcatcaacggggaagattgcgattacatacttcgtgaggtacacgggggaatttgcggcaatcatacagggggtaactcccttgcattaaaaatcatgcgacaagggtattactggccaaccttgcgacaagatgctctcgcttttgcgaagaaatgcagcaggtgccagcgaataaccacatatacccaccaacctccgagtaacctacattctatcacaagtccatggccctttgcactatgggggattgacttaatatgcgagctacctaaagggaaaggtggagtcaaatatgcggtagtcgtagtagattactcttgaaactgcggttaggtttcttacttatcgtttg

SEQ ID NO: 356926 - DNA, 917 bp, Cannabis indica
caacaacacccaattctaaagctttatgtaagtttttcacctttcgtacttcattgtttgtgttcgttgcatgcttcactgtttatctgctttttctgggtttgatgtttgaactttctgggaagtttcgtcttgagtttttgtgtaatacgttagactcctcttttctggtgtttgagtcacttttattttgcgtactatattttttccaaaggcccatcttttctttacgtgatgaccttcaagggttcagagaggactttgtctttctcgatttttaccctttttttccttttcttttctttgcttattcgtaatgtcaccatctgtgagattcttgcacccgacttttgtccaggaaaaccttctaaggctttcttgttgacaaccgtccggagggggcctctttccagcggttaggggacccccattccttttttgacttagggtttggtatgtagggaattttaaatctttttcagaatcaaaatgtctgcatccggttccaagtcttctcagaacggcagaaagtgcctagccaccctggaggaggtgatgagaggtcccgtggcctaggaagggtataagccttgtgctacggggtgggaagggccgagcttcactcaacccttactttccctcatcagctggagcacattgtgctggtggccggcatcaagcccgccacttccgggacttacccctgaccgccccgggacacggagacgcccaatcacagctacggaggctttggagcttggagccaaacgcatttgatgaccggggctatgcttcccctttaagattacttcattaatttccttgtatttgtcggccttgcgccataccaactcattcctcaagcttaccgcctgctttcaggcttatttattttttactctgcccggggctggggc

SEQ ID NO: 356927 - DNA, 608 bp, Cannabis indica
gaaacaaaatgttgtatctagatccagtgctgaatcagaatatagagctatggcccagtctgtgtgtgaggtaatatggatttatcagcttttgactgaattcgggtttaagacttctattccagcaaaattatggtgtgataatcaagctgctcttcatattgcctcgaatcccgtattccacgagcgaactaagcacattgagattgattgtcattttgttcgtgagaaaattcaacaaggtctgatctccacaggatatgtgaagaccggagaacaactaggagatatttttacaaaggctttgaatggggtgcgggttgattatctttgtaacaagctgggcatgattaacatctatgctccagcttgagggggagtgttagatattagatgtatattagctgtaaaagaattagatatttagtagatatttagtagatatttagtctcctaactttgtatataaatatgtattattctatgaaatcaacacacaattcgaatcactattttctacaaataggaaaaaggatgagaaaacctaaaaactacttcccccccccctccctctctctctctctctctctacgtacttctacgtaacg

SEQ ID NO: 356928 - DNA, 511 bp, Cannabis indica
agagaagtgttgttcttcaatctgtgtatgatttcattttttttttctcctttttgtttattgagtagttttaatcctttatacaagctttaaatctgcttcgtgaataaggtttgattcacagattgctaaaaatctaaggtacattttatgttccctatttctacatacagagtactaggaagtagttacttataaatatccatgtcagttcctatattttgtgtgaagagcctgattcgattcatgtgtttaccctttttgcttgtttttttatcgtgatagtgttttgaattattttatacccttgcagtgaaacatttttaacaaaagaatgtaatggaagaaataaaagcaatgtaaacattggtatgtacagtgttgttgaaaaataaatgttttttaaaatcaattttatttggtaagttgtgtgaaaagcatcagtcgattcatgtgtttggtcattttggtgtgtattttttttaccaaagtgttttggtttacaatttaa

SEQ ID NO: 356929 - DNA, 561 bp, Cannabis indica
aatttgacacactttggaatgtgaagcatctccatcaaatcattttgaacccttttgcctgtaaaatatacagagccgttgtgaacttaaccgagacattgaatggtaaaaccaaatgcttcatcttggttcctttaaaatttaaataatagaaactatacataggtagaaaaaagacatacatgagacacaaacacaatagcatacgtgcatcgatgtcgtttttcatgatgcccagattgagaaaaagaaacaaacacaatagcatacgtatgcaccagtcaacaatcacataagccaagtgggcaggaaacactaattatgctacttgccatgcaacagtcaaccaagaaacctcatactgcagtatatatttatttaaggtataataaacaaataaccaaacattcatattatatagctgcttttttttttaaaagaaaaattatgaaatcagtggatttaatttttcgattataaattatgaatgccaatcgtatgccttttttgaatttaaactcagccaaaaaaaatttgctatttttgaataaaaaatttaat

SEQ ID NO: 356930 - DNA, 721 bp, Cannabis indica
tctctaataggcgcattaggtctatgtcggttaggatcgaggatagggagttgagtgctgaccttatagaactggaattaacggagtttgacatcatacttgggatggactttctgtccaagtattaggccagtatagattgtaagcggaaaatggtgacttttcagcccgaaggtgaagatccatttgtttatgttggatcagttcggggatctcggatcccagttataactgagatcccagttataactgtactaagagctagggatctactacacagtggatgtgtaggatttttagcaatggtgattgattccagcagacccgaaacatttgggcctgaggtagtcagagtggttagagactttctcgacgtgtttcccgaggagttgccgggattactgtcgcaatgagaaattgattttgtgattgatctggcatctggagccgaacctgtttctaaagctccatatagaatggctcgagcagaactcaaggagcttaagttacagcttcaggggatgcttgatattaggtttacccgacccagtgtatagccctggggagctctggttctgtttgtaaaaaaagaaagatggttccctcagaatgtgtattgactattgggaattgaacaagttgacaattaagaacaagtacccgtcacccaggatcgatgatttgttcgatcaactttagggaaagacagtgttttcgaaga

SEQ ID NO: 356931 - DNA, 886 bp, Cannabis indica
tttggcctgaattattaatttttaaataaaaataaaattttaataatatgtatcaatcagggacgagtacgtacctacggaaattctaaaaacacaataatgtattattatcgtaaaaaattagttaggtatttatctagaatgtggagttaaatttaagtatttacaccgtaaattattttaatttatatgtgtttcaacaaaaaaatataatttatttgtaataaattatagtaaatataataatagtgtatattagtgctgtaaatacataccagactttttgacactacacgaaatcggtacgagctcaaaaggcacgagcacaactaggcataaaaaatacgggtttgagcacgacacgatacgctgctacaaattggcatgataagatacaaaaaatatgtccttaagcacgacacagtacgagaagcacgaaaggtacaacacgtaaacacgaatagactagcccgaagagcgcaacacacaacaagtccgaaaagcacgacacgatatattaaaagacattataatttattattattattaataataataaggtatgaatttatcaattataaataaattaaaacaataataaaacttaaatacgatattgaatattataattctataattaaaactattaaaacatgagaaattaagattatatattaatttatttatagggtgtgatataaaaatttaagtatttataagtaaatatttaaattctaatgatgttaaaaaaaatttatatgattatcgctaaaatattgttaaaaagttatagaaatattgtaacgtccccgcttcaagcctccattgggcccttacacccacggactaatgactcttatacacgagtacgccactctggctgctt

SEQ ID NO: 356932 - DNA, 496 bp, Cannabis indica
ctttgactttaaattttagattcccaatagaaattattttcagtttcctaaaatacatttaacaatacaatatgactatcacaagtttttaatattcattttctgtcaatggattcaaactatatgtttatgtatggaatatgagtttagttttctgtgactaggatccacttggactattctaagaactctttgttataactaaaccttagtcatcaaaaaccacaaccacattctttttatatctatggcatttgcatcttgttcatagtggttttgataagatcattctctgcaaatagtcaatatgcctataaccacctgaaagtaagatcatctatattcgaatatggatatacattcagggatggatatgagtttttgttatattcttaagacgatcactctaaattttaccttaggctaagagatttaaaatgtttgagaaatttcatgaatttctagccatggtgaaaaaccattaaggtaagtggtt

SEQ ID NO: 356933 - DNA, 562 bp, Cannabis indica
gggcagtttgcatgcagaattttataacccgatctttatgtcgggttggaaaatatatagtataaaccgactaaaccgaccgatgtacagccctactaacacatgtgcttcatctgagactttcccaaaaaaatgctaagccacctttcttaccatgggcttctatagtaaaatagctctcaaagcccaatcgatatttacggcccgtttggcatagcttttaaaaaagctaaaaagttgttttttaaaaaaattgtgataaaaatgtgtttcgtaaacagttaaaaaataactttttgaagaatttttggagaagctaaagctgctccaacccaacttttagaaaaatattgttttgattaaaagactacaataatttcttttttactaaaattatatttacttatttattatatattaaaaaaaataaaaaatattttaaaaaaattaattataataaaataaataattattaaatctattatttttttaaaaaaaaaaattttattttattttaatattaacaaacaacatcaacgtaaaaattttcttatatacttga

SEQ ID NO: 356934 - DNA, 862 bp, Cannabis indica
ttgttcataccctgagtaccactgagtgatatactcagtactttcccgtacttgggctggtatcactgtaatgtactctcaaataacattcactataccaatgcactttgtaccttaactgtacaagtgttggtagtgcaactaacactttaagcatgcatatacacataatatatacatacactcagatattgatatcacacattatatacagttcttaccttctttccagattcacgtgtgctggccgacctgaacggaaagtcttgtgctagatggatgccctaatcacattacgaaactgggtaagttacatgatcaaaaccctaatctcgggaaacccgaacccataaccctaggtccctaggttctgttatactccctaaaggttactcaaactctggaattagggaaacacccaaccacggtactaaaatggacgaaaatcgaggaaatgaagtgtttgggggatcctgccaaaaccggctagagaagtctggcaaaaccggctagccagtttgcacgagttctccccaaatctttcacctcttgctcaattttccaccaaatgccaccaaactctccagagtacctaaacaatgcatatacaacatattccagccagtaattcactgaaaaactcaatgaaacaaattatgccattagagatcaaagctttgaactcaaagctcaaacttgcacaaaacctaatccaaccatcattaccagctgctaggacctaaaaccaactcaaatgaaccttaaaattctatccctaaacaaacctaaccctaacaaccccatttcacaaaatcacaagttcaaactaaactttaaaacttcaaaacataagactatggtt

SEQ ID NO: 356935 - DNA, 1092 bp, Cannabis indica
gaaaaagcagatgaacagtaaaagcatgctatgtaaacgataaacaaaactaaagtacaaggtgcgaagaacttacataaagcttgggaactgggtgttggtgttgatcgctggtagaaagtcgattggcaacgacgaagaaaaaggagtaagaaatctatggtgtttgagggtttcttttctctctggaaaacttgagaaaatttggtgaaaagctgaaagtaaccaaatgaaatgagaagggtggcatttataggccagacgcacatgtgaaacagctgtgattagctaccatcgaacggctgggaaggaacacgattcgaattccctggatccagcggttgggttgaatcgtcatcaaggcggtggaaacgtttgagtacccgtctgacacccattaatgcgtcgtatcaataaatggacaagaaacgaatcgacgcctgcaaaaagtaaattgctgtagtaatgatggtcattaaatacaccatcacgcgcctaaagcacgtgctaggaaaccgaggaggcaaccggaggcatctaaactagccttgttcactttaaaattaaacaaggcttggggggtaaatgttgccccttattttgcccaaaatacgtgaaccaaccggatgatgacacgtggatgggaagggtttagcgattaaataaaacagctaagtcttcttgaaagcaaaggattatctcggacatgcctcccggagaaggcatgtaagcctcacgtgctcccggagagcaagatggccataaagcacctccaggtggtgtcagattctatctgaacagtcatctcgcatttaacgccgcatgggaggaagcgtattggaactgccacacgcaataaagtctgacgacacaaccccctatttgcacctactaggctatgatcaataaagtctagtgacggctactctctgaggaatcacatcagtcaaaaggggttaaggactaccttcataaaatccctacaacacctagggatttgaccatgcattacccatgatatattcattgggaatgtataactttactaatcgtcacagaaaggcatgtaccttaattctagggatcacccca

SEQ ID NO: 356936 - DNA, 630 bp, Cannabis indica
atttgatccctttttttttttaaaaaaaattataaccggttttatgagatactatgtgttatgaagtattttattgtgaaactagtttgtttttaatttatattttagtgttttaggaactgatttcttctttgtttttaattgtatatcggtttgagttattgcgtgttacttgtttgtattcattatgttatataaccggttttattttagttataactagtgtgagttctttcgtgttatttgtttttattcattataacactgttatagacacggttctatgttaattataattgtcttgagttattttatgttatttatatttatttattatgttacagaactggttatatttcaattgtaaccggtttaaattattagtttttattcatataactggttatatttttagttatatctgagacatttacttcttgtgacttttccagtgactttttcggcgacgttgacttttccgacgacttttctggcgacagtgatttttctagccacttttacggtgccagtgacttttccagcgactttttcaataaaacttacaaatatgagatttctatttttttttttacaaaaatatggcctaaaaaaattctatataaatgtaaa

SEQ ID NO: 356937 - DNA, 888 bp, Cannabis indica
tacactacataatatgtaatcaaatcccacaagtttagggatgattgctgtaaaattatttcggtcaactttgtaattaactgtccactatgtaattataaatagtggcagacaagttcaaaaaagggacgaaaaaactcatatgaaagaggccttgagaaatactcagaaatctgaataagattgactcgtggactatgcaaaattttaactgcaaaaccacgtaacaaccctgtgttcatattctttattttgatagatttaattttttctgtgtgaaatcaatattgtgaggctcaaatttggtgaacgaaaatatgcgttaacaatttggtgctttcattgagagcctctgtgaaaaagctcagaaaaaaccctcattcttttgaagaaaaacaacctccttcatggctgaaaatccagaaaatgttaaacaccccacatgaggaagccaaccatcgttctagaaaagatcccatgagctccagaagatctaccaatcaacagtccagaaggaccacccgttctaggagggctcaacctgagggtggccccagtgcgcggaccacacgttccgagagaactcaacccgacgttggtcctagtatgcagacaacatggtcaaggcaaactcagtgtgggaatggtcagaaacccggaacgagggatgaagagctcaatcgtggtggtgtccaatctgtgagagaaagaacttatgaaacgaaaagtcgtcgcctgagacaccgtctggaagaggcgcagcgtaggaatgctaagttagaacgtgaggtgtcctcagccaaggcggcacaggggacaaatgttggatatattttaccaggatctagatttactaacaagtatatttcattaacaccctaatatgaa

SEQ ID NO: 356938 - DNA, 605 bp, Cannabis indica
gtttagatcccacgggttttggtggttctgatcgttaagggtattttgcatttcatctcgcaaaaccctcctcaaagcctccacatcggcatgcccccgggagtactcgtccatggcgtagttatgtttggctatccggagctcctgcctcgcctcatctccaggaaccggagtcagcactatgttgggaggcactgtatattcctccgcctcggaagggatcccggaatcagggccaggggccggagtgtccactctccgctgccgtttgggcacctcctcggctaccatcttgcccttgcgcttgcgaatcagagcaacctcttgctcttcttcactttcttcaacttcctcaggaagagcccattgctcttcttgaccttctttagcttcctcaggaagcgcctcctcctcatccactaagtcaatagtgtctggaggggcactggaagaagctttcaagggagtggccacttgggaagaagttaaaggaaggggagcgtcaggagtgtgagctccggcaagggcggccaaaatggcatccatggaattagctgctacaacaaaagaaaagagccaagtgttagaatatctgtgaaagcagt

SEQ ID NO: 356939 - DNA, 684 bp, Cannabis indica
aaggctaaaagagatgagctactgacccccgtctcctacaagcactgcgtcaagcgcttcgacgacggcctctacatggccggccagtcaaatggccaaagcatcaagctcgaattctatcccaagcctgaggaggctcttgccaaattttaggagaagaagaagaagcttgatgctatgcttgaagcacgtcgggaccctcgccttcctcctcgtcttgattaggccgttgagtccagcccatttcatcatgattatatttcttttttttttttctttacaacctatttttcttttcttcaagacaatttttattatatagctgctttattttctaaggggagacgattattatggcctatccccgggccctttgtattattatatttattttttgacctgccgtttgggccaggatgttttacatatatatatgatctctttgatgtatattctctttgactttgtttttacttttggcctgtttcacatcagtccgtgtggtatgccttagtacccccctgagtggcatgaaaactttgtttttaaggcactcagttttatttagaatttataggttgcatacattttgacggtacaaattctttaaacaaagcctaagttaacatatttggactatggtaatacttctggagatgatcggcgttccaggcccttggcacg

SEQ ID NO: 356940 - DNA, 1071 bp, Cannabis indica
ttttttttttttttgattaataataaacaaatatttaaaaggacttaggattgaaacaaaatcataatataaattacttttgtcacaactttttctaattagagttatatttataataattacaagagaaatgttaaaaggtaccggtggtgtctagcaccttcttatgtgtgaatatcgttattggtcaaactaattattgagtctcatataatttaatataatagtttttaagaagtatcgctagccgatcgctacgagacatgtcgagaaggtgctagacactactgatgccgaatagcaatgctctaattacaaatatataatttttccaataatggaaacaaaatatatttatatagaataaagacaaaattaatgcctagctacacctaattattagctccctatttaaatctaatttatatcttctctctctatcctaccttttataataataataccaagttaataatcactctatatatttatataattaattactttaaattttatttttaataaaactattcacatataatttttttaaaaacatacatataaatataattggctcgtcatataaaattattagaatataattaatttattgggtgccaaatatagtaagacaaaaatgatatctaaacctagatattctagctccatataaaactatatcaatacccattttaagattagatcgaccttaaaaaataaaaattattagactatttatttaaaaatatatatatttttctttaagttgttgaattattatatatgtgaggtctaagtaggggtttaataatctggcttgggagagatattgaaacttgtttaatacgttgtatgatcgacttattatttagatttaataataaatttggggctataaaataagaccaataatggcctctcttatttttcacacttttaacaaatcttttctttctttctttcttttgtctcttattttctatagctcctatataatatgaagtcatcatcatcatcatcattaatagtaataattcttgtgatgatgactatggttgttgggtgccttgg

SEQ ID NO: 356941 - DNA, 739 bp, Cannabis indica
ctgatatggttaggtttaatcttagttgtagtatttatgttcttcaatttgttcaaagtcgaccaattggatcttctcgtgacacacagattaaggacatggtagttcaattgagtggagcggtaatcatagatattgaatctatagcttctataagtatgtagaagtgatacgatgatttcctttgagcttggcttaatagagataaatgattgaggtctcatttcagtaattatattagtttactaaaatatcatttataggtagctaagtgttttaaggataaaatacattgaaaggtagaacggtaaatttgtccctattcaatgtagattatctatagaggatctttgactattagaattgtaacaatggaaagtcataatgtatctatatcttggtacatatagagtgttctatataattgagaatgcaattcctaatctatagttgcacaaggaggaattaataagttagggaatttacttggtacattctagatctactaattggaagctcgattatataggtccatggtcccctcgctacttgagataatacttcttgcagactcagttaattggttttgattaattaattataattctaaaattagactatatcttatttataaattttcactaagcaagggcttaattgtgaagaaaagagattttggggtctatttattaattaagagactttgtatggtctaattaataaatagtataaatgacaa

SEQ ID NO: 356942 - DNA, 677 bp, Cannabis indica
gggccgggctactctcatcaaatctgtgggcctgtcaatgccgatgtacgctatgcaaactactaaactctccaaccgtctggctaccaaaattgataatatggtgtgtgacttctggtggggttttgagaaagacaatcacgagatttacttaaaagcgagggataaaatttgccttccaaaatctcttggggtctggggttcagaaaatctagaggaatgaaccaagcctttttagctaagtgggggtggaacatccttaatggaagtcagactctgtgctgtagggtgcttcaagcgaaatacctcaaaagaaaagatttccttaactgtggtttcaaagaatctaattcttggttttggaaaaacgtggttaaaaccaaatccatcttaaggaaatgtgcgtgcaaactggtggcggatgggagggctacacgaatttgggaggatccttggatccctcacatgaagaatttcctccctaagcccattgggtctcctgttagggaccacagatttgttgtggagttgctttctatagatggaggttgggatagtcacaagttgaattgcctttttgatcgtgagactgtttctgcaattttaaaaggtggtgctccctctagcatgggtcaagacaagtggatttagactcttgttgtgatattttgcacacg

SEQ ID NO: 356943 - DNA, 1128 bp, Cannabis indica
aatctagatcctgggaaaatatttccaacataagtctaacccttgtctgcaaaccccatttgtctcagcattgcacacaaaaagtgccaataaactctgtcataagccttgcttaaatccaatttcagcgccatataaccgtctttaccaacttgcttcctcttcagataatgcagaatttcaaaggaaaccatgatattatcagtgatcaatcgcccaggaataaacgcactttgattcaaagaaataatctctaataataagccattcattctattagcaagaactttagtgatgatcttagcaataacattacaaagagaaataggacgcaacttgctcatctgataagggttctttttcatggggattaagactatattagtatcattcattccattaggcatttgctcattggaaaataaatttctaaccgtaagaatcacatcattgcccactatggaccaatatttttttaaaaaattcggattcataccatcagggccaggcgatttatcatggtgcatctgaaacacaacatctttaacctcttcatctccaataggccaaagaaggaactcattatgctcatcacgaacagtaatccagaacctcatcccatcgagtagactcaacagtaaataacttagtgtaaaagtcgaccatcacattgtccaacccaatgcctcatgttcccatccgcatcttttaagcaaaaaatctgattattacgtcttctagttgatgcttttgagtgaaaaacttgctattttgatctccctcttttaaccaaagttgttttgatctttgtctccaaaacacttctctttgattaagcacagcaaaaagctccttcttagcatcataaaaaagtttcttcccctcttcatctcttctacttttaaaccgcttaagctcctgattacaatgtttgatacgctttgaaaaacttccaaaaacatcttttcccactgccgcaacagtcgaccacactcgtaaatttgttcctcaataccgtgccccaccaacctatccccagcaatccccgaatatttataattattttttaaaattaaaattacgtcgaccactaaaaatttgccacgtgtacaagtgtgtacacgtgga

SEQ ID NO: 356944 - DNA, 878 bp, Cannabis indica
gtgagtatttactcttcttgcacttatacaacccaagatttttcgaccccatttaatgagctttgagggggtatttatagttttattttccaaggttttcaacatacagtgtcccgtttaggcgagagtcaaggcatcatccattgaatagagtagtcaactcatctaaaatgataaacattctagcaatcttttattcgatcgaaaagagaatctgacgttgtctcgtttaggcgagagtcaaggttattcctatgtcatgagcctccattattatttcatacttttgtaagtcttactaatagtcgccaccattacagtgattcatactaaaaataaaatacttacaaataatacttatcttttgagattctacgacgttaaattgctaatgaacgttcctccattagggaggattactcactaaaacaataactatgtagaaccaacaatggagatcgaatgtctcttgattaaagctcattatttaaaatgtatttttatttaatcatttattttatttatattttaataatgaaaattatatattaaagttggtccgaaaaaagatttgaaaaaaaatatttccaactttaattaaattttcaatatttaatttcaaaatgatatattgatatataaaattcgaaattaaataaataaactaaaatataataaaatgagatttaaaaaatatctaatttaagttgttttaaaataactaaattttcaacttaaattatttcaaacaaaatttaattaaataacaaattaagttgtaaccacctaatttgaaaactattccattttaagttgatccaaaattaacaaactttcaacttaaaaaataattccaagaatctttcaataactaattc

SEQ ID NO: 356945 - DNA, 323 bp, Cannabis indica
ccaataaaaataattccagaaacagatattcaattatgttacacgaaaattcacaaacatcaatcaatcatcatacaacacacaaaacaacatgataccatccaaaaaacaaacaaatcgttttaagtccaaaattcttgaaagcaaatcaattaacatggctctgaggccagttgttggaaattattttacaaggatcttagatctactcacaagtacgttgattaacaccctaaatatgaacttctaaaacgattataaattaaacacatataaagtatgagaaaccttacattggatgcagcagaataaaatgtctcctt

SEQ ID NO: 356946 - DNA, 791 bp, Cannabis indica
caactttaagtttgcagtggctcatttttcttcgatttcatcaagtgattctactaggagtatgtgatttgtatcttgattgtacatcaatcttctgtgggaaagtggctcgagttctacaagcagcatagcttcatatacgtacgccattacggatggtgtctttccagttgtcgttttctcagttgtacgatatgaccattgaacttcaggaagctcttctggacagtttcctttggcatcttcaagttttttctcctgtgtatccttcaaggtcttattgagtgcttcaacttgaccattcgcttgaagatgcgccactatggagaaactttttgatataatggttgcaagtggttcagcttcagtccaaactggaaaattacgttcttcacaataaagtcttgaaatttctttgatgtaatggttgcaagtggttcggcttcagtccacttagtaaagtaatcaaccgctaccactacatactgcactcttcctttacctttgggtaattgtccaaccaggtcaatcccccaaatggcaaagggtcacagactttgcatctgtgttaactcgttgggtagagctcgtggtatctttgaaaatctctagcatttgtcacacttcttaacataggcttttgaatcttcaatcatcattgaccagaagtaaccttgccttagaattttcttggataagctttgcccggcgacatgatttccatagaattcgtcctgcacttcagataggagtcgtgcagcttcttcgtgagtaacacatctgagtaatgg

SEQ ID NO: 356947 - DNA, 1020 bp, Cannabis indica
agaggtatgtttcaaataaatataaaattagaggtaaatttgattaattgattaataaaagggatatttttcaacttacccctaaagttttattaagtttttatttaagtaaaattaaatattataaacaataaatatttataatttaattgattaaggtgtatgatatattatacaatatcatgagtttcaattccatacacttatttttaatatttttttagggtaaatagcgttaacatccccagtagttctattttacttgcaattaacccctaaaacctaaatttgggcggtaaaacccccaaaactacgattccgttaacaaattacaacttccatccaaatttagttgttaactgtcaggttggattgtccacgtagacatagtatacacgtggcacaattttattgactcacgtaaataataatattaaaaaattaaaattaaaaataaaaaaaaaaagatatattttttttcaaccatgacatatttttctgaaaaaaaaatattaatatttttcttttatttttcttcttcaatccaccaccaccatccaaagtcactgtaaacaccaccactaacacaaccgaaaccaccatcatccctagccaccgtaaacaccaccacccaccactaccgaaaccaccaccatcaataaccatcgtaaacagcaccatccaccactatcgaaactaccaccacaacctatttttcaaatccatatcacacaaaaaaattcaatactaaaaccaaatttaaacaaattcaaatccaacaaacaaataaacacacaaatatatacacaaaatctcagtcccaaaacttaaatttgaaaagcctaaatttattttccccacaacaattatcttttctcatatttaaaaataaagaacacaataatacataaatagggatatctatacacagatcttgatgattgtaaaaaaatttatagaaatccctagatctagagagagagagagagagagagagagaggagggagtcgagtacgtta

SEQ ID NO: 356948 - DNA, 798 bp, Cannabis indica
cttggggctggccttgcgcctagtgcccaggttgataatttgccaacctgggccacaaaaaatggagttttttaggaatttttctgagcatcatcttcgtctttagaaaatattaagattcaactatttccggggaccaaacagaatttctgaaggggaaaaactgggtcccaatgctcaggttgacacctagggctgggcccagcacccaagttttgacattttatcaacccgggttgtttccaattcagttcagcaaaaatgctctagaaattttcacattcattagaactaatataaattcaagtaaattcgatgagaaaaccacaaactcgagtccttggaaataggacccactgcctaagttgacctagtgctaggcccagcgcccaggttgacaattaaccttggacggtgccttcaattactcaaatgccaaatctaatatgaccattgaatccagaatggtcaaaaatgagggaggagaccccaccctcaagttcaaaatccttggaagtatcaaaaatagaatcctaaaagttcggtataaaaggcctaacacacatgttaacaattggcctagtttgctgagttttgcttatctaaatcagatgtcatttcaaccatccatctagtttttcacaagtacaatgatccatgaagttagaacaatcaaattcacattttcaattttttggcaaattaactcactcggaaatcgaaagttttgagtcttctgttaatttctgcaaaacatcaacatctctcacaactagtgaccagctttgctagaaccta

SEQ ID NO: 356949 - DNA, 748 bp, Cannabis indica
attggatttgcaataggtatatcattcgctaactatttgttattataattaattatcaatgcatgcttagttgagtttgaatatcttaaatattcatctgtaatgaagtaggttatgtgaatacatgtactgcgatcggatgggtggagaaattttgtattttttttatgttattttgtttgttttgttttgtatatatttgttttgtttgttaatttaggcacttttaaaaattttgagaacgtccaattacagtctttatgttgccgaatattcagtaggattaaagtaaactaatttttgtattattttgtttgtttgttacaatataacttactttatattgtgtttgtttatcctgaatacataatggttgttcatgcatttaatatttcgtatagattacttgttatatatatagctaactttaaattttatttgttaatggtgtagatatgaccaactcaggttcgggatcagattcagacccagaggcagagtgtcctaggccgatgcctacacgagaaactactcaaatgaatgaaatatccaagctgatggatcaaggcaaaagtgtggccctcgaggtgaatgacaaagggcaatactatagcaaaagctactccaaactattatcggctttaggagttagatgccctcagacgatagggttgtcctataaaaattggaaagaagtcaaccctacactgaaaaataaagttcggacagatatacaggtaagcagtta

SEQ ID NO: 356950 - DNA, 582 bp, Cannabis indica
aactacacaatatctacaaaagaataattaagttattttcatgttagtgtgaagttttttttttgtttttttcgcaacatcttatttcaacttgaaaataatgtataatatcaacttattttcatgttgttgtaaagtttgttatgaatcatacactacactagttgttcaacaattaaaagaatatagttatacatgttaaaacaaaaacttatctttatctcttacatccagacatgaaaaataataagagaacacattatgttgattttgaatcgagtgggggtattgataggaagagattgtagatatgaaaaaaattacttatatttagtagtgacattgtttgttgttttgcagttgtaaacacgttgtttaattttattactttttgaacatgttgctttcacattgtttgtacgttgaatttcatatgtaaagatttgtagattccttaaattatcagctgtttttattattttttacatcgttgttaagcatttgttaacaattttaaaaactactaacaactattgtatctttgaaaaaaaaaaattataattatacaaatacttgatgtat

SEQ ID NO: 356951 - DNA, 1146 bp, Cannabis indica
caaacaaaatttaatacagatttgaacccaatatcaaacacctcaataaaaacacaaatctaaattcaatgtggtgagtgaaccaaaaaaaaaccaaaatcgtctcaccttgaaaacttagatctggaatctaatccaggtacacaatcatcccccgtccccgtagtcgacaacacaaaactcggcttattcaccttcgtcgccgatgccgttaaccctaaagtacggaacaccaacctcgcaagcaaaagctacctccaactcggcatcacaaggacgacgaccacattgtcgacggcgatgccttgggcttgagaagaggaataatcgagaaagaaaagaagagaaaaaggaaaaaaaatcttgtggaatttatttattaaaataattttatattctgaaatttatatatgataattaataaattacttttcagatataataatcagattaatattaaaatgtgggtagtttaaaaatattaaaatgttaaatgcatcaaaaagtaaattttatttacaccgtataaaatgataaatacactttatttttaaaaaaaaaatataaatttaaataatttttttttgaataaaaatcataatatctattaattaataaattcgttcaaaacaatagaacacacttcaaaggaacatcacacgaccagtagagaaacaagagtcttttcccaagtaatgagcaacttatttgcagatcgttttacaaaacacaaattgtgaaggcataaaataccgctttgaattgcttagacacacactaagtaatctgctttcaacatgactctatcccacgaatgagttgtaatccactcaatgcttctttaatgccctattatcacagcaatttcgggttgaacacatccaatcttccttttcttgaatacttctactaggggtgttcgcggtgcgggttgtgcggtttttaaccattttttcaaaccaacccgcacatgcggttttcctaattttccaaaccgcacccgcaccgcgatactaaaaaaccgcaaaaaccgcaccgcaaaaaatgatgcggtgcggtgcggtttttgcggtttatgcggtttgaactatcacaattttttttttgaaataatcataaaataattaaactatcattaatataatt

SEQ ID NO: 356952 - DNA, 870 bp, Cannabis indica
ggccttgtatgacttaaaggctaccacatcgatattccacttgtgcctgaatttccaacaaagaatgggttaggatgtctgagaggaaactagcaaactgctcgggaatgttataaccttgcagtggccaaggctaagaaggaagtatcctccagccagagcacagacaagggaaaaaacatttccaagtagggaacttcgcaaggcgggggatgaagatgtggatcctcgacttggggacccaagcagcaatgttggacttgtggaagagttacaagagatcgagattgatccagatatctcgatcagaaagctgaagatcggaaagggtttgttgctcgaagtaaaattagaattgataaaatttctgagagcaaacctagacgtttttgcctggtgacatgctgatatggtcggaattgatccttctataatttcacacgttctgaatattgatcccaatttctggccagttcaacaaaagtgaaggctattagacaaagagcaagcactaaccctaaaggaagaagtagaaaagctacgcaacaaataatttcataattgaagctttctacccagcttgggtcgcaaatcctgtattggtgcccaggtcgaacaagaaatggtgagtctgtattgatttcacaaacctcaacaaagcatgcccgaaagactgttttccacttccaatgatcgatcagctcgtggatgcaatagcagggcatgaaatattaagcttcatggacgcttattcgggctacaatcaaattaaaatacatcccccaaaccaagaacatacaagtttccggacagatatgggtctatattgttacaaagtaatgtcgtcggtctaaaaaacgctggagcgac

SEQ ID NO: 356953 - DNA, 964 bp, Cannabis indica
tataagttttggtagtgcaactagcactttaagcacgcatatacacataacatatacatatactcagttattgatataacacattatatacagttcttagcttctttccagattcaagtgtgctggccaacctgaacggaaagtcttgtgctagatggatgccctaatcacataatgaaaccgggtaagttacatgatcaaaaaccctaatcccgggaaacccaaacccataaccctaggttctgttatactctctataggttacccaaactctggaattagggaaacacctaaccacggcagtgaaatggacgaaaatttgataaaatgaagtgtttgggaatcctgccaaaaccggctagctggttttagaggtctggcaaaactggccagccggtttgcaccaattctccccaaacctttcacctcttgctcaattttccaccaaatgccaccaaactttccagagtacctaaacaatgcatatacaacatattccagccagtatttcacagaaaaactcagtgaaacaaattatgccattagagatcaaagctttgaactcaaagctcaaacttgcacaaacctaatccaaccattaataccagctgctaggacctaaaaccaactcaaattaagcttagaattcgaaccctaagcattcctaaccctaacagcccctatatcacaaaatcacaaactcacaccaagtaaaaacttaaaaattaataaagggtgctactagggcttaccttagctccaagaacacttgaattcctagatgagttccagaaaaataatggtgaaaaaaggtggtctcccctggttgcttcaaccgaaagaaagaaagagagaaagctctatatttaggttttctttttctttaattttcctctaaatgaattgaaggttaatccttcaccttagctgaaataaactaatgctaggtgtcactctaataggc

SEQ ID NO: 356954 - DNA, 598 bp, Cannabis indica
gttgcttaccaagctgacatggtccacattttcccaaagactccttatctaatttaggtaatcctcgaacaatttctgcattatacgatctccttagatttttaaaatgaatatgacgaagtttttcatgccataaataagtaatattatcaatgacagaatgacaaatagcatacgtagtgagagtataacaatcgtcactagatctgaacccttgcaagacaatttcatcaagaatattatacacataacaatgattactatcaaagctcacagtataaccctgattaaaaaattgactaatgctaagaagattagcttttagtccatcaaccaacatgacattcttcaatctacgaagcccttcaaacttgagagtttctatccctatgacttttccaataagatcgttaccaaaagtaacttctccacacttcatgggtctaatgttctcaagatattctttttcacctgtcatgtgtcttgaacacccactaccaaagtaccacatgttagtagcaatagttttaaaataagaagaacctaccaagaatttatttttgacaacccatttttgtttttgtaaaacatgtttatt

SEQ ID NO: 356955 - DNA, 687 bp, Cannabis indica
agaatgcgacactttgcgagctggggcacctaatccacttccataatagtattgaatttctctaaataatcaatggcattagaggtacctttgtattttcaagattcggataaccggaatcccttagggagccgagcttgtcgcactttcgcagtgaaaggggaggtcccatgcagcttgtatatgggctttctctgctgctcaagcattttcaaagcttgcaggagcatgctttgatcaatacccccggctcagggagcagggacttgtgcggctgcaggggctgttgctattgtagcgaggtttgctgggatattaaccccagtagtcacagttggtgcgttaggcgggtttgtgcgagtatttacaccctgatcgctaatttggggatcacggggctcttcatcgtcacgaggggcgtgggagtgtgctctgaaaacatcgttaaggtgatcacgcagacccccctgtgaacctgatatcgtcctccctgcggtgtctccatagaaccggacctcgtgtacctgctgggtgtgcgaccatgcgaggacgaggaggcggattctacgtcattgtctcccaaaggtctgctgcgaggattgcgtcgttcggggtcttcctctatatgtgcctcctggttgggatacctcgcagatgatgggttttgtgccctaaataaaacccttt

SEQ ID NO: 356956 - DNA, 558 bp, Cannabis indica
catctctagccacaacaaacaaagctataagtgccattgctgtacaaaattgcagcatcaatattgactttaatggtattgcaccaggcctagaccaagccgaatgcccatcttttgctgtgagataagctgctgtaggaaccagcattcggtcttgagcattgcaccagttggagagagtattcttggaccaaaaagacaacaacagctgctgtcgatgaagtgtccaaccacaccagattcgtttttggtctttcaaacagcccaacaaagcactgcaacataccgctaactgatctttatccaactgcagtaaacatggcttccaaccaacccgctaaacgaggtcacggctgggatagttttcttcaaaccagcaagctcccaacaactattagcgaaagaaaaatcaaccaaacaatggtaaggagtttcagcatgaagcacacaccttggacagttataatcaacttgaacatgtttagttccgctaatcgtgttttagtgggaagacaatccgaagccgtcacgccaaactagatctttgactttaggagg

SEQ ID NO: 356957 - DNA, 189 bp, Cannabis indica
gatgttgcttatttaccctctattaggaggaatttgatctctgtatctattttggatagactaggttatagtcttcattttggaaatggaaaactgactttgtatcgtgactctatgttgattggaaatggaactttgtgtggaaacttatataagcttgatttgcttgatgttgttcctgttacttct

SEQ ID NO: 356958 - DNA, 717 bp, Cannabis indica
ataactattaataataaagtttttattaatattatattattattatgatattattattatgatattattattataacattatttttatatatataacttatcgttaacataatatatatattataagatatcagaacaatagtacgaacaaaaccctcttcttccttcgacgaacattttctcccttttttatctattttctttgatttttaactcgaaacctagtggtctaagctctggtagtagcgggatagcaaatccttgaagagggaaagcttaaggtatggcttaattacgttttaacctaaaaatgattagttttatatattggatttatgatttagagtggttatggagattctaatttcgtagaattgttctttggtagctataggactagtttcgatgtttacttgttgaatttgaagtgattttgagttaaaaatcaagtttggaactttttaaagcttagcccgaacgtttatggcgtttttcatttaagggctcaattttaatttctgttacgtaataatggtaatatttatggtatatatatgccctatgaagtttggagtgatttggatgagttttggtagtgtttcggtgagtgccgaatttaggattttcgagtttcacccttttttgaaattcttaagagatcagaaatcatatttttgtaataacttttcactcgggtatccgttttagacattctat

SEQ ID NO: 356959 - DNA, 559 bp, Cannabis indica
ggccgaacctctttaaaaactctttgttttttatttatcttttcacattatatctaaattatttcatttatcgcttacgattaagactcattgtcattggctaaagcgaggtcaacattttggtgctttcattgagagccaaaatcataaattcgctctttacttcaaatttaatcttaaacacgatggtggtacaaactcgtagaggcgtgatcaatctggcaaatccaccggcagtggatcccgcattacagaatccaagaaatgcaggggttccaccagccacaaatcctaaacaactaattacgcagtcaccaaccgtgggtgatggtgtgacgtctcctttgaatggaatcgcacccgatgtgcaagagactggaaataccaattcaacagccaactcagcattccaatgttcctgtcctggatttgtctgatacctgctcacaattcctactgcataacagatgtcaggtctagtgcataacattgcatacattagactcacaacttctaaagcataaggaacccttcttatgccctctatctcttgaggatc

SEQ ID NO: 356960 - DNA, 1327 bp, Cannabis indica
gggtatccaattagtaattagattggattttaaggtctaattagattggatcggatgataatttttcaaatccaattactgatcgaattggaccggatgagaaaaaaaaagattagattagatcagatgcccacccctaaaagcatgggtatacctaaaaatcgtaaacaaataaaaaatccattaataattatctttctctagaaatatattcaacacaaacccattaattattatagttaatagaaactctaattccttgagctcaaaatctggttaaatgctaggtactttcagtagtcttgttttttgtcttcttggccttttgtgttcccttgtaaaggtggcctttaccatttgttaaggtatgtggtttagaagaatgatgaacattccaagcacaagaaaatgaagggagagagagaattaaaaaaaattgttagttttaattttatttattttaaaattaattttttaaatttatataattagttgtttgtttaaaatatattttaataatttttctaaattagattaattagagaataacacgtgctattttagaaagaattaacacaattggattttaagtttttttattgtaatttttaagatttgagtatttatgccataaatttctctataaaatatcaacataattttttatttttaaagaatatttgttaagtaatagtatattctgttaaaattaacatagaaaaataaaaaaaaatataatcgttaaaccaaaaaattacggttacatagtcacaatttttattagaatagatatatactagtgtgtggaggacgtgccatgcacgtaaccccctgtcaaaacatgtgggttataatcatatatgttatttttactaattatatttaaacaattattgaaaaaaattatgtttaaacaaggacataatgtggtataagttcccttattgacaatcattcataacaaaaaaaagaaaattaacaacaagttttgtaattatgcattagaacataatgctaaaatttgatacaaatatatcacaagtaattttttttaaatatagtacaatttttacatatctcgtaagaaatattcttgcaaacttatacataataaaaataataaattaaaactcttataaaaattaataaagataagtatatataatagcgaaaatattaagggatacattaaggtgtcaagcaccacaaaaggtaacattattatttgtgcattttaatatcaattttcacaaatgttaatgagaaatttacatggtatactaacatttggcatttttttacagaaatattgtcaggcggtattttt

SEQ ID NO: 356961 - DNA, 634 bp, Cannabis indica
ctaatatatcgcatcgtctaatcgaacaagctcattcctacgcccggtacttatcatatgtcagtaacgcccatatctacacatcgccaggagtaatttcctaatcagacgagctcgtacctacgccccgtatttatcatatgtcactaacgtccgcatctacacgtcgccaggaagaaaccctacaacagtttcattttatgtcataacttgacaattttcatatcactgacatcgtatctacacattgccaagagtaatggcctaatcaggcgagctcgtacctacacccggtacttatcatatgtcactgacgctcgtatctacatgtcgccaggaggaaaccctacaacagtttcattctattccataacctaacaattttcatatcactgatgccgtatctacacgtcgccaagagtaatcgcctaatcagacaagctcgtacctacgtctggtacttatcatatgtcattgacgcccgtatctacacgtcgccaggaggaaaccctacgacggtttcattctatgccataatttggcaattttcatatcactgacgttgtatctacacatcgtcaagagtaattgcatttcctaatcaggtgagcccgtacctacgcttggtactcat

SEQ ID NO: 356962 - DNA, 632 bp, Cannabis indica
agatgagaatttttttagtatttattttaataggtgatctcttatttatagacatataagagtcaaatattaaaaaactaagaaaaagagaatattgattacaattaatgataataaataaaagatttggacatctatataattattaatatttataacactcctccttggatgtccataattactgcctcattaaaagtctatccgagaaaacccagtgggacaaaattcggtcaaagaaaaaagagtgcggtatgaaattactccccctcattttggcattcatggagatcctttaatcgacacattccaatcttgtgaaccatcttctcaaaagttgatgttggtaatgactttgtgaataagtctgcaagattatcacttgatcgattttgttgaacatcgatatcaccattctcttgaagattgtgtgcaaagaagaattttggtaaaatatgtttagttctatctcctttaatgtaccccctataagttgagcaatgcaagcagcattatcttcatagagaattgttggtacttctttattagatgttaatctacatgttgctcgaatatgttgtgtcattgatcttaaccaaatacattctcgacttgcctcatgaattgcaagt

SEQ ID NO: 356963 - DNA, 567 bp, Cannabis indica
aaaatataatccaacagttactgcctgtaggtcgtacaaggctggatgacttatcatggcgttgaaggctgagggcatgtccattactacgaactacgacatcactattctggttgttggattctctcaaacaactaagggcagtcggatgtaccccttgggcgcaatgctttggccatagacgttgtacattactaatgtgcaaggtgtcaagtcggttagttggagccccatttttcatattattttcttgatttttgcccacctgatgtggcatgcttacatagacaatatcagtgccaagtggcagtataactcaccaacaaggaggtcaagtcagcactttagccaacgagggtcccttcactaaaacgagacaacgagcaacagaccagccacctcaatggggctagccagccacccctagtaggccctatggccagctagcttctagactgcacaaggccagccagcctgcatcctagaggtgcatggccagctaggattggacttggcaagacttcaatgcacaaccttacacgtggactacaagttagactgtgaatt

SEQ ID NO: 356964 - DNA, 640 bp, Cannabis indica
cctgctaactcttcccgaatggctgtggcagacacattacaatcctctatcgtatcattgagggagtcttgtaatgcagcctgcccattttgtagcacaatgatagtagcctgcatgtctgttgctgcttgttctaatgccctgatgcgatcctccatctgaggcgcgtttgatgtttcagtggcagcatctctcctctcgattgcagctaccctggccaacaagttagaatagtcttcagccaacaaggcaacttgtcgttgtgttgctgttggccctgagttttgattgctggaggctagatccctgaccctctcgtctaggccatctaattcccctatgcgcctctcaagctcttaaatcctttgggtgttgctcaccattatgtcgtgttaccaagcttctctttctcttggctgtgataccaactgtcacgggccgcctatttggacacccccaaataagtggaatgtgcggcgcttgctggcacaccgagctagcaagtcagcctaaacgcgcctgcaggtaaacaagttcaacggttaggcacgatacatgtctcgtacatgtggagtgcaaacaagaagcatgagcaagcaaacacaaagcgtccccaaggaccaatctcacacaacccaca

SEQ ID NO: 356965 - DNA, 772 bp, Cannabis indica
ataatgtgctagtgtgccaagacctggtaaggctatatgggaggaaaaattgcaaaccgagttgcatgatcaagattgatctaaggaaggcgtacgacactatagaatggggattcatagaagagatgatgaaggcacttggcttccctcgtaagttcatttctcttatcctggaatgtatttgcactcctaaattctccttgctcttgaatggctctatgtgtggattttttaacactaagagaggattaagacagggcgatcccatgtccccactactttttgtattgggaatggagtatctctcgagaattcttacaaaagtaggagagtggcctggatttaaatttcatgatagatgtggacaaatcaaattgaatcacttatgctttgcggatgacttgcttgttttttgcaatggtgatttcatttccataatgcttttgctcaaaggcctaaaattgttctcatctacttcgggactaatgccaaatgatcataaaatagccatatattgctcgggaatggctgatgttgaagtgaataggatcctggaggcatcaaactttaaaagaaatttcttgccatttagatacctgggtgtaccgatttgctcaaggaaaatttctagagcagaatgttaatacttgctggagaagatgactagtagaattaggtgttggagttcaaaaaacctatcctatatgggcagggttacattgattaactcggttttgttggctattcacacctactgggctcagatttttat

SEQ ID NO: 356966 - DNA, 645 bp, Cannabis indica
cccgttacccgaatcctgagtcaagatctggatcactgtcacgggtctcagtctggttcttgttcaggtcccaagtcccatttctgagtttttgttcgggatcgagactggggtccggttctagttcccgaccttggctctgtgtccctagtgtggttccatgtttgggtttgagttcaggttcacgttcgtgtcccgggtccaggtttgggttaggatccgtgtgcatctcccaattcgggtctaggtcaaatttggagtctaggtcctggtctggttgcggttctggatgtaggtccaatttcagttatgattccaagtccaagtcctagttcaagtcctagtcaacttccggttctggttccaatttttggtcacaggatacgggttcgggtctacttttgggttgggactcggttcaggttcgagtgtccgggttcaggtctacttttgggtttgggactcggttcaggtccttaacagggtttgggtccaatgctgggtcccaaatccacatactgactacggtttttgtcgaagccctgggtgcagatcaggattccaatctcgggtccaattcttgttctgtttctggtgccgggtcacgagatggttcctaggttcaagttcgggtctgggtcgggt

SEQ ID NO: 356967 - DNA, 511 bp, Cannabis indica
gcttaatccaattggtgcttatggtttttactgctggaaaaggtttggttattgttgatgaagctcttgttcaagagcttagtatagccatgattgtgcatgattttgaggtgtttttgctacatgaattcttgagggtttgttgctggattttaatgcttgatgctatgatttaaattccttgttgattgctagcaactatattggttaatttgtggttttggttgagaaattggagtgatttggttaggtttggtagctgaaattcgagtaggagcttgctggtttctgagttctgcacccagatgccgcagcatgctctggagcatgccgcggcccgctcctctgactggacctgggaattggtcccaggtgtcgcggcatggtttgggcatgccgcagcccgccctagtgtttttgggcagttttgaattgaatttttgaaaattcgtaactcttgattccgaactccgatttgggagttctttatactgttggaaagctcgttccg

SEQ ID NO: 356968 - DNA, 563 bp, Cannabis indica
ttaaacaacatacttgtgagtagatctaagatcctggtaaaataaattccaacacctacatgattcgaagagcagcatgtagattctggattttagtgtcatctccaagggttgtttaaacattggtagcaggcggaacggctgtgttatgaatgccctagtttgctactgaactagtattcccagtctcttgcacacaaggcacgatttcatccacaagagtcgtcacactgtgacccgcatttgatggttgtctgatatttacgattggcggaacccttgtgtttcatgggttctgtagtgcaggatccaccgcctatggattcgctggatcgacctgttggaaatattttaccaggatctagatttactaccatgtatgtttcattaaaagggttcaagaaaaccttaactttgggtgcaccagagtataatgactccttctgttcagatctctagcccttaattcctttttgtagcagagcatcaccaagatctgaatttggatctctttctctccttccttgatggttggattctacacaatcttccacactatgatt

SEQ ID NO: 356969 - DNA, 1905 bp, Cannabis indica
tgaacatataattacccaaaaattagaaaaaagaaaaaaggaaagtaacttccttacttggtcaccacgtgaggagagaaaataggaaaccaaaaaggatatttcaaaatatagtcaaagattaccaaaagttgaaaaaggaaacagcataacccacaaaatctacaaaataaatacaccaaccaaatccgaaaatgacacgaaaaaggaaaccaacaaaataaataattaaatgaaaacaagtttcctaaaacaccacaaaaaagcaaatccctaaaaaataaaggaaacacaatagataaaatgcaataaaaatatgtttccataattgaaaaaataaaagaaaaaaatagcccaaaaattcaaaaaatttgaaaaattatgcccccctttttcttaaaatctttcaaaataagcccccccatattaaattgcaaagaatgaacatgacaacacacaaagagacataaagcaccaatcaacactttagagcaaaaatagtgtctaagaaaataataaaacacgacaagaaaaatatcaagattttttaagaatactcaattgacaaaatcgaccacaaattttttactttaaaaaacaaaaaaaataaaataatcttgatatttttgccaacaaaaagtacacaatgtccgcttgtcttggtccctgataaaaaaatcaaacttagaagaatagtcaaaaattattttattaagctaatgaactagtggaatgaggtcataccgattacgcaggaaaaaagtggactcaatcaccaagaatattaaaggcaattcaagcagtatgtaacagctttataactatgttaagcataagtgtgtgaaagtgtaagcaggaaatattgcccaatttgtcaaaaagacttttctgataaactataaccataggagacgctgtcacactacctcaatggtagcccttttcaatggtagcatatcttctacataactcctaattacatagttccaacttactcagagacgactttcacacattgagataggtagctctattcatccaatggagcttgaacacacagtttttaaattttttttttgaaaatggtagcttacataacactgtttgaagaacctatatattcttgggaggagtgaacaattttcctgaaccaaacctatatgaaaccataacaccaaaaacgttagcaataaaataatgactgtaattcttataaggttgagattttcttctaggacaaagacaaagacaagacattatgaaccctaagtcaactcaaatatgaaggtgttggaagttattttaccaggatcttagatctactcacaagtatgttgatttaacaacctaaataagaacttctaaaacgatgggaaattaaacacataaaagtatcaaaaatcttacattgaatgcagtggaatatatgtctcctcccactcaaatctctaacccttgattcctttctatcgcagagtataatcaagatctgagcccgatcgtccttctttgttgtttttgaattctacacagccttcctcactatgattgaggtattacttgatgtgtgtgggcgactactctatcactcatagatttcgaaacagagaaggtagagagagagagggtggcggctcagagagagtttttgtgtgagaaaattctgtcagaatattgtgtgtacaaaaactgaagcctttaccttctatttatagaagaccacctagggctatggttgaattaattgacatttaaaaattgaaaaatcaatgtgaaaagggaagcatagtggccggcctaggcattgtggaaacaaggcttgccacttttccaactttttatttcctactttgttagtttcctgttttgtcaaaaactaccaattcctttgttcaaccacataaa

SEQ ID NO: 356970 - DNA, 516 bp, Cannabis indica
aatcacgtaatacgcctatgttagttagggtgttacagttaagctctaccttaatgtattgcacaagttctttgacctgctcgttaccggcttacccgttgaactagcccatacttacatcgtaggaactcagtagtaaaattgggtggaagtatttattatagatatggaaatctattacttctatgtctattagaagtgaaatgctagtttctttagagcttgacttaacgcgataaatgatagagcactcatttcgataattatattagtttcccaaaatatcatttacaagtagctaagtgttttaaagataaaatacattaaaggataaaacgataattttgttcctactcaatttaaaccatctatagaagatcaatgattattgtgattgaaacaatggataaattatagcgtatctatactttgtgtataaagtgttcaatgtaatcaggagtgtaattttgaatctatagtggagttagtgttggaagttattttaccaggatctta

SEQ ID NO: 356971 - DNA, 522 bp, Cannabis indica
ttttgcgcttttgactgcctctttataatacttttcattgaacagttcctggaacttttcccaggtcattgtaggaacataattagttagggacaccatgtcccaccataccagagcgtcttcttggaattggaatgtagcacaggccactctatcattgtcggtgacggccataaaattcagaattctagtaatcacagttagccattgcttgactttcatgacattgggacctcccaagaaaactggaggtgccatgcttacagaacctttcatacaggggttccattcggttcactacaactaccggtcctgccttcatagcaggggtagaagctattggtatttctagaacagggattgtaggagcaccctgatgtctcaaacgccggatctcttcatcttgttcattaatcttggcttgcatttctacaaacctgtttttccaatcttgggcagcctgtggcgggttagcatcaccccagccacgtgccctgcctctaggacctctacctcgaccac

SEQ ID NO: 356972 - DNA, 987 bp, Cannabis indica
ccatgatttgtcgcctctaatagtcttactattagaggtgattttttgtcgcctcaaaattgtcgcccctaaaaattaaatttgttgtagtgccaatgttcaactttttgatcttcatatgataccagaaaccaactacgtgagtatcttatgctacaaaaatcccaccgagttctactagtgccgcacgattttattggtagtttgaagaagagcatggctcaagggttggttctgttctatagcaggtgaagtggtctacaacaccgtcggttgagcctgagattttgtgcaacaactgtggtgttgattttattgaagcctgcgcagatgctgaacttgaaaagctcaatttgtacaactttgacgtgagctttgttgtaggaaagttggtgccagcccgagaagaaatgtggtattttgactgtccaattatagctctacaaaatttagtatcacttggacccaagattattccagcttcattatgtgaaacttaagaagcatgtagataaatgattgtttattgatgaagcagaggatggtattcaatggcgaattctaagtggaaaaagtcaatatccagaacattatttctttcaaggtctgctgctaattgctataggtgatcgagatagtgacacgatcaagtgacatgaatctgtgcaattagtaattgatgataaatgttacaaatagatttttattagacttattatacattcatgagcttttatcatgttattttgtacttggagcaaatttcatttttgatacatgaattgaatattttgatgatataagaaatattttttagattttatcatgttatttggtacttgtgttattattgagaattatagcaatattaaaatgtaatatttcttaatatataacataataataatgtaatgaaaaattatatgattacatttttaaaatgtttttcaatgaatataacataagaggaatgataacattaaaaaa

SEQ ID NO: 356973 - DNA, 1443 bp, Cannabis indica
aataaattctaaaaaaagaaagtctacctattggtaacctgctattacaggtcaaagaaaaatgtaaccatatggttacaataaaaatgtaaccattgaatagtcacccatcaatatatatatatattccatatgcataaagtaagaaaaataataagagcattttaattaaatttttgatgagagttatatttttaaagtgaattacctctaatcaagtaaaaaaaaaaactaaaataaaaacctattaataatattattagaaacaataagacatgcttaaaaaaaggagatatatacaaaataatagtttatacggtatttttacttattatgtatatacaattaagcaagcatatattagtgtaattattttatataaactaaattacattatttcgatatgaaaaacatagagaactcctttactggagagcaacatgaaaaaaaaattcaatataaatctatatatattatatgattgcaacatccaaaatttatacatcaaatatccaaaattattgaacaaaactcccccatctataccaaaacatatataacaatataaactcattaagaagtgttccatataacagtataaactcatcttaattttaatatttaccattattatacttgctagctccaattagttagaaagtgacctccaccaaagacatgctaattaccaaaagaagaattcttatctctgcatttttttagcgtgaaattagctaaatgggatatgtatatatatatgaaagaattaatatggtatagcgagaaattaaataattaaagaaaacttaaaagtctcaaataaaataatttattaatatggtacgatgattaatgtatttgacaattatgattagtcttgatgaagccttctctcttatataggaactacattgtatattgagtattattaagtatttattttattttattgttatctattattaataataagaagtttattcaaataataataataataatggttaacaaacaatttataattaattttaaaaaattataattacttttctctttttaaatgattttatatataaatgtagggactggatttggtcccgttatgccaaaatagggaatacaatccctgattgtactgtagccgttggattgaattggggcatgatctaatggctggggttaaagtaggagtatttagggggggaaaatagtaactagtttgtttttttgttaattttaattaattaatttttaaaaaactgacaacgattgacgtttgacgtttgacgtacgggtgacagttaccaattttgagaatacactaaatagtgggttcgtgggttattagggcacatttcgttcttcttcacacttcttcacatttcgttcttcttcttcttcacattgccttcttcttcttcttcttcttcttcacatttcctt

SEQ ID NO: 356974 - DNA, 605 bp, Cannabis indica
atctgagtggaaggagacactatattccgctgcaaccactgtaaggtttgttttactttatatgtgtttatttcatatcgttttagaagttcatatttaggattttaataacatacttgttagtaaatctaagatcctggtaaaataattccaacaggaatagtgtgggggaaccaaggagaagcaaggcaatgttacaacactgtcgtacatctattagttttggtggtatgagggggcgaagagccttttgcagaagaacatgacaaattggacccccgtatcgggtccgaagtgactttacaacctatggaggacatcgaggaagtgagagtgtgcgacctcgacccatctaaagttattcgtctaggaaaaaatctagaatcagaggagcggagtaagatcatcgacactataaaggcagctacggacgtctttccctggtgccatggggatatgaccgggataagcccctacgtaatcactcatgtcctgaatgtcaacccagatatgcctccggtacaacaaaaaagacgcccgctaaatccagtgaaggtcgatgccctggaaaaagaagtggataagttgttatccaacggcttcat

SEQ ID NO: 356975 - DNA, 620 bp, Cannabis indica
aagttgttatccaacggcttcatccgggatgtatactacccagaatgattggccaacccagttctggtacctaaatcgaatgggacatggcgagtctttatagactttgctgatcttcacaaggcatgcccaaaggactgcttctcgttgccccagattgatcagatggtggacgccacctcgggttttgagttgctatcctttatggatgcctattcgagctaccatcaaattaaaatgcatgtcactgatcaagaatgtactagcttcaggaccgacaagggggtatactgctacctggtcatgcccttcggattaaagaactctggagcaacttaccagcgcatggtcaaccaaatactcaaaggtctcctgagatggaacattgaagtatacgtagacaacatgttggtcaaatctagaatgtgcatgggccatgcagacgacctcacaaagtgctttaaggtagtctggaggtatgggatgaaacttaatcccaaaaattgcacttttggcgtcaaattaggaaaatttctggggttcatcgtaagtcagcctaggatagaggtgaaccctaaaaaaatacaggccttgttaaacatgttggaattattttacca

SEQ ID NO: 356976 - DNA, 824 bp, Cannabis indica
tatgatctatgcttgatgtttgtatgtgtgtattgtgtggttgttttgggaaggtttctgggtaagatcgatcaatagatcgagaaggatctctggttctagggtttgagaaccagagagaaggcagagagaaagagagagagtttgagaaactctcgaatgttcgaaggtgcaaatgagctagggttagctctgattgaacttagttttgttcaatccagaacgacaaatcgtttggtttaaacgatttgtcgtgtgagtgaagaacgacaagttttcattgtcgtgtaggctaaacgaccagggttctttggtcgttgactgaggtttaaattgatttttctgggacagatttgtccctgtcgttttgactcttttcttgagtggtgtagggtaaatttgggatttcaccaagccaaattcctacagtggtattgagttaaagagttatatttttttgatattattaacaatgtttgttatctaagctctctcaaaagtatttctttgtcatgttacagttttaatgttacggcttataaattagttaaacatatctttttcactaaaatatgagatcttttttattgtaagaaactcctcctcctctcatatgtataactctaatccaatccaattttgatactcgaaaaactagaaaccattcgcaaggggagacgtcacactggtaccttagagcatttctaatggaatataaaaaagatgatcatttcagtacacaacaaaaattactattttaatagtatttttaaaaaatgtgctaaatttgtcaaatgctaaaaattgtatcaaatttaggacaa

SEQ ID NO: 356977 - DNA, 518 bp, Cannabis indica
gttggtcatgggggactttaacagttatctgtatagctttgataagatgggaaatgatcaccttgattccccttctatgtctctctttgctgattttttgactaattttagcatgttccctgttcagtttctaggaaataggtacacttggtctaataaaactatttctgaacgtttagattgggtagtagtgtcagaatcttggagtgatttttatcctaaccatagtcttcagcatctaggttattatggatctgatcaccgtattcttaaactaagtttagctcccactagtattaattatactgcccataggactaggcgttttcggtttcagaataattggctagaggacccctccttttatgatgtggttaaaaatgtatggaatagtactctggttcctggttctgtgcaaggacataataaccctcttgtaggttgttataggagttttcttaagaagcaaggagattgtatttcttctctaaaaaattggaatagggacaataatctcc

SEQ ID NO: 356978 - DNA, 1037 bp, Cannabis indica
cccctgattgggggaggttttttgaagaaactattcttttcttcaatggcatagatatcgtcccgagggaccgccaactctgtataatttacaaagcgcgaacaacctttcctcttcgaagaggattccttctttggaggggacttggataatttccgacttcgttgtctctgtggactacgtcttttcggactcattcctctggacttcttccctctaggactgcaagatcgtgaccgcggcactggtgacttacgtttgtctttgcccttatctaactcagccagagaattttcaatcctcttatgcgcctccgccatagcgaagaacttgaccaacgattcaggtcttcaagcttgcagttccttccagaaatgagttcttggtaggacacctgttatcaacctacatactagcgaagactcgggagccttctctacggcattaaagcgtttaaaatagtcttgtaaagaatcaccaggttactgcttgatatttgccagagtggtatagggtggcctataggtcatcgtggcttggaaatgcatgaggaacaggttgacaaaggtctcccatgttgagatagatgcctcgggcaattggctgaaccaatcatgggcattttcttcaaacattgccgcaagaatgcgacactttgcaagtgtaggtacctgatccacttccataatagtattaaatttttataaatggtctatgtgattagtggtaccttggtattttacggattctgttaaccggaatcccttgggcagtcgagcttgtcgcacttttgcagtgaaaggagaggtcccatgcagcttctatatgggctttgtctgctgctcgagcatttttaaggactacagaagcatacgttgatcgatattcccagctaaggtagtattgacctgtgtttccgtaggcgtcgtcactactgcggcgatgttcgcagagatattatctcaagtagtcacagctggtgcggtaggcgagttgatacgattatttatgccctgatcgcccattcgaggatcacg

SEQ ID NO: 356979 - DNA, 752 bp, Cannabis indica
taagtataaaaattattttatacagaataactttttatttagaccgcgcaacgccggttatatttcctagttaggatataacataaatgccctcatgggtgagagcaaaaataatgctctcacctaagaagtacccaatatatatatatcatcaaccaaaaaattaagtcacaccttttttttttctaattatattaatcttttattactatctatcttctctcaatctctaactgccacattttttttatttatttattttttattactcttcatacttattattattcattctctttttcttatatagcatcaaataatcttttttatattcacaaataattacataagttgtaggtacatgctgaatttcataatcaaatattatatagcaatctctctctctctcctaccgagtcctagcataatctatcttggaaaaggctttcgacaaataattaaataaattggaacaattatcttagtttcataaaactttcaggattttaatttcacgacttttttcttttatttaacaaactggttgtatctttgaattttctttaaatgatatatttgaagtattatatcattatatatttcatatgatttttttgaattgttatttcaactaaatattattaattttaaaatttttaatttttgttattattaaattttaatttgtttcctaataaattataaaaaataaaatgttactatgttaggtttatgcagtgtagtgatatttt

SEQ ID NO: 356980 - DNA, 1203 bp, Cannabis indica
cttttcacatatactcggttcgtttaatacttccatcaataccaaattcaattcattaagtttggtctgggaggccaaagcgtcagcattagagttttgttctcttagaatttgttcgattttaaagtaatcaaacttttccaagtttttccgaaccttctctaagtattttgccagttttaaacccttttcctggtattcacctagaacttggttattggtttagacaaaattggaagggttcacagatgtttcttatgtttgcgaaggcttcctcacactcgtctgtccattcaaactttttgttgcctcgcaacacattgaagaatggtaggcacttattagttgatttcgagatgaatctgttaagagctgtcattcttcctgttaaggcctatacttccttcggttttgttggtgacggcatttctatcaaagccttaattttttccaaatttgcctcaatgcccatcgcgttgactatgaatctaagaaattttcctgagaagactccaaaggaacacttctttgagttgagtttcatattgtactttttttaatatctcaaagtactccgcgaggtcttacatgtggtctccattttttatctacttcaccaacatatcattgacgtagacctccatgttcctccctattttcttttcaaacatttcattcactagtcgctgacacgttttttcaaaccaaaggcatgactttataacaacaaagtcccatgttaattacgaaacttgtatgctcttaatcagggacatgcatcttaatcttgttatatccagcatatgcgtccatcaacgtcataagctcgtgtccagcagtagcatccactaactggtcgatccttggtagtggaaagcaatcctttggacaggccttgtttaaatctgaaaattcaatacaagttctccaagttccatttggttttgggacaacgacaggattggatattcacgaggggtagaatgcctcgcatataaagtcattagtcaacaacttatccactccctctttgagtgccctttgtcttttagaatccaagggtcgtcttttctatctcttggcttggtaatttgggtcgatattccagtggtggcaaataactttagggtcaatccctatcatatttgagtggctccaggaaaactgatcgcggggcgtccatttaataggacttagcctgcg

SEQ ID NO: 356981 - DNA, 884 bp, Cannabis indica
aaactctctctaataagataaaaaataatgtaaaatcctagagagaattgtaagcacactagagaagataagaacaagtttggctcaagtgtgtgcggttggtgtgtttataaaaagatgataattctttagcttagaactcttagaatgatgttatatgatgaatagaagctcaaacaaccttaatttttgagtgaaaaatgagtttacatagtgtaggaatgaaaactagccgtttatagccttggatgcaaaaaatgagactgccactaggcaaatcggttcagcagtttccaaatcggttcaccggtttccaaaccggttcaccgatttttggtgaattggttgacctctttgaaatcagttaacctgattccaggcagtgggaaaaaagtccaattttttgaactaaaatggccataactctctactcgattatctgatttcagaaattctaattttgttatcttagttaaatgaaatgtaatttagaaagtcaatcaaaaaaaaaattgaaccaatgggtgagaaaaattatcgcacaatttagtaagtgggacaaaatttgtacttataaactctagtgtactatgcaaatcactttaacaagactaaagtaaatttatacaatttgattgtgtgtagtctttatgtatatgagcttcctatcttgatttgcatgttttgatccaaagttgacttttctccaagagttcactttgactttgtctttcgagttgacttttgaagtcctcttttggatagagtcttgaattcttgatctcttgatgaaacttttgctcttatgaagtatgaagtagttgatatacttgttgaatctacttctttactttaccgagcaaatattggtactttgtgatttt

SEQ ID NO: 356982 - DNA, 538 bp, Cannabis indica
atagctttcatgtggattgtgtggggagcagcgggtgctcttattaatgtggaatgatgactgggatgttactgttaaaagctactctactggacatattgatgctcttgtacaatgttcggggagtgagttgtggcgatcatgggattttataacaacctaaaaactcacctccgaaaagagtcttggttactccttaggcgtataaagcaattctttaatctaccatggttttgtgaggggggatttcagtgaggtttttatctatgcgcggaaagaagggtggagcagatcgcgatgttatggcgatgagaaagtttcaaaaagttctcgatgactgtatgctagatgacttggggtatgaagggtcatctttcacttgggtgaataaaagacaaggtacttcacttgtctaagaacagttagatcggtttgtgtgcaatcaagcttggtattagttgtatccttcagttcgagtgtgccatggtgattttcttcgttctgaccatcgtcttatagttgcaaaacttgagaatgt

SEQ ID NO: 356983 - DNA, 541 bp, Cannabis indica
gtgtatctattgcaatctaaaatttgacaagcctttgcctagtttttaacctgtcttgcacagctagccaaagtaaaaagctatgctttggtatgttcattctcgaccacacctgtttactccagtgacacacttgatttcctgctgtcatctgattgtatacatcagatattttgtagtttccagcaactaactgagttgggttgatctgatctttccattaatttttgagctcaactagtttcttccaatacaaactactttgaattggggcctcataatcccaccaagagtctttgttgatatagacattatgcacccactttacctataagttatctttctttgatgcaattgcccatatatttttaaaaacagcagctttgttctagtcatgtatgctcatgaaacctatacctccagctttctttggcttacaaatgtttctccatgcaatactcccagcaacagccataacactctgccctttccacaaaaaacttatgcatatggcttcaatatcaacaactactctttgggg

SEQ ID NO: 356984 - DNA, 567 bp, Cannabis indica
ccttgattagtaaaaattcataaagaatagtctaattttagaattataattgattaattaaaaccaataaattgagtttgtaagcagtattatctcaactagtgtggggactatgagcctatataatcaagcttccaataagtagatctaaaatgtatcaagtaaattctctaacttattaattcctccttgcgtcattatgaattcaaaattacactattaattatatagaatgctctaaatgtaccaagatatagatacactatgaattatacatcgttcttatccaaatagtcaaagatcctctatagatgatctatattgaatagggataaatttaccgtgctaccattcaatgtatattatccttaaaacacttagctacctataaatgatactttagtaaactaatataattactgaaatgatgcctcaatcatttatctatatcaagccaagctcgaaagagtataggctgatatcatggtcgatctgtactacttgacagtatcacatcggcacgactagagtacaactagcgtatcgagtataggttgatattatggt

SEQ ID NO: 356985 - DNA, 521 bp, Cannabis indica
ttttactttatttcgtcggtttcttttttatcatcatttaatcaaacgacgcaaatagtatataattaatgacgtttttaaacagacgggtccgattatttagacactattcacgtcggtcaacactatgaatagtagcgttgactgatgtgaatagtgtaatttgtagtagtgctcggtcccagacccggacacaaacacaaacacgaacatagacatggactgggacccaagatctgaatcagaacgagaccgggacccaagattgggatcaagatcttgaccgatgacccacggcttggacctaacccgtagtcggtgtctggatttttgaatcgtaccaagaccccaacctggaaccatttctagaccaggatccaaaactaaactcagacccgggactcaaaatcagaacaagaaccgaaatcaggaccttggaacaggaatcggacctcaacccagaacaagatctagacgcagaaccaaacatggacctagacctagactagggatcgataccc

SEQ ID NO: 356986 - DNA, 771 bp, Cannabis indica
tagaagttcaatattaggttgttaaatcaacatacttgcaaatagatctaagatcctggataaatataataccaacagaacacaccgtaggagcggcattgaatagccccttcgatacaattttctttctactatcgtgtagcgaggcaccaaatacaagagttttcgtgccttgtttttgtcagttgaaagttgtccgtttaaaagatagttaactataggtgtcatccaggtaggcgagcgatctatcatctcaacttcttcttttgcacatatacttggctcatttagcatctccactggaaccaagttcaattcatttagtttattctgttagactagttttacaaaggcatcgacattagaggttagttctcttggtttatgctcgattttgaaataatcaaatttttccaagttcttccgaacattctctaggtactttgcaatttttaagcccttagcctggtattcccctagtacttggtttacaatcaattgcaaatcactatggcacataagacttttaaccttcagcactttagctatcttcaaaccagcgatcaaggcttcataaccagcaaattgaaatcttaaggcataatgaaacttgaagccttctggaaaaataagtattacccctgcacccgatccatgctcattggatgctccatccacgtgcaacttccaagtttttgcatctcgctaaacaagaaaattttcctctacagttattccttctatcaggaaatctgccaaagcttggccctt

SEQ ID NO: 356987 - DNA, 967 bp, Cannabis indica
aatagtcttttctactcttttgttgaagtatcttgtaactcggtgttgatacgctgcattagtgatttgcgactcagtttgtttttcatcaagtagatccaaggacaattttagaagttcttggttttattctggattataaaactctcgtttgtgagtcaatatgttcacttcaacaggagcattgcttccgagccaaatgctagcgagaagggagtgtgtcccattgccgtcttctcggtaattctgtgagcccagagtacttgaggtagctcatcgacccacctgcctttggcagcgtctaacttcttcttgatagtatccttcagggttttattaacagcttccacttgtccattcgcctggggcctagatactaacgagaagctcttaattattttgtttctctcgctgaactcaataaacaagtcgccatcaaactgggttccattatcagatactatcttcatgggaattccaaacctacagacaatgttcttgacgacaaaatcgaggattttcttgcaagttatggaaactagaggctcagccacaatccatttagtgaagaagtcaattgctactaccgcgtacttagatcctactcgcccagtgggtaatgccccaattaggtcaatccccatatagcaaatgggtagggcgaggtcatcattcttagttctgttggcgacacgcgaagtatatgtgaaaacctctgatacttatcacatttcttgacaaactcatgggttttcttattaatcgttggtcagcaatatccttctctaatgatctttttagataggcttcgccaacaagcatgatccccacaaaaaccttcatgaatttttctgatgatttcattcgcttctatagggagaacacaccgaagtagaggcatcaaataacctattttataaagtttgccttcaattattgtgtagcgaggcactgaatacaaaagttt

SEQ ID NO: 356988 - DNA, 680 bp, Cannabis indica
aagaatatcagtgtgataagggtttggatgaatttattaatcaaataagtaaatagatgatcacatgaaccaaataacacattaaacaggtaatgaaattaaatctgtttctttattgatattttaatagaaaagattacattgacttagaattttctttagggcacaaagcccaacatttaccagggctgccacctcaacgggagattaaattttattattgatctggtacctggagcgaaacctgtttcaaaagcaccctactgcatggctcctatagaattgaaagagttgaagatacaactccaggggatgctggatctagggttcacctaaaccagtgtgtcaccctgaggagcttcagtgttgttcgtaagaagaaagatggaactcttcaaatttgtattgactattgggagcaaaacaagttaactgttaaaaaaaagtatcctttgcctagaactgacgatctgtttgatcaacttcacggtaagacgacattctctaaaattaatttaagatctggttatcatcaactcagaatccaagaagaagacatatcgaagattgctttccgaactaggtactgttgggttttgtgccctaaataaaacccgtttcaatataatcagatttacttattaataaagattagaaataacattttatgttgcatggtt

SEQ ID NO: 356989 - DNA, 542 bp, Cannabis indica
ggtaagagtttagttctttttttcatgaaaaagcttaggttataaggggtgaattttggttctgttgttgctagggtataagtaagcttttggttttgtttctgagtgttttgagattggttttgatgctcatttgggtgatttgctcgctaggagagagtcaagtttgagttttaagctcaaagtttgagctctcatggtaacttttgattaagagcataattttgatttctgttacgtaaaaattgttatttggatgttgtgtgattgttttgtgaagtttggaatcaattggttaggttttgagatgtttaaaactcggggttctcatttcctacaaaaaatagtccaccgtttttagaaaaatggttaaccgtattccctaccaggaaaccctgacaatggcttaccatttttggtgatgtttagaacccctgcttttcaagatttcttgatgtttagggcattggtaccctagtgacttatagggggacttacggtgatgaattaaggacatagaacgagttaggttaagtgattaa

SEQ ID NO: 356990 - DNA, 576 bp, Cannabis indica
aaaaatataatttgccattgacaaaagacaaaataattttttttgacaaaacaaaataaattttaatagattatgtaattgaataactttcacaaggattttaatagattatgtagttgaataattttcacaaggttgaatatattgtcaattctcttttttttttgtttttaaaaaaaatttgtcaattttaatagattatgtagttgaataattttcacaaggctgaatatattgtcaattctttttttttttaaaaaaaaattgtaaatatattcaattacttttgaaaataatttatggaatcagtttgtaatttttgaaatggtttaaactttaaacatatcgctaataccactttatgataatataaaattaataaattccttatttcctaatgtatttgttttcctttacgcttctttttttggttacacctacactacagcaaatctaaattgattagtcttttttattttttatttttgaaaagtaaattgattagtcttaatataatattatacaagcttaatgctattagtagttacaacatactgatattacattttaacataa

SEQ ID NO: 356991 - DNA, 801 bp, Cannabis indica
aaaataaaacaaggcttgctcaagtgcttccggttgactcctcggtttcctggcacgagctttgagcgcgtgagggtgcatttaatgatggcctttaatgcagcgattcactttttgcagaggtcgattcgtttcacgcccattgattgatacggcgcattaatggtgtcagacggacactcaaacgtttccaccgccttaattacaaatcaatctgatccgttgatctttgagaattcgaatcgtgcgtttccccaaccgttcgattggtaggtgatagtgcctgttcctcatgcagttttgcctataaaagccaccacctttccttcatttcggttacttcccatttcttgccaactttgctcaagtttcccagagagaaaaaattctcagaccaagaaaacactgttgaacactttgcaattttcccagtccatcttcgttcactactgtcaatccttcttatctttgtttgatctacagcagaacccccagtctcaacacttcactgtaagtttcttgcaccccttgctttactgttaatgtacatggcatgcttttacttatctgctcgttttttctggttttgtatttgaagtttctgggaatgcactcttttagatttttcacgtaacaggtctagattcaccatttctggtgttaggattactcttgtcacgtatttgttactattttttgcaaaagaccatacgttcttcgtatactggtcgtttagggcataggagagattgctttctttcgattttctgccctttctttttctttggtgcgcaatgtcgt

SEQ ID NO: 356992 - DNA, 754 bp, Cannabis indica
tggtttgtttggttagaattgctacttgaatcctctcttgtgcagtttgattagtttttaaagaacttaaacaagaatacgaggggaaaaaggcagaggtgtgagtttatttgagggtaaaagccatcaaatttgagtgaaaatacgagtgaatttgagtgacaaattatttttgagggaaacacgtgagggagtgcggtaaggtctttctttatctgttctaactttaattttgcagaatttgatcatgtcaaaagtttcaaaagaaaatatcggtaatgaaactacaccacctatggttccaaatctacaacttcaagctttcatgcaggagatgaggaggatgatgagaaaggagtgtgaataaatacatgagaggttagatagggtagaagagggaacccaacagaggccacggaggaacagggttcaccaaagggatgatagtgaagtagatggggaagggaaaatttttgatgaagagtttgatgggataccagtgggtaaccataggagctatggtcggggatagagaagttaggaactaggtagataattatttgggaaatataatgatgaaaattcccacttttcaagggaaaaatgatcccaaagcatacctggagttggaaaagaagatggaattgttgtttgattgtcacaactattctaaaacgaaaaaggtaaaacttgctgccattgaatttactgactatgctattgttagtgggattagttgtgcatcaacaggagg

SEQ ID NO: 356993 - DNA, 548 bp, Cannabis indica
tcgggctctatcatcggccaaaataataggattaaaatcattatgagcacccccaacttcaaacccatcggccatattgcagcattttttagccttgtgtttctttctcctttgtctgaaattgcattcaatttcggggtcaataggagcaagttcaaggtcttcttctttgttcatgcactaatttacacctgaaaaagaaaaattcagcgcaccaaaataggattaaaacctcaaaccagaaaataaattgcaaaatagttgataatacacaatttttagtttcaatccccgtcaacggtgccaaaaacttgttgtgaaaattatatacgcaagtatacgcagtcaaacaagtaataaagtgataagtaagatcgtctccacagggattgcaaacaaagtttgatgtaaaaccaactaattacaacttaaagtaagaggaaataacatgaaaatggttgagaaatgattcaaaattaaaaatgaaagtaattaaacttgctaaaattaatactactgttgctagaaaaattgcttgcaagaaaaaa

SEQ ID NO: 356994 - DNA, 1385 bp, Cannabis indica
agatttacactgatcataaaagtctcaagtactttttcacccagaatgatttaaatatgaggcagagacggtggctggagttggccaaagattgtgactgtgaaattttgtatcaccccgagaaagacaatgttgtggttgatgcactatgtagaagaggtcccgtgcaggttttcaccattgtgatgatagcttctcaactggcctcagaaatggtaaaagctgaaattgaatttgtagttggaaagttacacaacttgacacttcaatcagatctgttagaaagaattagaaaggcacagttgaaagatcctgagctaatcaagattcgagatgaggtgatggctggtaggcctaaggacttttcaatctcgaataacgaaatattattgtataaagctcgggtttatgttcataatattggtgagcttaagaaggaaatcctcgatgaagcccacaccacaccttattcgttgcatccgggaaccaccaaaatgtaccaggatctaaaaccctatttttggtggtatggaatgaaaagagatgtggtagaatacgtgtccatgtgtttgacctgctagcaaattaaagctaaacatcagaggtcggcagggttattgcaaccattagcccttcctaagtggaagtgggaggacattgcaatggatttcgtggttggtttgcctagaaccacgggaatgtatgattcagtatgggtcatagtggaccgattcataaagtcagctcattttctaccagtaaagattacctatacagtggatcagtacgctgaactgtatgtgaaggagagagtttgtctccatggagctcctaaatctattatttcagacagggatcaaaagtttacatcaaaattttgggtgtgtcttcagagggctataggcacaaagctgaaatttagcacaggttttcacactcagactgatgggaaatcagaaagaacaatttagatactagaagatttgttacgagcatgtgtcatggactttgagggttcatggagtaagtacttgtctttgattgagttttcctacaacaatagctaccaaagtacaatagggatggctccttatgagatgatgtatggtacgaaatttcgttccccaattcattgggacgaaactggagaaaggaagtatctgggtccggaattagttcaaaagaccaatgaagctatagacaagattaatgctcggatgcttgcttcgcaaagtaggcagaaaagttacgctgatccgaagcgcagagatattacatttcaggcaacggaacatgttttcctgggaatttctcctgtgaagggtataagacgctttgggaagagaggaaagttaagccctaggttcattgggccatttcagata

SEQ ID NO: 356995 - DNA, 385 bp, Cannabis indica
attatttaaaattaatttaagatattagagtaatttgaactttaaaataggtaaaaatctatctttttgcttatttttttatcttatttttaaaatttatttattgaatatttaattttttataaaataacatgaaatttgaaaagtagttagcatttttttgaaaaaagattcttaggttagttgaaacataattttttaaaattataggtttaattttttttttaatttatttattttttatgttctggaaaaaattattatttatttttttcgaaattataaataaattaaattaatttgaaattaaaaaaaccctaaataaaaaatttccaacttgttgcaagtgtatgtgttttatattgtttgagtgtaaaacaagttt

SEQ ID NO: 356996 - DNA, 926 bp, Cannabis indica
aaaactctatttcaatgaaatctctattgtttaattagcaataaagagacagaagtattttcatcacttattatatgtgtcatttggttcatgttatcatttatatgtttatttgattcataaattcatccaaacccttatcacattaatattcttgtttattgtgtcgtcagcacaatggaaagtaatcaagattgtgtgattaaatatattcctagatttatcagtatacaaggtgttgacttcgcttttagccaacgagaatgagtctattttataagcgataaaggatttataataacaaatatatgataaaacaataaaaagacacaggaattttatagaggttcagccccgagcagttcagtaatagcctaatcctcgctacttgtattgacttaagatcaaggagaaaaattccttttcttatagctcttacaacagtatctctcaatatataattcttagacatatttaaggtatagtcttagctcaactgcttttcgaccgatcctttgcccagtgaatatacatcactatttatagggctcgtaagcttggggaggaagagtttccccacaatgtgtataaacaaaaagatcgtgggatcaatgctgaatgcaaggatcatgggattgaggctgaatacactgataacgggatcatgtgtatgccatatccacgtaaatttatccctgagttatagggattgtgctgatgactcatgatgcgaaagttgaattcgctagtgttggttgctctgcacggattgttgaataccttgctttgagcatgccagggaggcatcctgctcggactatgcttcccaagcaaatgttccaagtggcttccacgtgtcaccattcatgtgatgccacgtcagagtgcaaaaattgggataacatttgccccccaagtctgtatgg

SEQ ID NO: 356997 - DNA, 615 bp, Cannabis indica
gtgaaaccgtatttataatttttttttattattttgtgtattatgaaattatccctaaattattcctatataaggttcggtccaagtgatttggaggccttttaaattcaaattgggccttatgcactcgcccaagttatctaatgtgtgggtcgaccctgccaatattatcctcttagattaagtggatcatattaatcttacatgtatgcattaatcaattcttaaaaatggtttttttttaataatgtttcaggcaagtatggcaaaggagagattatttggtgatacatcaaaaaatggattagaggactagaaatatatttatatatattaaaatttattgttaattttgagaagaaaaaagaaattaatgacattttattttttttatagggtattattttataaatacataaaaattaaaaaaaaattaaaaaaaattcaagttgtacgaaattttaaatatttttacgattttaatttacaagaaaaaatggtattttcatgttgtattttttttattgttttgtttatctgtatgttattttttgtttgtttattttaattgttatttaggtatgttattttttttttctttttattgtaattttc

SEQ ID NO: 356998 - DNA, 788 bp, Cannabis indica
aaaaattattcaaatgtgttccctcaaaaacaaggagagcaacacaagtgaaagaaaccatttcccaccatggaacaagcctagccgaccactgccatatttgttgcacaatgagtggcagtggtcggcgatgaaaaaaggggatgagatttcttactaaaaatatattttcatgaataatatgtcaaaaccaattgaaagaagccaccaagtagtgttgaaaccacttggcgaccactgtcacacttttgggacaattggtggtagtggtcaaccaccacaaggggtccgagaacatgcatggctgggcactaaccatttggctatgtcagtactcgcaactggggcaaaacaacataaactacctttagtaaaagggcataactctctctatctttatctaaatgacctggttcaacttactttggaaagataatttcaagtcaaatcttagtgtgtctcagagttgtagccaacactacaagaaatgtcacttttgccagcacatttttgtgctggcaaaagttggtattgcgctggtaaaatagaatttacttgtgatgtgttggcaaaaggggttggtaaatcaatgcttgtattagaacttttactagcataaaatgaaaagcgctggcaaaaataactttcccaacgcgtaaatgtgctggtaaaagttcgattttagccactgcaaatgtacgttggtaaaactttgacctctttgccagtgcagtttgtgaaatgcgctggtaaaagttacttttaccaacgcagtagtgaactgtgct

SEQ ID NO: 356999 - DNA, 710 bp, Cannabis indica
aggacgtaggtggcttaatctatctgtaaaaattgagagtttgcaatttccatcgctaaactctttacatttatagtttgttatttgtttatacatgtgattatctttgttattgcattaaacttgaatatttgtatgaattgtctttgggatttttaaatttatgaaattatcttaaatttctaattcactcccctcttggaatcatatcttgggctaacagttggtatcagagcaaaggctcttatttttgggtagatttcataatctaagagtatgtattttccaatcaattcatacaataacatgtctacaaccatgttatgatacatttataaatcatttaacatgtttatattctatttaattaactaaatacaatttacacgtattaaactataataaatataagagtttatatttaaataggttattgctgtgtaatttttaaattaaacatattaattcaaaaaataatttatttaataaatctcttagccatgtcaactcaaaaataactcaaattcatctaaatccaaacgtatttattttagggatttttacacacatactgaaatttttaacttttttattgtgggacgaaattttttttcaaaaatactgtattttttttcaaaatacagtgtaagttttatattgtgtattatattaaattttcacggttgttccacggttattttttagttatt

SEQ ID NO: 357000 - DNA, 895 bp, Cannabis indica
aattagttttagatattagtagcatttgagtttgaaaatttgatttttccacaaactagccgtatggttaattttgattttttttattattttctgtttgttttatttttttaaattataagatcagatattttctattttattattaaaatttaaaatgatcttattttgatattaagatactaataaaacttagaaataatctagttagaattttaaatttactaaccatatcagatttataaaatttgttatttttaaaatattttttattaaattaaattataagattagaaaaatgttagttttgacattttatcttattggatatttattttaattaaaattttatatttttttgtgaaaataacatgaaattttgaaaagttgttaattttggtttgaataaatattttaggattttccaaccattaaattttcaaacttagggtattttattttatttttattaaataagattgataatatcctaaccgtcaaaatatcttattttcaattttatttattttgttaaatttattttattaaattataagattagaaatataatatgagaaatatctcaattttcaaattaagatattatattatattatcttattagatatttaactactttaaattatttaaataaattaaaaaatgcgaaaattaattggatatttgattttcatctttgaattttagatatttaggagatttgttagcttttaaatattttcaaatatttgtctaacaacttaaatttaaattctagttaagacattttttaaatatattattttaaagtagatatcttaacctactttctagatatttgttgcatgtttgttttatttatttattaaaaaaaattaacaaacctattatttat

SEQ ID NO: 357001 - DNA, 1133 bp, Cannabis indica
cctagagaggatgtaggcgggtggacgggatcgagatggtccgaatgttggacagaggtcgttgagcaagttagtcctttaaagaggatcagtaggctgagatggagttgagactgggttgcttttcttcatgggaatactagacattctagagaggagacgttgttggttgcttcgagtcaagttcaaagatgctagaaagacaactaccacgtgtaattgtggagaggcgcaagagaatggttgaaactcgttggcatagtacaagattgaggggattgtccacgctgtatgcttggtacactaggccaggtttgcttgagtgacatcgtaaaccgcaggaggcgcttttggttgaaaaggaagcttgttggcaggagtgtggaagtagtgcaaggaccgtcagattcttgttagtcacgacagaggtcgagagttgatgacctagatggttcagattgggatagaaatgggaagcttcagttgctacgtggggggtcaagagggacgcacatggagaccaagggggcagaggcagcaattgttagaggatggttgtatttggaggtgttcgcatgcgagttttatttgatccatatggaagcgccgaggcagtttagtggaatgtgttggcttgttaaaccgccagagggcgtaagtcgcagaaagacatcgatagagatgcgtagttgtggaatgaatgcatcaaagaagccagcagggctgagaagactgagcgaaagcattgagacgacactagagtttgtgtggaagccagagggtcgtgccagcgagacttagttagtcatgtttgcctgcgaaggtcaagaagggtgctagagtttgcatgaaggccagagggctgcatcattggaacttagtacaccgtggaagcaagaagggcgtgatgcaagtgtgaatcaattggatggttgagtgggtagttagtgcatgcatgtggaattccacaggggtgctatataagatagttgactcgagagtcacatcctgcgggatgcacttttagatgacatggtttgcatgaagagttgggtggtcaggcatttccgtgtgggcatgttgtcgaggacgccaacagatgaactgggggagagaccttcacggttcactca

SEQ ID NO: 357002 - DNA, 719 bp, Cannabis indica
gtgatttctagtaactaatttatatataatatttaattaagtaaaaaatatatattaagttgaaaattaattttagaccaacttaaatagaatattattcttaaaacttaaattagaattaataattaagttaattttattcaagtacttaattatttatttttatttaacgaaattttttagatcaacttaaattagaatattttttagaatataaattagagttaataattaagttgattttttttaagatacttaattatttatttctattttaataaattaatcaaataaaaattatatttaagtcggaaatttgttaatttcaaatcaacttaaattagaacaattttcagaaaatattttattttattttaataatcatttctcgcataaattttgaaatgcatttattttaaatgtagatattttgaaattttctattttaaaaattagattattgaaatttaacttgttaataaattttagatcaacttaaatcaagtaactttcattaataattaattgaaataaatggactaaaatatattatattttaatttgaaaattaattattagtttatgaagtatgtagatggatattttcttggtagactttttggtatttttctagatatatttaattaaatttgaaaattaatatttaagttgattttgttcaagaaacttaaaatatttaatatttttcttaagagatt

SEQ ID NO: 357003 - DNA, 553 bp, Cannabis indica
gttccaccatctgtttggatctgatggtccaacatgttccctttccactcccccctgtatggctggattgaactcctcttctataaattcaaagtcaccctcagttgtttgtgtttggggttgtgtttggggttgtctttcaataggtgtttctgtttggggtcggggatgtgcttagggttgtgctttgtgtttggggttgtctttcaacaggtgtttctgtttggggttgagaaggttgatccatgtcaaaatcagtgtcccaatcaggctgtgtttcaggctatgtttcaggcaatgcgtcattagtggcatctgccacagggggtactaggtgctcgtgtctggggctatgtttggggctgtgtttcaggccatgagtcattaatggcatctgccatagggggtaccaggtgcttgtgtttgggattgtgtttggggttgagcctttctcatcctcctaagtctcaatcacttagccattggagtttcttctagaggttttttgaatccaatgaccacaacatcatgggatttaggtccatctggctct

SEQ ID NO: 357004 - DNA, 1162 bp, Cannabis indica
taatttcctaagccttaagcaattaagaaaaatcaaaggaaatagaaagttctctctttccttccctctctctcttcgaacccagccaagaacaagagggtttgctgctgaatttggtagtttcagcaagggattcaagagaagtcaagacaaggtaagccctagcttcttttcccccttagttcttgaagttttatttggtttcaatatgtgattttgaatattggtggctgttagagttaggttaagttgtagttcgaattttaagcttaatttgagttgattttaggtcctagcaactggtattgatggttggattaggttttgtgcaagtttaagctttgggttcaaatctttgatctctaatggcataatttgatttattgagtttttctgtgatttattggttggaatatgttgtgtataccctaattaggtactctggaaagtttggttgcatttggtggagcattgagcaagaaaggaaagttcttgggtgaactggtgcaaaccgggtaaccggttttggcagggttgcccggacctttcattttctaaatttttgtccattccgtaccgtggttgggtgtttccctattttcagagttagattaacccctagaaagtataacagaacctagggttatggttttgggtttctcgggattagggttttaatcatggcagttacccaatttcataatttgattagggcatccatctagcacgagacattttgctcaggttggccagcacacttgaatttggaaagaaggtaagaactgaatgtaatgtgtgatatcaatatctgagtgtatgtatatgttatgtgtatacgcatgcttaaattattaatggcactaccaacacttgtacagttaaggtatagagtgcattgttatagtgaatgttaattaagagtacattacagtgataccaacacaggtacgggaaggtactgagtgtgtgtggtatataactcagtggtactcaaggtgtgaaacaaaccctacgaacactcatacagtgaggtacatagtgtatgtggtatagtggctataccctagtatggaacgttcttacgcatctgttgagccttgtaaataggtgtatgggcacctaaatacaagtcggaaattatatgatatgttatatgcttttc

SEQ ID NO: 357005 - DNA, 631 bp, Cannabis indica
taattatttttttttattatttggggggcaaggaggtcttttagtaagacttttcttttgtctttagtggctaagttttggctgagaatggattttactaagcaattttattaaaaaaaaagaaagaggaagcaatgagaggttgcttaagtttgaaggaaaaacaaaggaaaatagttttttctctttctctctctttcgattcttttgggctgtagttgggggtgagaatttgtgttgaatcaagggaattctagtggtattgaagctttgttcaaggtaatctttttctctatcttttacttgaagttgttgtagttaaattaggttttgatgtgaattttgggaaattggtggctgtttgatttgggaattgtttaggttagtttctggtgttaattagaggttgttatcctggttataagctaagctaagtgagtattttaatgtttgaattgaatttaaagttgtgagttcaaattggagctttaatggtgaaatgggattttgtttgatttgttgagatttgttggttgggtttggtttggaatagtgtatgcaggtattctggaagttttgaaaagatttggggttgttttgaattaaggggatggatttttgggttcccagc

SEQ ID NO: 357006 - DNA, 640 bp, Cannabis indica
gagagtgtaaattagggtgtgattagcactcttcttaattatttacaaaaaggtggggtgttacaccaggcaccttagatgttcattttgatcaaatggttttcatgggcttcgtctccatatatgttgaaaaccattcttctcatttcatatttttgccaattttgtcaaaaacttagaccattttcaatgggagatgtaaaaattgtgctatatttagcacaaaaagtaattgtgtggtaaattttagctttgttctctaatgcacaattgcaaaattttgatgtaaaaatttaatatctcattaatgttctattaaaaaaaataaaatttaataactttataatcaattttattattattttaatatgtaagacaataaaaaaaataatatatatataaatatttcataatttaatgtgatagttaaatatattaataaaagggataattgcggcaaaagtccccaaaaacttgaggttgataccgattagtcctcaacctcaaaaattggcggtgaaaatactcaaggtggacaaagttgtttgtccgttcatactcagtccgttagtgagactaacgggacacgtggacgcaccagatttaatccctttttttttttaattttcccctaaaatat

SEQ ID NO: 357007 - DNA, 612 bp, Cannabis indica
aagatgaaaatcctgatattaagtgtggtgaagttgtgttgagatgatcaaagagagctcgcaaacctgctatttatgattactaccttgtctacttgcaagaacatgattatgatgtgggagacgcttctgaaccagttacttatcaagaagccatgacgagtcctcaatctaagttatagttgaatgcaatgactcatgagtcaagtttcatgtcgcgaaacaaagtttggaatttagttgtcctaccaaaaagttgcaaacccactaggtgcaaatgggtttacaagatcaagcgtgactcaagtgggcaaatagtaaggtataaggctagacttattgctaaagggtatagccagagtgaaggtattgatttcaaagaagcacctgtctctaccaaagattctttgcgaatcatcaaggctatggttgctcatttaatttggaagttgaacaaatggatgtgaaaactgccttttcaaatggagatctgtatgaagatgtctacatgattcagcctgttggttttgaggagcctggcaaggaacatatggtttgcaagctcaataagtctattatagacttaaacaaagcatcaagacagtggtatct

SEQ ID NO: 357008 - DNA, 454 bp, Cannabis indica
atcagcataggtggtgttatcatcagtaatgatcattaagtcatgtattattttcaaattcaacccgtccagatacttctctttgttgctaaaataggttggcacaattctcgaggccaatcttgccaagcgatcaaactgagttgtgtattcagtaacactcatattttctttctaggttagctgagtaaattctttccttttcacgcttctgactgcttgattgtagtattttgcattaaacagttcctggaacttttcctaggccattgtagtaacatcaagagtcagggacaccatgtcccaccacactagagcgtcttcttggaactggaatgtggcacatgccactctatcattgtcggcgacgcccataaaattcaaaattccagtaatgactattagccattgctcggctttcataacatcgggatctcccagaaagactggaggt

SEQ ID NO: 357009 - DNA, 728 bp, Cannabis indica
ccgactctcatgttctgcatgtgttctggaagcacccattcatcctcctcgccgacaagattaactgttgcatcgtaagtattcttccacatctcttttgtgtaataggaggaggacagagcgtatagactgacattctgagtaagcgtcacaacacatgcatggggacaaggaatattttcaacaattagaacatgttgcatgtgcatgttctctcaattaagttcacatcaccacctttctcacagtcagaacctcttgaaacgttaaataattgtgcactgttacgtatgacgattctaaaccttccatcctcgtgttgctttatcaaattttccttaaaatgagttgccaaaggggtagcgcacttacttgccttttcgagacggtcagcgaactaattttgcagtgtgaaccttatgaactcgtagttattggatatttctggaattcttctgtcacgttgttgaggctttcaatagcattgtttgtcattatgttgtacctgtctcctggacaataaggacgagcccacttttccaatcctatactctcaacataagcagcgatggcaggatccatctatcgaagcacctacaaatgtctgtcacattccctctttaaccatgcataagcagccaaccatattgcgtgttacatacatcagtcttgaacttgtgggtgacattcatagaaatatgtttgtagcatgcgcagtggcatgcttc

SEQ ID NO: 357010 - DNA, 684 bp, Cannabis indica
catatttagggtgtttaaacaaaatacttgtgagtagatctaagatcctggtaaaatatattccaacacattgttcttttggctacccagaggaatgacagttgtaggttgttgattcgtagcctgataggcttttcatatcagcatggtggcctgccttgtctgttcgtcaatggctgcttgttgagctctcaacgtttccgtttcttaatccctccatttagcgacgccttctcttcgaatgcgagattcaccatagcacggagttcctcctgatcatgatgcagggtgttggtatgaccttgcatgattccaagagcttcatggaggttctagatcttggtatcatctccaatggttgtccgaacatttgttgtggacggaacttcattgttaagaatgccctgattggttgttgaactggtatttgcagtctcctgcacaccaggcgcgattccactcagaggagttgtcacaccttgacctacagttgatggttgttcaggattcgtggcaggtggagccattgcattccttggattctacagtgcaggatccactgtctgtgcatttgctagtagggttattcatccgatccaatacgcacttttttggtcaaacaacatccaatccgcactaagtgcggattttatttttggatccaatccaatccgcacaatagct

SEQ ID NO: 357011 - DNA, 505 bp, Cannabis indica
tacattgaattgagttttatttacagcataaaacccaacagctagggtgttacaagacagacctttcctcaaaggtcaaacgaaaagaacagccagatcccatcaaccagcagcttgggaatggccagggatctctggctcaacaacaacccccattgtatagccactggccggccagccatccgcaggagtacccatggccagccaaggtacatcacttcctctccaaggggagcgaggtgcaatgagatcaatcttcgactgaagaggagcgagagtgggtggaaacacccaaaatggaaatttgagaagtgaaaccgatcacttcaggcatctagatccaccaaacttcagcaactcgtgtgatctacccccaatcaacacagagatgaatgtatgatagtttatgaatgtatatgaatttatattgaatcatgttgttttctgttattaattgttgtagtttcaattttgaatcttcattgttggtctaacttaacttgtt

SEQ ID NO: 357012 - DNA, 1017 bp, Cannabis indica
agggtttgatatgtgagacttgtatttggggagaaaaacagagaagatttttggaaatttacttgctggccagagatgttttggtactgatcaagggcttctttaatggcattgcacgcttgaatgtttgacctacagaataaaatgctgtcatccgcaaataggagatgagagatctttggggctgaacgtgcaattttgatcccaaaagcctcttcctgactctcagcacgcttaagtatggatgagaggccctcagcacacatgagaaagagatatggggagaggggatcaccttgcctgatcccccgagaaggggtaacaagccccacagcttggccattaatgttgaattttaaagtggctgtggtgatgcaagccatgatcagcttgataaaccgagtggaaaactgaaatttttccataattttatgtaaaaatttccactccactcgatcaaaagccttagccatgtcaagcttgacagccatccaacttactctaccttgctttttatttttgatggaatgcaagatttcctgagccataagaatgttgtcagagatgaggcggcctttgaggaaagcactttgatttggggaaatcaaagggctgaggacaagcttaagcctattagcaaggactttcgaaatgattttgtaaatagttgtacagaggctaatagggcgatagtctttcagggaaacaggtttttaaccttgggaatcaaggtgatcagagtggtattaaatggggagatgtcagaaagattattaagaacattgaggacagcttcagtgacatctttaccaacaacattccagtttttttgatagaattggttattaaaaccatctatacctggagctttatcgggacccatttggaaaagagctttttccacctcagaggggggaaaaagcttgttcaagcagacgacaatgtgacggctccatccgaggaaaagggtcagaaagcccagcctctatatccaaatcctggggatgttgagaagta

SEQ ID NO: 357013 - DNA, 739 bp, Cannabis indica
atcaaagatttagagaaagagatccaggttcagatcttaataatactctgcgtcagaaaggatacaagggttagagatctgaacggagggagtcatttaattccgctgcacccaatgtaaggtttcttaaactttatatttgtttatttcatcgttttagaaagttcatatttagggtgttaatcaacatacttgtgagtagatctaagatcctggtaaaataatttccaacatcccttgcattaaaaatcatgcgacaaggatattactggccaaccttacgacaggatgctttcgcttttgcgaagaaatgcgacaagtgtcagcgaatagccacatatacccatcaaccaccgagtcacctacattctatcacaagtcctttcgcagtatggggaatcgacttaataggcgagctacccaaaggaaaaggtggagtcaaatatgcagtagtcacagtagactattttacaaaatgggccgaggccaaaccactagcaaccattacagcgactaaattgcgagagtttgtctacaaatccataatttgtcgatttggcatcccttacacactcatctaagacaatggaaagcagtttgattgtaaagagatgcgacaattatgtgacgatctgggaattaagaaagcattctccgtagttgcttacccacaaatcaacggacagactgaagctgttaataaaataataaagcacaccatcaaagggaaactcaaaga

SEQ ID NO: 357014 - DNA, 824 bp, Cannabis indica
agatcctggtaaaataaattccaacatttatcatatttcttgacaaattcatgtgtgtccttattgatcgttggctagtaatatccttgttgaatgatctttttcgacaaactttgccaacccgcatgatccccacagaagccttcatgaatttccttaatgatttcatttgcttctgcgggaggaacacaccaaagtaggggcattgaataccctcttctatatagtttgtctccgatcagttatgtagcgaggcactgtatacaaaaagtttttccgcctcatttttgtcattttggaagttgaccgtcaagtaaatagttaataataggcgtcatccatgtcggagagctatctatcatctcgacgtcttgaggtttcacatatacttggctcgctgagcagttctaccgaaacctgatttaattcatccagatctttcagcgaggccagctttgctaaggcgtcgacgttggagttctgttctttcggaatttgttcgattttaaagtaatcgaatctttccaagttcttccaaactttctctaaatactttgccatttcaagcctttggcctggtattgcctgaggacctggttcacgatcagctccgaatcactgtgacaaatgagattttggactttcaaggcctctgctatctttaagcaggcaatcaatgcttcatacttagcctcgttatttgatgcatcaatttggaatctcagagcatagtgaaacttagccttctggcgatattaatattacccctgcacccaaaccctattcgttggatgcgccatccacatattgttggaaattatttt

SEQ ID NO: 357015 - DNA, 621 bp, Cannabis indica
ggtttggaaccctaatgcctagcggggagttagttatctccaataggtgtattaggtctatgccagttaggatcgatgatagggagttgagtgctgaccttatagaactagaattaacggagtttgacatcatacttggggtggattttctgcacaagtattcagccagtatagactgtaagcggaaaatggtgactttctagccagaaggtgaagatccatttgtctatgttggatcagttcaggggtctcggatcccagttatttcggtactaagagctagggatctactacaaagtggatgtataggatatttagcaatggtggtagactgtagcagacccgaaacatttgggcttgaggtagtcagggtggttaaagactttctcgacatatttcccaaggagttgccaagattaccgccacaacgagaaatttattttttgattgatttggcacctggagcggaacctatttctaaagctccatatagaatggctctagcagaactcaaggagcttaagttacagcttcaggggatgcttgatattgggtttacctgacccagtgtatcgccctggggagctccggttctatttgtgaaaaagaaagatggttccc

SEQ ID NO: 357016 - DNA, 591 bp, Cannabis indica
ataatattgtgcgctataaatcttccctgtacaaagccctcctgattctgtgccactaactcaggaagaacatgtttcaatctggaacagatcaatttagttgcaactttgtatatgacattgcaacaagcaataggtctgaagtcacttacagtatttgggcatttcacttttggaatgagagtaagcacagtggagttgatctccttcagtatctgccccgagtgcaagaaattctggactgcagcacacaaatcttcttgaatgagctctcaagaatcctgaaaaaagtagcttgagtacccgttcggtcctggggctttgattcctagtattgcaaaaatagcagccttgatttcttcacatgagtactcctggtacaaccaattagcatgttgatcagatacaacagcccccaaatgcaccaattttgttaaaacaggtcttctcccttgcattgtattgcccagcagccctttgtaatatgccaaaaaagcttctgatatctttgtttcttctgttaatctttccccctcctggttctgtattgaaagcactctattttgtgttctccttgctttaatacttgca

SEQ ID NO: 357017 - DNA, 700 bp, Cannabis indica
gacccagattatacactctgaatgtttattttccctatctatatattatagtattttattttatttttatttttgttttgtgtttttgtatttttgtatttttatgtttgttttgggttactgttatcaggttatctccactctcaccccgtgcatattatcgtcgatcaggtgtactcttttccctatctttttcatttcatattttttgtgacattgaggacactgtctaattttgagttgggggtggtgagctctggtgagcgttcatttagagaattataattgtcttgttgaattttttaagtcaatttttttcaaaattatccaagcatgatagtaaaattacagtttgagtcaatatttgctatattttgttaccaagttgtgattttcagagttcttttgtgcactttccaaacatgtggtaaaatggttgtaaacacatatagttaagaaaaattttgagtgtaaagtttttcatttttggtgagttgtgagagttgagaaaacaactttttgaactttcattgatcatttgagttggtaaagttaaacttttggaatttcaaacatgacatttactagagggattaatttattgtcaaaagagcctttgtgtttatttctttgtaactttattgtatttctttatatctttatttttatatgttgtctcttgtcaaaaaaaaaaaaaaaa

SEQ ID NO: 357018 - DNA, 593 bp, Cannabis indica
agaccgcttttaaggaggattttcttttagacaactggtcttttcccaattaacacgactgcattttgcattatacgtaagtaaactttatctcaaaaactcggttttgacttatttcatatttgtaaccttggcctcgctgacatatcttacttattatgttgacagcggtcttaaaaagaccagttctcactcctgagatgctcgagcgacataaaactttgttgggtcttccgttcggactacgatcaactgagtttctcttaaatgaggccaatctgaagactgttggccttctcgcttcgaacgagtatacttgtgattacaaatttcctatgtatacatcatgggagaaggttccagttccagctgacgaggaaagtcaagattatgtggctcgagtgcactatctccagaatgtagcccctcgggaagctgaagaagtttcatcctgaggtaatcaatgtggattgtctcccattgttcttagggcaagaggtactttgttagtaactttcaatgatattcggtataacttttacatttggaactcattccttatagatcatgttacccataggtttgatagttgg

SEQ ID NO: 357019 - DNA, 752 bp, Cannabis indica
ctcaaagtgagcaaagcgatctgcgggaggctccgtggctgaggtcgtcgcgagagcaggagttgtttttggagttcgaggtggaccaaaactgataggcccccgaggattcaatgctccttcttccttccacattggtacacccacctcgcgacaaagagcaatgacagtagctggcagaaataacttccctttcccccggtgcgcacagtcagcaattactttggctaggaccgtccctacatcaacatcccaacccattctaatgaagtataacatccatgcgtggtctttgctgactgtagaatcatgcgaggtggggcatagggcagtttgcaagaatgtatacagacatttcaaatcgtgctccaagtcagtgcgccgaaagcgaagatttccataattattgagatcccattcggaccttggcctggcaagcaccgacatcatgtcactcaaagtatcgtcgctcacttgccctttttgagcggagtaatggcattcaattgattttaacccaaacaagttgttgatttcttcagccaagaatgagactggtacttcacgcacaaccacttcagtgggccattcttggtgttatcccaaatttggcactctgacgtggcatcacgagaatggtgacacgtggactctacctggagcatctgttcggatcaatatgtcgagcaggatgcctcgctggcatatcctgaatggaatactcaacgagccgtgcagaatgagcaacactt

SEQ ID NO: 357020 - DNA, 611 bp, Cannabis indica
tcctgttagggtatacaccgacctgccactacaaaaaatactgcaaaagccagatgcttctgggcggtaactcaagtgggcggtagagttaggtcagtacaaaatcaacttccaaccccgaacaacaatcaaaggccaagccttggccgactttgtggtagaatgcataggcaataaagaaagcataccagaaagcaaccccgagccagcacctcagccaagcaacaatgaagacaaaccgacctggaaactacatgtggatgggtcggctacagatcaactatctggcacaggaattgccctcgtcacgcctgtgaggcaacacctacacgctgcggtcagttcggattcaaggcatctaacaacgaagccgagtacgaagctctaatcgctgaactaaaactagctcgggatatgaaggccaaacacattgaaatatgcagtgattgatagctggtggtaaatcatgtatctggagaatacaaggctcggggagaaaagatgatagcatatctgagcaaaatacaccacctgctcgcacaattcaaaagctacagtctcagacaaattccaagagaagaaaatacaactgcagacacgttagctcgatt

SEQ ID NO: 357021 - DNA, 565 bp, Cannabis indica
agaatatggaatttttcgaactcttttccatggtcaatcctgaacctaatactttttccaacttttggagtctttctcagttttgcagtctcaatatcaaggcagagaacgatccgaatgtgtcagacttctctctaagaaattcgacccaggtaaactgagactagtcatcaccattacatatctttttcccactgatactttcattctgcattggccccatcaggtccacatgcattagttccaacacacgcgaaatgaggagtctattaattgggggatgaggtgtcttatgctgttttccaagctaacatggtccacaggctctctccttggacactttcatgtcgagaattccccttacagcttgaagcttcaccattctttggagatctctgtagttcaagtgccctagcctgtagtgccataagtcaggtttgtccaagaaggtcctgttgcacactatggtattgcacacagcatagcactggtccatagttctgttccctgttaagacaatacacaaatcagatgaaactaaacactgagttttagtgaaacttac

SEQ ID NO: 357022 - DNA, 636 bp, Cannabis indica
agatgatgaattcaactcagaatccctttgtgcattcgaataatggagtgattcagacattacagaatgctatcaaatgtccactattcacacgatgcaaccatcccatgtcctcactgtgcaagtttcaacaaactatgccaagccgataaaagtggtaggattttttgacacgggaggatcatacacgataatgaaccctgatattcttcctaaagaatattggaagaaagagaaacaatactttcatgctgcaaatagaggtattttttgcacagagctcatcagcaatcgattcagttgcagttcctcccagggtgttttgttactcacagagtcattagataaaaattaccaggaaaatacttaattgttgaatttgatctttacacaaagaagaagggtttgcgtattctccctagtggacttggttacatataacattttgctccatgggaagcaataccaaactatttattaatgccccatgacccatttcatcggataaagaaagagctcatcaaagtctcatgtgccaataatcatgcagagttcctgaagaaatgtgaccatcctctttggaaaaatcaacagttctccataagcgtttcttttaagcttaatgaagatataaac

SEQ ID NO: 357023 - DNA, 1091 bp, Cannabis indica
taatcaataccttatttttggttaaagcctttggcaactaatcgagctttacatcgatcaatggagccatcagcattgtatttgattcggtatacccatttgcagccaatggcatggtaaccatcaggaagtgacaacaattcaagtgtcattggcttcaagagcatcagtttcggtgtccatagatttttgccatataggatcctttgttgtcattttgtagctggtaggttctacaaaggtatgggcagcgagagctgctgctcgaaagtgttgtgtcaacctattgtaagacaaatatttattaatagggtgagcagtagtattgcaaatataatcagaaagatgttctggtttagataaaagtcttcccatagttgaagtgataggaggagtagtggatatgttcttaggtgtggatgggacttcatcaggagtaatgttggtgacaggcaaactgttagaggatgaagttccatcagagttgggaacatgtgaagtatcctcagagggagtatgtgaatgtcctgtagaaggaattaaagaaagtgagaataattcatttatagatgtgggagatgtagtttcggaaagtggaaaaatatcttcatgaaagtaaacatctctagattgaatgatttcttgagtttcaatatttaaaagattataagctttcataccagggggtaacctataaaaatgtaaggtcgagatctcggggagaacttgtgccgtttggtttctaatgtcgaagcaaaagcaagacaaccaaagactttgaggtgagcatagttgggagctttgttataaagtatctcaaaggaagttttcttgttaagtaatttagatggagtacgatttataagataaacagcagtattaatgacatgactccaataaggtaaggataaatgagattgaaataataatgctctaccaacatttaatatgtgttgatgtttacgctcaaccacagaattttgttgaggacgaccaacgcaagaattattgattgagattcccttggtggcgtagaaggctgttagattgagctctttagcattgtcacaacgaacaactttaatgttgac

SEQ ID NO: 357024 - DNA, 742 bp, Cannabis indica
ttcaaataagcggaattagtaagtttctctttgatcaaaatctgaccagactagctcttggttacgcaggctgttcagattagtatggacaccaggcgaaataccaggatccagggcaattcggttggatctaatgctggtcagggagctcagaatcccccaaatgttcgtggccgaggtagaggtctcaggggcagggcacgtggccggggtgatgttaacccgccacaggttgcccaagctgcccaagatgctcaggatgcccaaaattgggaaaataggtttgcagcaatgcaagcccgaattgaggaacaggataatgagattcaacggttacgtcagcagggtgctcctgcaatgcctgctccagaaattccagtggcacctgcccctgctgtccaggccgaaccagtggtggcagtgaatcggatggaacccctgtatgaaaggttccgcaagcaagcacctccagtttttctgggaggtcctgatgtcatgaaagtcgagcaatggctatcagtgattactagaatcctgaactttatgggcgtcaccggaaatgacagggtggtctgtgccaccttccagtttcaagaagatgcactagtctggtgggacatggtgtctatgatacatgatgtcacgacatgacctgggaaaagttccaggaactttttaatgcaaaatattacaatgaagcagttagaagtgccaagagaaaggaattcactcacctgactca

SEQ ID NO: 357025 - DNA, 519 bp, Cannabis indica
aatttaaaatatatgtatattttcatcgggtattacatttggattggtcggaagctcctcagccctggaatccatagtttttggctccgattgaggcttgaaatctataggaacaaatgaaaaatggttggtgcatctgggtattatgagtttggaatgatgaacttctaaactcaaaatggacattttggcaagaaagaaataatccattatgaaaatggatctcactaaagagtcagaaggtttctgaaaaatgacaagcttgagccgcccttttatacacgaagtctagtgacaagaaagccaaagattgagaaatctaacggttggaagttgtgaaaaatatgaataggcaattcacaatgactctcgaaaccgtacaatctccagaattaaaagatgcattttttccaagaaaagatcttgacaaaaaatgccctttgtaattattaaaaagtccttttactaaaaagaacttttaaggggcaattgttatacccgaaattcggctagaggaca

SEQ ID NO: 357026 - DNA, 652 bp, Cannabis indica
agatgttggctcgtgattgctatcgtatagagttgcaacatgcaaaggtcggtccttagttgatgatgatcttggcaagagaaaacgagaaaaaagaggaagatcttgatccccgagttcaagatgaaagaaacctgctaaaaccaatagaagagttggaataggttattctcgacccatgaaatccaaccaaatgcgtgtacgttgggaagaatttggacgagcagctcaaatagcaattaataagttttatgaaagcgaaccaggatcaattcgcttgtagtcatgccatcacttaaatgctgatccaaactacccggccaagagatcaaaaaggaggcccttagattccgagaggcaaggggtactaaaacaggaagttgacaagttgttagtcaacgattttatacgctagttattttatcccttatggatagccaatcctattctcgtcccgaaacctaacggaacttggagaacttgtattgacttctccaatctgaataaggcatgcccaaaaaactattttccacttcccaagatcgaccagttagtggatgcaactgctgggcacgatcttatgttgtttatggatgcctattctggatatgaccagataaaaatgtacatcccagatcaagagcatacaagc

SEQ ID NO: 357027 - DNA, 711 bp, Cannabis indica
ttggttatactgatgagagtcatattgatcatgttcggtgcatattattgcttcacgacctagtctctgtgtcatcataggtagatcaggcatgtgcactcacctgtaggtgaaagacctagaatctgtacagggagtgaattaaatttgagcccctgtattatggtggttatcaggtgcgactacctggtttaggatgttgttttctatgactggtattgagagctaggggtctagtggactgtgtaatatgcatttgatgcttgattattttgtgattatttgtggcctctctactttgtttatatattttgaaaaaagtgatgagatgagttattttttaaaaaaaagctaaccatgcaagaatttttattcaatcaagggtccttttatattaattgttttcttactgggcttcataagctcaccccctattttctccccttccaggaatttaatttgatgctaatggatgaggatggtactgttgagaggaagaaagtcattattatttttttttaagtatgaaaatcattattagttttgtcttattctacttattaaactttcaatgtaactgattttgtatttaagctgaaatgatggtctggatgatttaaattagctatgtactagtttgaaaagaggaatgatggatgctaggtattattttggtattttattgacctattaaatctatctattcagtga

SEQ ID NO: 357028 - DNA, 551 bp, Cannabis indica
aaatcaaatcctctctgaactcacccattattcttctctctataaaatcatctaagcttctatgcaacaatatataacttcaaccctaaaaagaattccttttgtgtatcatacaaccaagtttcttttttcctttgcaatctccttagcttaactataatttagaatatttgagaattctcttacagttaaaaaataaaagacaaacatttgtgaaccacaaatggcatgtagaatagattctcaataattaatttctaaagcaaataacatgttccagttccaattacggtatcccaaaattggagcataggatctcaataaaaaataaaaaagattcacgggcatgacaggaaaaactctttaatgcaaaacccaaccgagtaagtatactacaaacccattttatagaaatttcccaataactaaattcattatttgaatcaattgtaacatttctaacccaagaaactcaagagcgattactgaaagttctaattctgaataacccatgatgggattaaaactaaagcatatgtaacctaacatct

SEQ ID NO: 357029 - DNA, 879 bp, Cannabis indica
aaagagttttatttagggcataaaacccaacattgataggggtggagaaatatttggttatgcagttcaaagattattaagttgaacttcgaattgtatccaaacttaccttcccagaaattcagattgcatattgatgaaagtgaaaggttatgattatttactagcagttgcctaagtccttctagggaaataccctagtgataggaaaatttcagaatgatggaatggttgtgtacttagtatacatcgttactagattcagggatgtcttgattatgaacttaagaaaagctagaactattaactaaggtttatatgtttgatagctaatctaaagcgattaggggtggaccatcccatggtcattaagataagaaagtgtttgtttcaacaaatactacttttctaagaatataactaaatctgagaacaaagaagcaaagtagaggagatactatttgatttcaaagtgttctatcatcttattctatataagatggtctcactgccttattgtcttgacacaaccgatgaggacaataccactaatattcttagacaaaaagtcacagtaccttgtcgtagtgggagggttttaagaaactcaccctgttatgacttggaagacgcttgtgataaaaatttattgttagtttaaacaaatcatggatagtcagaataaggaactaagaagcaaagccaagagaactatagttaaaaccatttatatggagtaaccaaaagtttttttattacaatgacaagaaatgaaattataaaaataagtctattcaatggtcttaacaaaactttctaatcctaatattttaggtttgagattatctaaatatgtggcttatggtatacctggtaatt

SEQ ID NO: 357030 - DNA, 987 bp, Cannabis indica
cgttgaccgacacacctaaattcagaattaataggtaagactaatataataattgcatatgtacttacatatttagcgtgcatatttatgaatgtctaataaataacatatcagtaatgacgatattagtatacatagagttgcactgaatactgacgaatatatgtttggcataatacaaattaacgctatcatatcagtacaactagagtaccgaggattggttgattttatggttaatagtattgtcgtacgaacgttctagactcagtacccgtaggacgcgggataggattgtaattaggtgtacgggcacctagttataatcttatttgtgatatgctttttttactgagtctgtcgactcacaaatattgttaatgtgtagataaaggcaaatttaagaacgaacaacaatgagtacgaacggtttaagattgtacatatcggggcagttagacctggagtgtttggtcttcgggacagtaggctttattttaatagttgctaggcgacaacttttgtagccaaatattttgtcaagcaattataactttaaaaatagaatcctgaattatgtaaagtatttatatattcaagtttaaaatttaataatgaaaattttaattatgcacatttttctataatccctttgattagcgaaggagtgcacaacattaaaaaatcgtgatatattacgcgcctaaactagtaaggtgttacacataaccaatcaaacaaaactgttacaacattaagtatatttaattaagataaaaaaacgtttacagaataaatgagagaacaattttgactattcttatttaatatctaaacgtatgcgatctattcaccgtacactttcctgagtaacatatgaacttgcgggttctctggggttactcgcatataaagtctttgggccacaaaaccttgggattatttacaagatagaatgcttgtgttaggttataattagcctatgtt

SEQ ID NO: 357031 - DNA, 590 bp, Cannabis indica
aaaaattgcaaaatccaagtggggtccaataacacccatggcctgccacttgtgcatgcattttccaattattattttcattattttaataccaattaattaataacctaaacctagcagttgtctataaatagaaagtgaaggctcacaccaaaagatgcaatgaagcattcaagaaactgaaaatttgagccttcccttttctctctatagccgaaccatatagctcttctcttgctcttccaattttgaataccctagtgaaaagagtagtgcccacacacagcaaacagaacctcaatcatagtttggaagattgtgaaggatccaaatccaagagaaggacatttagactcagatcttgattatactctgcaacagaaaggatacaacggtcagagatctgagtggaaggagacatattattccgctgcacccaatgtaaggtttctcatactttatgtatttatttattatcgttttagaaagttcatatttaggatgttaatcaacatactcgtgagtagatctaagatcctggtaaaattaattctaacacactattccttgtaccattgggagaattgaag

SEQ ID NO: 357032 - DNA, 622 bp, Cannabis indica
ggtagtgtagtattggagaaattagaataccgagttgagcaaggttaggtttttagaccacttttaccctaggcttgaaatagcttaagattaagcaccaagggcgattttagtcattataaattaaggggagttaggtggcgtgtgtgtgtgtctgacagctgcccttcattctatgctgagtattgtatatgaaatacatttttgaaaattaggaaagaggaaaaatcaagaattaagagaaaacccttttctttctctctctctctctccttgctcgtgaaccaccaaaccagaagcaaccaaccgatttcttcttttatttctagaatttagcaaggattaaagtagaattcaagttgaggtaacctctagatcatttgctctttgttttcaagctttgatgttggtttagatatgtgattttgggattttaggggctgtgagggtttggtttatgtgtggttcaatttctaagtttaatttgagttggaaatagctttttgtagctggtttaattgttttgggtgatggatgcacaagcttgagtttggttcatccatggcatattttgtatttgtgcatttttttgggttttgttgattgaattatattgtggaag

SEQ ID NO: 357033 - DNA, 562 bp, Cannabis indica
ttttatttatatatattttttagtaataattagaataattatatgtgcacacaaaacatgtagacacattatcacgtttagactttctctttagttatataattaaatgtacattaaacttttagattaaaactgaaaatattaatgtatgtacatagattatcaaatagaaaaagtaattaaacaaattaaataaataacaaaaattaataaaacaaagaatagtcaagaaaatatatatagactgctacctcaattgtttgatacttttctttatatattgttatgagaatgaattggatacaaaaaatttctaaattataaattaataataataatagaataggagttatgagaatgaatatgcacataataataatggaatatgagttataagattgaatagacactcataaataaaattagataaatcttagaaaaactataaaatagaaaaatgacaatactaaaaatgatagaatgccatatcattatcacatactccaacaatacaattatatagaatatatatacataatatatgtaaatagattgaagaggt

SEQ ID NO: 357034 - DNA, 570 bp, Cannabis indica
tttttttaaaaaaaataaaattacatattacatattaatttatatttttatttgatttgttatttaaattataagttactaactttttaaaatttataatatcactttattacattttaaattatatattacatgttataattcaattatttttttaatcattcattataatttaaaattaatttttttaaaatactaaaatattactttacaaaatttttcattacatatttaaaatttatgttttatcttatacattatttttttatcaacaattaatttattattttaatcttattaataaattaattttatttcatttaaactattaattaattttacatcatctagctatctaccaaaattttggcaacataacaacttaaaaatcgtaaacccaaaattttcaaaacctataaataacataaataaatattccacgacaatatatgaacaaaaaaatgaatccacccatctgactgccgtaaattttattgtagaacctacttcactaacatgcataaacatactaacttataaaaaaaactattaaatttacaatactaatat

SEQ ID NO: 357035 - DNA, 581 bp, Cannabis indica
ataaggcctagtagggtttacctcggttctggttaccgagcctaacctggttatgccttgctcgcataaccatattcgtgaatatacgtaatccatgtattacgttctttcagtggtttatcctggtgatatataccaggtctaacccagttatgtcttatacacataacttttaacatacatgcgtgtgttcaatatttactacaacatatgtaatcactcatataatacatttctatatactcagataacatttactaagagtgttaaccctaactcatgctttcattggactcacaatattctagggtaataaccctagaccgcattaaaattaaactcaaggtactagcttaccgagtctagtttaattatgccttaagcgcataattcataatcccaatatatagatatatccgacatggcatagtattacacaacatatatcactagggtaataaccctaggctattaaaccgctcatgttagggtaataaccctaatcccggttgcaattactcacatatatcatattcaacataagcgccaccgcgcatactctacgtgcaaactactgtctt

SEQ ID NO: 357036 - DNA, 421 bp, Cannabis indica
ggtgtgggttcgcgtcctgggtcatggtctaggttcggtccgagacctaagttccaatcccgatatgagtttggattcagttcggggtctaagtccttatttctgggtctaagtccttggttctgatcctggtctgggttcgagttttggtctaggtctgggtctagctttgggtcttattctaggtgtgggtttgagttcgggtccgagtatgtgtccgcgtttgtgtccaattctggtccccgatctaggtctatggtcgggtccaggtccaagttcgggtctaaagtgcgtgtcgaagtttgggtctgggtcagtatctcggtccagatctaggtccagcattacgatcccagtctaggtcttgttccgagtcatggttcgtatcttgatccctatctaggtccaagtctttgtttgg

SEQ ID NO: 357037 - DNA, 552 bp, Cannabis indica
tcggtccagatctaggtccagcattacgatcccagtctaggtcttgttccgagtcatggttcgtatcttgatccctatctaggtccaagtctttgtttggcatcgggtcccagatttaggtccaggtccgtgtatcagtttcggtctgggtacacgaccatgtccgggcccgagttccagtctcagtttgggtctgaggctaggtttgtgttcggttctaggtctgggtactagtcttgatcgcggtcctagtctttttctagggtcctagttcggcgattttaattcatattctaattttggatcccaggtctaggtctggtttgggtttggttctttgtttgggttgtggtcctcgtctgagacacaaatctagacaccgactactggtctgttccagccccgttacccgaatctcgagtcaagatctagatcattgtcacgggtctcagtcttgttctggttcaggtcccaggtcccatttctgagtttggattcgggatcgagactggggtgcggttctaggtcctgacccttgttctgtgtccctag

SEQ ID NO: 357038 - DNA, 412 bp, Cannabis indica
atatgtttcaacaatacaccctggtttaatgaaccaacatgttagctccctttttcatgtgcatagcaactcttgggactatgacctttatacgagatatgttcaataatcgagattctgatattgatcaagcatgtcgatattttagtcacttgccctgtctgtaatctacaacctgaaaccatcacccatgtcctcatctcttgcccgtttgcatttgattgttggagccaatgtgcaactccagtagtttttgatcctggcggttctttcggcaattggttggagaccatctttaagcaagctgaagctgatatgatttgtcttattgccatgtatagctgggcaatctggaaggctaggaacaaggttgtttggaaaaacaacactcctctattaatgacgtgcttac

SEQ ID NO: 357039 - DNA, 1515 bp, Cannabis indica
attagtttagtccaacctaattctcatgatctcataataaagctgttaaaaaataaaatttattcaatacgtattgacaatgttattagcgtttaggaatatgagaattaatatttttaatcttaaagtttttttttaatatcatgtgttgaatatatattaaatcaattaatatatatttttaaataaaatatattaaatatataaaattataaatattatttaaaaatgtataaatataattagatgatcattggatgataattgaattggtttggttagttatctattggatcggatgtccaatccaacaaccgatccgattagattttcaaaatttacatctgatccgatccaattatgattggatatccgattctattggatcaattaggattggattggtcgattgtaattgcattggatgacttttcgcacactcctagaaattagagctgaagcacttagctattttttttttttgtaatctcgtgagaaataaaagctcgaagtggacgtagctccattaccttcgcgaaaaggggagtgaatctattataaattttgtgtttctatatacttgcattaattattcatcttgtcaatctagcgagctagtgttgaccacttttcagtgtcaacaatctaaatttttctttagattcagttaaaccaatcacatatactaatattattatatttttaaattttctactaatcattgatctaaggtttttaaaataataataataaaaaaaaactatttactaatactaaatcaatcatactttcaacaacacattttaagttataaactcaattttttttattttaagactataacattgaaatcacgaagtaaattaattattaaattttttctcatcatacattggaatgatattttatttcattttaaaatgaaattgtcattccaccaagatggtagaaaggtcattctattagaatgacattccaacactttaatatacaactaaataaatgaatataatgaagattatttcttttccttttcattctatttcattacctcaaactaaatgccaccatagtgtcagaaaacctattttggatatgtgattaatttaaaatttaagaaacttaatataaaatttgtatgaaatatgaagacaatcttgaattatctaaatattattttaacgcttaaaataatttccaatgaaattattaagaataatttgcggcattacctctttaagtggtcagatttttgtaactgacccccaattctaaagttttggtggaaaacctcctaaatccaagttttgttagcacttagccctttccatccattttgaggtgttaagtgtcaggttggaatatccacgcgtacacagtgtacacgtggcacaattttattggtccacgtaaataaatatttaaaaaaatataaaaattaatattttaaaataaaaataaacaaattacatattttcttaaaatttaaaaaaataatttaaaaaataaaattaa

SEQ ID NO: 357040 - DNA, 747 bp, Cannabis indica
taaaaaatatgaaaaagaaaaaatataatagagtgctaactcacatttttttggcttataaatatatagataaattatataaatatataaatttgatttgataacttaaaataataatgataaaaagtttaattataattaattgagcaagatcaagttatcaatcacatatatatttttggacaaattaaatgaatataagaatactttgtttatagtatagatgtatatttataatatagttcttaatccatgtgggagttttacacattaataaaaaaaacttactaagtcatataactcaacatctacaaatatgtaaaatgaattaaatttactaaatttcttttaaaatagattaaaatattataggatgtcttgtcacctcattttctttagtacttttctttatactagaagaaagttacgtgcaaggcacgtatatttagttttatgttatgtgttctataatttaattaagaaagattcaataaataatcatataatttaaaatgatttaaaaactaattttaattagtgtgtggggttatttgaaaatcaatagtgaaaagtcaaatttaaaatttgcagaaagagaagaggagaatggagattagcttgaaatatatttaaaaaataataatgctacacacttactatggacacttaactcgagccggtaataataaaattataaagaataagggtagcaggcatataactggacatatgaaagaaagaatataa

SEQ ID NO: 357041 - DNA, 844 bp, Cannabis indica
aaaatagtttggataccaacaataaattatttatgatattagttttttttttattcaatatttatgatattagttgaaaacaaaatcacagtatttttgatttttttttttttttgggtaaagatttctaaattaaaattatatatgcttagaacagaaaaaacattgttttttcaaactatataactttatttttagatgattaagactatttttgactgagaagaaaagaaattttgttaaaacaaagtgagtagaaaataaaaagaaaatacacgttttataagtgtgaaaatatgataggagattaagacaaattactcatgatgttgaaaattagtttaacaataaaattgtaattgaacatagattttttatactaaaattgttctagtaaaaaattacaactctaatttattgctttattcctcctaaatcgtcggttgtcctcttctcaatcaacaatctcgaattgtgataaaaaattctcagagaagcaattcggcagagttttgataggctagtgtgattaagaattcgtcctcatatcagggtcttctatttagatgcatgaatcaatgtggcgcgttctttttttttttgttggttgattgaaatgtcacgcgttctttagtccttatttttttttgtcgtgttttcccattcgttccttcttccgagctcaactatgttcttcctaatatcttcgttctttctttccattttaatgaaacgacgtgtttcgtctcttcttactacaccactgtatttattcttcattttaaatcaaagaaaattactttttaatgtgatcattattaaattttaattatatatttttttt

SEQ ID NO: 357042 - DNA, 779 bp, Cannabis indica
aacttgaaataccattgctgagcggcttcaaacagagtggcaggaaagattctgcagcatacatctccttgtaccccttgcaaatccatttgcatttcaaagtacttgagatgggaaaggggatcttctgtccccgtgtacattttccatgtcggcattttgaacttgtggggcagtggcaggagattgatgtttggcgagaaaagagttttgcgtgctcggtctaactcaatatcattatttttttgtccagccatgccgtgaaacatatttttcagttagtctagctgaacctgtacggctgggctgacctgctcgacattctggtcaacttggattacgtcagcatctttctaagcggggatttgagtaggagctccgggttgcacaatcaccgtaacaatctaatcatctgttcccgtccttctatttagatcattcctaacctttcaaatacataagcgcctggttgccttagcgattgattctcttggttgacgggtggaatggcaccgttgatctggttggagccatcaagtatgactcctcctgatgaattaccagacaaggtctgctcgcctaccattgggcccgcgagcagaactcgtgatcagggatttggcggctgaccatttgaagtttgggaagtgttcatcgttggatcctcgttcgtttctcccaggggaatgacgttcggagattgctgacctacgatttggtaggctcttcgtatcagcacagtggcttgccgactacgattttcaatctctgcatggtga

SEQ ID NO: 357043 - DNA, 712 bp, Cannabis indica
ataaaagtatattaatcgcacgaacacatgaagacgcgttgaatttctaaaacaatatacagagaaaatgaattcaaaattgatacaaaactctcgaatctcattgataatgctaccaagataataaccaataggatgattggtaatgagcttaacgataagtagccaagatgatgattaggcctccttcctaaggccgagctatgagtgagatactattttggaagaactaaaattctaactttgtgtgtagacctaaagccatgcaaacctacaaaagcttcaaccacaaaaggtgagaaaaagacttgcaagaaccatgttgccaacgccaaggtatcaccatcacatcacggaccacaagtcacaattcatacttttgtcgaaaattgcatcgacatcagttttaaaacaagggttacaatcaaagagtggtagtatactgacttgcttgttcgatgagaatgcttagaaaagatagccttcctttctgaaaagggtatctctaatacgccctttcaaagcaaaggttgctaagttggaaattgcgatcgtgtcacaaatcatcgcacacaacactctaattcattgctaattgccatttaataggggttggcctaaaggagccaaaaaggattacgccaaacatagcttttagagcctcgtggactttttcttatttgaaagtctctctttgttgaattgatctctc

SEQ ID NO: 357044 - DNA, 1573 bp, Cannabis indica
gcatcgccattagagatacacttatgcaactctttaataaatgatgtatcattatcgtgtgagtgccatactaatgaccatatgataattatattttataatgaatatgctaagtgaaatttattttactattaagtacattacatgatacattaaaattatacgtgcgtagcacgtgttattccaactagtaatataaaatggttgtaaacattataatgaaactgagattaatagttcatagtatacataataatacatataaatgaaaaaataatatgtcaccaacatttatttataaaaaacgaaatatgtccttcaacctattaatcttctcaaaaaaaaatactgctttaagattattagaattaaatataaagagaatgaagaaaattaacaaacataataatatattattaattaaagaacaaaaatataaatacaaaataataaaatacgaaaccattaatcgaaagaaaagttgaggcacgtgaaacacgtttttcttaaagtaaatttgcctactctacctgattggtattagaggatacgtgagcaaccatttctcaggatacaatgactaacgagtagaagaatatacgactttcactactataggaaactaggattaatacaaagaagaagacaagagagctttttagtaaatgactctattgatttgtgtgtttaaaataaaagttgaagccttcttttacaagcttcatatgaagtgaaataccaagtgtgaaggaaagggaaataatataaaagatcccacaaaattggtaatattgatcaatcacaatattcaccataattttttatatctatcaaaatattcatcattattacggtgattagatcattgatcaaatctgtatttattaccagctattattgaactacatttaaggcatcaatttctcaacacatattaacctaagttagttatttattatatattaaatataatttttttaataaaagatctatatagtaaaaactaataaaataaataaccagcttcgtaaaattttacatattatataaaagcaaaaaataaaattttattaaaaacccaaaattaactttcaaataaacgagaaattaaatcaaaataactaagtaattattattaaaatataaaattagaatgaaaagataaaacgaaattaaatagtaaaaattttaattaaaaagaaaaataaattgcattaacaagtaataaataaattatttaaaaacaacaacaaataagtaataaaaagagaaagttaaaaaatgaaggcagtaattaagtcactgaaaattcaaactaaacgaaggactattcaacatcgatcatcacacactaaatctaactttaaaacacattaaatttgtacactaacaaaataaatatatataataaataaaaaagtatataaataaataaataaatgtatttataccgagctcggagagagagaaagagagagagggagacggacgggaggtagtggtggtccgacgtatgagacagagatgagagggacatcgacgggaggtgatggtggtccgacatatgtgatac

SEQ ID NO: 357045 - DNA, 922 bp, Cannabis indica
tttccgagggtaagcatcatcctctacgaatggtggtctgatctaaatttgtaatttttttttactattgttgcttcattgatcttttacctttgtctttataggaatggacgtagattttgagagctagttcagaggtcctcttcaggctgacaaggaatccaagaagaaggtaatcccagttggcgaggtcatggattctactaaagaaccgaaatggctcaagaccaaggcttgcataagaaaatctctaaaccagccaatcactgatgtttataaatttcttaaggctgggaatgaggtctcggccgcagggaatgagatctctgctacaggaaatgggatcttctgatgcaaaaaatggaggtcttctactgcagagaatgaggtctatgtagaggtcgagtccttttgcatgtagacgatctttctcgagctacgtgtagatgatctttctcgagctctcctctcctctataaataaccttgtagtctttgtttagaaaaatagcttaatggtttgcccctagtggcatttttgtatagataagtttgtaaaccaacttatcttaaatgccttgtactttttcattcgaacttaatatatttgtgtttgcttgcatttttattcacaatgtaaataattatattttgttcaaatgcaaagtacctttggtctttccattactcataattttcctattaagtagttagtaatctaccagacctttcattttcgagcagttatcaactctgcctcgtgtggcatgctgccccatggcacacccacaatggggtcatttttgtaacatgagcatgccttggtacttcatcattagtcaagtattgcaccaagcacctcattggggtggggagtcttttgctatttagctttctttctttgtatttccactcaaatatgt

SEQ ID NO: 357046 - DNA, 209 bp, Cannabis indica
tgcttcaatctcattaaatggccaaacaaaaagttgattcaacggccatatgagatgagttctaaaaaaggaacactatatatatatatatataaaataccacgattgaaactgaacggatgttcaatcaagttctataacttgagggaacttccgttgagacggagggctattgtctctgaacggggactttggtcgtgaaggacttt

SEQ ID NO: 357047 - DNA, 623 bp, Cannabis indica
agattttgaattgagatcatagaacatgtagaaggtgatcaagcttacacatggaattaaacacaaatatagataatttcacaaatcaagattgaggaatggcaattattcattaactaggcaaaactttaaacaacattcatcatcctccctaaatgggaaatttagctcataaaaataatataaacatccatgattaattctgaaacaaaactagacataaaagataaataggggtaaaagaaagaaactagatggtgatatcgctccgggtcttcaagattgcttcctctcctctttcattcacttttcaggcctatttctgcttgccttggccttctgaatcgtgtcccttatataggaatgaaaggtgtgcctctaattgagaaaaaatctgaattaggtcaaaaatctcgttttccgtacctggtcgcgacccatttaaaggctggtcgcgaccactggcaaaactcaaaaaaccgagtttctgccaaatctcccaagtcgcgaccatagtcgcaaccagataaaagggtcgtgactaggcttcaagctgctcgcgactactgactcccattgagcagctttcgtcgatttttcaccagtttgtcccgtctttttgt

SEQ ID NO: 357048 - DNA, 928 bp, Cannabis indica
agttacgtgcaaggcacgtatgcatagttttatgttagtcgctatatatgtaactgtaaaaatcataaaaaagaaaactaaagatcactataatagttggttctgatcttcttttacttcggttaaaagaataatgtaatatttttattttgcacttttcaccctgcaaaatgtatgtatacaaaatatttatactaaatttaagtaaatttatactaaatattatgtaacgaaaatgaatagaaaaatataatcttaaaataggggaaaagatttattagttaaagttttagaaaatcttatgaaaaataaaactaagcatagtaaaacgttatcttaatctttcatcggctcagcagtttgaatggtgaattgattgtactttgggctcatctgtcggcacttttaatggtgaattgattgtactttgggctcatccgtcattttggatcgacatataactggattcttcatttaatgactgataatctctctatagttttttggagaaataagcgatgtttctgcaaaatttaatttaaatattacttttatgattattaagataagtttcagtaggcttgtaattgcaaaaaaaaaaatattacacatttatatatatataaatatatgatatactaaatgtgaaaatatacctcagttaaatacgactttaagatgagtaggatggaactatgttatcacctctgcaaggtatacaataacagatcaaagtaattccaatatattactgaaacaataacacagatagttataaatatcataaaatatcccactttattttctaactaaattaaaaaaaaataaagtactttaaaattttaaaatattttatgatatttttttaaaaaattaattaaaaaatcaagtaaatagaatagatgataacctatatgtttgttgatat

SEQ ID NO: 357049 - DNA, 695 bp, Cannabis indica
acggccaggatgacttcttcttactcgtgctgagctgtctaggcatacctctcccgagctttgcccgaatctccagcgatgcgcggacctccaataatgacttgtaagtgtccatctacgggtggaggtagcagatcctggttgttttgaccttggctggtcttgacatacttctataggtgcggattgtttttctttatcagaaattcaatttcccgcttcagattataacattcgttggtgtcgtggccgtagtctccgtagaaccgacaaaatttcttcatgtcccttttttgttatctttcttcatgggctcgggcttcttgtataggattaacgctgagttgccatatatacactctctataccttcagccaaaatagtgaatgcagtgtgtttggcatgatcacggggagcctgtccggatttatcagtgaactttcctttcttcccgtttccttgcttgtgcttgttgcttgaacgcttgccacttggattgttggaatagttgggaagttgggcagatgttccagtggaaggagcctttgctttgcccagcttttgctcaccttctgctcgttgaatggcttcttcgagcttgatgaagcctttggcttggtccaggaaatcagtcattgagtctactggcccgttcttccttatatccttccaaagttcaccaaggacttcaatgc

SEQ ID NO: 357050 - DNA, 480 bp, Cannabis indica
aaaaaggatttttcatgtaaaaatttctagttaataaccttggacaaattatttagatatatttagatgagaatataaattaataagaaaaacttttctcgtattaaagataaatgattatagtaattaaagaataaagtatattataatacaaatagaaatatatagtaggtgcacaactagattgtaataaacatctagagtttagtatatatataaattcatagtggaattttaattatgaaaataatgtaaaattttggaaatatgaatatataaatataatgtaatgtccctcctttcggtaactaaaactaaataagacagtgaaaatttgtgtaataagtaactagttaatattatgggaaaatttaggatttttatgcgtacttttatggtagaaagtatggtttgaaaattaatatcaatcaatatcaatcactttaaaattattttttttattttctctttaattctctc

SEQ ID NO: 357051 - DNA, 677 bp, Cannabis indica
agtttgaggcaattggacaagttttgaaaaaattggaattttttggggaggactggtagaaactagttaacccgtttaccagtacctgtaaaaccagttaaccagtttttgcaggtttcccgaaaaaacccattttctcaattctcgtccattttagtgccttagttgggtgtttccctattttctaagatagtgtagtccctagagagtataacagagccttgagtgtagactcgggtatccctgattaaggttttggacatgtgatatatctggttttaatatgtgatcagggcatccatccagcacgagactttccgtttaggtcgaccaattcccttgaatctctaaaggaggtaagaactatatataatgtgtaatatgaatatgcgaatgtatgtatgtgttaatgtgtatgcatgcttgttgtgattcatacactaccaacacttgtacggtagcggtacagagtgtgtatgatgtctgaagagtacatcacggtgttaccagcactagtacaggaaggtacaaggtgtgtgtgctacaacacttaacagtactcaaggtgcggttcataccctacctacactaatacgatggtagtactgtttgcatgtggtacattgatacatggtcgtattttagtagaatgttcttactcatctattaagccttgt

SEQ ID NO: 357052 - DNA, 536 bp, Cannabis indica
actgagtttacatcacaactcccttcttgggttacgtccatgaaagcccttactggtgatggcctcagcaacattgatgccagtgtgaaatcctatatcatcatcaatgaatgatatcaatcatatacaacatacttggaaattaaagccatccaaataattatagtgattaaccaattactaatgcccttcaacaattagaattagtaacagagaaaatttatttagctaattattaattaacacctaccaaacacttagccattgctgctgatcaaatatgtttttactttttgaatatccttaatatatatcatcacctaacctaattaattaactatattgtgtagtaactattcatgggtaatacctattaagaagtattatataacgaataacgaataatgaaatcacaaatttaaatttatatgcttaatttaactgcttaattaaaaaaatatcaaaaaatatctcttttaacactatatcaaaaatatgtttatacaaaaatatataactcaaactcaactatttct

SEQ ID NO: 357053 - DNA, 699 bp, Cannabis indica
gacctaagatcaaccattgatattgacttaaaaagatataacggtaagtttatgatatcttatctaagatcaatataggtcccttccaatgtgtactccatacatccgatattggtaaactttgctcattccctggaaaggacataaaacttatccaagttgtaagtttaccttatcattgattttcatgtcagtctaaatccagtaaactaattaatcatgggaatcaaacttttgaacatgcaatcatgattatattctactgtcctgacaacactatcatcatgaacaaatatatatgtatatatttacaaatgttctggacttaatagaatttatacatataatcatgaaataaattatgtgaaccatataacataaaatgatttttatcttatattaattagtaaatctgattatattgaaatgagtttaatttaaggcaccaaacccaacattgaattgcaaacctagggttttaggcctcctatataaaggccttaaccttagcctaaaaacctaagttgcctctaagcttgtaacttgtttctaaactctaagtgtgtgataaactctctctcttcctcacttcctctctctctctcacactcctatcgtagcaacatcccaacacttgagtttttccagtattgatttataccttgtaatcctaagggtgctatagcagatcccacctat

SEQ ID NO: 357054 - DNA, 632 bp, Cannabis indica
cgcccaagtacccgtcctggtcgagagttcagaggcgtgcctccgaaatcttggacggaggacttacccacctggcgcccaaggcaccttgccgtcaaatgaggaatcgcctcagaaagctcctcactgacgtagtccatgccctcaaccaggacgtctccgtgagcatcgactggctgcccagcctcgttgtactccccgaagttagggggttcaacctcttcctctccctccgcctcagaaggactgcccagacgcacctagtccagcttctcaacctcctgggcctcagcatccccctcacggtcctcttccatcaggacggccgaatcctgttcggcgtggggtagagtcgcaagccgagccacttgaggatcataagcgtcggccagacgcgtggttttctttgtacgagccatcatcctatggctgggtacgaggtcagaagaatttccttcgctagaaggaggactagcacgaagacgaggatgaacctcttgcagaagttgaagcaagttctggtcgatctgatgcccaagttcccaagactcacctaggttcatctacaaaagacaacacacaagatgagtgttggacggagtatcaaacgagaaacaagcaaatatgccgac

SEQ ID NO: 357055 - DNA, 1284 bp, Cannabis indica
cgtcctttccatgccataaaattctccaagacatgtcactttagtcttagttgtgtctcacttgtctctcatccctaagtgaggctttccaaacctctcctccttgagtgatgctccacacagttgttgttgtatcgatgaatattggaatctagggatgtcaccttgaatgtaaatttctccttttcctcaagttttgaatttgcgatctactctctaacttcttatcttagattctggcattgtcctccttggactaatttctataacagacttatctctaaagtcttcacatacatacttcttactatctaacttaggagtgtgtaacttataaaacatccatcaagatagtacttttccttaaagatatattttttcatcttcttaataatcgagtttggtgaaatgccctgtcccagtctagtatagcatcaactatcctaagccattacctacttcctataggttcggctttctttcataactagctgtggggactgtttctttaaccatttgtagacaggtacaatcctatgcatcggtatttagttagctattggtacatttagtatagcatcaactatcccactattaatatctcaatattatcaatttttttatactaataattaattatatcaaaattaattacttaagtactttcgctactaatttatttagatacataattttaccataattatcttttaagttaatttgctttgttactttttttatcaagaaagataatttctattaatcaaaccgagtctattaatgtttcaaaacaaaacgagtcaattacatttacaagggtttccttcaaaagagaaacttgcaattcaattttatttatactagacaacttcctttttgtacaagattaagtccacttttgaagctctctttaatactatactatatatacaattcatacactttttcttatttatacacaaattttagtttagccaaatgttttaaattgcacctcctaacacatttttatgaacataatatgaattttatgacacattctaatatatttttaatttatttttaaaaattatgtgtttttgtaaacatatttattttttttcaataacaaaaaaaattaaaataactttgtaaagtccttttttggcaagttaggtgacaaaataatttttccatttatggtaagattgctatgcattcattttcgatttcttaccttataaattcggtttttagttgcccttttccttgtttggaaagttgcactttcagctgaactttcct

SEQ ID NO: 357056 - DNA, 758 bp, Cannabis indica
tggagagctcaaaactttacgttcaattggaacgtatgtacatcgatgcgtagtggtgattacttgttacatctttgaaccacatacacaaaattggagatggaacaaattttttgtacaatgtgggccatttggacggaacgaagaaagtggttcatggtttaaaagcacgaatagctcagaatttagccacctttgcctctgtttggattcagaattatcgagctgcttaacatcagcaccctgcttcgactacttctgcaccagcaccgtgcaaatcctgctatgtctcaaccgtggtctcctccagctccaggcggccttaaactgaatgtagatgcgactgtcaattcctcaatgaatacaattggtgtgggggctgttattagagattctaatggacacgttgtggctgctatatcaatgccaattgtaggtaacttcaaattccatgaaatggaagccaaagcactcttccacaatctcaattgagctattcaacaacagataccggttatacaagttgagatagatgcactcatggtgacaaatgcattgacagctcctttcaatccaaattcctctttttcaaatttaatggttgatgttattagtcttttatcctttttccctaatgtacatgtttcacatgttaaacgttttgcaaatgaagcggctcatggtcttgctaagtttgcattaggggtggatgagacttgtgttggattaaaaaaatcctatgtgggcacatatgtata

SEQ ID NO: 357057 - DNA, 572 bp, Cannabis indica
gacgcataatggatatgtggtgaaatctgtttctttgatcttcaattgcaagtaaaagttgaggctggcatcgttgaatatttttatcggtggtattccttctttagcttggtactgtatttgcagtattgttttggtgtttttgcaccccaatgaagtaagcagtatttgtaatagctcttcatacttgcattttgttggtatgaattctccactagcctcatagttgacataattatgttcttcatcccattgtccattgctctttatcagtactggtatacgttccattacctgccattgttcccaatattacatttacgtgtctttttttttcatattaaaacaacagtaaaacaatactacaaaacaatttacactagttgtttattagtattcttatttattattttgctgatccatataattagcaatgattctgtgttaataacgccaaaacaacattagaacaaccttgttttttcgaatgaacaattgtagtcgtttctcagggataatttacatgtaatttttttttttataaaatcccatcataaattaaacaacatcag

SEQ ID NO: 357058 - DNA, 466 bp, Cannabis indica
tttagaagttcatatttaaggtgttaatcaacatacttttgagtagatctaagatcctggtaaaataatttccaatagatattaggactcgtatctgtgatttgatgaatattaatgaggctggggttgatagtatgtacttggggttacctagcatcatcagccacaataaaaatgttgtgtggagtttcttaaaagaaagaatgaaaaagagaataaatgcttgggagggcgaatatctatctcgggctgggaaggaagttctacttaaggcattcgttgaatcgcttccttcgtatgcaatgaatgtcttcttacttccggtaggaatttgcaaggaaatcgagcgtatgatggctaatttcttgtggaaaacaacgtcctctaatggaggagggagaagtattgttggaaatattttaccaggatctagattaactaccatgtatgtttcattaacatccta

SEQ ID NO: 357059 - DNA, 501 bp, Cannabis indica
gctccagcatttttgagaccaaatgtcatgaccttatagcaatacagacccatatctattcggaaacttgtatgtccttggtctggtggatgcatcttgattttattatactccgagtaggcatccatgaagctgaaaatttcgtgccttattgttgcgtccacaagctgatctattcttggaagtggaaaacagtcttttgggaatgccttgttgaggtcggtgaaatcaatacatacttgtgatttcttattcggcttgggtaccattacgggattagcaacccatgatgggtagaaagcttcaattatgaaattattattacgtcgcttctctacctcttcttttagcgctagggctcgctccttgttcaacagtcttcatttttgttgaataggccaaaaatttgggtcaatattcaagacatgtaaaattatagaaggatcgattctgaccatgtcctcatgtgaccatggaaaaatgtctaggtttgctctcaga

SEQ ID NO: 357060 - DNA, 995 bp, Cannabis indica
aaggtcatgaaagctcatcaaactatggaggctttaaaaggaaaagccaccaaaggtggaaagaagagcaatgacaaatccattaagagaggagttgctcgagcatcaaaggctattgcaataccgaagtctttggagtccatccaaacaaagtcaacaaaatctagttgcattcatattggaaccacaaaggttaagcaacaaggcctggctcaaataatgatcggttttgctccaattaacctagttgatgtcactttttgtatggtgaactcaacggaggagaaaactaatggtctagatttcttagtacaaaagactactaaagatcctacctcatcactttgtatcacaaagctactaaataatagtacggctgggtcatacaccaaatatgatggggcaaaatcagttatttctagaaaaccttttaaagaaaaaataagaggaattgagtcagaccttgtgagaaagacctcaaagtaatcttgctaagggatttacatcaacacctaagtccataagaaatgatgcaagtactgggtttaacttttcacaattgaactcgtacacattttctaatggcataaataaatggacttcaagagaaaaagaagaaggaaggtgggaatatcttcatggtctaaataccataagaaccaccactactataactagggcattaaggaataaaccaaaatagtacatgagacaagtagtatgctcaaaactacagcctgtacaaaaaaagttagcttatgagtgccctagtttcttagcagttcaatccaaaagctttgataaatgctccaatgactcatatcacgatgttgttgagttttgtgccctaaatataacccatttcaatataatcagatttactaattaataaagattataaatcacattttatgttacatggttcacatgatttatttcatgattatatttaatgtataaattctattaggtacagaacatatgtatttgttcat

SEQ ID NO: 357061 - DNA, 1676 bp, Cannabis indica
attgcttgggtactaggggtgctgaacagatgttccaggagagggagcatgtgattggtttggtttaagctcgacttctgctcgctgaatggcttcttcgagcttgatgaaaccttctacacgatcgaggaagtcactcataaaatttattggtcgatctctcttgatgtccttccaaagctctccgagaactttgatgccccccagtattgtggttagtttcccttcttcggttaatcgtgccccttcgtcgcctctgtaatgagtctactgatatatgcttggagaggttcccttggcctttgtttcacttcgacaaggtcctctaaatgtaatgggagttggcgagaagaagagaattgtgcatggaatttcgaggagaaagccttccaagagttaaaccttcctggtgtcaacttgaagtaccattgttgggcaacttctgagagagtggtaggaaaaactctacaacacacatctccttctactccttgtaagtccatttgcatttcaaaatatttgagatgtgatgagggatcttctttcccggtatgcatcttccaagttggcatcttgaacttgtggggcagctctagaacattgatctctagagtacacggggatccacgtgcttggtccaacttgagatcattgtgcttttgtccagccatgccttggaacatgtttttcagttcatccaattgtccctacacggatgaatgaacttgttcggcctcttggccgaccagaatcacgtcaggatctctttaagtaggatattgttcggctaaccctctccttttatttagatcatctctgagatcatgagctgttcccagtctattaaatgtagatgcactaggttgtcttagtgactggttgctttggccaagcactcggccagaatcgatagtccaggtggagttattaggtataacccctcctaacgtattaccagatatggtctcgccgcctaccgcttggcccacaggtggaacttgtgactggggattggatgactgaccgttcagagtttgggaaatgttcccaacttgatcttcgtctgagccgctcattgggatgctggatgcgggttgctgattagtaacttggtaggctctgtgtatcagtacagtggcttgtcttgttcggttgtcgatggctgcttattgagccttcaacgtttccatctctttatctttccattcggtgaactaacgcctttgctctacgaacgcaaggttcactgcagcatggagctcttcctgatcatgatgtagagtattagtatgaccttacatgagcccaagagcattaagaaggttttggatcttggtgtcatctccaacagttgttttggcatttgttgctgaaggaaccccagtgctgggagtacttagatcggctgccgaactggtatttccagtctcttgcacactgggtgtgattccagccaaaggagacgtcacaccatgacctgtggttggtggttgcgtaattggttgttcaggatttgtgactggtgggacccttgcattacctggactctgcagtgcgggatacactgctggtggatctatctaatcgatcgcacctctgcgagtttgtaccaccatcgtgtttatgattacatttaaagtaaagagcaaatttatgatccttgctctcaatgaaag

SEQ ID NO: 357062 - DNA, 900 bp, Cannabis indica
atcagatcaaaagatctttttatcaaacaaaatcttaataattgcttaagaattaacaattattcataaacattgaatataaattctaattgtttatgtggtattaactctttgcagagatgaatataccatagattttgtatcaataataaataaaaaacacatacaaacatgataaacatataaatataattggtattggcatacacaaaataaagaaaatatgaagctcaattcattaatgcaattcataatgaaatttcttaaagagaaaactttattaataatctcaaaaatatcataatgagttgtctgcataaatatgaaataggaaataaaatcccaaactaataattgaaactaaattgttcataaaccgaaacaattaaataaaaaatgagcttcatcttcacttagacaatctccaccctgttgtccaaccatccgactcaactcgctaggatagtaatccaagcttaagcagctggggcagaaataagaagaaaacaaacatggttagtagatccagaataaaaaacccaaggggataataattctctaaaatacatgattttatagcataaatagaaataccttgtttccttgccaaaaacttaggacactggggtttctagtggcctttttcgttgcaatagaagcactttcccttttgctttgcatttggattagaagccttgttcttattagccgttttatcaactttaagaggcttcttgctattcttccaattcttatttctgtagggtttcgaagtagaggcaatgtttgcctcagcttcggccgtaccattaccagtgccagaactaggagctttagtttctcctttctgtggtcctccaattaaattttcaaatgtctaaagtgttggaattattttac

SEQ ID NO: 357063 - DNA, 579 bp, Cannabis indica
gaaatcatcattttacttctatatccagatagaagctatagattccatatctatgattagcgctcgtactcaattgtattatcatgtgtccaagatgtatgtgtgacccgaaccaattggtaggctttgacgaataactttaagaacacaaataacactcttgagatcgaacttaaccatagcaagattaagatcttttgatctaagatcaaccagtgatattaacttagaaagatacaacggtaagattataaatctttaccaagatcaatatcggtcacagtgcaatgtatactccatacatccgatactagcatactttgtcaatgtcctggaaagaacataacacttatccaaggtgtaagtaaactttatcgttgactaccacatcagtgtaaatccaatgcactgataaatcatgggacattaagcatataatcacaattaccttccactgtgttgatatcactgtatttgtgaacaacaatatgttctgaatttaacagaaattgtatattgaaccataaacatgaaaactacatgaaaatacgaatgacttctaatcttttattgataaca

SEQ ID NO: 357064 - DNA, 567 bp, Cannabis indica
ttttaatttttttttaccgatggaacaatctcagcccatatgatataaaaatgagagatttttttaattaaatagaaaaattaagcataaaaactcaaaattttctaattttatccattcatgggtaatacccattaagagtgcacccatatatatatagtagttaaagagaataaatttattaagatgctttcatgtttcaaatccccttagttcttcttttctatgtgtatacacattttatttattaaaaaaaccaaggaagtataatgttcaaaataatttaaacttatgaccactacaataggagtatgttgctaaatcatcattccacttaaatttaggggttgagatgcaaaatgaccctaaatttggtaactaagttagtaaatgtccacttttttaaaaaattaagaaaatggccaaatctaataaattagctaataaaaattataaaaataaatttatcacatattttttttaaaaaaatatatataataacaaaattaagttacataatttttttagtattgcatattattatattgtaacaaaaataaataaata

SEQ ID NO: 357065 - DNA, 703 bp, Cannabis indica
ttttatttgttattggtatcgaaaaaattaccgaagtttgttaccggcgctggaaaaatcgtcagagtagcttccggtgtcagaaaagtcacaagagttgttgatagcgccagaaaagtcatcagaattggcattgtcattggaaaaatcatcaagaaactggtttcttcaaaaaattactagaaaagttaccaattcagatgccaattcagtttcttgatgatttttccagcgacaataccaattcaaatgactttttcgatgccgtcagcaactctgacgatttttccgacaccagcagctactctgtcaacttttttcgacacggacagcaaactctaaaaagtcatcggaattggtattgtcgccggaaaaataccaagaaactggttccttcatcaagaaactgatttcttcatcaagaaaacggtttcttagtaatttttccgatgatttttctggcgacaatgccaattttgttttccagtgtcggcaactaggggtgttcgcgatgcgggtggtgtggtttttgacttttttttcaaaccaacctgcacatgtatttttttaatttcccaaactgcacccgcactgcgaaactaaaaaatcgcatcgcaaaaaatggtgtggtgcggtgcgttttatgcagtttttacggtttggactatcactagataaattatcacaaatacaacaaagtttg

SEQ ID NO: 357066 - DNA, 812 bp, Cannabis indica
ttctgaaaactcacacagactgataacttgggacttacttcccttttgttccaacttccaaatttttcttttcgttggaaccaccttaagatagataggattcccaactttaaatttaatatctctattcatctattgcataagcaatacacaaatttgaatctttaaactacatcaatatcactttaacagtactctaataactgtcattacataaaaactcatttagaatcttccactcagtatccttatttgactgatacaacaatctggtttatatcataaaatttcctttaaacaaaatcaaaagtcctttgtcaagccggtatcaaacctcctctcgtgcttctaaagttcggagttactccactgagccattttatttctttccaacaaattgaactacaatgtaatattaacaagttctccaatcgcgatctcaattcctattctatttacatccccaacaactgatggtaagatctttttcctttacaaacttctcctggtcctctttgatttacaacacctattaccaatttacttcccaaaacggtaaagaaacatatcgttataatcttcaactaaccctaaccattattgcagcttcttacttaaatcctttcaagtgaagatatgttttgaagcccttgtagttcatataaacttcacacttttcatcatataggtactgacgccaaactctcagtgcataaataaccgcgccaacttagtatcatgattagaacaccactattcacactccttccattgtccaagtgcacaggcaataaccctcttaaactgtatca

SEQ ID NO: 357067 - DNA, 524 bp, Cannabis indica
ttcctttccattccattccatttcattacctccaaccaaacgccacctaagtgcgtagttcatattttgaattcaatctaatctataaaagtgcggattgcataagttattttgaattaattatttttcaatattaaattatttaatatttataaaaatatttttttttcacataattatattgttattttatatctccaacaacaaattaaaataaataaaataataaataacaaatttaaagaaagaaaaaaaaattgtatatataaaaatgtttaattttattttaaattatatgtagaaaaaaattatatataagaatagaatatttaatttattaagatttgaaatatatgtgtattgtatctattctatataaagtgtgcttatataattgaattcttggtttatgagaaattcatgggtaactttttttttaaataatttttctattcaaaaataataatttttttttattaagatgtattttaatattaatttttaaataaattaatgttactttt

SEQ ID NO: 357068 - DNA, 714 bp, Cannabis indica
acttttttttcaaaccaacctgcacattgatttttttaatttcccaaactgcacccgcactgcgaaactaaaaaatcgcatcgcaaaaaatggtgtggtgcggtgcgttttatgcagtttttacggtttggactatcactagataaattatcacaaatacaacaaagtttgagcaacacttgtcaaaaataccataagacttgaaaataaatatgaaaaaaaagtttcaagtttcaacaatacaataattattttttcaacaaaaaaaaaattagtggccttaggttgggccttcacatattgaacctaaataaatataaaaattagtatttttataatatgcaatgcggtgcggtttgaaccgcatattaacaattcaaaaccgcaaacctcaccgcaccgtgcggtttagaaaaaattcaaaccgcgaccgcaccgcaaagaatttcaaaccacatttttttttgcagtatggtgcggtgcggacggtttgaacggtttgagcggtttgatgaacacccctaccggcagcaactacgaagactttttcgacaccgacaactactccgacgatgaaaaaaagatgataatctagaaacccataaaatttcactactacaatgttggcctttagaggctattttttcacccccagttataaaaaaggaagctaaagggtgtgaaaatacctttttttttttttttcgaaattga

SEQ ID NO: 357069 - DNA, 547 bp, Cannabis indica
aaattttagatagaaatataaaacaggtaacattggtatttaatttcgttatatttataggagcttgagtgactaagaataattaatgactactttttattgaaaaatttgggggggaattaaaatttttatttttatttttatttaaaatttaaataaatttataaatatctctttattttaatattggatgttaagatatttatgagtatcctaataatactcaactacgtgatatgatttttatttgattaaaattttgaactgtttgaatttctaaattagtaattttgatttaatttaaatataaaattaaacaacctttattgtgtgttaatagattttttttaatatcttaagtttaaataattgacgaaaggttgtttaataaaaattatacttatcttcatttcaattttatttgaaacctaaaataattaaaaaattgaataataataataataataataattgtaacgccctaatgctaagggacgctacagtgctttttcaattattgtgcaatctttgctaatcaaagaaattt

SEQ ID NO: 357070 - DNA, 600 bp, Cannabis indica
aagccatgaagacgccatcatcaaaacgcttggcgcaccggctgcaggagaccgggagaaagaagctcatctctttttgccttctttgaggcttgttccttgaagtccctgagctccttcagctccgtggcgagagtggcccaggattctaagttttcctggtgagtttcctctaaggacctcaccttagcagccatctcctccaaggcttcgctggcttcccgaagctcccgcctggccttcgcagtggcttcaccttccgtcctcatctcctcttgatgcctggcctccagcctatctctccgcagggcctcctcccggatcattgcctccgcctgcgcttccctctgcttggcctcttcctcgttagctttggcaatggcctcccggcgctcagtagcctcctgataaagccgcctctcagcagtaagatcttgaagaatcttcctgacttcgtccatgtccctaaaatcggacaggacgaaaccatggttgattatgttcttggagagatggtcggcttcagcagaaagctaaagaaaaataatacaattataagtaagaatctccgaaaaagaaaataataaggagaaaagcaaa

SEQ ID NO: 357071 - DNA, 673 bp, Cannabis indica
taagcatttgaaacctttgtcaaatggaggacattgctagagaaccaaactggcaagaaattaaaggagttgagaacagataatgacctggagtactgctcaaatctgttcaaagatttctgtgccagagaaggaatgatgagacacaaaacagtgatcaaaacccctcaacaaaatagtttggctgagagaatgaataggacactcaaaacggtttagaaagagtgagatgcctactacttggtgttggtttagaaaggaaattttggggtgaggcactcaaaacggtctgctatttggttaacatatgtccatctattgcaaacaagttcaagactctacaagaaatgtggatagggcatgttcccaaacttgatcaccttagagtatttgggtgcactgcctatgcacacataaaacaggataagttacaaccaagagcactgaagtgcatgtttcttggttatcctgatggagtcaaaggttacaaactttggtgtatggaacctggtttcaagaagtgcatcataagtagagatgttgtcttcaaagaggatgaaatggcaatgaaaaccaaatctccaactgaaatgcaacccgctataccagttcaaggtctgcaacttgaggtggaccaatctaacactcaaaatgcagaagagagtcctgaaat

SEQ ID NO: 357072 - DNA, 808 bp, Cannabis indica
cttcttctttcttctcatctactttatattattttatattattttatattattttataacaggaacaaccatacttatatttttctaaaaaaaataaatattttgttgagtaaaggacctattttgtgataaacatccacaataaaactagcattcaagatgaacctaaaatgagtaagttaagatgtaataatacgtaacctattttttttcacatattattatgaaataattacataattatgaaataattacataaggcacttattttttgtaaaatatttactatttttacgttacaaaatttattttttttttaaatttttacggttttaccaaaaaataacaacgaaaacaacataaaagtaacatcaaaaataacaaacaaaaaagtaaacaaaaaataacatacagattaacaaaaaattaacaacaaatgaaataaaatttcaacaataaaaagaccgtattttatgtaaaataaaaataaaaaaaaaacgtaaaaataatttaaaattctgaagaaaccgtatttttgtttgttattgtgcatttgtgaaattatccctattataattgcagagttgtgtctttgaataatttagtaattggagagttgttccctcaatgtattgtaccactataaagtctctaaaatttggtacacaggggcaataattagtaattataatagtttagcttgaaaatttcaaaaaacaaaatcacaataattataaggctaattcccgaactttgacatgtactaaatcgtgttccctgaactttttttaccgttagaaattccccc

SEQ ID NO: 357073 - DNA, 441 bp, Cannabis indica
aattaaaaaaaaaatattaaattatctcattatgataattagaattgaattaggaatagtaaatttataaatacaaaactacacaaaaaatcggaagttaattccatgaaaaagcatgaaaaaacaaagaaaaacaaaaattttgggagctgtacggacagtatgccaagcatactgtccgcgcgcgcagccctgagttacaggccaagaaacctcggcggaacaggggaggttgcagcctttgcgcgcgcgtaggcgaggcttcagatacgtgatccgcgcgcgcatgaaggattcagacagcaagctcggtgttgcttgtctgaatccgcgcgcgcgtgagtgtgcacagcccccttatctttttttttcgaatcttcaaaaaatcataactaattcaaattaaatcaaaattgagttctgtaaaaaagtaacttgctt

SEQ ID NO: 357074 - DNA, 884 bp, Cannabis indica
tttgcagcaaacttagacaaaaatgtgaatttggatacgggcaagatttccgggctcaaatcacatgattgtcacgtgttgttacaacatttactacctgcaggtatccgtaagttcttgaaaaaggaaatccgggacacaatcattgagctgtgtgtgtatttcaaacaattatgctcaagaacacttaatgtttcagatttagaaaaaatgcaaacaaatattctaactattttgtgcaagttagaaacaattttccaccggctttcttcgacataatggttcacgtagttatgcatctccctaaagaagctatactaggtggaccagtgcagtacaggtggatgtatcccattgagcagtcaatgtctgtgtacaagcaatatgtcaggaatcatgcccgtccagaaggctctattgctgaatcttttgtggttaatgaggcattaaccttttgctcaatgtactttcgagaagtggaaactcgattcaaccgtcctgactggaacaatgacattgcacagaggacagtcgacaccttacccatgcaaagcaagcgtaaggcggagtggtacattttgaacaattgcacagaggttgagtcgtatatcaagtaagtataaattccatacacaattactcacaatagtcgacttcacctaaaaaattcttaacttactaagtgcattatattatatagtgagcacaaggagttgcttcaagcaaggggtgtaggcaatattgaaaaagtgcaagagactgagttccctgaatggttcaaaactcaagtaagcattgttgcctctcaatagtcataatcttgttctcaataactgttaaatttttttaatttaatattttcctgaaatgtagattaatgaact

SEQ ID NO: 357075 - DNA, 580 bp, Cannabis indica
actagagctccccagggtgacacactaggccgaataaaccctaagtcaagtaatcttgaagctgaatctttaattccttaagctcggctcgagccattctataaggagccttggaaaccggttccactccgggtgctaaatctatcaccaagtcaatttcccgctaaggtggtaaactcggaagttgtttgggaaaaacatcaagaaattcccgaaccactttgaaatcttctggccggatagtgtatggccgagtggtgtcccccaccacggccagaaaccctaaacaactgccatgcagtagttccctagctgatagggccgaaatcactgggatccgagatccccgaaccgaaccgacaaaaataaatggttcttcactttccggttggaagattaccatcttcctcttgcagtcaatactggccgaatacttggataggaaatcaattcccacaataatatcaagatctactaaagctcatttctattaggtcagcacttaactccctaccgtcaattctgatcggcatagacctaatccacctttcgaagataactaactctccgctaggtaata

SEQ ID NO: 357076 - DNA, 505 bp, Cannabis indica
aattgtgatttttggatggaggtatgaagagcaaaaaggaaccagggtttaggtagtttagccgccaaaaatttggttttttgtagttaagtgttacaaaccgtaaaattcaggtggtttagccaccaatattcctttttaaattgttaaaaactatttagaacgatataaaaacataaaaacaactgtatatataatttaggaaatctacagattttgactactaaaactcaacgtacaaataacgtctaagcaacatgctcaaaaaataacaaaattaaataacatatttacaactttaaaacaagaattttttacactagatgtcaaatttggcatcttttttacatttttatttatgtttggttttttaaacttttttataaaatctggttttcaattttatttttcaaaaagttctttaattacaaaaatacatttattgtttatgtcatctttcccccattttttcttagtctcttttacatgttaactccctcttttt

SEQ ID NO: 357077 - DNA, 750 bp, Cannabis indica
cccaaataacataaaaacgagaaaatctagggtcccagaaaatttcccaaccggcagaccggttgcacaaccggaattctggttcctcgcaggaaactttcaaaaattcacactttgctcaaatcaattccaaaccataccaaaacttccagacctgttctaaataccccaaagaacatttctaaagcatctacacagtccagaacacacagatatcaaaaatgccattaaagctccaagctttgaagtcaaaactcaaacttggttaaatctaactaacatgcatccaaatcagaataaaactacatattcatgcatattaaaacctctgaaaacacaggaattcgacctcaacaaacacagcaacaaaactcacaatttcacttgaaaaaccatagcttttgaactacaaattctcaaactagaacaaggataactagcatgcatttcaacctatctaatcacatttaattcagtattttaaacacaaaaacaacaacaacaactaacagcagcaacaacatcaaaaactagcatgcaacctatccacttttcttaaaaaacttcaagaacaaaagcaagagacttaccaagagttgagaccacaagaacttgataaatccagcaagaaaacacacaaagaaatcccccaattccagctgctcaaaaccgaaaagagaagaaggagagaaaaagagacttttttgcttttcttttcaaattttctaattttttccaactttgtaaaaa

SEQ ID NO: 357078 - DNA, 549 bp, Cannabis indica
taaatattaaatttatatttagaaatttattctaaattggaaattttaattaaataaatattagatgaaaattcactttaaatatttagctttattataagggcattcgatctccattgttggtgctacatagttcttattttagtgagtaatcttccctaatggaagaacgttcattagcaatttaacgccgtagatctcgaaagataagtattatttataagtgttttatttttagtatggatcaccctaatggtggcgactattagtaagacttacaaaagtatgaaacaatggtggaagtttttaagatagaatggccttgactctcgcctaaacgggacaacgctggattctcatcttgatcgaataaaaggttgctagaatgttgatcattttagatgagctgacaattctattcaatggatggtatctttgactctcgcctaaacggaacactgataccagtttgttggaaaccttcaaaattatttaggactgtatgttttagtattttcgcttgtcattcctatttgctaaatgcttaat

SEQ ID NO: 357079 - DNA, 730 bp, Cannabis indica
atcgttggatctttgtctgtttcacccaggggaatgacattcgggggttgctacgcaacagttggataggcttttcgtatcagcacagtagcttgtagactacgattgtcaatctctgcatggtgagcccttaatgcttccatctcgttgtccctccattcggcaaacatgcgtctctgctcttcaaacgcgagatttaccgcagtgtggagttcctcctgatcatgatgtagggtgttggtatgaccctgcatgagtcgaagagcagcatggaggttttggatctcagtatcatttccaatggtcgttcgaacgttggtagcaggtggaacagttatgctatgaatgccttggctggatgctgaactagtattcccagtctcttgcacaccaggcgaaatttcatccacatgagtcgtcacaccattacccgcgtttcacggttgttcgagattaacagctggcgaaacccttatgtttctcagattctgcaatgcaagatccactgcctgtgtggattttcgagatcaaccatgcccctacaagtctgtacctacgttgtacttgtggttaaatttagaatgaaaagcaattcttgattttgctctcaatgaaagcactaaaatgttgacctcgcttttacccagcgacagtgagtctaatttagtaagcaagaagtagtttgtaacgattggaatataataaagcaatataaagacataggaatttt

SEQ ID NO: 357080 - DNA, 737 bp, Cannabis indica
aactaggaactaaaagtttccctattgataaaaagcatggcaataccccaaataacataaaaacgaggaggactagggtttctgaaaatcacccaaccggtagaccggttgcccaaccggaattccggttctggaaatattcagaaccccatccggaattccggatgcacaaccggaattccggttcctcgcagaaatcactcaaaaattcacacattgcacaaatccaatccaaacaataccaaaacttccagacctgctatttagaccctaaggaacaattctaaagcataaaaaccaagcttcatgcaaccaaaccaaaaccaccattaaagcatcaagctttgagttctaaactcaaacttgatcaaaccccactaacatgcattcaattcagcccaaatcaacttaatcatgcataaattaacctctgaaaatagcagcaaacatcaacagcaagtaaacaacagattcaagacatttctttgaaaaatcatatttttgagctaaaaacttcaaatcttgaatcaaagcaaaataccatgcattaactagctctaacctacttaaaataacaaaactaatcctctgaaaataacaacaaattacagcagcaagcatcacaacaaaatcaagcatgcatcatcatctttttaaacattttctaaaaattacaaaagggaaaggtttagaaaccttaccaaagcttgatgaacactagattgaaggagaaaggg

SEQ ID NO: 357081 - DNA, 570 bp, Cannabis indica
ttacttaggttttaagtaagaaaggttgatatttccttgaggatttagagttgtatgtttggattcaatttaggggttgtgtttttagacctgttttgaactgtgttgaagtttgaattgaatgatttctactggttatttagtttggattgagtaaaataaaataaaatgagttttcttcacttgagtatgtaatttttgaattaagagttgagatgttgtaattgacgcttgggatacattatattgatgatattgtactgttctggagcatttgggttgctttggtggtgtttgtattggttttggaggaggaaaatttgaaaattgcaaccctgccagaactggttaatctttggactggtcgaccgattggttctggtgcagcagaactggtctatcggtttccttgcagggagaaatttttcaattttctttagggttggttttagggcttggggtgatttctgtgactggtatatattgtttagaaagtgtaaatgttgggttttatgccctaaataaaactctgtttcaatgtaatccagattattctatatcaataaagta

SEQ ID NO: 357082 - DNA, 593 bp, Cannabis indica
atacataacataactgaatacattattataggtaccacttttatctcccaaaaattgtactatattataaaaagtaattttatgatatatttacatcaatatttttactattgtatactctaattgattataattacaaaatttgatataaaattgaatattttattaatatttttattaaaaatataaaaaataatatctttattattaatatagcattgttattatgcaccttaaagtatctctaatggtaaatatttaaaggatatttgtttaagtagacatattaagtggtaaaatattaaaatgctataccattacaaagagatggacgtcaatctaaaaatttacatggaggttatacagtagcattgatactatttatttatttttttaataaaaaaatattgttgctaaaatcttgtgaaaaagaaaaagaaaaagaatgacaatcatgcaatatcgtaagatatttttatctaacgattgcatcctatatcgtaaaatgtttgtggatgcaatatcgtatcccacttgtggtgagtctaggtggcaaaagaaaaaaaattttgacgaggtaaaggttggtgtcc

SEQ ID NO: 357083 - DNA, 613 bp, Cannabis indica
gtaggtcaaggcctataagacctagagggtcactatagctctacctagaggaggccagactcgtggcgcctattatggtgacaatattcaacacatctgcagtgttcatcgagattccaattgtgactggaacctgagaatctggacctacattttgtgagtcttgagcgagacccaaagatgcaaatggtgcgacgggagttcttcttgtcttaataatgttatttgatcagatacggtatccacactctcaatgaaagcacaccaaactgttgacctcaaaaagtgatcaaccaacagtggggtcatatggatctgatacttgccaagtgttacataaacaagaattaaaagaaataaacactaagatttgttatagaggtatggcccccttgtgataactggtaatcacctactcccctttcggttgtattgataccaagagataatactatttagattgctatagttgagatctgatttagctctctataaggatacaaagtatgaattaagaaggcaaagaaagagatgaagtgagaagagagagagagccctattgggcgtgaataagggagagagagagagagagagagaggagagaatatggctt

SEQ ID NO: 357084 - DNA, 879 bp, Cannabis indica
caccggtagatggacatctgcaagccatcattggagggccacacatagctggagattcgggaaaagctcgggagaggtatgcccgaacagcacaatatgagcaagaagaagtgatcatggccgtagaagaaaggaagccctaaatcccacgggcaggagggcccaccataacattcaatgatgaagatgccatcaagatcaggttttcgcacaacgacgcgctggtcatagaggtccagatagcaaagaagatggtggccagaaccatgatagataatggagcctcttccaacatcttattcaaaactgcctatgagaagatggggctccagcttaaggatctagccccttgtctcctgcttgtatatggtttcttcggccaaggagttgcacctctaggacaaatttgcctacccctcactgttggacaagctccaacgagcaagactatcttgtgacaatttctagtgttagatgttccttcagcctttaacgtcattctatgccgaccaactttgtatgacaaaggttgtcacatcgatattatactcgtgcctgaagttcccaacaaagaattgggtagggtgtctgagaggaaaccagcagactgcgcgggaatgttataaccttgtagtggccaaggctaagaaggaagtatcctccagctagagcacagacaagggaaaggacatttccaagtagggaacttcccaaggcggggatgaagatgtggatcctcgacttggggacccaagctgtaatgttggacctgtggaagaattagaagagatcgagatcgattccgatatcccgaccagaaagctaaaaattggaaaaggtttgttgctcgaagtaaaatcaacattgataaaatttttg

SEQ ID NO: 357085 - DNA, 562 bp, Cannabis indica
tgaatcaggacccgaaatcagaagagacaacaataatgattgcaacttcatacacttccatggtggcaagttgtaaggaatcaagatgtaacacccgtatttgaaaatttgataaatcaaaattaatcttataatataatatttataaaatctcgtaagtcgggatcccgagtttataaccatgttgaaaatacatatgcaacatataaagttataatatattattattatttttttacaaattacagggcaatactaaaataaaactcaaaatgggataagatcgaaacccttcaggttgcactgccacgatatgtacaatccttgtcgaaccctaactcactactccaccagccaagcttaacccttacctacacaagataagaaactgatgagtagaaaaactcagtaagataaacatataacaaattataaaaccgacttgtgtctaggtgcccatacacctattcacaagactaaccaaatgattaagaacgttcttaatgggtggtgctattgaccatgatttcacccactaccagtactatgattgtactgcggg

SEQ ID NO: 357086 - DNA, 502 bp, Cannabis indica
tatattctgttaaaccaagaattgtcgttatatagacacttttaatatataaagataaagatataaattaggtaataattttaaaatcgtaaaatacaaaaagtattgcaatttaaatagagaaataaaaatatatttgatttctataactcaattatttgtttaaaatcattattattaattttttagttaaacaataatgttattattatttattatatgatattctaattcatgtttgaaatgatattaataatgttttatgtttattataagtggttttaaaatatttaacaatataacatatttataaaaacacaaaataaactatagaagtaaaatttaaataaataaatattaaatagttttattatttagaaataaaaagcccgtaattatttattaagaaataaatatttattattcattttattttgattaattataattttaatttttttttattgaaacataaaattaaaattataaatattaatgtata

SEQ ID NO: 357087 - DNA, 343 bp, Cannabis indica
ctaggatatcctataggcacaaaaggttatagaatctgcataaaccagaatggaaagcctaaggtgattatttctagaaatgttgtgtttaatgaaaatgatttacctcacttgaaagccgagaaaggcagtgttttacctgatgcagattcatctggcaagagggaagatttggcagagtttgaaattgagctcaaaggatttgaaccagcaagtgagaagaatgacagcacagacacagctccagatgagactgaggaacaaccaaatctatctgactaccaacttgctagagatagaaccagaagagaaatccatataccagcaaggtttgcagaagctg

SEQ ID NO: 357088 - DNA, 588 bp, Cannabis indica
aaagaacatattcactcggtttggtactcctcgagcaattataagcgatgaagggagtcacttctgcaacaaacaatttgaagcactcctctcgagatatggtgtccaccaccgaactactctatcgtatcatccacaaagtaatggccaagctgaaatttctaaccgggagatcaagatgattttggagaaaacagtgcatagatcaagaaaggactggtcacgaaagctagatgatgcactatgggcttatcgaacaacatttaaaacaccaattgggatgtcaccatatcagttggtgtttggaaaagcttgccatctgctggtggaactagaacataaggctttttgggctatgaagactcttaacatggacttgaaagttgcaggggagaaaagattactgcaattgaatgagttggaggagtccagaaatgaagctcatgagaatgcaaaaatttacaaggaacgaaccaagaagtggcatgaccaaggcttagtcaaaaaggagtttcaacctgggcaacaagtgctacttttcaattcaaggttgaaattgtttcctggcaagttaaagtcaagatggtc

SEQ ID NO: 357089 - DNA, 515 bp, Cannabis indica
aagcagccagagtggcgtactcgtgtataagagccattattccgtgggtggaaggacccaatggaggcttgaagtggggacgttacaaaaatctcaattgaggagatgaacagcatgctagaaggctccagaagaagaaagacgtcgctgtgttttttctatgtaatgttaattttacacaaagcaaagtgaaaaatatctatatagtaaaaatagtgttctcaatacaaagattaacaacttaaaaaattataattattttgagtgagatttaatctcaaccacttaaaattctgttattgtaattacttaaattttaaatctatgtctatataaagaaagagataagattaaaaactctaatgactcattctccttttctctttctttatgcaaatttcaaattgggcttcaccataaaatttaaaataactccacacaataattaaaattagtttttaaaccattttaaattatataattatttattgaactattctcaattaaattttaaa

SEQ ID NO: 357090 - DNA, 679 bp, Cannabis indica
agagaatatgaaaaaaaaaaattgatagggagcaacttgaaaaaaaaaaagtaataagttgttgcaatattgttgaaaaaaaaagaaaaaaaatctcttgtaattagaaaaaaaaaaaaaagagtattgggattgcgcctgaaaaattcttgggtgacatgattggagaaggttatagtataggcaagactaaatgaccatttcaactacccttacctaagcctaacactacaagcctaaaaagaccttttaattcttggttgtgcattgatttatattatagtgtagaatagtaagtattgcaagcatatggaattttggactagtggattgatagttgtaattggcatgcataaagaagttcaattgttagttaattgcattctatggtttcatgagctgaatgaaatcgaattgaagtgtgtcaatggtgtaattaaactgaaattcttgattgttatgcataagtgaaatttttaatgatcatattattgagtctacttgaacattactcatgttatggagattgacttgtttaacatttatttttcggtttagtgttttactcgaggacgagtagtcgagtaaatgtttagtttggaggaatttgttaggttatttttagtattatttttaggttaatttttagtgtgtttttaatttagttctactcttgttt

SEQ ID NO: 357091 - DNA, 527 bp, Cannabis indica
aggtcagctttttgttgctggtatattgactgttctaattgattctggtgcgatgcattcttatatttaaagtagaataattgagaagttgaatagacctagtgatgtgctttgtagaggttttggaactttgatgcctacttgggaattggttatctccaacaggtgggttcgatcccttccactatttgtggaaggaagagagttatcagttgatctgatagaattgaatctagaggattttgatgttatcttggggatggattggcttgctaaatacaatgccaccatcgattgtaaaagaaagatggtaacttttcagcctgagggcgacgatcccttggtgtttgtgggtaagatgcatggatcccagattcccttaatttcagcacttaaggaaagagatttgttgtgtgaggggtgcattggtctcttagcaaatgtagtggatgctacctgggaaccacaagtgggaccggagcatgtcccagtggtccaagaatttctggatgtgttcccagaagagt

SEQ ID NO: 357092 - DNA, 546 bp, Cannabis indica
tacctctacttttatatttatttaaaaaatacctcttttatgtgtattgtacccaaaataccctgacataagagagtcacatggagagtatcttgaagtgacaggggtaaaattggtatagtgtttaaaaaaagaggtaaaaatgatagactttaaaaaagaaggcaaaaataaaagagaacaatataaaaagggtatagagtgtaatttcttcttttataattgggttaagtaatgagtaatgtattaccacttcttccttgaatattagcctgaatggaagcactcttggtaggattatttccaagtgtgcctcaatgcaaggggacccatatccccttatatttttatatggacaacgaaaatactttcaagacttattaaggaggcagttaaaaatgggactatcttaggtattagattgagtagaggaagtctgattttgtcgcatatttttttcgcagatgattgtattttggtgtgggttagactaatgggattttttctataataaattaaaaagggaagcaatttacatttataacc

SEQ ID NO: 357093 - DNA, 1237 bp, Cannabis indica
aaagaaaaaagatgattccaaaaggcttcctaatgacaagaaaccccaataggtatatccctcttttatactgaatacaccaaactcaatgaaaacttgagaaaagatctacctcgtacacgtacaagaagccgtttttggcgagccaacacctatgaaacgtgcgaggtgcaagagggatctaagtaagcggtgcgaataccatggggatattggtcataccatagaagagagtcgttagtttaaagatgagatagaaagtctcatatcgcaaggacaccttcatcgatatataaaggggcgggaagatgcctatgattagttcgatctgcccaataactcgagcaactgaagattataaccctcttccacgagaagaagggcactttggttatctcgagagggatcgggtcacaaaagtacgaaaggcagttcgataaaagcaaacttgtaaaagaattccaacctaagtagatgctggctcaatatggttgccatcattagacgttaaccagtggcagtcgaagacagaactaaaaataggattactctatctggaaccctggtatattacaggatcggccctgagtattgaaacagttgtaagagaatgttggggattgaccctggacatcaaaacctgttttatcaaaaccagatgctcctggaagattgataaaataaataattgaactaaggaagtttttctcagattaatgattgtaaattacattactgatggaatattttgaattccagttgtgaataaaataatcatttattaaacaagtgattacaaagagtaaaacctttaaaattacttgaggggcatatatgtatgattaaccagaattgatttggaaatacatagttcaatgcaaacccatagtttcaaaaaataataaaatttttgaaaactttttaaaaggtcctcgaccaagcctttttgacggaagaggggtcaaactgttataactccctgaccaaaccttttcgacgcaaaaggggttgaatcgttataacgccttgatcaaaccattctaacgagaaagggatcaaacaactgtaatttttgatttataacctatctgatgagacaggaaaatcaaaagttacgactagcgcataaagttgaatactaacggctcgcgctaagggaaagtattaaacgagacatccaaatctcttgaaaaaaatacttaaacccaacacgttggtagaaattttaactactcat

SEQ ID NO: 357094 - DNA, 1178 bp, Cannabis indica
ttttagctatctcatgtgtccttctttgggcacatttttagcaaagataggatcaaggtggatcaaggaaagataaaatccgccagggattggccgagactgaaaacgattataacagttagaagtttcttgggtttggctggttattacaatcggttcgtagaaaggttctctaaaatttcaacacccttatccaagcttactaaaaagaatcagcgttttttgtggacggataagtgtgaagcaagtttttaggagctgaaacatagattaatcacagctctagtgttagccctaccttctgataaagagaagttcattatttattgtgatgcatctagacagggtatggggtgtgtattgttgcaggctgatcgggttattgcctatgcctctcgttagttgaaagaatatgagcagcgatacccaactcatgacctagaacttgttgcagtactttttgcattgaagatttggcggcattatctctacggagagagatgtgaaattttactaaccataagagcctcaaatatttctttactcaaaaagacttgaatataagacagaggagttggttagagttggttaaggattatgacagtgagatccaagtcataataacacagagaagtaagagttgttgaccgagagctgacctgttaccactgaagggctagcttcaacatcagcctgagttattgcaaacacccttgttggcgcgggtttcactatagtcttctgtgctttagtcttgagttggggacaatccctcttataatgccctggcataccacattgaaagcagtcctgccccctacactctcccagatgatgcttcttacaactaaggcactctgggtatgtgtattgggtttcagacctaccctgatgattacctcgtccctgtttccctcagaacctcttattctaacctgagccactagatgcagtaggtgcctttcttttctggtcagtggtcgagccactacctctcctaccatagcctagtgtaggaggggtaggagccccaccaacaacctgagtcccttgagactttagggtgcactccactgcaccctcagctcacagtgccttaccaaccatatcagcataggcggtattgtcttcggtagtgatcattaaatcatgtcttatcttcgcattcaacccgtcca

SEQ ID NO: 357095 - DNA, 346 bp, Cannabis indica
ttcatgattatagtgttgccaacaaggtggaatataatcatgattattgtaacggcccgatttcccgagacgtcacactcgctagtccgtttaaaaccatttataataaaaacaataaactaatttattgaaaataattaaaacatgagatctcgttattttaaaacaaaaacacttgattcatttacaaatttttaaacattaatttttacaaaagtaattgagccataatcttttaaagaaatattcttaaaccaaaacatcgtgacaatcccctaacatgtaatccatgcctcgagctcaccaccctcactgtatagtttttcctttacctgcacgcagagta

SEQ ID NO: 357096 - DNA, 614 bp, Cannabis indica
gtcacgagttgcactcgtgggccaggaggcgagcagaccttgtctggtaattcattaggagaagttatacctaatggttccaaccaactcaatggtgccatcccacctgtcaaccaagcgaatcaatcactaaggcagtcaggcacttctatgttcgaaaggttgggagcaacccatgacctaaggaatggtcggaacagaaggaggggagtggagggacaaaatattacgacgatcgtgcagcctggagcctgtacttaaattctcgctcataaagatgttgaccataatgccgagtaggtcaatccagccgtacaggctcagctagacgaactgaaaaatatgtttcatggcatggctggacaaaggaataatgatcttgagttggaccgagcacgcggaactcctttctcaccagagatcaatctcctgccactgccccacaagttcaaaatgccgacgtggaagatgtatactgggagagaagatcctcaagtatttcaaaatgcagatggatttacaaggagtacggggagatgtatgctgtagaatcttccccgccactttgttagaagccgctcagcaatggtatttcaagttggctcctggaaagt

SEQ ID NO: 357097 - DNA, 1243 bp, Cannabis indica
agatgggagagaggatcttctctcccattgtacatcttccacgttggcatcttgaacttgtggggtagtggcaggagattgatctctggtgagaagggagcttggccatgccatgaatcatattcttcagttcttcgagcttggcctgtacggctgggctgacttgattggccttttggtcgggttggattacgtcagcgtctttctgagcgaggatttgagtaggggctctgggctgcacgatcgttgtagtattatgctcgtctgttccccttcttctatttagatcgtcccttaggtcatgggttgttcccagcctatcgaacacagaagaacttggctgccttagcgattggttcgcttggttgacaggtggaatggctccattattatgcgtggatccgtcgagcatggctcctcctgatgaattcccagacaaggtctgcccgcctacctcttggcccacgagtggaactcatgaccggggattggacggctgaccgttggttgtctgggaggcattcatcgtcgggtcatcctccgtttctcccaggggaatgacgctcggcgtttgttggcctacagtctgataggctcttcgtatcagcacagtagcttgccgactacgatcttcgatttctgcatggtgagcccttaatgcctccatctctttgtccctccattcggcgaacatacgcctctgttcgtcaaacgcgaggtttactgcggcacgtaattcctcctgatcatgatgcagagtattgctgtgaccctgcatgagtccgagcgcagcgcggagattttgcaattcggttgcgtctccgatggtcgtttgggcgttgatgcctggtggaatagtcgtgttatgaacgccctggctgtgtgcggaaccgttattcccagtctcttgcacaccaggcgcagtttcagtaacaggagttgtcccaccattcaccacgcttcccgtctgtccaagattgacagcgggtggaacccttgaactccctgggtcctgcaatgtcggatccagcgtctgtgagcttgctgggtcagacaggcctctacgagtttgtaccatcgtgtcgaatattgaaaagagcgatctgtgattctcctctcaatgaaagcaccaaaatgttgacttcgcttttagccaacgacaatgagtctttttgataagcgataaacgatatgtcgtaatgagaatatataataaagcaataacaagacacataaattttat

SEQ ID NO: 357098 - DNA, 1045 bp, Cannabis indica
aaaaaaataaacatgcaaaaataagcataaaggaaatcgagaacttactcaaggatcagatgtctggattcaaggaacgacaaaccaacaagcagttttgatgaaggcacttcagcaaacttgaaaccaaaaaaacctctcttttctctctgaactcactagcaaagaaagatggtgaaaatgagtttatgtgccaatgctctttggtatttattggcaagtcatgaaaaggggtaatcatttcacatgacctcagatgcctcgtttccctctaaaaagtgaatatgggaaataaaaaataatcaagtgcaaccgtcaaccatggtgagagaaatcggatttcaaaatattaattgtcagggcattaattagccgaaaaccgaagggacgtccagtaagtctcacatcgagtctcggacagacgcgcttgacacgtgtccccatccaagggtagaagcagctcggatgaagtctacacgccactacggaagtcccgtacagacttgggggcaaatgttctcccaatttttgcactctgacgtggcatcacacaatggtgacacgtggaataaatcttgagtatctgcacagagggtatagtctgagcaggatgcctcgtaggcctatctggagcaaagatattagcaatccgcgcagatccatcaacacttagtgaattcagcttttgcatcgtgagtcatcaaagaaatccctataacttggggatcagatcatagagatatggcaagctgtccaaatcccacgatcagtgtattctacatttatcatgcaatctttctgcttatatccattgtaacgagaagggaaacacttcctctcaaagttcatagtcctataaataatgatgcatgctcactgggcaaaggacgagagattgtaccctagagatactatctaagaattcatattcagagatattgttacaagacctataagaaaatgaacctttctccttgttcttgagtcaatacaaataacgaggattaagctattactaaacttctcggggctgaacctctataaa

SEQ ID NO: 357099 - DNA, 1269 bp, Cannabis indica
gggaacctctgtatgaaaggttccacaagcagggacctccgatttttctgggaggtcggacgtcatgaaagtcgagcagtggctaactgtgatcactaagatattgaattttatgggtgtcaccgggaatgacagagtggtgtgtgccacatttcagtttcaagaggacgcattcgtatggtcggacatggtgtctatgatatacgatgtcaccatgatgacttgggaaaagttccaggaacttttcaatgcgaagtactataatgaggccgtcagaagtgccaagagaaaagagtttactcaccttacccagaaagagaacatgaccgttactgagtacacaacgcagtttgatcggttggcgaggttggcctcgagaattgtgccacaatttcagtaaaaaggaaaaagatttggatggacttaatgcgaagattcggcatgacctgatgattactacagacgacaagaccacctatgctgaaatggtggagaaagcacttcgagctgagggcgcagttgggtgtatgactgagtcagctaggactccactgggtggcggggcccttacccctcctgcatcaggttttagcaggggaggtagtggttcggccatggaccagaagagaaaagcatccactgcaaccggtggctcgggtcagaacaagaggttccgagggaaccagagtcgaggcagtcgtcagggtagctctgagacccaatatacctacgtagagtgccgcagttgtaaaaggcaccatctgggttagtgtagagggcaggggtgcttccagtgtggcatgccaggacactaaaagagggattgccctcaacttagaacagaagcattaaaggctcaggcgagacccactccagctagggtgttcgccattactcaggctgatgcagaagccagcccttcagtggtgtcaggtcagctctcagttaacaactctttttactccgtattatttgactctggggccacacattcttatgtggcagccagaatctttagtaaattggatagaccgcatgatagttaggaatcagggtttggaaccctattacctggcggagagttagttatctccaaaagttagattaggtctatgccagtcagaattgacgatagggagtagagatgaatttagtagattttgacattattctgggaatggatttcttatccaaatattcagctagcattgaatttaagaggaagatggtaatcttccaaccagaaggagaagaaccgtttgtttttgt

SEQ ID NO: 357100 - DNA, 533 bp, Cannabis indica
ccactattactcttgccctcgacccattctcatttgaagctccatcaacaaacattttccatttttccatattatttcatgttcgagagtcttctcctgagttagtttcttttatcaaaaacttagctaaagcctaacctttgattgagttcctcagttgtaagtaattttaaactatcctaattcaatcgaccatttaatcaatcttctcgatgcattgggatttgacaatactcgttgcaatggctaatctctaaggactttaatagggtgtgtttaaaaataaggtcacagttttttagatgtatgtatcaagcagagtgcaagttttttgaacggtgggtatcttgattctgccccagtaatgttttacttacatagtagataggttgttgattcctaccttcttctcgctttcatgttgcgcttatggcactttctgagatggccaaataaaggaacaatgtttctctagtaattggtttggcaaaaattaggtgtgtagaaatatgttctttatttctttgtaatcc

SEQ ID NO: 357101 - DNA, 474 bp, Cannabis indica
aagtttggaatgatttggttaggtttggagctactttggaaaatttaaagttaaggaaaatcgtgtttctggctattcagaacaggaattttggatggtaccaaccggaattccgtttggttagtttgcagaaaagtttaattttatattttggccataacatttcactcgggtatccgttttggacgttctatataccatttcgaagcttgcaaagagctttacaatatggtatatattttagagacaatatataagttttactttcgtgtatctataccgtggcatttggtaaaaaaccctagattgtcttatacgaatattaaggagtgttttgggatagacacttattggtttatcattgttatgacatagggcccaggatcgtcgatcgttttccaagcaagtcggccaacatacctaaactgaaacttgaggtaagaagtgttgggaatatatattttaccaggatct

SEQ ID NO: 357102 - DNA, 553 bp, Cannabis indica
tgttctatgttatatacaaatagatcttgggttaattgttaatttatttaacaagttgtccttagtccactattatctccattaattagaactcaaataaagtgtgtatgcatggcaccaaatcatagagtggggcggtgatgatttatttatttatttaggcattatgtctattgtgtgtcgttatatgtgtgcttggtcccaacaaaaactcaaagctgtagaaatgaaacttttgttttggattaataatgtcctacaatacaaaaaatgatgtactactcatcgcccatagcccactcagtttaaaccatctttatcttattgcaaacatctttattattagtgttgtattatttgtaataagtaatataataaatgggagatcaccaactttgtcacacagtacttaaatattgctaattgtttggaataattagataaagaaccatattttataagaaaaattacaattttttaagtttaacaattttttttacatttttacggttttccgtaaaaacaacacgcaaacaacaagaaaactatataa

SEQ ID NO: 357103 - DNA, 796 bp, Cannabis indica
ataaaaggaaaaattattttgtcaactaacttgccaaaaaaggactttacagttacttcatgttttccaaagtaaggaatgttgtaaattattgtatcaatatgtacgtattatgttgtccaaagtaacatgttttttctattataaatgaataaatatgtgtcgatttttgcatgttttcctattatgtcgttgtttgccacatcttctaaagtttatattcactttttgctctccccgtaatcttattcttttcttcattggtctatgaggaggaattttttcttttggtggtagcataaatacatccaattcttcaagtagactccattcatcctcatgtggcaaatgatatactgtttttgcataagtttctacattatcttcttgaaaccttctacatgtggaagttttatcttgaatattatctataattatttctctttcttcaattacttttttttaaacaaatggtgttacattgtctcacttgtgaaacatatgtgaaataataacaaaaaaatagtattttgaataaggtcacttggtattatgtaagatttcatgaaggttccatcatccaaaataattggtctacaatgttgccatctaatggaatgtgcatatgcttgatataagtatttgaatcgatctttgtccactactacaaaccaagcttttagatgcactttttttcaacaaatattaaagaaccgacgtcatagggttggaattttttagaagggattttgacaccacctatggcgtcgattttttggaaataaccgacgccata

SEQ ID NO: 357104 - DNA, 505 bp, Cannabis indica
aggctactaacatgcttcctaacaagcttttcttaaatcatactattaaaataaactactaaagcaataaaagcttactaaaccgtgaaacgatctgactactgatgatgatagtacatgtcgtggcaatctttagtagatgttgcccctgattttgcccaatatatgtggaccaaccagacaaggacacgtggatcaagcaatttatgattcaaaatattttctaagtctttacgctataaggcagcgtccaggacgtagctcccggagaaggcatatggaaccctatatgctcccggaagctcaagtaacgctaaggaatctccgcggggtgtcaggtttctcctgagtaatcaagtcgcatttaatgctgcatgggaggaaacgtgttgggactgctacacgcaataaagtctgacggcacaacctccaacttgcaactacaaagtaatgatcatttaagtctaacgacgggtacactgtgaagagtcacatcagtcaaaag

SEQ ID NO: 357105 - DNA, 1119 bp, Cannabis indica
aaaattttcgggaacgtccgaattatagatgttatgctgccgaaatttcagtaaaaatttcactaggattagtattttattgaattaattaagttaagttgaaatagaattattttattgtattaattaggttaattaaattgttgttttgttgttttgttagaagtttcgaaatggatggagattggatgagtgcgagaataggttaacgctaaaatatagggaaggtgttgatttctttttggagttttctgcaaagaatgcggataatcctgatttgtttcattgcccatgtctcaaatgtggtaacatggagcgtatgaaaattttccaaataagagaacatttgtttaagaatggtatagacaagagttataagatttggtatcaccacggagaaaaaaatagaagatcgggcgagggaccctctagaaaggataagtttgttaataatgtggagtataaagatgattacattgcagagatgattaacgaagtagagtttgaatctcaaacggtacattccgcctgcaaagacacaattattgtctggactttcagagattgtgaagaattggcctactaagaaatcaaagagatactatattaaactgaagtgttcggaggagaaggccaagagtgttggatcatcggagacgaggtggaagatgtgtgcgagctccataagattggaaatattgttatgtctttttggtgcaggtataatagttaataactaagttaatatctaagctaaaaattatatatacaactgtttattaataatttgttttaatttagttatttgcaagaacacacacttaatcttggtgggttgaggaatacatacgcatttaataatcctgcttcagtagcaactgaagctggtaaactcaaacaacgttcagagaatctatgtcagcgattgatgggtatgcaacctgaacaatggttgatatgtccgtggaattcagagtaagtatgtttttatattaataaatgtaacaaactaatggatcgattagtgagttgactgaattaacatgttttgttctgtagtgatcactggttgacaattatgattcatgccaatactcaaagtgttgcatatcttgactc

SEQ ID NO: 357106 - DNA, 714 bp, Cannabis indica
aaggatgcctataaatagagctctatcccttttcatttgttcatcccattacaaccataacaagctactccaagagtgaagagtgaggctcttgagagaaaaatagtgagaatacctctttgtaagagaaatgtaagggagtaagaaaaagagagttccttcaaaattatgagaaatattttgtaaagagatggtgagattaccacactagtgagtgtgagagttttgagtgcattcctcaagtatttgtcaaaacttgatggtgtaatattgtgtacccattattattgttatagtggaaggtttaccgtggtttttatttgccacgagctaatttcttgtcatgcatttagtgttttgattattattcttaaaatactatttacattggaagatatccgaaaattctgaatatgctctgtgattgtagttttgacagatctttcacatcggaaaggaatttcagagtccccattgtatttttctgtaaatattgatcctgaagggaattggaatacaatctattattcccaatagtgcgttgagttaagaaaatggaaagtaaagagatgtgtattagtttgtagtcggtacaaatataggcggtatgggatcgatttaaatagttaacatgatttgtgtaatatatttataatgaggagtgctaccgtcaacctcttattacaatctcttagtcaatcttcatgcctgaaa

SEQ ID NO: 357107 - DNA, 478 bp, Cannabis indica
aaatcctcaaaaaatacaacatgaaactcaatcccttaaagtgctcctttaaagtcagttcgggtaagtttcttggttttattattaatgcttggggtatcgaagccaatccagagaaaatacaagccctcttggatatgaaattgccaagtaaaactaaggaagtccatagcttatttggtcggatagtcgcactcagtagatttgtttttaagtcaacagacaagtttgttcctttcttcaacatccttcgaggaaataagaaatttgaatggacggaggaatgcgagaatggatttcaagaactaaaaggaacacttggaaaacctcccgtactcttaaatcccctagacggagaagaatttgaaatatacttagctgttacaaaataaactgtaagtgtcgtgcttattagagaagaaaacaacatccaacatccagtctactatattagcaaaagactcattgaagcggaagg

SEQ ID NO: 357108 - DNA, 659 bp, Cannabis indica
ttcgcgttgaagagttcctgaaacctttcccaggtcatagtggtgacatcatgaatctgggacaccatgtcccaccagactaaagcgtcctcttgaaactgaaatgtggcacacaccaccctgtcattcccggtgacacccataaagttcaatatccttgtaatcaccgttagccactgctcggctttcatgacgtccggacctcccagaaaaatcggaggtgcctgcttcaggaacctttcatacaagggttccattctatttcccgctacaactatttcggcctgagcaacaggggcaggtgccacaggaacttctcgcactggcactgcaggagcaccttgctgcctcaatctctgaatctcactatcttgctcctctattctgtcttgcatttccgcaaacctactttcccaattctgggctttctgattggcttgggcggcctgtggcgggttaacatcatcccgaccacgagccctgcccctgggacctctacctcggcccctaacattcggtggaaactgagctccttgaccctgatttgactcgactgagttgccctgactcatggtgttccgcctggcgtccatctagtctgaacagcctgcgaaacagagagttggcacatcaggtcatgatcaacgagagcttactaa

SEQ ID NO: 357109 - DNA, 667 bp, Cannabis indica
gcccgagttccagtctcaggtttgggtctgaggctaggtatgtgttcgtgtataggtcttggtccgggtccttgtcacgctccaagtcttgttctagggtcctggttcggcgatgcttgttcaggctctaattttgggtcccaggtctagctctgggtttgggtttggttattcgtttgggttttgttcctagtctgagtcccagatccggacaccgactacttgtctgttccaggccccgttatccgaatccggagtcaagatctggatcactgtgacgggtctcagtatgattttggtttaggtcccaagtccaatttctgagtttgggttagggatcgagactggggtgcggttctaggtctcgaccctggttctgtgtccctagtctagttccatgtttgggtctgagttcaggttcaggttcgggtcgggagtccaggtttgggttgggatcttggtccggctcccaatttcgatctaggtctgatttggagtccgggtcctggtccggttataattcttgatctaggtccaattttagtaatgattccaagtccaagtcctagttctagtctcgctcctcttctggttttggctccaattttgggtcacacggtacgggtttgggtcaactttgggtttgggactgggttcaagtccgagt

SEQ ID NO: 357110 - DNA, 632 bp, Cannabis indica
ttttccgggatattacatatggtatctacgatacccacatattccaatacaatctccgtaattaataaattacgctttattattcattaattcatatttccctaatcaactcatgattagtttaagtaggattataatcctactttaatacccacttaatcacatatttaataaaatatggctaaataaatatcaatataattatcgggatattacaattatcccctccttataaaaatttcatcctcgaaatttattcaaacaactcgagacacagctctcgcaactgtgacttcatctttcaaattgcctttcaatcttattgttctttcacagcactcgaactagtgttatagttttggttccgcaacactttctcttttctgttctaaaatgtgtatcgattgttcctcatataacaaatctgtttgaaatgcaatattctcccagctctgtatatggatttcttccactttgtatttctaaaaccttgaagcatatgttgtaaactctaaataaaacagggagtatggctagctaataagttacccgaccttccctttctaaaaactcaaacggactgattaacctgggacttaactccctttctcaccaatttctgaatttttttt

SEQ ID NO: 357111 - DNA, 504 bp, Cannabis indica
acccacccccacgactaaacccagatgtcgacgatgacgacccacccacagacgcgaccccacgacgacgactaaactcaccccacgactaaacccaccccacaactaaacccacagacgcaaccgaggacgatgactcacccccacgacgcgaccgaaccacccacgacgacccacacagttcaacattgatccacgacgatccacggccacccacgaccagcacaaccacgaccacgaaccaccgagggaacccaaattataaccgtaagttcttttctcattaaaaatttgaattttcatagatttggatgcgaatttgtgtatgttcttcagattagattgttttagattgtgtattcgaatttggatggttttctgcatgttcattagttgtgtctatttgttaaaaaaatgttatcgatgagatatcgataggatatcgataggatatcgacaaaatgacctttagaaatttctgtgtgttaaagtgtatcgatagga

SEQ ID NO: 357112 - DNA, 1384 bp, Cannabis indica
gaagaatgggacacacttatctgctgattttgaaacaaatctgttaagtgcggtgatccgaccagtcaaactttgtacttccttggtttttgttggcgacttcatatccaggagggcttgaatcttttctggattggcttcgattcctcgggcattgacaatgaagcctagaaactttcccaagctgactccaaaggaacactttaagggatttagtttcatgttgtatttcttgaggactttgaagcattcgtccaggccctctatgtgccccccaaccatcctggatttgacgagcatgtcgtccacatatacctccatatttcgctcgatctggtctttaaacattttttttaccaacctttggtatgttgctccagagttttaagaccaaacggcattactttgtagaactatagacccatatttgttcgaaaacttgtatgtttttggtctggtggacgcattttgatctaattgtacctcgaataagcatccctgaagcttaatatttcatgccctgctgttgcatccacgagctgatcgattcttggaagtggaaaacagtctttggggcatgcttggttgaggtctgtgatatcaatacacaatcgccatttcttgtttggcttgggtaccagtacgggatttgcaacccaagttgggtagaaagcttcacttatgaaattgttgttgcgtagcttttctacttcttcttttagggctagtgctcgctctttgtccaatagccttcgcttttgcgtagccttcgaaatgattgaagggtcaattctgaccatatcctcgtgtgaccaggcaaaatcctctaggttttgctattagaaattttatcaatgctgattttacttcgagcaacaaacccttttcgatctttagctttctggccgggatatttggatcaatctcgatctcttctaattcttccacatgtccaacattgttgcttgggtccctaagtcgaggatccacatcttaatccccgccttggaaaactcgctacttggaaatattttttcccttgtctgttctctggcttaaggatacttccttcttagccttggccactgcaaggttataacattcccaagcagtctgctggtttcctctcaaacaccctagcccattcttcgttgcgaacttcaggcacgagtggaatatcgatgtgacagcctttaagtcatacaaagctggacggcctagcattacgtaaaaggttgaaggaacatctaataccagaaattgtaccttaatagtcatggtcgtcggagcttgtccgagagtgaggggtagacaaatttgtccatgaggtgcaattccttggccagagaaaccatatacaggcaggagacagtgattagatctt

SEQ ID NO: 357113 - DNA, 257 bp, Cannabis indica
aataatttccaacatatatatgtataatatttagttggaaaaaaatatatatatttacatattttctcacaataatatatatctctcatttatccatcattagatgacatggaatctattaaaattaaggctaattaagatttttgctccctaaacttaaacatgtaccaaattgtaccccctgaatttttatggccgttaaaaatctcccatgaactattgagattgttagatttaaggacttttttctaatttca

SEQ ID NO: 357114 - DNA, 765 bp, Cannabis indica
ttacatccgtaattcgaaccaagattacttgtaccgaagaacagacatgagtgaatcgtactagcaactattcattaaagattttataactttagtatgttgctgactattttattcatagctaactggtcttagttctttgtacagctacaagccacaacctcatatatgaataagaaatttttcaatatttaatataaattattcaataataaatattaataatttaacatttacacatatatcaaatgttcaacgctttatttaataattagaaatgtcttaataggcttttcagggcataaaccctaacaaaaatgacaaactttttctcataaacggtctaccgtttcttctagctgtgtcccgaaaaaatggcctaccatttttggagaaacgacctacaattcttcaaggactttttcctaaagtcttgttttttgtgttttctcgatatttagggtattttcatgctatttatcgataggaaaacttctggttttgtgttttagacttagaacgggttagatcaagttggtaactgatttaccattgttgtggcatagggcctgggatcatcgttcattctccgctcaagttggctgacacacctgaatagggatttaaggtaagaaaattgcattcgtaccacttagcaagtcaagataagctaagattattatcgcttgtgatttgattattatctataataaagatacgataattattgttttacaaaaaagagtcattactctaaattgagac

SEQ ID NO: 357115 - DNA, 553 bp, Cannabis indica
cgaactccgtcagatttggtctcggccaattcttcactgagttaatcttatttggatcaaccacaattccatcctttccaacaatatgtcccagagaagatacctcagaaaacaagaattcacattttttgaactttgcatataacttgtgatccctaagtcgttgcaataccatttgaagatgatgcccgtgctcctcttctgtctgagagtatacaaggatgtcatcgataaatactataacgcagttattgaggaaatccttgaataccctattcatgagatccataaaggtcgcaggagcattagtcaatccgaatgacattaccagaaagttatagtccccatatctggttcaaaaagcagtctttggtatgtcctcttcccggattctgagttgatgataactagatcgtagaacaattttcgaaaacactatctttccctgaagttgatcgaacaaatcatcgattctgggtaacgggtacttgttcttaattgtcaacttttttagttcctgataatcaatacacattctgagggaaccatcttt

SEQ ID NO: 357116 - DNA, 683 bp, Cannabis indica
agttttaaggtcaaccttctcttaattttttctaaaaaaaaaaaaggtcaaaccttatatatactaacattttaaaatagatcatagagtttacaataagtagtgggagagagatcatatatatgtgtttgtttcttgtatcttgtgttttttcataaaatcatttctgcgcgtgtcttataagttataaggttaatttgagatttaattattataattataggaggaaggattagagagaatatgaatgtttggcttttttttttgtcaactaaagaaatcgtgtgatttggggctggggttgatcttggacccgcttttcaggctgtcttccattctttctcatcatccaatttttgttcttaagtatcatcctttacaaacgttacacgtgtgtatagattgaccactcatgattcaattcttttataaaacaccaaatatatatattagaaaatttacaccaaaaattctcaaaaaaaatcagtttgataaagataagttactaattttaaaaaatagcattaataattctcaaagtcatattttttatttctccgttaatcctaattttaactgagctgtttactttgttaaaattaccacatgtcgagatattataagtctaaattattattttaattttaaaaaataaaataaaaataaataaataatttcttttt

SEQ ID NO: 357117 - DNA, 571 bp, Cannabis indica
gaaaggtggttgaggcagataaagaaaattttcaacacaataggaacacctgaggaatatcaagttactttggctgtgtccaaattagagggtggtacaacagattggtgggagaccttctccaagacaatggaaactgatgggatgacttggcgagattttgaggaagttttcagggaacaatattttagtccatctcacaagagggctctgataggagtatttgatggtctaagacaagcggatatgagtgtgaatgaattttaaatgaagtttgtagagctatcctcttatgcatatcctggtgttgttgaccaacccttggtgattgaacagttcatgcgtcatttgaggcctacgatacgtgatccaatagcccttttgacctttaacaacctgactgagtgtgtgacagccgccttgcgaactgaggctcatgtagaagggaatgagaagaagaacacaagcagaggaagaggaaatgaccgaaagatgaccaagaagaatcaaggacagtggtcccaaggacaacaatttagtgttggaattttattttatcaggatcttagat

SEQ ID NO: 357118 - DNA, 882 bp, Cannabis indica
aattttatctttattaatattaacccttattttttcgtttggtaatcgcagagatgactttcctaaagtctgctcctatgctcaactgtaaattgaaacccgcgacagcagcgacctctcctattacatcccagaagaggaaaagcgatgtggttgttactcctgtcgcagattcctccaaggggcccgctaagggtgttcaagagaaagggaagaaggttgtgatcgatccagcggctcgagctagtcatgtgctgtaccttcaggagaggtttgtcagcgatgagttcttgtcgaagattgacaaggcctcttcagaggagctgcttcctcgcgctgcggagttagcttcgcagttcatggtcacgtttgcgaaggcttttgctacagggcccaaagaggttgaactcgcgaagaaacatattgcccagcttcaagaatacattaagaagctaaagcaagatgcgtcttctaaggcaaaagaactagaggaacttcgtaaggttaaggagcaggtcgaccttgaagccaaggcgaagatcgaaaagatgtctcgcgacttggaaactgagaaggagaacggcaaaaaacagtacgaccaggcggtctcggactacatctatactactctttccaaagttccagacttcgacttcttgatccttggagcagaagccgcagaaatggccgaggctttttgcgctatgtcacccacaccaactcaaggtggtggagggaaccttcttgaggagaccgaagtcgcggaggtggaggtggaggaggttgagaacgaggtggccagtaaagtcgtggatgaatttgttcctgctgctcccaacgcttgatttttttccttctatgtttgctcatgttgaactatat

SEQ ID NO: 357119 - DNA, 1133 bp, Cannabis indica
gcagggaagataaacttaccaaccttcaccagtacatcttcaattatcccacgaggatgagtcaaagaacgatccgccagttgtaaagtcactgttgtgggctttgcttttcccaatcctagccttttgaagacagacaagggcattagattaatgcttgctcccagatcacatagagctttagtttccaccgaaccccctatagagcatggaatattgaaactacccggatctttaagcttgggcagtagtttcttctacaaaattgcactgcactcctcagtgagtgccactgtctcgaattcttccaacttccttttcttagctaaaatttctttcatgaacttcaggtaagttggcatttgctccaaggcctccgcaaatggaatgttaatgtgcagcttcctgaatatttcaagaaattttgaaaactgcttgtcgaggttgttcttacggagtctttgagggtaaggaattttaatatggtgatctatgctgatcggagccgaagcttatttttcggtgcaagaccctcagtagtgttcttttcctttggtgcctgtgtctgtgcatgttgatcttaaaccacatcttccactggttgcttgccactaggtccctcataactctttccactcctcaaggaaattgcttgacattgctcttttccccttgcctcactagtgctaggtgaattcccttgagtacaattgaccatttgagctgtcaactgtccaatttgagtttctaaagttttaatggaggctctagtctccatcattaattggagcaataaattagcttggatatttgagcctccactaggactttattgttgcaactattgttggttttgttggggctgatttctctgctggtagaacccctgttggctgtgcccataattattgttttgagaatagttcccaatggcttttgcttgatccattggcaaactgttcacatccaccgggcatgtgtcatatgtctgagggcccccacatagctcacaagtaatttgagcctgtttcacctgagcagtcatcaacttcgtcagggcctccactgggctgtcaacttggtgatggcatctacctcgtgcataccagcaactttcttcgtttggcttcttt

SEQ ID NO: 357120 - DNA, 884 bp, Cannabis indica
cccgttacccgaatcccgagtcaatatctggatcactgtcaccggtctcggtctggttctggttcaggtcccaggtcccatttctgagtttgtgttcgggatcgagactggggtgcggttctaggtcccgacactggttctgtgtccctagtctggttccttgtttgcgtctgagttcaggttcgggttcgggttccgagtccttgtttgggttgggatccgactccaactccccattcgtgtctaggactgatttggagtccgggtcctggtccggttacggtttttgatctaggtctaatttaagttatgattccaagtccaagtcctagttctattccaggtcaactttaggttttgtttccaattttgggtcacagggtacgggttcggatccacttttgggtttcggactgggttcaggtcccggtgacggttcgggtccttgtcagggttcgagtcaaaggctgggtcccaaatcgagacaccgactacgagttttgtccaagccttgggtcaagatcccgatcccaatctcgggtcccagtctggttacatttttggtgccgagtctcgagctgggtcctaggttcaagttcgggtctaggttgggtactaggtcccgatcctagttctatttcccaggtccctatcttgattctgggtccaggtcccggttattgtgtgggtttgggtctcggtctaggttcgggttcgagtcttagtctcggtttgggtttaggtctctgcttgagttttgatctgggttcgggtttgggtttaggtccttgtcctggtcctagtcctagttcggttctagttccatttgcgattccgagttcgagtttgggtttgagttcgggtcggaattcgagtcctggtct

SEQ ID NO: 357121 - DNA, 1093 bp, Cannabis indica
aataaaatgccacataagtttttttgtgctttcctttatatagatttatagattatagattatagatataaaatctaaatctatactctaattattaggacatatataatctaaatcacatgacaaactcctacacttctgtgttaaattatacatataattcgcattaagcaaatatattttaattcctacagagactatacaggtactttcgtccaatattaaaatctatgtctattttaccatagcatgattaaatcccactttttaaattttgcattgaaatcataaaataattaattaatgatcaagcaattataagcattaaacacgaatgaaatagattcacataagaaactagaagaaaactataattgtattaaatcataaagtatcaaacaatattcattaaaaaccctaattaggagtttagctcctaattgtatttctaaacaattgtataaaactagttgaaaatataaaatcaaagataaaagaaagaaactttttgaagatcaatagatgtagcctccaaggttgcttcttctctctatttttgtcctcccaaaagtcccaatcaaaagcctctgactatttttttgtagtaaacaaaagctacaacttgtgacatgtcaaattcttttgatattttacccttccaacaaggtaaaatatcgacaaaatcattgaggatggacggtacttcgttcattatatcaaaatcattattgagcaagcatttaatttactcaaattttagttaaccacttcaagtcttcaacagtgtcttgctcttcatttttaggctcgatctattctatgtattcaactaaagacgtttttccattattcaaatcaaacaactctcataaacttcattatttgagttactgtccttataacactccaaattatacgccactacattatcacatagagatcttatcatgtctgtcaagtgattaataatttttctgcaagtgattgttcgtattcctattcttcaagtggttgggggaagaaacataataaccacaataattatgtccattctttatccatatctaactaaaaccacctaaaataattaaat

SEQ ID NO: 357122 - DNA, 592 bp, Cannabis indica
caacttagaccttgaaaatcgaatcaagacttgaacccgccccagttccaatctttgacccggccccgactccgaacccaacttaaataaaatcaacaaataaaaatgaaaataaaatttactagacatacttttgttttttgtttttaaaattgaaaaacaaaagtggtaatttttatatttttttgttattcaagccctaaattttatgttagtaatcctaaatattacattttttatttttctatataaaattcttcaaacttacatttttttgaaatcacctcaaaattaaattggttaattttttttaataaatgtgtttatttgtaatatttaattattttattttaattttttaataataattttaatgtactgaaaatgaaaatgtaatttaaaaaattatattttatttttgtgtgtaatagactatttaaatttgtttttcagtgtagtagtttatttaaaatttttaaaaaattatcaaatattctaaataacaaaaatgcacacttacaaaaaataataaatattataattaaaatatggtgcgtactattttttttggggaattacctcatatactatt

SEQ ID NO: 357123 - DNA, 1023 bp, Cannabis indica
accatgggtaatgcatggtcaaatccctaggtgctgtagggcttttatgtggaatgtccttattgccttttgactgacgtgactcttcgcagtgtagccgtcaatagacttaagtgatcatagcttcgtaggtgcagattgggggttgtgtcgtcagactttattgcgtgtagcagtcccaacacgtttcctcccatgcggcattaaatgcgagatgactgctcaggggaagcctgacacctcgcggagatgctttgatgttacttaggcctccgggagcatagggggctccgtatgccttctccgggaggcaggtcccggatgctgcctttcttcataaagacttagcaaataatttgaatgttaagatcttttggtccacgtgtccttgtccggttggtccacgtatattgggcaaaatcaggggcaacatttacccccaagccttgtttatttgaaaaatgaatcaaggcttgttcaagtgcctccggttgactcctcggtttcctggcacgtgctttgggcgcgtgaaggtgcatttaatgatcaccattaatgcagcgattcactttttgcaggcgtcgattcgcttcatgcccattgattgatacggcgcattaatgcgtgtcagacggatactcaaatgtttccaccgccttaattacgaatcaatctcaccattgattcttggaattcgaatcgtgcgcctccccagccgttcgattggtaggtgattgtgcctgttccacatgcaccttggcctataacagccaccacctttccttcatttggttactttcattctttcgccaattttcttcgagttttccagagaaagaaatccttagaccagaaaaccttcaaacactttacagatttctttgctaacctttgttcgttactgtcagtctacatttctttattgatcaatagcaacccccagttccaacacttcatgtaagtttctcgcatccctcactttactgtttgtgttcatggcatgctttactgtttatttgtttt

SEQ ID NO: 357124 - DNA, 657 bp, Cannabis indica
cttcctcccgaagtaaggcttgaacaagtctttttccgaagatctttctctcgttcaatcaagttgttcaaaccaaccctaatacatgtataagaataaatataaaaatactaaaatctagatgaacaactaagttttcacaaaaagaactctctcttcacaaataaaaatatgcaaaaaaaaagctagaagagtttaaccgattggctgctctctaggttctattaatagaacataggaaccctagagacagccacataatcgattccatagttgtacaaacttttctaaaatgacacctattttgcatcatcagaatcaggttctatagcagcaaaccagaccaaaagaagaaactttccaaataggtgatcgatcatgaacatggactagatacctgccaaaaatagtgtgcttgacctgatttgatcaagacacaatcaaacacattaaagagaaatagtaatggtcaaagtttccatatcaaacaaacttacaataagaaaatttcttctcttacaagaagtttctaaaataagaaaaatgatagctgaaaaatgattatttcctttgatagaaaagagcaataaatacataatattaaggtaataaaatctgtttaattgcacaaagaaatcacaccataaataaaaaata

SEQ ID NO: 357125 - DNA, 590 bp, Cannabis indica
gaccaggtacggaaatcgagattgctgacctaattcagatttttttccaattggaggcacacctttcattcctatataaggaacacgactcagaaggccaaagcaagcaagaacaggcctgaaaattcaatgaaagaggagaggaagcgatcttgaagacctggagcgatatcaccatctagtttctttcttttaccctctattttatcttttatgtctagttttgtttcagaattaatcatggatgtttttattatcgttatgagctaaatttcccatttagggagaatgatgaagggcatgttgtttaaagtttttgcctagttaataaataatttccattcctccatcttgattgtgaaattatctatatttgtgtttaattccatgtgtaagcttgatcaccttctacatgttctatgatctcaatttaaaatctgaaaagtgagaattgagaatgctaaaattggataatcgaggttctatgtgaaacgggagtatttacatgacttatgtgataattaaattattacttaatgttgatttcatgttaatttaattaagagaataattagagaacatgtggttta

SEQ ID NO: 357126 - DNA, 694 bp, Cannabis indica
catatctacttatctacttaaaattttattagtatgaacaaagttgtatacacacatgaatgatacaagtaattagataaatattgatgttgcaggaacccctcatccataatttagaagtccacacatacactctgaaagagttatagaaaacatatgatcatagataatatacggtgacattttaaaagtgataacaataatcttatgaggtatattatcactaaaataattatgcatcatatgtgcatgagagagacattgtaacaccctaactagcataggcgtgttagcgtgatttttaacgtactgtgtagctcgttgctaatcaacgagattattgaaaatcgtgaataattaaaattttgcttatttaattaaaaactaaaagtattacatatataaaattcctcgatcccgtttacaaaatactttataagagtttgctatacacataaatcaaaagtttgtcgcacagcgactatacagcaaaagcctcgatgtcccaaagatcgtgcgctccaggcctaaccgccccgacatgtacaatcttcacatgctcgtactcacagctcctcaactttagccttgcctttacctacacataaagatagcactatgagtcgacagactcagtaagaaaagcataacataaacatacaactattccgggttataacctggcgcacataca

SEQ ID NO: 357127 - DNA, 662 bp, Cannabis indica
ttcttttgcttctttttgtctttggacgaccccttagaatcgtcttttctctttgagccgaaggcccctgagttatcaactctagttgagacagtacttgttgaaacattgttgggtttggctcccgagccagttattaacaagttcatctctttttgagcttcatctttttgaaggaacacctgagccctctcgttgaactcagtgatgttcttcactggccgaccctgtaagtcgtcccacaattcgcccctaacagtggatagatcagtagtgatcccaacatgaagggcagtaagttgtgtactatcatttagatttctaactcttgtagcagctgtgctaaaacgacttacttatgccttaagtgtctcacttggttgttgctttctattggttagcaaggacatctcgggtcgcctatcccttgcagcttggaactactttttaaagtccttggacagctattccaaagaagtaatggaatgatgagcaaattgttggaactattttaccaggatttagatttactaccatgtatgttatttaacatcctaaatatgaatctctaaaacaatgtatataaacatataaaaagttatgagaaacctttacagtggggtgcgaagcgggaaattaaaagactctccgctcagatctct

SEQ ID NO: 357128 - DNA, 942 bp, Cannabis indica
gggaaaaattaggggcaacacaaataagtaatgaaataaatctgattctttattgataaatgaatataaaagattacattaaaatagagttttatttaaagtataaaacacaataatggaggctctcaaaaactctacttgtctgacaaaatataaactaggttatatgagttggatgagaatgagaccatcctattcattttatactatttcaccgagggttaggatttaaattatattgaataaaaaatgataaaataatagcaaaaataaccctatagtggccgaccatatagattggccccactaaatataattttgccattttttcaacaatttatcttttatttcacaaatactatattttccaattttaatcctataaatgccaaaatgccaaactatttatttaataattataattaattatcaaataaaataatcatttatcttatttattaattagacttttcaaagtctcttaattaataaataaatcctaaaacatcttttcttcacaattaagccattgcttagtgaaaattcatagataagacatagtctaatttttgaattaaaattgattaattaaaactaattaactgagtcttacaagtagtattgtctcaactagtgtggggaccatgagcctatataatcaagcttccaataagtagctctagaatttaccaagtaaattctctaacttataaattcctctccttgcgccactatagattcagaattgcactcttaattgggcgggttgcacttagatttttgtaacctgatctttacattgggttaaataaaatgtaacgtaaactgaccaaaccgaccgaggtacacccctagctagttagaataaattttaccaggatctaaatttactaacaagtatgtttattaacaccctaaatatgaattctctaaaacaatgta

SEQ ID NO: 357129 - DNA, 541 bp, Cannabis indica
aaaataatataatatataatttaatataatagtgtactatataatacaatgttattcttacatatttaatcactgcagaaatatagaaatgtgcattagaaaaggtcagatcagtatttgagggaaatattattaatgaagaaatttattgtatctattgtgttgtctctgatctaaattaagtattttcttttttattttatttatttgattatatataattgaatggtattttatttgatcagatatagatgaatttattatgcatttatatattataactaagggtgtttattggatcatatttaatatttttatgtctattcaaatccgattcaattaatttcatttattcaatcgatctaatatccaattagattagttcggttctatatatccattgtattttaaatatatttattcgtttaatttgagtttatctaatattttagacctagtatttttcgaatcggattcatccaatattttagatccaatccaaaaaaaaaaaaaataatagtaaaattttaatattaatttt

SEQ ID NO: 357130 - DNA, 1414 bp, Cannabis indica
aatgtatctcgctgagtcacccctctaggatagcaacattaaccttgacagcgagctagagcttttcccatatctttctgagggtgataatgtacataccgtcgtttctgctattgaagacataacattccatctgacaatcgcagttcttgatgacaaggtgaagtttagcagtcaacatcatttgaatgtcaacttctatttgagagagctgactcgatggagccgtggatctcattgaaagatgtctggagctgattaatgaaggtaccatgagtaggccttcctatagcgagatggatgcctcgctattcgttgtttggattcgttcaactattatgattagtttgtgtaatgtatattatacgctaagtgttctaacagtcaacatgtcgtgtcttcatctctttatcgtagcgaggtgggtgcctcactttgtattacacatatcatccttatgattgcatcttctgacgcgaaatgttttcttgtcaacgcatgagtcaatagtttgtatatccttatctcgcttaagactttggagtcagcgagttgtaaatgtactctatcaactccgcatttaactagttattccatttgaatatcttcaaatataattttcattatatttgttgaatcgtattgtccaagattgacacgtgtcctcctctgatgtgccagctaaatttcgggtgtaacattatccaagataaatatttgtcccttctaatgtatagttcatacatctgatactggtaaactttgtcaatgccctagaaaggacataacacttatccaaggtgtaagtataccttatcgctgattatcatgccagtctgaatccagtgaattgaccaatcatgggaattaaacttttgattatataatcatgattatattccactgtgttgatgacactatgatcatgaataaatatatatgttctggacttaatagaatttatacattaaatataatgatgaaataaatcatgtgaaacatgcaacataaaagcgatttctgatctttattaattagtaaatctgttgtctgaaaattggttttatttagggcacaaaacccaacaatataaccataatccgcaatataaatacttagggtaatgatcctaattcacaacacatattaacttagggtaatgaccctaatttatgctttcatctaattaatcacataatatataattacgctaccgcgttatactctatgtgcataattcactatcttacctaatttccaatgtatgaggagaaatttgaagtcataggtgatcttaaccaagtgttggtaggcctagtcacaggttgggttttatgccctaaataaaactcaaatttcaatgtaatctttatcttttaaatatcaataaagaaacataagtattttcatcact

SEQ ID NO: 357131 - DNA, 687 bp, Cannabis indica
gttgacttttccatacttagaactataaatttttgaagctatattgggggtgcggtgggtggggtggggtgaggtggggaatgtgtatgaaagccatatatgatagtgaatttcttagtatgaataatggatataaattttgataagagaataaggatataaattttgagaattaaaaaaaatttgtggagaatttgaaaaataaaaataattattagtaagtatttatataaaaaaaaatatttgcttatttttttttttaatgtgcaacgataaagtttaaaatatatatatacctccaccttaaattcaaattaaaaaaaatgttcaacattaatataaatctaatttatctatcttttctcaaaaataaataaatgctaccgcaaacaatataactttagctccatttacaaaattttatgaaaaaaatagtttcaatgtcaacaatacaattttttatgatagtactcatttattattgatagtttaacataaagttgttcgcagtgtaagtggtgcagtttttaaccattttttcaaactaacagtttctacagtttagactatcacaaaataattaaaatatcacaaatacaataaaacttgagcaatacttgtcaaaaataccacaagatttgaaaataaatataaaaaatttcaaatttcaacaatacaataattagt

SEQ ID NO: 357132 - DNA, 506 bp, Cannabis indica
atgttgatatctcaatatattcaacaagtaccaatttctgcaaattaagacaatgcattagtttgttgaaggtgagaaccttcgttcccatgtctgcagggttgtcacttatgtgcaccttttccagctccaaaaccctatcctcaatcttctctcgaatctagtatagtctaatgtcaatgtgcttgctcttctcatggtacacatggttcttacataggtgaaatattgatgacagactatcagaatagactgtccctttgtctttgagcaattgtaattcttgtagtgttccctgtaaccaaatggcttccttgaaagcttcagtggtggccatgaattcagattatgtagttgagagtgccaccactggcatgttgttgtgatttccaacatatgcaactcttattaaccatgaacacatatgcaataatggatcttcttttatccctgtttgatgcacaatcagcattaacaaaaccttctaacctcacattagatgtgtc

SEQ ID NO: 357133 - DNA, 457 bp, Cannabis indica
tgttaatcaacatacttgtgggtagatctaagatcctggtaaaatattttccaacagttatcccgacggaaacgcaagtgcctactttgcgatccgaattaagtaccgaagagaacactttcgtcagattataagttgctgacgacgtcgaggaaagaagggagtgcgccttgtcccgaatgcagaattactgttccgcggtggcaaagcaatacaataagaaagttaggcccaggaattttctcgcgggggaactagttctaagaaatgtttttcagaacaccgatgaagcccgagcgggaaagttatccaccaactgggaaggaccacaccaagtaataagcctgacgggaaatggggcgtacagactgtcctgtatggactcgccgagatcacatgaggctggaatgcaaggtacctcaaaaaattctatgtataaactaaaagctaggaactc

SEQ ID NO: 357134 - DNA, 972 bp, Cannabis indica
taaatggaaattttatttaataagtaattttaattattaaataattagttttggcatttaagtggttgaattggaaaaatggaatttttgagaaaataagataaatagttgaaaaaaatagcaaaattgcaaagtggggcccatatccatggccgaccacttaacgacaaatttacatttagtttgtcaatattttaatgccaaataattctaaccttaccctagtgggattcctataaataggtagtgatggcctcaaagaaaaagatgattcaaacactttccttcagtcaaaaacttgagccatcttctctaccaattttgaatccttctatctctctttctctcttcaatttcgaaccctatagtgatagagtaagtacccacacacatcaagtggtactcaatcatagcgtgtaaggctgtgaagaatctaaattcaagagaaggagaatcaagctcagatcttggtgatactctgctacagaaaggatacaagggttagagatctgagcggaaagagccatttaattctactacaaccactgtaaggtttctcataccttttatgtgtttattttatatcgttttagaagttcatgtttaggatgttaaaaacatacttgttagtaaatctagatcctggtaaaatatattccaacataaataagatggaagacatacttgatttcataatattagatacgagataagattgtgagtatatggtcttccacagactaatattctctctatatgttctcacttaattgatgagaatagaagagaagagtggttaagattagccttttatgttttttaaataacaaactaattagaacctcataaactctaattaggtttactattatgtattacacattacaaagcctataccgaataaaatatttattaagctcatttaattagatcattaattagtccaatttagaatattaactcaaataaatt

SEQ ID NO: 357135 - DNA, 725 bp, Cannabis indica
cgggaaaaatcatcaatgaaggtaataaattatttatagccgcccatagcaggtggaacaaaggacgcacaaatgtcagtgtgaataggctccaatacatctgtgcacctgtctgacttactctttctaaccttagcagttaactttccttttatataatcaacacagacagtgaaatcagagaaatcaagatcttgaagtacaccatctttcaccaatctctccattctatctctagaaatatggcccaaacgtttatgccaaagcatagaagattttaattctaatcttgcacgtttggaaccaacaatagcattaagagaagaagaagaggaagggcaagagggagaagtaacaaaaacagcatcatataaatcaagcttatatcaatttccacataaacttccattaccaaccaacatagagtcatgatacaaagtcagatttccagttctagaaagaatactataacctagtctatccgaaatagatacagaaatcaagttcctcctaatagagggcaagtaagcaacatcttgcaatttgaaaaaaattcatgtattaaactgtagtttaaaagtcccaaaaaattccattctaactttagtattgtcttccatgtatacgtactcttccgaactatttggccttcttcgatttgtcactacctttcttctctaagtggacttttggtcactagagttgttggaagtggactctctctt

SEQ ID NO: 357136 - DNA, 529 bp, Cannabis indica
ttgaaatttgtagttcagtcttccatcaaacaccaaaagatcactgattgaatactcactttattcactccacctattgtcatacaaaataaccaaaaatgaattatttaattaagaaaataaatataatctatatatctatatatataaataaaggaaagcataagagcattgatgtggcatcttttccttccatttctctattttctctattttgttatgttttctaattttttttctattgaataataagaaaaaaataatgtaacctctccattattaattttttataatctattagtattcttttaaactgttagtattctcatctctatatatatatatagaatattttattacacccaaaaaatataatatatgtatagtaatttgtaaacctataaaattgattaatctttaacaattcaaaatatatgcatacatatttatatttgaaaaaaaagtataatacatatagtctatatttatatatctgtctatatatttatatatataattatacaattct

SEQ ID NO: 357137 - DNA, 526 bp, Cannabis indica
gatgttaatgaaacatacatggtagtaaatctagatccgggtaaaatatttccaacagttctgtgcgaggagtccagtcagacttgcgagaatgctacaatgcagcagtcaagctcgcagagaagaaatcggttaatgtcatctatctgttagaggcaccacctcctcgcaaggaggtccttaggatagaagaattgccgcataaagacggaccgaatttggatcctaggatcctcgattatgccgcaactgcccaagccgcggaagacagtattaaggtacctatcgatcccgtagataatagtaaagttttgaaaattggctctaaactaacttttcagcagtgagaaaaactaacgacatttctcaaacaaaatcttgatgttttcccttggaaacattcagatatggtcagaatatctacgcaggtcatgtttcatcgcttaaacattgaccctgaagtgcgaggtgtccgacagaagcgccgcaaaatggaccccgcaaggtaccaagcactaaaggaaga

SEQ ID NO: 357138 - DNA, 747 bp, Cannabis indica
gaaaaagcttagaaaaaaccctcatttcttttgaagaaaaaccatctccttcatggctgaaaacccagaagatgtaaatacaccgcatgaggaaacccatcattgttctgggaaagagccgatgggcaccagaaggtcttcctatccatagcccagacggaccacccgctataggaggactcaacttgagggtggccccagcactcgaaccacacgttctcggaggaacctgatgttggtcccagtacgcgaataacacgctcgaggagaactcagcgtgggagtggccaaaatcctagaactaaagatgaggagcccatttgtggaggtactcagcctatgggagaaggcacttatgaaataaaaatctgccgccttagacgcctcttggaagaggcacaacggcggaacgctgagatagaacgtgatgcagacgcagctaggacggcgcatgggactgttggaaatatgtttttaccattctaaaacaatgtaaataaacccatataaagtttgagggtgcaatggaataataaggactccttccacttagatctctaacccttgtatcctatctgtagcagggtatcaccaagatctgagtccgaatctccttctcttgaaactggattcttcacagccttacactatgattgagtaccacttgatgtgtgtgggcacttactctatctctaaagggtatgaaaatatgaagaaaaaagataggaatgtggttcgaaaatagca

SEQ ID NO: 357139 - DNA, 874 bp, Cannabis indica
actggaatgttgagcatttgcggccctactaccagtaaactaatgttgtaatctctcttatctggtgtaatatttagaacttcaattattaataaagttgaattattccccaagtagttacaaagttttattcttcaaaattacttgaggggcatatatatgtgtattatcaactggaaattatgtggaaatacataatatgttgcaaaaaaaaaaccttttttaaaaaaaaaatcaaagttttttaagtggttgattggagtcatatatggacgatgcgaagtcaaaagtagcagttgtaaatgagatttaactcataaaaacaacgataagctacatgtgaagctgtttaacggctcgcatttttataggaatgtattaacacgaggcaccaagatgccttgagaaaatacttaatctaaggtgtgaatagaaggcttaactattcatacaagcaatcaaaaatatataaagtgattcacgagataaattatttaaagtatgtttcagtttgtctaaaaacaaattataactatttacgcgaagtagagaactgataactacttgcaaatcgaaagcataacagataatatttgctcgcgcacatagtagattactatctaattaaactatatcaaaggaaaatataagagccattgaaagctttaaagtattttaagtttgatcaaagtataattgtttaaattatgaataaaaacacaagtaagcaaacatattaagttcgaatgcaaaaatgcgaggcaataaataaaagataaaataaaagcaaagttggccatccaactatgcaaatttgtctttacaaaaaagggcaacaaagggaaaactattgtctcggccatatggccatttt

SEQ ID NO: 357140 - DNA, 520 bp, Cannabis indica
ctcaacaacctgaaaacaacattcaagaaaaatgcaaggttcttcgaaaagccattttctcgtgcagccaaggcatacactgctaaaaaattcgaatatcacatgagagagctcgatgccttagacaaacgagttcgaccttatctacaaaaaattggatatgataaatggtcaaggttgtattccaaacacaaaagatacagtacaatgacatccaatgttgatgaatcattgaatgcagcaaacctggcagctagagaactcccaataacaacactaatggaagctctgaggactttaatccaggaatggacatgcaaaaacaggaaaatggctcaaggaacattcacaaaattgactccacttgcagagatgaagatgaagggcaactacaaaacttctttgaaattaaaggtacacgatttttctagaattatatttcataatgttgaactaatgtttaatttctgttattttaacaaacaatatacacacaaatttgttctcaagttagagcatc

SEQ ID NO: 357141 - DNA, 236 bp, Cannabis indica
aaattgcaaaagtggggcccaatatccaatgctatggccggccactattgttaggcttttatcatttattttttctattatgttaatgccaaataattctaacctaaccctaggtggcatactataaataggtagtgatgacttcaggaaaagatgatgcatcttattccttcagagaaaaacttgagtgccttctaccattaacctagctgccacctctcttcttccttcttcac

SEQ ID NO: 357142 - DNA, 812 bp, Cannabis indica
aattcatcttcaaaatagatagctctatctaattttatcaccgtggtggtgtgagaaggacaatagaacctaaaacctctcgaaccaatagtgtagcctacaaaatagccactgatagtcttcggatcaagcttcttagattgtgggttatagggtcttacttcagctttacatccctaaacatgaaaatgacgcaaactcgatttctttcctgaccacaacctgtatggtgtctttaggacagacttgctaggcacttgattcaagatataagcagcagtccttaatgcctcaccccataaaaattctgacaatctagcatgaatcaacatacaaacgtaccatgtcaagaagtgtgtgattccttctttcagcaattccattttgctggggtgtccatggcattgtatatcttgcatcaatacaacattccagcaagtatttggcaaaaggcctggggttccttccagtttcatcataacgcccataatactccccacctctatcagaattgacagctttaatcttctttcccttttgaagctcaacattcgtcttgaaaatcttgaaagcatctaaagattcagatttttcacgaatgagctcatcatggccatatcgggaaaaatcatcgatgaaggtgataaagtacttataaccacccatagcaggtggaacaaaaggcccacaaatatcagtatgaataagctttaacacatttgcgcatctatctaacttactctttctaaccttggcagtcaactttccttttatacaatcaacacaggcagtgaaatcagagaagtcaagat

SEQ ID NO: 357143 - DNA, 478 bp, Cannabis indica
gagagtttgcattttctaatccttaaactctttactttacaagtttgaatatttgttataatatattgcttgccttattacttgcttttatttgattaagtggttaattgcttaattttgtgttaaaagttttaatttaccgaaattagtttaaatttctaattcaccccctcttggaaacatatcatgggctaacattcatgccatacattataataattgtccaaaaaaaataaaataccaaaaattttaatgtttaacaaagtccaacatgaattcaataataatacataatagtagaacacatcacaatacgactaaattcaacattcattttaaacctcggtaggtgcaagactttttgttgtgccccttgccaccacacttgccgcagttttattttatcacaatcctttcaccattacaagcagtacgatttgacttaattcttccaaccttttgttggaattattttacc

SEQ ID NO: 357144 - DNA, 1074 bp, Cannabis indica
caaggccatcaacaaaatagggcgttttgttgataagtacttcatggtaaggatgcgagcattacccggactcattttcagcatatttcgacatatcatcgtcctcccctcactcttgctcttagggatagagctcaaaaacttgctcagttaccgagggaaggccaaaatattatccagttgacctccgatgataatcttgtgaggtatgggctttatcctgaggactttactcctaagtccgtggcagagaagaagaggaaattttatgctggccaggccgaacgagctcacccggagaatgagttgattcaactgaagcgtgaagctaagttgaagggtggtgccagggccaagcaatatgctcaggagcctttgaattctgaagattaagctgaggaagagcaggtgactccattgatgtggaagaagaaactcccggcctcgcccaggcctgttgaacatgcaattcgcataagggagcccatttcacctgctcggccatctcctctcgtgttcagaaaagggaaagctgtcatgtctgagataagatcactgtcaggtgatgatggacttctgagtcttgtgcgggcggtcaccttgcattttactttattttgttcttgagcttcttgattttcatgccttgtgtttctgatggctgtcttctaaccatactgtttttgttctgtgcagacatgtctcggcagatgctcgacgctcagaggaagagagtgggcggaatctctactgcctctcctcccgccaagaagtctaagggcggtgaggggtcctcttaaaaggaaaagagacctaccagggacgaggttattgatctttctgaggacctgactgctacaaaaccctatacccccaaatttgccaactccaaggagtctggaccaccaacggctaggtctgaactggtcaggagtgatcctgaacgggtgcagtcacaaactccacctttgctcgtgcttccagaggccaaaaagggcaaggagatgatggcccactacatgaaccggctggttcctgaggtcagtgagcaactggctggtgctgacaatgact

SEQ ID NO: 357145 - DNA, 667 bp, Cannabis indica
gttttggggaagcgaacaccaaatcgaccaggatctgcttcaactcttgcacgaagatcatcctcgtcttcgttctagtccaaatcttgaacacaaaatcgacacgtattctagcttaagttttctgtccagccatacgatgatggctcacacaaaaaagacaatgcgtagagtcgacgcatctgaccctcaagtggcccggcatgccaccttacccagtgtcgaacaggattcgtccgtccaggaggaagaggatcatgaaggggacgttgaggtctaggagattgaggagcaggacgatgtccgtcctagccgtccctccgaggcggaggaagaggaggaggttgcactccaaactatgggggatacaatgaggctggggagccaatcgatgctgatggcgacgtccttgttgagggtgtggactatgccagtgaggaacttactgctgcggttcctcaaagaaggtgttaggctaaaattattctaagttttgggccatatttcggctagttttcactctttgtttctagttttagggctattttacgcttgattcttttgtttcaggtccctgggtgtttaaagaaagtatttacaagaattgaggacaagtggtgaaagaattgagaagaaaaaccaaaaaacatatgttgctgccaaatcc

SEQ ID NO: 357146 - DNA, 561 bp, Cannabis indica
cctcgctattctcctttacccacttatggtttcttattaatactctacgtattcgtacatttattcctcgcctaagactttacatactcaattaatactcaattaatgagttattccataaaaagatacggcactgattcatattctctttatcttgacatgtgtcctccagcaaattttcgggtataacgattgcccattaaaaagttctttttttgtaaaaagagctttttaataatggagggaattttcatcaaaatccttttttggaaaggacgcctcctttgattctagtggttgtatggtttcgaagagcattatgaattgcctactcatattcagcacgattcccagccgttagatttcttaatctttggctttcttgtcactgtactttgtgtataaaagggcggctcaagcttgtcatttttcacaaaccttctggcttgaaatccatttttagaatggattactttatttctaccaacatatctcttctaagttcaaaagtttatcttccctgactcataatacctagatgtatctgttgggttttgtgcc

SEQ ID NO: 357147 - DNA, 643 bp, Cannabis indica
aacacccattctacaaccctaacttccacattccaatttctccatccccattaacataaatattcaatctcatctcacaaaaacaacttttcttccattattttcttaatcattcattcctaatcacttcaaaacccaattactctcatcaatccatcttttcctttaaaacccacactcaaatccctaattttcactcaatttcaaaaatccattaatcatcacattctacctcaagaacttacaatttcttcatcaatggaggtagagtgaaggagattctcatcaatgtaaataatttcttatgattatttatgaaatttttttagataattttgaatttttgagaatcttgtgaaaaattggtgtgtttttgccatttttttgcatattgtcgtggaaaaattatttgtgattgaaagagtgagtaatttgtgattgggtattcacccaggaaagaggaaatttaaggggaagtgttgccgaaatttttcttgagtggtaagagaattgagtgagaatgggacccaaaagatcaagagtgagtgagaaaggtgcctcttcatccaacccacctagctcatcggggcaatccaatgtagatagggcgaggtttgtaagtgccgaagcacaagagcgctat

SEQ ID NO: 357148 - DNA, 819 bp, Cannabis indica
agcttaccgcctgctttcaggcttatttattttatatgccgcccggagctggggttcgcccagtccggctgaaattttgtatttttacgaacttgtttctgtcctcaagaagggggacaaatttaaagacggattttatggcctccgggcccaccctttgaacgagggcccagtccctttcaaccaccaaaagcatgtgaaggagtaccatcactacttcttcttttcttccggctaccaggccatggaccgcccggagcttcttacagagtgggtcaggatcccaccttacatgcgaaccgcgcctacccgagtattactccagtgggccaagactttctccacttatgacaagaaggccctcgacgttggggacttggtcacggtggagaactgtcggaaggccaagctgatatctgagaatcagtcggtggatgacttcaacctttccaaggtcatctgcccgaacgtgaggactccgggtgcggaaagggcgctccgggtggagataatcgcctcggtgtaggaccggtaccataaggacctctttaagaaggaacaagagctggcctatatcaaggcccaggcggcagccgggaggaccttccgtttggaagctcctgcggagcggaggccctccaggcccaagcctgtgatcccggttcccaatactggtgctcccgacgccagtacttcaggttctggtaagtctcctttaataatacattatgttcctcctgtccgagagtatacccaacttagacctatagggttcgatgaacgcctttgtaggtttagaatgccttccacccggtgggg

SEQ ID NO: 357149 - DNA, 684 bp, Cannabis indica
aaaattttttaaaaaaaaagaaaaattgaatttgggttgttaagtgttacgtttttaatgcttttatcacttggtttgtataagagatctacacactgagcggatcatattaaaattgtctgttttttttcatataagtatcaatatttaaacaaattgtaatttttttttagtattacatgtgtaaattatgttattgtcttaaacaacatgtataaggttcaaaaacataacattaagctcatgacgcttataaaggtaaaatttttgctaattgtgtttctatttactcgaatagttattatttctcttttagtccactaataatgaaataaattacagatagttgatacatcactcattaaaataaacaatattaactgttaattaagcaatgaacgtagaatatatctctcctcctccatccataaatgcttcaattactgttatgcaagaactgagattgaacattacacaaaccagagaaaagaatgcatagacaagaattcaatgagcaaacttaatgaacattacaattaactaaacacagaactgaataatgtcaaatgaattaagcaactgtacaattaaagaacaagaacttagctgataaaaatgacaatctttattgatgaattctagtagaaaatgatcacagtatttacaatgcaatcgagccttgaa

SEQ ID NO: 357150 - DNA, 737 bp, Cannabis indica
aaggttgatacaaatttaggctgtgtaatgataatcatatacatggctattattagttactggttgatcttgtctatcatttatcacacatacattgacatggtattatctattatggatcgttgtttggaattaaatcaaagaatgtgttataataaaacttgttgagaaaatttattggaaaaaaaaaagtttttgagaaaatagaaaatagtatcaatattgcctagaaaatagttccaaagaatactttttttttaataagtaaaatttatgtttgttataataacaacatctagtaaatggtctatttctaactttatagatagttaatgtctcttttttaaaataataaagcaaatgtccttttttactttttaatacctaaaatacccttcattatatagaaggtattatatgttttattcctttaatagaaattatgaaaaacaataaatcaaaatctatctactgaatttttgtcaactattttttcattatataaatgtattatatattttattcttttagattttgctgctgttgttgttttctaatatgttatttaaccatataattaattttttataaatatatcgtatgatatacaaacaatataccttaaaccaatatacatatatcacaaacttaaactaacatactattaaatgaattgttttccacaatatacagtagcatacaaaaactatatatcacaatcataaacagatatacca

SEQ ID NO: 357151 - DNA, 517 bp, Cannabis indica
tatatataattttttttattaatatatattttaattttttatgatggtgccatttgttaacacttttattttcttacttttaatcataaaatgatagtaaaatttttatttttgaaaaacaaaaatacattctgtaactacttttgttttacaattttaaaaacaaaaaaaaatgtgttctgtagattttattttcattttcattttttaattttatttaagtctggtttaggtcagaaatcgaatttgggttcaagtcagaggacgagttcagcgcaagggccgttgggggggggagatttgggtccgaattttgtcagagtccaaaatattgtttaggaaaaaaactatttaaaaaaatattgaaagtgatttttttttgttttcaaatttttgattcttaattaaaaaattgaaaagtgaaaacagttttatagaacatgtttttaaaaatattttcattttttcaattttaaaaatagaaaactgattaaaaaatgttatcaaacgccactat

SEQ ID NO: 357152 - DNA, 670 bp, Cannabis indica
tccatccacttcggcctgcagggtgcgtatctggtcttggattgcagtgtactgatcggtggtcggttcgacaacaccctcgaacaccgccgccagagtaaagggtggaaagagccctgttgtagctgctagtgtacatgtttccccgacatgagggccagtagtttcagggaataggttgagaggtcttacattgccccgacctactccgccattgatttcatctacgggaggtgctctgcctcctgacagtggaacgttcatcattccaatgttgatggattcgttattaagacctgcgtttgcttggtttcctgccattatgattttctctctaaattagcaagaaagtacttcttcgtattcccaaagacggcgccaaatgttgtcgagcaaatttcacaacaccaaaaatgaataataataataataataagaataatatgatgaacaagtgtgagtattcaacctagaacagcgagtactcgaactgggaacataaatgcttaatgaaaactggaaatatcaagaaaacaagggaatatagtggttcagtcagatcacggtctgcttagtccactgttgcaaggatttcataggtgtccatttcatggtggatcacccctttatatacaaagcaagtgtccgattatttacaaagattgcattc

SEQ ID NO: 357153 - DNA, 723 bp, Cannabis indica
gagttcggataattaacaaaacgcagtccacccttcctcttcggagaggactccttcttcgggaggagatttggccaactttggacttcgttgtctccgtgggctgcgtcttctcgggcttcggcctctggaattcttccctcggggactgcgagatcttgatcgcggtattggtgatgtacgtttatccttgcccttctccaactctgccagagaattctcaattctcttatgaggttcagccatagcgaagaattcgactagcgattctggccttcgagcttgtaactccttccagaaatcagttcttggcaaaatacctgttatcaacatgcaaacaagcgaagactcgggagccttctcgacttttgttacttccgcattaaaccgtttaaaatagtcttgtaaagactcaccgggttcttgtttgatgttggccagagttgtataaggaggcctataggtcatcgtggcctgaaagtgcgtgaggaataagtcgacaaaggtttcccatgtcgatatcgaggcctcaggcaactgggtaaaccaatcgtgggcgttttcctcgagtgttgccgcgagaatgcggcattttgcaagctgtggtacctgatccacttccattatagtattaaatttttcaagataatctataggattagaggtacctttatattttagggattcggatagccaaaatccctttggaagttgagcttgtcg

SEQ ID NO: 357154 - DNA, 602 bp, Cannabis indica
tattttaatgatgtttgagttattccgaattagtagagagttagatatgtctggttatgaatttagggttattccaaggttaggaataagttgtttattgagctttgttgacgtgacacaggacccgggatcatcaagctttgtttttcaacttaggctgacatgcacgcttaatctctggacttaggtaagaaaagtataaagcactatttatggttaacgatatgattgtaatgatctcgattatgatcgagatcccggtatgtgttggttgtgactcgatcttcattgagattattatataatatgaatttgttgtgacttgatggtaatcgaggtaatgatattattgtcgtttgtgaattctttatgattgagggaagaacacggttatcaccgatgttgtgaatgaatgaagaaatgatcattaccgttatgagtaattattcgttgaaaccgcgttaggttttttacttattgttcgctttatcgggcaacgatagtacatacgcagctcgtggataacgagtggtgaggattggtaacgatcattaccattatgagtattattcttaaaaccgtagataggtttcttacttatc

SEQ ID NO: 357155 - DNA, 630 bp, Cannabis indica
acattaaacactaatcaagtttctactaaaattaggaataaacaaaacattgtctaaaactaaaaatttcttccaaaacttgaggcgagcttttcccttagcttgggccgatactaattcaccatttcaaactttgagcttcaactcccttggatttagataattccaagtttcaagcagctgcaatgaagaacaaacatggttagtagatccagaatcaacaatccaaatggatttgtcattctctaaaacacatgattcaaaaacaaaagcgttaccttcgttccaattgtctagaagtctaggacatctttcttcctgatgtcccttctcatcacaatacgaacatagaagagtacgactgtccattgtttcaatatttgaacttgaagaagcagcattgttagaagcatcattctcaataactctcttcctctttcgcatgtctgcaaaactggatggtggcctccttgtaggaaatttccgttcataagctcgcaattctgcgtccagcttgtctaagtcagatgagttaaaattgttgataatgtaggatacaacaaatccattatacttgggtggaagactattaagaattaattgaacccattgttctcttgataaatcaat

SEQ ID NO: 357156 - DNA, 633 bp, Cannabis indica
ttctactagtgttttataaaaattcagtagttttgaaaacctttccgtgtgacagtatttttgtaaaagttaacccaacttccagtatattggtaagtttccattaaaataagggtaaatttctctcttttgggccttgtgtgagagttagggggccattagtagtgggtacgacatactgaacccagccctccctcatatgaacaaccccaattgtgaaggcccgtttgcctgattcgaataactataataggttaattaaactagtttaacttaataaaattgattagctacataattaatttcgaaatatatgaaataaatttttcatcagaatattttgaaattaatttaagaaaaatacacttagtttaatgaaacttttcaagataaactagatgtatttttctgtatttaattaaataaaagaagttataactattagattcttctagatacttaattatttaaattgggaaatttgaatttgtatgcttgcatttaattaaaatttatcctcaaaactcataataccctatatttaaaatatatgacaatttttctattatgcccaaaataccctctgttttttccttcaccccctaccacttcttctctctttccctctctctt

SEQ ID NO: 357157 - DNA, 588 bp, Cannabis indica
gtaaactctattgtagattatcatatcagtaaaaccctatgtgtgataaatctaggaaactttattcacatagtcatgtttactttccaatgtgttggcaacataataaacaggatcaagtatgtgaaaagggtttcagatgaatttataaattatgtacattatagaatttattgaaagaatattgaattttatgggagtgatcggaaacgacagagtggcatttgccacgtttcaatttcaagaggatgccctgatttggtgggaggtggtatccttcaccagagatgttaccagaatgacctgggaggaatttcgggatttgttcattgccaaatattataatgaggcagtccgcagtgcaaagaggaaggaatttgttgagttggtacaaggcgagggtatgtcagtgactaaatatacaaccaagtttgatcgcttggccaagctagcctccggaatcgtaccaacagacttcagcaagaaagaaaagtatttggctgggctgaatgccaagatcaggcatgacctggttattacaacgaatggtaccacaacttacgcagaaatggttgataaggctcttcg

SEQ ID NO: 357158 - DNA, 686 bp, Cannabis indica
tattttcacatatctttgttgtttgctaaatgcttaataatttctgaattgtgtgtgaatttatattgaaccatgttgttttctgttatgaattgtagttgaaaatttcgtgtaaaataagtataactttgactctcgcctaccgggacatcgttggattcttattttaatcgaaattatcctaattttccctcttggcttattcatttcgaatttgcttaaatagtatattattggatgaatggtttataaatcatttgattatgatgacattctattttctcttataaaattaaatggcgcaaatgactatattcctgacattctatctcgaaataaaataaatcctcgatcttagattctcctatttgtatatgcttactttgggcaaataaaatatagagttagattagtagtggtggtccaagagagaataataactcaagaaatatttggtataaatttaagtctttgaatttaaattttagattccaaatagaaatttttaattcagtttcaagaatagaatactgttcaactttcacaagttattaatatccagtttctgttaatggattcaaactgtatgttaatgtatggaatttgagtttagtattctgtgaccaagatccacttggactattctaagaactctttattgtgactagacctaagtcatcaaaaga

SEQ ID NO: 357159 - DNA, 757 bp, Cannabis indica
tccaaaaggtggattaggtctatgccgatcagaattgacgatagggagttaagtgctgacctaatagagatgagtttagaagattttgacatcatactggggatggatttcctatctaaatactcagcgagtattgacagtaacaggaagatggtaatcttccaactggaaggagaagaaccgtttgttattgtcggttcggttcagagatctcagatcccggtgattttggccctgtcagctagggaattattgtgtggcggttgtctagggtttctggccgtggtggtggacaccactcagccagacactattcgaccagaggatatcaaggtggttcgggaatttctagatgtttttcccaaagaactttcgggtttaccacctcagtgggaaattgattttgttattgatttggcacccggagtggaactggtttccaaggctccttatagaatggctccagctgagcttaaagaattgaaaattgagctccaagggttacttgacatagggtttatccggcctagtgtgtcaccctggggagctccggtattatttgtcaagaagaaggatgggtctatgagaatgtacatcgactatcgggagttaaacaagctaacagttaaaaataaatatccattaccaaggatcgatgatcttttcgatcaacttcaagggaagacggtcttctcaaagattgacctccgatcgggcgatcatcagttgaaaatccgagaggaggacattccgaaga

SEQ ID NO: 357160 - DNA, 632 bp, Cannabis indica
atataacatattttttttatatatatttgtgattataatgaactagattaaaatattatcattattataatagaatcttaacaactcacagcacttcaaaaattataatttaccaaccactcagctcagtttttttccacagttccgctacagctgcttttccccacggcacagctgtgccaaactggcccaaattcctctcctttgagccttgtgtgagagttagggggccattagtagtaggtacgacatactgaatcaagtcctccctacatgaacaaccccaattgttaaggcccatttgccttatttaaataagggtaatttgcggcataacctccttcagtggccaggtttttataactaacccccaattctaaaattttggtggtaaaacctcctaaacccaagttctgttagcacttagccctcttccatccatttttggctgttaaccgccatggtgaaatgtttacgtgtacacaatatacatgtggcacaattttattggtctatgtaaataaatattttttaaaaaaattaattattttaaaaataaaaaaactaaaaaaatttacttttcctttaaaaattaaaaaaaaaattttcaaaaaataaaattttttaaaaaa

SEQ ID NO: 357161 - DNA, 542 bp, Cannabis indica
tccataacctgcaagaaagttcttgacttcgttgccaagaacattgtctgtaagtttggaattcccatggagacagtatcctataacggaacccaatttgatggagacttgtacactgagttctgtgagaggaataaaataattaagagcttctcatcagtatccagtcctctggcgaatgggcaagtggaagctgttaataaaaccttgaaggatactatcaagaagaagttagactctgccaaaggcagatgggtcgacgagctaccacaagtactttggggtcacagaactaccgagaagacagcaacgggacatactcccttctcgctagcattcggctcgaaagcaatgctacctattgaagtgaacatattgactcatagatgagagttttataatcaagaagaaagccaagaacttctaaagttatctctggttctgcttgatgaaaaacgaactgagtcgcaagtcactaatacagcgtatcagcaccgagttacaagatatttcaacaaaaaagttaagaaaagactattcaa

SEQ ID NO: 357162 - DNA, 519 bp, Cannabis indica
atacctccataaggtatggacaatattttatatcttttatgtgcttttaattactaaaatacctcttacactatcttttacacaatcatatgattggttgttgggtggttggccaaatgttgcatcaaacgaaggtttcaatcagacacaaattgcttggtggttggccgaaggttgcatcagatgaaggttgatgggtggtttctaggtggttggtcgaaggttgcatgaaacgaaggtttcaatcagacaaaataactgttagcaaaatatttatgtaactgttataaaacattaaaaatcataacaatattttcacatacataactctatctatgttatcccaattttcgcactctgacgtgacatcacatgatggtgacacgtggaatcaacttcgagtatctgctcggagagtacagtccgaacagcatgcctgaagcaaggcgatcagcaatccgcgcagagcgaccaacacttagtgaattcagcttttgcatcgtgagtcatcaaagaaat

SEQ ID NO: 357163 - DNA, 668 bp, Cannabis indica
accgtcgacacctgagagaaaatgaaactattaagtacacgaaaatggactaacaccacattcccttcaaaaaaaagatttattttttaatacccacagtgaagaacgaattataaaaagtgcagaacggagaaacttactagtacaacccaccgtcgacacccacgactgtaacaaccccaacaatggcagaagacgactaatgtacaccacaatgaagaacgaagtataaaaagtgaagaaaatgtaaaatctggtttttacctaagctgaaatgaaaatgaaatggaaaatgaaaaagaaaatggaaaatgtgtgttttcaaccaacagagacgaaaatggaaaatcgaaggaaggagaaaatgaaaaacgaaaaattaaaagaaagtgaagaaggaaatggaagagtggaggacgacggttgatgtgattgatggaagtcagttttaacttttccaaatttaataaatgggtaatggcgacaaaacccctaaaacttttattttagtttaacttaaccctcaaaactcaaaattgggtggtaaaaccccaaaaactatgattctgttagcaatttaacacttccgtccaaatttaactgttaactgccaggttggcttgtccatgtggacacaatatacacgtggcacaattttattggtccac

SEQ ID NO: 357164 - DNA, 1959 bp, Cannabis indica
gtccaggttgcaatttggggctgggttgaggtttgcgtctagtttcgggtcccagtctaggttcgagttcgaggctgggtcccagatccaaacaccgactacgggttcggtccaagccctaggtctagatgtggatcctgatctcgggtctcggtcgggttccatttcgtgtgtcgagtcacgagttggttcctagatttaagtccaggtttggggtcgggtcttgggtcacggtcctagttccattgcccaagtccgtatctcgattcttggtctaagtcccggtttgggtcccattctaggttcaggcatgggtcctagtcgaggttcaggtttgagtctcggtctgggtttttatttgggtttgggttcgggtctgtgtcttagtcctggtcctggtcctagtcctagtccagttccagttccaattgcgtttcggagttcgagtttgggttcgagttcgggtcggggttcgagttctagttcgagtttgtgtttgggtccagatctcggtctaggtccgaatcaggctctgggtgtgggttggggtccttggtctgggtcaaggttctggtccgagtcctaggttttgatctcaatctgagtctgaggttagttctgggtctaagtcctgggttctgatcctggtctgggttcgagtttgggtcctggttcaggtctatgtttgggtctgattcttggtctgtgtctgagttttggtcgggttcgggttttgtcctggtatgtgttcgtgtccaggttcctgtcctagttgaggtccggggcaggtttcatgtctgggtctgggtctgacttcagattcccgggtccaggtcaggtcctggttcaggttcaagtctagaatttacatcatggtctgggttccggggcctaggtccctggtctaggtgccccatccaagtccggttcctaggtcctagtctggttccaatttcaggttcaggtcctgagtcttggttttagtcctggtcgcggtccgtgttcaggtccaggtctcgatccctatctttgtctgggtttaggttcgggtccttttaagggtctagatcctggtctgggttgcgagtgtcaggatctggtgagggcttaggaccaggtcaggtccaggtcccggtcccggtcctagtccaggttcaagtcttaggtctcaggtcccagtcctagtcaaggtctcggtccaggttttggtctgagtttgagttatggtttgggtttggttatcgtcttaggtctgggtcctagtcataatttccagtttttattctaggtccgagtttggttccgggtccgggtctgtgtccaagttggtgtcagggtctgagtcttagttcgagtccgagtacaggtttttcgaatctctgtctgggtccaaatgtgagtcaaggtccaagttcaggtcttggttctgggtcccatgttcgtgtcttggtctgtgtctgcgtctgggcctaggtcccgtgtttcaatcccggtctaggtctgcgtcggtatttgggttcgggtatgggttcgtgtccatgtcaaggtttgaattccaatttaggttaagggcttcgtccaggtctgggatcgtgtcccgacttcgtgttcaggttctggttcgagtctgagtgctagtctgggtcgaggactgggtctgaacccgagttctgggctaggttcggtctagttctgagtccgagtcaaggtccacgtcacggtcccggtcctgttccatggtcctgatcacgttctttttcaagtttaggttttgggtcctaggtttgggtctgggtctaggtccttttccagcttcgggtccttgtccgagtccatgatcaacacatcgactatgggtcgtgtccaagccccggttctctaatcattggacaagatctgcatcccaatcacgggtcctagtcttaattcaattcatgtcctaggtcagggtctaggttt

SEQ ID NO: 357165 - DNA, 558 bp, Cannabis indica
taatttttttgactttgtttaataattattattaatttaatgataattgtacagttaacaattattaaaataatttttgataattttttaaatttgtaaatcatagaaattttttcgagtttcttctcattctgtttgacatagtcactctcttatttaatttatcatgactatgtaatctccactaatattctttctttcacatttttctattatttgttgttataaaattgtaaaccttaattatttgatgcaaaaataatgtgttatgatggacactttatttttaattatcaatatattataagcaattaatatatctcttttgaaaaatttagctaaaaattattaaatttttaatgattgttttatcaccaagttacttatgtcgtagaaaatattatttcttttggttgactatatttgtaattacttgtccaaaggtagtaattacatatattagttcacattccatgaagtgagtttatattaaatgtgtatattttaattatttacccaaaggtaataattaaatatacatatatgtttattattatt

SEQ ID NO: 357166 - DNA, 544 bp, Cannabis indica
gttttttctggttcgagttttgtcttttggtatgggttgtgtagctcagaatcatcatggtgctatggtagaagcattcaagaagggaagcattcaagaaagggaagattagatgtgttcaatccgaaattgctgagataataggcattaaagaagcattgagttggattacaactcattcgtgggatagagtcatgttggaaacagatagcttggtttgtgtccaagcgattcagagcggtattttatgctttcacaatttgtgttttgtaaaacgatctgcaaataagttagctcattgcttgacaagaggctcttgtttctttacaggtcgtgtgcttcagttggaggactgttcatttgaaatgtattttattgttttgaacgaatttattaattaataaatcttatgacttttattaaaaaaaaatattgcataaaatataatttaatatacagtagaacctctatccaagaatacacttggtaccaaaaaaataatattctaattgagaggttataactaaatagagttacacttgaa

SEQ ID NO: 357167 - DNA, 794 bp, Cannabis indica
gctagtgatcggtccgccaattggagagttactgttgttggctttgcttcacccagctgcaatcttttaaacaccgatagaggcatcaagttaatgctggctcccaagtcacaaagtgcatttattccctcaatttttcctatagtacaaggaatagtgaaactccctggatctctgagtttaggagggagtttcttctgtaggatggcgctgcactcttcagttagagccactgtctcataatcctccatctttctcttctttgacaggatttccttcataaacttcacataacttggcatctgctctaaagcttcagcaaagggaatgttaatgtgaagtcttttgaacacttccaggaatttggtgaactgcttgtctaagcttgactttctaagcctttgagggtatggtatttttacatggtgatcactattagttggtggagactgctgtggttgtgtttgactatcagtagccttcgttgaagtgggtgttggggttgacatcggttgctcttcattctccttttctccattcactagttgtggcatttcaggaccatcataatttttaccgcttctcagggtaattgccttgcagttttccttggggtttacttcagttgtgctaggcaaattcccttgaggacgggttgctacttgagttgctagttggcccatctgtgtctgcaggtctttgattgaagatctagtttcagtcatgaattgaagcagtaaatctgtctgcaaactagaatttccaccagaggtttgttgctgattaaactgttg

SEQ ID NO: 357168 - DNA, 581 bp, Cannabis indica
ctattgctaagggatctataatttaaagtaagggtataaaagtaaacttaaaaagaaaaaaaatatgttgttggtgggatttgaatctttaatttttaatatatatatatacaatctagcttaattattacaccaaaactagtattatgtctataaatatcacattttattataaatatatattataattagctaaaatatatatacattgttttcttgatttttttagggacaactgccccctcgctttaatgtgggtccgcctatttgctaccttatacgagtggtttataacattatttagaggtaacattttgaaattagttagcaatattccttaaaagcgattacaaataattatatgagtccccatatttaactataacaatgttacaataacaatataacactttagaaaaatagtgtggtgcggtgcggtttttgtggtttatgcggtttggactatcactaaataaataaattatcacaaatacaacaaattttgagcaaaacttgtcaaaataccataaggcttgaatataaatatgaaaaaaaaaaaattaagtgtcaacaatacaata

SEQ ID NO: 357169 - DNA, 814 bp, Cannabis indica
aacccgccaaacccgacccgccaacccgcaatttaaatatgttatatatatttttattttttattacaatatatatattaaattattaattaaaaaataaaaaatcctaaacttttcttaaaatttaaactctcagatttttttttattttttataaatttattttcttaaataatataaattaaatatatttttatatataatttttattaaaaatttatatatattatattaaataatttatattcagaaatatataataattttttaataatatatataaattttattttaatttattgttatttttattagttttgaatagaaaattattttttttaaagagttgaccgggtcaacccgccaacccggtcaacccggccaacccaaacccgcaaacccaaaacccacgaacccgcaaacccgccaacccgtgccctattcgggtccgggttcggtttcatttttttgaacccgaaacccacgaacccaaaacccgcgaacccgaaacccggtaaacccgcccgatgttcagccctaataattataaatcatgttcccagccatccacattattatattcccgaaataaaagttgtaagaatcatcttctttgagaaattttaacgagtgcataaaagaaactaataacatgaataggagtccacgataactcaagatttaggctaatctactattgatcatctttatgatatgaactaggtctttatgataaacgacatgttaattgttgactgaggttttcagcaaccaataaaataataataatttagagagctgtaagaaattagga

SEQ ID NO: 357170 - DNA, 840 bp, Cannabis indica
aggattagccttccaaaaatcatagaagagctggagaccgactgtctccaaggcattgaccttctccttcaacctgtccacctcagccgaaagctctccctccttggcttccttttcctccttcatccgatgaagaacttctcaaagggaagtcctctcatcttgaagaccgtttacctcagcagataagatctcgatggtctcctcaaaacggtcagcaacatcgagatccttagtcagcacagtgattttcttctcagtggcaaacaacttcttgttggcttcacccaatgccaaccgaacagctctgacttctgccctggcttctttagcatccttcttggccaagtctgcctccgcccttagggtgtcagacagagccgcgttcttggaagcagcagacttagcccgagagtaaatgtaagccaactttagaccggtctgcacaaaggaaaaactttagcatattgagctaagtatggaagattaaggggaagtatcaaaaaagacttaccctggtgaactccttcaagactctgcccataagcatttccaaagaagagtcattgtcagcaccagccagttgcttactgacctcaggaacccgccggttcatataatgggccagcatctacttgccctttttggcctctagaagcacctgcaaacgtgcagtaggtgcctgtacccgttcaagatcactcctgaccagttcagacccaatcgttggtggtccagactccttggacttggaagctttgggggtagagagatttgcagcagttagctcctcagaaagatcaataacctccccggtaggcctcttttcctttgtagagg

SEQ ID NO: 357171 - DNA, 380 bp, Cannabis indica
atataagtgaattatttaatttaattttttaatcatgttttaaaaataatggtatttttgttcaaaattaatttattccattccattccattatatagtcaaccaaacataagaatatgtattcaattattgattccataaatctaaccaaacaacctattcctattcctattcttattccattccattacccttaccattcctattcttattactattcctattccattattttcattacctccaaccaaacgggcccttagttcctttctctgtttcacaactaaacggttctgtaaattatacattttttacttgaattaagttataattctagttttgctttgcttttctttttaattgttgtaattttttttttt

SEQ ID NO: 357172 - DNA, 836 bp, Cannabis indica
tttgaaagcgtactgactaggttctcttttcgtttgataattcttcatcatcatctctagtgataatgagtatctatcgtacatatatcagaacaattgcgatatttgcttccttactttgacaaataagcttgaatctgcatgtgtcatggaatatctgatttctactaaaaactcaacaatctttccataccatgctcgtggagcttgctttaatccatagagcgcctttttcagtttgcaaacatagtcaggatgtgctttatcctcaaatcctctaggttgcaccatgtatatctctcgatccagttctccatgtagaaatgcattcttcacatccatctgccatagcctccagtctttactagctgcaagtgctaacagaactcgcactgttgtaattttagcgactgggctaaatgtctcgtcataatcaagcccatattgttgagagaatcctcgagcaactaaccgagccttgtatctctcaattgaaccatcaggacgagtttttaccttgtagacccatttgcacgaaatgggtttcacttccttcggctttggtaccaactcccaagtctgattctttgctagcgcacgtatttcttctttcatagctcctagccacttggagttttggtatgcctcttcatatgactctggttctttgaacttttcttcttcagctacagcagcattagcatattttggatttggctttcgcgctcttgttgatctccgaagttctggttgactatcatcatgtccttctctttgatgcacccctgtttgccatggattctgaggtgcctcatcctcagtgttttcttcttcat

SEQ ID NO: 357173 - DNA, 541 bp, Cannabis indica
gtttttggcgttgttgccggggaattgtttaaaaattgatattgcataagattagattaaattctactttggttaagtctttctactgattgctaacatgtttttttcatcattgtcttaatctatttcaggaattgaaggtgtatgcaatgtcaaggacatagtgtaatactgtcgattgatcctaaaattgagaagacctgtagaagaaacaaaagaaacaaaaggcaagaaagagtttcagcaagtgctaaaacaaaagaagtcatggctgataatgctaatggtggtaataagtgcagcaaaaacagtaataacgaaggtgccattgaagactaggcaaacggtcgtagtctgagagactacattctcccaacattgataggggttcatgttggaaatattttaccaggacctagatttactaacaactatgtttcattaacatcctaatatgaatttctaaaacaatgaaataaacacataagggtttaagaaaagcttacattgggtgcagtggaatataattactccttccgtt

SEQ ID NO: 357174 - DNA, 583 bp, Cannabis indica
aaacgaatatgggaaatcaaaagtaatcgagtgcaaccgtcagccatggagagagaaaattggatttcgaaatataaattgtcaaaccatttattagccgaaaaccgaagggacgcccagtcagcctcacatcaactctcgaacagtcacgctcaagacatgtccccatccaaaggcagaaccagcttggatgaagtctacacgtaacctcagaggtctcgtacagacttggggtgcaaatgttatcccaaattttgcactctgatgtggcatcatgagaatgttgacacgtgaagtccacttggaacatctgctcgggaagataggccgagcaggatttctcgctggcatgtccagagtaagatattcaacgatccgtgcaaagcaatcaacacttatcgaattcagattttgcatcatgagtcatcagctcaatccctataactcagggatcaatttacgtggatacggcatacacacgatcccactatcagtgtttttggcctaaatcccacgatccttgcattcagcattaatcccgcgatctttctgtttatacgcattgtaacgagagaggaaactc

SEQ ID NO: 357175 - DNA, 673 bp, Cannabis indica
atgcagtcggcgatgagtgcacggccagattttcagggttcgggtggtgctgtcaacctgattgtcacgaatcatgaagagaatcgtgggcttattttttctctagctgttttgagcgataataatgggagtaaaggatgggaggcggtaggcatagtaactaaaatttggaagaggagggaatggtctttttggactctaaatgtaaacgaactaataagaaagtttctattgggcatgttggatcgaaggagggtgttgatgtgtgtatgggggaggctcttgctactatttcaaaaaacatcaatttggcgagctcggtcgagcgggctcgtcagtcattatgagtactctaagttggaattgtcgtgggcttgggaacccagggactattcaattccttaaagatatgatttatcaaaagaagcccatgtttatttttctttgtgagacgttatatttaaaagctcagttggagcttctagcatcacaacttggttatgagggtcttttttcggttgatgcccaggggagggggtggattagcagtgttatgaaaggataaggatgatgctcagatggtcgggtattcacaaaatcatatagatatggtggtaagacatgatagccctcatatctggcaccttacggggttatattggtagaaacctaa

SEQ ID NO: 357176 - DNA, 652 bp, Cannabis indica
caactttgcactttgcatttttaggccaatttaatagttctagcttgttttcttcatagtttgtgtttgttaatttttttttacatattctcatcactttattttattttatttttttgttgaaaccaatttgtgagtaattagttttataaatcaatttccaattttcaatccctgtggagacgatactcgatttatcactttattacttgttacgattgcgtacacttgcgtatacaattttcacaacaagtttttggcgccgttgccggggattgatttagtgaaattttatttttggaacttaattactatcaatttggtttttttttttagtttttcatttgttcattctattttccttgttctattttacgctttgtttgtcttgttttggtttcttttgcaaggtcttgagatgtctcatctacaagtccttatgaattttgttcaacatgacttggagcccttgtatgaagcatggtggagatacaaggcatttctagtgaggtttccatatcatgggttgtccaaagagtgtcaattagaaatcttcctaaatgggttgaatccaagcacacgaaaatgggtagaaagaggaaatggtaccaccaatttctaccaactatcaatcgatgaagcctattggatg

SEQ ID NO: 357177 - DNA, 645 bp, Cannabis indica
accaagtttgagtgtaggaagttacagttcaaaaatcaacaaaaacactgctaatattgcaagaactagtgatgcatctgacaattcggtccttatttttgctgatgaatttgccaagttcttgaggtatcaggaatcacttaagttttcatctccttctatcactgcaatagctaatttaagtaactctaatgcatgctttctttccacatcctcaaaatgggttgttgattctggtaccacaaatcacatgacaggtaattccagtctcttttccacttttcagtctcatagtcccacttctgctgttactttagctgatggatcattatcttctgttcttggatctggcattgttgctcccacacctttgctcactttgtcagcagtcttacatttacctaatttgtcatttaatttgcttttggttagtcaactcactcataatctaaattgttcaatcgcattctttcccgatcattgtttgttccaaaatcttatgacgaagaagattattggtaaaggacgtgaatctggcagcctctaatgtgtccgctcatactttgcgaagtgataatgccaaagaatacacatctgcgcaatttcaatcttacttgacctctaatggcatgcttcatgaaactt

SEQ ID NO: 357178 - DNA, 547 bp, Cannabis indica
ggatagctaataactctgcttccgaaaccgaaagagcttggaccttttgagctttaacaaaccaaatgccagaaaaagtgtcaatatccattgaagctatgcctgcatttatatttgtccaggaggcatctgtaaatataatgttgcagcactgtctttcctgttcatcaatggaattctgcaaagcctcggagccatctgcgacttgatcagtgaccttatgcccaatgctattggcacctgcctgctgaacttcgaagaaacttttccttattcttcccaaaaccagatcaatattgattgcagcatcccgaatacaataggcatttctttggtgccatatttcggagagagtacatccaagatagttgagtatatcgactctgctattaccttgatatatatcaactattgtttccagcaatgtgatcaaactctctgagactataccatcaactcttacggggaaaagaccaccaaaccaaatagctctagcaaagttacaattaaagaaaagatgggaagcattttccaaatcataatcgca

SEQ ID NO: 357179 - DNA, 561 bp, Cannabis indica
aaattaacgtccgctcccatcatacagtcacctgattggaatttgccttttgaaatcatgtgtgatgcaagcaattttgctgttggagctgttttgggacaacgaagggaggggaaaccttttgttgtctattatgcaagtcgaactcttaatagtgctcaaatgaactattccactactgaaaaagagttgcttgctgttgtctttgctcttgacaaatttcgagcttacttgattggttcacctattacgatcttcacagatcattctgcccttaagtacctcctttccaaaaaggatactaaggcgcgcttaatacggtggatccttctattgcaagaatttgacatcacaatcaaagacaagaaaggtgttgagaatgtcgtcgcagatcacttgtctcgacttgaatttagtgattctgctgatgatccacctattcgtgatgatttccccgatgaacaactgcttgctgttactaagttaccgtggtatgcacacatagttaactacttagtaacaggtgaacttccttctgagtggagttcacaagatagacgc

SEQ ID NO: 357180 - DNA, 692 bp, Cannabis indica
ttttatttttatttataacattattttttttttcaatcttgtgtgattaatttgtatttcttttatgtttctattttccagtttgattccaatgaagaaaaattctcatagcttgtttgttggcatattcaaattacaacttaaagagagaaacttgtgaaggatgtgaaagacttctgtttgagtagaaaattgtagaatgtcatttaatggtagactaagctgaaatgttatataccttatttatccttccattttcatatagctaaattgttcttacacagtaagatggttatatgtcaataatggcatataacttcacttatataatgactgaatatttatatataaagttacagttgtttccttcctgatgaaaaaacataatgagaaaggaaaggcttttcaaacataatgtgatattgtaggttgttagcacaaataacatctcaacggatatatgagaaaaatctaagagtacataaaaatggtattcgatctttgacatgcattgtgcattgggcaaaagtggttcatatatatatatatataatatattaatgaaccccaaagataagaattattatagtactagctaatagtaagaaacaacaattctcctagtacaagaaagaactcaaaacgggtaaacttttattcagcaaaacaatgactacactcaagactcataa

SEQ ID NO: 357181 - DNA, 765 bp, Cannabis indica
atatttactaaataaaagaaatattgctttttgaaatttttacatcaaaataccaaataaatttttattatacatatacctgcgcgcacacgacctgagttactcttacactttaagttcttttacactgtcacactctcatgcaagagtagactatagatctggttgacacctatcatccaatctctccctctcttttttccttctttttttgttttctttcaattttatttaataaaaatttttccataactgatctccttccctcctcaagatcaaaacccacccctacccaaagatttttctgtcattttcttttctaacttcactacaaaaaatttcacttttgccagcacatttttatgctggcaaaagttcgtattgcgctggtaaaatagaatttacttgtgatgtgttcgcaaaagggggttggcaaatcaatatttgtattagaacttttgctagcataaaatgaaaagcgctggtaaaaatgatttttcttagcgcctaaatgcgatggtaaaagttagcttttagccactgtaaatgtacgcttgtaaattaaattttgacctctttgccagtgtagtttgcgaaatgcgctggtaaaaattacttttaccagcgcagtagcgaactgtgctggtaaaagtaacatttcttgtagtgcttcccttaaccgattgtcttctattttttttttttttgggtctaacttatatatattcatggctatttacttgatcatcattgtccccttctcca

SEQ ID NO: 357182 - DNA, 616 bp, Cannabis indica
taaagtaattttaacggcaacagaaaaaaaactctgaagttttaaaaatgtttgctacttatatgattttacaaataaattgtaaagtaaatcttataattaataccgcatatatatattagtctatttttattgttgtaagagttttttaataaacgtattgttatttatttatctaaagttaattaaaaattcaaaaccaaaccagaacaatgatcaagccaaataaaaccactcaaaaatggattagtttggttcgaaccattgtatttcgtagttctaattttttttacaataattattcattttttccttatattttttagttattgagggtagttattgaatgggaaaatatgagtgtatatatagaggagtaaaggagagagaggttatgcgagaattgaggttatacatgatcacatttttatgtgataagaatttgatgttttttttttattgattttgacaaataaaataaaaatatataagaaaaaaaatgatgcattattagttcttaaacaaataaattttggaaaaaataattataaatttagatataaaatatttttttttaaaaaaaaaaaaaaaagttagggtcggatctgatccgatc

SEQ ID NO: 357183 - DNA, 778 bp, Cannabis indica
tgttggtaatactagaacacttatagatgccacagctggtggagcatttatgaggaaaagtgcaaatgaagcccatgaattgctagaagagatggccctgaataatcaacagtggccaactgagagaagtcaggcaaagaaggtggctggtatgcatgaggttgatgccataacaaaactgacagcccaggtagaggccttgacaaagttgatagttgtgcaggcaaaacaggctcaagttgtttgtgagctctgtggaggccctcatccgtatgagggctgcccgatagatgtgaatagtttgccaatggatgaagctaaagctattgggaattactctcaaaacaacaactatgggtttaatcaaggaggaggtcgaaggaataatgggttctatcaacaaagaaatcagaaccaaacgcagatccaataacaatcacagcaacaaggctctagtgggagttctagtcttcagacagatttattgctacagtttatgacagagactagatcatccattaaagccttacaaactcaaatggggcagttggcaactcagatagaaacccaccctcaagggaacttgcctagtacaacagaggtcaatccaaaagaaaaatgcaaggtaattaccttgagaagtgagaagaagtatgaagggcatgatgggggacaaccagtggaagaagagactcaggatctcccgccaccggtatcaacaaaaaagaagactactgagagtcctacaccaaaataagcatctccaccaatcagtata

SEQ ID NO: 357184 - DNA, 585 bp, Cannabis indica
catattactctcacctataccatcaaatggttaaataattcctagattaaaaatcgagtcgaacgacatataatatgactatatttaaaatttggggttatgcagcctcacctaagtgatgcacattaacaatcggtggcggtaaaaattggtgtaccagaaacgtcgtcgaaaataggggcagtgtatatcaaaacgaccacctaaatgagtagatcacacccatgccaatcgtttgtcaaaacggtacacgatatcgccgaaaagtcaccgaaaaggggcggagctatgataatgtcaccggaaaaagtaacgagccgggcaaaatagtttagtgtaggttgttctcctccacgagctgagtttagtggtgaagacgtctcgtcatacggacaccgaaagtaacaagaaaatccgttcaaagtttgaaaccccaaactttgacttgcgatcccgagctaacagtggcgaaaggagcagcggcactttgggggtgaggtcgctggcacttgggctttcgattgtctagcaggtggggctgggcggtgatggtggtttgtgggttttttttttttttttgatgtt

SEQ ID NO: 357185 - DNA, 1052 bp, Cannabis indica
tataggattccttctagggttagttttagaattaatatgaaatttaaaaatgtaaaataatagcttaaattactttaagtggacgacctcattgtggaccccacagtttcaatttgccattttatttaaaaacttatcttttatttcacaaacaccatatttcaattctaactctataaatgtcaattccatttatttaataattataattaattatcaaataaaattgtcatctaacttatttattaactagaccttacaaagtctcttaattaataaataaaccctaaatcttttttcttctcaaataagcccttgcctagtgaaaaatttacaaacaagacataaacttatttagaattctaattaattaatttaaataaattaattgagactacaaaataatattatcccaattagtgttgggaccatgaccctatttaattaagcttccaataagtagatccaaaattcacaaagtaaaatttttaacttattaattcttcctgactccactatatattcagaattgaaatcttaattacatagaatgctctattgccaaaatagatgcgatttgaaccattatttcaacccaaatagtcaaagatcctctataaatgatctacatcgagtagggacaaatttactgttctacccttcaatgtattttatccttaaaatacttagctagttgtaaatgatatttcagtaaactaatataattacttaaatgaggcctcaatcattatcgcgttaagccaagcttgaaggaaatcatcgtttcacttctaatagttatagaagctatagattctatatctatgattagtgctccactcaattgtactaccatgttcccaagatgtaagcattgggttgatccaattgctcagctttaacgaataagtttaagaatacaaataatacatttaagccagaaactaaccatctcgagattaagatctattgatctaagatcaacaaaatgatattgacttagatagatataacagtaagtttatgatatcttatccaatgtcaatatcggt

SEQ ID NO: 357186 - DNA, 856 bp, Cannabis indica
aggccgtgcattcgatggcgacgatgaccaggaggaagacagctttctcccaacctcgatttcagaagaggaggccgcaccaatagagctaggcccgatgtcttctgcagacatcgaaagaatggtgcaggaactcgccgaacctgggaccatcgacattcgagacagcgagtccacggtgtcggcccacgactaccttatacactcgaggcatgctcctgacgtcgaggtcgaggagatggacgatgattggacgaccccagctcgcgagtcaggcgaggatgaagaagaggcagaagggagcgggacggactcggtggacgacactcagctgaacgagcccttcgcgtgtgaagatctaatttcgagggttaccaaatcagatttcactacctttgtgaggttaaatctgctgcgacttgcgtttcagcgacctaaaccgtcccagagggcgcatctcccgtttaccaatcctgcgattattcccacagaggatgtggtagtctcaatacccattcttcgatgtggggtatcggtccccttccatcccttcatcgcagctattctcaggcgatacgatgtatcaccttttcaactaactccaaacagttatcgcactgccctagccttctatgcgatgtatatggagtatgttcatagggctccctcagtagaagagttcagctatttctacgacataaaaagcgtaggtcttcataacggcttctactgttttagcaaatgggcgacttctgaaatcaatggagtagaaggaatggtgtcgaacatgggagactggaaatcgaagtggttctacgtctttaaagtccctgggattagaactgactttaatcgc

SEQ ID NO: 357187 - DNA, 591 bp, Cannabis indica
caatggagcttgaacacacagtttttaaacatttttattttgaaaatggtagcttacataacactgtttgatgaacctgaatattcctgggaggagtgaacaattttcctgaataaaacctgtatgaacccaataccaaaaacattagcaataaaattatgactgtaattcttataaggttgagattttcctctagaacaaagacaaagacaagacattatgaaccctaagtcaactcaaatatcaaggatcatgaagaacaaaaacattaaacagtacaaacccctaaggatttccttagagaaataaaacggaccgagtcaagagctttagtaaaaatatctgctatttgcttgctagtttcaacatattctaagacaagagttttattttccacaagctctctaataaagtgatgacggatgtctatgtgctttgtgcgtgagtgttgaacaggattcttagaaatgtttatagcactagtattatcacagaaaatagttaaagttttcaaatcaaacccataatctgccatcatttgtttcatccataacaattgggtacaacaactacccgcagcaatgtactcag

SEQ ID NO: 357188 - DNA, 753 bp, Cannabis indica
aggtactctggaaagtttggtggcatttagtggaaaattgagcaagaggtgaagggtttggggtgaactggtgcaaaccggctagccggttttgccagacctctatccggttttggcaggattccccaaacacttcatttcctcgatcttcgtccactttagtgccgtggttgggtgtttccctaatttcagagtttgagtaacctatagagagtataacagaacatagggttgtgggttcgggtttccctaaaatagggtttttgatcatgtaacttacctggtttcataatgtgattagggcatccatctagcacaagattctccgttcaggtcggccagcacacttgaatctggaaagaaggtaagaactgaatataatgtgtgatatcaatatctgagtgtatgtatatgttatgtgtatatgcatgcttaaattgttaatggaaataccaacacttgtacggttaaggtatagagtgcattggtatagtgaatgttaattgggagtacatttcagtgataccaacacgagtacggagaagtacttagtgtgtctggtacatcactcagaggtactcagggtatgaaacaaaccctaacaacactcgtacagagaggtacgtagtgtatgtggtatagtggctataccctggtatggaacgttcttatactcatctgttgagccttgtaaataggtgtatgggcacctaaatacaagttagaaattatatgatatgttatatgcttttc

SEQ ID NO: 357189 - DNA, 922 bp, Cannabis indica
tgcgacttgattgctcagggaaagcctgacacctcgcggagatggggctccctatgtcttctccgggaggcatgtcccggatgctgccttattacataaagacttagcaaatagtttgaatgctaagttgtttactccacgtgttcttgtctgattggtccacgtatattgggcaaaatcagggacaacaccaacgttgatttgccaacacatcaaaaataaatttcattttaccatcgtaacaccaaacatttgccaacacaaaaatatactgacaaaagtaatatttcttgtgacaccaccatttaagctcaataagtatgaaaggcgacaagaaacatatataccatgacaattgattcacgaaaccatcttcgatctcaattaaagagtcatatcctttactgagatcttcacacacacacatatatatcccataatacataccccgatttatgatagtcaaatcatatatgaactctttccgaattgaaaagttttcagttatattattttatataatatagtatttagattaaataattaagtgtgacaaagtattaattttatcaaattgtgacatacattatgaagttacaaaatgtgtagaatgattacaaaataagagttgcaaatcctttaaattgatggtcacttgaatatgtaactctcatctctttttcacttttaaattagtaaaagatgttactaattttttatgaatgtgaatgaatgatagctattgaaaatattattgttagagacttgatttattcatttataaggtgtataaatagttcaaaatcaagtgagaatgatttggaacactttggaaaagaatgggccaaagctgaaaaatagtaactagtaactagttactgtttttttctaacatatacttgcacacgttttgaaagtttga

SEQ ID NO: 357190 - DNA, 904 bp, Cannabis indica
ctctgctacagaaaggaatcaagggctagatatctgaacggaaggagtcatataattccgctgcacccaatgtaaggtttcctaaactttatacgtgtttatttcatcgttttagaaagttcatatttagggttttaatcaacatacttgtgagtagatctaagatcctggtaaaataaattccaacagtggggtcctcccgagatcatggccactctcccgttgggtcttgacgataggccaggaattgctgggcatctccggggggagcaactggggcaaaagctcctgctactcgccctggcgctccttgaggcaaagttccagtcggcttaactggattgaggtagggcaatcagttcttgatccactcatagagatgtcccaatcggatcaagttctcgatctcatccttgagatttttgcattcactggtgctgtgcccaatgtcattgtgatactcgcatctcttgttggggtccccccgggagctgtctttgtacaaaggaggcggtctccgttagtgcgtattttgcctagtagcaaaatatacacgttcttgggcgtccgtcaactccgtgtattgagtatactgaggagtatacccccttttgtgccgcttatcctccgtccggttgctgcctttggaggacctcttgctccgagagccttgagaaggaccggctaaacttgcggtcggagcgaagtgcgacggggcctgtccattaatccccgatggatttccaaagtgggaagatgcgggggccaagggtgggccttaactgtatcagggagtagcagaaaattgtatgctgctcatctgcggagcggctgcaggcaaagtgcctgggagctgagctccgggcacatatcctgctattccggtgggatagtatcctccata

SEQ ID NO: 357191 - DNA, 517 bp, Cannabis indica
gtcggttgaaaataaataaattcagcaaaaaataaaataaaaaaagttgagtgacttaaatataatttgtaaataaatatatttttgatatagtataaaaagatatattttttgatatattttttaaattaaacagctaaattaagtatgaaaatttaatttcttttgttttattcactgttagatcaaaatctaataatttttttttgaggggtaaaatctaatgattttctaaattataatttatacttaaatttatttaataattattaattgataatactcactgagaattgttatatatatatatatagtctaatttttttttgaactatatttgaatcttattttcaatgagttaattttttttaaatcattttaattttataaattattttaaataattataacgcacacaacaaaattacactaaaaaattctcaatatttcaaacaaataaaaatatatcagtataatttttttaggagcacactataaaattttccaatttatatgt

SEQ ID NO: 357192 - DNA, 723 bp, Cannabis indica
catgccttcttagattactaccaaaagctattgggatctacaataccagccagaaggaaagttgttcaagcaattgtggatttgggacctaaggtaacaagcattcacaatgatattctattgggtgactacacaaggaaggaagtagaagatgctatctttgctattgatagggataaggcccctggaccagatggatatggaagtgccctttttcaacacaaatggaaattggtaggggatgagatagtagaggcagtattatctttttgaaaatctggaaattttttaaaagagattaatattaccactattactctaattccaaaatcaaaatgccccaagagtgtagtggatttcagaccaatctcatgctccaatgttatacacaaaacagccactaaagttctatgcaatagattgagaggaattcttcctgatctcattgctgcgaaccaaggaggcttcacacatgggagattcattgcgcataatgtgctagtgtgccaagacttggtaagactatatgggaggaaaaattgcaaaccgagttgcatgatcaagattgatctaaggaaggcgtacgacactatagaatggggattcatagaagagatgatgaaggcacttggcttccctagtaagttcatttctcttatccttgaatgtatttgtacacctaaattctctttgctcttgaatggctctatgtgtggctttttt

SEQ ID NO: 357193 - DNA, 592 bp, Cannabis indica
attttataaaattataatttttttagttttatttatactaaaaaagtaaaaaaaaaaaaacaattacaattttagtaaaaaagtctaacatggatgaaagttcaggagcataatttagtgctcaaagttcgaagggcatgatttggtagatattaaagtctggggaacatggttttgtacctaaacaatcattgaaatagtaaaattgaataaaattagacaaaagtccttaaatctaacgatctcaatagttcaggggcattttcaatggccttaaaagttcatgggcataatttggtacatgtcaaagttcagggacagaaatcctaattagccttttacatataatatggaacacatagctttagtctttttctttttaaaaataaaatataatataacgaaaaagaaaatttaaaattacaccacatataatatttataaaaaaagttattagtataatatttttaacttttaatttgaaataaataaatatatgaaatttttacatgaaaaatcctttttacacactttattacataattaccctcacacgcctattactacatttatacttacaaacttattttta

SEQ ID NO: 357194 - DNA, 621 bp, Cannabis indica
cagttaacggaaccaggcttgcggcgaataggatcgggttttcttgaggacgatgcttggatcggagcgggtcggaatgaggtgagagaagtggtcgccattagaggaaaacgaaggagttttcgatcggtggttacgagagaaatattgaatcagaaaatagggattgtaattttatcccgtttatttatcacggttaaaaaatatataacagtctgctttataggggttgtaccctaaggacatgttaagtcctttaacgaaataaagggtattttagactttaaagtacaacctctaaagcaggttggtaggacagtaagggtaggtttaagtggaaaaaaaagaagagaaaagtggataagatatacacgtggaagagcgtgttgttgcagcggtctagttgctcttttttaatagctttaattgtcatttttgaggaaacttggatattttgtgctcttctttaatgaaaattacgtgtcatggacaaaatacttacttaaatattaattaattttattttaaaaaattaattgaagattgctattagtcatcacatcttaatcaattgttaatgattttttttatatataaataaaataaataaaatttgatatt

SEQ ID NO: 357195 - DNA, 540 bp, Cannabis indica
ttgtgattatttggggaaacctggtgcaaaccggttaaccagtttgctaggacctgtaaaacgagttaaccggttttggcaaattccccaaacaactcatttcctccattcgtgtccatttcaaagcctcgtttgggtgattcccagttttttatgatatcgtagttccagttagtaataacagaaccttgagttggaggtttgggtttcccgaattagggttttggtgtgatattcccaatttttattatgtgattagggcatcaatctagcacgggactttctgttccggtcggccaactcacttgaattcgaaaaagaggtaagaacaacgtataatatgtgatatatgcaaatgtatgtatgtgagaaatgtatatgcatgcttgttatggttggtacactaccaacacttgtacggaaatggtacagagtgcattgtatagtgtatattgtttaaagagtatattacggtgttaccagcacaagtatggggaagtacaggatgtgtgtggtataacacttagtggtactcagggt

SEQ ID NO: 357196 - DNA, 787 bp, Cannabis indica
tggtatttcaagttggctcttgaaaagtttagttcatggaaaaccttctcttcggaaatccatgcacaattctcctcctcatgccaacttccattgcatctaggagacttggtcgaagttaagcaaagaccaagcgagcctctccgggcatatatcagcagattcatgacggaggcgaccaaagtttcacgggtaactgaagatggaaagttatccgcgatactggggggcattgaagtcctcggcgaactttggaaggatataaggaagaacgggccggtagactcaatgagtgattttcttgaccgtgccgaaggcttcatcaagctcgaagaagccattcaacgagcgaaaggtgagcaaaagcctggcaagtcaaaggctccttctactggaacatccgcccaacttccccattacccaaataattcaagttcaagtggtaaatgttccaacaacaaccacaggcaagggaatgggaagaaaggaaagttcactggcaaatttgaacaagctccccaggaaaatcaagccaagtacactgcattcactattttgactgaagatatagaaagtgtgtacatggcaactcagtcgctggccccatataggaagcccaaacccatgaagaaatatgtcaacaagagggacatgacaaagtgttgtcggttccatggagactacggccacgacactaatgaatgcaacaacttgaagcgagaaattgaattcctgataaggaaaaacaacccacacctgcagaagtatgtcaagaccgatcagggtc

SEQ ID NO: 357197 - DNA, 807 bp, Cannabis indica
tggaaacttttctctccatatgaactaattaataatacagacaaaagtgtcagcttaatagtcctaacagttgaaaagctaagtcatgatcaacatataagtatactataaatataagcatagtatttattaaattttgcctgatatgataaaaatttcattcgtcttctaaattttcttaaaaacctttttagatgatgaaaggtaatatttggatatctccaaatccagtggagtttgtacaaagcatgacacttgtcctcaggttctagaaccgacctttaagaagagggatttttgccgttggaaatgtgctagatcaacaacagcagaggtccaattcccagttaagaggcctgcgagttatactagctaatgatgacggtgtaaacaggacagtgaccaagaagctgtttgagaaattgggctgtcatgtgttggccatttcctcaggttttgagtgcctgactactgttactagtgctgaaaatgcttgccgagtggttcttctcgataatcatatgcctaaaatgaatttcttatgcgaatctgaaagtttcgcagccgcatctggccattgataatagctgtcacggcgagcatagaggagaatgtgtgggagagatgtctgcagataggcatgaatggattgattaaataataattaaaaaaatctaatacgtataaaatacatatatttcaatactttgtaaattaaatgtatatttcattcttatatataattttttttacatacaatttaaacaaaattaaatattttttatacattacaattttttttcttcc

SEQ ID NO: 357198 - DNA, 957 bp, Cannabis indica
tcaagtaacaaaaatgtatatgggataatattatctcaaaatatagcttattaaaaaggtcaaatagttatttattttttttaataatatatatagtaactcttcaatataaaattaaactttttttttgataaattaatacaataaaaaatacttttagtatatgatatatattaaattttgttagagtttaatttttttttttaataattataaaagaaattaaaagattattatttttgacttcaacatcttatttagtaacagtgtagaaatatatattttctatatataaaaataatcaacttaaaaaataagtagtattttatatatatatatatatataaatactactttttaaaataaaatagctaagtgtagttgatattttcttttcaaattgtagtaaaaagaaaaaaaaataaggaaaaaagaaataataaaatattcaacaaaatcaggcataaagagaagaataaaagtcaaaagatgaagctgacagttataaaaaaaaattgcttgcatttgtttgtatattccgtatagaagtaacggtaattgcatcaattaaataattaacgatatatttattaataattacaatattatgtatataattaaaaattccccttgtttttttggtactctttatcccattcgaccttgagagaattttttagtttattttttttataatcatatcttctttaaagttatgtgtaattttttttttaaaaaaaataattaaataatttatagtactaaaataagattcaaccaattatttactatacgcttataaaaaaataattatgcatgcaatataatacaagaaatttttacatgaaaaatcctttttacacactttattacataattaccctcacacgcctattactacatttctacttacaaacttatttttattacacatttaccacttactcatcataccat

SEQ ID NO: 357199 - DNA, 833 bp, Cannabis indica
tatcaagaactctatttttaatatagtaagccattcaaaaaattttaaaaatttacagaaataataaaatacggctataaaaaattgtattttgtgattttgaacataaagattgactaaaaagtcaaaagttgtaattagtacttattttttattatcattttaattttctctttcttactttatttaatcattaatgctacaacccaataataatttgttgttaaaaaaaaagctaattagatatttacatttcaattttgatatgtactaaattttgctctaaattttttaggttgttaaatttttttatgaattattaagattgttggattgaattttttttgtctaattccgtttaattttattaacgttcaattttccatgtaccaatcattctccctaatgtgaaattcctgacggtttaaaaccgtcacctataatagggtataggagacggtttaaaactgtgccctatactataggcgatggtttgctcgtgggtttcaaagcttgctcgtgggttttgaagggtggtggtgggtttggaagccagattttgtggtggtaggtttggaagccagagttcgtggtggtgggtttcaacgtttcgaaggtgggatttggtggcagtgggttttgtcggcgtcaactaaaggtgttcatccaatccaatctgcactattttcttcatagtgcatccgatccgcactaagtgcaggttttatttttttagacccaatccaatctgcacaatagctcaaattcaatccaatccaatccaatccgcaaaaagtgcagattagatcggttattttggattgattactttt

SEQ ID NO: 357200 - DNA, 861 bp, Cannabis indica
ttttaagggggggatagttgtaaagaccgcttagctttaatttggaaattagcagataattagggtttaattatgaaattagttattaattctcaattattaatttatgatgatttatttgaattcataatgcattttatatgtcatatatagaaatttcatatttttgtatgttcagtgcccgacaacattggaacgcagtgtatggctcactagaatcacatcttggtattttagtatagtggggcggtattgttagacattgggaatgtcgagtttagtcgggaatttagaatttaccaagatacccttagtacccttttatgtcattttaatgtgagagagcaaaaaggtcattttgcctatatgtactttgtcttttgtggattttatttaaaagtttattaatctgatttttagttatgttatgctgaatattaaccaaggaaaatctattatttgctcattttattaaaaaatcaaaagatagacgaaaattgcattttctctcaagtttctctctctctctttcgaatccacctagagggagctagggttgggattatttttctgcattttcagcttcttccaacagggattaggagatcttaagctctaggagcctgtaattcgccgagcagattattccactcaggttgaccggtacacctgaattcagaatcgaggtaagggcaaggctaaagttgaggaaccgtgaggacgagcagaagaaagggcatggcttctcagcatttaaaggagtacgagcagaggtaccctactcacgacttagaactcctggcagtagtatttgctctaaagatttggcggcattacttatatggggagaaatgtcagata

SEQ ID NO: 357201 - DNA, 617 bp, Cannabis indica
attaagctaaactcggtaaactagtaccttgagttaatgttaatgtggtctaggattattaccctagaatattataaaagtaaggaagcaataatgtatgattatgttgttaattaaatgaaggcataagttagggttattaccctcagtaaatgttatttcgagcatattgtaatatgttggaggaatgagtatttagtatgcaattagggttattaccccaagattctatatgctttgatatatattgaatgcatacatatatgtcaagagttatgtgcataagacataacttggttagacctagtatattattaggataaaccactgaaagaacgtaatgtatggattacgtaaatatatatgaatagggttatgcgagcaaggcataaccaggttagactcggtaattataaccgagataaaccttactaaggccttattgtaaatagacgtgtgagtgtaacacgtaggtctatgccacatagacatatatgtgtgtgagcgtaacacacaggtctatagcaaatagacaaatagtgcagtggcaccattaattatgtgataaatatatatatattgagattaagggttatgcgttcaaggcataatcaagt

SEQ ID NO: 357202 - DNA, 201 bp, Cannabis indica
tgatattcttgtttattgtatcgtcaacacagtggaaagtaatcaaaattgagtgattaaatgtattcctataatttatcagtacacagggtttaatgatatgataatctacaacgtagtttacttgcaccttggataagtgttatgtccttttcaggacattggttaaagtaagcttgggttggatgtatagagtatgca

SEQ ID NO: 357203 - DNA, 605 bp, Cannabis indica
atattgggagcctccattatcagtgtagtcatctcatgagtataaaagtaactcctacaaatactgttcttttgaacaagagaacgtaagttttatttaatatattcgcctttaaatctaaattgttaatattaatgctaacgtagttaaatttgcctttatagtagagattatggtgtattcatgcttaagacaatagaaatgcacattgatggtaagtgcaacgagtcagctacaatatttctcaacgacgacaacatagtaacattcaggaaggtagatgcagttcaattatatgtgggtagtgcagatccttaattaaccatgtccttgttcattattttaatttttgtaattttgtggataaacttgaatttgctctgaacaaccataaatgaccttgaatttacactatgcgatcatcatggtcttttatattcttcaacaaactttaaagaacttgactctactctgaacgaccataaaagaccttgaatttataccatgcaaccatcatggtcttttatgttcttcagcaaactttaaaaaacttgaattttctctgaacgccataacgaccttgaatttacactatcatcatggtc

SEQ ID NO: 357204 - DNA, 1109 bp, Cannabis indica
caaataattttcattttttttaatttttaatattttttgattaaaaataatttacatttaatatttttattttttatttttaaagtattcattatataattgtaatatttacttaaaatattttaatatatattttatccatatatattattaatagaaaaaagagtatagacacaaggggactcatataatggctagggagaattctaaccccctcatatttttatatttttagcattttataatttattttattaatattgatttatgaatatgtagtattataatttttataatttattattgtatgtatatttattaattatttaaattttgcaataacgctggtaaaatttcatgggttcgccactgagtatatgttaaaagtaattttatttcaatagtttataaaaaatagtaatattattatttaagctttttcagttgttcttttctttttattttagcatatttgaaaaaaaaaatacatataaataaagaatatatttatttaatttgataaaatattaatataaaactttttaaaattaatacaaaaatgaataaataaataaaatatcatcatttaagagtgagaattttatgtttcaagaaaataaaagtttagggactaattttgtcaaaaaataaattttgaaaactaagttgccaaaacgtatatagtttgcagaccaaattaccaaaaaataaagtttagggactaacttgccaaaatatatatagtttagggacctacggtacaaataagcttaatttatatagtgtgtcgaaaaactcgtgcaactaagggccagtttgacactgttgtgctgtgagcaaaagcagctgtagctgtgcgaaaaacaacttttacaaaactatggaaaaaaaaactagctaagtgtttgataaattataaattttaaagtactatgagttgttaagattctactataataatgataatactataatctagttcattataatcactaataaacataaaaaaaaactatgttatataaattttttattttatatgtattttaattattttttcccataatataaatttgtatggatttaataaaaataatttataatatttt

SEQ ID NO: 357205 - DNA, 1344 bp, Cannabis indica
cttctccaggttctccttgatgctctccttgattgatgtacccacttggctagctgacatacccgctaacacctttagagtcgccaactctgctttaccgctaagggcatcagctgcctgattgagacatcttttcttgtgctcgaagtagaagtcaaattctgccaagaatcctgccatcgtgcttgcttggaggttagtttttgttgcgtgaggaattgactaacatcagtattgtccgtcttcaccacaaacttcgaccccaataagtagtgcctccacgtcagcaaataatgaataactgctaggagctctttctcctgtgcagtataccgcctttctgcttcgaaaagcttgcgctctcaaatgccacggggtggccctcctgaatgagcacccctcccaaagcataatctgacgcatttgtctgtacttcaaagggtttgcatacctctggcagggctaatacaagatcttcaatcatggcttctttcagactttgaaatgcttcttcgcacttatcagaccatgtccatataacacccttctttaacagctttgtcaagggtgccgctcttctcgaatagccctccacaaattgcctatagtaattggctagaccgaggaaagagtgtagttgtttcacattggatggggtcgtccactcttggatcgtctgcaccttctccaaatccatacagatcttcccgtgttccactacatgtcctaggaacttgatactttgttgagaaatgagcacttctctcactttacatacaactattctttccttaactttcggaacaccatagccaagtgctcctgatgctcttctaaagtggcgttgtagaccacgatatcatccaggtacaccaccacgaacttatctaagtcttcatagaagacttcattcatgagtgtacagaatatggctgcacatttgtcaacccaaacgacatgatgcaaactcaaatgccccataccgagtaacacaagttgtctttggttcatcctcttcagcgatttgaacctggtagtagcctgatcttaagtccaacttcgtgaagtatttcgccccacttagcaggtcaaacaaatcagcgatcaagggaatggggtattggttgcgcacagacactttgttgagggcgcggtagtctatgcatagtcttaaggtctcgtccttcttcttctagaacaacatgggggcaccaaatggtgcctttgatggcttgatgaatcctacctccaacatctccgttagctgcctcttcaactccttaagttctaggggagacaatgttggaatttattttaccaagatcttagatctactcacaagta

SEQ ID NO: 357206 - DNA, 828 bp, Cannabis indica
ccaaactgtaggtcagcaaccaccgaatgtcattcccctgggtgagacggacgaagatccagcgatgaatacttcccagactacaaatggtcagctgcccagtccccggtcacgagttccacttgtaggccaaccggcaggcgggcagaccttgtctagtaattcatcgggagagatcatacttgatggttccaaccaaatcaatggtgcatcccaccagtcaaccaagcaaatcaaacgctaagcagccaggcgcttctgtattcgaaaggttggggacaactcacgacctaaggaatgatctgaatagaaggagaggaatagacgatcaaaatgtcacgacgatcgttcagcccagagtatgcagacgtgattcaaattgacaaaaatgccgagcaagttagcccagccgtgcaggcatagctagacgaactgaaaaatatgttccatggcatggctggacagagaaacaataatcttgagttagaacgagcacgcagtacacctttctctcctgagatcaatctcctggcgctgccccacaagtttaaaatgccaacatggaagatgtacacagggagagaagatcctctctcccacctcaagtattttgaaatgcaattggatttgcaaggagtacgaggggatgtgtgttgcagaatttttcctgctactctgtcggaagccgctcaacaatggtttttcaagttggcccttggaatgtttagttcatggaaagccttctcttcggaattcgatgtagaattgtcctcctcacaccaactcccatttcatctagaagacttggtcgaagttaagcaacgacca

SEQ ID NO: 357207 - DNA, 1002 bp, Cannabis indica
ggcatggctcatgggtgctctgctgtgcaggaaagggtaagactattgctgatcagccatgagtgcaggagctggatgaagaatgtacatgtctgtgccatatcagaccaaacgggttggggtctaccagtgttgtgtttttgaaactatattttgccgcttaggccgctgaaaaaaaaggacttgtaataatatttgtaaatgtttttgggatcccaacatctgtaacttttagtttataaagtttaaagtattacggtttatttttattcttattgttattaaagtttaaattcttcgccatttttattagtaatcccatttaggggattagggtttaataagtgacttgggtagcgtgcctaattatttagggcgttacaatttggtatcggagcgccaatgtttttaaacttcctgtagactggccgaacatgtaccttcatcgtcaaagacaagctcgactcatggtgcagttagtattgagagtaaatactttactgtttgtgtgataatttgtttaccgctttccattttaggcagtatgcaagcatctagaatatatatatgtgttatgtgatgccatgctttaaaatactatatgattaagtgtttatttatatggggtaaatggatgagttaaggtttagggcaataagtgcataagtgtggtattggtgcttaacttgcaggggttgttgattacacgggtactagtaatggaccctctttaatcatccagaccacagggtgagttagtagagcctggtgtagaccaaaccaatccaccggcactgcctccaccttcgcaaaatctgagaataatgtgggggttggcaatgctaatcctcctactgattggtagcgaatgtttcaagaaatgtgaagtgtcatacttcgtcaagaagaagagttgcgacgattaagacaaccagctgcccttgttgatcaagtgttaccaccagcacctgtgccagtggtgggtaaccaggggtttgttat

SEQ ID NO: 357208 - DNA, 611 bp, Cannabis indica
gaaggagctttcgacttgccaggtttttggtaaccttctactcgctgaatatcctcttcaagtttgataaaaccatctgcatggtcaagaaaatcactcattgagtcgactggtctgttcgtccttatgtccttccaaagctcaccaaggacttcaatgccccccagtatcgcatacaactttttttcctcggttacctgcgaaaccttagtcgcctccgtcatgaatctgctgatgtacgctcggagaggctctcctggtctttgctttacttcgaccagatctcctaggtgcagcgaaagttggtgagaggaggaaaattgtgcatggaactctgaggagaaagccttccatgagttgaactttccaggtgccaactggaaataccattgttgggcagcttccgagagggtggcaggaaaaattctgcaacatacatctcctcgtactccttgcagatccatttgcatctcgaaatacttgaggtgggacaaaggatcttcctttccagtatacatcttccaggttggcatcttaaacttgtggggcaactccaggatattgatctcgggggagaaaggggttccacgtgctcgatctaactcgagatc

SEQ ID NO: 357209 - DNA, 903 bp, Cannabis indica
ttccatttttgcgaacctttgctccaaatccaacatagcctatgacggataacaatcactcccatcagaagtcctctaaggctttcaccttgcttatggggacaacttagactccattctctttaatcgttactagccctgaccacactactcttactctccatattgcaccagatgtccattctataggacaaacctgtcaattagtaagccagtctggtcaggcaacgacccaattgcaaacttactaccacacttatggattttaaggcaatgcaaataaggtaaataaccataatctaatatgcttcctaacatgttttaatattcaaataaatactaaacaagtacgggcttactgaacagtgagccgagctttctttgatgaagattgtacatgtcttgacgagcttcggtagacaaacctggcagctctgataccgaaagtgtaacaccctaatgctaaggcacgctacagtgatttttcaattacagtgctatcgttgataatcaaagaatttacctaaaaatcgtgtcaaattaaaacttttatattaaatattaaactttataactttacaaaatcatttataagtaccaagatcccgtttttaaacttttatacaaaatactcaaaatacatcaccaggtcgcacagcgactacaaaatattaaccccagatgtcccgagactgaacactccaggtcgcattgccacgacatgtacaacctcatctcagtcaggctcactcctgttcagctatcgcctttcctttacttacacatggaagcagaaatgtgagtcaacaaactcagtaagaaaagcatatactatatcatataataccaacttgtatctaggcgcccatacacctatttacaaggcttaacagatgagtaaga

SEQ ID NO: 357210 - DNA, 647 bp, Cannabis indica
gagacttaccagatctggatgtgctggcatcaggggccctagtattggggaccgagaccagtaacttaggccggaaaggtgttcgttctttacccacttccagtcgaagggtcgtcccaacaacagcctgagccttgatataggccaactcctgtttcctcctaaaaagatacggtcctctgtcgaggctatgatgtctgcccggagcacctttttagcgtctggagtacgaatgtttgggcagaggaccttggagaggttgaagtcgtccacggattagatccccgagatgagtttagccttccggtagttctccgtggtgaccaagtcccccacgttaagaccatttctatcataagtggagaaaccttggcatgctggaggaaaagctgggtaggagcaatacaatgcaaaggggggatcctggcccactccatgagaagctctgggcgatccacggcttggaagccggaagagaagaagaagcggtagcggtactccttaacattcttttgaaaattaaagtggatcgggccctcattagtgggatgggcccggagggtgaaaaaactgtccttaaacttgtcccccttcttggggacagatacaagttcataaaaatacaaaatctcagccgggctaggtga

SEQ ID NO: 357211 - DNA, 740 bp, Cannabis indica
gtagcctttcttatggtcttgagaacaacctgcagggtatgtggtgttccactaaagcaagctcttcacctacactagacactgctgggagtaatcacacctgaaaaacaggtgctcggttgtttcatctgcaacattgcagaggctgcaaaccggagaatcaattactttgaacctacagagccgttctttggtttttcaatctctgtaatatggccatccatgtgagaaagctatgcttcggggtgttaattctagaccaaacttcattgcaccaatccactcttccatgttcttggaccaaaagattgtaccctgctgccactttatagtccttcttcgaaaattcttcaacgttcattgtttgtttcactaaatctttaatagacaccattttcctccaataccaactactactttggggagctttataatcccaccaattatggttctttatatttacacaatgcacccatttcacccaaagattgtcctttttatttgccacagcccatatgtgtttaaacatagctgctacattccattgagcaatgttcaataagccaagtccaccttcttttttcgggtagcataaactttcccaagaaacagttccagccccttccattatgctcttccctgtccacaagaaacacctacatactccctctatttctttaatgacttttttagggagaatcatgatctgactcctatacatgtgaattgtactaagaaca

SEQ ID NO: 357212 - DNA, 679 bp, Cannabis indica
ttttgattcttggttgtgcattggtttagtactagcggagaatagtaagtattacaatcatatagagttttgggttagtggactgatgattgtaattgacatgcataaagtggtccaattattagttaattgaattctatggtttcattagctgaatgaaaataagttgaagtttgtcaatggtgtaattgaactgaaattctggaatgtatgcataagtgagaattttcataatcatgttcttgaatctacttgaaaattactcatgttttggagattgacttgtttaatatttatttattgttttacttgaggacgagtaaaagtttagtttggtggaatttgttaggttttttttagtattatttttaggttaatttttagtgtgtttctaatttagctctactattgcttggagcaattcgggaggaaataaatagcagaatacagagtacgaatttcagagatcaactgcaatactagaggcattcttcgcagggttttcaacattattttcttttctattttcttctcttttcttaagttaataggtgtgattttgcttccataaacatgggtagctaacagactttattaggatttagatggaggttgtttgacattgttttatggttttaatatgatttattttcccccaatttctatgtattgtatttca

SEQ ID NO: 357213 - DNA, 802 bp, Cannabis indica
aaagtgcacttcttcgggttaagtttcattccgtatctccagaccacttcgaaacattcttctaggtcatctgcgtggctagcgtatgccttcgacttgaccagcatgtcgtccacgtatacctccatatttcgccccagaaggcctttaaacatccggttcaccattctctggtaagttgcaccagcattctttagtccaaaaggcatgaccaggtagcagtatacccccttatcggtcctgaagctagtgcactcttgatccgcgatgtgcatcttgatctggttgtaaccggcgtatgcgtccatgaaggacaatagcttgaatccggaggtggcatccaccatctggtcgattcttggcaagggaaaacagtcttttgggcaggctttgtttagatcggtaaaatctatacaaacccgccatgtcccgtttggttttggtaccagcaccggattagccagccattctgggtaatacacgtctcggatcatgccactggttagtaatttgtccacctctttctctagggcttctgcctttaccgagtcgaaggggcgtcttttttgttggaccagtggcatgttggggttgacgttgaggacgtgggttatgacgtgggggcttatgccggtcatgtcctcttgacaccacgcaaaaacatatgtggcagcctttagtgtctttattattttttctttttcctccggctctagaatttttcctagctggaggaccttggtggggtctaggtcacacaccgatacttcctcgacatcctccatgggttctataatttttt

SEQ ID NO: 357214 - DNA, 497 bp, Cannabis indica
tatgttttggatttaacagaaattgtatacattaaactataaacatgaaaataacatctaaacataaatgacttctaatcttctattgataacaaatcagattatattgaaatgagttttatttagagcataaaatcccaacaaactcccacttgcactaacataaaacaagaagtgcattttaatcaatctattatcttaaatctagatcaagtgtagtgtttctgactaaacccaaattacaggaactgtaagtctgtggtaagcaactactttctccaccattacttcctttgtattcataaaacattatgcaacatcatatttctatatgtattacttctctagggatactgaattatttactgcttattaagtgcatctgaataaacagaagacatatctctaattctatctaaaaaagataacacagttatgaactttctccagtttgaataactttccagtgttttcaaacacaactaagttatttagct

SEQ ID NO: 357215 - DNA, 604 bp, Cannabis indica
ttttcatatttaaaccattctcagctcgtctctaaaaccctctcaacttttcttcagtgctcccaggctcgtcccacttctccggcgatttcgatctcggccgttcattttcgcaacatcctccgttgtcaccggacgtatccaagttcgtatctggctgtttttttttttttttgtattagttttcatctgtaaaatctatttcttatttttcctatctcttaatcttattttattttttatttgtttgtttttcttttattttcagctttgatttttgtgaattgttttgtgttattactgaaatatttctttaatttccatcaagaaaaaaaatacatattttttttattacattggtgtgtgttccacagagttggctcccaaatcccaactatgccttctcttttcccttaattatttttaaataatttaatatatatatatatatatttgggtgactattcaatggttacatttttattgtaaccatatggttacatttttctttgacctgtaatagcaggttactaataggtagactttccttttttataattaattaattataattaactattttcttaaaataattaattataat

SEQ ID NO: 357216 - DNA, 602 bp, Cannabis indica
attgtattgtataatattatattgaattatattttatgcaatatttttatgtaaaactatatatagtattgacttttttggacacctaaatatataataatttagtataaattaaaattttaacatagtattatatcaaaatatgatatataatccaaatcaatataatacaatacaatacgacctaatacaacgtaccaaacgagcccctaatgattatctttttaccacaatttcaacagtgtctatagcccacaatttaaattaacaagttagatagaatatgtgagaaactgaattaattagttcttcattgtccacttaagacccgccattttttcccccttttgcagcctcctaaagcatcatttaatttcaatgcatcctgtaaaaactccaattatgtttaacagagtttaagatctaatattccacagaagctatcctcattatttaaagcaacatatctagttttagccaatgtttaaaaaggcgtttttgaggcgcgcctcaagctgaggcgtttaaagattgcaccaaggcgtgcgccttgttgaggagaagagaggcgtacgcctcaatgggtgaggcgctgaattgag

SEQ ID NO: 357217 - DNA, 309 bp, Cannabis indica
caaattacaaatgaagtcattcagcaaaaagaaaagaaaagaaaatagtaataattaagttggcaactctcttcattatataagaaacaaaaaattgatcagtataaaattccaacaagaaactcaaaatttcaaattaatacaacctaaatataatgtagacaggttttctaaaaataaataaatatatatgtagacaatacgtggtccggacaaataaataaatataattgaacactgtcccagcaaataaactacaataaattaataataattaatacaagttaaattacaatagcactagctaac

SEQ ID NO: 357218 - DNA, 642 bp, Cannabis indica
gccgggctcccaatgtgaagggacctcccagcaatcgcctggcttctcctctcgaccgggctcccaacgcaaaggggcctcccagaagccgcctaggccttggaataagccttctcctgggccttccggtagagatactcctggtacttcttctccgcggtggcaataagctcatcccgaaggtcttctccgcggcaggcaccctcacattcggacagataaccttagaaaggttagtgtcctccaatgattggtgcggcaggatcaacttggccttccggtagttctccgtcgtgactaagcccccgacgtcgagatccgcccggtcgtaagtcacaaagacctggggtcgctgaaggaaaatctgagtaggcgcggtccgctcatatgggggaatcttgacccactccgtgagaagctccgggtactccacagctcggaacccggaggagaagaaaaagcgatggcgatactccttgacatgagtttgccgattgtaagggaccaccccatcatttgaagggtgggcccggaaaccataaaaaccgtctttaagtttgtccctttttttggggacggaaacaagttcataaaaatacaaaatctccgccagactgggaaaaataaacaagcctgaaagta

SEQ ID NO: 357219 - DNA, 1016 bp, Cannabis indica
tggtagtgtccttggatttatcagtccaagattatttccaataaactatcacaaacattcttctcaacatgcatgacatcaatattgtgtttaagaatgtttgaacaccaatagtcaagctcgtagaagatgctttttttcttccaattttaattttctgcaactcgcctgtgcttcacaccaccaaatagctcatgatttctcgggagatgggatgggagtttatttacttgttctaatacttcctcacaagtaaaatgccttggaggaggtcttctctcaatttgtctgttgaattgagtatcccttctcatttgatggttatttggcaaaaatcttctatgacctacgtaagatgtcttaccaattactcgaatggaagaagtatcttcattacaagtgggacaagctttgtatccctgaccactccaaccagacaaataactacgagctggaaaatcattgactgtccacagaagagctgcgcgcatcttgaacacatttttggttcgactatctctcgtatctactccgttaacccacaactccttcaactcatccaccaagggtcttaaaaatacatctatatccattctcggtgatttttctccaggaataagaatggtcaacataaaattattatctttcatacataacaaaggtggaagattatagttcgccaaaactacaggccacatactgtaagcttggctcatgttgccaaatggattaaagccatcggtagctaaacctagaagaacatttcgaggttcactagcaaaatcaggatgtttggcatcgaaatccttccacgctacaccatccaaagggtgtcgcatcacagcgtcatcttttgatttactagtgtggtgccataccatgtattttgccgtatgccttgaagtatacaatctcttcaattgcggagttaacggaaagtaatgcatcaccttatgaggcaccttttttgctcctgagttttctaaagttatccatctactagtgccacaactgga

SEQ ID NO: 357220 - DNA, 585 bp, Cannabis indica
tattttcgtcccattgttttgtttttttttttttttttttttttttttttttttttatctttttctttttttgtcatacgtacaaatatagaattggcttatcttatcataattactaatttaaagaagactctttccacaactataaattttatatagttgagcagttgaaattttgaactttttctttccttttattctctctctcattaaaggcttttttctagctaattgcatgtagtaatgaagtaaaatggtgtgctaataattaatgtgatttaatgtagacaatttatatgggcagtactgatcatcactcaaaaaatttacatatctatctatatatatattatatatatatataaataatattttacagtataaataatgacttgacatttaacggttaagcagttataaaaatttcagaaatataatttaaatattattactattaaaaattaaacttatgtacttatttagggtaaatagcggcataagtacctaaagttttaagtttgtaagcggcataaacccaatgtttatttttagcggcataagtacccaatgtttgtaaaaactgta

SEQ ID NO: 357221 - DNA, 630 bp, Cannabis indica
ttaaaaaaaaaataaataaaatgctaaattgatcagcacttctttcaattctcactatgaattttttgtactggcctcaaaattgaaatagaacaatcctttataatgtttaaaatttcttttccaacaaagaaaaaaatacacaaaaaattactgaggtattatacattgaataaaaattattgattttaattatgatcaattatcatacaatggtccgagtttttgatcgtccactgtctcacacttctctctctcctgggttgacctctttctccctgagtctttgtcgtcggggaggtgggaattaggggtgttcgcggtgcgggtggtacggtttaggggtgttcgcggtgcgggtggtgcagtttttgaccattttttcaaaccaacccgcacatgcggtttttctaatttcccaaaccgcacccccaccgcgaaactaaaaaaccgcaaaaaccgcaccccaaaaaatggtgtgatgcggtgtagtttttgtggtttggactatgaccaaatgattaaactatcacaaatacaacaaaatttgagcaacacttatcaaaaataccataagtcttcaaaataaaaatgcaaaaaaaattaagtttcaaccatacaataattagt

SEQ ID NO: 357222 - DNA, 1026 bp, Cannabis indica
taagtgacatgaaaagtagttttgaagtcacttactcttacaagtttaaataagaagtttcatatattttttcggtacaaattcttttacagaatataaactttgttttttaactattgataatactttcggaggtgatcagcattctaggccgtaggcactgtggttctgtccattctttttagcttgtaggtctcggagccgatttcatcctcaatctcatatggtccttcccaatttgtcccaagtacccaactccgagttcttgagttgctgggaagactcttcttaagactagatcactaatggtgaatttccattttttgactttggcgttgaagtgtttagccacctttctttgataagctgctatccgtacttaagactcatcctagagttcgtcaatttgatccagtgcttcttgtaataaagctttgtttgttgtcagatcatatgtcgcccttctgtgggatgggaacaaggtttccaccaggaccatagcttcacagtcgtacaccattgaaaattgtgagtgtccggttgtgtttcttggagtggttcggtaggcccataatactcttggcaattcttcaggccaattatttttgcaggccagcagcttcttctttagggtgatctttaggattttgttgacatcttctctctgtccatttatttgtggccttgccaccgcggagaagcttttaacaactccttgttggtttcagaagttggtgaattcttcgcagtcagactgctttccattgtttgagactattttatgcagcaagccatatcgacccaccatgtttttgataacaatgtctaatgcttttttagcagttattgtcttcataggctaggcctccgtcaactttttgaagtagtccacggctactatggcatactttacccctccctttcttgttggtaaggacccaatgagatctattccccataccacgaaggaccaggggctagtcattagggtaatttcgttggggggggggctcttggtatgtttgc

SEQ ID NO: 357223 - DNA, 780 bp, Cannabis indica
aggcatgagccccaagtctggagcatagaacaaaggccaccaaaaatctttgagggagagaatgactcggtaacattcacggaggaggatgagaggggggtgcatttgatacgaaccacacaaacagttgtgatgaaacctgacaccaaatatggcagactctaagaattctcgaaatttggatgtggaaccgcgacccaatgcttagttaagcatgaagctaggtatgaaataagatgccacaaacggtggtggaaatctgtttgataagtcaggttgagtgccacaaggaatactccttgataagttcaaatagttctctcaagaacttaagaagaaaacctctcaaaattttattaaaaaaaaaactgattttccaaagtgtttacaaggctttatatagccaacttacaaccaagaataaaaggaaactaaaagaaagaaaattttccaaataaaataaagatagaataaagtaaacaaaattaaaaaagaaagcttccaaattccttgaaaaacgtgatcaactcaatttgggtctaaattgagtttactttgatgagaagcacaaatctttgttctcctttagtgttgactacggtctcctcttgttttaaaactctgttgactaagttgttgagttcttctttgaatctcttggctcgcgccctcgtcactgggctaactggaacttgacttgtttttttggccttagtgttctcatcattccccccctcttgaaaaggatttgtcttcaaatcttcacttgcatcaaaaggg

SEQ ID NO: 357224 - DNA, 1174 bp, Cannabis indica
aggtgaaccttagtaagtcttctgttttcttcaattctaataccgataccgggactcgtgatcttattttgtctacgcttcatatgagggatgcggatgatcagagtttttatcttgggctgcctagtatggtgggaagaaaaaagagtgtcactttcggctttctaaaagagaaggtgaggaaaagaattcacaagtgggatagtaaactcctgtctagagcggggaaggaagtgcttttgaagtcggttattcaatatttactgacttatgctatgagtgttttcttgatcccgttggagatttgtaaagacgtggatcgacttatgggttgatattggtggcatacgaagtcttcacaaggccaaggtattcattggaagagttgggataagctgtgtttgcataagcaccaagggggtttgggttttcgaaatctcagggattttaatttagctatgttaggtaagcaaagttggagacttttgactaataatagttccttagtggctcgagtttttaaagtcaggcactatccccattcctcgtttcttgatgctgaattaggtgctaatccaagctaagtgtggcggagtgtgctagaggcaaaatctatggttaagatgggagcgagatggcatgttggagccggtttttctataacgattctcaatcaaccatggcttccttgtaaggaacatccgtatgttacctcttctcatgtggctctccatgactgtaaggtcaataatttattaaaattgggctctcttgagtgggatgaggaagttcttcaagatttatttcctcagagggaaattgatttgatccgttgtattccgttgtctccgtcttcggttgaggatgcatggttttggatgttggagacgcatggggattattctgtcgaaagtgcttatcatgccttacaagttagcaatggtaggtggaatactcaagacaattcggatttttggaggatgttttggaacttgaaattgccgcctaaggtgaagaattttctttagcggggtcttacccattgtctccctactcttgtgtctctatggtctaaaagggtccacgtgagtggattgtgtccgatgtgtcatcgggaggatgagacaatttttcatttaatggttagttgtgcttttactaagagttgtctgga

SEQ ID NO: 357225 - DNA, 1295 bp, Cannabis indica
taaagtgcacacacgtggcgtccctgttggacagggcgttacagctgtgattttcctgcatttactaggtcaaaaatatcgtgtattaaacacgtctttaattgttgaatttggagatgtctcgacagaaacttgattatagtgatcccaatagcgagctgagaacattcttccttttgaggtcgacgatgtatgtcttgtgtcgatcgcagttatttacaaagaatttttctgactcgccgacgttgtaagcctcgctcctgttagctagatgaagctataggaagtcttcccatagcgagatggtcacctcgcttacttgttctttgagtcgatccgtctttttcacttagttttcttattacaagctaaggacttttacggttgatacatatcgttttctctggtgcctcgctattcacatttagcgctgtatggtttctcgctaatatactaagtgtcagtttgtacactgactcctcgcctaagaccttacagccagcgggttacaaatatactctgatacttacgtaattaatgagttatttccataaaatgctattgcactaattcacattccctttatcttgacacatgtcctccagacgaatttcgggtataacaattgccccttaaaaagttcttttttagtaaaaagagctttttaataattatagagggcattttcgtcaagatcttttcgtagaaaaaacgcatcctttaattctggcagttgtacggtttcgagagtcattatgaatcgtctatgtcttcatatttttcacaacttccaaccatttgatttctcaatctatggctttcttgtcactggacttcgtgtataaaagggcggcttaagcttgtcatttttcacaatccgtttggctctttagtgagatccattttcagaatggatcatttcttttttgccaaaatatcccttctgagttcagaagttcatccttccaaactcataatacccagatgcaccaaccattttccatttgttcctacagacttcaagcctcaactggagccgaaaacgatggattctagggctgaggagcttccaaccaatccaaaccagggaaaccccgtagcctgccatggccgatcctcacaagttattcttgagggtatagatcttgtgagcgatctcaaaggtcctcctcaagctgatgaagaattctataggaaaattgggatggttcaggttgatctgggaagaaagttggcgtggtttctatcagagaatccagccaacccaaggcccaaattgttgggttttgtgccct

SEQ ID NO: 357226 - DNA, 539 bp, Cannabis indica
cacagatgctaagcccattaacaattgatcaccaacaacatgggctaacacagcaaagaactatccaatcaacccaagttttaataaaaccaataaaatataatgtaagcccaaataaaagtctaacatcataataatagcatttcaaatttcaagattaaaaatcttgatatcagctgttccacaactacaataaaactacagtacactgagtggtattctaaaactatgataaatattacatgtgtattaaaattatcaacttaataaatgagtcacattaaactatcttaagaagcttcttgaattcaattttttttttaaaactcaccaaatattactgatatgtcacgaaatttagctcataaattttaaaatgtcataaaactcgataagtgatattgtgggtttacctagtatagtttaattgtgactaatactaggaacaaaaaaattaaaataagtttagtggcttagttctttagagaaaataaaatatataatttttatttacactttttaattcttatattactttt

SEQ ID NO: 357227 - DNA, 876 bp, Cannabis indica
ctctatagatgatttatattgcatagggattaatttcccgttacacccttcaatgtattttatccttaaaaaacttagccacctataaatgatatttcagtgaattaacataatcactgaaatgagtactcaaccatttatctctgtttagcaaagctcgaaggaaatcatctattatagtgagatttttctcatctagaaactcgagaccagactcctatttgaaacccttggatatgcaaggaaaggggaaaactggctttaagtctcaaatggctgggggtttcgcagtaactcaagggacatgcaatcgcacgcatgaacattgggctacggcgacacaccaaccatttgaaagacccaaccagtattcccacacaaaaatgcacaaaaagcataaagaaagccctaaagttctaaacaatgggtcggagtgaccaagtacccagaattcctaaggaaatgtacacgggagtattcgagatgttcatctcaatacttgcgagtacttaaaatagcaagtaaaaaagatgcaaatattcaaagtactcttcctggaattcacgattgtacaaatttcaggtctatttttcctggaaattaatcagttctagcagaaaaataaggctatatgtgcattccctatgaacaacatgcattttctattcctcaaaaattcaaaatacagagtgtttctctcaaaatcagaaaccaaaattcgcaagtagttttgaaaactaaccttaaaattcgacgattctctctgtgatgtcattttactgcctctaaaactcaaaacattcaaaaagaaaggcaaaaatctgggagaagaatttaggtctttggagtttcaaatgaaatgaggaaaatgaaaat

SEQ ID NO: 357228 - DNA, 535 bp, Cannabis indica
agagttacaaaatacatcactggtagatcccaacccgcttggtcttggtagtgtgttatttcagtcttcaaagtagatgtttggccgagttcaaccagttgtcattgaggcaattggtttgaaggaagcactaagttggatcaaacaacaagggttcaaacatgttgtggttgagtcagattacaagagttattaatgctcttcatcgttcaactcatatggtctctcctttgggtttaattatttctgattgtcgtttcctagtttttgacataaataatatttcgtgtgtttttattaaacgatctgcgaacatggtcgcttattgtttggcgactattacttgttcttttgctcgtcgtagctataatggggggcttttccctgctgcttttcaaacaattatttcagacgatttgtctatctaatgaaattgtaattttctcgtaaaaaaaaaattacatttaaactaaaatataattaacaataaattttgagtattgttatgttttttttttttttttttaataatagt

SEQ ID NO: 357229 - DNA, 540 bp, Cannabis indica
aattctaaaaacaattcaagagaggggcaataatgcaactttgtaatatttcattttattttttcttctacttgagatacctatatagctcattctcaaaaagaagaagaaaaaaagagatatgtatagttaacctattttttttcttcactccctgtccctttattataattgtttcttatgtgagtttagttggagatagtaaatttgaagagaatatgaaattgaaagtgattaacattattactattttaatttaaaaagtgagacacacttaaaaatacaaattttttatattgatcccaatttctccataggagacggatttctaaaacatagtaacactattcctctagtttatattattttatttttcttttttgtgccacagattgtatatacatacagtatgtgaatctagataacactagtcctttagttttagattcattaggattgttcgtagttggtttgtttgggaatttatgctggtttctttttgagttagtgaaagacctatagattttagaatttttgctt

SEQ ID NO: 357230 - DNA, 705 bp, Cannabis indica
gctcaagcttgtcatttttcacaagcttctggctctttggtgagatccatctctagaatggatcatctctttcttgatagaatgtcccatctcaattcagaagttcacccccctcaaattcataactccaggatgcaccaaccatttttcttcttcatccgttcccaaggactttaaacctcaattggaaccagaaacgacagattccaaggctgaggagcttccgacaaatccaaaccaaaggaacgccgttgatcgttacgggcgatcatcataagtgattcttaagggtgagtgttatcccttgtaaatggtgatctgagtcggatcatacatattattaattttatatgttttttgttgctccattgaactttttctttgtctccacgggaatagacatagatcatgtgagtgatctttgatgtcctcctcaggctgaccaggaatcccggaagaaagttggcgtggtttcggatggattcgggagggaagttggtgtggtttctatcagaaaatctagccaacccaagacccaaacatgcatcagaagacctttgcgccaacctctttctggtatcgaggaattccttgaggctggaaataaggtctcagctgtaggaaatgggatcttctgatgaggggaatgaggtctgtgcagagaccaaggctctctacatgcaaacggtctttctcgagctacgt

SEQ ID NO: 357231 - DNA, 700 bp, Cannabis indica
gatggtcatctcacattcttgttcttcgagacgatctgacttttatacttagtttacttactataagctaaggtatgtgttactctactctggtgcctcgctattctcctttagcaacatatggtgtcttgttaatacactaaacaccagttcgtatattgattcctcgcctaagatcttacagtcaacgagttacaaatatactctgatactcacgcaattaatgagttattccataaatgatattgcaccgattcacattcccttttccttgacacttgtcctccagccaaatttcgggtataacaattgcccctcaaaatgttcttttttagtaaaaagagctttttaataattatggagggcatttccgccaaaatcctttcttggaaaggacgcctcctacgacattcttcctcgcttgaacgactttaacagaataaagatactctatttcatagggagtggtgcactcccaattcaggattttgtacagaaccctcaaccttgcaaggattctgtaggagacaggatttagttgaaatgcggcaagcccgaggttgtttacaaagtccttgaaataatcacaaagggggattatttcccctgcctgatgtgctcaaggctccaaatgcctataccagccaagcaacttgtactagtctcgccactggccccctcagaggtctcgcctgtaaga

SEQ ID NO: 357232 - DNA, 525 bp, Cannabis indica
tgtgtttgcttgcatttttattcctaatgtaaacaactatattttgatcaaatgtatagtacttttgagtttttccattgctcgcaatcttcctatttaagtagttagttatctaccaaactttttaattttcgagcagttgtcaattctgccacgctatagcagttatagtctgccttaagaaaacttaaatatacttcaatgattttataacttcgtatatttttaatttgctcgtatgaatagttagattatctatccactttctaggttcaagtacttttatcaaggcgtcgtgatgcctcgtttagcactttcttagctcgcgtgaaccgttaatattcagttttgtacgcgagttataacttttgattttcctttcccgtcagataggtttttaattaaaaattatagttgtttaatcccttctttgtcaaaaaggtttaatcaagttgttataactattcgacccctttttcgtcaaaaaggtttggtcagggagttataacagtttgactcctcttt

SEQ ID NO: 357233 - DNA, 577 bp, Cannabis indica
aggtgcctcacctaaagttaatgccagctcgattatgccaaggctagcaatgttatcccgggtgaatctgtaaagattcaccacaaaaggccttaacttggctttctcaagccccattttcttcagagtctccttataaatgatgtttaccgagctcccattgtctattaacactctcttgatcctcttaattgcgagttgaatggttatgaccatcagatcgatgtgagggtatctcatgttcttctcgtcttcctctgtgaatgtaataggggcttcctcggttttcaccttcttggaaggttctggggcaaagattgattgctcattctttatctccttcacatatctattttgagcgttattgctttcgcctgcaatatgcggcccttccgaaagaactaggatgtcctttccttccacaggaataggttgtaatccctggttgtttgggttattaggctaacggggctgtcttttcacatactgtttaaatggcctcaagcgatgagactctctatctcatctttcaattggcgacattcgtcggtcgcaagcccaatatctttatgaaatt

SEQ ID NO: 357234 - DNA, 547 bp, Cannabis indica
tatcacttactttataagtgaacatttgggttgagcgtagctcctatcacttattttatacgtgaatattctggttgagcgtggctcgcttgttattgcttttactttacatttttgagctctaaaatataacaaacacttaaagtaattgacacaggcatttacgtggaaaccctttcaggaaaaaatcatgggcgaagcatgcaaaaatccactacgtaagggggggcattgttttgccatacatgtgattagaaaatgtatttcttaaggtgtacggtgttcctgctattttctatgtttcttccatctgctgctcggagtttgtatgctccttgcccagctacctttgtaatcttgtaaggcccctcccaattgggtcctaatttgcctgctccttcttccatcgtgttttggaacactcggcgtagtacccattgggaggaatgaaaatataggaatgggaatgggaatgggaataagaataggaatggaatggaataaaatttaaaatgcgtaaaaagaattgataaaaaaatcattaaat

SEQ ID NO: 357235 - DNA, 708 bp, Cannabis indica
atatcccatttcagatagcaagtgggtcagcccagtacaagtggtacccaagaaaggagggatgactgtggtaaagaatgagaagaatgaattaatccctactagaacagttactggttggaggatttgtattgactacagaaagctcaacaaagcaacccggaaagaccactttcccttgcccttcattgatcagatgttagaccggttggcggggcaagaatattactgtttcttagatggctactctgggtatcatcaaatagccatagcacctgaggatcaagagaagactactttcacatgtccttatggcacttttgcttttaggagaatgccctttggactatgtaatgcacctgcaacatttcaaaggtgtatgatggctatcttttcggacttaatcgaatcatgcatagagatctttatggatgatttctcagtctttggctcttcattcgatcattgctagagaatttggagaaggtgttaatcagatgcgaaaagtcaaacttggtcctaaactgggagaagtgtcactttatggtaacagaagggatagttttgggacacaagatctcaaaagcaggtattgaggtggataaagcaaaggtgtcaacaatagagaatttgccccccagtttctgtgaaaggagtaaggagtttcttgggtcatgctggtttctaccgaagatttattaaggactt

SEQ ID NO: 357236 - DNA, 1006 bp, Cannabis indica
ctttggttcgtcggggttcgtcgggctgttgatttcgacgatctgcgattgggagtggaatggaagggagatctgcgattgggagtgagaatggaagggaagtgagaaggaaacgattgagatgagatagattttttttttacatttttttataagaataataagttaacggcgttaaaagaaaacgtttaaaaaattaaaaattgttctcttggcgttaaaaaaaaatcgttaaaccaagaattaccgttagataggcacttttaatatataaagatatgaaattagatttgaccaatttttaattgaatttggcgagtgacatctgatccaattcaattagtatataatttttaatatccaattaaatctaattattattaaatatttaattttatgtaatttgattggattaaattagactgaaaattgctcattcctatatatgggtatgtacgtgaagtgttgtacgggtaaattattaaaatataaatgaaaatttgaactgtgtcatgcatgtataggtacatacgtgaaatgcgtgtatgagtatttccaaaaaaaatagcgtgtatgagtatttttttaaattattaaaatataaaggtgtcgtttggtagcaattttgttttccaattttttaatcacaaaataaaagtcaaatttttgtttttaaaaattttgcttttaaaaaattcataaacattatttatttttgatggagtttgattaataatcacgatggagaaaatggaggctaagacaataatagaattatgaggccttcatagttattaaatttgtgcacatataggtggcgttttttcaaaaacatgctctataaaaattgtttttcacttttttaactttttagttgtagaattaaaattttaaaaacaaaaaaagttaactttcaatatttttttaaacaaatttttttcttaattcaatatttagtactcctaacgagacctgaacccaaatcctcccccacggccctggcgct

SEQ ID NO: 357237 - DNA, 513 bp, Cannabis indica
aattaagatttaaaaaaacagaaatgatatcgtattagtaaatcaaaatacaccaaactcttttaatttaaaacttgtagaaaaaactagtgtatcttactttgatacaaatataaaaaaaattaataatattttaaaaaataatttcaaaaaagacttaatcgtaaatgatgagtttaaaaagttaataaataaaatattacttttttagagttatcatttttttgaaaaataaaataataaaaaaataaaaaaaatgagtgaataaatatagtttatattaattaatattataaaactaataaaaaattaaagaaaagagagaattaaggaagggtaaatggcggcaaaacccccaatactttggttttagtttcactaaacccccacaacccatatttctgcgggtaaacccccaaaaccactattctgttagcaaaaacacactttcgtcgaaatttagctgttaattgctaggttggactggaccgagaacacgtggcacaattttat

SEQ ID NO: 357238 - DNA, 648 bp, Cannabis indica
gcactcgcagtatctcgctggttttatcctgggcgaggtctaaaacttcgagaagtctctcatggacataccagctttcattggaaatctgaatacacgtgtcctttaaataagagtccggtctcgagtttctaggtgagagaaatctcactataacagaagttttgaacaagatattggaagaggctccattatcaatcatggttattgccaccatcttgtttactatctatacctccacgaccaacgggtcattgtgcagaaacctgattttgatagcatcgcggacaacattccatcttcagttactcgtgaaaccttggtcgcctccgtcatgaatctgctgatgtatgcccggagaggctcgcatggtctttgcttgacttcgaccatgtctcctagatgcaacagaagttggcgagaggaggaaaattgtgcatggaattgtgaagagaaggctttccatgagttgaactttccaggggacagcttgaaataccattgctgagcggcttccgagagggtagcaggaaaaattatgtaacacacatctcctcgtactccttgcagatccatttgcatctcgaaatacttgaggtgggagagaggatcttctcttccagtgtacattttccaggttggcatttt

SEQ ID NO: 357239 - DNA, 677 bp, Cannabis indica
tatttttgtgtgaaacaaagtgtgataaaaaaaaaaaggatggaagtgataaaatgtcaactgggctttgaaggcttatttgtagtggaggcccaaggtttaagtggtgggatggcccttatgtggaagaacaaagaagagggtactcttttgggtttctcaaatcatcacatagacttaagcattgatgtaggagagggatcgaaatggagactcactggagtctatggtgaaccgaatcatgggaggcgacatgaaacttggaacctgcttagaacgttagccgctgagtctattttgccatggtgtgtaattggcgacctaaacaacgtactcactcaagaagacaagagaggaggtcagccctatcctgggttgaagccaaattggattgggcgctttttgttgaagcttggaatcgtctttttccaggtgcacgattaatcaaccttgagcattcttcttctaatcactgccctctatacttagaactggttgtaccagatgtttttactcaaacaaaacgtttttcgttttgaaaacgcgtggttgaaggagcctatctgctaggggtgttcatcaaaccgcccaaaccgctcaaaccgcccgcaccgcaccacaccgcaaaaaaatgttgtttgaaattctttgcggtgcggtgcggtgcggtcgcggtt

SEQ ID NO: 357240 - DNA, 554 bp, Cannabis indica
aaattgagagaatatagaaaaaatttagattgccaacaacttagaaaaaaaaaagttcaccactagtgcaaattacaaaaaaaaaaagatacatataaagttgttgcaattttgttgaaaaaaaaaaaagaattctttcatgtaattagaaataaaggtattgggattgtgtagaaaatattgtgggtgacatgattggagaagattatggtataggaaagccaaaatgacaatttcgactacctttaacctaagcctatcattacaagccttgaaagaccttatgattcttagttgagcattaatctatattagtggagaatagtaagtattgcaagcatatgaaattttgggttagtgaattgatgattgtaatcggcatgcataaagtggtttaatagttagttaattacattctatgatttcataagctaaatgaaaataaattgaaatttgtcaatggtttaatttaactgaaattctggattacatgcataagtgaattttttcgtaaccatgttattgaagctacttgaaaattactcatgttttgg

SEQ ID NO: 357241 - DNA, 726 bp, Cannabis indica
gtgaggcccattagtgtggctacttacttttttgcccattattttattctttatccatataattaaatcctaaacccttgttaaaatactataaaaggtacatgatgctctcatctcatctcatccaacaacaacaactgactattcaaccaacctaaacctagttttcattctctgacaattaatagatgagagacgccttctatagtgatttcgagcctcctttgttcttgaccaatttgcccataatggtagagtgtcatgcccacacatagcaagtcaagtactcaatcatagtgtggaagacggtggtaaccaactcgaaggagagaaagagatccaagctcaaatcttgttattactctgtgacagaaaggaacaaggattagagatctgagctgaaggagtcattattattctgttgcaatcaatgtaaggttttctaaacttttatgtgtttaatttcatcgtattagaaaaattcatatttagggtgttaatgaaatatacttgttagttcatctagatcctgctaaaataaatcccaacagttggcctcagagccatggtaatgatttacttccatgaaatatggattgaaaacgatgattttgttgatttggacgttttcatgtttgtttatgtgtgatttgatgattgtttgtaattaagaaattttttccatgaaaataattttatttatattctgaaaataatttatttgga

SEQ ID NO: 357242 - DNA, 429 bp, Cannabis indica
tttttttttgggcccctggactaggtgggccctaggcataggcctagcccgcctatgcccagggccggccctggctattaggttaggtactgattttttagcataaatattgattgtttggttaacgaattcatttagtaagctataatagaaaaggtaaaactctaatgagattacgagatttctatgataattagttgttttattcattattcttttagtgtaattttgttattgtgaaatctcgcagcacatacatatggatttggacttgtatacaattttcataagtagtgttaaaactatttctaacaacaaatgtatgcaaacttggtgaatgtttgcattatttataagggaaatatctcatagacatgatctaaaaaaatttaaataattgatgtttattatttaagattacatatttta

SEQ ID NO: 357243 - DNA, 879 bp, Cannabis indica
ccctctccttcccttctctctcttcgaactagccaagaacaagggagtttgttgctaaactttggtgatttcagcaagggattcaaggaggtttaagctaaggtaaccctagttattttctagttgtgttttctcaagatttttattagtttcaagtagtgattttacaaattggtggctgttagggttaggaatgtttagggtttgaatatttgggttcatttgagttgaatttagtttctagcagctggttttgatgtttggattaggttttgtgcaagtttgagctttgagttcaaagctttgatctttaatggcataatgtgattcattgagtttttctgtgaaatactggttggaaaatattgtctatgcattatttaggtactctggaaggtttggttgcatttggtggaaaattgagcaagaaatggaaagtttggggtgaacaggtgcaaaccggttagccggttttactagtacctctaaaaccggctaaccggttttggcagggtccccaaacgcttcattttctcgatttttatccattttagtgccgaagttgggtgtttccctatttctagagtttgagtaacctctagagagtataacagaacctagggttatgggttcaggtttcccaaattagggcttttgatcgtgtgatttacccgattgcattatgtgattagggcatccatctagcgcgagactttccgttcaggtcggccagcacacttgaatctggaaagaaggtaagagctgtatataatgtgtgatattaataactgagtgtatgtatatgttatgtgtatatgcatgcttatggtttagttgcactaccaacacttgtacaagttatggtacagagtgcattgg

SEQ ID NO: 357244 - DNA, 727 bp, Cannabis indica
ggaaagtgcaaaagagtggacttgatagagcaaaccatttgatacattgaggcctcaaaggcaagctgacgcttttgatccttcttatagcgtttggcaaaagattgaaactcagtaaacatttgtacctgccagctggaatccgagagccctttgaacataggagacttgcctttactcactgtggttcctgagggagtggttgaagaaggcttcctgttgaccaccgagagaaagctcttactgagaaccggattctgaacttgataatcatgcgttgtgagtggagggtgagcatccataagaactcgttgaactaaacttggaaatggtagcttgttacgagtgccagtggattcagaggcttccagtacccgttcaaaaatgagcgagggcagatcaatggacacattagtgcctacagcatacaagaacttgccaatctcaagtgtaacagcagacaaatgagaattaggaaaccaattgtacaaggctactcgatgaagaaccctatagaatggagtcaagtgagtgaccagaatttcctgtttgtcccaaatatagtcatccctgccagttagcactcgacccatcaaagattgatctggattgaagtgtttcccatatgttggattcctgatggactcaacttgcaataaggaagcaatagtggaaggaccaaaaggaactctatgacccctaacaaaggcactcacacaccctggat

SEQ ID NO: 357245 - DNA, 656 bp, Cannabis indica
gtattttttaacttgaaatatactaatatgtttttattttttttaatatcgaattatttgaatagtagaaactaacaataataattataaaaaaaaagtgaagaacggtttggatgggttaacccgaccaaaccgacgaaatcattgggcgagttgaactttctctaatttttgattgggcgggttatgattaaatatttgcaacccgatatttatatggggttgataaaaatatgctataactcgactaaaccgaccgccatacacccctagtgtagagtattccctgctacacttttagaagtcgcacgacaatggtattttaagttaccaccaggaaggtttaattcatggaaagccttctccttggagttccatgcacattactcttcttctcgccaactcccgatacatttagaagacctggtcgaagtgaaacaaacactaggagagcctctcagagcctatataagtagattcatgacagaagctacaaaagtagcaaggttaactaaagaagggaggctgaccgtaatactgggggcattgaagtacttggagaactatggaaggatatcaagaaaactggccctgtaggatctatggcagagtttttagaccgagcagatgggtttatcaagctcgaagaggctatt

SEQ ID NO: 357246 - DNA, 577 bp, Cannabis indica
tttcccttattgaatccgtgtataaagacgaggcccattggagctgaagagaggccctatcatagagaacaaagccccacctacgttatgagcaacagaattaaaataaaagctttacagaaatgacactaatctaatcgggataagtaagaactattttttttttgttattttatattaattaaatataactgtaaaataattttaataaaaagtacttttttttataatcaatgtaccaaatatatcttcacataacttatcaaaattagagttcctaacaataagaatatgacctataaaattaagtatatattaaagagtaataaaagaaaattaaaaattaaaataagtaatgaaaagtaagtatatagtataatttcctcaatctaacctgtctagctatgtgatgaactctcaaaattattgggctttgcatctcatttgcatatgatgacaaattgggatgagaagtttactcaactccaaagattattggtattgagaaaattatattatatacccattttattttatttgttttaatttttatctccatttttatattcttaaaaat

SEQ ID NO: 357247 - DNA, 750 bp, Cannabis indica
ctgaagttcactccagcaaggcacacaactaagaaagaatatactcgaatatgtgcatgctgatctttgggggccatacaaggtgcctactcacttcggtaagtaatattttctttcaatagttgatgactatagtaggtatgtttagacctatttgctaacaaataatgatgagtgcttggaagagttggaaaactcaagtggaaaaccaaatagatcttaaaattaagaaccttaggatgaataatgggttggagtttattaacttcaaatttgacaagttgtgtcaagaatttggaatcactaggcattgaaccatagtgaagacctcgaagcaaaattgtgttgttgaaaggatgaattgaaccctgttaaacaaagttagatgtttattattcagatccaaattagaaaaactattttgggagaggctctagaaaccgtaacctaccttataaatagaagcccaaatagagtgatagacttaaaaacaccttatgaaatttggtacagcagaacccctaacctaacacatttaagaatatttgggtgcacaacatatgtacactaatctattgacaagctggaacctagacccgttaagaaaactttcctaggttatgccttaggtaccaaggggtatagaatttgcattttcaggaagggtaaaccaaaagttgtgattgctagaaatttgttttcactgagttggaatatcctcacttgacctctgggaaaggtagtgtgtct

SEQ ID NO: 357248 - DNA, 744 bp, Cannabis indica
aggaaaacactcactggaggaaggagtatagccaatattacttcaataaaagtttctgcacccatgattatgtataaaagttgtataattgtaaacatctatttgagcaataacaatataaggaacttcaactatattttaaaacaaaatgagataggtgtccgttagatgagtctttcggtgccacgtaggcggatgatcttacgcgtgtacaagatgatagtcaacattcatttagattcgttatatacataatatatatattatcaaggaccacctagaagtaaagtagtctctatcttcattgcatttttgacacgtgtaaccaattaggacgttccatcaacattttatacaacatgacaaactctccagtgagagccacgattacatgaagttgtagtttggacttttgcttcacatggataaggatattggttataaccagaagttactactttagaatggtagtattttgatcaggtgttcttagattcccaatcctaaaaaaacaaaagaaaacactactaaaaaaacactacaacaacaccaaaaaaattaaagaataacaaaaacaagcataaaaaaaatagaacaaaaataatgaaatcacacacctctacaacccttttcttgattgcacaatctttactgaagatttaccctttccctaaaatttaacaaaacaaaaccaaaacaacaacaatacacaccatcaaacaaaacagaaaaacataaaataaa

SEQ ID NO: 357249 - DNA, 921 bp, Cannabis indica
agtctgtgataagcatgtgtgatagattttgagagttcctgaaataagcatcatttctgaatgagttttcatataataaaagttattagaatattattaatgtggcactgatgcagtttaaagattcaagtttgtatattgcttataatggatggaagagctatgctgatccaaagtgtagaaatattaaattccaagttgggaattttatcttcttcatgtggttctaatgaggggaattcaaaaattgggaaaaaaggaaagtcaagtcctaggttaatcggtctgtttgagtttctaaaaagggtaggtcgggtagcttattagctagccatactctctgctttatctggagtttccaacatgtacttcaatgtttttagaagtatgggatagaaacgatccatatacggagttaagagaatattgaatttcaaatagacttttcataggagtaacaatcgatacagattttctgaacagaaaagagaaagtgttgtggaacaaagactatatcgttagttataatgctgtgaaagaacaacaagattgaaaggcaatttgggagttaaaatcgtagttgcgggagctctatcccgagttgtttgaataaattttgagaatgaaatttctataaggaggggatagttgtaatatcccaaaaaatatattaatattttaattggacatattttattaaatatgtgatgaagtgcgcattagagtaggattataatcctacttaaactaattatgatttgattagtgaaatataaacaattaaagcgtgatttattaattatggagattatattagaatatgtaggtatcgtagatactatagtttgaataaaatattttcgagcctggcaactgtggaacttgacggggaagtcaaaaatgttacgataataaaagatg

SEQ ID NO: 357250 - DNA, 1594 bp, Cannabis indica
agggtttgattttgttcttcaataatttagaggtttttagcaagtttctagtgttccaatccaaggtataactttcttagactctcctttatgtttattttaagtttttagttgagttcaagcatgttttcttgagatagggttctgtagaagttgtcggtgtttgatattgttttctaaagttagattatggttatttatgttgaattgagctagttttggtggttgttataaggtttgagcaagctttgagtttaagaactcaagcttgcctctttaatggtgaatcttgattttgagcttgtttagttgttttgttgcatggaatatgtttattggggtatattgaataggtctggaaggtttggttgagtttgggattgttttgagtgagacttgtaggaaccgaaattccagttggttcccagaaaacccctcagaactggaattccggttggggaaccagtcttccggttggggcagttttgggaacccttgtttttcccatttttgcggtatttagggtattgccatgttattttttgatagggaaacttttagtttcaagtttaagtccccgggaagtgatttagtgtatcactcaccagttttatgaaaaatgtgatttaggggcctgtaattcgtcaagcagctgttccactaaggttggccgacacaactaaattcagaaacgaggtaagattagtataatgatatgaatttgtatttacctgtttagtgtgcatgttagttaagcctattagattacattagaaatgtatgttggcttaagtactattcgacagtatcacatcggtacgcctagagtatgactagcgtaccgattataggctgatattatggtcgatagtatcgtactacttgacagtatcacatcggcacggctaaagtatgactaccgtaccgactatatgctgatattattgtcaatagtaatgtcgtacgaacgctctagactcagcaccatgttggacacggggatagggttatgattgggggtatcggcgtctgatcatcatctaagttaatgctatgttattatttatgcttttcttactgagtctgttgactcacagtttctatttccatgtgtaggtaagggcaaggctaaggctgagcagccgtgagagcgagcagatggagattgtacatgtcagcgtggttaggcctggagcgtacggtctttgggacatcaggggttattttgtatagttgctaagtggtaaacttttgtatattcacaatgaaactttgtaaatattttgtaaacgggatcccggatttatatatgtaggttattttatatttctaattaattaagcaaaattttaatgaatcacgatttttaataaactcgttgattatcaacgagttgcacagttaagtttaaaatcacgttaacatacctaagatcgttagggtgttacaaaagagttctcagaatagtccaagtggatccctgtcatagaatactaaactcaaatctcatgcattaacatacactttgaatccattgaaagaaaatagatattaatagcttgtgaaagtaatactgtattattcaatgtattct

SEQ ID NO: 357251 - DNA, 688 bp, Cannabis indica
gtctaatctccctagctagatgttatccttactaaatcttttacaatttgaaagatttgtcaagtttttacttgaccataatttacaaaagtttgaaatgatattactttgaatttatttaaagattattaagcatttttctttctcacatcatatgtctagacaaaatctcttctaagcacaatgtagattgaactattactctcatattattttcttcatgctttatgctaactttaagattaactcaaatatatagtgaaatacataatcttattataaataaattttctcaatatagtgtacttgatttgattcataatttgcaccttgcgagaaaagtttgttagttatttttttaaatactacttactgacatattctagggtaaaacttttgtgaagctgtggttgatttttttcaagtataatatatgcgtaaaggcttcaattctcaaaggattttgccggacaactcaaggcacatacaagtctcaaaggactttgcccaacaacaaactatgctctctacaacactatgagaacactctaaaaaaagtgaccacttttaatagagttcaaatactcatttgaatatttgaaaattatccaccaactccatggctatcacaaaatattttattagatgtttatgaacacaaataaaaagatcatacgaccaattagaa

SEQ ID NO: 357252 - DNA, 481 bp, Cannabis indica
ttcaaagaaattaaacaccaatttccttcaatttttcgagggataacatctagctctcatcatcgctctattttttatgttttaattagtattttagtttttttgaaagagaacatcagttcaagattaaaccagaaaactaggattgacaggggcaatccttccccaatacaaaaggtcttacatagcctttcattcctggcttgaacagccaagctattaacaaaagtcaggaaatctctcttaacaaacactaatttgcagtccctgcatttcgacatctggtccagaatatgtagaaatttatcagtcaatttccaatccggacatttccttttagcaaaagctgtgactgctacttggcaatccgagagaatcactgcaccaacccactccttctgaacgattacctccacagctagaccaatggcactcatctctgcctcaaggcttgaggagccttccttactgaagtacccgt

SEQ ID NO: 357253 - DNA, 551 bp, Cannabis indica
tcaatgtcatctccaatggttgtttgaacatcaatggcgagcgaaacggttgtgctttgaacgccctggtcagctactgaacaggtattcccaatctcttacacaccaggcgcaatctcatccacaggagtcgtcacaccacgacccgcaattgatggctgtccgagattaacggctggcggaacccttgtgtttccaggattctacagtgcatgatccactgtctgtggatttgttggatcaaccacgcccctacaggtttgtaccaccatcgtacttgtgattaaatttgcaataaagagcgatccttgagttcagctctcaatgaaagcaccaaaatattgaccttgcttttagccaacggcagtgagtctaattttgtaagcaacaagtagtttataacgactgaaatatagtaaagcaatctaaagacacaggaattttatagaggttcagctctgagcagtttggtaatagcctaatcctcgttatttgtattaacttaagaaaaaggagaaaggttccttttttatagctcttacaacaatatc

SEQ ID NO: 357254 - DNA, 578 bp, Cannabis indica
aaatataaaaataaaatagaacactattacattacaaatggacaaatcaaaacacaacaacatacaaattacaaaaacaaaaacaaaaaaaaacccctaaaaaacgaaaacaaacgactgaccttggaaactttagctagttgaatgaactcatcgtcaagttcaaaatcgaaatcagactcctcctcaatagctcgatgatgtttagaaactctcttagaaggagattgagcaactaacttgtgtttggaaggagcaggagaaggagttggatgattgtctttcaatttttgcttccacattgtagatttgggtaacttagatttacaggtgtttcgggattttttaactacagaggatgtagacttagagtgtgtgacagccatgaaaaagaaaactaaaatagaaatttataggagaaaatgcacaacggttagaagggaaaaaaatttagagagaaattgggtttcaaacaaaaaatgaaaattgatcaacaccccacaactaaaaaagctgctcaaaaccaaccactctcaaacagatttaaatttcaaaaactaaaaaaaatgaatgaagaa

SEQ ID NO: 357255 - DNA, 533 bp, Cannabis indica
tattttattcctaaaataataattgccaaccatatctattttaaaattagtttattttgttattttaattttattaatgtaaagaccgcttagcttaaatttggaaattagcagataattagggtttaattatgaaaattagttattaattttaaattattaatttatgatgatttatttgaattcagaatgcactttatatgttagatatagaaatttcataattttgcatgttcagtgtccggcaacattggaacgcggtgtatggcttagttgaatcacattttagtttagcggggtggtgcagttagactttgggaatgtcgggatttaagaatttcccaaaataccccttagtgatcttttgatggcttttgtgtgggaaggacatttttagtctttttttcccacattgtaatttgtcctttagtgagggttctaatttattttaaatcatatttttactactattagtagatgattttaatttaaataaaacaaatttatagtattcattttacaaaaaaaaaaaa

SEQ ID NO: 357256 - DNA, 1150 bp, Cannabis indica
tacggtaccctttcgaggaagaccatgggaaaaatcccacttcaatccctgggagaaagaaaaaggtgcaggatccgcggaaagtccgctcagatttctcgaaagggaaaggtctacagaggggcaggctccctaaagtgagtcttggccctcaggatcgagaggaccgaaaaagcgtatcaatgcaccaggagcccgaagagagaggaaggaaaaactagagatacccttcagttgacttaagacaaaaatcaacaaaaaacacggtgatctacgagatcacctagataaaaaaaaacgtgtaccagcagtctccgtagaacactaaatgagaattctggctgagttggcaacactgcgcaaagacattgctttggagtctcccgaaggaaaaacgggggacgacgtcagattacgattgtgaggaccgggagccttgagcctggcacatactggaagcagacctccgtaatattttaagatgcccgagatggcagcatatactggagattcggaccctagtgatcatttatcccgtttcaaccgggtgatgacagtcatgagggtcagcaatgatgccaagtgtctatgctttctgctaacattaagtggttctgctgagaaatggttcaaaaatttggaaccaggatcagtggactgttggaacaagctgcaagtcagcttccggagacagtttttcgcagcaagaaagattaatctcgaacttagcaccttgactaatataaagcaattgcctacggaaaccttaaacaacttcataaaaaggttcaaagaggaagcttcaaacaccaagaaggtggatgacagacaatagcttgcccttctccaagctggaatccgtacggggaccccaatttgaaacgaattacaacaagagggagcaaccaatctctaagatttccagaaaagggtccaaaagtacatcaattgggaagaagcccagatagtggcctactgtggatactattcaaccagagtctcaggatatgcacccagagcttagctttcatgagccatgtgttggaaattattttaccaggatcttagatctactcacaagtatattgtttaacaccctaaatatgaactttctaaaacgatgaaatgaacacatataaagtttaggaaa

SEQ ID NO: 357257 - DNA, 634 bp, Cannabis indica
atacaacttataatccctgagtctctttattacaattcgaagatgatgctcatgctcctcttctaacagagagtacacaaggatgtcatcgataaacaatatgacacagttatcgaggaaatcctagaatactatattcatgacatccataaaaaccattggagtatttgtcaatccgaatgacattaccagaaactcatactgcccatatctggttcgaaatgcagtctctggtatatcttgttcctgaattctgagctgatgataactggatcgcaggtcaatctttgaaaacacagtatttccgtgaagttgatcaaacaaatcatcaattttgggcaatagtacttgttcttaatcgtcaatttgtttagttcccgataatcaacacattatgagggaaccatccttcttcttcaaaaaagaattggagctccccaaggcgatacactgggtcaggtaaaccctaaatcaagcatcccttcaagttgtatttttagctccttgagttttgctggagccatgttatacggtgcttttgaaacaggttcaactttaggtgccaagtcaatcacaaaatcgatctctcgttgtagcggtaatcttagcaactcctcaggaaatacgtcgagaa

SEQ ID NO: 357258 - DNA, 706 bp, Cannabis indica
aattcattgaataagtcaccgtcaaactaagttctgttatcaaatacaatcttaatgggtattccaaacctacaaactatgttttttacaacaaagtcgaggactttttgtaggttatggataccagaggttcagcgtctgtccacattgtaaagaagtcgacagccaccactgcatactttgctcctccttgccctgtgggaagtgccccaattaaattaatcccccatattgcaaatgggtaaggcaaggtcatcatcctcagttccaatggtggtacgtgaggtatatgcgagaatctctgatatttatcacacttgccaaattcatgggtgtccttgtttctggttggccaggaatatccttgtcgaataatattttttgacaagctttgccaatttgcatggtccctagaaaagccttcatgaatttctctgatgatctcatttgcttctgtgggaataacacagcgtgggagaggcattgaagagtcccttctatataatttgccctctactatcgtgtagcgaggcactaaatataggagttttcgtgcctcgtttttgtcaattggaagttatccgttgagaagatagttaactataggtatcatccagggtaggtgagctatctatcatctcaacttcttctttgtcacatatacttggctcatttaacatctccacaagaccaagttcaattcatc

SEQ ID NO: 357259 - DNA, 770 bp, Cannabis indica
ggtgctctactgtgcaggaaagggtaagattattgctgattagccatgagtgcaggagctggatgaagaatgtacatgtccgggccatatcagaccaagcgggttggggtctgccagtgttgtgtttttgaaactctgttttgccgcttaggccgaccgaaaggaaaggacttgtaataatattttgtaaatgtttttgggatcccaacatctgtaactttcagtttataaagtttaaagtattacaagtttattttcattcctattgttattaaagtttaaattccgcgccatttttattagtaatcctgtttaggggattagggcttaataagttacttgggtagcgtgcctaattatttagggtgttacacattgcatgagctaagtcaggtcttgaacacaccatggagtacatgagactcccaacacaacttgcatgaggaacattgctcatcttggctctttctgcatcttttttttgtgactgagatgcagtcaacttgaagtgttgagcaagttgtgttgcaacaggtttgcacttaccatgtcaaacttgttcaatactttctgcaggtaggcagcttgagaaagtactatcatgccaggtccaggtctctttgtgtctatcccaggaattctctttgctttgcccagatctttcatctcaaactcatcactgagtttccttttcagcttgtcaatctcttgttgggttttatgccctaaataaaactccatttcaatgtaatctctattattcaatatca

SEQ ID NO: 357260 - DNA, 757 bp, Cannabis indica
caacgagtttcaaacattctgttgcgcctctctacagtttcacgtggtagttgtctttctagcatccctgaacttgactcgaagcaaccatccatgtctcctctttaggatgtccagtattcccatgaagagaagcaaccaagtcttaactccatctcaacctactgatcctctttaaaagactaactggctcaacgacatcttgttccaacattagaaccatctcgatccgtccacacgcctacatcctctctaggataggccaaccaggttcacctcccactgagatgaacttggctctgataccaactgtcacgggatcaccttttcaggcagcggaacacccgtgcggcaccttgacttctctaagccaaggtcagccttccaaccatccgagtaacaatggactcatttttcgctcgaccatgtgcctcgtgcacacttccgtctctcgaacaactcccaccgagtcatgctcgcaagcatccatgagtgcttccatgcatcgaggctctctagcccgaataatcgcactgtccatatgttcccaccatggtaagacaaatccatacaccgattctcaccttgtcactcgtgacctaggtagcatgtgtagcaggatgccaacaccaagttaacgtgccaacgcttctatcatgccccattcgatactgtttgaatagtctccctcgtcacccaaggactcccatacgtccatggaccaatcctcaaggcaccatgccttcacgcatgttgg

SEQ ID NO: 357261 - DNA, 1221 bp, Cannabis indica
gtagtcctttcgaggaggaggaagaggaggaggctgcagccccaaactttgggggatataatgaggctggggagccagttgacgcagatggcgacgtcctggtcgagggcgtggattacgtcactgaggaacttattgccgcagttcctcacaggaggcagggtgctttgggcgccaggtgggtgagccctccgtccaaggtcactgaggcacgtttacgggatctcgaccagggcggctatctggctgagctagactgttacattcccgcctctaacaatcgagccagaaatcctgagaggggaatgtgtgcctagtcgggtgttcctgctaaacaaggggtactgctggctttgcacccgtactttaggaagatggcaaacttcttccgtctctgtccgacccaattcactcccaaaggcatcaagtatctgtctgccctgttcattccctacgccattcagaagtgggatataccttctccccatgaatttagttggttttttgacttgaagtctactcccaagcaagtcaggtcgagatacttctacttttctcagttagactacaagtggttgaggggcactggggacaaggccgttagcaaaattgggcattttgttgacgagtattacatggtggatggcatgggtaccacttacactcggttccaacagatccctagatatcaccgcccacccttcacacttgctctcagggatagagcttagaagcttgctcagctgccgggtgctgcccggaatatcactttgttgacctccgatgacaactttgtggagtacgggctttactcgaaggatttcattcctcatcttgtgaaggagaaaaagaggaaatccagtgctggtcgggctgagggagctcatcaagagaatgaactcattcaacttaagcgtgaggctaagttgaagggaggtgcggcggcaaaacagtatgctctggagcattctaagcaggaagacaaggtagaggaggaccaggtgactccgctcaaaaggaggaagaagcttcctgccgagcataggcccgttgaacatggaattggaatcagggagcccagtctacctgctcggccatccactcctgtagtaggaaaggggaaggtcgtcctggaggagataagagacttgtcaggtgatgatgagcctttaagtcttgctcgggcaaacgcttctttcgaagcgcaagatactccgtctt

SEQ ID NO: 357262 - DNA, 944 bp, Cannabis indica
ttcaatggaaggtaagaaatcaacatgtgataatacaagggtaagaattgtgataatttgttatttacttattttttatatagtataatatatattcacatatttttctatattgagatatatgtatataaatgagttatatatatatatatgtggatgtatatgtcatattaatatagtgatatataatatgatatttgaatatgttatatgttgatatgtatatgtgagatacataatatataacatgtatatgagttatatatattatgtggagataatatatattataatgagtatatgttatatgagatgatagtaacatacataatatattaattagcataaaatttgagagataattttatgcacgagagttatatatattattactatataataatatattattactatatggttacaacctctccaaattttaataatattttaatactgattcttttctttaatttttttttttcactttagttaattttttttcctaaatttttttctttttcctttttaattaaaaataattagtaaatttatttttattttaaatagttagttgatttttttttctttaaaataaaatattttcatgatagtttaaaaaagataagttgatctaataaaaactagtgtactcctctcagtagaacctttatttcggcatccaaaaatatttttgatttttcaatagaccacttgtaaattttcaaaaaattataaataatttacaatgttaacaataaagttcaaatattttattgtcatgagcaactgttttttcttatagatgtagcaatcaactgtttgaattttatttacggcactgtaaactattcaaaatttcatgaaaatttacaagtagttctaagtaactacattgtacatgattaaaaaaataataatttaaaaaactctacatagatgac

SEQ ID NO: 357263 - DNA, 1067 bp, Cannabis indica
ttactatgcaatctttctgcttatatccattgtaacgagaagggaaatacttcctctccatgctatagccctataaataatgatgcatgttcattgggcaaagggtcaaaagattttacttgagatattatctaagaattcatattcagagatattgttgtaagagctataagaaaaggaacctttgtccttgttcttgagttaatacaaataacgaggattaggctattaccaaattgctcagggctaaacctctataaaattcctatgtctttataatgctttactatatttcaattgttataaactacttgttgcttatgaaattagactcactgtcgttgcctaaaagcgaggtcaacacctaatttagcgtccatctaaacaagattaaaataataatcataagattgaacatagaaggatagacacaatttgatataatgaaaactagaaattaacattcaataatgaaattaagaattcatgtttcgggttttgaaataacccttaactaaaatcataatatatattaaagtagaaggagaacaaaagagctataatgaagaactcttcgaaggagatctctgtctcttccttgctctctctttgagtttctctctctaatttgtaggtttagaatactctgctatttaagtgtttctaagtttgttttgagctctgaataacctgtttatataggctaacaaagttacataaaagatactaaaaagatttataaacttaaaaaaataaaaatcgcaactctacttgaaaagctatattttttttcgcttatctttttatccttttttttttcttctagaaatttcctcctgcgatgactgatagtgttttggccatatctctctcgatattactcggaatcggacaattcaaaatgttccggagagataagaatgagatctaaaattttcatgtcgagctctaagtccaattatgcttctaggatcatccagtattataattaagttccaccttgtaaaaccgagcttgtcggcttttactattttccaccacaatatgcatacatccctccaaatgac

SEQ ID NO: 357264 - DNA, 818 bp, Cannabis indica
ttttaccccttgaactttgaccaatactccacagggcacatatataccaaatactaagggtggacatgcgatctaatccaatctttttttctcatccaatccaatccaatcaacaattagattaagaaaatcatcatccgatccaatccaattagatctcaaaatcctatccaatccaattaataattagattggatcagtttttttttattagatatccaattacacatctaaattacaatattaactaaaaaaatacgtaaaaactaagtatcaccttttatttaagtttaatacttcataaacatattatcgttacaagtaatgtagccaaaaattttaaataattaaaacaacaatatctctaagtaataaaatagaacaaaacatcacgaaaataaatacacaaaataaccaagtgttataaatttaacacacaaaatctaataaaaatgtaataaatatatattatctttttcattatataaataatttttaacatatataaatgtaattggattggatcggtttttaattagattttgagattaacatccaataaccgatccaattcagttagaatccaacttttagcatccaatacaattcaattgtaattggatatctaactttttgtaattggattggactggatgggttcgattcattagattggattggatgatgcccacccctacggcatatatattacagtcctaatgtaactgaaattaaaagcgagcccttaaacagaaaatgtcattaatgttcggactaagccttaaaaaaagttctaaactcgatttttaactcaaaat

SEQ ID NO: 357265 - DNA, 694 bp, Cannabis indica
agttttttgcggtgcagtttttgcggtattttagtatcgcggtgcgggtgcggtttggaaaattggaaaaactgcatgtgtgggttggtttgaaaaaatggttaaaaaccgcaccacccgcaccgcgaacacccctaattctgacaacttttctgacagtggtagttactctgacgactttttcgacaccagcagctactccagcgactttttcggtaccgacatcaaactctagaaaattcgtcggaattggtattgtcgctagaaaaattatcgaaaaaatcaccaggaaagtgattttttggtaatttttttgacgatgatgccaattaagatgaattttccagtgctggcagcaactccaacgactgcccggtgccggcaccaactccgacgactttttcggcgccgacagcaaactttggtgccttttccagcattagtgacaactccggtgatcactgtaatttcatttgttttatttttttcaaaaaatatgaaggaaattttaatatcttttatggtaattcaatcccatgtatgttaagtttttattttaaatgctatattttttcctattaagtttccttaccatatttatcaaaacttgctttattttttctatatttatggaattacccctttttattgggataattatatttttacggttttttataaaaacaataaaaaa

SEQ ID NO: 357266 - DNA, 525 bp, Cannabis indica
gtcctcgaatcaataaacatgctcgtcttccttttgagttagttcattctgatgtttggggtccttctcctattttgtatcaacctggatttaggtattttgttacttgtggatgattattctcgtgtaacttggttatatttaatgaaaaattgttctgagttgttttctatattttgtgctttttgtgctaagatttgaaatcaatttaatgtatatattcgtacttttagaagtgataataccaaagaatacacatgtgctcaatttcaatcttacatgacctctaatgggatgctttatgaaacttcttgtgttgatattgcacatcaaaatggtgtcgcataacgtaaaaattgacatcttcttgaaattgcatgtgccctcttatttcaaatgaaagttcccaaatcttttttagccaatgtagtttccatggcatgctttcttattaatcgcatgccatcctttgtacttgttatagtgagatttctctcacctagaaactcgagaccagactcctat

SEQ ID NO: 357267 - DNA, 1129 bp, Cannabis indica
cttcggaatttcatgcgcaattcgcctcctcgcgccaactcccattacatttaggagatttggtcgaagttaagcaacgaccaggcgagcaactccgggcatacattagcagattcatgacggaggcaaccaaagtttcaagggtaaccgaggatggaaagttatccgcgatactggggggcatcgaagtcctcagtgaactttggaaagatataaggaagaacgggccagtagactcaatgagtgatttccttgaccgagccgaaggcttcatcaagcttgaagaagccattcaacgagcagaaggtgaataaaagtcgggcaagtcaaaagctccttccactgggacatccgcccaacttcccaactacccaaataatttaagctcaagtggcaagcattccagcaacaaccacaagcaagggaacgggaataaaggaaagttcactaataaatccggacagactccccgggagaatcatgccaaatacactgcattcactactcttacaaaagatatagaaagtgtatatatggcaacccagtcattggctccgtacaagaagctcggacccatgaagagagataccaacaaaaggaacatgacaaagttttgtcggttccacggagactacggccacgacactaacgaatgctacaacttgaagtgggaaattgaattcctaataagggaaaacaatctacacctgtagaagtatgtcaagactgaccaaggtcaaaacaacaaagatttgctacctccaccggtagatggacacttgcaagtcataattggaggccctcacattgctggagatttgggcaaagctcaggagaggtatgccggaacagcaaaacacgagcaagaagaagtcatcctggtcgtggaagaaaggaagcccaaagttacatgagcacgagagccgaccataaccttcaacgatgaaaacgctgtcaagattagatttccgtacaacgacccgctggtcgtggaagtccagatagccaataaaatggtggccagaaccatgatcgacaatggagcttcttcaaacatcttgttcaagactgcttacgaaaagatgggactccaactcaaggatctaactccatgcctccagcctatcta

SEQ ID NO: 357268 - DNA, 692 bp, Cannabis indica
tctgcgagttccccagagttgaaataggctgctattggcatcatccagttaggagatgtatcgatcatttcgatttcttccgtgccggtgttgctaggctcttcaagaaactgtaacgggaccaggttcgccttgtcacttatatggctgctcgcgaatcgggctagcgcatctgctgttgtgttttcttctcttggaattttcctgaggctaaagcttttgaattgtgctagcagatcatttattttgcttacatatgctatcattttttctccgcgagcctcgtattcgccagatacatgatttaccactagctgttagtcattgcagatctcgatctgttcgaccttcatctccttcgctagtttgagtccagcgattagggcttcgtattgagcctcgttgttggaggctttatttgacagctgcatgcaggtgttgtcccccaggtgtgacaagggcaagtcctgcgccagatagctgatctgtggccgacccttccaatgcagcttccaggtcggcttgttttcagtgttgctcggctgcggtgttgactcgagatcgccttctgggatgctttcagtttttcttgtgcattccaccacaaagtcgaccaaggcttggcctttgatagttgttcggggttggaagttgatttcgtactgccctaattcaaccgcccacttgagtaa

SEQ ID NO: 357269 - DNA, 598 bp, Cannabis indica
attactttcacggaagaagacgcaaatatggtgtccgttttccccaccatgatcctctggtcatagagactcccatcgccaacaagatcatggctaggatactatttgacaatgggagttctgtgaatttattatttaaggaagccttcacggtgataggcctcacggaccgggatctgtcgccaagcgattctgagctcacgggattcaacgaaaccacacttatcccaatgggaaaggtgaggttgccagtcaccttatgtccggacacaccccagaacacttttaaatactgcacattcgtggtggtagactgcccaactgcttacaacgcaattcttggccgaccgaccctagtagactttggcgcagttacgtctatccgacacttgtgtctgaaattccccaccaaggaagctggagtagggaccgtgagtggcaatcaaggtgaggccaggcaatgttacaatttcgcggcccacttaccagtattgatggtccgtgaaggcatcgagccagatttggtagaagaagatgagttggatccccatgtgggatctgaaaaaattgtagaacctatggaggacgtcgaggaagt

SEQ ID NO: 357270 - DNA, 822 bp, Cannabis indica
tgcctgcaaaaggaaataaatattaatgatgacagtcataaatgcagcccaagcgcctaggggacgtgccgttacgtaaacaaagctagcggaggcctcaaacaagcctcatttacccttcactaaatgagacttggggggtaaatgttgcctaagattttttccaaaatacgtggccgcatgtaaggatgccacgtggatttaggagaatttccacttacaaaaatcaattaagtcttggggaaggatgtgcatctcagggagcgagcctcccgaaggagagcacaaagcacgtgtttactttccgggaggctagaattacaacaagtcatctacgggagggaaagagatcgttcgaacgatcacctcgcatttaatgccgcatgggggaaaacgtattggaacctccataaaagatatgacagatggtgtaagcccttttaaaggcgattgtacaacgatcgatgagtctagtgacaactacattatgtggaatcacatcagtcaagagaggataaaagattatatccacctaccccttaagatacctacgatataggtcatgtatttcctattttatgtttgataggagcatgtacccctaagaagcaaacacagaatgacaagtgatcccttcctagggatccctccagaaaaacactataaatacccccacagacagaatggaaagggggtaaaaaaattgattaaggaatcaaagagagtaaagacgagagggattcaccaagaacattctttgtaataaacactctcataaataaaaaagacttgtagactaaggctcattaatgcccccaacca

SEQ ID NO: 357271 - DNA, 1519 bp, Cannabis indica
catctgcgactctaactccaagtcactttttcaaccttgtgtttcgcacagcactttactagcggaatagtcttgtttacacactttttccttcttgtccagaatctgtgctagttgttcttcatatgacaagtcagtttgaagctcgatgtcttcataacttaatacatgagttgtatcaggtacatattttcgaagcatacgagacgtggaacacattatgaaccctagatagagcaggaggtaaagccaactgataagctacctgaccctactctctcaagaatctcgaatgggccaataaacttgagactaaaatttccccttttcccgaacctctgaattcccttcattggggatacccgaaggaaaataaaatccccaatcaggaattcaatatctctacgctttggttctccgtagcttttctgtctactttgtgaagcaagcatacgagctcgaatcttttcaatagcctcactcgttctttagacagcttcaggtccaagatacctacattcactggcttcatcccagtgaatgggtgaacgacacttccttccataaagcatctcatatggaagccatgccaatagtactctgataactattgttgtaagaaaactcgatcagaggaagatacttgttccaagaaccttcaaaatccattacacacgctcttagcatatccttaagtatctgaattttcctattagattgaccatcagtttgaggatgaaaagttgtacagaactttaacttagtacccgttgctcgctacaaactttcccaaaatttagatgtaaaatttggatctcgatctaaaactatcgacttcgaggcactatgaagctgaactatttccttgatgtataaattagcatactgatccactgtatacattgtctgcaccggtaaaaagtgtgcaaatttcgtatatcaatccactatcacccaaatagagtcatagtactttactgttcttggcaatcccaccacaaaatccatggtgatgtctttctatttccacttgggaatctttagaggctgaagcaaacccgccggcctctgatgttcaaccttgatttactgacaggttaagcatcttgacacatactcaacaatatcactcttcatacccagccaccaatatagagttttcacatcatgatacattttggttgttctcgggtgtaaggagtacggtgtagtatgagactcatcaagaatctcctgtcttgtaattttatcttttggtacacaaaccctgttcttgtatcataataacccatcagatgaaagtgaaaagtcttttgctaatctggcctctagcttctccttgtgcccctgtaactcagaatcactttgttgggccattttaattctttccaacaagtcagactgcagggtaatgttagaaagttttccgatcacaaattcaatccccgctctagtcacatcttcagccaactctgctgaaatcttctttaattcgtaaacttgccctgggcctttttga

SEQ ID NO: 357272 - DNA, 1084 bp, Cannabis indica
tgtgagtcagctccaccgccaagaaggaccttaatgttgaacaacgaaagcgggatgtaggaaaactattaccactaacacttgatgaagtgacaggcaaagtgtttggcacgaagaaccaagcttttgtacatcaactgggtattgaagtcacaatcttattgccaggacactacttgaattttaaagatgtacatcaacactttaaagactaagttgtacaaaaaatgataaaacaaattaacaagtttaatattgtagatttttaattttaatgaatataaaattctttaacaagtactatttatttgtagtatttgtacgatattaatagtcatccagagcttgaaaaggtgatgcaaactctctaccatgagatgaagagaatgtattctgagagaaagaatatcaggcacagtcactttctagaacattattctggggatccaaataatttgaaaagtgttatcaatgttgtacctgatcactactctacagagagttggaagcaaattgttgaattattttttagcccaaaatttattgcgtgatctaatcaaaacaagaaaaatagaaaggaaataaaatatatgtccacgcaaggcataaagttgatggcagcgactcgtaatgaatttgtaagtaatattattaactttctattagtaaatttttttacacattacaaactaaccttacttttgaattgaacgtccctaaagactatgcaatttatgcttggaaaaatagccaccttaaaaaaggaacagacacttaggttagcgagacatgccgagaactacatgtaattaagtttcaaattttcattttataatatttttaaaatgaatgaatgaaggtaatattgtgtttctaatattttatttgatcaggagcaaatgaatgaagaggttgccaacatgacgggaacagaaaatgattccaacaatggatcttctaccaaatacaagcaatttcaagctattaataaagttcttgggaatcggttggactatcaaagaggagtggattataaattgaaagacaaatcagtaacaagctctagtactcaaagtcaagctca

SEQ ID NO: 357273 - DNA, 921 bp, Cannabis indica
ggacaagtggatgcggctatgactgctatttatggcatcaaagagggtctaagctggatttaaagaaaaggttgggttgatgtgcaacttgaaaccgattgcctaattgctatccaagctttacaaagcacaattcatatgccttctctctttgacttattagttcatgagtgcaagatcctcttgacctctttaaaatttgttgagattcatttgtcaaacgttctgtaaataaagatactcattgtcttgctcgtagcttttgttttatctagatcatattttcaccaagtctaatgcttcccctgaattcttatcaattgtaatggttgatgtttcatgttaataaagttacatttcctttcaaaaaaaaaattaaaatgttagattattaaataccacatgaaacaaatctatagtttgcttataagtaggtgctatatataaatattttttttaaaaaaaaagttttgtagtcaaaatttgaaaagtaattgtttaatccatattttagtcctgatatgatgtcattgtaaaatatttaaactaaatgacatatatatatattatgatattaaagtattaaaaatgaaatatattaatctctataatatacataattttaaatttgtaatttgtaattgattacactttgatacataaagtgtcatgatgttgttacaagctccaattaataacaaaacttttgttaaataccacatagaacaaatgtgtaattttaaaataattataggtgaatacatattaaaaaactttttggtatgctaaaaactataattgttaaataacaatgaagtaaaaaactaaaaaaaaaaataattaaaatactatatttctatattattatattatattattggccgtatgttgttgttttaccatttacaaaaaaaaaaaaaa

SEQ ID NO: 357274 - DNA, 849 bp, Cannabis indica
gtgatttccacagaatccgtagtgaacctcaaataggagtcgtgtagcttcgtcttgagtgacacatctgagcaatggcatcgagaatcctcttctgtacatggctccctctactatgatataccgtgctgccttccttctcatttttcgagcttcatttcagttatctaggagttccccagagttgaggtaggctgctattggcgtcatccaatttggaaaggtttcaatcattttgatttcttctgtgccagtgatgcatggctcttcaaggaagtgaatagggaccaagtttgccttgtcacttacattgctacttcccaatcgagctaacgcgtctgcagttgtattttcttctcttggaatttgtctgagaccgtagcttttgaattgtgcaagcagatcgtgtatttcgctcagatatgctatcatcttttctccctgagcttcgtattctctggatacatgatttaccaccagctgtgaatcactacagatttcaatgtgttcggccttcatctctcgggctagttttagtccagcaattagagcttcgtactcggcttcgttgttagatgccttgaatccgaacttgactgcagcgtgcaggtgtttccccccaggcgtgacgagggcaatacctgcgccaaatagttgatctgtagccgacccatccacatgtagtttacaggtcggtttgtcttcattgttatttggctgaggtgctggctcggggttgctttccggtatgctttcttttttgcctgtgcattctaccataaagtcggccaaggcttggcctttgattttgttcggggttggaggtgatttcgtactgacccaactcta

SEQ ID NO: 357275 - DNA, 673 bp, Cannabis indica
cacggacttaggagtaaagtccttgggatagagcccgttcctcacaaagttatcctcacaggtcaactggataatattccggtcttccctcagaagccgggcaaaattttgagctctattcctaagagcaagagtgaggggagggcggtgatagatcagaatctgctggaactgagtgcgagtgatgcccgtgccgtccaccataaagtactcatcagcaaagcgcccaatcttgctgatggacgtatcgtccatgcccgccaaccacttgaagcctggttgagagaagtagaagtaccccgacctgccttgcttgggggtggacttcaaataaaagtaccaagcaacctcatggggagagggtataccccatttctgggaggcatagaggacgaagagggaagacagatacttgatgcccttaggagtgaaattggtcgggcagaggtcgaagaagtctgccacatccttgaagtattgatgtaagggcatcaaccctccttgctaaccatgggcacccgaccaggtgcacatcccccttttaaggtttgtggcatgattattgtgggcgggaatgtagcagtccagctcgcccaggtatctgccctggttaagagttccaaggtgcacctccgtaatcttggacggagggcttacccaccttgcgcccaag

SEQ ID NO: 357276 - DNA, 381 bp, Cannabis indica
actacaaatatcaaaattcgcgatggtacctaaaaaactaattttttttttggaccgtcgctaaaaaaattaagtaactatttaaaaccgtcgggaaaaatttagtattcctgacggtttaaaatcatagtaaacaaaatagttgacgtttttataataaaatgcgaatttttaggagagccttatacccaacggtttaaaaccatcgggtataagggcccattaaaaaatcgtcacctacatcttgtcatgtttcccacgggcccacctactttttttctatttcccacatgcccacctgtttcttatcacctatttgttctctatttctcacattctaaaatgaaaaacttaactctccaaagtgttggaaattatttt

SEQ ID NO: 357277 - DNA, 1070 bp, Cannabis indica
tgttgttgatgttgatgatgttgttgatgttgatgatgttgatgatgatgccctcccatcatcatattaggaggagcaactggtgttccggcagcatctcgtgaatccattcacacacctcaaaagatcaaattttcaattttctttctctcttttcccctgtttggattccgggaaaatcaattagagaaagtaaagctaattttccggttcactgaatcatttctctgcttgttgtaacctactttatgcgaaagtgaagagagagaaagagagagtgagacttagagagagagaaagagagtgtgaatacatacaaatctgtttctaaatagaaatcaaaaagcggaagctcaaagtacaaatttttattagggtttatttatttaattatttttaattaaataaataaataaattataattaaacttccatctttcaagatggaatttttgttgcccacagtttttttcacaggtggcagattcttattggattaatattacattttaaaataaagatttgcaataaaatctgatattggtactttggtacttgttatttggtatatttttaaaggaagaaaaaattatatataaagaaataaaaattaaaaaatggatgtggtattaatattattatgtatgatatgaaatgaagtcaaatcttttatagaaagtgatccatcacaatttgtttaagacatagtttggtatatttaatatgataaaatcaatatattttttaagacataaaatataaagtataaaataaagtatcatttggtctatcacaatatcatattttgtttgttaaaaaaatgtttctctcaaacatttttcttaaaacaaaatctttcttactggtcaaagaatgattgatattattattctatattgtcaaatattatttttattatatttataatattcatgtaggaaaatattagttttatgctactcaatataattttgtaaaagaactatactaagaagctcaagctcaagtaactcctttccaaaaaaaaaatcccaagtacctatactttaaggaagatatttatcacataa

SEQ ID NO: 357278 - DNA, 708 bp, Cannabis indica
agggaaccccttttggccaatgtagattgatagatgataacttcaacaatataagtattagagctaatagcctaacactaataacaaagacaaaaaaatgaaagtctagaagttcgcttttatacatcataaaatacaaccagaaacacaagtgatcttgcagttcaatacaaaccaccaataactgaatcagaataaccaattgagaacttgcagaaaaacaatcaataatcgtggaaaataataatcagtcaatcattgagaaacagtcgataacatgtcgagaaatcatcaataatatgggacaagaaattttgaaaacacaactatacacactatcaaaaaactatcgacaaacaatcgagaacacaaagataacaagccaagaatgacttgttttgctaaaacacatctcaatcatgattggaaatgtaaaatcatttgccatttcggcaaactgtcgagaacctttaaaaaagccttcgagaaaggtcatccctgagctttggacattcgagtagagaaccttttgataacctatcgaaaagccttcgagaaaggtcttccctgaccttgggacatttaagtcaagaacctttcaagaacttatcgacaacccgtcgagaaaggtctttcctgaccttgacacattcgcatggagaacgtatcgagaaactgtcgagaaaaatacgaacacacagaatactc

SEQ ID NO: 357279 - DNA, 764 bp, Cannabis indica
gagaggtgcagagaaaagagagagattgggtttgggttttgtagaagaatattttgtagatgaagaagattcttaggtgtaagtgtgagagttgaaacacttagtgaggactcaacagagaatctcgtctcgactgtattgtacctattcttgctcaatcaataaagaaagatttcggtggtatttcaaaactggagtagagccatagatcacatcgatctattggacttgaaccagtatatatcttggtgttgatttctttatttcttacatttattgttttttggttttcattactctgtttgcctatttttatccgattattattttcggtttgataatttgtcattgctaatcgtttgactgtttaaagtattgacattttgattctgtacatttaatcgtaattttcccacataaattattaacactttttttaatggaagcactaccacttaaatgatgaactttataattaagttcgataataataataataataataataataaaacaaaaaattattaacagttttctagtgaataattttttccttatattaaattaatatatacacatacatatatatatactagataaatttacgtgtcaagtcacgtatattaattttattttaattttttttttaatatcataattttaaaattaataatattcaatgtattaataatcattgaaaaacaaaaattaccattatactttgtaataataattaacaaaaattattattcgtcttaaattta

SEQ ID NO: 357280 - DNA, 524 bp, Cannabis indica
ggcataaaacccaacagaacattcttcgcatgtagcatgcttcgagatatttctgcaagatggcaattctttctctcaactactctattttgttgtagcgtatttgcaaatgtgaattgatggcatatgtggcattctcgaagatacttaaaaaattcatctgaggtatattcgccaccgttgtctgttcggaggcattggattttcttgctgagttctccttctattatttctttaaactctttaaattttgaaatttttttggatttttctttcataaagaaaacccatatgtacgttgagaagttgtcgatgaatgtaaccatgtacctcatgtcgctgattaatggtagtttaactcgccgaaacacgtcagaatggaccagctccaacggtgctttggctttgaactttgaatcttcatacggtaattgatgcgccttaccgtattggcagctagcacatacggtctttgttatgacctcgagttgaggaagacccttcagcatagacttcttcatcat

SEQ ID NO: 357281 - DNA, 1125 bp, Cannabis indica
ttcgactggggtgcttcggaggtgagtgtgaactcgttggtggttcaactggaaagggctcggcttgattgggtgctggacgtgatgtcttcagttggtacagggatgggttcgacttggatgatggttaaactgagttgaacggttggagttcagtcgagtgggaaatggtgatacgtttgccggctggtcgattggacaatggtgatttctggtgggttggtgtcgacttggaggtggctcgggttgaatggatgaaatggttgggaggtttgagattagttcgaatggtgattcgggttgctatgagttcgggcgaagtcgactgcagacggcttggatgttgctggttcgtggctgggtcaagcttggtgcgaacggaggctatgggttcatgcaaaatcgaaggtggggttcgatttggtgtctacgggctcaggtgaatggcaaacgactgagaagagggaagtgaatgtgatgatgatgatgggtgcagtatagggttgaatgctaagtgggcgggtcaacattagctggggcccagttgaccaaaaaaatcaggcccaaactgattaaattagagtaaagtggggtctgtgtatctccaaaatcaattgggctcactcaattcaaaaattaagtacaaccccaaatgatttatctgaacaaaaaaaaacatattccaatgattgcatcatgaagaccatttcaatcacatgtttttctttaacagacaactcactttattttttttttttcaaaccccaattcatttgatcagcctagcacccaaaacaccacttgctaagcctttgctaaagcaactggctagcaatctgccaccccaaacttaatgcttttgcccaattcaaaatttcttcacttccacagcctttttcacttgattctctgcacaaagaaaagaacacaatctcaatttcaccatgacaattatttatagctaattataatatattatatatttcatttttttttttatatttttttttttttttttcttttcttttttttttcaaggggttgccttcatttgagaattttttttttcttttctattcttttttcaatttttttttttcaatttctaatctttttttacttctt

SEQ ID NO: 357282 - DNA, 981 bp, Cannabis indica
agttttgattattgttcatgagcgtgtggatccaagttccactttgcaattgcctaaagaaattgggaatctgatccatctaaggctattaagtattcttagttgcgagattgaaaagattccatcttcttttgggaatttaagatgcctgcagactttgagagtatcgaccttgagtcataacataccaagttcaatgtgcaagttggagcaactgaggtatctatgttttatcactgtagagggcatgaaatttgataatttcgtgaggtcaactaagtctagaaatttacaaacattggtaggtattcgtaccaaggatcttctattgagtgatcttctacacttggagaatctcaagaaattaaaaatttgtgtgaatggaaattttgagacattcttacacaatccccaatctctcacattcactcgtctattttcgttacaagtgacaaattgtaatactagcaacaagatagatattgttcctttgatattaagctgtcctcacatttataagcttgtagtgttttcgtatatagtaaggttaccagaggtcaaccaattctccccaaatcttatgaagttaaagttgagttctctcagacttgaggatgatccaatgccaacattagaaaagctaccaaaattaagagtccttataattgactatgatagctttataggggatgagatggtgtgctcaagaggaggtttcccccgacttgaatctcttaggcttgagcttctaattggcttaaaagagtggaaagtggaggagagtgcattccctagacttggctatttgagcattcgcgcgtgcatgagattgaggagagttccagatggagtaagaaacattgttacactcaacgagataaagatatctttaatgcctaagaaattcaaagaaagaatggagcaaggaggagacgatttccacaaagtcaaccacgtaccatcacgtgtattcatcaattg

SEQ ID NO: 357283 - DNA, 430 bp, Cannabis indica
cctaaaagcccaataaaatagttgaatagtatctatattcaagggcattttggtcatttgtaattcactaatttcatatacaaatatctagggtttcaagttataaattagggtttaggcttcctatataaaggcctcaactctaacctaaaaaatctctctctgagcctgatactagcctccaagtgaaaaaggtctaagtttgataactctcttcctcactctctctcacacgcccatacaagctttctcatcacttgatggttggttctaaacttacaaggcaacctatgacaagccaatatcaagtcttagagaagcagtgtccaagtacagagaaagagaagctgagatggacaaagttccctatgatattgcagttggctctgtcatgtatgtaatggtgtgcactgttgaaaattattttacc

SEQ ID NO: 357284 - DNA, 1523 bp, Cannabis indica
tttttttttctttgttaatcgcagaaatgactttcctaaagtctgctcctatgctcaatcgcaaactgaaacccgggacagcagcgacttctcctattacgtcccagaagaggaaaagtgatgtgtttgtcactcctgtcgcagattcctccaagaggcctgctaagggtgttcaagagaaagggaagaaggttgtgatcgatccagtggctcgagctcgtcatgtgttgtaccttcaggagaggtttgtcagcgatgattttttgtcgaagattgacaagtcatcttcaaaggagctgcttcctcgcgctgcggagttagcttcgcagttcatggctacatttgcgaaggcttttgctgtagggcccaaagaagttgaaatcgcgaagaagcatattactcagcttcaagaagacgttaagaagctgaagcaagatgcgtcttccaaggccaaagaattagaggaaattcgtaaggccaaggagcaagtcgagcttgaagccaaggcgaagattgaagagatgtctcgcgacctggaatctgagaaggagaacggcaagaaacagtacgaccaggcggtctcggactacatctatactactctttccaaaattccagacttcgacttctcgattcttggagcggaagtcgcagaaatggccgaggctttacgcgctatgtcacccacaccaactcaaggcggtggagggatccttctggaggagactgaagtcgcggaggcagaggaggttgagaacgaggtggccagtaaagtcgttgatgactctgttcctgctgctcccaacgcttgatttttcccttctatgtttgaactatatttcttttaaatttgctagttttttttatgcggtacaggggtactcgcactctgtacttagacaaatttgcaatttattttggacaaattcatatcctcgcggataatcaatgtttaacattttcgcagtacacgggtactcgcgttttaatatatattcgattttaattacagcctggtgtaataagtagaaaatctcacaagacttgacaaaatttgtttaaacttgaagaattaacaaatatgaggcatttcctttatataatcaatagtacattatggtatactcccctatacttaggattttttttatataaaaaatgactaagtataagtacaaagcgaacataaaatgcgagtactactgataatataattttaggctttcgccattccaagctcggggaatcgcagttccatcgagtgctgcgagtcggtatgtagcgtcacctattttttccgcgatgagatacggtccttcccaattatctccaaagaccccatgcgctgggttcttggtgtttggcattactcttctaaggaccaagtctcctgctcgtaggacttttgcttttaccttagaattaaagtatcttgcagttcgccgttggtaagccgcattttttaagtgtgcttgatcgcgtttttcttctagaagatcaaggtagagtgactgcttttcttc

SEQ ID NO: 357285 - DNA, 609 bp, Cannabis indica
gagtcaaatgtatatatatatatgtatctgtaaaaaaaagaataatatatacaataacagacccttcgtccacctctctctctctctctctacctatctctctttctctttctctctcttcaaagcttcaaaggaaacccacaaatctccataaccaccacactccggcgaccgcccgacctcacgcgccagacaaatctgaagcccaagtgtcggcgacctcacccaccaagcggtgccgcttctctcgccgccgttagcttgggatcgcgagtcaaagtttgggaattcaaactttgaacggattttttggtcacctccggcgtccggttgacgaatcatcttcaccactaaactcagctcgtcgaggagaacaccctacactaaaccatttttcccggttcgctactttttcaggtgacatttttgtagctccacccctttctggcgacttttcggtgacatcgtataccgttttcacaaatggttggcatgggtgtgatctactcgtcgaggtggtcgttttgatatacgctacatctattttcgacgatgtttccggtacaccaatttttactaccaccgattgttaatgtgcaccgcttaggt

SEQ ID NO: 357286 - DNA, 640 bp, Cannabis indica
ccaagagactgtaagtctacgtgttcacttgggggcacccacaccgtacaatgcatcgaactaggatagagaaattatttagaaaaagtttaacgctaagaataagctactaaacctacctctaagtcaagtgcaagcatactttggcttaacatatataaaaataaattttgatacttacatgtcaaggccataagaagatagctaagattaaagaccgactagtcggtcacacaatccatgacaaaaagcaatagggccaaaaaatagtagtgttcaaaaattgagggcgtatagaccaaagatacaagcatgaaggccctagggctgaaaatatgtaatgtttaaaaagtaaaaggccacatgccatacagtacatgaaaatattgtttatattatacaaccataatgttgaatactaataaattgcatttacatgtatacaggggcaagtggagctgaattggaagctgtaagatctagatcgctagagtctatgccgaccataacatcgacaagctggccaacatgctcttcaggaaagcctcactgcccacgtatgacagatcagcattggagttacgtagcttgaaactcatagatgatttctgaagacaagccaacgtactcatcctttatg

SEQ ID NO: 357287 - DNA, 596 bp, Cannabis indica
aaaaaaaattaaacataaaatgtaaattttttacaaaaaaaataaataaattatactttatataattatctcttattaatttttatttagtatatatatgtagagaatttttattagattttgttaaatataataagaacccaacttttgggttggaagaatcagtattgatttctgtaggaatttttagataggattttactatcttgccccctacaccaacaaacaaaaccaatcaagtataaggtcaatttcgacctttccctgttcaatgacttttcaaagtcagagaacccaaaacgacagcgttttgtgtttgaacaaaaaccaaggctcgagaatcttctcagccactttctctctttctctgtcttcacttcgaaaccctagcagagagtttctctctgagaaactcgaagctaggtttcaatctacccagaaaatacaagccccaaacactatacacagatcagatctacaatgatctgatctgtacacacccacacacacaaatagaaaagattagggatagaaaaacaccagaaatttcccgaagttcaccaataaaattggctacgtctccgtttgagctgctc

SEQ ID NO: 357288 - DNA, 648 bp, Cannabis indica
aaatagaaaattcatttccataattaaaatattcttatagatctttcccggtacaaatggatctgggagacaacctcttccaccaatctttggcagactttgataaagttaatgtaaaatagagacactttgcatcttctcctgccttcactacttgcatcatacaagtgtatttagacaggtgggccctgggtccctcctacctttcatacaactccatttgaggcattctaaaatatttcaacaagggtgcctctattattctttttacacatggtttcaaatcatcctctttaaaatcacatacggccccacttcacttccggtaagacacttcgtgaacttggtcaattcagactatttgatcttccaaattctttgtattttcatcctagaactcacgcccatgaattttaccattgatatgatttatgaggtcgtttccaagagggcttacgttctcaccttttggctcattcttttgttgtgtctaaatgtgcttggaggtcagattttaacaaactgccctttgaaactttgtgaatatcctctaatccatcactctggttaatagaatttctaggacaatttttccttcccagagcagtaggcctttgtacatgagtacttggcttatccccaatgcaa

SEQ ID NO: 357289 - DNA, 665 bp, Cannabis indica
taaaatttggaggtgcaaagatggtcccactttttccaatgtatcttatggttgtggcccagggacccccaccaaaatttagacattaacttgctgtaatgcttacaaagagacaccggaaggcggaagcaggacatggcatatgaaggaatggcttgaatgaccgcttttaaaaggacttcttttcccgctctagagaagagagtttggttccaaactgaaagcttagaactagctttttggagaaggaacaggaaagaggaggttttagacctagagaaacattgagggacacccaaatatttgtcaatgaaaggtttgtcatcgaggtgaagagtgtcccggaaggaacgacagtcaacggaggaggtattgggagagaaaagtatggaggatttgtggaagttgacagattggccagtagcaaggttataaaggttaagaatatccttgatttccatggccgtggaaggagtgaccttcgtgaaaagaagactgtcgtcagcaaaaaggaggtgggagatagtaggagcggagcgggagatggaaatcccgtggaaagcgttagagttggctttagcgttgatggtcccagaaagaccttcagcaacaaggagaaaaagatagggagagagagggtcgccctgacgaattccacgagaagg

SEQ ID NO: 357290 - DNA, 506 bp, Cannabis indica
gaaattaattaaagtaattaattccagtagtactactttagtttcatccacgtggatttatttatatcaacgtacgtgagaaataaataaataaataataatgcatatgtatcatgtatcgtactctatgaatttagttttactatcactatcaattaataaatatcaaagtaattttctttcaataagacaattagtctcaacttgttctgtaactttatagcctgacttttcaatattggtggcctagtaagtaagatctacgattctattactcatcacattatttatgtgacaatttcaaatagtttcaaataggataagctttcattggtatatatgtgatttcagcttaattatctttcctagtattgtgactaaaagtttgtcaactctataaattggcttaattaattacatgtgctttttcttgtaattttaatcttgtggcttaagaattggttaaggatatgatgcgtgtaaatcaaatttaataattttttaga

SEQ ID NO: 357291 - DNA, 656 bp, Cannabis indica
tatactggttcaagtagaatagatcaatatgatctatggctctactctgttctggaacaccactaaatcttctttattgattgagtaagaacatgtacagtaaagttgagaaggattctctgttgagttctctcaaaagtgtttcaactcacatactcttacccaagaattttcttcatctactgaaaattcttcttataaaatccaaaccaaatatctctcttttctctgtacctctcaatctttactctctcaaactctcaatctcaatctaaaccatcttctgaaatgacaagccaatgtggtatatataggcttaggatcaagatcctaaattcggtggctgcaagaattgaagttgttaagttagttagccagtaactaacttaaccaattttcttttgagtgagatctccacgtcagtgtaagtcttagtgcatccagaaatgtatatgagcttccgtgatcacggaccaaaggtcactcatagaagacccttctcgaaaggacaaggaagccttccaggattggcttccgtgagtgaacaaatttctaaaaatgacttttggagaccttttcatttggaagaaataccacaaccacacttgaaatcttagtgtgataagtgagtaaaaagctttatatataccctattg

SEQ ID NO: 357292 - DNA, 638 bp, Cannabis indica
gggcgtggttgaggttcgggtttcggtcttggttaggatccgaaggtgggtccagtttcaggttcgagtctaggtccaggtcttggtcccgttccaagatccggtcagttccaatttagatttgtttttgttcccgagtgtgggtctgggtcttggtatgtgtccgggtcctggtttgattttcgagtttgggtttcggttctggtctaagtcctacatctagacaccgactactggtcgagttctgaatcccagttctcgaggttggtcctaggtccaagtttgggtctggggtcgggtctcagatccctatccaagttctgaggcccaagttctggtcctagtttgggggcccaattcggtttgggtcccccatctatgttcggttcctaggtcccagtccgggtccaatttcgttttcgggtttgggtacgggtccagtgcgagtctaaatcttggttagggtttgggtccgagtttgggtcccagtcccagtctggtccgggtttcgggtcctaggtcgtagtcaagttcttgggtcttgggttcggccctggtttttgggtcttggttttggtctgtatctaggtcccggtcttggtttaggtcccagtgtaatatccgctaactccgaaagg

SEQ ID NO: 357293 - DNA, 877 bp, Cannabis indica
tgtagtatcccacatgacaatgaccaatcccatgttgtcactattgactgataataagctgaatggatctaacttcccaaaatggaaagagaacattaacattgctctcataggtgaaagtgccttgtttgtgttaactgagccgtctcctgagcagccgggtgacaatgcaaccaaagctgtaaaggagaagtacgagcgttggcagaatgccaacaacaaagctcgatacttcatactttccagcatggtagacaccttgaaaacaaggtttgcaaacactgacacggctgcaggaatcatgacggagttaactaatctattcggaatggcatcaatccaatctcgctttgaagcgacaaggaagtttatcaatgcacggatgagtcctcatcagaatgtgcgtgatcaccttctccagatggcaagttatttccaagaagctcagaatcatggagctcaaatggatcagacaactcaagttagtctaatcttgaatagtctgactccagcttttctgccctacacctccaattatgtcatgaataagaaggaacaagactttcacgagttggttaacgaccttcagacatttgaaaatttgattggaggaccacagaagaaagggtctaaagctcataattctggaaatggtaatggagcgactaaggctgaggcaaaccttgcctctacttccaaacccaagaacaagaagaaatggaagaatagcaaaaagcctgttcaagctgtgaaaacagttaaaaagaaaaaggctgctaatcctggtgatgcaccaaaaggaaaatgcttctattgcaatgaaaaaggccattggaaaccccaatgccctaaatttctagcaaagaaacaaggtata

SEQ ID NO: 357294 - DNA, 989 bp, Cannabis indica
gaaaaccagcaaagaacttgagggaaacttagctctcttcatcaaattcttggcaaaaccttctgccctaggagttagtcaagttgaggtaagttttggtaccatttctctttgatttctttaagttttaggttaggttttgattagggtttcaagaaaatcagggctgggggaataagttaggattagaatctgttgttaggcttggtttaaagcttgtctaggtatgagttagctggatttaagggttgcttaacttggaatgagttgaatgaagttttatgagttctatttcacttgggcatataattttgagtaaatggatgaattgtggtgttttgatgcattgattatgttgtgtttatgatattatattgatctggagcagttggacatgtttggtttagttttggttcgagtttggaggagaaaactcatgtttgcaatcctgccagaaccggtcgaccggtttgcttactggggaaaatttttagcttttgtcagggctgattttagggctcggggtgatttccatgtctggtatagattgtttagaagttgtaaaacctattttgggctgattttagggctcggggtgattttgtggaaattagggttattctcgaatttatcgattaaggtatttattgtatgttgttgtcgtgacataggacccaggatcgccaagctttgattacacttaggtcaacatgtacgctaaatttctgaactgaggtaagaaaagtattaaatattgtatatggttaatgttgactgttacagtctcgattatgatcaaaatcccggtatgtgttcgttgtgacttaatcttaaacgaggttaacgatatgtattagttgtaactcgattatgatcaaggaaaataaatgatatgcaatgattatcatctttgtgactcgattatgatcgagggaaatgatatgaaacgattattatcgttgtgactcgattataatcgagggtaatga

SEQ ID NO: 357295 - DNA, 639 bp, Cannabis indica
ctaaattagtttttacacttctctaaaaatactgctccacctccaaagtaatcaccatctcataagtagactttctagcattatcgtcagtctagaaatttaatttggtatagtctaagagtattaaatacaactcttatcgactaacatatagttactctttcgatcttaagatttagttgattgtcttctaatgttcattttctagattaaactgatacttactcataactcccacttaacatcaggtgtctggtctaatgcttaccgaagcatacatgaaacctctcactcttgattcttaaggaaatattttcatgacttttatcttttttagaatagttaaaattgttccttcgataaataaaatctatgtctaggagccaaaagacttcctttatagttagccattagaaaaatactccagcatcttactgaagtaagtttcttgcactagagtaagaaaattaccaagtataccaaaagccataggtttagataatctcaaacctacgatactaggatcgcaaagttttgttaagtccattgaatagacttattatcaaacttttctttcttgttcttctattagaaaacttttggtactcatataaatggttttaaccatagttctcttgg

SEQ ID NO: 357296 - DNA, 510 bp, Cannabis indica
aaaaaatacgagctgtacggacagtatgctgagcatactgcccgcgcgcgcgacagggacgcatgggagcaagctcggcgctggggaggggctacaggatttccgcgcgtggatgggtgtgattcagacaagcgctctgtcaagcagctgtctgaacgcgtgctgtccgagggtgtaaccctcgtgcgcgcgcgtagccctgttgcacgaccctgattttttccaaatcttcaaaaaatcaaaactacttcaaattaaatcgaaattgagttctgtaaaaaattaaattgcttaattttttccatgctatccaataaaaataattccagaaacagaatttcaattatttttcacgaaaattcataaacatcaatcaatcatcatataacactcaatacaacatgaaaccatccaaatcacaaacaatcgttttgaagtccaaatttcttgcaaacaaatcaattaccatggctatgaggccagttgttggaatttattttaccaggatct

SEQ ID NO: 357297 - DNA, 634 bp, Cannabis indica
tatggcataataatgtatattgggcatgaaagtaattaaaggaaacacattaggctcaattaagtggttaaaattttgaaacaagctaaggctcgacttgggtatactaaggacaaaattttacaggtaatcttcaagggctcaatcggtccaaagaaaattgcctaaatcattttccaaaaaacaatcatcaaggatttcgcttcgagagagtaagtcacgcaagttctattccattccaagcaaacatttcacaaacccaagtagaacacaagtgatactatccaaaaatcaataatttacatctatatgaaagaaaatttttacaaggcatccaattcaatccaaagagtttatgaattaagcacacagtttaaatttcaatccattgcacacataacaatagcagtttaatcagtagactggctcatttatcaacacatgaaaaataaaaaaaaaaactaaactagttaattaactaaaaacaaagacagtaaaaaacataaaaattttaaataccctcccccaaactaaacgattcacattgtccccaatgtgatataatattcaaaggtgagaaggacttacctgaacccccatcagaagggtttggcctcaatactgcttcaacttg

SEQ ID NO: 357298 - DNA, 813 bp, Cannabis indica
ttagggcataaaacctaacacgaggaacttcacaaggctaaggagaaagtcaagctcgaagccaagagtgctcagatgaaggtcgaggagatgtctcgtgacatagaggtcgagaaggagaacgggaggaagcagtatgaccaggcggtctctgactaaatttactccaccctctcccaaattccagactttgacttctcaatcctcggaggagaagccgctgagatggctgacgctttccgcgcaatgtcgcctacgcagactcaaggaggtggagggaatctgtttcccaaggaggctgaggctgcggatgtcaaggaagtcgagaacgaagctatcagcaaagtcgcggatggatctgcccctgctgctcccaatgcttaactttttcctttaatatttacttatgttagaccctttttttatatgcggtacaagggtactcgcactttgtacttgaacaaatttacttttatgtttcttttgaatgactttatatcctctcggggatatttatctataacgttctcgcagtacacgggcactcgcgttttttggttattcttgattgcgagtatataaatgcttcttatactttagaaaatttcagaaacttgaaaattttcaaacttgacaaatttcataactttcataactaatcaatagtacatagttgtatataccccctatacttaggattttcttataaaaaatgactaagtataaatacataccgagtataaactatacaatgtgagtactatttgttgggtttgatgccctaaataaaactcatttcaaaataatcagatt

SEQ ID NO: 357299 - DNA, 829 bp, Cannabis indica
aaccctccttcgccaatcaggttccccatcaccaataaggcatcctaagcctccacgtactaatgcaccagcaccacatcaaccagccccaagggagaggtcacgacagagggaagcacctcctagtcgccctccaagccaagacttgcctcgaccccctcaaaacgggcgagaggactaccgagacaaccatgctcgacaggtacctgataaaagtctaaatttgtatattttaagcctttaaatgtgtatgtaaaattaatttaattaaatattttaatggttttaattatataattattttaataaaaaatatttaatttattttaattttatgttatttttcagatttggagcaccaatagtaaaattgcaaatgattaaagaaaaagcccaatagctcaagcttgttctcccttgcactctctctccaatcaagatacattaacttgttaaagctttacgagtgttcaacatcctaagcccaacattttttccaagttataactcatgccacgtatgaatgggttggctaattaaatggaagtttcactttcccattaattgacactaagctagcctatggtcagttttgaatatttcaacaaatagaatccatatccaagcacaatactaatgggccacgtctgccacttgttcctcatatttgtaaaccgtgccatttctctagttctctcagctttcaaagccactttctccactaaatgagcactaaaattctaatttgtgggagcaaatcttcactataaatagtactcttagcattgtaaaaaggcatcagattttagagagagtagaaaattatttt

SEQ ID NO: 357300 - DNA, 747 bp, Cannabis indica
cttgtgtcttccataatcattttctgatcacttctcattttaattacttgtttaatttttacaaatcatttctcaatattctcatcacattcaaggttcatattttattattgtaaaattactaattgtccttttgagtgtattttttctccctgtggatacgacatatagcccgtttactaccgcgaccgcagtgtaactaattgggcgacatcaaccacacgtccataactccgagaaaaatgaaaaccaagaccaccccggtggaacctggaagctacaagttgatggttcttctaccgaccagtcatcaggagcggggatcaccctaacaacaccagagggacaacgaattcacacggccattcgctttggtttccctgcctcaaacaatgaagcagagtatgaagcattaattgtcggtctgaaactagcgaaagaggtgaaggccagacacttagacatttacagtgactcccagctggttgtaaaccaagttttgggagaatacatggctagaggagaaaagatgatggcctcccttagcaaaatacaagacttgcttgcccaactggaggtgtacaccattcaacaaataccacgagaagagaatgctaccgccgatgccttggcaaggttaacaacaagtgaaaagatagataaagccagccttgtaccaatagaatacttacccgagccaagcatccgcactaaagaagaagtactcctactcgatacgactcaatc

SEQ ID NO: 357301 - DNA, 474 bp, Cannabis indica
tggtaaaataattccaacagcctaggcaccaggtgttctaggtgcttaaaaatgaaagttcttcaaatctaattttgatgcctctaatacttttgtggtatgtctagtttttgtctcagtgcaaattttgatccattttccctaagacaatcctagaaaatgaaaccctagttggattttaaacttgggagctgggtgaaaccttagtcccccgggttgatttttgaggtgttggtttgtgtgtttttagcttgtgggccccggacttggatgcttgatgtctttatggtaaaaatagtgaaagatagtgagttagaaacaacttggtgggatctaaacacccattctggtgttctcgaagtgaaccttggcgtagggctagggacctctcacagatggacttgctatgatccaggaatactcaactctaggatgttttctttcttgtcacatgtcaaacattgatgtcaacat

SEQ ID NO: 357302 - DNA, 516 bp, Cannabis indica
caaagaaatggtcctcacatttataatctgagaaaaggcttgatgaatctccgacaagagaatcaaaccatcagcatgtattacactaagctaaagacaatatgggaagaactgtccaattacaggcctagttgtacctgcaatggttgtacttgtggtggtgtgaaaaagcttcaagaacaccaccacatggaatacataatgtctttcttgatgggattatctgataatttcactcaaatccgtagtagcatactgctgatggaccctttacctgaagccaatcgggtttttcacttggttactcaagaggaaaatcaaagggaaatcaaaacattggaaatgattcgaataatgctaacttggcttttgcttttcagaatgacaggaatgcttcatctaagtctgattcacagggaaacaagaaccatcctccaagaaagaatcgaccattttgcactcattgcaacatacatggtcacacaattgaaaaatgctacaaaatccatggctatc

SEQ ID NO: 357303 - DNA, 741 bp, Cannabis indica
atttttgttttttaatttttaaacaaaaagaagaaatattttgcaaatttttatttatttatttaagtgaggagtgatcaaagtaaatattaattttcattttttttttaaattttgattcttattttaaaaaacaataaacaaaaacagtttacaaattaaacatgtcttttttcaaaaataattttacttttttaatcaagaaaatatatttaattacattatttatgtaattagttacataataattaccatataaataaatctaattgataattagtctaaattatattcttcgattcttataactcgtataaaaattgataataattatactatcaaatattataatttttaaataattaagtattacataattattattactttgtataattactacttttgtaaaatataaaaataataataggaaagaccaatataaataagataccttcaattgcaaaagtggatggaagaaaagaaataacaaggcacaatgctatcatggccatagccaaacacttcacaaaattaacattaatattctttttctccataatattaatatatagttagaaattatatttctcaatggggagttatatttacaccccataaaattataaatacaccccattattaaaaaaaatataaacttaaataatttttaaaaattacttttaatattttttaaaattttttcctcacattattttatgttaattttaatacttattt

SEQ ID NO: 357304 - DNA, 836 bp, Cannabis indica
tattactttatgtatgacatcttgataattggaaagaatagaaagtctataaacatgctgaaagaacaactaagctctgaatccgaaatgaagaacctaggtgaagctaaaaggatactagggatagacatcaagagacaaagacctggctctattttcttgtctcgggaaggatacattcagaaaattattgacaagatttgtatgagtgaggccaagacagtcactacacctcttgcctcacacttcaaacttgctcaaaatcaagcaccagataatgaagaagacaggttatacatggacaatgtaccctatgcttcctgtgttggaagcctaatgtactgtatggtctgtaccagacctgacttggcttatgcattgagcatggtgagcaggtttatttcagaccctgggaagacacattgggaggctgtgaagtggattctaagatatctaaaaggaacagctaatgttggtctgttatacagagacaatgcaaagtttgagactgaaattgcagggtatgttgactcggattatgctgggagtattaacaccagaaggtcaattactggttatgcatttactgcttttggtggatgcataagttggaaatcaaacttacaaaaggtggtggctctatccaccacagaggcagaatatatggctgctactgaagccattaaagaggcaatttggttaagaggtttcacagaagaacttggttttaaaggagaagacatcactgtccattgtgataatcaaagtgctattcacttaatgaaaaacccaatgtaccatgaaaggtccaagcacatagacatcaagctccattt

SEQ ID NO: 357305 - DNA, 521 bp, Cannabis indica
ccacctgagagagaaattgatttggcacttggagcagaaccggtttctaaagccccttatagaatggctccagcagaacttaaagaattaaaaattcaactccaggtgttgcttgacatagggttttcgcggcctagtgtgtcaccttggggagctccgatactgtttgtcaagaagaaagatgggtttttaaggatgtgcatagtactgggaattgaacaagctaacaatcaagaataattatcctttatttaggatcgatgatcttttaaataaacttcaggggaatactgtcttttcaaagattgatctctgttcgtgctatcatcagttgagaatttaagaggaggacatcccaaagacagccttccgcactacgtatggacattatgaatttcaagttatgtcttttggactgaccaatgctcccgcagctttcatggatctgatgaatagaatattcaaggatttcctcgatatttgtgttgttgttatttatcgacgacatccttgtgtactct

SEQ ID NO: 357306 - DNA, 598 bp, Cannabis indica
ttgaaactaatttagtttttccactagtcttgtcttttgacatagttctttagtcttatcttttgacatggttttttagtcttttccttttaggtttttcggttcgagtcttgtcttttggcatgtgttgtgtagctcagaatcatcatggtgctattgtagaagcattcaacaaggggaagattagatgtgttcaactcaaaattactgagataataggcattaaagaagcattgagttgaattgcaactcattcgtgggatagaattatattagaaatatataacttggtgtgtgtccaaacgattcaaagcggtattttatgccttcataatttgtgttttgtaaaacgatctgcaaataagttgactcattgcttagcaagagactcttgtttctctacaggtcgtgtgcttcagttagaggattgttcctctgaaatacgttctactattttgaacgaatttataaattaatagatcatgacataacattaacctaatatctattctatataaagtgtgcctatataaccgaattcttggtttatgagaaatttatgggtgactttttatttatatttaataaaataataaaa

SEQ ID NO: 357307 - DNA, 756 bp, Cannabis indica
cctagatctggaccgagatcctgacccaaacacaaacttggacccgcacacaggaccccgacatagacctggagccgaacatagacccaaatctgggtcaagacctggacacaaaccccgacacagacttgcacccgaactcaaacccacacatagaatcagaccgaaagctagacccggacctggacccaaacttgaacccagtccattatcaaatctaaggacttatacccagaacttaatccagactcagatcggcattggaacttgggactcggacccaaccttggccaagacccaggatgcgaacccccacccggagcctgatctagacctagactgaaatccggacccaaacccaaacttagaccaggactaaaattccgacctgaactcaaactcaaactacaactcagaataacaaatgaaactagaatcgaactaggaccaggaccaggaactaaattcaaactcaatcccagataaaaacccagacagacacctaaacctgaaccgagactaggactcgaaactgaacctagaccgggacacaaatccacacaacaattgggacctggacccagaataaggatagggacatggaaatagaactaggaccgggtcctagtacccgaccaaaactcgaacttgaacatagaacccagctcgtgagctgacaccagaaatggaaccagactgggacccaagattggtatccagatctggacccagggcttggacaaaacccgtagtcgg

SEQ ID NO: 357308 - DNA, 901 bp, Cannabis indica
tcatcacataaataataatgtcatttcatatttgtctgtataacacaaacctgcttgttacactcacacgcctatttatgtctatgtggcacagacctacgtgttacactcacacgtctaattacaataaggccttagaacggttcatctcagttctagttaccaagtccaacccgattatgccttgaacacataacccttaatttcaatatacatctatatatatcatggcataacaattacatattaaaaatttactagggtaataatcctaagccaataaactgctcactttagagtaataactctaatctcggttgctagtttctcatatttttcatattccatataagtgtcattgcgtatatctctacgtgctaactactgtcttacctgatgtcccgcaaatatggagattccaaatccctgggtgctcctgaccaagtgccggtaatcctagtcacaatttcgggatacacaagtatagggttaatccctaaatccattttcacaaattataaactgggcattaatatagagctcggaaagagctttccaacgatataaagaacatcccaaacggagtcccaagtcaaaagttatgaccaaaataaaaatccgaaaaaaacacaatatgttgccataaaatggccgtggctactgggttttaaaaacccaggtaacccagtttccgaccacgaaaatgcatctaaaaataccaattttcatgctatatcagcccacaatcataccaaactttcacctagcataaaccaagtaattagagaggaattacacctaattcacttccaacaacaccaaaaaccagcaactaaaaatgagcattcagcaatgaattttagcccctaaactcatccaattcaacacaaacccaaacaca

SEQ ID NO: 357309 - DNA, 644 bp, Cannabis indica
aatagaatcctgaagattttttatcataataaaactttataataacctaatctaaaagtgtaatgacaaaattaattactattttttttcatctattgatgttagaaattgtcttcaagtttgttatattaaaaaaattgtcgaaaaattgagctcagagtcttattactaccattttagaaaaatattggatcaattttatcatttaacaaaatagaagatccaattaataatttttataaaacacaaagtatttaccctttaaaatctaacttttattagaaaagtttattaattcaaaattaattaataagggcgcgtttggaaagccacgtgggaattggaattggatgtaattggaggtaattacacagttttgacgtgtttgtgtggccacgtaattacatagtaactgtgtaattagaggtaattgtgaggcctcaattactctctccaattctcatactcccacgagaattgggtgtaattatataccaaaaataaattcaaattattttaattaattgatatgatatttaattatttttaatgtattgactttacttttctatcatcatcaaaaatataagattggattagtcatgttgtgtacttcacaactttattcgcaagtggaattggga

SEQ ID NO: 357310 - DNA, 546 bp, Cannabis indica
tttcaccctcaaacagatggtcagtctgagagaaccattcagatattggaagacatgttgcgagcatgtgtaatagattttgaaggatcttggagcaagttcctacccttgattgagttttcatataataatagttatcagagtaccattggtatggcaccttacgagatgttgtatggtaggaaatgtcgatcgcctatccactgggatgaggctggagagagacttatcttggacctgaattggtccaaaggaccaatgaagccattgaaaagattcgatctcgtatgcttgcttcgcaaagtagacaaaaaagctacgctgatccaaagcgtagggatatcgaatttcaagtgggagactctgtatttcttcgaatatcacctataaaaggggtgcgtagatttggaaagaaaggaaagttgagccctagatacattggtccttttgagatactggagcggataggacaggtggcctatcgattagctttaccacccgcgttatccggggtgcataatgtcttccatatctctatgttgagaa

SEQ ID NO: 357311 - DNA, 1154 bp, Cannabis indica
ggcataaaacccaacaacaagtacttcagggatgtggcaaacttctttggtctctactcggcccacatcactccaaagggcatcaagtatttatctgccctcttcgtcctctacgcttcccaaggatgggatgctccttctccccacgaggtcgccttgttttttgacctgaagtctaccaccaaacaaggcaggtcggggtacttctacttctctcaaccaggcttcaagtggttgaccggcacgaatgacaaggccatcagcaaaatagggcgttttgctgatgagtacttcatggtgaagggatccggagcgatttactcgggtactcgggtttttacccagattcccggacatatcaccgtgctccccttactcttgcttctagggatagagcttagaaacgtttcccggttccgggggaagatagaatattattcagttgacctccgatgataatctggtgcagtgcggtctctatctcgagggcttttctcctaagtccgtggcggggaagaagaggaagtctgctgctggccggcctgaacgagctaataaggaggatgagcttattcaacttaagcgcgaggctaagttgaagggaagtgctagggccatgcagtatgctcaggagcctttgaatcctgaagatgaggctaaggacgagcaggtgaccccattgaagaggaagaagaaactcccggccacgcccagcctgttgaacatgcgattcgcaaaagggagcccatttcacctgttcagccatctccaccctttgccgaaaagggaaggctgtcatgtctgagataagatcaatgtcaggtgatgatggacttctgagtctctgtgcgggctgtcaccttgcttttttactttgcttttgagcttcttgactttcatgccttgtgttttctgatggctgttttctaaccatactgtttttgttctgtgtagacatgtctcggcaaatgatcgatgctctgaggaagagaatgggcggaagctctagcgcctctcctccggccaagaagtccaagggcggtaaggggtcctcttttatggaaaagagaccttctggagaggtcattgatctttctgaggagctgactgctgcaaacccctctacccccaagtctgccaagtctaaggaatct

SEQ ID NO: 357312 - DNA, 594 bp, Cannabis indica
aagactagacttatatatagtcccaaactcaaacaaggatagcaccaactaactaactaacataaccgaaagttagtttagttagttggtttaaatgagttggataataagttggtttagaggatcaatttccacaactatattactgcacctatatatttgtcaatatgttgtatttactttccattttatacattaaatttattttcttatttatatttttttttcttcaacgtacctaatagcatttgaatttatattttcttaggatgcttaattgtttatatattaagtggtagctaaatatatattttgtttttaaattgtaatacttagggctcatttgacagagtttttaaaaaagttaaaagctgttttttagaaaaaatctatgataacaatatatttggtaaacagtcaaaaactaactttttgaagaatttttggagaagctatagctaaaagctgaaactgctccaacctaatttttagaaaaagctgttttgattaaaagactaatattttttttgcactaaaaccatatctacttatttattacatattaaaaaaaattaaaaaattaaaataaactaa

SEQ ID NO: 357313 - DNA, 584 bp, Cannabis indica
cgtaagcgaaatggcaagatggttgaggttgaaacttccaagcggacccagaggcgggacattccggtgctgagcaatgattccgggattccttccgaagcggaggaatacactgtgctgcacgacatagtgttgaccccggttcccgcagatgaggagaggcaaaatctccgagtggccaagtacaactacgcccttgacgagtacagtcgggggcatgctgaggtggaggccgtaaagaagattttgcaagaggagcagcagaacactcttcacgaggacaccttccgaaatcggtgggacctgaacatggatccgttgacggattggttcaaccgcttcgtcaggcccaccttagctccctttgcctcggagatgaccagccaatttgtctcccacctgactcaattcccagctaaaagatatgcagcttgtgcctctttgaactctgtttaccaggtccaagacattagctctgccatggccgcggtgagtacttgtaatttattccttcctttgatattttttctagggcatctggtctcactcttgtctcttttttcagattactgccgagaccggcc

SEQ ID NO: 357314 - DNA, 651 bp, Cannabis indica
tatcgcttactaaactagactcactgtcgttggctaaaagtgaggtcaacattttggtgctttcattgagagcataatccagaatcgctcttcattcaaaacctaaccacaagtacgatggtggtacagactcgtaggggcctggttgatcctgcattgcaaaacccaggaaacgcaaggcttccgccagctgttaatcctgaacaggcagtgaacgtgggtcacggtatagcgactcctgtagatgaaatcgcacatgctgtgcaagagacagggaataacagtttaacacccaaccagggcattcataacatagtcattccgcctactaccaacacttaaacgaccattggagatgatactgagatacaaaacctctgtgctgctcttggacttatgcagggtcatacaattaccctagaacatgattaggaagaactctgcgctgcagtaaatctcacgttcgaggaacaaagacttatgttaggcgagtggagagacaaagagatggaagcgttaagggctcatcatacagagattgaaaatcgtagtcggaaagctactgtgctgctacgaaaagcctaccaaactgtcagacagcaacctccgagtgtcatcccccttggtgagacggacgaagatccagcgacg

SEQ ID NO: 357315 - DNA, 525 bp, Cannabis indica
aggtccatcgagtgaacagtgtacgtcccatatttgaatactaaatatttgttaaatccattaaataatattagtaaacattaaatattttaatttacgttgattgaaatttaatttttgacaaatgttgctcaagttttgttgtatttgtgatagtttaattattggtaatagtccaaatcgaaaaaactgtaccgcatcgcaccattttccgcagtgcgagttctgcgatttttagtttcgcggtgcgagtgcggtttgagaaattggaaaaaccgcatgtatggattggtttaaaaaaaaaaaggttaaaaactacactacccacactgcaaacacccgaatatattattaccacacttaaaaatataaaaatacaaacaaatacatttataaaagtcttgattaatatttctttataattatttagttttttttaatattatataattattatataaaaaaaaatttagtgttgtctacagtgaacatcctgtttctatcatagtctcaatcgtgaagccg

SEQ ID NO: 357316 - DNA, 597 bp, Cannabis indica
ttgaggagtgggcggtttccttttatttgttcatgggctggcggttaccatttaaattttcaaatttggtttcctttttcttgtcttgcttcaagtttatataaaccaatctttgtcatttaactcaccacctacccgaacctagtttattgtttcttgtgttgttgctgttcatcttctctcttcagatcaaaaaatggtgagaactaagaatctagggcacaccaaaaagttggaggaaactgttgcaactccttccaatgcaccccctgctgcttcagttcatcctcctgttgttgcaaagcctagagattcatcgcttcctcaccgtgaatctcaaactgagaagccaaaacgtcctccgaagcaagttgctcgcaaattggtaagacctcttcgaacctggacttcttcgtctgaatcttcaaaggaatcccctccaccgttggcagttcctcctcctactgcatcagtccctgccaccactccaacaggctcttctactcgaactcgagcccagcaagcctctgctgaaaagaacttcgagcttctcaaagtcgtgataaggcagtccctctagccaagaagaaactcaag

SEQ ID NO: 357317 - DNA, 657 bp, Cannabis indica
tcctccgggaggcccactccctgtggtgttctgttttgtccaagacttagttgattttcgtgagtgaatgttcttccaaatccacgtgtcacccttatccgcgtccacgtatttagaaaaaccaaaggcaacatttacccccaagcctcatttagtaaagggtaaatgaggcttgtttgatgcctccggttagcctgttgatataacgacacgtgccttaagcgcgtgggctgcatttatgatggtcatcattaatatttatttttgcaagcaacgattcgcttcccgtccattgagaaaccgacgcatttaatccgggtgtcaaaaaagtactcaaacgttttcaaccgctctggcacccatttatctcacccgttggattcgtagaatgtgaatcgattacgatccccaccgtacgatggtgtctgatcacagctgcgttgcaccctttctggtctataaaagcaagcatttttccttcattgggttacttttgctatttctccatttcaacccaagcaaccccttcgagaaaatttcagaaaccatagatttcttagtgttgttcctccgtcgctgttagtcaaagttccaccatcagccatcgtcgacttccagcttgctacctttgtgtaagtttttgttggaaatatttta

SEQ ID NO: 357318 - DNA, 594 bp, Cannabis indica
ctaatacactttaccaaagaagctcgtaggaaaaaattttcccctggctgaaatgtaatgtctctacgcttcggattactataactcttctgcctacttggcgaagcaagcatccgagccttgatcttgtctatagcttcattgatctttttgaactaattctggacgcaaatacttcctttgtccagttttggcccagtggattggggagctacattttctaccatacaacacttcataaggagccatccctattgtactttggtagctgttgttatgggagaattcagtcaaaggcaagtacttactccacgaaccatcaaagtccatgacaccagctcgtaataatcttctagtatctgaattgttctctctgactgcccatcaatctgagggtgaaaattcgtaccgaacattagctttctgcccatagctatctgaagacttatccagaattttgatgtaaactttggatctctgtctgaaataatggattcaggagctccatggagacgaactatctccttcacatataatgtaacaccctaactaccataggcgtattacgtgagttttaaacatactgtgcagctc

SEQ ID NO: 357319 - DNA, 504 bp, Cannabis indica
cactaaaaatttgccatgtgtacaagtgtgtacacgtagacagtccaccgtggcacttaactgtgatttttggacggaggtacgcagagcaaaacggaactagggtttaggtagttatgccgccaaaatttcagtttttgtggttaagtgttacaaaacgtaaagttcaagtggtttagccgccaatattcctataatataaaaagcctgtagtttatgtaaataaaatataaaatatttatttcaaaaaatctaacatattgaaaatttcgtaccgaccgtatttttgtaatttgtttttggttactttcgttttttttttttaattttcccaaaattaaacgaatttttacaaaaatactggattttgggtcaaaatttacaattttactgccacatgaaatgttttacaaaaatattatctttttgtaaaacaaccgtaaaataacaaaacagaacaattaaaaacaacagtaaaataactgtgaaaatttaacacaatac

SEQ ID NO: 357320 - DNA, 817 bp, Cannabis indica
  modified_base (756)..(756): a, c, t, g, unknown or other
tttgtaaaaaaatggcaaaagttaatataccatataaatttccctaacaaaattgaatatacttaccaatagaacaagtagaagtaaaataaaagaaaaaaaatctgactagagaaaaattattatacggtttttttttcaatatatttagtatagaagtgatacagtgccctaataaataaatgaataattacataaaatactattttttttgtaaatttttatttttacactatcaaagtttttttttttacatttttacaattttttttataaaaataacacgaaaataacattcatatagcatcaaaacaacaacaaaatatcatacaaataacaaaaaatcaacaataaattaacaaaagtataatataaaaatacattaaaagattgtattttctataaataaaataatataaatatttaaaatttcgtacaatcgtatttttgtatttttttattgtttttgtgtatttgtgaaataatcctaaatataaaaaaataatatacaaaaaaaaagtaatattatgctgtaaaattgctagttgggctttcgaagcctaaattttagttttgggttttctctgaatgacttcaagcccatctaaagacattcagttgagatattatttatacaaaatatctttattaagaggtgatttataaagtacttaaaattagcaaggatgaaacacatttttaagaataatttatttttgtcaagtaaaatttggattgtgaaaaaacttttttttnttattattattagtggtagtgctacttgtcctcacttttttggtgaccccttttgtcatta

SEQ ID NO: 357321 - DNA, 638 bp, Cannabis indica
ctggtagacggagttcaaggatgcacaagcagcgtaccgtttaggcgggaaccgagtcagatgggagacgtactcgctggtcatctcggaggcaaaaggggccaaggtgggcccgaggaaacggttgaaccagtccgtcagagggtccatgttcagatcccacggattccggaagttctcctcgttaagagagttttgcaactcctctcgtaagatcctcctcaaggcctccacctcagcgtgcccccgggtgtactcgtcaagggcatagttatatttggctatccaaagattctgcctctcctcatctccggggaccgaagtcaacacaatgccatgaggcactgtatactcctccgcctcagaggggatcccggaatcatgactcggggccggagtatccaccctccgcgggctttagaagactcctcagctaccatcttgcctttacgcttgcgcacaagagcaacctctagctcttcttcaccttcttcaacttcctcaggaagtaccccttactcttcttcaccttcttcaacttcctcaagaagtacctcctcgtcgtccactaagtcaatagtgttcggagggccgttggaagaagctttcccggggttgaccaactgggaagaagtagg

SEQ ID NO: 357322 - DNA, 1035 bp, Cannabis indica
ggacctgaacctcaacccagaccacagatcccgaacccagacatggacccagaccccaaacccggacccgggacccagacccggacctggacccagacccggacatggaccaggaccctggacccggacatggaccaggaccctggacccgaacatggaccaggaccctggacccgaacccgaacccggacccagacccggaaccggacatggacccggaccccggaccggacccaaacccggaccgaaccccgacccgaacccagactcggaccccagacctcgaacccggacacaaacccagactctgacctcggaccccaaactggactcggacttggacccggacctggacccaagacccggacgcataacacggacaccaacccggactcgggacgtgaacccgagacccgaacccggacctagacccgataccagggacccgaacccgtagttggtgttgggattgagtgtattaaaaatatattaaaactttacacaatcaattaacacaagtcaataccacattgtattgtattaaataatactaatacaatacaatacaatacaacacaatacattacaatacgacataccaaacgagcccatacaaatattatttatacatatatatatatatagatttacacacacacataacacaaacaaaactcagaggtaaagaggaagagagttacaggaacggaggtaggttgagctcgactctcggtcaagacaatatactaagagatgatagactaagggcgggtgctgtccctgtgcggtggccggcgctgctggaagaagtttgacgatcaagagaggggacgatcggacttttagggattaaaggatttagtcgatacagtaaagaaatttgggaatgttttatttagggtaaacttacaaaaatactggaatttgagttaagttttataaaaatactgtaacacacggaaaagttttcaaaaataccgtgtttttataaaacaccagtagaacacaaaaacaaaacaactcaaaaaaatagta

SEQ ID NO: 357323 - DNA, 848 bp, Cannabis indica
tttatttagtgcataaaacccaacacctatcgcatatcgtaactgatccatcttgaggtcaattccttcgatacctacatgggtttcattcctcgaccaatttgagcttggcctgtgccatcagtaggtgggacaaaatttctagtattatccctttcggtggcaccattagtagcgttgcctcctatagtggtggcgttggtggtacgcccagctgctgtctgcccagcagcatcagtttggccagttgtcccatgactaccagcagtctgagcgttgtgggggtggctgcaccaccgttccccgaacgtgggggtcattctccattgttgccaccgagatttcttgttgataaaacttgttaggcgttatccatctcctcgtcaggtcgttcttgagatcttcgggttaacatcattttgaccggtattgaacttcaagattttggctaaagctctcaatgaaagtaccaaaatattgactagatttttagccaactgtcgcggagtcgtaataaatgatatttaaaccaaaatcataacaattaatgtaaataatgacaccagaaattgcaataaatgtaaagaaagtcaccagaatttaaaaaggttcgaccctagatgttggtaatagcctacttcccttgtgttttattaatcaaagttacaaaagtcaggaacatgctcttgattgcaaagaatgaaaatagtgttttttctctaagtgctctgttatagtgagatttctctcacctagaaactcgagaccagattcctctttaaaaggacacgtgtattcagattcccaatgaaagctgaaatgtccgtgagagacttctcgaagtttag

SEQ ID NO: 357324 - DNA, 650 bp, Cannabis indica
tagaaagaaataccttgtttctttgctagaaacttagggcattggggtttccagtggcccttttcattgcaatagaagcattttccttttggtttatcacctggagtagcagcctttttctttttaactgttttcacagcttgaacaggcttcttgctattattccacttcttcttgttcttgggtttggaagtagaggcaaagtttgcctcagccctagccgccctattagcattcccagaattatgagctttagatcctcctttctgtggtcctccaatcaaattttcaaatgtctaaaggtcgtttactaactcgtgaaagtcttgttccttcttgttcatgacataatttgaagtataaggtagaaaggccagagtcaaattgttcaagatcagactcaattgagttgtctgatccataatagctccatgattttgagcttcctgaaagtaactcgccatttggagaaggtgatcacgcacgttctgatgaggtttcatccgtgcattgatgaaattccttgtcgcttcaaagcgagattcaattggtgccaccccgaatagttcagtcaactggttcaagatatctgcagccgtgagagtgtttgcaaaccttgttttcaaggtgtcaaccatgctagaaagcat

SEQ ID NO: 357325 - DNA, 868 bp, Cannabis indica
atggtagttcaattgaatgagagcgctaatcataaatatggaatctagaacttctatctggacatagaagcttgaaatgatgatttcattcgagtatggcttaatagagataaatgatagagtgctcagtttagtgattatattagttcactgaaatatcatttataggtagcttagtcttttaaggataaaatacattgaagggtctaacggtaaatttatccatactcaatgtaaatcatctatagaggatcattgattattaggattataacaaatggataactcatagtgtatctatatcgcggaacatatagagtgttctatgtaattgagagttcaaatccaaatttatagagtgcaaggaggaattaataagttagtaaattacttcgtaaattctagatctgtttattggaagctcggttatgtaggcccatggtccccatactagttgagacaaactgcttgtaagactcagttaattaattttaattagtcaattataattctaaaattagactatgtctagtttgtgaatttttcactaagttatggcttgattgtgaagaaataaaattttagggtttatttgttaattaagagactttatggagtctaattgaagaataatgtaaatgtcaattttatttgataattaatattaattattaaataaattgttttggcatttacgagattgaaattacaaaatattatatttgtgaaaaatagataaatgcttgaaaaaaatggcaaaaatctaactagtgatggacccacatgtggtcggccattaggtcatatttttgctattattttatattttttattccaaataattgaatcctaaacctaagtgaattag

SEQ ID NO: 357326 - DNA, 1039 bp, Cannabis indica
ccaattaaaaaaccgatccaatccaattagtaattggattggattttgaggtctaattggattggattggatgatgattttccaaatccaattactaattggattggatcggattaggaaaaaaaggtttgattggatcggacgcccacccctaggttaaaggactaaatacatctcaaagaacaagttgttaatctatccgaagagcatgcacagctaatccatgtgcagtcataatggctgaacaatgtacataaattagggacactccatgaaaattggataacaaacttattacaatctctaacaatgatcctagatcactaggaaaaaagaaatagtagtcacaattgctaaggggtaaaaattcctatccaacatcattaaaattgctagaaaatatgcttaaaatggtcggaaataggaatatctatcttccacacctaaatttccagtcgatgcttgttctactccctctaaatgttccaaataaaaataagatgatccaactgcataaaatacaaagaaaactaacaactaatataaatcacaaaatactatttataatgagactaaaagtaccataaaaaaatttatctgctaaaaatgttgttctctagcgaagcaagcatttgaagccgcaaaactcgaaaatttccattctaataactctttaacttcaataactcaatatctttataactctaataaccaataactaaaaacaatctaaaaaaaacccataaaatgtcataaaattagaatactactattggacttattagaaagatgccttggagaaaataatacataccaaatcacaataaaataaaagaaagaacttctactatacatgcctaattcagtttaaaattttatatgtacgtaattgtaaaaataatgatcatccataattctgcagagttaaaaactttctattataagaatcaaataagcaatcatatatatatatacatatagactaatttataaaagtgaaaccattaaagagtatcatattgataccgctatcaatgta

SEQ ID NO: 357327 - DNA, 826 bp, Cannabis indica
gttgttaatccaacatacttgttagtaattctagatcctggtaaaataatttccaacaagtccctccctctacatctacaacacttcgaaagctaatcacgagccattgtgcaccgaagccaagatgcctgaatagtaacccaaggggacacaccaagttctgaaataaaaagaagaaaaacaaagctatttagccttagctcatgcctgagaagagccattgcgaaatgccatcgctaaaaccgaaagtgatacaaccagaagaagtccaccgtcatgactctcaccatctcgagaaaccggagatacccacgcccattgccgttgttgtcttgtgcccaagagaacgacttcaattgcaactcccaaccgacgagaaaagacgacttggaagagatgtccaaccactgtggccagccgccaaatgccgaaaaacgcaggcaccactgagcaggtcctaaggagtgagacccaacacccacacaaaccatccagtaccaaaatccaccagaagggagctctgccgttgcacgaaaaagaactagatgctgggctcttggacaccactagcccatagtcggctggcggcacccatgggagcataagaaaccttcaaaaaaactagaatgagaaaagaggaaaaaccttaaaaactacagaaaaagagttaagcttaaaatgctttgataaagggtttagagtagtacttattgatttaaggtggcgtttggttggagataatgaaatggaatggaaataaaacaattttcattccattcctttgtttggttgtatttaaagtattggaatatcattccaatggaat

SEQ ID NO: 357328 - DNA, 493 bp, Cannabis indica
tatatatatagagatttatatttatagagagaaaaaagtcaaaacacgtgcatgcgtggggactgggaagcagtaatctagcagattcttcatcagaccaaaatttatgtgttccaatgcgccactaacacctactaagtattaattttttttgtctttattttcaattatatacttccttttttctttttactaaactatctaaatttgtctttttttttttttttcttgaaagggactaaatttgtatctaaattaaatctatatatatatggaacacttctcaatggatattaccaatgaataattactaagaaaatttaattataaatattaatattaaaaatatcaaaacatccaattttaatctaataataaataataaaattacaaatttaaatttttatgcttaatttaactacttcattaaaaaaaatatcaaaaaatatatctttttacattatatcaaaaatatgttcatacaaaaatattt

SEQ ID NO: 357329 - DNA, 834 bp, Cannabis indica
ttttagcttcaagtttgcagatttttttttacaaaactgttgttcagctttgtgtagactgaatccagacgtcgatccttgagtaagtgctcgatttcttttacttttacttttgcacatttactttctgaatgcgactttaactttgctgtagaagatacgtagaaagccctaggttcagaaactttgcgattttcccttgcaatgatttatgcgacttcaccattcctgatgcttgctttctgactgcacaatgtctgtctttcatcttgcttattcaaagcttcatgaaattttttccctaactctcgaaaatttcaagcttttgagttttgacttttcgtcgaatatttctattctttaatctgttgagtactccttgtcggcatatttgcatgtttactattcgatatcccgaccaaacactcatctcgcgtgttgtcttttgtagatgaacccaggtgagttttggagaagagaacaccgaatcgaccagaacttgcttcaactcttgcatgaggatcaccctcgtctttgttctagtccgccctcttcaagcgacggacattttatttcaatcttctcgtccagccacaggatgatggcttgtactaaacagacaatgcataaagtcaacgcgtctgaccctcatgtggcccagtatgccactttgcctagcgcggaataggatccacccgtgcgggaggagggggatcacgaaggggacgccaaagtctaagagatagaggaacagggcgatgtccgacttggtagtccttctgaggcggaggaagaaaaggaggttgcacccccaaactttgggggatacaacga

SEQ ID NO: 357330 - DNA, 940 bp, Cannabis indica
tgagcccaagtccaatctgcgagtaaagcttgagctaagtgagcaacactcgcaacagtaggggacttatcagaccatactagctcatttcgatgtttccaaattgcccaacatgtcattgcgatcaacctccttttctcccaatccgcctgttgtagaaccgtagcaaaccagttggcaaaagaaccaacttccgtcaaattaacaccagcagccaactgttgccaacacgctttggcaaaagagtattacaccaagcaatggtagatagtttcaccagttactttgcacacagggcagatgatatcaataggcacatgtctagaacaggtttggattttgtaggcagacagttagtagcaacacgtcataacaagtctttcacttttggaggaacacttagcttccatagagtattccaaaagatagaattatcatcctgtgcacccaactctttgctcaatggtaagaacttataaaccgattttactgagaaatggtccaagctctcccaactcagtaccaaacatcacataaacgacttgaagacaacgaaatactaacaattaagttagcatccctttcattaaacatatcatgcaccaagtcaacatcccaagccaacgtatcagtttccataagtgctttaacattttgatcaataagagcaggattattcgaagttactcttggattatcttcattcggcagccacagatccatcactatattaattcgagaaccatcaccaactctgcatctcgtcccttttcgaacaatctcttgagtttcataaatacttcaccacacacgaaacttgtattgctccccaactcaacatttaagaaggtaccattacggtagtacctagctttaaaaatcttgctgacaagtgagttcggacgactaaacaatctccatccttgtttacaaagcaaac

SEQ ID NO: 357331 - DNA, 748 bp, Cannabis indica
gatcagggcattacatcagttcatagagatgttgctcttttgtagaaatgagagactcgaaactctttatttctgagtgagtttcccatgttggaaatgaaaaatgcaaagttgtgaatttgacttctatgacttcattgatcttaattattgtgcaaaactagacgaacggtcaaagcagaattagaatcagataagcagaacccaacgcactaggccatttgtcaacctaggcattgagcaccctatttctgagctttcgagtttttgttttgatacttctaaggttcttgaacttgaggatgaggtttcttaccctgttttttaccattcttgattcaatgattgactcagatttggcatttgaatgatcaaaaccagagcaccatgttgattgtcaacctaggcgctgggcctaacactcaatcaacctggcactgggccctatttctaaggctcgagtttgtggttttctctccgagtttatttgaatgttcattatcctaatgattcaaaaaatgctttgaacacttttttgagaacttgattggaaatagctcaggttgataatatgtcaacctgggcgctgggcctaatttttgacacctagaaagtgttgtttcttcctccaaagtacatatttcctcattttttatgaagaaaaagatgatggaaaattcggatcatcgatttgatacttagaaggcgcccagattgacaaattctcaacctaggcgttgcgtgaccg

SEQ ID NO: 357332 - DNA, 647 bp, Cannabis indica
aaaaggcatctagcgatgcctcaagttttgcgaaaccataactagagaaacgttgtttctctatttagccatctcggaagatgcgattactgcagctatagtccgagaagagggcaagcaccaaaacctatttactatgtatgtaaaaggttaataggggtagaatccagatatccccctctagaaaaactcgaattgtgcctagtccatgcgtctcgttaactacggccatacttccaggcacaccccacaaaagtgttgaccgatcagcccttgagacaagttttatcgaaactagatgcttctggaagattgataaaatggtcgattaaactggggaagtttgacataacatacaatcctcgaacatccatcaagggccaagctttggctaacttcttgatagaatgtataactctagaagaaattccacctgtacagtgagacacggaaacttagaagttatacgtggatggagcatccaacgaacagggttcgggtgcagcggtaatactaatattgccataagggtttaaagttcactattgacgaattaaataacgaggctgagtatgaagccttgattgccggcttaaagataactgaagcattgaatgtcaaaaaacctcatatgtcgtagtgattcg

SEQ ID NO: 357333 - DNA, 568 bp, Cannabis indica
accgacacaattgttgtgccgctatgatagcgccaattaatactctctggggtgaatatcactcttaaccagtacgacgcttgtactgtcgaaccgacacaattgttgtgccgctatgatatcacccaaaacatatacaatcatacatacatcatgcatatatctcatataacacgctatatacagttcttacctgatttccgaattcaagtgtgctggccaacctgaacggaaattctcgcgctagatggatgccctaatcatattaattgtaacacagatgagtgactcgctaaatcactttccggggatttaaacttgaaactaaaagtttcactatcgataaataacatggcaataccctaaatatctcaaaattggcaaaaactaaggtcccaaaaattcctccaaccggcagaccggttcccaaccggaattccaaaactgggacaccaactggtcgaccggttggtacaggttccccatgaccggtcgacccgttctgtgctgggaacctgaaaaatctcccccttgaactcaaaacccaaccaaacttaaccaaactctc

SEQ ID NO: 357334 - DNA, 1047 bp, Cannabis indica
aaagtattcagcaatccgtgcagagcgatcaacacttagcgaattgagctttcgcatcatgagtcatcagcacaatccctatagctcggggatcagtttacgtggatatggcatacacacgatcccactatcagtgcattcagcctcaatcccacgatccttgcattcaacattgatcccacgatctttctgtttatacgcattgtaacgagaggggaaactcttcctccccaagcctcctagccctataaatagtgatgtatgttcattgggcaggggatggatcggtagaaaagcagttgagctaagactatattattatctaagaattatatattcagagatactgttgtaagagttataagaaaaggaatatttctccttgaccttaagtcaatacaaataacgaggattaggctattaccaaactgctcggggctgaacctctataaaattcctgtgtctttttattgctttatcgtatatctgttattataaatcatttatctcttataaaatagactcattgtcgttggctaaaagtaaagtcaacaaattcttttgtctagacctatctatccctaccctggccactcggattaccacctcttaagatattactaacagtttcatggtcaaaaaggttgtgtggcttgggtgtgtcccagtttccgtcaggtagaagtaaatccgaccctttctccaagccccgctattgacgataattggacttagggtaaaaatctgtaccatgcataacccaagggtcatcctaaatacttgtctctctcccatcggatattagcttgcacgccccttttcttaaaatctcttttgatcgcactacatttctctaaaacaaagaatcggagctctttacctcacagtcaaaaaactgtttacccttaaggtacttagatctgagaacattacagcacagctacttttccttagtaagcagagcccagccccacttggccagcaatgcctggttcatctccacagtctttctaaagtcaagccccccacgggacttgggaaggcaca

SEQ ID NO: 357335 - DNA, 807 bp, Cannabis indica
ttttttctccacttccaccacttctacgttaagtggatttcatcaacaaaaaaataaataaataaatgggctataaaaagattgatgactgaacagttaaagcgaaaatttttgaaaatctttggcaagaaattaatcgtaagagtgaaacagaggaaaaaaagaataaaaaaaaatctgcacatccaaagtctaccttcaagctttataagggtaagggaaaattcataataggaatctattctttttcttttgattctcttactttcaatcttgtgattaagagtcattctaatcctctttgattcactagacttcggaaataagtcaatgtgatatataatcaaagagaaaagactaatattcctatgttgttaattttatcatcgattttttatatttctcttcgattcactagacttcagaaaataagtcaatatgtgttatataatcgaagagaataatataaatcttcatggtgttacgctaccaaaatttttacaatatggggattctaataaaaattttaatcaaataacatacataaaaaaaaactgtgagccgaaaagatctatttaaaactatctcaattgattgatctattcaaccgcgtgaacctctctcctaaagtcaaatgtaaaattatacatatcaacatcaatatctattctatataaagtgtgcctatataacagaattcttggtttatgagaaattcatgggtaactttttattaatattaaaataaaatggtttattattaaaataaattgtttatgagaaatttatgggtcactttttatttat

SEQ ID NO: 357336 - DNA, 499 bp, Cannabis indica
gttcatgtttgtacttataacactatctatacttttattttctttctgaactctcaagttgcttcacatcagtaaactgataaaaaaatgaacaatatacaattaggaatgagaatggaaatgagaacagaaataagaatgaaatagaacaaaattcaaaatgcataaagaaaattgataaaataattattaaatttttgtcttatcttagcattcgaatcgtctttccttccattatataatagaataatcattccacaaacatagtagaaaagtcattccattggaatgatattttaatattttaaaatgcaaccaaaccaaaggaatgaatagaataaaaattgattcatttgcattttattccattttattatctctaaccaaacacaaagattcaacaccaaaagtgagattgtagtacattcaggtatatttcttttgtttttttttactagaaattcatagtaaaactagtaaagatcatttttcatacctc

SEQ ID NO: 357337 - DNA, 763 bp, Cannabis indica
tcaaccgcttcgtcggtcctactctcgcccccttcgcttctgagctaactagccagtttgtctcccatctgacccaattctcggccaaaagatacgtagcccgtgcttccacaaactctatttaccaagttcaggatatcagggctgccttggctgcggtaagtttttgtgattcattcctctctttttgcttgtattttgtgttaaggcattcgatctcattcttgtttctcttttcagatcactgcagagaccggccgcttctcgaagaccctgattaaccatgggtacgtcatgtccgaatttgggggcatggacgaggccatgaagagtctgcgagacttgtcggctaagaggaaagcattccgggaggaggcccagcaaagggaggctcaggtggaggcgaggcaccaggaggagctaaaggctcagggcgaagctgtggccaaggccaagtgcgagttgcgggaagccaaggaagctatggatgagctgagtgccaagttaaaatctatggaggagctgcaccaagcggacttgcagtcgacggccaacctggccatggaggtgaaggagctaagggactttaaagatcaagccttgaagaaggctaaaagagatgagctcctagcccccgtcgtctgcaagcattgcaccaagcgctttgacgatggcgttttcatggcttggcagaaaaatgcccagaacatcaagctcaatttttatcccaagcctgaggaagtccttgttcgcttctgggaga

SEQ ID NO: 357338 - DNA, 604 bp, Cannabis indica
catggcgcacatgcgttgatttaactattaaataaagcttgtcccaaagacagcttcccacttcctagcattgaccaacttgttgatgccactacaggtcatgagcttctcagctttatggatgcatactcgggatataaacccagtgtactatgtctgtaaatgcttgttagatgctgagactcgctatcctcaaatggaaaaactagtgtttgccctggtaatatcgtcaagaaaactgcgaccttatttttaggcccataacattgaagttttaacaaactaccctttgaggcaagtcttagcaaagccagaggcatcgggaagattgttgaaatagttagtagagttaagccagttcgacatcaggtacaaactgagatctgcgatcaagtggcaggccttggcagatttcattcttgagtttccaagtactgaagtggcactcatagaagacaaaattcacactgctgtaccgaatggagaaggatggacgtgtacgtcgatggggattctaatagcaaaggttccggtggtggaatcatacttatcagtcctaacaatttaaggtacatgctgctttacgttttgaattttctgcatc

SEQ ID NO: 357339 - DNA, 856 bp, Cannabis indica
tatgttcaagtccttcatgacggcaactgcatggttacaaggtatttcatctttttgcaatctattgcatgtgcatgttttgcccttcaagtttactattcttgtcttcatctatcacctaaaataggttttgattttctagtttgacctgcatgtttttcgaagcaactttaatacaaccaaaaaactctataaaaataacttctacagtttagagtatgcgacctctaatatcaacttaatgttaatcgcaatgagtgtatatagttccctattagttttttttttgttttctgatgatagtgtgagccttgttgtgcattttttgcctctttcctattatgttatgtccactcttgcatctgtgccctcaagcactccattaatgttgtgattggtgtttcccttgctgctaaatttgttgagttcagtgcttcagctatgttagatgtcatagttgagtacctatcatttaaacagtttttatcatcaatataatttttattccaattgatatgcaacactaaaaaaaatacaaaaacaatgtttttaaatcagataccgtattacatattatcctttctttttaattaaatattattgttttacctgttgttttttgaatgatatcttgactatttctcatggccaattttttccaaatacggtcttatgcgcttatccaagttatctagctccctcatatgaaattcgaactctagatctgtgtaagcttttgcggctgcatttgaaaaaacacgatgtacccctcccatttgaaaaaaatcaaaaactcaaaacttctctctccctctcgctgaacacgacgtacgcacaacctacacccacatcccac

SEQ ID NO: 357340 - DNA, 654 bp, Cannabis indica
ttgtgaaaaattaagcaattttattttttacggaactcgattccaataaaaattgaaaaagttatgaattttgaaaaatcaggattcaaggctatcgagtgggtgcatcgttgtgcaccaggcactcggacaacccaggatccgcgcgcgtgactagcccaccagtaccctgcatccgcccatttttcccgctcgagcaccctgcatcagccgagtttccttggctgggtgcccttgctccgcacgcgtatgggcattttgcagcctctgaaggttgcacgtaaaccataaaaaaattgcgatttttggagtttttccccaaaaatctaatttctccatgggattgtttcccaaaatttatttttctatttttaaatatttctaaattgaaatatttccaatcttaaaatattttcaatttggaattttttccaagattaaatatttccattttggaatatttctaattttaaatatttcctattatggtcagatttaaaaatttgttaacttctttaatatttatatattatttaattataagattagatattttgatatttaacatattttgaattaaaagataactttctctttttatttaagatattatattaaaattatcttatattacaaattaaataattaataaat

SEQ ID NO: 357341 - DNA, 850 bp, Cannabis indica
ggagggtccttatgtgattgaaacgatagtagcaactggggtttataaattggcttggttgaaaggctcgctgataaagaactactagaacgtgaaatatttgcgaccttactaccagtaacttaattattgtaactcacatttctgatgtaatctttcgaacttcggttatgaataaagttaatcattttttcaaagtaattacaaagtgttactctttgaaattactagaggggcatatgtgcatgattaaccggaatgtatctagaaatacatgatatattgcacactcaacactttaaaaaaaattaaacaattttttaaatttttttgttgatcaaacctttctgacgagaaaggaggatcaaaatattatgaataacctttcaattaaaaacctgtccaacgagaaaggaaaatcaaaagttataaatgagaaacaactcataaatcacatgtggagctgaatactaacgtctcacattgtatcagagagtattaaacgagacatcaaggtgtcttgaaaaaagtacttaaacatagtgtgtgaatagacgatctaactattcatataagcaataaaaaatatacaatgtgataaaatcattaaaagtatattcaagtttgtttgaaacaaattatattcgttattgcaagacagaattgataactactcgcaaattaaaatcatggcaaataataaactgctcgcgcatatagtagactactaactacatacatattattagaagaaaatacgagcaatgaaaaggcctaaagtattttgcatttgatcaaaatataattatttaaattgtgaataaaatacaagtaaacaagtatatattaa

SEQ ID NO: 357342 - DNA, 569 bp, Cannabis indica
tttttattaaaattataatttggaccagtaatacttcaacacgtggcattttaaaaattaataaacggacagttatcttagggaccaacagactcacaaaaaatgcgaccttgattattaccgccaatttttgaggttgaggactaatctgcatcaaccctaagtttttggggacttttgccgcaattatccctataaactttaatattatttgttttaggttaattaaacttatacaaattttaaattaatttaaatatatatgaatatcaatatattatttgtaacattattatttttttattgttatttttaatattgggcagtatgttcaattttactattcttaaattttatatttattttctttaaatttttaaaactgtaaatattaaaaaaaaacataaaattaaatattaattagtttcctttaatttataaaatctttaaaatacacatataacaaaaataaaaactaaaaatataacaaagtatacgtgcacgtaacaataacctagtctatatataaatggaatatttttaatgggtattatctattaatggttact

SEQ ID NO: 357343 - DNA, 661 bp, Cannabis indica
ttggtttagatttggaataggtagatatgtggttaatggtttgttgtggtaatgtagtgaagtaatgatgttgatgagtagttgtagatttagtatatgaaatgagtttggcttagaagagagggttgtttgagaaagtagtaaacttttattgatagtttggaactttggttttttggtgttggtttagctcctcaacccaagcttggtatttatagggagctaaggttgatactacaactttctagatttttcttattttgaattacaatttaactttctaagatattctagaattttctaagtttcttagcttacaaatatagtttctaggtaattctagttttctctaattttcttagttttgtgtagttaatactagaattttctagataagaaaagtgtagaaatgtgtagcacttttcatcacatttgaatactattaggaagcaattggatcatggaaacccctataagagaaagaatgtaggccaataaaagtggaatgggaaagcgacaagagctccatgtgttttcggctaactagagttttgccatttgatatttcaagatcttccagacctttcgatagttcattttttgtcaacatacgaatttgttaggctatttttagcctaagttttgggtcacattttatagt

SEQ ID NO: 357344 - DNA, 835 bp, Cannabis indica
actttgccaatgttctggaaagaacataacacttattcaaggtgtaagtatactttatcgctgactatcacatcagtgtaaatccagtgcactaatgaatcaagggatattatcttttgaagcatataatcacaattaccttccactttgttgacatcactgtaattgtgaataactatatattttggaattaacaaattttgtacacattaaaccataaacatgaaaactacatttaaacataaatgacttctaatcttctattgataacaaattagattacattgaaaggtgttatagtgagatttttctcacctagaaactcgagactggactcctattaaaaagacccgtgtattcactttcctcgaggagagatgagatgttgatgagagacctctcgaagtacgaacctcgactgaaccaaattcagcgagatgatgcgagtatgaccgagtctaatcgcattcgtatggctcgcgtaatgtagtacctaggaccagttccaaacttgcatacgccagggtatatgggagtatcaccgtgatcctcctacaaaaacttagagatcgattctctatactacgagctggtcccattgacccaactgccttgataaactgatatagacttgcatgtcttagttctatcaacatgttataagatgtccgcataagcgactccaagaggacgcagacatcctagactcgactagtctcaaatgcatcctaagcttgcgagctcatgcaagaatatgaacagccaactcgcactacagaagtcgcatacattgttgtatttagtgaattaagctggaaactgttcttcatttatt

SEQ ID NO: 357345 - DNA, 529 bp, Cannabis indica
acctggagtgttcggtctcgggacatctggggattgtattctgtagtcattgtgcgacctgtaatatgtgtatcttggaatattaacttttaaaagtttcaaaacgggatcccgacacttgttaatattttaatatattataaagtttattaattaatataaaagttttaatttgacacgttttttaagaaaattctttgattagcaaagattgtactgtaattgaaaaagcactgtggcgtgccttaacattagggcgttacataaacttaagtatttatgccgtaaattactcttttttatgtgttaaaatttgaaacttaaaatatattaaaagagaaaagagtgtatacaaatttatgagagagaaatagaaagggtagttatgggaaaatatatagcagaaaacaatttaaaaaaaaataaaataattatatatttcttgaccgtttgattaaatgattaataatcatccaatgattattattattaatattattgaaaaaaaataataaatatatgaagtttt

SEQ ID NO: 357346 - DNA, 522 bp, Cannabis indica
taatatctcaaatataactattactgtatataataaaaaagaaaatattgtactacaaatcattaatgtaaattatttcagcaaaaactatatataaatagtatacatataatcattaaataaaaatcaatatattaaaattattaactaaaaagattatataaaatataaaaaaggaaaagctaaaggccaaattaacgcaaaataaaaataaaaatcagtaatcaaggtaattatcgataaatagataaaattttataaattaaattaaaatagaaaaaattaatttaaaattattttatctgtttttttaacccatatatttaaattctaacctaaccctaataagtttagtataaaaagataattataggctcttatttgaaagaggttgataacctaattttattttgtcagaaaaataagagagctgttataattaattttcgaattcccttcttttctctcctcttgaattcgtgtcatataatatcaagtcaatactcaatcatagtgtggaag

SEQ ID NO: 357347 - DNA, 663 bp, Cannabis indica
tgttgttcaaatatcatacaataataaaattggttttatacaaactaaaaaaaatagaataatattataaaaatggagcaaccccattacagaacagttaaaacctgtgaaaccagttttgacgctataaaaaatcataacaaaatataaatgttaattataaagttaactgaaacaaatttcatcagacaatcaaataaaaaaaaatacacacacaaaaatacaaaaaaaaaatactaattacacatataatcaaaacaacacaccatgcataccaatattaaaaacaaaacataagtgtaagtttccaacctagaaacaaaataataaaaaagtaacttaaaataaaaaatttgtaataacataatgaaactattttttttattcttttaatgaaattattagtttctttcaatgttgatgaaactgatttttaaagttgtattatttttagattatattttttaaaatatttttttttcaggatgatgttgatgaaactggtttttctttttttttgcttctgcaggttttaatgaaataattactttttaacaaaaaaacaatgaaaaaacaaacaaacagtactttaaataaaaaataagttcaatttctgtaaaaaaaaaaaaaaaacgcaatctacagttgagattattttttatt

SEQ ID NO: 357348 - DNA, 618 bp, Cannabis indica
taataattatgtacattataattttgtagggtcacttgtaaattttgataatttttttaatagtttacaatgctaaaataaaatttaaatattatattctaatatttataactgtttttttttttatactagtagtttgaattttattttcgattgtagatttttaaaattttttgaaaaatttataggtaatcctaaaaaattataacgttcctaatcattaaaaactaattgaactccaaaaaattattagataccaaaataaataaaaagtgtaccgaaataatatattaaaagtatactatatatttttcgagtgttaacaaagtatatacaatatgtaataacactactacaatctaagcctttagcttcccttttttcaatctaatttataaaaagggaagctaaagggggtgaaaatatctgcattgacatttagaggcggttttttggtaaaaaccgtaggtatagagtgtatatatatctatgccgtcggttgggggttgggaaaaatcagggtttttttatataaccctatggcgtcggttattaggtattaaccgacgccataggtgccacctttattcgacacgtggcacctatggcgtcggttaa

SEQ ID NO: 357349 - DNA, 953 bp, Cannabis indica
agggcacaaaacccaacactctcttcctcactccctctcacacgcccatacaagcattctcaacacttgaaatttaccatcttgattcctattttgtatccttaaggaagctatatcggatcccaccctatagtgatctgaatagtatttttcctcagtatcaatacaactaaaaggggagtaggtcattacccgctaacgaagggggtcgaacctttataaaattctgtgtgttctttgctttctattctaattgtgtaacacatggcaaacatcaaatttatacgaccttgatgtcagttaatcactttttgaagtcaacacaaaattcaaaaagatggacgaattttagtagaaattgagagggctttgtatacacatactttgtatctcgaaaagatttcataatataaattttcatcaacatcaacatgtaattattcaaatttcttaaagaaaattacaagagaaatattgtaatacatcaagaaaaaaataataataataacataaaactctcaaaaattataaagcaaaagagaaattattgtgctataaaaagtaaaataatataataataataagataaaatttgagaataaattagcatatgctaagttctaataaattatgtaatatttttttatttattatatattctatttttattattatataaagtttgactgcattttattagaaaaaataaaagagaattgttaaaaagtatgtttagtatttttttggtgtcatatgattattggtgtaattaagtatcgggtcatcgataactaatcgtgagtcactaactatagaaaatgttagacactaataataattaatagcaaagttgaaaacaaacttatttgaccgcattttttaagttcattcattttttttattattattattttttacaattttagaacacttttttttttttggcttttttt

SEQ ID NO: 357350 - DNA, 893 bp, Cannabis indica
tacaaataggaccctgaattgattttttgtcaaaataaaatttaataataattcaatctaaatgtgttatgacaaaaatgtttatattttctgtatttgtttgtcttaggaattgtcttcaagttggttatattaaaaaaagttgtcaaaaattaagctcagagtcctatttttattatttttaaaaatatagggtctattttatcatttaacaaaatagaggatttaatctgtaacttttagaaaacacaatatctaaaatggtataacaaaatagaaggatttagataaatttatgacctttttttttttttgaatgataataattaattggagttgactttaattgaacaggcaatagtatacttaggtgtcatgaacatcatgctaataaaactttataacttatggcatgtttactaatcaggattgggagtgataggtatggtaatcactccttttcatttgtttactttatttaatggttggaatactctaagggaaaggcataaaattaggagaaaagaatgggagaagttttcctcccaatttcttcaggtataaaccattacgggtaatgctattttttagttttttatttattttttattattaaaaacaaaaagacacttttgccaccaaatattatataccctattatatatatattatataccctaaaccctaaacaaactacttttctattctctttcgtttctttttttgcagcagctattttcttcttcttctttttttttctgagagaggaacaaccacatatcaacatcaaggtgagttttaattctttatcattcattatatatatataatttttgatgatgcatgtatgatgcatatattgatggtttatgtttattatcatgttttattat

SEQ ID NO: 357351 - DNA, 678 bp, Cannabis indica
ttgtggatatggaggaattggttgctagtagtgatggacaacctactcaggatagtttgcgtagccaggcctcaaagtatgcacaaaccctagaacaacgagcggaggaagctagaatctttagagaggatacaccaccacactttcaaccattaggggccaattctattccaccgtctgcatcgatgccccattctgcatctatgctacagtcagcatctattcacagcacttcacaacctcaagattcaatatcttctgccatattggcaagattggagagtgttgagagagacaacttgcttcaaagcaaggccagactgatattctgaaaggacatacagagattatgcgttacttgaagaccttattgacactcattggaaatccgagaaggcccaatacagaggcagaggcagagccacagtcaaaccccatctcttcgagagatgagttcattcttcccaatgattacaaacctaatgatgtgaaagatgtactccatacacctcaaaacatgtcgatcatgtccattagagatacgcaagattcagaggtgcaagttttagagactgtttcaacaccagtggagaagagaccgaaaaagaggctgaggtggtttgacgagtacaccaaaataaagaagaagatgaaaccatcgatagctcatgtaaatgt

SEQ ID NO: 357352 - DNA, 858 bp, Cannabis indica
acctgacacaactccctctataattctcttttttcttcaacttttcatgccattttccccgctaaatgtgacgcgaaaaatatcagtttgtgggagcattttggttctataaataagatcatttaagagagaaaaagtatcatattatagaatacagaaatcacactttgttatttctttgattctctcttattattattttagtttatttattttggtgataaaaataagtgaattaaagtaataatattggtgaggttagagtgtagctattgtactttttatttttaatattgatatattgattcttttatctatatatttcatttattaaatttttatttatcttctaatttttttttccaaatttaatagtatcttttatataaattcagtcatgcttttcttatataagttaggttattaatattgagaaatttgacaatccatccttaaattgggtttaggcacttaaactatactacccctttttgcatcatgcaatatatgctacatttaatttttttttttccaattttacccctaaaaaataaaaaaccaatacacatagccatgtacggtatactttgtcccatgagaaaccttcttacccttcttcttatcaatgttctgcttgtaacgcgtcatgtccttactcatagaccacatcaacttctgaaaagcacgctcaccctacggatacttgaagaaaaattcaaggttctcaacaaacttcaacatctccaacaaaacttggacactgccttctttttaaagctaattcaccctcaataaaagtgaccaagcttgtacacgtcatctgctacatcacatctctccaattggagaatagtgtat

SEQ ID NO: 357353 - DNA, 711 bp, Cannabis indica
aaatatgacacatcaatttatttgagagtattttttttaaaaaaaaactatctacatggttaatagtatttaaaaaaaaatagttaattgagttggcacattgatattagtttaatacattatgggataccaatttttcacatataatcttaattctgagagttgtgacaatatatattcctttttttatttgaaatttcctcttgaaaaaaaaaaaataaaataaaaaaatactatctaatagtataaaacaaacaaatatatatattaatatctaaaaaacaaatgtatattaaataaacacaatttaaatagatattagattctaatctaataaaagatgactcctttttatggaagtctaagaataattccttttaaataaatacacacatgaaaaataggagttatctaaaagtcgtatagctttgaaaccctataatgttaaacacgcccgtacgttaatcatggtataattaataacccgcagtatagtataataatagtatgattaaaagcaccactaagtgataatatttttttactttattttttaaaatatattataattttttttttttttactaacatacttttatattacaccatacaccaattttttaaaatacatcaccaaaaatttactttttaaaatttaattatattttcttttaaaaaaaaaaatttattatatttttattcatttcaaat

SEQ ID NO: 357354 - DNA, 1102 bp, Cannabis indica
ttttaattttttttttctagtgtaactctattaagttataacctcccaattagaatataatttacttggtcccaagtgtattcttgaatagaggttctactgtatacactatcactatttattcttttatttcttataatcatctctctttttattcttgctctttgattgcttctcttgattctttcactattcctaaaactgttcatgaagcagtgtctcatattggttggcttggtacaatgatagaagagatgaacgctttaattgtaaatggtacttgggacttggttagtttaccttcaggataatgggccataaggtgtaaatgggtgtttacagttaaattcaatcaagatggaataattgctcacttaaaaatcttcttgttgctaagggttatgcttaaacctatagagtggactattgtgatactttttctcttgttgctaaactcacatatgctagactgttcatttccatggcagctactcatcattggccttcgcatcaggttgatactaaaaatactttttttcatggagatcttgaggaagaagtgtgtatggagaaccttcatgggtttgttgcttaaagggagttagggcgagtttattttctttgtaaatgtttatgggattgaaacaaagtccttgtgctttgtttggtaaatttagtcagactgttgagaaatttggtttgttaaaaagtaagtcaaatcattttgtgttctatatataaaagaacaattactcgtattattttataagtggcatatgttgatgacatcattattactagaagcgataatgaagacatctcatcccttaagtctttcatttatacccagtttcacacgaaaaatttaggggtgcttaagtatttcttgagtgttgaagttactcaaagtaaacaaggtatttttctatctcaaataaaatatgtacttgatttcttaactgaaacaagaaaattaggagcaaaaccttgtaatgctctaattaatcgagttgtgcatcttacatgtgatgaggaaccatttgaaaatcctaaaaaatttcacaaatcagttggaaaggtaaattatctaactgtgactcgt

SEQ ID NO: 357355 - DNA, 639 bp, Cannabis indica
ccgaatcttaacactggctgcatcatccccgagatagctgtctgagggacgaaaccaactagaagacagataggctgaagagtccaaggaacgggcactggaggtctagaacccatccggggccggcataaataatcgccttactgagagaagtaatactcctttgcatgatccccccactgagtggaggatcctaaacctatggagacgttcatcgaaccctataggcctaaggctagcatactcaaggacaggagggacgtaatgtatcattaaaggggacttaccagaaccagaagtgctggcatcgggagcccccgtattcggcacctagaccgcaggccttggtctgggggtccttctctccaccgagcacccgatacgaaggggccttccggcggccacctaggccttattataagcctgctcctgggccttttggaagaggtacttctgatacttatcttctgccgtggcgatgatgtcctcccggagtaccttctctgcggccggaaccctcacgtttgggcagatgactttggaaaggttggagtcatccaccgactgatgcctctggatcaccttggccttctggcagttctccgtcgtgaccaactccccgacgtcgagggccttctt

SEQ ID NO: 357356 - DNA, 816 bp, Cannabis indica
acaaagctttaaacctatctaccaaattcggtttaagcctagtttccataaaaaaataagaacaggtttgtgagacttgatcatgtctgaaagccaattgaatgctcgagggttccccaatcctcgagcattccaacatataaggctcattttcccgggcggatgccgggtgtgctcagcatcacccgcctgttcatcatcaggaattgaagaagagccactaacatcaacatcaccagctctagctcgcttaagcatagagcgcattgaaccaccaacattagcttgacatgcttgaaaagtaggccttttgaccccagaagcacacgcgaaacctttacctctaacctgagaatcaggcaagggggtttccaccacagaggcaggggaggcctaacttgagttgaggatcaaagaaggcaaagcttcagcaagagagcgagcagcagaagtcagttcagggttaacgaaacccggggaatcattgacattaatggagtcagtatgcaacggggcagacaaagatgaacccgacaaagaaaatcccaaagagtagttaggattcactagagtagggatcatgacattataggattgacaagaaccagtcagaccagtaaccgaagttacattagagttcagcagaggagtaaaactaaatgggttattcaaaaaaggattagggaattgacttccatgaggaaagtcagaaaggtccatatcagtgatagttatagctggaggatgaggatattgaaaaggagattgcctttcagtaggcttttctttacctctaagagggagatcataaggaca

SEQ ID NO: 357357 - DNA, 558 bp, Cannabis indica
aataatttccaacactgataataccttgtttatcaaacatttgcaacctggtatttttgtagctcaaatctatgttgatgacattatttttagggtctacttgtgataaaatcttaagtgacaaccatgcgatagccattgttaagctagagtcggacaataaaaaggccttggagaccattgagcagatgaagatagatcgtaagtacggagaggtcgatcgcaataaaatgtacgccaatgagaatgtctttgggattgcttatatgtgttggtgccaaaaaaaaaaggacttggacttcaagttcatgggtaaattactaggtgagttcgaggaacatgttcgtaaggcccaagtggctcctgccaatactagggcgactgagactgaggcaaaggctgaggagaagaaagtgttggaaattattttaccaggatcttagatctactcacaagtatgttgattaacaccctaaatatgaactttctaaaacgatgaaataaatacatataaagtttagaaaaccttacattgggttgcagcggaattaaatgact

SEQ ID NO: 357358 - DNA, 577 bp, Cannabis indica
caaacaatgggcggctttgttcacaaatcgttctacaaactaaataacaacatgactcatagtagataaaataaactgacaatcattcaccaacaaaccaaactcagacgacatatgcaagttactatagatagcttgaacacagaccaagctatctgtttccaaataaaacattagaccaagtatgtcgctgaatccaacttagagcttccttgatcctaataatttttgcaatctctggtttaacagtctccaatttgcttttagtgtaggcttcaataacatggcctacatgatttcgggccaagcaacccatctcaaaacgacttacatcattaaatagagctctattattatttttatatattttaattgtatggtgtatatatttatttagtttttattttattatggtatataatttttgtaaagacagcttaagttaatttggaaattagcagttaatcatgattatttatgaaaattatttatagctatttaaataatttattatactgttattattgaattcagtgatgctttttatgttcatgtagtagtttgcataattttgcat

SEQ ID NO: 357359 - DNA, 507 bp, Cannabis indica
tttttatgtaaatttaaaataaaaaaaaaaatatatatatatatatataattaaaactaaattttaaatagaaataaaataaaatgatagaaaaattaggtttggagttaggtttggagtttgttagttgaacctacaattaataatattcaagattaactataaataaaaaaaatatattaattatggtgtagtttttaagagttaatttgagtcattggattaaatcaagggcaataaattattatccctattgataagtaaaatactcaattcctactataatagctatataattaataaaaggttatcactgtaaaaaaaacgtggcaagtttcttttttctttttttttttttaattttcttttaattaaaattgataataaaaatatgataccctaaatatataatacccattccttttactttaatttattctctcttactattcatcatctttttcttttttttcttcactctctacttcctttcttcttttttttttt

SEQ ID NO: 357360 - DNA, 1003 bp, Cannabis indica
  modified_base (944)..(944): a, c, t, g, unknown or other
attttactatttcaatgattgtttatgtactaaaccatgttccccagactttgatatctaccaaatcatgccttcgaactttgacatgcactaaactatgccccctgaactttcatccatgttagacttttttactaaaattagaaaaaagtccttaaatccaacaatctcaatagttcagggggcattttcaatgaccttaaaagttcaggaggcatgatttggtacatgtcaaagttcagggggcaaaaatcttaattagcctttagaaaattatcatctgatccaattaaattagacgtcaaaattcaatctaatccaattattaattagatcggatcaactttttaattggatatccaattatacacttaatttttaatattaacataaaatatgaagaaaaatacgtaaaaaattaaatatcaccatttatttaagtttaatactttataaaactatcattgttacaagtgtaatgcaactaaaagttccaaaaaaagtaaaataaaaatagaacaaaatatcatcaaaataaatatacaaaatgattaaatgttacaaattcaacacatacaaaaaatccactaaaaataattaaaatatatataaatgtaattggattggatcaaatcagtttttaattaaattttaagaatgacatataagaaccgattcaatccaattagaatctaacttttaacatccaatctaatccaattataattggataggattggattagtattggatgttactcaccttagtgggacctaattttggattttctttaggcctaaacccaagtccaaaggtacaacctttattttttggttaaaattgtggaaaattgggcttttctgtggaggataggtaatgtgtccttgctttttcttttttttttttttttttttttatttttttttatttataatttgattgtntgttggcctttgtcttgtgtctctatagatatcgaataggtagagttttttatctcatc

SEQ ID NO: 357361 - DNA, 492 bp, Cannabis indica
aagacccattcgcacctggacttcctcttcttaatcttcaaaggaatctcctcctccattggcagttccacctcctgctgcatcaatgcctggctccactccaacaggcccttctactcgaactcgagcccagcaagcctctgctgagaaggaacttcgagcctctcaatctcgtgagaagacagtccctccagccaagaagaaactcaagactaatccaccctcggcctcatcaagttccagttcagaagaagaggatccaatggaagtttcttcagacaaatcagtgtctcttcactctgagaaggacagtgaggacacagaactcgagccagagcttcctcgaccaaaatctgcttctgcagcaaaggcctctgctgctgccaaaggcaagcagcccatggaagatccttcatctggtaatgtcccttcctctctttctggctgtcctcgattttattatcgtgacaatgaacgtgactggaatttata

SEQ ID NO: 357362 - DNA, 792 bp, Cannabis indica
aataataaattttttttaattatttaagcatataaattcaaatttcccttctctttttactagttggtggagaaaggaaccacacaagtcattttactctttatgtaattgtaatttgtaagcttgtcctagccattatatgtgtatatgctgttttttctttcttctttcaatgtaatgacaaagtcaacattctatttatgtatttattaattattgaaatactaactaaataataacataaatgaaatttgaataaagagtcccaatttgatgttataaactctacaatagagaaaacgacaaagtcagttaaaaaaattaccaagaaaaaaattgtaagtgactttacattggtatggtacttatttatttatttcgagataagtttgagccacatttcataaagagggtactactattagaaatataagatttttactattttgattaaaataatttttagtgcttgaaaattaatttttctctcaatatgtccattagaaaaatgatgcacaacagtcttggcatcgtcgctgtgagatttcacgatttttcgagatgtgtgagtaacattttaagagaatactaatgaatgtaaaagtaagaaaaaatgaaaagaagaatatttctaatttttgaattaaggggccattttcacaaaattaaacacaaaaccaatcttcatattcacgtcttagtagtatgaattcattgtgacttatgggaaaaaatattctgatatgggtcctggcaagatttcacaaaggggtaccactattagaaatgtga

SEQ ID NO: 357363 - DNA, 595 bp, Cannabis indica
attaaaattattgttagtgcttgaaaactacattttctctcaacatgtccaatagaaaactaatgcgcaacggtcttggcttcattcctatgaaattttacagatttttgggatgtatatgatgagattttaagagaacacaaacgagtgtaagagtaagaaaaatacttattaaaatttaccctgagcagaagaacattttaaatttctaaattatggggtcattataaccaaatttaatacaaaaccaatcttcatattcaagtcttagtactgcgagttcaatatgtctaatgggaaaaaatattccaagatgggttcgggccacacttcacaaaggggtaccactataaaaacttggcttggtccccgtgaaatttcacgatttttggagatgtgtagggtgagattttaacagaaaactaacgtgtgtaagagtaaggaaaaaacttgttaaaatttatcctgaaaagaagaatattctcaatttttgaattagggagccattttaaccaaatttaatgcgaaaacaatcttcatattcacttcttagtagtacaaattcattgtgactagtggcaaaaaatattccgag

SEQ ID NO: 357364 - DNA, 877 bp, Cannabis indica
taagtgcaagatttgattgttcctttttctggcactagcattggcatgaaagtatttggtgtttttgtccccgttgtgtaaccaaaattgcttcgatctttgtctccaatagatctcttgttgagctaaaagttcagagtaattattttgttcattaacaaactcgacattcaagggaaaattatggtgctgcttcagttgtgccattttctttttactggtagaaatacgacccttgaaattaccagtgagatccgaagcccactttgtcaaattatccccacaaaattttattttatcaaagagggataagttcctgtgcatatcccagcaatctcttacaatctgtgcacaaatgggctctcgagaccacgcgttctcataacgaaaacgaggagcattgaaagtactatgatgggcatcaggttgtaaaaagatgggagtatgatcggaactagaaaaaccaatgttggtgagagtagcttcagtaaaagtgtctaaccaactaagagagacagttgctttattgagacgaatttctacacaatggtctgtgcctcgtccacgatttcaggtgaaaggatagtcgcgaaggtccagatcaataaggttgcaatcatcaagaactgattggaaaccatcaataagagaagttgggtacggacgcccgcctctcttgtcggattggattgaaatattattaaaatcaccgatgatacaccatgggagagatgactcgcagtgcaatgaacgaagaagagtccatattcgatcccgttgtcttctgtttggtttaccgtagaagccagttaggcgccatgttgacatgccccttatacaatgtaacacctaactaacataggcgtattacgtgatt

SEQ ID NO: 357365 - DNA, 707 bp, Cannabis indica
ttttctaaagcttaattatgtttagatacatggatttaagcagtttttgtggttgttggttggcgttaataaagtttggagttttgaactcaaactttagtctttaatggtgaaatttgattttgaggttcggttgttgttttgttgcttgggttttgttctttatggtctaaataacaagtctggaaagtttggcttgaattggggttattttgattgagatatggaaattttggtctttcctgcactgaaccgaaattccggtttagaggggcctgtaggaatcgagattccggttggctccgaggaattttttcccagaaccggaattccggttggggaaccggtctaccggctggggcagttttgggaaccctagtttttcccattttcgtgttgtttagggtattgccatgttatttatcgatagggaaacttctagtttcaagtttaagtccccagaaactgatttagcatgtcattcacctacgttatgattgatgtgatttaggagcctgtaatttgccgagcagttgttccactaaggttggctggcacacttgaattcggaatcaaggtaagattagtataatgtcatgcatatgcttatacatgtttagcgtacatgttagttgtcgtcagaataacatattagatatatgttaggcaaattttatatagccatcagattagcatataagggcaac

SEQ ID NO: 357366 - DNA, 614 bp, Cannabis indica
ctctctctctctctcttaatttcttacagctctttaaattattattattttattggttgccgaaaacctcggtcaaaattttggtgctttcattgagagctaaagaaagcgtctgtaagtagacattgcattacagcaaaacaacaatggtggagactcgaagcacacgtcaacctggccctcttcaagatgctcaagacccaaatgacgaggacgtgtcctcaagagcaactgtgggttctgaggaagaagaaggaatacctgatgcgactacgaaggaaacttcgatgcgtacgcctacgacgaaggtatctactcagaattggtactcttaaggcaaaaggctgtcgatcatgaagctgaaatcgcagcccatgctggccatgcaaaaagccatggaggcagcaggaatccacatgcatcctaaagccatccctgccggacttggaaaggaaccagaggaatcctcgccaagtacccaaaagtagaaatctagggaaccaagccctataaggtatcccgctgaaagggaaaccaaaaaaaaccctacttccactcctatgagaaagaaaaaggtgcaggatccgtgaaaggtctgctaggatttctcgaaa

SEQ ID NO: 357367 - DNA, 563 bp, Cannabis indica
acataaaagtaatggatgacgtcgaaaaaaataatcctcatgaaggaatatgtcatcgccctagaaaagaggcattgagtcctcatggatctattgagtcatcacatgaacagactgcaagccttggggaaacccagtattagggtccctagcttgatgaaccttgggtaaacaacgagcggtcacttcctaaccaagttgatgaggatggcgcctacgacccaaccaggtacataccaatcgtggagttagaaaatcaccatcttaggcgtcgattggaggaagcaaaccggcgtaatgcagaattagagcgtgaaatagctgcagtaaggcaagtgcaggagaatagttcctgaaatcaacttgaccttggaagaagagattcacgaggcaaacctcgcaactcgcaaaccaaggggcaggagacaacccagagatatactcaaaactcttaagagatgcaacttaaggaaattgaggaaaatctagggatgcagcctgggatatgtggaacatcggacggaaatcgccaaccctctcttcaagttcataagaaaggaact

SEQ ID NO: 357368 - DNA, 497 bp, Cannabis indica
aagtgttgctcaaactttgttgtatttgtgataatttaattatttagtaatagtccaaactgcaaaactgtataaaccgcactgcactattttttacagtgcaattttttagtttcgcggtgcgggtgcagtttgagaaattaaaaaaaccgtatgtgcgggttaatttgaaaaaatagtcaaaaaccgcaccacccgcaccgcgaagactctacttatttacgtatccatgtggataaaatttatgtacacatgaacaactaacatcgcagttaattgtcaaaaataaataaaaattgctaattgctaaagaaggcgggttttggaattttttttttgtcaaaatttaaattttagaaactaattactaagaaagtgaaaatataaataatttccataaataaataaaggaaaattctacaatacacccccttaaaatggatatattgatgcacccctatctattttagcatgaaaataattttttagttcaaatt

SEQ ID NO: 357369 - DNA, 941 bp, Cannabis indica
gggcataaaacccaacactctgtaccataattgtacaagtgttgatagtgtaacaaacatataagcatgcatatacacttaacatatacatacactcgcatattgatatcacacattatatacagttcttacctcctttccaaattcaagtgtgttggccgacctgaacggaaattctcgtactggatggatgccctaatcacataatgaaaccgggtaaatcacatgttcaaaatcctaatctgagaaacccgaacctataactctaggctctgctataatcactagggattacactaactcaggaaataaggaaacaccgaactaaggcacttaaatggatgagaattgagaaaacgggacatttggggaaccctgccaaaaccggctaatcaggtactggtaaaccgattaaccggtttatacctgtcctccccaaaaactcacaaatttgctcaaaacttgtccaattgcctccaaactttccagagtacctaaacaatgtatacacaacatattccaaccagaaatttccaaaaaaaacacactaaatcaaattatgccattaaagatcaaagcttaggtttcaaagcataaacttgtaaaaatccaacataaactagtaaaaccagctaccagaaccttcaatcaacttaaattgagcataaaaccgaactccaagcaattctaacccttacagccaccaacactaaaaatcattactttaaaccaaattcaaagcttaaaaacacatagaacaaagaactaaggattacctcaacctcaagaacacttgattccaaaaaatatgaggatttgaatggttttcccctggttttgttgctggttcgaagagagagaaggagaagaggaaaagagttctatttcttgatttttcctttaatttcctcaaaataaaaaggatttcctaactaatcctt

SEQ ID NO: 357370 - DNA, 626 bp, Cannabis indica
aaaggagcatcaagcagggtgaactgatgagcagttagccgagaattaatagcagataaaagtaaattagtagcatccctgctactaccatgagaatggaaaaagggttgagaaaaaacgacagatttcagtttcaatggcagcttgactagaaatagtactaccatcatcaagagtgagctttctaatgaaattggttcttttccaagatgaggctttgtgatgaaaaaatttggtgtttttgtcaccagcccgaagccaatggactttagatctttgcttcaaaaatatctcttgtttataaagaaggctatcaagctgcgactgaagtttagaagcctcgaacaggttctcattagaagcaggaagggaacaaaagatgtcattaagctgcctatcaattttattaatcctattagctaaacttttaaaagattggttccaagttcggatagcctgaatacaactgctttgcttactaacaaaatttgacaaaagatgattattagagccagagtttgaacaactccagaaattattaacagtagtaaaaaagtgggttcagtaagccaatgatttttaaaaggaaacctcatatttttcactttatgcatactatcatcaga

SEQ ID NO: 357371 - DNA, 814 bp, Cannabis indica
ggctaggcttcacctagcccaaccgaaattttcatatttttacgaacttgtgtctgtccccaagtaagggggataaattttaagacgattttttcacactccgggaccatcctaccaatgagggtccagtcccttacgatttccaaaagaatgttatggagtaccgtcaccgatttttcttctcatccgactttcaagcagtggaacgcccagaactgctcacggagtgggtcaggattcccccgatgcattgcaccactcctacccaactcttccttcagcatgccaaagtcttttccacatatgacaaaaatcgtcttaatgtgggggacttggtcacaacggtgaattgcaggaaggctaagctcatcatggagggccaattggtggacgaattcaacctctccaagatcttttgtcccaacattcgcatcccggatgctgaaaaggtactctgggcggacattatcacctcaatggaggaccggcaccagaagtacctctttaagagggaacaggatctggcttacattaaggctcaagccgctgccgggaggactctccgggtagaggctggcaaagagtgcgtgttgtctcggccgaagttgctgctccggcttcccaatactagggcacctgatgccagccccctggatctgataagtctcccttagttattgatcgtgtcccttccgctaaagattattctcgatgtagacctatagagtttgatgaacatctccttaggccattcccggatggggtgatcatgcgaagggcttttatttttcaaacctaggtcattttttaggcc

SEQ ID NO: 357372 - DNA, 1211 bp, Cannabis indica
cttgacacgtcgtgtacccagactgactgacacccggaccaaaaccccgacccagaccaagatcgaaactcgaaagctagatttgtaacgagaccctgacctagacccagacctagaaccgcacctgggacccgaactcgaacctggacctaaacccagacccagacaaagatccggacctggacccagactcagaccaagaatcagacctaaaaaccaaacccagacaataatcggaacacggcactccgacccgaacctggacaccggggccgaacccaagacccaagaaccagactcagacctgggacccaaagcccagaccaagactaggattgggatgcgaactcggaccctaaccaaaaccacgacctaaactcggaccgaacccgaacacgaacttggacccggaacgggagctaggacctgaacatagatgagggacacagacctaggaattgggcccctgaactaggacaagaaactggtctcagaattttgatctggatcaaggacccaaccctagacccaaacctggacataggaccaacgtcgggacctgggatccgggatcgatgcttggacctgaccactactcagtgtctaggtcaaggacatagacaagaacccgaacccaaactagaactcaaactaagacccggacacataccaagacccagacccacactcgtgaacaaaaaccgaaacatgaattagaacgggaccaagatctttgaacgggaccgggaccaagatctttgaacgggaccgggaccaagacctggacccagacccagcctcgaaccctacctgagaccgaaacccagaactgaaccttgccacagactcaaatcatcacccgaacccagagtcggatccaaactcgaccaaaacccgtagcccgtgacttgaaactggaatcgaaactagaagcggattaggacggaagaataaaccatgacatagacatgaacatagagccaaaactgtaaccggaacaagacccagactcggtcaaagagccactctgggattgggtccaaaatctaaatccaaaccagaacattaaacatgactcggggcccagaacaaagacataaattcaaacaagaacattaaacatgactcggggccaaaactgggatcgaaacccagactggaccccagtctcggtcttggacctagacccaaacctagaccctgacttggga

SEQ ID NO: 357373 - DNA, 299 bp, Cannabis indica
tcattatattctgctgccatcaatgtaaggatttcttaatctcttatgtgtttatttcattgttttagaaaattcatatttaggatgatagactatagattataatcaaacatacaaattagtaaatctagatcctggtaaaacaagttccaactttattaacacccgaaccacgtaaaaaaccttcatctttttatttttgcaagttaaatttctttagttcttaaatatctagtttctaaaaatctcggtaaacactacacattgagagcaagtattcaatgttgaagaaacaatta

SEQ ID NO: 357374 - DNA, 500 bp, Cannabis indica
catgaaaatttgcaattttcctttacctacatttgtacttcattttataaccgatgcaataagtaaaaaaaaaaatattttagcaattgatatgacatttttgaaccgacgtaataagttttttgtgacggtttgaaattgccataaataattttgcgtcgtttcaaaactgacgcagaaaataaaatagaagtatgtattttttgcgtcggtttgaaaatgtagataattggtttttgcgtcattttttaaatgacgctaatagaaaactatttgcgactacggtatatacgtcgattttctcaaccgacgtaaattctttaaatgacacttaaaaactgacggaaattatactttttgtagtagtgatgatattgtgtttggctctacttctaactctgaagtgcaagtttttgtttcccaaatgcaaaaggagtttgaaatgagcattgtaggtgaactcacttattttctcggtcttcaagtgaagcaatcagatg

SEQ ID NO: 357375 - DNA, 788 bp, Cannabis indica
tatggaattgagccaatttgacatacactacattccatgcatttcaataaaaggacgggcccttgcagacttcataacggaatgcaatgaggcagaagctagttcaagtgtgccagtagcgcagaccccagcatggaaggtattcgttgatggagcgtcaaacgaaaacagatccgatgctgggatagcaatgatatcgctagatggacttcggcttcaagcagccctgcgttttgcattcctggcttctaacaacaaagccgaatatgaagccctaattgcaggactgaagttggaaaaagtcgtaggggctacaagagtagaagtctccagcgattcacaactggtggtcaatcaagtctcaagggaataccaaacgcgtggagagaaaatggtcgcgtgcggaacaagtggcccgttaacaacttcatgagttcacggagtacaaagtggagagaatttccggggagaagaacgctcaagcagactgtttggccaagttagcatcggacttgagatagagagactgggggtggtacccattgaacgcctcgcggagccgagcatcagaattaaagaaacattagcgacaaatgagcaagagccaagtttgatggactctatcatcagatacatcacgaaaggcgagttgcctcaggaaagggccatatcaaggaggctacagtatcaggcacatcagtatgtaaggatggataatattctctactaaagaagactcagtatgtcatacttaaggtgtgggtcgctcacatttctgatagtggtac

SEQ ID NO: 357376 - DNA, 734 bp, Cannabis indica
ttccaacaaaagtgtagtcactaatgtctcatgattttggtatagatgccaacaaaataatagcttgatcctctttatcaattttgacctctacatttaataattgaattatacacttattagatctatttatatgatcccgaacatcttttccttcaaccatttttaattcatataactgcttcttcagatataatatatttgttagggattttgacatataaagcttatttaatttttttataactcagaaaaacatgtttcattcaatacactatactttaattcaggaaccaaacttaaacgaatagtgcttaccgcttttgcctgtaactcttccaaatcttcatcagtcatactctcaggtttctttccctgcagtgtctttaggagcccttgttgtaccaacatatcttttaccgtactctgccataaactaaaattattcttcccataaaaaagttctatcttaaattttgtggaagacaccatgttagacattttcaaaggcgaagttgttaagtatatttaacataagtctaatcaaatctaacattgtcctatatttcactaacctttaaaatcaaaaggaaaatatttaacatgactagtaacacgtcaaaaaaatatgactaataaggatacacaacattattagtgacgaaattcaaaaagaaaacaagtatttattcttgtagctagctgaaaacaaaataggataatacaattatttt

SEQ ID NO: 357377 - DNA, 519 bp, Cannabis indica
tttgtaaagaagaaaaaaaaataggtgagacaaataaagagagaaagagagagagggtaaaagaagaaagaaaaaaaccaataccttcaggcgatggggcaaccgacaatggtgggaaagagcgagatagagagagagattgttaggtgttgaccgaggtttttggcaaccaattaaatgagataatgatgagagctttagaataattaatgcaggtagtttttacgtggttcggacattaatgagccgtaatctacgagtcttttttatttatgagagttcttatacagataatgttcttggtgagttctctgtctctggcttttttttttcgaacccccccttttccattttgttcaggggtatttatagagtttggtaaggatcactaaaaagggatcacttgtctttgagtgccagccatgcatgtatgtgcacaagttcctaagggatgtaaaatagggtatacatgacctatgctgtaggtatcgtagggattaggtgagagtaatctttatc

SEQ ID NO: 357378 - DNA, 1664 bp, Cannabis indica
ttttattctaatcaaccaaaacccccattttctaattcttgtcactaatttgtgaataattgaataaacatagttctcgtgggatccacccttacttacaattacactaaaataattggaggtatttgaataaaaatatcagtaaatttgttgtggcttacgacacacatcaataaaggataattttgattaaaataagaatcaaatgatgtcccgtttaggtgagagtcaaagttattcttattttataaactccttcattgttttatgttgtaaacactagtctaagttgtcatcttttgatgagtcaactaaatgtcgcatttacaaatatttatctgtggagatctaacacttttatgtttgtttaacggataacaatctttggagtgtcccgttaaaaacaactaaccaacttagaccaacaatgaagattcaaaatttgtactacaaaaattaataataggaaacataatgaaggttcaatataaattcatacacattcagaaattagcaagcatttagcaagtaagaaaaacatgtgaaaatacaaaatagacacatcttaaataagaatccaatgatgtcccatttaggcgagagtcaaagatatcattcgttgaatagagttgtcatctcatctaaaatggacaccattttagcaacgttttattcgattgaaatcagaatctgacgttgtctcatttgcgcaagagtcaaggtcattctatttcatgagcttctacaattgtttcatactttgtaagccctacttttagcagtcactattgggggtgattattactaagaataaaagactttcaataatactatcttccaagattctacgacgttaaattgctaatgaatgaagatctattagcgatgaatctcattaaaacaggaactatgtagaacagacaatgtagatcaaatatccttataataaagctcattattttaaaggagttgtattttcatttgattcttattttaatctatttattttaatgttaatatatttatttaattaaaagtactaatttagataactctaaatataaattttaatttaacatttataaaatcacataaatacttaagtagatcagaaaataaaaatttattttaagtccttagtattaattttcaataaatattatgaaaattacttaatttaagttggtcaaaaattaattaaataattaattttcaactcaaaattaattttccatagatatatatctgattgaatttgaaatccaatgtatttaaaacatattttaaaattactcattaaaatgaaataaaataaatttcaaaaaattattgttatattgatctaaaattaattaaataatttttaacataaatataatttgtctatttaattaaatcttttaagaaaaaaatctaatatttaagtatcttgaacaaaatcaacttaaatattaatttcgtatttttattttggggccattaccggggattatagttttattttataattcatattgaatttttgttactaacttcttttactttgataatctcaggtgtacatgtctagtggagatgatactcaagagaaactttaaagggttaaacaatttcttcagtcatcatctgcttctcgatcatagaagactatcaccaacaaccaa

SEQ ID NO: 357379 - DNA, 527 bp, Cannabis indica
tcagacgagttccaattgtttaacaacaaattggttaaactcaggtgataagcttttgagaacaaaatgaactctttgctctctagataaaacaattcccagcatagatgccttctggaatttcatgttcatcatgagcaagtgtgaagtgatactctaaccaggagtcatcttcacactttagagttcattcctaaaggcatatgctagatgagaattggagtgtgggttgtacattttgacactacaaatatcaataaacagaaataaattattggttcaatgaaatgcatacacaagtttagaaaataacaagtaaagcaaatatgtttacaaaaataccaaaaattaaacatattaaatatttttcaaggtttccaacttaatgaaatatagtgtctcggtaggcgagagttaaagataacattagttgaatagaatggtcaactcatctaaaatggacatcattctagtaaacttttattcgatcaaaatagaatccaaacgttgtcccagtaggcgagagt

SEQ ID NO: 357380 - DNA, 537 bp, Cannabis indica
aatcccggttaggggattagggtttcataatcattttgggtagcgtgcctaattatttagggcgttacaccttaggtctctggaacaagctggcttcattctacatgaaaaaatatcttgcaaacaagttgtatctcaagaaaaagttgtacacacttcgaatggatgagtcaaaggaattaagagagcatctagatgaatataacaggatcattcttgatctgaataatcttggggtgaaaattgatgatgaagaccacgctataatcttgttgagttcacttcccaagatgtatgagcgctttgttgatacaatcttgtatggcaaagaaactctgaccatgacagagattaaggctggattgaattctaaagaaattcagaagaaaggagatttgaaaaaagagaccaatagggaaggattattcattattaaggaaaaattccccaataaggaatacaagggaaatcagaactcaaatagctacaaaggtaactattcaagatccaattctagaaactccacaagagggccaa

SEQ ID NO: 357381 - DNA, 412 bp, Cannabis indica
aatgtccttatcgtcttttgactgacgtgactcttcacagtgtagtcgtcgatagacttaaatgatcattactttgtagctgctggatggaggttgtgccgtcagactttattgcgtgtagcagtcccaacacgcttcctcccatgcggcattaaatgcgacttgattgctcagggaaagactgacacctcgcggagatgccttagcgttacttgggcttccgggagcatatggggtcccatatgccttctccgggaggcatgtcccggaagagtccttattacataaggacttagcaaatagtttgaatgataagttgtttgatccatgtgtccttgtctggttggtccacgtatattgggcaaaatcaggggcaacaaaaacatataataccttttacataatgaagggt

SEQ ID NO: 357382 - DNA, 564 bp, Cannabis indica
gtacttctggttaggtttagggactcttctggctttatctcttgtaagctgatactatgtgaggtcttcctaatttctgtcttcttcatcttgaacttcatgttccacctgatttggtgcttcttgtggtttcatttgaattggttccacctgatctggatccggtaccacttcagttgggacagtttgagtgactccaatagatgtacctgcagggttagtttctgtggaacctgcatcaagctcattagtatttttacaaggacaatcattttcttgaaaaattacatctctactaatgagtgttttaaaacctcatttcccttttacccacaatctatagccttttacaccctctaggtatcccagaatcacacattttagagctctaggctctaatttccctacactttgatgtgcataagctgcacatccaaagacttccaaattagataagtcatgtggtttaccagtccacctttcttcaggggttttaccttcaattgcaatagaagggcttctattaattaagtatgtagtggttacaactgcttctccccaaaa

SEQ ID NO: 357383 - DNA, 423 bp, Cannabis indica
attggtactgaaccaagtttgcatgtcaacgaagatgaccgcaacatggacgacgaagatgctactgaagaatctgatgaagaaattttagttgacctgtgtgaagatgatgtgaatgatcatttagttaataatgatagtgatatgaatgattaattttcaatcactttattttgtaatacatacaattattaatttcaagttaatatttcttatttcaagttaactttattaattttaaattattgttactattacttataaatgaaatatttttttcaaaaaaaagtaatgtcagctgatgtatccacttatcatggtggagacgggggtggtaccgatccaccggaccctagtagggttccgccgacttgtcagacggctccaccgccaagaagaaggggatgtggccttgctaccaac

SEQ ID NO: 357384 - DNA, 1248 bp, Cannabis indica
cttatcaattccttgtcgatcttattatctagaagaaacccaattattttttttttgtgaaactctttgtcggaaggacaggttggaaaggctacggggtgcaggttggggttgagatggattgtagttcggttgatgcgagaggacagtagtggtggggtggccatgcttttggcgtaataatgatgatgtgcagctacttggatactcttttcatcacattgatattcagatttcagaagtagcttcttctccttggcgcttaacgggtatttatggagaacctaatagagttgtccggtataaaacatgggatttattgagattgttaaagtcagaatcttctcttccttggtgtattattggagacttaaacaatactacgagtcatacagataaaataggaggtaatagatatccacaaatgctggtggatggtttcaactaagctttgtctgactgtgatcttgttgatatggagttaatcgggtatccttatacttgggagcgtgggagaggcactgattcatgggttgaagttcgtcttgatcgagccctcgtttgttccagctggttccaaaggtttcgtatggctcagcttcataatttggaagtttcaatctctgatcattgcccgctgcttctggaaccgacagtgcattttgttacggtgccgtttcgtcagttccggtttgataatgcctggttgcgtgaaccgctgtgtcgccaggttgttaaggatagttgggagttgtgtgcaggtcagcatgttatgaagaaaatctcgtattgtggggaatctcttcaagtgtgggggcgtgagtatacaggcaattttaaaaaacgaattagtcattgtaagcgggagatccagtattggaagaaggggcgggatgctatgtccgttcagaagtttcgggaggctgaactgaatcttagtgaaactatgaatcaatgagaagtgttttggcgccaacgttctaaacagctgtgccttcaagaaggtgataataacagtaagtactttcatgctaaagctacttcaagaaagaatcacaatacaataactcgacttatgaatgatgtggataattgggttacttgggaggatgagttgcccaatgttatggttgattatttcactaagttatttacttcaaatgtcatcgattactcaactgtggttgaggagattactccttcgatcgcagtggatcagaatttgtctttacttaggccggttttgga

SEQ ID NO: 357385 - DNA, 993 bp, Cannabis indica
tacacaatgagttgttttcgtcttcctaagaaaacgatcaatagtattcatagtatggctgcgagattttggtggggctcatcggaaaaggatgcgaaaattcattggtgcaaatggtccgttctgtgtaaaaataaggagcaaggtggcttaggattcagagatttgggtttatttaatcaagctctccttgcaaagcaaatttggagatgtataaggtttccaaattctttgtgtagcaaggttttgaaagctagttactatcctcagagtggtgtattggaggcgaagtgtgggaatcatgcttcctttgtatggcgaagtttggtttgggggaaaaagattattcagaacggctatcggtggcgaattggtaatggtgattcagttcgggttctagaagacccttggctacctaggcctctcacttttaaagtatatgataaaccgcctttgccagagcaactctatgtcgttgatttgaagaaaccgaatggtgcttgggatgcggagtttattagagctgtcttcaatccaacagatgcggatctcattcttcaaatgcctacatcggagtgggatattgaggataaaatcttatggcattatagtagtaatggagagtactcggtccgtagtggttatcgaatggcggctgccttgcaggtcaaagatgtacagtcagatactgaaccagctgagaaatggtggaagtttctttggaagctcaaaattcctccgaaggtaaagcattttgtttggaagatggctcattcttggattccaactaatgcggctcttgctcaccgaaacattcaagttgagccttactgtagccggtgttctattggtgcatatgagaatgtttttcatgcactttggagctgtcgggtgaaccgtgaggtttggacttcagctgggttctatgggaaaattcagaggcttggaagggaggatgtattagcctttctaatgcgcatctcagccactttt

SEQ ID NO: 357386 - DNA, 665 bp, Cannabis indica
cccaaatttgactgccccgtgcaggtgttggcccccaagtgtgacaagggcaatacctgcacctgacagttgatctgtagccgacccatcctcatgtaatttctaggtaggtttatcttcattgttttttggctgagtttcttgtactggctctaggttgctttttgaaacgctttcttctttgcccgtgcattcgactacaaagttcgctaaagcatgtcctttggttactgtttgggattgaaaattattttgtattgactcaattccactgcccatttgagtaatcgtctagaagcatcgagtttttgtaatatttggtgtagtggttggttagtgtataaccagacaggatgagctcgaaagtaaggccttaacttccttgttgttaatatttggcattaagtaagcttttctatcagcgaatatcatccttcagcttcaacaagtcttttactgatgtaatagattggatgctggacattttatgcttctctgatcagcacgacactcacagcatgttctgtaacagctaggtatattcctaattcttctccgtccagaggttttgagagtacatgaggttttgcaagttgtctatttggttcttgaaaagcattatcgcattcctctgtcccttcaaatttcttatttcctcgaaggat

SEQ ID NO: 357387 - DNA, 675 bp, Cannabis indica
ataatctgccggttcggactgccgtacaaaatagtttcagataatggcaagcagttcgacagccaatccttcactgacttttgtgcgaaccatggtatcatcaaaagtttccttgcagtgtcgcattctcaagcgaatggtcaagttgaagcagtcaacaagaccttgaaggatacactaaagaacaaactcgaagacgccaaaggaaattggccagaagagcttcctgaagcagtgaactgagaaaacaacaactggacaaacaccattcgctatggcgtacggatatgaagctatgctacttgtagaactcgagccaccttcccgcagaagattgatgtacaatcaagataccaataacgtactcctggcaaaatcacttgatgaaatcgaagaacgacgagcaattacaaacttgaagttgatgtcccatcagcaaaagttagctcgatatttcatagtcttgaccctggttctacgtccctagtctggttccatgtttgcgtctgagttcaggttcgggttcgggtcccgagtccacgtttgggttgggattcgggtccggctcccaattcaggtctaggtctgatttggagtccgggtcctggtccggttacggttctggatctaggtccaatttcagttatgattccaagtccaagtcctagttccagt

SEQ ID NO: 357388 - DNA, 569 bp, Cannabis indica
ttgaatcggacaagccctctgaatcatgattctcttcagtttcttcttcaggttcagaatccgaggatgagacggaagggggattctccttgagatttttgccctttgaagatgaagacaccacctttttccctttgaaaacatttttaggctgaaccactttgggctttttaggagtggataccttggaccttattcgagaactcaccgtgggcaaagtcaccatagctttgtcgacattaggtgcaccattgaagaagaagacttcgacaatgtgtgaccggatgaatgagattcatcatgatcactaaacccaggtgttgaagaagcaattggagaagcaatgactggtggagaggcgagattgatgaccgatttttgagcttgggtcttcgattttctggcagatttcgtcggagcagaggacgaacaaggagctccggtcgctggtgcagccggcacaagtggggtgatcggagatgcagaagcagagccacgggagggcttcttgaacggttgaacattcttagttttggccatttctctttgaaaccctagaacacaaacac

SEQ ID NO: 357389 - DNA, 712 bp, Cannabis indica
attagtagttgtagtttttgttgttttttgttttttttttttaacattcgaaagtgtagttataagtagagttgtacagacattttcgtaaacgcccaaccgtccaaaccaaaacgacaaaatcgataaaaaaaatacaaaccgacataactagacaaaattctaaaccgtccaatcaattacttgggcgggttgaaaattgatccaaaccgcccagttaaatcgcccaaccagatttttactttttttattttattttatatatatactatataatattgttgctcctgattttgccaaatattcgtggaccaaccagacagggacacgtggacacgaaggtcttaacatttaaattaatggctaagtctttataaagaaaggcgttattcgggatctacctcccggagaaggcatacgaagtcctctatgctcccggaggcctaagtggtatcaaagcacctccgggagatgtcagacttcctctgagcagtcatctcgcatttaatgccgcatgggaggaggcgtgtgggaactgccacacgcaataaagtctgacgacacaacccccgatctgcacctatatggctatgatcacttaagtctaatgacggctacactgtgaagaatcacatcagtcaaaaggcaataaaggacaatccacataaaatccctacagcacctagggatttgaccatgcattacccatggt

SEQ ID NO: 357390 - DNA, 670 bp, Cannabis indica
atataaattgataagaacacgttttaataataataataatataatattaataaaaattttaacattaatagttatcttattgtttcttagccactaaaaaatctttaaatttagggtatttggtcaactccgagtatcccaaagtatttcgatatctctaaaatcaacttatcttaataatcctttcaatatttttaactaaaattattgtgatattttttgcctctaagatcgccgaacttgaaaatatctatatttcacaaataactcatatgatatccacatatttcaaataaatctccatggttaacaaactacgcttatttttccacttatagcaaaatttataatttatgctaaattagattagcaagatcataatgctactcattactacttatttattccataatatataataaaccctaattattcgtaattaggtttctgggatattacaaccatcccctccttataaaaatttcatccttgaaatttacctgaataatttgggatattaccccccgtattcatgattttaactctcaagttgcttcttccatcttgttgtttctctacaacattttcttaattagtggaaatatctcattccatattactttctttttccagttcaaaacctggacatgatgtttttcccatgtaataa

SEQ ID NO: 357391 - DNA, 579 bp, Cannabis indica
taaaataatttccaacaattcacagcgtgttgttaatcatattctcaaagagtatcaagcctgagggtcaaacatgattgtatacttaaggaacgctaaggatctattagcgtagctcaagtactactccatcaaacaagtgtcacgtgaacagaatgccaatgaacactcacttgccaaactggctagtactatagattttgatactcaaagtgtagttcccatcgaataactcgacaaatggagcattaacaatgactcagagcctatcccaatgattgaaaacactccatcatggatgatcccgattacacagtacttagaacaaggtattcttccaactgacaggaacaaagctaagagactgatgagaaatgaagctccattcttcatgcatggatgcagtaatgtacagaagaagtttctcaatgccacttttgaggtgtgtcatgaaagaagaagccaaacttctcatggtcaaggcacatgagggtttttgtggcaaccatgctcgggggaaaagcctttcaaagaagatcttgagacaagggtacttttggccaacaatgacagaagact

SEQ ID NO: 357392 - DNA, 581 bp, Cannabis indica
atgtttttaggacagaattacgcttgttttctatgttttcaggtttctcgtagctgttggacgttcaaggcttcaaaagtgcaacaaaagacaagttgagccaagaaaaacgcaaaaatcaggatttggttcacttctagccgcagtaaatttatttacggccgcggccaagatttggtagagaggtactctcgagacggattcagtagccgcggctagctgctccaccgccgcggccaagtcagcactcgccgcaacgagggaacccatggctgcggcgaggttccgtacaaagtgagggcaattttatcttttgaatcctggaacgaaaaataaaaagaaaactgcaaatagaagaaaaggggaagcgatttttagacctagaaagcagtcaagagcggctggaggagaaaagtggcgacccgaattaattcctacaacaatttctttcttccttcctttttaatttctttatgttgaattctgttttaggaatggttatggatttgaacatgagctaaactctcaattagggaagatgatgaatgttgtttaaagtttttcctagttaatgttaattg

SEQ ID NO: 357393 - DNA, 1040 bp, Cannabis indica
atcaccaccctcccctcactcttgctcttagggatagagctcaaaaacttgcccgactcctgggggaagaccaaaatattattcagttgacttccgaggataatcttgtgaggtatgggctctatcctaaggactttactcttaagtccgtaacggggaagaagaggaaatctggtgctggctagaccgaacgggctcatttggaggatgagttgattcaactaaagggcgaggctaagttgaagggtggtgcaagggccaagcagtatgctcaggagcccttgaatcttgaagatgaggctgaagaagagcaggtgactccactgaaaaggaagaagaaactcctggcaccgcccaggccaaggcctactaaacatgcgattcgcataagggagcccatttaacctgttcggtcatcccctcccgtgtttggaaaagggaaagctgttaggtctgaaataagatcgatgtcaagtgatgatggacttctgagtcttgttcgggcagtcaccttgcatgttacttcatcttgtttctaagcttcttgaccttcataccttatgtttctgatgtctgttttctaaccatgttgtttttgttctgtacagacatgtctcggctgatgctcgacgctctgaggaagagaataggcagaagctctagtgcctctcctccagccaagaagtctaagggcggtgaggggtcctctactaagggaaaaaggcctactggggaggttattaatctttctgaggagctgactgctgcaaacccctctaccccaaagttgtcaagtctaaggagtctccaccatcgaaggttgggtctcaacttgtcaggagtgatcttgaaagggtgcgggcacttactccaccgttgtcggtgcttctaaaggccaaaatgggcaaggagatgatggcccattatatgaacagactggttcctgaggtcagtgagcaactggctggtgctgacaatgactcttctttggaatttctggtgggcggagtcttaaaagtgttcaccagggtaagtctttc

SEQ ID NO: 357394 - DNA, 1091 bp, Cannabis indica
cccgtacttgtttagtattttaaatgattattaacgtatgataggaagcatattagattataattatttattttaagtgtgctgcctttaagtccataagagcggtattaagttttatgatcgctgtctcacctgcctggcttatgggttcgcaggctaagtcctataaaatggacgcccagcaaaatacaagaagttagggtaacatggttgagaccgaaggcggtcagggaaatcaaaatccctagaatccctgtggaagcggccgtggtcgtggtagagctcaaggtggtcgtcctgtaaatccaccacaagctcctccagattgggagtagaggtttgcagaaatgcaagatcgaatccgcaagcaggatgaagaaattcagaagttaaggcagcagggtcctcctgccgggctcctcagcaagttgctcaggccgttgcagttccagaggtgcaagcagaacaacctgttgctggcaaccgtatggagccattgtacgtaaggttccgtaagcaggcctccgtgtttctgggaggtcccaatgtgatgaaggctgagcagtggctcaagtgattgaacgaattctaaattttatgcgagtggttggtagtgatcgggtcacctgcgccactttccagttccaggaagatgctctcgtgtggtgggagttgataatcctcactcgggacgtcacagttatgacctgggaagattttagggagctgtttaactccaaatatgataatgaagtcgtccgcagtgctaagcggaaagagttcattgagttggtgcaaaccgaggggatgtcggttattgagtatactacaaagtttgaccatctggccaagctcgccgtgggtatcgtgccaactaactttagcaagaaagagaagtatttggccagtatgaatgtgaagattaggcattatctagtgatcactactaatgaagcaaccacatatgctgaaatggttgagaaagccctacgggctgagggtgttgtgaaattccttcaggagccccaagtgaccccgaatgttggtggaacccccacttttcctactcctgtttatggtagggatggtgg

SEQ ID NO: 357395 - DNA, 736 bp, Cannabis indica
ataaacagtagagacaactcatgagtaatagatatatgcaaacattacatttcaattgtcaacatgttttaccaaatgattactattccaaaaaaacttagtcaaaatagctactattgtaacgccctgtccaacagggacgccacgtgtgtgcaatttaataaaatactctgatttatataatatgtaatatcgaacccacctgctggagataaccaactccccagtaggcagcaaggttccaaaacctctagaaagcacatcactaggtctattcaacttctcaattattctacttgaaatataagaatgcgtcgcaccagaatcaattagaacagtcaagaaagtaccagcaacagaaagctgacctgtcacagtggaaggaccagcatcagcctcagcttgagtcagggcaaacactcgggcaggagtgggtgtatcatccttcttttgctctagtcgtagcaattgtggacaatttctcttcatgtgacccaccattccacagtggaaacaggccctggcctgacactcgcccaggtgatgccttttacatctcgaacattcaggaaaagtccgccagttttcgtttccaccacgacggaaaccttggttaccctaatgtttgggcctgctgctgatgattcactaggtcttttcttgcggtcaccgggatcagtacccctaccagaaccagcacctgctgtttgcttccatgaatctcttctggcaatat

SEQ ID NO: 357396 - DNA, 532 bp, Cannabis indica
tttatttttttgtttattaaattaaacatatataatataacaatttgttcatcatgatcattgtagcatagctctgtagctaagtaccaaagaagaaggctctcagcatgtgagaatagtagagagatgaaacagagtaaatgcagaggagaaatgatagaatggctcaactcaacatgaggagcagttactgatatttatagtgaatccaatattaggaaagtagttacacaggctggcaaaagctcagcacaagatcaagaatgtaaaatagttacaatagaaaacgaaaataactaacataactgtctatgtaacaaacttatcctaataccccccctcaagttacatcggggcattgaagtgttaacttgtccctaaagtatacaaactgagccacaggaagaggctttgtgagtacatctgcaagctgataatttgtgtcgacataccgcacatccaatttggtctcaaggactttgtcacggacaaaatgtaaatcgatttcgatgtgttttgtgcgggcatggta

SEQ ID NO: 357397 - DNA, 708 bp, Cannabis indica
cttattgattttccttcaaaattacaatctcattttacagaccccttccacttctttttcttggagaaattacatcgtatactcactttattttacttgttttaatttttaccttcatttttattttactcacttttataaatgatatcccccattagatcctttaagttaatgtaaattatatgttagacttaagtagaaagtaagggtatattagacaactcactcataaaagtgggtatattttaataaaatataatataatggcatttttagttgttaatggatataaaaaaaaagtattcttcaacttatccattttttcttctccaatgatctcagccatacacccattgattcctccttttcacatgtaatttggtttctgaaatttactgtaactttatttgaaagctccttcgccatctcctaagtttgaaagttgtttgccgtaagtctctctcaaagcatcgcagagccgttgagaatggtgagtgttcttcgtagcttcttctttcttcctcctttcactctccatctttcttagattttttttcgatgcatgtcgccggcagaagctgctgcatcatcgacgacactgtaatttcgtattcactttgaagatttgatttttttctaaaaaaagaaaaattaaaagtttacgtttatggactttataatggaagcaaagttgttatttattttaaa

SEQ ID NO: 357398 - DNA, 688 bp, Cannabis indica
ttttttaaaaaaaaaaatttacggtttgggttgctccagtaatttctatgtcagttgctatgtagatttttgttacgatttagattaatccattagttgctatgtgagttgctatgtgattttttgtaaaaatacaaaaaaaaataaaatataaaaataaaaaaatccctagaaaagatccttccacaattatattaacctttattggttaccaaaaaatactaatttttcttttggccattttatagttttaagtttaagttttcgaaaagtaatttaacgtatcacttaccaaatttacgtatgttgtgatttaggggcctataaatcgttgatcagtaatttccactcagaattaccgacatactagcattcagaatcaaggtaagattaaaatagtagttgcatatatgtatacatgtgttagcgtgcatgttagtcgccatctgaaaaacatatcagggtatcagtaaggtgtacatagagttgcatcgagatgccaacaaatatatattagacaaatcagtagccattagattaacatatcaagatattgatgaagtgtacgtagagttgcactgagatatcaacagatatatgctagactttcagatagtatgaactaattgctaccacatcagtacgactaaaatactgagtatagactggattcgcgattagtcatact

SEQ ID NO: 357399 - DNA, 675 bp, Cannabis indica
aaggtgggcccaaggaagcgacggaaccagtccgatagggggtccaaatttaggtcccacggatcctggtactccgggttgttgatggtgtcttgcacctcaacccgaagaaccctcctaagggcttccacctcagcaaacccccgggagtattcatccatggcatagttatgcttggctatccggagctcctgcctcgcctcgtctccagggaccggagtcagcacaatattgggaggggcagtatgctcttccatgggagagaccccaccatcaagaccgtgggccggagtatcagctctctgagggcgcttgggctcttcctaggcaatcattttgcccttacgcttgcgaatcagagcaatttcttgctcttcttcaccttcttcaacttcctcaggaagagcccggagccctcctgcaccttctttaacttcctcagaaaagccccattgcttttcttgactttctcccggcagcacctcctcgtcatccactaaatcaatagtgtcgggaggaggctggaagaaaaatttagagcaggggccatcggggaagaagtaaaggcaggaggagcctcaggagtgtgaaccccagcgagctgatccaagatggcgtcgatggagatacctactacaacaaaagaaagcaagtgttagaacatccgtgggaaac

SEQ ID NO: 357400 - DNA, 659 bp, Cannabis indica
aaaatggtaaaaataggactctaagtttaattttcgataacttttttttaatatactaacttgaagacaattcctaacacgaacagacagaaaatgtaaacagttttgtcgtaacatattgagatcagattattattaaattttattttgataaaaaattagttcagggtcctatttgtaccattttagaaaacacagagtcgagtttgtcatttaacaaaacagagggttcaattgataacttttgcaaaacataggatcagaaatagtatttaccctattctaaatttatcatgtaaaagaaataaggttacaacttaattactcatttacctaaaaatatgaagggtttttatttttacattttaaaacagttttttttttttttgttagttttacgaaaattcacataacgactaacggagtaacataaattgcaatcaaaattcacttagcaactcacatagaaactactcgagcaacccaaatttacggtttgggttgctctggtggttgttccggtagtttctatgtgggttgttatatatgaatttaattgcattttaggttgctctattggttgttatggggtttctagattttacgtaaaaaaaaaaaaaaactgttttgaaatataaaaataagaaaactcctaaaaa

SEQ ID NO: 357401 - DNA, 591 bp, Cannabis indica
tactcactaaaacaagaactatgtagaaccaacattggagatcgaatgtctcttgattaaagctcattatttaaaatgtatttttatttaatcacttattttagtctaaatattttaataataaaaatcacttaattttagttgatccaaaattaattaaataattaattttcaaccttaatttaatttttaaaaattaattttcgaaaatattatatataaatatataaaatttcgaaaataataaaataaaaatttgaaaaatatctaatttaagttaagataaaattttaaacttaaattatttttaaaaaatttaattaaataacaaattaagtatcttgaactaatcaccttaatttgaaaaatattctattttaagttgatccaaaattaacaaatttttaacttaaaacaatatttaaagaatatctcaataactaacttcctagaaaaattccacttaattattaatttcaaaaatattcaaattcaagttgatccaaaattaattataaataactgattttcaacttaaatatattttatgatatattaaataattaagtatctagaagaatctaattagtt

SEQ ID NO: 357402 - DNA, 534 bp, Cannabis indica
taataataaaacaattattaattaaacaatacttaataattcaatacaaataaaataatacataaaacaattactaatatttaaaaaaacaaaaaaaaaatcaacttccatacccatcggccccatcgggcctacaatcggccccatcgggcctacatacaatcggcccatcgggcctacaccttccccatcggacccctaacctacaaaaaaccccaatcggacccttcgaagcagaccatcgggcctgcatgaaatcggcccatcgggccatcgggggtcccatcgggccatcggaccctatcctttatttcccaaattcggtccaagtatcgggccatagcatcggacccatcggggggtcccatcgggccatctgacccaatactttatttcacaaaaacatccctacatcgggccatagcatcggacccatcgggggtcccatcgggccatcggacctgatactttatttcacacatttattcctacatcgggccatagcatcgggcccatcgggggtcccatcggacc

SEQ ID NO: 357403 - DNA, 648 bp, Cannabis indica
ttttgtttatggtatattaatttaagattatgatatattaattataccaaaatatattatgaatgaaataaatagaaaaatggcacatcaaatgtaatgatatatcctatttggtgaaatgtgaaatatcactatatgacataataataatattaaaaacaacacaaataattatcatatattaaagtttaaataatatatatatgttgcagttagatttatataccatatatatagtagtaggaaataaaaatagaacaacaataaaaaaagttatcaattaaaatacaaatcatttagaaaatagttttatcaaataaaatgatatgctactacaaacaaatttgaaaaagtgtaagagagtagaataaagctttcatattctttggagcaaatgtgttttttttttttttttgaaggaaccaactatgttgcttttgtttggttcgaatcaattttgtttggaagaaatagctattgttgccttagtttggaaaaaattaggaggaaatggttgaaggaattcggtaaattaattaaaaaaaattaatgagagtagaagctttaatgattttttgggaggaattacagtaatttggaggaaattaaaaaaaaatatatatgttaatttatttttgacatatttaa

SEQ ID NO: 357404 - DNA, 466 bp, Cannabis indica
atatagataataacaacaagaagactcatgaacattctcatttatatatatatatatatatatatatatatatatttgatgtttgttcattgaaggtattaattttgatgattaattgttttttttttagaaaaattgatgatcaattgttataaaacaatataatgtctttttcattttactgaaagtttatagccaaagtactaaaggcccgtttagcgcagcttttggaaaagctaaaagctcctttttgaattttgaaaaagctgtgataaaaatatgtttggtaaacagtcaaaaaacagctttttgaagaattttgaaaaagttattttgtttaaaagattataacaatttttttttagtactaaaatcatatttaattatttattatatattaaaaaataaaaataaataaaataaactaattataataaataaatatttttttgaaaaaaataaataa

SEQ ID NO: 357405 - DNA, 1631 bp, Cannabis indica
tggatcaacttgaatttgattttttttaaaataaataattaagttaaatttttctagaaaattagttattgagatattctttaaatattgttttaagttgaaaatttgttaattttagatcaacttaaaatggaatatttttcaaattaaggtgattagttcaagatactaaatttattatttaattaaattattgaaaaataatttaagttgaaaattttgttattttagaacaacttaaattagatatttttcaagtatttattttattatattttaattattttgtaaatttttatatatttttgtataatgattttcgaaaattaaattaaagttaaaaattaattatttaattaattttggatcaacttaaattgagtaattttcattattaaaatatatatactaaaaataagtgattaaatgaaaatacattttaagtaatgagctttaatcaagcgacattcgatctccattgtttgtactacatagttctttttttagtgagtaatcatccctaatggatgaacgtttattagcaatttaacgccgtagaatctcaaaagataagtattacttataagtgttttattcatagtattgatcaccttaatggtggctactattagtaagacttacaaaagtatgaaacaatggtggaggctcatgaaataggaatgaccttgagtctcgcctaaacgggacaacgttggattctctttttgatcgataaaaggttgctagaatgtttgtcattttagatgagttaactactctagtcaatggatgatatctttgactctcgcctaaatgggacactgtatcagtttgttgaaaaccttggaaaatattaattatgttttattttggtatttttacaaacatattttctatatttgttattttctgaacttgtgtatgaaattatagaaccagatgatttatttctgtttattgatattcttagtgtcaaaatggacaacccacaccccgaccctctcctagtatatacctttgcaaatgaactctatagagtgaaaatgcttcttggaaagagcattaattcacacttgttgatgatgaatctgaagttccagaaagcaaatttgctaggaattgatttacctagagaacaatgggttcaattcattcttaatagtcttcctcttgagtataatagatttgttgtatcttatatgatcaacaattttaactcatccgaaatggacaagctagaagctgaattgcgtgcttatgaatggagcttacctgtaaagaggccaccctgcagttttgcaaacttaggtaagaggaaaagatttaagtatgaagcttctaataatgctgcttcttcaagtacaaatggtgaaacaattgatagtagtactcttcaatgttcaaattgtaatgagaagggacatcaggaagaacgatgtcctagacttctaaacaattcgaatgaaggtaatgcttttgtttttgaatcatgtgttttagagaatcacaaatccttctggattgttgattctagatctactaaccatgtttgttcttcattgcagctgcttaaaacttggggttatttaaatctaggggagttgaaggtcaaagttggaaatggggaatta

SEQ ID NO: 357406 - DNA, 731 bp, Cannabis indica
cgtctcccagctgactcggtgcgcgcctaaacggtacgctgcttgtgcatccgttaaacttcgtctaccaggttcaggacctcagccataccctggctgcggtaagtactttgtgagtttatttcgtttcctcattagttttacttaaggccttcactgacttttgcttccgttttccagagttactgtagaggccgaaccgccgttttccaaaaccataattaatcatggcttcgtcttgtctgaatttggggcatagacgaggtcgtgaagattctgcaggacttgtctgctgaaaggcgggcgttccgggaggaggctcttgctaaggcaaagttcgaggaagaggccaagcaaagggaagcccaggcagaggcgatgatccgagaagaggtcctccggagggataggctggaggcgaagcactgggaagcgttgagggcggaggccgaagctactaccaaggcaaaatgcgagcttcggaaggccagggaggccttggacgagatggacgctaaggtgaggtccttagaggaattgcaccaggcggatctggagtccagggctaacttagccgtggagatgaaggagctcaaggactttaaagaccaagccttgaagaaggctaagaaagacgagctcctctcccctgtttcctgcagccgttgcattaagcgcttacgaggacggagtctacatggcctggtcgacaaatggccagagtatcaagc

SEQ ID NO: 357407 - DNA, 934 bp, Cannabis indica
atttaaaaaataaaacaaggcttgttcaagtgcttccggttgactcctcggtttcctggcacgtgccttgggcgcgtgaaggtgcatttaatgatcaccattaatgcagtgattcactttttgtagacgtcgattcgtttcatgcctattgattgatacagcgcattaatggtgtcagacggatactcaaacgtttccaccgccttaattacgaaccaatccaaccgttgattcttgggaattcgaatcgtgcgcctccccagccgttcgattggtaggtgatagcgcatgttcctcatgtactttggcctataaaagccaacacctttccttcatttggttactttcctttttttcgccaactttcttcgagttctccagagagaaagaaatcctcagaccagaaaaccttcaaacactttacagatttctttgctaaccttcgctcattactgtcagtctacgtttctttgtttgatcaacagcaaacccccagttctaacacttcatgtaagtttctcgcatccctcactttactatttgtgtttatggcatgctttactatctgtttgtttttctgggtttgtgtttgaagtttctgggaatgtattcccttcagttttcacgtaatacatctagatttcccttctctgtggttagggttactcttgtcacgcactgttgttatattttgtaaaggaccatacactcttcgtgtgatgtccttcaagggcatagagaggacttcgtttttctcgattttctgcccttcctctttctttgtctttcatgcgcaatgtcaccatctgtgagatctttgcacccgactgttgtccaggaaatccttctaaggctttcttgttgacagatgtccggagggggcctctttccagcggttaggggacccccattccctttttttgatttagggttt

SEQ ID NO: 357408 - DNA, 507 bp, Cannabis indica
cagcacctagtttccttttagcagcaactaaacaagtagggctaggaggattatctttcaaattcttcttacccattgttgcttgaaatttatttttttggggttgttttgggggctagttagcaacaagggaggatgatgattgggtaacagtcattgtgaataagtagaagtaatatttatagaagaataagaatgaaaatgtgggggaaataatatgaagatggaataattgaaaaaatttgacacaaactgtataaacgcttgaaacaaatggatattagtgatgattatttaacatttaaaaataattttaaactccaaaaagaagcatactgtcacaaattgacaccccatgtcaaatcaatacttttttgaaatatttaaaaataattttaaaataaattaaaaccccacaaaaagaagagcattgtcacacatagtgacacccacacgttaatcaaaacttttttgaaaaaaaatcaaaaatgaagtggcaaaactcgg

SEQ ID NO: 357409 - DNA, 461 bp, Cannabis indica
aaacttaaatgtgccatatttatcataagaacttttaaaatcccatactaagtgtaatttcctcattttattttgacaaaaaatcagttcaggatcttgtactattttagatccattaacattttttcatttaacaaaacaaataatccaattgataaattttgcaaaacacaaattctaaaatagtatttaccctttttccttttacattaccacatttatttttgttttttgagaaattaccacttaaattttgtgtgaataaaaaagagagtataatagtatatgatggatttgggcacaggtgattgaaagtggagttgacacacttgtagccacctttttatgtccgaattgctttttcacacgattctctctctttctctctctaataacctctcaatatcttctctcccactgtacgttctctctctctctctcttgagagctaccttgttgag

SEQ ID NO: 357410 - DNA, 593 bp, Cannabis indica
tacatgatctggatcaggtcggatcacagtcggattagatccgacccgctccattgacattcttaattgtatcgactattttataaacactgttaatttaagggttgagtagaattttccaatttattgatataatgaggatatatatgacaagtgacaataaggccatttttgttgtagaactagggtcaatggaacgaaaccaaacagtaacaaactatgtaaatataatatgtacatatttgtataataaatatttaaagataaacatgataaaagtataaaaaagagattttgaccaaagagtgcactccaagtatggggaactgtgtgtgagggctttttaattactagtaggtagtcaaaaagaaccatcctaacagaatcttaaaacacacaccaatttattctatgcaaatgtagactatacatatatacaacaaacctatatatacataattttaattagttaaggcatcattttaaactagattatagtaattatatttgatattttgtttgtttctggaaatctaaataatttacagtggtaaaattacattcaattatactaactatatatatatataaaa

SEQ ID NO: 357411 - DNA, 454 bp, Cannabis indica
cacattatgattgagtacttgacttgttatgtgtgggcatggtactctataactattgctcgaattggtaaagaacaatgaataaggtgcgaaatcactatagaaaggagtctttcatctactagttgtcaaagaatgaaaattaggtttagtttggttaaactgagttgttttatgagaatgagagcatcatgttcctttatagtatttaaactagggtttaggatttaattatatggattaagaaagaataaaataatgggcaaaaatcacactaagtggccgaccactaatggacctcactagttataattttgccactttattttaaccacttaatcttctttcaataatgccatatttctaatttcaattcaataaatttcaaaactatttatttaataattataattaattatcaaataaaattaccatttacattatttattaatta

SEQ ID NO: 357412 - DNA, 773 bp, Cannabis indica
aacttctaaaacgaatataaataaacacatgtaaagtatgagaaaccttacattgggtgcagcagaataatatgtctccttccactcaaatctctaacccttgtatcctttctgttacagagtattatcaagatctgagcccgaatgtccttctttgttgtatctaaattcttcacagtctttctcactatgattgaggtactacttgctgtgtgtgggcactactctatcacttagagatttcgaaacagagaagaagaaagaatgcaattgtgttgtgtgtgtttcttgaagcctttaccttctatttatagaataccacacagggttagggttgaattacttggcattaaaaaattgaaaaaattaaatgataaagggcaatgatgtggccggccatggcaatatggaaataggcctcacatttgcaactttcctattttatcatctctcttactcattttctcaaaaattgccaattttcacattcaaccatataaatatcaattctaactatttaataactataattaattattaaataatattgtcatttattatatttattaattaaactaatcaaagtctcttaattaataaatataccctataaactctttctttacagtttcgcccttaataagtgataaattctcaaatagacatagtctaacttgagaattataattgattaattaaaaccaattaatagagtctatatatctgagcttccaataagcagatcaagaatttacaacttaaattcactgact

SEQ ID NO: 357413 - DNA, 669 bp, Cannabis indica
tgtgatcttgaccacaatgaattattctaaataatataaataaaatggacgattattttatatatatatatatatttttaatttctagagttatagttgtgattatatatagagttgaaatatgctaaatatcaattcaaatattaataggatttgttttattattattttattatatataaataatattttattattttattaaataaaaataaaaagtcacccataaatttctcataaactaagaatttcagttatataggcacactttatatagaatagatatacttttaatatcttttcctcctaaaaatacccttatatttcaaaaaaacttatctctatctttctcactctccgacgttaatcccgacccagaacccctacagtcgaacgcacagacccagaaccccagtcgcaaggcctcactgtcgtcttttctcacgagctctctcgttttttttgcatttatttcttctagtttaccagttttttgcgatatttagtgatgtatttgcaatgatagaacaaatctgaggttagggataaaatttagcaaggatttacgatatttggcgatgtttcatgatgatattagcgatgtatttgtgatatgagactaaaaaatgcacagcacattgcgaaccatcgctaatcatcgtgaaaact

SEQ ID NO: 357414 - DNA, 740 bp, Cannabis indica
agggatctatgactatcataaaaggatacaagcatgaaggattgtactatctacaaggagaaccagtaactcaatgcaacaactcagtggccatctcaacagatgacaagaaggcagtcctatggcacagaaggctagggcatctcagtgaaaaaggattgcaagtaatgagtgagcaaaacctactaggcagagacaaggtggggaaacttgacttttgtgaatcatgcattttgggaaaacaccatagactcaaattcaaaacaggtatacacaaaactaaacaacccctagaatatgtgcattctgacttatggggtcctgaaaagactctaacacatggaggtaatgcctattttatgtctatagtggatgatcactctaggaaagtttggatttttctacttaaaaataaaaatgatgcatttagtagatttgttcaatggaaaaccttgatggaaaatatcacagattacaaactgaaaaatcttagaactgacaatggtttggagttttgtaatgatatttttgacagctattgcaaggaagtggggattcaaagacatagaactgtcagactcactcctcagcaaaatggagttgctgaaagaatgaataggactttgatggacaaagtcagatgcttgttactacaatctggacttgctaaaacattctggggtgaagctgtgatgacagcaacttatgtaatcaataggtgtccagccagtgctattgat

SEQ ID NO: 357415 - DNA, 720 bp, Cannabis indica
acacacctgaaaaagacaacaaaggcatactatataataatatagtcctagaagcacgtaattaaattaatttcattactttacccttctcgggtcataattactaaaatgcccctgctcaccaacggagtcttaacatataattaatcaaataaattctaactatataataatataattcctcaattattcataattatctcattaggattttgctaatccatttcttaaatccagggtattacactaatggctcttcggttagtattttgcatgattcttggttgccccatgataccaattcgtttgttttatctaataatcctggccttgttgatcaacatgtttctagtttagtggttggggaaaggtcttgggatgttgaacttctaaatgatatgtttgaggagagggatattaatttgattagaagtattcaacttagtcattctcgggatatggatggttggtgttggaacatggagtcttcggggttttactcggttaaaagtacttacaagtttcttcaatcttcaagaggaaattggttatatatgcaagatgatagttgctggaagaaattatggcagcttcccataccgcccaaagttcatcatttcttgtggaaagcttgttcaggatgtcttccaaccaaggtactgttggaaatattttaccatgatctagatttactaccaagtatgtttgattaacatccta

SEQ ID NO: 357416 - DNA, 593 bp, Cannabis indica
tagatccctctcatctgcccaaatatcccgtcaccctcaacccacccattcctccgtggaagtccaaatgtctgccatggaagcgtcctccatggaagcttgtcgaagactcaaaacgtcccactacaaagttcgaaggtcggagctcgtagcttaatgagtaagtgttttttaaaataattataaaagtatactctatttttcattagattttatgtggttgttgtttgtatttgtttggttttgatgtattcttcgctgaaatcatgagatctaattttcttaagtattttatgtgttcgtaattttctcgaagctttattgatacgttctcgacgagttctcgatgcagatgtcctaaggtcagggaagacatttatcaatagttttttgatagttcaagttttgcaaaaaaaagtggaatttgtttactatcgattgattatcgataggtttttgatagattatcaatatgagtgagaattcttttcgctgtcgttatcttggttattctcgcttgattattgataaattattgactgattatcgagaagttctcggcatgttatcgatagttcaagttttaccaaaaa

SEQ ID NO: 357417 - DNA, 1121 bp, Cannabis indica
ttttagttattttaaacttttagatgcattgcactataacaataatatttttatagagtattaaatttaattaaagggtaatatttaatttttacgtatttttctttataattttaacttagtactaaaaattagaggttcaattcgatattcaattaaaaaattaatctgatccaattactaattggattggcttggattttgcggtttaattggatcggatcggatgatgattttctaactctaattactgattggattgtatcagacgaaaagaaaaatattggattgaattggatgcccatccctaatttgtaagactagttaatagttacttagttttattggaaaaattaggaaacaaaccccttagtaataattaacttgtaatagtatgagttattattttactaaatttttagtttttttaatagtatgagtatgtgttggaagttgttttactaggatttagatttactaacaagtatgttgattataattctataatctaacaccttaaacatgaatttcttaaaataatgaattaaacagataaagttataaaaatcttacaattatattggtggcaacggaataatatggctcctttgttggattataattttaccaggatctagatttaataccatgtatgttgtttaacatcctaattatgaatttctaaaacaatgtaatttaaacacatataaagtttgagaaaccttacattagttgcagtagaattaaatgactccttccgctcagatctctaatccttgtatcctttctgtaacagagtatccccaagatctgagcccgattctccttcacttgaattggattcttcacagtcttacacattatgattgagtaccaacttaatatgtgagggcacgtactctatcactatagggtttgaaaattgaagagaggaagagagagagagaaagattcgaaaatagagagaagagaaggctcaaaatttgactgaaggcttgaatgcatcatctctcaatttgagcctatcactatctatttataggaatctaattagatttaggtttaatttatttggcattaaaaaattaataaataaatgataaaatacatcacaagtggcc

SEQ ID NO: 357418 - DNA, 914 bp, Cannabis indica
tccagagattcattcaactctcgacggatctccctctcctgattcctgtcgcgggagccagcagggagactttggagagtgttgagtttttgttcaagatctttaatggccacatccaacttccgaaactgggaccgattccaattcaggagggccacccgagtggcacccaccttcttataaatgcgagcaggggcccaattgtgtttgaccgaattccaagcatgggctactaccagattacttctagcgtcgcggatccaaccttcttcaaatttgaagcatctcttgaatttgagctccatgccctccgataaaagacacagggggcggtggtccgaattgctagtttggacagtgttgagaatagccttcggaaataactgaatccaggccccatacacaaggcctttatccagagcagatttcacatggtgccggccagaccgatggttatcccacgtcagaaagtctccttggatgggcatattgataagacctctaccctcaataagattagaaataatcagaatgaagggatcccgaccagaggagccttctctctcagagccacttaggacaaaattagtatctcccaaaattagccagggcccaccaaatctatcccctattttctagaactcagcccagaattttttcttagcattcatatagggagggccatagacacacgaaagaagccacgggtaagagggagggtcagagtacactaaacccgagatatgattacgcgagcaagagatacactcaaaactaaacctcgacttccaagccagaatgattcctcccgcattattaatagaaagaacacaaatattaaagtgaaaaagtgtaaagactttagggtacgtaccagaggattagcatccactttgagctcggttagaaaaaca

SEQ ID NO: 357419 - DNA, 780 bp, Cannabis indica
aaaaacaaataataattattttggttgcgacttgcaaaacaaaacgtgcactttaaagcaatttggaataataagggaaaataatataaagagcttgtagtattcgcaattagttttgccctatatctagtggatacattatcattttaacctatatataatttgtttaaattaataatcacatacattattgtctactcttttagcaatatccaattgcgtttatggaaaacaattacattaaaatattatatattatattttctcgtaattttcagaaagaatattatgttaacaagagtcaccaaaattgaggatggtgactaattgaagcgcttgaccgctattatatataaatccaaatccatttgaaaaataaacaacgtttagacgggtacttgttattttttcaaataggccccattaagacatctctaaccgaactttaaaacgctaaatatagtgtagtttcacactatatttatttcaatgagatactaaaattatacttataaatagatttgtctactgtgtcccaccgaatttagtaggaaccacactatttttgctttttaagtttttaataattaaataatactttttaagagaaaaattaaatacttatatatatttagtattaaaatattcttattatattaataaagtaatagaataataaataacataaaatttggtgtaatttttagtgttgtgattggaattgaaaaaaaaaattaatgttgaagtagtagtttttggtgttgatttaacaccaaattt

SEQ ID NO: 357420 - DNA, 651 bp, Cannabis indica
aggacatgaaccagaagaacgagctaaccaattagccgcttggttcccagatcgtttaacaaactgaactgaaacatgaaaaatagaaaagggtcgtataagattaatacaatccgaaataataagaccaagaggagaaagaacttggctcttgctattgatagcattaaccaacaagagacagtccgactgcattaccactgctgtaggacgaaactcttcaacatcacctccttcttcccagtttgatttaacccaactcaatgcctccttcattgacaaagcctcagcaacaacagggtcaacatctccccgaagcttgacggcagcagcagcaaagcacaagccagcatgatctctagcaatccaccccaatccatgactcttctctcttgaaaaaaaaaaagcagcatcataattaaccttcaactctcccaaagacggtttattccaatgctcaacaccagccgtaggctgactagaagaagatgaaacccctccatttgtaatctgagcaaacttccaaagttcaaggtacgtaattgcatatgaaacaactttttccacagaagtagccttattaatccaaagtaaatcattgcgagccccccaaacaccccaaagaatcattgccaacttatctattttctc

SEQ ID NO: 357421 - DNA, 495 bp, Cannabis indica
gagcttccgcccgttctcttccttagagggtcgatcatctgccgagacatgtctgcatagaacaaaaagagtatggttagaagacagccatcagaaacacaaggcatgaaaatcaagaagctcaagaacaagataaagtaaaatgcaaggtgaccgcccgcacaagactcagaagtccatcatcacctgacatcgatcttatctcaaacatgacagctttcccttttctgaacacgggaggagatggccgagcaggtgaaatgggctcccttatgcgaattgcatgttcagcaggcttgggcgaggccaggagtttcttcttcctcttcagtggagtcacctgctcttcctcaacttcatcttcagaattcaaaggctcctgagcatattgtttggcccttgcacctcccttcaacttagcctcgcgcttaagttgaatgagttcatcctccttatgagctcgttcggtccagccagcatcagatttcctcttct

SEQ ID NO: 357422 - DNA, 831 bp, Cannabis indica
tagatttactaattgataaagatcataagttattttatgttgcatggttcacatgattatatgtttaatatataaattattaagtccagaacatacagttattcatgattatagtgttgtcaacacagtagaagataatcattattatatgtttcaaagtttaagtcccatgatttgtcagtacactggatttagactgacatgataatcagtgataaagtatacttacaccttagataagtgttatgtcatttctagggcattgacaaagtatgctagtatcagatgtatggagtatacattggattggatcgatattgaacttagataaaatatcataaacttacctttatatctttctaagtcaatatcactggttgatcttaggttaatagatcttaatcctgagatggttaggtttgatctcaattgtattattaatgttcttagagttgttcgtgaaaactaaccaatggttcgggcgaacagaacatgatagtataattgagtgagagcgctaatcatatatatgaaatctatagcttccataagtattagaagtgaaacgattatttctttcgagcttggcttaatagtgataaatgattgggatctcattttagtaattagattagtttactaaaatatcattataagtagctaagtgtttcaaggataaaatacattaagggtagaatggtaattttgtccctattcaatgtagatcatatatagaggatctttgactatttagattagaacgatggataattcatagtgtatctatatcttggtacatatagagtgttctatataattaatagtgcaatt

SEQ ID NO: 357423 - DNA, 598 bp, Cannabis indica
attattattaatgatattttattttttttaatacaaatttgtaccttaaaatggttttactgtgctagatatatatccaattattattattattattattataacacacatacataaatgtgcagggaaattttggaaatttattcattagaattggcaaagcttttccaaaagtataatctcccaaatagctagaaaaggttcttggaatagaaaacaaagaaatttccaaattagttgaagatggaatgcaatcaataaatatgatcaactatctccatgctctcaaccagagaaattatagatgtgaaacctcactctgacactgtggtccgtaccattctccttcaagccaaccaagtggaaggcctccaagttaagaaagagaaaaatattgtgcatatattttaaacatcattaaaaattgaagatatttattaaataaaaaaaatataattttaaaaatgattttttttagtatatgttgcatttattatctaaaaatattttaactaattaagcaagaatcttaattatacatacaaaaattatgtaatattaattttacacaagtaaaataaaagaaataatgatttat

SEQ ID NO: 357424 - DNA, 557 bp, Cannabis indica
ttttatattttttacggaattctatatagaaatccttattgcaactagcgctgcatcctaaatcgcaacaaaaaatcgtataaaaacctttattgcaactagcattgcaactatagttaatgcaatttgaaattggacgaagaaaaatacatgagactattattaattatttatatacatatttatatatattaatttaaggaggagtgatatcgttaatctcatattataatctcttagtcaatatttatgcccgaaaactgaatactttttttaaaaaaattcatggcggtgttcgttatgcttacagtatcatccatgtaaatttttaaatttttttgaatagatcattgtaccgaaaaatacggttgaagtttttttaacacatgtagtaaattggaatatcaggaattctgtttttgacattgtaaattattcagaatttttttaataaagagatgatattataactcactacaaaaaatcttacttttagtgacaacaaaatttgtaactaaaagtgaaaaaattgtgactaattataaatcatgattcct

SEQ ID NO: 357425 - DNA, 956 bp, Cannabis indica
caggagtgatgaaggaacatttctggggtactccaccaacagtcgagcttacagagtattcaacaaaaggactctctctgtagtcgaatcaatgaatgtgaaatttgatgatttagaaggacatgaagaagtgtggatcgaagatgattctcctgttctctcaggctctagaccagtccttactagacaaactaaagtgtaccctgacacacctacagagtctctaaatacagcaccaagcgtatcaggcgacaatcaagcacgtgccagagatccaggaagagaaaatgaagttgatagtgccttgcccaaagaaccccaacaagccaaaggacataaaacggacccccatcctgggttgagaaagctcatcctcaggccactgtcataggaaatccgaatgataccatggtcactagacgtaaactgcagaatttgttagtctttgcctgctatatgtcacagattgagcccaaaagtgttcgagatgcgttgttagatgagttctggttggctgccatgcaggatgaaatgggaaattttaagagacttggtgtctggataatggtccctcgaccagatggtgcgaatgttatagggacaaaatggctgtttaaaaataagtctgatgaatttgggacagtgactcgaaataaagctcgacttgtggctcaaggatatagtcaggtcgaaggcatcgactttgatgaaacgtttgcacccgtggctcgattagaatccatacgtctacttcttatcattgcatgctttctgaagatcaaactcttccaaatggacgtcaagagtgcgtttctcaatggggtcattcaagaggaagtctatgtcaaacaaccataggggtttgaagatccacatcatccacaccatgtgtacaagctcaataaagccttatatggactgaaacaggcccctcgtgcgtggtatgatagactcac

SEQ ID NO: 357426 - DNA, 923 bp, Cannabis indica
tttgagtttggggttttgagtttggggtttgggtttgagtttggggttttgagtttggggtttgggtttttaggtttgggatttagggttctggggttttgcgttgtgtgtttagagtctttggcttttgggttttttgggtttgacgtttagggtttgtggttttatgactagggtctagagtttaggatcttggacctagtatttggggtatgaggttttaagtctagggtttggtgtttgggttttaggatatggggttttagggtttgggtttcgggtttggaattttgggtatggtgtttttgtgtttagggtttttaggtttgctattttctggattagggtttggggtttagggtttgatgtttgggattttgaggttttacagtttagggttttggggtttggggtttgggatttgggttttagggtttggggttttgcaatattggcgttttggggtttggggtttgggaatcgttatggaaatgtgttggggaatggaaatgggaataggaatggaaattggaatgggaatgggcatgggtcagggaatgggaatggggattgggaatgggaatgggcagttaaaagggaatgggaatgagaatggaaatgggaataggaatggaaattggaatgggaatgggcatgggtcagggaatgggaatggggattgggaatgggaatgggctagggaaagggaatgggaatgagaatggaaatggaaatgggccggggaatgggaatgggaatgggccggggaatggaaatgcgaatgggctagggaattagaatgcgaatgcgaatgcaaataggaaaagtaatgtgaatgggaatggaaatggttggggaatgggaatggcaatgctaatggcatgtttactaataagtaatgggaatcaatagtaaggtaatca

SEQ ID NO: 357427 - DNA, 657 bp, Cannabis indica
cttgtgggcatcacttagcttgtaacgtgccatcatagactgcacgtaacacgaagcgcgagctccgggaggctagggaggccttagacgaaatggcttccaaggtgaagtccttagatgaattgcaccaggcggacttggagtctagggcaaacttggcaaacttggccgtggagctaaagtagcttaaggactttaaagaccaagccttgaaaaaggcaatgagagatgagctcctttctcccgtctcttgcagccgatgcattaagcagttcgacaatggcgctacatggccttgtcaacaaatggccagagtatcaaactcaacttctacccaaaccctgcggagatgattgctaaattccaggagaagaagaagaagcttgatgccatgctcgaggctcgcattggtcctcgccttcctcctcgaattgactaggccgttttgaatacaacccagatttttcttatctctcttttttttatttacagctgattctcttttatttaagataatctttatttacagctgttttattttctcaggagaaacaatggttaaggcctgtccccgggccctttgtatatatttacaataattttttgagctgcccttagggctatgatttttatatatgcacatatttttcttttttg

SEQ ID NO: 357428 - DNA, 683 bp, Cannabis indica
aattttcactaagctagggcttagttgtgaagaaaagggattctagggtttatttgttaactaagagactttgttaagtctgattaatgaatatattaaatggaaatattattaaataattaattttaattattaaataattagatttggcatttaagtgttaaattgagaaaattgcatttttgagaaaatgagatgaaaaattagaaaaatggcaaaattgcaaagtgggggccactatccatggccggccacttgggaagcaattttccactttatttttttattattttattgctaattaaatctaacctaaccttaagtggtttcctataaataggtagtgatggcttcaaaggaaaatatgatgcaactcattccttcagtaaaatttagagccaccttcactccccctattcgaaaccttctctctttcattctctcttcaaaattaaagccctatagtgaaaagagtgagtgcccagacacatcaagtggtactcaatcatagtgtttaaggttgtgaagaatccagtttcaagagaaggagattcagactcagatcttggtgataccctgctacagaaggagacattatattccgctgtaagcactgtaaagtttctgcaactttatatgtgtttatttcatatcattttacaagttcatgtttaggatgttaa

SEQ ID NO: 357429 - DNA, 607 bp, Cannabis indica
attgggaaaaacccttttcattttagaattaagagaaagaagaaaaattggaaatttgagttatctcttgaactctctctttccttctttcggctggggcaaagctagggcaaggagcagatttttccttccatttctctgagatttagcaagaattcaaggaggaattaaccaaggtaaccttagttacactctagttaagttttttctcaagttttgcttagttgcaagaggtgatttctaggccagtagctgttaggttttcatgtgcttgagattcgaattttagggtccttttaagtttattttaactccttgcagctggttttaattagtgttggtggttttatgcaattttaagcttagagttcaaatctttgagctttaatggcaatttgagatttgttgttttgttctgtgaaatactggctgggttttattgtttatgcattgaataggagctctggaaggtttcatggcaattggtgaagaattgagcagcaaatgaaaagctttggggaaactggtgcaaaccggttagccggtttgcagtgccacaaaaaccagctagccggttttttcagggttccccgggcctttcattttc

SEQ ID NO: 357430 - DNA, 686 bp, Cannabis indica
tgctacaaaaaggatacaagggttagagatctgagcggaaggagtcatttgattccgctgcaaccattgtaaggtttctcataccttttatgtgtttattttcatcgttttagaaattcatattaggatgttaaaaatatacttgttagtaaatctagatcctggtaaaatatattccaacagatcgtaacctagatagctgaagctctactgattcattctaaactttcctcttcttcaagagaaacgaagaatacagagttagggttttcctgctaaaatactgtaaaaatatcaagtacaccatttgaggctaatagactgactcatggactaaggttaattaacacctgaaccacgtaaattgtaacaataaagcccggtgtcagttcaaaaactagtatgtttttcgtctggtgcgtgcatgctgatctggttgtagtcgactatcgcgtccaccaattgatgaattcgtggtagtgggaaacaatctttaaggcatgctttgttgaggttggtaaagtcgacgcatgtcctttactttcctttcagtttaggcaccagaatagggttggatacccaaatcgagtagaaagctccctgataaagctgttctcctttagtctttcaacttcttccttgagagctttggaacactctttgtcaaggagcctgcgtttctgttg

SEQ ID NO: 357431 - DNA, 548 bp, Cannabis indica
agactcagacttggacccaggtcccagacctagattgggaacccaaacccggtattaaaaccagaatcgggacccgggactgggatggggacccaacacccaaccccggtctccactactacaaaaagtacaattctcgtcgatttttaagtgtcatttaaagaatttgcaaatagtttttcattagtgtcattttttaaatgaagcaaaaaacaattatcgtcatttaaaaaccgacgcaaaatatacactcttctttttcatcttcttcgtcaaataaaaaatgacgcaaaatcgtttgtggcattttaaaactgtcactaaaaatttatagcgtcggttttaaaatgacatataaattgctgaaatacttttatttttaacttattgcgtcagttataaaatgaagcataaatgtatgtaaggaaaatttgcaaattttcatgcatttttccctacatgcatttttaaattttagaacgattttatgtaatagaaaatacatgatacaaaaaaaattaaaataacgttgataaaacttatataaa

SEQ ID NO: 357432 - DNA, 863 bp, Cannabis indica
tataatttagtagtactcaatccaattccctgtggttcgacctcacttgcgtgagatactacttgatacgttcacttacgtaataaacagaattttcgtaacaggtgtgcaaagtcttctttgatgactctttagatttgtttttattatttttgctctaattaattttcactcattcttgtatgagttaattatttttatttatattaaaggaacaaataaagatttcctttcaattcaaattacaatttaataaatttgtcataatagtaaattcaaaaagatttaaaagaatgtttgctcatattttaacgaccttaaaagtttaggggcatgatttagtataagtcaaagttcagggggcaaaaatccaaattagctaatattttaggagtacaaatcaacttctcttggatgttcaccacagactatttctatatgatttggtaggggtgtgcagaaagtcatccgatccaatcccaaccgatccaataaaatcggatatccaatcataattagatcagatcggatgcaaatttaaataattcaattggatcggatcagatgttggatgagacatccgatccaatagataaccgaaccgatccaatccaatatcatccaatgtccatccaatcatatttaatatttataattttatatatttaattattttgttttaaaaaaatatattaattattaataggttttactgtgtacctgcacacatattaagacttttgcttattaagttagatttgtgttatatttttattatgggattgtaatatccagtttatatacatatattggtatttggtatattaagtgtgatacaattatattattattgttattattat

SEQ ID NO: 357433 - DNA, 584 bp, Cannabis indica
atcccatgaaaaaattggatttttggggaaaaaccccaaaaaatcgcaattttggggaatgctgcccaggagggtgcacgtgcagcctccagaggctgcaaaacacgcaacgcgcgcggacgagcaggtgctgggcgagagacctcggcgccagcacggtgatcctcgacggatggcaggatcacacagccggaacaacagggtgctcgcgcgcgcggatgggggcctggccgaaagcacctgatgcgtgcgattgagctcccatgcatacccgaaatcccaattttccaaaattcataactttctcaatttttatcggaatcgagttccataaaaaaaattgcttaatttttcacaagaaatccaaataaaatattttaaaaaatcgaaaaaatatttttcatggaaaaagatactgtacaacatatacattcatcaactaacacataaaccacatgaaaccatccaaatcaacacaaaaacatataaatcatcgttttaattcatattacatgaaagtaaatcattaccatggctctggtgccagttgttggaaattattttacctaggatctagatttgct

SEQ ID NO: 357434 - DNA, 580 bp, Cannabis indica
atctgatcccctgcctccagcccatataaggtttctccggccagagtgttgcatctttagggaaaattcgcctacccctcactattgggcaagctccgaagagcataactgtgatggcacaatttttggtactatatgttccatcagcctttaacatgttgggccgaccagccttatatgacttaaatgttgttatatcagtattccattcatgcgtcaagttcccaataaagaatggggtaggatgcgtgagagggaatcaataggtttcacgggaatgttacaaccttgccctaaccaaggctaaaaagaatgaatcctccagtcagagtttggacaaggggaagagcattgccaaatagggaaccgcccaaggcagggacaaagatgtggatccccgacttggggaaccaaatacaaatgttgggcaggtggaagagttagaagaaattgaaattgaccaaagtgttccgaccaggaaacttaaaattcgaaaaggtttgttgcttgaagtaaaattagctctgataaaatttctaagagcaaacctatacattttttcctggtcacatgaggacat

SEQ ID NO: 357435 - DNA, 754 bp, Cannabis indica
aaggtcgccgaacctgaaaatatttttatttcacaaataactcatattatatccacgtatttcaaataaatctccgtaattaacaaattacgcttatttatccactaatcaggtcttcagggtcaccgaacctgaaaatatttttattccacatatagctcatattacattcacacattctatataaatctctgtaatttataaattacgcttatttacttacttatagcaaaatttaaattttatgctgaaataaattagtaagatcataacccaacttattaccttattaacacataatataaatataaaccctaattatatactattagacttattgggatattacactgcttctcgcaagaatcagcatctgccttcagaaatgttttgcaagaaacgcctatagcgactaccgatattttcctgttgggttctcactgcgtgttccctaaccctagcatcgttcaactctaatttggaggtgggttttgaagggttgggtatatacgagatgactgattctgtagggaactccaactctaaaacttctggacgataaattcctgaaccagagtgggacattgctgcaagcaaaaagcagtcccaatccttggagagaattttatcaaacccgaaggtaatgagttggagatcttaaaacaacctacatattgcctgaaccctaatatgaacctagaaatagtttaaatcctaaaaactaccaaaacaaaatgagatgacaatgatacaa

SEQ ID NO: 357436 - DNA, 883 bp, Cannabis indica
cttgaccattcgcttgaggatgccacactgcggaaaaactgttgatgataccatggttcgcacaaaaatcagtgaaggattggctgtcgaactacttccattatctgaaacgatcttgtacagcagtccaaactggaaaattatgttcttcacaatgaagtcttgaactttctttgatgtaatggttgcgagtggttcggcttcggtccacttagtaaagtaatcaaccgctaccactgcatactgcacttctcctttaccgttgggtaattgtctgatcaggtcaatcccccaaattgtgaagggccacagactttgcatctgtgttaactcgtccatcgttggccagaagtaaccttcccttataattttcttagataagctttgcccggcggcatgatttccaaagcatctgtcgtgcacttcagataggagtcgtgcgacttcttcttgaataacacatctgagaaatggcatctagaatcctctactgtacataattccctctactatgatataccgtgcagctttccttctcattttctgagcttcattccgattatttgggagtttgccagagtcgaggtaggctgctattggtgttatccaatttggggaagtatgaatcattttgatttcttccgtgccagtgatgctaggctcttcgaggaactggataggaaccaagtttgccttgtcacttacattgttgcttgccaatcgagctaacgcgtctggagtcgtattttcttcccatggaatttgtttgagaccatagcttttgaattgtgtgaacagatcatgtattttgctcagatatgctatcatcttttctacccgagcttcgtattcttcggatgcatgatttaccaccagttgtgaa

SEQ ID NO: 357437 - DNA, 543 bp, Cannabis indica
ttttttttttgaaaaaatttcatcatctttattaattgcaatccatagtgattacatgattaaaatctaaagtaacatcactactcctgataacatgatcagcaactaaataggatgctcgagctaagaaatgagcaacactatttgcagaacatctaataaaattgacataaacatctcgcaagtcatttaacaacatcttacaatcagaaataatagtcctaaagtatgaaacaatgggaatagagctacgtaacacttgcaccacaataagattatcagttttaatgacaaccttcctccaatctttccgtttaaccaaactcagtgcctctttaacacccaaagcttccaccatttcaggttgcaacacccctgaccaagagcaggtaaaagcttccaccaatgcgccagtttcgtccctaattacccctgcaaaactataagttccagatcttgaaaaaatggcagcatctacattaatcttcaaggtgtttttagctggtttggcccaagttttagcaccatcgacatcagtaagga

SEQ ID NO: 357438 - DNA, 595 bp, Cannabis indica
aatgagtcctcttgccttgccattaaaagatcattggatatctatcacaaagcttcgggtcaagttctcaattcagacaaatcagttatgtccttctcacccaatacaacactggcggctcaagtttttttccatcgacatctaaacatgccgatctgtgaatgccacgaaagataccttggtttgccttcctactctgggagggataaaaagaggatgtttagtgatattaaggagaaaatctggcgactaatgcatacttggagtgagaaatttttttcagctggtggtcgcgaagtgcttcttaaagcggtagttcaatccattcctacatatgcaatgagtcgctttcgtctaccggtttacttttgcaaccaacttgagtctatgatggctaatttctggtggggcttgaatgagaatggcaacacgattcattggcgctcttggaaacttttgtgtaaaagaaagacagtggcggtatggggtttcgctctttcatgcattttaataaagcaatgcttgcaaagcaagcttggagactccttaaacaaccagactccttacttgcaaaggtgctgaagagtagatacta

SEQ ID NO: 357439 - DNA, 1039 bp, Cannabis indica
ccttggaaaataatttatgttttattttggtatttttgcaaacatgtttccttacttgttattttaagaacttgtgtatgaatttaattgaaccaataatttatttctgttattgatatttgtagtgtcaaaatgtacaacccacacccaaatcctcttttagtatatgcctttacaaatgaactccaaagtgtgaagatgactcctggtcagagtatcacttcacacttgctcatgatgaacatgaaattccagaaatcagctatgttgggaattgttttatctagagagcaaagagttcattttgttctcaataacttatcacttgagtttaaccaatgtgttgtatcttttatgattaacaattggaactcctccgacatagataagttggacgctgaattgcgtgcttatgaacaaatattgtcacttgcatggaggtccttctccagtaatacagataagggcaaaaagaaagctgaagatattgagaatgattcctccgacaatcctactatttcgggcccagttgagaaaaatagagaaagtgattccactatctcagattatctttcacaacagattgaaccagcaataagaacaatccaagaacagttaagcagacatattattcaatgttctaattttgaatagaagggacattttaaatttaaacgtcctaaatttctcaacactaagaacaatggtaatgctttagtttttgaatcatgtgttttagagaatgacaaatccatctggattgttgattctagatctactaaccatgtctgttgttcattgcagttgcttgaacattggaataatttaatattcagagaattgaaacttaaagttggtaatggcgaaatggcatcggttagagctaaaggaaaagcaaaactcaagtttcagaatagaattttaaatttagacaatactttgtttattctaaatttcagtagaaacttgatttctatttcatgtttacagttgcaacaatataaattgaattttttgaattctggttctatcatttctc

SEQ ID NO: 357440 - DNA, 598 bp, Cannabis indica
taccagacaaggtctgctcgcctaccgctgggcccacgagcggaactcgtgaccggagattgggcggctgaccattagtagtttgagaagtattcatcgttgggtccttttctgtttctctcaggggaatgacgttcggcgattgctgacctacagtttggtaggattttcgtatcagcacggtggcttgccgactacgatcttcaatctctgcatggtgagcccttaatgcctccatctctttatctctccattcggcgagcattcgcctttgttcgtcaaacgcgagatttactgcagcatgcagttcgtcctgatcatgatgcagggtgttgttatgaccctgcatgagtctgagcacgtcacagagattttgtaattcagtagcatctctgatggtcgtctgggcgttggttccaggcggaacagtcgtattatggacgccctggttgggtgcggaactgttattcccagtctcttgcacaccaggcgcaattccacctataggaactgtttcgccattccccacgcttgctggctgtcatggattaacagcaggcggaacccttgaactccctgggttctacgatgtaggatc

SEQ ID NO: 357441 - DNA, 719 bp, Cannabis indica
ttgttggatttaaggactttgtctaatttcattcaattttactattttagtgattgttcatgtactaaactatactctacatactttgatatctaacaaatcatgtccctcgaactttgacatatactaaattatatcatctgaactttcatctccatgttagacttttttactaaaattgaacaaaagtcttaaaatccaacaatctcaatagttcaaggtatttttaacgaccttaaaaattcaggttgcatgatttgatgcatgtcaaaatttaaggggcaaaaattctaattaaccttttatttagtaaaaattaaaagaaattactaactatttataaaccttgtcacatgataatgtgctagtactcgggcatctaattggctcttagcaataatctttcttgttactttatttattgacctaacttgcacgttgaccttttatttcttagcgcatcatcatttcggcacacaactaataaattctttcacactttaacttttaaaaatattttacctttcttttttaacaagcttatttaccaatcccataataataataataataataataataataataataataataatattttaatgctagatatttttactcagttcaaaattatttatttcataaataattaattatgattttgtaaacttaaatgatttttgtttaaacctaaaataattaattttattatgata

SEQ ID NO: 357442 - DNA, 912 bp, Cannabis indica
ccactttcacaaaatataaagttggcattcaaaatattgataatcataaagagctcagaactagttttccaacgatataaagaatgtcaaaaatggagtcccgagtcaaaagttatggccaaaacaaaattgggaatagggatggctctctgctgggttttatggccgcggcgaccataaatctgaccgcggccagtgggtttgaaaaatctagaaaaccagaatttaaggtctaaaaattctcacttttccatatattcgaaccttaatcaaaccataacgaaaattaacttcttacagataaaaatcctcacaagagagagctaaaacatcaacaacaactctcaaaattaagattgtataaataacccaaaatcatgctttaacttaacaaagttcaagctcttgaactagagcttcaaaaccatgcatcccaataaatttccatcaacaacataccattaacaaataacttgaattcaaggcaagagaaaaactctagaattccctccagagatcaaacaacaattacaccaaaaatccaagcaacactcactcaaattaacaatagaacatcactaccatgcaacctatcatcatcttgaacaaactcatgcttttcaacaataaattcagcaaggataacaaggataaaagctacaatgtttacatcaaaattcaattcaaatgctagcacaaagatccaccaagattatgcttcaaatccaaccaatttctcacgaaatcaaagagaaaataagagagggtttgagagggagagaggattttccaagagggaaagagaacccataattttctaattcatttcttcaaaattcagctttaccaaataaatcaaataaggtcaaaagaccaaaatgcccctagggccaattctcacatattcaaaca

SEQ ID NO: 357443 - DNA, 619 bp, Cannabis indica
atgggaatgggaatcttgaaatattatcttgtttgtacaagttttgaatattcttttgaaaaaagtttaggaaaagattcacttctggtacccacacataattatataaaaacaagagtaaatactattttggaccctctattttattaaatgacaaaatggactttatattatccaaaatggtaaaaataggaccctgagctcaatttttaataattttatataaccaacttttaagacaatttctaacacgaacagatacagaaaatgtaaccaactttatcataacatctttagatcagactattattaagttttattttgacaaaaaatcagttcatggtcctatttgtacaattttaaaaaatacggggtccattttatcatttaacaaaacagagagtttaataaataacttttgcaaaacaggtccaaaatagtatttaccctaaaaacaataagttaaaacatttctgtgcaaccaaacatattctcctaactttgtaaatctaacttacttttctcatgtacaaccaaacacaatcatacatgattcaaacaatcacattaccctatttaaaagttttgagtaatgatatgtgtatacataaattacaca

SEQ ID NO: 357444 - DNA, 772 bp, Cannabis indica
tttcttagactaatatgtctagacttcccattatatactccactatatgctctagctaatgttgcttggctatcacaatgtatcgatattgtagatacatcctctttactaattggaatctcaattaagagatctcttaatcattcggcatctttcccagtggaagctagagctataaactctgcttctattgtgaaatgagaaatgcaagcttgtttcttggacccctaagaaaccgcccctccacctagggtaaatacccaaccagttgtggacaaattatccccaaggttggctatccaacttgcatcagtatatcaatctaaaattgaaagaaatttggagtagtgaaggcataagtttttcgttttctttagataacccaaaactctccctatatgcctttcaatgatccacacttggattactagtaaacctactaagtttactcaccgcaaatgatatatcgggccttgtacattgggcaacgtacataaagctccctataacacttgcatactccaactgagccagtactgctctgccactatttttaactagtggtttactatgatcgaatggtgtgttggcctctttagcctttagatggctaaacttattcaacactttctcaatacagtgtgcttgccctaaagcaaaacctccactatgccttctaactttgatacccaaagtagtatccacttctccaagatctttcattttaaaggttgaagaaagaaacctttagtttcttctattcctttcatgt

SEQ ID NO: 357445 - DNA, 740 bp, Cannabis indica
tctcatcaaacctagagagaaaactaggttttcagctttggaggcattagttggataatgagaccatagccttccttttatactattctccaatagggttaggattgaattattaaaaataaaaaattgataaaaataaagtgaaaattagcacatatggttggccacttaatgggccccatacaaatttggtttttgccatttttctcatctatcttatctatttttcacaaataccatttttgtaacttcaaccctgtaaatgccaaaactatttatttaataattaaaataactatcaaataaaattgtcattcataatatttattaattagacttaataaattcgcttaattaagaaagaaaccccaaaacactatttcttcacgatcaagccatatcttagtgaaaaatattcataaactagacaaagtctaattttagaattataattgattaactaaatcaattaactgagtcttacaagcagtttgtctcaactagtatggggaccatgggcctatataaccgagcttccaataagcatatctagaatttaccaagtaaattcactaacttattaattcctcattgcatccagcatagaacttggaattacactctcagttatatagaacgctctatatgttccagatatagatacactattaattatccattattataatcccaataatcaatgattctctatagatgatctaccgttacacccttttaat

SEQ ID NO: 357446 - DNA, 572 bp, Cannabis indica
tttttaattttattttttttcttatttttaattattaatattaggtagaccaataaaaatttgccacgtgtaacttctatacaccgtggcagaccactttggctcttaacaaactaaaatggacggaaggtatgttgaccaaaaagattgtggaggatgagaagttttcccataattttttcagtttagggtttgatcatgccaaatgtcaaagttcaggaaatttgaccgcaaattaccccataaaaaaaaagtaattgaggaaccaaaatatttaaattatgttaatttaaaaatgtgatgcaccataaatatgcacacacaaaattgagaggctaaaaggaatttaaattttggggtcttatataaataatttaagaattattaaactaataattactttggtgtactagtaaaatttttagggctcgtttggaacgacgtattaggtcgtattgtattgtattgtattatattgaattgtattttatgcaatattttttatgtaaaactatatgatattaacttttatggatacctaaatatataatattttagtataaattaaagtt

SEQ ID NO: 357447 - DNA, 711 bp, Cannabis indica
taatttagtatactatacttagtcactagttattaatttcgtaagcctcgaggcatttgacgcgtctcacaaattatattgaaataatattttagaacacctaaggatgaataaaatatcacataaaattcaaacataccaaagatatatcataaaacttaaactaaagtaaagataattatgtttctagaactattctattatactataacacacttgactcataaaactcgaattaaaatattaataaaaaatgcaatgatgattagaaatcatataagtcatcatcgcttgttttatcttcttttagattgttttttgttgttattgatagccttataaatttttttgagaatgttcaattatagtcgctatgttgttaaaatttcaatagatttaggataaaattatttgatataagtttctcttaaacttagttgttaggattttttttgttgcttttcgttatggaaaaatcatggatgcgtgagtagcgccggttattatatagttagtaatttagagtaaaattagttactggttagttacaaattatatttagtatatagtagttagttactaactagtaaattagtagattctgtgatatattatactacggtaagatcgataagtagaataatatgcatgttaaatgagtttgaatatcttaaatattcacccgtaatgaagtaggttctacgaatacat

SEQ ID NO: 357448 - DNA, 527 bp, Cannabis indica
taaaataagttaaaataaaatagtaataggagagaaaaagatagtaaaagtttatttctatactactaaaatactgataaatattacaatgcaaaagggtgcaatttatagtgaaagttggctctataaaatggtattttcatgtaccatttagtgggttaaatgacacaaaaactgataaaagttgtatgagaaatgcgataatgtaggaagtggagatttagtaatgggtgcattagttagtgggccacgcataaatcagttgctcaagaaagcagaagaaataggggatgtgtgtcatgttgctggagcttgcggtaatggagataatagtccgtctattgataacattaatgactttagacattatattgggccttttgcttttattcaagcccattttgttatctttagttgtagtaatttgattttaggaataattacatgaggcaccattttttgtaaaatatttacatttttacgttcaaaaaatatttttttacatttttacggttttccaaaaaata

SEQ ID NO: 357449 - DNA, 937 bp, Cannabis indica
ttgatgacatcatttttggctcaacttgggaaagtgaagtacatacatttgtcaccttaatgactagtgagtttgaaatgagtttgataggtgaccttaatttctttctaggacttcaaataaaacaactagatcatggcacattcatatcacagtccaaatatgtcaagtctatgttagataagtttgggttttcacaggtcaagcatgcacatacaccaataggcactacaaccaaattgtcacgagatgagtctggtgaccctgtagaccccactctatacagaagtatgataggtggattactgtatctcacagctagtcgacctgatatatccttcagtgtaggcttatgtgccaggtatcaagccaatcctaaacagtcccatctctctgcggtcaaaagaattttcaaatatctggctgggacagttaactatggtctttggtatagttgtgacacgaataccactttggtaggatatagattctgattgggcagggtgtctagatgataggaaaagcacttcagggggatgcttttacattgggaataatctagtctcgtggtatagcaaaaaacaactatccatctcactttctactgcgaagcagaatatattgcagctggtagctactacactcaattaatatggctgaacaaaatgcttactgattatggacacccacaacacacactgaccattttttgtgacagtacaagcgccataaacatctctaaaaaccctgtgcagcactctcgaactaaacacatcgacatcaggtacccctttatctgagatctagttgattcaaatatgctgtcaatatctcatgtgcccacaactaatcaattagcagaccttttcactaaagctttagatactcaaacttttactcacttaagaaaatgtattggtctctgtactatctaaac

SEQ ID NO: 357450 - DNA, 693 bp, Cannabis indica
aaaaagttcctgaaacttttcccaggtcagtgtggtgacatcatgtatcatggaaaccatgtcccaccagaccaacgcatcctcttgaaactgaaatgtggcacacaccactctgtcattcccagtgacgcccatgaagtttaatattttcgtaattactgttagccactgctcggctttcacgacgtccggacctccaagaaaaaccggaggtgcctgcttgcggaacctttcatacagcggttccattctattcaccgccactaccagttcggcctggacaataggggcaggtgccactcaaacttctggaacaggcactgcaggagcaccctgctgtctcaatctctggatctcattatcttgctcctctattctagcttgcatttctgcaaacctattttcctagttctgggcttcctgagtggcttgggcagcctgtggcgagttaacatcaccccgactacgagccctgcccctaggacctctacctcggccccaagcattttggggaatttgagcttcctgaccttgatttgaccaaaccgagttgccctgactcctggtatttcgcctggcgtccatctagtctgaacagcctacgaaaccaagagttggcatatcaggtcatgaccaacgagagcttactaatgccgcttaatttgaaaattaaaaacatgcgcctattctact

SEQ ID NO: 357451 - DNA, 330 bp, Cannabis indica
aaagttagcaaaatatcttacttctatttaaaattacatgattataataatcttattttaaatttaaataaggtcaaaataatttaaaaaaaaataatttttaaaaaatatttaatatctgacctttaaatttaaaaaataagataaaataatcaaatttaaaaataagatataaaatcaagcaaaaagatagatttttacttgttttcaaattttacactaatatctaaaattaaatttaaaaaattcaaattaatttatttctgatattagatttgaaaattgaaaagtaaaaatcaaaatacaaaactacacaaaaaatcggaagtt

SEQ ID NO: 357452 - DNA, 900 bp, Cannabis indica
atttatatttatttaaataaatacaaaatggagtttacaataattattgctagtgcttttcaaatcacattattcaattcgatcgaattagttacttgttaaaaagaaattcgagttaattcttggaataaataactaaaaataatcaacccaatcgataaaattttgatataatgaaaaaattatacacatcatatcattaagaaaaatgattatccgatctttgttgaggtaaaagaaatttattgagaaattaactaatatgaaaggtttttataaatttttttctatcatttaaaaatgaggcattttactttatttagtgggagtgttttctattagttttaaggtgctactataatacactcttctaaaaagaatgcattgatgtactttttatctgtttcgatatctagaataattttttagtcaatttttttttataatcatatatgttatagttatttacgacatcttgtacaattttgagaattttagaataatttacgatatacaaataagtgtttaaactgtttgaaccttgtttttggtgtgttaaatttttttcaaatttctcaaaaaatttacaggatgtcttaaatactacaacatgcacgaccataaaaaaaacttggactgaaaaattctctcgaatgtcaaaataaataagggtgcatcggtgtatttttttaaggagtgcattttataattttcgttagttttattattattttggttgaaaataattttttatttttttgcaactctatgtataaaaattatctttttgaaaacaatataaaaaaaataatgttttaatgttaaaccttaaagactgcccttttcaaaaaaaaaaaaaaagaaagaaaaaaggaaaaaaccttaaagactgccaacgct

SEQ ID NO: 357453 - DNA, 780 bp, Cannabis indica
aattgaccattttacccctagctttggaaatatcctagttttaagtctaagggcaatttagtcctttggtctatttgaggttaggtggctggttattttagtgacacctagctatttctaagggttggaagaattgattaatgatccttttcccatttgaagaaaataaaaaaaaaaggggctttatccttgaagctctctctccctctttcggctgagacaaaaccaaagaagaagccaacttttcctcctcaattttctggaattaagctaaagatcaagtactcttgaagtggaggtaaccctagaactcttgtttatgtgttgttaagctttttacttagtttgaacttgtgattttgagaataagtggctgttaggtttaggtatgcttagggtttgaattctaagtctattttgagttgattttgagctctggttattagctttgggctgtggtgagggtagtgtgcaagcttgagctttgaagctcaaggtttgagctttaatggcataatttgatttagtggtcttttctgtgaattgctggttggaaaatgttgtgtatgcattgtataggtgtactggagagtttgataaagtttggttgagttttgagttcaaggggagattttttcgggttcccagcacagaaccggaattccggttctgggggacctgtggcaaccggtcgaccggttggtgacccagaaccggatttccggttgggaaccggtctgcctgttgggggaatttccagaaccctagttttggccaatt

SEQ ID NO: 357454 - DNA, 644 bp, Cannabis indica
ttaagtctattgacggctacactgcgaagagtcacgtcagtcaaaaggcaataaggaaattccacataaaaaacccctacaacacctagggatttgaccatgcattacccatggtatattcattgggaatacccaactttatggatagttacagaaatacatgtactataatcctgggaatcaccccaccaaaaacactataaataccccctcaaagctcattaaatggggtcgagaattttgggttgcataagtgcaagaagagtaaatactcaccaagaacattctctgtatttaatacactcataaatacacagactcgtggactaaggctcattaacgccccaaccacgtaaaaatccttctcttaatttcttacagttctctaatcttatattattttattggttgccgaaaacctcggtcaacagttcgtttagggttcgaatggggttcaagtggccgatagaggtaggaattctgtcgccgttgggtgtgaagtagaggttaggattgggtttagtctgtcggggtgaggatagagagagtcagtgagctgaggttatgagagaaagctgataaagaggttgagtcggtgctattggatagtgttgggttttatgccctaaataaaactctgtttc

SEQ ID NO: 357455 - DNA, 641 bp, Cannabis indica
aattacaaagtattttactaatacatacttataatatatatttgtttttagatttgctgacatgcatcttcaaaatacagactcaaaatagtaaaagaccgaaaccctccaggttgcactgccgcgatatgtacaatcactgccgagctctatctcactgttcctccagctttgcttttcctttacctacacaaggtagcaaactgatgagtcaacagactcagtaagatatgcaagaaatatatataaataaagcaatgctggctttatgattaagccgccctgagctcaataatcaagctcaccaaatggttaagaacgttcttaagggaagtacgactactgtaccaaatgcactaaagtaccaaattttgtactcgtgttggtagagccctaactgtacttccggaaattactaggtgttgtagcacgaacacgacgtacccttggtactcgtgttggtaacaccgtaaccacaattataaacaacactatactaacactctataaaccacatttaaactagtgctagtagtgcaaatatgtaaaacaagcatatattcatatatatatatatatatatatatattcttatgctatcttacctcgttccgtgctcaagtgtgccggtcagcctgagt

SEQ ID NO: 357456 - DNA, 535 bp, Cannabis indica
aagaaagaaagagcagccaaattgataaaacatatatagctttaggattatttaatagtgttacttaattaatagaaagagtattttaggaattttgatatgaaaaatacaaatttagtacttgtactattgatttatgatatgtatattaaacaatatatatagattaataacttttaaaaaattaggaaaaaaaagataaatattaaaataaattaaaaaatgagatatataaaaatgagatatgtacacacgattaattttagttagtttgaaattttttttgaattgtataaatatatttctagttaattattcaattagtatatataaaaataattaaaataaaaaattagataaaaagtgattatagattattattttattactttaaatgagagaatagatagagttaattggagtgtttttagagtgtcatgtgaccccctaatatttctcctttatatatatatgggtatgctcttaatgggtattacccatatatgggtattttattcttgaccattggatcaaa

SEQ ID NO: 357457 - DNA, 511 bp, Cannabis indica
gcatagtccacatttactctaatcctgtctggtctagggagtccccagcgaacttcatgaatcccctggccctcatcgatcgaatcagtcgagcaacctaaagagaaaatccaatgattcaggaactctttatttgatttatcttccgcatcttctgcataggccacctttcattattatggtagcttttgttttgaaaaaaccagagcttatgatagagagtagcagcaaagaacatgaactccccccccccccaccaacttcatcatccccgtgaactgaagacgaattgagaatccattttaccacctctgcaccggagtgaaaagggagatcgttgatacgaagcttccagctacaagaaagccagagaaagttggtaacctcacagtgggaaaagaaatgttgccaagagtcactctacttcgagaccgcacagggcacaactgccaatagtgttattgaaaatccgagccaaacgggagacagtccttcataattcgccacaaaa

SEQ ID NO: 357458 - DNA, 1095 bp, Cannabis indica
gttaatctttccttcaactctctgaaagcttcttcaccactatcatcccacataaactttacttcttttcttgctaactttgtcaaaggcatagcaatccgagagaaattctccacaaagcgacgatagtagcctaccaaccccagaaaactttgaacttcagtgacattctttggtctttcccactgtagaagagagtctatctttacaggatcaacggtgataccatcttgagaaattacatggcccaagaatttgacttcagtcatccaaaattcacacttctctttcttagcgtataattgatgatctctcaatgtctgtaatactgttatcaaatgttcagcatgattctcacgtgtcttagaatacaccaagatatcatcaatgaataccaccacaaacttatccaagaaaggtctaaagactctattcataagatccataaatgtagcaggtgcattcgttaacccaaacgacattaccaaaactcaaagtgtccgtaacgtgtcctgaaagcagtcttagggatatcttcttccctaatcctcaattgatggtagcctgacctctcaaatcaatctttgaaaagaactttgaaccaccaagttgatcaaatagttcatcaatcctcagtacaggatatttgtttttaattgtcatctgattcaactttcgataatcgagacaaagtcgcaaagtcccatcagctttcttggcaaacaagactggagctccccatggagaagtactatgtctgatgtaacccttacccattaactctcctaattgttttttcaattcagccaactctgcaggtgcctagcgataaggcgcaagagaaactggttaagatccgggaatcaaatcaatacaaaactcgatctccaggtggtaaccctggtaaatcctctggaaacacatccagaaaaccactaaccactgatatccaagggaactggtctaaatttctagactcatcatcgatcgcaaaaaaattcccataacactctaagtttctctttccgcctaagcatgccctgaagataggattttgtctcactgcgctcatgttggctcgataaacaatgaaat

SEQ ID NO: 357459 - DNA, 806 bp, Cannabis indica
accaacaacatgggctaacacagcaaagaactatccaatcaatctaagttttaataaaactaataaaatttaatgtaagcccaaataaaagtctaacaactaagttaagcgtgtttttttcaaagtacttaagatgaagaaaaaaaaaagacgatagtaattattatcaattatgtcgttcattttgaggattttgattacttgatctaggtggtttaattagggtggtcaaaattttcgagatgaataataaaattcttttattatatttaaaaaatatcgtgaaagaaaaatgagtatagggatataataatatagtatatacaatataattaaattcataattcttttcttttcactaatgagattatggattgtggtccgaacaagtggaaaccactttaattatttaaatttatttggaaaataaataaaactttagggggacaaaatactaagcttagctggctaaataaaagtctatttttttccacaccacactcttaaaccaaaagttttgaagcagacaaacaagtgaacaaaaaaaaaccaaaatgtttaaaaagaagtgagtaaaaataattaatagtagataagcaaaaaaaataaaattactaatagcattgatatatgcataatttaaatactatatattgagtaaaatattttatattattatcaaatataatgttttgatgtatatattgttattacttaaaatatacaattttttttaggggaattactctatatattatttttataatttttttttcaaatttacggtttgggtttctaaagtagtt

SEQ ID NO: 357460 - DNA, 529 bp, Cannabis indica
agagcctatgcaaaatccctcaatttacagaagcatcattggatcacttcagtacctatgccacacgagacctgacatagcttactctgtgaataagctaagtcagttccttcaaagccccactacagtccattggaatgccgtaaagagagtgctaaggtacttgaagggaaccaaaaccctgggacttcacataagctgcagcaatcatctcaatataactggtttctcagatgcagattgggcatcgtgccctgatgataggcgatcggtagcaggctattgtgtgtatctgggtgaaacattggtgtcatggtcttccaaaaagcaagcggttgtgtctagatcaagcactgaatccgaatatcgggcattggcacatgttgcagctgagatttcttggattgaatctctactcaaagagcttaaatttccattgtcactgccttccatcacttggtgtgatatattagtgcaagtgcacttgcatccaatcccgtattccatgcgagaaccaaacacatcgaaa

SEQ ID NO: 357461 - DNA, 579 bp, Cannabis indica
ttaacattaaatacatattcattttaaaaaaatattaaatagatataataaaaaaattatttttattctttaaaataatatataaaattcctatactcaaccaaacagtgtaatttaattaacagtagtatgattacatatcaccctacacagccaaacacattttacacgtttttcctacaatcatattctcctttataatattatttataatcaaattattttgaacacctcatacaaaattctcccttaatatattatactaatattttgtatttaattttatttttgttaaaaaacattttaatttaattttttttgaattactattataattttttttatatatttcatacctctttatattaaacatctttctctataaaaaatattatttatttaattacattatatataacattatttattgtaataattgaaaagaaaaatatataatctaatataaaattaagcatttgtatcttgcacgtaacattaatctattatatattacataaacttctagttttggtaaaatatttacacttttacgttcaatttttcttttacatttttaca

SEQ ID NO: 357462 - DNA, 960 bp, Cannabis indica
tgccttctccgggagctacgtcctggacgctgccttatgacataaagacttagcaaatatttttggattataagttgcttgatccacgtgtccctgtctggttggtccacgtacattgggcaaaatcgggggcaacaaaagtcaatgtaatatcaatcatttctaaatatatattggagttttttttttatttttatactttaaaatagttttttttatatatatatttttatgtaaaattcctattgccactagcggaacaacctaaattataaccaaaaatcgtatagcaacccacatcaaaaaatcctgtaaaaactactttagaaacccaaatagtaaatttaaaaaaataatatattaaataattccacatatatatatgtacgcgcacatatatatatactagattaaagttacgtacaatgtacatatatttaattatattttagttaatttttaattattatactatataatattattataatttaattaaataaataatttattttaaagtaattatttatacataaaataaaaaacataatgatatatatattgggaaaaaaaataatgtgtaaaatttcaaaactaaactcttatttcttgttcataatttaagataattaatgtattagctttgataaataaatcaacaatcactaagagcatctacaatagagatgcaaataagtggtgaaaaactaaaatgtaattcatttaacaaaaagtatactctaaatctaatgatgtgctaaaaagtatgtaaatttaacacgtaagactatcttccattagtaataaaattgataataaagttattagtttttattttattcttaataaaaacattaattagatattaaattttatattttcgtaattgtgcattagagcataatactaaaatttaatttaaatctaccacaaatttattttttgtgccaataaaataat

SEQ ID NO: 357463 - DNA, 1145 bp, Cannabis indica
gtctgggtcccccatttatgtttagatcttaggtcctggtctggatccaagttcatgtttcggtttcgggttcgggttcgggtctcgagtcccggtctagtcaagtcccaatttgggttcagctccaagttcaggtccttgtcccagtgtggctccgagtttcgggtcccaggtctgagtctggttcttaggtccttggtccggccatagtttttgggtctgggtccaaatcctaggttcttaggtttaggtcccaagtcaatggtcccggtccgggtccaagtctcggtatggtctgagtttgggtttaggtttgggtccctttactgtcccaagtctgggttctagtcccagaccttgtccgattctaattatgggtctggattccagttctgggtccggttctaggtctgtgtacggatccgggtcattgtcctggattcaaacactgactacgggtcaggtcaaagccttaggtccagattcggatctcagtcttgttccagttctggtcccgggtcttgggtcgggtcctaagtttaggtttgggtccgggtttggggttttgtcccggtagttaggtcctgggttataggtccagggtcgggtcccgtatctcgagtctagagtctagttttgggtctcggtcgcgaatctggggcctagtttttgctccaagtcccccatctaggtctgcatccttggtctaggtctgggtttaggttttagtttttggcccaggtcccccatcgaggtctggatcctagggcccagtttaagtccaagtttaggttcgggtttggatcccgagtttgggtccgagtctaggtcccagtacaggttaatgttttgagtttggattcgggtcccagtcttagtccaggtccctatttgggtctgggttggggtaacgattttggtcccagtcaaggtctaggtcccagacgaggttttggtctgggtttgggtcagggttcaggtcctgagtttgggtctaggttcgggtttagatccgggtccaggtctaggtcctgggttccgatctcggtatgggtatgggtcttggcccgtgttaaggttagggtatagggtttagggttttgggtttattatttaggggatttagggtttagggtttagggctt

SEQ ID NO: 357464 - DNA, 1895 bp, Cannabis indica
gggatttctcgttcatcaattttcggttgtctcctatctggttatccgtcctgatttttagagagtgtctcattttccccaggttgttcttcccgggcctttttctgtctcctggttcgtgagccatgaggtctaccccgtggtcttctcactccaggttcaggttgattttgagcatttatcccctgtgtcgccatggccgaagctacctcacgttctaactcaacatttcgacgatgagcttcttctagacgacgtctcaggcagcggctttttgcttcataagttctttctcccacagattaggcacctccaaagttgagctcttcaaccctcgtcccggggttctgaccattcccacgctgagttctcctcgagcgtgttgtccgcgtactaggaccaacgtcgggtcgagttctccgagaacgtgcggtccgtgcgctgggaccaccctcgggttgagccctcctaaaacaagtggtccttctggactacgggttggtaggtcttctggagcccatgggctctttcccagaatgatgattggtttcctcatgtggggtgttaacattttcttgattttcaaccatgaaggaggttatttttcttcaaaagaagggagggtttttattctgagctttttcacagaggctctcaatgaaagcaccaaactgttaacggagtttttcgttaactaaatttgagcctcacggtattgatttcacacagaaaaaataaatgctatagaaaaataatatatgaacatagggttttttacgtggttttgcagttaaaattctggatagtccacgagtcaatcttattcaaatttctgattgtgttcttttagggcctcccctgcataagttttttccgtcttttttttgagcttgtctgccactatttataattacatagtggtctgtcaattacaaagctaactgtaatatatttacaacaattatccctaaaatcatgggatttaattacatatcacgaagtgtaaatgcggtttatgatttgaaaattgtttagttgtgattttcccgcttttactgggtcaaaacaatcgtgtattaaacacgtctttaattattgtatctggagatatctcgccagcaacttggttacagtgatcccactagcgagctggggtcattcttccttctgaggtcgacgatgtatgtctgatgtcgatcgtgcttcttattctgaaggaattctttgaggctcacttaaatgctatcttctggctcaccaggattgtaagcctcactgacgctaacgggacgaagttatatgcagtcttcccataacgagacggtcaccttgcgtacttgttctcgagtcgatccaacttttacacttagtttgttcattgcatgctaaggactttcacgatggatgtgtgccgctttcatcttccaatgtgttatgtccttgaggtctcgctattcatatttagtgacatatggtttctcattaatatactaagtaacagtttgtacattgattcctcgccttggaccttacagtcaacgggttacaaatatactctgatacttacgtaattaatgaattattcgaaaagctattgcatcgattcacattccctttatcttgacacgtgtcctccagccgaatttcgggtataataacaagatcaaaaggttgtaagttttaattattaattatagtatttattataacaacaaataataataaatataaaaactaatataaatttttactttcttttacagtttggagaaaagcaagcataaaatcaaaaaactgaattattaccattatagcgacagtagatagaacggttaatggtggtgatcacgaaggcttggacgaatgatactaaaaggcctaagaattttttttcc

SEQ ID NO: 357465 - DNA, 963 bp, Cannabis indica
agtcgtgcagcttcttcttgggttacacatctgagcaatggcatggagaatcctcgtttgtacatgattccctctactatgatgtaccatgcagccttccttctcatctttcgagcttcatttctattatctgggacttcctcagtgttgaggtaggttgcaattggcgtcatctagtttggggatgtatcaatcatttcaatctcctcatgttttcttcccttggaattttgctcagatacgctatcatcttttccccctgagccttgtattctccagatacatgatttaccaccaactatgaatcactgcagatctcgatatgtttgaccttcatctcttgggctagttttagaccggtgatcaaagattcatattcggcctcattattagatgctttaaatccaaatttgactacagcgtgcaggtcttttcccccaggtgtgaaaagggcaattcctgcaccggatagttgatctgtagccgacccgtccacatgtagtttccaagtcggcttgtcttcactgttactcggttgaggtatttgtactggctcggggttgttttctgatacgctttcttccttgcccgtgcattcttctacaaagtctgctaaggcttgacctttaattgttgttcagggttggaagataatctcatactaacccaattctaccgcccacttgagtaaccgtccagaggcgttcagttttcacaatatttggcgtaacagtttgtcagtgtatacttgaacaggatgagcttgaaagtagggccttagctttcttgttgctagaatcttgaaaaatgcgagcttttctatcaatggatatcggctttcagtctcaatgagtcttttattgatgtaatagatcgaatgttgaacgttattttcctctctgatcagtatggcacttacagcatgctccgtaactgtaacgccctaatgctaaggcacgctac

SEQ ID NO: 357466 - DNA, 1038 bp, Cannabis indica
gttcgggtttggggcccaagtcccccatctaggtccggatcctaagtcccggtcaaggtccaagttcaggttcgagtttggctccaaagtttgggtctgagtctaggtcccagtatgggtctaggtccgggtctcgatctgagtccaagtccctattcgggtctgggtcggggacacgatccaggtcccactcaaggtgtagatcccagaccaggttctggtctggctttgggtccgggtttaagtcctgagtttaggtctaggtttgggtttggatcctggtcttggtctgggtcttgggttccaatctcggtatgggtattggtctaggtccgtgtccaggttagggtttagggtttagggttttgggtttaatatttagggattttgggtttaggattttgggcttaggtcttaggggtaaatgtaaagagtttagggtttagggtttaatggtctacttccagttccagttccaattacgggtcttagtccaagtcctggttccggtctaggtccgtgttttggttcaggtctgagtcttggttcccaatccaaacaccaaccacatgtcgagtctagttcgagttcaggtatgggttctggttggtccgggtttaggtccaggtccaggtcgaattccctaatttagacaccgactatgggtcgggtccaagcctcgggtcttgggttctgtcccgggtcaaaatctagatcctggtccagttctagctcttgtcttaggtccaagtcatgggtcttggtccccgattcaagtcaaagtgcatgttcccggtcttagttagggtcccagtccgagtgtaggtcccggtttgtgttcagtaatggtccttgtctcagctcttggcctggtctgggtctaggtctagttgcccttcgggtcccaggtcctggtccggctctggggtcggattctgggtctcagtcccagttctaatgcccgtgtcctaggtccaagtccccaatccaagttcgagtcctagcacctggtcttagtccaagacccgatcggggttc

SEQ ID NO: 357467 - DNA, 891 bp, Cannabis indica
ttatgagtggtttctcttggaaactttgtataaggctaggtagtgagtccattatagtcaattatgcaacttaggactcactatatgtcttagtaagtgtacttaagacagtacttggtcattaatcgaccttatatactttattttacttggaaggtaccattgggtatcgttgacttaaacatgtttgtagctttgttaggttgctcacctccccttattttttccatgcagtagtgtagggtgttgaataggggaggtgatagccgcgtaggtcccttgtttaccttgtagtgatggccagaacaaaacaaacactgcgtagggaagctctgtatgatccccacgtggccatggtggccataaggggtggacttggaatggaggaggagaccccttagccccctattgatgttgagccaatgatgggctcaggagttgagagttttgatgcagaatttgagttggaggcggttgctctagtgcggaggaggaggtacaagacttgttctgtcctcctagactatctcttgggtcactatgacgcctgaggtaatccagtgaacaggcttggtgaggcttcagagctaggattggaccatgtcctagaggagtctatagagctagagatacagaatgcaagaccacccaaagttagttgggtctggcctgctttcgctctgtccgatgaggccttcagtaaggtccttggtagtggtttgataggagatgtccattgtgagattccccataaaagttgtctgatgcataggccccctctgggctagtaggtgttgtttgaggccacattgagcatggggcggtgctgccgcttcaccagtattttctagacgttgctgcttactttgggatgtgcccaacacagctcat

SEQ ID NO: 357468 - DNA, 916 bp, Cannabis indica
aaaaaaaaaaagtgaagttaagagagtttttccacccacaaaagatcaggggttaagcgtagaaaattaaaatataagtggatttcaacacgaattatcaaagaacacccggtaaacccgaccaccacactcttgccatatctgaagacaatgcaagtttaaaaagattgttagctaaagagctcgctaaacgattacaaaagagaaacttagaaacattaacacggttacaaatatcatcaatatctttaaaaattaggccaaactcagccaagaacaaatttctcttccgtaggatatggataaaacgttgacaatctgattcgatctccacattgttgaagccaagatgcgaacatagaagtaatttatatattaatttaattatctttagtatttgtcagaaacaatatcactatctttctatatatttttaaaatagcaaattacatttctaattttaatactattattttgtttataatagacatacatcaaaatattatcttttagattatatataactcaataagtataaaaagaaaatataaggatattacaaaagttgagcaacaccgcgcgaagcggggctttgttccctagttaagagaatacaatggaaatgaaaacattcagcttagctccattccaagtagttgatctactaatgtaaatataagtcattgacatcaatacaatatctttagtgagtaaaaaacttcacttctacttcacctaaagaatgtttcaaatattcttgcagctgtcaaaataaaaaagaaaaaattcagcttatctatgatataagaatatttttatatcaggaaataaatttctatttaaggaaataaaataaataattgattttgtgataaatgaatattttatatattcattgaatctggacaaaattaat

SEQ ID NO: 357469 - DNA, 711 bp, Cannabis indica
taaagtagtgtgctccacctttggttggaatcctagatggcccccaaaggtcagaatggacataagctaacctttctgtggtggtgtgttctgccttgttgaacttcaatctacaagccttccccaaaacacattcatcacagaattcaagtctttctgttagcttctccttgaacagtccttgcctgttcatttcctcaagtcctctctgacttacatgccccaatctgaggtgccatagccttgcttgactgtgtttggttgagtccaaaacaggtgctgcacaacctgatattgtctttccatccaagaaatacaatccattactcaaccttcctctcaacacagttcctgtgccttgtgcaattttcattacaccttcctcaactttgacaacataccccaatttatcaaacataccaatagagagaagatttcttttgagatctggaacatacctgacctgctgcaaggtcaacatgacttcatcatgattctttaacaagattgttcccacacctttgatctcacacgctttgttgttcccaagaagaactgagcccccatgactctctgaaagagtcctaaacagtcctttgtttggtgtcatatgaaatgaacaccctgaatctagaatccaatctccacctgaatctgaactagacatcacaagaacatcagatgacactgtaagtgcatcagacgacccat

SEQ ID NO: 357470 - DNA, 570 bp, Cannabis indica
aaacactcatctctaaagtggccctccttctggcaataataacattgctttcatgcagctccattagagcttggccctcctgtggagtttctagaattggatcttgaatggttacctctgtagccattagagttctgatttcccttgaattccctcttggggaattttcccttaacaatgagtaatccttccccattgacctcatctttctcatctcccttcttctgaatttctttcgaattcaatgcagccttaacctctgtcatagtcagagtttctttgccatacaagatggtatcaacaaagtgctcatacatcttgggaagtgaactcaacaagattatagcctggtattcatcatcaattttcaccacaagattattcagatctagaatgattctgttaaaatcatctagatgtcttctcaattcctttgactcatccattcaaagtgtgtacaacttcttcttaagatacaacttgtttgcaagagatttcttcatgtagattgatgccaacttgtttcaaagacccaaggcctgttggaatatgttttaccaagatctagat

SEQ ID NO: 357471 - DNA, 544 bp, Cannabis indica
tcatcatcttaattttcatgtgacatgatcattatgttactgagatacccccagccatttgttgagatgtctggttaatcctttatattttctgaacctttttatgcgagtgagggcacttcttttattctcgcactttcaccacactgaaaagatgttccatctttcagacgagcgacttgacggatagccaatgcttggctctagaggtggggcttttgcaattgaggtggagaagagcgatagtttcatacccacctcgatctctaaggaggaggtccatactgctagagctgctcgtcaaggttcactatccatggacgagatagataggatggttcaggaactcgctgaaccagtaacggttgagattcacgatagcgaatctacggtgtcagctcgtgaatatctcactcattcgacacatgcccctaacattgaagtcgaagaaatggaagactttgaggttccagattgcgagtcggaggaggaagaaggtgctgagggtagcgagacagattcaattgacgacgctcaactgaat

SEQ ID NO: 357472 - DNA, 798 bp, Cannabis indica
actaaaaatataatttatctttatatatttatactattaaagtaaaaaaaaactatcactaattaattaatatattaatgtaattttttatttttaggtgcaccacaaaatttttcaatatataattaggggtctatataggtacaccacataattttccaatatatatataattaagttttatatatatatatatagggtgatatatatatagggtccacaaatgagtatactcgcatcttcattatattttatataagtatgattttatttttataaatggtgatctattgtatgcttatttaaaatattatgtaattattattttttaaaagaaatttagagtaatttatatttttagaaataagatttaaataaactattttacaagaagtattaaaaacagcaagtagaactgtaacaatatcatgtctttggcgctaaatttatttagaattaatatatgtagaagctaaatagctaaagtgtgcattgtcttataaaaataatagaataataactatttatgtgctgaaaacacgatatagatatatattgtacaattattttttggggtgtatttttaatttttttatatatttatatatatattttagtggggatatgattctcatcttacaaaaagttaaacagtgagaattaatatttaattaattataataatagcgatataatatcttgtagtaatattgaatataaagtagtaatttttttttctctaatattcatataatcatgaatattttgctccacgtgggtagaacgtataaactttca

SEQ ID NO: 357473 - DNA, 996 bp, Cannabis indica
ggcaaaacagagtctcaaaatacatcactagtagaccccaacccgcttggtctagtgtggcctgaacatgtacatttcccgtccagctcctacactcatggctgctcaaacacaactttaccctttcctacacagtagagcacccgtgagctaagcccagcaagacagtataaaacataacaatactatactcatcatataatataaacagtaatgccatttaaatctgtttgtgtgtcacagacctacaggttgggctcacatgcctatttatgtttacgtgacgtaaacctacgtgttactctcacacgtctatttatgtctacgtggcatagacctacgtgttgctctcacatgtctaaatacaataaggccttaggtggttcatctcggttatggttaccgagtccaacccgattatgccttaaacgcataacccttaaatctaaatataatcatatacttagcatggtatagcatttactcaacttatatcactagggtaatacccctaggctattaaccgctcatattagggtaataaccctaatctcggttacaattactcacatatatcatattcaacataagcgccaccgcgcatactctatatgcaaactactgtcttacttgttgtcccgcaataacatagattctgaacctctgggtgctcgcgatcaagttccggtaatcctagtcacactatctgggatttcacaaatcgggttaatccctaatttcactttcacataatataaacatggtattcaaagcacagataatcaagtagagctcggaccgacctttccaacaatataaagaatgtcccaaacggagtcccgagcaaaagttatggccaaaacaaaatcggaaaaaacatattttctcactgccaaacccagtcgcgacgaccaaaaatcccgtcgcgacgattgggtttagaacacccaaaaactccatttttaaggccaaaacatgccaacttttcctagattt

SEQ ID NO: 357474 - DNA, 866 bp, Cannabis indica
tgaaaataaactttattagacagaaatatctgctaaaacaatggactgaagagcaaggggaacatcactctcagtaaaacgacgacctgaccaataacaagcaccacgtgccatacagtgcgcggctttgttagcagaccgtttaacatgaccaatagaaacactacttaaagaagataaaatagattgacaatcttgaacaaatagaccaaaaatagaaggcatagataccgaactaagaatagcttgaacaactaaaatgcaatccgtctctaaaatgacatttgacttgttattcctctttatccaactaagtgcctctttgacacttagaatttctgcaatctcgggtcggcaactgacagaagaaatagttgaaaacgcctcaactattcgaccatcacagccgcgtgctacaaacccagtaccaatctcatttgtgtcttcaaaaaccgccccatccacattaatttttaactgtccagcagccggtttggaccagtggtctcttgtgtcagtgcgattggaagccagggagaccgagtccagccgcttagactgagcacacttccattgtcgaagagtggttcgagccagccaaacaacctcagcagcactacaacttttaccattccaaagcatatcatttcgagccttccaaattgcccaaccaaccatgacaacttcttcaaccaaccccatattgcctactgccaacacttccataaaccaatcaaaaaaaattggttgctgcagaatgaccaacacctaacgcagatctgagccaacacgaatgagcaaaggagcattgaaccaaaacatggaatattgactcttccccacagttgcacaacacacaatgtaaa

SEQ ID NO: 357475 - DNA, 745 bp, Cannabis indica
aataactatctttattcatttattgatcgaaaagtgtatttgttaccgtagtaacttgcatcaaagctatttgatccaatctgatctcttagcttaacatgagataaaacaaattgtagacataagaaactgtactctaaagtggtcacccaacatgagtactttgtttcttttattgaaacctttgagcgtagttcgcccagcaggccattcacttaaaagcaaattttcatttagtacttaaagtggtcatccgacctggtactttattggtagtattttctaaaatgttctccattccaatagcgtggtactaaaatgagttgcatttttttgacatacttacctaatttgtatgctccggagtcgagaacttcaaccacttgatatggtccttcccagttaggtccaagtacacctgccgtactgtctttggtgtttaggaatacccttttcaggaccatatctcccacgaagaatttccgagccttcacttgtttgttgaaatactgagctactttttgttgatgggccatcaactttaagtttgtagttcctcgtctttcttcgatttcttcaagtgattctgctaggagtatgttattggtaccttgatcgtatgccaatcttctatgggaaggtgcctcgagttcgacgggcagcatagcttcataactgtacgccattgcgaatggtgtctgtccggttgccattttttttcacttgtacggtatgaccatagaac

SEQ ID NO: 357476 - DNA, 784 bp, Cannabis indica
ctttgattccaatgacctccacagaagaagccttagctcgcccatgaaaactcattgaaaagccttccaaaagagtgccagagctatcataagctactactcccacaccaaactttccttttgactcaaaaagtgttccgtcaacattaacctttatcttattcacatccagtttagtctggtgctcaagtctattatcccacttcatcacgtgagacaacgacccctttctattattattagtttttatggttcatatcagagtagaaagcaaaagtgaggttttataaaatattttagatgaatctaatatgaactataatccccaagatcttaacatgattacataaattaaatctaaactacatgtaagagaattttacctcttgatgcctatcagggtatcctcaattcttttcgtatatattatcgatcatccaatccaaaggcaatatgtgttgcgctttgtgccctaaataaaactctatttcaatgtaatcttctatattcatttatcaagaaacagatttattttcattacttttttattgtgttatttggttcatgtgatcatttatttatttatttgatttataaattcatccaaatccttattacattgatattcttgtttattgtgttgtcaacacagttgaaaacaatcaagattgtgtgattaaatgtattcctacgatttatcagtacacagagtttaactgataggataatctacaatgtattttacttgcaccttagataattgatatgtcttttccagggcatt

SEQ ID NO: 357477 - DNA, 774 bp, Cannabis indica
gggtgtgccaactggtttcacatcagtaaacccaaatttctctagaattttagcagtgtagctgctttgggacaacttcagggttcttctttccctgtttctttcaatttcaatgcccagaattctccttgctggaccaaggtctttcatctcaaactccttgtgcaacaccctcttaactttgtctatttcactcatgcttttgctagcaatgagcatgtcatcaacatagagaagtagaaacacaggatgcttctcattcttgacatacacacagctgtcaaaagcacttcttttgaaacccgatttgattacatagtcatcaaatcttttgtaccattgtctaggagactgttttaaaccatagagtgacagtagacagacatggtcctcttttcccttttcttcataacctggtggttgcttcatcaaaatttgttcttctagatcaccatggaggaatgctgtctttacatcaagttgctctagttctagatcttccactgcaacaagagttagtagaattcttattgaagtgtgtttcaccacaggagagaatatttcattatagtcaatgccctctctttgtgtgaaacctctagcaactagcctagctttgaatcttgccacttccacccctggtattccctctttttgctttagaatccatttgcagcttacaattttcctaccaactggaactttaaccaggatccaggttttatttcttttaagggaatcaatctcatcatccatagcagatttccatcttgg

SEQ ID NO: 357478 - DNA, 592 bp, Cannabis indica
tatttccatgttgtttatcgatgggggaacttttagtttcaagtttaagtctccggaaagtgatttggtgagtcactcatctatgttacagttaatgtgattagggcatccatctagcacgagcatttccgttcaggtcgcccagcacacttgaattcggaaagaaggtaagaactgtatgtaatatgtgatatgaatatctgagtgtatgtatatgttatgtgtatattgatgcttaaaatgttatttgcactaccaacacttatacgattatagtatagagtgcgttcgtacagtgaatgttatcttagagtaccctgataccagcataagtacagtgaggtactgggagtgcgtggcatatcactcaaaggtattcagggtatgagcaaaccctaccaacacttgtacatcgaggtacatagtgcaagttgtatagtggttataccctagtatggaacgttcgtactcatctgtcaagccttgtaaataggtgtatgggcgcctaagtacaagtcaaaaaattatatgatatgttgtatgcttttcttaatgagtctgttaactcacagttctactttcatgtgtaggt

SEQ ID NO: 357479 - DNA, 666 bp, Cannabis indica
aaataaaaaaaaataatgttaaaacacaaaattttaaagctgaaaaaaaattataggaagcccctatagagtcagctatttcataataaccctacagagtcggttatttcataataaccgacaccatagggatcctacggaggcgatttttttataataaccgactccataaggtccttacagcgtcgattgtttttaacccttatagtgtcgccttgtacaacatcggtagcgaattttactaaaattgacgctgaaaggccttaaaaaccatctctaaagcccaattttgtagtagtgtttaaatttgaaagtttaataagaatattgttgtagtgtgattgtttattattaattttactgatttgccctcaaatttcgtgaattttttcttcttctttaagttaattttttttatatgtatataagggcacaccttccatgtgtttgacaaaatgcctaacatagttattcttaatcattagcctaaagaaagagggcatcttcaattgtgctattgtaatttttatttttcttcaaactgggattttcatattgttcctccgatgttatttatgttcattttgattttatgaattagtaaatttaacaataaatttgatgcaatattgtttatatttttttatacgtgttgttttgctattg

SEQ ID NO: 357480 - DNA, 1085 bp, Cannabis indica
cactaaatggactgaggccgagcattttgtttcataacctgcaagaaagtccttgaattcgttgtcaagaacattgtctgtaggtttggaattcccatgaagatagtatccgataatggaacccagcttaatggcgacttgttcactgagttctgcgagaggaacaaaataattaagagcttctcgtcagtatctcggcctcaggcgaatggacaagtggaagctattaataaaaccttgaaggatactatcaagaagaagctagatgctgccaaaggaaggtgggtcgacgagctaccacaagtacattgggctcaaagaactacagagaagacaacaatgggacacactcccttctcgctagcattcggttcgaaagcaatgctacctgttgaagtgaacatatcgactcataggcaagagttttataatcaagaagaaaaccaagaactcctaaagttatctttggatttgcttgataaaaaacaaactgagtcgcaagtcactaatgtaatgtatcaacaccgagttacaagatacttcaacaaaagagtcaagaaaaggctattcaatgttggagacttggtgctgaggcgagtatttgcaaacacgagagatgcgtctgtaggagtgttcaacccaaattaggagggtccatatgtaatcaaaacaatagtaggaatcagagtttacaaatttgctcgactaaatggctcgctaataaagaactactggaacgtggaacatttgtgaccctattaccagtaaattaatgatttaactcacattgttgatgtaatagtttaactttagttatgaataaagagaatgatttcttttatttaagcaattaaaaagccttactctttaaaattacttaaggggcatctgtgtatgattaacaagaatttatctggaaatatatgatataatgcaaacccacaacttttattttttttaaagtttttggtcgaacctttctgacgagaaggcgatcaaaccatcataactttttgatttaaacctgtctgacgaaaaaggaaaattaaaagttataaatgagatataactcataacttgcgtac

SEQ ID NO: 357481 - DNA, 550 bp, Cannabis indica
tctagtatttttgtaagtttcccgatgaaaaatgacctaaaaattgtagggataattagatagataagacaccattttttttttgtaaaaaaattatggtgccgtttggtaatacttttgtcttctaattttttaatcataaaatgaaagtaaaatttttgtttttaaaaattttgtttttgaaaaacgaaaatgcgttcagtaactacttttgtttttcaaatttaaaaacagaaaacaaaagtgtgttctttaaagttcattttcattttcattttttgattttatttacgtcgagtctaggtccgaggttggatttgggtttaagtcagaggccgggttcagcgccaggaccgtggggggattcgggtcccggtcataatccaagtccaagatattgattaagagaaaaaaaaaaaaagctgtttaaaaaaatattgaaagtgattttttttaaaaaaaaatttgattctcaattaaaaaaattgaaaaataaaaacagttttatagaacatgtttttgaaaaatattttcactttttcaattttaa

SEQ ID NO: 357482 - DNA, 605 bp, Cannabis indica
agggcataaaatccaacagccaatgccctggaaaggacataatacttattcaaggtgtaagtatactttatcgctgatttcagtttaaacccagtgtactgaaaaattatgggaattaaacttttgaacatataatcatgattatattctactgtgttgacaacactataatcatgaatagctatatgatctggttttaataaaatttatacattaatcatataatcatgaaataaatcatgtgaactgtttactgagtttttcaataactaaatattcttagagcttaaaaagtaataatggagtaaatagtgaaatagaaaataagagatttttacatggttcaggcattaactatccttagtctatgagtccattttattaggctcattggtcggtaactgtttatacaaatcgagatataatggattagaactcctttccaccgtgttcctcttgaaaagagaaagcctagtaggaatagtctagagttatcagtaaggttatgagaatgtgttcttcttaggatggagaacgggtcttcgatcccaaagagaaggtcctcctttcttgggctttttgtagggttttatgccctaaataaa

SEQ ID NO: 357483 - DNA, 805 bp, Cannabis indica
tgtgttctgacaagttggcgcggtatagtcacaaccgggtattttgggccaaaccgggtttggggccaaaatacaattttgggatgatttattggcattttatttatatgtgattaatctaaaattaatttgagaatatttgtgatgagattgacacaattgcccttaaatgcttttatgtgtgtaatttggcccttgggggtattttggtaaattggcaaattagtgtatttgtaataaagtgaattgtttgcaaaaatgaaaagaaatttatgcttttgttctcagcccttgtaaccgaccccctccctctctcaaaactcatcttttcaagttttgatttttgttgagaaatatcttggattcaagcttgaggtgtgataatctttggagctagggtgatttgggatcttgaggtagtttctatctcttgttgccttttaattgttgctgaaattgaagtgagttaagcatgttttagtgtgtttataatcttgagatgcatgttgatgatagttgggttgttcttgttgttgtgagcatgctttgtgcttggatcttttgagtttattttgatttaggtttggaagaatttaaaggattttattagtttttttattctgttatttagctctgaaataagttgcttgaagatgttcttgatgttcttgtcatttgatggtgcatgttgatgattgtgaggtgaaatattagatgttgttgattaatgttggaattgatgttattagctcgttgttgtgttattttttttatctgtaagaagttaattttgggtatggtatga

SEQ ID NO: 357484 - DNA, 536 bp, Cannabis indica
ggtaggaaaagaaagtttgcaaactcaataggtccatttatggaattaagcaagcttctcgctccatgaaccaaaggtttgatgagatcaccaagacctacagttttcttcagaattttgatgaaccttgtgtttaccaactcaaggaaaatcaagtggtagtcttcctggtcctttattttgattacattttgattattggcaacaatatcaagaaaatgactggcaacaaggaatggcttgacactcaattcgaaatgaaggatttgggtgaagctgcatatgttcccggtattcagattatcagaaactgaaagagtagatcccttgtactctctcaaagaacttacatagataaggttttagagagattcaaagacaaacaccaaaggggaaacaatgccttttagatttggtgtccgtctatctaaggagaagtgtcccattgatcctcaagagatagaggacatgagaagggttccttatgctttagcagttggaagtctaatgtatgcaatgttatgcactagacctga

SEQ ID NO: 357485 - DNA, 614 bp, Cannabis indica
acaaaaatataatttgcactcacttgaaaaaaaatattgttatcccaattttcgcactctgacgtggcatcacacgatactgacacgtggaatcaactctatgcagctgctcacaagaaatattccaaacaggacaccacatacatttgcttagacgaattcctcttagccgagcagtgagcaatccgcgcagcatgctaacacttagtaaattaagctttcgcatcgtgagtcaccaaagaaatccctataactttgggatcagatcacagagatatggcaagctgtctgaatcccacgattggtgtattctgtatttacaatgcaatctttccacttatatcaattgtaaccagaagggaaatacttcactcataagcttaatgccctataaatagtgattcatattcactgggcaaagggtcaaaacatttgtctaagaattcatattcagagatactattataagagctctaagaaaaggaaccattctccttattcctaagtcaatacaaactacgaggattaggctattactgtaattccctagaattgagaagtggattagcaaaatcctaattagataattatgaataattgaggaattatattat

SEQ ID NO: 357486 - DNA, 546 bp, Cannabis indica
tttaatttagggggtattttaggaaacttttaaaattataggaataaatttgtacaaattataaaggggtataaattttgatataggttgtattattcaaaaattgaaatttcccttttagtttaagctgaagtatgggtaatatcattaacagaacaagagcaataaataaaaggacacatcaaatgaaaatatcattaaaattgggtacccaagtagaaattagcagagtcttgcccaaaaatcttattaatcacaacctaacattcagattccaagatcaaatatagagaacccgagggctgagagtcttgagctgtcgaagacgggagataaaagaaagactatttttattttaattatttaaataaaattttggaggacctagtattctaccacttattaacccaagattctagacatttattaaatgtaaataagagagatccaccaaggctaaaatactataggtgaagatataaaagggaaataaatgttttttttttttttttgccatttgctcttgctcgtctgtgaatttttaaa

SEQ ID NO: 357487 - DNA, 605 bp, Cannabis indica
aagggggacgaaaactgtaaaacagagatcatacgccgaaacactataagctaaggctatctaagaattatatattcagagatactattgtaagagctataagaaaagaaatcttcttccttatcttaagtcaatacaactaacgaggattaggctattaccgaattgctcggggctgaacctctataaaatttatgtgtcttcttattattattatttgctttattacgtattcttattatgacacatcgtttatcgcttatcaaaaaagaatcattatcgttggctaaaagcgaagtcaacacatagaaaaaaaatatatgatattatatgagtataataggtaaagaaattaacacctaataatgtaaaaaagaaaatttttaaaaaatattaaggctaatttttgaaaattatttttagtttatatatatatttttttaatattgggatcatttataattttgtgcggtgaaaataaaatattccataaatataaagcatgttacacaaacataactttataaatataatttttttaaaaaatttataaatttctcactttcattatatgtttttttgatatataaatatatattttaaaa

SEQ ID NO: 357488 - DNA, 626 bp, Cannabis indica
agcttcaataacatatggaccttcccagtttgggttaaaccactctagtagctagatctcacgtatttgtaaatacacatcttaacatcgaatctccaactttaaaagtcttttttgaactctgttgttaaaatatctcatgataagatgttgataagttgcattggttatttgcgactcattacgcctttcttcaagtagatccaaggacatattcaaaagttcttggtcctcttgattatagaaattactcctgtttgacgcaatgttaacttctactggtaacattgcttccaagtcgaatgccaagcaaaatggagtgtgtcccatcgctgctttctcttagttctataggcccaaagcacctgtggtagcttgtctacccaccttcctttagcaacgtctaacttctttttaattgtatcttttaaggttttattaacaacttctacttgtccattttcttgaggtctcaatactgatgagaagcttttaataattttattcctttgatagaattcagtgaatgattcaccattaaactgagttccgttgttagatactgttttgattggaattccaaacctacaaataatgttcttaataataaggtgaagaactttttt

SEQ ID NO: 357489 - DNA, 686 bp, Cannabis indica
ttattgctttttgcaggcaacgattcgcttcttgcgcattaatgatctgacgcatttaatcggtgtcagacaaatacacaagcgtttttaaccgccctgataagtatttatcccaaccgttagatttgcagaatgcgaatcgattgcgattctcaccgtacgatggcgcctgatcacagctgctttgcacccattctggcctataaaagccaacatttctccttcatttggttactttcaccacttcgccatttcttcacaagaacacccttgagaaaaaaatttagaaaccatagatttcttgttgctattcctccgtcgctgccatagatttcagaaatcatttaagagagagatcaagttagtgagaaaaacacaaagaaacttagcttgtatttgagatgaattctcttagtgattagttgagaatgagggttgtaaaaggcatttccatgtgtttgaatggattgcctctgttgtggacattggcccacataaaataaatggtagagaattaagccatatataagaacatgggctactccactcattactaattagttttgagatagaaccccatgattttcaacatggtatcagagccatatctcttgcgggcaagtgatcctatccgatctgcacttatacagatagtgaccatgtctactctgatacggtttaagatt

SEQ ID NO: 357490 - DNA, 828 bp, Cannabis indica
tatactctatgtgctaagtttaccggttggaccctctattttgttaattgataaaatagatcctgcattttctaaaatagtaaaaataggattctgagcttaattttagacaactttttttcttagtacaaccaacttgaagacaattcctaacacgaatagatatagaaaatataaacagttttgtcataacaccttttaatcaaattattattaattttattttgacaaaaaaaatcagttcagggtcctatttgtgctattttggaaaatacagggtccattttatcatttaacaaaacagaagatctaagtggtaacttttgcaaaatacaggatccaaaatagtatttacccgattaaaaaatatctaaatgtataacaatatatgttccttcttttatagatttttatttattaaaaataattaactaataaaataattatcaaaaaaatgaaaaaaaaaaatagtatcttctagaatttttaaactgctatgtgcctcatattttatattatgccaaaagaattttaccttctttaattattatttttcttaaaaaaaaaattctcttaaaaataattgtgaattttaccaataatgacattatagtcattagccacacatactagggtcagtttggcacgattatgttgtgggggaaaatagctgtaaagacggcttagtttaatttggaaattagcagttaatcatgtttaattatgaaaatgatttatagctatttaaataattatttatactgttattgttgaattctgaaatggattttatgtcatttagagattttcataagtttgcttttccgg

SEQ ID NO: 357491 - DNA, 848 bp, Cannabis indica
tccaccaaagccactctacccccccccgacgacagaaacgccttaaaccaatcggcgaaggtagattctgcagaaaaaaacagccccacacccgacctatgccaacacgattgtgcaaaatggcagccaaccaaaacatgaaaaatggtttcttcatcagaattacaaaacacacaacgagaatcaacaggaacatgtttggtacgcaattgggtacgagttgggagacaccccaagatagctttccacgcaaagtgaagaaacttggggggactttaactttccagagaaccttccacaattcagactccgagtgaataccccattctcctttcagttcttggagataacagtaggaactcttaaccgagtaaaacccattcgactctttaccccaaaaccaagaatcaacattaacattatcacttagaggaacccgcattatcaactcgatatcccttgcctcgaacaaatcatgaaagacctcaagatcccattgcttacgatcgatgtgcatcaactgcgagaccatgctaggagccaacacagggtgtctagaaatgacacaaaggttcacatcagaaatcagccaagggacattaagcacaggggtagacacactagacccgattctccttctagcaccatcacggaccagtcgttgtgattcaaacacactccgccaaataaaatttgggttaggacctatctcagccgttagaaaattaccatttggatagtagcgggccttgtaaatacggcccacaagagaatcttcatatagaagaagacgccatccttgttttcctaacaaggaaagattgtaatcccgcaaattacgaaaccca

SEQ ID NO: 357492 - DNA, 695 bp, Cannabis indica
aaaattcaatgccaatgcgctgatttggaaaaaatagacatcgacattgagttttagaggcaaaaggtgtgttaaggcattggtgtgaaccatgtcgaagcattaggagagagaaagtttactgcccaaaagtgcctattgcctacccatgcctcaacatggtccagaccatgtcgtagcgcgctcccaaaaattcagctttttaggatttcataaattggacagggctgtggcgtggggtttaccatgtcgtggcccgcatgcttaaaaattgacttgattagagtttttaaacccttaaaaattctaaggcgatttttttattggaactttaggaggacgaaaatagagagttgaagtgactttggagactacaaccattgatcttcaaaagagattctctcttctatctttaatttcatgtttctaattagttttaatcaattgttgacaatgacaatgagtagttaaatttctaattagggtgttaatggatattgttttgatattttctctatggtttttaatacaatttttagttattccccaatttcgtatgtgcatttattacatttatgtctaatgcttataactgtttgatcaccaattatttgtttataatttcaatgaaaatctaaaaagtgagtattgattatgttatagtaaaataaacatagatttcgatattggatgaa

SEQ ID NO: 357493 - DNA, 873 bp, Cannabis indica
ggccgcggcccctgggttccaaacctagaaaaatccccatttcagcttcgaaaattcaagctcaaacacaccattcatgctcaaatcttaatcaaactctcaaaccataaattaaaattatcaatatacatacaaagttgaaacataagaacatggctcaaaatctacaatataaatcctcaaagtttcagatttaaacaacatacatccaaggctttaaactaaagcaagattcaccaagaactcaacttcaagaacttagtgcctctccaaaattctcagctcacatataattaaaaatcacagctgcataataaaaacacaatagaatcaccaaagttctcttaaaatataatacaagtctagaacattaagattaaactaatttccaatacacacacacatgcatcacaaggatcaccaaaacccattttcaagctttactcaacttcaatttcagcaatagaaattagatttaaaacaataaaaagtacctcaaattccatcaaagaacaatcctcaacacctccaagttccattacaatccaacacatccctgctaactcttcccgaatggctgtgacagacacattacaatcctctatcgtatcactgagggagtcttgtaatgcagcttgcccattttgtagcacagtgatagtagcctgcatgtctgttgttgcttgttctaatgtcttgatgcgatcctccatctgaggcgcacctgatgttccggtagcagcatctctcctctggatcgcagctactctgaccaacaagttagcatagtcttgagccaacgtggcaacttgttgttgtgtcattgttggccccgagtttttgattgctaaaggttagatccctgaccctctc

SEQ ID NO: 357494 - DNA, 556 bp, Cannabis indica
ctcacaccctcacataaccaagacacaatttcttctttttatgagaaagttacaaaattttggttaaagaaaaatagagcctattgtgaaatgatatgggtaaaattggtagaatgattgaaaaaataagtaaacataatagattttgaaagagagtaaaaattaaaagtatcaatttataacacttttatatcggattattattaaattttattttgacaaaaaatcagttcaggatcctatttgtactattttaaaaaatacaggatctattttgttatttaacaaaataaagtgtccaaataacaacttttgcaaaatacaaaatctaaaatgttatttattctattaaaaatattctaaatcgattttttttcaactttttttttgtagtaattatgaaaaaatcttttaaataattaactccccgatgttttatttggtagaaaataatcaacacgtgagaatgctaaatctcactctttttttgttcggaagggttttaaatttaagtatttatattgtaaattattaattatattttattttttaaaat

SEQ ID NO: 357495 - DNA, 940 bp, Cannabis indica
aattttttttaaaatattttgtgacactttaaatttgatattgtttttttatgacattaaattaaatgggaaaaattattctctcctcaatcaacaatcttgaatttcgagaagcgttcatgctatcccaaatttggtccacttgacgtggcatgtccatgtaagccaagacagagtacatgtgaaacacaaccttgctaacagcaagaaaaggtctccatacaaggtatggcaaaaccgtcaagcagcaagcgaagtctataggccggccaggatctataccagcatgtctggatagccaagggaagtctataggtcggccaggaacagcttatatggtcagcctggttctaggcataagttgggcggccaaaaggtgactttcagaccaagggtgcttctgtttgaccaagggaacctgacctctacaaggaaaaggtgtacaaagctggcatccacttgccaaaggctggcgtcctcttggtagggctggtaggaacatgacctgtaagattctagcaggcacatgatctgctagatcctagcaggagcatggtcagccagacctcaacctgtacacatagcatggtcggtcagacctcatactataggtgtatggctatctagcttctccctggcaagacattgatgcgcgaccttcacctgcggacagcaagccaagctgcgagttgggccttgatagcccactaagaggttatgaaaatatctacttttaaggggaaattcggtcatttgtatttattaatttaatatgtaaatatctatgatttaatctactaattagggtttatgctctcctatataaagggccttaactcaaccttagaaacctaagtcactttaagtctcattgaagcctctaagtccttagctctcaactctaagcttgaaaccctaatcttctcctctctctctctct

SEQ ID NO: 357496 - DNA, 719 bp, Cannabis indica
tggaaaatggtaaaacagatctgctttgcttgcttaaaagtacactgtatgggttgaaccaatcacctagacagtggaatcaaaggttcaatctgtttattcaagttattggattttaaagatcaaaatttgaatcttgtctctactgcaaggaaatagggacaactaaggttgtgaaccagttactctaggttgatgacatgacgatcattagcaaagacaagactgaaattcaagtcattaaaaacaaacttaattctgaatttcaaatgaaggacttgggagctttcaagaaaattttggggatagaagtcttaagaagtaggcaagaagggaaaatgatactgactcagagaagctacattgagaaagtaatcaagaagttcaacttggattcatccaacactactgttgtgccacttgctgggcattttaaattgtcaaatgaatattgtccaaagacttaaacagagagagaaaacaggaaggggtaccttatgctatggttgttgaatgcctcatttataacatggttagtactgtgcctgatattagctcattctctaagtgtattaagaaggtttacggcaaaacctgggttagaacagtggaatgtagttcaatggctgattagatacttgaaaggtacaatcaagtatggcttgatatatcaaaaagacacaccaaatgcgagattagaaggctatgttgatgttgat

SEQ ID NO: 357497 - DNA, 780 bp, Cannabis indica
aaccaataattaggggaatttttaaaaaataggatacttttaccaaaactcctaaaataccctcataatttctaaccctttctctctccttctcaaacaaactctctctacccacttcgccctgaaccgaaccacgcgacccccacctcccaccacgagacgacccctacctccgaccgagacgaccgccacctccgacggagacccacaaaaccactccgatcgagatcgcacggtaccgactctacattggtcggatccaagaacaacatacacgagacaagaccatcagacccccaatcccatcggacccaagaaaaacatacacgagacaagaccatcagaccccatcggtccgagcatcggaccaatcggtccttggcgatttttggagggaccatcggaccccatcggtccgatgctattaaaatcgattttgggaccatcggacccatcggaacttcttcttcctcaagcaaaaattgacccattgtggatccggccaatgtatagtcggtaccgtgagggtctcgatcggagtggttctgtgggtctccgtcggaggcgtctcggtcggaggtggcggtcgtctcggtcggaggtgggggtcgtctcgtggtgggaggtgggggtcgcgcggttcggttcaggcgaagtgggtagcgagagtttgtttgagaaggagagagaaagggttagaaattatgagggtattttaggggttttggtaaaagtatcctagttttaaaagggaaatttcatattttggccctaataaaa

SEQ ID NO: 357498 - DNA, 740 bp, Cannabis indica
tatctgttgctgggaagtttcttaaatttagtgtagaggaatttgccttagtcacaagtctagattgccacattgagtctgatatttttcagttcaaacaggataagaatatgctagttgaacattgtttaaagggtaataaaaaaattaccaagaattcgattcaagttgcctttactactaacaaccttaggaataatgatgatcttgcagtcaagttgactattttgtattttgttcagtgttacttgctcggaagtcctcttggaaaggttgtctctattgaggaacttgatattgtggatagtggtcgttataatgagtatgggcaggggaatgagtgttttgagatgactattgaatctcttaagggtaagattgatgccagtattagaaatgttaggaagaaggataaggatggcaggttttataggttgttaggttctccttatgaaatgcaagtttggtttgttgagtgttgtccataggtcgttgggaatatttttttgtatttaaacattggcattcttaggcttcttaactggcctaaaatgccagagtttaaattttttcagctaaaaatagacaatgtgaacaacatcatctccaattggtctttcaagtaggtatatgtgtgttgtttttcttttgttttttagttgtttcagtgttattttttcatttttttatgaattgcatgtttattcacttttatttctttttttggctttttttttttt

SEQ ID NO: 357499 - DNA, 651 bp, Cannabis indica
acaactctattttagagttgttttggaacttattgcttgttctaattggtcgtatgatctttttatttgtgtttcataaacagtccaataaaatattttgtaatagccatggagttggtggataattttccaatattcaaaggagtatttgaactctataaaaagttgttactttctttttagagtgttctcgtaatgttgtagagggaatagtttgttgttaggcaaagtcctttgagacttatctgggccttgagttgtctggcaaaatcctttgagaattgaaccctttacgcatatattttgcttggaaaaagtcaaccacaacttcacaaaaattttaccccataatatttcagtaagtagtatttaaaaaataactaacaaacttttctgacaatgtgcaaatcttgaatcaaatcaagtacactatattgacaaaatgtcattataataagattatgtatttcaatatatatttgagttaattttaaagttagcataaagcatgaagaaaataatgtgagagtgatagttcaactacattatgcttagaagagattttatctagacatatgatgtgagaaagaaaaatactcaataatctttaaataaataaataagttcaaaggactttgcctaacaacaaac

SEQ ID NO: 357500 - DNA, 990 bp, Cannabis indica
aacccaaggggataataattctctaaaacacgtgagtttatagcatagaaagaaataccttgtttctttgctagaaacttagggcattagggtttccagtggcccttttcattacaatagaagcattttccatttggcttatatccgggattagcagcctttttctttttaactgttttcacaacttgaacaggcttcttgctattcttccacttcttcttgttgttgggttcggaagcaaaggtaatttttgcctcagccttagccaccccattagcattcccagaattaggagctttagatactcctttctgtggtcctccaatcaaattttcaaatgtctgaaggttgttaaccaactcgtgaatgtcaagttccaactttttcatgacataatttgaagaaaagggtagaaaggctggagtcaaactgttcaagatcagactcacttgagttgtctgatccataaaagttccatgattctcagcttcttagaagtaactcgtcatttggagaaggtgatcacgcacgctctgatgaggtctcatccgtgcattatttttctttgtcgcctcaaagcgagcttgaattgatgccatttcgaatagttcaatcaacttgttcacgatttgtgcagccgtgagagtgttagcaaaccttgttttcaaggtgtcaaccatactagacagcataaagtatcgagctttattgttggcattcttccaacgctcaaacttatcttttacttccttggttgcactctcaccttgctgctcaggatccgcttcagttaacacaaagagggcattttcaccaatgagagcaatgttaatgttctttctccatttgttaaagttagatccattcagcttattatcactcaacagtgacaccatggggttgatcattgtcatgttggatactacaaataacaataaatagaaatcaaataaggtttaacacaaaatctcattcagaaattattagcac

SEQ ID NO: 357501 - DNA, 923 bp, Cannabis indica
taatatcatacgcaatttgcttcatttaatatattaataacaattaggcaatataggcgcttcggacaactaatttaattttttttaagtattataaataatagttatttaaaaatataattcattgtaaagaagaattacctcatatattattttttaacttattttttttttaaatttacggtttgagtttttaaagtggtttctccggtaatttttatgtgggttgctatacaatttttttgttgcgatttaaattgcagcgcaagttacaataggagtttctatgtaaaattctataaaaatgcaaaataaaactattttgaagtgtaaaaataaaaaaatctcaatcataaatatattattttattttatattatcattaataatttatttatcaacaacaaaaaacacaattttattaattattatttagaattatttattatgaaattttaaatttattatatgtagtattttaaattgctttgttaaaaaaatatttttataaaaataaataaataggcggtgtagaaaaaaattacagtgtttctcgtaatgcattattttcatatctccatcattcaaaattattgttattattgtatctcacttgttatcttattgtatctcacttattttcatcaccgtatctcatctgctgtcatcactgtatcgcatcccttgtcattaccatagttcacttgtagtctcactattgtatttcccaaatctatatctcaatcttaacttccatctcgaattttaaatatttttaaaacattagagaaaattcattagtttgttttgttattattaattaatatgttttaaaaagtgattattattttttaaatatcttaattaaaaatatatatatatatatataaaaatgtgatattttagttatgaaaaatgctaaa

SEQ ID NO: 357502 - DNA, 870 bp, Cannabis indica
aagtctaagggcggtgaggggtcctctacaaaggaaaagaggcctactcgggaggtcattgatctttccgaggagctgactgctgcaaacccctctacccctaaagctgccaagtccaatgagtcttgaccaccaatggttgggtctaaactggttaggagtgatcctgaacgggtgcgggcacctactccacctttgtcggtgcttccagaggccaaaaatggcaaggagatgctggcccattacatgaatcggctggttcctgaggtcagtgagcaactggctgatgctgacaatgactcttctttggaattgctggtgggtggagtcttgaaggagttcaccagggtaagtctttttttatacttccctccattgttagctcaatacgctaaagtttttcctttgtgaaggccggtcagaagtttgcatacacttactcctgggctaagtcttcttcttccaagaacatggatctgtctgacaccttgaaggcggaggccaacttggccaggaaggatgctaaagaagccagggcggaagttgaagcgattcggttggaattgggtgaagccaacaagaagttatttgccgctcagaagaaaatcactgtgcttactaaggatcttgaggctgctgaccattttgaggagaccatcgagaccttatctgctgaggttaacagtcttcaagacgagaggacttctctttgagcagttcttcatcaaatgaaggaggaaaaggaagtcaaggagggggagcttttggccgaggtggacaggttgaaggagaaggtcaatgccttggagacagccggtctcaagctcttctttgatttttggatggataatcctcgggccaattttgact

SEQ ID NO: 357503 - DNA, 631 bp, Cannabis indica
acgggttgacacgacacgacccacgtaacctgtttataagtatgttttgtttaaacatgtcaatcaataaaaggtttattaagtattcaacacgtttttaacccatttatgacacgttaaagtactaaaataacttttaaataggtcattgacaggtcaattttatgttagccgtgtcaacccaaacacgatccgtttattaaacgagttagacgagtcaacccgaacacgacccgaatccatttaaggcaaacctaaacccgctaactctcgtgcgggtttcgagtcgtgtcatcgtgtctgacccgttttgccagccctagttgataggggtggtgattcaacccctctttagcctacatcaacttagatttctagactttcactactactagaaagtctacatatgagatggtgattactctagaggtgaagcagttattctgtaggactataaatgtaataccctaagattaagaaactaaattaacaaccctatctagtttgattatgtattaatgtagaattacattattatataatttaatatatggaattatgctaataatgtaacaccctaactagcataggcgtgttagcatgatttttgacgtactgtgcagctcgttgc

SEQ ID NO: 357504 - DNA, 552 bp, Cannabis indica
cacgatcacacatctattcaggtaactcctagaacatccgattcatataatccatatcaaatatactacgtagccttggcccatcattcaccctgatggtgattcttacatttcagacattcaagatatgacttgaaagaggatctgtgaccttgacggccacttcaatttccatactcatgcaactcaagaacataaaccaacataaacatgctttttcattcataaatcacagcaacaattcaaagttcaagtggtggaaacactacctcaagctttacccaaaaccaagcaccaaactcaccaaagttcctagcttgatccaaagtaaatatgaagaatttatgcaattggtgagatgagaattggagagggtgaggggttcggctagggcttgaaacaaagcagaaaatgaaattcaataatgccaaaaatcccttttgttgtgaatatatcaaataagcaaatgaccataatgccccctaggccataacatagcataaatacaattcaagggaaacatgtcatttttatcacaaataaatccaatat

SEQ ID NO: 357505 - DNA, 589 bp, Cannabis indica
agcatgactaagtctatatatatatatttagtatataatagcatatatagtagtatagatagatgaagaacaaaaaaataaaagtgaaataagaacttgcattgctcaaataaatattacaagtgaatcaaagatacaaaataacctcactttgtatatagaatcatccctaaccttccaaggaagattagaccattatgctaatcattctcataaagaaatatgagaagaaaagtgaagagaaattttggtatagtttctttactctaaaaattacattaaaagattgccaaagagtggtgttccgaaggggtctcatctcttccctatttatagccaaagtgagtgaattaaaataattaataaattaactattttaatatgttctagaaatttcaggcataaatgaggtaggtgagatatgagaacggtagaatggtaaaatatacaatgtgcaatttattggctgagagaaatagaaaaatgagccaaataaatgcaaaggagtataaaattataatgtattttgaaattgcatttgaaaacaatttcaaaaatggcggattgaaggaggagacgacacttggcg

SEQ ID NO: 357506 - DNA, 563 bp, Cannabis indica
aaagggttcactaaggatattcattctatggtaggcttgaaaggctcaaactgtctaaagaaactgcctaaatcatgttcctattaaatgctgtcaaggattttgcctcaagagaataaggcatgcaagttctaagctattcaatcagtcttaccacaaaccacagcaaaacaattataacatatttcacagattgtcaaattgtatccatacacaggttttacaagcatccaaactaatccaaagagttaaaagaattaagcacacagtttcaaaatttcaggacatttcataatcaatagcagcatacaactatcttcaacttatttccaaatgataaaaacaaactaaactaaactaaaacagaaaaaaaaaaaattaagtccccccaaactgaaattcacattgtccccaatgtgctattaaaactaaagggaaagagacttacctgaggtccatgtcatctcaacaagcggttgtcgcccataataagcgtcatgcaagacaacttgaaagtgtttttgaagatgccctcaagcttggcatgtaatgagtttgaacca

SEQ ID NO: 357507 - DNA, 580 bp, Cannabis indica
caaaccgaaaccgcttaacaaaattgtggcttgcagcaggaaccatgaccataagaatcagagcatggtctgaagttgaaatctcaagattatggagcttagcagaagtgaacatgttcaaccaagcaagattagctagccccctatccaaccgcacttctatccaatgattagtaccccgcccacgctcccaagtaaacggataaccacataattccatgtcttgaagtccattgtcaaccaaagactgttgaaaaccttggcttaaaaaagtcaagatacctattaccgccccttttgtcatcatgagataaaatattgttaagatcacccatcacacaccatggtagattagaccgattagcaagagtacgtaacagattccaagtagaagcacgcctactcctattcggttccccatacacaccagtgaaccgccattcttgcacaccttcagaagcaactctcacatctatataagcatctgaaaatccaagcaaagacacttcatcctcaagtttccataaaatgcaatacctccactcctaccattgacatctacgactatcatgccatcaaa

SEQ ID NO: 357508 - DNA, 820 bp, Cannabis indica
ccatgaatttctcataaaccattctatttttaacaataaactattttatttttaatataaataagatgtcacccatgaatttctcataaaccaagaattcggttatatagacacactttatatagaatagatatttaggtttgaattattgattttattccttttgatataaatatccaataagataattttaaatataattttaaagtttaaaaagaaatttcacactttaaaatatcaaatatttaaaatatatgatcttatcatttgatattaaaagttaaaatcaaattcaaccatatttaaaatatctcatttaattcttaagtcaaaaagcattctaaaaccaaaatttatcttttattaattaaaaattcaataaaaataaatttattttgattttagtaattttgccttcaaaaatggaaagtacttaaaaaattaatgaatttaggcttttgaattactcaatttgcactttccaatcaaaagatatggcaaaaataaaattagaaactaagaaaaaggggaaaccaaagatttaaatgcaagatagaataactcgttaacaaagatttaatagaaaatattcatgacttgctggctatataatcttaggcgagataaggataaaaggctattaaaacttatatcgacgagacacgcacctgtctcggaatacatagtcaaagaagatattcatttattcaaagtagaataaatacaatcacacatggtaacctcgggttatgaatagcgagacattcacctcgcgattctaattaaagaaacttgatgaggcgaactatctgctaacact

SEQ ID NO: 357509 - DNA, 695 bp, Cannabis indica
ttgattttgtacacccatttgtttccaattacatggcatccagggggaagagatactattttccatgtattgtttttctttagagcaaaaaactcattatccatagcttttagccattgagagtattgcttggcttggctataggaagttggttcaagttcgatgtatgcttgaagtatggcatttcgaaaatttttgtgaagtctattgtaagacaggtatttgtcgagggggtgtgcaatggaagtttgacacacaaagtccttgagatggcatggtttagttatgtgtctgcctgttttggttgtagtggcaacagggatttgaggggggttatgttgtgttgtaggctcaacagactttggtcctggaattggcgatattgaatgttgctggtgtgatatgccaggctcgatgtctgtagtaatggtgccattttgtgccttagaaggcgtggacactgctggttttatgttgggtgctggttgcagcaggagcaacagggcacttcttggatttagacataactggtgccatttggatgctggtgttgcatcaagagcaccaggacactgcagagatttggatactgctggtgttgcaagatgttgagaaaaaaatgagtccagatccgtagtagcagatcccttgagagggaaaacattctcataaaaaatcacatctctagaatggaa

SEQ ID NO: 357510 - DNA, 535 bp, Cannabis indica
tctctctctctctctctctctctctctcgctctcttttcttgcagctctctttgagatggtgccatggctaaaacaagatccaagatgtaggggaagcttcaatcgactatgaaatcgaatgcaaaaaagaagaaaaaaggtccttcatcctccattgatgtgaagaaaaccaagtcgatggatgaggtgctgggagtagaaccaatcgacttttcagatgaggaagaggaacaaagcctggaagatcagcgagccaatccatctacgcaggtttgtcctcagggggctctatcgcctagaacttccctaaaaacaatactgcaaaacgaagaggttgtgcatgattttaatttctttatggaggcaaacagacgatgttctgaagaggtggcaagaggagttcaaataacacctccagttctgcgatctgggaatgttgtgagaaacctctccacatctttcgacaacaccaaagcaagcagtcaggttgtaaagcccgcttagttaatttggaaattagcagttatttatgtt

SEQ ID NO: 357511 - DNA, 631 bp, Cannabis indica
caacctcaaattcgaatagaaaaactcatactatttagttcttctagttataaaaaatgaatttaatatcatttgaaaataattaattatttaaaattattatacaagagaattctaatttgtgtaaaaaaaagtctaatttttgtaaagaaaaaataaagttttattgtgaatattataattaaatggcttaattattaaaataatcatagtagggatttatatataaaaatatttgtaattattaattgctaaaagaggtcttgttaaatattcaattaattgttttaagaaaataatttattataattaattgattctaaagaaggaagttttatctattggtaacctgatattataagtaaaagaaaaatgtaatcatgatgattataataaaaatgtaagcattaagtaatcatccaatatatatatatatatatatatttatatatatatattataataaatctataaaagctacaattaaagaagggatgatttcacaaatatacaaaaataacaaaaaaattataaaagtacagtttcacgaaattttaaacatttttatggtttttttttattttatttacatcaaataatgtctttttatgttgttatcttgttaatttgt

SEQ ID NO: 357512 - DNA, 438 bp, Cannabis indica
tatccacgtaaatttatccctgagctatagggattgagctgatgactcatgatgcgaaagctgaatttgctaagtgttgatcgctttgcatggatcactgaatatcttgctctggacatgccagcgaggcatcctgctcgacctatcttcccgagtagatgttctaagtggactccacgtgtcacaattctcgtaatgccacgtcagagtgcaaaatttgggataacaagtttgaaaaatgatattttagtattttatatcattctacttattagaaatttataaattatagtttaaatatttaaataacttagatatttttgtaaaaatttgaataaagcttaatttgagatattttgacatataattaggataattattatttatttattattttattcttaaaatataattgcctaaccatatctatttttcaaa

SEQ ID NO: 357513 - DNA, 813 bp, Cannabis indica
aggggtggagaaatatttggtagatatgcagttaaaagatcattaagttgttttttaaattatccaaacttacctcccagaaattcgatttgcatattgataatagtataaggtctatgattagttactagccgttgcctataccctagtgataggaaaattttagaatgattgaatggttgtgtacttagtgtaaaccattactagattcatggatgtcctaattgtaatcttaagaacagctaaaactgttaactaaggtttgcatgtttgatagctattctaagggattagtggtcgaccatcccatggtcattaagataagaaagtgtttgatttaacaaatactacttttctaagaaaattactaattctgaaaacaaagtagcaaataaaggagatattttttcatgattccaaaagtgttctatcatcttattctgtataagatggtctcactacctctgttgtcttgacacaaccgaagaggataattccacttatattcctagacaaaaagtcaggtaccttgtcgtagtgggagagtttcaaggaactcaccctgttatgacttgaaagacacttgtgatgaaaatccattgttagtttaaacaagtaatggattgtcagaataagaaactaagaagcaaagccaacagaactatggttaaaaccattcatatggaacaacaaaaagttttctattacaagtacaagaaaggaaatttcgttagtaagtctattcattggacttaacaaaacttcatgttcctagtattaaaggtttgagtttatctaaacctatggcttgtg

SEQ ID NO: 357514 - DNA, 517 bp, Cannabis indica
ccaataccaagtgtctgcatcaaccgaacttaagggaattccaagaataatagatgcatcttcaggagaaaataaatcccttaccacatcgacatcccagcttctattgttaatttggaagagactattaactgtgaagtgtttcaaggcccggcacaacaggaattggagaggctcgatcaacaataggtagccatggatctgatcgtaatttgcacagacaatcccccaccaatccttttcctcagccccgtctttaacaacatcccgggcagcaaagatactactccaaacaaagcttggatttgacccaagctccgcagaaagaaagtccccatgaggatagtatctcgctttgaagactttccccactatggattcatgacgaaacagtaatctccaaccctgcttgccaagcattgcaagattaaaatcccgcaagcatcgaaagcccataccaccttcgaacttatgtttattcaatctatcccaattcatccaaataataccacttcca

SEQ ID NO: 357515 - DNA, 1125 bp, Cannabis indica
ttgaataaaatagattacattgaaatggagttttatttagggcataaaacctaacaaaaggttgggggaatatggaggacagagatgaatgcttcaaaatcctctgcagctacaacatgaagctcaaacccagacaagatccaagtccttttggacatgaagtcacccacaaccatcaaaaaagtacaaagccaaacgggatgcattactgcactaaacaaatttgtgtccaagtctacaaataaatgtgtacccttcttcaacattctcaaaggcaaaaaattcaagtggacaaaggaatgtgaaaccacattccaggagcaaagaaataattggctctaccacttgtgttgcccaaatctctagacaaagaagagctaggtgtgtacctagcagtcacaaaacatgctgtgagtgttgtcctcataagagaagaaggtggagtacaacaccctgtatactacatcagcaagagacttatcgatgctgaaagttagtacccactcatggaaaagctgacccataacttgctcttggcttccagaaagttaacgccatacttctaggtacaccctataaaggtgtacactaatcaacagttgcagcaggttctacagaaacctaaagtatcaggctgaccactcaagtgaaccactgagactcggccaatataaggccacctctcaaccaagcgtggccaacaaaggccaaactctcaccaacttcatggctaatcatagaagcatatctccaaaaatctctcaaagttcgagagaaaagtagatgccaaagaagaagctgttgggctttgtgccctaaatcaaactctatttcaatgtaatcttttccattcaattatcaataaagaaactgaattatcttcattacttatttagtatgtcctttggttcatgtgatcatttatatgtttatttgatttataaattcatccaaatccttatcacattgatattcttgtttattgtgtcgtcagcacagtgaaaagtaatcaagattatgtgattaaatgtattcctatatgttgggttttatgccctaaataaaactcatttcaatataatcagatttccttattaatatagatcagaaataacatttaatgtt

SEQ ID NO: 357516 - DNA, 1378 bp, Cannabis indica
ttaaaattttgcttaattaattacaaacattaaaataatatacttatataaatctgggatcctgtttacaaagcatgtacaaaagtttcactgtgcatatacaaaagtttatcgcctagtgactatacaaaataagccctgatgtcccaaataccgtacgctccaggcctaaccgccccgacatgtacaatctccatctgcccgctctcacggctgctcagccttaaccttgcccttacctacacatgaaaatagtaattcagtaagaaaagcataaataataacataacaataacccagattatgatcagacgcccatacccccaatcataaccctatccccatgtcctttacggttctgagtctagaacgttcgtacgacaatactattgaccataatatcagcctatactcggtaagctagtcatactctagccgtaccgatgtgatactgtcaagtagtacaatactatcgaccataatattagcctatacttggtacgctagtcatactctaggcgtactgatgtgatactgtcgaatagtacataagccaacatacatttttagtgtaatctaacaggcttaactaacatacacgctaaacatgtaaatacatatgcatattattatactaatcttaccttgttttcgaattcaggtgtgtcggccaacctgagtagaacagctacatcacaattatttgtaaaactgatgagtgatacgctaaatcacttatcggggacttaaacttgaaactaaaagtttgtctattgataaataacatggtaataccctaaatatcgcaaaaacgagaaaaactacggttaccaaaactgctctaaccggtagaccggttccccaaccgaaattccgattctgaggggtttcctggggaccaaccggagctagttcctcaggtcccagtgaaccggtcaaccagttcagtgcaagaaaacttcaaaaattcctaactcactcaaatcaaccccaaactcaaccaaacctttcagacctgttcaatataccccaatgaacatattctaagcaacagaacaacataacatgctcaaaatcaaaatccaccattaaagacaaaactttgtctaacaaccaaaacaagctaccaataaactttaaatcagcgcaaaaaaaaaattctaactacagaacacctcaataaaaacaaaacacaacaacagcaaccataattccaaaatcatgaataaaccttacttgaaccctaagaattaaccaagagaatgtgctaggaatttaccttgagcttgaaatcataaaaaacttgctggaaatccctagtttatgcagaataatcctcaaaccctagctgatctagggaacgagagagagagagaga

SEQ ID NO: 357517 - DNA, 669 bp, Cannabis indica
tatttaatatttttcaatattatttttattatataaataatttttaatatatataaatgtaattggattggatcgatttttaattggattttgagattaacatctaataacggatccaatccaattagaatctaacttttagcatccaatctaattcaattataattggatacccaactttttgtaattgaattggatcggatcggttcggttcgattggattggattggatgatacccactcctaatagagatgtttcagttggtataggtgtagagaaagagatgtgtaggtcataatggtctaaggtcatgaatggagtgagagtgagcttctcatggctggcatatgcacgtggtttctctcaaatcttttttctcaatttttcccataagtctcctcttaactacattaaaggccttatgacttttttcctccaaaaattatgctataaaagtcatttaattgatataaaattatgtgacgataaattatcacattctaattaagtccactaaacacataaatgtataattattttagaataatggtttacccgtaagtcattgcttttgaggttccgtaacatggaatttcacaaataatttctagggttaattttaaaaattcacaaaaacaacaaaaaaaataacaaaaatacagtttcac

SEQ ID NO: 357518 - DNA, 910 bp, Cannabis indica
cctctcaaggatctcaaaaggtttgatgaacctctggctaagttttcctttcttaccaaagcatttaatgcctttcataggcaatacttagagaaataccatatctccgacataaaaatcaatatctcaacactttggatttgcatagctcttctgtctactctgagcagcgagcatccgtgctgtgattttatcaactgcctcacttgttcactaaacagcttcgggacttaggaactttctctcacctacttcatcccagtgaatagatgatctacactttcttccatataataattcataaggagccatcccggttattgcctgatagttgttgttatacgagaactcaatcaggggaaggtactttacacatgatcctttaaagtctaacacacatgcccgtatcatgtcttcataaatctgaatagtccttttggactgcccatccgtctgaggatggaatgttgtgctaaattttaattgagtgcccatagctcgatgtaggctctcccagaatctcgatgttaactttggatccctatcagaaacaatggactttgggacaccatgaagacgaactattactaacatacagttctccatactgataaaaggagaaatttgtccgaacaggtaaaaagtgcactgactttataaacctgccaaccatgacccacatagagtcatactgtcccgtagtcctaggcaatccaaccacgaagtccattacaatgtcctcccatttccattctgaaagattcagtggctgcagcaaacctgcaggcctttggtgttcagccttcacttgctaacaagttaaacactttgcaacatattcagctatatcatttcatttttcaacatggccttaagatcttggtacatcttcgtgttgggttttgtgccc

SEQ ID NO: 357519 - DNA, 874 bp, Cannabis indica
cttctccaagcaggcatccgaatagggactccattttggaacgagttacaacaagaaggagcttcaaaccttcaagacttccagaagagagtccagaaatatatcaacctggaagaagcccaaatagtggcctatgggggatactatcccaccggggtagcgggatgtgtgcccgaagcccaactcacgggtactgtgccagcaacagctccaccgattagcggcatacagttttccgctactcctgggtatagtcaaggccaggcttaccccccgcatcttcccactataggaatcccttggggataaatggacaagccccctcgcactccgctccgaccccaagtttagccggttcttctcagggctcttggaataaaaggtcctccaaaggcagcaaccgaacggaggataagcggcagaaaagggggtatactccccaatatacccaatacacggagttaacggactcccaagaacgtgtatattttgcctagtggcaaaatacacactatcggaggccgcctcccctgtacaaagacagctcccggagggatcccaataagagatgcgagtaccacaatgacattgggcacagcaccaatgaatgcaaaaatctcaaagacgagatcgaaaacttaatctgattgggacatctctacgagtggatcaagaaccatttgccccatctcaacccaggtcaggcagctgaagctttgccacaaggagcgccagggggtgcagcaggagtattggctccagttgctccccccggagatgcccagcatattcccggcctgccaccaagcccaacgggagagtggctatgatctcgagaggacctcacgatcggaggaactacctgcaaggagct

SEQ ID NO: 357520 - DNA, 618 bp, Cannabis indica
gatcctaaaataaatccatgtatatcgtaaactaaattaaactaattacatatgcaaaattaacaacaatcataaaacttgttactcatgtattataaccaaaatagtaaccttgtacttaatctataatcaaagaggttcatctacttttattattattaatattatttatttttaaatttagcactaattcagtaacataaacaaacaagagaaaaagcaaagcctaatttaataccctattcaatgatcaatctaatatgtcattatattcaggtggtggtctaagttttttagatttactagacttgcatgtagtcatcctttccatcaccataggcaattttgcaagttcttttgtccaagtcatcttcgtaaggatcataaaagtattcatctttttcttcctcttccatgactttcaattccaatcctataatatatttcaatgaaaattattacaagtataaatcaacctctgcctctgactagcctctaacaaaatttagaaacacatatataacaccgagttagagtagaatacttacattataatacacaactttttcttctttttcttcttctttatcactctctttttcttcagatttctaagag

SEQ ID NO: 357521 - DNA, 1080 bp, Cannabis indica
cggaacacaatacacacacacacactatcgcgaccggagccctaggccatggcagatatgtaatatccataacttgggttgtcaaatgtcacattttgacccttgtacgaagataacactaataaatgatccttgaatttatatatctcaaaatacttatttaaaaagaatggattaactcctatatcgataagaaaatatcagtaacaaaatcaggaccactcatcaatataaaagaacaataatatccgcacagttatgtagccaccagataaatagacttactaagttaataaaatatcaaaataatatctagtatccatcatttctcatttctaactagtacatagctaattaatttattcagaccttccattccagcataaatacaaaatcaatttcataggaagtttaatatgtagagtaagactaaactaataacaactttcttcctcgatgataccatcctcatcaacttgcatcaaactgagttttcggaaggggagaaaatagggggtgagcttataaagtccagtaggaaaacaactaatatcaaaggaaccttggtttaataaaaattcctgcatggttagcttttaaaaaaataaaatatctcatcaccattatcaaaatgtataaacaaaatagagaaaccacaaataatcacaaaatcaagcatcaaaggcatatcacactgtccactatatccctagctctcaataccaatcatagaaaatgacattcaaaattgggtagttgcacctgataacaaccataataccagggctcaaatgcaattcactccatgtacagattgtaggtctttcacctacaggtgagtgcacactcgatctacctatgatgatatagagtctgggtcttgaaacactaatatgcacaaatcatgatcaacacgacgctcatcagtataaccaaagaaggcaaataataagaataacaatgaacatattcctttttattttctaaaagacccgtcagcataacggctgtattttgaataaatccaaaaatcataatttgcataaatatttgtacaaaaatatatttggcactccgtgc

SEQ ID NO: 357522 - DNA, 1095 bp, Cannabis indica
ttttgatgacttaggtctagtttttagaaagagttcttagaatagtccaagtggatcttggtcacagaatacaaaactcaaattccatacataaacatacagtttaaatccattgacagaaaatggatattaataacttgtgaaagtcatactgtatagtccaatgtattcaaggaaactgaaatttgaatttctttttggaatctaatatttaaagtcaaagacttaaatttataccaaatatacatgagtaattattctttcttggatcaccactactaatctaactctaagtttaatttgccaaaagtaaacatagacaagtaggagatttttaagatcaaggatttatatcatttcgagatagaatatcaggaatataatcatatgcgccattcaatttcataaaagaaaatagaatggcatcataagcaaataatttataaaccattcatccaatgatatattatttaagaaaattcgaagtgaataagagaagaggaaaataaagaacaatttcgattaaaataagaatccaacgatatcccgtttaggcgagagttaaagttattcttattttataaatctcttcattgtttcatgttgtaaacactaatctaagttgtcatctttggatgtacaactagatgttgcatttataaatacttatctgttgagatctaacactattatgtttgtctaatggatagcaatccttttggatttgtcccattaaaacaacaaattaagtaagaccaacaatgaagatttgaaattatactacaacattaataacagaaaacaacatggttcaatataaattcatacacaatttagaaattatcaagcatttagcaaataacaaagacatgtaaaaatacaaaactatcatatcttaaataattttcaagatttccaacaaactgatacagtgtcccggtaggcgagagtcaaagtaatcattcattgaatagagttgtcagctcatctaaaatgaataccattctagcaaccttttattcgatcaaaataagaatccaacgttgtcccgataggcgagagtcaaggttattcttattttatgagcttccacca

SEQ ID NO: 357523 - DNA, 1393 bp, Cannabis indica
cggaaggaactcccggagtcattgcttggcacggagtcgtccccgttccggtccgcttagagggctccacctccaccatcttgccctttcgcttacgctcgagggcagtagcgtccgccacttcaccttcttcaagttcctcctcctcgtccactaagacgatggtgcctgaaggggcattggaggaggacctcccgggagtaaccaactgtgaggcagtcggagatagagaagcatctagactgtaggcctccacaagagttgcgaagagatcgtccatgggcctggctgctgcaaaacagaaataagttaagtgttaggacattcatgagaacagcatacacttagcaagaaagcaataaaactagtcctaccctgattctctaattcggccctagcaaagtctcgaatcatagcactggcttcgtcatccacgagaaagctgtccaagggaagaaaccagctggaagataaatgggctgaatgatccaggggaataggcgccgggggtccagaacctatcgggaccgacctaaataatgacctaagtgggaaaagtaatactccttggcatgattcccccaccgggtagaaggcatcctaaacctacgaaggcgctcatcgaatcctataggcctaagacgggtatactcacggacggaaggaacataatgtattgttaaaggggacttaccagaacccgaagtgctggcatcgggagctccagtatttggaaccgggaccacaggcttgggcctgaggctcctccgcttcggcggagcttccagacgaagagtcctcccggcggccgcctgggccttgatgtaggccagctcctgttccctcctgaaaaggtacttctggtacttgtcctccgccatggcaataatgtcgtcccggaacaccttttctgccgccggagtccttgcgttcgggcagatgactttagagagattgaagtcatccaccgactggttccccaaaattagcttggccttccgacagttctctgtcgtgaccaactccccgatatcaagggccttcttgtcataagtggagaaggttttggcccgttgaagaaatatttgggtaggctcggtccgcatataaggagggatcctaacccactccgtgagaagctccgggcgatccatggcctggaagccggacgagaagaagaagcggtgacgatactccttcacgtgcttctgctggttgaaagggactgggccctcattcaaaggatgggcccgaaggccataaaaaccgtccttaagtttatctccctttttagggatagaaacgagttcataaaagtacaaaatttatgccggactggggagccccagctccgggcagcataaaaaataaacaagcctgaaagcaggcggta

SEQ ID NO: 357524 - DNA, 560 bp, Cannabis indica
tagcttttgaattatgcgagcagatcatgtattttggttagatatgctatcatcttttctccctgagcttcgtattctccagatacatgattcaccaccagctgtgaatcactgcaaatttcgatgtgtttggccttcatctccggggctagtcttagcccaacgattaaagcttcgtactcggcttcgttgttagatgctttgaattcgaacttgattgcaacgtgcagctgttgccccccaggcgtgacaagggccatccctgcaccagatagtttcatgttgaagcctagaaactttcccgagctgactttgaaggaacactttaagggatttagtttcatgttgtattttctgaggactttgaagcattcatccaggtcgtctatgtgcccccagccttttgggatttgacgagcatatcatccacgtacacttccatatttcgcccgatttggtctttaaacattttgtttaccaatctttggtacgtagctccagcatttttagaccaaacgacatgactttgtagcattagagacccatatctgttcggaaac

SEQ ID NO: 357525 - DNA, 776 bp, Cannabis indica
ttattcacatcaagttgtctaatgtcccagtttttagcaacaacaatggtaagaatgattcttatcgtcgatgccttcacaaccgggctgtaggtctcgccaaagtcaataccgggcctttgattgaagccttttgcgactaatctcgccttgtacctttgaaatgtactatcagcattcaatttaactttatacacccacttattacctataatattcattccttcagactttggaaccaatatccaagttccattcctcttgagtgcaatcatctctgttgacatagccttattccaacctttgtgtctaagagcttcttcaacactggtaggttcttcataatcacagttccactgagagtgtcccatatagactttaggcttaaaaatccctgccttagctctagtaatcatcgggtgagaaggagctgtaggcacgatttcttcagaaggatcaagggaaccagcattgacattaccaggtgagtgtctcgagtaaacaacatcactcaaattatcagtagaaccacctggactgtgtgcatctgcaggtaactcatcgaagaaaccagatgaagtagcagaaggagagttaacccgagttacctggttttgatcactaggatctgtctgaactgtagcatcttctccagggacttgagacattgtatcagatgagttgcccttctctgaactgctggacacagactggtttagagactgaaacagaacagaccaagaaggcacactaacacatacagactgttcaggtct

SEQ ID NO: 357526 - DNA, 644 bp, Cannabis indica
tgatatggcaaccatagtgggtcgatatcctgccccttatactcttgtgactcgcttcctctcgagataaccgaggtgtcccttcctcctacagggggggttataatccctggtcgcttgagttattgagcagatcgagctgatcatggacatcgtcctgcccctttacatatcgtcaaaaatgtccctgcgatatgagaccttctatctcatctttcagctggcgacactcttccgtggtatgaccaatatatccattatattcacactatttagttggatcccttttatgcctcacatgtttcataggttttggctcgctaaaaaagacttcctgtacatgtgcgaggtaggtattctctcgagtttcattgatctcggtatattcaacataaaaagggatatatttattgtgttttcttatccttggacagccttttggaatcgtcttttttctttgatcctaaggcttccaaatcaaattctccaacagtatcatgccccggttgtcttctgagtttcgtgactcgatgccttctgaacttattctccaactcgtccattcgcaaatggagtgaatccttttctttggacgagttgttgacaaagatcaggcttcttcaagttcagatgctctcgtagat

SEQ ID NO: 357527 - DNA, 849 bp, Cannabis indica
gctaatgaacttgacaatgaaaaattatgtatatagagaatgaacagttaataacatgtcgtttccaccccctcaaaaaaaaaaaaaattatagagaaaataagtggaaaatgatgatgtgatgtatcatgtatgcttttccaaataaataacaaaaattacatacaatgatgtctacttatatgatacacgcaaaatattaaatatttaagctgtgactctctaaactacaaaaagattaccattgattttgacaactaatttatgtggaagtgtcaaatcatcccatacataatcgacagtacttcccgatacaagaacctctggctccaataaatcctgtcaaatgcacaagagaaatttgaaaaaaagaacaaccacataacatggtaactgttcacatcacttgcattagtatttagtacataactaaaatacaaaacagtaaccttttgatggtacgttatagatacatggggcaagtaattctcaattcgatatggaagattgacatttggaggactatggtagtgcataacaagtttagaaccttcttctacaacatgaacatcagcaaatgttgttttactttctcctggtgatttcttttggcctgatcgttgctccctgaatttgaggaaaaagcgtcctaaagaagcaatgcataccggtccggaccaaactgaatcaggctgcttcaatttaaattggacataaagtaatgcgtcatcattttctttactatgttttcttaataaactctcaaagaaactgagtttctttttattgaccatcacatttgacagctgtaatgttgctctctgtctactgttaacgataatatcgtca

SEQ ID NO: 357528 - DNA, 974 bp, Cannabis indica
agaaaggcagtggtaacatccatctgatctatctccatgtcaaactgtgtagctaagcttaggaccactctaatcgttttatacttcaccaccggagagaaaatctcattgaagtcaataccttccttttgtgtgaagcctttagcgactagcctagccttgaaccttataggctcatctttagatcttccttccttgtgcttgaacaaccacttacaagacacaatacttttaccctcgggtcttggtaccacaacccaagtcttattcttcttgagagatcccatctcatcatccatggccttattccactccttagaattctttccattaactgcctcattataagtcttgggttccatatcatccatttccaaatctgttagaagagcataagccaattcttcactccaaatgttgtagctgaatttctgattaggcttcggagtcctcttagatctatcccttgtcaactgatagtttgtaaggtcctcttcggtgtcttcatccctgatctcttgttgagcatcagttcctcccccttgaccattgttcatgggctgctggctttggttaggttccacctgaaccattcccggtgtgtcttcattttgttccacctgattagaaccagttttaacttctaggtttgtacctgcagggttagtatcttccattcctgcactagacttttcattaggtaaacaaggaaaaatattttcttggaatataacatctctactattcatagttttaaatccccctttttcctttacccaaagtctatacccttttaccccttcggggtaccctaagaaaacacactttaaagccctaggttcaagttttcctatgctttgatgtgcataagctgcacatccaaaaactttcaaatgagaaaggtttggaggtttacctgaccatttctcctcgggagttttaccttcaattgctcttgatgggcttctattaat

SEQ ID NO: 357529 - DNA, 558 bp, Cannabis indica
aatacatagaaattagggggaaaaataaatcatattaaaaccataaaacaatgtcaaataacatccatctagaccctaatcaagtgtttagctactcatgttcatggaagcaaaatcacacaaattatcttaagaaaagagaagaaaatagaaaataatgttgaaaactctctgcagactgcctccagtattgacttcaatctctgaaattcgtactcctttttcattctgaattgcttgactgaaatcatctccagttcactctttatataggcactgagggactaagaagatataaaaaagcacaagtttaaattcctattcagattcaaattgggaaaccaccaaaaacccacgtggaagaaaagattatattttctgcagaaataggggcgggccgtggcgccacaatggctgggaggcgactcgtgttgttttgcagcacgagatttcggtgtttttcaaatgagcgggccgcgacacacccattcctgggtcgcgacccgtgtggtccaaagccttcgttttcctcgcgaaatatctttttctgggcaggat

SEQ ID NO: 357530 - DNA, 621 bp, Cannabis indica
aacatggcaataccataaatattgcaaaaaggtgaaaactagggttccctaaaatgccctgaccggtagatcggttccccaaccaaaattccagttctgtggggtttcctagggacaaactggaattccagttcctacaggtccgcccgaaccagaatttcggttcagtgcaaaaaccacctacacccttcaattcaaacccaaacctcaaaataacttccagatcatctaattacattataacaaagagaattcatgcaacaaaaccaaccataacagccagaaacaaaatccaccatgttagagcaaagtttgagctctttcaacaaacctcacaaacagccaccaattcaattcaatctaacttaaatcacctcaaattaacttcaaaagaaatctcaaacctcaatcataccacagaatcctaattctaggaaaacatgcaagaatccaactaaaacataaaataaacaaagaggagaatctaagggtttttatcttcacttgaatacaccaagaactagctacaatacctcgattcaagctgaaatccccaacccttgctgattttctaaggagctcgagaaagagggagagagtttggagagagagagagagaga

SEQ ID NO: 357531 - DNA, 702 bp, Cannabis indica
gaaagaaaaatataaaatttctatttggaatcaaaaatttaaagtcaaagacttaaattcaaccaaatataaaatgggtttattctagcttggaccaccactactaatctaaccctaagtttgattagcctaaagtatacatatacaagtaggagatttctaagatccaggctgtatatcattttgggatagaatgtcgggaatataatcatatgcgccattcaattttttaagagaaaaaataatgacatcataagcaaatgatttataaaccattcatccaatgatatatatattattaaagctaattcaaaatgaataagctaagaggaaaaattaaaggattaattattttaaatttaaaataagaatccaacgatgtcccgattatcgagagtcaaagttattcttacttttataaacttcttcattgcttcatattgtaaatactagtctaaggtgtaatctattgatgaacaactaaatgttgtatttacaaatatttatctaccgagatctaacactattatgtttgtctaatggatgacaattcattaggatttgtcccattaaaaacaacaagccaagttagactaacaatgaagattcgaaattaaactacaattaataacagaaaataacctggttcaatataaattcacacataattcagaacttattaagcatttagcaaataggaat

SEQ ID NO: 357532 - DNA, 867 bp, Cannabis indica
atgtacattcagcatactgttctacagtataagtcactcgcacaggtaaaaagtagcgctgaccttggaaattctatccactatcacccatatggaatcatataacccagtagtcctaggcaaccccactacgaagtccatagttatgtcttcccatttccattcaggtattctcaagggctgaagtaaacctgctggcctttgatgttcagccttaacctgctgacaggttaaacactttgaaacgtattcaacaatatcactcttcattcccggccaccaatatattgccttggtgtcatgatacatctttgttgtccccgggtgtagggaatacggagtagtatggaactcatcaagaatttctcttctgatctgatcatctgtcggaacacaaattctacccttatatcttagtagtccacttggagtcacaatgaaatcttttgtagcaccaatctcaactttttttctgagttcaataaattcaggatcattttgttggccaatctttattctttccagtaaatcagactgcaatgtaatatttgccaacttcccgactacaaactcaatctcagccttggccatatcctcagccaatcttggagagatttccttcaactcataaacctgccctgggcctttccggctaagtgcatctgccactacgtttgctttgccgggatggtagaggatttcacagtcataatccttgactaactctagccatcgtcgttgtctcatattcaaatctttttgagtgaaaaagtatttcaaacttttgtggtcggtgtaaatctcacacttttcaccatataaatagtgacgccaaaccttcagggcaaaaaccacggctgccagttc

SEQ ID NO: 357533 - DNA, 1069 bp, Cannabis indica
ggggcttcttggaagaggcttacaatggtgtaagctttggaaccaaggtggtggttcgaagatccaatagtcaggggtgttgttcatgcattaaagaagagaagaaacacaaaaattagtactgtgattagagagaaaaacagagaagaataagaagagcaaattatagtaatatattcggattaccactcttaccattgtgagttagaatccatgctttgtaactcttgaacattgaagaatcatagtggaacgaggcgagctcgaagaggacgtacccgcacaattttggggaacctctataaaaccggtgtcttcttctccatttttcttttctgtatttttcattgatatgtttgtttgattattgtttgtgtatgtgattttctgggtttaaatcggtttgggaaaggattaacttttctggtttagatctaggttgattacaggtatttctggggtatttgtgcaatcgggttgggtttatttttcttagctgagatttatttttctggactgtaatagcatctgtcttcatgttcttcagagaagaacaatgaagaacgaaggctgctgctaaggtttttgtaaggctgttgtatattatgtgttaaggttaaaatgagatatatatatatatgtgatgtgaatttagggtttctgatatatatttagaaacaacctgtagcttcgattaaaggggaggctcccgttttgtggggttttaatatcaaggagtcaaaagatactttgactgggtaaaaggcctaattgaccgtgggtttctttgactggtctttgctgtgtgtagggaaattgggagtaataatttcctacataatggatgcaatgcaagttttttgaacaaatcagaaaacaataaatgaataaaaacgatatgataagatcaaatatcctataattagatatacatatactcaaataatgttaaaataaaacttattagttttactttgtaaaatattgaaaataaatttcattcttatttacataacaatagtcttttcataccatcttactatgctaaataaacttattagtttatttt

SEQ ID NO: 357534 - DNA, 661 bp, Cannabis indica
aaatctttcttccctgtaaacttttccaaatcgaactttgtatttcccatgattcccaccttgcgttattcacactatgattaggtaattaaaagtaattaagcacgaatgaaatagaatacatagaaactgggagaaaataaatcatattaataccagaaaacaatgtttaagaatctccatctagaccctaattaagtgtttagctactcatgtttatggaagcaaaatcacacatattaacttaagaaaatagaagaaaatagagaagaaaagaatgttgaaaatcctctgaagaatgcctccagtattgcaattgatctctgaaattcgtatttgtattctctgtttatttccttctgaattgcttcccccaaaagtattgaagtccacttcttttatagccaaaaaaatgaaaaaaataaaataaaaattcgctgaagaaaaaaaacctattctcctgatagtattttggtcataactctctcgatattgcttggaattggatgattcaagatgttatggaaagataaaaagaaagatctagaacttttatgttttggctttttccaaaatctaaatcagaacatagtcgaactcaggcttgaaattttagctttatttcttgtcacaattttctctattttatatattatctttt

SEQ ID NO: 357535 - DNA, 679 bp, Cannabis indica
tcacgaatcgagaagaaggaaagataacctcataaaatatcataaaactcataaaataatctataacaatgttagaatttaaaatgaaagttgctaaagtatatgggattataccttataattaattggcaataaagaaaagtagtatcttatatatatgacaatttattttcacactcactacaagaaatgtcacttttgccaacacatttttatgctggtaaaaattggtaatgcgctggtaaaatagaatttacttgtgatgtgttggcaaaaggagttgacaaatcaatattggtattagaacttttgccagcataaaatgaaaagcgctgaaaaaaatgaattttcccagcgcataaatacgctggtaaaaattagattttagccactgcaaatgtacgctggtaaaattttgacctttttgccagcgtagtttgcgaaatgcgctggtaaaagttacttttacactgatgtgaattcagtaaaccaataggtatttacaatttgatttttataaatatatattcatcattgactaactatttaatattttaatttattagatattttggctattgctctcaaaatgaacctaccaaaagaagtcaacactccctatgaactacatacaattcaagagatatatttaaattgatgaaaggtaaaactatacatt

SEQ ID NO: 357536 - DNA, 500 bp, Cannabis indica
accttccactgtgttgacatcactataattgtgaataactatatgttctggatttaacagattttgtacacattaaaccataaatatgaaaactaaatgttaacataaatgacttctaattttctattgataacaaatcagattgtattgtaatgagttttatttagggcataaaatcccaacaactcatgcacacaccataactcttatagcattaagaatttcaaattaagatgtgtaacaccttttacacttttaaagttggtgataatggtggaggttactcatagtaacaagtaactcccccaaatgttacaaaaatatgacaattgtcatatcttacatgttagtttgttacacatatttaatctatacattatattaatgatcaataatataacaatcccccaccagattaaatattatctttttagtaacaaacttgtaacttttgtaacatttatttaattaataaaaaatattatatcaaaatataatat

SEQ ID NO: 357537 - DNA, 620 bp, Cannabis indica
caaatggataaatggtgatcgaactttctaacctttttttgttggaaaactacacaatgtagttgacgcttgaggtggagattgttgaaatatggggtccgtagcagagtgagccaagatttagagacacactcgcagcgtttaagagatttgacatcgagtcttgagagaatgtccccaagaaaatcacaagggatatcattgtaattgtaaagcacacctttttcttcattggccattggagaaagagatttggctaagacagttgaggagattagttagtaagagagattaagattagagtaagagaaaaataaatcttaattaatatggcattgtgtaaagataaaattagaggtgttcataaaatagtcaacccaatctaatctgcatgatacaatctataatctaatttgcaaagttgctatattcgcacttgtgcggattagattggattggaaaatccaaatttgcacttgtggagattgaatgttaattgacatgtaaaaataatcgattcaatccaatccatacatatttatataaaattttaaaaaattataaatacaattacgataataatataaaaaaaaattagtaatttaaaaatataatacata

SEQ ID NO: 357538 - DNA, 585 bp, Cannabis indica
gaacacggctttgtccaacaccatgatggcagaggtggacttggccaggaaggatgctgaagatgtcagggcagaactcggagttgttcggacggagttgggtgaagccaacaagaagcttttctctgcccagaagaaaatagttgagctgtccaaggatcttgaggcttttgaccgacttgaggtgatcatcgagactttgtctactgaagtcaatagtcttcaggatgagaggacatctcttcgagcggtcctttgtcgggtgaaggaggagaaggaagctaaggaggaggagcttacaaccaaggtgatgaaactgaaagagaaagttcatgccattgagacagccgatcttgagcttttctacgacttttggaaggctaatcctcaagcaaacttcgactacttgggagaagctaaggacatgtaccttgaattgtgcgcttcccaagtggcttatggtgaaaccgaggcggctgcttctacctccggccaaaatgctgatgtacctcccattcaaacaacagatcctccagctcctgccggccaagaagacccaaatcaagagcctgggactccagctgt

SEQ ID NO: 357539 - DNA, 566 bp, Cannabis indica
tttctaagtcccgtattaacaaagtatacttctatataagaataattacatcttaataaaatatatacatatgttttgtaaatttatttacataaaattaataattttattccaaattgtaacatatgtattaccattatatttactctaaaataattctattataatatagtattaataagtatttattgttattattgttacattgatattttttagtattttaatttttttttctagtataactctatttagttataacctctcaattagaatataatttgcttggtcccaagtctattcttgaatagaggttctactgtatttatcaatttgtatttctaaaaaatataaatatatatttatcaagttaatattaagtgcaacagatatatatttagtttttatcttgattatatttatattctttagttgaataattattttttttaatttaattgtaaaattaaattttttttatgaaatatctacaataagtttaaatttgaatcataagttaaaaaaatattttatgttatgtagtcatatttaatataagagaaata

SEQ ID NO: 357540 - DNA, 561 bp, Cannabis indica
gtttccaaatgacgaggtggccacatcacagaagagcgagttgaccccaacgtaccaataggagaagggtggactctgtatgttgatggggcatccaacaatgaagaatcaggggtggaataatcctcataagtcccaacaaattcaaggtacaccctgcccttagatttgaatttcctgtatctaacaacgaagtcgaatatgaggctctaatcgcaggattaaagctcgctctcgagatgaaagtcaagtaccttcaagcatttagcgactcgcaaatcgtagtttgccaagtcaatggagtgtacctgggcaaaagaggatgtttggccaaatatctttcttatacttgtgagttattacaaaagtttaaaaaaatagttgtttgtagaatatctcgtgcttacaattcacatgcagatacctcttaatttctgtagaatcacccaaaaatatatatggttttaaattttaataattgttttattttaaaatattattattattattattaataaatatttctttatttttttttttaattttaaaaagagaataaag

SEQ ID NO: 357541 - DNA, 564 bp, Cannabis indica
acatatcatcgtcctcccctcacccttactcttagggatagggctcaaaagcttacccggatgccggcggaggacagggatatcatctagttgacctccgatacaaatcttgtgcagtacgggctttacccagaggacttttcttctaagtccgtggtagagaagaagggtaaatctgctgctgtccggcctgaacgagctcataaggaggatgagctgattcaacttaagcgagaggctaagttgaagggaggtgccggggcaaagcagtatgctcaggagtctatgaatcctgaagatgaggccgaggctgaggctgaggctgagcaggtgattcctttgaggaggaagaagaaactcccggccacgcccaggcctgttgaacatgccattcgcataagcgagcccatttcacctgttcggccttcccatccttatgctggaaaagggaaggccattatggctgaaataaagtcgatgtcaggtgatgatggacttctgactttctgggcgggcagtcactctgcgctttacttctttttcagcttcttgactttcatactt

SEQ ID NO: 357542 - DNA, 225 bp, Cannabis indica
ttgttaattgttgttaatttttttgttatatgtatgttattttttgttagtttttttagttgttatttgatagttattttcatgttacttttatagttgttttgactatgttagtttatgtccttattttaaaaaaatatagcaaatgaccctaaatcataagacaatgttaataaatgtcctcatttcaaaatcattaatttttttttttttttataattagaa

SEQ ID NO: 357543 - DNA, 587 bp, Cannabis indica
tttagatcggattataattaaattttattttgacaaaaaatcaattcagggtcctatttgtactattttagaaaatacagggtccattttgtcatttaacaaaacacagggtccaattggtaacttttgtaaaacagaaggtccaaaatggtatttacccttttatgtaaaataaaaattattaaaatgagatatatttataaattttgagggtgcaaataaaattttcttttccccctagtaaattgtcattttaaggttacttaccatagtatagtgaggtggatgtatatggataatctgtatactattttatttgttgagttatttaaatcaaatttgttttacttttcaatttttaaataaattttttgaatattattattatggaatttttttaatattatgcctaaaaataattttatttacaaaaatacctttaagaaaattatttgcacaaataccattgtgccacgtcagcatacttaccgaattccaaaaaaaatgaccgaaaatgaaaaatatcgttttcagaatttttttcgctttttgggagttttggaaaaagtaaccttttagttactttt

SEQ ID NO: 357544 - DNA, 1115 bp, Cannabis indica
ataatatacactctatatgaaaattcatttcatttgttgatctcacgccctctagggaaattcgtgttaaaacatcataaatatatatatatgtatatatatatatattattatattattatatttttctcaagatttaactattattaattaattactgtcattaggtatgaatataatatatacatatagggtggcatatctagtaatggtattaggttcgaatatatgtttaaaatataataacgtggatatttaaaaaagctataggtttgaaatttgggtacgttttcacattgataaagcaatcctattactatactaatcaataatcaataatcaataatcaataatcaatattcatcgtctcaacggtaacaattgtaatggtggattatcttaattttttttaaaagacaaacggaaacttctgttaattggtaaattggatatagtttattataaaagagagttatttttaattacaataaaaagttacttattactagtgacaaacttagaattttttatttgtggaggcttaactgttataaaaatatttatatattactttacatgaaaattataattattttatgaagactttttactattttgttgtataataatttaactaaatagaaaatatttaatttattttaacactaattttttttactgggggctataccccacactactatagtgtgtctgtgtctgcttattactagaatataatatttagatacaagttattactaatttaattttagtcacaacaagtattgtactaaaaatatatttggtcacaacaagtattgtgatttttgtgactaatacttttagccactggccttttagtcacaacataagaatcataatttataataaatagtcgtatcttttttacttttcactacaaaaaactgctatttttaatgacaactttttagtcacaacataacttttttgtgactaaatatgacttttagtcacaacaaaatgttacttgcgactaaaatatagtatttagttacaagttgtcactaatttagttttagtcataacaagtataatgtgactaaaaatacattttttttttgaagaaaaatggt

SEQ ID NO: 357545 - DNA, 517 bp, Cannabis indica
agctaatttttggtagaattttgattagaatctgaattaaaatctaattttcagaataaaattaattttaattaattttttaattaattaacattagtttctgatattagtaggctttgaattttgaaaatttgatttttcacaaaggagcttgttaggttatatttagcctatgtttcgggtctgtaaagttagcattttctcgtctattggtgtcttttggagcagttttacgcttgattttcattgtttcaggttcccggggtgttaaagttcaaattcagtcaaatggtgaaaagacgggacaaactggcaaaaaaattggaaaaatcggctccagatgcgtcagtagtcgcgaccaccgttgagccaggtcgcgaccctttttcatggtcgcgactctggtcgcgacttcgagatttggcagaaactcggtttttcgagttttgcctatagtcgcgaccagcttaaaggctagtcgcgactaggtacggaaaatacagttttgacctaattc

SEQ ID NO: 357546 - DNA, 1545 bp, Cannabis indica
tcttctggcaatattttcttttgtatcagagcttctgcacccttagaaactagagccagttcaactatttgagcataagttcgagcaaccccggttgtttagaagcaacaatcacatctcgtgctatatgttcatccaaccctcgaatgaactttgctttcctagcagcatcagcagccacctcatctgaagcaaactttgcgagtcgatcaaacttagtggcatactctgtcacagtcatgttgccctgagtaacgtataaactcttctgcctttgccacccgaatagattcattataatacttctcataaaacaaggtccagaaggcttcccatgtcatgttattcagatcatgaccctgggatacaatctcccaccaaatacaggaatcatctcgcagcatataagtagcacacctgacccggtcattattttctaccgcataaaatcaaaaatggatgttatcataatcgtccattgctttgccttgagtggattagcaccacccacaaacactggcgggttctgcttccggaatcgctcatacaaaggttctgaatgtttccctgcatccggtggcactaccagaggtgccggaagatcagggttaaggtttagagcaggctgagctcgctgctctctcaattttctgatttgctccccctcctgccgaatagtctcttgcgtttcagcatataactcttcccaatttggtggtggtggagggttctcgccctcaccaggagccctgagcccagctagcttgcggttacccctaccagtccgcctcgggtgcataactatacacctgcggtcacattccatgtaataagaatactaataagtattttcatatattatagtactgcccactcgattccgatatcaacacaattaaaataatcaggcaatcagaaaattaaaaaactatcttttaactaaaagcttactgaaacatgagtcgatcaagtccttgcagccaatgtacatatcaaaccagtcttcaggatctaaaaaccttgctctgataccatgttgtaacgccctatccaatagggacaccacgtgtgtgcttttataaaattgatatatatatatacaatataattataccaaaagtgcgggtaatttaattttttttttgcaacgaaaatcaagcatgtaaaaacttcttcatagcagaagataagtaatgagaactatggggacccctgttatcaaaatagtacaaactagtttactagtacttttacaatataaactttgtaatcccaaaatactatcaaaacgaatcatgttgttcattgggccgatacactgcggctgatatgtacattgctgctacgacctcgagctcatggctgctctatctttgctttccccttacctgcaccataaagcacccgtgagtcacagagactcaacaagaaaagtgaaataaacaataactgataataaccatcaactctatctcatgtcagcatgcttacacatttacataacatcataaaagcacaatcctggtactttataaagtatccctt

SEQ ID NO: 357547 - DNA, 864 bp, Cannabis indica
gatcaaatgtgaaagttttaagcttaaatcccatatcaattgggagattttcttgatggtcaaagtaaggtgaattaaagcttgtccactagaacggttggagcaactggagctcctattacacctagaagctattgttggttgttggctaggctcgatctgtaccaccgggcttacccagctaagtctaccactataacaatggttttgttatgagttgtaaagtggtgactatttggaaatcaatacataaggatgtgagaactaaattcttgtttaaagatcataccatgttaaatggctcgattaagcctggaaaaggtaactaaaaggacacccgagttcaatagatttaatcccttttgaggaaggacatcaagatagtgatgactgtaattctcaaaatggtcaattcaaagcattatcgttagtcaatactatgtgagagatcagtgggagcaatgatatgtttatattattacttgatatagtacattgctcatattttatgatagtgatctattctggagacgattgaactgttatttgataatctctgaaagaggaagaatccttgatgaactttatatggtctaattattttagattcttcgtgataagatcaacagtaaactaaattgtctcatagtttgcattgactaactattgttgtgattaatgttttgatttcattgagaatttttaaatagtctaaagtatgatttgttatgaaaggcctaaagtccatgtatattagtaataacgagagattagtattgaaattgtcccatgcatatatatgcttattgaaggcagcctagggttcgctcaagtacatgcattcctattgggatatatgttgca

SEQ ID NO: 357548 - DNA, 639 bp, Cannabis indica
ctcactgatgcatttcttcatcaatttctctcaataccttactgtatacatactggtaattgttaaattcaagtggcagggcacatcatgttcttctatttgttactagtttgtttcatttttggtgatatcttgctactagttttgattcattatattgtcgagaccttaatctagtttttaactctgtttttatatttctttttccaaattttattttttccaattttggaatgctccgttcgtgtctacatccttagtgttggatcttcattaatgtatttttatgtatcatttttgtataattgtggtaataattgctattttgtcgaaggtttaaggtctgataaagtctcgacaatggagcttttccgacaatggaatttctctgcaataaagtttgtcgaaggtcttaagtgtaatttttggtgagtaaagtttttattagtttcagcaaagggtttccaatttatatgtaattgttttagtgtgtgaaccatgcacggtattcttgggtttcaagctggttaagccattgtttcccttttattagtttcaggcattgaataagaaagttacgttgtgatgaggatgacgtgacacggcagaatgtttcagtcatttaaacaacgttatttt

SEQ ID NO: 357549 - DNA, 856 bp, Cannabis indica
aaaaatttattttgtgtacatgtgaacagtctactgtatcacttaactgaaatttttagacagaagggtaatgagaaaaatgaaacctaggatcagtaggttttaccgtcaaaattttagtttttgtggttaagtggtaaaaaatataaagttcaagtagtgttgtcgtcaatataaagtatcataaaattaagaaatagggggtttttcatacatataaaaaaaattaaatggagtttacttttatatgacataattaaataatacaaaaagatatcagattaaaaaataatcaaagtttaaaatatggaaaaaaaaaagaattataaataaatttgataaaattctaataataagtatcgccaaaaaagtcatcgacgtcgaaaaagtcactggtgtactaaaaaattattgccaccgagaaagtcactaaaataattaccgtcaccgaaaaagtcaccagaagtagatgtcttagatataaattaaaatagaatagattctatatgattttgaataaaaataaataacacggaataactcaaactagttataaattaaaatagaaccaattctataacataatgaataaaaataaataacacataataactcaaatcggctataattaaaataaaaatggttctatatcataatgaatacaaacaaataataactcaaattggttataattcaaaaaaacaaagaggaaatcagttcctaaaacactaaaatataaattaaaaataaaattagttccacaacaaattgagtaaatatgaataacacacaatacctcataaaccggttataattaaaaaatatggggatcatttctgtaaagttcttttttggc

SEQ ID NO: 357550 - DNA, 1068 bp, Cannabis indica
gggttcgcgtcctgggtcttggtctaggttgggtccgactaccaagttccaaacccgatatgagtctggattcagttcttgttctaagtcctttgttctgatcctgttcttgtttcgagtttgggtccgggtccaggtctagtttttggtctgattctaggtgtgggtttgagttcgggtcccgagttcgagtcctattttggattcgatttcgggttcaggtttggtccttgttcgtgtctaggttcctgtgctagtttgtgtttagggtaggttttatttccgggtctgggtccaacgtcgaactctgaagtcaagggcaggtcctggttccggttcgagtctcgaattctgatttttgtttgggctctcgggcctaggtccatggtctaggtcccctatctaagtccggttcctaggtcctagtcttggtcaagcttcgggtttgggtcctcaatcttcgtttgagtccaggtgccggtccgtgtttgggtctaggttttggtcccagtcttcggccgagttcgggttcggttccttgttagggtctggatgctagtttgactcccataagcgtttaggaccaggccaggtccatgtcccgatctaggttcgagtcccaggtctcaggtcccaatcatagtgaaggtctcggtccaagttcttgtctgagtctgggttcggttttgatctcaagtttgggtcctaatcacagttccaattctgattcttggtccggcatcgattccgagtcagggtcagagtccaggttggggttggggtcttagtcttagtttgagtccgggtacgggtttttcggatctcgaactgggtctaggtctgagtaaaggtcccatgatcagcgataggtctttgtctgggtctgcgtccgagtttaggtcccatgtttcgatccctgttttggtctgggttagtattcagtttcgggtttgggttcgtgtccatgtctaggtccgaatcccagtctcggttatgggcttattctaggtctgggatcgagtcccgtgttcaggttggggttcgtgttcgagtctcagtcctagtgtg

SEQ ID NO: 357551 - DNA, 966 bp, Cannabis indica
tgaaataatgttcaaaaggagtgagagtgaaatataagacttctaacttaagaataataatagtaataatgacaccatattttttacgtaattttgcagctaactctatatagtccacaagtctatcttattcaagatatttctggatgcagaatgatggttttacaatcagtgatttttttcctctcaaaggtttttcgttcctttttctgtataatctactcctatttttaagaatataggttgacagttatttacatttgaatttaaaatacataactattttcacgaaacgtagattttgaccacgtcccattttaacacgtgtagagctaattaaaaattcgcataactatttgttattcttatctttaaggtagtggatactgacgtgggataggagtatctcactagctagaggtatctcgttttgtacatagatgaatgacttggtttattcatatgctttccaacaatgacatgatcaccggtgtactgagcaaacttaagaactgctcttcgaccatcaggcctcgcagactggacaatcatgtcctgcatgctcccaaactattacacttagttattataatgtgaattacatatgctaagggtttcaacgactaattcacattgtcaatacttccttacatgcagcgaggtagatgtctcgctatgcattgtccgtagctcccttgggattatgccttccgaggtaagatggtttctcgtcaatacatgaattgatagtttgtgtatccttgtctcgcctaagactatacattcagcgagttaagaatatactgcattaattttatatttaatgagttattctattttgcatttaatgatataattatcatgatatctgttgattcatattccacaagactgacacgtgtcactttttgaagtgcatccgaatttcgggtataacaatgagatttggagagagagagagagaga

SEQ ID NO: 357552 - DNA, 590 bp, Cannabis indica
gagcaccctgctgacgtaaccgttgaatctcattatcatgttcctcaatttgggctgcattgctgcaaacctattttcccaattttgggcatcctgagcatcttaggcagcttaggcaacctatggtgggttaacatcaccccggccacgtgccctgcccctgagacctctacctcagccacggacatttgggggattttgagctccctgaccagcattagatccaaccgaattgccctggctcctggtatttcgcctggcgtccatactaatctgaacagcctgcgtaaccaagagctagcatggtcagaccatgatcaaagagaaacttaaaaatgccgcttatttagaaattaaaaaaaaaaacatgcacctattctactatcagactactaacatgcttcttaacaggcttttcttaaatagtatactattaaaataagctactaaaacaataaaagcttactgaacggtggaacgagctaactgttgatgatgattgtacatgtcgtgacgatcttcggaagacaacctggcggctctgataccaaattgtaacaccctaactagcataggcgtattacgtgatt

SEQ ID NO: 357553 - DNA, 743 bp, Cannabis indica
tagggaatttactcggtaaatttcagtttagcttattggaagctcagttatataggcccatggtccccatgctagttgagaccatactgcttgtaagactcaaataattaattttagttaatcaattatagttctaaaattagactatgtctagtttatgaattttcactaagcaagggctaaattgtgaagaaaagagattctaggttttatttattaattggaagactttattatgtctaattaataaatatattaatgacaatattatttaatatttaatttaagttattaaataattagttttggcatttaaatggtgaaaattggaaaattggcgtttttgagaaaatagaaatgaaaattgtcaaaattgaaaaaataccaagtggggcccattaacctatggccggccacttaatgatgattttccaattaatattttcattattttaatgtctagtaattcctaacctaaacctagtggttacctataaatagatagtgatggctcacacttaaagagaatgtaaaagagatgaattttgtcttcagaaaaattgagcctcctatcctattgtctatagccgaacgtctctctccctcttttcttatttaattttttgaaatcttgagtgataaagtgagtgcccacacacatcaagtggtttctcaatcatagtctggaagattgtgaagaatccaaattgaataaaaggacattcgggctcagatcttggtga

SEQ ID NO: 357554 - DNA, 428 bp, Cannabis indica
gtaaaataatttccaacatgaggaacctattgtacttcgtcaatacatggacgaaattgaaggtttagagacaagtgaacaagttattccaggtaacatattgttcaaccattatatattaattgttaattgaaattattttatatatgttagattttatgttaatgaaatttttattaggtgatggatcatgtattactattaatgagaatattgaaaatgtctctggaagtggaagtgggacagagaaaatcaactaaaatctcaaggtaattaatgaaaatttaattttttactttgaagctttatttttctaatagtactttcataaattatttctttaattgtgtattcttgtttttttattagtgtaggtggtgatcatggaccatggttgctttgcttgttggattggactctattttcta

SEQ ID NO: 357555 - DNA, 674 bp, Cannabis indica
atatattagcggaccactaatatgttgacatgtgtcaacttagtctattttaatagaatttaacgaattgataatgatgaaagtagcgtaaaagtaactttaggtatttaatccgctaaaagaaaaaacatgtagtatataagtgtatgaaatttaaaacatcaagtatttatgccgcaaatactctatgtttgaataggatttaacaaaaaagtagtgacagaagtaacggaaatgtaacttaaagtatttaatccgtcgaaaaaaacacgtggtatttaagtgtataaaaccgaaaacctatggtatttatgccgcaattaaaaaaatttaacatgtcaaaaaataaagttcaaatagtatattacccacgtaatatttattttatatgtatgtaaaatacactatttaaatattattttttaaattattttgaatttttcaaaatttcacaaaatatcttaatgtcatatagaaaattagactaattttttctttcaatgcacatttttttgagtgtattgtaaaaagaaccctttattatttactttaagaaaaaaaaaagcacattttacaatgttttttggtttaatcttaaataattaatatgtaaaaagtagaagtgttcatcaaaccgctcaaaccgcccgcaccgcaccacatcgtaaaaaaaa

SEQ ID NO: 357556 - DNA, 1458 bp, Cannabis indica
ttgattccaattacgatgatattaaataattaaaataatttggggaaaatttggagtgaatttggaattgtggctgacctcagtaatttaattaatcgagctgcctacataccttttttttataaaggatcaagctacttatagttcagaatacgacattttagaatttaaatataaagatttccatagatgaccacttttaggaattcattgctatttaaaaattttgaaaaattcctaggcgtatgaccttttacagaattttgagatttatgttttataccattttgcggtatcgacgactgcacttagtcttagcaactaagttgtctacatatcctttttatagaaatcaagtcaaacgtagttccactgtctttgtgaaaagtgaattcactttttattttgttgaggtgaatgacctcatttaggaatgtcatttaatttattatggttttgaattttagtgcacttttcaattttgaggtaaaattaccattttgagatttttgtgaggtaaacaacttttttttatgaggaaatgacctctttaaaattttgtgaggtgaatgatctctttaatattcgaagattaattttgatgagcttatttagaattttgtgccattttgtatggctttagaattttactactttttttgtgataaaattgagctttgggatatttttattatcttttataaataaaaaacttatttggtgatgacattttaattatttattttaaaatttaaaaattaatgataattatttatcccatattaaataatatcttaaatccaaatcactttaaaatttaaatcataatgtatgagatttaaattatcgaataatatcagtatcttataattttatttaatttgaattatagagaattaaagatattaaataattttatatttgtgtataaaagggtgcactcttaatgagtatcacccatgaatggataatattagaaaacaatgagttttatgatttaatttttttatttaattagtaaaaaattctttttttacgtttatatggactggagttgttccatcaattaataataataataataataataataataataataataataataataataataataaaaagttttcagcgaaaaaatgataaaaaaaagttgagtttgacttaaatatttttatataaatatatttttgatatagtgtaaaaagaagtattttttgatattttctttaattaagtagctaaatcaagcatagaaattcaaatttctcttttattattcgctatcgaaactaaaatttaatggtttaatatttttaaaattaatatttatagttaaatttgtttagtacccatcaatgggtaatacctattaagaagtgttccatatagatatatatatatatcttccaattgaaacaacatagatatatgtctatgattttgtctcgttat

SEQ ID NO: 357557 - DNA, 548 bp, Cannabis indica
aattagatgatgaggcctcaaaccttacaagagtaaacaacatgcctaatcattgagctacccctcttacatctcactcttgaaccagccatcattcaaagacttgctaagtcaagctaatacacccctgtcttaaaccaatataaaagaacagaaaataataacaaatattactctttagtttagtagtttattagtgtaagaacatatttggttgttggtgtgaagagtaagagtggtgacttgttaaatagaattattggctcacttagccaatgaatgaagaatatatgaatttcttattctctctagactctctcatctctctcaattcttatgtctctactatcttcttagacaagctaaaacaataattttaatttgatcatccaatgagagttcctacaattcccttcaatgaagaacccttcattgaaagcatacaaaatgacactgtaaaaacatatgatctaatcccaatactgcataaatattttttccttagtgaccaaacattaaaaattcccaaagaatgacacaaatgaata

SEQ ID NO: 357558 - DNA, 521 bp, Cannabis indica
acaaaaaccaacccccttaactcaattcaatcccaaacttaaccaaattgtccagggtacctatacaatgcataaccaaccatttccaaccagaatttcacagaataaaccaaagaaactcaactttccattaaagctcaaagcttgagtttcaaaactcaagcttgcttaaaactaataccaagcattaaaatcaactaccagaacccttaatcaaccaatattgagcatgaaaacctaaccataaccatttgtaaacttaacagccaccataattcaaaatcatgcttgaaacgaaagtaaattcaactaaaaacccataactcaaaagataaaggtttctagggtttacctcacttactaaaaccttgaatccttgataaattccagagaaatggaagaggaaaaattgaaccttgcccttgcttcgtcccagtcgaacggaagagagagagagagagttaaagaaacaagtctcttttcctttttttctttctatttcttgatttttctttaaatgg

SEQ ID NO: 357559 - DNA, 529 bp, Cannabis indica
attaactcttattttgacaaaaaaatcagttcatggtactattttgtactattttaaaaaatatatagtccaatttgtcatttaacaaaatagagagtcaaatcagtaactttttgtaaaatacaaaatctaaaatgatatttaccctgtatttaaatacaaaaatctaaaagtaatttatggtataaatatataaatttaactctcggttgtaaataaatatctaagtttaatttttgaaatttttacattaaaaatacaaaatgctaaaactattacatatatactacaacacggtgaaagcaacttttatacacttttgcttaagttttttatatttttaccacatgcacacacatatcatgtatttttgacacgtcagtgattgatgtattacatcaatcactctatacatcatttccctctttttttctcttctttttcctattattttatatttcttttcattttttttttaaaaatatcacctccatagttaaacacttcccctccacatcccaactccatt

SEQ ID NO: 357560 - DNA, 195 bp, Cannabis indica
ctcacaccaaaataagagattcagtgattcaagagattgccttcagaaaaattgagccactcactatccttctatagccgacctctctctctctctctttctcttcttcttctaatttcaaaaaccttgagtgatagagtagtgcccacacacatcaagtggtacttcaatcatagtctagaaaatcgtgaagaa

SEQ ID NO: 357561 - DNA, 525 bp, Cannabis indica
catgtccttagcatcgcccaagtagtcgaaattggcctgaggattagccttcaaaaaatcaaagaatagctcggcaccggttgtctccaaggcattgatcttctccttcaacctgtctaccccaatcaaaagctcctcctccttggcttccttttcctccttcatccgatgaagaactgctcgaagggaagtcctctcgtcctgaagactgttcacctcagcagataaggtctcgatggtctcctcaaaacggtcagcaacctcgagatccttagtcagcacagtgattttcttctgagcggcaaacagcttcttgctggcttcacccaattccaaccggacagctctgacttctgctctggcttcttcagcatccttcctggccaagttcgcctccgccctcagggtgttagatagagccgtgttcttagaagcaacagacttagcccgggagtaagtgtaggccaacttcagactggcctgcacaaggaaaaaactttagcatttgagctaagtatggaagat

SEQ ID NO: 357562 - DNA, 1214 bp, Cannabis indica
gttaacctagtttcttatatggtgtgaggtagaaatctagcatagtgttatcacaagtgtatttgagttgacaacttctttacaaaatagatgatatgtatacatgggctttgagtctacaaataagtttattataattttttgaagaaagacaaataacaaaaaatggagtaattatataaaatacaatttttttttgtaaattttttatatttgttcaattatttttttatatttgtacgatattttataaaaataatacaaaaataataagaaaattacataaaagtaacaaaaatatgacaaaaaaatattatccaaataacaacaaaaaataatacaagttacaaaaaatcaacaataaattaacaagaatacaatataaaaatacatcaaaagaccgtattttctataaataaaatcataaaaatcataaaaataatatttaagaaaactttacattggtggcagtagaatatgtgatggttttttccgttaatatgtgatggttttttccgttcagatctctaacccttgttcctttctgtcacagagtattactaagatctgaacctggatctccttagatgatagaattcttcacaatcatccacactataattgaatattgacttgaattgcgtgggcaagtaatcaactcactataagactcaaaaatttgaagaagaaagagaaaggaattcaaattcaagagaggctctttatttttctgagttgtctcacaaactagtgtgataagcttatgttgtcaaggttatcagtataagagcctattattatctatttatgggatttcttctagggttagaatttaaattatatagaattaaaaaagataaaacaatggcttaataattcttttaagtggtcgactatatatgtggccctataggtttcaattttgccatttatttaaaaacttatcttcttttttttcacaaatgtcatatgttaactctaattcaataaatatcaattctatctatttaataattaattgtaatctatttaataattaattataattattaaataaaatttttatttaatttatttattaattagaccctataaagtctcttaattaacaaataaatcttaaatcttctttttctactcaattaagcccttgcttaataaaaattcataaataaggcatagtctagtttataattctaattgattaattaaaa

SEQ ID NO: 357563 - DNA, 654 bp, Cannabis indica
agatcctggtaaaataatatccaacagatagtacttaagccaccatacatttattgatatccaatataatactaaatatattgataccgctattctaatgtaatctaacaggcttaacaaacatgtacgctaaatagttcgaagaagaaatagcaagctcccaaaactcgaaaagtcccaaaagcttggggataaatgttatctgcattcccagatgcttaatacgtggaaatcacggaagggtgccactatgtactatttgcagttggtgtgtaccctttgtttaatagggtcatggaagaagtagtattctaggaggaaccaacaatcctctatgttaataagaatgtttttgtaggggtctttgtttatattcctaaagatatttatatcttgattattaactctgttttttttggttggtctttagttttgattgttagtcattgaacataacctgtcaagggagagaatgttagtgttattattttgttgacagtgtttgtttctgttccaatgtctagtcgtatctggtatttttagttctgttatatctgcactagcgttctgttacgtgagtttctagttaagtattagttagtgccaggtggacgttattttgttggatatataaatagtcggtttctgttagta

SEQ ID NO: 357564 - DNA, 693 bp, Cannabis indica
atgtgtattgattactgggagttgaacaagcttacgatcaagagcaagtatccttacctcaaattgatgatcttttgatcaataaaggggaagacggtcttctccaagatcgatcttcgttcaggctatcatcagttgagaattcgagagaaagatatcccaaaaactgcattccgtactcggtatggacattatgaatttcttgtgatgtcttttggaatcaccaatgcctcggcggtattcatggatcttatgaattgggtattcaaggattacctggatagatgtgtgatcgtgtttattgatgacatcttggtttattctgaatcagaagaggaacatgaattgcatctcgatcggtattgcaacggttacgaaatcccaagttgtatgctaagttcaaaaagtgtgaattatggttatctcgtgtctctttcttggggcatatagtagataaagatgggatcatggtggatccagccaagattgaagctgttcaggattggccaacaccaaaatcggctactgaagttagaagctttttgggtttagctgggtactatcgtcggttcgttgagggtttctcaaagattgttgtacccttaacggagcagacccgaaggaacttaaagtttgtttagactgatcgatgtgagaaatgttttctggagttaaagcaatgcttgattaccg

SEQ ID NO: 357565 - DNA, 516 bp, Cannabis indica
ttgcgtgttgtcttttgtagatgaacccaggtgagtcttgggagcccgagcatcaaatcgaccaggagctgcttcaacttctgcacgaagtccatccttgtattcgtgctaattctccttcaagagaaggatattcttctgattccgtacccagccatagaatgatggctagtacaaagaaaactacgcgtctggcagacgcttctaacccccaggtggctcggcttgccactctgcccgacgtcgaacaagatttggcggtcccaatggaggaggactgtgtgggggacgccgaagttcaggaggttgaggagctggacgaggcgcgtccgggcagcccttccattgctgagggagaggaagagattgaaccccctaactatggggagtacaatgaggctgggcaaccagttgatgcttccttgttgagggcgttgattacgtcactgaggagtttgctgtgccttgggcgccaggtgggtgagtcctccatccaagattttgttggaaattatt

SEQ ID NO: 357566 - DNA, 539 bp, Cannabis indica
acggttcagtaagcttttattgctttagtagcttatatatttattatgaaataagaaaagcctgataggaagcatgttagtagcctgatagtagaataggcgcatgttttgtttttaatttccaaattaagcggcattagtaagctctctttgatcatgacctgatgtgccaactcttggtttcgcaggctgttcagactagatggacgccacgcagaatactagaagccagggcaactcagtagggacaaatcagggtcagggagcctagtttcccccgcatgctaggggccgtggtagaggtcccaggggcagggctcgtggtggggtgctgataacccgccacaggctgcccaggatgctcaagtcgatcaggaagcccagaattgggacactaggtttgctgaaatgcaagccaggatagaggagaaagatcttgagatacagacattgaggcagcagggggctcccgcagtgcctgtgacagaagttccagtggcacccgcccctgctgctcagaccgagatagtggtagcggc

SEQ ID NO: 357567 - DNA, 520 bp, Cannabis indica
gaattaaaaaaagaataaaatattgggcaaaaatcaacactagggctggccatacaaaggaccaatatctagttacaattttgccacttttttcaactacttaatcttctttcaataataccatattttctaattcaatcctataaatgccaaaactatttatttaagaattataattaattatcaaataaaatttccatttttattatttatttattagaccatgcaaagtctcttaattaataaattcatccgaaaaaccacttttcttcacaattaagcatttgcttagtgaaaattcataaataatatattgtcttattttggaattataattgattaattaaaatcaattggctaagtctgccttactagatttgcgttcggatctatgttgagatggtggcacaatacggttggatctattccttccatatcttcatgccctcatgcgaacacatgtagattactcgctcgaagctacttcaactccttcttaagggtttcaaggagccttttt

SEQ ID NO: 357568 - DNA, 488 bp, Cannabis indica
tggtgatttttgattctgtggtttctgggtcgtgttgttgctttagaaatgttttttggggtatttagaacagctctggaagatttgatatgaattgggttcgatttgattcagttatgattttttcaatgtttcctgcgaggaactggaatttcggatggatttcaagaattcccagaaccaaaattccggttgggaaattttcaggaaccctagtttttctcgtttttatgttattgagggtattgccatgctttttatcgatagggaaacttttagtttctagcttaagtccccgagaagtgatttagcgtatcacttaatagtgttgtgatttttatggtttaggagcctataaaccgctgtgcagttcattccaatcaggttgaccggcacacgtgaattcagaattgaggtaagattagtataacagtatgcatatataatacatgtttagcgtgcatgttaggaagcatgttagattacat

SEQ ID NO: 357569 - DNA, 170 bp, Cannabis indica
aaatatcatttatacggagcttagtgttttaaggatactaagcaagggcgaaattgtaaaaaaaagagattctaggtttatttattaatttccttatttggcaggccactatgcaagccttttaccatttatttttccatcttcaatttcgaaatagccttgagtgaatg

SEQ ID NO: 357570 - DNA, 637 bp, Cannabis indica
tctaaaatttaaagtcaaagacttaaatttataccaaataatcttgagttttattcaagtttgtaccaccactactaatctaactctaaattaggttgcctatagtaaacatatacaagtaggagattctataagaccgagaatttatatcatttcgatatagaatatttggaatatagtcatatgcgctatttaatttcatagaagaaaataaaatgacatcattaccaaataatttataaaccatctattcaatgatatactatctaagaaatttcttaatgaaaaagctaagaggaaaactaaaggataatttcaattaaaataagaatccaatgatatcccgttgaggcgagagttaaaattattcttattttataaatttcttcattgtttcatattgtaaacactagtctaagttgtcatctttggatgtacaactagatgttgcatttacaaatatttatctaatcaagatctaacactattatgtttgtctaatagatgacaatcctttggatttgtcccattaaaataacaaactaagttagtcaacaatgaagattcaaaatttgtactacaacatcaataacagaagacaacatgattcaatataaattcatacacattcaaaaat

SEQ ID NO: 357571 - DNA, 843 bp, Cannabis indica
ttccttttttctccttcacaggctgaggaatgaaatccttcgggtagagcccgtactccacaaagttgtcctcggaagtcaacaaagttatattccaagcagcacccgacagctgagcaagcctttgagctctatccctaagagcaagtgtgaagggtgagcagtgatatatagggatctgctggaaccgagtgtaggtggtgcccatgccataaaccatgaaatactcgtcaacaaaatgtcaaattttgctaacgaccttttcctcggtgcccgtcaaccacttgtagtctgggtgagagaagtagaagtatcccgacttgccttgcttggcagtacacttcaaatcaaaaaaccagctaacctcatggggagaaggcatatcccatttctggatggcgtagagaatgaacagggcagacagatacttgatgcccttgggagtgaattgggtcggacaaagacggaagaagtctaccaccttcctaaagtacgggtgcaaaggcagcaatgccccttgtctagcattagcacccgaccaggcacatccccctcttagggtttgtggctcgattgttataggtaggaatctaacagtctaacttgcccaagtagccaccctggtcgagatcccgtaaacgtgcctcggtgaccttggatggagggctcacccacctagcgcctaaagcaccctgcctccttttaggaaccgcagtagtaagttcctcagtgacgaagtccacgccttcgacctagacatcgccgtcagcgtcaattggctccgcagcctcattgtatcccctaaagtttgggggtgcagcctcctcctcttcacctcctcga

SEQ ID NO: 357572 - DNA, 654 bp, Cannabis indica
taggagggcccaacaggatggtcctagtgctcggaccacacatgcccggagaactcaacccgacattggtcctggtacgtggacaacgcgctcgaggtgaactcaccgtgggaatggtcaaaatcctaggacgagggatgaagagctcaaccgtgcaggtgcccaatctgtgggagaaataacttatgaaacggaaagctgccgcctgagacgccgtctggaagagacgtatcgtcgaaacactgagttagaacgagaggcagcttcagccagggcgacgcaggagacgaatgctcaaaatcaacctgaacctggagtgagaagactacgaggcagaccttgtggctcacgaaccaggagacaggaaaaggctcgagaagaaaacctcggggaaaatgagacaccccttgagaatcaagataaatagcctgaaaggagacaaccaaaaactgatgaacgagaaatccctcatgaaaatgaggaggatcttggaactcagccgggagtacggagatcacctgataggaatcacctgtgttcttcccaaacccatagagcgaggactcgtacataccctgatgggagaaatgttgggttttatgcactcaataaaactctattttaatgtaatcaagattattcaatatcaataaa

SEQ ID NO: 357573 - DNA, 930 bp, Cannabis indica
tcgatcccaaacccaaactcagaaatcgaacctgggacctgaactagaaccagaccgagacccgtgacagtgatcgagatcttgactcgggatttgggtaatggggcctagaacagaccagtagtcggtgtctagatctggggctcaaactaggaccgaaacccagacgaagaaccaaactcgaacccagacctagatctgggacccaaaattagaacctgaacaagaatcgtcgaaccaggaccatagaaccagactaggtcgtaaccagaacccgaccccagacctagaactgaacacagacctagcctcaaacccaaactgagattagaactcgggcccgaacatggtcgtgtacccagaccgaaactgagacccagacctggacctaaatctgggactcgatccaaacacagacttgtacctagatagggatcccggatacgaacctggactcggaccaagaagaagactgggattgaaatgttggacctagatctggacagagatcctcacccagaccccaacttggaccagcacttaggacctgaacttttacctggacccgaacctccacccagatcggggtccagacccggacacaaacccaaacacagactcggacccgaactcaaacccacacctagaatcagacccaaagctagacctggacccggacacaaactcaaacccagaccaggatcagaaccaaggacttagacccaaaactgaatcaagactcagatcttgattggaaccatgggctcgaacctaacctagaccgagacccccgatgcgaatccacacccagaacctgatctggaccaaaacgtaaatccagacccaaacccaaactcaaacaaggacttgaactcaatcccgaactcaaaagtggacctgaacccgtacgctgtgacccaaaattggaac

SEQ ID NO: 357574 - DNA, 582 bp, Cannabis indica
tttactttttaaaatttattaatcttatattacaaaaagtgaaccggttaccaatatttttatcctacatataacttttatatagttttgttgttgattttatgttgttttcgtgctattttttataaatatatttataaattatataatatatagattttttttttgaaaatatataatatatagattatatataataaaaacatatatatatatataaactctcttaatcgagttgatcgggttagttttgtttgattggacggattaatattatttttaacccccaatataaagattgggcgggttatattttcgtcaagtttttcggtttacatttttcatcgaattatttcaatttggtttgagcgagttgttcggcgggaagatttacaaaaatttatgtacaacactatccttaattaaaaatactaattagtcaaataataataataataataataagggatattggcggctaaaccacctgaactttacggtttgtaacacttaaccaccaaaactgaatttttggcggctaaactacctaaactccacttccgttttgctctgcacacctcc

SEQ ID NO: 357575 - DNA, 574 bp, Cannabis indica
cagaaaaaaaaaaccggttaaaacagacatacactgacattcgatatactttgactcgcaggcatgacaatcatctcagaccggcacaaaagcatagagaaagcagtagcaactgtctacccaaacatattccatggagcatgcatattccacttgcttaacaacattaaggtcaattttggagcacacggagaagatcttacattaaactttgtcaaagccgccaagacatacaacacgaaatcatttgaaggatacatgtcagaactcgacaaaatagacagcagaatcagaccttatcttcagagaataggatacaaatattggagtagatgccactgcccgaccagaaggtacacaatgatgacatccaacatagctgagtcgataaattcagcaatacttgccacaagaacactgcccatcactacaatgatggagagtcttcgaagtttggtacaaaaatgggtttggacaaacggcaacgaagcacatggaacattcaccaaagtttcaacagtgacagaaaaaatactcagagacaactttattcaagcaagaaaatatgaggtaa

SEQ ID NO: 357576 - DNA, 541 bp, Cannabis indica
agaggaacccaccataacatttaatgatgaagatgctgtgaagattaatttctcgcacaacgatccgttggtcgtggaagtccagatagccaaaaagatggtggcccgaactatgatagataatggagcctctgccaatatcttgttcaaaacaccatatgaaaaaatggggctctagctcaaagatttactccttgtctccagcccgtgtatggtttctccggccatagtgttgcacctctagggcaaatttgcctacccctcactattgggcaagctccaaagagcataattgtaatggcacaatttttgatattggacattctttcagcctttaatgtcatgttaggctgaccaaatttatatgacctaaaggttgttacgtcgatattttattcatcccttaagtttccaatgaagaatggggttgggtgcctgagaggaaatcaacaagttgcacgggaatgttacaatcttgccctaaccaaggctaaaaggaagtatcctctagtcagagttcggacaagggaaaagacattgc

SEQ ID NO: 357577 - DNA, 573 bp, Cannabis indica
ttgtatttgtataaataagaatttactcaattggaataaacaacttagaaatttccattcagtttctctttctctcttcatattcttcttttcttcttactaaattatattattttataacatattgttattttattgtatagtaagaaagttaatcttaaaatatttggtatgtctctacaaaaaataattcggagaacttataagagcaccaatagtgcttcatttcaccaaattggtgtataattttcacacaatttaattttaatggtacactaaattaatgtacactgaattctatattattaatagttagattttgagtctacaacaatttatcgatagttttttttttttttttgtcattatagctctgattttaattttcttaaaaaattaatcttacatttttttttctcaaattaaatttatcagaaaagtaataattaatttaaaacactaaaatagtgaaaaatacaaaaaataacaataacaaaaaactaatattaaataaataaaaataatataacactatggtatgaaattttaaaaaaaaaccacataaataaaaat

SEQ ID NO: 357578 - DNA, 1624 bp, Cannabis indica
  modified_base (158)..(158): a, c, t, g, unknown or other
  modified_base (331)..(331): a, c, t, g, unknown or other
  modified_base (345)..(345): a, c, t, g, unknown or other
  modified_base (351)..(351): a, c, t, g, unknown or other
  modified_base (357)..(357): a, c, t, g, unknown or other
  modified_base (371)..(371): a, c, t, g, unknown or other
  modified_base (443)..(443): a, c, t, g, unknown or other
  modified_base (553)..(553): a, c, t, g, unknown or other
  modified_base (654)..(654): a, c, t, g, unknown or other
taaaaaaaaaccgggggtttttttttttaaaaaaaaaaaaaccccccggggggttttaaaaattttttaaacccccccggggaaaaaagttttaaacccccggggtaattttaaaccctttaaaacgtattttttaaccccgaatttttttaaaaacncgttaaaaaaaaacgttttctaaaaaagggttcttaaagtttagaaacctttttaaaaggttaaactaaaagttactagaacttcggaaaaatttgtaacggtacgtcggaactaggtacattagggaacttaggactactgaaaaccctttgaaaaacttttggggaccgtntccccggtaccggntacccncttacncttactatcgttanaacgtctacgtactacagtaacacttttacgaaagaggtaaagtggaagagggacaacggtgaaaacccggngaaaccccgtcaaacgttacacgtactagactcgaggtaaacgtgaagtaaacgctaaaagacttaagcttaagcggtaactggggtaacttacagtactctttctactntactatattattaagttaattagtaatcgttaattacttagtttttaccgtcttactattactatattactattagatttgctatattactatacacttanaattataatattattattatttaggattaaaacactttatactcaaactataaaaattttaagagttaaaaatatttaaatatatacaagaacgatgggtttacgtttactatacaccaaattagtttttgagatagaactccacgattttttgtagtaagtataaattagaatttagatgtgtatataataaataaagtaatagtattatataagaaaaacataattggtaatgttaaaaaaatggaagaaagatggtaatcttagtgaaaaatattagaaaaggtggaattaataaaaaaaaaatcacgtgactttataaagaaaataaaatagtaaaaaaaataacaatttttgaatttaataaattgtacttgtgagtaatgatgtagttgtttttaatagactatttagactattttttaatagaaagaaacaattcaaatctttcttctaatttataaaaaattatcatttaagaaaacaaagtagtaaatcaataacttttctgaaacgagttttaaaatgatatttatcatttgtaataatagaaaaattatatttacacttggctaattatagtttttataatgtattcttagtgatgaatttatatattttgtaattagcacaaataccaataaatttaatattcattacaaactaagtactcgtctttttaccctataaaatttatattatttttttattttataatatagaatttacaaatttaaatgaaacaaagatatttgttataaattttaatgtagttctataattatagattttttttcattcaaatttttgtcttttttgtttagtttttaatttgaaaagtaattttaaattgaattaattattatttatttaaatttttaatttaaaaaataattttaaattaataaattattatcttatttaaaagtttttttttctttttggtttaactaaatattatagttttttt

SEQ ID NO: 357579 - DNA, 565 bp, Cannabis indica
tatcttcaatattgttcggattgagacggaacttagtttttgcaatttttttgcgtctacaaatacaatggtgcaatcagattggtgaaactatgttatttggtttacggtttggtcgtatgtctacagagcaaaatcatgtatgttcctgatagaaggctaaaagctcagaatgccctttaagggggtaccctagtgtcagctctcaatcaccccggcaccttcgtgctaagtgagctactactagtcagcgagactagtaggacgggcatatgaggaccacgaggggactcatatgtctctatgagttagagtactcatggacattatcaggctgacccggtagtgcatttaagaagttgctagaggttaacaggtacgtttccattagcttgtcggtatgccacttgcacgagatgtgttccaaacctcctagagatgttgtggtgcgccttcgccatgagtatcaacacgagatgacacaagtagtcattcgtgggctagtttgcatacgggcatggtacggatgcaccatgttggaaagggacagaggtctaatgtatgc

SEQ ID NO: 357580 - DNA, 522 bp, Cannabis indica
attagagtctccaaatcttgagtctcaaaatcatgataaactcgaagtagatgtaagtcattatcgctgaaagggaccgaactactataaaattgatgtgttcatcactctttttactagtttcatattaacaattgccatttatcgggataacattgttattggtcatttcacgagtcaataataatatattattttatttatttatatttgattttttatttaaattattatataaattaaaaactatttagataaaaagtaatatcaaacaaggtttataataaatacattattaacgtgagggaagaaaaaaaaaaggataaatggcggcaaaacccctaaaatttttattttggtttcacttaacccccaaaacccaattttttgcggtaaaacccccaatactcgtattctattagcaatttaacatttctgtcccttttaggtgttaagtgccatgttggactggacacagtgtacacgtggcacaatttttttggtccacgtaaaaaattattt

SEQ ID NO: 357581 - DNA, 670 bp, Cannabis indica
agtaaaaatgtaaaaaataccgcttgaaagtatttttgtacaaaaatggcaaaagttagtataccatgtgaattttcctaatttaaacaactattattaattgaataggcccaatactaattgggcctaaataaaatctatcaaatatgacagttttatttagcaacatagtcaattttaattacaaaaattaaatgagctccctctatgcatctaagaccaaaacaaacatataggcttacacagacacactgatttggatggatcctatcatgttagtaggtttataaacagatgaaagaagattgtaaaattaacctgttacaaattatttatttgacctattgacaatggaaccattggttaaaatcaaatcattggatctatcaacaagttaaccatagaaatttagatcaaacaataataggttttataaagcaagttttaataataaacaatatataaaacacacacatgcaacaaattggatagttggatataggatttatttcattttaattaattaaataatttttgaaaaatctaaataattaaattattattttcaaaaaatataaatttaaaattaaataatcaatttcaaaattaaagctatatatatgaaaaattaagttttcaacaaacctaaatatctatttcaaaaaaatgc

SEQ ID NO: 357582 - DNA, 762 bp, Cannabis indica
aaactgcctctttcagaaagttgagcttccctttctctatatatagccgcccactctcttcctcttgtatgcttgaaccatacatgaaacacacacaagagagagagatacaatttcgaactcctaagtgagagagtagtgcccacacacagcaaacagtacctcaatcgtagattggaagactgtgaaggagacatattattccgctgcaatcaatgtaaggttttcttaactttatatgtgttttccttttatcgcattagaagttcatatttaggttgttaatcaacatacttgtgagtagatctacgatcttggtaaaattaattccaacaattgtttccatgggttcagcttctatccattttaatttccacaataagtggccggccatggtgtgataatgggccccacttgattttgcagttttagcaaattttatttctattttctcaaaaatgcaaattttccaattctaaccatttaaatgccaaaactaattatttaataactaaaatagattattaaataatattgtcatttaatttaattattaactagacatataaagtccattaataaataaataaacctagaaaactcttttctttacaatttcacccctgcttagtgaaaattcataaaattagacatagtctaactttagaattataattgatcaatcacgaatcaattaatgagtcttacaagcagaatgttctcaactagaatggggaccatggatctatatgctgagcttcc

SEQ ID NO: 357583 - DNA, 1212 bp, Cannabis indica
caacagtatctctgaatatataattcttagataatagtatagtcttagctcaactgctttttgaccgatctcttgcccagtgaatatacatcactatttatagggctcgtaagcttggagaggaagagtttcccctctcgttacaatgcgtataaacagaaagatcgtgggatcaatgctgaatacaaggatcatgggattgaggctgaatacactgatagtgggatcgtgtgtatgccatatccgcgtaaatcgatccctgagttatagggattgtgttgatgactcatgatgcgaaagctgaattcgctaagtgttggttgctcggcacgagttgctaaatatcttgctttgggcatgccagcgaggcatcttgctcagactatacttctcgagcagatgttccaagtgggttccacgtgtcaccattcatgtgatgccacgtcagagtgcaaaaattgagataacactaccgttataatgtccgttttcagtcttttactttagtcaaatttttaatattctcacaatttttaataatttattaatgtataagtattaatctagtttataaaattacacacgtgacgtccctatgcaatggggcattacactttgtgtctctatagttattattgtttaacatgtgacagtcataagcaaaatctaatcctaaccatgtttgttggctaagtcaatagtcaacactttataagccttcagaaatacaattacaaagttacaagcaaaaacaatgtccactctactatgaaacgaaaaagacaatcattgtcattgtagcacaaagacaattacaaattctagttagcagtaagcacccctaatatttataacatgtgcatattctatacaaaaatataaagatacatttatcatccacaaattaccacaactaattagactatattgaaactgtttatgttagcccaataagaaaacacagccaacaaagaaaaaattagaaaaaaataaggcatttcacaatcatataactcgacatttatcttctataatttgaatatcctgttagaattctttaacactcataaaatatgcaacaacaagattcaattccatagataaacataatacatataattataaatgtataaccatagatctaaagaatacctttgtttattcaaagagaagaactcaaatggcggaagcgtaccttaatccatagatagt

SEQ ID NO: 357584 - DNA, 556 bp, Cannabis indica
aaacccatttttgtaccaaacttcgaagactctccatcattgtagtgatgggcagtgttcttgtggcaagtattgctgaatttatcgactcagctatgttggatgtcatcattgtgtaccttctggtcaggcagtggcatctactccaatatttgtatcctattctctgaagataaggtctaattctgctgtctattttgtcgagttctgacatgtatccttcaaataatttcatgttgtatgttttggcggctttgacaaagtttattataagatcttccccatgtactccaaaatcgaccttaatgttgttaaacaagtggaatatgcatgctccatggaatatgtttgggtagacagttgttactgttttctctatgcttttgtgccggtctgagatgattgtcatgcctgcgagtcaaagtatatcaaatatcagtttatgtctgttttaactgttggaattattttaccaggatctagatttactaacaagtatgttggttaacatcctaaatatgaattctctaaaacaatgaaataaacacataagagt

SEQ ID NO: 357585 - DNA, 477 bp, Cannabis indica
atactaaaaaacgacatgtcgttttccgcataagggaaaaacgacacgtcgtacggagtgggctcaaaaactctctacttaaaaacgacatgtcgtttttcacataagaaaaacgacatgtcgtacggagtcgtctcctacctccaaccgggtcagttttgacccgtttagcgcgggtccgctcgacccgacccaaaacacgaccataaaactattttccgttgtccaaaaatcatgaaatcaattccaaaatgatctaaatgaaaaaattaagagatccatattgatttcaagcatcgaaaaattcgcaaaatgtagattttaatttcataaaacttttcgggtccgaacgaaatttttccaaaaaaaattttcaatctcagtaattttcaaattcctttatcattcataaaatcgatctaaatattatatgaatataataacgaatataggattcgaaataaatatcaaaattga

SEQ ID NO: 357586 - DNA, 600 bp, Cannabis indica
tacgatcaattctcataacttgctcatgaattgattgtccaacaatgaagtcatcataacataagccagcattctcctcatcctcttcagtctctacgaacctcctccctcgtgttgataaaacagtagaccatttatcattagccggatcaaaaatgtaaaaaacttgaactgcttggctagccatgatgaatggatcattcttgcttcctctcttacttaaatcaaccaaagtaaaaccgagctcgtcagtttttcctccaacattgttgtcaacccaagaacatttaaaaagtggcattcgaaacgcaaaataattgagctcccatatttcttcaatgaccccataatacgtcatagtacctaaaacatagtttctttcttttgcacttgcaaagtgcgtagtttttgtgacgatacgtattccactattttgaacctctcgagcatcatctcttgactttgtatggaaacgtttaccccttacaatatatgctttatgctttgctaccggaaaagttggtccaagggcaatacgactcaacacatcagatactccatgatttagttcgttcaactttgctataatggtattcctta

SEQ ID NO: 357587 - DNA, 501 bp, Cannabis indica
aaatattaaattaaaatttatatttacagttatctaaattagaagttttaattaaataagtatatattaaaaaaaatagattaaaataagtatcgaatgaaaatacaactctttaaaataatgagccttagttataaggatattggatctccattgttggtcctacatagttaatttgtttttaataaaatttcgagacgctagacttcgtccccctaatggatggttattcgttgaagcttttaacattgtaacgatctcgaaagataagtcttttgtaagttttcgtctctattagactctccccaacggtgactacttagagataaatttacgaagtatgatacaatggtgaaagatcataaaataaaaataaccttgactctcgcctaccgggacaacattggattcttattttgatcgaatgaaaggttgctagaatggtgtccattttagatgacctgaactctgttcaatgaatgatactttgactctcgccta

SEQ ID NO: 357588 - DNA, 557 bp, Cannabis indica
acccacacaataaccgggacctggacccagaattaggatatggacctgggaaacagaactaggaccgggacctaatacccgacccatacccgaacttaaacctctgacccagctcgtgacgccgcaccagaaatggaaccagactggggtcccgagattgggatctggatctggacccagggcttgaacaaaacccgtagtcggtatctggatttaggacccagccctggacccaaaccctaataagcacccgaacccacaccaagaactaaacccactgccaaacccaaaagtggactcgaacccgtaccctgtgacccaaaattggaaccaaaatcggaagttgactgggacttgaactaggacttggacttggaatcataactgaaattggacatatatatgcagaaccgtaattggcccaggacccgaactccaaataagacctagatccgaattgttagccgcacccagatcccaacccaaacatggactcgggacccgaacatgaacctgaactctgacccaaacatggaaccagactagggacacagaac

SEQ ID NO: 357589 - DNA, 540 bp, Cannabis indica
ctctctctctctctctcgtctctaaggctatacctttctctcgttagagatctacctacttgatccatgttttgtaacttaataaagagctatatcagatcccacctatagtgatctgaatagtattatctttaggtatcaatacaactaaaaggagagtaggtcattatccgctaactaaaggggtcgaacctctataaatatccttgtcttatttactttattgttcttgttgtgtaacacgtggcatacatcatattaatacgacccatgtcggttgatcaaattttaaggtgaacaatatataacctggattgttccaaactcattataattcattcaaattttatcaaataatatttttaattttattttttctataaaattaaactaaatatagtatttatttaattactaaaatatcatgtatgtttatcatggggtaaggctgcactacaaaaaattgttacttttagtgacaattttttagtcacagcataatttttttgtgactaaatgtgtgactaaaagtcacattta

SEQ ID NO: 357590 - DNA, 844 bp, Cannabis indica
ctaggtaacagtatacccccttatcggtcctgaagctagtgcactcttgatccgctacgtgtatttttatttggttgtaaccggcgtacgcgtccatgaaggacagtagtttgaatccggaggtggcgtctaccatctggtcgatcctgggcagagggaaacaatcctttgggcaagctttgtttagatcagtgaagtctatacaaactcgccaggtcccattaggctttggcaccaggaccggattggctagccattccgggtagtagacatctcgaatcatgccactcgttaatagtttgtccacctctttctctaaggcttcggcctttactgagtcgaggggacgtcgtttctactggactggcggcatgtccgggttgacattgaggacatgggtgatgacgtggggacttatgccagtcatgtcttcttggcaccatgcgaaaacgtcaatggcacccctcaacgtctttattactttttcttttttctccagttctaagctctttcctagccagagtactttggtggagtcgaggtcgcacaccgacacttcctagacgtcctccatcggttctacaatttttttagatcccgcacgaggatccaactcatcttcttcagccatttccgactcaataatttctcggaccatcagcacgggtaggtgggcagcaacgttacagcactgcctggcctccccttgatttccccttacagtccgtatcccagcttcttatgttgggaatttcaagcacaagtgtcgtattgacgtgactgcaccaaagtccaccaaggtcggtcggccgaggattgtgttataagatgttgggcagtccac

SEQ ID NO: 357591 - DNA, 500 bp, Cannabis indica
aaaataatttccaacaacatcagcaagagactaattgacactgaaagtcagtatccactcatggagaagttgacctataacttgctcttgccatccagaaagttgaggccatacttccaagcacacccaataaaggtgtacatcgatcaaccattacggcagattttacagaaacctaaagcatctggccgactaattaagtgggcattgaactttgcaaatttgacaccacacatcaaccaagaatggccatgaaggatcaagcccttgcaaactttgtggccaagtgttaaaacacacctcttgaaatctctcaagatttaagagaagagcgagagccagagaagaagcaagagtaagagcagcaataaaaacctaaagaattaacatggatactccatgttaatggaagctgcactaaccaattgtccggtgcaggcattgccctcataacacctgggggcaatagttgaacagagcaatcaaattcatcttcaagg

SEQ ID NO: 357592 - DNA, 1538 bp, Cannabis indica
agatcctggtaaaataaattccaacagtcttactcatcgatcgtgtcctactaatagactttgtctttgagtggctcgtagatttaatggttcccatactttcttgatcattagctcgttgagtactttctcctcttcgagttgatcgacggtgggtacttgacctcctcgaagttacacttgcttcttcacgctctattctttccccttgagagcagtttgtcttatttccccatcagggtctgtacgagtcctcgctctatgggtttgggaagaacgctggtgatttctagcaggtgacctccattttcccggttgagtcccaagatcctcctcattgccatgaggatttctcgttcatcagtttccagttgtctcccatctcgctattcgttctaatttttagggggtgtctcattttccatgggttgttcttcctgggcattttcctgtctcctggttcgtgagccacgaggtctgccttgtggtctcctcactctaggtttaggttgagtttgagcattcgtcctctgtgccaccctagctgatgctgcatcacgttctaactcagcgtttcaacattgcgcctcttccagacggcatctcagacggcagttttccgtttcataagtaccttttctcatagactgggcacctatatgattaagctcttcatccctcgtctcggggttctaaccactcccacgctgagttctcctcgagcgtgttgtttgcatactagaaccaacgtcgggtgtggttctccaagaacgtgtggtccgtgcactggggccaccctcaggttgattcctcctggaacgggtggtccatctggaccgcgggttggtagacctcctggagcctatgggctctttcccaagaaggtgattagtttcctcatgtggagtgttaacattttctggattttcagccatgaatgaggtggtttttcttcagaagaagggagggtttttctaaactttttcatagaggctctcaatgaaagcaccaaactgttaacgcaaatttttgttaactaaatttgagcctcacagcagtgatttcacacagaaaatacgaaagctgtaaaaataaaaatttgaacacagagttttctacgttgttttgcagttaaaattcggcatagtccacgagtcaatcttattcatatttttgattcttgtttagggccttccttgtatgagttttgtcgtcccctttttgatcttctttgtcactatttataattacatagtggacagttaattaccaagttgactgtaatatgtttacaacaatcatccctaaaatcatgggatttgactacatatggtgtaatgtaaatgcagtttatgatttgaaaatcatatagctgtgattttcctgcttttactaggtcaaaatgatcgtgtttcaagcacgtctttaattattgtttctagatttgtcgcgagagaagcttagtttcagtgatctcaatagcaagtcgggattatttttccttctgaggtcaacgatgcatgtcttgtgtcgatcgc

SEQ ID NO: 357593 - DNA, 689 bp, Cannabis indica
agaatccttgccagtttgaaggtcttgtataaaattttgaagtgggacgatccctacgcctgtggaaatagagtatctttattctataaaggctgttccaacgaggaagaatggcacaaggggtttctaatatctcggtaatcattctagcgagcctaaaattattgtaaacttgccaaacaaaatatctttcaaagataacttcttttggacaactagcctctccccaatcggcacaaccactttctgcaaaattcgtaagtgattgttttcattaggctcagtcagattaatcctcttttcattctaagtttttttttactaagcttttgttttctatagccctctcgaaaagacccgtcactactcgcgagatggtcaaccggcacaagttcctgctgactattccccacagccttaggtcgtgtgacttccttctaaacgaggccaatctgagatctgtgggcctccttactgacatggagtttacttgtgattataaatttcccaagtattcttcttggcagcaggttcccgttccagagggggataaggcctgggatcgcgtggctcaggcacaataccttcaaaacactgtccctcgagaagccagaggagcaacctgaggtaatcaatgtggttggtaacccacaatactgttgggttttatgccctaaataaaactcttt

SEQ ID NO: 357594 - DNA, 496 bp, Cannabis indica
aatcattgtgctgactaaggatctcgaggttgctgatcgttttgaggagaccatcgagatcttatctgctgaggtaaacagtcttcaagatgagaggacttctcttggagcagttcttcatcggatgaaggaggaaaaggatgccaaggagggggagctttcggccgaggtggacaggttgaaggagaaggtcaatgccttggcgactgccggtctcgagctcttctttgatttttggaaggctaatcctcggaccaactttgactacttgggcaatgctaaggacatgtatcctgagtagtgcgcggcccaagttgcttatggtggaaccgaggcggctgcttcaacctccagttacactgctgatgctcttcccgctcaaacaatagatcctcctgctccagttggcccagaagaaccgaaccaagagcctgagactccagctgtgtaagcatttctctttttatctcctttttatatatatatcttattcggc

SEQ ID NO: 357595 - DNA, 921 bp, Cannabis indica
tatttagggcacaaagctcaacaacttcgtcgtatattctgttactgtcttaccctcactctgaaccagctcggtaaattcttttcgcttagcactgtggactgcctcattatattacttggctttgaacaagtctcggaattcttccctggtcataacagtgacgtctcgggtgaaggacactaattcccactacacgagcgcatcttcctggaactgaaaggtagcataagtcacccggtcatttccaacgacccgtcatgaaatttcgaatcctttctatcaccgtgagccactactcagccttcattacatctgggcctcctaaaaaaactagaggtgcctgcttacaaaatctctcgtatagtggctccatacggttgccagcaacaggttattctactggtacagcaggaactaaagcagcctgaacttgtggtggaggcactgcaggaggaccttactgcctcaacctcagaatttctttctcttgttggcgaatacgatcttgcatttccgcgaatctttggtcccaatctggaagagcttgaggtgtattttcatgtcgaccgccttgaaaccttccacggcctatgccacgtccatgaggattctatggaatttaatttccctgaccgcctccggtctcgaccctattaccctgactccttgtatttcgttgggcgtccaattagtaggacttagcctgtgaacccataagttaggcaggtcaaatagcaatcacaaagactgaatattgctcttatggattttaaggcaatgcattaaaataaataattagaaactattatgcttcctaaaatgctttactaatcaagtacaatactaaacaagtaaaggcttactgaactgtgagctgagcttttctctgatgatgattgtacatgtcttgacgatctt

SEQ ID NO: 357596 - DNA, 686 bp, Cannabis indica
tattcattaatcaaaaatatcttcacattatatttcattaaaatataccttgagttacccaatataccatcattctctacttaagtctagcatataatttacattaacataaggggtctaatagggacatcatctataaaagtagatagaggcggacccacattgtagcgagatgccccctgaaaaaaattgggaaaaaaatgtatatctattttagttagttacaacatatatttgtattaaaagatgatatttatagacataatagtaagctaggtgtaatagttaaggtagattattaatatgttagaggataaaagttcaaattccactaactacattaaaattacgcccccctcactataaattctgggtccgccaatgatataaaaatagaggtaaaatttaaaacaagtaaagtaaagtgagtgtacaatgtaatttcttcaagaattttggcatttttacataaatatgttttttttttcacagaaatttaaatttttaaaaatactaatttaaagttttaaaattacaaaaataatatttctcaataaaaaaacaaaaacacaagacctcgaccgtattacaataggcaaatcaagcagagattaactactcaatttgtttttgtactaaaattattttttactaaattttaataaggaaatttgattttctatgct

SEQ ID NO: 357597 - DNA, 512 bp, Cannabis indica
atgccttgtattttctgatggctgttttctaaccacactatttttggtctgtgcagacatgtctcggtagatgcttgatgctctcaggaagaggatgggcggaagctctggcgcctctcctctggagaagacaccttttggagaggttattgatctttccgaggagctgactgctgcaaacccttctacccccgaatctgccaagtccaaggagtctggaccaccaatgattgctgcaggcaccaactccacctttgcccgtgctgcaagaggctaaaaagggcaaggagatgctgtcccactatatgaaccggctggttcctgaggtcagtgagcaactggctggtgctgatagtgactcatctctggatgtgttggtgggcggagtcctgaaggagctcaccagggtaagtcttttttgaaacttcccttttaactttccacacttagctccatatgctgacttttttcctttgtgcaggccggtttgaagttggcttacacttactccc

SEQ ID NO: 357598 - DNA, 1420 bp, Cannabis indica
gaaaacaaccacgagccagtacaaataccttagcctagtaacaatgaagacaagtcgacttggaaactacatgtggacgagtcggctacagatcaactatctggtgcaggaatcgcccttgttacacctggggggcagcacctgcacgttgcagtcaaatttggatttaaattatccaataatgaggctgagtatgaagctttgatcgccgatctaaaactagcccgggagatgaaggtcgaacatattgaaatttgtagtgattcacagctagtggtaaaccatatatttgtaatgatagcgtatctgagcaaaatacacgacatgcttgcacagttcaaaagctatgctcttaggcaaattccaagggaagagaatacgactgctgacgcattgactcggcttgcgagtagtaatgtaaatgataatgcaaagctgattcctattcagtttctcgaagaacctagcatcactggcacaaaagagattgaaatgattgatacatccccaaactggatgacgccaatagcaacttacctcaacactaaggaactcccatataatcgaaacgaggctcgaaagatgagaaggaaggctgcacggtacatcatagtagaggtaattatgtacagacaaggattctccatggctcagatgtgttacccaagaagaagctgcacgacttttgtctgaagtacatgatggattttgtggaaaccatgctgccgggcagagtttatctaacaaaattctaaggcaaggttatttctggccaacaatgattgaagattccaaggcctacgttaaaaatttgataaatgccagagattttcgaagatacctcgagcacaacccaatgagttaactgagatgcaaagtccttggccattcgccatttggggaattggcctgatcggacaattacccaagggcaaaggtagcgtgcagtatgcagtgtcacggttgattatttcaccaagtggatagaagccgaaccattggcaaccattacatccaaaaagtgcaagacttcattgtgaaaaacataatctgccggttcagattgccgtactaaatatttttggacaatggcaaacagtttgacaaccagtcctttactaatttttgtgtgaaccatggcattatcaaaagtttccccgtagtagcatatccccaagcaaatggtcaagttgaagcagtcaacaagacattgaaggatacactaaagaaaagacttgaggattcttggaagtattttatcaggatctagatttactaccatgtatgttttataaacaacttaatatgaattctaaaacaatgaaataaacacgtataaagtttagtaaaccttacattgggtgcatcggaatataatgacaccttccatcaggttttctttgagagaaaataagatgca

SEQ ID NO: 357599 - DNA, 1423 bp, Cannabis indica
ttagtgggctcccccacttcaactttgggaaaaacttctctcttagaggaatacccctcgaggtacagctcgcaagctaatcgcataatcgcatacggttcctctattctaaacgtccctttgatgaggatgctgaactaatgcctcgatcattctgactcttcgcccctcgacatttcaatgtttccttagtaccttcatcctgctgactttcaccttgggccaacattgccatggtgttatcttagtacctgagtcccgtagactttcaccctaggtaattggcactgcctgtgtcccgagtcttcttgactttacatcttgaacaacaatcaatctccatgatactcatctcgatgcttgaaatgaataactagtcttgttgagtgaaccatgaaggtctctcccccacttcatttgttggcgtcctcgacaacatgcccacacgtaaatgcttgaccgcccaacccttcatgcacaccatgtcatctaaaagtgcatcatgcaggatgtgatcactctcaagtcaactatctcatatagcacccctatcgatttccacatgcatgcattaactgcccacacaaccatccagccgattcacacttgcatcacgctcttcttgctcccacaatgtactaagttccaatgatgcaaccctctggtcatcatgcaaactctagcacccttcttgaccttcgcaagcaaacatgactactaagtctcactggcacgaccctctggcctccacacaaactctagcgccatctcaacacttgcgctcggtcttctcagtcctgctggctacttagatgcattcattccacaactccgcatctttgccgatgcctttgtgtgacttacaacctctggcagttttacaagcccacacatcccactcaactgtctcggtgcatcaatacggatcaaataaaactcacatgcgaacacctccaagtacaatcatcttctaacgattgcggcctctgcccccttggtctccatgtgcgtccctcttgacacacctatgtagcaactgaagcattccatgtctatcccaatctgaaccatctcagtcatcaactctcgacctctatcgtgactaacaggaatctgacggtccttccacacccatgccaacaagcttctttttcaaaaaaagctcctcctgcgacttacgatgtcactcaagaaacttggcctagtgtaccaagcatatagtatggactacccaatcaaccttgtatcatgctaatgagtttcaaacattctgttacgcctctccacaattgcacgtggtagttgtctttctagcatctctaaacttgagtcgaagaaccatcattgtctcctttctaggatgtccagtattcccatgaagaaaacgcaacccagtctcaactccatcttagcctactgatcc

SEQ ID NO: 357600 - DNA, 654 bp, Cannabis indica
aacataaaatgttatttctgatctttatgaataagtaaatctgattatattgaaatgggttttatttagggcacaaaacccaacaccactaggcagctcagaagaaattcttgctgggcataatgcccaaactcttaacggtcaaccgtcaagtccccggtcacaggttttatctgtgggccaagtagtaggcggctaaaccttatctaaaaattcattaggtggagttatacctaataacttcgtccaaattagtggttctggccagctgaccggctaaaccaaccaatcactgagacagccttgtgtctcagtattcaacagattgggaacaactcatgatctcagacatgatttgaatagaaggaaaggtctagatgaacaatatgttcaatcggccactcagcctggtatccgcatccaggatccaactctaagagatcctagcgtgacacagatcggccaagaggctgaactagttcacttatctatgcaagcatagttggatgaattgaaaaatatattccaaggcctggccgaccaaaaactcattgatctcgagttggaccgagcacgcaaataacttttcactcctgagatcaatgttctagagctacccctcaagttcaaaatgccgacctggaaaatgtacac

SEQ ID NO: 357601 - DNA, 1149 bp, Cannabis indica
gtgactcctttgaggaggaagaataaactcccagccacgcccagacctgttgaacatgcacttcgcataagggagcccatttcacctgttcgaccatctcatccctatgctggaaaagggaaggctgttatggctgagatagcaggtgatgatggacttctgactttctgggtgggcagtcactctgtgctttacttctttttcagcttctttattttcatgctttgtattttctgctggtttttgctaaccactttttgtgttctgtgcagacatgtctcaacagatgatcgacgctttaaggaagaggatgagcggaagctctagcgcctcccctccggccaagaagtctaagggcggagaggggtcttcagagaagaggccttctggagaggttattgacctttcttaggagctgactactgcgaatccttccactcccaaatctgccaagtctaaggagtctgggccaccaatatcttggtccgaactggtcaggaggattcctaagcgggtgcgggcaccaactctacccgtgcccgtgctgcccgaggccaagaagggcaaggaggtgatggctcactacatgaaccggctggttcctgaggtcggtgtgcaactggctagtgctgacgactcatctctggatgtgttggtgggcggagtcttaaaggagctcaccagggttagtattttttgatacttccccttttaacttttcacacttagctccatatgctgactttttcctttatgcaggccggtttgaagttggcttacacctactcccgggctaaatctgctacttccaagagtgcgactctgtccaacaccttgagggcggaggcggacttggccaagaaggaagctgaggaggccagggcggagactgcagctgttcgtcatgagttgggtgaggccaacaagaagatgtttaccgctgagaagaagatcaccgtgctaacaaggacctcgaggctgctgatcgctttgaggaaaccatcgagaccttatctgctgaggttgatcgtcttcaggatgagaggagttctttcggcaggtccttcttcggctgaaggaagataaggacgctcaggtggccgaggcggaccgtttgaaggagaaggtcaatgcttggagactgtcagc

SEQ ID NO: 357602 - DNA, 636 bp, Cannabis indica
atgatattcataatgattggtgggcctggaaaccagggcccaccgaactcccattttttgaaagaccaatattatcttgaacaagaacattattgggctcatcatcatggtccactcccttagactttgacacatcaacagctttatataaagcactttccattcttttcctttttaattccaccaaatccatgtccacatcagaagtgtacatagcttcattctctatcacagtaacgattggatcataaatggccttatcaaatctttgaccaacctccctagaatcatgggatggtgatatgatattgccttgactgccgtgggtgttattatgcagctggtgagatcccacaaaattagcttgtgttgatgacttcgaagtaatgattctcggaccgccgttgttgtcatcggttcttggtggttgatcggcagaactggaacgcagccatggagaagctgtgaggaagtttttccttcttgatggggctcgcatggctataccataaggtttttcaatttcctccaacggagtatcatataacttgtgacacaaacgctcggaatggcccattataccgcaaataaaacaaaaggtcggtaggtattcatacttgaagttagcataaaatg

SEQ ID NO: 357603 - DNA, 1248 bp, Cannabis indica
ttgtactcagcattaatcccacgatcattctgtttatatccattataacgagaggggaaagacttcctctccaagcatatagccctataaatagtgatgcatgttcactgggtaaaaggacgcaaacagttcagtcgagactataccctaaagaaattatctaagaatacatattcagagatactgttgtaagagctataagaagagaaatctttctccttgttcttaagtcaatacaaataacgagaattaggctattaccgaactgctcggggctgaacctctataaaattctcgtgtctttatattgctttattatataccgattgctataaatgacttatcgcttactaaatcagactcgttgtcattggctaaaagtgaggtaaatattttggtgctttaattgagagcagaatcaagaattgctcttaattcaaaatctaaccgcaaatacgatggtgccgactcgtagaggcctgactgatccagcaaattcatagaccgtggatcctacattgcaaaacctaggaaatacaagggttccgcctgctgttaatcctggacagccagcaaacgtggggaatggtctaacaactcctatagatgaaatcgcgcctggtgtgctagagactgggaataacagttccgcacccaaccagagcattcataacacaactattctgcctggaaccaacacccagacaaccatcgaagatgctattgatttacaaaatctccacgacgctcttggactcatgtagggtcataacaataccctacatcatgatcaggacgaactccgcactgcagtaaatctcgagttcaaagaacaaaggcgtatatttactgagtggagagatagagagatggaggcgttaagggctcaccatgcagagattgaaaatcgtagtcggcaagctaccttggtgatacgaaaagccttccaaactgtaggtcagcaaccaccgaatgtcattcccttgggtgagacggacgaagatccagcaatgaatacttcccagactgcaaatggtcagccgcctaatccccagtcacgagttccactcgtgggcctagcggtaggggggcagaccttgtctagtaatttatcaagagaagtcatacctgatggttccaaccagatcaatggtgcgattccacccgtcaaccaagcatatcaatcgctgaggcagccaggcgcttctgtattcgaaaggttgggggtgacccatgacctaaggaatg

SEQ ID NO: 357604 - DNA, 730 bp, Cannabis indica
tatcgatcagtgacaaaaaaaataatgacaaatagttcttacagatacacattcacatttcacatttttaattacaattaagttgcacattagttcaatgatggtttgatactacaatatcataatattataaaaacagagctcgaagttatcaaatatacgacctaaatagataaaatacgattgttgtaatatttatttgtattaaatatgtggaattattagttgttttgtgattttatgttagttgactcacaactgatataacagttgcattacagattaattacagttgccttgaagttgacttcttctttcctttcctttttggccattgaagttgaatttttttcagacgaagacacttttgacttcttttttattgtacgacgaccacctttagacatgggggaagtgaaatcgggatcatcatcgttgataactggacgtttccctttagccttgttaacaactgatttatgacccatttttgaagtttttttttggcaatgaagatggaaaagtggaagatgatataaaaaaattgataaaataggcagttggaagaagaagatggcgaaggttatgggtgggaggtagtttttgtgggttttaatcgtgggtttcaaaagtataatgactggaaaatagttttaaaatgaaaaattgagaaagaaaaagaaaaaaaaaattgaatggtaaatttaaaaatgaaaaacgaaagaaaaaa

SEQ ID NO: 357605 - DNA, 579 bp, Cannabis indica
tgtactgcagtcgaatgggtggataaattttgtattgctaatattattttgtttgttttgtattattttatttgttttgtttgttactttaggaatttttaaaatttttaggaatgtttaattacagtcattatgctttcaaaattttggtagaattagaattaattttacaaaaaaaaaaaataataataaatattgaaggaaaaatatataacacaaataactagttaattactcgctagttgtaagaaactaggtgacaaaacacatttatataaaattttcaattataaatgaaaaaccaaccaaatgaatggattcactttaggaaaagtcattccaattctacctctattccaatcaactaaacactaccctagttagttaattacaacttatacaacttaataaaaaaacaaactaaaataagcattatagtaatatataaattaatatgaattaattgtgaaaaacttagttagtaacattgtgtaagtagtaactagttataattagttactaaatactgatttttttttgttaggatatttgttatggataaatcatggatgtgtgagg

SEQ ID NO: 357606 - DNA, 768 bp, Cannabis indica
agactcatcccggagttcatcgatttgattcagcacttcttgtaataaagccttgtttgttgctggatcataagtcgtcctcctatgggatgagaacaatgtttgcaccgggaccatggcctcacaaccgtatgccattgagaacggtgagtggccggttgtggttcttggaatggtccggtaggcccataacactcttggaaattcttccggccaattgtttttgcaggccagcaacttcttctttagggtgacctttaggattttattgacgacttctgcgtgtccatttgtttgtggccttgccaccgcggagaagcttttgatgactctgtgttggttgcagaagtaggtgaattcttcgtagtcaaactgcttctcgttgtctgagactatcttatgaggcaggccatatcgacacactatgtttttgataacaatttctagtgcttttatagcagttatagtcttcattgactcggcctctgtccactttgtgaagtagtctactgctactatggcatactttacccctccctttcctgttggtaatgacccaataagatctatcccccacaccgcgcagggccaaggtctagtcatcagggtgatctcattgggggggggggctgttggtatgttcgcaaacctttggcacaaatcacatttcaggacacagtctatacaatcttttttcattatttgccagaattatccttgtctcaatattttctttgagagacttggacctccggtatgatcttcgca

SEQ ID NO: 357607 - DNA, 454 bp, Cannabis indica
ataatatgtcttcttccactcagatctctaacacttgaatcctttctgttgcagagtattatcaagatctgagtccgaatgtccttctctttgatttgtatttttcacgatcttccaaactatgattgaggtaccacttgctgtgtgtgggcactactctttcactagggtatctcgaaattggaagagaagagaagaaggcgaggagggtcggctatagagagaaaaggaatggctcaattttctgaaaaaggcagtttcctgaaatactgaataattgcttaactgcttcatttggtgtgagccatcactttctatttataggaacctactaggtttaggttagtaattaattgacattaaaataatgagaataataatttgaaaaaaacttgcacaagtggccggccatggtgttaatgggcctcacttggaattttgcagttttcacaat

SEQ ID NO: 357608 - DNA, 505 bp, Cannabis indica
aagcttcttgctgctaacaccaacattgaggagctggccaaagagctgcaagatatgccttcgaccaagcaactagaggctgataatgtttctttgtccaaggaggtcaataatctcaaggatgagagggagagtctctggactcttctttccaaactggaggaggatgtcaagaataaatagaccagggaggaggaactcgagaaggaggtcaggaacaagcagactagggaggaggagctcgagaaggaggtggagaccctggaggcagttgctcttgaggttttctatgatttctggaaggctaatcttgaaggaaattttgattaccttgttgaacccaagagcatgtgtcttgatttcttctcttagaattttcttgaggacatagctcttgaattgtgcaagcatgtcattgttgaactaaaattggatatacgcaagtgcacgtagtcacaaacaagtaatataatgataagtaacgagtatcatctccacaaggact

SEQ ID NO: 357609 - DNA, 769 bp, Cannabis indica
taattattattaataataaattttttattaatattatattattattataactattataactattattatattattattattattataatattattttttataaaacttatcagtacgataagtttatatatattaaatttttaaaacacaacatacagaatgaactcttttctattgtatgaacgaaacccttacctttccttgtctattttattattattattttcaacccacaacctagcgattcaagcttttgtagtagtaggatagaaaattattgaaaaaggagagcttaaggtaagctttatttttgttttaagttagaaacgattggttttgtataagggtttcaggaattagaatagttatgaaggttttgaccttataggattattattgggtagtcatgggactaattctgatattttcttgctgaaatcgaggttatttttggttagagattgagtttggaaccttttaaaacttaatttcgaacactagtggcatttgccaattaagggctcgattttagtttctattacgtaagttgttaggctatttttagccttagtttcgggtcacattttatagttgtttttcttctttattattatttttggaatagaattacgcttgttttctttggtttcaggtttcgacacttggaatgtataaattggacaaatttcggaaaacagtgatctataaaatagagaaaattttgaaagagaaaaaatatgaaacttcaagcctaaattcgactatgttc

SEQ ID NO: 357610 - DNA, 874 bp, Cannabis indica
agaaaggaatcaaggactagagatctgaatggaaggagtcattatattctgctgcacccaatgtgaggtttcctaaactttatatgtgtttatttcattgttttagaattcatattaggatgttaatgaaacagacatgctagtaaatctagatcctggtaaaatatttccaacaatttccccgcaggcgtgacaagggcaatccttgcacttgatgctggtctgtagctgacccgtctacatgtagtttccaggtcgatttttcatcactattacttggctgaggtgtttgtaccggctcagggttgctttctggtatgcttgctttcttgcctgtgcattctaccacaaagtgtgctaaggcttgacctttggttgtttttaggggttggaaagtaattttgtattggcccaaccccaccgcccacttaagtagccgcccagaggcgtctggcttttgcaatatttggcttaatggttggtcagtgtacacccgagcaagatgagcttgaaaataaggccttaattttattgttgctagaataaggcaataagcgagtttctctatcaatgactcttttactaatgtaatagactgggtgttgtatgctgttctcttttctgattagcacggcactcataggatgctccaagacagctaagtatattccaagctcttctctgtccagaggttttgagagtacgggaggttttgcaagttgttcttttagctcttggaaagctttttcacattcctccgtccactcgaattgcttgtttcctcgtaggatattgaagaatgggacacacttgtctgttaattttaaaacgaatctgctgagtgcggcgatccgaccagtcaaactttgcactt

SEQ ID NO: 357611 - DNA, 857 bp, Cannabis indica
gtatttgattttggaatgtgactgagggtgtgagactcaagagaggaagactcaggtgataaggattctgtgagcagatttgggaagtgggattcatcaaatataacatctcgagagatgtacaagcggccagaggagtcaaggcatttatagcctttatggttcaagctataacctatgaaagtgcatggtgtagacctgaattcgagcttatgcttgttgtaaggtcaaatattagggtaacaaacacaaccaaaaaccttgagtttggtataatcgggtgtaatattgaagagcacttcaataggagattttagtgagagaattggtgttggaagcctattatggatgtaaacagtggtcctaaaggcttcatcccaaaatcgtaatgggagattggcttgagctagaagagtgagaccattttcaacaatgtgtctgtgttttcgctcggctaaaccattttgttcatgagtggtgggacaaggttttctatggacaattcctgcttctcttagacattcagtgaaagccctatattctcctccccaatcagattgaaaggattggattttggtgcctaactgtagttcaacttcagttttaaagatctgaaaagttttgacagcatcagatttagactttaagaggtatagccatgtaaacctcgaataggcatccatgaaatggatgtaatatttgtatccattgtgtgaggttgtaaaggaggggccccataagtctgaaacaataagctgaagtggcttagtgtagcatgtttcagaagcttttgggaaagggaatttgtgtatttttcctaaacaacaagctttgcaaactgaagtagacattttatt

SEQ ID NO: 357612 - DNA, 476 bp, Cannabis indica
atttatctttatagtaaggactcaaaaaaattttatttttgcttatggtccattaaattcaactcaaagccggctctacttcataagaactgaaattcaatgttttctttaataataacatatattgttgtagttgtggttttttaaaccctataatttgtacccatagctttagcaaaaagtacgtagtaattatttttatattatatatacatacagatatcatatatataaatatatgaaaaacaatgcacatgatataataacattacttgaagaaaggagttttttgcatagctacttttgccgacaccaccattcatgtggaggacttgttctacttccatttttactaatgttattatagattttgctcaatatattgattattgagaatcttaaattaaaatgattatataccatataagtgttggagagctcacatttatatagtgcaacttcacaggggtatattt

SEQ ID NO: 357613 - DNA, 650 bp, Cannabis indica
aacaacagtcatcataaaactcaacgagaacatatttgtcacgggtcagatgagaaatggaaagcatgttcttagttattcgtgggacacacataatatttttaagatgtagaaaatttgaagagtgtggtgcagaaagtatgcttttacaagtttgagtaattgataaggactagccatttccaatgacaagatgaggtatacctttttgatcatatttgtgctgcaagtttgatgcatctgctatgatgtggttggtagccccgatatctatgtaccacacatataggaatttcctttcatctcggtacaacagtagcaaaagtagagataatagagttgatatattgatattggaatgatatatggattggagatacaacattaaagaatcggtttccggatctggcagtgttatcaaaagcgaaaaactcgactataaaagatcttgttgccattgaaggagaggtaggaaattgtgttgcaagttggaattttaagtttagaaggaatttgatggagagagaaatgcctaatcttattgtattactgcaactactggaacatattaggctgctcaacatatcagaggatagtagagtatggaaaccagatcctagtggaattttctcttgtaagtcagctttcaa

SEQ ID NO: 357614 - DNA, 474 bp, Cannabis indica
gtctgaattgtcctttcggactgtccatcagtctgaggatggaaagctgtactgaatttcagtttagtacccatagcccgttgcaaactctgccaaaacttagaggtaaatttcggatctctatccgaaactatggagtttggtactccatggaatcttactatttctttgacgtacaaatccgcgtactgatccactgaaaaaggctgttttaactggtagaaaatgtgcagactttgtgaatcggtctaccacaacccaaatagaatcaaacaaacccgcagttctaggtaatccaaccacaaagtccatcgtgatatcttcccacttccactcaggtaaggttaaaggctgcaacaatacaaccctgccggtctatgatgttcagccttgatctgctaaaaggttaagcatctcgatacgaattctacaacattcttcttcattctcctccaccaaaattaaggtttaaga

SEQ ID NO: 357615 - DNA, 753 bp, Cannabis indica
actggtctgttccaagccctgttacccgaatctcgagtcaagatcaggatcactgtcacgagtctctgtctagttctggttcaggtcccaggtcccatttctgagtttgagttcgggatagagactggggtgcggttctaggtcccgaccctggttctgtgtccctagtctagttccatgtttcggtctgagttcaagttccggttcgggtcccgagtccagttttgggttgggatccgggttcggctcccaattcgggggtaggtctaatttggagtctgggttttggtccggttacggttctcgatctaggtccaatttgagttatcattccaagtccaagtcctagttctagtcccgatcaactttcggttttggttccaattttgggtcatagggtacgcgttcgggagtgggtttgggtccttgtcagggttcgagcccagggttgagtcctaaatccagacaccgactacgggtttgtccaagccggtgtgccgatccggatcctaaactcgggtcccagtctagttccatttctggtgccgggtcacgaggtgggtcctaggttcaagttcaggtctgggtcgagtactaggtcccggtcctaggggtgttcgcggttcgggtggtgcggtttttaaccattttttcaaaccaagccacacatgcggtttttccaattttccaaaccgcacccgtaccgcgatactaaaaaaccgcatcgcaaaaaatgatgcggtgcggtgcggt

SEQ ID NO: 357616 - DNA, 572 bp, Cannabis indica
gataacctatgaccaagaggtaagcatcaccttggtggtgggatcccttaacaaagtagaagaaagaagagaccaagccaacctaaagctgtaggcctaccaacgaaaggttgcaaggcacttcaacaaacaagtcaagaaaaggaaattcttcaaaggagacctagtgctgtgaagagtgttgctaaaaaccaaagatcctgcagctggagtgtttagacttaaatgggaaggcctctaccaagttacatagataacaagtaagggagcctataagcttggcaggtacaacgagaacatagaactggttctcttaccaagatattggaatgaggagcacctccaaaagtactaccagtgaccagcttgtatgaactctactctttagtattagttttattaactcattaataagagttagtttagaaagagctaggtacccatcgctcttcatcgattgcctcttcctggcatgttaggcaggggtagccacttgacttctagaagcagactttttattttgtaagcttgtaaaatcaatcaatgtaagttgcacagcaacaacacatttt

SEQ ID NO: 357617 - DNA, 470 bp, Cannabis indica
gggcataaaacccaacaatggaagctattggaacatgcaatttagttttaagtagtggttttattttaaaattggaaacgactttttatgtaccaagtttctctagaaacttgatttcagtttcaagactcatcccctttggtttttcctttacattttctgacaaatatttcaatttataatataaatctgaatgtgttggaaatggtattttgtctgatggtctttactgccttaatttacaaaataataccactaataatgttatgcatgttcacactagcactaaaagatgtgttatgaaagaggattcctgtacattgtggcaccggagattgggacatatctccattgatagaattaaaaggttggtaaaagatggggtactcaataccttagattttactgactttgatacttgtgtggattgcattaagggaaagaaaacctccaagtctgtcaaaactggt

SEQ ID NO: 357618 - DNA, 409 bp, Cannabis indica
taggatgttaatgaaacatacatggtagtaaatctagatcgtggtaaaataattctaacattaataacatcggattgtggtctttgaacatcttatactgtacccatgcactcagtatcgctaccatactactattagtagcatatgaatcacataaataatatgcatataatacacatacacatacacatacacatacacatacatatatattctatgctaatcttatctcgtttctgaattcaagtgtgtcggtcgacctgaatgaaaaattatgcgctgaacggaggccctatgtcacaatcacgtaaaatgggcaaacaactttctaagactttttggggaacctaaacacaaaactagaagtttccatatcaataaatagcatggcaatgttggaaattatttt

SEQ ID NO: 357619 - DNA, 933 bp, Cannabis indica
acatccacataattattaatatttataacatttttctaattttgcatcatatttcaaattcttggcagaataataggaatctatcaagaaaggaagagtggacttttagagtttcatctaaaaaggtactagttttggtattttatttgtccctgtcaattatcattttatacttttatctttaaaatctaataaaaaaacttacaacaaatttattttttaatcaaaaatcttagttaggagcaatcaaaaatttaataaccatctaattttaaaaatatcttaatattagttttttgcttttgaatgataagtaggtaatggttatagttagttggaatgtaagaggacttaatggtgatgtagctttacgacaaacaaaattgttgttgaagtatcataaaacagatgtcatcttctttatggagactaaattagcagaaggaaaactggattccatgaaaaaatatcttggttttgaagagggatatgaagtgccacgaaatggtctaagcaggggattaatgttactatggaaagagaacgttgaaatctcaaatataagatcctcttccaatcatattagttgttttatacgactggaaagtcaagtgttggcatggcatttttgtggattctatgggatcctaaggtctaatagacataatacatgacaattgctcgaacgcctcagaatagtggctactggaccataaatggtagttggagatttcaatgaaatcttaactaatcaagataaggaaggagggaacatgagaagaccttcacaaatggaagcttttcaaaatacattagaattgtgtgctctacatcctttaccttttacgggtgagcgttttacttaggctaaaaatacaaatggaagtctaactagcaaagattagattgggtaatggtaaatgaagcatggac

SEQ ID NO: 357620 - DNA, 582 bp, Cannabis indica
tcctaaaaatcagactccaactgcctccgaaaatcaaggacacggttgagatagttccacgtcggtcgcatctcctgaaacgagaagcaccgacccccctatataaggggtcacccgcgacctgggagggggatccacaatctcaaacacttagaaaaataaacacttctcattctttgcaatcaagagcctgttcttgacttttgcaactcaaaataaaacaaggggagtaggttattaccgacattcggggccgaacctctttaaattctggtgtccttatttacatttattgcaaattctagtgttattaactgcatttattattgtgattttggtttaaatctcatttattatgactcctcgtcggttgactaaaaatccagtcaacaaccaccatgatttcttcttgaacgtgttgttccaaaagtgggtggcctctgagagcccattggttctttttcaaaatgatatgtagtctcatcaggatgacttctatcgttttggttgggatcagccatagattttttttgtttgttaagagggattttttctgagttttatcacgtaggctctcaatga

SEQ ID NO: 357621 - DNA, 752 bp, Cannabis indica
acttgttctctgaacagcttcgggacccgagaactttctctcacttacttcatccaagtgaataagtgatctaaactttcttccatagagtagttcataaggagctatcctgattattgcttgatagctattgttgtacgagaactcaatcagaggaaggtactttacccatgattcttcaaagtctaacacacatgcctgtagcatgtcttctaaaatttgaatggtcctttcgaactgtccatctgtctgaggatggaatgttgtattgaatttcaattgagtacccatggctatatgtaagctctcccagaatcttaatgtaaactttggatccctatcagaaataatggactttgggacaccgtggagacaaactatttctctaacatatagttctgcataccgatcaatggagaaatttgtcctaacaggtaagaagtgcactgacttgtaaacatgtcaacaataactcacacagagtcgtattgtcctgcagtcctaggtaatcccactacaaagtccatgacaatgtcttttgatttccattctagaaggtttactggctataacaaacctgcagacctttggtctttagctttcacttgttggcaagttaaacactttgcaacatactatgttatatcgttcttcattccaggccaccaacacatagacttaaggtcttgacacatttttgctgtccctgaacaaacagaataaggagttgtgtgagactcattcaaaatttc

SEQ ID NO: 357622 - DNA, 607 bp, Cannabis indica
caatgaatataaaatattcatttatcaaaaaatcaattatttattttatttccttaaatagaaatatatttccgtgtatagaaatattcttatattatagagaaaaataatgccttcattcacatcgaggtaaccaaaaacccaatgactaacttttccaaaattcttttggattgccttgttgaacctccctcaacaaaaaggatgtgaatagcttggggatgaaatttgtactcagggacatccaagaaataacctaattgagtatcacggaatattttcatcacattcccgaatttgttttcttgatgttcttaataacaccataagtgcaataattaacacacttagacctggaataattagaaggatggaatttgtattcccaatcttgcataaatatatagaaacacaaaaatagaaaattgtttatgacatacaaaatttcaaaagtatattaaaactatgtataaacttttagaaaaacacattcacacagaacaaataaaaaatgtcaagaaaaccagaatacatagtacattgcaataatttataaatatcatcacgaatatcaactaaaacaataatgaatcataaacgaaaccta

SEQ ID NO: 357623 - DNA, 677 bp, Cannabis indica
catgagtccaagagcagcacggaggttctggatctctgtgtcatctccaatggttgttcgaacattcgttgctggcggaactccattattgggaataccctgattgactgctgaattgatatttccattctcttccacaccaggtgcaattccactcaaaggagtcgtcatacacgaacctacggttggcggttgttcaggattcgtggctggtggaacccctgcatttcttggattttgcagtgcgggatccacttctggtggatttttcggatcgaccacgcctctacgagtctgtaccacaatcacatttattattaaatttgaattaaagagcgagcttgagttcaattctcaatgaaaacaccaaaaaattgacctcgcttttggcaaacgacaatgagtcgtaattgtaagcgacaagtagtataatatagaggtaatataatgaaataaataaagacatagaatttttatagaggttcggccctgagcagttcgataatagcctactcctcttgatttgtattgacttaagaacacagaatgcaatgattcctttcttagagcttttacaatgatatctctgagtatatactctttgttgatctcgcttttagccaacgacaacgagtcgaatttagtaagcgataagtgatttgtagcaatcgatatat

SEQ ID NO: 357624 - DNA, 493 bp, Cannabis indica
tattacatcaaaagtgggcaatttgtgcctttacattatcaaaatttgttggtaggtatgacgaccagctatgaaaatacactttgcgggtataccaacaagcctaagtcattgcttaaaagcaacttatatttgtagtacttttgtaggtgctttgtattttaatggcaagacactagtactagcttcgtgttggcaccgtaacatgctaacttgtatattccaggtgggatgatcccaactactccatactcagtggtaagtcaccctttggcaggatgatgggttattatacccataggttcggacaagaggaatgtcgcacgtggctaaagattgtatcaattagaaggacatagtcattcaaagaggatgcttgtttggctttttgtattataagtgtttccaccattaagtgttggtcctctttccattgttaaagccattttttatatttactctcctcacccatgggagcctttggccactagtg

SEQ ID NO: 357625 - DNA, 1620 bp, Cannabis indica
cctcaaaaggtagcaaccggacggagaacaagtaccagaaaagggggtatactccccaatacacccagtacacagaacacccaagagcgtgtgtatttcgccacgaggtaaaatacgcactaccggagaccgccctctctgtacagagatagctcccgaagggatcccaataaaagatgcaagtaccagaacaaaattggacacaacaccaatgaatgaatgaatcttaaagatgagatcgagaacttgattcgattgggtcatctctatgagtggatcaagaaccggctgccccatctcaacccgagtccggcagggggacctttgccctaagggatgccagggggtgcgccggagcgttagctccagctgcgcatccaggagagcctcagtagactcctggcctgccaccaagacccaacggaagagtggctatgacctctggagggccccatatcggagggaccacttgaaaggaactaaagcgctacaacggggccattaaacacagcgaggtttgggaagtactcagctcccagcttaaaggccccgactcatggatcaaccaattacattcacggaagaagacgcaaagacagtgcgttttcctcaccatgaaccctggtcatagagactcccatcgccaacaagatcgtggctagaatactgatcgacaatgggagttctgtgaatttattgtttcaaaaagcattcaggatgatcggcgtcacggaccgtgatctttagcccagcagttcccagctcacgggattcaatggaaccacacttatcccaatgggaaaagtgaggttaccagtcaccttgtgcccggacacacccagagcacttttaaatactgcacattcgtggtggtagaatgcctaactgcttacaacagaatcctcgaccgaccagccctagtggactttggcgcaattacgactatccggcacttggttctgaaattccctactctagaatctcgagtagggaccgttcggggtaatcaaggagaggccaggcaatattacagtgttgcggcccacttaccagtattgatggtccgtggagttattgagccaggagtggcggaagaagatgagttggatccccgtgtgcgattcaaaaaaattgtagaacctatggaggacgtcgaggacgtgtcagtatgcgaccttgaccctagcaagatccttcggctgggaaagagcctagaaccggaggaaaaagaaaaaataattaaagcactaagggcagccagggatgtttttgcgtggtgccaaggaaacatgaccggcataagtcccatgtcataacccatgtcctcaacgttaacccggatatgccaccagttccacagaagcgacgtcccctcgatccagtgaaggcagaaactttggagaaagaggtggacaagctactaactagtggcatgatctgagacgtatattatccagaatggctggccaatccggtgctggtgcctaaacgaaatgggacatgtcgggtattataaattttacagatctaaacaaggcctgcccaaaagactacttccccctaccgcggatcgaccaaatggtggatgccacctctagattcaggctattgtccttcatg

SEQ ID NO: 357626 - DNA, 832 bp, Cannabis indica
gattgttgttaagttgtttttgtgttgttaattagttgttttcgcataactgttgcattgagaaaagaaaaccctacacgcccaagctcactttgtctaaactgccatgtggcagccgcagagtcactgccacattctgacgcgcgtcagtaaaaatttttactctccccactcgcgtgtgagtctcactctcctatcctattcacatgtgtatctcactctctccttttacacttggtatttatctctccattgtatttttgtaataaagaaactttataaatattatttttgtaattagtaaaagtacaaatgtttatttttccttaggatggtataaatgtttattttgagtaattttaacctaaaatagaaaaaacctcaaaagtaaactcttataatttttccatatattgtgtaatttctaccaatttatatggcaattatgtgactaacttaaactgtaagaataataaaaaaaaattaatatataaatgtgccgtttgataatatttttttattctaaatttttaatcacaaaatgaaagtaagatttttgtttttaaaaattttaattttaaaaaataaaagtgtgttctgtaacgattttttttttaattttaaaaatagaaaatagaagtgtattctgtaaagttcatttttattttttttattttatttaagtcgggtctaggttcgggatcagattcaagttcgggtcagaggtcgagttcagtgccaaagctgtaggggagatttgggttcgggtctttatcagagtctaaaatattgattaagaaataaaaatatttaaatgatttttttttaaaaa

SEQ ID NO: 357627 - DNA, 881 bp, Cannabis indica
attttcctttatgaatcaccgatcacgagactactgacctagtcaccaaaccactacacattaaaaatttattaaataaataaggtcataccattatattactttgaaacattttttacgtcgtagaaaaatcggaagttctactattttaagaatgtatatgaagaagatgatggagctatacttctatatcatttttattatacttttataaaatagattattttaaatgaactcggagatttcttatatacaattatatcccattctctaaattataaataacgaaagatatattttattattttctttaatttatctcacacatttatattacactataaattaattttttatatttttctttatatatattatttaaataatatatttataatacactaataataaaatatttattaatttttataattacaaacaactaaacaaaacatatcacaaaaataagcactaaaatctaaaaatcttttagctaagtactatatttcttgagataaaaatctattagatatggttttttttttaccattaaatttttaataacccttagttaattttttttcttttattttacatttaacttttatgataatgtttcgtaaaagatgcttacataaatacaaacataaaaattaatgttgttgggtatattttctcttttctaaggcttctcgaatgagactataaaatctattaccttatatatgtgggagtgaggcactagaccactgcaattcctttttttttttttaataatttaataatcattttatataatagaacaaataattaaataatttatttataatcaaaacttatattatattaataaaataatataataataaataatatatttt

SEQ ID NO: 357628 - DNA, 1018 bp, Cannabis indica
tacttgtaatccaccaatttctcggcagccacaatcgccgagggtaaatcagttaccgcttgcctcctcaattcagcctgtgcccatggctgcaatcccgacaagaagttgaacatcttgtcctcctcggacatgttctttatatccagcaacaaagaactatattctttcacatactctcgcaccgaaccagtgtgcttgagtttcttaagggactcacgagcgatccatgctgtgttgcatggaaggaactgatccttcaactccttcttcaacacttcccaagtctcgatattgggccttcccgatcgagtatcttcctccatccgagtgcgccaccataacttggcatcaccctgaagatacatacttgtaatggtcactctatccgcatctggaatccttgccgccttgaaatattgctcgacgtcccaaaggaaattctctaattccttcgagttccgactaccattgaaggctttcggttcagggactttgattttcgaagaatgggctgaagatgagtcggttccttgggacggatttgctatcgccctttttattactgctacatccgcatcgagagccataaatctctccttcacagaatttgataggtccaatagtttgtccaccacccccttcatcttctcatcgaactctctttgcatatcaatcatggccctgccacaacccgcaacttgatctgacgcttccttcaacaaatctcgagccaacatctcaagggactccagttaatcagaatgttgttcaccaagaacaaacaaacttacactatcctcttcgttgggagaaccaaccaactcttcgagcctttcaacatgagaacaaagttcagcattcgtcaccatgatttttgctatttcccaacacgattcccgctctgataccagttgtcacaaggctaatttctcacactcaaattttccctgcgatggcctagattcacccgaatctagtcagccaacccaacaatccgttagtatgcacacacact

SEQ ID NO: 357629 - DNA, 738 bp, Cannabis indica
cagaacacgaattcgcagataaggtccaaagttttccactaaggaaagagggaagatttacagagatcaccaatttcatcagcgataaactgagcgagttggggacttttacggccaaacgggattcgatggatttgaacccagaaaggggtgtatctaacagaatcaggagtaggagttggtgagacatccggatgggtgaagaccatcaagaacttgtcaaaatgccatggctgctcttcaagcacacggcgcctatctccatcacattggaaagaagcaagaaagagcccagagtgatactcagaaatttgacagggaaagcggagagtccaagcttcggtcatggctttttcaatccacgacggtttagctggtttgggtgataagagcttgaaaatcaagcagaaagcatcagtatcagtggaggagtggatagagatgtgatcaaagtcatgaacgaggctgtcttcgtcatcaagagcggtaatggggtttgggttggtggaagaggaagccataacgatgtggtaggtgagagtgaatgggttttcagcagggattgaaaatggtgtgcaaacagaaatggaaagggcatataaataagcaaatatggaaagaagcaagagagacgagtacctggagaagaagagtcgcctcgaagagaggattggcgtctgaaccatcacttcacagctgggggaggcggtctggaatcgacgctgaagagtaatgatg

SEQ ID NO: 357630 - DNA, 824 bp, Cannabis indica
taggtcccgaccctggttctgtgtccctagtctggttccatgtttaggtctgagttcaggttcgggttcgggtcccgagtccaggtttgggtggggatccgggtccggctcccaattcgggtttagctctgatttggagtttgggtcctggaccggttacagttctagatctaggtccaatttcaattatgattccaagtcctagtcctagttccagtcccggtcaacttctagttttggttccaattatgggtcacagggtacgggttcgggtccacttttgggtttgggactgggttcaggtctgggtgtaggttcgggtccttgtcagggttcgggtccaaggctgggtcataaatcgagacaccgactacgggttttgtccaagccctgggtgcagatccggatcccaatctcgggtcccagtctggttccatttctggtgccgggtcacgagctgggtcctaggttcaagttcgggtctgggtcgggtactaggtccctatcctagttctgtttcccaggtgtctatcctaattctgggtctgggtcaaggtcccagttattgtgttggtttgggttctggtctaggttcaggttcgagtcttagtgtcatttcgggtttaagtctctgtctgggttttgatctaggttcgggtttgggtttaggtccttgtcccggtcctagtcctagttcggttctagttccatttgcgattctgagttcgagttttggtttcagttcgagttggagttcgagtcctggtctgagtttgggttcaggtcctgatttcagtctaggtccagatcaggctccgggtgtg

SEQ ID NO: 357631 - DNA, 793 bp, Cannabis indica
attaagcgtttcgggaaaagaggcaagttatgccctaggtttaccggacctttcgagattctcgagaaggttggacaagtggcatatcgtttagctttgcctccagctctttcagcagttcacaacgtattccatgtctcgatgttgagaaaatacgtttcagacccaactcatgtacttagttatgagaatcttgagctgcaaccagatatgtcctatgaggaacaaccagttcaaatccttgacagaaaggataaagttcctcggactaagaccatagctctggtcaaagtactctggagaaatagcaaggtggaggaagccacctgggagttagaatcagacatgaaagctcaatatccaaatttgttcaggttagattttgaggacgaaatcgttttaagggggggataattgtaaagaccgcttagctttaatttgaaaattagcagataattagggctttgttatgaaagctaattattaatagtgaattaattatttatgatgatttatttgaatttagaatgcattttcatgtcacatatagaaatttcataattttgcatattttggtgcccgacaacattggaacgtggtgtatggcttcttgaatcacatcttagtatttttagtatagaatgacaatagttagacatttgggatgtcgggaatagaagggactttagagtttcccaaaatacccctaagtgccccttttatgccttttagtgttggaatggcaaaatggtctttttgcccattcttgttgtgacagtcagtagtcttggga

SEQ ID NO: 357632 - DNA, 594 bp, Cannabis indica
gcttcacaacttgaagctgcaatgtgatttgttagaacgcgaattaaagtcgttcagatgactgatccagagttagtaaaaatcagagaagaggtttcagctggtcaagccagagattttaccgtgttagacagtgggatgttattgtttaaagccagggtttgtgttccaaatagtgtggaacttagaaacaaaattctcgaggaggctcataccactccatattccctacattcaccaccaagatgtatcaggatcttaaaccttacttctggtggagcagaatgaagaagaatgtggtagaattcgtatcgagatgcttaacctgttagcagattaaggctgaacatcagagacgggtagggtgctacagcctttgaccctacatgaatggaaatgggaggacatgacgatggattttttggtcaggttaactagaaccacgagtttgtttcattctatttgggttgtggtagattgattcacgaagtctgctcatttcctaccagttaaaacaacctaatcagtggctcagttagcagatttgtatgtcaaggaaatagtaagactgcatggtgtgccaaagtctatagt

SEQ ID NO: 357633 - DNA, 406 bp, Cannabis indica
aactcatattccatactttaatatacagtttgaatccattgatagaaaatagttattaaacacttgtgaaagtgtaactgtattgtattctggaaatagaaatataaaatctctatttggaatcgaaaattcaatgtcaaacacttaaatttataccaaatatacatgagtattattctatcttgaaccaccactactaatcgaactctaagtctgatttgcctaaagtaaacatatataagtaggaaattttaaagattgaagatttatatcatttcaggataaaatatcgggaatataatcgtatgcatcattcaattccttaagaggaaatagaatgacatttaatgatttataaaccatttatccaatgatatatttattgagctaattcgaaatgaataag

SEQ ID NO: 357634 - DNA, 561 bp, Cannabis indica
agtcgactaatgtattgttgtcgatcggtctctataatcgttgcctatttgacgtcgcaaaattaggtagaataagcgacgatttaaaacagccgacgaaaattttttatcgacggtttcaaaccattggcaatagtgaaaactatatagctgataattttgtaccgtcacattaaaaaaaatagattgcctctcaaaacattcaccatatctgcaaaccagatgcaaaactagaatccctacacatctcaaattaaagaacaacacaatagataaatacaaatgaaagacaatagagatagcctgaaaataatattgacgaacggggttgcgctagtggttggaggcggcacctgagatgatggtgcgtcgattggtgatggttccaattgccgacgtggtgtgactggtaggcggtgttgactgttgaggtggtgcgattggaaaggatattaccgagatggaccagttggtgcgagtgtacgtacgtggctccgtctgactggcggttgctgctgtacgctccgtcgatggagagggacgagagagagagagagagag

SEQ ID NO: 357635 - DNA, 856 bp, Cannabis indica
accctacccaatgcaggtctagccgcccaaggatagtagcaaggtgtaagcttggccgacctaggcaaactcctgtacttgggaatggccggccagggtctgcagttcaacatgggtctgactgaccttcaccatacactttcccaaggtatggccagccaggccctatctctccataatctacagcctccccaaggtgggtcagtcagtcaagtccccatagaaacagatccttttgtgcaagcacagttggaccaactcacggacatgatccaaggcatagtttgcctgaagtcttcagaccttcaacttgatcggtcaaggagatcaccgttcttggcatacataaatgtcttgccattgccaaagttcaaaatgctggtatggaagatgtatattggatgagaagacctactggctcacatcaaatacttcaagatgaaactcgacctccacaaggtcactggtgatgtgcggtggtgtatattcccatccacatttttggagatagcctaacgatggtactttaaaattaccctaggaagattcaactcttgggctgagttctcaaaagaattctacacataattctcgtccttgagacttgtaccatcatagctggaagaccttgttgaagtcaaacatcaacaaggggaacctctgaaggattacattcagagatttatggcctaggctactaaagtcaaaggccttacagaagaaagccgatatacggccatactagggggcatactcccactcagtgatttctagaaggatatctggagaatctccaccaacaacatgaaggagttccttgatagagctgacaactttaacaaacttgaagaagcta

SEQ ID NO: 357636 - DNA, 534 bp, Cannabis indica
aacatagccattgctggtgtatgcgcatactcaaacaaaatacatatgttacaaaggagcagtacaaaaaaaaatgcagacaataggagcaaggaaatctaaatatgaaacaaaagaaatagtttagcaaacagaagatataatccttcattaactgaaggggatatcatataccaaaaactatagtaccagagaaatacatggaaataattgaatacttaaaacacaaagatagaaaggagaggcaaatgcaagagtgcaaatgctatgtaaagcccaaaaagatatctctaactcgctgcgctaggaatagagaagaggtttacctaaaatccattgagcaaactgagaatcctagaaaaatcatttgagtaacttgaagaaaatataaagaccaaaaatcacaaagatatatgccaggtatagttcctgaaattaccaaaccaacatgaatgttaagaaaatgtaaaaccaaaaatatcaccaaaacctaatagaaagtctagaaaatagtagaaaactaagtcaagtcaa

SEQ ID NO: 357637 - DNA, 625 bp, Cannabis indica
ccaatccatccccaaaataacatcaaaatcctccagattcaattctgtcagattaattgataactctcttccttccacaaatactggaagggatctcacccacctgctggagataaccaactccccagtaggcagcaaagttccgaaacctctagaaagcacatcactaggtctattcaacttctcaattattctacttgaaatataagaatgcgtcgcaccagaatcaattagaacagtcaataaagtaccagcaacagaaagctgacctgttacagtagaaggaccagtatcagcctcagcctgagtcagggcaaacactcgagtaggagcgggtgtacaatccttcttttgctctagtcatagtagctgtggacaatttctcttcatgtaacccactaccgcacagtggaaacaggccctggcctgacactcaccctggtggcgccttttgcatctcgatcattcaggaaaagtctgccagttttagttcccaccaggacggaaaccttagttaccctggaaccttttgtttgggcctatagctgataattcactaggtcttttcttgcggtcaccgggatcagtacccctaccagaaccagcacctgatgtttgcttccat

SEQ ID NO: 357638 - DNA, 525 bp, Cannabis indica
ctctaaattcccgactaatctcgacattcccaatgtctaaataaattgccccaatatactaaaatgctgaaattgtgattctcctgagccatacaccgcgttccatgttgccgggcaccgaaaatgcaaaattatgaaatttcactatatgacataaaatgcatttagaattcaaatataacaatatatataattatttaaatatctataaataattttccataattaaatcttaattaactgctaacttccaaattaaactaagcggtctttacaatcggaccatcggccccatgaaagtccaacccccttctttcccacatcggaccatcagaccccataccatcggacccaacaaatgaccaccagaccctcttcttccccacatccgaacacccaaatcccttctcctttcacagatccaaacaccctaatcccaattccaaaaaatatttcttaaatcacaaacaataaatcttaaacacaaacaattccaaacaaaatcacaaacccaataaatcttaa

SEQ ID NO: 357639 - DNA, 1011 bp, Cannabis indica
tgaaaataattttattttcattatgaaaatattttattttgatttcttgtgaaaaatcaagcaattttagtttttacggaactcgattccgataaaaattggagagttatgatattttgaagttttgggttgaatgggtgtcgagttggtgcatcaagtgcaccaggcactcaaacaaggaggcttcctgcgcgcgcgtgaggcacacaaaacttttctgaagcctcggtcacacgcctgttcgggcagcagcatgcgcgtgccaacacccttcatgcaaggtcttttgcgcgcgaaattggcttgctgatcctccatgcacgcgcgtcctaggctactggcagactggcagccttcctgggcacagcagcctcttgggcagccacacccctaatgcgatttttgtgggatattttcataaattttaattttttccaatttcataaaatattatttttaatatatttaaacttaaatatcaatttaaattaataatatttaattttttaatagaaaattattaatttttgatattttgaggtttaaatttaaaaattgattattttatttttttatttatggtcagattttaaaaacttgttaatttgttaatatttatatattatttaattataagatcagatattttaatattaatcatattttaaattaaatgataattttatccttttaatttgaaatatcatattaaaattatcttataagataaattaaataattgataaatttgaaattaaattagatatttttatagatattctaaccataaaattttcaaattcaaaattggttattttgttaaatatttatttatttataaattataagttagaataatgatattttatatcattttacttattagaaatttataaatagtattttaaatatttaaataactaagatatttttgtaaaaatttgaaaaaggcttaatttgagatattttgacatataattaggataattattatttgtttattattttatt

SEQ ID NO: 357640 - DNA, 1026 bp, Cannabis indica
tccacgtggctctggtcttgcccacatggatatgtcacataatcacatcaagctatatttttctcaactcaaaatcacttattagttgatcatagatcaattgatctcaatctttagatgattaagttttaagctaattgtattattagagttctttaatttatttgttaccatcttacccgtggtctagctcatacttacatcttggaactcggtagttcaattgagtgtgagcattagctagatatagacacctatagtttctatgattatttaaaagtgaaatgatagtctcctttgagcttggctaaacgagttaaatggtgagtaatcatttcagtaattataagagtttactaaaatatcatttacaatgagctataagtgtttaaaagataaaattcattgaggggaaaaatagaaattttatccccacttgatgtagaccatctatagagaatcattcattgttctgatcaaagcaatattgtataatttataacatatatatattggtaatatataatgttctatgtaataatgagtgcaattatgggtttatagtggagtcacgaagaattaatataagttaagaaatgtacttggtaaattcaaatcaacttagtaggagtttgatttcataggcccatgaaatgtaaaaactatgtcaagtttgataattttcactaaatttgggctaaattaagaagataaaaaaagattaaggtttatttgtttattaaaacactttatgagtcaaattaataaatataatttaaattatattttaattgataatgatttataattattaaattaaaaaaaattaaatagattttaattaaattaataaataaattagaaaaggttaatttatttttaatcatgaattgatttaaaataaaggctaattagtaattttttcccctaaactttgacatgtactaaatcatgtcccctgaacttttttggccgttaaaaattcccctcgaactattgagattgttaaatttaaggacttttgtc

SEQ ID NO: 357641 - DNA, 621 bp, Cannabis indica
agtttagaataggtggtcgatatagagttcgggagaaacttgcaaacaccaacataaagtaattgttgcattattacatggcagtcgtgtgattttaacccaataacatttgataatttttgtttactttctttttcaaattcgaacaaaagccatctagaaatttcatatctctaataaatttacaaaattggagcctatcattaggtttaagaacgtaaggagcatgcggtttctacaacttccccctctcatcttcataaatctacaaccattctctgactcataacttcttcaaatcgtgtcttgcattggtggtatccttggatttatcattgtccaaaattgtgcccaataaactgtcacaaatattcttctcaatatgcatgacatcaatattgtttttaaaatgtttgaacaccaatagtcaagctcgtagaagatgcttttttttcctccaattttgatttttcgccacttgcctatgcttcacaccaccaaatagctcatgatttctcgagagttggggtgggagtttgtttacttgttctaatacttcctcataagtgaaacgtctcggaggtcttctctcaatttttctgtcaaattgagtatcccttc

SEQ ID NO: 357642 - DNA, 554 bp, Cannabis indica
ggactgtccaagtgtacacacttatacacgtggcaaatttttagtggtccacataatattaattttataaaataattataaatattaaaaaatcagaaaaaataaaaattaaatttttttttctttttccttttcttttcttctttttttcttttttttttccttcttctttcttcttcttaacctgtagattatgttgtgttagatgttggggtgagttcctttgggttgaatgtgaaaagggctataaatcctcaacccaaaagcatgtcctctgcgaaacaccctaatgcgccctcacttcatccgtgggttgcactgtcaccggttccaactcaagtgaatacatttgtagtgtgacacccactgacccattttcattcagtacaagtagggatttacaccaagacattttttacatccaacccaccaacggattcaacccaatggtaaaatctgtttctataccaaatctcccctttgtttgtgctccaaactctctagtgaaaggtctcgcaagtggaactgtggtgtagatcactccaccgccgcta

SEQ ID NO: 357643 - DNA, 1384 bp, Cannabis indica
ggtaccccgatataccccgtaaggggggtcagggtcgggtaccccgagacaacttacagtttttttttgttggggcatcacctccaagcgggggttggggtgatacaccccgagaccaccccatgggaggtcggggtggtacaccccgagactatcaatagggggtgatgcctcgggacgaccgtatagtaattttgcgatttggagctaattgttgcttgtctaattcttggggtcttaaatgtatgccttcatgtgttgtttttgctttttacacttagtaaaaatattaagtgttgtaatggtcattgttgctcccttcatttagctacttagatgattatctcgttgtaaatttttgttgtgcatattttctcttctccttttatttttgtactagtaggtgagtccatcatggatagcttactagcattactcggtgtactcacctcctcgctttttcctttttgcagatgcgttatagcgattattggggaggtgaacaccgagtagacgaggaccttcttcagcttttgtttgaagattgtccagcgtcgcccccgcacaacttgtctggggacgaggggcttagtagtgtgtcagagacgcccgaccacctctaccgagagagaataggtggtgaagtgtacaacaggcacatttgggagcttgaaaaggggatacgatcttatttgccccgagagtggacatacactcttccttttggtgaggtcaacattccagtaggggtgcccatcggcccgtcaggggagctccccttggccgagactgctataaccaccgcaaaactacctaccatgttgaacgctatggctcgcactaaaaagaagagtcgggttggctcttctgacagtcctcatatggcggaggtcatcactaaacggagggtatctgacgatcttgagactggttccgacgatggagccatggaggagatagtcagagagtttgagaagtgggtggaagaggaagctaagaataccctccacaaagccgccaaagagaaagaaccagccgagggttcccaaccagctactcttgaaatcagacagtttgcctcgagagtgattaaggaggtttgcacttcccattgcaaaaccaagcagaccccatttttggccccttctagtagtcttagcgagacccaattccaatatgtggaggagatgacgatgaatggcaaggattgcaagttaataatcccgtccctgaatcagttggcgcatgatcctagagagggattgtgtgcatggtctcgtcgccatattacttatggggggcactcacccttcataattttttcaaagatgtgggtgattattttggcattagttcggggcagttctctcccttggccatgcga

SEQ ID NO: 357644 - DNA, 890 bp, Cannabis indica
gtttgattgaatcaaagctacagaagttatcaaagttgtgaagacaaattcctacacccattttctctctctgaatctgctcctctctctctcttttctacttataataatatatctatattagcaaagctatactagtgtagttgttggggttgtctagagtttcactccatgatctatctggtcctctctctatataaataaataataaaaatataaaagagagagggagtcagaaagtcgtcggtgaagcagtcgggttcaacggcggcggttgttgatgaaactttagttaatacttaatagttagttatattacaattctctgtaaaaatatttcatttttattttcttacccaaccgtgtagcaataatatgtattatgtaccaaaaaaaagactattgtcttaaacaaattatatatatttataataacaataatattattttagtactatttttaatttaattttttataaaaaaatatttcatttatcaaaaaaaaaaatttatatttccttctatctacttttaaaggtgctctttgtgtttgtgaggacaagaactcaaggaaggaacgaggatattgtgattcaaccatttttttcgcttctgttttagaagaaacaatattgggaaattttaggatgtaattcaattcatgtacatgtattgattaattttttttttgcttaaaggattgtgtagatagtaaataattataatttttttgaaaattcaaaataatttgttgtgtttaaatatatgtatgtgttttattttatatgcatgtgaaattaatttttaattttattttttatatagtaaattataatttatttaaattgtataaaataatttataaaatatcttaaataattataatatat

SEQ ID NO: 357645 - DNA, 563 bp, Cannabis indica
tgctagtgagaatgaagtacgtcccgttactgtcttcttagttgttctatgagcccaaagtacctgaggtagtttgtcgacccatctacctttggcaccatctaacttcttttttatagtatctttcaagggtttattaacagcttctacttgcttgttttcctaaggcctggacagtgacgagaagctcttaataatcttatttctttcgcaaaactcagtgaataggtcgccatcgaactgagtcctgttatctgatactatcttaatgggtattccaaacctacaaataatgtttttgactacaaattcaagaacttttttgcaagttatggacaccagaggttcaacctctgtccattttgtaaagaaatcgacagccaccactgcatacttggctcctcctcgccctgtgggaagtgccccaattaaatcaattccccatattgtaaatgggtagggcgaggtcatcattctcagttccattggtggtacacgaggtatatgcggaaacctctgacacttatcacacttcttgaaaaattcatgggtgtccttgttta

SEQ ID NO: 357646 - DNA, 550 bp, Cannabis indica
ccttaaactctttactttacaagtttgaatatttgttataatatatcgcttgccatattacttgcatttatttgattaagtgtctaattacttaatttggtgttaaaagttttaatttaccaaaattagtttaaatttccaattcacccccttgtaaacatatcttgggctaacaaaatatgttgacgaacaaatggatgagtttaacaaattgatcattgatctcaaaaacattggtgtcatcaagaccttgttgttgctaagctctctaccaatatcttcaggtatttcaaggacacaatgttgtatgaaagagaatccatctccctcgatgaagtttaatcaaccttgaatgcaaaggaattgtatcaaagaagtttaatcaacattggtgtcattgaaatatcatttataggtggctaagtgttttaaggataaaagacaatgaagggtgtaacggtaaatttatccctatacaatgtaaatcatctatagaggagcattgattattgggattattgttggaaatttttttaccaggatcttagat

SEQ ID NO: 357647 - DNA, 522 bp, Cannabis indica
gtagcgtgccttagcattagggcgttacaaaaccgatgtggaagttacatgtggatgggttggcgacagatcaactatctggtgcaggaatttcccttgtcacacctagggggcaacacctgcacgctgtggtcaaattcggattcaaagcctctaacaacaaagccgaatacgacgccctaattgctggacttaaactatcaaaggaaatgaaggccgaacacattgagatctgtagtgattcacagtttgtggtaaatcatgtatccggcgaatacgaggcttgaggagaaaaaaatgatagcatatctgagcaaaatacatgatctgctcgcacaattcaaaagctacggtctcaaaaaaattccaagagaagaaaatacaactgcagatgcgttagctcgattggcgagcggcaatataagtgacaaggcaaacctggtccctatccagttcctcaaagagcctagcatcactggcacagaagaaatccaatctgcacgacttctatttgaagttcac

SEQ ID NO: 357648 - DNA, 633 bp, Cannabis indica
ttgttggtgtatgatttgtatttttgaagttagattacggttaaatatgatgaattgatctagttttggtagctattagtaggtttgagcaagctttgagttttagaactcaagcttggctctttaatggtgtttttttattctaagcttgtatggttgtgttattgcttggaatatatcttttggggtataatatgcaggtccggaaggtttagaatagattggaatcgatttggttaggttttggaatttttgggggatttctggtgtaaatcgattaaccggttttacaaaaccggttaactggatttgttgctgggttctccaaaaaattcgtgttgtcgattcgtgttagtttcagagctttggttggttagttccctgttagtttagggtattttgatgttaacttacaatagataggttttggtttaaaacttaagtcccggttttgatttagcgtgtcacttatctatgttataatcgattggccggcacacctaaatttagaaataaggtaagattagtataatgtcatgcatatatatttacatgtttagcatacatgttgtttatgcctattagaatacattgatagcagtaatagtatatactgatcgatgttgtcacatc

SEQ ID NO: 357649 - DNA, 968 bp, Cannabis indica
atttacatccgatccgatccaattatgattggatatccgattttattggattggattggattggatcggtcggttgggattggatcggatgactttctgcacacccctaggtaatagcctaatccttgtagtttgtattgacttaagaacaaggagaatggttccttttcttagagctcttacaatagtatctctgaatatgatttcttagacaaatgtttcgaccctttgcctagtgaatatgaatcactatttatagggctataagcttgggagggaagtatttcccttctggttacaattgatataagtggaaagatttcatagtaaatacagaatacactaatcgtgggattcagataccttgccatatctctctgatttgatcccaaagttataggaatttctttgatgactcacgatgcgaaagttgaatttgttaagtgttggcgtgctacgtggattgctcactgccgggttgagagggcttcatccgagcgaatatatgaggtgccctattcggtgtatctcttgtgagcaggtatatagagtatattccacgtgtcaccatcgtgtgatgccacgtcagagtgcaaaattgggataacagtatgtgtctaggcccgtgtctatgttagggttttggatttagtatttagggatttatggtatagggtttagggcttagggttttggggtaagtgtaaagagtttaagatttagggtttaaggtttaggatttagagtttaagggtccaattccagttccggctccaatttttggtcatcgggtacgatttatggttcaggtgtgggtttaggtcagaatcctggtctggctctaggttcgtgttttgggttcaaaaccgtgtctcagtcccaaatccaaacaccaaccacatgtcgagtccatgttgggttttatgctctaaataaaactccatttcaatgtaatctattttattcaa

SEQ ID NO: 357650 - DNA, 423 bp, Cannabis indica
ctaaccctactggaatgctataaaaagatagtgaaggcttcagaaaaattacacttctgaatcagaaaacctgagcctttctctctctaccttggtaaaataattccaacacaatgaatttcagtataacacatcttgaaagaaccctaaggatcaatatttctaacagaaatagaccgctctgatacaaaatgtaaacccaaatttttgtctaacttatctttttcatattcgtattgattttattgatttatgcttgaatgtgaaaaataaatcaaagattcaacactagaaatttacaaacattacctgccctagaaactcattctaggccccgaaccaggatagtaactttcactatattcaaagatgtatcttacaataccaactataaacactattgtaaacaatacactcatttac

SEQ ID NO: 357651 - DNA, 675 bp, Cannabis indica
tactgcttgccaatcgagctaagacgtctgcagttgtgttttcttcccttggaatttgtctgagaccgtagcttttgaattgtgcgagcaggtcatgtatttttctcaaatatgctattatcttttccccccgagcctcgtattctccagatacatgatttaccaccagctgtgaatcactgtagatttcaatgtgtttggctttcatctcccgggctagttttaggccagtagttaaagcttcatatttggcttcgttattagatgccttgaatccaaatttgactgtagtgtgcaggcgttgtcccccaggtgtgacaagggcaattcctgcaccagatagttgatcagtagccgacccgtccacatgtagtttccaagtcagcttgtcttcactgttacttggctgagatgtttgtaccggctcggggttgctttctagtatgctttcttctttgcctgtgcattctaccacaaagtccgttaggaccaggcctttgattgctgttcggggttggaaggtgatttcgtactgacccagctctaccgcccacttgagtaaccatccagaggcgtctgacttttgcaatatttggcgtaatggttggtcagtgtacacccgaacaagatgagcttgaaaagagggccttaactttctcgttgctagaattaggc

SEQ ID NO: 357652 - DNA, 644 bp, Cannabis indica
aataatctaaaaataaaatataagtgtgaaaactagttttgaacctagaaacaaagtaataaaaaaacttaaaataaatatacattaatatcataaaattgagcaacctcattacagaaccctcaaaacccgtgaaacaagtttcaaacctgtgaaccctgtgaaaccagttttgaccctataaaaaatcataacaaaacttgtaaaatcattacaaaacttgtgaaatcataacgaaactagtttatgcaatatgaacataaaagatttaaaccacttagcataataccaaggacccttagagcagcaaaacttaaccaaagacaagcgaaccaaactaataaatttcacacaagcaaaccagccctctgaaacacacaaactaataaatttcacaaccaaaaacacaaactcaatttctttctatctaacaacatgaactaacttgttcttgttgttctacaaccacaactaggctatatagtaaataacagattgatataaaattatgattgattatataattaacacaatcatagtatacaagaaagttaaaagcttgttctcttaattagttttgccctacaaataagaccaaattaaaaattaaaaatgtcataacaatgacaacaaattaaaaccaa

SEQ ID NO: 357653 - DNA, 611 bp, Cannabis indica
ggagaagctaacaaaaagacttgaattttgtgatgaatgtgttttggggaaggcttgtagattgaagttcaacaaggcagaacacaccaccacagaaaagttagcttatgttcattctgacctttgggggccatctaggattccaaccaaaggtggagcacactactttatgagtataattgatgattgcagctggaaagtttgggtttatttgttgaaaagaaaaaatgaggctataggaatctttgatacatggaagaggctactaaaaaaccaaactggtaacaatatcaaggtactaagaactgacaatggtcttgagtactgttcaaatgagttcaagggattgtgtgccacaatggaaatcaagagacatagaactgtgatcaaaacccctcagcaaaatggtgttcctgagaggatgaatacaactttgattgagagggttagatgcatgttactatgagctggtttagatagaacctttaggggagaagctcttaaaacatcatgttatctaagcaatagatcaccatctgtgccaaacaacttcaagaccccacaagagttatggataggtaaacccctaaacttagatcacttgaaagtgt

SEQ ID NO: 357654 - DNA, 1084 bp, Cannabis indica
ttcttcttcttctcctaaatttagcaatcatctcctcaggcttgggatagaagtcaagcttcatgctttggccatttgtcgaccaggccatgtagacgccatcatcaaagtgcttgatacaacgcttgcaggaaacaggggagaggagctcatctcttttagccttctttaaggcttgatctctgaagtcttttagctccttcatctccacgaccaagttagccctggactgcaagtccgcctgctgcaattcctttaaggacctcaccttcgcggccatctcgtctatggcctccctggcctcccgaagctcgcgcttggccttggcagtggcctcgccaccagcctatccctccgcaaaacctcctctcggagcatcgtcgctgcctgggcttccctctatttagactcctcctcgagcttcgccttagcaagagcctcctttcgctcggcctcctcctagatcgcccgcctttcagcagacaagtcctgtaggatcctcacgacctcgtctatgcccccaaattaggacaggacgcagccatggttaactatggtcttagaaaggcggatggtctctgcagtgatctggaaaaggaagtaagagtgagaataaaaaccttaggcaaaataccaaggaaagaaataaatcacaagtacttaccacagccagggcgttgctgatgtcctgaacctggtagacggagttcaaggatgcacaagcagcgtactgtttgggcgagaattgagtcagatgggagacgtattcgctggtcagctccgaggcgaaaggggctaaggtgggtcccaaggaaacagttgaaccaatccgtcaggagatccatgttcagatcccactgattccggaagttctcctattgagagtgttttgcagctacctctcgtaagaccctcttcaaggcctccaacctcagcatgcccccgggtgtactcgtcaagggcgtagttatgtttgggtatctgaagattctgcctctcctcatctccagggacttggagtcaacacattgctatgaggcactgtatactctccgcctcggaggggatcccggagtcatgactc

SEQ ID NO: 357655 - DNA, 1285 bp, Cannabis indica
tagttttaaccatagttctcttgcctttgcttcttagttcttcattctgacaatccgttacatgtttaaactaacaatggatttttaatcacaagtttcttctaagtcccgacagtttgagttacttagaaccctcccactacgacaaggtaccgtaactttttgtctaagaacctaagtggtattgtcctcatcggttgtatcaatacaacagaggccgtggaatcatcttatgaataagatgatagaacactttggaataaaaaaaaaatatctcctctactttgctactttcagatttagtcattttcttagaaagtagtatttgttcaaacaaacactatcttatcttaatgactataggatggtccacccctaatcacttagaatagctatcaaacatgcaaaccaaggttaataattctagcctttctaaagttcacgatcaggacatttatgaatctaggaatggtttacaccaagtacacaaccatttcatcattctgaaattttcctatcactagggtatttccctagaaggacttaggcaactgctagtactaatcataaaccttatactatcatcaatatgcaaatcaaatttctggggaggtaagtttggatatcattcaaaattcaacttaatgatctttgaactacatatctaccaaatatttctccacccctatcacttcgcaagatctttaactacttaccttatgttttcaacattgctagaaattcatgaaatttctcaaacatttcaaatttctttgtataaggtaaaatctagagtgattgttttaagaatttaacgataactcatatccacccctgaatgtacatctatattcgaatacaaatgatctaactttcaagtggatattggcatattttctctttgcagagaatgatcttgtcaaaatcactatgaacaagatgtaaatgccatagataatttatgtggttgtggtattttgatgatttaggtctagttacaataaagagttcttagaataatccaagtggatcctggtcacagaatacaaaactcatattccatacattaacatacagttcgaatccatggacagaaaatggagattaacaacttgtgaaagtcatactgtattgtccaatttaatgtcatagacttaaatttataccaaatatttctgagtaattattctagtttggaccaccactactaatttagttctaagtctaaattttcttaagtaagcatatacaagtaggagattttctaagtatcgatgatttatat

SEQ ID NO: 357656 - DNA, 278 bp, Cannabis indica
aaaatgtaaaataaaaataaactttacagaacacacttttgtttttatgtttttaaaactgaaaaataaaagtggttacagaacgcatttttattttttcaaaaaataaaaatttttaagaacaaaaactttactttcattttgtgattaataacattagaaatttatgtagtagacttctaaagggtctttatggtagactcgtatctatttcgatatttagagaatttttttagtataatttttttatattcatgtacgttgtaattatttagaac

SEQ ID NO: 357657 - DNA, 716 bp, Cannabis indica
atatgagagtaaggcttatgatcgtgttgaatgggattatctgtctgctgtcatgcatcgtatggggtttgctggtaaatgggtcagccttattatgaaatgtgttacttctgttcagtattctgttttccatgatggccatctcatggggccgattgttccctctcgtggaatccgccaaggagatcctttatctacttatttgttcatcatttgtgctgaagggttttcttccttgatcagaaaatttgaagatgatcaggttatccaaggttgccgtgttgctagaaatgctcctcccataactcacatgttgtttgctgatgatagttaccttttttgtcaagcaaatcccaccacagctatcaacattaagcaaatgcttcactctttcgaaattgcatctgggcaaaaggtgaatgtggctaagtcttctattttcttcagccccaacaatgcagcaccaaaccgaaatgagatttgtaatgttcttggcatgacagaagctactgatggctctctttacttgggactacctaacattataggtagaaagaagactgtgatacttggcttcctcaaaaacaagattataaatcggctcaatagttggaatggcaagttcttatctcgtgcaggcaaggaagttctccttaaatctgttattcaatctcttccaacttacgctatgagcgtcttccttcttcccttggaaa

SEQ ID NO: 357658 - DNA, 671 bp, Cannabis indica
aatttctaaatcacattttgtttaaataagagaaaaaaattggaatttttgaaatcggaaaatcgagtaaagagttgtgcgtgttttagtgccgaaaaatgcaagttttgaacttgcctgattttcggcctacctattgaaaataggtagtccgtttttcgcagataggtagtccgtttttcccaggattctttttgaaaaatgtgctaacggctataaacggctagtttttgttcctacactatataaacttgtttttcacttaaaaattaaggttggttgagcttctattcatcatataacatcattctaagtgttctaagctaaagaattatcatcttttcataaacacaccaactacacacacttgagccaaacttgttgttatcttctctagtgtgcttgcaattctctctaggattttacattgttttttatcttattagagagagttttctttgtatttcaaaattacatattcattgtattgagaggtgaggttgacaccagttttgtaaacaacccgagaagagtgagattttcactacaacaatccgatagtgagattgacacttcaacaatccgatgaggttgatagtccttggaagaaaactattgtgagaggtttgggaaaaaccttagtgaaaaattccctggttgtaagggttagt

SEQ ID NO: 357659 - DNA, 527 bp, Cannabis indica
gtaaaattcatgcaaacataaatcacttcaaatttcttgtattgataagtaatcagattgtaaagagttttatttagggcttaaaacacaacacaaacaaccaaaataattcagtttgtggcatcaagtattcagatgatggaagaagaaggtggtaataagcattttggttctactgttggtgaccaatatatagagatagaatttctggtaatgagcgattatttttctaaaaattcggtgtacccaccgaatattttttgaagatactttcgaatgtatcggtcattgttcctccatatcctaaatgcaattcaactatctgatgattactttgttcaggaaaacgatggtatagggaggcctaggttgtctggtttacaaaaaatgaattcatcaattgggatgttatcatatgatatttctgttgggttctgtgcccaaaataaaacccatttcaatataatataatcagatttacttattaataaagatcagaaaaaacattttatgatgcatggttcaca

SEQ ID NO: 357660 - DNA, 1126 bp, Cannabis indica
cagtgacgctattgagggatcaattgcatttatcaatgtaaatcaattgtatccattttgaactgacattgagtattaacttacacgttgcatttaaggattgttattagggttggtacaattgcataccaacaccatgaccatttgtgtgttattaacttacaaaactttccaaaaaagaaacctcacaaaatatttaatatatttctccaaactctaatatacattactctcattgaggaattgtcgaaaaagaatgaaaaatcatgaaaattgatctcaaatgggtcatgattaagataaagtggtatcaatacttgattttttctgagctagctagttgaacatgtttatgaagttatcaaaattgatcacaatttttttgatatggaattaacttattataagataataacgatggcaaaaattatctaatgtcaaaataggtgtgtgtggaaagtggtaagtgagtacggaaatgagaaataaaatgataaagaaggatttttatttttgttaatttatttattaagggaaaaaaagggaaatttttttattcatgcttaaaataagtgtatggtcttattatatactgtcctattaaatattaaacaaaatatgctacccttttttagtactaaatttatccctctactaataaaattaaaccctatccactatctttcccttttcattctcatttatctttctctctctttacaaagtcacttacacacacacatctttgccgagcactctctcttggagttttagctttcaaccaagtgtgtaggagcaatccaaactccctaccaactcatccttcaaaaaaacaatgggtatataatttatttaataattattgttagattaagtttgtatttaggttgaaatgaatggatctacacgtattatttttttatttgggttattttgtttctgaaacttgagctgcgtgaattttgtattttctggttttttttttcatgttttagcgataatttacaatatctagcgatacatagtgacataagagtatgctaaaggttagggatgacttataacaacattctacatcatgttgcgactaagtttacgacttgtgccaatttatgcttaccataga

SEQ ID NO: 357661 - DNA, 424 bp, Cannabis indica
ctagggcagacccggctcgattcggccacgttcttcatcttagcaggtcaggccccgacccgaaattaattgggtcgggtcagcctgaccttccttttttttttttttttttttaaatcactttatttattgctacttatcaataaaactcacacaattcatttatatttttcttaataagaaaacaatatgcaccatttatactaaagaaaatagcaaacttggcaagtaaaaattttatagttaaccatttaacatcatagataatttcagtttcataataacaaagtgtttctttgttctgctaatgttttagtttgcttagtaggcttatatgaagagttgagccaagaagaaaaattattttcatgtgttatatactgttaaaagttaaacattcttctcattgcagattaagctctct

SEQ ID NO: 357662 - DNA, 572 bp, Cannabis indica
gagaatcgggctcagatcttggtgatactttgctacagaagtgatacaagggttagagatgtgagcggaaagagtcatttaatttcgctgcaaccaatgtaaggtttcttaaactttatatgtgtttaaattacattattttagaaattcatatttaggatgttaaataacgtacatggtagtaaatctagatcttggtaaaataatccccaacacaggtttgtgggaagatttgataaaattttgattagagaagaatggagactatgtgaagtgatagggataaaattagtaaaatgattaaaaaataaggtaaacataataaattttaaaatagaagataaaaatttaaaatatcaatttaaaagagatatatgctgtaatttttttttttaataatttacattgccttgatctccaatttatcttgcaccagctctcaggccaagtaacataaagtaggggtgttcacggtgagggtgatgtgatttttgactatttattcaaaccaacccgcaccaatttttcaaactgcacccgcactgcaaaactaaaaaatcgcagaaatcgca

SEQ ID NO: 357663 - DNA, 1151 bp, Cannabis indica
ttaaacaacatacttgtgagtagatctaagatcctggtaaaataaattccaacaattatatatgacaagttatttccacacattggcaatgtggtactaactctaatataccctcctcacgtttgggcctaaaaagtgtgagtataacgaacgacctttaagagaccacagagccgaacgtgacatttgaaagaatcccacaaggccaaatattaggatatttgtgggtgtatacgtcgagaaatttattgatattgaaataggtcaaatatcctgttatacccgaaatttggctggaggacacgtgtcaaggtaaagggaatgtgaatcggtgcaatacctttttatggaataactcattaattgcgtaagtatcagagtacatttgtaacatgctgactataagttcttaggcgaggaatcaatgtagaaactggcacttagtgtattaacgagaaacaatatgtcgctaaaggggaatagcgaggcaccagttaaaagtgacacataccttagcttgcaatgagcaaactaagtgtaaaagtcagatcggctcgaagaacaagtatgcgagatgaccatctcgctatgaggaaacttcctatagtttcatcaaactaataagagcgaggctcataaccctggcaagtcagaggatttctgtataccagcgatcgacgtaagacatacattgtcgacctcggaaagaagaatggtcccagctcgctattgggatcactacaatcaagtttctgtcgagacatctccagattcaacaattaaagacgtgtttaatacacgatattcttaacccagtaaaagcaggaaaattacagctatacgatcttcaaaatcatacactgcatttacattttgtgatatgtaatcagatcccacgattttatggataatggctgtaaacatgttttggtgggataatggctgtaaacatgttttggtgggataatggctgtaaacatattttggtaagctttgtaattaactgccactatacaattataaatagtggcaaacaatctcaaaaaagggacgaaaaactcttatgaaagaggtcctgacaaaatacttagaaatctgaataagaccgactcgaggactatgcagaattttaactgcaagaccacgtaaaa

SEQ ID NO: 357664 - DNA, 509 bp, Cannabis indica
tgcatggtccatctccatctcagctctaaaacttttatttttaaagcttgattttgtttatgaatggcagctctctgttttggttactaggtcttaggattgaacaacacaacactaatcatttgtccttgatgtcgtttatgaatggcatcaactgtacttgaatgcaataataaccataatggttagctctagtcttgactgaacaataccatatcagcagtatataaaaaatagtatattcgtgtactttgaatgaaatttcaccatattgttcctttagctacaagagttttctgcttgtgagttttttccgtgtgttcatatatcattcatttagggaatttaatttataaattacaagagaagaatatgctgagatgtaaggtgtgtatcacgtgtttgggaatgagaattttgagggaaaaactaattaaattattacgtttttttttcattatatatacaaattgtctataaaaaattatagattagatttgtctgttgga

SEQ ID NO: 357665 - DNA, 606 bp, Cannabis indica
actttaataaaaactgctaaccaattattaagtatcatatctgtatagtgttgggcatcttaagttgctaaataataatgttcttttaaaaataaaaaaataatttatcagaaaaatattctacaaaagaaaaaaattattcataagaaaaatcgaaaaaaaaaatcattaaaagaactcacaaaaattgtaaaaaaaaattgtcattcataacaaaaaaaaaataaaatcattaaaaaaaacaaagaagttgttctaaaaagaaattatacaaacaaaaataattaaaagacaaaaataagtttttttatttttttttttgaagatccattcttctataaatgctatatgatatatgtattatattaaagattggtgtctaataacattacgtgctatcttattattataattaagggtaaatagcggcaaaatccccaatactttcattttggtttcactaaaccccgaaaatctaaatttgtgcgggtaaacccccaaaactcgtattctgttagcaatttaccctttccgtccaaatttagttgtttagtaccaggttggcttgtccacgtggacacaatatacacgtggcacaattttatt

SEQ ID NO: 357666 - DNA, 696 bp, Cannabis indica
atatataatataaacagtaatgccatttaaatctgtatgtgtgtcacagacctacatgttaggctcacatgcctgtttatgtttgcgtgacattaacctacgtgttactctcacacgtctattaatgtctacgtggcatagacctacgtgttgctctcacacatctaaatacaataaggccttagaatggttcatctcggttatgattactgagtccaacccgattatgccttgaatgcataacccttaaatctcaatataatcatatacttagcatggcatagcatttactcaacttatatcactagggttataaccctaggctattaaccactcatattagagtaataaccataatccgggctacaattacttacatatatcatattcaacataagcgccaccgcgcatactctacgtgcaaactaatgtattacctgatgtcccgcaataacaaagattccaaacccctgggtgctcctgatcaagtgtcggtaatcctagtcacacaacccgggatttcacaaatagggttaatctctaatttcactttcacatagtataaacatggcattcaaaacacagataatcaaatagatctcggaacgagctttccaacgatataaagaacgtcccaaacagagtcccgagtcaaaagttatggccaaaacaaaatcaggaaaaacatattttctc

SEQ ID NO: 357667 - DNA, 594 bp, Cannabis indica
gtgtaacttgatatcaatgtgctttgacctctcatgaaatattggatttttcatgagatgtaaagcactttgattgtcacaataaactgtgatatcctcagatctgaaacctaactcccttgtcaaccccttaagccatatagcctccttgatgacttctgtagcagccatgtattcagcttctgtagatgacaagactactatttcttccttgtactggttctccttactgaacacaatatcagtgtccagagtacctttcaggtacctcataatccatttgagtgcttcccaatgctcagggcttgggtttgaaatgtacctgctgaccacactcattacatgagctaagttaggtcttgaacataccatgaagtacatgagactcccaacacaacttgcatagggaacattgctcatcttggctctttctgcatctgtttttagtgacggagatgcagacaacttgaagtgctgagcaagtggtgttgcaactggtttgcacttgtccatgccaaacatgttcaatacttctgtaggtagatagcttgagaaagtactatcatgccatgcttaggtctctttatgtctatc

SEQ ID NO: 357668 - DNA, 1091 bp, Cannabis indica
caagacccgagacaaggactagtacagaacatggaccgggacctacacacggactgggaacataacccagtccgggacctaggacccttacctgaattgggacatggacctatgactgaggacccaagacccaaacctagacccaaaccttaacttgagactcaaactaggacacaagacatgagctagaactggactaagatcttgatttagactcgagaccaaggacccaagacccgaggcttggacccgacccacagtcggtgtctaaatctgggaattggacttggacccggacccagacccagacccagacccgaaccagaactggaacccgtaccagaactcaaactagactcgacatgtggttagtgtctggattcgggacaaagactcagacctaaaccaaaacacgaacctagacccagaccaggattcggacctagacccacacccgaaccttaaatcttaccctatgaccaaaaatgtgaactggaactagaagcagacccttaaaccctaaaccctaaaccttaaaccctaaatcctaaactctatacacttaccccaaaccctaaacattaaatccctaaacactaaacccaaaaccataaacccaaaccctaacctggacatgggcctagacccatacccataccgagatcggaacccaggacccagacccaaacctgaatatagacccgaacctagacctagactcatgacctgaacccggatccaaacacagaccggaacctggttcgagacctagaccttcattgggacccagattaggaccccgacccggaccagaatagggacctggactcagaccgcgacccggacccaaactcaaacctgagcctgtactgcgacctagactcagacccaaactcgggatccaaacccgaacctgaacttggacctacaccgagacctaggatccaaagctagatgggggacctgggcccaaaacccgtacctagacccagacctggaccaaggattcagacctagataggagacttggacccaaaactaggccttggaacagggactaagacccaaaactcgaccctagactcgagaca

SEQ ID NO: 357669 - DNA, 787 bp, Cannabis indica
tgacctgggaaaagtttcaggaaatttttcaatgctaagattacaatgaggcagttagaagtgataagagaaaagaattgactcatttaactcaaaaagaaaatatgggtgttgctgagtacacaacacaatttgactatttagcgacattggcctcaggaattgtgccaaccgacttcagtgagaaagagaaatatctggatgggttaaatgctaagatcaggcatgatttaatgattactactaacgacagaaccacttatgctgagatggttgataaggcactgggagctgaaggcgcagtggggtgcgtgatagagtctggtgggactccagttgttggtggggctcctacccctcgtgcatcaagttttagcatgcgaggtagtggttcggccatagatcaaaaaagaaaggcatccactgcaactattggctcgagtcagaaccagaggttctgagggaaccaaggtagaggcaatcatcagagtggcaccgaaacccggtacacttacccagagtgccccagttgtaagaagcaccatctgggggagtgtaaaggcactactacaaaaatgggttttccagacgattttaaatagtcgtttaaagtattcctgtcggtttctataaccgtcgcctatacgaccgtcgtaaaacaagaataataggcgatggttcaaaaccgtcgctaatgtgggtttcccaacggtttcaaaccgtcacctataactgggtataggcgacggtttataaccatgccttatactaaaaccgtcgcctatag

SEQ ID NO: 357670 - DNA, 1184 bp, Cannabis indica
ctcaattctcacttttcagattatgaattgagatcatagaacatgtagaaggtgatcaagcttacatatgtaattaaacacaaatatagatgatttcataaatcaagattggaggaatggcaattaacattaactaggcaaaactttaaacaacattcattatccttcgtaaatgggaatttagttcataaaattaaagtaaacatccatgattaaatctgaaaaaaaaaatagacataaaagaaaaatagagagtgaaagaaagaaactagatggtgatttcgctccgggtcttcaagatcgcttcctctcctccttcattcacttttcgggccgctttctgatgcctttggccatctgagtcgagtcccttagataggaattaaggttgtgcctccaattggaaaaatatcagaattaggtcaaaaaatccagctttccgtgatcgcgaccacaagcaaatctcgaaaaaatggggtttctgccaaaatccccaagttgcgaccatagtcgtgaccaaagaaaggggtcgcgactaggccttgtgctggtcgcgactactgatctagttttggcagctttagccgattgccccgtcttttcatcaattgactgaatttgaactccaatgcaccggaaacctaaaacagggaaaatcaagcgtaaaattgctccaaaaggcgacaacatttgagaaaatgcttattaatgagacccgcaacttaggctaaaaatagcctaacaatgactcttcccaattatttctcaagaacatatcaaatgattttgagttgagcaaaaggacgtcagaattttctttgatcaagtaggtgaatccacaaggtgaaaattattgataaaggttataaaatacttgtttctgcacaacgtgatggagtactgtgttgagctttgtaccctaaataaaactctatttcaatgtaatcttttctattcaattatcaataaagaaacagaattattttcattacttatttagtatgtcatttggttcatgggatcatttatatgtttatttgatttataaattcatccaaatctttatcacatcgatattcttgtttattgtgtcatcagcatagtggaaagtaatcaatattatgtgaataaatgtattcctaaatttatcagtacacagggtttgactgatatgataatctaca

SEQ ID NO: 357671 - DNA, 807 bp, Cannabis indica
aacttttctgcctgctttgagaagcaagcattctggccttaatcttctttgtcgcctcattggtacattgaactaattctggacctaggtattttctctctccgatttcatcccaattaattggagatgtacatttctcgtcgtacaacatctcatagggagccatccctattgtactctgataactattgttgtacgaaaaccctatcaatggtagatacttactccaggagccttcaaaatccatcacacaggctcgcaacatatcctctaatatctgaattgtcctctcgaactgaccatatgtctgggatggaaagatatactgaacttcaactttgtacccatggctcgctggagacttacccaaaacttggaagtgaacttcagacatctatccaaaataacggatttcagagccctacaaattcgtactatttcttttacgtatagttctgcttattgatctattgaaattgctattttcaatggcagaaagtgtgctgacttggtaaaccgatccacaactacccatatggaatcaaacataccggtagttttgggtaatcctgttggaaatattttaccaggatctagatttactaacaagtacgtttcattaacatcctaatatgaattctaaaacaatgaaataaacacatataaagtttagtaaaccttacattactaccaagtatgtttcattaacatcctaatatgaattctaaaacaatgaaataaacatatataaagtttagtaagccttacattgggtgcagcggaatataatgactccttccattcaga

SEQ ID NO: 357672 - DNA, 638 bp, Cannabis indica
tataaaatgcggctaaaccctctaaaatgcatctttggagtcggttcagggaaattcctccgattcatggttaatcaacgaggaatagaggcatgccccacgaagatcaaagcattggtggatatgccatcaccgactaagccaaaagaagtccaaagcctcacaggtaaattcgcctctctaaactgctttatatcacgaccctttgttaaatgcaaagagttttttcaaattttaaaaggtaataagaagttccaatggaccgaggaatgcaaggaggcttttcaagcattaaaaacacatttgggacagcccccgatcctatcaaagcccatgaccggcgaggtcttatccatctacctagcggtgtcagaatatgcgattagttcggtactaattcgcgaagatcaaggacgacaatgcccagtatactatgtcagtaatcgcttgttggatgctgagacccgctatcctcaaatggaaaaattaacgttcgccctaataatatcgtcaagaaagttgcgaccttattttcaggctcatagtattgaagttttaacaaactaccctttgaggcaagtcttagcaaaaccagagacatcggggagattgttgaaatggtcagtagagttaagcca

SEQ ID NO: 357673 - DNA, 771 bp, Cannabis indica
caattttttcctgtgaaccggtatgacctcattctattacttcattagtttgataaaataatttctgattattcttatgagtttgattttttcatcagggacaaagacaaatggacattgtgaattctagttgcaaaaatatcaaggttattttatttttctgtcttttaatacaaaaaaataaaaaaaaaaagggtcgtgatcgagttgtcaagtgagctttgttaaaaatttgttattttttttgtatgtttcattatgttcttagacacaattttttgctcttaagtggtgattagtgctttttgtgtcttggtgtgttctcttgttcattatttgcaatttttctttggggggcattttttgaaaaaataaaagaaaaaggggggcatattttttcttttcgaatttttttcgaatccttgtaaattttttcttttattttttcattttatggaaacatgttttaattgtatttatttatttagaatgtttcctttatttgtggagatttggtctttttggtgtgtataggaaacttgtacttaaataattaattattttttgtttcctttttggtggcaatttcggttttggtaagggtttttaaattcttagattttgtggggatttttggtttcctttttccatttaaggaaacattgaccaaattttgaaaaaccttttttggtttccttttttttctctccacacgtgagtcaaaggtaaggaagttactttccttttcaattttttttctgattttgggta

SEQ ID NO: 357674 - DNA, 554 bp, Cannabis indica
gcttgcctttctactttttgtttggaacttggattttagtatagaaacctttggaaaattctacaatgcaacccttaaaatggataattgatgcacccctatctgttttagcatccgaaataattttttggtcaaattttttctcatagtcatgtacgttatagttatttaagacatcctgcaaaattttaagaaattcagaaaaatttaacacgccgaaaattacgttcaaacagtgtgttgcacgcgtgactattttaatttatacgcgtgtaaaatagactgtttgaacattgttttctatattgtaaactattccgaattttttaaaattttgtaggatgtcttaaatagatataacgtacatgaatatgaaaaaaaaattagactaaaaaattcttctagatgccgaaacaagttaagggtgcatcagtacatccattttaagggggtgcattgtagaatcatccgaaaacttttatgaggaaatttttcctgctaaattttttatgacgaaaattagtatggaagaaatttttctaacaaattttttt

SEQ ID NO: 357675 - DNA, 556 bp, Cannabis indica
gtttgaagttttctgggttagcacgctactatcgttgctttgtggagaatttctctcggattgatatgcctttacaaagttaacaagaaaggaagttaagtttgtgtgggatgatagttgttaagaagctttcagagaattgaatgtaagattaacttcggtgcctgttctcattgttcctaatagtgaggaaccatatgtggtattcagtgatgtttcaggtactgacttaggaggtgtcctcatgcaaaatggtaaggtggttgcctatgcttctcgacaattgaaaccacatgagaagaattacactacacatgtcctagaacttgccgcagtaatgtttgtcttgaaaatttagagatgttatttgtatggcataaagtttgagttatactcagatcataagagcttgaagtatctttttactgaaagggacttgaacttgaggcaaagaagatgggttaagtatatggaggactacgattttactttgcagtaccaccttgggaaagctaatgtagtagcttatgagtgaaatattggaaattattttacc

SEQ ID NO: 357676 - DNA, 516 bp, Cannabis indica
ttgttgttaacgacttcatacgcgaggtcttttatcccttatggatagctgattctgttcttgtctttgaagcctaacagaacttggagaacttgtattgatttctctgatttgaataaggcgtgcccaaaagtttgctttccactacccaggtttgactagttagtggatggaactgctgggcacgagcttatgtcatttattgacgcatattctggatataactagataaaaatgtatgtctcggatcaagaacatacaagcttcgtaacaaacatgggactctattattataaagtcatacggtttggactgaagaacgctggggcaacgtatcagcgattggtaaataaaatgttcgcaaaccagatagggcagaacatggaagtttatgtcgatgatatgttggtaaaataaataaagagtaggaaccatacctcagaacttgcagaatgctttaagatattaaagaagtataacatgaagctaaactccaaaaaatgttcctttggagtt

SEQ ID NO: 357677 - DNA, 585 bp, Cannabis indica
tgaggcacgcttgcagactctcgaccaggatggctaccttggcgaattggactgctacattcccacccacaataattgtgccacaaaccctgaaagggggatgtgcgcttggtcgggcgctcatgcccagcaaggggcattgatgcctttgcaccaatactttaagaatgtggtggacttcttcggcctctgtccggcccaattcactcctaagggcattaagtatctgtctgccctcttcgtcctctacgcctcccagaagtgggatatgccttctccccacgaggtcagctggttcattgatttgaattccacccccaagcaaggcaggtcggggtacttctatttctctcaaccagactacaagtggttgacgggcaccgatgattcggccatcagcaaaattgggcattttgttccagcagattccaacatgtcaccacactcccctcactctttctcatagggatagaactcaaaagcttgcttgactggcgggggaagactggaatatcatctagttgacctccgaggacaactttgtgaagtatgggctctatcaaaaggatttcattcctaagccag

SEQ ID NO: 357678 - DNA, 815 bp, Cannabis indica
aagtgttgaggaaagtcactcagccaagtgttgaggaaagtcactcgaccatggcatgaggaaagtcactcggctaagtgttgaggaaagtcactcgggcaagcattgaggaaagtcaatcggccaaacattgaagaaagtcactaggctaaacattgaagaaagttaagcatgcatgttacacggcatgcccaaccatgcatgtcactcggcatggtcaagcatgcaagtcactcgacatgctaatgcatgtcactcggcatgctcacgcatgcatgtcactaaagcatgcaagtcactcggcatgctcaagcatgcttgtcactcaccatgctcaagcatgcatgtcactcgacatgctcaagcatgtgagtcactcggcatgctcaagcatgcaagtcacatggcgtgctcaagcatctaagtcactcggcatgctcaagcattaatgtcactcggtcaaggtagcatgtaagccactcgaccaagatttgcatgcacattaagtaatcaagcatgcaagtcactcggcgtgctcaagcatgcaagtcactcggcatgttcaagcattaatgtaactcagtcaaggtagcatgtaagccactcaacaaagatttgcatgcgcattaatcaaacatgctcttgtcaatgacacaaccacgccaagtgagatttttcccaagttttgatgatgaaggcaacgaaggtatgattacaaggagaaggtgtgcatgcaagatgagtacaaccacgcctcctacaagttttgatgccaaggaggtacgagtagtagaggcaccacacctgcaaggcct

SEQ ID NO: 357679 - DNA, 504 bp, Cannabis indica
taataatttttgtcagctggacaatgaatctctccatgaggcttgggagaggttcaaagatctcatcaggaaatgtccacatcatggtattgaaaagtggatgttgctccataacttctacaacgggctgattggtaatacaagaacgatcatagatgccacagctggttaggcatttatgagaaaaagtgcaaacgaggcgtatgatctgctcgaagaaatggttatgaataaccaacaatggccaactgaaagaagccaaacgaagaaggttgctggtatgcacaaggtagacgccatcgccaagttgacagcccaagtggatgccttgacgaagttgatgactgctcaggtgaaacaggctcaagttgcttgtgagctctgtgggggtcctcacacatatgaccaatgtctggtggatttgaatagttttccaatggatcaagtaaagtccattgggaactattctcaaaataataattatgggcacaagcaacaggggtt

SEQ ID NO: 357680 - DNA, 649 bp, Cannabis indica
acaaaatccttgtggaggcttaaatatccaaattgacttatttctccaattcatgatggagactagagcctctattaaaactctagaaactcagatggaacaattggctactcaagtggcaaaacaagttcaaggaaattcacctagcactagtgaggcaaaggaaaaagagcaatgtaaagcaatttccttgaggagtggaaagagttatgagggacctagtggcaagcaaccagttgaagatggggttcaggatcaacaggcacagacacaggcaccaaaggaaaagaagactgttgagggtcttgcaccgaaagaagcttcacctccgatcagcatagatcaccatattaaaattccttaccctcaaagactccgcaagaacaacctcgacaagaagttttcaaaatttcttgaaatatttaggaagctgcacattaacattccatttgtggaggccttggagcaaatgccaacttacctgaagttcatgaaagaaattttagctaagaaaaggaagttggaagaatttgagacagtggcactcactgaggagtgcagtgcaattttgcagaagaaactaccgcccaagcttaaagatccgggtagtttcaatattccatgctctatagggggttcggtggaaact

SEQ ID NO: 357681 - DNA, 524 bp, Cannabis indica
gagagcatggactttccaatttttctatggtcgcgactaggctttatgtagtcgcgaccaggggcgaaagacgagatttttgggcagttttgtaatttcaccattcaaagatatctgcattattttctatataagggttacgtgttttagaggcaaaggagacagaatactaaaccctaaaactgaaggaggcaaaggaagtaattgtggcaatccggagcaagatcaccaactagttctttcttctccctttcatgtctttatgttaatttctgtttcaatttttatggatgtgaacatgagctttttgaactaaattcccaatttagggatatgatgaatgttagatgatgtttctttaattcagttaatgtgattatcagtttttcttctctatattgtgtgatttgttcttatttgttttaattacatattttagactggccatcttgaatgtgatttatgatcctaatatgaaatctgagaagtaaatattaggaatgctctaatcggacaaacataag

SEQ ID NO: 357682 - DNA, 684 bp, Cannabis indica
attgattgtaagcgaaaaatggtaattttccaacttgaggatgaggatccatttgtctatgttggatcaatttaagggtcttggatcccaattatctcaattttaagggctagagatttacaacacagtgaatctgtatgattttagcagttgtgatagacttcagcagacccaaaacatttcagcctgatgtagtcagggttattaaagaatttctcgacgtatttcctgaggagttgctaggattatcgctacaacgagaaatagattttgtgattgacttggcacctagagttgaacctatttcaaaggctccatatagaatggctccagcaaaactcaaggagctaatggcatgtttactaataactaatgggaatcaatcgtaaggtaattattcccttacatttttttacttgcattattaaaattaggaaagggagaactttattaaataagggagaaaagaaagggagaacttccccacaaattttgtaaggaatgccattaagggcaatggattttaattatttttattttttttttaatattaaatacataatgacaattttgtcctttaaaatatgtcttacaaaataactaccatataatatagtttaacttaaaagggcaatttagtcaatttaagtattccgattacgtttcctaataaagtaaacaaga

SEQ ID NO: 357683 - DNA, 740 bp, Cannabis indica
aataataataacaatttaattgtatcacacttaatatacaaaataccaatatatgtatataaactggatattacaagaacgcagaatcaagattctttctactgcaattcttgaagaaatagttaatgtcatcaatggcgagacttgaattggaaaaatttgatggaattggagactttgcgctatggagagaaagtttgaaagggatcctagtgcaccagaaggtctccaaagttcttggagatgatgagttattggctaaaaagaaactagaagaaaagtaaaaatggaggagatggcgtattacatgtcatgtatctatcaaacagtgttcgaagaaaactcatcacagagaaaataggaaaaggagtatggaacaagttggaagaattatacataaagccatcatttgctagaaaggttatacgattttagaatgatttattcccttataatattgacaagtttaatgagattattgtaggattggctaatataaatcataaggttgatgaagaaagccaagttatcattttgttgagatcgctcccaatcacatatcaagaagtcaaggctgccatcaaattgaaagatttcgaatttcaattggaaaaggaatccaagaaagaggaagtgtatttggcaagaggaagatcagccaagaaaggaagttcgaagagtaaacatcatcactatcaatcaagaacctataagccaggcaggttagacagcgatcaaaa

SEQ ID NO: 357684 - DNA, 581 bp, Cannabis indica
caaaaactagtagggttactacaaccactagaatttgaatggaagtggaaggatattacgatttgagtttgtggctggtttgcccagtaccatgacaatgtatgactcagtatgggtcatagtggactgtttgacgaagtcacaacattttttgtcgatagaaacaacttatacagtggatttgtatgcagagctgtatgtgaaagaaattgttttccttcatggagctccaaatccattatttcggatagggatccaacgtttacattgaagttctgggtaagtcttcagagagctatgggtacgaagttgaagttcagtgcaacttttcactctcagactaacgggcaatcagagagaataatataagtactagaagatttattgcaagcatgtgtcatggactttcagggttcatggagcaaatacttacctttgagttttcttacaataacagtcaaagtacaataaggatggctccctcataaatgttgtacggtatgaagtatcgatccccaatttattaggatgaaactggagaaaagaagtatttaggtcctgagttagttcaaaggaccaat

SEQ ID NO: 357685 - DNA, 607 bp, Cannabis indica
aaaatatattttttctcacattaatatgtgtactattcggccataaaaccggctgtaggaagtcaataaacttggagctacatttactctttctttgtctcatttgaggtatgtcaaacctcaacttgaagtgagggatttcataaaataaagtaatgagatattatattttttaatcataacataggttattcttgttagagttagatataaaacatacatggatcttaaactaacgttagatctttaaaattactttatgaattaatgagaagaaaatatgtgattccatgattttcgatatgagatcatattatgggaatatggtctttcacagattaatcttctctttatgagttctcactcatttgatgagaatagaggagaagaggagttaaagattaatcttggggaccaaacttgtaacgtcccgcttcaagcttctattgtgccttctgccacggacttgtggctcttatacatacgtacatcattttggctacttcttggaatgagaactaaccctacaaaccaacacgagtatttccagcatgctttgtcctcactcgcacactccttggggtaacttcccaagagatcactcatc

SEQ ID NO: 357686 - DNA, 754 bp, Cannabis indica
cccagatcaaaacccagacagagatctaaacccgaactgagactaggactcgaacccgaacctagaccgtgacgcaaacccacaataactgggacgtagaccctgaatcaggatagggacgtgggaaacagaacaaggaccgggacctagtacccgacccagacccgaacttgaacctaggacccagctcgtgacccggcaccaaaaatggaacaagattgggaccctagattgggatccggatctgttcccagggcttggacaaaacccgtagtcggtgtctggatttgggacccagccctggacatgaaccctgaccaagacctgaacccacacccggacctgaacccagtccaaacccaaaagtggacccaaacccgtaccctgtgaccaaaaattggaaccaaaaccggaagttgaccgggactggaactagtacttcgatttggaatcataactgaaattggacctatatccataaccgtattcggaccaggacctggactgcaaatcagacctagacccaaattcggagccagacccggattccaacccaaacctagactcggcacccaaacccgaacctgaacttaggcccaaacatggaaccagactaaggacacagaaactgggttgggacatagaactgcaccctagtctcgatcccgaacccaaactcagaaatgggacctgaaacctgaactagaaccagacctggacagtgatccaaatcttgactcgggattcgggtaac

SEQ ID NO: 357687 - DNA, 1346 bp, Cannabis indica
aaccctacctgagaccgaaaccttaacctaaaccttgcctcagaccaaaatgacgacccgaacccagactcagatccaaactcgaccaaaacccgtaccccataacttaaaactgtaatcgaaactagaagcagaccaggacccaagaacaagaccatgacaaggacatcaacatagagccaaaactgtaaccggacctggacccagactcggtcaaggaccgactctgggatcgggtccaaaatctaaatccaaacccgaactgggactcaagacacgaacctagacttgaattcagaccagaacattgaacatgacacgagacccagaactggaccctagtctcggtcctggacctaaacccaaacctagaccctgacctaggacatgaattgaaacaagactaggacccatgattgggatgcagatctagtccaatgattagagaactggggcttggacacgacccatagttgatgtcttgatcatggactcggacaaggacccgaagctggaaaaggacctagacccagacccaaacctgggacgcaaaaccgaaacttgaaaaagaacgtgatcaggaccatggaacaggaccgggaccgtgagctggaccttgacccgaactcagaactagaccgaacctagctcagaactcgggttcagacccagtcgtggacccagactagcactcagactcgaaccagaacctgaacacgaagtcgggacacgatcctagacccggacaaagccctttacctaaattggaattcagaccttgacatggacacaaacccatacccgaacccaaataccgacgacgacctagaccgggattgaaacaagggacctaggcccagacgcagacgcatacccagacatgaacatgggacccagaaccaagacctaaacctagaccttgactcagatctgtacctagaccgagattcgaaaaacccgtactcggactcgaactaagactcagaccctgaaaccaacttggacacagacccggatccggaaccatagtcggacccagaataaaaactggaaattatgactaggacccagacctaagacgataaccaaacccaaaccataactcaaactcagaccaaaacctggaccgagaccttgactaggactgggacctgagacctaagacttgaacctggactaggaccgggaccgggacctggacctggacctggacctgacctggtcctaagccctcaccagatcttgacactcgcaacccagaccaggatctagacccttaaaaggacccgaacctaaaccaagacaaagattgggatcgagacgtggacctgaacacggaccgcgac

SEQ ID NO: 357688 - DNA, 1815 bp, Cannabis indica
tgagtatgttacgtttttttttagttaatgattagtgattatttataaaaattattaaattaaaatctttaagacccttatttttaattgcaataatagtatgacacctcagctcgtactagtggttaaaaattactaccatttctttttatattacgtaatcgaagaataaataaactgttaatttaagtaaaatagtttaattatataccaactaacttcacaaattattatattttattattacattcttttgtaactatcgttacctttaaacatgtgtgataaaattacagaattgtgataaagtatacttaatatcaaaattagtagagtcaatttttttaatattaataattctaatattgattaagatactatttgatttttttataattttttttaggaatttatcaaaaaatagactcatttagaatactgttaggtatatgatttcaaaaaataatttatactctattaaagtttgtttgattttatagtttgataacttttttgttaacaaaatataaaagaaactaaaaaattatttttgatttcgatcattttttctagattcaacaaaaaaaaatataattttcatataataaaatgatcatcttgaaaaatgtcatgataatactattttttaactcaaccaactaacaatgtgataagtaaaaaaaatatagagagatgagtgagtataattttaaaaaaatttattgaaattactctacaaaagaagtttatgtaaattacaatataaaggttactctttttttaaatatttactgaaattgttctataaaataaacttatgtataatattatcaagtaaataataaaatactttttagtaacccataaaattagttggtacattaattttttttaagtgaaaaatttggtactatcttattttcttataagttattttaaaaatttgtgaaaagtattttataaaattagcatataatttagtgactattaaaatatgaaaaaattataaaagaaaataataacatattaaattataattggtatattaaattttgttgtatttaaaaaattttacattttcttcaataaattaattgtggaaaaaaaaaattaaaatgttaactttaattttagtcattttttcctaataatggtagaaaaaaaatatatatggtaaaacaatcttattaaaaagaagtagataatgacagtataaattttttgatttaaataattacgtgtgaataaaaaaccttttaaaccttttttttaagaaaagaaaagaaataaaaacaaaaaagaagagagaaagttttgaaagcataaaaaaaattattaatatttgtgtgtttcatatttaataaataaataaaaaaaaaaactagaaattaaaaacaaaacaattagcctatttataatgtgctgctcatttttttggtgtgtctacacgtgtttcaaaaaaataaataagaaagtattatgactggaataacaagaaaagtagtaattgtgggattaattttaaaatttagtttggtacgcaggattggactggattggactgaaaatgattggattcgactggacaagattgaattatgctaaaaagtaatcccgtgttttggtttaagaatagactgaattattttatttattttcttttagaaaaagaaaacttaaattaaaacaaaaatatataataataaattaaaactaaaatatataataataaataaataaaaatgaataattcgcagtaaaaataaaaaataaaaataaaataatatatcatatatataattaagtatatatcat

SEQ ID NO: 357689 - DNA, 1715 bp, Cannabis indica
atttaaaaaattatcatctgatccaatctaattaagtttcaaaatctaattcaattaataattagatttgatcggttgtttaattggatttcaattcgacacttgatttttaacttttttttttaataaagaaaacataaaaactaaactatacatgagttcttagggttttgatgtccgtcgtaagccataccgaataattttatttttatattaccaattacttcagtataatggtaaatacaggtctatctcatgaggactattgtcaaattaatatttaaaaattagtaacaagaataaaaagtgaaagtttttaattataaagattaaacaataaatatgaagtaaataaagatagatattacactattaagaaatagttaagaattaatctccaccttcaacaatcattcaagatcaataataaaagcattattctaatttaattaaactattaaccccgcaaaaaatgctgaagtagtcacttttttttaatctccctattacaattaatcaaggcgaagtgctcaataattaaatctttttactaagcaatagatccataaagtatgaaatctatttaacctaagaaaaacattgatgtctatggagataagttaatctaggtaacaaatcaataaagcatataattcatttaacctgagttctatttttcatcacaatcaataatacatttgacattactattaattgaaaattatcactctacttagaatcctaaactattaggtgagaattaattctaagatgataatagaacaatatacaaaaccttaattatttatatgcctaacaagaatacacaatattcatagcaatcaaatagaaaaataaaaataatttaatatgagagaaatcaataataacatattgagatttatgccctaaaatcaagtgattaatggataatatattagagaatatatgaaatacaattataacataaatgatacattaattataatagtataattattaaatatctgaaaatttattatttatatggagagtgtataatcttgtaaggacatacaagagaattacgatataaataaaataagtcggaagtgtattaaagtaatggaactctttaatatggaactgctaagtacgatttactatacactatacttctagtgtgtgtaattttaatttggatcacatatgtggatagacatgtagtaataaatgtgttgtgtataattcaattatgcatgattggaccgatatgtaataaacgtctgtcatgaacgtgtcgtttaccatgaaagaattattcatatcacaatgatgatcatcagtagatcaacttgaatcctaagtatacaactcttgtttgtattcattgagttctttgattcactcgttaatgtttctcagagaatatgattcttacaacttctatttttgggagcttaataacatgagtgagtgagaacatgttatacaatagtggaatttaagttttcttaatagatcgaatattagttctcttatagtgttaattttgggagtgctaacaattggatccaaatttataataagttatagattaattgttcacattgaattaatggtacataaggagtcaatagataattagatgggtaaaacataatttgacctactctaattatgcactaataattggagggtgaacgtacttatattgattatacaagtaagaattc

SEQ ID NO: 357690 - DNA, 499 bp, Cannabis indica
aaattatttaggattgtatgctttagtattttcgcttgtcattcctacttgctatgtgctaataatttgtaaatgagattctatgttgaaccttacatgatttctatttattgttatttgtagtatccaacataacaatgaccaatcccatgttgtcactgttgactgataataactgtgtggatctaaatttcccaaatgaaagagaacattaacattgctctctttggtgaaaatgccctgtttattcttttacaaaaatcccagtaccttatcgtagtgggagggtttcaaggaactcaccctgctatgacttggaagacacttgtgataaaaatccattgttagtttaaacaagtaatggattgtcagaataagaaactaagaagaaaagccaagagaactatgtttaaaaccattcatatggaacaaccaaaagttttctattacaaggacaagaaaggaaattttgaaaataagtatattcaatggacttaac

SEQ ID NO: 357691 - DNA, 372 bp, Cannabis indica
accactgatcaatatgctgcgattcaggatcaactgcgggcactacaggccgaagtcgatggacagagccgagctcgacgccctcctcgagttcctgctattcgcaccgataaccctcaggtaacaacttctagacgtcatactaaccgtgtacgcaaggaacgaagaactaaccctgaaggtctggacctgaaccatccaatgtcgagggatcaatccgcaaggtatccaaaccagagcgcacaaatcgatgaagatcctgagcgccgtaatcctcgcagccgaccatcaagagacaacgacgcagaatcagcctcttcgtcgtcgcatggtcgcactccaagcaggtacacaaggtccggctctgtacag

SEQ ID NO: 357692 - DNA, 536 bp, Cannabis indica
ttcttttagtcatatttttgtataaataggggttcactcaattaaaataaataactaagaaattctcattcagtttctctttctctcttcatcatcttcttcttttcttcttatctattatattataacacgttaccagcacgagtctctgcccaaatccaaatgtaaatatttgttaaagttcttgaatattgttttaaggtcatgatacactaaatatatatttatatatatactcatctgacttaaataattttaagaaaccctttttttcttttttatttaatatatatattaaatatgcatgtatatattttatatgtttattattgagttcatatatatatatatatattatatttcttattgtttatttatgatatgatagagaaaatttatataaattatacatatatccagaagattatgtattctcaataaaatattgcatatattatgaagattatgcattcttgttgcccctgattttgcccaatatatgtggaccaaccagacaaggacacgtggatcaagca

SEQ ID NO: 357693 - DNA, 1367 bp, Cannabis indica
tctggttgcagctcaagatttttgtaactaagcacatgagtagggtctgaaacggattttctcaacatcgagacatggaatacattgtgaactgctaaaagagctgaaggcaaagctaatcgatatgccacttgtccaaccttctcgagaatgtcaaaaggtccaataaatttagggcataacttgcctcttttcccgaaacgcttgatccccttcataggagacacccgtaggaacacatgatcccctacttgaaattctacatctttgcgtttcggatctgcataactcttttgcatgctctgggaagcaagtattctagctttaatcttctcaatcgcttcattagttcgttgcactgatttcggacgtagatatttcatctcccctgtcttatcctagtgaatgggagacctacactttatgccatataatagttcatagggagccatctctatcatacttttatagctattattgtacaagaactctatcaacggtagatacttaccccaagagccttcaaaatccataacacaggctcgtaacatatcttccagtatctgaattgtcctttctgactgtccatctgtctgagaatggaaagctgtactgaacttcagtttggtacccatagcccgttgtaaactttgccaaaactttgaagtaaattttggatctctatctgaaactatggattttggcacaccatgcaaccttaatatttccttgacgtacaaatctgcgtattgatccactgaaaaggttgttttaacttgtaaaaaatgagcagactttgtaaacgggtccaccactacccaaattaaatcaaataatctcgtggttctaggtaatccaaccacaaagtccattgtgatatcttcccacttccactaaggtagggttaaaggctgcaacaaccatgctggtctctgatgttcagccttaatctactgacaagttaggcatctcgatacgaattctaccacattcttcttcatttcgctccaccaaaattaaagtttaatatcttgatacatattggtggtgccgggatgcaaggaatatggagtggtatgagcctcttcgagaattttatttctaagttccacactattagtgttgaccgaggtattcagcaaccaatataataatataagattagagaactgtaagaaattaagagtaggatttttacgtggttggggtgttaatgagcctttgtccacgagtcagtgtatttatgagtgtattaaatacagagaatgttcttggtgaagtattactcttttttgctcttatgcaatcccaaattctcgaccccatttaatgagctttgagggggtatttatagtgtttttggtggg

SEQ ID NO: 357694 - DNA, 854 bp, Cannabis indica
gccagcctagccggtccttcccagggctcgaggagtaaaaggtcctccaaaggcagcactcggacggaggaaaaacgacagaaaagggggtatactcctcaatatacccagtacacggagttaacggactcccaagaacgtgtgtactttgctactaggcaaaatacgcactatcggagaccacctcctttgtacaaagacagctcccggagggatcccaacaagagatgcgagtaccataacgacattgggcacagcaccaatgaatgcaaaaatctcaaagacgagatcgaaaacttaatccgattgggacacctctacgagtggatcaagaatcggttgcctcacctcaacccaggtcaggcggctggaactttgccacaagtagcaccagggggtgcagcaggagtattggctccagttgtcccccccggagatgctcagcatattcccggcctgccaccgagacccaacggaagagtggctatgatctcgggaggaccccacatcggaggaaccacccgcaaagagctgaaacggtacgcaggggccgtgaaacacgatgaggtgtgggaagttactcaactcccagctcaaaggccccggctgatggatcaacccattacattcacggaagaagacgctaagacggtgcattttcctcaccatgacccgttggtcatagagacccccattgccaataaggtggaggccagagtcctgatcgacaacggaagttccgtgaatttgctgttcaaagaggcctttactgcaataggcctgacggaccgagacctctcaccaagtggttcccaactcacggggttcaacggaacaacacttatcccaatggg

SEQ ID NO: 357695 - DNA, 616 bp, Cannabis indica
ggtatataattttattactacgttacattaattttctgtactacgatatatttaatactgctgtatatatttaaatgatctaatatacttatttatttttgttacaatataataatatacaatactaaaaaaaatttgtaacttaattttattattatatatatatttttttaaaaaatatgtgataaatgtatttttataatttttattagctaatttattagatttgacaattttcttaatttttacaaaaagtagacatttactaacttagttaccaaatttaggagtattttgcatctcaacccataaaaaaaaagtctagtatgtcttcaaattatagagaaatagatcattattaataataatttgtaatttaccaaaaaatatattataaaatatatagaaagaaaagaaataccaatagaaaattaaggtcttgatgttgtccattgatgctattgatagtaatattgtccattattagttgaggtactctaaacaaataaaagaaaaaagattaaaaaaaaaaatatatttaggattatagaaaggttatccactaaaaaataaaaaaaaaaactaaaaaaaaaaagaaaaagaaaaaaagaaacga

SEQ ID NO: 357696 - DNA, 1004 bp, Cannabis indica
ttctttagatgataatattgattaatttaataaaataattattggtttagctaacattgatcataaggtagacaaaaaaagtcaagcaatcatattgctcagatcattaccaatggcatgtcaagaagttaaagcagcaatcaagtatggaagggatgtgatctcgttggagggtgttcatgcgacattaaaatcaaaagactttgaattgtaactcgagaaggagactacgaaagacgaagcctatcttacaagtggaagaagtccaaagagaggatcatcaaggaacaactagtcaccattaagatcgaagtcaaagattaaagacaatcgacaatgttatcaatgtggaaagattgaccacattaaaatattttgtagtcaattgaagacgtaatctggttttagatcaaaccatgatgacaaaagatgcaacagaaactaaaaccattactcaaaatctattgatcatggaaatcaaagaaaagactctacagctgtgactgaaagcagtggagatggaagttcagatggggcattatttttattttagaaaataataaaaataaagagtggatccttgattcaggatgtacttatcatatgtgtcccaatttagaatctttctttgattatcaagaaaccaataatggtggtagagtactaatgggtaatgatgtttctagtatggttgttggaatcggtaaggtggctataaggcaattcaatggtgaagtgaagattttgcataatgtgaggcacattccagaattgtggaggaatctaatatcacttggaaccttggaagatgaatgttatggctataagttcttgaatgggagcctaaggatcacaaaaagttcaatgcttgtgatgaaaagaaagagagtacatgggttttatgtgttggattttatgccctaaataaaactctatttcaatgtaatctttatattttaaatatcaataaagaaacagaagtattttcatcacttatttgtgtg

SEQ ID NO: 357697 - DNA, 503 bp, Cannabis indica
ttaggattgtcacctaccttcagctgtttgagaagcagttgttgttggaattatttactaggatcttggatttactaacaagtatgttatttaacatcctaaatatgaacttctaaaacgatatgaaataaacacatataaagtataagaaactttacaatggttgcagcggaatataatgtcgccttccactcagatctctaacccttttatcctttctgtaacaaagtatcaccaatatctgagtctgaatctccttcccttgaatctggattcttcacagccttacacattatgattgagtaccacttgatgtgtgtgagcactcactcattcactataggctcagtttagaagagaggaagagagagagagagaatgtgatttcggctagggttaggaaggaggctcaaattttatctgaaggaatgagatgcatcatcttttccctaaagccatcactacctatttataggaaaccacctagtgttaggttagattta

SEQ ID NO: 357698 - DNA, 995 bp, Cannabis indica
ctcaatcatagtatgtaagaatgtgaagaatccaaacacaaggaaggagtttcgggctcagatcttggtgatactctactacagaaaggatacaagggttagagatcttagcggaaggagtcatttaattctactgcactcattttaaggtttctcaaactttatatgtgtttatttacattgttttagaaactcatatttaggatgttaaacaacatacatggtagtaaatctagatcctggtaaaataattccaacactaccttggtcacgagtgacaaggtgagcgtcggtgttgggatttgccttatcatagtgggaactatggacagtgcgagtatcttggatagagagccacaatgcatggatgcactcatggatgcttgcgagcatcactcggcaggagttttttgagagacggaagtgtgcacgaggcacacggttgcacaaaaaatgagcccattgttactcggatagttggaaggttgaccttggcttagagaagtcaaggtgacgcactggtgttctgctgcctgaaaaggtgagcccgtgatagttggtatcagagccaagttcatctcaatgggaggtgaacctggttggcttatcctagaggggatgtaggcatgtcgaaggatgctagaaagataactaccacgtgcaattgtggagatgcacaacaaaatgtttgaaactttttggcatagtacaaggttgattgggtagtccatactgtatgcttggtacactaggccaagtttgcttgagtgacatcgtaagccgcaggaggcgcttttgttgaaaaggaagcttattggcaggggtgtggaagtagtgcagggactgccagattcttgttagtcacgacagtggtcgagagttgatgaccaagatggttaaatttggaatagacatggaatgcttcaattgctacatgaatgtgtcaagagggacgcacatggagaccaaggggggtagatgccgcaatcgtcaga

SEQ ID NO: 357699 - DNA, 752 bp, Cannabis indica
tttcattacttccaaccaaacgtaaccttaggtgtaatttaatattaagtcccatttattttactttattaaagattacaaaaaattgctaaccaactttgctaggcaccttaggtggcgtttggttggaagtagtgaaaatataagaatatgaatgagaatgagaataaaaataggaatataatagaataaaatttaaaatgcataagaaaattgacaaaaaaaattattaatttttttttcacattatattagaatggtctttctttccatttcaaaataggatattcattccactataatggtaaaaagggcattccattggaataacattccaatacattaaaatgcaaccaaacaaaagaatggaatggaaattatttcattttcatttcattgatccattcctttctatttcattatctccaaccaaacaccaccttagtgtcccgcgatactcaaattatatatgcggtccttaattaaaacttttccacattacactattataggtattttttttaaaaaaaataaattcatcttttccaaaatataatttagtgacaaattattagaatttaatatatatatatatatttatatatatatgggtgcactcttaatgggtattccccatgaataggtaaaattgcaaaaaattgagtttttatgtctaatttttctatctaattagaaaaatctctcacttttacatcatatggctgagattgttccatcggttgaaaaaaaaa

SEQ ID NO: 357700 - DNA, 508 bp, Cannabis indica
tatatagattctttatattttctctatattatttaaaatttatttattataatatattttaggggcttttttatttttacacaacttaaattgcaacaaaaaatcgtatagaaacccctattgcaactagcgctgtaaccactttaaaaacctaaactgtaaatttgaaaaaaaagagttaaaaaaatagtatatagggtaattctcctttattttattcattttttttaaaaaaatgaatacaataatattaatatcacacacatatattacaaattttttttgaaaaattaaagtaatatttataataaatagtatttctctacatgtagctaaatactattcacaagtagagtactcccaatagatgagctaaaatagctcaatctttaaattatagaggaaaaaataacaaaattgagcttccaacaagtgatgtaaaccttagctattttacatattttttagctcaatgaatagtacttagctaaatgtagagataactatt

SEQ ID NO: 357701 - DNA, 700 bp, Cannabis indica
ttaaatattacataatataaatatactaatattattaccttaaaattttgatgatacgactaagtagtgcgtgcattgcacgcaccttctacctagtatataatatatatatatatatatatgtaagagaaaataacaagatgaggaggatgggggagatgtcccgaggaatacttcacctatagggtataggtcggtcagttaggctgcattttaagggttacctattagcatgatcggctttgagttgaaatggactataggcaaaaaaaaaacaaaaaaaattctttaatataaagataaatagtatttttaaaaattattaaaaaatatgtatattttttaaaaagcaattttttcatttgggctcctaaaataagtgagttttaggcgcgagcctaacccgcctatacccaggaccgaccctagttattagaatatttcaaatttagaataaaataaagaattgattttgtaataaatgaatattttatattcattgaatgtggacaaaattaattacgtaatattctatatatgatcatattttaatatttattacccaattcaatttcttgaattaattgtcaaagtatcctgactagagatgcacacgaggcagggaattagcggggagtgctctccctatccccatccccgttaagaattttaatcctcatccccgcttattccccatcgg

SEQ ID NO: 357702 - DNA, 849 bp, Cannabis indica
ggttgggatgttgatgtaggggtgtcctagcccaagaaattgccgattgtgcgcattgagggaaaggaaaattatttctaccagctactatcactactctctgttgcgacgcgggtgtaccgatgtggaatgaagaaggagcattgaatcctcaggggcctatcagttttggtccaccaggagctctgaaaacaactcctacgtctgcttcgacttcagccacggagcctccagtagatcactttgctcattttgattgcacgctatgtgggaatatgagcaaaagcgcgatgtcgttatggagcatgaatttaggagggtgacgccacgatttaagcccaagttcccgccattccctcagcaagttctcgaccagtgggctgggccatcagcttcaaatccggaggagccccacgaggaccccgagtagagggagtttcctaatacctacgctaatttatattttttgttatgtgtcatttttagtttgtattgtgctaattgtgtgttgtcttttgtgttttaaaacttttatgtcatgtcatttatgtgtttgttagtttgacattgagagatttaagagtttttatgtggcctagtgttctgctcgatgatgatattttccgctcattccatttatgttgctgcctaattttatatgttgcatttgcatgttgaattgttggatatcatggatgtttctccttagtctctcctcaatagtgcatacttttattttcccaccatgctttgcatttttcatacgattgctgcatatatacttttagcatctagaattggttagtgcatctccttgaagcgaaatcctagttagacttgtcccttaga

SEQ ID NO: 357703 - DNA, 506 bp, Cannabis indica
gtaatataaaaatttaagtatttataagtaaatattcaaattttaatgatgctaataattttttatatgattatttgtaaaatattattgaaaatttatataaaaataactaaagttattaaatatatatactttagtaactgtaaaaaaaaataagaaaatttaaaacacgaattaaagtccaaatataaaaatgagctaatctgtttaagaaatacgagctaacacgaataaaacacgatatgaatccgagcatgacacaaaaatatcatgtctacgaggtgtgtctgacctaccctttaaaaatattaacacggcacaatacaacttatgtttctgtagcacgacacgacacacccggttttttaaaaaaaaacacaaataaataatagggtaaataccattttggactctgtgttttacaaaagttatcaattgaacactctattttgttaaatgataaaatggaccctgtatttttcaaaatggtacaaataggaccctta

SEQ ID NO: 357704 - DNA, 356 bp, Cannabis indica
ttgggggttcaacctctgcctcttcctcctccccggaggaactgcctacatcatcctgcctctcaatctcttagacctcagcgtccccttcatgatcctcctccatctggacggctggatcctgttcagcgttgggcaaagtggcgtgccgagccacttgagggtcagatgcgtcagccagacgcgtggttttctttgtatgagccatcattctatggctctgtacaaggtttgaagaatgtccttcgctagaggaaggtgggctagaagaagacgaggatgatccttgtgcagaagttgaagcaggtcctggtcgatccgatgtctgttttaccaagactcacctgagttcatct

SEQ ID NO: 357705 - DNA, 873 bp, Cannabis indica
aaaaataataataaaaaaatttaacagacaatttcttgattcacaacaacaaattcttgattcataaaccacaaattcaactcaaacaaatacactaaaaaataaataaattatacctaaaggaattacactcaaatgtatattcatatcaattatatattcatagactttatgggtttcaaaataaaattcgaagatgcaatagaacccagaacactaagaacaaagacttgcccaaaactcgttcccctctgttttcggcgagcacctcgcttctcgtacgatgccatcatgctcaacgtgttgctggacagtcccgtcaacaaatctagaaacgacatcgtttcattcacccaatgggcatcgttcgtgtacttgagggtagaccggttcttcgtcgcaatcatactggaataggggcgtcgcactcatccacgcctcgaggcagttcttcgtctcaatcgtactggaacaggagcacaagacctcgaggaatttcttcgtcgcagtcgatcggttcatgtttgaggcagaggatttgaggttcgttgagacagagaatttcttcgtccagtcgaccgccacttgatttatttgtcccggagtcgaatcaaggggcagtggagacaccgaggtggaggcggctttggatgatggtgatggtggtctgtactggaggcggctttggatgatggtgatggcggtctgtggaggcagattgggtgaagacgaaatagaggaagaagaggggcggaaggaagaagaagatgaaatagggtttgggtttgggttatggtttcttattttccttttatacccaaagttaaatttatttactaaaatatttaaattaatctgattattttattttct

SEQ ID NO: 357706 - DNA, 548 bp, Cannabis indica
acagttttgtcatagcacttttagatcaaattataattaaattttattttgacaaaaaatcaattcagggtcctatttgtactattttagaaaatacagagtctattttgtcatttaacaaaacacaggatccaattggtaacttttgtaaaacagagggtccaaaatggtatttaccctaagtataactataatacatgcaatcacatgaagaagaaaaaattatgttataaattgtgcaaataggatatgttgtgaatacctttgataacatcaggcataggaaatttaaggaatttttctccatcagatcggagcaactctttcaacatgtcgaccggaacagctttccttattttatcaaatacttctgttggtaactctaatcctccttcatacaactcatgtacttcttggaatttatcgaactcgtttggagtttcatcgaagaaatgctttagagcaggtacgacggcatgagataaagccttaattgcataagcaagaaaatctgacatcttcaagtgaccaaatctttcatctcttgg

SEQ ID NO: 357707 - DNA, 778 bp, Cannabis indica
aaggtttcctaaactttatatctgtttatttcattgttttagaattcatattaggatgttaatgaaacaagggacgcgtcttaccaaaaagggattataacgaaaatgccctttgtaactattaaaaaacacttttttactaaaacagaactttttaagggcaattgttatacccgaaattcggctgccgtctcagtggaagacacgtgtcatgataaagggaatatggatcgatgcaatctctttttatagaataacttattaattacataggtatcagagtatatttgtaacctactgactgtaaggtcttatgcgaggagtcaatatacaaatgttgcttagtatattagcgagaaaccatatgtcgctgagtgtgaatagcgaggcatcaagtacattacttccaggaagacaaaagcgacccatatcaactgcggaagcacttaatgcataatgtacaaactatgtgtgatagtcaagctggctcaaaacctaataagcgaggtgcttatctcgctatgggaaggcttcctataacttcatcgagttgacttcagacattttatcagtgagagttacaatcctaataagtcagaagccaacagtcaaaatgagcctcgaataatccattgtaaataagaacaacgctcatgacaatatgtgtatcgtcaacctcagaaggaaaaaatggccccacctcgctattatgatcactagaaccaagcttctgccaagacatcctcagatacgacaattaaagacgggttttaataca

SEQ ID NO: 357708 - DNA, 1126 bp, Cannabis indica
attaaataatcctatatccaactgtccaatttgttgcatggtgtgttttatattgtttattattaaaacaagttttataaaacttattattgtttaatctaaattgccatggttaactttttgacagatccaatgatatgattttaaccaatagttcaattgtcaataggtcaaataaataatttgtaacaggtaaattttgcaatcttctttcatctatgtataaacctagtaacatgataggatccatccaaatcagtgtgcctgtgtgagcctatatgtttgcattgggcttagatgcatatagggagctcatttaatttttgtaattaaaatggactaggttgctaaataaaattatcacacttgatagatattatttaggcccaattagtatttgggtattcaattaataacagttgtttaaattaaggttaaattcctctcttttgggccttgtgagagagttagggggccattagtagtgggtacgacatactgaacccagccctccctcacatgaacaaccccaactgtgaagacccatttgcctgatttgaaaaactgtactaggttaattaaactagtttaacctaataaaaattgattagcaacataataaatttcaaaatatatgaaattcatttttcatttgattattttgaaattaatttagaaaaacacacttagtttaatgaaattcaaattcaagataaactagatgtatttttctgtatttaattaaataaaagaagttataactaattagattcttctggaaacttaattatttgaatcttcaaagaaaatatatttaagttgaaaattagtttttcaaactaattttggatcaacttaaatttgattttttttttaaattaataattaagtagaatcttcttgaaaattagttattcagatattctttaaatattgttttcagttaaaaatttgttaattttggatcaacttaaaatggaatatttttcaaattaaggttgattagttcaagatactttatttgttatctaattaaattttttgaaaaagaatttaagttgaaaattttataattttagaacaacttaaattagatattttttaaattatttattttattatattt

SEQ ID NO: 357709 - DNA, 594 bp, Cannabis indica
gagagagagagttcagacttagaattcagcttatgacatagggttttagggtttagttaaggccatttgtataggagcgcttaaaccttttttcaggtaaaataagaaaatatttacgtattaaattagtaaaatacaaatgatgccccttaaaaatagatattttccctccacttttgtgggctgttaaggcccaatttgtagtctagcttgctgaccacacataaagttgtacatcaaagtcttgccaggccaatgtctgcccagacatgcatttgcaggatgcaggttggccgacttgtgttgtccagaagctggtcggcctatgctggccataggaccagcaaggggtggccggccagcctccttgaggtggttggtccatcattcatcaccccgtttaagtgctggaactccccattagttgaagtgatgagtagatgacttggccttcttgtttgtgagctagactatcatgtggcactgatattggccatgtagacatgtcacgtcaggtgggcaaaaatcgggataaaaaatttctttcatctttaatatcacgtattttttatagttataaattattaatgcttg

SEQ ID NO: 357710 - DNA, 575 bp, Cannabis indica
aagaaagaagctgatgctattgacagaagtgcacaaagactctacgacaatcatgtcggagggtaaagccaactgagtgtaaatgggatcaaactatagcatcgacctttaaaaggttggctgaccctggccttagcaagctggtcggccatatagtcatcaacctggttgaccactacctccacaagttggtcggccatagaatcaatgacttggccggccatagcctcctccaaatggccaagcaatgctttgatatggctggacacctggtcttgccctggccaactcgatccactagtagtctgctctcatacttcttgtctatagtgaccaagaggtaaaaaacatcttgctagcatgatcctttgacaaaaaggaaagaagaagagaccaagccaactcaaagcagcatggctgccgacaaagagttaccaggcccttcaacaaatagatcaaggaaaaaaattctttgtaagagaattactccctgaagaatattccttggcaacaaagatcctacaagaagcatgttcggaccaaactgagaaggtccacaccaagttacaagataa

SEQ ID NO: 357711 - DNA, 301 bp, Cannabis indica
aacctcaatactaaatacaatagtggttatatttgcgagcctagtcctgtaaaatgagaataaaaaaactactaaatttagacgaccttagaagcaaaactgaacttggagctaaacatgaaagttttagatctcgttctcagctttccggtacatcatgaatcgtccaattctaagttgtattgaagaagttatggccaaaatactaatttgaacacgcgacataaatttttcagcaacaagtctattgagaatattttactaggatccagatttaccaacaagtatgtttcattaacat

SEQ ID NO: 357712 - DNA, 929 bp, Cannabis indica
aaggatgcggtcaaggataaatctgaagtgagtataaccctcattcatcaagaaaacaagaaactggttctagaagtattgaatggcattactgacaagactgttgccctgctaacgagaaactatgccaaattcttgaaaaagaattacaagagaaatttttcagctgataaagaaaatacttcaagaagaacaaggctggaaacttcaaacaaggacaaccatctgctgatcaaaagaatcgaggaatcaagtgcaaagagtgtgatggatatggccacatccaggccgagtgcccaaacactctcaaaaagaagaaggcccttgcagcaacttggagggataatgaagaagaaaagaattccactgccattgaaagcacaaatgaggataagcaggtagtagcttttatggcccaaagctgtcactcaattgagtgtgaagatgatgtagtctccactacatcagaagtcgataatgaaggtagaaaaaatgtgtatgaggaaatttttgcccaatgggagtacatgactaaatagatcagaggtctaaaaagctcctcagagcaagtggagactgaaaaaggcatgttagaggacaaggttaaaaacctcaacagacttcttgatgagaaggagaataagatttataaacttactgctgatctgattggagccaagcaagcactgcaattcattcccccaggcacaactgctatcagtcaaaccttatgttgacttcacttttagccaacgacaatgagtctttttgataagcgataaacgatatgtcgtaatgagtatatataagaaagcaataataagacacgtgaattttatagaggttcagccccgagcagttcggtaatagcctaatcctcattatttgtattgacttaagaacaaggaagaagtttccttttcttatag

SEQ ID NO: 357713 - DNA, 818 bp, Cannabis indica
tttttcctaatgccacaagaattacaagaaaatcggctaagtctgaaagctctaatttctagagagagatgttctgatcttatgagtacttttctaaatgtaaaaactgagctagaagagctctctttttatagggaaagaagtcctattaaaatgataaaaaaaataattcaaaaaatatgaaatttacatttaggctatttgttaccgtatatgatgatctaacgatgaaatcgactccggaagtcgctcgtcaattttcgaaggttgagtcgtgtctgcagcacctgctttgggtaagttgtaccttaaattcgtaactctctcacggtgaaatttggagtcaatagctttagaattgcgattgaagtgagtcaagacttgatagagcactgaaatagcttcgcaacacaagttgaattacatcaatcggatcaatattgagtgagttatgaccaacttaatgaaggttgtgttacaccaccgcaactaccacttaaagtgtattctaaaagaaataaatgttggaatttatattaccaggatgttagatctactcacaactatattgtttaacgccctaaatacgaactttctaaaacgataattaaacacatataaagttaaggaaacattatattggttgtagcggaataatgtctccttccactcagatctctaacccttgtatcaagatctgagcccgaatgtccttctctttgtgtgtgatccttcacagtcttccaatatatgattgaggtaccacttgctgtgtgtgggcactactctatcactaaggttttgaaattgtgaagagg

SEQ ID NO: 357714 - DNA, 715 bp, Cannabis indica
cgaggtcatcattctaagttcagttggcggtacgcgaggtatatgtaaaatctctaacattcatcacatttcttgacaaactcatgtgtgtccttagttggcaagtaatatccttttctaatgatctttttagacagactttgccaacccgcatgatccccacagaagccttcatgaatttctttaatgatttcgtttgcttctgcgggaggaacacaccaaagtaggggcattgaataccctcttttatatagtttgccttcgatcattgtgtagcgaggcactatatacaaaagtttttgcgcctcatttttgtcattcagaagttgcccatcgagtaaatagctgataatatgcgtcatccatgttcgagagctatctatcatctcgacgtcttcagtttcacatatacttggctcgctcagcatttctaccaaaactagatttagttcatccatatcattctgcgaggctaattttgctaaggcatcgacgttggagttttcttctctcggaatttgttcgattttaaagtaatcgaatctttcgaagttctttcaaactttctctaaatactttgccattttaaagcctttggcctggtattccccgaggacctggtttatgatcagttgtgaatcactatgacagatcagatttttgactttcaaggcctcttctatctttaaaccgacaatctgttgggttttatgcc

SEQ ID NO: 357715 - DNA, 1217 bp, Cannabis indica
gatggttttttgggagacccggataaggattcgtataagtgcctgagtcacagttacaagtccacctctgaatccactctaggggaccaatcgactacgacgattcagtctatcgatcatcatgggcggattgaatttgggtttgaatgagtaaggaaagaaagaaggtcaatcattaggcagaaaaaccaaaagtgaatggatccaaacaaaatgaatcgaatcagaaaacaaaaagtgaatggatccttggggtctgagtttggtgttgggaattgaatcagagagaaattcattgtcgtaggctgtggttgagaaattcaaagagacgatttttctaggtgatgtttgaattgagtgggggacattaattttcggcttcgatttgcaaatcgttgcaatgtcatatttggattctttgatttagtcaaagaaggatttttttgataattataagaagagaaaaaaaaaagttaacggcgttagcttcaaaacgttaaaaataccgttaaattaagaattaccgttaaatagatacttttaatatataaagatatagttatatatagtttacctttttttttaagactcacttttcattttagttaaaaattgtgtttaaaaagacaaccttgtagcatttctcggaatatttatataagaaaggaagaaaaattggcacaagtcttttccatgcttccctccatactttctcctcacaatctcatatcctatattttgggtgtggtcatccatgaccaattacaatggtaggccattgccattgaacattgcttgcttaaaaaaataataaattattgtaactaaattattgtgttcaactcaaataattttattcttttatgttggaacaaaaaagttcattaaaactagaagtttaggagatattaattcattatgtattgatttaaactctctttgaaagatattcataaattatgtttataaaatatattcacaaattatgttgatttaaactagaaattaaaactctcaaatagtttctttttcgatttttcagacacatccttagattatgtttataaattaggaataattacataaggcacatttttttgtaaaatatttatatttttacgttcaaagaatgtttttttacatttttacggttttctaaaaaataacacgaaaacgacataaaatcaacaagaaaacaacataaaagtaacatgaaa

SEQ ID NO: 357716 - DNA, 576 bp, Cannabis indica
gcatactggtcaatggagaaattcgtccgaacaggtaaaaagtgagctgactttgtatacctgtccactatgacccacacagagtcaaactgtcccatggttctaggcatacctaccacaaagtccatagcaatgtcctcccatttccactccgataagttcagtggctgcagcaaccctgccggtcactgatgtttagccttaacttgttgacaagtaaggcactttgcaacatactcagcaatgtcgttcttcatgcctgtccaccagaacatggctttaaggtcttgatacatctttgttgaccctcgatgaactgaataaggagtcgtatgagactcattcataatctctttcttgatactctcatccatgggcacacaaactcgattcccgaatctcaacaatcccgtttcatccaatgagaaatcactagccttcctagccgaaaccctagctcaggtttttactaatttcggatcttgcatttgtacttctttgattcgcgtggattgcagggtaatattagccaactgccccacaaccaactcaattttagctcgagtcatctcattt

SEQ ID NO: 357717 - DNA, 534 bp, Cannabis indica
attggaagaggttattctcaacccaagaaatcccaccaaatgtgagtacgttgggaagaacctggacgagcagctcaaatagaaattaataagctttttgaacgcgaaccaggatcaattcgcctggagtcatggggatatgatagggatcgaccataaaattatctaccatcacttaaatattgatccaaactacccgacgaagagacaaaaaaggaggcccttggatttcgagaggcaaagggcactaaaataggaagttgacaagtttttagtcaacgattttatatgcgaggtattttatccctcgtgggtagccaatcctgttctcgtcccaaaacctaacaaaacttggagaacttgtattgatatctccgatctgaataaggcatgcccaaaagactgttctccacttgccaggatcgaccagttagtggatgcaactgctggggacgggcttatgtcgtttatggatgcatattctggatataaccagataaaaaagtacgtcccagatcaagaacatacaagctt

SEQ ID NO: 357718 - DNA, 791 bp, Cannabis indica
gaaaagagagaacaagccatcagaatagcagcataccagccaaaggtggcccaacatttcaataagaacattagggtccgacaattcaaggaaggagaatggatactacgacgagtgttccaaaacacaaaggaagaaggagcaggcaacttaggacccaattgggaggggccttaccagattacaaagatagttggccaaggagcatacaaactccgagcaacagatggaagaaacataggaaatagctggaacgctgtacaccttaagaaataccatttctaatcacatgtatggcaaaataaattttttcatgctccgctcgtggttttttcccgaaaggctttccacgtaaatacatgtgttaattattttaagtgttttttatattttagagctcaaaaacgtaaagtaaaagtaataacaagagagccacgctcaacaagaatattcacttatgaaataagtggtaggagctacgctcaacctaaatattcacttacaaagtaagtgatacgagctacgctgaacccaactatccacttataaagtaagtgatatgagctacgctcaacctaactattcacttatgaaataagtgatatgagctacgctcaacccaaatattcacttatgaaataagtgatatgagctatgctcaacccaactatccacttataaaataagtgataggagctacgctcaacccaactattcacttataaaataagtgatatgagctacgctcaacccaactattcacttacaaagtaagtaataggagctacgct

SEQ ID NO: 357719 - DNA, 948 bp, Cannabis indica
tctcgctttcttacagctcactactataatcatattttaatagttgccgaaaaatctcggtcaacatgtagcatgccaataaaattatatacatacattaaaatatttttattatactaataaaattatataccactattatacatatcataataaaaaataatatcatataacaaaatagaaatacaccgtacaataaaatctatatactaacaacccacaacaactcataaaagattaataaaatcagcataacttttaaataaaaaagattttaacaaaactaatatagaaatactataatttttaaataatttgcttctaattctaaaaaaaaaatttaatgattttgaaatgaggacatttactaatatagtcctatgatttagggtcatttgctataattttgaaaatgaggacatatactaacataatcctataaattatggtcatttactataattttccttaataatatggaataatacagcaaagaaccattcaatcaagttgaattaataaaactaattaaatttaaataaaaatctaacatattttctatatatatttatttattgaaaatgaatacacacaacaaatatttctatcaaaatcaatatgcaaactgacaattataataataataaaaacggaatcatgcatcgaacatttagcataacttttagaaaaattgaaactagttttgataggaaaataaataaattaaagtgtttcaagttaaccgcgttacaaagtttcattaaaaacacacttagctagagacatcagacatgtgtactaagatacaacacaagtcaacccaataaagttatatgcatgtgtaccatgaggtacgtggcattttacaattataatagttattgattttttataaggataaatagtaatttttcttcgtgaattgtgacatgtactaaatcgttcccc

SEQ ID NO: 357720 - DNA, 733 bp, Cannabis indica
taaaaggtatatatattgacgcaccttttacctgtttcgacatctaaaattttttttttatctattttctttttatattcgtatatgttataattttttaagatatcttactaatttttgagaaattcaaacggtctatttcacacgcgtatagaataaaatagtcacgggtgcaacacattatttgaatgagaaatgttaataaataaccctatttctaactttagtgatagttaatgtctattttttaaaataattaaacaaatgtccttttttactttttaatacctaaaatatccttcattatataaaaggtattataaaaataccttagagtaatatgaatataacatacaaatactataccttagagtaatatgagttattatgtcatttttttttttactgatatgtattcttttaattttatttttatttctttccttcatgatatataatataacatataaatattataccttagagtaatatgaatataccacaacaattctatagtcaaataaatatataaaagaaacttaaataaacttccacaagttttttttttctctttctttcatgatataccatagcaaataaaaataatataccactctatttatttattaatatatcatagcacataataaagatataccgtacaaaataaaaaaaatactaaaaacttaaattaatatttaatagttttttttttctttctatccttcacgat

SEQ ID NO: 357721 - DNA, 834 bp, Cannabis indica
acctttcacggtcctgcatctttttctttttccctggaatggaagtagggtttttccattggtttccttcagagggataccgtatgggactaggttccctggacttatgcttctgagtgcttggtgaggactcttccggcgtttcctcgagtcctgtaggaatggctttagggtgaatgtggatccctgcagtatccatagctttttggatggcgaccatcacctcttgcatctttttgttttgttctttttgggctgcaatctcagcttcatgatcaacagtcttttgtcttaagagcagtagctttgtgtaactgccttcgtcataggcgtcatactcgtcaaagtttttctcatattcgtcattgttggcttcctctcgttcctcagatcccacgttgactctagaagccacttcttcgtcttcagggttttgagcgtcttgaggaggacggggctgacatgtgttgcgagtttctaccattgttgctttagcttataaggttgttgtctgtttgaagacgcttccttcaactctgaataaagcaccaaaatgttgaccgaggttttcggcaactgatttaataatatatataagaaaattgtaggaagtttaatgcatggaatttttacgtggttggggcattaacgaggcttagtcaacgagtctttgttatttatgagagtatttattacagagaatgttcttggtagatatcactcctatttactctctttaactcatatgcacccagaattctcgacccctgtctcagtgtgtttggggggtatttatagtgtttttctggggggatccctagaactgaatcactt

SEQ ID NO: 357722 - DNA, 602 bp, Cannabis indica
aatttctttcatatttttttttttaaaaaaataaaacaaatgaaattacagtaccagaaaagtcaccgaagtttgttgtcggtgctggaaaagtcgccggagtagctgtcggtgtcagttattggagttgctggcggtgctaaaaaggtcgtcagaattgagattatcgccgaaaaaattaccggaaaaatcacttagaaactagtttcttcatcaaaaattggttttgattttataaaagtaaaatttataataaaaaaaacataaattcagttttgaagcaaccccattacagtaaaatagaggtgctcgaaaaaacacaaaaatcaaactactctctccagccacacaagatttttttctctctcctgcgattcaaatttcttagtttcttattgtccgcatttttgtgattgtgacatgtgaattttaatcaagaaaggttaatgaatcattagctgatcaactcccttaaccatggttctaggaaggttcagggtatgatcagccctggctcgcgaaaagggcctccatgattgggacttccctgatagtcagcaatgcgggagatatttaaataattagcagttaattatgattaa

SEQ ID NO: 357723 - DNA, 599 bp, Cannabis indica
aaaagaaagatgcaacacaacaattaaaggtgaaaaaaaataaagagatcgaaaattaaacctgcaggcccccttttataaatgtttctatggagaaattaaacctgaaattttacaataagaggagggcagagattacccatgagctggaaccacatctccttgaaaagcaaagattatcaattccactcagacaggactcccacagcacacggatcactgtgcagttacacacaaagcttccagattgcttagtggcaagcaggatccattgaggtgggtcttcattgggaacccaagcattaagctgaattatccctccggcttggacccttggtcccccaataacgaattcccactttcttttctatatcatttaattagtttagaaccaataacacaaaagcccaattaaaaatatatgtggagaatatatttaaaaatctattaatctatttttaaattaaaaattatacctatattaaccacaaatgtagaacattttagttataaaatttaccacaaattttaaaaatattgaatttagtttatccaaaaataaaaaataaaataaaaacgtatatacaacatactgtaca

SEQ ID NO: 357724 - DNA, 599 bp, Cannabis indica
tcagttcaacaactccatatggatacaccttgaccacagcaaacggtctgggccatcttgacttcaatttgccaggaaaaccttgagttaaaaagttaagactttctagccaggttggaactcttttctgactaaattcctgtcatgtcatttcttcgtcctctctttgtaaatcattgtattctcgcatgcctcatttctgaattcttctagctcatctaattgtagcagtctcttctctcgtgctactgtgagatccatgttcaaagttttcatcacccaaaaggccttatgctctaattccattgaaagatgacaggctttttcataaactaacctatatggtgacatcccaataggtgttttgaatgcagttcgataagcccacaatgcatcatctattttccttgaccagtcctttctagattgttgagctgtcttctctaggatcaacttaatttcccaattggaaatctcagcttgaccattgctttgtggatggtaaggtagggttgttctatgatggactccatatcttgtaagtaatgcctcaaactatttattacaaaaatgactcccttcatcgctgatgattgctc

SEQ ID NO: 357725 - DNA, 525 bp, Cannabis indica
atctaaaaggcccaaataaagagataactacaaacctcttttaaccaaaaaaaaaaaaaaaaaaaaacgacaaaaatccaattatttaaaatttttaattttaaaaatatcaaattacatatcatatttgtcagttaggacagaccaaatctcatttacatacctatttttttttttttttctgcagcaatttcatacctatctctaaatatccacacacatatttatataataatagacttgatactcgagcactgtcatttgttcaaaaaaaatccacaacactatcataaaatgacagtgattaataatactagatcagttggtttatctaatgcattaatattaaaaaagtagtgtttgatgatagattttgaaaaattaaatatatatagtttttttttcgctaaagaaaaaaaataaatatagttgtgaagaatgttctacacaatttgcatttgagaaatgtcaattttatttcgtaaacccgtgtggaatcaaatcttttcttttctttcttttttt

SEQ ID NO: 357726 - DNA, 869 bp, Cannabis indica
tgttatttattttttattttgttgggaagaaattaataatgaatcattaataagaaagcatatattagtacgtacatatcaaataaatcatttaaaaattctaaaacattatattatattacatgcattttaattgtataaattaattaagtcaaaaattttatggaagaaataataaaactcaaaatacatcatacactactataaaaaaaacacttttagaaacggtttttaaggcctttcagcgtcggtttcggcgaaattcgctaatgacgttgatcagggcgatgttgtagggttgaatacaaccgacgccattggataccctctagcgtcggttattagctaggaacacgccataggggtatatatggcgtcggttcctagctaataaccgacgctatatatacccataggaaccgacgccatatatacctaaattttaatttttttaatttaatttaatttatttaaattatatatttattaatttatatattattttatttaatttaaatttaaattagatatttatttttaaaaaggtaaattaaatattatttaattaattttaggattggccaaaataccgaatttcacttcatagaagtaattaaataaattacaattaaagatttcacaaatattgtaaaattagtccaagtattaacaagttaatacagtagaacctctatccaagaatacacttgggactaagaaaattatattctaattgagaggttataattatatagaggtacactaagaaaaaaaattaaaacaccaataaatatcaatgtaataataataataattaaacaatccttaatactatataataatagaattattttttgagtaaatataat

SEQ ID NO: 357727 - DNA, 1154 bp, Cannabis indica
tatatttgtgtatttttaatttacacatatttttaatataagttgataatagttataaaggttaaaattttatctacttttactctaatttgataagtttgtaactggaagtttttaatttaatattttaaatattttataggtatcgggttctttgtgttgattgaagagtgtacaagtagctatttttattggagaaaggtataatcactaaaattttaaaattctttatttagtggagtttgaatatcttagatatttatttgtagtgaagtaagttctgcgattaattatactgcggtcggatgggtggaatatgcatgttggatgagtttagatatcttaaatattcatccgtactgaaataggttttgcgaatacatgtaatgcggtcggatgggtggataatttttgtactattaatgctattttgtttgttttgtttcttatttttggcatgtttaaaatttttgggacgtccgattacagtcgttatgttactaaaattttggtagaattaggataaattttcatgtttagaatgcataaatttcactaaaatttatatatgtgcggtagttaatttaactaattaaatactacacatattcaaacaaataattaaatattgttttgttttctttatagaagttttaaaatggatagaaattggatgaatgcaaatagattatcagcggagtataaacaaggtgttgaccatttcttggacttttgtcagaagtatgcgaaaaatcctaaattggttctttgtccttgtcttgaatgtggtaacttggatcgtatgaacattactaagataaaagagcatttgttaaggaacgaaatagataagagttataaggtttgggtttaccacggggaaaagaagattagagttccgggcgagggaacatctaagtctaagaaggttaagggtgttaatttggactatgaggatgattgcattccagaaatgataggagatgcacaatttgaatcaaatgccgatctattgaaatttcaaagttttgtagaggatgccgagaagcctatttacccaaattgtaatagatttactaaattatcgacacttgttagattatacaatataaaagccaaacacgggtggagtgataagagttttacggatttac

SEQ ID NO: 357728 - DNA, 578 bp, Cannabis indica
atataatactctttgattaaatgtcttttcattaaattgtttacatctaacttttagaacataagtatcatattttgcctaaacatagtttctttgattttgtgtaatttcattacattgtaacacatttaatgcttagaaattatacattttattagtgaagaaaaatcctacatttttgaaagaaacttgtgcttaaatagaaaatacattttagaaaatatagtgtgatttatttcaactatatatatgaacttggaaatcaatatacttacaaatacaattcaacttacattttgtggattctaatatcttaagaatattattttacacatcttatttgaaaattattttcatactcactcatctttaatcttaaatattttagtgacttgtattttatttattttttaaaaccaaaatcccatcaaatatttggaactaggttagaatatccttgctttgtttaaaaaagtttcttttgatgttagtcaactctcatgggttcgaccttacacttacatgaactatatattccgaaacgtagtcgtgcacttgcgagtataaatattaaaaca

SEQ ID NO: 357729 - DNA, 424 bp, Cannabis indica
atatatataaaaattcagtactttatgtaaattttcttttattttttcctaatatattaaaaagaaaaaaatttcgtttttctaggggaaaaaaagccctaattaagtagctagattggaaaattatatctaatgaccaaccaaacaatttattaaggtggtatttggtaacacttttgtttttaaattttttaatcacaaaaataaaaataaaatgtgttctataaaaacttttttattttttaattttaaaaacaaaaaccaaaaatgtgttctgtaaattttatatatcattttcattaatttgttgattttatttatgtcgagtccgaggccgggtttgaggtagggaccgagagcgggtccaagtctgggctctaaggtctaagttggggttagagtccaaaatattgattaaaaaaat

SEQ ID NO: 357730 - DNA, 823 bp, Cannabis indica
atgcactgctgcattaagcagacttatgtccaagtatacagacaaatgtgtacccttcttcaacatgaagcagaagcaacaacaaacacgagtggacaaaggaatgtgaaactgcattctgagagctaaagaaataatttagctcagcaacctatgttgcccaaatcctcagacaaagaagagctaggcatgcacctagcagtcacagaacatgttgtgaattttgccctcacaaaagaagaagataatgtacatcaccttgtatacaacaccagcaagagatggatcaacactaaaggtccattcccactcatggagaagctgacccacatcttgctcttagcttccacaaagctaaggccatactttgagatacaccctataagggtgtacaccgatcaatagttgcaacaggttctacagaaacctagaggatcaggccaacaactcaagtgaaccattgagactcggccaacataaaatcacctcacaaccaagcatggccaccaaaggccaagctctcaccgaattcatggctaatcatagaagcatatttccccaaatttctcagtattcagtagaaaagcaaaagccagagaagaagcgagaacaagaacccaagaggtgcattataacgccctaaataattaggcacgctacctaagtcacttattaagccttaatcccctaaacggaattactaataaaaatggcgcggaatttaaactttaattacaataggaatgaaaataaacttgtaatactttaaactttataaactaaaagttacagatgttgggaacccaaaaaccttttaaaaaaa

SEQ ID NO: 357731 - DNA, 350 bp, Cannabis indica
tcataccaatactctgcatcatgatcaggaggaactgcgtgccgcagtaaatctcgcatttgatgaatagaggcgtatgttcgctgaatggagagacaaagagatggaggcattaagggctcaccatgcagagatcgaagatcgtagtcggcaagctactgtgctgatacgaagagcctaccagactgtaggccaacaaacgccgagcgtcattcccctgggagaaacggaggatgacccgacgatgaatgcctcccagacaaccaacggtcagccgtccaatccccggtcacgagttcccctcgtgggccaagaggtaggcaggcagaccttgtctggaattcatcagg

SEQ ID NO: 357732 - DNA, 719 bp, Cannabis indica
ttatttttaagtcttatggtatttttgataagtcttagcttaaaatttgttatatttgtgatagtttaattatttagttatagtctaaaccgcaaaaattgtaaaaattgcacaataccatttttttgcgatgcaatttttaccgttttttagtttcgcaatacaaatgcatgtgtaagttgattttaaaaaataatcaaaaactgtaccacccacactcggaacactactataatttgatacatgataaatttggggaaaaaatttttcagttagtcaaattaataaggggtaagttgaaaaatgcctcttttattcatcaattaatcaaatttacctctaattttatatttatttgaaacatacctctttttatatgtattgtacccaaaatacccttacataagagaatcacatggagagtatcttgaagtgacaggagcaaaattggtacaatgtttaaaaaaaagaggtaaaaatgataaattttaaaaaaaaaggtaaaaataaaagaggacatataaaaaaagggaaaagagtgtaaatttcctcaaattaaaaatggtaatgataaataagtcatgatttagccaaatgtgggttgttttatttttctctgggtattttttttttattattattaataataaatgaatgaattctgattccgtacattggtacaatgcagtgtgactattattaattaattaaaataaaaa

SEQ ID NO: 357733 - DNA, 575 bp, Cannabis indica
taaaataatttccaacaagcaattggatactaaaattcaaatacaagtcaacaagcagtgaaagtccgaaaaagaaacatgcatgttgtgtctgcaaaccattaatgactacaagagagttagattcaatgtagtccacaggtagctgtagatcttttatccattgtagactatggaccagggccaaagcttccataatttctggtttaaaacaacctgggaaaggtcttgacgtagcagcgatgcaatccccattactgtttcgtaatatagcaccaaaaccagtaatttgtttagctttattaacagctatgtctgtgttgggaatattttaccaggatctagatttactaacaagtatgttgattaatatcctaaatataaattctctaaaacaaatgaaataaacacataaggtataagaaaaccttacattgattgaagcggaatataatgactcctttcgttcaagatctctagcccttgattcctttctgtagtagagcattatcaagatcttaacctggaactctttctctccttcaggtttggttaccaccgtcttactcactatg

SEQ ID NO: 357734 - DNA, 561 bp, Cannabis indica
gctacttctccatcaagccctcatcttgaatccattaatcattaaataacaggttacactcttgatttacaactgtatgatttctctctgtttttctctctttggatactaacaaaactctcttttccttttacatgaacacacaagtgattctctaggaggagttcactaggaggggacaactctcagccaaaggctctctttttctctgttgttgttctctctggctctgtatatctcaaaagagagaaaatatcctcttatatatatgatttgtgattctgatctagggcagagccctagagatatttgtaactgtttttgtaactgtttcagttgtaactgattttatgttctttagtcttgatctttgttgtatttgatataagggtatatttgtcaaaccctgtgggtagtgttatacaactttaggataaataagtgaatctataacaacaaattccacccaggttctcttatttacccaaggatagttgatgatgctatgagggcttgaatgaccctactagggtcagctccatttgtttatccctagcaagt

SEQ ID NO: 357735 - DNA, 1410 bp, Cannabis indica
atggtgttggacatggtagcatttttggaggcagcagatttaggtcaagaataggtgtaagccaacttcagactagcctacaccgagaaaaaactttaatgtctgaaccaagtaaagaaggattaaaggaaactatcaacaaagacttaccctggtgaattgcctcaagactcctgccatcagcagctccaaggaagactcctcgtcagcaccaaccagctgctcacttacctcaagaaccaaccggttcatgtaatgggcgagcatctctttgcctttcttggcctctagatgcaatggcaaaggtggagtaggagcccgcatctgctcagatccgcacttggccaactcggatccaccctttgattgcttaggcctatctgagcttcctcctcgagaatctttggacttagtaacttttggagtagaaggatctgcaacagttagctccttagaaaggtcaataacctccctggccggtgccttttccttggaaggggtcacctcactgcccttagatttcatggccggaaaagatgagcttgagcttcctccaactctctttttcagagcatcaagtatcttctgagacatttctgcacgaaacaaaaacaacatggttagaggaaaaagggcaatagaagcataaagcatgatagtcaaaaattttaaaaataagatggaatatcctgcgaaacgattgtccgagcaagactcgagagtccatcatcacctgataagtccgttatctccaccatgacaactttcccttttcctagtacgggagaagatggccgagcaggtgaactgggctccctaattcgaatggcatgttcaatgggcctaggctgggccagaagtttctacctcctttttagcggagtcacctactcttctcagcctcatcttcaggattcaggggctcatgagcatactgtttggtccttgcacctcccttcaacttagcttcacgcttaagttgaatgagttcatcctcctgatgaactctctcagcccatccagcacaagatttcctcttcctctccttcattggcttaggaagaaaatccttcggatagagcccgtacttcaaaaagttgtcctcgaaggtcaactgaatgatatttcggtcatccaccctgaagtactcgtaacaaaaatgccaaatctagctaacagccttatcctcggtgcccgtcaaccacttgaagtctggttgagagaaatagaagtaccccaatctgccttgcttaggggtggacttcaaatcgaaaagccagcttacctcatggggagagggcatatcccatttctgggagccatagagaacgaagagggcggataaatacttaatgcccttgggattaaattgggtcggacagaggcggaagaagttgttgggttttatgc

SEQ ID NO: 357736 - DNA, 947 bp, Cannabis indica
cattttaatccattctaacattttgtagatgtctagatttgataataatgactttaaacattcaatgtccctcttcttaggccaactccaatgggcatgcaaaaactcattaataatgtgattttccacaaaaatcacttcaaccgcacgacaaaattaatattaattttgagtttgtttacagtgtcccaccatatttaggtgggcactatagacaacactattttttttaaaaaaacttttaataataattatataatacttaaaaaaaaaactaaaataattataaatacatattaatcaaaacttttataaatgtatttgtttgtatttttatatttttaagtctgctaaaaaaaaatattaagagtattcgcatcattttttaaaccaatccacacatggggtttttccaatttcccaaaccgcactagcaccgcgaaattaaaaaaccacgaaaattgcaccacaaaaaataatgtgatgcagtgcaggttttgcagtttggactatcaccaataatttattggatttaacaaatatttagtattaaaatattcttattatattaataaaataatagaataattaaaaatataatatttggtgtaatttttagtattgtggttaaaattgaaaaaaatttaatgttaaaataataattttttggtgttgatttaataccaaatttaaatttatgatacccttaaacatttatttatttatttatttttttaacatcccttaaacatttacttgagagagagaaaaagcatctatgggtaaaatatagaataacaagatgaattctcttacagaaagcatgaagatttccatctttaaataataagaataaaaactttttcaaaagaaatttaaatttgacatgacattatttttacccactcagaaaatatagtactagttcctccttctgataacaaccg

SEQ ID NO: 357737 - DNA, 632 bp, Cannabis indica
catgaaacaagatatgtgctggaagttcaacttatgtatcatcctctttgaattttttttttagacatttggttatatcatgtatggttgggacttggaagtattatcatattttggggtcttcttaattcttataactaatttgtggcacgtttgggaaaggagaaatctaacccagaagtaacgaggaagatagggaaagaattggcaacattggcacaagtcaaaatttcggagtagagacaaacaatggttttatatcatgaaaaactcttgctacctcaattttccttccatatggctttatacgataatcggaagttattttcctttttttttttttttttctacagtagatatcataataacgcatgatttcgattgagtttggatcctttatacatgagaaaactatcatcaattttaaattggccaactagaaattttttttccagaactttaacatattttaaattatgcctgaatttttttttaattaaccttttaaatatcttcatatattaaaagtgcgcattttttggtttaacagaatatacttaaaaataaaaaaatattctgttaaatttaacgattaggtttgatttcccgttaacaaataaacccaataatta

SEQ ID NO: 357738 - DNA, 1111 bp, Cannabis indica
taccgaaatgctcagggctgaacctctataaaattcctgtgtcttattatttctttatcatatatctgttactacatatcgtttatcgcttataaaatagactcattgtcgttagctaaaagcgaagtcaacattttgatgctttcattgagagaaggatcacaaatcgctctttattcaatactcaaccgccaacacgatggtgcaaacttgtagaggcctgtctgacccaacgaattcacagacgctggatccggcactacaggacccatgaagttcaagggttccgcctgctattaatcccggatagacgggaagcgtggtgaatggtggaaaagctcctattactggaattgcgcctggtgtgcaagagactgggaataacagtttcgcacccaaccagggcatccatgatacgactattttgcctggaaccaatgcccagacgaccatcggagacgcaaccaaattgcaaaatctccacgacgcgctcggactcatgcagggtcataacaacactctgcatcatgatcaggacgaactgcgtgctgcagtaaatctcgcgtttgacgaacaaaggcgtatgttctctgaattgagagataaagagatggagacattaagggctcaccatacgtagtcagcaagccaccgtactgatacgaagagcctaccaaactgtaggtcagcaatcgtcgaatgtcattcccctgggagaacggaagaggacccaatgatgaatacttcccagactactaatggtcagccgcccaatccccacttacgagttccgctcgtgagcccagcggtaggcaagcagaccttgtccgttaattcatcaggaggagtggtgccattccacccgtcaaccaagcgaatcaatcgctaaggcaactaggctcttctgtgttggaaaggttaggagcaacccatgacctaaggaacgatctaaacagaaggaggggaacaaacgaagagaacattacgacgatcgtgtagcctggagcccgtactcaaatccccgctcagaaagatgctgacgtaatccaagtcgactagaatgccgagcacgtcagcccagccagacaagcccagcttgaagaactgaaaa

SEQ ID NO: 357739 - DNA, 535 bp, Cannabis indica
gtgattatttttcacatctttttgcacctactgctgttgactttgctgagatcttgcattgtacacctgccacggttactattgctcagaatgaaatgttagttgaaccggttttggatgatgaagttcgtcgcgccctctttcaaatgcatcctgataaatccccgggacctgatgggatgacccctgggttctatcaaaaatgctggagtactgttggtggtgatgttattaagttagtgaaagatttctttattgaaggctctttccctaacgaggtaaatcatactaatattgtacttatccctaagaagaagcaacctgaggtgatgactgatgttcggccaatatctttgtgtaatgtcctgtataaaagaatttctaaggtgttggcgaatagattaaaagggattctgcctttggtaatttctgatacgcagagcgcgtttctccctgggcggttgatttcagataatatcatggtttcatttgagataatgcattatctgaagcgaaaaagaagagggaaagaagg

SEQ ID NO: 357740 - DNA, 747 bp, Cannabis indica
ggagatccttgcagcaccaacagtagtcatgttagcattaaacggaggaaactgctctgataccatgttgaagttacgagccattgacaaagaacaaatgcagaaagtaaagaagaagaaggaagagaaagaattgagaaagaaacagagaaaaagatatggagaagaaaaggaaagatctcattgaatgaagcttagtacatattatatatacaacatgagaacaatacaaactaactgactaacagtaacgaactaacaaacaactaatataacaaactaactaactgttagttgccttaacaatgtgtctttatatggtagactttacggctaatttcatggagatgaacttaaatagaaactaaggaagatcttgattgacttgccacataaaattgcgaatcaatgctgttggagatcaataaacattcaattctaagaatatttattttaggaatatgcttttttgttagatgtaaaaactcgttgttgttgttttttgtaatattgtataaataaaacccaaagagcaacctcttctcttctagtatcttatttttcatatttttttttttttgaaaacaattatttttcatatcttaattttgtgagaagattatttcttttgtaaaaacttaaagtgttctattaggtttttgtgtctttgttattgttctcttgttgttcgtaaaataggttgaagaaaaactttgaataaacgtgtgtattcgggagaagagtttt

SEQ ID NO: 357741 - DNA, 401 bp, Cannabis indica
tatatataaaaatgtatgagaaaatgataataagtttttttgcacatattttgtaattaagtaaaataatgtatacaaaattgtaaaatgcccttttataatattatgagcatgcaattgcagaacttgtgtaattaaagaatgtatgtataagttattatgatggagaatgttttgttattaagtaatgtataaaggaataacaacacttaattaagttgtaaatattatgcgttgttgattgaatgataaaaaaatgtcaaatatatgtttattgggtccatatggtaaatagggaggcaatgtggtgactggtgaaagacatgaagactcagtatcccgagtgtttggtaagttaaattttgaggatgaaatttttttaaggagggtagaatgtaata

SEQ ID NO: 357742 - DNA, 1003 bp, Cannabis indica
acccttttagagcagtgacctacaatttttttctaagttttttttaattctttttaatatgattataggttgactaatattagtaatatcgtaggaaacttctttggtgcaccgatgcacttccttaatattttggcattcaagagaattttttagtcaatttaattttttttcatggtcgtgtacattatagttatttaagtcattttgtaaaattttaaaattaagaataatttataatataaaaagtaatattcaaatagtactctataatgcttatagaaatttgttccttatacttatatatttaatatactcataaaatatgtatttataataattaagatgtaaaaagaaaaatacataaattcttattctaattatttataaaagttaaataaaatataaatgaaattgattatagaccgttaggcacgtgcattgcacgtgtagcctcatctagtgtttagaaatatagtagcatgtgatatgtaacaagtatgggtctgatttcaccggatcacaaattctagtactgcttccattaagattttaaaatttgattttggacctatagcatttaggagaaagcgatgttggggaagtttccctttttcccaactctctacacatattatattaattattaattaatctattaatggccatgtgattttgttttcttgatgataattttattttgtgatctttttagacacttaatccaagaaagagtattgatatttaagtgtacagctggtaaatttaaaagaaatattgcggcaacctagtttttttttttttttttttagtacaaaaaaataggataacctatcgaaacgcgcaccaaaaattttctgttatatgatgtaatatatgacagcttttgatttttctggtcctccttttataagagaaatagatcggttcataaagaaaataaaaagttataattagagggaatgtttcttcatatgggttaaactttaaaagtactcaaaaa

SEQ ID NO: 357743 - DNA, 617 bp, Cannabis indica
ggaccaagacctggacctgaatcaaaagccagacccacacccagaccctgagccggaccaaacccagaccgagattgcaacccaggactcagagcagacccagcccagaccaagacctgaatccataccaagacttagacccgaaaatgggaatcaaacccagaccgagacccgaacctagacctagactacgatctagaccctgactcggagccaaactcggaccaggactcgaacccgacttggacccggatcgataatcgaaactggaataagagttggactagaactgggaccaggactagaacctaggacatgggactagaagtggtcccaaacacaaaccttaaactgcaaacctaatccctaaaccctaaaccgtaaatcgtaaaccataactttaaaccataaaccgtaaaccttataccccattccttaaaccataaaccctaaaacataaaccctaaactctaaatccctaaacactaaaccctcaaccctaaaccctaaaagaacactgaatcctaaactcctaaaccctaaccttaaaccctaaagcctaaaaccagactcaaacacagacccaaacaaagaactggaaatgaacacaaatatgg

SEQ ID NO: 357744 - DNA, 642 bp, Cannabis indica
cttacaagcagtttgtctcaactagtatggggaccataggcagatctagaatttaccaagtaaatttcctaacttattaatccctcattgtactactatagatttggaattgcactcttaattatatagagcgctctatgtatagaccgcttaactttaatttggaaattagtagataaataggatttaattatgaaacttgcatattatttatgaattatcagtttacggagatttatttgaattcagaatacaatttatatgtcatatatggaatttcatatttttgcatattttgtgcccgacaacattggaacgcggggtttggctagtagaatcacatcttagtatttttagtatagcggggtgatatagttagacattgggaatgttgggattagttgagattctagaatttaccaaattacccctaagtgattttatgactttttggctaagtggagggcaaaatggtcatttttcctaattgtgtctttgtcctttagtggacactagatagaaattacattatgaatattattctttaattacttagataaaactcttttttatttacatttttatcaattagaagaaatcacataaaacactctctctccaaagttctctctctctctctct

SEQ ID NO: 357745 - DNA, 597 bp, Cannabis indica
aactactaacgctaaaaatatttattcaaaaaaaaaaggaaattataacaactaccttaattaaataataaaataactatcactatcattcaaaaatagtgataatgggtcaagttttggataaaaccaaatacgaaccacataaaaattaatgtaaatggttcactattttatcagaagatcttgtatggcttcggtatagtagtgtgagataatttgggtaagcttattgaagtcaagacatgtcaccctcgtacgtacttactctgctgagattgtgggagctttggggatcaaagaagctctaagttagattaaaagcatgtactaatataatgtagagcttgaaactgactgtctgttgtctgtccaagcaatccaaagtaatcaaaggatgtcttctacttttggcttgattatttaggattgtcgttctttattgtcttctctacatgatgtaaagttgtattttattaggggatcaacaaattgagttgctcacactgatactagacacctggaattatctctggttgtagtatttttgagcaggatgttgaggttgatttgaaggtttttatgtattcaaaatgtttt

SEQ ID NO: 357746 - DNA, 740 bp, Cannabis indica
attcaactaatgttatctttgactctcacctaccgagacactgtatttcattttgttggaaaccttagaaaataattgaatatgttttatttttgtattttgcaaacatgtttctttacttgctattttctgaatttgtgtatgaatttatttgaatcaatttatttctgtttattgatatttgtagtgtcaaaatactgtttaacaatcccaatcctcaattagtataggcctttgcaaatgaactccaaagtgcgaagatgactcctggtcagagtatcacttcacacttgctcatgatgaacttgaaattccagaaagtaactgtgttgggaattgttttatcaagagagaaaagagttcaatttgttctcaacagcttatcacctaagtttaagcaatttgttgtatcttttatgattaacaattagaactcatccgacatagacaagatgggcgttgaattacatgctcatgtaaggacattgtcacttacaaggaggtccctctccagtactgtagataagggcaaaaacaaagctgaagatattgagaatgactcctccggcagtcctactactttagggtcagttgagaagaatagagagagtgcttccactttgttagattatctttcacaacaaattgaaccaacaatatgaacaatataagaactaagcagacatattattcaatattctaattgtgaacagaaggacattttaaatcaaaatgtccca

SEQ ID NO: 357747 - DNA, 813 bp, Cannabis indica
gagagagagagaggaggctgaatttttagatttgaggagaggggcattttggggttaacactaaaagattagcatagtcaaaaaaaatttgggagggtggtataattaaacaccatttgtcatttcttagcatcaaatgtcatattttcctatataaatatatgagtactccatgacatgtaaacgataaacgtagacttatggtaaaaaaagttgacacttattaattattaaggttgtctttttcagttgttataaattcttttactatatttaaatttattttcgaatcaaaaataagaaaatatagttactgatattattaaaaaaaaattaaaaatgaatatctcactaaataaaatacaaccgcacgcgaagcgtggtttatttcctagttacttataaaatcaattgcatccacacacccaccacacgaaacatacatctcatttcacagctatgagattatgttggtccaaacaaccaaatttaaatgtctcaccgattgaatttttttagaaacgctctatagtaagaaaaattctatatgtataactagggaactaagtcgcgcttcacatgtatatatattgtatttatattaagtgatataatttaaaatatgacattttagcgtgtatattataaacaaactaatagtattaaaagttaaaatataatttgctattctaaaatatatagaaaagtgaagattttgtgacaaatattagcgttataattactagaaaaataaaatttattttatgattatttttttgtattttttatttcataaatttatattctaataaa

SEQ ID NO: 357748 - DNA, 1018 bp, Cannabis indica
ggcgtggagaagaactcttgatggtactcttggattactactttactataaagatattattgtattatatttcatcaatttcttcttgttcccatacaagatttttattttgaagtatggtgtgaaaaatagacagatatattatgaaataacaaccatacaattttactaaaagatccaaatcttagtggagaataagaattcgattgaacaatattttttggtggtggtcgtggttgttagacctccatccgtttcctcccgtttcttcaccttgaagagtaagcacgacaataatatttctttgagaagaaacggaggaaacggatgatggactaccctccacctccaccattcaaaaatgttgtcgtattctaatttttgaatcctttagtatagttgaagattaatattttatgatgtctctagctatctctacataatattttaacataagtttctacgaattacctataaatattgagcaagcaagaagaatatgatcaacatataaaccaacaataaatttattaagagtaaaataaaaaagtagttgaaaagtatcattgatagcttcttcttcttatcttatggaaacataaataggttcacaaacaaacaaaagatgaaatatcgtaattttattattttattatttgttaataattgaatcatattactttatagtgttattctttgttaaagggcttctagtgttattatttattaatgtttatttgagctattaactgtaatgtgtgtacattgtttcggttaatattaataaaaaaaacttaatttttcattgctttgtgtatgatttagaataatacattgcttgggtaaaattacattgctttgggaaaaataaaaaaaggcattataatatttattttctttcatgaaacaaatctcatcaattatttggagctaggttagagtttagttaattttgattttaaaaagtctctcttacatgtaaatcaactcttcggcctcgtaaaatggattttatgaa

SEQ ID NO: 357749 - DNA, 668 bp, Cannabis indica
acccaaaaaatttcctgaggaaactcaaaaggaacatttttttgggtttagcttcatgttatacttctttaatatcttaaagcattccgcgaggtttgaggtataatccctactctttattgactttaccaacatatcattgacgtaaaattccatgtttcaccctatttcatttgcgaacatttcgtttaccattcgctaatacgttgccccaacattcttcagttcgaaaggcatgattttatagcaatagagtaccatgtttgttacgaagcttgtatgttcttgatccgggacatacatttttatctagttatatctagaatttgcatccataaatgacataagctcatgtctagcaattgcatcaactaactggttgatcctgggaagtggaaaacaatcttttgggcacgccttgttcagatcagagaaatcaatacaagttctccaagttctgttaggcttcgggacgagaacaggattggctatccacgagggataaaacacctcgcgtataaagtcgttgactaacaacttgtcaacttcctgttttagtgccccttgcctctcggaatccaagggtctccttttctgtctcttcgctgggtagtttagatcaacatttaaatgatggcatataatattagggtcgatccctatcatat

SEQ ID NO: 357750 - DNA, 834 bp, Cannabis indica
ttaataatatttttctaattccaattttgtttaaaaataggctgatccccagacgggggagcttcccagtgctgtggatacatttgcaaagtttcactgcaagaacaacaaatggcgcggtgagcacacacaacaactgcatgtaagtatctttatatttttaataaattagttttataacataaatttctttcactctaacagtttcattatgaacttttttgcaggccaaaatggttgagattcgtgacactcaaccaacgccagccaatgctccccgccagtacaatgtcgaccccacacaatctcctgcagatacgcatgttatgacacaggtacttggagagcagtcacgccacttgaaaggactgggcccgttgccaagacttaagacggggacaaaaagagcaactcccaggccaggtacatccgggtagccccctatcactcaagaggaatatgaggcattgaagcaaagggcgggagaacaagaagcacggaacaagtggcaacaacagatgatgatgactcagaatcagatcatgagtgcgttccaaaaacaaatgatccaattggccagcgctggtctaggatttaacatgccggatctacctctgattctaccatttcagccttctggccatgcagcaggtttctcctcacagactgccccttccagtgatgacgacgatgatgatgctgatttgtaattttttttagtttacaatgtagataatattattgtttatgaattcataatacttttacttagtttatgatgtttaatatagttttgtaataacattataactttcggttttataatatatttga

SEQ ID NO: 357751 - DNA, 611 bp, Cannabis indica
aagaccatagccatgaataaaatagtcagcaacatgttaaagttatagaatctttaatcaatggttgctagtacagttcatcgatgcctgttcttcgatgaaagtaatccctgttcggattacagatgtagtatgacattaaagtgaatgtgttgtatataatagagattatatatgacaaggattgatatgaataaagttgtctttatctatcatgtcattttctataaagacctaattcatatcataatgatgatcaatggtagattggcctaaatcctgattaatcatgaactcagttcatgttattagtttctttgattcacttgttaaagtttatcagggaagatgattcttacaacttctgttcgaggaatctaataatatggatggctagaaacatgatctactagggctgtataaaaaaatttgtaaaccgcccaaactgaataatctgcccaaaccaaaccgaaaaaatcgataaaaattacaaaccaaaataacctgaaaaaattacaaaccgcccaatctgttaattgggcgggttgaaaataggtccaacccacccaattaaaccgaccaacccgatttggattttttttttttttaac

SEQ ID NO: 357752 - DNA, 373 bp, Cannabis indica
atcactacgagctaagttgaaagaaaaaggagtactagttccagactttcatttttcatctaagcttagctgaagtgatccccactacactaatgccatgtttgactaatagtgtaggggccataccttagtaatggaccttctaaagatgtctttgtcacatcttgttggtttaggaggtgatcgattcacttgcataaggtgaaatgaatctctctgtgaagcaaactatttagggagaagttactttattgatgatattatctcagatgctccctgttccagtaccttggaaccaaaattcaatttaagtggtaatcataacaaactctaacctatttttcctaggttctaatgttgggttttatgccct

SEQ ID NO: 357753 - DNA, 614 bp, Cannabis indica
ggtgcatacaagtttggcaagtacaacgagaacttggagttggtacttctacccaaacactaaaatagagaacatttgggtaagtactcttactatccaacttgtcaattagtttctctaacatttcatcatgtaaggacctataaaaaaagctagtatccatttcttttcagcatggcctcccatcactcttcagtgatggccattgcatggtaagcctcgtaggaatagccactacgtgatttcaaaagtagacactaagctataagcttttgctacacgtaagaccagccatgtctaaaccacttgtgaacaaagataacttcttaaagttattctttgccaattctacacgcgtacacctggtagaaccccaagaaaattcccagtaaaggtctatgaaactttgtgaattacaagtgaccaagagactgtaagtctacacgctcacttgggggcacctacactatacaatgcatcgatctagcacatagaacttatgcagagaaattttaaaacttagaataagctactaaacttgcctctaagtcaacttcaggcatacgtcgacttgacataaagaaaagtaatttcagatacttacatgtcaaggc

SEQ ID NO: 357754 - DNA, 907 bp, Cannabis indica
aatgtgataaatgccaaagatttttaaagatacctcgtgcaccacccaacgaactaactcagatgcaaagtgcttggcctttcgccatttggggaatcgacctgattggacagttgcccaaaggcaaaggcggagtacagtacccagtggttgcagttgattattttaccaagtggattgaagccgagccattggcaaccatcacgtccaaaaaactgcaagacttcatggtgaaaagcataatttgccagttcggagtactatacaagatagtctccgacaatggcaaacaatttgtcagtcaatccttcactgttttcagtgcaaaccatgtgatcataagaagtttctccgcagtggcgcatccccaagaaaatggtcaagttgaagtagtcaacaagacattgaaggacaccctaaagaagaaacttgaagatgctaaaggaaattgactagaagaactcccaaaagttctatggtcatatcgcacaactaaaaaatagttactggacagactccatttgccatgacatatggatgtgaagctatgccgcccgtaaaactcgaaccaccgtcccacagaagattaacatacagccaagaggccaatcatgtactccttgcagaatcacttgatgaggttgaagagaaacaaaccacagcaaacttaaaactgatagcccatcaacaaaaagtagctcggtattttaacaaacaattgatagcacggaaattctttctgggagatattggtcctaagaagagtatttttaaacaccgaagacagtacggcaggtgtgctcggaacaaacttggaaggaccatatcaagtgttcaaagttctagaatcaggggcatacaaattgggtaagtatgatgaaaatatgcaactcgttctagtaccaag

SEQ ID NO: 357755 - DNA, 623 bp, Cannabis indica
ttgttttttttctttcaaatcttatacatagcatattatagttaatcgactttttggggaacttttattaattctctcccaatcttatcaccattgcaaaatatgttacttgggaatttatgatattatttgaactaataaataagatgatttgtaaaacatagtaacactattcttctagtttatattatttcatttttcatttttgtaccacagattgtatatacatacagtatgtgaatctagataacactagtcctttagttttagattcattaagattgtttgtagttggtttgtttgggaatttatgcttggttctttttgagttagtgaaagacctatagattttagaatttttgcttaaatgtttgcacagtgtgatgaagtttttgagttaaattttttaaatttagttttgagcctgggagatctcggtcagtgtcgtgttgggttgaaggctgaaatggtggatagttgatttcatcttgttgtttgttattgattttgttcttttttaggtgagctgatataataggatatagtggtaattttgttataggtttgtttatattgattttgttctattttgtgccattatttatggttttggcgccttacaa

SEQ ID NO: 357756 - DNA, 522 bp, Cannabis indica
tatcttgtgcgtgcaaattgttgaactaatgccttttatgtctgctatagtccacccaattattgttttatgtttctttaacacttctagcaataaaccttcagcttcaacttctaaccatgctgatataattactggcagcattttattctcccccaaataagaatattttagatgacttggcaagggtttcagctctagctttggtggttcttggatggaaggttttggaggcttgaaattgctttccttcaactctaaagactcaaaaggtctcttgaatttagggaaaggctgcattggctctacccaagcaatttgggtttcttcattgtcactcaaagctttaagctcttcaagagaacttatcaacctcttatatttccccacttccttgtgaaatcttacagccacaatagaattaattacactcaaatgggagaattcttcaatctcatccggaaatctcatagcattgaacacattaaaagtgactttttgatcattcactctcatagtgag

SEQ ID NO: 357757 - DNA, 800 bp, Cannabis indica
atttaaaagcttaaaaattaaaaaaaaaattatgtctttataaaagattgaacttataaaattatagtttatgtaagaaaattttaccacttacaccattatatgagaaaagatatagagaaaacagggaaaaatcaaagcatttggtatattatgttgctgaactgattttataatggataattgagcttatatagctcgatacaatcaaaaattggttagttaaatctaaccaatattgtaacagcataagctgagatagtggctgttgtgttagaagggaagtaaaggccttgtcccggggttgattttaagtactgtaagatacggtttgtagcatggagatgtggaacctgtggacaagttaaaaactgacttagatggttgaccgcataggagatgtcgggccttgtaattgtcaagtatattagtttgccaataaggcttctataggctgtgggatctgggagaagattccctttatctttgcttagttttaggtttgtttccatgggagtagacactggtttagcatctatgtagcctgtttcctttaataattgaagtgcaaaaggcctttgagagaccgaaatacctttctttgtgcgaccaacctcaagaccaagaaagaaacgaatggttcgaagatctttaagtttgaatttggcatggaggtatgttttgaactgtgatattgcatggtcattgttgcttgcaacaactatgtcatccacatagataagaatggccaagaatatgttatttgtccttttaatgaacaaggtgttgggttttatgcc

SEQ ID NO: 357758 - DNA, 507 bp, Cannabis indica
attttcaaagttggaatatttcccttcaattttgtttttattttttttatttttcacactcatgctatcttgtttattatcatagattggttgcttctaacaaatttatttcaattcatatttactttatcacataagataattgaatgattttcaatctaaatagtaaataggtggctatgatttgtggtctatgaaatattctaatggattttacttcttgacattttttatcttttcacaaagtaactattttttaatgttattattattattattattattattattattattattattagcattactctatatactattttttaatttttttttttaaatttacgtatttgggttgctctggtagttgcttctgtaatttctatgtaggttgctatgtggattttgattgcaatttaaattgctctattggttgttatgtgaatttccgtaaaaatataaataaaaaaaactgttttgaagtgtaaaaataaaataccctta

SEQ ID NO: 357759 - DNA, 806 bp, Cannabis indica
atataaatgtgatagtgggtttggatgaatttataaatcaaaataaacaagtaaatgataacatgaaccaaatgacacacaaagtgatgaaaaatacatctgtttctttattgatatttaagaagataaagattacattgaaatggagttttatttagggcataaaacccaacattatcttagtttgaaactggaagttccctctagactaagtcatcaatacagcaatctagtattaacattaatgttcaatacttgaccttaaaattaagtaatcattagagataccataaaacttttcatgaggatttaggaatttttttgcctaagtcattcgaatagactatgccaaaaattcttctatcttattctcaaagttctgataagttgtttctatccatgtgaatggttagatttactttctcagttgaattctaaagttcctatcacaagtgtcatccaattgaagatgggcttagaatttaaaattctcccactcaaatgaggtactgtgatactatgaccaagaacttttattggtatcaatttctgttacaacagtaatatattaattggaacataaattaagatcaagaataagttctaaataatttgctaacttttttcattatataacatccatatttaatcaaaaatatgtgtgccacagaatactgtggtgtagtgagtatagtctagaattcgaaatgaactacatattttaacagtttaatccacccctaagtgatatagatgtcatgtggactgaacccctatttatacaaaatatgactaaaagaatggga

SEQ ID NO: 357760 - DNA, 559 bp, Cannabis indica
cacagtcgtcgaacacgaaagttaagagccacagcgagcttcaaacatcgtcgagaacggaggccaagatccctgcacataagagagaaagagagagaaacagagaaatgaaagaataaggaaaaactgaccttggatttcgaggttggtcggggatctgagaacttcggtgttggtttcttggtgagaacttcggtgctggtttcgaaggagggtggggcactggctggcagcagcgatcggcgaagaagaacaacatcgacgagatcaacgaagaagaagaggaggaggccttagtcgtctgttgtccgtcgtccgtcctccgtcgtccgtcgccagagatggactggccagaaatcgaaagaagaagaggccagaagaagaagaagaagaagccagaagaagaagaaaccagaagtcgtctgtttcatggtatgcccacatgtatagtgacacactatggatgtgggcataccttttttgagtctctcctagcgtgactctataggtcagtattttttaaaaaataaaataaaaaaactatgggtattaattttta

SEQ ID NO: 357761 - DNA, 663 bp, Cannabis indica
ttctccaaaattactactccaccccagagtaatcaccatctcatctgtagactttcttgcactaacgcaagtctagaaacccgatttggtgtagtctaagagtattaaataccacacttattgactaacatatagttcctcttcttgatcttaaaatttacttgattgtcttccaatgttattttcctggattaatctgataacaactcatttctcccactcaacagcatgtgtctggtgtaatgcatactaaagcatatctaagacctctcacagttgatcctaaggaattctttaatgacttttatctttttttggaatagtttagacttttccttagttaaataaaatctatgtctagaaatcgagaaggttctatagattgagccactagaaaataaaaatgcttcagcatcttactaaagtaagttgctcgcactagagtaattaaataaccaggtataccacaaaccataggtttagataaactcaaacctataatactaggaacaggaagttttgttaagtctattgaatagacttattttcaaaatatcctttcttatccctgtaatagataacaaaatgcaaagaactacgaacaacttgatcccttaaaagggtacggaggcaattagaacaaatatggatgtagccgcaaaa

SEQ ID NO: 357762 - DNA, 621 bp, Cannabis indica
ttacaactcaagaaaagtcttattgggctatgaaaaaatccaagcaatttcaatagaggaaatttaattcactaggaaagtattttggaattttgcaggtcttagaaaaaagaattcaagggtttcaggaagttttagaatccttagagcaagatcaacaatggaggagaagaagaaaatttctcaaaaaaaaattaacactgaataagaaaaaaaaattctaccttggaggatgaaggacacttgaaggcttgatgaagataaaattccaaggctttttctaacgcttgggcatggagagcttgaatgaggagtgtggaaattttgattgaaagctctcttacttaaaggtgagttcaatctcctaatcctagagaaattgagagtcttttaaatttaaagctttaaaagaagaaataaatgataagtaaaagatataaatatatattttctctcctcctttaagcataatttgatatttctatagcaataggaatagagttttttaaatttaaaaggtagcgtccattcctaatgctactaagttaaagaaaaattagagatttaaaagaaaaaagataaatgataagcaaaagatcaaaaatcttctctctctctctc

SEQ ID NO: 357763 - DNA, 666 bp, Cannabis indica
aggtgttggttttggtagggtaccagccccggtgaccgcaagaaaaggcctattgaatcatcagttgtaggcccaaacaaaaggttccagggtaaccaaggcttccgtcgtagtgggaacaaaaactggcggacttttcctgaatgcccgagatgtaaaaggcgccaccagggcgagtgtcaggccagggcctgtttccactgtggggtagtaggtcacatgaaaaggaatttccaacagctactgcgactagagcaaaagaaggatgacacacctactcctgcccaggtgtttgccctaactcaggctgaggctgatgctggtccttccactgtgacaggtcagctttctgttgctaatactttattgactattctgattgattctggtgcgacgcattcttatattttaagtagaataattgagaagttgaataggcctagtgatgtgcattctagaggtttcggaactttgctgcctactggggagttgaatatctccagcaggtgggttcgatccgttccagtatttgtaggaagggagttattagttgatctgatagaattgaatctagaggattttgatgttattttggagatgaattggcttgctaaatcaacgccactattgattgcaaaaagaagatggtaacttttcagcctgagg

SEQ ID NO: 357764 - DNA, 918 bp, Cannabis indica
gaccagggcggatacttgggcgagctgcactgctacattctcgcccacaataatcgtgccacaaactctgacaaggggatgtgcgcctggtcgagggcccatggtcagcaaggagcgttgatgcacttgcataagtacttcaaggatgtggctgacttcttcggtctctgcccggcctagttactcctaagggcattaagtatttgtctaccctcttcgtcctctacgcttcccaaggatggggtaccccttctcctcatgaggtttcctggttcttcgatttgaagtccacccccaaacaaggcaggtcggggtacttctatttctgccagccaggctttaagtggttgaccggcacggatgacaaggccatcagcaaaatagggcattttgctcatgaatgcttcatggtgaaggatgcgagcattacccggactaagttttagcagatttcgacatatcaccgtcctcccctcactcttgctcttagggatagagctcaaaaatttgctcggttgttggaggaagaccagaatattatccagttgacctacgatgataatcatgtgaggtacgagctttatcccgaggactttagtcctaagttcgtggcagggaagaagaggaaatctagtgctagcccaactgaacgagctcatgaggaggatgagctcattcaactcaagcgcgaggctaagttgaagggtggtgctagagccaagcaatatgctcaggagcctttgaatcctgaagatgaagctgaggtcttcttttctccctgagcctcgtattcactggatacatgatttaccaccaactgtgaatcactgcaaattttaatgtgttcggctttcatttcctgggctagttttagtccagcgattagagcttcatcttcggcttcgttgttagatgcct

SEQ ID NO: 357765 - DNA, 1079 bp, Cannabis indica
ttgggaaaaatcaggggcaacagaaccaatcgagccttttgatatatacaaaattacaggctgtaggaattttagcaaatattacggtccttctaccccttcatctagtgatagctcgccttctagtgattttggtaaatcccttaggtggaaaattatactcctcccctttttaatcgaccgttataatgattgtaatgcctcgtcttgttttgcagacatgggttatgaagacatcatggaccgtaaagggaagaaaaggacatccaaccctggagtccctactattgtcgaagtggttcctcccaaaaggcaaaggacaaccaccacccataagaagaaatcactgatcgagcctatcgatctcgaggttttggacgacgagattcaagagaaatttccccctccagttgtccccgacgccaatgctccttgtcccgaggcgacccccgctaccgcttctttgagccaagacattgagaccctgtcggtcacagctggggaagctgggtctaaatttgcccaggcatatggagtcgccttttggcgcaaacttcaaactcttcttccccctaattgggattttctcaatcttaggagtccaaaagagatgctttcaaggagcttggactgtcacttcatggtacgttggctttgttattataattatattattcttttttacacctctttcatatccatatgtttgcaattctctaggcttccttcgcttcttttgcttccaaccgattactctctgagcggcttgaatacttggagggcaaggtcccacaagctactttcacaatttaaggttgtgagtatgcaccgggatgactcctaataggaagatacccgcctcacgaaagaagtcgagaaactaaaggaggaagcccaaaaggcaatgaaagaagccgagaaggcaaaagaggaagccgagaaggccaaggaggaggccgagaaggcaaaagaagaggctaagaagaccatcaaagcccaagctgatgagtttgaggagaagcttgctgaaaaaattgttgagaaagaagtcgagactgtagaacggtgcaataaggttg

SEQ ID NO: 357766 - DNA, 918 bp, Cannabis indica
atatgaattcctaattttgtttggcaaaatagttaataattacatgggaaaataatattttgtagtagttaatatttaatttaatatggaaagtttttagtaattacatagtataattacatccaattctctggcccccatgagaattggaaagtataattggaatccctcaattatttccaattacacaattatagtgtaattacatggtcagacaaacatgtcaaattgtgtaattacctctaattacacacaaatccaattacattgtggctttccaaacacaccctaaattaaattatatggactaatttgtagtataaatacttaagtttaatttttggcggtaataatacttaagttatatttttggaactctgttggtacctgaccattaaatattgaactctgtaagtacctgaccgtgaaatattaaattattatccacatatcattttcttattggtgtatttaaattaattttaaaaaaatttaatgatttgtactaattagaaattgtcacgtcgcaatttacttaactcttaacagctatgtacttacaaaagtttcaaaattataacttaagtattattactgtcaaaaattaaatttaaatatttatacttgtaaattacttaattatataatactttaatatttattacgagatatattataaaattttattagtataattaaatatgtataattaatctagtgtaattattaattagacgtttggtacgcaggactggattggactagacaggctaatttgtccaatccagtgtttgggcatgttagaagtctggataactaatccaactaatctcatctgtctgggattatttgtcccatcgagcagggtgggataaataatcccatgcaggtgagatttttttttttttttatcgtttt

SEQ ID NO: 357767 - DNA, 580 bp, Cannabis indica
ttacagacaacaggctgaccgagcagcttttaatcccgattttacatacttttgttatttttaatgactttcatccgctgtttatgatcatcgtgcaattgtgcttgttttatctttactaaatgctttgtataggtataggtgccccctaagtgaccgattagacttatgactctgggtcacttataattttttgcaagtatgctcttttgtgtgttcggggttttgcgttcgaccaaacctttgtacgcactggatggtaaatcaacaacctgttagtaattttgactcaatttgaattttgaaataaacatctttgtttattgatcgaaaatgtgtttgttaccgtagtaagttacatcagagctagttgatctaatctgatcttttagcttaacatgaaataaaacaaattgcagaatttagaaattgtactttagatggtggttgtccgacctaagtacttctcaattttgtctgaacctttgggcgtggtccacccagcaggccattcacttaaaagtaaatgttcttttagtacttaatgtggtcatcctacctggtacttatattggtagta

SEQ ID NO: 357768 - DNA, 536 bp, Cannabis indica
aatcaatataaacataaatatttttatatacacttaagtggattctgaatccttaataatatcccaaatattactgaaaatatctgttactgtcattttactgtcatttttactgtttaaatactttattttattttgttaccaaaaatctcaccattttcgggactaggttagagttttattagcttagattaaattagtattttcttcgatttctcgcaattcccatgggttcgacctcgttcttcacaatctccatactacaataaagattcgtgcgcttgcgagttgataaatgtaaaacgtaatatttcagtacacaacaagtttttggcgctgttgccggggaactgcaagatgaaaaactactttaattcaagttggtataattcttctactagttattatattatacatattatattacatttcttaataacaaagtaaacttatatatataaaattattattattattataataaacttacgtttacgtaagtttttaaaaaaaattatatatgtattattattatt

SEQ ID NO: 357769 - DNA, 778 bp, Cannabis indica
tttaaaaattaagaaaaataagagagcaaagaatagggaaagaaaattattggtgctgccacctcacataccttaacaacagcattatataagtatatagattcttattattttgtttttttgtgataatacccccttaactttacttttgtttgtaaatttaagagtgtcgattaaatattacgattaaatacaaactatttaaaataataatataatatttaaataaataaattattttaattaataaaaatataccatgtatacatacaatgaatcaaaatttaattaatactcaaaattaacaaataaaaatgaaactaaatgagtgttgccataaaaaaatcgaaaaattaaccttacaatctatacagataaaaatataagaaaatttgattgcatattatataatatattttggtttttttttccctacaaagtatatctaaaagtaatttacggattccattgatcacgaacaggttttgtggccggggatggtttagaccgatggtgtgcacctaatgctaacgaaatcaagattaatgtggatgcatcaatatttgggagtagtcatgactatggttatggaattgtggctagagatgaacatagttttatggtggaaggtgtttctcggctttgtcatggtaatgtacgtccggagctagatgaggcaattggagttcgtgaggctctaagctggataaaagacaaacaatggccacaggtgattctagagacaaactgtttggtggtggtacaagcaattcgtaat

SEQ ID NO: 357770 - DNA, 537 bp, Cannabis indica
ttcatggccaagaaacaacaatcaaataaaatgaactcacttgaatgaacaaaggcaaagcaaatgctaaagtaagcttaaaaattaaatcatacccaacatagaagttcatagccattcaagcctcaaaaatctaactcatattcaagtaagaaaataaaatccaagctgaaaaatattcatccatggctgctgcccaagtttacaatctcacatagtttctaatgctaagtacaaacaacaataaagaaagaagaaaaggaaaactattaaggaagggtaaaagaaaaatcaaacactaaagcttggtcctctctcctttcttctctgctgtagttaatcctcaaaaaattgcagcagctcacgtaatggaggttgaagagggtgtacttccctcttctcttctttttggtgttggatttttagggtacaaacttcataccccaaaatagaagcccaaacttttccactttggcccactaggtttagtcccttttcttccacaacagctagctggagtgttttgagtgactgggc

SEQ ID NO: 357771 - DNA, 922 bp, Cannabis indica
ggcataaaacccaacaaaagcctcaaattattcggcataaatcaaagaaatggctttttatgctggtcagttcttcccgaagagaggagttgtaaccctcgtagtcagtttaatgaggatgtagggtgtacaagagattcttccagaatcggggattggagtttatggtgggacttattttatcaagagctaatttattaccatgtatatttgattattatcataataatatgataacttaaaatatgttttaccaaacgattaaataaacaccttaaagtttcatattcttacattaattacaacagaataaagtgactcctttcatttagtcactctaaccctcgattcccattctatagcagggtattatcaagtaatccaagatttattttcttgaaccgacaagcgataaactacatgaacttccacaaagatctaagtaccaccttgactagagtgggttggttactattacttgttgtggtataaaaaaacaaagagaagagagagatgatgtgtaaaatttagaaagagagagaggagctttttcttgtcagtttttggcttgaatcacttatctgaccaagctctcatatctttctttatatagctatcacactagagttaggtttagattaaatgggatcaaaataaaaaataaggaaatttacacttgacaccttatttttgatctaattgtcaaaaatggccaagtatgaataatatttttatttgtttggaatgtttcaataccctcatttataccatttctctctttcttctttctcttttccctcaaactttaaaaataatttttggtcacgccgttactcggatgagcctaaaaaaatatcattgtgatctactcttcaatgtgaatatttttaaatgtggaaacatatatatatatatatatata

SEQ ID NO: 357772 - DNA, 852 bp, Cannabis indica
ctgggcctgctcatcaaaggctttcagtcaactagaaaagtacacacttctgacttcacctagactttactcacatatgctaagcccattaacaattgatcaccaacaacatgggctaacacaacaaagaactatccaatcaaacccaagttttaataaaaccaataaaaatttaaatgttaaagcccaaataaaagtctaaacaaagcaatcatactgtcattttgtttgccacatgtgacaaaatttaataaaagaaccaatttacagcactatgaatggttcaaaagactatttgtaacgagctaaaaagttcagagatataataatacataagtcataatttgtgaaataaaaatcctaaatatccttactattaaaacaaagtgtcatattattattcactgatccaaaatttcattcaagtgggggtggactaaattattaaaataatataatatacaaatataactataaatatttattttaagagaggtagacacttattttattctatataattaatttttattttaatttttttatacattaagaataaaagaaaaaaaatgagcatgtaaataaggtgccacatgtaaataatgatattagacacactaatatctaataacaatatttttaatataaaatactaaaatgtactaatggtgcttaataggggtattcataaaatagtcaatcaaatataattcagtttgcatttgtgtgtgcgaattgcatgttaatcgacatgtaaaagtaaccgattcaatctaatttacacacattttcatatattttaaaaaattatacatcaattaataatttaatgtaaaaaataataatttaaaa

SEQ ID NO: 357773 - DNA, 543 bp, Cannabis indica
aaaaaaaaatttaaaattctatagtttaagtttttccaaatcccagaacctttacaaaaataacaggtatgtttattttaattgaaagtttaaattgaaccgcacttttcttaaactaaaaaaggattaactgttacagagattgaaaacagtttttcactctcgactaaactaacctacacgcctttatctctttctcctcacattgttccacacgccactcttcttgtgagttgttgtgtgctttaagatcaaccctaaatccaaacagtgtctcgtgagttaaaaatatgctgtgatagaaaatttctattcatccaaactaaacctaataacccactttattcctatagctttaaaggctgacttggaagatcaagttgtaagaattaccttctgggataaactttaacgagttaatcaaggagcttaatgaacataattaacatatttatttataatatatttgtgtttatatattctctaatgcaactatctattagatacttgattctatggttgaaatgttgggttttatgccct

SEQ ID NO: 357774 - DNA, 608 bp, Cannabis indica
ctccaatgatgacttgcaagtgttcatcaattggcagaggcatcagatcctggttattctgaccttggttggccttgacgtacttctgtaagtgcgggtattttttcttgattagaagttatattccccgtttcaagttgtagcattcgttggtgtcgtggccgtagtctccatggaaccgacaaaattttgtcatgtcccttttgctggtatctttcttcatgggcccgagcttcttgtacggaattagcgactgagtcgctatatacacactttttatatcttcagttaagatagtgaatgtagtgtgtttggcgcgatcacggggagtatgtccgtgttttttgatgaactttcccttcttcccgtttcctttcttgtggttgttgcctgaacgcttgccacttgaattgctggaatattagggaagctgggcggacattccagtggaaggaaccttcgttttgttcggcttttgctcaccctctgctcgctgaatggcttcttcgagcttgatgaaaccttcgacccggtcaaggaaatcactcattgagtcgaccggtctgtttttcccttatgtccctgccacagttcgccaaggacttcaa

SEQ ID NO: 357775 - DNA, 573 bp, Cannabis indica
catctggtcgcagtacatactccccatgcatctggtcgtagtgcatactccccatgcttttggtcgtagtacatacttccaatgcatctggtcgtagtacacactcccatgcatctggtcgcagtacatactccccatgcatctggtcgcagtgcatactccccatgcttttggtcgtagtacatacttccaatgcatctggtcgtagtacacactcccatgcatctggtcgtagtacacactcctatgcatctggttgcagtacacactcccatacatctagttgtagtatacactcgcatgcatctggttgtaatacatactcacatgctctaggtcgtagcacctacttcgccatgcagggatcatgagaaacacaaacgagctgcttggagtggtgccaaaaagaatgggaagacaacatataataagtcaactttgtgtaaaccacaaaaaaatgacttatggggaaattgttatacccattttttggactatttaatgaaaaaatcgaattgaatgccacatgtcataaataataaattctcacaataaatacattgtgggacaggt

SEQ ID NO: 357776 - DNA, 541 bp, Cannabis indica
tatataataagtgttctaataatcgattcaccttgtcaatgccttcttatacgtagcgagatggatgtctcacctcgtcaacacttctttacatgcagcgaggttgatgcctcgctatgcgttgtctatggctcccgtgacattgtgccttccgagacaagatggtttctcattaatacagaaattgatagtttgtacatccttgtctcgcttaagactatacaaccagtgagttacaaatatactctatttattctatatttaatgagttattctattttacatttaatgatataattgtcatcatatttgttgatttatattccctgagactgacacgtgtcactttctgaagtacagccgaatttcgggtgtaacaatattagtttactgaaatatcatttataggtagctaagtgttttaaggataaaatatattgaagggtagaacaataaatttgtccattttcagtatagatcatctacatgagatctttgactattaggattgtaacaatgtataatcataacgtatctatat

SEQ ID NO: 357777 - DNA, 520 bp, Cannabis indica
tatttatttatttcttaattaaaataatttaaccaataatattttgacacatgacaattttaaaaaagtaaatgacacagttaaaaataggactaactgacaaataaaaagcatgaacttgaggactattaccgttattttttgaggttggggacttatctgtatcaaactgaactttttgaggacttttgccgcaaatttctccttttttaaatactagtttgtttgtttttgttttttaaataataaaaataaaggttctttcttttttttttaattctaattttaaatatctttaaaacaaatcaaaaccaaaaaatactactattcaattataagaataagtactggattttttaggaaaaatcaatgagacattcttaaaagggtattttggtagatcttttatctatttaggcattgacgagagctttttaagtctgttttttttatgatcgtgtatatttttttttattaatagacgtattggtataatttaaatgagtatggtgatttgtgt

SEQ ID NO: 357778 - DNA, 1128 bp, Cannabis indica
caaacgttggatctggcagtaccaagtatatagcagcctccctgtagcttctagacctcaaatcatccaacaacatctccacttgctcttgttcaactaccctgaatcccatattcaggtgtttccctttaggcttaaatagaaatccaaatgggaactggtatcccaattccacacccatctcttccaaatgcaacctgttgaacccttcaaacccacagtgatcaaaatatgcaatttcaccaccctcatacatcttattgccacaacgggtataccagaaccccccatggaataatttcactgtgaaattatccgaattcaaacctgcaacataaactagagttaatggtggatgtttactaggcaaaacctaacaactttacccaaatatttgacaaaaccccctaaacatttagccccccccccccccccaccattatacatacagacaaaaaaaaaaaacatgtgcaaatgttccttttgcagaagacaaaggcataagattccctaacagcctttgactacttattttttacccaaaagtgcaatactttaatatctatctacccacttgacctgtgtatggaccacaattcaacaaaccccacaacctaactattattaactccactaccagaattaaaaaccactataaatccagcacacttatacccaacatttttcaaaaccctaaacagactattacaagaaaaaatcacttaccgtagtctggaggagcatcgtccctattccaacgacgaaaagccatttcatcaacgacttctgctttctcagtcttcctcttcaacatctatgccgtgtttctgggtttcctttgattttttgataatgggtttggggttcttacactggttcgggttcgtgtttcctttgatttccaaacagtgtcttggacttcgcttcttttgatttcgcaaaaaaacggttgggggtctcacacacgggtcaaggttcccttctcctcgaccagaccaggtttctgggttctgggtctttttttttttttttgagatcaatgtttctgggttgtttgtcttaagcttagttttttttgcttgtcgatttatattcattaaagtttttttttttttaatttcatttccc

SEQ ID NO: 357779 - DNA, 847 bp, Cannabis indica
cactaactcagaaataaaatcaggataaatcaacaataactcatatggacatctaaaaagaaaggaaattttaattcaaaatcaaaaaactcaccacgcaatcaaggattcggtccaaaccaaaagaggatttgatatatccttcttcttgactcacatctgaatatcaccgccatcttcatcagcggcctaaatacataaacagattaaaaactcaaaatacataaatgaaaaacatagagcaattaaaaaagagaaaaggaaatcaatataagagatgaaaccaaaataatcaaaaccaaacaaagtaagaagactttgcaaaatagaaattgggtgagaaaaatcaaaactagaatctagtttcgttttctttttggtctctactggaccctatcgattttgccagaacttattgtacattttgatttctcattaagtaaaaatttacttgatttaagttggtctaaattaaaattaattaattttcaactttaatctttttaaaaaaaaaaattaaaatatttgcattaaataatgcatttcaaaatttattgtgaaaaatgattaataaaataaaataaaatatattaaaaactattctaatttaggttgatctgaaattaaaattgccaacttaaatataattttctatctaattaaatttcttgaaaaaatctaatatttaagtgtcttgaataaaatcaacttaaatattcattattatttaaataaatgttaaaattagaaacaaataattaagtgtcttgaataaaatcaacttaattgttaattctaatttaagttgatctaaaattaataaaaaaaataattttcaacttaaata

SEQ ID NO: 357780 - DNA, 904 bp, Cannabis indica
aagataaatatgaaattttaatcgtatagagttttattttaataaaatatagtattttaaaataatttaaattcaaataatttagataaatataatataatgatattttgttatattactataatttgtatatctatcgtgtatgattttgataaacgcaaaccctagattttggggatttctaatttgtggtcaagggttttaatattcgaattctaatttgttataggtttgatctaaccgtttcatgtaagtatggattttctgaattattattatttaaatttaatgtctgcaattactttattacaccatctttttttacttgtgtagattggattcttacaattgaaacatatattttctgcattagcataatgacacatggtaagatgtcatacacaaaatacctaaaacttaaaaatgtgttttgtttaagagaaactaatacatatgaaattaatgttcataatttaattttacaagatcgtgacagagaaccttcaaagaggattccatataaagattttccaatcgaaaaaaagaaagaaatatgtaaaaaacaaagagagagatatgctaaacaaaaagcattgaagatcaatccgattagtgtaagtagtaatcccagtcatattgatcttcacacatatattgtcgagaatacggcaacgtcaagtcaacaacatccaaattttctttctgactatgcaagtattgttgaagaagatattcttcaacaatcatcaaaaagactgcgaaatgatactactcacaccaccataaatgaagatgaatcttcttgtggagataatgtttctaccaatgtcgattgtgaaactaattcatttgtaaattcatcatcttcgggcaatgtcaatttcaatcaggtttgcatttgacc

SEQ ID NO: 357781 - DNA, 898 bp, Cannabis indica
tgcattctgatttaagcactcacataaatcgggttgtctccgaatcaaatgttcatgaagatttggttgtcttcgttcatagttactcacgaaccttgtatctgagtaactctcagattgatagctcctcatatttctcactctttttatcagcataacgacgaggtatatctcttccttgcgtatgcctttccgatcaattatgccctcgagacctttaatgtcccgagctagaacttgccttgtcctgcacaggccttctccttcagaaaaggttgaatacatgccctctgttgaggtatgtgtatgcctcctccctatcattttgagaaggacgctgggggtgtctcagtggtaacccacttgttctaagttgtgtcccaagatttctcgcattattatgagggatctcctattccctagttctggattgcctatgttctcgtttctacgagaagactctgggatgtcattgttttcattctcctgattcgtaaaaccctggggtctttgaggtacttctcgacgaggtgcttgattattctgttgttcgtctactggaacatccctagtttccccaggttgctcctcctgggtgatctggggattttcttgatttgtctcctgcctcgtggccttcttactccaggatcaggttggctttgtgcattgtttccttgagtcgccctggctgcggctacctctctttccaactcagcatttcggttgttagattcggccaggcattgccggagttgtcaattttttagttctactaatggtacatccctagtgggatcataggcatcctcacttctgggtacataaccagtattagtattggtttcctcattccttctttctgggttttgataatgaccaccttggcttcttcttg

SEQ ID NO: 357782 - DNA, 782 bp, Cannabis indica
tagattttaccttatgcaaagaaatttgaaatatttgaaaaatttcatgaatttctagcaacggtggaaaaccattaaggtaagtgattaaagatcttgcgaactgataggggtgaagaaatatttggtagatatgcagttcaaagatcattaagtttatttttgaattatatccaaacttacctccttagaaattcaatttgcatattgatgaaaatacatggtctatgattagttactaccaattgcctaagtccttctagggatataccctagtgataggaaaatttcagaatcatgaaatggttgtgtacttagtgtaaactattactagattcatggatgtcctaatcgtaatcttaagaaaagctagaactgttaactaaggtttgcatgtttgatagctattctaagtgattaggggtgcaccatcccatagtcaatagataagaaagtgtttgtttcaacaaatactacttttcttagaaaatgactaagtctggaaacaaacactaatacaaaacaaggctttagattcccttttttgaacccattttataaaaagggaagctaaagggtctgaaaacacctgcctattgaaaatttacctttagaggcagttttttttataaaaactgtaggtataaaattggattgtaccatttagaggcgacttgaaatcaaacgacatagggtttgataggtaaacccatagtcgtcggttggtatataataaccgacgacatagggtacacctgaaatttgacacgtgtaccctatgc

SEQ ID NO: 357783 - DNA, 499 bp, Cannabis indica
aaaaataaaaataaaaattattttttaaattaaaaaaattacaaaattaaaatatcacataaacttccaactcctccaaaacatggcgaggctgaggacggccatggattcggcgttctgggatttggacgtggctatgcttgagtccttgaaggctccgctaaggctgtaccaagtgagccattccccatggacgctacttgagcaagtcaaattattagaatacagcaagtctccttcttgggaaatgggtttgttcttggcattatcccttcttactttcttactctatccaaggattctggttctttgagttttcaattcctctttctaaaacctgccacctccaactggtaagtaataagcccacatacacatactacacttttgtttctctttcgttttctctagctttgtttgctttctcactatcaacagtcctatttcactttttctcaaaaaaaaaaaaaaacaagtcctatttcaccacatctcatcc

SEQ ID NO: 357784 - DNA, 351 bp, Cannabis indica
acctaaacctagtagttgcctataaatagaaagtgatggctcaatctaaatcataactttgaataaccttttctgtcagaaaattttatcttcagaaaaactaagccttccctttctcttctttggccgaaatcactctctcgcttttctttctcataaattttgaaccttagtgatagagtaagtgcccacacacagcaagtggtaactcaattatagattggaagactgtgaaggatatcacacaaagagaaggatattcgggctcagatcttgataatactctgcgacgggttacagatctgagtgaaaggagaaattaattccgtagcatcaatgtaaggttttctt

SEQ ID NO: 357785 - DNA, 925 bp, Cannabis indica
aattaagttgctaaccatcccattatggttatgagtaacattaggcacatagtaatgattgtgtattatggaattaaacctatgattgtattagtccattataatagttctaacattctcccacttggacaatacaatcacgccaccataataatgtctatcacacataaggtaaccaattaagacgtatataataccatatcgacaggatacatgtattatgtatgaattggttaccatattgacacgtcttaattggttaccttatgtgtgacaggatactgccttgctaaggaagatgaggacttaataagggaaaagcaagaagcatctccatggtaacgaacccaagaaattctcagaagagagagtctacttccaacaactctagtgaccaaaagtccacttagagaagaaaggcagtgataaatcgaagaaggccgaatagttcggaagggtacgtatatatggaagacgatactaaagtcagaatagagttttgggattgtttgactacagttaaatacaggatattttcttggaaattttgcaagttgttgcttacttgccctctattaggaggaacttgatttctgtatctattttggatagactaggttatagctttcttttggaatcgaaaatctgattttgtatcgtgactctatgagggttggtaatggaagttcatgtggaactttatatatataagcttgatttatataatgctgtttctgctacttctccctcttgcctttcttcttcttctcttaatgttgttgttggttccaaacgtgcaagattagaattgaaatcatccatgctttggcataaacgtttgggccatgtttctagagatagaatggagagattggtgaaatggtgtatttcaagatctcgatttctctgaattcactgcctgtgt

SEQ ID NO: 357786 - DNA, 684 bp, Cannabis indica
agttcgatcaagcacatatcctttaaattccaaacaccaaatggcgtgggagtggtgcgtggcgaccagatgctggctcgcaattgctatcgcataaagctgcagcatagaaaagccggtcatcagttgatggcgatcttggtagaagaaactgaatagaaagatgaagatcttgaccccccgagttcaagacgagagaaacctgttaaaactaattgaagaattggaagaggtcattctcgacccaggaaatcccacaaagtgtgtatacattgggaagaacctggacgagcagctcaaatagcagctaatcagctttttgaaggtgaaccctgatcagtttgcctggagccatggacatatgatagggatcgaccctaatattatcttctatcatttaaatgttgatccaagtgtttggttttgtgccctaaataaaacccattacaatctaatctgattagttatcaatttaagagatttgaagtgatttatgttaacatgtatttttcatgcttatggtttaatgtatgcacaaaattagttaagtccagaacatatatttattcacaattacagtaatgtcaacacagtggaatgtgattgtgattatatgattcaaaagactaagtcctgtttcataagtgttttggatttcactgatgtgataatcagcgatgaagt

SEQ ID NO: 357787 - DNA, 668 bp, Cannabis indica
aatcatataaataatatatatgttatctcataaagtaaccatcttcataacatcacgttgcctaatcaagcaagtcgatgctttaacctgataatcatgtattgcatcgcctaatcaggaaagcccatgccatagcctgacacccatatgtcgcataactgcatcacctaatcaggtgagcctgtgccaaaaacctgcacccatatatcatataattacatcacctaattaggtgagcccgtgccacaatctggcaccaatatatcgcatcgtttaattatacgaactcgtaccaatgcctggtacttatcatatgtcactgacgcccatacttacgcccagtacgtcgctagaaaagttgcatcacataattaggtgagcttgtacctacgctcgttactcatcatatatcactgacacccatacttacgcccagtacgtcgccagaaaaattacatcacctaatcaggtgagttcatatatcacatggataataacatcacattatcaatattcaaccaatcagtattttcaatatataacaatattaactgtaaacttaaataagaactagttaagctaaaataatagttccaaaatgtttagcatttaaaaacattaaaagcaaaatactgcgacagccccctaacatgcggtccacgcctcga

SEQ ID NO: 357788 - DNA, 512 bp, Cannabis indica
tgaaaatttgattggaggacccaagaagagagggagtaaacctcagaattctggaaatggtaataggacgaataatcctgaggcacacgttgcctctccaaatccaagaataagaagaagtgaaaaatgccaagaagcgagctcaagctgtgaaagcagctaagaacaaaaaggctgcagcttctggtgatacaccaaaaggaaaatgtttctactgcaatgagaaaggccattggaaaccccaatgtcctaagcttcttgcaaagaaacaaggtatttctttctataaactgatgtgttttagtgaattattatccatttggattattaattctggactactaaccttgtttatttttcttcttatagctcaagcttcttaaactcggatgctgtcttagcgagttggatctgaaagctggataatgggatggagttcgtcaagataaagaagaagctcatttatttacttttgaattaattgttttaaattttaaaacaatttggatttc

SEQ ID NO: 357789 - DNA, 953 bp, Cannabis indica
attgtgtttatcgacgacatcctcgtgtactctcaatcagaagaggagcatgagttacatcttcagatggtactgcaactacttcgagaacataagttatatgccaaattcaaaaagtgtaaattttggctatctcaagtgtcctttcttgggcacattgttagcaaatacgggatcaaggtggatctgggaaagatagaattcgttagggattggccaagactgaaaacagtcacagaagttagaaagtttcttgggtctggccagttattatcattggtttgtagaagggttctctaaaatttcaacacccttaaccgagctcactaaaaagaatcagcattttgtgtggacggataagtgtgaagcaagttttcaggagctgaaatagagattaatcacagctccagtgttagccctaccttctgataaagagaactttgtggtgtattgtgatgcatccagatagggtctggggtgtgtactgatgcgggccgatcttgttatttcctatgccttccatcagttgaaagattatgagcaataatacctgactcatgaccttgaacttgctgcagcagtatttgctttgaagatttggcggcattacctctgcggagagaggtgtaaaatttatactgaccataaaagtcttaaatatttctttactcagaaagacttgaatatgagacagaggtgttggttagagttggttaaggattatgattgtgacatccttcacctcagttagtagaagacatggtcagatctagcatcgagtttgttgtgggcaaacttcacaacctgacgttgcaatctgatctgttagaacgaatgaaagctgcttagttaactgatccagagttagtgaaaattagagaaggggtttcaactagtcaagtcagagattttacagtgtcagatagtgggatgttgtgttgggttttatgccc

SEQ ID NO: 357790 - DNA, 858 bp, Cannabis indica
tttcctctctcgttacaatgcgcataaacagaaagatcgtgtgatcaacgctgaatacaaggatcatgggattgaggctgagtacactgatagtgggatcatgtgtatgccatatccacgtaagttgatccctgagttatagaaattgagctgatgactcatgatgcgaaagctgaattcgctaagtgttgagtgctctgcacggatcgctgaataccttattctggatgtgctagcaaggcatcctgctcgatctatcttcccaagcagatgctccaagtggactccacgtgtcaccattctcgtgatgccacgtcagagtgcaaaatttgggataccatttgcccccaagtctgtacgggacctctgaggttgcgtgtagatttcttccaagctggctctacctttggatggggacacgtgtcgagcatgaccgttcgagactcgatgtgaagccaactgggcgtcccctcggttttcggctaataaattctctgacaattaatatttcgaaatccaattttctctctccacggctgacagttgcaattgattacttttgatttcccatattcgttttctaggcgggaagctaaggcgtctaaggttccttttgatgcagttacctctttgcctataaatacccatagtactagcacataacccattttataaaccttcgttgctaagtaaactctagagcaaaagggagttttccagcttcaaagttgccgaagtgccttcatacgaccgctggtttgcttgacgttgcttaaacccagacattggaacctttgagtaagtttctgatttcctttatgcttttctttgcatgtgtacactttgaatgcaactatg

SEQ ID NO: 357791 - DNA, 755 bp, Cannabis indica
atcctgcatagcagaatttacatgttcctagtgttgtgacgatagaggattctcttccttaccatttaccccctgctcagacaactcgctaaatagactattcgattgctcttactacataacttatcacacatttagtccacatcttccaagcatttagaacttagacagacatcgatatcaatatgcatatactatacacatattcttaccataatcaatactatattaattttcccaacatactttataatagtataggcaggtaatccaatagcaaataatataaatacttactataccatgagtcgacctttcttcacaacaaatgtacatatttgaccaatcttcaggacctttaaaaccatgactgctttgataccaagttgtaacaccctaatctataaggacgccaggtgtgattctataaactagtttaatactaataggttaattaattattaaaaacagtgatgatatcagaagcttgactaaaatataaaataccaaaaacgagcatcataatggcattaaaaacatgttatgaggattcttgttataaaagattatatatgacaacaattcaaaaaataaaaactaaaatgcacaacccaaaaaccttcctaggaactcagcacgcaggccggtagggtcaatatgtacattactagagaagattgcaacctcatgattgatctagattttctttgtctttacctgcaccacatagcacatgtgagtcataaggactcaac

SEQ ID NO: 357792 - DNA, 694 bp, Cannabis indica
aaaaaaaagagataaagaataatagttcatgtggtatttttacttattatgtatatgcaaagcaaacacattttagtgtaattatttaatttaaactaaattatattatttcaatagaaaaatatacggaacttctctagtagaggaggataacatgaaaaagtattcaataaacctatatatattatgtaattgcaatataaaaaatttgtacatagatcaaatatctaaaattaatgaacaaaactcatccatttacacaaatcatatataataatataaactcattttaattttaacatttactattattatcttcatagtcgttagctcatctctctaattagttaagaggggctccatcaaagacatgctaactaccaaaaaaaaaaaaatgattcctatctctacattttttttttgtgagaaattagctagatggacatatgtatatataggaaaaaattaatatgtataggaagaagttaaatagttaaagtaaatttaaaagtctcaaataaactctaaattaaatctacaactatataggaatacaaataatatgaatagggtatatttatatatatttattggtatatgttaagaatgtgagtagtcttagatatagaatgataatgaagagcctcaaataatatctaatgacatgacttttaattttttttatgatagttaa

SEQ ID NO: 357793 - DNA, 996 bp, Cannabis indica
gacttttatcagaagtacatgaccaattttgtggaaaccaagtagccgggcagagtttatccaagaaaattctaaggcaaggttatttctggccaacaatgattgaagactccaaggcctacgttaagaaatgtgataatgccagagattttcaaagatacctcaggcaccgcccaacgaactatttaagatgcaaagtccttggcctttcgccattttgggaatcgacctgatcggacagatacccaaaggcaaaggcggtgtgcaatacgcggtggttgcagttgattattttacaaagtggacggaacctgagccactgacaaccatcatgtcgaaaaaagtgcaagacttcattgtaaagaacataatttttcagttcggattaagttacaagatagtctcaaacaatggtaaacaatttgacagtcagtccttcactgatttctgtgtgaaccatggaatcataacaagtttctcagcggtggcacatccccaagcaaatggtcaagttgaagcagtcaacaagacactcaaagacaccctaaagaataaacttgaagatgctaaaggaaactgcccggaagaacttcctgaagctctatggtcatactgcataaccaagaaaacagcaaccggacagactccatttgccatgacatatggatatgaagctatgctgcccgttgaactcgaactgccatcccatagaagattaacatatagccaagaggccaatcatgtactcctcacagagtcacttgatgaagttgaggaaaaacaaactgtagcaaacttaaaactgatagcccatcagcaaaaagtagctcgttattttaacaaacaagtgaaagcacaaaatttttttgtgggagatatggtcctaagaagagtatttttgaacaccaaagacagtacaataggtgtgctcggaccaaactgggaaggaccatatcaagtggttgatgttctagaatcaggggcatacaaattggg

SEQ ID NO: 357794 - DNA, 1031 bp, Cannabis indica
aataacatattctaagcaagcaactatttccacatcaagttaactaacgataataataaaataaatatatacatataatatagtagaaaataataacaaaatatttttggttattacacaaggtcttaattgtgaagaaaagaagtttttgggttaatttattaattaagagactttgtatggtctaattaataaataatataaatggaaatttgttaattaattataattattaaataaataattttgatatttataagattgaaattggaaatatggtattattaaaagaaaaataaatagttaaaataaagtggcaaaattgtaactagtaaaaggcactttagtagttggccactatgttgatttttgctcaatatattattcttttttaatctatataattcaaacttaagcgctagttgaaacactacaaaaggaacatgatgctttcatctcatccagtattttcagcctgccaaatctagtttctaactttttcagatgactagtaaatgagagacaccttctatacagtttttgaacactccttcattgttcttcataatcaacccatagtaatagagtgcgatacccacacataacaagtcaagtactcaatcatagtgcgaaagacggtggtaatcaaacctaaaaaagagaaagagatccaggctcagattttaataatactctgcgatagaaatgaacaagggttagatttctaagtggaaggagtcataattattccgctgcaatcaatgtaaggttttctaaactcttatgtgtttaatttcatcgtataagagatattcatatttaagatgctaattaattgtagtaaatctagatcctggtaaaataatcccaacaatgtcatcaacatagacataagcaaggcttatgatacaattagttggaacttccttgaagacctactatgtgcctacaacctgcccaatcaatttgttcataggagtatggaatgtgttagatctgttgagttttgtgccctaaataaaacccattac

SEQ ID NO: 357795 - DNA, 469 bp, Cannabis indica
ttctctttcttgctgaaattggttggcataactctcgaggccaacctcgccaaacaatcaaattgagtcgtgtattcagtaacactcatgctttctttttgagtcagttgggtgaattcttttcttttagcacttcttactgctttgttataatacttagcattaaatagttcctgaaacttttcccaggtcatagttgtcacatcgtgaatcatggacaccatgtcccaccaggccagagcgtcttcttgaaattgaaaagtggcacaggccaccctatcattaccggtgatgcccataaaattcaagattcactgttagccattgcttggctttcatgacatcgggatctcccaagaaaactggaggtgtttacttatagaacctttcataccggggtttcatccggttcactgtaaccacaggttcggcctgcacagtaggggcaggtgccactggtatttctaga

SEQ ID NO: 357796 - DNA, 722 bp, Cannabis indica
ttaatcatagttcaattgttaattgattaaataaataatttataacaggtaaattttgtaatttctttcatctgtgataaacctagtaacatgatagggtccatccaaatcagtttgtatgtttgagcctatatgtttgtaattggacttagatgcatgtaagaagcctatttattttttgatatataaatagattacgttgccaagaataaaatatcacattgatatttttattttaggcccaattagtattgagcttattcaattaataataattatttaatgaaaggttaaattcctctcttttgggccttgtgtgagagtttgggagccaatagtggatacgacatactgaatccaaccccgcctcacatgaactaccccaactgtgaaagctcatttgcctcatttaaataattatattatgctaattttattagtttaacttaatgaaaattgatttacaacataattaattttgaaataaataaaattattttttcattggattattttaaaattaatttagaaaaatacatttagtttaaagaaaagattctagatagtaatttctagtaactaatttatattttctaatatctaattaagtagaaaaatatgtttaagttaaaaaataattctaaataattttataccaacttaaattagaatatttttctcataatttaaattagaaattaataattaagttgattttattc

SEQ ID NO: 357797 - DNA, 533 bp, Cannabis indica
aaaatatatttaagttaaaattaatttattaattaatttacaccaactaaattagaattatttttcttagaacttaaattataattaataattaagttgattttattcaagatacttaattatttgtttcaattttaataaatttaattaaattaaaaaattatttttaagttgaaaactttaatttcaaatcaacctaaattagaataattattagaatatattttattttattttaataaatttaattgaaaatttgaaatacatttattttaaatgtggatttttcaaaatttttaattttaaaaattagatcaaagttaaaaattaatttattaattaattttagatcaacttaaatcaagtaaatttttataaatgatttgtttaaataaatagattaaaatatattatattttaattagaaaatcaataatagtttataaaatatctagatagttattttctaagtagacttttggtatatttctagatgtagttaattaaatagaaaattaatatttaacttgatt

SEQ ID NO: 357798 - DNA, 915 bp, Cannabis indica
ctctttttgatcttaagatttagttgattgtctttcaatgttcctttcctgaattaatatgatacctactcataactcccactcaacagtaggtgtctggtctaatgcattgcaaagtatacatgagacctctcattgttgattcttaaggaattcctttcatgacttttatcttttctgtaatagttgaaactgtttcttagataaataaaattctatgtgtaggagtcaaaagacttcctatagaattagccattaaaaaaaggctctagcatcttactaaagtaagttgcttgcactagagtaagtaaattactaggcataccacaagccacggtttagataatctcaaacctataatactaggatcgggaagtttgttaagtccattgaatagacttattatcgaaattttctttcttgtccttgtactagaaaacttttggtttctccatatgaatgtttttaaccatagttatctttactttgcttcttagttccttattctgactatccattacttgttaaaactaataatggattttgatcacatgtgtctccctagtcataacagggtgggttccttaaaaccctcccactacgacaaggtatcgtgactttctatctaggaacattagtggtattgtcctcatcgattgtgtcaagacaacagaggcagtgggaccatcttatatataataagaagatagaacactttggaattgaaaatatctcctttactttgctattttgttttcagatttagtcacattcttagaaaagtagtatttgttgaaacaaatactttcttatcttaataaccataggatggtccaaccctaatcacttagaatagctattaaacatgcaaaccttagttaacagttctagcttttcttaagttcatgatcagaa

SEQ ID NO: 357799 - DNA, 667 bp, Cannabis indica
ttgttgaccgagagctgacctgttaccactgaagggatggcttctgcatcagcttgagttatcgcgaacacccgagctggagtgggtttcgctgcagtcttcggtgttttggtcctgagctggggacaatcccttttgtaatgccctggcatgccacactgaaagcacccctgccctttacactcccccagatggtgcttttacaactggggcactctgggtaagtgtatcgggtttcagtgccactctgacgattgcctcaactctggttccctcggaacctcttgttctgacccgagccactggtagcagtagatgcctttcttttctgatcaatggccgagccactacatccgctgctaaagcctaatgcaggaggggtaggagccccgccaacaattggagtcccacgagactctactatgcatccactgcgccctcagctggtagtgccttatctaccatttcagcataggtggtactgtcgtcagtagtgatcatcaaatcatgtctgatcttcgcattcaacccatccagatacttctctttcttgctgaaattggttggcacaattcccgaggccaacctcaccaaacagtcaaattgcgttgtgtattcagtaatattggaaattattttaccaagatcttagatctactcacaagta

SEQ ID NO: 357800 - DNA, 478 bp, Cannabis indica
aaaatttaagaaatcaaggaagtatgacagtaactcacagtacgctaggagatcaggcaagatcttcttttgattcgtcattgtattcttcatggaattgaatacgaagatcttcctccttaaaatgttgaagtgaagaaatatccaatggcgttgaacactgacatgacacggatcgacaacatcgtcaacaccgatccaaggctggaagcaaaagttatattgccctagaatgtaatcggtgaccatgttgtcgtacctgatgacactcggatcatgtttcacctttataaaatcagcatacactcccttaatagttgcatcaaaatacgagcatgtcgtcgtcactctcttattaacactgacatcataaatgatgctcttcctaagatagtaaaaggccacattcagatgctgcacaaaataaacaaaaacaataaccagttaaaaattgaaaaaagcaaagatattaataaaa

SEQ ID NO: 357801 - DNA, 372 bp, Cannabis indica
ggtctccaattttggagagcactgccattctctatggcacaggtcacttaaggcgactcctaggcttaaaataactttctcacttgtttcttactcattgatgtcgtgggaacccactcagacaatttcgtcccatagtttgcgaggagtgacctgtgtcattctcttatggcacaggtcacctaaggtgactcctaggccagaaatgacttttctcacttgtttcttactccttgatgacgtgggaacccactcggacaattttcctcccatagtttgtgaggagtgacatgtgccattctcttatggcacaggtcacctaaggcgactcctaggctggaaatgacttttctcacttgtcctttattccat

SEQ ID NO: 357802 - DNA, 749 bp, Cannabis indica
aaaagtgaataaaataataaccagttatattcagcaattcaatcttaaattaagttgcatacacaattactcaatattatacacaattgtggtacttttatgaagcaccccttttaccactcattaatcacaagctgaatatgtcactatcgttgcccgataaagcaaacgacaagtaagaaatctaaccgcagtttgaagagtaattactcgtgacggtattaaccgtttccaaccctaggtcgtaacctaggctcaacaaatatctaatcaaagtcttgataataatcaaggccataacaattcaaccattaatatttagccacatacggtgcttaccacttttcttaccttagttcagaactcaagcgtacgggctgacctgagtggaaaacaagctagggaatcccgatcctatgtaacgacatcaaaaactcactaaaaaccttaatcaaatttctgataatagactttaattctcataatcggacacaccctactttcccccggataaaactagcttgaacatctctaaaacaccctgaatttcactctggaagataccccgaatcagatcgaacttgaggagaaaaacccaaaatcccctctgctggccaaactggtcgtccggtttgccaggtgcctgaaaaaccggttcaccgcttttccctgggtagccaaggaaatttctagtttttcaccctaaaaactgattcaacctccaccaaacttgctcaaaccttccaaaa

SEQ ID NO: 357803 - DNA, 1320 bp, Cannabis indica
aattatatattcagagatactgttgtaagagctataagaaatggaatctttctccttgatcttaagtcaatacaagtaacaaggattaggctattaccgaactgctcggggctgaacctctataaaattcctgtgtctttatattgctttcacatatatttgtattataaataacttatcgcttataaaatggactcgttgtcgttggctaaaagcgaggtcaacattttggtgctttcattgagagaaggatcacgaatcgctctttattcaacatccaatcgcaaatacgatggtgcaaactcgtagaggcccaaatgatccagctaattcacagacactggatcccgcatcgtagaacccaagaaacacaagagttccgccagctgttaatcttggacagcaggcgaacgtggggaatggtgtgacagttcctatagatgaaatcgcgcctggtgtgcaagagactgggaataacaattctgcaaccaatcagggcattcataacacaactgtttctcctggaacaaatgcccagacgaccatcagagatgccactgaattgcaaaatcttcttgactctctcggactcatgtagggtcctaacaataccctacatcatgatcaggacgaactgcgcgttgcagtaaatctcacgttcgacgaagaaaggcgtatgttcaccgaatggagagatagagagagatgtaggcattaagggctcaccatgcagagattgaaaatcgtagtcggcaggctaccgtgctgatacaaaaaggctacaaaactgtaggtcagcagtcgccgaacatcattcccctgggtgaaacagacgaagatccagcgatgaatgcttctcagaccgtaaatggtcaaccgcccaatccctggtcacgagttgcactcgtgggccaagcggtaggcaggcagaccttgtctagtaattcatcgagagaagtaatacctgatggttccaaccagataaatggtgccattccacccgtcaacctagtgaatcaatcgctgaggcagccaagcacttctgtgttcgaaaggttgggcacaacccatgacctaaggaatgatctaaatagaagagggggagtatacgatcagaatgttacgacaatctcgcagcccaaaattcgtactcaaattcccgctcaaaaagatgctgttgtaattcaaattgaccaaaatgccgagcaggccagcccagccgtacaggctcagctagacgaactgaaaaatatgtttcacggcatggctggacaaagaaacaatgatcttaagctataccgagcacgcgaaactcctttc

SEQ ID NO: 357804 - DNA, 576 bp, Cannabis indica
tacgaagggtggtgctttaaatcactatcttagactcagatttccaagcttgtcttgaggacaagaagtctacatctgggatgctctttactcttgggggtggagcaattgtttgggaaagtgttaaacaaatcgcaacgtcagactctaccattaaggcttagtacatagttgttgctgaagctgctaaggaacttgtctgtcttagaaagttcttctaaggacttggtgtttttcctagaatgaaaaaactactggttttactttgtgataatactggagctatagccaacagtaaagagcctcgaagccacaagagaaacaaacacatagaggaaatatcatattaatagggaatatgtggtaagaggggatgtactggtggagaaactagatatagaagacaacttagctgatccattcaccaaagttttgactgtaactacatttgaaaagcacggactgaatttaggattaattgaaatgtactgatagttttatgttagtgcaagtggaagtttgttgggttttgtgccctaaataaaactctattttaatgtaatcttttctattcaa

SEQ ID NO: 357805 - DNA, 245 bp, Cannabis indica
gtaagcttgggttggatgtatggtgtatgcatcggaagggatcgatattgaacttgaatcagatatgataaacttaccgtaatatctattcaattcaatatcacctagttgatcttagatcaaatgttctcaatcctaagattgttaggttctagttcatttgcattatttgtgttctaaaatttgttcattatagtcgaccaaatggttcttctcgtgacatataggctaaggacatggtagtt

SEQ ID NO: 357806 - DNA, 549 bp, Cannabis indica
gaacctgaagtactggcatctggagcaccagtgttaggaaccgggaccgaaggcttaggcctggaaggcctccgatccgtgcccgcttccaggcgaagggtcctcccagctgcagcctgggccttgatataagctagctcctgctccccctaaagatgtatttctggtaccggtcctccgtcgaggtgattatatccacccggagagccctttccgtagcatgagtcctgacgtttgggcagatgaccttggaaaggttaaagtcatcgaccgactgattctcggatatcagcttggccttctgacaattgtccgtcgtgaccaagtccccaacgttgagggcctttttgtcgtaagtagagaaagtcttggcccgcttgaggaacaattgagtaggtgcggtcctcaggtagggaaggatcttgaccactctgtaagaagctgcgggaagtccatggcttggaagctggaggaaaagaagaagcggtggcggtactccttgatatgtttttaaaaaatataagggactgggccctcattcaaaggatg

SEQ ID NO: 357807 - DNA, 725 bp, Cannabis indica
aagtgttgctcattctgcacggctcgttgagtattccattatggacatgcgagcgaggcatcctgctcggcatgttgatccgaacagatgctctttatagagtccacgtgtcaccattctcgtgatgccacgtcagagtgccaaatttgggataacagataacaacacgcataagtgactcgctaaatcacaaccaggacttaggttttaaatcaaaaacctatctactgtaacttaatatggaaataccctaaactagtagggaatcaaccaactagaaacctgaaactgacgcgaaatgacaagttgaatttttggatttccctgctgcaaaattcgggtaaccgtggttagcgggttttacccaggaaaaccaaaaagctccaaaccctaaccaaatcgtttccaaacccaaccaaactttccagacctgcatattataccccaataaaccatttccaagcaacaaaagaaaaatcaaagctcagaattgaattttaccattaaagcttcaagtttgagttcataaactcaaaacttaaaagcaaccactaacaaccctaaattcatgctctaaacaacatttctaaacatatttaaactccagaaaactaacccaaacagtaacagaacacaaaactctaatgcatgcaaaataccattttcttaacattcaagaacacaaaaaataggagttaaagggattataccttggcttgagacta

SEQ ID NO: 357808 - DNA, 863 bp, Cannabis indica
catagtgtgtaagactgtgaagaacccaaacaacaagaaggagaatcagcatcaaagggaggagagaaagagatccaagtttagatcttggtgatgctctagattctggtaaaatatttccaacatctcttgtggtgcgccaccaaagccaaagctgaacggcttatgatagaagtgcatgaaggcttctgcggaaaccatgccaggggcaaacttatccaaaaagatactctgacaagggtacttttggccaacgatgatcgaagactcaatggactatgtcaggaaatgtgaaaagtgccagagctttttgaagataccaagagctttaccaaatgagctcacgatgatgcaatctccttggcccttcatagtgtgggggatggacctgattggtcagctcccaaagggaaaaggaggggtacagtttgctgtcatcgcagtaagctacttcaccaaatggacagaagctaaaccctggcgacaatcacctccaagaaggtccttgactttgttatcaagaacatcagatgctggttcagccttccccaaaagattatgtcgtacaacaacaaatagtttcatagtgacatgttcactaatttctacaacaagcatggcatcatcaaaagcttctctgttgtggcccatcctcaggcaaatgggaaagtagaagcttgttggaaaggtgttaccaggatctagatttactaacaattatgttttattaacatcctaatatgaattctaaaacaatgaaatgaacacatataaagtttaggaaaccttacattgggtgcagtggaatataatgtctccttccgttcagatctctagctattgattcgtttctttagcagagc

SEQ ID NO: 357809 - DNA, 586 bp, Cannabis indica
gacagagttagaatggaaattcattcgagatgatgatgatgttgaagatgggttttaaggctgaatgggttcatattattatgaagtgcgtttcatctgtatgctactccttccaaattaacggtatcatttatggaaaagtcattccaaatagagggttaagacaaggtgacccattatctccttatcttttcctcatttgtgcagaaggtctctcggcattaattaagcaggcagaaaacaagaaagaaataattggtctaaaagtggcaagagaagctccatctattagtcatctattcttcgctgacgatagtttactcttcttggcggctaatgagggttcattgcattcaatccaacaaatttttgcagtttattcaaggtgctcaggacaggtaaaaagttggtagtatgggtatttggaattttagttcattattatttcaattaccaaactttaattgctctaaaagtaggacaagtaactttatgatctaatttttctctttctaaattataggtaataaatttcaataaatctattctctattttttgtcaaatacaaaggaagaaatgaggaaa

SEQ ID NO: 357810 - DNA, 602 bp, Cannabis indica
aagcctcgtaatttgattgcgtctccgcgtcacggggcggcccgtggtacgtcccggaagtcgcaggcttgatgccggccaccaccacaatgtgctccagctggtgagggcaagttaaggtagagtgaagctcggtcgcttcccatcccgtggcatgaggcctatacccctcctgggcgacgggacccaccatcacctcttccagggtggccaggcgttttcctcctttcttggaagatttggaaccagatgtagacattgtggttctgaaaaagagttaaaattctagcagtgaagccccataccaaaccctaaatcaaaaaagggaatgggggtcccctaacagctggaaagaggccccctccagacggttgtcaacaagaaagccttagaatgttttcctggaaaaaagtcgggtgcaagaatcttacagatagtgacattacacataaataaagaaaggaaaagaaagagaaaaggtaagaatcgagaaagacaaagtcttctctgtacccttgaaggtcaacccataaagaacagatgggcctttggaaaaatataatgtgcaaaataagagtgattcaaacaccagaaaagagaaa

SEQ ID NO: 357811 - DNA, 588 bp, Cannabis indica
tgtttaaacaacatacttgtgagtagctctaagatcctggtaaaataaatattccaacataacttagagtcatttttagtgtagaaaaactgtagcaaaaatttctcttcacttttcttctcatcttttctccttagaaattttataaatatttagtttcacaactatatatatatatttttaaaaaaattgttccctttaatttttatttcgttctcactttgacttctgtttagcgtgatagtttttattatgttttaattctatttcttcattgagttttatttgtctttttcttagtactcttataatttaagtcctttaaaaaatcataaaatacaaaaaaaaaaaagattctaacattttaatcataaaacgcttagtatttgtacaacggtgtaatattgtatatgacacaaactaagattgttctatctataaggtttaaataaagtttatgttagtgtaccctccactttacctggaaacctctattctgtctaggcaaggttgagataaagcgataccttaacaacctttctaattggccttggaacatttgttgtgttaatcattgtaatattacat

SEQ ID NO: 357812 - DNA, 616 bp, Cannabis indica
tatctcagccataaccttcccttttccagcataaggatgggatggccgaacaggtgagacaggctcccttatgcgaatggcatgttcaacgggcctgggtgtggccgggaatttcttcttcctcctcaaaggagtcacctgctcagcctcagcctcagcctcaacttcatcttcaggattcataggctcctgagcatactgctttgcccgagcacctcccttcaacttagccgctcgcttaagttgaatgagcttgttcagaccgagcaacaaaagatttccctttcttccccatcacggacttagaagaaaagtcctctgggtaaagcctgtactgcactagatttgcatcggaggtcaactggatgatatccctgtcttccgccgacaaccgggcaagcttctgagccctatccctaagagtaaggatgaggggaggacggtgatatgtcggaatctgctcaaaccgagtccgggtgatgttcggatcctttaccatgaagtactcatcaacaaaataccctattttgttgatggccttgtggtttgtcccgctcaaccacttgaagcctggctgagagaagtaaaaataacccaacctgccttgcttgggggt

SEQ ID NO: 357813 - DNA, 518 bp, Cannabis indica
aaggaacaattctaaagcataaaaaccaagcttcatgcaaccaaaccaaaaccaccattaaagcatcaagctttgagttctaaactcaaacttgatcaaaccccactaacatgcattcaattcagcccaaatcaacttaatcatgcataaaataacttatgaaaatagcagcaaacatctacagcttgcaattaacagattcaacacatttctttgaaaatcatatttttgagctcaaaactatcaatcttgaatcaaagaaaatatcatgcattaaactagctctaatctacttaaaataacatgattgattctctgagaatagcaacaaatcacagcagcaagaacataacaaaatcaagcatgcatcatcataaaattcttccgaaatttccaaggaacaagaaaaggagctagagcaaggtttacctctactagaattactttgatcttgctgaaaacaacttgaatcaaacaaaaaaacccagccctagtagctcccaagcttggccgaaaag

SEQ ID NO: 357814 - DNA, 572 bp, Cannabis indica
gccagaatgcttgcttctcagagcaggcaaaagagttatgcagatccaaaacgcagaaatgtagaatttcaagtaggggatcatgtgttcctacgggtgtgtcctatgaaggggattaagcatttcgagaaaagaggcaagttatgccctagatttagaagacctttcgagattctcgagaaggttggacaagcggcatatcgattagctttgcctacagctctttcagtagttcacaatgtattccatgtctcaatgttgagaaaatacgtttcagaccctactcatgtacttagttatgaaaatcttgagctgcagccagacatgtcatatgaagaacaaccagttcagatccttgacagaaggataacgtccttcggaacaagacataactttggtcaaactactctggagaaacagtaaggtggaggaagccacatgggaattagaattagacataaggactcaatatccagagaggctagatttcgaggacgaaatccttttaaggggggaataattataaagaccgcttagttttaatttggaaattagtagataattatggctta

SEQ ID NO: 357815 - DNA, 532 bp, Cannabis indica
ttttcttctcttagaatttgtctgaggctgtagcttttgaattgtgcgagcagatcatgtgttttgctcagatatgcgatcattttttctccctaagcatcgtattcgcaagatacatgatttaccactagctgtgaatcactgcagatctcaatgcgctcggccttcatctcctttgctagtttgagtccagcgattagggtttcgtattcggcctcgttgttacaggctttgaatccgaatttgactgctgcatgcaggtgttgccccctaggtgtgacaagggcaattccagcaccggataattgatctgttgccgacccatccacatgtagcttccaggtcagttttttttttagtattactcactgtggtattgggtcaagatctctttctggtatgatttcaattttttcggtgcattccaccacaaaatggcccaaggcttggcctttgatagttgttcggggttggaagttgatttcgtactgccccaattctaccgcccacttgagtaaccgtccagaggcat

SEQ ID NO: 357816 - DNA, 614 bp, Cannabis indica
gccggcccaaagtatttttgtaattttttttccttttttgtatttttttgtttttttcccttaatatttttgcatattaaaaatttcattttattattagggattcctcgccccgtccccgccccattaggggattccccgccccatccccgccccattaggggattccccgccccatccccgatggggaataagcagggatggggattaaaatttttaacagagatggggacggggaagcactccccgccaattccccgccccatgtgcacccctaattgttacaatttaatataaaaattataaaaatttaaaagatattgcgtgttaaaataacttgtaagagattggtatagatacattaattatcgacttcgccttctattcaactttttatataaatttggagcatgcatttaattgtggagattggagaatcacatataatctatattattttatttccaacccaataaaacctccctaacataactttatatttaagattttaaaattttaattaaaatatggctaaacattttaaaaatatcccttaacacttttttagccatataatattagaatattttatttatggaaattattttctaatt

SEQ ID NO: 357817 - DNA, 810 bp, Cannabis indica
catactcatccattgctccgccttgagtggatcagcaccaccctcaaacactagcgggttctgcttttggaactgctcatacaatggttccaaacagttcccttcatccggtggcactaccagagctgccggaggatcaggattagggtttagagcaggctgaggtcgctgctctctcaattctctgatttgctcaccctactgctgaatagtctcttgcattgtagcatataaatcttcccagttttgtggtggtggaggttgtcaccctcaccaggagccccgagcccagctagctcacgggtacccctaccagttcgcctcgggtgcatatctatacacctgcggtcacatttcaggtaataacaatactaataagtatttccatatattatagtcctgcccacacctcgcagctaatgtacatatcaagccagtcttcaagatctaaaaaccttggactctgataccatgttgtaacaccctgtccaacaagtacgccacgtgtgtgaaatttaataaaattcttatatagtgttgtcgagtaaattttgcaacaccaaattatatgatattattagtgacaagaagcaatttacgtgaaaagacaagtgcgagtattcaacctagaatggcgagtactcaactgggaatgagaaatagttaaccaaaaactggaaaataacaatgagacagagaaattatagtggttcagtcagattatggtctgcttagtccactgtagcaagagattcgtaggtgccatttcacggtggatcacccctttatatacaaagcaggtgtccgatc

SEQ ID NO: 357818 - DNA, 997 bp, Cannabis indica
ttgatatttgagtggtgaactcttatttgtccgcttttcaaatttttctaacactctcattttattcttccaactttcttagtagttggagtgatgtccttaattgttgtatatagtgtagtcatttattcacctgttttcaaataaaacaatagatatacaaaataaaaaatataattaagctcatattaaaatcaatctcacctttcaatatagtgaaaggtttttaaattgattcattctcacttaataattgtgacagacctaacgaataataatattatgttacctaataacaaaataggaatccaccaaacaacattatcaaaatttattccaagtataattatataaatctattactcattgaagtctattagaaactctaaaaagctcacaatacgaaatttcacatcaaaaatctaaaaatgatcaactatgtagcaggaatgataatacaataaccaaaattgcctagtcatatacagtcttaaaacttaaaagagtggcattattcattcaagtttcgactaagtgtttctgagtttgagttataatattgtgtcctgtgtttatgtccaaatattatgtgtgtctggctaatctagtgaagaagattgaagttttgattctcaataaatagaatgaatataagtgtatactttgtagtaggtcattattgtgtcatttttaagttaatgtgtcaacttgaaaataattcatttaataaacggaatagaggagtcaatctaaaaatatttttctaccttaataagtagagctatagaaaacaaactcggtaactttttgagtgttaaaaaattgtaaatggttataaattcagagtaagtaactttttacactaatatattgcatttagtatttacttttaatttgcaacaccattatttagattaattaaatatacgtaaaaataattttaaataataacacaaaatttttttttcttcaattaattattgtattaaataactat

SEQ ID NO: 357819 - DNA, 787 bp, Cannabis indica
catgcaaagctcgagtttgaaccatttctctaatatttaaatgaatatgtgttgtattgctggttgttatatattgtgcgattttctcctacattaatacctttttttggtttgtttaccgacttttaggcgacattatgcgattactgtgcgatttttgtgcgattttagctgacaggatcttgattttgatgttgttttgttatgtatatttttggcgatattatgcgattattgtgcaattttagtgcgatgttagctgacaggatcttgttttttagtttgcttggttttgtttttttttggcgatattatgcgattttagtgcgattttcgtgcgatgttaattgacaggatcttgattttttagtttgtttggttctgtattttttggcgatattatgcgattaatgtgcgattttaatgcgattgttaccagaattatttttcaagatgtcatcatatcccatagttgccgttataagacaggtatttatcaaaatataaaaaaaaataaagaaattgatacaaggaacaatttaaacagctttaaatttacttgttatatataattttggtgagattataatacaattacaaaaggggagtttatgtgtataagaacctacaaaaaactaccatgttaagttctggtaaaataagtccacacaccacctatgtcgaaaggtgagcatgttaccatcatgaacatgctccaacgaccggtccagcatcaagtgctcaatatgctccatggcatacattccacaattgccaactaaaaaaa

SEQ ID NO: 357820 - DNA, 492 bp, Cannabis indica
aaataatttccaacagttctttagtcttttccttttagttatttccattagtcttgtctttgatattgtgttttagtctttacctttggttcgagtcttgtctttaggcatgggttgtgtagctcagaatcatcatggtgctatggtagaagcattcaagaagggaaattttggatgtgttcaacccgaaattgctgagataataggcattaaagaagcattgagttggattgcaactcattcgtggaatagagtcatgttgaaaacagacagcttggtgtgtgtccaagcgattcaaagcggtatttcttagggttgaacatttacacccgcaaacccgaaaaacccgaccacccgccccgacccgccaaccaaaaaaccgaaaacctaaaaactcgtgtggtcgggtcgggttcaactcgaaaaatagcccacacgggtttcgggttcgggtatagtgaattgttttttttttatttgggttttaacccg

SEQ ID NO: 357821 - DNA, 1434 bp, Cannabis indica
caacttagtttcatctcatcatgtatataactataatgaattgagtttcaattaactatatatatatatatgtgtgtgtgtttgtgttggtagattgttgagcttagaaaccatccataatatgttggggttcagtttcatgcggagttcaagtcaagaccaagaaagccttcagcattgttctcagggcttatagcagcctcatgtggggagttagagagtttggtgcagtttgatcagaccaacaacaacatttgtaattagagaattcataataataattataatggtgatcccatgatatactaaaataggaatgggaatggaaaaccagcagtactagaactagatcctgctatttatagtctttgcaatggggtacattagtataatatactattactattattacatacaacaagggttgtagtttttggttaggttgctgtgtatagttattgggatattaatgtggtgtagtagaagaactggggctgatccaggtattttttgaacgggttcagcttgtgaaaaagttcaatttcacaaccacatacatcacttgttactattttactattactattttactcttgtgagaaaattgggaaaatgtatgtattatattttgtgtgaggattaaggatgcatttcctttctctctataagccgctcttgtgttatttaaagaagagaacattgattattctggatattattgttttgattcgagaagtggggttttaggcgaacaaagaaaaattaaaaccttaaataaaactaacaatacgtggctcgccacgtaacattcacctagtatatatatatatatatatatatgtatatatagtgtcttcctatgtaccactttggtttgtaagaccacagaacaagtgaagaacaactcagcaatcaaaaagcttaattactataccactctttatgactaagtcaattggcataattctattatacacaaatttataaacaaataatttatctatatgactaattctattttagtatgacaatattaaacaaatacatgtattgattatttgaaactatacatcgtattgaattatgaactagaagttaatactttatcaaccattagttaatttagactcgattattatatgctagctaatattttatgcacataattatacaagttataataatctccttatatttataaaaatatgtggtcccaaaatatatcatccccaagctagtctattatagaattatttcaatagagaaattttatttacactctattttaataatttatatatatattttatataaatttataacttttaattgtactaagggtttttttttaaaatttttttctttccaatttatattcttaaaaatatacctatcgaataagataaataatattttaaatattatgacaaaaaa

SEQ ID NO: 357822 - DNA, 821 bp, Cannabis indica
caagccaaccaggatgtaacaccctgactctcagaaacgccacgtgtgtgcttttacaaactcattattactagtttattagttaggaaaaagtgtggtttaattaaaatctttaactaaatctaaaataaaactttcatatcaaacattgtcataatatggggatcccctgctaataaaattcctttacaactaatttacaaaacgactattacgaaatcaaggttacattttcaaatatagagaaaagaattcgatcttgcttcccagaagccaagacactacggtggacatgtacattgctgggaaaacctcaaactcatggtcgaacacaacttctaacttctttacctgcaccatgaagcacccgtgagtcacagtgactcagcaagaaaatctactagataaagaaaaatcatgaaaaattatagcagatttcattacaatagaatatacatacaaataggtcatactctttcaacgtacatatacaattcagcgtctatacgagcaaacttattacaagattatacataaccaacaacctcagtgtttcataaaatattctaatcatacattatcataaacacttactttcaatgcttcataaagcattctggttcacacgttagcatattcacacaacttcagtgcttcataaagcactctaattctgcatcattataaacacatacttttacatccctaggtcactgcgattgcaagaaaagtgactaatttcataagcaatataacatccatttaatcatactataactaaaaatgtattcaattacaactcatcacataataacacactt

SEQ ID NO: 357823 - DNA, 569 bp, Cannabis indica
ttcgttctgaaattattttattttgattcctcgtaaaaagttaagcaattttggtttttacagaactcgattcagataaaaattgagaaagttgtgaaagtttgaaaatcgggtttcaaaggtgtcgagattgggtgctaatgcgcaccagcatctccatcaaggagaggctactggcgtcgaggaatgccactcatccgaggctgcaagcctctcgtgcgcgcgcgcggaagggcaatttgcaacctattttggctgcacgtgcgaccttgcttgcagccacctcccaaactcgatttttgtgggatttttccacaaattttgaatttttgcaattttgaaaccctaatttcaaaataaaatatcatttttaatatattcaaacttaaatatcaattttaaattaataatatttaatttttaataggttattattggttacattttataaaaaaaatttaatttcattaatatttatatattatttaattataagatcaaatattttaatattggccatcttttaaattaaaagataactttatccttttaatatgaaatattatatt

SEQ ID NO: 357824 - DNA, 877 bp, Cannabis indica
aattttgagttggatgctttgaattggaatttggtggagttgttgaagactattgggctgagaaatattagtgaatttgagcacagtattgaatggaacagtaaaaaaaaaaaaaaaaaaaaaaaactagattgtggacagattgtcgtagggaagagagttcattgagtgcacaagaggttaattcggttccattgatagttgacattggggttgtaatttggaacttttcggtgtgattttgaatgtctaattgtctctgccgtgggttttatgatggtgataattagtgaaatggtgtgaattggcagtggtaatgttagaaatagtgcaagtttgaactgatttgtggtgttggataaatgagacattgagtgacttgcacagaggaagtatcatggccaagtactacatggattgtgtgtaaggtgtcaacatttacttggtgtggtgtgggttggcaaaagtagtagtttttgaacaagagtgggttggagacagtgaggtaccttgtacgagttcttgttgtgtaaaggggcagcagtgagtaaggcaacaaagaagaaagtcattgtgttggggtagtgtgcaagtgaaaagaaaagaaaatgcccaaagttaagaagaccgccaacaagaataaaaagaagtcactgcatgaaattcctaagtttcattgcccggcagctgagacaaagtatcatgagaaggtggacaatcgggaattttatatggagcgtggattagtagccgatattgaggacattgatgagttgcccgaatgggtcagtgccacgattcatcagcgagattggggactttttgtccaacaaagagagcaggcggtcatggaagttgtcaaggaattttacgccaa

SEQ ID NO: 357825 - DNA, 479 bp, Cannabis indica
tgtttgtttggtaggcatggcaactgtggaatgaaagcagaggactagaagtggttgatgatgtattggccgagtcatactctgcagaagaagcagtaaggtgcatattttagatttggattttttaattatttacaaccattttagtgaatagggtttgtgtcttatttccacagattttgtacaatcggttttgacatgatttactccaatattctaatgttccatatatagctcaattttaagaatgtagtctatttgagattgagattgacaatattgctatgttaaaagccagcagcaagcttggggagtgagcaataccattacaacaataaaactaaggtagcctagaggggtcgcttaaagtttttattaattattatggtcttccttttttatatattcttctcctttcaatttctttggttcactattttttaattcagtaccgaaaaaaaaagagagagagagaagaa

SEQ ID NO: 357826 - DNA, 638 bp, Cannabis indica
atcacttgtcacgattcaaccgagtaatgatggtcatgagggtcagcaatgacgccaaatgtttttgcttccctctaacgttaagcgggtctgcggaagagtggttcaagaaaatggaaccaggatccgtggactgctggaataagctgcaaaccagcttccggagatagtttgtcgccgcaaggaaggttaatctgaaggttagcgccttgactaacatcaagtagctacctacggaaacattgaagaatttcataaagaggtttaaggaaaaagcctcaaaaaccaagaaagttgatgacggacaacatcttactcttcttcaaacagggatccgtacaggaactccgttctggaacaagttacagcaagaaggagcctccaaccttcaagatttccagaaaagagtccaaaaatacatcaacctagaagaggcgcaaatagtggcctatgggggatactaccctaccgggatagtggggtatgtacccggagctcagctcccgggaactttaccagcagctgctctaccgatgagcggcatataatttttcgctaccccatgatatagtcaaggtcagggcttagcccctgcatcttctcattatgggaatccttctgggataagtggacaagtc

SEQ ID NO: 357827 - DNA, 653 bp, Cannabis indica
atatttaagttgattttattcttgatacttaaatattagttattttcagaatatttaattaaatagaaaaattattttaagttggaaattataatttcagaaaaacttaaatttgaataattttaaaaatatattttattttattttattaatcatttttttaaaatttcgaaattgcattatttaaatgcaaataattttgggtttttttttaaaatagattaaagttgaaaattatttattttgattaattttagatcaacttaaatcaattaaatttttcattaatgattaattaaaataaatagactaaaatatattatattttaattagaaaataaagtaattatttagtgaaaatctagatagttattttctatttgcttgaagtatttttctagttatattcaattaaaaagaaaattaatatttaagttgattttattgatgatacttaaatattttataattttcttaatatttaattagggcaaaaattttcagagaaaagtcaggaagtttgaaattttctcgagttagggcaaaaatttcatgaagcttagaataagcaagatgaaagacatgcattatgcagttcagaaagcaagcattatggactgtaaaatcgcatgaaaccatgacaaagaagaatc

SEQ ID NO: 357828 - DNA, 519 bp, Cannabis indica
aaaatatagaagctcttgcacagactcctttcatgttatctttaattgcttgggaatcagatattttatcttcatgctcaaaaagacatatgcgatttaatttaattttttttaaaaaaaaaaaatagtatacaaattagatgataaaacaaataacatgaatgatttacaagaatttaatattttcacataagtttcttgtgaatatggttgaagaggtaaaattgtatctaccaattgtttgatttacatatatattctatatataatatcaatgtatgtactacatgttagtgagaatatgacaacaattaaattaggtagttttcataatgtagcttaatatggaatctcttattattcatatattgaaacatacaacttaagggatctctttgtatgtaggacaggcagcatgggcggacctagaaaatatttttagcatgcatattctttgtttttttttttttggtaaggtctagcagaacatattcagatacaatttaagtaacaaaatca

SEQ ID NO: 357829 - DNA, 760 bp, Cannabis indica
tgatgagtccatatttatcttatacatatagcttattgatttattcatattcttaaattgattctttaaattttttattagtgtgattttaatttgttaggctattttaaagactattcatgcatttagagtcttttggagggattttatcatattttggtagaaaatagtgggagccggcgagctcgattgtacaaggcagaatttaattgcaaattcggacgatattagagacagaattggacttagaggtcaacatgaaagttttagatatcgttcttagatttccagaacatcttgaatcgtccaactctgagtaatatcaagagagttatggccaaaatactatcaatcatcgcagtaggaaatttctgaaaaaaaaaatagcaaaaaaaaaaatagattttcaagaagagttgcgatttttttatccttttttttttttttttcaaaagaagaagagtaatttttcttttagtaagatatatcctaatactattataaatagaatcttaattctaaggggagtttatctatccactatatgtagaatcctaattctaataggattcatctaactttctcattattataaataagacctcttagactacaaattgaagagtctaaaagctacaattaagagagagcaaagaagctactattagcgatcttctaaacaagattaaaacaatgatcataacattgaacatggaagaataaaagcaattcgatataatggaaactagaaattaacatt

SEQ ID NO: 357830 - DNA, 581 bp, Cannabis indica
aaactttcaaagacaaaatcctctcagattgatttttgttttctcttcttgaatttcaaagctttccgaaacaatcagagctaatcacagggggaattgtcaaatctcaaggttagcttttgaaacttctttcgaattttgtttttgattttgagaaacactctgcattttgaattttttgaggaataggaaatgcatgttgttcatagggaatgcacatagagctgggtaattctcagaaaaagtagacctgaaatttgtataatcgtgaattctagggagaacaccttgaatattcgcatctttttcctcgctaaccatactattccattgcccttattgtataacttatcacacatttagttcacatcttctaactatttaaaaataagacaaatatcaatatcaatatgcatataccatacacatattcttatcacaatcatcactatgctacttttccagcatactttataataggctaggcaggtaatctaatagcaaataatataaatacttactatataccatgagtcgacctgtcctcgcagcaaatcttaaagtttcatatggatggatca

SEQ ID NO: 357831 - DNA, 790 bp, Cannabis indica
attttcttatattttaataaaaatattacatttatatcatgttttgtaattatatattagggtacaatattaaaagttgatgtaaatatattataatttttttttccaaatatgagttatggttagtgattattattgtaataattgaatggtatttcttttcaatattgttttaagattgctaatagtgttgcacattttttagcaaaattatcactttatgagattatcatgtttggtggtttggtcacttgattgtattagtactaggggtgtttattagaccacttccaatatttgtaggtctattcagcttcgatccaattatatattaaatgttaggttttatcatctgatccgatccaattaatttcagtcataaaattgatccaacatccatttgatgttagattagatcaattctatcaattggatgtatttcatatatatttattggtttaatttagatttatccaaaattttagacctaatatttttttgatcagaccggatccatataatattttaggttaagtatatattagattggattagattcatcaaatccgaaaaaaaaaaaaaagtaactttaatattaattatcatatatacaagtttatattttacgtataataatataaaattaattaactcatccaaacgaaatgaaaataataattagttcaattggatgttggatgtattagatttttagacacttcatccaacatccgattcgatctaattgaatatttaaaaatgagtttttttcaatattacacaataaaaa

SEQ ID NO: 357832 - DNA, 503 bp, Cannabis indica
aatgagataaaaagaggagatatatacctgagtaccttccttcaagactcctcctagaaccagctccaaggataattcattgtccgccccagacagctgatcactcacttcaagaagtgatcgatttaatagtactggaacatgtctttacccctgttggcctctgtgctcagtaccacgattgtttaaggggtcctggctttatcagacccgtctgagctcccccctctggaactctttaacttcgagaccttctgagccggaaggtccgcaacaggtcgctcctcataaaggtcaatgacctcatcaattggtgccctctccttggatggagtctcgctgtctttagacttcttggcgggggggagacagacccgagttgtctcccactctcttattaaaggcccggagcatcttttgagacatttctacacggataatacaatgcagttagaagcagatataatatatgtgaaagcataatataagagaagtaaatgcaa

SEQ ID NO: 357833 - DNA, 851 bp, Cannabis indica
cgattcttgtgggcagcgtcttgcatccacaatagctttttctctagctctccatgctttttggtaagatatggagacactataatcatctgccatgtcatccactattttatttggtgtgtagtctctttttggatttacaaatttggttcttattacgctcccaatcaggttacttattgcattaggatggtctacagatatgacagttattgagcatgtatgagaatgttgaatctttctgattttgaacatgtttgtttttccatgttttgatgccaaaaaactccatttgcaattttcatcgaagcaaattaacttatagtcaagtttggaggatctctttaccttgaagggctagttttttcttattaagtataggctgatagcattttgtagtgtttctttgtttgttaaaagttgtccaacaaatatgctatcaacatgaggatttaagatcacctgacttgttgcttgatggcttgtttcaattgcattttcaacttgattgattacgaagtctgccatgtgttgtgcatactctgtccttgtagatatcactagagctgctaccaatatttctattggaatggctgccgaaaggttaaccatcatagggtatttggtctcatcatcatctttttttctaacttgttcataaaatttgcatccattgtcatttgtaatcttcatgggtggtattcatgatgttatttggaatcgaacatcaatgtttgtttatttctgtcaaaacccaaagtagaacatattttgtttgtccactcattgtccattataaaatatcataactgttattggatcttccatatcaaactgtcatcaatcaatgc

SEQ ID NO: 357834 - DNA, 663 bp, Cannabis indica
atattgattaaattgatgaattgctgtgtattaatgcttgggatgtgttgtgtatatgatattattttgatatggagtggttgggcaggtgtggttgagttttggtttgagttttgaggagaaaactcaagattgcaaccctgccagaaccggtcgaccggttggttctggtgcagtagaaccgtcaaccggtttgcctgcaggtgaaatttttagttttcttctaggctagttttagggttcgggatgatttccgtggctagtgtagattgtttaaaagtggtaaaacctattttggagctaatagaagctaaggtttaccagttatgggaattagggttattcccagaattattgattaaggtatttattgaatgttgttgtcgtgacataggacccgggaacgtcaagctttgtttttcacttaggccggcacgcgcgcttaatctctggactgaggtaagaaaagtattatgtacagtttatggttaacgattataattttgatagtctcgattatgattgagattccgatatttgattgttgtgactcgattatgattgagggaaatgatatgaaatgattattattgttgtgactcgattatgattgagggaaatgatatggaacgattattatcgttgtgactcgattatgatcga

SEQ ID NO: 357835 - DNA, 570 bp, Cannabis indica
ataaaaaaaaaatgcgcaaaaaaggggaagaagaccagcgatgatggtgatgatggaaaaatagattctatgagatgatgatgattaaaaattggtttttttttaaaaaataaaatataaagttaattttgattggttgttaattttttttttttaatttaatatcagatttctctaaaaaaaaaagaaaaatttaataaactacgaataaatacatgttaaaccattttaacttttaaaagtcatataaatgagtggttgaaaaagtgtacctataatatagaaacaaaaatgtagtcgccatcattattctatattatatattgaaaaggaattgtccatatatattattatttatggcgtgtggcatgtgttccattttaagtgcctaccaaaggtggtccatgttattatattaaatgtcatatttggatattacatgaaattgtatataaatccagataaaactatagatatatactaaattaattgtggtggatatgaattaaattgaaaaaaaggtaaataccattttggactctgtgttttgcaaaagttacagattggacc

SEQ ID NO: 357836 - DNA, 507 bp, Cannabis indica
cttctgtttctttattgatattaaaaagataaagattatattgaaatagagttttatttagggcataaaacccaacaggctcatggtcctcgtaccagttgagacaatactacttgcaagactcaattaattgattttgattaatcaattataattctaaaattagactaagtctagtttataaattttcactaagcaagggcttaattgtgaagaaagaatttttagagttaatttgttaattaagagacattgataagtctatttaataaatatattaaatgataatattatttaataattagtttttagttattaaataattagaatttgcatttaaatggttaaattggaaaattggcatttttgagaaaataagatgagaaaatgagaaaatagcaaaattgcaaagtggagcccaacatccaaaccatggccggccactctatcgcaatttaccatttaattttttcattattttaatgctaaataaatctaacctaaccc

SEQ ID NO: 357837 - DNA, 644 bp, Cannabis indica
tcttgccaacaattgcatttttttgtagtgttgtccacagtaacatcttttcctttgctgagagctaatgctgtgttgctgctgcgctgaagagaaatgctagtagtactagttttagagtgagcaatatcatcataattaattgatttttcatgttctaaaattaatcgttgtctacttagaaaccattcaaggagggaggtagtacttcacctgcttgcttgtcatgcaacaatattaatgacttggtatcaatctgtagctctagcttctaagcttccatcttcctcctcatcatcagcctcaaatattgggtcttaataaagatgatgatgattttttaatggagatctttattgatgtcaatatgtcctagtgtaccaattgccaccaatccataaagctcaccattcacttcctcttttccatgctgaattttcttgctgcactactacttgtcctcgtgcctctacacgagatagtcaaatgtaaaattattgattatttagggggcgtttagtaatacatttctaattaatttttggttttaaaattaaaaagtaaaatattttctaaatcatgtttataaaattatttttatttttcaattttttaattaagtaatctaaattttaaaaacaaaa

SEQ ID NO: 357838 - DNA, 629 bp, Cannabis indica
ttgactgtggttgtttgttgtccaactacgacgttagttacctctattgttgatggttgtttggccacttggcttgatcatcctaattaggtatcgtcaagtgattgaatcggatcaattggaacttggaatcttctttgactattgtctgatgttgccattgaagcattcaatgactcaagctggacctttagtgcggcattctccttcttgaacgacgcattttctctttccactgcttgagtgcgctccaagttttctttcatttgagccgtgagagtggcgagttgttctcgaaagctggtttgcttctcattgatctccccttcctccatgtgctctgccattgctctagtgtgggttgactgaatgataaaggtcgaaacactttgctcgattacagcttgtcagggccccacagagggcgacaaattgtagatgctaaaatccacaatcaatcaaagatgatcgtacacgggcaccgacaacctgtagaacaaagaagagagtaatcgagaaaccttgggacaccaagatggtgtaagctgaagggactctgacggtcaagtcagcaagattgttaacaatgtaattaaaaagatgatagtaaatgactgaactaagttacc

SEQ ID NO: 357839 - DNA, 588 bp, Cannabis indica
gcaacacccaatcttatcaaagaccatgaccggtgaagtcctatccatctacttagcagtatcagaatatgcgattagttcgatactaatacgcgaagatcaaggacgacaatacccggtgtactatgtcagtaaacgattactggatgctgagacacgctatcctcaaatggaaaaattggcgttcgccctggtaatatcgtcgagaaaattgcgaccttatttccaggctcacagtatcgaagttttaacaaactaccctttgaggcaagtcttagcaaaaccagagacgtcggggaggttgttgaaatgggcaatggagttaagtcaattcgacatcaagtataagccaagaactgcgatcaaggggcaagccttggcagattttatcctcgaattcccaagcaccgaagtggcactcatagacgacaaagtcgacactgctatgaccaatggagaagcatggacgttgtacgtcgacggagcctcgaatagcaaaggttctggtggcaggatcttactaatcagccccagcaattttaaggtacaccctgctttacgttttgaattttctgcatctaacaatga

SEQ ID NO: 357840 - DNA, 856 bp, Cannabis indica
cctttcccataaaaacaaatgggatctcaccctctggttcaaaagtcaccatctttctcttacaatctatagtagcattgtacttagtcaacaaatccattccaaggattacatcaaaatcttttaagtctaattcaatcaaatccattgacaattctctccattctactaacattgggagagaccttacccacctccaggagattaccacttctcctgtaggtaacaaggtaccaaatccaccagacatgatattacatggcctactcaatttctcaatgattctactagaaatatatgaatgtgtagcacgaaaatcaatcaaagtagtaaacataataccaccaatagatatctcacctgtaactgtcgaagggcgaacttcagcatctacttgggtcaaaacaaacacccgagcaggttccatataactctctttcttagcctcgggcttctgtagctgtggacagttgttcttgaaatggcctgctactccacattagtagcaaactctagacagacattcacccaagtgatgtctcttgcatttcgggcattcagggtaaggctgccaaacctcatttctgccacgacgaaagctctggttattttgaaactttttgtttggacccacaaccggtggtccatctagtttcctttttcggtcattggggctaaagcttttactcactccaataccagatgaggtcttccacgcgtccttcctctgagtactctttttacgaatcaggctttcagccccctcagcagtgagagctaagtccacaatctgaggataagtcttcatgacccctgattgtttggctgccataaccacatctctagcaatatattc

SEQ ID NO: 357841 - DNA, 813 bp, Cannabis indica
ataaatatttaaaacactaacatatttaaaaatacaaaataacagtaaaaaaatactaatactaataaaataaaataaaaataacataacactaagttataaaactaaaaagaacaacattaagtaaaataataatttaatagtcaaattgatcacttgtagatcttaaccttgaagaatatcaaaaatattagctatatggacttttagtattttgagaatatagatcttcttaagatatttaatattattggtgagctcttttgtacataatcattttttgctcattttgaaaatagtcgtgtatataataggattaactatagaacttcaagaaagaaagaaaatgtgtagtgcttaattgatttaataaatattttattttactaaattattctaagattttaaattcttactagtagacatgatataatttttactaattatttcataaattagctattttaagttattaatgtgactaattatttttaatttttatttataatgtactttcatatgaatctacagtatttctaaagttttaagggtttgtttttttttttacagaaatatagattgttattcactacaaaaaatcttatttttagtcacaataaaatttgtgactaaaagtcgtaaaaaagaaaattgtgactaattataaataattattcttatgttgtgactaaaaaatttgtggctaaaggtattagtcacaaaaatttcaatttgttgtgactaaatgtatttttagtcacaatatttgttgtgattaaaaataaattagtgataacttgtatttaaatacta

SEQ ID NO: 357842 - DNA, 510 bp, Cannabis indica
atatatatatatataccaagaaggaataggatgaacaacttacgagtcaaagatggatgtttgcgtagggaagaatcctgtaactgagttttaaatgaatgactaaatgaactctgtgaacttttgagattgaagattaaatctaaagaaattcgcaggaaataagtcaaggacaaagagggcatgaaaagttctgagaaattggaaaaagggttttttgtagaaaagctcgaagtttgtcgaatgcaaaaaatggtggaatgatggtttcatttcaatttttataccttgagattggtcaccgttagattaaaaaaaaagagatctaacggacaagaacaaaggagaattgaaaaagatgggtcattaaatgctaatgatgtgccttgaaactatgaacctccaaatttaaaagacatgcaattttttaaatttggttaagacaaatataccctttgtaatcatttaaaagatctttttattaaaaagaacttttaaggggcaattatt

SEQ ID NO: 357843 - DNA, 532 bp, Cannabis indica
attaatcacgatttccataaacctcgttgattagcaacgagttgcacagtacgtttaaaatcacgtcaacacgcctatgctagttagggtgttacatacattgtcgacttcggaaagaagaatggtcccaggtcgctattgggatcactataatcaagtttgtcgagacatctccagattcagtaattaaagacgtgtttaatacacgacatttcttacccagtaaaagcgggaaaatcacagctatacaatttttaaaatcatacaccgcatttacatttcgtgatgtgtaatcagatcctacgattttagggataatggctgtaaatatattctggtcaattttgtaattaattttccactatgtaattataaatagtgacaaacaatctcaaaaaagggggacgaaaaaactcatatgatagaggccctaaaaaatactcagaattctgaataagattgaatcgtgggctaggcagaattttaactgcaaaatcacgtaaaaaaaccctgtgttcatatattatttttc

SEQ ID NO: 357844 - DNA, 588 bp, Cannabis indica
ctcaatgagagcaccaaactgttcacatatattttcgttaactaaatttgagcctcacagtagtaatttcacacagaaaaataaaagctacagaaataaagatatgaacacaaagttttttacgtggttttgtatttaaaattctgcatagtgcacgagtaaatcttattcaaatttctgatttttttaggaactctctcgtatgagctttttcgtcccttttttgatcttgtttgtcactatttataattacatagtggacagttaattacaaagttgaccggaatatgtttacaacaatcatccctaaaatcatgggatttgattacatatcacgtagtgtaaatgtagtttaggatttgaaaatcatatagctatgattttctcgcttttgctgggtcaaaacaattgtgtattaaacacgtctttacttgatgtatctggagatgtctcaatagaaacttggttccagtgatctccatagcgagctgggaccattcttccttccgaggttgacgatgtatgtctggtgtcgattgcagttcttatcctcaaagaattctttgaggctcatttgaatgctatctt

SEQ ID NO: 357845 - DNA, 1062 bp, Cannabis indica
taaaacataaaaatgactaaagactcataaacaccaattacactgaagaattgatacagaaccagtaaacttaatatttattaggtgaacttcttaatttaattgttaaatattataataaaaacattaaatagcaataaataatttatttatttttttcatgcaaaaaattgtagatgttattcaataaacaacattaattttatagaaaaaaatatttaattgaaatgctattagtaaaaaaaaaaaaaaataaaaaacttaaatagtatttaaaaaaataaaattaaataaaaaaaatatagtgttctaagaaaaatttaaaggaattattacataaaaaatataaattgacactttatttacaaaaatatacattcgtaaggtgtggacaatatttatactttttatctgactttaattacaaaaaataccacttacactatcacttacacaatcagaccatagttgcaaggtggttgttgcatggttgcgcggtagttgcatcagacgaaggtttcaatccgacgatggttgcagggtggttgctgagtggctggccaaaggttgcattagacaaaagtttctatcagacaaaagtttgtgggtggttactgggtggttggccaaaggttgcattagacgaaggtttcaatcagacaaaataactggtagtaaaatatttatacaattgtaatgcaactgttgtaacacattaaaaattagaatagtgtttccacgtacgtaactctatctacatgtctctttatgatttaatatgaacaaattcaccattaaaaatttggaaaataacaaaagtacactaggataaatattttacaatagtattgatgtaattttttttggattatactttagttggattgtttaggaactccagtttaattttttgagattagcctttcatggatctgaaaattgaagtcattagttttatgcaaattaaactggatttcccgttgaattttagtttcgtagtagtttttctacacttttttttatgaattcgaaacagcccatggtggttctctttctggttga

SEQ ID NO: 357846 - DNA, 810 bp, Cannabis indica
cgtgttttatctattcaggtcgcatttttgacaattccgagccctatttttatatactataatattgtagttgcaaaaccattaatcagttaacgtgcaacttaattacaaataaaaatattaaatgtgaatgtgtatttataagaaattatttgtcatcagttatttttttttttttggttcactgatcaataattacttgtgtcttaatagtaatatgtggagaaataattgttagcaaaatattaatgcaacagtaatgcaactgttatgaaacattaaaaatcataataatgtttcgacgtacgtaactctatctacatgtctcttcatgatttaatatgaataaattcaccattgaaaatttggaaaacaatacaagtttacctaggattaacatttagtgttgatgtaatttttttttcttttttggattatacttgagttgattgtttgggaactccagttcaactttttgagatctgcattttatggatcagaaaattgaagttagaacattagttttatgcgaattaaacgtgatttctgattgaattttagttttgtaatagtttttctacaatttttttcatgaattcaaaacagtccttgttttgattgcttccagtcgtcttcttaggtgaactcgtcagaattaatggtggttctctttctagttggatttcatttcggttgtgttgggttgttgggtggttgaccgaaggttgcatcatacgaatgtttcaatcctaggaagcgtggatcgtgagttaaaggtgtgtgtaagaggtattgtgtaggatttttttt

SEQ ID NO: 357847 - DNA, 1249 bp, Cannabis indica
atttttaaatctctccccccaaactaaatatgacattgtccccaatgtatacaatgaaatgcagagagaagagacttacctgagaccttttcagaaagggttaggtggcggcggctgatcatatggatagaactgaggaggtggcgccaagtaattcgggtcatcaatcccaatgttcattctgttgatgagagagttaagttggtgaacttgtccctcatcatggatactcttttgcaccatatagttttgcatgtggttgctctgctgaattatataactcagctgtccatgagtatattgcatcattggatcgataggcccaagaaattgtgggggccgctcctcctcttcttcaacactaggctctctttgccgccttcggccttgcggtgcatcaggttgaggctggccataaggatctggctcttttagcctgttgacaaatgtgatatccatcttgcgaagtggcaccaccgtgttgtcatactccaattgtggaacatcatatgccccgcagagttctgttatgatacctgccaaaccaaaaccacctcccgtggctttggtcaatactatgccggatgacttgtccaatatttatgttgtaccccttcataatggcgtacacatatttcaggcgatccatttggacatcggagaagtgtttatttggcaccaaccgagcactcacgaagtacagccatgtcttcgccaccgggtttaattcacacctatataggatgtttggcgacccctcttggccatcattgtcgtggaacctcaaccccgggaatcccaccgtctcagccacatccaccaaatcaaactgctcttcctcctcaataattcggaggcgttgctcttccctagaataatccgggacagaaaacataacattgaaagcatcagcagtggcgggaaccttctttcctcgcaccttcacctctccattccggcgctcgggccaattggcaagaaattcacaggccatagtcacattagcccggccccgagcatccacaaagctaccccatttcatcctctcaatttgggctcgaattgtctcaaaccttggttgacgtctcaaaggattttcagggaattcaataccccggtcttcaatgtaaggcctaatttttagcctcataaaacgattttgcgcctcctcattgacaaaccgggttctatcgaaacccgtagttggtgggtttgatgacgaaccttcctcaacatgcctagttctctt

SEQ ID NO: 357848 - DNA, 522 bp, Cannabis indica
agaaaattaaagtaagaagataagagtgtttatattaataaacttaaacttgtttaggagaagataggaataaacaaaaaataaataaatactatttaattgaaatcaatttctatcttatcttcaattattcttctttatcaacaagctttgataatattatataagaaattagtaaaagttgtcaaatgtaagtttttttggttaaagaattttttaaacttagcttatgactagaaaggtaatattataatgtcatctttttatttaaaaaataataataaataaataaaacaaaacacatgttttgagtttttcatgacttttggttgaaagttgaaaattatgtgaaaatagtaaatatttcaaaaaaaaagtaacaaaatagtagaaatattaaccaaatttagaccaaaacaacaaaaaattatgtcaaaaagtagttgtggaatctcttttggacaatctttaaggaaaaaatcaaaattgagtcatttgatttttttttcttttttaccaaaa

SEQ ID NO: 357849 - DNA, 652 bp, Cannabis indica
agcttagaaaaaaccctcctaactaaaagaaaaatctttctccatggcatataacagggaaaatgttgatactcatcctgaagagactactcgtcatcttggaaaagagccaacgggctcacagaggcctcctagctcacagacaacagggtccacactctcaagaaggacccaacatgaaggtggccgaaacccaaaaaaaacgcgttccacacattcaagaaggacccatcatgaaggcggccaaaacccaaaaacagggaataaggaacccaacataagtgttggtggtgctcaaccgatgcaatatgatgattatggtgcctatgatcccacgagatacgtgtcagttgtcgagttggaaaatcgccatctcaaacgccgcatggaggaggccaatcgacgaaacactgggttggaatgggaggcagccacggctagggtggtgttacgaattttatgtttactacgcaagtatacgcaatcaagtagtatctcacgcaagtgaggtcaaaccacagggaattggattaagtactactaaactatacttatgattctatttgaaaaaataataatttttgcaattaaaaagtaaataactcagaaaattaaaaagagaataaacaacaattaatcaagatgagagatt

SEQ ID NO: 357850 - DNA, 500 bp, Cannabis indica
cgtttttaaaggttaaaaaaaaataacattttctaaaaaaaaaaaaaaaaaaaaacgtcatatagcttggtctatattcagcaacactctatacatttatacataaaattaatcttaaaaattataccacattgtatatataatgtgacaagacattccaataaacaatcccattggagatgctacaatatatcatattatataagcaattaataataaattcaaatatatgtattaaaatacaagaaagaacctacaacatataaaatgaaatattgatgtggtatgtgaatgtaagaaacaaaaatttattaataataatagtgtttgatatgttaatttaaaaaaaaaagtttaatattattaatattattttgtttcttacatatatgggtgaaggtgtattaggattgttagttcttctactcatagcttaacaccagagagagaaaacaatggagcaagatagagaaagaagaagaaacagagaagagagaaaa

SEQ ID NO: 357851 - DNA, 1129 bp, Cannabis indica
cacatttaagtttgatatttatatggtattttttttttaggtctttttatggtttttgatatgtcatgtcatatatatgtaaattaggttttcaaatcccatatttaatgtttttatttgtttaggtagttttatttgtcagtgatgttggaaaagtcaccggagtttgctgtcggtgccggaaaaacattggagtagcgatcggtgccgaaaaagtcgtcggagttgctgctggcgccagaaaattcgtcgaaattggcattgtcgccagaaaaatcactgaaaaaataccaagaaactagtttcttaatgaagaaaccactttcttggtgatttttctggtgacaatgtcaattctgacgagttttctgacattggaagctactccgatgacttttccggcaccgacagcaaactttggaaaagtcatcggaattggcataggtgccgaaaaaattaccaagaaactggtgtcttgatgaaaaaaccagttacttgataaaggaaccaatttcttgatgaagaaactacggtaatttttctgacgacaatgccaattctgacaactttttcggcgttggcagcaactccgaggacttttccgacaccggcagctactccggcaactttttcggcaccgacatcaaactccaagaaagtcatcggacttggcattgtcactggtaaaattctagaaaaatcaccaagaaaccggttctaacatcaagaaaccggtttcttggtgatttttccagcgacaatgctaattctgacgacttttcggcgccggcagcaactccggcgactttttcggcaccggcggctactccgacgacttttccggtgccgacagtaaactccggtgacttttccagcacgagtgacaacttcggcaatcactatagttttatttgttttattttttaaaaaaaataaatatgaagggaattttaatatttttatggtaatttaattaagtttttattttttatgaattttaaattcagatttctttttaatgttttgtatggtttttttagaaaaaaaccatatttttagtttgattggttagataatgccatatttagtggtatttactttttatgccatatttatcataaccttaata

SEQ ID NO: 357852 - DNA, 633 bp, Cannabis indica
agaagaccttagttaacttctcttttacaattttcactcttcctatgaatgttattcatacagaaattttatgtttttctacttaatttccttacctcgaatgtagaaaaaataacttgattgcaagagtgacccttgaaaccaataatcgccttatgaaaaacctcgtttccatattcttaaattagaacatactataagtagtatgatcaatatttaaaatttaactttgaatttataatccaaatataagatgataatatacctaaactcccaaagaagatctaatagtgactatgaattacaaccgagccttgtaaaagcacaccaatactttggagattactagatttgagagaaacaacaatgttggtctttttgaaaatattgtagtgatgggagtgtaatagcaatgtcgatatgacaaaagatacgttagaacttgtagtgactctcaagttgcatggttttgtctcttaaagaaactagtgattgactatgtaagatggtaaagaatgaaataattgaacaaaattgtgaagtgccaatggttctggtttaagggaacaaaataggttaatcgaaaatattgatggtagctttaattagagagcacaataagattgagagaga

SEQ ID NO: 357853 - DNA, 614 bp, Cannabis indica
ttccttttctgatcagtggtggagtcaccaccatccataccatagacaggaggaggaacagtcggggttccaccaacactcggagtcactcggggctcctgaagaaatttcaccgcaccctcggctcttaaagccttctcgaccatttcagcatatgtagttgcctcggtagtagtaatcaccaaatcatgcctcatctgtgcactcaaaccggccaaatacttttctctcttgctaaagtcagttggcacgattcccacggcgagcttagctagacggtcaaactttgtcgtatactcagtagcagacattacctcagtttgaaccagttcggtgaactctttccgctttgcactgcggatagcttcattgtaatatttggagttgaacaactccttgaattcttcccaggtcatcactgtgacgtcccgggtgagggttatcaattcgcaccacacgagagcgtcctcctgaaactggaaagtggcttatgtcacccgatcattaccaaccactcccataaagttgaggttacgctcaatcactgtgagtcactgctctgccttcattacatcaggacctcccaaaaacactggaggtgcctgcttccggaa

SEQ ID NO: 357854 - DNA, 586 bp, Cannabis indica
ttcatttctttaaatattttgaacgtaacgtctacttttcaaattgtttaaaatgtttaatattttcaagatggttgttgtttcttgatgaggttataactttaatccaatgcttaaatgtggaagagaatcgtaacaagtcttttgtaatagatggttctgatactttattgccattttttaaaaaagcaatggtgttggttggaccattttggcataacgagacgaataagaaggaaaggaagaagacaatattttatttgaatgatgaaatcgaagacgaattagttcagcatatcatgaatgaagttcttcgtttcgaggtaagctttttcagtccggaattcatccctatagagatcaaaaattttattaaagtgtttcattcaaagttaaaggatcttgaaagtaaggtttcgaaacacaaattgaaaagaatccataataacataaatgagcattggagtaattgtattgatcaatatttggaccaagaaagtaatgatggtgatagctctgattatgtttttgatcagtggattttcttttctcaagtattgagtgatgggatttaagaaatatggag

SEQ ID NO: 357855 - DNA, 972 bp, Cannabis indica
cggcaacatggaactcggtgtttggctcagtagaatcacaacttagtatgttagtatattggggtagtttattagacattgggaatgtcaagattggtcgggaatttagaatttcccataatacccttttagtaccctttatgttattttagtgtggaggggcaaaatggtcattttgccccattgatattttgtcctttagtggacttagtaattgggatttaatgctatgttatgtttatttgttggctgagaatttaattgaataaaaggaaagaaaaagtgttagtttactcaatattttcaaattaagaaaaatcaagggaaaaagcttttcactctcaactctctctctctttttcgttccaccctagagcagctagggttctttatattcttcaatcattcaaggaaactcagcttgtttttaagtgatcttgatcaaggtaaaggtttagctcttctcttcttgttgtcttgagatttaagtttgagatttttgcataattgttgatgtaatgctgctgttaattgttgatgttgtcttcagaagtttaaacttgtttaattgagtagaatggagttggttgtgatgcatgctagttgtgtttattcaaagttttgaattttagctcaaaattatgatttttatggaaaattgaggaattagttgctgtagaggttgtttgtgcgtgggtttgttttctgcaattattttatacttgtttgagtagattaaatcaagttttgatgcatgtaggtgagctttagccaagtttgagtttgaactcaaagcttggagctcacatggtggtttttgattttgtgcatgaagcttggttttcttgctttgaaaatgtttattggggtatttagaacaggtcgggaaggtttggtatgaattgggtttgatttgagtgagttatgaatttttgaatgtttcctgcttagaaccggaattctggatggtgt

SEQ ID NO: 357856 - DNA, 687 bp, Cannabis indica
ccctatcatatctccatggctctagacaaattgatcctggttcgccttccaaaagtttattagctgtaatttgagctgctcgtccaggttcttcccaatgtatacacattttgtgggatttcctgggtcgagattaacctcttccaattctttgatttgttttagcaggtttctttcatcttaaactcggggatcaagatcttcgtattccttctcgttatctcctgccagatcatcatcaactgatgatcgacctttctatgctgtaactctatgcgatagcaatcgcgagccaacatttggtcgccatgcaccactcccacgccatctggcgtttgaaatttcaaggataggtgcttgatcgaactgactgcccctagtcccatcagtgctggatgacccaacaatatgttgtaagccaagggcagatgactaagaagtcttgcataacagtagcagataatggcacctcgcctaaagtgaatgtgaggtcgatcatgccaaggctagcgataatgtcccaggtgaatccacaaacactttcttatcttaatgacaataggatggtccacccctagtcacttagaatagctatcaaacatgcaaaccttggttaacagttttaggtttcttaagatcacgattaggtcatccatgaatctagtaatggtttacactaagtacaca

SEQ ID NO: 357857 - DNA, 641 bp, Cannabis indica
attggagttcccaaacaatccaactcaagtataatccaaaaaaaaaaaatacatcaatactatagtaaaatatttatcctggtgtattttgttgttttccgaatttctaatggtgaatttgttcatattaaattataaaaagacatgtagatagagttatgtacgtgaaaacattgttctgatttttaatgtttcacaacagttgcattatagttgcataaacattttactaacaattatttggtctgattgaaactttcgtttgatgcaaccttcgaccaactgcccagcaaccacccagaaactttcgtgtgattgaaaccttcgtctgatgcaaccttcgaccaaccacttagcaaccaccatgcaaccatcgtctgattgaaaccttcgtctgatgcaaccaccgcgcaaccacgcagcaaccactctgcaaccatcgtctgattgtgtaagtgatgatagtgtaagtggtattttggtaattaaaattacataaaaggtataaatgttgactttaccttatggatgtatttttgtaaataaaatgtcaatttatattttctatgtaataattccattaatttatttctgataattagatttgaaacatgaaaagtaaaaatcaaaatacaaaacta

SEQ ID NO: 357858 - DNA, 656 bp, Cannabis indica
gttcaacagtcttgcctttgtggactagttccagactgctctctatcatctttttgagtgatcttaaggtttatactaatacattttggcaagcaagtttcccactacctcttccaaagagtttccacttacaaatccattcctaccctttagatgagggataaagctaaccacattctgtcccttcgagtagagaggaggaatatactaaggttggcctacatggccaacttcttaatatatagaatatatcctctagagtttggagttgcaagggctgagggtcgatcgggtggtccacatttttgtcttttgtaaatatctaactaactatacaattgttaagggatttgaattgtaagcctagggtttaaggcttcctatataaaggccttaacctctgactgaaaatccaagttgcctaatgttgacctcgcttttagccaacgacagtgagtctaatttagtaagcgacaagtagtttataacgattacaataaaataaagcaatataaagacacaagaattttatagaggttcagccccgaacagttcggtaatagcctaatcctcgttatttgtattgactcaagaataaggagaaagattccttttcttatagctcttacaacattatctctgaacatgaattctta

SEQ ID NO: 357859 - DNA, 629 bp, Cannabis indica
cggtttgatgaacacctctacttttaattgttcttgtttttttattttatggttattttataaaaagatagtatttttgtaaacaaatcccatgtgacagtaaaattgtaaagttttacccaaaatctagtacttttgtaaaaatttctttattaatttgtcaaatcagtcaaaaataagattgtacatcaacaggaacataaaccctattaaacactcgatctagaaaagaacaagatgctctaacaaactatgagcaactatgttagtagattgtttaataaaaaataaggaaacattatttaaagatgtaagaagtttacgacaatcttctataataactccaaaagaagaaatcataggtaatgaatttcgaatattatggattgttaccaagcaatctgactccagctccactttccgccatgtttgagttttaatcaagcttaatgctttctttatcctatttgcttcagtcaaatttagattgcctataccagtaaaactgtccgacttagccatcactaattccccttgagagtctcgatcgactattccataactaggactgagcataaaatacagaatactgaaaaaaacccgttcaaaccgacctaccgaacaccgtt

SEQ ID NO: 357860 - DNA, 651 bp, Cannabis indica
tcctccttagagttcttctcctcttccacccgacaaaggacagctcgaagagacgtcctttaatcttgaaggctattcacttctgcagataaggtttcgatggtctcctcaagtcagtcagaagcctcgagatccttagtcaactcagttattttcttctgagcagtaaaagcttcttgttgacttcacccagctccattcaaatagctccaagttccaccctggcgtcatcggcgtccttccttgccaagtccacctccgccctcatggtgttggacagagtcgcgttcttgaaagcagcagacttagttcgggagtatgtgtagaaaacttcagaccagcctgtgcagagaaaaaactttaaaatccaaaccaaacaaagaggattaaaggaaactgtcaagaaaggcttacccttgtgaattccttcaagactcctcccatcagcagctccaaagaagagtcgttgtcagcaccggccagttgctcactaacctcaggaaccaatcggttcatgtagtgggcgagcatctccttgcctttcttggcctctggaagcactggcaaaggaagagtaggagcagtaaataaccataagtgtaaagcccgcttagttaatttggaaattatcagttaattatgattaattat

SEQ ID NO: 357861 - DNA, 517 bp, Cannabis indica
aatcagattgtaaagggttttatttatggcacaaaacccaacagagcaccccttggctggccagcggagaacactccctcctcgaggggagcgagccacttaaaggtcaatcttcaatcgacatggaccgagaatgggtggaaacacccaaagcgacaattttagaaggcaaattaatcttttcaggtacttagatccaccaaactctagtaactggtttgatctacctcctatcaatgcaccgacaacatcaaccagtaggggagttacgggtagccaaacaatacctgatgtaggtataatgccttaaataattagacacgctacccaagttatttgcgaaaccctaatcccttaaacgagattactaaccaaaatagcacagaaattaaacttttgcaataaacggaatgaaaataaaacttgtaataatttaaactttacaacagttgggatcccaaaattatttacaaactttattacaagtctctttcagttagtcggcctaagcggcaaa

SEQ ID NO: 357862 - DNA, 754 bp, Cannabis indica
aaatgcgatggatggctagtttgatcacatggataagttaagaaccttatttcttagtgggaaatattgtagagaaaataaaatatcgggattaagcggggttatggagtttgaccattttacccctagctttagaaatatttaagttgtaacctaaagggcattttggacattttagatggtggattggtggctgcctaggggggtgacatgtggcctcttttatttcagaaaggattaatttcccaaaccttagtttatttgaggaaaattaaggaaagaaggataattagaaagaaagacttttctcttggaactctcttcctctctctttcagctgagacaaaactttttctccccaattttctggagttaagctaaggattcaaatggtcttggagttaaggtaaccctagaacctatagttgtgtgttttaaagcttttactttggttcatgttatgaattttgtgaaatgagggctgttagggttaggtttatttagggtttgattttctaggttcatttgagttgaatatagccttgagcagctggttttgatgtttggacttagttttgtgcaagtttaagctttgatctctaatggcataatttgattcattgggtttttctatgaaatactggttggaaaatattgtctatgcattgtttaggcactctggaaagtttggtggcatttggtggaaaattaagcaagaggtgaaggatttggggtgaactagtgcaaaccggct

SEQ ID NO: 357863 - DNA, 384 bp, Cannabis indica
ttacttgtatccttataatgattatggtttgtaactaccacccatatacaaattttgttattttgtctgcttcctcatgaataccatacaaaatgataataataaacattgttacaaaaatctaattatggtaatttgactcattaatacatccaataaattaaagtaacaatttggatgattttatgtaaatgtgtaataaaatgtgtacatttttaaatttatttttttttgcacattttttgtaataaaattgtttttattctacactaatgaaaaaaagccctacaaaataatcgaagagataggttatttttctcttcagttattatgtaataaccgaatacttgtaaggttgctcattttttatttatttatttgtat

SEQ ID NO: 357864 - DNA, 630 bp, Cannabis indica
ttctggacggatgaacaaccaaacagagcatgtgctaaggttttctcatgattatggcagcgacagcatgtatgagaacccactattcggcggtggtagaggtttacacttgtaacgccctgtccaacagggacgccacgtgtgtgtttttataaaattcttatttgaatactatataattataccaaaagtgtgggtaattaaatttttgataattaaaatcaagcatataaaaacttatttatagtaaaagataagtaatgagaactatgggaaccttctgttttcaaaatattacaaactagtttattagtatttttacaacataaactttgcaatccaaaaatactatcaaaatggagcatcctgttcactgggccgagtcgctgcggctgatatgtacattgctgctacgacctcaatctcatggctggtcaacctttgcttgccccttacctgcacaataaagcacctgtgagtcacagagactcaacaagaaaagtgaataaaataataaccagtaattttcagcaattcaatctcaaattaacttgcatacacatttacacaatattataaacacaattctggtactttataaagtacacctttaccactcattaatcacga

SEQ ID NO: 357865 - DNA, 544 bp, Cannabis indica
aagatatggcttgattgtgaagaaataggatttaaaggtttatttattaattaagagattttgtggagtctaattaataaataatataaatgactattttatttgataattaattttaattattaaataaatagttatggcatttataggattggaattgcaaaaagtgatatttgttaaaaatagataaatgattgagaaaaatggcaaaaatctaactagtgatgggcccacataggggtctgccattaggttctattttttctattattttatcattttttattccaaagaatttaatcctaaccctttgtgaattattataaaaagaaaagaatggtctcataatccaactaatgactcttgacctagtttttatcttgtcaaacaactagagagtttgagacttcttcttcttcttcttttctcttcaaattcaaaattcaatagtcttcttaccattaaaaatcagcctttagtgattgagtgcatgccctcccatagcaagttattcctcaatcatagtgtgtaagactgtgaagaa

SEQ ID NO: 357866 - DNA, 1270 bp, Cannabis indica
tgttaatcaaacatacttagtagtaaatctagatcctggtaaaatattttcaacaggttgcgattggatatcctctcttatcttatagcaaagttaacgcacttgaaaattttggggaaaataccaaattatatttttgatgaattgttgaaatttcttaaatttgcatttccgaaggataacaaaattcttgcaacacactatgaggcaaagaagaaattaggtaaattaggccaagggtacgaatcaatttatgtgtgcgtgaataattgttgcttattttacaatgagcatgcattcaaagatttctgcccagtgtgttggaccagtagatgggttaatgatgagaacacaaggggaaaaaaattagcgcataaggtgatgcgttactttatgttgactcctcgattgaaaatattatatagttcaagacgtacagctaaagagattgtttggcatcgtactgggcgcatgaaagaaaatggtgttatgcgccatcctgtcaattccgctgcatgcaaaaactttgatagcagacatcttaattttgcaagagatctgcgaaatgttcgattaggtttagctgctgatggatttaatccttttgacaacatgatccaattgtataatatgtggcatgtagtgttggcaaattacaatatgccaccgtggatgtgtatgaaggataacaatttcttgttggctctccttattcctggacctaaatcactaggtaaggatatggatatatttttgaggccactagtagatgagctgaacgaattgcggactaacgggattgaaacaagagatgctacaaacaattcaatgttcaagttacgcgcagctcttctttggacagttaatgattttcctgcctgcagtagcttgtctggatgaagtggccagggatataaagcttgtcctacatgcaacgacgatactagttccattcgagtgattggtaagacctcttatgttggccatagacatttcttgccatcaaatcactgtatgagaaagggccgcaaatttgatggaaatgttgagaagagacttcttccaagatgatttacttgttctgacatattagaacaagtgaatgtgttaccacaacaagctatgggaaatcgaaaaagaagtgagactgaaagtaattggaagaaaaaaagcattttttatgaacttgagtattggagtacaaatgagttcaaacacaacttagatgtgatgcatgtggaaaagaatgtttgtgatagtatccttggca

SEQ ID NO: 357867 - DNA, 1094 bp, Cannabis indica
aagatcaatatcggtccgagtccaatgtatactccatacatctgatactagcatactttgctgattttctagaaagaacataacacttatccaatgtgtaaataagctttatcgctgacaatcacatcaatgtaaatccagtgctctgatgaatcaagggacatagtcttctgaagcatataataacaattaccttccactatgttgacatcactgtaattgtgaataaccatatgttgcagacttaacagaaattgtatacattgaaccataaacatgaaaactatatgtaaacataaatgacttctaattttctattgctaacaaatcagattatattgtaataggttttatttagggcataaaatcccaacaaaaatgtgtgctgaatttcaactgagtacccatggctcgatgtagacactcccaaaatcttgatgtgaacttcggatccctctcagaaacaatggactttgggacaccatggagacgaacaatttctctaacatataactcagcatactgattaatggagaagtttgtccgaatatgtaagaagtgcgcttactttgtaagcctgtccactatgacccacacatagtcgtactgtcctgtagtcctaggcaatccaaccacgaagtccatggcaatgtcttcccatttccattcttgaagattcagtggctgcagcaaccctgcagacctctggtgttcaactttcacttgctgacaagttaaacacctcacaacataatcatcaatatcattcttcatacctggccaccagaacatgatcttgagatcttgatacatcttcgttgatcttggatgaactgagtaacgagtcatatgagactcatcaaagatctctatattaatatccatccataggcacacaaacacgattcttaaatcgtagcattcccgtgtcatccactgtaaaatcacttgtcttcccagctgaaaccctatctcagaatttctctaactctggatcttgcaattgtgcttctttgattcactccagaagagtagattccagggtaatactagccaattaccccacaatgaactcaatttttagctcgggtcat

SEQ ID NO: 357868 - DNA, 639 bp, Cannabis indica
aaggagagaaagagatccgggttcagatcttgataatactctgcgacagaaaggatacaagggttagagatctaacgaaaggagtcatattatttcgctgcacccaatgtaaggtttctcatactttatatgtatttatttcacatcggcccctctcaaaccagaaggaaaactcagccaagctcccttttttctgtgttttcagctaaagattcaaggaggaacaatcaaggtaaaccctagctttccttttaagtttttgaagttgtattttagtttcaagaggtgattttgggttatgggggctgttagggtttgatgcttgaatagttcgaattctagggcttgtatggattgattttagttcatagcagctggttttgaggtttattgtaagttttatgcaactttgagctttgagttcaaagctttgagctttaatggcaacttgggttttagtggtttgttctgtgaaatactagatggattatgttgtgtatgcccttattaggtactctggaaggtttcatggaaattggtgaagaattgagaaacaaatgaagagctttgggaaaactggtgcaaaccggctagccggtttgcagtgccacaaaaccggctagccagttttggcagggt

SEQ ID NO: 357869 - DNA, 741 bp, Cannabis indica
caaattacttaaagattatggtatatctatattagttttgttaaaaaaaaaatatttgaaagttatgttgattttttttaattttttatgagttattgtgggtagttggtatataaattttgttgtacagtatatctctattttattgtatagtattattattcttagatgatatttattttttattttgttatgtataatagtagtactatataattttgttagcataatacaaacattttaatgtacgtatataattttattggcatgctacatatatttaattgttatttttatatattttaattgtatgatatatgtttattttaggtaatattcaattagtagtcgagtttccgaaagacttttgtcaacgtaattttgtgccaaaaatggcaatcatttgtcggtgacatcatgtcgcgacaaaagccatattttttttttgtgccaacagagcatcggtgaagattcatctttttcagacgtaaaaatacgtcagccaaaagtgcactgaccaccgacaaattatggtcaaaaagttgacttttgctagcacatgtacaaaatgcatcagtaaaagtcgatttttttgtggtgacaagtagttatttcaatcttaagtttggctattttacgatttaatattggatgtcacatattttatcctaataattgatattaaaagggaaatttgaatttctatacttacaataccttaaaattttatccctaaatgca

SEQ ID NO: 357870 - DNA, 757 bp, Cannabis indica
ttttcataattaaacataattaattgctaatttccaaattaaactaagcgttctttacagtttaggttgcctaaagtaaacatatacaagtaggagatttctaagatcggggatttatatcattttaggatagaatgtcgggaatatagtcatttgcgccattcaatttcataagagaaattagagtgatcttaagaagataatttataagccattcatccaatgatatactatttaaacaaattctaaatgcaaaagctaagaggaaaaactaaaggataattttgattaaaataagaatctaacgatgtaccgtttaggtgagagtcaaagttattcttattttaataaatgtcttcattgttttatattgtaaatactagtctaagatgtcatcttttgatgtacaactagatattgcctttacaaatactaatttgtcatgatcaaacactattatgtttgtctaatggatgacaatcctttgagattcgtcccattaaaaacaacaagctaagttagaccaacaatgaagattcaaaatcatactacaacattaataacagaaaatcacatggttcaattaaaattcatacacattcaaaaattatcatacattagaaagtaagaaagacatgtaagaacacaaaacaagcacatcttaaataatttctaaggtttccaataaactgatacaatgtcccgataggcgagagtcaaagatatcatcattgaatagagcagtcaactcatctaa

SEQ ID NO: 357871 - DNA, 558 bp, Cannabis indica
tggccaagcaagcatggcgcattataatgaacccaccatcaattttggcacaagtaatgaaagcaagatattttagaatatctaacatcctagaggtagacaagggttcttatccatcatttacatggcaaggaatcttatggggaagagatctattattaaaagggctacgacgaagtattggcaatggtatgaatactaggacttttgaagacccttggttgcccagacctccttcgtttcttccaagttcgcgccctgcgtatgaggtggcaagagtgtcagatattatcgagtcaccagggaaatggaataatgaagtagtaaatcaatatttcaatgtatctgacgtagaatgtattctttccatacctttaagtatgtttaatcatgaggattcgtggttctggcactatacaaatcatggtagttactctgtggggagtgggcagggccggccctaggcataggcgggctaggcccgtgcctaaggcccacacttttcgggggcccaaaataaaaaaaaaaaatattaggcttttatttaagtaaaattaa

SEQ ID NO: 357872 - DNA, 530 bp, Cannabis indica
aaacattgaaaatacatataataaaattcgaacccaaatcttaacacacacatcagaataaaaattaaactgttgaccgaggttttcggcaaccaatataataatgataattaagagagctataaagaattaagagagagagttttacgtggttggggcattaatgagccttagtccacgagtctgtgtatttatgatagtatttattacagagaatgtttttggtggatttttcctcttctaattcttatggaacccagaattctcgacccctgccttaatgagttagggatcgtggggtgatctctagaattgaggtacatgtctgtctgcaattatcagtaaaggcacacattcccaatgaatatatcataggaaatgcatggtctaatccctacggctttatggatgtagtcctttatcctttttgactgatgtgagtcctcataaagtagccgtcactaggctcattaatcatagcatagtagctgcagagagggggttgtgccgtcagactttaagatatatgg

SEQ ID NO: 357873 - DNA, 1107 bp, Cannabis indica
cttttctttattactttgcaagtaatggtgtatgagtactagtaattggttttttttttttttattattagatttttcccaaaacatgttcataattatgttttaagctggttggttattctttcccctagttcaaaaaataaaaatcaaaatttagtgcataactaacgttgtgtatcatttagtaaaatatatgtgacaagacaggtacacagaaagtgaaacaaacaacctcacctatctaactagtattgattctcaaggcacaagtgggcgaactatatactctttttctttttctttctttgggtaccttggcaagcttttagcttcctatgtatattatagctcatcgcatcatatggtatttagatagaaaaccaaaaaaaacttaagtttgattatgatataatttaatttacaaatctattttcaagcttgaaggatctggcagtgaactatgtgactcctcaagcggttcctaccagcaaggcttgaccacagatttgtgaccaaagtcttgaattgaccttttcctgctatattttcccataaatgctctgcggtagctccatctacatcgttggattttgaaacgtccaccaaggatatgctcatgttatttcgaatgatgcccaatttaccatttaagggaacaagagcagctgcctccaatgcctgagaattccccaaatgcatcttactgtcaatgtgtttgctccaagaatcagttacttcgtcgtaaactcgaagtttgcagccatccttgcattccaaggcgtagaggtttccatttaaagaagcactaggattcctccaacctgcgaccattccgtcgtacacagggtaccaactgttgttttcaggttggtagacctcactcagaacttgacgatgagagcccagccccttcaggtaccatttcccttcgtatacaaccccaatgaaaggtaccattgcagtgctcatatctgaaatgaaggtccatctgttcttgttgggatctataaaacttctgctgatctcaaggacctatgaatcccttcattctccccaccagcaacatagaggcaattgtttattaacacatgagccaaaaaaaatgtc

SEQ ID NO: 357874 - DNA, 2400 bp, Cannabis indica
acaccggaagagtcctcaccaagcactcagaaacccaagaccagggaacccagccctatacggtacccttccaaggaaaaccatgggaaaaatcccacttcaatccccgagagaaagaaaaaggtgcaggatccacgaaaagttcactcagatttcccaaaagggaaaggtccgcagaggggtaagctccctagagcgagttttggccctcaggatcgagaggaccgaaagagcgtatccgtgcactaggagcccggagatagaggaaggaaaaatcggagatatcctccagttgacttaagacaaaaaatcaacaaaaaacacggtgatcaacgagatcacctagacaacaagaaacatgtaccagcggtctccacggggacactaaatgaaggaattctggctgagttggcaacgctgcacaaagacattgctagagtgtctcgaaggcaaaaaggggacgactcagattctgattgcgaggaccgagagccatgcacccggtgcatattgaaggcagagctcctcaaaaatttcaatatgcccgagaaggcagcgtatactggagactcagaccctagtgatcatttatcccgtttcaaccgggtaatgacagtcatgagggtccgcaatgatgccaagtgtctatgctttctgctaacattaagtggttccactaaggaatggttcaaaaagctggaacaagctgcaagtcagcttccggaggcagttcgtcgcagtaagaaagatcaacatcgaagtcagcgctatgattaacataaagaaattgcccgcagaaaccttaaagaacttcataaaaaggtttaaagaggaagctccaagaaggtggatgaaggacaacatcttgcacttcttcaagctaggattcgtacggggaccccattctggaacgaattacaacaggaaggagctgccaatctccaagacttctagaagagggtccaaaagtacatcaatttggaagaagcccaaatagtggcctacgggggatactatccaaccaaaatgtcaggatatgtacccggagctcagctctcgggagctatgccccagaccacttctcaaatgagcggcataccattctccgctacaccaggatataatcagagcctagccttggctcccgcatcatcacattttgggaaccccgtaaacaacccctcggggatgggtggcaagctccatctcactccgctcctaccacaagcccgacaggacatcctcagagctcccagagcaagaggtcctcaaagggtagcaaccggacggaagataaacgacaacgaaggggagacacccctcaatatactcaatacacggagctcacggacacacaagagcaggtatattttgccacaaggaaaaatacacattactggaatactcctcccctgtatagagacaattcccgaagagatcctagcaagagatgtgaataccacaacgacattcgccacagtaccaatgaatgccaaaacttgaaggacgagatcgaaaacttgatttgattgggtcatttatattaatggattaagaactggctaccccatctcaacccggttccagcaggtggcccgttgccacaaggggcaccagggggtgcacccggagcgccaacacctgttgtacctcccgggagagcaatccctcaacaggtccctgggttcccaccaagacccaatgggagagtggccatgatctccggtgggtgccatattgggggaaccaccagaaaagaattaaagcgctatgctagagccataaaacatgatgaagtgtgggaagtcacccagcttccagcacaaaggccccgacttatggaccagcccattactttcatggaagaggatgcgaatctggtgcgcttccttcaccatgaccctttggtcatagagactcatatcgccaataaaattgtggcaaggatattggtcgataatgggagttctgtgaacttgttgttcaaagaagccttcacagccataggcctcacggacaaggatttgtcgcccagcggctcctagctcataagattcaatgggaccacccttatcctaatagggaaattgagactgccagtcaccctgtgcctagataccactcacaatacttttaagtacaacaccttcgtggtggtagattgcccaactgcatacaacgccatccttggctgactggccctggtcgatttcagcgcaatcacttccattcggcacttgtgcctcaaattccctactcatgaagctagagtagggacagtaaggggtaatcagggagaggccaggcagtgctataatgtcgcaacacatttgccggtgctggtggtgttggaatttattttaccaggatcttagatctactcacaagtatgttgattaa

SEQ ID NO: 357875 - DNA, 173 bp, Cannabis indica
taaaataatttccaacactttgtccttactcgcacgcttcttagaaaaacttcttaggaggtcacccatcctgaaattgtccccggttaagcacgcttaattgtggagttctttcgtgatgggctaccaaaaaacaagatgctccaagtaagttgtacaatcccacattgcgt

SEQ ID NO: 357876 - DNA, 873 bp, Cannabis indica
atatatggtacttaatacacaacaagtgtaaatatatgcatatcttaattgaataagaggggaggtaacccataccccaattggcttattgagggtcttggtgacatgttggaagagtgtagtttgcttgatatggagttgtgtggctatcctttcacttgggagaaaggcaagggcactaattcatggattgaagtccatattgacagggctttagtctctcaaaactagatggatattttttcacttgctaagcttattaatttagaagtgtctacttcggatcactgaactttacaattattgttgaatgtggagaagagatttgtgtccaaaaaacaatttcggttcgaaattttatggctccgtgagcctgcttgtttgcaaattgttaaggatacttgggaacttttttctgggtgctcagttatggagaagatcagttcttacggcgagaagttgctggtttggggaaaagattactcaggtaatttcaaggaacgtattcaggcttgcaaggctgagataagaagatggaagaaaggcagagatgacgtttctattcagaattataaggcggcagaggctcgattacaagatgttttattgcagaaagaaattttttcgcgacaacgttcgaaaaaattacggctaagagagggggatcaaaactctaaatactttcatgctatggccacttcgagaagacataacaactcaatccagaagctgaaaaatgaacaaggtgtatgggtcgactgggagaatgatttgtctgggcttatggtgctcggttttgtgccttaaataaaactctatttcaatgtaatttttttctattcaattatcaataaagaaatagatttaatttca

SEQ ID NO: 357877 - DNA, 843 bp, Cannabis indica
aattgatcaataaaatcaattaattgagtctacaagataatattatctcaagtagtgtaaggacaatgggcatatataatcaagctccaacaagtagtattagaatttactaagtaaattctctatttttattaatttctcctgcttccactataaattcaaaattgcacagttgattcaatagatagttctataccaagtatagatacgctataaattattcattattttaatctaaataatcaatgatcctttatggatgatttacattgagtagggagaaatttattgttttactctttaatgtattttatccttaaaacacttagtacttgcaaatgatattccactaaattaatataattactaaaatgagtactccaccatttaaactcatttagctaacctctaaggaaagtatcgtttcacttttatgtgattaaaaaagttatagattttatatctatgattagtgctcccactaaattgcactactataattctcaagatgtaagtgttgtgccaatctacttagttagctttaacaaacaggtgaaagaacacatgtaatatacttatggcatgtttactaaagcataatcgttatcagaataaactaatggaagaaatgaaagggaataaaatgttatagaacagaatcattattttaacatgttgtttacctctacatagctcacagacaatctaagcttgttttgcttgcagagctatcagttttgttagggcctctacctgggctgtcaatttagtgatggcatctacttcatgcataccagccacctttttagattgactcctttcagttggccactactgattatt

SEQ ID NO: 357878 - DNA, 825 bp, Cannabis indica
atagtaaataaattaccactatgtgtacttacatagcaaataaattttacagcaataaagtattatatattttggatgatattaatgtcttactgcacgttttataattatccaaagttgtcatagactatcaaatttagatgagatcgacggtaattgagatcgttcagatattttttagtgcaaaacttttcatctatttattatgtatttttatttgacaaaatttattattcaatattttatttgataaaatttttcatttaattattattattattattgcatgtattattttattgttcactattatactttatgtaatacaactatcaatatatattaacaaataaaaatttaagactttccaccacaataattataaattttaaaaattttaaaatattaaaattgttccaaaccctaaagcctaatatctctagatcataaaatgtaaccagatttatcataatatctctagcaagaacaaatacataaaatgtaatcagatttatcatactatctctagatcgaattatcattaagttttattttgataaaaaaactaattcagggtcctatttgtacaattttaaaaaatacaggattcattttatcatttaataaaacagagggactaattggtaacttttataaaacacggtgtctaaaatggtatttacccatatatatattaacaaaaaaaaaaattgaagattttccaccacaataattacaaactttaaattattacagtataagaattatttcacactaataatgaaaaaatattgaagaaatttaaattattgtttggaaaaaaaa

SEQ ID NO: 357879 - DNA, 533 bp, Cannabis indica
ttttttttttttaagtttttcattacgagatggatattttctactagagatacttattttaggtaggaaaaataaacttaagaaaataccacaataattgtaatggaaaaataaaataaaaacctaaactattagcatgtatatagaaattaacaacaattaatcaaaataataatgaacaaaatgtgtatgtatacctgttatatatatgtacatttcttcttgacatcttctatgtaaattgcaaaccaattgatttaaaggagaaaaaataatgagatatgagagtaaatatatcatgagcagaaatatataatgagaaatattaaaaatttctaaaatatattagaatatataaaaaatgtgtaaaaccaaaataatcctacaactatatataatagtttcatattcccaatttagaaaaaaaaaaaaccaaaaaagataaatgatgtgtgtaaaggttggaatttttaaaattccaaccaattaaaattttcaaaaaaaaaaaacccataaaattaggctaaaactaa

SEQ ID NO: 357880 - DNA, 834 bp, Cannabis indica
ttttcctttttgctgaaatcagttggcactatacccgaggccaacctcacccgacgattaaactgggtcgtatactctttaacactcatgttttccttctcggtcaagtgagtgaactcttttctcttggcacttttgacggcctcattatagtacttaacattaaacagctcctggaatttctcccaggtcatagtagtgacatcatgtatcatggacaccatgtcccaccaaactagagcatcctcttgaaattgaaaagtggcacagaccactctatcatttccagtaacgcccatgaaattcaagattcttgtaatcatttttagccactgctcggctttcataacgtccggacctcccagaaaaaccagaggtgcttgcttgtagaacctttcatacaagggttccattcggttcgttgccacaaccgattcggcctgcacaacaggggcgggtgccactggtatctctggaacaggcactgcaggagcaccctgctgtctcaactaccgaattacttcctcttgttcattgattttagcttgcatttctacaaacctattttcccaattctgggcttcctgagtagcttgggcagcctgtggcgggttagcatcaccccgccacgtgccctgcccctgggacctctaccccgaccctgagtatttgggggaaattgagctccctgccttcatttgacctgaccgagttgccctggctcctggtatgtcgcctggcgtccatttagactgaacagcctgcgtaaccatgagctagtctggtcagatcatgatcaacgagaagttactaatgccgcttacttggaaatta

SEQ ID NO: 357881 - DNA, 591 bp, Cannabis indica
ccagaagaatagagtgaataagttgagctctagcagcaaaagacaaatgtctactagcccaagtgtgtaatagttgtttgatcttcctgtgaaccacttcacaatcagtcactctccatttattagggcttaaagggactgagattttttactggaaaagtagtctcttcttcaaagctgaactctccaagaaaaatcatcttaatatcatgtgagacaccgctaacataaacatgagatttctttttattggtagataacactgaacaagcacataacacataataagccttattcatttcactaacaacattaaggatacccttacaaaaaatcacaaaaccatcaacaaatcagagattaacaagttttaagcttttacaaagaggatgtaatttgaagtccttgctacgcgaagcctttagcaacaatctagtaagtattccatcacaagaacaaacaataacggagagaatcaccttgtttcaaccctttcgcaccttcaaaatggccttgaattttgtcacatcataagggaataagaagttccttgtaaacaatgttagataaattaacaattaacccaagatc

SEQ ID NO: 357882 - DNA, 1497 bp, Cannabis indica
aagcgcttaatgcatcggctgcaagagacgggagaaaggagctcatctttcttagccttcttcaaggcttggtctttaaagtccttgagctccttcagctccacggccaagtttgccctagactccaagtccgcctggtgcacttcctctaaggacttcaccttggcggccatttcatctaaggcttccctagcctcccggagctcgcgtttggccttggcaacagcctcgccctccgccctcagctcctcccggtgcttggcctccagcttgtccctccgaagggtctcctcccggatcatcgcctccgcttgggcttccctccgcctggcctcttcctcgaacttggccttggcaagggcctcccgccgctcagcatcctcttggaacgtccgcctttcagcagacagatcctgcagggtcttcatgacttcgtctatgcccccaaattcggacaagacgaagccatggttgattaggttcttggaaaggcggccggcctctgcagcaagctggaaaaggatgcaagagtgagtaaagtccttaagaaaaataatgaggaaaaaagtaaactacgaaatacttaccacagtcaaggagtggctgagatcctgaacttgaaagacggagttcaaggatgcacaagcagcgaaccgcttgggcgcgcaccgggttagctgagacacaaactcgccggtcatctccgcggcaaaaggagccaaggtgggcccgaggaaacgattgaaccagtccgacagggggtccaagtttagatcccacgggttctggtagttctgatcgttaagggtattttgcatttcatctcgcaaaaccctcctcaaggcctccacatcggcatgcccccgggagtactcgtccatggcatagttatgtttggctatccggagctcctgcctcgcctaccagaagggatgccgaaatcagggccaggggtcggagtgtccactctccgctgccgtttaggcacctgctcggctaccatcttgcccttacgcttgcggatcagagtaacctcttcctcttcttaaccttcttcaacttcctcaggaagagcccattgctcttcttgaccttctttagcttcctcaggaagcgcctcctcctcatccactaagtcaatagtgtctggaggggcattggaagaagctttcatgggagtggccacttgggaagaagttagaggaaggggagcgtcaggagtgtgagctccgacaagggcggcaaagattgcatccatggagttagctgctacaacaatagaaaagaggcaagtgtcagaatctgtgaaaacagtaaacactcaaaaaagcaatcaagctagtcctaccctgactctctaattcggccctagcaaagttccgaatcttaatgctggctgcatcatccccgagatagctgtccgagggccggaaccagctagaataaagatatgccaaagggtccaagggaacgggctccggaggtccagagcccatc

SEQ ID NO: 357883 - DNA, 1150 bp, Cannabis indica
agaaggaacaagactttcacgagttggttaacgaccttcagacatttgaaaatttgaggaccgcaaaagaaaggatctaaagcccattaattctggaaatgctaatggggcggctaaggccgaggcaaactttccctctacttccaaacccaagaacaagaagaagtgtaataatagcaagaagcctgttcaagctgtgaaaacagttaaaaagaaaaaggttgttactcctggtgatacaccaaaaggaaaatgcttctattgcaatgaaaagggccactggaaatcccaatgccctaaatttctagcaaagaaacaagctatttcttttcatataaactgatgagttttagagaattattatctacttcgattattaattctggacctactaaccatgtttatttgtttttcttcttatttcaacttcagctgcttaaactcggatgctatcttagcgagttgaattggatggttggacagatgagtggagctagtccaagatgaaaatgaagctcaaaatcttcttctattattttttaattaattgttttagtttaagaacaatttggatttcaattattagtttgagatttttattctctatttttcatattcttacagacaattcttttttttttggagaattttataataaagttttctattttgagaatgaattgtatttatgaattgagcttcatttactttatcttgtgtatgccagtaccaattatatttatatattttattatttatatgtgtatatgttctattattgacaaagttctatagtatattcaactctggaaagagttaatactacataaacacttagaatcttaattctatgtttatgaataattgttaattctaaaacaattattaagaatttgtttaatagaaagatcttttgatctgataggggtggaaaaagttaagaataatatgcagttcaacgatctttcatatctattgaactctggattatattcataactccacatgatccctataacacttagggatggaccatgatctctatatcccttaggggtggatcataatctctatatacttaggggtggactatactattgaaatatgtagttcattttgaactctgtactatactcaatacaccacaata

SEQ ID NO: 357884 - DNA, 533 bp, Cannabis indica
ttaggtatgatgtactcataagccaacttagtttaacattttatagtcaaatttgttaatggatgaataccaatttagttcaaatgctaagaaataagaagcttctgtcatgaatttgaatgatatattattaatgcaatataaatagagtgactttttttgacagttataaaccgtcatttaaaataacttttttcgtctgttactattcgaaggaagtcttttcccacagttataaacactcacttaaaatgactttttccaacagttgtaaatcgttatttaaagtgacttttttcaatagttataaaccgccatttaaagttctgtatttttatggcactcacatagccaacgattataggaaccgataggaaataatataaaagacagttataaaccgaaaaaccaatttaatagtagtgctcatttacagatcgggtaattaatcactctatattaaaagattcatttagaccataataataaattaaaatatacatgataatgttttgtatcattttcaattaaat

SEQ ID NO: 357885 - DNA, 756 bp, Cannabis indica
taccataacgacattgggcacagaaccaatgaatgcaaaaatctcaaagacgagatcgaaaacttaatccgattgggacacctctacgagtggatcaataatcgtttgcgtcacctcaacccaggtcaggcggctggaactttgccacaagtaacaccagggggtgcagcaggagtattggctccagttgctccccccggagatgctcagcatattcccggcctaccacctagacctaacgggagagtggctatgatctcgggaggaccccacatcggagggaccacccgcaaggagctgaagcggtacgcagggggcgtgaaacacgatgaggtttgggaagttactcaactcccagctcaaaggccccggctgatggatcaacccatcacattcacggaagaagacgctaagacggtgcgttttcctcagcatgacctgttggtcataaagacccccattgccaataaggtggtggccaaagtcttgatcgacaacgggaatttcgtgaatttgctgttcaaagaggcctttacagactggccttggtggactttggtgcattcacatcaatacggcacttgtgcctgaaattcccaacccaggaagctggcatagggacggtgagaggaaatcaaggggaggtgaggcaatgctataacgttgctacccacctacccgtgctgatggtccgagaaactactgagccagaaatggatgaagaatacgagttggatcctcgcatgggatccgaaa

SEQ ID NO: 357886 - DNA, 545 bp, Cannabis indica
aaaagaaaataattttttttaaaaaaaaaacgtgtaacaataaaattataaatttttatttaaaatttaatatttttgtaaaaacccttttatttttaagttttataaaatttgtagccttttagaaaatataaatagtgattattataatcataaagaataggaatttgtttttgtggattagcaatatggtcatgtgtttgttgggattaggtgatttttagatttgacttggttggtcaagatatcatatattaaattatctctgcaaacataaaatacatttgatgtaatgccatatttctacgtacatattttgatattatttatagcaaactattaattatccgtaaataagaatgaatttgtttttagcaaaacaaaaaaaattactttatatattgtttttttaattttatgtttaaaaatttaccgtttgaatttctaaaatgactgcagcgatagttgtaatggggtttctatacgattttttgttgcaatttaagtttcagcgctaattgcaataaaaatttctatgtaaaatt

SEQ ID NO: 357887 - DNA, 436 bp, Cannabis indica
gggcacaaaacccaacaagatcaacaagtgatattgacttagaaagatataacagtaagattataatatctttaccaagatcaatatcggtctgagtccaatgtatactccatacatccgaaactagcatacttcgccaatatcctggacagaacataacacttatccaaggtttaagtatactttatcgctgattaatcacattagtgtaaatctagtgcactgattaataaagggacactatcttttgaagcatataatcacaattaccttccactgtgttgacatcattgtaattgtgaataactatatgttctggacttaacagattttatacacattaaactattaacttgaaaactacatgtaaacataaatgacttcttattttctattgataacaaatcagattgtattgaaatcggttttatttagg

SEQ ID NO: 357888 - DNA, 525 bp, Cannabis indica
gtaatgggttttatttagggcataaaatccaacagtatgtctatttgatgtcccaatgtaagttttgacccttttgcactaagacggtctcagaaactgaaatcctagttgggaatgtcaacttgggtgccaggtgaaaccctaggtgcctaggttggcttcgggttgcaagttgtataatattagctcctgaggcttagattaggtttctcgatctattcatggtacaaaatactgaaagatagtgagttagattcaagttattgaagtctaaacttctatttggagttctcaaagtcaacctgggcgcaaggctaaggacgcctcccaggtcgacctgctacgactcgagactactcaactctaagatgtcatctttctttccatgtatcaaacattgatgttcacatcatcaggactactcttggtgtaaacaatgttgttttggacatctttacgtgtctaataaaaatgtttaaatatttccttttccaattaggtattaaattttattttaagaaaaaa

SEQ ID NO: 357889 - DNA, 548 bp, Cannabis indica
tggggaaaaggagtgttcatgatatctggatggtacggctttggctcctcgtcagagtcgtatccaaattgtcttcctaatacccccacttgatttcccctgaacttatcctccaactcgtttattcacaattggataggatcctcttgctttgggccaagttgttggcgaagataaggttttttctaattcaagtgctctcgcaggtccggttgggagtaattgctaatagtccttcttctactcacagaatgtgccctacttacagacctcattttactcattgacctcatcctcaagtgacttgcggatatactatttcccgtgctttcttgataattagcccgacgagcactctctactcctcgagttgatcgactgtgggtccttaaatgctctgaggtcacactttcttcttcaagctctattcttcccccctgagcgtggtttgttgtatttctcccactgggtttgtacgagccctctctctatgggttcgagaagaacgatggtgattcctcaccgctgacctacattccccaggttgt

SEQ ID NO: 357890 - DNA, 541 bp, Cannabis indica
taaatagttatgacatttataggattgaaaaattaaaaaatatggcatttgtgaaataatagataaattgttaagaaaaatggcaaaaatgtaactagtgatgggcccacttcatggccggctactaagtcctatttttgctattattttatcattttttttattccatataattcaatcctaaccctaagtgaattagtataaaaagaaaagaatggtctcttaattcaactaatgactctaaacctagttttcatattgttagacaactagagagtttgagacttcttattcttcttttctctcttctaaatttgaaatcctattgtcttcttcacaaacaaattcaagcctttagtgattgagtgcatgcccacccatagcaagttagtcctcaatcatagtgtgtaagactgtgaggaatccaaacaactcaaggagtgtcgagctcagatcttgattatactctacagcagaaaggaacaaaggttagagatttgagtggaatgagttatttgattctgctgcaaccaatgtaagg

SEQ ID NO: 357891 - DNA, 818 bp, Cannabis indica
tttatatggtattttttgtgttttaggttttttatggtatttgagatgccatatatatgtaattaagttttcaaatcccatatttaatgtttttatttgtttagaaagttttatttgttattgatgccgaaaagtcaccggagtttgctgccggtgccgaaaaagtcaccggagtagcagtcggcgccggaaaagtcgtcggagttgctatcggcgctggaaatttcgttggaattggcattgtcgccggaaaaatcactaaaaaaatcaccaagaaactggtttcttcttcaagaaaccggttagaagaaaccggtttcttcttcaagaaaccggtttctttggtgatttttccgttaacaatgccaattctgacgatttttctgacgctagcagctactccggcgacttttccggcaccgacagcaaacttcagaaaagtcatcagaattggcatagtcgccggaaaaattaccaagaaactggtttctggtttcttgatgaagaaaccagttttttggtatttttccagtgatttctttgatgacaatggcaattctgacgacttttctggcgttggtagcaactctgacgactaatacaccgacaactactccggtgactttttcagtaccgacagtaaactttgggaaattcgttggaattggcattgtcgccggaaaaattactggaaaaatcaccaagaaactggttttttcttcatcaagaaaccaatttcttgatgaagaaaccagtttcttggtaattttttttgtatattttttttctctatttggttgattgatgaaactagtttc

SEQ ID NO: 357892 - DNA, 566 bp, Cannabis indica
ttggaaattatttgttctaaccaacacactttaagaagcaaaattaatgttatatgcaaattggtatttttctaaaatttattattttatgtatccacaaaataatagtgtattattaaaaataacacatacaaccttttcaggcccaataacattcagcagcccaagaagcaaacaataggagagtcaacactctcttttccaattcaatatttcggtcaaagcaagaagagtcacaatgactctttctctctccaatcaaacaccttttctcaagtaatggatcggcccagcaagtcttcagcccaagaaaactttctctcaccaatcaaggttaattccttttcttttattattggtttcggcccacaagactaaataagccctaaaagttttaaccctaatataaatggtaatgtctcaaaccctaacacacggcagccattttctttcaaagattcaaacttttcaaatgccttttctctctatctctctaacggcagaagctaaagaaaacctagggttagggttttctttatcttatcttcttcttctcttcaacacaa

SEQ ID NO: 357893 - DNA, 337 bp, Cannabis indica
cttgcttagtgaaaattcacataatagacatagtctaactttagaattataattgattaatcaaaatcaactaactgagtcttacaagcagtatctaattaaactttctagcattaacacaagtctaaaaacctaatttggtgtagtctaagagtattaaaataccacccttatcgactaacatatagttcctctttcgatcttaagatttacttaattatcttccaatatttctttcctggattaaactaatactactaataactcccactcaacagacggtgtctgatcgcatgcataccgaagcattcataagacctctcactattgattctta

SEQ ID NO: 357894 - DNA, 647 bp, Cannabis indica
acttgtataattattaatgaaaccaataataaggagttaattacttttgtttaaaaggaaaattaaacaactcgaaagatgcagattaacagtgctactaaccaaccgtatgagtttgactaataatatagtattcttttgatatttgagggtttctattgaaaagacaaaatgattgaacagaagagaagtttggtcacaaaagcctcaggaaagtaatactaataaggagacataataagagacaaaggaagagtgatgatgtggatttctagtcttggtcctatatgtcaaaacaaaacaaggtatcaatgacttctgcatcaattatttctatccaaacaaaaagaagagtttcctgttttccaatctcattagcagattaaaaacttaaaaccctaagtacaatacatgttttccaatgagtgaatatacataaaacttcaaagtgagcagtgcaaactccaaatctaatgaattgagtaacatttttgtaacgcccgtactttataataataaaatccgaagtctaattttcaaaattaatataataataattatatggatcgggatcccgagtatcaaaatactagttaaaagtattttactaatatgtacttatacattttttttttaaatttagcgga

SEQ ID NO: 357895 - DNA, 572 bp, Cannabis indica
atcctaaggtggttaatttctagcttaaatgtactatatgttgggatatattttaccaggatctagatttactaacaagtatgttcattaacaccctaaatatgaattctctaatacgataaaattaaacacataagagtttagaaaaccttacattgatgcagcagaaaaataatgactccttctgctcagatctctaacccttgttcctttctagcgcagagtaataacaagatcagagcctggatctctttctctcctttgggttggttaccaccgtcttccgcactatgattgagtactttacttgctaggtgtgggcatgatactctatcactatgggccaaataggtgaagaacaataaaggatgcttgaaatcactatagaaggtatctctcatctactagtttttgaagaatgaaaactagctttagcttggttgaagtgaattactggatgagatgagagcatcatgttccttttatagtaattcaactagggtttaggtttgaattatatggattaaaaagaataaaataatgggcaaaattacaccactagtggccggcca

SEQ ID NO: 357896 - DNA, 514 bp, Cannabis indica
gtactccaactcatggagacatataagtcccatcgtggtcctcatatgcccgccctactagtcccactaactagtagtagctcacttagcacaaaggtgtcagggggtagtggagagctgacaccagagtaccctcttaaagagcattctgagcttttaaccttctaccaggaacatacatgattttggctctgttgacatatgaccaaaccgtaaaccaaatcacatagcttcaccaatccaattgcaccattctattgtagatccaaataagtggcgaatactaaaccccgtcccaatccagacaatattgaagatatttacgaaaatgccactgccatacaaactaagcatcagcatgcacctcaacatgtgccaccacttgaccaccacttggacaacttgtgggcatcacttagcttgtaatgtgccatctgtgcacgtacgttactgttggaatatattttaccaggatctagatttactatcatgtatgttaattaacatcctaaat

SEQ ID NO: 357897 - DNA, 714 bp, Cannabis indica
ttgaaaatattttgtttagattttattttatttttgtttatagataaaaattgatatttatgtcacaattgaaaaaaaaaaatataagaaaagcattgtttttattaaaagataattatattttgaaaggaatatttttattaaattaatgtgatatatttttgtgttgaaaatattttatttagatttattttgttgttgtttgagaaaaaaaacatatagcatctataaaataaaaggaaaagaaagaaagaaagacaatgtcaaagttgtgatccaaagcattgaagaagtgtcatttttgaagaccattgctgagccaaaattagtgttttgatgtgtatcacaactacaaaaattccctttagaagtttttaagccttttcagcgtcggttttggcgaaattcactaccaacgctgatcagggcaacgctaaagggttttgaaaaatcgacgccatatatacccctatggcgtcagttattatctaggatccaacgccataggggtatctatggcgtcggttcctagataataaccgacgccatagggggcgtaggaactgacgccaaaaatgagcagtacttttcagttttttttaatttattataatttattttaattatatatttattaatttatatattattttatttaatttaaattacatatttattttttaaaatgtaaattaaatattatttaaattaatt

SEQ ID NO: 357898 - DNA, 548 bp, Cannabis indica
atgcaatatgtcgggcattgtaccttgttatgtacgagcgacagtgatatatggataccgagcgtaggtataggctcacctgattaggtgatgcaatatggttggtgtcacgggcgacctatttggactcccccaaataggtggaacgtgcggcacttgctagcacacccagcgagcaagtcagcctaaacgcacctacaggcaaacaagttcaaaggttaggcacgatacatatctcgcacatgttgagtgcaaacaagaagcatgagtaagcaaacacaaagcgtccccaaggaccaatctcacacaacgcacaagcaaacatataaacaagtggcacgcactggcccaaaaaaggcaacaaacatgcatcacatagaccatatagaagcatacacaagaagcatggataaacatcgttttattattatatggccttgatagggcaagggagtacacagctgggcccctatcatgctggtgacaaggtgcttcataagtcacctggtcacccccctaaagaggttattggggttttaagggatttc

SEQ ID NO: 357899 - DNA, 854 bp, Cannabis indica
tcgctctctttccaggacttcttcacctacaaattttggtctttaggcttcaaaataatcgtataaaagatcgtaacaaactcattttgtggaacgattcatagttccacaattatcgggattttgttacggatgttactaatacttattataataataaaatatgtaacaattacaccattctataacaatattattaatattactatattatatctctaataaaataacaacaataatataacaaatatattacaccataatataaaataaattcacataattattattgttatacccacaataataatatgcacaaaataaataattaaattatcacaagtatttaattatttactcaacattctcatacattgtaaaaaaaatattcgaactcaagaaatcaattttttttttgtcactaaaaatctcatatgtttaataaattttcttaatatgcaaattaacaaagtacctacaaaaggaaaaaaaaattacaaaattaccctttcgagaaagaggatattacaaatttaccgttctacccttcaatgtattttatctttaaaacacttagctacctataaatgatattttagaaaactaatataattactaaaatgaggcctcaattatttatctctagtaagccaagcttaaaggaactcatcatatcacttctaaatacttatagaagccaaaaaattccatatctatgattagcgctcccactcaattaaactatcattttccaaagatgtaagtgttcagccaaccagactttaacgaaaaaactttatgtaacctaaataatatagttgagatgaacctaactattggtgggttttatgccc

SEQ ID NO: 357900 - DNA, 672 bp, Cannabis indica
attatttttttatatttttaaattaaacaataaaaataatttttaaattgaacacatattaaaattaaaattaaacacactaaacatcatattcttattaatcaagagtacacatattttatattacacaacagaacattataaaattaaagcacactcaataatacataataaaaacattacaaacttaaacatacatttaaaaattaaaatacaacacaccaaacattaaacggaaaagtaataacacagatatgaaccttcaaagacaaaatgagatacaacaatttaataatgtggaagattatttcttgatccgccgagatagtcataatacggactataaacttgtgagtcattttcagctctttcaccttgatcttgagatcgttgatcttcatcttcaacgccatgtcccgaatcttgagatgctcgatattgtgacccctcatattgtgatccctgatattgagatccctgatttggatatccctgatattgagatccttctccttgttctccaacttcggatgtttgtgccctttctttgtaaattcgtcttttttcactttgaatgtacttatgaaactctggatcggatatagaattcaaatccgtgaataaaattttttcgtcagcctttcttctgtgacgttcatttctatccttgtt

SEQ ID NO: 357901 - DNA, 359 bp, Cannabis indica
cattgcttccaagtcgaatgccaagcaaaatggagtgtgtcccatcgctgttttctcttagttctattggcccaaagcacctgtggtagcttgtctacccaccttcctttagcaacgtctaacttctttttaattgtatcttttaaggttttattaacaacttctacttgtccattttcttgaggtctcaatactgatgagaagcttttaataattttattcctttgatagaattcagtgaatgattcaccattaaactgagttccgttgttagatactgttttgattggaattccaaacctacaaataatgttcttaataataaggtgaagaactttttttgtatgtgatggaaacta

SEQ ID NO: 357902 - DNA, 658 bp, Cannabis indica
tataattattatttaaataaggcaaatgagctttcacaattggggttgttcatgtgaggaagggttgggttcagtatgtcgtacccactactaatgaccccctaactatcacacaaggccaaaggagaggaatttaaccttaaattaaataattgttattcattgaaagcctaatactaattgggcctaaataaaactatcatggatgatattttattcattttataagcaacctagtccatttaaatatctagaaataaatgggctatctatatgcatctaagcctaaaagcaaacatataagcccacacaggtcaaattgatttggatgtgccctatcatatttctaggtttacacagatgaaagaaatacaaaatttaccttttacaaattatctataagatctattgacaataagactatgattaaaattagatcattagatctgtcaatgagttaatcgtaataatttaaatcagataaataataggtttgtaataaaaagttttgaataaacaattaaataaaaataaacacaatatccatgtaataaatgtgaaataaaatattaatataattaaattattattttaactaacaaactattttgaaaatttagggttgttaaaaaaaccctaaaatatcttttcaaaaatt

SEQ ID NO: 357903 - DNA, 993 bp, Cannabis indica
gttgggtctaagctttaggtcgtgggtcaagattcggatcccaatcttgggtcccggtcttgttccgattcggatactgggtcctagtccgtgtccgggtccgggtccgggtcgaggattgaaaccggggttgggtcttgggtcccaatcccactcctgggtcccgattttggttctaatttcaagttttgttccccaatctaggtctgggacttgggtccaagtttgagtctccgatctcggtccgggttgtgcgtctgggtttgggtccaagtccatgtctgggttctggttcgtgtcctgagtcctgatctgagttttaatttggctccgtgtcccggtccaggtctgggtcttggtcctagtcagattctagttccgggaatgagactgggtagcagtccctcggttggtcttattcgcgggtcccggtacgcttacagttccggatccagttttgggtcacggggtacgggtttaggtccgagtctgggtctgggttcaggtttaggtctgagtctgggtctggctccgggtttaggtccgagtttgggtataggtttaagccccgggtctaggttcacgttttagtccgggtatgggtcccaaatccaaacatcgactatgggttaggtttaagccccgggtctaaatcaggatccaagtctcaggtcccagtctagttccacttcgggtcctaggtcttggtcctagtccgggtttaggatttgggtccgaggtcaggtcctgggtatcggtgctagtttctgaagcccgggtcccggatccaggtccccatcctggtccggttcctaggtcccagtccgagtctaggacccggttggggttcaagtcctagtctgagttcgggttggagtttttgatcccgatctgggtctagatctaggtttgagtccttggtttgattcttgattcatgtccgggtccgagtcccccatccaggtcctagtcctaggtcctagtccgggtcca

SEQ ID NO: 357904 - DNA, 336 bp, Cannabis indica
taaatttccaattcaccccctcttggaaaatatcttaggctaacatttggtatcagagaaaaagctcaatttatttgattagatttcacaatctagagaatggcatttccaagtaattcatacaataacatgtgagaagattttagcataaatagagcaccatgcttaaatggagtatattttccttattggaaaattagaatggaaacttacctttaatccatagattatgatttgtggcatattgtgtctagtggttcttacattgctatacatgttataaatggtgtagaagttgttaagacttatgaggcatatgttgttggaaattatttt

SEQ ID NO: 357905 - DNA, 555 bp, Cannabis indica
caaaatatcaaagattaataatagtctatttaaaaataaatattattaatttaaagatgatatttaagttcaaatattttaaaaataatattttattttaaaattttgggtttgaaattgcaaaaatccgaaattgggaaaaaatcccacaaaaatcaaaattttcggtgcaagtgcacctgctgtcgagaagcctggcagcccctacgcgcgcgcacgaaaaggagctgcagcctccttaactgatgtttctcggttagatgctgcatatctacgcgtgccttgcgtgtctgaaggagggacacgcccagcggaccgagttcagacaagatctgtcctaagcacgcgcgcgcacgtcaccttgtccgagtgactggcgtgcgtgcaataggaccctgtgcacctgaaacttcaaactttcataactttgcaatttttatcggaatcgagttccgtaaaaaataaaattgcttaatttttcacaaggaatccaaataaaataatttcatggaaaatttcgtaaatcacatacattcatcaaataatcacataaac

SEQ ID NO: 357906 - DNA, 410 bp, Cannabis indica
ccaatttcaatgtctcttcttctccagctgtttttggaaacttggcttatggattctctgttaacaaccctaagaaaaagatgaacatcgcttatgacgagatcgactctgtcgttttttacagatcaacgtttttggcggagactcgaatccttcctcctcatcgacgccttcttcctcctcaccatcggagcaacactatttcaccacagtgcccagaaaaagataaagagaacctcctcctcattgacgcctattcttcttcctcaccatcaaagtcagatccagatctagtttttcaagggttgcgaacttccatctggctctgagaagataaaagtcgagaaagagagtggagagagagtaaagaacacgagggtctctcagttagggttcttcagcagtaaaat

SEQ ID NO: 357907 - DNA, 534 bp, Cannabis indica
aaaaaatctataataataacaagtttaattaatatactatttatgaagataatcggaaagtagggaacataataacgattctagtttatagtcattacttcaactggttgtcccatgtggatcaaaccaagtactacaagcttggttactcctagttatcacaagtttgattactcttagttgctaatatttgttatagaatgttttccctttaatcttgatacgatactctgttgtgatctaacaactgtagttttcttatttgtgcgttggaatataaagggaaattagaagggccttctgggaacacatggttttatctctccggtctcgtaataccggatatgtctttagggtacaaattattgaaggcataaggctttacgactgcgaaaccaaggtatgttcatggaaggacatatccaggtgggattggcccacttctcctttgttgagggtcccactgataggtctgcggtgctgacctgaagtctatgtgtccaatacaaaaaatgcgaataacagttacaattt

SEQ ID NO: 357908 - DNA, 613 bp, Cannabis indica
gaacggaaagtctcgtgctagatggatgccctaattacattatgaaactgggtaagttacatgatcaaaaccctaatcccaggaaacccaaaaccataaacctaggttatgttatacttcttagaggttacccaaactctggaattagggaaatacccaaccacgacactgaaatggacgaaaattgagaaaatgaagtgttcaggaatcctgccaaaatcggctttagaggtcttgcaaaaccggctagccggtttgcaccagttctccccaaacccttcacctcttgctcaattttccaccaaatgctaccaaactttccagagtacctaaacaatgcatagacaatattttccaaccagtatttcacagaaaagcccaatgaatcaatttatgccattagagttcaaagctttgaactcaaagcttaaacttgcacaacacccattccaaccatcaaaaccagctacaagaagctaataccaactcaaattaagcttagaattcgaaccctaagcatttccaaccctaatagcccctatattacaaaatcataaactcaacctaaacttaaattcaagaactaaggcaaagagatgctagggcttacctt

SEQ ID NO: 357909 - DNA, 819 bp, Cannabis indica
aaatatttgtaaatgcaacatctagttgtacatccaaagatgacaacttagattagtatttacaatatgaaacaatgaatagatttataaaataagaataactttgactctcgcctaccgggacattgttagattcttattttaaatcgaaattatcctttatttttcctcttagcttattcattttgaatttgcttaaatagtatggatgaatggtttataaatcatctgcttatgatatcattctactttctcttatgaaattaaatggcgtagatgattatattcctgacattctatcccgaaatgatataaatcctcgatcttagaaatctcctacttgtatatgcttacttaaggcaacttaaacttagagttagattagtagtggtggtccaagatagaataatcactcattgtatatttggtataaatttcagttttagactttaatattagattccaaatagaaattttatatttctatttcctagaatacattacacattacagtatgactttcacaagtttttaatatccattttctgtcaatggattcaaactgtataattatgtattgaatttgagttttgtattctgtgaccaagatccacttggactattctaagaactctttcttgtaactagacctaagttatcaaaagattacaatcacattttagtatctatggcatttatatcttgttcatagtggtttgacaagatcattctcttagcaaaaagaaaatatgactatatccactgaaagtaggatcatctatattatatatggatgtacattcagggggtggatagtga

SEQ ID NO: 357910 - DNA, 625 bp, Cannabis indica
ttttggttatgctgaattcatttcatatgcacttatgattgcagaagaggttgacatttagaacccactagctttgaagaagctatgagaagtaaatatgttgtagcatggctacaggccatccaagaagagatgcactctcttaagaagaatagaacctggattgttgtgaagaaatcagagttctacaagcttgtaggatgtaaatggcttttcaagcataaagaaggttcagggaatgagcctaccagattcaaggtaaggttagttgccaaagggttcactcagaaagaaggcatcgattacaatgagattttctctccagtggtgaagcaaggttcaatcagagccatgatggcaaaggcagcaagcatggacctaaagattgaacagatggatgtaagaataactttcttacatagggaactagaagaggaaatctatatgcaacagcctgagggctttgacaatgggaatccagatgaggtatgtttacttaagaagtctctttatggcctcaagtaagtatgactcatgtgtgtatttcaataatcaaacctacttgctactatatgttgatgatatactgatctttagcaagaaaagtcagagattgacaagctga

SEQ ID NO: 357911 - DNA, 1154 bp, Cannabis indica
atcatgattatattccactgtgctgacgacactataatcattaacaaatatttatgttctggacttaatagaatttatacattaaatataatcatgaaataaatcatgtgaatcatgcaatataaaagcaatttctaagcttttattaattagtaaatctgattatattgaaacaggttttatttaggacacaaaacccaacatctcccttattttgttcgaagccatactctttaatagtcttagtaaatgtgatattctatgatcttaaggcttgctttaatccataaatagatttaagcaacttgcacacctttcattcattccctggtaacacatatccttctggttgttccatatatatatggtttcatcaagatttccatttagaaaagcggcgttgacaactatttttcatatctcagaatcatatgcggaagctatggaaagaagaatatgaatggatttaagcatcgccgcaggagagaaggtatcttcatagtcgatgccttctccctgtgtgtagcctttcaccacaagcctagctttaaaggtctctaccttccctttagcatttttcttctttttgaaaatgtacttacacccaatgggagtaatatcctcaggtggattttcatataccaagactttgttggtgcgcatggagtccatctctgaatccatggcattattccacttgtctaagttaggatcatctattccttctttgtatgtcaatggatcatccttgcctatgtcagaaacaagaacatgagcttcatgttcgtagtagacaagatgtctcacaaccctcccactacgacgatgtaccggggtttcctatacaggaattttggtaaccgctatcagtcgttcaactaatggtgctaaaatcattggtttggaattctcatttctgaattcctcgataaccacttgactacgtggcttatgacttttcatatagtcatgtttaggaaaagtagcatttgttgacacaaatatcgtattttcttgatgacaataaaattaggcaccttgagtctcatctgaatatcctaccaatatacacactttagtcttaggagcaagcttccaagacataggttgaagagcatgagaagttgatgttggaatttattttaccaggatct

SEQ ID NO: 357912 - DNA, 532 bp, Cannabis indica
tctgcaacattagaaacatcatcagttttatgacatgggataagataagccatcttagaaactctgtctaccaccacaaaaattgagtccctcccatgtttactcctaggtaaacccagcacaaaatccattgagatatcaacccatggtgaactagggataggtaggggtgtgtaaagaccatttggttgaaccctcgatttagcttgcttacaagtgacacatctaccacaaatttgctcaacatctcttttcatgtggggccaaaagaagtgttcttgtaatataattaaggttttagaaactccaaaatgtcccataagccctcctcgatgggattcccgaactaataaatctcataaagaataattaggcacacacaacctttgctctctaaagaagaaaccctcatgcctataaaacttaccttcacgagatttttcacaagcatcatacatctccccaaaatcatggtcatctggataaagttccttaatatgttcaaaaccaagtaatttagcatcaagagtag

SEQ ID NO: 357913 - DNA, 784 bp, Cannabis indica
cattagtaagctctcgttgatcatgacctgatatgccaactcttggtttcgcatgctgtccagactagatggatgccaggcgaaacaccaggagtcagggcaactcggtcgggtcaaatgaaggctagggagctcagtttcccccaaatgttaggggccgaggtagaggtcccaggggtagggctcgtggttggggtgatgctaacccgccacaggttccccaggctgcccaagccactcaggaagcccagaattgagaaaatcggtttgcagaaatgcaagccagaattgaagagcaagatagagaaattcagcgattaagacagcagggtgctcctgcagtgcctgttcgtgaagatccagtggcacctacccctgttgtccaggccaaaccagtgttagcagtaaatagaatggaacccctgtatgaaaggttccgcaagcaagcacctccagtttttctgggaggtccggacgtcatgaaggccgagcagtggctaactgtgatcaccaagatttttgaattttatgggtgtcatcgggaatgacagagtggtgtgtgacacatttcagtttcaagagggcgcattagtgtggtgggacatggtgtctatgacacacgatgtcaccacgatgacctgggaaaagttccaggagcttttcaatgcaaagtactacaatgaggccgttagaagtgccaagagaaaagagttcactcacttgactcagaaagaaaatatgagtgtgacggaatatatgacgcagtttgatcggttggcgaggt

SEQ ID NO: 357914 - DNA, 838 bp, Cannabis indica
gagtccatcacaatgtccctccactcaaccaagtagcccttatgacactgaccctgaagctaacacatcctctgatagtagctcactcgccaatcgtccaatgcatactccttttgacaaggacgaagtatggtgcacccctcggggtgaggttcgcaaaccaaccattcccaacgacacctacagaacacgcttccactgaagccaagtccctctggacgagtccctcatgaaacttcacacgccaactccatgtcgcaccatcctcgtgatggaaatcgagcaagacactcattgtaggataaattttggtgcgtcccatctagacgaggctcgcaagccaactacacccattgcagcaccaagtgcactcttgcataagatttcttcaagaagttcacaacattggccctccggccctaccacacacccacgacttcatgcaaaaggccccactgacctactgcatacttgctcctctgagctaattttcccattggctcctgcttgtgtcggctctcaacattgtgccatatgtccatctcctaaaatcaaccttgcatcctctgatgactcgctaacttttgacaaacttgataacacccagtcttactgttaagacttgaagtcatcccaatccgctctctcccatcggcatatgctctctaatccattcgacttacagtgtcccatacaacaccaaacatgcccataacatgccgtaaactagctcagtcttgatctcagcctacgcccttgcatattgtctatctgcagcttgcagtaatcatgaaagtctttgcactgaacaacccatctattgtagtgtttccctctg

SEQ ID NO: 357915 - DNA, 535 bp, Cannabis indica
aagaggaaaggtaaaaatgatgacgtaagcatgtaggggtatatttgtaataaattgtgtaaattggatttttggtgtaaaaatttcaataatgaatatacctcagccaaaatcaataattaaataataaaatattttttttcaatttaaagataaaaaataaaataaaattaacagtgtcacttcaaacaagtgtcgcatcttaattaagtgagctatttatttatttttttttttaaaaaattgatttcaaaatacttttcattgatttttcaatatatatatttttgaaatttttacaccaaaaatacaaaatacacactttattacatatatatcttcacacggttaaaccaacatttatacacattaactttattttattacacttttaccacttgcacacacaatccatgcatgcagccacacacgtcattgattgatgacttatatcaatcacatcttacatcatttccttatctttttctcttcttctttttttttttattattttcaatttcttttcagttttttt

SEQ ID NO: 357916 - DNA, 692 bp, Cannabis indica
cctcttcaaaggagtcacctgctcagcctcagcctcaacctcggcttcatcttcaggattcatagactcttgagcatactgctttgcccgggcacctcccttcaacttagcctcacgcttgagttgaatgagctaatcctccttatcatctcgtttgggccgggcagcatcagatttccccttcttccccaccacggacataggagaaaagtccttaggataaagcccatactgcaccatattctcgtcggaggtcaactggatgatatccctgtcttccgctggcaaccgggcaagtttttgagctctatccctaagagcaagagtgaggggaggacggtgatatgtcgggatctgctgaaaccgagtccgggtgatgtcggatccttcaccatgatgtaatcatcaacaaaacgccctattttgctgatggccttgtggtccgtccctctcaaccacttgaagcctagctaagagaagtaaaaataccccgacctgccttgcttggggatagacttcaagtcgaagaaccaagcgacctcgtggggagaaggagcatcccatccctgagaagcctagaggacgaagagagtagacaaatacttaatgcccttgggagtaatctgtgctgggcagaggctgaagaagtccgccacatcccggaagtacttatgcaagggcatcagcgcccc

SEQ ID NO: 357917 - DNA, 719 bp, Cannabis indica
cctaatcccatctcaaaacatcatccaattgccgacctccgtcaccaccacccccgcacggcgcacccacaaccgccgctcctcccagctggcatttccatagaaaattttggtaagtttataaatatatataataaaaattttcttattatattcttactacatatttggtgtatatatattagaaatttatcatttaatttatttttttatgatattttgttaaacatgtttttgtatttagatttttgggctatagagaaaaaattatagattgattgatgataataaggatggtctctctctgattttaatactttttttttgttggattttatttatttttattaattttttgtgatactatatagtatagatacgtacaaattaagattgtgggcaaaaatagaaaagaaaaatagagttaaaatatcatgtatacaagctaacactacaagagatttgtatattaccggcggaagcatccgccggtattaaatgcccagaccgccggtaataattaataccggcggaatccgccggtaattatcctttggcattaattggtcgctataaatggttattagcgacgaaaataggattctgccggtaataatattaatacctgcggattaatagcggtggggtccaccggtattaatatttttaaatattaaaaaaaaacattataatgattaataccggcggacccaattatt

SEQ ID NO: 357918 - DNA, 570 bp, Cannabis indica
aatgagttgcattttttttgtcatacttacccagcttgtatgctcctaattccaaaactttaatcacctgatatggtccttccctgtttggtctgaacacacctgtcgtgctgtctttggtgtccaaaaatacccttctgaggaccatatctcccacaaataatttctgtgctttcacttgcttgttaaagtaccgagctaccttttgtttatgggctaccaattttagatttgttgtggttcgctttacttcgatttcatcaagtgattctgcgaggagtgcatgattaacttcttggttatatgtcaatcttctgtgggacgaaggttcaagctctacgggcagcatagcttcataaccatatgccatggcaaatggagtctgtctgattgctgttttctcggttgtgcggtacgaccataatactttaaggagttcttccggccaatttcctttagcatcttcaagttgtttctttagagtatctttgagtgtcttgttgactgcttcgacttgaccattttcttggggatgtgccactgcggagaaactttttatgatcccatggt

SEQ ID NO: 357919 - DNA, 963 bp, Cannabis indica
aagtttaagaaaccttacattagttgcagcggaattaaatgactctttccgctcaaatctctaacccttgtatcctttctgtagcagagtatcaccaagatctgagctcgatcctccttcagttgaatggatgcttcacaatcttacacactatgattgagtaccaacttgctatgtgtgggcacgtactctatcactatagggtttgaaaattgaagagagagagagagagagagagagagagagagagaaggattcgaatatgagagagatagaaggctcaaatttttattaaaaggcttgagtacatcatctttcagtttgagaccatcactatctatttataggaatccatctaggtttaggtttaaattatttagcattaaaaaattgataaaataaatggtaaaatcatgcttaagtggtcggccatagcatgtgggcccaccacttgcaatattgccatttttcaactatttatcttatttttctcaaaaatgtcatattttccaattcaaccacttaaatgccaaaactatttatttaataattaaaattaattatcaaataaaattgtcatttaacatatttattaattagacttaataaagtctcttaattaacaaataaatcctagaatctcttttctacacaattaagccctaacttagtgaaaattcataaataagatatagtttaattttagaattataattgattaattaaaatcatttacttgagtcttaaaaacagtattgtctcaaatagtatggggaccatgggcctatataaccgagcttccaataagaagatttagaaagtaaattccctaacttattaattcctcattgcaccactattgaacttggaattacactctcagttatatagaacgttctatatgctccacgatatagatacgctataaatatttaatcatcgttctaatcccaataatcaaag

SEQ ID NO: 357920 - DNA, 557 bp, Cannabis indica
atatcaacttggaaaagtgtgatttgtaaatagcataggaatgtgttatttaccttgtatgacttgaaggaattgtgcttaaattggtattcttaaaattaattgggcataggaatatgctaattaattagagaattcaaaccataaatactttggaaaaaggattatgacattttaaattcctagttgacatcatcaatttacaacaatactcatttgcacaattatatcaactttgcatttttaggccaatttaataattctagcttgttttcttcatagtttgtgtttattaatttttacatattctcaacaatttattttatttttgtttgaaccaatttgtgagtaattagttttataaattaatttccaattttcaatccctgtggagacgatactcgatttatcactttattacttgttacgattgcgtacacttgcgtatacaatttttcacaacattgggaattaaattttgtcattttataaagtaggggtgagcaacggtctgtttggtcggtttttcaaaaaaaaaaaaaaaatccaaaattcag

SEQ ID NO: 357921 - DNA, 542 bp, Cannabis indica
cctttaagtcatacaaggccgaccgaccaagcattacgttaaaagctgaggaacatctaatattaggaaccgcgccattacaatcatgctcgtcagagcttgtccaacagtgaggggtagacgaatttgtcctagaggggcgactccttgaccggaaaaaccatagacagactggaggcatgggattaaatcctttagttggagtcccatcttttcataaattattttgaataagatgttggaagaggctccattatcgatcactattctggccaccattttattggctgtctggacttccacgaccatcaggtcgttgtgcagaaatctaattttgatagtgtcttcatcgttgaaggttatggtcagctctcctgctcgtggaactttgggcttcctttcttccatggccaggataacttcttctttctcgtgctgcactgttcgggcatacctctcccgagctttgcccgaatctccagcaatgtgtgggcctcgtacaatgacttgcagatgtccatctactggtggaggtagcaaat

SEQ ID NO: 357922 - DNA, 693 bp, Cannabis indica
agaagaaaactaggtcaagagtcattttttagattatgaaaccattctattctttctataataattcagttagggttaggattgaattatttggaataaaaaatgataaaataatattaaaaataggaccctagttgtccgccatatggtggcccaacactagttagatttttgccatttttttttcaaccatttatctatttttcacaaatgccacattttgcaatttcaatcctataaatgccagaactatttatttaatgattaaattaattatcaaataaaattttcatttatattatttattaattggactccacaaagtctcttaattaacaaataaaccctaaaattctatttcttcacaatgaagccatatcttagtgaaaactcataaactagacataatctaattttagaattataattgagtaattaaaatcaattagctgagtcttacaagaagtttgtctcaactagtacggggaccatgggcctatataaccgagcttctaataagaaaatttagaatttaccaagtgaatttcctaacttattaattcctattgcaccactatagatttggaattacactctcaattatatagaacactctatatgttctacgatatagatacactatgatttatccattttttataatcctaataatcaacgatcctctatagattg

SEQ ID NO: 357923 - DNA, 645 bp, Cannabis indica
aaaataatttccaacagttattaggtataactccacttaaagaacggccagataggggttggccatctaccgcttggcccacatgtgggacctatgactggggattggacgactgaccattatgagtctgggcggtatgcttgataggaatttcttctgtacagcccagtgggatactggacgtaacaactggttgctgattagcaacttgataggctctccgtatcagtacggtagcctgccttgttcggtcatcgatggctgcttgttgagccttcaatgtttcaatctccctatccttccactcaatgaactggcacctctgctcatcatatgcaaggtttattgcggcacggagatcctccttgtaatacccgggattaagaaaagaattagcaaaaccctaactagataattatgagttaattgaggaattatattattatatagttcaacatatgtgaaattatatgaatttaacatgttaagaccccgttggtgagccaggggcattttggtaattatgacccgagaagggtaaattgttgagattaatttaattacgtgcttaatagaactatattattatatagtatgcctgtgttgtcttttcaggtgtgttctgacaggttagcgcggtatagt

SEQ ID NO: 357924 - DNA, 428 bp, Cannabis indica
tggtaaaataattccaacatatcccttattattaaattctgcagtaaatttattatgaaaaatactatatgctatatatttggttaacgaaaatttgtgttaacaatttgcaagtccagtcctagaaaatcagaataaaaatctactaaaacaaacataaacgaacgcaaaaacagatttaaaataatgaagctgaaataaccacttaaaaaaaacataaaagagccacacacctcaaaatatttttgtcagtgagctcgtcaaatgtatttataagagaatcagagtaaaaaaactacaaaacaaccacatcaacatgagcaactggaaaacaaccattaattctggcaaaatagagcaagaacagtaaaatcgacatcaaataaataaatcatggcaaaataaccgtaaaataacactaaaacaaa

SEQ ID NO: 357925 - DNA, 720 bp, Cannabis indica
aatgatacgtggataatgacttactatttaaagggaaccaaacattcaatctgttaggaaagttaggattttataattgtagatcatgttcccaacaatctatattattagatttctaaaatataagttgtaagaatcatcttctctaagaaactttaatgagtgaatcaaataaactaataacatgagcatgagttcatgattactcgggattcaagtcgatctattattgatcatttttatgatatgaattaggtttttataataaacgttatgtttgataaagaaaaattaatttcatatcgacctatgtcatattgtaacgccctattgcttaggccccccacagtgattttttacttactgtgcactccttagctagtcagagagtttcttaacaatcgtgttaaatttaaatttttaattaaactttaaactttataaatatatatatgtctgtacaaaaagttggaatcccgtctttaaaattaacattcatcttcaatatacactttatagacatgtcgctctacgactacaaaatgtaggccaaagtcgtcccaagattgaactctccaagtgtaaccatcttgatatgtagaatcatctccgagctctggactcatcggtactcaaccttagcctttcttttacctacacatgcaaacaatatctgtaagtcaacatactcagtaaaaaaagcataaagcataaaacata

SEQ ID NO: 357926 - DNA, 742 bp, Cannabis indica
cgtctaatcatagatctattgtcagttggtatacgtaccccacactctagttgtagaaaaagcactatgtcgttttgtttgatctctttcgttttgaggtggtgactaactatttttaggaaggttctttttaatatgtacttttcctttattttcttagaaaaatctaagtagttgtcacgttgaattggtactttagaaatctggctctattctcgtcctcttatccacgtatcccctttgattatgttcaatcttcatgttagagcttttgtagctcttttctcatgtacgcagagggggatttcctttaggtagagtagagatcaaagcaactcttccttctttttgccttctcttactttcaatctccctcttcctctactcttcttctctttggtccattagctcaaacattccttcagctctttctattacttctatcattgttttcgacttttaaagtataagttactcgcttaacaatgaacctctacaaaaattgttggggatatgctccttttttttctttgtatggtataggtcctttctttctttcctacttttggaatttccactgtaatgtggggcaaaatgttccacaatggtgttaaactattacatagattatgagctatccatacacacattaagcattaatcatcattgctcataaccatttaatccaagatcaatactttatttagaacatccaaaataatacacacatacctcccattga

SEQ ID NO: 357927 - DNA, 801 bp, Cannabis indica
ccacgcacatatttaaccaccttataaacagactcatcaggagaaactgaggatgaacctgatttagatgcaccagaagcaagctcaatgaatggagatttcaaaacagctcctttcttccgatccctcttttgaggacgtaaaataggagtctcttgaaaaacaaccatttcaagatcagtcttctcagaagtctcaacagaagcagggacatgagttgaggaaccaatctaaaaaaaaagaaaaaaaaaactatttttttttttaaaaaaaaaagtacaatcaaaacactagtaaaacaacaatagaatatcatataaacacaaattacaaagaaaaaagaaagaaacacaaaccaaattctccacagctttaacagcagatgcaattgttgcatcaacatcaatgttctcctccacaccttgagactgttcagactgacaaaaaaaacaacattaaaaaaatattaaaacaaaatcaaaacacaagatacacaaaaacaacacagaatattaaaacaaacaagaaatacacctgtttaacctctgcaacaggttccatagggtcagtcttcttggcatcattaatgttgttttctttagtaagaagaatccaccttgccagtatcatcatcctttgaaacaacttcgggaacaacaacaccctcatcattacgatcatccccagtatgagcctcatcctgcccaacaccaactcaagctccatcttgatcatcatcatcatcatcatcatcatcatcatcatcatcatcatcatcatctatcatcatcatcatcatca

SEQ ID NO: 357928 - DNA, 465 bp, Cannabis indica
ggtaaaatatttccaacagtatcttcgattggatgcttggaaggcacccaaattaaaaaattgtcaacctgggtgctcggtgctcaataattaacttgctctaaatttaattctgatgcctcaaacatgtttgtggtatgtcaagccgatgtcccaatgttatttttgaccacttttcactaagacagtcccagaaactgaaaccttagttgaggctgtcaacttgcacgtcgagtggaaaatgtaggtggccaagttggtttccaggttgtaggttcctgtaattttagctcccaaacattcttttaggttgttccatgtcttcatggtataaaatactaaaatatagtgagttggattcaagttattgaagtccaaacttccatctcggagcccctagagtcaacctgggcacaaggctagggtcccctcctaggttaactactatgactcgggtctactcaa

SEQ ID NO: 357929 - DNA, 1946 bp, Cannabis indica
tacctatccctgaatatcatgccagcctaaatctagtgaactgacaaataagggaattaaacttttgaacatataatcatgattatattccattgtgttgacatcactataatcatgaacaaatacatatgttctggacttaatagaatttatacattaaacaatcatgaaataaatcatgtgaaccatgcaacataaaatgcagtttctgatctttattagtaaatctcattatattgaaatgagttttattcagggcacaaaacccaacagtgttgtcatcagtggtaatcataaggtcatatcttatcttttaattcaatccatccaggtatttctctttcttactaaaatcagttggcactattcccaaggctaatcttgccaatcgatcaaattgagttgtgtattcagcaacactcatatttttttctgggtcagctgggtaaattcctttcttttttgcacttctgactgcatcattatagtactttgcgttgaacaactcctgaaacttttcccaggtgatagtggtaacatcacaagtcatggacaccatgtcccaccaaactagagcattttcttgaaactggaagccactctgtcattaccggtgacacccatgaaattcaaaattcttgtaataatagtcagccactgctcgactttcattacatcgggacctcccagaaagactggaggcgcctgcttgcagaaccttttatatagtggttccattcggttcactgcaacaactggtcctgcctgcacaacaggaacatgagctacctgtatttctagagcaaggatcgccgaagcaccctactgtctcaagcgtctgatttcttcatctgctcattaattctggcttgcatttctacaaacctattttcccattcctgggcaacatgcggcgggttaacatcaccccaatcgcgtgccctgcctctagggcctctgccttggccacgaacgtttgggggaatctgaactccctgattgtcactggatccgaccgagttaccatgactcctggtgtttcgcctggcgtccatactactagaacaacctacgtaaccaagagctagtctggtcaaattgcgatcaagaataacttactaattacggtttattttggaaatttaaaacatgggcctattcaattatcaggctactaacatgcttcctatcaggcttttcttaaaacatactattaaaataaaatactaaagtaataaaggcttactgaaccgtaagatgagctgaacactgatgatgattgtacatgtcgtgacgatctttggaagataacctggtggctctgatacaaaagtatttacaaaagttttacagtgcatatacaaaagtttgtcgcctagcgactatacaaaataagccctgatgtttgaaagactgtacgctctaggcctaaccgccccgacatgtacaatcttcatctactcgctttcacggctgctcaatcttagccttgcccttacctacacagtactactaaccatagtatcagcctatactcgatacgctaatcgtactctattcgtactgatgtgatactcttaagtagtatagtgctatcgaccatgatatcagcctatactcggtacgctagtcgtactctagtcgtactgatatgatattgttgaatagtacttaagccaacatacatttattgatatccaatacaatactaaacatattgatatcactattataatggaaatacatatgcatatcattatagtaattttacctcgttaccgaattcaggtgtgccgggcaacttgagtggaacaactggttgacaaattataggcccctaagtcacattattcgtaaaattggtgaatgacatgctaaatcactttctgagaacttaaacttgaaactaaaagtttccctattgataaataacatgacaataccct

SEQ ID NO: 357930 - DNA, 666 bp, Cannabis indica
aagttaaaaattaattttttaatcaatatttagaccaacttaaattaggatatttttcttagaacttaaataaaaaaaataataattaaattgattttattcaagatacttaattatttatttctatttcaagaaatttaattaaattagaaaacatattaaagttgataattaattttttaattaattttataccagcttaaattaaaatattttcttagatattaaattagaattaataattaagttgattttattctagatacttaattatttctattttaagaatttaggtaaatagaaaataatatttaagtttgaaatttttcaatttcagataaatttaaattagaataattttcagaatatattttattttattttaagaatcatttcccacattaattttgaaatgcatttattttaaatacatatatttcaaaaaattttattttgttaaagttgaaaattaatttttttattaattttagatcaccttcataaattaattttcattaattagttatttaaaataaatagactgatatatattattttaattagaaaataagtaattaattttgaattatctagatatatattttataggtagacttttggtatttttttagatatatttaattaaattagaaaattaatatttaa

SEQ ID NO: 357931 - DNA, 618 bp, Cannabis indica
gtcattttacaaacttctggctttttggtgagatccatcctgagaatggatcatcaatttgttgctagaatgtccaatctgagttcaaaagtttaccctcccaaactcataatactgggatgcaccaaccattttccattcattcccatgaacttcaaacctcaattggaatcagtaacgatggattccaagactgaggagcttccgaccaatccaaaccaagggaacccccgtagcccattacgggagatcctcacaagtgatccttgaaggtaagtattattccttatgaatggtggtttcagtcagactattatattttatcttttttttttacttccactgacctcctctttttttttctttgtctcgacaggaatagacatagatcttgtgagcgatcttagaggtcttcctcaggctaacaaggaatcccagaagaaagttggtgtggtttcggatgaattcaggagggaagttggcgtgatttctatcagagaatccagccaacctaagacctaaacctgcaccagaagacctttgtgttgggttttatgccctaaataaaactcatttcaatataatcagatttgcttattaagatagataagaaataac

SEQ ID NO: 357932 - DNA, 665 bp, Cannabis indica
atacttgtgagtagatctaagttcctggtaaaataacttccaacatgggtatacttagcgcccatttggcacagctttttggaaaagctaaaagctgcttttcgaaaaagctgtgaaaaaaatgtatttggtaagcagtcaaaaaatagttttttgaagaatttttggagaagctacaattaaaagctaaagttacaacaacctaattgttgccccagattttgcccaaaatacgtgaaccaaccgtacaatgacatgtggaaggaaagggtttagcatttgaattaaaaagctaagtctttataaagaaaaaggtaactatggatatgcctcccggagaaggcatgcaaagtctcatatgctcccggagagcaagatggcatcaaagcatctctgggtggtgtcaggcttcctctgaacagtcatttcacctttaatgtcgcatgggaggaggcgtattggaactgccacatgcaataaagtctgacgacacaacccccaatctgtacctactaggctatgaccaataaagtctagtgatggctactctgtgaagaatctctacagcacctagggattagaccatgcattacccatgatatattcattgggaatgtacaaatttactggtaattacagaaatgcatgtaccttaattctgggga

SEQ ID NO: 357933 - DNA, 690 bp, Cannabis indica
agcaaaaatcataaaaattgcattgttcatatttttcataaataattctcttagagtttaataaaatctttagaattgagaaattataactctaattcctatttctaagataggacccacaatataataaaatcataaataattataaaaatatcaataattgatgataattacctttactaatccatattctaacatgcgatcattaaattctattccatccacaatgtggagcttggtgacaaagttcctcagccatataccgtgattggatgcctcataatacgcaactaaattctgctgccatggtggatgaagctatgagtgtttgtgttgcactcctccatgatatagctccaccacctaacagatatatgtagcccgaattagatctcctactatcttggcatcccgcaatgttagagtcaaaatatccaatgatcttaaagtgatctgacctcctatatgtgagaatttactctcttattctcttcaaatatttcataacctttttggatactttctagtgatcaatacctagattgcttaagtatttgcctaactctctaacaatgtatgctatatccaaacacatacaaatttgagcatacattagaacaactgaagtattatctcatcaatgtcaccattgggaaatgatattttaacatccatctgatgtaactcaag

SEQ ID NO: 357934 - DNA, 534 bp, Cannabis indica
tttttttctaaccttaagaagaaggtaaacgaaaatgagacaaatattgttggattaaaatctcatgattgccatgtgataatgtagtggttactcccaatttgtattggcaagtttttggataagagaacatccaaaaccatcatagaactttgctaattctttcgaatgttatgttcaaggacaataaatgtgaaggatatggagaaggctcaagaagatctcattcatatattgtgtaagatggagttgatatatcctccgacattttttgatattatgatccatttagtgctacatttgccagaagaagatataatcgacaacaatgaatattcagagacaattacaaacattgcatgggctgaaatggcatatagatataagaaacagaagctgttaagacatgtgcattttaaaaaatactacaaaagtactgctgattttgataacgctgctgcccacccgcctaatgatcttactccagaggattggcttcctctttgtaatttcttcaccagtccagagtttatt

SEQ ID NO: 357935 - DNA, 493 bp, Cannabis indica
gtattagaacttttaccagcacaaatgaaaagtggtggtaagaatgacttatcctagtgcgtaaatgcactggtaaaacttagattttagccactgcaaatgtgcactggtaagcccccctcccccgacacaaatattgataaaacattttatttatttatttattgttgtatgttctttatttttttccataatttataataccccttactttattttgttttttttggctcctccaaatcccatctctacctccgtccctgaagctaccaaaggagtgatcactacaaaaaatcttacttttagtcacaataaatcttgcgattaaaagtaaaaaatttgtgactaattataaattcacattcctatatatgttgtgactaaaagtattagtcaaaaaagttacaatttattgtgatcactaaacgtttttagtcacaatacttgttgtgattaaaactaaattagtgacaacttgtatctaaacactatg

SEQ ID NO: 357936 - DNA, 755 bp, Cannabis indica
gttttgaattcaataacacttgagggacatctgtttattaaataagcagatgtcataactacttctccccaaaaaccatgggacaaaccagattgtattaacatacatctggctttgttcagaatggttctgttcattctttctgcaacaccattttgttgtggtgttagcctaactgttctgtgcctttgaatacctgtttctctgcaaaacatatcaaattcattgttgcaaaattccagaccattgtctgtccttaggtttttaacctttctaccagtaagattttcaataagtgttttccagtgtttaaacctttgaaaagcatcatttttatttttaagtaagaaaatccatacttttctagaaaaatcatcaactatagacataaaataggtattacctccatgggttggtgtcttttcaggaccccataaatctgagtgtatataatccaatatacctttagatttatgtgtccctgttttgaacttcagcctgtgatgttttccaagtatgcaatgctcacaaaattccactttgctgattttgtctttgcctagcaattgttgttcatttacaatttgtaaacccttttctgctaagtgtccaagtctgttgtgccatagtatagctttagcatcttcaggactttacaaaatgttgttctgtccaacagtgttgttgcttctagctataggttccccaatcatgtagtataggccttctttcttaactcctttgatgatagtcat

SEQ ID NO: 357937 - DNA, 730 bp, Cannabis indica
attaaactaaaaatttattttgtatgatgaaagaattaagggtaaaattactagtgggatacattataaaaacaccttataatttatattgaacacacaccaaggcaggcaacactttatatcaaaacaaaacatcatgaatcatttcggtcacgaataaccactccaaaaaagaaagaaaaagaaaaaaaaatccttatctatatatacacaagcattgaagcatcacgattaagaaaacgtatcaattcaataatgttttacatgataaatcgtgtaatatcccataatatgccattacatatatatatataattattttttaaaaaaaaaacaggtatatgccaaggatataccattacaatagttctcacaattaagttgttcttcgaatccataataacgataatgtgttaattggaaattatacatacgtggaggggtttcaatgtatacacagtatacttctcatttggaaattattttttaattacgaatgcatgcaatatacgtacgtatagaattacatgaagagtttatatatatatatatatatataaatatactagtatattgttacgtgcgatgcacgtatgctatgttttatattaagtattatattatgagttcggaagaaaataaatgaatcaaaaataaataatatttaatttagagagatttaaataataaatttaaattaaattttatgtccagtaaaacatattggaaa

SEQ ID NO: 357938 - DNA, 614 bp, Cannabis indica
agagaaggtgttccgggatgacatcgtcgccatggcggaggacaagtaccaggcaaacgccggaaaggcccttcgtattggagctccgttggagcggaggacccccagacctaaacccacggtcctggtaccaaatactggggctcccgatgccagcacttcgggttctggtaagtcccctttaataatacactatgttcctcccgtccctgagtatacccgccttaggcctatagggttcgatgaacgtctccgtaggtttaggatgccttccacccggtgggggaatcatgccaaggagtattgtttctcccacttaggtcattatttagggcggtctcggatgggttctggacccccggcgcccattcccttggaccattcagcccatttatcctctagttggtttcgtccctcggacagctttctcggggatgatgaagccactgctatgattcgggactttgttagggccgaattagagagtcagggtaggactagcttgattgctttttgttaagtgtatgctattctcacggatgttctaacacgacttattttcttgttgcagcagctaggcccatggcgaactcttggccacccttgctggagcc

SEQ ID NO: 357939 - DNA, 685 bp, Cannabis indica
taaatgtaaaaaaaaaaaaaaatccataaccctatattgttaattatttatgccataaaaaagtaaattataccctcaattctcatattaatgaaaatatgggatctaaggtccgaagatgtggtcgaggtcaaaaatatttatgaaagtgaatatgttaaataaaatttaaaagtgattttttttcaaaatttttattttcattttaaaaattaaaaaattgttcagagaataaatttctctcttaatatatatactttttttctttttgaacatatcttaatatatatacttaaataatcataaaatcataacttaaattattttattttttcaataaattataataatgcgcggttacgttaccttgttcatatggatatgagaaagacagcactgatgaataaggagcagaataagcataattatagatatggacagaatcaaattatgcatgagtagtgacaatgatacgctatactatttagctaataatagtatcaactataataattctgtgttggttgtgtgaaagtatgtgctaccaaaaagttgttgattttgtggtaccatatttgttttctttttaatttacacctagtatatatagaatcacttttcacaacttttttgcattatgctttttggcttgattttattttttatatattgattcaaaattcaa

SEQ ID NO: 357940 - DNA, 709 bp, Cannabis indica
ctaatagaataattaattgttaaaaattatgatgatattaaaaacttgactaaaacaaaacactaaaaatagacattataacagcataaaaagtgtgtttcagggattcctgttataaaaagttttactacagaaatatctacgacaaccatttaaacacaaaatcaaaatacacaatagatacagccagcccaaaataactcctagcaacttggcacgcaggccagtgaggtcaatatatacattgctagagaaagtagtcacctcatgccagctttaactttttcttgcccttacctgcaccacatagcacctgtgagtcaaaatgactcagtaagaaaaacaataataataattatataatttattattcaaatgttatcatttatacacattcagaatcaaacaattacgcattgttcataagatgaaatataaatcactgctggtatctgccatgaataaacattagtatacagatatatggtaatacaaaatcataaattcaacagtaggaaatataactagtcatatgcatagaaatatgtatgctcatatatttgcattgcctatcaggaaagcccgtatcataatgaaatatcataaccagaacattcgataggaaataatagaaccatccatatgcatagaaatagaaatgctcatatatttccattacctaattaggcaagcccgtgtcataatgtaa

SEQ ID NO: 357941 - DNA, 803 bp, Cannabis indica
gcgagatggatgcctcgcttattagttgtttggattcgctcgactgttatacttagtttgtataatgtgtattatacgctaagtgccttaacaatcatcatgtctcgttgatgtctcttcatgcgtagcgaggttgatgcctcgtcttgcactactgatgtcgtatggtttctcgttaacggacaaggcaacagtttgtatatctttatctcgcttaagaccttacagttagcaagttgtgaatatactctgtcagttccacatttaatgagttattctattttcaaatataactgtcattatattcgttgattcatattctccaaatttggcacgtgtcctcctctgaagtgctaggcgaattttgagtataacaagtataaaaaatagttataaattgttaggaaaaactaattttattatagtgttagtgaccacttaagagtgtatttctcttttcaaaacatgtgttcctcattcgaaaacacaacactgattacattagagaataccactactacaatattaggctttaacttaaaattttttaataataaaaaaaaatataattttttttattttgtgttgattaaattagtgttaagataaacaattttatattattcaactattttattttactattttaattatttactaaataaaaatatgataaatatttattatatatttataatatatatttaattaaatatgatacaatacattataattaatttatttatttttgtctacgaattattcatttttatttatctgttattatatattttaactttaat

SEQ ID NO: 357942 - DNA, 836 bp, Cannabis indica
ttggatcgtttttggattatttacggacaaaatctcactttgatttagggatgattttttaacttaaaatctttagaattgaggtattttattctcttgaaccacattttagcacttaaattgtaacaccctaactaacttaggcatgttagcgtgatttttaacgtacagtgcagcttgttgctaatcaacgagattaatgaaaacgtgattaattaaaatttacttatttaattagaaacataaagtagtatatttataaaatctcaggatcccgtttacaaaatacatttacaaaagtttaatattcatatacaaaagttttgtcgcctagcgactatacagcaaaagtcttgatgtcccaaagatcgtacgctccagacctaaccgccccgacatgtacaatcttcatctgctcactctcacggctcctcagctttagccttgcccttacctacacatggaaatagcactgtgagtcgacagactcagcaagaaaagcatcacatagaacataataatatcccggattataatcaggcgcccatacacccgaccataaccttatccatgtgtcccacacggtactgagtctagaacattcatacgacaatactatcgaccataatgtcagtctatactcaatatgctagtcatactctagccatattgatgtgacaacatcgatcagtatttcaaccaacatacatttatcagtaatcaataaaaatctacgtatattattaccgctattaatgtattctaacaggcataaacagtatgtatgctaaacatgtaataacatatgcatcacgttatactaatcttacctcaat

SEQ ID NO: 357943 - DNA, 501 bp, Cannabis indica
cttcttcactttgtctgtgtcgtcagattcaccaaaagaaataataaacaacatttcagatctgatattttctacctccttcttcaaacaacctttcaaatctgaaaaaaaaaaaaaatacctgcaaatggttttatttattgtcccaactaatttttctttcacaaatcttttacaaggtcgaagtaattttctgcaaatgattttattctatatatgatttagtttggtcatcatcctctatggggtagttagcagtaagtatttttattttatttaattagagcatgatgaaccaaaaaaatttagaaaacaattatcttaaaaaggaatacccaaaagagaatcaaacctaattttagggcttcaatattggtatactctgatttttttctttaattgttgctgaagtacagaagataactaaaacaataacgaacaactccatccaaaagaagagattgcaagactaaaaaccacctaaaacttgcagctttgtgg

SEQ ID NO: 357944 - DNA, 729 bp, Cannabis indica
ctcaagccaaccttgaacctaaggtaagttcctcatgttttggtgcatttctagatttctaagctaggttttgttattctttttgaaagttttcagggctgtaggtttagatgaggtttaagtatgttatcttatttgaattaggtctgttggtgtatgtttaaattgaattcatggctgttgggattggtttgtgagtgaggaagctaaaagaacttagttttcttcacttgagcatatgaatttgaactagagattgaacttttttgtaatttgcagcttgggttatgctatgtttatgctattatactgttctggaaagtttggttaggtttgaggagttttgggtcgaaattggagaagagaaacttttgttcctggtctgccagaaccggtcgactggtatgttctggtgtaccagaagtggtcaaccggttgcttgtagggaaaatttttcgggtttcctttaggttcagttttggcccgggaagttgtgtaccatctgttttgaagtaaatatgggatgcttgacctaatttggagttgttgggcgttaggttatgtttgatttctaaactagggttttaatccagaatttcgagttaaggtatttattgtgtttcaattgtcgtgacataggaccgaattccctagcttgttttccactcggatcggcccgtacacgtgacttctgaactaaggtaagaaaagtggtaagcactgtatgtg

SEQ ID NO: 357945 - DNA, 773 bp, Cannabis indica
tttttttttcagggggggcagtctgtgggtccgcccctgggctgatgggaaatcagagagaactatttagatactagaagatttacagcgagtctgtatcatggactttgaggattcatggaataagtagtttcctttaattgaattctcccacagtaacagttaccaaagtacaataaggatggctccctatgagatgttttatagtagaaaatgtcattaccctattcattgggatgaaactggagaaaggaagtacttaggaccagaattagttcagaggaccaatgaagctatagacaagatcaagactcggatgcttgcttcacaaagcaggcagaaaagttatgttgatccaaagcatagagacattacatttcaggcaggggaacatgttttcctgcgggtttcaccagtgaaggttattaggcgcttcaagaagagggataagttaagccctaggttctttgggccatttcaaatgctcgagaaggtcgggttggtagcgtatcggctagccttaccaccagcattatcggttgtccaaaatgtaattcatattttaatgttgaggaaatatgtttcagacccgactcatgtcttgagttacgaagcccttgaactacagtcagacttatcctacgaagaacagccagttcaaatccttgataggaaggaaaaagtttttcgaaacaagaccatcgctttggtcaaagtgctctgaaagaatagcaaggtggaagaagccacctgggagttagagtctgacatga

SEQ ID NO: 357946 - DNA, 507 bp, Cannabis indica
acactaaaaaatattctttattattatattaattttgttataaaataataaaaaaaatatcatattaattaacaaaaatcaccacaattgttatatttaactaataattttcggcaagttaaattttttcaaatttttgtagaatgtcttaaataactataatgtacacgactatataaaaaatgactaaaaaatatgttaggtgccgaaacaaataggagtacactttaaaaaaaatatatattatagaattttctaaaataaatttttaatttcataaatataataatataaatattaattaaatattagttaaatatatatatatataaatgccgtaaagtgcacggcatactgtagaaaaaatttgataagagcatcaccaacgaggcttcaaatttggtgatgctgtgcaattattcctccaacgtaattgtaaatattacattaaattgccgtgtgtgctacagtgcacggcatatatgccgtgcactgttcacacggcat

SEQ ID NO: 357947 - DNA, 504 bp, Cannabis indica
acatttatgaaaaaagcccttaacattattcacccccacattaccccaaaattctgtggaggcccaagcggtgctagtggattggtttggtcattaccaggctcgtgaaatcccaaaattttgtagctctaaatgttaatatgtaattagaatgcaaattatgtgattaaatgtaatatgtggtcaaatgaccaaaatgccccaaaagcataaataatgacataacatataacaagggtaatattgtcaattcaatcacacatgcataacacattaattcaaattttctcatttatcatatcaatgccaaaaataaattaaatgtattttgggccccaaatctggttcagtccaaaatacctaattgtaactatacccctgacttattaaaaaacacctggagatagacataataaacataatatataataatatagtccataagcacgatatatcataaaattacagttttaccttttttgggtcaaaattacgaaaataccc

SEQ ID NO: 357948 - DNA, 620 bp, Cannabis indica
aaaaaataataagacaaaattaatttattaaactttaatttcgattgtgaagtgtaaattgttccatgtgaacataacatgaaagtcttctattgtgtaatatgtattgtgaaattcaaattacaaagaggataaggagaagcttatatacttataaacgatatacaatatttatattttatatacttagaggtataattttatattttaacttgtgaaagtttcagcacggattaggataaattattattcagactctattaacactttgaaattgaataaggaaaaaaataaggtaatgaatagtaaaaactaaagggctggccttatttgggtgagcagttgaaaatctctcaaatttagtttctaagggcttctccaaggagccatcaaaacactatatttagtgtgagattttctccaaggacacggcatctacggctgcatattgccgtttgtgatacagtacacggcatatatgcagtgcactgtagcacactgcatttttttttttcatttttttttatatatttaataattatatatattattatttatatttataaaattacaatatatttttttaaagtagtgcattgatatactcttacttgttttgg

SEQ ID NO: 357949 - DNA, 732 bp, Cannabis indica
ctgacatactatacacttagctaaaaagttgaccacatctcttttcataccttcccaccaatattgtctctttaaatcttggtacatctttgtacttccacaatgtacaacaaatttagatatatgggcctcaatcaaaatggtctccctaagatcagggataattgcaactactagtctccccatatggtatagatacccttcaccattaactgtccagccgtctagttgctcaccatcctagaatcggttccaaataagtcttagcttttcatcttaccactgacgttgcttaacttgttgaagtagcactggtgtagccactatgttagagatacaagctacttcttccccttcatagtattgcaagttataatcacccattgtgattgtccttttccagtcctcaagagccaaacatgccaatgtaccatgaggctttctacttagtgcatcagctactacatgagatttcccaggatggtactgtaaagtgaaattacagtcctccatatactcaacccatcttctttgcctcaagttcaagtccctttgtgtaaaaaaatacttcaagctcttatgatttgagcagcaagttctaggtcatgtgtaaggtaattcttctcatgtggtttcaattgtcgagaagcataggcaaccaccttgccattttgcatgaggacacctcctaatcaagtacctaaagtgtaacgccctaatctataggaacgc

SEQ ID NO: 357950 - DNA, 978 bp, Cannabis indica
attaggaattcacatgtaattagtacttgacatccaaacacaccttgtattttaaaatacaatgtaattactatacagtgtaattactaccctagtaattacactacatagtaattacacagttgtttccaaacaaaattgataccttaaattattttaaaaagataaatttaagaaaatttcgctaacaaaaaaaaaaaaaaggttagatgtatagaaattaaaatataataggaattcatcgcccattactatatttttaaatacaaatgataaaaaataaaacaaagaaacaaaagagtgatgacatacattccaaaaaagaataaggctaattaggatttttgtcccataaactttaacatgtaccaaaccatgcctcctgaacttttctggctattaaaaattccccatgaattattgagattgttagatttaaggacttttgtctaatttcatttaattttactatttcagtgattgtttatgtactaaatcatgctctccaaactttgatatctaccaaatcatgcctttcaaactttgacatgtattaaatcatgccccctgaactttcatccattttagacttttttactaaaattggacaaaagtccttaaattcaagaatctcaatagttcaggggcatttttaacaatcttaaaagttcagagggcatgatttggtacatgtcaaagtttgggggtaaaatatatgacttgttaaaaattttaattcaacttttacatttactaaaatttagtcttttggttaagttatcttctattattctatttaaatgttaatgtgtttttataatttaataactttacctcctaaactttaataactattcatcttaccccatccgaataaaaaagagaaagattcacatttttttcttagtaaatcttgaaaggttaatttagatttaaaagaaattattttgaatgattaacaaaattaaaaaaaaaata

SEQ ID NO: 357951 - DNA, 647 bp, Cannabis indica
ctctcttcaactgtgtagtcccatacctacacagtctcagaataatcccacttgaccttccccaggcgatgtgggattgcacaacttacccggtatttccccttacggatcacgggactactgactgtcacaaggcccaatacttacatcttgggaacatggtagtgtaattgagtgggagcgctaatcatagatacagaatctatagcttctttgaatatatatatataagtgaaaggataatttctatcgagcttgggtaaacaagattaaatggtggagtactcatttcagtgattatattagtttattgaaatattatttataagtagctaagttttttaaggataaaatacattgaagggtagaatagtaaatttgtccctactcgatgtagatcataaataaaggaccattggttatttggatttaaacaatgggtaatttatagcgtatctatatttagaacatatagagcgttctatttaattggatgtgcaattcttaatctatgtggagtcaggagaaattaataagatagagaatgtacttggtaaattctagaactacttattgggagcttaattatgtaggcccatgatcccagcactagttcagataatattggcttgcagactcagttaatt

SEQ ID NO: 357952 - DNA, 984 bp, Cannabis indica
gggcgtggccccgtggactaggagtgttcgaaagaacactgatactacgtacaaatctaaagtgtcaagtgatttaattttatgcaattatttttatattcaatctattatgttttgtcgctgcaaaactgggttctgcagtaacagaattacaaattctgcttctgcagacgtatacaattttatattttcgtatatattattgatatttgcaaaaagttagtttttcaattgatatcagagcgggacaataaactcttagcgtggtccttttaacggtttcgtgtgtttttatgtaaaatgtcattttttgcagaaagaagttcgatttctagaccacctttgcttaatgattctaattatccttattcgaaagttagaatgagggccttcatcaaatctcaagatgagaaagcttggaggatggttctatcaggttggtcttctccagttgagacagattatgaaggtaattctaaaataaaatctgaactggaatggtctattgaagatgataaactttctgcctacaatagcaaagcgttgcatgctatttttaatggtgaaggtgaaggttatattaaacttatatcatctcgtgaatctactaaggaagcttggcagatccttcaaattcagtttgaaggaacatctgatgtttaacgctccagatttattaatttgatgagcttaggatgtctgataatgaaaccctaactgaattctatgaaaggctatctaatatagctaatgaatattttgctcttggtgaaaagcttgatgattttgttcttgtgagaaaaattgttagagttcttccagagaggtttaatactaaacttttgacaatagaggaagctaaagactttagcacaatgaaggtggaagaattaataggttccttgcgtacttttgaattgaatcaacaaatcaaacaataggacaaacccaaattcattgctgataaaggtaaaagtatcgctt

SEQ ID NO: 357953 - DNA, 659 bp, Cannabis indica
ttttttttttctaaataattttatttttatctactataaatatatatatatttcactaatattctttcaataataataaaaacaaaaattcacccactaaaaaatgtggcttgctcatttttaaaacagtaatcacctttgtcatttccataaatttaagacaaatcaaagcactaaattactaatattactaatcaaagcactaaattactaatattactaatcaaagcactaaattactaatattactaatcaaagcactaaatttacttattggttacaaattagtgattgaatatatatatatattgtaatacccggaattaggaaatagattagcaaaaccctaactagataatgtataattgagaaattatattattatataatttaatatatatgaaattatacaaatgttaatatgttaagaccttgttggtgagctaagggcattttggtaattatgacccaagaagggtaaaatgatgaaattaatttaattacgtgcttaataggactatattattatatagtatgtctgtgttgtcttttcaggtgtgttgtgataggttagcgcggtatagtcaaaccgggaatttcgggccgaacagggttcgggcccgaaatgtaaattgaattgattatttggcattttattt

SEQ ID NO: 357954 - DNA, 505 bp, Cannabis indica
ttttttttttttagttgtagcgtaatggtttttacaattatatagtagcttaatagcttaaaaatcctaggttcgaacctatgacctctccctttttccccatccctctctcaccactaagctagccttagtggcttaaataaaaataaattattaagttattatgattccgaacaacgcaaatatgtaaataaatttctatcctagtttaaatatttattgagcaacgataactgaaaaactacagctaccaaagaaaaaaaaattgcttgttagattttcaatatttgcaaaaacacacataatttaagtggcaaatcacttttaataggtgggatctttaaattacaccatctcaaacttgtgctatatttgatacaaaatgactttgtaatatatttacattaatttttagcaatatgcttcaatgtataattataaaattttacacaaaatttaataattaattactattttttattaaaaatataaaaattatgacttg

SEQ ID NO: 357955 - DNA, 546 bp, Cannabis indica
ctcgccaactcccattacatttagaagacttggtcgaagtgaaacaaagaccaggagagcctacataagtaggttcatgacagaagctacgaaagtagcaagattaactagaaagggatggctggtcgctatactggggggcattgaagtacttggagaactgtggaaagacattaaaaaaaagtggccctgtaagatctatggcagagttttttagaccgagcagatgggtttataaagctcgaagaggccattcaacgggcagatgtcgaacctaggccaggccaaccacaggtcccctcggcaagagcatctgctcaaaccctacagtatcctagcagctcaacttcgagtggcaaaatatccaataacaatggcatcaaggtgtggaagagggaaagtcgcaagcaaagccgaataaacccctagagagatgctccaaattcactgcctctttgtcctaattgacgacctagacgacgaaatctaaaatggtaaccccaagtctgtgtcccgtacaaaaaccctagctcccactgaaaaagg

SEQ ID NO: 357956 - DNA, 1298 bp, Cannabis indica
cacgatcatcaatagattcatctaaaaataagcattccaattgcaacttctgcttctcctcatcagatggacgaatgttcttaatcttcaactgaaaaatagaaacaaaaaaacaaaacacgaaacaaaaaaaataaaaaaaaaacaaagattaataaactggcacaaaacaaatataaaatagtaaagaaactaaaaaatcaccttgtttaacggcaaatcaaaaatcatgcctttcaagtctctaaaagttagctttttatcccaacatcattggtccaattcagaattcttgaaatcctggatgcaactcttttgcaaaaggtgtttaccatcgcaagacaacattcataaaaccaaactatgcacacccaaggacagcccaacgctctataccaaccatcataggactgacctcccttctcctcttttttatttttcatttaataccatgctctattttgcctttaaaagaatcaatagtcaactcaaacgactccctaccccaacaatactcatcccatcgaccgctgtcaacaacatctaaatcaaacctagaaacttccttatctggagtattgctaataaggaaatattggatgaaatacaacagagagagtttcaaacctatggattcatcctgtccccacctactgtccaagaaagcatcctctatagccttatgatcaatggtttttgtgtcagggaaacaaacctcaattaactagtttgattcctgggaaaacaaaagtttattgtaatccccaaaccaatcaagaccagtaatcaagtaatactcttcgacactgaaccgtatacaacggccaacaaccttagcccaaaattctttgggattgggctggtaaacctctctcaaaagtaggccgtgaacaacttgggtgaaaaataaagtcaaaaatatctaaaaaattcccaaattgggtgtctcagaacattgttaacaaattcacaaacaaagtattcttaatgttattaataacagagaaattaatcgtacataaacactgttgggatttaatgccctaaatcaaacccattacaatcgaatctgatttgttatcaataagagaattagaagtgatttatgttaacatatagttttcatgcttatggtttaatatatgcacaaaatcagttaagtccagaacatatattcattcacaattacagtgatgtcaacacattggaatgtgattgtgattatatgattcaaaagactaagttcctatttcatcagtgttttggatttacactgatgtgataatcagcgatgaagt

SEQ ID NO: 357957 - DNA, 535 bp, Cannabis indica
gatagactcgtggagtatgaagacttaactgtaaaatcacataaaattcttggtgttattattatatttattatactttattaatcttcattatttttgtgttaaatttattacaaaaaaggcttatttttagttaacaaaaatctgcattaacagtttggtgctttcattgacagcctacgtgataaaacttagaaaattcactcctaacaaacaatctgtcggtggatgatcacactcaaaatgatgaaagtcatcctaatgagaccacacatcgtcctgggaaagaaccaatgggttctcaaaggccacccacttctggaataatacgttcaagaaggagtcatggtggtaacaaccaaaacccagaaggaagaaacgaagaacccaatgatactatagggtatgtacccagaagtgaggatgcttatgatcccctaggtatgtacccttagtagaattgaaaatagacaactccgacaatgcttagccgaatctaaccaacgaaacaatgagttggaaagagaggctacag

SEQ ID NO: 357958 - DNA, 462 bp, Cannabis indica
cgtctagctgtgcgacgataaaaaagcctaattggggcaacccaagttttctttatgttttagttaaattttgttacgttttagtcgttctttctagtcttgtttagaaaactggtaaaacaagttttggttttcttattatttttgtgctgtatagtaatgaaaaaaaaattgtttttttttgggtttcgcccagtggccgcggtcagatgtaatgccgccgcagccatttaagagttacagagagggccaattattgaggttatctggccgcggcgaggggtaatgccgccgcggccatttaagagttacaagaagacaattttttttcgcgaattttggccgcggcgaggctatatgtggctgcggcgagatgatgcatacgagatttaaaaggcgaaattcccaaacatttcaaacacactcccattcaaaatccctaaactccacctccgaaaatac

SEQ ID NO: 357959 - DNA, 667 bp, Cannabis indica
aataccaaaacaacaaagaaagtcagattggcatacccttttctcgaatagggtagcgacatcaggttgcttgacatcatgtttcgtaactgtgttgggggtgctccaattcaacattcgagggaatctagtccctctgcactgcccgtacttcttccccaaatcttgcatcacctcaaaggcccagtattgtagcgccggtgcatatccgtagacattgtacttcgcctctggttgagtaatttttttctccttcttccctttcttcttatccttagtagatttatcaaggtagttcttcctcaggtcagtcatacttttggctgtggatgacaacaacttctgatatgaaagaaggccccacggatattcgaagaacttctcctcgttttctactaacttcagcatatccgaccatatataaacaccctcagcccttgatagtagcactccttcaacaaatgcacacagccccagcttgtacacgtcgtcggccacatcgcacgcctcaaaagctagccaaagggttttgaaagtgacccgtttggcattattgaggtagtcccgcaatatccgatcagactcacatagtgtagtcaattcttcagtcgaggggccaccgctcatcttcagtcccgtgatcaatccaaactcagaccttccaaat

SEQ ID NO: 357960 - DNA, 526 bp, Cannabis indica
agaaatgaagagttttgagtctcatttctgcagaacagcaacatgtttgagaactggtgaccagtttcaccagaacacaaaaacggactaagtgatgtccaaatatcacttaggaatcttaaagtacaccccttggacgtttttgcacttactcaatgtctaagttgacgtcatatgtcaacctgggcgttggatgttaacttgggcgctgggttatgaattgcctttaatgaaatagtcataactcactcaacattgatcagatcgatgcaattcaacttgattttaaaagttatttaaattctctatcaagtcatgtctcacacttcaatttcaattctgaagatattggcctcaaattttaccccaagagagttacaaaaataagcttcgagttacccgcagtgggtcctgtcaggctccaaaaaatgaccatcacctttagaagttaattttcaccgttagataatcatctacagtcagaattatccaatttgtattttttttattattttattcctatttt

SEQ ID NO: 357961 - DNA, 1715 bp, Cannabis indica
gaaatcaaatggatattaaaaaccaagtaagaataaatttgtaattttaatatttgaaaaatattattataacaataatagccataaaaatataccacattatagatttactaatattatatattcaaatatttgaaacaaaatatattgtattaaataaatcattttacatatcaaatcctattactaaagaattctaataaataaataaataattgtaacaccctaactagcataggcgtgttagtgtgattttaaacgtactgtgcagctcactgctaatcaatgaggttaatgaaaaatgtgattaattaaaatttgcttatttaattgaaaacttaaagtattacatatataaaattccaggatcccgtttacaaaatactttgaaaaagtttgctatacgcataaacaaaaccttgtcgcccatcgactatacaacaaaagccttgatgtcccaaatatcgtacgctccaggcctaaccgccatgacaagtacaatcttcatctgctcgtactcacggctcctcaactttagccttgcccttacctacacataaacatagcattgtgagtcgacatactcagtaagaaaatcataacataaacatacaaataacccgagttataacctggcgcccatacacctgatcataaccctaatccccgtgtcccacacggtactgagtctagaacgttcataagacaatactatcgaccataatgtcagcctatactcaatatgccagtcatactatagccatattgatgtgacaacatcgaccagtattttagccaacatacatttatcagtaatcaccacaactctatgtatactattactactatcaatgtaatctaacaggcataacaacatgtacgctaaacatgtaataacatatgcatgatattatactaatcttacctcaattccgaattcaggtgtgccggaacctgagtagaacaactgctcggcgaattataagctcctaaatcacatcgaaaacaacacacataagtgactcggtaaatcacaacagggactaaggtttacaaccaaaaccctatctactgcaactaaatatggtaatatcccaaattagcagggaatcaaccaactaaaaacctgaaactagcacgaaacgacaagctgaaaaactagttttccctgctgcaaaatctggtaaccggtttttcctaaaaaaccaaaaaaaattcaacccctaaccaaatcattcccaaactcaatcaaactctccagacatgcatattatacgccaataaacattttccaaccaacaaaacaacaattaaagctcaaatttgaatttcaccattaaatctccaagtttgagttctaaaactcaaaacatggttaaaccttcaaacaactaccaattcatgcttaaaacaactgaatctaacatataacaacctctgaaaactataacaaactctaacaatagctacaacaacaaaaccataaaatcatgcatgaactattcttctacacttcaagaaactaaaggaaaagttacaagaagcatacctagaacttggaaccaccaaattcttgctgaaactagcttgaaatctacaaagaacaccaaaccgtagcttaatctagggatttcgagagagagagaaggaaagagggttggaagggagtctttctttagttttttttttttggaaataaatgaaataacttagct

SEQ ID NO: 357962 - DNA, 976 bp, Cannabis indica
agttaaaacattaatgggaaaaaatagctagtaatatgaatcactatagtatgactcttgtgtggaggcaggcgggtcagggaaatacatgttggagtggtcattgaatgagttagatcttgcttgattgtttgcagattgttgcccctgagatccattattttgttgacggtttgggtaccgacgataatcatggtctgataagcgacaaatgcgataatgtcttgagtttcttgggatctgctccccgtttggtccttcccttggatttcccatacccttggttctcacaacttcggggtctttaataatgttggggttgttacgatatcttccaggttgtggcatctctccttccaaattggaactcaagtcaaattcttccttaaacattagtgttagccgttcaatctcttcctttgcacggttatacgaatcctctgattttgatgcatagaaagtcaagttataagttagtgaactgagggatccaaacctagccatctcataaatgtgttgttattgttgtgcagggtggttaaaatgtaggtggagatttgtctttgcggttatgctccattgcttcatgagaagagtattaggtattcttctcatgtttaatcttttcattgtagcccataaatgtctacaagggtgttgggattttatgccctaaataaaatccatttcaatctaatctgatttgttgtcaatagaagattagaagtcatttgtgtttacatgtagttttcatgtttatggtttaatgtgtacaaaatctgttaaatccagaacatatagttattcacaattacagtgatgtcaacacagtggaaggtaattgtgattatatgcttcaaaagataacctctcttgattcatcagtgcactggatttacactgatgtgatagtcagcgataaagtatacttacaccttgaataagtgttatgttctttccagaacattggcaaagt

SEQ ID NO: 357963 - DNA, 1667 bp, Cannabis indica
gtagcggataacagcggagccaatgatgtgtattcgaatcataggagctagtaatcgacgatatgctcatattggtgacgttattgttgctataatcaaataagcaataccaaatacagttagccactacttggtttataacatctggacctcccaaaaataatggaggtgtctgcttatggacctttcatacagtggttccatccggttaccaataacaaccgaccccacctgcataacaagggaaggagcaacttgcacctcaggagcaggcattgtaggagcactctactgcctcaaacgttgaatatcttcgtcttactcattaattctatcttgaattacagaaagcctaatctcccagtcttaggcaacctgcagtgggttaacatcaccccgactgcgtgccctacctcttgggcctctgcctcagccataaatattctggggaaactgaactccctgaccgccactagattcgaccaaattaccctggcttctcccgtttcgcctagcatccattctattagaatagcttacaaaacaatgatctagcctggtgaaatcgcaatcaagaacaaatttctaattaccgcttacttaagaaattgaagcatgcgcctactcatctatcaagctactaacatgcttcctatttgacatatcttatatcatactaataaaacaaactactaaagcaataaaggcttattgaaccgtgagttgagcataactctaatgatgattgtacatatcgtgacgatttttaaaaagtaacctggtggctctgataccaaattgtgacaccctactaggttaggcttgttatcgtgatttaaagctaattgtgttatccattgataatcaatgagcttgttggaaaacttaattaattaaaactttacttaattaacttttaattaaaacaaataaacttgacataaattgggatcccgtatttgaaaagttacaaccataataaaaaaaaatattagttacaaaaattatcacctagtgactaatcaaaatacaccatgttgtcccgaagattgaacactttcggtctaactgccccgatatgtacaatcttcatctgctcgcactcactgttgctcagcattagctttacccttacctacacatgtaaacagtaactgtgagtctacagactcaataagaaaagcataatcataacataatcttaaagcggattataactaggcgcccatacacccaatcataaccctatcccacatcccacacatactgagtctagaacgtttgtacaacagtattattaatatcagcctatactcggtactctactcgtactaatgcgatagcgtcaatcaaaacttatgccaaacatacattcatcagtatccaatataactctatgtatattgatattactatttcaatatattacaggcattcataaacatgcacgctaagcatgtaatcacatatgcacatcattatactaatctttccttgatcccaaatttaggtgtgttggtcaacctgagtggaactactgctcgacgatttacaggcccctaagtcacaacattcataaagttgataagtggcacgctaaatcactttttggggactaaaaaatcaaaaccaaaagttttcatatcgatggatagcatgacaatacc

SEQ ID NO: 357964 - DNA, 757 bp, Cannabis indica
ttgacatcccgcacgtatcatctttgtgctcagggctgtaactagcggtaagcttgacttgactttgattccttcaaatatgaatgcctctccagattcaggggtgaaagtcactgtcctctttcggcagtctattgttgctccatgtcgtgatagccaatccatacccaagataagatcgtaatccctcatctccagctctatcagatctccactaagttccttgtctgcaatccttattggcgcatcccgcactcctctagatgatatcataacctcgcccgagggcaactccgtcatgaacttataactaaagtttacatacggtagttctaacttatctatcatctttaaagcaataaatgagtgcgtagctccagaatcaaataaaacagtacatagttttccagagatagaaatctgacctgcaaccacagtgttactagtctcagcctcccctctggttagtgcaaatactcgagctgggacaagtttgtcatccttgagttgatcacccttttgtggacagtccttcttatagtggcctggttgcccacacttgtaacaagtcttgcctttcagtcgacattctcccggatgcttacgaccacatgttgggcatagggggtactccacatatggcttcttccctttgtagttattggaccctatcttgtttctcttgtcggcttcgttgtgttggttacttggcagttttcttttgttatcattgttggaatttattttaccaggatct

SEQ ID NO: 357965 - DNA, 655 bp, Cannabis indica
gaatgttgggattagtcgggaatttagaatttcccaaaaatacccttttatgtgcttttaaccctttttgtgtgggaggggcaaaatggtctttttgccccataaacctttgtcctttagtgggcttattattattgtgtaatgtgatttatgaggtgtttatttggctgaatgaataactaagattaatttttataactcatttttatccaaattgaaaaatcaaaggaaagacaaaacccaattttctctcaagcctctctctctttcggcctccttgagcagcaaggattcttggcatttttcttggaattcaagctaattttaacaagatttagtgatcacaagttgttggtatgattcctatagctttcttttaagtttcttgaatttttgagaaagtttgataattgcatgctttgagttttgtggttgtagttgttgctaggttttgattgtattttcagaagtttatttatgtctaattgaatggatttgaactgattatgttgttagttgttggttctatgcttgtgtgaagcttttaaactcaaaactatgatttttaaggttatatgttgattttcgttgctgtagttgttgttattgtttagtgttgttttctgcggttgcattatggtgaaacatggtgaat

SEQ ID NO: 357966 - DNA, 700 bp, Cannabis indica
ttagcttcttatttttagtttaatgagtttaaaatattatttctcaagtttagaattaaggttaagaattttgctcttgaattgatttgttactttgttttatttttatttgaaattcttggaatttctcttagttgattttgcattatttagtaagaagtccatgtggagacgaactttgattacttatcattgtattacttgtttgtgattgtgtacacttgcgcaattataaatcaatataaattttcacaacagagatttctaccagagacatccgagcaacttcgtctggactatgtttaggcttcaaacagtgagtaagttttcaatcttctcctcttttaactatgcatttttaatttctgggtttccattgtacaaaatacatttgttcttgacttgttgtagaagattcatagaaaatctagtcttgaaactttgtagctttctctataatatttcatacggcatcttcatcttgactttaatctcgcattgttcgtttttcaccttgctcattcaaagattagtgaaattttaacttttaacccaaaaattcaaaattgattggttatgacttaatttttgtacgttttttatcctttcaatctgttgagtattcctggtcggcatattttcatgtttattgttcaatatcccagccaaacactcatctcgtgtgttgtcttttatagat

SEQ ID NO: 357967 - DNA, 523 bp, Cannabis indica
tgggtccgagtcccaagttccattaccgatcttagtctagattcagttctgggtctaagtccttgcttctgatcctggtctgggttcgagttttggtctgggtccgggtcagctttgggtttgattctaggtgtggttttgagtttggctccgaatttgtgtccgggtttgtgtcgaggtctggacgccgatctgggtctaggttcggctccaggtcaaagttcaggtcccgagtgcgggcccaagtttgagtttaggtcaagatctcggtcaagatctaggtccaacatttcgatcccagtttgggttagggattgaggctgggatgcagttctaggtcctgaccctagttctgtgtccccagtttggttccatgtttgggtctgagttcaggttcaggtcccgagaccaggtttgagttgggatccgggcccggctcccaattcgtgtctaggtctgatttggagtcccggtcctggtccgggtacggttctagatctaggtccaatttcagttatgattc

SEQ ID NO: 357968 - DNA, 739 bp, Cannabis indica
gggtgataacatccaatttaattgaatagaataattccaaataacatttataataaaaatggataattttttttttaaaaaaaaaaaaacgaacattcgacattagggattgactactcggttcgtgagtagttggggaactatgttagtggtgctcaggtcgttagggaagttcgatagtggcacaaggtgtctgggctacttgggtggcagtcaagggctcgggatgaaatttgggagggtgcaatttcaatctaagaaagagaagagactaaaacaaggaaagatggaagtgagatagtggagagtttttaaatgaggaggacattttgggaaacatagaaaagttagcctatatttaagaaagagaaatgttaaagggcaccagtagtgcctagcaccctcttatatgtcaatattgttattggttcaactaaatatcgggtcctacataattaaatataatagctttttagaaatatcgctaaccaatcgcaacgcgacatgccgagaagatactagacatcacaaatgtttaatagcaatctgtttaagaaatatgaaatacacataaatttagagtattaattaccccatatgtatatattcttaagcattttcctttataattcaaacttggaaactaaaaaatatcaacacagttttcattatttacttattttaatttcacttccaaaatttaaaaaaggacctactagtctacggttctccaaatcaa

SEQ ID NO: 357969 - DNA, 544 bp, Cannabis indica
gttttggcccaatgggctaaataaaaacgtttttgagtgtgttcatgagccctaagcacgttaatacattatgtctattttattatagcattatgtctattttattatagcatgatgataataccatggaatactaattatatactggtcttgagtgaacaatacttaattatgttagtttacataaaatattctaacataaaaaaaatctaaaacaaatgcaaatttttatttgagagaaaaaaaagaaaagaacaagaaaagaccatgttgaaataagttataataaattgaaaaatgtaatgaattgatggcaatcccacttatagaaacctcatgttgtaacaagaaaaatatggcggcaaagaggatgtatcaaaaatcaaagaggttgttaggtattgaaattaagttgagtgttttatatatctattctatataaagtgtgtctatataactgaaattcttggtttatgagaaatttatgggtcatttttattttttatttaataaaataataataaaacaaatcctattaatattt

SEQ ID NO: 357970 - DNA, 881 bp, Cannabis indica
caaccggaattccagttcctcgcaggaatttttcaaaaattcacacatagctcaaatccaatccaaactataccaaaacttccagacctgctatttagaccctaaggagcaattctaaagcaacaaaaccacccagaattcacagaatcaaaaatcaccattggaggttcaagattgagttcaaaactcaaaacttgactaatccctccaaacagccactaaaacatgcataaatcaacatatttcaacatattaaaactgcagaaatcaaaccctaactcatgcaacaatcacagcaacaaatttcgaaaattctctttgaaaactaaactttgagctaaaacttccaatcttgaatcaaagcaaatatcatgcattaaactagctttaatctacttaaaataacaagattaatcctctgtaaatcacaacaaatcacagcagcaagaacacaaccaaatcaagcatgcatacatcctctttttcatcaaaatttaagaaaacaaagaagaaaagagtaagaacaatacctaaagcttgagttgaacacaaaaaaaacctgaaaaaacaaagaaaatccaaagttcttgctgcttcaaagggccgaacaagagagaagaaaagagagagctttttgagaaatttctaactttttctaagtttgaaaagaaaatgaaattaaatgccacttaacccattttacttcagccaaaataataatcaaaatatcaattggggcaaaatgaccattttgccccttcacactaaaataacatctaatatactaagttgttattttactgagccaaacaccgagttccatgataccgggcaccggaatgcaaacttatgaaaatctctaaatgacataaaatgcattt

SEQ ID NO: 357971 - DNA, 833 bp, Cannabis indica
cctggtaaaataatttctaataaaggatgagctgttaattaacgactcttaaagaattaatctcgcttgatctgaactcgtaaaatgatgcgatcttgacaggatctagtcgcatactatgccacgcgtggtataagaaaagcaggaccgagagaatttatataagtcgcgcatgtatcgaaatatatgcgatgactaagttttcttctcccacgactaagtaaatatcgcttctttacataacgattcattcgaatgacaaatcgtgttcgacgactcggcagggactcgtatgtcctatgttgtcaacacgtgagatgtctgtcaatgtattcaaggtgaacacagacatctaagcgataggtccattgtccattcagcaaatatagatcgcacctaaagcttgcaagtttgtgcgagaatatgaatagtcaattcgcgctcgataagttgcatacgttcttgtacttaatacaagaacgtattaaattgttcttcatttattcttttacgtttattttgatttaatactatcatctattgtaagaacggtttaaaaatcgatcaaccatgtaaaactaaaagtttttctatataaatgaatgatccaaatcaaataaactaagcataaattatttgcaacagtggactaagcagaccgagatctgactgaaccactatatttccttgtatcattatttttaattgttcttttgttttcagtatctcattgttgaatactcgctactttaagtgagtgttcatacttttttttattcagcttatttattattgaaatttttacatgaaaaatcctttttacacactttatt

SEQ ID NO: 357972 - DNA, 610 bp, Cannabis indica
ttgacaagatcattctctgcaaagagtccatatgcctatatccacttgaaagtaagatcatctatattcgaatatggatgcacattcaggggtggatatgagttttcgttatattcttaagaatatcactctagattttacctttgcaaagaaatttgaaatgttcgagaaatttcataaatttctagcaatgtttaaaaacattaacgtaagtggttaccgatcttgcaaactgataggggtggagaaatatttggtggatatccagttcaaaaatcattaagttgaattttgaattctatccaaacttacctcccaagaaatttgatttgcatattgatgatagtataaggtttatgattagttactagcagctgcctaagtccttctaggaaaataccctagtgataggaaaattttagaattatggaattgttgtgtacttagtgtaaaccattactattcatggatgtcctaattgtgaacttaacaaagctagaattgttaactaaggtttgcatgtttgatagctattctgagtgattagggatggaccatcctattgtcattaagataagaaagtctttgtttcaacaaatactatttttct

SEQ ID NO: 357973 - DNA, 616 bp, Cannabis indica
attagcaacgagctgcacagtacgtttaaaaatcacgtaatacgcctaaggtagttagggtgttataaattgcttcctcaggcccactttggctccctttgcctcggagattactagcgagtttgtctcctatctgactcagttcccgcctaagagatatgccgcttgtgcctccctaaactccatctaccaggttcaagacatcagctctgccatggcttcggtaggtacttgtgatttattccttcccttgatattttgtctaaggcatccgatctcactcttgtctcctttcccagattactgcggagaccagctgcctttccaagaccttaattaaccagggcttcatcatgtccgaatttgggggcatagacgaggccgtgaggatcctgcgggacttgactaccgaaaggcgggcgatccaggaggaggctgaatgaagggaggccctcgctgaggtgaagctcaaggaggaagctaaacagagggaagcccaagcggaggcgaagctccgagaggaggccaagcggagggaggctgagatggaggcgaggcaccgggaggcgctgaaggcggagggtgaggccgctgccaaggctatgcgtgagcttcg

SEQ ID NO: 357974 - DNA, 505 bp, Cannabis indica
acaactcactatttttctccccagacatacttctctctcacacaaaatacatatttataaagttacaaaacttggacatcaagataacttagggactaagacattccaaatcttccttaagaagactcattaaaacttggtcaccaagactatcctttgccaacaattaataattactcaaagaaatgataccttaacaaatgtagataaataaataaataaataattttagtcaaactccaacatagataatttgactaagtgttgggagagggagctgttggaaattattttacgaggatctcagatctactcacaagtatgttgattaacaccctaaatatgaactttctaaaatgatgaaataaacacatataaagtttagtaaaccttacattgggtgcagcgaaataatatgacaccttccgttcagatatctagctcttgattccttcctgtagcagagcattatcaatatctgaacctggatctctttctctgattc

SEQ ID NO: 357975 - DNA, 1088 bp, Cannabis indica
ttggcattaaattagctttgttctcaagtatttttaatttattttagtgacttttatttgattttatttagttttgcatgaatattaattttattattctttgattaatttttaattaattttgtaatattttatcaattttatttactttcccattttataagtgttaatctcaatgttctgtatttttgtaaaatgtttaaatgcacattttgaacttatcacatgggtcaaattatggagctagaatttcatcaaagtttcattgaaatcactaaagcttaaattgattgataattatttatagtgggctaacaattaacatattgggcttttacgtgacccaaaggagatgcagcccaaaatgaatatattaacttcatttggcttgaagagcctagcagtaggcgtgaataagagagaagaatgggctgcttgtatatctattctatataaaatgtggctatataacagaattcttggtttatgaaaaattattggttggctttttttttaaataaaaaaaaagaaattattacacataaagggtcagcatccatgcagttagttaaacctaaatataattaatccgcctaaattatagtgttgcaattaataataaatttgttcgtattgtttatttttttattaaaaattattttcaaattttgattattagaattagttaaattttaaatattattttaaattaaatttgaatgttttgatagtttaaccaaataagcattttcattaattgccatgataaatttaggacgaataataattttttttaattactattacaaagtataatagtaatttttgtttttatttaaatcactattttgctttcaaatttaaatgattatcactacattgaatattattaattttaaaattatgatattacaaaaactaaaaactaaaataaaaattaacatacgtgggttggcacgtaacatgtatgtagtatataaatatatatgcatagatgtataatgagaaggcatgcgtgaaacaaatagaaagggggggccgagtttggtgctactcctcctgacgcctacagtgaagaaaatgaagaa

SEQ ID NO: 357976 - DNA, 560 bp, Cannabis indica
agatatcttaaatagttataatgtaaacgaataatactgaaaaaatattttttttttttataataaaacaaatgtattagtgtattccttttaagatgatgcattgtagaaacacctataatttaatataataatttttatagaatattatcaatcaatcgtaaatttttacctttaagtgatgccaaataataataataataataataataataataataataataataataataataataatacataagccaacctttcggtttattctactaaacttacaaaaatattagaatttaggttaacttttacaaaaatactgtcacactaacttcaacagtgaaacacaaaatagaacagttaaaaataacattgaaacaactaaaaaacaacggtagaataacagtaaaaatttaacacaatacacagtataaaatttacacaataattttgaaaaaaaattctacccacaataaaaaaaaaatcaaataagttgtgtaaatatctctttattctatctacaaaaaaaaaaaaaaaaaacaaaaaaaaaaaaaaacctt

SEQ ID NO: 357977 - DNA, 695 bp, Cannabis indica
ccacaccgtaaaatattaaaaccacattttctttaccgcatgtgcgatttaagaggtttgatgaataacccttatttgaaccttaaatctgccaaatcatttgactattttttttttttttaaaaaaaaaaaaaaccaaatcatgtaattacactaacaaaagctcttacacataagtatcatatttggtggctgaaattcaagtttaacaaaaatgaatcttcaatttaaaaaaaaaaaaagaaaacaatctcagagacccatacttctcaatatattagttaatttgctagtgtcatacttacaagtcttcacgatttaccatttttccttaattaattcttccatacaaataatacaaactttaaattaacctagctacaactagatagaagcatgcacgtctcaaaataatgatcgtatatatttatgcctacgttttttttatatcatatattatataaatatatagattatgtataaaaaaatttctatattatcactctttttttttaaagaaaagctccaagtactccaattcaatactatatatccttatttttaagggtggatctacataaaaatatagaaagggtagtactcaatatatttatatttataataaaagataatgtttatatacattaggttaattttaatataatagttaagaggtgactattcaatggttacat

SEQ ID NO: 357978 - DNA, 855 bp, Cannabis indica
tgtaatgggttttatttagggcacaaaacccaacatatagctagcccaaatacatcatgaaaagtaggcaatcatgccctaagatcaaatttgggaaattgtgtgtattccaatttttgcctaggtgacgtggcatgtctatataggcaagattaatgccacgtggaatataacatgtcactaggcaagccaaatcaccatgcacaacatatttattaacgagggatccaaatactcagtcaggataaagttataagaaaatggccgaccaagagggtctggccagaccaccactggccggccaaggaataccatgtgctggccagccccaagcaaaaggtgtattaggcagtacatgtaaaggatgtccaaaagatgcctagtcgattgagatttctacaaccttcatcttggatggatcataacttgttcttagctgcgaaaccactccaacaatccatgaaaataaggttttaaccctaaaatatatacctatcttttagggatattaattatttaattttatagtttaaatatataataaaaaagactaatatctcttatttttaagggatattaacctatttgaatctagatcttttgtaagctctaaactatataaacaacatcaggctaaatgaaaagggacctaaattctaagtctcgaaagcctttaagcactcttgttttctctctctcacacgccaccttcagttcattagacactaagtctgtttctcatctcacttgttcgagatttgtcatactttattctcactattgtaatattcatagagatgttagaaatattttatcaggatctagatttactaacaagtatgtttcattaacatc

SEQ ID NO: 357979 - DNA, 506 bp, Cannabis indica
tggacttaaatagaattcatagattatatatataatcatgaaataaatcatgtgaaccatgcaacataaaatgttaattctgatctttattaataagtagatctgattatattgaaatgggttttatttagggcacaaaacccaatagttttgaaaatgttgtgttaaaattaatataacaattgtggaggaaagaaggcgaagacgagtcactatagtgactcagtgacggtctcgcagcaggagaattgtagtatttgcttccgtgagcatgatgattgctgtagtgagtcgctgagtcaactctagcatttttggctcaataatccaaaggaagaagacgaagacgagtcactatagtgactcgccgttggaaaggtagatgacatttctgctctttcggtttccttccttgaagttgagagcttagacccgagttctttctttgactgaggtttggaaccctactgcgagagggacgcctcgcgagccgggcttctagagat

SEQ ID NO: 357980 - DNA, 797 bp, Cannabis indica
ttggggccacaattgtatatataaaatatgtgttgggtcatcaaataaataagtcaaatttatgtggtttattttggaataaagttgatgacttaagagcataattgtcatgattttaatgtgtggataccaattagacaatttctattttgatgagggaccaaataaaaatagttaataaatattaccaacagttttgtctgttggtaatataaacaggtatcggtccccattttttgcatcgcttcatacatcgtattcttgaatccccatcatcaagaaactcaggttccagagaaaaactttgatgcaaaaattggaagatcataccatttaaagattgattctatggactccggtacgcttccgctattccttaatcttattgtttgattctcttgaattaattagggcaaattaagttttacagtgttcttaacatatacttcatacttaaattaatatttcatattttttcctctttccttcattatataccatagcacattaaaataatatactgcaatattaaactaatatattttcttttagttttttttcttagtatactattacacataaaaacaatcaattatagtgcacaataactataccgaacaataaactatatttaatattttaattttatttttatttctttctttcatgatatataatataatatataaatgctatacataccttagagtaatatgaatataccacaacaattctatagtcaaataaatatatctatttaagtaatactctattcaagaataacctctaatttgtta

SEQ ID NO: 357981 - DNA, 595 bp, Cannabis indica
caataaaccttgtattatgccaacgagtttcaacaactctgttgcacctttctacaattgcacgtggtagttgtctttctagcatctctccacacgcctacatactctctaagataggccaaccaggttcacctcccactgagatgaacttggctctgataccaactatcacgggctcaccttttcagacagaagaacacctcttcagtaccttgacttccctaagccaaggtcaaccttccaactatctgagtaacaatgggctcatttttcgtgcgaccatgtgcctcgtgcacacttctgtctctcgaacaactcttgctgagtcatgctcgcaagcatccatgagtgcgtccatgcatcaagactctttagctaaaatacacatactgtccataggttcccactatgataaggcaaatcccaacactgacgctcaccttgtcactcgtgaccatggtagcatgtgtggcaagatgccaacacaaagatgacgtgccaacacttctatcatgccccactcgatactatctgaatagtctccctcgtcgcccaaggactcccatacgtctatggaccaatcctcaaggcgcca

SEQ ID NO: 357982 - DNA, 1837 bp, Cannabis indica
tgacttaagatcaaagagaaagaatctttttcttttagctcttacaacagtatctctgaatgtataattcttagataatatatttagggtatagtcttagctcaactgtttttcgacctcttgcccagtgaacatgtatccccctccatctggacggctagatcctattcggtgctgggcaaagtggcgtgccgagcaacttgagggtcagatgcgttagccagacgtgtggttttctttgtacgagctatcattttatggctgggtacatgatttagagaatgtccttcactagaggaaggtgggctagaacgaagacgaggatgatcctcgtgtagaagttgaagtagatcctaatcgatccaatgtctgttctcccaagacgcacctgagttcatctacaaaagacaacacacaagatgagtgtttggttagaatatcgaacaataaacaagcaaatatgccaaccaagagttctcaacagattaaagaatgtgaatgttcaaagaaaagtcagaactcaagaagtcaaaaaatttctcgagttagggcaaaaaagttcatgaagcttcgaataagcaatatgaaagacaaacattacgcagttcagaaacaagcattatgactctaaaatcgcatgaagacatgataaagaagaatcccggaagtttctggacctaggatttcctagacattttctacaacagagtcgaaggtgcattcaaaatgtaaacaagcaaagataagcatataggaaattggaaacttactcgagagtcagatgtctgggttcgagcaacgtcaatccaacaagcagtgtttctgaaggcacttcggcaactttgaagccaagaatctctcttttcgctctgaagcttacttagcaaagaagggtgatataaatgagtttatgtgccaatactgtttgatatttataggcaagtcacgaaaagaggtaatcatctcaaaggaacctcatacgcctcagtttccctctttaaaagcgaatatgggaaataaaaaataatcaagtgcagccgtcagccgtggagagagaaaattggatttcaaaatattaattgtcagagcatttattagcctaaaacccaagggatgctcaatcaacctcacatagagtctcggacgatcgcactcgccacgtgtccccatacaaaggcagaagcagctcggatgaagtctacacgcaacttcggaagttccgtacagatttcgggggcaaatgttatcccaatttttgcactctgacgtggcatcacatgaatggtgacacgtggaatccacttggaacatctgctcgggaagcatagtccgagcaggatacctcgttggcatgctcaaagcaaagtattcagcaatccgcatagagcaaccaacacatagcgaatttagctttcgcatcgtgagtcatcagcacaatccctataactcaaggatcagattacatggatatggcatacacacgatcccactatcggtgtattcaacctcaatcccacgatccttgtattaagtattgatcccacgatctttctatttatgcgcattgtaacgagaggggaaactcttcctctccaagcttactagccctataaatagtgatgcatgttcactgggcaagaggtcgaaaaacagttaagctaagactataccctaaatatattatttaagaattatacattcagagatactgttgtaagagcaataagaaaggattctttctccttgatcttaagtcaatacaaataacgaggattatgctattaccgaactgctcggggctgaacctctataaaattcctgtgtctttacattgctt

SEQ ID NO: 357983 - DNA, 666 bp, Cannabis indica
agatcctggtaaaataaattccaacacctttctccttgatcttaagtcaatacaaataacgaggattaggctattaccgaactgcttggggctggacctctataaaattcctttgtctttacattgctttattatatattgattgctataaatcccttatctcttactaaattcgactcattttcgttggctaaaagcgaggtcaacattttggtgctttcattgagagaaggatcacaaatcgctctttattcaatatctcacaacaaatacgatggtgcaaactcgtagtggcctgactgatccagaaaattcacaaacggtggatcctacattgtagaacccaggaaacacaagggttccgccagctgttaatcctggacatccggtgaacatggggaatagtgtaacaattcctatagataaaaccgcgcctggtgtgcaagagactgggaataaaagttctgcacccaaccagggcactcataacacaactgttccgcctggaaccaacacccagacgatcatcggagatgccacttagttacaaaatcttcgtgacgctctcggactaatgcagggtcataacaataccctacatcatgatcaggacaaactccgcactgcggtaaatctcgcgtttgacgaacaaaggcatatgtttgc

SEQ ID NO: 357984 - DNA, 804 bp, Cannabis indica
gagacacagatgtcaaactattatttcacgtattgacaagaaaaccatttcatatatgaagacatgatcataaggactacatcagtaataaaaagtgaggcaccaacctcgctacgtatgaagaaatataaattagacatgttgactgatagaacacttagcgtataatatacattatacaaactaagcataacagttgaatgaacttgaacaacgaatagcgaagcatccatctcgctataggaaggaaaactcatagtaccttaactaatcagtttcaaacatctttcaataagattcactgttccgtcgagtcaactctctcagatagaagctgacattcaaatgatgttgactgctgaagttcatcttgttacaaagaactgcaattatcagatggagcgtaatgtcttcaatcgcagaaacaacgagatttacattatcaacctcgaaaatacatgggaaaagctctagcttactgccagggtttttatcgctatgttcccagggagaagtcccaacacgatacacattacaacgtacttaatccacgtacgcattgacccagtaaaagcagataaatcacagttgtgtaattttcaaataataactgcatttattttatgtgggatgaaatcaaatcccacaatttcaggggattattgttgtaggatatcagtctgatttgtaattaactgtcctcctatgtaactataaataggagtaggatatactgaaaaaggggcaaaaaatcttttagagaaaaggccctagttttgtatcaaaaatctaataagatagact

SEQ ID NO: 357985 - DNA, 661 bp, Cannabis indica
agttcctggtaaaataacttccaacatccccaagttgacttggtgctgggcccatcacccaaggataaaataaacttagtgcattggtttcgatcatctaaatgcaaattcagttcaaagaattctctcaagtgtggtcaaaaatggggtaggagatctcgtccccaattttaagaaccttggaagtattaaaacggcttcacagaagctgaagaaagagcacacaggtgcccaggttgacaggtgacctggtgcactagattttgcttatccgattctgattttgtctcgagcgctcatctagtttttcatggtaaatgagagttatgaactcagacaagtcaaatttacaacttcatatcgtcactttttcagcaaagtgacttagttgcaaatcgagcagttttgagtctctcaattttgcaaaacagcaacatctctgagagctaatgaaagactttacaataacacggaaacaagttaagtgatgtctaaatatcactttggcattaaaaagtacaccttcaacacattttttccttggcctagcgtctaggttgacgtcatatgtcaacctgggcgttgggagcagaacaaccttcagtagaacgatcataacttactcaatattgatttgattgatgcaatttaacttgcattt

SEQ ID NO: 357986 - DNA, 521 bp, Cannabis indica
caaacaccatcgtacgatacaaaaagaaatactttgtctcctgcaatttcaaaccaaacaaggtgagtacaggaaaaaataagaaaaaataagaaatatcgacatctcatcgatatccatcgacttatgtcgataaaaaatacagcacaaagtataccatgtttcatcgacaaataatcgacatactgtcgacattatatcgacaacattaccaaaaaaagaggttggcagtcctcatcgatatataatcgacacaccatcgacataatattgacatagactcctcaatgcaatttgcatgtcagacacgtgtacaatggtaattaatccattccactatcgacaagctatcgacattgtatcgatattcactcgacaaatacacattgcatgcgtttcatttttaaagtttacacatttaatgttaataaattttacctatgttcccaacaacccttcccaactgccacggtgcatgtcagacacgtgtatcatcgataagctatcgacataacgtcgac

SEQ ID NO: 357987 - DNA, 516 bp, Cannabis indica
ccaagatgtaagtatccacccaacaattggttagctttcacaacatctctaagaacataaataatacaattgagatcgaacctaactatcttaggattaagatctattgacctaagatcaaccagtgataatgacttagaaagatataacaataagtttatgatatcttatcctagttcaatatcagtccaatccaatgtatactctatacatccaatactagtatactttgccaataccctagaaaggacaaaacacttatcaatggtgtaagtatactttatcgttgattatcatgtcattttaaatccggtgtaccgacaaatcatgagacttaaacttttaaacatataatcataattatattccactttgttgacaacactataatcatgaataattatatgttttttatataatagaatttatatattaaacatataatcataaaataaatcatgtgaactatgcaacataaaataatttctaatcttttattaattagtaaatctgatt

SEQ ID NO: 357988 - DNA, 675 bp, Cannabis indica
aatgagaaaacagctggcgacattaatcctccctttgatttcagcatagctcagattgatgacaagtcttggtttgtgattttacagacttgtggtgaagaattgactgatctggtacttaactggttatttttttctgtctgtttttatttttcttaatttctttgcttttttcaatttttaactggttattgtttttattaattgtgtgcagcatctgaatgtggtactctgctatcttaggaagaacatcttatatgatgttagtgttaataagagagtgacgacgacatgctcatattttgatgcaactattaagggagtgtatgctaattttataaaggcaaaacgtgatctaagtgtcatcaggtacgacaacatggtcaccgattacattctgggacaatataacttttgcttccagccttggatcggtgttgacgatgttgtcggtccatgtcatgtcggtgttcaacgacattggatatttcttcacttcaacattttaaggaggaagatcttcatattcaattccatgaagaatacaaagacgaataagaagatcttgcctgatctccttgcgtactgtgagttactgccatacttccttgatttcttaaatttttatgatggtaggaacgacattagtttggagtcaggcccttatgctatgcc

SEQ ID NO: 357989 - DNA, 499 bp, Cannabis indica
acccgcttaatttgaaattgacagttagaggcagttttttgattgataaaaccgtaggtatagaaattaataaaaccaatgccctcagttgggggttgaaaatcctccagctgtatatataatacatacgggcatcagtaattatggaaataaccgacgcgatagatgcacggtttattgacaataaatcgtgcatctatggcgtcgattatttcctaataaccgacgtcatatgtattatatatacgagcagcaaggcttcatcttccccacttcgcctccttcttcaggaagtaggcatggcaaaaagatccattcattcggatcgaatcagtgatccgatccgacggatcattactgatacgaaacattcggaagttattggatcttggatcagatctgacccgccccgtcttaaattttttacggatcggatctgactcgaatccgttttaaatatatttttttttaaaaaaaaaaagaaatttgaatctaccct

SEQ ID NO: 357990 - DNA, 739 bp, Cannabis indica
catgacccagcgcccaagttgacatatgacgtcaacgtggatgctgggtaagtgtaaaaatgtccaagggatgtactttaaggtgtttaagtgatattttgacatcacttagcctatttctgtaatctagcgaagttggtcaccgattctcggagatgttgttgttttgcataaatgagaggctcaaaattcttcatttccgagtgagttttccatgttggaaatgagaaatgcgaagttgtgaatttgacttctctaacttcatggatcttagtgattgtaaaaacctagacggacgaccaaaatagaatcagaattggataagtagaacctagtgcaccgcgccatttgtcaacttgggcattgggcacttactcccaagctcttcggatctcgtttttgatacttctaacgcctataaacttgagcacgaggtctcctaccccttttttgaccatctcagattcattgttcgaataagatttggcatttgatcaattgaaggtagcgcccccagactcattgtcaatttgagcgccaggcccaacaccagggcgctgggcccagcactaggtcaacctggggccccatttttaggagctcgggtttgtggttttctccctgagtttgcttgaatctttattatttttaatgataaaaaaatgccttaatatttttggtgaacttgatcgaagacaacccaggttaactgtaacgccctaatgctaaggcacgctac

SEQ ID NO: 357991 - DNA, 582 bp, Cannabis indica
tgtcacaatataattatcacaatatagcttattaagtttttttgttttttgtttttttttatgaatcagctttagctcaatataagctggttttgaatgataaatataatggtttgccaagtaattccgcatgtggtatttgcttagatttatattcagtaaataaagacaatgaatctttgctaccaacatctgaggttagaattaacaaccacaacatgaaattgcagacatacgaagaagacgagagaaaataattaaattttcaaaattttaattttaaataaaaaaaaatagaaaacaaaactcagttatcgaacatactttttttttgaaattttacctaacacactttcaaaagatttctttaatttttattaaaaacaaaaattcaatttaaaaaatactaatataattaatattatatatgtttgtatgtatactaatccattttcactttcattatttaaccaactaaaatacaaaaaaaataactcttataagtgaaagtaaaaatagatgctctcacttaatgactataaatatatatatatatatatatatatatactaagtaaaaagt

SEQ ID NO: 357992 - DNA, 808 bp, Cannabis indica
cagctcattaaaagctgattgaaacggtgccaagttgtgaaagctgggtcgatttggttcaacgttggatttggaaattgcagaggacatgccacggtgccatcaatgtaaccttcaagaccatttgcaataataatgttctgcatttacatcctccaaacaaagtataattagtgtcatctaattttactgagatagtttgattgaaggaagggaaatttagaggtaaggaaggagaagaagatgatgccgagaatagaggagaagaagaggtaggtggtgcggcgatagtggtgggtgttttgtgtttatgatggtagggttttgaaggaggttttaggtattttcatcttccactacaagaaatgtcacttttgccagcacatttttgtgctggaaaaagtcatgcgctggtaaaatagaatttatttgtgatgtgttggcaaaagggggttggcaaatcaatgttggtattagaacttttgccagcataaaataaaagcgctggcaaaaataacttttcccagctggtaaaagttagattttagccactgcaaatgtatgctggtaaaattttgacctctttgccagtgcagtttgcgaaatgcgctggtaaaagttacttttaccagcgcagtaacgaactgtgctggtaaaagtgacatttcttgcagtgttccatttatggggtagacctagtacaatctattgatgccatggggagccttttggctctgataccatgtcataaggaatgaaagtgtattactaatcctcagggtcggccctgaaatttagtgggctatag

SEQ ID NO: 357993 - DNA, 1052 bp, Cannabis indica
ccgaagcccccgtagttatggttagcgtctcctcgtcccgaggcgtccgctggtaggtcctggaggttgtaggcttgatacctgccaccaccacgatctgttccagctggtgagggcaggtcagggtagaatgaagctcagccgcttcccacccgtacgcacgggacttgtgcccctcttcggccacaggacccttcatgacctcctccagggtggccaagcgcttctgtaccttcttcgaagatttaaaactggatgtagacattttggttctgaaagagattgaaaaaaaaaatccagcagtcaggccccaaaccaaaccctatttcaaaaagggaatgggggtcccctaaccgctggaaagagggcccctccggacacttgccaaaaaagaaagcctcaaaaggttttccttgacaagagtcgggtgcaagaatcccacagatagtgacttacgaataagtaaagagaaaagaaaaaaaaagtgtaaaaatcgagaagacgaagtctactctaaacccttgagtgtcattacgtgagacaaagatgggtcctcgacaaaaacacgatgaaaagaagtaattcaaacgcaaaaaaggaggaatctaacgcgttgtacagaaactcaaaacagaaattcccacaaattcaacatccaacccagaaaagcagatgaacagtaaacatgctatgtaaacaaacaatgaactagagtacaagatgcgaagaacttacataaagcttgggaactgggtgttggtgttgatcgctggtaaaaagttgattggcaacgacgaagaaaatgagtaagaaatctatggtgcttaaaggtttcttttctctctggaaaacttgagaaaatttggtgaaatgctgaaagtaaccaaatgaagtaagaaggttggcttttataggccagagcatgcgtgagacagctgtgacagccaccatcgaacggctgggaaagcaatcgattcgcattctatagatccaacggtcagattgaatcgtcatcaagcagtggaaaacgcttgagtacccgtctgacaccc

SEQ ID NO: 357994 - DNA, 772 bp, Cannabis indica
atttctaaatttaggtgcctcataaaaattttcctatttaatatgtgtttcggcttttatcaacagttttttaatctatttttctacactagttgggtcgtgagcgtagttcaaatattttttataaatttgtaacatgttgatttttttatcttggtctttaatgttttgtgtaaattaacaaaggctaaaattatttattaattttgtggctcttaaaaatatttaggatattttacacacattttatttttgtaaaaaagaataatttagattttttttacgagaaaaataattaatacataaaatatataattaatttcataaaataattagtacataatatttttattaagtttatttttttaataataagataaatttatttattaattttgtggctcttaaaaatatttaggatattttacacacattttatttttgtaaaaaagaataatttagatttttttacgagaaaaataattaatacataaaatatataattaatttcataaaataattagtacataatatttttattaagtttatttttttaataataagatataattatcattttatggggtgtaaatagaactccctcaaaattattaacacttttattacattatagattataaatagatattatctaaatttaatatatattaataaattcatttactatatggtatgattattagtatatatttatcaaataattaattatcaaatgcaaaatattcaacttaaaaaaataaaaaaatcttat

SEQ ID NO: 357995 - DNA, 740 bp, Cannabis indica
atttgtgaaattaaccctttaatataaggaagaagttgaaaaatatctttttttttatacattaaccaaatttaccttcaaataaaatttaattcaaatatacatcttttttataagtattgtacacagaggcggagccaagataaaaaattaaggggggccaaactatattataaatttaagtgataaatatattagaaatactttattaaatgagatattcgcagtaaaattttcttagtatttacatttattacatatgatcctaatatacaaaagtagtaaaaaatattttactttacgatttttcactaaaaaaagcttttatttatttaacttaagaaaaattgattttatttttctattcaaatttgtatatttttaattaaaaatataaataattaatatcgtaagataagataattttgtcgctattttttttggatcatatgtgtactgcaaatattatgggagtttcattgtaaatattctttattaaattcataattaaattaaaatacataatttttttcttgtatatcacaaaattcatcgataaaggaatttatactaaattttttggcgatttctcttttaatatatatttacaaacaatcacgtaaaaattcattctatcttttcggagaatgtaatcttcactataattgtagttgagaaaaaatcactttgtggtagctataaaaaatgaaagagtaagagaaagaattatcattttatac

SEQ ID NO: 357996 - DNA, 462 bp, Cannabis indica
ttgatctgtgtgttatatgatgactgattgatgcttgtgaaattttatgaaaaataattgaatatttgtttctggaattacttttgttggatagtttggaaaaaattaagcaatttacgttcttacagaacttgattttgattttatttgaactagttatgaatttttgaaaattggaaaatatcaggactgatcacccacatgtgcgcgcgggggtgcttgattttcctcaggtgcacgcgctcagacaagcacatgcccaagaaatctcagtcagaacgtgctgagggtgtccgaaggctgggctgcgcgcgcggatatgctgctggcagcatccgtgggcatgaaacagcccacatccgctcgattgcatgcccctggatggtactcattgcatactctccgtaccacatgcaattttttgcaatttttctattttttcatgctttttcatggaatcaa

SEQ ID NO: 357997 - DNA, 1005 bp, Cannabis indica
acttcaagaaagtcatttctgcaggttacagcaaaaaataagggttaatactaataaggatgaaattctaacaccctagtttatgtatgcgataaactacctgatgatggtcgaggagtttgcttggaaagacgtttatcaattcgctcttgttgcttttcagaaggttccttatacaccggctctctccagagacttgcgttctcagggatcagtttgtgttctcgcagtttagcagtcgtacacaataatcgccagtcgcgatcttgtacaggaaggctcccaagaacttcagctgtctctctgcgagtcgcgtcgagtgcagggcgagctggtctatctgcgaaaacaaaaagagcgagttagcttaagatctcaaagtaactcaaaaaatgactaagtcaggaaacatgcgacatactaggtcgacggttaaagtcagttctaatccctggtactttgaatatgtaaaacaactttgatttccaatctcccatattagaaaccatgccttctaccccgttaatctcagaagtggcccactgaagcaatagaaaccattgtgaaggcctacgctttttatatcatagaagtagctaaactcttctaccgtgggagccctatgtacgtactccatatacatcgcatacaaagcaagggctgtgcgataactattgggggttagttggaaaagagacacatcgaacgtgtgaggatggccgcaataaagggataaaaagggaccgataccccacatcgaagaatgggtattgagattaccacatcctctgtgggaataatcactggattggtaaaagacagatgcgccctctgagttggtttaggtcgcaaagaagcaagtcgcaacaagtttagtcttgtaaaggtagtgaggtccgatttggtaaccctcgaaactaagtcctcgcacgagaagggctcgttcagttgagtgtcgtccaccgaatcagtcccactcccttctgcctcttcttcttcctcgcc

SEQ ID NO: 357998 - DNA, 698 bp, Cannabis indica
tcgagacatctccagattcagcaattaaagacgtgtttaatacacaatattcttgacccagtaaaagcgggaaaatcacagctatacaattttcaaaatcatacaccgcatttacattttgtgatatgtaatcagataccacgattttagggataagggtagtaacacatattttggtcagctttgtaattaaatgccgctatgcaattataaatagtggcaaacaatctcaaaaataggatgaaaaaactcttatgaaagaggccctaaaaaaatactcagaaatctgaataagattaactcgtggactatgcagaattttaactgcaaaaccacgtaaaaaaccatgtgttcatatattatttttctatagcttttatttgttctgtgttgaattatcatcgtgaggctcaaatttggttaacaaaaatctacgttaacagtttggttctttcattgagagcttctgtaaaaatgctcagagaaaacactcccttcttttaaagaaaaaccttttccttcatggctgaaaatccagagaatattaacaccccacatgaggaactaactgttgggttttatgccctaaataaaactcatttcatataatgagatttacttattaataaagatcagaaatagcatttatgttgcatggttcacatgatttatttctatgattatatgtatataatgta

SEQ ID NO: 357999 - DNA, 526 bp, Cannabis indica
agaaatgggaagagggagagtagagttgaagagaatagaaaacaagatcaacaggcaagttactttctcaaagagaagaaatggtttgctcaagaaagcttatgagctctctgtcctttgtgatgctgaagttgcccttatcgtcttctctagtcgaggcaagctctatgagtttggaagcgctgggtaaatacatatatactactcacaaacatttcattattctattttttacttttatttttctgtaatatatatataccccaagccctagccagatctgctgagatttttttgacctatacttcaaactctctttcttcctcttttgagtctacttgttataaattaatataccattttcattattagtgataaatttacaacagtttatcataaatatatctgttgatcatcatatataagaaatattttctagttcgttttttttttttggtgataaatctgatgtgttcatcaaaaacaactttacaaactaacagcactttttattttataaaaagtt

SEQ ID NO: 358000 - DNA, 786 bp, Cannabis indica
gaatattgggataggccgaaactgtcaaattaaaaaaattaaactagttaaaaagatagtacttttatatgtttgtatttatggtaaaatgaatatatacttattttttcttttatgactataatatgatttgaatgtttaagcatatcacgattgttagttagtacatagtaactacattcgtaattgtatagttattttggacaagcaaaattatctatttgcggtccctttgggccaaatacaatagtatttaagctaagatttgtgttattaaagacattaaagaaattataagttaagcattttaaatttattaattgatgattatattagaatgaatagcttaaagttctaaacttacatctctattatctcaacaatgattgacgggattttagattcaagcgagtttaagaatacaactcttcccgatgtcattgctatgatcaacagccaatgcttgctgaaaaaagtaacagtgttatattaatataaaaataaatattatagtaaaagtgaaatagatgtgtgattcttaccatgtgttccatggtataaaaaaaatattatcctatttgactcatagtgtctaactacattgataatttgattcatggctatcaccttgtcctgctcattattataactaaaaagcttgacatcataaaacttgtatagctctttttgtctttgatttaaattttcccaattacatctatttagaaaagaaaaaaaatcaaatagagtcctaaaaaaaataggcagagttttctctatttccat

SEQ ID NO: 358001 - DNA, 550 bp, Cannabis indica
tatggagctctcaactgtgacgtccaaacttggtatagtagtagaactagtacaacttgttcgtcaagatatgcatgaacaaatattataagccttgctagttcataattaattaaggccggttatataatttgcaaattcaaaacaaaaaacaatataaattacacatcacaacataaattttttttgacttcatttttaatttatatcataataattaagaaaatagaattttatcttttaagggatagatgaaactgaatatataaatgttcttaaaattaagtaagatactataattttttcatcttattttatttttagtttttatgtcgaacgagaaattaggcaattaattaattatttagttcattttttttaattctaactgatcgtgtatccaatagaaaaatatccctattggattgcatgctattgctatatattaataaaattatatgatttattcaatatctttatatattaaaagtgcctatttaacggcatttcttggtttaacagaatataccttaaaaataaaagaatattc

SEQ ID NO: 358002 - DNA, 794 bp, Cannabis indica
aaaagaaaagaggcaagtgttagaatatccatggaaatagtaaacactcgaataaagcaatcaagctattcctaccctaactctctaattcagccctagcaaagttccgaatcttaacgctggctacatcatcctcgagatagctgtccgaaggcaggaaccagctggaagaaatgtaggctgaagggtccaagggaacgggttccggaggaccagaacccattcgggaccgacctaggaaatctcctaagttggaaaaataataatccttcatatggtctccccaccgggtcgagggcatcctaaacctatggagacgctcatcgaaccctacaggcctaaggctggcatattcgctaacggaaggaacgtaatgtactgctaaaggagacttaccggagccggaagtactggcatcaggagccccggtgttcggcacctgaaccgaaggctttggcctgggagccctcctctcagccgggctcccaatgcgaagggacctcccagcaatcgcctggcttctcctctcgaccgggctccccacgcgaaggggcctcccggaagctgcctgggccttggaataagccttctcctgggccttccggtagagatactcctggtacttcttctctgcggtggcgatgagttcatcccggaaggtcttctccgcggcaggcaccctcaattcggacagataaccttagaaaggttagagtcctccactgattggtgcggcaggatcagcttggccttccggcagttctccgtcgtgctaagcccccgacgtcaagatc

SEQ ID NO: 358003 - DNA, 705 bp, Cannabis indica
tattttctatataataattccttatttaattttggatttaaaatttaaattcaaatatccataattatattaagaaaaatagtgtcttttttttaatcagaaaaagagtgtcttaatctcaattaaaataaaaatagttattattttaagacaaaacatatagtaataataaatttgtcttaaataaagggtttatttaagaataaattaattaaaaatattttaattaatttatggttggtaaaattatcttaaataaaaatatttatttaagaataaattaattatattgttttaattaattaaaagggtttaagagaggtcataaataaaaatatttaagaataattaattaaaaatattttaatcaattttaaggcctacaacgattctacaaaattataaaaatgaccttgcaacgatagagagaaggatttgtaatttaatttctaatttttctaaagagttgtaaaattaaaatactcaaattttattcggttcatcatcattgtttatttattgcttttaaataaatcttcattaatagtttattaataatatgctcatgcattagtgaataacatggcatacatacaaattctacatagttatattatcatgcatctcatagtagaaacatgatatattaggattgtcctatgtatttatgtatttatcatttttgaaaccgaaagtatgtaaact

SEQ ID NO: 358004 - DNA, 1614 bp, Cannabis indica
gcatggttgataccttgaaaataaggtttgccaacactctcacggctgcagaaatcatgaaccagttaactgaactatttggaatggcgttagatcaatctcattttgaggagaccaagaactttataaatgtgcggatgaaacctcatcagaacgtgtgtgatcacctactcaagatggctagttacttccagaaagctgagaatcatggagctattataaatcaggaaacccaagtgagtttgatcttaaatattctaactctagcttttttgctctttacttcaaattatgtcatgaacaaattgaatttttactttcacgagttgatcaataaccttcagactaggggtggcaattcgtgtttgcgggtcgtgttcgtgtcgtgtcgagacccaagtatagcaggcatatgctcgacctaaacacgacccgtttaataatcgtgtaagaaaatgaaatgcaaacacaacccgtttataagcatattttgtttaaatatgttaattaataacacgtttatgaagtattcaacacgtttataacccatttatgacatgttaaagtactaaaataactttaaataggtcattaacgagtcaagtttgtgttagccgtgtcaactcgaacacgacccgtttattaaatgggttacacaagtcaacctgaacatgacccaaacccatttaaggcaaaccaaacccgctaactatcgtgcgagtttcgagtcgtgttatcgtgtctgacccatttttccgaccccacttcagacatttgaaaatttgattggaggaccgcagaaaggaggaaacaaagctcctagttctagtaatgctactaatggtacgacaaagcctgaggcaaacattgcctctacttcgaaactcgcaaagaagaataaatggacgaatagcaagaagcatcttaaagctgttaacacggctaataaaaacaaaaaggctactaatccaaaagcaaaggaaaaaggaaaatacttctaatgcaacgaaaaaggtcacaggaaaccccggtgtcctaagtttttggcaaagaagcaaggtatttttaacttttttataaattcatgtattttagagaattattagccctttgggttattaattctagatctactaaccatgtttattttcttcttatttcagctccagttgcttaaacttaaattgctatcctagcgagttaagccgaatggttggacattagggtggagattgtccaagttcgtttttattctttaatttttgaattaattattttagttatcgaacaatttagtttcaattattagtatgaaaattctatttcttatttcatattattgcaaacaattcatttcgatattttttaaagtattaatataatattttttttctcttttaaaagatttttattatgaattgttattataaaattgtgcttcatattctatacttgtatgtcaataccaaattatatttataggtttatcaggttttatgtattttgtattttattattgatacaaaatctatggtataataacttctgtaaagagataatactacataaacacttagaatttaaattcaatgtttatgaataatttttaattct

SEQ ID NO: 358005 - DNA, 1042 bp, Cannabis indica
taaatcttggtaaaatattcccaataataactgggacccagcgcccaggttgacacctggcactgggcccagcgctcaagttgacatattgtcaacctgaggtgtttctaatcaagttcaccaaaaagtgtgttgattatttttttggtcatcagaaataatgaagattcaagcaaacttggggagaaaatcacaaacttgagcccttagaaatagggcctaattcccaggtcgacaattaacctaggacgctaccataaattgcttaaatgacaaatttgatttgaccaatgaatccggaatggtcaaaaatggggtaggagacctcgtcctcaagttctagatccttggaagtattaaaatgagatcccgagagctcgagaatgagtgcctagcgtccaggttcataaatggcctagtgccctgggttctgcttgtttgattctaattccatttcgattgtccatctagttttttacaataataagatccatgaagttagagaagtcaaattcacaactttgcattttcatttccaacatgggaaactcactcggaaatgaagagttttgggtctcttatttccactaaacagcaacatctccaagaattggtgaccagcttcgctagaacacagaatcagacttaatggtattaaaatatcacttaggcatcttaaagtacatcccttggaagttttaacacttacccaacgtccacgctgacttcatatgtcaacttgggtgctgagatgtcaacctggcactggatgtcaacctcggcgctgggtcatgaactcccttcagtaaaataaccataactcacttaatattgatctgattgacacgattcaactagcattttgaagctaatttatagctctatcaattcatgtctcacactttaatcgtaattctgaagctatcaacgccaaatttgtaatgactgcattttagaatatggatttgtaaaggcaatagcgttcattattggtattattttataattatttatgattttatttaattgtgggtctcattat

SEQ ID NO: 358006 - DNA, 544 bp, Cannabis indica
gtaaaataatttccaacagatcagttaatacttttattgggtgtgccaggaagtaaggtcgtaacttgtgagacgcgtggataaggcataaagcaagtttttcaagagggggataccttgactatgccactagtaaccttttactaacatagaaaacaggttgctagtgctttccctcttctcgcactatagctacactaatcgcgtcttctgcgattgccagatagaggagtaaccgcactattacatgtttgttgggtccatatgatagataaggaggtaatgtggtaagtggtgaaggacatgaagacttaacccgccgagtgttggtaagttaaattttgagggcgaaatttcttttaaggagggtagaatgtaatatccagattaaaatagtatttaatttttttcttgggatattaatagtgcgaggataattatctcatttatttgtgttgttagtgagtagagattattgcttagagtagttgtaccaattttctaaagagagttaaagttgtattaactacgaaagtaaaatatt

SEQ ID NO: 358007 - DNA, 699 bp, Cannabis indica
tcactagaaaaactgggattttctgtctccaaattttttgggggcctggggttccgtattctctcctctcataaccaagctctcttagctaagcaggcttggcgtatttggaatgataagaattcccttctccattctgtccttaaagctcggtatttcaaaaattctgatttcatgaatgccccttctggtcacaactcttctttcacctggagaagtattctttggggtcgccagttgcttcaaaagggtctggtttggaagattggtactggaactaatatccccttatttgctcccaattggattcccaacattcaacaccctatccttttgcattctctccaccagtcaagcttttgtctcttttttcataaatgatgactcaacttggaacatccgtaagcttcagcattacttcccttcttatcaagttgaccatatcctcacaacccccattgaccctgcatcttcagattctcttatttggggtttccactcctcaggcattttaacagtcaaatctgcttaccatcttgcctgctctcttgaatcagttgaggttccctcctcctccaatcctaacccgtaccttcattggtggaaaaccctttggtctattcctgttcccccaaagattaaacatttaatttggagagccttccaccatattttgccatgtgctctcaatcttttcct

SEQ ID NO: 358008 - DNA, 569 bp, Cannabis indica
cacagcgactcaaaaagccttttgactctcgactcgcgcgcaactcaaaccgagtcaactcgctcaatgccaagcttcagttgaaactcagcgacatccataaatgcgatctccgaccagtggaaaccgagattcaaccagaagacctctcaacacccataatctccagcgtaagtcagggaagcagcaaatgcttcgctcggatcggagtcggtactccgacaaatcagtgcgaaccttgctccgattgctaccaagaaactgatccgatattccaacccgaatcatcatcttcttacagtcctctcacctccgattcacgccaatgcgtcgccctcaaaacctccgcttgtagaaacaacaggtgtttataccaggttgcttatggcgacggttcctacaccgtcggtgatttcgtcactgaaacgctgtcgtttggtaagtcaggttcaataaaaaaattgaaaaccctaaatctagattaagagagacagagagaggagatcgagagagagagtgatagagagagagctgagatgaacagatagaaaaagaaagaaaagaaaaaa

SEQ ID NO: 358009 - DNA, 1203 bp, Cannabis indica
atttattatggtgtaaattttacaccatagcaaatattgtgccaaatttggtacaaaacttactatgtgccaatactttttagcacaccatcggagcaaattttttgttaaatgaactatattttacttttacaccacttatttatatctcacttgaagatactcttagccacaaaaagttgtatagtggtaaatatgtataaatatttgtcttttaaagtagtggtgttagtttcctaaagcggtgtaaggtggcaattatcaagtcacgtcacgtcactctgatttaacacgaacacgatttgaaatcttacaagtttgaaatgattcgaaaattatttggattatcttcgttgtcttttattaatttttcgttactagtcgtgcttttgttgcccatctaaatacatttaaaaactccacaccacacaaacacgatatgatgatgacactaaaaataacaatttatcttacaattagtcaatacaacacaagattttttgggttctatctaaatagaccatatagagtgttaggtgtgtgttagttgttagttagtgagttgtatagaaagttagttagttttgttataactaattcttgtaacagaattgaattgaaccgtgtatatatatacttactgtaaaagcatgatcctctaatcaatgaaatacaacttttctctttcctctctctctgttacactctgttcttattttactaaaatggtatcagagccaagaacatcttaagctctttcttcttcgtttttcttttatgttcttcttatttttctagctatggcaaaaagaggagcaacacagactcgaagcaatacatatttagatgacaactctaaaaatgcaaatcgttcatttgctactgattcgaatttgaggttcgatgatccatgaaatcctattatctctctcatggagatcatccaagttcaatgcttgtagctaaaattctcactggatctgagaattacagctcgtggaagagatcaatgcttgttgctctagttgcgcgaaacaaagtcaagtttatggatagaagactaccacaacatgatgaagattatgatccctggtgcagatgcaatagtttgatcatttcttggatcttgcgtgctgtctcgactgagatcgaagatagcataatgtatctaagaaatgcttcatcaattttggttgaattgta

SEQ ID NO: 358010 - DNA, 811 bp, Cannabis indica
tccttttgattccgaaaagaatgttgtcaacattagtggagagaggtaagcatgcaagcatattggctattagtttgtggactgatttgatggagtgaaacaattatgacattattttaatattgaagttagtttgtatctctacattgtgtgataagaagagcatcctaattaattgttagagtttttggaattgaaaatctagtttagttaatggaaggaaatttcacatgagccagcagtaatataattatctgatagcttagttaatcgagtttttagtgttagtcttagtcttactcgagggcgagtaagaatctagtttgggggaatttgttaggctatttttagcctacattttgggtcactttttatagttgttttccttctttgttattctttttggaatagaattacgcttgttttctttgatttcaggtttcacacttggaatatatcaattgatcaaatttcggaaaataacaagctatagaatagagaaaattctgcaagaaaataaagctgaaacttcaagcttaaattcgactatgttcttatcagattttggaaaaagtcaaaacataaaagttttagatttctttttcttctttccaacgcatcttgaatcaactcatttggagttcgtatgtgaaagttatgcacattttactgaaagatgctgaagctgtcaaattttgctccagtagtcgcgaccaccactttccatggtcgcgaccctttttcatggtcgcgactaggagccaaacagcgagtttttttttcgtattttgcctatggtcgcgactagact

SEQ ID NO: 358011 - DNA, 730 bp, Cannabis indica
attaaattatatttattgtagagttgttttttctagttattttataatttatttttaaatttcgtgaaattaattttttgttatatttttactttttagtgagaaaaaaatatttttataatttaaaaattttataaatatatttttgtaaattaaaattttaaatcgtaaaattataaataaaacataaaaaaaaaatatttttcacaaaaaataaacaataaaaatagtttttactacaaaaaaaaaaatatattcagccaaaaaaaaagttgacaaaatcttgtgacaaactttttttttttgtaatggaacttgaagcttcattgatagaaaagaagtacaaagcaaacaagtccttacaaggaaggtaaagaaccattccataataactccctgtctaatcctaaacctaacttagctaaattatgagcatgagtattatcatctcttctaataaacacaactttaagcctaggattaaaggacaaagagttgtaaacatcaattaaaacatcatcacaaacactattattccagttacatttattaatcttatccaccacaaccttacaatccgaaaaaagaacatgaacaggtaaattaatcattttagtccaagccactgcaagagaaacaactttagcttcagctataactggaagaattatcccagtaactggtttcaccaaccccagccaaccacttgatctgaatcattcttcaccac

SEQ ID NO: 358012 - DNA, 387 bp, Cannabis indica
aactacatgtcctattcatagatttaggagattaaaaagaatccttccacgttgggccttgtacttcctgcacgaaggagagtgctccacccctcacgctattacagaaatggccaatccttcctcccaagacggcccagaggaaaatgaagctcatactactcctcaaaatcctcctacccaaaagaggcggactcagcaagaggaaacggctccacacatggcgaccaaaaaaacaaaggaagcggaaccaacgagaggttcaacgcatggcgcctaccttagaggcaaaggcacgctatgatcatagtacttgcgatcccaacgtctcaattgagcgtccagacaacagtttggagtcgtccgaggtgcaaagttacctctctt

SEQ ID NO: 358013 - DNA, 638 bp, Cannabis indica
aatacccctagagtttaataaaatctccgaaattgagaaattacaactctaatatttatttctaaaatattggggtccaaaataattaaattcataaataataataaaataatagaaattagtgctaattgccttttctaatccaatttattaaggcggtcgttacaattatccctccgttaaaaggatttcgtcctcgaaatctaacttgaatagctctggatatgttgagtcctcacattagactccaatttctaggtggcttcctccaccttactgttcttccagagcactaaatcagaacaatagtcttgtttcgaatttgaataggttgttctttataggataagtctgattgcagttcaagggcttcataactcaagatatgagtcgggtctgacacgtatttccttaacatggaaatatgaaatatgtcatgaacagccaacaatgctggtggtaaggctagccgatacgctacctgcccgaccttctcaagtatctgaactggcccaatgaacctagggcttaacttacccttctttccgaaacacctaatacccttcattagtgaaacccgcataaaacatgtttccctgtctaaaatgtaacatctctgcacttcaggtcagcataac

SEQ ID NO: 358014 - DNA, 677 bp, Cannabis indica
gttttaaaccgacactaaagaaaaaaacatttatgtatactttaagtgtcggttttaaaatgacaccaaaactcatttgtctcagtttataacagacacttaaaatctgactttttgtgattgtcgaataggtatcagttctacgaaccgacactaaaggtataagtgccagtttaaaactgacaccaaaagtccagtttgtggtaaggtctgctcaaaagcctttgcttcgtggctagattcatccattggatcatggtctatctgacaagtacaaattataaccttttaatgaatggtcgtatccaaggatcttttaaaggggaaaagggtcttcgacagggagagcccatgtcacctttgctctttgtactaatcatggaatacctcacaagactcttagctcggagttccaacaacaaggggttcagatttcacccgatgtgtaagaatctctgactgatgaacttatgtttagtatatgacctccttatcttttgcaagggcaatatgacatcagtgaattgtatgcttgatgctttccaaagatgttgtgatacaacgggtttgtctgcaaacatctcgaagtcccataactttgaaggagttaaggaagaatgaaaagttaatattctcaagaaagtcaatatgactgaaggtaaattccctcttaaata

SEQ ID NO: 358015 - DNA, 825 bp, Cannabis indica
atttgaagcttggattgaagcttgagtgttaagaaagtgtgttggaagtttgaggcttgattgtacaaggaattgaggtagtttttatagttgataacttttgattctttgctgtaatattgtggaaaagcatgaattaagtgaaataaccttgtttatgcatgtatgaaagagttggagttaatttggttgaatttgagtatgtttatgcttgaatctttgctgtagtgtttctactgattttgatttgagttcttgctgaattttttaggtcaaagagcatgaaaagattaaattgttcttggagttgcatgttaagtgtttgggtgttcaatcttgatagatttaagtatgatttgcatatttatgttgtgaattatattgttaagttttgattgagtttctagagtattttatagattagagtacatgttttattggctattttgttgctaggaaatattggagttaggttggtttgaagctttagtttaagagcttgagttttgttaattttgaggaatctgatttttgaggtttattgttggaattgatgcatgaaatatgtgtttttgaccctctaatatatatgctagcaactctatttcgtgattctgagagatatgtatgtttggggtgagttttggtacttattttcgaagtagaaaactgggttttctaggtttctaaacccagtggtcgcgactatcatatgtctgatcgcgaccatgatactggcagattattaatttttttgagtttttgtttttgccgtaacttttgactcgggactccgtttgggacgttctttataccgttggaaag

SEQ ID NO: 358016 - DNA, 660 bp, Cannabis indica
acctctagttctagttcaggtatgttggccgatcttcttgaagtacgatcgatgattacgggccctatgccataataataataaactaataagtgtttatctcaaaatattgcttaatagttacaaaagacaacctaaggtttcctaccaaatcttgtagttcaaaaacactaaaataaaacttatattttggctctaaaacatactccatatagtagagctcgttgcaagcttcaaagcgatatatagaacgtccaaaatggacacccgagtgaaaagttataataaaaatacgatttcagatctccctggaatttctaaaaacggcaagccattttggtaaaaacgaccgactgtttttgggcacgaaaatctcaaattttgcactcactaaatgctcccaaaacatatccaaatcattccaaacttcacaggacacatatataccatatatacaacaatccttacataacagaaattaagattaagcccttaaacaagaaacgccattaaagctcgaacctaagctttaaaaagttctaaactcaatttctaactcaaaatcacctcaaagtcattaagaaaatattggaactagtcccatgactacccgataacaattctataagattaaaaccttcataactattctaattcaca

SEQ ID NO: 358017 - DNA, 620 bp, Cannabis indica
gctaaagaaggtcaagaagagcaatgggctcttcctgaggaagttgaagaaggtgaagaagggcaagaggttgctctgattcgcaagcgcaaaggcaaaatggtagccgaggaggcatctaagcggccgcaaagagtggacactccggccccgagccatgattccgggatccctcccgaggcggaggaatttacagtgcctcccaacatagtgctgactctggttcccagagatgaggcgaggcaggagcttcggatagccaagtacaattatgccatggacgagtactcccgggggcatgctgaagtggaggccttaaggaggattttgcgggatgagatgcaaaattcccttatcgatcagaattaccagattccgtgggatctaaacctggaccccctggcggactggttcaatcgtttcttcgagcctaccttggctccttttgccgcggagatgcggtgagttcgtctcccagctaacctggtgcgcgcctaaacggtttgctgcttgtgcatccttgaactctgtctttcacgttcaggatctcagccattccttgactgtggtaagtattccgtggtttacttatttttccattatttttcttaaggccttta

SEQ ID NO: 358018 - DNA, 804 bp, Cannabis indica
atttacactcctacgaaggaccaaaggagtcgaggctcccatgcttacattagtgtacgaaagtcgcttatcgcagaggtgtcgcgcaccaaatcaaaccatttgaattatattatagtaatgacattgaatatattattattttttttaccattattttagttaatttattttcaaatataatatattatatggcttctacttttacaattactattttttttttaactatgtgacattatttattataattattaaaaataataatatattatatgtgaaaataaattaactaaaataataaattaattatatgtgacattattttttaccatttgaatgtattatatgtgacattatttattataattatgaaaagtaattaatatattatatttaagataaatcctaatttttttatttatattgcttacttgacagtggtattaccaattgtggggttacttgacagtggtagtaccaattatttccttttttctataacttgtgtagatgggcattagatattagacttacaggcaagatacctgatttaatttcataggaagttggtcaaatcttactaccttgtaaggcaagatgaacaaatatctgtattttgatgatgttgcaatatctatatccttattaacaatagctaactacttgtttgtcttgatgcaaggtttcttaagggaactctttccaaggacccattctttactacaactgtgagagttaacaggactcaacagaaatttaactatatattttcaaagctaataatcttacctgtgaactata

SEQ ID NO: 358019 - DNA, 410 bp, Cannabis indica
atttcatattttattaaatatttgttatatattaattttttttttattttgtatgtgttctattagtggatcagaagtcaccactattatttttgaagttttcttttttgatattaagatttttattgtctagttctcctgggggtatctttgcatgtccttagtataaacaatgaacttttatagatggaagaaaaatcctccactgattaagtaactttgttacttttgttattttaacatgtatcggtttcccttacaaaaaaataaatatatatacatatttatatcaatcaatgtttaatttatttttttacttaaatcaatgtatatatatgtgtatagataagtatattttgagtaaatatgtaaatttgtgtatatatatatatatgtatggaactactttt

SEQ ID NO: 358020 - DNA, 773 bp, Cannabis indica
gcagtaaacaaaacattgaagactacattaaagaagcgcctaaaggctgccaaaggaagatggccagaggagctcccgcaagtactctggtcctataggacctcacaccgaacagctacaggaaatactcccttctcactcacctatgggagtgaagccatgctcccggttgagacccaagtcccctcacactgaaatcagtactatgaacaacaccgtaaccacctattcctggaggaggccctagacttactcgatgaaagaagagaggagtcacaattacgtaatgtcgctcaccagcaacgggtaaagaagtattatgactctcatgttcggagtagggagtttataataggtgacttaatgttaagaagggtgttcttagcgacgcgtgacccaacagctggggtctttgggccggaaggaccgtatcagatcgaaactgtcttgaggcttggagtgtacaagctcgctcgccttaacggggagcaagtgccgcaagcatggaacaatgagcacttgaggcgatactaccaataggtggaagtcctcctcgttcgggggtcctttctttactttgatatttagcctagtttccttttagttaattatttattaagttattttttcatgcccaagatctttattagattttcatattcttagaaattcttaaagttgttattttcaacgcttgaataaaaatatttatttattcaaaagatagttatatttccaaacccaaaacaagtcaccaaggataataatcaaac

SEQ ID NO: 358021 - DNA, 1134 bp, Cannabis indica
cacacttaaatttaaccaatttatatggtattttttttttattttttatttttaggtctttctatgatatttgatatgccatatatatctaaattaggttttcaaatctcatatttaatgttttcatttgtttaggtagttttatttgtcactgatgccgaaaaagtccctggagtttgctgctggtgctgaaaaaatcaccggagtagcagttggtgccggaaagtcgtcggagttgctaccagcgctaaaaaatttgtcagaattaacattatcgccggaaaaattactaaaaaattaccaagaaactgattaagaaactagtttctttatgaagaaaccactttttttagtatttttccggtgacaatgccaattctgatgacttttctaacactggtagctactccaatgacttttctggcaccgacagcaaattttggaaaagtcatcgaaattggcatagtcgtcggaaaaattaccaagaaactggttttttgatgaagaaccagtttcttggtgatttttttgttgatttttttgacgtaccatgccaatttctaacgacttttttggcgttagcagcaactctggcgacttttttgacactgaccgctactctggtgactttttcagtaccaacagcaaactccaggaaattcgtcggaattagtattgtcacaaaaaagtaccgaaaaaatcaccgagaaactggtttcttgatgaagaaatcaatttcttggtgatttattttgtgatttttcataatctttattattgttgtgtgacgaaactagttctttgatgaagaaactactttcatggtgaagaaaccactttcttagtgattttttcggtgattttgctagcggcaatgccaatttgacgacttttttgacgccgacattaactccggtgacttttttgacaccggcagctacaccgacgacctttccggcactgacaacaaactccagaatagtcgccaagatcggcattgtcgctggtaaaatcaccgaaaaatcataaaaaaaaaaccaattttttggtgattttccttgtaattttttcgatgacaatgctaattctgacgattttttcggcaccgacggtaactccgacgacttttctggc

SEQ ID NO: 358022 - DNA, 639 bp, Cannabis indica
aactctggcgtgccatctccatattgagtccaccaatccactaaaattggacatcaaaagaataaatattttagataacatgctaagaaattttccaaaagcattagtaaaagatttagacatttcattacctagtaatcgttttccaaatgtctgtttagcttgggtaaatccaaagaagccttctttattgtgaaaaatgctacattgaaggtcaactttttctctttctttgggatgtgggatagtctgtccatacaatgaaacaaatccaacttgacctttggatggttggaaaaatcttcaccataatgacagcggggattcaaatagtaggcagcagcgtgcaaatatcgatgtcattgaaattcccatttctcatcattgatttcccatatctccttgtaatctttttcttctccacccaaattatttgctatattttccttagccttatccattgcattatagagaaatcccatagccggttccttatcaccatcaactaaccttagcacttcaactaaaggacttctggtcctaatagcataaattacacttggccaaaagttcttgtccttcaaaactgtttttcttgcttcttttccatctggtttagctgcccaaggacactctatc

SEQ ID NO: 358023 - DNA, 1084 bp, Cannabis indica
aaaaattaaaaaacctatacatttgcaaaatgggatcaaaataaaggtgattttctattccacttttttataataaaaaaaaaaaaatgggataaagggtacctcttatcccaactttttcataaaaagtgcttttatctcacttttctcaaaaaattgggataaaatgggtacttttatcccatttttaatgaaaatatttgaatactagggtactttttatccttaaaaaactagataaaaagtacatttttatcccggttgtttaaatactttttatcccactgccatacatcccgattttcattttagcaaaaaattgggataaaaagccttaaaaaccaggataaaaggtcttttcttgtagtagtgaagtttccaaaccttccacagaagtaacacttccttgtttccttctctctggacttcgatcttgattgagagtgatggtatttattcttcgaacttcctttcttgggtgatcttcctcttgccaagtacacttcttctttcttggattccttctcgaattgtagtttaaaacctttcgacttaagtgcggcaagaacatcctccaatgcacttatgtctctaccatacttcatggctgccttgacttcttgatatgcaattggaagtgacctcaacaagatgatggtctggctttcttcatcaaccttgccgtttatattatccaatcctacaataatctcattaaatctatcaatattatcatctaaagaaaaggaagaattattctaaaaccgtatgacctttctagcaattgatcttgctagctattgatggttttaagtatagttcttccaacttgttccaaactcttttcatcatcttttctgtgatgagttttcttcgaacactgtttttgtagatacatgatgattgtgtagtatgccatctcctccatttctactttttcctctggtttcttctcggccaaaaatttctcatctccaagaacctttgaaaccttctagtgcactaggattcctttcaaactttctctccacatcgtaaagtctcttgttccatcgaatttctccaatttgaatctcaccattga

SEQ ID NO: 358024 - DNA, 472 bp, Cannabis indica
tatatgtaaattattacgtaactttaaaaaactttgctcgtggaaactaatgcatatgccgagcacttacaatcatttgttagttgtaaactttgttaggtttttttggccattgatgcttggttttgtgaactttgataaaagtcacacttcttttttattattattattacttatatattttgttattaagttgtgaagaagaaaaaagagaagtggggattggaatattatgtgtgatcccatgggaatgtagtccaaattgtaataggaaaagaaatacaataaataattaaagaaaactcaatcgtagatgtacaatagcaagaacctaatcgtatttttttggatttaatgagatttattttattatatataaataaaaagtgatccatcaatttctcaaaaaccattttatttttaatataaataaaaagtcacccatgatgaggtggtaatttggtgacctact

SEQ ID NO: 358025 - DNA, 327 bp, Cannabis indica
attaaccaattataattctctaaaaataaactatgtcttatttatgaattttcaataagcaagggcttaattgtgaagaaaagagatttgagggtttatttgttgattaagagatattgttaagtttaattaataaataaattaaatggtaattttatttggtaattaaatttaattattaaataaatagttttgacatttaaaggattgaaattgcaaaatatgacatttgtaaaagaaatgataaataattgaataaaatgacaaaattgtaattagtgcggccaacatcctatggccagccacttaatgttggaaattatttta

SEQ ID NO: 358026 - DNA, 1581 bp, Cannabis indica
gatttaactgtagtctttgactctagtccgtttcaagtcatgaaatggttccatctagtcgagggaattgtaggatcaacctagtaggagtttttgcctatactgtttaaattaatctctaacgccatttatttcttgctctaaatgctctattgttatcctcattgttttcctttggactgggaaataattaactgtagaagttctttgtatagttttaagtcacagatcatctgtttagtatatgttagttaatacatacttggtaaaacatatgttgttgtggtgtctagagaagtgttctggagaactttaccacaagaagcatagttttatcatgctttgatgtaccaaaattttgaatatgaaagtatttgtccttttcatccagatttagtatttgttactggtacattatataatatataactacaattttcttcctctgattaaggttgaatggtgcagggtatggaaatgggacattgatcaatcactggacaaattaaacagcaatgtcaagggtcactagatggaaagttgagaaacaaaagtcaaagtggttttcaggctacaattccatgctacacatgtaagtttctggaaaacttcttaagtctgtgtacagttgatatgcattgtatttcatagttctactctttgtattttataaaaatgtagttctagattgtctgtgcccacacttctttcttcttttagccaaaaagtgggaaaaaaagaggggtaatactccgatatactatttttttgaacttttttttttttcaaacgacaaatatacaaaaaaaaaatattatttttatcatttaaacttaaatatcaaattttcaaaattaataatatttaattttttttaatagattattattaattctttgatattttgaggtttaaatctgttgacctcgcttttggccaacgacagtgagtattaattgtaagagacaagtagtataatatagatgcaatatagtaaaataaataaagacatagaatttttatagaggttcgaccccgagcagtttggtagtagcctactccccttgatttgtattgacttaagaacaaagaatgcaatgattgcttttcttagagctcttacaataatatctctgaatatgcattcttagatgactttttcgaccctttgcccagtgagaatagatcactatttatagggctaaaagctttgagggaaaagtttcccttctgtttacaatagatataattggcaggattatacattaaatacagaatacactgattaagagatttggacaacttgcaatatctttgtaatatgatcccaggattatagggattgcctctgtgattcacgatgcaagtgtttagattgctaagtgttagcatgttgttcgaactgtccactgcccggttaagaaggcttcgtccttgcaaatatatgtggtgttctgttcggcatatctcttgcgaacagatatgtgaagttgattccacgtgtcaccattgtgtgatgccatgccagagtgcaaaaattgggataacatttgccccccaagtctgtacgggactttcgaa

SEQ ID NO: 358027 - DNA, 502 bp, Cannabis indica
gtggtaaaatgtaaacacacaaattatgtagttcgacaatttgcgtatttcaaagaaagtcgttgatattattaaactaagtagaaaatatccagaatatgaatacatatttcctagtaataatatctctaaactaagtgtttctcaaaatgtttctccaaactcactaaattatttttcaaatttggatatccaaatgctccctctctaagatttttcattgaacccgttgcactaagttgcaccccaatttgcaaatgctcttcaaagagctctatatttataatatataattaatgagaggtagctcaactttcaatcacatgtaataaatgagagagcataagtcaatagctattgtatagctttattgacaaatgtgacaaataataagagcatctccaatgggaggcaacatctatagttgccaaaagtaacacatcatcacaaaaaatttagttttttttttatttattattttttctcattcacataagatttg

SEQ ID NO: 358028 - DNA, 556 bp, Cannabis indica
ccccaaataacataaaaacgagaaaatctagggttcctgaaaatcacccaaccgacagaccgattgcccaaccggaattttgattccgggaattttcagaaccccatccggaattccggatgcacaaccggaattccggttcctcactgatttcaaccaaaaaattcataacttgctcaaatccaaaccaattcaaacaaaaccttccagacctactatatagaccctaaggagcatttctaaagcataaaaaccgagcttcatgcaaccaaaccaaaatcaccattaaagcatcaagctttgaggtccaaactcaaacttgataaaacattacttacatgcattcaaatcagaccaaacctacttaaacatgcataatttaacctctgaaaactacagcaagcatcaacaaaacaatagcagtagatttcaacaatttttctttgaaaaccatagttttgagccaaaatttcatctcttgataaaaccaacaaatcaccaacacaatcatggttgaatcaacattttaaatcataaataaacctctgaaatcaac

SEQ ID NO: 358029 - DNA, 1282 bp, Cannabis indica
ccaagtgtattcttggatagaggttctactgtacatatcactattgaaaacatatgaccactttggggcagtttggcacaactgtgggaaaaagcagctgtgctgtgaggaaaaacagctttagcagaaagctgagctgagtgtttgctaattataatttttaaagtgttgagacttattaagtaactattataataatgataatattttaatctagtttattataatcacaaatatataaaaaaatctataatatataaaatttttattttttatatatttttaattatttttttatagtataaatttatatgcatttgataaaaataatatttaatatttttaaattatatttttatcacttgtaaaagataaaattgtagtttataagaaatataaattgatattgtttgttaataataaaaatataaatacaaaacattttttaaaataaaataaaaaattagaaatttaaatattaattattttaaatatttttcatttaaaaatattttaatttttataatgtttagccttcttctttatggttttctttagctcaagataggttaattgcatgattttcgtgatttgaggttctgtagtgtgcagctagtttgggtttgaattctgggggttaagatatgtttgttttagtttgattttgtgctgagatagctagttgtgctacggattactcaaacttgtagttagagagcttaagttggctctctattgttgtttttaatttctgagctatttgatgtgttctgttgcttaaaatgaatttagtatagtacatgcaagtgttctagagagtatggtagagtttgggctcgatttgagttgtggaggacatttttggggttccctgcactgaaccggtcgaccggtttaagggagcctgtaacaaccggtcgaccagttgatccccaagaaccggtcttccagttaggaaccagtctgctggtcggacttttttcagaaccctaccttaaactaagttgaagaataagcatactatgaatgtatattacttactagttcatgcatgattttataaataatgtaattgatgtaaataattaattttatatctaaaaattttaaatacattgaacattataatcttgaaaaataaaattaattaatataatatgatagaattttaaaactattaaattaattgaaatcttaaattaaatataagtaaagaaaagaaaaaaaaaatattacttctaaagtattgaactcgtggcattttaattattttaagagtgat

SEQ ID NO: 358030 - DNA, 514 bp, Cannabis indica
caaacgcaaagacagctcggatgaagtctacacgcaactttggaagtcccgtacagacttggggcaaatgttatcccaattttggcactctgacgtggcatcactcgatggtgacacgtggaatcgactctgggtatctgctcgcaagacacaggccgaacatgtcacctcacacatctgctcggacgaagtcctctagactgagaagtgagcaatccgcgcagcatgccaacacttagcaaattcagctttcgcatcgtgagtcctctagacagagatatagcaagctgtctaaatcccactattagtgtatctgtatttactatgcaatctttctacttatatcaattgtaacgagaaggaaaatacttcctctccaagcttatagccttataaatagtgaatcatattcactaggcaaagggtcgaaagattttgtctaagaattcatattcagagatacttatgtaagagctctaaaaagaggaactattctccttgttcttaagtcaat

SEQ ID NO: 358031 - DNA, 585 bp, Cannabis indica
ggcccacccttcgaatgatggcgtggtcccttacaaccagcaaaaacatgtcaagaagtaccgccatcgctttttcttctcctccgggttccgagctgtggagcacccggagctccttacggagtcggttaggagccctccgtacgagcggaccgcgcctactcagatcttccttcagtgggcccagatcttcgcgacttatgataaggcagatctcgacgtcgggggattggtcacgacggagaactgctggaaggccatcctgatcatggcgcaccagtcggtggaggattccaacctttctaaggttatctgcccgaacgtgagggttccggccgcggagaagaccttccgggatgagattattgccactgcggagaagaagtaccaagattatctctaccggaaggcccaggagaaggcttacactaaggcccaggcggtttccgggaggccccttcgcgttgggagcccggtcgagaggagaagccaaacggctgccgggagatcccttcgcattgggagcccggttgagaagagggctcccaggccaaggcctaccgtccaggtgtcgaatacaggggc

SEQ ID NO: 358032 - DNA, 517 bp, Cannabis indica
gagttgagaagctcatctcaaattatcggttgttttccttttaaatgggttgtcattctcgaatatttaggatcaaatatcagtttaaatattaatgagatttgttttattattattttattatatataaataatattttattattttattaaataaaaataaaaagtcaccatgaatttctcataaaccaataatttcaattatatagacacactttatatagaatagatatatattgagatgaaactctatatatatatatacatcttaccccaatgaatttttttttacaattattttaatttctcatcctagtttcttgtaaggaaaagtacttatactatttgagatggattacaatatgtggtgtgtcaaattttcatccatatatctagagatcatatcaatatcttttaaacagtgttaaaaattaatttatatacatcaaaaagttttaaataatatttgcatgattattttggctaataactatattgatgatatatccattttttt

SEQ ID NO: 358033 - DNA, 564 bp, Cannabis indica
aactttaaaatatctataactatttttcaaattagatatttacctaactgaattagttaactaattaattaaccaaaaaagacaaaccccatagggatagagacaagcataggcgcctaccattgtctttaggacaaggttggtgtcttttgtcctgacaatttttgtcttaacaatttttgtctttttccctatttaattaatttgaaaaaaaaaatttactatttagccaattcaaaatagatttttccaaacatttttatacaactctttatccctacccttgacaattgttttaatgtgtcaattcgaggaccatggacctataattctaagctccaacaaactagattatttattaagtctcatcaactaaataatcccttgtttattaattctatgattactctactataaatatgaaattgcactcttaggaattataaattatatttactgagtttgactgtagtgtctattgatagaatcaatttaagtggttagccctccatgtgttggttcgtaattagttttggtcaaaatactattttacccttctaatta

SEQ ID NO: 358034 - DNA, 554 bp, Cannabis indica
atgagattattgggataagttgattttagaaatattggggtattttagggtacttgaagttggccaaataccttagaaatagagatttcttagtggctaagaaataataaataactattgataataaagtttttattaatattattatattattattattaatatattattattattatattatcattattagtatattattataatattatttatacatataagttaacgtaagttaacttgtttatatatatattaacatatcagtgtaacagaacgaacgaacgaacgaaaccttcgttctctcccttcgacaaaacattttccttttatattcattttctttgattttcaattcaaaacttagcgatctaagttccggtagtagcaggatagcaaatccttgaaaagggaaagcttaaggtatggtttaatttcgttttaagtttaaaaacaattggtttcgtataggggttttgtgaattaaaatagttatgaaggttctgacaatatagaattattctcgggtagtcatgggactagttccgatattt

SEQ ID NO: 358035 - DNA, 584 bp, Cannabis indica
agtagaaaaaaaaaccagtttcatcaaatcatcttgggaaaaaaataatataaaaaagtataatctaaaaataatacaaactttaaaaatcagtttcatcaacatcgaaagaaactaataatttcattaaaataataaaaaaatagtttcatcaacaagataataataaaaaaaaactataatcaaaaaatgatactaactttaaaaacctgtttcatcaatattaagagaaactaattatttcattaaaagaggaaaaaaataatttctcaataacataatgaaaaatacacaatacttaataactaaacttttacaaacgatactaaatttaaaaaccagtttcaaacatataaattttatatcaatacctaataaccaaacttctaacttcattctttattttggcatttaatttttttttttgcttgctaaaaaactagagaataaagagacaaaataacaaagagaatcagaaattaaaatcaaagagaaaaaaagaaaaaaaataaagagacaaaaattgaaacttaaaactcaattatgaataacaataaaaaccagttatgaaaactagttactta

SEQ ID NO: 358036 - DNA, 1884 bp, Cannabis indica
ttctcgcttatatgatcgagcctctggtgccaaagatcaatgtttgtatctttctgaactaagttaatctctcctttgtgtatcttagcttccaagacatagagagtattcgctttctttcctcttgccactacaagagaaccatttgtgagcttccatttactttcactaaaccaatttatgaaaccctcatcatcaagtcttctagtagatatcaagttaaggcaaatgtttggaacatgcctaacatcgttgagaatcaatttgctaccaacattacttttcaagcaaatatctctaatacccacaatcttcgatgaaccactgtgtcccattttgatattgccaaagtcaccagtagtgtaagaagtgaagaaatcactacgatagtaacatggaatgaagcatcaggatcaataacccaactccaatcttgggttgcaagacaaacacacccatcatcacatacaatgaaaacattaccttcagtggcaattgtattagtctctttctagtttttcttcccttgattctgctctctttttaattttatacaatcccttattaagtgacttggttgttacaatgataagacttaatatttttgttagacttggatcttcttctagaaccatactaatttctagtctgacttcgtccatgcatgtcatgcttttcagtaacaagagtcccagaagaagaaaaagattcacattgtgctttcattttggcttcattaagcaaactatctttgaccaaatccatggtcaaagtcccttctagtgtggaattagaaacagttatcacaaaagtttcccaactgtcaggtaaagaactgaggagtaatgatgtttgcatctcatcatccatattcatcttcatggcaactaactggttcgcaagactctgaaattgacttattttctcaaccatactaccacgatccttgtactttaaatttacaaatcttctaagtagaaaaatattattatcagtcgttcttttggcaaagagattttttagctttttctaaacagcatcagctctgatttcattagagatgtgttcatgaagatttatatccatccatcgtgtaatataggcaatgacttttttatgttgaacttttcattcctcatcatgtaacttagacagtttctcactacctttaataggtttgtacaaatcttccatcaattgcttccaagaggcataatttgacaagctcaattctatcattccatccgactcatccatttttcaacacacaagaattcaactccaattaaccttagctctaataccacttattggaaaaacttattgaaattattcataatatttttcgctttgtatgccaaaaatgagatatttatcaaacatgttagaaatattaaaaccaaaacaccacaagtaatagaaaatatacaaataaagcataaaagtataagacaccaagatttttacgtagaaattcaatgcgggaaaaaatcatgggaccgtagtccgctcaaatcatccattatgtatcaccaaagttcaataatgagattacaatattcttctctagtaaaactagaggctcacaattagggatgcacatagcgcgggaaattggcagggagtgctcccctatccccatccccgcttattttctattggggatggggtgggaacggggcaagaaatcccctaataaaaaataaaatttataataaaaatttaaatatataaaaatattaaattacgtaaaaattaaaatattatacattaattattatttaataaactaattattatacaaaccacaacttataattcataaaaataatactaatatactaaaaaatacaaacataaattataaattataaaatattacta

SEQ ID NO: 358037 - DNA, 1066 bp, Cannabis indica
taagaaaccctagggttagaaacttctgcgattcttctttatcatgtcttcatgtgagtttacacccatgatgcttgcttctgaactgcatagcgtacgtctttcatctcgcttattctaagcttcatgaacttttttgccctaactcaagaaaattttctgacttcttgagttctgacttttctttaaacatagctgttctttaatctgttgagtactcctggtcggcatatttgcttggttattgttcgatattccgaccaacactcatctcgtgtgttgtcttttgtagatgaactcaggtgagtcttgggaactcggacatcagatcgaccaggatttgcttcaacttctgcacgaggatcaccctcgtcttcgttccagtcctccttcttctagtgaaggacattcttctggccctgtacctagccataggatgatggctcgtacaaagtaaaccacgcgtctggctgacgcaaatgatcctcaagtggcttggcttgcccctttgccagcgccgaacatgattctgctgtctagatggaggaggatcgtgacggggatgctgaggtccaggaggttgaggagctggacgatgtgcgttccggtaacccctccgaggcggagggagaggaagaggttgagctcccaaattacggagggtacaatgaggctggggagccagtcgatgctgacggagacgtcctggtcgagggggtggactacatcagtgaggagctttccgcggcggttcctcataaaaggctgggtgccttgggcgccagatgggtaagtcctccgtccaagattacggaggcacgccttcgaactcttgaacaggacggatacctgggcgagctggactgcaacattcctgaccacaataaaagcgccacaaaccctgacaaggggatgtgcgcctggtctggagcccatggtcaggaaggagcgttgatgcccttgcataagtacttcaaggatgtggcggacttcttcggtctctgcccgacccagttcactccttagggcattaagtatttgttttccctcttcgtcctctacgctt

SEQ ID NO: 358038 - DNA, 930 bp, Cannabis indica
aatattatttaataatttattgtaattattaaataattagttttggcatttaaacggttagaattggaaaattggcgtttttgagaaaatagaaatgaaaattgttaaaattgcaaaataccaaaatggggcccactacatcatggccggccacttaatatgtattttcaattaatattttcattatttaaatgtccaataattcctaacttaaacctagtggttacctataaatagataatagtgatggctcacacttgttaagagattgaaaataagaaattttgccttcagaaaatttgagccatcacttcccttactatagccgacctctttctctctctctttccttcttcaagttttttttcgaaacccttagtgatagagtagttcccacacacatcaagtggtacctcatcatagtctggaagattgtgaagaatccaaactgaagagaaggacattcgggctcagattttggtgatactctgcgacagaaaggatacaagggttagagatctaagtggaaggacacatattattctgctgcaatcaatgtaaggttctctaaactttatatgtgtttattatcgttttagaagttcatatttaggttgttaaacaacatacttgtgagtagatctaagatcctggtaaaataaattgcaacagctacaacgttggccttcccaggatgataaagagtcccatagtcataatcctttaccaattctagccaatgtctttgtctcatgttcaggactttctggccagagtagggtacctctgctcgtactcctttaactgccgagaagcataagctattaccctcccaacctgcataagcacacagccgagaccctgtctcgaggcatcacaatataccacaaacttttccttatctgaaggaagagttaatacaggagcggt

SEQ ID NO: 358039 - DNA, 626 bp, Cannabis indica
atgaacaagtctcccttctccaactttccaccgtagccctctaattagtaactctctaccccatataattccttgccaagttaaagatgggttgtgaccatgatgagcatgaaggaaatcattgtgtggaaagtatcgacttttaagcagtctaccaagaagagaattcgggtttgccaacaaccgccaagcttgttttgccaataaagcttgattaaattgttcaaaagatcgaaaacccattccgccttcatattttgatttgcaaagaagatgccaagcccgccaatgtattttggaaccattttcattagacccccaccaaaaattagccatcattgactcaagttggttgcatatagtgactggaagtcgaaagcagctcataatataggtgggaatagcttggacaacagctttaaggagaacttcacgcccgccagcagagaagagtttttcattccagttatgcatcagacgccatatcttctctttaatatcactaaaaagttgttgcttatctctgccagtatacgatggaagacctaagtatttttcatgacattcacagataggcatggagagagtccgatggaaaaaaacttgggctgccaaagtagtgttag

SEQ ID NO: 358040 - DNA, 530 bp, Cannabis indica
ttcccagccacttatgttattaagctccaaaaacagaagttgtaagaattaacttttttgagaaactttaacgagtgaatcaaagaactcaatgagcacaaataggagttcatgtatactcaggattcaagctgatctattaatgatcattgttgtgatatgaatactctttcattggaaacgacacgttaatgaaagaaatttattacataccggttcagtcatgcataatcgaattatacacaatacctttactacatttctatccatatgtgatccaaatcaaaatcacacacacacacaacactaaaagtatactgtatagtaaactgcatttagaagttccatattaaagattcttattacttttatacactatcgacttaatatttttattcatatcgtataatcttaattctcttgtacgtccttacaagattataccttctccatataaataagaaattttcagatatttattaattataattttataattaatgtatcatttatcttgtaattgtatttca

SEQ ID NO: 358041 - DNA, 596 bp, Cannabis indica
ctaagaagccatgtagataatttctatgtcttctgttcggacagagaaagcagtaaacttggtaggattttcccggggagtctatttggttttgccagtgaactttccctttttcccattgccttgcctattgttattgttggaccgtttaccacccgagcttgaactacttgggtactgagggagttggatggatattccagcggagggagcgtttggctttccaagtttatgctcgacttctgctcgttgaatggcttcttcaagcttaatgaagccatttgtacggtctagaaagtcactcatagaatctattggtccattttttctgatatccttccaaatttctccaagaacttcgatgccccacagtatagcggacaatttcccatcttcattcaaccgtgtaacttttgttgcctccgtcatgaatctgctgatataagcttagagaggttctcctggtaaatggaaaaattgcaaagtgggcccattatccaacctatggctggccactacgcatgggttttacaatttatttttctattattttaatgctaattaaatcaaacctaaacctaggtggttacctataa

SEQ ID NO: 358042 - DNA, 627 bp, Cannabis indica
atattttattgtgcgtaataatgctctataatgtatggtggggtagggtggaattactttttagcaaataaaattttattttcaacattaatttttaaaatttattgctctaaatatttgtaaaatattattcattgctcttaatatattttattaattattttgaattttaattttttttatatatattaatatatatattatatgtttgaaatatattaaaatataaaaaaaaaaaaaaaataaaagtggagttttgataatgcatattttaatgaatagaataaataaattgataagagtctctaaggtgagaaccactagaatatttttattttatttacttttaattattttttaattttatactctctttgttttttaaggttttatataaatacttttttctttacatttttacataaaaatagtattttatgttaattttatatattattttttaaaaatctcttaatctccagacactaagagcttgtttggctgtgttttcagttttcagtttttaatattgcatttttaaaagtgagaatagaaaactgttttttgtcattttaaaaatttaatggtgtttggcacaaatttttaaaaactgtttttagatttttt

SEQ ID NO: 358043 - DNA, 530 bp, Cannabis indica
tattttttggaaaaccgtaaaaataaaaaaaaaaataaaaaaaaaagaaaacattctttgaacgtaaaaatgtaaatattttacaaaaaatggtgtcttatgtaattattcctaaaaacaattactggcaagaaaatactgggcttcgtaggctaagaattcttgggtgaaattcggtgacacaaatttggcgttctttcaccagagtgcttctcaccagaaaaagaagaatttaatttgtggtatctttgagcacaacttggtttgggttgaggaacctcaccgtgtagttcaattttttagcaatattttgggtttctttttactgttaaacattcacatagattatgaactatccaaatatacattaaacatcattgttcataatcattaaaaccaaaatcaatactttatttagagcatcacaaatgtaaaacacatacctcccatattgctattctccattgttgctaagacaccaaaaccttcaatatgaaaaacaccaaattggtagaagagaacctatgaga

SEQ ID NO: 358044 - DNA, 1012 bp, Cannabis indica
attttgaccccaataaagttaaaattacgataaatctatttctacataattaaaagatctttgaattatctttccaacgctactagaatcatctcaatccgagccctagaactccagatatgatcgttttagtaaaatagtttttaatcttgcaaatttatccaaacttacaaacttttaacattaattctataataatgttacttatttgatatcacttatacaatcaattaaaacccactaaataatttataggaccctaataaactttcatattgggcttgaattacgtaattacctaattcgtaaaaataccataattttatcttgacacttaatgcaatttcagttatgtttagaaatttgccaatactactctaagcaattatctctattcattatcaatagaaataaataaactaattattctcacacaaattgtatttaaaatatatatataattttaccgggtattacttatagctttgaagaccaaggatgtatgtgaattttttctaccaaaccttgtaaaaattgagagtttgtaatttcttacctttaaactctttactttacaagcttgattatttgctctctatatcattgccatactatttgcatttacttgattaattgcatagctttgtgttgaaagtttcaatttaccaaaattagtttaaatttctaattcacccctctcttggaaacatatcttgagttaacaattggtatcagaataatggctcaattatttgattagatttcacaatctagaacatgacgtttctaagtaattcacaaaataacatgttagaaggtttgagcacaaatagagcaccatacttcaatggagtagatttttcttattggaaaattagaatggaaacttaccttcaatctaggaattataatttgtggcatatagtgtctaatggtccttacattcccaaacatgttatatgaaatttcgtttttataattactgtaacgccctaatgctaaggcacgctac

SEQ ID NO: 358045 - DNA, 578 bp, Cannabis indica
tttagtgaaaaaaaaaaaaaattccaagtggccgcggcgatgggatatatggccgcggccatttaagccttacagagaggaggaaaaatgcacgaattctggccgcggcgaggggacataccgccgcggccatttaagagttacagaaagggggttattttcacgaattctcgccgcggcgagattggtcagaataagtttaaaaacccccaaatccctaacatttcaaactcacaccacattcaaaccctcacctctccacgccgaaaacacttcctccaccatatttttcttcatctaatcccattcaaaatcacattcaaccaaacctaaccatacactttcatcatcaatcatcctaaacccttatttctctcatcaaacactaattcccactcaaaatcaaccccaaatccctaaaaccttacccaaaaatttaaaaacccttattcatctttttctttctcaagagcttcaagatttcaaaatggaggatgattaaagggggaattgtcactgagatattgattctaagacttccaatccaatttttattgaagaatttgtgaattgttgga

SEQ ID NO: 358046 - DNA, 458 bp, Cannabis indica
aagaataggaatagaaatagaaatggaatagaaataaaatttaaatgcatacaaaaattaattaattttttttttttttcatgttacattagaattgtctttctttcttttttgaaatgaaatagtcattctaccaaaataatagaaaggacattcctgtggaatgcatttcaatactttaaaatgtaatcaaacaaagaaattgaatgaaaattgtttcttttccatttcattttatttcattacctctaacaaaaccctacttaaaagttaaagaaaacaatgtaatgataataatgattccattatacattaaaccgaacatgttttaaagtatgagaatatcattttaatatggagtttctacaaaattactgaattttaagtaaaagtttataattttactaccacacaatattttttacaaaaatactatctttttacaaaacaatcgtaat

SEQ ID NO: 358047 - DNA, 980 bp, Cannabis indica
ttcctggctgctaattcttcttgttgcagcatcttgtttaacggatcctgctgtaatttattttgcatctcagctaaagtatcttttgcctgctgtgtagccatttggatgtctgaaaaagcatgcttattcaactcctttaacacccctttcaaccttttaagcttggtgaccacttggaacattttaagtccctgagtttgttgattccaggatgctgccactcttgctgcataatccggttgagtattccacattttaaagtacctaaatggcttctttccactagtaggcatattttggaatgtcataacagctagagtatggtccattaactctatattcataaaattaacctcagcattaggaaatttgtcaatccaactctaatttgccatggccctctcaatcttcgaaaagattctatcatctccttgttgtttattactccaagtctagaaattacaacaagacttgacatcctccaaaaggcagctagaaacacaatcaataaaatcctatgaaggatgatatttaactctattccctattctttcttccttggctagaatgtcattgaagtcccccatgactaaccaaggttcgtgttgtgcaacctgctgcaagtctttccacaaagctttcctgccctcttcatcattataagcatacagaaagcttagtgcaaattgataattcccatcaattgtttctacacccacatgaattagttgccttgaacactttagaatacttacattacagctacttggattccacgcaatcacaattctaccccctttgttccatgatatatttgttgtgaagcaccatccttgaaagacgtttaagtacaaatctcctaatttaggagccttgactctcgtcttgaggagaccaaccaaacaaaccttattcttattaataaactctctaaccgtgtgttgcttttgttggttgttgattccccagacgttcca

SEQ ID NO: 358048 - DNA, 649 bp, Cannabis indica
agcgggaagcacaaacacttagcgtcattgctgactctcatgactcggttgaatcgtgtcaggtgatcactaggatcagagttcccggtataagctcccatttcgggcatcttaaagtttttggggagctctgcttccaggatgtgcttggcacacggctcccggtcttcaccgtctgagtcgtcgcctttctatctccgggagactcgggcgatgtcttttcggagtatggcaagttctgccatgattccttcgtttaacgttcccgtggagaccgcgggtttgtatttcttttggtaaaggtgatcccggagatcaccttggttcccgttaatctgattcctcagatcaatggggggacatttctgtccccttcttcctctcccccgggctcttggtgcacggaaacgctttttcggtcctctcgatcctgagggccaagactccctttttggagtttgcccttctgtggacctttcccttttgggaaatccgagcagacctttcgcggatcctgtacctttttctttttcccaggagtagaggtagggtttttcttttggttcccttcagcgagataccttatagggcttggttccctagatttcttcttttgggtacttggctaggattcctctggttcctttcc

SEQ ID NO: 358049 - DNA, 527 bp, Cannabis indica
tcagaatgcgggtgatggacccatctcgcatcactctccataaaggtgatgtcgttgcattccttcttaaacaacttctcgggccgctcgctaagattgttaacattagtgagcggcttctccttggcttctctggcatatcgctcttgtgacttgcgagagtcccctgcgatatgaggtcctccaataatagttaggatgttgcgaggtgttctggagccactcgcattctggttttctcctttgtcatccgcttggggacgactttcctcactcttcttatacttgtcgaacttccctttttgaattagctcctccatttcatcctgcaagacccaacattctgaggtactgtgaccaatgtccttgtggtacttacagaattttttagggtctctcctgtcgcgatttcccctgatggggggcggcttcttgaagactccgtttctttcttcgattgcgtagatatggtcttgggatgcgagttcagtatagttgatgaaacgaggtccacctttccttttcgg

SEQ ID NO: 358050 - DNA, 844 bp, Cannabis indica
ataccttaagcttttcctcttaaagatttgctattccgctactactagagcttagatcgctaggtttcgggttgagaatcaaagaaaatggaatcaaaaaagattagggtttcgttgaacgaaaaaacaagagagagtttcataattcttctattcttccgtttataacttaacatatatatataacttatacgtttttaatatatataatatattttaaattgataataatataataatattaatagtaatattaataaaattttattattaatagttatcttattattttttagccactaagaaattttaaattctaagctatttggtcaattttgagtaccccaaaatatctccatatttttaaaatcaacttacctcaataattctatcaatatttcttactaatactgttgtgacattttggcctctaatcgggtctccaaggtcgctgaacttaaaaataatattatttcacaaataattcatattatatctacgtatttgaaataaatctctgtaattgacaaattacacttatttatccacttatcgagtcttcatgatcgccaaacctaaaaatatttttattctacgtacagctcatattatattcacacatgctatataaatctccatactttataaattacgcttatttattcacttatagaaaattcaaattttatgttgaaatagattagtagaatcataatcccacttattacataattaacccataatataaatataaatcctaattatttatcattaagcttatcgagatattacaatttttgttttgctgtatggtatattattattcttagatgatatttacttt

SEQ ID NO: 358051 - DNA, 550 bp, Cannabis indica
ttaatcttcctttgttattttttaattttctgaattgtcttacttgattcgtaaaaagtattattttaccagatagaatcataagtataatttagtagtaattagtccaattccctatggttcgacctcacctgtgtgagtttactacttgattgcgtagacttgcgcagtgatcataattttcgtaacataaggcagccaggttcttctgtgttcgaaaggttgggaacaccccgtgacttaagggacgacctaaatagaagaaggggaacagacgagcagaatactacaacgaatgtgcagtatagagcccatactcaaatccctgctcagaaagacgctgacatagcccaacctgaccagaacgccaatgaagtcagcccagccgtacaggcccagcttgtcgaactgaagaatatgtttcatggcatggccggtcagcgtaacaatgatcttgagttagaccgtgcacacagaactcccttctccccagaaatcaacctcccgccactacctgacaagttcaagatgccaacgttgaagatgtaca

SEQ ID NO: 358052 - DNA, 687 bp, Cannabis indica
tatactaaaaactaaaaagttaaaaaaaattaaaattcaaaatcggtttggtcgatttaattgggcgggttggacctattttcaacccgcccaattaacagattgggcggtttgtaattttttccggttatttcggtttgtaatttttatcagttttttcggtttggtttgggcggtttacaaatttttttgtatagcaatttttattattttttttttcacaaaatcacatctttttaaatattttgaaatagaaaattatgcttctaatttcaaagttgttactttgtttataatatacacctcaaaatattatattacaaattatatcactcaatcagtataaagcaaattagaatatcagaagattaaaaaaattagatcgaacccacgtgaagcgaagcttagttctctagtattagtatatagtattgctatttgacaccaataatgcctaaattcacatagaagtagtggcttgtgattagttaacgatattttataaaaataggttatattaagttatatagaatctgatattaaattataccaataacgatatgacacattagagcatctctaatggggggttgcccattggagaggtcttcccacatatgtaattgttggaatatgttttaccaggatctaaatttactaccatgtatgttatttaacaccctaaat

SEQ ID NO: 358053 - DNA, 686 bp, Cannabis indica
gttcaattaaatgatctttgaactgcatatccatatactctccacccctatcagttcatatacgctggaaacactcgtgttggtctgtagggccagttgtcagtccatgaagcagccagagtcacgtactcgtgtataagaggcatcattctgtgggtgtaagggctcaatggaggcttgaagcggggacgttacagtgtttatttcagtaattatattagtttgttaaaatatcatttacaagtagctaagtattttaaggataaaatatattaaagggtaaaacgataaatttgtccctactcgatgtagatcatttataaaggatctttgattatttggattgaaacaatagataatttatagcgtatttattcttgatgaatagttctatctaatcaggagtataattctaaatctatagtggagttaggaggaattaataagttaggaaatttacttagtaaattttggatctacttattgggagcttggttatatagacttatagtacccgcactagctgggataatattattttgtagtttcaattaattgatttattaatcaattaggattctaaacaaagactatcttatttgtgaattttatcaaggaagagcacaattgagaagaaaagagaattcaaggtttatttattaattaagagaccttgaaaggtctaa

SEQ ID NO: 358054 - DNA, 567 bp, Cannabis indica
agtcaaaggatccagatttcaatcccaaacattcccggcgtaatcgctgcgagtaaaattgtcctgggcctccctcagaatctttttcagggcgtccattggcttcgctgctaaactgccaaaaaagcattagactttgttatcaaaaacatagtgtgtcaatacggcttgcctcgtaagatagtctcagacaatggaaagcagtttgactgcaaagaattcaccaacttctacaaccagcacggagtcattaaaagtttctccgcagtggcaaggccacaaacaaatggacaagcagaaaccgtcaataaaatcctaaaggtcatcctaaagaagaagttgttggcctgcaagaacaactggcttgaagaattaccaaaggtgttatgggcataccggaccactccaagaaccacaacaaggcactcgccattctcaatggcgtacggttgtaaggctatggtcccggtggaaaccttgttcccatcccacaagagaacggcatacgattcggtaacaaacaaggctttattacaagtagcagtggatcaaattgacgagctccgg

SEQ ID NO: 358055 - DNA, 1163 bp, Cannabis indica
gtatatggggcttaaggcgaaatcaaaatttggagctcctatatatagattaactattataaaaattatagctcaagtacttagtttaatggtaaagcttttaaaaactttgagatctaaggttcaattcctcataactacacattaaatattttttaaaaagattaaaatgtagaggttagagagaagttaagcattttgccacaacaccaaacaatttttattataatttgttcttatttaaaatcttatctatatattaatatattttttttcacaatttcgaggccctgagcgttcgggggcctgaggcgcatgcctagctgcctaccctcagggtcggccctgctattttggcagtattcaagagtctagacaaaaaatatatatataaatagcagcctaataaggaattgcattcttcaaataatatgcctatatttaattgttcatttttaatttcagcttaattagataaatataccttgtgacttatagtgtcataagcaaattattattatagacaataatagatatctaattgaaccgaaccgaactaattaatccaattcaaattgctccatacaaatagcatctttcatttaaatatcactcttcatttaaatttaatactctattcagatatcatctttacaactaaaaaattaaaataactaaaataataacactggaaaataataaaatagaacaaaatatcatgtaaacgaatacacagaatatcatattattacaaattcaacacaaaaataaaacaaccagttaaaatataattataatgtatttttaaatttttttattatacaagaaatatcacttttaccagcacagtttgctattgcgttggtaaaagtaacttttaccagcgcagtttacaaagatgtcaaagttttaccagtgtatatttgcaatgactaaaatataacttttaccaccgcatttacgcgctggaaaaattcatttttgccagcactttttattttatgttggcaaaagttctaataccaacgttgatttgtcaacctccatttgccaacacatcacaagtaaactctattttaccatcgcaataccaacttttgccagcacaaaaatgtgctggcaaaagtaacatttcttgtagtgtatatatataaatataaata

SEQ ID NO: 358056 - DNA, 1017 bp, Cannabis indica
cttttaatatataaagatacacatataaataaattaatttagtgttttcaaaattaaaatatattatacgattttagtttaattataattttaatttaaaattaataaatttaataaaaatttaaaactaaaaaaataagaaaattaatgagagaaaaaataatgctatttaaaaaattaaaaaaattaaaaattaaaaattaattttagattgcaaatgtatactctaataaaatattaaaaatgagataactaaagagagtagaaaaaaataactttagaagatttattaaaatgataataaaatatcaatttatagatttatgctctaataaaatattaaaaatgagagaattaaggagagtagagaaaaataactttagagcgattttagagtgacacatcaccgtcttatacttctcctttatatagatatataaattatttaaaaaataaaaatattaaaacaaaattaatttaaatttaaaaaaattgtaaaattataaaaaaaataaaaatattaattgaaaattaatacatgaaccctagtttccttttctcttcaactttctctctcttaaactctctccaacccgtgcggtgcccctgcgatttttggagtggctatctcctgtcatcgatcaacggaatcaacaccaccatggtgctcgtagatcttaaaaacctgttgacctcgcttttagccaacgacaacgagtctaatttaataagcgataaatgatttacaacaatcgatatataataaagcaatataaagacacaagaattttatagaggttcagccccgagcagttcgataatagcctaatcctcgttacttgtattgacttaagaacaaggagaatggttctttttcttatagctcttacaacagcatctctgaatatataattcttagataatatctttagggtatagtctcaactgaactgtttccgaccttttgcccagtgaacatgcatcactatatatagggctagtaagcttggagaggaa

SEQ ID NO: 358057 - DNA, 753 bp, Cannabis indica
taaacaactgctaatttccaaattaactaagcgggctttacatgtacacccacaagtttcccgatatttggccttgtgggattctttcaagtgtcacgttcggtcctgtggtctcttaaaggtcgttcgttatacccacactttccaggctcaaacgtgaggatggtgtattaagaggtagtcccacattgctaatgtgtggaaataaattgtgatatataagatgaaagggctactcctcccattgccaattggttttgggatggaacctcattcatcttattcctcaaattctaacaatatgtgcacctcaccatatgtatataatattaatattatatatatttatatacaaataattattatttaatattatttttttaattaaaggataactttcattaataataataagaaaattctgccaatgcaatacgttgcccctaattttgcccaaaatacgtggaccaaccggacgatgacacgtggatggaaagggtttagcatttgaataaaacagctaagtcttcttcatgcaaaggattaccttagacatgcctcccggagaaggcatgtaagtctcgtatgctcccggagagcaagatggcgacatagcatctccgggaggtgtcaagtttcatctgaacagttatctcgcatttaatgccgcatgggaggaggcgtattgaaactgccatacgcaataaagtctgacggcacaacccccaatctgtacccactaggctatgacca

SEQ ID NO: 358058 - DNA, 846 bp, Cannabis indica
ctcatcagttgttaattctcattgcttttggtaaaatttacacctttaatacttctttgttacttttgttgtgctattttgagtgaaggtggctttataatgagcagatgaaattttaatacttctttgttactttataatcgagactttgagaattgagggttccttctttgtctaatttacacacgctttgcttattcttaattttgtaatatttgtttttccaggtcaaagatgttcttgctgctattattttaagaactggaacaaatgcaacatatattataaccttattattattgtttccaatatgtttttactggacataaaagtttaatttaaatttattattcaaatctctctaaattaaatattatttattttttattcatttatttccttccgaactcataatataatacttaatataaaacatagcatacgtgcatcgcacgtaacaatatactagtatatatatatatattttgtccaaacaaaaatattatatactgcttgttaattccattttttgcatactagtatgctttaatatcgtttcctattttgtgtattcaaacttggaaggaaagttgtctagctttcctatttttggaaaaaaggtaaaaatagtaagtttgcttacccatttttttttatctaaccagctgtataatctgatcctgtgttgagtttcccattttctcagatcaaatttcttgaagagaaaaccggagctaaactttccttttctataaaaggaaagttgtagttactgtccacgattctgtaggtacaaaaacgaaaattcctggactgattaaagaattattttagggaagtttctag

SEQ ID NO: 358059 - DNA, 1553 bp, Cannabis indica
agcttcttacttcacttgcagtcttaggtgttggccagctcttgacagcttcgatctttgtaggatccacctcaactccatctttggaaactatatggcctaggaattccacattctctaactagaattcacatttcttgaatttggcgtatagttggttctccttaagtcgatttggagttatcctcaggtgttcctcatgttcctccatagttttggagtagataagaatgttattaatgaatacgacaacaaacttatctaggtactccttgaacaccctattcattatatccatgacgactgctggggaattagttagtctgaaagacattaccaaaaactcatagtgtccatatcgtgttctgaatattgtcttgggtatgtcctccttccaaaccttcagctggtaatacccagatcttagatctattttcgagaacacagtcgagccttgcaattgatcaaagagatcgtcaatccttgggaaatggtacttattcttgatggtcaccttgttgagctcatggtagtctatgcacatcctcatgcttccatctttcttcttaacaaagagtactagagtaccctaaggtgagcaacttggtctaatgatccctttgtctaggagctcttgtagctatactttgagtttctacagctcgtaaatttccattttgtatggagccttcacaattatagcactcttggagctaacttgattatgaactctacatcattgtctgaaggtattcctggtagatcttttagaaagaccttttggaattcacagactatgtgcatgtttttcattgtttgttgtgtctccactacttggtgcactacattagtcaacaatgcttgacatcataccttcctcagctggctagtttataaggatgagattaaagaagttgataaggctagcttaacttctttgaaagtaatctggtctccggcctttgttgccaaaagtgaccaaatactttcaacaatagatgaatggatagccaatccatatcgagtgcagcgtcatgatcctttatttccagctctatcaatttattcgttagttgtcttttattgagttctatatatcccaatatgggtgctacaatccttggttgttccttcccctctaaaggattatagactccttcaaatgtcgatgtttttttattattattctttcatatgatggctcaaagcagtgtgttggctgttgaaccaaattccttgtgctttacctcttatggcaatgcaacttttcatcctgaggttggagtcgttccctaagcttagctttctctttctccaactactcgcaaaaatgagcgtcgtctcaactaagcctatgccttgtatgtacttacgtgggtgccacttccataatagcgcaactcgttatccttgtcctccaccatgaatagcttagcgtcgtagttcatcttcttcttaagcttcttgtaggtttgaagctcctccttcttgattgttctattgagacgacttgatcgtctaagcaacataatctcttaatatttagttctaat

SEQ ID NO: 358060 - DNA, 688 bp, Cannabis indica
gaatccacaggtggtggatcctgcactacaaaacccgagaaacccaagggttctgccagccgtaaatctctcggacagccaccaactgcgggtcacggtgtgacgactcttgtggatgaaatcttatctggtgtgcaggagactgggaataccagtttagcaaccgaccaaggcattcataacacagccgttctgcccgctaccaatgttcaaacaaccattggagatgacactgacatccagaacctctgtgctgcccttggaatcatgcagggtcataccaacaccctacatcatgatcaggaggaactccgtgctacagtaaatctcacatttgaagagcagaggcgtatgtttgccgaatggagggacaaagagattgaaacgttaagggctcagcaagcagtcattgacgatcgcagtcggcaagccactgtgctgatacgaaaagcctatcaaattgtcgggcagcagctcgcgaatgtcatccccttgggcgaaacagtcaaagatccagcaatgaatacttcccagactataaatggccagccgtcaaatccccgatcacaagttctgcctgtgggccaagtggtaggcgggcagaccttgtctactaattcatcgggaaaagtcatacccaacaattccaaccaagttaatggtgacggtcagcaaattggccaaacca

SEQ ID NO: 358061 - DNA, 542 bp, Cannabis indica
atgtgtgttttgtggagaaggacatgtgtttgagaagtgtccttctaatccagagtccatttgttacatggaatatcagaattttaacagaaacaatggggcattctcaaatcctaatctaacttggggggtcaaggagcaagctcaagcaccgcactagcccaaggaagacaagcatatccaccgagtttttcacaacagccgcgacattcacaacatgctctaaaatcccaatcgagttctttggagagtttaatgcatgattatatagctaaaaatgatgcagtgatacaaagtcaggcaacctctcttcgtaaccttgagttgcagctgggacatttagctaatgaattaaaagctaggtcgcaaggttctttgtttagtgacacggaaaatccaaggagagatgggaaagaacaatgtaaagccattcagctaaggagtggcaagaatctgaaaagttctgaggaggaaataaagggtagtggcgagcccacttcaatccaagtcgacaaaaattgagtaacaaaactgcccaggaa

SEQ ID NO: 358062 - DNA, 532 bp, Cannabis indica
gatccacttcaaaatattgtgtatttgttgggggcaatctgatctcttgaaagagtaagaaacaaatattgtgtttagatccaatgctgaatcagaatataaagctatggcacaatctgtgtgtgagatgataagaatttatcaacttttgactgtattcgggtttaagacttctattccagcaaaattgtagtgtgataatcaagttgctcttcatattatctcaaattttgtgttccactagtgaactaagcacattgagattaattgttattttgttcgtgagagaattcaaaaacgcatgatctccacaggatatgtgaagataggagaacaattaggaaatatttttacaaaggttttaaatggggtgtgggttgattatttttgtaacaagttgggaatgattagcttgaggaggagtgttagaatattagttgtatattaattataaaaattaaggtaaattgtatttagtagtttcctatttagtctcctaccttcgtatataaatatatactattctacggaa

SEQ ID NO: 358063 - DNA, 421 bp, Cannabis indica
gtgaaattcaaaaagtgtgaattctggttgtctaaggtatcttttctggggcatattgtcgggaagaatggaattatggtagatctaagcaagatcgagacagtgaagaactggcgaaggccaaaataagtgacagatgttcgaagttttctcagtttagcagggtattatcgacatttcatcgagggattctctaaaatctctatgccactgaccgagttgactaagaaaatcaacgattcttgtggtcaaacaaatatgaagtaagttttctagagttgaaacaacgattgataatagctccagtgttagctttgccatcagatcaacaaaaatttgtttttattgtgacccatccaaagagggtttgggatgtgttctgatgcaagctgacaaaatcatagcctatgcctctcgtcaa

SEQ ID NO: 358064 - DNA, 605 bp, Cannabis indica
ccctttttgatgaatcaaaagggggagaaaatctatgattatttttggcacaacctaaatttttttggtatctaatcttttaatcttaagtataaaattgagggggagtttacaaaaacatgcaaggtaaaattaaaaggtaaatttttttttcttgcacacattaagggggagctaatccaatatacattgtttaaatttttcctttcccttttcaaaataatcaaatatttgatatcatcaaaaagggggagattgttaactcaaacttttagatctccttgttttgatgattaacaaatatttgattattatttgttactaatgatttgttgattttgtagcaaaattaaaagagaaaataaatctttcaagataaattggtatttttaccaaacttttcaaagcaacccaaaatggattcaacaagcttatcaagagcaaaaagattcatcaagggatcaacaactcaagaccctattcaaaagaggtcttcaaaagcccaaagtcaaaagtcaacctgaaagtcaaagtcaaagtcaactctagggaaaagtcaacatgggataaaaaacatgaaaatcaagctaggaggctcatctaca

SEQ ID NO: 358065 - DNA, 488 bp, Cannabis indica
cctcgaattgatgatctgtttgatcaactgaaggggaagacggtcttttccaagatcgatcttcgctcaggctatcatcagctgagaattcgagaggaagatatcccgaaaactgcgtttcgtactcggtatggacactatgaatttcttgtgatgtcttttggactcactaatgccccggcggcattcatggatttgatgaatcgggtgtttaaggattacctggataggtttgtgattgtgtttatcgatgacattttggtgtactctgagacagaagaagagcatgagttgcatctcagagcggttttgcaaagattacgggatcacaagctttatgctaagttcaaaaagtgtgaattctggttatctcgtgtctcatttttggggcacatagtggataaagatgggatcatggtggatccggctaaaattgaagctgtacgggattggccagtaccgaagtcagctacagaggtcagaagttt

SEQ ID NO: 358066 - DNA, 677 bp, Cannabis indica
aagctgattggagtcagttgagcctagaggggctgaggggattgtagcatttaaaataattatttatcaagtgacttcaactgaaactaaggtagagatttgttggttatggttacaagttttgtcatccgtgatcgaagatattgatccagagagcaaataccggaggcttagtgtgtattcaaaaagccatgcagaagatcttgtaaaatccagaaggtacttccagataagcttgtaccgcatatgtaatgtctctctcggataacttgttattaattcggaggtacacagttggacaacttattgtcagtcttgaaggaccatccaggaaggaaatcatgtacgtgtctggaaggcttttgtgtttataaagtttttgaattgttcgtactgaaagcattttttttcaagataacatggattattattgctggagatgagctggattatttaaggcggtgtaaatatgtcacgataatttaggagatacttttggcaacaatataaatctataaatagttgtaaatctttataactgttggattaaacctccacttacactgatattaagtctaaatacaacttgaacacaaaggacagaaaaggaaatacatgcaaaatccctaagttgaccttcggtctctaataactctaacagaaagtagttagagtgg

SEQ ID NO: 358067 - DNA, 705 bp, Cannabis indica
tgtacatgtcgtgacgatcttcgaaagacaacctggcagctctaataccaaaattgtaacaccctaactaatataggcgtgttagcgtgatttaaaatgtattgtgcagttcgttgctaatcaacgaggttattgaaaatcgtgattaattaaaatttgcttatttaattagaaacttaaagtattacatatataacatcctgagatcccattatacatttataaaagtttgctatacacatatacaaaagttttgttgccaagcgactatcagcaaaagccttgatgacccctaagatcgtacgctcaaagcctaaccgctccgacatgtacaatcttcacctgctcgttctcacggttcctcagctttagccttgcccttacctacacatggaaataacactgtgagtcgacagactcagtaagaaaagcataacataaatcatactaaaatcccaaagttattgttggaaattatttaaccaggatctatttactatcatgtatgttggattaacaacctaatatgaattctaaaacaataaaaataaacacatataaagtcagaaaaccttacagtgggtgcagcgggataatatgactccttccgttcagatctctagcccttgattcctttatgtagcagagcatcaccaagatctgaacctggatattcttttctccttctttgatgcagaatttcca

SEQ ID NO: 358068 - DNA, 615 bp, Cannabis indica
tggagatttgttccttgtacatgaagggacgcacagttccgccagaggttattaagaaagaatgccaactgagaactttcttagagatgagggtaacaatatcaaacacagaatttatgctattattcgtgactaaggtgagaaaagttaggaattcagagcctacgccgcctactaatcctctccctcgaagtgtggtagggtctttcgttcccgaaacagatgttgggattggtgtgaatgaggaagttctgaccaatgtagatcaacagcaagaagcgacaagatttgatcagtttgatgaattcgatactaccttctacaataacgatcctattgtagatttgaatatgaatgatgaacatgatttggcagtcgataaagccgtagtggtatcttccttgaggttagagtgtgtaccgagcaaccatggtacacagcgagaacgacaaccccgtaatgaaaattgcaatacacctggaactagcagtagtcgacaaggtagaatcgaagagcatgctcctccttgtcatgcaaccttctcaacgttctcgtcttttgaagtttgtaccaagttcaaagctcctatgtggacaaaggaagatataatggaaa

SEQ ID NO: 358069 - DNA, 683 bp, Cannabis indica
tgttagaatctgagccaagtaaatgagattaaggaaactgtcaggaaagactcaccctcgtaaactccttcaggactcctcccatcaacagctccagggaaggctcgttgtcagctccggccagctgctcattcacctcatgaaccaaccaattcatgtagtgggtgagcatctccttgcctcttttagtgtctgggtgcagtgatggaggtggagtaggagcctggatttccttcgactgttcggtcctgtccaaacttcctccttgagagactttagacttagcaactttttgggcagaagggtccacaacggttagctcctcggaaagatcgataatagcttcggccggtgccttctctctggatggggtcgtctcaccgcgcctagacttcttggcaggaggagatgagattgagcttcctcccactctcttcttcaaagcttcaagcatcttttgagacatgtctgcgcgaaataaaagcaacatggttagagaaaagcacttgaagtacgaagtataataatcaagaaggttaaaaacaagacaaagaatcttgcgaagcgcttgcctgagcaaaactcgaaggctcatcatcacttgacaagtctcttatctctgccagcatggctttcccctttcctattacaggagtggatggccgagcaggtagactgggctc

SEQ ID NO: 358070 - DNA, 920 bp, Cannabis indica
gggtgctcctgatcaggtgccggtaatcctagtcacataaatccgggatatttcacacttagggttaacccctgattccatactcataaaattcaatcatggcatttaaaattcagataatcatatagagctcggaacgagctttctaacgatataaaaaactcccaaatcggagttcggaatcaaaagttatgaatttttaaagttcgatacaaaactgcccaaaaatcacgagggcgggccgcggcatgcccaagccatgccgcgacacctgggacgaaacccaagttccaccaagaggggcgggagcatgccgcggaatctgggtgcagaacccagaaaccagcaagttcatactcgaaaatttagcttccaaaccaaacttttcaccccaaattctcaaccaaactttcaatttcacatatagagttgctagcagaatattaggaagcaaaaattcacaacttaagcattaaattcaccaattaaacatatcaaaaactcaaattaagaaagataaacacaagctgaacactttgagcaaaattcctccatgaacacatatacaagagctagaattgaagaataatctctacaccaatttcacagctgtaaagattaactaaggaatcattctaactcataatttccaataatatcacaacctaaaatcacccacaacaaccttcaagcatgatcaaagatataatatcataaaaacactcaaatccaaacacatgcatatcaagagaacatcacataattcatgctttttccacaatatttcagcaattaaaacaaggttaagatcatagaaagctaccttaattcacaccaaaacaagaacaatgatctttcctccaaactcaagcttcaaatcaagccaaaaccaagcttttcttcaacaattcaagttgaaa

SEQ ID NO: 358071 - DNA, 616 bp, Cannabis indica
tgttgtgcaattatattgatgtatattttaatttattttttatatttttttttgttgtatcatggtgttgtataagtaatttgtcgctgtttttgatttattgagattgatatttagttaatttacatattaaagtagtgttgttgtctagttgtttctcaattgtaattgagttgtccaaaagagataataaatagccttatatttaattatgagtatatatttagtttttcagacatatttgagaggttgtccaaatgttttgttgttgttttgatgtatattttagtttattttttatacttttttggttgtgtttgtatatgtgatttgtagttatttctgttttattaaaattaattttatgtttttttttttgagaaatcagcagtgtttttcattactccaaaagactttttacaaccattcagcaccttttataaaataaggtgtgatcttttacttctaagtaattacaaatgattacatttcattaaactatgaagtatcccctattgaaaccttcctaggccatacactttgtatcctagttttacaaatatttttaatcctctgtacaatagacttcgggtcttccttagtctgtagccacaat

SEQ ID NO: 358072 - DNA, 648 bp, Cannabis indica
tgaccagaatatgtttatagccattatccctaaaatcgggggatctgattacatattacgaaatgtaaatgcggtacatgattttgaaaatcgtatagctgtgattttcccgcttttactgggtcaaaaatattgtgtattaaacacgtctttaattgatgaatctcgagatgtctcgatagaaacttgattgtagtgatcccaatagcgagctaggaccattcttctttccgaggtcaacaatgtatgtcttacgtcaatcgcgagtataaagaaatcttctgacttgccaaggttattagcctcgctcctgttagttggatgaagatgtaggaagtctcctcatagcgacatggtcatctcgcatacttgttctttgagccgatccgacttttacacttagtttgcttattgcaagctaaggtatgtatcacttttcttcggtgcctcgttattcacctttagcgacatatggtttctcgttaatagaataagtgccagtttgtacattgattcctcgcgtaagaccttacagtcagcgggttacaaatatactctgatacttacgcagttaatgagttattccatagaaagatattgtaccgattcacattccctttatcttgacacgtgtcctccagccaaatt

SEQ ID NO: 358073 - DNA, 534 bp, Cannabis indica
cattcccaatgtctaataaaccgtcccacaatcctaacatactaagttgtgattttactgagccaaccaccgagttccatgttaccgggcagcggaaatgcaaaattatgaaaactactaaatgacataaaatgcatctcagaattcaataataacagtataaataattatttaaatagctataaataattttcataattaaacatgattaactgctaatttccaaattaaactaagtggtctttacaggactccaactcaaagatctgatcccatgtacccaatcggtgtatggtttctctggcaaaagtgttgcacctttgggccaaattcgcctaccctcacaattagacaagctctgaggagcataattgtgatggcacaattcctgataattgatgttccatcagcatttaatgttatgtcaggtcgaccaaccttatatgacctaaaggctatcacattaatcttccactcgtgcatcaagtttccaactaagaatggggtagggtgcctaaagggaaatcaacaagt

SEQ ID NO: 358074 - DNA, 596 bp, Cannabis indica
tatgtttttattttttttaaaatatttgaacttaccaaaatctataagaacaaaatcaataaagaaaattttaacaaaaaattgagaaacctgaggaaaaacagaagtttttaattgtcttgtttttgtgaattatgaagaattattagtttataactttagtgtattatataaatttgtattacatcatatgttattgacaattaatttttaattattgggcactgctatgtcttaggttagtgttgcagaaatgaagtttgcaattaagtgcgagtattctaggatttcagatagacatcctgccgctacaatttgatgatgctggaactagtcgggaagaggtgggagataatgatggccatggcaatgatgatattgatgatgatgcaaccgatttgtagtagtaattatttttattttagttgagaaaattatgtttatgttagtattttgaacaaatgctcatttactaacttttagacaattacaattatattatgaatgtataattaaaacaattgaaaattatattttattgtgtaattatttataattaagctttcatgttttttaattattatttatttaaattt

SEQ ID NO: 358075 - DNA, 715 bp, Cannabis indica
aatttaataaataaataaaataacaaaacatactcaacctagtcttaaatttatttcatagactagaattatattgtaacatcatattgacaattctcaaacaatgaacacaatttttaatatttattctacttaaaacctaattaaataattaatgagtcacaaataattataataaacacctacatcaaccaataaattataaaactctttttgttttgtaccatagatagtaaatagcaatacaaaatatatttactgttttagagtcaattaactattttttataattattttaagtattaaataaataaattcatgaaaaatacaaaaatgatcgaaaaataaatctaaccattctaacacagttaatagtctgtaccaagccctaaataattaactttcaattttctgaacaacctaggtatttttcataattaagtttagaaataacataaataattcatgaacaatacaaaattaactaagattcaaatcaatcaattttatagcagtttatatctcataaataatcatataaaataaacttaaatttttctgagtaatctaagtatttttcctaattaatttaacaaataaatcaaataattcataataaatcaaataattgcaagaaaattatgaaacttcaccaaacaccctaaaataatatgtagaatcaaaatctacaaaaaaagatgggaaaaacacctca

SEQ ID NO: 358076 - DNA, 528 bp, Cannabis indica
tagtgaaacttcactttgaggaagaacttggatatctaatttttacgggttgtagagcaaaggctttccttgaatgtatcagcctataattgttgggggcatcatctaatagaccctgtagggatctgacgagcttcccgaagagcacttgttggtatccgtttccaagactatgtttccttcctccacacagatgtaattctttgctatctcataaaagtctttaatgccaagtaattcccttttcagcatattcccccatagtccacttccagggcgtactccaacgactatggtgaacttgagttcatcttcaaacatcttccccactttggtgacttcggcgttgaagtgctggatgtagcttcacaagatttcttgttccccttgcttcattttggtgatacttgttacatgctgatgagtgcacatttgtacactcattcttagtcaattattagatagattagtatttatttttgtatagatttaatgtgttttctccaagtgtataggtttatgctgaaa

SEQ ID NO: 358077 - DNA, 528 bp, Cannabis indica
attttacgtggtatgtaatcgaactccacgatttcaaggaataattgttgtaggatatcagtcaactatgtaattaactaccctattatgtaattataaataggagcaagttacactgaaaaggggacaaaaaaaatattagagaaaaatggcctgagagctgtatcagaaatctaataagattgactcgtgaactacgcaaaattttaactgacaaaatcaacgtaaaaaccttcgtgttcatatctttcttttgcttacttttgttttctgtgcaaatctatcactacttgggctcaaatatagttaacgaaaatctacattaataactaggaataaagagtagtataatgatgttacgaaaaaatctattttgaattggaaaaatagtaattatttatttttctaacaaataaataaattttcaaattaattaaatagagaaaagacaaaaatttttaagataagatttgttgagacaaaaattgtcaagacaaaagacgccatccttgtcctaaatagacaagg

SEQ ID NO: 358078 - DNA, 569 bp, Cannabis indica
aatacaatttaatattgttattcaataagaattaatctttggataaagccttttagtcagctgtggatatttctttataactatataaattacacacttttgtattcattcatattcacaattcaatctctttctttcttccccatatcgaaattcatccatggctattagggcaattttgataattactatagtgtgttatatttcatactatagtaaagctgaagaagatttcaccacaaaactatcaaagctagaagagttggaaattgagaaggagcttaatcttttgaataaaccaccaataaagactattaaggtgtaattataattttattttatttgctcttattataaatattattattatataaaaagatgatttaatatgtttataataatttgacatatatttacagacaaaagatggagttctttacgattgtattgattttttcaaacaaccagcatttgatcatcccgcgttgaaaaatcatagctatcattataaggtttgtaatttaatttgtgcattgtctttttttttttttttttcttttcttataata

SEQ ID NO: 358079 - DNA, 577 bp, Cannabis indica
ttttggggtttaagtaaaatagtcctattttaacaattaccctaagtttttgtttacctaaccaattatgctttaaaagatgcataaaaattcaaatttccctttagaacgaagattttaatgcagtttgtcggggtttttagtgatgaaaagaaaatggtaatagtattacaatgaaatagaccattgtaaggcatgtgccaaaattataattacttactgtataactagtaagtgtgaatttatttttataatttagatgtgcaactaaataaaaaaatatcacatctaaatttgaatattaaataatttagggatattggcggctaaaccacctgaactttatggtttgtaacacttaaccacaaaaatcgaatttttggcggctaaactacctaaactcgggttccgttttgctttgcactcctccgtccaaaaatcactgttaattgccatggtggactgtccacttgtacacacttgtacacctggcaaactttttagtggtccacctaatattaattttaaaaaaactaaataaaaaatattaaaaaaattaaaaaataaagaaaaaaaa

SEQ ID NO: 358080 - DNA, 472 bp, Cannabis indica
gaaattattttttatagattattttgaaattaatttaaaaaacacacttagcttgataaaattaattcaagataaactatatgtatttttctaatatttaattaaatgaagaagttataactaattaaattcttctaaatacttaattatttaaattttataagaatatatatttaacttaaaaattaatttttgagagtattgatataatttaaaatgatttccttatgagttgcttttatgaaattgagcttcatattctttaacttgtatgtcaatactaaattatatttatatatttatcatgttttatgtgtttcatattttactattgatacaaaatcaatggtatataaatctctgcaaagagataacgccgcataaacacttagaatttaataaatctctgcaaagagataaatccttaaaacacttgaccccgcaccatttatgtttgtttggtcaagctcga

SEQ ID NO: 358081 - DNA, 593 bp, Cannabis indica
ggacgcggcatgcttagaccatgctgcgacacctgggttgaaaacccagaattcagccatgaacaacacgaatttcaacaacctaaacacttccaattcatccaaaatcttgatcaaactctcaaatcaacaaatagggttgctagcaattaaaagatacttaattaaacacatttcatgcatcaaaatcctataccaaactcaaaattcagatttccccaaagaataaaaatcaaactccaaacttgcaaaattcaagctcttgaactagagcttcaaactcaattaactcaaccaacttccagcagtaaaataccataaaactcaaggattaaagctagaaaatatccccactacaccttctaaagctcaacaacataaattccaactaattcatgtaatttcacactcaatttaccaagattaacaaccaaaaccatgaacatgcaattacacaaccacaacaactctaaacatgcttttcaacaaataaaccagcaagaatttcaacaataaatctcaaataaactcagcaagaaactacctcaattccaagcttaaaatccttctaatttaaagctccaaaatcaagc

SEQ ID NO: 358082 - DNA, 1311 bp, Cannabis indica
tccttgaacctctttatgaaattcttcaatgtctccgtaggcagctgcttgatgttagtcaaagcgctgacctaactttccttgcggtgacaaattgtctccagaagctggtttgcaacttattccagcaatccacagatcctggttccaatttcttgacccactcttccgcggatccgcttagagtaagcgggaagcacaaacacttggcgtcattgctgaccctcatgactgtcatgactcggttgaactatgacaggtgatcgcttggatcccagttcctggtgtaagctcccatttcgggcatgttaaaattgttggggagctctgcttgcaagatgtgcttggcacatggttctcgatcctcacagtcagagtcagagtcctcgcctttctgtctccgggagactcgggcgatgtcttttcggagtatggcaagctctgccatgattccttcgttcaacgttcccgtagagactgcgtaccgtatgtctttatgtccaggtgatcccgtagatcaccatggttcccgttaatctgatttcttagatcaatgggaggacattcttgcccccttctccctctccccccgggcttttggtgtacggaaataatttttcgatcctctcgatcctgagggccaagactcccttttttggagtttgcccctctgcggacctttcgtggatcctgcacttttttctttttcccaagggtggaggtagggtttttcttttggtttccttcagcgggataccttatagggctaggctccctagacttctgcttttggttacttggcgaggattcctctggttcctttccaagtccagcagggatggctttaagatgcaagtggattcctgcggcctccatggctttttgcatggccagcctcaccgcttgcattttttagtttagctctttttcggttgcgatttcagcctcatggtcggcagccttttgccttaagagtacaaactctgagtagctgccttcatcgtaggcgtcgtactcgtcgaagtttccttcatactcgtcatcaggggttccttcttcttcctcagagcccatattcgctcttgaggccacgtcctcatcatttggatcttgagcatcttaatgagggcgaggttgacgtgtgcttcgagtctccaccatttttgtcttgttgtaatgtagtgtctactttcagacgcttcctttagctctcaatgaaagcaccaaaatgttgaccgaggttttcggcaaccaatataataataataattaagagggctataaggatttaagagagagatttttacgtgg

SEQ ID NO: 358083 - DNA, 881 bp, Cannabis indica
tttttcactagtgttgcattcgcccgtccgagaatggtaaccaaaatcgaaccattcatacttgcactcccaagcaaaaattaatatattacattcctgacttgaagaatggagttgattggaaccttggcaattttacacccctcgcaatgtctgggacgttttcggatgaggatgatgatgagaccacaactatacaagaaagaaactcttcaagaatttttttagtcattcaacttccacagttggatgatgttcaatatgttcgtgatgatgttgacccaattcaagtgaccaacatgggtcgtcatgagcagtctaactgtgaagatttagatgaattcattatttatagtgatgatgaagacactagtgatagtgataatgaaaatcatgtagatgttaatgatgatgatgacttgtagattttcaagtattgtaatatagacgccaatgttgatttaatgaaatacatgcctcttttgtcaataatatgattaattaattattcatagcttgtatttgtagaatggctgatgtaggttcaagtggaggtcagaaaaagggagttaggggaaactataagggaaaaatattgaacaagaactggccaagttgccacgaggtcaaaaattgaaatttagatttcatatggcgactagggccactgtagatgactttggcaacaagtttaaaaattacataaagtttcatgctcgcaatactattcctacgaccaagtttaagttcgaggacgttgaggctacactcattcagactatatgggatagaatagcggtaatattctaaattttttaataatacatcaaacaaaatcattatataaaaaatacaatatatatgactttggtatttttttt

SEQ ID NO: 358084 - DNA, 813 bp, Cannabis indica
aacaggaggtggaggagggggacacctagtgtacactataggaggctgagggagtggtggaggtgtaggcattatgggagtgatgaccaaggcaggtgaaggaataagagactcgtcaaaacatgtattaggcatataggatgtgatagaataaaccaaaaaatcatcatcctctccctgacgagttggagtaggtgaagataaaaaataaggtgtattttccacaaatataacatcaatagaaacaagatatttgttgaaattatgacagtaacatctataccctttctgaagacgagaataaccaagaaatacacactttaatgccttagggtctaatttgatgacatgtggacgaacatcgcgagcaaaacaaacactgccaaatactcgaggagcaactggaaacaatcacttacaaggaaaaagaattttaaatgggatctcaccattaagtacacaggatggcatgcgattaataagcaagcatgtcgtgaaaactgcatcggcccaaaaagggcatgtgcagttttaagaagatgtctgtttttacgttctgtgacaccattttgaggtgcagtatcaacacaagaagtttcatgaagcatgccctcagaggtcatgtaagataaaaattgagcagatgtgtactctttggcattatcacttctcaaagtacaaatagatacattaaattgattttgaatctcagtacaaaaagcatagaatatagaaaacaactcagaataatttttcattaaatataaccaagttacacgagaataatcatccacaaaagtaacaaaatacctg

SEQ ID NO: 358085 - DNA, 509 bp, Cannabis indica
cagaacctaatttggattttttatgaattaattatgattttttgaatttggatgaaaatatcttgttttggatgcacgtgtgcacgcgcgggggatgagttttcactcggacagcacgcgcctttagacacgggctgacccaggattcttggacatggccctgttcgaagggctgctcatgccgagctacctcggccaaaacaggttgcacgcagccccttttctcggccattcccttgcatccgcgcgcgcaggagtatgtaatgtgttacgtgcggtccaagagagcacgttacaagctaagtgatgtccacaagttggccaagtggtggtcatgtggtggcgcatgttgtggtgcatgcgggcggcatgctgatgcttagtttgtaggtagtggaattttcgtaaatatcttcaatattgtccagaacgggacgggacttggtatttgccatttatttgggtctaaaaatagaatggtgcaatcggtttggcgaaactaggtgatt

SEQ ID NO: 358086 - DNA, 696 bp, Cannabis indica
tttgttctatctttgtaggttgtgtcaaaatccaatcttcctgaatatgatgacgatgaaggtgggctgcaattatcactcgttcgggaagataaggttgtatgtttgtttctttgttataaaggatgtgtttattataactggtttttttagattgtaagtttaattgattcgtgtttttattccaggttcactctggcttaggtgaggagagggatgagggcggtgttttttcgtatgaaacgattacagtcgaccaatccattttggatttggttgatagaatcactcgggcatattcttccccacttagtgcaaagaatgagaaatgggatttggtgtcaattcctgaatctgcatcccctgctgtggaagatgagattgaggttctagatgttatgcctttgcaatccagtgttgctttcaagagacaagcaaaacctggattgcattgtagatctccgtttgtcaacgagtttggttcttctgaaccagaaattcaaaataagaaggataaggaggcatctagtgaattagcttttgaccctaaggagttgtttccctttgttaaagagattgggaagaacaccgaccctgatgattgcggggatatgttaagtggattgaaagtgctcggttgatgaagaagaagtatgttttttattgttatgttattatttttgtttttaatagttg

SEQ ID NO: 358087 - DNA, 666 bp, Cannabis indica
gtcaaagagcagttcttaaatttacttagtacctcggtgctcatgccagtgctagaaggcctatgaataaaataagttgtttatgtactaggcgagacacctcagcgaggtacccttggcagcgtgtcttaatccacgtcagtgttgactttcttcaaaagagattaaactatatttgtgtaattttcaaataataattatacttatttacgtggagcatgattaaagcccacaatttcaggaatattgttatgggatttgaaattaaatatcattaactgtcaacatatattactataaataggggcagattatacaagaaaagggaatgaaaaaatcttagagagagagagaggaatacactgattgtcaagaaccctagttctgtatcagaaaaatctgaataagattaactcgtggactatgcagagttaactgtaaaaccacgtaaaaactagggctgtacatcggtcggtttgggcggtttatcctatatattttctaacccaatccaaagtacgggttgctaaaatttaagtacaacccgcccaatttaaaaaaaaaaaaaaattgtaaacccaccaacggtttgtgcggtttggtcgggttaacccgcccaaaccggccaaacttttttttttttaaagttaataaaaattaaaaaga

SEQ ID NO: 358088 - DNA, 625 bp, Cannabis indica
tacattgtctttcctttaaaatctcaattgcgatttttaaccagatttttcgctcaactgcctcaaagttcaaccttaaagttcaattagagaaatagataatataactcacaaatgaccccaatatttagaatccaccatatatgctcaactcatactaaataattctacaaaccattttttcaatatgcttgcattatttaacattctctactaatgtcaacaacaaatgttttgaaatcaaaaggactttaaaatgttataatgttaggcttagataaaggtaaatgaaaatgtcatttaggctcaactatctcaatccccacttaatacaatacagaagagagatttatttttttgtaacccaaaccaataactcttattatttattttttcttctatttttcttcttctttatcttctttttttttttcctaaatagaagagaaactaaagaaaatgattgcaactaattaaaacactgtctctctgtaacaccctgtctaatagggacgtcacgtgtgtgcttttataaaattcatactttatattaggggtattcattaaaccgcccaaaccgctcgaaccgcccgcaccgcaccacaccgcaaaaaaaatgcggttt

SEQ ID NO: 358089 - DNA, 612 bp, Cannabis indica
ttttttattggggtttgggggtttacaatttgggattttgggttcaagggtcgagggtttagggtttaaaatttggagttagtcgtttggggtttttaggtttgggggtttggcattaagctgttttacattaggtgtttgggtttggggttttgagtttgggactttgggtttttaggtttgggatttaaggttttggggtttgggattaacagtttgggttttgctgtttagagtctctggcttttggggttttggggtttgaggtttagggttcggggttttatgactagggtctagagtttaggatcttggaccaagtatttggggtaggaggttttaagtcttgggtttggtgtttgggttatagggtttccggtttttgggttagcgtttggggtttgggatttggggtatggtgtttttgtgttcaggatttttaggtttgctgtttttgggattagggtttggggtttagggtttgatgtatggggttttaaggttttacggtttaggggttggggttttggatttgggttttagggtttcgggtttagggttttgcagttttgtcatttggggttttggggtttggggaatcgttatgggaat

SEQ ID NO: 358090 - DNA, 810 bp, Cannabis indica
aaaattatatcgttctattcttcccatccatctgagcaagattaatcctaaaagttttcaagtcatctttccattacatccttacccaaatgtatagcactcttcactcgaatctttgatcaccatcatctcgtgtctattgatccaagtagcttaaagtatttgatgtaagaaactctatatttactcatttattgatcacaatatgagaatattcgtaggtctcctttttttattgttttttagaatgaaacatgtctcagtaaagctgtcatatctctttaaatactcattcgattctcgcaatcctagtgcctataaaaagcttattgaatttttcataattgttatgaagaaaggttttactgaatcgaaatttatctatatcaaaaattagtatttctacgttgtttgttgtaaatcgttttttttcatatttttttatataagttgtctcagtaaaatctgaataatgatccgattctggcgatcttagtaccgttgaaaagacaattcaattttctaaatgttttatgaaggaactattcaccaattattgattattctaagtcaaaactattattttattgctgtagttcgaaatcaatttgtttcaggatttctaaaaaactgcttcaataaatatctatatctcttatgttataacttcgattttaaagattttagtgtcattagaaatggaaattgattttctaaaaattttacgaagagagtattctctaatttggaatatgtcagtatcaaaactttatatttctgatgtctcctgtgattcgttactccatattc

SEQ ID NO: 358091 - DNA, 542 bp, Cannabis indica
ttcgaacccatgacctctctctttttcccatccctccctcaccagtcaccactaatatttcattattctctctttttctttttgtaaaataagtgcattatctatgtggtgaatcctcactctcaaaacaagttgttatagcagtaacaatgttcaagaaacacaaattaaaactaaaaccaatcacaaaatcaaaacttgaacttaattaaaataagacaaagaaaacttaactcaataatggatgaatagtggatctttattgaataggaatagtcactagtacacaatagaatgagcccaagattacaactcaacacactaagtaattacaaagacgtgcctcacattgagggaaatcacttcaagagtgatactcccatttacattcctccacacacactcactatgatattggactctctctcactaaactgaatctaaagtatgagctttggagattagaactcagaactctctcaactcagaacttccttcgtgattagaggaactcctatatatagttgctggtgggtcctctt

SEQ ID NO: 358092 - DNA, 562 bp, Cannabis indica
aatatttcaacaaatagaagccatatctaagcacaatactaatgggccacgtctgccacttgttcctcatatttgcaaaccatgccatttctctagttctctcagctttcaaagccactttctccactaaatgaggcactaaaattctaatttgtgggagcaaatcttcactataaatagtactcttagcattgtaaaaaggcatcagagtttagagagagtagaaaattattttgtcattttatttttctctcttattgctattttatctatacttattttagtgacaaaaataagtgtattaaaatagtaatattgattcttttgtgcttcatcttcatatctcatttattaaattgttcttcatcttctaatttttcttccaaaattaatagtatctttatataagttcagtcatgcttttcttatgtaagttaggctattaatattttggtatatttattatattgtatgtcatttactgcattctgccaatagtggtattttgtcgatttatgatatataatatgatatcctgtgaaattagaagtaagattcaatt

SEQ ID NO: 358093 - DNA, 896 bp, Cannabis indica
atatatatatatatttggttatttttattttgaggaatttggctcaggcaattattttattttatttttattttacagaaagtgtaatcaataatttttacaagtgtcagaaaaatataatgaatctgattgtagttatgaaaaatattaggcaagctttttctaaaagaaaattttaattatatagaatgttaaaattaaggttcaaaacattttaattatataggatgtgaaattttgattaataaaattccttttttcttgttaaaaaataaaattaatgttcaagtaatttattatagtaaaaaaaaaaaattaaacacgtgtgctgtttattatacgtaaaataattgtttttttttttttgaaagttttgtaatgtataggatttaatgtaagaaatgcgtgccaacaaaaatacacaagcaaagaaagaatgttgataggaaatagaaaataaaataaaattagaaagtaaagaatacaaaagggagtaagtaaggtaagaaggggtaatttaccaattttctttttttgggttaacaatttaaagaaacatacaattttcacttttgtcgatatttttttttttttctatctaaataaattctaataccaattttattttggtatactaatactatactattactaatcagtagtgttaaagcaaaaaaaacaacccttgtttgatagtatttacacaaaccaaattgtattgtatctttctcaaagcaccttctcctctctcactctgcaacccggagatctccctgattggcttattcttcagatttcgctaaaatctagccggaatgggaaaggtggcagtcggagcggcggtcatttgcgcggccactgtgtgtgccgcggcggccttggtagtccgacaccgc

SEQ ID NO: 358094 - DNA, 947 bp, Cannabis indica
ggaacaagtcttcttcgagaacaggttttgataggatcaggggtttggccatgtgttcttttagttttttgaatgcctcctcgcacttatcggagcattcaaatttttggcatttcttcaggatgttgaagaaaggaatgcacttgtcggtggatcaggagataaactggctcagggcagcaacctttgtggttaagctctgtgtttcttgggggaaggcatgtttagaagagcttgaatttttttcgcgtttgcctctatccctcgttggctgacaataaagcccagaaactttcctgatttgaccccaaaagtgcatttcttcgggttaagtttcatcccgtatctccgaaccacttcaaagcattcttggaggtcatctgcatggctcgcgtatgccttcgacttgaccaacatgtcgtccatgtacacttccatgttccgtcccagaaggcctttaaacatccggttcaccattcattgatatgttgcactagcattctttaatccgaagggcatgaccaggtagctgtatacccccttatcagtcctgaagctagtgcattcttgatctgcaatgtgcatcttaatatagttgtagccggcataagcgtccatgaaggacaacagcttgaatcatgaggtggcgtccaccatttggttgattcgtggtagggggcaacagccttttggacaggccttgtctacatcggtaaaatctatacatacccgcgatgtcccgtttggttttggcaccagtaccggattggctagacattctggatagtacacgtctcggatcatgacactggtcagtagtttgtccacctctttctctagggcttctaccttcactgggtcgagggggcgtcgcttctattggactggtggaaagtggcgttggtggaaacaaacacgttatcatccttgtgactataaaatagtcc

SEQ ID NO: 358095 - DNA, 544 bp, Cannabis indica
ggtaaaataatttccaacaccagattcatctgcaaccatgccaaccttcctctgttattctttgtcagcctgagtggaccttttaacttgcccacaagatctatgatcatttgtgaggattgcacatggaaagctacgaggttcccctggtttggattggtcggaagctcctcagccttagaatccatcgtttccggctcctgttgaggcttgaagtctttaggaacaaatggaaaatggtttgtgtatctaggtattatgagtttggaaggaagaacttctaaactcagaagggatattttggcaggaaagagatgatctattttgaaaatagatctcactaaagagccagaggtttgtgaaaaatgacaagcttgaggtgcccttttatacacgaactccagtgacaagaaagccaaagattgagaaatataactgttggaagttgtgcaaaatatgaagagacgattcataatgactctcgaaaccttacaaccgctagaatcaaaggatgcatttttcaagaaaagatcttgacaaaaat

SEQ ID NO: 358096 - DNA, 670 bp, Cannabis indica
ctcaggtttaaataaacatactttatatagaaaaagccaaactcaaatagatgagagagagagagagagaataactgtaagaaaaagtgagaagtagagagagatcgtgaactgaaataatgtaaaaccacatgatcttcaatagagggcgctgtaaaatcgttgatcttcgtagtagatgaacgagttaatatgagaaaagctcgaagaggaagagtaacccaaaatttttgaggtgaaccactataatctcgtgttatctctctatgtgttttctttttcattgtatttttttctcactacaaaaaactactacttttagtgacaactttttagtcacaatataaatttgttatgattaaatgtaacttttagtcacaacaaaaacttgtgactaaaacatagtatttaattacgttgtactaatttagttttagttacaacaatattatgactaaaaacacatttaatcacaacaaattgtaatttttgtgattaataatgcattttgtcacaaatcttttagtcacaacataagaataataatttataattagtcacaatttttttacttttagttacaacttttgttgtgactaaaagtaaaaattttgtagtgtctatttgtgacagttagtagtcccgtgatccgtaaggggaaacaccgggt

SEQ ID NO: 358097 - DNA, 746 bp, Cannabis indica
aattatcagaattaaattaatcaattttttttaatgaatttagatattagtagtttttgaaccttaaaaatagataaaatctattattattgcttagttggtatcttattttaaatttttattattttttttttcaaatttaaggtcagatattttataatttatattacttaattaattttataaaatgatcttatttgaaattgaaaataagattattttaacctagaaatttaaattgtaaccagatattttgctaattttcaaaattttgttattttatttaaattaaattataaaattagataagtgatctttatttatcattttatttgatagaatatttaattttattttaacataaaatatgaaaagttgttagcaggtttgttgaaaacctaatttttcaaattgataggtttaatttttgaaattaattatttaatttaattttttttcgaaagtaataatttaattatttagattttttgagaataatttaattatttaattaatttaaattaaataaatcctatacccatctatctaacttgttacatgtgtgtgtgttttatatattgtgtattatcaaaacttgttttataaaacctattattgtttgatctaaattgtcatgattaacttgttgaaagatccaatgatttgattttaaccaatggttcaattgtcaattggtcaaataaataatttgtaacagacaatttttgcaatcttctttcatctgt

SEQ ID NO: 358098 - DNA, 1003 bp, Cannabis indica
tttttttgagaaatttaactgttattataaatggtcactacaagaaatgtcacttttgccagcacaaagttggtattgcgctggtaaaatagaatttacttatgatgtgttagcaaaagggggttgggcaaattaatgttggtattagaacttatgtcagcataaaatgaaaagcgctggcaaaaatgactttttttcagcacttaaatgcattgataaaagttagattttagccacttcaaatgtacgctggtaaaactttgacctctttgccaacgcaattcgcaaaatgcgctggtaaaagttatttttaccagcgcatgcagtagcgaactgtgctggtaaaagtgacatttctttgtagtgggtaatggcttagtattgttaataaaagtatattccactggatactaatttatagtatagtttcgttatctatttggcatagttatattgtaaccgttaaatttaaaagaaaagataattgataaattattgttaactcgatacataaaagtacagtgtttcattaatatcttctaaatatagatatttttgaaaattgaataaaatcgtaaaatattaaattaaattttataattaaatatacaaattatatcattttaaatatatataggtaactacttaataattatatttttattataatcatcatgattacatttgttttaacctgtaatagcacgttactaagaggtataatttttattaaaattaaattaattataattaattattttcttaaaataattgattttttaatttaaatattaaacaaaaccctttttcaagaattaatatttacaaataattttattttttatttaaatccctattataattattttaacaatcaaactatttaattataatatttacaataaaactttatttttttttacaaatattagacttccactcctttcaaaataattttttgaataattaatttgtttttaaaaatgacatttaattttttttt

SEQ ID NO: 358099 - DNA, 558 bp, Cannabis indica
aaccgtatacaacgaccaacaaccttagcccaaaattctttgggattgggctggtaaacctccctcaaaagaaggctgtgaactacttgggatgaaaaacaaaattagggatatctaagaaatgcccaaactgcgtgtctcataatatttttaacaaattcccagataaagtattcttaatgtttagcaataacagagaaattgctagtacatacgcacttggttctaaaaatcactgggactgaatttgttaatccaatcctgcattgtacaaagaaagtaaatataatgaatgggcatatgcaagttgcaaaactataatacaactacaaaataactaaaaacaaaccaacaaaaaggacaaactccttcaatataaacatccatgatagttctaatttttacccattgatgatgtatacatggacaacaaacaactagataacaacaatttcaatacaaacacacatagtaaggtgttaaaactatacaaaaaaactatgaaaaaactataaaaaaaaatgaaaactgatcaaataaagaaattgaaatgaaaaa

SEQ ID NO: 358100 - DNA, 594 bp, Cannabis indica
gaaactcaacttaccattaaacaacaaagctttgagttcaaaaataaaatttgcataaatccaaccccatacactaaaacgagctgcaagaagcttaaaccaactcaaatgaaccttaaaattctaaccctaaaagccatcaattcacaaaatcacatactcaaactaaagaaaaagcttcaaaacataagactacggttctagggttaccttagcttgatcctccttgaatcccttgctgaaatcaccaaagatcaacaacaaaaccccctggttttggctggttcaaagagagagagtaagggaaagagaagttgttcataaatttgcttttcttgatttttctttttaatttccctcaaataaaataaatgttaattacattaaccttggctggagtattttactgctaggtgtcatccccaaaaatcagccacctaacccaccattaaaattactaaaatgccctccataaccttaactttgacattttcaaacctaggggtaaaatggtcaaaaaccataaccccgcacaatctcgatattttattttttctgatattgatccctctaagaaataaggttctacactta

SEQ ID NO: 358101 - DNA, 138 bp, Cannabis indica
gaccgtttagaaattataaccgtataaaaccgaccgtacggtttttggcggttttcggtttggcggttttaggcagttttgcggtttttggcggatttgacggttatttggttaaactatttttttatttcaaaaacc

SEQ ID NO: 358102 - DNA, 1403 bp, Cannabis indica
attagaaaattggcatttttgggaaaatagaaataaaattgtggaaactgcaaaatctaagtgaggcccatcacacccatggccggccacttgtgtgtgtatttctaaattattattttcatttttttaatgccaaataattactaacctaaacctagcagctatctataaatagaaagtggtggcacacaccaaataaggcaattaagcaattactctataattcaggaaactgcctctttcagaaagctgagcttcccttttctctatatatagccgcccatctcttcttcctctaaaagaacaatacacaacaatataagagagatacaattttgcatcctagtgagagagtagtgcccacacacagcaaacagtacctcaatcatagattggaagactgtgaaggattgaatctaagagaaggacatttgggcttagatcttgattatactctgcaacagaaatgattcaagggtaagagatctgagtggaaggagacatattattccgctgcaaccagtgtaaggttttcttaactttatatgtgttttccttttatcgttttagaacttcatatttaggttgttaatcaacatacttgtgagtagatctaagatcctagtaaaataattccaacagcaacttccatcaacatggagtttccatgttagatcttcaggattttgttattgaacttgctctcacttgttctctggctcttgctattctcctgagtcttgagagacctcaagagttgagttgttgcacttagccacgaagtctgtaagggcttgcccctttatggctgttcttggctggtatgtgatctcaaactggccaagctctatagcccatttgagtagtcggcctaatgcttcatgtttgtacaaaacctgtagttgttgatcagtgcacaccttaatgaggtgtgcctggaagtagggcctcaactttctagaggccaagagaaagctgtaggttagcttctccatgagtgggtattgactctctacgtcagctagccttttgctgatgtagttcataggatgctatacacctgccttcttctcttgtgaggatagcactcacagcgtgctctgtgactgctaggtacacacctagctcttcattgtctaggggcttagacaacaccgatggttgtgctaattgcttcttcagctcctggaaagtgttttcacattcctctgtccactcaaactttttgctacctctgagaatattgaagaagggtacacatttgttcgtagatttagacacaaatcttcttagtgtagtgttacgaaaattgttaattactacgcaagtgcacgcaatcaagtagtatactcacgcaagtgaggtcgaaccacagggaattggattaattactactaaactat

SEQ ID NO: 358103 - DNA, 563 bp, Cannabis indica
caacaccaggaacacaaactcgagcgagctttatataacatcattccactattcgagactgaaaagtcactaggtcgaccagtgattacctcatcccgaatcttaattagctcgagatattctagttgtgcctttctgattctttctaatagatcagattgaagtgtcaagttgtgtaactttccaactacaaattcaatccctacactaaccatttcagaagctagttgaggggctatcagcaccgtggtgcaaacctgccccgaacctcttctactcaaagcatctgccacaacattggctttcccggggtgatacagaatctcacagtcatagtctttaaccaattctagccacctcctctgcctcatgttcaaatctttctgggtgaaaaagtatttgagactcttatgatcggtataaatctcacacttttcaccataaagataatgtcgccatatctttagagcaaaaagtacagcggcaagctctaggtcatgagttgggtagcgttgctcataattcttcaattgacgagaggcataagctatgactctgtcagc

SEQ ID NO: 358104 - DNA, 585 bp, Cannabis indica
caaacctagatacttctttatcatgagtattactaagaagaaaacactgaataaaatacaaaacatccagtttcaatccaagggactcatccaaaccccacctactacccaaaaaagcatcctcaatagctttgtggtcaatagtttttacaccacgaaaacaaatttctaccaactgatttgattcctgtgaaaacaacttgttgcaatcaccgaaacaatcaattttaggttgcattcaccctaaaatttcacaaagtagaatgaacaaaaaacgcaaaaactggaaatacactacaatgttcaaaaaaggggaaaacgaaaatgaaactgaaaaccaacctcggttcgaacttcggcagcaacactagcttttttcccaaaaacttcatcaaccattttctcttccacactgagctttgatttcttcttaggatgtggcctcccacgcttggttaaaggaggagcaaaatcagaatcctcctcttcaataattggacgtttacccttcgctttgtaagctagagatttcaatcccattttggaatttttttttctgaactagggaaggagatgaggatgaac

SEQ ID NO: 358105 - DNA, 593 bp, Cannabis indica
ctaaggcatccgatctcactttttgtctcctttttcagattactgcggagaccagccgcctttccaagaccttaattaaccatggcttcgtcatgtccgaatttgggggcatagacgaggccgtgaggatcctgcgggacttgtctgccgaaaggtgggcgatccaggaggaggttgatcgaagggaggccctcgcagaggcaaagctcaaggaggaagccaaacagagggaggaccaagtggaggcgcagctccgagaggaggcaagcagagggaggctgagacgaaggtgaggcaccgggaggcgctgaaggctgagggtgaggccactgccaaagctaggcgtgagtttcgggaggccagggaagctatggacgagatggctgccaaggtaaagtccttagaggaattgcaccaggcaggtttgcagcctacgaccaacctgaccgtggaggtgaaggagttgagggacttcaaagatcaggccatgaaaaaggccaaaagagaagaactcctaacccccgtctcctgcaagcattgtgccaaacgcttcgacgacggcgtctatatggcctggcagtcgaacggccaga

SEQ ID NO: 358106 - DNA, 388 bp, Cannabis indica
gttccaggtccaagtccaagtcccggttccgatcctgttcccgggtcccagtctacttccagtttctgttctaattttggctcacaaggtacgggttcgggtccaggttgcaatttggggctgggttgaggtttgcgtctagtttcgggtcccagtctaggttcgagttcgagactgggtcccagatccaaacaccgactacaggttcggtccaagccctaggtctagatgtggatcctgatcttgggtctcagtcgggttccatttcgtgtgtcgagtcacgagttggttcctagatttaagtccaggtttggggtcgggtcttgggtcacggtcctagttccattgcccaagtccgtatcttgattcttggtctaagtcccagttt

SEQ ID NO: 358107 - DNA, 681 bp, Cannabis indica
atagagctattctaacgaagtattttcgggctgtgatgaacaaacatgtgtagctttgggttaagtgggtcaatctcatgtatttgaaggacaataatatatgggactacacccctacaatggatgttagctggtactggaggaagatatgccatttaagggcaaggttttctactgctactctcatggctgcgggtaaaaatgggaaattcagtgttgctgcagtgtacaaaagcactttgcaggttggggaagtgtgctatactgaagctgtttggtgcagaagcagtctcccgaagcataggtttgttttatggcaggtagttaataatcaattgctaactagagacaagtttttcaggtttcaaatcactctgaaaaatgtcaattgtcctgtttgcaatgctgaaattgagagtcataaacacctatactttgactgtattttctctaagcaggtggttactgctatctttgattggattggtgtcaaggcttggcctttgttgtatgatggatggcttagttggtgttcgaacatgagcaatgggcagagcatgagcatctactatgtctgtcttgcagcgtgtgtttacagcatttggaggaaccgaaacaactgtattcatgagaatttttcttttacagttttgtatatagtcaacgagattaaagttgtta

SEQ ID NO: 358108 - DNA, 521 bp, Cannabis indica
gccttagcaagagcctcccttcgatcagcctcctcctggatcgtccacctttcagcagacatgtcccgcaggatcctcgcggcctcatctatgcccccaaatttggacatgacgaagccatgattaactatggtcttggaaaggcagctggtctccgcagtaatctgaaaaaggagacaagagtaagatcgaatgccttagacaaaatatcaaggaaagaaataaaccgcaagtacctaccgcagccatggcgttgctgatgtcttgaacctggtagacggagttcaaggaggcacaagcagcataccgtttaggcgggaactgagtcagatgggacacatactcgctggccatctccgaggcaaagggagccaaggtgggcccaaggaaacaattgaaccagtccgtcagtgagtccatgttcaagtcccacagattccggaaggcctcctcattgagagtgttttgctgctcctcccgtaagatcctcttcaaggcctccacctcagcatgcccccggc

SEQ ID NO: 358109 - DNA, 661 bp, Cannabis indica
ggtgggttatcagaaagtagatgcttcttattttgttcctaattgtatttcttgctttcattctttcattaataaaattcaattgccatcactcccttcattaacctcttgcaatttctcatctaagttttttttttttgttcacttaaacttgaggaattcctatcttattgtcaacttgaatcttgtttatttctacttattttaacttgcataaatttctcttgaactgacacaactttaaaatttatcaatcacttacagttaactactgttataaagtgaattaatgtaacttatatagtagaggcaacattgctcataccaggtacccataaataaactggaaatacacatttctcgaattctcaactaataacaatcaatcaaagatcattctgtgatcttgaaatttcttttctatatttggtagagatcttgatgatcttttcaacacacccagaaatatacatacctcaagtatattatctgttttattgataaccccttagtacaaactatgataccaacttatagtgagtctcccgttgatgatgttgattcatcaacatctgagactctccatcattaccactaaggtttcactcccaggttcatacgctactcttgttttcttacaatcatcactatctctatattt

SEQ ID NO: 358110 - DNA, 709 bp, Cannabis indica
gacccgaacccggacccaaaccccagacttgaaccccggacttggactcggacgcgggcctaaatgcggactccggacccagacccgagacttgaacctagacctgggatccgagacttgggactcagacacggacccggacccgtagttggtgttggggtcaagtattggaaatatattatcactttacacaatcttataatacaagtcaataccaaatatagtattatattaaataatactaatacaatacaacataacacaatccaacacaatacaatacaatacaatacggcctaccaaacgagctctttgtgcattaatttagctttgttttcgagtatttttagtttattttagtgacctttattttgttttacttaattttgcacaaatattagttttagcatttatagattagttttagttaatttttgtaatattttatcaattttatttagtttttcattttaaaaacattattctcaatattctgtatgtttgataagagatcaaatgtaaaatttagacttattaagtgtcaaaatggtcaaaatagagaacaatttgaattatgtgattgatgtagttgattaatttactaaagtcgaattaaagtccaaatatctttttcaaagtccattttatttattaatgggctgatatatttttagtgtgataagggttaacaaaaaaattaaaaaaaaaa

SEQ ID NO: 358111 - DNA, 754 bp, Cannabis indica
gaatgatcttgtcaaaaccactatgaacaagatacaaatgccacaaatttataaaatatggttgtggtattttaatgaaaaagggcttagttattataaagagttcttagaatagtccaagtggatcctggtcacagaatgcaaaactcagattccttacattaacatatagtttggatccattgatagaaaatggatattaatagcttgtaaaaatcatactgtattggccaatgtattctaagaaattcaaataaaaatgtatatttggaatctaaaatttaaagtcaatgacttaaatttatatgaaatatacaatgagtgattattctctcttggaccaccactactaatctaactctaagtctaagttgcctaaagtaagcatatacaagtaggagatttctaagatcgaggatttatatcatttcaggatagaatgtcgagaatatagccatttgtgccattcaatttcttaagagaaattagagtgacatcatatgcagatgctttataaaccattcatccaacgatatattatttaagcaaattctaaatgaaatgctaagaggaataattaaaggacaatttcgattaaaatcaaaatccaacaatgtcccggtaggcgagagtcaaagtcattcttattttataaacttcttcattatttcatattgtaaatactagtctaagttgtcatctttggatgaacaactagatgttgcatttacaaatatttatctatcgagatcta

SEQ ID NO: 358112 - DNA, 775 bp, Cannabis indica
aacaaattttatttatttttttattttgggcccccggaaagtgtgggccctaggcacgggcctagcccgcctatgcctaaggccggccctgattgtattatattatattaaattagattatatatcatatttttatatgatactatattaaactttaatttatactaaaatattatatatttaggtgtccataaaaattaatacctcatataattttacataaaaatattgcataaaatacaatttaatataatactatacaatacaatatggtgtactaggcttatcaaacgaaccctaagtgtgtattttaagacaaatatttttttaaatggacataattttatacttctttgtatatattttatattattaaaatattatatcattaaatattctattaattaaaacaaaaagttaaaataaaataacaaattaattaaaattaacaaaaagagaaaaaaaatcttatagtatgttaacaataaaaaattgtcaaccaactcattagattgacgacatgagtaataagtttaggtatataatttagagagatacacaaaatttatagtagttcactccctatgtcgcgatggtaatagagttacatctacttcgagtttttatttctcacgagatggtaattacagattaagacagcatttaagctctgatttatagagagagaaactagagagatatggtctgaccttgtaggtatttttttgaatatgaaaaatgagctaagggagctctctttttataggtgaatgag

SEQ ID NO: 358113 - DNA, 959 bp, Cannabis indica
ctggggagtttctgcgacacccacgcacatcagtgggcagttgatggcgacaaacagggcaagagttacgaagtgaaagccacggaaggatacagtctgtatggtagatatgcttgcagggcatctctcgagcttctgaattgagctcaaattcctccttacaaacagcacagtgtaattccgtggatatatggtttgccacaatcttgataatgggcatggactcaatagccgctttggacgctggaggatgatccattctcccaaccccattaatttctaactgtgacaattgatccaaaaggcggtcaaatcctgaacccataaaaaaatcagaaatgctaggaggtatgggccgaagactagttccaacaccatcatcgtaatatagctcaaagttacttcgatcagtaccattcatttcttctccgttgttgctgccgccctcgctaccctcagcgacgccacgaaggacaataacagggttaaaaggcgagcggtcacgactacttcttgggctgcggcgcagcctttggccataactacgaatctctggattgggggtattgtcaaggtacatagcagcagctggaaaccgattatggattggggatctagttggggtcgagttctgcatttcttcaacaaatccgccaccacaatgcagacaaagtaaggtatcttggaccggaacttggattcctacgttaatgattcgactgcatctatagcaccaatatgatgttccagccaaatccatataccaaatattccaaccaaatcggattatatgaaaacctacataaaaagaaatgtatatatgtatcttcgttaaattcatttttacaaacatttaggtggcgtttggtaacacttttttaatcagttttctattttaaaagtgaaaagtaaaatatttttcaaaacatgttctataaactgtttttacttttcaattt

SEQ ID NO: 358114 - DNA, 813 bp, Cannabis indica
gatctggaatggaaggagtcattatattctgctgcaatcaatgtgaggttttctcaaacagttatgtgtttattttattgatttagagaattcatatttaggatgttaatcaacatacttgtttgtaaatctagatcctggtaaaatattcctaacacaatcagctcgatcaagcacttgtctttaaagttccaaaccccagagggcatgggggtggtgcgtggcgaccagatgctggctcgcgattgttatcgcatagagctgcagcataggaaggccagtcatcaactgataacgatcacgctggagaaaacaagaagaaagatgaagatcttgatcctcgagttcaagatgaaagtaacccgctaaaacatatttaagaattggaggaggttattctcgacccaggaaatcccaccaaatgtgtgtacattgggaagaacctggacgagcagcttaaataacaattaataagctttttgaaggcgaacgaagatcaatttgcctggagtcatggagatatgatagggattgaccctaagattatctgccatcacttaaatgttgatccaacctacccagcgaagagacaaaaaaggaggccctttgattccgagaggcaagggccactgaaacaagaagttgacaagttgctagtcaacgattttatacgcgaggtattttatccctcgtggatagccaatccttttctcgtcccgaaacataacagaacttggagaacttttattgaattcttcaatctgaataaggcgtgcccaaaaagactgttttccacttcccaggattgaccag

SEQ ID NO: 358115 - DNA, 559 bp, Cannabis indica
aaactgtgtgccattgtctaagactatcttgtacgggagcctgaaccgacatattatgtttgcaccatgaagtctagcactttcttggatgtaatttttgccaatggctcgaattcagtccatttagtgaaataatctattgcaaccactgcatattgtactctccctttacctttaggcaattatccaattagatcaattccccaaatagaaaaaggccaaggactttacatctgagttagttcgttgggtggtgcatggggtatctttgaaaatctttggcatatatcacatttcttaacataggcttttgaatctgtaatcatagtcggccagaaatatccttaccttagtattttctttgataggctttgcccggctgcgtagttgccatagaatccatcatgtacttcagaaaaaagtcttgcagcttcttcttttgtgacacatctaagtagtggcatgaagaacccccttctatacataactccttgatgtcgcccaaatagttacactgcggtcgcggtagtaaacgggctatatgttgtatctacaggga

SEQ ID NO: 358116 - DNA, 634 bp, Cannabis indica
gtttcgccgcaaatagctctttaaaatatcttattattatattgattaatttgcggtgatataatatatacttaagtttatcttcgagttgtaaattaataattaattttgaaaatcatgggcttccatctcaaaactaattggcgaagtaacccatgttcttatatatggttcaatgtttttacatttaatccatgtgggacaatgttctgcaatacttaagttattttttttacggtaaaaatacctcttgttatactttttatggctaattaagatttttacctcctaaatttcgacatgtactaaattatgtccctaaacttttaaagtcgttaataattccccttgaactattgggattgttggatttaaagacttttgtctaattttagtaaaaaaaaaaatctaacatggatgaaagttcaggggcatgatttagtatatgtcaaagtttgaggagcatgatttggtagatatcaaagtttggggagcgtatagtttagtatattaacaatcactgaaatagtaaaattgaatgaaattaaacaaaagtccttaatctaacaatctcaatagttcgggggaatttttaacggccagaaaagtttaggaggcatgatttggtatatgt

SEQ ID NO: 358117 - DNA, 774 bp, Cannabis indica
aagggaacttagaaacccataagaaaattaactaacaaaagcagtaaactaacactgcttcgagtgttttctctggatttttctgtctgaaactctgaaactgtactgaattttaaaaacctaagcttctatttatagaagggtaaaaggactaaatgcgcaattaaacttattacaaattgcatgtgggtaaaaatgtaaatacataaaagttatttctgagtgacacatggcactcgttgattggttgctttgggtgaggcggtgcatcgtgtcattgcttggttggataaaaaatgaagtatttgggctgctgaagggagcggtcacggaggaccaatcgcggggcatggcgtgaagtgcacgcacggccagggtgaggtcgtgcgcctcacactcgcgtggaagggagagagggggacaagcccctgctggtgctagcagtggcagatgcggacgaatgggaggaggccacatggtgtggctgtcggctggagagggaaaatgggtcgaatttgggccttgttcttgggttgtttcagcttcaaaaatgccatttttcaatactttggacctcatttctatcatctttttatttctttccactcttttcacaaatgcaattttctcaatcaaacacaaacaaaattaaatccaaacaaaatattttcaacatgaaatatatcataataattttaatgaaaatatttatttaaaatctaattaatttgtatttctttaaataaaaacaatgcattttcttaactttttatt

SEQ ID NO: 358118 - DNA, 691 bp, Cannabis indica
ttgatgagaatcaataaataatctagtttattggagcttaaaatataggtttatggtctccgaattctcaccttgaaacactgtacaagggaagagataaagagtagtacaatgttgtttagtaaaaatttattttcaattagaaaaaatagtaattatttatttttagtaaaaaaaaaaattaattttttaaattaattaaataggaaaaagacaaaaattatcaagacaatatttgttaaggaaaaaagttgtcaggacatgacaccatccttgtcctaaacgaacaagggtaggtgcctagcatgtagcctgtccctacactacaataaatatggtgtatatctttgatttttaacgatattaaatataaaaaccgatgagaaaagtaggaagagaaagaaagaaaaaattcgcaaacctataactgccgtcatttcgaaataaacgaagacataagtcatggagacctttatctttagttatacataggtgtgcctatgtcttcataggtttccacaaccttagcctcatatcaaatacacgtggagacctatgtcttcggttattttgaaataaccgaatatatatatatgtctataaaatcttaatttcaaatttaaaactctcatttcctttttcttctccatctttcctctcaacaaaaaatgctgccaccatctctcttgaa

SEQ ID NO: 358119 - DNA, 876 bp, Cannabis indica
aaagggacttagatcgatctagtattttgattgaattatctaaaattttaaggtcaattgttgtatcttgaccttaattattattggagttatttatccttgtttctgagagaaatctgagtaattggctggaatgcgtttccattacaggtgaaccttgtaaattactcatcttgattttactttttaaggtagctataatacatgattaacaaaattcatgcttcttttaatatgaaatatgtaaatattaatgaatggtaatggagtcgtagacatgtatagcggggataattttttccaccccatatctaatcaataccgtaatgacacatcatttaatttatttttgtaaaatttactcactaaaactaacggaacaattccattaactacaagttttctattttttaaatttctttttttttacttattattttggctgaacaatagtttttttttttttaaatatataatttataaatttttatacctcatattaacctaaaaatttcaaactctagaagaaaaattataaatatgctctttcttttcaatgattcttataattaatattatgtccctattcagataaataaaaaaaataatatatcattattattttttagttattttaattatatttaatatttatgataataatttctttaaaaaaaattagttctaccattttttgtagttaacaaatttgctctgtaagttttagtgagtaaactttacaaaaataaattaaaatgatgtgtgatcatcatattaattatacataatagaatacaatattttgacaggggatcttgattcatatatatatgtagctattgcttgatatgatttatgtatatatatttatatata

SEQ ID NO: 358120 - DNA, 786 bp, Cannabis indica
gataactaatcagattgtaaagagttttatttagggcataaaacccaacagttgaggcattagttagtccaaaagagattaccaaaaactcataatgtccatatcctattctgaatgatgtcttgggtatgtcttccgtctggaccctcagctggtgatacccagatcttagatctattttcaagaaaacagtcgagccttgcaattgatcaaaaatattgtcaatccttggaaaagggtacttattcttgatggtcaccttgttgaactcacggtagtatatgcacatcctcatacttccatctttcttcttgacaaagagtactagagcaccccaagattagcaacttggtctaatgatccctttgtctaggagctcttgtagttgtattttaagctcttataattcgttaggcgccatcctgtatggagcctttgaaattggagtagtccctggggctaattcgatgatgaactctacatcactatttgagggtatccccggtagatcatttagaaaagactttttggaattcacatactatgtgcatgttttttcattgttagttgtgtctcctgtgcgtggagtatattatccaacaacgcttgacaccataccttccatagctggctagtctttaaggatgagattgaagagttcataaggctagcttaacttctttgaaagtaactagtctcgacctttgttgccaacaacgaccaatgctttcagcaatagatgaatggatagccaatccatatcgagtgcagcaccgtgatccttca

SEQ ID NO: 358121 - DNA, 520 bp, Cannabis indica
tatgtgtataggataatattatatattcgaaataaataaattttttcaaaatttaaagaaaaaaatgaaatttttgtgaattattttatagaaattaatgtacggtagattatggaaatttgatgtaaaataaaaaatttgagtgatgtagattttaaagccaatatcgtttggactaggggtgtacatcggtcggtttggtcgggttatagtgtatttttaccaactcaatataaatgttgggttgcaaatatctaattgtaacttgtccaatgaaaaaataaaaaaaaaagtgtaacctacctaatattttttgtcagtttggtcggattaactcgtttaaaccgatcctttttttttttatttattttttcattgttgttagtttatggtgttccaataattgatttgaaaaaataaatgtatagtatatgcctttcaaaattaaaatagttatagttgaaattaatgttaaaaaaataaatatgaattgaatgaacattaaagtattaaacaatat

SEQ ID NO: 358122 - DNA, 523 bp, Cannabis indica
atacataatcaacatatatatatttctatgctttctaatatataaaatcgtacgtatatgctttcgtgattgcagatcaatggtattaaaaattatttttattattattgttaaaaaaatatatattttatacttgaaccaattatgtttttaaaaaattgtgctggaataccagaccaaaaagaaagtaaagagctttatcagttttatttctccaataagagacagatgccgtatttatatgaataggacacaaaatgggacacgacaaaagatttggataacctcagagtctctgttaaaaacctcagatctttcacatatttatcttcatactctttctcattttcactttctatcttcatctctttctctcttttctttttcttttatcacttttagatttttatgactactattttatttgattgaattatagaaaaaacttgtcctacttatttttttttttttcataaaaacaataggacaaaaaaaaaactttttacccttaattaattattat

SEQ ID NO: 358123 - DNA, 660 bp, Cannabis indica
ataaaattaaaagtgcatttcaattaatctcaacatcttgatgtccagatcaagtgtaatatgtagtattatctttgtaatagaatctgaagggttgtattcaattaccaaccttctccaccattacatctccttaatcacaaaatccttgatattgtgaaattcctttctatatgtttcactcctcttagggtactggattttttactatttggcaactatatttgtgttgtcaagaagtaacactagtagttaatccattaatggaataactgtgggaatatattttactaggacctagatttactactaagtatgtttttaaaatcctaaatatgaatttctaaaataataaaatttaaacacatataaagtatgagaaaccttacattggttgcagtagaattaaataactccttccacttatctctaaccctttccagtttgtcacagagtataatcaagatctgagcctgacactcctctagttgtttggattcttcacagtcctacacactatgattgaggacttactggctatgagtggtgttatacccgaaatttagctaccatctcagtggggaacacgtgtcaatataaaaggaatatggatcgatgcaattactttttatggaacaactcattaattacgtaagtatc

SEQ ID NO: 358124 - DNA, 646 bp, Cannabis indica
caatgaatgtatgattggcataaatattgattgacactatcacattggtacaactagagtattgagaataggctgatattataaataatagtactgtcgtacgaacgttctagactcaatacgcatgggacatgggttacgattgggtgtatgggtgcctaattataatctgatttatctttatgatatacttatgctttttcttattgagtcgtcgactcacattactatttccacatgtaggtaagggaaaagctaaggttgaacaacagtgagtgcgagcagatgaatattgtacatgttggggcggttagacctggagcgtacgatctttgggatagcaggctatattttgagtagtcgctaggcgataacttttgtatcaaatactttgtattacacttgtaaaattttaaatacgagatcccaatttatatagaagttatttacttttaatttaagggtaattaaattaaattttaattaattacgattttcaactaactacttgattagcaacgacttgcatagttaatataaaattcgataacatgtctaaactagtagggtgttacatctcaatacatattttagttttattttcatattttttttaaatcatgtatatatgtattttttatttttt

SEQ ID NO: 358125 - DNA, 941 bp, Cannabis indica
gaccatatttgacttgcaaattgcgaaacaatggtagaagctcataagatagaatagccttgactctcgcctaaacgggacaagccgccatggtcatcaaattttggaggatccaccatggccacagtggcttcaggacttagtgtgactgtgagaaacatatagatcatgagactcaaaacctgtaacgagccactcttaatttgtacaacatggtcgagccagccctagaccgtgaggtccaaaagacccttacgaattcattgataagtctcaatggcctaacaaagaccaaaaaatagtggaaagtaattgatccttgtcagttggtagctgtgtgggaaggaggcatcgctatgtgctcgatcaagcctcactcggctaaactaagtttccatgcaagtcagccagctattaaacgaatgagacctgggaccatgaagtcccattcgttgacatgcatgtgttagtttttatggtccaaatctgagtctaaagtggaagcaatttttagaaaataaaattttagataaaactaatctaaagattctaaaccacaattctcaagatctcaacataattacatagattaaatctaaactatataaaaaagtaatttacctcttgatgcctacgagaggttcctcgattatttttataatttttatcaatcatccaatccaaaggcatattgaacttattgaagatttcacaccagtgttgtaatatcctagaattaagaaatagattagcaaaatcctaattagataattatgaataattgagaaattatattattatatagttcaatatatgagaatttaattgattaattgtatgttaagaccctattggtaagccagtggtattttagtaattatgacccgagaatggtaaaatgataaaattaatttaataacatgcttaatagaactatatta

SEQ ID NO: 358126 - DNA, 547 bp, Cannabis indica
ccattgtttcggatagagatccagaattcatatcaagattctgggagagtctgcattgagctatgggaattcagttaaagtttagcacaacatttcatcctcagacggatggacaatccgagaggactattcagatcttagaggactttctacgggcatgtgtgcttgactttgaaggatcatgggtaaagtatcttcccctgattgagttctcatacaacaacagctatcaggcaacaatcgggatggcctcttatgagcttttatatggaataaaacgtagatcacctattcactgggatgaggtaggtgaaagaaagttcttgggtcccgaggctattcagagaacaagtgaggcagttgctaaagctagagcacgaatgctcgcggctcagagcagacaaaagagttatgctgatccaaagcgacaatatattaattttcagatcggggacatggtatttctccgaacatcgccgatgaaaggcatcaagtgctttggtaagaaagggaaacttagccccaggtttattggaccttttgaaat

SEQ ID NO: 358127 - DNA, 371 bp, Cannabis indica
acatgtcgtgttgcgattggctagcaatactcccaaaaaattattatattaaattatataggacccgatacttggaccaatagcgatattgacacataggaaggtgctaaacaccactggtgtcctttagcatttctctttataaaactatttttcttttttaatttttgattgagaattaaaatttttttaaacagttttttttcttaatacatattttagactgcgactttaatttggaccttaggactcgaactacggccctaaccccagtcatggactctccaaatccggacctagatccgacttaaataaaattaaaatataaaaataaaaataaaaataaaaataaaatttatagaacacacttt

SEQ ID NO: 358128 - DNA, 749 bp, Cannabis indica
tcctcctccacccgacgaaggactgctcgaagagatgcctttcatcttgaagactgttcacttcagcagataaagtctcgatggtctcctcaagtcggtcagaagcctcaagatccttagtcaactaagctattttcatctgggcggtaaaaagcttcttgttggcttcatccaactctattcgaacagctccgagttttgccatggcgtctttagcatccttcctggccaagtccacctccgccctcatggtgttggataaagccgtgttcttggaagaagcaaacttagcccgggagtaggtgtaggccaacttcataccggcctggacaaatgaaacactttcgtatttgagccatgtaaagaggattaaatgaaatcgtcaagaaagacttacccttgtgaattccttcaagactccacccatcagtagctccagagaagagtcattgttagcactggccaactgctcattaacctcaggaacgaaccggttcatatagtgggcgagcatctccttgcctttcttggccttcggaagcactggcaaaggtggagtaggggtccgcagcagctcagacccacctctcggttggtcagacctatccgaactccctccttgagactccttagacttggaaacttttggagtagaggggtttgcaaccgttagctcctcagaaagatcgatgacctccccggcaggcgtcttttccttagagaggtcccctcactgcctttagacttct

SEQ ID NO: 358129 - DNA, 573 bp, Cannabis indica
ttaaaacaacctacatattgcataaaccctagtatgaatagttttaaaccctaaaaaactacctaaaccagatgagatgataacgatacaaacgaatcaagcaactaatccacactatgtaataaacatgatgaagaagaaataacttaccgtttgaagttagggcttggggcaacgcctgggaaatctatctgcaaaccttcgaacgaagcaaggatcaccttgaaaaaatgaagtcagaggaaactcacatgaaaaaggtcaaagacaaggattgcatgcaaatcttcagacaggtttaatggtgatccttaatgaagaagtttaagggtatttctcaaactttctgaaatggtgcaaaggttgttccttttccttattttatagtcatgataatgatttcaaaaaagatttgatccaatggacgtgattcaagtggaagtggaaaagatggtcatttaattttgatgtacctcgaaacctcacaactgccaaaatcaaagggaatgcgtctttccaaaaacaaaggagtgtgacgaaaatacccttggtaatcattaaaaagctcttttt

SEQ ID NO: 358130 - DNA, 1064 bp, Cannabis indica
cctctcaaggatttcaaaaagtccaatgaaccttgggctaagctttccttcttaccaaagcgtttaatgcctttcatcggtgatatttggagaaatcccttgtccccaatttgaaaatcaatatcccgacactttggattagcataaattttttgtctactctgagccgcgagcattcacgctctaatattgccaacgacctcacttgttctctgaacagcctcaggacccaagaactttctttcacccacttcatcccagtgaatgggcgacctacactttcttcatataaaagttcataaggggccatcccgattgttgccttgtatctgttattataggataactcgatcaggggaaggtactttacccatgatccttcaaagtcaagaacacatgcccgtagcatgtcttctaaaatttgaatactcctctcggattgcccatccgtctgaggatgaaatgctatgctaaactttaacttagtaacatatatcgatggagactctcctagaatctcgatgtaaacttcagatctctaaccgaaataatggactttggaacaccataaagacgcacaatttctctgacatataacttagtataatggtcaatggagaaattcatctgaacaggtaaaaagtacactgactttgtaaacctgtccaccatgacccacacagagtcaaactgtcctgttgttctaggcaaacctaccacgaagtccatagcaacatcttcccatttccactctggtatgttcaatggcggaagtaaccctgtaggcctctgatgttcagcctttacttgctgactggtaagacacttagcaacatactcagcaatgtcatttttcattcctggccaccagaacatggctttcaagtcttggtacatcttcgttgaccttagatgaactgaataaggacttgtatgagactcatccatgatctccattttaataaaatcatccataggcacacaaacacgatctccgaatcgaaatattcctgttacatccactgagaaatcactagccttcccagccgaaaccctatctcagg

SEQ ID NO: 358131 - DNA, 576 bp, Cannabis indica
tttttatttataatattatattaaaattatcttatataacaaattaaataattaataaatttaaaattaacctaggtatttttagagatattctaaccatacatattttcaaattcaaaaatatgtttttttgttaaatattttattatttataaattataagtttaaaaatgatattttactattttatatcattttacttattagaaatttataagttatatttttaatatttaaataacttagatatttttgtagaaacttgtgttatcccaaattttgcactttgacgtggcatcacgagaatggtgacacgtggagttcacttggagtatctgctctggaggaaagaccgagtaggatgcctcactggcacatccagaatgagatattcagcgagctgtgtagagcactcaacacttagcgtattcagcattcgcctcatcagtcatcagctcaatctctataactcagggatcaacttacgtggatatggcatacacacgatcccactatcagtgtactcagcctcaatcccacgatccttgcattcagcattgatcacacgatctttct

SEQ ID NO: 358132 - DNA, 746 bp, Cannabis indica
aatatataaaatattaaataaaagggttgttttcaatattatacttaaaattaattttatttataaaaatacctttaagaaaataatttgcacaaataccgttgtgccacatcagcatacataccaaaaatcaaaataattaccgaaaatagaaaaaaattgtcgtttccaggaatttttgctttttgggagtttgaaaaaaaaaaagtacctatttagttgcttttgatgtgaataagatatcaattggttacttttttactaaaaaaattatttcaaaattttacgcatatataaataataaaataataattttaatatgttaaaaacatatattttttgttatatatttgttatttaacaaatatataatgaagattaaaatgtggcatattatatattaatatgagattaatatatattatgtattggaggttatattatatcattatagtataataatacacataaattgtaacaaagtgaggagttacatatctgaaatagtttgtaacctaaggatcaaaaattgataaatatgtaattatgtgagttgttacatatgggagttatggaattaatgggataagtttctagctgttagaaactgttacaatactcaattatatcatttaaatgggtattgggacgttgggaaatgatttaactcggagaggagttacattttgagttctcaggaaacagttgtttaatagttgtttgtatgttgttttatggttgttttc

SEQ ID NO: 358133 - DNA, 623 bp, Cannabis indica
gcctcatcttgctcagtatgattgacattattgcaatttaaagttttgttattttataggataaatagtattttgtatggtgtattttgcaaaagttatataatgaattttctgttttgttaaatgataaaatagattttgtattttttaaaatagtacaaaacaaatggtactttgaactgattttttgtcaaaataaaacttaataataattcgaaatgttatgataaaattagttaatttttttacatctgtgcgtgttatgaattgttttcaaattaattacattaaaaaaattattgaaaattgaactcatgatcttatttataccatttagggtttgtttggtatgttgtattatattgtattgtattgtattataatattttagtataaaataaagtttaatataatattatataatatatacatataatctaattcaataaaatataatacaatacgatttaatataacattttaaataaatctttaaaaaatacaagatttactttatcatttaataaaatagaatgtacaatttatgttgttttttctttataattataggctaattaggattttttttttcccgaacttcgacatgtaccaaatcatgcccc

SEQ ID NO: 358134 - DNA, 621 bp, Cannabis indica
aataagtgactcgctaaatcacacccaggacttaggttttaaaccaaaaacctatatactgtaacttaatatggcaataccctaaactagcagggaattaaccaactagaaacctgaaattgacgcaaaacgacaagctgaattttcgggtttccctgctgcaaaatttgggtaaccggttttttaagcattgtaaaaccggttagccaattttacccagaaaacccaaaaaccaacaaagcctaaccaaatcgtttccaaactcaacaaaactttccatacctgcatattataccccaataaaccattttcaagcaacaaaacaacaatcaaagctcagaatcaaatttcaccattaaagctccaagtttgagttctaaaactcaaagcttggataaactcactaacagcccttaattcattatccaaacaacatttataaacatacttaaactccagaaaactaacccaaacaataacagccagtacagaacacaaaactacaattcatgcaaaataccattttcctaaaattcaaaaaaaaacaagaatatgagttaaagagattatgccttggcttgagactactacaaccagctgagaatcaaaggaaaaagatga

SEQ ID NO: 358135 - DNA, 741 bp, Cannabis indica
acgtaaattgatccctgagttatagggattgtgctgatgactcatgatgcgaaagctgaattcgctaagtgttggttgctctgcacggatcgctgaatatcttgctatgagcatgccagcgaggcatcctactcagaccattcttcccaagtagatattttgagtggactccacgtgtcaccattcgcgtgatgccacgtcagagagccaaaattgggataacatttgccccccaagtctgtacgagacttctgaagttgcgtgtagacttcatctgagctgattctgccttttgatggggacacgtgtcgagcgcgactgtccgagactcgatatgaggctgactaggcatcccttcggtttttagctaataaatgctttgaaaattaatatttcgaaatacaattttctctccccacggctgacgattacactcgattacgtttgatttcccatattcttttttattggcgggaagttgaggcgtctgaggttcctttgaggcaattacctcttttcgtgacttgcctataaataccaacaacattggcacataaacgcatttcatcacccttctttgctaagtaagcctcagagcgaaaagagaagttcttggcttcaaagttgccgaagttccttcagaaaaattgcttgttggattgacgttgctcaagcccagacatttgaatcttgagtaagtttttgattcccctttatgcttatccttgcatgtttacattt

SEQ ID NO: 358136 - DNA, 1318 bp, Cannabis indica
ttttttgtatctgttcgtattaagcattgtcttcaagctggttatattaaaaaaaaaaagttgtcaaaaattaagctcagggtcctatttttaatattttagaaaatacagggtccattttgtcatttaacaaaacacagggtccaatctgcgacttttgcaaaacacaggatccaaaatggtatttactcttatattattaatctcaaagctacatctataactttgaagaccaaaagaccaaagacgtagatggtttaattttaccgaactttgtaaaaattgaaagtttgcagttttttacctttaaattctttactttacaagtttgattatttgttatacattattgcttattatattatttacatttatttgattaagagtttaatcgcatagttttgtgttaaaagttttaatttaccaaattagtttaattttcaattcaccctctcttgaaaacatatcttggactaacaaatttgagttacacaatcttctttactatgctaagtattgctttgaaatgtgtaggcaattactcaacaccaagaaccacaaatttttgtgataaaaactcaagagaattttgaaaatatagatagaaaataatatgctatctttttgattcagtttgccagacaagagagagtctaaaaggtgttctaagaatcaaggatcattatgttctatttatagggatccattaggtatagggttagaactaaatgggctaatttaaaagatccaatagcttaaaataatctctcatggccgaaatccctataaggctcatgagttagatttttatcattattttgcttccttaatgaagcaaacttatctttctttagtaatgctattttctgttctaattatttaaatactaattttatctatttaataattataattaattattaaataaaattaccatttaaatatttattaattagaccttccaaggtctcttaattaataaataaacattaaattctcttttcttttcaattatgcccttccttggtaaaatttacaaataagacatagtcattatttagaatcctatttgattaaataaatcaattaattgagactacaagataatattatttcagttaatgcggggaccatgggcctatgtaaccaagctctcgatcagtagttctagaatttaccaagtaaattctctatcttattacttgctcctgactccactatagattcagaattgcacttctaattacatagaacactctatttgttggaattattttaccaggatcttagatttattaacaagtatgttatttaacat

SEQ ID NO: 358137 - DNA, 1803 bp, Cannabis indica
attatacaaaaaaaaaatggaaattaattccatgaaaaatcatgaaaaaatgaaaaaaaatttacatgcggctcagatgatatgcatttcataccatctgtgcgcatgcatcagggtagctggtcgagttttgccacacaaggaggctgccagcatgatttgtgcacacggaatggggctgttcagacagccttaggtgtgttttcttaaacaagcattgtccaaacacgcatgctaaccgagtgacactcggtgtccgcgcatgtgtgtaggtgacccctcttcaattttttttttttaattttcaaaacatcatagctaatttaaataaaattgaaattcagttctatactatccaaataaagtaacttcagattgtgaatccaattattttacgtaaaaattttgtaaacatcaagcaatcatcaatgaacacatagatcaacatgaatcacatccaaatcacacatacatcgttttaaatctatattttttgaaagtaaatcattaccatgactctgaggccatttgtaaaaatatatttaatcacataatcttgattactttccactgtgttgacaacacaataaacaagaatataaatgtgataaggatttggatgaatttataaatcaaataagtgatcacattaaccaaataacacatattaaacaagtaatgaaataaatttgtttcttcattgataaatgattattcaagattacattgaagtagagttttatttagggcacaaaacccaaaagccatgatgtttaaaatttctttgacactgtctgagcttgactgctcttgcccccaagcgttgatctcttagtgactggggtaaagaactttgaagtttgtatgttgaagctatttattgtgagtgagatagaccactgttgaggtgtagtgggttatttattgtgtgcttggtgcttaagcatgtgctcattttatgatcataagtgagatgaatctctgtcgatgagtagtatagaaaaactcactgaatctttgtataggggcaaaatcacaggtttttgaagagcctagtttgatgatttcaaatcataaaactttgttaaagaaaaaactcccaagggaagaaaaagaaaaaagaaatattggaccgaagccgtgctaagtacagcatcccgtacttaggaggagcttagccactaaaagaataccacaactagggtagcatcccactcctagagggctttcttcaatcaattataaaatctcttctagatgcagcggcattcttccagagagctttctgtaattgatgatgcttttcttttctttctgattttgttatctgaagaggaacacttgcactagcactttaggtttataaactagattgttatattcttgtgagacctcaagtatttaaatcataacagtgcttaactctggtgtgcaaatattctgtacatgtggttgttcatcttaataaacttaccagcactcgcactagcacttcggaattaagaaactcagttactagggataacttcaatatttcattaaaccatagaattactaactcatgtgtgaaaaatgccactgtaactcctgactctcatagacaaaggtgtatgtgacttacatggctttcgtgcaccataatttttgtgaatggtcatgtaccgtgcatagatccagtatatactatatcttatttgcctctaagtcatcgaagaaatgccttcattagtcacttgccatactaaattctgttggtctttcttgatcaagagtctcagagagttgttacatgtgtgagtactc

SEQ ID NO: 358138 - DNA, 500 bp, Cannabis indica
tttttcacttttattctttttttttacaaatacagatgatgattttgatattttaaaagtataagtatctttaatgttatcgatacaattaatcatttgatattttaaaaatagactaattagtttgttattttataggcatacatgatgatatgtgtttgaaaaaataaattgttattccaatatacgaacaataaattaataagtttattagtgtatatcattattttttattatagtttactatgtattgaaaaaaattccaacaaacagaaactagtaggtttattgacatatataatggtaggctatataaaatgaaatgaattgttattccaatatacgaaaagaaataaaaatttattttaatatgccaaaataaactaatagatttattagtatatacgatagtataggctatacgaaaatgctattatataaacaaagaataaaaatttgttttaatatgtcaaaataaactaatttatgagtataggcgt

SEQ ID NO: 358139 - DNA, 804 bp, Cannabis indica
accactggtgcctagcaccctcctacgtgtcaatatcgctattggtgtaattaagtatcgggtcccatatagtttaatataataatttttatacagtatcgctaactaattgtaagtcgacacatctagaaggtgctagataccactggtgcccaataacaatgctcgtttgttaattaattgtttgaaagttgaaatttgagactacaaagccagcacagcagtaaataaaccccgaagctattggaggcttgcaactatatataaaataataataattaaaagaaaaacagtagaattagtgagacttagtcaagatgggtccactaattaaacagtttactttatgaaatccacgtcattggataagtgctggtaagtttttttttttttttttttttttttctatagaaagtgctggtaagttaataatctcaatctagatctaccaaacataagaatagattttctatccaaaaaagaaataaaaataaacacacacaacaatagataggatgagtgggatccacgtcttgtcacgtgacagagattttgcatcaaaactcattcatacagatatatatatctccacataatcgtagtaaaaaatatctatttttcttctcgtgaataaaaaatatctacttaagttaccgccttccagtataagtaggggtgttcacaaagtatccgatccaatttaatccgcacgatccaatccaatctaattcgcaaaatacgaatatccgcacttgtgcggattggattggattaaaaaatccaaaatccgcacttgtgcggatt

SEQ ID NO: 358140 - DNA, 1218 bp, Cannabis indica
tgtgtggtacttacagaattttttaggatccctccggtcgcgattccccctgatggggggcggcttcttgaagactccgttcctttcttcaatcgcatagatatggtctcgagggactgcgagttcagtataattgacgaagcgaggtcctcccttcctttttggcgaggactccttctttgggggtgacttagccagcttcggacttcgctgtctgcgcgggctgcgtcttctcgggcttcggcccctggagttcttccctcgcggactgcgagatcgtgaccgcggtatgggtgaccgacgtttgtccttccccttctctaactccgctagagagttctcaattcttttgtgaggttcggccatggcgaagaactctaccaaggactccggccttcgagcttgtagttccttccaaaagtcggtcctcggcaagatacctgttatcaacatacaaacaagcgaagactcgggggccttctcgacctttgttacttctgcgttaaaacgtttgaaatagtcttgtaaagactcaccaggttcttgtttgatgttggccaaagtcgtatagggtggtctatacgtcattgtggcctggaaatgcgtgaggaataggtcgacgaaggtttcccacgtcgatattgatgcctcaggtaattgggtgaaccaatcatgagcattttcctcgagtgttgccgcaagaatgcggcacttcgcgagttgtggtacctggtctacttccattatagtattgaatttttctaaatagtctatcgggttagaagtacctttatacttgagggattcggataaacgaaaccctttcggaagttgagcctgccgcacctctgcagtaaaaggcgaggtgccatgcagcttatatataggcttgcgctgctgctcgagcatctttaaagcttgcagaagcatgctttggtcgattcctcctgtcgcaggggctggagtcgctgcgactgcggggctcgcaactactgcggcaaggtttgctgggatattaatcccagtggtcgcgatcggcgcgataggcgggttattatctgcgttgacaccctgatcgcccgcctggggatcacggagtgtctcagtattatgtgggccgcgggagcgtgccctgaaaactgcgttgagatgatcacgtagatcacctcggtgtacttgataacgtcctccctgttgtgtctgtacagagccggacct

SEQ ID NO: 358141 - DNA, 560 bp, Cannabis indica
atagtcaaaaggatggatcctatccactcgcagttgaaacaccgcgattgatatgtacatcgttgggagacctctgactcatggttgaaccacttttcttaataagtgtcatcaccatattacttgctcaaaatatcagtataacaaaaatgaataacatctactaattcagaccatgaaacagagcacaaaatgaatgtagtaaattggaatatgttgtttgtctattgagaaggtgaacaaataattaataaattatatatattatttactaaaatgaatataatgatgcttaaaaaaaatgaatatgatgatgctaagaggcaacgaggcagcatcaacgtcagtgatcgcaaaattggagatgtacgttcaaggaataaatatactaattttagtgtttatagattatgaaaaaaaaataacaaaaaaaaaaaaaatattctaaaacaaatgtcaattttagagaaaaagaaaacctaataatacaatgctacaaaaatctaccataagcctatgcagtgacgaagccagaaatttagttgagtgagggcttgaat

SEQ ID NO: 358142 - DNA, 588 bp, Cannabis indica
aacgtgaacatttgcgaccctactatcaataaataaatgatgtaactcgcattactgatgtaagctttaaacatcagttatgaataatgagaatcatttatattaagtaattacaaagtttcattctttaaaattactaaaggggcatttatgtatgactaatcggaattcatctggagatacattgtataatgcaaaccctccattttaattttttttttaaaattcaaaggttctcgactaaacctctttgatggaggtggactcgaaccgttataacaacctgaccaaatccttttgacgagaaaggggtcgaatcgttataacaccttgatcaaacctttttgaccaagaagggatcaaacaactataatttttgatttataacctatccgacgggagtggaaaatcaaaagttataactcgcgtacaaaactgaatactaacggttctcgcgagctaggaaagtactaaacgaggcatcacaacaccttgatgaagtacttacacctagaaaacggatagataatataactattcatgcaaaaaaaataaaaaatacaaagagataaaatccttaaagtatat

SEQ ID NO: 358143 - DNA, 505 bp, Cannabis indica
tagtcacaatataatttttttgtgactaaatgtaacgttaagtcacaacaaaatgttactttgtaactaaaacatagtatttagttacaagttatcactaatttagttttagtcataacaagtattgtgactaaaaacacatttagtccaacaaattataatttttgtgacaaatactttgatccacggaccttttagtcacaacataggaatcatgatttataattagttataattttttcacttttagtcacaagttttgttgtgaataaaagtaaaaaattttgtagtaataatgtttaaagatatatctttatgggaaattttataatgcatccccttaaaagggatacaccgatacatctctctctgttttagtatccgaaataattttttagtcaaattttttctcataataatcacgtagattatatttatttaagacatcctgcaaaattttaagaaactcagaaaagtttaagatgccgaaaattgcgttcaagca

SEQ ID NO: 358144 - DNA, 785 bp, Cannabis indica
aaaaatggcgcaaatatagaacaaaccaataacaaaaagattacaatatatcccattataacaactcaacattatagaacaaaaccaaaaacaaacaacaagatatattcaactaaccaccatttcagcattcaacccaacaccaaactgaacgaaatcacccacgattaaactaaaattaaaattttaactcaaaaacttcatcacactgtgcaaacattcaaacaaaagtactaaaatctagacgccttttactaactcagaaataaaatcagaataaatcaacaacataacttatatggacatctaaaaagaaagaaaattttaattcaaaatcaaaaaactcaccatgcaatcaaggattcggtccaaaccaatagaggatttgatatatccttcttcttgacctacatctgaatatcaccaccaacttcatcagcggcctcttcttatggtgattttgattttgaaagagccttcatcatcgggaatgaactcttccttatatgatacatccctccagccatatattcttaaatatgatatgatcttgtttgtccatttttataacattttatgtctttgaaatatttgtatagtattgagtttgccctatttttataacacttatttagaaagtttatattttatagcaataattatataaaatactaatttttataaaatttttactttttacattcaaagttttatttttatattttcatggtattttattaaaacacaaaaaaataacataaaaacaacaacaaaataacataaaa

SEQ ID NO: 358145 - DNA, 546 bp, Cannabis indica
ataatcctccatctttctcttctttgacagaatctccttcatgaacttcacataacttggcatctgctctaaagcttcagcaaagggaatgttaatgtgtagtcttttgaaaacctctagaaatttggtgaactgcttgtctagatttgtctttcggagtctctgaggatagggtattttcacatgatgatcaatactgattggtggagactgttgtgatggtgctgggctatcagtagccttctctactgttggtgttggggttggcactggttgaacttttatctcctcatctacatcaactggttgtgtcaattcaggcccatcatacttcttaccgctcctcagggtaattgccttgcagttttctttgggattgacttcagttgtgctaggcaaatttccttgaggacgggttgctacctgagttgctagttggcccatttgagtctgcaagtctttaatggaagatctagtttcagtcatgaattgtagcaataaatctgtttgcaaactagaatttccaccagaggcttgttgctgagt

SEQ ID NO: 358146 - DNA, 818 bp, Cannabis indica
gtcgctgcttaaatgtataaatgtatgtaaaaattatatttagttttctcttgtcaaaattgtctaagatattttatccaaaatcttatcacctaatcactgagtttacagaatgttttaactaattcatgatattaaaaaattagaacaccacaaaaaaatgtgaatagtactgtaagtacttgccgaattttctaacactaatttacaacactagatgtgaatagagctttcggagaaaaataattctagttcattttgctacaaaccaaaatcaaaattaaagaactaaagtaaaaaaaaaaaaaactgagccttccacttctctctctatagccgaccctaacctctctctcttttcctcttcacaatttcgaaaccttagtgatagagtagtgcccacacacagcaagtggtacctcaatcatagattggaagactgtgaaggatcacacacaaagagaaggacattcgggctcagatcttgataatactctgcgacagaaaggatacaagggttagagatctgagtggaaggagacattattccgctgcaaccaatgtaaggttttcttaactttatatgtgtttaattatcgttttagaaagttcatatttagggtgttaaacaacatacttgtgagtagatctaagatcctggtaaaataaattccaacacttgtatcatatattattatcttaccgtaatatctattcaatgcaatatcacctagttgatcttagatcaaatgatctcaatcctgagatggttaggttctagttcaatcgtattatttgtgttcttcaatctgttcatt

SEQ ID NO: 358147 - DNA, 765 bp, Cannabis indica
atttatcaattttgaggcctagtccaattttccaatgagagatcgatatgacaagacatataatagtcccatcttataactatgtggtagaaattttaggattgcttaaagctttaaaaaaaatatcttagagcagtgccactatgtgaaaacaaggattatgcaatctgctcgttttcttagctttctcaatgatctatcaacgacaacgatcatgtcatgctagagtcgtttaaacaaaatatatgactcttacgcaagtaaggacaactacttcaaatgtcataaccaaattcagttaatccactatcgatagggtagaaaaaattgtttggttcatgacttttaatgtgtttccttcatcgtaaaatcatcgataggatgactaaattgcatgtatggatcttagtaataattatgattgatacgagagaaaagtattaacatgaatcataattttcgataattgacatgtgaaaacttacgacaggtaagcttaacatattccatgaataattttaaatctcataactatctaataccaaatgcgcattttgaatttctagcaattttattaccgaaaatatcaattaaatattgacaataatttgtatggtaaatgcgcaaatcatgatcaatgttttattacacattttccatagtatatgccccaaaagaatttcattgtaataacaataaaattcataaaaataaaaatcttaaaatcacaaaaggcatatacataacaaaactatggaaagataa

SEQ ID NO: 358148 - DNA, 1032 bp, Cannabis indica
agatcatcgcgaggcagaatcaagcactgctcgcgtaaagtaggttattaactacttagcctcagagaaaaatacgagcaatggaaaccccaaataaactttatgcatttgattgtttaaattgtgaatgaaacaaaagcaaacatccacatgttgaagtttaaacttaaaagtatgaggcaataaatagcaaagttggccatccaacttcgcaaatttgtcttacaaaaagtgccaccggggcaaaccattgtctcggccaaaaggccatttttttaaaatatatatatatatataataaaagggagaaataaaaaccaagtttacatggtgggagacttggatggatcttttttttcttcctctacctcgacctcttcctccttcgcccaggacttctcgcagaaagccaaagattcctcttccttctcctctaagaagcttgtgtccatattggtattcgccatccagacttgatatacagtacgaaggccaaccttgttgcatcattctgtggtctcgacctccttctcagcaagcttcttttaaaattcatcaacttgggccttgatggtctcctcggcttcttcctttgccttctcggcttcttatttgaggcggatgatttcctgctgggcgtcgtcccgttgcttaatcacaaccctgcattgggatagtaatttttggccctcgccctccagatatttaagttgctccgaaagtcgtcaattagaagcaaaagaaatgaaagaagcctggagaattacgaataaaagaatatgagaaaagagagaagaaaaaataataataacaataaggccaacttaccatgaatttgtagtctaagctctttgaaagcatctcttctggactcccaagattgattaaatcccaatcagggggaaggagagtcttaagtttgtgccagcaagcaatctcgtatgcctgggcgaattcagatccagcctctcccactgtagctgacaaggtctcaatggccttgctcaaggaggcagaagcatgggctttctc

SEQ ID NO: 358149 - DNA, 656 bp, Cannabis indica
taatggcggtaatatggcggcaacaacggtaataacggaggtgccgttgaagatcaggcaaacggtcgtagtctgagagactacattctccaaccattgatgggggttcagtgttgtataagaccacctaccgtagaggccagtaacttcgagataaagccagacatactccaaatggtgcagtcttcagtccagtttggtggactcccctctgaagaccccaatttgtacttttccaatttcatggagttgtgtcaaactttcaaggtaaacggagtcagtgatgatgccatccgtttgagactatccccattctcgctgagggagtgagccaaaagtttgttgatctccttgccaccaaactccattgcaacatggactgatttggcaacaaagttcttgtccaagttttttcctccagcaaagtctgccaagctacgaggagaaattaataatttctgtcagttggacaatgaatctctccttgaggcttgggagaggttcaaggatctcatcagaaaatgttcacatcatgggattgaaaagtggatgttggttcataatttctacaatgggctgattggtaacaccagaacaattatagatgccacagctggtggggtatttatgaaaaaaaagtgcaaacgaggcttatg

SEQ ID NO: 358150 - DNA, 714 bp, Cannabis indica
attttattagaacctcacgcccaacgatagacaagaaacgaccctcccagctttgaatgcgcttctgcattttatctttcaaaaaccccaagatagcatccttatttcgtcccattgcacaagggaggccaagataagtactatgttcatcagcaagtctcattcgaaggatcccacacaatcgttctcgagtagcattaggcacattagtactgaagaagatagaggacttaccgaaattaacttgttgttcagaagcgagctcaaacagctgaagcagatgtaaaatatgcgaagcctctctatcattcgcacgacaataaacataactgtcgtctgcaaaaagcatatgagatataaccggggcaccagtagcaaccttgcaccctttaagtcgaccatcccgttcgaacttccgtatcaaagatgagaagcctttagcaaaaataagaaataaataaggtgatagagcatcaccttgtctaatacccctcttaggaacaatcggacctagctcatgaccaccatgaattattttatacctcacagagctaaccgtagcaataacaagatcaatgaaccgcaagtcaaagcccattttgctcatcatagctcaaagaaagccccactccacacgatcataagctttactaacatccaatttgagcgccatatagccttctttgccttttacgctttcttttgagatagtgc

SEQ ID NO: 358151 - DNA, 921 bp, Cannabis indica
taaacttttatctaaaacagaatgaaaataaaacttgtaataactttaaactttacaaacaaaagagacataatttgggatcccaaaaatattttacaaaatattacaagtccttttcactagccgacctaagcggcaaatcagagttacaaaagtacatcactggtagatcccaactcgcttggtctagtgtggcccgaacatgtacaagaatcgccaagctcccgcactcatggttgatcacaaaccgatttaccctttcctgcacagtagagcacccgtgagccaagcccagcaagacaataaatactattagcaattataataaacatattacatatataataatgccattcatatttgtctatttaacatagacccgtcacgctcacacgcccaattatgtctacatgacgtagacccacgtgttacgctcacacgtctagatacaataaggccttagtagggtttatctcgattatagttaccgagtccaacctgattatgccttgaacgcgcaacccttaatctctctatatataacacataattaatggcaccaccgcactatttgtctatttgatataaacttgcgtgttacgctcacacgcctatatatgtctatgtggcatagacccacgtgttacactcacacgtctatttatgtctatgtaacatagacttacgtgttacgctcacacgtctatttataataaggccttagtagagtttatctcagttatagttaccgacatgtaacatacatcaccgctttcttaccttcataatattctcgggtaataaccctagaccgcatttaattaaactcaaggtgctagtttaccgagtttagcttaattatgccttaggcgcataattcttcattctaacatattatgcatggcataacattcaaaatca

SEQ ID NO: 358152 - DNA, 534 bp, Cannabis indica
atatttaaatccataaatatgtaaaataataaaaatactctcagctaaataaaattacaaaaataccctttcggagttagcagatattaaaaaatacatgatcggacacatttttgcaagtttcctttttctggtatggtttgctgcaacagaacctgtctcttatgctacaaaacatgattttcttttaggaaagtttgtacaacagtagaatcgattttgcgactgtctctagggttttcatgttttataaatagaacctagagagcagccattcgattcaactcttctagctttcattttttgcatattctcatttgtgaagagagagttctttttgtgaaaccctatttgttcatctaggttttagtgtttatatatctgttcttatactggtcttagggttggttagaacatcttgattgaagagaaaggtcttcgggagaagacttgtgcaagccttactttgggacgaagtaagcactcacacctcaaagacgaagggagttcactgtttgaaggtggttctgaaat

SEQ ID NO: 358153 - DNA, 716 bp, Cannabis indica
aaaatatttccaacagtgtcaccttcggccactgctacgtattttgggaaaaatctgaggcaacagaaggtaattgtgattatatgctttaaaagataatgtcccatgattcatcagtgtaagggatttacactaatgtgatagtcagcgataaagcttacttacaccttggataagtgttatattttttccgaaatattggcaaagtatgctagtatcggatgtatggagtatacattggactgggaccgatattcatcttggtaaagatattataatcttaccgttgtatctttctaagtcgatatcactgattaatcttaaatcaaaagatcttaatcctgacatggtgaggttcgatctcaagagtgatatttgtgttctttaagttgttagtcaaagcctaccatttggttcaggtcacacgtacagcttgggaacatgatagtacaatcaagtggtagcgctagtcatagatatggaatttatagcttctatctagacatagaagtaaaatgatgattttcttcgagcttggcttaatagagataaatggaagagctcttacttcagtgattatattagtttacttaaatatcatttataggaagctaagtgttttaaggataaaatacattaaggggtaaaatggtaaatttgtccctactaggtgtaaatcatctatagaggatctttgattattgggattagaacga

SEQ ID NO: 358154 - DNA, 733 bp, Cannabis indica
actgaaaattacattctttaataggaattaggaatgattgttgagggtggcgaataacctttaactagtttcttatatcgtattctttactttaaatttgttttttctttaatttttattttattctaatcttcaaaaccctctttttcctaattcttactaatttgtgaataattgaataaacatagtcctcgtgggatggacccttacttacgattatactaaaataattggaagtattggaattaaaaaaatagtaaatttgttgtggcttacgacacgcatcaataggggatagatattggtaacccgagccaaactacaaacattcctgctgtatttgcgcccatcagagaactaatcgtaaatcgacagtggactaagtttgtggatgtcactgagcgcagcaaccaaaccttagatttataattcctagctaactggccagaaagagaggatgacaaggtcaatgttagggggttagagtgcatgtttccacaaccgccattcatgttgtttatgacctaccaacctttactgtagaagagcaaccattgagatagcaacttcgagacaggagcttgaattatgaggacgtagctgaaaccctacgttaatcaggccttaggttccatgaatttgatggagaaccgtatcagctgtatcggtgtgaactcaacccggtagccaaggcatggttatactttgttagtgcaaggttggtaccaaacaa

SEQ ID NO: 358155 - DNA, 931 bp, Cannabis indica
caagaaatgaaaaatttggtgtgtacggtgcaaaccgggtaactggtttggcaggatccccaaatgcttcgttttctcaattctcgtccattccgtgccgtggttgggtgtttccctatttccagagttaaagtaacctctaaaaagtatagcagaaccaatggttgtagatttgggtttccttggattagagttttgatcttgtaacttacccggtttcataatgtgattagggcatccatctagcgcgagacttttcgttcaggtcagccagtacacttgaattcagaaagaaggtaagaactgtgtataatgtgtaatataaacatttgagtgtatgtatatgttatgtgtatatgcatgcttaaagtattaattgcactaccaacacttgtacatttaaggtatagagtgcattggtatagtgaatgttatttgagattacattatagtgataccagcacaagtacgggtaaatactgagtgtgtgtggtatatcactcagtggtactcagggtatgaaacaaaccctaccaacacccgtgcagtgaggtatgtagtgtatgttgtatagtggctataccctcgtatggaacattcttactcatctattgagtcttgtaaataggtgttatatgcttttcttatatgatatgttatatgcttttcttattgagtctgtcgactcacagttttgcttccatgtgttggtaaaggaagacgaaagctgaacatgagtgaatctgagctggatcaggttgtacatgtgaaagcagcgcgacctggagtgttcggtctggggacatctggggttgtattttgtagtcgctgtgtaacctggatattatgtattttaaagtattatatttaaaaagtttaaaaacgggatccggaacttgtaaataatttataaattataaagtttaataat

SEQ ID NO: 358156 - DNA, 542 bp, Cannabis indica
atctttctgctgtgaaaagaatcattcgctatgtaaatagcactattgattttgggatttggttttctaaagacactaactctaaccttgtttgctttagtgatgctgattgggcaggtaatgcagatgatagaaaaagtactagtggtggatgtttctatcttggaaacaatcttgtttcatggcacaacaagaagcaaaactcaatctctctgaccactgcataggtttggtatatttttgcgggtagttgttgtacccaattgttatggatgaaacaaatggtggcagattatgggtttgatttgaaaacaataactattttctgtgataatactagtgttataaacatttcaaaaaatcctactcaacactctcgcacaaagcacatagacatctgtcttcactttattaaaaagcttgtggaaaataaaagtcttgtcttggaatatgttgaaactagcaagcaaatagcagattttttactaaagctcttgactcggtccgttttatatctccaaggaaatccttaggagtttgta

SEQ ID NO: 358157 - DNA, 508 bp, Cannabis indica
aagataaataaaacttattgtcattggctcttggaaccaatggctctaaggttgagcaatggactaaacccggatctaatacaatcaagattaatgttaatgccgctctctttgaaggagaaggctcctacggcttttggcattgttgcccgagactcctcaggcctcttattggatgctattgcagtatgtaacagaggctcattcgctgctgaaattttcgaagcaataggtgttaaggaagcccttagttggatcaaaactaagggttgggataaagtggagattgaaactgacagtatgctcaccgtctaggccattcgtacctctcatcgtatgtcctccatttttaggttggttgtgaacgattgtaaacttttactttctcatgttccacatgtttccttgaattttattaaacaatcagctaatcgagttgcccactatgtggctaggcactgtcgatttttttctggttgtagcattcatgttcagaatttaccacctg

SEQ ID NO: 358158 - DNA, 604 bp, Cannabis indica
acacgttcaaaaaacttcaaacgtattttcggcattgtaaattattcaaaatttttcaaaaatttacagagataatattgtaagcataacgaataccccgtaaaaaaaaattgaaaaccaacatgtgtttttgcacgtggagattgactaaaaaaatgtaatagatagttgacggtagcactcctcattcaaatatatgttttcagagacataattttgtcccgtgatgtagttgttatattattttatataatataatatttagattaaataattaagttataaataattaagtgtgacaaagtattaattttgtcaaattgtaacatacattatggagttacaaaatgtgtagaatgatcacaaaataggagttgcaaatcctttaaatttgatgatcacttgaatatgtaactctcatctctttttcactcttaaattagtaaaagatgttactaattgtttatgaatgtgaatgaatgatagctattaaaatatagttgttggagacttgatttattcatttataaggtgtataaatggttcaaaatcaagtggaagtgatttggaacactttggagaagaattggctaaagctgaaaaa

SEQ ID NO: 358159 - DNA, 507 bp, Cannabis indica
cacaaagtaagatgggtcttggagctgttattcatgactggcaaggtaatgtggttgctggattttctgcacctgtggctggaaatttgcagccactaatggctaaggctttgtccctgcgggccagcttagagtggtgcaccaacattcatatcccgttagcagtggttgaaacagactcaaaattgctggttgacaaggtccataacaagaaagctgatttttcagcactctcaaatgttgtcgaagatataagatgttctttatctgccttccctgatgttcacctccggcacgtaaacagatctaataattgcagagcgcacaacctggcgcaaagggcattggggcaagatgaagaatactgttggaatgctttagttccagctttgtattagcttctactggagctctctcaaaaaaaaaaatgtattgtactatatgtgtgcaagcgtagtccattataaattcagttacaatattactggtcgaagctagcatatcgac

SEQ ID NO: 358160 - DNA, 608 bp, Cannabis indica
gaccaggacccagacccagacctagaactaaacacagacttagcctcagacccactttgagactagaactcgggccgggacacagtcgtgtacccagaacggaactaagacccggaccttgacctaaatctgctacccaatcccaaacatagacttggacctagatagggatctggatacgaacctgtactcggacgaagacccagactgggatcgaaatgttggacctagatctggaccgagatcttgacctaaaccaaaacttggacccgcactcaggacctgaacttggacctggagccgaacttagacccagatcggcgtccagacctggacacaaacccggacaaaaattcggacccaaactcaaaaccatacctagatttagacccaaagctagacccgaacctggacgcgcacccaaattcgaacccagaccaggatcaaaagaaaggacatagacccaaaacttaatccagacgaagatcggtattggaacttggtactcggacccaacctagaccaaaacccaggacgcgaacccacatccggcgcctgatctggacctagcctaaaatccggacccgaacccaaactcagaccaggac

SEQ ID NO: 358161 - DNA, 604 bp, Cannabis indica
aaattaaacaatgtggtcatatatgaccaattttaataactatgcatttaggaaaataattttagggtattttaagtatgaaaattcaaatttcccaataaaaaaataacaatactaaaaatgatagaatgccatatcacataccccaacaatacaattatatagattatatataatatatgtaaatcgattgatcaggttttgtttatttatttgaaagaacgaaaaagatagatatacaatttcattgctcttaagagtaattatagttataaaattgttatgaaacattattaatatttttttgaggatgccaccctaaattacatgggtgatatcttctttttttttaaggtatttatcactatttttattatgaatatatgataatgttttgtgtttaaataaataaaaattaaatatatttatttttttataaggaatgccaatagttttaaaatgctataaattaatgtgcatataaataaataattttttactattacatatttaatgcattcatatgcttttatttgatttttattggaaaaatgtgttaagctcataaaaaatagaaaaaatagaataaaaaatgtaaaggatg

SEQ ID NO: 358162 - DNA, 2425 bp, Cannabis indica
aattttctagaattatagagagtaatagtcataaaatgtttaggctataataaattgacaatttgctagaacattctagcataataatgtaccatcctttgagtagtataaataggggaataggtcctttggtggtgtgtggtgagttgagcgataacttgagtgttcaagtaaagtgtgtcctagtgtgttcaactaagttccaataaaactctaaaagagtgtctcatcaaatagtgtgcaagtaaacatttaagtgtgagtgtctagtaaataaatgagtgagtgcttggtgtgttgtgatcaagataaagtgttcaagtcttggtgtaattgcttatataataataaagtaattacattttcacgtgttgtggtgtccaagaaacatgtcgaagcatgctacatgtgaagaatgttccaggaagattttgggctgaaggtatgaagacagccgctcacgtaattaataggcttccccaagctaagttagggttcgtttcaccctttgaaaaactgtggggttgtaaatctgtagtaagtcactttcgagtatttagttttgtgtgctacgtattcgtgccaagccacttacgtagcaaatttgacaagaaggcgatacgatgtatctttgtgggatacgacagccaacggaaagggtggagatgttgcgaccctacaactggaaagtgttatacatcaatgaatgtggtcttcgatgaggcatcatcatggtggtcatcgcaaaaggaagcattaccagattctaaagaaatggaagacgaattgcagaagaaaatgggggagcaaattgttgagttacctctaactcaagatacaaataaagaagcaaacaccgaggacaagacaccttagaatccatggaaagcaggggtgcatcaaagaaaagaacatgatgatagccaatcagaactttggagatcaacaagagcgtaagagccaaatccaaaatatgctaatgctgcggtagctgaagaagaaaagtttagagaaccagagtcatatgaagaggcataccaaaactgcaagtggctagaagctatgaaagaagaaataagtgcgctagcaaagaatcagacttgggagttggtaccaaagtcgaaagaagtgaaacccatttcgtgcaaatgggtctacaaggtaaaatcctgtcctgacggctcaattgaaagatacaaggctcggttagttgctctaggattctctcaacaatatgggctagataatgacgagacatttagcccagtcgctaagattacaacaatacgggttctattagcacttgcagctagtaaagactggaggctatggaaaatggatgtaaagaatgcctttctacttggagaactggatcaagagatatacatgttacaaccaagagggtttgaggatagagcacatcccgactatgtttgcaaactaaaaaaggcactggtttaaagcaagctccacgagcatggtatggaaagattgccgagttcttagtagaaagcaaatattccatggcacatgtagattcaagcttattcgtcaaagtaagggaagcaaagattgcgattgttctggtatatgtcgatgatctcattatcactagagatgatgatgcagaaatttttcaaacaaaggagaacctatcagtacgctttcaaataaaggagcttggagaattgaaacacttccttggattaaaaggtttatttctctgtcaacaaaattatgctaaagatttgctgcaaagatttggaatgctcgagtgcaagcccatctcaacacctatggaagctaatgctaagctatgtgctcatgctgggaaggacttgcaagatggagcaatgtatcgacaactggtgggaagtctaatctaccttacattgactcgaccagatatttcttatgcagttggagtagtaagtcgatatatgcagcaaccaaagaagccacatttggaagtagtacgacgaatactgaggtatgtcaaagataccattaactatggtctcttctataagaaaggagatgaggttaagatcattggctactgtgatgctgattatgctggagatcatgatacatgacgatcaactactgggtatgtattcaagattggatctggggtagtgtcttggtgtagcaaaaggcaaccaacagtgtctttgtcaaccacagaagcagagtatagagcagcaacaatggcagctcaagagagtacgtggttgatgcaactaatgaaggatctacaccaatttacagattctgcagtgccactttattgtgacaatcaatctgctattcgtctagcagagaatccagtatttcatgctcgaacaaagcatgtggaggtgcattaccattttctcagagagaaagtacttcaagaagaattagagatgcaccaagtgaagag

SEQ ID NO: 358163 - DNA, 1233 bp, Cannabis indica
gagaatcgggctcagatcttggtgatactctgctacagaaaggatacgagggttagagatctgagcggaaggtgtcatttaattccgctgcaaccactgtaaggtttctaaaactttatatgtgtttatttacattgtttaaaaaattcatatttaggatgttaaataacatacatgttagtaaatctagatcctagtaaaatataatccaacactttcccacttaggtccaaacacccttggtgctaagtctttagtgctcaagaacactctttgcagcaccaggtctcctatgaaaaacttcctacccttgacttgtttattgaagagccttgctacattttgctggtgggcttgaagctttaggttgacttgtattcttctttcttctacttcatcaacggactctgccagcagggtgttgtttagttgctggtcataggttgttctcttgtgagacggtgacactagctcaaaagaaaataccacctcgtagccataagctagagcagatggagtttcccaagtggtcgtcttcttggtagtcctatacgacaataggacctccgggtgcaatttaggccagttgactttagcttcctcaaggtatttcttcagggtgtccttgagggtttttttgatagcttctacctacccatttgcttgaggatgggccacagcatagaagctctctatgatgacatgcctattgcagaaatcagtgaacatgtcactatcaaactgcgtgccgtcgtctaacacaatcttctggggaagtccaaattggcaatgatgttcttgacaacaatgtcaaggaccttcttagaggtgattgttgttaggggttccaattctatccattttgtgaagtagtctactgtgatgacaacaaataatacccctccttttctctttagaagatgaccaattagttctatcccccacactgcgaagggccaaggacattgcatcatcatgagcttttttggcagagctcttgggattttccaaaatatgtagcacttgtcacattttctgacatagtccattgagtctttgatcgttgttggccaaaagtacccttgtcaaagtatcttttggataggctttgcccccagcatggttgttgcaaaagccttaatgcacttctatcattagcaattcaatttgggctttggtgacacacctcaagagaggcatggaaaagtgttggaatatattttaccaggacct

SEQ ID NO: 358164 - DNA, 610 bp, Cannabis indica
tgagaacgtgtaggcaaacaacccgaaagagctttccaaacaaaatgtaaaactttaggaggggctttaatcttccacagcatcttccaaacatcgtcctccatggatgagttccaattaccattgaccgactgtaagtgagtataggcgcttttgacagtgaaaaaactagttggatccttgttccaaaaccaactatcactcccaagatttaacactcaaaggcgtctgtttgatgagctccacatcacgggacccaaacaagtcctcaataagctctacattattaaaataataatttttgaacatgtatacaatatacaaaaataaaatattatctatatattattaaaataagtttagagaatgcattatttttacatgtacaataagttgtattagtttaaatacatctctattatatatatgtgtgtctaatttaaaggagctaatgaaggccttttttatcacatttaattaaaaattttaagaaaatctctattataaagagactattaagagcactcacaacatctctaaaatagagaagtgttaaaaaatttaaaggactctactaaataggggtgtgcagaaagttatccaatccaat

SEQ ID NO: 358165 - DNA, 714 bp, Cannabis indica
agagcaagaggttgctcttgtgcgcaagcgtaaaggcaagatggtagctgaggagtcttctaaacgcccgcggagggtggacactccggccccgagtcatgactccgggatccccccgaggcggaggagtatacagtgcctcatggcattgtgctgactccagtccccggagatgaggagaggcaggagcttcggatagccaaatataattatgcccttgacgagtacacccgagggcacgctgaggtggaggccttgaggagggttttacgagaggagttgcaaaactctcttaacgaggagaacttccagaatccgtgggatctgaacatggaccccctgacggactggttcaccgtttcctcgggcccaccttggccccttttgcctccgagatgaccagtgagtacgtctcccatctgactcgattcccgcctaaacggtacgctgcttgtgcatccttgaactccgtctaccaggttcaggacatcagccatgccctggctgcggtaagtactttgtgatttatttctttcctcaatattttacttaaggctttcattctcactcttacttccctttccagattactgcggagaccagccgcctttccaagaccatagttaatcatggcttcgtcttgtccgaatttgggggcatagacgaggtcgtgaagatcctgcaggacctgtctgctgaaaggcgggcgttcca

SEQ ID NO: 358166 - DNA, 671 bp, Cannabis indica
tccttcttcttcttcttcctctaatttttttgaagccatggtgaattgagagtgtacctactcatgtcaaagcaatacctagcatagtgaagaagactatgtcaaaccatattgaaggagagaagatttaggttcatatcttgataatgctctgctacaaacaagaatcataggctacatatttgaatggaagaagtcattatatttcgctgtcatcaatgtaagaatttcttaatctcttatgtatttattttattatttttaaaaattcatatttaggatattagattatagacttataatcaacatacatgttagttgttatacccgaaattcggctaccatctcaatagaaggcacgtgtcaagataaaaggaatatggatcgatgcaatcgtcttttatagaataactcattaattacgtaagtattagagtatatttgtaacctggtgactgaaaggtcttaggcgaggaatcaatatacaaactggtgctcagtatattagcgagaaaccatatgtcactaaatgccatcaaggatatcgacacatatcaactgcgaaagcccttagtgtataatctacaaactaagtgtaacgatcggatcggctcgaacccaaataagcgaggtgaccgtctcgctatgggaagacttcctataacttcatc

SEQ ID NO: 358167 - DNA, 887 bp, Cannabis indica
atacaagtttccggacagatatgggtctctactgctacaaagtcatgccgtttggtcttaaaaacgccagtaaaaatctaagccctccttgatatgaactcgccaacaaaaacaaaagaggtacaaagcctaactggtcgaatcgccgcacttagcagattcgtgtcaaaatcaacagataaatgtgtcccattcttcaacatcctgcgaggaaacaaaaagtttgaatggacagaagaatgtgaaagagcttttcaagatctaaaggcacagctctctaaacctcccgtcctctctaaacatctagacggtgaggaacaggggatatacctggcagtaacagagcatgccataaagctgtactaatcagagaagaagatggcgtgcaacattcagtctattacatcagcaaaagactcatcgaggccgaaggccgatattcgttgatagaaaagctcgcctactgcctcatcttagcaacaagacagctaagaccttattttcaagctcatcctgttcgggtgtacatcgaccaaccactagggcaaatcctgcaaaagccagatgcctctgggcgattactcaagtggacggtggaattgggacagtacgaaatcaacttccaaccccgaacagctatcaaaggcaaagccttggcagactttgtggtggaatgcacaggaaaacctgaaagcatccttgaaggcgatcccgagccaacaccactgccgaacagcactgaaaacaagccgacttggaagcctcacctggatggatcggccacagatcagctatccggtgcaggaattgcccttgtcacacctaggggcaacacctgcatgcagcggtcaaattcggattcaaagcctccaacaatgaggccgaat

SEQ ID NO: 358168 - DNA, 528 bp, Cannabis indica
caaaaaagactaacccttgtgagagccttcaagactccgcccagcaacacatccagagatgagtcgtcagcaccagccagttgctcaccgacctcaggaaccagccagttcatgtagtgagccatcacctcctttcccttcttcgcctcaggcagcacaagcacaggtggagttgatacttgcacccgctcaggaatcgtccagaccagttcggaccaagatgttggtggcccaaactccttagacttggcagatttgggagtggaaggatttgtagtagtcagctcctcagaaaggtcagtaacctctctagaaggcctcttctctgaagaccgctctctgcccttagacttcttggccggagggaggcgctagagcttccactcatcctcttccttaaagcgtcgatcatctgccgagacatatttgcacagaataaaaacagcgtggttagcacaaaccagcagaaaatacaaagcatgaacgtcaagaagctgaaaaagagtaaagcgcagagtgactgcccgc

SEQ ID NO: 358169 - DNA, 956 bp, Cannabis indica
tgcctcaaatatgtccgtggtatttctagttgatgttccaatgtaaattttgacccatttgcactaagacggtcctaaaaactgaaaccttagttgcaaatgtcaacttgggcgctgggtgaaacccgaggtggctaggttggcttttggggtgtgggtttgtgtaatttcaccttctaagggcttgatttggttgctccatgtcttcctggtatagaatactgaaagatagagagcaagaaacgagctatcaaaatccaaacttccattctagagttcatgaagtcatcctaggcgcggggctagggacccctcccaggtcgactttctatgactcgggactactcaactctgagatgtcatctttcttgccacgtgttaagcattaatgtccacatcatcacagctactttcggtgtaagcatttgccccccaagtcaactttacactcgtgtgaggttgacttaatgacgtgaactaagcccatttctcttgaaactaccaggtggtcataaattttaacaatcttggacaattttttttggtcttcaagcattcccactgagagtaggatttcaaattctcaccccttgttgaatagtggaattcaaaatttaagtataaaaagagaagaggaaagatgatcatcttttcgtatcatttatcttttccatttaaatttaaaatttagatgactccttgagtaatttcctttgatttgatatgctgtaaaatcatattgatgttggaatgttaacatttactctgatctttggtcgttgtcttagcattgactctcttgtcacactaagtgtttatgtgaatattgatgtagtcttggcttctcttaggttgtagcctcaaagttctttatcattccctcagctgtgtttcagcgaaggtggtcttgttcatctcctcgatttgatagtagaggatgttggaaattattttac

SEQ ID NO: 358170 - DNA, 513 bp, Cannabis indica
ttttcccaacagtttataactatcttttgtactattttctaacggttcctaaaaccgttggctatgtgggtgtcataaaaatacagaatttaaatgacagtttataactgttggaaaaaaaatcactttaaatgacagtttataactgttggagaaaaccactttaaatgacaatttataattgttggcaaaaatattatgaaaattaaattactttttaatatatattttaaatattaaatatatataataatatttatttttattaaaaaataatattattaaaataaaaaataatatattttaataattcacaatgtatacaatattattctgaacaaaaaatacaattgaaaataaataataaacatgaatattacaacttaatctttaaacaaatatgcaataataataatatctgaacaaaaaatatgtaataataatattacagattttgttgttcataaaaaaaatatattacaacttaatctctaaacaaaaaatgtctccaac

SEQ ID NO: 358171 - DNA, 614 bp, Cannabis indica
gttcgggtttaggtctctgtttgggttttgatctgggttcgggtttaggtttaggtccttgtcctggccctagtcctagttcggttctagttacatttgcgattctgtgttcaagtttgggttttagttcgggtcggaatttgagtcctggtctgaatttttgttctggtccagatttcagtataggtctagatcaggctccgggagtgggttcgcatcctgggtcttggtctaggttgggtccgagtcccaagttccaatcctgatctgagtttggattcagttatgggtctaagttcttggttctgatccaggtctgggttctagtttgggtccaggtccgggtctagctttgggtctgattctaggtgtggatgtttgagttccggtccgagtttgtgtacgggtttgtgtccacgtcgggaccccgatttgggtctagcttcgcgtctaggtccaactttgggtcccgagtgcgggtccaagtttgggtctgggtcagtatctaggtcaagatctaggtccagcatttcgatcccagtgtgggtcttggtctgagtccaagttcgaatcaggatccatatctaggtccaagtctgtgtttgggatcgggt

SEQ ID NO: 358172 - DNA, 508 bp, Cannabis indica
tatttatttatttgaccagctgaaagtatttttgtgatatcattacttttttttgttaaaattgaaaaaaacccttaaaaaaattaaataatttggatcaatgagtgactgatatttgaaattgattttacacggccagatacctacagaagttataaaaatataacagaatataattgaaaaataaatttaagtatttacgacacaaattattttttaaaaaattttgcttaaatttattcaaatttattttaatctattgaatagatacacaacacgaccactaccacccacgccacctccaggtaggggtgtacgtcggtcggtttagtcgggttatagcatatttttatcaacccaatataaatatcgggttgcaaatatttaaccataacccgcccaatcaaaaattagagaaagttcaacccgcccaatgatttcgtcggtttggtcgggttaacccgtccaaaccgttcttcactttttttttataattattattgttagt

SEQ ID NO: 358173 - DNA, 642 bp, Cannabis indica
atcatcaatacaaacagtatttttaaacaaaataaacagaaggactaaatgtatgcatataaaattatacaaggactatttataacaagctgaatagattaaggggcataatagtatagtgtcataagtacagggggtaaaaaagataattattcaaaaatatatttaattttgtaattaactcattaattgtaaaaaagtaagattcgagttcgacccgtataaaaaaaatagactaactcatttataaaaaagggacctatccaaataaaatacggtacgaatacaagtacgacacacctatttacaatgagaaattttatttatacctcaaaaatttttaaagacatctcattttaataatttttattttaaaaaaaatttatatctttaattgtactaaattttttcaacttttttcttccaattcatattcttaaaaaatatgcctatcaaacaaaattaaattatattttaaatattatgacaaaaaaattaaaataaaaaaatataatgaaattttcttagaaaaaaaaaaatatatatatatacatgagttagaaagaattatgaaaatgaaatcaaaataagtattgaaattaacataaaataatgtgaggaaaaaattaaaaaaatatatta

SEQ ID NO: 358174 - DNA, 940 bp, Cannabis indica
ataatactatacaatacaatactgtctagtacagcgtaccaaatgaacccattatttattaatcaatatactaattattatacaaaacataagttaaaaaattataaaaataatagtaaaaataaaaatacaagcacatattataaaatataaaattttaataaaaaagatagcttatatacaaacacttagagtaatgtaaatgtgtatttattaaacttttaatttaattttattatattaataataaaataatatatatgtataaaataaagatttttaataaaaaataaaaaaataatagttaaaacacaaaatttgaagttagaaaaaaaaatcatagagaaagcctctatagagtaagttatttcataataaccgactccacaagatcactatagagtcgatataaggactctatatggaggcggttttttcataataaccgatttcatagggtccctatagcgtaagttatttttaaccaatatagttgaaagtacaacttgttgattttaatgatccagattaccaagttgattatctttaggttgattaattgatttcaacatatgaatttcagacttgaattgagaataaagaagtaaaacacacaaagatttacaagcttcatctgcactgagaacacatcttagccgactagtgcttgggttccccgaaccagggtaatctcatctactaattctcaagagtttcatattacaatttccaattctctctaaaggaatctaatacaaactttacagcaattagtaatgaattaccaacagcaatcaagaatcctgattgctagtgcacaatcccttgtgcagcaactgagttcttcttcgacacttcttcaacctgaaatcccttcagatctgatgacaaagttgacactgaactcccttcagttagaactcagcaacttcaggctctg

SEQ ID NO: 358175 - DNA, 714 bp, Cannabis indica
gaagctaaaaacctctcttttcgctctgaacttacttagcaaggaaggttggcaaaaataagtttgtggataaatgctcattggtatttataggcaaacaatgaaatggggtaattatttcaaaagaacctcagacgcctcggttcccccctaaaagcgaatatgggaaatcaaaagtaatcaagtgtagctgtcaaccgtggtgagagaaaatcagatttcgaaatacaaattgtcagagcatttattagctgaaaactgaagggacgcctagtgatcctcacatcgagtcgcgaacaagcgcacctgacacgtgtcacccattctaacgcaaagacaactcagaggaagtctacacgcaacttcggaagtcccgtacagacttgggggcaaatgttaccccaatttttgcactctgacgtggcatcacatgatagtgacacgtcgaatcgactccaagtatctactcgcaagatatagtctaaataggatacctcatatgcatgctcgaggcaaagcaatcagcaatccccgcagaacgaccaacacttagcgaattcagctttcgcatcctgagttatcaaggaaatccctataacttggggatcacattgtagagatatggcaaggtgtccaaatcccacaattagtgtattttgtatttattatgcaatctttctatttatatcccttgtaatgagaagggaaatactt

SEQ ID NO: 358176 - DNA, 524 bp, Cannabis indica
aagtcccaacagtttctaatcaagtgtccaactttgccacaatgatgacacttccttgttccctaggtcttgatttcgatcttgaattagaccttaagtttcctctgaatctagagtttcctcttctaggtactctgcctcgaaccattagtgcatcatcagttcttgattcttgcttagcagctctttgccaattcaactcagcatcccttgatgtgagtgtactcataacatcatctaatgttaatgtatccctactgtacatgataactgttctcatttccttaaacttatcaggcaaagcattgagcaagatcactacttgatcttcttcttttatagtttcacccatattagtaagagccaacacaatcttgttaagttcatcaagattttgatccaaagtaatagtagcattcaatcttggttgcagtagatcgagccatgtacaattgattgagtttactccaaattccaagagttatcttctcaccaatcacctgcctcagtacattgtctgcaag

SEQ ID NO: 358177 - DNA, 831 bp, Cannabis indica
gatgaatacttcccagacaactaacagtcagccgcccaatcaccgattacaagttcaactcatgaaccaagaggtaaacgggcagaccttgtcctggaattcatcaggaggagccaacctgacagatccaaccagaataatggtgttattccacctgtcaaccaagggaatcaatcgctaaggcaaccaggctcttctatgttcgataggttgggaacaacccatgacctaaggaacaatttaaacagaagaaggggaacagacgagcagaatattccaacgatcgtccatccctgagcccatactcaaatccccgttcagaaagacactgacgtaatccaagttgaccaaaataccgagcaagtaagcccagccgtacaggcccagcttgacgagttgaaaaatatgtttcatggcatggccggactgcgtaacaatgatcgttagaccgtgctcgcggaactcccttctcaccagagatcaatctcctcccactgcctcacaagttcaaaatgcctacgtggaagatgtatactgggagagaagatcctctttcccatctcaagtactttgagatgcaaatggattcacaaggaggacgaggggacgtatgctgcagaatcttccccgccactctgtcgaaagccgcacaacaatggtatttcaagttggctcctggaaattttacttcttgggcaaccttttctttaaaattccatgtgcaattctcttcctcacgtaacctcccattgcatctgggagatttggtcgaagtaaagcaacgaccaggcgagcaactccgggcgtacatcagcagattcatgacggaag

SEQ ID NO: 358178 - DNA, 791 bp, Cannabis indica
aaggataatttcaaaataagaattcaacgatgtcccgtttaggggagagtcaaagttattcttattttattaatctcttcattgtttcatattgttaacactaatgtaagttgtcatctttggatgtacagctagatgttgcatttataaatacttatctgttgagatctaacactattatgtctgtcgaacgaattacaatcctttgggattgtgtcccattaaaaacaacaagctaagttagaccaacaacgaagattcgatatttatactacaacattaataacagaaaacaaatatgttcaatataaattcatacacattcagaaattataatacaagtaacatttaagaaagacatgtaaaaatacaaaacaaacacatcttaaataatttctaaggttcctaacaaactgatacagtgtcccgtttaggcgagagtcaaaaataccatgcattgaataaagtagtcaactcatataaaatggatactattctatcaacggtttattcaattgaaaagagaatcttacgttgctacgttttgagtcgagagtcaaggtcattcctatttcatgagcttccaccattgtttcataccttgtaagtcctattcttagcagccactattcagatggacgttactaagaataaaacacttacaataatacttatcttttgagattctacgacgttaaattgctaatgaacgtacatctattggggatgaatctcactaaaaaagaactgtgtagaaccaacaattgtgatcaaatgtccttataactaaa

SEQ ID NO: 358179 - DNA, 546 bp, Cannabis indica
attattaaaaagctctttttacaaaaaaaaaaaaagaactttttaaggggcaattattatactcgaaattcggctggaggacacgtgtcatgataaacagaacgtgaatcggtgtcgtatctttttatggaataaatcattaattgtgtaagtactagagtatatttgcaacccgctgactgtaaagtcttaggcgaggaatcaatgtacgaactggtaattagagtattgaccagaaaccatacgtggctaaaaaagaatagcgaggcaccagagaagaataacacatacctcagctcacaaataggcagactaagtataaaagtcgaaccagctcggagtacaataatacgagacgatcatctcactacaagaaaactacctatagtttcatccaactaatgaaagtgagactcacaaccagagacgaacccactcataataatgtgggggctatagcccccactaacaaaaatattgccttttaaaaaattaaatataaattttttattttgataattatggatcaaaatagtagaaaagccc

SEQ ID NO: 358180 - DNA, 756 bp, Cannabis indica
ctaatggtcgtagcttgagagattatattctccctactctcacaggggctcagtcatgtatcaggccaccggcagtggaggctaacaactttgaaatcaagcctgccatactccaaatggtgcagtcttcagtccagtttggtggactcccttctgaagatcccaatctgcatctatcaaacttcatagagttgtgccagactttcaaagtaaatggggttagtgatgacgccatccgattgagactgtttcctttctcactcagagaaagagccaaaagttggttaatttccttgccacccaactccattgccacatggaatgacttggctacaaaatttctgtccaagttctttcctccagcaaagtcagccaagttgagaggagaaatcaacaacttctgtcagcaagaaaacgaatctctccatgagtcttgggagaggtttaaagatctcatcagaaagtgccctcatcatggtattgagaagtggatgctggttcacaacttctacaacgggctggttggtaacacaagaacacttatagatgctgcagctggtggagcatttatgagaaaaagtgcgaatgaggcttatgagctattggaggagatggccctaaacaatcagcagtggccaactgaaagaagtcaaactaataaggtcgctagtgtgttggaggtcgatgccattacaaagctgacaactcaggttgaggccctaacaaagctgatcgcagggcaagctaaacaagccc

SEQ ID NO: 358181 - DNA, 509 bp, Cannabis indica
cgtaaatcaaaaaaatcggcatatatattatcgatatgatgttgacgttatgtcgatagcttatcgatagtatacgtgtctgacatgcaatttggcggttgggaatagttgttgggaatgtaggaaaaattaattaacattaaatgtgtaactgtacaagtaaaacgcatgcaatgtgtatttatcgagtgaatatcgatacaatgtcgatagcttgtcgatagttgagaagattaattaccattatccacgtgtctgacatgctaagcgcattgagtctatatcgatagtatgtcgatggtgtgtcgatagtttatcgatatgcagtgcaaaccaaattgtcgatgtttttatcgacataatgtcgatggggtatcgataggatgtcgatatttgttatgttttgttattttttcctatactcacatttttttgtttgaaattgtaggatcgactgtgtttcttgttgtaccgtacgatggtgtttggtgtgttgagggttataattg

SEQ ID NO: 358182 - DNA, 759 bp, Cannabis indica
tttttcctcttagcttttttcatttataatttgcttaaatagtatatcattggatgaatagtttatcaatcatctgcttatgatgtcattctactttcttctatgaaattgaatggctcacatgactatattctcgacattctatcccgaaatgatataaatcctcgatcttagaaatctcctacttgtatatgtttactttaggcaacttagacttagagttagaaagtagtggtggtccaagctagaaaattactcaaaaaattttggtataaatttaagtctttgactttattttagatttcaaatagaaattttaaattttagtttcctagaatacattggacaatacagtatgactttcataagctataaatatccattttctgtcaatggatcaaaatttgtattctgtgaccaagatccacttggactactattcaaagaactctttaatgtaactagacctaagtcatcataaagaccacaaccacattcttttatatctctggcaatttatcttgttcatagtcgttttgacaagatcatcctctgcaaagagaaaatatctcaatatccacttgaaagtaagatcatctatattcgaatatggatgtacattccgggatggatatgatttttcgttacattctttagataattattctagattttaccttatgcaaagaaatttgaaaattttgagaaatttcatgaatttctagaaatgttgaaaaacattaaggtaattggttaaag

SEQ ID NO: 358183 - DNA, 781 bp, Cannabis indica
tacagtgaattttgcaacaactgcttgtcttttcgatgattccattcaagcgttgtaccacaagttcaacaaagcccaggcaatgaaaactaagatgtcgctcatacatgctgccacccaatagcgcattacatccgaggtttgcgaattccgtattctaagccttggtatgaagtcgatcatgtcttattcatcatcaatcttaggaaggaaaatcattgggtttttgattgtcttgacttgaatgaggggattttggttctttataattccttgaggactgccaaaatgaattcttccgctaggaatgcaatgaagacttattctgtgttactccctttgctttttgatctccttagattttggaagaataggtcccatgttcctgatttatgttctgaccctaaagctcctctaagggtccgcttggttgatggtaatgggtcagaaaggaattgaatagaatactaatgggcctgattattttgtttggttggaaaataacaattttggaaaagaattccataataatgctattcccccaaactaatagaattgctattccattttttatttggtggaattataatcccattccactactttggcagatatctctcttctactctagccatggcctaagcccaacaaaccctaaccctagcaaactgaagattgaccattgtgaccgtcttcttcgtcttcttcgatcgatcagactgttggaaatattttaccaggatctagatttactaccatgtatgttttattaacatcctaa

SEQ ID NO: 358184 - DNA, 536 bp, Cannabis indica
ttgcagtctgggaagtattcatccctcgatcttcgtctgtctcacccaggggaatgacattcagaggttgctgacctacagtttggtaggctttttgtatcagcacggtagcttgccgactacgattttcaatctttgtatggtgaacccttaacgcctccatctctctatctctccactcgataagcatacgcctttgttcttcaaacgcgagatttaccgcagtgcggagttcttcctgatcatgatgtagggtattgttgtgaccctgaatgagtgcaagagcatcttgaagattttgtaactcagtagcatctccgatggtcgtctgggtgttggttctaggcagaatagttgtgttatgaatgccctggttaggtgcagaactgttattccaagtctcttgtacaccaggcgcgatttcatctataggagttgttacattattccccacgtttgccggctgtccaggattcacagctggcggaacccttgtgttctgggttctgcaatgcaggatccaccgtctgtgaatt

SEQ ID NO: 358185 - DNA, 1291 bp, Cannabis indica
aagaataaggagaatagttccttttcttagagctcttacaatagtatctctgaagatgaattcttagatagatttttcgaccctttgcccagtgagtatgaatcactatttatagggctataagcttgggagggaagtatttcccttcttgttacaattgatataagtggaaatattgcataataaatacaaaatatgctaatcgtgggattcagtcagctagccatatctctgtgatctaaccccaaagttatagggatttcttcagtgactcacgatggaaaagctaaatttgctaagtgttagcatgctgcgcagcttgctcactgcccagctaagagggcctcgtccgagcgaatatataggtgccttgttcgtcatatttcttgggagtaggtacatagaaattattccacgtgtcaccatcgtgcgacgccacgtcagagtgcaaaaattgggataaccaaaatatatttaagttgaaaattaatttgtcatttaattttggaccaacttaaattagaatattttcttagatatcaaattagaattaataattaagttaattttattctagatacttaattatttctattttaatgatttaattaaatagaaaattatatttaagtcgaaaatttattaatttcagatcaacttaattagaataattttcagagtatatttaattttattttgataatcattttcccacttaaatttcgaaatgcattatttttaatgtagatatttttaaattgatcaattttgaaaatcagattaaagttgaaaattaatttattaattaattttacatcaacttaaatcaaaaataaatagaataaaatatattatatttaattagaaaataagtaattagtttatgaattatctagatagatatttctaggtagacttttggtattttctagatatatttaattaaattagaaaattaatatttaagttgattttactcaagatacttaaagatttgatatttttcataagagatttaattaaataggaaaattatatttgtgttgaaaattaaattctttaattttagaccaacataaatatgaataattttttcagttttattttattttattttattttaatggaatttcgaaaactgtacttttttataatacattgaatttcgaattctatcatataaatatatatatttatagaaaattagatttgagttgaaaattaattttaattaattttaaatcaacttaaattaagtaatttttcataatatttattggaaaattaatac

SEQ ID NO: 358186 - DNA, 2064 bp, Cannabis indica
aaaatatctacatttaaaataaagtatttctaaattttatgtggaaaataattattaaaataaaataaaatatattacaaaattattctaatttaagttgatctgaaattgaaaaatttccagcccaaatataattttctatttaatttaattcattaaaatagaaataattaagtatctagaataagatcaacttaattattaattctaatttaatatctaacaaaataatctaatttaagttggtccaaaataaattaaattaattttccacttaaatatattttctaattaattaaatttcttgaaatagaaacaaataattaagtatcttgagtaaaatcaaattaattattaattctaatttaagttttaagaaaaatatcctaatttaagttggtctaaaattaaaatatatctttctacttaagtaaatattagaaaatattaattagttactagaatcactatctagaatcttttctttaaactaagtgtgttttttaaaattaattttataataatccaatgaaaaacgaattctatttattttaaaattaattatgttgttaattcaattttaattaggttaaactagtataattagcataatacaattatttaaataaggtaaatgggccttcacagttgaggttgttcataatatgagggagggctgggttcagtatgtcctacatactactaatggccccctaactctcacacaaggcccaaaggagaggaatttaaccattaattaaataattattattcattgaataagcccaatactaattgggcctaaattaaattatcattggtgatatttatttttgcaacttagtccatttatctatcttgaaataaataggcttcctagatgcatttaagcccaaaagcaaacatatactctcacacatgtcaaattaatttggatgggccctatcatgtttctagatttacacagatgaaagaaatataaaatttacatgttacaaattatttataagatttattgattattggatatgattataattagatcattggatctatcatcgagttaatcatagcaatttagatcaaataaataataggtttgttaacaaaacagttttgaataaacaattaaataaaaacaaacacaatatccatgtaacaaatgtaaaataagatatttatacttatataattaaattattatttgattaaccaactaaattttgaaaatttagggttgtttaaacaacctaaaatatctcttcataatttaaaatccaactaattttaaaatatctaagtttatttgaactattttatgaaattaaattaaatatctaatacaataaacgatttgaaaataaccaaatagacattttcaatatcattttctaatcttataatttaatagaattcaaataacaaaataaattaattttaaaatagatatgattacacaattattattttaagaataaaataataaacaaataataattatccaaattatatatcaaaatatctcaaattaagccttttttaaatttctacacaaatatctagattatttaaataattaaaatactatgtataaatgtctgataagtaaaatgatataaaatattagttttctaacttatcatatataacgaataaaatatttcacaaaataactaatttttgaatttgaaaatattatataaaaatatctaggttaatttaaatttattaattatttaattcatcttataagataattttaatagcatatttcaaattaaaaggataatattatcttttaatttaaaatatagccaatattaaaatatcagatcttataattaaataatgtatatatattcaaaaaattaacaaaattttaaaatttgaccatgaatttaaaaataaaataatcaatttttaaaattcaaacctcaaaatatcagaaattaataataatctattaaaatttaaatattattaatttacaaaattgatatttaagtttaaatatattaaaaataatattttattttgaaattagggtttgaaaattagaaaaat

SEQ ID NO: 358187 - DNA, 536 bp, Cannabis indica
attttaaaaaaatataagatctattttgtacttcaaggtcctatttgtaccatttggaaaatataaggtttattttgtcattttataaaacagatggtccattcactaacttttacaaaacactaagtctaaaatagcatttgttatcccaaatttgtccacctgacgtagctcctctacatggcaaaaagcagaaaatacgttgaagacaggtcatcactaatttgccaggattattgtcgtgcagcctctcaacctttgagactccatgctgcacggtacacacaagaaaaatgagatgtacaaccttgctagcaaggtcctagtcagacctatagctggtcggccaggagtgctagcttccaagcaccgagcaaccttcaacaaagctggcgggccaagtgcacagaaacacaccagcacttgtgtttttttcacaagccttccaactcgctctcatcattcctacgactttaaagcagttcaaactgcccacaaagataggggctctttgtcaacaaataacaaccctattc

SEQ ID NO: 358188 - DNA, 631 bp, Cannabis indica
tggttgttattcatcgatgataaccaagcagctaatcgtcttgccgcattgtcaaaagactgactcttctcttcatcgtttttaccattcactgcgagaagctctgggtcgtaaaacttgaaaaaatttctcaaaccgttgatgctctcccagatgtgcctgccaaaaaaattgttaattattaatgtcttataataatttgactagaatttgatatataaggttagttagattaaagaagagtatacatcattcaaaacagcattccttggttgccgataaagtcacacaatgcaacctgctgcaaatcctcttcaaataacgtgatctgggtacgcagtgctatgaatgctcggggtacaagaattgtgattatatcacatatatttttgagattcaggaattcaacaaccatccattttagcgatttagggatcctttccataaccttttacgagaataattcatcttctcgttgacgacttccttgtggagaaagcatgagagctttccccttcgacccatcacgtcttgaaggaggttgagcgagtggatcctaaacaaaacaaacaaaacataatatgtaaagcccgcttagttaatttggaaattagcagttatttatgttaat

SEQ ID NO: 358189 - DNA, 512 bp, Cannabis indica
gtttcgggtttgctagagtcaatgacaaccgctaaaaatcctacacatccattgtgtagtaaatctctagctcttaggactgaaataatcgggatctgagacccctcaacagatccaacatagaaaaatagatcttcgccctccggctgaaaagttaccattatttgcttacaatcaatgctggtcgaatacttgaacaagaaatccatccatagtatgatatcaaattctgctaattccagctctactaggtcagcactcaactccctatcttcgaccctaactggcatagacctaattcgcctttgggagataatcaattccccgctaggcagtaaggttccaaaccctttttcaataaagtcacaaggcctacccaattgactaattacccgagtttccacatatgaatgtgtagccccaaggtcaaataacacagtaagataggagttgttgacaataagctaacttgtcaccactgaaggactggctacagcatcagcttgagtgat

SEQ ID NO: 358190 - DNA, 680 bp, Cannabis indica
gagagaattttatcaaacctgaatgtggtgagtttgagattctgaaaaacctacgtatttcctaaaccctagtgttgacctaaatacagttcaaccctaaaactactaaaaccaaatgagatggtaacgatacaaataaattaagcagcagtcaaatacaatgtaataagcatgtaaaggaggaaagcaacttactgttttgagttagggtttggggcaatgaatggttgttcggtctgcaatctttgaatgtagcaaggatcgctttgcgaagataaaattggaggaaactcgcataaaaaatgtcaaggacagggatggcatgcaaatcctcggacaaactcgatgctgattcttggcaaagaagcataagaatttctcagactttctaaaatggaggcaataatgcaaaggtggttcttttttcttactttatactattgatattgattttgttggatcaggaaaatatttgatcatacggacaaaattcaaagtagaagtggaaaatatggtcatttaatactgatgtacgaacggcacaactgccaaaatcagaggacatgcgttttttcaaaagggatcatgacagaaataccctttataatcattaaaaatcactttttattaaaaaataactttttaaggggcaattgttacccgaaattcaactagcacat

SEQ ID NO: 358191 - DNA, 643 bp, Cannabis indica
tatgaggctacgtgtttaggtaactgggtaatttcataaaaaaagacctgaaaattggcataactgcacactgtatagaaaatgcttgaataggcactgctttatgtttcgaatactcgcatgtatgcgatacttaatcacttctgattgtcgcctagatctttaggattttgtattctatgaatttggttgtgagaacattgactgagtctttcaaatggtggatgtatcacagtattctaatggtcatatatgcggttatatgttccttgagatactgtgatacacccagccatttgcgacatgcgttaatgttctaataagcgtactctttggctggtagatatcctcgaaacggtgggagtacctcagtaacttcagggtcatgcttgagaacgcatgccccttgagtcactgagtttctcccacccgtttctagaggtatatcgcttagctcaagatgcgtgacttattcgcaggttgcgattttagttggactccttgaaatggtgggtgtctcctcatcacctcagggccatgccgaaagacgcatgtcgctgaggttatcaggacacttctaaccatttttttgggacgtttttttttattcgcatatttattattcgctctgttcgcatactga

SEQ ID NO: 358192 - DNA, 583 bp, Cannabis indica
caccaaccaatttccatttgttcccaaagacttcaagcctcaactggagccaaaaacgatggattccaaggctgaggagcttccgaccaatccaaactaggagaaccccatagcttgccatggccgatcctaacaagttatccctgagggtatagagcttgtgagcggtcttgaaagtcctcctcaggctggtaaagaattccagaggaaggttggcatggttgcagatgaacatggaagaaagtttgcgtggtttctattagagaatccagccaacccaagacccaaacctgcgcttaaagatctttgcaccatcctctttctggtatcgaggaatttcctgaggctgcgaaagagatctcggcttcaagaaatggaatctgatgatgaagagaataaggtctgtgcagagatcaaggctctcttcgtgcagacggtctttcttgacctacatgtagccggtctttctccaagatatgtctagatggtctttctctctcatccttggtttaggaagatgacttaatggtttgtccctagtggcatttttgtaaagacaaagttgtaaccagttttaggtttt

SEQ ID NO: 358193 - DNA, 428 bp, Cannabis indica
gaaattatttaggattgtatgttttagtattttcgcttgtcattcctacttgctatgtgctaataatttctgaatgagatttttgttttaaaccttacttgatttctatttattgttatttgtagtatccaacatgacaatgaccaatcccatgttgtcactattgactgataataagctgagtggatctaacttccctaaatggaaagagaacattaacattgctctcataggtgaaagtgccctgtttgtgttaactgaaccatctcctgaacagccggtgacaatgcaacaaacctgtaaaagagaagtacgagcgttggcagaatgctaacaacaaagcttgatactttgctttgaacatggttgacgccttgaaacaaggttcgcaacactgtcacggctgcagaaatcatgacagagtaact

SEQ ID NO: 358194 - DNA, 532 bp, Cannabis indica
taaaaagtattggtttaagaataaaatattttagttttttaagtatagaaaatcaaatttcccaaataaagcatgcataagttcaaattcaatatctcactaactaaaaccaacaactacaatgaatttcaagcataaaaccaagctccatatcaagtacaagaacaagaaattcaagtttaaagcacccatgtcaaagttatacctaattcaaagcttgaaaactcaagcatccaaatcttaaggaaaaacccaaaattccatgatcaaaaacaaaaaattcaaatcctatattcatccctaaaagcatacaaaacaaaccagatgcaaataacacacatccataagctcaaatatacaaaaatgatcactaagcctcaaaatcacaacaacatgcataaacaactcacaagaacaccaaaacacactcaaagagcttcaaaaacacctatgattaacacaacattcatcaattaaatccaaaaattaagagataaagtagctacctcaagcttctctaaacaaaatcatg

SEQ ID NO: 358195 - DNA, 828 bp, Cannabis indica
gcatttttaaaagtaatttttttcattactaattgtcttgataaaaaactaattaattgtctttatataaaaaattttatttttatatcatataatttaagatacattttagttacctctaaaatttatatttttacatcttagtaattaattagttatttttaaattatattatggtggattataatttaaaatacatttaggtaactttaaaatttattttcgaaacaatgaattaacatgtaatataacaagctactatttttatatactaaatattttatatatctttttgttatatgaaagctaattaattatagtataatataatacaattcaattctaaaatgaatgttaactaagattaaaaaaattataataagtaactaataactatattagtaactaaatagtttcttttctagaaatagcaaaaaaaatatatgctttgcacatcttaaaatgttcaaagtatatcagaatgatattttttttagactcatccgagtaacgacgtgaacataaattatttttaaagtttgagtgaaagaggcaacctgagaattcgagacgaatatgcagcagaaatatctgaagttgttcaggtaaattccgagacgaaatttctataaggagggtgtatttgtagtaccctggaattatgtaatggattagcaaaaccataattagataattatgaataatcgaggaattatattattatatagtttagtatatgtgaattaatatgatttataacatggtaagaccccgttggtgagtcaggggcattttagtaattatcaccagagaagggtaaaatgatga

SEQ ID NO: 358196 - DNA, 614 bp, Cannabis indica
ctaaattgagaaatgcaaatttgctgatcctaaatttacaataaaggttagaagttttctggaattaacaggatgctacagataattgttgggggttgttaacacccttagtgattagatcgaaagaattgaaaatagaggttaactattgtaccaatgataacattgttagccagtgaggagaaaatgtgattcaaggtgatacttctaaacaaggaatagattgtattctgacacagtttaggagagttattgcctaactatctaggctactgaaggaatatgagagtggtatttaagccatgatattggattggcagtaatcgttttacattgaaagttgggcaccatttttctatgtggattttctatatggtgaaaatgtgaagtctatacggatcacgaaagtatcaaatacttttcttttgaaagaatttagatgggaggcagtggtgacggttaaagttgattgaaaactgtgtgatttattaccacttggggaagtaaattagtagtagataccttaaaccgaggaggtttaggacaagtttgtaaagcgaaaagatcttactatcggttgttgggaatgtaaccagaatagggattgagttcat

SEQ ID NO: 358197 - DNA, 712 bp, Cannabis indica
gtcaaccgggtattttgggccgaacgggattcaggcccgaaatgcaatttgggattaaatattggcattttatttgatatttgataatctgaaatttatttgaaattaaatgtgtatgaaatgacaattatgcccttgaaaccttgctgaaatattgtggaaaagcatgaattaagtgaaataaccttgtttatgcatgtatgaaagagttggagttaatttggttgaatttgagtatgtttatgcttgaatcattgttgtagtgtttctactgattttgatttgagttcttgctgagttttttaggttaaagagcatgaaaagattaaattattcttggagttgcatgttaagtgtttgggtgttcaatcttgataaatttgagtatgatttgcatatttatgttgtgaattatattgttaagttttgattgagtttctagagtattttctagattagagtacatgttttattggctattttgttgttgggaaatattggagttaggttggtttgaagctttagtttaagagcttgagttttgttaattttgagcaatctgatttttgaggtttattgttggaattgatgcatgaaatatgtgtttttggccctctaatatatgctagcaactctatttcgtgattctgagagatatgtatgtttggggtgagtttgggtgagttttggtacttattttcgaagcagaaaa

SEQ ID NO: 358198 - DNA, 794 bp, Cannabis indica
tgagatatccttctactcgcacacctgacttttcgcgtcttggcgggatggttagttttcgcgagaattcaaatcatcctcctaagacgattttatagtttatatgcgggtgaggtcacttactttgtcttttcgcacattcaccacgctgaaaagatcttctatctttcagatgagcgacctgtcggatagccagatgctcggctcaggaggaaatgcgtttgatggagatgaggaccaacgggaggatagttttatcccgacttcgatctcagaagaggagatcgcaactgccggagatgcggaattaggcccgatgtcctctgcagacattgaaaggatggtgcaggagctcgctgaaccaggaactattgaatctgagacagcgaatctacggtgtcagcgcgtgattatctcgtccattcaagacatgctcctgacgtcgaggtcgaggagatggacgatgattgggcggccccagctcgagagtcaggcgaggaagaagaagatgcggaaggaagtgggaccgattcggtggacaacactcagttgaacgagcccttttcatgcgaggacttggtctcgagggtcaccaaatcagatcttaccactttcacgaggctgaaccttctgcgacttgcttctttacgacctaaacctactcagagagcgcacctttcctttaccaatcctgcgatcattcccacagaggatgtggtaatctcaatacccattcttcgatgtggggtatcgatcccttttcaccccttcattgcggccattctcaagcgtta

SEQ ID NO: 358199 - DNA, 765 bp, Cannabis indica
aacattaaatgttatttctgatctttattaattagtaaatctgattatactgaaataggttttatttagggcataaaacccaacagttactacttacacaatgtaactgactaggtttcttacaattaattcatattaatttagatatcactaaaattcttgttttagtttggttcatgttattaagttgtataagttgtaaaagtggtaaaagttgtaattaactaactagggtagtgtttagttgattggaatgtcgttagaattggaatgacttttcctaaagtgaatccattcatttgttttgtttgtcatttataatagaaaagtttatataaatgtgttatgccacctaatttcttacaactagtgagtaattaactagttatttgtgttatgtacttttcctttaatatttatgtttttttagtaaatttcattctaattctacaaaaatttcggcagcataacgactgtaattggacgttcctaaaaattttaaaaatacataaagtaacaaacaaaacaaatatagcaaacaaaataacataaacaatacaaaattcattcacccatccgtccgcaatacatgtattcgcagaacctacttcactataattttaagatattcaaactccactaaccatgcattgataattaattataaaaattaaaagttagtgaatgtatatacctagagcaagttaaaatctaatcaataccgaaatatgtcgaatctcaaaaattagctcacaacctacaata

SEQ ID NO: 358200 - DNA, 1257 bp, Cannabis indica
ttaatagaatttatacattaaccaatcatgaaataatcaatgtgaaccatgcaacataaaatgttacttctgatcttattaattgtaaatttgattatattgaaagggtatatagagcacaaaaaccaacagcttcatccaccttgttgtttctctagagtactttgaccaagttatggtcttgttttgaagaaccttatcctttctgtctaggatctgaactggctgttcttcgtatgataagtctggttgcagctcaagattttcataacttagtacattagcagggtctgaaacgtattttcgtagcatagaaacatggaatacgttgtgaactactgaaagagctagaggcaaagctaaatgatatgccacttgtgaaaccttctcaagaatctcgaaaggtctgtaaatctagggcataatttgcctcttttcccaaaacgtttgacccccttcattggagacacccgtaggaacatatgatctcctacatgaaactctacatttctgcatttcggatctgcataactattttgcctactctgagaggcaagcattatagctttaatcttctttattgcttcattagtccgttgcaatgatttcgggcctaggtatttcttctcccttgattcatcccagtgaatgggaaatctacattttctaccatataacaattcatagggagccatccctattgtactttgataactgttattgtatgaaaactctatcagtggtagatacttgctccaagaaccctcaaaatccataacatgggctcgtaacatatcttctagtatctggattattctttcggactgtccatcagtctgaggatggaaagttgtactgaatttcagtttggtacccttagcccgctgtaaattctacaaaaatttagaagtaaacttcgtatctctatccgaaactatagactttggtacaccatgtaatcttactatctccttgatgtacaaatctgcatatgatccactgtaaaggttgtttcaacttgtaaaaaatgggcagactttgtgaatcgatctaccacaatccaaattgaatcaaataaacccgtggttctaggtaatccaaccacaaagtccatggtgatatcttcccacttccactcaggaagtgtcaaaggctgcaacaaacctgtccgtctctggtgttcagccttgatctgctgacaggttagccatcgcgatatgaattcgaccacattcttctgttggaattattttacca

SEQ ID NO: 358201 - DNA, 621 bp, Cannabis indica
ctagttaaaaatttaagaaaaaaaaactggtttcgtaaagccacacttagataaaaactcacacacaaaaaccagttaaataaaatagctcaaataaaaatattcattcaacatgctccaacccaccaaataattacactcattatccgcctcaaaaatactcattcattaagttatataatcaattttattttagttataaccggtttgagttattccgtgttatttgtttttatttattataacattgttatagaaccggttctaatttaattgtaattagtttgagtttttttattttatttatttttattcattatgttacagaaccagctatatttcaattataaccggtttgagttattttgtgttattgattttcattcattatattatagaactggttctatttttgtttatatttgagacatctacttcttgtgacttttctagtgactttttctggcgacgatgattttttcggtgacttttgcggtaggggtgacttttccagcgacttccccggtaccagtgactttttcggtgccttttccagcgctgacgacttttccggaaaaacgtatattattgtttacaaatatgagatttccatattttttt

SEQ ID NO: 358202 - DNA, 586 bp, Cannabis indica
cgtgatatgtaatcaaaccccataagtttaggggatgatcgttgtaaaaagattacagtcaactttgtaattaactgccaactatatgattataaatagtggcaaataagatcaaaaaaggggatgaaaaaatcgtacaagaaaggccctgagaaaaccatcagaaatctgaataagattgactcgtggactatgcagaattttaactgcaaaaccacgtaaaaaatcatgtgtgttcatactttcattttacagcttttattttttctgtgtgagattgtcactgtgagactcaaatttagttaacgaaaatctgcgttaacaagggccaataacttcttaaaatataatttataaatacatttatatacatacaaaaaattatataaaaatacataaatacatataaaaaaaatcattcccctcataaatagttaatatgtttcgcgaatggtcataatctttctttttactaacaattttaagaagagaaatgctaaactatattagtggtgtctagcaccctcctacatgtcaatattgttattgatacaattaagtatcagtcccatataacttaatgtaa

SEQ ID NO: 358203 - DNA, 1824 bp, Cannabis indica
atcagggaataaacttttgaacttataattaagattttattccactgtgctgacaacactataatcattaacaaattcatatgttctggacttaaataaaattcatacattatatgcatataatcatgaaataaatcatgtgaaccatgcaacataaaattgttatttctgatctttattattaagtaaatctgattatattgaaatgagttttatttagggcacaaaacccaacagtaatgtccttgaccaatcgagttaactcatccaaccgagcctggatcaccggatctatggttgtttgaggttgagcaatattgacaccaacatttgtttggtccccttggaccggctcaggtgggttcactatgttggaaccacgattgtttctatttctgttgagggcgtctcgcaagtctctattccctcgggggcctaccttttaaaaaactgacccggtttttagccttcctccggcgttctgactgtcagcccttccatcagctgggggtgatacttggtcattccttcccctttagggtggattctgaggttgatgttgcctattaggggcatacggccctccggcttgataacccccaactcaggatttggttgtttgttagcccaactttcagcttcatcatcaccatgaccgtcaaggtagtttggacggtagtcagtgttgacctcggggtcttctcttcttcccctagacctactatttcttggccgatcattgacatctcgtggttgatcgcgttggtcgcggggttgccactccctatgtcggggcgtctttctaccgtttctgccacggtcaccattgttgtttctagagtttcctccaccagtccaccttagacggacattgtgggagtcatcacgttccatatgatgaccgggtagaacttgctcatcggccagaggcagtcgattattattgcggggaaccttgttagaggggtgattcttagtcctctcttggttccttgggaaatcttcaagtccatagaccaccctctccctctggttccttggggtagggacctcccaaggataggtttgatgtatttgttgattgtgggcatcagtacccatcccttgagtgttttggttgaagtagcttcgtattaagtccgcaacctcttgggtgcgacgatcttggtcatcttggcgcctcctcatctcacgagcatgatcttctatccaagattggaattctctcctttggttagcgagactttcagtcaaggccgctcgagccatattttgctcttcgtgcacaatttggaattggccttgcatctggcctatcgtatctcgcagttgatccatctcggggtcaattccctcaatttcaacatggggttcattccctggcgtaaagatgccagggccgcggccagtttgagcttggcccgcaccgttagtaggtgggacaaaatttctagtattacctcttctggtggcgccattaatagcactgcctcctgcggcagtggcattggtggtacgcctagtagttgtctgtctagtgactgcagtttgaccagttgctccatggccagcagttggagcggtggtggtagtgtcgccgttccccgaacgcgggggtcgttctccattatttccggcaaagttgcttgctaatggaacttagtgggcactttccatctcttcgtcaggtcgctcttgagatctttgggttaacaccattttttccggtgaaaaacttaaatgcagttaataacgccggaattcgcaataaaatgttgactggatttttagccaaccgacgcaaagtcgtaataaatgagattt

SEQ ID NO: 358204 - DNA, 1052 bp, Cannabis indica
atcctagttcctaaggaactgggttgatcaacatatcgatagaccctccctgatctatcaacaagtcttccttgaagtggatctctgatgagatcctggcctcttctatcgattctttggttgaacaaccttattagatcgttggcctctcggttgcggcgatctaactctccttggtgagattgaaggatgtactcttggtcatccatccatctcaggaatttgcacctctgctaagtgaatacatcgcaatcaacacgatgtggttcttcaaggaatttgcatctctactgagcaaatacatcgcattcagcaacacatagttcttcaattaggcctacatggcctacaacttccctgagtttggccaactcaaggtcttctccgaagcctaggtgaggctctccaatttttggtctcgtctctcctgcatagtactgggggcaaaatccagttgttgtttttgggggtgcccccaaggactcttccttaagttggaggtgtctgtggagggtcctcgcttggaggctggggcctatcaattggatccaatgggatgcttgtatcagtctggtcactgtagagtcctgcctagtagtcctggccgcctatagacctacaggggtggtcaagccgcccaaggtgtgcaggacctaactgcttaaggtgtacaagatctggcaggtcaaggtgtacaggatttagcaggtcaaggtgtataggatctgataggtcaaggtgtacaagatctggcaggtcactatagctctgtcaagaggaggccagagtcgtggcgcctattgtggtgataggattcaccacatctatagtgttcattgggattcaagctgtgacaggaacctgcgtatttggatctacagtctgtgggttttgagggagacccaaagatgcatatggtgcgataggagttcttctcatgttaaccatgggatttgatcagatacgatatctacgctatcaaagaaagcaccaaacagttgacctcaaaaaatgatcaaccgacagcggggtcgtatggatctgatgcttgc

SEQ ID NO: 358205 - DNA, 800 bp, Cannabis indica
aataaaataaaatatagtccccgataacggcaccaaaaatttgatgtgtgtcgtaagccacaaaaaattttacaatattttaattccaatacctccaagttattttagtataatcgtaaataagggttgatcccacgaggactatatttattttattattcacaatttagtaacaaaaattagaaaaagggagggggggttgatgattagaataaaaatagcgataataaaaattaaagaaaagaacaaatttcaagtgagactacgatatgagagactagttaaaggttattctccaccctcaacaatcattcctaatttctatcaaagaatgtaattttcagtttccaatcaaactataatccagcagataaagctgaagcagtcaattatcccaatctcctattgtatgtaatcaaggcgaagcgctcaataattaactcttttacctaaagcggtaaatctacgaagcatgcaatttatttaacttagataaagcattgagttttatggagatagactaatctaggcaacaaattaatgaagtatataatttatttaacctagattttattcttcatcacaaatagaaattacaatttgtcacaaacacttagaatcctacactattaggtgaatagtaatcctaaaatgacggtaggttaaagttaaacctaatttagtggtcatctaaacaagattaaaacaataaccatgacattaaatgtaacgccctagtgctaaggcacgctacagtgctttttcaattattgtgcaatctttgctaatcaaagaaattt

SEQ ID NO: 358206 - DNA, 876 bp, Cannabis indica
tctcttctactagcgaccctacctctctctcttttcctcttcacaattttgaaaccctcagtgatggagtagtgcccacacacatcaagtggtacctcaatcatagattggaagactatgaaggatcacacacaaagagaaagacattcgggctcaaatcttgataatactctgcgacaaaaaggatacaagggttagagatctgagtggaaggagacattattccgctgccactaatgtaaggttttcttaactttatatgtgtttaattatcgttttagaaagttcatatttagggtgttaaacaacataattgtgagtagatctaagatcctggtaaaataatttccaacatggacatgccacattaggtggaaaaaagtcaagataacatttgcccctaagtccttatgcagacgtctgtacatatagggactttccaacttagttgggactgatgtagccttaaccaggaaaatcttgcagattatttagcctttgaaatatttgctctttcttgtctgatcacattccttagcagtaacttaacaacattacacttccacatgtttattaatgcatgctgcatggcaagtgagagggggtctcacagaagttgtataagctcatggggggaactcacttctcatttcccatatttattctctctccttaaaaaatcaaactttggaagctcttcattctctcttgaggtcgatgccccctagtgctctatttcccaggatttttgtcttatcttgacaattcaagcttcccatcttcttcatcaatagtttccactagtgggtaagcttttaaatcttgttcttcacttgtttatttgattttgccattcgctttgaatattttttgatt

SEQ ID NO: 358207 - DNA, 765 bp, Cannabis indica
gcacctatacctgcacaaagcatttggtaaataacaaaaacaaaatgaacacaattgcacaatgattaaaaacaagggaggaaattcattaagaataacaaaagcattcaaacccgagattaaaggttacccggttagccagttgttcaaaaaatgaaaaatatattccaagtttaaagaccgcttggccggtcaccttgtctcaaaagaaggcctgttggccgaacagacataaaaaaaggatattagaaagaaatcaattagacggcaggagtcccgggctctttgtacgggtcgactggatttgaaggggctgaaggatcatcattctgggcgaaaggagcctcaacattctgatcggtaggagaggtggaagtggtcgcctcgggatccccgtaggcttcctcagcagcgcagtagtcgagaaacatgtctttggaagcgcccatataatcaaagttcgctttgggattggccttccaaaagtcataaaagatctcgagaccagctgtctctaaggcatttatcttctccccgagcctcaccacctcggatttttgtttctccacctcggccccaagttcctcctctttagctttcttctcatcctccaacctgtggagaagagtccggagaccctctctttcatcctgaagactagtaacgtcccgagacaaagaagcaaaatcagctttaagctgctcaattgacggcgtctcgtgcaattccttggtcagctcggcaactttggtctcagccgctaga

SEQ ID NO: 358208 - DNA, 858 bp, Cannabis indica
tcttttgatgtatttttatgttagaatctagatgatttgttgttaatttttcgttatatatattttattttttgttattgattggatattattttcctgttattttaaatatttctagttattttcatgttatttttatagaataccgtaaaaatatatatacaaaagtaaatctttaaacataaaaatttttaaatgtaaagttttcacaaaaccaaatagcaaaaataataatagtaatgacaaaattccaaaactcatttgcagggccgactctataggtaataggtgtgcaaattgagctagtgcatatgattcaatatattttttatttaatgccttttaattttttcaactttttaagggcctaacaacttattattagtcacttccatcccaattctcaaagctcatttttaaattctattactgcttttaagcaaaaaaaaaaaaaactattactattatttattattttttttattagaatcaataaaaattttaataaaatagtttgaattttttagtattttgtaaaatatataaccgtataataatatttaaaaatatcatttataaattgtatattttttttaggggctcaattaagaattttttagtctatttttttttttttttgttaattgtctatattgtaattatttaagacatcatggaatatttagaaaattttttaaaaaattaacacgctaaaaataagttttaacattatattaaacgcatgactgttttattttatatgtgttcatcgtaatcatgaagagtaaagagtaaagaggaaattacgtagaatatggcattttttctttaaattttcataaatatggaaaaattaga

SEQ ID NO: 358209 - DNA, 543 bp, Cannabis indica
ttaaaaactgcctcgaaaagggggtttttgtagtagtgtatttataatatttaaagcttctggtaatgccattcacaatgaagctctcttgcaaccgatccatgatgaagagtaaagtcggctgtgttttctatgcatccagataaactcccgggcctgacattatgggacctgggtttctttccacaccattgggatattgttggtgctgatgtaatcagcttagtgaaagagtttttcggctccgaagaaatgcgttgtggtcttaatgacaccaatcttgttttgatcccaaaaaagaaaaactttgttgttatgggtgatcttaggccaatatccttttgtaatgttctttataagatcatctcaaaagttttggcaaaccgtatgagagatttgattgactgtatttatctctgacacccaaagttcttttattcctaatcatcttatctcagacaatgttatggttgcctttgaggttatgcactacctgaaacgaaaaagaagaggtaaaaaaggcttcatggctcttaaactcga

SEQ ID NO: 358210 - DNA, 670 bp, Cannabis indica
gtctcctcgtcccgaggcaaccggtggaaggtcccggaggccgatggtatgatgcctgccaccaccacaatcttttcaagctagtgagcacaagtcagtgtggagtggagctcatccgcctcccatccgttagcatgggacttaaagttctcttgggccacacgcccctgcatgacctgctccagggtggccagttggacctctcccttcttggaagacttagaaccaaacgctgaagcagacattttggttttgaaaaaatcgagaaaatccagcagtttggccccaaacaaaaccctaatgttcgaaaaggggaatgggggtcccctaaccgctggaaagaggccccctctggacacttgccaaataagaaaaccccaatagattttccttggcaagaatcgggtgtaaaaatcccaaaggcagtgacattgcaaaagaaaaaaagagaaaagggaaaaaagggcaaagccgagaaagcaagatctactctaagccctaaagacgttattacgtaagataaggatggttcctaaatagaaacatagtaaaaaggagcagtcaagacgcagaaaaagaggaatttaacgcatcatacagtaaattcaggcaaagtcattcctagaagttcgacatccaacccaaaaatcataaaacatgctatataaac

SEQ ID NO: 358211 - DNA, 637 bp, Cannabis indica
taggctattaccgaactaagggggtcgaacctctttaaaatcttgtgttcttccttgcttacctatttttactctgtcttaattacatttctaatcttatttattgactcactgtcgttggctaaaagcgaggtccacattttggtgctttcattgagagcaaaaatccaagtttgctctttgccttaagtttaagcagacacacagaatggtggtgcaaacttccagaggcgtggttgaccatagtgacccactgctgacagttcttgccttacaaactcctgaaaatacaagggtctcaccaaaaaccaatcctgagcagccaaacacgcagccacctactgtgggataaggtgtgacatcccctatggttaggatcacaccaggtgtgcaagagactgggaatacaagttcggcagccgatcagagcactcccagcactagaatcccatccacagccaatgctcaggcaacaataggagacgatattgagattcagaacctctgcaatgcccttagacttatgcaaggtcacactaataccttgcatcatgatcaggaagagctctgtgctgtaatgaaccttgcgtttgaagcgcagaggcgttagtcattgagtggagggatagagagatgg

SEQ ID NO: 358212 - DNA, 591 bp, Cannabis indica
taaaactttacaaataaatactgttggaatatggggatcccctgctaccgaaattcttttacaattaatttacaaaacgactaatacaaaatcaaggttacaaatccaaatatagaaaaagaggtcaatcctgcttcgcagaagtcaagacaccacgactgatatgtacactgttgggagacctctgacccatggttgaagacaactgctattctgcttacctacaccatgaagcacttgtgagtcacaatgactcagcaagaaaagctactagacaatagtatagtaagtactagcattataacataatatacatatcagtggatcaatacatattcaacatgcatatacatatcagtttgtctacacgaacaccttcataacacagtgtaagaaaaatcaaacaaactcataattaataaattcaccttttcaccaagtagacattcatttaacccatagcaatataatctcagtgctttgaacaacactctagccatacattattgtaattacataatttcggtaattcacttagtactctacttacacaataccataatcacctaaactcaatgcttcataaagcac

SEQ ID NO: 358213 - DNA, 725 bp, Cannabis indica
ctcttaccctatttttgatcattctagattcactggtcgaatcagatttggcatttgagtgatcaaaataagcgcaccaagttgattgtcaacctgggcactgggcccaccgccaaatcaatctaggcgctgggctttgcttttagggcctcgagtttgtagttttctttctgagtttgctcgaatcttcattatttctgatgacgaaaaaaatgcgtgaaatactttttcgagaacttgattggaaacagtcctggttgacaatatgttaacctgggcgatgggtcccctttatggccctttgaaagttccgtttggtcctcaaaaatagttgaatcttaatctttgctgaaaactgagaagatgctcgaaagaattctcgtaaaatatcatcaattggcctaggttgacaaaatgtcaacctgagcgttgggccccgagtgttaacctgggtgctaggccttgcttatggcacccaggatgtgttgtttcttcccccgaaagttcctatttccctatttttgataaaaatgaagaagatgcaaaagtcgaatcgtcgatctgatacttggaaggcatccagattgacaaattgtcaacctgggcgctgggtgcccaggcagcgagtgctctgggtgtcaaaaatgaactttctttgaatatgattctgatgagtgcacattcgtatactcattctagtcaattattagatagattagtattta

SEQ ID NO: 358214 - DNA, 629 bp, Cannabis indica
aaattgagaaaatgaaaggcccggggaaccctgccaaaaccggctagccgatttttgtggcactgcaagccggtttgcaccaggtttcccaaagctcttcatttgttgctcaattctccaccaattgccatgaaaccttccagagtacctaataagggcatacacaatataatccggccagtaactcacagaacaaaccaccaaaacccaagttgccattaaagcttaaagctttgaactcaaagctcaaagttgcataaaacttacaatcaatctcaaaaccagctgctatgaactaaaattaacccaaacaagccctagaattcgaactatgcaagcatcaaaccctaacagctcctataacccaaatcacctcttgaaactaaaatacaacttcatgaacttaaaaggaaaggagctagggtttaccttgattgttcctccttgaatccttggctgaaaacacagaaaaataaagactttggctgggttttccttctggtttgagagggccgaacaccaagagagagagaagagaaatgttattttctctaatttaatttcttttccttaatttgctttctttcaaagtaatacccctcttttcattcaattaggctgaaataaaa

SEQ ID NO: 358215 - DNA, 685 bp, Cannabis indica
gccacaggtgagaatatctcattaaaatcgatcccctctttctgtgtaaaccctttagccactagtcttgccttaaacttcttaggatctgtctcagtaagtccttccttatgtttgaaaagccacttgcatgaaactatactctttcccttaggtttcttaactagtatccaggttctgttctttctcagagattccatctctgtatccattgccttggaccatttcttggcatctttatcagtcatagcttcctcataagtcttaggttctgtgatttccactcccatagcataaaagaatgcataggctagcacttcttcccaagcagtgaaagtaaacctctgtgtaggtttaggaacccttctatggtcaattggtaatcttgtattgcctcagtttcttgcctttcttctagaataggttccacttgaatgttgtcatcctgaacttggtcattttctttccaagttttcatctccttgagtgttttccacctgttctggttccacctgaacagtattaggttgagtgttccttgtttgtatgtctacagatgtgcctgcagggttagtgtttaaagtaggactagatacagagttattattagtaatgcaaggaaatgagtcttccttaaaaataacatccctactatttataattttaaacccttgtttttctctta

SEQ ID NO: 358216 - DNA, 447 bp, Cannabis indica
cgcctaagatagttagggtgttataacttttactgtccaacttgtggtacgcaaattgtaaaatctcaaactgctaaatttctggaatttgatgttaatgaaaatattccttcaacatctgttgaaattggagagtcatctaaatgaatttttattcctatgtcatttcaagagatgataatagtagtcttaatcctattccagttggtaatgctcccatttttgatgaatatagtgatcttgatatcaaagatgatgagggtcttattattgacaatgggcctattattgcagaagctccagttgttgacgagaatcctattattgaagaaattccagttgtggaaaatgttattcaaaataatgatcaacaaatagaagctattccagaagtacctcctctaagaacatctcaaagacaaaagaagtcaacaaagtgtcatgata

SEQ ID NO: 358217 - DNA, 829 bp, Cannabis indica
ttttttttaatatttcagattctacccaatagttttattctattttttttaatattttactaaaattttattttttttattttacctcccacactatacattaatttttttatatttttctctatgtcattttaactatgcaatataagtcgtggtcgttataataattgatttaaaataaaataattcaattataattatttaagtttaaaatatttttatattgttagtgtaaaaaagtatatcttatatagttattattaattattaatattttatgaaggaatgttacgataaaatatagggaatgaaacaaagattgattaccgctcctgtgttaaccttaccggtaaatgatgaaaagtttgtgatttattgtgatgcatccaaacatgggttaggttgtgttcttatgcagtcagggaaagtgattgcttatgcatccaggcaattgaaaaagtatgaacagcagtatctcacccatgatattgaactggcagcaattgttttcgcattgaaagtttggcgtcactatctgttggtgagaaatgcgagatttatattgatcacaaaaggctcaagtactttttcactcagaaggacttaaatatgaggcaacgacgatggttagaactggtcaaagattatgactacgagattctctaccaccctgcaaggcaaatgtggtagcagatgctctaagtcaaaataaatgaaattaattatgttgctaatcaatttttattaggttaaactagcttaattaacctagtacagttattcaaatcaggcaattgggccttcacaattggggtggttcatgtgaggg

SEQ ID NO: 358218 - DNA, 803 bp, Cannabis indica
gagctttgtttaggttgattttaggttctggatgttagttttgagctatggtgatagaattgagcaagcttgagctttgaaactcaagtttaggtctctaatggcataatttgatttagtgtatttttctgagaattactggttgggatatgttgtgtatacattgtttaggtactctggaaagtttggtggcaattggataagctttgagcgaattggaggttttttggggaggactggcagaaacaggttaaccagttttaccagtacctgtaaaactggttaatcggttttggctggttccccgagaaaccggtttttctcaattctcgtctatttcagtgccatatttgggtgttttcctatttcctaggttaatgtaatccctagtgagtatagcagagccttgagttgtgaactcgggtttcccggtttaaggttttgaacatgtgatttacccagtttcaatatgtgattagggcatccattcagcacgggacttttcgttcaggtcgaccaattcatttgaatttggaaagaaggtaagaattgtatataatgtgtgatatggatatgcaaatgtatgtatatgtttaatgtatatgcatgcttatatgttgtgattcatacactaccaacacttgtacggttgcggtacggagtgcattggtaaagtgtatgatgtctgaaagtacatcgtggtgttaccaacacttgtatgaaaaggtacaaggtgtctgtggtacaacacttaacagtacttaaggtgcggtccataccctacctacactagtacgaaggta

SEQ ID NO: 358219 - DNA, 1369 bp, Cannabis indica
taacgtttccatctccttatctctccattcagcgaacatgcgcctctgctcttcaaataggagatccaccgcggcacggagttcgtcctgatcacaatgcagggtgttggtatgaccctgcatgactccaagagcagcacgaaggttttggatttcagtgtcatctctaatggttgtttgaacattggtagcgggcggaatggcggtgttatgaatgccctagttggctcctaaactggtattccaagtctcttgcacaccaggcacgatttcattgacacgaatcgtcacaccgtgacccgtggttgagggctgtctgggatttacggttcgcagaacccttgtgttccctgggttctatagtgcaggatccaccgcctttggattcgcctgatcaaccacacccctacaagtctatgccaccatcgtactagtgattagaattgaaataaagagcgatccttgattcttctctcaatgaaagcaccgaaatgttgacctcgcttttagccaacgacaatgagtctaatttgtaagcgacaagtagtttaatacaggtgtaatataataaagcgaataaagacacaagaattttatagaggttcagccccaagaagtttggtaatagcctaatcctcgtagtttgtattgacttaagaacaaggagaatggttcctttcctcagagctcttacaataatatctctaaatatgaattcttagacaaaatgtttcgaccatttgcccagtgaatatgaattactatttatagggctataagcttgagagggaagtatttcccttctagttacaattgatataagtagaaagattgcgtagtaaatatagaatacactaatcgtgcgattcagacagctttccatatctctgtgatttgatcccaaagttatagggatttctttggtgactcacgatgcgaaagctgaatttgctaagtgttggcatgctttgcggactgcttattacccggctaagaggacttcgtctgagcggatgtatgtggtgtcctgttcggcatatttcttgcgagcagatacatgtagttgattccacatgtcaccatcgtgtaatgccacgtcagagtgcaaaaattgggataacatgcttaattcagcatatctaaacataattaaacctctgaaaacaataacaaacaaccacaacaagaacaacaacaaaaatctcaattcatgcaaaatgcattttcctacaattcaagaaacttaagagaaagctacaataggcttaccttgggttggaaatcactaaacacttgctgaactagcttcaattacagaggaaacatcaaaccctaactggtctaggggttcgaatgagagagagcttga

SEQ ID NO: 358220 - DNA, 399 bp, Cannabis indica
aaataatttccaacagtttcttgctttgtaacttttttgttgaacattttgaagtatgcaaaactacagattctttaggtaccaacttttgtcaaagttctcatcgtagcatttctcgaggtcttcgtgaactaacttacgcagaggaattgtaatcattgtttcagatcgctacaagagtcgtggggcttaccttctgtctttgttttttctagttagttgccttaggcagaacactgcaacagatctatgttatttagattggtgagggtaggtgtaaagaccgcttagtttaatttgaaaattagcagttaattatgatttaattatagaaaattatttatagatatttaaataattatttatgctgttattttagaattcagaatgcatttttat

SEQ ID NO: 358221 - DNA, 815 bp, Cannabis indica
ctctttcctgtccataaaaaacttctgcacactccttctatctctttaatcactttcttagggaggatcataatttgactccaatacatgtgtattgtgaggagaactgaattaaccaatactagtctgcccacaaaagacaagtttctggttgaccaaactcgaattctctttgtcattttctgagcaaggctgatgcaatcccctgctgctattttccttgcacaaataggtaccccaaggtaattgaaaggctcctcctgcctagtaaaaccagtcatatccaaaacccgtttaatttctttttcatccattccactgaagtatattgcagattttgcactatttggtgttaaacccgaagacatagaaaatagtttcagcccttgcatcaagagataaatgcttttaaagtcccctctacaaaatagaagcacatcatccgcaaaacttagatgattgagttgcatttcagcacacctttcatgaaaaccaaaatcctccttcttcccaattttactcataatcctactaagatactccatccctagaacaaatagtaaaggagacataggatcaccttgtctcaatccccttcttgcttcaaaaaaaccatgcatagaaccattaaacatcaaggagaatttaggagttctaatacatgtggagattaatcttataaatttctccgggaaattcaaatgactcaacatttcttctaggaattcccaatccattgtgtcataagccttttgaagatcaagcttgatcatgcaattaggcttagcccctttcctaccataattcctaatgag

SEQ ID NO: 358222 - DNA, 1003 bp, Cannabis indica
ctttatatgtgtttaatttcataatcgttttagaagttcatatttaggatgttaatcaacatacttgcgagtagatctaagatcctggtaaaataatttccaatagttactacttacacaatgtaactaactaggtttcgcaccattaaatcatattaatttttaatattcttgttttagtttggttcatatttttaagttgtataagttgtaggagttgtaattaactaagtagggtaatgttagttgattggaatgttggtagaattggaatgactaatccattcatttgtttggtttgtcatttataattaataagtttatataaatgtgtatataattatttgtattatgtcacctaatttcttataactaggtgttaggctatttttagcctatatttttgatcgattttatatgcgcttttcactgtgttaggacggaattacgcttgttttctatgttttcaggttctttggaataatagaggtctcgggatgcaaaagtccagtaaaagatgagttgagccaagaaaaacacctatttgaggcgagatgcaattctggtcgcggctagatacatcttggccgcggctagatcatgaagcaggaagccagaattttgaggcttcagtccccgcgacgagacacaccttcaccgcggcgagacacaccttcgccgcgaccatataaaaattacagaagcagtttttttggtgtctatctggccgcgacaagctacagcttggccgtggcgagatcccgtacggcccggggtaaaattatccgacgaaccctaaaaattacttataaatagaaaactgcgatgggaagtcgggggaagcgatttggagacctaaaacacaacagaaagcggccggaagagcagagcaaatcaaagtgaagatccagaatcaatccatcaacagtttctttctctattcctctttaatttatttatgttgaatattgtcataggaatggttatggatttatttctgaac

SEQ ID NO: 358223 - DNA, 1108 bp, Cannabis indica
catgacacaagtgagctacctagaaagaggcagtaaccagatattgagcgccttgtgtcttgacaggatccctaatcagcatccgagaaaaaagaaagttggacattagaagccgacaagctggtctcggcatgagctgagattgtggggattgtgttggatgcaaagaataaaccttgtccaggagttgtctttaagtattgtaggatgcgatgtgctgcatgaagatgggaaacccgaggagtagttaaaattgggtcaaatgattgaccgcctaagagatgtcgggtcttgttatagttaagtatattagtttgccaatgaggcttctaaaaacagtaggatcgggttggagagtccctttgttgttacttaacttgaagttagtttccataggtgtggagactggtttggctcctatgtaacctgtgtccttgagtaattggatggtaaatggtctttgagagaccgaaatgccttgttttgttctaccaatctcaaggccaaggaagaatcgaatggttccaaggtccttgagtttgaatttgtcatgaagatatgtcttgaagtgagatatcgcgagatcattattgctggcaacaataatgtcatccacatatatgagaatggctagaaagaaggttttggtcctctttatgaatagagagttgtcagatagggattgagaaaaaccatctgaaatgagagtatgactaagtttactaaaccattgcctggatgcttgtttgagtccatagatgcttttgtttagtttgcacacagtgttgggaggtgctttgtaacctggaaggattttcatgtagacttcttcatggagatcgccatggagaaaagcattgttgatgtctaattggtggacgttccaattgtacattgcagaaagagctaagaagatcttagggtgttgaattttgccacaggggcataggtttgagaatagtcaatgccatgcctttgagagtagcctttagctactaggcgggctttgaatcgttcaacaccccactttcattgtattttactttgtagacccatttgcacccaatggctttgtggccaggtggtagcttggtgacaatccaagtgt

SEQ ID NO: 358224 - DNA, 570 bp, Cannabis indica
aaaaaagaaagaaaaccctatttaaagagtttccttccaaggcaagaaaaacatttcaaaaacaacatcaagcttctcttcttcttctccttctgccgaaccctaggagcagctgggaaccaggtgaaactcatcttatttcatccactcttgagctaatctaagccctagaagctagctaagtgaaggtatgattttctactcttctcttgattggttttcttgagtttagtttaggttttggtgaaggttttcaatgaattctgagctggggtataaactgagggtaaggtaggttcttagggttgaattggaacttgtttgaatgaaaattgagtgaggttaagggctgtttaattgaattggtgttgaaagtgatgtttagtgcaaattttcaagtgagatggtgattttgagttaaatggtgaattgtgattaaatgatgtgttgaatatgttgtacttggtatattgaactgttctggaaatgcaatttaggtctgaaatggttttggttcgagctggggaagaaaacccagaatttttctggtctgacagcaaccggtcgacc

SEQ ID NO: 358225 - DNA, 888 bp, Cannabis indica
tatgccccagactgcaaatggctagggactagtgatagagtttcactggcttggtggcctgttgacacaggtcacaatttgttgacatttatcacattatttagcgaaattggttgcatctacccgtaaggtcggctagtaatatccttgttgcatgatcttcaaggtaaggaaattacctccagtgtgatttccacaaataccaccatgtacttctcgaagtatgtaatcgcattcgtctccatcgatacatttgagccacagttggctaaaacttctatgatatagctcgatgtcataaatgacatatcgagcagctcgacatcgtaactttttagcctcaagtttatcttcagggagtttgcccattgttaaataagtaacgattggggtcatctaagtgatttgctcagttacgttgacttgcatgatctctttgcgaagaatagtcggatgagccaacacatcaattggaattacttcgagtaattctgcttctcttgttgaggccaaatgtgtaatgccctaaataattaggcacgctacccaagatacttaagaaaccctaatcccctaaacgggattacaaataaaattagcgcggaaattaaactttaataacaaacgaaatgaaaataaacttgtaataatttaaactttacaaactaaaagttacaaaagtcaggatcccaaaaatatttacaaaacactattacaagtccttttccattggtcgacctaagcggcaaaacagagtcacaaaatacatcactggtagaccccaacccacttggtctagtgtggcccaaacatgtacattcatcatccagctcccatactcatggctgattagaaacaactttaccctttcctgcacagtagagcacc

SEQ ID NO: 358226 - DNA, 725 bp, Cannabis indica
aggcagtcttgacatccatttggtgcacaactaagttgtgtatggcagctaatgaaattaaaactctaatggatgctatcctagtgactggtgaaaaggtgtcaaagaaatctacattctctctctgtctaaaacccttggctaccaaacgagccttgtatttgtcaacagttccatcaggtttcaatttctttttcagaatccacttacaacctatagacttacagccagggggtaagtttacaacacgccaggttttgttggtcacaagagagtccatttcatcatctacggcctcttgccaaagatctgcatctaaagaagtcaaagcttcttggaggttagcaggatcctctaggtataagcacagaaatcaaaaccaaagtctttagctacccttgctctcttacttcttctaggttcagtttctaaaatccttagtttgttcattactcttaaatactagaagattgctagttgatgcacccccactatttctcaatttaaatggaaatctatcttcgaaaaaatcagcgtcattagattctactatcacatgcgcattaagatcatataacctgtaggcttttctattaacagcataccctaaagatatacattcataggctctacttgctagcttaattctctgaggatcaggaatacaaacataagctaaacaatcccaagttctaaaataggaaatatttggttgtctattattc

SEQ ID NO: 358227 - DNA, 719 bp, Cannabis indica
ccacttgatatggcccttcccagttcgatctgagcacacatgtcgtgctatctttggtttgttagtgggctaccagtttcaagtttgttgtggtccacttttctttgatttaatcaagtgactctgtgaggagtgcatgattaacctcttggttatatgtcaatcttctgtgggacggtggttcgagttctacgggcaacatagcttcataaccaaatgacatggcaaatggagtctttctggtcgctattttctcagttgtgcggtacgactataatacttcagggagttcctccggccagtttcctttagcatcttcaagtcgtttctttagagtatcattgagtgtcttgttgactgcttcaacttgaccattttcttggggatgtgccactgcggagaaactttttatgatcccatggttagcgcaaaaatcagtgaaggactgactgtcaaattgtttgccattgtccgagactatcttgtacggtaatccgaaccgacaaattatattcttcacaatgaactcttgcacttttatggacgtgattgttgtcagtggctcggcctccgtccatttggtaaaataatcaactgtaactattgagttttgtactccgcctttccccttgggcaattgttcgatcaggtcaatccccaattagcaaaaggccaaggactttgcatctcagttaattcgttgggcggtgcacgaggta

SEQ ID NO: 358228 - DNA, 789 bp, Cannabis indica
actgaacttcacttgagtactgcccatcatccacagacagatggacagtctcagaggaccatacagactttggaagacatgcttcgctcttgagttttggattttagaggtagttggggagaacatttgtcactagtggaattcacatacaacaagctaccaagccagtataggcatggctccttatgacgccatatatgggagaccatgcagatcaccattgtgttgggcagaaccagatgagcatgtcaccattggccccagattatcactagtaacactaaaaagattaagggaatccaagaaagacttaaggttgttcaaagtcgtcagaaaagctatgccgatctccatcaaagagaagttgagtttgatgttggtgattatgtcttcttgaaagttactcctatgcatggtgtaacaagatttggagtgaagggtaagctagccccaaggtatattggaccttttgtggttatcgagaggattagggaggtcgcctatcgattaaacttaccaggacagttggggctagctccctaatccataacatgaggctctccctcttcaggaagatgtgacttatgaagaacaacctgtcaaaatcttcgaaggagagctaaaagtgttaaggaacatagagattctagtagtcaaggtcttatggaagaaccatagagaagacgaggctacttgggagttagagtcccagatgtatatgaagtatcctcacttgtttaattttcaacttgaggtagtactttaaaattttgggacgaaatttcttta

SEQ ID NO: 358229 - DNA, 654 bp, Cannabis indica
gccaatgtagtggctgatgccctgagcagaaagggtcccgggcaggtaactagtatggttcatgtttcacctcagttagcagaagacatggtcagatcaagcatcgagtttgttgtaggtaaacttcataacttgacgtattagagctgctcagttaactgatctagagttggtacaaattagagaagagctttcagctggtcaagctagagattttacgatattagataatgggatgctgttatttaagaccagggtctgtattcctaatagtgtggaacttagaaatgaaattcttgaagaggctcataccactcaatatttcttgcatcccggcaccaccaagatgtatcgggatcttaaaccttacttcgtggtggagcggaatgaagaagaatatggtagaattgatattgagatgcctaacctatcaacagatcaaggctgaacatcagagaccagcaggattgttgcagcctttaacactacctaagtggaagtgggaagatatcacgatggactttgtggttttgattacctagaaccacgagtattatttgattcaatttgggttgtggtagaccggttcacgagtctgcttcattttttaccagttaaaacaaccttcacagtggatcaatatgcagatttgta

SEQ ID NO: 358230 - DNA, 444 bp, Cannabis indica
ttaaacaacatacttgtgagtaaatctaagatcctggtaaaataaattccaatagtacagagcttaattggtcgcttcgcatggggaccagacaatgattttgtctgaaaatgcgggcagacgtctgatgacacctcattctgcgcgcgggaaggctgcaacttcccctgtccgccgaggtttcttggctagtcactccaggttgcgcgcgcggacggtatgcaaacaactcccaaagttttcgtttttcttcgttttttcatgcttgttcatggaattaacttccgatgttttgtgtagttttgtatttatagatttactattcttaattcaattctaattatcataattaatttatttaatatttttttaatttaattaatgatattagtgtaatttgaatttgaaattagtaaatatctatttttttgcttaattatctat

SEQ ID NO: 358231 - DNA, 593 bp, Cannabis indica
ttcataattttttattttatttatttaaattacaaattacaaactttttaatcttcaaaatatcatttgcttacattttcaatttaacaataaatattcatttataattttctatttatttatttaacttaaaaattacaacctttttaaagttaataatatcacttacttactttttaaaattaaacaataagtagtaatttataattttcacatttattcatttaaattaaagattaaaatttttttaaaataaaaaataaattgattacctattatagattataatatacattgatttatatattatatttttttttatcatttattaattaaattaaaattaccaaatttttaaaaattttaatatatagtaaattatatattacattatttttcacttttattattttttaattattttttatttaaattaaaattactaactttttaaaaccatttaataccattttattacattttaacttatatattacattttttaatattgttttttaattaaatgtttttctaattatttattatttaaattgaaaatattttttttttaaaataaaattacttcactaaat

SEQ ID NO: 358232 - DNA, 364 bp, Cannabis indica
agctcggttatatagacccatagagtatcttcttggataggctttgcccctggcatggttgccacagaagccttcatgcacttctatcattagctgttcaacttttgctttgttgacgcacctcaagagaggcatggaaaagctctatctatacattactccgtctaggattagatacctcgtagcttttcttttcagtttgtttgcttcaatttttccttctggcaaggccccaattttgaggttaactgtgataggtgtcatccatgttggattatctgttgggttttgtgccctaaataaaacccatttcaatataatcaaatttatttattaataaagatcagaaataacattttatgtt

SEQ ID NO: 358233 - DNA, 558 bp, Cannabis indica
tgtctgcacggaacaaaaatagtgtggttagcaaacaaccgtcagaaacataaagcataacagtcaagaagctcagaaataagacgaagtaaaatgcaaagtgactgcccaaacaagactcaaaggtccatcgtcacctgtcatccctctgatttcaaacataacaactttccctttttcgaacacaggaggggatggcgaaacaggtggaatgggctccctgatgagaatcgcatgtttaacaggcctgggccgggctgaagttttcttcctcattaatggagtcacctactcttcctcagcttcatctttaggattcaagagctcctgagcatattgctcggcccttgcaccacctttcaacttagcttcccgcttaagttgaataagctcattcttcggatgagctcgttcagttcggcaagcaccagatttcctcttcatccccaccacggatttaggagtaaagtccttgggatagagcccgtacctcacaaagtttcctcagaggtcaactggataatattacggtcttcccccagcagtcgggcaagtttt

SEQ ID NO: 358234 - DNA, 600 bp, Cannabis indica
atatatgtctcattatcataattaactaaaatataataattgaatgaaataaaattaaatattagtgttagttttggctggttaacccgactaaactaaccaattcattgggcgagttaaaattttatttttttcttaattaggtggattgctcttaaatttttgtaatatgatctttatgttgagttgaataaaatgtaacgtaaattgaccaaatcaaccgacgtacacccttaacgtgaatcattaaaatatttttgttatccgattataatatattaggtaatttgcaaccaaactcacatatgctataatttggatatagctaactaggtaacgtaaccgcgcgttgcgcggtcctttcaataattacaaaaaaaatatataattttattaatttatataattaaagttaaaaacttataccataaatagcaagacaaaatataaattataatcttctattatttgataattttttttttaaataaagttttattttcatttttaaaaataattaaagattactttaaattttaaagttttgacaaaatattaaaaaattcaagaatctttcttgcattcattcaaaaatgtaca

SEQ ID NO: 358235 - DNA, 543 bp, Cannabis indica
cacacactctcaattgaagaaggttagacttttgaacaaaaaaaatgagagaggagtgaatagtgatgatcgtggaaatgtgggtagttgagcatatataacacttgaacataattacccaaaaaaaaaaaggaaagtaacttccttaccttattcaccacgtgaggagagaaaataggaaaccaaaaagatatttcaaaaatttgtcaaagattaccataaatggaaaaatgaaacaacatatccccacaaaatctaagaattaaaaatccccataacattcgaaaatgctaccaaaaaggaaaccaacaaaataattaattaaataaaaataagtttccaaaaacactacaaaaaaataaaagcaaatccctaacaaaagtaaaagaaacacaatagataaaatgcaataaaaacatgtttccataaatgaaaaaataaaagaaaaaagtaggccaaaaatttgaaaaattcgaaaaattatgctcccctttttctagaattttttcaaaataagcctcccatattaaattgcaaagaacg

SEQ ID NO: 358236 - DNA, 828 bp, Cannabis indica
gaagcttggttttcttgctttggttatgttctttagggtctaaatagcaggtctggagaatttggtatgatttgagatcaaattgcatgagaaatgaattttttaaggtttcctgcactgaatcagaatttcggttcagtatggcctgtaagaactggaatttcggttggtgtcctggtttcctcccagaaccggaattccagttgtagaaccggtctaccggttgggacaattttgggaaccctagttctttccatttttgtgttgtttagggtattaccatgctttttatcgatagggaaacttttagtttctagtttaagtccctgggaagtgatttagcgtgtcacttactagtgttgtgattgagcagttcgttccactcaggttgaccaacacacctgtaatttgcatgtttagcgtgcatgttaggaagcctgttagattacattagatatgtatgttggctttgtaccatccgagagtatcacatcggtacggctagagtatgactagcgtaccgagcatagggatattatggtcgatggtactgtactatttgactgtatcacatctgtaaggctagagtatgactagcagctagagtatgactagcgtaccgagtataggctgatactgtaacacattggtaaggctagagtatgactagcgtaccgagtatactttgttactctgtcaaaagtaccgtcgtacgaacgttcgaaactcagtaccgtgtgagacatgtggattagggttgtggtcaggggtatgggcgtttgatcataacccgggatatatgtatgttttatgatttatactttcctt

SEQ ID NO: 358237 - DNA, 980 bp, Cannabis indica
gttcatcagatacctgaacccggcagttgcccagttcttgtggcgaatgtccctggtaaccctaagagagtgcaagtaccccgaagtgatatcgcagcccgtttttggcgcaaggactgtccctatgaccaccaaagaaaatttaatcagaaataggctgtctgcctcaacgcactccaacaaagatttctccaaccctgtcaacgacacggtgtactcgacaacgttcaatatctcctccagatatcgagtgtcactatcaccctcggtgactacaggatcccctccgtcgtccacccccataacatctccgaacatcgcggcagataagtgaattttcctcccatacaaatccagtatgctagtggttgggtcaacatgtttgattaaccaactcactagtcgggtgtcaatgtatggtgcatcctctctgatgaatgatccaaatccagcattttggatcacatctttctgctccaggttcaggttcttgcaaatcctgattaaacggttgaaggagcatcgaccgtacacagatgcttcttcactttcaggagcaacctcttcctcatccacctccactttcttccccttggcatcagctgcctttggtttcctcccccttgtttgcactgccttcttagcgggattagggttagggtcatagcttctccactcagacttctcctcgtcggtgaaacctttatattgcactttcaatttgtcggtagcctgtaatatgaggcaaacttacatcaactacagagtacatggaaagaatcttaaagtatgtcaaacaattacgatgaattacagacaattgacataaaaaaattaagtaacagtcgacatcaaacctctttctcagttaatcccttctcagctgctcgaagggctttgtagttcgcattgctacatatggacataatttcaatcaaatatataataaaataaatgttaaacatcattcacacgagtaa

SEQ ID NO: 358238 - DNA, 723 bp, Cannabis indica
tcatcatcaatcgcaaacagattcccataacactctaagtttctctttccacctaagcatgcccttaagataggattttgtctcactgcgctcatgttggctcgataaacaatgaaatcaccactaggggttaaaagagtcactcttttgcgtgaacaatccacaatagcttggtatttagacaaccaatccataccaagaattacatcaaattgccccataggcaacactaataagtttctagataacttgtgtccctcaaacacaatacaaactgacctacatatggtggataccttaccgtgttcccctataggtacactcaaatgtaacgcaggactaaaagtttcccaactcaaacccaacatactagcaaacatcaaagatataaaggaatgcaatgccccagtatcaaataacacatgaacccaagagtgtgagataagaaccataccatcaacaactccctggtcagcaccgccctatacatcatcaaccccaagagcataggcttgagtggacaactttgcttttgcctttcccgttccctaactaggatggcttgtacttgcaccagaccatccaccttgattgtacattctttgactcccattcggagtaggagtttggaaaccttgtgagtaccccatgttgaactctgaaccttgtggcctgaactaatgttgatactgagactgcaggcccaattggggtgtgaaattg

SEQ ID NO: 358239 - DNA, 369 bp, Cannabis indica
caagtatcatataattataactaagagcattgatattgggcaccagtagtgcgcaacaccttttataggtagggcacccttcgattggttagcgatattccctaaaattcttttaaaaaaaaaaaaatcatgtgggacctgctacttaattaccccaatagtaatataatacaaaagaggattgccctttttagcatttctcataactaaaatatcatatctttttttatatattttttttcttttttttaattaagatatataaaaaataataatcactttttaaaaacatattaattaataataacagaacaaactaatgaattttctccaatgtcttaaaaatgttaaaaaaatatttaaaattcg

SEQ ID NO: 358240 - DNA, 950 bp, Cannabis indica
cataatcttaatttccacattctctcgaagaaatctaatctaaagtaaacttaacacacttacttaattccaatcagtgcatatagagataaataaactagggttaaactaatattaccggagcttggttcagagggaagagaagtgggaggcatcaccgaccaatatctctatttagagcagcctgaaaagcttccacatcagcccccgaatgcatgctttcgtccttcgaaaaacaaaacacaattcagttcaaatcaaatcaattttacaaatcgaattcttaattctattccaaaaacaaaattcaaaacctaaaaagattgcagagaaagagagagagaaggaacctcgtcatcttcgagaagcttcttcataagagagggatccatggtgatttgggtcgatcgaagcgaaggagaagaagaaggatgaaggcgccaatatttttaatttatttttaatcaattaataatcaatatatatagaagaatggacggtgacatggcgctctcttctctccttaatttttttttttaatttttcattctttttataaatcttttatctcattaattcacttatcctttaattttttattatattatattttataaattaattaaaaatatcttttaaaaaaatatcgtgtatctatataattttttaaatgggacttttgtcctgacatgtaccaaatcatgccttaaaaatgtctcttaaactattgattgttggatttaaggagttttgtctaatttcattcaattttattattttaatgattgtttatgtactaaaccatactccctagactttgatatctaccaaatcatgtccctcaaactttgacatgtactaaattatgtcctctgtactctcattcatgttagacttttttactaaattgaaaaaaaaaaattcttaagtccaacaatcttaatagttta

SEQ ID NO: 358241 - DNA, 789 bp, Cannabis indica
gttggatttgaagatttctatttagtttaatagaagcttaataattgtgtactaaattgtgtcttccaagtttttatttatatcaaatgtcttttaataaaattgaaatcaaatagaaatcttcaaatttaacacttttaatagtttgaagggaatttatattagcaaaaattagacaagtatgatatgctacgtattaaatttgggagagaaaagtcctaatttacctctaaattgccatcaataatttaatactttttaaaaatattaatataatatacattttgtttttttaaagaataatttaatatttattgcagatatatcaaatcataattaaatgaggtatgagaagttagtatttatctttaaattacttttaattttttaattaatttttataataacaaaaataataaaaatcatgtaaacaaatcaaaacataacacatgttcaattatgtacgtataggtctaccactttggtatttaattttggatatttaacataatggtatagacaataatagaatgtgaatttggagagttttactatcaaaaaatcgatttgtaaggttaaatgtcacaaaatatatattttaggtagttttatcacaaatattccttaattgtattaggataaatagtgacataagtactcaaagttttaattttgtaagtggcacaaactcaatgttaaattttagcagcataagtacccaatattgtaaaactgtaatttttctaatttcttcagtacagactctgttttgaattttttaaaagaaca

SEQ ID NO: 358242 - DNA, 642 bp, Cannabis indica
atgcaaatagttgtgtttttttggtaagatgaatctgttcagttttatgttgaaataggtaagttattcacattcaattagtcggaaatcgagtatatttggtacatatatagatatgctaaaagacattagtagtgtttagcacgtgtcaatattgttattaactaagtattaagtttcctataatttaatataataatttttaaaaagtattgctaaagcaacttgtccaaaagtgctaaatactactggtgtctaataacatctaaaatataaagctacactttgtgcaaaggtgtctatttatgagtgccttattttttgtgggagggatgcaatagactctgtgcaaatggtgtgaatccattaaaaattggtgccttctttatttgttaaatttaactattaatttagtatattcagtcaaaaaaacataaacaattctgttaagacacaaaaaaaaaaaaaaaaaaaacaaaagttaaataactattctataatagaataccgaggactagattaatatcacatgcaatacagtattgtacgtattttagttatatactcaattatattcttactatatattctggttatgtatattttagttatgtaattagtattttttgttgtatgtgatgt

SEQ ID NO: 358243 - DNA, 743 bp, Cannabis indica
attactgttaatgtattatttggttcacatgtttacttcatgatcatttgtttgatttataaattcatctacatcattatcacattgataatcttgattactgtgttgtcaacacagaggaaagtaattaagattatgtgattaaataacttcctacaatttatcagtatacagaatttcactgatatgataatcaataatgtagtttacttacaccttggataagtgctatgtcatttccagggtattggtaaagtaagcttggattggatgtatggagtatacatcagatgagaccgatattgaacatggataagatatcataaatttatcgtaatatctaactaggtcaatatcacacagttgatcttagatcactgatctcaatcctgagatggttaggttctagttcaattgtattatttatgttcttcaatttgtttgttaagttgaccaattatattttcccgtgacatacagattaagaacatggtagttcaattgagtgggagtgctaatcatagatacagaatctatagcttatataaatgcataaaagtgaaatgataatttctttcaagcttggcttaatagagataaatggtagagtactcatttcagtaattatattaatttactaaaatatcatttataggtagctaagtgttttaaagataaaatacattgaagggtagaaccgtaaattcgtccctactcgatgtaaatcatctatagaggatcat

SEQ ID NO: 358244 - DNA, 950 bp, Cannabis indica
ctttttccttaggtagttcgcctatcaagtcaatcccccacactgcaaagggccaaggacttatgatggaatgcaagtcggttggaggttgatggacatatgttgctattcgctgacatttgtcgcatttctttgcgaaagtgaaggcgtcttgtcgcagggtaggcaggtaatatccttgtcgcatgatttttagggcaagggaattacctcctgtatgattgccacaaatacccccatgcacctcacgtagtatatagtcgcagtcttctccgtcgatacacttaagtaatggctgactaaagcttcaacgatataaccttccatcatatatgacatatcgggcagctcgctgcctcaacttccttgcctccatcttgtcatcgggcaagatatcgttttctagatatgcgactattggagtcatccaggtgacttctcgggcagtatctatttccatggtcgcctcttaatttatcgttgggtgagccaatacatccaccggaattacatctagtaattcggcttctctagtcgaggccaaatggggcaatgcgtctacgtgtgaattatgagcacgcggtactcgagacacgactactttcttgaatttttgcatcagttcgcatactatggctagatacttaaccaatctccctcctctggccagatattctgcatttacctggcacactacaatttgggaatcgctgaaagcctgtagatactcgattctcatctcaagagcaagctttaatcctgcgattaaagcctcatattcggcttcattgttagatgcagaaaattcaaaacgtaagcaggatgtaccttaaaattgctgggactgatcagtaggattccgccaccagaaccttcgctattcaaagccccatcgacgtacaacgtccatccttctccattgggtacagcagtgtcaaccttgtcgtcta

SEQ ID NO: 358245 - DNA, 1195 bp, Cannabis indica
gttcactaaggtaatttatagtcttctcaaatgtataaatctcaattgcatgtaaattctctactctcgtgataaattaaacatgtaagatgcattaaacacagaaatcctataagctatctaaaccgtataggtactctcgtcctatatcgaaatttaattccatttcactatagaataatcgacgctcacttctcagatcttgcatcgaaatcataaaacaattaacatgatggccatgcaattaaaaaaacactagaatatttatttatatatataaatactaagttgtatacatatcgaactcactgcattgcttctttttttatactcttattattcatttcatcgatggcttcttttgttggaactttgtgaaattgtataaaaaaaatgaaaaattaagtgtgtgagtgaatggagtcccacgtgggatagaaacacatcattaaaagtatatataatgtgcaagtttgaggtttgggtttgggccccaacccagttttgtgcgcatgggtgaggactcacacattggactaccacacacgcgtgtcgttgccgccgtctgacgggccgagctggaatggtgggcgggtgaagtgtcacttaattttttaaagaaaaaattattttattaaataaatattcatttttatttgtaacattaaatgaagtagtaaaaagcgatcaattaatgatctgcttttcactgccgtgatccaactcctccatgattatattaccattttcttactatttaatcttagatcgacttctctatataagtcatatcaaaacaatgtaaggatacatcctttcaacaacaaaaaaatttcttctttcttacgatttttctcaatgcaataatttagggtataatcgaacgatattgttcgttgtataacatatcgtacacaaagtctgttttatctaggggacgtcgtagttgctagctagactgtcgtgcacactttgggcagagccgtaaaacgtcttaaagaaagcgacattgtctgcgactcagccataatcttctatcggtaattcgatccacctaagaaagttgttctacataacgatgaagaaagttgcttttgttctcactgctctgaagcttgtcgcctctgaagcttctatcgacgaggacaaagaggctgaacgcgagaagcaacaaaaagatttgaactcctgggtc

SEQ ID NO: 358246 - DNA, 510 bp, Cannabis indica
gattcattgtttatttcattctcttctttggtttcaatttcaaacattgcaatgatattctgatttttctaccatttgactggactgactatattcttctctgaaactacaaaagtctattccaatgaccatatatattttggttttcttttatttgttacatattcatactctatgttacttgtctataccataattgaaatccaagtatttagtaattactaaagttttctttttaaacattatagaggattagtcgaccgagcctagtttctatgagaaaagagaagtaatgatttagtttgacaagtgcaaaatgaagcatcagtgatttaaactattgttgaaatgcaggcaagtaaccattctaatccatcaagggaccaaatgattaatgttgttcagcaacattttacttcatagcaggtctctttcttaccttctaactgtttgaatattttatcaggatctagatttactaccaagtatgtatcattaacatcctaatat

SEQ ID NO: 358247 - DNA, 725 bp, Cannabis indica
tcactcaagggttcggtttcagtggtgaagaagaggaagagagagtggcggctaggttaaggagagaaggcactcagttttctctgaaggaataagatgcatcatctttttcctgaagccatcactacctatttatagtcaaccacctagggctaggttagaattatttggcattaaaataatgaaaaaaaataaatgataaaaacctacttaagtggccggtctaggcttaggatattgggccccacttttacaattttgctattttatcatttctacatcttattttctcaaaaacgccgattttccaatttaaccattttaatgcaaactccaactatttaataagtaaaaataattattaaatactattgtcatttaatatatttattaattagactagccaaagtctcttaattaacaaaaaagccctagtaactatttcttcacaattttgcccttgctttgtgaaaattcacaaatgagtcttacaagtagtattgtctcaactagtatggggaccatgagactatatatctgagcttccaataagcagaccaagaacttaccaagtaaattcactgacttattaattccttgttgcatccacgcatagaacttagaataccatatagatacgctatcaattatccatcattataatcccaataatccatgatcctctatagatgatctacattgtatagggattaaattactgttac

SEQ ID NO: 358248 - DNA, 706 bp, Cannabis indica
ctaaaaatatagccactggttgccttagagtcatctgataaagtattccaatcagcatcactgagtacagctggaaacttctgataaggtaatccaatggtcaatgttcttttgaggtatctcatgaccctctcaatagcattccaatactctgcactaggtctactagtaaacttcaggtctagtacaatcagtggtataccgaagactgccaatgatgctcacatattagattgtcttacactatcaccagtgttcttaaataattttatattaggatcatatggtgtacaagcaggtttacagttaaagtaattatatttctttaagaccttctcaatgtagtgagattgatccaaagaaattctcttttcagatccattacgccacaatagaaacacttgccttttgcctttttgtccttagacttgagtctaactttgttcttcttggccttgggtgacttcttccctttgggccttccatcattgttgtccttactgttccacttccttttcttatcaaaagaagaatgagagttggattttacttcagcgatgtttgattcaccttccttggacttatccttgttaagttcttaagcacggtcaactcgttcaacaattaaatcgtgttaaactctagcttgttcatcacgtagtttatggtgaaagccttgaagcaaggagatagagactcaaagatc

SEQ ID NO: 358249 - DNA, 773 bp, Cannabis indica
aaaaaatttgactaaaaaattatttcggatgctaaaatagataggggtgcatcaatatatctattttaaaggagttcattgtagaattttccaaagtataagagcaaaaaaaaatttggcttaagcggattagctactcaatatcagagccaggtttcgatcctgggacctgtgggttatgggcccaccacgcttccgctgcgccactctgatttgtgatatttgttgtatgacataatatttaacataatttgtatgtatgcacttttcttcgtataattgttcgtgttttggagtctggtccttttacctttaagttttccaaagtgacccgtgaaagaagttatttggaaaagattagataggttctgtctttatttcatttaaatttaaagtaataatgactttgtttttttttggaaacctaaagtagtaattacttaaaagaatgttcaatctatagaatgaatataccaattataattataattttgtctctttaatttttattttagcatttaaatactcaaagcttaagtttaaattcttaaaagaaaatttaaatttcctaacgattattccccctaacaaaatttaaatttattataaatataaaaacacatgctccacatgaatgttaccatatatgaatgtactaggtgagtgtaggtgccgagccacgtattgctagtttaatttaagatattttttaagattttgaatatattttatttttaaagtataaaatttttttgtttgaaaaaattaaatat

SEQ ID NO: 358250 - DNA, 814 bp, Cannabis indica
cacgtggacttgaatttattgggaaggtttattaatgagtattttatccattgttatttgttacatcatttcgaatacgtaatttatataaggttgcttctctccttttatttaaggggaaacaaatgtatatttatgttagtgaaagagtgattggttatatttcataaagaaaaagagagagagaagaagaagaagagtagttggtcccttacgtaaaaattgaaaagaaaattaataattggttgaatatgtattaatgaatgaagtatataaaattgactagccatattttacgaataatgatatattgttttgctgcttcttactttttatcattttaatttctaattccatataaactaacaaatgttcttattagaaatgacttcttaataataaaaaaaaatagcaatataagttaccagcattactatccaataattacaaaacgggaagaaaaaaaagtcattaaccaaaactttccatagttgtcaactttggccatgattgggtaccccattaaacaggcataatttaccatcaattggctaaatatatttgactttggccaagatttattgtccatatatataagcatttttataaagtagtcatgtgcttaatattatgataaaaggtattttcttataattgattaaatatattaaattacaacaataataatattacacttcacatatttactcattaatttaatccctaaaactcctgaaacctaaattttaaccgtaaaacccctaaaacatgcatcctgtgtccacgtgagaaaagacgagagagagagagagag

SEQ ID NO: 358251 - DNA, 837 bp, Cannabis indica
ctttatccactatgtgccctaggcaagagacatatgacaaccaaaactcgcacttcttgaatttagcatagagcttatgatcccgtagtcgttacaatgctgatttgagatgcagttcatattcttcttcatattcggcaaaatccagaatagcatcaataaacactatcagacacttgtctaggtaatccttgaatactaggttcataagatctgtaaatgctgctggggcattggtgagtctgaaagaaatcaccagaaactcataatgtccataccgagtacggaacgcagtctttgggatatcctcttctcaaattctaagttgatggtaacctgagagcaagttgatctttgaaaagaacatcttgcccttcagttgatcaaataggtcgtcaattcgaggtaaaggatatttattcctaatagtaagcttgttcaattgccgatagtcaatacacattcgaagcgactcatctttcttcctcacaaataatactggaccaccctagggggaataactcgatcttttaaattccaagttaagcaactcctggagttggatctttaattctttcaattctgcttgagccattcgatacagtgcctttgatactggttccgctctcggaactaactctatcacaaactcaatttctcaggaaggtggtaatcccagtaagtcctctgtagatacatcaagaaattcgcacaccaatctcatatttttaggtccagatgacacaggttggctggtattcactacattgactaggaatcctagacaacctctgcgcatcagatctttagcttttaggagtgttattctaggtatgc

SEQ ID NO: 358252 - DNA, 662 bp, Cannabis indica
aatattggtaaaatatgtcattttttccttaacatctcattctacccctctcatttgaacaactatctctctctctttcccccttctctctctcgctctctgtaaacacgcacacggaggagcacacaatcgacccataacccactacccacaaccttggtctcttctctccacgacaaccatgaccacatacccaaagacccacggacccaatgaccaccgtggacccaatgaccaccgtggacccaacgacttctccatcaatcacggcttcaccattggcaatgttatcaaaagaataaattgtatgatcaatgtttgttatatgtgagtaaatgttatacttaaggttaaaaatggccagatctaagttttgggcaaaaaattggtatttttgtcaggcccgatagtggcccgatggtagtctcatagtggtctgatgccttcttgttgttaaaatgagtaacgattgaagacgaaagtacgatggtagtctgataatagcccgatgatggggtttgatagtggtctgatggtggcccgatgcctttctgacgagcttaatgaatggagcttaacatctataaatgtagatatggtccgatggtagtttgatggtcacctgatgctactttttttttatgtataaaaatataaaaaaa

SEQ ID NO: 358253 - DNA, 936 bp, Cannabis indica
cactagcttcattcaaatttcaaaaaataaactcaataattaacccaaaaaattaaacaatctttacgattaacccattcatcacccatacaggcaaacacaacaaaagcctctctctctcaatttcacctactgaaacagaatgcaatcatcagttgttaattctcattgcttttggtaaaatttacacctttaatacttctttgttacttttgttgtgctattttgagtgaaggtggctttataatgagcagatgaaattttaatacttctttgttactttataatcgagactttgagaattgagggttccttctttgtctaatttacacacgctttgcttattcttaattttgtaatatttgtttttccaggtcaaatatgttcttgctgctattattttaagaactggaacaaatgcaacatatattataaccttattattattgtttccaatatgtttttactggacataaaagtttaatttaaatttattattcaaatctctctaaattaaatattatttattttttattcatttatttccttccgaactcataatataatacttaatataaaacatagcatacgtgcatcgcacgtaacaatatactagtatatatttaaaaacattaaaaataaaacttttatctaacacacacttaattattataattttttaaaagaataaatatgatttcaccctagactattatctttataggggattcactactacaatattagcttttagaggcagttttttcaaccccatttataaaaagggaagctaaagggtgtgaaaatacccgctatgttcgaaattgacatttagaggcggttttttgataaaaaccgtaggtataaaattgcattataccatttagaggcggttggaaattaattttttttttttctgaactaccctatggcgtc

SEQ ID NO: 358254 - DNA, 1037 bp, Cannabis indica
tttttgacaaaaaactataccaattagtctaaatagtaaaaaaaccaataaaaattaaagtaaacccaaataaaagtctaccagaagaattttgaaactgtaatagagaatatactctcaatcaagaaagatattatttattaataaaaaagacccgtaaattacgattaattaacacataaactacataaaaatatcttctctactcgtaattagttaaatttaagagttacctaaaatttgaatgaacagaaagatttaacttttttttttccatttcttcaatctaatttgtttacttttcctaaattaattgatgatcatgtgactcattagaaatagttatacattattctaatattttgctctatttttttaaaactcttatattaatataaaattaatttaaattttatacttcaagtgaaaaaaaaatacttattttcaaaataaaataaaaactgtactcttttcttctttctttttttttttcttagtgtaatgcagtctttataattttgttggtatttttttatgggtaaattctattttaaattttaaattttgtaaaatttattgattaaaccttatgtttcttttaataaattaaaccttaggttttgttaaacgacaaattaaattttatatttttaaaatagtacaaagtagtacatggactaattttttgtaaaaataaaaattaataataacccattttctgcatctgtttttattctttctaaccaaacgccgtcaaggatcatactatgaaactataatttgtatctcaaatgagaaaagaattgttcgctattatgtgcaaaaatctcgtcaaagtgattataaagactcaacctttagtcgaaatagtcagactcaacgaactctgaccgttaccgccaccattgctgacgacccaagagttttggtatgttgataagtaggggtagacattcgatccaatccaacttttatttttctcacccgatccaatccaatcaataattggatttggaaaatcatcatccgatccaatc

SEQ ID NO: 358255 - DNA, 996 bp, Cannabis indica
agtcgcctgcgatatggggccctccaatgatagttaagatattgcgaggcgttctcgaaccactcgcgttttgattttcttccttgtcatccgctcggggatgaccttcctcgttcttcttatacttatcgaattttcctctccgaatcagctcctcgatttcgtcctgcaagacccaacattctaaagtggtatgaccaatatctttatggtacttacagaactttttggggtctcttctgtcgcggtttcccctgatggggggcggcttcttgaagactccattcctctcttcaatcgcataaatgtggtctcggggcaccgcgagttcggtataattaacaaaacgcggtccacccttcctcttcggagaggactccttcttgggaggagatttggccaactttggacttcgttgtctccgtgggctgcgtcttctcgggcttcggcctctggaattcttccctcggggactgcgagatcttgatcgcggtattggtgatttacgtttatccttgcccttctccaactctgccagagaattctcaattctcttatgaggttcagccatagcgaagaattcgactagcgattctggccttcgagcttgtaactccttccagaaatcggttctcggcaaaatacctgttatcaacatgcaaacaagcgaagactcgggagccttctcgacttttgttacttccgcattaaaccgtttaaaatagtcttgtaaagactcaccgggttcttgtttgatgttggccagagttgtataaggaggcctataggtcatcgtggcctgaaagtgcgtgaggaataagtcgacaaaggtttcccatgtcgatatcgaggcctcaggcaattgggtaaaccaatcgtgggcgttttcctcgagcgttgccgcaagagtgcggcattttgcaagctgtggtacctgatccacttccattatagtattaaatttttcaagataatctatagggttagaggtacctt

SEQ ID NO: 358256 - DNA, 668 bp, Cannabis indica
atctatctattttctaggtttaattactttatcaagacatcatgatgcctcgtttagtagtttcctagcacgcgaaaaccgttagtattcaatttgtacgcgagttataatttttgattttccactccgtcagataggttataaatcaaaaattatagttgtttgatcccttcttcgtcagaaaggtttgatcaaggtgttataacgattctacccctttctcgtcaaaaaagtttggttaggctgttataacggttcgactccacttttgtcaaagaggtttggtcgagaacctttgaatttaaaaaaaaaaattgaaatgctggatttgcattatacaatgtatttccagatgaattcaagttagtcattcataaatgccccttaagtaattttaaagaatgagactttgtaattacttaatataaatgattccctttattcataactgaagtttaagggttacatcagttatgcgagttacatcatttatttattgatagtagggtcgcaaatgttctacgttccagtagttggttattagcacgccattagaccgagccaatttacaacactccgactctaactactgcttcgatgacatatggaccctcccgaacttcggggttgaacgcactccctactacgatcgcatctctcgtatttgt

SEQ ID NO: 358257 - DNA, 483 bp, Cannabis indica
tttcaaactttgagacatatttagtttttattttctactaggttatgtttttttttaggtaggtttatcttttatcttttatgaattatgaatgcataataaatatttgtgagaatattggtttaatttatttttttcaattattttaaatttaattttttttttattttaccttaatggatacccgatgggtttcccataaacgatgggtattcccctaccccgaatccgttggttattagacggggatgggggtataaataagtagcggggatagggccggggattgcattccccgtacattaaccgtccgatttccatctctagttcgcaggttacgaattgactcgatcaactcttaacttttttaaaaaaaaaaaataaaaaaaataaaaaaaacccaaattgtatatggttatttctttatattaacttaagtatatatactgtaatctatattctttttaaaattttttttttttt

SEQ ID NO: 358258 - DNA, 528 bp, Cannabis indica
ctaaatatgaacttcaaaaacgacatgaaataaacacacatgaagtattagaaaccttacagtggttgcagcggaatataatgtctccttccactcatatctctaacccttgtatcctttctgtagcagagtatcaccaagatctgagtccgaatctccttctcttaaaactggattcttcacagccttacacactctggttgagtactacttgatgtttgtcggcactcactcttttcactatgtggcttcggttttgaagagagaaagagaaagagatggtttcggctagggtagtgaaggaggctttgaaatttttactgaaggaatgagatgcatcatcttttcccttaagccatcactacctatttataggaaaccacctagggttaggttagatttaattagcattaaaataatgaaaaaaatggtaaatttgccatagaatggtcggccatgaattggtattgggccccactttgcaattttgccatttttctcattttccttcttattttctcaaaaacg

SEQ ID NO: 358259 - DNA, 486 bp, Cannabis indica
gcattgtaaaaccggttagccggttttacccagaaaacccaaaaaccacccaagcctaaccaaattatttccaaactcaaccaaactttccagacctgcatattataccccaataaactatttccaagcaacaaaacaacaattaaagctcagaatcaaatttcaccatcaaagctccaagtttgagttctaaaactcaaaacttgtttaaacttactaacagcccttaaatcatgctcaaaacaacatttgtaaacatatattaacctctgaaaactatatcaaaccctaacagcaagaacagcaaccaaaacaccatttcatgaaaaattccttttcttacaattcaataaatcaaaaaggacgttactaggggttttaccttggcttggattacactatgagctgctaaaaaaaacacaaattgctgagaaaagttagaaccctagctggttccaagagatttgaaggagagagagagagaga

SEQ ID NO: 358260 - DNA, 1324 bp, Cannabis indica
ctgtgactactgaaggactagcggcaacatctgcctgtgtgatggcaaatacacgcgcaggcttggcctagcttcaggcttaggttcttctttcattaattggggacaatctttcctgaggtgccccagtgacccacattgaaaacaagctctccggttacaagtcgtgggatgatgtttcttgcagcgtgggcactcaggataggagtaattccgacgtccccctttattttggtttcctcgaaacctcttaccttgccctgaactccacaaagatgggaaagttctcttcttttgctcaaaagtgaaatcaccactctcttttccagggctaaaaatagggagagtagtggtcccactagcaccaggagtctctcaggtttcttggaaaaacttgactgctccttcagctcgaagagccttatcaaccattttagcataggttgtagtatcatttgttgtgataaccatatcatgcttaatcttggaatgcaaccctgccatgcacttttttactaaaatccgttggtacgaacccacaggctaacttagccaagagatcaaacttggttgtatatttagtcactgacataccctcgccttgtaccaatttgacaaactctttccactttgcactgtggaccgcctcattatagtacttagcattaaaaaaataccggaattcctcccaggtcattctagcaacatccttggtgagggataccatctcccaccacaccagggcatcctcctgaaattgaaacatggcacatgccaccctatcatttccaacaactcccatgaagttcgatattctttcaataacagtcagccattgttcagccttaagtacattagggcctcccaaaaaaactgaatctctcatataaaggctccatacggttaccagcaacttgttgctctgctggcaccgtaggaaccgcagcaggcagttgcaggggaagctcaacaggagcatcccgttgcctgagtctccaaatctcatcttcttgttgcacaattctggcttgcatctcagtaaacctttgctcccaatcagccggagcctatggtggatcctcttggccacctctcggagcacgaccgcggcctctaccgcgtccactggaattttggggatttctaccaccccgactacctccggtctcaaccattttaccctgccttctgacgtttcactgggcgttcattattaggtcttaccctgcgaacacacaaggcatgtaggttagacagtggtcaaaatatcttaagaccgcattgaggtttaaacatcaattcccacatatatgcaatgtatctt

SEQ ID NO: 358261 - DNA, 528 bp, Cannabis indica
tttatatggactttttatatgccatatttttgtaaaaaaagatagaaatctcatatttgtaaacaataataagtttttccagaaaagtcgccagtcgctgacgtcggaaaagtcaccagaaaagttagtgtcactgaaaaagtcaccgtcgctggaaaagtcatcgttgccgaaaattcaccgtcgccaaaaaaaattactggaaaaatcaccagaggtagatgtctcaaatataaacaaaaaaagaaccggctctacaatataatgaatgaaaataaataatacaaaataactcaaagcggttataattgaaatataactggttttgtaacataatgaatacaaaattaataaaacaaaataactcaaactaattataattaaattagaatcggttctataacaatgttatagtgaataaaaacaaataacacgaaataactcaaaccggttataactaaaatagaatcggttatataacataatgaatgagtatttttgaggtagatatggtatgagtgtaattat

SEQ ID NO: 358262 - DNA, 748 bp, Cannabis indica
ctaaagcatagactaaaaacataatcaaaaagtttgaaaaaaattaaagaaaacacttgggttgcctcccaagagcgctgtctttatcgtcatatagccggacgctgagccttgtacttcaaagtggcgccagaatcatggcggacttggcttggtcaaattgacctcccaagtagagctttaaacgctgtccattaactttgaaagttgctggaccatcaccttttaactccaccgctccataaggaaacaccttgaccactgtgaatggtcctgaccaccttgacttcagctttccaggaaacagtttcaaccttgaattaaagagtaacacttgctgcccaggttgaaactccttccttactagaccttggtcatgccacttcttagttctttccttgtagatttttgcgttctcataggcttcatttcgaaactcctctagctcgttcaactgtagcagtcttttctcccctgcagcttttagttccatgttaagagtcttcatggcccaaaaagctttatgctctaactccaccggtagatgacaagcctttccaaacaccaaccgatatggagacatgccaatcggtgttttgaaagcagttctgtatgcccacaatgcatcatctaattttcttgaccaatctttccttgatctttgcactgttttctctagaatcatcttgatctcccgattagaaatttcagcttggccattactttggggatggtatggtaaagcagt

SEQ ID NO: 358263 - DNA, 491 bp, Cannabis indica
cctaattgttttttcaattcagccaactctgcaggtgccatgcaataaggcgcaatagaaactggttgagctccgggaatcaaatcaatgcaaaactcgatctccctaccaggtggtaaccctggtaaatcctctggaaacacatccggaaaaccactaaccactgatatccaagggaactggtctaaattcctagactcatcatcgatcgcaaacagattcccataacactctaagtttctctttccacctaaacatgcccttaagataggattttgtctcactgcactcatgttggctcgataaacaatgaaatcaccactaggggttaaaagagtcactcttttacgtgaacaatccacaatagcttggtatttacacaaccaatccataacaagaattacatcaaattaccccataggcaacactaataagtttccagacaacttgtgtccctcaaacacaatacaaactgacctacatatggtgga

SEQ ID NO: 358264 - DNA, 708 bp, Cannabis indica
gcaagttcatttttgagcactcaaggccctaaggccccgagcaccctagcccctaggttgacaattcgtcaatctgagtgccttctaagtatcagatcaacgatccaacttttgcatcttctttgtcttccttaaaaacagagaaataggtcattttgaagaagaaacaacacttactaggtgccaaaagtaagatccaacacccaggttcacattttgtcaacatgggccatttttattagatttttgaagaacacttccgagcatcttctttgttttcaaaaaaatattgagattcagctattttcgatgaccaaacaaaatttttaaagggccaaaagggggacctagcgcctagattgacacttggagttgggccctacgcccaagttgacatattgtcaacgtgggctatttccaatcaagttcaccaaaaagtgtttcgagcatttttttttaatcatcataaataatgaagaatcaagcaaactcgggagaaaacaacattctcgagaccctagaaacaaggcctagtgcccaggttgacctagtgttgggcgcagcgcccaggttgacaatcaacttgtgatggtgccttcaatcacacaaatgccaaatctgatgagaccattgaattcgcaacggtcaaaaatagggtaggagaccttgttctcaagtttagaagccttggaagtatcaaaacaagat

SEQ ID NO: 358265 - DNA, 662 bp, Cannabis indica
aaatagggtaggagaccttgttctcaagtttagaagccttggaagtatcaaaacaagatcccgagagcttgagaatgggtacccagcatctaagttgaccaaagggcctagggcgctgggttatgcttattcgattttgaatccgtttcaactatccgtctagtttttcacaataactaggaatccatgaagttagaatagttaaattcataacttcgtatttctaatttctgagatgggaaactcacttagaaatgaagagttttgagcctctcattttcgtagaacaacaacatctccgagaactgggtgatcaccatcgccagaatatataaatagactaagtagagtcaaaatatcacttaggaatcttaaaggacattccttggatattttttcacttatttagcatccaggttgacatcagatgtcaacctgggcgctaagatgtcaatgtgagcgttgagatgtcaacctgggagttaggtcctgaactgcctttagtaaaacagtcataacgcactcaatattgatctgattgacgcaatttaatttgcgtttttgaagttatttaaatgctatataaagccatgtctcacactccaattgcaattctgaagctatcatcgtcaaatttacccccaagggagttacaaaaataa

SEQ ID NO: 358266 - DNA, 609 bp, Cannabis indica
ctatatttagtattttattatcccattagaaacagccttagccaataaatgactattggagtgttcccgttagtcgttaagtgtcattctcattgatgttacccatccaattgatttcgtatgctattacatcaccattcgcctttacaaattctgtaatattacccaaattcttttaatatataatcttttggtccaaattttaaaaacaaaataaatagcattaccaatacttttataaataatacattttccaatatatttttaatatgatattagggcctttaacaaacacagctacacatccaaaacacaagtgttttttgtcagtatcaatataaagaatatgggagaagtgaaactttatggtgctagggcaagccatttcagtaacagagtaaacatagctctgaaactcaaaggtgttgaatacaaatactatgaagaagatctgaagaacaagagtgcttcgctcctcaaatacaacccaattcacaaaaaagtccctacctttgtccacaatgaaaagcccgtagcagagtcacttgtaattcttgaatacatcgatgagacatggaagactcaccccatcttgcctcaacaccctta

SEQ ID NO: 358267 - DNA, 788 bp, Cannabis indica
atgttgaggtacatcactaaaatttaagtagttcccctgcaataatgtgctcacttcgacacccaacagtcggatgaaagcttggttctccaagccaacaaattttcctgttgcaggatcaagcgtaagcggcaatggcccttgattcgcccgcctgcgagtctctaatggtatattactagcaacaccacgactttttcttttgggcagtggtgttgcctcgcaagttgagggtaccctactaggatctggtggatcaaaaccatcaccgtctcccccgtgagaagaagctatattggctgacattatgactctttaaaagcaaagttatattactaaattagtatgaatgtaaattagcaaaaaaatatttatagtttgaattacaattaacataatcaaattcatcacttataatattactacaaaaattaaaacataagtaaactaatagtcactatcacactcatcattttcagtaaacaatatcatcttcacatcgatcaattagcaactcgtcaccttcatcagttattacatcatcaacgtcaccatctacagcattttcatcagcctgattaacattcaaattttgtgtagtatcaattatgtcgccacttcagaaggttgcaaaattaactctcttagatccacagtcaaccgaaaatttgagcagcttaaatcatgtacaatatcttcatcatcttcatcctcctcaatgtcccaaaatttgtcgatggtttacattctcgtatatttttccaatgtctacctctaagcaaatcatc

SEQ ID NO: 358268 - DNA, 610 bp, Cannabis indica
actttttgctaaatgagctatattttaactttttcaccatttatttacacatccattagagatgctcttaaaagggttaagtgcacactctaatactaaaattttattagattttaatttgttattcgtgtttttgactgagacttgcacatcatgggacaaaaatttggaaaaggtaaaaacctattttcatcatttccactctttcagagcatctcccaaatcagtgatgcaaatacaaaatatagctcactttataaaatttctactccaatggtgtgctaaattgtaatgcaaatatctcacaagacaaaaattgattcaaatttgcatcactttttagcataatgtaaaatttgtatcacaataaatgcaaaactttcatatttactattatgtcatttttaatatttttattatcgaattttagttaaagtctaccttcacattaaatgtatgaatttttatattctttttaggctaattaggatttttgcctctagaacttttaaggttgttaaaaatgccccctgaactattgagattgttggatttaagtgttaggttttatgccctaaataaaactccatttcaatgtaatctattttat

SEQ ID NO: 358269 - DNA, 924 bp, Cannabis indica
accaaagatttgtaaacaaaatgtttaaagatcagatcgggcgaaatatggaagtatacgtcgataatatgcccgtaaaatcccgaaaggttggggacacatagacgacctggacgaatgcttcaaagtcctcagaaaatacaacatgaagctaaatcccttaaagtgttccttcagagtcagctcgggaaagtttctaggcttcatcatcaatgcccgaggaattgaagctaatccagaaaagattcaagccctcctgaatatgaactcgccaacaaaaaccaaagaagtgcaaagcttaactggtcggatcgccgggcgtagcagattcgtttcaaaatcaacagacaaatgtgtcccattcttcaacatcctgcgaggaaacaagcagtttgagtggacagaagagtgtgaaaaagctttccaagggctaaaggcacaacttgcaaaacctcccgtactctcaaaacctctggacggcgaggaacggggaatatacttggctattacggaacatgccgtgagtgttgtgctgatcagagaagaaaacaatgtacaacacccagtcggttacatcagtaaaagactcattgaggttgagggtcgatatccgttaatagaaaaactcgcctactgcctcattttagcaacaaggaagttgaggccctatttccaagctcatcatgtttgggtatataccgacgagccactacgacaaatactgcaaaagctagatgcttctagatggttactcaagtgggcggtagagttaggccactacgaaatcactttccaaccctgaacaacaatcaaaggccaagccttggcagactttgtggtagaatgcacaggcaagaaagaaagcataccagaaagcgaccccgagccggtacaaatacctcagccaagtcacaatgaggacaa

SEQ ID NO: 358270 - DNA, 630 bp, Cannabis indica
aaaatctcaagttataccaactgtgattgaccatgatctggatgaaatcctcttcaccggcacatctccacctcagaatcttgtcaatggagctgtaaactctgagtatactctgtggaaaaagaaggatcaattactgctttcatggcttcagtcttccatgtccgaagtcattcttgcatctgttgcaaatcatacttcgtcacactctatttggccgaccactacaagaaaatgttacattaccggcggactataaatccgctgctaatagtagggttaattttttaagaaaataaaaaaattagtttgcgcgggaattgtctcggtattaaatttcaaatttattagcagcggactattaccggcggaagtctgccgctaataatattaaataatattttaaaaattacattttttattattaccggcggatcctattattactggcacatctccgctcctaataattttatatatatatgaaaaaccgtatttttgcaaatgtcaattatatatataaacagtatgtttctgcagaagcagaaagtaattctgctacagcaaaatagaacaggcagaatataaaatatttgcagaaaattaaataacttgacacaagagatttat

SEQ ID NO: 358271 - DNA, 791 bp, Cannabis indica
aataacataaaattaaaataaattaaatatttttaattaaaataattatataattaaaatcataaaaatatttaattaaattaagtttacatacacaattaaaggcttaaaatatacaaatttaggcttttatcagtgcttgcctcacaaagtaggcaaaagagttatgcaaatctgcagtgcagaaatatagaatttcaagtaggagaacatgtaaaccatagggtgtctctgaagaaggggatcatatgtttcaggaaaagaggcaagttatgtagtaggtttacaaggccttacgagattcttaggaatgttggactagtagcttatcgtctagccttgcctctaaaactttcagcagttcacaatgtgtttgatgtatccatgttgcgtaagtatgtttcggatcctgctcatgtgctaatgtatgagaatcttaagcttcaaaaagatcttttgtaggaggaacaaagagttcaaatcttggacagaaaagataaagttcttcgaaacaagaccatagctttggttaaggtgctatggagaaacagtaaggtggaggaagccacctgggagttagagtccgacatgagggctcaatatccaaagttattcaggttatattttgagtacgaattccttttaacgggggaaaaattgtaaagaccgcttaaatttaaattggaattaatagataattagggcttaattataaaattacgatattaattatgaattatcattttatggagatttatttaaattcaagatgtattatttatgccatatat

SEQ ID NO: 358272 - DNA, 1118 bp, Cannabis indica
gcaagatttttaataagacagttattatggacatccaagggggagtgttataaatattaataattatgtggatgtccaaatcttttatttattaccattaattgtaatcaacattcctctttttcttagtttccctttttcttagtttcttaatatctcactcttgtatttgtataaataggggttcaccccattggaataaacaactcagaaattctcattcactttctctttctctcttcatcttcttcttctttcttctcatctactttatattattttataacaatttcaatattttaaaataaaccaaacaaaggaatagaataaaagttgtttccttcctattccattctctccaatactaaacatcacctaaatctcataccattgttggtacaattaaatatcaaattttatataattacataattaatatcatagtaattataattttacatctaaacacacatttataaataaattttatgaagtgcaatgtataaaaatattttgttggaaatataaactttaaatagttggcttcccggcctgtcctggctttctgcccctgtccacatacaacaaggcaaaaaaaaaaaaacgattttgtatcctaaaggtgaccggctaaccattataaactaataaccttttttcaaagtcaacatttaaaaacgttttactcaacaatgatcttgtcgatgtatacagtattatactttatatatgtaccaaatgttgaagaattgaactcatcaaacactttactgtttcttccatcttttattgttttatactcaattttttcactcattcataacgtaataaaactaataatcttggggcacaagttggttggtttattcattcaacaaacaacaatacgttttgttttttgttttgcatggtaccttaggctgatggattcgagtacaaccgaatgccacaattgacgattgtatacaattaaaatatttagaagaatgggtattaacgagctatttaatttcgttttatttgttttttttttttttgtaaaatataaaattgtagggttaatattattttggacccgtgttttgtaaaaattactaattgaactctctgttttgtta

SEQ ID NO: 358273 - DNA, 545 bp, Cannabis indica
taagaaaagctagaactattaacttaagtttgtatttttgatagctattctaatgtgattaggagtggactatcatgtggtcattaagataagaaagtatttgtttcaacaaataagaatatgactaaatttgaaagcaaagtagcaaagtagaggagatattttcaattccaaagtgttctatcatcttatcctatataagatggtcccacttcctctattgtattgacacaatcgatgaggacatactattaatgttcttacacaaaaagtcatggtacgtcatcgtagtgggagagttttaaagaacccaccctgttatgacttggaagacacttgtgatagaaatccattgtcagtttaaacaagtaatggatagtcaaaatatggaactaagaagcaaagtcaagagaactgtggttaaaaccattcacatggagtaaccaaaaagttttctattacaatggacttaacaaaacttcttgagcctagtatcataggtttgagattatttaaacatatggcttatggtatacctggtaatt

SEQ ID NO: 358274 - DNA, 423 bp, Cannabis indica
agatcctaggtaaaaataatatccaacatagagttgtgtttctcttctattttttcagatctcgatgtgtgctcgtggctttctattcaggcgtcctggctccaatgcacaatggctcaatagctttcggagtgttgttgacatagagactagactagggttttacccaaagggatgtgcttctcttgtcctagcaccttcaccgtttagaaccacaacgggtggttgtgtggatttttctcgtcgaaagttggcaatgctcctttgctaaatgggtattacccataaatagatattattaggaaaatttaagtttttatacttaattttttttatttaattaaaaatacatatctaacttttacattatatgggctgagatcgttccatcaactagaaaaaaaataaataaaacaaaaaaag

SEQ ID NO: 358275 - DNA, 596 bp, Cannabis indica
aagttcagtaagttcacaatagagtcaactactcttaacactgaaatgaaatatcacaattgcaatgtacaatcaatttcctcgtaacacactacacattctaccttaacaaatgaggatgctgtaaatgtccatacaacagctataactttccataccattatactttctttgtataaaagaggaagttgtaggtgttcatatgacacttaatcacaaaatagctcctcctagaatcataaatgcttataagtggatttcatcatccatgcaccctatccaatcgagatcagtaaaaccaacttttatatgtcacaatattagtttgtcgattgtcaacaaatccttggtaccataaggatgatagctcaagtaccaatccaacatgaatgcaacagatatcccaataggaatgcatgtacttgagcaaaccctaggctgccttcaataagcatatatatgcatgggacaatttcaatgcttatctctcgttattactaatatacatggactttaggcctttcataacaaatcacactttagactatttaaaaattctcaatgaaatcaaagcattaatcacaacactagttagt

SEQ ID NO: 358276 - DNA, 599 bp, Cannabis indica
gatatataatgactatgatcctcgatgtcttctcttgtaaacatcttctccttgagtttaccgtagcttgcttaagaagaaaatagatcgctaaatcattggtccctctagcaacactaaaaccactagcatcattggtccctctagcattaccggttccgtcttgatgaatatatactactagtaccaggtgtttggcaattttctctatgggacattcttttttgtatcggttgtctgggtggtatttggtacgatagtagagtcaagttcaaagatacagcagtagggacatttatatcttggtcgtctcttacatcatcattgccctcaacatagcattcagggtctggaccatcataaaaactatcaataaagggcatttgtgctacaatgccaacagttagcatcatactgtttaattcaggtaacacattggctgccaatacctctggatttgtttctagaaaaaaactcccaacctcgctacgagatcgatacaaatattattctttaacaaagtcacaaataagggagtaaattcatctagcttcttcgcaagcatagacaaaaatgaccttacacgcttatcatttcca

SEQ ID NO: 358277 - DNA, 628 bp, Cannabis indica
aaagaaagagtgcagagtggacagatatccatagagcacattgggaaaaactccaagataccggatccgctcataaaaggattaccacccaaggtctctcatgggcacactgctcatatggatgtagtattgcttgaggatatcatgatttagtgggagtttgtattttctttgctttatgtttgtttaagatatttatgtatttagttatttttcttatcagaaataaagtttgcagttcattcactctgttttgtcatgtttaaatctgacctcactttggtttaaggaggaccatttggaaagaggcatgttttgttcacattgcatgtaatttccatgctacacatctgtaacgccctaaatagttaggcacgctacccaatatacttatgaaaccctaatcctctaatcgtgattactaattaaattagcgcagaaattaaactttaatgacaaccagaatgaaaataaacttgtaatactttttcactttacaaaataaaagatacatgtgtcgggatcccgaaagtactttacaaaatattattacaagtgcgtttcttctagctgacctaagcggcaaaacaaagtacaaaatacatcactggtagaacccaacccgctt

SEQ ID NO: 358278 - DNA, 874 bp, Cannabis indica
cttaaaacactctaaataaacttatacaacttcagaaaaacacacccacttgaatttaaaacatacagcccctaattcctaactaaacaagcatcaaacctaactttactaaaaaagaaagtccaaaagcaaagttgaatgatatacctccaattaaagcttccaacccacctaaaacttgttgaattgagttgagaaaaacaattcccagctgattccttgctggttcgaaagaaaagagagaaggagaggacttggtgataaaggtaatggctctttttggttctttcttgaaggtcaaagactaactattcatttgactaaaagaaaccattaaaattataacatttctcagccaaaaataaaccaaataagacaaaagaagtcttgacaaaagaccttcttacccctccatttaaataaaataattatagcatcccaagggtgaaatggtcaaaaacaaccaaaccccgaaaactcaatacttagcgaaataccccgaacaaataacgtacatcaaaatataaaataagactctctaaaggccccaacgccgctttccacagcttccaaacacaacacagaaattaggtaattaaatgtaaaataacataaaaacatatatgatatattaaatatatttccaaaatatacatttcataattattaattaatctcatacataaatcttaattatttaataattcaaggtattaaccatatgcggtctttacaattatccccccgttaaaaggatttcgtccccgaaatctacctgaacaactcaggatgctgagccctcatatcagcctctaactcccaagtggcttcttccactttacttttctccaaagtaccttgaccaatgatatgg

SEQ ID NO: 358279 - DNA, 744 bp, Cannabis indica
aatattggactagataaagttttagactcccttttgtgttggacataatagcctgggacataaaaggggtgtttttctagtccaacattatcggactagaaaaatatttctagtccaacaattttggactagaaaaatatttctagtccaataatgttggactaaaaatatttttctagtccaacattattggacttaaaaagcagtcccataacatgaacttaatttttggactagaaaaatatttctagtctaacaatgttggacttgaaaggcaatctcacactataaacccctttctagtcgagctaaattggacttgaaactagatttttttttaaaaaaaataaatgctgcaaaattaattttatttctttatttttatattatattataaataattatttatattatataatatatttttttttccaacaaactatttataaataacgtacctcaattaatacacataaaaaaagtaaaaatatataaaaaaaaaattaactatatttgataaagatatatacataacaaaattaataaatattgtattaaaaaaaataatatctttaactggtattgtaactaaatatttgtcatgaataaattttatttaaaaaaattaactaatgacccataatgcgatgactctacaagtgtggaagcatatctgtcgcccactcttctctcatcttgtcaatcatagcttttggatatgactttttgtctattagctacaaa

SEQ ID NO: 358280 - DNA, 512 bp, Cannabis indica
agatcctggtaaaataaattccaacattcaaaacacccagaaatatacatacctcaagtatattatctgctttattgataaccccttggtacaaactaccataccaacttatagtgagtcttccgttgatgatgttgattcatcaacatctgagactctccatcattaccacaaggtttcactcccaggttcatacgctactattgttttcttacaatcatcactatctctatatttagttaatcactctaaaaatcattttaccctccattatgtagtccattgtttaataaataacctactatgtgatccaacattcaccaatcactcgaatacatgctcattaaattgcatctcaattcatatgcttttccccattcaaggtaagtatgcctttatataattgcttaataaagtaatcttttcccaaaatttcaatggtctccttatataccatattgaatatccagtcaattatgaagtactctccatcattaccgtatcaccttaag

SEQ ID NO: 358281 - DNA, 844 bp, Cannabis indica
attttaagaataaaataataaataaataataattaccataattatatgtcaaaatatctcaaattaagcaatattcaaatttctacaaaaatatctaagttatttaaatatttaaatataatttataaatatctaataagtaaaaaaatgatataaaatagtaaaatatcatttttaaacttataatttataaataattaaatatttaacaaaataacaaacttttgaatttgaaaatattatggttaaaatatctataaaaatatctaggttaatttcaaatttattaattatttaatttgtcatataagataattttaatatcatatttcaaataaaaagataaagttatcttttaatttaaaatatgttaaatatcaaaatatctaatcttataattaaataatatataaatattaaagaaattaacaaatttttaaatctgaccataatttaaaaaataaaataatcaatttttaaatttaaacctcaaaatatcaaaattaataataattattaaaaataaatattattaatttgaaatatgatatttaagttcaaatatatttaaaaataatattttattttaaatttggggttttaaaattggaaaaatcgaattttgggaaaaaatcccatgaaaatcggatttggggtgaatgctgcccaggaggctgcacgtgcagccacgagaggctgcaaacaggccatgcacgcgcggacgaagaggatcagcagggttcgtgtgcggcaaagcttggcgctggcagggttgatgtccgagctcacgggcgcgctgggcctccttgtccgagggtctggtgcgcacggtgcacccatctcg

SEQ ID NO: 358282 - DNA, 914 bp, Cannabis indica
atctgttactgtcatttttatagtttaaacactttattttattttattttgttataaaaaatctcactatttttggaactaggttagagttttattagcttagatttaattagtattttcttcgatttcacgcaattcccatgggttcgacctcgttcttcacaatctccatactacaataaagattcgtgcgcttgcaagttgataaatgtaaaacgtaccatttcggtatacaacaccttcccaggtaggtccgagcacatctgtcgtattgtctttggtgtttagaaatactcttcttaggaccatatctcccacaaagaatgtccgagctttcacttgtttgttgaaataccgagctactttttgttgatgggccattagctttaagtttgttgtggttcgcttctcttcaattcatcaagtgattcggcaaggagtacgtgattggcttcctggctatacgtcaatcttctatgggatggtggttcaagttctacgggcatccttacttcatatccatatgccatggcaaatggagtctgtccggttgccgttttctcggttgttcgatacgaccataaaacttcaggaagctcctcaggccagtttcctttagcatcctcaagtcttttctttagtgtatccttcaatgtcttattgactgcttcaacttgaccatttacttggggatgcgccactgcggagaaacttttgataatacaatggttcgcacataaatcagtaaaggactggctgtcaaactgtttgccattgtccgagactattttgtacggcaatctgaaccggcagattatgttcttcaccacaaagtcttgaacttttttggacgtaatggttgccagtggctcggcttctatccacttagtgaagtaatcaaccgcaaccactgc

SEQ ID NO: 358283 - DNA, 612 bp, Cannabis indica
acttagcaacatacgctaaaagatttttgcttcagtttataactgaagcaaatagtaaagcactgacgcaaattagttttttgcttcggttatgaaccgaagcaaaagaataaaaaaaaacataaactttaatatcaccacaacccttcggaccaccacaacaacccaacaacaataacaataataataaatactgccaccacatcaacccatcgtaccaccaaaagcacatcaaaccaccaccatcccactgaaccaccaccatcccaccggaccaccaccactacttgcaaaaaaaattagagagaaaaagagagagaactcaaacgagaaagagaaaaaccatagctggggctaggagcgcaagaaggggaacgataaaaaaataatgaatctcacctttgaagagtccattttcttgagagagagagagagagaggagggcggagggtggcgaagagtcggtcccgtgctccatgatggccaacaatgaactccaatgccacgtgcaaaaatatgagaaagagagagttagagtttgagtggttcatgctatgggttgggttaagaagaaaggaagaagatgaggtgatgatgggtgaagagagggaa

SEQ ID NO: 358284 - DNA, 639 bp, Cannabis indica
attgttattagttgagaattcaaaaaatgggtatttctagtttagttgtgggtacctggtatgaccagtgttgcctctaccgtataggtttaattaatttactttataacggttgttaactgtaaatgattggaaaatttagaagttatgtcaattcaagggaaattgatacaagttaaaataagaggaggtaaacaagatttaagttcacaataagataggaattcctcaagtttaagtgaacaaatacaatgaggaataagaggttaatggagggagtgatggaaattagatttaataaacaaaggaatgaaagtagaaaatacaattaggaacgacaaagaagcatctactttctgataacccaccatgagtgtaccttggagttaagcatacttaacttggagtaatctcgagatgaaaaatcttctggggagtcatctcaaaaagcatacgagtgatgacaaaatacgctagaaagattcgtattagaatgcaaaatcagcagttgttctagagattatcaagagaaagggatgtgttaataagtaaagatttacaaggcatcgagaagagtatatattagtggatggaagtaaggaatgctataattgaatatctatcataaacgaatattta

SEQ ID NO: 358285 - DNA, 556 bp, Cannabis indica
ttttgtcagtacagactccgttttgaatttattacaggaacatttggaagtaactgatactacatatttttgtctatacccaatgatctagaatctgaaccttatatgtggcctatttaagaaaataacagagtttgtactgacgaaattagagaaaaattacagttttataaacattggtacttacaccgctaaaaataaacattggcattatgccacttacaaacttgaaactttgggaacttataacactatttaccctttttcatatgatgacttactattagtaaacattccatttagtaaagtaaattttaaataatatatagtatcgaaatcaaatttaaatcaatttttttgtatgagtgccaaaaacaaaaaaaaaaaaacgtaggctccttacaatagtagccattttaagggggaaatttgattttctatacttagaaaatcaaaaaatttgatttctaaaccaataatttaaaccctaaaaaaactataccttttttttcaaaaccccaaaaatacccccaaactaaaactatctctctttctc

SEQ ID NO: 358286 - DNA, 596 bp, Cannabis indica
tgagaagttacattctttgagaatttaaagtaataattatctcattttatgagataggaaaaagtataagagttacacttatgagaattgtcttatcatagcaagaacaaatgaattaaaagtagatccaaacttgtgaaatgagccataaattggaagagcaattttggactcaaattaaacgaatcaatgtggattcaaaaattgtaaaaagataacaaaattggagaagcaattttgaattttaaaaaattaaagtggtgaacaaaactgatgagaattttgttaactttagtgtaatatttgggttaatctcattgaggtgataactttaaaataatgagtaaaaataatcacattattttgtaagcggtgatgtgagtttgatattttaattttgttgagaaaactaaaaatatcaaatggtattttcaaagtgactttaaagagtcatttcaagagaaatacatacaaaagtgatattttgtatacactttatgctagaaatgtgggggtgagccacaaatttaatcaaaatgtattgagacattattgattaatttagggataattgcagcaaaagtccccaaaaactt

SEQ ID NO: 358287 - DNA, 678 bp, Cannabis indica
gccaagtcattccaattagtcaccgaatcgggaggaagagtattaagccatgctctagcccgatccctcaaggaaaatgggaacaacttcaatcttaaagcctcttcacttactccttgtagcttgaaagaatcactcacctccaaaaatgagcgaatatggaggtgaggatcttccgttggcgacccaccaaattgaccaaccgtttggagcatttgaaacatgacgggcttgagctcaaagtgaggtgcttggatttcgggtctcacaatacccggattaagctcattgaacataggggctgcatactctcttattgctcgggctctatcatcggccaaagcaataggattggcttcattatgagcacccccaacttcaaacccatcggccatattgcagcgttttttagccttttgttcctttctcctttgtctgaaagtgcgttcaatttcggggtcaataggagcaagttcaaggtcttcttcttgctcgttcatacactagattacacctgaaaaagaaaaattcagcgcaccaaataggattaaaactttaaaccagaaaataaattgcaaaatagttgataatacacaatttttagtttcaatccccggcaacggcgccaaaaacttgttgtgaaaattatatacgcaagtatacgcagtcaaacaagta

SEQ ID NO: 358288 - DNA, 699 bp, Cannabis indica
aaaaataaacattagtgctcggtttggaccggttaacccgactaaaccgaccaatttattgggcgagttgaaacttttttttttcttaattgggtgagttgcacttagatttttgtaacccgatctttacattgggttaataaaaatgtaacgtaaaccgaccaaaccgaccgatgtacacccctagttggtgactgtgataataattgtgatggtggtggtgttaatggaggtgatgtgatggtggtggtgttaacaaaggtggtgtgatggtggtggttgtggggtgagaaagaattagggtatttcaaacgaaaaataaagaaaagaaaagaagaaaaagaaaaagaaaaaagaaaaaaagaactttttatttcatttttctaaataatttttttgaaaatttaaaataatttttattatatttaaaattaaaattaaatggactactaaaattttgctacgtgtactcttgtgtacacataggcagtccaccgtgacacttaattgagagttttgaacggaagtgtaaagagcaaatagaatttgaatttgataggtttcacagtcaaaaaattgattttgtagttaagtgttaaaaaacataaaattcaagttgttttaccgttaatattccttgttattatttaatgttttatttatatattggtatttttttcacaatcttgtagccctaag

SEQ ID NO: 358289 - DNA, 1133 bp, Cannabis indica
tgggagtctctatgaccagagggtcatgatgaggaaaatgcacagtctttacatcttcttctgtgaacgtgatgggttgatccattagttggggcctttgagctggagctgagtaacttcccaaacctcgctctgttttatggctccggcataatgcttcaatttcctttcgagtagttcctccgatatggggtcctccagaatcatagctactcttccgttgggtcttggtggcaggccaaaaatttgctgaggttcccctgggggagcgcctggtgctaatgctccgggtgcaccccccgatgctccttggggcaaaggtcctgtttcctgaaccgggttgagatggggcaaccggttcttaatccattcgtaaagatggcccaatcatattaactttttgatctcatctttgaggtttttgcattcattggtgctgtgtccgatgtcgttatgatactcgcaccttttgttgggatcccttcgggatctatctctgtatagaggaggcggtctccggtagtgtgtattttgcctggtagcgaaatacacacgttcctgggagtccgtcagtcccgtatactgattgtattggggagtgtacccccttttctgtcgcttgtcctgcgtccggttgctaccttttgaggacctcctgctccgagagccttgagaaggacctgcttagcttgcagtaggagcggagtgagacgggacttgtccacttatcccagaaggattcccataatgagaagatgtaggggctaaggcctgaccctgattatatcctggggtagcggaaaattgtatgtcgctcatcggtggagtagctattggtaaagttctcgggagttgggttcctggtacataccctgctatcccggtcgggtagtatcccccataggccactattcgggcctcttctaggttgatgtatttttggacccttttctggaagtcttgaaggttggaggctccttcttgctgtaactcgttccagaatggagtccttgtacggatccctgcttgaaggagtgcaagctgttgtccgtcatcaactttcttagtctttgaggcttcctccttaaacctctttataaaaattttcaacgtctccgtgggcagctgcttga

SEQ ID NO: 358290 - DNA, 503 bp, Cannabis indica
tagtttgtgtttattaatctttacatattctttattttatttttgtttaaattaatttgtgagtaactagttttataaatcattttccaattttcaatccttatggagacgatacctcagccaagtaacaatgaggacaaaccgacctggaaactacatgtagatgggtcggctacagatcaactatctggtgcagggattgcccttgtcacgcctgggggcagcacctgcacgatgcagtcaagtttggattcaaagcatctaacaacaaagccgactacgaagctctaatcgctgggctaagactagagcgggagatgaaggctgaacacattgaaatctgcagtgattcacagctggtggtaaatcatgtatccggagaatacgaagcttggggaggaaagatgaaagcatatatgagcaaaatacatgatctactcgcacaattcaaaagctacggtctcagacaaattccggaagaagaaaatacaactgcagatgcg

SEQ ID NO: 358291 - DNA, 608 bp, Cannabis indica
ataatataatataaattaaaataatatgataaatatattattatgtgaatgataaaaaaatcttatttttagttacatcaaaacttgtgagtaaaaataaaaaagttgtgactaattataaattagtattcctatgttgtgactaaaaagtctgtggttaaatgtattagttacaaaaattacaatttgttgtgactaaatgtatttttattcacaatatttgttgtgactaaaactaaattaatgacaactcgtgtctaaatgttatattttagtcacaaataaaaccctaaagttttaagattcaataacgaaaattttatcattaatttattacgaaattaatatttaactattgataattaacatatacaaattaattatacaaattataggttctaaatcatatacaaaaggcaatttgataccacatgttagataaattaacaataaattcatgatttatttgtatataatatacaacacgataacaatatatgataattaagtatatgtgtacttaattgatctatattaccgcaattcgatagtgcaatactataactaagtcttcctccttagatctctaaatcagaagcagtttattt

SEQ ID NO: 358292 - DNA, 609 bp, Cannabis indica
cccatttcttgaagccgagatctatttcccagcctcaggaaatttctcaacactagagagaggctgacgcaaagatctcttggcacaggttagggtcttaggttcgctagattctctaatagaaactacgccaacttccttcccagatccacctgaaaccatgccaatcttcctctagaattcttcagcagcctgaggaggagctttgagatcgctcacaagatttataccctctgggatcacttgtgaggatcagccatggcaggtcacggggttcccctggcttggatttgtcggaagcccctcagctttggaatccatcgtttccggctccagtttttgaagtctgtaggaacgaatggaaattaattggtgcatctaggtattatgagtctgaaaggattaaattctgaactcagaagagacattttgccaggaagaaagtaatccattctgaaaatggctttcactaaagagccagaaggtttgtgaaaaataacaagcttgagctgctcttttatacacgaagttcagtgataagaaagccaaagattgagaaatctaacggctgggaatcgtgcagaatatgaataggcaattcataatgat

SEQ ID NO: 358293 - DNA, 776 bp, Cannabis indica
ttttataaatttttaaataattatattaggtggtccaatataaatatgccacgtgtacatgatggtacacctaggcagtgtatgtcagcaattaactgagataaatggatggcaccttaaatttgttaatagtttaatagtttggatggttttaccaccaaaatttgaggttagatggttaagtgtaagtaaaatgatagtttggagggtttagccgcaaattactcttaattatttaatttatcatataagataattttaatataatattataaattaaaagataaagttatctttaaattcataatatagtcaatattaaagtatctgatcttataattacataatatataaatattaaagagattaataaatttttttaaatctggccataatttaaaaaataaaataatcaattttaaatttagacatcaaaatatgagaaattaataataatctattaaaaattaaatattattaatttaaaattgatatttaagcttaaatattttaaaaataatagtttattttgatttctagggtttaaaattgggaaaattcggaaaaattgaaaaaattccacaaaattcgagttttgggtgtaaacacccttgctgtgcacacgtaggctgtgtgcagccccttctgcgcgcccaggaggctgcttggagccttcgtgtgcgcagctgggcatgtccgtgtgtctaaagcgtggggcatcagcgtgcgttcagacaaaaattgtcctaagcacacatcaccttgtccgagtgact

SEQ ID NO: 358294 - DNA, 550 bp, Cannabis indica
tctgggttttgacttgatttttacacattttttgtccacttaatttgttgagtactcctagtcggcatatttgcctgtttatagttcgatatcccagccaaacactcatcttgtgtgttgtcttttgtagatgaacccaggtgagttttggggaagcgaacaccgaatcaaccaggacttgcttcaacttctgtacaaggatcaaccttgtcttcgggttagtccgtcctatttgagtgatggactttctaactcgtgctttgaagattgggaggtgagtagtgatcgttctcctactttagaacccgtagtgcaacaccattgttactacgagcagatcgctaaagaggggtacaaccgcttcatttgggaattgaagaagggttggaggcattatctcccgtcaaactggacatatattgtccgaccaattgtcgttcctgctgttatggttgcacaacatttgcatcagtacccgtccaagaggaggatgatggctcgtacaaagcagacaatgcggaaggtcaacacatctgatcctcatgtggcc

SEQ ID NO: 358295 - DNA, 585 bp, Cannabis indica
gttcggcgattcttgttcaggttctaattttgggtcccaagtctaagtctgggtttgggtttggttcttcgtctaggttctggtactagtctgagtccctgatctagatacggactactggtctgttcgaggccccgttacccgaatcttaagtcaagattttgatcactgtcatgggatcgagactggagtgcggttctaggtcccgaccctggttctgtgtccctactctagttccaggtttgggtcatagttcaggttcgggttcaggttcgggtccagagtccaggtttggattgggatccgggccaactccaaattcaggtctatgtcttatgtggagtccgggtcctagtccgattacggttctagatctaggtccaatttcagttatgattccaagtccaagtcctacttccactcccggtcaacttcgggttttgtttccaattttgggtcacagggtacgagttcaggtccacttttgggtttgggactaggtttaggtccgggtgtgggtttgagtccttgtcagggttcgggtccagggctgggtgacaaatctagacaccgactacggctttt

SEQ ID NO: 358296 - DNA, 803 bp, Cannabis indica
tgtgattaaaaaattaaaaaacaaaaatgttaccaaacggcacctaaataaacaatatttttaaaaaattattaaaaaaatatatatattttttaaaaaaataattttttatttaggcctttttaaaatgagtaggttctaaatgcaagtctaacttacttatacccggaacggacgttgtataaacattactaggcagtacgcgcgtgttggatctttgtgaaatattacaaaaataaagtgtgcgagtaagagtcctacatgggatagaaacacttcatttgaagtgtataactagtgcaagtttgagatatgagtttgggctccaaggggtacccagttttgtgcgcataggtgaggactcacacaccggaccaccacacacgcgcgcgccactgccgtcgtccgaccgaccgtgccgagcgggcgggtgtggtgtcaccttattttttgggaaaaatttatttatttaattaattaaaacagtttttttttaaacgtgtttgattaatcagtaaacaaaggtatcctgattttgtgcatcgttcccacgatctattccaacgttcccttccagtaacgtatttcttcccgttactactttcagtgcattgcctatataatgcgactgaacagtggaagaaaaatatcttttttcactctcataaattatacgatatatttacatactactataatacatatttatattttcgagcagtagtcgcttttcggtgtttaatttcgacggtactctatcgtgcaatagagttccgatacagtgttcgactgggctgttttat

SEQ ID NO: 358297 - DNA, 1041 bp, Cannabis indica
ttgtaaaatcgcatgaaaccatagacaaagaagaatcgcagagtttctaaacctagggtttcctatgaatgttctacggcaaagtcgaaggtgcattcaaaaaaataagcataaaggaaattgagaacttactcaagagtcacatgtttggattcaagcaacgtcgaaacaacgagcagttttgatgaaggcacttcagcaaacttgaaaccaaaaaacctctcttttcgctctaaactctcttagcaaagcaagatgttgaaaatgagtttatgtgccaacgctcattggtatttataggcgagtcatgaaaagaggtaatcatttcaaaagaacctcagatgcctcgtttccctctaaaaagcaaatatgggaaatcaaaaataatcaagtgcagccgtcaatcgtggtaagagaaatcggattttgtaatattaattgtcagagcattaattatccaaaaacttaagggacacccagtccgcctcacatcgagtctcgaacaaacacgctctacacatgtccccatccaaaggcagaagcagctcggatgaagtctacacgcagctttggaagtctcgtacagacttgggggcaaatgttatcccaattgttgcactatgatgtggcatcacatgatggtgacacatggaatcaactttgagtatctgctcggagtgtattgtccgaacaggatgcctcataggcatgcccgaagcaaagcaatcagcgatccgcacagagcaatcaacatttagtgaattcagctttcgcatcgtgagtcatcaaagaaatccctataactcagggatcagatcacagacatatggcaagctgtctaaatcccacaaccagtgtattctgcatttatcatgcaatctttctgcttatatccattgtaacgagaagggaaatacttcctctccaaggtcctagccctataaatagtgatgcatgctcactgggcaaaagacgagagattttaccctagagatattatctaagaattcatattcaaagatattgttgtaagagctataa

SEQ ID NO: 358298 - DNA, 621 bp, Cannabis indica
cttgatgacgtgtcacggcatacccatggattgtttttatataacgttttttctgtaatattaatgtatataatgtatatatataaaaatttccctattttttttatggtttctaattgttataaattttatcagttacagggtatataaattttagagtttgtacagtgatgcttttgatgttgttggagaaaaaaagatgatggtgttagttctgtgtttgatgtttaaggtgtattgatattgtaagatgattatattagttttccattttccgtatagaataatttctttgacttgaaaacgttaaaaaattttatttggtgccatttcacaattgattgcattaggaaatggtttttaaatttcaaaatctttggccaagctgatcttctgcttacacagaatggtatctgaaatgattttatttttgttgtaaaatagatttcaaacgaagcccttgatagtaaatgtggctactttaggaggtttaggttaggttttttttagcagaaaaaaagatagtagaagaagaagaagaagaagaagagagggtgaggaaattcgggaattagggagttaggtttttttttttaattttttagttttttaaaattgttt

SEQ ID NO: 358299 - DNA, 630 bp, Cannabis indica
tggtcgttcaacaagagcaacaacgttgtcttggcaatactggcgttgttactgctacttcggccaaaccaaatccaaacaaaccatctcggaataagaaacttcggccaacttgttctaattgtcttaaaccgggtcaccttgttgacaaatgctacttcctccacggttttcctcccggatattgagacaagaaaaagaccaccaccactgctcgagcgaatcaagcctcggtgactcccactccagacccctccgcggctggcacttcccaactccagctcagtcaacagctgatctctctactcaatcaacaaatccaaggcgccccttccaccagtgaaaatatccctgtggtttctaacatcttcggtaatgacaatttttttcctctttttttatggattgtagatagtggcgctactcatcacatatatcactctcttcattgctttacatctttaaataaaaataatgttgctaacttggtcactttacctaatggtcatcaaattcatatcaacaaatcaggaactgttaaaatttctgaccaacttgtcttaacgaatgtcttgtatattcctgaatttaaattcaatttatttttagttaatgcttatcttgaacatt

SEQ ID NO: 358300 - DNA, 1066 bp, Cannabis indica
caggtagcttatcggttggcgctacctcctgctttatctggggttcagaacgtgttttatgtcttaatgcttcggaaatatgtatcagatacaactcatgtcttaagttatgaagacattgagcttcagaccgacctgtcatatgaagaacaaccagtacatattttagactaaaaagaaaaggcgttgcggaacgagactattcctctagttaaagtgctgtggcagaaaaacaaggttgaagaagcgacttaggaattatagtcacagatgcgggagctctatcctcagctttttaggtaaatttcgaggagaaaattcctataaggggggatagttgtaatatcccgcaaaataaatgatatttaaatagacatattttattaaatatgtaattattttggtaatgaagtaagattatgatcttacttagggtaattaataagggttcattgaatgatcataaagcgtaatttattaattatggagattatattgggatatgtgtgtatcgaagatactatttttgaaataaaaatattttatcgggcccagcgactgtggaaatttagcattatggtaagaaatatcacgacattgatggaagaattattttgagggtattttggactaggttagaatttttacaatgtcggtttaatggattagttaaattaccaaaatgcccctaggttatttttagaatttaagtttcttagagggtaagttggtcattatttaggataggtatttatattattatgggctgaattttaaaaaaataaaataaaaataaagcaataataaaaataagaaaaagaaatatttacgggaatagcttccaaggcaagaaaccaaacttcctcttctcctcttctccttcgtgcaagccaaaaccaacccaccttgaggattttttcttctagcttctaccctcatttaagagctagttcttgtcccaagtcaacctagaagagcttgaaggtaggttcttaacctttttgaattgaaaacattagtttttgagttggttttcatgtagtgttttataattctgtggctgtgt

SEQ ID NO: 358301 - DNA, 1053 bp, Cannabis indica
tgaccaaagctatggtctatttctaaagaaccttatcctttctatcaaggatctgaagtggctgttcttcatatgacaagtctggttgcagctcaatattttcataactaagtacatgagcagggtctgaatcatttttccttagcgtagaaacatggaatacactgtgaactactgaaagagatggaggcaaagctaatcgatatgccacttgtccaaccttcttaagaatctcaaaaggtcctgtaaatctaaggcataacttgcctcttttctcgaaaagcatgatccctttcattggagatactcgtaggaacacatgatctcctacttgaaactccacatttctgtgtttcggatctacataactcttttaccaatttggagaggcaagcatcctggctttaattttctcaatttcttcattagtccgttgtactgattcctgacctaagtatttgctctctccagtttcatcccagtgaatgggagatctacactttctccatataacagttcataaggacccatccctattgttatttgataacttttattgtacgagaactccatcaattacagatacttactccaggagccttcgaaatccataacaccggtttgtaacatatcttcaagtatctaaatcttcctttcggactgtccatcagtttgaggatggaagattgtactgaacttcattttggtacccatagcccattgcaaactctgccagaatttagaggtaaactttggatctctacccgaaactatggattttggcactccatataattttactatctcattaacgtacaaatctgcatactgatccactgaaaacgttgtcttaattggtagaaaatgtgtagacttcgtgaatcggtctaccacaacccaaattgaatccaacaaacccattgttctaggtaaccaaaccacgaagtccatcgtgatatcttcccacttccactcaggtagggttaaaggctgcaacaattgtgccggtctgtaatgtttagccttgatttgctgacacgttaggcatctcga

SEQ ID NO: 358302 - DNA, 635 bp, Cannabis indica
ctaatacttgacgataatgtatatgcttgcttgataatttcaaagaactatttttatatacttagcaattagagaatgagaaaataagttttttgtacaaagatcttgaatattattttaatattggcgatctctattaatttctcttctctttgattatgtgagagatagttatattttactcatcttatttctttgttcttacactatttactgtgttattattatttgctttgtgtttatgaatctttattacttgtcatgagttttattattggtttccaattttccattgaatatgttatttctctaacatcttttgattgagtatttaatataaattcatgtctttttttacaaatggtcactaaacctcattttatgtatggttatatatttgataacatagatatttttgaaaatattatttataattgttctaaattttaaagagtaccatttcttagagaattagagtattggtcaataattttataatctctatcattgacttcaacttaaaatgtaattattgaattgtttgtgtgcacccgtgccttgagagtggtcgcttttcttaaataaataaataaaaaagaagtaaacttctggaataaagatttttagctagtgga

SEQ ID NO: 358303 - DNA, 749 bp, Cannabis indica
aaagttttaattttaaaaaggttgtcgaatctacagggattgattattaaatatcattaattattataatttttgattttatgctttaattagagaattcaaagtaaataatgattaagattgaaataataaaataactgaaaagtaaacagacaaataaaaattttaattagcaaataaagatctagagcattgacttccctgattcaaattatgaatctcaatttacaaattatcccaatttattctataattcatagtttcaagaattctaatgtaatctattaatctctctcgagtgatgatagaattaactataattaactaacaaggtatctctatttaatgtaattaattaaacaataataaagtaatataattccatatgaataaaactcatagaattagtggaatgtctcaatctcacacttttcctatgtcatgcaattctagtccaattttagatttcctctcttaagtgtaaaacaaaaaatctctatactaaataatagtgatcaagcattaataagatgatatttaacacaaaattacataaataaatagcaaaaacaaatatgagaaaaatttaaaaacaataattcataatctaaaatagttccataaacactctagaaaaagtatttacttcataattacaaacataataaccacaataatcatgttcataattaaataactaaacaaaagaataaagaagaagaagaagagaagaagaaagaaactactaa

SEQ ID NO: 358304 - DNA, 992 bp, Cannabis indica
ttttatataatctacaaatataaaaataaaaaaaaaattagtaattatttaatgtataaacaaaaggaagagaaattatttttttaatatcaacaatataatgtaagaaatgttgtaaaaattgaaaagcctacaaaaaaataaaaaaaaaaataaaaaaacaaagttgaaaaagaaaaaaaaaaaatggtgatatgcgtgcgtgtgaatggagaaaaagacaaaaaagaacatgttgatgtgtagtgcgtgaaatgagaaagagagagaaagaaaacacaaaaacaatgaacaatagtcttggtatgcccattccggtattaacattaataaaaaagctgacaagaaattcctaaataattttaaatgaacgtgttaatatgcaattatttctttatttaaccccacttcaagctagtcacaatttgtcttgctgtagcataatcatctttaatgggatataaattttcaaaatatatattgatgactcaattaaggcaggataaaatatataacccctataattatcatgtgatccaaaaattgtcgatattattgaaggaattgaaaaaaaaatttgacttactaacctatattttcagcttttagtacacattacgagattatatatatataaaaaaaaccaataagaatacttaaaagaatgcttaatctgaactttttttttttacatctttgaatagacattttaaattagattaaaaataataggaaaatttaatcaattaatatatattaaataatatagtagctttttaataatttttagaagtggttattatttaacaatttaaaacaaaagtatagaaaaataatgtaagaaaaaaataaaataattatttgtaagtggtagagattttgacaagcttaatgtgtaatattcaatattaaaatgtaactgtgcttgacaccaagaagacccccttaaaagggtttatataaagggaaatttgattttctatacttagaaa

SEQ ID NO: 358305 - DNA, 628 bp, Cannabis indica
atttactttaagttttacttttttttttaacaacttttaagttttacttttatatatacacaaatgtacatattaatcacttaattagtatttaatattgatattgaactaatatctcaaatttacaaaataaataaataaataaataaataaacttaagaagattttgtcacaaaaaaaataagagagctaagtgtacaaaaattaaaacataagagagtttccctgctaattattcgtgataaatttatgagaacatctccaatagaggtgtaaattattgttggaggaatttagacaacaccaaataaaataatgtatttaaagtatgaataagattatgcgattactctacccagaagggcgagtactcaaactatagacactcagacgtactggaaatataaataacacaaagagaatatagtggttcagtcagatcacggtttgcttagtcaactattgtaagggttttctgtcttgtttatttcatgttggatcactcctttatatacaaagcaagtgttctttgattacacagagattgatttaattatcagttcgtttatacattgaatataagatttaaattaataaaaatgtaaatacaataaatgaagaacatttt

SEQ ID NO: 358306 - DNA, 539 bp, Cannabis indica
tttgtcttcaacctttactcatttaacaacaggaagacatcagacaactatcagaccaccattggatcaccatcggacttgacaaaaaaactagttttttgctcaaaactcggatctggccattttcgaccctaaatgtaacatctactcaaaaataacaaacactaatcatataatttattcctttgacaacattgtcgatggtgaagccgtggttgatggagaagtcgttgggtccgcggtagtcattgggtttgtggtcagggctgaccttgagctaagacgaaggaggcggccgccttaggcccccaccgctcagggccccatttcgaaaaaaaaatgaaaatataattagtaataaaataaataataatacttttaaagctaaatatgtgttgtagcctagcggtaatttgattagtttaataattaagaggttaagagttcaaattccaatagcctcactttttaatgggtcctaattttattttgtctaggcccaaattaacatagggccggtcatggtggtcgtggagaga

SEQ ID NO: 358307 - DNA, 619 bp, Cannabis indica
agacccaaactcgcaccgagacctgaaccgaaactgggacaagtactcggactgggacccgcgaccaggatcgggaccaggacctgagaaccgaaccgtgacctataccccgacaaggtcaagacccgagacaaggaatagtacggaacatggaccgggacctgcacttggagtgggaacctaacctagatcgggacctaggaccctgacttgaatcgtggacatggaacaatgactgaggacccaagacccaaacctagacccaaaccttgacttgagacccgaaccaggacacaagacatgagctagaactagactaagatcttgatttagacccgagacccaagacccaagacccgaggctcggacccgacccacagtcaatgtctaaatctgggaattagacttggacaccgacccagacccggaccagttctcaaactagactcgacatgtggttggtgtctggatttgggacgaagactcggacctaaaccaaaacacgaacctagacctagaccaggactcggacctagacccacacccgaaccttaaatcttacccaatgacccaaaatgtgaactggaactagaagtagacccttaaaccctaaacccta

SEQ ID NO: 358308 - DNA, 1555 bp, Cannabis indica
actactggtctgttccaggccccgttacccgaatcctgagtaaagatctagatcactgtcacgggtctcggtctggttcgtgttcaggtcccaggtcccatttctgagtttgggttggtgatcgagactggggtgctgtgctaggtcccgaccctagttctgtgtccctagtttggttccatgtttgggtttgagttaaggttcgggttcgggtcccaagtccaggtttgggttgggatcaaggttcggctcccaattcaggtctaggttttatttggagtctgggtcctggtccggttacggttttggatataggtccggttaggattccaagtccaaatcctagttctagttttggtgaacttcttgtttttgttccaattttgggtgactgggtacgagttcgagtccacttttatgtttgggactacgttcaggtccgtgagtgggttcaggtccttgtcagggttcaggtccagggctgggtcccaaatccagacaccgactacgggttttgtccaagccctgggtccagatctggatcccaatctcgcgtcccagtctggttccatttcttgtgccgggtcacgagctgggtcctaggttcaagttcgtgtttgggtcgaatactaggtcccggtcctagttctgtttcccagctcgctatctttattctaggtccaggtcccaattatttagtgggtttgggtctcggtcaaggttcgggttcaagtcctagtctcggttcgggtttaggtctctgtctaggttttgatcttggctcgggtttgggtttaggtcctggtcctggtcctagttcgattcaagttccatctacgattctgagttcgagtttgggtttcaattcgagtcggagttcgagtcattgtctgagttttggttcgggtccggatttcattctaggtccacatcaggctctaggtgtgggttcgcgtcctgggtcttggtctatgtggggtcggagtcccaagtttcgatcgcgatcttagtctggatttagttcttggtctaagtccttggttttgatcgtggtttgggttcaagttttggttcgggttcgagtctagctttgggtctgattccaggtgtgggtttgagttcgggtctgagtctgtttctgggtttgtgtgcaagccttgaccccaatctgggtctaggttttggtccaggtccaagtttgggtcttgttaaggatctcggtccagatctagttccagcattttgttcctagtttgggtcatggtccgagtccaggttcgtatccggatccctatctaggtccaactctgtgtttgggatcaggtccaagatttaggtctaggtccgggtctcagttctggtctgaggccaggtctgtgttcggttctaggtctgtgtccaggtcttggtttcggtcctagtcttgttctaggctcctggttttgcgattcttgttcaggttctaattttgggtcccaagtctaggtcatggttcgggttttgttcttcatctgggttctggtcctagtctgagtccaagatctagacaccgact

SEQ ID NO: 358309 - DNA, 1253 bp, Cannabis indica
gtgattgtcaaatggagcgttattcttcaatagcataagcaacgagatttacattataaacctcgaaaagacatggaaaaagctctgactcgctaccagatgattgttgctattctcttagcgagatgtcccaaaacgatacgctttataacgtatgtaatacacgtttgcattgacccagtaaaagcagaccaatcacagctgtgtgattttcaaataataaccacatttattttacgtgagatgtaattaaatcccacaattttaggagattattgttgtaagatatcattcagatttgtaattaagtgccctcctatgtaattagaaataggagggggttacactgaaatggggaggaaaaattcattagagaaaaggccctagaattgtatcagaaatctaataagattgactcgtggactatgcagaattttaactgcaaaaccacgtataaaactttttgttctttatttttcttttactgctattattttttgtgcaaattcatcacagtttaggctttcatatagttaacgaaaatctgcattaacagtttggtgctttcattgagagcctttgtgaaaaaagccaaggaaaaacccttctaatatatatatatatataaaactttctccatggcttacaacggagaaaacgttgatactcttcatgaagaaaccactcacaatcctgaaaaagagccaatgggctctcagaggcctcccaactcgtgatctacacggaccccccgctccagcaggacccaacctaagggtggcccaagtacacggaccacttgttctaggatgacccaacctgagggtggcccatgtaaacggaccacacgctcaaggaggacccataatcaaggaatagggtacgaagaacctaaaatgaacattggtagagcccattccaggccaactggtgatgatggtgcctatgatccaacaagatacgtgaggaagcaaaccgacagaatgctgagttggaacgtgaggcggccgcggccggggtagcatagaagaataacacacaaaatcaacctaatcatggggtgagaataccatgaggcagaccttgcggctcacgaaccaggaggcaggagacatctcaggagaaccctctgaatgctcaggaagaacaacctggggaaactgagggtccttctgaaaatgaacaactatatccttctcacaaatttgagaatagaaggcgaccaaaaaccagggaacaagaaatccctcgtg

SEQ ID NO: 358310 - DNA, 402 bp, Cannabis indica
aaaccagatctaggcgcagaaccgaataatgactctaacccaagagacccgaacccaaccccagaattgcgccaggacctgcgacccagatcccgtaacccagcacccattacccgggaccaggtctagaacccagacctataccagaacccgaacgcagacccaaacccagaccaagacccggacccagacacggactgaaactttgacccagactcagaccaaaacccagactggtactcgtactagaacacggactcgaacccaggacccggacctagaccgatatccggtatgggacctagactcggactaggataaagacctaaaccaggactaggactagaacctggactaggaatgatcgagactcaagagctgggaccgagatcgagacctggg

SEQ ID NO: 358311 - DNA, 737 bp, Cannabis indica
gttgaagtaaaccccatattaaccacactgtaaaaaccagaatattacacaaagagtttacaaaggcagtaaataaaacctatgtggccttaggcctctatttacctagacagttcataaagtcagttataaagtttgttagaactttataacatactctctgattcactgtattccactaatatatataaagccaaagattacaacatcaaagggagaagaaaaaaaatccagatcagtaacaacacaacaaaagacagaacattacaaaaccagatcagagacaaatattcatattcttctagagatcaaacagagcaacaaaaggagggagttcgtggttgaggcttacagaggttttgccttgaagccctagcttgggtttggagatccacaactcaagaaggtgttgttcatgtaacaaagaagaaaaatacacaattgttagtagtgatttttgagagaaacagagagaatagagagctagaaaatactgtatatattcggattaccactcttaccattgtgagttggaatccaagctttgtaactctgaagattcatagtgaaacgaggcgagctcgaagaggacgtacccacacaatttcggggaacctctataaaattctggtgtgttctctccaatttattttctgcaattactattgtgttcatgctatttttgggtttatttttctgggcagagagggaaatttctgggttgttctgggttgtgt

SEQ ID NO: 358312 - DNA, 651 bp, Cannabis indica
tgtattagaaattctaaaattcgcacttgtgcaagttggatgttgattgacatgtaaaagtaaaccatctaatccaaccacacatatttatataatttaaaaatgaattataaatacaattaatattttaatgtaaaaaataataatttaaaatctaatacatatgatagaaatatatttcaaaatattgtagatcaaatgtatatttcatcataatttacaaataaaatataatctaaaacaaaattcaacatttttttatacatataatttttttcttcttgctttaaattttttattttttattttaatttgttgctggagacataaaacaacaataatttgttttattttgttgttagttatgtgaaaaaatattttttaaagaaatattaaaaaataatcagtctaaaataaatgatctaattcgtacttttgtggatttgattagatatgtggattggattagatccaaaatataaaatctgcacttagtgcgaatcaaatgtactatgagcaggtcctaagcctatgcctagggccgacctagctcaggggctcaaaaaaaattgttccctttaaaatatcacattttcttttttactgattataaaataccatataatttttttttttttaaataagggtcca

SEQ ID NO: 358313 - DNA, 685 bp, Cannabis indica
attttcaatttatactatatatatgtattaaacaaaaatggaaaattaactaaatgcaatttattgactaaattaacacaaaaataggaaaataattaatattccaaataaaaaaaatttataaaaaaattcggaattttttccctttttttttcgaaaaaatacactaccatacgacatgtcgtttttgcaaaaagcaaaacgacacgtcgtttttccaatggacgctgaatacaggtgaaaacgacacgtcgttttccccaacggaaaaacgacacgtcgttttactcaatgcagggctgacgcataagactataaacgacatgtcgttttccacaatgtgaaaaacgacatgtcgtttttcaacaacgacagtgcaataaagcttacaaacgacacgtcatttttttacaaacgacacgtcgttttttacaaacgacatgtcgtttgcgtcgtcttctccagccaaaccgggtcgattttgacccgtttttctgcacgcgggtccgtcgaacccgacccaaacccgatcggaaattgcgtttccgacgaccaaattgcgtgttttcaaatctaaaatgttctaaatcaaataataaagagatccacatagattttatgcacgaaaacacgaaaaaatatatactttaatatcacgaaactaatcgggtccgaaaaagtttta

SEQ ID NO: 358314 - DNA, 1273 bp, Cannabis indica
attaccctagtgatatatgttatttaaatgctatgccatgttgtatatatgaatatattgggatttagggttatgtgttcaaggcataaccaggttggactcggtaaccagaaccgagaggaaccattctaaggccttattgtaattagacgtgtgagcgcaacacgtaggtctacgctacgtaaacataaataggcatgtgagcgtaacatgtgggtctgtgtcatacatgcgtatgagaatggcattattgtttatatagtatgataaacatgttattgatattttatgctgtcttgctgggcttggctcacaggtgctctactgtgcaggaaatggtaaagctgtttctgatcagccatgagtatgggagctgaacgaagaatgtacatgttcgggacacactagaccaagcggtctaccagtattgtattttgtaactcttttttgtctcttaggtcggccaatggaaaaggacttgtaatagtgttttgtaaatatttttgggatccctacttttgtaacttttaatttgtaaagtttaaattattacaagtttattttcattccatttgttattaaagtttaatttctgcgctaattttgttagtaatcctatttaggggattagggtttcttaagtaacttgggtagcgtgcctaattattgagggcgttacaagattgctaactacttaaataggaaaattacgagcaatggaaagacccaaaagtactctgcatttaatcaaaatatagttgtttacattgtgaatgaaaatgcaatattaagttcaaatgtaaaagtaaaaggcatttaaaataagaaaaacaaaccaagttggtttacaaacttgtctttacaaaaatgccactaggggcaaaccattaagccgttttcctaaacaaagaatacaaggttataggagacaagagagctcgagaaagtctgtctacacgaaaaaggacttgacctctgcatagacctcattctctgcagtagggaccttcattcctcgcatcagaagatcccatttcctgcagccgagacctcattctcagcctcgagaagtttaacaacaccagtggttaggtggcccaaagatttccccgtgtaagctttgttcttgagccatttgggttctttggtggaatttgaaacctcatcgggttgggataccttctccctggatttctcattggctcgaggaggaccttcgaacatgctctcaaaatctacgaccattcctatagagacaaagataaaagatcaa

SEQ ID NO: 358315 - DNA, 641 bp, Cannabis indica
gtttaacaatttacccatcattcaatcacctattgggaacagtgctctaaggacttcaagaaatagttctaggcagcaagagacaagtgactgtagcgtcttctcttactaacataaagcaatagtcgcgcgagacacttaaggcctactttggtctttttagtatagctgctgtaagggttagaaatttgaacgactgtatccagcttactgctctccaagtagggatcacgactgatctctcaagtgctggaggggagctgtgggatgacttgcagggtcgcccagtgaaaaatatcagtgagttcaatgagagagtttaggtgtttgttcaaaaagaggaatcaagaaaaaagatgaagttgttaaagactggctttggaagtaaacccaacactatctcgacaagtatcatctggatgaaagctcacaatccaagaggctctaagaggaaagatgactctaatgaatcagctaaggacttgaaaaaatagaggaagcatgacaagtacgtgccaatctacactatttatactgagcttaatgaaacttggggaaatatctatctcgcacatgaacacaaggtcgcattccgcaaacctgagcccatgaggcatacgagacataaaagagatgcaaca

SEQ ID NO: 358316 - DNA, 671 bp, Cannabis indica
gcattgacacatgaacataggtggaggctctactatggttacacgtgacacacttacacacaatattttttaacctgacattttttgtgtaagtaaataacaacaaataaagtagtacacgtgaccttttaacattaactttctattggaatatcttttacgaggattcaaatttactaacaagtatatttttaacatcctaaatatgaatttctaaaacgatgaaaataataaagacataaaaggtatgaaaaaccttatattggatgcagcggaattaaatgatcgttccgctcagctaacccttgtatcctttctgtcgcagagtatcaccaagatctgagcccgaaactcctttagttgtttggattcttcacagtcttacacacaatgattgaggactcacttgctatgggtggacacacactcaatcactaaagacttgaatttgatttgtgaagaacactaaaaatttcaaaaattaaagaagaaaagaagaagaagaagtctcataaacctagagagaaagaaaactaggttaatttcctttaaagcattagttggataatgagactttcttttctttttatactacttctcttagggttagggttgatttatttggaataaaaaaataataaaaatggagcaaaaatagggacctagtggcc

SEQ ID NO: 358317 - DNA, 740 bp, Cannabis indica
caggattctgaccattcccacgcagagttctcctcgagggcgttgtccgcgtactagggccaacgcctggttgagttctctggggacgtgtggtccgagcactggggccatcctcaggttgagccctcctggaacgggtggtccttctagactacggattggtagatcttctagagcccatgagctcttttctagaacgatggttagtttcctcatgtggggtgtcaatagtctctggatctgcaaccataaaggagaaggtttttcttttaaaagaagggagggctttttctgagcttttttacagaggctctcaatgaaagcaccaaactattaatgtatatttttcgttaaccaaatttgagcctcactatgattattcaacactgaataaataaaagctatagaaaagtaatgtatgaacacatggttttttaagtggttttgcagttaaaattccgcatagtccacgagtcaatcttattcagatttctgagtattttttaagggtctctttcataagaatttttttgtcctttttttgagattgtttgtcagtatttataattgcatagtggcaattaattacaaagctaaccaaaatatgattacagttattatccctaaaatcatgggatgtgattacgtatcacaaaatgtaaatgcgatgtataatttggaaaatcatatatctgtgattttcccgcttttagtgggttaagaatatcgtgtattaaaca

SEQ ID NO: 358318 - DNA, 466 bp, Cannabis indica
ggggaaaaatcccacaaaaatcggattttggaggtggctgccaggagggctgcacgtgcaaccgaggaaggctgcacgcagccacaaaatgcgtgcggaatggagaaacacagtcacatgcagcatccctggcgcgcgtatcccatgtccgaagcaaggtctgaccgtgcgcttcagacaattcacgtctaaaatctgcgcgcggaataccttgccgagggcctgtctcgcatggtgctcgaccatatgcacccaaaatttcaaactttcataactttctcattttttatcggaattaagttctgtaaaaacgaaagttgcttaattttgcacaaggaatttaactaaaatattttcagaaagaaaaaaaatgttttcatggaaaatttttgtaaaacacatacattcatcatataatcacataaaccatcatgaaaccatccaaatcaacacaaaacatcgtttt

SEQ ID NO: 358319 - DNA, 510 bp, Cannabis indica
agatggtggttactctgggggtggagggattattctataagagtgtaaaaactaatctgtaataatttagttccaccagtgaagctaaataacttagttgttttacgaaaagtactagaagttattcaaactaaagaaaattattaactgtttttatctctattccattttgaatagaattaaagatgtgtcttctatgtaataattatgtaaagtttataaagtttcatagttaatattaaagttttaatttgacacaacttttaagaaaattctttgattagcaaagatagcattgcaattgaaaaatcactgtagcgtgtctttgcattagggcattacaatttttgtatcagagccgccgggtttgtctaccgaagctcgccaagacatttacaatcatcatcaaagaaagtttggttcacggttcaataaacccgtacttgtttagtattatatgtgattattaaagcatgttaggaagcatattagtttataattgtttatttt

SEQ ID NO: 358320 - DNA, 357 bp, Cannabis indica
ggccattcccgacattccgaatgtctaaacccgtccccaacgttccaaaataccgggcaccagaatgcaaaattatgaaaactactacatgatataaaaatgcatctctgaattcaataataacagtataataaattatttaaacagctataaataatttcataattaaacgtgattaactgctaatttccaaattaaactaagcggttcaagatagagatttttatgtggttcaagtattaattaaccttactccacaactcagtctattagcctctatgggcgtatttggtgagtttacagtattttgtatgaaaccctaactgttggaaattatttaccaggatcttagatcta

SEQ ID NO: 358321 - DNA, 581 bp, Cannabis indica
cacccaatcaaggtgttgaccaaccaccccctctggcaggtcctgcaaaagccaaaggcatccggaaggctcctcaaatgggcaatggagttaagtaaatttgacttgcactacgttccccgtatttccataaagggacaagcgctagcagacttcatcaccgagtgtaatgaggctgaagcaaccgcaaacataccgacaccatcggtcccggcatggaaagtatttgtggacagagcctccaacgacaatggatccggagcgggggttgcaatgatatctccaaacggactttgactccaagcagccctacagttcgacttttcagcttcaaacaatgaggccgaatacgaagccttgatagcggggctgaggttagcaaagaccgtaggggctaaaagagtagaagtctaaagtgactcctaactggtagtgaaccaggtgtcgggagaatatcagacgcgcggagaaagaatgggcgcgtatgtagcgatagtctgggaactgctccacgagttcacagactataaagtagagagaatccccagagaaaagaacactcacgcagactgcctggctaa

SEQ ID NO: 358322 - DNA, 513 bp, Cannabis indica
agccttagtgattgagtgcatcctcacacataccaagttagtcctcaatcatagtgtgtaagactgtgaagaatccgaacaactaaaggagtttcgggctcagatcttggtgatactctgttacagaaaggatacaagggttagagatctgagtggaaggagtcatttaattctggtgcaaccaatgtaaggttctcataccttttatgtgtttattctatatcgttttagaggttcatgtttaggatgttaaaaacacacttgttagtaaatctagatcatggtaaaatatattccaacattgtattcctctgtgagataatcttaaacctccgccagaactttaccagccttagacaccggttccccatcctcgttgaatcccgcaaagggcaacctctgagcaactccctcttcctaggcttcagatggagtatcaggacggacctcgccttgatcttccatctcttggacctcaacgtcccctcactgtcttcttcctcagcagcaggc

SEQ ID NO: 358323 - DNA, 1750 bp, Cannabis indica
aagtcgttgttgataatcgtttttaccaacgaagtattcccaacgtactttttaccaacgaaatgtcctcattgatgcgctatactgacgaaaataggggtttttaccaacgaaatttgtcctcattaatgctcatttttcttgtagtgaccatagagatgggccccactagttataattttgccatttttttttcaactatttatcttttattttacttatgccatattttctaattttaatcctataaatgtcaaaactatttatttaataattataattaatcatcaaataaaattatcatttaatttatttattaattagactttacaaagtctcttaattaacaaataaaccctaaaacctcgtttcttcgcaattaagccattgcttactgaaaattcataaataagacatggtctaattttagaattatatttgattaattaaaaccaattaactgagtctacaagcagtattatttcaacttgtgtggtgaccatgtgcctacataatcaagcttccaataagtagttgtagaatctaccaagtaaattctctaacttcttaattccttcttacgccactatagattaagaattgtactcttaattatatagaaagctttacatatttcacgatatagatacgctatgaattatctattgttataattcaaataatcaatgtgcctttatagatgatctacattgagtagggataaatttaccgttctaaatcatcatttcacttatatgtatttatagaagctatatattctatatttatgattatcacttccactcaattgcactacaatattcttaatctgtatgtcatgagaagatccaattggtcaactttaacgaacaaattgaagaacataaataatacatctaaactagaacctaaccatctcaggattgagatcatttgatctaagatcaactagatgatattgaattatatagatattacggtaagtttatggtatcttatctaagttcaatagcggtctcttctgatgtatacaccatacattcaatccaagcttattttactaataccctggaaaggacatattacttatccaaggtgcaagtaaactacattgtagattatcatatcagtaaaatcttatgtattgataaatcatacgaatttatttaatcacataatgttaattactttccactgtattgacaacacaataatcaagaatatcaatgtcataaggatttgaatgaatttataaactaaacaaatgaacatgaaataaacatgtgaaccaaataatacattaaacaagtaatgaaataaatctgtttctttattgataaatgaatatttaagattacattgaaatagagttttatttagggcacaaaacccaacaactaaaactctgattcaaactgttcaaaagggttctacaccaatgatagaatatctaagacagaagaaaaattaggcagacatgcttgcctttgctggagatacataccctgaagcataccttgtggccaatgtgctctcagctctagatgcagaatatttgtctttgtacttcaaatcgaggcttgcccaaaaacaacaaggcaagagctgcatgatattccccccagctttgatagcaaaataattgtgacagtcagtagtcctgtgatctgtaaggggaaataccgggtaagttgtacaatcccacactgcttggggaaggtcaagtgggatgattctgagactgtgtagg

SEQ ID NO: 358324 - DNA, 764 bp, Cannabis indica
ttttttttagagcttgctactgggtccgaacaccttatatttatgtttaaatatatactttgcttggctttttaatttcgttaaacttttggcctgttttacatttgtccgtgtagtatgccttattaccccgctaactgtcatgaaaattgtttttagggcactcagctttacaaacgttaatttggaggttgcatatacttgtctggtaaaaatttactttacagagcataagtttatatttcttgactattggtaatacttctggaggtgatcagcgttccaggccctaggtaccatggttccgtccattcttttgagcttgtaggtcctggagccgatttcgtcctcgattttgtatgctccttcccaattaggtccgactacccccactccgggttcttggatggctgggaagactcgtcttaagaccagatcaccaatagcgaattttctacttttaacttttgagttaagtatttagtcagtttcttttgataagctgccattcgtatttgagactcatcccgaagtttgtcaatctgatccaacggttcttgtaataaagccttatttgttgttggatcgtacgtcgttctcctgtgggatgtgaatagcatttccaccgggaccatttcctcacaaccgtatgccattgaaaatagcgagtggccggttgtggttcttggggttgtccggtaggcccataacactcttggcaattcttcgggccaattgtttttgtaggccagcagcttcttctt

SEQ ID NO: 358325 - DNA, 934 bp, Cannabis indica
atccaacacaaagtctaatattctctagcaatccacaaataatccaatcaaacttgtgtagagagattaaaatttgttacctcaatgaaaatcaatctttagtcaacctccattgatgagaaccttgaagctttaaggaagaagaaggtgaatagtgatttttctgaaatttgggtgaggtttagggattttggaatggatttttagaggaaaagagtgttagatgagagaaataagggattatgatgatttaggatgaaagtttatggttaaatttgatgaaaattggttttgaatgggattagatgaagaaaatatggtgaggagaagggtttttcggctggagaagttagggatttgaatgtggggtttgatttgaaatgtagggatttggcctttttaaaaagggaaactgaccaatctagccgcggccatataaagcctcgccgcggctagaattcgacgaaaatatgtgctctctgtaaggaccttatggccgcggcaagtcccatttttttgaggaatgctaattagaaccgaaaaagaaaaataacagtaaacttaaaaagagttcaactaaatcaaaagaacacttgggttgcctcccaattagcgctaactttatcgtcgctcagctagacgttgatcgagatcttcaaagtggcgccagaatcatggcggacttggtttgatcaaattgacctcccaagtagagctttaatcgctgtccattcactttgaaagtattaggactttcaccttttagttccactgctccgtagggaaacactttgatcaccgtaaatggccctgaccaccttgattttaatttaccaggaaacaactttagtcttgagttaaagagtagaacttgttgaccaggttgaaactcctttctgactagatttctgtcatgccatctcttagttctttc

SEQ ID NO: 358326 - DNA, 745 bp, Cannabis indica
aaaaagaaggatggttccctccgaatgtgtattgataaataggaactaaacaagtaaacaattaagaatatgtatatgttgttgggatggatgatttgttcgattagcttcacagaaagtctataattttaaagattgacttgcgacctggctatcatcaactcagaattcgagaataagatattccaaaagttgcattttaaaccaagtatagtcattatgagttttttgtaatatcattcggattgataaatgctctagcaacctctgtagatttcatgaatagagtattcaaggatattctcgataaccgtgttatagtggtgatcgatgacatccttatgtactctcagatagaagaggagcaggagcaacatctctgaacggtattacaatgatttagggatcacaagctatatgcaaaattttaaaaaatgtgaattctggttatcagaggtgtcttccctaggggcacattgtcggaaaagatgaaaatcatggttgacatggggaaaattgagttagtgaaaagttggccgaggccaagacagtgacgaaagtgcaaaattttctcggtttaataggatattatcggtgttttgttgaaggattttctaagatctctatgctactaacagagttaactaagaagaaccaatggtttgtatggcttaacaagtgtgaagcgagttttcacaagttgaagcagcaattaataacagcaccggtgttagctttgccatca

SEQ ID NO: 358327 - DNA, 534 bp, Cannabis indica
ttttaattaatcacgatttccataaacctcgttgattagcaacgagctgcacagtacatttaaaaatcatgtaatacgcctatgctagttagggtgttacatacatcttcgaatggttctgcaacggcttcgggaacacaagctttatgccaaattcaagaaatgtaaattttggctatctcaggtgtcctttctagggcatactgttaacaaggatgggatcaaggtggatccaggaaagatagaatccgtcaaggattggccaagaccgaaaacagtgacggaagtcagaaacttcttgggtttagccggttattatcgtcagtttgtagaagagttttctaaaatctcaacacccttaaccgagcttaccaaaaagaatcagcgctttatatggtcagacaaatgtgaggctagttttcaggagctgaaacagaggttgattacagctccagtgctagccttgccttctgacaaagaaaagttcgtggtttactgtgatgcatccagacagggtctggggtgtgtgttgat

SEQ ID NO: 358328 - DNA, 584 bp, Cannabis indica
ttttgaaaacttacacacaagctaaaacacatactcctgcaacaaggcactacaagaaaatacattttcagcgactagattttttgtgaccaaatcaacttagtcactaatagttagattttgtgactaatttttagtcgtaaataattttagtcacgagacaatgtttatttggaaccaaaaaaatcaatgaccaattttttagtcactgtttgttatatttagtgactaaaatagtatttagtcactaaaactgttgcgccaaattataatagtggcgagactaataatttttggtgactaaaattatttagtcattaaaaatttaaaatttgtgacgaaatagttagtcagtaaaagttaatgatcttttacaactaaaatattagtcttaaaatattttatttttacaattattaataatttatatgtaccaagtaattatttagtttctttaaaatataagattaattattactatattgaatatacattaactactaatttaatccttaaaaaaatatgattaacataaattatatttttttaaaaaatatatatatagttattgaattagtagcaaa

SEQ ID NO: 358329 - DNA, 638 bp, Cannabis indica
aacttaaaataccattgttgtgcgacttctgatagagtggcggggaagattctacagcatacgtccccccatactccttgcaaatccatttgcatctcaaagtacttgagatgggaaagaggttcttctcttccagtatacatcttccacattggcattttaaacttgtaaggcgatggcaggagattgatctctggtgagaaaggagttccgcgagcacggactaactcaagatcattgttacattgtccggccatgccatgaaacatatttttcaactcgtcaagttgggcctgtacggctaggctgacctgctcggcattctggtcgacttggattacgtcagcgtctttctaagcgaggatttgagtatgggttccgagctgcacgatcgttgtagtattctgctcgttcgttccccttcttctatttagatcgttccttaggtcatgggttgttcctaacctatcgaacatagaagaacctggttgccttagcgattgattcacttggttgacaggtggaataacaccattattctggttggaaccgtcaggtatggctcctcctgatgaactaccggacaaggtctgcccgcctacctcttggctcatgagtggaactcgtaaccggggatt

SEQ ID NO: 358330 - DNA, 614 bp, Cannabis indica
atggacactgaaattgatgctcttgaagccaacggcacttggatcgtcatcactctccctaatggacatcatgtattggttataaatgggtatacataatcaaatacaatgttaatggcttagttgatcgtttcaaagtacgattggttgccaaaagcttcaatcaaaaacaaggtattgattactttcacacctttgcccattttgcaaagtttaataccttaaaacttctgcttgccattacggcaattaacaatcggtctctgtaccaacttgatatcaacaatgccttttttcatagcgatttcaatgaaactctctatatgacactccccaaaggatataaactcaaggaacaaattcccccaaatgttctttgtaaattgaccaaaagtctatatggctttaaacaagcctctagacaatggttcacaaaactcaacaattatcttctatcaactgatttcacccaatctctctcagaccacactttgttcatcaaaaatgataaaggcatttttctcgcccttttaatctatgttgatgacattgtggttacctccaataatgatgatgttgttacttctttcaaacagcaacttaactctgtgttt

SEQ ID NO: 358331 - DNA, 780 bp, Cannabis indica
attgaaatcgaagccctagtttttattgactgttaatttcctttatttatttatttgcttcatacttccactagctttcttattttaattttctctcttaattttatttaaccaaacagtagtaagaatttaattttaaagtacttaactacaatcctcgtgggatcaacctcactcttggtgagtttactacttgttacgatacgtacacttgtgtgtgtaaaaataccacaacacacatgcagattcaagcttattcgtcaaagtaagggcaaagatcgcgatagttctggtatatgttgatgatctccttatcactagagatgatgacgcagaaatttttcaaacaaaggagaacctattagtacgctttcaaatgaaggagcttggagaattgaaacacttcctcggattagaagttgaccgaactaaggaaggtttatttctctgtcagcaaaagtatgctaaagatttgctgcaaagatttggaatgctcgagtgcaagcccatctcaacacctatggaagctaatgctaagctatgtgctcatgctgggaaggacttgcaagatggagcaatgtatcaacaactggtgggaagtctaatctaccttacattgactcgaccagatatttcttatgcagttggagtagtaagtcaatatatgcagcaaccaaaaaagccacatttggaagtagtacgacgaatactgaggtatgtcaaagataccattaactatggtctcttctataagcaaaggggatgaggttaagatcattg

SEQ ID NO: 358332 - DNA, 815 bp, Cannabis indica
tttatttttattttgtaaccaaaagccacctaaaggtttactaaatcttctcttatacgaaactagtagcaactagcaagcatcttaattattctgtcactatctccaaagcttcattgaattgaaggtattcaagggatgtagatcccgacatacagtgtctggcacgtttatggggttgtccatagtgtggtatttggcacatatgcattttagtcaatattttaaattaacttgataaatattattgtgtaaaatagaataatttgcgacataaatatttaagtttaactttcaattacgaataaatatttaaatttaattttttgcggtaataatatttaagttataattttggaacttctgtaggtacttggttaaataaattgccacgtgacaatccttgattagtccaagtcattaaatttttattattaaaaaaaaatagttcaaacataccaataaaaaaataacaacgtgggtataatggtttaatatttaacaataggtacttacagagttccaaaaatataacttaagtattattaccgccgaaaattaaacttaggtatttatttgcaactgagagttaaacttatatattttggggcttttttcattttttactacttttaaaacagtttttttttttttttttttttagttatttttacggtaattctactatagaaatttcctatttgcaacttagcgctgcaacctaaattgctaacaaaaaatcgtatagaaacccctattgctaactagcgatgcaaccactttagaaactcaaagcataaatttgaaaaaaaaaa

SEQ ID NO: 358333 - DNA, 1099 bp, Cannabis indica
taatattcttaatataaaaaactaaatggtacttgtttaaaaaaataataagaaagatgcaaaactaaattactataactgagtgaaccagtgcagtgcagtatatgtgaaaattattataaaaacttttttttttttaaataagtagcatttagtttttaatattaagaatattaagttttaaaataaaaaaaaaatgtaatgcatctgtaccctccacgtgtccatatttatgagttaacgaaagtggtagtaacaggtgtaagaaaattataacattgagtatttttacctccaaaaataaagataaggtatttaagtgtataaaatctgaaatattaggtatttacgccgtaattcatcctataaaatataaataattatttactaattaattaaaatattctaattatggttagacttaattaccaaatatttcagttacctgatttaatttctagaattaattgtcaaaatattttaacattaattgtggcagagaccttgatggaaggtctcacctatataaatataggatctcggtccccgagctcactacttattctgtgaaacacattaaatccatataaagatagtagagagagcttggaattaagcttgattacccacatcaatcagtttcatttgcagatcaaagcttgtgtggaacaaaagctcaaagaatcaatggctggaggtatctcgatccttagttttaatgcatatatatttcattaattctgtacttcatacaataatcatatatgcttcattttatacatataaatatctaacaattggtatcagagcaaattttaaatctctgatctatattttcagtttttatatatgtatatatattcatacaatcagtttaattttatttttatgttggattgtgattttctttcttttaatcttttgattcatattttgttaatttcattctatattaactttttatatgcatcaaaatgattaactttcatataaatatatatacatattcacattcatatatatatatacacccagggtcggccctaggcatagacgggctaggcccgtgcttagggcccacacctttcggggaccaaaa

SEQ ID NO: 358334 - DNA, 1007 bp, Cannabis indica
ctgatgttgtggctcggcaacagtttgagattgataaattaaaaactaaaatccaatcccttaaacagaagcaaaacactgcccaacaagaggaataaggagaggtggttgatcaagcgtatgttccacaacaatatgctcgtgaggatgagggtcgaccagaaatttatgctgaggagttttcttccctcaacgagccacctctcctgtacaatttcgatgaccaaagggcccttgatcagcaagtatatctctgctttgacaatatcgataatattgtggcccgagcatatctgtacgagcatgagggtccaatcaaagttcactgcatagactacgatgattcacatgcctgggtcttaatttcagaaatgctgcaagaggatgttgaaatctcaatctcaattgaagggtgcaaatatgttagggaagtagcaaacatgttccttccttggcctaaaacacctgagataacttttgttataaattaattattaatgattagtgatgtttgaatatcttaaatatttattcgcagtgaagtaggttctgcgaatatatatgttgcgatgggatggatgaataaacaactgttatatctgtgttatttgtcattatataggtgtgtttaaaattttgggggcattcaattacagccattatgctgtcaaaattttggtagaattaggatcaaatttgatatattatggtgtgttttgtacaaggtccactcgctcaaccgccttcaagacgtgatgtgccgaaggagaaagtacccatgccttctccacaaggtagtcatgatgaagaagatgaataattctcacgaaaggtcatggatttgatccctaaatcgctaaaatggatggttgttgaatttctaagactcaaagataaacgtgaaataatcacaattcttgtgcctaaaggattcatagcattgcgtatccagatcacgttatctggagaggatttgcagcaggttgcattgtgtgacttcatcggca

SEQ ID NO: 358335 - DNA, 819 bp, Cannabis indica
aaatcatgcctttcgaactttgacatgtatgaaattatgccccctgaactttcatccatgttagactttttttactaaaattagaaaaaagtccttaaatccaaccatctcaatagttcaggggtattttcaatgactttaaaagttcagggagcatgatttggtacatgtcaaagttcagggggcaaaaatcctaattagcctaataggaatgttaaaaagtagagaaatactaaaaaaatttagtggtgcttagagtatctttaatggtaaaattttaaaagatatttggtgaggtggccatattatatagtaaaatattgagatgctatactattgaagaaaaaatgataccattctaaaaatttgcatagataatatgttgtggtattgatgctatttttttttttccataaaaaagtgaagctaaaaaattattgtagttaaaaattaggatatatatataaaataataatgtatgagatcataattatagtacttttaaagagtagtatacattgaagtatttttaaaaataaaagtagtcaaaaataatagtgtaagaaagataaaataaaatattatattttaaatgatgtgtaaattgttactcttagcattttcttatgtgtcaacatcgttattggttcaactaaatatcagatcctatatagtttaatataataatttttaacgagtatcactagccaatcgcaaaacgacatatctagaggtgctaagcatcactagtgccctaataacaatgctctaaaaaggtactaacgagtatttaacagtgctctcgatgtcatattgtta

SEQ ID NO: 358336 - DNA, 1024 bp, Cannabis indica
ttagtagtacaaattcttgactagtggcaaaaaatattctacgatgggtccgggccacatttcacaaaggggtaccactatcagaaatgtgtgattttcactattttgattaaaattattattagtgcatgaaaactactttatatcgcaacgtgtccatcagaaaattgatgcacaacattcttggcttcttcctcgtaaaatttcacaatttttgagatgtgtatggtgagattttaacagaacactaacgagtgtaagagtaaagaaagaacttgttgaaatttaccctgtaaagaagaatattttcaatttttgaattagggggccattttaacaaaatttaacgcaaaaccaatcttcatattcaagtcttagagtacaaattaatatctgccattacattcgttgatacgtattctctaaggttaacatgcgtcatcctctatagtgccagccggatttcaaggtataatagaaggaaataccattccagactaacatgagaaaacatttaatgatttttatcaataacttatgcatttgaaattttatattattttcattcctattcccattccctgaaccctgaaccctaaacccaaaacccctaaacccctaaaccctcaaacccttaaaccgtaaaacagtaaaccctaaatcctaaacgccaaaacccaaaccgcaaaccataaccccgacaccctgaaccctaacacctgaacacagacccttaggtggcattttgttagaggtaatgaaatggaatggaaaagaaataattttcattccattcttttgtttagtttatttttaaattattagaatgacatcccaatagaatgccctttccaccattttggtggaatgaatattctatttcataatggaaggaacaacaattatcatgtaacatgagaaaaaatttaatgatttttatcaacttttttatgcattttaaattttattttattcaattctcattcccattcccctaaaccctaaaccctgaaccctgaaccct

SEQ ID NO: 358337 - DNA, 516 bp, Cannabis indica
tttattggttgtatgtttgaatctgttagtagacgatgtaattttatggcccataatgtggcaaagtgggcgttttcccatcagaggttcggttctgtgcctctatcctctatgcccgaaactatattttgtaatgaccgcgaggtctgaccgttttttaatctaatgcatgtacgcttttcttcaaaaaaaaaatattacagtgataatccatacgatgcaatctcaaaactaaatatacacaaaactgaaattctaaaaaaataccatcaactattcaccaatcaccaccatcaagagtttattcttcaataatcaaaaatcacaaaaaacttctctaacaatgtgagagcgaagccctacaaacttccaaagctatgtatagtactttcttcatgattataaacatacaaatatattaggtatatatatgagaaaaaaaaaacacaaaatactaattatataagagaaatttgcggccaaactcccctatgttttgattgttacacacttaac

SEQ ID NO: 358338 - DNA, 1329 bp, Cannabis indica
catgaagacatggaaaacccaatctaaggcccaagagctaaaattacacgaacctgtaacccaaaagccaacttgggcacctagggtttcacccagcgcctaggttgacatattcaactagggttttagtttttgggacagtcttagtgcaaaaatggtcaaaaacttatattacatcaactagatataccacgaacatatttgaggcatcaaaattagaattggagcaagttcatttttgagcacccagagccttgagcacccattacccaagttgacaatctgtaaatctaggcaccttccaagtatcagatcgaaggtgcaacttttgcatcttttttgtcttcatcaaaaacaggaaataagtcctttggaagaagaaatgacacttattggatacaaaaaataggccacaatgcctaggttgatatttttcaacctgtgccattttaaatggagtttctcaagaacacttccaaccatcttctttgtttttagaaaatattaagattcaactatatttaggaaccaaatagaattttcgaaggggcaaaattgggacccaacgcctaggttaacacctggagctgggcccagcgcccaagttgacatattatcaacctaggttgtttccgatcaagttcaccaaaatgtgttcaaggaatttttttctttcaacagaaataatgaaaattctgttgccattagaaaaggggcccaatgcctaggttgacaatcaacctaagacactgccttcaattactcaaatgtcaaatctaatacgaccattgaatctagaatggtcaaaaaataaggtaggagaccttatcctcaagaagccttggaagtataaaaaaaaaagatcccgagagcttgagagtaagtacctagcgcccaagttgacaaaaggcttggtgcggtgggttctgcttatccgattctgatgtcatttcgatcatctgtttagtttttcataataacaaagatttatgaagtcagagaagtcaaattcacaactttgtatttcttatttttggctcactcaaaaatgaaaaattttactaactgtatatatatatatatattatattttatatataattagagaataaaattgcacgtttcgtgtggcaagaaaaaaataatataataatattaataatttattattttgataaaattgtaattattttgaatgaaaaaatgaaaagatatttttttttgtttattttaaaactttataatataaaaatatttacgggtatttttatttttacacttcaaaacagtttttttttttgtattttttacagaatttcacacagaaac

SEQ ID NO: 358339 - DNA, 1638 bp, Cannabis indica
gctaactgctgatgatgattgtacatgtcgtgacgatcgttcggaagataacctgacagctctgataccaaattgtaacaccctaactattataagcgtgttagcgtgtattttttaacgtactatgcagctcgttgctaatcaacgaggttattgaaaatcgtgaataattaaaattttgcttattgaattaaaacataacatttaacacttacaaaatttcgggatcctatttacaaaatacagttacaaaagtttactatttatttaaaaaaatatatgttgcctggcgactaaacaacaaaagccctaatgtctcgaggatcgtacgctccagtcctaaccgccccgacatgtacaatcttcacctactcgctctcacggctcctcaactttagccttgcccttacctacacatagcattagcactgtgagtcgagagacttagtaagaaaagcataacataataaacatactaagatccgggttataatcaggcgcccatacacctaaccataacacaactgaatcaagatcgatcttgacaaagtatgactagccgcgagtccagcctatactcagtactctaatcgcagtgatgtagtagcagtaaactcataatatctgatagcctagcatacatctgttggcatctcggtgcatctccctatacacctcactgatgccctgatatgttaatctgagggctatagatttgcctattctgacgacaactaacatgcacgctaaacatgtataaacatatgcaaaatattatactaatcttaccttgactccgaattcaggtgtaccggccaacctgagtggaacaacagctcggcgaattataggctcctaaatcacatcaatcataatataggtaagtgacacgctaaatcacttttcggggacttaaacttgaaactaaaagtttccctatcgatgaataacatggcaataccctaaacatctcaaaaatgggaaaaactagggttctcaaaactgccccaaccggtagaccggttccccaaccggaattccggttctgcggggtttcctggggaccaacaggaattccggttcctacaggtccctctgaactggaattccagttcagtgcaggaatgacccgaaattccatatttcaaccaaaacaaccccaattcacatgaaaccttccagacctgttctaagcatcctaaagatcattttccaagcaacaaaaccaattcctaaactcagaaacaagaaatgccattaaagctccaagtttgagttctaaaactcaaagcttggttaaactaataaataaccaccgaaaccagctcaaaccaacataactaaacataatttaactacagagaacacaatcaaacactagcaacaagaacagcaactaaaatcccaaaaacatgcataattcatttcttcaaaaataagaaatcaaagagaaagctacaagagactttaccttggcttggatacactagaaactagctagaacccacttggaattgctgaagaaaactcaaaccctagctggtctaggggttcaaatcagagagagcttgaacgagagagagatgagcttcctttccaaattttgaaataaaagaaataatgatttttgttttaaaa

SEQ ID NO: 358340 - DNA, 589 bp, Cannabis indica
ggatgatggacgaacagaggaggtcaggggaggattttcaaaagaaccaagtgtgcgttgacgttcttcttgaacaatcatagcaaagacccgagaaaggtttggtataggttcattgaggagtatttgggcacgaactgaagcataagattcattgagcccagtaagaaattgaagaacttgattttgattataaaaatcaagaaaaaccttcatagcaccacaagtgcaagttgtattcggctgaaactctttcagctcatcccattgagatttcaattttgtgaagtaggaggtgacgaaatgatcaccttgttgcaaccgagtgagttgcgtttgaagttgaaagattcgaggagcattaccctcattgaatctttcagctaaatcatgccacatatcagtagctaggtcaaagtacattatactttgggtgattttagcagagatggaattcacaagctaagacatgaccatatttttacaacgaagccaagaagggagaagagagttacaagattcaggctttgggagagagccatcaataaaagctgttttgttcttcactgccagagccatggtgattccc

SEQ ID NO: 358341 - DNA, 640 bp, Cannabis indica
aatacttaaaataattatgaaaaatagttaagtgatgctaaaacagtaaaatatatttttgtaatgctatttaccatctatggtacgaaataaaaaggtttttataatttattggttgctgtaggtatttattataattatttgtggctaattaaatatttaattgagttttaaatagagtaaatattaaaaattgtgttcactgtttgggaaccgtcaatatgatattacgaaataattttagtctataaaataaaattaagactaggttgagatattttgttattttatttatttaaataattggtattttatatatagtttgactttgaagtgtaaattagtaaataaatatggataataaattgtacatgtttctatatagattaaatatattttatgattaagaaatatcctagcttctgattttggtaaataattacatatttgtatattttgttaataaatggtattttaatgagatttcacgtaaaaagtgtttgtatgagttcatgttttacgttaaaaatatctgtttgagtacatcatatgtgttggtgttaatcatagtgataaatgattgtgtttggtgtgtcatgcaagtgaaatcgacctacgtgttgtgtagtttgacgtaaga

SEQ ID NO: 358342 - DNA, 874 bp, Cannabis indica
gagcggggttatgaaatttgaccattttacccctagctttaaaaaaaccttattattgggttaaagggcattttagtcttttggttaaggggtgagtgaggtggctgcccaagtaattgacacctagcacattaatttttcagcaatgagtaaattggggaaaaccattttcatttgagaaaattaaaagaaaaagaagaaaattagaaattgagttctctctctttccttctttcggctgggacaaagctagggcaaggagcagatttttccttccatttctttgagatttagcaagaattcaagggggaattaaccaaggtaaccttagctactctcttgttatgtttttctcaagttttgtttagcttcaagaggtgatttctaggttagtggctgttaagttttcatgtgtttaggtttcgaattctaaggtccttttaggttgattttaactccttgctgttgattttaattggtattgatggttttacgcaattttaagcttagagttcaaagctttgagctttaatggcataacttgatttggtgtgttcttttgtgaaattctggctggaaatggttgtttatgcattgtataggtactctggagagtttggttaagtttggttgagttttgaggtcatgggggaatttttcgggttcccagcacagaactgaaattccggttctgggggacctgtggcaaccggtcgaccagttggtgacccagaaccggacttcaggttgggaaccggtctgccgtttgggggaattttcggaaccctagttttgcccaattttgagatagttagggtattgccatgtggtttatcgatagggaaacttttagtttcaagtttaagtcccggaa

SEQ ID NO: 358343 - DNA, 528 bp, Cannabis indica
aagattgaggatttatatcattttaggatagaatgtcgggaatatagtcatctgtgccattcaatttcatatgaaaaatttgaatgacatcataagtagatgatttatgaactattcatccaatgatataacattaagaaaattctaaatgaaaaatctaagaggaaaaacttaaggataattttgaattaaataagaattcaacgatgtcgcgttcaggcgagagtcaaagttattcttattttattaatctcttcattgtttcatattgtaaacactaatctaagttgtcatctttggatgtacaattagatgttgcatgtacaaatacttatttgttgagatctaacactattatgtttgtctaacggatgataatcctttgggatttgtcccattaaaaacaacaagttatgttagaccaacaacggagattccatatttatactacaacattaataagagagaacaacatgattcaatataaattcatacacaaatatgtaaaaatacaaaacaaacacatct

SEQ ID NO: 358344 - DNA, 621 bp, Cannabis indica
tggtctgagtttgggttcgaattcaaatttttgtctacgtccagatcaggctccaggtgtgtgtccacgtccttgatcttggtctagttgggtgcgagtcccaagttccattcccgatctgagtctggattcagttctgggtatatgtccttggttcagatctttgtctggttcgtgtttgggtcttggtccgggtctagctttgtctctgattccaggtgttggtttgagttcaggttcgagtccgtgtcacggattgtgtccaggtttggaccccgatctgggtctaggttcaggaccaggtccaagttggggtcccgactgcgggtccaagtttgggtctgggttaagatctcggtccagatctagttccagcatttcgatccccgtcttggtctcggtccaagtccacgttcgtatccggatccctatctaggtccaaatctgtgtttgggatcgggtcccagatttaggtaaaagtctgggtctcagttctggtccgggtacacgaccatgttcgagcccgagttccagtcttagttatggtatgaggctacgtctgtgttcgattctaggtctgggtcggggtcctggtcacggtcctagtcttgttctagggtc

SEQ ID NO: 358345 - DNA, 1576 bp, Cannabis indica
agctcacgggattcaatggaaccacacttatcccaatgggaaaagttacgttgccagttaccttgtgtccggacacacccctgagccctttttaaatactgcacattcgtagtggtagactgcccaactgcttacaacgcaatcctcggccgatcggccctagtggactttggcgcagttacctctatccgacacttgtgtctgaaatttcctactcaggaagctggagtagggactgtgaggggtaatcaaggtgaggccagacaatgttacaatattgcggcccacttaccggtattgatggtctgtgaaggtatcgagccagaggtggtggaagaagatgagttggatcctcgtgtgggatctgaaaaaattgtagaacctatagaggacgtcgaggaagtgccagtatgcgaccttgaccctaccaagatcctccggctgggaaagagcctagaaccggaggaaaaagaaaaaataattaaagcactaagggcagccaccgatgtttttgcgtggtgccaaggagacatgaccggcataagtccccatgtcataacccatgtcctcaatgttaacccggatatgccaccagttcagcagaagcgacgtcccctcgatccagtgaaggcggaagctctggagaaagaggtggacaagctactaactagtggcatgatccgggatgtgtattatccagaatggctggccaatccggtgctggtgcctaaaccaaatgggacatggcgagtatgtatagattttaccgatctaaacaaggcctgcccaaaagacagcttcccctaccgcggatcgaccaaatggtggacgccacctccggattcaagctattgtccttcatggacgcctatgtcggctacaactagatcaagatgcacattgtggatcaagaatgcactagcttcaggaccgataagggggtatactgctacctggtcatgcctttcagactaaaaaatgctggtgcaacatatcaacgaatggttaaccggatgtttaaaggccttctgggacgaaacatggaggtgtacgtggacgacatgttggtaaaatcaaaggcatgtgcaagccatgcagatgacctcgaggaatgctatgaagtggttcagagatttggaatgaaacttaacccgaagaagtgcactttcggggttaagttaggaaagtttctgggatttatcgtcagccagcgagggatagaggcaaacccggaaaaaattctagccctcctgagcatgccttctcccaagaagcacaaagacgtacaaagcctaaccagaaagattgctgccctcagccggttcatttcctgagccacagacaaatgcattcccttcttcaacattctgaagaaatgcaaaaaatttgaatggaccgaagaatgcgaggaggcattcaaaaaattaaaagagcacatggctaaacctccaatcttgtcaaaacccgttctcagagaagacttgttactatatttagctgtctccgagaatgcggttagtgcaaccctagtctaggaagaggaaaaaactcaacaccccatgtactatgtcagcaa

SEQ ID NO: 358346 - DNA, 621 bp, Cannabis indica
ttattaatgttaacgttgtctgagtttagtcattgtaattcaatgtgtaaataatggattaacaataaatgtgatcctcatataaccgattggacacctactttgtatataaaggggtgatccaccatgaaaatggacctacgaatcccttgctacagtggactaagcagaacaaaatctggctgaaccactataattcatcgtcttgtttactttttccagccttgttgtttgttcttgcattcccatccgagtacccgccattttaggtggaatactcgcacttgtcatttctcaaataattctctttcttatcgattaaattgtactttttggtgttgcgaaatttgctcgacaacagtagtggtcctcactagttacaattttactattttattcaaccatttctcttttctttcaataatattatattttataatttcaatcctatacatgtcaaaactatttattaaataattataattaatcatcaaataaaattgtcatttatcttatttattaattagaccttacaaaatctctcaattaacaaataaaccctaaaaccttttttcttcacaattaagcccttacttagtgaaaattcataaataagacata

SEQ ID NO: 358347 - DNA, 590 bp, Cannabis indica
agttatctactctttcattttctccatgtttcatctattatattccttggattttaattatacacaagtcaacaaaaccattagaaggagctaaatcagaattgcacgatctaattaattcaactgtcctttcatctatttttgggcctttatttagaaaaaaatagtatttttcaaaatcagcaaaaaaattgtataattttgaaaggggaattttttttggggcccctggactaggtgggccctaggcaaagctagcccgcctatgcccagggccggccctgagaacaagttgttgaggagaagaaggaggaggtagaaatctcggtactatctctctgttttacattatacattttgattttagttatcgactctttcattttctccatgtttcatctattatattccttgaattttaattatacacaagtcaacaaaactattggaaggagctgaatcggaattgcatgatctgaagcgagaagaacaagtcgttgaggagaagaaggaggaggtagaaatctcggtactatctctctgttttacattatacattttgattttagttatcgactctttcattttct

SEQ ID NO: 358348 - DNA, 647 bp, Cannabis indica
atttatcagaatcaataatattattttatttccttaattagaaatattctaatagttgaatgtatgtttttgtttgagttattatatttaactcgtttttatgtgtgagtttttatcttagttgctttacggaaccaattattttgtcttaaatttttaactagttgataaatatagtcggtttctttatattatatttgagttattatgtattattatttgtgtttatttattttgttatggaactggttctttttatatttatgccttcatattttttagaatcgattcttattttttaaaaaaaaaattatattcggttttttgaggtcttatgtgttatgaagtattttgttatgaaactagttttgtttttaatttatgtttcagtgttttaggaactgtttttctctttatttttaattataatcggtttgagttgttgcgtgttacttgtttatattcattatgttagacatttatatatataaactgaaatgtatatgtttaagtattaagtgcggaattaatcaaacatatatacactatgaataaggatcgaaatacctccagccattgaatcttgagcttcaaacccacataagctttgatctgcaaaggaattgactaccatgggtaatcgggct

SEQ ID NO: 358349 - DNA, 533 bp, Cannabis indica
ttgaggtatagttatatttcaccaggaactattgtctttatgttcattagtatatcatgaaggaaagaaaaagaaaaaaaaaacatgtggaatattaaattaagttttggtatatatatatattttccactatactggtggtatattaatttttcactataatatatatgcttatgattccagaatatagtttttatatgctattgtatatcgtgaaaaaaaaaatcatttaatagtatattagtttaagtttatggtatatttatattggtctaaggtatatcgtttgtatgtgatatatatatcgtaaaggatagaaaggaaaaaaaaactattaaatattaatttaagtatgaagtatagttatctttgactgagatatattaattttatgttcattgatatttcatgaaggaaagaataagaaaaaaaaaaacttgtaggaatattaaattaagttttttagtataattttttttactactatgctggtggtatattattttttgactatggtatatctgcttatgatt

SEQ ID NO: 358350 - DNA, 353 bp, Cannabis indica
attgagattgttagatttaaggacttttgtgtaatttcattcaattttactgtttcagtaattgtttatgtaccaaatcatagttcagggaatttttaacggctaaaaaaattcaagggacatgatttagtacatgttaggaggaaaaatatcttagaggtgaagattttgataacaatcatgtccgataacaaccatgttcaatttcatacaaaagttaaactaaaaaaatccaaaaatagctattgtgctcccttcatcgtcattgaaggcattaagaattatcgtcattgaaggcatgacaaattatcaagaatcggcacaactgctaggaagaggaattcatatttgaa

SEQ ID NO: 358351 - DNA, 710 bp, Cannabis indica
acttccatgaccgcctgctctcttttcaaaaagtccccaatctcgcttatgaatcgttgcactgacccattcggtaaagttaacataggagcggtgatcaatctttgtttcaacccctggaaactactttcacacttgtcagtccaaacaaactaacaattctttcgggtcaattcggttaagggcgtagaaatctttgcaaagccctcaacaaatctccgataataccctgccaaccccaggaaacttctaacttcagttgctgacttaggtcgaggccagtcacgtactgcttcaatctttactggatccactagaataccatctttacttaccacatgccccaggaaactcacctgaggtaaccaaaattcatatttcttaaacttggcatacaacttatgctccctgagatgttgtaataccattgtaagatgcctttcgtgagtttcttctgaatctgaatagattagaatatcatcaataaagacaataacaaaatcatccagaaagtctttgaacactcggttcatcaggtccataaatgttgctggtgcatttgttaatccaaaagacattactagaaattcatagtgtccatacagggtccggaaagccattttgggaatatcctcttcccgaatcctcaactggtgataaccagaccgaagatcaatcttggaaaagacagtctttccctgtagctgatc

SEQ ID NO: 358352 - DNA, 607 bp, Cannabis indica
acttgtaagaatagtatatttatgaaagtattaaacttaaataaaaagtgattacttaaatttttacgtatttttctttatatttttaagctaatattgaaatttaggtgtgtgattggattttccaaattaaaaaaatcgatccaatccaattagtaattggattggattagattggattttgaggtctaattggattggatcggatgatgattttccaaatctagttactaattggattggatcggatgatgattttccaaatctagttactaattggattggatcgaatgaggaagaaaagattagattggatcggatgcccacccctagtgatagttgagttgttttggtgttgtttgggggcttgaggttgtgtttgagcaaagtttgagtttaagaactcaagctttgctctctaatggtgaatttttatataaatgttgttggctggttttattgtatggattatgtttattatgatgtaagtaggtattctggaagttttgatgagatttgggattgcattggagttgtggtgtggttctgtgtgtatcctgcactgaattggaattcctgttcagagggacctgtaggaaccggaatt

SEQ ID NO: 358353 - DNA, 605 bp, Cannabis indica
aatgaagtgcagaagtggaaattgggtgttgcgatgaagtctctgtagccaattacaaacaagcaaagaagcacttcgctgaatgttatgtgcaacgggaagttttctggcgtcaaagatcgaaacaattgtggttgcaagagggagataataatagcaagtattttcatgcttctgcaactacgagatggaataattttgttgcaaaacttaaagatcatttgtgtgcatgggttgactgggatagtggttttgatgatcttatggtttcttatttttacgagtctattttcctcttcccaaatcgactggagagaagtcacaagcaacgtgcaaactcgtgtatcatcccagcagaatgctgagctgctattaccggttttagatgaagaagttcggaaagctttgttccaaatgcattcggataaattcctagggcctgatggaatgaccctgggtttttttaccagaagtgctggctgattgttaaggatgatgtcatcaatatggttaagcaattttttcataatggttctcttcccacagactttagcaaaactattttggtcttaatccctaaaaagaagtcagcctatggatatggg

SEQ ID NO: 358354 - DNA, 758 bp, Cannabis indica
acaaaataacattagacacaaacaacaaaaacaatcatgataattaacatgaaaaccagtttcatacaaactaacagtaacacacctcaaccttaaccttaaaaccacccacacaccaaaaatcacagagcgcacaaataacacaaatcaatctgtagaaactcgtttttgacatgtttccaaaataggtatgtatcaaataggtttccaaaaaggtatgataaaattgaaaaaacatattttcaatatgtgcattactttgcaacttgaaaattaaaacacctcacaaaccaaaaatctgaggatcccaaacaacacctgcatcagttctaactaatatagaaactgtaatatcagaaactagtttttaactgattccaaattaggtataggataagcccaaacaacacctgatatagaaactgtgatcttcatatgaaaacaggttttccaatgacaatttttaaaatcacagaatgcacaaataacacaaatcaatctcgagaaactggtttttgacatgtagaagtaataatagaaagaaattgtagttacaatgatttgactaaaaaaatggaccctaaaaaagaataaaataatctaccatacaacttgtaagacaaaaaattgcaataattttcaaaacataacaaaattttacattatgaagctaacaagatagtatagtataattatgaaacaaaatgacacctaaaaaccacctctgctgctaatggttctcttccaaattaggcttc

SEQ ID NO: 358355 - DNA, 672 bp, Cannabis indica
tttttagtattttttttaattgatgcttacaccatgccatagcatcttttacatctctcctttcttatttctttatttatttaatatatattaaataataatataatagtattttaataatttttagatgcttatcattggatatttttgaataaaaagtgccaaaaataatgtggaagaaatataaaataaaataatatatttttaagtgatgagtaaatttttgacactcttaaaatatattactattggagatattttaagtgagctatatttgcatctctattttttattaagtaattgttaatttaataatataaaaatacttttaattctattttatttaattttttttttcagaaaaatcaaactttcattgaaggaaataaagcccaaaaggaaaagatctaccaatagatcaatacaaacaaaacactgttgtagctactattacttgtatttgtttttaataatcaatacaaacaattagatagcatgtctatatcgtgaaacatataaaatgctctatctaagtctgagagtgcaattctaagttctaagagtggattcaacgaggaattaataagtaaggatttacttagtaaattcggttaacttattcgaagctcagcatatagatccatggtccccattctagttgagaccatactg

SEQ ID NO: 358356 - DNA, 643 bp, Cannabis indica
tttaaattgttgtttgtgttgatttggatgtgttcatgttggttttatgtgcatatttgatgattgtatggaaatcacaattttacgaagttaaatatttttcattctgaaagtattttacctggaaactagatgaacaattaataaatttaggcttcgaatttaatttgaattttttatgaattagttatgatttttttgaagtttgatgaaaatatcccaaaattgtagcacgagtgtgctcgcgcggatgagggctgtcactcggtcgagaccgagcttctgacaagccctgttcgaggtttgtcgggcaaggtgtctgaagcccttggtaacgtcgagctccttcagccaacagaggttgcatgcagcctcccccctcgcccatcacccctcgtacgcgcgcgcagggctatgcaactgaagccattaatttattggaggagatgcccactaatagttataattggcctaatgaaagaaatactcacaaaaaggtggctgggttacatgaagtagatcctatgacaaatatagcagctcaaatttctgctttatctaatccagtggctgccttagttgcttagaaaaacatatcaactatagaaaatgttgttgctgcatctactgttgggttttatgc

SEQ ID NO: 358357 - DNA, 819 bp, Cannabis indica
tggatggctggaaacatgatctaaaattacggaatcatggctttcttaatggatcaaatgttggctccctttaagtgttgattctagaactaagaagttgcgcacaaatttagattggatctaaattatactttgactagtgaactaatggtactaaaggataaaaaaataattagaagagtaaaatgataatatgaccaaaaataattacgaatcgatataaggagggctaatcactagaattgattatatcaatggatactgtagtaaaactcagtaaataaaattctataattactaagatttcgattctaaatttatagtagagtaatcatggaattaataaacatggttatttagttgatgagattcaataaataatctagtttattgtaacttaaaattataggtccatggtccctttatcgtcaccttgaaataggagtgtacgtcggtcagtttggttagtttatgttatatttcattcaacccaatataaaaattgagttacaaaaattaagtgcagcccatccattaagaaaaatggaattagtaacccgcccaatgaaattggtcgggttaacccgtccaaaccgacaattaatgttttattttttttacattcaattattatattataaataattgagataataagataaatatatatagattaaatttaaagttcaaatcaaccaccataaaaatacatagtattttaaactttatatttttttaaatatgtatgtaaattatatgataatgtaattatatataataaaacatatatacatatatatatatatatataaaccctct

SEQ ID NO: 358358 - DNA, 1456 bp, Cannabis indica
gaaaattatttttaaatatgtgtaatactacggtttaaatttgaattacaattttaaaagaaaaatacatagccacatttaatataagaaaaaaaaaaaagagagatatatgtgtagtataagtttaaatttgcattgtaatattttaaaaaatgaacaacactttttgttatatagttacatttaatataactaggtattagtaacatgcaatgcatatttgctcagagttgctattatctaattattaatttaaataattaataataataaaaattaaagccaatacaattgaactatattattagatatattgttaactcaaaaacttttcctagtgatatggacatcaatgtatgacacgtggtaagaacgatgacatcttgaggttgagtagtctcgagtcataacagtcaacttgagacgggtccctagccctgtgcccaggttgacttcgggaactctgaattggaagttcgagctttgataacttgtttctaactcactatctttcgtgtaccataaagacatagagcgaccaaatccaagccccgagagctgaaaatacacaaactgatacctcgaaagtcaacctagaaccgagggtttcacccaacgcccaagtagacatcctcaattggggtttcagcttctgggaccatcttagtgtaaatgggtcaaactttacattggaacatgaactggacataccacaaacatatttaaggcatcatataatcagatttggagaaatggcaaaaaccaaaaatgcccaaccgtccgagaagccttctattggctctgcctctacttctctgagcaacccacctgcgccacttgctctagtgaccggagttcctggttcgtcatctgctctgacgaaaactgccagaaaatcgaagacccaagctcaaaagtcgacttacaacctcacttctcctccagtcattacttctttgattgctactccaactcctgagtttggtgatcaagatgaatcccattcatccgatcactctctttcgaagtcttattcttcgaatggtgctccaaatgtcaaaaaaaaagtaatggtgcccttgcccacggtgagttctcgaacaagttccaaggtatacacacctcaaaaactcgaagtggttctgcccaaaagtgtctccaacaggaaaaagatggtgccttcattttcaaaggctaaaaatctcaaagagaatccctttctgtctcatcttcggattctgaacctgaagaaggaactgaggaggatcacgaatcagagggtttgtccgattcaagtgaagagtttgtcccaaagaactaccctctactgatgattctgggtctgaaagtgaagagcctgaagctgaacctatcaatgcagaacttgttgttgtccctgctgcaattccaaagaaggacaaaggaaaaagacacattgtctctccaagtcctattc

SEQ ID NO: 358359 - DNA, 1282 bp, Cannabis indica
atgaaccaaaaataagagggaaaaacgtgataaattatgggtggttaatggaggttacttgaattcaaaatgaacttagagaacagaaatgaagaatcgaaaatgaaatgaaaacaaaatgaaaaaagagagggaagagagtatgatttgattgatgatgcatggggagagcacacgtgtatgcatggtatgatgagtaagtggtaaatgtgtaataaaaataactttgtaagtagaaatgtagtaataggcgtgtgagggtaattttgtaataaagtgtgtaaaaaggatttttcatgtaaaaatttctaaaaattatttaaatcaattgtaatcctgtatgtatatgacattttttttaaaatggtgcacatatgactcttaaaatataatatgagtattattttaaattaaaataaataatatatattataaaaataaattttaatggcattaaaaaaataagactatttttttttacattttgaaaatgccactaaattattttgaaaatattaaataaataaataataaatatcatagtgacattttaaagtgacaatttatatttaggtgtcatcttaaaatatcaataaatatcaatttatttaagattgtttcacaccttgagagcttaatgtcaaagtattggtgagggtcctctaataatagaacaaaaggtgtcagttggtttagttggcgtcggctttgtagaagcaagaattcaggtgggattggctttcgtaatttgcgggattataatctttccttgttaggaaagcagggatggcgccttcttttgtatgaagattttcttgtgggacgtgtttacaaggcccgatactttccaaatggtaattttcttacggctgagatatgtcctaacctaagttttatttggcggagtgtgtttgaatcacaacgactggttcgtgatggtgctagaaggagaatcgggtctggtgtgtctacccatgtgcttaatgtcccttggctggtttctgatgagaaccattgtgtcatttctagacatcctgggttggcccatagcacggtctcgcagttgatgcacatcaatcgtaagcaatgggatcttgaggtctggcatgatttgtttgaggcaagggatattgagttgataatgaaggttcctataagtgataatgttaatgttgattcttagttttgggatgaagagtcgaatgagttttactcggttaagagctcctaccgctatcttcaagaactgaaaggtgaatggggtgttcagttggagtctgac

SEQ ID NO: 358360 - DNA, 530 bp, Cannabis indica
tttggggtcaatttgttaattaagatactttgtatggtctaattaataaattacataaatgaaaattttatttagtaattaattataattaataaataaatagttgatcgaacttagcttgttgtttttaatgggacaaatcccaaaggattgtcatccattagacaaacataatagtgttagatcttgacagataagtatttgtaaatgcaacatctagttaaacatccaaagatgacaacttggactagtatttacaatatgaaacaatcaagaagtttataaaataagaataatattgactctcgcctaccaggacatcgttcaatttttattttaatcaaattatcctttattttttctcttagcttattcactacgaatttgcttaaataatatattggatgaatgatttataaatcatctgcttataatgttattgtattttcttttatgaaattgaatggcgcatatgattatattcccgacattctgtctcgaaatgatataaatcctcgatcttagaatct

SEQ ID NO: 358361 - DNA, 665 bp, Cannabis indica
cacagtgaaatataatcatgattatatgttcaaaagtttaattcctgtgatttgtcagttcactaaatttagactgacatgatatttggcgataaggtatacttacaccttggataaattttatgtcatttccagggcattggcaaagtttaccagtatcggatgtatggaatatacattggatgagaccgatatttatcttggataagatatcataaacttactcttatatctttataagttaatatcactagatgatcttaggtctatagatcttaattctgatatggttaggcttagcttagttgtattatttatgttcttcaagttgttcgtggaagctaatcaatagttctggcggatatttacatcttagaaatatggtagttcaattgagtgggagcactaatcatagatatggaatctataggttctataagtatttagaactaagacgataatttccttcgagcttggctgaatagaaataaatggttgaggcctcattttagtgattatattagtttattgaagtatcatttacaggtagctaagttttaaaggataaaaatacattgaagggtagaacagtaaattgtccctattcgatgtagatcatctattgaggatctttgactataagaattgtaacaatggataatcat

SEQ ID NO: 358362 - DNA, 548 bp, Cannabis indica
aatacccctagagtttaataaaatctccgaaattgagaaattataactctaaaatttatttctaaatattggagtccacaattaaataaattcataaataattataagataacagaaattagtgcgaattgcctattctaatccaatttactaaggcggtcattacaattatccccccgttaaaacgatttcgtcctcgaaatctaacgtaaatagctctggatatgatgagtcctcaaattagactccaactcccaggtggcttcttccaccttactgtttctccacagcaccttaaccagggcaataatcttattctggagaacttttcttttctatccaagatcaatacaggttgctctttataggataagtctgattgcacttcaagggcttcataaatcaagatatgagtcgggtctaacacatatttattcaacatggaaatatgaaatacgtcatgaacaactagcaatgctggtggtaaggctagccgatacgctacctacctgaccttctcaagtatctgaaatggcccaatgaaccta

SEQ ID NO: 358363 - DNA, 929 bp, Cannabis indica
agaagagctcaagatcggctgtctgcagagcattaactttctctttcagcttcgtcacctcggccgtaagctcctcctccttagatttcgtctcctcctccacccgacaaagaaccgctcgaagagaagtcctttcatcttgaagactattcacttcagcatataaggtcttgatggtctcttcaagacggtcagaagcgtcaagatccttagtcaactcagctattttcttctgggtggtaaaaagcttcttgttggcttcaccaatctccattcgaacagctccaagttccaccctggcgtcgtcagcgtccttcttggccaagtccacctctgccctcatggtgttggacagagccgtgttcttagaggcagcagacttagcccatgagtatgtgtaggccaacttcagaccgacctgcacaaagaaaaaactttagtatttgagccaagtaaagaagattaaaggaaagtgtcaagaaagacttaccctggtgaattccttcaagactccggccatcaggagctccagagaagagtcattgtcagcgccagctagttgctcactaacctcaggaaccaaccggttcagatagtgggcaagcatctctttgcccttcttggcctctgaagcaccgacaaaggtggagtaggggcccacatctgctcgggtccactcttagtcagctcagacccacttctcggttgttcaggcctgtccaaactccctcctcgagactcctttgacttagaaacttttggagtagaggggtttgcaactgctagctcctcagaaagatcaatgaccttcccgacaggcgccttttccttagaggaggaccgctcactgcctttagacttcttggctggaggagatgcgttggaacttccgccaattctcttcctcagagcgtcaagcatcttctgag

SEQ ID NO: 358364 - DNA, 623 bp, Cannabis indica
tattattattagaaaatgaattagttagtcaatgaaagtctagatagttattgtctgtttgcttgaactatttttctagtgatatttaattaaatagaaaaattaatatttaagttgatttttatcatgatacttaaatatttgataatttttcttaatatttaattaaataggaaaattatatttgtgctaaacattaatttttaattaattttggaccaacataaattgaataatttttcatgatttattttatttaattttaagcaatttcgaaaattgtatttattttaaatacattattattttcaaattttgcattatatatctatagaaaattaaatttgagttgaaaattttaattaattttggatcaacttaaattgaatgattttcgtaatatttattgaaaaattaatactaaggatagaaaataatttagttttgcttttgcatcttccttaagtataattttataaatattaaataataatttatattagaattttattctaaattggaaattgtaattaaataaatatattttaaaataaactgattaaaataaacatcaaagaaaatacaactccttaaaataatgagcttttagttataaggatatt

SEQ ID NO: 358365 - DNA, 644 bp, Cannabis indica
tatgctgccgaaatttcggtagaatttggatcaaatttgatatattatgttctattttgtttagggtccactcgctcaactgccttcaagacgtgatgcatcgaaggggaaagctcccatgctttctctataaggcgttcgtgaacgggaagatgaattattctcgcaaaaggtcatggataggatccctatatcgttaaaatggatggttattaaattcctgaacctcaaagataaacgtgatataaccacaattcctgtaccccaagcattcatagcaccgcgtaccgaaatcacgttatctggatagaatttaaagtaggttgcattgtgtgacttcatcggcaaccaaggaatgctgtttggaatgatgtatactcttctttaatctaattaaccttatatatatggaattctagtcaaattaatataagacactaatacttaacaatatttttaccaggcacatctgggtgagcatcaacggtttgagaaaatttttcagacccagagcttctcgcagtgaatggtaaaaatgatgaagagaagagtcagtcttttgacaatgcggctagacgattagcagcttggtaatcatcgatgaataataaccaccaaatgttctttattccttggaatatcgg

SEQ ID NO: 358366 - DNA, 531 bp, Cannabis indica
aatcacgtaatacgcctatgttagttagggtgttacattgggttacctagaaccatgggtttgtttgattctatttgtgttgtgatataccgatttatagaatctgctcattttctactagtttaaacaaacttttcagtggatcaatatatgcggatttatatgttaaagagattgtaagattgcatggtgtgccaaagtccatagtttcgggtagggatccaaagttcacttcaaaattttggtagtttacaatggtctatggtaccaaacaaaaattcagtacgactttccatcctcagactgatggacggtttgaaaggatgattcacatactggaagatatgttacgagcctgtattatggatttcgaaggctgctggagtaagtacctaccgttgatagaattctcgtataataacattatccgagtacgatagggatggatctctatgaactgttatatggtagaaaatgtagatctccaattcactgggatgagacaggggagagaaaatacctaggtccaga

SEQ ID NO: 358367 - DNA, 576 bp, Cannabis indica
tttatcttttctggaatagttgaaacttttcattagataaataaaattaacttaattattaattctatttaagttctaacaaaaatatcctaatttaagttggtctaaaattaataaataaatcaattttcaacttaaatatattttttaacttaattaaatattagaaaatataaattagttactagaaatcactttcttgaatcttttctttaaactaagtgtgtttttctaaattaattttaaaatagtctaatgaaaaattaattctatttatttcaaaattaattatgttgcttattcaattttaattatgttaaactagtataattagcctaatacaattatttaaataaggtaaatgggccttcacatttggggttgttcatgtgagggagggttgggttcaatatgtcgtacccactacaatggccccctaactctcacacaaggtccaaatgagaggaatttaagcttaaattaaacaactgttattaattgaataagcccaatactaattgggcataaataaaactatcaaaagtgatatttcattgagaaatgtaagtaaatggc

SEQ ID NO: 358368 - DNA, 565 bp, Cannabis indica
ttcggaccccggacctggactcagacctaggtttcggacccagactcaggactcgggacccagacctagacttagacctgagactcgagacctgaactcaaactcaaactcgaacctacgacctagacccgagacccggacctgaacctaaacttggatcccggacttgggacccgagatccagacccggacctgagactcaaacccggatccaaacttagatttgagacccggactcaggactcgagacatggaccccagatccgcgacccaggatctaggacacagacctagacacggacccgaacccgaacccgactcgtagttggtgttggggtcgagtgtattgaaatatattataactttacataatatattaatgcaagtcaataccaaacatagtcttgtattaaataatactaaaacaatgcaatctaatacaatataatacaatacgtcataccgaatgagcccttagacacttagagtaatttagaatattagtgtaatatatttacttagagtaaatgtaaatgtgtatttatttaatttttttaatgtaatt

SEQ ID NO: 358369 - DNA, 876 bp, Cannabis indica
agttagggtgttacatttttagattgcgttagcatgttagttttttttagttgttaggcagttttatgttagtttttcaacttttacttttattgattttttaattttctcttccaagttccagattccaatccaaatgttgttgctgaaaaggcaaatgccattgcttctaatgtagaagaggatgacactgttacttatactcctctgttggataagagaaagcgtgccccgacattgaaatcgccttttgtttattttgggtcacatgatgtgagcagcactccaatggaggtaatgtcctcaagttctcaatatggaggagatgagagggattttaagatagttacgtatgtgaagggtctttacgctcttaacgatttattttctgatcccgtctctcttgaaatcgaggctaagtttgatgattagattaccaaaggattgctaaaacatcctaggtaattattttctttattctgtttttatttttttatttgtttgcatttcattttatttttccaattatttgaattcaatattgtttcttagtcgtttgttttttgatataggccttacaatgtttacgaggatggtgcgaagaaaatttccccggggttcaaattaggtgtagattatgttgaagataaaacatgattttatcatttgtcttgctgtgacatgtttatcaatgacacagtaacatttcttttttccttttaaaattctttatagctgtattatagttgttttatcattgttttttagttgagctactgtgattaattttttgtaatatttgttcacattttcttttgtgtttctctattatcttgtttgagcatatgaatactatattctattaccttaggaaaa

SEQ ID NO: 358370 - DNA, 924 bp, Cannabis indica
tacatgtcaaagttcagggagcaaaaatcctaattagccttttttttttaatataaccaacttgaaaataattcttactacgaacaaatacaaaaaatatagtcagttttattataacacctctagatcaaattattattaagttttatattggcaaaaatattagttcatggtcccatttgtatcactttgaaaaatataaggtttattttgtcatttaaacaaataaatagtctaactaataacttttgtaaaatacatggtctaaaatagtatttaccctaaaaatatgaatgaattaagtaaaataaatacatgtgaatatgtaatcgagaaatgctaaagggcaccagcggtgcctagcaccctcctacgtgtcaatatcactaatggtccaactaagtatcaggtcccatataatttaatataataacttatagagagtatcgctagccaatcacaacgcgacatatcgagaaggtgctagacaccactggtgcctaatagcaatgctctatgtgatcatattaaaagtatgctaataaacgtggcaaatgtattaaacaaaattgtcctatttttaaatacataaacttaaaatcaagtgggtcgtgggtgcttaaaaaaaatatggggataattttaaaaaaaaaatgcaaaaataataaataaaaaattacaaaagtacaattgtacagaattttaaatattttttatagttttttaaagatttttatttactataaaatattgtctttttgatgcattttttatgttgtactcttgttatttttgttattttgtatattatttttttattgtagtttttgtatgttttttttttactactttatgtgtattttctttatttgtttttctttgttgttttttagtttgtaataccgtaaaaaatattaaaaaaaa

SEQ ID NO: 358371 - DNA, 722 bp, Cannabis indica
tttgcatgcttagtttagattgttgttgttgctgtgattttgttgttgtttgcagaggtttaagcatgattatttgagtagattagagctagtttgatgcatgttagttgccttgattcaagcttagaatttttatactcaaaactatggtttttcaaagtgaaaatgtgaaaatagctgctgtaaagtttgattgtgtttgagttcagtttctgcagtttttatatgcatgaatatgtaattttaatcaaggtttgatgcatgatagggttgtttaaccaagtttgagttttgaactcaaagcttggagctttaatggcatttttggtatctgtgtgttctggactgttttgatgctttagtattgttctttggggtatttagaacaggtctggaaggtttggtttaagttgggtttgaattgaatgaattatgaatttttgaaggtttcctgcgaggaaccggaattccggttgtgcatccggaattccggatggggttcaggaatttccagaaccggaattccggttgtgcaaccggcctgccggttgggaaattttcagggaccctagattttctcgtttttatgttatttggggtattgccatgctttttatcgatagggaaacttttagtttctagtttaagtccccgggaagagatttagtgtatcacttattagtgttgtgattgttatggttttggagcctgtaaacctccgc

SEQ ID NO: 358372 - DNA, 741 bp, Cannabis indica
ttgcgctagtaaaatagaatttacttgtgatgtgttggcaaaaggggttggcaaattaatgttggtattagaacttttgccaacataaaatgaaaagcgttggcaaaaataatttttcacagcgcgtaaatgcgctggtaaaagttagattttagccactgcaaatgtatgctggtaaaactttgacctctttgccagcgcagtttgcaaaatgcgctggtaaaagttacttttattattcaagtattaaatataactccacattatcgtcaaaattgaaaataaaaattttgtagcaattatggtactttttgttgggagttttgcaacaaaataattactgattttttagtgcatacatataacaattgtaaaactaacaaacttttgatatcgaaaaatatttgtatttcataatttgttaattgatgagtcaaaatagttacaattaatattgtctgctcaacaataattaatttttcataaaacaatattgccagccccaattccttcaatagaatatacatatcacaattattttattaggtgactaaataattaatccaataataaattaacttccaagtaaagtaattatttcaaaaaattaggagctattgaaataataataagatgaaaattaactaattaagattcaaacaaattacaataattacaaaattatagctcgagtacatattattattattattatggctattttataaaataaatataaaa

SEQ ID NO: 358373 - DNA, 1059 bp, Cannabis indica
gcctctgtcagtttttaaaaaatgcagttggggaagcaaagccaaccacggtaactttacaattggcggatcgatcactagctcatcctaggggagtcaattaggatgtgttagtcaaggttgacaagttcagttttccagctgattttattgttctggatatggaagaagataacagcgtcccaatcattcttgggagaccattcttggcaactggccaagctttgatcgatgttcagaagggtgaattgaagctgcgagtacaaggagaagaagtggttttcaatgtgttaaaagcgatgacatacccaaaggcaagtgataactgtttatttgttgatctgattgataccattgtgaatgagaaaaagttgatagatgatcctctagaactgagcttaattgaagattaattgacggagcaagagagaaaagaggtaatggagtatgttaaatggcttgattcctatgggccattgaacataaagtattatgaagagctgggagtagtaccaaaagagcttgtgccatctactgagaaacctccagagcttgagttgaagatgctccctagtcatctgcgatatgagttcttgggagaagataagaagcttccagttatagtgtcagcttcactttttgatgtggagactgatagattggttagagtgcttcgagcgcacaacaaggccattgcatggacactgggtgatatcaagggaatcagtccctcaattgtgatgcatcgaattttgatggaagaaaacgctaaaccaataattgatgcacaacataaactcaatctacctatgaaggaagttgttagaaaggaagtggtcaagtgcttagatgctgtagtggcctaccccatctcagatagtaaatgggttagtccagtgcaagtagtcccaaagaaaggggggacgacagtattcacaaatgagaagaacgtgttgattcccacaagaatagttactagttggaggatttgtattgattatagaaaactcaataaagcaacccgaaaagatcattttcccttgccctttattgatcaga

SEQ ID NO: 358374 - DNA, 509 bp, Cannabis indica
catcagcctttaacgtcatgctaagccgaccagccttatacgacttaaaagctgttacatcgatattccattcgtgcgtcaagttcccaacaaagaatggggtggggtgcgtgagaggaaaccaacaagttgcacgagaatgttacaaccttgccctaaccaaggataaaaagaaagagtcctccagttaaagttcagacaaggggaagagcatttctaaatagggaaccgcccaaggcgaggacgaagatgtagatccccgacttggggaacaaaatacaaatgttgggccggtggaagaattagaagaaattgaaattgacacaagtgttccgaccagaaaactcaaaattggaaaaggtttgctgctccaagtaaaatcagtagtgataaaatttctaagagccaacctatacattttttcctggtcgcatgaggacatggttggaatcaatctttctataatttcacacgccctgaacatcgatccaaacttccgacccgttcaa

SEQ ID NO: 358375 - DNA, 720 bp, Cannabis indica
aataacaaaatttgaaagttagcaaaatatctggttacaatttaaatttttagattaaaataatcttattttaaatttcaaataaggtcattttattaaaaattaattaaataatttaaaaatataaaatatatgaccttaaatttaaaaatcagataagataatcaaaattttaaaataagataaccaactaagcaaaaatatagatttttacctattttcaaggttcaaaaaccaacaatatcttaaattaattaaaaaaaaatcaaatattagatttgaaatatgaaaaataaaaatctaaatacaaaattacacaaaaaattcgaaattaattccatgaaaaaatttacatttggtgcgggtggtacgtagtacataccatccgcgcgtgcccagaagggtgcacagccgagaaacctcggggctgggggatgccagtagcatgtccgtacgcgtaggtggggatttcagaaaacctgggcgatgcgggtgacacacccgtgtgtcacctgatctgcgcacgcatggggtgtatctccacccttaagatttttcaattttcaattttcaaaagttcacaactaattcaaattaaatcgaaattaagttcagtaaaaaagtgaattgcttaattttttccatactatccaacaaaaataattccagaataaaattccaattattttttgtaaaaaatttgcaaacattaaacaatca

SEQ ID NO: 358376 - DNA, 699 bp, Cannabis indica
aaatttagggccattttacatctcaacccttttacttaatctagaatataaggaaataatgaagatagcgttaataataataatcatgcaaaattgaaaatagtgtgggatcaaatcaataagaccttactaaagccacatagtaaggttatttaggcctgcccctgttccgttgagacaaaaggacgctgactttaacttcattcttgataatctcacttcaaagctacaggactggaaggccaagactttgtcaaaggcgggcagggctactttgattaaatcggtgggtctctcgttgccaatgtacgctatgcagaccaccaaactctctaaccgcatggtcaaccgtattgatgggctggttagggatttctggtggggttttgagaaaggaaaccatgggctccatttaaaagcttgggacaagctgtgccttcctaaatctcttggtggcctcggtttccggaaaactagagaaatgaaccaggcttttctggctaagtggggggtggcatatccttactggtagccaatcgttgtgctgcagagttttaacgacgaagtatttaaaagggaaggattttctaaaatataaatataaaaaactctaactcttggttctggaagagtgtggtgaaagctaactcaatttttaaagagaggtgcttgtaagctggtggctaatggagagaatac

SEQ ID NO: 358377 - DNA, 543 bp, Cannabis indica
tttaaaaaaatatataaaaatatatcaatatattttttattattttttgaactttttatttataaaatacattttcaataaaaatataataaactatttttggttgttttatagtatttatcatgaggttatttttttttgattattttttgttattttatagtagaattatagttgtcgtgatgttcattgtatttttattttttgctgaataaaatgtatttttgtaattaaaaattttaagttgtaaaattgtaaacaaaacataaaagaaaaatatttttaaaaattctccaaaaatgaaatatctcaaaatttatttcattgaaggcatactttattgataggagaatttgtattagaatatattgatatagttgagttgaattatttaggagaatattctcatttagtaccttgtatttttataaaagaatatatttaataccttgtgtttttaataatacttaatcgatacctcatatttttaaattgtacatatttagtaacctaaagtaaaatttaatcaatataattttatca

SEQ ID NO: 358378 - DNA, 1240 bp, Cannabis indica
cctaagaccttacagccagcatgttacaaatatactctgatacttacgtaattaatgagttattccataaaaagtgattgcatcgatccatattccctttatcttgacacatgttctccactgaaatgacagccgaattttgggtataaaaattatccctcaaatagttattttttagtaaaaaagtattttttgaataattacagagggcgcttttgtcataatcctttttggaaagacgcatactttgattatgtcggttgtacggttttgagggtaattatgaattgtctcttcatattctgccctacttccaatccttggccttcatatttcccaatccttggccttctctctttcttgccaaaatgccctatctaagttcaggagtttaccctcccaaactcataatacaaggatgcaacaaccattttccattcgtttccaagaacttcaaacctcaattggaaccggaaacaatggattccaaggttgaggagcttccaaccaatccaaaccaggggaaccccgtagcccgttatgggcgatcctcataagtgatccttgagggtaagtgttattccttgtgaatggtggtttgagtcggattattatattttttttactgacccccctttttctctttgtctccacaggaatggacataaatcttgtgagcgatcttagaggtcctcctcaggctgacaaggaatgccggaagaaagttgacgtggtttctatcagagaatccagccaacccaagacccaaacctgcaccaaaagacctttgcgccaatctctttctagtatcgaggaatttcttaagtctgggaataggatctcggctgcaagaaatgggatcttttgatgaggagaatgaggtctgtgcagagacctgggctctctacatgtagccagtctttcttgagccacatgtagcgggtctttctctaagctatgtgtagacggtctttctcaagctatatgaagacagtctttctcgagtttatcgacttcccctctcatcatttgtttaggaagatgacttaatggtttaccctagtggaatttttgtaaagacaagtttgtaacccaaattgggttttttcttatcttaagtgccttatactattttcactcgaacttaatacaattgtgtttgcttgcgttttttttcacaatgtaaacaactatattttgatgaaatgtacagtacgtttgggtttttccattgctcgta

SEQ ID NO: 358379 - DNA, 581 bp, Cannabis indica
agaaaaaattacctaataattttgctgcaaagtattcatttggagaagaatttttcaatgattgatcttttttcggaatctagaaaaatatagaacatacaaagaaattaaaaaaaaaaataataaacaaaaaaacttcaaaaaataaatatatattgactaagtaataaaaatagaatcaacacaaaaattagaaggaaaaaaaaattaacataacaaaaattctataaagtttaacttgattttggacactatatatataggttctttgtagtggaagaatacaattatttttttttaattatagaatacaaatagttttaatatcatagaatattaatatatacataaataataagagttacataagaatacaaataaactttttttaattaaagaatacaaatagttttattataataataggacattaatataaatataaatgataagagtcatacataaataatataaatatttttttttaatttaaataatacaaatagttttaatataataatagaaataaataagaaaattgagaaaataaaaaaggtaaaagaaaactatgtgtgatgaca

SEQ ID NO: 358380 - DNA, 745 bp, Cannabis indica
aataacatttaatgttgcatggttcacatgatttatttcaacctggacctgaataccgacccagacctagaccagggtcgaaacatgggacctggatctagacccagacagagacccagacccaaacccaggacccaaacccaggacccaaacctggactcaaactcaaacttagacccagaccgggatccaaaaaacccatacccggactcggactaagactcggactccgaccccaacctggacccatacacggacccggaacaaaatgtggacctagaatcagaactggaactgtgactaggacctggacttgagaccagaatcgaacccaaaccataaccaaaactcggaccaaaacctgtaccgagccttgactacgactaggacctgagacctaggacctaaatctagaccgagagccgaactgggacctgatcctaaaccctcgctgggacctaagactcgggagccagaccaagatccaaaccctgacaaggacccacacctgaactcgaaccaagacttggactgagacctggacccaaacctagagcgagacctggactaataccaagacttaggacctgaacccgaacctcgacctagacaaggacctagtaattagacttggatgggcgacctagaccagggacttaggccctggaacccaaacccagatcaaaattcgggactcgaacccaaaccaggacttgtcctagacctgggaatccaaagtcagacc

SEQ ID NO: 358381 - DNA, 1197 bp, Cannabis indica
tatgttacctcataaagcaaccatcttcataacatcacgttgctaagtcaggcaagtcgatgctttaatatgataatcttgtattgcattgcctaatcaagcaggctcgtcccatagcctgacacccatatgtcgcataactacatcacctaatcaggtgagcctatgctaaaaacctgcacccatatatcatataattgcatcacctaatcaggtgagctcgtgccacaatttggcacgaatatatcgcttcatctaattagacgagctcgtacctacgcctggtacttatcatatgtcattgacggccgtacttaagcccagtacgtcgctcgcatcacctaatcaggtgagcctgtacctacactcggtactcatcatatatcactaacgcccgtacttacgcctagtacgtcgccaggaaaattgcatcacctaatcaggtgagcccacatatcacatgcataatattatcacattatcaatactcaaccaatcagtcttttcattatatatcaatattaactatatctcaatattaatcaagtcataacaatagtaattatattaaatacaccgtactatgtagtacaatatacctcaagtttcggttcaagtatgttggctgatctacttgaagtacaatcgatgatctcgggccctaagtcataacaataatagactaacaagtgtttatctcaaaatactgcttaataattgcaaaggacaacctaaggtttcctaccaaaactcatagttcaaatacactaaaataaaacttatattttagctctaaaatatacaccatatggtagagcttgttgcaagcttcaaaacgatatatagaacgtccaaaacgaacactcgagtgaaaagttatgaccaaaatacgattcccgagttccctaggttgctcgaaatggtaaatcggttggccagaatcggttgactggcttacaaactggttgaccggtttatcaggggcaaaaatatgatttttttcaagtttacccactcaccgaaacgctaccagaacctgtccaaaccaccccaaacttcatagggacatatataccatatatactaccatacttacgtaatagaatctaaaatcgagccagtaattagcaaacgccactagtgttcggacttaagttataaaaagttctaaactcaatttctaactcaaaatcacct

SEQ ID NO: 358382 - DNA, 661 bp, Cannabis indica
acgctcaactagttgtaggtcatgtcctaggtcaatacgcaactcactacaaaaataatggcctatctgagcttattttaagacttgttaagttggctcaaaggctgtactagaaggcaagtccctaaagaagatacaatagctaatgcactcgctggactagccaccaacatctagtaagtcgaggaaaactcagcatatgcttagttctctaaagaactaggcatccctatttcaaaaggaatatacatgttgtacaaccatccaatatggatgacacccacagtagcatacctccaaacacaaaccttgacaaaaagtaaggaaaagggggatagttgttgggtgtacaatcctagacagtgtaacgcgcacaaacgggatatctcaatacaacctctaatatgtgataccaagtaagaagttgagcagctattgacaggagtgcataaacgctctacgacagctatgttggggggcaaagccaactaagtgtaaatgggatcaaactgcaacatcaaaagagcctccaaaaggctggccgcgcatgacttcagcaagttgcccggccatggaattaaaaattgttgggttttatgccataaataaaactccatttcaatgtaatctattttatttaatatcaataaagaaacagaag

SEQ ID NO: 358383 - DNA, 514 bp, Cannabis indica
acataaaaatattgcataaaatacaatttaatataatacaatacaatacaatacgacctaatacggcgttctaaacgagctctaaatgatttataatattgtaattattttttaaaactttactgaaatatgagaattttgttaaattttaagactaattgaatattaatgacatggtacttttaatgttggtttgtcattatcatgtcattgcaacatattttaattaaaaaattgatttaggatataaaaattatttttgttattaaaattaaaagtttagaaaaattaaacaatattttaatttaaaatactttaaaaaacaatattttaatttaaaaaaacaaaaaaaaaaaatataatcatcgatattacattaaggctaataataatctttttctcctaaactttgacatgtaccaaatcaagccccctgaatttttaaggtcgttaaaaatatctcttgaactattgagattgttggatttaaggaattttttccaattttagtaaa

SEQ ID NO: 358384 - DNA, 598 bp, Cannabis indica
gataaatgaaccaagcagttagtcttatatagaaaaaaaaaacaggaagctgttaaggagatacaaggaaatatgtcaggaattatgataatgataagtaagctctgaatatagccttatcacaaggagtagcttcttcaatctagcctgacataaaagcagtatacctattttagtaaacaagttaagttatagtatattatattatatataactaatatattactaagatagagtaagttcatgacatctctctgcaaccattaagaatagcagggtgctacaaaactaggctgttgagattttacaacctctttctacaagccgttgcaagatcaacagtaccacaaaatcatgctataaagagaaataaagtggtcacacataggcttggtacatgaaattcgaaataaaaaaaaaacagaaaagtaaagaaaaaaaaaactttcttttaaatatcatcaagagtgagagggtccggcgccaccaaaaggatctgataaaggaacttcaaatgtattactgaaagggataacacgataattagaactaggaactgtcaatgagactggatgtaacaccctaactatcttaggcg

SEQ ID NO: 358385 - DNA, 654 bp, Cannabis indica
taaaaggaggtacattgaagagatagaattaaaacacatttcatcaaattcttctttctacattttaagaaaatgcacattagtgttcaacaaattcaatcaagtgtcaatcttgtaaacttattcacaaagtcattaccaacatcaacatttgaaaagatagctcacaagattagaatttattgattaaaagatcttcacgaatgcctaaatgaggggaagttagtttacactgcactacttttcttttgacaaaatttttcaacaaagtttttaatgaaacaatttttatggacatctaagggggagtgttatgaaatattatatatggatgtccaaattattaaattaattatcatcattaatacttaattatattttcctttattacattaatttagtttatcattcttttaatcatatttttgtataaataagaattcaccctattagaatgaataattaaaaaattctcattcagtttctctttctctctcaatctttatcttttctactgattatttgttattatacacttgtaaataataatttggctaattagtaattttttcctccgaactttgacatataccaaatcatgccccctgaacttttttgaccgttaaaaattcctcttgaactattgagattgtt

SEQ ID NO: 358386 - DNA, 533 bp, Cannabis indica
ataactcttaaatgatgaacaactattttaaacaatatgacatgattttgttttaatttcataaaatgatataaaaataagatatcataaaattgtgtcattaacatgaaatattatatgccttcataaaattttagatgacaatcgagaaatctggtaccacattgcgaaatcgtagatgtccacaatattagaattgtataaatgcatttttagagatgacctcgaaatgtaaagattgtgatggtagaattaggtacccttgtgtaagatgtgtgaacaataggcttcaaactttacctgttgtaaaagcacacatatttgattgtgtttttttactggttacgagaagtggacttaccacggggaagcagaatctagcgccactaatgtaatgaatgaccatgatggcactgatgatgactgtgaaattgatgagatgattctgatagtggatcaattccttcagccgtcatttgaaatggatgataattgtaacaccctaactaacataggcgtattgcgtgattttt

SEQ ID NO: 358387 - DNA, 1058 bp, Cannabis indica
aaaaataataaaataaaatacaaatagttggtataaaaataaggtgaatttttatttttacattttaaagtagttatttttttgtttgtatttttacgaaaatttacatagaaacccacgtagaaactaacggagcagcttaaatcgcaattacaattcatatagcaacccacataaaaattatcgaaacaacttaaactgtaaaaataaaaaaaataaataaaaaaaagtgaaaaaaaatggtatgtaggatgattctcctaaaaataattgggataattacataagatatttttacttttaccgatttttttttttacaattttacgattttccatagaaataacacgaaaacaataagaaaacaacataaaagtaacaagaaaataacatctaaataacatcaaaacaacaacaaaaaataacatacagataacgaaaaatcaaataacaaattaaacaagagtacaacataaaaagactagtatttctagtaaattaaaatcaaaaaaatcataaaattatttaaatttatagacggttatttttattgtttttatctatttgtgaaatatccttttttgtattttcctcaaacttttggcatccccactaaattatggaatagggtggctataaaaattttccactcacctatttatttatttcgtaggatgctcaattaaatgggcctagttcattactttgtattgacttttaccacatatagaaagaaaaaaatatattgtacttttgtatatatacaatcacattttatattaatcataataacaaacaatggctaagtggatttctatttcatcatcatcattttcattgtgtataagtgaaaatgtttttagtaataatcatcatcttcccctcctctttcactcaaatatttctttcactcaaagccaaagtaattacattttttccaatccatataatataatatttgcagtttgcccccttacaattttattttatacaattttgaacctttttttcatatgaatttcaggcatggaaggggttaatagttgagtgcagtgcaa

SEQ ID NO: 358388 - DNA, 195 bp, Cannabis indica
ggaaatctgcatgatttccgcgcgcgaaattgagttctctaaaaaagtaactttcttaatgttttccatactatccaataaaaataattctagaaacaaatattcaattattttttacgaaaattcacaaacatcaatcaataatcaaataacactctatacagcatgataccatccaaaacatcaaacaatcgt

SEQ ID NO: 358389 - DNA, 1018 bp, Cannabis indica
ttttatactcatctgtttgcaattctctaggcttccttggcttcttttgcttccaatcgactactctctgagtgacttgaatatttgaagaacgagactcacaaattaatatcccagtccaaggatgtgtgtgagaaatgagacaatgcccaacaggagattacccgcctcaagcaagaagccaagaaagagaaggaggaagcaaagaaggaagtcgagaaggcaaaagaggaggctaaaaaggccctcaaagtctaagctgacgagtttgaggagaagcttgctgagaaacttaccgagaaagaaatggagaccgaagaatggtgcgataaagttggtctttcggctgtataccgggcctggctttggaaccctaacatggataccagcttcttggaggagaacgaagaggaaactttagctctctgcgagaagaccaagatggaagaagaagacaacgaggttgaggaagaagaagaaattcgatccaagtctcccagcatgtagacttggtttatttatctcccttttcttttcttttaggaaatggccctttgcccgagacaatggttttgcccctagtggcaattttttgtaaagacatatttgcaaggttggacagccaactttgcttttttaatgcctcgcactttcaagtatgaactttattatgcggatgtttacttgcgttttagtcacaatataaactatcacaagcataaagtttattaggggtttccgttgattgtcctttctttcaacgctaagtagttaatttcctactttacgtgcgagcaacttatctgctcattcctcaatctacgaaccgtcatcgattccatctcgcgatcattgaaaatgatcccattttaagcacattcaaatatatttttaatgaacttgtcattttatatatatttttattgcgtacatgagtagttaaaatttctacccacgtgttgggtttaagtatttttttcaagacatttgtatgtctcgtttaatacttccccctagc

SEQ ID NO: 358390 - DNA, 1335 bp, Cannabis indica
aggagacattttattccactgcacccaatgtaaggtttctcatactttatatgtgtttaatttataatcgttttagaagttcatatttagggtgttaatcaatatacttgtgagtagatctaagatcctggtaaaataatttccaacaatcttctcagtagttctatgggcccagagcaccggaggtagctcgtcaacccatctgcctttggcagcgtctagcttcttctttatagtatcctttaggattttattaacggcttcaacttgtccatttgcctgaggcctggatactgacgagaagcttttaataattttattcctctcgcagaatttagtgaacaagtaaccttcaaattgggttccattatcggatactatcttcatggggattacgaacctggagataatgttcttgacaacaatgtcaaggactttcttgtaggttatgaaaatgaggggcttgacctctatccattcagtgaagaagttgactgctactaccgcatacttagctcctcctcgcccagtcggtaatgtcccaattaggtcaatccgccatatagtgaatgggtagggcgaggtcatcattctaagtttttttggcagtacgcgaggtatatgtgaaaacctctgacacttatcacatttcttgacaaactcgtgtgtgtccctattgatcgttggtcagttatatcattgtctaaagatctttttagacaggctttgccaacctgcatgatccccacagaagccttcatgaatttctctaatgattttgttttcttctgcggggagaacacaccgaagtaggtgcgttgaataccctcttccatatagtttgccttcgattattttgtagcgaggcactgaatacaatagttttctcgcctcgcttttgtcatttggaagttgtccgtcgagtaaataattgataataggtgtcattcatggttgagagctatctatcatcttgaagtctttagtttcacatatacttgactcgctcagcatctctaccgggactagattcaattcatccaggttattctgcgaggccagttttgctatggcatcagcgttggagttttgttctcttaaaatttgtttgattttaaagcaatcgagcctttccaagttcttccgaactttctttaaatactttgccatttttaagcctttggccttgttatcccaatttctgcactctaacgtggcatcacacgatggtgacacgtggaatcaactccaagtatctgctcgcaagatatagtccgaacatgatacctcgtatgcttgctcaagacgaagcagtcagtaacccgcacaaaatga

SEQ ID NO: 358391 - DNA, 548 bp, Cannabis indica
cggaaaagttgctggagtagctgtcggcatcgaaaaagtcacatgagttgctgtcggtgctgaaaaagtcgtcagaattggcactgtcgcttgaaaaattaccaagaaagtttcttggtgattttttcaacaccggcagctactccaatgacttttccggcattgacagcaaacttcaaaaaagtcgtcagaattggcattgtcacgggaaaaatcaccaagaaactgcttttttcataaagaaattgatttcttgatgaagaaatcggattcttagtgattttttcgatgattttttttgacacccgcagctactccggtgacttttccggaaccgatagtaaactttgaaaaagtcgtcagaattggcattgtcgccagaaaaatcaccaagaaactggtttcttgatgaagaaaccagtttcttgatagaagtaccgatttcttgatgaagaaaccagtttcttggtgattttttttagcacaatgtcaatttcaatgacttttctgaagtttgttgtcgatgccggaaaagtcgccggagtaat

SEQ ID NO: 358392 - DNA, 448 bp, Cannabis indica
atagagtaaagtaggaccaattgaaaatgacatgaatagatcaccatgcatgtaattttcataccacattatcatgattgatttatgtcatttggctatgttgatgtatgtgaccattgatgggtttagttgtgattgatacaacgaaaatcgttttgatccgacgttgatatagttaatggacgagattgcatatgcctatggttatgatgacaaagttatgagttcaataaggttaacacatttatatatatacatatgtggaccagtggacgattgttagaaattattggggccacaattgtatatataaaatatgtgttgggtcatcaaataaataagtcaaatttatgtggtttattttggaataaagttgatgacttaagagcataattgtcatgattttaatgtgtggataccaattagacaatttctattttgatgaggg

SEQ ID NO: 358393 - DNA, 825 bp, Cannabis indica
gaagaattggaggaagtaccattcgacttcgaacaaccatcaaaattagtcaagatcggaaaagagcttcctaaggacataagatctgctttgatccagttcttaagggaaaaccaagatgtctttgtctggtcacaggaagagacgaagacatggaaggaataagccccaccgtgataagtcacgccgtaaacatcgacatcgaaaacttcaagcagttcaacataaaagagaggcaaggcactaaaggaagaggtggaaatactgtggaacaacaacttcatcaaagaagcctactacccagtctaggtctcgaaccccgtactagttccaaagccgaatggtacctggagggtatgcattgactttacagacttaaacaaggcgtgcctaaaagattgttttcccctgcctagaatcgaccaattggtggatgcaacaaccggccatgaaattataactttcatggatgcatactcggggtacaatcagataaagcatgtacccacctgaccaagaacatacaagctttcgaatgaacgtcggcttatattgctacaaagtaatgctgtttggcttgataaatgctagagtcacctatcaaaggttagtcaaccgaatgtttaaagaacaaataggaagaaacatggaggtatacgtcgatgatatgatggtaaagtctaagaaggcccgagggcacattgaagatttaaaggaatgttttgagatcctaagacaatatcaaatgaagctcaatcctctaaagtgttctttcagggtaagcttcagaaaattccttgggttcatagtgaactctaggggcat

SEQ ID NO: 358394 - DNA, 522 bp, Cannabis indica
gccatggtagttatgctcgtcggagcttgtccaactgtgaagggtagccggatttgtcctggaggtgaaactccttgactggagaaaccatagacaggctagaggcattcagttagatcattgagctggagccccatcttctcgtaagcagtcttgaacaaaatgtttgaagaagctccattatcgatcatggttctagccaccattttgtttgctatctggacttccacgaccagcgggtcgttgtgctggaatcttatctgaacatcatcttcatcgttgaaagttatggttggctctcctgcgcgtggaactttcggcttcctctcttccacggccaagataacttcttcttgctcgtactgagctgtttgagcatatctctctcgagcttttcccgtatctccagggatgtgtgggcctccaaaaatgacttgcaagtgtctatctatcggtggaggcaacagactttggctgttctgaccttggttggcgttgacatacctgttgggttttatgccc

SEQ ID NO: 358395 - DNA, 912 bp, Cannabis indica
tttttttaaaaaaaaaaagatagtataattcttgataaaagaaaattaatataattgttatataagtattgatcatattaaaattattttgactggtcctatagtacaaagctaatatttatgttttacaaaagttattaattagactctctgttttgtcaaatgataaaatagactttatattttctaaaatggtaaaaataggaccttaagttcaattttcaacaattttattttttaatataaccaactttaaaataatttctaacacaaacagatacagaaaatgtaaccagttttatcataacatctttaaatttgattattattaagttttattttaacaaaaagtcagttcagggtcttgtttgtacaattttagaaaatacaggatctattttgtcatttaacaaaatagagagttcaattggtaacttttgcaaaacgcagagagttcaaaatggtatttacccaaacaaataatccaaaatattatcggattatttacaccacatactgaaatttttaacttttttacttttttactgtggggtggaaatttttttaaaaatattgtgtaagttttatactgtatactgtgttaagttttcactgttgttatacgtttattttgttgttatacggttattttttagttgttccagtattgtttttagttgttcttttttgtgttcaactattgttttataaaaatacagtatttttttaaaaaaattccgtataatattatttttgtaaaaattaacctaaattccagtatttttgtaagtttttcatattataaaaaaaaaattaataattcaaaaaaaagaaggaaattagactctataccttttttattattatactcttttatttttattcttcttttttaaagttctattattttta

SEQ ID NO: 358396 - DNA, 799 bp, Cannabis indica
ttattgggtagatcaaactcgtcataggcatcttcctgccctttcttatatcgatgaaggtatccttgcgatatgagactttctatctcatctttcaactgacgacactcttctgtggtatgaccaatatcaccatgctattcacaccgcttacttggatccctcttgtgccgcacatgtttcataggccttggctcgccaaaaatagcttcttatatgtgtgcaaggttgatcttttcccaagtttcattgagctcggtgtattcggtataaagagggatatacgttgtcattttatcagttgttcggtacgaccatagaacttcaggaagttcctctagccaatttcctttagcatcctcgagtcttttccttcgtgtatctttcacggtcttgttgactggttcaacttgaccattcgcttgaggatgcgccactgcggagaaacttttgatgataccatggttcgcacaaaaatcagtgaagaactggctatcaaattttttccattgtccgaaactattttttacggcaattcgaaccgacagattatgttcttcacaacaaagtcttgaacttttttagatgtaatggttgctagtggctcggcttccgttcacttagtgaagtaatcaattgcaaccactgcgtactgcactcctcctttacgtttgggtaattgtccgattaggtcaattccccaaatggaaaaatgccacggactctgcatctaagttaacacgttgggcggagctcgagttatcttaaaaaatctctggcatttgtcgcattttttgac

SEQ ID NO: 358397 - DNA, 574 bp, Cannabis indica
aaaatattgctcaatatagaccatagccacataacattttctttttttctttattttttttttctttgttgagaaaaaattattttttaccaaaaaactcattaatttaatgtgaactaagactatggtgaataactttaacaattgtaactattggagtattttttattggaaaatgtaccgaatcttatctgaatgagagagaaaaaaaaaaaaaaatttaagatgatgtgtgtatttttgacaactatagatattgccccaattggagatactgctacataaaatagtcttgaaaattagaccattgctcttatctctcaatagctatatccataaatagttttttttttttgaaatatttgcaccaacaactattcttattaaattatttaataatttacccttacctattttaatactcacaatttaggtatttcttttttataggtataccaatgtatatttattgcttctctctcctaaattctgcctacatgctagctttttcttttttcttgttttttttttcttttttttttttagtacatagtagcttttttgtttttttttt

SEQ ID NO: 358398 - DNA, 616 bp, Cannabis indica
tgatggagagtactttataattgtctggatagtcaatgtggtatataaggagaccattaaaattctgagaaatgattactttattaagcaattatggaaaggcatactcacccagaatagggaaaaacttatgaattgaggtattatttaatagacatgtaattgagtgattggtggatgttggatcacaaagtaagttatttattaaacaacgagctatataattgagtgtaaaataagttttaaagtagttaaccaagttggtatggtaatttgtaccaaggagttatcaataaaacaaaaaatatacttgaggtatgtatatttctagatgcgtttgaaaagattatcaagatttctactaaacacaaaaaagaaacttcaggatcaagaaatgatctttaattaattgttattagttgagaattcaagaaatgggtatttccagtttagttgtgggtacctggtatgagcagtgttgcctctactgtataggtttaatcaaattactttataatggtggttaatcgtaaatgattgggaaaaaaaattagaagttgtgtcatttcaagggaaatcaatgcaagttaaataagtggagatgaacaagatttaa

SEQ ID NO: 358399 - DNA, 635 bp, Cannabis indica
aggaaaaatggccccagctcgctcttgagatcactgaaaccaagcttctgtcgagacatcttcagatacaacaattaaagacgtgtttaatatactatcattttaacctagtaaaagcgggaaaatcacaactatataattttcaaatcataaccgcatttacactacgtgatatgtaatcaaaccccatgattttaggggatgatcgttgtaaacagattacagtcaactttgtaattaactgctcactatgtaattataaatagtgacaaacaagatcaaaaagggaacagaaaaactcatacaaaagaagccttgaaaaataatcagaaatctgaataagattgactcgtggactatgcagaattttaactgcaaaaccgcgtaaaaaaccttgtgtgttcagacttgttattttataacttttatttattctgtgtgagattgtcatagttaggctcaaatttagttaacgaaaatttgtgttaacagtttggtgctttcattgagagcctttgtggaaaagctcagaaaaaccttccattgttttgaagaaaaaccacctcctttgttacgaattttatgtttattacgcaagtgtacgcaatcaagtagtatctcacgcaagtgaggtc

SEQ ID NO: 358400 - DNA, 545 bp, Cannabis indica
ttttcgtcgccattcagggggagctctttgataaacttctaattttcttagggggagcatttggtttaggacaatattatttttggcatggattatgctcaatgaagggggagaaatacttatcctttgtgtaaactttgtgtaaatagttgcgtttgttgtttggttgtttaaagtgtttgttattctgttagtttagactctgttacattttgatggttgtactttgttttgctctggtattgttgtcattgaccataatttgtcaagggggagattgtaagaaccagtattttctgtagtgacaaattatgtccagttgtgtctgggattcgttgtaatacccggaattaagaaatggattagcaaaaccctaactagataattatgtataattgaggaaattatattattatataatttaatatatgtgattttatatgaattttaatatattaaagaccccgttggtgagccaggggcattttggtaattatgacccgagaagggtaaattgttgagattaaattaattacgtgcttaat

SEQ ID NO: 358401 - DNA, 564 bp, Cannabis indica
acaaagaacctatatatagtctctaagaatcaagttaaactttatagaatttttgttatgttaattttttttccttctaatttttgatgttgatctatttttattacttagcaatatatatttattttttgaagtttttgttatatttttttttaattcttgatgttctatattttcagatttcgaagaagatcaatcattgaaaaattcttctccaatgaatactttgcagcaaaattattaggtaattttttctcttgctatgaaagattatattactttttatttttatttggtttttaattacaattttttttgttaaagtttttaattacaaattaagtattaagtttttctctaatagattttttggtaacaaagtccactcatagttttgaagtttttgttatattaattttatttctttttaattcttgatgttaattattttcactacttagtaatgtatgttcattttttaagtttttattatgttttttcttattttttgatgttttatattttcagattacttggaaaagactattcattcatatattattc

SEQ ID NO: 358402 - DNA, 417 bp, Cannabis indica
aataataataataaataataataatacactttaaataaaaatagtgtgctattggactcctcataagataggaatttatatactttattcatttatttatttttaaaacaagtgattaataaatttattattaataataattattattaataataaaattcaactgatattataaatataatagatcgaattaacagaaacagtgacaaacaggaccaccttcatttttacatatacctcctctacaaggcccctttttacactcggcatcgcatttagtgggatttgagtcagaatgaggacataaatctggacgctttgtgctcttgcaacatgcaaggagcataggagaatcttgtcctagagtaccattgaagcctacaaaaacaaaatataaagtatgactactaataataa

SEQ ID NO: 358403 - DNA, 644 bp, Cannabis indica
atgaaactggcgcattggtggaagcctttacctgctgtcggtcaggggtgttgcaacctgaaatgatggaagctttgggtgttaaggaggcactaagttggattaaacggaaagattggaggaaggttgtcattgaaactgatagtcttactgtgatgcaagcgttacgtagctctattcctatggtttcatactttgggagtattatttctgattgtaagatgttgttaaatgacttgtgagatgtttatgtcaattttattagacgttctgcaaatagtgttgctcatttattagctcgagcatcctatttagttgttgatcgtgttatcaagagtagtgatgttactctagattttaatcatgtaatcactatggattacaattaataaagatgatgaattttttccaaaaaaaaaaatactatatatgttttagtcacaagtaatattttgttgtggataaaagtcacatttagttacaaaaaaattatcttataactaaaaagttgtcactaaaagtatcagttttttgtagtgataattgttatacaaagtcagtaactattaagaaatacatacttttcacctcaacctgagtaagagctccaactctgtaatgaccgctttagtaatttggattag

SEQ ID NO: 358404 - DNA, 578 bp, Cannabis indica
actcggtcaaggaaaaaagagtacagtgtgaaataactcccctcatttaggtattcgtagagatcttctaatcgataaattctgaacttatatgttgtcttctaaatattgatgttggtaatgattctatgaataagtctgcaagattgacacttgattgaatgtgttggacaccaatatagcaattgtccttaagatcatgagttaagaagaatttgatgaaattgcctttggttctatcttcttcattatagctttagttgaacaatgcatttcgcgttatcatcatagagaattgttgatgcttatattgctttattgagtgtaatccatatgtttctaaatatgttgtgtcaataatctcagtcgcacacattctctacttgcttcatgaagtgcaagtgtaatgactacatcattagacatgaaaattagcagataactagtgattaaattagtctttatgattatatgtgcattagtattacaataagtcctattgtgagaaataggcattagtggtataatttctcaattacagagattttattgaattctaggtgtgtcatacatgttat

SEQ ID NO: 358405 - DNA, 720 bp, Cannabis indica
aacagtaagctcctcctcattagtcttcttctcttcttccagccgacggaagacagaccgaagaactcccctttcctcttgaaggctattcacttctaccaacagggggccgatcgtaacttcaagttggtcggaggcttcgaggtccttagtcaactcgactatttcctcttcttgttgacctcacccagctccgttcggacagcttcgagttccaccctggcgtcatcaacatccttcctggccaagtccacctacgccctcatggtgttggacatggcagcgttgttggaggcggcagacttagctcgggaataggtgtaagccaactttagaccagcctatatagagaacagactttaaagtttaagccaagtaaaaaggattaaaggaaattgtcaagaaagacttacccttgtgaattccctcaagattcctcccatcagcagctctagggaagattcattgtcagcgccggccaactgctcactcacctcaggaatcaaccaattcatgtaatgggcgagcatgtccttacctttcttggcctctggatgcactggaaagggtggagtaggagcccgcatctgctcagatcttctcttagccagctcggagccaccctttgactgctcaggcctgttcgagtttcctcccccataatctttggacttagcaactttcagaatagaagggttcgcgacaactagatcctcagaa

SEQ ID NO: 358406 - DNA, 655 bp, Cannabis indica
cctgcatgtctcgttgtatgacagaaccattgatctggtcttgcatttgaataactttaacacaataatgcgagcgagtaatgtgacgaacaatttatgttgtattttgttccccaccttgcttgttggagtagtgagtagctagtttaacaagtttactcatcattccataacttcttgggagcagctgtctagggatttcaagaaacagttctagttggctagggatagacgaccagaagcggcctcactaaccaatataaagtagcagcccggtgagacacttaaggcgtacttaagtcattttatcacggctgcggctagggttaggaatttggatgacaacatgcaacttacagcccttcaggcggggatctctactgatccattgaccgtagggggcaagttatgggatgacttacaaggacgtccagtgagaagcatcactgaattcaacaaaagggctcgggtgttcgtttagaaggaagaagcccaaaaggaaatgaatctgttgaaaataagctcgggaggcaaacccaacaatgtttcaacaggaactttgataacccaggggcttctggtttgaagagaaaggacgaagttaaggaactgtcgaaggataaaaaaaaatagaagaagcatgataagtacgtgc

SEQ ID NO: 358407 - DNA, 995 bp, Cannabis indica
aggcccaggcggccgccggaagggcccttcgtagtattgggggtccggtggagcgaaggacccccaaaccaaagcccgtggtcccagtaccgaatatgggggctcctgatgccagcacttcgggttctggtaagtcccctttaatgatacattatgtcccttccgtccgtgagtatgctagccttaggcctatagggttcgatgaacgtctccataggtttaggatgccttccactcggtgggggaatcatgccaaggagtattatttctcccacttaggcgattatttaggtcggtcccggatgggttctggacctccggtgcccattcccttggacccttcagcctatttatcttctagttggttccgtccttcagacagctatctcggggatgatgcagctagtgttatgattcgggactttgctagggccgaattagagagtcagggtaggactagcttgattgttttttgctaagtgtatgctgctttcatggatgttctaacagttggccgattttcttgttgcagcagccgcacccatggacgaaatcttggccactcttgctggagcccatagtcctgatgcttcccctcctcctacttcttctcagttggtcactcccgggagggcttcctccagcgccccttcggccactattgtcttggtggacgaggaggaggtacttcttgaggaagctgaagaaggtgaagaagagcaagaggtcgccctcgtgcgcaagcgcaagggcaagatggtggaggaggagccttctaagcgcccctggagggtggacacttcggccccgagtcatgactctgggattccctccgaggcggaggaatacacagtgcctcatggcattgtgttgactccgatcccaggcgacgaggagaggcaaaaccttcggatagccaaacacaactacgccctcgacgagtacacacaagggcatgctgaggtggaggccttgaagagggtcttacgagagga

SEQ ID NO: 358408 - DNA, 981 bp, Cannabis indica
gagagagttgagttggtgaacttatccctcatcatgtatactccgcgacaccatatagttttgcgtgtggttgttctgctgaattatataactcagctgggcatgagtatattgcatcatcggatcgataggcccaagcaattgtgggggcacttcctcctcttcttcaacactaggctctctttgccgccttcggccttgtggtgcatcaggtggaggctggccataaggatgtggctcttttagcatgttgacaaaggtgatgtccatctttagaagtggcaccacagtgttatcatactccagttgtggcatatcatatgccccgcagagttcagttatcacacccaccaaagcaagaccacaacctgtggctccttgaacaatttgctcaatgctgtttctgatgacttgtccaatattaatgttgtaccctttcataatggtgtacacatatttaaggcgatccatttggacatctgaaaagtgtttacttggcaccaatcgagcactcacgaagtacagccatgtctttgccaccgggtttatttcacacctgtgtagaatgtttggtgacccgtcttggccatcattgtcatggaacctcaaccccagaaatcccactgttttagccacgcccaccaaatcaaactgttcttcctgctcgataattcggaggcgttgttcctctctagaataattcgggacagagaacataacgtcgaatgcatcagcagtggcgggaacctgctttcctcgcaccttcacctccccatttctgcgctcgagccaattggcgagaaattcacatgccatagtcacattagcccggccccgagcatccacgaaactaccctatttcatcctctcaatttgagcccgcattgctttgaacctaggttgacacctcaagggattttcagggaattcaataccccgatctttaatgtaaggccttattttgagcctcatgaaacgatt

SEQ ID NO: 358409 - DNA, 918 bp, Cannabis indica
gacccctccacatctacaactgtgcccccaacccctgcctctgtgccgccaaccgctgctgcagccaatgagtctgagtacctcttgttggctaagagattggagaaggtagaagcgcaacaacttgcgattctcactgcccagactgagatgaaggctgacttcaagagaagtcagaaagagatgaagaatcttatcatggatcaaattgcgtccgtgataagtttgttacagaagcagccttcggagccgacacaaccatcagggccggcacatcaatcatcgccaacacatccatcagacccgacagagccattatagacgatatatccatcaccgccgaaagatgattttgatgaggatgatgtctatccagaagattgggaacccaacgtagatgaggttccttctactcctggaaacgccattgtgattgccctgggtgatacagaatctcaggatgtggaaaacttgaatgggccaccagctggggtggacttctccaaggttaggcgaaagcgaaagccggttttcttgaaggactacacagcggggaagaagaaacaatgacatgggcccgttgaagtagacactgtgaaaccggcggactcccgactgttaaaatttttccagaagtggatcacttacgctagggacaacgaccgtcctagggatgttcacactagcccagccaatcgatcctggttcgtgaaactgatggtgcagggagaatggcttgatgatgctgtaagttatttcttaacagaattaatttattgtgttttaaaatttttgtgcgagtttaatgcgatttatatgccatttgtatgcgaaatctatttaactagtttcttttgaatctttatatgtgacatttatgcgacttatatgcgattttatgcgatttattcacttctt

SEQ ID NO: 358410 - DNA, 899 bp, Cannabis indica
atacgaagggggggatcacaaccgaaatacccgaagctttgccaatattgttctaagctttcttcacctttaagagaaatcagggacaaagagttagcgtttcttgcaaaatattataaacacatcaaacacaccattagaggctaatagactgactcgtggcctaaggttaattaatacctaaaccacgtaaaaatttccgtatcatttatttctatatgttactattttttagctcctaaatatttattttctaaaaatatcgataaatatttatatataaatatataataaatatatatttttatatttttttcctaacactttttgactctctcacaaaattttattttattattttttattatatttctttctatcttttattactattcacactcaaatttttcatactatttttatataattaatcacttttatataataaaaaaaatcttaattaatttctttaaacctttactaaaatatgattcttttacttttacactttttctcatattttttaacactcttactctatcttacataggggtgttcatataattcgcaatttgtggttccaaacctcaaccaatcctgaccaaactatttgagatcggaccaaatgaatccggtgtgaatgatttgataaattcagaccgttttaaattctctggtttggtcacgtttttagaaatctaagtagtggttcaaattaaaccaattcgtataattattatatatatatatatatacttaatatattttgagagataaaatattaatatttggaaactaactttaagtaaaatattgatattgagtttatattgtcacgataactattttttttattgttatttatgtattataaacttattaaaagtaaaaaaaaatac

SEQ ID NO: 358411 - DNA, 408 bp, Cannabis indica
agactacgaccacgacactaacgaatgctataacttgaagcaagaaattgaattcctaataaggaaaaacaatccacacctccagaagtatgtcaggaccgatcaaggtcagaacaaccatgatttgctaccgccaccggtagatggaaacttgcaagtcattattggagcccctcacattgcttgagattcgggcaaagcttgggagaggtatgcccgaacaacgcaacacgagcaaaaagaagtcatcctggccgtggaagaaaggcagctcaaagttccacgagcaggagagctaaccataactttcaacgaagaagacgctgtcaagattagatttccgtaaaacacccactgttcgtggaagtccagatagccaataaaatggtggccagtaccatgatcgac

SEQ ID NO: 358412 - DNA, 755 bp, Cannabis indica
ggtagtcatgggactagttccgatgttcacttgttgaatttgaggtgattttgagttagaaatcgagttcggaactttttaacgcttagtccgtacgttaatggtgttttttatttaagggctcaattttaatttctgttgcgtaagtatggtaatatttatggtatatatgcactcagtgaagtttggagtattttggataattttggtagtgtttcggtgagtgcaaaaattgggatcttcgagttttatagtttttagaaattccttagagatcagaaatcgtatttttatcataacttttgactcagatgtccgttttagacattctatataccgttccaaagcttgcgatgagctctatattatggtgtatgctttagagccaaaatataagttttattttagtgtatttatactgtggggttcggtagaaaaccttaaattgtcttatgtgaatattaagtagtgttttgggataaatacttattggtttatcattattgttgtgacataggaccgagataatcagggatagttttccacttgggttcgccgaaatgtatgaacctggattaaaggtaagaaaagtatattgtactgcagagtacgttgtatgtaatacaattagtattgttatgaatcgattaatattgagatatagttaatattgttatataatgaaaagactgattggttgagtattgataatgtgataatattatgcatgcgatatatgggctcacttgattagg

SEQ ID NO: 358413 - DNA, 497 bp, Cannabis indica
ttctatgcaattagaaacaatttccaattcaaagtgaaaaagtcttgcgcaacatacaaaatttgttgtttggatccaaaatgcaagtgggcactaacgacatctagatgaattcaacttcttttctgctcaaattagctcccactagctcacttgaagaaatgttaagacaagtcagatggaaatgatgcttgcacgaaatctttgtcttaactcaataattcacataaatatttaatttttgatttacagagggcttaaccatggattttgaggattcccaaccaatcttggaattcattaatcttttttgtcgaggaggatgaaagaaaaaattttgctacctgatgatctaaaatctttaagtagcgagaagaaaaactaccagagctctcctggatactatataggtgtgtggaatattgtgaggagcaaatgaggggtgttatctatttataatagaatctctcctattcctaagtccattaggatttcat

SEQ ID NO: 358414 - DNA, 531 bp, Cannabis indica
gtcctagtcctagttcggttctagttaaatttgtgatttagagttcgagtttttgtttgagttcgggtcggagtttgagtcctggtctgagtttgggttcgggtcctgatttcagtctacgtccagatcaggctctgggtgtgacttcgcgtcctgggtgtagctctaggttgggcccgagtcccaagttcaaatcccgatctgagtctgaattcagttctgggtctaagtccctcgttctgatccaggtctgggttcgagtttgggaccgggtacgggtctagcttttggtttgattttaggtctgggtttgagttcgggtctgagtttgtgtctgggtttgtgtcccggtctggaccccaatttgggtccaggtttgggtccatgtccaagttggggtcctgagtgcgagtccaagttttggtctgggtcaggatgtcggtccagatctaggtcaagcatttcaatccaagtctgggtcttggtccgagtcctggttcgtatacggatccctatctacgtccaagtctg

SEQ ID NO: 358415 - DNA, 508 bp, Cannabis indica
tctacatgcatatgtttaacttgaacaccatccatttaataattttgtcgaaaaataaatttcaaatacaggttgaccagggccgtctcaaggtgatgagaggcctagggcgaaatttgaaacaagggcttttttctttaataaaaattaaaataaattttaaataaatttggacacaatatcaattttaatttattttttttatatagtgtaatacaaatatttaagttataatattattatttatttatttttgaaatgctaagtaaaacttttcacaaataactaaaagaataaaaagtgtattttcaaaaaaagtattaaagataactagcgtagggattgaaccttaaacctcaaggctaacacaagctctacttaccatctgtgctggatgcttttcatgtaatttattgagttaaatatttatatattatatgtttttatatgtatatattaattttaattttttcggggcctccaaaattgtggggcctggggccaaggc

SEQ ID NO: 358416 - DNA, 529 bp, Cannabis indica
actagaaccgaactaggactaggacaaggaccaggacctaaacccaaacctgaaccaagatcaaaacccaaagagagacctaaactcgaaccgacagtaggactcgaacccgaaccaagatcgggacccaaacccacccaataaccgggagttggacctagaatcaggatagggacatgggaaacagaactaggaccgagacctagtaatcgacccaggcacgaacttgaatttaggacccagctcgggacccagcaccagaaagagaaccagactgcgacccgagatttggattcaaatatagacccaaggcttggaaaaaacccgtagtcggtgtctagatttgggacccagccttggactcgaaccctcacaaggacccgaacccacacccagacctgaacccagtcccaaacacaaaagtggacccgtacccgtaccctgtgaccaaaaatttgaacaaaaactggaagttgaccggactggtactaggacttggacttggaatcataactgaaattggacctag

SEQ ID NO: 358417 - DNA, 918 bp, Cannabis indica
aatggtcattttgccccattgttattttttccttttgtggacttagtgtgatttgaatatgtgactatgtggcatttcttttggctgaaataaagaattatattaagcattttatcctcattttatccaaaattgaaaacttagaaaaaaaaatttagaaaaactcaactcttttcctctctctctctcggcttggtgtggattgctagggctgggaattcttcttgatccttcaagctttattcatctaatctaggtgtagttcaagttgttggtaaggtccttaaacttgctcttggtttttcttggaattttgatgaattgcatgcttatcttgaggtgtagttgctgctgtgtttgtgagatgatttcagtggtttattattgtttatttgagtaaaattgaactgcttattatgcttgatagttatgttgtttaaagcttggaaatttcttactcaaaactatagttttcaaagaaaaatgaagagttttgatgctgtggttgctgttgttgtgtaattgtattttctggtgttatattatgttgaaataggttgagatatgcatgatttagtggctgtttagaggtttagtcaagttttgagtttttgaactcaatcttgaacctccaatggtgaaatgagtttctgtggttgaagcttggttcttttgctttggatttgttcttaggggtatttagaacaggtctggaaggtttggattgatttggttttgatttggttgagttttggaatttttcttgattcctgcgaggaaccgaagttctagatgtgcaaccggaattccggatgggttcaggattttccagaaccggaattccggttgtgcaaccggtctgccacttgggaaattttcaggaaccctagttttactcatttttatgttatttggggt

SEQ ID NO: 358418 - DNA, 1426 bp, Cannabis indica
ccccagaaccttccaagaaggtgaagaccgaggaaccccacattacgttcacagaggaagacgagaacaacgtgagataccctcacgtcgaactgctggtcataaccattcaacttaccaataagaggataaagagagtgttaatagacaagtgggagctacggtaaatatcatttataaggagactttaaagaaaatggggcccgaaaaggccaagttaaggccttgtatggtgaatctttacggattcaccggggatagcattgctagccttggcataatcgagctcgcattaactgtagctgaggcacctgtaactgctactgttatgcaagacttcgtggttgtcgacctgccctcggctgacaacatattgttgggtcgcacagcactgatcggacaaggggtagtcagttcgatcaagcacctatctttaaagttccaaacatcagatggcgtgggagtggtgcatggcgaccagatgatggatcgtgattgctatcgcatagagttgcagcatagaaaggtcggtcatcagttgatgatgatcttggcaggagaaaacgagaagaaagaggaagatcttgatccctgagtcgaagatgaaaaaaacctgctaaaaccaattgaagaattggagaaggttattctcgacccaggatttcccaccaaatgtgtgtacgttgagaagaacccggacgaacatctcaaatagcaatgaatatgctttttgaaggcgaaccaggatcaattcgcttggcgtcatggggatatgataaggatcgaccctaagattatctgccatcacttaaatgttgatccaaactacccgacgaagagacaaaaaaggaggcccttggattttgagaggcaaggggcactaaaatagggtggttgacaagttgttagtcaacgattttatacgcgaggtatattatccctcgtggatagccaatcctgttgtggtcccgaaacctaacggaacatggagaaacttgtattgatttctccaatctgaataaggcatgcccaaaagactattttccacttcccaggatcaaccagttagtggatgcaactactgggcacgagcttatgtcatttatcgatgcatattctggatataaccagataaaaatgtacatcccagattagaaacatccaagcttcgtaactaacatgggactctattgttataaagtcatgtcgttcggactgaagaacactggggcaacgtatcagcgactagtaaacaaaatgttcacaagccaaatagggcgaaacatggaggtttacgttgatgatattttggttaaatcaataaagagtacggatgatacctcaaacctcgtgggatgctttaaaatattaaaaaagtataacatgaagctaaacccaaaaaaaaatgttcctttagagtctcctc

SEQ ID NO: 358419 - DNA, 500 bp, Cannabis indica
gggcataaaacccaacactaatacctcctcagaaattagacaaatcatctgtactagaatgggcattcaggaggcggctgagaatagcaagtacttgggacttccaagtacggttggaagaaataaaaatgttgtctttggctatgtgaaggataaggtgcataaacgaattcaaacttgggacaacaagtttctttctagagctggtaaagaagtgcttattaagtcggttgttcaagctcttcctgattacacaatgaatgtctttcttatccccgttggaatttgtaacgatattgagcgagctattagtcaattttggtggagatcttcttcaaagaagggaattcattggatgaattgggataagctttcggctcacaaagctaatggtggaatggggtttcgggattttagagactttaatcttgcgttattggctaagcaagggtggagactcctcacttgtggtgataccttgatggggaaaatttttaaag

SEQ ID NO: 358420 - DNA, 2170 bp, Cannabis indica
aaagactgctttctgcactaggtatgggcattatgaatttttggttatgtcttttggactaaccaatgctcctgcagcttttatggatctgatgaatagggtattcaaggattttctcgatatctgtgttattgtatttatcgacgacattcttgtgtactctcaatcaaaagaaaagcacgagcaacatctccagatggttctacaatgactacgagaacataaactgtatgccaaattcaagaagtgcgagttttagctatctgaagtgtcttttcttggacacattgtcagtaaagatggaatcaaggtggatcaaggaaagattgaatccgttagggattggccgagactgaagacactaatagaagttagaagtttcttgggtctggctagttattaccgtcagtttgtagagggattctctaagatttcaacacacttaactgaacttactaaaaagaattagcgatttttgtggtcagacaagtgtgaagcaagcatttaagaggtcaaacaaagattggttacaactctggtattatccctaccatctgataaggaaaagtttgtagtctactgcgatgcatccagacagggtctggggtgtgtactgatgtagaccgaccaagtcatcacttatgcctcccgacagttgaaagaatatgagcagcgatacccaactcatgatttagaacttgccgtggtggttttagctttgaagatttggcaacattatctctacgaagagaaatgtgaaatttatactgaccataagagcatgaagtacttctttactcaaaagatttgaatatgagaaagaggcgttggttagagtttgttaaggattatgactgtgaaatcctttaccatcatgggaaggccaatgttgtggctgattctctgagtaggaagggtcccgggcagataactaattaatgtgattaagattttaccttggttagcaaaagacatggtcaaattaggcattaagtttgttgtaggcaaacttcatcacttgatgctgcaatctgatctgttagaacgatttaaagcttatcagtcagctgatctagaattagtgaagatccgtgaagaggttttagctggtcaagttgaagattttacggtgtcagatagtgtgatgctgttgtttaagactaggatttgtgttccaagtagtgcagaaattagaaatgagattcttgaggaagctcataccactccatagtcactccatagcactaccaagatgtatcaagatcttaaaccttattactggtggtgcgggataaagaaagatatggtagaatttgtatcccagtgcttaacttgtcaacagattaaggttgtatatcagagaccggcaagtttgtttcagccactgacacttcctaagttgtagtgggaggatatcaccatggactttgtggttgggttatctaaaccatgggaatgtacgattcaatttgggttgtggtagatcgatttacgaagtctacacattttctatcgataaaaataacctttacagtggattaggatgcagatttgtacatgaaagagatagtgagattacatgtcgttccatagtccattatatcagatcgagatctaaagtttacttcgaaattctaatagagtctctagggggctatgggtaccaaactaaaattcaataccgctttccatcctcagagtgatggatagcccaaaaggacaattcagatactggaagacatgtaacgagcctgtgtaatggatttcgggggctcctggagcaagtacctgccactgatagaattctcgtacaataacagctaccggagtacaatagggatggctccctatgagttgttatatggcaggaagtgtagatctcctattcactgggatgaaatgggagaaaaaaaatacctaggtccagaatcagtacaacggactgatgaagccatagaaaagattaaggccagaatgcttgcctctcagagtaggcaaaagagttatggtcgatagtactatactacttaacagtatcacatcagtacgactagagtacgattagcatactgagtataggctgatatcattgtcagtagtactatcgtatgatcatcttgactcagtaccgtgttggacacggggatatggttatggttgggtgtatggg

SEQ ID NO: 358421 - DNA, 865 bp, Cannabis indica
ttcgagattctcgagaaggttggtcaagtggcatatcggttagctttgcctccagctctttcagcagttcacaacgtattccatgtctctatgttgagaaaatacgtttcagaccctactcatatacttagttatgagaaccttgagctgcagccagacatgtcatatgaggaacagccagtacagatccttgatagaaaggataaagtccttcgaaataagaccatatctttagtcaaagtactctggagaaaaagtaaggtggaggaagccacctaggagttagaatcagacatgagaacccaatatccagagttattcaggttagatttcagggacgaaatccttttaagggcgggatagttgtaaagaccgcttagcttaaatttggaaattagcagataattagggtttaattatgaaaattatttattgatatttaaataattctttatgtttatttattttaatttagaatgcatttaatatgtcatatatagaaattttgtatttttgcatgttcggtgtccggcaactttgcaacgcggtgtatcgctcagtagaatcacattttagtattttagcatagcggggtagtttagttagtgtcgagattgtcgggaattacaatttcccaaaatactcttagtaccctttaagttagttttgtgtgggcaagggcattttagtctttttgcccttttggtgttttgtctttatgtgaatcaaataaatggatttattcagattttgtttaattatatttggctgaagcaatttaataaaactattctattaatattttacaaaaataaggaaaaaggaagcaaaatcatttttctctcaaagccctctctctctctct

SEQ ID NO: 358422 - DNA, 747 bp, Cannabis indica
tactaggctaaaggcttaaaaatggcaaagtatttagagaaagttcggatgaacatggaaagattcgattaatttaaaatcgaacaaattccacgagaacaaacctccaatgtcgatgccttagcaaaactagcctcgcagaatgacctggatgaattgaatctggtcatggtagagatgctgagcgagctaagtatatgtgaaactgaagacattgagatgatagatagctctccaacatggatgacgcctattatcaattatttactcgacagacaacttccaaatgaaaaaaatgaggtgcgaaaactattgtattcagtgcctcgctacacaatgatcgaaggcaaactatataaaagagggtattcaattcccctactttggtgtgttcttcctgaagaagcaaacaaaatctttagagaaattcatgaaggcttcagtggggatcatgcgggttagcaaagtctgtcaaaaaagatcataaggacacacacgagtttgtgaagaaatgtgatatgtgttagaggttttctcatatacatcgcgtaccgccaacagatcttacccactgggggatcgactactcatttgctatacgtggatcgactgaattgcgtcattacccactgggcgaggacgagctaagtatgcggtagtagcagtcgacttcttcactaaatagacgaaggccgagcccctcatctccataacctacaagaaagtccttgactttgttatcaagaa

SEQ ID NO: 358423 - DNA, 721 bp, Cannabis indica
tgggaatcaccccaccaaaaacactataaataccccctcaaagctcattaatggggtcgggaattttgggttgcataagtgcaagaagagtaaatactcaccaagaacattctctgtattaaatacactcataaatatacagactcgtggactaaggctcattaacgccccaacctcgtaaaaatccttctcttaatttcttatagctccttaatcttttattattttattggattccgaaaacctcggtcaacagctctgaacgaccataaacgaccttgaatttacactatgcgaacatcatgatcttttatgttcttcgataagaacttaactttgctcttaatgaccataaacaactttgaatttaaacttgtatattgtgtactctaattctttaaatagttaaaaattgacttataccatgtaattcaatgattgagttatttaaaatatgtaactaaatagtcaccaagacttatacaatgtactttaatggtgaaattcctatacaattataaaatatactttaattataatctatagattatacttaaatggttatacatacatattttataaaataatttgatttgtatattgaatctcatatatataatgtaattaaatagtcaattagacttataatatgtactttaatggtgaatcactattcaattataaaatatattttaatttaatctataaattatacttaaat

SEQ ID NO: 358424 - DNA, 1039 bp, Cannabis indica
cattacccactgggcgaggacgagctaagtatgcggtagtagcagtcgacttcttcactaaatagacgaaggccgagcccctcatctccataacctacaagaaagtccttgactttgttatcaagaacattatctgtaggtttggaattcccatgaagaaagtatccaataatggaacccaatttgatggggtcttgttcactgaattctgcaagaggaaaaaattatccaaagcttctcgtcagtatccaggcctaaggaaaatggacaagtggaagccgttaataaaaccctaagggatactatcaagaagaagctagacagtgccaaaggctaatgggttgatgagccacatcaggtgctctgggcccacagaactacctagaaaacagctaccgaacacactcgtttctcgctagcatttggctcaaaagcaatgctgcctattgaagtgaacatatcgactcacagaagggagttttataatcaagaagaaaaccaggaacttttaaaactgtccttgatcgacttgaggaaaatgaactgagtcgcaaatcaccaacgcagcacacgaacaccgagtcacaagatacttcaatagaaaagtcaaggaaagactattcaatgttggagacttggtgctaagacgagtctttgcaaatacgagagatgcatctgaaggagtgttcaatctgaattgggggggtccatatgtcatcgaagcagtagttggagtcggagtctataaattggcttgacttgatgactcgctaataaagaactactggaatgtacaacatttgcgacctcactaccaataaatgagtgatataactcgcaatactaatgtaaactttaaacttcagttatggataaagagaatcatttatattatgtaattacaaagttcgttctttaaaaattatttaagcgttatttatgtatgattaactagaattcatttggaaatacattgtataatgcaaacccgtcatttaaatatttttttgaaattcaaaggttctcgactagacctctt

SEQ ID NO: 358425 - DNA, 520 bp, Cannabis indica
taggtcatccgtgaacataatacgaaagggtgtcaaaaatcacttattgtcccaaaaatttccccacgtacatgacactcctttgacatgatctcaaaaaatcaagcagcttgtcctctacgtcagaccttagaaaggctcacagcaaaaaaacaaattacctttttggacagacaccaactattctaatatttttttatttcccacgatggctcacgccccacctatcacaatcaatagtttcaccaaggacataaagcaactcaattcaaattgggtttcacctacccgacctaataactcagaatgtgttgtattttaccctatcaatggattttttgaactaaaaagaattctaatgggttcagatttgtctaacccaccaataatttacctataaatatggctttaactagggctgaacattttgaacgggtttgacttgaacccgagcaacccgcccgaacccgaactagtgaacccgtaaaattttttttaaaaaaagtttcgggcgggttgg

SEQ ID NO: 358426 - DNA, 686 bp, Cannabis indica
ttaaataaaaataaaaagtcacccatgaatttctcataaactaagaatttcagttatataggcacactttatatagaattttatttattcttatatgaaaaaaagaataaaatatatattgtaaaaattagtaactttgtaatatatagtgcggtgtaattttaatcgcaattattaaatttaaaattacaatccactgcatcatgcagtttgaaaaaaatgcaaactgcaaccgcaccgcaaaaaattttaaaatgcaaactgcaaccgcaccgcaaacatccaacatttcttctttttatgatttagtgaaggatgttcaaagtcagttatcctacctctctattgtgtgtatatcttatgtttggcgagatgctaaccaagctgctcatagtttggcgcaacaagctttagtattgaataatgattgtacttggttagagtaaatcccctcaactattttctctgttgttgtaaaagaattatcttaattaatgaaagcagagtttctctaaaaataatgtaaaatagtttaactataaaacgtaatttatatattatgttataaataattttagtaaaaaatatgtaaatcggtttattcgagttatttggtcaggttagaataatattcaacccgctcaatatattcattgggcggtttgaattttttgtaaaattattcg

SEQ ID NO: 358427 - DNA, 568 bp, Cannabis indica
ttctccaaataatagtcaattccgaaattccgtgtctgacggaattttggaatcccccccggaggattggttgaagctcaactgtgacatcagagtgggattggatagcatgtgtgctgctgtggtttcaaaggatcacgttggcaaggtgatctgggtttctacatctaagctggagttttctaatgctctctgtggggaagcggcaggttgctgtttggccctagaggaggctaaagttcgtggtgttgagtttcttattttggagagtgattcgagggtggtgatcaacgctcttaatgggaaggagtcccgttgggagcttgataactatgtctctttttgtaaaaacacctcccccttttttattggttgtatgtttcaatatgttagtagacaatgtaattttattgcccataatgtagctaagtgggctttttcccaacagaaagtcggctccgtgccactatcctccatgcccgatactatattttgtaatgaccgcgaggtctaactgatattaatctaatatatgcacgcttttcttcagaaaaaaaaattccaaaat

SEQ ID NO: 358428 - DNA, 644 bp, Cannabis indica
ggtccaatctgtaacttttgcaaaacacagggtccaaaatggtatttaccctaaatattattttggattttgtattttgcaaaagttatcaatttgatcttttattttgttaaatgacaaaataaaccttatatttcctaaaattatacaaatagtatcctaactgattttttgtcaaaataaaacttaataataatctgatctagagatcttatgacaaaactgattacattttgtatatttatttatgttagaaattttcttaaagttggttatatttttttaaaaaaaaaattgttgaaaattgaaaactcagggtcctatttttaacattttgaaaaatatagggtccattttgtaatttaacaaaatagaaggtccaattaataacttttacaaagcacagaatctaaaatggtatttaataataaaaattaatgaccaagttattatgtggtctttataattttgaataatcaacaaaataaatttcaaactcctttaataagaaagtgctgtatattatggggcgttaaaattttttaagaggaatatttgcagtaaaagtgttcaaattattataggggaattactttatatatattattttttttaactttttttcttttcaaatttatgatttg

SEQ ID NO: 358429 - DNA, 512 bp, Cannabis indica
tctcaataaattatgtcaatataaaaaaaagaatgggaccgactcctagtagttatcgataatatttttgcttataatgtagcgctagtaattataaatgaacgaggatcttgaacctaaatctgtgagtgaaaaacttgatatattattaatggatgtagtcacatcttatttatatggatcactagatagtgatatatacatgaagatccctgaatgatttaagatgtctgatgcatataattcaagaaatcgagaaatgtactcaattaaataacaaagatcattatatggattgaaacaatcaggacgcgtgtggtacaatcaacttagtaagcatttattaaaggaaggatatacaaatgatcatatttgcctatatttttataaaaaagttctgagtttgttatcactgttgtttatgttgatgacttgaatattatttgaactcctgaaatacttttagaagttgtggaatatctaaagaaaaagttcgaaatgaaagatttagg

SEQ ID NO: 358430 - DNA, 555 bp, Cannabis indica
gacaaaatttctataggagggagtagttgtaatatcccagaaaataatacggtaattgattggacatattttattaaaattattttggtaataaagtaagattatgatcttacttaggttaattagtttgaatttaataaatggttaaataaagcgtaatttattaattacggagattttattggaatatgtgagtatcgtggataccatatttcaaataaaatatttttgggcccggcgactgtagaaactggacggagtggtcagaaatgtcacgataataaagtatggattgaattggaacttatattgggctagtttagtgtgttaggttgtcagtttggcgaattagctagaattaccagaatacccctagggtttgattttaatttaaggatttaggaggggtaaaatggtcatttgagtggtgtggatttaggcggttttaaccgttagcggtttttcggttttgtcagtttcagttccaacggtgttcggtaggtcggtttgaacggtttttttcaatttttttggattttatgctcacccctaact

SEQ ID NO: 358431 - DNA, 545 bp, Cannabis indica
tttactacttgaaacgatacgtgcacttacgtgtgcaaaatatcgcaacataaggtaaaaatataaaccgtaaaacatagtatatatatgtgtattttgtgtttgtttattaaatatgtgtttatatatatgtattgtgtgtatatatattgtgtatattatttatataaatattgtaattgtattgtatacattttaagtaatatatatgtatgtatatatatatgtattgtgaatgagaatgagatagaagagaattaatgagtttagaaataaagtttttaaaattttattagtgtaagatataattaattatatatgtatgtatacgtaaaatttttaaaaatatataatttactaactagtaactagttaatttttttataattagtaagtaattaaataaataaattttaattttattatatttcattatattataggttgtgagctaattttcaaggttttgaaaaatttggtgttgattgggttttaacttggtataggtatatacattcactaactttttgttattaattaattat

SEQ ID NO: 358432 - DNA, 498 bp, Cannabis indica
ttttaattagcttagatatgtggagttaagaaaatttgggttttagggtctaatttgggttttaacatgtcaatttgtgaaaattgttgaattttgttaatgatgggttgaatatttaattttatgattaatatactattttggagaggttggacaagtttggtgagaatttggtttgaatttggggaagaaaacccaagttttcttggtctgccaaaaccgattgaccggttggtttcggtgcaccagaaccggtcgactggttgccctgcaggaagaattcctgggttttcttcgagttctgttttggcttggggtagtgcctagtgcctgttttaggttattaatgtcttgtgtagcttattttgggattgttggaagttaggttatgtccggtttcagatttaagattttttctcggagttttggtttaagacatttattgagttttggttgtcgttgttggaaattattttaccaggatcttatatctactca

SEQ ID NO: 358433 - DNA, 529 bp, Cannabis indica
ctggagttcccaaacaatccaaatcaagtataattcaaaaagaatacatcaataccattgtaaaatacttatcctggtgtattttgttgttttttaaatttctaatggtgaatttgttcatattaaatcataagcagacatgtagatagatttacgtacgtggaaacactactgttctgatttttaatgtttcacaacagttgcataaatattttgctaacatttatttcgtctgattgaaaccttcgtctgatgcaaccttcgaccaaccaccctgaaactttcgtctgattaaaatcttcgtctgatgcaaccttcgaccaaccaccctacaaccatcgtctgattgaaaccttcatctgatgcaaccaccgcgcaaccacgcagcaacaaccctgcaaccatcgtctgattgtgtaagtgatagtgtaagtggtattttggtaattaaaatcacataaaaggtataaatattgtctttaccttatggaggtatttttgtaaataaagtgtcaatttatattttcta

SEQ ID NO: 358434 - DNA, 508 bp, Cannabis indica
agatattttttttttgattccaatgtgttctatcatcgtattctataaaagatggtcccactgcctctgttgtcttgatacaaccgatgaggataataccacatacattcttagacagaaagtcacgataccttgtcgtagtgggagggtttcaaggaactcacccttttatgacttggaagatacttgtgacaaaatccattgtttgtttaaaaaagaaatgtatagtcagataaggaactaagaagcaaagccaagagaactatgcttaaaaccattcatatagagtaaccaaaagttttctagtacaaggacaagaaagaaaattttcaaaaataagtctattcaatggacttaacaaaagtacctggtcctagtattataggtttgagattatctaaacctgtggcttatggtatgcctgttaatttacttactctggtccaagcaacttactttaataagatgctggagcatttttctaatggctacatctatacaagctttt

SEQ ID NO: 358435 - DNA, 521 bp, Cannabis indica
aatagagaaaattgtgtaaaaaaaaataaagtcaaaacttcaagcctgaattcgattatgatctgatcagattttggagaaagtcaaaacataaaagttcttgatctctcttctatctttctggaacatcaaatcgtccaattccgagcaatatcgagagagttatggccaaaatactatcagtcgacgcagtagaaaactcaccgccccttctaattttaaacagaataggttttttcagtgtttttatgtttttttaatcattttttggctaaaaaagaagtggacttcaatagtgttcaagaggtaattcagtaggaaatcagaagcaatgtacgaatttttgagaacaaaaccaatattagaggctttctcaatagagttttcagcattcttttcttctctattcttaaattaatatgtgtgaatttgctacaatgaacatgagtagctaaacagttcattagggtctagatggagattgtttgatattaatttttggttttaatatgatttaattt

SEQ ID NO: 358436 - DNA, 562 bp, Cannabis indica
gccattgtcaacggagagtgagactgagaggagggaaaagccgtttaaaatgaaatgaaatgaaaaagacagagaaagccgaggagaaatggagtaagtcagggcctagccaatttctctatacgtcgacgtttttgtaataagccttaaaagcgtaccggtcactctatttgggttggcttcgattggaaggagaaatttttgttaaaattgcgtgtatttttaacgtattttttcgtaataagtcttaaagcgttcggggcactcttcgcttggaaagaaatatttttgtcaaaattgcaagaatagtgaattaggtaatcattccaatttcgggtttatttcacaaatatataaaaataataaaaaataataaaaaatttgattatataaaattttaaatatttttacgaatttttatgatttcacatacaaaaaatacagtcttttgatatatttttatgttgtactcttgttaatttatgttaatttattgttatttgtattttattttttgttgttgttttgatattatttttttgttactttgatgtattttttt

SEQ ID NO: 358437 - DNA, 1014 bp, Cannabis indica
aaatccaccaaggccggtcggctaaggattgcgttgtatgtagttgggcagtctaccaccacaaaggtgcagtacttgaaagtactctgaagtgtatcctggcataaggtgactggaaatctcacttttcccattgggataagcgtggttccaatgaatcccgtgagttgggaaccgctcggtgataaatctcggtccgtgaggcctattgcagtgaaggcttctttaaataacaagttcacggaacttccattgtcaatcaatattccagccacaattttgttggcaatgggagtctctatgacaagctggtcatgatgaggaaaacgcaccagttttgcgtcttcctccgtgaaagtaattggctgatctatgagtcaaggcctttaagctgggagctgggtgactctgttggaattattttaccaggatcttagatctactcaccagtatgttgattaacatcctaaatatgaacttctaaaacgattataaataaacacatataaagtgtgagaaaccttacattgggtgcagcagaataatatgtctccttccactcagatctctaacccttgtatcctttctgttgtagagtattatcaagatctgagtccgaatgtccttctcttggatttggatccttcacaatcttccaaactatgattgaggtactgcttgctgtgtgtgggcactactctttcacaagggtattttgaaattggaagagcaagacaagagaaaaggggttcggctatagagagaaatgggaaggctcaaacttatgaaagaggcagtttcctgaatttctgaacaattgcttaactgtttaatttggtgtgagccatcactttctatttatagacaactgctaggtttatgttagtaattaattggcactaaaataataaaaataataactggaaaatggatgcataagtggccggcctaaggtgttaatgggcctcacttggattttggttttcacaatttttatttctattttcccaaaaa

SEQ ID NO: 358438 - DNA, 613 bp, Cannabis indica
tattttgatgtcattacctattccagttatctatttatataaaatgtggctatataaccaaaagtgttgtttttattttttaaaacattataatttaaatttaaactcaccacacatttatcttttacgttttatcttatattaaatgtgactatacaaaatatctttatattattataaaatatcgttacctattgcagttaccaaaaaaatctttatattattattttaaaaaaaataaaaaaaaaatttgtagaatgaatattctattttgaaatgagaagaatgactattctaatgtaacatgagaaaattttaaaacttttgttatatatattttatgtgattccattccatttttattcatattctcattctcattcctatttatattttaatgttttcatttctcccaaccaaacgctacattggtgaccatgggcagtgctacccaattttcttaggaggcaagtcaaatattataaaaaataataaataacagcataaagtatagattcaatagttttgagataacaggtgaaatacaatactgactgtaaagtccttttttggcaagttagttgacaaaatattttccatttatggtaagatt

SEQ ID NO: 358439 - DNA, 963 bp, Cannabis indica
caactcaaatagcagctaataagcttttttaaggccaacctagatcagtttgcctggagccatggagatatgttagggatcgaccctaatattatctgccatcatttaaatgttgatccaagctacccagcaaagagacaaaaaaagagacccttggattccaagaggcaaggggcactaaaacaggaaatggacaagttgttagttaacgactttatacacgaggtattctatcctcatggatagttaatcctattctcgtcccaaagcctaaagaaacttcgagaacttgtattgacttctctgatctgaataaggtgtgtccaaaagattgttttccaattcgcaagattgaccagttggtggatgcaactgctgggcacgagcttatatcatttatggacgcatattctggatataacaagataaaaatgtatgtctcagatcaagaacatacaagctttgtaaccaacatgggactctactgttataaagtcatgtcgttcagattgaagaacgctggggcaacatatcaacgattggtaaacgaaatgttcgcaaaccaaataggtcgaaacatggaagtttacgtcgatgatatgttggtaaaatcgataaaaagtaaggattatacctaaaaaccttgtggaatgctttaagatattaaagaagtataacatgaagctaaacctgaaaaatgttcctttggagtttcctcgagaaagtttttgggattcatatttaacgcgaggggtattaaagcaaatcttgaaaaaatcaaggcattaatagacatgccatcaccaacaaagcctaaggaagtacaagccttgacaggaagaatggttgcacttaacagattcattttgaagtcaactgataagtgtgtgccatttttcaacatcttgcgaggcaacaaaaagttcgaatggacaaaagtgtgtgaagaggcctttcagaaca

SEQ ID NO: 358440 - DNA, 733 bp, Cannabis indica
aaaatagtatatgagataataaagtatttttaaatattaaaagcaaaaataaaaataaaaacatacataaaatcttattagaataaaaatttaaaaaaaaataactatgagaacactttacatttctaattcaaaatcaatcaattaaggcctcctccgaaaatcctacttaggtaatgggcccatccaatatgaaaggatgggcctcacacccattcgaagcccaagataattacatctgagactgaatctctccgaatttggaagagcatcacgcccttataagcagaggcagttaaggccccatagatgagcatctaggatgttagtttttatagttcatatgagagttgcagtagaaatgcaattcaaaaacttttgaatttaaaataattgttgaatctaatatgaactataaaccttggatctcaacacaattatacacaatacaaacctaactactagtttaagagattttacatcttgttgcctatcaaggtttcctcactatcttgtcgtaatacaatcgaacatccaatccaaaagaacttgttgaaaaattcacaccagggtcttccaagtcagcctcaacactctaagaatagagtgggctattaaattcagtttggatgaaaataaggttgagattttatgtcctaaataaaactcaattcaatgtaatcgtatttactttgaataaagtgttaaataaattaacaattaacccaagatc

SEQ ID NO: 358441 - DNA, 1159 bp, Cannabis indica
atcttcaagaagggaggaaagcgtctggccaccttggaagaagttatggtgggtcccgttgcccaggaggggtatagacctcgtgccacgggatgggaagcggctgagcttcactctactttgacttgccctcaccaactggagaacatcgtggaggtggccggtatgaaacccgcgatgtcggggacgtaccaccggccgccccgtgatgcagagacgcccaaccacaattacgcaggcttcggagcttggagccagacgcatttgatgaccggggctatgcttccccttcaagattatttcattaatttccttgtatttgttggccttgcaccataccaacttattccacaagcttacctcctgctttcaggcttatttattttttactccgcccggggatggggctctcccagtccggcggagattttgtatttttacgaacttgtttctatccccaagaagggggacaaacttaaggatggtttttacggcttccgggcccacccttcgaatgagggcgtggtcccttataaccagcaaaaacacgtcaaggagtaccgccatcgctttttcttctcctccgggttccgagctgtggagcacccggagctccttacggagtgggttaggatccctccgtacgagcggaccgcgcctactcagatctttcttcagcgggccaagaccttcgcgacttatgatagggcggatctcgacgtcgggggattggtcacgacggagaactgccggaaggccaagctgatcctggcgcaccagtcggtggaggactccaacctttctaaggtcatctgcccgaacgtgagggttccggccgcggagaagaccttccgggatgagattattgccaccgcggaaaagaagtaccaagattacctctaccggaaggcccaggaaaaggcttatactaaggcccaggcggcttccgggaggccccttcgcgttgggagcccggttgagagaaggagccagacggctgccgggagatcccttcgcattgggagtccggttgagaagagggctcccaggccaaggcctatcgtccaggtgccgaatacaggggatcctgacgccagcacttccggctctggtaagtcccctttagcaatacattatgtccctcctgttagcgaatatg

SEQ ID NO: 358442 - DNA, 764 bp, Cannabis indica
ttataattattaaataaataattttggcatttataagattaaaattagaaaatatgacatttgtaaaataataaataaatagttgaaaaaaatagcaagattataattagtggggcacatctacatgcccggccactataaggtttaatttgatattattttatcattttttattccatataatttaatcctaatcctaagtaaaatggtataaaaggaatatgatgatctcattatccaataaccttaacctaatatgctttaaacttagtttacactctttcagacaactagagttttgagacctccattccttcttcttcttctatttttgaaatctcttatattgttcttcataaattttcgagccattagtgagtgagtgcatgcatgcccacccatagcaagtctagtactcaatcatagcgtgtaagactataaagaatccaaacacctgaaggagaattaggctcagatcttgataatactctgtgacataaaggaacaaggattaaagatttgagtgggaggaatcattatattccgatgcaatcaatgtaaggttacttaaactttatatgtgtttaaattctattattttagaaatttatatttaggatgttaataaacatacatccaagtaataaaacaatgtttcagaacgctaaacctaaaccaaatcaaaagcataacaaatagatgaagaggggtcggagaaaagatttttacaaacttgatgacgcgcttcaaattgatccttcgtg

SEQ ID NO: 358443 - DNA, 654 bp, Cannabis indica
gacatggttagcaaatttgaaacattaactagtttatatctaaattttattattatttttatatcaaaataaaattatttaaaattttaataataaaatacgtaatatcttatcttataattaaaataaataaaataaacaaaaataattaaaaaatttcaaaattaaccattaggctagtttgtgcaaaaatcaaattttcaaattcaaaggctacaaatatctaaagctaattttaaataattaaaaaattataaaaattaattttattctgataattagattttttatttgaaaatttagattttacacaaaattctaccaaaatttgaattttgtttcaatgataaatgtttgaaagtcaaaatatcacaaaaacaagatttggcatattgcatattgccgagggagaggctgcaatgcagccttgttgaccatgtatactcggcgtgacatgagcttaagacagcccgtgtgtgagaaacctcgaatagggcttgtcttgtaacgccccgatttcccgaaacgtcacacttactagtccgtttaaaaccgtttataataaaacaataaactaatttattgaaaataactaaagcatgtgatctcattattttaaaacaaaaacacttgattcatttataaatttttaaa

SEQ ID NO: 358444 - DNA, 540 bp, Cannabis indica
atatatacatatacatatattttgaagataggattataatataattttaactgattttgtattagtggccggaagggcattgaatttcaagcaaaggggtcttcattatttatcaagaatggtaattgagtttcattagtcatgttgttacagattcacatatttacccttaagttgaataacaccactcacagggtctgacaaatatactcttacatcagatacaacaaagatcaagactaaagaacacagaaacagttacaaaaacagttacaactgaaatagttacaaaatcagttacaaatattactctaaggctctgccctagatcagaataacagatcagtataaaaggacgtattttgctcagatacaaaataagagatacaacaaggagtaaaagagagagtcacaaccagagaaaacaactacaaaaataacaacataagaaaaagagagccttttggcttagggttgtcctctccttgagagctcctcctacagatgttcatgtaaaagaaaagagagttttgttagtat

SEQ ID NO: 358445 - DNA, 567 bp, Cannabis indica
agagagtgagattgagagaaaaatgtgatttttctttaacttagtttttccttgaaaatgagacaaatgtcctttgtttcaatcaaataaaaccaactaattaaactttaaaatcagattttaacattaactagaaaatcacaaaagacaaactaaggcttggaaaaatgacaattttgccctcccatactaatagccactaaaggtcacaaaggggtattttgggaaattctaaattcatgaccaatcccgacatttcccatgtctaactataccaccgcgctatataaaataccaagatgcaattctactgagccatacaccgcgttcccatgttgtcgggcaccaaaaatgtaaaaatacgaaatttctctatatgacatattaaatgcaaactgaattcaaataaatcatcataaacaattattttaatatcaataaataattttcataattaaaccctaattttctgctagtttccaaatttaaattaaacgatctttacaactatccccccattaaaaggatttcgtccccgaaatctaacctgaataactctggatattg

SEQ ID NO: 358446 - DNA, 983 bp, Cannabis indica
gcataaaacccaacattatgtcagcaagcacatgataggagcggagacgcggtacccagtcattgaaaaactagttttttgcctcctaatggcctcgagaaagttgagaccctacttccaagctcacccaatcaaggtattgaccaaccacccacttcggcaagtcctacaaaagccagaggcgtccggaaggctcctcaaatgggcaatggagttaagtcaatttgacttgcactacattccccacatttccataaagggacaagcgttggcagacttcatcaccgagtgtaatgaagccaaagctactgcaaacatacccacaccgtcagtcccagcatggaaagtatttgtagacggagcctccaacgagagcagatccggagcgggggtcgcaatgatatctacgagtggacttcgaatccaggcagccctacggttcgacttctcagcctcaaacaatgaggccgaatattaagccttgatagcagggctaagactagcaaagaccgtgggggctaaaagagtggaagtctacagcgaatcccagctggtaatgaaccaagtgttgggagagtatcagacgcgcagagaaagaatggtcgcgtatgtagcaatagtccgggaactgctccacaagttcacggactataaagtggaaagaatccccagagaaaagaacgctcacgtggacttcctggctaagttagcttcagacagtgaaattgagaaacttggggtagtactcgtggaacacttggcagagccaagcatcaaagtaaaagaggccatagcaacggttgggcaagaacccagctggatggtccccatcattgaatacataacgaaaggtcgagttgccccaagaaagggcactgtccagaaagattcagtatcaggctcaacgttatgtgatgatggacaaattttcgctaccgaaaaggctcagcatgccttatttaaggtgtgtactcggacctgaa

SEQ ID NO: 358447 - DNA, 700 bp, Cannabis indica
atgtgagagtgtagcaattatcaacaaatctaaaccattgtaaaatgcatcgtttattactgttaagaacaaagcaatgatcattgtcaaaattgacagtatacccttgatcacaaatttgactaatgctaagtaaattagctctcagtcccttgataagcataacatttttcaaccttggtaacccttcaaattgagagttcccataccaaggacatttcctgttaaaccattgccaaacgtgacctcaccacattgcattggtctgatattcactaaaaaatccttgtcaccttccatatgtctagaacaactactgttaaaataccacatttgagaaacagcacttttatcagaaaaaccagctagatatttttctttttcaatccatttttgtttcaaagcactatgtttcttttgaaaaaatttcaaatcaccaaaataatttgttttgtacaaattttgcatgatgaagcatttaggtcgaatatgccccttaataccacaaaaatgacagattagaacaaaccttcttacctgagatcttatcctttttgaacttattggagactttgcttctgcagtcgatatttttgtagcatcagatctttaatttgcagcagtaggtaaattcgctagaacactagattttacaaattttatttttccagaactttcagtaccatttgatccaatacca

SEQ ID NO: 358448 - DNA, 580 bp, Cannabis indica
caaaccaaccacaaaatccatcgcaatgtcttcccacttccattctggaagtgttagtggctgtagtaatcctgcaggtcgctgatgttctgctttaatttgttaacaagttaagcacttagtgacatagtctaccacatcccttttcatgccataccaccaaaaatagggtttcagatcttgatacatcttggtggttccaggatgcaatgaatagggggtggtgtgagcttcatccagaatttctttcttaagctcacagatattagggacacacactcgtgctttaaacaatagcattccactatcagagattgaaaagtccttagctttgcctgctaagacatcttctcgaatctttaatatttcaggatcttccaactgtgccaccttaattctttccaataaatctgactgaagcgtcagattatataatccctcaattacaaattcaatatttgccctaaacatctccgaagctaactgaggagaaatcatcaccatattggaaatctgatctggtccttttcaacttaaggcatctgccacaacatttgcttttccaggatgatacaagatt

SEQ ID NO: 358449 - DNA, 1404 bp, Cannabis indica
gtaaattatttaaaaaatttcaaaaataggtaaaatacctaatactactataatgtacatcatatatataacaaaatatttattaataataatttctctatattccaaaaatcacacacaaaaaaaaaaaaaaatccttaaagtgtgagcaaaattgatgcccacaccagaaaaaaaaaatcccaatatatttatttggataaatattattttagactatgtgttttacaaaaattactaattaatactttattttgttatatgacacatttgaacttgtgtttcctaaaatagtactaattaatattaccatgaactgattttttttgtaaaataaaatttaataataatttgatatagaggtgttatgataaaaatgcactacaaaaaactgttacttttagtcaaacataaattttttgtgactaaatgtgacttttagtcacaacaaaatattacttgtgactaaaatatagtctttagttacaagttgtcactaatttagttttagtcacaacaagtattgtgactaaaaatatatttagtcacaacaaattgtaaattttgtgactaatacctttagccacggactttttaaccacaacatagaaatgataattcataattagtcacaatttttttacttttagtcacaagttttgttgcgactaatataaaagtaagattttttgtagtgatgattacgtttttttacatctgttcgtgctagaaattattttcaagttggttatattaaataaattttctccctaaactttcgacaatactaattttgctccctaaaatatatggtttgttaaaaaccctccctaattaaacttttacatttacaaaaatttagtccttctattaggttccatctcattgtttcgtttaaatactgacgtgtctttgtatattaacaattttgtccgactcctaaatattgacaactatcaaatcatacacactcaaaataaaaataaaaaagatttaatatttatttaataaatattaaaaaattatttagatcttaacagaaatcagtatgaataattaagaaaattaaaatattaaaactaattaagcgatttaaaaaactatttatttttattaaaaaatcaatttttgtaaaagttaaattttataggaacaagtttgagtctatttttttctccaaaaatataaatttggtttagtaaacataatatttgttttagtttaatatctaatttttttttcaaaataattttatatttttattgaatttttaattatttttaaaatatgagtttataagaatacataagcttgatttcttctacaaaaaatattagtttctttaaattatttattgaatttttaataattttaatttttcttttaagatacgtgtttataaat

SEQ ID NO: 358450 - DNA, 811 bp, Cannabis indica
ctcggtccagatctaggtccagcatttccatcccagtctgggtcttggtccgagtccaggttcgtatctagatccctatctaggtccaagtctgtgtttgggatcgtgtcccagatttaagtccaggtccgggtctcagttccggtctcggtacacgcttgtgttcgggcccgagtttcaatctcaatttgggtcttaggctaggtctgtgttcggttctatttctgggtccgggtcctggtcacggtcctagtcttgttctatggtcctggttcggtgattctatttcaggttctaattttgggtcccagatctaggtctaagttccgattcggttcttcgtctgggttctggtcctagtctgagtcccaaatctagacaccgactactggtctgttctaggccccattacccgaatctcgagtcaagatgtggatcactgtcaagggtctcggtcttgttctggatcaggtcccgagtcccatttctgagtttgtgttcgggatcgagactgggtgcggttctaggtgccaaccctggttctgtgtccctagtctagttcaatatttgggtctgagttcaggtttaagttcgggtcccaagtcgaggtttgggttgggatccgggtctgactctccattggggtctaggtctgatttggagttcgcgtcctggtccggttacgattctggatctatgtccaatttcaatttttattccaagtccaagtattcgttccagtcccggtcaacttccagttttggttccaattttgggtcacagggtacaggttcgggtccacttttgagtt

SEQ ID NO: 358451 - DNA, 690 bp, Cannabis indica
atgaaacttataaaaaaaaacatagtaaaaaagtaaaaaataccgattggcagtatttttataaaaaaaatgaaaaaaattagtatacctgtaaatttcccttttatgggaaacttacaaaaatactagaatatactcatttaaaatttaaaactcgtttagctatttttatctaaggaatatactcatttaatacctatattttctttgattttttttttttgaaaacatatttggtaccttgtgcttttaataataccagttctcagttatattatcttaaagtaaaatttaatcaatataattttattaatttgatcaaacggttctcagttatattatgtaattaaataattaaatttaaatccagaatttataaaatttaagacagtttaattgtattaataaaattttataaaaaaaatgtttgaatttagggtaccaaatatgtatagtttaatatacaaggtgccaaataaatattattgaaaatacaaggtaccaaaatctgtatttatataaaacatagggtaccaaatgtgtataaaccttttcatctatttttagcagttcaataccaagttaattgtccatatgtacataggatattctctacgtggactcagtgtacacatgacactaatattattcgaaccttacgtaaaataaattaatttaaaaaaaaaaaaa

SEQ ID NO: 358452 - DNA, 606 bp, Cannabis indica
ttctttggcaaagataaaattttaagaaaatcatcattatttttgcctggtcagttgtgtcagggtgcctatacttaaggcctacggaaagtgattagtctcactctttcactttactctcagaaaccctaagccctgcaacattcaacccttttctctctaaaatagagaataccactcccattgcagtaccccctgttgctatgtttgttccatccgtggcaaccactgttaatcctacaatggcacctacagtcgagactacactgcctaatccctgtcgtgacattgtcctctaccagtcggaggttggtggttctgctcatcactcgagtcctgagtcgactccgtctccgccctcacccccattcagtcagaaacctcgtacgtttctaggtaaggctcctcccctgactaaaaaggttagtccttctctgtcgtcccctccttcatctgtgtcaaaatgagtcacttgttcttcgtcgagtctacagcctccatcaaaacccgtaggacctcctcgtcctccatctaaaggtttcctattccttcccaaccagtcgaaagagttcaaagcaaaaacgaaagtcctcacgtgataccacg

SEQ ID NO: 358453 - DNA, 551 bp, Cannabis indica
ggtaaaatatttccaacaagactagcttgggggttgcgcaacttgaactcgtaagtgagtttggaggacaggtcaggaaactcctctcttaaggcctactggccatcaatagcctccctcagtttctccttgtgctcatcaaggttagtatgaagcccacagatgaaggaaacttatgcgatgttctctgtgtttctagcaccaagcatagtctgtaagtcagaccattctctgtctctctgccaagagagcttccagcttagatatggctttgtccttcacaacaagggaagcctccaaggtcttcacctgctcccaaagagcatccgaggatccccgagagccatcatgtgcttagcttagcttcatcaaggacctaaaaaaacaaaaaaaacactcaccatacaaaaccacaacacctagcccgcgtacgtccccccttgggggcctcctatcggcaaagccacgcccctccataaccaacactacctaggttcgggtcccaaggcccaaccgatcgacacaagcctcatcggctacgccagccctgt

SEQ ID NO: 358454 - DNA, 592 bp, Cannabis indica
gggtttaagttcatgttcttgaattgaaatcttgataagtttaagcaagatttgtgttgttttaggcaatctgatttttggcattgttatggggattttgatgcatgaaatgctttttttgagcatctattaattgctagtaatcctatttgttaatttgaaagtttggttgagaattttgggtgaaaagattggattttcttgctgaaaatcgtgttcaagcttgctggtttctgggtttggaacccagatgccgcagcatgctctgaagcatgtcgcggcccgcccctgctgatggaacatgggggttcgtcccaggtgccgccgcatgacttgggcgtgccgcggcccaccctcgtgtttttgggcagtttcgagttaaatttcgaaaattcataacttttgattcctaattccgattttggagttgtttatatcgtttgaaagctcgttctgagctctatgtgataatcagaatttttaatgccatgattgaaatttatgagtatggaatcaagagttaaccccaattgtgaaatatcctagatttgtgtgactaggattaccggcaccagatcaggagcacccaggg

SEQ ID NO: 358455 - DNA, 576 bp, Cannabis indica
aaaattttaaaattatttaaaattccatattttatattcttttttgttgttttaatctctattagattgggattatttcacaaatacacaaaaacaacaaaaaaattacaaaaatacaattttacaaaatttaaacatttttacgttttttttattttatttacagaaaatacggtctttttatgttatattcttattaattttttgttgattttttgttatctgcatgttaatttttgttgttgttttgatattatttagatgttacctttatgtagttttcttgttgtttttatgaaaaaccgtaaaaatataaaaaaaaaaattgtaaaagtaaaaatgtatttttttttataaaaaatagtgcctcgtgtaattatccctattaaatttagtagaagcatgagtccccacccgctccaacttaacgcccagctagaggcccaccctcaaaagtaacaactcaattacattaagaaaatttacatggtatactaattttcactatttttttacaaaaatactgttatgcggtattttttatttttttactgtatttttttataagtttcatac

SEQ ID NO: 358456 - DNA, 566 bp, Cannabis indica
ttttagaattcatattaagatgtcaatgaaacatacttgttagtaaatctagatcctggtaaaatatatccaacaatgcaatttagatggcgactgacattttaaatgttgttctgtaaagaccgtttagcttaaatttgaaaattagcagataattacggtttaattatgaaaattagttattaattctaaattattaatttatgatgatttatttgaattcagaatgcattttatatgtcatatatagaaatttcatatttttgtatgttcagtgttcggtaatattggaacgcggtgtatggcttagttgaatcacatcttagtattttagtatagcgaggagacataattagacattgggaatgtcgaaattagtcgggaattgagaatttcccaaaataaccttagtaccattttatgttgtgttagtgtgagaggggaaaaatggtcattttgccccatgtgtattttgtcctttagtggacttagatacatttagtaacctgattgttttagtagtgtaatggctgataatatttgataaaacaccattacttcattta

SEQ ID NO: 358457 - DNA, 794 bp, Cannabis indica
tttcgataaacttgtctcaagggctgatcgattaacacgtttatgggatgcgcctggaagtatggccgtagtttacgagacgcatggactatcacaacacgagtttttctagaggcggatatcttgattctccccctagtaacattttacttacatagtaaataggttgatggtgcttgcgctcttctcgcactattgctgcactaatcgcatcttccgatattgccaaatacaggagcagcgtttctccagttattagttttgccaaaattggaggcgtcgctagatgcctttatatgttctgaaaggcctctttgcactcttttgtccactcacactttttgttgcctcgcaatatattgaagaacgacagacacttattagttgacttcgaaatgaatctgttaagtgcatccattcttcctgtcagggcttgtacttccttaggctttgtcggtgatggcatgtctattaatgccttgattttttcgggatttgcttcaatacccctcgcgttaactatgaatcccaaaaaatttcctgaggaaaccccaaaggaacattttttagggtttagcttcatgttatacttccttaatatcttaaagcatttcgcgaggtctgtggtatgatccctactttttattgattttaccaacatatcatcgacgtaaacctccatgttctggcctatttggtttgtgaacatttcatttattaatcgctgatatgttgccccaacattttttggtccgaacgacatgactttataacattagagtcccatgttggtt

SEQ ID NO: 358458 - DNA, 513 bp, Cannabis indica
agagagggagaaggaggcaaaatgtttgggattttttgagttagaagagaggggtattttggagtcactaataaaagaataggatagttataaaatttttataagggtggtataattaaacaccctatctaatgtttaagcataaaatgtcaaatttcccaattaaaatcccttaaaccacggaagcccattccacccctatccttgtgatctgtgagcttttccacctcaattaatgaactcctttattgttgtttgatctccaccaaaatttactaatggtacgctcaatataatttataagataatctaatgtgatttgttaacaatataaatataaatactttttaaacaaaataaaaaatttaaatattttttcctaaaaaaataatatattataaataattaaatatatttttagtaaaaaagtaatttacacatttttagtaccaactttcaacgtaacttctccgtaaatttttaaataaaatattttttaactgcttactaaat

SEQ ID NO: 358459 - DNA, 528 bp, Cannabis indica
cgacaatgttattcatatcggtccttgtcatatataatctctattatatacagcaccttcacttagatgtctcactacatcagtaattaaaaccaagattacttgtaccgtagaacgggcatcagtgaaccatactatagcaacatttgattaaatattctataaccttaatgtgttgcggtctgtcttattcataactaagtggtcttagttttttgtatagctacaagccacaacctcatatatgaataaagaattttccgatatttaatataaattattcaataataaatattaataacttaacattcatacatatatcaaatgctcaactctttatttaataattagaaaatatctttgcaggcttttcagggcataaaccctaacagggagtggttctttaatctaaaagaagaaaggtcagggtaagtcatggtgggaaacaacagttcctgtggtattcaagggattagttcaatcaagataagtatgagagatggcacttgggaggaattaactgatgtg

SEQ ID NO: 358460 - DNA, 518 bp, Cannabis indica
gcccggcgacaacggaaaatgcgatggatggctagattgatcacatgggtaagtttagaactttatttcttagcggggaatattgtagagaaaataaattatcgggattgatcggggttatgggatttgaccattttacccctagttttagaaataccctagttttaagttaaggggcattttagtcattttatttggttaagagataggtggctgccctaggtgaatgacacctagcaagtgaatactcagcatgaattagttaattaaaccctttttccatttaaagaaaaatcaagaaaaagaaagaaaaataaggaaaagagacttgtttctttaactctctctctctctttctttcggctgggaccaagcaagggcaaggttcaatttttcctcttccatttctctggaatttatcaaggattcaaggttgtagtaagtgaggtaaaccctagaaacctttatcttttgagttatgagtttttagttgaatttactttggtttcaagcatgat

SEQ ID NO: 358461 - DNA, 1130 bp, Cannabis indica
ccccatcagggtctgtacgagtcctcactctatgggtttgggaagaaaattggtgatttcttgcaggtgacctccgttctccccggttgagtcccaagatcctccacattctcatgagggatttctcgttcatcagtttccggttgtctcctatctggctgttcgttctggttctcagggagtgtctcattttgcccgggttgttcttcccaggcgttctcctgtctcttggttcgtgagccacgaggtctgcctcgtggtctctcactccaggttcaggttgattttaagcattcatcccctatgccgccctggccgaggctgcatcacgctctaactcagcgttttgccactgtgccccttccaaacggcgccataggcagcggttttctgtttcctaagttccttctcccaaaaattgggcacctccacgattgagctcttcatccttcgtcctgcggtttttaccattcccacgctaagttctcctcgagctcgttatccgcgtactaggaccaatgtcaggtcgagttctctaagaacgtgtgatccgcacactaggaccaccctcaggttgagccctcttggaacgagttgtccttctggactgcggattggtagattttctggagcccaggggtctttcccagaacaatgaatggtttcctcatgtggggtgttaacattttctggatttttagccatgaaggaggttatttttcttcaaaagaagggaggatttttttctgaactttttcacagaggctctcaatgaaagcaccaaacggttaacgcagactttcattgactaaatttgagcctcacaatagtaattttacatagaaaaataaaagctatagaaataatagtatgaacacagggtttttttacgtggttttgttctgattgttttttaggtaactctcctgtatgagtctttttttcgttcccctttttttgtatcttgtttgccactctctataattacatagtggtcagtaaattacaaagttggctgtaatatgtttacaacaatcatccttaaaatcatgggatttgattacatatcatgtagtataaatgcggtttatgatttgaaaattgtatagatgtgattttctgcttttact

SEQ ID NO: 358462 - DNA, 931 bp, Cannabis indica
tttttttttttagaaaaaagttctcattaaaactttaagagtaaacctaatgaaagaaatagctcatagttattttcctttatattatttagtattacttgtgagaaaattaaatataaatataaaatattattttagattttctattttgtaaaaattattaattggactttctatttttttaaatgataaaatgaatcttgtattttctaaaatggtgaaaaataagacattgaactcaatgaaaaaaaaaatctaatatcgatatagatcttggcaaatattttctgaaataaatattttatatttataaaaaaatatattatatttatgtgaataacactaaagaatcattaaaatgattattattaatacaattttatgttgatttttgaatatccaaaaagaatgttaagaaaattgattgaaacatccaagtataagaataacaatgaatatgattaatgttatttaaacacaggagacatgtatttcctcttcatcattccttacatagaatgataagaattgaatttatttaattttaaagagtattcatattctatatgttgcccctgattttgcccaatatacgtggaccaaccagacaaggacacgtagatcaaatagcttagcatttaaattatttgctaaatctttctgtaatagggtagcatccgggacatgcctcccggagaagacatagggagccccatacgctcccggaagcccaagtaacactaaggcatctctgcgaggtgtcaggcttcccctgagcaatcaagtcgcatttaatgccgcatgggaggaagcgtgttgggactgctacacgtaataaagtctgacggcacaacccccaatctgcagctacgaagtaatgatcatttaagtctatcgatggctacactgtgaagagtcacatcagtcaaaa

SEQ ID NO: 358463 - DNA, 466 bp, Cannabis indica
tggggagcatgttttagtacataaacaatcactaaaacagtaaaattgaatgaaattagacaaatgtccttaaatttaacaatctcaacagttcggggggaaattttaacgaccaaaaaaattcagagggcacgatttagtacttgtcaaacttcgggaagaaaaatgactaattagtctaaatattatatttactctaaaataattttattatgatatagtattaatgattgtttattgttatattgttacattgatattttttggtattttaaatttttatttctagtgtaactctatttaattataatctttcaattagaatataatttacttggtctcaagtactgtattcttggatagaagttctactgtaaatattattaaaagaaatccacttcataagttttgttaattctatttttagcatatataattgacaaaaatattttattatttattatta

SEQ ID NO: 358464 - DNA, 603 bp, Cannabis indica
accataaatattacttactataagtcttgccttttccataaatatatatacaatatatgtacgtatttatagtgtaaaatgtatataatagtagaaaaatagaaagaaaaatgataagaaaatttggaggagggagaaagaaatataggtcaaatgaaggcactaattaaggccagggaggcctaaaaatgggaaattatgaaaaagtgggaaaggaattgcatatttgcatatatagctttaacaaattaagcaaaattaaattctaactttctctttattacaaagaaaaattccccatattggtatcacgtgaagccattgtcacaatttaggccttgaaaaagtaattctttgtgttatctttacatatgaaacccttaataataaaggaaaaaagaaaaagttattacagataatttgataaatacctctttttttattctttaattaaaaatatattcatattaaatttcattaaaatgtatccgtgagttgtctaatatactattacattctacttaagtctagcacataatttatattaatttaagggatataataaggacattatttataaaagtggatatatcttaaaaaata

SEQ ID NO: 358465 - DNA, 606 bp, Cannabis indica
accttgaggatttttcttcagcttctaccctcatttcagagctagttcttgtcccaagtcaacctagaaggacttgaaggtaggttcttaacctttttggattgaaaacattatttttgagttggttttcatgaagggttttataattctatggctgtgtgagttaaactaggtttgtggtgtatttagggtaggttttgagcatgttaggaatggttttaagtggtctctatggctgcttgaattgaatttggtttgttgaagcaaaaaataagttttcttcactttaaagtgtgactttgagcaaattgataaattgtgatgaattagttgtttggttatgttatattcgctatattaaactattctggaaggtttgagcaggtttggtcgaggttagatcagtttttggggtgaaaaactagaaatccccatggctccccaagaaaaactggtcgaccgatttttcaagcaactggcaaatcggtcgaccagtttggccaacaggggggattttgggtttttctcctcaagtccgatctgattcagggtatcttccggagtgaaattcagggtgttttaaagatgtttaagctagtttgattc

SEQ ID NO: 358466 - DNA, 469 bp, Cannabis indica
aattttaactgcaaaatcacgtaaaaaatcctgtgtgttcatactttttattgtatagcttttattttttctgtgtgagattgtcattgttaggctcaaatttggttaacgaaaatctgcgttaacaagtttaaatataatttttttataaaaaattgtataatgaatttttctacaatattaattttattttctgagtaaaaataatgaaattttagtaatataattactcatataattaaaaaaatatattatatcaataatataaaattttaaaatttgataattttatgattaattatcactaagtaaaatacgaccgcacgcgaaacacggtttgttttctagtttcataaatgaaagataaaataactattttagtaaataaattggcacaaaataattgaattgaaatactacccataattatattttcgcaaaaaatcacaccatcccaagttttgtgccc

SEQ ID NO: 358467 - DNA, 785 bp, Cannabis indica
tcggaagcttcactctctgaaccagtacccttcattttttgttgtagagcatatgcactcttgacagagtacattccattggcttccttagaccagcaaagcacatccgactgctggtgtacacttaaaggaatttgcaaaatcagtctttgatccctctcctcgaatagatcttcaaggatatccacatcccaagaggccatgtccatggacattaaattactcactttagcaagatgaagagctggatgagaggaaatcacacacggttgtagctgatcgggcagccaaggttcgttcaacacgtcaatagaagagccatttcccacactccaacgaactcccgcacgaacaagagcttgagcttcccaaatactacgccatacaaaacttgggttgttccctaaagaggccgagaggtatgatcgattgggaaagtatcgagccttgaaaatccgagacactaaagactcgactcttgttaaaaaatgccaaccttgttttcccaagagagccaaattaaaatcatgtaaattccgaaaaccaagacccccattgctcttgctattgcacatacgatcccaagacatccaagggatgcccttgttctcttttgatgaactcttccaccaaaatctcgccatggtactctcaatatctctactaatttccaacggaagtaagaaaacattcatagcataactaggaagggcttgcgctaccgatttgattaacacttctttaccagcacgagaaagaacttttgaatcccagccttgaagctt

SEQ ID NO: 358468 - DNA, 1739 bp, Cannabis indica
gtcacacctgggggcaacacctggacgctccagacaaattcaggtttaaggcatccaacaatgaagctgaatatgaagcccttatcaccagcctaaaacttgcttgagaattgcaggtcaaacacattgagatctgtaatgactcacagttagtggtaaatcatgtatctggggagtacgaggctcgcaggaaaaggatagcctatctaagcaaaatacatgatctgctcgcacacttcaaaagcaatgctctcaaacaaattctaagggaagaaaacacaattgttgatgcattagcccaactcgcgagcagtaacataaatgataagggtaatctaatccccatgcaatttcttgaaaaacctagtatcattggcacggaggaaatcaaaatgattgacacatccccaaactggatgatgccaatagcagcctacctcaacattggggaactcctagataataggaatgaagctcggaagatgagaagaaaggttgtgtagtacatcattgtagagagtgttatgtatagaagaggattctgcatgccactactcaggtgtgttacacaagaagaagttgcacgacttttgtcagaagtacatgatggattctacggcaaccatgcagctaggcaaagtttatccaagaaaattctaaggcaaggttatttttggccaaccatgattgaagattccaaggcctacgttaagaaatgtgataaatgcctaaaattttcagagatacctcgtgcaccgcccaacgaactaactcagatgcaaagtccttggccttttgccatttgcgggattgtcctgatcggatagttacccaagggaaaaggtgaagtgcagtacgcagtagttgcagtagattactttaccaaatggacagaagtcgagacacttgcaactatcacgtccaaaaaagtgcaagacttcattgtgaaaaatataatttgtcggttcggattactgtacaagatagtctcggacaatggcaaacaatataacagtcagtccttcactaatttttgtgcgaaccatgggatcataaaaagtttctctgcagtggcacatccccaagcaaatggtcaagtcgaagcagtcaacatgacactcaaagataccctaaagaaacgacttgaagatgccaaatgaaactggccggaggaactccctaaagtattatggtcataccgcacaaccgagaaaacaacgaccgaatagacttcttttgccatgacatatggttacgaagctatgttgcccgtggaacttgaacctccaacgattttttgttgcgatttttggtttcttttatatacaagtatttagtaatttttgtaaacacatcataactaaattaatagttgaacttatttgatattcatactaaccgttatatataaattattagtgcaaggacctatgtactactcgatgatggtaccgagttgctagatgctgtgatgttccgagatgttacagaaaatatattctcatgtactgtagttcaaaaacataggttgtttgttcaaaaaactgtggagaaattatcggcccaaaaagggagaattcagttgtatgtagatcaaacccgaatgatgagttcaaagtacaatcaattcaccattcaagcagctgaaccaatggacgattaggaagaagtttcactatactctttttagtttttcaaataatattccatatattaagacttttttaataattttttct

SEQ ID NO: 358469 - DNA, 492 bp, Cannabis indica
ttttaaaaaaaatagaatacgtggctcaattcaaataaaatttagtggaaacaccagtacacttcttttatcgaaagggataatcccctgcaacacactatacttcttatcatgtacacaatagtatttataaccaatcaaaacacaccaaataagaaatattagagtatccctaattagggtctctactctagaatttctcattgttttttattgagctttttatattaatgttgcaattagagattttacatgaccactgcgaatcgcgaattatttccgagttttataataagtgtaatttaatagtgtacagtgaacatctctaattgaaacaccgtttaagcataataaattaagattatttcacaaatacacaaaaataacaaaaaaaattataaaaatacggttccacggaattttaaatattttttacgatttttttttattttattcatagaaaatacggtattttattgttgtactcttgtt

SEQ ID NO: 358470 - DNA, 648 bp, Cannabis indica
gaataaagttaatcatttttttttttcaagtaattataaagtgttactctttaaaattacttgaggggcatatgtgtatgattaaccgaaatttatctgaaaatacatgatatagtgaaaacccacaactttaaaatttttgaaaatttttaaagtttttgatcaaactttctaacgagaatggaggatcaaacaattatgaataaatttttgatttaaaatctgtctgacgagaaaggaaaatcaaaagttataaatgagatataactcataactcacaatgcaaagctaaatactaacggctcgcatcgtacaggaaagtgttaaacgagacatcaaggtgtcttgaaaaggacttaaacctagtgtgtgaatagacgatgtaactattcacataagcaatcaaaaatatacaaagtgataaatcattaaaagtatattcaagtttgcttgaaacagattacaactgttattgcgaggtagaattgataacagctcgcaaattaaaagcatggcagataataaacttctcgcgcatatagtagactattaactacttacatattattagaggaaaatacgagcaatggaaaggcctaaagtattttgcatttgatcaaaatataattgtttaaattgtgaataaaa

SEQ ID NO: 358471 - DNA, 600 bp, Cannabis indica
aataaaaatcagaaactctatatcttgcattgtccatatgctttgtttcacatgttttatacatgattataagtttaatatataagttctattaaattctgaacatatagtagttattcataattacagtgatatcatcatagtggaaagaaattgtgattatatgcttcaaattatttagttccatgatttatcagtgcattggatttatactaatgcgataatcatcgataatgtttacttacaattagctaagtagaatgtcttttccaggacattagtaaagtaaactaggattggatgtattggctatacatcggaatggagcgacattgaaaatggaaaagatattataaactcacctttatattttttaaagtcaatatcacttaattgattataaattatttgatctcaatccttagatggttaagttatagcttaaatatattgcacgagttctttgacttattcgttaccagcttaccgtaggaataacccatacttacatcttgaaaactcaatagtacaattaagtgggagtgttaatcatatatatgaacatttataacttctatgcttattagaagtgaaacaata

SEQ ID NO: 358472 - DNA, 656 bp, Cannabis indica
ttctcaataatttcattatacaacaaaacaatttacaagcaaatttacaaaaatgcccattgggccatataacacccattctagcatacaagggcatttaagtcttttcatacataaaaatttccaaataaaatttagattcatcattactaaataaaatgccaatatttcaatccaaattgcatttcgggcctgaaccccactcagcccgaaatacccggttgtgactataccgcgcccatctgtcagaacacacctgaaaaagacaacataggcatactatataataatatagtcccataagcatgttaataaattaatttcactgttttacccttcttgaggcaaaattactaaaatgcccctggctcatcaacggggtcttaacatgttattaatcaaataaattctcatatattaaattatataataatattattcctcaataatacataattatctaattaggattttgctaatccatttcataattttaattaggatttgtgatcagggttgcccatgtcggtccccttactgacattaccactagcaggagggttcgatgacgtgatggcatcctttggagtttgctcttttactacatgttgctcagcctcctcagctatcaaggctagctctaccactttcttata

SEQ ID NO: 358473 - DNA, 553 bp, Cannabis indica
tatgtcttccattgcctcacaattccagacttctatactctctaagtttacaaacttttgagcaacagggaacaaattctttaatctattacaatgcttcacatccacctttctcaattgattgaaggagcctcttgggagtttattgccacgacatatgctttccaagcttcctaatctttcaagtgttagtgactccaaacgtggaagaaaggctacgtcggtcgaattaatgatacattggaccccatcattatcatgaaatcccatatgctttaatctaggaaaaccttcattaaccaaagatggagaaacattgttgacagacattgacccttctaatgacaaacattcggaccttctcatcaacgatatcagttcacgtgcatagacttgttccaaatgagagaggcttaggcccaaccacttgcttgaaacttcatttctggaaagagaggaatattctccaatagatatatggtatctctccaatttttcagaaaacaaaccctcaggcaaaacatgttcaggcggtacatataaatgtaaggct

SEQ ID NO: 358474 - DNA, 908 bp, Cannabis indica
ttgtggtgataccgtttaaaaaaacttgagacgctatactagacttggtaatctattcaaacttttttattcaatatttaaaaatattagaaaaattaaagtattttcgattgtttatttcaattatgtttaggtattcgtgtgatgttgtttgagtaagcttttaatttaatattttaaatattttataggtttcaagttctttgtgttgattaaagattgcgcaattgtagctatctttattggagaaatgtataatctgtaaaactttataattctttgtttagtggagtttgaatatgttagatattcatgcgtagtgaagtacggttggatgggtggaatatgcatgttagtagagtttgaatatcttaaatattcatccatagtgatgtaggttctacgaattcatgtactgcggtcggatgggtggataattttgtattgttaatattattttgttattattatattgttttatgtgtttattagttttttttcatgtttttaattttcgggaatgtccaattacagccgttatgctgtcgaaattttgctagatcgaattatgataaatttcactaaaatacataaaattcaataaaatatatatatgtgtagtaattaatttaattaatttaactaattatttactacacatataaatttatcaagcggagtatagtgaaggtgttgaccattttttggacttttgtcagaagtatgccaaaaatcctaaattggttctttgtccttgtcttaaatatcgtaacatggagcatatggacattattatgataaaggagcatttatttaggaatagaatagacaagagttataaggtttgggtttaccaaggggaaaagtgtaaagcccgcttagttaatttggaaattagcagttgttta

SEQ ID NO: 358475 - DNA, 709 bp, Cannabis indica
gcctagtgacggctactttatgagaaatcacatcagtcaagaaaggataatggattacatccattaaacccctaaaaagcctagggattagaccatgcatttcctatgatgtattcattgggaatgtgtgcctttactgaatattacagaaagacatgtacctcaattctggggatcaccccacaaaaacactataaataccccccaaactcattaaggcaggggtcgagaattctgggtttcataagaactagagagaaaaaccaccaagaacattctctgtaataaatactctcataaatatacagactcgtggactaaggctcattaatgccccaaccacgtaaaaatcttgtgcattaacttcttacagctttcttaaatattattattatattggttgccgaaaacctcggtcaacattttggtgctttcattgagagctgaaggaagcgtctgcaagtaggcagtaatattacaaaacaacaatggtggagactcgcaacacacgtcaaccccgtcctcctcaagacgctcaagacccagacgatgaggatgtggcctcaagagtgaacgtgggctctgaggaaggagaaggaacccacgacgacgaatacgaagggaacttcgatgagtacgacgcctatgacgaaggcagctatacagagctagtactcttaagacaaaaggctgctgatcacgaggctga

SEQ ID NO: 358476 - DNA, 636 bp, Cannabis indica
atttggtgggagattgtgtctcaaggtcatgacctgaataacatgacctaggatgctttctgagcattattttacgagaaatactataatgagtctattcgggcagcaaaggcagaagaatttatacgattgacttaaggcagcatgacagtaacagaatatgccaccaagttctatcgactggaaaaatttgcttcagatgaagtggctactgaagctgctagaaaagtaaagtttattggaggattggatgaacatattgcacgagatgtgatagttgttgctaaacaacttagggttgttcggacttatgcccagatagtcaaattggccctagttgttgagggtgcagaagatcagatacgaaagaaaaatattgccagaagagattcatggaagcaaacatcaagtgttggttctggtaggggtactgactctggtgatcgcaataaaaggcctaatgaacaagcatctgcaggcccaaacaaaaggttccagggtaaccaaggtttccattgtggcgggaatgaaaattggcggacttttcctgaatgtccgagatgtaaaaggcgccaccagggcgagtgtaaggccagggcctgttttcattgccgggtagtgggtcacatgaagatg

SEQ ID NO: 358477 - DNA, 512 bp, Cannabis indica
cttaataattgttttagaattaacaattattcataaacactgaaatgaaattctaagtgtttatgtagtattaactctttgaagagtttaatataccatagaatttgtatcatcaataaaacacatacacatacaaacattataaacatgtaaatataattggtactggcatacacaggataaagtaaatgaagctcaattcataaatgcaattgatttccaaaatagaaaactttattataaaattctcaaaattaaaagaattgtctgcaataatatgaaaaatagggaatcaaaattccaaactaataattgaaatccacattgttctgaaaaataaaataattaattcaaaaaataataatagaatatttcgagcttcatcttcatcttggactatctccgcccatttgtccaaccatccgattcaactcgctaggatagcatccgagttcaagcagctggagctgaaataagaagaaaaacaaacaaacatggttagtaggtccaga

SEQ ID NO: 358478 - DNA, 549 bp, Cannabis indica
tactttaatggagatccatccatcagcattggtcgactgcgtagcatctttgagagttgcactgagaaggatggtgtttacaagctgggtttggtgctgtttgtgatggttgttttgactaggaaagaggagaagaccctagttccgccatttactatgagaatggctgacaaccttcctttgttctaccagtacccgtggggaaaaatttctttaacttgttgaaagatacttggagtaaggacttcgtagaaaagaagaagcatgtggataagaagattgaaaagggaactactcaaaaggagtcgaagtacttagtctatggatatgttgtagcattgcagtattgggcatatgagtccatcttggagctttctgagaaatttgcgatcagaaaatcgcgcagctttcctagaatggtgaactgggagagtaaagaggcgccactcagcaaagaggaagtcatcagatgtttgcaagaaatgtaagatttttaattcattttgtggttcacgtttattattatttcattttaatccaagtctaata

SEQ ID NO: 358479 - DNA, 909 bp, Cannabis indica
gtggatttttgcccaatattttattctttttcaatccatataattcaaccctaagccctagttgaaacattataaaaggaacatgatactctcactcatccaactcttatcaatttaaccattgccttcaacctagatgagagagttccttcctttgtgatttcagtctcctttattgttcttcaccattcgaacccatagtcaatgagtgtcatgcccacacatagcaagtcaagtactcaatcatagtgagtaagacgatggtaaccaaacccgaaggagagaaagagatcaggttcagatcttgataatgatctggtacgtacagaaaggaatcaagggctagagatcttgaatggaatgagtcatattattctactgcaatcaatgtaaggttttgttaaacccttatgtgtttaacttcattgttttagatgattcatatttaggatgttaattcaatatacttgttagtaaatctacattctggtaaaatattcccaacaatatactataccaatgcacgcagtactactaccgtactagtgttggtagtatatgaatcacatgacatagcatgcaatttacatatatacacacatatatatatatacatattttatattaatcttatctcgtttcttgattcaagtgtgctagtcaacttgaatgaaaactcacacgctgaacagaggccctatatcacaatcacgtaaattgggtaaataatttgctaaaacctttttacggacctaatctcaaaattagaagtttgcctatcgataaataacatgacaataccctatatatctaggaaacacaaaaaatgacattatgaggaaactaactaaaaaacaacgaaccatttttctgggtctttacctataaaaacagtagaccgtttttttt

SEQ ID NO: 358480 - DNA, 556 bp, Cannabis indica
tttttataaataatataaaaaaaacttactaagaagtcatatatctcaattctcaatatgtacaaatatatcaaataaattaaatttattaaaattcttttaaaagtaaaaatagatcaaaatattgtaggatgttacctcattttctttaatgctttcttttatatttatatatagatatagatattgatttatttgttaaaaactaatttttttttttttaaatattttgcaaaaattaaaaaatgtaagaatatgtttaaataaataatatctatcactcacatatttgatgaaaaatatatataacttaaaagtttaacatttacaatagtctcatatcacagaagtatataaaaaaatatatatttaaagtgtcttattattctaataaatattatatattaataaatcaatatagttttaattatttaaataaaattaaaataaaaaattataagaaaataatttttaatataaaaaataattaaattaatttttttataatcatttaaacttgaaaaagattgaaaaatacaaaaatgtattttgcatt

SEQ ID NO: 358481 - DNA, 527 bp, Cannabis indica
ttaatttaatttttttaacatgaaattaaaaatatttcatgctgcacttgtagccacggcttaccacatttggagggtccaaaatgatgctctttggaatcaaaaagtgtggtgtattcggcatactgtacagaaaattaagggagacttgcaatatagaatttatcatgtaatgctaaaaaaggctaaagctatagatagagaatggtttatgagaagatgtacaaaatagaattgcaagaagagtatgtgaaaagcatgtatgagttgtaattggtgtatgtaattggtaattgagcaatacaatgatccttattcatcagaaaaagaaatttattatatatatcaaactatataaatgtatataagatttctaatggaacttaaatctattatttttctctacaattctagcttcaataatagcaaaacgggttacagtgggtcgacacgaacacgacacaagtttttacgggtcgggttagggttgagataattagacacgagtcaaaaaacgggtcgacacg

SEQ ID NO: 358482 - DNA, 918 bp, Cannabis indica
gatgtgatttttttttgaaaatgaaatatcaactccattgaaatttagcattcatcatacaaaaggacataaagctcactaggaatatcattcctataaatgctacgatcagagaaaaaccgggagtgcctagcaacaaagtgagcaacttggtttgttgatcgatcgtctaatgaaacgaacacttacattatttaaaactgataataaacttttacaatcattaacaatcaaaccaaaagcagaaatcatgtgttgattactaaaaattgcttggatcgtgaccatgctatcaatctcaatttcaacttaattccattccttgtcttttagccagctaagtgcctctttgataccaagagcttccaccacctccgctggataagtacccccatgatatttagcttttaaattaacaaggcgacccatagaatcacgagccacgataccaaagtcgtatgcattttctttctcaaacaaagctccatcaagatttaacttgactgtatttgaatcgggtttggtccaacgctcaatgttattatcattttgtaagagagacaatgataatacactagatttatcttgagcagaacaccaatagtcaagtgtagtccatgctgaatttagaactataattggagaagaggatttcttttcccaaacaagtttatttcgtgacttccaaagtgcccagcagatcatgatagcacggcatgatatatcatcaccgtactctcaaacgtagactcaagccaatgaccgatagttgatgaagcatcaaactgaatggtgaatccacattactcccagcagctgagtgcaaaaagaacaatttaaaaaatgcatgagaagcagtctcggctgcattgtgacagaacgggcaaaaagaagaaatatcaatattcttgaagccaa

SEQ ID NO: 358483 - DNA, 675 bp, Cannabis indica
agtacctcttagcttctttccttttgatttcttgaagcttaaattagaagtaggtgtttgaatatttgattttgggtattgtggtaccaattgatggttgggttaggattttaatgtttattttaggttgtttaagttgtcctgtgttggatttattggttgttgaggtgtttgggcaaagtttgagtttcaaaaccaaaactttgctcttcaatggtgaaatgagtttctatgttgtatgctgagttctattgcttaaatttggttcattatagaatgtacaggtattttggaaggtttcttagagtttagggttgaattgtggtgtgagggtcgatttttcgatttctctgcacaaaaccggttgggacttgagaaactggtaaaccagttttgccctcaggaaacccaataaaccggttttccggttgggatttttctagggctgaacatcgggcaggtttatcgggtttcgggttggcgggtttcgggttcacgggtttcgggttcaaaaaattgaaactgaacccggacccgaatagggcacgggttggtgggttggcgggtcacgggttggcggtttcggttggttgggtttagcgggttggcgagttgacccggtcaactcagtcaactcggtcaactctttaaaaaaaattaattttttattgaaat

SEQ ID NO: 358484 - DNA, 553 bp, Cannabis indica
taaatgctcattttctccacaaatgaaacaaggttcaagtggtcttgtttgagcttgggcaaccatgcgccctttttggccatctttatttgaaaggatttcaacttgattttttaaagcttccgacttaggtctttatattgtccccttcccgcagttggtaaattccagctggtcgatttctcttggtgctttcagcagcacttggaccagtccacgtgtgagatttttcagcgagcttaacgcgaaactcaagagtttcttcaggctcattttgcaggaattcaccattacacatcatctccacgaactgacgctcatgacccgtgaggccttcgtagaagtagctcacgattctccaactttcatacccatgatgtggacactaacttaagagatctttaaatctctcccaaacttgatagaacgtttcattgtatttttgggaaaatgttgagatttgtcattcaatctgttggtcttatggatggggaaatatttaacaaaaaatttggtcatttcatcccatgttccaatagacctagatctcaaa

SEQ ID NO: 358485 - DNA, 946 bp, Cannabis indica
aggtgaaacattattattgggaagagccaatcctctacaagcactgcgctgatcagataattagaagatgtgtgcctgaagaggagatgtattctatcctaaatcattgtcatgctttgccatgtggaggacatttcagtgggaccagaactgctgctaaggtgttgcagagtggattcttttggccaacactatttaaagatgctagtacctttgtgaaggcatgtgatcgttgtcaacgaacaggtaatatctcaaggaggaacgaaatgcctttaacaggaatcttggaagtggaattgtttgatgtgtgggggatagacttcatgggtccttttccttcatcttttagcaatcaatacatcctattggctgtggactatgtgtctaaatgggttgaagctgcagctacaccacagaatgatggtaaaacagttctccgctttttgcaaaagaacatcttcactcagtttggtactcctcgagcaatcataagcgatgaagggagtcacttctgcaacaaacagtttgaagcactcctttcaagatatggtgtccgacatcgaactgctttaccatatcatccccagagtaatggccaagctgaaatttctaatcgggagataaagatgattctagagaaaacagtgcagagatcaaggaaagattggtcaagaaagttagatgacgcattgtgggcatacagaactgcttttaaaacaccaattggcatgtctccatatcggttggtgtttggaaaggcttgtcatctgccggtggagttagaacataaagatttttgggccatgaagactctcaacatgagattgaaagctgcaggagagaaaaggctactgcaattgaatgaactagaggagtttcgtaatgaggcatatgagaatgcaaaaatctacaaggagagaaccaagaagtggcatgaccaagg

SEQ ID NO: 358486 - DNA, 712 bp, Cannabis indica
ctcatcttgattaatcttcgtttattttctctttaatttctgagttatttacttttaaaattgcaacttattattttaccaaatagaatcataattataatttagtagtactcaatctaattccctgtggttcgacctcacttgcgtgagatactacttgatacgtacacttgcgtaataaacaaaaaaattcgtaacagtataccaaggctgctagtgcagcagccaaaactcctcgacgaaatttaattatattaacctgatataattttatttgaaatatttttatactgaaatatttttgtaagaaaattaattttgtggcacatttgaaaaaaaaatggaaaagagcaaatgctatttttaaaaataaaataaaaggatatatttattttttattttggaaaaaaatagtaaaattttaaattaaaaataatttaagtaaggtcttggtcaacataaaataatattttattaatgaaagataaatttaatttatattagttcttgtattatttgaaataagtaattatttggccaaatcatttcttttctccttatttcttatgctaaaaactgttagtcctttaattggtattacatttgtttttttttttaatttattttttttgtttaaatttatctaagcttgaaagttacattttatttttaaaaaaaaaattaaataaataaagtaacctccaaatgcgcc

SEQ ID NO: 358487 - DNA, 2121 bp, Cannabis indica
ttagctatctggacctccacaccaacgagtcgttgtgcggaaacccttattttgacagtgccttcatcgttaaaggttatggtaggccctcctgcccatggattttaggcttcctttcttctacggctaggatcacttcttcttactcgtgctgtgttgttcgggcatacctctcccgagcttctcccgaacctcctgctatgtgcgggcctccaatgatgacttgcagatgtccgtccaccagtggaggtggcaagccttggttattgtcgttcctctgattctgatcgaccttgacatatttctgtagatgtgagttatttttccttatcaggatttcaatttcccgcttcaaattgttgcattcattggtcatgtctctcttgctgacatccttcttcatgggcgcgggcttcttatacggggctagcgactgagtggtcatgtaaacactttctatatcttcagccaagatggtaaattcagtgtactttacttgattctcccggggagcttgctcagtttcgccagtgaactttcccttcttcccattcccttgcctgttgttgttgttggaacgtttaccatttgatctcgaattatttgggaaaagagggagtttggcggacgttccagtggaaggaactttggacttgccaagctttttctcaccttctgctcgctgaatagcctttttcaagtttgatgaagctttcaccacgatcaagaaaatcactgattgagtctactgggtcgttctttttaatgtccttccaaagttcaccgaagacttcaatgcccctcagtatcgcggacaacttttaatctttagttacccgtgaaaccttagtcgcctccgtcatgaatctgctgatgtatgctcggagaggctcgccttgtccttgcttgacttctaccaggtctcttagatgcaacagaagttggccagaagatgagaattgtgcatggaattctgaggagaaggccttcttgaactttccaggggccaggttgaaataccattgctgggtggcttccgagagggtagtaagaaacattctgcaacatacatcaccttgtaccccctgcatatccatttgcatcttgaaatacttgaggtgggaaagatgatcttctcttccagtctacattttccaggttggcattttaaacttgtgcggtaacgacatgagattgatctcgagagagaaaggggttccacatgctcggcccaactcgagatcattgtttctctgtccgaccatgccttggaacatactctttagttcgtctagctgtgccggcacagttggactaacctgttcaccatttgggccgatttgagtcacgtcagtatctttctaagcaggaatttgagcagaggtttcgggctgcacgatcggcgtgcgaagctgatcatctactcctctccttttgttcagatcatttctgagatcatgagtcgttcccaacctttcgaatatagatacgcctaactgtcttagtgattgattggtttggttaacgtgctgaccggaaccattaatctggttggaattattaggtatgacttctcccgatgaattactagacaaggtctgcccacctactgcttggccaacaagcgaaacctgtgaccggacatttggcggctgaccatttatagtctgagaagtactcatcgcagcatcttcgtctgtttcactcaaggagatgacattcgagggttgctgctcaaatgtttgataggcttttcgtatcaacacagtagcttgccgactacgattgtcaatctgtacatgatgagcctttaatgcttccatctctttgtccctccattcggcaaacatgcgtctgtgttcctcgaatgcaagatttatcgcagtgtgaagtttcttctgatcatgatgtagggtgttggtatgaccttgcatgagtccaagagcagcgcggaggtttaggatctcagtatcatctccaatgggcattcgagcgttgggagcaggcggaacggctgtttataatgccctggcttggtgctgaactggtattcccagtttcttgcacaccaggcgcgatttcatccacaggagtcgtcacaccatgacccgcgtttaacgg

SEQ ID NO: 358488 - DNA, 589 bp, Cannabis indica
tacattgcccctcaagtctgtacgggacttccgaagttgcatgtagacttcattcgagctgcttctagctttggatggggacttttcaagcacgaccgtgcgagactcgatgtgaggttgactgggcatcccttcagttttcggctaataaatgttctgacaattaatattttaaaatctgattttctccctccacagttgacggctgcacttgattatatttgatttcccatatttgcttttaaggagggaaactgagaagtctgaggttcctttgaaatgattacctcttttcatgacttgcctatacatatcaaccagcattagcacataaactcattttcaccatccatcttcgctgagtgagttcagagcgaaaagagaggttcttggctttaagtttgctgaagtgccttcatcagacctgcttgttggattgacgttgctcgaacccagacatctgacttttgagtaagtttctaatttcctttatgcttatttttgcatgtttacatttcgaatgcacctttaactttgttgtagaaaatatctaggaaaccctaggtcctgaaacttctgcgattcttct

SEQ ID NO: 358489 - DNA, 846 bp, Cannabis indica
catactctcagttccatatcgattctttcattagaattgagaatggacaatggtggagttttactggcttctatggcgacccagatccgagtcaactttttcactcatggaagctcttaaaacggctcagtagaatgtatactggaccttgggttgttggaggggatttcaatgagattttgagccaaaaagagaagttgggaggccttcctaaaccgatgtatcttattaacaactttaggaaggctttggatagatgtcatttgagagatgtgggatatgaggggagtgattatacttagtgtaatgggaggaaaaatgatctcatctttgaaagactcgatcaggtgtgtggtaattcagattggtttgacatgttcccgtccatgcaagttcgtcatttggatcgtacgaattcggatcattgtcctttactactaatggaccatgatccccatttaaagatgcatcatacgacaagatggagaactagattccactttgaaagcgcttgggcagaggacgaagagtgtactcaaatagtgcaatcggcctggttgagaaacaagcagaatgtgaatactcaggggctgaagacacggttgggacagattgggatggctctgcaacattggaataagactaagaggcaagagatgtcaaggcacctaaaggattatgaagataaaatctccttgttatcccgaagtactaacgctaaggattggcaacatctacaagacttagaaagaaataaaaacgttggcttgacaaagaggagaaattttggaagcaacgaagtcgagctttatggctgaaagaaggggacaagaacacaaagttttt

SEQ ID NO: 358490 - DNA, 938 bp, Cannabis indica
gtcggggagtttccttcgatcgtggtggtcgacagcgattagggctaaggcttaggcttcaactgtaaatatttgagattagaagaaaaattgagataaagggaaaatagagaaagaaaagtcttactgctcgcggttagggcaacggaaaaggcacaaacttaagatctttggggtttgaatgtcttgccgagagaggagagtttgtgttgatctgtatttgtactggttttaaatgatattcttaggcttctaaactatgcatatatactagttgttgttcttctagtcgttttcctttctcctactttcataaatgttacttatatttatgttcacccaaattttgacgacgatgacgtgtgaaggatagcaccgcgtgccacaaaaatactgggactaaattaatgaagaaggtgttaagtcatgactgttgagatgccccctcaatttgggtggttgttcttctcccccaaaaaaaaaacttaggtttaggcccccccccccccccaaacttgggtttatggggggacccgactcccccaatttgggtttaaggggaggaccccagccccccccccccctccaacttgggtttaagaggacgccccccccccccaacaccattgggtttaggagggtgatgacgattatcaatcagatgcacccgcctctaaattcaccatcgccgctggaatctccgcctctgcattctccaaaggctacttctttttactcttaaaaaggcttttgaacatcttatttacgcctcctttaatttctttaagcgctcctaaatttttctattgttctcttggtctttttacatcattaaactcaaagtgatgatgaagatgatttggtgatatcggtgtatatctcatgctttgagttctctgtacatcagaaaaagaaaatctcctcatacttagagttct

SEQ ID NO: 358491 - DNA, 112 bp, Cannabis indica
gactacttccattcagatatctagcccttgattcctttctgtaacagagcattatcaatatctgaacctggatctctttctctgattctttggtgctgaaactccttcttgc

SEQ ID NO: 358492 - DNA, 545 bp, Cannabis indica
gatgcgattttcctggcgacgtactgggcgtaagtacgggcgtcattgatatatgatgagtaccaagtgtagttaagggctaacttgattaggtgatgcaattttcctggcgatgtaaagggcgtaagtacgggcatcagtgatatatgatgagtaatgagtgtaggtacgggctcaccttattaggtaatgcggttttcctggcgacgtactgggcgtaagtacgggtgtcagtaacatatgataagtactgggcgtaggtacgagctcgtctaattagacgatgcgatatattggtaccagattgtggcacgggctcacctgattaggtgatgcaattatatgatatatgagtgcagtttttcggcacaggctcacctgaataggtgatgcagttatgcgacatatgcgtgtcaggctatggcacgggcttgcctgattaggcgatgctatacaagattatcaaattaaagcatggacttgcctgaataggcaacgtgatgttatgaagatggttgctttatgaggtaacatatatattattt

SEQ ID NO: 358493 - DNA, 741 bp, Cannabis indica
ctttaaaaattataatttaccaaacactcagctcagcttttttccacagttctgctacagctgctttttcccacagcacagctacagctgcttttccccacagcacagctgtgccaaactggccctcaatcaactcataattatctctcttacaaatgcttcaggccatggagatcgtggcttcagaggtggtcgaggcaactacaggaaatagaggtggaagaggcaatcgacctatatgtcgattgtgtggtacggttggccacactagacttaagtgctaccataggtttgacatcacatttactaaccttccaaatcaagaagcctcttcttcatcgacccgtcccaataactctgcacatgctcgtctcatagaatctcctattgcatttgatctgtctggagcatggtatcttgttagggtttatgccctaaaaataagtatttaatggataatatattataatatatataaaatgcaattataagataaatgaataggttaattatagaagtatattaataaatatctgaaaatttcatattcatataaagattgtatgatcttgtaagatagtaaaagagaattaagatcatacaatatgaataaaataattcagtaatgtattaaagtatgaaatctttaatatgaaattatgaagtacggtttactatgcactatactctagtgcgtgtgattttgattcagatcacgtatgtagatagacatgtggtaaa

SEQ ID NO: 358494 - DNA, 661 bp, Cannabis indica
tttatgatttccatgtcccacaccttatcatccaatcgaaagagactgtgaactgttttgtcttgtaacccagggtggtccgaatgcacatacggatctacagggcaaggtaaccaaggatcatgtaaaattgagatcgtaaaaccatctcccaccgtccttcgagcacccgcccgaacaatagactgcgcctcatgcacactcccccaaacaaagttgggattattacccaatctagcatccaaaaatgttccatttggatagtaacgagccttaaacacctttccaatcagagaagattcatttgtaaggagctgccacccttgctttcccagtagagataaattaaaatcatgaaagctttggaagcccagtccacccgcatgtttgtgtctacacatacgcccccatctcatccaagtaatactccttgtagtcgaagagcctgttttccaccagagtttagccataataccttctaaagccttacaagtttccaccggaagcagaacgacactcattgcttagctaggaatagcctatgcaaccgttttgagaaggacctccttccttgctcgagagagtaaacgaccttcccacccttgaatacgcttttgtaatttgtccttaagaaaacctaaaatggcagtcttctttcggc

SEQ ID NO: 358495 - DNA, 477 bp, Cannabis indica
aaagatcttagtgacgcctcttttgttttaggattttaaatacatcgagatcattcttggggtattcctagattatcataaaagagctattggcatgcagattgtagatcaggtgatacccctattgctaaaggagataaattctgtcttagtcaatgtcctaaaagtaaccttaaaattcaggaagtacaaaagattccctatgcatcagctattgggagtctaatgtatcttcaggtgtgtacacgtctagatattacatacatttttaggatgatggacagatatttaagcaatcctagtatggaccatgggatagcagccaagagggttgtgaggtatctttagagaacaaaagattacatgctcacatacaggaagtcaaatcatttggaggtcgtagggtattcttattctgatttcgctggatgccaagatagcaaaaggtgtacatcaggctatatttttctgttagct

SEQ ID NO: 358496 - DNA, 952 bp, Cannabis indica
ttatgaaagttatgaaatttctcaagtttctgaacttttttaccttaatacttattacaccaagctgtagttaaagtcgcaatcaagatattataaatagcgaaaaacgcaagaacccgtgtactgcgaaaatgtcatagataaaaatccccgagaggatgtaaagtcattcaaaagaaacataaacaaaaatttgtttgagtacacatcgcgagtacccttgtaccgcatatatatataaaaaaattctaacataagtaaatattaaagaaagaagttaagcattgggagcagcaggggcagatccatctgcgactttgctgatagcttcgttctcgacttccttgatgtccgcagcatcagcctcctcgggaaacagatttcctccactgccttgagtctgcgtaggagacatggctcgaaaggcctcagccatctcagcagcttctgccccaagaattgagaagtcgaagtccggaatttcggaaagggtggtgtaaatgtaattagattctgcctggtcatactgcttcttcccattctccttctcgacctccaagtcacgagacatctcctcgacctttgtctgagagttcttggcttcgagctcgacttgctccttagacttgcaaaggtcttcgagctccttgtccttgtcagtcgcatcctgttttagtttctttatgctctcctgaagctggacattttgcctcttcagcaattcaacttctttagaaccagcagcgatggctttcatgaacatggtcatcgattgcgaagccaactccacagagcgtggaacaagctctcggaaggaatcctctccaccttagacatgaactcctcgcccacgaacttctcctgcatagtcagaaagtcgagggttcggacagttggctcgatcacgtccttttgtcttgcgtgcccttagttggcctcttggaggtatccg

SEQ ID NO: 358497 - DNA, 591 bp, Cannabis indica
agatcctggtaaaataaattccaacaaatatcactggttgatcttatatctatggatcttaatcttgatatggttaggtttaacttagttgtattatttatgttcttcaagttgttcgtgggagctaaccaatggatctagcagatatttacatcttaagaacatggtagttcaattgagtgagagcgctgatttaagatatggaatctattacctctataagtatttagaagtgaaacgatgatttccttcaatcttggcttaatagagataaatgattgagatctcattttagtaattatattagtttagtgaaataacatttataactagctaagtgttttaaggataaaatacattgaagggtagaacggtatatttgtccctattcagtgtagatcatctatagaggatctttgactattaggattgttgaccgaggttttcgacaaccaataaaatattataagattagagagctgtaagaaaattagagaaggattattacgtgattggggcgttaatgagccttagtccacgagtctatatcatttatggatgtatttaatacagagaatgtatttggtgagt

SEQ ID NO: 358498 - DNA, 659 bp, Cannabis indica
gaacacttaaacaactaactaaccgccttgacaattgtcagttatttcagttagtgtgtgtcctaactaacctactgctataaatagaagacattacaactaacagaaagagaggtgatacacaaagaagaatgagagctttattgagatgaattctcttcaagtttggggtgttacaaggttgttcaggttcaagattttgactgcctttagtgagctcattttgtaactggtgtgaatcaccattagtgtgctttgtgttcttgattctccattgttgtaatttgtaatctttgccattcaataataaaatcatcacaaccaatagagttgtttctacccgggaattaggtctaagttttatccaaaacttgtgactgaacctcgttatttcttgctaccaatttactttctagtttatagtttctagtttaatgttctaagcctatttcttttcttgcattgtgttcttgtttgtgcttgagtgcacaacaaatgttatcagagtactagggagatcagggatcagattcaagaaacatttacaagaaaatcaagattgatgcaagatggctttcaccaaatttgaggtggacaaattcacaggcactaatgacttcagtttgtggagaattaaaatgaaagcttttcttgttcat

SEQ ID NO: 358499 - DNA, 649 bp, Cannabis indica
gtggacaaatttcacaggcactaatgacttcagtttgtggagattaaaatgaagcttttctgttcatcaggggatttcagaggctttagatgatgatgctatgaaggagatagatgacaataagaagaggaaagctgagattgaaaataaggctcacagtgccatacttctcaatcatggagatgaagtcttgagcgaagtgtcaagtgaagaaaaggctcttggattatggaataaattggctaccatttacatgaaaatctctggccaataaactatatctcaagaacaagttgtatactcttagaatggatgaatccaaggagcttcgaaaaaatcttgatgattacaacaagattattcttgatctgaataatcttggagtataaattgaagaagaggaccaagcaatcatcctacttagttcattgccaaaaatgtatgaacactttgttgacaccatcttatatgggaaggacaccttgacaatgatagaagtcaaggttgcattgtgttcaaaagaaattcagaggaaggatgatcaagcagataacagtggtgatgggttgttcattgcaaaaggaagatttcaaaagaaagactacaaggggcacaagaattcttacagcaataacaaagacaagagtga

SEQ ID NO: 358500 - DNA, 584 bp, Cannabis indica
gtttaaaaaaaaatgacgaagaacagaacagaacaaggccccctttaaaaatggaaaacgcccgaacttgccctagcacaaaatacctctctgaaaatgtcagccatgaaaaggttggcgaatcaacctgcgaaaccctatgaagaacatgtgtgtgtatgtaatctgtgttcaatttctggtacgtatgatgtttgtttcggttttcttcgttcttcgtttggggaactatgcgagacctctgcgagtagtgggctgggcatggagaagaagatgcagaagaggccttaagccttaaacaaacaaacaatttttttggacaatcattttgggctttttttttcattattattattattatttatttttttattttaaaaaatatattaaaaataaattatacaaaaaaaataaaactgtaataacagattaaatatcatatttaattcattgcaaacaaaaatatcatatttaattatggaaaattctataaaaagggtacacctcctatctatttcggtatttagagaattttttagtctaatttcttttatagtcgtgtagttatttaagacattatgtaa

SEQ ID NO: 358501 - DNA, 906 bp, Cannabis indica
ctgggaaggccaatgtagtggccgatgccctgagcaggaacggtccggggcaggtagcttgtatgattcagatttcacctcagttagcagaggacatggttagatctagcattgagtttgttgtaggcaagcttcacaacttaacgctgcaatctgatctgttagaacgaattaaagtcgctcagatgactgatccagagttagtaaaaataagagaagaggtttcagctggtcaagcaagagatttttcagtgtcagacagtgggatgttactgtttaaagctagcgtttgtgttccaaatagtgtggaacttagaaacaaaattctcaaagaggctcataccaccccatattccctacatcccggtaccaccaagatgtatcaggatcttaagccctacttctggtggagcggaatgaagaaaaatttggtagaattcgtatcgagatgcctaacctgtcagcagatcaaggctgtgcatcaaaaaccggcagggttgttacagcctttaaccatacgtgaatggaagtgggaggacatcacaattacctagaaccacaggattgttcgattctatttgggttgtggtggatcgatttacgaagtctggtccttttctgccagttaaaacaacttatttagtggatcagttggcagagttgtatgttaaagatatagtaaggcttcatggggtaccaaagtctatagttttggatagagatccgaagttcacctctaagttttggcagagtttgcaacgagccatgggtacgaaattaaaattcagtacagcattccatcctcagactgatgggcagtccgaaaggacgattcagatattggaggatatgttacaagcctgtgttatggatttttgaaggctcttggagtaaatatctgccgtt

SEQ ID NO: 358502 - DNA, 842 bp, Cannabis indica
aaaaaaaaaaaaaaagtctttttcaatatttttttatacagttttttttttctaatcaatattttggactctaaccagacttagacccaaatccacccccacggctctggtagtgaactcggcctctgacccgaaaccgaacccgaccctggacctagacccgacttaaataaaattaaaaaataaaaatgaaaatgaactttatagaacacacttttgttttttgtttttaaaagtaaagaacaaaagtggttacagaatgcatttttgtttttcaaaaaacaaaatttttaaaaacaaaaattttacttttattttgtgattaaaaaattagaaaataaaagttttatcaaacgacacctaagtaaaaaaaaatcgtaattcaaaaacatgttgagaagttgatattgttttctatattacaattaggtcaatgtttgttatttttctaatatttatagttgtctttttgttgttttatagttttttttttgttaagttgtttcagagttattttttaattgttttagttgtttaaaaattttattttatcttattgaaacacaatatttttgtattttagaattttaatacaatattttttgaaaatttggtacaacataaacataaacataaatataaatatggaagaagtttcaatggttacatttttattgtaaccatcatgggtacatttttttaagccattagattactattaaatggttgtgattaatttgggaattaaataaaaataaataataaataacttgtaacctgaaagtaacctaataatttatttcctaataaaactttaattaagattaattatattttaaaat

SEQ ID NO: 358503 - DNA, 493 bp, Cannabis indica
atctaagatccttgtaaaataaattccaagatgttacgtacgtgctaagagggcacgttacaagctaagtgatggccacaagttggccaagtggtggtaaagtggtgacggatgttatggcgcatgctggtggcatgttgatgcttagtttgtttgtagtggcatttttgtaaatatcttcaatactgtccagatgggacgagacttggtattcgccatttatttgggtctacaaatagaatggtgcaatcagtttggcaaaactaggtgatttggtatatggttctttccatatctttgcagagcaaaaatcatctatgttcctcgtagaaggctaaaagcccagaatgctctttaagggggtaccctggtgtcagctctccaccaccccttgcaccttggttctaagtgagctactactagtcagtgggactagtagggcgcgcatatgaggaccacgaggggactcatatgtctccatgagttggagtac

SEQ ID NO: 358504 - DNA, 793 bp, Cannabis indica
ttgctccaaccatatttgtgcattgcaagcctgtttaacttgcaaaaattcatgctttctaaattatactgccaagacctccaaatctttgaacccaactcataatccaatactggttattcactttaactaacactatatcatatatgcgctaaaatatcgtaagcatactggtaacttattaaaacgagttaaaccctaccatgggttattgtagcccagctattaacttactgttaacctttaacaataggttaaccatacaatctcataatatattaaccagtaaagttttttttttggggtaaggatacaataaatataattggcaaaccatgccgaacagaccttactctgtccatcactactatacctcctttaccctcacttgtatctgattttctactagagactcattgtctgtaattccttagttaaggctctttgacttatacttcctaaattacctttagacataagtctatactccgtttaagcatttcattccatgttcgagcgcaactgaactatgaataattctctttctcttttccctctaagttttccacttctaattggacgatcttcagctgtttgcaaagatgtttgctatgggagtattccgactttgaaaagtccatcaagaagtttcctttactagcattccagttcaagaaaattctctaatatttctcaaaattcttagatcttaatagctttatctttttgagaatttttttttctcgagcactataagacctaaaatgccacctctttaacaaaagttggcact

SEQ ID NO: 358505 - DNA, 633 bp, Cannabis indica
gggcagtcaaatttgggtttagagcatccaacaatgaagcagaaatgaatcctttattgtcagcctaaaacttgctcgacaattgaatgtcgtacttattgagatctgtagtgattcataattagtggtaaatcatctatctagggagtatgatgctcgaggagaaaagatgatagcctatctaagaaaaatacatgacctcctcacacaattcaaaagttatgccctcaagcaaattccaagagaagaaaacacaactgctgatacactagccaaactcgcgagtagcaacataaataataaggctaatctaatccccatacaattccttgaaaaacctagtatcactagcacagaggagattgaaatgattgacacatctccaagctggatgacgccaatagcagcctacctcaacattggggaactcctaaataatagttttgaagctcaaaaaatgaagagaaaggctatacggtacatcatcgtagatggaatcatgtatagaagaggattctccatgccattactcaggtgtgttacacaagaagaagccgcaaaacttttgtctaaagtacatgatggattctacggcaaccacgcagctgggaagatgtaaagaccgcttagttt

SEQ ID NO: 358506 - DNA, 818 bp, Cannabis indica
agctttccaacgatagaaagaacgtccaaaatggagtaagtaagttatggccaaaataaaatcgggaaaaggaatagctctctgcttgatttttggccgcgggaacttggttcgaaaaacctagaaaaccagattttaaggtctaaaaatgccacttttcctaaattttgaacctcaaccaaaacagagggtaaaaacacatattaaagctcaaaaatcacaactcaaatgcatctaaacttagatttaaacaacaaacaacataggctccaaacttgagcacaatatgaacaaattcaagctcacaccatgaatcttcaaatcccaaaacataaactcaaacacaacattaaataagggctgtataatagaataaaaatatcattaaaatccttacaaatcatctaaaaaataccacataagcatcctactttaactttctaactcaatcaagcataaggagtaaagattacactaatattatcaaacatgcataccaagaacatcataccctaatttcatgattttgaacaataaatttcagcaagaattccaaataaaacttagtataaagggctacctcaattccttccaatctctagcacgaaaagccaccaagaccaagcttgaatccaagcaattcacaatcaaaattcaagaattagaaatgagtttagagagagggagagggttggcgaatatgactgaggaaacaatgcaggaaataaaactttattttacttaaaatttctttttgttgcaaataacaaatagtagaaaattcaaaaaatgcccttagggccatacacacacataag

SEQ ID NO: 358507 - DNA, 537 bp, Cannabis indica
catttctataaggtcaacacttaactccctatcctcaattctgatcggcatagacctaatccaccttttggagataactaactctctgccaggtaatagggttccaaaccctgattcataactatcgtgcggtctatccaatttactaaagattttggctgccacataagaatgagtggccccagagtcaaacaacacaaagaaacaagagttattgaccgagagctgacctgttaccactgaagggctggcttctgcatcagcctgagttatggcgaacacccttctggagtgcgttttactgcagtctttggtgcctcagttttgtgttggggacaatctctcctgtaatgccctggcatgccacactggaagtacccctaacctttacactcccccagatggtgccgtttacagctgggacattcagggtaagtgtatcgggtgtcagtgccactctggcgattgcctcgaccctggttcctcaaaacctcttgttctgaccccagccactggttgcagtggatgcctttcttt

SEQ ID NO: 358508 - DNA, 1764 bp, Cannabis indica
gagccctagttgtcccaaagatcaaacattccaagtcgaactatcttgatatgtataatcttcatccagctccaaactcagtgccattcaacaacaacttttcctttagctgcacataacatatgatccgtgagtcaacagactcagtaagaaaagcataaagataacctataacctgttggattttgtgccctaaatataaccaatttcaatataatcagatttactaattaataaaagattagaaatcattttatgttgcatggttcacatgatttatttcatgattatatttaatgtataaattatattaagtccagaacgcattgttatacccaaaattcagcgtgcacatcagaagaagacacgtgtctagcttggaagaatgaagaactcaaacaagcaatcgtgagtacacttgacctggaataactcattaacagaaaaaatttgcagagtatgtttataactcggctggctagaaagtcttatgcgagataaactaattgttgacttgtgtctcgacgagaaactacgtcagtgtaagtgtgcatgacgagacattaacctcgttgcgggtaggagatataataacaataaaaatacttagcttatataacatgttctacaaactacgtataagtagaggggtggatcaaggtgacagacagtaaggcgtctatctcgctgtaagatggcacccacggaagaaagatcatctcgacattagaaactgtaattgtcagaattaaagtaaaatcagtattaaccttgagaagttgtatgacgagctccagctcgccatcaaagttaactcagcgaggcatccaaatgagataaggcttaccgtatatctttaatgtgcgttcatctcggcccaataaaagtgggatattcacagctgtgtgaattctaaataaaaactgcacttacttagcgtgatttgcaaatcaaatcccatgatttgagagaataattgctgtaaagattacagtcaactttgtaattaactgctcactatattattataaatagtggcaagcaagatgagaagagggacgaaaaaactcaaacaaaggaggccctaaaaaacaatcaaaaatctgaataagattgactcgtggactatgcagaattttaactgcaaaaccacgtaaaaaaccttgtgtgttcatacttttatttttatagcttttattttttctgtgtgaaatcgttactgtgagtctcaaatttggttaacaaaaatttgcattaatagtttggtgctttcattgagagcctctgtgaaaaagctcagaaaaagcctcctgacataaaagtaatgaatgatgatgaggaaaataatcctctgaaggaattagtcatcgccctagaaaagagccattgagtcctcaaggatctattgagtcatcagatgaacagactggaagctccaggaaaaccaagtattggggttcttggcttgacggaccttgggtaaacaacgaccggttgattcctaaccaggttgatgaagatggcacctaggacccaaccaggtacataccaattgtggagttagaaaatcgccatcttaagcgtcgattggaggaagcaaactgatgtaatgctgaatttgaacgtgaaatagctgcaataagagcagtgcaggagaatagttcctgaaatgaacctgaccttggaagaagagattcacaaggcaaacctcgcaattctcaaaccaaggggcaggagacatcccagagatatactcagaactct

SEQ ID NO: 358509 - DNA, 608 bp, Cannabis indica
tcaaatgtgtgttacccaagaagaagctgcacgacttttgtttgaagtacatgatggattttgtggaaaccccgttgtcgggcagagtttatctaagaaaattctaaggcagggttatttctggccgagaatgaatgaagattcgaaggcctatgttaaaagatgtgataaatgccagagttttcgaagataccttgagcattgcccaatgagttaactcagctgcaaagtccttggcctttcgctatttggggaattgacctgatcggacacccaagggcaaaggtggcatgcagtatgcagtggtctcagtggcttacttcaccaagtggacataagccaaaccattagcaaccattacatccaaaaaagtgcaagacttcattgtgaagaacataatctgccggttcggattgccgtacaaaatagtttcggacaatggcaaacagtttgacagccagtcctttactgatttctgtgcgaaccatcgcattatcaaaagtttctctgcagtggcacatccccaagcaaatggtcaagttgaagcagtcaacaagatattaaaggatacactaaagaaaagacttgaggatgctaaaggaaactgg

SEQ ID NO: 358510 - DNA, 970 bp, Cannabis indica
tcaaacccgaaacccagactcggacccagacctagacctagacccgtaccccaagcttgggtctgagtccgagtcttggttggagttcgagaactggaatctgactacgacccagaccaaaacccgaattgggatgtggacttaaatcaaaactcggatcgggactcgggacacgaacgcgaacggagacacagacttggaccttgacccaaaccgggattggagactcaaacctagacccaggacccagacctagattggagaccaaaactcaaaattagaacaacaattaggacccaggactgggacttggacccaagacctaaccccggtctcgatcccagacccagacccagacacggacacagaccgggacctaaagatccgaattgaaatgagactggaacccaagattgggatctgaatcttgaccaacgacctggggctcggaaccaacccgtagtcggtgtctggatcttggaatcataccaagacccgaacttggaaccatttccagaccaggacctaaatcctaactcggacccgagatcaaaatcggaacaagaaccagaatcaggaccctggaataggaattggacctggacccaaaactggatctagacgcagaaccgaacacagacccagacccatatagggattcataccagaacccaggcccaaacccggacccagacttgcgcaagacttgtgacttaggacccgtgactcgagacctggaacagaacctagactcgtacaagaactcagacccagacccagacctagaccaagacccggaccaagacacagactgaaacccagactcagatcgaaacccagacctagacccggacccaaacctggactagtactataactcgtactcgaacccaggactgggacccggactaagatcaggactgggacccaaacccggactaggaccgagacctgaacctggaataggact

SEQ ID NO: 358511 - DNA, 836 bp, Cannabis indica
tttgtgactaatacatttaactaaggaattttgcatcacaacataacaataataatttataattagtcattaatttttttacttctagtcacaagttttgttgtgactaaaaagtaaaaattttgtagtgtttatatacgtatataactctaggcaataaatttaatcccttttttgataaaaaataaataaaatgtactccattaattatatagtacaatttttgttttaatatagtttgacgaaagcttacaacaaacttagtttgaggtaatttaatttcaatttaatgcataaattcgttttattaacccaactttttatctaataattggaataataaacaaaataatatataaataggatattatctactatatatgtatatgattccgtgatgttgcatttttttttttcttaagttttttttttttttcttaccaatttgtgcataaaaaattagacttttttcagttttattccaaaaaatataacaatattacaaaaatatttccacctagccaaataaacaaatatataactcaaataaaaaaaaaatgacacaaataccacttatacacaccttcaacccaggatccatgaatcttgggcaaccacccagcaatccaacacaaccgaaacgaaaatccaatcagaaagagaaccaccattaattccggtgacttcacctcagaagacgaccagaatcaatcaaaacaatgactgtttcgaattcatgaaaaaaaaaatgcagaaaaactattacgaaattaaaattcaattagaaatcttatttattttgcataaaactaatgtcctgactttaattttcagat

SEQ ID NO: 358512 - DNA, 590 bp, Cannabis indica
aattgggtaagtatgatgaaaaaatgcaactcattctggtaccaatgtattggaatggggaacttttaaggaaatactaccaatagaagtaccaggtcgaatgaccatatcaagtacgaaacaaaagaacatttgctcttaagtgaatggccttctgggcgagccatgtccaaaggttcggataaaattaaaaagtactcaggtcggatgaccaccattggaagtataatttttaattttttcaatttgttttatttcatgttaagctaaagatcaggtcaaatcagtataatagctttgctgtaagttactatggtaacaaacatatttccgatcaataaattaataaaaatgtttatttcaaaactcaaattgagtcaaacctattagcatgttattaatttaccataaagtgcgaacaaaaggttttggtcgagcccaaaaccccgaacagacaaaaaagcacacttgcaaaaaatataaaaagtgaccaagagtcatacgtttgctcggtcacttggggggcacctatacctgtacaaagtatttggtaaaaaataaaacaaacagaattgcatgatgattataaa

SEQ ID NO: 358513 - DNA, 452 bp, Cannabis indica
ggtcggatcagatccgatccgtataaggcgggtcggatcagatccgatccgagtatctaatccagcggggcggggcggggcagatccgtatatgacctggatcaggttggatcagagtcggatcagattcgacccgcaccattgacattcctaaaaatatcagaggataaatcctatatatgtggccggccatggcagtgtggatttgggcctcactttttgcaattttgcagttttatcacttttgcatctgattttctcaaaaatgccaattttctaaatcaaccatttaaatgaaaattataactatttaataaaaataaataattattaaataatattgccatttatcatatttattaattgaaccatacaaagtatcataattaacatatatgcccctctaactctttctttacaattttgccgttacttagtgaaaatttcacaaa

SEQ ID NO: 358514 - DNA, 645 bp, Cannabis indica
catgtttagggtattagattatagtttatgatcaatatacttgttattaaatctagatcctggaaaaatatatttcaacagacggtcgttcaccccttttaaaagcaatggaaaagctcgataggacaatatagcttattggcgcaagttggcgtgggggaggtgcaaagcaggccaggacctctacgaagtatggattaagagaaagagtagtgccacacaacaataattggtcactataagcaaccctaccagcctttggagaagtagccatttccctatcatcagctagtgacaaacaaaaggagacattgggaaaaataatgtaggtgaccataatgtcacgaaggtcagctacggtgatagagttagtaacatcgacaagagaaaataggtctgccagcattagcaagcttggaatcattaacttcttagaagacatacctttagacataaggaaatgattgtaagcatgggcttcacattaatttatgatttctttcgagaatcctacaagctcaagtcttattttgaggtaacccaacaagaaatgaacgagagttaaacttcgtcccacaatcatcgggccgggcagactcaagtgaaaggggagaaataagtgttggaagttattttaccaggatc

SEQ ID NO: 358515 - DNA, 441 bp, Cannabis indica
acccagacccaaacttggaccagtcactcgggacctagaacttttacctggacccgaacctacacccagatcggggtacagacctggacacaaacccaaacacagactcggatccgaactcaaacccacacctagaatcagacccacagctacaccaggacccggaaacaaactcgaaccccgaccaggatgagaaccaaggacttagacccaaaactaaatccagacacagattcgagattggaaacgatggactcagccccaacctagaccaagacccccgatacgaacccacactcggagcctgatctggacctagactgaaatccggaccgaacccaaactcagaccaggacgtgaactcaatcccgaactcaaaagtggacccgaaccgtacgctgtgacccaaaattggaaccaaaactggaagttcgaccgaga

SEQ ID NO: 358516 - DNA, 812 bp, Cannabis indica
cataaaattaccatatctctctcgtcgtgtccgttttcagtaatctaggtaccgttttaaagataatttaatggtctatattttttgtgaagaaacttttccctaattctggttatttcggtgtgaaaaaattcatcttttcatgctgcctgtcgaattacagttttttcagattttctttcgatattgcctcagtaaaagtgctatatctctctcgatatctattattttccagcgattctggtaccgttagaaagataattcgataatccatattttctttgaagaaacgtttccctaatttagggttctgacttgtcaaaagttggtatctttactcggttaggatatcttattttatgttttgtttcagaaaaagtgtccttagtaaaaactcaatatctctctcaattttgatccattttaaaagatctttatctcgttttaaagcttaagaagagagctatatttttgttgaaggaaaatctgtctggatcggggtgtaactatatttaaaattattattattaaactatattcagaaatcaacatgatccaggattttaaagaaaatgttttaataaaatatccataaatcctaggttataacttcgattttgatgatctctataccgttagaaaggtcttttgattatctaaaaactttgtgaacagtaggatttctaattcaaacgttttatgagtcaaattctgatctaaactttctgtatagtaagaattacaaatatattgagtttatcggtgatttaagggttagctaattgttgatagggcctagaagatatcgtaag

SEQ ID NO: 358517 - DNA, 843 bp, Cannabis indica
tgtgaaattattaccgtgaggctcaaatttggttaacgaaaatactgcgttaacaatagtgttgtctatgttgaaagttattttaccaagatctagatttactaacatatatgtttgattataatctataatctaacagtctaaatattaatttcttaaaacaatgaaataaatacataaaatattaagaaattcttacattgatggtagcggaagataatgactcattcgattcagatctttagcctttgattcatgtctgtagcagagcattatcaagatatgaacctggatcttgtctcctttaatttggttagacacagtcttcctcactatgctagggattgttttgacatgagtggacatactctcaatccaccataggcttcgaaatttataaagaagaagaagaggaaagtcaaattacaaaaggctcttttctattttctatctgacaaaatagtctgatgtcaatgaatgaattgagaaataaagagccatcttattctatttatagtgagatactaggattaggtttagaatttaaatgacattaaaaaaaaaagataaaaataatagcttttttaaccttaagtgatcggccatattgtgggccccacaggtttcaattttgtcatttatttaactcatctttctattcacaaataccatattttagttctaactccacaaatgtcaattctatctatataataatcataattaattattaaataaaattttcataattaattaattatttattaataagaccttacaaagtctcttaattaattaataatctctaaatcctctttttttctcaaataagtccttgcttag

SEQ ID NO: 358518 - DNA, 553 bp, Cannabis indica
tagaacaagaataggacggcaggacccagacccagacctagaacggaacacagacctagactcatacccaaactgagactgaaactccggcccagacacgttcgtgtacccagaccgcaagtgagactcggacttggacctaaatctgggacccgatccaaaacacaaacttggacctagatagggatccaaatacgaacctagctcggaccaagacccagactaggatcaaaatgctggacatagatgttgaccgagatcctgaccaagacccaaacttggacctgcactcgggacccgaacatggacctcgacccgagcctagacctagatcggggtctagacctggacacaaacccagacgtagactcggacctgaactccaacccacacctagaatcagacccaaagctaaacccagacccagacccaaactcaaacccataccatgatcgaaaccaaggacttagagccagaacagaatccagactcagatggggattggaacttgggactcagacccaaccttgaccaagacccaggacgcgaaccc

SEQ ID NO: 358519 - DNA, 1314 bp, Cannabis indica
gttgaacgtattgttcgtccagacctcttcttttgttcaaatcactcctgagatcatgggctgcacccaatctattgaatactgaagcactaggtggtctcagtgtttgaatggtttggtcggtgggtcggccaaaaccgtcagtttggatgaagttattaggtataactccacctaaagaatggtcagagagggtctggccgtctgccatttggcccacaagtgggacctgtggctagggattggatggctgagcattatgagtctgggcggtatgcccagcagtaattttttctgtaccgcccagtgggatactagacgtggcagctggttgctgattagcaacttgataggctccctgtattagtacggtagcttaccttgttcgatcatcgatggttgcatgctaagcctttaatgttttcatctccctgtccctccactcaatgaactggcgtcgctggtcattgaacgcaggtttattataacacggagatcctcctgatcatgatgtaaggcgttagtatgatcttgcatgagtccaagggcatcgcggaggtttttaatcttagtgtcatcccccatcgtcctctgagcattggttgtggatgggattcaagtgttgggagtgctttgatcagctacagaactggcattcccagtctcttgcacacctggtgtgatcccagccaaaggggaagtcacaccttggcccatagtaggtggttgtgtgttaggctgctcgggattggttcccggtgggacccttgtattcctaggggtttgcgcagcagggtttgtcaccattgggtcactttgatcaactaagcctctgcgagtttgcaccaccattctgtatgcatgttgagactttacacaaagaacaaacttggatttttgctctcaatgaaagcacctaaatattgacctcgctttaagtcaacgacaatgagtcaattatgaagagattagaaatggaataaaaatagagcaaaaactaataagcaataaagaacaccaggttttgaagaggtttgacccctttagtttggtaatagcctactccctttagattgtactaacttgagaacaaagaacatagtgtttcctctctcaaagctctcacaataaaatctctgagtatttctcttagatctctctctggagcaattctttcgatcccttttacaatgaagctagttcactatttataggggcttaatgcacgaggaaaggtttccctttgtttacaacatctataatttgaaagaacatttattacataattggaatacatgaaatgggggattgaga

SEQ ID NO: 358520 - DNA, 751 bp, Cannabis indica
tttgaagtccaccctaagcaaggcaggtcggggtacttctatttctctcaaccagacttcaagtggttggcgggcaccgatgatttggccatcagcgaaattgggcattttactgatgaatacttcatggtggacgacacgggcatcactcgcacccggttccagcagattctgacatatcaccgccctcctctcactcttgctctctaggatagagctcaaaaacttgctcgattaccgggggaagaccggaatatcatgcagttaacctctaaggataactttgtgaagtacgggctctatcccaaggacttcattcccaaaccagtgaaggggaggaagaggaaatatgatgctggacgggttgaacgagctcatcaggaggatgagttgattcaactgaagcgcgaggctaagttgaagggaggtgcaagggccaagcaatatgttcaggagcccttaaatcctgaggctgaggaagagcaggcgactccgctcaagaggaggaagaaacttccggccccgcccaggcctgttgaacatgcgattcacataagggagcccatctcacctgctcggtcgtcccctcccgtgtcaggaaaaggaaagctgttatgtctgaaataagaacgatgtcaggtgatgatggacttttgatccgttacttggggcctatcactttccgatgccactttgtcttgttttaagcttcttgactattatgcctcatgtttttgtatgtctgttttct

SEQ ID NO: 358521 - DNA, 656 bp, Cannabis indica
acacacctcgtccagctcctcaaactcctggacctcagcgtccccctcacggtcctcctccatcgggacggccgaatcctgttcggcatcgggcagagtggcaagctgagccacttgagggtcagaagcatcggccagaggcgtggttttcttcgtatgagacatcatcctatggctgggtacgaggtcagaagattttccttcgctagaaggaggactagcacgaagacgaggatgaacctcgtgcaaaagttgaagcaaatcctggtcgatctgatgcccgagttcccaagactcacctgggttcatctacaaaagacaacacacaagatgagggttggacggagtatcaaacgaaaaacaagcaaatatgccgaccaggagtactcaacagattaaagaacgactatgtttaaagaaaagtcaaaactcaataagtcaaaaagttttggggttttttcaataatatacctaaaattgattttatttataaaaatacctttaagaaaattatttgcacaaataccgtcgtgccacgtcagcatgcataccgaaattcaaaacaattaccgaaaatagaaaaaactggaaaaatctcatttctagaaattttcgcttttggggagatttgaaaaaagcaaccatttagttgcttt

SEQ ID NO: 358522 - DNA, 815 bp, Cannabis indica
aatggtacagtagtaacgaaaattacattttcttttttattttaattttattggcggttctagttataataacaaaagcatgttacatgcatgttagtgtagttattatttgtacgtacctaccaagattagacactcccaatcaaagaaaaaaaaaaaaaagaaaaaaaaaaaaaagaaagaacaaacattccagtttgggcagccgaaaaagaagcagtacgtattttattttatattttaattagaagattttttttagttgttttttaggagaactggtggttctatttaaggatgctcaaaaacctaatttcttttcaattttagtggtgaaaaaataccaaatctttcaacactgttgcaccaatacattatacatatacactaacactaaaccaaaatatttttcataactagataaatattagtttagtgtaattaaatatagagaaatccctcatatattattttttaacatttttttttatatttttataatttttttttagaaaattacactatatacccattttactttatttattttaatttttactattatttccatattctttaagatatacctatttttatagatgatgtgtctattataccccttaagttaacactacaaaaaatagctacttttagtgacaactttttcatcgcaaaacataaatttttttatgattaattgtgacttttagtcacaacaaaatattacttgtaactaaaacataacatttagttacaagttgtcactaatttagttttagtcacaacaagtattgtgactaaaaacacatttagtc

SEQ ID NO: 358523 - DNA, 537 bp, Cannabis indica
gtgattggttgttcaggatttgtggctggtggaaccattgcctttcctggattttgtagtgcaggatccaatgccggtggatttactggatcgaccacgcctctacgagtttgtaccaccatcgtgtttattagtaaatttgtagtaaagagcgagtttgtgatccttgctctcaatgaaagcaccaaaatgttgacctcgcttttagccaacgacaatgagtcttaattataagcgataagtgaaataatttagatgtaatatgaaaagataaataaagaacacaaagtttttaaagaggttcggccccgagcagttcagtaatagcctaatccccttgatttgtattgacttaagaacaaagaatacaatgattcttctcttagagctcttacaatgaaatctctgagtgtactctcttagataattctttcgaccctctacccagtgagaatagatcactatttatagggctatgtgcttgcgggaaggttttcctttgtttacaatgtctataattggtaagattacacatta

SEQ ID NO: 358524 - DNA, 531 bp, Cannabis indica
actaaagcggtcattacattgttgtttgtttgtttgctttttttttttggttttgatataaattttttagaaatcatgagatctcattgtttgaagtatttttgttgttcatatttttctcgatgggttctcgacacgttctcgatgggttcttgacaccattgtctcaaggttaaggatgatctttctcgactagttcttgatacgttctcgataggttctcgacacggatgtcccaaggtcagggaagacctctctcgacgagtatcgatacgttctcgaaaggttcttcagaatatttagtcagttttgaatggtggttatgttatggtgtttttcgatccgatggtgttggtcagaaagaataaaaatgatgtatgttttcgattatttatcgacagattctcgataggttatcgctaggttttggtgaggatcattaagtttagatattatcgatgtgttatcgatatgttatcgacatgttcttcatagttgaaacattgaaaaaaaaattataattttgttttt

SEQ ID NO: 358525 - DNA, 641 bp, Cannabis indica
acataaacttccatgttcgcccaatttggtttgcgaacatttcattaactaatcgctgatatattgccctagcattcttcgatccaaacgacatgactttataataatagagtcccatgttggttacaaagcttgtatgttcctgatctgggacatacatttttatctggttatatctagaatatgcgtccataaatgatataagctcgtgcccaacagttgcatccactaattactcgatcctgggtagtggaaaatagtcttttgggcatgccttattcagatcagagaaataaatacaagctctctaagttccgttaggctttgggacgagaacaggattagctgtccactagggataaaataccttgcgtattatgttgttaacaaacaacttatccacttcctgttttagtgcgccttgtctctaggactccgaaggtctccttttctgcctcttcgctgggtagcttatgatggaaattattttaccaggatcttagatctactcaccagtatgttgattaacaccctaaatatgaactttctaaaacgatgaaagaaacacatataaagtttagtaaaccttacactgggtgcagcagaataatatgactccttccattcagatatctagccct

SEQ ID NO: 358526 - DNA, 630 bp, Cannabis indica
tttgtttgagcttaggaagggttggagatgttacctcccatccaactagacttatatcatccgacctggtgttgctgacactcttccagtaggccgtccaagatctggtgcctttggcattccaattgttgtttctgtcgtgaatgttgcgcggcacacacaacaatacccgcctaagagaaggatgatggcccgcaccgaatagatgatgcagaaaattaatgcgaccgaccctcacgtggcccggcatgccacactgtcgagtgtcaaacaggacctgtctgctacagaggaggaagactatgagggagatgttgaggtccaagagatagaggaccaggacggtgactgtcctgatagtccctccgaggctgaagaggagggagtggctcggcctctatgttttaaaggatataatgagtccagggagccggtatttgagctcggtgacatcttggtcgaaggggaagactatgtcactcaagaatttatcgaggtatccccaagaggcaaggtgccttaggggctagatgggtgtatcctccgtccatcctaactgagggccacttaaaaaatttggagaaggctgggtatctgggcagacttgagtgcttcctcccttctccaaat

SEQ ID NO: 358527 - DNA, 766 bp, Cannabis indica
ctctttaatggtgtttttgaattatgagtttattacttgatgttgttgcatggattctattatatatgatgtaattaggtactctcgaagttattgtgaaatttgggtttgaattgaagtgtgtaggtggatttttgtgttttctgcactgaaccagaattccagtttagggggacctgtaggaaccaaaattctagttggtccccaagaaacccccacagaaccagaattggggaatcggtctaccggttggagcattttagggaaacctaatttttctcgtgtttgtaatatttagggtattgccatgttatccatcaatagggaaacttttagtttcaagtttaagtttctaagaagtgatttagcgtgtcactcatcagttttacgaataatgtgatttaggggcatgtaaatcgtcgagcagttgttccactcaagttagctagcacacctgaattcataaatgaggtaatattagtataatgatatgcatatgtgtttacatatttagagtacatgttagttaagcctgttagattacattataatattggtatcagtatatttagtattatattggatatcgataaatttattgttgtcttaagtactatttgacagtatcacatcagtatgactagagtatgactaacgtaccgagtataggctgatattatggtcgatagtattgtactacttggcagtatcacatcggtacgactagagtatgactagcgtaccgagcataggctgatattatggt

SEQ ID NO: 358528 - DNA, 723 bp, Cannabis indica
tattatgattagctaatttattatattttgctattttttttaatttttaaaaaagacatatttactaacttagttttcaaatttaaggtcattttgcgtctcaactctcttaaatagggcacatataagactcagattctagatcatttggtctagacagaaacatgtagtatcagttaattctaaaagttcttttaataaatttaaaacggattctatactgacgaaactggaagaaaattatagttttataaatattgggtactactacttatgctgctaaaaatattgggtttatgtcacttacaaatattaaactttgggtactgacgccgttatttaccttttctattatgatcatatgtgcaacaactgcaaatattaagtgaagttcttcgtaaatatccattaataaattgaaaaaaaaatattttatagttatcgaataaagataataaaaacaaagtcaaaagaaaaaaaaagttattcaaatataaaattaataaaagaactctaaaaaataaacctaattttattgaaagaaaaaaggtcaaaatatatgaattgagtaaaagaaaaaaagaaagatttgataaatgataatgagataatgaatgaattgttgattaacacattgaatagataaagtggacaactttttcattaaaaaaagtggttttttcatttttattttttaaaatagttatttagtttttttttttt

SEQ ID NO: 358529 - DNA, 764 bp, Cannabis indica
gagtgggatctgaaacgtatttcagtaacataaagacatgaaacacgttgtgaattgctaaaagtgctggaggcaaggctagacaatatgctaccagtcctgtaacgccctgaccctcagggacgctacgtgtgtgcttttacaaagttatttctcgtaatctattagtttagaaaaaaagtgtggtttaattaaaaacttttgattaagttaaaataaaactttcatactaaataccataatacggggatcccctgtttataaagttcttttatagtaggttacaaaattacatttacaaaaataaggttacatttccaaacagaaataggttgatcctgcttcctagaagccaagacaccacggctgatatgtacactactggaagacctcaagctcatggctgaacataatttttaacctttttacctgcaccatgaagcacgcgtgagtcacaatgactcagcaagaaagctatttagtcaaaagcaataaaaatgcaagtattcttatcataacataacatacatactcgtaattcattatctattcagtctgcatatatagtataacgtctatacgaaccgtatattacccaatataaaaatatcatagcatcttaccgtgaatagctttatcattacactaatcaaatattcattcaatacacaatcacatatttttagtgccttgtaaagcactctaattttacatccctataaacacgtattcttacatcccgtgagtcactgaggctctgcaag

SEQ ID NO: 358530 - DNA, 855 bp, Cannabis indica
ttttatgggaaaatattttttgaatatcttagaatatcggggttgaacgaaataacagaaccgcaccattttacctctaggggttatgagataactttgcggagaaataagggcgataggtggttgtggcttatccttttgaggatgaccagctgcttaggaaggaaacaaaaggaaagcaaataaaaggaccaaaagaaaagcaaagtcaaaagcaaaaagaaaagtcaaaaaacaccaaatcaccttctccttctccctatactttgtaacttctgaaccagggccaaaactcaatgttttccacaattttcaagcctcttcctagctagaattcatgaaggagttcaaccccctagcccctccaaacttctaaggtaaaacctaacgtgaaatttatttgtttctagggttttcgttagttttcagtggctgtttatagtagaacatgttgaataagtttaggaatggaatgattattaaggttattaaggactgtttagaagtggtttgaattgttttgggttgttgtagcaaaagttatgcaagtttgagtttaaagaactcaaacttaacttggttgtattgaccactgttgtaaggtccccgcttcaagcctccattaggcccttacacccacggaataatggctcttatacacgagtacgccaccttggctgcttcttggattgatgattgaccctacagaccaacacgagtgttttcagcatgctttgtcctcactcgcacgcttcctaagaaaacttcccaggaggtcacccagcgtgttttcagcgtgcttaactgtggagttcttttgtgatgggctaccaaaaaacaagatgcaccttgttg

SEQ ID NO: 358531 - DNA, 659 bp, Cannabis indica
atcaacgagtttattaaaaattgtaaataatacaaaagatgtcgcttagcgatcattcctgctgtctcaaagatcatacgctccaggtctaaccattcccacatgtacaatcttcattcgctcactgtcaaggctgctcaaccttagccttgcccttacctacacatacaaacaatatctgtgagtcgatagactcagtaagaaaatataatcataacaaatatgtaaacatgattaagattaggcactcatacccctaaccgtaacccctccccgctacctacacgatacttagtcaagaatgttcaaacgacagtactatggaccataatatcagcctatactcaatacgctagtcatactctagtcttatcgatgtgcaactgtcaagtagtatggtactatcagccacaatatcagcctatactcggtacgctagttgtactctagtagtatcgatgtgatactgtttagtagtacataagccaacatacatttatcgatatccaatataatactaaatatactgataccgctattataatgtaatctaacaagtgtaattaacatgtacgctaaacatgtaaacacatatgcatatcattatactaatcttacctcgtttttgaatttaggtgtgctagccaacctgagtggaa

SEQ ID NO: 358532 - DNA, 648 bp, Cannabis indica
ccattaaggacttacaaatcacccacttcgacaagtcttatagaagccgaaagcgttaggaagactcctcaaatgggccatggaattgagccagttccacatacactacgtaccacgcatttccataaaaggacaggccttagtagacttcataacggagtgtaatgaggcagaagctagttcaagcgtgccagtgcgcggaccctagcatggaaggtattcgtagatgaagcgtcaaacgaaaatggatccggtgctaggatagcaatgataatgacagatggacttcggcaccaggcagccctgcgttttacattcccagcttctaacaacgaagccgaatatgaagccctaattgcaggattgaaattggcaaaagtcgtaggggccgcaagagtagaagtctttagcaattcgcaactggtggtcaatcaagtctgttggatggactccatcatcagatacataacgaaaggtgagttgcctcaggaaagggccatatccaggaggctacagtatcaggcacatcggtatgtaatgatggataataatctctaccaaaaaggactcagcatgccatacttaaggtgtgtatcaaaccctgaagctagacaaatcatgctagaggtccatgaagggttctgtgga

SEQ ID NO: 358533 - DNA, 496 bp, Cannabis indica
attcttcccaatgattacagacctaatgatgtggaagatgtactccataaacctcaaaacatgtcgatcacgtccattagagatacccaagattcagaggtacaggttttagagaccgttccaacactggtggagaagataccgaagaaaaggccaaggtggtttgacgagtagaccgaaatgaagaagaagatgaaggcatcgatagccaatgtgaatgttgacccacttcggcccgttgatgagaagccactacatagttttcgaaattggttagtaagaaccatcggaaacaagtattcgagggacgtcttcaccggtgtatatggcgtggcctggttccagaagctacttacggacagagaatagctttctgatgatgtaagtttattatatgttgttatttactgctatttaccgttgttatttactgctatttaccgttgttatttgttttattttttttaatgttgtaatgtggttgtgctgacttatt

SEQ ID NO: 358534 - DNA, 704 bp, Cannabis indica
ttttatgaactcgtttctgtccccaagaagggggacaaacttaaggacggcttttatggcttccgggcccaccctttgaatgagggcccgatccccttcaaccagcaaaaacatgtcaaggagtatcgtcaccgcttcttcttctcctccgggttcctggctgtggaacacccagagcttctcacggagtgggttaggatccctccttatgagcggactgcgcctactcagctcttcctccaacgggccaagaccttcgccacatatgacaagaaggaccttgacgtcggggggttggtcacgacggagaattgccggaaggccaagctgatcctggggcatcagtcggtggaggactccaacctttccaaggttatctgcccgaacgtaagggttccggccgcggagaagacattctgggaggagatcattgccacagcggaagataagtaccgagagtacctcttccggaaggcccaggagaaggcttacactaaggcccaggcggctgctgggaggcccctttgtgttgggagcccggtcgaaaggaggacccaggcggctgccgggaggcccctccgtattggaagtccggtggagaggagggcccccagaacaaggcctactgtccaggtgccgaatacgggggctcccgatgccaacacttctggttctggtaagtcccctttaacaatacattatgt

SEQ ID NO: 358535 - DNA, 546 bp, Cannabis indica
  modified_base (543)..(543): a, c, t, g, unknown or other
ttttttttttatttttttacctaaacacgctcaattttttatttttttttaattctaaaagttaaaaaatagtccaaactggatttataaagttaaaatgttttaattaataaaaaaatacaaacaatatttaattgttgataaaaaaagtgaaaaaagatatttaatgtggattaaatttgaggaatgttatattttatactagttattctacaatttttaacatgtgtcatattgacagtaatcattttgcatcttattaaaaaaaatcttttactgtacaaatgctaaaatattgctctcaaaaataggaaaataaaaggttttgttgtttgtttttttgttttttttttctattaatagataatttaaaaattgaaaaggaaaactcatgaaaaggggaccacgcagtaataaatagtaacagtgatatattaatattgtttttcttttcttcattatgaaattgatgttataaaataattttatagaacaattcaataatatccagcattttttctttcaaaaaaaaaataataaaanaaa

SEQ ID NO: 358536 - DNA, 1171 bp, Cannabis indica
cttattcttcctttgctgagcttccttcaaggattctagaactccctagaaatccttaaatttcctatttaagatcttcacaactctaaaatactattcttgaactgaaatttccttagacacacacataatcaatcaatatatcactaacatgtttccatcatgcatttctaattataataagctactaaaacatgtaaagacttactgaaccgtgagtcgagcttatctctaatgatgattgtacatatcttgacggtgtagtagacaacctggcagctctaatactaaaattgtaacacgctactagtttaggcgctatagaacttttaataaaaactgtgcaaactttgctaatcaaaaagtttatcaaaagtgataaaattaatctttaataaataaacatatgctgtattacatttataaaatatgagatcccatatctatattttttttaactatagataatgaaaagatgtcgcacaacgactacaaaatcgtgagccttagttgtcacgaagatccaaaactctaggtcaatctatctcgatatgtacaatcttcatccagctcaaaactcactttcgttcaacaacaactttacctttacttgcacataacatagcatctttgagtcgaccgactcagtaagaaaagcataaaacataaatatataaccgacctacgactaagtgcccatacacctatcaaaaagtcataaaccatgcaaacatgtataattgagtctcgaacgttcttgaccataataccacatgcacttcgtactctagtcgtactagtgttggtagcatcaatccatactataagtacaactagccataataccacatgcactcagtaatttagcttactagtgttggtagcgttggttcatactaaattgcaaaacacatacattcacgatataaagatataatcatatatatacaccaatcatcgttctaacggacatgtcatacatctggaaaacataaatataaacatgtacatatgtatgtgtgttatactagtcttaccttaatttttatttcaggtgtgctggtcaaccttagcagaaatagctgctggtaatcaaaggccgtaagtcacatttctagaaaaaccataagtgttgccctaatacttttgggacttaaattgacaactaaaa

SEQ ID NO: 358537 - DNA, 554 bp, Cannabis indica
ttgggtaccagtacgggattagctacccaggccgagtagaaagcctcaatgatgaacttgttattacgtagattttatacctattcttttaatgcttgtgcccgttccttgtccaatagtcttcgtttttgttgaacggggcagatatttgggtcgatgtttagggcgtgagatattacaaaagggtcaataccaaccatttgttgggaacttgacgcacaaatgaaaaactgatgtgatagctttcgagtcatattagggccgatcggcctaacatgacgttgaaggttgatggaacattaattatcaggaattgtcccatcacagttatgctcctcgaagcttgtccaacagtgaggggtagaaggattcgccctaaaggtgcaacactttggccagagaaaccatatacgagttgggtacaaaggattaaatctttaagttggagctgttgggttttgtgccttaaataaaactcatttcaatataatcagatttactaattaataaagatcagaaatcgttttatgttgcatggttcacatgatttagtt

SEQ ID NO: 358538 - DNA, 1272 bp, Cannabis indica
caccacgtaaaaatgtggttattatttgaaaatcatacagtggtgatttatccagttttgtttggtcaatgctgacattgatttagatacgctgctaagtgtatttcgcgggggcatctcgctaggaacttgaatagcaacaataatcctggcagcgagttggagcttttcccatgtcttttggaggttgataatgtaaatcccatcgtttctgcgtgtgaacggttaaggctccatctgacaatcacagttcttagtgacaaggtgaacttcaagagccaaaatcatttgaatgtcaacttctttctgagagagttgacttgacggggcagtgaatctcattgaaagatgtctggagctgattagtgaaggtaccaggaatatgccttcctatagcgagatggatgcctcgctatccatttttcagattcttccagctattatacttagttggtatgacgtatttattccatgtctttaattttggccttgctgactttaaatttgcttttgtttttgatagctgtctcgaaaagaccaactcgtactcccgagatgactgagcgatgcaggctcctgcggggtcttcaattcggtcatctgagttccttcttaacgaggttaacctgagatctatggatctcctcactgagaaggagtttatttgtgattataaatgcaccaattactcctcttggcaccaggttcctttcccagccgatgaggaaactcatgatcgtgtggctcgggtgcattatcttcggaacaccgttcctcgggaattcgaaggagtttcccaaggtaatcaatttggttggtcatgttggaaatattttaccaggatctagatttactaccatgtatgtttcattaacatcctaatatgaattctaaaacaataaaaataaacacatacaaagtttagaaaaccttacattgggtgcaacagaatataatgactccttccgttcggatctctagcctttgattcctttctgtagcagaacataatcaagatctgaacctggatctttttctctccttccttttatgctgattctccttcttgttgtttggaatttcctacagtcttacatactatgattagatacccacttgatgtgtatgggcactcactcattcactaatggctgaaaaaaatttagtgtgaagatagacttagtatttcgaattgaagaacaaacaagaaggaagaggtctcatctaggtttttagctttggaggcattagttggataatgagaccataacc

SEQ ID NO: 358539 - DNA, 555 bp, Cannabis indica
tggcaccacgcaaaaacatccgttgctgtccttaattctttaataattttgtctttctcctccggttctaggctctttcccagtcggaggatcttgatagggtcgaggtcgcatacttgcacttcctcgacgtctttaatgggttctacaatctttttggattccacacggggatccaactcatcttcttttgccaaccttggctcaatattctcacggaccattaacacgggtaaatgggttgcgacataataacactgcctggcctctccctgattaccccttacggtccccaccccagcttcctgggtagggaatttcagacacaagtgccggatggatgtaattgcgccaaaattaaccaaggccggtcggccaaggattgcattgtatgcagttgggaagtctaccaccacaaaggtacagtacttgaaagtactctagggtgtatcctggcacaaggtgactggcaacctcacttttcccattgggataagcgtggttccattgaatcctgtgagttgggaaccgcttggtgataaatcccagtccgtg

SEQ ID NO: 358540 - DNA, 678 bp, Cannabis indica
aaacatatactcaatttgatcttcgttgaataactaaatctccatgtacaaataatgaataataacctgaatttaatatggaatttaaataattaagcatcaacacattgagtcaactcaaaaaaaaaaaaattaaaacaacacacaaataatctagaaaaaaaaaaacacttaaaaacaactataatggagattttttatatcttaaattaagtgacaagtgtatttttttttcaagtgggggtgggagctgaaaggtgagtactattgaattagcttagcaaattttttaatgcgtgtggatgcaaataaatttaatgtgatatttcaaatacaatcagttggacccaaactattttttagcatataaatttattttattaaaactataaataaaaataataatataaaaaaaatcagctatagagaatactaaaataggatagggcctcaatttttatatgctttttacggtgcttagccatttgagattcaatcttctcacgaaaaaaatattttcagaaataagaaggcttccttcctcaattacagttagctacgaaggttaaaagagattttttacccataacaagaacaattttggagttttttcttagccttttttgagaaaaaaaaataaaaaaaggggaagatgaactagaactagttacaactata

SEQ ID NO: 358541 - DNA, 622 bp, Cannabis indica
tggcagataatcttagggtcgattcgtaccatatccccgtgactccaggcgaattgatcctggttcactttcaaaaagcttattaattactatttgagctgctcgtccaggtttttcccaatgtacacacatttggtgggatttcctgggtcgagaataacctcctcaattcttcaattggttttagcaggtttctttcatcttgaactcgacgatcaagatcttcatttttcttatcgtgttctcctgccaatatcatcatccattgatgaccggcttttaatgctacatctctatgcaataataatcacgagccaggatctggtcaccaagcaccacttccacgccatctgttgtttggaatttcaagaataggtgcttgatcgaactgactggccctagtccgatcagtgttgttcaacccaacaatatattttaagccaagggcaagtcaacgactaagaaatcttgcataacagtagcagataaaggtgcctcgcctaaagttaatgcgagcttgattatgccaaggctagcaatgctatctctagtgaatccgcaaagattcaccatacaaggtcttaacttggcctttttgaccccattttctttagagtctcgt

SEQ ID NO: 358542 - DNA, 979 bp, Cannabis indica
aatcatatgtgacttaatgctcttactaggagacattttcacatgatatatttcatttgcaaaggcatgtagaaggtgaggttcggggtgtgggttatccattttgacactacaaatataaataaatagaaataaatcatttggttcacttaaattcatacataagttaagaaaataacaagttagtaaacatgtttgtaaaaatactaaaataaaatatattcaattattttctaaggttttcaacaaactgatacaatgctttgttttagtcgatagtaaaaaatatcatccattgaatagagttgtcaactcatctaaaatggaagttcattcttattttatgagcttctaccgttgtttcataccttgtaagtcctattcttaacagccactattcgaatggtcgttactaagaataaaactcttacaaaaatacttatctttcgagattctacggcgttaaattgttaatgaacgtccatctattatggatgaatctcactaaaactagaactttgtagaaccaacaatggagatcgaatatctttatgattaaagctcattatgtaaaatgtatttttatctaatcacttattttaatctgtatattttaataatgaaaattacttaatttaagttgatccaaaattaattaaaattacttttcatgtaacttaattttcaaaaatacattatgaataattataaaatttcaaaaatttattaaaatataataaaataaatacttgaaaatatcttatttaagttgttctaaaataactaaatttttaacttaaataattttccaaaatttaattaaataacaaattaagtatcttgaactaataaccttaatttgaaaaatatccctatttaagttgatccaaaattaacaaattcttaactcaaaaatatttttaaaagaatatctgtataactaatttcttagaaaattctacttaattattaatttcaa

SEQ ID NO: 358543 - DNA, 741 bp, Cannabis indica
gaacatcttgaatcggccaattccgggtaatatcgcgagagttatgactaaaatactatcagttgtcacagcaggaaatttctgaaaaaaaaaataagcgaatatatagcttttaaagtaaaattgcgatttatttctttatttaaaaaaatatgaattatcttttctttttagtgagatatttctatgagtttctctctctaatttttccttttagaattattcaatttgtggcctaagaggtcctatttatagtgcttgaatatagatcaatcctcttggaattaagattctatttatagtgcttgaaaagataaatgaatcctcttagaattgagattctatttatagtattaacaaatatctcactaaaagaagataaaaaaatcacaactctacttgaaaagctatctttattttcacttattttttttttttgtaaattcttgcgatgactgatagtattttagctataactctctcaatattaccggaattgaacgattcaagatattctaaaaaagctaaagaatgagatccaaaaccttcatgttgagctccaagtccaattctgcttctaaggtcgtccaaatttgcaattaagttccgccttgtaaaattgagcttctcggcttccactattttccaccaaatatgctaaaaagcccccccaaaagacctctaaaatgcatgaatagtctttaaattagactaacaaattaaaaatcaacactaatcaat

SEQ ID NO: 358544 - DNA, 587 bp, Cannabis indica
actcatcaccctcttcttcttcgaacttcttctcttttacattagggcaaaactcttcattttccattttcgtttctgattaggcaaaactcccatttttaattttttttcacttcgtttcgtgtacatactcttagggagcaagtgtggtgtacattattcgtgttctgccattgttatggttgttacagttgtgggtctcgatggttggttctacaagtaagttttccggttctacttttcatgcttttcgttcttcattgtgggtaatcaaatgatactagtgatgcaattttaatagtcttattttctcttaggtatcgacgactttatcttcaagtgagttgccgtttcttgtagggctgtacataaatttttgtaaaccgcccaacccgaacaactcacccaaaccaaatccagataacctgacgaaaaatgcaaaccgaaaaatatgacgaaaatataaccagtccaatctttatattaggcgggttgaaaataatatcaatctgcccaatcaacctaaactaacccgaccaacttgattaagaaagtttttttttggtatatatatttttattatatat

SEQ ID NO: 358545 - DNA, 950 bp, Cannabis indica
ttgagtacttcaataaatctacacacaatgtgagagagtgagactactacatcacttgtaacgccgtaatctataaagacgctacgtgcgtgattttataaattaatttaatactaatagaataattaattgttaagaatcgtgataatactaaaaacttgactaaaatgaaacattaaaaattgacatcataatggcagtaaaaaagtttttctgagaatcactgttataaaaagttttacaaaagaactatatataatgacacctcaaaaacataaaaccaaaacacatgatagatacagccctaaacaactctttgcaacccggcacgcacgctggtgagatcaatatgtacattgctgaatgagaccgtcttctcatggatactctaactttcccttgcccttacctgcaccatagagtactcgtgagtcacatagactcagcaagaaaagtaataaagaagggtacattaaataacttattatacattttattatcataaaatgattataccataatattcaacaataagtaatatagccagccatatgcataaaaacagatttgctcatatatttgcattgcctaattcatattgcaatatcatatataataccattgtatcacctaatcagatgagcccgtgtcacaacttggcaccaatatattgtatccctaatcagacgagctcgtaccaaagcttggtactcacatgtcactgtcgctcgtacctaattaggtacgctgccaggaggaaacccaacaacagttttgatctatgccataacccgacattcatatatcattgccgcatgtacctaataaggtacgctgtaaggaatatcgcatcacctatttaggtgagctcgtacatatgctcgatactcatcatatgtcactgacgttcgtacctacgcccggtacaaattggaccctctgttttgtta

SEQ ID NO: 358546 - DNA, 763 bp, Cannabis indica
ttattttaattctaattaaatctaaactaaccctaagttgtttcctataaataggtagtgatggctaaaggaaaaagatgatgcatcgattccttcagtaaaattttgagcctcctttcctatttgcttttgccaccttggaaaataacacatatatttagtttttggtatttttgtaaacatatttgctgtacttgttattttctgaacttgtgtatgaatttattgaaccaataatttatttctgtttattgatttttgtagtgtcaaaatgtacaacccacaccccaattctcatctagaatatgcctctaggaatgaacttcaaagtgtgaagatgactcctggtcaaagtaacacttcacacttgctcatgatgaacatgaaattctagaaagaaaataagttgggaattgttttatctgaagagcagagagttcattgctccgacaatcctactacttcaagctcagttgagaagaatagagaaagtgattccacttcctcaaattatccttcacaacagattgaaccagcaataagaacaatccaaaaacggttaagcaatgatgctttagtttttgaatcatgtgttttagagaatgataaatccatctggattcttgattctggatctacaaaccatgtcagttgttcattgcaattgcttgaaaactggaattatttgaaatccggagagttgaaacttaaagttggtaatggcgaaatggtatcggttagagctagaggaaaagccaaactc

SEQ ID NO: 358547 - DNA, 513 bp, Cannabis indica
agtgtagtagtagtaaactcctcgtaataggatctgaaaggttgatttaaacacaaccttttctccaccattgctcttccttaatcaaaatatcattgataatgtgaaatatctctctatgtgtctactcttttaggataatggattctatacctttggcaactacttttggttaataaggaaattaacactagtagttaaggctggtttgaactgtgccacagttgtatagaactttccttagactgaataagtacctttcttgcaactttaacattcagtccctttctggtagacctagatacttcagataggtttttatacttttccaaaattactattcaacccccagagtaatcaccatcttatcagaaagattttctagcacaaaggcaaatatcgaaatctgatgtggtgtagtctaagagttttaaatacacccttattgactaacataaattctttcatggctttatcttttctggtaatagttgagtacctttacttagataa

SEQ ID NO: 358548 - DNA, 750 bp, Cannabis indica
acttaagaataaggaagaagattccttttcttatacctcttacaataatatctctgaatatataattcttagatagccttagcttatagcgtttcggcgtatgatctctattttacagttttcgatcgatctctcttgtctcttttttcatctcctttgcccagtgaatattcctcactatttatagggcaagaaacttgaggaggaagagtttcctctctcgttacaaagcgcataaacacaaagatcgtgtgatcattgctgaatgctaggatcgtgggattgaggctgtatacaccgatagtggaatcgtgtgtatgccacatccacgcaagttgatccctgagttatagggattgagctggtgactcacgaagtgcttggttgaattcgctaagtgttgctcattctgcacggctcgttgagtattccatcatggacatgccagcgaggcatcctgctcggcatgttgatccgaccaggtgctctaagtagatgccacgtgtcaccattcttgtgatgccacgtcagagtgccaattttgggataacatttgccccccaagtctgtgcgggacctccgaggttgcgtatagacttattccgagctggctctgcctttgaaaggggacacgtgtcgagcatgaccgttcgagactcgatgtgaagctgactgggcgtcccttcggttttcggctaattaatgctctgacaattaatattttaaaaatccaaatttctctctccacgg

SEQ ID NO: 358549 - DNA, 500 bp, Cannabis indica
agtctttcgactcacagttctgctgtaggtaaaggaaaggcaaaaactaaacaagagtgagcctgagctaggatgaagttgtacatgtcgtggtggcgcgacctggagcgttctgtctcgggacatatggggtttttattttgtagtcgctttgcgacctgaatagttattttgtatatttggcaaaaagtttagaaacgggatcccggtacttgtaaacgattatgtaaagtttaaagtttaatatttaatataaaagttctaatttgacacgattttaagaaaatactttggttagcaaagtcagtactgtaattgaaaaatcactttagcgtgccttagcattagggcgttacactgaacctaaccatatcaagattaagatccatagacctaagatcaatcattgatattgacttaaaaagatataacggtaaatttatgatatattgtctaagttcaatattagtcccttctaatgtatactccacacatctgat

SEQ ID NO: 358550 - DNA, 532 bp, Cannabis indica
tatttttataaaaattaaccaaaatttcagtatttttgtaagttttcctatatttataccctcccaaatatgcatatgtgaatatcatactctttttgcaaaaatgacattttttatgtagtattttcaaaattgtcaacaaagaaaaattcattttttttttcatcaatttacacttggattctcaatttgtgcaggcaatattaactctttggatgttgtcaattattgggaattatgtggacactttgaatcttttctacattggtaagaataacaaaatattgctattagaattacatatttataccttccacaatcaataattacaattatttcagctatatattatggtaaatattattatagattctatatttttatattttacaaaatcatttgttttattaaatgacaattagactacgtattttctaaaatgatacaaaatagtacactggattttatatttttttttgtctaaaataaaaattaaataataacttgaatctagagttattatgacaaaact

SEQ ID NO: 358551 - DNA, 528 bp, Cannabis indica
aaagcataaaaataactctataccatagagttatcaaaagcccatacttcttcaataggcacttcactgagacagtggaggcattagatgtggccacctcctcgtcattcctaaaatttgggctagagtaattggaactttaacacattaagaatttcatcaatgttacttgtgatatccatagaataattctcttgaattttcttgcctcaacaagtttacactttagactttcatctactctttaatccactattaaccacctcactgttcttcaattttttcctccctcttttcttagaacagtcaccttccaccaccactacaggattaaaagtgttgactcagaaatctgaatagagattcttaagccacacctgctcgctagcttggcgagaatgaaatatgtgttaagtataaatagagagatacaataatttatagtagttcatttcctgtatcgtgaaagtaattaagctacgtctacttagagtttttttcctcatgagatggattatagaaaaatgg

SEQ ID NO: 358552 - DNA, 421 bp, Cannabis indica
aaaatctagcataaaatttagtatacgtgcctcgcacgtagttttttgctagtatatatatatgcataaattttataatgataagtttttatttatggacaagaagatttttgacgttttaatataaataaactaatttatttatttgctattttataggaattttttttttaaatagctattaactaatttatacagacgggattaatgaaaagtactatcaagtgattcttcaaacaaaatggtacgtgtcatttgctcattaaagagatagaggagagataggaaattttgagagacgatttttattcctaaattgctggcaagttagtttccattccaatttttttgttttgcaaattcgtcctcaaaatatataattttttccgaattggtctctaaattttattttttggcaaat

SEQ ID NO: 358553 - DNA, 758 bp, Cannabis indica
ttttgaacttttttacaaaatcccatatttcatgtaattttcactgaaaatataatcttttgggccgtgtcttcttgggccttaatcctaaccccgttgcccaaattttgttggaccaagtgagagtccaaagtaatgatgtgggccctaccaatatagtcaaaatttacaaaaaatatgacagatctttagaatttttaacattttttttacgattattattattattattaatgttttcttttaaaaaaaaaatacaaacacttgttttactattgttctcaaaacaatgttgttttcacactattgttacattatactaaatttttgaaaggtgaaaacaatgttatttttaaaaagatattaattaaaaaaattgaaaaataatatctataaaaatgtaagaaaaaataaaacgtgtgccattttatgacctttttgtgaaatcctgatatttttttgggccaagatgcaaaatggccttaaatctaacaattaagttaataaatgtccattttttaaaaaaattaacaaaatgtccttttagttaaaaatttgatgataaaattacaattataaccttgaataattaagtatgtggtatagttattttgcacaatagtatatcgtttttatgtgcaataatatattaaaaaaaaatgaaaggtagtatatatatatattttgaaataactgaaaggtaatatattagtttaagattgtagtatattagtttaatgtgctatggtatataatga

SEQ ID NO: 358554 - DNA, 972 bp, Cannabis indica
aaaaaaaaaaaattgaaacaaaacaagagaaaagtaatgatagctacaattagtttcacttagtcaaaggctatgcaaattatttactgactaaatgggacccgcaaactaatttatgtgatcggaaggcctacctcgattcctattgttttcagccattgccacgtgttttcagcatctaacaccgtcggcatgacgcgcggctcctttcgtggcagtcaagctcgaggaggatatttcaaagtcagcgtcttgtcgttggagcgtgtactcaacgcgctaacattacactgtgaagaactgattaatatatagttaaataacgttaggcaacctacgcaagtaagtaggcgattttttacggtttagaaatttcttaagaataaataattaagtgaagtaaagtcaactttgcatgtgcggtgatattagggcatttaatttgcaaatataattaaaatgaattaactaatcagagcagaaataaacataatattttttttgataatgattgttcagctacaattttgcatatggctttttcagccatttatgtgtgtgccaattttgtttaatgatatatataataaattttagttgatattccatttttctcaaaaatttgagtccaataattaagaatatgttccaatttatttgctggtttaatcattatttcagcctactaaaaaatttagtaatacatttgatctatatatatgtaaattattttgtctaaataatgtaaatatattgttttggttagaccattaatgagaatttctatcctatcttatttattctaaataaaattaaataaaatatttcttgacaaaaaataataattacataactgttataaatattaataattatgtggatgtccaaatcttttatttattaccattaattgtaatcaatattcctctttttcttagtttcttaatatctcactcttgtatttgtataaat

SEQ ID NO: 358555 - DNA, 889 bp, Cannabis indica
tagttggtgatggctccacaactagtgtgctcttagatccttggttaattgacgatatgaatccctttgtggagtctagacatcccgcacttgctggtgcttttgtgaagtccctcatgaagattgatgagaacgaatgggatgaagaggtaatcatggatgttttgaccgagagagaccaagaattaatttggaaaattcctccctctaatggtaacagcagcgatacatggtattggacgaaagaagataatggtctattcaccgtcaagagcgcctataagcttcagcaagaaattaaaggcgttaacgaaatggcggcaaattctggtttttggaaacaactttggcaattgaaattgcctccgaaagttcttaatttcttatggcgagtctcaaccaattgccttcccactcgttttcagcttagagttcgacatgtacctatcaacaccagctgccccttttgtaatgctgcaccagaaacatctttacatgttctggtgcgctgtcggtttgctcaggactgctgggccgtgtctcgggtgcctgctgttgctggggcagctatgaccttcacgatgtggttcgaagagggcttggacaaatggacgatggctgagagacttgaagcttcgatggtatgctggtccgtttggaagcacagaaacgagctggtttggaattccacaatgccgactgttagtgatgttgtcacattagctaaactcaactttattgaatggtataatgcccaaaaaaataaccaacctactcctgaagataatggttcggttgatggtaacttggagcattggacccctcccaactttcccacaataaaagttaatgttgatggtgcaattttcaccaatgaaaggcgctttgg

SEQ ID NO: 358556 - DNA, 567 bp, Cannabis indica
gtatcaacatgtctgaccgaccaagaggagtttataagacggccaggatgagcttgtatgaccgatcagggtttgagcacaagctggcctgccaaaaggtgactttcagaccaagggaaggtccgttcgaccaaggaagcttgacctctgcaagaaaaaggtgtacaaaggctgacctccacctccaaaagatggcctccacttgccaaaactagcaggagcatgacctaaaagatcctagcacgcacatggcagaccagaccctgacaggagcatggctgaccaaacctcaacctgcagaccttgtatggccggccagcctgcatcctgcaggtgcatggccgaccaaattttcccttgcaggacattcatgcacaaccttcatctgtggacagcaagtcaagctgcgagttgggccttgacagtccactaagatgctacaaaaatatcagcaactttcctattttcaaagggtagccatttatatttattaattaaatatataaataatagctttatttgatctattcctaaagaaattacacatataagctctactatataaag

SEQ ID NO: 358557 - DNA, 907 bp, Cannabis indica
attctcactgaactcagcatctctctgcctcagtgtccaaacttatggtgtgacaacatgggcactggttctcttgcatcaaatcctattttccacgcacacaccaaacatatcgaagtggatttgcattttgttcgggatagagtcttatcacacaaaccggatgtgagatatgttgaatctgagcaccaaattatagacctattcaataaacctctacctacttcaacgttccattattttcttgacaagttaactcatggcttaccccaagcgttaacttgaggggggatgttagaatgtaaaaatcagttaaattctgttattatttttgtaaagacaccttagtttaatttggaaattagcagttaattatgtttaattatgaaaattatttatagatatgtaaataattatttatgctgttagtattgaattctgaagtgcattttatgtcatatagtgaatttcataattttgcatttccgctgcccggtaatatggaactcggtgtttggctcagtaaaatcacaacttagtatgttagtattgtgggacggttatttagacattgggaatgtcgggagtggtcgggaatttagaatttcccaaaataccctttagtgccctttatgtttatttagtgtggaggggcaaaatggtcattttgccccattattgttttgtcctttagtggacttagtaattggaaaaatatgtgattatgtgggtttatgttggctgaaataaaaggttaaaaattatattttcttttatcatttcattcaaaatttaaaaattagaaaaaagtaatagtttttcctctcaaagctctctctctcttttcggccctccttgagcagcaaggaagtggatttttccttgtgattcaagtgatttccatcaa

SEQ ID NO: 358558 - DNA, 784 bp, Cannabis indica
tgcttttaatacaataggtgttaggtgctaacatcatcagtatattataattttagtggctttaatttatttattttttatttttaagtagggattgtagaatatagtcttacttgagataattctttcttattgattttttaaaaaatattttgccacacggtaagtcttttgggctaaagagtattatcatcacaacctacattttatggtgatcattttaatatgtaggaaatatatattttatcgccgtcataataatttaaataaactatatggttgcttatagtgctaattattaaatgctcattgattacctttttacaaaagaaaactttattttatttaattgactcgagtttatgtttaaaagtagaaaataaattattttaattaagtgactcaagtttatttttataattggttgattagtttaggttatatgtgagacataaatttgtaattctttttcaatttataggtggaatttaaattaatgagtcctaaaaatgtacattattttccattttgtttgttgttttacttgttcgttaatcagaatacatttatatataattcacgttttatgatcataagtgactaaaatatgtattatatattttttataaaaaatattactacgcaatatattacatagaatcatttactaattatgcaagtttcatagactaataaattaattggcgtatatcattatgtttgattatagtttactctattaaaaaatataaaatgttgttccaacaaacagaaactagtaggt

SEQ ID NO: 358559 - DNA, 492 bp, Cannabis indica
aagtaaagaaaaaaaaaaggattcgtcgatacaatcaaaaaataatcaaaataaaaagatttggtaattttatttcagcgtgatttaaagaaagtttcatttttgaatgaagttctaaaacaactattttaacttttttctaattattttaaatttatttcgaaatggatagatgtcacaaatgatgaattgatttcttacctatgttactctatttttgttaggaccgacttctacaattataataattgatgaattaaaaactttcaattggtattttttttaattcatcgtatcttttataaatggaaatttatggaagtgctttagaaacatatgcataaaaagaacatattttatttattctttttatgcctactataactagttatttcgattttctactagcagctttgactataaccttagctctatttatcggtctgaacaagataggacttatttgaaattaattgaacgaacaattcataa

SEQ ID NO: 358560 - DNA, 671 bp, Cannabis indica
ggtttcttaagtcaccatgcttctcgttaattttttgtcttagatcagtcgggggatacccccaaattttcctccccctttccccatgttcttggtgcacgaatacgctctttctgtcctctcgatcttgagggccaagactcgctcgagggagcgtgcccctctacggacctttcccatttgggaaatcagagcagaccttccgcggatcttgtaccttcctgtttctcccagggatcgaagtacaatttttcctagggttttcctcgaaaggataccgtatagggcttggctccctagttttaggcctctgagtgctcggcaggtcccttgtgtttcctctagtcccgcaggcatggctttgggttgcacatgtattccagccgtttccatagcgttttgcatggcaaccattatctcttgcatcctcttattctattctttttgggcggccagttcggactcatgatcagctgctttttgctttaggaccagtaactcagtgtagctaccttcatcgtaagcatcgtacccttcaaagttttcttcatattccttgtcgttcgtctcatctcgttcctcagagcccacgtttacccgcaccttctgggttctgatgatcttgggggggacaaggttggcgtgtgctgtttcgagtttccaccattgta

SEQ ID NO: 358561 - DNA, 1354 bp, Cannabis indica
tttactcggtaaattctagttcgtcttattggaagcttagttgtataggcccatggtccccatactcagtggcgaacctagaatataattttagggtgggctaactaaaatttatattgaaaattgaaaataataatttttaaaaacaatatatattatattattttacttaaatctcagataaaattattatatagattggaacaaatttcagcatttaaataataatatgacatttgataattcttgtgttttggtttttatgtgggaattggtattaattaattatagattaaatataatttattaaaataataagtttttttccaaaaaaagatatttgtagttcaaatactctatgtttagcgtcgaccttgagtaataatgggctttaaaaaaatttaagtttgtgttttatctaaagtaaaatgtaaatattattgggcctctattacaaaaattttcaaaaaggctatttttttcaatataaaaaaatatgttatataaaaattgtgggtattaggttaaagtgggccataagcacgggcctagtccgccttagcctcggatcgggcctgctaatgttaatactttgtagatttttttttttcaaaagagtagatttatatatacaaataaaaaagaagatagagctaagtggaaaatcatattcaaaattaggtctaccaagtaacgaacaaacacctacacaaattatgttgtctaacaattatgtattgtctctatctctaattttatataatctgttttgaaatttgagggtgggcttaagccctccctggactctatgtaggtacgcctatgcccatactagttgagaccatactgcttgtaagacccagataattgatttcaattaatcaattatggttctaaaattagactatgtctagtttatgaattttcactaagcaagggctaaattttgaagaaaagagattctaggttttatttataaattgaaagactttattatgtctaattaataaatatattaaatgacaatattatttgataattaatgttaggtattaaataattagttttgacatttaattgattagaattggaaaagtggcatttttgagaaaataaaggaaaattgacaaaattggaaaaatacccaagtggggcccattaacctatggccggccacttatatggattttccacttaatattttcattattttaatgcctaataattcataacctaaacctagtggttacctacaaatagatagtgatggctcacacttaaagcagatgaaatttcttgtcttcagaaaaattgagcctcctattctatagctatagccgaacctatacccctc

SEQ ID NO: 358562 - DNA, 979 bp, Cannabis indica
atcttcctccatatcaagaattaggaaatcagcagggaagataaacttaccaaccttcaccagtacatcttcaattatcccacgaggttgagtcaaagaatgacccgtcagttgtaaagtcactgttatgggctttgcttttcccaatcctagccttttgaagacagacaagggcatcagattaatgcttgctcccagatcacatagagctttagtttccaccgaaccccctatagagcatggaatattgaaactacccggatctttaagcttgggcggtagtttcttctgcactgcactcctcagtgagtgccactgtctcgaattcttccaacttccttttcttagctaaaatttctttcatgaacttcaggtaagttggcatttgctccaaggcctccgcaaatggaatgttaatgtgcagtttcctaaatatttcaagaaattttgaaaactgcttgtcgaggttgttcttgcggagtctttgagggtaaggaattttaatatggtgatctatgctgatcggaggcgaagcttctttcggtgcaagaccctcagtagtgttcttttcctttggtgcctgtgtctgtgcctgttgatcctgaaccccatcttcaactggttgcttgccactaggtcccttataactctttccactcctcaaggaaattgctttacattgctcttttccttttgcctcactagtgctaggtgaatttccttgagcttgttttgccacttgagtagccaattgttccatctgagtttctagagttttaatagaggctttagtctccatcatgaattggagcaataagtcagcttggatatttaagcctccactaggactttgttgttgcagttgttgttggttttgttggggctgatttctctgctggtagaacccttgttggttgtgcccacaattattgttttgagggatattggcggctaaaccacctgaactttacggtttgta

SEQ ID NO: 358563 - DNA, 642 bp, Cannabis indica
acccgtgtccttatattccattttacctcctcaaccatttggttggtgtctatttttgcaccctgccatataacagaattcctcattttccaggcactataaaccatggcagcagtcgcaacacagtacacaactttcttaaattttgaaagttttgctcttcctatccatttgacaagttgttgtacattagaggctagagcttttcatcccagccaagcctttatctccttcaaacagtaaccagtttccctacaggaaaagaaaaggtgctgaatgttctcagcttgttcttcacataggctacacttctcctgcaccatgatacccattttgatcaatcgatccttagtcttcagcttgttcttcacataggatcctatattattgatttagttacacacacttcagctagtcttcaattaatttgagacaatcactacaacattgaacactaatagcggcggacctctccgccgctattagtgtcatttctggccgctaaaggtcaatagcggcggacctcggccgctattggcccgccgctattgcttggccgctattaatagtattagcggccaaaaaaggggtccgccgctaatactattaatagcggcgcagcaatagcggcgggaccccgcc

SEQ ID NO: 358564 - DNA, 468 bp, Cannabis indica
attgaatgcttcgtacttttatatttgaacttaatatatatttgtttgcttgcattttcattcacaattcaaacaattaaattttgatcaaatgcaaaatacattaggaattcccattgcttattttcctttgatattatttaagtagttagtcatctactatgtgcgcgagcagttaatatctgctatgcttttggtttgcgagcagttatcgattctgcttcgcacaaacagttatagtctgttttaagcaaacttgaatatacttttaatgattcttcactttgtatatttttaattgcttatatgaacagttgggccttctattcatatgttaggtttaagtattttttcaagatatcttggtgtcttgtttaatactttcatatacaatgcgagccattagtattcagctttgcctgtagcttatgcgttatatctcatttacaacttttaattttcctttct

SEQ ID NO: 358565 - DNA, 193 bp, Cannabis indica
atggatttaaaacgataaatattgtttattgggttgatttggatgtgttcatgttggtttatatgctatttgatgaatgtatgtgatttataaaatttttccatgaaaataatttatttggatttcttgtgaaaaattaagcaattttagttttaacggagctcgattccgataaaaaataagaaagttatga

SEQ ID NO: 358566 - DNA, 702 bp, Cannabis indica
aaaaaatttaaaaacatgtcgacataatgtcgacataccgtcgacattatgtcgatatttttttaaatgcaaacacaattcaattatttcgacataatgtcgacataccgtcgatattatctaaagcagacacaatattattatgtcgacaaaatatcgacatcgtgtcgacattcagtcgacactacaaacctaaattcaacatgttaataccatcaacaacatattgacaacctgtcgatatgttgtcaacaaattcaatcggaccaccatttcacaacaagtcgacaacatatcgacatactgtcgatatacagtcgacaatacaacctaacaatcaacaagttaatttaatcgacaaaccatcgacatactgtcgacgacttgtcgacaatataggcagaaaatagacttaaaccacctatcgacatcctatcgatatacaaacgatatcctatcgacatacaaataacagctaaattcaaacagacacccaatctatcgacatcctatcgatatcctatcgatatgtcatcgacaaccctgtaataaacacagacaccattgaaacactaacatctacaacctaaagatcacaaaagctacaaaaaatccactaatctcaacaacattatatgattggcatcaaaatctatgaaaaatatattttttcaaaaaaaaatcttacctttgactgaattt

SEQ ID NO: 358567 - DNA, 526 bp, Cannabis indica
gagatgtgttctcagtgcagatgaagcttgtaaatctttgtgtgatttactgctttattatcgattcaagtctaaaattcatatcttgaaatcaatcaacctaaagataatcaacttggtaatttggatcattaaaatcaacaaggtgtactttcaagcccaaaatgtctttagcctaaatgataatagctttcttaacccatttgtgtgctaggcccaaatcaatagtaaagcttagggtacttgatatgtcgtcttcaaccttgcagcctgtaaagaccgcttagcttaaatttagaaattagccgataattagggtttaattatggaaattatttattaatattaaaataattatttatgatgatttattggaattcagaatgcattttatatgtcatatatagaaatttcatatttttgcatgttcagtgcccggcaacattggaacgcggtgtatggctcagtagaatcacatcttagtatttttgtttagtggggcagttttgttagacattgggaatgt

SEQ ID NO: 358568 - DNA, 604 bp, Cannabis indica
gaatagaattacatttgttttcttaaattttaaattttgatacttgaaatgtataaattggtcaaatttcgaaaaacagtgatctataaagtagataaaattttgcaagaaaataaagctgaaacttcaagcttaaattcaactatgtcctaatcagatttggaaaaggccaaaacataaaaattttagatatctttttcaattttctaacacatcttgaatcagctcatttgaagttcttatgtgaaagttatgcatattttactgagagaggtcgaagcaggaacattttggtcgcgactaatattcgtggtcgcgacgagcacgactgatagccgctatgagggactacaaaaacctcgttttttcacttttctacaggcgtcgcagtgaggctattggctgttggggcgctgacgttgtacgggtcaaggagaacttcgtcttttctcattttttggctaaaaaacaatatttaatgaaagggggccgtgaattacagagagatggacaaaatggaaccctaggaacacaagaagaaggctcttggagcgagcatgggtgactcatgacaatcctccatctagttgttgggttttatgcc

SEQ ID NO: 358569 - DNA, 701 bp, Cannabis indica
acgtaagtaaagtattttataattttactttactttacaactaatgttcaattaatatattttattatctaactgatttttctaacctttatatgcagcatatagatgcagcaatgcatatgctgaggaggcgacgcgccgactatccactgacatttcctcagaagggtatcattctctcaacattcgtcaccaccatgatcagcagtgcatggacgaatcacaggggtgcgaggagaaactttgtgtgggaggattatatcctggagtactgcagaggggttcataaggtattgttttagtaagattttaaatgttgaactatgattataagtttattatggtttgttaattgtttagattttctccataattacagaaccagttctttccgagatggatgggtaatgagttcatttacttcattttgcatcttcccgaccaaaggcactgggtcacagttgaagttgacatagagctgtggaaaattaatgtgtacgactgtgattccagcgtttgtcattggtccgccatggcacccgtcttgaagacttgggaagaactgttgccctcgctaatccatgcaaccggggattttccacttaataaccagatcatggcgttaactaataaggagatcaccgtgcttccgaaaatgcatgcgagtcgagccactcacgacttagttccgaaggcaacaa

SEQ ID NO: 358570 - DNA, 1051 bp, Cannabis indica
gtttttgcatttatatgattgaaattagaaaatataatattattaaaagaagaataagtggttgaaataaagttgcaaaattctaactagaaagtggtcccttaagtggccggccattaggtgtaattttgcctaatattttattcttttttgacctatataattcaaacctaagccctagttgaaacataataaaaggaacatgatgctctcatctcatcgaacacttttcaacctgccaaatctagtgattcgaaccctccttaattattcttcacctattcggcctatagtgatagagtgtcatgtccacacataggaagtcaagtactcaatcatagtgcggaagacagtggtaaccaacccgaaggtgagaaagagatccaagcttagatcttgataatactctacgacaaaaaggaataatggttagagatcttagcaggaggagtcttaatattatgctgcaatcaatgtaaggatttctaaactcttattttatcgtattaagttattaatatttaggatgttaattcaacatacttattagtaaatctagatcctggtagaatatcccaataactggcctcagagccatggtaatgatttactttcatgaaatatacatttaaaatgatgaatatattaattgtgttgatttgaatatgttcatgttggtttatgtgttatatgatgattgaatgtgaagtacgaacgttttccatgaaaacaattttatttttattctaacaataatttatttggattcgttgtgaaaaattaagcaattttggtttttacggaactcgattctgataaaaaacgacaaagttaagaaagtttgaaaaatccaggtgcacatggctcagtcgcacgcaccagtcagtccgacaaggtgacgtgcgcgtgcgcatgtgggggacataacatgtctatgttggaagttattttaccaggaacttagatctactcacaagtatgttgatttaacaacctaaatatgaacttctaaaacgatagaaaattaaacacataagagtatcagaaatct

SEQ ID NO: 358571 - DNA, 745 bp, Cannabis indica
ggttttaatagttttctatccttatctcgcttatgacttcatagtcaacgagttatgaatattctctattaatcatttatttaacgagttatactttttttcgcattaaatgatataaattcattatatcaggtggttcatattccactacttgacacgtgtcatcctcagaagtgtagccaaatttcgagtataacacccgaaatcctttcttttttctcaattaagcgcttacttagttaaaattaataaacaatacatagtcttattttaaaattctaattgattaattaaaagcaattaattgagtctacaagacaatattatcttagacaacgtggagtctgtgcctatgtaaccaaactcccaataagtagatctgaaatttaccaagtaaatttcttaacttatgaattcctcccgactccactatacatttgaaattgcactcttgattacatagaaagctctatatattccaaatatagatacgttatgaattatcttttgttttaatccaaataatcaaagatcctctatagatgatttacatcgagtaaggacaaatttatcgttctacctctcaatgtattttattcttaaaacacttagcttcctataaattatatttcattaagctaatataattactaaaataagaactcttcctttatctctattaagccaagctcaaagaaaattattatttcacttctatatagctatagaagctataaattccata

SEQ ID NO: 358572 - DNA, 957 bp, Cannabis indica
ctgcgtcagctcgttgggcggagctcttggtatctttgaaaaatctttggcattcgtcgcacttctttacataggctttcgaatcttcaatcattgttggccagagtagccttgccttagaattttctttgataagatctgtccggctgcattatttccacagaatccatcgtgaacttcatatagaagccgtgcagcttcatttggtgtgacgcacctgagtaacggcattgagaatcctcttctgtacatgattccgtctacgatgatgtaccgtgctgcctttcttctcattttccgagcttcatttctgttatctgggagttccccagagttgagataggctgctattggcgtcatccagttcggagatgcgtcgatcatttcaatttcttccgtacctgtgatgctacgctcttcaagaaactggattgggactaagttcgccttgtaacttatattgttgctcgccaaacgggctagcgcatctgcagttgtattttcctctcttggaatctgcttgaggctatagcttttgaattgtgcgagcagatcatgtattttgctcagatatgctatcattttttctccccgagcctcgtattcgccagatacatgattaaccactagctgtgagtcactgcagatctcgatgtgctcggctttcatttccttcgctagtttgagtccagcgattagggcttcgtattcggcctcattgttggaggctttgaatccgaatttgatcgctgcatgcaggtgttgccccccaggtgtgacaagggcaattcctgcgccggatagctgatctgtggccgatccatccacgtgaagcttccaggtcggcttgctttcagtgctggtcggctgtggtgttggctcgggatcgccttctgggatgctttcagtttttcctgtgcattccaccacaaagtcggccaaggcttggcctttgat

SEQ ID NO: 358573 - DNA, 580 bp, Cannabis indica
ccttttatgataagtggttacctctctggttactatatgggtacatggttaccttacttaatttttctattattttcttaatttttcttcaattttctacaaaaataatcttttagaaaatatcgtattttgcacaaagtataaaacccataaattataattcctacaaaactaataagaaattacataaactgctattttaataaaaaaaaaaaagtacatttttatgttttttttttacataagaaaactacatgaaagtaacagaaaaacaacatcaaaacagtaacaaacaacataaaaaataatatacaaataataaaaactcaacagcaaaataacaagagtacaacataaaaatatattaaaagaccgtattttatataaataaaatataataaactataaaaatatttaaaattctgtacaaccgtattattttgtatttttttttaaaattatcccaaaactaatgaactgtctttattataaaaaaaagtgatatttttgaaaattattaaaaaaaaattgagtttttaatatcttgtatttactctttagtattttatatatatatata

SEQ ID NO: 358574 - DNA, 991 bp, Cannabis indica
cttcaagcttcctaccttgatctaattgatcattcgtaggttggggcaaagagttaataattttgagttgagattggacattacgaatttgggtagctagcgtgaggcgagaggagcatgttgtgagtcgttcctttaggtcaattaaaggattggagtgaggagtcaagtttgtctggatccaagcatcacgaaggcaatcctcaaatcccggttcagtcatccaaagcttgtcaaaaatgaagcgaggtttttggtgacgatgatcgtgcatatattgcaaggtaagaatgagaggccgatggtcagaaccataaaaatcgccatgattaagttgggaatcaggaaatatagcatcccaagcgttattagataggcaccagtctaaccgttcctgagtatgatttggttgcttttggcgattagtccaagtgaaaggattacctaatggggtaagaggatgaagttcatgactatcaataaaagattggaaatgcaaggatggagtacgagacatattacccccgattttgtcagaaagagataggtaatcattgaaatcgcccatgatgagccacggctgaagccgagcatgagagccaagtcgatcaattaattgccacgtgtgcagtttatttggagtgtgaggtgcaccataaaaagcggtaaaagtaaaagcatgaaagttaggaaacttaagataacaataaaaatgacttatattatatgaaagcaaagttacatccacatcatgtgtccagagcaacaaaagaccaccactaagcccgacacgtgggacttctaaaccgttaggaaatttaagacttgaagcaaacttatttaaagctccaactgggagtttagactccataatatacaaaagtgttgggcggttttgcttcactagcagggagagagaacggaatgcatgtttactcccaaatccacgagcattcaagctgatgatactcatggctctaggcgggtacgc

SEQ ID NO: 358575 - DNA, 769 bp, Cannabis indica
atttggatttccaatcccccatattggaaaccatgccttccaccccgttgatctcagaagtggcccatttgctgaaacagtagaagccgttgtggagacctacattcttgatgtcataaaaatagctaaactcttccgtcgaaggtgccctgtgcacatactccatatacatcgcgtaatagcctaaggctatgcgataactatttggggttaattggaaaggggacacatcatactgcttgagaatagcggaaatgaatggatggaaggggattgacactccgcaccggagaatggggatagagactacgacatcttctgagggtatgatcgcagagttggtaaaaggaaggtgtggtctttgagtaggacgagcacgcatggtgccgagacgcaataaatttaacctcgaaaaagtggtcaggtcagatttggtgacccgcgagactaagtcttcgcagaagaatggctcatttaattgcgtcttgtcaatcgaatcggactcgctcccttcggcatctccatattcgccaaatccacgatcaggaatctctcaatcttcacccatctcctcgacttcgacgtcaggagcatgcctggagtgaataagatgatcacggactgacaccgtagactcgctgtctcaaatctcgatagttcctggttcaatgagctcctgcaccatcctctcaatgtctgcagaggacaacagacccagctctgtgtctccggcattagggacctcctcttctgagatcgaggtcgggat

SEQ ID NO: 358576 - DNA, 442 bp, Cannabis indica
gtatttatccttaaaacactttcaggtgttgaacccgatcttggtctaggttcaggtccaggtccaagttcggttcccatgtgcgggtctaagtttgggtcagggtcaggatctcggtccagatctaggtcagcatttcgatcccagtctgggtgttggttttagtccaggttcgtatccggatccctgtctaggtccaagtctgtgtttgagatcgggtccgagatttaggtccttgtttgggtcttatttcctgtctgggtaaacgaccgtgtctgggcccgagttctagtctcagtttgggtctgaggctaggtctgtgttcggttctaggtctgggtctggttcctggtctcggtcctagtcttgttctagggacctggtttggcgattcttgttcatgttctaatttttagtcccaggtctaggtctgggttcgggt

SEQ ID NO: 358577 - DNA, 518 bp, Cannabis indica
gggggtcccctaatcgctggaaagaggccccctccagacacgtgtcgcacaggaaaccctagaaggattccctggacaagtgtcgggtgcagtaaactcacagaacacgactttacgcgataaagaaaatagaaagaaaagattctgttctatgccctaagcagccattaaacgaagaacgtatggccttctacgaagaaaatacacaacaacaatagaggcatgacaatggcaatcctaccactagagcagtaaattcaaacagactacatgaagaacttaaacacttgcatgcccaaaaatctcgaatgcaaacccagaaaagaacaaacagaacaagtaataatatgacattcaataacagagcaaatgatgcaaagaacttacgatgaagtgttaaactaggggtcctgatgcaagtcgagtgaagacgagaaggactggtagcaacgagcaaagaagaactgggaaaatcgcaaagtgtttgaagacttcgttctaggtctgagaattttctc

SEQ ID NO: 358578 - DNA, 519 bp, Cannabis indica
atgagcattgataagttggagaattcagagtctttgtatgaggcaataaagccaaggaatccttgttccactctcactccactctaccattaccctcctcttcggtctcttatattagaagattgtggatcatcgtttagatccctccatatggatttatttcccaatctcaaaactcttgttattgaatccagccactactttgaagctatcacagtgtcagatgggaaatctctggaggaactaacatatttacgtatctcttcttgtgatagttttgtatctttcccaaatggtgaacttattgctcctaagctgagtgagttggatatttttaaatgccctaaattgaagtggttgccagagaagatgacttccttctctgctatgaagtccttgagaattagatattgtccgttgataaagagtttccctgaaggtgaaggtggtctgcctgttagtttgtctagacttgatatatcgtatgatgaacttttgaggatgaaatggaattggcaa

SEQ ID NO: 358579 - DNA, 736 bp, Cannabis indica
tttttttaatactttacacttgtagtaatatacataattacaatattttgtaataatacaacctaactccaatccagctaggtaaccgaaaacggcaaatatttgttttgtattattcaagacaaccaaggaatatagatcaatttttttcattattatttatctttgtaaagattttttaattttgtaactaaagatgtattgggagagaaaaataaacaggaggcaatagaaatatatcttaaatcaaaatataatttaatcttcatactaacaaattatatacctttacatggaagacaatattccttacaaaaaaatatggagtagagtaaaaatataaaatgtattctttttgtttctttttttgttatgtttctaatatgaggaaattgcacttagtatgggattttaaaagttcaaatgataaatatgacacatttaagtttgaccaatttatatggtattttttgtttttaggttttttatggtatttgatatgtcatatatatgtaattaggtttctaaatcccatatttaatgtttttatttgttgaggaagttttatttgtcattgacgtcggaaaagtcaccggagtttgctgtcggtgccggaaaagtcaccggagtagcggtcggtgatggaaaagtcatcggagttgctgccggcgccagaaatttgtcggaattcgcattgtcgccggaaaaatcactgaaaaatcaccaagaaactggt

SEQ ID NO: 358580 - DNA, 1160 bp, Cannabis indica
ctcttcctcctcaagtttcccagccctataaatagggaggaatgttcactgggcaagggacctagaaattataagctgatacgtagctaagctaaggctatactattatctaagaattatatattcagagataccgttgtaagagctataagaaaaggaaccttcttccttgttcttaagtcaatacaaataacgaggattaagctattatcgaactgctcggggctgaacctctatcaaattcttgtgttttattattgctttattacatatatccattacgacatatcgtttatcgcttatcaaaaagactcattatcgttggctaaaagcaaagtcaacagagagcctccttcaattgattttaaaatacatctccctatagtgataaagtatctttcccgctcatatcaagtcagtactcaatcagagtgttgaagattatgaagaattccaatacttgaaggagatccagattcagatcttgttattactctgcgacaaaaaggaacaagagttagagatcgaaacgaaaggagccataatattctactgccaccaatgtaaggttttctaaaattttaaatatgtttatttcattattttaggaaattcatgtttagggtgttagattatagaatataatccaacatactttttagtaaatctagatcctgataaaataagttccaacatacgcgcactaccattggacaagatctgatctcgtgccaaaaagaggtgtaatcgtctataggtcgatttccatatgaagcggacatggtaattttccttaaggtagcagttatgacctaagaccagtttgtggagatctcttcccggaagcgacttactttagttgtgctctagggcttcttagagttggggattattatggctatgttgggtcccaaatacgctacttgtattgtggatggctttcccccaccaagtatccattaaactctgctaatcctaaaagttaatacactttttcccctactcatgacatgtgtctatcgcttgaaaacacagataacaaatatgttgctggctattttattcatggctaagtgatcttaattctccatacaatacaagtcacaactgttaggttttatgccctaaataaaactccatttcaatgtaatctattttat

SEQ ID NO: 358581 - DNA, 608 bp, Cannabis indica
attaattaattaatttttttaagtatagtcaatcataattaatttaattttataaaaagaatatttacttattagtctatcataattacattaaaaaaatgtaactattaaatagtaactcatatatattgccttaatgaatttatctttaaaacataatattacagcttttctataatactaattgatagaatggtttttaataaattaatcttgaaattcactaatcttaggttcatcttatgaatatatatttatatatttattgaaaataagcgtattcattcgttaattaaagcaaaagttagacctctcaatcattataaaataactcctccggtaaggagaagatcaagatagagtcgtacaactggtgggtgatgttacgaaaattatgagcactacgcaagtatacgcagtcaagtagtaagctcacgcaagtgaggtcgaaccacaggaaattagattaattactactaaattatacttatgattctatctggctaatcaatactttttatgaattcaataaaataattcagaaacttaaaataacaaaagaatattaatcaagatgagaaaaatagggagaagaatcctgttgtcag

SEQ ID NO: 358582 - DNA, 513 bp, Cannabis indica
atcctgggggtaactgagtatactaggtgaatgctgcttcttttaacgattgcacgaattgtctaatcaatagtgcatctgattgggcagattcaccacatgcataagtaaaatatgccaaatgttcatggggagaaccgttaatcccatcaaacttttgtctgacgtagtttggtggaaatggaatttggtcatagtaagtcgggtatggcttatgatatccaagaataggcattgttgcaacataatattcccgaatactctccatgataaaagccttcatgtcctgctgaggttgaacaccagctagtgttggttgcacacagagtggtggcagttgtgtattacctacaggcgacgctgaagacgagaaatgttgtccaacttcactctccttttgtctcatattagcttgatgagataattgtgttgagagtcgggctacttctccatccctctcggccaataatctttgtagttcctgaatcttctcttcattactgattgccccag

SEQ ID NO: 358583 - DNA, 926 bp, Cannabis indica
tttttagccacaagttttgttgtaactaaaaaaaaaaattatagtgacatcatcccattaaattataaatatgacttgtgatatatatttaaattaatttttaatattgtgttctaattcataattgccatatttttatcattgcaaagtaaagtatgaaactaacttatcatctatatcattcacaaaacaaaaatcaatttgagctaagacatctctctttacttaattcactatacaatcaactctaggcacttttaagtcccaaacggccggcctcattccaaacccgccaaaatttggatagaccgtggcctcgccttgcctcaaccatctcaacaatcgatgcacatttgtttctcgagtcctctaactcaaccaagctttgattttgatcaagacacattctactcaaagaacaaatgggaaacatcctccctatgatttttcacaaacaacacattgggaattcataatcattttcacaccaaagtatgatgaaggctcactctaacattcaatatatccaaacaagctaaccaaagaatgaaagagggcttaaactccatttaaaagcaaagttaacaccttatattgatggtttagacttgttagtttgttatacatagacatggtgaatgctatattttgctagcaaaagattttgctgaactaaacaagctttaagcgaatttttaacctaaacaattttcttccaagaccagctaattgtgctgagaacctcattatcccaccatggagtatttgtaacgtccctgcttcaagtcttctttggatccttacacccacagaatgaatggctcttatacacgagtacgtcactctggctggttcatggactgatgactgaccctacagaccaacacgagtgtttccagcatgctttgtcctcactcacacgcttc

SEQ ID NO: 358584 - DNA, 546 bp, Cannabis indica
tttaatgttcatattgattgacgcgtgtttcggtatttatttagtatttttataatacgtagtgtaactatgtaaatttatttttgactaaataatagtttaatttgttcaatatttttttttcttgtgttgattgatgatttattttttgtcttttcgttttaggtttttatttagttttaaattaaatgagtaaataatttttgttgtggtttgattaaaaaagattaagaatttaaccttttattattttaaaaaaattattatgctattgtaatattttaaaatatattgaaaatttaattttaaacataattaatactaaattaatatatatatatatttatgactgatatataatttttataaaaaaaataaagatttttgccacaaacactacaaaaatatactacttttagtgacaattttttcacaacataaattttttgtgacttaatgtgacatttaatcacaataaaaagttacttgtgactaaaacataatatttggatacaagttgtcactaatttttgtgactaatacttt

SEQ ID NO: 358585 - DNA, 841 bp, Cannabis indica
agtaattaatggataatatattatagaatatataaaatgtaattataagataaatgaatatattaattatagaaatataattgataaatatctaaaaatttcttattcacatggaaaatgtataatcttgtaaggtcgtataagataattaagattatacaatatgaataaaactagtcggtaatgtattaaagtaaagagatctttaatatagaactactaagtataatttactatataatatactctagtgtacgtgattttgattcagatcacatatgtggatagacatgtagtaaatgtgttatttataatttaattatacatgagtactctattactgagtgttgaggttgacttggaagactatggtgtgaactcttcaacaatttcatggaattgatattcggtgaatttatacaataagatagcgagaaaattctgatgggctactagaggtattgttttcgtagtttagatttaatctatttatatatatatatattatgttgagattcttgagataattttttagtcacgctataaattttttgtgactaaatgtgacttttattcccaataaaaaattacttgtgactaaaacataccatttaggtacaagttgtcactaatttaattttagtcataccaaataatgtgattaaaaatacatttagtcacaacaaattgtaacttttgtgactaatacttttagccacagactttttagttacaacacaagaataataatttataattagtcacaacttttttactttagttataaatttattgtgactaaaaaaaaaaattaatagtgtttataatgtatataattata

SEQ ID NO: 358586 - DNA, 743 bp, Cannabis indica
aaaataaatatgaaaaaaaaattaagtttcaataatacaataattagtgggctttgggttggacattcacatattggacctaaatataaaagttagtattttttataatgtgcggtgcggtgcgatttgaactgcatattaacaattcaaaactgcaaacaacaccgcgcagtttaaaaaaaattcacttactaatcaaaagaaatttaaattattgtttagaaaaaaaaagaaattcaaattattaaattaatttaaaagcttaaattaaaaataaataaaataaaaaaattatgcattttcaaatgattgaactcatgttattgtacttgatgtaagataactttaccacttaggcaagtttgatgggagtgttattggttgcttgtgaggtttgggcttagggttatgataaggtggatgagagagatttaaaattttagtgagtttatattggatcgtagctactgtttatttacggtgcccaacaatttttgttttttctaataaaagaaatgtattgattaattacttttttacgtgggtctccccaggggtggagtgaggacttgattattagggggccaattataatttttttttaaaaaaatctataatgcacccctaactaaaaaaatcgctttaatacattttctatcatttttgacatctaagtaagtttttagtgcaattttttttaatgatcgtgcatattatagttttttctcaccatttgtaatttt

SEQ ID NO: 358587 - DNA, 676 bp, Cannabis indica
agatatccataatatctgccttattaaaaccttgctagaaaacctagtatgacaaaaactcggtcatgggaaaagagtgcggtgtgtataaactcaccctcattttggtgatctttcaatcgatgaattctaatcttatgtattgtcttctcaaatattgatgttggtaatgattttatagaaagtcgttgaagattagtacttgatcaaatttgttggacattagccgatatcaccactctcttgaagatcgtgcgtaaagatgaactttggtgaaatgtgtttagttttatctcttttagtgtaccctccttttagttgagtgatgcaattcatagaggactgtttgtactttctttattgggcatcaataaacatttcctttaatatgttgtgtcattgatctcagttgcacatattttctacttacttcatgaattgcaagtatcctaacatgatataaagttgtctcgttaaaaaccttgtcagaaaaacctaggatcaaaatcgaagctaaaggaaaaaagagtgcaatatatatatttcgtattcattattatttgcaagttagctcgttaaaaaccttgtcaggaaaattcattaagacagaacctaaattaagggaaaaaagagtgaaacatgaatatgtctccccttatgcacatatgatccataa

SEQ ID NO: 358588 - DNA, 695 bp, Cannabis indica
aaattaagcattgtcaatagtttgaggggaatgtttaacgtcaaaaatagttcagggggcacgatttacgcaagtgtcatagttccggggaagattgcaaattagcctataaaaaaataaaaattaaaggggacttattattctaataaatatcatatattaataaaatcaatataattttaaatatttaaataaaattaaaataaagaattataagaaaataattttttatatagaaactaaaatgaacgaaacactacagaatacctaaaattaagcattgtcaataggtttgaggggaatgtttaacgtaaaaaatagttcagggggcacgatttagcaagtgtcatagttcgggggaaaattgcaaattagcctataaaaaatatatatttaaggtgtcttattattctaataaatatcatatattaataaatcaatataattttaattatttaaataaaattaaaataaagaattataagaaaataatttttatatgaaaaaacaattaaatagttttttataattattttaaacttaaataaaaattgaaaaattgaaaaatgtaaaattatattctgcattcactttaaaaaaaaattgtaatgggcaagattaagttcaccaatcacccacgtagaaaataagtgaaatactttttatatgaaaaaaataattaaagggcttttttt

SEQ ID NO: 358589 - DNA, 591 bp, Cannabis indica
tacattaaaatagagttttatttaggacacaaaacccaacaaaatcccacttgcactaacataaaacaatcagtacattacaagtaattctagattcgttctgtgcttttcaaatgtagtgacagtcaaaaatttggtgaatggatcagctaagttgtcttcagtatcaactttctccaccagtacgtcccctctcgccacatattctctgatgatgtggtacttcctctcaatgtatttgtttctcttgtggcttcgaggctctttactgttggttatagtacccatgttgtcataaagtaaaaccaatggtttttccattccaggaacaacaccaagttctgtgaagagctttcttagccagaccagttccttagcagcctgagcgacagctatgtatttggcctccaaagtagagtttgatgttgcggtttggttggcacttctccaaacaatttctccacccctaatagtaaatatcatcccagatctagacttcctatcatcaagacaagcttggaaatctgagtcggtatagcctacgggatttaaagtaccacccttgtagactaacacataatgccttgtact

SEQ ID NO: 358590 - DNA, 551 bp, Cannabis indica
aataattaaagattgttacaaggtgacaccttttagctattttctttaacttttaataaaataaaataagtaagactctcataataatattacacttcataaaattattaggcatcaccaaaagtacttgctcttcagcaaataataaaaaaagttaattaagatttttatctcttaaattttgacatgtatcaaattatgtcccccgaatttttaaggtcgttaaaaatttccctaaaaaaaaaatctaacatggatgaaagttcagagggcatgacttatatatatcaaagttcaagggacatgatttggtagatattaaagtctgggaagcatgatttaatatataaacaatcactgaaacagtaaaattgaatgaaatcaaacaaaagtccttaaatctaacaatctcaatagtttagaggaaatttttaacggctaaaaaaaaaattacaagaatcataatttggtacatgttaaaatttaaagggtaagagcatctccaaggagcacactaaatttggtgttacaccatcaccaaatttagtgtc

SEQ ID NO: 358591 - DNA, 680 bp, Cannabis indica
accatatcaatatatgccaagccgaaaatatacattaaataaataaaatatttttagtcaaattaatatgccaaaaatggaattaacattatttttgaattttacaaagattggtcggtgtgattagaggaaaaaggcatccaactacaatatagtgagtactactagtagtagttaagtgattatactacatatgcatgtattgaatttcaacattagcatgtgttgttgtgttgtgtgtgttgtattcatacacaaataactagaagtgattgaaccctagcatattatttccacaaacttatccttaccaacatatctatgctgattaatgattgtgcctaactaattttagttgtgggtgtctcataactaatttggtttttaagattcttcatacacaaaaatatattgttcttcaccattattaattgagtattggtattaggcacctgtatattgaaaaatatttcttttttatgttcattaataaaaaatattcttatattattttttatcaaaatatacctacttttttgagtgagttgtccaatataccctcactttctacttaagtctaccatataaattacattaacctaaggggtctaataagtgggtatatctacaaaaattataaaaatagaggtaaaaattaaacaaataaagtaaaatgggta

SEQ ID NO: 358592 - DNA, 878 bp, Cannabis indica
taacaaaatttgtagcatgttatcaggtatcaaatcatggaatatgattgagaagctttgtcactaggctatgtattttggagaatgtagaaagaccagtcaagttattttgtgacaataattcaacaatgctatattccaataacaatacgagctcatccaagtgaaagtatattgacataaagttcctagttgtgaaagaaatagtgcaaagtggacagatatccatagagcacattggggcaaactccatgatagtagattcgcttacaaaaggatcaccacacaaggtctttcatgggcacactgatcatatgggtgttttcttgtttgaggatatcatgatttagtaggagttcgtattttgtttgctttatgtttgtataaggcatttatgtattttgttattttctgatcataaatgaagtatttagtttattcacactcttttgttatgtttaagtctgaactcactttagtttaaggaggaccacttagaaataggcatgttcagttcacattgcctgtaatttctatgatacacatccataattgatctatgattgatcttaacaaatcttgtcttgacaaattttgtcttaatgatttttatcttttctttatttaattaatttaaaaaaattatttatttattacaaatataaatagttactatttttttttttaatttaaaatagatttttctaaacattttaatacaactctttatccttacccttgacaatattttaaggaggcaattcggggaccatagacctataattctaagctccaataaattaaagggaaaaaaacaggaatattctaaaaagggaaaaatattacaacaatactgttggtcggcccaatgaacattt

SEQ ID NO: 358593 - DNA, 1192 bp, Cannabis indica
gacagaattacgcttgttttctatgttttcaggtttcccatagctatagacgttcgggtttcaaaagtacgataaaagacaagttgagccaagaaaaattgaaaaatcaggatttggttaacttctggccgcgacagatttattaacggccgcagccaaaatttggcagaaaggtattttcgtgactggcctagtagccgcggcgagatactccaccgccgcagccaaagcagcactcgccgcggcgaggttccatacaaatggaggccaatttcatcttttgaaatcttggacgaaaaatataaaggaaactgcgagaaagagaagaggagaggcgaattttagacctaaaagcaatcaagaacggcaaaaggagcagagtggcggcccggattcattccaccaattggaataattatggatttgaacatgaactaaattcccgattggggaagatgatgaatgttgtttaaagttttccctagttaatgtcaattgtcattccttttatcttgatttgtgaaaattatctatatttatgtttaattttatgtttaaacttgatcaccttctacatgttctatgatctcaattcaaaatctgaaaagcgagaattaagaatactaaaattgaataatctaggttttatgtggaacgaaagtatttgcatgacctatgtgacagttagattattgcttaatgctgattacatgtaattctaatttagagattaattagagaatatgtgatttagaacctaaaagatcttaaaagagctaggttaaattgtataatctgtcattcacataaagaaaaaggatagcaattaggcattaacaattgggtaaataaattaataggattctctaccctattttctcatcttgattaatctttttctgtttattttagcttcttgatattattgttcaatttttaatcataaagactattgatttacagaatagaatcataaattttatcttagtggtactcaatccaattccttgcggttcgacctcatgtgtgagtttactacttgattacgttcatttgcatactgtttacaaaattttgtaacaactattcaatggttacatttttattgtaaccatcatggttacatttttctttgacctgtaatagcaggttactaataagtaaacatttattttttagaattaattaatta

SEQ ID NO: 358594 - DNA, 583 bp, Cannabis indica
gccctgtgaactcacaggcctgccaggaggaatgagtctcatcagttggaatgcccgggggcttgggagtgaccgagcattccgaaatctctcccttcttgttagattgtataagccctctttactttttgttattgaaactaaattgtgtaagaactctattgatcgttttaaggttaagctaggttttgattttggttttgaagtcccccgtgttggtttaagtgggggactttttcttttgtggacttcggatttggatgtaactataattaactattctcttaatcatattcactgttttatctcatctgatagtttttctagttttaatcatactgctttttatggtgctcctaatcctgctaataggtcccagacttgggagttattatctagaattgggctctcttgcatttctgttccttggtgcgtgttaggcgattttaatgactttttaacttgggaggacaaatctagcagaaatttaggcaatggcccctcccctctttttcgcacttttataaacaaatttgattttcaagttttgcaacctgctggtccgcccctaacttggaccaac

SEQ ID NO: 358595 - DNA, 980 bp, Cannabis indica
gtctatttaattaattattttaagaaaatagttaattataattaattaaatctaaaaaaggaaagtttacctattggtaacctgctattacaggttaaaaaaaaatgtaaccatatggttacaataaaaatgtaaccattgaatagtcacccatacatatatgtataatgcaaacaaataaatgaatgtatatatatatagagagacaagtagtagtaaattaagagttatatatagtactaaataaatatttatggtaattttagcaaaaaataaatagttattgtataggaatgatagttaggttaggtgtaggaccaaataaaaaatgagatataaaacaatgactgacagatgggttgagttgatgagttgtctagttatgtttggcacaaacacatcctctatttattagctcactactcactattattcactatataataataaatcaatgaaatttgggataaggcttgtatggtggacactacaaatattttctattttcttttttgcattttttatgactatagttgtaattctaagctatctttatgtgaaatttcttgtatactagccttctaaacggttgttctagtagatttttcatctgtttcggtatttaagagagttttttagttttattttctttttataatcatatatattgtaactatttaaaatcacttatcaaaaacttctaaatagtttatagtactaaaaataaagtttatactaattatttactagagctgtacaaaaaaatttgtaaaccgcctaaaccgaataacccgcccaaaccgaaccgaaaaaaccgataaaaattacaaaccgaaataacccgaaaaaattacaaaccgcccagggttgaaaataggtccaacccgcccaattaaaccgaccaacccgaccaacccgattttgcactttattttttttaaaacttttagttttttttttattatataatataaatgatt

SEQ ID NO: 358596 - DNA, 719 bp, Cannabis indica
gactatcactccacaggattttgactaagggtatagtcttatttcgtaagacttttgttcctttttctatcacgcgcacagggcgtgccatataactcatgtcctgctcaaagttcaagttctcgtatttaagcacatgtgtcggatcaggtacatacttccgtaacatggatatgtggaaaacattatgtgtttctgctaatgttggcggtagggccaaacggtaagctacttgaccaactctatccagtatctcaaaaggacctataaatcttgggcttaactttccccgttttccgaaacgcataatccccttcataggtgataccttcaagaacactaagtcccctacagaaaactcaacctcccgtcttttcaaatctgcataacttttctgtctactttgggcggtgagcatcctttgtcgtatcttttcaactgcttctgaagcctctctaactgcttctggacctaagtagcgtctttctccaacttcatcccaatgaagcggtgatctacattttcgtccatacaacatctcatatggtgccattttgattgtggcttgatagctattattgtaggagaactccattagaggtaaatacttactccacgagccagtgaagtccagtgcacacgctcgaagcatatcctcgagtatttggatggtgcgttcagattgtccatctgtttggggatgaaatgctgtacttaat

SEQ ID NO: 358597 - DNA, 732 bp, Cannabis indica
cggatgaaggagaggcggacaggttgaaggagaaggtcaatgccttggagaaagtcggcctcaagctcttcttcgatttctgtaaggctaatctctaggccaattttgactacttgggcgaggctaaggaaatgtaccttgaatactgcgcggcccaagttgcttatggtgggaatgaggcggctgcttcaacctccggccaagcctctggccaggctgctgatgcttctcatgttcaattaacatatcctcctgctccagttggctcagaagaaccgaaccaagagcctgggactccagctgtttaaacacttctttttatgtccctttttatatatatattatatgcggtctcaaggccttttttaagacatcatgaccgaccaagcggtctttaaacttggaattatttttcattttttggacaacgggctgaccgggcaacttttaatcccggtactacgtgccattaccatccttaatgaatttcattctctgtttataattgttgtgcaattgtgattattttatttttaccaaatgttttgtacaggtataggtgccccccaagtgatcgagcagacgtatgactcttggtcacttgtcttttgcaaatatattgcttatctgttcggtgttttgggttcgaataaaccttttgtacgcactttaggtaaattataatcatgctgattttttccactcaatagaattggaaatactatctttatt

SEQ ID NO: 358598 - DNA, 1328 bp, Cannabis indica
cttttctatttttacataatttcatacaaagttccaacaatcccccacttgaaatttttaaaaatattttctcgagcaacatcaaacaactataagacagtgcttcagcaaagatatctttcgatttgaatcttgcatagtgaatacgatttagattttactagagtgactcgaagtcttgaactctatctctaacgtcgtaccacgcaccaatctttcaagggtgtattcaaataagcacgtgcgttaatggccatgcacgtctatcccagtatagtgaacgctctagaaattttgccccaaattccataggaagcggccccactcccacattcacataggtaagtctatcaagagtactcctgtagctcggtactccactccacatagagtatagatctcattaagagtttctattaactcatcctcttatcgcttcaagacttcatgcttcttctataacaatagcatgatcaacacatatcacttcataacttgttattacccgttgaacctaattcttgggatctccagtcattaggttgggttaccattatgagtgactcatctttctaaaggcaatagtcccattcctttcaaagttttatagactttctctctagctagtcctttcgtcaaaggatctgctaaattgtcatcagtgcgtacatgatccactctaacagctcctgtcgagaggaactctctaacagtgttgtgcttacgactgatttgtcgtttcttaccgttgtaataacggttctggacttttgcaatagccgcgatactatatcaatggatcaacacagctggtatcggtttttcccataaagggatctcagctagcaggcttctaagccaacctgcttcttcactagcagaggctagtgctatcatttcagactccatggtggactatgctaaaatagtctgtttctttgacttccaagaaacagcgccaccagctatgctaaaaatatagccacttgtagctttgcagtcatctgacaaagtgttccagtctgcatcactgtatccttcaaggacagctggaaacctttgatagtataatccaaggttcatggttctcttaaggtatctcattaccctctcaatagcatgccaatgctctatactaggcctactggtaaacatgcacaataatcccacgacataggcaatgtcgggtctcgtacaatcagtggcatatcgaagactgccaatgatgctcgcatagtcagattgtctcacaccgtcaccagtgttattgaatagctctacacttggatcatatggtgtgcaagcaggttttgttggaaattatttta

SEQ ID NO: 358599 - DNA, 999 bp, Cannabis indica
aataaggttgcccaaaagattgtttcccacttcctaagatcgaccagttagtggatgcaactgctgggcacgagcttatgtcatttatggacgcatattctggatataaccagataaaaatgtatgtcccaaatcaggaacatacaagcttcgtaactaacatgggactctattgttataaagtcatgttgttcagactaaagaacgttggggcaacatatgattggtaaaggaaaggttcgcaaaccaaatagggcgaaatatgaaagtttacgtcgatattatgttggtaaaatcaataaaaagtaaggatcatacctcagacctcgcaaaatgctttaagatattaaagaagtataacatggagctaaacccgaaaaaatgttcctttggagtttcctcaggaaattttttgggatttatagttaactcaagaggtattgaagcaaatcctaaaaatcaaggcattaatagacatgtcgtcaccaacaaagcctacggaagtacaagccctgacaggaagaatggccgcacttaacagattcatttcgaagtcaactgataagtgtgtgccgttcttcaacatattgcgaggcaacaaaaagttcgagtggataaaagagtgcgaagaggcctttcagaacataaaaaggcatctagcaacgcctctagttttggcaaaaccaataattggagagacaatgtttctctatttagccatctcggaagatgcgattagtgcagctatagtgcgagaagagggcaagcactagcaacctaattgctatgtaagtaaaaggttaataggggcagaatcccgatatccccctctagaaaaactcgcgttgtgcctagtccatgcatctcgtaaactacggccatacttccaggctcaccccataaaagtgttaatcgatgagcccttgagacaagttttatcaaactagatgcttctggaagattgataaaatggtcgattgaactggggtagttcgacat

SEQ ID NO: 358600 - DNA, 1273 bp, Cannabis indica
ctcttatttgatccaactgtgcttgcatagaaggatctgatgctataggagcctggtcaattggcccttctcgattgggttgcagccttagattggccaggacctggctaaccataccctgagagaggatatgttcaaggctggctagccctagacctgacatctggctttggtcggccaaccttgggtaaggtaattggcctttggacgacttgctcccaaatgttccagggaggaagctcaccctattgccgactaaaggtgcgccactaaggggttggctagccagaggctggccaagtgggggtgttgttgtgccaaaaatccctggttgactcgccaagtcgctagttgctagagtctgactgctcccgccaccagatctgtgtggcaggacttgtagactttcgggtagggggaggtccgtccaagtgctttacaaaccttgttaaactatttgtctataaaccctaccctatctgtcaactagtctctcttggagaagatctctaataagatattgacctctccctatagttctttcattgatccaccttatcaggtcactagtttctctattatgacggtctagcttttcttgatgagattggaggatgtactcctggttattcatccatctaaaaaaatttcatctctattgtgcaaatgcatcacagccaacaatgcgtagttctttagtttggccgacttggcagacaacctctctaagtttggccaattcgagatcttctcctaaatccacatgaggctcaccaattcctagccccgtttcccaacataatactagggaccagagtcagttgtggttcccagaggtcgctccatgttggccaaaccctcagtaggaggtgctaatggtagatctaccctgggtggtagagtcttgtcattgggactaaccgggttggcagcgtcaacttgacaaggtttatttgtcaagtttgttgtgcctgtcgagttggcagggttggccacatcctcagattcgtggatattctagtggtggctggaacatgaacatcgagattaacaatcatggtgtcttgaggaagacccaatgaggcagcagttgtagctggagttttccttattacatccatggtgatagatcagaccaatcgacaatgctctcaatgaaagcacaaaattgttgaccatagatttagaatacgatagtggagtcttatttatgctgatatcacaacgtgtacacaataagaacaagaaagtaaagagacatagtatttttata

SEQ ID NO: 358601 - DNA, 950 bp, Cannabis indica
tggtaaaataattccaacagcacctataggcgtacaatgtactatttgtcctcttgggactacttttgtattgttggccattaaagcctatatataccctattttcaggttgtgagaggggttagaaaatcattgtaacactaaatacttgagtaatttaaacacttttctttcttcattgttacttcaaacatttatcttgatcaagctttaaaactttcaacattcttcgtgatttgacattaactatggtttttcgactttgatttcgttgatgagattcagccatcaacaattaggatgagtaattagattttatgttgtaatatttattttatatatatatatgaaaattatgattaaaattttatttgtatttttattttgttttttggattggatatccaataaataaatctaaaatattagatggatcccatttgatttgcatgatttaaaaaatattgaatttaaaatattggataaatctgaattaaaataataaatatacaatacattcaataaatctattcaaatattcaattaatttgggtgattaaaattagtttgattggatgagttaataatatttaacattcattgtataatttgatcgaatctagatatttacatgcatacatttatgcaacttatgtgcaaatgattctatggaggctacgttaaataataaaattaaataaatttgcacgcaacaaagtaaaaatttactacaaacataaaatctaaatttaaatgtctaatgaaataaattaatactaaaattgtattgttacatttggatttagatttttccagtcatatggtcatcattggataatccttgttctatgagcatgatatgagatttgtggttgtttatatagagcatgaaaatctatgtatataattaatacaatatcctattatttaacagaatattctttattaat

SEQ ID NO: 358602 - DNA, 554 bp, Cannabis indica
atttaagtttttttttctaaaaggaaataaataaaatagtccagtctattcttaaaccaaacacatgattactttcagcataatccaatcttgtccagtccagtccaatccttttcagtccaatcctacgtaccaaatgggccctaattggatgcgcctagatatatggtcgtaatttgcgagatgcatgaaataggcataatgcaattttttcaagaggggggtatctcgactctgcccccagtaaccttttactgggatagtaaataagttgctggtgtttaccctcttctcgcactaaggccgcactaatggaatgctctaagacaactagataaaggtataaagtctctccagttattggtatggccaaaactaggggtgttgacaaatgcttctttatgcctttaaaagcttcctcacattcttctatccattaaaatctcttagtgccttgcaaaacaataaaaaatggaaggcatttatatattgactttgagatgaatctatttagtgctgccattctccccatcaaatcctgaacttcttttggc

SEQ ID NO: 358603 - DNA, 563 bp, Cannabis indica
tttttttttattgttttgtgttaaaatggttgctgtctggtttgttctgattttttatacattttttcgtctggcccaatgggacccaatagggacccgatgccagtccgatggatttcttagatctaaggtttagtttggttgaagtgatttgttggatgagaagagagcatcatgttccttttatagtacttcaactagagtttaggatttaattatatggattaaaaatgaataaaataatggacaaaaatcaactctaatggtcggccacacttgtgggcctcactagttataatttgtctctttatttcaaccatttatctttctttcaacaatactatattttctaattttaatcctataaatgttaaaattatttatttaataattataactaattatcaaataaaattgccatttatactctttcaaaaaaaaattgccatttatattatttattaattagaccatacaaagtctcttaattaataaataaacctcaaaacctcttttattcacaattaagccattgcttagtgaaaattcataaataagacata

SEQ ID NO: 358604 - DNA, 553 bp, Cannabis indica
tttttttcttattaaaaaacagaattttcatagatttggatgggaatttgtgtgtgttattctgattagattgttttagattgtgtatatgaatttggatgtttttctgcatgttaatcagtagtgtttgttgttcaaacaagttatcaatgacatattgataggttatcgatataatgtcgaccaagattgaaagttgtttgaccattagattgtctgtgttgttagtgtatatcgataggatgtcgttggtgtatcgataggatgtcgacttattctggaataaaagtgcaggtctctaatgtcgatagcatatcgaccgtatgtcaatatctttgtcgaaaatttgcttgaattactttctgttgtttttatcgacctcttgtcgacataatgtcgacaggttatcgacacttttatgtagttgatgtttgtttgataatgtcgacatgatgtcgaccttttgtcgacgattcttttgctccagcatgtacaagtatccaggaagcttcatgtatgaaaactcaggcgtacccctagcatacgtaagtcc

SEQ ID NO: 358605 - DNA, 557 bp, Cannabis indica
gtacaaaagtgtatacataagtatatcaagttggtagttaactgtgaaaaataaatgtcactttaaatttgctaatagtttagtagtttgaagggttttcctactaaaatttgagcttggaatattaagtgcaagtggaataatagtttagctgcaaaaagctcttttccttttaggatgtctacacatttggtaccctgtgttttatctaaatacaagttgagaaccctgtattttcaataatacttatttgatactctgtattttaaaatcatacatatttggtaccctaaattcaaaatttttgataaaattttatcaatacaatcaaactgtataaaattttatgaattctgaattcaaatttaattatttaattacatataactgagaattatttggttaaattaataaaattgtattgattaaattttactttaaggtcaaagatggtgtttggtaacacttttttactcaacattctgtttttaatattagaaaagtgaaaacatttttcaaaaacatgttttataaaattgttttcacttttcaatttt

SEQ ID NO: 358606 - DNA, 536 bp, Cannabis indica
tcaggggcaacatttaccccccaagccttgtttagtaatgaagtgaacaaggcttgcttagatgtttccggttgtcttatcagcttcctggcacgtgcttcgggcgcgtggtggtgtattaatgaccatcattactgcagttatttgctttttgcaggcgtcgattcgtttcttgtccatttattgatacggcgcattaaatgggtgtcagactggtactcaaacgttttctaccgccttgatgacgatttaatccaaccgtaaaatctatagaattcgaatcgatcatcatcctaaccgttcgatggtggctgatcacagctgtctcacgcaggttctggcctataaaagccagccttcctacttcatttggttactttcagcatttcaccaaatttcttcagagttttccagagagaaaagaaacatcaaacaccatagattttgtgcttttattcccgtcgctgccagcctaccttttaccggcgatcaacaccaacacccagtttccacacttcatgtaagttcttcatatc

SEQ ID NO: 358607 - DNA, 541 bp, Cannabis indica
tgggcaagtggaaaatgtggcaagaagtaggtgatgatttttcaatggaccattataggtgacagtttaaaccgtcgggaatactaaatttttcccgacggttttaaatagttacttaatttttttagcgacggtccccgaaaaaaatcgtttttcggaccgtcgcgaattctgatatttgtagtagtggttggacacattttaactctacataacccaaaccaacccatttcttgaaagatgttccaaatttgagacttctttcatacataaaatataatttatatccacaaaatatatacaaatacatattttacgttttcatacataaataaattatattgtgataaccttaaaatgtgaattaaccaaaacacatcactaacatgtagtctataattactctactacttttaccaaaaagtctaatgtgagaatcaatcactattgttaactttgctactcacacaatgatacccctactaccttagttttttttaaagcactatattacacacacatatgtatgtatcattttttt

SEQ ID NO: 358608 - DNA, 646 bp, Cannabis indica
tctcagtaagcccatgcataaaaaatatcctccttgtaaccagtaacttctttgatttgaacagatcaacatcataggatttcttacaatccaaaccggttattagggaaaattcttcaattctaaaatgcacaaccttgtttcccaatttgaaccagagctcaacatcatccctttcagtgtgaatctgccgcaaaagaacgagataaatgagttgtatttgatagttgaagttactcacatcaagaaattagccaaaaggagactttcgaaacaactccttcttaaagattctcattgatatcatggatgacattgtaaggattgtaaagttgaggtttcccagcaaacctcttcttaacatcaattttaaaataatattcctgtgagagaaaaaagaatataaacaatagaaattaaaattacacaacaaaaaaaataaaatattgaaaaactggttaaccaaaacaaaaagaaaaactaaaaacttaaaataaaaacatagagattatagaaaccagattcaaataaaactgtaaacagaaaacctgaaaataaggaaaataatagagcaagaaaccgatttctttagaaaataaaaattaccaatggagcatcaacagcaggagtctcgctcttcttcttg

SEQ ID NO: 358609 - DNA, 529 bp, Cannabis indica
ataaataaataaataaaatgtgaaggaggacatctgcttctcaactctggatcccaacgacgaacttgaagctcctccaccatcagacgaacccatacaccgacagatcccaacgccatactcgaagctccgcatctcggcgtcgatagatccaaatgcaaagtcgaagctctgctgctcaactctgacagacccaaacacaaagtcgaagcactgccgctcaactccgacagacccaaatgaatggacgtaatcttgaggtggtcgataatttctgggtttgcgatttgaatcttgatttaagggtttgtttaatttgttagatttatcaaagaaagcagaatattttataccaaaaagaaagaaagaaagacagaaaaattaagagaacatgatgattttcttttaagttagtataaaaagatgattgactaagagatatgtttgggcttttttctaatcggagaagaagacgataggagtgaaatatgaataaaattatttttattttgttattttatttataaat

SEQ ID NO: 358610 - DNA, 518 bp, Cannabis indica
agtcttgcctccacatgaaagagtaaaaatcaggaaagaccaaaaaacattaaagaaggaaaggctgggatgggaaaaaggatcaacacaacaagtgcagcaaaatgtggtgaactggggcataacaaaagaacatgcagcagaagacgtagaagggaataaaaacaacaacagaacaacagtggacaaacaaaagaaaactacacatacgttttgagaatgagatattgaggaatttaaatttctgaaatacaaagggaatacagtttttatttgaaaaacattgattacattgggaattgatgatactttagattggatattaaaagatgttagggatattaaaagatgttagatactaaattgaatatatatatgaagtttgttattgaaacggtctgtgtttttaatactgaaatgaatatttgtattcaaaaaaacagagaaactataagaaaaaaaaataaaaaagaagggatgtgaaatgaaaaaactaacaactttaacataccaacttg

SEQ ID NO: 358611 - DNA, 560 bp, Cannabis indica
gtgagagccgtcagcgacgagagagcaacaagaacctccgtttgtttgtgagtcttcaacggtgagagagtaccttcaagccctgccgtccatgagagaaagaagaagagaaggaatagttgagagaaagaaatagggttgccgctgagttttgagggtaaggttagggttttgagagagagatatatcatatataagatgatttggggctgatttttttctttaattttgtgacctatctcggcaagcccaactagcaccgccaagattgggtacacaatcttgacagtgttagttcagcccgtcgagattgggtccaactttaattttttttttaaaaatactttggttaccattcttgacggtttacaatgagcctgccgttatatagaccaatcttgacgggcacacgcgggcccgccgagattggtgtgccgagtttgcctgtttttcttgtagtgccattacatcattctgaaattgtattaccatagaaagacttaggcaacaactagtaactaatcatcaatatgcaaatcgaagtttctggggaggtaagt

SEQ ID NO: 358612 - DNA, 474 bp, Cannabis indica
agcaacccctggagctgaattttcaattctttaagctcagctagagccattctataaggatccttggagaccggttctactccaggtgccaaatcaattataaaataaatttcccgctgaggtgttaaacctgaaagttcttcaggaaaagcatctagaaattcccgaaccactttgatgtcatttggccgaacagagtctggccgattggtgtctaataccatggccagaaaccctagacatccatcgcccattaattctttagctgacaaagacgaaatcactgggatgcgagatccctgaaccgaaccgacaaaaacaaacgtttcctcaccttctagttggaagattaccatcttcctcttacagtcaatactggctgaatatttggataggaaatccattcccagtatgatatcaaaatccgctaagtcagcacttaactccctatcatcaattctgatcggcatagac

SEQ ID NO: 358613 - DNA, 763 bp, Cannabis indica
tttttttctttctctctttcgacgattccttgattccgtcctttctcttcggaccagaagctcacgagttatcaattctcgtggaagcagtacatgttgaaacattgttgggtttacctcccgagcctattttcaacaagttcatttcctttcgggcttctttcttccggacacgcacttgagccctttcaatgaactcagtgatgattcttaccgaacgtccttgtaagtcatcccacaactcgccccccgcggttaatcgatcagtagagatccctgcctgaagggctgtaagttgtgtgatgtcatccaaatttctaaccctagcggtagccgtgctaaaacgacttaagtatgccttaagtgtttcgtcgggctgctactttatattggttagcgaggccgcttcggttcggctatccctaatgccctgaaattgcttcttgaaatccctggacagctgctcctaggaagttattgaatgatgagtaaacttgttaaaccagctactcgatgctccaacaagcaaggtggggaacaaaatacaacgtaaattgttcgtcacattactcgctcgcattattgtgttaaagttattcaaatgcgagactggatctatggtttcgtcataagacaagacatgcgggtttttgaatcccgaaggaaatggggtattcataatatctgggtgatacggctcaagctcctcgtcagagtcgtatccagatagtttcccctaattctcccacttgatatctcctga

SEQ ID NO: 358614 - DNA, 667 bp, Cannabis indica
aaaatattaatataaattttctaatgatttgaaaagaatatataattttattgttatattgtttctcttaaaatcaatttaagtaactattgtttatttaatattattttaaattttgaaagcttatgtattataatttgaaattatatattttcactcattttaatgaataagcttttcataaaaaaaaatataaataaatttgtaatatttttttcatataaattcttattaaatgtaaaatatattaacaaaatcaaaattaaaaaaaaaaaaatctcacctatataagattatttattccctgttagattagctggatgggataaataatctcagacagataaaattagctggattagttatccagactttcaacatgcccaaacactggactggaaaaattagtagggttgtacataaatttttgtaaaccgcccaaaccaaaccaaaccaaaataacccgacaaaactgcaaactgaaaaatctaacaaaaatataacccgcccaatcttaactgagcaggttacactacttagatttttgtaacccgatctttatattgggttgaacaaaatgtagcacaaaccgatcaaaccgaccgacgtgttggaaattattttactatgatctagataactaacatgtatgttgattataatctat

SEQ ID NO: 358615 - DNA, 521 bp, Cannabis indica
acaatggagatcgaatgtccttgaaaagctcattatttaaaaaaatatttttagttaatcatttatttttaaattacatattttcataatgaaaatttcttaaaaataattaataaaattttgaaaatatttatgtaaaaataaaatttcaaaattatttaaaatataataaaataaatacatgaaaatatctaatttaagttgttctaaaataactaggtttttaacttaaataatttataaagtttaattaaataacaaattaagtatcttgaattaatcaacttaattttaaaaaaaaatattccaatttaagttgatctaaaattaacaaattttcaacttaaatatatttttaaagaatatctgaataactaattttctagaaaaatctacttaattgttaatttcttaaaaaatattctaatttaggttgatccaaaatcaattcgaaaaaaaaataaattttcaacttaaatatattttctatgaaaatttaaataattaagtatgtagaaaaa

SEQ ID NO: 358616 - DNA, 716 bp, Cannabis indica
atagatacgctattagttatctattgttataatcctaataatcaatgatcctctatagatgatttacattgtacagggattaattttaccattacacccttcaatgtattttatccttaaaacacttagccacctataaatgatatttcagtgaactaacataataactaaaatgagtactcaaccatttatctctatttgaaattgtattaaaatataataaaataaattcttaaaaaatatctaatttaagttgttctaaaataacaaattttcaatttaaataattttctaaaatttaattaaataacaaattaagtatcttgaactaatcaccttaatttgaaacatatccttatataagttgatctaaaattaacaaatttttaacttaaaaaaaatattttcaaagaatatgtgaataactaattttctagaaaattctacttaattattaatttcaaaatattctaatttatgttgctctaaaatcagttagaataactgattttcattttaaaatattttctatgaaattcaaataattaagtattcagaaaaatctaattagttataacttcttaatttatttttttttgtacgcgtataacttcttaatttaattaaatacaaaaaatacatatagtttatcttgagtatatttcattaaactgatcttgttttttttaaataatttcaaaataatctaatgaaaa

SEQ ID NO: 358617 - DNA, 625 bp, Cannabis indica
tccaggctttgcaacagcaggaggatgaactgaggcagcagggggtgcattggaaggagttgcaacggtttcttctaactttttagtgtgccctagattcttggttctcaccattttggatctgaaagagaagatgaacagagacaatacaagaaacaagaaaaagtgttcgggtaggtggtgagttaaatgacaaatattggtttatataaacttggaagcaagacaagaaaaggaaaccaaatttgaaaatttaaatggtaaccgccagcccatgaacacataaaaggaaaccgcccactcctcaattcctttcccttttttttaaaaaaataaaaaataaaaaggaaactagaattgccaataatatttccaaaaataaatcaatctttcaagaataaaagcacattaccataaaaagattaatctttacttggaaaaatatcaaaataaatcaaagaagaatgaatgttgatacttaccatttaagcacaagatttccttaacccatgaagcaagtcacacgcctccctctcttttttttttattttttattattattattatattttttaaattaaaaccgaaaataaaatacaatttgtacaataaatatatgtgattc

SEQ ID NO: 358618 - DNA, 540 bp, Cannabis indica
cttataaaacatctcttacatatatatgtatcatgaataattaaaaagtttacatctcacatcacttatatatccatataactaagtattttagtgtcttttgtaccctttgttttatctttgtagatgttcctttcgtttgtaattctttttttaaatggttttcttttgtaatttaatatcttcttaaataattatcacaaacatgattatgcacttcatatttagttgataaaatccccgttcttctccatatttctttttatagtaattatgatttttttttatattaacataataatattttataatataattttaaaaattataatataattttaaaaatgttaacacataaacttaggtggcgtttgataacacttttttaatcagttttctacttttaaaagtagaaaagtgaaaatattttttaaaaacatgttctataaaactgcttttacttttcaaatttataattagaaatcaaaattttaaaaacaaaaaaaaaatcacttttaatatttttttaaacaatttttt

SEQ ID NO: 358619 - DNA, 620 bp, Cannabis indica
atgcccacctattgaagattgactttagaagcagttttttatagaaattgtaggtataaaattagactataccatttaaagtcggttggaatggaaatatttctgagggtgatttgaatagcctatcccatcagttattttctaataacagacggtatagggttatataaaaaccgtatcagcttcttcttcttcacttcttcttcctcacgaaaccaaacaccaccagcagagacatacccaaacgctcgccaccttcgccaaccacccttactccagcccatatctcccctatttttgcaccatttgagcctattttttaaaaaaaatcttctatattttcgataactaaatccatacacactacgtacaaaaatgggttttcccgacatttttaaatagtcgtttaaagtattcccgtcggtttctataaccgtcgcctatacaaccgtcgtaaaacgagcataataggcgacggttcaaaacctgtcgcctatagtatagggcacggtttaaaatcgtcgcctataccctgttataggcgacggttttaaaccgtcgggaatgtaaaaaaaaatacagattttctgccattaaattttcccctatttttttcctcc

SEQ ID NO: 358620 - DNA, 995 bp, Cannabis indica
tttataatagtaccctagcttaagcccaaatgacttatcatacgaatgtctggagcagatttagcctccctgaacatagagttgtgatttgacaggtcataaatatggtcagctcctcacaagagaccttttagcttggcttaatctgaacttaccttctttgttatgtctcgtttgtcaaacaatgcaggattctctgagcattcgttattttcttgtcctttgtccaatcttgtttctaatatgttgttcacttggcttggtttcaaggctttgcccgatgaatactctagctagaaagtgcgactgaatcgtacgagagagggtttgtttgtgaacattgttatagcagtggttgttgccactgtctataatatttggatcaatcaaaataagtgtatgtatgagagtttttcaaaaatggcaatgctcatagtggaggaaatcaagttagtgatccctaagagagaattggtgtttgtatgtttgcttgttgattaatgaagcctttttcttcttgatcaaaaatataattgtgatttttatgactaataccttagttatagactttttaataataatataggaatgatgatttataattagtcacaatttttttatttttagtcacaagttttgttgtgactaaaaataaaactttttatagtggtgtatgataagatatatggaatttcatttcaaaataaagacagcgagtatatatatcttatatataatattaaattccagtctatcatcaatgtggaaatatgtatgaaaaatgattatcaatttattttaattttcataaatgtttatgtcattttttaataagagtcaaaatatgaatatttaaatatatatatatatatatataaggggctaattcaaaagaaaatttaaatacatcatgttattttaaagggattattttacaaatacacaaaaataacaaaaaaattataaaaatacgattttatgaaattttaaatatt

SEQ ID NO: 358621 - DNA, 699 bp, Cannabis indica
aaaagtgaactttttgaagtctactgtgtccttcaatcctaatacgtgtcttgcaacttgtgtccagatttgtgatattctccatatgcctgaagcctctgaaggaaggctctatctgggacttccgaacattattgggagaaacaaaaatgctgtactaggatttctgaagaccaaggtaattgcaagaattaatagttgggatggaaaacttctttctcatgccgacaaagaaattctcttgaaaattgttgttcaatcgctccccacatatgctatgagtgttttcctccttccacttggtacatgtaatgaaattgaaaaacttatggcccgattttggtggaagtcatcttctagtaaagggaaagaaattatttggaggtcttaggatcgtatggttgcccataaatatgatggtggcattggttttcggcacttgcatgatttcaacattgccatgcttgctaaacaaggttggcatctactttgcaatcgagatactcttgttggaaaagtctataaagctagatactttccccactctgatttcttgtcagtatagctaggaagtaacctaagctttgtctggagaggtatttggactacccaatctctactccatttgggtgtcagaggaataatcagatcaggggacacagtaagctattgggttttatgccctaaataaaactcttt

SEQ ID NO: 358622 - DNA, 1060 bp, Cannabis indica
cttatataattacatatatataattttcaaatttctacagttactaatggttttgctatggtgttgatttttattgcaagtgcaaggcagaaaatgaagttgttgaaatatgctgaaaagtaggaattgttgtttaaagcagtaggtcctaggagttatagcattggctcagcattttgaaacagagatgcataagagaatgaattgctgaagcaatgctgcaacaactgggagtattgggttcaaaaaaaaaaatatctataaactgggagtatgaaagggaaagagacatgtgggtgaggcgtgcaatgcaaaccaacgtgcgcaaagatatcccgggatatccaaattttccagatcagattcttgtgccttggcatccgattgacggtgaagcgtctgacccttgagggagctttcttattcccttaacctatttgagtactgtaaatatgtgtggtagttctgctatttagtttaaatgatgttagttatgtgttgttgttatgtgtgatcttgttgagattggttatctttattgctgtctttagatgtttgtgtaacaacattgtgtagttaaggtcatgttagtaatgttatgtggtcatgttgtgctatgttgtgttagcttgcaactgagaagtatatgtcatttttctttagcttggtttagcgccgctcgatgatgaaaaaataaccatttcctttcatttgtgatgtgcccttatttttgtgtgttgaaaatgctaagtttaaatgctactttgtctaaatgctagtttaagaggaattttttcaaataggtgtacttgtgttatcccaccatactttgagtttctagaatagctaacaccttgagaaagtttaagcatctagaattggttagcgtaattcttgaggcgaaatcctagctagctttacaacttggaaatgatttaggccatttgtggacgattgagcctttcaagctaacccgaaaaattttaattgtcaatagtcacccctcattgagccaaaagcctagtttttcctaatacccatcaaagttaatagacccaca

SEQ ID NO: 358623 - DNA, 364 bp, Cannabis indica
caacaatctcaatggttcatggggaatttttaatgaccttaaaaattcaggggacataatttagtacatgtcaaagttcggaagagaaaattcctaattagccaaaaaatatatattaggattacttaagtcagccaatataagaattaggtcgttgaaaatacctccttaactattgagattgttggatttaaaaacttttgtctaatttcattcaattttactattcattgattgtttgtgtagtaactcatgctccccaaactttgatatatatcaaattataccactcgaactttcaaatatactaaatcatacccctgaactttcatccatgttagacttttttactaaaattggacaa

SEQ ID NO: 358624 - DNA, 735 bp, Cannabis indica
aggtattagaattggtttggggtcatttgggttaaaattggaatttttaggacgattttgggggacttttttctggtctgctgcaccaaccggaattccggttgtaccatccggaattccggatggcgcaggaccagaaaataaggtccttttcgtcttttcagtgcgatttttcccttttaaaaaccctaccaccgaaattttcattccccattcagattttctaacctaaaacagcagccactcctcccttttctctcaaattctctctttcaaaacctcactttcatcttccaataataaaaaaaaagtgtgttcttcatggcttcttcatctaatccctcctcaagagctcacaagagaatggctagtgcaattcaacaaagggaaataagggcaaaagcaaggcaagagcccactctattcttcaatgatgaggatcataacaaatttgtcaatgatttctcttctaggaagattctcaaaggtaaaatttgtgatctctctagccttgattatgttgattttagtcatcactttgataccctaggatggacatctttcattcaaattaatactccattatatcctagactagtccaaggtttttatgcttgcattaaacctaccttagaacctttaggtgttaaaggaacccttagaggagtagcttttgaactcaatgtagcatctctcaatgacatgttaggagcaccaaatagtggcatattactt

SEQ ID NO: 358625 - DNA, 663 bp, Cannabis indica
ttacttttcaattttataattagaaatcaaaattttaaaaacaaaaaaaatcactttcaatatttttttaacagtttttttcttaatcaatcttttggattacgaccagacccggacccaaatcccctccccacggccctggcgctgaacccggcttttgacttgaacccgaatctgaccccgaacctagacccgacttaaataaaatcaaaaaataaaaataaaaatgaactttatagaacacacttttgttttctgtttttaaaattgaaaaacaaaagtggttacagaacgcatttttatttttcaaaaataaattttttaaaaacaaaaattttactttcattttgtgattaaaaaattaaaaaacaaaagtgttaccaaacggcaccatagtttctcatttgagaaggcttatactatagaagttaatggtgtggaggaaccatgtatcaagaccgtacggtacaaacttagtgataagagtaagaaagatattattgattccattgaccctacaactgaatgggactgtaaagaaacaaaaaggtctgactatttcgaggtgacagaaaaatatgctagtggtggaattaaagagcccaccagaaattgaagtagaagagatagtagaaacgatggaactcctttcagactcaaaat

SEQ ID NO: 358626 - DNA, 531 bp, Cannabis indica
gttatttttctgttatttttctgtacacttttttgtttatattttatagtacaccgtaaaaatagtaaaaaaaaaaaaaaaatcacgtaaaaaatataaaatttttacaaaaaataatactttatgtagagttatgtgtaatgtatcgtgtgttatgtaaaatatgaaaaattaaataactttaccagatttgcgagtaggttcaagtccaacacgaaacccaataatctaaaaaatcaaactcaaaacccgcttaaaagatccatcgggttcaacctgacccgcctgcagcactgaacattttttttttcttttaatttttcagtttggccaagcccgatcaaactggactggttcagatcaaactcgatacagatgtccaatcctaattaaaataaataaaactaaattaagatacataaaaatttcttttatctgcctttttctttcttttttttttctctatacgaatgtgtaatctctctctgtttttttttttcctcctgaacaacttattataatttaaaattg

SEQ ID NO: 358627 - DNA, 614 bp, Cannabis indica
acccatctactagcaaaacccattcgaatcataaccgctcttaagaagctccattccactctgtcgtatgccttgctcatatcaagcttgagcgccataaaccctttcttgccttttcttttgcgcttcaagtaatgcatcacctcaaaggctatcattatgttgtcagatataagacgccccggtatgaaggcgctttgggtttcagagatgatatggtcaatgagatcccgcatgcgattagctagcactttagagatgatcttatataggacattacatagtgagattggtctaagatcactcatagcaacaaagttcttcttctttggaatcaagacaagatgggtatcatttagaccagcaggaagtattccagagacaaagaaatctttactaattgtataacatcagtacccacaacttgccaatgatgttgaaagaaaccaggacacataccatcgggaccaggtgctttgtcaggatgcatagagaacaagcagacttaacttcttcatcaccaatcggttgtagcagtgcttcattgtgaaaagcagtaccgaaactctgatattgtctataatctgctgggccgaagtgttggatgattggaa

SEQ ID NO: 358628 - DNA, 909 bp, Cannabis indica
atactataaatgctaaaatataaaaatatgaggggctaaaattctctctagctattatatatgtatccgctagtatttatctttatttttcttattattaatgtatatgaatataataaataaaagtattaaaatattaatattaatataataaataaaaaaatattaatataattatttttcttaaatattaaaatttaaaaaagaaaattatttgaatttaacacaaaaacataaattaaagtaagtaaataaataataaaatatcaatatctaatagtgggaacttaatattgctaaataaataaaagtttgcggattaatttaccaaaatataaaatttggggaccaacttgccaaaacttatatagtttagagactaatttgtcaaaaaataaagtttgagaaccaacttgccaaaatatatataatttagcgacttacggtacaaataagccttaaaaatatggtgggaactcttgatttgatctcataattctgaatctaataaagatatgtattgctatacttattatgtcattatactcctttttctttctttctaaaaattgatgagtttgtgcttaacaatttgcaactacattatgttaattattgtacttgagacgaattataaatattgtagtttttgaattagtacattccattgaggaaagaatttgtaatttgaagatgtaaataaatttaattttctcgaccattcgcttggttggagcacaagtgtcacaacaaatagttagaattggcatttaaatgattgaattaggaaattggcatttttgagaaaatcagatacaaaaggtggtaaaattgcaaaattgcaaaacccaaggcccaatccacttatgtatggccggccacctatatgtatattttaaattgattttt

SEQ ID NO: 358629 - DNA, 630 bp, Cannabis indica
aagtagaagtaccccgacctgccttgcttgggggtagacttcaagtcaaaaaactagctaacttcatggggcgagggcatatcccacttctgggaggcgtagagaacgaacagagcagacagatatttgatgcccttgggagtgaattgggtcggacagaggcagaagaagtctgtcaccttcctaaagtatgagtgcaaaggcaacaatgccccttgcttggcatgagcacccgaccaagcacacattcccttttcagggtttgtgactcgattgttataggcgaaaatgtaacagtctaacttggccaagtaaccgccttgatcaagatcccgtaagcgtgcctcagtgaccttggacggagggctcacccacctggcgcccaatgcactctgcctcctttgaggaaccgcgacaataagttcctcagtggcgtaatccatgccctctaccaggacatcgccgtcaacatcaactggctccccagcttcattgtatcccccaaaatttaggggtgcaacctcctcctcttcctcctcctcggagcgactgcaggacggacatcgctcagctcctatatctcctggacctcagcatccccttcacgatccccctcctcctacacaggtg

SEQ ID NO: 358630 - DNA, 1068 bp, Cannabis indica
catataagataattttaatataatgtttcaaattaaaaggataaagttatcttttaatttaaaatatggcaaatattaaaatatctgatcttataattaaataatatataaatatcaaagaaattaacaaatttttaaaatttgaccataatttaaaaataaataatcaatttttaaatttaaacctcaaaatatcataaaactaataataatctattaaaaattaaatattattaatttaaaattgatatttaagtttaaatctattaaaaataatattttattttgattttagcgtttgaaaattgaaaaaatccaaagttggggaaaaatcccacaaaaatcgctttttggtgttggctgcccaggaggttgcacgtgcatgccacgagaggctgccaaaagccatatccgcgcgtggaaactgggatttgcagggtcctccgccgagtttcctcaacacatgcaaggtactgtatgagcgagctgcaaccaggcgtgacacgttcgtgtctgagcggggggctcatctaggatttcagataattgttttttgaatccgctcgggcataaggggtgttgtcggagtgcctggcgcgattgagcaccatctcgacacccatggcatctgattttcaaaaccccataactttatcaatttttatcggaattgagttctgtaaaaaccaaagttgcttaatttttcacaaggaatccaaataaaatattttcataatgaaaataattaaaatttcgtaaatcacataaaatcaacaaaaaacacataaaccaacatgaacacatccaaatcaacacacaaacaatattcatcgttttaaatccatattacatgaaagtaaatcattaccatgtctctgaggccagttgttgggaatattttaccaggatctatatttaaaagtatgttgaattaacatcgtaaatatgaattctctaaaacaatgaaattaaacacataagggtttaagaaaaccttacatttattgcagcggaatataatgactccttccgtgcaagatctctaacccttgattcctttctatagca

SEQ ID NO: 358631 - DNA, 574 bp, Cannabis indica
ctggacctcagcatccccttcacgatccccctcctcctacacaggtggatcttgttcttcgttgggcatggtggcatgttgggccacgtgaagatcggatgcgttggctttacacgttgtttgtttaatacgagccatcattctttggctggacgggaaggttaaatcaaaatgtctgtcgcttgaagagggcggactagagcaaagacgaggatgatcctcgtgcaaaagttgacgtaggtcctagtcgattttgtgttcgcttccccaaaactcacctagtttcatctacaaaagacaacacacgagatgagtgtttggtcgagatatcgaacattagacaggcaaatatgccgaccaggagtactcaacagattaaagaataaaaatattcaacgaaaagtcaagactcggaagttcgaaattttcttgagtcagggcaaaaaaattcatgaagcttagaataagcaagatgaaagacatgcattatgtagttcaaaaagcaagcattatgaacgatgaagtcgcatgaatcgttacaaaggaaaatcgcagagtttctaaacttagggtt

SEQ ID NO: 358632 - DNA, 729 bp, Cannabis indica
gcatgtaaatgctgatcccttggattaaaggcttagttgaattatcccaaagtcttgcctcttcagtctacgtgtcttaatctggttggtccacgtattttagacaaaatcatgggcaacacataccatttaccaatcgttgatatattgctccagctttttttagtccaaatggcacgactttataacaataaagtcccatgtttgttacaaaacttgtgtgttcttgatcagggatatgcattttaatcttgttatatccagaatatgcatccataaaagtcatcagctcgtatcctgttgttgcatccactaactggtcaatcctgggtagtggaaaacaatcttcggaacatgatttatttaagtctgaaaaatcgatacaagtcctccaagtgtcgttagcttttaggacaagaactggatttgagatccatgagggataaaaggtcttgcgtataaagtcattagttaacaacttttcaacttcttctttgagtgccccttgactttcagatctaatggccaccatttttgtcgttttgctggatagctggggtcgatgtttaaatgatgacaaattacattaggatttatccctatcatatccaggcaaattgatccttgtttgcctttacaaaatctattaattgctattttagtttttctccaaacttttcccaatgtaaacaattttgtgggattatttggatctaaaataacttcttc

SEQ ID NO: 358633 - DNA, 1210 bp, Cannabis indica
aagattaatcttcttgaaagattgtatgggtttagaatgatctcttctctatccttaaataataatgttgataaatttaatgaaataattgtaggtttagctaacattaatcataaggtagacgaagaaagccaagcaatcatattgctcagatcattaccaatgacatatcaagaagtcaaagtagcaatcaaatatggaagggatgtaatctcactggagggtattcacgctgcattaaaatcaaaggactttgaattgcaacttgagaaggagattaggaaagacaaagcctatcatgaaagaggaagtccaaagagaggatcatcaatgaacaaccagtcgccatcaagatcaaagtcaaagatcaaagataatcaacaatgttatcaatgtggaaagattggcaacattaaacgattctacagtcaattgaagacgcaatctggtttcagatccaactacgatgaccagagatgcaacagattccagaatcaatactcaaaatttaatgatcatggaaatcaaagaaaagactttggagtcgtggctgagagcagtggaaatggaagttcaaatggggaattattttctatttcagaaaataataacagtaaagagtggatcctttattcaggatgcacttatcatatgtgtcccaacttagaatctttctttgatcattaagaaaccaataatggtggtagagtactaatgggtaatgatgtttcttgcagggttgtttgaattggtaaggtggctataaggcaaatcaatggtgaagtgaagatttttcataatgtgaggcacattccagaattgaggaggaatttgatatcacttggaacctaggaagatgaaggttatggctataagtccttgaatgggagcctaaggatcacaaaaggttcaatgcttgtgatgaaaggaaagaaagtacatgggttgtatgtactcgagggtgaaactgtacctgtggccgaggcagatacagtaaaaggtttaaaaagtgatatgcagacatggcatcaaagactcagacatatgagtgaacaaggcattagggaattgcagaagaaaggagtcattgaaaagcttcagacatgtccattacaattctgtgagacttttgttgcaacacaagatcaagtttacaacaacaactcaaaacacaaagggagtcctagagtatgtgcatgctgacctttgg

SEQ ID NO: 358634 - DNA, 813 bp, Cannabis indica
atatatacatacaaaatattttcaaagatttttcaaacaaaatgtcataatatatatattatgaatattaaattaaacaacataatagcattaccaatttgataatatatagggcatatatgacatattttaataaaaaaatcatgattatatatgtattgattttaaaaaatataccatgcaattattaatgtacagattatatacgtgatattagtaatattctaatacaaattttattattaatgtacagattatatacgtgatattatataccatgcctaatacaaattttattatttattagtaatattctaatattgattatggtttgaaagcttactcattaaatgttgtacaatttagccataaaataattataaaaaggataaaaatataattatggtaatcattctcattaaatacatccaatataattaaattaagaatttgtatgattttatgtaaaaatgttttcaaatgtgtacattgtaacaattaattttttttgtgcatattttttgtaattatttaagaaaatatatacatttatatataaatatcctatatttaaatactgtttttaatattgtaaattattttaaatttatcaaaattttacaaaattataacttaatacatttttttttttgagtttagaagttaatacttggaaataatatatataatcaatttaataaataataaagtgtagagataaggatatccaattgattttttttttactaatttacaaataggttggtttgatatctatagacaatttattttatttatgttttcctaaaaaaa

SEQ ID NO: 358635 - DNA, 515 bp, Cannabis indica
aaattaagaatcgagaagaaaaatctttacacatgtaatccacaatgatcgtcagttcattatcgtcattagatcttcataatttaagcatatgatatataattttgattatggatgataatcaaaataattttgattatcaatcatgtatatactatatatatgttaagaataaaaaagaaattatatatatttatatcaggggtcggatatggtgcagataatattatctccgcccccgcccctctctcgcttcgggtattgaaattgtcccccaccaccgccccattaaccacgaagacggggaatccccaccccattaggggcgggtcctcgcggttacccattcccgcggtataaatttccatctctacacatcaaagacgaagggatttcgttgtttgatggtggttccaaaatcagattcgtaaagtgtattacaaaggattgtggcaaagatttagagagagtctaaacttgtataagtcaattgtctttgtaattttgagacttta

SEQ ID NO: 358636 - DNA, 619 bp, Cannabis indica
aagggctagagatctagaaccaaatgagtcattatattccgctgcaaccaatgtaaggttttcataaacccttatgtgtttatttcattattttagagaattcacatttaggatgttaattcaacatacttgttagtaaatctagatcctagtaaaatattcccaacatagccatgttcagaagtattgacagtaaaactatatgaactatatgatttgtaacactcaacttcataaatcgattttttagtgttaaaactctctaaactaccattatgttttagtttttacacttctatccaaaaaaatttattaagtgccaagtagactgcccaagtgtacacaagtgtaaatgtgacaaatttttagtggtccacataattttaatgattattttaaacattataaaaaataattaaaaaatatgaaaaaacaataattaaataaatatattttattttatttccttactttctttttcttttcttcttcttcaaccactagagccaaaaccctagacgattttcttcttctttaaccgttgagacatgggtcttctgttacttcttcttcttcttcttcttcttcttcttcttcttcttcttcttctatcacactc

SEQ ID NO: 358637 - DNA, 797 bp, Cannabis indica
gtagctgtacaaagaactaagattgcttagctatgaatgaaatagtcaacaacatattaggaatctttaatcaatagttgttattacggttcactgatgcacgttctttggtgcaagtaatctcagttcagattacggatgtagtatgacatcaaagtgaaagtgttgtatataataaagattatatatgataagaaccgatatgaataaagttgtatttatctaacatgttgtttaatataaagacttaattcatatcagaacgatgagcaatggtagatcaacctaaatcatgagtaatcataaatttttgttcatatcgtttatatataatttacattgagtaggaaaaaatttaccattttaccatttaatgtattttatttttaaaacacttaattaactacttgtaaatgctattttaataaactaatataattactgaaatgagcgcactatatcatttatcgcgttaagccaagctctaaagaaactatcgtttcacttctaataattatagaagctatagattttaaatctataattaacgctcacactcaattgaactactgagtttacaagatgtaaatactgggcaaatcttattggtaagatgtaacgaacaagtcaaagaatctatatagtacaattaagctagaacttaaaaatctcaagattgagatcaatcgacctatgatcaactaagtgacattgacttagaaaagacataaaagtaagtttatgatatcttttctgctgtcaatatcagtccattctgatgtataaccgatacatct

SEQ ID NO: 358638 - DNA, 1309 bp, Cannabis indica
gatcatcgggacaacgaggctgattttgtagctggtcgctaggcgacattattttgtataaacagttgaaactttttgtaaataattttgtaatcgggatcccgagtcttttgtaatattattttctaagtttaattaaaaagcaaaaattttaattaatcacgtttttccataaacctcgttgattagcaacgagctgcacagcatgtttaaaaatcacgtaatacgcctatgttagttagggtgttacaaagatgtaccaggtggtctctaaacttaaatctcttaaaccggtcctaaaagagattaacaaagctggtttttctaatatgcatacggctgtacagagagctaacggtgaattagaaagtgtgcaacaacaactacagcaagaccctcttgatgttgtgaagattgatggagaaatagctgctagagctaagttaattcaagtgcagcagaactatacagcttttttacagcagaaggctaaggtcacttggatacaaaatggtgatttaaatactgcaatttttcatgcaagtattaagcaaagagcaagacaaaatcagattttctccatagaaagcaagcatggcaccagaatcactgatccaaatctaatctcagcagcctttgttgattactataaggaactgctgggaacaagcttgactaacagaagaccagtgctaaagaagcttgtgagcagaggagcggttttgtccacacagcaagctgagaacctgatgatgcaatttactaaagatgaggttaaaggtgcactatttgacattcctgggaacaaagctccaggcccggatggttattcgagtttcttttttcaagattgctgggagatagtgggagatgacatttttcaggcagtgacatcctttctggaatcaggtaatatccttaaagagattaatgctacaatcttgacattagtgcctaaaatgaaatgtcctaacacagttaaagattttagaccaatagcttgttgcaatgtgatttataagattgcaacaaagcttttgtgctctagaatcaaactcattctccctaatttagtctccttgaatcaaggaggcttcattaaagggagattcataggacataatataatgattttccaggatttgctgagacactatgggaggaagaataataagccttcttgtattatcaagttagatctgcagaaggcttatgacactatagaatgggatttcattgaggaaatgttgcagggtctcttatttccatctaagttcattaagctggtcatgaattgtgtgagaacccc

SEQ ID NO: 358639 - DNA, 1200 bp, Cannabis indica
gagttgcaagagagtgggcggtttcctttttgttcatgggctggcggttatttttcaaattttcaaaattggtttccttttcttttctagcttccatatctatttaaaccaatctttgtcatttatctcaccacctacccgaacctagtttcttgtttctcttgttgttactgttcatcttccctttcagatcgaaaatggtgagaactaagaacctagggcataccaaaaagttggtggaaaccgatgcaaccccttccaatgcaccccctgctgcttcatccatgcctcctgctgctacaaaatcaggagattcatcgcttccccagcgtgaatctcaacccgagaagccaaaacgcatccctaagcaagtggctcaaaaatctgtacgcccttatcgaacctggtcttcttcgtcttcatcttcgaaggaatatcctccacctttagcaatccctcctcctgctgcatcagttcctgctaccactccaaccggtccttctactcgaacccaagcccagcaagcatctgtcgagaaagaacttcgtgcatctcgaagtcgtgataaggcagtgactccagccaagaagaagcttaaggccaatcctccttcgattttttcttctttagaagaagaagaaccaacggaagtctcctctgacaaatccgcttctctgcactccgagaaggagattctagaggacatgggagtttcctcaaacagtgaggacactgaactcgagccagagcctcaattgacaaaatctgctccaactcctgctcgttcttctccagcagcaaaggcttctgctactgccaaaggcaagcagcccatgaaggagtcttctcctggtaatgttccttcaactctttctcactgtcctcgattttattatcgtgataatgagcgtgattggaatttgtatgctacccgtaagtttgaaagtgagaggaattatgatttgcttgctcatcgggtctatggaattgttaagtttattcaattccatcaatgggaaaacactctcactgggttcaatgggtacattgcaaacattgttaaggatttctatgctaatctcactgatgattttcttgatgagaattctagactttttcgaagagtatatgttaggggacattggttttcattttctgaaaaaaaaaacaattgctcaagccttgcaacttccagagaat

SEQ ID NO: 358640 - DNA, 475 bp, Cannabis indica
atgcactcaatcactaatggctaaatttggtttctgaagattaggctatggtattttcaaattcaatagaagaaaggaagaggtctcatcaacctagagagaaaactaggtttttagctttggaggcattagttggataatgagaccatagctatccttttatactaatttccataaggttagggttgatttatttagaataaaaaaatgataaaaatagagcaaaataaccaagtggccggccacttaaatggccccacattggtttggtttttgccattttatctatttttcacaaataccattttttgcactttcaaccctataaatgcaaaaactatttatttaacaattgaaataattatcaaataaaattatcatttataatatttattaattagactccacaaagtctcttaattaataaattaaccttaaaataccatttcttcacaattaagccataacatagtga

SEQ ID NO: 358641 - DNA, 1003 bp, Cannabis indica
atagattttcaattatgattatgttatgacatttattcttttactaaactttttgatctaatttatttcatattttaataattaagtttatgggctattgatattttaattatatattgaaaataatttttttcatttcttctttttggtttattttttttcacatttaagtgaatttcaattaattttagttaagtaatgaatatcaaattgttgacaaaagcataaaatatagtaaaaatttttaaaaaataaataagattttgtcccccgaacaatatattacacttgtagaatttggtcatctgatttgttttattaccaaaaattctttcaacctatagaattttttttgaaataattgttggaggaagctactttggtgttatggctgcccaattttttaaaacttattttagtagatttttgtaaataacccctttaaattttagttttatatttcgtttttcttatagtcactctttgtctctatccctgaaagtggtcatgattcatgtatcacaaatataattgtactaggcaaataaaccgcgctttgcgcgattttgtaatttttttgtaaaatattttaagtttttagtaataaaaattttaatatatagctaactaaatattttatttctttttatgcacataaccgaataataatttttatatttatatatattgttaataattttttttactgcccattaaaaaaaatatagtttttgttatgtttaagtatttatgaaataagtactataatgaaatttttacatgaaaaatccattttacacaatttattacaaaattactcacacacgcctatgactacatttttacttacaaagttgcttttattacacaaataccacttagtcatcattccatccatcatcaatcaaatcctactctcttccctctcttttttcattttctatcaatcaatccatcatttcactctctttttttttcttttctttttatttttaattttatt

SEQ ID NO: 358642 - DNA, 700 bp, Cannabis indica
ttcatggaatccatttctgaatccatgtcggttgaccattgtttctgttctggactttccattgcctatttataggttaatggattgtcatcaataccgtcaccaatgaccatattaatttcaccatctaggccataacgagctggttttctagaaaccctcccactatgataaggaggcatgatcttttgaacaggagcattagtggtagttttttgggttgtatcaacttgcattggttcaaccgagggagtgggatcatcctctatttgactaaaagactatggaacattagttggagttatatctgaaagcatttcctctaacactactttgctttgtgggttgaagttcttaatatagtcatcttcaaggaaaggggcatttgtagaaataaatactatcatccttgtgactataaaatagtccacccttagtctctttagaattcctaacaaagatgcaaacttcagttcgcatttctagtttgccatctttctttcttaagatatgagcagggaacccctagattctgtaatgacataaactaagtatacaaccattctataattctaaaggtgtctctgggactgatttagatggaacactatttaaaatgtcagttgcaatctgaatagcatatccccagaaggatgtaggtgttggaaattattttaccaggaccttagatctactcaca

SEQ ID NO: 358643 - DNA, 628 bp, Cannabis indica
tttgttttttaatttttttaatcataaaagtaaaactaacatttttgtttttaaaaatttatttttaaaaaataaaaatatattctgtaaccacttttattttcaattttaaaaacgaaatagaaagtgttttctgtaaattttatttttatttttattttttgattttatttaagtcgagtttgaaatcgggtttggggttggagccgagtccgggagtgaaggtacaagttcggatcagagtccaaatattaattaagaaaaaaaaatattttaaaaaatattgatagtaatttttttatgttttcaaattttttaaaattttaattctcaattaaaaaataaaaaagtgaaaacatttttataaaacaagtttttataaaatattttgatttcaatttcataattttttctaactcatgtttatatatattttttatttttttttcttaagaaaaatttcatataatttttttattttaattctttttggcataatatttaaaaatataatttaaattttgttttgacatgtatatttttttaagtattatgaattagaagaaaaaagttaaaaaaaaaattaagtacaattaaaaatataaattttatataaataaaatattaa

SEQ ID NO: 358644 - DNA, 854 bp, Cannabis indica
aatgatatctttgactctcgcttgccagaatattgtatcagtttgttggaaaccttggaaattatttaagatgtgcttgttttgtattttcacatgtctttgttacttgctaaatgtatgatactttctgaatgtgttatgcatttatgttgaatcatgttgttttctgttattaatgttctagtataatttcaaatctttattgttggtctaacttagcttgttgttttaatgagacaaatcccaaaggatagtcatccattagacaaaaaaaatagtgttagatcttgagagatgaataattgtaaatgcaacatctagttgttcatccaaagatgactatatagactagtgtttacaatatgaaacaatgaagaaatttataaaataagaataactttgactctcgccaaacggaatatcattggattcttattttaatcgaaattatcctttagtttttctcttagctttttcatttagaattttctgacatagtatatcattggatagatggtttataaatcatctgcttatgatatcattctattttcttctatgaaattgaatggcgcagatgactatattgctgatattctatcctgaaatgatataaatccttgatcttagaaatctcctacttataaatgcttactataggcaacctaaacttagtgttagattagcggtggtggtccaagctagaataaatactaatgaatatttggtataaatttaaggctttgactttaaattttagattccaaatagaaattcagtttcctagaatacattgaataatacagtattactttcacaagctattaatatctattttctttcaatggattcaa

SEQ ID NO: 358645 - DNA, 1130 bp, Cannabis indica
aaaaatattaaaattaaaagtaaaacaatttttttcattccaacaaatcttttttttcttcattattttccatttttcttcttcttcatcttcttcatatgatcgacatccaccactaccaacatccaccgaaaccaccaccacctaccaaccaccgtaccatccacaaccaccaccaaaaccaccactactcaccaacaccacttcgtaccctattttttatacctaaatcacacatacacaaaaaaaaaaacaaaacaaaaaacaaataaaaaaaaaactaaatctaagaaccccagatttgaaaatactttcacattcatccaacccagatctgaagccttctctcgcaacgcctccaccgctccttctcttgccagaaaacttggagcaaatctgaaaatgacctctgtaatatcctaagattaagaaaatagataagcaaactctaactagttaactgtgtattagtgtggaattatattattatataatctattatatgtgaattaatctgttttatgacatgttaagaccccgttggtgagccaaggacattttagtaattttgacccaaaagggtaaaactgtggaatttttattatgatgtgcttatggactatattatatagtatacttgtcttgtctttttttttcaggtattttctgataggttggcgcggtatagttacaattgagaatttcgggccgaactcatgaaattcattttcgggattatatattggcattttattgatgtgtgaatattctaaaatttatttgagtatgtatgtgataaaaaaaagactttcttgcccttgatttgtgcttatgctttattaaggccctaagggcattttggtcatttgaccaattgatttactttgcaacaaaatggatttttggcattattggaaattcaatttcttctttgttctatccctagccgaacccccatcaccctctctctttctctcaaattttctttactttgtttatttcttacaattgagtttgtggtattgaagcttgggagttagagctttgtttttgagaaggcttgaggtaaattttcaccctttgattctgaatttaattgctgaagtgtgaagtgttggaaatattttacc

SEQ ID NO: 358646 - DNA, 723 bp, Cannabis indica
ttaaattattaaagttttaaacaatctacatctttctttaaactgatagtttattattatgaactaatttacaaaagtacccacgtggcgcccttacgcattagggcattacagttcctctagtggctttcttgacagatttttctagttcttcgttgaatacctttgccccactgttatcgatcaggttgatctttcatggatgaagaactaggcatggtcgaagtgtactacctttttctatcaatgtcgacctactatcacagactctgcacaaactccataaaaaaatacaatcgactccactaaagcagaactttcttatgtcttccaagttccatacatagtagacaaattcatgaaaaaagcttttaatttttagtgatacatacatcaagcccctaaacaaatattgattcttattttatatccttgaatttatataataaaaaaattaattatataaggtcccgcaacatgacctcctgatgaattaattttaaaaattcagtttgattgtcattattttatatccatgtgtatttaaagtaaaaaaaattaaaaagatgtataaataatatatttatatcttatctatatttataataataagaattaatatatagttttaagttttatatatatatatatatactagtaaaaagctacgtgcgaggcacgtatactaattttatgctaatttttttctatgttatttgaaag

SEQ ID NO: 358647 - DNA, 297 bp, Cannabis indica
attaaatagttagaattgacatttaaatagttgaattagaaaattggcgtttttgagaaaatcatgcagaaaagataaaactacgaaattgcaaaaagtgaggcccaaatccacattactagggccggccacttttagaggaattatcctctgatattttcattattttaatgccaaataattcaaacctagatagttaaggctataaatagatagttaaggcttcaggaaaattacacttttcattcagaaaaacttgagcctctctctctattcttggccgaccactctctctct

SEQ ID NO: 358648 - DNA, 980 bp, Cannabis indica
ttcttctctctcttgttcattgaaatttcgaaattcttagttacctcaatcatagtgaggaatatcgtgaagaaagactttcagcaagaaggagttccagcactaaagagtcagagaaagagatccaggttcagatattgataatgctctgctacataaaggaatcaagggctagatatctgaacggtaggagtcattatattctgctgcacccaatgtgaggtttactaaactttatatgtgttaatttaaccgtttaaaaaagtcaaaattaagggggtaaatcaacatacttgtgagtagatctaagatcctggtaaaataatttcctacaattatagtgtccattgatataatcaattcttgtgattagccctccttatattggtttgtaattagttttagtcaaattaccattttagccttgtaattacttttttatcttaattcctagtggaagtataatttaaatctcatctaaatttgcgcgtaactttccaattccagaattaatacataaaaggaaccaacattcaatctgttaggaaagtcaggattccataattgtagatcatgttctagtcaaccacattattagattcctaaagaagttgtaagaatgatcttctttaagaaactttaatgagtgaatcaaagaaactaataacatgaacatgaacttatggttacttaagagttaggtcgatctactattgatcatcactatgatatgaattaggtgtttatagtttacagtaagtttgaaaaatatatctttattcaaatcgatccttgtcatatataatctctattatatacagaaccttcactaatgtgtcatgctacatcaataactcgaattaagattacttacactaaataacgagcattagtgaaccgcagtagcaaccattgattaaagaatccttaactctaatatgttgttaactgtttattcatgactaagtaatcttaattct

SEQ ID NO: 358649 - DNA, 593 bp, Cannabis indica
atggttgcgggagggtgatcgtacttcaaaatattttcatgccaaaccaacttctagaagacagtcaaacgtgatccagcgcctgaaaaatactgctggagagtgggtgggctgggaaaccgtacttcctgatactgtggtaaattattttcagcatttgtttcatgattcagctactgacttctcttctgtcattaattgcgtccctcatttggtcgctgaagaccaaaatgctttgttgcttgaggaagttacccgtatggaaatcaagaaagctttctttcaaatgcatctcgataaggttcccagtcccaatggaatgatgtggttcggctggttcaagttttctttgctactagtgagtttccttctgttttgaatgaaactagtattgttcttgttccaaaaaagaaaattcctgagcaaatgggtgatcttcggcctatatcgctttgtaatgttctttacaaggtcgtttcaaaagtaattaccaataggatgaagtttattttgccatcagttatctctactaatcaaagtgcatttttgccgggtcgtttaatttccgacaatattatgatctcttatgaggt

SEQ ID NO: 358650 - DNA, 498 bp, Cannabis indica
cccttatgtgtttattttcattaatttagagaattcatatttaagatgttaatacaacatacttattagtaaatcttgatcctagtaaaatattcctaacattacaaactttcctaaaagaaaatcctattttgcagcattagagacaggttctgtagcagcaaaccagatttaaaaaagaaacttgccaaaatagtgtccgaacatgtatttggacttgatacctgctaaaatcagtgtgattgatctgatcttatcaagacacaatcaaactcattaaggagaaataaccatggtcaaagtttccatataaagccaactttccataaaagaatttcttttcttacaagaagtttccaaacttaaaaaaatggatagctaaaataagattctttcctgtgatagaaaaaagcattgaaaacatattataaaggtgagaaaatcagtttattaacacaaagaaatctcaccataaataaaaaatattttgacatctaa

SEQ ID NO: 358651 - DNA, 835 bp, Cannabis indica
taagcttcatggacgcttattcaggctacaatcagatcaaaatgcatccacctgaccaagaacatacaagtttccgaacagatatgggtctctactgctacaaagtcatgtcgtttggtctaaacaatgttggagctacataccaaagattggtaaacaagatgtttaaagatcagatcggtagaaatatggaagtgtacgtggatgacatgctcgtcaatccagaaaggctggcgggcacatagacgacgtggacgaatgtttcaaagtcctcaagaaatacaacatgaaactaaatcccttaaaatgctcctttggagtcagctcgagaaagtttctaggcttcatcgttaatgcctgaggaattgaagaaaatccagaaaaaatccacgccaacctggatatgaactcaccaacaaaaacaaaaaagaggtgcaaagcctaactggttgaatcgccgcacatagaagattcgtgtaaaaatcaacagacaaatgtgttccattcttcaacatcctgcgaggaaataaaaagttcgagtggacagaagaatgttaaagagcttttcaagatctaaaggcacagctcgcaaaacctcccgtactctctaaacctctagacagtgaggagctgggaatatacctagcagttacagagcatgccatgagtgtcgtactgatcagagaagagaacagcgtacaacacctagcctattacattagtaaaagacttatcgaggtcgaaggccgatatccgttgatagagaagctcgcctactgccttattctagcaacaggaagctgaggccttactttaagctcatcctgttcgggtg

SEQ ID NO: 358652 - DNA, 736 bp, Cannabis indica
aaatgccttgctggccgaatgaagaatagtttgcatcaagtaatatccgaggaacaaagtgcctttgtgggggggaggctcatacaagataatgcaataatcgggttcgaaagcctacattgtatgaagactaaaaggttcggcaatggaaggaaaatggctttgaaattggatatgtcaaaggcctacgatagagtggaatggaactttttgagaacaatgatgcgtgggttgggttatgaggaacaatggattaacaagattatgaagtgtgtggagagtgtctccttctcggtactcattaatggggaaaaaataggtaaattccaccaaactaggagtcttcgccaaggtgactcactatccccttacctatttcttctttgcttagaaggtctatcttgccttattcatgaggccaaaagggctggaagaattaatggaatccaatttggaagagaaaggattaaagtttcgcatttgttcttcgctgatgatagctttgtttttcttgatgcaaaggaagaggaatgtgatactatgaagaggatccttcaccaatactccaagctctcgggtcagcaaatcaacctcaagaagtctgaagtaagcatgggcaagaggatatcaactagccaaggacaagctttagctcaacgattgggggttcgactagtctctcaccatgccaagtatttggggcttccgagttttgtgggaagaaggaaacaagagg

SEQ ID NO: 358653 - DNA, 974 bp, Cannabis indica
gtttctcaccatgatgtttcagaaaagacgattcatcacacgatggattgatgcattatctgacccgcgtgcactcatgaaattcgcaatatttggatctcatattggtctcaggttagtccaaatttttatcttttgtttatctaagatatattaatttgaatagaacatgatgttatagtgggtgataaagattctaatattatttattaatttgaataaatatgggttgtttgtaggcagacaagtctcttggtcagaagctagcgtctcgactcaatgtgaggccaagcatttgagaatgaataaggccattgctctaatatttatataattatgaatgcatatgagatgattcaagctccttgtaattattcaataattaaaaaaaaaaatactaacaaattaaattcatacataaacattgttttaatatttttctttcatcatgaatgcactaaatatatcttagagtactacactataaactttcttaagcggatcacaaaatttctcctaattttaatttatttacttattttttctaacaagaagagaaaaaaaaacaaatcatacatgaatacttattcatatgtataagggtatattaagaaatttttactaatgatagcagtaaatgtttctcttatctcaatttttacccacctgatgtggtatgtttaagtagtcaatatcagcgccacatgacactacaactcaccaacaaaaagaccaagtcatctactcagcacttcaaccaacgggaagtcctggcactcaaatgggacaacgaatgacgaaccagccacctcaaggaggctggccgaccatccctggccggccctatggccagcataggcctgccagcttgtggacaacagaaggctggccagcctgcattttgtagatgcatggcttgttgggaatattttactaggatctagatttactaacaagtatgttgaattaacatc

SEQ ID NO: 358654 - DNA, 1115 bp, Cannabis indica
  modified_base (122)..(122): a, c, t, g, unknown or other
ctatttaaatatatattacataatacacacaaattaataaaatattgtatattacattaatattttatttatttttacactttacaattaaatattatattacaaaaagattaaaaaaattntagctacgcactaaattatataatcttagctacatttagctaattattatacattaagataaatttttttgagctatttaactcatttattgaatatgtttttacatttttttttaactctttaacatttttaacttttgtacttattttatattaactattgcaagtgctctaaggtacaacatgaccacatacaaaatccaatgtagactggtacgacttgatccatatattgaaatagactaaaatgataagttttaactagaagtatgaaaagcaagccaacacaataaacccatatttacacttttggctccttccatgcccatccatctcttctttgattctatcctctctactactcaaaggccatagcatatgccccttacacaacaagagttttttttttatcacgtaatgcagatttctttctcatcacttcggtagtttagataatcttagagacaatatgtcagctttagacgcaacaagagtttgaaagttaccacctactagcttagaaagctctaaaactagaggtaaaatggtcataacaaaatacattgtattctaacttttcatatatttatcttgctaattctaagatactagtccgtatctaagtgatataattagtcaaatcgttgattgttactattactgagcatacaacgtgaaaatgctaaaattcaaaaataatatgcatgacacacttggaatctaataaaatctccatgatcgagaaattatacctatttttgacaaggctaattatgatttttgcctcctcgaatttaatatataccaaatcatacctaaacttttaaagtcgttaaaaatgccccctgaattattgagattgttggatttaaggagttttttttttcaattttagtaaaaaaaatccagcatggatgaaagtttaagggccataatttagtacatgtcagagttcgagggacatgatttggtagatatcaaagtctggggagc

SEQ ID NO: 358655 - DNA, 562 bp, Cannabis indica
ttattattatatatttttatttaatttaagtttttttttaaaaggaaataaataaaatagttcagtccattcttaaatcaaacacatgattactttcagcataatccaatcttgtccagtccagtccaatcattttcagtccaatccagtccaatcctgcgtaccaaacgggcccctaaagtacacgtgtcagcatttggttgatagccaaatttcgggtataataattaccccctaaaaagtattttttaattaaaaaggacttttcaaatgtcttcaagggtattatcgtatttttccatttaaaatttgcatgcttagaatttggcagttcaaaactttgaggcatattatttctcatttaatgcttcgactgttcttttcgtgtatagttcccatccgttggattagatttattttgatcgtacggtggccaccttttaggtataaaattgaaattgtgcaaaatttttgccatttttcagcccacaaaccttcaagcttcaaaaaaatctcaaccacccctcttttgaatttgcatgccctctctgtctctcacatt

SEQ ID NO: 358656 - DNA, 549 bp, Cannabis indica
aataaaaatttgaaagttgaacaaatatctggttagatttttaaatttctagattaaataatacttatttaaattcaaataaggtaattttataaaattaattaaataatctaaaatctgaccttaaatttaaaagtaagataaaacaaccaaaattttaaaaataagtgttaacgcaaatttcgttaactaaatttgagcctcacaatagtgatttcacatagaattaatgaaagctatagaaataaaaaatatgaacacaaggttttttgggtggtttttaagttaaaattctgcatagtccacgagttaatctttttagatttcagattatttttcagggcctctcttgtatgattttttttgtcccctttttaatcttgtctgtcattatttataattacatagtggacaattaattacaaagttgactgtaatatgtttacagcaatcatccctaaaatcatgggatttgattacatatcacgtagtgtaaatgcggtttatgatttaaaaatcgtattgctgtgatcttcccgcttttactgg

SEQ ID NO: 358657 - DNA, 988 bp, Cannabis indica
ggatagtttcttgcatggcagcatataattcttctaagttgggtggtggtagagggttctcaccctcaccagcaaccccgagcccaactagctcgcggttacccctactggtccgcctagggtgcataagctatacacctgcagtcacattccaagtaatgacaattctaataagtatctccataaatcataacccttttcacacatttccaataataacacaattcaaatgaacaaacaaccaggtaattcacaaattgtctagtaataaaagcttattgaaacatgaatcaaacgagtctttgcaaccaatgcacctatcaaaccagtctttaggatctaaaaaccttagcgctctgataccatgttgtaacgcccttttcaacagggacgccacgtgtgtgtgcttttttaaaatttatatttactaataggtataattatatcaaaaagtgaggttacttaaaatttttcaatttaaataaacactttactttcattagaatatttactaatctttacggggaccacctattttcaaagtatttacaaaccggctaatcagtgcttttacaacataggtttatacttcaaaatacaatctaaatagaacatcatgttcactgagccgtaacaccgcaactgatatgtacattactgctacaaccttcgaactcatggctgctcagctttagccttccctttacctgcaccataaggcacatgtgagtcatagagtctcagcaagaaaaagtaattaaaataataatcattacaacatttatcgatcaaactttaattaacatacttaagcatttacacaatgttataataataatcctggtacatcataaagtacccttaccactcgttaattatgagctgtatatgtcactatcgttgcccgataaagcaaacgataagtaagaaacctatctgtggtttcaggagtaattactcgtaatggtaatgaccatttctcaaccct

SEQ ID NO: 358658 - DNA, 500 bp, Cannabis indica
aaacgactgtttaaaaacgtcgaaaaaactcatttttgtagtagtgaaatataatattattatattttaatttattttgttaaaatattacaatgacatttttgaattaatagtatataaatctatataatgttaaaagcaaaaaaattgttgtcttccctatatatagctgccttgcgaaggctacttaaaaactcataattttttactaaggctaaaataagacgctccttctctggaaggggcttcccagctaaaaaaaaaaaacaaaacaaaatacatcattccacaccagtaacggaataaggctcaataaaatatttttaaaaatttttttcaaaggttgaagaaaaagattgttatttggtgtttatagcttgccttgtatcattaatgtttgctaagcatgcaatattttagtataacaattatattttcaaagcttttatacaaataacatttttttttatatttagtttttaattttttaaaaaaaaatt

SEQ ID NO: 358659 - DNA, 750 bp, Cannabis indica
ttataaattataagtttaaaatgatattttttttctatatcatttttttttgactaactggaaaatttcattaatcaaagaccaaaacaagctacaacaaggccacacctaaccggccccaacaaccaccagctgcaacaagcagccactacaacagaaggcgtaaaaacatgcctttttcagcttgataaatcttcctattctttaagctatacaacctgtatttaactatttctttaatctcatttacaatcttcaatatagttaaacaactactattatgcacacaaaaattcctatttttccaaagcatgtaaacggtggcagcaaagagcaaattaatcacaccagaaatcttgctagaaaaccagcagcgccacctattgtagtccagcgaccaggcagcaacaccacaccagtcaaagatctgcttcacaacctccctagagacacaacaattgaaaaaaagatgatggtggctctcctcttcactcccacaaactgggcagaaactagagtctaaaatgatgtgaaacttatgaaaattatctctagtaagcaagtgtccatgaaccacctgccataagatgaatctatgcttgggcagagaaaaattacaccaaacagatttgtaatagctatcaatattcagctttaaagttcccaaatacaatctggcagcaataaacttacctttccttacagctgctgtcaccataggcttgctgaaatggcttctcaaatgacaga

SEQ ID NO: 358660 - DNA, 1388 bp, Cannabis indica
ggtggcaaaccctcaccgagattcaaaaaaaaaaagccattcaaagagggagtatcaatagaaacttttatcaataccggcaacaaagataaagggaaggcacgtgagccacaaaagaaattaactctcaaagaaaggaaggaagttaagtattcattcgacgatgatgacgtcgaccaaattttggatgagttattaaaagctaaggtaatacgactccccgagccaaaacgacgcaacaaggttagtacgacaaatgattcaaattattgtcagtaccaccaaattgtgagtcacccactgtcggactaccacatccttaaaaacattatcgaaggcatgatcaagagaaaagagattgagatggattcttctcttggaaaagcggcgacaaatacaacctccttaactgagaatgaccaaataccaaacaatcccacacaaagggacataatttctgtaacatttgaagttgacaaggaagttacaatagatagtgaagaggatttagaaagtacatgacaatcatgtactcggaaaaaacttgcaaaaattccatttcagaacccatctggaaacttcggagtcaaattttgggctagactagatataaaggatcaaaagaataagaaaatgattggaaagaaaaggtcgttccaaaagaaatgaattcgaacaaccaaaatgaaatctagtaactctggaagagtttttaccaaaagagttacaggacaaggcagctggttgtgatgacagtgtgtcggattgctgcatcactttgtggacaaaagaagatcctgaatttacctcacttgaaagtgaaaaggaggtagatgaaattaccttgcaagatatggggcggaaaatttttgcaaagaaggaaaaagaagcgaaagagcttgaaaaagctaaacaagaccttcaaaagtcttcatcttcggccaactaagaattcactaatgacaatcgaagaggcaaaagcactagtgaagatgaaatgatgcgagcaaaatatgatatattggctcatctaaagtgcatccctgctcttttaagcattaatgatgcactgcaaatgtctcctgagcatagaaatgcacttgttgtcgcattgagaagtcttgaatttaatacggagaaaatagagccactgaaacctacatcacttgaaatgcatacctcttgtatgacatgcataacttttgatgataaggatcgtcaattgggagctaccttgcataatcggcctctctatgtaacgggtatggttgctgatattcacgtaagccgcatcatgttggattgtggattgactgtgaatgtactccccttaaaaaccttgagagatgttggcttacacccacgtcaattgtctccatcatcattga

SEQ ID NO: 358661 - DNA, 854 bp, Cannabis indica
gacctacgttctcccgattgagtactaggatcctcctcattgtcatgaggaatttcttgttcatcagtttccggttgcctcccatctgactgtttgttttgattttcagggggtatctcattttccctggttgttcttcccagaaattttcctgtctcctagttcgtgagccacgaggcttacgtcgtggtcttctcactccaggtttaggttgattttgagcattcctcccccgtgccaccctggccaaggctgcatcacgctctaatttatcgtttcgatgttgtgcctcttctagacggcgtcttaggcgacggttttccgtttcataagtaccttcttccatagactaggcacctccacgattgagctcttcatccctcatcccagggttctggccactcccacactgagctctcctcgagcgtgttgcccacgtactaggaccaacgtcgggttgggtcctcatggaacgggtggtccgtctggactgcgagtttgtagaccttctagagcccatgggctctttcccagaatgatgattagtttcctcatgtggggtattaatattttctggattttcaaccatgaaggaggtggtttttcttcaaaagaatggaaggtttttctgagcttttccacaaaagctctcaatgaaagcaccaaactgttaacacaaattttcgttaactaaatttgagcctaactatgacaatctcacacagaaaaaataaaagttataaaataacaagtatgaacacacaagcttttttacgtggttttgcagttaaaattctacatagtccacgagtcaatcttattcagattttttattatttttcaaggcttctttt

SEQ ID NO: 358662 - DNA, 723 bp, Cannabis indica
ggcataaaacccaacagaaagacgggtctctgtgaatgtgtattgattaccgagagttgaacaatcttaccattaagaacaagtatcctttaccttgaattgacgatctttttgatcaactaaaggggaagacagtcttctccaagatcgatcttcgctcaggttatcatcaactaaaaatttgagaggaagatatcctgaaaactgtgttccgtacttggtatggacattatgaatttctagtgatgtcttttggattcactaatgccccgacgacattcattaatctcatgaatccggtattcaaggattacctagacagatgtctgattgtgttcattgatgacatcttggtttattctgattcagaagaggaacatgaattgcatctcagatcagtattacaacaattacgtgatcacaagctgtacgctaagttcaaaaagtgtgaattctggttatctcgtgtctctttcttggggcacatagtggataaagatgggatcatggttgattcggcaaaaattgaagttgttcgggattggccaatgccaaaattggctacgaaagttagaagctttttgggtttagctgagtattatcgtcggttcattgagggtttctcaaagattgttgtacccttaatggagctgactcgaaagaacttgaagtttgtttggactgatcggtgtgagaaaagttttctagagttaaagcagcgct

SEQ ID NO: 358663 - DNA, 1016 bp, Cannabis indica
gagaacctttgaatttcaaaaaaaattgaaatggcaggtttgcattatacaatgtatttccacatgaattccagttagtaacacgtaaatgcccattaagtaatttaaagaatgaaactttgtaattacttaatataaatgattctctatattcataactgaagtttgaagtttacatcagtcatttgagttacatcatttatttattgatagtaggattataaatgttctacgttccagtagttctttattagtgagccatcaagtcgagccaatttatagactccgactccaactactacttcgatgacatatggaccctcctagttcgggttgaacactcctgctgatgcatctctcgtatttgcaaagactcgtcttaacaccaagtctccaacattgaatagtcttttcttgactttttggttgaagtaccttgtgactcggtgttggtatgcggcgttggtaatttgccactcaattcgtttttcctcaagtagatccgaggacaattttaaaagttcctcgttttcttcttgattataaaactctcttctgtgagtcgatatgttcacttcaacaagcagcattgtttccgagccaaatgctaacgagaaaggagtgtgtcccgtggctgttttctcgatagttctgtgggcccagagcacctgaggtagttcgtcaatcaatcagcctctggcagcgtctaacttcttcttgatagtatcttttagggttttattgacgacttccacttgtccatttgcctgaggcttggatactgacaagaagcctttgataattttatttctctcacagaattcagtgaacaagttgccatcaaattggattccattatcaatactatcttcatgggaattccaaacctacagataatgttcttgacgacaaagtcaaggactttcttgcaggttatggagacgaggggcttggcctccgtccatttagtgaagaagtcgactgctaccaccgcatacttagctcttcctcgccca

SEQ ID NO: 358664 - DNA, 715 bp, Cannabis indica
ggagtgcagtacgtagtggtagtggttgatgactttactaagtggactgagcccgaaccactcgcaaccatcacatcaaagaaagttcaagactttattgtgaaggacctaatatgctggtcaatggcaagcagttcgacaaccaatcctttactgatttctgtgcaaaccatggtatcatcaaaaatttctccgcagtggcgcatcctcaggaaaacggtcaagttaaggcagtcaacaaaaccttcaaggatacactaaagaaaaaacttgaagatgccaaaggcaactggccagaagagcttcctgaagtcttatgaacctatgctgctcgtcgaactcgagccaccttcccacagaagactgacttacgatcaaggtaccaatcacatacttcttgcagaatcacttgatgaaatcgaagaaaaacgagcaactgtaaacttaaagttgatggtccatcaacaaaaatagcttggtatttcaacaaacaagtaaaggctcagaaattcttcgtgggagatatggtcttgagatgggtattcctaaacaccaaagacagtacgccaggtgttcttggacctaactgggaagggccatatcaagtggtcgaagttctcgacttcagagcatacaagctaggtaagtatgacgaaaaaatgcaactcattctagtagcaaaatactggaatggagaacatttaagaaaatacta

SEQ ID NO: 358665 - DNA, 1089 bp, Cannabis indica
gagacacgatacctagttatcgaaaaactagttttttttgcctcctaatggcctcgagaaagctaagaccctgtttccaggctcacccaatcaaagtattaaccaaccacccactccgataagttctataaaaaccagaggcgtccgggagacttctcaaatgggctatggagttaagccaatttgatctacattacataccacgcacctccataaaaggacaagcgctagcagacttcatcacggagtgccacgaggcagaggctaacgcaagcatgcccacaatgcaagtcgtggcgcggaaagtatttgtggatggcgcctccaacgaaaatggatccggagcgagggtagcaatgatatcccttgacagactccgactctaggcagccatatagtttgaattcacaacttttaacaatgagagcgaatacgaagccctgatagtagggctgaaattagcaaaagccatgggggccagaagagtagaagtctacagtgattcacaactggtagtaaaccaagtatcgggggaatatcaaatgcgcggagaaaagatggctgtgtacgtagcaatagtccaggaactgttccacgagttcacagactacaaagtagaaagaatactagagaaaggaacgttcacgtagactgtttggctaagttagcctcaaacagcgaaattgagaaactgggggtagtgcctgtggaacgccttgcgaagccaagcattaaagtcaagagtaccatagcaacagttgaaccagagctcaactggatggtccccatcatcgaatacataatgaaaggcgacctgccccaagaaaaggcactatccagaagggtacagtatcaaacgcattgttatgtgatgatggacaacattctctaccgaagaggactcaacatgccgtacctaaggtgtgtatcagaccttgaagccaagaaaattatgctagaggtccacaagggggttctgtggagaccatacaggaggcccaagtctctcgaagaaaatactgagacaagggtatttctggccaactatgaaaaaaacgattgcatagactacgtccaaaaatgtgattc

SEQ ID NO: 358666 - DNA, 587 bp, Cannabis indica
aatgaaggtcagggagctcagatctcccaaatgttcggggtcgaggtagaggtcctaggggcagggcacgtggttggggtgatgctaacccgccacaggttgcccaggctgcccaggatgcctagaattaggaaaacatgtttgcagaaatgcaaactagaatcaatgatcaagaggaaatgattcgtcagttaagacagcagggtgctcctgtagtgcctgttccagaaataccagtagctcgtgcccctgctgcgcaggctgaaccggttgctgcaacgaactggatggaacctctgtatgaaaggttccgtaagcaggcacctccaattttcctgggaggtccagatgttatgatggtcgagcaatggctaactatgatcaccaagatattgaatttcatgggcgtcacaggaaatgatagagtggtctgtgccacttttcaatttcaagaagatgctctagtttggtgggacatgatgtccatgatacatgatgttactacaagacctgtgagaaattccaggagttatttaatgccaagtactacaatgaggcagtcataagtgccaagagaaaagaattca

SEQ ID NO: 358667 - DNA, 422 bp, Cannabis indica
gcttaacttggggtaatctcaaggtgggaaatcttccgggaagttatctcggagagcacacaagtgaggacaaagtacactagaaagattcatattaggatgcagaatcaatagtcgtttcagatattatcaagatggaagggatgtgttcataagtagaaatttacaaggtgttgagataagtaaatattagtgggtgaaaataagaagtgctctagttgaatatctatcagaaataaatacttaactttttactgagttaagtcagtagatcagcttaggagatctcatagaaggaatagaaagacataattacaaattatgtactatgggatcttatgattttgaccgagtagtaacggctggatataccgagttaatatgttgtctattagtgtagacaatgttggaattattttacc

SEQ ID NO: 358668 - DNA, 554 bp, Cannabis indica
aaagttcagggggcaaaaatcctaattagcctatttttttgtattaatttaatacttttatcaaatttttaaataattttatttgatttttttagaattaatagtatattataatttttaaaattaattaattttttttggataaaaattattaaatttagtattagtcaaaattcagagggtaaaagtatcaattcttaacagctaaagtaacagaacctaatacaaggggcatgattatgtaactgttatattttaagattttttttaataagccgtatattttaagggacaagatcaagtagtgttgaaagtttcgagaacgaaattgctaattcttcttctttttttaagaagtgcaaataaaaaagaattattcataaataaagattctttacctaataaatgggcttcattattttttgataatggaattatccaaaaatgactaatttttaatttaattgtcaaaaataacttgtcaagtttcaataacgtttttatttgtttaggcatatttcaatgcccttatttatacatttctctctctctct

SEQ ID NO: 358669 - DNA, 542 bp, Cannabis indica
atcttcaaaaccctcaaactcatggctgaagcgacaccgtcaaactagtgcatgcacattagagcacccgtgagccaaggttcaacaagacagaataataatacaacatgaataattacaacaattacacttcatatagtacgccactgcgtatatactatgccaccgcactttatatcacattattctatatataataatatcactataattaatgtctatgtagcatagacccacgcgttacactcacactagggctgtacatcggtcggtttgggcggtttatcctaaatattttctaacccaatctaaagttcgggttgctaaaatttaagtgcaacccgcccaatttaaaaaaaaaaattctataaaccgaccaacggtttgggcggtttggtcgggttaacccgcccaaaccggccaaatttttttttttttttaagttttaaagttcaaaattaacaaaattttaaaaataaattaaaaataatcacattccaccaaatacaataccatatatatgactttaaaactaataatta

SEQ ID NO: 358670 - DNA, 855 bp, Cannabis indica
tgtggaactagttttgtttttaatttacgtttcagtattttagaaactgatttcttattattttttaattgtattcgctttgagttattacatgttacttgtttgtatttattatgttatataactggtttgagttatttcgtgttatttgtttttattcattataatattgttatagaaccgactctatttaattataactggtttgagttattttatattttaatttttattcattatgttacagaaccggttatatttcaattataactggtttgatttattttgtgttatatatttttattcattatgttagaatcggttctattttttttttttatatctgagacatctacttttggtgacttttccagggacggtaaattttttggcgactattctggtgatgataactttttcagcgacttttccggcaataataacttttcaggtgacttttccggcaccaacgatttttttagcacctatgactttttcggcgaaacttattattacaagttttatcaaatttatttattgttttttcccatattttaaactcttaattccatattttttgcattatttatttatgccacataaaaataaactctattacatttttccacatttataaaaaaaactccaaagtaagggtttttacactatacactattttttttactgtagcacgcgaattattacaattttaatatcttatttaaatactatatactcactttttccaaaaaaaaaagtttatttgcatttttgtttctacaggtctcttaatatatttttgttgtatgaaaaagtataaaaataattgaggtgatgggttatgtcacgtctgtg

SEQ ID NO: 358671 - DNA, 938 bp, Cannabis indica
ccccgcctttgacaaggtctttgccttccaaccctgaagttttgacgttaggttgtctaggataaagttgaagtcaacatctttctgcctagatctgaacaaggggagacccaaatattttaaacacccctcaggataatcaattcctaaagcttccttgatatctctgcgcatgttcaccgaggtattgttactaaagaaaattgtcgtcttgagcttattaacctactggccagaccaagagcagaagttttctatgcagctccagaagccatttgcctcaattaaattggctctacccaccaaaatcaagtcgcccgcaaagaaaatatgggatagaacaggaccacccctttgatggagccccggtcaagggcatcatggattaatcttgagagaatttcagcagcccagataaaaagataagggaagagcgggtctccttggcggagtccacaagaaggattaactctacctacttgacccccattaaggcaaatattgagggtcgtagtagaaatgcattgagaaatcaaatggcggaatttcgtagggataccataacactctagaacatggtcaatgaatttccagctcaacctatcatacgctttaaccaggtcaattttgatggcaaagaaaccctccttacctctcttcctattaaacgagtgaattatctcctgaacaatgacattgttatcatggatatttctccccgggacgaaggcagcttgagttgggcaaattatagaagggagaataggtctaattttgttcgccaaaatcttcgcaatgactttatacaccacattacacagagaaatgggcctgaagtggttggtacgtttagggttctggaccttcgggatgaggacgatgttggtggcattgatccctctatgcatattaccgttctcaaagaagtcaagtaccgc

SEQ ID NO: 358672 - DNA, 569 bp, Cannabis indica
atatcaatggtttatcttaggtctatggatcttaatcctgatatggttatgttcagcttagttgtattatttatgttcttcaaattgttcgtggaaggtaagtaatggttttggcagatatttagatcttgggaacatggtagttcaattaagtgggagcgctgatcatagatatagaatctatagcttctataagtatttaaaagtgaaacaatgatttcctttgagcttcgctgaatagagataaatgatcgaggcctcatttcagtaattatattaatctactgaagtatcatttataggtagttaagtgttttaaggataaaatatattaatgggcagaacggtaaatgtgtcccttttcaatgtagatcatctatagaggatctttgactattaagattgtaacaatggataatcataacatatctatatcgtggtacatatagaacgttttatataattgagagtgctattcaattcgaaatctacagtggcacaaggcgaaattaataagttagataatttacttgtaaaattctagatctacttattgaaagctcggttat

SEQ ID NO: 358673 - DNA, 551 bp, Cannabis indica
acttttccagtgctggtgactttttcagtaaaacttattattacaagttttatcaaatttatttattgttttacaaatatagaatttctacttcttttacaaaagtatggcataaaaagcccatataaatattaaaatattaaaaaaaaactcataatttcataatattatttacttatgccataaaaaagtaaactcttataacttttttttgtgtaatttttttaaatttcaatggtcggtcagagcggaaattcacttttattaagtattgcaattgatatattaaaatcttttacttgcacaattatctgtaattttgtgaacataaatttacacttgatcacaaaatattcaatcaaattcaatcagaatactgaatacacatctatttgtaaaattaatcaattcaatactatcttatataaatacaattaaaatttataaatatataattaatatatttaaaagtttataaatgtacatgtgtattttttaaaatatatatattataaaaattaataaagagattagagttttttttttttttt

SEQ ID NO: 358674 - DNA, 750 bp, Cannabis indica
attttaggatttagggtttaaggtttagggtttagggtttaagggaccgcttcaagtctcggcttcaatttcgggtcacatggtatgatttaaggtttgtgtgttggtctggtccaagtccttgtttgggtctaggtccgtgtttgggttcaggtccgagtcttggtcacaaatccaaactccaacctcatgtttagtctagttcgacttcttgtatggattctggttctggtccgggtctgggtcttggtccaggtccgattccctgatttagacaccgattacgggttgggtctaagcctcgggtcctgggtcccaggtcgaaatgcagatccttgtctagttctagctcatgtcttgggtcatggttcaggtgtcaagtggatgtttgcgtctaggtttgggtcatgggtcctaagtcatggatccaggtcccaaatttagggcaggatcttaggtccgggtccgtgttcagtactggtccttgtcttgggtcttggcttcgtctaggtttgggtcatggttcagttctaaggtccaaggttcgagtatcgggtcccgggtcacagtcccagtcccatgtcccgatcccggtctcggtctcgatctcaggtctcgatcttggtcccaggtcccgagtctcaatcccattcccaattcggcttctagtcctagtcctggttcaggtcttggtcctagttcgggtttatgtcccatacttgatatcggtctaggtccccgtcccgggtt

SEQ ID NO: 358675 - DNA, 617 bp, Cannabis indica
tgggtgcagcagaattaaatgactccttccgttcagatctctagcccttgattcctttctgtagcagagcattatcaagatctgaacctggatctctttctctctttcttgagcccgattctccttcttgttgattggattcttcacaatattacacactatgattgagataccacttgatgtgtgtgggcactcactctatcactcaaggtatgaaaattttaagaagaaaagaagagaacgtagttttggcctaatagaaagaagactcaggaaaaatttctgaaaaagtgaaatttcatcaatctgttaagtgtgagccatcactatctatttataggtaaccacctaggtttaggttagatttatatggcattaaaataatgaaaaaataaactgtagaacctacagtttgtggtcggccatgggtattggattgggccccactttgcaattttgccattttgtcatttttccatcccattttctcaaaaacaccagttttccaatttcaccacttaaattccaattctaactatttaataactaaaaatttaattattaaataatattttcatttattatattttattaattagactagtcaaagtctctta

SEQ ID NO: 358676 - DNA, 1264 bp, Cannabis indica
atctgtcattgcattcaaccataacttagattgaggactcctcatagcttctggtaagtaactggttacagaagcgtctcccacatcataatcatgtcttgcaaatagataaggtagtcatcatgaatagcaggtttgtgagctctctctgatctattaacacaacttcacaccctcaatatcaggattttcatcttgcatatgattctgaggttcatcatgagcttctattggaatttattcaatcacgggatcaatagtaggagcggaagcggaagcaacaggtacagggacataaatacgttcttccctgaacacaatttctcttgacccttgacttgaaccaaattcatcttcaaaatagacagctctatctgattctatcaccctggtggtgtgagaaggacaatagaatctagaacccctcgaaccaatagtgtagcctacaaaatagccactgatagtcttcggatcaagcttcttagattgtgggttatagggccttacttcagctttacatccccaaacatgaaaatgacgcaaactcggtttcttgcctgaccacaattcgtatggtgtctttgggacagacttgctaggcacttgattcaagatataagcagcagtccttaatgcctcaccccataaaaattctggcaagctagaatgaatcaacatacaacgtaccatgtcaagaagtgtgcgattccttctttcagcaattccattttgttggggtgtccctggcattgtatatcttgcatcaataccacattccagcaagtatttggcaaaaggcccggggttccttccagtttcatcataacgcccataatactctccacctctatcagaattgacagctttaatcttctttcccttttgaagctcaacattcgtcttgaaaatcttgaaagcatctaaagattcagatttttcacgaatgagctcaacatgaccatatcgggaaaaatcatcaatgaaggtgataaagtatttataaccacccatagcaggtggaacaaaaggcccacaaatatcagtatgaataagctctaacacatctgcagatctgtctgacttactctttctaaccttggcagtcaactttccttttatacaatcaacacaggcagtaaaatcagaaaaatcaagatcctgaagcacaccatctttcaccaatctctccattctatctctagaaatatggcctaaacgtttgtgccaaagcatggaagatttcaaatctgatcttgcacgttta

SEQ ID NO: 358677 - DNA, 500 bp, Cannabis indica
ttttgaaaaattcaaaataatttataaaatagaaaataatgttcaaacagtctattttacatgcttataaaataaaatagtcaagcgtacaacatagtatttgaacgtaattttcagcgtattaaactttttaaaattttttaaaattttgcaagatatcataaataattataatttacatgaccacgaaaaaagaatttgactaaaaaattatttcaaatacttaaacggatagaaatgtatcggtacatccttgtaaagagatttattatataattttccaaaattttagcctatatcaattatttcattttcatatatcttaaaaaggctacgaactttccttcgaacgtgcgtggaaagttggcgaaaaagaaagaatgaaagaaagaaagaaatcaattggacagctcagtttacgtaaccgtttttgtttctttgaaataacactttttgagaaaaaaaaaaagaaaaaagaaaattctacattattgatgtca

SEQ ID NO: 358678 - DNA, 744 bp, Cannabis indica
atgtcctttttcatgggagcaggcttcttgtacagagctactgactgagtagccatgtagattgtctccaaatcgtcaatcaagacagagaaagtattgaatttggaaggattttctctagggtcctgttcggctttaccaacaaactttcccttttttccattgccttgcctgttattgttgttagaccttttaccgcgtgagcttgaattgcttgggtattggaggtgttgaacggacgttctagtagagaaaacttgtgattggctgggtttaagctcgacttctgctcgctgaatggcctctttgagcttgatgaatccatatgcacgattgaggaagtcactcatagaatctactggtccatctctcttgatgttcttacaaagctcttcgagaacttcgatgcccccagtattgcggttaatttcccttcttcggttaaccgtgcaacttgcattgcctccatcatgaatctactgatataagctcggagaggctctcctgaccttttcctcactttgaccaggtcctctaaatgcaatgggagttggcaagaataagagaattgtgcatggaattctaaggagaaagccttccaacagttaagccttcccggtgtcaacttgtaataccattgttaggcaacttctgagagagtggtaggaaaaactctgcatcacgcatctcctcgtactccttgtaagtccatttgcatttcaaaatatttgagatgtgataagg

SEQ ID NO: 358679 - DNA, 518 bp, Cannabis indica
gggtctgatgcgtcgaccctacacattgctttttggaacgagccatcatcctatggctggacgaaagatttaaggaagaatgcctgtcactcgaagaagatggactagaatgaagacgaggatgatcctcgtggaagagttgaagaagatcctggtcgatttggtgttcgcttccccattactcacatgggttcttctacaaaagacaacacacaagatgagtgtttggtcgggttattgaacattaaaacgggcaaatatgccgacaaggagtactcaatagattaaagaataagaatattcaacgaaaagccaaaactcaagaagtttgaaatttttgcaagttagggcaaaaaatttcatgaagcttagaataagcaagatgaaagacaggaattatgcagttcaaaaagcaagcattacagacgaggaaatcacatgaactgtaacaaagggaaatcgtagagtttctaaacttagggtttcctacatatcttctgcagcaaaatcgaaagtgc

SEQ ID NO: 358680 - DNA, 1280 bp, Cannabis indica
ggggtcgaggagatgtgcggtgtagagtattccctgccacactttcaaaagccgcacaacagtggtatttccagttaccaccaggaaggttcaactcctggaaagccttctcctcggtgtttcatgcacaattctcttcttctcgccaactcccattgcatttagaagacttggtcgaagtgaagcaaagatcaagagagcctctccgagcctacataagcagattcatgacagaggctatgaaagttgcacgattaactgaagaggggaggctggccataatactggggggcatcgaagtgctcagagaactatggaaagatatcaagagaagtgtccctgtagactctatggtgaattttcttgatcgagcaagcgatttcatcaaacttaaagaggccattcaactggcggatgtcgagcttagaccgggccaaccacaggttccctcggtaggggcgtcttctcaaaacccccagtaccctagtagtttaaattcgggcggcaaaagatctaataacaacggcagacaaggcaataggaaaagggaaagttcgcaggcaaaaccaaatagacccctagagaaaatccttctaagttcactactttctctgtctagactgacaacctggagacgatctacatggtgactcagtctgtagtcccgtacaaaaaacgtactcccatgaaaaaggacaaagaaaagcaggacatgtccaaattttgccattttcatggagactatggccatgacactaatgagtgtaacaacatgaagcgagaaattgaattgttgataaggaaaaataaaccgcacgtgcaaaagtatgttaaggctgaccagaatcaacggacagcccaagacctattactgcctccaccaatggacgaacatttacaagttatcattgggggcccacatattgctagagattcgggcaaagctcgggagaggtatgcccaaactttacaacacaaaccaatggaagtggttctagccatagaagaaagaaagccaaaaatgccacaggtaggagaacccactataactttcattgaaaaagatgttgtcaatgttcgcttcccgcacaatgatccattagtcgtggaggtataaataacaaataaaacaaatggcccggacaatgatagataatggagcctcagcaaatattctgttcaaaacaccttatgagaaaatggggctccaactcaaagatctaacccgctgtacccaaccggtatatgatttctccagcgagagtgttgcacctttaggg

SEQ ID NO: 358681 - DNA, 505 bp, Cannabis indica
atcaaaagagtaatgtctaccatcatcatcctaactttacttgtaaatatatagatatataaagctagcaaataattctattcattttttgtcaagttcattgttgattggatccttcagcttctcatcatcctcttcaatggtagcttttttggcaacattcttttcaattgcagaaagatcatcaacatgttcaacaacagtattagcaagcttgtttgtagccagaaaaaggactttctatgccttgcttgtcattggtgagtctgtgatttcatgagagggtagatgtagtcgtttttgaaaaatcgagtttttgcaaatgtcaatgatatatataaaaatataaaactgtatacgcctgcagaagcagaatgtaattctgatactgcagaaaccagttttgcagcaacaaaatagaataggtagaatataaaaataattgcagaaaattaaataacttgacacaagagatttgtacgtggtatcagtgttctcccgaaca

SEQ ID NO: 358682 - DNA, 410 bp, Cannabis indica
tcctaactccactatagattcagaatcacactcttaattatatagaacgctctatatattccaagatatagatacgctattaatatccaatattataatccaaataatcaaagatcttctatagatgatttacatcgagtaggtacaaatttacctttctactcctcaatgtattttatccttaaaacacttagcttcctataaatgatatttgagtaaactaatataattactgaagtaagagctcttccattatctctattaaaccaagctcgaaggaaattacaatttcactattatgtctagataaaagctatagattctgtatctattggtcagctttaacgaacaactctaagaacacaaataacactcttgagattgaacctaaccatttcaggattaagatc

SEQ ID NO: 358683 - DNA, 507 bp, Cannabis indica
aaatttgaaatgaggcattttctttttataaaaattaaaaataaattttaattaaattttgacacaatcaattttaattgttttatctctatgtaataaataattttttgtaacgtaataagctaactcgatcaagtaatatttaattacaaagaacatctctattgaattgctatatattttagccataggcggctcttatagagtgcaagctgggctattgcacagtgccccaaaaaataaagggctccaaaaaaataaagggcataatatatatttttttttaatactcttcaattttttttaatgaacccaactttttaaaggattaacaacttatcattgatcatttctatgtcaattcccaaaatccattttcaattctattattgctttttaaagcaaaaaaaaaaaaaaaaaaaaaacttacaattgttgctatttatttatttttttttacttttttaactaactttcttactatttttttttactttttttacttac

SEQ ID NO: 358684 - DNA, 510 bp, Cannabis indica
ataatcacaagtataaacaaatattaaacttgaaatgcaaagagtttaaggataaaaattgcaaactctcgatttttataaggttcaaataaacaacctacgtcattagtcttcaaagccatggacctaattttaagttcaactatcgagccaagtaaatgggtttcactaacccttacaactgtggaatttttcaccaaacatactacaaaatcacatttttgtgttagttctaacgtccacaaaatttaaaaactggtgcaattaaagagctggaaaatttggtgtcagttatgcactgacccaaggttagcattattttcaaggttatatgcgttaattgtgaaccgacgcaacatctaatcaaaaaaacaaaagaataaaaacacaataccggtaacaggcatcgacccatttatataaaaaaattacctaataaatctaacctatctaacccactactagaaaagtaggctttagaggcagtttttaagtgttggaaattatttt

SEQ ID NO: 358685 - DNA, 969 bp, Cannabis indica
tcaacgagcggaaggtgagcaaaagtccgcccaactcccccaatacccaaataattcaagctcaaatggtaaatgttccaacaacaacaacaggcaatggaatgggaagaaaggaaagttcaccaacaaaaccgagcaagttcttggggagaatcaagaaaagtacactacatttaccatcttgactgaagacgtagaaagtgtttacatggccactcagtcactatccccgtacaagaagctcgtgcccgtgaagaaagatgtcagcaagagagacatgacaaagttttgccgtttgcacggagactacggccacgacagtaacgaatgcaacaacctgaagcgggaaattaaattcctgataaggaaaaacaacctgcatttacagaagtatgtcaagaccaatcagaataagaggaatgacaattacaaagacttgttacctccaccggtagacgggcatctgcaagtcattattgggggaccgcacataggtggagattcgggcaaagcttgggaaaggtatgcccgaacagcgcagcacgagcaagaggaagttatcctaaaattccacgagtaggagggcctaccataaccttcagcgacgaagatgctgtcaaaatcagatttccacacaacaacccgttggtcatagaggtccaaatagctaataagatggtggcaagaacaatgattgataacggtgcctcttccaatatcttgttcaaaaccacttatgaaaagatgggaccccagctcaaggatcaagcctcgtgtctcctgcctgtctatggtttctccggccaaggagtggcacctctaggacaaattcgtctacccctcactgttagacaagctccgacgagcatgactatcattgcgtaattcctggtgttagatgttccttcagcctttaacgtaatgctaggccgaccagccttgtatgacttaaaggttgtcacatcgata

SEQ ID NO: 358686 - DNA, 797 bp, Cannabis indica
ggtatacaatgtccactatgtaattataaatagtgacaaagaagatcaaaaaagggacgaaaaaactcatatgaaagaggccctgaaaaatactcagaaatctgaataaattgactcgtggactatgcataattttaactgcaaaaccacgcaaaaaaatcttgtattcatattctttattttgatagcttttattttttctgtgtgaaatcaatattgtgaggcttaaatttggttaacgaaaatcttcgttaacacattgtattttatgttctctattctcttattattttaaatttattttattttctctattttttatattatttgttaataaaagataattaattaattacaatttaattctttaaatttaatatttatgttattatatttttaataataataatttaatttaataatgtgacttaataatttaatacattaaaattataatttttatttttttatagattataacatattaattaattaatatttttttcttttataatatattaactgtaaattttattttttactaacataaaaaaatgtttctaagtggtatcattgcctagtttttataaaaacaacaatactttaaaatagaggagttcatttgttggaatgcttttttgctctattgtttttaaaaaaatttaagaattttttattttaaaagaattattaggtgctctaatatataataattaaatttaataataaaatattaaaaataataagtaaatataaaagaaatttatttattgccatataaattttacatcatcatc

SEQ ID NO: 358687 - DNA, 1014 bp, Cannabis indica
tgggggtgagcagttgttggagaagcgctaagcaaatcgcaatatcagactctaccatggaggccgagtacatagatgccgctgaggctgctaaggaacttgtttggctaagaaagttcttctcaggacttggtgttgttcctgaaatggaaaaactactggtttaactttgtgacaatactagtgctatagccaatagtaaagagcctcaaggccacaagagaagcaaacacatagagatgaaataccacatcatcagagaatatgtgggaagaggggacgtactggtggagaaagtggagactgaagacaacttagttgatccattcaccagagtattgactgcaactacatttgaaaagcatagattgaatttaggattaattgaaatgtactgatagttttatgttagtgcaagtgggactttgtagggctttgtgccctaaataaaactctatttcaatgtaatcttttctattcaattatcaataaagaaacagatttaatttcattacttgtttcatgtgctatttggttcatgtgatcatttatttacttatttgattaataaattcatccacacccttatcacactgatattcttgtttattgtgttgtcaacacagtggaaagtaaacaagattgtgtgattaaatgtattcctagatttatcactacccagtgtttaactgatatgacaatcaacaacgtagtttacttgcaacttgaataagtgttatgtcctttcgagggcattggttaaagtaagcttgggttggatgtatggagtatgcatcggaagggaccgatattgaacttgaactagatatgataattttaccgtaatatctatttaattcaatatcacctagttgattctagatcaaatgatctcaatcctgagatggttaggttcgatctcaagagtgttatttgtgttctttgattttttagttaagcctaccttttggtctcggtgatatgtacatttttggaacacggtagtacaattga

SEQ ID NO: 358688 - DNA, 631 bp, Cannabis indica
ttttccttgggccagtgtactctctaggaaagttgtgtcacccatgtgagaaagattagcattggagttgtgcagcttgaactcataaaggtcagtcatacctatgctaaattatagacccttcctggccagtcctaggtacgggagcttgccttggctggaaaggcctacacctggttattgtgcttggccggccaagcctacattagacagggtttggccaaccagttttccttcgtggccagccagataaagggcagggtttggccacttgcaatcctcctatggctggcaaaacctacaggaagcaaggtctggccacccatgactcctcagttgactaatgtggtttgtgtgttgataggaggtagatcataccaattgcaagagtttggtggatctaggtgtctaaagtgatctgcttcacttcttaaatagcaattttgggtgtttcaacttgctcctggtccttgtcagttgaagattgacctttggcacgtcactccccttggggaggaagtgatgtactcttgccaaccaagggggctcctcattggttgtataatgggggtgttgttgagccagagatccttggctggccccccgtgccgctagttgctgagatttggtt

SEQ ID NO: 358689 - DNA, 610 bp, Cannabis indica
tttttttatttttattttagtaaaatatgaccacatagaatattttttagtgaccttacaattttgtagtagtactttgctaagacattttgtctttttatttttaagtaagcctttttgttttttttttcttaattattgggtcactatattatcactctagtgctatcattatttttaagtacttctactattttctgtgttgtgactctgttttaccatgtaaaaaaaaattataatagggtaaatactattttggatcttgtattttacaaaagttattaattggaccctctattttattgaatgacaaaatggacattgtatttttcaaattgataaaaatactctaagcttaatttttgataactttttttgttattataaccaacttgaagataattactaatacgaaaagattaaacaactttgttataacgcctttagattaaattattattaaattttattttgacaaaaaatcagttcagagtcctatttgtactattttaaaaaatagaaggtccattttgtcatttaataaaatagaagaatataattgttaacttttgcaaaacatagagttcaaaataatatttattataatata

SEQ ID NO: 358690 - DNA, 475 bp, Cannabis indica
ccctcaagattttccatcttcacatgcagagtttctaactcaacctttaatacttcctcctgcttctctttcttgctcacttcaagcctcagcttcgcattcatatctagaagctcttgcttatcattttgcaacttgttactttgaccttttatagctccaatcacctgctcaagtgtctgtttttccgattcaagctccacaccagaatctctgaattgctgcagaaatgttgaaaccacagagttttcaaccaacaatcgttgctcctcgtcctcgcttcttgaaagagaactttttaagttgcgaatattatccagaatacaccgcactgatacgtgctcttgatcaaatttcttgtcatttccatgatctggttcaatttggagagccttaagcaccagtttaatccccaatttcaacttttcaatttcactaaccaagaactctgcttccacctgctgctcaaggtttt

SEQ ID NO: 358691 - DNA, 1062 bp, Cannabis indica
aaggtgtaagtatacctatctctgattatcatgctagtctaagtccagtgaactgacaaattaggaaattaaacttttttgaacatataattatgattatatttcactgtgctgacaacactataatcatgtacaaatacatatgttctaaacctaatagaatttataatcatgaaataaatcatgtgaaccatgcaacataaaatgatttttgatctttattaactagtaaatttgattatattgaaatgagttttatttagggcacaaaacccaacaaacagttaccgaagttccaagtttcctcggtctagcaggctattatcggcattttgtagaaggattttcgaagattgcaatgtcgttatctgagttaaccaggaagaatcaacggtttgtatggtcagataagtgtgagaaaagtttccaagagttgaaacaacggctgattacaactccaattttagccttgccatctgatcaagagaaatttgtggtctattgcgatgcatctaggcagggtttgggatgtgtgctgatgcaagcgggcaaagttatagcttacgcttcacaacaactgaaagattatgagcagcgctatccaactcatgacctagaacttgctgtagtggtgtttgccctgaagatttggtgacactactgatatggtgaacgaagtgagatttatactgaccacaaaagtctcaagtactttttcactcataaagatttgaacatgagacaaatgcggtggttagagttagtgaaagactatgattgtgaaatcctgtatcaccccgggaaggcaaatgttgtggcagatgccttgaatcggaaaggacctaatcagactttcaatatggtgatgatttcttctcaattagcctcagatatgtctagggaaaatattgaatttgtgattgagaaattgcataatctgacacttcagtcaaacttgttggaaaggattaaaatggcacaactaaaggaccctgaactgcttaaaactcaaggagatgtcttagtagacaaagctaaggacttttcgatctctagcagtgg

SEQ ID NO: 358692 - DNA, 849 bp, Cannabis indica
cgtctcctgaagcgagaagcaccaaccccctcccctatataaggggtcacccatgacttgggagggggatccgcaagcagaaacacttagtaaaataaacacatctcattctttgcaattaagaccttgttcttgacttttgcaactcagatcaataaaactcaagtggagtaggctattaccgacatccggggccgaacctctttaaattctggtgtcttttatttatatttattgcaaatttcggtgttattaactgcatttactattgtgattttggtttaaatctcatttattacgactctgcgtcggttggctaaaaatccagtcaatattttggtgctttcattgagagctttagccaaaatctttaagtttttcaccggaaaaaatagtattaacccgaagatctcaagagtgacctgacggagagatggaaagtgcccaccaagttccatcagcaagcaactcgcaagaaaaaatggagaacgacccccgcatcccgggaacggcggcacggccaccaccggtcaaactccagccgctagacagacaactactgggcgtaccaccaacgctacttccgcaggaggcgacgctactgatgacgccaccggaagaggtaatactagaaagtttgtcccacctactgacggtgcgggccaagctcagactaactgcggccctggcatctttacgccgcggaacgaaccccatgttgacatcgacagaattgaccccgagatggatcagctacgagaaacaataggccagatgcaaggccagttccaaactgtccaccagagcgaaatcaagctcgagtggctttgactgaaagtctcgctaacc

SEQ ID NO: 358693 - DNA, 440 bp, Cannabis indica
tgtgcgttttgctgcagcaaaacattagcaagtctttagcaaaaaatctcaggtttacaagaactccaataaagtgcacaaagctcttccaaactttatgcactcaatccttggacctgttcaaacatattcctatgccaatcaagctcgagaataccattacaagcacaactctcaaatgttacacaaggatataacatattcctatgttatctctaatctaatctaataagattaagatcttgtgtcatccaagctaagtccattacatttaacctttccagaattaaatataactcaataacaagttattggtggccaatcaatagcaagaaactaacataaagcacacttgaatgaacatgagaatttttactaaatatttgcataagaaaattactaaactaaaacataggattcttcaacaattcaaaccataa

SEQ ID NO: 358694 - DNA, 486 bp, Cannabis indica
aaatgtgatcaaatttgtttttggacttgacaacaatatcatcaacacacacctctatgctttcatgtatcatgtcatggaatattgccgtcattgctctttgatatgtggcaccagcatttttcaggccaaacggcatgacagtgtagtagaagtttccgaacggggttcgaaatgccgttttctctgcatcttccttggccatctgatttggttgtacccgctaaacccatccataaaagaaaacatttcacaatttgctgttgcatcgactaacgtatcaagatttggcaaaggaaagtcaccttttggtcaggctttattaagatccctttattaagatcccgataatcaacgcaaattcttattttccttcttcatcttcactggaacaatgttagctagccatattggatgcttgcacgtacgaataaatcctgctcttaataacttttcaattttttgccttgatctgaagttgtactt

SEQ ID NO: 358695 - DNA, 526 bp, Cannabis indica
gcacaatgatattacgattgttgtatgatatcatgatcgattgatgaaaaaagttctggagtccaccacttatcgagtggtaaacattattagggtttgtttgacttttataagacaagataatgtacgtcttaaaaatgatacaatgacataaatcaatttatagtgcctttagttttatgtcaaaatcagattaatgcatatgtagtaaatggctgctaaaaataattaattaatgctcttaatatattaatattattctacatatttttaccatttttagtgaaagatgagtgatatcgtcaacctcttattgcaaccttttagttaacctctacgctcaaaaacacatgtcgaaatattttttcaattttttttttcacggtggtgttcgttatgcttacaacatcattcctgtaaatttttgaaaaatttcaaatagtttacaatgccgaaaatatatttgaagtattttgaacgcgtgtggtaaactggaatatcaggaattctgttttcggtactgtaa

SEQ ID NO: 358696 - DNA, 1248 bp, Cannabis indica
gttgacgtcagatgtcaacctagctagcgctggaacttgaactgcctttagtaaaacagtcataactcactcaattttcatttgaatgatgcgattcaacttgcattttgaatctatttaagccctctatcaagtcatgtctcacactagtcaaaattttgaagctatcatcgccaaaattcacctccaagggagttacaaaaataagctccgagtaactcgcagcgggacccaccagacataaaaaaacagcaatcattactataagctaattttcactgttggatcatcatcaacggtggaaaacactttatttatattttatctcctatttttttgggtctcattcacctataaaaggagagctgccttaattcatttttacattaagaaaactaacctaaaggtgagagcttctctctctagactttttcggtctagagtttaaagtttttgatacttaaataattgttataattaccatctcgtgagaataaaaactcaaagtagatatagctccattactatcgcgacacagggggttaactactataaattggtgtgtctctcattaattgctctataacttgtcatattctcgccaatctagcaagcggatgtggcttagaaggctagtctagatttctgagtcaatacacatacactataatttttttttttttttttgatatagttaatcacaccaattttgcaaaataaaaaaatagctcatgcatcttttatattagggttgtacataaatttttgaaaactgtccaacccgcctaaactaaatcgaaaaacttgacaaaaatataacttgtccaatctttatattgggtgggttgaaaataatatcaacccatctaattaacacaaattaacccgaccaacccgattaaaagaatttattttctactataatatataatatgtataatgtatagtatttaaataatatggttataaaaaagaaaaatattaatgtatagtgtaatgtaaaataaagttaaaaaaaagttagaattttgatgttgtaatttaataagaaagtataaacttaggcagttacttataccttatagaaagagagagaggtatggaagagggcacagctttacagctaaagaaagagaagggcagagtaggcatataaatatggtatatttataatgtgatatcacgggaaatagtatttgacatagaaaagtaggcagctttttcatgtactagtatctgatgcagcgt

SEQ ID NO: 358697 - DNA, 674 bp, Cannabis indica
atttttataatttttttgttgttgttgtttttatgtgtgtgtgttttttgaaattgtccattttttataagctcaatataatacaagagtaatttgtgacgcaagtatttaagttttaactctcaattgttgataaaaacctaaatttaattttttacgttaataataaccaagttatatttctagaactccataagtatttgaccgttaagtgtgaagttataatccatttgtcattttcttattagtacatttaattaatttttaaataaaaaataaaaaaaaaatgatctggactaatcagggactgtcacgtggccattgacttaacacttaacgaccatgtacctacaaaaattctgaaaatataacttaaatattattaccgtaaaaaaataaacttaaatatttataccaatgtaatacaacttctgtaacgtccccgcttcaagcctccattggacccttacacccacagaataatgactcttatacacgggtacgtcactctggacgcttcatggactgatgactgaccctacagaccaacacgagtgtttccagcatgctttgtcctcactcgcatgcttcttgggaaaacttcccaggaggtcacccatcctgaaattactcccaagtcaagctcgcttaactgtggagttctttcgtgatgg

SEQ ID NO: 358698 - DNA, 997 bp, Cannabis indica
cttctaagactcagttaattgattttaattaatcaattataattccaaattagactatgtcttatttatgaatttttgctaagttatggctttattgtgaagaattacgattttagggtttatttgttatttaatagactttgtggagtctaattaataaataatataaatgaaaattttatttgataattaattataattattaaataactaattttgacatttataggattgaaattggaaaatatggcatttgtaaaattatagataaatggttaagaaaaatggcaaaaatataattagtgtaggacccacatatggtcggccacttacctcttatttttgctattattttatcattttttattccatataattcaatcctaaacctaagtgaattagtataaaaagaaaagaatagtctcataatctaactaatgactctgaacctagtttacatcttgtcagacaactagagagttttgaaacttcttcttcttcttcctaatttcgaaatccaagagtgttcatcacataaaattttgagccttagtacttgagtgcatgcccacccttagcaagttagtcctcaatcattgtgtgtaagactatgaagaatccaaacaactgaaggagaatttggctcagatcttgataatactctgtgacaataatgaataagggttagagatctgagtgaaaggagtcatttaattctgctgcaatcaatgtaaggttactcaaactttatacgtgtttaaattttattgttttagaaattcatatataggatgttaaaaacatacttgttagtaaatctaagtcctggtaaaatataatccaacaaggattccccaacagttctgttgaggtcgaggacctaaccgatgggataattttttgagtgaatggccagatattgaaacattacattgagagtgtgagccttgttgaagaggtccttcttgaggacctagattatacactctgaatgttt

SEQ ID NO: 358699 - DNA, 633 bp, Cannabis indica
acctggcggctctgataccaaaattgtaacaccctattaatttaggcgtgctactgtgctttttaaaattattgtgcaacctttgctaagcaaatggtttatcaaaagtgataaaatttaaactttaataaataaacatataatgtattacatttataaaatctgggatcccgtatctacattttacaactttacataatcaaaagatgttgcacagcgaccacaaaattgggagccctagttgtcccgaaaatccaacactctaggtcgaactgtcttgatatatacaatcttcatcaagctcaaaactcactgtcgttcaacaatagcttcgcctttacctgcacataacatagcatctgtgagtcgacagactcagtaagaaaaccataaaatataaatatataaccgacctacgactaagtgcccatacacctatcaataagtcataaaccatgcaaacatgtataattgagtcttgaacgttcttgaccatattataattgaccataataccacatgcactcagtactctagtcatagtagtgttggtagcatcaatccatattataagtacaactagccttaataccacatgcactagtaactccggtgtactagtgttggtagcac

SEQ ID NO: 358700 - DNA, 559 bp, Cannabis indica
aagagctatcgcccaagagaatagacaacaactccaaaggaacactattaatagggaacatacgttcagctagagacaaagagtgtcgggcaataaaatgcgcggcacgattcgcagaacgtttgacgaaacataaagtaacatttaacaaacttctaaggattaacttgcactcttccacaatataaccgaacccagaattaagcttctcattgcttcgaatagcatccacacaaaccagactatcggattcaacaacagcgtgggaatagttatgatttttcaaccaacttaaagcttctctaatgcccaaagcttctgcaatttcgggtgcaactttaccttgctttgcaccagcaagaacggagatcaattcaccttcagtatttcgaatcacacagccgaatccatgcttgagatcttgttcaaaaagagctgcatcgacgttcaacttgatgcctacagtcggtttggtccagacctctgagccatcaccaggtttcggaggcgacaatggaggtaagttacttctaccttgagccttcaaaaactggtgcaa

SEQ ID NO: 358701 - DNA, 628 bp, Cannabis indica
tttacattgaatcatgttattttctatcattaatgttgtagtatgaatttcaaatcttcattgttggtttaagttagtttgttatttcaatgggataaatcgcaaaagattgtcatccgctagataaacataatagtgttagatctcgacagataaatatttgtaaatgaaatatctagttgtacatttaaagatgacaacttagactagtgtttacaatgtgaaacaatgaagaaattaataaaagaagaatgactttgactctcgcctaaatgggacatcgttggattcttattttgatcgacattatcctttagtttttcctcttagctttttcattaagaatttgctcagatagtatatcattggataaaaaagattataaattatttgcttatgatgtcattctattttcttatataaaaattgaatggcccaaatgactatattccagacattctatccgaaaataatataaattcttgatcttagaaatctcctacttgtatatgcttactattggcaacttaaacttagagttagattagtagtggtggtccaagaaagaatcatgactcaaggaatatttggtataaatttaagtctttgactttaaattttagattcc

SEQ ID NO: 358702 - DNA, 509 bp, Cannabis indica
atcaaaagttgactaaagaacaaaaggtaagggtgttttggcgcattcctctcaagatgaactctcttctagccatgcgctacaacatacatttgaaccacttataaaagcataaaaagccaaaacttggaagagaatcaattcttctagccgtgggtctaaaggtgtgtccaaactgtcttctttccccattagtcctaagttatcacatgttatggttgctaatgctaaatacaagttgagtcctaaggtcaatggtggtgggaagcggaaaatggatatagagggtgctaccgaaggtgtgaaaaaggaagattgggtgagcaagtggacatggttccggaagatatgaatatgttattcgccaagagccatgagtctgctatgttggaacgcccgaggattggggaatcccggtgcgttgactgccttgcaaacgattgttcgtaagttttccccaagtttagttttttgtctgaaactaaactttatggtggttgggcggaagg

SEQ ID NO: 358703 - DNA, 501 bp, Cannabis indica
tttcaaaagtttcaccataaaggcaacaattagcgcaacgagtacgcgcaacaagcttacgtaagtttacattttaattcgtttctatttatttctttcaatttattttgtattaaaattaaccatttcatttatttgtttgttttaggagaaaatggttgaaatagtggaaactcaaccagcacccactgaagatcagcttgatgagactgctgtcgatcctacacagtacccccgagacttacctgttatgatgcaagtactcggggagcgatcttgacatttaagaggctttggccatctccctagactgaagggagttagggccaaaagagcacatgccacgcattcttcggccccaccgactgttacaatggaacagtacgaggctttacagaaaaagtggatgaagtagagtagacaactcaatatgcgaggtagaaatatgaaacacaacaactctacctcagacgattccaagattagtttgagtatctttct

SEQ ID NO: 358704 - DNA, 644 bp, Cannabis indica
gagatctcatttcagtaattatattagtttattgaaatatcatatatatgtagctaagtgtttaaaggataaaatatattgaacggtagaacggtaaatttgtccctattcaatgtagatcatctatagaggatccttgaatattaggattgtaacaatagataatcatgacgtatctatatcgtgatacatatagatcgagcgttctatataagcgagattgtattcagtaccaagttctatagtggttcaatgaggaattaataagttgagaatttacttagtgaattctagatctactttttgaaagctcggttatatgggcccatggtcccctcactagttgagataatattgcttgtagactcagttaattaattttaattaatcaattataattctaaaattaaactatgtcttatttatgaattttcactaagcaagggcttaattgagaagaaaagaggttttgggatcaatttattaattaagagactttgtatggtctaattaataaattacataaatgaaaattttatttagtaattaattataattatgaaataaatagtttttgcatttataggttggaattggaaaatatggtattattgaaaagaagaataagtggttggaataaagtg

SEQ ID NO: 358705 - DNA, 689 bp, Cannabis indica
agagacatgaccaagttttgtcatttcatggagattaaagccacgacatcaatgaatgcaacaatctgaagtgggaaattaaattcctaatatggaaaataacccgcatgtacagaagtatgcaaaggccgatcagaatctgaggggtgataacaaccaagacttgcaacctccaccagtagatgggcatctacaagtcattattggaggtctgcacatagctggagattcaagcaaagctcgggagaggtatgctcgaacagtacagcacgaggaagaagaagtaatcctggtcgtagaagagaggaagcctaaaatcccacaggcaggagagcccaccataactttcaatgacgaagattctatcaaaattagattttcgcacaacgacccattggtcgtggaggtccagatagccaacaaaattgttgccagaactatgatagataatggagcctcctccaacatcttattcaagaccacatatcaaaagatggggctccaactcaaagatctaacccctttccttctgcccgtatatggtttctctggccaaggagttgcacctctagggcaaatttgcctacccctcactattgggcaagctccaatgaggataactataatggcataatttctggtattggacgttccatcaacctttaatgtcatgctaggccaacgagctt

SEQ ID NO: 358706 - DNA, 933 bp, Cannabis indica
ttaaatttaaggacttttgtctaatttcattcaattttactgtttcaggtactaaatcatgctccctagactttgatatctaccaaattatgcccctcaaacttttatatgtattaaatcatgcccctgaatttttatccatgtttagaatttttttactaaaattagataaaagtccttaaatttaacaatgttaatagttcagggggaatttttaacggctaaaaaagttcagggagcatgatttagtacatgtcaaagttcggggaaaaaaattgctaattaacctaaatattaatagtgatattacatttttaggcacttatatagatgtgtagaataatagttctcatttgttgctattagtacactgaatgctacagattttttatttatttttttttttttgaaaatcagcgttttatagatagaatcactaaaaagttagatctcgtagtcgttacactggataaagtctggtataaaagagatgtattatgactttagtaaaggacaaagaagccttattcttaggccaccaccattgagtaaggacatgtattaagaaaataaaaacaaagataaagaaaaggaaattatggttagtataggactttgggattatttttatattgatttgtctctcattattattgtaacctttttttgataacttaaagaacatgcaccaaattacattattaaagttagtttagttataaagaaacaaatataaccaccaccaccccaccactaataacatcaaattcaatgtacatcaataataataaataagaatgaaaaaaaaaaaacgaaaaaatgttaattggtgcttattataacactctgatatgaatctgtaaccgcttgtgaaaatgatgtcttcaaattttttttgttaattttaatttttttaatttgtatttctaatta

SEQ ID NO: 358707 - DNA, 611 bp, Cannabis indica
gaaaatcacacagttgtgattgggatttaatttttcacttcaagcattcggagggatcttcacgtcgttcgttgattcacagattacagagccgtttgtcgtcccaaaaagtaatttcaaacagtaagtgcctttccttcctattttcttacatgcttttcatgttgtgtttctgggtttgatttctaatttcttagtcagcacctttgttacctcattcgattttagcacctttagggtagaatttattctgggtaaatattagggtttaggtcgaatgtaggttttttgaaattctccaatttaccaacttctggtttgatgaatttttttccaggaatggggattgcttcctccttacagcaatgtcccaatctttttcagaagtttattattgagaagaattagaaatagagtgtcctactgaacttgatgtcccatataaacccagaactctaggacccaaatccaaattagaggtaaatgatgcaagaattagagttaaacagtaattttgttaactaaattaaagcctatttcgtgatcaattggcacagaaataatagaagtataggaaatagaaagaacacaaagcttttttacgtggtttt

SEQ ID NO: 358708 - DNA, 505 bp, Cannabis indica
tattgggcaccactggtgcccaacacctttcatgggtgacaccttgcgattggtttgcgatattccctaaatcttatttttttaagttatatgagacatactacttaattacactaataatattatgataccaatgagggctgtcttttagcatttctcataactaaaatatcacatttataaatacatatatatattttaattaaaatatttaaaaaaataataattatttttttaaaacatattaattaataataacagaacaaactaataaattttctccaatgtcttaaaaatgttaaaaaatgtttaaaatttgagatgaaatttaagattaagatttagatttgggaaatacaatagtgacgactacaagtgtattacggtaatgacaaaagatgagaaacagtgatgacaacgagtgagatacggtgattaaaataagtgagatacaatgagacaacatgtaacaccctaactaccataagcgtattacgtgattttt

SEQ ID NO: 358709 - DNA, 962 bp, Cannabis indica
ttaattgtttgtgaactgctgtacttggcgggttttttgttctaatcagtaactggacttcttggtttgctacagcccagtctattttggaaaattgacattgtttttaattgcattttaatcttatttcaattttccttttgggaaattataaataaaacaaaactaacaagttacatgatccattatttaggcatattggtacattgtatttaacagtttccatatagtacattaaacaaattgactatagcacatataaagaaatgatgttatataggaagagatgtacatataggaaattaagtgtagggatgtcatgaatacactgaaatgttagacgattgcaatgaattattcaaagtctttgtcttccaacattttagtgttttgaatgtttgttaatttaagttattttatcttgtgtaatagatttttacaatggtgtatgaacggaagaggggtgctgctgcagagaaaaaggatgcagctgagataaaaaagaaggattcgaaggaagcttgggcgtaatattagtgagttatttgtggctgttattttcgcgctaatattgtctggttttgaaaataatatttgtaattccgttcctttatttaattgatgcaaccaagccaatttcaaagcttatgttgctgcacattcagataaatcaaaagcagatgtgagtgacttggagtgtgtgatggatcttttattttttatcttttatttagcgtactttacttaataatcgagagtcttaatattacaagtccttggtagttttaaggagcaatttaagctggttagggaggaagagattgagaagtgggcttcatttgaagttgaggcttccccctcgaaggttggtgttagagggaaagggaagaagttaaaggagacattatctgctgagccagggattgagaacaatgaaggggtaggggatgttcaagtttctg

SEQ ID NO: 358710 - DNA, 706 bp, Cannabis indica
agcgaataataaaagagaaattctaatttctatgcataatttagctactaaattaaaaaaaatatataaaaaaatacttcttcttacactatattaaaaatatatttatataaaatttttttaagtcaaactcaattttttttatcacttttttgcccatttttttttatttatttcttattttttttttcaattgatgtaccgattccaacccatataatgtaaaaatgagaaattttttttaattaaattaattataaaacttaattttttttaatattatttatttatgagtaatacctgttaaaaatacacctgtatataatagatgtagacaatcataggtaacagttcaatgaacgttgaagctattataaatgttttcacattaggtatttgatcaaactatatatcccccaacaagatctgtaaaagtcttaataccaaatagtgaattttattatattattattttgagatgtatgcataaactctactgtgaaaatggtgtgtaactctcattcttatttctaatttccccacaatccaaatatgtcaagctgaaaaagttatgttgtggttgatgatggatggttcacctaattcctctccacttgaacattacaactttattcatatatattaataaaaactaatattaattaattcattccattatataaaaatatataaaataaaaaggggt

SEQ ID NO: 358711 - DNA, 948 bp, Cannabis indica
accatgaatcagtcggtaatggatactatagtctgacattcgaagaaaatgaccaaacacagtttttgaaaacatttttaattgggttttagtaagaatttttttaatatcttcaataacagagtaataaccagaggttataactctggaacggtagtattctgatcgggtgtacttggattctcaatcctataaaaaaacaaaagaaaacaccactaaacacaaaattaaaacaacagtaaaaaaataaaaaataacaaaaacaagcataaaaaatattagaactaaaataatgaaattacacacctctacaacctttttcccaattatgtcctcaaacagataagttgattgaacaatcttcactagagatttaccctttccctaaagtttaacaaaacaaaactaaagcaacaacaagacacacattcaaacaaatagaaaaccataaaataggagaaccgacaaaaaagaacatgcaaaaagaagaaaaaaaaaatatacagacaaatgaaaaatatgatcaacatgcaaaaaatcctaaaacaacacaagatcaatagaaaaataccttatcagatttgggagactttacaaactcttgctccaactcaaaatcaaagtcggagttctccacaacaggtcgagggcgttttgatctagtgttcttcgaagtaccaacacctagttttcttttagcgagaactggaaaagtagggctaggaggattatctttcaaactcttcttgcccattgatgctcgagttttatttttctaaggttgttttgggggctttttagctacaggggaggaagatgatcgggtaacaactattgttaatgagaaaaaaataatatttatagaagaataccaacaaaaatgggagggaaatgtagagggaaattttagataaacataataactgaacaaatttgaaaaaaaaaaaa

SEQ ID NO: 358712 - DNA, 553 bp, Cannabis indica
ttaatcgtgtgccttcccaaccgcacgattggtaggtgatcgcgcctgttccacatgcattttggcctataaaagccatcattctcccttcattcggttactttcagaccttcaccaagtttcttcaaattttccagagagaaagaaaccctcgaactagaaaaccctcaaacaccataagtttcttactgaccttccttcgccattgtccgtcaacatttcaccgtcgatcaacaacaacgcccaattccaaagctttatgtaaatttttcgcatcccgtactttattgtttgtgttcattgcatgcttcactgttcatctgctttttctgggtttgatgtgaattttctgggaattttcgtcttgagtttctgtgtaatacgttggatttcccttttctggtgtttgagtttacttttattttgcgtattattattttttttttcaagggtcccatcttttctttatgtaatgaccttcaagggttcagagaggactttgtctttctcggtcttttaccctttttttttctttacttattcgtaatgtcac

SEQ ID NO: 358713 - DNA, 734 bp, Cannabis indica
tgatatatatgtatattatagtaaatatgttatatatatagggaaatttcattaattgaccttaataaaataccccatttcaaaatttataccctctactaatttgtacaaattaattccattattttctaaaactacccaaaatacccttttattttaatttttcctccctagcagtctaactcttactcttctcactctctctctcttcgtccttctctcttcgtcttcctctctgtcaaccgacccacccccacaccacacgaatttctcaaccgacccacccccacgactaaacccagacgccaacgacgacaacccacccccacgactaaacccacccacagacgcgaccgacgacgacgacccaccccatgactaaacccacagacgctaccgaggacgacgactcacccccacgacgcgaccgaactacccacgacgacccaaagagatccacattgatccacgacgacccacggcgacccacgaccaccacgaccacaaccacgaaccaccgagggaacccgaagtcaaactttgccactactattataaccgtaagttcttttctcattaaaaattagaattttcatatatttggatgcgaatttctgtatgttcttcagattagattattttagattttgtattcgaatttggatggttttctgcatgttcatcagttgtgtctatttgtttaaacaatgttatcgatgagatatcgataggat

SEQ ID NO: 358714 - DNA, 585 bp, Cannabis indica
tacggtaaatttatcatatctaatccaagttcaatatcgatcccttccaatgcatattgcatgcattcaacacaagctttactttaaccaatgccctagaaaggacataacacttatccaaggtgcaagtaaactatgttatagattatcatatcagttaaaccctgtgtactgataaatctaggaatacatttaatcacataaccttgattactttccaccgtgttgacgacacaataaacaagaatatcaatgtgataaggacttggatgaatttataaatcaaataaacatataaatgatcacatgaaccaaatgatatactaaataactaataaaaataattatatttctttattgataattgaatttaaaagattatattgaaatataattttatttaggtcacaaagctcaatacatccaaggtggcactaggcgtcattttaggcacccatgttgatgtatgtaaacatcgagcattttggcatattttccaagaatgtctgtaatgaccgcttgattttattttgagaattagcagataattagagtttaattttagaattagacttttaattatta

SEQ ID NO: 358715 - DNA, 687 bp, Cannabis indica
aaaaaaatttgacgacaatgaagtttttttggttaaaatattattatagataaccttcgttttgttatagataacttttctaaaaaaaaataagaattattatttaaactatttaattaaaatgttgataattaattgataaatttaattttttaaaataaaataacataaagtggaataaggaaaataaatattttttctttaaaaatattaattattaatattgtaaattaactaattaataatatctaaaaaaagaataaaaaaaaaaaaaaaaaaaaactacttcaaatatgtgacaaataaataaaaacttgaaaaaaaaaaaattaaaaaaaaaattcaaacaaatatcaaccaaaatatcagttcataaatagatatataattaatgaaagaaaacataattatttacatgtgtaaaaatatattacaaatatttttttttattaatacacatataaaaaaacacgtaaaagtaaattaaaattctaaataaaaattcataaataaaaaaaaacgcctctttatgttgtaatgctacatatttatatttatacaaccaaaataattaaatttatattaggactcaaaatgcctcacttatcaagtttaatttttcaaactaaaaaataacatataaatttgctctgtgttcgatattaggtataaaattttaataattat

SEQ ID NO: 358716 - DNA, 366 bp, Cannabis indica
ctataaataatttcataatttaaacataaataactgataatttccaaattaactaagcgggctttacaagaccccaacccacataacccatcggaccccaacccacataaccccacgagaaagaccatcggaccccaacccacataacccatcggaccccatcggaccctaccaatgtacaccatcggatgccatcggacaaataggaggtccgatgtcttcaacctcagatctgaaaaaacccaaaaccgaccgaggaaaaactaaccttcgacatattcgcgactgcaggtggtggtcgtgcgtggtcgggcgctgctgttggtggtggtgggtggtcgtcgcgttggaaattattttaccagg

SEQ ID NO: 358717 - DNA, 523 bp, Cannabis indica
aaaaaagaagaatcctgaaaccctgagcagtaagtctccagtattgcagttgatctctctactctgtatctgaactctcacttttttctctctgaaattgcttgctggaatcaactctcttctgctctttatataggcattcaggtcctaaaaaggtagaaaaccgcacatgtttaaattccattcggatttgaatttttgggaaacctcacgccagatattttttctgttgtcaaagaggcgggccgcgacatgctaaacccatgccgcggcccgtgtggccatgtgggggtgtttccttcgatttcttcaggtaggcgggccgtggcatgctaaaaccatgtcgcggcccgtgtggctctttgctctcaattccacacgtttttatctttttttcgaatttgattctgatattttccaccaggatattttcatgtgatattttatcatttttctgctaatattttctaactcttcatctattttaaaaatctgtaaaattaaaagataaaaagcgtaaaaa

SEQ ID NO: 358718 - DNA, 539 bp, Cannabis indica
ttatttaattttttatttaaatatgtaaaaagtgaaaaataaaatagattacagtgagaaccaatacgataagaaagaagagagggacttaatggcagatggtttgaaactgtgtttgaagattacgttcattgcctggttgtccatcactccttgcccaagaccacgtccatcatctctttccagaagacgatctacacttttactccaaaacctctacactccaccatttatcgtgcgccaaccatctatatatttatgtggttttggttgatttagactttgttgacaatggataatgattctatataacccaccattgaagaaataaaggcaagtgcaattgtattcatttctgtcattctttgggaatttttaatgtttggtcactaaggaaaagatatttatggagtattgggattagatcatatgtctttacagtgtcattctgtatgctttcaatgaagggttcttcattgcagggaattgtaggaactctcattggatgatcaaatcaaaattattgttttagcttgtct

SEQ ID NO: 358719 - DNA, 1784 bp, Cannabis indica
aactcagaccaaaacctggactgagaccttgattaggactgggacctgagacctaagactttaacctggactaggtttggcaccgggacctggacctcacctggtcctaaaccctcacaagatcctgacactcgcaacccagaccacgatctagacccttaaaaggacccgaccctaaaccccgacaaagatagggatcgcgacctggacctgaacacggaccgcgaccaggactaaaacaaagactcatgacctgaacccgaaattggaaccagactaggacctaggaaccggacttggatggggctcctagaccagggacctaggccccgaaacccagaccatgatgtaaattctagacttgaacctgaaccaggacctgacctggacccgggaatctgaagtcagacccagacccagacatgaaacctaccccggacctcaactaggagaggaacctggacaagaacacataccaggacccggacccggacctagaccgggatcgatacccggacccaaacctgaacgcagacgcaaacttgcaccaggacctacgtcccaaaacctgtaaaccaggacccgtgactcgggacctggacctagaaccacactcgtaccaaaactcagactcaaaccaaagactaggactcagaccgagattaggactgggacccagacccggactacaaccgagacctgaacatagactaagaatagaacccatactggaaccaggaccgggaatgggaccttggacctgatactcggacctaagacctgagaatagaactgtgaccaaggccgagacccgtccaagacccgagacaaggactagtaccaaacacggactaggacctacactgggactgggaccctaacccagacaaggacctaagaccttaacctgaattggggacacagacccatgacccaggacccaagacctaaaccttgatttgagacccaaactgcgacccaagacatgagctagatcttgaccacgatctggatttggacctgggatccaggagccaagaccagaagcttggacccgaccccatagtcggtgtttaaatttggaaattggaccttgacccgaacccagacccaaatcaaaactcctacccgtactagaactcgaactagactcgacatgtggtggtgtttgaatttgggaccaagactcagacctgaaccagaatacgaacctagacccagacacggactcaaacccagacccacacctgaaccttaaatcgtaccctgtcacccgaaattggaatcggaactggaagcgaacccttaaaccctaaaccctaaaccttaaaccttaaatcctaaactcgttacacttacccctaaaccctaagccctaaatccataaacactaaacctaaatccctaaaccctaacctggacacgggcctagacccatacccataccgagatcagaacctagaagccagacccagacccgaattgagacccgaaccgagacccaatttaggacttgaacccggacccaaacccagaccagaacctggtcttggacctagaccttgactaggacccggatcgggacctcaacccggacccgaacagggacctggacgacctggacccgaatagggacctggacttcgaccaacacccggacccagactcaaacttgaactcgtactaggacctagacttgcaccaaaactcgagatccaaacccgaatatgaatttggaccttgaccgggaccaaggatccgaacctagatgggggacctgggcc

SEQ ID NO: 358720 - DNA, 908 bp, Cannabis indica
agtgattttaatcactttgtcaaaaaaaaaaaaaaaaattatgacgtacaagctagatgcaatattcactgcacgatcaaccaagaatgagtgggctctacaagtttaagaaaatgagtgttgataaaataattaattcaatctaatatgcacaatccaatttgcagaatatttgtgtagtaatttaatttaatttttgcatcttaaattttaatatgtaccaaatcatgctcttgaactttttttgccgttaaaaattctccttgaattattgagattattagatttaaagacttttatctaatttcattcaattttattatttcagtgattgtttatgtattaaactatattccccagactttaatatctaccaaatcatgtccctcgaattttgatatgtattaaatcatgcttcctgaactttatccatgttataacttttttactaaaattagacaaaagtccttaaattcaacaatctcaatagttcaaggggtattcttaacaaccttaagaatttaaggaacataatttagtacatgtcaaagttcaggggaaaaattcataattagtctttaatttaatatacacatatttatataaatttttagagaagttatatatacaattaatacttcaatagaaaataaataataatttaaaaatctaatacatataatataaatatatttaagaacttaatagatcaaatctatatttctttctacatataatatatgaataatcaccatttatacttatacagtagaacctctatccaagaatacacttgggaccaactaaattatattctaattgggatgttataactaaatagagttacactagaaaaaaaattaaaaaaatcaaaaaaatatcaatgtaacaataataacaataaacaa

SEQ ID NO: 358721 - DNA, 638 bp, Cannabis indica
gaatttatcatttcaattttttttgacgatttattatattataaacataagaaattattatataaaaaaatataaattgacattttatttacaaaaatactttcatgagataaagtcaacatttatactttttatgtaattttaattaccaaaataccatttacacaatcaaacgatagttgcagagtggttgctgcgtggttgcgcggtggctgcatcagacgaaggtttcaatcagacgatggttgcagggtggttgctaggtggttggccgaaggttgcatcagacgaaggtttcaatcagacgaaagtttctgggtggttgcatggtggttggccgaaggtttcaatcagccaaataactgttagcaaaatgtttatgcaactgtaatgcaacattataaatcagaacagtgttttcacgtacgtaactctatctacatgtctctttatgatttaatatgaacaaattcaccattaaaaatttaaaaaacaacaaaaatgcactatgataaacattttactatagtattgatgtatttttttttggattatacttgagttggattgttagggaactctaattcaactttttgagatgtctttcatgaatctaaaaattgaagtcaggacattag

SEQ ID NO: 358722 - DNA, 1048 bp, Cannabis indica
tatctcaatcatagtgtggaagactgtgaagaatccaatcaacaagaaggagaatcgggctcaagaaagagagaaagagatccatgttcagatcttgataatgctttgctacagaaaggaatcaagggctagagatctgaacagaaggagtcattatattccggtgcaatcaatgtaaggtttcttaaactttatatgtgtttattttcattattttagagaattcatattaggatgttaagcaacatacatggtagtaaatctagatcctggtaaaatatttccaacagggtgctcatgctaaacaaggggcattgctgcctttgcacctgtactttaggaaggtggcagacttcttctgtctctgtccgacccaattcactcccaagggcatcaagtatttgtctaccctgttcattctctacgccatccagaaatgggatatgccttctccccatgaacttagctggtttttttttatttgaagtctactcccaaggaaggcaggtcgggatacttctacttctctcagccagactacaagtggttgacgggcaccggggcaaggccattagcaaaattgggcattttttatgagtattacatggtggatggcatgggaaccaccttcactcggttccagtagatccatatatatcaccacccacccttcacacttgctcttagggatagagctgaaaggcttgctcatctgtcgggtgctgcccggaatatcactatgttgacctccgaggacaaatttgtggaatataggctctacccgaaggatttccttcctcagcctgtgaaggagaaaaagaggatatctggtgctggctgggctgagggagctcatcgggagaatgaactcattcaacttaagtgtgaggctaagttgaagcgaggtgcggggggaaaaactgtatgctcaggagcattctgaccaggaagacgaggctgaggaggagtaggtgactctgctcaaaaggaggaagaagcttcttttcgagcacaggcctgttgaacatgcaattcgaatcagggagcc

SEQ ID NO: 358723 - DNA, 572 bp, Cannabis indica
gtttactttccaaagtgttgatgacacaataaacaggatcaagtatgtgaaaagggtttcatatgaatttataaatcaaatagacaagcaattgataacctaaaccaaaacatacacaaatgaatgaaaaatacttctgtttctttattgatgttgagtaaaatggattacattgaaatggagttttatttagggcataaaacccaacaaacactgcctggcctctccctggttacccctcacagtccctatcctagcttcccgagtagggaactttagacacaagtgcctgatcgacgtaacttcgccgaagtccaccatggccggttggccaaggattgcgttataagcagtcgggcagtctaccaccacgaatgtgcagtatttaaaagtgatttggggtgtgtctgagcacaaggtgactgacaaccttacttttcccattgggataagtggtgtccaattgaatcccgtgagctgggaaccacttggcgagagatctcggtctgtgaggcctcttaccgttaaggcttctttaaataacaaattcacagaactcccattgtcaatta

SEQ ID NO: 358724 - DNA, 1049 bp, Cannabis indica
tgctaatttagaggtagaagagataatcaagtttaatacaggaggggagggagatccctcaacatcaaatggatagattcttatgttggaatgtaagggggattaatggccagcagaagcataatgagattaagcagttgatcttctcgaaaggtgctggtttcgttagcctccttgaaacaaaggtacaaaataaaaatatgggaactttatatactagccttttttctggttggtgctttacaaacaataatccttggttggataaaggaagaataattgttgcgtggcagcctagtgtttactctgtggatattcgatattgctcgagccaacttatacattgctatgtagaatctcagcaacaagtggggaaattttatgtgtcattagtctatgcatttaatgatgtgaacaagagagcagaattatgggaagaattagaggaagtagctagcaaagtggatgagccatggttactaatgggtgatttcaatgagatattgaatgcaaatgaaaggattgggaaaagaactcataatgtaccctcccagaggtttcgggatagtatggagaagtgcagaatgatggatttaaaatcttcagggtcttttttcacatggaacaacaagcagaaaccagaggaacggatcttttcaaagattgatagagccatggtgaatatgcagtggttgaatgtatttccttgctctgaagccgtttttttacctgaaatgatttttgaccatagtcctatcttagtctctatttatgaggataagaactttgggaaaaaaccatttaggtactataacatgtggaagatggctcctgagtatgacaatctggttgctaaggcttgggaagaggagagtagtggtacaagaatgtttcgaattgtccataagctgaggagactaaaagcagtattaaaacaactgaacaagaaggatttctctgatattcataaggcagaaacagcagcacgaattcacttagcagagattcaaggtgaattgaatcagaacccggggaatgagaatctgatg

SEQ ID NO: 358725 - DNA, 1265 bp, Cannabis indica
gtaagagaattggctataaataaaaaaaaagagagagataagaaaaatctgggtggaattcataacggcctagtcaattcgaggaggaaggcgagggccaatgcgcgcctccagcattggcgtcaagcttcttcttcttctcccggaattttgcaatcatctccgggggtttggggtagaagtcaatcttgatattctggccatttgttgaccaggccatgtaaacgccattgtcgaagcgcttaatgcatcgtctgcaagagacgggagaaaggaactcatctttcttagccttcttcaaggcttggtctttaaagtccttgagcttctttagctcgacggccaagtttgccctggactgcaagtccgcctggtgcgcttcctctaaggacatcaccttggcggccatttcatctaaggcttcccttgcctcccggagctcgcgcctggccttggcaaccgcctcgccctccgccctcagctcctcccggtgcttggcctccagcctgtccctccgaaggacctcctcccggatcatcgcctccgcttgggcttccctctgcttggccgcttcctcgaacttggccttgggaagggcctcccgccgctcagcatcctcctgagatgtccgccttttagcagacaaatcctgcagggtcttcatgacttcgtctatgcccccaaattcagacaggacgaagccgtgattgattaggttcttggaaaggcggccggcctctgcagcaagctggaaaaggatgcaagagtgagtaaagtccttaagaaaaataatgagggaaaacgtaaactacgaaatacttaccacagtcaaggagtggctgagatcctgaacttgaaaattggagttcaaggatgcacaagcagcgaaccgcttgggcgtgcactgggctagctgagacacaaaatcgccggtcatcttcgcggcaaaaggagccaaggtgggcccgaggaaacgattgaaccagtccgacagggggtccaagtttagatcccacgggttttggtagttctaatcgttaagggtattttgcatttcatctcgcaaaaccctcctcaaggcctccacatcggcatgcccccgggagtactcgtccatggcgtagttatgcttggctatccagagctcctgcctcgcctcatctccgggaatcagagtcagcactatgttgggaggcactgtatattcctccgcctcggaagggatcaggtccaggggccggagtgtccactctccgctgccgttt

SEQ ID NO: 358726 - DNA, 482 bp, Cannabis indica
atatatatatatattcttttggaagggctggaagccccttatcatcataagtggctcccttagtatattcaataaaacacttaattaaatttttttaatgcactaaaatttgtattttcaaacaaaataaatcaaatattcagtgaaattcctaaaaaattattatttaatattgtgaacttaatccacctttaaaatcttatttaaattattgactcttatttaaactaaaattggcacttcctcattatattgtgcttgtgttgacaccaacacaaaattaaggtaaatataaacatgaaaaatttattaaatgtgtctaaaactcaaactctaattaaaatacgaacgattaattaataggccacatgaacgcaataacacgattatcgaaacaaacatgaattattttaaaaaaaaatatatgaatcaacagtaattaattcatgttgttgtcgacactcttatgagatgaaactatt

SEQ ID NO: 358727 - DNA, 670 bp, Cannabis indica
tttatatacacagaagttcccaatgacatacaccaacgacattgtacgacattgtcgttggtggcagactgatcactgcaacgtgtcagtctgtcaccaacgacaatgtcgttgggagctgaaataggagggaaatttaccgccttttacaacgaccatttttcaaaaataatcaaaacctttcccaacgaccatgtcgttattgaagtattttcaataacgacattgtcgtcatcaaatcgttattgatgattaatttttttttttttaaaaaaataataatagttgtcccaacgacagataagtgtcgttattgatagtaccatttttaatgaggattttttggcgttggtaatagtggcgttggtataaaccattattgttgtagtgttggtttatttgaattgaatagttagttaaaaagttagttaggatattagttatgtagtaatgagttgtcccagttgttagtaaattagtttatttgtaatcccagctactataagtagctaattacacattgttataactaatttcaattcattcaatacaattgttagttctctttccaattcattcattttttttattttaagcgtttatatattacacaatatatacatataacttggaacttaaattctgcacttccaacagacatgacaccctc

SEQ ID NO: 358728 - DNA, 668 bp, Cannabis indica
aaaaattggtccatggctgatgataatcaacggcaatagtcatcctgaacagactaatcgtcgtcctgggaaagcaccaacaggttcacaaaggccacccacttcatcaaaaacacgatcaagaagaagccaaggtggtcatgatcaaaacctagaaagatggaatgaggaaatcaatactagtactgattatgtacccaaaagtgaggatgcctatgatccccctagttatgtaccattagtagaattggaaaatcgacaactccggcaatgctttgtcaagtctaaccagctaaacgttgagttagaaagagaggcagtcgcaacctcgccgactcaaggaaacaatgcacagaactaacatgattctggagtgagaaggccacgaggtagacctcgagattcaagaaccaggaggcaagaaacatatcaagaaaatccccagaacacccaagaggtacaacctagggaactagggatgttccaagagacgaacaatagaataatcaagcacctcgtcaaggagtacctcaaagaccccagggtttcacgaattaggggaatgaaaacaatgacgtgccagagtcttctcgtagaaatgagaacataaggtaacccagaagtagggaagaagagatctctcgaaataataagagaaatcctgggac

SEQ ID NO: 358729 - DNA, 879 bp, Cannabis indica
tacagcgatagtggatagaacggttgatggcggtgattcacgatgacgattgaggctgaaaggcccaagaatttttcttccctatgttatttttttaggttaacttgtagttagatttattaacttgttaatacttgaactaattttacaatgtttgtgtaatatttaattacttttatgaaatgaaattaagtattttagccaattttaaaattagtttaaataatatttaatttaccttttaaaaaataaatatgtaatttaaatttaaattaaataaaataatatataaattaataaatatataatttaaataaattatatataattaaaaaaactaaaaaacgctcatatatgacgtcgattattagctaggaacagacgctatatgtaccctatggcatcgattcctagctaataaccgacgtcatagggtatatacgacgtcgagtttttaaaaccctttagttttaccctgttcagtgtcggtagcgaatttcgccaaaacagacgctgaaagaactaaaaaaccgcatctaaagaagatttttgtagtagtgcccttttgattttttttttaacaaacctttctcttatgtattataaatgtagcttcttcttctaaattatgttttgctcactgcaacatctatatatcatatatgtaataagtgtaacgttaaatacacaataggaatgaataataatgatatctgctaataaaatatgcatctaataaattttgcacactcaggtgcatgacagattttaggggtgttcatcaaatcgcttaaattgttcaaaccgcccgcaccgtaccacaccgcaaaaaaaatatagtttgaaattctttgcggtgcagtcacggtttgaattttt

SEQ ID NO: 358730 - DNA, 971 bp, Cannabis indica
gacttccttgatcgtgctggttttatcaagcttgaagaagacattcagcgagcagaggttgagcaaaaacctagccaaccaaaagttccttctgttggaacatccgaccagctcccccagtaccctagaagttcaaactcgagtggtaaacggtccaataacaacaataggcaaggaaagggaaaaaaaaaaggaaagttcgctggcaaaaccgaacaagctcccagggagaatactaccaagtttactgctttctccgtcctgacagcaggtatagaaactgtttacatggctactcagtcattagctccgtacaagaagcccgcacccataaaaaaagacgtgagcaagagagatatgaccaagttttgtcgttttcatggagattatggccatgacaccaactaatgcaaaaatttaaagggggaaattgaatttctgataagataaaataatccgcacatgcaaaagtatgtcaaggctgatcaaaatcaaaggggcaataacgaccaagatttactaccaccaccagtagatggacatctctaagtcattattgcaagtccgcgcatagctggagattcaggcaaagcccgagaaaggtatgcccgaacagtatagcatgagcaaaaagaggtagttctggccgtcgaagaaagaaaaccaaaaataccacgagcaggggagcccaccataacatttagtgatgaagatgatgtcaagattagtttctcgcacaacgacccgttggttgtggaagtccagatagccaacaagatggtggcccgaaccatgatagattatggagcctctacgaaaatcttattcaaaacaccgtatgaaaagatggggctccaactcaaagacctaaccccctgtctccagcccgtgtatggtttctccagccaaaatgttgcacctctagggcgaattcgcctacccctcactgttgggcaagctccgaggagcat

SEQ ID NO: 358731 - DNA, 329 bp, Cannabis indica
gcataaaacccaacaggttgttgaactagtatccccagtctcttgcacaccaggtgcgaattcatccacaggagtcgtcacaccatgacccgtagttggtggctgtccgggatttatagctggcggaacccttgggtttcccgggttctgcagtgcaagatccaccacttgtggattcactggatcaaccacgcccctacgagtctgtaccaccatcatacttgtgattaaatgtgaaataatgagcgatccagaacataggtaaagtatacagattaaaagaatctaaatcctaatatgcttaggctcaacttaggagtactattcat

SEQ ID NO: 358732 - DNA, 613 bp, Cannabis indica
acatgccttcccataaactaggcgataaggagacatgcctaggggagttttaaatgtcgtacggtaggcccaaagtgagtcatctaaccgctgggaccaatcttttctgctaggattcaccactttttcaagaattcccttgatttctctattggaaatttcagcttgcccgttggtctgtgggtgataagcggtggctattttgtgcttcacactatacttggctaaaagggcagccaagactttgttcacaaagtgtgtcccttcatcactaatcaacgctctcggtgtcccgaatcttgtgaagacattcttatgcaaaaatttcatcaccaccttggcatcatttgttggactagctattgcttccacccatttggaaacataatctacggccaccaatatgtaaagattcccaaaagatggagggaatggccccataaagtcaatgccccaaacatcaaacaattcaacctccaaaatgcaatttagtggcatttcattccttgctgaaatatttcccactctttggcagcgatcacatctttgaacaaagtcatgggcatccttgaatattgaaggccaataataccccgattgaaaaactttggca

SEQ ID NO: 358733 - DNA, 554 bp, Cannabis indica
ttttcttttcttcttctaaacttctaaagccgaaatattctagggttagggttcttatggttctaatcttttcaagcttcttccttttctattttaatggtagcagctaggtttttttttctagggtttatatatttttcttttctcttcttatttttctttacagcttctactcgaaacaagaacaacccaaaaacacaaagcttctacccgaaactaaacccagaaaacactccctttaatctcggccaaaaacacatcaaatccgaaaaacaccaagaacaccaaacacacacaaatacaaatataaacaatatagggattaagatgagaaatacaaagagtattaatagtaaagatggagacaccacatttgatctcggagttcgcccaaaataaccggctacttctccgtcaagccatcatcttgatttcattaatctcaacaggttacaacttcgatttacaactttatatttctctctgtttttctctcttttgatactaacaaaactctctttcttttacatgaacatctctaggaggagctcaca

SEQ ID NO: 358734 - DNA, 710 bp, Cannabis indica
tgaacacttaggaggagctcacaaggagatgacaactctcagccaaaaggctctctttttctctgttattatttttgatattgttctctgttgttgttctctactgtttgtgactctatttactccttgttgtatctcttattttgtatctgaaaaaaatacttccttttatactgatctgtgattctgatctagggtagagccctagagtaatatttgtaacttacttttgtaactgtttcagttgtaaccagttgtaactgattttatgttatttagtcttgatctttgttgtatttgatgtaagggtatatttgtcaatctctatgagtggtattatacaacttataaataagtgaatttgtaacaacaataattatattaatttctccataatttctaaattaataagggtcatgcgaacaattatacgatttgaaatgaggccatgacacgtacatgtaaacacacagaagaattgaatatattaatttagcttaattacaaattatatagtctctttttaattttttgtttttattattttattatatgtaccaaaatctttcatttgtgtccaatcgcgtgcaaattgacaaattgcttatcaaataaaaaataaataaaagatatataattaagacctaagaaggaataatattatctttcttttaaaagttagtctattcactaatactgatcttctatat

SEQ ID NO: 358735 - DNA, 568 bp, Cannabis indica
acctggaaccttgacccggacccagaactagaccgaacctaccccaagaactcgggctcaaacccagtcctagacccagaataggactgagacttgaaccagaacctgaacacgaactcgggagtcgagcccagacccagaccaagcccctgacctaaattggaattcagatgtagacatggacacgaactcatacacggacccaaataccgacccaaacctagaccgggattgaaacacgggacctagaccaagacgcagacgcagacccagacgcgaactagggacccacaaccaagacccgaacgtggaccttgactcaagcctggatccagaccgagatccgaaaaacccgtaaccaaactcgaactaagactcgctaccctgactccaacttggacccagacccagaccccgaaccaaacccggaccaaaacctggacggagaccttgactaggactgggacatgagacctaagacttgaacatggactaggaccaggaccgggacctgtacctgacctggtcctaaacgctcaccggatcctgagactcgcaacacagacca

SEQ ID NO: 358736 - DNA, 575 bp, Cannabis indica
aaaatttctgtgtcttattattgctttactacatattcttattacgacatatcatttatcgcttatcaaaaagactcattgtcgttggctaaaagcaaagtcaacaaaattgaaataactcataaggtggcaggtgaaacattcaacaagatggcaccaagtaagatttgtggtgattctgatgtggaggatctattgaaagagttgtacaaagttaaagaagtgattcctttatatgtgtgcgtaaaaagaataatgataaaggaaagacaaagtttgtcaatgatgatgatggtgatggtaatgaactcactggtaatgatgttgaatttgattgtgatgatgatgtttttgataatggaagcttttacgataattattttgggtgtcatataatagatcaagttccgaatgatccaagttatgtcccgaatgaagatatacctcagagtggtgaaggcatcattggttccaatcccacaccagatgatattgtacatgagagcggtaacaatgaacttcaggaatgtgataaagtagttgaagaaaataatgatgtaattgagaatgacatt

SEQ ID NO: 358737 - DNA, 545 bp, Cannabis indica
ggttcgggtcccgagtctaggttcgggtttggatccgggtctggctcccaattcgggtctaggtctgatttggagtctgggtcctggtccggttacggttctggatatatgcccaatttcagtaattattccaagtccttgtcctagttcaagtcctgatcaacttcttggtttggttccaattttgggtcacagggtacgggttcgcgtccacttttgggtcttggaatgggttcgggtacgggtgttgctttgggtccttacagggtttgggtccagggctgggtcccaaatccagacactgactacgagttttgtccaagccctaggtcaagatctggatcccaatctcgagtcccagtctggttccgtttcttgtggcgggtcacgagctgggtcctaggttcaagttcaggtctgggtcggtaactaggtccctgtcctagttatgtttcctaggtccctatccttattctgggtttaggtcccgccaattaagtgggtttgggtcccagtctaggttcgggttcgagtcctagtctcgg

SEQ ID NO: 358738 - DNA, 552 bp, Cannabis indica
ttttatctcttttttttaaaagacttttttcaatttttgcccctgtcacttcaatatacttatgttagggtattttaggtataatacatataaaaagtaatgtgcttcaattaaatataaattaaagataaatttaattaattgataaataaaagaggtatttttcaatataatctaatttctcatgtatagagaagcccaacccaatattcaaatcacccacgttcacatagcaagtgcaatattcatgtgcaacacgtggctgtctgtcatgtttcaattactccagtatctacgtagcatttacccacgtgacttttatcacattatgagtaaatgttctctataaaatatgttcaactttttgtccttatcattttcattttaatttttcatattgagtaattcttctcgggaaatttgaaaaactatccataaaaatctctaaaattatttccctaaatctatacctattaaaattacccatatatgactacatttgatttttttccataatatccctcccattccatttgaaaaacaaaatcccaa

SEQ ID NO: 358739 - DNA, 535 bp, Cannabis indica
aaaaattcctaaaaataatataaaaaaacacattagggattaagtaatccttacagtgatgacagtggaataatatgactccttctgttcagatctctaacccttgattcctgtcagtagcagagcattatcaagatctgaacctaaatcttctcctccttcgatggttttcatcacagtcttccacataggcttgagtatcaccttgaacagtgtgggctgatactcaaacacctttggaacaatatttttgagagagaaactttatgattttcgaaatatacaaagaaagaagagaagagagtaatctgacaatgaaaacttaggttaattctctcttttcatcattttctttatataggcttaacttagggctaggttagatgagattgggcttgaaataaagacttgggctgaatcttctttttagggtcaaatatacgggttttagagttagattttcgctactttatttcaactaatgaaataaaagtgtctttttctaattttaacacttttctcatctaattattta

SEQ ID NO: 358740 - DNA, 849 bp, Cannabis indica
aggtgttgagttggttgataacaatctaaattttcatgcgatagtagaaacaaattgttaggttgttgttaaagctattcatagttcttttgaaatgtttttgtagttttggcttactcatttatgattgtaggtctttattgctttctttggagaatgtttatctttgttttgctaagcaatcttctaacagtgctcatgcttatccaagcatagtattttattcatgactatattattaaagtggtcagttgtccttttgatttgttgtcgttgttgactgctgaccgctattctttattaagattaatatttttctttaaaaagaaatagttattattattcttttttaggatcatttagttgtctaaaacatcaaatttaaaataagtcaaaaccttcacttatgcaagaaatttataataagcaacacactattatgcctaacaacatcaaacgatacaacactttgtgggtgcccttcatcctttctcatattcaaataaaggcacaatgcccataggttgaactaagctacgcttggacccaaccgatccaatctaactatttattggatattgaattttatcatctgatccaatccaatcgaattgagtcatttgatccgatccgatctaatctgtaaagttcttttttggcaagttagttgacaaaataatttttccttttatggtaagattgttgtgcattcatattcggattcttaccttataaattcgatttttagttgctcttttccttgttaggaaagttacactttcagccgaactttcctttgttgaaaacttcttaaaagagaagaaattctcttttggaaagttgtctttt

SEQ ID NO: 358741 - DNA, 626 bp, Cannabis indica
cacaaaattgtggttgaactttgaaacaaactttctcatcaattaacatattttcatcacacttaagcttggatgaccaagcctcatatgccaaagagtgggactactattactaactgactgaatgaacaaagactaagcagtaacatgctcatttgattgactcttataactagatagtgaggttagactcttcttggaattcaaacaagcttaaaaacactgagattgatttgagatgtggttggaacatgacttagaaagttttagctgatatgggccattcctaagcattacccgagatagttccttcctgtagccagatcctttatcacacaatagttagaataaaagtcaacatagatagagttatctttagttagttgtgattgttagggtttataccctaaaaagcctataaagacatttttgattatttaaataaagagttgaacatttgatatatgtatgagtgttaagttattaatattattcttgaataagttatattaaatatcggaaaatttcttattcatatatgaggttgtggctattagaatattttatttaaggaaataattttctatttaaggaaattattttctatttaaggaaataaataaata

SEQ ID NO: 358742 - DNA, 881 bp, Cannabis indica
gtcgatgacatattgcttgccactaattatataggcttattgtatgaaaccaacaaatttctatctaagcaatttgagatgaaagatcatggtgacacctcttttgttttaggaattcagatatatcgagatcgttctcagggtattcttggattatcacaaaagagctatatcgataaagtactcaaaaggtttggcatgcaagattgtagaccaggtgatacccttgttgataaaggagacaaatttattcttagtcaatgccttaaaagcagccttgaaattcaagaaatgaaaaagattccctatgcatcagctgttgggagttgaatgtattttcaggtatgtaggcgtccagatattgcgtacattgttgagatgttaggcagatatttaagcaaccctggtgtggaccattggatatcagcaaggagggttatgaggtatcttcagagaataaaagattacatgctcacatacaggaagtcagatcatttggaggttgtagggtattttaattttgattttgctggatgccaagatagcagaagttctacatcaggatatattttcctattagctagaggagctatatcctagaaaagtgtcaaacacacacttatagcttcttccactatggcagcagaattcgtagcatgttatgaggcatcaaatcagggaatatgtctgaggaactttgttactaggctgcgtattttggagaatgtagaaaggccactctagatattttgtgacaataaatcaatagtgctatattccaataacaataggagctcatccaagtcaaatcatattaacataaagttcttagttgtgaaagaaagagtgcagagtggacagattgttgggttttatgccct

SEQ ID NO: 358743 - DNA, 943 bp, Cannabis indica
aggccttatggccaaacagatattaaaaaagaagaaagataaaaagataaatgttcagacggctagagtcccaggctccttgtacgggtcttctgggctggtaaaagctggaggatctattttctaggcagggggcatgtcaacgttcagaccggaagtagaagcggttgcctcagactctccataggccacttgggaagcacagtacttgaggtacatgtctttggcatcgcccaagtaatcaaaatttgcttgaggattagccttccagaagtcataaaaaatctcgagaccgactgtctctaagccattcaccatcccttgaagcctctctacttcagcgttaagctcctcctccttagacttcttctctgcttccaacctgcggaaaacagttcgaagaacctccctttcttcctgaaggttggtcacttctttgtataaggaggtcatggcagcctcaagttggtcagaagcctctaaatccttggtcagctcggccactttcttctcgacaagaagaaacttcttgttgacttcacccagttcaatttggatgacttcgagttgaaccctggcttcatcagcgcccctcctggccaagtccacttctgccctcatggtgttggacatggaagtgttcttggaagtagcaaacttagcttgagaataagtgtaagccatcttcagaccagtctgcacagagaaaaaacgttagaatttgagccgagtaaagaaggattaaaggaaattgtcaggaaatactcaccgtcgtaaactccttcacgactcctcccatcaacaactccagggaaggctcgttgtcagctccgaccagctgctcattcaccttagggactgaccgatttatgtagtgggtgagcatatccttgcctcttttggtctctggatgcagcgatggaggtggggtaggagcccggat

SEQ ID NO: 358744 - DNA, 506 bp, Cannabis indica
atatacataatcaataaattaattaagcttttatgtcactacctacatcactcaacatcactcaaacaatttaccctatacactataaattaatatttatttttataattaatatagtgaataattaattgggtaactatatattattttagattttgtatttttataaaatttattaattaattttttattttattaaataataagttaaataataacaactcgatctcaaaatgttattacaagactgaatgtatttcttacaactgttttgtgttgaaaactttcttcaaattgattatattaaaaaataaattattaaaaattagaattaagagttttattttgttaatattttaaaaaataataatgtctaatttatcatttaacaaatacaaaagttaggagaatggtattaattctaatcaattaaccaattgattatatgctttcttacctaataatgtggtatatgatctctatatatcttgttgggtaatagtgta

SEQ ID NO: 358745 - DNA, 940 bp, Cannabis indica
ccagctcgctatcaaggtcattgttaatgagttcatgtcaagacatcccagaatgttattgttgttgaaggaatttttacaacaccaaaaatagataataataaatatataataagtgcgagtactcgactcagaatagcgagtactcaaatcaagaacaaaaatacttagcaaaagactggaaaaatagtgaacacaagaggaatatagtggttcagtcagatctcggtctgcttaatccactgttgcaaagattctgttctttttatttcacggcggatcactcatttatatacaaagcaagtgtcctatcatttacacaaggattgcattcattatcaatccgtttatacattgatttacaataattaagctaaaaaacgtaaacataataaatgaagaacagtttccagtttaattcactaaatacagcaatgtatgcgacttctctagtgcgagttggctgttcatattcttgcataagctcgcaggcttaagatgcattcgagagtagttgagtccaggatgtttgcgatcttgtaaatttgcttttacgaacatcatataatgagttgatagaaccaagacatgcaagtctatattagtttatcgaggctgttgggtcatcgggactagctcgcaacatagagaattgatctctatgttttcgcaggaggatcgtggggatacacgcatatatcttgatatatgcaggttaaattcgttccttggtcctacatagtgcgagttatacgaatgcgattagacttggtcatatccgcatcatctcgctgagtctagttcaggcgaggtttgtactcgaggagtctctcattcacatcttagctttccttggggaaattgagtacacgtgtccttcaaataggagtctggtctcgagtttctaggtgagaaaaatctcactataacacatgcccct

SEQ ID NO: 358746 - DNA, 521 bp, Cannabis indica
actatttttaaaattttagtgtcccattaaaaatcccttaattgatttttaaattaaccttacaaataaatgtgctataatttccaaattataatgtcattattcaaatttagcagttttatattgtgtcattattgggtggccctaactcctatcataatgttgtatgagaatacattttttttgtaaagaagttaaatttttgatgtacgatttataacttgtacaaattatacattgtagttaaatatttttttaagaaatttttaataatttattttgttaaaaatagtattcaaataacttgttgtgtgcagaaaacaataacagtgtagaaaatgttgttagtaggttgctttcattaatattgcaaattatttaaaaaaataaaaaaaacaaaataaacaaaaaagctaagtaaagaaaaaatttatatagtcttacaatcagtaaaaatgaagattaaaatttatctatagccaaaaaaaataaaactttatagtgagtgatagttagagcac

SEQ ID NO: 358747 - DNA, 315 bp, Cannabis indica
acagaaaggatacaattgttagagatctgagtggaaggagacattaatttcgctgcgtcaatgtaaggttttcttaactttatatgtgtttatttatcgtttaagaaagttcatatttagggtgttaaataacatacttgtgagtagatctaagatcctagtaaaataaattctaacattatgctgatccaaagcgtcaggatattgatttctagggaaaagacagggtatttttctgaatatcaccgatgaaaggcattaaacacttttgtaagaaagggaagcttagcccaagcatcattggaccttttaaaa

SEQ ID NO: 358748 - DNA, 850 bp, Cannabis indica
gataatagatttgacagtgaggcattacctgaagaggcaattgattcaccagaacccgttatttcatcattagttgttgtttcctctgatctacctgttcctttaccagatccaatgttggcaatgtcagcttcaacaatcaccaactccaattcgagtgaacacattaagaggtttgtgattgaatgcatgaaagacattattcgtttgttatcttctcctttgacaacaacagacatctcaaaacatcgtgcggacgtgggtgtgcaacttgacgtgttgagtaccctttgcgggcattataaatgtggcttagcagaggttgcatggttcactgacaatgttaatgatttgctcaaaactcaagaaaagtttctcgcttctgctcaagttgttgagaatgcccttagtcttgatgaatctcttatcacggatcttcttcgtcgtgataaggataatttggcagctatagatcatttgtccatatctgttactaacaagacaaaggattttgaagattttaaagcagaggaagcagagattattgcagcagaactagccatacaacaacgacgagctgagttcgaagccaaaaaagcattttgaggtagatctttctagtctcaatgattccttgaaggagcaacgacatctcagtgaggagataagtcggtcaaaggaccaagctagtgtagaaaagttccatgaagctaagagagcgaaagcaacactcaggattcaagaagaagaaatccaaaggagactcgacgctttgactttatttctccagatggactgaagatcttacaattttttttttctaaaactttttagttttagttttagtttt

SEQ ID NO: 358749 - DNA, 439 bp, Cannabis indica
attaaaataatagaaaaattgaatcgaaaaataccctagcaagtggccagccatagtaagtgggcaccacttgagaatttttccacttttgacaatttctccttattttctcaaaaatgccattttttcaattctaaccactgaaatgccaaaactacttatttaataattaaaattgattatcaaataaaatttccatttaatatatttactaattagacttaataaagcctcttcattaataaacaaacactagaatctcttttcttcacaattatgcccttgcctagtgaaaattcataaactagtgggcctatacaactgagcttccaataagcaaaactagaatttaccaagtaaattccctaacttattaatcccttattgcatccaccatagaacttgaaattgcactctcattcatatagaacgctctata

SEQ ID NO: 358750 - DNA, 486 bp, Cannabis indica
tgtgcagcatcaaaatcgggttctgcagcagtagatcaagatcagaaaggaagctttccaaaatggaccaagatcacaaaattagacttcaaacctgtcaaataaagtttatttgatctgttctaatcatgtcaaaactgaaatcatcaattataaaaagggaaagacaagttttccaaagttagacaactttccataagagaattcagtctcttacaagaagtttcctaaaccaaatgagaccatccgagacagaatctttccttagaagaaaagagtaattaggggcacaaagttaatgtaataaaaacaatttaattgctcaataaaaatacatattcaataaaacataaaatacatacatatatactattaaaatttagatttttaccttattaccaaaattcgccaccacgcaccaccataataacacaatcttaaaaaatcaagaaaaaatcctaaaaaaaaatttacaaaaaataaaaa

SEQ ID NO: 358751 - DNA, 643 bp, Cannabis indica
ctatggtatattaaactttccaaaggcagtatactgccaaaaaaaaaacagtataaaagtaaacttgagcgtgtaacagtataaacgaaaaaaattgggaaaaaacagtaatgagtgtaaatttccctatttttattcttgttcttgcacatttagttagtaaccacatatctaattttacacatatattttataaacgtcattattatatgacttaaaatcaaacactaacctcattgactttgatgaatattggtagcatgacttaaaatcaaacaagtagaatgttgtataaaagtcactttgcttaattatatatataaatttatgtatataaaatataggataatgcttaggtagagtcacgaaagacgtctgtacatacagatatttcttttttcattatatgtcactctattgttttataccaataattaattaatctttttatattatttttatttcttttttaataattttgtgactcctaatgaagaaagttactatattcaataaatagtacccctaataattccaaaaaaaaatattataaatatcctttcatgttatcttcaattgcttgagaatcaggcatatcttcatgctcaaaagacatatgcaatttagttttatttttttaaaa

SEQ ID NO: 358752 - DNA, 712 bp, Cannabis indica
gttatgaaggtttgaaaaatcgggtgcatatggtcgaggtgatgctcaatcgcatgtacagagcactcgacaaagtgcttctgcgcgcgcggacaggggacaaatcttgtctgagcttggcatggactttggttcagacacgcctggaggctgcgagttgcgtgtccagatgctgcacctgtcgagatatgtcgcccatgtaccctgcaagttccctctcccgcgcgcggaatgggctgcttgcagcctgtttcctgggcagctaggagatttaccccaaaaatgcaatttttgtggatttttttccacaaatttctaaatttccctatttcaaaccctaataatcaaaattaaaatattattttaatatttaaacataaatatcaattttgtaaattaataatatttaattttttaatagattattattaatttatgatattttgaggtttaaatttaaaaattgattattttatttttatttatggtcagattttaaaattttattaatttttttaatatttatatattatttaattataagatcagatattttaatactgactatattttaaattaaaagatagcattatcctttttatttaaaatatttgttaggctatttttagcataagtttcgggtcacattttgtagttgtttttcttttttattattatttttagaataaattatgcttgttttctttggttt

SEQ ID NO: 358753 - DNA, 670 bp, Cannabis indica
aaagttactatattcaataaatagtacccctaataattccaaaaaaaaataattataaatatcctttcatgttatcttcaattgcttgggaatcaggcattttatcttcatgctcaaaagacatatgacaattttaatttttatttttttaaaaaaaaaacagtactacaaattagatgatataacaaataaacatgaatgatttacaagaatttaaaattttcacataagtttcttgtgaatggttgaagaggcaaaattgtatctactaattgtttgatttacatatatattatatatataatatcaatgtagtatatgttgtgagaatatgacaatgattaaattaggtagttttcataatgtagcttaatataaaatctcttattattcatatattgaaacatacaacttaagagatccctttgtatgtagggcaggcagcatgggcagacctagaaaacttttttagtaggcatattgtttgtttttttttgtaaggtctagcaagacatattcaaatataatttaacaaaatcaaattaaaaagcctttagcacattaggaatatgctcccatacttagtcaaaggtctagagttcgtctccccatatcctcaaaattatagtacattttctaaataaaaataaaagataaagataaattatta

SEQ ID NO: 358754 - DNA, 869 bp, Cannabis indica
attttgtgtgtaaatgtaataaacatattaaaccattagcatgaaaaattcatgaaaacataaatcacttcatatttcttatattgataactattcagagtgtaaagagttttatttagggcataaaacccaacaaaagggcatttttgtcatttggttaaatggtagaataggtggctgccctagcttggtgacacctagcaccctttttctcagccaaaataagttaagtaaatcattttacttaattaaggaaaagaaagggaaattagaaaaaataccaaaatttgaaagagaagctctttcttctctctctctctcttcgaagccagcaagaacaaggggaaatgggctgtgattttgagttgcagcaaggaattcaaggggtctttgaagctaaggtaagctctagtcttatccctctttatttcttgaattcatggatggttgaatatgagatttctaggtttagtggctgttaagttttcttgtgcttagggtttgaattttagggtccttttgagttgatttcaactcctagtagctggttttaatgggtgttgttggttttatgcaactttgaatattgagtttaaagctttgagatttaatggtaacttgggatttgttgatttgttctgtgaaatactggctgggttttatcgtttatgctttgaataggagctctggaaggtttcatggcaattggtgaagaattgagcaaggaatgaatggctttgggaaacctggtgcaaaccggctagccggttttggcagggttctccgggcctttcattttctcaatttttgccttttcgatgcctcggttgggtgattccccatttccagagttagaataacccattaag

SEQ ID NO: 358755 - DNA, 632 bp, Cannabis indica
atccttttaagggggggataattgtaaagaccgcttagctttaatttggaaattagcaaataattagggctttattatgaaaaattatttattaatatggaattaattatttatgatgatttatttgaattccgaatgcattttatatgtcttttatagaaatttcataattttgcatgttttgtgtccggcaacattagaacacggtgtatggctattagaatcacatcctagtatttttagtatagcgggataatagtttagacattgggaatgtcgggaatagtagggatgttagagtttcccgaaataccccttagtgtcattttatgacttttaatgtgggcaagggcattatggtctttttgcctagtgggtttttttcctttagtggacttggtattattttaataagttgattttaagtgatttcttggctgaaatagtagatagaaaactctttttatttactttaatatttgatttctacaaaatatcaaaaagaaggaaaaatcatttttggtctattctctctctcttcttcgaaacccttggggaaggcagcaacttggagtgttctcagcaggtttttgctggtttaggttgatacttggaggatcctttgaaggtat

SEQ ID NO: 358756 - DNA, 1058 bp, Cannabis indica
aagtcatcatcacctcacatcgatcttatcttagacataacggctttcccttttccgaacacgggaggagatggtcgagcaggtgaaatgggctcccttatgcgaattgcatgttcaatagacctgggcgaggccgagagtttcttcttcttcttcagtggagtcgcccgctcttcctcagattcatcttagcgattcaaaggctcctgagcatattgtttggccgtggcaccaccattcaacttagcctcgcgcttaaggtgaatgaattcattctccttatgagctccttcggtccggccaacatcagatttctttttcttccctaccacggacttgggagtaaagtcctcgggataaagcctgtacctcagaagattatcatcggaggtcaactagataatattctggtcttcccccggcaacggaacaagtttttgagctctatccctaagagcaagagttaggggaggatggtgatatgtcagaatctgctgaaactgagtccgagtaatgctcgcatccttcaccatgaagtactcatcaacaaaacgccctattttgctgatagccttgtcattcgtgccggtcaaccacttgaagcctggctgagagaaatagaagtaccctgacttgccttgtttgggggtggacttcaaatcaaagaaccaggcaacttcgtggggagaaggagtaccccatccttgggaagcgtagaggacgaagagggcagaaaaatacttaatgctcttaggagtgaactgggtcgggcagattccgaagaagtttgccacatccttgaagtacttatgcaagggcgtcaacgctccttgctgaccatgggcccctgaccaggcgcgcatccccttgtcaggatttgtggcacaattattgtgggcagcaatatagcagtccagctcacccaagtatctgccctggccaagagttcgaaggcgcgcctccgtaatcttggacgaaggacttacccatctagcgcccaaggcaccctgccttttatgaggaaccgccgcagcaagctcctcattaacgtagtccac

SEQ ID NO: 358757 - DNA, 995 bp, Cannabis indica
agacagtttcactagttaaaaaattgctgtgaaaaaaaaaataaatatatatatatatacatatatacagcaaggtagaaacaacaatttgagagttagaatcatagatatggaataatattcccaaattgtttaaataaatttcgaggacgaaatttctataaggaagggatagttgtaatatcccaataagtctaatggtaaataattagggtttatatttatattatgagttaatcaggtaataagcgagattatgatcctactaatttatttcagtataaaatttaaatttttctataagtaagtaaataatcgtaatttgttaattacggagatttatatagcatgcgtgaatgtaatatgagctatatgtagaataaaaatattttcaggttcggggaccctgaagactcgataagtggatatataagcgtaatttgttaattacggggatttatttgaaatacgtgaatataatatgagttatttgtgaaataaaaatattttcaagtttggtgactctgaagacccgattggaggccaaaaatgttacaacagttttagttagaaatattgatgagattattaggataagttgattttagaaatattggggtattttagggtactcgaagttggccaaataccttaaaaatagaaatttcttaatagttaagaaataataagataactattaataataaaatttttactaatatttttactaaaattatattattattatatatatataaaaacgaaagagaagtttcgttttgtttaaaattatatatatatatgttataacagtactaaacgaacgaaataacgaaggaacgaaacctcgttctctccctcgacaaatcttttctttctatattcattttttttcgattttcaatcttaagcttagcgatctaagcttcagtagtagcaggatagcaaatccttaaaaagggaaagcctaaattatggtttaatttcgttttaag

SEQ ID NO: 358758 - DNA, 514 bp, Cannabis indica
aacaaacaaaaaatctgacaatactttataaaaaaaaaacaagaaacttttgaaaatgccaaatggcacatcctcttctcaccagcacaaagtgagccccccacccattaggtctccatatcccaaaaaacatgacctcataaaaatgtaaataagaaaagaaaaagaagagaaatgaaaaaaaaaaacgcaaatcccaataaaaaagtaaaaaaaaaacaattttttagttaacaattctctaatatattatctattaattacttatttttagggcataaatcccaatactacagtcactacccttgcaactcgaaaccacctgacaccagacaaagatacaaggcataagagcaccatctacaagatgtcaccgtgtcccttgggaccaccaatgtatcttaggcaattagagcctacaaatactattttctcaaatgtggtaagggttgaaaaatcattgtaatacttgacctaaaaaaaatatgtacttctatctttctccatagttatt

SEQ ID NO: 358759 - DNA, 566 bp, Cannabis indica
ataaactcatccataatctctctattatccatattaattattaaaaaagttataaatttcttgtagcaaaccccattaatatgttactatagtgaatagctttaaataatctttattttgtattcgttttcttacaatattttaaactaccatttgatctatatactgaaaacagtttctaaaattctagtttcaagctttcttctcaaagctaggaaccacatatccaaacactttaaaaatatatgatgactattaaatattttatctttatgaaatatatatataaactcaaattcaattgtaataataacaataataataaatacatattgaaataataataaacaaatagaataaagtttaattaagttcttcatatttggcaaagataaatttcaaaaaacttttctcagagctcgtgaaagatttagtgaatttaaaattttaaaaaccatattattcagtatgcatagatttaatttcttgatatttgatttatctccttaagatttctttgctttaatattattcgcatctacttttagttttttcatttctattcg

SEQ ID NO: 358760 - DNA, 613 bp, Cannabis indica
cttcgttaccaaaataattacatatttaataaaatatgtctatttaaatattatttacttttcgaggatattacagttggggtctaccagtgatgttttttgtgactctgttttgccgcttaggtcggccagtagattagacttgtaataatatttggtaaaaatatttttgggatccccacttttgtaacttttactttatagctaaaattattattacaagtttattttcattccatttgtatttaaagtttaattttcgcgctaattttattagtaatcttgtttaggggattaggattgcttaagtatcttgggtattgtgcctaattatttagggcattacaatttggtatcagagcaaagtttttaaacttcatgtaggtcggtcgaacatgtacattcaccgtcggagacaagctcgactcatggtgcagtaagtgttaagagtaaatactttgctgcttatgtgatcatttgtttaccgctttccattttatgtgatgccatgatttaaaggctatatgattaagtgtttatttatatggaataaatagttaagttagggtttaaggcaataagtgcgtaagtgtggtattggtgcttaactcgc

SEQ ID NO: 358761 - DNA, 722 bp, Cannabis indica
gacactcagctgaacgaaccctttgcctgtgaagatgtgatttcgagggttatcaaatcagatttcactacctttatgagattaaatctgctgcaacttgcgtttcagcgacctaaaccgacccagagggcgcatctcccttttaccaaccctgcgattattcccacagaggatgtggtagtctcaatacccattctctgatgtggggtatcggtccccttccatcctttcatcgcagccattcttaggcgttatgatgtatcaccttttcaactaactccaaacagttatcgcactgccctagccttccacacgatgtatatggagtatgttcatagggctccctcagtagaagagttcagctatttctacgacataaaaagcgtaggtcttcataacggtttctactactttagcaaatgggcgacttctgaaatcaatggagtagaaggaatggtgtcaaacatgggggactggaaatcgaagtggttctatgtctttaaagtccctcggattagaactgactttaatcgcagacctagtatgttgcgtgtttttaacttggacattttctgatttattttgagatcttatgctaactcgcttttccttgttctcgcagatagactagctcgaccggcacttgacgcgactcgcagagagacagctgaaagtcctcgggagccttccggtacaagatcgcgactggcgattctgtgtac

SEQ ID NO: 358762 - DNA, 529 bp, Cannabis indica
aaaaaaggaatttaaaagatttatcatctataccagaaaaacaaaagaaatccatacataactttaactatacataaaggtttctttaataggtaagtaacattgtaagtatttacatatttttatagtattcataatcaacttttaaacatatatgtgttactaaaagacaattctttcttaattccaaatacatatcaactaaagtctaaggagcgattccataatcacgaatatcttaaaaaaaatgaataccattttagtctttttagactttgtgttctgcaaaaattatcaattgaattctttattttgttaaataataaaatataccttgtatttttcaaaatagtacaaatgtaggaccatgaactaacattttgtcaaaataaaattttataataatccgatctaaattaatgtgtttatgacaaaactgtttacattttctgtatttgttcgtattaggaattgtcttaaagttggttatattaaaaaaaaggtaaatactattttggattctgtgttt

SEQ ID NO: 358763 - DNA, 492 bp, Cannabis indica
gagccgtggtaatgatttactttcatgaaatatgaattaaaacgatattttgcattgatttggattgtttcatgtggtttatgtgcttatgtgatgatagtttagaaatcgcaatgtatgttactgaaatatttttgatttcgatctggaattatatttactggaaagtagacaaaaaattaataaattttaggcttttacagaacctaatttggattttttatgtaattagatatgtttttttttgaagttgaacgaaaatattaggttttgaatgcacacatgcgtgcgcacggtccttagggacgctcggacacactctgccattcagaaaatgctgaccaagattactcggacacgacgcctgtttgaagggctgctgcgctgagcatacacggtcaaatgaggctgcttgcagcctcttctctcggctgtctcccagcttctgcgcgcgcaggggtatgcgttgcttgttttcttcataacttttga

SEQ ID NO: 358764 - DNA, 566 bp, Cannabis indica
tcgatcccaaacccaaactcagaaatgggacctgagacctgaactagaacaagaccgagacccgtgacagtgatctagatcttgactcgggattcgggtaagggggcctggtagtgactagtattcggtgtgtagatctacgactcagactaggaccaaaacccagacgaaaaccaaactcgacccaaacctacacctgggaccaaaaattagatcctgaacaagaatcggcgaaccaggaccctagaacaagaccagggccgtgaccaagacctggacccagacctagaaccgaacccagacctagcctcagacccaaactaagaatggaactcaagcccgaacacggtcgtgttcccagaccaaaactgagacccagacctcgacctaaatcttggacacgatcccaaacacagacttggacctagatatagatcccgatacaaacctggactcgcgccaagacccagactgtgatcgaaattctggacctagatctgcaccaagatcctgaccaagacccaaacttggacccgcactcgggacccccacttggacctggaccc

SEQ ID NO: 358765 - DNA, 818 bp, Cannabis indica
tttttattgtattatgattaatacttatgttaatcataaacaaaaatgaaagagagactttacatattcgtattatataattttatattactcataaaaaaattaaaaatattggacttgaaatttcattcgtaactaaaaattaatttctttaaagtaaattttttaaaaattatcaaaactgcagaattcttagtttaacgatgtcttttgggtttctacgttaactttaacagaatattctattgcttaacagaatattctttattaattttataatattattatatatatatttaaaaataaaaattatatagatattttatatataaaaaaattaatttaaatttaaaatacttaaaattttattgatatttttaatcatattttaaatttattagtttaactttaaattaaaataaaataaaaaattatgtaaatattttatataaagaaatttaaatttaaaatattgaaaatattattaaccatatttttaactttattattatttattttatattttaaattaaaatagttgtaataagaaattgattgctttctgttttagttatggtaaacttattcacacaccatattttttcataaaatttgagaataacaaatatttaaatcaaatttacgaatccaatctatatatagtagacacactcaaatttggttatgtgagttttggttaagaataagtaaattacaatagatgcattatcagatatgctacctaattaaaaaaaaattaataatttaaaaaataatatataatcacattcaaatgacacactaatgtagcaatagct

SEQ ID NO: 358766 - DNA, 725 bp, Cannabis indica
agatctgtccacggtaaccatctgacgaaataatatggtagtcagagagaacttttagtgccgacaagagggagatagtgacaatgggaagagagatcgagagagagaactagattacggtacggtagagtttgtgcaaaggtggtgatgatgatgagatgggcgaggagatctagtgtagttggtggttttgcggtggtttggtgatggtggttgcggtggtcgacggaggttgtggactttgtggttgtgtggtggttacggtgtatcatctgggactttaatctctgttggtttgcgatagttatttttatttttaattattattttatttatttttaaaaatttcttttcagtttttgttgcttagttttaataagtatatcatggtgttctttctatatatgattatttatttgattctatagtagaagttctttcttttatttcattgtgaatcggtatgtgttattttcttcaaggtatctttctaataagtccaataatggtattctaaatttataatatttatggatttttcaagtgttttaatttttggttattagagttataaagatattgagttattgaaattatagagttactggaattgaaattttcgagttttgcgacttcaaatgatatgcttgcttcgctagagaacaatatttttagcagataagttttatttttggtacatttagtctcattagaaatagtttttt

SEQ ID NO: 358767 - DNA, 653 bp, Cannabis indica
gtaaaaataaatttaaaaaaaaaataaaaaaaaaaaaaaaaaaaaaaaaaactaaaacaaatcatattatttcaaaattgttgtctatatcacttgtaaccgccactatatttaaaatcgttatttgatagagaacataaaaactaataaaattaagctaaaaagacaaaagaaaaacaaatactattagttagtaatcatatagcacaattttgaaaaaaattctaaagatagttacgtattgttttatctctattaattttaattttggaatcttaaatttaatcaaaatattttataatttattaattaatttcaattatggtatttatttggtttctatattttgtgcatttgatttttatatctttgtattaattgatttatatatgaaaggaaagttgtctagcttttctatttatgaaaaataatgtataaagagtaagtttgaaaattcatcatttctctatctatccaattgtgttaatctgatcttgtgtgagttttctattatgtttgaccagatttcttatggagaaaattgaagcaaaatttttcttttctataaaaagaaagttgtgacagtcagtagtcccgtgattcgtaaggggaaataccgggtaagttgtgcaatcccacaccgcctggggaag

SEQ ID NO: 358768 - DNA, 576 bp, Cannabis indica
tttgcttttatagagcagtatacatgttgggaatgtaggaaaatttaatggccattaaatgtgtaactgtacaggtgaaacgcatgaaatggtgtatttgtcgacagaatatcgatactatgtcgatattatgtcgacaacatgctaatttaatgacacaacatacttatttgtcgatgctatgtcgacgttatgtcgatagcttatcgacaagacacgtgtctgacatgcaacgtggcagttgggaagggttgttgggaacgtaggtaaaatttattaacattaaatgtgtaaccgtaaaaaatgaaacgcatgcaatgtgtatttgtcgagtgaatatcgatactatgtcgatagcttgtcgatagtggaatggattaattaccattgtacacatgtctgacatgcaaattgcattgggagtatatgtcgatattatgtcgatggtgtgtcgattatatatcgatgaggactgccacctacatgtttggtaatgttgtcaacataatgtcgatagtacgtcgacacattgtcgatgatacgtgtcatactttctgctgttgtttttatcgacat

SEQ ID NO: 358769 - DNA, 780 bp, Cannabis indica
aacatcttttaattgtaagttaaatgaaaatctttgaaacacattaaagcataattatgaaaaaaaactaagaatgactattcgaagataacaatgactatgtctagtccagtattttattcattatgataacataacgtgataatgatatgatcattttcttttcagttgatggggctccaacgaggcttgaagatagcaacgagttcttctttagagggcgatacttccttgaccacaggatgagtagcaaagtcatggctccatttacagagctttggaaacttcgcctctgtcaatatctctactcccataagttcttctaatattgggatccacagggctatgatgtttcctgctaagtccaccatcccaatgctttctcctccaaaatacttgtctttcaactctttctctaagatctccagatactcacttacttcttccaatgcatttttctgatcctccttcaccttaacaactttaattattgttgttacgatctgggaaaagatcatattcaacgtcaaattgttactttacagtacacacataaggtgttcgacgaaagttgaagctcaaaaaaattaaagagggtacaagatatgagtttcaataaaaagttgattattggaagaattgtaccttgtcttcaaatgaaacgactccagaaaacgggcttgagctctttcataaagggtgttgaggcaagatggggtgagtcttccatgtctcatcgatgtattcaaagaattacaagtgactctgctacgggctttt

SEQ ID NO: 358770 - DNA, 856 bp, Cannabis indica
atcaaagtctagggagcatggtttaatacataaacataaatctgcaaattaataattttatattatttaaaaaaaattaaaaacacacactatatatactatcacacattatgattattattattggttttgaattatatattttctagatttatcaattaccttattttttatatagatttttattttgtgagagaattagatacaattctatctattttctcattattaattgatagattttatttgatatatttcttttataaaaaaaaattctgcaaattcacttatttataaaagtgagtaattaacttattatttgatttttttttatatatacaacaaacatattggggtcaaacctagtatcatgttatacaggtgagatataacaataacaatatccttgaatgtaatattgactacaagtgagatacagtgataagaacagttttgaaatcatataatagttttcaataaatttattaatttttataacaattcgagaggtcaagcctaacatcatgttatacaggtcgtgtctggcttccattataataacgtaatttggtaaatacaagttggatcggtccgtctgtacacatttaatttttcacacaaaattatatgaaaaattagattaaaatttaatacaatttattagttagttgtcattacatacaatttatgatttattttatatatataatttaaatttatttaaacatccgcaaagtgcgaattgtttactagtttaaataataaatagtgttatagtgagatttctctcacttagaaactcgagaccagacccctctttgaaggacacgtgtatccagacttccagtgaaggctg

SEQ ID NO: 358771 - DNA, 525 bp, Cannabis indica
gtccctatctcgatttcgggtcaaggtcccggttattgtgtgggtttgggtcccgatctggattcgggtttttgtttaggttgtggtcctggtcctagtcctagttcagttcaagttccattggcgattctgagttcgagtttaggcttgagttctggtgggagtttgagtcttggtctgagtttgggtttaggtccagatttaagtctaggtccagatcaggctccggatgtgggttcgcgtcctgggtttttgtctaggttgcgtccgagtccgaagttccaatcccgatctgagtatgtattcagttctgggtctaggtccttggttgtgatcctagtctgggtttgagtttgggtccgggtccaggtctagctttgggtctgattctaggtgtgggtgtttgagttcgggtgcgagtctgtgtccaggtttggaccctgatctgggtctaggttcaggtccaggtcaaagttcgtgtcccgagtgtgggtccaagtttgggtctgggtcaggatctcggtc

SEQ ID NO: 358772 - DNA, 761 bp, Cannabis indica
aagtgacgggaagcctcactttatccagttgggataagtgttgttccgttgaaccctgtgagttgggatccacttggtgaaaggtctcggtccgttaggcctattgtagtgaaggcctctttgaacagcagattcacggaactcccattgtcgatcaggactctggccacaatcttattggcaatgggagtctttatgaccagcgggtcatggtgaggaaaacgcaccgttttagcgtcttcttccgtgaatgtaatgggtcaatccattagccggggcctttgagccgggagttgagtaacttcccaaacctcatcttgtttcacggccccttcgtaccgtttcagctctttgcgggtagttccaccgatgtagggtcctcccgagatcatagccactctcccgttgggtctaggaggcaggccaggaatatgctgggcatctccggggggaactactggagccaatactcctgctgcaccccctggtgctccttgtggcaaagctccagccgcctgacctgggttgaggtgaggcaaccgattcttgatccactcgtagaggtgtcccaaccggatcaaattttcaatctcgtctttgagatttttgcattcattggtgttgtgcccaatgtcgttatggtactcgcatctcttagtggggtcccttcgggagctatctttgtacaggggaggcggtctccggtagtgcgtattctgcctagtagcaaaatacacacgttcttgggagtccgttaactc

SEQ ID NO: 358773 - DNA, 569 bp, Cannabis indica
aataagagggagtctatttatgcataagtcaattactttgtatttgtgagacctatctaatgaatcttatctctgggcgtgatcccgtgggctagtaacacaatctgaaagaattgttgataccacgtataaaaaccttgcgagtttttatttttctacactgtttgttttcaaatttattcttcaattacagagttgtgttctatacgtagctaccgaataattattttagtaccaatattattattccacaattaattaaattaattaataggtaattataaaacacaaaatttcaatattttacaaaatatttacaacttaatgtatattgtcatttttacatattatttgtttattacaaataataatcaatataataataataataaataattaataatactatattatattaaaattattttagagtaaatataatgttataatttgaaataaaattattaattttacataaataaatttacaaaatatatgtatatattttttattaagatgtaattattcttatatagatgtgtactttgttaatacgagacttagaaaat

SEQ ID NO: 358774 - DNA, 524 bp, Cannabis indica
tatttttgtgtatttttgaaataatctctattttttagtaattttcaatgaaggatccaatattttttctcaaggcctactcaatctcaaggacagccctacgttacttcagggttgggtttggactaaggtatgcaagcatgtgcctagagcccttctagcctagaggctcaaaaaatatcttccttctaaaatatgcatatattttttggtaaataccattttgaaccatgtgttttgtaaaagttattaattggaccctctattttgttaaatgacaaaatggaccctgtattttctaaaatggtacaaatacgatctcgaactgattttttgtcaaaaaaaaacttaattataatctgacctagagatattttggtaaaattgattacaatttctctatctgtttgtgttataaattgtcttcaagttggttttattataaaaaataaaattgtcgaaaattgagctcagagtcctatctttactattttataaaatacaaagtccattttgtcatttaa

SEQ ID NO: 358775 - DNA, 1180 bp, Cannabis indica
aaccgccaaaactcaaagcatgctatttttcaaactgagattaagacaaaaatacccttgtgataatttaaaagctctttttattataaaagaactttttaaggggaaattgttataccccaaaatttagctacagttcagaaagtgacacgtatcttgcagtggaatataaaccacctgatataataaaaattatattatttaatgtaaaaaaaaagaataacttgttaataaaggattaatagaacacattcataactcgatgactacatagttttaagcgagataaggataaaaagctattgaaaattatattgacgagacacacacctgcctcagattacacagccccagaagataattcatttattcaaaggagtgaatacatttatgcaaagcaacctcaggttacaaatagcgagacaaccacctcgctattctaaagaaacttgacaaggtgagccatctgcaaacacttagcgtttttccacattataatagacatggataaaaactcagagggaagcgaaatacaattatccaaatcaacattaaccatctataaggataagaataaaaagtagttaagcagttattctgtattatcccacatgcatttaaatgaaacgtgagaatcgtccacgtttcatgaacggttatatcttagattgatcctaagtgtaaataactgccaacctatatccctataaataggggcagattccacaaaaaaagggacggagatcgagagagaaaaagatcatcaattgtatcttatatcaattatacagaataatatcataataaaatagactcgtggagtatgcagaattaactgtaaaaccatgtaaaatccctggagttatttaatagttcattagtatttctatgatatatttattacgtaaaggcttattatttttagttaataaaaatctgcgttaacactactcgatgtagatcatctatagaggaccattgattatttatattataacaaaggataattaatagcgtatctatatctaggaacatatagagcattctatataattaatagtgaaattctaaatctatagtagaatcacgaggaattaataagttagagggtttacttggtaaattctagaaccacttattggaagcttgattatataggcccatggtcctcgcactagtt

SEQ ID NO: 358776 - DNA, 585 bp, Cannabis indica
gaaaattgagctcagagtcctatctttactattttataaaatacaaagtccattttgtcatttaacaaaacagaaagtccaattagtaagttttgcaaaacacaagatccaaaataatatttaccctatatttttactaattttcaaaaatatcatatagtttttgaataaagtgctcaattatttttctttttctccaaggtccacccaatctcaagggctgccctacttgactttttaatgtttatagatttaattagtaatgtttacactggatataacttattacaagaatgaatgaatgaaataacttattacaagaatgaatgaatgaatgaatacattttacatgtatatattaattaatttaaatttgatagatagtaatttgtgtgcatttataaaattaaatatatatatatatatggaatacttctaaatgggtattatccattgatgattactaaataaattaactataaatattaatttaaaaaaattaaattattagattttgatctaatgacaaaataataaaaggctaaattaggatttttgtccccgtgaactttgacatgtaccaaa

SEQ ID NO: 358777 - DNA, 539 bp, Cannabis indica
tcgagattgaaaagtccttaggttgacaggccatcacctcatctcgaatcttgattagcttaggatcttccaactgcacccttctgattctttctaacaaatcagattgaagtgtcaagttctccagctttccaactacaaattcaatttcagttttaacattttctgaggccacttgaggagctatcatcacagtagtgaaaacctgcccgtgacctcttgcacttaaagcatctgccacaacattggctttcacgagatgatacagaatttcgcggtcataatctttgactaactccagccaccgtctctgcctcatatttaaatcgttctggctgaaaaagtaattgagactcttatgatcagtataaatatcacaattttcaccataaaggtagtgtcgccatatttttagagcaaataccactacaacaagcactaaattatgtgttggatagcgctgctcataatcttttagttgatgggaggaataggctataacttttctagcttgcatcagaacacatcccagaccctgt

SEQ ID NO: 358778 - DNA, 922 bp, Cannabis indica
atgtagtcatttaaaaaaaaaaagaatggagagagaaataataaagcaacatttacactaaaaaaagaaagcaacatttaataaataaataagatgctgaattaaataaaccacataaatgtattccttttctaggcactcgataattaatatggcatttgggttgttacaaacaaatacaaagtaaaaaaaaatagatttcaataaatacggtaaaagacaaatactaacatttataaataaatcaatcacgttattattgttaattaattgtaaaaaacgactccacatgtaaatttcccataaattaaacacacaaagtaacgggtagagtagtttcacgacatctctaatagatgaataaaaatagttgtccaatagatctcacttaacacattttttatttttagtccattaaaatttttcttttatttttttaattaaaataaagagggcattagtgcaatttttgaaatcttttctttagctctttcttctctctcatgccacatcatacattatgattagatcaaccactattttgtcaaccatataagtaacggtcattgaagttggcctcataatgaaataggaattgttatgacactgattcaatggtcaataactcaatcatgtcacattcaagaactagatcaccgcgcattgattatagaatgtggaattttgatataaaaatcttttttctattattcaataaaaatttgtgggaactgctaatatctgctagttcggaagagtattttataaattggactgttgaggctattttgcaattttacatattttataaattataaatgtgagattttgtaataaattggaggtagggacattaattgtgaattaagaatactttattttattttatttttatttttgggaagatatttaaataaatggg

SEQ ID NO: 358779 - DNA, 508 bp, Cannabis indica
aacataaaatgttatttctgatctttatcaattagtaaatctgattatattaaaattggttttatttagggcacaaaatccaacaaatagtagcagggcctgtttattaaaactaatgtagaaaaagaggatacgacaatgcattgattgaggtggcaaatatgaggctgaggtggcgaaagagaagtgatttagagctgatgtagtcagaaaagtctctaagtgggaattaagggaccatgtggagggcatttttggaaaggtaaaaaatgggatataaccctaggttaaaagaaaagcggggaacacaattcttggcagccaccattattgaaaatacctagacgaatgaagaagaggaagaagaaaaagaagaagaagaaaaggaatgcacaaggaaggaggaagaaggaccatccatatagtttcttctactcctttaatcttttgtatttcctttttatacttctttattttcattttgagcatgaactaatttcttttagtt

SEQ ID NO: 358780 - DNA, 692 bp, Cannabis indica
actcttttataagtaatagagtttttaacaaaaaaagtgatgacagtgttgaaaaagctctacaaaggcatgaaaggcaggcatagacaaaccaatggctatcctttacaatcccaaaaccgaatcaattaaagctctgcagcagattctttatcagagacactttcttttactttcttggctgtcttgctcattgttttatccacaacttcagcagccgatttcgcagttccttcaactgtctctttgcttgtgtcgaaactcttctctactgcttgtgtcatcttaactccagcaccgcccttagcattcgcttcatctatgcctttaaagctgtaaacagacatcaaatggttgctcaaagtcaaaaatacatcaaatgaggaacaaacatgtatgtatgtattacaagaaaaagaagaaaaaacatactctaagtttggtgggaaatagtgaaattgaatatgttgcatgagactcttgactttcttccatgaattctgatgagaagtcttcagcaaggaaattgtgctttgtaatgtctttgtgaaagactttttgatactttcatgtttatgaataaaatctagactttctccttttgttagagtgatttgaatagaaattgttataaaccagaatataaacaagactcttcttttgctagttttgtccatgactttggatttgga

SEQ ID NO: 358781 - DNA, 744 bp, Cannabis indica
agatgttgtatttacaatatttatctttcgagatctaacactattatgtttgtctaatgttgacaatccattagggatttgtcccattagaacaacaaaccaagttagaccaacaatgaagattcgaaattaaactacaatttaataacagaaaataacatggttcaatataaattcatacacaattcagaaattattaaacatatagcaagtaggaatgacaagtgaaaatactaaaacatacaatcctaaataatttccaaggtcttcaacaaactgatatcagtgtcccgtttaggcgagagtcagtgataccatccattgaatagttagctgcccttcatactgatgaagaaactgaggacactgtatctgatacacctccgttggataagaggaatcatgctccggccttgaaatctccttttgttgatttcgggtcggcggatgtggggagcactccaatggaggtaatgtcctcaggttctcaatcagctggggatgatagggattttaaaatagttacttatgcgaagggcctttatgctcttaatgattcatttactgatcccatatctgctgagattgaggcaaagtttgacgcatggattagtcaaggcttgcttaaggtgactatttttattaaatttgtatttgtattctattttatttttcagttttattctggttttaatattatttttttgttgtttgtttgttcttttaggcattacaattgttatg

SEQ ID NO: 358782 - DNA, 868 bp, Cannabis indica
agatgaagataatgcaacagtcagatcgtcaatttgatacttggaagtcacccagacatcgggtgctttgggtgctcaaaaatgaactttttccaagtctaattatgatgcctcaaatattttcgtggtatgtctagtttatgtttcaatgcaaaatttgacccatttacactaagacgatctcgaaaatagataccctagttgaggatgtcaacttgggcgctaggtgaaaccctagtgcctaggttgacttttgaggtgttggttcgtgtatttttagctcccagggcctagacttggatgtttcatgttttcatggtacagaatactgaaagatggtgagttggaaacaacttggcaaaattaaaacacccattttggagttctcgaagtcaacttaggcccagggctagggacccctccaggtcaacttactatgattcaagactacttaactccaggatgttttccttcttgccaagtgtcaaacattgatgtccatgtcactaagactacttttggtgtaaattttttccccccaagtcaactttacacttgtgtgaggttgacttaatgatgtgaactgagcctgtttctctcgaaactactaggtgggcatcaattttgacaatcttggacaattatttctattcttcaagcattcccagtgaaagtaggatttcaaattctcattccctgttgaatagtagaattcaaaatttctagtataaaaggagaagaggaaagatgatcatcttttcttatcgcttatcttttcctttacaacttaaaatttaaaatgtaaatgctttgagtgtatttcttttattttgagataccgtgaaatcatgctaatattggaatgtca

SEQ ID NO: 358783 - DNA, 566 bp, Cannabis indica
aacattaaatgttatttctgatctatattaataagtaaatttgattatattgaaataaattttatttagggcataaaaaccaacagccctctagtgacttcagtaaatcccttaggtggaaaattgtattcctccctttttcatctgcctttttaataattgtaacactttattttgttttgtgacgtgggaggttttgaagatatcatggattgaaaaggaaagaagaggggaaccaaccctggggtccctacaactattgaggtggttccgtcccaaaaggtaaaggaaaaccaccgccacaagaagaattcatgttcgagcctatcgatctcgaggtctctgataccgaaacccaagagcaagttcctcctccagtcgctcccaattccaacgctcctcgtctggagaaagcccatgcttctgcctccttgagcaaggccattgagaccttgtcagctacagtgggagaggctggatctgaattcgcccaggcatacgagattgcttgctggcacaaacttaagactctccttccccctgattgggatttaatcaatcttggg

SEQ ID NO: 358784 - DNA, 980 bp, Cannabis indica
aagggaaaccatccctcatgcattaagcccctataaatatagacgtagcctcactatgaaagggattgaaaattttcttcaaagagagattcttgtgagaaaatagtgatttaagagagttattcagagatcagttgtaagagctttcaaagaggaagaacactttgttccttctcttaagtcaatacaatacaaagggagtaggctattaccacactcacggggctgaacttctttaaaatcttgtgttcattttactttattgtttttgttctcttttaattttttttgctggagttttgttcttttttaattatattattcaatcgcttattatttgactcagtgtcgttgactaaaagcgaggtcaacattttggtgttttcattgagagcaaaaacacaagttttttgtcttaagttttgacaggcaaacaggatggttgtacaaactcatagaggccttgttgatcagggtgacttgatggtgacatatcccaacgtgcagactcccgaaaacacgagaggaccaccagggacaaacctcgtgcagggaaagacaaaacaacctaccgtgcgccatggagtgacttcccctctggctgggatcacaccaagcgtacaagatattagagataccaattcagcagccaatcaatccactcctaatattgaggtcccgtctaccactaatgctcagaggccagttggagacggcattgaaatccagaacctccgagcagcccttgggctcaagcaaggtcataataacgctttgctcgatgatcaggaggatctttgacaaacaaagacatcaatttataaaacggagggaccgggagatggaaactctgagggctcaacaggcagccatagatgatcgcatgaggcaggccacatggtacttcaatatttgatagtttaggtgccgtacatgacctcaggactgacttaaatggaagaaggggcctggacgaacaa

SEQ ID NO: 358785 - DNA, 500 bp, Cannabis indica
acgaacccagtcgcaaaaaaccagtcgcaggcgcagaagaaacccagaaactgagaaaaagcaatccaaaacacagcccagagactctaaaaatcaatgatcatacgaacaagaatctacacattcaaaaccatgctccaccaatgaacacgcaagaatcggatcgtgaaaacccagccgcaagaaacagtcaaacagaaaaaactttcgaaccttgagagaagactctcacgcatgccagctggcaagaccttatttttatgttagtctaattttgttagactaaccaaaacaaataaaaaaccaaaacaaaatttatatctttaattatactaaatttttgaaatttttttcattcaattcatattcttaaaaaaaaatatatctatcaaataaaaataaattatagtttaaatattatgataaaaaaataaaataaaaatttatataaaattttcttagaaaaaataatatatgatttagaaaaaaaatataaaaat

SEQ ID NO: 358786 - DNA, 541 bp, Cannabis indica
ataatattttatgaacacaaaggaattaatggtagagaaagtagttgcttaccacaaacttatagttcctgtaatttagtttagtcaagtacactacacttgatctggatatcaagacaattgattaattgaaatgtactacttattttatgttagtgcaagtgagagttttttgagattttatgccctaaatgaaatccatttcaatctaatttgatttgttatcaatagaagatggaatgtaattgtgattatatgcttcaaaagataatgtcccttgattcatcagtgcactagatttacactgatatcatagtcagcgataaagcttaattatacctaggataagtgttatgttctctccagaacattggaaaaatatgttagtttcgaatgtatggagtatacattggattgagactgatattgatcttagtatatatattataatcttaccgttttatctttctaagtcactatcactggttgatcttagatcaaaagatcttattcctgacatagttaggttcaatctcaagag

SEQ ID NO: 358787 - DNA, 571 bp, Cannabis indica
gcccttaggtcgaacagatgaaaaaagttttaaaagtctactccaaaggagtcctaggttccttatacagatcagttgaatattcaacaacaaaagttaaatcttcagtagcaggcttctcatgctcttgggcagtaaaggagtctttatcagccattcttgcttcttcctcaactttctgtccctaagcacatgttattcaaagttaaaaaccctaatatcttatattctatgattagtcaagaacaattcaagagcatagaaatattacaacaagaaattcaagaaataatgtatatattcaatagaaattttgtaaaaaaaggcatagagataacttactcactatttgaagttttgtgaacgtgcttggagggttttggtgatggaaaatccaacaaggtttcttcaaaaattcacgaatgagaaaaggagattttttgctttgattttctaaaaaataaaatggctaaaagagtgcttctaaaggttaaagtcccttttatagatttgaaagggataatttttttttttttttgaataatgatagaaacttcattaactcaaatct

SEQ ID NO: 358788 - DNA, 596 bp, Cannabis indica
ccccaaacgtaggagcagtacccggaagtggatcttcattcagtgagagaaccaacccaatttgcatctgtgtatattttaagatcttagttgagatttttcctgaatattaacccttttcctggtgttcccttaaggtacctaagaatccagtagacaacatccatgtgttccttaaagggattattgagaaattagctaacaacactcatagcgaagcttatgtcaggctgagtgtgagttaggtatatttactttcccccaagacgttgataacttcctcgatcaacttttgttttgattgtcagtacttcaagtttggtattagtgtccatcggagtttcaattggcctgatcttagtttcttgtaataggtcaaggacatatttccactgagtgactgagatgccttggctggatcttgcaacttccatcttcgaaaaaattttaattggcctagatctttaatctcaaattcactggagagaagctgcttgagatgagaaatttcttccatgaaattaccagtaactgcttatgtaaacctgtcaaaccaggctcgaggggattgcttgaggccgtagagagtttttttt

SEQ ID NO: 358789 - DNA, 681 bp, Cannabis indica
attacattaaaaaataaaattgttaaaaattgagctcaaggtcttatttttaccattttggaaatataaggtccattttatcatttaacaaaacagatggtctaattggtaaattttacagaacatagggtccaaaatggtatttaccctttattttgttttaatagaatttgaaaatgtactttcaatatacattgcatttcgaatttaattagagataaatatttataaaaaattagatttaagttgaaaattaatcttaattagttttggaccaacttaaactaagtaatttttataatatttattgaaaattaatattaaggatgaaaaataatttttttttagatctatccaggtgtgtatttcattttataaatattaaattgaaatttatatttatagttatataaattagtaattttaattaaataaatatataaatattaaaataaatagattaaaataaatatcaaatgaaaatacaatttttttttttaaatttaatgagctttaatttaaggtatatttgtatcttctattgttagttcttactatgtttaattattttaattgggaccgtcaagacactagacttcgtctcccactatggatggtcttactattgaacatttaactaccataaaaatactcgaaagataagtaattttgttaagtttt

SEQ ID NO: 358790 - DNA, 394 bp, Cannabis indica
aaataaaatatttgaactaaatttttgatatggtaaactatatatacagaattttctaaaattttattgttgaacctgaataactaaacagatcatagagagtgtcaaaatatccctttttgatcgtgtactacatcttttctttttcatagattataccaatatacttcttcttttgatattctctctctgtaaaaaaaaaaaaaaaaaacctaaacatttagtaataactttttaatcacattataatttttttttataattaaatgtaacatttagtcacaataaaaattacttatgactaaaatatattatttacatacaagttgtcactaatttaaatttagtcacaacaaatattatgactaaaaaaatacatttagtcataacaaat

SEQ ID NO: 358791 - DNA, 851 bp, Cannabis indica
ggcaaggcacaaagggctttaaaaagaggcaagcccgggcagtgaaaaggtctgcagcaaaggttgccaagaccgaagggaggccaacgaagattggctcccccgtaatgatccaggaatgggagcgtatcttgattggttctgttcctattttcttgcccactgtcgcctcagtgatggttccctctgcggaggaaactgaggcaacaccgacttctcaacctcggagaggtaggaaggcaacaaaagggaggaggaggacaaacacttcaccttcaccaaaccctcttgaaatgagggaattagtaggaggcaccccgattaggccaccgatcgtaatctctgtcaaccgccaaggtcaacagggggtacctgctgagatcaatgaacgccctttattagatgaagggtgtaggacgcctttctccttcctaaagaaggctagaagcgatagtataagggttcccaaagcaagccctaactcattccgaagagaacatggtgactggatgtttctccagggctaccgaccaacaagggtcacctcaactgctaagcttacctcctacacgggccctgtaactcgatcgagagctcgtgccatgcaggaatcagtgaatccctcttttcaaaaagttcaatcaccttagagttaatttcttttagagattgcacaaattgccggatcaatagtgcatttgattgggcagattcaccacatgcagaggtgaaataggccaaatgctcatgaggagaaccattaattccatcaaacttttcaaacttttgtctgatgtagtttggtggaaatggaatttgatcatagtaagccaggtatggcttatgatatc

SEQ ID NO: 358792 - DNA, 621 bp, Cannabis indica
ttttattccccttgaaatttgtaaagacatcgatcgcctcatgggaagattctggtggcattctaaggcctctcaaggtggaggaatccattggaaaagctgagataagttatgtctgcataaacataaaggtggtttgggcttttgaaacttgagggactttaatttatctatattgggcaagcaaggttggcgtctgttaaccaatccgacttcgcttgtggctcatgtttttcaagctagatattatccccaaggttcttttcttgatgctgagttgggagctaatccgagttatgcgtggaggagtataattgaagctcaagatgtggttaaattgggggttagatggtgtgtgggttctggttcttcgatctctgttcttaaccagtcgtggctcccttctatggacaatccctatgtgatttcttctcatgaggctcttcaggattgtcatgtctctaatcttcttcagactaatcgaatgtgttgggatgtggagcttttagacgatttatttgagcccggagatgtggatctcatttgtaaaatttcgctacctgcgttgccaaaactggatacatggtattggtcttttgaaacttttggtggatattcagt

SEQ ID NO: 358793 - DNA, 546 bp, Cannabis indica
gaaaagaggttttggggtctatttattaattgagagagtttgtatggtcaaatgaataaataaatattttatttgacaattaattataattgttgaatgaatagttttggcatttataggattaaaattggaaatatggtataatgaaagaagaatatcttgttgaaataaagtggcaaaattgtaactagagattggtccttttagttgtcggccactctagtgatttttgcccaatattttattcttttctaatccatataattcaaacctaagccctagttgaaatactataaaaggaacatgatgttgtcatctcatctaattgaactattgcctttaaccaaatcaaacctagttttttctgtcaaacaactagtagatgcgagacaccttctatacagttttcaggccccgttcattcttcttcatagtaggcctatagtgatagagtgtcatgcccacacatagcaagttaagtactcaatcatagtgggtaagacagtggtaaccaaacccgaatgagagaaatagatccaagctcag

SEQ ID NO: 358794 - DNA, 566 bp, Cannabis indica
aacttgaagtttgtttggactgatcggtgtgagaaaagttttctggagttaaaatagtgcttgattactgctccagtgctaactcttcctttagataaggaaaagtttattgtttactgtgatgcctcgagacagggtctgggttgtgttcttatgcaacctggaaaggtaatagcctatgcctctcagtagttaaaggagtaaaagcagaggtaccctactcacgacttagaactcgaagtagtagtatttgcgctaaagatttggcggcattacttatatggcgagaaatgtgagatatacactgatcataaaagtctgaaatacttcttcacccaaagagacctgaacatgagatagagacgttgtctagatttggtgaaggattatgattgtgagatcctttatcaccctggtaaggccaacgttgttgctgatgccttgagtagaaaaggctagggtgagataaatacagtgaaacaaatctcccagcaattagcaaatgagatgacccaagctaaaatcaagttggttgtggggaaattagctaatattaccttgcaatc

SEQ ID NO: 358795 - DNA, 669 bp, Cannabis indica
gctttctgctccgaggattgagaagtcaaaatcgtggaattttggaaagagtggtgtaaatatagtcagaaactgcctggtcatactgtttcttcccattctccttcttgacctctaagtcgcgagacatctcctcgatcttcatctgagagttcttggcctcgagctcgacctgctccttagacttgcgaaggtcttcaagctccctgtccttatcaggtgcttcttgttttagtttctttatgctctcctggagctgagcattttgcctctccagcagttcaacttccttagaaccaacggcaacgactttcatgaatagagtcatcgactgggaagccaactccacagagcacggaacaagttcttcagaagggatcctctccgccttggatatgaactcctcgcccacgaacttcttttgcatagccagaaaatcgcgggctcggatagttggctcgatcatgactttcttccctttgtcttgcgcgatcttagccagtttcttggaggaatccgcggcaagagtagttataacgtcgctcttcctcttctgggcaatgacgggcgatgtcgtcgctgttccactttttggtttgcggttgaggacgggcgcgaacttcaagaaagtcatctctgcgaggacaaaagataagtatgaataaattt

SEQ ID NO: 358796 - DNA, 964 bp, Cannabis indica
gtctcacattgctaatgggtggagctaatgtgtggagataaattgtgatatataagatgaatggactactcctcccattgccaattagttttgagatgaaacccatcaccttatatcctaaattctaacaatgtattgagatttgtccacacaaataactaaggccgttattttagagaatgatttgtaagacttcgttagtgttctaacggttggatgcctgacaatatctagctttcatcaaacaaaagattagggaaatttaaaaggtagagtcattatttccactgcatattagtaagtaaactaaatttctattttgattttaaaaatctctatacatgtattatgctaatttctattatatatatattgaattagaagcatgtatatagattaataatatattagttcctacatatcgtatagtagttataattaccttctcttcagccttagcctcagctttggccttgcgcatttccttcatgtcagttagcttttccttcacagcctgcatgtttttattactgtatttatatacttatccctcttctatttcaaaatctcaatcatttactgcttagtttaatttaaggtccaaattccaaatggtatgtttaataaatatatatacatagaattcctcacaccagatcaaagaagccccattaattctcgatcccctattaattacacaaagttggacaagtgtcaatcgttgcaaattttaatgccgatcgatcaagagagaaatctaatctcgtggtgatgcatgatgatagttattcgaattgaccaacaacgtgtttcttacttgtcgagaaattattaattttataagcattattattggacattaatggtgtctaccacctttagatatatccttttggcgattggctagcgatactcactaaaactaaaatttaattatgagacctgatacttaattgaaccaata

SEQ ID NO: 358797 - DNA, 546 bp, Cannabis indica
gaccttcagcaagaaggagtttcagctactaaagaatcagagaaagagatctaggttcagatatttataatgctcttgctacagaaaggaatcaagggctacatatctgaacggaaggagtcatattattccgctgcacccaatgtaaggtttactaaactttatatgtgtttatatcatcgtttcaggaagttcatatttagggtgttaatcaacacacttgtgagtagatctaagatcctggtaaaataatttccaacatgtgtggcatttatgtacacgtgtcttacttgagaattttgtatttgattttgtctgacctgctttttttctttttacagtatgtctaattttggggaaccttgctcccaacgagctctgaataatttaggaagagaaatagagtttggactatcttatcggcgctccatttcattgaatgaagttaaagcatccaatgatcatcaataccctgtttctttatgtaagattgaagatgtaatttcgggtgacttacaatatcattcttcacttgatgataatgtt

SEQ ID NO: 358798 - DNA, 835 bp, Cannabis indica
aatctgattatattgaaatgagtcttatttagggcagaaagtccaacaaaatgtacattctattcttatttataagaaaatataggaatgatcataaaatagtcaatccaatccaatctcatccaatctaatccgcacgatccaatctaatccaatccacaaagtgtagatatcagcacttgtgtagattggattggattggagaaatctaaaatccgcagttgtgtggattgaatattgattgacatgtaaaagtaatcaatccaatccaatacacacatatttatgtacatttttaaaagaatatatatacaattagtattttaatgtaaaaaatagtaatttaaaattttaatacatataatacaaatatatttcaaaacttattatattaaatgtataattcatttttacatataatttttttttctatatacaatttaaaacaaaattaaatatttctttctacatataatatttttttctgcttttgaatttttgttgttggagacataaaacaataataatttattttatattgttgtttgttatgtgaaaaaaatgtgttttaataaatattaaaaataatcaaaaataatcgattcaatccgtacttttgtagattagatttaaattgggcagattagattggatctaaaatacaaactccgcacttagtgcagattggatgcactatgagtaaaataatacgaattaaattggatgaacactcctaaaaaaatataatctaaaataaaattaaatatttctttatatatataatttttttttcttcttctttgaatttattgttttttattttatttatatttgt

SEQ ID NO: 358799 - DNA, 919 bp, Cannabis indica
cacttttatagggtttttcatctgatattttcattattttaatgccaaataattcaaacctaaccctagtggaatgctataaatagatagtgaaggcttcaggaaatttacacttaactttctactttttcattcagagaaaaacctgagccttctctctctatacctggccgcccactctctctctctctcttcttccttaagatttcgaaatacttagtgattagagtagtgcccacacacagcaagtgatacctcaatcatagtgaggaagatcgtgaagaaagactttcagcaagaaggagtttcagcactaaagaatcagagaaagagatccaggttcagatcttgataatactctgcgacagaaaggatacaagggttagagatctgaacggaaggagtcatattattccgctgcacccaatgtaaggtttactaaactttatatgtgtttatttcatcgttttagaaagttcatatttagggtgttaatcaacatacttgtgagtagatctaagatcctggtaaaataatttccaacacgtgcagaccgaggtagaagtggttgcctcagactctccatacgccacttgggaagcgcagtactcgagatacatgtctttggcctcgcccagttaatcaaaattagcctaagggttagccttccaaaagtcataaaaaatctcaagatccgctgtctctaaggcattcacattccctttaagcctcactacctcagcattaagctcctcctccttgtacttcttctctacctccaacctgcagaaaacagttcgaagaacctccctctcttcctaaaggccagtcacttctttggtcagaagcctccaaatccttggtcagctcggccactttcttcttggcagcaagaagctttttgttgacttcacctagt

SEQ ID NO: 358800 - DNA, 790 bp, Cannabis indica
ataaaattaaataaaatgtgattgaaggaggatgctattataaaagttatatttcgatgaatattatttaaacatggtatatcacaaagacattaatagtgtaaaaaaaaataaaaagtaaaaatactaattatatttttttaaaaaaataaataaattttaatagggaaacttgaatttataggctacatttggtgtatattaaatttttgaacacaagtttactaaaattaaaaaaaaaaaaaataggcacactttatatttatacccattatacccttctctcttcttctctcttataacttcaccatccatactccctatttccatctatactaatggtgggtccgatgggggttcgatggtagcccgatgctactaatttttttatgattttgtacatatcaaaaaaagtagcatcaggtgaccatcagaccatatttacatttatagatgttaaactccattcattaagctcgtcaggaaggtatcgggccaccatcggaccatatcatcgggctaccatcagaccttcatcttcaacatttactcattttaacaacaagaaggcatcgaaccaccatcgggcttaaaaaactaactttttgcccaaaactcatatttgaccattttggaccataaatctaacatcaactcacagatagcaaacattaatcatacaatttattccttttgagaatattgttgatggtgaagtcgtggttgatggagaagtcgttgggtccacggtggtcattgggtccatgggtccttgagtctgtggtcatgg

SEQ ID NO: 358801 - DNA, 532 bp, Cannabis indica
attcagttctatttcactatagcataatcgatactcacttctcagatctcgcatcaaaatcataaacagttaattggtgattaggcaattaaaagtaattaaatacgaatgaaataaaatacatagaaattgagggaaaattaaatcatattagaaccataaatcaatatcaaacaatctccatctagactctaattaactgttaagctactcatgttcattgtagtaaattcacatatattaattttagaaaagagaagagaattaaaaaaaaaaaaaaaaaaaaaactgaaaaccccgttcaaaagccttcgcaattgatttttatcttcaattttcgtcctccttgattacttgttgaaaactatagaagtccacttttttatagcgaaaaaataataaaaaagttgggtaaataccattttggaccttgtgttttgcaaaaattatcaattggaccctctattttgttaaatgacaaaatagaccctgtattttctataatggtacaaataggaccctgaattgattt

SEQ ID NO: 358802 - DNA, 904 bp, Cannabis indica
gaaaattaaagacaatgaatgatgatatcagtttttttggatgaaaagagatttttgatcattggagaaattttcaaacaaaaaatgaaaataaaaaataaaaaagaaactaaaaataaaaataaaatgatgataaacagggaggaaaaataaattgagtgtaaaacttgtcaaataacatcatgcatgtgaaggtattgatgtaatattgttgagtttttatatttttgatgtaaattttcctttttaatattcctaaaaatttttaaaaaatattacatgaaaactaaactttacctgaattcttaggaggtaccccctcgtacgtctgctacctctctctcagtctttgcaggggtcatgatcgtctttgcattgacgcgtccttggttcattttgtgctattagcatgctttgaatacttgggattttactaagtatctatcttcctaatgggtcccttcatatgagcaagctttcagtattttaagccttatggagtgcctttaaaagcttcaagtactctagcctttataagacggggatctcacacaaaggtgcttgtggcatgaatgaaggagatgttgcatggggtcccatattggggacttgtcagtagtattataagttcatgcgtgctgtattggctcaacttatatttatttgtgttttttaaaaaacgagtcgtgtagtgtcgtgccacaaaaaaaaaaatgggttgtatcgtgttgtgctaacatttttaaatcgtaaatctagtatttttgtgtcgtgctcgaattcgtgtcgtactttgctggtgccggctcgtatttcttaaacagcccaacccattttcatattcgggcttaaattcgtgttttactttttcatattttttttacaattactaaattatatgtat

SEQ ID NO: 358803 - DNA, 975 bp, Cannabis indica
gaaaccttacagtgggtgcagaagaattataatggctcattccgctcagatctctaactcttgtatcgtgtttgtagcagagtatcaccaagatctgagcccaaatctccttctcttgaatttgtattcttcacagccttacacactatgattgagtaccacttgatgtgtgtgggcacttactctatcactatacggtttgaaaatataaagacagaaagagagaagagtggttcgaatggcatagaatagatggctcaaactttttgactgaaggcaagtgttttcatcatgttttgatttgaggccatcactatctatttataagcaaccacctaggtttaggtttgaattatttggcattaaaatattgaaaaaataaatagtaaaatcccttcaagtggttggccataggatgtgggcccccactttgaaattttgccatttttccaactatttatcttctttttttatcacgaagaagatacttcattaatcaacaagcaaatacaccctcaagcctcactagaacaaaacttccctcaagccaaaaacaaagagacaaattaattacattgtattctattcaagtaggctctctcctgtctagtaatttgtttattatttacaagattcaatctatataaaactatactctttacttcagctacaatccaattgacagttttagaacaaccttcaaaaacacacctgttcctatttacccaaatacagtaccaagtggctgcaaggatggctatattgatgcttctttgtaacccagacggcttgagagtgagccattttttccaggcctcaagagagatcggccaagcaatgtaaccaagccaagcaaaaattctggatagcactctttgcgaaaggctacaagtaaagaaaaggtggtcatgagtttccaactatttatcttattttctcaaaaaatgctatttttttaattcaaccacttaaatg

SEQ ID NO: 358804 - DNA, 700 bp, Cannabis indica
ccaaggtaccttgccttctatgacgaattgcggcagtaagttcctcacttgcgtagtccacgccctcagcatcaactagctccccgacctcattgtatcccccatagttttggggtgcaacctcctcctcttcctctgcattggaaggactgctaggacgggcatcatcctgctcttcaatctcctggacctcggcgtccccttcacgatcctcctcttcttggatggctgcatcttgttcggcactgggtagggtggcatgccgagccacttcagggtcgaatgcgttgaccctacgcattgtcttttggtaggagccatcattctatggctggtcaaaagatttaaggaagaatttctgtcactcgaagaagttggactagaacaaagacaaggatgatcctcgtgcaagagttgaagtaattccttgtcaatttggtgttcgcttcccgaaaagtcacatgggtgcatctacaaaagacaacacacaagatgagtgtttgtttggaatatcgaacgttaaaacaagaaaatatgctgactaggaggactcaacagattgaagaataagaatattcaacgaaaagtcaaaactcaggaagcttgaaattttcaggagttaaggcaaaaaaatctcatgaagcctagaatgagcaagatgaaagataggcattatccagtttaaaagataagcattacg

SEQ ID NO: 358805 - DNA, 570 bp, Cannabis indica
aaataatttccaacacaaactaccattcacaatcgacactaccccaaggaagaccaccatcatggccacgttcatagtggtagatgtactccatagaacacgatgctcggaaggccagcctgtacaatgtttgagctatcttataaatattatgttcagcttatgaaggagaaaaaagaagaccaagaaatgatctcattctgttcgatgttgtatgaaggtcatttttctatagaaaacttgaaggctttgatgacattgaggataattttaaagtttctaatggtacaagatgagcgctttcttatgacattatgcctcttaaggatgtgcatggtggaattgcccaagttgagctgtaaaaaggagttagtgtctagctaaagacattaaagtagagcagcgacactactttgaaggttcaacatattcaaaggtcttaccgtcataccgtccaccgccatatgatgtggcttgaggtaagtcattttctttgtattttattatcacattggagaatctttagtttgggggagggacttataacttttagttagttttttttttttt

SEQ ID NO: 358806 - DNA, 588 bp, Cannabis indica
aaaactgaccaaaaacacgagggcgggccgcggcatgccccagaccatgccgcggcacctgggacaaattcccaggtccactcagaggagcgggccgtgggcatgctccagagcatgccgcggcatctgggtgcaaaacccagaaaccagcaagtttctcttcgaatttcagcccaaaaactcaatcttttcttagcaatttcacaaccaaatcacaaatttgcatataggattaatagcacatactagatactcatttatcatattacatgcatcaaaatcccagaattcaaattgctcaaaaacactcaatatcatgcttaagattaacaaaacctaagctcaaactcaagaacttcaaaaccaagctcttcaaaccaattccagcaattaaacactaaatttcacacctgaaatttcaacctagaattaccaataatctcagcccaattcaataacaagcatacaacaagtcaaactcaaatccaatccaagatagcactaattcacccaacatgtagcaagaacaacctaacccatgcataaccaaaatcaacaaacctaaacatgtttctaccacaatattca

SEQ ID NO: 358807 - DNA, 929 bp, Cannabis indica
cctgacaaaggaaaaactttagcatattgagctaagtgtggaagattatggggaagtatcaaaaaagacttaccctagtgaactccttcaagactccagccaccaacaactccaaagaagagtcattgtcaacacccgccagttgctcactgacctcaggaatcagccggttcatataatgggccagcatccccttgcccttcttggcatttagaagcaccgacaagggtgaagcaggtgcctacatccattcaggattgcccctgaccagctcagaccaaaccgttggtggtccagactccttggacttggcagctttgggggtagaggggtttgcagcagtcagctcctcgaaaagatcaataacctcctcgataggcctctttgcctgtgtagaggacacctcaccgctcttagacttcttggccggaggggaggcgctagagcgtccgcctattctcttcctcagagtgttgatcatctaccgagacatgtctgcacagaacaaaaacaatatggttagaagacagccatcagaaaaataaggcatgaaaaccaagaagctcaaaaataagataaagtaaaatgctaggtcaccgcccaaacaagactgagaagtccatcattacctgacatcgatcttatctcagacatgacagctttcccttttccaaaagcgggagggaatggccgaacaggtgaaatgggctccctgatgcgaatcacatgttcaacaggcttgggcatggccgggagtttcttcttcctcttcaatggggtcacctgctcttcattggcttcatcttcaagattcaaggcatactgcttggcccttggacctcctttcaacttagcttcacacttcagttgaatcagctcattctcctaatgagctcgtttggtccggccagcaccatatttcctcttct

SEQ ID NO: 358808 - DNA, 582 bp, Cannabis indica
atatatttatatatatataccagaatttattttttttgtcggaatataaacactgaatcaccaaactatatgtttcagttatcacatttaatgtccaacaacagtagttgctttgttctattttcatttgcaggtgtttaagcattattttgaagagttggaagaagattcacttaaggataactctgtggttgtggtaagtggatatttaaattgttgattttgctttattgtaattggatagattcatggttgagagagtcagaactgtagaatatcaaattaaaccaaaacaatgggaaacatttatggctagacttttcgacttatccctcatagaaattttttatattatgatttgggtaaattgcggcatacatacctaatgttttagattttatacactaaaatacctaatgtttatttttagaggcaaaaatacctaatgttataattctcttacaccgttactaccacttccgttattaactcataaatatggacacgtagagggccaaaatgcattacatttatttatttaatttaaaaatttaatattcttaatatcaaaaactaaatact

SEQ ID NO: 358809 - DNA, 604 bp, Cannabis indica
atattccggtcttcccccgacagccggacaagtttttgaactctatccctataagcaagagtgagggcagggtggtgatatgtcgaaatctacgggaaccaagttcgggtaatgctcgcgtccttcaccatgaagtactcatcagcaaaatgccctatcttgctgatggccttatcattcgtgtcggtcaaccacttgaagcctggttgagagaaatagaagtaccccgacctgccttgcttgggggtggacttcaaatcaaagaaccaggcaacttcgtgaggagaaggagtaccccacccctaggaagcgtagaagacgaagagggtagataaatacttaatgcccttaggagtgaactgggccgggcagagaccgaaaaaatctgccacatccttgaagtatttatgcaagggcatcaacgctccttgctgaccatgggcacccgaccaagcgcacatccccttgtcagggtttgtggcacaattgttgtgagcgggaatgtaacagtccagctcgcccatgtatccgccctggtcaagggttcgaaggcgcgcctccgtaatcttggacggaggacttacccacctagcacccaaggcac

SEQ ID NO: 358810 - DNA, 548 bp, Cannabis indica
atcgcaaatttctcagcaagctccagtatggactcatatgcccaatactgcaatgctacagcatatccatagacaaagtacttcgactccttctaagttgttcccttttcaatcttcttatccttatgcttcttcttttctactaagtccttactccaagtatctttcaacaagttgaaagaaactttcccccacgggtactggtagaaaaaaagaaggtcgtcagccattctcataataattagcagaactagggtcttctcctctttcccagtcaaaacacccatcacaaacagctaggggtgcacacgagtcgggttttcgggtttttgggttcgggtttttgggctttgggtcttggaaatacacaaccgaacctgattttcaggtgtacgggtgcacctggttttgggtcgggtttttcgggttgggtgtggtcgggttcgggtcctattaggctaagcccgaatgtttaatttatgggctgaaataaaatttaatttttaaaaataccattttttttattttaacattagttggaccttttt

SEQ ID NO: 358811 - DNA, 1517 bp, Cannabis indica
ccaccatctccaacccccctctcacctcaggggaagaccgtgaaaaatcccaaaaccccaaaagagaatagggattttttttgggtcctgagatattttgggttttgtgactttctgggtttcgattgaggtgagaaaggggccggagatggtggctccgatccagtgtcgacaccgcatgtgaaaacttgagagagaaaaagagtatcgggagaaaaagaggaagagagagagagaaagagaaagagagaagagaaaagaaaaaaaaaaagaaaaaaaaatataactcgattttcaaaaaataaaaaataatcaacgtcacgactttgaccaaggcctataattgtcaaatgagttaagacatctttcttgagagtcccatgccacatctaggggactcgaaaatattaaccaaccatttggtgttgggtctcacacacctaagtgtgcccaaactagggttcatgggcccgcgcaagcattttcatcctagggacctcaatctaacaaggaaaccaataatgatttgactcattttggcatgagaagcttagacttgtgcataaagttagaattgcattgcatatgctcttggtacttaggtacatcttattgtgacatttcatctttcatctggaataataaattccttctagactaagtcatcaacataggactctagtattaacattaatgtaaaatacttgcttaagattaagtaatcactagagatacataaaatatttcataaggactaggaattgtgcctaagtctttcgaatattgcaaggtttcccttattatcctcatgattttgataagttattactatctgttatcccactttttgcactctgacgtggcatcacatgatgtgacacgtggaatcgattccgagtatctgctcgcaggatatagtctgaacaggatacctcatatgcatgctcgaagcaaagcgattagcgatccacacagagcgaccaacacttagcgaattcagctttcgcatcgtgagtcatcaaagaaatccctataacttggggatcaaattgcagagatatggctagctatccaaatcccacgatcaatatattctgtatttactatgcaatctttctgcttatatccattgtaacgagaagggaaatacttcctctccaagctcatagccctataaaaagtgatgcatattcactgggtaaagggtcgaaagattttacttaagagatattgtctaagaattcatattcaaagatattgttgtacgagctataagaaaaggaacatttctccttgttcttgagttaatgcaaataacgaggattatgctattaccgaactgctcgggattgaacctctataaaattcctgtgtctttatattgctttattatatttcaatcattataaactacttgtcgcttactaaattatgttgggttttatgccctaaataaaactcatttcaatataatcagagttacttattaatatagatcagaaataacatttaatgtt

SEQ ID NO: 358812 - DNA, 620 bp, Cannabis indica
cgaaaaaccaagaaagttgacgacggacaacagcttgcgcttctccaagcaggcatccgtacggggactcctttctggaatgaactacagcaagaaggagctgctagccttcaggacttccagaagagagtccaaaaatatatcaacctcgaagaagcccaaatagtggcttatggaggatactatcccaccgggatagcagggtacatgcccggagtatcgccctcgggtactgccccgaccgcaactccacaaacaagcggcatacaattctctgccaccccgagatatagtcagggccaggccttggcgccagcgtcatcccatttcggcaacccgtccggaatgaatggacaaactccttcgcactctgctccgactgctagcctggcaggcccttcccagggctcgaggagtaaaaggtcctccaagggcagcacccggacgggggagaagcgccagaaaagggggtacactccccagtacactcaatacacggagctgtcggactcccaagagcgtgtgtactttgctactaggcaaaatacacactaccggagaccacaaccgttgtacaaggatagctcccggagagatccgagcaaaagatgcgagtacca

SEQ ID NO: 358813 - DNA, 609 bp, Cannabis indica
attacaaattatagttggttacgaaatttacaaatctgttttgaaattttagtaatagttttcaatttcaaaatacatattaataaattagatattgttttaaaaaaaaattaatgaaagttataatttggtgtgaaataattattttttagacttcacagtatatttagttgtgaaaaattgatcataaattcacttcctcaaaataaatagcaatattattcattgagataaagataagaaatttacaaaaatactgaaattttggttattttttacaaaaatattcacacaaaaatcttttttaaaatactgtgtttttataaaacactagtaaacacacaaaattgaacaactcaaaacaacattagaataactaaaaaacatcagtagaacagaaaaaacttaacacagtatactgcagtatgaaacttataaaaaaaatatagtaaaaaaaattgcctgatagtaaaaaaaataaataaaagttaagtacatcatttaaatttctctaaagataaaccatatatattagcgtactttatatacacatcacatatatattataaagttttaatacattttagtactattcacttttcatatctt

SEQ ID NO: 358814 - DNA, 468 bp, Cannabis indica
cttgacactaacataaaactattagtacatttttattgatcctaaattcaatctgggcttttcaaatgtagttgcagtcaatacttcggtgagtggatcaactaggttatcatcagtgtccattttctccatgagtacgtcccatcttaccacatattctctgatgatgtggtatttcctctctatgtgtttgcttctcttgtggctttgaggctctttactattggctatagcaccagtattgtcacaaagtaaaacaagcggtttttccattctaggaacaacaccaagtcctaagaagaaattttttagccaaacaagttctttcgcaacctcagcggcggctatgtactcggcctccatgttagagtctgatattgcagttttcttagcgcttctccaaacaactgctccacccccaagagtaaaaaaccatccccagatgtagactttctgtcatcaagacaa

SEQ ID NO: 358815 - DNA, 625 bp, Cannabis indica
actcacctcaaacatgttagaaagtacgttcttcttcgctcttaatctccacccacaatctgtatccttacatgtgacgtaccaaatatcagtaccggacttcctaacgtagtagtcaaaccctttcttcattgcatacaggccaacaaccatctttaaatgctctttgtctctaaaaaactttcccacatgtaactccccgcctggtgtgccacccgtagatatataatgactatgatcctcgatgtcttctcttgtatacattttctccttgaatttaccgtaacttgtcgaagaagaaaatggatcgctccatccagtcacattggtccctcgagcatcagtaggaccactaatatcattggtctctctaccattattaggacctgtactgtcagtagttcctctagcatgactggtttcgcctggacgactactactagtaccaggtgtttggcaattttctctacggggcattcttttccgtgtcggtggcctcggtggtatttggtacgatagtggagtcaagttcaaaggtacagcagcaggggcctctgtaccttggtcgtctcttacgccatcattgccctcaacataacattcagggtctggaccattaaaaaaa

SEQ ID NO: 358816 - DNA, 820 bp, Cannabis indica
aggaaattgtcatttggtgtggtctttcttataaaggaaccgagattaagaagttaggtggcgtttggttggaggtaatgaaatggaatggaaaggaaacaattttcatttcattcatttatttggttgcatattaaagtattggaatgtcattccaatatagaatgaactttccaccattttggtggaatgactagtattccattttgaaatagaaggaaagatcattccaatgcatgatgagaaaatatttaataatttttttatgtattttaaaatttattccattccattcttattcttattttcattctcattcctatttttatgttttcattccttccaaccaaacgccaccttaataatattggcggtaggcatagtcgaaacttagttttatgggaacaaaagtttcatttaattattgttcttgtaaaaaaatattgttaatatgattacagttaaatttcaatccatgagcttgagtaaattcaataggaaaggtatagattgggtgagatgctcttaacagtttgtaagtaattttgttaggcttttacttttaagttgtacatatttttgttgtgaatatactgattctgaattttttttaagaaaaacatgcattagtataatattatctccaatactgtatataatatttttattatactctcacatttacctaattaaggattgtcttttgttggttaatgctatcaatagcaaaagtcaagttctttctcctcttggtcttattatttcggattgtattaatcttatacggtccatttctttttttcatgtttcagttcagttt

SEQ ID NO: 358817 - DNA, 494 bp, Cannabis indica
tcagccaagctcaaaggaaatcattttttcacttgtaaatacttatagaagatatagattgcatatctatgatcagccctcctactctattgaactaccatgtttccaagatgtaaatatctgccaaaaccatttcttagcttccacgaacacctcaaagaacataaataatacaactaagttgaacctaaccatatcaggattaagatccatagacctaagagcaaccattgatattgacttagaaagatataacgataactatatgataacttatctaaaatcaatatcagttccttccaatgtatactccatacatccgatactagtaaactttgcctatgacagttagtagtcccgtgatccataaggggaaacaccgggtaagctgtgcaatgccacaccgcctggggaaggtcaagcgggatgattctgagactgtgtaggtatgggactgcacagttgaagagagcttaaatggattgattggtact

SEQ ID NO: 358818 - DNA, 844 bp, Cannabis indica
caatctcacactttttcatatgtcatgcaattctaagtctgattttagattactagtctcaagtgtaaaacctaaattactccatactaattaatggtgatcaagcattaagaagatgataattagcacaaaattgtagaaacaaataataagaacaaatatgggaataatctaaaaacttatattcataatctaaaatagttccaccaacactctagaatgagtgtttagttcataatcacaaacataataaccacaataatcatgttcataattaaataactaagcaaaagaataaagaagaagaagaagaagaaaagaactctaatgatgatattagttgatgatgattgcttgaagactcttctctcttgctcttcaatgtgttttctaatcgcatagttgcttgtttctatctctctagtcgtctcctttaatctgaattgcatccttctttatataggtcaacaaagatagatcaatcctcttagaataaggaatttttaaaaaaaaaaaatgatacgtgctgcgctatagcgcctaagagaaaaatttctgaacccgtgttgaaattatctttttttttccgtaaaaaatcatttttttccagccgggcgctatagcgcagaccccctgcactatagcgcacaacactaattttttctgcttcgatattgctcagtaaatcatgcataacttttgcgtctggactctaaataagatgagttaacatgttttggaaagttgggaacgagctctatcattttgggtttcataaactcttcgagaaaatgatgaaatcattgtcaaaaatgggctcaaaaatctcagtccatcacaaaat

SEQ ID NO: 358819 - DNA, 763 bp, Cannabis indica
tttttacataaatattaaatagtaaccaatctaaataactgatccaatctgcacttttgtggattgaatttgagctattgtgcagattggattggatccgaaaaatgaaatctatacttagtgcgaatcgaatgcactatgaacaaaatagtacggattaaattagatgaacaccctatctaccaacactttgtaaaagctaatcctaaagttggtcagccttttggttttgggccaacctatgggctcttctttgctacataaaaaggaatttacataatacacctaaaacaggaaaaaaaaaaatctacatttttaagaaatatttattcatttatatttttacaattttatgttatttcaatattattttcaaattatcccaaagttatattgtacttctgcaacgtgtaaacaatgatttttttagaacaaagtataaacaatgatctgtaaaaaattttgtaaaaaatatttttttcaaaaaaaaaaaccataaaattttagctatttttgagtatttctgaaataatccctaaaattaatgtattgaacataattttgcattgagcagcataaatatgttcaagtgtatttaaatttaagggaattaccccatatactgtttttataacttttttaaaaaaaaaaatttacagttgggtttctaaagtggttgcagcactagttgcaatagggatttctctacgatttttcgttacgatttaggttgcagcgccagttgcaatagggatttttatgt

SEQ ID NO: 358820 - DNA, 713 bp, Cannabis indica
gatgtgttacagtatcagcctatactcggtacactagtcatactctagacttaccgatgtgatacagccaaacagtacagtaccatcgaccataatatcagcctatactcggtaccctagtcatactctagtcgtaccgatgtgatactatcgaatggtgcgaagccaacatacatctctaatgtaatctaacaggcttcctaacatgcacgctaaacatgtaaatacatatgcatactgttatactaatattacatcaatttcgaaattaggtgtgccaatcaacatgagtggaacgatctgcactgcgatttacaggctcctaaaccataacaatcacaacactgataagtgacacgctaaatcacttcctagggacttaaactagaaactaaaagtttccctatcgataaaaagcatggcaataccctaaacaacacaaaaatgggaagaactagggttcccaaaaatgtcccaactggtagaccggttctacaaccggaattccagttctcgaaaattcctggaatccccaaccggtcgaccggttgctaatggcttccctgaaccggaattccggttcagtgcagaaaattttcaaatattcactactcatccaattcaaccccaatttataccaaaacttccagacctgctatttagaccccaaggaacataaccaaagcaagaaaccaagcttcatgcacaaaatc

SEQ ID NO: 358821 - DNA, 687 bp, Cannabis indica
aaactctttgatacgaaataactctctcaattttccctctcgtccttaactcccttttccctcctttactgagattcaaagaaacctccatatcctgtccagattcttgctgtttcctcttaaatctactttagtctcagaagcgatcgagagcaaccgtagggaaaatcatcaaaactaaaggttagtttcgaatttatttgcatatttgttttctgttaagaaagtaaaactgctttctctgggtttttgtatttcgaggaggggtttgagaatgcatgcttgtaggaaacatatatagggttctgtttttctgtgtagaactgcgtaatcacagaaaaatagacctgaaatttgcatagccgtaaactttaggaagaatgtttaaataatcgcatctttcctatttgtttatcttttgaatacacgcgggtattcggatgaacacttcgaatactcgcatgcctgctcacccttggtttcacagagactttatcacttctagtcgttgtttagaacctagaattttatactctgtatattttgttgcgcgaacattggttaagtctttcaaatggtgggcgtgtcgcagtattctaatgtccatacgtgcgatcgtatgttccttgaggtactgcgatacgcccagccatttgtggcatacgccatgttggaaattattttacc

SEQ ID NO: 358822 - DNA, 503 bp, Cannabis indica
aacattaaatgttatttctgatctatattaataagtaaattcgattatattgaaatgagttttatttagggcataaaacccaacagaatgagcgagctctactctgtatagtcgagctatacactaatattttaagaatttttagactacattggtcgagctctactaaaagcagttgagattataatctcgactatttaagttcgagctctactaacactaatcatgttatataatatatcaaatagactttggaaatctcaaacatatttagtgaagttctactcattaacctcattatttgattgagttgttattgtgcatgcaggaggagttggttcgttcaaaatcaactgtcgttagattggttgttttggatctataatacttggtctttttcttcctgccattgaattaccaaaatatagtatgttagcttgggttattgagcaattgtacaacctaaaaaatactaattataagtaaatatgcataagagccaa

SEQ ID NO: 358823 - DNA, 622 bp, Cannabis indica
ctcttatgatcaatataaatttcacatttttcaccataaagataatgccgccatatctttagagcaaaaaccacagcagcaagctctaggtcatgagttgggtagcgttgctcataatccttcaattaacgagagacataggctataactttgtcagcttgcattagaacacatcccagaccttgtctggatgcatcacagtaaacaacgaacttttcttgatctgatggaaaagctaacatcggagctgttattagacactgcttcaactcttgaaaacttgcttcacatttatctgaccacacgaatcgctgatttttcgtagttaactcgatcagtggcatagagattttagagaatccctcaaaaaaacgtcgataataccctgctaaaccgagaaaactttgaatttttgtcactgattttggcctcggccagttcttcactgagtcgatcttgcttggatcaaccataatcccattctttccgacaatatgtcccagaaaagatactcctgacaaccagaattagcactttttgaactttgcatacaacttgtgatccctaagtcgctgcaataccattcgaagatgttgctcatgctcctcttctgactgagagt

SEQ ID NO: 358824 - DNA, 693 bp, Cannabis indica
atgaagaagaatgtggttgaatttgtatcgagatgcttaacctgtcagcagatcaaggctgaacttcagagactggcgatagcctttaactctacttgagttgaaatgggaggatatcgcgatggaatttgtggttggattacctaaaaccacgggtttgtttgattctatttgggttgtggtagatcgattcacgaagtctgcacattttctaccagttaagacaacctattcagtggatcagtatgcagatttgtacgttaaagaaacagtaagactgcatggtgtaccaaaatccatagttttggatagagatccgaaaattacctctaaattttggcaaagtttgcaacgggctatgggtactaaactgaagttcagtacagctttccatcctcagacagatggacagtctgaaaggacgattcagatactagaagatatgttacgagcctgtgttatggattttgaaggctcctagagtatgtacttaccgttgagagagttctcgtacaataacagttatcagagtacgatagggatggctccctatcaactgttatatggaaggaagtgtagatctcccatccattgggatgggacaggggagaagaaatacctaggtctaaaatcagtacaacgaaccaatgaggcaattgagaaaattaaagcaagaatgcttgcctctcagag

SEQ ID NO: 358825 - DNA, 598 bp, Cannabis indica
aataattaattaattatactattaacaaaagaggcatgcatttcatttaattaacgatgacttctatgttacaatactttaaagtctacaagtcatcataatcatcatcatcattaacaggtacattattttcattatcactatcactagtgtcttcatcatcagcataaacaatgaagccatctaaatcttcatggttaggctgctcacgacccttgttggtcacttgaattgggtcaacatcatcacggacatattcaacatcatccaactgtgcaagttgaacgactaaagggattcctgaagagtttctttcttttatagtggtggtctcatcatcatcctcatctaaaagatcccagacattgccaggggagtaaaaattgacaagcttccaatcaactccattcttcaagttaggattgtaatatattaaattttcttgggatgcaagtatgaatggttctttttggtaccattcacgggcaacacaaacactagtggaaaaaccatcactttttgtcctgtcaccgtttgtgtcccaccacttgcacctaaaataataacactcaatccttcaagtaagtgaactcgtaca

SEQ ID NO: 358826 - DNA, 667 bp, Cannabis indica
tgttcaagcgatgacacatgacctgcggagatattctgaccatatctgactgttttcaagcaaaaacatcaagattttgtttcagaaaagttgttagttgttctcgctgctgaaaagtcaatttagaaccaattttcaaaactttgctattatctataggatctataggtacctcaatggtgtcttcagcgacttgggctactgcggcatgatcaaggatccttggatccagatctggttcgtccatgtatggtacctcttcgattgtgaggacctcctggcgaggaggtggtgcctccaataagtagataatatttactgactttttctccgcgagcttgattgctggattgtagcattctcgtgagtctgactggagtcctcgcacagaacctactccggtgggagtagggaacttcattgtgagatgatagattgaggttatgatcttcatctccttcaagattgttcgaccaatcacggcattgtatgccgaatactggtcgattattgggaaattagccattgatttggctgttactggggcggttcccaaggtgattgggagtttgatcatccctttcaatgcgatgacgttgccggtaaaaccgtatatgcttgatgtcacgggtcgcaggtccttctcttgcaaccccatttgtttgaa

SEQ ID NO: 358827 - DNA, 537 bp, Cannabis indica
ctgtgagatactttcgtgcatgttctattggagttcctgtgtgtgtgtgtgcatatgaatacagattgaaacttggcgtgtttccaacatctattttctaaatttaacaacacatatatatcacacaatcaaaaaaaattagatcttaattggtttcttatatattcttagatatgtcgacttctagaagctataaaaatatgtttttctgacgtttttagacagccgttaaaagtattttcgttggtttctataatcatcgcctatacgatcgttgtaaaacggacagaataggggacggttcaaaaccgtcgctaatgtggatttcttgacggtttaaaaccgccgcctataacagggtataagcgacggtttataactgtgccctatactataggcgacggttttagcacacagtttaaaccgtcgcctatagtataggacacggtttaaaaccgtcgcctataccctgttataaccgtcgggaatgtaaaaaaaaatacaaattttaagttttataatattacctaaattaaa

SEQ ID NO: 358828 - DNA, 579 bp, Cannabis indica
aaagagatccaggttcacatcttgataatactctgctacagaaaggatacaagggttagagatctgaatagaaggagtcatttaatttccaacagttttttctagaaccatgaacacaacccgactcgagttgttgaaatagtttttagcacttttttgatttcctttgatcgttccaatacatccattgtcatagggaacttcatgcataaattcttgacggggattacttccccaaagtgttgaaattttatgtcctaaataaaactcatttcaatgtaaactgattttttatcaataaaagattagaagtcatttatgtatacatgtagttttaatgtttgtggtttaatgtgtacaaaatctgataagtccaaaacatatagttattcacaattacagtgatgtcaacatagtggaaggtaattgtgattatatccttgaaaagttaatctccctcgatttatcaatgcactggattttcactgatgtgatagccagcgataaagtatacttacactttggataagtgttatgttctttccagaacattagtaaagtatgctagttttggatgta

SEQ ID NO: 358829 - DNA, 823 bp, Cannabis indica
ttcaaagtgtatgaaagagatgcatgacctagctactataaggtgtatttataatcaatatacaccttattgacagctcatatacggtctgaacaagacaacaactcactagacaattaccctaaaaaagatattcaattagcccctgaattttcgtttctgtacctatagaatcgtgagcagtaagtatgactttctttttatagaaaagaaaagtcttgcttcggttttcttcacaaaaaatctgatcaaacatattagaaaacttacacaagatcaaataaataaaggtggatagatagaaaatgatgagtcatccaacttaccctttaaaccttattttttataaatagaaaaattagatatatttccttccatatataattcaatcaatacaaaaatatagaaaccaaataacaactcagctgaaataaataaataaataataaaatatttttgtcaaattaaagatgccaaaaatagaattaacaatatctatatatatttctatagtaagttatatgttttttgttatatggtatataaattttattatatagtatatcattttattttagaccatgcatgtttagtttatattttattatatataaaagtgatatacaattctgtaagtatgatataattattttatggttgtatgtaattttgttaatatgatatacacaatttttttaataatattatattattttattttattttttattataggtatatatgtattgttgtatggtatataatttttgttgtgtatagtatactatttacttaaaatgatatttaatttctattttattat

SEQ ID NO: 358830 - DNA, 889 bp, Cannabis indica
catccgatactagcatactttgctaatgtcctgaaaagaacataacactcatccaatgtgtaagtaagctttatcgctgactatcacattagtgtaaatctagtgcactgatgaatcatgggacattaacttttgaagcatataatcacaattaccttccattgtattgacatcactgtaattgtaaatacatatatgttgtggatttatcagaaattgtatactaaatcataaacatgaaaactacatataaatttaaatgacttcaaatcttttattaataacaaataagattatattgaaatgcattttatttaggccataaaatcccaacaaactcccacttgcactaacataaaacaagaagtgtatttcaattaatccattgtcttgatatctagatcaagtgtagtgtgtttgactaaacccaaataacaggaactgtaaggctatggtaagcaactgatttatccaccattacttcctttgtgttcataaaacattatgcaacatcatatttctatatgtattactcctctagggatactgaattctttattgcttgttaagtgcatctgaataaatagaagacatatctctaattctatccaaaatgaaatatagatagaaatagtttagaaatttcttcagtttaaataactttccagtgcttttcgaaagcaacaaagttgtttagcttcactggtaaaactaaattattatagatgagtttttacatccttctagaataattcctccacccccaaagtaacacaccatctttgatattaagttctgagctggtacagataaaatgattctagtatacaccccaatgatataacatataggtcactttcataattctttcttgattctctcccaatgt

SEQ ID NO: 358831 - DNA, 828 bp, Cannabis indica
aagaaaaataaaatatgaacaccgagttttttacatggttttgcagttaaaattctgcatagtccacgaatcaatcttatttagatttctaagagtttctttcgtccccccttttgatcttatctgccactatttataattccatagtggcaatgaattgcaaagctgaccaaaatacatttactgccattatccttaaaattatgagatttgattacaaatcaagccaaataaatgaggtttttacatagctgtaaatatcccgtctttattgggccgagatgaacgcataattaaagaaatacggtaagtcgtatctcatagggatgcctcgtctaggagggcgccaagatcactttgatagcaagcagttgcttgtcattttggcttctcgagactaatattgtcttaactctgatagttatactctctggggtggagaggatcttcctcgcatgcaaaacatcttttagcgagataaacgcctcgctatctgttatcttggctcgtcatactaactatactcagtttgtatgtcgtataatgtacgctaatcatttttagcgttgttgttatctctttcacgcagcgaggttgaggcctcgtcatgaacgtatgcacccacatggtttctcgtcaatacataaattagcagttcgtatgtttctatctcgcagaaggctattcagccagccgagttataaacctaccctacaaattatatttccaacgagttgttccatgctaagcgtacttgtcgtttgtgtgttttagctcttcccagctcgacatgtgtcctcctctgatgtgcttaccgaacttcgggta

SEQ ID NO: 358832 - DNA, 769 bp, Cannabis indica
atgatatttttgactcttgcctagttcagtgactactaggtatacacctagttcttcattgtctaggggtttggacaacacaagtggttgagccaattgtttctttagctcctagaacgcattttcacattcctctctccactcaaatttgttgttgcctctgagaatgttgaagaagggtacacatttatctgtagacttggatacaaatctgctcaatgcagcaatgaatcctgttaggatttgtgcttccttgacagtggtgggcgacttcatgttcgaaagggcttggatcttatttaggtttgcttctattcctctgtcattgactatgaagccaaggaattttccatagcctaccccaaaagaacatttgagggggttgagcttcatgttgtagctgtgaaggattttgaagtattcgtctaggccctccacatgccccccgtcctttttggacttgacatgtatgtcgtccacataaacttccatgttgcggccaatgagatctttgaacatcatgttcaccattgatatgtggcccctacatttttcaacccaaaaggcatgattttgtagcagtacaggcctagatttgtcatgaagctagtgtgctcctggtctggcgaatgcatctttatttgattgtaacctaaaaacgcagaaacttaggatttcatggtcagctgtggcatctacaagctggtaaattctgggaagcagaaagcagtcttttggacatgctttgttcaggttggtgaagtcaatg

SEQ ID NO: 358833 - DNA, 598 bp, Cannabis indica
aatctaggaaggcttgggggcacgcagatgacctggacgaatgcttcaaagtcctcagaaaatataacatgaaactcaatcccttaaagtgctcctttagagttagcttgggtaagtttctaggctttattgtcaacgcccgaggaattgaagccaatcgaaagaagattcaagccatcctggatatgaaatcaccaataaaaaccaaggaagtacaaagcttaactggtcggatcgccgctctcagaagatttgtttcaaaatcaacaaagaagtttgttccattcttcaacattctacgaggaaacaagaaatttggaacctctgtgagtgcaaaacctgctgtactcgcaaaacgtcttgtactcttgaaacctctggacggagaagagcttgggatatacttggctgtcacggagcttgttgtgagtgttgtactgatcagagaggaagacaatgtacaacatccggtctattacattagtacaagactcattgaggctgaaggccgatacccattgatagagaaactcacttactgcctgattctagcaacaagaaagataaagccctattttcaagctcatcatgttcgggt

SEQ ID NO: 358834 - DNA, 731 bp, Cannabis indica
tttttaaaaaaatatttaaagaattaaaatagaagtatgctacaaaaaaatgctttatatttttcttaattttaaaatttattattcatgctctacattaaagctagattaaattcaattcgatttaattaaaccgaaccaattcaattcaatctaattacaattagattggatgtcaaatcaatataagtacaattgaattggatcgattcttcgattagataggttattagatgctagtctcaaaatttaactaaaaactgatccaatctaactacaattaatacttattaaaatattatttatacagaataaaaaatattaaaaaaatgaaaaaaaaatagttaattatattttttaggcagtctctttatttactaatacatttaggtggcgtttggtaatatatttttttagttagttttctgtttttaaaattaaaaaagtggaaaaatatatttttcaaaaacatgttctataaaattattttcactttttaattttttaattgagaatcaaaattttaaaaacacaaaaaagtcactttcaatattttttaaacagttttttttttctttaatcaatattttagacttcggcgacacccgaacccaaatcctccccccacggctttagcgctgaacccgacctctgacccgaatctgaatccgaccccagacctagacccgatttaaataaaatcaaaaaataaaaatgaaaatgaactttac

SEQ ID NO: 358835 - DNA, 911 bp, Cannabis indica
cggctaccatttcaatggaaaacacgtgtccaaattgggaagaatatggatacaatagcgtgtaatggtaattacatttaatggaataactcattaaatgcagaagtgacagagtatatatacaacttgttgactataaggtcttatccgagataaagatatacaaactgttgcctcatgtattaacaagaaaccatacaacattggatgcaaaaggcgagacatcaacctcgttacgcctgggtagacataagcgaggcataataactgtgaaaacacttggcgtataatatacggtatacaaactaagtataacaatcgggtgaacccaagcaactaatagcgaggcacctatctcgctattagaaagcacgctcttgatacttccaccagtcagcttcagacatctttcaatgagatttatagtcttgacgagttggttctctcgagcagaaactgacattcaaataatgtagattgttggagttcaccttgtcaccgagaactgcgattgtcagatggagcgttatgtctttcgcgaagaagtgacgaggtttacattatcaacctcgaagagataggggaaaagatccagctcgctatcaatgtcattagtactgagttcatgtcgagacatcccagaacgttatgatttataacgtgtttaatacacgattatcttgacccagtaaaagcgggctaatcacagctgtgtgatattcaaataataaccgcatttattttaagtgatatgtaatcaaaatccacgatttcaggagataattgttgtaaaaattacagtcgcctctataattaattgctgactatgttattataaacagaggagagttagactaaaaaatggacgaaaaatcataagagaaaaaggccctagaacaatatcagaaatc

SEQ ID NO: 358836 - DNA, 602 bp, Cannabis indica
ctcattagagacctaccactgattcatacattggaaccttaagagagctatatcaaatcctacctatactgatatgaatagtattatctctaggtattaatacaactaaaatgggagtaggtcattatctactaactaagggggttgaacgcttacaaaaatccttgtgttcttttactttctagctccaattgtgtaacacatggcaagcattagtgttaatacgactctgctgtcggttggccaatttttgaggtcaataatttggtacttttattgagagcgagttgatatcatatatgatcaaacaccatggttaacacaagaagaactttggttgcactatctctatcattgggtcttcctcaagaccctctgactatagatcttgatgtccatgttccagccacaattggaattcccatgaatatttcatatgtggtcaatcctgccaccatggcaagcacttcgaatctggttactaaaactggccagagtgacacaaatatcccgatagatctaaacagcaggcccttgcctaagggaggactttttactggcgcctcccactaaaggaaggacccttggggaacaacccccag

SEQ ID NO: 358837 - DNA, 616 bp, Cannabis indica
aacaaattttataaaaaaaaaaataatgtaataaatacagaaagatacaagttgtcaaaactaagtacaaaaaaattgtaatacaaaagcatattgaggtgttgaaattattttgcttattggaattaggttaatgttttgttatttttctgttactttgtagttatatttttgttattttatagttattttcatgttatttgttaagttgttctaatgttgttttttagtggtttttgagttgattttattaaactaaaatacaatatttttattataattttaaaactttaaacacaatattttcgtaaagttagtacaataaataaaaatgtaaaaaactttcattaattttataaacttttcctcgtatttttgtaaattctcctaataaaaaatataactcgaaaacaaattagaaagtctactacaatattgatggaactagctgactacttgactaataaggctctaccagcctctcgttttctccagctctgctccaaactaacagtagctcctgatgagtttgaggaggatgataaaccattgtatacttgtaatttgttagatttaattctttcattagtaagcctagtgtaaaaactatcttctt

SEQ ID NO: 358838 - DNA, 1032 bp, Cannabis indica
tagtctgcaggctaccgtgcagatcaaaaagcctaccaaactgtaggtcagcaacctccaaatgtcgttcccttgggtgagacggacgaagatccagcgatgaatacttctgagacttcaaaggtcagccgcccaatcgccggtcatgagttccactcgtgggcctagtggtaggcaggaaaaccttgtctagtaattcatcaggagaagtcatacctgatgattccaaccagatcaatggtgccattgcacccgtcaaccaagcgaatcaatcgctaaggcagccaggcacttctgtattcgaaaggttaggggcgacccatgacctaaggaatgatctgaactgaaggaggggagtagacgattagaatgttacgacaatcttgtagcccaaaacccgtacataaattcccgctctgaaagatgctgatgttattcaaattgaccagaataccgagcaggttagcccagccgtacaggcacagctagacgaactaaaaaatatgtttcatggcatggctggacaaagaaacaatgatcttgagctgaaccgagcatgcggaactcctttctcgcttgagatctatctcctgccgttgccccacaagtttaaaatgccaacgtggaagatgtacaccgggagagaagatcccctttcccatctcaagtacttcgaaatgcaaatggatttacaaggggtatgaggatatgtatgctgcagaaccttccctgctactctgtcagaagccgctcagcaatggtatttcaagttggctcctggaaagtttagttcatggaaaagcttctcttcagaattccatgcacaattctcctcctcacgccaacttccattgcatttgggagactttgatgaagttaagcaatgaccaggcgaacctctctgggcatacatcagtaaattcatgacggaggcgaccaaagtttcacgagtaactaaagatggaaagttatctgcgatactggggggcatcgaagtcctcggaaaaatctagaaggatataaggaagaacg

SEQ ID NO: 358839 - DNA, 1141 bp, Cannabis indica
tgagtctttttcctctaaaaaagaaattctaaacgatgttgttgtctcctctgacagtgaggaaactgatctggagcctgagccatccttgccaaaatctgcagcagcaactcctcgttctgcttcagcagcagccaagggtaaatagcccatgaagagcaccttgtctggtaacctctcttcctctcaagctataaattctagatttttttttataatgataaccagcatgattggaatttatatgcttcccgtaagtttgagagtgaaagaaattttgatttacatgctcatagtcgtagagtctatgacattgtgaagtttgttcaatatcatcattggaaagatactctaacttgtcaaagaattttatgctaacttgattgatgatttgcttgataagaaatttgagttctttggtaaagtttatgttcgtggccattagttttcctttactgagaatgatatagtcgaagctttgaatctgctcaaaggtgtgacaaatgctccagtgactatggatcgtcacctcatgattactaatctcactggtgcacgagttgaatggcaagctggtcaaagtcttcgtatcactcatctcacttatggctatgcctcactcatgcggtttgctcttagtaattggcttccaaactccaacaagactatggtatctcaagacttagctcatcttctttttcgaatcaccttagggcgaccatcaatttggcttctcttatcttggaccaaattgtttccttctgaagaggtaaaaaccgcagtcacaagcttattttttctaacttaatctataaagttctttcctctcagaaagatgtggcttattcccatgagacactcaagcctcccctcactagaaccatctttcaaccctcagagtactttgatggatcttttcccaagcgtcctaaggattttgttggtgcaaatcttgttgctggtgcaagtttcagttctgcttctgcagatgtgcaggaagtcattctgttgaacaatcgtttagctgtcatggaggaggttcaacaagagatgtccaagcaattgtccactctgctcaagctttacggggcataagtttttttttctttccttctttttgactatttgttggacttatttt

SEQ ID NO: 358840 - DNA, 547 bp, Cannabis indica
aagccttcacggcgataggcctcacggaccgtgacctctcaccaagcggttcccatctcacagggttcaatggaacaacactcatcccaatgggaaaagtgaggctcccagtcaccttgtgcccagagagaccccagagcaactttaagtactgcacatttatggtggtggactgcccaaccacttacaacgcaatcctcgaccgactggccctggtggatttcggtgcagtcacgtcaattaggcatttgtgtctgaagtttcctactcaggaggctgggataggaaccatgagaggaaaccaaggggaggccaggcagtgctacaacgttgccgcccacctacccattctaatggtccgtgaagttattgagccaagaatggcagaagaagatgagttggatccccgtgtgggatccgaaaaaattgtagaacctatggaggatgtcgaggaagtgtccgtgtgtgacctcgaccctgccaaggtcctccgactaggaaaaagtctagaaccggaggaaaaagaaaaaataattaagacgctaag

SEQ ID NO: 358841 - DNA, 703 bp, Cannabis indica
tgacggctgcactcgattacttttgatttcccatatttgcttttgaggcgggaagtcgaggcgtctaaggttcctttgtatgcagttacccctttttcctataaatactcattgtgttggcacattactcattttatcacccatcgttgttaagtaaagtccatagcgaaaagagagagttttctggcttcaaagttgccgaagtgcctacagacgattgctggctcgcttgaacgcagacattcgaatctttcagtaagtttctgattccctttatgctttcctttgcatgtttacgctttgaatgtaactatgctgtagaaagaatgcttaggaaaccctagggttagaaacttctgtgactcttcttttccatgtcctcatgttggctttcagtcgtagggcttatttttgaactgcattgcatctgtcttccatcttgattattccaagcttcatgaacttttttgccctaactcaagaaaactttctgacttcttgagttttgtcttttctttgaacatagtcgttctttaatctgttgagtactcctggtcggcatatttgattgtttttcgtttgatactccgtccaacactcatcttgtgtgttgtcttttgtagatgaacccaggtgagtcttgggaactcgggcatcagatcgaccaggtttgcttctgttggaatttattttaccaggatct

SEQ ID NO: 358842 - DNA, 825 bp, Cannabis indica
gtttgggtttgagttcgggtcggagtttgagtcctggtttgagtttcggttcaggtccgtattttagtctaggtccagaagaggctccgggtgttggttcgcgtcctggctccttgtctaggttgggtccaagtcccaagcttcaatcccgattttagtctggattgagttctgggtctatgtccttggctctgatcctggtctgggttcgagttcgggtccaggtcctggtcgagctttcggtcagattctaggtgtgggtgtttgagttcgggtccgagtctgtgtctgggtttgtgtccaggtctggaccccgatttgggtctaggttcaggtgcaggtcccagttcgggtcccgagtgcgggtccaagtttgggtttgggttaggatctcagcccaggtctaggtccagcatttccatcccattctgggtcttggtccgagtccaggttcgtattcggatccctatctaggttcaagtctgtgttttggatcaggtcctagatttaggtcaaggtccgggtctcagttctgttctgggtacacgactgtgtctgggcctgagtttcagtctcagttttggtctgaggctaggtctatgttcagttctaggtcttggtccgggcactcgtcagggtcctagtcttgttctggggtcctagttcggcgattcttgttcaggttctaattatgggtcccaacgtctaggtcaaggtttgtgttcgggtttgtcgttcttcgtttgggttttggtcctagtcttagtcccagtatctaggcaccgactcaggtctgttccatgccccgttacacgaatcccaagt

SEQ ID NO: 358843 - DNA, 1084 bp, Cannabis indica
atatattgacatatattatgtttttgtcatcagtgttacaactactatttcaataacaatggtgttgaataatcttccacctcgagttagattttgccctaatgatgaagaaatagttggattttatgtatataacaagggttatttgcggcgtaacctctttaagtggttaggcttttgcaactaacccctaattctaaaatttttgtggtaaaaccccctaaactcgtgttctgttagcagtttaacatttttatccatttttagctgttaactaccatggtggaatgtctacgtgtgcacaatgtacacgtggcacaattttattggtcaatgtaataaatatttaaaattataataaaattaattattttaaaaataattttttttttaaaaaaaaaacctaaattccgtaattccctctttttctttcgccctccttcttcttcctctatcttcatttgcaacaccaccaccacccatggcaactcactacaagctctacattttccagaatgaaaaagcctacaatctctgtaatttcactcaaaccacgcttctaagcaaacccaatgccacttttcacacggtattttactctttctttctttcagacaaaataacaaacaccttatatgcattatttaacttctcttaatcacttcaataaatgacctcaaactatggattcccaacatgggtttttctcataaatgcataaattcaaatagccataatctaattttctgatttctaacataaaaattaaacttttatcttaccctaaaaatatacagtggtacccatcttgctctggtttcttatacttcactttcaacaatagctctctcagtagtacctgccaaggctccaaaaagctcgccgtgaaagtgacttcttcaccagaaagagacagatctaaggagaggggtgcagagagactgattcggggtttttgggtcttcgttgagttcatgtggtggtggtgctgggttgagatggtggtattgggttacgatggtggtgagttgccatgggtggtggtggtggtcatgtctacaaatgaagatagaggaagaagaag

SEQ ID NO: 358844 - DNA, 870 bp, Cannabis indica
ggattcttcacagtcttacacactatgattgaggactaacttgctatgagtgggcatgcactcaatcactaaggctcgaatttttatgtgaagaactctataggtttcaaaatttggaagaagaagaagaagaagaagaagaagaagaagtctcaaactctctagtcttctgacaagatacaaactctgtttagagtcattagttggattataagactattcttttctttatatactaattcacttaggtttacgattgaattatatagaataaaaaatgataaaataataacaagaatagggacttagtggttggccatgatgtgggccctaaactaattaatttttattatttttctcaatcatttatctattatttcacaaataccacattttctaattctaatcttatattggcaaaattatttaattaataattaaaattaattatcaaataaaattatcatttatattatttattaattagactccacaatgtctcttaattaacaaataaaccctaaaatcctatttcttcataataaagccataacttagtgaaaattcataaataagacatagtctaatttagaattataattgattaattaaagtcaattaactgagtcttacaagaaatttgtctcaactaatatggggatcataggcctatataactaagcttccaataagtagatctagaatttaccaagtaaattccctaacttattaattcattgcaccactatatatttggaattgtactctcaattatatagaacgctctatatgttctacgatataaataagctatgaattatccatttgttataatcttaataatcaatgatcctctatagatgatctaca

SEQ ID NO: 358845 - DNA, 790 bp, Cannabis indica
ggaagttcttcctccttttgagcagagtcacttgctcttcctcagcctcatcttcaggattcaaaggctcctaagcatactgtttggcccttgcacctcctttcaacttagcttcactcttaagttgaatgagttcactctcttgatgagctcccttagcccggcaagcaccagatttgctcttcttctccttcacaggcttaggagtaaaatcctttgggaaaagcccgtacttcacaaagttgtccttggaggtcaacgaaatgagattttggtcatcccccgacaactgagcaagtctttgagctctatccctaagagcaagcgtgaaaggagggcggtgaatgtggggatctgttagaactgagtatgggtggtgcccatgccttccaccatgaagtactcgtcaataaaatgcccaattttgttaacggccttgtccccggtgcccgtccacaacttgaagactggttgagagaagtagaagtaccctgacctgccttacttaggggtgaaattcaaattaaaaaactagcttacctcatggggagagggcatatcccacctctgggaggcatagagaacaaagagggcggacacaaagtaccttgccttctatgaggaactgcagcagtaagttcctcctcttcctccgccttagagggactactaggacaaacatcgtcctgctcctcaatctcctggacctcagtgtccccttcatcatcctcctcctctttgatggctagatcttgttcggcgctgggtaaggtggcgtgccgagccactt

SEQ ID NO: 358846 - DNA, 590 bp, Cannabis indica
atcaaacctaaattatgtttattaatatcatttttaagtgcaaatatttataattaactaaaattgcatatatttttttctgactttttttaggatcgactctatataagtcatgcccatgtatattttatatatatatatatatatctattatatatatttatatatattcaagtatgagtacgtagtatagtagtatgaaatgaaagtgaagacatagagaaatgtccaaaataaagaattattaataaattgaaactaaggtggagatggaccatagtttcatgatgaaatatttaatatctctttggattgacatagtgatatatcactataattttttgaataattagcatttttaccccctcaacttatgacactactatattgtgccccctaaaatatatgacatgttaataatattttaagtatcacttgatttagtgtctaatccattatttcattacggtaaaagtacacaatgtatactttatcagttattaactattttaacacagatgttaaaagctaacttagggaactgatgtggctttgaaaaaaaataacttagcgaacatatggcatagtat

SEQ ID NO: 358847 - DNA, 824 bp, Cannabis indica
atagtgccaaaaatgcatttgaagttttctaaatgcgcgtggtaaactggaatatcaagaactctgtttttggtactgtaaactattcagaatttttaaaaaatttacagggatgatactgtaactataacgaatatcgctatgaaaaaaaaaattaaaaaaaaaaataatttcgacatgtaatttcggacgcggaagttgattgagaggttgtaataggaggttgtaattagcactcttcaaagtaaatatcttctctcatacctgataaatccctattttcttgtcaaaacttataaaatgaaaaattgtaaaaaaaaaaaaaaaaaaaacaatctaagaattcacattcggggagatcatggaagatgaagcatttagcattgacaggagaaatagccaggaggaggaagcatcgatgagagttgtttgcattgagaggcgaaatcgtgaaggaggagcaacatccattgggaaccatcataactattctaatttacaataaacttattcccagaacttaaaagagagaaatataactgttggaactcaagtgatactccaaatagtgtagcttatcgtggattgaaaggagtgcttacacaaacaaaaaaatcaggaaaaagttcataggatgccataatattagagtaagatatgttttctaatttttttttgttttggcatttcagagagatggtggccgcaatattttgagaaacttacaaaaatactggaatttaggttaacttttacaaaaatactctcacacggaaaagtttttaaaaatactgtagttttataaaacactagtaaaacacaaa

SEQ ID NO: 358848 - DNA, 657 bp, Cannabis indica
tagactaaattttttttgaatgccgaaacaaatcaagagtgtatcagtacatctattttaagaggttgcattgttgaatcacccaaaaatgtatatatgaccagactaatactaatactatgcctatatatggaaagaaaaatattgaaataattaataattgttctaataattcctaataaaatatgtaaccaaccacaccatgtgatctctcttatttatttaaacttaagattactaatacatgtgtaaatgattacaaacaatatttacggcatcttataaagtttctagagcgggttagagtcctcactactaagacaatgcaaaatcaattagtaatgaggttagtatcatcatcttattattttatacattaataatgtaagatttctccacatcatcttaatattttgctcaaaatttaagggtgtttattggaccacatttaataattttagattatccagatcagatccaattatatattggatattaaattttaccattccatctgatccgatccaattaatttcagtcatccaatcggttctatccgttaagtatatttcatatacatttattggtttaatttggatttatttaatattttagacttagtattttttggataagatcggatccatctaatatttt

SEQ ID NO: 358849 - DNA, 604 bp, Cannabis indica
cctttagaggcagttttttagccctttcagcctcggttttggcgaaattcgctaccgatgctcattagggtgacgctaaagggttactaaacaaccgacgccatatgtaccctatggcgtcgattattagctaggaaccgacgtcatagggtacatatggcgtcagttcctagctattaaccgacgccatatatgagcaatttttagtttttttaatttatataaattattaaattatatatttattaatttatatattattttatttaatttaaatttaaattacatatttattttttaaaagttaaattaaatattatttaaattaatttaaaaattggctaaaatacataatttcatttcataaaagtaattaaatattacacaaacattgtaatattagtccaagtattaataagttaataaatctaactacaagttaattaatctaaaaaataacatagggaagaaaaattcttgggcctctcagcctcaatcgtcatcgtgaatcaccgccatcaaccgttctatccactgtcgctgtaatggtaacaattcagtttttagatcgtattgtcgcttacccccaaactgttaaaaaaat

SEQ ID NO: 358850 - DNA, 618 bp, Cannabis indica
tataaccactaaatcctatcgaggacttgtcgagaacccatcgataatcagtatacactcatcaaacatgataaataaagactaattattactatcgagaatccatcgacaatatgtcgataaccaaactttcataaattaaaagaaattatcatcaaaatgaaatgtatttcaacacaaataatatataatcgatctaactaaaaaaatcaaaaacaaactttttttaacaacatattttcgataacctatcggaatcttgttgtaaataatcgagaacatacataaccaccacaaccacactagatcggaaaacaccatagctaccatataaaatcagccataaattaagaaaaatttatcaaaatataatatatttcaacacaaataacatataatctctctaaattaaccacataaaaactaaaaacaaactttttttaacaacatcttgtcgataacctatcgagaatctgtcgataaataatcgagaacatacataaccaccaccaccacactagatcggaaaacaccataaccaccatataaaaccgaccataaattaagaaaaattcattaaaataaaatttatttcaacataaacaatatataatctct

SEQ ID NO: 358851 - DNA, 681 bp, Cannabis indica
gaagaaagaacttgggcatgaaataagaacattgttcaggaacaaattctagcagattttgatggtgatgaagagaaaagagagcagcaacaggctgtatagacagtccaaccaccaccaacaataatccctcaaagtccacctgctaatgaagcacccagtgaacaaaggcctcaagagagaggaaaataccttcatggatgatggattatgaggtatctaattttgatgattctgaagaggattcactcacgcatttttgtttatttttagattgtgatctagtagcttatgaagaagctgctaaagaattaaagtggagaaaggcgatggatgatgaaatggcggccatagaaagaaataatactttggagttgatggagcttctaaaaggtaaaagactattggtgttaagtgggtgtacaaggcgaagttgaaggaaaatggtgaggttgacaagcacaaagcgcgattggtggctaaaggctataagcaagagtttagtgtggattacaaagatatttttggtccagtggcgagacatgatacaatcagattggtcattgcattggttgctcagaactcatgacctatcttctagttagatctaaaattagcattcttacatggagactgtaacgccccaatttctcgagacgtcacactagctagtccgtttaa

SEQ ID NO: 358852 - DNA, 540 bp, Cannabis indica
ttttcctacatttttcttgcacaatttatcacaaaaacacatactaaatcacaatttcagttaaaccacaaattcatccacaaattaagccatattttaaagataaattaaaataaaaatttcaaaaaaaatacctctttaatctgattggttttatgggttgatcgagtgggtgtggttggtcgctgggatcgattgggtcgagagggtcggtgtttgttgggtcgagagggtcggtgtttgttgggtcgagagggtcgtcgttcattcggctccacagggtcgacgtcgttcgttggggtcgatagggttgtcattcgttggggtcgataggatcgggagggtcgtcagagtcgtcggaggttggggtcgattgggtctggttcgaatggagggggtgggttcggggttttgggttcgaatggagagggaaggaggagagagaaggttgttagagagaaggggggaaaactgaaaagttaggggtaattttggaagccaattgaaaaattagcatatttaaacaatgtgtaatttttt

SEQ ID NO: 358853 - DNA, 822 bp, Cannabis indica
accactttacaagctctttctctcagaggacactagctttgaccatatttttccaaaactaggaatctgagttcttgtacttacacccaaaaaactcctttcctttgagatacttggctcttaagatttcacagcaaatggattgattcccgcatagtaaattccacctccacttagctaggaaggctaaattcatctcctttattttacaaaatccaagaccacctctagatttgggaaggcaaatcttattccaggctttcaaccggatacctcggttccctttctcaaagccccaccaaaagtcatgcaccaagccatatatccttgagacaagtctattagagagtttggtggtttgcatcgcatacataggcatggacaagcccataaatttgataagtgtagcacgacccactttcgagagtgttttagctttccaaccctgtaattttgaggtaagattctctacaacaaaattgaaatcaacatccttttgtctagatcagaataaggggagccctagatattttacgttcccttccagccctccaaatcccaagacatctcgaatcccttatttgaagatctcaggggtatttttactaaagaaaatataagatttgagtttgttaacctattttcctgaccaagaacaaaacttctcaaggcaatcccagtatcattttgctttaaccagagaggccctaccaaccaagattaaatcatctgcaaaaaaaatgtggaaaagagtagggccgccccgtagaaagataatgacttggatattaccattacccattggctctatcaagaagtctc

SEQ ID NO: 358854 - DNA, 650 bp, Cannabis indica
catgcatattattccacccatcgatccggttgcagtacaatatattgtaaaacctacttcactgtacagatgaatatttaagatattcaaactctactaagcattcataattaattaacaataaaagttagtaaatgtatacctcgagctagcaagtaaccggtcaacactaaataagtcatatccttacaaattgacctcactacctacaacataaagaaatactacaaaattacaaatttctttatttagctacttactagttatataatttttgagtaactagttaatttgttactaactagttactaatgagtaactagttagtaataaaaatacatgaatatgaatagtaataaactatttactagctaataagaaaataaaaacacatgaataaaattaaaaataataaaaaaagatgataaaaaatagagttaatttctaaacttttgtttctaaactaattttttagaaattaatttctaaactttaattttcatactcttctatctcattttcattcacaatatttaacaaaactattagtttaaaatattcaatatatacatatacaatacataaaatactctcttatatcacattctcattcacaatatatatacacacaacacatattcaatacaaca

SEQ ID NO: 358855 - DNA, 471 bp, Cannabis indica
aaaaaattcactgcataccatctgcgcaagcagcatgggtgcaccgccgaggaatctcgcacacggatcctgcattgtaggatttccgcgcgcgtagggagtccttcagacaccacatgggcgagtttcttcggacaaggagctttcctaatgcgcgtgcttaagggtgatcacccgtgtccccgcgcgcacatagggtgtacccggttttagattttttttcagattttcaaaaaatcataactaattcaaataaattcgaaattgagatctgtagaaaagtgaattgcttaatttttcccaaactatccaacaaaaataattccagaacgaaaattcaattatttttcataaaaattttgcaaacatcaatcaatcatcaaataacacacagatcaacatgaaaccatccaaatcacacacaaattgttttaagtccaaatttcttgaaagtaaatcaattaccatggc

SEQ ID NO: 358856 - DNA, 928 bp, Cannabis indica
ttgatttagtatgtttttctgtgaaatactggttggattatgttgtgtatgcattgtataggtgttctggaaagtatggtttcatttggtgaaggattgagcaagaaatggaaaattcggggtgaactggtgcaaaccggctagccggttttaccagtacctgtaaaatcagctagccggttttggcagggttcccaaatgctccaatttctcaattctggagcaatccagtaccgtagttgggtgtttccctgtttcctgagttagtgtggctcatagaggttatagcagtgcctagagttttaagtttggatttcccgggattagggtttcgatcatgtgatttacccaattttattatgtgattagggcatccatttcgcaccagactttccgttcaggtcagctagcacacttgaatctggaaagaaggtaaaaattgtatataatgtgtgatatcaatatattagtgtatgtatatgttatgtgtatatgcatgcttaaaatgttagttgcactaccagcacttgtacagttatggtacagagtgcatcggtatagtgaatattgtttatgagtacagtacagtgataccaacacaagtacaagaaagtactgagggtgtgtggtatatcacttagtggtactcagggtacaaaacaaccctaccaacactcgtacagtgaggtacgtagtgtatgtggtatagtggctataccctagtatggaacattcttactcatctgttgagccttgtaaataggtgtatgggcgcctagatacaagtcggtgttatatgatatgttatatacttttcttactggagtctgtcgactcgtagttctgcttccatgtgtaggtaaggaaagcaaaagctgaacaggagtgagcttgagctgggatgaggttgtacatgtcaaagcagcgc

SEQ ID NO: 358857 - DNA, 976 bp, Cannabis indica
ttaataaaaagtactttttaataattgtagagggcattttcatcataatcccttttcagaaaaacacgtcttttgattctggcagttgtacggtttcaagggtcattatgaatcttcttttcatcttttgcctcactcccaaccgttagatttcccaacctttggctttcttgttacggaactttatgtataaaatggtggcttaagcttaccatattccacaaacttctggctttcttgattttcattctcttgctaagatgtcccatctgagtttagaaatttacccctcccaattcataacaacagaatgcaccaaaaacttttcttctttatacgttcccgagaacttcaaacctcaatttgaattggaaacgaaggattccatggctgaggagcttcagatcaatccaaacaaattgaaccttattgatcattatgggcgatcctcacaagtgattcttgagggtaagtattaccccttgtgaatggtggtttgaactggattatacatattattattttctgttgctccattgatcttttatctttgtctccacaagaatggacatagaatttgcgagcaatcttagaggtcctcctgaagctgacaaggaatccaggaagaaagttggcgtggtttcggattctactaaagaaaccaatcaacccaagacccaagcttgcacaagaagacctttgtgccaacctctctctggtattgagaaatttcctgaggctgggaatgaggtcttggctccaggaaatgggatcttctgatgtggagaatgaggtccatgcagaggtcaagaccttctacgtgtagacggtctttctcgacctatgtgtagacggtctttctccagtttatcaacccccttgtattctttgtttaggaagatgacttaacggtttgcccctagtcaaatttttgtaaagacgagtttgtaaatcaacttgggttttctcttatctt

SEQ ID NO: 358858 - DNA, 726 bp, Cannabis indica
  modified_base (615)..(615): a, c, t, g, unknown or other
cattttgtagtaatatccatttttttacagcttcgatatttgcacttggttttatcttaagagaattcaaagtgaaaaagaagaaaaacaaaagagggaactcatgtgaacattttgtaataaaactggtaacaaatttaccattctccataatatatattccattttgagttaaattcttagataatacattttctttttgaaagctcaaaaatagtagattcttaaattgctttggtttttttgattttctgtccatgaatttttgctccttgagctgctatgctttttgcaataaaaggtcaactaaccaaatcctccaaagttaaattattgcactattttggtgtcatttttcactaatttagggtaaaatctattaatttttgtgtaaaattcaatactaaatactacactaaatatgatataaaaatacatatatttttgcttaaaaaaaaaattatattttatattatttgcattaataattaatttatgatatattactgtacatatactcaacaaataactaagggagtttttcaaaaaatatatattttaaatgttttattttacaattttacgtcttaaatttttttatttagtaattttacnctaaaaaatctaaacattcattaatgatgtgaaatttagtgcattatagtaatgaaaatggtgtgtaaaaatttctacattaattagttggaatagtgtataaggtgatgc

SEQ ID NO: 358859 - DNA, 778 bp, Cannabis indica
ataaggcaattaagcaattatctgtaatttaggaaactgcctctttcagaatgttgagcttccctttctctatatataccgcccactctttcctcttgtatgcttgaaccatacacgaaatacacacaagagagagagagatacaatttcgaattccctagtgagagagtagtgcccacacacatcaaacagtacctcaatcatagattggaagactgtgaaggatcacctccaactgaaggacattcaggctcagatcttgattatactctgcaacagacaggaatcaagggttagagatctgagtggaaggagacatattattccgctacaatcaatgtaaggttttcttaactttatatgtgttttccttttatcgttttagaagttcatatttaggttgttaatcaacatacttgtgagtagatctaagatcctggtaaaattaattccaacacatacctcaacgaagttcagaagatgagaagaaagactgtatggtacatcatcgtagatggagtcatgtatagaaggggattctccatgccactacttaggtgtgttacacaagaagaagccgcatgacttttacctgaggtacatgatggattctgcggcaaccacgcggctgggccaagtttatccaacaaaattctaaggcaagattacttctggcgaccatgattaaagattccaaggcctacgtcaagaaatgtgataaatgtcaaagatttttaaagataccttgtaatatcccagaaaataaataatatttaaa

SEQ ID NO: 358860 - DNA, 650 bp, Cannabis indica
attcctgtctttttgggtcttgtgtgagagttagggggccatagcagtgggtacgacatactgaacccagacctccctcacatgaacaaccccaactatgaaggcctatttgcctgatttgaataactgtactaggttaattaaactagtttaacctaatcaaattgattagcaacataattaatttcgaaatatatgaaattaatttttcatttgattattttgaaattaatttagaaaaaacacatttagtttaatgaaattcaaatttaagataaagtaaatgtatttttctgtatttaattaaataaagaattaataactaattagattcctctagatacttaattatttaatatttcattaaaatatatttaagttgaaaattagttatttataactaattttggatcaacttgaatttgaatattgttgacattcataattaagctgagatattctaagaaattagttattggaagattctttaaaatattgtttttaagttgaaagttcgttaattttagatcaacttaaaatggaatattgttcaaactaagtggttagtaacttaatttgttatttaattaaatttttttaagttgaaaattttattattttagaacgacttaaattagataatttttcaa

SEQ ID NO: 358861 - DNA, 531 bp, Cannabis indica
ttattcttgctaagctttgaggtagtaattacaattttcaattgaatttttcttgctgaattttatagttgaaaagcatgttaagagatgaagttcttgagtttgcatgtatgaggagttatgttgatcttgggagatttatatgtgttaattccatgatgttgttgtgagtttattgttgattattggatgagattgctgagggtttttctaagtcaaggtttatgtgttaattggtgatatgctggtgggaataaatttgagttggtttggtttggagctcaagtccttgagcttgatttcttgttgattaaagcatgattttgtgctttatggaatctgaattttttcagtgtttattgttggattttgatgcatgaagtatgtgttttaaactccctttatgatgattaaaacctattttatggtttgggagttttggttgtgaattaggatgaaaagattggatttttcttgttgaaatcgtgttcttgctgctgtttttctggattttgaacccagatgccgcgg

SEQ ID NO: 358862 - DNA, 543 bp, Cannabis indica
tttttttattttttttattttaagaaatagcaattaatttttttttttcttacgattgggtcggtttagaaatcgggtcgggtttgactcgtcccggtttaaccctgatgggtcgaactggtcaaaacactaacggagcggggctgaccagccccatttgctatccctacagctaatagggttgaaactttgtcttgagttttctcaagtgattctttctctttttcaattatttatttagttatttatttatttatttttgtataaaggggtatgatttacctattatccaattctcttttctttttccttctttttaataatagctaggttttatagtgtttagttctaagatttagaaattgtgtgtattattaccatttgaaacgttacaatatgaatatatgtgttaataatgaatcataccagattttgttctaataatctgaatagaaagatttggtgtaaaggaccagggccaaagaaagtttcataattttctgattttggttcaataaaaaaaaatttctgtttctttcatgt

SEQ ID NO: 358863 - DNA, 758 bp, Cannabis indica
aattgatttctttggttataaaccaaagataggatagaacaattttgtttgtattatcacatagtgataatttatttcacacgcacatttttccttagacccgtttggagaggttgagtcagtaaggactcttatatacgcttctccaaattatccaggactttttatgtccacatagatagtttgggcttgttttatacttataatgtgatctattactcatttaattgtttctttgttaaagatttcggtacatcatctccttgcatgttcttgtaagttggcatacttagtaatagtatgcttacttatgagaactgtagggaggtgctgctgaaattttgaaaaaaaaaagaagcaaccttaagagaatagattgcactatatgtatattacaaacctaaatggaataggttctttatccttttagaaatggagtgacaaggtggagtaggacactttttcaactttaatttaaattgtctatttttatattgtgtagcaatatggtgagcgatagaagctggatgacttcaaacagacgatctgtagagtttcgtaggggtgtggatgagtttgttggagctgctcgaatgtaaataaattctgtcggagttacacgatgcccttgcatgagatgtctaaatgtgaactttgagactcccgataatattagggtacatctgtttatgcatggcatccaatgatcgtacacgacctggtattttcatggggagtcattcacgcaaccggctgta

SEQ ID NO: 358864 - DNA, 1165 bp, Cannabis indica
tatgtcttatttatgaattttcactaaggaagggttcaattgtgaagaaaagagattttagggtttatttgttaaatgagagactttattgagtcttattaacaaataaattaaatgacaattttatttgataattaattttaattattaaataaatagttttgaaatttaaaggattgaaattgcaaaatatgctatttgttaaagaaaaggataaatagttgagtaaaatggcaaaattataattagtggggcccacatcctatggtcggccagttaagctctatttagtcatttatttatcaattttttaatgccatataattcaaacctaaacctagaaggattcttataaatagatagtgatagactcaaaactgatagatgatgaatcataatccttttagtgaaatttgagtcttctctcttctctctctatttcaaatccttctctctctctctctttctcttcaattttcgagccatatagtgatagagtacatgcccacacatagcaagtcgagtacccaatcatagtgtgtaagactatgaagaatccaacaccagaaagagaatcaggctcaaatcttgataatactctaccacaaaaaggaacaagggttagagatctgagtggaaggagtcatttaattccactgcaaccaatgtaaggtttcttgaactttatatgtgtttaaattccattgttttagaaattcatgtttaggatattaaacaacatacatggtagtaaatctagatcctggtaaaacaattcccaacacctagaacaactcgagatggaagaatctactgaaacccacttaatcttgccttgcatcccagacgcagaaggtgactcgcatctcccaaactcaaagggatttaaacgtggaagcctgcctagccaatacccggatgggtactcaaagggcccaacggagatatgaaccaccttgaagtgtcgcagatgtcgaccttttatgcacaccagatcaccaagtgacggttatgctttttctgataaagatcagatcttgtctcctacatctgagcttggtagtgcgcgtactgttgggttttgtgccctaaataaaacccatttcaatataatcagatttactcattaataaagatgattaataacattttatgttgcatggtt

SEQ ID NO: 358865 - DNA, 730 bp, Cannabis indica
cgtacaaagaaaaccacgcgtctagttgacacaagtgatcctcaagtggcttggcttgccactttgcccaacgccaaataggatccggccgtccagatggaggaggatcgtgaaggggacgctgaggtctaggatatcgaggagctggacgatgtgtgtcctggcagtccctccgaggcggaggaggaggaagaggttgaacccccaaattacggggggtacaacgaggttgggaagccagtcgatgctgacgaagacgtcctggtcgaaggcgtggactacgttagtgaggagcttgcgcagcggttcctcataaaaggcagggtgccttgggctccaggtgggtaagtcctccgtccaagattacggaggcgtgccttcgaactcttgaccagggcagaaacctgggcaaactggactgctacattcctgcccatagtaatcgtgccacaaaccctgacaaggggatgtgcgcctggtcgggagcccatggttagcaaggagcattgatgcccttgcataagtacttcaaggatgtggcaaacttctttggtctctgcccgacccagttcactcctaagggaattaagtatttgtctgccctcttcgtcctctacgcttcccacggatggggtactccttctccccacgaagttgcctggttcttcgatatgaagtccaaccccaaacaaggcaggtcggggtacttctatttctctcaactaggctt

SEQ ID NO: 358866 - DNA, 728 bp, Cannabis indica
cacgtatttggacaaaattacgggcaacaggtttgaatcccataacactctttttaccaaaaaaaaaaaattatatatattttggagggccccaaaatcaaatttgccttaggcccataaattatcagggtcggccctgcctatagaattattgatttactaatttcatgtattattaataatatttatcataaaattggttttaaatgaaacaaaaatcaaggttaagaattttatttggaaatcgagccttaattttgtgccttgttatactaatctcgcaaggcatggtatcaatacttctgatgtgtaccctttgtgtttctaaaataatgaaaccacgatccatgctctttggttttgttcttcacttaaaaatattcataaaggctgggttgttaaaggtagagctgcacacgagtcgaatttttgggtttttgggtggtcgggttcgggttttcaaatttagagtgtaaaaaatgcacaaccgaacctaatttttgagtggttgggtatgtcgggtttcaggtcgggtatggcgtgtttcacttggtcgggttcgggttttattgggttgagcccaaatatttcatttctggggggttcgagttttattgggttgagcacgaatatttcatttttgagctcaaataaaatttaatttttaaaaatacctattcttttttttttaacatttttttgggtcttttttcttttataattaacat

SEQ ID NO: 358867 - DNA, 647 bp, Cannabis indica
tgcgagtatcctctcgatcctcccgcgaaaacatagagatcgactctctatgatgcgagctggtcccgatgaccctacagcctcgatgaaccagtatagtctcgtaggtctaggttctatcagctcgttatacgatgtccataagtgcgactatataagaacgcatgcatcttagacttaactaaatgttaggtgtaccctaaacccatgagcttacaccagaatatgaacagtcaactcgcacattaggagtcgtatacgttgctgtatttagtgaataagaaactgttcttcatttattaatgtttacgttttagcttaattattgtaaatcaatgtatgaacggattggcaaagaatgcaatccttgtgtaactatctggacacttgctttgtatataaaggagtgatccaccatgaaatgagacctacgaaactcttacaacagtggactaagcagaccgtgatctggttggaccactatattcctttgtcttcttaatatttctaatttttgccaaatatttacgttccccgttcgagtactcgccattttaggttgaatactcgcaattgttcatcatattctttcttcttattattatcgttattattcatttttggtgttgcgaaatttgtctcgacaa

SEQ ID NO: 358868 - DNA, 560 bp, Cannabis indica
tggacaaaagtcgggtgcaaaagtctcatagataatgacattgtgcataaaaggaaaaggaagaggaggggcagaaaatcgagaaagacaaagtcttctcgatgcctttgaaggccatcacacagagaataagtgagccttcactaaaaaataacaataatgtgttacaagagtgaccctaataccagagaagggaaatctagacatattacgtgaaaactcaagggaaaaaaaatcccagaaacttcaaacactaaacccagaaaaacaaataaacagtaaaggatgccatgaacaccaaactgtaaagtgagggatgcgagaaacttacatgaagtgttagaattgggggttgctgttgatcgacgtagaaaaatggactgacagtaacgaacaaaggttaaacaaaagaagaaaatactgaaaaagtgtttaaaaggttttacgttaggtctgaggatttctctctccggaaaactcgaagaaagttaggcgaaagaaggaaagtaaccaatagaggaaaggtaggtgccttttataggccaaagtgcatgtggaac

SEQ ID NO: 358869 - DNA, 888 bp, Cannabis indica
ctgccagggcttgccccttaatctcagatcttggtttgtacctaatatcgaattggctcaactctactgaccattttaacaatcttcctgatgcttctggtttcgccaaaacttgcctcaaagggtagttcgttaaaacttcagtgctatgggcctggaaataaggtcgcaattttcttgacgctattaccagagcaaatgccagtttctccatttgcgggtaacgagcctcagcgtctagcaaacacttactaacataatacaccggatattgtttaccttggtcttcgcagattagtaccgagctaattgcatattcagacactgcaaggtaaatagataaaacttctccgggtattgtctttgacaggattgggggctgccccaaatgtgtcttaagtgcttgaaaagcttcttcgcacttcttggtccattgaaacttcttattgccttttaaaatttgaaagaattctttgcatttatcagaggaacgtgatataaaacgatttaaggcggcgaccttacctgttagactttggacttcttttgacttagtcagagatcgcatctcaactaatgctttaatcttcgtagggtttgcctcgattcctcgctgattcaccataaacccgagaaatttccctgagccaaccccaaagacacacttaagaggattgagccgcattttgtattgtcgtagtatctcgaacattgcttgtaaatggttgacatggtcttttgcatgttgagattttacgagcatattgtcaacatacactttcatggtgtccccaattagatctgcgagcatcatatttaccagcctctgataagttgcacctgcgtttatcaaaccaaaaagcattaccttgtaacaatacaaacctc

SEQ ID NO: 358870 - DNA, 1089 bp, Cannabis indica
gacatgtctcggcagatgatcaatgctctgaggaagagaatgggcggaagctctagcgcctctcctccggccaagaagtccaaggggcagtgaggggtcctcttcaaaggaaaagagaccttccggagaggtcattgatctttctgaggagctgactgctgcaaacccctctacccccaagtctgccaagtccaaggagtctgggccaccaacggctgggtctgaactgatcaggactgatcctgagcgggtgcaggcaccaactccacctctgtcagtgctttcagaggccaaaaagggcaaggagatgctggcccactatatcacccggctcgttcctgaggtcagtgagcaactggctggtgttgacaacgactcgtctttggatgtattggttggtggagtcttgaaggagttcaccagggtaggtcttctttgatacttccctttaactttccacacttagctccatatgctaaagtttttcctctgtgcaggccggtctgaagttggcctacacttactcccgggttaagtttgttgcttccaagagcgcgactctgtccgacaccttgaaggcagaggcggacttggcaaagaagaaagctaaggaagccagggcagaagccggaggtgtgcggttggagttgggagaggccaacaagatgttgttcgctgctgagaagaagattttcgtgctgacaaaggatctcgaggctgcttaccgttttgaggagaccatcgagatcttatctactgaggtaaacagtcttcaggatgagaggacttctctgcgagcaattcttcttcggatgaaggaggagaaggacgccaaggagggggagctttcggccgaggtggacaggttgaaggagaaggtcaatgccttggagacagccggtctcgagctcttcttcgatttctggaaggctaatccccgggccaactttgactacttgggcgacgccaaggacatgtaccttgagtactgcgcagcccaagtggcttatggtgggaatgaggcggctacttcaacctccagccaagctgcttcaacctccagtcaggctgctgatgcttctcctgttc

SEQ ID NO: 358871 - DNA, 675 bp, Cannabis indica
ttatttttagaaaaattaggtctagagttagaattttctccctgtcctttatatttatttggtttgcctttgtttagaaaatatcaatctctcttcaaatgccctggattgccacaattgtagcatcccataggatcaggtggttcttttgagtttgatctccccttgttgtgactctttcctttgtggtgatctctgctgtgacttttacttttgaagtgtccaagttccctttgatttggtcttcctctactgaagtttacttctccattagaacctccatgtttctcattcttgatctctaagtcctttgacttcaaggctgaaattacttcttctagagtaatctctgtcctaccatatttaatggcattcttcacttctttgtaggattcaggtagtaagtttaagatgatgatggcttggttctcatcacttaatgcctcattttcaccaaaattagccaattcaatatgtaaccttagaaattcatctaggttttcatcaagagtcttgttagtggtcatcttgttaccaaagattctttctttaagaaagatctttctaatcaaagatttctttagaaactgatcttcaagctttttccatatttttgcttgagtattgattaatagtgaaaaatatacatttaagtaagcttaaattataagataa

SEQ ID NO: 358872 - DNA, 552 bp, Cannabis indica
tatttttcctctccttcttctcttggctccaaatacaacccatcccaagaatatatccccaaaaaagaataagaatacgcgcgttaccacactcttcttaacctttgtatatatatatatttcccaatgttgatagaaaaggcatttatatataataaattgtataaataaaatagaactttctttctaacattaaattgtgtgaatgtatgatcgtgtataatttaatacttgacggactcatggactctgttggaagttttcaagttgattattgttatatcatccttacccaaaaaaaaagtttattattataataaatgtgattatttggtcaactcgaatatagggaggattttgacagttaaaattagttcccattcactagaataaattttagttttagtcagaacaaaacttgtcactaaaaacaaaaaaaattgtgactaattataaatcataattcttatgttgtgattgaaaggttcgtggataacagtattagtcacaaaaattaaattttgttgtgactaaatgtatttttagtcacaa

SEQ ID NO: 358873 - DNA, 910 bp, Cannabis indica
ttagtggtgtatgttgataacatcattattactgaaaatgatactgaagacatcttatcccttaagtctttcattcatacccaattttacatgaaggctttaggggtgttcaagtatttcttgggtgttgaagttacttggagtaaacatggcatttttctgtctcaaagaaagtatgtgcttgatttgttaactgggcagaaaaattgggagcaaaatcttgtaacgctccaatgaatccagttgtgcatcttactcgtgatggggaaccatttgaagatcctgaaaaatatcgcagattatttggaatagttgaattatctaaccgtgactcgtctagctattgcattcccagttagtgtagttagtcagtttatgtcttctccaacaattcatcgttgggcagcattagagcaaatttttaaaaggagcactaggacatggtatagtttacaagaatcatggacatacccagattgagtgtttctttgatgtagattgggtaggctccaaggtagatagacgatcgttgggggcaatctaatctcttggaagattaagaaacaaaatgttgtgtctagatctagtgctaaatcagaatatagagctatggcacaatctgtgtgaggtaatatggatttatcaacttttcattggatttgggtttaagatttctattccagcaaaattgcggtgtgataatcgtgttactcttcataatgtctcaaatcccgtgttccatgagcaaattaagtacattaagattgattgtcattttgttcgtgagaaaattcaacaaggtctgatctccacaggatatgtgaagaccagagaacaattaggagatatttttacaaaagattttaatggagcgtgggttgattatttttgtaacaagctgggcatgatt

SEQ ID NO: 358874 - DNA, 655 bp, Cannabis indica
aagatgatattatctcagaaaaagagaggaccatgggcctatataactaagctcctaataagtagatcttgaagtttacctactaaattttttaacttattaattcctcctaactccattatagattcaaaatttcactattgattacataaaatgctctatataccacatataaatatgctatgaatttatctttgtttcaatcacaaaaattattgatccactataaacggtctacactgagtaggacaaaattactattttaccctttcatatattttatccttaaaacacttagctacttgtaaatgatatttcgataaagtaatataattaccaaaaagagcactctatcatttatcatgttaagtcaaagctctaagaaaaccatcgtttcacttctaatagacatagaagctatagatgtccatctctacgattaatactctcactcaattgtactaccgagtttccaagatgtaagtatgcgctcgtcctagggtaagctagtaatgcacaagtcaaagaactcgtgcaatatattaaagctagagctcaaccatctcaagataattaagatcaaatgatcgatgatcaactaagtgatattaacttagaaaagatagggtaaataacattttggaccctgtgtttt

SEQ ID NO: 358875 - DNA, 632 bp, Cannabis indica
aggaaaaaaaattcggattttttattttattttatttttaaattaattatttacgtggaccaataaaattgtgtcatgtgtacattgtgtccacgtaaacaatccaacatggcagttaacaactaaatttggatggaagatgtaaattactaatggtattgtagttttgagtgttttaacgctaaaatttgggttttgggagttagttgcaagaaaaatgaactattaggggttttgccgcaattgacccaataataattatttttattttagagcattgctattgagcatcagtagtgtctagcactttctagatgtgttattttcgaattggttagcaatactccatacaaattattatattaaactatatgtgacacgatacttaattgcaccaataacgatattgacacgtaggagggtgctaagcagtaccagtgatatcctttagcatttttctttattttattagaattttagctagagtagcttctttcgaataatttaagagcatctctaatggtagcatatcatctaaacatttacatttaatctaaatatataatattttattttatctctctttcacatcatttttgacactcttacttctaaaaacactctaatgtata

SEQ ID NO: 358876 - DNA, 435 bp, Cannabis indica
gggcacaaaacccaacacaagtttccttcgtattcgtcgtcgcgggtttcttctcctacctcaaagcccacattaacccttgacgctacctcctcatcttcaggatcttgggcatcttgaggaggacatggttgacgcgtgttacgagtttccaccattgttgttttagtttatgaggttgttgtctatttgcagacgcttccttcaactctcaatgaaagcaccaaaatgttgaccgaggttttcggcaaccaatttaataatgtataagaaagctgtaagaagattagtgcacgagatttttacgtggttggggcattaatgagccttagtccacgagtcttttttatttatgagagtatttattacagagaatgttcttggtagctttcctctcttacgttcttatgaaacccagaattctcgacccctgcc

SEQ ID NO: 358877 - DNA, 1095 bp, Cannabis indica
aatgcaattaatattgttgagaattgattgttattgggattaagatatgaatattattgttatataataaaaacattgattgattaaataatgataatgtgacgataccgtgaatgtgatatacaggctcaccttactaggtgatgcgatatacctggcggcgtaccttataaggtatgggcgatagtgatatgagaatgtccggctatgggatagattgaaactattgttggatttcttcctgacgacataccttattaggtacgggtgacagtgacatgtgagtacagagcgtaggtacaggctcgcctgattaggcgatgcgatacattggtgccaggttgttgcatgagctcaccttattaggtgatggaaatatgtgatatatgggtgccatgtttcagcatgggataacctgattaggtgatgcgattatgcaatatatgggtgccaagctatggcacatgcttgcttgattaggcaatgcaatacaggattatcagattaaagcattgactttcctgattaggcaatatgatgtaatgcatatggtactttatgaggtaacatatataaataatttatattattaaatgaataagatttctattattggtataatagttgtgtattaccaaaaatctgtgtactgatatttattcgtggcagatgccagtagtgatttggatttcatcttatgagtaatgagtgattgtttgattctgattgtttgagtataaatgataatatttgaataataaattatatgattattgttattacttttcttgttgagtccttgtaacttacgggtgctatgtggtgcaggtcaaggtaaagaaaagctagatcaaccataaggtgacagtcttctccagcaatgtacatattgaccccaccggcctgtgtgccgagttgccaggagttgttttgggttggctgtatctattgtgtattttgattttgtgttttgaattatttttgtttatagtcttttgtaagccttttataatagggatccctagaactcatttttaatgccattatgatacccgtttttagtgttttgttttagtcaagtttttaatatcatca

SEQ ID NO: 358878 - DNA, 610 bp, Cannabis indica
tgaaattaggggattgagaaagaaaagaagaacgggtcagaatgattttagaccaatcatttctcaaatttgaattattaaactagaaaacaaattgggttttgcatgggttctatttttatttagtgataactaaattataaaataaaattatcacattttaaattttaatattttaaatatgatatagtttaatataatttttttaataataacatgaataattatttttctaaactttcattttttacaagaaaaacaaattaatattataaagtcttaatttttttaattattttgaatttgatgaatgataattttttatttattatatatattattatatggtagttttcaaaattattatcatcaccctactcacttgtagttacaattacattcaaaatcgttgtcttaactttgtctcactaacttgtagtcatcactaatgagcagggtcgaccttgaaacaaagtgggccacaggaatttttttttttggcccttatgttaggaaaaatatggtatttttcaaaatcagtaaaaaaaaatgtataattttaaaagagaaaaaaaaatttagacccctgtgttgggtggggcctaggcac

SEQ ID NO: 358879 - DNA, 1516 bp, Cannabis indica
ataagtctgaagcagaaaaagaacgaacgaaccctcgtttctccccttcaaccaaattttctccttttatatccattttctttgattttcaatccaaaacttagcgatctaagctccggtagtagcaggatagcgaattctcagagcggagaagcttaaggtaaggtttaatttcgttttaagtttaataacaattggtttcgtataggggttttgtgaattagaatagttatgaaggttctgaccttataggattgttctcgggtagtcatgggactagttccgatgttttcttgttgaaattgaagtagttttgggttagaaatcgagtttggaactttttaaagcttagtccgagcgttaatggcgttttccatttaagggctcgattttaacttctgttacataagaatgatagtattcatggtatatatgtgccctgtgaagtttggagtgatttggataagttttggtagtgtttcggtgagtgcgaaaattgagattttcgtgtttcatagtttttagaaattcataggagatcagaaatcgtatttttatcataacttttcactcgggtgtctattttggacgttctatataccgtttcgaagcttgcgacgagctctacaatatggtgtatattttagagccaaaatataagttttattttagtgtattataccacagagtttggtagaaaatcctagattgtcttacgcgagtgttaagtggtgttttgggataaacacttattgatttactattgttatgacatagggcccgagattatcgatcgttctccaagcaggtcggccaacatacctgatccggaacttgaggtaagaaaagtataatgtaccacatggcatgacaggttctgaaattatcaattgtctgattaggcaatgataatgtaatgatactatagatacaatatatggtctcacctgattaggtgatgcaatatatctggcgacgtaccaggtgaaggtacgggcgtcagtagcatatgatgagtactgagtgtaggtacgagaccgtttgattagacgatgcgatatattagtgtcaagttgtggcacgggctcacctatatatgatattgcattatgacacgggcttgcgtgattaggcaatgcaaatatatgagcatatctatttctatgcatatgactgattatattacctagtgttgaatgttatagtttaatcattttgtgataatgaaatgtataattagctatttaatgtatccttctttattacttttcttgctgggtctatgtgactcacgggggctttgtgttgcaggtaagggcaaggcaaagttagaacagccatgagatggcggtcttctccagcaatgtacatattgaccccactagcctgcgtgttgagttaccaggagttgttttagactggctgtgtttgctgtattttaaattgtgttttgaattgttgttgtatatcgtcttttggataaatctttatatcagggattcccgaaactcctttt

SEQ ID NO: 358880 - DNA, 504 bp, Cannabis indica
ttttaacggccaataaagtcagagggcatgatttagtacattgcaaagttcagtaggaaaaattgttaataagcataattttttttctacatacaatttaaaataaaagtaaacactaaacatttctttatatatacattttttttttcttcctttgaatttattattttgtttatttaatgtgttgttggagatataaaataattataatttgttttattttgttgctacgtggaaaaaatatttttttttcataaatattaaataatttaatattaaaaagttaccaatctaaaataaccgatccaattcgtgcttttgcggattggattggattggatttgagatattgtgcccaaaaaaataaaaatccgtacttaggtggcgtttggttggaggaataaaaatataggaatatgaattggaatgggaataggaataggaataagaatggaatggaataaaattaaaatgtataaaaaaattgataaaaaattattaagt

SEQ ID NO: 358881 - DNA, 504 bp, Cannabis indica
attttagagtgtaagaaaacccttttatattgcctttttttttttttttagtgatttggtaaaggcttgaagttgagtttggggacttaagagtcaactcaattaaagtcaacctaactcaagataaaaagttttgacttggtgatatagtacattcatgtaatggaatatatttttatttaatcaaatggtattagagaaaaataatgacaaaatttgaataaatattgatgtgtttgaggaactagtcttattgtcataatttgtataaaattggccaatattttaggatatatttttgacccaactaattattctcttgaattatgtgcttctagtattgttaagtttttaaacaatgagagaagggtgtttgactttgttttatgttttttaaaattgtgttttttaaaaatggcaatagaaaatatttttgtagaaacatacgtttgattaatattttctaaaaattgcttttagatctttttttattaaaaaaaaaaa

SEQ ID NO: 358882 - DNA, 743 bp, Cannabis indica
ggcataaaacccaacacagacaactcaagtgagtttgatcttgaatagtttgactccagcttttcagccctttacattaaattatgtcatgaacaagttgacttttgacttccacgagttaatcaacaaccttcagacatttgaaaatttgattggaggaccacagaaaggaggaactaaagctcctagttctggcactgctaatggtacggctaaggctgaggcaaaatttgcctctgcttcgaaacccaaaaagaagaagtggaagaatagcaagaagcctcttaatgttgttaacacagctaataagaaaaagtctgctaatcccaatggaaaggaaaaaggaaagtgcttctattgcaacgaaaagggtcactagaaaccttagtgtcctaagtttatggcaaagaaacaaggtatttctatccttgctataaactcatgtgttttatagatttattatccccttaggttatttattctggatctacaaaccatgtttgttttcttcttatttcagctccagctgcttaaacttggattgctatcctagtgagttgagtcagatggttggacagaagggtggagattgtccaagtgaagatgaagctcgaatcttctttatttttgaattaattgttttagtctatgaacaatttagtttcaattattagtttgagattttattccctatttcatatttatgcagacaattcattgtgactttttttttgagattatta

SEQ ID NO: 358883 - DNA, 792 bp, Cannabis indica
tcggttatgttccacaaaccaaaacattttgcttagaatagaaaaccaactattttttaaaagttagttactcttatatttaggattgtgtttttgtatgttaaatcttcccttgcatttaactttttaagcttaaatattagtagtaaaattttctaaactattaaattgttaacaaatttaaagtatcatctagttaattatcaccatgaattacttatatacaaattcttgtacacgtgacaagtttatattgatacatataatattattaatttaaaattatttttaaattcattttaaaattaaataaaattgtaaaaataaaaaataaataaaatattataaatttttaaaaaattataatatttaaataattttattaggtgtatcaatatgaacgtgtcacatgtacaagagtgcacacataaacaatcaatgttgtcagttaattgtgaaaaatagataataccttaaatttactaacagttgggtagttcggaaggttttaccactaatatttgagcttggaaggttaagtgcagtgagaatgatagttgagagagttcagccgcaaaaaaactccttaagataaattagtagctgttgcccctgattttgcctaatatatgtggaccaaccagacaagtacacgtggatcaatcaacttatcatccaaactatttgctaagttcatatgtaataaagcagcatccgggaccatcctcccggagaagacataaggagccccatacgctcccggaagcccaagtaatgttaaggcatctccgc

SEQ ID NO: 358884 - DNA, 838 bp, Cannabis indica
cccgtttacataaatgtgacttagggcatccatccaacacgagattttctgttcaggtcggccaactcacttgaattcggaaacaaggtaagaatagcatagaacatcttatatatgtgattatgggtatgtatagcatatgcatgctgtgtatgtgaattgtaaatgttgtgaattgatatcatagcggcacaactatagtgtcgggtcagtagtacgagcatagtaatgggttctactaatatgcaattctagaaagcattaattgacgctatcatagcggtacgagcatagtaccgagtcaccaatacaagtatagtactagttaagagtgatattatggtcaattatacttttaggtattattgatgctatcatagcggtacgaacatagtaccatgctcacagtgcaatcattttgctggtagtggctaatatcatggtcaataataccatatgttaagaacgttcttacgtatctgataagccttgtggatagatgtatgggcgcctagatacaagtcggtaatatattatttgttatatacttttcttattgagtctattggctcacagttgctactttcgtgtaggtaacggaaaggtgaatgctgaacaggagtgagctctgagcttggatggtgattgtacatgctgggacgatgcgacctggagtgttcagtctcaagacatcttgggttgtattttgtagtcgttgggcgacatgtttgtaaagtattttgataacatttgtaaaaaatttaaatacggtatcccgacttatgtaaaaatatatatgtttataaagtttaataatttaaatcaaaagttttaattt

SEQ ID NO: 358885 - DNA, 1390 bp, Cannabis indica
ggtgcagagagaaggcactacacttagctcggtgcatacctgaagattcatactcgaaattacttagttacttgcacatgctaaacttgagaaatctaggtaccatcatggattttgtggtagaggatggtcgcttcaagtattgattcttctctctaggtccttgtatctgagggtttaggttttgccgacctgttgtatgcgttgatgggtctttcttgaagactaggtatggtgggcaaatgttgtatgcattggcactggatgcacggatccatatctttccatagctttctctatagttgacagtgaaaaccataattcttggacctatttaatgagaaaattgaaagaaacgattagtgatgttgagaacttagcctttgtgttggataggcatcaaagaaatgttcatgctttggagatcgtgttccctgatgcacaccacggtgcatgctaccaccacattattatgaacgtcaaccacaagttcaagactgacgtcttcacgaatcacatttacacgtgtgtctacacgtattcaaaatcagagtttcacagagaatttgagaacattctggcaatgaatattgcagttgcacaatatcttgaggaaattggatttgaaaaatgggttatgtcgtactttccaggggtatgttacaatgtaatgacaagaaactgggttgagagcttcaacaacacaactaaggacacaagaggcttcacaatcactgctgatgtagcattcctgaggtccaaagtccaacagtggtttgctacacaaaaagaaaaagctgacaagtggacgaagaccctagcaccataaatggaggaggacttggcattacaatttgaaaaatctcggtatttgaacgttgacacatgtggaccttacacgttgcaggttcaccgtagaggaatagttgagaccggtggtgtagtggacttgcaggatcagacttgcacttgcggcttgttctagtgcatgaagtttccttgttctcaagaacaaagtattagcatctacgcagtatgctcaccatattaaattggaggagcacatatggaggtacaattatgccagttggtgacgaggatgattgggaatttcttgatgacataaagaatatgatagttggagtgcctgttgagaagcaaccagtagggcgacccaagaagcaaaagtttggaagaattaagtcaaattgaactgcttgtcatggggaaagaattatcataccacgaaattgtggtaagtgcggtgccaaggggcacaatagaaacacttgcacctaccgaggttaaaaatgaatttttaatttagtcttactgtgatgtgttgtactgttatgtattgttattgaattcagttggaaattattttacc

SEQ ID NO: 358886 - DNA, 746 bp, Cannabis indica
gaagcttacagatcctgggccgccttggagctcgaaagccaccacgaagcggaggaagccgagatcgccttggaagaagcagaggaacagctcgaatcggccatggaagccgccatgaacgagttcagaagattcgagcaagaaatggagagaatggcggaggaggagcttaacagcttggaagccaaagccgaaggagccagaaagatgggtacgttgatggagaaggccgctaccatcgcttccaagaggtatatggaggcggctctcaattcggctacggcttccatgaaatcggcttggaagggaatctcttccaacaaagttcatccttcctgaattgttcctcccgagccgagccgagccgagccgtgataatgtgtaactgtgtatgtacgctatgaatataagtcgagaaaattatcaataataagtacttaatttttggattaaatggtattttcattttttctctgttctattttttttttattaatcagctaagagtggggatgcaaataattgatgatgtaaatgtaaaatataactttttgttaaaaaatttactctaataatatgttaaattatgatacaaaaatcataaataattaaaagtgatttaaatttgcatcatgatgtaaaaatttgtagcatcacaataaatgctatattattatatttagtaatttacggtataaatatttaagtttaactttcagttgcaagtaaatacttaaatttaattt

SEQ ID NO: 358887 - DNA, 1090 bp, Cannabis indica
gaaaaaactttagcatttgagcaaagtatggaagattgaagggaagtatccaaaaagacttaccctggtgaactccttcaagactccacccaccaacaattccaaagaagagtcattgtcagcaccagccagttgctcactgacctcaggaaccagccggttcatgtaacgggccagcatctcctttccattcttggcctccggaagcaccggcaaatattgagtaggtgcccgcacccgttcaagatcactcctgaccagttccaacccacccttcactggtccagactccttggacttagcacctttgggggtagaggggtttccagaagttagctccacggaaagatcaatgacctccccagtaggcctcttttccttagaagaggacccctcattgcccttagacttcttggctggaggagaggcactagagcttccgcctattctcttcctcagagcgtcaagcatctgccgagacatgtctgtacagaacgaaaaacaacatgattagaaaaacaaatataaggcatgaaaatcaagaagctcaaaaacaagacaaagtaatatgcaaggtgactgcccaaacaagactcagaagtccatcatcacctgacatcgatcttatttcagacataacaactttcccttttccaaacacgggaggggatggccgaacaggtgaaatgggctcccttatgcgaatcgcatgttcaacaggcctgggcggggccgggagtttcttcttccttttcagtggagtcacctgctcttcctcaacctcatcttcaggatccaagggctcctgagcatactgcttggcccttgcacctcccttcaatttagcttcgcacttaagttgaatgagttcattctcctgatgagttctttcggtccagccagcaccaaatttcctcttcttccccgtcacaggcttaggagtaaagtgcttgggatagagcccgtacctcccaaagttatcctcggaggtcaactggataatattccggtcttcccacggaaggtgggaaaatttttgagctctatccctaagagcaagagtgaggggagggcggtgatatgtcagaat

SEQ ID NO: 358888 - DNA, 615 bp, Cannabis indica
gagaaatctcactataacacacaaagtcgatcaaggcctggcctttgattgctgttcggggttggaagttgatttcgtactgacccaattctaccgcccacttaagtaaccgtccagaagcatctggcttttacagtatttgtcttaccggctggtcggtatataccccaacaggatgagcttggaaatagggcctcaacttccttgttgctagaatgaggcagtaggcgagtttttctatcaacggatatcagccctcggcctcgatgagtctcttactaatgtaatagactcggtgttgtacgttgttctcttctctgatcaggacggtacttacagcatgttccgtgatagctaggtatattcccaactcctcaccgtccagaggttttgaaagtacgggaggttttgcaagttgtgcctttagatcctgaaaagctttttcacattcttctgtccattcaaactatttgtttcctcgcaggatgttgaagaatggaacacatttgtccgttgattttgacacgaatctgctgagtgcggcgattcgaccagttaagctttgcacttctatagtttttgttggcgagttcatatccaggattgcttgagttt

SEQ ID NO: 358889 - DNA, 705 bp, Cannabis indica
actaacggacaaataaaaagtgtgaccataagggctattgccgctattttacaggctggtgactaatctgcatgaaagtgacctttttggagacttttgccgcaacttttcttataatgtttgataataacgatagtgtaaattgttcaaactatatcgcaccacactgtattttcgcagtgtgatttttacggtcttaagatctcgaggtgtgattgcggtttgaaaaattataaaaatcgcatatgtaatttggtttaaaaagctacaacccgcaccattgttaattaagttgctaagaacgattgattgatcgatctccgtagaatttaattatttggattgagattcgttagaatagatgacaaaccatgtgttttgtttggtaatgtagaaattgtgattcacaaaaatgttgaacattatgacaataatgaatgatagttacttggaaaaatttgacaagcaatataaggattgatcattaagatgagtaacggaaaaagtttggcatcctatctttttgtgtaccaaatgttctaacatgtggatagtgatattggtactcattgaggctaaggcatgtgctactccttgcgagatcatgatattatatagtgctttatgtaattacatcttgaatgtgtcaagagactacataatgaatcccattgaaattgttcttccctctctctctctctcttt

SEQ ID NO: 358890 - DNA, 939 bp, Cannabis indica
gccctcatctttaagacgttcttagttgcgttctttcttaataacctctagcagaatcatttgtcccttcatgtacaaggaataaatctctaatttcaaatcatacgccaaaggatcaacctccaactcttcatataaaatctgacgcaattgttgtatggttgtgtcagttctaactgttaacgtcaaactgccttcaactttataaacccaattaaaaccctcaacacacaaaacaccaccgtacgatataacaagaaacacaatcgatcctgtaatttgaaacaacaaaatgttcgttagggaacagtaccaaaaaaatataaaaaaccaaaaatagagaaatttaatataatcgacaacctatcgacatctcatcgatatcccattaataagaagtgtcaggatttcgagtagtgagaaaaattgacaaagtgtcgataatatatcgatataatgtcatgacattaaggcatttgagacactcaacaaaattgtcgacatatcgataaagattggcttcaagagcctatcaaaaatctattgaatagcattcaagaaaggtcatccctgaccttgaaacatcttcttcgagaatctttcgaaaacttatcgataaccattcgagaaaaataatgtcataacatgacattgaggtagttgagacactatatagaactatcgacatatcatcgatatcatatcgataaatattggcttcgaaaacctatcgaatagcattcgagaaaggtcatccctgaccttgcaacatctgcttcgagaactaatcgataaccagtcgagaaaaatacaaaacccaaaagactcatatcgataaatattggctttgagaacctatcgaaaacctatcgaaaagcattcgagaaaggtcatccctaactttggaacatctgcttcgagaagctttcgagaactaat

SEQ ID NO: 358891 - DNA, 660 bp, Cannabis indica
aagtcaagctttaccctccttagtctccacggaaaacagtatacggctcgagttcataatcaactcgacgactatgaacatcttactgtaagaagtctctagggtctgtgacatagccggtcaatgcagacgctgctgctgtgtacggtgaagcaagatatatctcgccttccttgtgtcccattcggcctgggaagttcctgtttgttgtcgacacacaaacctacaagaaccgaccatgctccagagttataaaatggacattatgtccttaactaaagacaagtctgtgcaaagtggactgttttaatggttaaaagagaaacaagaataacactcgagaaaataatttgccttaggttcgttcatgcgtgcgtaagtgtcttttggaccgcccaagcaagcaccgcaactagggctagcgggtgtatcgcaaccagcttcttcaaatatctgggagcaagtcttcccaccagatcctggcactgggagactatataagtccatccacacctgtaaattaggacatgttagactaagttctctcctcttattggcaacattaaccaaccaattattcagcattgcatttcgtagacaaaccttttgggtagctgggacaaggaatgttggaacttaacctttttgccctgtacataa

SEQ ID NO: 358892 - DNA, 363 bp, Cannabis indica
tttttctctcttaacaaaaaaaaaaaaaattaagagcactcttcctatatttttctatcttttacatgattaataaaagtaatatatatattttttggagtgttttgtagtttattcagagttaatttatgaaagatttgtatattttaacaagattgatgtcttgatatttttcttttaatttatagttgccttataacaaaattttctataattttgcctttttttttttattttttttttattttaagtttgtcatattatctttttatagagtcaaaattaaatttatagatttttatgagttttatttgcacactcataaaatgataagtacaccctattagaaaaatacttatataa

SEQ ID NO: 358893 - DNA, 544 bp, Cannabis indica
tattgttgaatcttgggtttaaacaaagaaaggatgatgtttttgtcttagtgtttgctggttttgatcatgttgtacatcgtactcccttgcttcaaaagaaatataatatacacatgatatgttgtttagtgttcctcattgcttgtttatgtgtcatcatgtgtgataatgaaagttccacaaacattcctcaaaatacatgttggctcaaaatatatagataacaaatatcatttttttagaattggttgagtaaaaatacattggataatcacatattattcttgatgctctatgctctcttggatttttgtttactaaagccttaaattctcgtattaatgtgtgcaacttgggagttttttaatgtgttctgtaacaccctggaatttagaaatggattagcgaaaccctaattaaataattatgaataattgagaaattatattattatatagttcaatatatgtgaaattatatgaattttaatatgttgagaccccgttggtgagccaggggcattttggtaattatgacccga

SEQ ID NO: 358894 - DNA, 783 bp, Cannabis indica
tatactggaagagaagatcctctgtcccaccttaagtacttggaaatgcaaatggatttgcaaggagtacgaggagatatgtgttgcagaatttttcctgctactctgtcggaagccgttcagcaatggtatttcaagttggcccctggaaagtttagttcatggaaagccttctcttcggaattccatgcacaattctcttcctcacgccaacttccactgcatctaggagacttggtcgaagttaagcaaacactaggtgagcctcttcgggcatacatcagcagattcatgacgaaggtaaccaaagtgtcacgggtaactgaagatggaaagttatccgcgatactggggggcattgaagtcctcggtgaactctagaaggatacaaggaagaacgggcaggtagactcaatgactttcttgaccttgccgaaggcttcatcaagctcgaagaagccattcaacgagcgaaaggtgagcaaaagcctgacaagtcaaaggctccttctactggaacatccgcccaactcccccattatcgaaacaatccaagctcaagtggcaagcgttccaacaacaaccacaggcaagggaatgggaagaaaggaacatttaacaacaaatccgagcaagctccccgggagaatcatgccaaatacactgcattcactatcttgactgaagatatagaaagtgtttacatggcaactcagtcgctagccccatataagaagcctgggcccatgaagaaagatgtccacaaaagggacatgacaaaat

SEQ ID NO: 358895 - DNA, 671 bp, Cannabis indica
attaacttgttgattgttaggttgtattgtcgactgaatgtcgacagtatgtcgatatgttgtcgacatgttgtgtaattgttatctgattgaatttgtcgacatcatatcgacaggttgtcgatatgttgtcgatggtattaacatgttgaatttaggtttgtattgtcgactgaatgtcgacaggatgtcgatattttgtcgacataattgaattgtgtttgcttttgataatatcgacataatgtcgacataattgaattgtgtttacttttggtaatatcgacataatgtcgacggtatgtcgacattatgtcgacatgtttttaaatttttttggtagctttatttatttgttttttgttttttcagatggctcccagactcataattccagcacccgagcattttactggccgcatcacatatagaggcactggaaaaattttgcaaaaatcaaagctcggtttgaggagttcaatctgaataacacggcgaaggaaagccgtttcagcaacttttggaatgccgtaccgttgacattctcctcggtgttatttcaccagctgatgctccacaaaatgaaagttgatgctcaggaggagttgaggatgcggttttacgttggtcggaaggaggtcagattcggagtgctggagtttgaactcatt

SEQ ID NO: 358896 - DNA, 527 bp, Cannabis indica
atatataaaaggggcaggaagatgcctatgatcagttcgatctgcccaataactcgagcgactgaagattataaccctctttcgtgagaagaaggcacactttggttatctcgagaggaagcaggtcacaagaattcaaagggcagttactccggtaaagcaattgtgtaaaaagaattgcaacgtgagtagatatcaccccactgtggttgccatatcaagctactacgaggaaagctggatgtcaaccagtagcagtcgaatacaaacaactaaaaccaagattactttacctggaaccccgttatatgtcagggattgacccttaatattgaaacaattgtgggagtatgttggggattgaccctggacataaaaatctattttatcaaaaccaaatcctcctggaagattgatagaataagcaattgagctggggaaattaatgattgtaaaatcacattactgatgaggcattttgaattccagttgtgaataaaatagtcatttctttcaaacaagtaatt

SEQ ID NO: 358897 - DNA, 559 bp, Cannabis indica
cgtctatttggggcgcttttctttggttatttttaatcgttttgagatcctgaacaccatgggaagcttccccaattgaaagggtgtgtcaagagcaatcaacgacgaagttacactttaccagtgatgaaatcggcataaactccagcaaccacagttatgaggatcttgttctcaaccagaaaatttattgatagctaaggtaagaagagtgaacatctgtgcacagggtgtatgttgaaacatacgattttattgtggatatatgatgtctatgtgcttatgagattttgtataatgaattgttgtttaagattagtattgttagcatgtgatagtgataaggcttttgactacttgtgtgagaataacacttataggataggtaatctgctgcttgtatgagcatagcacttgcaggatatatttttcgctgcttgtatgagtttacttgcagattgtcttatcatgggtgagtacaacttgtgataagagactgtcccgttgataccaagtgtgagaacagcacaaggtaggacaggttacacttcatgtctga

SEQ ID NO: 358898 - DNA, 596 bp, Cannabis indica
aggttagtttcgaatcaaaatgtctgttttctaaaaatcaaacatgttcttcgtgttcttgatgactcaaagagtcaagaatctaagcgaaggaaaaaattgaatcttttccatcaagaaatcacgcattatgcattcaaaaactatcatgcagatcaaaataccaaaaatattacaatctaatgtgagaatcaaaaagtttctagaagcttaaaaagcttgaaacttatcaataatagcagattcaaagaagagatgttaaagaaaagaagttaaggcaaatatggagagagaagatcaaagatctaaagcatgccatgcaaaaagccaatacatggctagacaaggcttcttgatagaggctactacaagcaagatgagagctagaaagtcctaatccaactagatgttcaaatagcgacttcggggaaaatgttattcaaaatttggtccatcagaggtgggatgtccacgtaagccaagactaaggacacgtggaaacaaaccttctcagtagcaggacaaagtctccttacaaggcatggaaaaacaatcaagcaacaagcaaaaggagtaaagcaagctatcaagaagct

SEQ ID NO: 358899 - DNA, 661 bp, Cannabis indica
ttactgaaatgagatctcaatcatttatcgcgttaagccaagctcgaagaaaatcatcgtttcacttctaaaagttataaaagctatagattccatatctatgattagctctctcactcaaatatactaccatattcgcaagatgtagattgctaatcatagatgtagatcgctaagcattggatcagcccaatgcttatatctcgctaatcattagcgatctactcaattatactaccatatctttgatattgtgaaattcctttgtatatgttttactcctctaagggtactgtattctttactgtttggtaactatatctgtgttagtcaggaagtaacactagtagttaatctattactggaataatgccaaaaaattacatagaactttccatatgctgaataattatctagtagccttctgggccactttaacattcagtctcactagtagagttaaagactccagattagtttttacacttctctaaaaatcactgctccacccccaaagtaatcaccatctcataagtagactttttagcattaacgcaagtctagaaacctgatttggtgtagtctaggggctcgtttggaacgccgtattaggtcgtatagtaatgtattgtattatattgaattggattatatatcatat

SEQ ID NO: 358900 - DNA, 570 bp, Cannabis indica
cgaccatagaacttcgggaagcttctctggccagtttccgttagcatcctcaagtcttttctttaatgtatccttcagggtcttgttgactgcttcaacttgaccattttcttggggatgcgccactgcagagaaactttcgatgataccatggtttgcacaaaaatatgtgaaggactggctgtcaaactgtttgccattgtccgaaactattttgtacgaaaatttgaactggcagattatgttctttacaacaaagtcttgaactttcttagatgtaatggttacgagtggttcggcttccttccacttagtgaagcaatcaaccgctaccactgcgtactgcactcctcctttgcctttgggtaattgtctgatcaggtcaattccccagatggcaaaaggccacgaactttgcatctgtgttaactcgttggacggagctcgaggtatcttctaaagtctctggcatttgtcacgtttcttaacataggcctttgaatcttcaatcattgtcagccagaaataaccttgccttagaattttcttagataaactctgcccgacggc

SEQ ID NO: 358901 - DNA, 731 bp, Cannabis indica
gaaaagacaaatctaggttgcaaattggaagaaaaacaccaatgcagtccttcataaagagcttgagcttcagcaaaaattggggaggaggcccctggtttgaagatccttgcagattgctgaatatgagacagaccctacatgtaaaccattccaatacctgttgcagaggcattagtatagggcagcatcaacaaaagagcagtggttgagggagtcaaaatatgatccaaggcaacagggcaatgattattgattagtagtcggtgttgagtctgaagaatgggtttgagcatcctggtaatcatgcagaaaacttgcaacaatatcttgaacattattcgttagaataggtttttgaaaaaggtgggcatttctaatgttctaaatttgccaaatgataccaaggaataagggaagatgatctctggaaattaaggtaaggctatgcagataaaaatctttgatatcaagcctatgatagtcaacaaaaaactgcttaaagttagagtgatgccaaaaggatttaactctggtacagtgaaggagagcatgagaaaccgactctgcacttcccccacaataagagcaactagcagatgggatagcatgcttaaggaaaaggtttagagcacaagggagaagatggttgaaagccttccaagtgaaatgcttaattttaggaggaattttcaaagtctagagaagtttccaccaatccttaaaaaggt

SEQ ID NO: 358902 - DNA, 872 bp, Cannabis indica
attttcaaaacccatctggaattccagatgcacaaccggaattccggttcctcgcaggcagaactcaaaaattcataacttcatcaaatcaaatccaattaatcccaaaccttctagacctgttctaaatgtcccatataacatttccaaagcaacaaaaccacccagaaatcacagattcaaaaatcaccattggaggttcaagattgagttcaaaactcacaacttgactaatccctccaaacagccactaaaacaagcataatcaacctatttcaacatattaaaactgcagaaatcaaaccctaactcatgcaacaatcccagcaacaaatttcgaaaattctctttgaaaactaaacttttgaacaagaaaattgacaaactaaagcaaggacaactagcatgcatttcaacctatctaaacatatttaattcaacattctaaacatagaaacaacaacaacaacaacaagcagcagcaacaacatcaaaatcatccatgcattactcaattttttcatcatttttcaagaaaacaaaggaagagaagctagacaagaaatacctctactaggatcactctaaacttgctgaaaatcacttgaatcacaagagaaaactcccctttttttgctgctcaaagggccgaatagagagaaatcttttgagaattttttttgtaatttttctaagtttgaaaaggaaatgaaattaaatgccacttaacccattttacttcagccaaaataataaacaaataacatattaaattcatttactaagtccacaaaaggacaaaatatcaatggggcaaaatgaccattttgcccctccatgctaaaataacaccaaaggggtattttgggaaa

SEQ ID NO: 358903 - DNA, 672 bp, Cannabis indica
gatctattgaatcatcgcatgaacagactacaagccccaggaaaacccggtattgaggtccctggttgatggaccttgggtcaacaacaaccggtcacttcctaaccaggttgatgaggatggcgcctacgacccaaccaaatacataccaatcgtggaattggaaaatggccatcttaggcattgattggaggaagcaaccagacataatgccaagttagagcgtgatagctgcagtaagagcaacacgtgagaaagatacccaaaatcaacctgaccttgggagaagagatccacgaggcaaacctcgcggatcgcaaacaaaggggcaggagacaacctagagatatactcagaactctcaagagatgcaacctgaagaaattgaggaaaatctggggacatagcctgggatatgcgaacattgttgggttttatgccctaaataaaactcatttcaatataatcagatttacttattaatatagatctgaaataacatttaatgttgcgtggttcacatgatttatttcatgattatatatacataatgtatgaattcatctgaaacccttttcacatacttgatcccgtttattgtgttgtcaacacattgaaaagtaaacatgactatgtgaataaagtttccaagatttatcagacacagggttt

SEQ ID NO: 358904 - DNA, 783 bp, Cannabis indica
tcttgggctcatgtgttatttgatactggtgcatcgcattcctttatatctttgatgtttgctagtatgttgggtttgagttgggaaacttttagtcctgtgttacatttgcgtgtacctatggggggacacggagaggtatccaccatatgtaggtcagtttgtattgtgttcaagggacgcaaattatctggaaacttattagtgttgcctatggggcaatttgatgtaattctctgtatggattggtatctaaataccaagctattgtggattgttcacgcaagagagtaactcttttaacccctagtggtgatttcattgtttatcgagccaacatgagtgcagtgagacaaaatcctatcaagccaaagagaaacttagagtgttatgggaatctgcttgcgatcgatgatgagtctaggaatttagaccagttcccttggatatcagtggttagtggttttccggatgtgtttccagaggatttaccagggttaccacctgatagggagatcgagtcttgcattgatttgattcccggatctcaaccagtttctattgcaccttatcgcatggcacctacagagttggctgaattgaaaaaacaattaggcgagttaatggataagggttacattagacatagtacttctccatgggaagctccaatcttgtttgctaagaaagctgatgggactttgcgactttgtgtcgactaaagaaagctgaatcagatgacaattaaaaacaaatatcctctaccgaggattgatgaattat

SEQ ID NO: 358905 - DNA, 1562 bp, Cannabis indica
aaaggcagatgggttgatgagctacctcaggtgctctgggcccacaaaactactgagaatacagccacgggacacactccttttctcgctagcatttggctcagaagcaatgctgcttgttgaagtgaatatatcgactcacagaagagagttttataatcaagaagaataccagaacttttaaaatgtccctggatctacttgaggtaaaacgaactgagtcacaaatcaccaacgccgcataccaacaccgagtcacaagatacttcaacaaaagagtcaagaaaagactatttaattttggagacttggtgttaagattaagtctttacaaatacgagagatgcatcagtagaagtgttcaacccgaactgggagggtccatatgtcatcgaagcagtagttggagttcgagtctataaattggctcgacttgatgactcgctaataaagaactactggaacgtagaacatttgcgaccctactatcaataaataaatgatgtaactcgcattactgatgtaaactttaaacttcagttatgaataaagagaatcatttatattaagtaattacaaagtttcattctttaaattacttaaggggcatttatgtatgactaaccggaattcatctggaaatacattgtataatgcaaacccgccatttcaagttttttgaaattcaaaggttcttgactaaacctcttgattaaacctctttgatgaaagtggagtggaactgagtcgaactgttataactccctgaccaaaccttttttacgtgaaacggttgatcaaacctttttgacgaagaagggatcaaacaactataattttatatttctaacctatttgacgggagaggaaaatcaaaacttataactcgcgtataaaactgaatactaacagttctcgcgagctaggaaagtgcttaacgaggcatcatgaccccttgataaaagtacttaaacctagaaaatcgatagataatataactatgcatacgagaaaattaaaaatataccaagtgataaaatcctttaagtatatttaagtttgcttaaggcagattataactgcaattgcgagccaggatcgacaatagctcaaaaatcataaagtttggtagattactaactacttaaacaagaagattatgagcgatggagaaacccaaaagttatgtatatttgatcatataattttttacattctgaataaaaacacaagaaaatacaattgtaataagttcgaatgaaaacagtacaaggcatttaagataagaaaaacctaagactggttacaaacttgtctttacaaaaatgctactaggggcaaaccattaagtcattctcttaagcaaaggatgagaggggaagccgatgaactcgagaaagaccgtctgcatatagcttgaaaaagaccgtttacacgtagctcgaagaaagtccgactagacatatcttgagaaagactagctacacatagagagccttgatctctgcacagacctcattcccctcatcatcagaagatcccatttcctgaagtcgagatct

SEQ ID NO: 358906 - DNA, 601 bp, Cannabis indica
agattcagaactttgctagggccgaattagagagtcagggtaggactagcttagaatttcttttttaagtgtttactgctttcacagatatgctaacactcaattcttttctcttgttgcagcagctaatcccatggaggcgatcttggccacccttgctggagctcacagtcctgatgcttctcttcctccaacttcttctcagattgtcacccccacgaaggctttttccagtgcccctccaaacactattgacttagtggatgaggaggaggtacttcctgaggaagctaaaaaaggtcaagaagagcaatgggctcttcctggggaagttgaagaaagtgaagaagagcaagaggttgctctgatccgcaagcgcaaaggcaagatggtggctgaggaaacacctaaacggcagcaaagaatggacactccggccccgagccgtgattccgagatctttcccgaggtcggaggagtttacagtgcctcgtaacattgtgctgactccggttcccgcagatgaggcgaggtggagcttcggatagccaagtacattatgccatggacgaatacgtcccaggggcatgctgaggtggag

SEQ ID NO: 358907 - DNA, 500 bp, Cannabis indica
tcattctaagttttgttggcggtacacaaggtatatgtgaaaatctctgacacttatctgatttcttgacaaactcgtgtgtgtccttattgatcattggccagtaatatctttgtctaatgatctttttagacaggttctgccagcccgcatgatccccatagaagccttcatgaatttctctgatgatttcatttgcttctacagagagaacacaccgaagtaagggcactgagtaccctcttctatatagtttgctttcgataattgtgtagcgaggcagtgaatacaatagttttcgtgcctcatttttgtcattcaaaagttgtacttcaagtaaaaaattgacaataggagtcatccatgtaggagagttatttatcatctcgacgtcttcagttcaacatatacttggctccctcagcatgtaaagaccgcttagtttaatttagaaatcagcagttaattatgattaattatggaaattatttatagatatt

SEQ ID NO: 358908 - DNA, 583 bp, Cannabis indica
atataatattatattatatatgatctatttataatttttaattttgtgattcaaatttttattatgttaaatttaggaaattttttaaaattatctttttatatatatatatttatttacaatttttaaggcctaaagtttttatttatgaaaatatatttttaaagttgtaaaattacaaaaatactctttgctcagtaaaaagtaagaaaataactaaaaaaaataacaagaaattaactttacaacaactataaaccagctataaataaactataaaataactaaaaataacccaaaaaaaaaacaacattataacatcggtaatataactataaataaactataaaataactaaaaaaatagtttattgtttttgttaaagagatatttttgtaaaaaattcaaagagtaaaaatgaaaaagtttcgtgtggttgtatttttgtaattttttttaaatttttggtccatgtaaatttttcttaaatttatgttataattctttattattaaaatatattttattttaatcggtctttatttttttttaaaaaaaatatagtttaatttattctaaaatc

SEQ ID NO: 358909 - DNA, 1058 bp, Cannabis indica
tcacatgcatattaaatttttgccacccatccgaccgtaatatacttttcaaagaatttacttcactaatatgaatatataacatattcaaaactttttatactattataaaacatataacataatcatactaaccttccaatataacgaggagtgatttttgataaataccgagcaaagggacaccaaaaatctatttagcaaaaaaataaatattgagtaaatgaaattataagtatagtactattataataaacacactatttatattaaaatatatagatatgtatggactatttcttaatgggtattactcattgatggttactaaataaaactataaatattaattttaaaaatcttaaattattagattttgatccaatgacgaataataaaagagaaacttgaatttctatacttcatttagctatttaattaaaagaatataaaaaattatcactttttacactatattaaaaatatgtttatatacaaaatacttaagccaaatttaacctttttttgtcgaaaaacttttgtatttaattttttttttcaatcgatggaacaaccccaactcatataatataaaaatgagagatatttttaattagatagaaaaaccaagcataaaaactcaaatttttattatattacccataaatgagtattaaccattaagagtgcacccatatatgtatatgtatattatgtgtatatagattgtatatacactatatataattacatttacatatatatataaactaatgtacacatatatacatttacatatatatatatattctaatttatatatacatatatatatgtacgtatatatatatttccatatatatacatatacacacgtatataaactaatatacacatatataccttcacatatatatacatatacacacatatatatacatttacataaatatacatatacacacatatatatacacactactagaaaatagacattttatccaactttttatacttaaaaaaataaaaagtgggataaaagtatgttgatagttttt

SEQ ID NO: 358910 - DNA, 752 bp, Cannabis indica
gggattgcctcaatccccctctggctgacgatgaagcccaggaactttcctgatttgactccaaaggtgcatttctttgggttgagcttcatgccgtatctacagactacctcaaatcactcttctaagtcgttcgcatggctattgcatgctttagacttgacgagcatatcgtccacgtataccttcgtgtttcgccccaggaggcctttgaacatccggttgaccattctttggtaggtcgctccggcgttcttcagtccgaaaggcatgaccaggtaacagtatacccccttatcggtcctgaagctagtgcactcttggtccgccgtgtgcatctttatttggttatacccggcgtaggcatccatgaaggatagtagtttgaatccggaagtggcatctaccatctggtcgatcctgggcagcgggaagcagtccttcggacaagctttgtttagatcggtgaaatctatacaaactcgccaagtcccgttcggcttgggcaccaggaccggattggctagccattccggatagtatacgtcgcggatcatgctgttcgtcagaagcttgtccacctctttctctagggccttggcctttactgaatcgaggaggcgtcacttttgttggactggcggcatgtccgggttgacgttgaggacgtgggtgatgacatggggacttatgccggtcatgtcctcttggcgccatgcaaaaatgtcgatggcgcccttcagtgtttttat

SEQ ID NO: 358911 - DNA, 1192 bp, Cannabis indica
cgctcactttagagtaataactctaatcccagtttctagtttctcatatttatcacattccatataagcgccattgcgcatatctctacgtgctaactactatcttacctgatgtcccgcaaatatggagatttcaaatcctcgggtgctcctaaccaagtgccggtaatcctagtcacaattctgggatacacaaatatagggttaatccctaaatctacttccacaaattataaacttggcatttaaattctagatattcacatagagctcgaaaagagctttccaacgatataaagaacgttccaacggagtcccaagtcaaaagttatccaaaacaaaaacccgaaaaaaaacacaatatgctgccataaaatggccgcggctactgggtttaaaaacccaggaaacccagtttccagccacgaaaatgcatccaaaaacaccaattttcatgctatatcaacccacaatcataccaaactttcacctagcataaaccaagtaattagagaggaattacacctaattcactctccaacaacacccaaaaccagcaacaaatttcagccccaaaattaaaccaattcaacacaaattttcatataattcaaagtcatacaccactaaatagcaagttctaaaatagggcattaaaatatataaaacatgcatcaaaatccaaccatataccactcaaagttcagatttaacaacatctaaactaagttctaaaccaagagcttaaatccataaaaccccaacaataaagacttgctcatccaagtcaaaatataaacacaaaatataactcaattaatcacacccaaagcttacccaaagcaaagatcaagagtttaagacatcacaagttcataacatctagaacaacccaattaacacatacatgcaattcaagaacttgaaaatccccacatgcttcaccatcatccaacaacaataaattttgataaaaatcaaatttctcaacttggaaaaaaaccttaaaacttgctaacaacataggtgcaaaagccataattaaacaagttcaagtcacaaagaaatcaccattagctccccttttccaccctcatgcattcaaagcccaaaaacattattctcaacaaatttcagcaagggaaaatgttacgatagtgacaaagtggaaagaaaagagaaagagagaaat

SEQ ID NO: 358912 - DNA, 791 bp, Cannabis indica
gatgtaaaatcaatggtaaaaaaaaagtttcctactagtagggaacttttgctaggtcctaccatagtattaccctatatcaatattagggggtaatgcatatgattcgatatgttgtaataacatgaattttgaattatgtgatttttttagtgtttatttttttttttacataattaaatactgttaaatggtacaggtttttagttttatttatatttttatggatttttttatgttataatttttaaaatattatattattatgaaatattatttatggatctcaaaatcaccaaattaattatcaccattaatgcttggttgtattttcttttattatattgatttagtttcttattcttttagtcatatttttatataaataagggttcactttattggaataaacaactgagaaattctcattcattttctctttctctctccttcttcttcttcttttcttcttatctattttatattagagaaatgttagtaaataaccatatttctaactttagtgatagttaatgtccattttttaaaataattaaacaaatgtccttttttactttttaatacctaaaatatccttcattatataaaaggtattataaaaataccttagagtaatatgaatataacatacaaatactataccttagagtaatatgagttattatgtccttttttttttttttttactgatatgtattcttttaattttatttttatttctttccttcatgatatataatataacatacaaacgatataccttagaccaa

SEQ ID NO: 358913 - DNA, 530 bp, Cannabis indica
atagattattgataatgacaatcccatcggctgtagataattaagttgatctttgagttttaaacattcatttgatgtaaaatttatatgtgagattataagatggttgatatccatcactttctgtaaattatagtaagtgtagcagtcttctatcattttcctttaaaactaaaagttatatccatcactctaagtacatagagaacatttttaatatttgaggaataaaataggaaatttacgctttaaaatatgacaagagaaacatatacttaaaaccagaaaacatccatgacttatgttcttgaaaaaaaacacacaacataacattataaaacacccataatagtctactttagctagaaaacagcccacacatttattgtaatacttagtaatagcaatcctatctcatttgtcaatgagtctttatgcctttgaatttttagttttcccttttgatccagagttagcccccacttctatagttttcccttttgatatctctgaatttcttgttttctcag

SEQ ID NO: 358914 - DNA, 864 bp, Cannabis indica
agaaattcaaatttcccattaaattactatgtatgaaaatagtgtagagagattaaagagctttgattatatatagtgagagtggaagagaagttcatgaaaagtggcttttgagagactaagtaaaaatattctcaagacaaatcactaacataattttttttagtatcctaacataaaaatttaaaatcatatattatattaggtaatctataatacaccttatgtggtaaacagtaaaaaaatattttaattttattttagtcactattaattatttaaatgtttttgaaaatttttatacgaaaataaatacaaatatagtatattattatgaaaatcaattagattaaaaaaaacttaaattaattctaaataacgaaacagataagtgatgcttaaaaaaagttaatttcgcatagtttattttagtaaacttcttttgacttttttttttctatttataaaaattaaaaataacattacgtcaaaatagaaataacataacctcaaaatagaaataacattagcctcaaaatgaaaataacttttataaaatagaaatagcaaaatctcgaaatagaaatagcataacttcaaaatagaaacaacttttataaaaataataaaaaatgaaaaaaaaatgaaaaaaaaaatgcagtatacatggcaattcccgactattagaactttttcatttaccgttgtttttttctaattattttatttaaatattttatcaatttttaaattaatgtagaattaggttcttggaagcggcgcctgagtcaaaaacattagacagcctatgatagggttgttcatccaatccaatccgcacttttttggtcaaacaacatccaa

SEQ ID NO: 358915 - DNA, 608 bp, Cannabis indica
acgcaaatgaaaattacaaacaagatatattatatatggggtattagtggtaaaattatttaaattttatggtttgtaacacttaaccccatatattcatcttttgtacaataaaatttattgaactcccattttgttttaatttttacacttccatccaaaaatttttattaagtaccatggtagactacccaatgcccacacaaatttttagtgctccagatattattaattattaaaatattataaaaaaaataatttaaaagttataaaaataaaacaataataaaaaaatatatatttttaaaagagtaattttgcggcataacctctttaagtggcgaagagttttacaactaaccctcaattctaaaattttggtggtaaaaaccttctaaacccaagttctgttagcaattagccctttccatcaattttttggtgttaagtgactggttagaatgtctacgtgtacacagtgcacacaatgtacacgtggcacaatttaattagtccacgtaataaatatttaaaattaaaataaaaaaaattaattatttttaaaataaaaaaaaattaattttctttaaaaattaaaaaaattattt

SEQ ID NO: 358916 - DNA, 603 bp, Cannabis indica
tatatatatattattatttaatgccactaactcacttaacacacatatcatgcgtcaagggtttaattagttcgtatatttctccactattttctcatatattgttatatgatattacatataaatactaactatattccaaaaccaattaagagaaatgatagcaccaaaatcgattaactgattaataaaacaacttcatttcaattctatgattttcttactatgtaattctccttcaaattaattactaacacatatatatcttaaataaaaaaaatatctaaataatagcaaataaaccatattttcaagggtgacatgtgataaatattatgctaaaaattccataccataatctaaagtgtaataccacttattatatttctaatgtgccacaaatttatattacttattcatacttttagaaaaaaaatgtacaattctaaatttatgcaataaaaataattattatcacatatataatatcataattaatgggtaaataccattttggaccctgtgttttgcaaaagttatcaattggaccttctgttttgttaaatgataaaatggaccctgtattttctaaaatagtacaaa

SEQ ID NO: 358917 - DNA, 666 bp, Cannabis indica
tatattctttactttattgacaacctttggtacaaactgccataccaatttatagtgagtctctcgttgatgatgctgattcatcaacatctgagactctcatgttctttttcatcattaccactaaggtttcactccctagttcatatgataccattgcttccttgcaatcatcactatcttcatacttggttaaccactttaaaacttattttacactcaattatatagctctttgtttaataaacaacctaaattgtgatccaatattcactaatcactcaaatacatgtccattaaattgcatctcaattcataagcttttccccattctgggtgagtacgcctttccataattgcttaataaagttatcttttccaagaatttcaatggtctccttatataccatattgactatgcagtcaattatgaaatactctccatcgttaccgtatcaccttaagtatattaggttatcttctttaccttagtgatacaactattgtaacgccctaaccaattaggcacgctacccaaagtacttaagaaaccctaatcccctaggcgggattactaatcaaaatagcgcagaatttaaatatttatattaaacataatgaaaataatgttggaattaattttaccagaatcttagatctactcac

SEQ ID NO: 358918 - DNA, 475 bp, Cannabis indica
aataataaaataataataataaattttattgtcactaaaaaaaaattgtatactccactaaactcataaatattcaaaataataaattatccccattaacaaacaaaataaactaaatgtataaaaaaaaattaattacccaagaagactgatattacagcctcaggtgaggatctatagaaatagtgtgttgtttcttgctcttccatgacaccagagacttgcctagaaacacacaaaaactagttgttaatcttctagtgtcaacacaagctgcccaattagcatctgtgtaggcttcaagtctgatttcagattctgcaaaataaaacaagtcttgtcttggaatgtctgcacatattgcaagaatatttgtgcagcgtggagatgattaactcttggtgaagtcaagaatcggctgagtttattgtaatacccggtaaaaatatacatatattttaaattttatttgtta

SEQ ID NO: 358919 - DNA, 981 bp, Cannabis indica
gatcacatatgtagatggacataaagtaaaggtactatgtataattaaattatgcataattggactaatatgtaataaatatctttcatcaacttatcgtttaccatgaaaagcgtttatcatatcacaatgatgattattagtagattagccttaatcctaagtatacatgaactcttatttgtgttcattgagttctttgattcacttgttaaagtttctcaaaaaagatgattcttacaacttctattttgggagcttaataacatgagtgactaggaacacgttatataatagtagaatccaagctttcctaacagattgaatattagttcccttatagtgttaattctaggagtgttaatagttagatccaaatttataataagttatagattaacagttcacattgaattaatggtcataaggaatctagagataattagaaggataaaatgttattttgaccaactctaattatgaactaataattagaggataaactacttatattgattatatcaatggactacaagtaagaattctgtaaatataattctatatagtcaaatagtgcaattacatatttatagtggagtaataatagaattaataaactagattattctgttgatgaaattgatggtaatcttagatttattggagctttaaaatataggtccatggtcccacatgagaaaattttatttgatgaataaatttcaagtgagaattaatttatatggaaaataaattcttaagggaaaatagtaatttgtgaaattattattttgattaattataacaattgtgaattatataattaatagtatttaactatttacttttattagataaaattatattcattagttaaatataatattattactgaataatattaaagagataaatatattattttagattaaataatatttattttagttcttgtgaaataagagattaatgataattaat

SEQ ID NO: 358920 - DNA, 696 bp, Cannabis indica
aaattttaagaaatttaaaaaaagtttaacatagcgaaaactatgttcaaatagtgtgttgcacgcgtgactattttattttatacgcgtgtaaaatagattgtttgaacattgttttctatattgtaaattattctgaatttttcaaaaatttgtaggatatcttaaatagctataacgtacatgaatatgaaaaaaaattagtcgaaatttttttctggatgccgaaacaagttaagggtgtatcagtacatcccttttaagggggtgcattgtagaatcaccctattttatattgtacttttgttaatttttttgttactttttgttattattttaatgttgttcggatattatttcttgttatttttatgtagttttcttgttatttttattgaatactgtaaaaatataaaaaaataaataattgtacgtaaaatataaaagagtaatttgcggcataaatacctaagttttatgccgagtagcagataaatacctaagtcctatttttggtggtaaaaataccttccgtcactactctggaacttccgtaggtacctctccgttatgtgcaaggttagtgtccacgtgtcacttgttcattggtccatgtcattaatttttttaatttattatttaaatattttaaaaaatataaaaaaataaacaaaaaataaatataatcaaattttt

SEQ ID NO: 358921 - DNA, 522 bp, Cannabis indica
acaatcccaatacccctttttttaattacatgagagatattattatttttttccaacaagattgcaacacttaatgtttatcttttctttctagattcgacaatgattgtcagtttttttttttttcaagttgttgtcaatctaagatttttcacattctctcaattttcactctttctcacacacataaaacaaatttctcatccaaattcccccaaactaaagatctacttatggtataattagggttaaatagtttggatatttatgggtttatcttttctaggctcatatgtgttgaacaaagaataggttaaggctcaaaaatggtaactaggataaaattacagggatggcttgaaaggcacaatcgatccaaaaattgcctaaatcactttcctagtcgtgcataatttattatttcgcctcaaatagcaagcaagcaagttctagaattttccaagcaactttccacatatcgaattagcatacataaaccaattcaattacttgaaaattacc

SEQ ID NO: 358922 - DNA, 454 bp, Cannabis indica
cacgaaagttttagatctcaatgtcatctccaatggtcgtttgaaaattagtagcgggcggaacgactgtgttatgaatgccctagttggctgttgaactggtattcccagtatcttgcacaccaggcacaatctcatccacaggagtcgtcacaccttgaacccgcaattgtaaattgtccaggatttagtgtcggcggaacccttgtgtttcctggaatctgcaatgcaggatccaccgcctatggatttgctagatcaaccacgtccctacgagtttgtactaccatcgtacttgtgattaaattcagaatgaagagccattcttgattctgctctcaatgaaagcaccaaaatcttgaccttgcttttttccaacaatagtgagtctattttagtaagcgactaagtagttataatgactgaaatatagtaaagctaatataaggacaca

SEQ ID NO: 358923 - DNA, 918 bp, Cannabis indica
gtatgcgccgtgaaggacaagcagtcatagtaccagttgatcctgaaattgagaagacttgtaggagaaacagaaagaacaagaggcaagaaagagtttcagcaactgctgaaacatcagaaatcatggctgctaatgtgaatgcgaatgctccaaataacggtaataatggtggtgccgtggaagatcaagctaatggccgtagcttgagagattacattctccctactctgacgggagtgcagtcatgtatcaggccaccggcagtggatgcaaataactttgagatcaaacctgccatacttcaaatggtgcagtcttcagttcagtttggtggactcccttctgaagatcctaatctgcatctctcgaacttcatggaactttgtgagacttttaaagtcaatggagttttttgattaatgaatacaaaatgaaggtattcattaacttcaaaaaaaagtatcaacagggttggccctgagtattaatgggctcaagtaatttttatttttttttttttttgttatatctaaagtagagtgtgggtattattgagtctattttacaaaaatttacaaaaacataattttttttcaatgcataaaatatgaggtttttatataaaaaaaaataaaaaataaaaaaatggattttgggtaaaagtttacaatttcagtcacacataattttttacaaaaatattttcattttataaaacaaccgtaaaaataacaaacaaaacaattaaaacaacagtggaacaactaaaaaacaatcctgaaaacttaacacagtacacagcataaaatttacactgtatttttaaaaaaatctaccccacagtaaaaaagtaaaaaaattagaaattttagtatgtggtataaaaacccctaaaaatatactatataaaaattt

SEQ ID NO: 358924 - DNA, 1096 bp, Cannabis indica
tgcgtgtcgagttgccaggagttttgttgggctggttgtatctgttgtgtgttttgattttgtgtttaaatggttgtcgtataattcctttagtaaaattttttataataggggatccccggaacacacttattatgtcgttataatgtgtgtttttggtattttattttagtcaagttttcaatattatcacgttttttaatgattaattattctattagtattaaactagtttgtaaaatcacacacgtggcatccctatagattagggcgttacaacttggtatcagtgcaacgatggttttaaaggtcctaaagactggtcgaatatgtacatttgctacgaggactggtcgactcacggtatagtaagtatttatattatttgttattggattacctgcctaggctattataaagtatgttgggaaacgtagcacagtgataattttgataagaatatatgtatggtatatgcataatgatattgatattcgtctgagttttaaatggttagaagaagtagactaaatattgatattcgtctaattagcgagttatctgagctcgaggcaaatagtatggaagagaattctttattgccataatgctcggaacatgtaaaaattctactatgcaagatatgattatacaataagggaaaacagatctgagatctgaaagaacaatatgctcatcttgtgtctgttcttgtattaccgacacttcatgttgtacaactagatgtggtggaatatatgaagccaacttaccagaagatcaggaagcaaaaactaaatgaaccatatttatgggataggagaaaaaggttccaggatggtcaggatagcggttaaggtgagaataaaaaattgtgacttatcctaattgttcaagatgcaaaaaaaaaaatgccatttgaaccaatgtagagccagatcttattttattgtggggtagtgggtcatctaaaaagaacctacccgtagttaagaaagactgatgttaaaggagaaaagtatacgtgtccagcccaagtgctggttatgacttaaggggactcgggtatcagacctttggccgactcaaattagaa

SEQ ID NO: 358925 - DNA, 811 bp, Cannabis indica
attgaaaaagcactgtagcgtgccttagcattagggcgttacattgcacatggccattaacggtgcaagaatgagacatgcggtctcaagtgagcattagcgagagtgtgtgtgctatcaccggtttgtactaaaagaatagtggttcaacgctatgtcaataaaagttttcatcaaactttctggtaactacattaaggtaaaatttaagttgaaagacattttacctaatgcacttaagcaagacttctataatagtgtgtatttagtcaatcaaagtgggggaatgttatattttaatataatatttttattgatcaaataaatattacaagtgtgttacacattttaatctactacaaaagtccgaattcgcaacgatcctaacaacgctttttttaggggaccgtcgctaaaaaaattaagtaactatttaaaatcgtcaagataaattaagtaactgtttagtattcccgacaatttatagcagtaattacaggaataggcgacgattttaattagaattcatgaatttattgagcccttatatccgacagtttaaaccgttaggtatagtataggcaacagtactatacccgacagttttaaaccgtcgggtataaatgtccattaaaaaattgtcacctacttcttgccacatttcccatgtggtgcccacctatttttttctatttcccacatgcccacctatttcttctctgttttccacaccctaaaacaaaaatcttaactctcccacccacgcctcctcaccatggccctcctctctcgacgtcttcctccctctctc

SEQ ID NO: 358926 - DNA, 599 bp, Cannabis indica
ggaagaaccaagttgatgagagttgagtttctttctagtttctttatcatttttccctaacattaccctaacttttcttattactagtttctttaggagggtaaactcatatttattctatttttaaatatctcttaggattataagttttttttaatacaaaagtatttattattttttattatttaaatgactaattaatcgtaccaccgagtgtgtggtgtagttggctggaatgctttgcataaggttcctcatttggttccccatgttaacatttatcttgggccttaaaatttgcactattttagtattaagaaacttttgaagattcaacagaataatcaatgtaataagaaaagttttcaaaaaacttcacattaatgtgtcaaatatgatgttaaaatgctttatgtttctgcagttaatattttggatatgacatacaacattaaaataattgttgtgcaactaatgagttgctcattgcaaagaagaaggtgttgttggttgttgttgtgttgttgaccatgttcactcacaatggataccttgtgaagtaagattctttcaattttagttgtatgtagaagaatagg

SEQ ID NO: 358927 - DNA, 737 bp, Cannabis indica
ggatatgtaatgtgtatatatatttaattgtgaaattaatattgatattttgtatatgttatttatgatagtatggtaacatatatgcaatattaattaacataaaattatctgagagttataattttatgggagttatatattaattttgtgtattaatatatgtatataaattatcatattaatatatgtactatatggtatgataatggagatgatgataagaaaaatgtgttcattctatcattattattgtgagactatattatgattaaagataattacttggaaatgaagttccattttggtgataatcatctcattttatgagataagaaaagtgaacttatgtgagttacacttttttgtgtttttcttgtcatagcaagagcaaagtgatcaaagtggatctaaattgtgaaatgagctcataaaattggaaggacaattttagactcaaagaaagtagatcattgtggattcaaataatgagataaaagattataaaattggagaagtaattttgaatcttaaaaagtaaagtggtgaaacaaaattgatgagaagtaatttgttaactttggactaatctcaatgaggagataaccataaaattgaagaagcaattttatgacattatgtgaattttgtgttatctattaacaaattttaagtataattttgttaataaaggacaaataatggataaaataattctattaatttgtaagtggtat

SEQ ID NO: 358928 - DNA, 1466 bp, Cannabis indica
gttcgatctcaactatgttaattgtgttctttgagttgtttgttaaagctggctaattagatcggcccaatagttacatcttgggaacatggttgtacaattgagtgggactgttaatcatagatacagaatctatgttgacataaaagtgaaatgatgatttcctttgagctcttaattgtgataatgaaaaagctcttatttcagtaaatatattagttcactgaaatattatttataggaagctaagtgttttaaggataaaatacattgaagggtagaacgataaatttgtccctactcgatgtaaatcatctatagaggatctttgattgtttggattataacaatggataattaatagtgtatctatatcttaaaacatatagaatgttctatataattaagagtgcaattatgaatctatagtgaaataaagagaaattaataagttaggaaatttacttggtaaattttagatctacttaatggaagcttgattatataagattatggtctccacactagttgagataatattggcttagttaattggttttaattaactaattgtaattctaatttagactatgtcttatttataaattttcactaagcaagggcttaattgagaagaaaagatgttttagagtgtatttattaattaagagactttttaaggtctaatgaataaataagataaatgataattttatttaataattaattataattattaagtaaatagatttgacatttaaaggttcaaaattaaaatatggtagttttgaaagaaaaagataaattattaaataaatggtaaaattaaaatttagtggggtccactaagtggctggccacttaagtgattttaagctattttttttaattccatataagttaaacctaaccctagaaggataacttaagctcctcagtgtattttgttgaataaagaaaagagcctactctctctatttcgaaatacatctccctctcttgcttcatcgaatttgaacccctatagtgataagagtatcttgcccactcaaatcaagccagtattcaatcatagtgagaaagattgtgaagaatttcaacacctgaaggagatccaagctcaaatcttttgattactgtgcgacagaaaggaacaagggttagagatctgagcagaaggatgttgggattttatgccccacataaaacccacttcaatttaatctgatttgttatcaatagaagattagaagtcatttatgtttacatgtaattttcatgtttatggtttaaagtatacaatttctgttaaatccaaaacatatagttattcacaattatagtgatgtcaacaaagtggaatgtaattgtgattatatgcttcaaaagataatgtctcttgattcatcagtgcactggatttacactgatgtgatagtcagcgataaagtatacttacaccttgg

SEQ ID NO: 358929 - DNA, 904 bp, Cannabis indica
cacaacctcaattcatccccaaaatttccaatattttccagaatacctgtatacactgaaatataccagtttcaatcaacaagactcaacaattcaatcaaatttcaaaatcaccattaatgatcaaggtttgagttctcaaactcaaaccttgataaaaccctactataatgaaccaaacaatctaaaacaactcaagtaaccttaattagacttcagaattccaattcaaacaataaaattcaacacagccccacaaaaccaagaattcaaaaaattacctaacttaagtttcaactaaaaattaaaggagaaaagctagggtacactaccttgatcaaagcttcaccacttagctaggaacttcaaagattcagcaagcaaaatcaaagttagggtaggttcttgcagttttcgaaatagagagagagaagaagaagattgatgagaaaaatggatttcctttactgttaagttttcctttggtattaattaaataaatccctttatatcttaataaaagatatatccagcccccctcaaggccactagaggccaaaaagattaaacaaggaaaagaccttttttgcccccatcaccaattaaagtaattaaaacatctcaagggtaaaatggtcattaactaaaccccgaaaataccaataccgctaaaacttaacaatgatatcccgaaaatattccaaaccatataaaatgcgactctctaaaggcccaacgtcgcttcccacagcttccgaacacagtcacagaaattgagaaattacataaatagcatgataaatatatatatgcactcaaataaattcccataatcacaatattattgataataataaaatctcatacataaactttaattattaaataattcaacgtattattc

SEQ ID NO: 358930 - DNA, 588 bp, Cannabis indica
gtcgccggagtaattgccagtgtcgaaaaaattactgagaaatcacccagaaatctgttctttcatcaagaaacctgtcttggtgatttttctagcgacagtgccaattctgacgacttttccagcaccagcatcaactctgacgacttttccgatgccaatagctactccaacggctttttcggtaccgcagcaaacttcgacgacttttccagcaccagtgacaaataaaactgcctaaacaaataaaaacattaaatatgggctttgaaaatctaatttagatatatcaaataccataaaaataacctaaaaaattaaaaaaaaaaaaaaatcatataaattggtcaaacttaaaagttccatatttaagtaaataacttttaaaatctcataatgagcgtaattttctcaaattaaaataggtaatttacaaggggaaaattttatttactcccaaaaaagacatcctattttaataatttttattttatataaaatttatatctttaattgtactaagttttcttaacttttttcttccaattaatattcttaaaaaatatacctatcaaataaaaataaatt

SEQ ID NO: 358931 - DNA, 632 bp, Cannabis indica
attaaaaggataatgctatcttttaatttaaaatatagctaatattaaaatatctaatcatataattaaataatatacaaatattaaagaaattaacaaaattttaaaatctcaccataaataaaaaataaataatcaatttttaaagttaaacctcaaaatatcataaattaataataatctattgaaattaaatattattaatttataattttgatatataagtttaaatatattaaaaataatattttattttgaatttttgggtttgaaattgggaaagtttggaaaaaaaaatggaaaaattccacaaaatttggattttggtgtaagatgcacctgctgcccacgaggaggttgtgtgcagcctcctacgcgcgcggggagaaggaactgcatggtgttgtgtgcggcgtatctcggtaggtgtagcatcaggactcgggtgcagcctcctgcgtgtctgaacgtgtgcattgccatgtctttagatacgattcgcttaggcatccgcgcgcgtatcaccttgtccgagtgactggtgtgcgtgcgattgagccatgtgcatccggatttcaaaaaccacataactttctcaatttttatcagaatcgagttccataaaaacgaaa

SEQ ID NO: 358932 - DNA, 501 bp, Cannabis indica
taaaataaaacataataataattcaatataaatatatggtaagattggaataaaataatactttacaacttaggcgacaaattaatgctagaataaaataattctagcataataaattttatgaacattatatttctatctcaaaaattttaaaatttatgagcattatatttatagtacctcaaaaatttaacttaattttaaaatttactcacttaatttaatttttaaaatttactctaaaaatataaggtggaaaattcactgaattgttcataactttacttttgaaaaacatctctttttctttttgaataatggcctcaatcaatgatgatttggtccaagaatttgcctagaaatgtttcctagctaattaaggagtcatcaattaatgtaagagactaaagagattattcctcacttattttattgtagagaataaagattatgagttgtaaagttgtattgctaagtatgctttagattttaaagctactg

SEQ ID NO: 358933 - DNA, 496 bp, Cannabis indica
tcaccacgtttgacggttatactagattatatttgattcccaatatttacttttgggggggggaccgatgcgtcaaaggcatttaaaatgattaccctttttcatttttctacctataaatagggttgtgcatccttcacaaattcacttttaccattttctccattaagcaaactcagagcaaaaaagaggtttttgcttcaagtctgtcgtgagatttctaccaaaagcatccgagtagctttgtttagactgaactcagacgtcaaaaagtaagttttcaattccttgttcttttactttgcatgtttattttttgggtttcatgtatgcgttctcgatcttgctgtagaagataggtagaaatctaggtataaaacttcgcgattttctttgtaataatctgtgaaacttcacggttcatgacgttggtctttgatcgtacattgtgttgggctttgtgccctaaataaaactctatttcaatgtaatcttt

SEQ ID NO: 358934 - DNA, 600 bp, Cannabis indica
tgcctcgtgaattgggcctcacttaattggcccaaagtcgatatatattgtatttaacccaacagtgggcctatttgacacctttaaactctatcgggcccagatatacccatacccagatctcacatataaatagaacattaccccttcatgcaaaaggttgagatttttttttgagaacaagtcctaagaattagggttcatcttctagggcaacactactacaaaattagcttttcccatcagtttataattgtcttatatgctattttccatcgattcctaaaaccgctggctatgtgggtgtcataaaaatataaaattttaaaagacggtttataactattgggaaaagactttaaatgatggtttacaatggctgggaaattttttgttaaataactatttataactaatggcaaaagtattatgtagattaagaaaaaaatacatttaagctagtttattatatatgaattattatataattataataatataaataaatttaaacaaaaataataatataagtaaaaattaaagaaataagaatcataaaatatatattcgaaatttaaaattattatgtttacaatattt

SEQ ID NO: 358935 - DNA, 741 bp, Cannabis indica
aagttgatgtacttttggaacctcttctggaaatcttggaggttcgcagctctttcttgctgtaactcgttccagaatggagttcctgtacggatctcaacttgaagaagtgcaagctgttgtccgtcatcaactttcttagtcttcgaggcttcctccttgaacctctttatgaaatttttcaatgtctctgtgggtagttgcttgatgttagtcagagcactgacttcgagattaatctttctcgcggcgacaaactgtctctggaaactaacttgcaacttgttccagcagtccaccgatcctggttccaacttcttgaaccattcctccgcggacccgcttaacgttagtgggaagcataagcacttggcgtcattgctgactctcgtgaccgtcattactcggttgaaccgagataaatgatcgctggggtctgtgtccccggtgtaagctgccattttcgggcatcttaaaatttttggggagtttcgcctccaaaatgtgtctagcgcacgactcctagtcctcacagtcagagtctgagtaatcgcctttttgtctctaggagactcgagaaatatctttgcacagtatggctagctcagctaggattccttcgttaagcgttcctgcggagaccgccggtgcgtgttcctttttgtccaagtgatcccgcaaatcaccatgcttcccgttgatctgatgtctcaaatcaacgggagggtatctccgtcccct

SEQ ID NO: 358936 - DNA, 705 bp, Cannabis indica
atcattagctcgttgagtactttctctctttgagttgatcggctatgggttctggattgcctcgaagtcacacttgcttcttcacgctatgttctttcctcccgagagcagtttgtcgcatttcccccatcaaggtatgtatgagtcctcgctctatgggtttaggaagaacattggtgatttctagcaggtgatctccgttctcccagttgagtcccaagatcctcctcattttcatgagggatttctccttcatcagtttccgattgtctcctttctggctgttcatcctgattcttagggggtgtctcattttccccagcttgttcttcccgggccttttcctgtctcctagtttgtgagccatgaggtctgcctcgtggtcttctcactcaaggttcaggttaattttgagtgttcatcccctgcgccgccctggccgaggctacgtcacgttctagctcagtgtttcgacgctgcgcctcttctaaacggtgtctcagaaggtagctttccgtttcataagttttttctcccatagattgggcacctccacggtttagctcttcatccctcgcccacgctgagttctcctcgagcgggttgtccgcgtactaggaccaacgtcgggttgagttctcaagggacgtgtggtccgaccactagggccaccctcaggttgagccctcctagaacgagtggtcc

SEQ ID NO: 358937 - DNA, 552 bp, Cannabis indica
tgttgggcctaggaaaaatataattttttttcttttgggcctttgggttgggtcggccttagatacaggctagctcgccttatttcaggtcttccaaatgcccctaaagaaagtcgtcagaatcacgaacaagaacaccaatatcaataatcctattattactattaatggtagcatccacatttaacttgaacaaaccagtaaataagctatccaataaataactctagacaggagtggttttgtagcccaaaagtatgacttttgggcttttaaccaactatcacaatactgaactatctatcttcaaatttttaaagtcgcacataatgtttgttcaggagtgtcaattgattctttattttttacataatgtttttatttgtcatgttaaacgatctgctaacaaagccgcacattgtgttgctcgtttgccaatgtcctggaaaggacataacacttatccaaggtgtatgaatacctatcgctaattataccatgccagtctaaatctagtgttctgaaaaatcaaggaccgatattgaactttga

SEQ ID NO: 358938 - DNA, 574 bp, Cannabis indica
cctaggaaataatgcagcaggccaaggtcttttaaagcgaagactttgttcaacttgacagtgaattgcttgagcttttgagcattgtttcctgttacaattatatcatctacatagatgagaacaaacacaatatcagcagcatttttaagaaagaatagagagaaatcagctttagaattggtgaacttccactcaagcaaagtttgtttcaacttatcaaaccaagcccttggtgcttatctcaatccatatagggatttagacaacttgcaaacataatctgggtgatttttatcctcaaaaccagcaggctgtgtcataaaaacatcttcaattaggctcccgtttagaaaagcattatttatatcaagttgtctaacttcccaagattttgacacagctattgtcaagatgattctaactgtgcaagcctttacaaccggactgaatgtctccccataatctataccaggtctttggctaaacccttttgcaacgagccttgctttgaatctttggtgcgaaccatctggatttagttttattctatacacccacttgttccccacaa

SEQ ID NO: 358939 - DNA, 504 bp, Cannabis indica
ttttatacattgtaagcaaaagaaaaactttccctgcattaaggccctgtaaatagtgacttagcttcaatgtgaaagggatcgaaagaattgcttcatagagagatctaagagaattactcagggatttcattgtaagagctttgagagaaaaacactttgttctttgttcttgagttaatacaatttaaggggagtaggctattaccacactaacggggccaaacctcttcaaaatctagtgttctttattttaattatattctaatcgcttaataattgactcactgtcattgactaaaagtgaggtcaacattttggtgctttcattgagagcgaaaacccaagtttgttctttgtcttaagtcttaacaggtatacagaatggtggtgcaaacttgcagagtcctggtcgatcagagcgacccaatggtgacagatcctaatgtacaaacccctaggaatacgagaggaccaccagggacaaatcccgaacaggccaat

SEQ ID NO: 358940 - DNA, 507 bp, Cannabis indica
ttaaaacttgaaacttttttttttcatattcattttcaagccttatggtatttttgacaagtgttgctcaaattttgttgtatttgtgatagtttaattatttaatgataatccaaactgcaaaaaccgcataaactgcaccgcactgaactattttttgcagtgcagtttttgcaacctcaaatccatacctgtgagtgaagcacaggtagtaaccggagttctacaattcaaaggcctatactcaacaaaaataattcatcctcttgaatcagttagtgaagaaagttgataatctatgcagagtagctgtagatgatgaattattgagagaagaaaccaaaaataaaaaaagaccgagagagagagaggatgggtgatggagagagaacttgtagtatgagataaaaaactacacagaacacaatatcaaactaatttttttgaaatacaaaagaaatatacatgctaaaaactaactggagaagaacacaccgctcgattaag

SEQ ID NO: 358941 - DNA, 522 bp, Cannabis indica
aattgaaccctaatccttggttctttcttggttcgaaaaggaaaaagggtggagaggttctaagtcttttcttgatttttctttatttttctttaaatgataaatctaaaatgtaattaccctatgctgaaactaaatgttgccagctgtctaaataaaaacaagccacttaagccccttagtgagattactaaaatgcactttattaagttaaacaataacaagcctaggggtaaattggtcaaaagccataacctcgctcaaaactgatattctatttatcacaaatatatatattccactaagaaaaaggttttagagttacctatgtgactctaacggccatccattgtattttccatcgtcgcagagcaaaaattataaaatttacataatgcatatttaacttaaataatactcttagagtttaataaaatctctgaaattgagaaattataactctaatgcttatttctaataatgggacccataacataataaactcatgcataattataaaaa

SEQ ID NO: 358942 - DNA, 521 bp, Cannabis indica
atagagtcctctattgagactatttctttatactaagggaaacaaaatccattttataataactattgggtatacaatggactacctatactggatttaagcagagtgcggaacaactttcggtggttcttttccaattctgtttattgcaattaatttctactgtaatgttgttgttttcatgtttcatgtttgttttttcactttgagactaacatgatcatgatcttgccttttgttctattgattgctcacaaagttctattttttaaaaaaaataaataaatgtactgtaagtattttatggtaccactttctagctactgtggtctatatatgcaactcgtgtacggacttccatgaatgtctaatgtgatgaatgtatccttgtgctttaactaatccttctttttttaaaaaaaaaatatattaaaaagtaaaaaaaaattaaaaaatatatatttaaaacggatcgggtcagatccgatccgtaaaaaaattaagcgtgtcgggtcggatct

SEQ ID NO: 358943 - DNA, 566 bp, Cannabis indica
  modified_base (34)..(34): a, c, t, g, unknown or other
tctgtttatacgcattgtaacgagaggggaaacncttcctccccaagcttactagccgtataaatagtgatggattgcatactccctgtgcgcacatgaggctgcaaatgggcgagggagaggctgcaagcatcctggtatgggggggaaaacctcggtctggaggggaaaatttggacagtgccttgtctgaaggcatcttgtccaagcgagcatccccctctgcgtgcgcacgtgtgttgctcggtttcagatattttcatccaaattaaaaaaaaatcataactaattaataaaaaatccaaattgagttctgcaaaagcctaaattcattaaatttttgtctactttccagtaaatatatttccataacgaaataaaaatatgtttacattatatattgcaatttccaaataatcatcaaataagcatataaacaatcatggaaccatccaaatcaacacaaacatcgttttaaatctatatttcatgaaagtaaatcattaccatggctctgataccaattgttagaatatttttacgaggagctagacttactatcatgt

SEQ ID NO: 358944 - DNA, 677 bp, Cannabis indica
aagttattatccttcgaattttaccatctatatgctccggcacattggatatttagatttgtaatgatcgcatatttagatatggacttagaaaataattaacatttattagtaatttaattaatatgtatgattatgtgtaaattaatacaaattaagccttattgtcagaaatatacattggagaaataatttcattgcttccttagcttttgaatctcctcctattatctctaaattctggcttgtatttctacaaactttttctcccaatctagtggagcttgtggcgggtttacattaccaccagcaaaagcccttctacaccatctcccttggccaagaggatgaagggattctgatttccctgaccacaccattagcctctaccatgttacccttaccactcgtgtttattgggtgtccattttataggacgagcctacaaatttataagtcacgttgtttaggcaacaatcaaaattgtaatttaaacgtcccatacatggaaacttaaacatgctcttattcttctatcaaacttgtatatgcttatcatacttttctaatcacgcttatgtgattcaaacaactaatacatgtaaatgcttactgaaccatgagttgagcttgtctctcatgatgattatacatatcttgacggtcttcaaaaaata

SEQ ID NO: 358945 - DNA, 449 bp, Cannabis indica
ttttgacactcaaagtgtttttattaccatgtcatttgatttctgataatatcatggtgtcatttaagatttatgcactacatggagcagaaggtttctgagaaggagggggtcatggctttaaagcttgatatgagtaaatcgtatgacagggtggagtggagttatcttagactcatgcttcaaaaacttggtttttcataacattggatgcagctagtttctggttgattttcaaccggtgaggtattaggtgttggattttattttaccaggatcttagatctactcacaagtatgttaattaacaacctaaatatgaacttctaaaacgataataaataaaacacatataaagttaagaaaccttacagtgggtgcagcggaataatgtgtctccttccactcagatctctaacccttgattcctttctgttgcagagtataat

SEQ ID NO: 358946 - DNA, 573 bp, Cannabis indica
aaaaaataatatttatatgactaacaataacatttatatgtaacttaaaaaattatataacgataaagtacatctaatataatcaaaagtaacaatcataaaaaatagtatcctacatgtcataataaaaaattgatatatctatgaagtatatcaaaaaaactaagtatcaccaaaagtaacgatcatatagctaaaagttttatatcctacatgtatcataacaaaatgtaaaaaaatcgcatactcattcttttaatatataagatttcacaaaattgccccattcatttcatatttcgtttatctcttgattgctgtaaggcttgttatctatgaactgtacaaccagataatattaaatgtatttaaaataaaaataattattagataaaaatcatatatgtttaattacctcattattcaaaaaagttgcgggattgtgctaagtcatgtagcttttaataatcttcatgcagtaatattcacattgtacatcgtcccgttgtcatcgacacttgtattgcctgatctttacctcaaccctgttttgtatatttttttgaatcttgt

SEQ ID NO: 358947 - DNA, 793 bp, Cannabis indica
aataacctggtaggtatataggtgtcattgtcaacttgacccattaatggggtaaattacaatttaattacattgattttgggctaattaggtgatgtacttagaatgtcagagcatatagctttggaaaaaaaaagagctttgttttggtggtgcatgctccctagatctgacgtaggggacaaatccctgacatggtgggaccccgagtctggaggtcgccacgtaagatgatttttggaagtctcttcaattgcctgtattcggattaccccatgagagcatttagaaatgcatgtcttgatggagctttcaccatctaggccaaacatcatttcgtcaatcgatcaagtggtctgaccttatctttctgtaagttgggcttacattcggctttggatcttttaccgtcattgcacttttagttgcatcttaatgcgccgataatagttatttttgttgacgctttcattttacgccggcaaaagctctagtattgacgtcgatttgtcgaccccttttgtcagtgaaatacccaacttttgactgtgtaaaaatgcactagcaaaagtcttatttcttatagtgggggtttaatacaaaaaactgctatttttaatgacaatattttagttacaatataatttttttgtgattaaatgtgactttttagtcacaacaaaatattacttgtgactaaaacatagtatttagttacaagctgtcactaatttagttttagtcacaacaagtattatgactaaaaatacatttagtcacaacaaattgtaat

SEQ ID NO: 358948 - DNA, 526 bp, Cannabis indica
aggtacctcaattgtgtcttccgcggcttgggctgcggcggtgtgatcgaggattcttggatccaagtctggttcatctatgtgcggtactcctcgattctgaggatatcctggcgaggaggtggtgcctccaaaagatagataacatttaccgtccttctctttgcgagtttaactgccgtgttgtagcattcccgcgattctgcttggactccccgcacagaacctactccagcgggagtagggaacttcattgtcagatcgaggttatgattttcatctccttcaggatcggtcgaccaattacggcgttatacgctgagtactggtcgattactgcgaagtccgccattgacttggctgttactggggcagttcctaaagtgattgggagtttgatcattccttttattgttatgaagtctcccataaaaccataaatgctcgacgtcataggtcgcagatccttctcctacaccctatttgtttgaatgcttggaaattcagcagattcactgaactccca

SEQ ID NO: 358949 - DNA, 506 bp, Cannabis indica
ttttttttctaaaaaaaactacataaaacattaaaaagaaatctgaatttaaaattcataaaaataaaacttaattaaattaccataaaaaatattaaaattctcttcatatttatttttttaaaaaaataaaacaaataaaactatagtgattgccgaagttgtcactcgtgccggaaagtcaccggagtttatgtcggcattggaaaagtcatcggagtaaccgccggtgctggaaaagttatcggagttactattctggagtttgatgtcagtgtcgaaaaagtcgccggagtagttgctggtgttggaaaaatcgtcagagttattgccggcgtcaaaaagtcgtcagaataggcattgtcgccagcaaaatcattagaaaaatcatcaaagtggttttttcataaaaaaaaccggtttcttcaccaagaaagtggtttcttcatcaatgaactaattttgttacacaacaataataaagattatgaaaacaaaacaaaaat

SEQ ID NO: 358950 - DNA, 706 bp, Cannabis indica
aaataaagataatttgatttgttttaataaagacaaaattgaaatcaatttcttctcttacaagaaatttccaaacaaagaaaagtccaactgaaaaaaaaatctttccttagaagaaaagagtaattaaatgcacaaaattaatgtaataaaactaatttaaatgctcaataaaaatgcacattaattaaaaaatattttgacaactaaatttctaaaaaaagatctaacaagatcattagggccatgcgctggaggctttcactgttagtcatgttggctgagttcaacccaaaattgcagaaaatactgacatcaaagaagctttaagctgaattattcgtcatcagcgacctagtattcttcttgaaatggatagcttgatctctatccaagcaataccaagcaatctacatatactatcagaatttgatctgttggttcacgactgtaagagtcttttacttagtttttttttggtatttttacattttgtagaatgatctgtaaacaaagttgcttattgtcttgcttgtagctcttgtttttctatataagtcgtgctcatagtgcatctgatccgcactaagtgtggatttcattttttggatccaatcaaattcacacaatagctcaaatccaatatccaatccaatccgtaaaagtgcggattggatcggttattttggattggtcactttttaat

SEQ ID NO: 358951 - DNA, 587 bp, Cannabis indica
tgtcttatttatgagtttcattaggcaagggttattttgagaaggaaaagagaatttagggtttgtttattaattaagagactttaaaaggtctaattattaaatagatagaattgacaattatagagttagaattaaaagatggcatttgagaaaagaaagataagtttcaataaaatggcaaaattaaaagggaaaagtagactctataccctttttaatgtcatcttttatttttaccttttcttttaaagtttatcatttttacctcttttttcaacactttaccaattttgtccttgtcacttcaatatactctccatgtgactcccttatgtcaggatattttgggtataatacatatgaaaagaggtatgtttcaattaaataaaaataggggtatatttagttaattgacaaataaaagaggtatttttcaacataccccaaattaaaacccattaggcccatatagaatttgaccaacatgggtttaataaagtcatttttatcttttttattctattttaattcaaaacctaaccctaaaagctaccatataaatagaatatgataactcttatttt

SEQ ID NO: 358952 - DNA, 935 bp, Cannabis indica
ttctagtttgtttagaaaactggaaaaacaatttttagtttacttgttattgtactgtatagaaaaaaaagttttttttggggtttcacccagtggccgcggccagatgtaatgccgccgcggccatttaagagttacagaaagctttttattttgggcattcttggccgcggcgaggacggtcagacgattttaaaaggggcgattcgcacataatttcaaaatacaattctctcattctcaaccctcacctcccaccgaatatcactctcccacaccatttttcttcttcaaatcccgttcaaaaccgttttccttcaaatctaaccataaatcttcatcccaaatccttctaaaccattattcctctcatcaatcactcattccctctcaaaatcaatcccaaatccctaaaacctcacccaaactttcaaaaacccctattcatcttcttctttctcaagaacttcaagtttttctacaatgaaggttgattaaaggtggattctcattgaggtaataattctaagactctctatacaatttttattgaaacatttgtgaattgttggagaattttggattgtttgttggatttttgggatttttgctctatacattgttcaatattgttgttgtgagtaagattgggtttgattgtgagtgaattaattcccgggaagtggatttttaaggggaagtgctgccgaaatttttaaaaatcttgaaagttaggaaaatttgggtgagatgggtcctaaaaggtcaagagtgagtgaagaagggggagcttcatcatccaacccacctaggggtcgctctaatcttgatagagtgaggtttactaatatggatgctcaagagcgatttttgaaattgaaagatagggcattcattgaagatagagggattgacattgttaacctgagccaaac

SEQ ID NO: 358953 - DNA, 602 bp, Cannabis indica
atcagattgtaatgggttttatttagggtacaaaatccaacaagggttttcttacgtggttttgcagttaaaattctgcatagtccacaagtcaatcttattcacatttctgattattttataaggcctctcttgtatgagttttttcgtccttttttttatcttctcttattcaagtgtttttctcaagtttagagtgattttagtgaaggtaatccttctctagcttctcttcttttaatttcttgaaattttgatgaaaagatgatgtttgcatgcttgtttgaattgtccttgctgctgtgttttgatgttaatttcagaggtttatttataatttaaaatgttgattcaagcatgttaggattggtgattacttgattttattgagatatgaaattttggctcaaaaactatggttttcaaagagaagtgttgaaatctgttgctgttgttttgttgatgtttcttgtggtttttagaggttaagttatgcatgtttaagtaggtttgggctgaattgattgcatgttggtgttgtttaatcaagtttgagtttggagctcaaagcttgaagctttaatggtgattttggtttgttt

SEQ ID NO: 358954 - DNA, 896 bp, Cannabis indica
ggattttgaggagcagtatgagcttcattttcctctgggccgtcttgggaggaaggattggccatctctgtaatagcgtgaggggtggagcactctccttcgtgcaaaaagtacaaggcccagcgtgggaggattcttttcaatctcttcactctatgaataggacatgtagtttcgtgagatccgccagatgactcactacctaaagggctaggagaagacgacgaatcagatgaatttggaggtgaccggtagtctgagtataggtgagcaaggaggtcgtcgtcaatatggttgtcgcctccccaatggtcacgagcatacatctacaaacacaagtatggggagtgagcatacaagcatggaatgaggtaacaaaaaaataaataaaaaatgctaagttaaattcacttggtaaggtagtgaggctagttaattaaaataaattagataaaaactaattcaatcacaaaaattagatgcaaactaaatttgatttcaatcaaattggaaaaatctaattgtgttaaattggattggaataaacctagtttaatttaactaagctgaatgaatttaatttttttttaaaaaagtattttattttattttttggattgttttgggtatattagaattttattgaggcatcaaccttctgtatgtattcttggtatatagatgtgtataaaaaaaaagaagcaatatgtgtggctccatgagctccaacaaaggagccaaatggctccataagctcccacaaagaggtcaaatggctccataggctcctgcaatggagctgaaaaaaaaagtggaactggaacaaaaaagtggagctgaaaaaaaaaaagaaagtggagctgaaaaaagagagtggagccgattggaatggctcc

SEQ ID NO: 358955 - DNA, 696 bp, Cannabis indica
aaatgaacttatccacttgtaccaacacatcttcaattttcctttcctgatgagccatggaacgatccgctaattgcaaagtgatggtggttggcctttcttctccaattcccaacttcctaaaaatagacataggcatgagattaatactagctcccaagtaacacagatctcttccaacatctcgaccccctatagaaattggaattgtaaagctgcctggatctttcaatttgggtggaattttacttttcaacatagcactacatccgtccgagaaagcgacagtttcaaactcgccaagcctccttttctttgtcaaaatatccttcaaaaacttcacataggttgggatttgctccaaagcttccactaattatatattgatgtggagctgctttagaacatcaaggaatctccagaattgaccatcgtcttgttgcttcttaaaccgttgaggaaatggcggcggtggcttttgcaaagacatttctacagcagaatgctgactggatgctgtaactactgggggaatttcaacagctgaaattgttggtttttgttcatttccccctctttttgcattgaagagggctccttactgcctgttgtagccacatttgactcaagaatttttccacttctcaaggttaccgctttgcaatgctctttgccatctcttcttgggtttttggt

SEQ ID NO: 358956 - DNA, 1234 bp, Cannabis indica
agagaaaaggtaaaaatgtttagataaacgtgtgtaagtatatatgtaataaaaattctattttgtatttttggtgtaaaaatttctttactgtatttatttattttatatgaaaaatctatttgtttctttgttttttctttaaagtatttatttcttctttaataatattgatttgcttagcaagacataccctttttttatttatttcttctttaatatatattgatttgcttagtaagacataccattttttttgaggtaccactttaaatttttttaattgtgtataaagtgatgactcttataactactataaaataatctttttcaactatgaatatagtaaaaactacatttcgcaacaagatgaaaaatgaatatttaagtagtcgttcgctagtattatatattaaaaaaaaaaaaatttaacaaaaaaaaattagtatagattcacttatggataacttttatgacatgtaagaaagaggttctacattttaatttaaattataaagttttttttttttttggaaagatttatcacctaaatttagaaaatagttttgcccccctaactttatattctggctccgcccctgctaattgcactaagaaaaataatattaactcttcaatatatttttgtattacgatttcttttacatggttttgataaattaatttatctttttgttctattacattatttttttctataaaatttgttcgttacagttttatttctttgcaactttttttttttctctttttctttttgagttagtgatagttaaaattataatttattttttaaaaattaaataaatagttacattaataataaaaataataaaatcttataatttcaaaaaggagtatataacataataagtaatatataattgaatatgtgaatatctactactgcacatcatgtcaattaaaaaaacaaaaaaatctaatcattgtatatcattgtattttaaaaaaaaatgtcaaaaaaataaaataaattatatgtatctatatctacaacaacacacatacaacaacaaaaaaagaaaaaattcaagaataaactaaaaatatacaccataaaaaatagaaatttttacatgaaaaatccattttgcacaatttattacctaaatacctctacacgcctatgtctacatttttactttacaaagttggttttatttacacaaataccacttagtcatcattccat

SEQ ID NO: 358957 - DNA, 574 bp, Cannabis indica
gctccatgagctccaacaaaagaaagtggagctgaaaaaaaaaaaggtggagccgattggaatggctccatgagctccaacaaatgagctgcatggtatattggagccaattggcacaagaggagacccaattggtattattgtctattttaaaaaaaaatgtatatatatgcaacatgagacatggagatggtatcaacgtatctacactcatcaattcctacatactccaacccattctacttttttgtctttaccctctaaagcctaaatagccacaaacacatttttccctccattttaaatttcttttggatctaaattagggatttcaaatgttcatcactatcatcatcatgttcttcatttttcccaaaaacgtttacccaaatcacaccaaatacataaatctcacgcatttctaaaataaagagtggattaagataacccatagcctacattgctaagtttcattcatagatttcaaaaattacaagccaaatttcacaacattaggaaaaagaaaatatgtaaaaagagggttttattgaaaaagtctaaagaacactatgat

SEQ ID NO: 358958 - DNA, 522 bp, Cannabis indica
tgcaaaaataaaagataacaagcgtagaattgctccaaacacaagtaaaactaaattaaaagtatactaaaattaatctaatgttaatactaaaaataacctaacaaatttccctaaactaaactttaacttgttctcgagtaaaacactaaatgaaaaataaaagttaaacaagtcaatctctagaacaagagtaattttcgagtaaactcaataacatgattgtgaaaattttcacttatgtatacaatccaaaatttcagttcaattacgcctttgacacacttcaatttattttcatccagctcatgaaaccatagaacgcaattaactaacaattgaaccactttatgcatgccaattacaatcatcaatccactaacctaaaattccatatgcttgcaatacttactattctccactaatataaattaatgcacaaccaagaatcagaaggtctttctaggcttgtaatgttaggcttaggtaagggtagttgaaatggtcatttaggctttccta

SEQ ID NO: 358959 - DNA, 601 bp, Cannabis indica
cgcggtatccctcgcctcttctctttctactcttcctcttaaggtttgattcacctcgttccccctatagggatttacgcgagctcctttcttatgaacttggagagaaggttggcgatcaacgactgacgttccacatgtcctaggttgtgtcctcagatttccctcagtttcctgaagttgcctcccttgagagttctgggaatatctttgggatgtctcctaccccttggttttcaagttacgaggtttgcctcgtggatctctgtctccaaggtcaagttgattttgggaactattctcctatgccgctctggctgcagctatttcacgctctaattcggcattatgctagtttgcttcctccaataagcgcctaagatggcggttttctaactcaacgattggtatgtacctggttgggttgtaggcaccatcctcatcaacctagttaggaagagaccggctgttgtttatgttggattttgtgccataaataaaacccatttcaatataatcagattcactaattaataaagatcagaaatcacattttatattgcatggctcacatgatttatttcatgtttataaattctat

SEQ ID NO: 358960 - DNA, 930 bp, Cannabis indica
cagatatttaacgcatttaggagtgaactgggctaggcagaggccgaagaagtctgccacatcctttaaatattgatgcaaaggcaccaacgccccttgctgggcatgagcgcccgaccaagatcacatccccctttcagggtttgtggctcgattattgtgggcgggaatgtagcagtccaactcgcctaagtagccatcttggtcgagagaccgcaggcgcgcctcagtaaccctggacggaggactcacccacctggtgcccaaggcactttacctccgatgagcaactgcagcattaagctcctcaccgacgtagtccacgccttcgatcaggatgtcagcgtcagcatcgactggctccccagcctcattgcattccccgtagtttgggggttcaacctcctcctattcctccacctcggaggaacttccaggacgaatgtcgtcttgcccctcaatctcctggacctcggcgtccccttcatgatccacctctacctggacggctggatcctgttcggcgctgggcaaagtggcgtgccgagctacttgaggatcagatgcataggccacacgcattgttttcttggtacgagccatcattctatggtcgggtacaagatttaaagaaggtgggctagaacgaagatgagagtggtcctcgtacagaagttgaagtaggtcctggtcgatttgatgttcgctctcccaaaactcacctgggttcatctacaaaagacaacacacgagatgagtttttggtcggaatatcgaacgataaacaaagcaaatatgccgaccaggagtactcaacagattaaagaacaagaatgttcaaagaaaagtcagaactcaagaagtttgaaattttctcgagttagggcaaaaaaattcatgaagcttagaataagcaagatggaagaccgg

SEQ ID NO: 358961 - DNA, 547 bp, Cannabis indica
tgacaaataaaacttcctaaacaaataaaaacattaaatatgagatttgaaaacctaattacatatatatggcatatcaaataccataaaaagacctaaaaatagaaaaaaataccatataaatttggcaaacttaaatgtgccatatttatcataggaatttttaaaatctcatagtaagtgtaatttcctctattatatatgtaaattgtttagagaaatttacaaaaatactagattttgattaaatgttcacatttatgctgtcacacgataaaaattatatgtatactgtcttgttttttttttcttccttttataatgtagatgccaaaatcacataccaagcctctatcttctatacccacatacagaattaccccaacaatacgagaacacttgaaaacaaccattaattctagcaagatggaacaaaatagagaaatcgacatcaaataaataatacatgacaaaacaactgtgaaacaacactaaaacaaattaaaaaaacaaaagaaaaaatagaattaaaaaaagactaaccatc

SEQ ID NO: 358962 - DNA, 440 bp, Cannabis indica
taaaatatattccaacaaaagtatcgccgtatgaacgttcgggactcagtatcgtgtgggacacggcagtgagggttatggtcaggggtatgggcgtctgatcataacccgggattatgtatgttttatgatttatgctttgcttactgagtctctcgactcacagtgctatgtttatttgtaggtaagggcaaggctaaggctgagcaaccgtgaggacgagccgatgaagattgtacatgtcggggcagttaggcctggagcgttcgatcctcgagacaacaatacttttgtaattagtcgctgggcgacaagtatttagtaaataacagtaaactatttggaaagtattttataaatggaatcccaaagcattttgtgtggaatattatataagtttaattaaaaagcaaaatttttaattaatcacgatttccata

SEQ ID NO: 358963 - DNA, 411 bp, Cannabis indica
agggtcttatttttactagttttaggaaaatacatggtcctattttgtcatttaacaaaatagagggtccaatcggtaacttttgacaaaatacgagggttacaaaatagttactttaccctattttaaatggatttgtcgagtgtggcaaaaatatagaatccaaaagggaaatttgcgacaaaacctcctaaagtggacaggtttttgcaactaatcccctaatctaaaattttggcggtaaaacttgttggaaattattttaccaggatcttagatctactcacaagtatgttgtctaaacaccctaaatatgaactttctaaaacgataaattaaacacatataaagttaacaaaaccttacattaatgcagcggaattaatttctccttccgctcaaatctctaac

SEQ ID NO: 358964 - DNA, 677 bp, Cannabis indica
tataaatattaaagaaattaactaatttttaaaatcttaacagaattgaaaaataaaataattaatttttaaatttaaacatcaaaatatcataaaattaataataatctattaataaatatatattattaatttaaaattgatatttaagtttaaatatattaagaaataatattttgttttgatttttgtggtttgaaattggaaaaattcgaaaaatttgaaaaatcccaaaaaaacgggttaggggtgttgcttcccaggagggctgcacgtgcagccaaaataggctgcaggtggcccaggacgcgcgcgggagcagggtgtctgaccgagaaaactgggtcacctgtagggtgacacgcgcgcggaagaccctcgctagcagggtgcatcctcggacaggcaggcgggtgcagcttcggacagaacctcttcagacacgcacacgggttcatcttgtccgagcacctgcgcgcgcatggtggggtgcgatgacactatatgcacccgaaacttcaaaacaccatatctctcgcatttttgatcagattgagttctgtaaaaacgaagttgcttcatttttcacaggattccaaatgaaatattttcagaataaataaattattttcctggaaaaatttcgaattacatacaatcatcaaatacacataaac

SEQ ID NO: 358965 - DNA, 696 bp, Cannabis indica
atactattttaatctggatattacatcgatggattccattgtcgcctgagtcctttgctctagcgactgatgcttcggtggtataaggcaggggttttgtcggtttggggggggggggagtgatacaggatgctacgggtgtggtttggttggcgtgatcatctagtgtataaggtgatttctctgttaatgtggcggagttgcttgccattcggatgggtctgtctcttgcacttcaacatggttttcgtatctccattattaatagtgattctacaatggcaattggttggattaataagcttcacatgaattttagtgttcagtctattttattatatgtctattctttattagttgttgttggtggtggttcttgcagtgttgttccgcgttcggcgaatggtgttgcccatacactgacaacctctgttactagtttatgagattatgtttggacagatgcttgtccacgatttttgagttcttctgtaacagcggatttaattcaatgaattatgtctttttcttaagaaaaatagatcactaaaattatattttctctattttacaacatgcttttacattgtagcatacatcaatttatttatatttttctctacatcattaaattaatattattttattttacactattaaaataataattttcaaacatatatacaatatacataa

SEQ ID NO: 358966 - DNA, 637 bp, Cannabis indica
tagcctctgaaatggttaacgcagggaattgaattcgtagttggaaagttacacagtttaacgcttcaatctgatcgattagaaagaatcagaaaagcgcaattggaatatcctaatctagttgaggttcgagacgatgtaatagccagttgacctaaagactttttagtctcgaacagtagaatgttgttatttaaagctcgagtttgtgtttctaatgttgaagaaatcaagaaggagatacttgatgaagctcataccacatcttactcattgcatccaggaaccaccaaaatgtatcaggatttaaaaccctatttttggttgtatgggatgaaaagagaagtggtagattatgtgtgcaggcgtttaacctgccagcaaattaaagctgaacaccaaaggccggcagggttactgcaatctttagtccttcctgagtggaagtgggaggacattacaatggattttataattagaatacctagaactatgggaatgtatgattcagtaagggccatcgtggacagatacacaaatcagctcactctctactagtgagagttacatattcagtggatcagtacgctgaattgtatgtgaatgaaatagttcgtctccatggagcccctaaatc

SEQ ID NO: 358967 - DNA, 424 bp, Cannabis indica
actccataacaagtccttggtcctttgcggtttgggggatcgacctaattaaggagttacccaaaggaaagggcggagtcaaatacgctatagtcgcagtcgattacttcaccaaatgggctgagggaaaagcacttgcgactatttcagctgtcaaattacgagagtttgtatataattccatcatctgccgatctggcatcccttacaaacttatctcggataatggaaagcaattcgattgtaaggaaatgcgacaattgtgcgatgagttggggattaaaaaggcgttttgagcagttgtttatccacagagtaaagggcaaacagaagccgtaaacaagataattaagcatactatcaagggaaaactcgaagagcgaaagggggtatggccagaagagcttttgcaagttttatggtc

SEQ ID NO: 358968 - DNA, 904 bp, Cannabis indica
ctctctctctctctctcgagttcgacccaaaccaccacaaccgacattggaacccaaccagactcgtcgaaaccaccacgaaccgtcgccaccaccaccaagcttagtcaaaggtaagatattttttattattaaaaattataattttcatagatttcgatgccaatttgtgtatgttcttcagattagattttcttagattgtgtatgcgaattcggatgtttttccgcatgttcatcagtggtgtctatttgttttaacaatgttatcgatgagatatcgataggttatcgatataatgtcgacccaaattgaaagtagtttgagcattagaattgtttgtgttgttaatgtatatcgataggatatcgtaggtgtatcgataggatgttgacacaataatttagttgattcagattattatttgaaagaatttaattaatttattgataggatgtcgtatgtgtatcgatggtatgtcgactcaataagcataaatttttttacctaaattgttgataatttgtcgacggtatgtcgatatgtactattgacaatgtgatgtaattgctttttgtgattgctaagtgtgataatatcgaccgaatgtcgacattgtgtagactattttgttttactgaatatgtgtgatcatattattggaatatcgatagcatgtcgaccagatgtcgatatgttttcgataatataatgtaattgttcactgtaatttctgtgtggtaatatcgacagaatattgacatcatgtcgattttttgtcgacaattttaatttttttgatagtattatttttttgttatatattgttgtagatggctccgagactcatagttccagcatccgggcattttactagccgcatgacatatagaggcaccggtgc

SEQ ID NO: 358969 - DNA, 934 bp, Cannabis indica
cgaaacttgtactagaacgtggcaaagaccctaataggactggggtcgtggccaagacctagacctagatcgggacctgaaactagactagaacccagccccgaaactcgggctcggacccagacccagacctatacctagacccgctcccaaaaccagaataggattgcgacttgaacttgaacccgaacccgaactcgagacttgatcccagacccaaaaaaatcccctaacgtaaatttgattcagaccatgacatggacacaaacctagacttggaccccaatactgacctagacccagatccaggccgggatcgaaacacgagacctgaccctgtcctagccgcagatccagaccaaaacctaggacccagacccgaacctaggacccagacccagaacccgaacctagacccatatcgggattcgaaaaacccatacccatactcagactaagactcggaccccaaccgcaacctggaccaagacccagacccaaaaccaaaccaaaacctggaattagaacttgaactgtgactaggacccatacctgagaccaaaaccgaaccgaaaccataacccaaactcatacaagaacctttgccaagaccttgactacaactaggacttgagacttgggacacaaacctagactagcacccgaaccgtgaccttgacctgacatggtcctaaacgcgcactgagacattagacccgcgacccagactaggatccagaccctgacaaggacccaaacctgaacccgaaccaagactaggactgagacctggagcggaaccaagactgagatctggactaaaaccaagactcaataaccgaacccgaacctaggcccagactagaacctacgaacccgactttgatgggggacctagaccagggacctaggccctagaacccagacccagatc

SEQ ID NO: 358970 - DNA, 604 bp, Cannabis indica
ggctagccggtttgcaccagtaatcccaaaacacttcatcctttgctcaattttccaccaaatgttaccaaactttccagagtacctacccaatgtattcacaacataaaccaaccagtatttcacagaaaaacacaccaaatcaatttatgccattaaagctcaaagctttgaactcaaagcttaaaattgcataaaacttacaatcaatctctaaaccagctgcaatgaactaaaattaagccaaacaaaccctagaattcgaactaagcaaacatcaaaccctaacagcccctataacccaaaatcacttcttaaaaccaaaatacaacttcataaacttaaaaggaaaggagctagggttaccttagttatttttccttgaatccttggttgaaaacacagaaaattatgaagaaatggctgggttttccttctggtttgtgagggccgaacaccaagagagagaaaggagaaatgatatttctctaattttaatttctttttccttaattttctttctttcaaagtaaaacccctttcttttcattcaattatgctgaaatagaataggtgtcatcacccaaggctgccacctaaccct

SEQ ID NO: 358971 - DNA, 720 bp, Cannabis indica
ttaacattagaaaaataatcatattaggccataatcaatagaaccaattgaaatcgaagccctaattcttattaactgtcaattttcttaaataattgctttttactagttttcttatttttgattctctcttaatttttattcaaccaaatagaagtaaaagtttaatttcaatgtacttaactacaatccttgtgggatcgacctcagtcctggtgagtttactacttgtaacgatacgtacacttgcgtgtacaaaatatcacaacattaatttattgttgattttttgtaatctgtatgttatttttttgttgttgttttgatgttatttatatgttattttcatgttatgtttatatagttttcttgttatttttgtgttgcttctatgaaaaactgtaaaaatttaaaaaaaaaaatctttaaaagtaaaaatataattttttttataaaaaattgtacattatgtaattattctaaaatttatttcttttcctatgatctattatatgtgagggtctccctgtttaaatcttgtgtatattattatgtacaattttcaaaattttgtattacttaagactatctccaatgcaagatttaaaatttgtactaaatttggcacaaaaatgagcttgtgttatatttagcctattatttacaattgtgcttcaatgcacaagatgtaaataagaaaaaaataaattgattatatta

SEQ ID NO: 358972 - DNA, 443 bp, Cannabis indica
atgaaaataaacacatataaaactatagaaaatcttacattggtggcagcaaaattatatggctccttccacgcagatctctaaatcttgtttcgttctgtagcatagtaataaaaagttctgagcctaaatctccttcaagtattagattcttcacaatcttccacattatgattgagtacttgacttgatatgagtgggtgtgtactctatcactatatggacaaaatttagagagagaagaagaagagagctcaaaaatttgagagaggagcctctcttttaaattttctgatagaatagactaatgatgagttctcaggttatgagtctgtcatgttctatttataggattccttctagggttaggtttaatatatatggattaaaaaaaagataaataaatggctaaattactccttaagtggccgactacttagtgt

SEQ ID NO: 358973 - DNA, 458 bp, Cannabis indica
atgagaaaaaatttgactaaaaaattattttagatattaaaatgaatagaaatgtatgtgtacatcgcttttaagagagtacattataaaattttccaataatatatattaagtttgggaccccattaagtttttgttatttttcaatcataattttgttaaattttattagatctaactaaaataacaggtgtcaattaattagtagtccactttaataataattatttaattataaaaactaactaattaaattaattttgttctttctatccatatttcaaattctattattatttattttaagattatttaatgattttgtaaaaataaaaaatgagttggattttgtatattaatattaatatgtgtcattttacctagctaaattaatacttaacgaaattaatagtaacaaccgcaatatttaatgttcgtttgtaacgttgtattaggtc

SEQ ID NO: 358974 - DNA, 425 bp, Cannabis indica
  modified_base (92)..(92): a, c, t, g, unknown or other
ttaaggttttttaagatagaaaatcaaatttcccaattagaataattataaaattactaacacctactaaagcaaaagaaaaacaaaaaaanaaaaaaaaaaaggaaattttaccttataaaaaaaatggttagaatgaatgtaatttttttatataaaaaaaatagcattggaaaaacaaaaaaattgaattgggaattttatcttaaaacagtttaagaataaaattatcatacaattaattcaaacaccgtgtatctaaaaaaaaacatcaacatcatactatgtgtgtcacgtcttcattaacaacactctaaaaatagtcaaaatagaacacaaattagaagaaaggataaaaataaaatcgacttatcaacactatttttttgatgaaacgtctcaatatagggtatcattaatgacat

SEQ ID NO: 358975 - DNA, 1383 bp, Cannabis indica
gcctgatcttcacatttaaaccgacaaatttttctttcttgctaaagtcagttggcatgattcccacggcgagcttggccaaacggtcaaacttggtagtatactcagtcaccgacatccccttagtttgtaccaactccgtgacctcttttggcttagcactgcggatgacttcattataatatttagagttaaacaactccgtgaattctttgcaggtcataactgtgacgtcccgagtgagggttatgaactcccaccacacgagggcgtcctcctggaactgaaaagtggcgtaagtcacccgatcattaccaaccactcccataaagttgagaataccttcaatcactctaagccactgctcaaccttcatcacatctagacctccaaaaacactggaggtgctttctttcggaacctttcgtacaacggctccatatggttgccaacaacaggttgttctgctggcaccgctggaactgcaacgacctgagcaaattgctaaggaggcacggcaggaggaccctgctgcctcaacctctaaatctcttcatcctgctcgcggattcgatcttgcatttctgcaaacctctgctcccaatccggaggagcttgtggtggatttattggacgaccaccctgagctctgccacgcctacggccgcgagcacggggattctggggatttccctaactgcctccggtctcaaccatgttaccctgacttcttgtatttcgcggggcatccattatataggacttagcctacgaacccataagccaggcaggttagacagcgatcaaaaacttaataccgctcttatggacttaaaggcaacatacttaacattaaatcaatatgctccctaacatgctttaataatcatttaaactactagacaagtacgggcttactaaactgtgaaccgagctttccctgatgaagaatgtatgtgtcttaacaagcttcggtagacaaacctggcggctctgataccaaaattgaaacgccctaatcctaaggcacgctacaatactttttcaagtacagtgttgtctttgctaattaaagaattttcttgaaaaacttgtcaaattaaaacttttatattaattaataaactttataatatacaaaaatatttacaagtaccgagatcccgtttacaaacttttaaaatataatatcccaaaatacgtataatccaggtcacacagcgactacaaaatataaccccagatgtcccgacaccgaacactccaagtcgcgcctcttcgacatgtacaacttcatccgagcttaggttcattcctgttcagctttcgcctttcctttacctacacatatgtaaaactgtgagttgctgcctgcgaggaacc

SEQ ID NO: 358976 - DNA, 532 bp, Cannabis indica
agtaaactaatataattattgaaatgagatctcaattatttatctctatttagccaagctcaaaggaaatcatcgtttcacttctaaatacttatagaagctatatattccatatctatgatcagtgctgccgctcagttgaactaccatgttcccaagatgtaaatatccaccagaaccattggttagcatccacgaacaacttgaataacataaataattcaactaagcagaacctaagcatattaggattaagatccattgacctaatatcaaccattgataatgacttagaaagattaacggtaagtttaagatatcttatccaagattaatatcagtcccttccaatgtatactccatacattcgatacttgtaaacttttccaataccctagaaatgacataacacttatccaaggtgtaagtataacttatcgccaattatcatgttagtctaactacagtgaactgacaaatcatgagagttaaactttttaacatataatcttgattatattccactgtgttg

SEQ ID NO: 358977 - DNA, 917 bp, Cannabis indica
taaatttgaaaaaaaaaaaatagtatatgagttaattccccaaaattatatcaaaagctatttatttttaaaaaaaatattattaaactatttttttaatggaaaacactttattaaattagaaaactcgtccgcaaaaaaataggaaattctatttagataatgagctaccctattaggggtatatacttaacaaaaacgaagagcaagactctaattcaaacaatagagctctacaatcctgtacaatgcgaccaaaataagattgcattgccaagttactacgaacagcctgtaccaaaactaaataacttgtctcaacaataacattagtccatgcattattacactttattcaactgaatgctttagcaagatctggtcggaggataccaccacaacaactcgaaatagccaacacaagaaaagctacaacaaccacggtgttcaaagatagcctcaactacattgaccttaaccatattccttttgtttagttcagctccatcaccatgagtcataaactcaaccatagatctattgtactttcttgagcacatacccattgattaagaaagagttatattatttatagggatatgattttgtctcgtgatgtactttcacggaatgtattccgtagtacattagatggatctcggggtacattaaatgagtatcaggatacgtttctactttttaaccctaattacccctagatcaatctcagccgtcagattaaataactccctcatctgatggctgtcgtacatcacggattacaatccgtgaaagtacaataacgggataaaatcatatcccattatttatatatataatataatattttgttagagattttattacaatgaaagaaaatcaagatattacaactctattgtaatacaatacaagga

SEQ ID NO: 358978 - DNA, 732 bp, Cannabis indica
gaaccattatgtcaaaaaatgctggtgggaaaatggtttccaatttgcaaagaatgtctagaatacttttttgcatgatctgcaagtctgtaacattcaatgttttacagcacaatttctggaaaaatacacacagctcaattattgtatccctaacttctttcttcaagaactttctaatgccaccgggcatcaagcgttgtagcaacacatgacaatcgtgagacttcagaccagaaattttgtcttcagtctcattgacatttttctctaaatttgaagcgaatccgtctgggaactgcacagacttaataaattcgcaaaattcacgtcgttcaggaagagtaagtgtgtaactagcatgcggtttcctcaaattcccgttacggtcttcaaataaccacaactcacgacgtattttaaggtcctccaaatccaatcttgccttgtctgtgtccttagacttcccctcgatacttaacaaagttccaagtacactgtcacacacatttttctcgatatgcattacgtcaagattatgtcggagagacaagtccttccaatactctagctcaaaaaatatactcttctttgaccaatttaacttagctacagaacgtttacgtttgactccaccaaattgcttgtgttttccaggaaaacgaaattgtaactgctcaagctgagctaaaaatatcgtctcctgacaattgtggaggaggtggtcttttc

SEQ ID NO: 358979 - DNA, 588 bp, Cannabis indica
atttaccttgcacatgagcagaatgtgccttcggcaaacccgagcctatgaggaattcgagcagcaaaagagatcttaacaaatattgtaaatttcataaagatattgggcatacgaccgacgaatgtcgccaattgaaacatgagatagagagtctcatcactcaaggccattttaaatagtacgtgaaaagatagggccaggaatacaacgagccccatcagcctaatagcccaaacaaccaggggttacaacctattcctatggaaggataggacatcccggttacttcaggagggtcgcatattgcaggggaaagcaataacgctcacaagagatatgtgaaggagataaagaacgagcattcggtctttgccccagaaccttccaagaaggtgaaaactgaggaaccccccattacgttaacagaggaagatgagaagaacgtgagataccctcacgtcgatccgctagtcataaccattcagctcaccaataagaggatcaagagagtgttaatagacaatgggagctcggtaaatatcatctataaggagactctaaagaaaatggggctcgaaaaggcca

SEQ ID NO: 358980 - DNA, 523 bp, Cannabis indica
ttggatatccaattgtgatcggatcgaattagatgttatttttaaatattcaattggatcggatcagatagtgaggtttctaaaaatccaatacatccaacatccaatcgaaataaaatctatatgtatatatgaaaattaacattaaaattttactctttttttcttggattggatgaatccaatccaatccaatacatactggacctaaaatattggatggatccgatctaatccaaaaaatactaagtctaaaatattggataaactcaaattaaaccaataaatatatatgatatacatctaatggatagaaccgatccaatccaacattcaatgaatgttggatctattggatgatcgaaattaattggatcggatcggatagtaaaatctaacatccaatatatgattagatcggatctgggtagacataaaaatattagatgtgatccaatgaatatatgattttgtgctattatttttatttggtagttactataataatattaattaattagaa

SEQ ID NO: 358981 - DNA, 833 bp, Cannabis indica
tctctctctctctctctccttggtgctgcaccgaagtcgaaccataagcacggtgctctgaccatctctccagtcagacctcatcgttctcccaagcccgagaaccctgaacctaatctctctttctcttccttcctcaccatctctctcctagtccctctcttctattctcagctcaaccacgaccaggccacgacgaccgttaatggtcgccgatggtccaaaaagaccatggaaacctaatctccaagcccagaaacctaaacccaatgatcccctgagtctgtctctctctatttctcgattttaggcttcaatttggcctctctggttgttaacaagctaaaagaacctcgtttctagattgtgtcgagagcttccagatcacgtagttcatttttccatgcaccacctttgatcgaagacgaccaccatgcacgtcagtgctcttgctagggttcgatttctaagaagaatgaagaagaaaaagaaaaaaaaaaagagatttttttttctaattttaaaatattttaagttattttttataatatttatatcattaatattaggcggactaatgaaaatttactacgtgctcttgcattagacgaaggtttcaatcagacaaaataactgttagcaaaatatttatgcaactataatacaactgttgagaaacattaaaaatcaaaacagtatttccacgtaagtaactctatctacatgtctctttatgatttaatatgaacaaattcactattagaaatttagaaaataacaaaaatacaccaggataaacattttactatagtattgatgtattttttttttgg

SEQ ID NO: 358982 - DNA, 647 bp, Cannabis indica
cttttgaacatataatcatgattatattcgactgtgttgacgacactataatcatgaacaaatatatgcatatttatatatatatattctagacttaatagaatttatacattaaatatagtcatgaaataaatcatgtgaaccatgtaatataaaatgcatctttattaattagtaaacttgattatattaaaaatgggttttatttagggcacaaagcccaacaatatatatatatttcattcttatatatgataatttttttctatgtacaatttaaataataattaaacatttttttcctacattttttttcttcatttaaaattttattttttattttctttatattattttattattgaagacataaaacaacaacaacttgttttatttcgttagttatgtggaaaaaatatatttatttaataaatattaaataatttaatagtgaaaagtaataattccaaaatataaaattcccacttacaccatgttttgtgagatggatggagaagattaatgatggagagttgagggaggatagagaatataaaggagagagagtatggtagtaatcctttcaaagttgttttgaaagaaaatcaaaaggtggagagatatattactatgtacttataaaatta

SEQ ID NO: 358983 - DNA, 707 bp, Cannabis indica
agtattgattttattgttttttggttgttcagaaagataccaatataaataatttttagtaaatccaatggctaaaataattagaaggtttagtattggttatgatgttggtatcccaacccatctttatagataataaataagctgaattgaattgtgattctattagttaattttaatttgtttatattgtttataaatataatttttattttaccataaatagatatataaaataatataactttattgtataaattataaatgtgggtatttcgttatcaataagagagatgggacattaataatgaattggaaaattttgttttatcctataagatgctgaaataaatggacaattaagtttaataagtttgagttttattttattgtattaaaagataacaataaaaaatagatatatatagtattaggaaagcattaagatatacattatttttttattgacatctatctatcttaatactactagtagtatattataatttatttaaaaaatagttaactccaatatagtcaaataataattttatcgtgttggaaatgtcaatcaagaaagcttaaattttctaaagttattttttggaagtatctttttcaaactaaggcagtcaacttctataattgatataaatagaaatggatcaaattatagtttcattatatatatatggtaggatttaggt

SEQ ID NO: 358984 - DNA, 739 bp, Cannabis indica
gaagaatttcctatccttgacttatttgttgaagtgccttgcaaccttttactggcaagcctacaactttaggtcggcttgatctcttctttcttctagtttgtcaagggattctgctagtaggatgttgtttgtatcctggtaaaaggttgtccttctgtgagacggtggcaccaactctacaggcaacatcgcctcatagccataagttagagcgaatggagtttgcctggtggctatcttctcagtagttctatgcgaccaaaggacctctgggagtaattctcgccaattgcctttttcctcttcaaggcactttttcaaagtttccttgaggatcttgttgacagcttctacctacccatttgcttgaggatgggccacgatagaaaagcttttgatgatatccagtctgttgcagaaatcagtaaacatgtcactgtcaaactgctttccattgtctgagacaatcttttgtggaagtccaaagcaacatatgatgttcttggcaacaaagtcaaggacttttttagaagtgattattgccaggggttcagcttctacccacttggtaaagtagtctacagcgacaacggcatactgcacccctccttttccctttgggagttgaccaatcagttctattccccatactgcaaaagggtcgaggagactggatcatcgtgagctcgttgggtggagctctagggatcttcgagaatctctagcacttgtcaca

SEQ ID NO: 358985 - DNA, 554 bp, Cannabis indica
gatcaactaagtaatattgacttagaaagatataacggtaagtttatgatatcttatacaagttcaatattggtccagtctgatgtatactccatacatctgatactagtatactttaccaataccctggaaaagacataccacatatcaatgtgtaagtaaactttattgctgattatcacgtcagtgtaaatccactgcactgataaattatgggactaaactttgaagcatataatcataattactttctactgtgctggcatcattgtaatctgtgaataactatatgttttggatttatcaaaaatgtatattaaaccataatcatgaaaataatatttaaacttaaatgacttctaatcttctattgattgcaaataagattatattgaaattgattttatttaggacataaaatgcaacactctcttggaagaatggggagcaaagggagagagagggagagcagggagctcaacccgtgccttgacccctcctcgtgctagctcttcctcttgtgtggcatctcaccttgctagttggcctcccat

SEQ ID NO: 358986 - DNA, 530 bp, Cannabis indica
gaacactcaagttttacaaataaaacactcttctcacaaagaaagatatgaaaatatgagactagaagagataaaaatgtttggctactctctaggtcctatttatagaacatagtaaccctagagacagccacaaaaatgatttcccaactgtacaaaactttcttaaaaaaattcctgatttgcagcatcagaatcgggttttatagcagttaggaccagaaaggaaactttccaaattgaacaaagatcacgaatttggaatcaaacctgccaaataaagtttatttgatttgttctaataaaggcaaaaccgaaatcatccattagaaaaagggaaagtcaagtttcccaaaattagacaactttccataagagaattccttctcttacaagaagtttcctaaacaaaaaagagaccagctgagaaggaatctttccttagaaaaaaagagtaattaaatgtacaaaatcaatgtaataaaaataatttaaatgctcaataaaaatgtatattaattaaaaaatat

SEQ ID NO: 358987 - DNA, 565 bp, Cannabis indica
actttaaccaatgccctaaaaagtacataccatttatccaaggtgcaagtaaagtacattgtaaattatcctattagttaaaccctatgtactgataaatcataggaatacatttaatcacacaatcttaattactttacactgtattgacaatacgataaacaagaatatcaatgtgataaggatttagatgaatttataaaccaaataaataaataaatgatcacataagccaaataacatattaaataagtaatgaaaataaatctgtttctttattgacaaatgaatatgaaagattacattgaaatatagttttatttggggaacaaagccaaacattgatcagatcagctttggctagaagaatgcattctgagaaggtgtcttgccccctttgcggggaggaagagaaaactatggatcatcttttcctcccttgtaactttgcttctcacctctagaggtcttccccttggggcatgatgctagtgcctgagtctggggtttgtatgtgttgggttttatgccctaaataaaactctttacaatccgattagttatc

SEQ ID NO: 358988 - DNA, 845 bp, Cannabis indica
ggcggagatttttgtatgtatttttacgaacttgtttctgtccccaagaagggggacaaacttaaggacggtttttacggcttccgggcccacccttcgaatgatggcgcggtcccttacaaccagcaaaaacacgtcaggagtaccgccattgctttttcttctcctccgggttccgagctgtggagcacccggagctccttacggagtgggttaggattcctccgtacgagcggaccacgcctactcagatcttccttcagcgggcccagatcttcgcgacgtatgattaggcggacctcgatgtcgggggatcgatcacgacggagaactgccggaaggccaagctgatcctggctcaccagtcggtggaggactccaatctttctaaggtcctctgcccgaacgtgagggtttcggccgcggagaagaccttccgggatgagatcattgccactgcggagaagaagttccaaaattatctctaccggaaggcccaggagaaggcttataccaaggcccaggcggcttccgggaggccccttcgagttgggagcccggtcgagaggaggagccaagcggttgccgggagatcccttcgcattgggagtctggttgagaagagggctcctaggccaaggcctatcgtccaggtgccaaatacaggggctcttgacgccagcactttccggctccggtaagtcccctttagcaatacattatgtccctcttgttagcaaatatgctagccttaggcctgtagggtttgataaccgtctccttagggttaggatgccctcgacccggtggggggatcatgcaaaggattattatttctccaactt

SEQ ID NO: 358989 - DNA, 526 bp, Cannabis indica
ggggctcctacccctcctgcatcaggttttagcaggggaggtagtggtttggccatggatcagaaaaggaaagcatccactgcaaccggtggctcagttcagttgaagaggttctggggaaaccagggtcgaggcagtcgccagggtagttctgagacccgatacacttacccagagtgccccagttgtaaaaggtaccatctgggggagtgtagaggacaagggtgctttcagtgtggcatttcagggcattacaagagggattgccctcaactcagaaccgaaacaccaaagactccaacaaaacttactccagcaacggtgttcgccattactcaggctgatgcagaagccagtccttcggtggtgacaggtcagctctcagtcaacaacttttactgctctgtactgtttgactctggggccacacattcctatgtggcagccagaatctttggtaaattggatagaccgcatgatagttatgaatcagggttgggaaccctattacctggcggagagttag

SEQ ID NO: 358990 - DNA, 273 bp, Cannabis indica
taataataataataaatgaaagaatatattattgaggagtgttgagtttgtggtgcgatcataattacgtaaagcacttttatacttcccattaattaacgtaacaaagcagtgatcacatgggtggctttagtttagtaaaccttttctgtttttctatttttctttttttttttaattccgaaataatacagaatttcatcactttttaatttttttaaaaagaaaaaagcttccaaaccattcaaaaaaaaaaaaaaaaactaaacctaa

SEQ ID NO: 358991 - DNA, 1064 bp, Cannabis indica
atgctaggctcttcgaggaaatgaataggaaccaatttcaccttgtcacttacattgctgcttgccaatcgagctaacgcgtctgcagttgtattttcttctcttggaatttgtctgagaccgtagcttttgaattgtgcgagcagatcatgtattttgctcagatatgctatcatcttttctccccgagccttgtattctccggatacacgatttaccaccagctgtgaatcactacagatttcaatgtgttcggccttcatctcctgggctagtcttagcccagcaattagagcttcgtactcggcttcgttgttagatgctttgaatctgaacttgactgcagcgtgcaggtgttgccccgaggcgtgataagggcaactcctgcaccagatagttgatctgtagctgacccatctacatgtagtttctaggttggcttgtcttcattgttacttggctgaggtgtttgtaccggctcggggttgctttctggtatgctttctttcttgcatgtgcattctaccacaaagtgtgccaaggcttggcctttgattgctattcggggttggaaagtgatttcatactagcccaactctactgcccactttagtagccctccagaagcatctggtttttgcagtatttggcgtagtggctcgtcggtgtatacccgaacaggatgagcttggaaatagggcatcaacttccttgttgctagaataaggcagtaggcgcgtttctctattaacgggtatcagctctcggccttaatgagtcttttactgatataatagactaggtgttgtatgttattctcttctctgattagtacgacactcacggcatgttccgtgacaactaagtatattcccagttcctctccatccagaggttttgagagtacgggaggttttgcaagttgtacttttagctcttggaaagctttttcacactactctgtccactcaaactgcttgtttcctcgcatgatgttgaagaatgggacacactaatctgttgattttgaaacgaatctgctgagcgcggcgatctgaccagtt

SEQ ID NO: 358992 - DNA, 765 bp, Cannabis indica
ctttccaactgtcgtttgtttgttccctctccataaatgacacgtcgtttaaaatcatgccatagaataatttggagcgttttcagctttctacatttatatgtaaatattcattaaacaatatattgcacatttggggctccttaatttaggaggtcttataaagattgtattatacatatatagggatatgattttgtctcgttattgtactttcacggattgtaatccatgatgtacggcagccgtcagatgagggagttttttgatctgacggctgagattgatctaggggtaattagagttaaaaagtagaaacgtaccctgacactcatttaatgtaccctgaaacccatctcatgtaccacggaatacattccgtaaaagtacatcacgagacaaaatcatattcctacatatatatatttggtaagagaatcgatactgattaaaataacaattgtaacaatcttacataagcattggaggattaagagtgtaaaaaatattactaaatataaatctaaaattagtagaacatgtaaaaattattacactgtaatgatcatctttgttgtcctcataatctccatcatatccttcatcttcgtcaggaatacatgatcaaaaattatatcctttcactttttcaatcactttatctcgtttaagaagaactgtaaaaaaacggcgttttttattaggcgatatacccacagctcttaaggtagtcgtccacatcgtacgttatatatactacctaag

SEQ ID NO: 358993 - DNA, 652 bp, Cannabis indica
aaacttttaaaattaatattacactaaaataattattacataattatacaaaataaaatttaactaatttatatatatatatgtatatattgcaacacttaagaatgaataaacattaccctagaataactaattacaaatttttaaaaaatatgtttaaaaaaaacttacaaggccattaatactatacactaattttccttgactatttcactagtctcacatttcaatatacataaatacatattcctatattctactatcaaattaataccaacaaacacatatgctatttccattaccaatttatacacaaaacttttcacatgacaaattattcacaacaacataaaatctattccatgtattaccaaacaagattgaaatatgaatctatttcatgtaatggagcattgagagataatataaaaattgattggtataaaaacccactttcttgcaccaacattgagtacataataagtttagtttctaacatttcaaataattgtttttctttttgactttggatcatccatggtaatctatttcctataaaaccatttcctcattacaaaatattatataaattgacattttactaacatttttcattaaagaaagaaaaaataccatttttggccaaaaaaaa

SEQ ID NO: 358994 - DNA, 636 bp, Cannabis indica
aggcattctccgcagttgcttacccgcaaagcaacggacagactgaagctgttaacaaaataataaaacacaccattaaagggaaattagaagaacgcaaggggacttggccagatgagctctcgcaagttctttggtcttacaacacaactcctcgatccacgactggcgaaacacccttctcgctttcctacgggtgcgaggccatggtaccagttcaaattggggcaggttccctacgtagagatgttttcaacatctcgcagaatgaagaaaaacagtcactctacctcgatcttctggaagaaaaacgcgatcaagcacacttaaaaaatgcggcttaccaacggtgaactgcaagatacttcaattctaaggtcaagacaaaagtcctgcgaacaggagacttggtccttagaaaagtaatgccaaataccaagaaccaagcgcatggggtctttggggataattgggaaggaccgtatctcatcgcggaaaagattggtgacgctacataccgactcgcagcactcgatggtactgcgattccacgagcttggaatggcgaaagcctaaaattctattatcaatagtactcgcattatttaaattttgttcactttgtacttatactta

SEQ ID NO: 358995 - DNA, 483 bp, Cannabis indica
aagaaattttgttttttacggaactcgattccgataaaaattgagaaagttatgatttttggaaaaaatcggatttcatggtgtcgagtgggtgctcgtcagcaccaggcactcggactgggaagcccatccgcgcgcgtgagcctcggtcacgcaccctgcaatccgcccgtgtggaaccctacggacgccgagtttctcgcccagccactcctgctccgcgcgtggaaggctgatttgcagcctcctagggctgcacgtgcagcccttcctgggaagccagcacccacattgcgatttttgtggatttttttcccaaaattcgattttttccaattttaaatatttccaatttttaaatatttccaattttaaatatttccaattatggtcagatttaaaaatttgttaatttctttaatatttatatattatttaattataagattagatattttaatatttaacatattttaaattaaa

SEQ ID NO: 358996 - DNA, 630 bp, Cannabis indica
ataatgagtcttgtattttttgttttaggaaaatggtttgccccttgtggcatttttctagaaacaagtttgtaaagttagctaactaacttagctccccttttcttattatcttaaatgctttgtacttttgcattcgaacttaatatatttatgtttgcttgcgtttttattcacaaagtaaacaattatattttgatgaaatgtagagtactcttggttttaccattgctcataattttcctatttaagtagttagcaatccactaattgcgcagacagtttattatctaccaagcttataatttacgagcagttatcaattctaccttgcaataacagttatattatctattcatacactaggtttaagcaaacttgaatatacttttaatgatctaatcactttctacatttttgattgcttacttgaatagttatattatctattcatacactaggtttaagtacttatatcaaaacaccttgatgtctcatttaatactttcctttattgtgcgagccgttaatattcagctacggacgcgagttatgagtaatatctaacttataacttttgatttttctttctcgtcagacaggttttaaatcaaaaagttacgatggttt

SEQ ID NO: 358997 - DNA, 547 bp, Cannabis indica
gctgccccttttttacaaattatcaagtttctagtatttaagacaagaaagaaaaaaaaaacaaaaatatagaagaaaaggaaaaaaaaatgcaaacaaatagggattttgtccttctctttttcttgcacttgggtaccccttttctccttcctcttttgtactttttcaccctacacttaattctctccaaaaatggcagctactatcatcttgatgaagaagcttgtacttagtcttctttttatttgttgggtaaatagggtacaaaataacaccctaaaaatagaagcccaatcctttccaatcttagcccactaggtttagtattcttacttccacagcagccagctggcgtacgatacgtgactggtacataattactgatgtggataagtgaagttcattttttagacttcttccatgtcattgcccaaactgtccagaatgttatagcattctggcagcatttcctcccaaattaaaacttttatttccactttgcctttgcatcatttcctttttcctagcaagttaattcttcttt

SEQ ID NO: 358998 - DNA, 744 bp, Cannabis indica
tcctcgcaggcagaacttcaaaatttcacacaatgctcaaatcaactccaaaccaaaccaaaacttccagacctgttctatacatcccctagaacatttctaaaacatcaaatccacccagaatgtacagaaacgaaaatcaccattaaagcccaagctttgagttctaaactcaaacttggttaaaatcaactagcatgcatccattcagcctaaatcaacttaatcaagcctagaataacctctgaaaacaatagcaatcatctacagcaagcaattaacagattgaacacatttctttgaaaatcatagcttttgcatagaaaattcataactcaagcaacctaactatcatgcattaataatagctcaaatatcctcaacttaacatgcttaaatctcagaaattaaccacaaactcacagcagcaacaatatcaaataatcatgcatgcattacaccaaactttcttacaactcaagaaaacacaaagaggagttactagagatcaaaccttgacttggattacacaaagagctgctgaaaatcacaagaattaagcaagaacacccagccctagcagctcctagacttggccgaaaagagagaaagagagagagttttgaaaattttctatttttctaacttagaattttttttgaataaaatgagaataaaagccattaccccccatatattcagccaacaattaataaaataaacacataatacaactactaaaat

SEQ ID NO: 358999 - DNA, 568 bp, Cannabis indica
atttctctacaaattttaaaatgatgacatttacttacaaagttccaagctaataatcttaaaagaaagagtaatttgcggtataaaaacctaagtttaattattagttgtaaataaatacttaagtttaatttttgacgataataataactaagttacatttttagattttgtaggtagctgctgttgaatgtgaagtattattcacgtgttattttttttattggtatatttatattattttttattaaaaaaaataaaatttcatgatctggaccaatgagggattgttgtcacgtgataatttacttaacacttaacagttaggtacctatagaagttccagaattataacttatgtattattatcgctaaaaattaaaattgagcatttatttacaacaaaaaattatatttaagtatttatactgtaaattaaaaaaaaaaaatatataacttttgggttttgtgaatgggataaaccaacctatcttggatggatccgtttcggccatatgctgtcttttttcttaggatagtccgactaagatccataggccaaacccaa

SEQ ID NO: 359000 - DNA, 577 bp, Cannabis indica
atttcatgattatgtttaatgtataaattctattaagtcgagaacacatatatatatatatatatttgttcatgattatagtgtcatccacacagtggaatataatcatgattatatgttcaaaagtttaattatgataatcgacgataaagtatacttacaccttggataagtgttatgtcctttccaaggtattgacaaagtttactagtataggatgtatggggtatacattggattggaccaatattgatcttagataagatatcataaacttattgttatatttttctaagtcaatatcactggttgttcttaggtagggttgaacatttagacccctaaacccaaaaaacttgaccaaccgccccaacttgctgtcaaaaaaatcaaaaaattgaaaactcatgtggttgggtcggatccaacccaaaaatacccctcacgggtttcacgttcgggctttaaaaatgtatgttttttagtcgggttctaacccgtaacccaaacaacagtaaataaaaaattaaaaatatttttttattacattaaaaaataataatattaattattaaaa

SEQ ID NO: 359001 - DNA, 707 bp, Cannabis indica
cttcgactcttctcttttcacgacaactacaatttaatattattaatatttttttttcttttagtcttgcttgttggatggagactagatagtagtaaattgtaatttatagagcatcatcatcaatgtcatcgtaaaagcttgaaatctctaccaataacgtggaaatcgaggcgatggtattagattaagggaactccatattcaatgagattattaccactttaaagattagagaaagaggagataagtttatttaactatatataatgtgaaaatataaataaaaaatagaaacaattataattcaacctaatatatatgaaataaaaataataatatcataaaaactaataataattcacaataactagtattatgtgtgtgaaatagaaataattagtagtatgtgagtgtgtataaaataaaaataactaacattaaaaatcattgaaaatagaaataatttaatctcaacatagaaaaaacaacaagcatttaaccttatattacattaaaaaatagaaacaacttacattaaaaatagcaacaattttatttcaaaatggaaataattaaaatttagactaattagtaatttttttcccccgaactttgacatgtactaaatcgtgctccctgaacttttttggccgttaaaaattccccccgaactattgagattgttaaatttaaggacttttgtc

SEQ ID NO: 359002 - DNA, 675 bp, Cannabis indica
ataaaatagattacattgaaatggagttttatttagggcctaaaacctaacacttcccccttgggtgtggttcatcgtgtttcccctactgggatttgtacgagccccttccctatgggtctgggaagaacactgatggttcctcgctggtgacctacgtcccccaggttgtgtcccaggattttccttgtttccacatggaatttcctgttcccttgttttggctcgccttctattctcatttctattagatggttctggcttatcttttgggttttcagggggaacctaagtttccccgggttgctcgtttttagggggtcccttagtttccccacgtcgttcttcctgagcattttgagggttctcctgagcagtttcctgcctcgtagttcgtgagtcgcaaggactgcctcgtggtcttctcactccaaggttaggttgattttgagtattattcccctgtcctgccctggctgcggctgcctcacgctccaattcagcattctgctgattttcctcctgcaggcggtgcctgagatggcggttttctaattcaacgataggcatgtaccttgtaagatcatacgcaccgtcatccatgggtcgagcacctccaagattgggttcttcgtcccttactccaaggttttggccatttccatgctgagtcct

SEQ ID NO: 359003 - DNA, 521 bp, Cannabis indica
aaatttaacataaaataataacatcattagtatttaatctgataaaattaacatatatcaatcaattattaaataaaattataggttccaaatcatatacaataggcattctaataccacatgttagaaaatcaaataaacccgagatacagatttgcatataatctagaaaaacaataatagatgataataattccgtatacttacttatatctctaatcagaagtagttttatttatctgattatgaaaaagtatacaattgtgatgtgactatatatattaatagagttagactaggtctgctcatcaaatacttcaattaattagaaaaactcacatatatacttcctctaggctttatatgttagacttttatttgggcttacattaaattttattggttttattaaaacttgggttgattggatagttctttgctgtgttagcccatgttgttggtgatcaattgttaatgggcttagcatctgtgtgtaaagtctaggtgaagcagaagtgtgg

SEQ ID NO: 359004 - DNA, 1318 bp, Cannabis indica
ctagatggtggacgtgtatgaaaagaaactctatgtgtttttccagctaagcaatgatcacaagttttaagaggcgtaccttgcaaattcggtaagaattgctttctagcaagagtttgaagtcctttctcgctgatatgaccgagcctctggtgccaaagatcaatgtttgcatctttttgaactgcattaatctctcctttgtgtagcttagcttccatgacatagagagtattcactttctttcctctcgccactacaagagaaccattggtgagcttccatttactttcaccaaaccagtttatgaacccctcatcatcaagtcttccagtagatatcaagttaaggcgaatgtctggaacatgcctaacatctttgagaatcaatttgctaccaacactggtttccaagcaaatatctccaatacccacaatctttgatgcaccattgtttcccattctgacagtgccaaaatcaccagtagtgtaagaagtgaagaaatcactacgagcagtaacatggaatgaagcgccagaatcaatcacccaactacaatcttgggtagcaagactaacacacccatcatcacatacaatgacaacatcaccttcagtggaaactgtattagtcactttctcatttttctttccttgattctgctctcttttcaatattctgcaatcccttattaagtgacctggcttgttacaatgataacacttgatatcttttcgagacttggatcttcttctagaaccatgctgatttttagtctgacttcgtccccgcctgtcatgcttttcagtaacaagaaccccagaggaagaagaagattcaccttgtgctttccttctggcctcttcattaagcaaactatctttgaccaaatccatagtcaaagtcccttctggcgtggaattagaaaccgttatcaccaacgtttcccaactgtcaggtaaagaactgaggagtaatgatgcttgcatctcatcatccatattcatcttcatggcaactaactggtttgcaagactctgaaattgacttgtatgctcaaccatactaccaccatccttgtacttcaaatttacaagtcttctaagtagagaaatcttattgccagccgttctcttcgcaaagagattttctagctttttccaaacaacatcagctctggtttcattagagatatgctcatgaagatttatatccatccatcgtctaatataggaaatgacttttctatgttgaacttgttggaaaatatttttaccaggatctagatttactaccaagtatgtttcattaacaacct

SEQ ID NO: 359005 - DNA, 653 bp, Cannabis indica
gcatagagtttatgatctctaagtcgctatagaaccattcgaagatgttgctcatgttctgtttctgaccaagagtacacaagaatatcgtcgataagtacaattacaaagttatcgaggaaatccttgaataccctattcatgagatccataaaggctgccggagcatttgttaacccgaaagacataaccaggaactcgtagtgaccatacctggttcggaagactgtcttcggaatattctcttctcgaattctcaactgatgatatccagacctcaagtcaattttagagaataccgttttgccttgaagttgatcaaacaaatcgtcaattctaggcagaggatatttattcttaatggttaacttatgcagctcccgatagtcgatacacattcgaagagttccatctttcttcttcacaaatagaactggagctccccaaggtgacacactaggccgagtgaaccctagatccaacatcccttggagttctatcttcatttcttttaattaagcaggtgccattcggtagggtgcctttgaaacaggttctgctccaggaattaaatcaatgatgaaatctatctcccgctgaggtggtaatccaggcaattcatcttgaaacacatccaggaattccttaaccac

SEQ ID NO: 359006 - DNA, 602 bp, Cannabis indica
catggtgcttaccacttttcttaccttagttcagaacttaagtgtacaggccgacctgagtggaaaacaagctaggcgatctcggtcctatgtcacgacaattgaaattcaatgaataccttaaaccaaaattccaaaataaaaaccctaactcgaaaccaaggataacctaactcccaacaacttcaaaataggtcaagcatcccatatacaacttaaaacagatgatacacaacttccttggccaatactgaacttgaagaaaacccagaaaatttgccctacaagcaaccagtcgaccggttctggtgcaccagaaccaaccggtcgaccggttctggcagaccagttctccaagggttctctcctccaaaatcaacccaaaactccaccaaacctaatcaaactttccagaacagtataatatagcaaacatgaaacaattaattcattacaatatatcaatttgctcaaaatcacacttaaaagtgaagaaaaacacaactctatccctatgtagcttaatcaattcaaccagcccctacacctaactaatacaagctcaaacaacctcaacaactaccctaaaatcatattccatc

SEQ ID NO: 359007 - DNA, 587 bp, Cannabis indica
aacatacaggagaagacataaaagataaaaagaaacggaacaactaaaaaataaattaaaaacaacggaggaaaactgaacatatattagagcataagatattaaagacaataacttacatacaaatttcattattttcctattattattgaaaatagagcaatacaataatatttagaaaaatgtaataaatatatgaaataaacaacaataaagcaactctgaaacaataataaaacaataacaaaataaaccagtaatagaaaatggtaagttggagaaagagggtggacttggaagtacggtagagatggagtcaacgctttgagaccaaagagaccgaagaacatgaatttagtgggagtttctggaaaatttctacaagaaactcatcagagagcaaactctccatctctctctcacacacaaccacattattatcttactcaattcttcttcttcctctttcacatattgttttttttattcggttacctactacaaaaggagagggttagcttttattttggtaatgttgtaaacttgaagaaaaaaaaaaagaaaaaaaaaataaagaagaagatgaa

SEQ ID NO: 359008 - DNA, 848 bp, Cannabis indica
gatgccctgagcaggaagggtcccgggcaggtacctagtatggttcagatttcacctcagttagcagaggacatggtcagatcgagcatcgagttggttgtaggcaagcttcataacttgacgctgcaatctgatctattagaacgaattaaagtcgctcagttaactgatccagagttattaaagatcagagaagaggtatcagctgatcaaggcaaggattttacagtgtcaggcagtgggatgttgttgttcaaaaccaaggtttgtgttcctaatagtgtggaacttagaaatgaaattctcgaagaggctcatactactcaatattccctacatcccggcaccaccaagatgtattaatatcttaaaccttacttctggtggagcgaaaaagagaagaatgtggtagaattcgtattgagatgcttaacctgtcagcatatcaaggttgaacatctgagaccggcgaggttgttgcagcctttaaccctacctgagtggaagtgggaagatatcacgatggactttgtggttggattacctagaactacgggtttgtttgattctatttgggttgtgatagatcgattcacgaagtctgtacattttctaccagttaaaacaaccttttcagtggatcagtacgcagatttctacgtcaaagaaatagtaagactgtttggtgtaccaaaatccatagtttcggatagagatctgaagtttacctccaagttttggcagagtttgcaacgggctatggatactaaactgaaactcagtacagctttccatcctcagaatgatggataatccaaaaggacaattcagatactggaagatatgtt

SEQ ID NO: 359009 - DNA, 1208 bp, Cannabis indica
aaagaaaaatgtaaaaaagaaaaatacatacaaaaatataaaaaaaatgctaatcacaaatataatcaaaacaacatacaatgcataccaataattttaaaataaaatataagtataagtttcaaacttaaaaataaaataataataaaaaaataacataaaataaaaaatttgtaataactttataaaataaggcaactccattacaaaattctcaaaatatgtaaactagttttaaacaataatttaaaaaaaaaatactaacaaaaataatcaaaagcaacacataacaataatttaagaacataatatagatgtgaaaaccaattccaaatttagaaaaaaaaataatataaagaaacttaaaataaaaaaaatcataaaatgaagcaatcgcattacaaaaccttcaaaatctgtgaaacaactttcgaccctataagaaaatcatataaaatttatgaaaccagtcttaaccctataaaaaaaattaagaaagaaattttatctacaccccaaaaacttttaaagacgccatattttaataatttttattttatataaaatctatataattaaatggtcaaatttttttttggaacttttttatttcatattcttaaaaaacataccaattaaacaaaataaattatattttaaatattatgacaaaaattatataaaattttctttaagaaaaataaaaaaataatatgtatacatgatttagaaaaaaatatgaaaataaaatcaaaataagtattgaaattaacataaaataatgcaaggaaaagattttaaaaatacattaagagtgatttttaaaattatataagtatttttctaatagggtgtacttatcattttataagtggcaaatagaactcataaaaacctataaatttagttttgactctataaaaagataatataacaaacttaaaaaaaaaaagacaaaaaaagacaaaaaaagacaaaacacaacaaaaaaaatgaagcaaccccagtacagtaaaacagaggtgttcgaaaaaatacaaaaatcaaactaagtattataattataatattcaatctcatattatagaaaatcttgttataagacaattataaattaaaagaaaaatataaagacaacaatcttgttaaaatatacaaattattcatagattaactctaaataaactacaaaacatccaaaaaaaaat

SEQ ID NO: 359010 - DNA, 1069 bp, Cannabis indica
tgttaggaagcatgttagtagcctgatactagaataggcgcatgtttttaatttccaaataagcggcattagtaagttctctttgatcatgatctaaccatgctagctcttgcttacgtaggttgttcagactagatggacgttaagagaaataccaggagccagggcaactcggttggatcaaatgaaggtcagtgagctcagtttctcccaaatgttcagggtcgaggtagaggtcccagaggcagggcacgtagtcggggtgaggctgcccaaggtgctcaagatgcccgaaattgggaaaataggtttgcagcaatgcaagccagaatcgaggaacacgataatgaaatccaacgattgagacagcaaggtgctcctgcagtgcctgctccagaaattccagtggcacctgcccctgctgtcgaggctgaatcaatggttgcagtgaatcggatggaacctctgtatgaaaggttccgcaagctagcacctccaatttttcagggaggtcctgattgtatgaaagtcgagcaatggctaacaatgattactagaatcttgaattttatgggcgtcacttgtaatgatagggtggtctatgccacctaccaattttaagaagacgcactagtctggtgggacatggtgtccatgattcacgatgtcacgacgatgacctgggaaaagttccaggaactgttcgatgtgaagtattataatgaggcagtcagaagtgccaagagaaaagaattcaatgacttgacccagaaggaaaacatgagtgttactgagtatacgacccagtttgatcgctttgcgaggtgggcctcaggaattgcaccaaccgatttcagtaaaaaggaaaaatacttggatgggttaaatgcgaagattcgacgtgatttgatgattactaccgatgatagaaccacctatgttgaaatggtggataaggcactgcaagctgagggcgcagtgggatgcatgatagaatccagtgggactccagctgttggcggggctcctacccctcctgcattaggttttagcaggggaggtagtggtt

SEQ ID NO: 359011 - DNA, 637 bp, Cannabis indica
tttagaattgggggttagttgcaagaacctggccacttaaggaggttatgccgcaaattaccctatataataattgattagcagttttttttacattattcactaaatcaaaatttgtaagacctgatattgaaatgcaccaataacaatatgccactatttattgtgtttaatacctcctttagcatttttcttatcatctctaatagatggtgtataatttgaactaaaaaaatgagtcaatattatattttgcctaaattttataatagtgcttgataggctagtttatgtacatttaataaagtattttagaggtatgtttcaattgattatatttatcttgtgtagaaatgcacttattttctactcgtttcaagtttaaatggtaaaattcataatatgaattgaaaataagaaggaaaatatcaaattagatgaatatgatgaatttattatgaaatttgaagttctaagatataatggtgtgaaagattttaagttttggatgctcaacactctccgtttttttttatcgagaatcaatatgaaacttacaacttatttttgagtataatgtgttcactttgagggaaaatattgtaaataaaagttttagatctctctttcttcaatt

SEQ ID NO: 359012 - DNA, 548 bp, Cannabis indica
aattccggttctgggaattcctgaaccccatccggaattccagttgcacaaccagaattccagttcctcgcaggaaacattcaaaattacataactgaatcaaaccaacccaaaaatacaacaaaccttccagacctgttctaaataccccaaagaacataaccaaagcatcaaaacaacccagaacacacagatactaaaaatgccatgtgagctccaagctttgagttcaaaactcaaacttggctaaagctcacccacaagcatcaaaaccagtttaaatctactcaatcatgcatataaaaacttctgaaaacacaggaaatcgaccccaacaaacacagcaacaaaactcatcaatttaccttgaaaattatagttttgagttaaaaattcacaaacttgagcaaggataactagcatgcatcaaaacctatctcaactcacttaattaaacatttttaatccacagaaaacaacaacaacaactaacagcagctacaaccaaaaaacacaagcatgcaatactcaacttttttctaaaattt

SEQ ID NO: 359013 - DNA, 526 bp, Cannabis indica
ttttatatctattcttatatttaaattaaatcacaaaagctaatttatacaaaaatagtcttttggtataatggtaagaatttatcaatatatatttttggtcacaagttcgaatctcaatagactactttctgtatttttttagcctactatacatattcttagcacttaataaaatctattcttatccctcaacaatataaaaatataatatatactttagatagtggtaagtactcaataatataatatttttgtcatggttcaaatctccatataccttttattgggagaggaaaggggttcccaaattttttatttatgattattgtaatcgggaaatttgtgtacttggcttgagggaggagaggggttcgctataaatgactattccgcacaatacatttcgggtgcgatcataccagcactaatgcaccggatcccatcagaactccgcagttaagcgtgcttgggcgagagtagtactaggatgggtgacctcctgggaagtcctcgtgttgcaccc

SEQ ID NO: 359014 - DNA, 841 bp, Cannabis indica
taattaataaattaattttcaacacaaatataatattcctatttaattaaatattaagaaaattatcaaatatttaagtatcatgaataaaatcaacttaaatattaattttctatttaattaaatataactagaaaaatacttcaagcaaacagaaaataactatctagattttcactaactaattactttattttctaattaaaatatgatatattttagtctatttattttaattaatcattaatgaaaaatttaattgatttaagttaatctaaagttaattaaaaattaattttcaactttaatttttaaaaaaaaaattcaaaaattatttgcatttaaataaatacaatttcaaaatattttgagggaaaaatgattaataaaataaaataaaatatattttgaaaattattctatttaagttgttctgaaattaaaatttccaacttaaatataattttctatctaattaaatattctgaaaataactaatatttcagtatcaagaataaaatcaacttaaatatttaattaaatgtattaaataaaagaatcaaataattaagtataaaatcatctaatttattaattctaatttaatactaggaaaaatattctgatttaagttggcgaaaaattaattaataaataataaattttcaacttaaaaaatgttttactaattaattaaatattagaaaatataattaattactacaaagaaataactagaaaatatatcaataacaaagtatttttcgaaaattaactttaaaatatttaatagaaaataaatttcatatattttaaagttaattatgttgctaattcaatt

SEQ ID NO: 359015 - DNA, 1458 bp, Cannabis indica
tgttattttttggaaaaccgtaaaaatgtaaaaaaaacattctttgaacgtaaaaatgcaaatattttataaaaaatggtgtcttatgtaattattccttattattatttactacgataatttatctcatatttttatagttttttttttttttttcatatatgccatatatatcaatttttttgcatatatgcttaatctttatagtagtctagttaacggagaaatgtagactttctaattaattaaatcatttgatggaaaagcctagccttacaaaaattatatgttcttgtaatttgctttagatataaagatgttgagagaaagaccattattacactgtaactatatatcaatgtgtattatatcgcaatgttgagagaaagcctagccttacggtacttttttgtgtttttgatatttgatacatcatttttgccctatcaattttgacatgtatcaaatgatgttcctgaacttttaaggtcgttaaaaatgcctcctgaactattgagattgttggatttaaggatttttgtctaattttagtaaaaaagtctaacatggatgaaagtttagagggaaaaatttagtacatgtcaaagttcgaggggcatgatttggtagatatcaaagtttttgggagcataatttaatacataaacaataatttgaaataggaaaattgaatgaaatttgacaaaagtccttaaatccaaaaaatttcaataattcagggggcatttttaacgatcttaaaagttcaaggggcatgatttggtacatgtcaaagttcagggggcaaaaatcctaactgaattgtagttggattgtttttgttgaggaagcatagaagaaaaggccctgtcctggagagttctttaggtagtgtaggattctagttgcagcttgcatgtgtgggagtcgtggggattggagatactgactaagtttcttcacgacaaaactgatgtcaggccgtgtgattgtcaagtaaaagtttccctatgagacttctatattgagttgggttgggaagtaattcccctgagtcactactgagtttgttgttgggctccatgggagtggaaaccggttttgagccaagacaacatgaatcctgcaagagttgtatggtgaagggtctctatgagacagatattccttttgaacaacgagctatctcgagacctaggaaaaaatgaaagagtccaaggttttttaatttgaacctggtatcgagtgtggtgatgaatttttgtaattcagttgtgttgttggtggcaacaacgatgtcatcaacgtatatgagtaaagccataaacatacttgattggtttctgatgaacagagaatggtcatttagggattgagtgaaattttgttgtcttagtatggaactcaatttcgcatccattggtgtgaggattgtttgagaccatatatgcttttctg

SEQ ID NO: 359016 - DNA, 741 bp, Cannabis indica
taaaataatttccaacagctggcggggtctgatttctggggtaagttatggcgacttaaagttccttcgaaggtgaaagatttattgtggagagcggcatcaaattgtttaccaaccaaatccatgcttcggtatagacatgtcaatattgatactatttgtcctgtgtgttcttccaataatgaaacaatattgcatcgactggtggagtgttcttttgctcgggcttgttgggtcaatacgggaatagatgttgatttggagtatgttggtactttcacaggttggattgaggcttgctttcaaacttttgagggggatcaaagaaagatcatagccatgacttgttgggctatatggaaggctagaaatgattgtgtttggaaggaaaaaagtgctagtgtggcgactgtcactgtcttggctttgagtatgttggaacaatggagtaaagtgcaagacaaagattacgttcctactgctgcatttttgacagcagccgatggtgcactttcttggcaaataccagcaacaggggaggtcaaaattaataccagcaataggtatagttttgcttgtgttgctagggatgcttcgggttatgtattggaagtaatttcttgctgtaatcccggtactgtaactccagaattagctgaggctatgggtgtgagggaggcattaagttggctcaaaaagaaaggttggaatcaggttaccattgaatctgattgttttact

SEQ ID NO: 359017 - DNA, 614 bp, Cannabis indica
tcatgcccctactactatccattaggatgcttgtaagcgtctatttcgctatctcaaaggcacaattcatgagggcctcttcatacgacctgctccaaggctatgcttgcaagcatattcggatgccgattgggcatcatgtccagacgatcgaaggtccacgggaggttatgctatattcctaggaggcaatctcatatcttggtcagcaaaaaagcaacaagtagttgctagatcaagcaccaaaagtgagttccgtgctctagcaaatacagcagccgaagtcaagtggctcaaatctgttttgactgagttacaggtgcaactcccagctgctcccattatatgggttgacaatcaaagtgcagcctctcttgctgcaaatccggtgtttcacgcaaggtcaaagcatatagaaattgatcttcactttgtgagagatcaaattttagctaaagagattgaggttcgatatgtcccttctgcagatcaaacaacaaacattctcacaaaagctctctccacagatcgcttcctctatctcaaagccaagctcaaagtctgttccactccctttagcttgaggggggatgataaataacagtttttcagct

SEQ ID NO: 359018 - DNA, 403 bp, Cannabis indica
ttccaaaattcataacctttttaatttttatcggaatcgagttctgtaaaaagaaaaattgcttaatttttcacaagaaaccaaaaaaaatattttcaaaaagaaaaaaaaatattttcatggaaaaaattcataaatacatacattcattatataatcacataaaccatcatcaaatcatccaaatcaacacaaaacattgctttaattcatatttcatgaaagtaaatcattaacctggctttgaggccagttgttgaaattattttaccaggatctagatttactaccaattatgttgtttagcatcctaatacgaatttctaaaacaatgtaaataaacacatataaagttaaagaaaccttacattgattgtaggagaatataatgaatccttccgtt

SEQ ID NO: 359019 - DNA, 790 bp, Cannabis indica
taactaagcgggctttacagcggtcatgatgaagaagatgaattattctcgcgaaaggtcatggacttgatccctaaatcgctaaaatggatggttgttgaatttttgaacctcaaaaataaatgtcatataatcacaattcgggtactccgaggattcatagcaccgagtaccctgatcatgttatttggagaggatttgtaacaggttgcattgtgtgacttcatcggcaaccaatgtggaatgatgtatactctttttttatctaattaaccttatatatgaaattctagtcaaattattataagacattaatacttaacaatttaatgtaggcacatctgggagagtatcaatgatttgagaaaaaatttcaagatttacgacccagagcttctcccaatgaatggtagcaatgatgaagagaagagtcggtcttttgataatgcgacaagatgattggctacttggttatcatcgatgaataacaaccaccaaatgttctttattccatagaatatcgggtaaacactatttaattctttagtgcttattgttcatttctatattatgacttcaaattatttttatactatcttacttatatcgcaatatcattttctagtgcgcattggatgctagaggtcgttgaccaaagaaaattatctatttagaccatatacgtgaccaccaagttcccaaacaaattactcaaatgttggaaaggtaataatttaatgactatttatgtaacaaattttaattaactaatgaattgaaatgctaatat

SEQ ID NO: 359020 - DNA, 1043 bp, Cannabis indica
caaacccctccacccccaaagctgccaagtctaaggagtctggaccaccaacggttgggcttgaactggtcaggagtgatcctgaacgggtgcgggcacctactccacctttgtcagtgctttcaaaggccaaaaagggcaaggagatgctagcccattatatgaaccggcttgttcctgaggtcagtgagcaactggctggtgctgacaatgactcttctttggaattgctggtgagcggagtcttgaaggagttcaccagggtaagtcttttttgatacttccccttaatcttccatgcttagctcaatatgctaaagtttctcctttgtccatgccggtctgaagttggcttacatttactcctgggctaagtctgctgcttccaagaacgcagctctgtccgacaccctgaaggcggaggcagacttggccaggaaggatgctaaagaagccagggcggaagtcggagctgttcggttggaattgggtgaagccaacaagaagttgtttgctgctcagaagaaaatcactgtgctgactaaggatctcgaggctgctgaccattttgaggagaccatcgagaccttatctgctaaggtgaacagtcttcaggacgagaggacttctcttcgagcagttcttcatcggatgaaggaggaaaaggaagccaaggagggggagctttcggccgaggtggacaggttgaaggagaaggtcaatgccttggagacagccggtctcgagctcttctttgatttttggaaggctaatcctcaggccaattttgactacttgggcgatgctaaggacatgtaccttgagtactgcgcgtcccaagtggcttatggcgaaactgaggcggctgcttcaacctccggtcaggccgctgatgcacttcctgttcaaacaacagatcctcctgctccggttggcctagaagaaccgaaccaagaatctgggactccagctgcttaaacacttctctttttatctttttatttgatatatcttattcgtcctcaaggccttttctaagacat

SEQ ID NO: 359021 - DNA, 651 bp, Cannabis indica
aatttagtcaattcccaaaccccgtcaaaacccagtattttaaaacctaacaacgatacccccgctaataatattttaaaacaaataaaatgcgactctctaaaggcccaacgtcgctttccacagcttccgtgcaaaatcacagaatttaagaaatttacataaatagcgtaataaacatatattagattaaataaatttccaccatatgcatattataaataatattcaaatcttatgaataaaccctaattattgattgatccaaaatgttaatcataagcggtctttacaattatccccccgttaaaaggattttgtcctcgaaatctaacctgaataactctggatattgaatccttatatcagactccaattcccaagtggcttcctccactttactatttctctagagcactttaaccaatgtgatggttttacttcaaaaggaccttttctttcttatccagaatttggactagttacttgtcacaaaataggtccggttttaattccaatgcctcataactcaagatatgtgatcaaatatgtatttcctcagcatggaaacgagaaatacattatgctcagctgacaacgatggagataagaaacctgcccaaccttttcaagtatttcaaaaggtccaat

SEQ ID NO: 359022 - DNA, 635 bp, Cannabis indica
acttgttgatcttagatcaaaagatcttaattctgatatggttggattcgatctcaatagtgttatttatgttcttagagttgttcgttaaagcctactaattggttcagctaacccatatatcttgggaatataatagtataattgagtgggagcgctaatcatagatgcagaatctatagcttctatctggacatagaagtgaaatgatgatttccttcctgcttggcttaatagagataaatgaaagagttcttatttcagtaattatattagtttactaaaatatcatgtataggaagctgtgttttaaggataaaatacattgaggggtggaacgagagatttgtccctactcggtgtaaatcatctatagaagatctttgattattggaattagaatgatggatatttgatagcgtatctatatcttggaacatatagagcgttctatgtaattaagagtgaaattctgaatctatagtggcacaaggagaaattaataagttagagaatttacttggtaaattctagatctacttattagaagcttggttatataagcccatggtccccacactagttgagataatattgcttgtaagactcagttaattgcttttaattaattaatt

SEQ ID NO: 359023 - DNA, 999 bp, Cannabis indica
aacaattgaagaatactcaagagaaattcacattatcatatctacatgttgacctcgcttttagccaacgacaatgagtctattttgtaagtgacaagtagtttagcacgagcgaaatataataaagcaaataaagacacaaaaattttataataggttcagtcccgagcagttcggtaatagcctaatccttgttatttgtattgacttaagaacaaggagaatgattccttttcttagagctcttaaaattaaatctctgaatatgaattcttagacaaaatgtttcgaccctttgcccagtgagtatgactcactatttaggaggctataagcttggtagggaagtatttcccttctagttacaattgatataagtagaaagattgcatagtaaatacagaatacactaatcgtgggatttggacagcttgccatatctctgtaatctgatcccaaagttatagggatttctttgatgactcacaatgcgaaagctgaatttgttaagtgtcggtgtgttgcacggattgctcacggcttggttaagaggacttcggccgagcaaatgtatgtggtgtcatgttcggcctgtgtcttgcgagcaggtacctagagttgaatccacgtgtcaccatcgtgtgatgccatgtcagagtgcacaaattgggataacatttgcctccaagtctgtacgggacttccaaagttgtgtgtagacttcatccgagctgtctttatgtttggatgggtgacacgagtcaggtgcatctgttcgcgattcgatgtgaggctgactaggcgtctcttcagtttttggctaataaatactctgacgcaattaatgttttgaaatccaattttctctcaccacgtttgacggttacacttaattgcttttgatttccaatattttctttttggggggaaccgaggcatctgaggtatttgaaatgattacccctttttgtttttctgcctataaatacgactgagcat

SEQ ID NO: 359024 - DNA, 993 bp, Cannabis indica
attattactttgattttcttgttacttttggagtttgggatataatgaatgaattaaagaagaagaagaagaagaatagaagaaaaatattttacttactatcaagatttccatgaagaatgctttttttgtttccatacttaattactatttcaacacacactcaaataataataacttttttattttctctaattaacagttaacacctacgtttatttatatataccatatcactcagtggcggaaccagacaaaaacccgaggaggggccaaataggaaggtcaagcgaattgcatttttacctatttctttttaaaaaatattaataaaattaggctatttaaaaattttataaccttgaactattacaatgataatgatcgtatcgtaccccttgaaattttttctgctaaaacatgtcaatgtagttgatgtgttattgtcagggccacatatttaatttgaaattttaaaaaaatattttcttattaactataaattataggataaatactattttggaccctctactttgtaaaagttatcaattagaccctctgttttgttaaatgacaaaatggaccctatattttccaaaatggtataaaaaatataggatcctaaactcaatttttaacatttttattttttaatataactaactttaagataatttctaacacgaacagatacagaaaatgtaactagatttgttataacatctttagataaaattattattaaattttaattttgtacaaaaaatacaattacagggtcctatttgtactattttagaaatacagggtccattttgtcatttaacaaaacaaagggtccaattggtaacttttgcaaaacacagggtccaaaatggtatttacccattaatttactactattagatttattatttaggctataaaatattcctaccatataaacaaaattaagttgcttacacatgaatatgatttcaatgtttggcc

SEQ ID NO: 359025 - DNA, 887 bp, Cannabis indica
tgtgttgatgactcatgatgcgaaagctgaattcgctaagtgtgggtcgctctcggtagattgctgtatacttcgctctaagcgtgccagcgatatgtcctgcctcgaccattcttcccgagcagatattccaagtggattccacatgtcaccattcatgtgatgccacgtcagagtgcaaaaattgggatcacatttgccccccaagtctgtacaggacttccgaagttacgtgtagagttcatccgagctgtttctgcctttggatggggacacatgttgagcgtgaccgtccgagactcgatgtgaggctgactggacgtcccttcagttttcggctaataaatgctctgacaattaatatttcgaaatccaattttctttctccacggctgacggttgcacttgattacttttgatttcccatattcgttttgaggagggaaactaaggcgtctgaggttcctttgaggcaattacctcttttcgtgacttgcctataaatagcaacagcattggcacataaacttattttcgtcacccttctttgttaagtaaacttcagagagaaaagaaaaattcatggcttcaaagttgccgaagtgccttcatacaaacttcttgttggatagacattgctcacccagacatttgaatcttgagtaagtttctgatttcctttatgcttatcttcgtatttttacattttgaatgcaccttctactgtgctgtagaaaaatgtttaggaaacccttggattagaaacctctgcgattcttctttatcatgtcttcatgcggttttacagccataatgcttgtttctgaactgcataacatccatctttcatctttcttattctaagcttcatgaactttcttgcccta

SEQ ID NO: 359026 - DNA, 518 bp, Cannabis indica
gtaaaaaattctgtgtgacagtacaattataaactttaaccaaaaattcaatatttttataaatttttttattttcaatgaaaatgttcttaggcccaaaagttgtcagggtcaacccaaattagtcttcttaaaaatcagaccttttttttttttttaattaaaatcaacatctttattaactaaccaaatcttaaaaataatagaacgtgcttcagaggaacaatcctccaactgaagcacacgacctggagagaaacaagaatctctggctaagcagtgagccagcttgtttgcagatcgtttgacaaaacacaattcaacattgtctaaatataaaagcaacgcactaaaagaccaaaagaagatgacatcgagattttactttgaatagcttgtatgcacaccaagctgtctgattttaaaattacttgtccccaaattgtgacaatcaatccaacttaatgcttctttgatgccaaccatcttagcaacttcaggttgaaccctccccaaat

SEQ ID NO: 359027 - DNA, 530 bp, Cannabis indica
gagcaaaaactaaatgaaccaccaagtatggaatagaacaaaaggttcttgggcaaccaagatagcggtcaaagtgagaataagaaatgacgaccttatcctgagtgttcaagatgccaaaaatgggccatttgggctaatgtagagccatatcttgttattatgggatagtgggtcatctgaaaagaacctgcccacagttaagaaagactgatgttaataaaaagtgtacgggtcgtccccaagtgccagtttgattcaagggacccgggtatcggtccttcggccgactcaagttagaattttatgggtaatattataattatagcttcaattaatatcaatattaaacattttacactcaatgaagggatatcaaaagatctgaatggacagtgcgtgtatgttatttagtggtaactcatctgacagggtagacagattagaaaaatggcaatatgagttaaatttgttgatattcccaagtggaatataggacatgagtaattaatggaggtatccatctaatt

SEQ ID NO: 359028 - DNA, 857 bp, Cannabis indica
cggtctatccaatttattaaaaattttggctgccacataagagtgggtggccccagagtcccatagtcaaacaatacagagaagtaagagttgttgactgagagctgacctgtaacaactgaggggctagattctgcatcaggttgagttaaagcaaacacccctgctggagcgagttttgcagttgtcttttgttcctctttcttaagctacgggcaatctcttttatagtgtcctcacaacccagacaggaaacatcctcaccctctacactcacccagatgatgcttcttacaagtgtgacatttcgggtaagtatatcgagttttggaaccaccctgacgattacctcgaccccagttccctcagaacctcttactctgacttgagccaccaggtgcaaatggtgccttttgtttctggtcggtggtcgagtcactaccacccttaccatgaccagaaggaggaggagtaggggctacaccagcaacctgagtccctcgggactcctgggtgcactcaactgcaccctcagctcgcacggcctttcccaccatatcagaataggtggtgttgtcatcagtagtaatcataagatcatgtttaatttttggactcaatccatctagctacttttcttcttgctgaaattgattggcataattctcaaggccaacctagccaattggtcgaactgagttgtgtattcagtaacactcgtattctccttttgggtcaattggataaattctttcttttcatacttctgactacctcggtgtaatactttgcattgaacaactcctaaaactcttcccaggtagcagtagtaacatcacgagttagggacaccatgt

SEQ ID NO: 359029 - DNA, 1289 bp, Cannabis indica
taaaaccataaaacaatgttaaacaatctccatcgatctacaccctaattaaatgtttagctactcatgtttataagagcacaatcacacatattaactttaagaaaagagataaaaatagagaagagaataatgttgaaaaaccctctaaagaatgcctctaatactgcagttgatctctccaattcgcacatgtattatctgtttatttctctctgaaattgcttgcatgaaatcaactctagttcaccctttatataggcttttagggactaaaaagatagaaaaacacacatgttaaatgctattcaaattaggaaatcaccaaaacccacgtgagacaaaaaaaaatatgatttttttgctttttaggggggcgggccgcggcccagctttatcatgtcgcggcccgtgttggaatttcacgttttgacagtgatttttctactgcgtccactgatagtattttggccataactctctcgatattgctcggaattggatgattcaagatgtaccaaaaagataaaagagagatttagaacttttatgttttgactttttccaaaatctaatcagaagatatagtaaaattcaggcttaaaattttcaactttatttttttgctataattttctctattttaaatatcatctttttgtgagatatttttttatctttttttccatcttttttctctaatatttttctaatcttcttttattttaaatttgcaaaaataaaagatcgataacaagcgtaaaaatactccaaacacaattaaaactcaattaaaaatatactaaacttaatctaaaattaatactaaaataacctaacaaatatgctcgtattaatttctaaaagtatgcaatatgttcttaatgtttttggttttcatatttttttcttccccttattcaatgtccctgcttctgttgtatgtttctttccaagaatggttctgattccactgtaaggaatgtcaactttaccctataccccacaaaaataaatgaatcaagtatccaaggttaatttagacattttctctccgagtcaaacgacttttaactctaatataaaaaatgtactgttgtgatcgtaaacaaaatcctcacagaacactctcgaaccctaatcactttcacacacacccttatcaaattgaaaccctagatttgagtgtcttctccaaaaactcaaagttctcatcagtcttgaaacaaaccttctcaccctccccaaatcaaagattaatcgacaaacacatatatacacatataact

SEQ ID NO: 359030 - DNA, 615 bp, Cannabis indica
aatcaagaaaaattatctcctatactttgctaatttatttttcagacttagtcattttcttagaaaagtagtatttgttgaaacaaacactttcttatcttaatgaccataggatggtccacccctaatcacttagaatagctatcaaacatgcaaaccttagttaacagttctagcttttcttaaggtcacgatcaggacatccatgaatctagtaattgtttacactaagtacacaaccattctatcattctgaaattttcctataactagggtatattcctagaaggacttaggaaactgctagtaactaaacataaaccttatactatcatcaatatgcaaattaaatttctagggaggtaagtttgaatacaatgcaaaaaacacttaatgatctttgaactgcatatccaaatatttctccacccctatcacttcgcaagatctttaaccacttaccttaatgtgtttcaacattgctagaaattcatgaaatttttcaaacatttcaaatttatttgcacaaggtaaaaacctagagtgatcgtcttaagaatataacgaaaactcatatccacccctgaatgtacatctatattcgaatatagatga

SEQ ID NO: 359031 - DNA, 1695 bp, Cannabis indica
ttgcgttggctaaaagcgaagtcaacaattcctatcatctaacatataggtcactttcagaaatctttcttgactgtctccttatgttccttgtttgatttcatctcagatggctcccactcaacagtaggagtctggttaaattcatacatagaagtacatttaacctcttactattgttttttagggatatattatcttagtctgaaattgtaagttccttctagactaagtcatcaacatagcaatctagtattaacattaatattcaatacttgcttaagattaagtaatcattagagataccataaaacttttcatgatacgattaggactttttgcctaagtcattcaaatagaccatgcaagaattatactatcttattctcaaaattctgataagttatttcgatccatatgaatggttagatttactttcttagttgaattctaaagttcctatcaccagtgtcatccaaatgaagaagggtttagaattttaaaattctcccactcaaataaggtactgtgatactatgaccaagaatttttattggtatcaatttctattacaacagtaatatattaattagaacataaattaagatcaagaataagttctaaataatttgctaattttgttcattatattacatccatgtttaatcaaaaaaaaatgtgtgccattgagtaatgtggtgtattgagtatagtctagagttcgaaatgaactacatatttcaatagcttaatccacccctaagtgatatagagatcatgtggagttctgaatataatgcagagttcaaaagatataaaaagatcgttgaactgcatattattcttaacttcttcgacccctatcagatcaaaagatctttttattaaacaaattcttaataattattttagaattaacaattattcataaacatagaattgaaattctaagtgtttatgcgacattcattctttgtagagtttaatataccatagaatttgtatcaataataaaacacaaatacacacaaacattataaacatataaatataattggtactggcatacacaagataaagtaaatgaagctcaattcataaatgcaattcatgtccaaaagagaaaactttattataatattctccaacataaaacgaattgtctgcaataatatgaaaaatagggaataaaaatcccaaaccaataattgaaattcaaattgttcttaaattaaaacaattaattcaaaaattataacacaatagaagattccgagcttcaccttcaatcttggactatctctacgcatttgtccaaccatccgactcaactcgctaggatagcaatccaagttcaagcagctggagctgaaataagaagaaaaacaaacatggttagtaggtccagaattaataacccaagggaataataattctctaaaacacatgagtttatagcatagaaagaaataccttgtttctttgctagaaacttagggcattggggtttttagtggcccttttcattgaaatagaagcattttccttttggcttatctccaggagtagcagcctttttcttttaaactgttttcacagcttgaacaggcttcttgctattcttccacttcttcttgttgttgggtttggaagtagaggcaatgtttgcctttgccttagccgccccattagcat

SEQ ID NO: 359032 - DNA, 612 bp, Cannabis indica
aaaaatatattttactgttttagcatcacttaactatttttcattattattttaagtattaactaaataaattcatgaaaagaaaaatgattgaaaaccaaatctaacaattctaacacagtttatagtccgtactaatttgaaaataattaacttttaattttctgaataatctaggtatttttcataattaaatttagaaataacacaaataattcttgaaaaatacaaaatcgaccgaaaacctaatctatcaattttgtaacaatttatgatcaataaccaatcatagaaagtaaacttagatttttctaagcaacctaagtatttttcataattaaattaaaaaataacataaataattcataaaaaatacaaaattaaccaaaattcgaatctaccaatttttatcatataaaataatttagatttttttgagtaatctaagtattttttcctaattaatttcataaataactaaataattcataataaatcaaataattgcaagaaaattatcaaacttcatagtaggcctaagaacacctagcacaagtcaaaaactgaaaaaaaatcgaaaaataacctccagaagcccctgaacggagtgtc

SEQ ID NO: 359033 - DNA, 549 bp, Cannabis indica
agaagaaaacccccaaatcagcccatccctttcagcttcctctcctgaaaaccctagccgcacgccactatcagtttctacctctgtcaaacagtacccagccgcaccattcacccctgcacaaaccatttccactcgcaccctccgcccaaccacatcgactcacaacccgaaccactgccttccacaatcaccatctccgacgacagcaaccacgcagcagtcatcgccatcatccatttcgcacaccagaaatcgactccatctgcaccattcgaatacgcaacagtcaccaccgtactctacagttccagaacaggtgaagtgaggcagagggtcagggcacaaaaattcagccaagccgagccaactcttggtttgtatcttgaatcgttccttgaatgaaatgggtacttggagataattgtgacttatgctatttggaaattgttgaggtggaggagtattgaatttgctttgtttctctgtgaatatactggtgtgtgggttgatattgttgaaacagaattattgtggctgacttttgct

SEQ ID NO: 359034 - DNA, 546 bp, Cannabis indica
gggcataaaacccaacagacttcttattcgtcgacctaccctcggcttacaacatattgttgggtcgtccagcactgatcggactaggggcaatcagtttgatcaagcacctatccttgaaattctaaacactagaaggtgtgggagttgtgcatggcgaccagatgctggctcgcgattgctatcgcatagagctacaacatagaaaagactttcattagttgatggcaatcttggcagaagaaactgaacaaaaagacgaagatctagacccctgagttcaaaatgaaaggaacatgctaaaaccaattgaagaattggaagaagttattctcgacccaggaaatcccacaaaatgtgtatacattgggaagaacctggacgagcagctcaaatagtagctaataagctttttgaaggcgaaccaggatcagttcacctggagccatggagatatgatagggatcgatcctaatattatctgccatcatttaaatgttgatccaagttacccagagaagcgacagaaatggagacccttggatt

SEQ ID NO: 359035 - DNA, 519 bp, Cannabis indica
atacatttattaggtgtaccatttttttttccttaattcttactggcccatttagcttccctatgccatgaggtaaaatgaaaggtgcctacactagacttcccctatatatatatattctcaaaagaatatatcgctcacaaatttaatcccacaaagaattatgcatatacatatgctgtaagtaaccattgaaccaggagagaaatagaaaatttccaacagcacacatatttttataactactgacataaattctccagaactaatttaaggatgctcttgatatcacgtgttaggaatattataaaacttaatttaaccctaattaattcatgagaattaaataatagcattataaattagcggaagcctacaagtatccataaaatcgacctttgattggtatgatcttctaatttccatcaaaatctttctctgactttttctcgtggtgatgagatataagagtaagaagatacgatacaaatggggaccattacctgttatattaccaac

SEQ ID NO: 359036 - DNA, 885 bp, Cannabis indica
acttacatttactactcgcaagccgagctaatgcgtcagcagtcgtgttttcttcccttggagtttgtttgacagcgtaggttttgaactgtgtgagaaaattgtgtattttgctcaaatatgctatcatcttttctccctgagcctcatattttccaaatacgtgatttactaccacctgtgcatcactgcagatttaattatgttcagccttcatctcccgggctagttttagtccatcgatgaaagcttcatattcgacttcattattggatgctttaaatccaaacttggctgtagcgtgcaggtgttgccccccaggtgtgacaagggtgattcctgtgcccgaccgttgatctatagctgacccgtcgacatgtagtttctaagtcggcttgtcttcactattacttggctgtggtatttgtactggctcaaggttgccttcggatatgctttcttccttgcctgtgcattctaccacaaagtctgctaaggcctagcctttgattgttgttcggggatggaaagtaatttcatacttacccagttctactgcccacttgagtatccgtccagaggcgttcgacttttgcaatttttggcgtaacggttggtcaatgtacacccaaataggatgagattgaaaatagggcgttaactttcttattgctagaatcaagcagtaggtgagtttctctatcaatgggtatcggccttcggcctcaatgagtcttttgctaatgtaatagacaagatgttgtatgttgttttcctctctgatcagtataacactcatggcatgctccgttactgctaagtatatcttaatttcttcttcgtctacaggtttcgagagtacaggaggttttgcgagttgcattt

SEQ ID NO: 359037 - DNA, 957 bp, Cannabis indica
tatggcattaagatttttgacctttaacacttcagctatctttaagccagcaatcacgacttcatacttagcctcgctgttggaagtgtcaaattgaaatcttaaggcataatgaaacttaacaccttctagcgagattaatatcactcttgcacccgagccatgttcattggatgctccatccacgtagaacttccaagtgtccacgtctcgctgaataattggattgtcatatggagttatcccttctacaaggaaatctgccaaagttttgcccttaatggatgttcttgggtgataagttatgtcaacctgccccagttcaattaaccattttatcaatcttctagaagcatctggctttgacaaaacttgtatcaggggttgatcagttatcacctttattggatgtgcctgaaagtaaggccttaatttgagagatgcatgaattaggcatagggaaagttttttaaaaggtggatacctcgattctaccccagtaaccttttactaacatagtaagttgttggtgctttccatcttctcgcactattgctgcactaattgcattttctgagacagccaagtagaggagtaaagtttctccaatcattggttttgccaaaacaggaggtgttgacaagttcctcttaatgcttttaaaggcctgtttgcactcatcggtccactcaaacttcatgttgccttgcaatacattgaagaatggtaagcacttatcagttgatttcgagatgaatctgttaagtgctgccatccttcctattaaggtctgaacttccttcggcttagttggtgatggcatctatatcaaaaccttaattttcttaggatttacttcaatgcccctcgcgttgaatatgaatcccaaaaattttcctgaggaaactccaaaggaacattttttgggttaagtttcatattgtactttctcagtat

SEQ ID NO: 359038 - DNA, 881 bp, Cannabis indica
gtatagtagcatcttgtacttcaggaatgtcttcatctccatcaaaatatacgtctttttttgcatttgtccttataaaattatgaattccacaacaggcaatcacaatgtacttctgtatttttagatcataggaaggcatttgctttaaaataggaaagcgagccttcaatacgccaaagcaccgctcgatgacatttctcaaagacgaatgtcgataattgaacaactccctttttcctgaaggattacgatctgcatattgattcaaatgatatctttctcctcgatatggggaaagaaaaccaggcatgtttgtatatccagaatcaacaagataatattttcctaaacaatgttaattgatattaatttttcatattaatattaatacaaaataatgtcaataaacataataagtttgataacacttaccattgggtggagctgggaattcataatctgggtttgtggcacattctgaaagaattcgtgcatcattagctgatccttcccatcccgctacaacatatgtgaacttcatgtcaaatgaacatatacacatgacgttttgagttgtatccaccttccgacctcgatatggtatttgttcattaatggggacatgagcagagatatgggtcccatctatagctcctacacaattctaaaaataaaaaataaattaatggcttttgttctttctttatttattaaattttaaaataataataaaagagatagtataaatttttttaccttgaaaaatggataatttctgaaggaactacatcaaacaaaggtggagtaattaactttttacataaatgacataccgcctttaatactttcctaaagtattcagatgtagttgaggtgga

SEQ ID NO: 359039 - DNA, 596 bp, Cannabis indica
gcggattggatgttgtttgacaaaaagagtgcggattggatcgaatgaacagccctaatcttgattactttctactgtaagctgacgacataataaacaagaatatcaatgtgataaggattttgatgaatttataaatcaaataaacatatagatgatcacatgaactaaataaaatactaaataagtaatgaaaataaatctgtttcattattgataattgaatagaaaagattacattgaaatagagttttatttagggccccaacagtaattactcattttcattaacggtaatgaccgtatctttccctcgatcataaccgagtcataaatgataataatcgttacctcaatcataatcgagtcacaaacgatgataatcgtttctcatcattacctcgatcataatcgttcctcacattacttgcttagcggtgcatatagcttttcttacctcaattccaaagtgaggtgcgcgggctaactggagtggaataatacttgacaatctcgggtcctatgtcacaacagcggtaaatcaataagggtttattacaaaaaaaaactatctaaaacccacataaaataactta

SEQ ID NO: 359040 - DNA, 202 bp, Cannabis indica
tttggaaaaattaggtttcaactaacataaatatcatttcgaaaatttgctaaccatcttttaaattttcatgttattttataaattaaatatttaataaaatagaatgacaataaatatattatagtaatcttattttaaatttaaataaggtcaaataatttaaaaatagaataattaaaaaaaaataatatctgacctt

SEQ ID NO: 359041 - DNA, 509 bp, Cannabis indica
aaataagtattttcttcgatttcacgcaattcccatgggttcgacctcgttctttacaatctccatactacaataaagattcgtgcgcttgcgagttgataaatgtaaaacgtaccattttggtatacaacacctctcccaaggtcaatgcgagctcgattatgtcctgactggcgatactgtcaccagtgaagccgcacagatttaccaagcaaggcctcaatttggctgccccatcttcttcagcgtttccttgtaaatgatgttcactaaactcccgttatctatatgcaccctctttatccttttatttgcgagctggatagtaatcaccaatggatcaacgtgaggatacctcacgttcttttcatcttcctccgagaacatgattggaggttcttcagtttttaccttcttagaaggctctggagcaaatactgactactcattttttatttttttttcacatatctcttttcggcattgttgctctctcctgcaatgtgcgg

SEQ ID NO: 359042 - DNA, 589 bp, Cannabis indica
tcgctaggaaaattgcatcacctaatcaggtgagcccatatatcatatgcataatatcatcacattatcgatactcaaccaatcaatcttttcattatataacaatattaactatatctcaatattaatcaattcattgcaatagtagttgtattacacacaacgtactatgtaatacaatatacttttcttacctttaatccaagttcatacatttcagcccacccaaatggagaactatccccgattatctcagccctatgtcacaacaatgataaaccaatacgtctttatcccaaaacactgccttatattcacataagacaatttagggttttctaccaaatcttgcgatataaatacactaagatagaacttatattttagctctaaacatacaacatatggtaaagctcgtcgcaagctttgaaacggtatatagaacgtccaaaacggatactcgaatcaaaagttatgacaaaaatacgatttctgatctcttaagaatttctaaaaactataaaactcaaaaattacaattttcgcactcaccgaaacactatcaaaacttatccaaatcactccaaac

SEQ ID NO: 359043 - DNA, 557 bp, Cannabis indica
  modified_base (518)..(518): a, c, t, g, unknown or other
attttgttttattttttttgttgttggtttgtctttttgttcttcgatagctcgccatcaaatacgtcgttcattttctttagtctctgctaattgaaaggggttgttaatggtatagttatgtaactttcctaaaatagttgtgtatgccgagttaattgtgatgctataatcttttcatctgattttattttaattattttgtcaaataatccaagaatcatgcaataggtttgtgcccctgattttgcccaaaatacgtggaccaaccggatgatgacacgtgggtaggaagggtttagcatttgaataaaacagctaagtcttcttaaagcaaaggattactttaggcatgcctcccggagaaggcatgtaagtcccatatgcacccggagagcaggatggcaacaaagcatctccggatggtgtcagatgccatccgaacagtcatctcgcatttaatgccgcatgggaggaggcgtattggaactgccacacgcaataaagtctgacgacanaaaccccccaaatctgtacctactaggctatgatcaata

SEQ ID NO: 359044 - DNA, 697 bp, Cannabis indica
taaatgtcaacattcgaaagttcaatttcatagaaaaagaatgataaaaaagttaccatcacacatggatatatatgctctcttccaagttgagaaattagatttaagtacataatagcaaaaacaaatacaaagtaatattagagattaggcccaattacttaagcccatttatctattgggctgccctatcttttgtatatatatatatcattttctgtacaagtaaataacataatgcaaaataatacaaagtcatttcagacttttctttttcattcgaacagagggtttccctctcaaacaaatctaatatggtatcagtgatatactgggttcatccctaaaaaccctagccgtcctcctccttcttctcttctcttccatggctccaagaaccagaaactccaccgtcgccgccgcctctgtcagtgagtctccttctcttccgctgccatctccgaccgtcgccaatggtgaagctccttcctccactgctgttcatgacgatgctccatcccttgctaactccatctccgagaacatcaatgccgaaccttccatgtttgctccttccaccaccactgtcctcggctccattccagacggtgttcttccaagttttggaccgaatgaaccagcaccggtcatctccagctccgctccggcgtcggcctcaacatcaaccatgcttccg

SEQ ID NO: 359045 - DNA, 643 bp, Cannabis indica
tgagtgtcatccagttcggtgttgtgtctatcattttaatttcttcagcacaatttatactgggctcttctaagaattgaatagggactagattggccttatatgttactgtgctgctcgtaagccgagctaaagcatcagcagttgtgttttcttctcttggaatttgcctgagggtgtaacccttgaattgtgtgagcatgtcttgtatcttgcttagataagccatcactctctctccacgggcctcgtactctactgaaacatgattcactaccagctgtgaatcactatagacttcaatgtactcagcatgcaactcctaagcaaattttaagctaaaaatgagggcttcatactctgctctgttgttggaggctttaaacctaaatttgactgcctcgtgcagatgttgccctgcaggtgtgacgagggcaactccttcaccagaaagttgatttgtagctgacccgtctacatgcaatttctaagtaggtctgtcttgtcttctaattgtattacaattaattgaattggatccatgggtcactactcgacttgtcgctcacgatctgtgttctgattcaaccggtctcaaagatctagaaggttacgattcaagtgctcgtgcaagtcaggttgt

SEQ ID NO: 359046 - DNA, 571 bp, Cannabis indica
ttaggtaccagtggggcctaatactttctcgacatgtcgcgtgattggctagcgatattatttaaaagctattatattaaattatatggggcccgatacttagttggaacaatagcgatattgacacataagagggtgcttagcaccaccactggtgccctttagcatttctcttataataacgctaattaggtttttttgtttcatgaagtttgacatgtactaaaaaaaagtttttaaatctactaatcttaatagtttagggatatttttaacgactttaaaagtttaggaggtatgatttggtacatattaaaatttaggaggtaaaaattctaattagcctaataataatagtaggtgaattattttatatattattttgttttttttttaatttatgatttgagttgttacgattatttttatttgagttgtatgtgaattttgattactatttaggttgttctgctgatttatatgtgagttgttgtgaaaaatacaaaaagataaaatactttgaagtgaaaatgaaaaaactctagaagggtaaatataattttggaccatg

SEQ ID NO: 359047 - DNA, 664 bp, Cannabis indica
ttttgaattgagatcatagaacatgcagaaggtgaatcaaacttacacatggaattaaacacaaatatagataatttcacaatcaagaatggaggaatggaaattaaatacattaactaggcaaaaacattaaacaacaatcatcatcctccctaaatgggaaatttagttcataattaaatccataacaattcctataacaatattcagcataaagaaattaaaaaggaatagagaaagaaactgttggtggaatgactctggatcttcactttgatttcctctgctcttcttgccgctttctgctgtgttttaggtctcaaaatcgcttcccctgatttccaatcgcagttttctatttatatcagtatttttagggttcattggataaaaataccctcagtcgtacggactctcgccgcggccacaagatgtctcgccgcggctagattagcttctgacaaccacggttctgccttgactttatggacgcggcgcaggggtatttggccgcagcgattgggacagccaaaatcatcggttctgtcttcgagttatggccacgacgacaatgatctagccgcggccagaagtgcgtcaagttgaaaaaaatggcattttcttggctccgctcgtctttactgcacttttacatcccgaggcc

SEQ ID NO: 359048 - DNA, 500 bp, Cannabis indica
tatatatattgtgtatatactatttgtatattttgtgtaattattttgtatatatatttgttgtgaatgagaatgaggtagtaggaatttcattagtttagaattaaagtttttaaaattttatagtgtgatatataattgattatatatgtatatgtctataattttttttttaaaaaaaaattaactacagaatttagtaactagtaacttgttacacttcttaataactagtaactaatttaataattaaaattctaatttgattgtatattgcatttattataggttatgtgctaatatttgagggccgacatattttggtgttaatcagaatagcaataagtatatccattcactaactttttgttattacaattaattatcaatgcatgcttagttgagtttgaatatcttaaatattcatccctagtgaagtaagttctgcgaatacatgtactgcagtcggataggtgcataaattttttattgtttatgtt

SEQ ID NO: 359049 - DNA, 524 bp, Cannabis indica
aaagagttttatttagggcataaaacccaacagttgagaccttacttccaagctcacccaatcaaggtattaacaacccacccgctcggacaagtcttacaaaaaccataggcatccggaaggctcctcaaatgggcaatggagttaagctaattcgatctacactacatcccacgcatttctataaaagggcaggcgttagcggacttcatcacggagtgcaatgaagctgaagctaccgtaaacatacccacatcaccagtcccagcgtggaaagtattcgtggatggcgcctccaacgagaacggatccggagcgggggtcgcaatgatatccccgaacggacttcgactccaagcagccctacggttcgaattctcagcttctaacaatgaggccgagtatgaagccctgatagcagggctgagattagcaaaaaccgtgggggctaaaagagtagaagtcaacagcgattcgcaactggtagtaaatcgggtgttgggagaatatcagatgcgcggaga

SEQ ID NO: 359050 - DNA, 617 bp, Cannabis indica
aaaccattaagttatcttcctaagcaaacgatgagagagaaagatcatctacacatagcttggagaaagaccggttacacgtaggacgagaaagactgtctgcacatagagagccttgatctctgcacagaccttattctcctcatcatcagatcccatttcctgaagccgagatctctttcccagcctcaggaaattcctcgataccggagagaggttgacgcaaagatcttctggcacaggtttgggtcttgggttggctggattttctgataaaaacctcgccgaattccttcccagattcatctgcaaccatgccaaccttgaggtggaccttttaaatcgcccacaagatctatgatcacttgtgaggattgcccatggtagactacggggtcccctggtttggattggtcgaaagctcctcagccttagaatccattgtttccaactccagttgaggcttgaagtctttaggaacaaatggaaattggttggtgcgtctgggtaagatgagaatgaacattctagtaggaaagagatgatccattatgaaaatggatctcatcaaaaaagccagaggtttgtgaaaaaatgacaagcttgagccgcccttt

SEQ ID NO: 359051 - DNA, 632 bp, Cannabis indica
gcctagcggggagttggttatctccaataggcgcattaggtctatgccagttagaattgaagatagggagttgagtgctgaccttatagaactggaattaacgaagtttgaaattatacttgtgatggattttctatccaaatattcggccagtatagactgcaagtgaaaaatggtgacttttttcatccagaaggagaaaatccatttatttatgttagatcagttcaggcgtctctgatcccgattatttccatgttaagggctagggatccactacacagtggatgtgtaggatttttatcgattgtgattgactccagcagacccgaaacatttgggcctaaggtagtcaaagttgttaatgattttctcgtcatttttcctgaggagttgccgagattatcggcacgacgagaaatagactttgtgattgatttagcacctagaaacgaacctgtttcaaaagctctgtataggatgactccagcagaactcacggagctcaagctacaactttaggggatgcttgatatagggtttactcaacccaatgtttcgccttggggagcttcggttctgtttgtgaaaaagaaggatggttctctcagaatgtgtattgattatcggga

SEQ ID NO: 359052 - DNA, 512 bp, Cannabis indica
ttacgtggcaaaatctaataattagaatagataataaggagaagtatgagaggtgacatgatattctattctatataaaatgtggctatataacagaatttttgatttatgagaaattattcggtgatttttttttaaaagttttttgttcaaaaataacagttttttggccgagattaacagaatatcccaattatttaacaaaatattatttaataattttataatattattatatgtatttaatatctttatatataattcaattttcccaatcgttgccgtcgaagattgagaaagagtttgggtttttttttttataagttttttattcaagaaaaaagacagctatttaattaaaagtttttaactatttttttttgttttattttgttttaataataatattatttaatttcattttatgtatgaaactattatatatatttatttaatattttgtttttaattagtttttagtcaactatcttttatagtattaattattaata

SEQ ID NO: 359053 - DNA, 638 bp, Cannabis indica
tattgaatatgtaatttaatatacatatttttgtttcacaatattttcatgttagtttttttttttaattgggaaaaataaatatgtgacttattagttaaattattttattctacattaactttttgatactaatcttactaaaaaaaattattgaaaatttattctagacagttataaaataaagatcttcatttgaattaattattactctaaaatcaaaactaaaagtacaagtttactctctaaagtaaaaataatatctaaaatttaacaatcagattactttttcaaattaacatgttattttgtgcaaccatagcacaacacacactacaaatactatgttactttttgaagaaaaattaaagctaaaaattcagctactaggttatttttttcaaaataacaagattatttattaaaaaataaagtcacaattcaacacactcaactataattagtgatacatgtattagtttacttacaaactaacatgttacttcccgcaaaaatgaaattaaaattaacaaactatacaaaaagcataagtaaaattatcagattacaatttggagcaaaaatagtttcaaattccacgactatgttattattattttaccttaaaatctttctcg

SEQ ID NO: 359054 - DNA, 423 bp, Cannabis indica
ataagcttgagtggggttatctccgggctatgatggtaaggatgggctttgatggtcgctggattaatttagttatgcaatgtgtatgttttgtttcctataccatttcacatggtgggaaggagttggggcccattattgctcaaagagggttgcgccaaggggatcctttatcaccatatctgtttattatttatgctgaaggtttctctagtttgttgtggagttatgaacaaagtggcttactcacgaggtgtaaaattgctcgaggtgcgccagcaatctctcatatgctctttgctgatgacagctacatttactgtaaggtaactgaggaagaagcgtacaatgtgaaggagttgctacaaacttatgaggtggcttcggggcaaagaatcaatttctccaagtcttctgtgtttt

SEQ ID NO: 359055 - DNA, 556 bp, Cannabis indica
aattattacaagttttattttaaattcgtttataattaaagtttaatttccgtgctaattttattagtaatcccaattaggggattagggtttcataagtatcttgggtagcgtgcctaattatttagggcgttacaatttcaactcagaacatttgttaaattttcatttactttcttttcaaattagaacaaaagccatcgagaaatttcacatctctaataaatttacaaaattggagcctatcatcaggtttaagaaaagtttttgaattttgggttgtcctgctcatgttcttaaacctaagattgagaaacttgctcttaaaacaaaaatgcgtatgcttgtaggatattcagaggaaacttgaggtgcctacttctaaagtcatcaagataacaaagtatttgtatcaacaaatgctacttttcttgaacatgaatatatgaaaggtcataaacctcgcaatcaagtggttatcgaggaaataaaaaatgattagattttgaaccaccaatttaattaccattagttcaacgtgttgggttttatgccc

SEQ ID NO: 359056 - DNA, 526 bp, Cannabis indica
caatgtattttatccttgaaacatttagcttcttataaataatatttcagtaaactaatagaattactgaagtaaaagctcttccatttatgtctgctaagctaagctataagaaaatcatcatttcacttctatatagttatagaagctatagattccatatctatgattaacactcccactcaattgcactatcatgttcccaatgtctaagtattagtccgatccaatcagtgagctttaatgaacaagtcaaaaaacacaaataatacaattaagctaaaatctaacgatctcaagattaaaatctttttatctaaggtcaactaagttaccttaacttacaaaagatataacggtaagtatatgatatcttttccactgtcaatatcggtctagtccgatgtatacccaataaattcgatactagtatactttgctaatatcctggaaaggacataccacatatcaatgtataagtaaatttatcgttgattatcacgtcagtgtagatctagtgcactga

SEQ ID NO: 359057 - DNA, 544 bp, Cannabis indica
taatttctgtaaaatttatatagataattaattttattttgtatttttacactaataattatgcatttttgactacttaacagtggtggtgtaggactatcagtagtcttctcttctgttgatgttggagttggtgccgctgtatctataatctcttcattcactggttgcatcttctcgggcctatcatatttcttaccactcctcagggtgattgccttgcagttttctttaggattaacttcagttgtgctaggcaagtttccctgaggacgggttgctacctgggttgctagctgccccatttgagtctgcaaatctttaatggaagatctagtttcagtcataaattgtagcaatagatctgtctgcaaactagaatttccactagagctttgttgctgagtatactgttggttttgtgtctggttctgatttctctgttgatagaacccactgttccttcggttacctccttgattgaacccataattgttgttgttctgagaataatttccaatggcttttgcttcatccattggca

SEQ ID NO: 359058 - DNA, 587 bp, Cannabis indica
ctttattgatgttgaataaaatagattacattgaaatgtagttcaagaagtgagcctccggagaagtacaaaaagcatgtccttcctctccgggagctagaaacatgataacacatttcttggaggaggaggacattcaaacaatcacctcacatataatacaacacggggaaagtgtttgggaatgccgtaagaggatatgtcagacaatgtaagcctcgtttacgatgattacacgatatcaaaacggctagtgacaactccattatgaagagtcacatcaatcaaggaaggataaagattaatgtcacttaatccctaagatacctacgacataggttaggcatgtcctattttgtatctcttgggaacttgtgctcatacattgctggcactcaaagagaagttatcgcttttgaactatccccacaaatctctataaatacccatgagaaaaatgggaaagggccggatcgatggaaagagagagagaaaaactcaccaagaacattctctgtatcggaaatctaattaataacaaagactcgtggactacggctcattaatgctcgagaacaacgtaaaaa

SEQ ID NO: 359059 - DNA, 1195 bp, Cannabis indica
gtggcttgatccttcacaaagaaggtatgtaggcagctcggttaattaaattgattgagttcagctgcaattctaaatttaccccaaatttccctaatttatttcaaatcatttaacatcatcgtaattggaatcaaagggtatctcctttaaataaaaggattgtaattaagaggttattcttataatcttggatgggtcgaacttaaattagtaaactcttatgctataaatttggcataggtgaaattgtattttgcatttattttaatgttttaaatgtaaagtttttgcttaacataattattggcacgcccagtaggacccattctccttttcatctccaattatgttgagaattaaaatattacactcttgtaattaggtgtgctattttacaggaaaaataatggcaccgaaagtaacaacattttttcgcatgcttgcacatgacttggggaaaaagaagaaagatgaatttctcgtgacattttttattggaacccatactctaactgatgttccaagggaaataaaggtcacaggggctcaataaaccgcacaggctctaaaggaaaaagtcgccaaagacctaaagaagagacaggctaaatctattacgagaggagttgctcaagcatcgcaggctattgcaatgtcaaactcatctgagtccattcaaacaaattcaacaaaatctagtggcattcctattggaaccacaaaggttaagcaacagtgcctgactcaaataatgatcggttctattctaatcaacctggttgatgtcagtttttgcatggtgaattcaacagaggtggagaacaatggtctagatttttcaaaacaaaagatcactaaagatcctacctcatcactttgcacaaagctactaaataatagtacggctgggtcatacaccaaatatgctggggcagaaccggttatttctagaaaaccttttaaggaaatatagaaggaattgagtcagaccttgtgagaaacatctcattgtttcaaggtaatcttactaagggatttacatcaaagccgaagtctacaagaaatgatgcaagtactgggtttaacttttcacagttgaactcgtacacattttctaatggcataaatgaatggacttcaaaagaaaaagaagaaggaaggtgggaatgtctttatggtctaaataccataa

SEQ ID NO: 359060 - DNA, 876 bp, Cannabis indica
ttttttttttggacagtagaaaaaagagaaaacacttggacaaatggttagtttctgaaatgaatttaaacgtttcttaatagtttcatttaagttttattacagtttaacaatatctataaaataaaaaattgacaaaaaacagggttcagaactagaaatacaagacttgaacaaaggaaaggaaatggaattaagtttctattctatttcataaatataattttttttatataaaattagagtaaaaaatgttagtctacaatactaacattatcaataacagaatcaaaacagtttcaaaatcgttgccttgcgctaataacaatttcaaaatcacaggaaaaaaaagacattccattcctagtcttctgcaatggacaatttgatgatcgaatgaattatgaaaattatgaagctagtggacattacatttcagtcaattgtaagtatgaagaattacaacggaagctgaaagaggtcctggaatgcaaccaagaaaacactgttttgcaactgaaatatcaagtcaaagaaggataccaaccattgaggataaaggatgatcaaagcctgcatttctacatacaactaaaactgaaggaacccgacttcacaacatacccattgtgtgtgaatgtcatcaacaacccaccaacaaccatcaatccatcgttcttggaaatagtaatgcattaattgcacatacaagcgcatttgaaccgatggaatacaatgcagcaacaacagaagactcaacaaatcaacaacatacaattgaagctacaatactggaagatgggggagaaaattttgacttcatggactatgcaaaacttgtggcagaggaaatggttgagcaactggaaaacaaca

SEQ ID NO: 359061 - DNA, 563 bp, Cannabis indica
tttttataattttgaaactttaacacagtatttttgaaaacttaatacagtaaaaatgtaaaaaaaaaaaaaaagaagtgacaataaaaatgacaaaaaaattagagtatttttgtaaatccccccttatttttattttatgaatatgtttagcatcataattttaataattctttagttgtatataaatttattaattatttaaaattttcatcaatgttgggaaaattttatgggttctcttggaacataagttaaaaatataatttatttcggtagttataaaaaaaatatttttattatttaaatttttttattcttttcttcttcttattttagcaatacacgtacataaaaaataggggtcttttcaatattatacctaaaattgattttatttataaaaatacctttaaaaaaattatttgcacaaatactggtgtgctcagcacaaataccgaaatccaaaataattaccaaaagtggaaaaaacttgaaaaatctcgctttcagaaatttctgtgttttgtaagttttaaaaaaagtaacattttagttgcttt

SEQ ID NO: 359062 - DNA, 623 bp, Cannabis indica
tcgctagcatttggctcggaagcgatgctgtcggttgaagtgaacatattgacttgcagaagagagttttataatcaagaagaaaaccaggaacttttaaaattatccttggatctttttgaggaaaaatgatctgagtcgcaaatcaccaactctacataccaacaccgagtcagaagatacttcaacaaaaaagtcaagaaaagactattcaatgttggagacttggtattaagatgagtctttacaaatacgagagatgcatccgcaggagtgttcaacctgaattgggagggtccatatgttatcgaagtagtagttagagtcggagtctataaattggctcgacttaatgactcgctaataaagaactactggaacgtagaacgtttgcgaccctactatcaataaataaatgatgtaactcacattactgatgtaaactttaaatttcagttatgaataaagagaatcatttatattaagtaatcacaaagtttcattctttaaaaattacttaaggggcatttatgtatgactaaccgaaattcatctagaaatacattgtataatgtaaacccgccatttcaatttttttttttaaaattcaaaggttctcgact

SEQ ID NO: 359063 - DNA, 803 bp, Cannabis indica
atacctcgagctccgcccaacaagtaaactcagatgcaaagtccgtggccctttgccatttggggaattgatctgataggacaattacccaaaggcaatggacgagtgcagtaacggttgattacttcactaaatggacggaggccaaaccactcgcaaccattacatccaagaaagttcaagactttattgtgaagaacataatctgtcggctcggattgtcgtacaaaatagtttcaaataatggcaagcagtttgacagccaatccttccctaatttttgtgcgaatcatcatatcatcaaaagtttctccgcagtggcacatccacaagcgaatggtcaagttgaagcagtcaacaagaccttgaaggatacactaaagaaaagactcaaagatgcttaaggaaattggtcggaagaacttcctgaagttctatggtcatatcgaacaactgagaaaatggcaaccggacagaccccatttgctatggcatatgggtatgaagctatgttacctatagagcttgagccaccatcccacagaagattaacgtacatccaagaagtaaatcacgtactcctagccaaattacttgatgaatcgaagataagcgaaccgcagcaaacttaaagttgatagcccatcaacaaaaagtagcttggtatttcaatgaacaattaaaggctcagaaattatttgtgggagatatggtcctaagaagagtatttctaaacaccaaagacactacggcaggtgtgctcagacctaactaggaaggaccatatcaggtgtcgaagttct

SEQ ID NO: 359064 - DNA, 506 bp, Cannabis indica
tttacaaaatacaggatccaaaatagtatttactctataataatttcaatttttaacttcacaatatcaatcatatataaataattgattagtctaaaaatgatactaataatttaattaagtaaaaaataaagttacatcatcattcaacttattatatttatttaaacataaatgcaacaataatatgataatattccctcaaaaaaaaaaaaacaaataataattaaagaggtggcggtatattcttttttttttcctctaatctccttatttttgtggtaattttaatatttaattacaaattatgaataatgctaattaattaatctatttaaaaaaattagttaaataattgtatgtccattgttaaaaaagttaagtaataattgatattaatataattgtaacttaattattgaaagttcaaataacgttttatatatatatatttttatatttttttattaattgattagtgaaaataatattatgtgtattatttg

SEQ ID NO: 359065 - DNA, 693 bp, Cannabis indica
cctcaaaaaatacaacatgaaacgaaatcccttaaagtgttctttcggagtcagctcgggaaagtttctaggcttcatcctcaatgcctgaggaattgaagctaatccagaaaagattcacgccctcttggatatgaactcgcgaacaaaaaccaaagaagtgcaaagcttaactggtcggatcgttgcgctcagcagatttgtttcaaaatcaacagacaagtgtgtcccatgcttcaacatcctgcgaggacacaagcagttcgagtggatagaggagtgtgaaaaagctttccaagagctaaaggcacaacttgcaaaacctcccgtactctcaaaacctttggacgacgaggaattgggaatatacttagctgtcacaaaacatgctatgagtgtcgtactaatcagagaagagaataatgtacagtacacagtctattacatcagtaaaagactcattgaagccgagggccgatacccgttaatagataactcgccaactgcctcattctagcaacaaggaagttgaggccttattttcaagctcatccagttcgggtatataccaaccaaccactacgccaaatactgcaaaatctagatgcttctggacggctactcaagtgggcggtagagttggaccagtacgaaatcactttccaaccccgaacagtaatcaaaggccaagcc

SEQ ID NO: 359066 - DNA, 528 bp, Cannabis indica
aaacttactaaattaattaaaaacttaagaactaaaccaatttttagttaaaacaaatgtgaaaaataactctaatttctagagttatcaaggagtacatcgaggctcatcccataaataagagaggtccaaaggaagctcgatgcatctctccaccatccgtcctgaccatgaagagattgactaatcttttggaagatggtctcttggggaatgttgaatgcttccttccctctcctagtctgccggctaccgaccctggaaagggttattgtgcttggttgggccctcacgccaaacagggtgtaatgctacctttgcatctgtacttcaaagagatggccaactattcccttatcagtctgacccaattcacacccaaaggccttaaagtatctatccactctgtttgtgttgtacgctctcaaggatggggtcagcttggggtgggcaacatccaatccaatccaattgagcagaaccgatccaatccaattacaaaaattggatatccaattaaaattggat

SEQ ID NO: 359067 - DNA, 486 bp, Cannabis indica
cacattgtttttttttctttttctttccttcatgatattttttttttgaaagaacaacaagttcattaagcagaaaaatagatgggaatcacagggggaagtccctccccttgatacaaaatatgttgttcataggcgactctagcgcccttggccaccccatcagccagagtgtttaaactacggttaatataaaaaaacttacacactaaaaagttctttaagactttaacaatagaaaaatagatattagaggacttccactcaggaggtctatcttcagtagtaagagccttgacagctaccaaggaatctgagagaatgtgaacttctttctttcatgatatactaatgaacataaagataatatttcctagtgaaatataactatacctcaaacttaaactaatattccattattttttaatttccgtctttcgttcattatataccatagcacattaaaataatatactacaatcttaa

SEQ ID NO: 359068 - DNA, 503 bp, Cannabis indica
aattttaaagaaaatataaacttttaaaatcaacattaaaacaaagcaactattttgacatatttaatagctattttcagctaaaaaagaaagaaaaaaaaatcaaactcacccaaataaacctctaagcaattgtcacccatatagcctttgtgttgtatgaaactttagccaaacaattttaaatctaaaatatccaaatacaagttataatttcattattttataacttttttactgaaaggaagaaaaaacaccatttttggcacaaaaaaaaaccattttcggccaaaaaaataaagaaaaaaaatcaaaaatcaccaaaatgaagctccaatcaattcttaaacttcctttatgttgtatgaagctaacccaaatatatttcaatctaaaacattcaaatacaagctaacatctcattattttactaattttttaaactaaaataaattaaaaactattaagatgagaatataaaaaaaaaaaaattaaatcaatag

SEQ ID NO: 359069 - DNA, 885 bp, Cannabis indica
gacgctttgagtagaaaaagtcagagtgagttgaattctatgaagcaaattttccaacagctggcaactgaaatgactcgagctcagactgagttggttgtgggacaactggttaatattaccctgcaatccactcttcttgagagaattaaagaagcacaaaagcaggattcagaattgataaaaacccaagctagggtttcggctgggaaggctagtgatttctcagtggatgaaacgggaatgttgagatttgggaatcgagtttgtgtgcctatggatgaaaacatcaagaaagagatcatggatgagtctcacacgactccttattcagttcatccagggtcgacaaagatgtaccaagacctgaaagccatgttttggtggccaggcatgaagaatgacatcgctgagtatgttgcaaatgccttacgtgtcagcaagtgaaagctgagcaccagcgacctgcagggttgctgcaaccactgaatataccagagtggaaatgggaagatatagccatggacttcgtggtaggtatgcctagaaccacgggacaatttgactctgtgtgggtcatagtggacaggtttacaaagtctgctcactttttacctgttcggacgaatttctccattgatcagtatgctgaattgtatgtcagagaaattgttcgtctgcatggtgtcccaaagtccattgtgtcggatagagatccgaagtttacatcaagattctgggagagtctgcatcgagctatgggaactcagttaaagttcagcacagcttttcatcctcagacggatgggcaatccgagaggaccattcagattttagaggacatgctacgggcatgtgtgcttgactttgaaggatcatgggtaa

SEQ ID NO: 359070 - DNA, 580 bp, Cannabis indica
aaaactgctaattatttataggatgtgatcacctcatggtgtttttcgagtttcagaaaaatctagctaaaaacactaaagagtatccatggtgtctagtaccacctcacactactgttatattaagtatcgaatcctacctatttttatttaaaaactattataaaaaactattaatacttccccatgactgtattttcttttcttttttactttttaattaccaatcacaattttttttctatttcaacatgtatatattacattgtataacttgagatttgaactcagaaactccaacacacacagccacttgagctaccctgaagtaattttttttaccaatcacaataggatttattattattaatttatcaaaacttaattattattatatatatagaggatgtatagtacaatatatcattattattcattagttactatggagtgttttgtgttcgtttatttgatgacccgtatctttctttctgacccaattatgtttagtacctttccggtattattccgatctagctgaaaaaaaaaaactaccaccacagatcatcagtaataatac

SEQ ID NO: 359071 - DNA, 606 bp, Cannabis indica
ttgtcgacctcggaaagaagaatggttccaagtcgccattgggattactacaatcaagtttctgtcgagacatctccagattcaacaattaaagacgtgtttaatacgcgatattcatgacccaataaaagtaggaaaatcacagctatatgattttcaaaatcatacaccccattgacgtgttgtgatatgtaatcagatccaacgattttagggataatgactgtaatcatattttggttagttttgtaattaactgccactatgcaattataaatagtggcaaataatatcaaaagagggaggaaaaaactcttatgaaagaggccctgaaaaaaaatactcagaaatctgaataagattgactcgtggactatgcagaattttaactgcaaaatcacgtaaaaaactctgtgttcatatattgtttttctagagcttttatttattctgtgttgaattattatcgtgaagctcaaatttggttatcgaaaatctacgttaacagtttggtgctttcattgagagactctgtggaaaagctcagaaaaaggcttcccttcttttaaagaaaaaccttctccttttatggctgaaaatccagag

SEQ ID NO: 359072 - DNA, 694 bp, Cannabis indica
aacttgcggcacttgccatacacacaatcatcacaaaattctagcttttctccaagttttcccttgagaatgccttgtttttccagttcactcatgcctctttcacttacatgacctaatctgagatgccatagtctagtactctccatgttaggtcctttgactaccatatcattttcaccagtaatggtcttccctttgagataataaatcccattcttaagttcccctttcataacaactaaagagcctttcatgactttgaaagaactatcaatctttatggtatgacccttctcaatcaattcaccaatggaaagtaaatttctttttaaatctggtacatacctgactttctatatgcttctgacttgatcatcatgtagtttcaatctcaatgttccaattctagcaatcttgcatgccttattgtaacccaacaagactgatccaccatctaatttcttgaaactgttgaacaggtctcttcttggtgtcatgtggaatgaacaccctgagtcaagaatccatgaatcacctgattcttggctagatacaactagaacatcagcagattcatagccatcagctactacaccagcatctcctctgtctttacttttgtctctttgaagtttagcttttagagccctgcattcatccctgaaatggccctctttcttacagtagtagc

SEQ ID NO: 359073 - DNA, 1147 bp, Cannabis indica
taaacttactttcagttcagttcagttccaatcaatatacaaattttatatgtatctaactttccactacataagattagggattaattgggataagtaagtacctgctgtaatgaggaggtgcaaccttgattggagtctttgggtcctttcaacaggtgtttcattcaaatcagcaccctttaaatccccacttgaccctttagatcctgaatcacaatcttccatatctacaatctccattgcttctttggcttcaactggaagaagcagccttgcaaatgccactacaaaaacatataaaaacaaaaagtataatctttttctattcatctgtattattaacaagcctaaatccacaaacccaacaaagaagaagaaaacacctctgtttcaaagtagaggagtctgcaaccaaatcatcaccatctattgctattacaggctctgttgccattgacatgtttgtttctccttcttctcaaaatcagtattttttgttggttgacctgaaacagaggagagagagagagaagtgaagaataatggaatcaatcaaaatcgaaggtgatacaaaaaacgcaggaaaggtgggtgtggagtggatggagaaattgagcgttgaaaacacattaattaataaattaataataatactatcaatttcactaataaaccctcctaaatctctataataatattcccactctcaagtctcaattttatatttgagatattaatatgcttccatatcatttgctattttacttttgtttattttccttatcaaaattgtttggactgattaattatcttgtttgattaaataaaacataaattaattattttgtgacaaatgttatcaaaggattaattattttattaaatagaataatgatataatttacacataaacataataagtaatacttattttaaataaagatgtttggttgaagttacttgccaaataatgtgtgtaaatttgtacgtgaactatatgtgtgtaaatactattttaaacaaaaataatattacggattgggagagaatttttttaataattatataatgcactattttttattaaattaatttttattatttttaattatttaaagtattttttttatttatttttactaat

SEQ ID NO: 359074 - DNA, 647 bp, Cannabis indica
ggttttggatctaggtccaatttcaggtatgattccaagtccaagtcctagttccagtcccgatgaacttccggttttcgttcaaatttttggtcgcagggtatgggttcgggtccacttttgggcttaggactgggttgaggtcagtgtgtgggttcgggtccttatcagggttcgggtccagggctgggtccccaatcatgaaacccacaacaggttttgtccaagccctgggtccagatccgaatcccaatctcgggtcccaatgtggttccatttctggtgccgggtcacgagctgggtcctgggttcaagttcgggtctggatcgggtactaggtcgcggtcctagttctgtttccaaggtccttatcctgagttcgagtttgggtttgagttcgggtgggagttcgagtcctggtctgagttttggttcgggtctggattttagtctaggtccagatcaggctccgggtgtgggttcgcgtcctgggaggtctacgttgggttcgagtcgcaagttccaatcccgatctgtgtttggattcagttcttggtctaagtccttggtttttatcctgttctgtttttgagtttgtgcccaggtccgggtctagctttgggtctgattctaggtgtgggtgtttg

SEQ ID NO: 359075 - DNA, 1468 bp, Cannabis indica
atagaataattttttttttaaaaaaagaaattgggtcggatcagatccgattcgtataaggcgggtcagatcagatccgatccgagtatctgatccagcggggcagggcggggcaaatccgtacatgatctggatcaggtcaattcagagtcggatcagatccgacccgccccattggcattcctacaaatatctagggtttcaagttgtaatctacgatttaggcctcctatataaaggccttaactctaacctagaaacctaagttgaatctaagcctcaaactgcctccaagctctaagcctaagtttgacaacttctctcttcctcactttctctctcacacgcccatacaagcatcatctcaacacttgagttttgccattcttgattcatactttgtattcctaagggtgctacagcaaattccatctatagtgatctagataatattaaccctcagcattactaaaactaaaaggtgagtaggtcattacccgttatcataaggaggccaaacctctataacaaatctgtgtgtttattatttttaatctttatttgtgcaaacacgtggcaagcatcagatctatacgaccccgctgtcagttaatctctttttgaagtcaataatttgtattaaatttgtggaaatattagttttgtagttttatgttagttggctcgcaacagatataactgttgcattacagtttcatcacaattgtctaaaagatgacttcttctttcccttctagccgtcgaagttgatttttttttttcaggtaaagacactttcaattcttcttcattgaatgacaaacactttagccacggggggagcgaaatcagagtcatcatcatcgatgactgggcgtttccctttcgcattgtctgcaactgatttacgacctatttttgaagtttttgttggcaatggagatggagaagcagaagtaatagccattatatcaattacgaaatgaaagaaatataaaaaatactaataaaggaggcagttggaagaaaaagaaggcaaaggttatggcttagaggtggttttcgtgggttttgaaaggataatggctggaaggtggtttgagctgacatgattgaatatgtgtaagtggtatttttggtaaataaaaactcatttgagacaattattacctacaccttgtagatgtatttttataaataaagtattaacttatattttttatataaatttttttaatatatacatacatataaatttatgaaatttttacatcaaaaatcgaatttactcaatttattacaaacaaacccctacacgcttacatcatcatttttacctttcctctttcttttattacaattataccacttacacatcaattccatgcatgcagccacgtcattgattgatgacttatatcaatcacaccttacatcattcacttatctttttctcttcttctttttt

SEQ ID NO: 359076 - DNA, 546 bp, Cannabis indica
tgagttgtatattgctgttggagtagaaacgaagaaaaaaaaatagaaaaaaatgaaaaaaaatattaatgtttttaatttttatattattttttaattaaaattataatttggacgaataatatttcaacgcgtggcatttttaacatacacaaacgtatccgttaacttaggtagtaacagacaaacaaaaatggtgaacttagggattattaacgccaatttttgaggttgaggatttatctgcatcaaatggactttttagggacttataccgcaatcatccctaaattctgttatctcctcaagatggattgtatatgttgtatacagatattttggcaatgttagaagtaagggtggtagagggaagaggtttggtgaatgcataagtgagttgtaaggtgatattgacagggattagccgaatggtgttgttattgattttatccccgatgaaatgacaatcttgtagagttagtgcttgaagtttttttttttttgttgtaataatagtaatatctcatttcaaatattttattgtat

SEQ ID NO: 359077 - DNA, 1101 bp, Cannabis indica
atacccttatttaagttgattaaaattaacaaattaaaaattaaaatattttaaagaatatctgaataactaattttctaaaaaattctacttaattattaatttcaaaatattgtaatttaagtttatccaaaattagttaggataactgattttcaacttaaatatattttctatgaaaattcaaataattaagtatctagaaaaatctaattagccataacttcttaatttaattaaatacagaaaaacacatatagtttatcttgaaaatatttcattaaataaagtgtatttttcttaaattaatttcaaaataatctgatgaaaaattaatttcatatatttcgaaattaattatgttgctaatcaattttattaggttatactagtgtaattaatttattatagttattcaaataaggcaaatgggccttcacaattggggttgttcatgtgagggatagttgggttcagtatgtcgtgtccactacaaatgccccctaactctcacacaaggcccaaaggagaggaatttaaccttaactaaacaactgtattcattgaataagtctaatactaattggtcctaaataaaatctatcataaagtgacaattttattttagcaaccttgtccattttaattacaaaaattgaatgggctccataagcatctaagcccaaagcaaacatataggcacatgcgaacactaatttggatggatcctatcatgttactaggtttatacatagatgaaagaagattgtaaaatttacatgttacaaattatttattttgacctattgacaattgaacaattagttaaaatcaaatcattgtatctgtcaacaagttatccattgcaatttagatcaaacaataataggtcttttaaaaacaaattttaataataaacaatatataaaacacatatgcaacaaattggatagttggatatatgatttatttaatttaaattaattaaataattaaagtatattcgcaaaatctaaataataatgtaacaccctaatttatagggacgccacatgtgtgattttataaactagtttaatactaatagaataattaattatt

SEQ ID NO: 359078 - DNA, 592 bp, Cannabis indica
tcttcaaattaatccatactttttccaccaaatacacctaaaaattcataaaattaattagaaaactaagataaaattaaaaataaataccacataacatattataataaaataattataaaaacacacaaaacatataaaattacaataaagctaataaattcaaaaataattaaaaacttaataaattaattaaaattcaagaactaaaccaattttagttttaaaaaaatgtgaaagtaactctaattcctagagttatcacaaccccaaattttgctagtcctcaagcaaaagaaaaattaaaaacacacattttttttttattttagtgataccaaaaatgtcctcaaaaattgtacattgaaaatagcttatataaagtatgaataaaaattaagcttatggagctaattcaattgtcaatcttgctttaaaaatatattttaaattctaaatctaagatctattcatcaaattattatgtgaattttggaaaaattattgtaacaaaatatttatttcacataacaagatgaataatttttttttcaatatttaatctttatgcaaaattgacccaagaattaaa

SEQ ID NO: 359079 - DNA, 1199 bp, Cannabis indica
tcggtttgccattgatactaaaaactgaccatgttcaggtggttttaaccgaaggcaatttttttggttttcaatttctttcggtgtgcgaacaatcaatgtactcgatttgatcgatttcttagattttttgctcacagaaagaaaaaaaaaactatttgaacttgcaaaataaaccatgtgaattatttgactactttttatttagtcacatggtattataaatttttgtagtagacactcttaaagatccttttagaagatctttcaatgtgttttaacattcagaaaaaactttcaaaataatttacaatcttgaaaataaaatttaaacaattacataccacgcgtacaagaaaaaacaattcacatataataaaatatatagatcttattttcggctataacaaataaaagatctaccaaaacatccctttaaaagagggtctaccaaaatatccctttaagaaagtgtactggagacttaccccatgatattatactattattagccacaacataacttaataataaaaatacattaaaaaaaggatagatttagaaattaatattttattttattttatttttctttcgtaaagtattttattattattaatttttttgaataaatcttgtaaatttattaatagcaatccactaaaataatagcttgtaatctaaaggagagatctcacttgttagagggattaaaattaagaaaatgaggcaaataatttgtctaattcttagatcgtttgacaaataaattaaaaataaaacaagatgaaaaatattggaacatcacaataaccttaataatatatatatatatatattcagtttcatctaccgctaagaagatacagcagtagaaattattgcagtatgttcattcaaccttgcagcttgagcactcaactattatgcaatgtaagtaattgtactcttaacaacctcttcacgtagaatttgttattcacaactactaaaagcgatttattagtgtaaagaataaagaataactaacaacaaaataaaataaaactatgtaaacactcaaaactatgtcacaaagataagattaaaatacttaaaattaggggtgttcaataaaatttacaaaccgcccaacccgaataaaccgcccaaatcaaaccgaataaatcgacaaaaaatacaacccgaaataatacaat

SEQ ID NO: 359080 - DNA, 980 bp, Cannabis indica
cctggaaacccgattggaggccaaaaatgtcacaatgattttagtaaaaaatattgttgggattattgagataagttgattttaaaaatatcggggtattttggggtacttggagttgaccaaataccttagaaataaagatttcttagtggctaaaaaataatgaaataactattaataataaagtttttattaatattatattattattatatataaacgaatcttatcaatttatatatatgttatatgttttaaaaacataacagaagaatgaacaaatgaaaccctctgtcggtgtaacgaaactctcacttctattatctaattttcttcgaatttcaatccgaaacctagtaattcaagcaccggtagtagcgggatagtaaatcactaaagagggagagcttaaggtaaggattgattttgttttaagttaaaaatgattagttttatataatgactttgtgatttagagtagttatggagattttgacttcatagaattattctttgaaagttatgggactagttttgatgtttacttgttaaatttgaggtgattttgagttagatatcacgtttggagctttttaaagcttagtcaaaatgttaatggtagtttccgtttaagggctcaattttaatttctattacgtaaggattgtagtatttatgatatatatatatatgtctcctgtaaagttacaaataatttggataagtttcgggggtgtttcggtgagtgtgaaatttgggatttttgtgtttcaccatttttagaaattcctacgagattagaaattgtatttttaccataacttttcactcaagtgttcgttttggacgttctatctgtttcgaagcttgcaacgagctctacaatatagtgtatattttagagccaaaatataagttttattttagtgtatttatattgtggggtttgtagaaaaccctagattgtcttacacgagtgt

SEQ ID NO: 359081 - DNA, 1099 bp, Cannabis indica
ttctcaatgagggattaaggtgttaagcaacctattactagtcagtatacactctctaaggaacaatgccctaagacagagaaggaaattgaaactatgaaggatgtaccctattctaatgctgtagggtctgtaatgtacttaatggtaagtactagacctgatttgggatttgctatgagtgtacttagcaaatacatggctaatccaggaaaagttcactggttagccatgaaatgggtgttcaggtatctacttgggacaactaaggttggattaacctacaatagacagaaagctaacactataattgaaggctatagtgactcagactatgcaggggacagggataataggagatctacatctgcctatttctttctaattggaggtaactgtgtaagttggaaagttcagcttcaacctgttgtggcactatcaactacagaagctgagtatgtggccacaactgaagctataaaggaagctatatggctaaaagggctaatgaaagaacttaatctacttaaaggagtacctactgtgtactcagacagccagagctgcatatttctatgtaagaaccctatgttccatgacagaacaaaacacatagaaatcaagtatcacttcatcagggacaaagtgacacaaggtgagatagacatagagaaggtgcctactgaggataacccagcagacatgggaactaaaattgtgactcttaacaagttcatacattgtatgaacttgttaagaatcgacaaaggagactaagagtaggacctatcaagctaagactctcagagataaacagacaaacatcagaactggttataagaggatttcaggtggaaattgttgaataaaatccacttataaccagtccctttacaacaaatatccacatcagcaattacaaacagaaataaaacaagtaagactcgatcctagggtggcttcgcctctagtggatcaagacttagtagttagttaccagttgtaactaactcctaaggctttgatcaaccgactctacaacattataaatacacaaatcaaagcaaataaacctagatctacaacacagaaacagatc

SEQ ID NO: 359082 - DNA, 779 bp, Cannabis indica
attttaataactttggattcagggaaaaaattataggtattagtaagtatattaattcaaatttcccttacaaaaatagacttccgtacatgatcggtctagtacacgttatttattttggtatttaaaagattttacagtttttttttttataatcacgtatgttatacttatttaaaaaaataatttgcggcataaatacttaagtttaactcccaattgtaaataaatacttaaatttaatttttagcggtaataatacctaagttatatatttataactctctaagtacctaaccgttaaatattatgtcattatccacatgtcattttcttattcgtatatttaaattatgttttttaaaaaaataaaaatttaatgacttggaccaatcaggaattgccacgtggtaatttacttaacaattaacaatcaggtacctgcaaaagctctaaaattataacttaagtattattaccgctaaaaattaaacttaagtatttatttacaattggaagttaaacttaggtatttatgccgcaaattactctatttaaaactagttccaaacttttgtaattttaatatataaatatatgctgtacttataattagtgatataatctaaaacataacgtgtattatgattattattaattactataaaaggttgattataaattgattaatttaattatataattagtttatgttcaactattatttataatttattattttatataattttttcaggtaagtatatcaaatatcactt

SEQ ID NO: 359083 - DNA, 1445 bp, Cannabis indica
tttataaaataaggcaaaatattggggcgttacaagttaacttaaccatttatatttatcgtaataacttatcagaattataaggataagataggaaattttgcaatgtctattcaaaagactcaagcgtaatttctagttcttatgaaatgttttatggtatctctaatgattacttaatcttaagaaagtattttatattattgttaatactagaatgctatattgatgacttagtctagaaagaacttaacgtttctagactaagataaaatgtcacaacaagatgtccctaagtaccaatattaagaagattaatgcatacttgtgtatgcattaaaccagactcctaatgttgagtgggaccatctaagatgtaatcaaacaaggaatattagaagacaatcaagaaagaatctctaaaagtgacctgtgttagatgataggggtgtatattagaaaccttatatctacactaagtcagaacttattattagagatgatggttactctagggtgaaggaattattctagaatgatgtaaaaaatccatctataataattttgttccaccagtgaagctaagtaacttagctgcttttgaaaggaactagaaagttattcaaactgaagaaagatcttgactattttttatctctattccattttggatagaattagagacgtgtcttctgtacattcagatgcacttaacaacctataagtaatttagtatccctagaggagtaatacatacataaaagtgatgttgcataacgttttttgcaaacaaaggaagtagtggaggagaaagttgtttcttaccacaaccttacagttcctcttatttggttatagtcaaacacactacacttgatatgaatatcaagagaatagattgattgaaatgtgcttctagttttatgttagtgcaagtgggagtttgttgggattttatggcctaaataaaaccaatttcagtatgatcttatttgttatcaattgaagattagaattcatttaagttagcatgttattttcatgattatagtttaatatacaacttctaataaatccagaacatattgttgttcacaattacaatgatgtcatcacattggaaggtaattgtgattatacgttccaaagtttatgtctcattattcatcactgcactggatttacactgatgtgataatcaagcgataaagtttacttacaccttgggtaattgttatatcctttccaaggcatagataaagaatgctagtatcggatgtatggagtatgcatcgaagtggaccgatattgaacttggtaaagattattgggaatattttaccagaatctagatttactaacaagtatgttgattaatatcctaaatatgaatatctctaaaacaatgaaattaaaacacacaagagtttagaaaaccttacatt

SEQ ID NO: 359084 - DNA, 618 bp, Cannabis indica
tccgtggccctttgccatttgggaattgacctaatcggcagttacctaatggtaaaggcagagtgcagtacgcagtggtggcagtcgactactttacgaagtggactgaagccaaaccactggcgaccattacatcgaagaaagttcaagaatttatagtgaagaacatcatatgccgtttcagactaccatacaaaatagtctcagacaatggaaacagttcgccagccaatctttcactgatttctatgcgaaccatggtatcatcaaaagtttctccgcagtggcacaccctcaagaaaacggtcaagttgaagcagtcaacaaaaccttgaaggatacactaaagaagaaactcgaagatgccaaaggaaactggccagaagaactccccaaagttctatggtcataccgtacaatggaaaaaacagcaaccggtcagacaccatttgcaatggcgtacggttataaagctatgctgcccgtcgaactcgagccaccttcccacagaagattgacgtacgatcaaggtaccagtcacatactcctcacagaatcgcttgatgaaattgaagaaaaacgagcaactgcaaacttaaagttgatagctcatcaaca

SEQ ID NO: 359085 - DNA, 444 bp, Cannabis indica
aagtatataaaatcaaaacattaagagattaagtgtatatttatttttaatttttattataataaattatatatatttataatgaaaaaaggggataaaaatataatttaatatccatattatattggaagaggtttcaatggttaaaattttaatgtaaccatcatggttacatttttttttaagtaattggattactattgaatggttgtgattaatttggaaattaaataaaaataaaggctaattagtaatttttttcccccgaactttgacatgtactaaattgtgccccctaattttttttagccattagaaattccccccgaactattgagattgttaaatttaaggacttttgtctaatttcattcaattttactgtttcagtgattgtttatgtacaaaatcatgctcccagactttgatatctaccaaatcatg

SEQ ID NO: 359086 - DNA, 698 bp, Cannabis indica
tatgtgtcgagtagagtaattgaaagtttccataaaccatatgatatttatgcttcggggtttggtaccctgttaccttcgcgagaccttatagtatccactaggtggattcagtctttgtatttctggattgacggttgtgaattaaccgccgatctaattgagatgcaactgtttgattttgatataatccgggaatggattttctgtcaaagtatggggcaacgatcgactgcaagcggaagatggcggtatttaagcccgatagtgctaactagtagtgtttgtgggtaaagttcaggggacacacataccaagaataacacttttgaaagctaaagacctgatgaacaaaggttgtgttggattcatagttactacaatggataccagccaacctacgacatctggacctgaaagtacaagattggtatgcaagttcctagacgtcttgaaagaagatctaccgggattgccacctactcgagagattgaatttgtaattgagttagtttcaggagcggaaccggtatcaaaagcaccgtatcgaatgactccagtagaattgagggaattaaagatccaattgcaagagttattgaatttgggattcattagaccgagctactctccttagggtgctccaggttttttctaaagaagaaagacgggtctctgggaatgtgtattgattaccg

SEQ ID NO: 359087 - DNA, 541 bp, Cannabis indica
ccaaacccaaaagtggaaccgaactagtaacctgtgacctaaaattggaaccaaaaccgcaagttgaccgggactggaactaggacatggacttggaatcataactaaaatgggacctagatcaagaaccgtaaccggaccaggacccagactctaaatcagacctagacccgaattgggagcagaaccaggatcccaaccaaaacctggactaaggacccaaacccgaacctaaactcagacccaaacatggaaccaaactagggaaagagaaccagggtcgggacctagaaccacacctcagtctcgatctcggacccaaactctgaaatgagacatgggaactgaaccagaacaagatcgagacccgtgacagtgatctagatcttgactcgggattcaggtaacacatcctggaacaaacaagtagtcagtgtctagatttgggactcaaacttggacaagagcccaaacgaagaaccaaacccagacccagacgtagacttagaacaaaaattaaacctgaacaagaattgctgaa

SEQ ID NO: 359088 - DNA, 553 bp, Cannabis indica
aaattacaacaataaaatatgtatataaactttacaaaaaatatttatttagtatatacactcaccaaaattatatatattaaatctacacatatataaacaaaaacaacatatattatatatataaaatacaaaaaaaaaaatacattatattttaaaaatataacccattaatatatatatatatatacagtgaacatatataccaaaataaaacaataaatatacaaataaaatatatatatccccaaataacacaataatatatatatacagtgaatatatatatacaaaaatatatatatacagaaatatatatatatatacagttaatatataaacaaataaaataaataaataacccaaataaattatatatatacacaggaaatatatatcaaaatcaaataataaataacccaaataaaaaataatatatatacaaaaaataaaaaaattaaataacccaaactaaatgtatatatatacacatattattatatatacacctaaatgcacaatatatacagatctatcacaaaaacaaaaaaaa

SEQ ID NO: 359089 - DNA, 547 bp, Cannabis indica
atgatacgaaccacactaataatgaaacccgacaccaaatatggcagactctaagaattctcgaaattttgatgtggaaccgcgacccaatgcttagttaagcatgaaccttggtatgaaggaagacgccacaaatggttgtggaaatccgtttgataagtcgggttgaacgccacaaggaatactccttgataagttcgaatagttctctcaagaactcaagaagaaaacctctcaaaattttattccaaaatattctgatttttcaaagtgtttacaagactttatatagccaacttacaaccaagagaaaaggaaactaaaagaaagaaaactttccaaatgaaacaaagacaaaataaaggaaacaaaattgagaaaggaaagctgccaattgccttggaaaacgtgataagctcaacttgggtctgaattgagtccactttgatgaaacccagtggaggcaacggaggaatagggttcaccaaagggatgataattaagtagatgcggaagggataatttctgatgaagagtttgatgggat

SEQ ID NO: 359090 - DNA, 1640 bp, Cannabis indica
ttggggtccgggttgcggtctggggtctggtttctaggtctgggtccagggtccgtgttggggttcgagtctgagtctagtgtccaggtccaagtttggggtcagtatatgggtcggggtctgaggtctgaggtctgggtcggggttcggccgtccggggttcgggttgggttccagggtctgggtttgggtttgggtttggggtctgggttcagtgtctgagtttggtccgagttccagttcggggtccgggtctgactccggtgtctgggtctaggtttgagtccggttgtgggtcctggtctgggtccaaggttcgggtccaaggttagagtttgggttttggcctgggttcacggtccgaggtttgagtctaggtattggttctgggtttgtgtttaggctaaggtccgtggtccgaggtctgggtacggggtccagtccagagtctagtccggggtaggatgggttcatgtcatggtatcgtgtagaatattgtaaaaaaaaattcaaaaaacagttttcaaaaagtgagccaaacaccattaaatttttaaaatgacaaaaaaacttttttctattcacagttttgaaaaagacaattctaaaaatcaaaaaattgaaaacacagccaaacaacctctaagcttgtagacaccatttttttttttttaagatttctaatttttattgtctaaaatatatgaggacttggacgtatgtggtcagctaaacctagcttataatttttgttggactatttccctctaaattttagttcataaaatctattaactattaatagtaaaatcaaactttaattaaatgatcaaggacataagagcatttttaatggagtgtcaaaaaggtggtatattgctatattttagcacacttaaaaaaaactactgctccaatgatgttctaaaagttgtgctaaatttggcacatcctaaaagttgtgtcaaatttggcacatgctaaaagttatgtcaaatttggcacaagatatagtagtactgtgccaaatttaaaccacaataaatgttaactttttatttactataatgtcattaattattatgattaattgacttttaataaactttacattctttatttttcatattactattatttaaataataaaataataaataataataattttatatattctacgataaaatattaaatgatcatcaatgtaatcaagggctaagatagcaaaatgatcttaaaattggaagctaagtgagtaaatgttacttttttttttaattaaaaaataaccaaatataataaattagctaataaaattataaaattatatttactacatattaatttctttaaaataaattagataataattaaattaagttatataaattttgtagtattgcatattaatatattgtaataaaagtgaataaatatattagatcattaaatatatacaatagtatttgatatatcgtattcttaaaatttaatataccataggtaataaaactatatatcacaaagaaattataatactactaaattaatactcaaaatatatatatcatgctaacaaaattatattatcactattaaaatatgtataccataccaaaaaatttatatataatcat

SEQ ID NO: 359091 - DNA, 869 bp, Cannabis indica
gggggttgctgcccgacagtttgataggccttccatatcagcattgtagcttgtcgactacgattgtcaattttgaatgatgggcccttaacgcttccatctcttatccctccattcggcaaacaagcacctttgctcttcgaatgcaagatttaccgcagcgcggagttcctcctgatcatgatgtagtgtgttggtattactagcatgagtccaagagcaacacgaaggttttagatctctgtatcatctccaatggtcattcgaacgttggtagcaggcagaacagctgtgttatgaatgccctggctgggtgctgaactggtattcccagtctcttgcacaccaggcgcgatttcatccataggagtcgtcacaccatgacccgcatttgactgttgctcgggatttacagttggcagaacccttgtgtttcctgggttctgtaatgcaggatccaccgcctgcggatttgccagatcaaccatgcccctacgagtctgtaccaccatcgtacttgttattaaatttaaaatgaagagcgattcttgactctgctctcaatgaaagcaccaaaatattgacctcgatttaagccaacgacagtgagtctaatttagtaatcgacaagtagtttataacgattgaaaaatggtaaagcaacgtaaagacacaagaattttatagaggttcagccccgagcagttcggtaatagcctaatcctcattatttgtattaactcaagaacaaggagaaaggttccttttgttatagctcttacaacagtatctctgaatataaattcttagacaatatttctcaagtaaaatctttcgaccctttgcccagtgaacatgcatcactatgt

SEQ ID NO: 359092 - DNA, 627 bp, Cannabis indica
actaataaaattgtagttataatgtacatgatttttttttttttttctaaatgacccaattttaaaattttgcacaaggcccctaaaatgcttgggccgacactggccgtgaggaaaatgtgcatccctaattggaggtaataaaataatatagaagtggttaatttttattttattttttttatttaactgcataagttctatagttatttttatttgacaacttattagttttaaataaattttaaagttacccaaatatatttttaaataataaaataggataatgcaacataacaaatagctaattaattattaagatggttacaaataagttttagaggtaaccaaattttatctcaaattatgtaatttaaaaattaagtttttttatgtaaaagtaattaattaatttcttatcatcatcataagtaaccaaaaggttacttgaaaacccaagaaaataaaataaaaaaaaatgaaattcgggattaatttcgtttcaggaatattattttgaaattaaggtattttttaataacacgacaaagtattattgtaattgagacttattaagatatttttgtagagttagtattgtaacgccctaatgctaaggcacgctac

SEQ ID NO: 359093 - DNA, 1082 bp, Cannabis indica
tgatagttgacccacttgattctctaaactttttatcgctgcttgagtttcttgtttgaattgttgagaatcagccaacgatggcattaataagatcttaagatgtaggcttgggaggtgctggtggggcagcttgtggtgcttgattttgtctgacagatgtccactattgataattaaaagcaggttgttggacattttgttgattgccatagcaaaaatttggatgatcacgccatccctcattatatgtgttcgaatatggattatactactgtcttggttgacctgggaaacctccaatagcattaacatcttctgttggcccttcatagagagtaggacaagtattagtagtatgccccacaacttgacatattccacatggctttacatgttggcttaaaacaagttgttggaccacggaggttaattgagctatttgttgactaagctggttctcaatgggtttgctcacttcattaacctgtcgtgatgttgagggagagtctcggcgagtgccaaactgttgtgaattggcagccatgtttgagataagatttctggcttctgttggggttttgtctaccaatgctcctccacttgctgcatctatcatacttctctcaaaaggtaagagaccttcataaaagtattgaattaagagttgttcactgatttggtggtgagggcaactagcacacaaccttttaaatctttcccaatattcataaagtgactctccagtaatttgctgaattccacagatttcttttcggatgcttccaactttagaggctgggaagtatcgctccaagaaaacagtcttcatgtcattccatgtttcaatagttcccggtggtagatagtacaaccactccttcgcagcatcttttaaagagaaagggaaggcccgcagcttgatttgttcttcagtaactgatgtaggtttcatactagagcagacaatatgaaactccttaaggtgcttgttggggtcttctccaggtaatccatgaaaagctggtagtaaatggatgaggccggatttcagttcaaaattgacatccaaaggtgcataa

SEQ ID NO: 359094 - DNA, 678 bp, Cannabis indica
tgctggtgctttccctcttctcataccaatgctgcagtgattgcactttctgagacaaccaagtagaggtataaagtctctctagttgttggtttggccaagactggaggtgttgataaatgtttctttatgcccctaaaggcttcctcgcactcatctgtccattcgaacctcttgttacctcgcaacacattgaagaagggtaggcatttatcagttgattttgagatgaatctgtttagtgctaccattctccctgttaaggcttggacttcctttggctttgtgggtgatggcatctctattaaagccttaatttttttaggatttgcttcaatgccccttgcattaactgtgaaccctagaaacttccccgaggagactccaaaagaacacttctttgggttgagtttcatattgtacttttggaagcactccgcgaggtcttttgtgtgatcttcacactttaccgactttaccaacatatcatcgacatagacttccatgatcctccctatttattttttgaacattctatgtactagtcggtgatatgttgccccagcattcttcagaccaaaaggcatgactttataacaaaaagttcgatgttggttacaaaacttgtatgctcgtgattagggacatgcattttgatttggttatatccagaatatg

SEQ ID NO: 359095 - DNA, 557 bp, Cannabis indica
tttaattaataataattacttaaaaaaattatattaaaattttaatattaaaaaatttgtgagataaatacttaaaatattaaatttgttgctaataaataccgaaatttgaaaaaatagtaaattcacatttatgatttaatttttattctgatgtatgtgttaagttctggattcgaattttattgtgtgtgttttaatgtttgagttttagtgttttactaaggttctaatgtttgagtttgtgtttatgagatctatttttatttattttatagattttgagaacttgaaatttgatgttgtttccattgattattgggattgaaagttagatttgtcgtatgggaatttttagtttgtctttttcgtttcattggttgaaaaatagcatttgaatcgataatcaaagtatattgttaatctccttacaaaaaaattttttgttaatctgtaaagataatatggctggaagaagatggaaaaattaatttttatttcatttaatatgtatataatgttttttttaataatatgaattaacttgaattaatttt

SEQ ID NO: 359096 - DNA, 1017 bp, Cannabis indica
tgcaaagctcgagtttgaaccgtctctctaatatttaaatgaatatgtgttgtattactagttgttgaatattgttatggatatttttaatgtgtctgcgactttgtgcgacatttatgcgattattgtgcgattttagctcatatttataattgttggttcgcgcgatttgtatgcgatatctatgcgacattgtgcgattttctgcacccttttaatttttattttgcgatttctggcggcatttggcgatttcactggtaacatgcctaatatactaactgtctactttttatgatttctatgcgatgtacgtgcaacatttgagcgatttcacatttcacagtataatataatacagttgcaaaagtttatgtgtatataagaagggataacattaaataagactaccatgtcaagttctggtaaaataagtccacacaccacctatgtctaaaggtgagcatgttatcatcattaactagctctaacgatcgctccaacatgcagtgctcaatgtactccatggcaaacactccacaatcgccactacaaattaaaaaattagtaaatattagcaacaattaagttaagtaattcataatggagtgcaaaattaaataaattacaaaaaaaaaaaaaagagatttacctggtctccgtttgtggtgcaacctcagaggtagctcgtctataatgtaggggtaggagctgactgagatcaccgcaatcaaccggatgtacataattgttatatggaaaataaccgctagctcgaattagatgcgcaaatagctcgctgtaaggcttcaaatatgactccatggcttcctcaggggtggcaccgatatcacaatcatatacaatgatctcccaattgtcaatatccacctcaactggcacccagtggtgctctttgggaaggttcaacacaaagtatatgtaatcctggttctcccaacatggcaagtgtctgtgctatatgttgggttttgtgccctaaataaaacccattac

SEQ ID NO: 359097 - DNA, 791 bp, Cannabis indica
tgtttatgattattatccaagttaaatatcggtccaattcgatgtatactccatacatccgatactagcatactttaccaatgccctggaaaggacataacacttatccaaggtataaatataccttatcactgattagcatgtcagtctaaatctagtgtactgacatatcatgagactcaaacatttgaacatataatcatgattacattccacggtgtggacaacattataatcaagaataaatatatgttctggacttaatagaatttatacattcaacatataatcataaaataaattatgtgaaccatgcaacataaaataatttctgatcttttattaattagtaaatctgattatagttaaatggattttatttagggcacaaaacccaatagttaagtcagtagatcagcttaggaggtcccataggaggaatataaagatgtaattatgaattatgtactgtgggatcttatgatttcaaccgagtgatagtgtttggacatactgagttaatatactgtctatcagtgtagataattaagacaatgaatgaggatatggaattcatacgaaggaatagtctaatcttgtgaaatcccaaagttgatatctttggctatgatgttaagaaattatgaagttatcgagaaccatagagattaaaacaaaaatagtataatgttttattcttgaaagatatgggtaatctgggaggattaatggaatattagaaacatgctgtgagcatatttaataaaggttagattatcttagaataatct

SEQ ID NO: 359098 - DNA, 587 bp, Cannabis indica
ataaataagcttagtaaatttatatattaacaacgaggcatgatcttaattctatatattatgtattttatgaattcaagatatgagctaacagttaataaagttttaagttaaattatatgaatgacaaaatagcggcaagtggtaaaagtgattattttacaatattgctaattaggatttttgtttattgaactttgacatgtatcaaattatatctcttgaacttttaaggtcgttaaaaatgtcgtctgaactattgagattattggatttaaggacttttgtctaaattcattcaattttactatttcagtaattgtttatgtactaaaccatgctcctaagactttgatatctaccaaattatgtcacttgaactttgacatgtactaaattatgtcctctgaacttccatcaatgttagacttttttactaaaattagaaaaaaaatctttaaatccaacaatctcaatagttcagggggcatttttaacgaccttaaggcgtttggttggggaggaatgaaatataggaataggaatgggaatgggaataggaataggaatggaattgaataaaattt

SEQ ID NO: 359099 - DNA, 846 bp, Cannabis indica
gatacctagactcggccccaatgagatgcttgctgagatagtactctttgtgtcccttcatcctcacacaccagagcaggactagttgcatgctcggtgatagctaggtagatgaataactctttgccatctactaatttttatgggatcgagggtttggatagatgatgttttagagcatggaatgcttgctcgcattcatcagtccattccttttgttacttcctcttagtagattaaagaagggaacactattgtgtgtcgtaagccacaacaaatttactaattttttaattcaaataactttaattattttagtataatcataaataaggattgatcccacgaggactacgtttatttaattactcaaaaaatactgactaaagctagaaaaagggggttttcaggtttagagtagcataaataagagtattaacaaattaaaattgagactacgatatgagaaattagttaaaggttatttgccaccctcaacaatcattcttaattcctattaatgaatgtaattttaattttcaatcaaactattaatcctacagattaagctgaagcagtcaattatcctaatctccctattacatgtaatcaaggtgaaacgctcaatcactaactatttacctacgcagtaaatccacgaagcatgtaatttatttaacttacataaagctttgagatttatggagatagattaatctagggaacaaattaatgaagcatataatttatttaacctaggttctattcttcttcacaactaaaatacctttgacaatattaaaaattgcaatttatcacaaatacttaaaatcctagactattagg

SEQ ID NO: 359100 - DNA, 739 bp, Cannabis indica
tcagggaattaaactttcgaacatataatcatgactatattccaccgtgctgacaacactataatcatgtataaatacatatgtgctggacctaatagaatttataatcatgaaataaatcatgtgaaccatgcaacataaaatatatttctgatctttattaactagtaaatctgattatattgaaatgggttttatttagggcataaaacccaacgcttccaacatctcgacccccaatagaaattggaattgtaaagctacatggatcttttatttaggtggaattttactctttaacatagcactacaaccctttgtcaaagcaacagtttcaaactcaccaagcctccttttctttttcacaatgtccttcaaaaactttacatacattggtatttgctccaaagcttccactaatggtatgttgatgtggagctgccttagaacatcaagaaatctctagaattgaccatcgtcttgctgcttcttgaatcattgaggaaatggtggaagtggcttttgcaaaggcttttctgcagcagaatgctgatcggatgctgtaactactaggggaatttcagcagctaaaattgttgttttttttttttcgtttccccctctttttggattgaagagggctcctcgctgccctttgttgccactacttttgactctaaattttttccacttctcaaggttatcgctttgcattactctttgccatctcttcttgggt

SEQ ID NO: 359101 - DNA, 519 bp, Cannabis indica
actctcatgtggtgtattttcacactattgtccgcatgcaagttattgtatcgattttaacctaaaagtaaaacaaaaaaataaaagtggcaagaagagtcaataactattataatagttagaatcagatgtaatgtaatgataaatgtggtttcaaaattgtcaatgtaaacttactaggcgacgacgtagttgatgtatgagattattagaaccattcaatcgatctttagattcagggatcttcgtgaccaaaacattgtgcaatccaacaatcattgtcatcaaagtattgatcttttgcacactaacctatcatccaaaaaataaaaaacttatgaatactttaaaaatgtaatatatatgttggactacactaaaatcactcaaacaagagatacaaatacttgcacattttatgtgtttcggaattttagagagtccatgttaacatttgtaggtatattaataattgtagcttcaccatcttcatccggaatcacaaaactccatggagga

SEQ ID NO: 359102 - DNA, 770 bp, Cannabis indica
tatagggtgattctacaatgcacccctataaaagggatgtactgatacacccttaacttgtttcggcatccagaaaaattttttagtctaattttttttcatattcatgtaagttatatctatttaagatatcctacaaaattttgagaaattcggaataatttacaatatagaaaataatgttcaaacagtctattttacacgcgtataaaataaaataatcacgcgtgcaacgcactgtttgaacgcagttttcggcgtgttaaacttttccgaatttcttaaaattttgcaggatatcttaaataactataacgtacatgactatgagaaaaaatttgaccaaaaaattatttcagatgctaaaacagataggggtgtatcaatatacccattttaagggggtgcattatagaattttccattattattaaagctaaagctatatagctaagtaatgtgaaccacaaaaaacagatcacatggcacagttacaagtgaacagtatgtaacttcatttgttttttttttttttttgggaagccgccaaaatatataataataatacctataaatatccaatagttttgtgccacataaatgttaaaataataatataaaatgttaaaataataatataaaacaatagggtgattctacaatgcactccctcaaaagagatatatgcactctctacttatttcggcatctaaaaaaaatttagtcttattttttttttcatattcttgcactcccttaaaagagatata

SEQ ID NO: 359103 - DNA, 654 bp, Cannabis indica
ttgaccgttgatgatgatctaatggtgaaattgactctggaggttagtcttcaatttctagagcttgagtcgcgtttgtaggatccattttgagtaagttgcaacttaaattcataactctcttaaggatacaatttggacttgataacttcagaattacgattgaagtgtgagaaataacttgatagatcattgaaatagcttcaaaatgcaagttgaatcgcgtaaattagatcaatattgagtgagttatgactgttttactaaaggctgctctgataccaatgcctagattgacatccagcccccaagttgacatatgatgtcaacttagacgctaggccaagaaaaaaacgtgttaaggatttactttttgatgcctaagtgatatttttacatcacttagctagttgtcgtgttttggtgaagttgttcaccagttttcaaagatgttcctatttcgcaaaatcgggagactcgaaactacccgatttgcgactaagtcacttgccaaaaaagtgaaaatatgaagttttgaatttgacttgtctgagttcataactcttatttaccatgaaaagctaaatgaacgctcaatatagaatcagaatcagataagcagaacccaacgcaccaggtcacatgtcaacttgg

SEQ ID NO: 359104 - DNA, 328 bp, Cannabis indica
tctcagccataaccttcgtcatcttcttcttccaattacctcctttatcagtttttttttttatatatatatcattcatttcgtatatataatgactattacctttggctctgcttctcaatctgattcattgccaaaaaagcttcaaaaatgggtcataaatcagttgttaacaaggctaaagggaaacgtacagtcatcgttgatgatgactccgattttgctccccccgtggctaaagtcatcgtccagtaaagaagaagttgaaggtgtctttgcttgaaaaaagattacaactctaactcctagaagagaaagaagaagtcaa

SEQ ID NO: 359105 - DNA, 462 bp, Cannabis indica
acctttataacgagttattttatgttgcatttaatgatatgactttactatgtggttcatattccactgcaggacacgtatcaatttttgaattgcagtagaatttcaggtataacagagagaaattctattattttaaaaattaagatttgtattctgtatttcaaaaaatatccttaataatgactcgtggagtatgtaaattttaactacaaaactatgtaaaatatcccgtgttataaattttgtagtatacttattactaaaaaggctatttatttagttgacgaaaatctgtgttaacagcttagtgctttcattcagagccttggtgatatacatcataaatcatatatatgtatatggaagaggtttcaatggttacatttttattgtaaccatcatggttacatttttttaagtcattggattactattgaatggttgtgattaatttagaaa

SEQ ID NO: 359106 - DNA, 1019 bp, Cannabis indica
aactactacatgacataaaaatgcatctctgaattcaataataacagtataataaattatttaaatagctataaataatttcataattaaacgtaattaactgctaatttccaaattaaactaagcggtctttacaccacttttcagcgtcaacacttgtcatatgcttggaataatcattgtcaaaataccacatttaagaagcaatagatttaaagcaagaagaaccaactaaatatttgtttttgacaacctatttttattttttagaattatatttatttccaaaatatttagaattaaatatattttgcatggtaatatatttaggtcgaatatgatattttattccacaaaaatggcatataggaatgaatcgatttctatttcctttgggattgcacaaaacttaccaagctacttctttctgtaatacaatacattttgctatagaatcaaaccctacaaagtaatgtcagaacatccaggaatcaaatttttatgttttacaaatttagtatttgatttagattgagtcttaataaaacccaaaccagcatgacttgtttgtcctaacttttgaacctcttaaaaatgttggaacggggatttagtattttaacatttcttttcaattttttaagttccttagttaaagatacaatttcagaatttcttgatttcaatttagattcacaacatttatttttctcttcgacatctttgatgttgtgagataactctttattaaattttactaaggaacaattttcattacaaatttacaaccacttaccaaacattatcttgtaaaattctgtcaatgatttttcatcaagttctcactcatctgaatatgaaagagctcatttatcattgtcatcagtcaatgtattgtttacacacaaaacttttcttttcttttcttttttctataaatcacttgacaaaacacttgttaaaacaatattttcatcttcactattttcaaaatcatcatcactccaagtaacattaaa

SEQ ID NO: 359107 - DNA, 1114 bp, Cannabis indica
aactcatattccatactttaatataaagtgtgaaccattgatagaaaatggttattaaacacttgtgaaagtgtaactacattgtattctggaaatagaaatgtaaaatttctatttggaatctaaataagtcaaagactgaaatttataccaaatatacatgagtaattcttctttcttggaccaccactactaatctaactctaagtctgatttgcctaaagtaaacatatacaagtaggagattttaagattgaggatttatatcatttcgggatagaatgtcgggaatataatcatatgcgccattcaatttcttaagagaaaatagaatgacattatatgatttataaaccattcatccaatgatatattatttaagctaattcgaaatgaataagctaagaggaataaaggataatttcgaatttaaaataagaatccaacgatgtcccgattagcgagagtcaaagttattcttatttatataatcttcttgtttcatattgtaaatacttgtctaaggtgtcatcaattgatgaacagctagatgttgcatttacaatatttatctatcgagatctaacactattatgtttgtctaatggatgacaatccattagggatttgtcccattaaaacaacaagccaagttagaccaacaatgaagattcgaaattaaactacaactaataacagaaaataacatggttcaatataaattcacacacaattcagaaattatcaagcatttagcaaataacaaagacatgtgaaaatacaaaacaggcacatcttaaataatttccaaggtttccaacaaactgatacagtgtcccggtaggcgagagtcaaagtatcattcattgaatagagttgtcagctcatctaaaatggaaaccattctagcaaccttttattcgatcaaaataagaatccaacgttgtcccggtaggcgagagtcaaggttatcttattttatgagcttccaccattgtttcatacttcgtaaatttatctctaagtagtcaccgtaggggagagtctaatagagacgaaaacttacaaaatacttatcatatgagatcttacggtgttaaatgctttcaacgac

SEQ ID NO: 359108 - DNA, 587 bp, Cannabis indica
tcctttttcttaattccgggtattacagatagggactctcttctttattctattcttaaagctcgatactttaaacattctaattttttgaatgctcctgttggtcataattcttcttttacctggaggagtcttctttggggccatcaattgcttaagaagggtctggtttggaagattggtgatggtattaatgtccctttatcagcaccaaattggatccctactattcacagtcccactctcttacatctgcttgacgagtcccaagcttttgtttctttcttcatcaatcaggactccacttggaatgtccataaacttaagcatttcttccctgcttatcaagtggaaagtatcctcaaaattcccctggatccaactttctctgattctcttatttggggatttcacccctctggcattatcactgtcaaatctgcttaccatcttgcctcttcccttgcttctgtggatgttccctcctcttccatccccaacccttatcaacattggtggaaaaagctttggtctctctctgtccctcccaaaattaaaaatttcatttggaaagcctttcaccatat

SEQ ID NO: 359109 - DNA, 830 bp, Cannabis indica
gtttttgttattttatagttgatttttcgttatttgtattgttattttattgtattttttataaaataccgtaaaaatgtaccaaaaaaattaaacgtaaaaatataaaacttttaaaaaaattagtgttttatgtaatgattacaattaactaccttcaaatggtgtttcacataaaaataagtgaaaatcacattatttatggtttatatgactttattttttagaaaaaaaaaaaacttttaacccaggaggaaattataaatgtcatggatttttatactttttgtttgtgcaaaaataacttttttaaaaaagattatttatgagaaaattaaagaaaaagttgaacaatatgagaaaattaaggtaataaggtactgataggtaatcaattatcataaatggggtaaccagatactttatgctgttttttctatatttttcttaactttttttctgaaattttctaataaaataattcgttttttttttgagaaaaatcatatttttgcaaacttatactttaaaagccaaaaaaataaaaatttctaaaacaacattctaaaattaattcctctaagcttttctccaaagcataacaataaaaattatagtattttatgactgcataaacccataaaggtcatatgtgcatttacaacttgttctcttcttgataataaggatgaataactatgaattccaaccatgagtgatttttttttatgttcaattttccaaattccatagatttcccaataattcgatataaagtcaatatatttttaggaaaatttacaaaatactaaaatttagattaattttta

SEQ ID NO: 359110 - DNA, 524 bp, Cannabis indica
caatataaatgtgacacgtgtataaaagtgtacacataagtagtctatataggaagttaattgtggaaaatagatgtcactttaaatttgctaccagttcactagtttggaggattttaccatcaaaatttgagtttaaaaagttaagtgcaagtaaagtgatagttgagagagtttaaccgcaaaaaactcatataccaaatattgcatactctataatccataatgcatggtaaatctatacaaccaactcattcaactaataaagttaaaaaaatataaattactattttagataatgtactttacaaaagttacagatttcactttctattttattagatgataattcaaacattgtatttttcaaaatagtacaaaatagaccaactctattttcgtcaacttttctttttaatataacaaacttgaagccaatttctagcataaacaaataaaaaaaaaaaaaaaaaagattaactagtcttgttataacacttctatattagtttattattttttta

SEQ ID NO: 359111 - DNA, 333 bp, Cannabis indica
ggttgctgcccctccaaaaattttacatgcttctgctcaaaaaaatgattaaggatgatgatgctcttcgattataggttttttttcggtttctttttagtttccccctatttttttaattttttcttatataacttttgtgggttttatgtttattcttttcattattttaggttttagagtttctaatttagttttgcaattctgttgtttttttttaggttgtaatacttctgttatattaatttaatgtatgtttattttattttgtttttccttttttgtttttttagttttaaattctattaacattttttgtttgttttttttttt

SEQ ID NO: 359112 - DNA, 708 bp, Cannabis indica
ccgactacgggttttgtccaagcccttggtccagatctagatcccaatctcgggtcctagtctagttccatttctggtgcagggtcacgagctgggtcctagtttcaagttcgggtctgggtcaggtactaggtctcgactatttcagttttccaggtccctataatgattctgggtcctggtccaagttattgggtcggtttgggtgccggtctaggtctgggttcgagtcttggtgtcggctcgggtttaggtctctttctggatttttgtctaggttcggatttgggtttaggtcctcgtcctggtcctcgtcctagttcagtctagttccatttgctattctgagttcgagtttgggtttgagttccggtcaaagttcgagtccttgtctgagtttgggttcgggtcctgatttcagtctaggtccagatcaggctccgggtcttggtctaggttgggtccgagtcccaagttccaatcccgatttgagtctggattgagttctgggtctaagtccatggtttttatcctggtctgggttccacttgggtccgggtccgggtcaagcttttggtctgattctaggtgtgggtgtttgagttcgggtccgagtctgtgtatgagtttgtgtccaggtctgcacccccatctgggtcaaggttcgggtccaggtccaagttcgggtctcgagtgcgggtcaaagtt

SEQ ID NO: 359113 - DNA, 728 bp, Cannabis indica
cataatgttgggcgagccccatatgagaagcccgccaaatttgagttttttgaaagcccaacattttccaagcccaccgaagcttccttttccaaagcctctgttgacttccttcttttattatccagtattaaaacattctcatccaaactatgtgtagctgattcctccatttgtgagtcagagatatccacaatgagattctttcccttattagtcttcctaaaatcttgcaaatccacctcatgattcaaattagcttctttttctccacctttctctccatgattcttgccaccttcctctccctggttgtcactttccatattggtctttcccatatgattctccaccggtccaccactgctctctccgaccaccgcccctggagtccaccctcgggttctaagccatttcgcaccaatgttttgcttacggttctggaatttggctctcatgaattccccataaggcttaacgatttggtctaaaggtttgtcaaagagtttgacacaaaacctttctgaatgtccaatgattccgcatataaaacaaaatgttggcgccctttcatacttgaaatttgcccaaaatgttgttccatcaggctttgtcaatctcatacgccttctcaaaggtttgttgatgtcgatggttacccgcactctgaaataatccctccacacgcccaaaaaattcttaggatccgactccacaaactgccccat

SEQ ID NO: 359114 - DNA, 547 bp, Cannabis indica
ttcaggatgttccactcccacttagttaagaaggtttggttcatttcactatatttcttgaaccctaaatcccctaaggatttcggaaggcacattttgtcccacgctttgaggtagatctcgtggttttctttttcaaactcccaccaaaagtcacgcaccatactatcaattttggaggccattcgattaaacataatattatattaaaatatacttatacaatacaattcagcatatcaaatgagctcttaatgtaataaggattactttacagaatactaaataaaataaaggagttttaattgtacttcaaaaatttataaataataatctttattttatataaaaataaaaagatattttaatattatgataaaaacaattattttaaaaaatatttgaatttttttttaaaaaattaaaattatacatgtttttaaaaatatatatatgaatttttttttgtagaaatattgacattaattcaaaataatgtgagtttttttctaatatattaagaatgatttttaaaaattattttaag

SEQ ID NO: 359115 - DNA, 656 bp, Cannabis indica
gtgccttcaagataactcaaaatctcttcttggtcttttatttcatatcgtcctgatcgtgtggctagaaaatttggatttgaccaacatgttcctcatgatcgtaaggcagggagtctagaaaaggcaacaaaatcatgtttgttaggttctcttcaagtttcaaaacgttcgcataacttgttccaactcccatgtaaggagaggcagggtggggtatcctcaaagtttgctaacttgtggatgcgccaaaataacatatggtcagtctgtcaaagtaaatatcgtgatcgcgaaaagggtatggactctaccttattttttcttatcatgcatatccatttattacatatttatgtattgataatgtcagtcctcccttttttttatgccttcatcacgttgtcatattcacatttatatatgtgactatgcatatatcatgcatacccatatttatatatattaatcatcacctgatctttgataggtccgacagaaggagaggatcttaccaccgaaactggggcacacatcacttcacaagaagcatagcctgtggaccctcttggacatggcttggttggtgagcgtcatgttccttctaggtctataccggatgatatgatgtcggcctttttggagggtgaccaaag

SEQ ID NO: 359116 - DNA, 603 bp, Cannabis indica
agattttgttttaaaccttacttgatttctatttattgttatatgtagtatcccacatgacaatgaccaatcccatgttgtcactattgactgataataagctgaatggatctaacttcccaaaatggaaagagaacattaacattgctctcataggtgaaagtgccttgtttgtgttaaatgagccgtctcctgagcaatcgggtgacaatgtaaccaaatctgtaaaggagaagtacgaacgttggcagaatggcaacaacaaagctcgatactttatactttccagcgtggtagacaccttgaaaacaaggtttgcaaacactgacacggctgcaggaatcatgacggagttaactattctattcggaatggcatcaatcaaatctcgctttgaagcgataaggaagtttatcaatgcacggatgagtcctcatcagaatgtacatgatcaccttctccaaatggcaagttatttctaggaagctcagaatcatggagctcaaatggatcagacaactcaagttagtctaatcttgaatagtcggactccagcttttttgccctacacctccaattatgtcatgaataagaaggaacaag

SEQ ID NO: 359117 - DNA, 786 bp, Cannabis indica
ttaaacatgtaattaaacacaaatatggataaattcacaatcaagaaaggaaaaatagcaattatcattaaccaaaagtaatttcaatcaacattcatcatctccctaaataggagttttgttcataaaatccataataacatccataatcaaaactaaaacagaaattaacatagaaattaaaagtttaagaaagaactagttggtaattgcattatgaatcaccaccattgcttcctctgcctccttctttcacttttgggtccaatttctgcctcccttccttctaaaacatgagccccttatatagaaattagggttgctacctttgaaaaagtcaaaaattggccaaaaatctcgtatttcgctcctgtcacgactacataaagcctagtcgggaccataggcaaaatacaaaaataaacttgctgtctggcctcctaggcgcgaccatgaaaaagggtcgcgaccatggaaagtggtggccgcgactactgaagcaaatttgacaacttcagcatctttcagtaaaatgtgcataactttcacatacgaactccaaatgagttgattcaagatgcgttggaaagaaattaaaaacttctatgttttgactttttccaaaatctgatcagaacatagtcaaatataagcttgaagtttcagctttattttcttgcagaattttctctattctatagattgttgttttccgaaatttaatcaatttatacattccaattgtgaaacctgaaaccaaagaaaacaagcataattctattccaa

SEQ ID NO: 359118 - DNA, 594 bp, Cannabis indica
ctacttcgatcgggtttttttttgggtcggaagagatttttttttttttggtttgatttgctctgataccatgatgagaatcatgaggttccatttcaaaactaattggcaatgggaggagtagcccattcctcttatatattctattatctttccacacattggcaatgtgggactctctaacagaaactacatgtatatattgctaaatacgcatataagtataaatatatgtatagaatatgtaacacacaaatttaagtagttcggcagaatatcatttgcctacgtctacggtagcatttaagctatgattaggttttattaataaaatagaaatctacaaatttttgagaaattattctcaataatagtttcagctgtgtgtaaatgggtattttagtaaaatagaagtggtatcaatgcaaactatttttgtgtagagagaaaaaagataaataagaaaggaaaagaaaaaggtaaacaaagagcgtgcatataaacacgctttttttttttttggagtttatcttttcggaaaggtttaaggtgaaagattcaagggagtttgtatacaagcatgttgttatgctt

SEQ ID NO: 359119 - DNA, 1425 bp, Cannabis indica
gacacttcctgttgtaccactggattggtgaaatatatgaacccaacttaagagcaaatcagtaggtggaaactaaatgaaccacaaattatgggatagaacaaaagattatagggtgaccaggatagcgatcaaagtgtgtataagaaatggcaaccttatcttgagtgttcaagatgtaaaaaggcgccatttgggctaatgtagagccaaatcttgttattgtgggatagcgggtcatttgaaaagaacttgtccacaattaagaaagactgatgttaaagaagaaaagtgtacgagtcatgtccaagtgctaattatgatttaaggggacttgggtatcggtcttttgactgactcaagttagaaatttatgtgtaagattatagttgctgtttcaattgatattgatatcaaacattgtacactcaatgaggggatataaaaatatctgaatgggcagtgcgtgtatgttatttagtgataactcatttgacaaggtagacagattagaaaaaaaaatggcaatatgagttaaatttgctgatattcccaagtggaacatatgatctgagtacttaatgggagtatccatctaattgatttggagaacaaagtcttttgatataaagtgatctagtgttagtataagtggaacaaattatgagtattgttcaaaaccctaggtgaattaaaggcgacgattatgtgggtggatctattcactagcagagggcatgagtcatggtgtgacaattagagtcccgtgatctgggaaggaatgaccaggagctgtataatccacatttcttaggggaaaggttgtatgtaatgattttgagatgatgtatgaatgggactacatggtgttgaggacttgaatgaattgtttgagactacctatattagcaaaaagtatcctgttttggtagcccatcatgaaagaactccacagttaagtgtccttgacatggggtgattacatttaggaagtttccccatgaagcgtgcgagttagaataaagaatgttgaaaactcttggatcggtctgtagggccagtcgtcagtctaggaagtagctaaagtgatgcactcttgtataagagtcattattctgtgggtgtaaggggcctaatgtaggcttgaagcggggacattgctagggtaacatataaaagaatgtcagaggagtagtggtatcactaaggcaaggaaaattacctggattatatatggtgatacggtaatgatggaaaatacttttatatttgaccagatggtcaatctagtttataaggagactattgagattctgagaaaggattaccttattaagcaatgatgaaaagacatactcacccaaattgggggaaaggcttataaattgagatgcaatttaatagacatgtattcgagtgattggt

SEQ ID NO: 359120 - DNA, 858 bp, Cannabis indica
cgtcagcctaataacccaaacgatcaggggttgcaatcttttcctctggaaggagagaacatcctggttattttgggagggctacatattgcaggagaaacaagtaacgctcaaaagagatatgtgaaggaaataaagaacgagcaaccggtctttgccccagaaccttccacaaaggtgaaaatcgaggaacctcccattacattcacagagaaagacgagaagaatgtaagataccctgacatcgatccattagtcataaccattcagctagccaataagaggatcaagaaagtgttaatagataatgggagctcgttaaatatcatttataaggatactctaaagaaaatggggctcgaaaaggccaagttaaggccttgtatggtgaatctttgagggttcaatgggatagcattgcaagccttggcataattgagctcgcactaactgtaggtgaggcacctctaactgctactgttatgcaagaattcttggttgttgacctgccatcagcttacaacatattgttgggtcgtccagcactgatcgaactaggggcagtcaactcgatcaagcacttatcctttaagttccaaaccccagatgtcgtgggggtggtgcatgcaaacaaaatgctggctcgtgattaccgcattgagctgtagcatagaaaggccgatcattagctgatgaccatcttggcaggagaaaacgagaagaaagatatgttggattttgtgccctaaataaaacccatttcaatataatcagatttacttattaataaagaccagaaataacattttatgtttcatggttcacatgatttatttcatgattatatatataatgtat

SEQ ID NO: 359121 - DNA, 632 bp, Cannabis indica
ggtaaaatatttccaacagtcaagtactcaattatagtgcggaagacggtggtaaccaacccgaatgagagaaggagatctaggctcagatcttgtattactctacgacagaaagaaacatgggttagagatctgagcggaaggagtcatattattccgctgcaatcaatgttaggttttctaaactcttatgtgtttaatttcaacgtattagaacttcatatttatggtgttaatgaaacatactttttagtatatctaaatcctggtaaaataaatcccaacagtaacatccctaaagaacttcctgaacttcatgacaacaaagagataataacttatttcaaggtagtaaaaaagattcaagtgaaggatgaaaattcaacatcacttcattccttaatacaactccagtctcaaatgaagaattaatctctaatgcttcaagttctcatcctaatcaaactctcttctgactctttctgaaaagaaacacaaacttacatttgacaatgaaaaaaagaaacataaagctactgacaaagatgaaaagaaccacaagacttctaatgaagatcaaatgcagtagattgctttgcagtgcatctcttctattggaaattattttacca

SEQ ID NO: 359122 - DNA, 968 bp, Cannabis indica
tgtttggccactcggagattctgcctctcctcatccacaggaaccagggtcaacactatgccatgaggcacagtgtattcctccgcctcggaaggaatcccagagtcgttgcttggcgccggagtgtcccccctccgggtccgcttagaaggctccacctccaccatcttgcctttttgcttacgctcaagggcggccgcgtctgccacttcaccttcttgaacttcctcctcctcgtccaccaagacgattgtgcccgaaggggcgttggaggaggacctcccaggagtaaccaactgggaggctgccagaggtgtagaagcatcaggactgtaggcctcagcaagagttgccaagagattgtccatgggcctggctgctgcaacaaagagaatatgttaagtgctaggacattcatgagaacagcatacactttgcaaaaaagcaataaaactagtcctacactgactctctaattcgaccctagcaaagtctcgaatcatgacgctggcttcgccatccccgagataactgtccgagggaagaaaccagttggaagatacgtatcttgaatgatccaagggaataggcgccggaggtccaaaacccagccgggaccgacctaagtaatggcctaagtgggaaaaataacactccttggcatgattaccccactgggtagaaggcattctaaacctatggagacgctcattgaaccctgtaggcctaaggctggtatactcacggacaggaggaacataatgtattgttaaagaggacttaccagaacccaaagtgctggcattgggagctccggtatttgggactgggaccacaggcttgggcctgtgggtcctctgctccggcggagcttccaggcggagagtcctcccagcgaccgcctgggccttgatataggccagctcctgttccctcttgaagagatacttctggtacttgtcctccgc

SEQ ID NO: 359123 - DNA, 716 bp, Cannabis indica
gtgcctctttgaggtgaaccctatcttcgtaaagaaatcaagtggcagctgcttttacctttatgcattcacacctaaacacaggtatacattcgtctcaggttttgtgcggctattattcatgtatatttttattcatctatacatctatttactaatttgctccttctactgtcattattttatttatttacacaatcttttctatttccctttttttttttactcatcaacaaatacaaagacaaaacttgagcctaccaaaattattgcatcacaaataaaatgataaattcaagatctccccttttctagttttgtaatgtcaaaatattaatttattaacaaaaaagtataatttaataataaaaaaaaaggaaacaaacacattaatggattggctaattaagatttttgccccctgaactttgacatgtaacaaatcatgctccctgaacttttaaggtcattaaaaatgtctcctgaactattgagattgtggatttaaggacttttgtctaatttcattcaattttactatttcagtgattatttatatactaaatcaagctccctagactttgatatatctctcaaatcatgctccttaaactttgacatgtactaaattataactccctggactttcattcatgttagacttttttactaaaattaaaaaaaaaatccttaaatccaacaatgtcaatagttta

SEQ ID NO: 359124 - DNA, 523 bp, Cannabis indica
aacaattggcccatgaagtattgaataacataaaactacaagttcccaaccataagcactttattctttaaatcaataatagaagattgcaatttatttgcttttcgaaatccatctttgatcgtagtagcatggtgaaaaaatgacattgaatatttgaatactatgaagggaaacaattattttgataatttgcaacaaaattacaagatgacttttatttgtgaatcgatgactagatcaatctattcaaaacgtcgggaaacattattaagaagggaaatttcactttttgcctttaataatataccccatatcaaattttataccccttactaatttatacaaaacaattccactattttcaaattctacccaaaataccccttacatttaattttcccactctctctttcccactctctctttccctctctctgtctttcccactctctctccgacttttcctcttcgtccctgcccaaaaacaaaacagttgaacgacgacgacgaccacgcattt

SEQ ID NO: 359125 - DNA, 974 bp, Cannabis indica
tttatggtgaaccagcgaggaattgaagctaatcccgtgagagttaaagctttggtggaaatgcgatctccgaccaaaccaaaggaggtccaaatccttacaggtaaagtcgttgctttaaatcgctttatattacgttcctctaataagtgaaaataattttttcaaattttaaaaggcaataagaagtttcagtggactgaaaagtgtgaagagacttttcaagctctcaagtcgcatttggggcaacccctattcctttcaaaaccgatgcccggagagatcttatccatctacctcacagtgttcgaatacgcgattagttcagtactaatctgcgaagaccaaggaaaatagtatccagtgtattatgttagtaagcgtctcttagacgctgaaacttgtaatccgcagatgtagaaatcggcatttgccctggtaatagcgtcaaaaaaattgtttccttatgtccaagctcataacatcgaagttttaacaaactaccctttgaggaaagttttggcaaaaccagaagtctcaggaagattgttaaaatgatcggtagagctgagtcagttcgacatcaggtacaagctgaaatctgcgatcaaggggcaggcccttgcagatttcatactcgagtttccaagcactgaggtagcactcatagaagaaaaagttgatcctgacgtaccagacggtgaaggatggactttatatgttgattgagcctccaaaagcgaaggctcaggaggtggtataatactcataagccccaataattttaaggtacatggtgcacttagatttgaattttctgcatctaacaatgaagacgagtatgaggctttgatcgtaggattaaaactccctcttgagatgaagattgaaatgggttttatgccctaaataaaacccatttcaatataatcagacttacttattattaaagatcagaaataacattttatgtt

SEQ ID NO: 359126 - DNA, 527 bp, Cannabis indica
atacacaattaaaggacggtagatgacaactaatcttctaaaatagacgtcctatccaaaataccagattggctaaaacacaaaatacaggctttcaatattttagactgcttgtcgtatgaagcagactgtgtgtcgtatataatagacgacttgttaaaacaattaaatttacaaaaaaaatgttaattaattgttaatactacaaataaatatgaatatagataaattactaaattccactaatatatcctcaaattgaactaggagaccctatgcaactgttatagtaagaccctcatattagataaccattgcgtgtcgtaagccacaataaatttactatttttttaatttcaatacttccaattattttatgacaatcgtaattaagggttgaacccacgaggactatatttatttaattattcactattaaaaagaaattaaagggggggtcgattagtgactttgtcgcaaacaactactaatgatactgtaatgaccgctttagtaatttggattag

SEQ ID NO: 359127 - DNA, 1848 bp, Cannabis indica
tcaagcacacaagctcgtagcatgtctctagaatctgaatagttctctcgaattgcccatctgtctgaggatgaaatgttgtgctaaactttaactgagtacccatagctcgatgtagactctcccagaatctcgatgtaaacttcggatctctatccaaaacaatggactctgggacaccatgaagacgaacgatttatctgacatataactcagcatactggtcaatggagaaattcatccaaacaggtaggaagtgcgctgactttgtaaacctgtccactatgacccacacagagtcaaactgtcccgtggttctaggcaaacctaccacgaagtccatatcaatatcttcccatttccactctggtatgttcaatggctgtaacaaccatgcaggcctcttgtaatatcccgaaaataaataataaataaatgatatttaaaaagacatattttattaaacatgtgattattttggtaacgaagtaagattatgatcttacttagggtaactactgagaatttatctaatgatatataaagcgtaatttattaattacggagattatattgagatatgtgggtatcgaggataccactattttttaaaaataaaatatcaggcctggcaatttcagttagaaatgtcacgacattgatggaagaattattttgagtgtattccggactaggttagaaattttagaatgtctgtttaatggattagtaaaattaccaaaatgctctaagttatttaaaagtttggaggggtagattagtcttttggtaattatatattcttttgcccttttgacttttctagggttggtcattatttttttttaaaaaagaaagaagctattaaatagaaaacttccaagggaagtaaccaaagaaaaaaaaaacaaaacaaacacaacaagcaagctttccctctcttcttccttcgagcagctacaaccagccaacatagggagattttctccagctatcttttcctcatctcaagcagaatctaaccccaaatcaacctagaatcttgaggtaagcttctcccttatgttcttgatgatttcctaggttttaagctaggtttttattagttctttatgggtgttcatggctgtaggcttagatgagttctgagcatgatttcttagttgaattaggtttgtttgtgcatgttttatttgattccatggctgttgggattgtattgtgtttgaaggagctaaaggaattgagtttccttcacttgagtatatgattttgagttagagattgaactactgtaatttgaagcttgggatatgttatatttatgttattatactgttttggaaagtttggttaggtttggtggagttttggctcgaatttgaaggagagaacccaaggaaatctggtctgccagaaccggtcgaccggttggttctggtgcactagaaccggtcgaccggttgccttgcaggggaaatttcttggttttcttcaggttcagtttttggcccgggaagttgtgtatcatctattttgggttttatatgggatgcttgacctattttgaagttgttgggagttgggttatgcttggttttgagttagggtttttatttcggaattttggattaaggtattcattgagttttaattgtcgtgacataggaccggaatcgcctagcttgttttccactcaggtcggcccgtacgcttgagttctgaactaaggtaataaaagtggtaagcaccgtatgtggctaaatattaatggttgaagggttatggccttgattattatccagactttgattaaatatttgttgagcctaggttatgacctagggt

SEQ ID NO: 359128 - DNA, 656 bp, Cannabis indica
aaaaaagtcgtccccctcaacttaaattctgagtccgccactgaaagtaactactaacaaaaacgccacaacgatatagtgttgacctaacaacaatgcccattccaattaagtataatttagaatgatcacattttatttttattttgatctttatctcggctggagtgatacgatcatccttacttgatcgtagcccatgaaagtacaattcaatgtttctactttacaatgacaaaaagttattatgcgatcgatgcacagtacccatcactatctcatgtaaccttattatgattaggggatcatgtctgggtgggtatataatatattgatttctatatataaacaaacacgtatatataggaattacataaatgttagagaggccaccttaagatgtgtcaagcacatcgtgtataaatatagtaaatattattagcaaatatttttagttatacgatttagttttttttatatatatattatttaatagaaaaagataattaatttaagtattatttaataaaaataatataatattaaaaatttatgttaattataattttagtttaattattgtaatattttctaattttataatacttttaatagtttttaaaatattatatatattattttttaaataatatcag

SEQ ID NO: 359129 - DNA, 697 bp, Cannabis indica
taagattcatgttattatgtatgtttacaatattagagcgtggccattgctaaagttatatatttaaataatatatttataagattcatgttatttaagtgtgtatataaatagtgtgtttttaagattcacattatttagttatgattgttatgttatttaaataatgtgtagtagtttgacattatttaaattaggtagattatagcttatgtgatatgatttgactgagaagataatagttaaatacttgactgatgggtctatatggtaaatagggggccatttagtagtgggtacgattttactgaacccagccctccgccatttagtccaatagcttaggtttatttgccaaagtcaaactcgagcgtaatcattattatgtgatttagcttataacctagttgttagttactagtgataaaattaagtttatgtattactacttctctaaatatgcatgtacgttttagttttattttcttttatgtgactacgtttacaagtatttccatactgagtcagtagctcacccttattaaacttaccatgtgcagattgaggttgtaataaaacgtagaattaaagccgatggcaagtgatgctagaaaaattaataatatacccaagatctatttgtatataacatagaacacaatagtaatatataataattaggtatgtgtacctgatt

SEQ ID NO: 359130 - DNA, 924 bp, Cannabis indica
aaaaaaaaaaaacttgttgtttggcctcctagtcgcgaccatggaaagtggtggtcgcgactactgaaacaaaatttgacaccttcaacatcttttagtaaaatgtgcataactttcacatacaaactccaaatgagttgattcaagatgcgttggaaagaagaaaaagaaatctaaaactttttattttgactttttccaaaatctgatcagaacatagtcgaatttaatcttgaagtttcagctttattttcttgcagaattttctctattctatgttttccgaaattcgatcaattgatatattccaagtgtgaaacctgaaaccaaagaaaacaagcgtaattctattccaaatataataataaagaaggaaaacaactataaaaagtgacccaaaatgtaggctaaaaatagcctaacaaattcccccaaactagattcttactcgccctcgagtaagactaagactaacactaaaactcgattaacttagctatcagataattatattattgctggctcatgtgaaatttcctttcattaactaaactagattttcaattccaaaaactctaacaattaattaggatgctcatcttatcacacaatgtacagatacaaactaacttcaatattgaaataatgtcataattgtttcactccatcaaatcagtccacaaactaatagccaatatgcttgcatgcttacctctctccactaatgttgacaacattcttttcggaatcaaaaggactttttaggtaagaatttatggcttagatatttggaaaatgaaagacaattttggctaaagatatcataagcacaaaagaacccacaagcttctcataatttaaaatttcccgaagtgttcccacaactaacaatgattgagatttttctattttttttttcaatca

SEQ ID NO: 359131 - DNA, 866 bp, Cannabis indica
gcttgaagttccccactcaagaagctgggtataggaaccgtgagaggaaatcaagggtaggccaggcagtgttacaacgttgctgcccacctacccgtcctgatggtccgagaaattattgagccaaaaatggcagaagaagatgagttggatccccgcgtgggatccgagaaaattgtagaaccaatggaggatgtcgagaaactgtcagtgtgcgacctcgactccaccaaagtcctcctgctaggaaagagcctagaacctgaggaaaaagaaacaataataaagacactgaggggcaccacggacattttcgtgtggtgtcaagaagacatgaccggcataagtccccacgtcataacccacatccttaatgtcaatccggacatgcctccggttcagcagaagcgacgtcccctcgactcagtgcaggcagaagccttagagaaagaggtggacaaacttctaacgagtggcatgattcgagatgtcgactacccagaatgggttgccaatccggtactggtgccaaagcccaacaaaacatggcgggtttgtatagacttcactgatctaaaaaaggcatgcccaaaagattgtttccctttgccaaggatcgaccagatggtggacgccacctccggcttcaaactactgtccttcatggacgcgtacgccggttacaaccagattaaaatgcacgtcgcagatcaagagtgcactagcttcaggacagataagggggtatactgctacttagtcatgcctttcggactgaagaatgctggtgcaacttatcaaaggatggtgaaccggatgttcaaagacctcctggggaaaaatatggaggtatacgtggacgaaat

SEQ ID NO: 359132 - DNA, 579 bp, Cannabis indica
cccggttgtctgggcagcaacaacacgaaaaatttcaatatttaagcccccataacctactcaaatcttccccaaacaccaccaaactttccagagcatcaacatatgacatattaaacatattccatagctcaaacacaataatttcactaaaaatcaaaaagttccattaaagctccaagcttgagttctatgaactcaagcttgctttacacaacaccatccactaaaaactgagttaagaactcacaaataaactcatcaccaacctgttttcatcactaaaagcatactaaacaatcaagatgcaaacaacacacacccataagctcatatacaccaaaattatcactaaatctcaaaatcacaacaacaaccttttcatgctctaaaaaccataaaattcagcaagggtaacaaggattaaagctacaaagtttacctcaaattcaattcaaatgctagcacaaaattcctcaatcacaaagcctcaatccaagcaaactttaagtaatttctcaccaaaacaagagaaaataataagagggtttgtgagagagagagagagagaaggtcggc

SEQ ID NO: 359133 - DNA, 1552 bp, Cannabis indica
tgaccagtaagatcacggccccactcaagaagagtatcaagacaaagtttagttttctcagcaagggaaagtgtagcattgagctcccaacaacttcgaacaatttgactacatagaggctcacggctccaagcattttcataccgaaaaatgaccactggtttactcatcacacaaggtgcaggttcaagaaaaataggcgtatgatcggaggatgaaaaatcaaaatttgacaaacgagcctcattaaaaatagttagccaagactgagtagcaaaagctttgtctaaccttatttcaatgtgattttgagtcccttttccacgctcccaagtgtacttatgaccacgcagttgaagttcacacaatcggcaatcatggagagcagtattgaagccgtggatcaaagattgagggtaaggacgaccgccctttttatcatcatgcgtggtaatgttgttgaagtctccaaggatacaccatggtaatggtgaagaatcggcaagctcacgaagaagattccaagttgtatgtcttctcgaacggtttggctcaccatagaacccagtaagacgccaatgaacaaagccaggaacatgaatctctaagtcaatgtggtgggccgaaaacttaagcaaatgggcatcagtagcaactttccataaaaaagcaataccaccttttctaccttgggccggcacagaaaagctattctcaaagcccaaccgaaccttgagtctatccacaatgtcattgttgcataaagtttcacaaaggaaaataaagttgggcttcttttgtacacagagatcaataaggaaaataaagttggacttcttttgtacacagatatctatgagataattctttattaactttattaaggaacaattgtcatcataaattttcaaccacttaccatacattaccttataagattctgctaatgattcatcatcaagttctgactcatttgaatctaaaatagcttctttatcgttgtcatcagtcaaagtgttgtttaaacacaaaaaaatttctttttcctgtaaaaaacttgacaaaacactgttaaagtaatgtttttatttttgtcatactattttcagaatcattatcactccaagtaacatcaaaggtttttttattttttttcaaggtattagcacattcagattaaatatgatcataccctttgcattcgctgcattgaaggtacccttttgaatattgagaataaaagatttagatgcatcattaccttttggagtttttgtgaaattctttttatttctaatattttcatgtacttttgaaatttttttgttaacaaagtcatttcatcatcactctcattgtaagcttcatatttttcaaaaactttaaaggcaataccttagcttttctcaacggaagagtttggcttaacctttataccatacatttaaaactcataatccataaatttaaactttaaactgttggaattattttaccaggatcttagatctactcacaagtatatttattaacatcctaaataagaactttc

SEQ ID NO: 359134 - DNA, 627 bp, Cannabis indica
atctaatattatgtatacatgtagtgtaacacttacaaaagtgttttagtctctcaaagtggcgctcatcctaatgaagtatacatattagaattttacactgaataagatgaggcgccaacaaatcaaagataaacaagacacttgtcttgaaaatcactgatgcaataagccctcatcaagacaaaattacttatagatatattcagtctaactacttcaacttatgccggccaaatcattttcaatctaaaatcacgctacaggcactctgagtcaatcatgcacacctacgagtaatgctctttaacttgagtataactcaacttaaagagcaagggacaaactgtagtggccaaaaattgctctaagcccaacgaaaaggcccaacgatcgaagtacttacgaagcccacttataagtcagaaacaaggaacccgtaagcccaatggctcacatgggccacgcccaatccatgccttttgggtcatacccatattcgaatgtccaacccacaataaagcttgattttaaagtgtaatgttagggttgacgcgtggaggaagaagaacgttaagtttcccaactaacccacgaaaatagcgatcttccctagcatagcggagc

SEQ ID NO: 359135 - DNA, 2792 bp, Cannabis indica
ctggccaaccttacctaccggacttcgtggatcgtcgatgaattccatagccatatgtgcttggcccagcagaatcaaatccaattctctgaaataataacaattccttgatcatgggagtcgactttctctttcattgaatttaattcatttggaattgttgcctgagattcatcttcccccacatattccatctatttctttgaacttctgatattcggcagtcaccacgatcgtagactctaataccaattgatgtgccctgtattcaacactagctaaatgcttaagagctctatatgaacccaatacatgcataaaccccataaatctcactcacctcccttaaaacagcttgcaactattcaacaaattacataagtaccctcactcaagagaaagaccaatccacccctgggcagtagtgctctctcttagccctcctagcataagtgtaacgcacctaggtcctaacaccacaacaataaactaaatactcaattatatatcacaatatgataggatcgtaagcgattaaatatgttcaacacatccttagagatcatatcttatgtcctcaaattcaagtaatttggcaattggataataatctctcttcacaagatattgagaacaatttagtcaccaaatggaaaaaaaaaaaaaaaaaagacttcctctcaattttcttctttttaatttgggtagcacaaacctcattttgggtagccattggttggactcgttgaggggtgactaacatcattttaaaaacacgttttatgaaatttactatgggtaatactttgtacaaggtgatttggaattacatcaaagtttgatttgttgatggcaagatgagttgagcaccactgaacatgacgggcatgggatgattatttgttttttgatctggtgacataaatggtgtacttagatgtaagttctaagacgattaacaagtattgatctgtatgacaatgttgtctaatttcgatcattgatgaactctttcaatgaattacactgttgcaactatctgttcaaagatcaaccttaagtcatcaccaaatctaagtcaaacataaagttgatctcttggatgagttacttggttatgccctttggctcaccaacacttcacccacattcccaacccttatgacaattagtcttggtactctttgactatattttggtgtataaacaccggctaaatgatcattcttgacatttatccatcaccctttggcttttgtgtaagcataagctatttgccaacctcaagaagtgtatgtctatgagggatagcatttggaccgcacaatctcaagtgatgggatggcgtggatcaatccaagtgcaagtcatataagttggctagagcctaagaacatttgagaaatgtgtggaatcctgagagttcctaggtactactgcaagtttgttcgaagttattgtgagattgcttaaacacaactaaagaatgatagaaccacaaatgtggtttttgaaactctcaaatgagccatcatcatagtttaagtgttatcactacctaattttgaccacaattttcatatcatgttggagaagttttggtgcagaggcatcactcgtggcttcatatagccaggctaggccaacaagtaaagagccatgatcacaattccagtgttgatggtgcctaattttgaccgcaatttcagtatataatgttggggcagttttgatgcaaaaacagtgactcgtggctttctgtagccaagtctaaggccaacaagcaaagtatgtgcggaggaaatgatggtcacggttttgctatccaaaaatggtgccctttcctacttgaccaacaatttgtggtgcacacatgccaacgcttaaagttcctaataaaacaaacacactgtaattccaaaatatcaacgttgaatggaaaaacttatgggttgcaatgtaagtcaggcactggtaaaaaggttgttgatgcctaccatgtatcaaccagccaattggatatcaaaacctacttgtctctaagttgattgggattcttcgaagcaagagttgaaaaatgataaaatttggccttgaatatttccatgtatctcaaatttggcgtgctcgtggcatgattaattcatcccattactgcccccttaactgagccaagatttggagttggtaattgactcagaaaaggtgattgtcatacgaaacacccactcatatgtgttgggaaaagtatggttgttgatcaaatggaaggacttgccttttttttaatcaacttggcagagctacaacaacttacagcagcaattgcctcattttcaccttaaggataaggtgaaagtttgaatgaaggcaatgataggcctccattatgatacaccttttctcatagaaaatcatagaagtgagattttgaaaaacaaaatcataccaaactttagatgtcatataatcagtttgattgtttttagatttccaaggattgggtttgtttttgttagaatttaggataagatgcatggtgttctatctcaaaaccaattggcaatgggaggagtaacctattcatcttatatatggtattttatttccacacattgtcaatgtgagactaactctaatacaccctccttatgtttgggcctaaaaagcgtgagtataatgtacgaccttgtggagtgccaaaaaagtggtgtattgctatattttagcacacctaaaaaaaactatactccaatggtgttctaaaaagtgtgctaaatttggcacatgct

SEQ ID NO: 359136 - DNA, 1243 bp, Cannabis indica
accttggctgcatcaagttccccttggagtttgtggcatgcatcgaccttatctttgcctcttctaagcagcttcaagctcggcctcgagggtcctcttcaccttcttggcttctttggttagacgagtgttctccaatttggcatcattttattgcttggtcacaacctcgcgctggcccatcaggttctggatctctctctctagatactttattttttccatgcctcgctgttgggcaacaaaggaaatgaaagatgtctggaaaccaacaaacgaaaatgcatgagtattttgaaggatgttaaaaaaaagaagtgagtagataaggataaggaaatttaccgagaggctatgagatacacgttttgtaagcatctccccaagatccccattattgattaaataccattcatgggggaggagagccttgaaatgacgccagcatgctgcaccaaactctgcagtgtactctgggccagtttttctagcctcgacaggcagagttttgagggcttggctcgaggagtcagaagcttgagtcgttttgggaataggctcatcggtacgtgcggggctgaaggaggggttggatcccgagtctcagtttcagggaccttgagattagcagtttgggaggctcgcttcttgttagcagtagtcttcttaggcctttttaggggctccacgtcgacgtctgatggagcctccgagatggtcaactttttctttccctttttgtgaaagagacccttgagattcatttctgcgagacaagataaagtgtttgcatttatcaaaaaataagtaaaagaggaaattggggcataatttcctgtctaaggaatttaccataagaagacaaagaggaaggactataatatccactaaaatccctacaccccgtgattccgaatatatcatagggattaattggttctaaatcccagctcgcgtctaagtggcttgccctatccagcatggtcccatactgctcggctatcctgtagtacgagtcagtacaactaatttggacgtggaacttgttggaattattttaccaggaccttagatctactcacaagtatgttgattaacctcctaaatatgaacttctaaaatgattataagtaaacacatataaagtatgagaaaccttacccttgtatcctttctgtcgcagagtattatcaagatctgagcccgaatatccttctttgttgaatctggattcttcacgatc

SEQ ID NO: 359137 - DNA, 534 bp, Cannabis indica
tattcatttttcaaaatagtggtgcaaagtaactattatattggttgtgtctattgggccaatagcttattgtttaaaaatgaccaacaaaacataagagaaagtagaaattatatttccttcaaaaaaaaaaaagtagaaattatatgaattatgggaaatatttatcattttacttttttatggcataattaaataaatctaatagagtatggattttttgttttatttacttttttatggatttattttagaaatttttacatcaaaaatccaatttactcaatttattataaaaaaacccctacacgcttacatcatcatttttacatttcctctttcttttattacaattataccacttatacatcaattccatgcatgcagccacgtcattgattgatgacttatatcaatcacaccttacatcattcacttatctttttctcttcttcttttttttttttattattttcaatttcttttcagtttttttttttaaaaaaataaaacctccatagctgaactcttctc

SEQ ID NO: 359138 - DNA, 606 bp, Cannabis indica
ctgcgaggggctatggacgagcagacggtctagaacgccggtggagccttggttttggttttttttatatatagtaaagtattctgagctcagcgggatgttgtgaatttattttaaaagtgcattcaactacttattttattttaatatgaatgatcattcgtcttttacatatttaaagtaaaacccgctgtgtatttctaaacagttttgagtcttttcaatttatgcatcaaagttagtattttgtaaaataaggcaaaatattggggcgttacaatttcaaagtttggataagttgtttatcaagtttcgttgtcgcgacatatgacccgagatcgtcgagcgtagttccactcaggtcgacccacacatctgatattggatcgaggtaagaaaagctatatgcactactaagcatgttaagtaagaaacaattattatcgtgtgtggctcgattatgattgaggtaaagatacggttattaccgttattgagaatgagtaaagatacggtcattaccgttattggaaatgagtaattacttacttgaaactgcagatagatttcttacttattgatggctttatcgggcaacgatagtga

SEQ ID NO: 359139 - DNA, 640 bp, Cannabis indica
ggatggggacggggggagcactccctgccaatttcccaccccgtgtgcatccctatgtacagctgaaaaggaataggggtcaatggggtgcgtgtgtgggggctttgggaccgaatatatgggaaatttcactattaatgtataataaaatacatcatatcgaatttgactctccatactatttgttgccaaataattttttttttgtttttttgaactaaaaaaataaattttattaaatcaaatcagctaccaagatagcttccaaaccagcaaggacaacaaccctgcgggaaacacaaccaggaatagaaccagaagaacgagctaaaaagttagccgcctggttcccgaactgcttaacaaatctaattgaaataggaaccaaaagagaggattgcataagagctacacaatccgaaattaaaatccccaccggagacaacaaacgcttcttctgttgcatggctcgcaccagcagcagcgagtccacctccataaccacaccagcaagcacaccccctttcaacccaccttcccttcacccaactgagcgcctccttcaacgccatagctttagccaaaaatgggtcgggctgaccataagttttaactgccagcgcatcaatgaatgaaccat

SEQ ID NO: 359140 - DNA, 457 bp, Cannabis indica
gtctggttccatgtttgggtttttgttcaagttcgggtttaggactcgagtccaggatttggttgggatccgggtccggcttccaattcgggtcttggtcttatttggagtccgggtcctggtccagttacggttctggatctatgtccaatttcaattatgatttcgagtccaagtcctagttctagccccagtcaacttcaagttttggttcaaattttaggtaacagggtacgtgttcgggtccagttttgtgtttgggactgggttcaggcccgggtgtgggttcgggtccttgtcacggttcgggtccagggatgggtctcaaatctagacaccgactacgggttctatccaagccctgggtctagatctggatcccaatctcgggtcccagtcttgttccatttctagtgccgggtgacaagctgggtcctaggttcaagttcgggtctgg

SEQ ID NO: 359141 - DNA, 887 bp, Cannabis indica
tttaaattttataatatgagtttatatttttttttcagtacagtattatttttatatttctttaagttatgttttgtataatagttagtattttgaataatagataatgtgtaatattttaatttgttgttttactttaaataaattaatagaattcttctgttaagtattagaatcaatatttaggatgtatttgttaattcttataaaagtataggttaaagaaagcatacctaattctattgaaatttcggcaacataagggctataattgaacatttccaaaaaatttaaagttattaataataacaaaaaataatctaaaacaagataaaacaagtgatgatgactttgataatttctaattatcattgtatttcccattaatattttaattcgagttttatgagtcaagtgttgtctagaataatagaatttagggttctagttctagaaacataattatctttagtttagtttaagttttatgatacaacattgatatatttaaatttaatgtgacattttattcatccttaggcgttctaaaatattattcaatataatttgtgagacttacacgttaaaccctaacaacaaagaaagcatattgcttataccaaaaattatgtacttgacttccgataaaatcctaacaaccaagtttaagagaaactaaaatcaaatattatcttagttctaccgaaatttcagcagcataacggttataattgaatgtttccgaaaaattcaaacctattaataacaacaaaacgcaattcaaaacaatataaagaatcacaacaacttttagcaatataaaagtttactacctatccgactacagtacatgtattcgcagaacctacttcactacggatgaatat

SEQ ID NO: 359142 - DNA, 856 bp, Cannabis indica
acttatgttgttatttttatgtgcattaagcaaaaaaaaatgcaagaataggtatttggaaatgtttgggacaaggagataaaggagaagaaaaatgcttaatgctgactggcattgctatagcaatcatcgcgtagcaatttgtcagcccaataagtgtattttggcagaagtccaactagcattaatgaagaaagaaaggagctgaggtggcgaaaatgtgaccaatgactcaactaataggtggaaaatgaaggacaagtggaccatcactgtgatttccgattagggtaaactttagtaccctaattggggagcaaaagagaaggaggataaatcaaaaggtggctgcactttgagaaaaggaggctggtacgaaattgtagaaaaaaaaaagaaatctaagtacataaaaagaaaggaaaagaagagagtacaaagaagaagactaagaagaaggagaagaaggcaacttacaaagaaaggatttgagcttcaaactcatttctcttgctctcctcttcattttgtatcattttctactctctagttttctctttaactccatgaacatttcattttctgggttgatgtttttaatttcagccatgaactaaaatatttgagatttgggtggttctgaacccttgtatggactagtattttgattttgcaatgattaagtaatcttgtcttagttcaattagttgtgatgaaatattgattgaatgttaatttttggccatctttaacatttagcaagctagttcttacttggaaaagtaagacttagttgaacccctccaattgatgcatgatttttacctttttttttaggttttaattagtagtgaaa

SEQ ID NO: 359143 - DNA, 588 bp, Cannabis indica
ttttttttaaaaaaaaaagtgaagagtggtcaagaatctagagagatttactatttataggacttgatattctttctctttggatatatgaataatattattgtgtgaaaatattaattttgtcaaaagaaagtcaaaagggaagggtgaacaaatcaatctactcacaactaccttactcattatctctatttgtgatggaatttttaccaaacaccacatatgtatccatgcatatgaaagcaactctcttaattgagagaatagtaatttacaatattataatttaatttttaattacagataaatatttaaatttaattttttatagtgataattaatacctaattatatttctagaacttctgtaaatacttaattatcaagtgtcaagtcaatagacatgtgacagtctcaattggtccacatcattaaatttttattttatatttaaaatttaattaaatatactaataagaaaatgacacgtaaataataacgttacacttaacaattaagtacttattaggggtgttcatccgatccaatctgcacttttttggtcaaacatccaatccgcactaagtg

SEQ ID NO: 359144 - DNA, 987 bp, Cannabis indica
tacacaatcatcatgtatctatccaacagtgttcgaaaaaactcatcacaaagaagacattgaaaggagtttgggataaattggaagaattatacttaaaaccatcaatagctagcaagatcaatgtgctagaaaggttatacggttttagaatgatttcttctctttctttagttgaaaatattgatagatttaataagattattgtaggtttggctaatataaatcacaaggttgatgaagaaagtcaggccatcattctgttgagatcacttccaattgcatatcaagaagtcaagattgccatcaagtatggcagggatgttattgcattggaagatgttcttgccgcatttaagtcgaaggatttcgagttacaattggagaaggaatccaagaaagaagaaatgtatttggcaagaggaagatcacccaagaaaatgagtttgaagaataaacaccagcactctcaatcgagattgaagtccagagagaaggacacaaggaagtgttacttctatgtaaagtctggacacttgcaaagattttgcaagaagtacaaagagtaacaagatttgaacgaatttcacaatggagataggaaggacttccgtaaacatcatgggaaggattctgttgtactcggagaaaacactcccatttttctgatccccctttccatttttctcaggggtatttatagagattggtggggatagttgaaaagggataatttgtctttgagtgccagctattaggggtgttcgcggtacgggtggtgcagtttttaatcattttttcaaaccaacccgcacatgcggttttttcaattttccaaactgcacccgcaccgcgatactaaaacccgcaaaaactgcaccccaaaaaatgatgcggtgcagtgcggtttttgcggtttatgcgatttgaactatcgcaatttttttttttaaatcatcataaaataattaaactatcattaatata

SEQ ID NO: 359145 - DNA, 554 bp, Cannabis indica
ggccaggataccctagagtctcagcaatatccacataattcgtacttcctctcataaaattgtcgtttcaagggttgttcttcattagtgaaagtttggagatcgtaaagggcatggaatagcggctgtggtagtcaggcactgtaaccccccctaatctaaactttgccctcttctcgtttcaggccagttggctaaaaacttccaaagcttagacgtttgattaccacgctccagtgacaatctacgaacttagtcctactgcctatgtaggatttgatccctaatagatgcaaaagcacggggaatgttggcagtttggccttaaggttcacaatgtactatcccgtactatcgttcaattgaattgtcccctatactttcaatttcaaaaacccgctcttgagcctccatgttcggtaaacctaacttctattcaaaggttagagcgtcccctaggtgggttagatgaatgaagctccctcctcattaactccttgaccgtctttggacccatctcaccaaaaaaaacttatatcctaaactccccaaga

SEQ ID NO: 359146 - DNA, 563 bp, Cannabis indica
cgacgaaataaagccaaaaagattttgaaaactttctttcattttgcgtctgttattaacagtcaattattttgtttgtgaggatttaaaactggcgtaaaattaaattataaaaaatgtaaacagacgcgaatttgatagattccctaaaagccaaataacacaaggccactgttcacacattcctaaccctaaaaatcttagaaagctctggcgaaaccaccttctcagccccttcaaattcgcccagttgctctccgaaaccagcgtcaaccctgtcaatcatcctctctaaaaccattatctcgacccttccgatcgtcctcttcgaaaccagccactcgagcccctttccctttccgtcgtcagcttcctcacggtggtggtgtgaagctctctgctccgatgtagctctcaatggaagcttctctcctttccctgtacttttttttaaggaatgcatggtccatctccatctcagctctaaaacttttatttttaaagcttgattttgtttatgaatggcagctctctgttttggttactaggtcttaggattgaac

SEQ ID NO: 359147 - DNA, 544 bp, Cannabis indica
acctagaaccacgggtttatttgactcaatttgggtagtggtggaccgatttacaaaatctgctcactttcgaccagttagaacaacctttacagtggatcagtacgcagatctgtatgtcaagaaaatagtaaggttgcatggtgtgcccaaatccatagtttcagatagagatctgaagttcacttcgaagttttggcaaagtttacaacgggctatgggtaccaaactgaagttcagtacagctttccatcctcatacaaatggacaatccgaaaggacaatccagatactggaagatatgttacgagcctgtgttatggattttgaaggtacttggagtaagtacctaccgttgatagatttttcataccataacagttaccaaagtacgatagggatggctccctatgaactattgtatggccgaaagtgtagatctcccatccattgggatgagacagggtcgaggaagtacttaggtccggattcagtggaacggaccaatgaagcaattgagaagattaaagccagaatgcttgct

SEQ ID NO: 359148 - DNA, 565 bp, Cannabis indica
acacaaaaggtggcatggatatcagttggtgaaatacctcggtcatgcggcttgtaagcttggatcgcagagcttcatagtccatcatgtccaccaagtcgtcggcttgatagacgacatcttgaagcttgaaaagccacttcttgacattgtcatctcgaagttgcttgtcctcggcatcattgagcagtttgttagctgataacatcctagtgttgagcttgtccagcagcttcagaatggattgctttccttggaacagctggggtatgtcttgagaagccaatctctcaaacagaacttgaagtgaggctgagagcaaagcaccagcaaccaattcaacagccatattgaatagcaaagcaagtagggaatgaagaatgatgaataaggcaaaagaaagaaagaagtagatagataataataatgtactgtatatcctctttccttgaaatttgagtggaaataaataataatggaatggaatgcccattatatgagcattgctattgggcaccagtggtgcctaacaccttctaaatgtgtcgacttgcaattggctagc

SEQ ID NO: 359149 - DNA, 547 bp, Cannabis indica
agttaatttcgaggacaaaatctttttaaggggcggggggaaattgtaaagaccacttaactttaatttggaaacatagcagataaatagggtttaattatggaacttgcatattagttatgaattatcagtttatggggatttatttgaattcagaatgcattttatatgttatatatggaatttcacaattttgtatgttttatgcccgacaacattagaacgcggtgtttggctattaaaatcacatcttagtatttgtttagtatagcaaagcaatatagttaggcattgggaatgtcaggtgttgcccctgattttgcccagtatacgtgaaccaatcagataaggacacgtggatcaagcaattcacaaatatttgctaagtctctatgccataaggtagcgtccagaacgtagcccccggagaaggcacatggaactacatatgctcccggagactcgaatagcgctaaggcatctccgcgaggtgtcaggcttctcctgaccaatcaagtcgcattaaatgccgcatgggaggaagcgt

SEQ ID NO: 359150 - DNA, 802 bp, Cannabis indica
tatacactagctattgccatcatattttgagcaatattggagagccatacattttagtataaaaaaaatgatactctctagctcattctgttatatagaaactcacattttttcatttggtcgtctccatagtctatgtctattcaactaattcactcttaacgatgatcaagttaattagtttctgtgagcacctgtatttttcatgaaattaatgaaaatttagtatgctaattattataataagtttgtatgttcagcttttgttaggtattcaattttattttatgtttaggtttgtgtttgtgtttataagtttaggtgtgtgttttttttaatgcaagtcaagttaaccatttttatattcaaactctaaaacatgaaaaaaaaaaagatgatagatatttgaaaaataaaataaataaataaattcaatctaaatgcatatagttaacaattaattattattttaatatgcttttataaatatctattctatataaagtgtgcctatataacaaaatttttagttttatgagaaattcatgggtgactttttatttatattaaatataaaatgatttattattaaaaataaaatgatttatgagaaattcatgggtcactttttatttatatataataaaataaatcctattaaataaaaaaaatacgattgagtttttgttgttgtacatttacgatcgggttttctttaattatttataatattcccatgggatcacacataatattccaatccacacttctctttttcttcttcacaacttaataacaaaat

SEQ ID NO: 359151 - DNA, 525 bp, Cannabis indica
catatagttaacaattaattatttttttaatatgctttcataaatatctattctatataaagtgtgcccatataacagaattcttggttttatgagaaattcatgagtgattttttatttatattaaaactaaaatgatttattattaaaaataaaatagtttatgagaaattcatgggtcactttttatttatatataataaaataaattctattaaataaaaaaaatacgattgagtttttgttgttgtacatttacgatcgggttttctttaattatttataatattcccatgggatcacacataatattccaatccacacttctcttttttcttcttcacaacttaataacaaaatatataagtaataataataataaaaaagaagcgtgacttttatcaaagttcacaaaactaagcatcaatagcaaaaaaacaaaacccaacaaagtttacagctaacaaatgattctaagtgctccgcatatgcattagtttctaggagcaaagttttttaaagtta

SEQ ID NO: 359152 - DNA, 479 bp, Cannabis indica
gcccgcacacagtagtagattactgagtacttaaataggaaaattacgagcaatggaaagactaaacgtactctacatttgatcaaaatgtatagttgtttacattgtgaataaaaacacaagcaaacacaaatatattaagttcgaatgtaaatgtacaaggcatttaagacaagtaaaaagctaagttggtttgtaaacttgtctttacaaaagtaccacctggggcaaaccatttgactattttcctaaataaagaatacaaggttcattataggagacagaagagctcgaaaaataccatctccaagcaaaaggattcgacctgatgtactgactcagtatgacgtccctctgtgatccttgctgcatagacctcattctctgcagcagaagaccttcattcctcgcatcagaagatcccatttcatgcagcagaggcctcactccctgaagccgagactgttgggttttatgcc

SEQ ID NO: 359153 - DNA, 543 bp, Cannabis indica
tcctcaattattcataattatctaattagggttttgctaatccatttcttaattctagggtattacagctgaactttaacagcccgagcaaattgctgaggaggcacgtcaggaggaccctgctgcctcaacctctgaatttcttcatcatgctggcagattcgatctttcatttctgcaaacctctgctccatatccggaggagcttggtgtggatttatagggcgaccaccctgagctctgccacggccacaaccacggccacggggattctggggattttgatttccctgaccgcctccggtctcaaccatgttaccttgacttcttgtatttcgctaggcgtccatcttataggacttagcctgcgaacccataagccagacaggttagatagcgatcataaaacttaataccgctcttatggacttaaaagcaacacacttaaaataaacaattatactctaatatgcttcctatcatgctttaataatcatttaaaacactaaacaagtaccggcttactgaaccgtgaaccgagct

SEQ ID NO: 359154 - DNA, 1300 bp, Cannabis indica
aaaattcttgaagaacagaaacaattgtccaagattgtcaaaattgatgtccaactgatagtttcgagagaaacgggcttagttcaagtcattaagtcaacctcacacaagtataaagttcaattgggggcaaatttttacaccaagagtagccttatgtggacatcaatgttttgttggggattattttaccaaggtctagatttactaccatgtatgttgtttaacatcctaaacatgaatttctaaaaaaatagaatttaaacacatataaaattcaagaaaatttacattggttgcagcggaattaaatgactccttccactcagatctctaaccattgttcctttctgtcacaaagtattatcaagatctaagcccgacactccttcaattgattggattcttcacagttataattgagtaccaacttgctatgtgtgggcatgtactctatcactataagggtttcaattttgaagagagaaagagagaaggactcaaaaattagagagagaaagagaaggctcaaatttgactgaaggcttgtcaaagctaaagctttcagttttgattccatcactgtctatttataggaatccttctaggtttaggtttgaattatttggcattaaaaaaaattgataaataaatggtaaaaattagcctaagtagctggtcataggatgtgggcccaccacttgtaattttgttattttttaactatttatcctattctttcacaaatgccatattttctaattcaaccacttaaatgcaaaactttatttaataattaaagtaattatcaaataaaactaaaatttaatatatttattaattagacttaatagattctcttaattaacaaataaatcctagaatctcttttcttcataatttagtcctagcttagtaaaaattcaaaaataagacatagtctaattttagaattataattgattaattaaaatcaattaactaagtcttaacaagcagtatcgtctcaactagtatggggaccatgggcctacataaccgagcttccaataagcaaatctagaatatatcaagtaaattctctaacttattaattcctccttgcactactatagatttggaattgcactctcaattatatctacgatatagatacactatgaaaatttaaccatcgttctaatcctaataatcaaagatcctctataaatgaatttacatcgagtagggacaaatttaccatttcactcctcaatgattttatccttaaaacacttagcttcctataaatgatatttca

SEQ ID NO: 359155 - DNA, 930 bp, Cannabis indica
actctctaactcagccctagcaaagtcttggagtacaatgttgatttcatcatccccgagaaagttgttcgaggggagaaaccagctggaagataaatgggctgagtggtccaggggaataggtgccggaggtccagagcccatccgagaccgacccaagaaatggcccaagtgggaaaactaatattcttggcgtgactcccccaccgggtggaaggcatgctaaacctatagaggtgctcatcgaaccctatgggtctacggtgggtatactctcggacaggagggacataatgaattactgaaggagacttaccagaacctaaagtactggcgtcgggagcgccagtgttgggaatcgaggccacaggctcgggcctggagggaccccgctctgaaagagcttccagacgaagggtcctccaggctgtagcctgagccttgatgtaggccagctcctgttccctcctaaagaggtacttctggtaccggtcctccgccgaggcgattatgtccacccggagcgccatttctgcagccggagtccttacatccgggcagatgacataggaaagattgaagtcatccaccaactgattctcggatatcagcttggccttccgacagttctccgtcgtgaccaagtccccaatgttgagggcatgcttgtcataggtggagaatgtcttggcccgctaaaggaatactcgagtaggtgcggtccacatgtaaggagagatcctaacctactctgtaaggagctccgggcggtccatggcctggaaactggaggagaagaagcatcggtggtggtactccttcacgtgtttttgatggtcgaaagggactgggccctcgttcaaagggtgggcctgaaggccataaaatttgtctttaaattgtccccttcttggggacaaatacaagttc

SEQ ID NO: 359156 - DNA, 534 bp, Cannabis indica
gctcactatttataattatattcaaatacacaatatataaaataaaattaaaaaatattattatattgataaaatattaaatacacaaaaaataattaattttagtgagtttggaagttactattacacaatatagtaactacactatattttaaaatatcagacgtgtttagataggaggtgataattacttatgaaatcttaatgtcttgtttggcaaagttattaatttttacacgagaaaaataataatttttagtacttaatatttataatagaaagtttttagtaattacacccaggggcataagaattagagagtgtaattgagacctctcaaatgttacttttaattatgcgattacaatgtaattacgtattcaaacaaatacataaaagtgtgtaattaccttcaattacatctaattctaattccttttacctgtttaaatgcattatattgtttataagtaatggtaatatggtaaataaaaatataaaattttgtaaaagtcaataaataataataataat

SEQ ID NO: 359157 - DNA, 641 bp, Cannabis indica
ttggattggattggattggatgatgcccacccctagttctagtactgtacatcaatcaattttatcatcccattagcaaaacttaattattagggcaagacttgtgtgcattattgtcaaggattttttcacaacaccaaattaggtgagtatttaaagttatttatagtataaaattaaaatatatgtgtgcaagtattggcgaacctaaaaataaagatgaaggggactcgaaccactgacttataatatatgtgtaaggtagcttaaccaaggccgcccttgaaaatttataggcctaagacaaatttgattttgggatcctttaaaatatatataaatttttttaaaaaaaaatagtgttatgggcgggtaacttttaaaaatattagaatttggaataacttttacaaaaatattgtcacacagaaaggtttacaaaaatactgtgtttttataaaacaccagtagaacacaaaacagaacaactcaaaacaccagtagaacaactaaaaaacaccagtaaaacaccagtgaaaacttaacacagtatactacagtatgaaacttataaaaaaaatacagtaaaaaagtaaaaaataccgtctggcagtatttttgtaaaaaaatgacaaaagtta

SEQ ID NO: 359158 - DNA, 657 bp, Cannabis indica
aaagtgctctatggggtgtcaggatacagggggagcctacttttcccatcaggatgagtgtcgtctcattgaatcttgtgagctgtgagccactaggctataggtccttatctgtgagcctatggtcgtgaaggcttctttgaataacagatttatggaactcctgttatctacctatattctagccacaaccttattggcgatatgagtttctatgactacaggatcatggtgaggtaaacgcactgatttcgcgtcctcttccgtaaaagtaataggttggtccatgagtctgggtctttgtgcttggagttgagtgacctcccacaattcatcgtgttttagggctccaacataacgtttcaactcgttcctggcggttcctccaatatgaggcccaccaaaaatcatggccactcttcgattctctcggggtggcaatccgggcgcctgttgaggaagcgcccctttgggaggtacttgcccctaatgcataccccttgctcctccctgacgcagtgggcctcctgctggagctgggtttaagtgcggtaacctgcttttgatccattcatacaagtggcctaatcgaattaggttctcaattttgtctttcaggtttttgcactcgtttgtggtgtggccaatgtcgttgtg

SEQ ID NO: 359159 - DNA, 513 bp, Cannabis indica
ataaaacccaacactttcttggtaaccctctctttataaaaggcaacagaaccagtgactttaatttcatcattaagaaggttagatgtaaaatggagggctagagggcaaagcttctgtctcaggcagcaagaactgtccttataaagaatgtaatatcctctatcacgatttacactatgtcggtgttccagcttgcagtgaaaaataccaaggttttggatgccatggttcatcgtttttggtggacatggagcatggaggggggcaaatgttggaatatattttactaggatctagatttactaccatgtatgtttttaacatcctaatatgaatttctaaaacaatgtaatttaaacacataaaagttatgagaaatcttacagtgggtgcagcggaattaaatgactcattccactcagatctctaactattgtatcctttctgtagcagagtatcaccaagatctgaacccgaaactccttccttgtgtttggattcttcacagtc

SEQ ID NO: 359160 - DNA, 585 bp, Cannabis indica
gttctgggaattttcgaagcccatccggaattctggatgcacaaccggaattccggttcctcgcaggcagaaattcaaaaattcatatctcaaccaaaacaaatccaattaacctcaaaccttccagacctgatctaaacatcctatagaacaattctaaagcatcaacacagcccagaaagcacagaaatgaaaatcaccattaaagcccaagctttgagttccaaactcaaacttggttaataacaactaacatgcatccaaaccatgattcaaactcataatcaagcatataaacactgcagaaactaaaacctaactcatgcaaacactacagccacaatttcgaaaattcactttgaaaaccaaactttgagctaaaactttcaatcttgaaatcaaagcaaatatcatgcattcactaactctaaactacttaaaataacaagattaatccactgaaaataacaacaattcacagcagcaagaacatatcaaaaatcaagcatgcatcatcatctatttaaacattttctaaaaattaccaaaggaaaaggtttagaaactttaccaaggcttgaagaa

SEQ ID NO: 359161 - DNA, 537 bp, Cannabis indica
attgtttaatttttgggtttaattattggatttatttattaatggaagatcaaacctaatcgttaaatttaacagaatatattctgttaaaccaagaaacgttaaaccaagaattgccgttagatagacacttttaatatataaagatatatataatacaatttgtcactacaaacttgagacacattaatagtgcacatgtgcccttcatgcttttttcttttaaagtcgatgtatacaaattctttgtatatatattccaagtgtatacaacagaggtatatacatatatttgacttgtatggtaaaacaaattagttctattattttatatttattttttatgcattgatatttttggatctgttttactaacttgttcaagtcaatttttttctttttgaatactttgatcgttggctttgcttttaaatatttctcgatcaaattatattttaccgcaaattattttgacaataattttatggatgtgagcatccattttttttatagaatggatgtgagcatccatttttt

SEQ ID NO: 359162 - DNA, 832 bp, Cannabis indica
ccggctgaaaagttacaatttttccttgcaatcaatgttgcttgaatacttggacagaaaatccatcccaagtttaatgtcaaattttgttaattccagctctactaggtcagcactcaactctctatcttcgatcctaactggcaataaggttccaactccccgctaggcaatagggttccaaaccctctttcaataaaatcacatggcctacccaaaagatcaattacctgtgttgccacatatgagtgtgttgctctcgagtcaaataacacagtataaaaggagttattgacaagaagctaacttgtcaccacagaaagactggctgcaacattagcttgagtgatggcaaacacccgagcaagtacgggttttgcctctgacttctactcttctttctttgtgtaagggcaatctttcttgaaatgccccacatgcaacactaaaagcatgtcttccggttgcactcacccgaattatgtttcttacaacgtgggcactcagggtaagagtaaccctaacatccacctctgccttggttcctatggaactgcttgctctgtcccaaactaccaaatgtcgggttagcttttctgttctaatcagtagtggaataaccaccatccctaccataaatagaagtaagaagagtgagggtcccaccaacactctaagtcactcggggctcctgtagaaacttaaccgcatcctcagctcgtagagccctctgaaccagcttcgcataaaatgttccttcatttgtagtaatcaccaggtcgtgtctaattttcaaattcagacctgccaggtatttctcctttttttgaaa

SEQ ID NO: 359163 - DNA, 694 bp, Cannabis indica
ttgggcgtctccgcgtcgcgaggtggccgatggtaggtccctgaggtggaaggcttgattccagcaacctccacaatgttctccaattggtggggacaggtcaaggtggaataaagctcagccgcttcccatccggtcgcccgggacttatacccctcctgggcaacgggtcccagggagacctcttcaagggtagccatgcgcttaccacttttcttagattactttgagccagaagccgacatttttctattctgtaaaaagagtgagattccagcagttaggctccataccaaaccctaaaataagataaagggaatgggggtcccctaaccgctggaaagaggccccctccggacacgtgtcacacaggaaaccctagaaggattccctggacaagtgtcgagtgcagtaaattcacagaagacggctttacgcgataagaaaaacaaaaaaaagaagtctatcctatgccctaagcaaccattatacgaagaacgtatggcctcctacaaagaaaattcacaataacaacagaggcgtgacaatagtgtaacgtccccgcttcaagcctccattaggcccttacacccacggactaatggctcttatacacgagtacgccacactctggctacttcctggatcgatgactgaccctacagaccaacacgagtgttttcagcgtgctttg

SEQ ID NO: 359164 - DNA, 568 bp, Cannabis indica
gacaacacaataaataagaacataaatgtgataaccatttggatgaatttataaatcaaataaacatataaatgataaaatgaaccaaatgacacacaaagtgatgaaaatacttctgtttctttattgatatttaaaagataaagattacattgaaatggagttttatttagggcataaaacttaacacttacacaggcgcatttgtttgtcagtataagagactcgccagcaaaagttgaccgccaaaattttcaaggcttttgccggcgcacagatgcaccggcaaaagtccccacctacttttgcgtgcacgttttttcactacgagggaaattgaccgccttttttttcagacttttgccagcgaattttggcaccggcaaaagtaaataatattaaaaaaaaataaataaatagttttggcggcgcatgtaattgcgccggcaaaagtggcaaccgtacagccaacaattcccaccttttggcggtttggtgccaacgtttgccggcgcaattcgtgtacttcgccgacgatattggtgttgggttttatgccgtaaataaa

SEQ ID NO: 359165 - DNA, 786 bp, Cannabis indica
ttcgatgcatactccatgcatccaattcaagctttactttaaccaatgccctggaaaaaacatagcacttatccaaggtgcaagtaaactatgttgtagattcacatatcaattaaaccctgtgtactgataaatctaggaatatatatttaatcacataatcttgattattttccactgtgctgacgacacaataaacaagaatataaatgtgatatgggtttggatgaatttataaatcaaataaacaagtaaatgataacatgaaccaaatgacacacaaataagtgatgaaaatacttctatttctttattgatatttgaaagataaagattacattgaaattggagttttatttagggcataaaacccagcaaactcccacttgcactaatataaaacaatcagtacatttcaattaatcctaaattctgacagtgcttttcaaatgcaattcctgcaaagactttggtgaatggatcagctaggttgtcctctgtgtccactttttgcaccagtacatcccctcttgccacatattctctaattatgtgatacttcctttcgatatgcttgcttctcttgtggcttcgagggtcattactgttggctatggctccagtgttatcaaaaagcaaaaccagtggtttttccattccagggacgacacggagtctagtgaagaactttctaagccagacaagttcttttgctgcctctgcagcaggtatgtattttgcctccatggtgcagtctgaaatcgtggtttgtttagcacttctcca

SEQ ID NO: 359166 - DNA, 540 bp, Cannabis indica
ctctgataccatgttgtaatgccctgaccaacaaggatgccacaagtgtgtgtttttataaaatatcctttcctttaggttatatgattacaccaaaagtgtgtttaattaaaatttgataactttaaaacaaacatataaaatttctttttataaaagataaataatattaatctcggggtccccctatttctaaaatatttacaatgtagtttaaaagtacttttacaacataaactttatatttccaaaatgcaaccaaaaggaacaccctgaacactgggctgtggcacgctgatatgtacattgttgttacgaccttaactcatggctgctcaaccttagactttcctttacctgcaccatatagcacctgtgagtcatagagacccagcaagaaaagtgaacaaacaataattaatttaacatttatctattcattctcatattatcaagcttaaacaattacataatatcttaatcacacaatcccggtacttcctaaagtacattttgttggaatttattttaccaggatct

SEQ ID NO: 359167 - DNA, 744 bp, Cannabis indica
ctctggtgtcgataaaacaatagacgatttatcataagccggatcagaaatgtaaaaaacttgaactgcttggctagccatgatgaatggatcgttctttcttcctctctacttaaatcaaccaaagtaaaaccaagctcgtctgcttttactccaacgttgttgtcaacccaagaacatttaaaaattggaatttggaacgcaaaagaattgagctcccatatttcttcaatgaccccataatacgtcatagtacctagaacagggtttctatcttttgcactagcaaagtgcatagtttctgcaacaatacatatgccactactttgaacctctcgagcatcatctaatgacattgtatggaaacgcttatcatgcccctcaaacttttatatgtattaaattatgcccctgaattttcatccgtgttagaatttttttactaaaattagacaaaagtccttaaatttaacaatcttaatagttcagggggaatttttaacggccaaaaaagttcaggggcataatttagtacatgtcaaagttcgcgggaaaaaattggtaattagcctaacactttagatgagctgacaactctattcaatggatggtagctttgactctcgcctaaacggggcactgatatcagtttgttgaaaaccttggaaattatttaggattgtatttttttttttatattttctcttatcattcctacatgctatgtgcttataatttctgaat

SEQ ID NO: 359168 - DNA, 540 bp, Cannabis indica
ccaaaaatggaattaacagtttacacaacatcctttttgtataagctgtactattgtatatactaataaatctattagtttattttagcatattgaaacaaatttttatttttcttttcgtatatactaataaatctattagtttatatttttcaatacagagtaaactataatcaaacataatgatatacaccaataaacctattagtctatttttcatatattgaaacaacaaattatttttcaaacacaatctatcatcatgtatgcctataaaataatattttttttaggttcaatcgagtaatgacatagttcgaaattatttttaaagttaaaaataaaaaaaaaaagagaaaaaataggtaaatgatgtactcttaaaaaacaagcttaaagtaaataaataaatattaataaactttttctctcactttaaataattaaataatttttatatctttatatattaaaagtgcctatctaacggtatttcttcgtttaacagaatataattaaaaataaaagaatattctgtta

SEQ ID NO: 359169 - DNA, 532 bp, Cannabis indica
aaaaaaattaaaaattattataaatatttaaaaattataaaaataaataaattataaaaaaatattttattttatttttctttttttctttttttctttttttttcttttcttcttcttcttcttcttcttttgctgcgtgcaagaccaaaaaccccaactggtttactgagttttatcttaaaataaagcaaaaccaattgatcaaactctccaatggtgttaaacgtacaaaaccccatttgaatcaacccaagataagagatttcccacttggaatttcgaccaagggtcattcccatcagcttcaaaaatattcaaaggcaactgggaaacatgaaagattgaagcttcctcaaaatccggcaacaaaaactcattggaatcaactttccagtgaggaagattcaaccaaagggagtaataacaagccaaaccaaacccactacaaccactaaagacagcgtggaaaatacccattccttagctacggcggccgtcacccgaaaacgactatcgcgatgaacaaaggg

SEQ ID NO: 359170 - DNA, 662 bp, Cannabis indica
gatatggccaactcgggttcggatcagattcaaacccagagacagagtgtcctaggtcgatgcctacacgaggagctactcaaatgaatgaaatattcaagctaatggatcaaggcaaaagagtggccgtcgaggtgaatgacaaaggacaatactgtggcgaaagctactccaagctcgtatcaagtttaggagttagatgctgtcagacgatagggttgtccataaaaattggaaagaagtcgaccctacattgaaaaataaagtttggacaaatatacaggtaagcagttatttgttaggaattttgatttgtttttgattaattcagatgttaactctaatcgtgtttgttttccttcaaagtagacgggtttcattttgccggattccttcaaacatgaaagtctgatccttactgggaagttaatgaaagacttcatgaataggatgacaaaagacattataatgcccgcaatagaagagaaggatgtgcaacgactggcacaagttcctgaaaagcatcccgaaatcgaccttactaatttgttgaaattttttgaaagtcgactaactctggaattttaggtacactaattatatttgtactaagataaactcttatatacaagtacatgtatctaatatatttttttggcatt

SEQ ID NO: 359171 - DNA, 1008 bp, Cannabis indica
gaagacgggttgtaactagccgagaaactgtgcttgaatttgtacttattcatcaacttgaccattgccttacatttgaaataaagggcattgtcggagataatttttgaaggaatcccatatcggtaaattacgtgggtccttataaaatcagtgacatcttctgcccgtacttcttttagtggtatggcttctgcccatttagagaagtaatctgtgatggccaaaatatacttatgggctttggaagagggtggcgtaaaaggaccaatgacctccattccccatgtttcgaaaggtcatgacagtatagaaggatggagtggttgagggggttgatggatgaaatctccatgtaattggcatgacttacaacatttagcaaaattaattgcatcttgaaccatagtaggccaatagtaacccaaccgctttaattgagccgacaattttgggccggcttgatgggcgccacatgtaccaacatgagtctcttgaagtgcatgtgttgcttcttctatcgagaggtatctcaataatatcccatcgaatgaacgcttgtacaatgtgtcattaaagaccacaaatcgaggcgctcttattcttatatccactcttttcttcaagtcttctggcaagactcctttttggatgtagtctttgattggctgacgccagtcattttcatttgcactatccaggaaagttatcaagttgactgtattttcttcttcaactctttccatagattgggataatacatggcgttcccctatggtaatttggatatccctttcttcaggaagtgttagtgatgcagctaaattagccaatgcatcagctttaccattttttgatctggggatgcgatttagagttatatcttagaattggccaagcaatagccttttcatgataagggactaaattctcctgcttgaccgcaaattcaccactcatttgtttaataaccaaaagagaatcgccaaatacctccaatgattgtat

SEQ ID NO: 359172 - DNA, 507 bp, Cannabis indica
tattcctagtctcttgcacactatgcgcgatttcttctacaggagtcgttacaccgtgacccacgtttgtcgactgttttggattaatagctggcggaacccttgcatttcctgggttttgcaatgcaggatccaatgtctgtggatttgctggaccaaccagggccctacgagtctgtaccacgatcgtacttgtggttagattttgaatgaagagcgattcttgagtctgctctcaatgaaagtaccaaaatgttgaccttacttttagccaacgacagtgagtcttatttagtaagcgataagtaatttatagcaattgatatagaataccacaatgtaaagacacaagaattttatagaggttcagccccgagcagttcagtaataacctaatcctcgttatttgtattgactttagaacaaggagaaaggttcattttcttatagctcttacaacaatatctctcattctttaatcgcatgaaagtgctaggtgcattagtt

SEQ ID NO: 359173 - DNA, 1208 bp, Cannabis indica
aaataaacacaagtctgtcacataataaccagttccaaacgtaaactaataaaaacatatgtctaaatccaaatgttcagaaatccaaactaaacaacctaataatagcacaacctaataataacacaacctaataataacataagtttttttacggactattcaccatatgaaatcttagccttggtagaccgaaacctaggggaggcctttgagggaggatacatgtttgtgtggcgagacttccccgtactgaactgaggatcgcctggagactttgacggactacgcaaaggggctgaggatgatgcaaatgagctgccttgtacaacccttcgatcttcaaccactttggttcggagttcattttgttcatcagttattatcctcgcagcgatttccaaacgtgcctcaatcgggtgaaactgtagaaaagtacataaacaaaaacaaaaacttacaaaatgtaattaactctgatcaagttgacagtagaacacggaattaaatttcaattacacaacattaatctcaatcaaacttgggtagtacagtctgaactaactaaacaggggtatacctgatcaactactccttcctcattagccacaacctccatgtacttcatcacatatacactgcaattccggtcattgtcttgttgaggaagcccgcgatctttactatcaattctgaaatccacaaaagtcacattctttgacttattctcatcgaacaaaaggtccaacgtcgacagctgcaaacatatacaattagttagattcaataaacaatgaattcacatcaaacaatgacactttgcaactttaccatttctttcgtagcgtcaacacgatacttctcatccattgcggtgtgtagcgagtccagaaatgagacaaccttggacttcatattaagttcggcgccaaaccaatgtggtggaccttctagcgtcaacaccggcacaaacatctacaattgataagagaaaaaataaagtcataaataaattcaaattacagaccatatagatattcgacactacaatgaccaatatgcatcattaacataaatcagttttcaaaattacaattaagaacgagcatgtgtatatgatgaagtaccttgacgcaatttcggaagttgtcttcgtaaaacagtgttgaccgttctcgttcttttgcaatcctcttcacattaaacga

SEQ ID NO: 359174 - DNA, 865 bp, Cannabis indica
ctacacaatgaatattggtatagaagacaaggttcatttcatctgaggtacaagtaaaagaggcagttttagtgtaacttaggatgtctaatacatctgagatactatgttaccaggtgtgaaagtgacttgacatcctaaaatttagggattttgtaaggttttaaagtgtgaagagctcactataaatagagcccttgaactaattgtaaaagggactctttggtagaaaaaatattaatgaaactgtagtttttcttaatagtgaagaaagtaatatttactttgagtattcttctattaggatcttgaaacatcatcttaagttcttgttattttgttgacgagttcttaccatcaatagggggttgtgagagtttagaataggttttataggaaaaatttcgagtttgaaatgaccaataaccccacaatcacaaaatcttgtagaaaatggtagaccgttttcttaggtactgggaaaacggtctgccgtcttctcaatacaatggctgaagacaaaaattgtcacaacttaggttttaaaaatccttttgaccccaaaccttttctaacaacttaaatatgacaaaatgaagattcttaaacaagaaaattagaaaaatgacgatttacgataagcttttggaaaaatgcttagaaaactagaaccttaccaaaaataaaatttatacaataaatttgaaaaattctttttccaatatggatgtagaatgtgaggtttacaaacttacggaatcaaaaaatattggaaaatgagaaagtttggcgaacaatgctcttttaggcctaaaaacctataaaacaacaagtagcgtacaaaaaatttgttcaatgcatattt

SEQ ID NO: 359175 - DNA, 518 bp, Cannabis indica
ttgattgcttatctctggaatactcgcgggtattcggatgagcatctcgaatacttgcatatatgcttcctttaggatttctagtgactttatcattttacccgttgtttagaacttaggattttctctatattctatgtatattttgttgtggggatactagttaattctttcaaatggtaagtgtgtcgccgtattccaatgctcatgcgtgcgatttcatgtttattgaggtactgcgatacacctagccatttgcgacatacgccagcgttccctgttcccatatgaccgtgtatttcgactagtaggtttgcttgaaacagtgaggtatttacgttagcccaaggtttatgcgagaaaagcatgccccttgagatataggagattcctcagctgtttcttgagatataccactagtcggatatgcgtgacatactcgcaggttgtgattggttagatttctcgaaacggtgggtgtttcccagtaactttagggtcatgcttgaaaacgcatg

SEQ ID NO: 359176 - DNA, 740 bp, Cannabis indica
ggcacatttaaaaaaaaaataaaaaaaagagcaaatgtaatttttaaaagtaaattaaaaagatatttttaggagaaaaaaataaaatctcaaacttaaagtaacccataaaagataatgtcgggtaacacaagaaaatattctattagtgaaacataaatttaaaggggattttcatgtatatgggaattgaatgtatagtttactcttttttagcataaataaataatatcatggggttaaggattttttttttattattactattttacatttatataagctttttatgccatatgtttgttaaaaaaaagggtagaaatcatatttataaaataataataagatttgccaaaaaagtcaacggcgctggaaaatcgtcgaaaaagttagtagaatagtcatcgttgccaaaaaagtcactgtcactggaaaactcatcagaaataaatatctcatatataactaaaaatagaaccagttctatgaatatatactaataacttaaactggttataattgaaatataataggttctgtaacataataattaaaaataaataacacaaaataacttaaaccaattataattaaaatagaatcagttctataacagtgttataatgaataaaaacaaataacacgaaataactgaaaccgattataactaaaatagaactaattatataatataatgaatacaaataagtaacacgtaataactcaagccgattacaatt

SEQ ID NO: 359177 - DNA, 1353 bp, Cannabis indica
acatgaaagtaataaaaaagtaacctcaaaacaatgtaaaaaaattatacaaataataaaaaatcaacaataaaataatacaccaaaagaccgtatattatgtaaataaatcttattttatgtaaataaaaaaaactgtaaaaatattaaaatctctgaacaaactgtatttttgtaatttttttaaagttatcccaataaaaaatatatttttaataataatttttaaaataccatttattcttataaataagagctcaaaaaatatatttttctttagacccatttcaattccgggccggccctgttaaagatcctacaaaagaagattataaatacttactgtatactttcaacgttttcctattgtgctgtaacagaattttggccatccagtttgttgttattaagaaatctgttaattaagcagattaaaaataatcaagttagttgtctgatatatatgctgaaagatttgttgtgtactgatcataaaattagactcacatttcactaagatgtggaagttgactcaatgacttaggaactggtccttcaaactgattattctccaaatgtcttcaacaaaaaaaccaaatcaaaagtgtgaaagagctaacaataatgaacaaaagaaataattagataaataaatgatcaagtttcacaagagacatacaaactccttaaatcctttagtgaccacatttctggaatggtacctgagagtttgttacccccaagccatctgtaataaataatcatatcattattacaataaacatagctcatttagtagtaattaatgatgagattaattagataagcataaacattaatggtgtcattactacttactacttacatatgattgagtgcagttaaatttgctatggttggagacagagtaccagacagttccttgttagttaaattcctttacattacagaaaacacatgtacaacaattcttaagaggatgaaatctttgtaacatataataataaaatttctagtttaatatgactatataaaaaaaaaaagtttttggcggctaaattctctttttaattatcatttcacttgcacttaattttttaagtttaaattttggcagtaaaatcctctaaactactgaactattagcaaatttaaagtgtcattcagttgattgattccataaaatacttatgtgtacactcttgtacacgtgacacgtttatatttaatattattatttcaaaatttattttaaaattagatgaaattataaaaataaaaataaattcataaattttgaaatattttttgtaatttttaaataataatattagtgttgagaatcatggggtt

SEQ ID NO: 359178 - DNA, 930 bp, Cannabis indica
agtaattggtatttgagacaaataatgaaagtaaaagaaaaaattaaacaaacaatagtccctaaacattgttttatagtgtgtgatgaccttgtaatatagtgggttatagaaaaaaaatatttttaggccttcacttagaaaaaaaaaatatagcattttttaaaattagtaaaaaaaatctataattttgaaaagaaaatttttttagggccttggcctaagtggaacctaagcacaggcctagctcgcctatgtccagaatcgaacctgagtgtgacttgcagtgttaaacaagttgcagaccaatgacagattgtttcgatcattccgaacatgaatgtttgtagagataatctttgtttggtgtgcgaatcatagcaatgaaagactagagagcatttgttgtttttttgatgttattatgtttgagatgtttggaaactcttaagatgtgattggtaggattgtgtataaatcgatttaatttaatgataattgaccgattcaattagaactgaccctgaaacatttgatatatattcaattgtgatcagattagattggattttgtgtttttaattaatatccaattagatattggattggatgttggatgaggtgtctaaaaatctaatacatcttatagttacattcaatcaaactaattaatattttcatttattagtttgaatgaataattcaattttatgttgttataacataaaaatatggaatatattaaaattaacattaaaatattatattttttattggatggatccaatctaatccaatacataatatatctaaattattggatgaatttgagttgatcaaataaatatatacttggtttaaaatattttattaacccatatatacaagaaatatgcatttaatggatagaagtgatctaatctaatatcc

SEQ ID NO: 359179 - DNA, 577 bp, Cannabis indica
tatatatatatatagatttatagttttacttttgttttaaatttttattttgtgtgagaattatttagttttaaatttttcttcactataacgtacatttgaatatatttatttgcgtgttttctcttttatataagatattataagatgaatttttatttttttttattttttttagagttctttaaatagaattatcattttttttaaaatacatataaatataagtttaaaattatttaatatgattttattgtacaattaatattcatatttatataatttaaaatttttataaacaatcacacgcaaagcacacacagtatatttattaatctatatatctatctatatatctatataaaggagaagtgtgatccggtgacgtggcggtctaaaatcactctaaaactattattctctcctctccttaattctctcaattttaatattttattaaaacataaattaataaattaatattttactattattttaataaatcaattaaaaacttaaatatctaactttaaatcttctctaatttttaaaaaacatataactctaaacctataaa

SEQ ID NO: 359180 - DNA, 1052 bp, Cannabis indica
gacgtgacagcctttaagtcatacaaggccgcccgaccaagcattacgttaaaagctaaagaaatatctaatattaggaactatgtggttacagtcatgctcgtcggagcttgtccaacagtgaggggtagacgaatttttcctagaggtgcgactccttgaccggagaaaccacatacgggctggaggcatggctttagatccttgagttggagtcccattttttcgtaagcaattttgaacaagatgttggaagaggctccattatcgatcatggttctggccaccattttattaggtatctggacttccacgaccagcgggtcgttgtgcagaagtctaattttgacaacgtcttcatcgttgaaggttttggtcggctctcctgctcgtggaactttgggcttcctttcttccacgaccaggatgactgcttcttactcgtgttgcattgttcgggcatacctctcccgagctttgccagaatctccagcaatgtgtgggcctccaacaatgacttgcaaatgtccatctaccggtggaggtagcaaatcttggttgttgtcgttcctctaaccttggtcggtcttaacataattttgcatatgtggattgtttttctttatgaggaattaaatttcccgcttcaagttgtaacattcattagtgtcgtggtcgtagtctccgtggaaccgacaaaactttgtcatgtctgttttgttcgcatctttcttcatgggcccaggcttcttatacggggcaagcgactgagttgccatgtatacactttctatatcttcattcagaatggtgaatgcagtgtattgggcatgattctctcggggagcttgttcggatttaccagtgacctttcgtttcttcccattcccttgcttgtggttgttactggaacgcttaccacttgagcttgaattgattgggtagtgaggaagttgggcagatgttccagtggaaggagcctttgacttgccaggctttttctcacattccgctcgttgaatggcttcttcgagcttgatgaagccttctgc

SEQ ID NO: 359181 - DNA, 530 bp, Cannabis indica
ctaattctaaggagttgtcttcttcggaatttagacccttgttatcatcatcgacaataaaatcatctaattgttgaggctgtgaattcacacgatggatgtttgaagttgaacatagtcaacatcatccaactgtggaagttgaataacgaactcggtttcagctgaattgttttcctatataaagggtgtctccccatcagtgtccaggaagttccaaacatttcgctgtatgtactcatttacaatcacccagtctttaccgttcttcagatcaggaatgtaatagatcaattttgcttgagatgcaagtatgaacggttcattttggtaccactctcggttgacgcaaatgctagtaataacaccgtcactatccattctactcccattagtgtcaaaccacttacacaaaaataagagaacactgcagtcttttaaataggtgaacaccataatttttttaagtgtgccataaaaattttgtccatcttcacggggcaccatagcactgctattttgtgttttgc

SEQ ID NO: 359182 - DNA, 1177 bp, Cannabis indica
tccttaggccgaagaaaccatagataggcaggagacatggggttagatccttgcgctaaagtcccatcttttcataagcagttttgaacaagatattggaagaggctccgttatcaatcatggttatggccaccattttattagctatttggacttccacgaccagcgggtcgttgtgcggaaatctgattttgacagcgtcttcatcgttgaaggttatggtaggccctcctgctcgtggaaatttgggcttcctttcttctaaggctaggataactttctcttgtttgtgctgcgctgttcgggcatacctctcccgagctttgcccaaatctccagcaatatgcgggcctccaacgatgacttgcagatgtccatctactggtgtgggttgtttttccttatcatgaatttaatttcccgcttcaggttgttgcattcgtttgtgtcgtggccgtagtctccatggaaatgacaaaactttgtcatgtctctcttgctgagatctttcttcatgggcccgggcttcttatatggggccagcgactaagtagccatgtaaacactttctatgtcttcagtcaagatggtaaatgcagtgtactttgcttgactctcatggggagcttgctcggatttgtcggggaaccatcccttcttcccattcccttgactgttgttgttgttggaacgtttaccatttgagcttgaattatttgggtattgggggagttggacggacgttccagtggaaagagcctttgacttgccaggcttttgctcaccttccgctcgttgaatagcttcttcgagcttgatgaagcccttaacatggtcaagaaagtcactcattgagtctatcgggtcgttcttccttatgtccttccaaagttcaccaacgacttcaatgccccccagtatcgcggacaactttccatcttcaattacccgtgaaactttggtcgcctccgtcatgaatctactgatgtatgctcggagaggctcacctggtctttgcttgacttcgaccaaatctcccagatgcaacggaagttggcgagaggaggagaattgtgcatggaatttcgaagagaaggctttccatgagttgaactttctacgggccaacttgaaataccattgctgggcggcttccgaaagggtagcaggaaagatt

SEQ ID NO: 359183 - DNA, 347 bp, Cannabis indica
attttaatagttgccgaaaacctcggtcaacactatctttatttttatttcaacatatttgcttttaccaaacacaagataataatttttttaacaaataattaagataattatatgaattcctttggaataatatttataaatattactttactatatagtaatgagtaaatgatacccttcttttaccaaaaagaaaaaaacaaaaataaataataataaattatattaaaataacaaaacttttatttcaatcctttaacaaaaaaataaataaataaatgaacggaagaaacacatttttttctagttatgtaaaacacaacctcattattattattattatt

SEQ ID NO: 359184 - DNA, 499 bp, Cannabis indica
tattaatgagatctttattaaaaaaatctacaacatccaagtgcgtaatatctaaaggcactttgaaaaaaccatcattttgataggcaaaatttgcttctattttatcttttcctttcacagatccttgattaagattaacaatatatttttcgtacaacaggtacgtgcccattgtccttttattccacatttgaatcataagttttcagaatttttacgattattattttgaagatattttttcttgttctcagtagttgtgcttttcattggagtatataaatttttattctagccattacgatgccaaacattgcttcgactatgactacaaccgcgactttgattatcgtcacgaccacgtctattactttgattatgatcacgaccacgaccacgactttgattatggtcacgatcacgtctattactttgattatgatcacgaccacgactatgattatgattgtcagaaattgtagcattcacttcaggg

SEQ ID NO: 359185 - DNA, 742 bp, Cannabis indica
cggattgagagcaaagatttgcgcaaatgcaagatcggatccgccaacaggatgaagagattcagaggttgaggcagcagggtcctcctgccgtgccacttcagcaagttgctcaggccgtcgtagttccagcagttccagcagaacaacctgttgttggcaaccgtttggagccgttgtacgaaaggtttccgaaagcaagcatctctagtgtttctgggaggtcctgatgtaatgaaggctgagcagtggctcacagtgattgagcgtatcctaaactttatgggagtggttggtaatgatcgagtgacttgcgccaccttccagttccaggaggatgctctcgtgtggtgggagttgataaccctcactcgagacgtcacagttatgacttgggaggaattcaaggaattgtttaattctaaatattacaatgaagctgtctgcagtgctaagcggaaagagttcactgaatttgttcaaaccgaggggatgtcggttacggagtatactaccaagtttgaccgtttggccaatctcgctgtggcaatcgtgccaactgactttagcaagaaagagaattatttggccgctttgagtgcgaagattatgcacgatttggtgattactaccattgaagcaacctcatatgctgaaatggtcgaaaaggctttgagagccgagggtgtggtgaaattccttcaggagccccgagtgactccgagtgttggtggaaccccca

SEQ ID NO: 359186 - DNA, 1231 bp, Cannabis indica
ctccactgatcccttgtttttttacttttacagaaagtgacatagatcttgcgagtgattttagaggtcctcctcaggctgacaaggaatcaaagaagaaagttggcatggtttcagatgaatctagggggaaagttggcgtggtttctatcaaagaatccaaccaacccaagacccaaacctgcgcaagacctttataccaacctttctctagtatcgagaaatttcctaaggctgggaatgaggtctcagctgcaagaaatgggttcctctgatgtggagaatgaggtctatgcagaggtcaagaccttctacatgtagacggtctttctcgagctatgtgtagccggtctttctccaagctatgtgtagacactctttcttgagtttaccgatccctcattctttgttttaggaagatgaatttaatggtttcccctagtggtatttttgtaaagataagtttaaaaccctacttggggttttttttttgtcttaaatgcctttactcggcatgaatgcaggtgctttccccttcaaattggtattcccttaaaagtagggatcaggttggctgccagatcctttgcaattcgaacttaatacaattgtgtttgcttgcgttttcattcacaatgtaaacatctatattttgatcaaatgcaaagtacttttgggtttttccattgctcgtaatcttcctgtttaagtagttagttatctaccaaaattttttgatttttgagctgaaagtgcaactagtagattttaatgattcaagttaccaagttgtacatctttaaattgatcgatttcaagatatgagttatgaacaagaattaagctttaagcagtaaatcacacatcaatttacaagcttcatctgcactgagaacacatctcagccgactagtgcttgggttccccgaaccagggtaaattcatccactatcaatcaaaggttcatattacaatttccaattctctctaaaggaatcaaatacaaccttttcagcaaatagtaatgaattaccaacgacaatcaagaacactgattgtcaatgcacaatcccttgtgcagcaactgagctcctcttcaacatgtcttcaatctgaaatcccttcagatctgatgatgaagatgacactgaaatcccttcagtttgaactcaacaattccagattcagatcattccgccattgacgaacactctcaagcttcaagatctaa

SEQ ID NO: 359187 - DNA, 603 bp, Cannabis indica
cacagcctcttgctttttctctttattgaggcctctaacattccaacacaaaatattgcaacaattcataataaatgaaccagtgacccgtctccctgtgtcccactctccttattttgcaacatctcaaaagtattcttttctttgtgatgcaccccatgctccctaacaacttgcttagccttgagaagatgaactctttttggtgtttcccaattttcctcagcctctccctctctttcagctccagtcaacttagccccctgatttgattctcgagcaacctctcggccactcaattcccctgccttctgttgagaaataactccatccttcccccttctttacccaatcttaccactactttattcttgccatcaattcccataactgtagcctccttagatttagtttggacatcatttccacctttcttctcctcaccagcccctactcctttcacatcttttttgacccattgcttagcctcacctttcctacactcagccatgatatgcccgaaacccccacaacttttgcacttaaatgacaaccattcatagtccacccctgctcaaccaatctccctttctcattaatata

SEQ ID NO: 359188 - DNA, 776 bp, Cannabis indica
agatgaccaataatgacttggtttatccatatgccttccagcaatggcatgagcaccagtgtactgagtaaacttaagaactgctctttgaccataaggccttacagactggacaatcatgtcctccatgtttccaagttgttacacttagttcctataatgtggattatatgctaagtgtttcaacagccaactcgtctcgtcaatattttcttatatgtagcgaggtggatgcctcactatacattacgcgtagtttcctcgagattatgccttcctaggcaagatggtctctcatcaatacatgaattaatagtttgtatattcttgtctcgcctaagactatacattcagcgagttatgaatatactctattaattctatatttaatgagttattccattttacatttaatgatataattgttattttatttattgattcatattccacgagattgacaggtgtcattttctgaagtacaaccgaattttgggtataacaagaggtcttgggttcattttgtaaaacaacaagtttctataaagagagcacattgctataaacactttaggcttgatgattcctaaaagctatttctactttttttttccctaactgcgaggtagggggaaataagcttttggacaaaggtgtaagaacttgttcaagttttgtgattcccctattatacacttgtggtgtatgtggtgttgagattgctctcacatctcttttatatatataatatatatatatatattgtgtttcatgtg

SEQ ID NO: 359189 - DNA, 838 bp, Cannabis indica
ttttaaagaccgcttggccggtcatgatgtcttaagaaaggtcttatggccgaataagatatataaaaagagaaagataaaagaagtatttaaacagctggagtcctaggctctcggttgggatcttctgggccggtaggagctggaggatctattgtttgaacgggaggtacatcaacattttggtcggaggaagaagcagtcgtatcaggctcaccataagccacttgggaagcgcagaactcgagatacatgcatttggcttcacccaagtaatcaaagtttgcctgaggcttagccttccaaaagtcataaaagagctcgaggccggctgtctctaaggcacagaccttttctcccagcctctccacctcggctgtaagctcctcctccttagacttcttctcctgttccacccgacggaggacagctcaaagagacatcctttcatcctgaaggctattcacctctacagataaggtttcgatggtctcctcaagtcggtcagaagcctcgagatccttagtcaactcggttattttcttctgagttgtaaacagcttcttgttgacttcacccagttccacctgaacaactccaactttccccctagcgtcatcagcgtccttcctggccaagtccacctccaccctcatggtgttggacagagccgcgttcttggaagcagcagacttagcccgggagtatgtgtaagccaacttcagaccagcctgtgcagagaaaaaagtttataatccaagctaagtaaagaggattaagggaaactgtcaagaaaagcttaccctggtgaattccttcaagactcctcccatcagca

SEQ ID NO: 359190 - DNA, 565 bp, Cannabis indica
gttgaagaaattctacactactctcgaattagttctagaagtagaaaaaccactggtgttctactgtgacagtagtggagcaatggcccactccaaggaaccaaggagccacaagagaggcaagcacattaagaggaagtaccatctactaaggaatatagtagagagaggtgatgtaacggtcttgaagatcgcgtcagaacataacctggtagatccattcacaaagacactacaagcaaaatcttttatgggtcgtaatactaatatgagactaagagagatgcccgattttcttttagggcaagtgggagattgttagggtttatgccctgaaaagcctgtaaagatatttctaattattaaataaagagttgaatagtttgatatatgcttgaatattaaattatttatatttatcattgaataatttatatgtaaaaatctaaaaagtccttattcatatatgaggttgcggcttgtagctgtataaagaactaagaccacttagctatgaataaaacagtcagcaataatattttttagtttaatttataattttttt

SEQ ID NO: 359191 - DNA, 654 bp, Cannabis indica
gatccaactcgtcttcttcagcaatttttagctcaatagtttctcagaccatcaacacgggtaggtgggtagcgacgttatagcattgcctcgcctccccttgatttcccttcaccgtccctatcccagcttcctgggttgggaattttaggcacaagtgccgtatggacgtgactgtgccaaagtccaccaagactggtcggctgatgattgcgttgtaggctgtcgggaagtccaccaccacaaacgtgcagtacttgaaagtgcactggggtgtgtctgggcacaagctgactggaagcctcacatttcccattgggataagtgttgttccgttaaaccctgtgagttgggaaccacttggtaagaggtctcggtccgtcaggcctattgcagtaaaggcctctttgaacagcaaattcacggaactcccgttgtcgttcaggactctggccaccaccttattggcaatgggggtctctatgaccaacggatcatggtgaggaaaacgcaccgtcttagcgtcttcttctgtgaatgtaatgggttgatccatcagccggggcctttgagctgggagttgagtaacttcccacacctcatcgtgtttcacggcccctgcgtccgtttcaactctttgcgggtggttcctcc

SEQ ID NO: 359192 - DNA, 615 bp, Cannabis indica
ttattttgctgtgcctgggcatgagtagtagttatcgttcaaactcattaagtgggatttttcaggaactattttgattagtgaacttttaagttgctgaaagcttcttctttgtttttgttgttgttgcaggaagtcattgatatgtgtgactttgcagttggtctgagccgacagctgaatggatctataatcccttcagaacgtgagattacaattctttgattgttttatattttttgacactgtaaatgttccctagtgactatgagtaaactgaatttgtttgctgtgttgttattagcttggactgcaaataaacttaaatttatttgtcatgtattaagacaaaatctaaactttgggatgtgaattaactgatttagcttttatgttttctctgcaggtccgaatcatatgatgcttgaggtaagaccagcaccggaccatcaatgttttcaaatctgaaagtttactaattagaaaaaatatgcattgaacataaaagatgaggttttgattatatagggtgtttatatgacaggtgtggaacccactgggaatagtcggggtgatcactgctttcaatttcccatgtgctgttcttggtgcgtt

SEQ ID NO: 359193 - DNA, 748 bp, Cannabis indica
gcaaacatacataaaaaaactaaaaaggaaaatagtcaaaaccatctaacacatcatcactacctcaaacatgtaaaatatcaatcaaaaccatataacacaccataactctcatactcttgtactatctttttacttttacatgctttaattcttgaatctaatatttgaatcaattagggaacaaaacactaaaccactttcaatcctctaattcattttgcatagagcaaaatattaggattctttatttttattatttttttttggctgagcctctcaacgattatttcacttccacttaatcatataaatttaaatttagtcgtaaaaccttttaaattgtcatataattttcacggttaagtataacataaattacttatcagtaatctgtacttatacacgtgagacttttatattaatacacctactaatattattatttaataattataaagaattattttaaaatttatatataatatattttttttattttttttaaatattttatttcttatttttgtaattttatataattttcacagttaagtgtaacatagattgcttattataagtagtcagtacactcttatacatgtgagacttttatattgacacacctactaatattattatttagtaattataataaattatttcaaaatttatgtataatatatttttttatttttttaaaaaatttaatttttatttttataattttatataattttaaaataat

SEQ ID NO: 359194 - DNA, 730 bp, Cannabis indica
atgttcagtcggttctcagtttaatcggtcggtttgtcattgacactaaaaccgaccgtgttaaggcagttttaaccgaaggcggtttttcagttttcaattttttcggtgttcaaacggttggtgtactcggtttggtcggtttcttagattttttactcacccttacactgcatgcaaatcgcggtttgttttctagtttacattaatttaaggggtattgttatactcgaaattcggctagcaatcagaggaggacacgtgtcaaactgggaagaatacaaatcaacacacgtaatgatgattataattgaaatagaataactcgttaaatgcgaaattgacagagtatatttataactcgattgactgaaaaatcttaggcgagataaaaatatgcaaactgttgcctcgtgcatcagtgagaaaccatacaatttcagatatacaaggcgaggcgtcaacctcgctacgcattagaagacgagatacaatggctgataagacacttagcgtataatacacggtatacaaactaagtataataatccggtaaacccatacaactaataacgaggcgtccatcttgctataggaaggcgcgcttgtggtatcttcactagtcagctccagacatcttttagtgagcttcacaactccgtcaagtcagttctctcggatagaagcttgttgggttttgtgccctaaataaaactcattacaatctgat

SEQ ID NO: 359195 - DNA, 516 bp, Cannabis indica
attcttggttcttgattgttgattgtctctctttagttttgctttcaaagccagacattcttctctaaaatatccctccttttatggtagaagcattgttttccagtgttgcctcttgaactagatcccccaattggaccctttgcaccagttctagactgattagcctagtgatgattttgatttcccttgtagttcttggaaaattttccattcacaatcagcagtccctccccattgctattcccacccttatcacctttcttttgaatttcttttgatttgaatgcacccttcactttagtcatggtgagagtgtacttaacattaaagatggtatcaacaaaatgttcataaaatttttgggaagggaactaaggagtattatggcctggtcttcatcatctattttgacaccaagattattaagatctacgataaatcttgttgaaaatcatcacgatgattcctcaactctctggtttcatccatattaagagtatataatctcttctt

SEQ ID NO: 359196 - DNA, 934 bp, Cannabis indica
gcttggtttgagaaacttcaaaactgcctgtactctctcgggttcatctcttccaaatctgatcactctttgtttatacaacatactgatgcatctgtgacacttatcttggtttatgttgatgatatcttgattacagggagtgacactactgttatggacaccattattgcagctcttaacaggcagtttgctcttaaagacttggggcctctttcatactttttaggcattgaagttacacaatcagctgctggtttacacttgtctcaagccaagtatgccaaggatcttctagttaaggctcaaatgagcaatgctaaaccagcccctacacctatgacaagtagcattcgtttatctgcttaccagggggaacccgtggaagatgttcaccattataggtcaattgttggagccttacaatacttgaccattacaaggcctgaactttcttttagtgtgaacaaggtgtgtcaatacatgcaaaaacctctatccactcattggtcagcagtcaaacgaatcctaaggtatgtgagtggcacaataaatcatggattgcatctgcaaaaaccagcaaacatggaccttgttgcatactgtgatgctgattgggcttcggacccagatgacaggagatccactacagggtttgcaatatttcttggctcaaatctattgcttggaaaagtaggaagcagcagactgtatctagatccagcacagaggctgaatatagaagtgctgctgcagttacagcagagttaacatggctgcaatacttgtttgctgaactaagattgcagctgactcaaactccaactatatggtgtgataaccttagcacaataatgctaactcagaatcctgtgctacatcaaagaacaaagcatattgaacttgatttgtacttcattagagagaaggttct

SEQ ID NO: 359197 - DNA, 574 bp, Cannabis indica
aacaaaaatactactttcatttttgtagattaaaaaaattaaagaaaaataaaagtgttaatcaaacgccgtcatactttgtaatttgttggtaattattaaaaatatataggaagtattgatgattatttaatttcagattgataaagtatgcaagttctgctacaaacattgctactaaactagaaatgttatgacaaagttagtttttcttttttaatttgcttttattccatattattggatagtcgaggcttctattctttctcgagagttttaaattattggaaaaaagataagcaaagagagacttatggtaaaacttaatatgcaccaaagtttttttaccgcgtgaccattcttacttaaagcttttatccataattttgggaaaaacttttgtaagtttatattggcttgcaccactctttttggtttttctttgtgctcctaaatggccaacatttaaagaaagtttgttctcgaaagagtcttagtcttatttaggaagatttattgcagcacggagatcctcctgatcatgatgcaaggtgttagtgtgaccttgcatgag

SEQ ID NO: 359198 - DNA, 684 bp, Cannabis indica
atagcataattgacactcacttctcagatctcgcatcaaaatcatagacagttaattggtgatcaggcaattaaaagtagttaagcacaaatgaaatagaatacataaaaattagggggaaaataaatcatattaaaacaataaaacaatgttaaacaatctccatctaaccctaattaaatatttagctactcatatttatgagagcacaatcacacatattaactttaagaaaagagatgaaaataaagaagcaaagaatctcgaaaaccctctgaagaatgcctccaatattgcagttgatctctccacttttcatccgtattctatgtttatttctctctaaaattgcttgatgaaatcaattctcttcttccctttatataggcattgagggcctaaaaagatagatagaatgcacatgttcaaattcctattcggatttaaattttgggaaacctccagaacgagatttttttttactgcagaaatagaggcgggccgcggcatgctaaagccatgccgcggcccgtgtggccttcctgggatatttccttttatttttcacgtaggcaggccacagcatgctaacgccatgtcgcggcccgtgtcttctctgctccatattccatgtgcttttatctttttttctgggttttgaattttgattattttttccactgg

SEQ ID NO: 359199 - DNA, 631 bp, Cannabis indica
cttggattctaggaatgcgcacctcacgcattcgccaagtgagcactttgtaataggtgtaataatttctttaatttttgaaagatgatacctgaactttactaaaagatgttagtgatattttataatagctattaaattaattatataaaatctaatatttatttatattaatagtaatataacacccttaatacattttaactttttttttttctagtgttctataggtttgttgaaaattatagatgtgctaatcaatattttgtaatgtgacttgttactatataagttaaccatatattctgatatgtaaatatactataccgctgctacttttttaatatttttctagtgcccacacgtttattaaaaattatagatatttttgatcgatgtggatgtgaatggctacttggagatgatgtgttttgtcttaatttcaattaggatttttggtttcgtgtatgtagggcttttggcgatgagaaattgtaattttgatggtttctttcgtttgatattttatgttaagctaattagcaatttttctttccgaactttgacatgtactaaatcatactccttgaatttttttggccgttaaaaatttcccctgaactattaagat

SEQ ID NO: 359200 - DNA, 1002 bp, Cannabis indica
atttcaaaatttataatatttttgaaatatttaattttttattttttataattttatttaattttaaaataaattttgaaataggtaccgaaagtcggggttgggtatatatacaattattagcagtcggagcgttgttaatgccctgtcgctaataattctaatgatttatttttttttatttttgtaatattattagcggtgggactcgccgctaatactattagcggcggagtctaccgctaataatttttttttaaaaaaaataaataagtagaattagcggcgaattctggttccgccgctaatgctaccactattaggggcgaattttgcccatcgctaataatattgcggctattgataaattttattgtagtgatagtatataataagacgattctaacttaactataaaatattagcacgtgagtatataatatttactctagatataaattattactcactgtgtgaatatattgctccacatacatataagttagttcctgaaagtctaaatttactaaataaatgagttatattaagtgagtgaccggtctgaaaaaaaaaatggtgagggattgaatccatggcctatatatatataggacgcgaatgaagtcatgcgtgactagtcctgtatttttttttaagtggtgagggattaagctaaatataatatttttttgtgctcaagttaatagtcattcttctttaagatgaattagttatcttttcataaaaaaaaataataaaaaataagaaagaaagagaggagtaagttgaaagaggcatttttttttagtattttcaattattaatctatttgtacttaatcttccaagcttaaattttggtggtaaaataaaaccctccaaataactgaactgttagtaaatttaaggtgttatctattttttacaattaactgtcaatatagactacttatgtgtacactcttgtacacgtaacatttatattggtatacctaatattatt

SEQ ID NO: 359201 - DNA, 873 bp, Cannabis indica
acacgtcggcgtcccgtactagattagggcgttacgaagactagcatggtcaagataaataaaaataaagagagtgactatgtcaaacaaaacgaagaagaagtccaaaaaaattactatgatttagtagatctcaaaaaattagtcaaaaattatttttaattaatttcttaatttgcataattatcattaaattaataataattattaaatagagtaaaaaaaaattaactaaaaatcataagaaatcataaattaaattctaggtacgctaaaaaaaaactgtacaaaaaacaacgttggacggtgaagcacgcgcccaatgcaccactgccgagaatggacattgcagggaaggctgtcttcaaacttcagttgggtctaggagcggttcgcatgactcgattgcagtccaatcaggtcgagatgaaattttggccaaaaaacggatgaaaatagtaggaaattgagggattttgcttgggtttcttaatctaatctatccagagatcaaattttaggtataaatgaagaaaataggatagatcttatggtgtaatccgaaagtttcaaaacaaaaaatttaacataaatcctattaattttcgaataataggaaattaaattgtgaagaaacattataaaacaatgaaaaatcatttatgcataatcaatttcacatttgaacaattaatctcattataattttatgagaaaatcttaaacttaaagcatgaaattctctctcaatattcaataaaattaagcatgtaatatatcaatataaagtttataacaaaaggaataaaagcccaaaagtttcagaatcaatacataaaaaaattcaacataaaataataacgaaattaatat

SEQ ID NO: 359202 - DNA, 511 bp, Cannabis indica
accaaaaaaaataattaaataaatatgttatatgctcatttgtagtggctattagtgttcaatttatctctatagtgtaatgtcattccttctttcttttcttttcttttttcaatcaaaaagaaacaatattctcatcaattaaacagcaaacaataaaacaattacaatgtagtgacaattccatcttctagacaatttccttgttatctaccattaaccgcgtatacgattttattcctatttatccaaatactagtcatgaaccttttcggttcactttcactgagtttcagtttcagaatcatcacaatgttaaccttacaatgtaacaaattgcctctagccataagataaacatgtgtaatgtaactcttgttttgatataatgctcattaaatagagaccagaattcagacttttttttttgcacttggtgtaaaggacaataaacaatatggggaagagtatatcaaatggccaatattgtagatcaattatatatatatat

SEQ ID NO: 359203 - DNA, 531 bp, Cannabis indica
actattaggtctgtttttgcttcgttctgaccttcaatgtcgtattccttatatagggatgagtggtgtgcctccaattgagagaaaaatcaaaattaggtcaaatctgcgatttccgtacctagtcgcgactagcatttaagctagtcgcgactacgggcaaacctcaaaaatcagaggttctgccaaatcttgaagtcgcgaccaggaaaaagggtcgcgacctggctctctggaagtcgcaactactgacacgtctggagccaaattttccaattttttccagtttgtcccatttttttcaccatttgactgaatttgaactttaacaccccgggaacctgaaacaatgaaaatcaagcgtaaaactgctctaaaagacaccaataaacgagaaaatgctaactttaaagacccgaaacataggctaaatataacctaacaaaatcccccaaactagattcttatttgcccccgagtaaggtaaaaaaaaactaactacgctatcagataatcactacgctgctgact

SEQ ID NO: 359204 - DNA, 861 bp, Cannabis indica
agtattaaactagtttataaaatcacacacatggcgtccctatagattagggtgctacaacttggtatcagagcagccattgttttaaaggtgctaaagactggtcgaatatgtacatttgttgcgaggacaggtagactcatggtatatagtaagtatatatattatttgttattggattacctgcctaggctattataaagtatgttgcgaaaagtaccatagtgatgattgtgataagaatatgtgtatggtatatgcatattaatattgatatccgtctgagttctaaatggttagaagatgtggattaaacgtgtgataagttaagcagtaagggcaatcaaatagcctgattagcgagctatctgggctcgaggaaaatggtaaggaagagaatttttcattaccataatgcgaggaacatgtaaattctgttatgcaggatatgattagacaataagggaaaatagttctgagatctgaaagaataataggctcatcttgtgtctattcttatattatcgacacttcctgttgtaccactagatgtggtggaatatatgaagccaacttactagtagatcaagaagcaaaaactaaataaaccaccaattatgggacatgacaaaaaggttctagggcagtaaggatagcgatcaaggtgagaataagaaatggtgaccttatcctgagtatttaagatgcaaaaaggcgccatttgaaccaatgtagagccagatcttattatattgtggggtagtgggtcaccttaaaagaacctgcccacagttaagaaagattgatgttaaagaagaaaagtgtagggatcctgtgttgggaattattttaccaggatct

SEQ ID NO: 359205 - DNA, 749 bp, Cannabis indica
tagggcacaaaacccaacagtgaattccacttgtccggtctgcaatatggctccggaaactattgaacatgctcttctattttgtccacttgcagtagctgtgtgggatcgggtgggtattggtacggtattgcagcaggagttctcttttttgggttggtgtatgtatcattttgaaatatttgatttagataatgcaagcttgctggtggccttatgctgggcaatttagaatgctaggaatgatagagtttggcaagacaaggttatggggatcgaaggcattgttgcatctgcaacaaactaccttaatcaatggcgtgttgcttagaattcaaacaatgagatgttgttcactgggttcattccgggggatggggttgagcaatggagtgctcaaagtgttaatagtattaaggtgaatgtcaatgcggctgtgtttaatgattcctgtgcctatggagttggttttgtggcgagagattccagacgtttctttgttgaaagcggtacaaagttgtttcatggctcgatttatcctgtggtggccgaagcaattggagtctgggaggcattgagttggatcaaggatcattcatggcttcatgtgacttaagaaacagattgtcttttagtgttcaagctgtccgtagctctatagttatgatttcttattttggcaaagttgttagtgattgtaggaatttgttaaattctttgcgtaatgttcttttcattttgtaaaacga

SEQ ID NO: 359206 - DNA, 625 bp, Cannabis indica
ataaatgccaaaactattaatttaataattaaaataataatcaaataaaattttcaattatattatttattaattagactccacaaagtctgctaattaacaaataaaccttaaaattccatttcttcacaatcaagtcatatcctatttctatacatgtatgaaatatgaaattttgaaatttatattaaaatataataaaataaattcctgaaaaatatttaacttaagttgttataaaataactaaacttttaacttaaataatttttcaaaatttaattaaataacaaattaagtatcttgaactaatcaccttaatttgaaaaaaatgtttctatttaagttgatctaaaattaacaaatttttaacttaaaaatatttttaaggaatatctgaacaactaatttccttagaaaattatacttaattattaattattaatttcaagatattctaatttaagttgatccaaaattagtttgaaaaactgattttcaacttaaatatattttctatgaaaacttcaaataattaagtatctagaaaaatctaattagttatagcttcttttatttaattaaatacagaaaaaatacatctagtttatcttgaatatgtttca

SEQ ID NO: 359207 - DNA, 602 bp, Cannabis indica
gtggttcggccatggaccagaagaggaaatcatccactgcatccggtggctcggggcagaacaagaggttccgagggaaccagaatcgaggcggtcgtcagggtagtgttgagacccgttattcctacccggagtgtcccatttgtaagaggcatcatccgggtgagtgctaaggtcagggatgcttttagtgtggcagccagaatctttagtaaattggatagaccgtgtgatagttatgaatcagggtttggaaccctattacctggcggagagttagttatctccaaaaggtggattaggtctatgccgatcagaatagatggtagagagttaagtgctgacttgatagagatgagcctagtagagttcgatattattttaggaatggatttcctatctaaatactcagctagtattgattgcaagaggaagatggtgatcttccaaccggaaagtgaagaaccatttgtgtttgttggttcagttcggggatctcggatcccggtgatttcggccatgtcagctaaggagttattgcatggcggttgtttagggtttctggccgtggtgatggacaccactcggccagataccattcg

SEQ ID NO: 359208 - DNA, 642 bp, Cannabis indica
tccttgatggataatctttttttgataaactttgccaacctgcgtgatctccacaaaagccttcgtgaatttccttgattatttcgttagcttctattggcaatacacaccgtaagagaggcattgaataatccttcctatataatttgtcctcgactattgtataccgaggtaccgaatacaagactttgtgtgcctcatttttgtctgtaggaagttctctgctgagtagatacttgagtatgggtgtcatctatgtaggcgaggcatctatcatctcaacttctttctttacacatatacttgggtcgctcaaaactttaacagctaccaaacttaaactatcaagctcattttgcgaggccaactttgccagtgcatcagcatttgagttatgttctcttagaatttattcaatcttaaaataatcaaacttttctaagctcttccaaactttctccaaatattttgccatctttaaacctttcgcctggtattcccctagaacttgattcacaatcaattgcgagtcactatagtatacaagatttttgacttttactgcttcaactattcttaaaccagccaacaaagcttcgtactcggcctttttgtttgaagtgtcaaattggaatcttaatg

SEQ ID NO: 359209 - DNA, 669 bp, Cannabis indica
ttaaacaacatacttgtgagtagatctaagatcctggtaaaataaattccaacagttactgcaaccaatgaacataccagagttgaaatgggaagacattgccatggacttcgtggtaggtatgcctagagccacgggacagtttgactcagtgtgggtcatagtggacaggtttacgaagtcagcgcacttcttacctgttctgttgaatttctccattgaccagtatgcatagttatatgtgatggaaattgttcgtcttcatggtgtcccaaagtccattgtttcggatagagatccgaagtttacatcgagattctgggagagtctatatcgagctatgggtactcaactaaagttcagcacgacatttcatcctcagacggatgggcaattcgagaggaaaatacagattttagaagacatgctacgggcatgtgtgcttgactttaaaggatcatgggtaaagttttgggttttatgccctaaataaaacttcatttcaatgtaatccgtattattcaatatcaataaagaaatagaagtatttttcattcatttgtgtctgttttggttcacattatcaattatttgtctatttgatttataaattcatccaaacccctttaacattcttgttcttgtttattgtgtcgtcagcacagtgga

SEQ ID NO: 359210 - DNA, 984 bp, Cannabis indica
atataatatattttttaatattgtatttaaaccttttttatatgatagaattttaattatttttttattgtttaattgaattaaagttcaatttaaaacgagatttaaatttgtatttgatgttttcttcttgttgtgaaaatcttatttatctataataggtttacttgaaaataacattatgtagtttttgatatgtacatgaaaaaatcagctacaatcaacacatttttttaagagagaaaataatgaagtttcaaaatataatgtgtcatcaatttcacctatagatattgatcatgtaaattttgaaaaccactctctaaaatcttcaaaacttgacattagagaaggatttgatatcaattcattagagcgtgatcctggactacgccccaccaaaataataatatccactcaagatgcgtgacgaagttcgtagagcttatattaaagctagtccatatcagattatactttctagctatcaacaatcagagaaagcacattcatgtagtttttagtcatcctggtttaagctatttccatcgtggttggaatactctcataatgtaaatattttattttgtttactgttaacctggcatggaaacttttcctggtgatatgaacatcaatatttgacacatagcaagaagaatgacatcacagagttgagtagacccgagtcataaaaatcgacctgggaggggaccctagccctgcgcccagattgcttcgggatctctaagatggaagttcaaacttcgataatttggatgtaactaactatctataagtactctgtaccatgaagacatgtagtaacctaatccaagctccgagagctgaaattacacgaacctgcaaaacatcccagtcgaagtgcccatcatagacggccgagatgcccatcgccagctgcctagataagatccagctcacaaccgccctcatcattcacaatagtctctctctctctct

SEQ ID NO: 359211 - DNA, 559 bp, Cannabis indica
atgaaattaaggtttcaatatatgtattttatttataaatgcgattacatatagatataaattttatttttaaatatatataacaaaaataatttttttatataaaatatttatataatttttatttttaaatatatacaataatattataaaattaataaagaatatgttgttaagtaattggaatattctgttaaagttaacgtagaaaatcaaaattacccttaaaccgaaaattctgttacataatcacatcaatcaatatatcaatatatatatatatataaataaactaaaagtataagtcggtgacgtagcgctccaaaatctcttcaaacacttctatctattttctccttaattcttttatttttttcaattttttattcagtttataaatatttattgattaattaattaaaaaatattcataaaaattataatagttgtaatttaaaattttaattaaaaattaaaatctatatcttagtctttaaatcacacgttaattcatttcaagaaaaaaaaatttacaccaaaaatctgttttgcacatttt

SEQ ID NO: 359212 - DNA, 548 bp, Cannabis indica
gggtattcatcaaaccgttcaaattgcccataccgcaaaaaaatgcagtataaaattctttgcgatgcggtcgtaatttgaatttttattaaactgcatggtgcggtttgccgttttgaattgttaatatgcagttcaaacctcaccgcatgtacattataaaaatattttcttttaatatatttatttgggtctaatatatgaatgtccaactcaaaactcactaataattgtattattgaaacttatttttttatatatatatttagtttcaagccttatggtatttttgacaagtgtttatcaaactttgttgtacccccagaaattgcaaaaaccacactgcaccgcactattatttgcgatgcagtttctgctgttttctagtttcgtggtgcgggtgtggtttgagaaattagaaagactacatgtgcgggttagcttgaaaaaatagtcaaaaaccgcactacccgcaccatgaacacccctaaaaattatgtcttagttatttatgtgagtgggtgaggataatttaggtacaatactca

SEQ ID NO: 359213 - DNA, 598 bp, Cannabis indica
aaattaaaaaaaattataaccggttttatgaggtattatgtgttatgaagtattttattgtgaaactagttttgtttttaatttatatttcagtgttttaggaactgatttcttctttgtttttaattgtagtcggtttgagttattgcgtgttacttatttatattcattatgttatataaccagttttatttttagttataaccagtttgagttctttcatgttatttgtttttattcattataacattgttatagaaccggttctattttaattataactggtttgagttattttatgttatttatatttatttattatgttacaaaaccggttatatttcaattataacaagtttgagttattagtttttattcatataaccagttatatttttagttatatctgagacatttacttattgtgacttttcgagtgacttttctagagacgttgactttttcgttgattttctcggcgacgacaatttttccggtgacagtgatttttctggagacttttccggtgccggtgactttttcagcaaaacttattgttgttttacaaatatggaatttctacttttttttacaaaaa

SEQ ID NO: 359214 - DNA, 746 bp, Cannabis indica
tttcaacataaatataattttcatatttaaataaatatcttgagaaaaatatcgaatatttttgtgtctagagcaaatcaatgtaaatattaatgttctaatttaattaaatatatgtagaaaaataccaaaaagtctacgtagaaagtatatatctagattattcataaactaaatagtaattttctaattaaaatataatatattttagtctatttattttaatcaaatcattaatgaaaattacttaatttaagtgttggaatatattttaccaggatctagatttactagcaagtatatttttaacatcctaaacattaacttctaaaacgatataaaataaacacaaaaaaggtatgagaaacattacattggtcgcagaggaattaaataactccttctgctcagatctctaacccttgtatcctttctgtcgcagagtatcaccaagatctgagcctgatattccttcagttgtttggaatcttcacagtcttacacactatgattgaggactaacttgctatgggtgggcatgcactcaatcactaaaggctgaatttcattttatgaagaacattaaggatttcaaaaattagagaagaaaagaagaagacgaagtctcaaactcactagttgtctctcaagaagaaaactaggtcaagagttaatgtttgcattagttggataatgagacctttctttctttttatactaattcacttagggttaggattgattta

SEQ ID NO: 359215 - DNA, 663 bp, Cannabis indica
ctcagccacatgactctcctctaaagggatatgattttgaaggtcagcaatacgtttattaagaacaactatcttatttttaaacatactattagtacaaacattccaagactttaaagaagaaatgcaagactcttgtttatccataaaactagcaaaattagaattattagaatgtgaaggactcaaccaagaacgctgaactgtttgataaaattcctcattttccaaccagacattctcaaattgaaatctcttcttagaacgaataggaatagaaaaagtatctaacttaatatctacttttaatactctatgatcagaaccaaaaaaacctaaatgatgcagaatagcactaggaaacatatcaacccaagagtcagaacacactgcccaatctaaatgttcataagtggatccatgtttccaagtaaacttattaccaataaaatccataggagaaagtttaaatttgtccaaaaaaagagcaaactcatccatatcagtaacattatgataattactaccagttttatcactataaagcaaataagaattaaaatctccaataacaaaccaaggaagattaggagcattataaaacactttatgcaaaagattccaagtaaaagaacgttgactaacaataggggaaccataaaa

SEQ ID NO: 359216 - DNA, 581 bp, Cannabis indica
ttattaaagttatagattatagaagattatcgataaatgggaattttctttttcgtaatttcataattaataaaggttattttgataattcaattaggataagcctataaacattctatttttattaaagttatagattatagattatagatttatctttttatttgttatattttttttatatatatatattttgcttgatttattattttttttattttatttttctcccatttcctatatctatttgttgacttcgcttttagccaacgaaaatgagtctgttttacaagcgaaaaatgatttataataacagatatacgataaagcaataaaaagacacatgaattttatagaggttcagtcccgagcagttcggtaatagcctaatcctcgctatttgtattgacttaagatcaaggagaaagattccttttcttatagctcttacaacagtatctctgaatatataattcttagataatagtatagtcttagctcaactgatttttcgaccgatctttcgcccagtgaacatacatcactatttatagggccagtaagcttggagaggaagagtt

SEQ ID NO: 359217 - DNA, 735 bp, Cannabis indica
ctctttccttcttcttcattggttgtttcgaaccccttagtgatagagtagtgcccacacacagcaagtggtaccttaatcatagtgtggaagagcgtgaatccagattcaacagaaggacattcagactcagatcttggtgatactctacgacagaaaggatacaagggttagagatctgagtggaaggagacatataattccgctgcacccaatgtaaggtttctcatactttatatatgttcatttataatcgttttagaagttcatatttaggatgttaaacaacatacttgtgagtagatctaagatcctagtaaaataattccaacagttaagaaagtgaagaacaacattgcaaaggtctctaccaacaatgtggcaattcttttgataaaagaagggattaagcccatcaggactaggagctttatcctaagcgagttgaaaaagagcccgtttaacttcagcaaaatcaaaattatgggccaggtaatcatactattggctagtagcatgcttagtgactcccttaaggaccgtgttaatggacttctgatctatgcctttggatgtgaaaagatcagaatagaattggaaaaatgtgttagtaatatctgtgaggttagtgacagtagagttgtcattcaaagtgagtgcctgtatgaaattatttctttttcgagcggaggcccaattgtggaagtatttggtgttcttgtcaccagcatgaag

SEQ ID NO: 359218 - DNA, 522 bp, Cannabis indica
tttttagtagtgttttcttttattttttttaggattgggaatctaagtacacccgatctgaatactaccattctagagtagtagcttctggttatagccaatatcactggagagtttgctgcttttcattttcaagtactatgttcaaatattaaaagaaatggaagaaggagaatagaaagtcagtctattacttcaattttcttgtaatacccttagatgtttgcaagcccgtttggcactaaagttagggaccaatatccttatccatgtgaaggaaaagtctaaactacaacttcatgtaatcgtggctctcactggagagtttttcatgttgtataaagtgttgatggaacgtcctaattggttacacgtgtcagaatgcaatgaagatagagactactttacttctaggtggtccttgataatatatatatatatatgtgtatataaagaatctaaatgaatgttgactatcatcttgtacacgtgtaagatcatcctgttggaatatgttttacc

SEQ ID NO: 359219 - DNA, 686 bp, Cannabis indica
ctttcagcattattttaatgtttattttattggttgttgatcgtattatcaaccttgctttagactttagttttctggattaagttcctggtagaaatttactatgatcgctggaatctatgttgactaatattataggtggtagaaactttttttgagggtctattgtagtgataatggttttttttttttcgattgcaatttccttggcggtggattttattgaatcttttacaatgttgataatgacggtttttttttgtcaaggcatcgtgcagtgtcgacgatgaaattgaatggtaaccactcgtgtgtaatttatggggcagattgttaccaattttaaaaatttgatatgaattccattctgttcttaaatgatgatgtgtcactatgtgttaagtgtatgtatctaaaatttagtctatatttaaatttttttcttataaaaatgtattagataaagaagcatctttttttatatggcactaaaagggataagctgaaaaatacctcttttttgtatttattaattaaaataccccatattatattttattaaaatatacccactttcttgagtgggttgtccaatatacctttactctctacttaagtctagcatataatttacattaacctaagaggtctaatggagatatcatctataaaagtgggtatatctt

SEQ ID NO: 359220 - DNA, 574 bp, Cannabis indica
tcagtttttactccaatattgttgtcaacccaagaacatttaaaaagtagaattcggaacgcaaaataattgagctcccatatttcttcaataaccccataatacgtcatagtacctaaaacatagtttatatcttttgcacttgccaaatgcatggtttctgcgatgatacgtatgccactattttgaacctctcgagcatcatctcttgactttgtatggaaacatatgcttcatgccttgctaccgcaaaagttggtccaagggcaatatgactgaacacatcagatactccatgatttggttcgttcaactttgctaatgatattcctaaaccacccaatgaaagtttgacgatgcttgtctgcaacccatttttgtttattttaatgatttcttggaaccattgattgtaacagctccatgtggtcactgtaaaacaagtaaggcaaatcaagttattgttcatcgggacttaagtaatgttaatcaatggaaaagctacttatgttatgtaacgctcccgcttcaagcctccattggatccttacacccacggaatgaatggctctta

SEQ ID NO: 359221 - DNA, 1000 bp, Cannabis indica
ggatatcgttttggccctggaccaaaagtgaatatacgctaagtgtttttagtgttatcgtttctcttccacgcagcgaggttgaggcctcgtcatgcacacgtgcacccacatgctttctcatcaatacataagttaacagttcgtacgtttctgtctcacaaaaggctatttagccagtcgagttataaacatacattgcaaattatatttccaacgagtcattccatgctaagtgtacttttcgtttgtgtgtttaagttcttccttcttcctagctcgacacgtgtcttcctctgatgtgcttaccaaattttgggtataacaattgctccttaaaagttctttttaattaaaaagagctttttaatgattacaaagggtatttccgtcatgttcctctttcttgaaaagacgcatattctctgattttggcggttgtgcagtttcgaggtacatcagaatttaataacaatcttttccacttccgctttgaatcatgtccataggatcaaatctttctctgatctaacgaaaccactatcatgggtataaaataagaaaaaagtaaccacatttgcaccatttcaaaaagtttgagaaaaacccttaaacttcttcatcaaggatcaccattaaatctgtccgaagacttgcatgccatccttgtccttgacctttttcctgtaagtttccttcgacttcatctcctcaaagcgatccttgcttcgttcgaaggtttgcagacgaaattaccaggcattgccccaagccctaactacaaacagtaagttgcgttcttctttctcatgtttgttacatagtttggatcagttacttgatttgtttgtatcgttatcatctcgtctagttttggtagtttttttaagggttaaaactgttcatactaggattcaggcaatatgtaggttgtcattctgcttgtaagactcatatagatccatggtccccattctagttgagaacattctgcttgtaa

SEQ ID NO: 359222 - DNA, 807 bp, Cannabis indica
aaacattaaaaaatcagaacaatatttccacgtacgtaactctatctacatgtctctttatgatttaatatgaacaaattcaccattagaaatttagaaaataacgaaaatacaccaagataaatattttactatagtattgatgtaattttttttggattatacttgagttggattatttgggaactccagttcaactttttgagatctgcctttcatggatctaaaaattgaagtcagtacatcagttttatgcaaattaaactgaattttcggttgaattttagtttcgtagtagtttttctacacttttttataaatttaaaacagccaatgttttgattgattctaatcgttttctcaggtgaagtcgccggaattattggtggttctctttctggttgaatttttgtttcggttgcgttggattggtgcgtggttacacgatggttgcgcgatagttgcccagaaagcatggatactgggttgaaggtgtgtgtaagtggtatttgtgtaattttttttaatttaggctgtatatttgtttatttggccagctagaagtatttttgtaatattgttacttttttggttaaaactgaaaaaagccctttaaattatatctgagacatatatctaactccagtgacttttctgacgacaacacaacaactccgttaatttttcaataattttttcagtgacttttccaataaccactacaaaaaatcttacttttagtcacaacaaaacttgtgactaaaagtaaaaaagttgtgactaattataaattattattcttacgtt

SEQ ID NO: 359223 - DNA, 889 bp, Cannabis indica
ttattatttttgaaattgatcccaccttaatttttttaaaaaaattataaccggttttatgaggtattatatgttattcgtttttactcattttgttgcggaactagttttatttttaatttatattttagtgttttgggaactgatttcctttttgtaattggtttgagttattgcgtataacttatttttattcattatgttatagatccatttctattttaattatattcagtttgagttatgttgtgttatttgtttttattcattataacattgtcatagaaggaaatctactttaattataactggtttgagttattttgtgtttatttttattcattatgttataaaatcagtttaagttattctgtgttattagtttttattattatgttatagaatcggttctatttttaattataatcgatttgaattattgtgtgtttcttgtttttattcattatgttatagaattggttttattgtaatttatccacagtttgagttaaataatgttatttatttttattcattatgttataaaatcggttatatttttatttaaatatgagacatctacttcttgtgatttttccagtgatttttctgactacaatgattttattggtgaaaataactttttcgtcgactttttcggcgacaataacttttctgttgacttttgctgtatcggtggcttttttggcgccggtgacttttctggcgaaacttattattagaaattttatcaaatttatttattgtcttttttctaatttctcatattttaaaccttaattattttttaatctcatatctttttgcattatttatgtatttattttaggttaattagcaatttttccccccgaattttgacatgtac

SEQ ID NO: 359224 - DNA, 727 bp, Cannabis indica
aagttcattcaatttcatcaatgggaacacactcttactggttttattggattcattgctaacattattaaagagttttatgctaatcttactgatgatttccttgatgagaactctagactgtatagaagagtgtatgttaggggtcactggttctcattttctgaaaaggacattgctcaggctctgcaattgcctgagaatgtatccaatgctgtgatgtccatggatcgtgacttgatgcactctgaactcactggtgctcgttcagaattgaaaccaggggagagtcttcgaattactcacctcacttttgctcatgcttcccttatgcggtttgcactaagcaattgggttccaaattcgaacaagaccgtggtgtctcaagaagtggctacactcctataccgcatcacctctggaacttccattgatctagcctctcatattctcaaccagattgtctcctttcgaagaggtaaaaagccaaccttcaaacttgtatttccaaatctaatctataaggttttatcctctcagaagaatgtggcccaagcacatgaaacacttgagcctcccatcactggccctacattccaaccttctgaatattttgatggtgtgttccaaaaacggccaaaggctggtgctgctgctgcttctgctggtgcaagttcaggctctgctgctgcagagctcctggaagtcaagtctgaacttcagaatg

SEQ ID NO: 359225 - DNA, 501 bp, Cannabis indica
aaaaggcaaaaacctagttttctttctctctaggtttatgagacttcttctacttttcttctcttattttcgaattctatagtgttcttcacaaaaacaaaattcaacctttagtgattaagtgcatgcccacccatatcaagttagtcctcaatcatagtatgtaagactgtgaagaatctaaacaactgaaggagtttcgggctcagatcttggttatactctgtgacagaaaggatacaagggttagagatctgagcggaagtagtcatttaattccgctgcaaccaatgtaaggtttctcatacctttatcgtgtttatttttatcgttttagaaatttatctttaggatgttaaaaacatacttgtttgtaaatctagatcctggtaaaacatattccaacattgggttgatccatttggttaacaaacaagtcgaagaacataaataacacttaagctcgaacttaaccatcttaggattaagatctattgatct

SEQ ID NO: 359226 - DNA, 671 bp, Cannabis indica
taagcggtttatgcactgttggtggtttgatgaacacccccactaataatacgactagtattaaatccaatacaaggctcatccttacattgtgatgacaattcaaaatttgattattttgtactataaattagttttgtaacacatattatacgtgataaaatggttattacgttgaataatttgacataaaagttgaggacttatataatgttaatcactttaagaattacaacaaaacaataacatttaaaatttaggttttcaaattaatgttaaatagtagaatattgatggttaggttttccaattgagttttcagtcgaagataatgtaaggttccttaggtgaactattggaggcaacgataagtgacatggtcggtaaggtcaaggaggtacgttcgtgactggtggggatgttcttcgatcgttcacacaataattttataacgttaatgactaagaaaaaaaatatcttttttcttttgttagtaaagtgttgatgtaagttaaagttaaaaaaaaaaatatgttgttttattctttgtcttgaaaagcaaaaaaataataataataataaagaaaaaatttattagaagatagcatgttataacacgctttcggctcgtttggaacgccgtattaagtcgtattgtattgtattgtatt

SEQ ID NO: 359227 - DNA, 677 bp, Cannabis indica
tgaagaggttgctcatcgggaacagaaaatgattccaacgatggatcttctagcaaatacaagcaatttcaagctatgagtaaagttcttgggagtcggttggactatcaaagaggagtaggttataaattgaaacacaactcagaaacaagtttttgtactcaaagtcaagctcaatcacaaggcccttctccatccattagtccggaagatatgagagtcattgctgagtttatgttaaaaatgcgtgataagattgatcaatctagaacctctagtgacccttctctacatgacccgcggtttgaaatttttttacaaacactactagaaaaatccccttttaagtccatcaatattggactagataaattttttgagtcccttttgtgttggacataatagccttggacataaaaggggtgtttttctagtccaacattattggactagaaaaacatttctagtccaacaattttcgactagaaaaatatttctagtccaacaattctagtccaataatattggactagaaatattaacattaaaatatttctagtccaacaatgttggactgaaaatatttttctagtcgaacattattggacttaaaaagcagtcccataacatgaaacttaattgttggactagaaaaatatttctagtccaacaatgtt

SEQ ID NO: 359228 - DNA, 844 bp, Cannabis indica
agcttgattgctttttaagtgtatgctgctttcacagatattctaacacttgactcttttctcttgttgcagcagccgatcccatggatgcgatcttggccacccttgctggagcccacagtcctgatgtttcccctcctcctaattcttcccagttggtcacccccgagaaagcttcttccagtgcccctccgaacactattgacttagtggacgaggaggaggtacttcttgaggaagctgaagaaggtgaagaagagcaaggggtacttcctgaggaagttgaagaaggtgaagaagagcaagaggttgctctcgtgcgcaagcacaaaggcaagatggtagctgaggagtcttctaaacgcccgcggagggtggacactccggccccgagtcatgactccgggatcccctccgaggcggaggagtatacagtgcctcaaggcattgtgttgactccgttccccggagatgaggagaggcagaatcttcggatagccaaatataattatgtccttgacgagtacacccgggggcacgctgaggtggaggccttgaggagggtcttacgggaggagttgtgtaaagaccgcttagtttaatttggaaattagcagttaatcatgtttaattatgaaaattatttatagctatttaaataattatttatactgttgttattgaattctgagatgcattttatgtcatttagtagttttcataattttgcattttcggtgcccgataacatggaactcggtgtagtagtgtgggatggtttactagacattgggaatgtcgggaatggccgggaatttagaatttcccaaaataaccccccccc

SEQ ID NO: 359229 - DNA, 731 bp, Cannabis indica
ttgaatttcaaaaaaaagaaatggcaggtttgcattatacaatatatttttagatgaatttcggttagtcatacataaatgccccttaagtaattttaaagaatgaaactttgtaattacttcatataaatgattctctttattcataactgaagtttaaagcttacattagtaattcaagttacatcatttatttattgatagtaaggtcgcaaatgttctacgttccagtattagcgagccatctggtcgagcctatttatagactccgacttcaactactgcttcgatgacatatggaccctcccagttcgggttgaacactcttgctgatgcattttttgtatttgcaaagactcatcttaacaccaagtctccaacattgaacagtattttcttgactcttttgttaaagtatcttgtgactcggtgttggtatgcagcgttggtgatttgcgactcagtcatttttcctcaagtagatccaaggacaatttaaaagttcttggttttcttcttgattatcaaacactcttttgtaagtcgatatattcacttcaacaggcagcattgcctccaagccaaatgctagcgagaaaggagtgtgtcccgtgactattttctaggtagttcttgttgggttttatgccctaaataaaactcatttcaatataatctgatttacttattaatatagatcagaaataacattcaatgttgcatggttcaca

SEQ ID NO: 359230 - DNA, 577 bp, Cannabis indica
attttagagaaattaaaatatcgggattagacggtgttatggaatttgataattttacccctagctttaaaaatgcctaagcagttggtttaggggcattttagtaaaatgccaatgggggataggtggctgcctagtttagtgccaacctagcaagttcttttgcagccaaggattaattagaatacctttccttaatgaaaaaaaatcaataaaatttaaaaaaaaaaagaggaaaaggtcaattagagagttcttcttctctctttctctttgctcggccaaaccaaaaaccaggggggtttgctgctaatatttggtattttcagcaaggaactcaaaggagatcaagccaagtaagccctagcctctctaccccttagttttgaagtttctacttagtttgaatgtataattttgagtatttagtggatgttaaggttaaggtaagttgtagttcgaactctagggtttatttgagttggtttcaagttcttgtagctggttttagtgtgttgtgttgaatttatgcaagtttgggttggaaaacctaaactttgatctctaatggctatgt

SEQ ID NO: 359231 - DNA, 982 bp, Cannabis indica
gtattgatttgccaaatagaatcataagtataatttagtggtaattaattcaattccctgtggttcgacctcacttgtgtgagcttactacttgactacgtatacttgcgtagtgtttataaatttcgtaacacccgaccttgactcaaggaaccgcttcgatggccgctaagaagacgatcaatattatgcttttaaaagtcagtttatacaaaaaaaaaaaattatattgaagcttgatgtattgaagacatgtgctttatttttctagtttgaaaagtttttttttcttttgattttaaaagaagaacgttaaagaaagaaaaaaaaattagttcagatttataatgttttgttttattttgtagaagaagacgaaaaatagagaaaaaagataaaaaaataaataaataattttaatgaattttaaataatttatttattttagcttttaattaaaattattatttagacttataacatttagacatgtggtaattttgaataacttaacggactagttaaaataaagactaatagacttacaagaaaaatgaacttagggactattgtcactatttttaaaggttgagaattaatctgcatcacagtaaatttttgtaggacttttgttataatatcccaataagcctaatggtaaataatagggtttatatttatattatgagttaatcaggtaatgagtgagattatgatcctactaatttatttcaacataaaatttaaatttttgctataagtgagtaaataatcgtaatttgttaattacgaagatttctatagaatgtgtgaatataatacagtagaacctctatttaagaataacctctaatttgttataaaaaaatcaagtcccgatttgggctagttataaataagaataacctctaaattgtaattagttatacattttctaagtcctgtattaacaaagtatacctctatataagaataattacat

SEQ ID NO: 359232 - DNA, 1175 bp, Cannabis indica
atcaagggatacaagttatggtgccttgaaactggttttaagaactgtatcataagtagggatgttgtgttcagagaagatgagatggccatgaaagtaactacaagtcaaactgaagctgcacctgcaaaagaaaaaaattcaagcagattacaacttgaggtggaaccaagtaatgactcaattcagacacaagaccaacagattgatggcagtcaagatagatcagatgatgatcaagatgacctcagcaactatcagttggctagtgacagagatagaagaaaaataaggccacctgatagacttggatatgctgagtttatagcatttgcactcactgttgcagatgaaattgacagttcagtcccttcaatctattttgaagctgtcaatggaaggaatggtaaagcctggttagaggcaattcaagaagaaatgacttcactcagaaaaaatagaacttggattgtggttaagaagcctactggtaaaagagttgttggctgcaaatggatttttagagaaaaggaaggtgattccaaggatggtacaaagaaatttaaggcaaggtttgtagctaagggtttcactcaacaagagggtgtagatttcactgaaattttctcaccagttgtcaaacaagcctcaataagaatgatcttgtcaaaggctgcaaaatttgatcttggggtggatcaaatggatgtgagaacaacctttctacatggaaatctagaagaagagatttatatgcaattgcctgaaggttttgaaagcaaagacaaagatcaagtttgtcttttgaagaaatctctatatggtcttaagcaagctcctagacaatggaacttgaagtttgatgaatacatgaacaagattggctacattaagagcaaatatgacccttgtgtatatttttctaacaaaatctatctactattgtatgttgatgatatattggttgttgggcaggaaaggtctgaaattgacaagttaaagcagctgttgtgtaaagaattcaaaatgaaggatctagggagagcaaaaaggatactaggcattgacataagcagagaaagacctcaaaagatcatactatctcaatgcaactatctcaagaaggttcttgataagtttggaatgttcaactccaaagctgtatcaacaccatt

SEQ ID NO: 359233 - DNA, 609 bp, Cannabis indica
aatttttttataattatattaatcatagttcaaaattcaatgtattctcaaaaaatacatttttaaattcatattaaaataaaataaatcctgaaaaaattattctaatttatgttgatctaaaattaattttcaacataaatataattgtgacgccctaatacgtgtgtaattttataaaactagcttaatactaatatattaattaattaataaaaactatgaaaataataaaaacttaactattataaaacactaaaaagggacattataactgcagtaaaaaagagttccggggatccttgttataaaagatttatccaaaagatgatatacaacaacaattcaaaacacaatttaaaatacaataggcacaggtagtctaaaactactcaacacataggctggtggggacaatatgtacattgctggagaagaccgtcatctcatggttgtcctaactttgccttgcccttacctgtaccacaaggcacccgtgagtcacatagactcagcaacaaaagtaacaaagaatgatacattaaatagctaattatacatttcattatcacaaaatgattaaactataacattcaacaataggtaata

SEQ ID NO: 359234 - DNA, 963 bp, Cannabis indica
gtcctaggttcaagttcgggtctgggtcaggtactaggtcccgatcctagttctgtttcacagatccctatcctgattctaagtccaagtcccagttattgtgtgggtttgggtcctggttttagttcggggtcgagtgcaagtctcggttcgggtttaggtctttgtctgggttttgatctgggttcgggttttggtttaggtgctggtcctggtccttgtcctagttcggttctagttcaatttgcgattctgagttcgagtttgggtttcacttcgggtcagagttcgagtctttttctgagtttgggtaccggtcaggatttctgtgaaggtccaaatcaggctccgagtgtgggttcaagtcctgggtcttggtctatgttgggtccaagtcccaagttccattccatatcggagtcttgattcaattctgggtctatgtccttggttctgatcctggtctgagttcgagtttgggtctaggtccgggtctagatttgggtctgatctaggtgtggtttgagttcgggtctgagtctgtgtccgggtatgtccaggtctagaccccgatctgagtctaggtttgggtccaagtccatgttggggttccgagtgcgggtcgatgttttgctcagggtcaggatctcggtcctaatctaggtccagcatttcgatcccattctgtgtcttggtccgagtcaaggttcgtatccagatccctatgtaggtccaagtcattgtttgggatcaggtcccagatttaggtccatttctgggtctcagttccggtctaggtacacaaccttgtcacggcccaagttccagtctcagttttggtctgtggctaggtctttgttcggttctaaatcttggtctgtgtcctagtaatagtcctagtcttgttctagggtcctagtttggcgattcttgttcaggttctaattttgggtcccaggtcta

SEQ ID NO: 359235 - DNA, 602 bp, Cannabis indica
tacttatacttatctttcatttatattcgcagatatcacttttctgaagtctgcccccgtcctgaagatcaaaccgaagggtggaacaacgatgacttcgccggttgtcgcccaaaagaggaagagcgatgcgatggctacacttgttgtagactcttccaagaggttggccaagaccacacaggacaaggggaagaaagtcgtaattgatccacctgttcgagctcgcgacttcctagccatgcaagagaagttcctggctgagattccttatgaggatcttgttacgcgatctgccgaactggccgcgcagccgatgactctgttcataaaagctgctgctactccttcgaaggaagccgactcgctgaagaggcaaaatgctcattttcagtagaacataaaaaagctgaagcaagaagtggcgaggatggagaaggagctcgaggaactcagcaaggccaaggagaaggagctcgaagaactcagcaaggcgaaggaagaggcggagcttgaggtcaagaaatcgcaggcgacgatcgtggagatggcccgcgattgggagactgagaaagagaatgggaagaagcagtatgatcagg

SEQ ID NO: 359236 - DNA, 1065 bp, Cannabis indica
catcttagtaataatttccaataaatatttagaaattattcaacccgagttcctaagagtcacctgggttcatctacaaaagacaacacgcaagatgagtgttggacggagtaacaaacgaaaaacaagcaaatatgccgaccaggagtactcaacagattaaagaacgactatgtctaaagaaaagtcaaagctcaagaagtcaaaaagttttcttgagttagggcaaaaaagttcataaagcttagaataagcaagatgaaagagagacgcaatgcggttcagagacaagctctatggttgtaaacccacatgaagatatgataaagaagagttgcagaagtttctaaccctagggtttcctaagcagttttctacagcatagttgcattcaaagagtaaatatgcaaaggaaagcataaaggaaatcagaaacttactcaaagattcgaatgtctgggttcgagcaacgtcaagcaaaccggcagtcgtatgaaggcacctcagaaactttgaagctagaaaactattttcgctctggagtttacttagcaatgaagggtgataaaatgagttatgtgccaatgctgtgggtatttataggcaagtcacgaaaagaggtaactgaatcaaaggaacctcagacgcctcagcttcccgcctcaaaaatgaatatgggaaatcaaaactaatcgagtgcaaccgtcagccgtggagagagaaaatcagattttgaaatattaattgtcagagcatttattagccaaaacctgaagggatgcccagtcagcttcacatcaagtctcgaacgatcatgctcgacacgtgttcccatccaaaggcgaagccagctcggaagaagtctacacgcaacctcggaggtcccgtacagacttggggggaaaatgttatcccaaattttgcactctaacgtggcatcacgagaatggtgacacatgtagtccacttggagcatctgcttgggaagataggctgagtaggatgcctcgctggcacatccagaataagatattcagcgattcgtgcagagcactcaacacttag

SEQ ID NO: 359237 - DNA, 975 bp, Cannabis indica
gaaagaacatagcacttatccaaggtacaagtaaactatgttgtagatttacatatcagttagaccctgtgtactgataaatctaagaatatatctttaatcacataatcttgattcctttccactatactgacgccacaataaacaagaacatcaatgtgaaaagggttggatgaatctataaatcaagtaaacaagtaattgataacatgaaccaaatgacacacaaaagagtgaaaaatacttctgtttctttattgatattgaataatagagattacattgaaatggagttttatttagggcataaaacctaacaaaatattcccaagagtaaccagtcttaggtttttcttttctttaatgccttgtactgtttttattcaaacttaatacaattgtgtttgcttgcgttattattcacaatgtaaacaactatattttgatcaaatatacaatacttttgggtttttccattgctcgtaatcttcttgtttaagtagttagtattctaccaaactttatgatttttcgagcagttgttaattctgccgcgcaattgtagttataatctatgttaagcaaacttgaatatactttaaggattttatcactttgtatattttaatttgcttgcatggatagttatattatctatttgttttctaggtttaagtacttttatcaaggcgtcgtgatgcctcttttagtactttccaagctcgcgagaactgttagtattcagttttatacgcaagttataacttttgattttcctctcctgtcagataggttataaatcaaaaaattatagttgtttgatcacttctttgtcaaaaaggtttgatcaaggtgttgtaacgattcgaccactttctcgtcaaaaaggtttggtgaggtagttataacggtttgactccactttcgtcaaagaggtttagtcgagaacctttgaatttcaatttttttttgaaa

SEQ ID NO: 359238 - DNA, 748 bp, Cannabis indica
aaaagttaggctacctgattcagtgtttggtctcgctcatcattgaaacttctaccacgcttccctccaaccgcatcaagttcatcaatgaaaataattgaaggggaagagtttccttgccacaaggaaaaggtctctaatgcgtgctgcccctccttccaacaaacatctccacaaattcactagcagaaacagtgaaaaatggtacacctgcctctccagccactgcacgggcaagtaatgttttccctgttcctggaggacccaccagtaaaacacctctgggtaattttgctccaagcttttggtagtttatagcaccttgtaagcatgaaactatctagaaacaaaaactgtatcattaaagataaactaagaagaaacttcacaaaaaaagctagcttttgcagttttctacttcttggagtaatcttgtcagcaaatgtttttaactcatcaaaaaagagattctatcagcacaaatttgtaggtaaacactttcggaacaaactgaatcctaaaatgtctgtattgttcccataaaaatttcttagtgtaatacataatatgtacatacgcctacatataccaataaattaatcccaaaagagaaagctccaacaacaaactatgatacacttgtgattctagtcttaagattttctatctatgcatacacataatacatacagttttctgaaaaagagaaagggacctcttgtcttagacaggaccctccctgttatgt

SEQ ID NO: 359239 - DNA, 932 bp, Cannabis indica
catccatccttcctgtcagggcttgtacttccttaggctttgttggtgatgggatttctatcaatggcttgattttttcagggttttcctcgataccccttgcattgactatgaatcccaaaaattttcctaaggaaactccaaaggaacactttttcgggtttagcttcatattatacgtttttaatattttgaagcatttcgcgaggtctgtggtatggctcccactttttactgattttactaacatatcattgacgtaaacctccatattctgtctgatctgatttgtgaacatatcgttcaccaatcactgatatgttgccccagcattctttagccaaaacggcatgaccttgtaacagtagagtcccatgttggttatgaagctcgtatgttcctgatcttggagatgcatttttatctggttatatccagaatatgcatccataaatgacataagcttgtgcccagcagttgcattcactaactggtccatcctgggtagtgggaagcagtctttttggcacgccttattcagatcagaaaaatcaatacaatttctccaagttctgttttgttttgggacgagaacaggattggctatccatgagggataaaacaccttgtgtataaagtcattgactaataacttgtccacttcttgttttagtgcgccttgcctctcagaatcatagggtctccttttctgcctcttcgctgggtagtttggatcgacatttaaatgatggtagataatattagggtcaatccctatcgtatctccatggctccaggtgaactgatcctgattcgcccttaagaaacatattagctactgctttaattgctcgtccaggttattcccaatgtaaacacactttgtgggatttcctgggtcgagacaacttcttccaattcttcaattggtt

SEQ ID NO: 359240 - DNA, 598 bp, Cannabis indica
tgcaagtattttaccatttatattttcattattttaatgccatataattctaacctaaacctagatggcttactataaatagatagtgatggcttaggaaataaggacatgcatcgtattcctttcagggaaaaacctgagcctcctattctttctctatagccgccaccctcttcttctcttttcttctcttcaattttgaaataccctattgatagagtagtgccactactacaaaaatgggtttcagtgacacttattgacagactctaaaatgctttagtgacacttcactgcgcgtcactaatgtgtgtgtcaggaaaagtaatatatagtgactctttctatgtgttatttaaacctttcagactctctcaaagcgcgtcactgtagacttttacaatcactgtagacttctttcatctgtgtgagcctatatgttttctattgggcttagatgcatataggaagcccatttaagtttttactaagtaaatggactaggttgctaaaataaaatttgatagaagtaagtttatttaggcccaattagatttgggcttattcaatgaataacaattgtttatttaaaggttaa

SEQ ID NO: 359241 - DNA, 832 bp, Cannabis indica
ttatgtaatattctatatatggtcagatttctatatttattacccgatttgatttcaagaattaattttcaaaatattctaacaattaatgtggcgtagatactgatggagtatcctacctataaatatagggtctcggtcctcgagttcctcactcattctgcttatttagcgaattccatctaaagagagttgagagagcgaggaagcccgaactctaataccgaaactatcgtagggattgaagcttaaagatcaatggctggaggtatatcgatctttcattacatatattatcgatatgtttatagtttttccgcattacatattgtttatatatatgctatattttatatactatattatagtttaacagttggtatcagagcggttttaatctctgccttgattttggttaaatttcatatacatatatatactcgtagatacagtgttcatatatatatttattttcgttcgtgtatatatatattcatattcaaacaattccaattatatatatatttttatacgtatatatatacatttattcatacgttgatatatatattatatactttatacgatacggtataatatatttttgttcgatatatatttatgtatatgtatatatgtttttatatatattgtacattatatatatgttttatcgcataataatattcataatacccattttcattattttatgtgatatatacatgcatatatataacatgaagttgatcggtctaaagttcgattttttccgtttttcattttttcggtatttatttcgaattctatatatatattactatattcgtat

SEQ ID NO: 359242 - DNA, 536 bp, Cannabis indica
aaactagcatactttgccaatatatggaaagaacataacacttatccaaggtgtaagtacacttcatcgctaattatcacattagtgtaaatctagtgcactaatgaatcagggacattgtcttttgaagcatataatcacaatcacattacactgtgttgacatcactataattgtgaatgactatatgttctgaacttaacatattttgtatatataaaaccataaacatgaaaattacatgtaaacataaatgacttctaatcttatattgataacaaatcagattagattgaaattagttttatttagggcataaaatcccaacatttactgctttgggtaaaagagttaattattgaacgcttcgtcttgattacatacaatagggagattaagataattgactgcttcagcattttttgggggataaatagtttgattggagactgaaaattacattctttaatagaaattgggaatgattattgagggtggagaataaccgttaactagtctctcataccgtagtctca

SEQ ID NO: 359243 - DNA, 972 bp, Cannabis indica
aggatgatcacattccaaaaatgattggagatggaaaatatgaattaaatgctgatcctttgaaatttcaaaattttgtagacgatgccgagaagcctatttaccctaattgtaataggtttactaagttgtcgacacttatttgattatacaatataaaagccaaatacgggtggagtaataagagttttacagatttactagctttcttagtagagttattaccggaagataatgtggtgccttcgtctttctatgaggtgaagaagacattttgttccttaggcatgcaatatgaaaaaatacatgcatgtcctaacgattacatcctacaccataagatgtttgtggatacaatatcgtgtcccacttgtaatgagtttaggtggcaaaaaaaaaagaattccgaccaggtaaaggttggtatctctgcaaaagtattatggtacttaccccaatacctcgtttggtttgattctttcaaaatgttaatcatgcaaaaaatttgatctggcatgccagcgatagaaagttagatggtaagatgagacatccagctgactcacccgcttggaaatcaattgatgctaggttgcttgaattcggcgatgaacctaggaatatccatcttggtctttcctcgaacggaatcaatccacataccaaccttagcaataagtaaagttgctcgccagttttgcttgtgatgtataatttgcccccttggttggtaatgaagaggaagttcactatgcttacactgttgatatcaggcccttcacagcttagtaattacattggtgtgtactcaacccctctagttgatgatttgagtcgattgtggtatgagggtttttctacttacgatgcctttaggaaagaagagttcaatcttaaagtcatattactatggaccattaatgattttccagctttctaaaatctttctggatacagtgtgaaagggtacaa

SEQ ID NO: 359244 - DNA, 642 bp, Cannabis indica
acttggacaaaaagaaacacatgtcggcggtctccgcaaggacgctgaatgaaggaatcatggctgagctagcaatactacacaaagacattgctcgagtctcccggaggcaaatagaggatgactcagactctgattgcgtagaccgcgagccgtgcgccagatacattttggaggcagagctcctcaaaaactttatgatgcccgaaatggcagcctacaccagggactgagaccccagcgatcacttatcctggtttaaccgagtaatgacgattatgagagtcagtaatgatgccaagtgcttatgctttccactaacgttaagcggttccgcggaggagtggttcaaaaagttggaaccaggatccgtggactgatggaacaaattgcaagttagcttccagagatagtttctcgccgtaggaaaaattaatctcgaagtcattgccctgactaacatcaagcagttacccacagaaacattgaaaaatttcataaagaggttcaaggaagaggccttgaaaaccaagaaatttgatgacggacaaaaacttgcacttcttcaagctgggatctgtacaggaaccccgttctggaacgaattacaataagaggagctgctaacctccaagatttcca

SEQ ID NO: 359245 - DNA, 1023 bp, Cannabis indica
aaagggttttatttagggcacaaaacccaacacggtctacctcaagatcattattacgctctccagccatgccatgaaacatatttttcaattcgtcaagctggtcctgtacggctgggctaacctactcggcattctggtcgacttagattacgtcagcatctttctgagcagggatttgagtatgggctctaggctgcacgatcgttgtagtattctgctcatctgttccccttcttctgtttagatcgttccttaggttgtgagttgctcccaacctttcgaacacagaagagcctggttgccttagcgattgattcttttggttggcgggtggaatagcaccattagtctggttggaaccgtcaggtatgactcctcttgatgaattaccggacatggtttgctcgcctaccgctgggctcacgagcggaactcgtaaccggggattgggcggctgaccattagtagtctgggaagtattctcatttggtcatcttctgtttctcccaggggaatgacgttcggcgattattgacctacagtttggtaggctcttcgtatcagcatggtggcttaccgactacgatcttcaatctctgcatggtgagcccttaatgtctccatctctttatctctccattcagcgaacatacacctttgttcgtcaaatgcgagatttactgcagcacgcagttcgtcgtaatcatgatgcagagatgcagagtgttgttatgaccctgcataagtccgagcgcgtcacggagattttgcaattcgattgcgtctccaatggtcgtctgggcgttggttccaggcagaacagtcgtattatgaatgccctagttgggtccggaactgttattcccagtctcttgcacaccaggcgcaattccagtaataggagctgttccaccattcaccacgcttcccgtctgtctgggattaacagcaagtagaacccttgaactccctgggtcctgtaatgccggatccagcgtctgtgaatttgctgggtcagac

SEQ ID NO: 359246 - DNA, 385 bp, Cannabis indica
accgtagcctatagtataggccacggtttttaaccgtcgcatatagtgttttaaaccgtggcccatactattttcccgacaattttcgaccatcgtcaattttacccagtatccgcgacactcgtataggcgacagttttatggactgtcgggaattctttggctgaaaatgtaaaaccgacaggaatttggggttttttagtagtgctcaaaaatgccaattttccaatttaaccacttcaatgccaattctaattatttaataactaaaaattaattattaaataatattgtcacttaatatatttattaattagacttatcaaaatattttaattaataaattaaaccctagaaactctttattcacaattaagcccttgct

SEQ ID NO: 359247 - DNA, 579 bp, Cannabis indica
aaaaataccacattttttttctaaataaggatccaaaataatttttttcctatgacccactaaatttcagggtcggccctgtctgtgtaacctacttataagtatattttatttaaacatgtcaattaataacacatttataacatattcaatatatttatgattcatttataacctgttaaagtattaaaataactttaaattggtcattaacgagtcagtttcgtgttaatcgtgtcaatccgaacaagatctgtttattaaatgggttagacgagtcaatctgaacacgactaaaatccatttaagacaaatccaaacctgataactctcgtacaggtttcgaatcgtgttatcgtatctgacccgttttgtcggccttaagttttatgccttaaataaaagtcgttttaatataatcttatttactaattaataaaagattagaaatcattttatgttgtatgcttcacatgttattttcatgattatatatttattatgggtgactatttaatggttacatttttattgtaactatatggttacatttttttttaacctgtaatagcaggttac

SEQ ID NO: 359248 - DNA, 531 bp, Cannabis indica
atgtgtttattgtgacttaatctaaattgaggttaatgatatgtattggataacgagtgttaaggttagaaacgctcattaccgttatgagtaattactcgttggaaccgcgattaggtttcttacttatcgttcgctttatcaggcaacaatagtgacatacgcaactcatggataacgagtggtgaggattggaagcggtcattaccgttatgagtaattattcctgaaaccaaagatagatttcttacttatcgtttgctgtatcgggcaacgatagtgacgtgtgtagctcgtggttaacgagtggtaagggtactttatgaataaccaggattgtgtggttacgatgttgtgaaatggattaagcgtgatattatatgataagttgtaattgaatatatttttattatagtgtgattggatcaatgaatgttatattacttatgaaattagtcactttccttgccgagcttcagtgactcatgggatgtaagaatatgtgtttatagggatgtaagattagaatgc

SEQ ID NO: 359249 - DNA, 460 bp, Cannabis indica
tgctttgctgacgatctattggtgttcagtcatggagattttatctcaatcatgttgatgttaagagggctgaaactcttctcttcaacttcgggtttaatgtcgaatgagcagaagacggtggtctattattcaggcatgtcagatactgaagttggaagaatcctggaagtctcacaattcaaaaggagctccctaccattcaggtacttcggaatacctatctgttcaaagaaaatttctaattctgaatgtcagatcttgttagagaagatggttagtaaaatcagagggtggagttctcaaaacttgtcctatatgggaagagtaactttgattaatgttgtactcatagctatacatacttactgggctcagattatgtatattaccaaagaagttgcgcaaggtatattgaggctaagtatgtagatcttacttatggaaaggaactacaaat

SEQ ID NO: 359250 - DNA, 723 bp, Cannabis indica
ttcttttggagcttagacggaattcgtaccaagtggtcatatttttaacatgttccatgcttatctcatgctctctaagtctttcaccaataagcacccaatcactaaagccttcatttattaattgtcctccaacaatttttgttttaaaaactttgcaacaaaaacaaaatactctgtctaactcttttgaataaaagccaatctctatcacacttctctccatttgataaaactctagtatacaaattagcagtgaatcgtctagaaaatttacctttaggacaggccataatagaaaaatctctttttggacaattcatcactaataaatcaatcatttttggatcaagtgtaaagaccgcttagtttaatttggaaattagcagttaattatgatttaattatgaaaaattatttatagatatttaaataattatttatgttattatatttgaattctgaaatgcattttatgtcatatagtgaaattttataattttgcattttcggtgcccggcaacatggaactcggtgtttggctcagtagaatcacaacttagcatgttagtattgtgggacggtttaattagacattggaaatgtcgggattagtcgggaatttagaatttcccaaaaataccctttagtaccattttatgttattttagtgtggaggggcaaaatggtcattttgtcccattaatattttgtcctttagtg

SEQ ID NO: 359251 - DNA, 566 bp, Cannabis indica
agaaccagactaagacccgtgacaacgatatagatcttgactcaggattcgggtgaaactgattggaacagaccagtggtcggtgtctagatttgggagtcaaactaggaccagaacccagaagaagaacaccacccaaacccagaccaagacctgggacccaaaataataaccttaacaacaatcgccgggccaggacactagaacaagactaggaccgtgacaaggaccgcgacccaaacctagaaccgaacacagacctatacccaaacttagactagaactcgggcccggacaaggtcgtttacccagaccggaaatgggacccggtcctagacctaaatctgggaacctatcccaaacacagacttggacctagatagagatctggatacgaacatggactcggaccaagacccaaactagcataaaaacgctggacctagatctggaccgagatcctaacccacacccaaacttggacccgcactcgagaccccaacttggacctggacccgaacctagacctagatcggggtccagacttcgacacaaacccagacaca

SEQ ID NO: 359252 - DNA, 831 bp, Cannabis indica
taagtagtcgaagtttgcctgaggattagctttccaaaaatcaaagaagagctcgaggccggcagtctccaaagcatctaccttctccttcaagcggttcgcctcgaccgcttgagcgtccttattttccttcaaccaaagatagacttgccgcagagaagtcctctcatcctgaagacgatcaacctcaacagacaaggtctcgatggtttcctcaagaagatcagcagcctcgagatccttggtcaggacggtgatcttcttattagcggcaaaaagcttcttgttggcctcacccaactcatggcgaacagctgcagtctctaccctggcctcctcaacttccttcttggccaagtccgcctccgccctcaaggtctcagacagagccgtactcttggaagcagcagatttagcccgggagtaagcataacccagcttcaaaccgacctgccaaaggaaaaggccagcatatgaagctaaatatgaaaaactaaaagggaagtgtcaaaaagaaaagactaaccctggtaagctcctgcaagactccgcccaccaacacatccagagatgagtggtccgcaccagccaactgctcaccgacctcaggaaccagccagttcatgtgatgagccatcacctccctgcccttcttgacctcaggcagcacgggcatggatagagttggtgcctgcacccgttcaagaatcctcctgaccagttcggacccaaatgttggtggcccagactccttagacttggcagattggggagtagaaggatttgcagcagccagctcctcagaaaggtcaatgacctctccagaaggcc

SEQ ID NO: 359253 - DNA, 784 bp, Cannabis indica
aatcatcatttcacttctatataattatagaagctatagatttcatatctatgattaccgctcgcactcaattacattaccatattctgaagatgtaagtactgggccgatccaattggtcaactttaacgaacaagtcaaagaacataaataatacagttaagctagaacctaaccatctcaggattaagatttattaacctaagatcaacttagtgatattgacttagaaagatataacagtaagtttatgatatctttttccactatcaatatcagtctagtctgatgtatattccatacaaccgatactagtatactttactaataccctaaaaaggacataccacatatcaacgtgtaagtaaactttatcattaattatcacgtcagtgtaaattcagtgcactgataaattatgggattaaagactttaaagcatataatcacaattattttctactgtgatgacatcactgttattgtgaataactatatgttctggatttaacagaaattgtgttctaaaaccataaacatgaaaactatatgtaaacttaaatgacttctaatcttctattgatagaaaataagattatattgaaatagattttatttagggcataaaatctcaacaaactcccacttgcactgacataaaactagaagtacatttcaattaatctattgtcttgatattcatatcaagtgtagtgtgttgactatacacaaataacaggaattgtaaggttctagtaagcaatagctttctctaccattactt

SEQ ID NO: 359254 - DNA, 867 bp, Cannabis indica
tgggtcaggattcccccctacgagcggaccgcgcctactgaggttctaaccgtttctaagggtttatttgtccgaatgtgagggtgcctgccgcagagaagaccttccgggatgaactcatcgccaccgcagagaagaagtaccaggagtatctctaccggaaagcccaggagaaggcttattccaaggcccaggcagcttccgagaggccccttcgcgtggggagcccggtcgagaggagaagccaagcgattgctgggaggtcccttcgcattgggagcccggctgagaggagggctcccaggccaaagccttcggttcaggtgctgaacaccggggctcctgatgccagtacctccggctccggtaagtctcctttagcagtacattacgttcctcctgttagcgaatatgccagccttaggcctgtagggttcgatgaacgtctcctttggtttaggacgcccttgactcggtggggagatcatgccaaggattattatttttccaacttaggagatttcctaggccggtcctggatgggttctggacctccagaccccgttcccttggacccttcggcctatctttcttctagctagtttcggccctcagacggctatcttggggatgatgcagccagcattaagattcggaactttgctagggccgaattagagagtcagggtaggactagcttgattgcttttttgagcgtttcactgctttcacagatattctaactcttcttttcttttgttgtagcagctaattccatggatgcaattttggccgagcttgccggagctcacactcctgacgctcccttcctttaacttcttcccaagtggccactcccttgaaagc

SEQ ID NO: 359255 - DNA, 597 bp, Cannabis indica
aataaatcttttaacttactctttcaaaacgcctctcagccataagtttcgatccttgtgttgtagggtactgcatcttttttctattttctgcattaattttagaacgagcaataaactctggactggtgaagaaattacaaagaggaagccaatcctctggagtaagatcactaggcgggtgggcaacagcgttatcaaaatcagcaggacttttgtagtattttttaaaatgcacatgtcttaacaactttcgtttcttatatctatctgccatttcagcccatgcaatagttactagtacgcaattttcatagaactcttaggagagaaccagtgggattgacagagacagaggaataaatcattgttcttgagaaccgttcatggtattaccacccattggcagcagttcaacaatacaatagcaatgaacggaaaccagcagatttgattcaccttatactactttcaaaaacaaaaactagaaacgatgcttgaatatctaaatcatcattaaatgcaatatcacaaataatttagttagcacatctatatcagtagacttacacatatagcaatctgcattacaagcta

SEQ ID NO: 359256 - DNA, 758 bp, Cannabis indica
ctctctctctctctcttttgaataaatagcgtactctgataaataaaccggttaaacctcacggttgttatataaaatatttgtcggaatggagtttaacgggataaccccacacctcttgtgggtgaacgcgtacttaggcacattatgagcggcaaaattacaatccttgttaatatcttttttgataagaactctactattgatgaggttagggtaaaaaaattgggagactattggaaaggaatttactaatgctatcattgatattcttaatagtaatagtgacatttcctatattaacaaaacacatatagttcttattcctaaaaatttaatgatgttgatcttagagattttagacccattagtttatgttccactatttataaaattatttctagggtgattgttaatagattaaagcatgtccgtatctctctaatttcaaattgtcgaagtgttttttgtcggatcatgctatttttaataacattcttattattaatttattcatgctattaataataaaaggaatggtaggaaggtttgggttgccttaaaatttgatatgtcttaggcttttgataggttgaatggttttttgtcaagtcaattacgagtcatatgggttttcctgttaactttgtcaatctaattttttgttgtatttctactatttctttttctttctctattaatgtccactattggttccgtctctctttctataggtattagtgttgggttttatgccc

SEQ ID NO: 359257 - DNA, 1172 bp, Cannabis indica
ctccaatctttgaaggacttttgatccaatcaaatccaagaggtctttagaagatattcgccagcaggaattttaaccttggttttaaagtactctggacctctaaccatgaacttgtccccaggtggagtggcccaaccattagtacatttttctggatcaagaaatggaacagctccacctgacttcacactttctatccatctaatctcctctttggaaccagtaccagccatataatatctgcttttaattgaaatgtgtcaaaagatacagtaaataagcaatgaaaacgacaaggattataattgtgtgatataaccgaaccagacccatttgaaactaattagtgaaaagtgaatcgcaaattaaaactagatttccttggctgtcaaaaagttggatttaggaagaaatggattgtaattggatctttgacaatatcttccgtccaccaattcattctacatatataaagtattttaaaccttaaaaaagaaaaattttaaaaaaaaaaaaaaaacagaataaataataataataaaagtctctacatatataatttcaaaacatagagctatagcttagagtttccaactgtgataggaaattgtgtttagttttgggttaagattctatataaaaaattatcttaactagctatgtatatgtatatatacgtacataaatattatcattatgatcatattttacaatataaattaatcaagcttgagctatgttggattttctgaaatatttaatctttaaaatatcattcatatattaattagatggttttaattgacttaccattaatctcacaaataataatcatgatgaaaatatatataagaaattttttaattcaattaatatttaataaccaggtttaataaataataatatagctttccctaactatttatgaataattaactacttttcatgatatgaaattcatcaatttcatatcatgactttcaaaaagttacaaataaaaatatgatttttcacatcttttttatctgcaaaaaactcaaaaaggagtcaagttgggtctggggataaagaaaatttataattgatagttggcatacaattagaataggaattatttcacaaatatatacaaaaataataaaaatacagttgtacggaattttaaatat

SEQ ID NO: 359258 - DNA, 526 bp, Cannabis indica
aattaagtggctgatgcacttagccgaaaagatgtacaagtttttgttggtgcattgactcaggtgagttcaactttattcgaccgggtgagggagcagtcattgctcgatcctggttacaagaagcttcgtgaggaagtaagaaatggggaatgagtgcggtactgggaagaagatgggcttctctatgccaagggtggaaaattgtttgtaccgaacagtggaactttaaggagggaattacttaaagaaacccacgatcctaagtgggctggtcacccgggtgtggctaggatgctagctttactgtcgaagtcttactataggccgaaaatggaaagacatagaagtgtatgtaaggacatgccttgtatgtcaacaagataagacagaaaaaaggcaagaagtagggttgcttcaacctctgccaatgtattgcttgctgtgtgtgggcactactctaatcactaaggtttttcgaaattatcaaggaagaagagagagagagtggcggccaaggtagaga

SEQ ID NO: 359259 - DNA, 793 bp, Cannabis indica
gaagtatatgtttcataacacacacgaaatttagagggattgaataattaccttcaacatcaacaatcttgagcaatagatcacttgattttatgtccaaatgatttttttccctaaaaaaggatttgaactcatggtaaataaaggagatgtactcattctctgtaaaacttgaaatttgtagaagctcatcaatgttctcatcattaaggactagaggtgtagtgtctatactttgcatcttatttgtcaaattcttattacgaaccttcaagacaaaaaaaatgatttttgaaacatttttcctcacgttcagttagagtgtgaattaagtcttgaaaagtgaaaatagagtcttctttctttttatttccaccagttgattttgtatttctcctgagaatttccaagcatcgtctcccactatctttaacttcacatctctaagatctccctttagtacatttatgatctgtcatgttcaagccatatatatgtaataacttatggtcagttatattaaggaatactctttttttcatattttttttatctattaataaaaatacatttataaaatctacccgtggtgggttgtctaatatacacttcatatataaaagtataggtatatggcaaataatataaaaataaaagtaaaaattaaaataaataaattaaaatagatatacaatgcaatttagactactttttcataagacctgaataaggccagtctcgaaatttagtaggctttaaaaaataaaaattattggactttttatttaaaaaa

SEQ ID NO: 359260 - DNA, 760 bp, Cannabis indica
ttttttatttattgtgtgatttcttcatgcaattaaaccgattttatctccatgatattgtgtctttattgctcttttctatcaaaggaaataatcattttttacctgtacattttctgttttggatcttcttgtaagagaagaaattctcttatggaaagtggttttatttggaaactttgaccctttcttgataagatcggatcaagcacactttttttggcaggaatgaagtccatgttcatgatcgagcacctatttggcaagtgtcctttctggtctgttttgttgctgcagaaacctgattctgatgctgcaaaacagtattttttaggaaagtttgaacagctgtggaatcgatttcgtggctatccttgggttccttgtctaaaatagagcctagagagcagccaattatttcaactcttctagctttcatttttttcttacatattttatttgtgaagagagagttctttttgtgagaacctaattgttcatctaggtttaagtgtttatatatttattcttatactggtcttagggtcggatagaacaaattgattgaacaagagaaaggtcttcgagagaagacttgttcaagccttacttcggaaggaagtaagcactcacacctcaaagacaaagggagtttgatgtttgaaggtggttcaaatttcagattcgtgaagtgtgttacaaaggattggggcaaagatttagagggagtctaaacttgtataagtcaattgtctttgta

SEQ ID NO: 359261 - DNA, 501 bp, Cannabis indica
aattatataagtaataaatatctgatttcacatttgttacatagatattgtttgttatacttaaattgtttattcaaaaacttttttcttttaataacaaacctattattaatttgatctaaattgctatgattacttgttgacagattattctgaagttttcctatcactagggtatttccctagaaggacttaagctagtaactaatcatagacctttcacttttatcaatatgcaatccgaatttctggggaggtaattttggatacaattaaaaatttaacttaatgatctttgaactgcatatctaccaaatatttatccacccctatcagttaccttaatggcacaaccaaccctaatggtgtgcaggctgttccattgcacagggcccaaagatagaaagggcccaaattttcttttaaaaaaatcatattcatcagtttgagttaggaataattacataaggcaccattttctgtaaaatatttacattttta

SEQ ID NO: 359262 - DNA, 622 bp, Cannabis indica
ccattttttatttatattatatttgtttaacaaaattgataaagaaaattgttagtaaaaaaatttgcagttggtcaagagttgcaaaaagtaagaactaaaaaaatcaaaaataaattttaatagatgcctctatcaaataagttaaaatagcttaaaattaacatcataaatagtgttttctatggggtgaagcattttgcttcttcaaataatttgtcccatttttatttcctttttattacttttaacttttttgagttttttttatttttatactttaattaattttttaatattttatgaacttaaattgcaaatttaaaaataaaaatagttaaaaaataatataataagtaattcacgtagctttttatatatttaataaaactagattaaagttacgtacaatgtacgtatatttaattatattttagttaatttttaattattatactatacaatattattatagtttaattaaataaataatcttattttaaactaattatttatcataaaataaaaaacataatgatatatatattggcaaaaaaataatgcgtaaaatttcaaaactaaactcttatttcttgtgttagacttttatttgggcttacat

SEQ ID NO: 359263 - DNA, 520 bp, Cannabis indica
ttacggtttgagtttctaaagtggttgcagcgctagttgcaataggggtttctatacgattttttgttacaatttagattgtaacgctagttgcaataaatatttctatgtaaaattccgtaaaagtataaaaaaaaagctgttttaaagtgtaaaaataaaaatacacattttttttaaattaatataataatttttataaaatatctcatatcaataaaatgtagatagtatgaatcccgtacattcaggggcggacgtacttgtctccctatagtggtcatggcccccctagcatttgtatatatgcaatataaaatcttagttatagtatattgtaattaaactttttaataattattatatggtggctcttttagaaaagtcaaactaaaatttgaaaattataacgaagactacacttcgcaacaaaatagaagataatttttaagtgattgtttgctagtgtatattaaaaaaaaattgttaaaaaatttagcatagattcaattatagatga

SEQ ID NO: 359264 - DNA, 644 bp, Cannabis indica
ttttgttaagtccattgaatagacttattttcaaaatttcctttttttttccttgtaattgaaaacttttgattattccatatgaatgggtgtaccatagttctcttggctttgcttactagttccttattttgactatccattacttgtttaagctaacaatggatttttatcactagtgtcagggtgagttccttgaaaccgtcccattataacaagctactatgactatctgtctaagaacataagttgtattgacctcatcatctgtatcaagataacagaggcactgggaccatcttatatcgaataagatgctacaacagtttggaataaagaaaaattatctcctctacttttctactttattttctgatttagtcatattcttaaaaaaaatagtatttattgaaacaaacactttcttatctgaatgaccaaaggatggtccactgctaatcactttagaatagctatcaatcatgcaaaccttggttaaccgttctatcttttcttaagttcacgatcaaaacacccatcaataagtaatggtttacactaagtaaataaccattccatcattctaaaaatttattgtcactagggtatttccctagaagggcttaggcaactactagtaacta

SEQ ID NO: 359265 - DNA, 179 bp, Cannabis indica
agcatgaaaaattgaaaaaaacgaaaaaaaaaaaagaaagctgtacgcatggtatgtacagcataccacccgcgcgcgctcaagggggatattggctgaccatcctcggcgcgtgagggtgtgtcaccacccctaacttttttcaaatcttcaaaaaatcataactaatttaaataaaa

SEQ ID NO: 359266 - DNA, 705 bp, Cannabis indica
tgattttttttttttggatgaattttaaaagattaataataaaaattaataaaacatagtagttctagtaaaacaataaatctatcaaaaaaaaaaaagttgtattgttttgtactttttacaattttcactttagtgataaaaaaggaattacatcacgaggagattcttccattcaaaaaaactcattatttattctaagagcatgtttaatcaatcggtaagccgcaatattaaaattgtgcataacatcaaagaaatgctctgttatacccgaaattcggctagtacatcagaggaagacacgtgtcaagctgagaagaataaagaactcaaacatgtaatcataattacacttgacatggaataactcgttaaaagcataattaacagagtatgtttacaactcggatgactgaacagtcttatgcatgcgagataaaaatgtacaaactgttgccttctgccttgatgagaaaccatgtaactttaggtgtgcaagacgaggcactaacctcgttacgtggaggagatgtcatgacaatagagatacttagcgtacattgtacgatatacaagctaagtataacagatgggtgaaccaaagcgagagacagcgaggcgtccattgcagaataagatcaaaaaagggcggaaaaaatcatacaaaaaaggccctgagaaaaccatcagaaatctgaataa

SEQ ID NO: 359267 - DNA, 1086 bp, Cannabis indica
tttcttagtatagcgggaaaatagttagacatttggaatgtcgagaatagttgggattttagagtttcccaaaatacccctaagtacccttttatgttattttatgtgggaggggcaaaaaggtccttttgccccatgtctcttttatctttagtgatattaattaaagttaatgagctgatattttctttgttttatgctggaataatattggtaaaacttaggtttatttcattttattcaaaattgaaaaaaattagaaaaagactttctctttcaacctcctctccttctctctctcgaaatccatagagcaatttagggtttggtgttctttctaaaattcaagctggtttttacaagaaattggtggtctcaagctttaggtaaggtctctagcaactcctatttaatttcttgaattttaagaaaaatgaattttgcatgaaatagagttttagttgctgttgttgctgtagtcatttgatgttgttttcagaagttagaatatgatttcttatgttgattttaacatgatttgttggttgtttgaagttttagacaagctttgagttttggaactcaagcttgaagctttaatggtgaattttgattctgaactttaattgttgttttgttgcttggaaaatatttattggggtataatatgcaggtctggaaagtttggttgagtttgggaacgatttggttaggtggttgtttgttgttggttttttgggtaaaatcggctaaccggttttacactgcttgtaaaaccggttaactggattttgcagctagggtgaaaaccagttttttcagcttgtcgttccgtcttagtttcaggttttcacgcagtttattccctgctagtttgggatatttttgtattaagttgcagtaggttaagttttggttttaaacctttgtcccggttgtgatttagcggatcacatatatgttttggaatcgatgtgatttaggaccctataattcggcgagcagttgttccactcaggttgaccggcacacctgaattcagaattaaggtaagattagtataatatcatgcatatgttattacat

SEQ ID NO: 359268 - DNA, 525 bp, Cannabis indica
gagtgattctaatcactttgtacaaaaaaaaaaaaaagtatacagggtggattctacacacatgggacctttttctagcaaatcaggttttgccatatcagcttatcttagtgcatgagaaacaccagattatttctttattattattttgcctttgagaatcaacattttgcgaatttttaccactattacctttgagatttacttttctctaattcatcaacaacagcagagactgcgacgatcgtttaggtattgaagcactagattcttcactagaaactcccattatcagtaataatattatttattactattttttattgatgatgattaaaaccccatcttttgattctttaattttttatatactattaacaataggcaaagaacttttatgagtatgtttattagtaatttttttctttttttctccattaatatattagtaatttagtcgtagttaagtgctattgttttgctacaaagcaatgtcgaagtagtcagcgatgacacatcgatttc

SEQ ID NO: 359269 - DNA, 711 bp, Cannabis indica
tcaatcactaatggctgatttttggtttgtgaagaagactacgatgttttcgaaattaagagaagagaatgaagaggtctcataaacctagagagaaaactaggtttttaactttggaggcattagttggataatgagaccatagcttttcttttacactaatttccaatagggttatggttgaactatttggagtaaaaaattgataaaaatagagtcaaaatgacatataatggccagccacttaatgggcccaacattagtttagtttttgccatttttctcaactattttatctatttttcacaaatactactttttgcaatttcaaccctataaatgccaaaactaattatttaataattaaaataattatcaaataaaattgtgatttataatatttattaattagactccacaaaatctcttaattaataaattaaccctaaaataccatttcttcacaatcaagccataacatagtgaatattcataaactacacatagtctaattttaaaattaaaattgattaattaaaatcaattaactgagtcttacaagaagtttgtctcaactagtatggggatcatgggcctatataaccgagcttccaataagcagatctagaatttatcaagtaaattctctaacttattaattcctcgtttaaccactatagaacttggaaattcactctcagttatatagaa

SEQ ID NO: 359270 - DNA, 772 bp, Cannabis indica
ggccatatgtcaacctgagcattgagtgctcttttcaaagcttctaggttgttgttttgatacttccaaggttctttaaatcgaggaagaggtctcctatcccatttatgaccatttcaaagagaattctcgagcccaacaccaagataacttgggtgcttagctaagctttcatgcccttagaattgtcattttctccttaaatttatttttatcttcattatttctcatgacggaaaaaatgttcggagcgtttttcaagaaaattattggaaacatcttgggttgacaatatgtcaacctgggcattgggtccagtttcaagctttagaaagtttcgttccctcctcacaaatacttgcatcttaatcttccataaaaacggagaatatgcctggaagatttttccgaaaaacttctagaaaatggccgaggttgacaaaatgtcaactttggagctggtccttcattttggcctccaattgggtctgtttcttcctcaaaagtacttttttttttctcattttggatgaagacaaagaaaatgcccgagatggattttcggtttgatgctcggaagtggtccaggttgacaatatgtcatcctaggcattgggtgcctgtgccatctggtgcttagtgtgctaaaaaatggaagttctccaaatctgattcttatgcctcaaatatattcatgacatgtctaattcatgtcccaatacaaagtttgacccatttttacaagacaacatcgaaaactgaaaccctactt

SEQ ID NO: 359271 - DNA, 509 bp, Cannabis indica
tgggtcgcgtaccctttttggtagtcgcgaccctggtcgcgacctgggactttacagaaacaggcaagaatttcactcccagaagtcgcgactagggtcaacccaagtcgtgaccctttttccaagtcgcgaccctagtcgcgacttcccctttttccagaaaccctatgaaatccgaacttaagcaagtcgcgaccagtctttggccaagtcgcgactagctcacggatttctataaatacctcaaattttccccccatttaaccctacacccaaattcaaacataccagccgtcctcaacctattcccttcaaaagtttcaaaattttcttccccaaatcttcaattctttcatcttcaaaccaatttctcaaacccaatccattcaaaaacccaatttcactcatcaatctacacctaccatcaaaaaccataccaaaaatcacccataataccccaaatccaaaaaattacaattgtcctcatcttcaacctcaagttttcaaga

SEQ ID NO: 359272 - DNA, 678 bp, Cannabis indica
tacttttattttatagcttttattttttatatgtgagatagtcacttttaggctcaaatatggttaacgaaaatctgcgttaacagtttggtgctttcattgagagcctatgtgaaaatctctgaaaaaaaaccctcctttgttttgaagaaaagaccctctcattcatggctaaaaatccaaaaaatattaatacaccacatgagaaaactcatcatcattctgggaaagagcccatgggctctagaaggtctaccaacccacagtccagacggaccacccactccaggaggactcaacctgagggtggccctagcgctcggaccacacgttcacggagaacccaacctgacgttagtcctagtaagcggacaacgcgtgggaatggccagaaccctaggatgatggatgaagagccaaatcgtggaggtacccatcctatggaagaggatatttatgaaacggaaaatcgccgccttagacgccgtctggaagaggcccagcagtcgaacgttgcgttagaacgtgacacggctgtggctagggcagcacagggaactaatgctcagaatcaacctgaacctagagtgagaagaccacagggcaggtctcgtagctcacgaaccaggagataggaaaatgtcagggaagaacaacttagggaaaatgagatacccc

SEQ ID NO: 359273 - DNA, 514 bp, Cannabis indica
ctaggtccaatttcagttatgattccaagtccaagtcctagttccagtcctggtcaactttttgttttggttccaatttcgggtcacaaggtacgggttcaagtccacttttgggtctagggctgggtcccaaatccagacaccgactacgggttttgtacaagccctaggtccagatctggatcccagtttcgggtccccgtctgattccatttctggtgccgtgtcacgagctaggtgttatgttcaagttcgggtatgggtcgggtactaggacccggtcctagttctgtttcccaggtccctatcgtgattattggtccaggtctcggttattgtgtgggtttgggtcccggtctaggtttgggttccaatcccaagttgaaatcccgatctgagtctggattcatttctgggtcaaatccttaaaactgatcgtggtctgggttcgagtttgggtccaagtccgggtctagctttgtgtttgattctaggtgtgggtgtttgagttcgg

SEQ ID NO: 359274 - DNA, 521 bp, Cannabis indica
aaaattattttaataagctaaaaatgcttaagaacaaactaatttaatagacaaaaagagccaaataactctattttcatagagttatcaaaaatacaaatattttaatgtatgtatataatttttttggtatgctacatatatttaattattattttttacatattttaattatatgatatgtatttattttaaataatattttattactttctattttattatatacaatggtggtgtataattttattgtcatggaatatatattttaattatggtatataatttggttagtatagtatacatcgttgaccttaaaaagtgatcattcaacagtggagtcgtatggatctgatgcttgccacgtgttacacatataagaatgaaaagcaacaaacgcaaagatttttacagaggttcaggccccttgtgatagcgggtaatgacctactccccttttagttgtattgatatcaagagataaaactattcagatcgctataggtgggatctgatatagc

SEQ ID NO: 359275 - DNA, 741 bp, Cannabis indica
aaattaattaaataatttaaaatataaaaatatctagacgttaaatttaaaaataagataaaataattaaattttaaaaatgtgataaccaactaagcaaaaagatagatttttacctattttcaaggttcaaatatcactaatatcttaaattaataaaaaatattaattaatttaattctgataattagattcgaaatatgaaaaataaaaatctaaataccaaattacataaaaaattcaaaattaattccatgaaaaaaatgaaaaaattgaaaaaatttgcatttggtatttcataccatccgcgcgcgcgcaggtggaggtgtcttgctgagaaatctcgaccaaggaggctgcgtgcagccttgtacgcgagcggacagggctttagacgcgaccctgaccgtgttccttcggacaacaccttgtccgaatgcatgtgtgaccgagtgtcactcggttccgcgcgctcacatgagtgacaccacccctaagattatttcaaatttcaaaaattcataactaattcaaataaaattgaaattgagttctgtaaaaaagtaaattacttaatgttttccatactatgcaacaaaaataattctagaataaagttataattatttttcgtaaaaaatttgtaatcatcaaacaatcattaaaaacacatagatcaacatgaatcacatccaaatcatacatacatcgttttaagaccaaatttcttgaaagtaaatc

SEQ ID NO: 359276 - DNA, 513 bp, Cannabis indica
gtgtgatcaagcactttgtccctcacaaagtgaagatccacttcaatatgctttgttgtttgatgaaagacaggatttaaagccagagatgttgctttgaggttgtcacactagagtatagggcaggaggaaagctgaatatcaagttcactaaataaggattgaatccatataaggtcagtagttgataactctatgaaaatagagtaatttatatctttttgggtattaaattagttttgttctcaagaatttttagtttattttagtgacttttatttggttttttttttaattttgcataaatattaattttagcattttgaaattagttttaattaattttcttaatttttatttgtttatttagtctcccaattaattaaatataattatgtgtggtgttgtaggaatttaaatgcaaaattgatattaagtgttatgggccacgatgttgggcaagaaactaaaaaaaaaaaaagacccaaaggaagaaatttgggcagcccatga

SEQ ID NO: 359277 - DNA, 788 bp, Cannabis indica
atctgagtggaaggagacatataattccgctgccatcactgtaagatattcttgaaacaaatatatacagatatttatatgctctagactaaatagaatttatacattaaacataatcatgaaataaatcatgtgaatcatgcaacataaaatgtgatttctaatcttttattaattagtaaatctaattatattgaaatggattttatttaggacacaaaatccaacaaactcctacttgcactaatataaaataaaaagtgcatttcaattaatctcaacaccttgatatccagatcaagtgtagtatgtagtattctttctgtaataggatctttctccactattacatatccttaatcacaaaatccttgatattgtgaaattcttctctatatgtctactcctctagggatactagattctttactttttggcaactacttctgtgttagtcagaaagtaatactagtagttaattaattaatggtacaatgtcaaaaactgtatagaactttccataggctgattaagtatctttcctgcaactttaacattcagtctcactggtagagttagagactcagataggattttacacttctccaaaattattgctccaccccagagtaatcaccatgttattaataaactttctagcatcaagcaagtctagattcctgatttggtgtagtctaagagtattaaaataccacccttatcgactaacatatagttcatcttcttgatcttatgatttactttattgtctttcaatgttcatttcc

SEQ ID NO: 359278 - DNA, 601 bp, Cannabis indica
aaaaaaaaaaaaaaaaaaattcgcctgtggtttctcaagaaggtgaatatggatgtaatataagtttattatcttaagtgatgtttgtcattctctaatgaggtatttatttttatagatatatgacttgcacaagtttggatcattagagaatgtcgaagagttgctagctttagcatcccggtctgatcacttaagtacttactatgaaggttgtattgtgaatggagttcgatttatggctactaaacgagaagagaagaggagcacacaaaatagtggagtgtttgtggcttgaacagaaggttttaattattacggcacgcttactgaagattatgcaattcatacttggaaaaaaggccaccttaaaaaagaaatagaagacacttggattagcgagacatgcagagaactacatgtaagtttcaaatttttgttttataatattttcaaaaagaatgcatgaatgtattattgtgtttctaacattttatttgatctggagtgaatgcttgaagaggttgctagcattacgggaacagaaaatggttccagcgatggatatcttctagcaaatacaagcaatttcaagctatga

SEQ ID NO: 359279 - DNA, 589 bp, Cannabis indica
accgtctgtgggaccatgagaagtacattcttattaaattctagaaggaaaatcatcatggctaggaaaccaagcaaacggaggtgttaacaacgaatccatcaacatcggaacaatgaacgttctgttatccggagttagaacgccacctgtggatgtcattaatggcagagtagggagaggtaatgtcagacctctcaatctattccctgaaactgcaggcccccaagtcggagaaacatccacgccagcagcaacaatggggcactttccacccatcactccggcggtagtatccgagggaatcgtccagctcaccactgaccagtataccgcgatcctggaccaactacgcgccctgcaggccgaggtggatggacagaacagggcccgactcccccttcgagcccccactacttgcacagagtaataaattctaggcgtcgtaataaccgtgttcgcagggaacgaaggaccaaccccgaatgtctggacctgaatcagccaacctcaggagaccaatctgcgaggtaacccaactaggagacgcagattgatgaagacccgaacgacgtaaccctcgcagcag

SEQ ID NO: 359280 - DNA, 831 bp, Cannabis indica
caaactcattttccccaaccttctttgctaagtaggttcagagcgaaaaagagaggtttttggcttcaagtttgctgaagtgcgttcataaaaaatgctcgtttggatcgacgtaacctgaacccagacgcttgattccttgagtaagttctcaatttcctttatgtttactttgcacatttgctttctgatgcactttcgatttcgctgtagaagatatgtaagaaaccctaagtttagaaactctgcgattttcctttgttacggttcatgcgatttcatcgtccataatgcttgctttttgaactgcataatgcatgtctttcatcttgcttattctaagcttcatgaaatttttttgtcctaactcgtaaaaatttcaaacgtcatgagttttgacctttcgttgaatattcttattctttaatttgttgagtacttttggtcggcatatttgcccattttaacgttcgatatcctgaccaaacactcatcttgtgtgttgtcttttgtagatgaacccaagtgagtttttgggaagcaaacaccaaatcgaccaggatctgcttcaactcttgcacgaggatcatcctcatcttcattctagttaaacttcttcgagtgacaggcattcttccttaagtcttttgtccagccataggatgatggctcgtaccaaaaagacaatgcgtagggtcgacgcatccgaccctcaagtggcccggcacgccaccttacctagcgccgaacaagatccaaccgtccaggaggagaaggatcatgaaggggacgctgaggtccaagagattgagtgttgggttttatacccta

SEQ ID NO: 359281 - DNA, 1018 bp, Cannabis indica
tttttatatttatacttttttatactattttttacttattataggtaaaactaacatttttttttctcttctttagtgacttttttagggcaattattcactttttttttttgcttttctttctcatatctctcttttattattttttttttccaatcatctctttcttttttttatgtttttttctcaaactaattttaatctttgtatatatataaatatataaaaagtgtaaatttttatacatatattacttttttaatactcattctttttttcttttacaaaaaatgaaacaacacttttatatttttctactttttatatgattaataaaagtagtatatatatttttaatatcttgaagtttattcagagttaatttatgaatgatttgcatatttaacaagattgatatgattatttttctattaatttatagttgtcttttttttatttttatagttatttttatgttgttatttatgtgttctatagtaattttatggttatttttctgttatttttatatgtttttttttgtacagttgttgtttaatttatgtgtattttttatcgtgtatactttcagtttatttcagataatatttttattttatatatctgtatttatttattatttttatgttgtttttttaattatttttcaaaaaggaaaagagaaacaaaaaaattgaaataataaagttgtaacaacaaataacattaaaaaatgcaatagtacaaaaagataaataaaattgtcaaaattaagtaaacaaaattatcatatacaaaaatatattaaggagttgatattattttgcttttttgcaattaagtcaatgttttgttattattttgttactttgtagttataattttgttatttttatactttgttcatgttgtttgttaagttgttttaaggttgttttttagttattttcgagttttttatttttttttaacttaaaacacaatattttttgtaattttgaaactttaaacacagtat

SEQ ID NO: 359282 - DNA, 534 bp, Cannabis indica
tttctaactacatttacacaactctttccaagattccagacttcgacttctcgatccttggggcggaggcagctaagatggctgaagcttttcgagccatgtcacccacgcagactcaaggaggtggaggaaatcttttccccgaggttgctgatgctagtgacactgaagaagtcgtggacgaggctgccagcaaagtcacagatgaatctaccactccaactgcccctattgctcccaatgcttagtttttacttaacattacttttgccagactttcttaagcggtacaagggtactcgtagtttgtactttgacaaatttacgtttattttccttttgtaacaaattaagatcccttcagggatacttacttatgttatatttttgcagtacatgggtactcgcgtttgtctgtctattatcatcttgattgcggtttaattacaactcggtgtaataaatactaaggtagaaaaatttcaaaaactttgaaaaaaatcataactcttataagaaatagattaatcaata

SEQ ID NO: 359283 - DNA, 635 bp, Cannabis indica
tctcagtaaatcttctggaaagatgtcaaggaacttgcatactaatcttgtactctcaggtccagatgtcaaaggttggctggtatccactgcagtaaccatgaaacccagacaacctttgctaaccagatctttagctttcagaagtgttattcttggtatgcgtgtcccttaaactttacccacaaacactgccggattagcactatcaggctcaaacaccaccatcttctgcttgcagtcaatcgttgccccatacttagacagaaaataaattcccaggattatatcaaaatcagacagttgcagctctattatattggcggttaattcacaaccgtcaatccagaaagacaaagaccgaatccaccttgtggatactataaggtatccttgcacccgtactttaggaatgtgccatacttcttccgcctctgtccaacccaattcacccccaagggcattaagtatctatccgccctctttgttttctatgcctcccacaggtgggatatgccctctccccatgacgtaaattggttttttgatttgaagtccacccctaagcaaggcaggtcggggtacttctatttctctcaaccagacttcaagtggttgacgggcaccggggacaa

SEQ ID NO: 359284 - DNA, 569 bp, Cannabis indica
ttaatccccaactttttttaaaaaaaaaaattataaccggttttatgtgttatgatgtattttattgtgaaattagttttgtttttaatttatatttcagtgttttaggaacagatttcttctttgtttataattgtaatcggtttgagctattgcatgttacttgtttgtattcattatgttatataacttgttctattttagttataaccggtttaagttatttcatgttatttgtttttattcatttaacactattatagaaccggttatattttaattataactggtttgagttatttcatattatttatatttatttattatgttacagaatcggttatatttcaattataaccggtttgagttattagtttttattcatataaccggttatatttttagttatatttgagacatttacttcttgtgacttttctattgacttttccggtgacgttgacttttccggtgacttttccggcgagattgatttttccagtgacttttccgattccggtgacttttccagtgccggcggcttttttcggcaaaacttattgttgttt

SEQ ID NO: 359285 - DNA, 651 bp, Cannabis indica
ctgtgctgggaaccctaaaaccgttcccctcaactccaatcaaccccaaacttcacaataacttccagaacacctgtaaacatcatattagaccaatcccaatcaataaaactcagcaattcacacagattttcaatccaccattagagagctaagtttgagttcacaaactctaactttgctcaaacctcaaattaaccttcaatttcaattcaagtaagcttaaacaacctaaaaccatttccagaataccaaattataccatttcaatccacacagccacctagaacctaaattcacatgtaacacctaacctatacttactaaaataaagaaaaggatagctaagaatctttaccctaggttgaatcttctttttcaggtttacaaactctaaattccagcagcaaacactccttcttgctggttctttggggtgcacgacaaagagagaaagggagagatactttctcctaaggtttccttcttcattaagtaaagccaaccttttctttttctttttaaattaataaacttattctcagccaacaaattaactagcataagacaaaagaagtcttataaaaagaccttcttgccccctcactaaaaaaagaatttaaaacatcacaagggtaaaatagtcattta

SEQ ID NO: 359286 - DNA, 573 bp, Cannabis indica
tggtatgtggatttttcttctggttctatctctagcaagctggttgtcagacagatctggttgttcctcagtctcaactggagctgtgtctatactatcattcttctcatttggttcaaatcctttaagcttgatttcaaactctgccaactcctccctcttgccaaatgaatctgcatagggtaacacactacctttctcagctttcaagtgaggaaaatcattttcattaaacacaacatttctagaaataatcaccttagacttcccattctggtttatgcagattctataaccttttgtacctataggatatcttagaaacatgcctttgacaaatctagctattgggctttatgccataaataaaactctatttcaatgtaatcttttctattcaattattaataaagaaacagatttattttcattatttatttagtatgttatttggttcatgtgatcatttatatgtttatttaatttataaattcatccaaacccttatctcattgatattcttgtttattgtgtcatcaagatagtggaaagtaatcaagattatgtgattaa

SEQ ID NO: 359287 - DNA, 760 bp, Cannabis indica
atgaaattaaatctgtttctttattaataattgaatagaaaagattatattgaaatagagttttatttagggcacaaagtccaataaatgggccttcacaattggagttgttcatgtgagggagggttgggttcagtatgtcgtacacactactaatggccccctaactcccatacaatgcccaaaagagaggaatttaaccttaattaaacaattgttattcattgaataagtccaatactaattggacctaaataaaatctatcaatagtgatcattttattttagcaacttagtccattttagttacaaaaattaaatgggctccctatatgcatctaagcccaaagcaaacatataggctcacacaggcacacaccaatttggaaggatcctattatgttacaaggtttgtacacaaatgaaagaagattacaaaatttatcttttagaaattgtttatttgacctattgacaattgaaccattagttaaaatcagatcattggatctgtcaacaagttaaccatatcaatttagatcaaacaataataggttttataaaataagtttggataataaacaatatatataaaacacacacacatacaacaaactggacagatagttataggatttatttaatttatattaatttttgaaaataaataattttgaaaataataaaattaaattaaataattaattttaaaattaaacctataaatttgaaaaattaggtttttaacaaacctaaatat

SEQ ID NO: 359288 - DNA, 546 bp, Cannabis indica
acaccaaatttgatgagctccttagatatggtgtatatgataagattattattagacttgagatattttttttctaaaaaaaattaaataaataaaaaagaagaaaaaagatggtggaagtgtttaattggatcgtacttatcattaattaagttttgataagaccaacgatgtatattaggtacggttgatatttcaagtgataagtccataccacattgggagtgggacaacctggccaacttgatattttcttgcttcaaacacttagaaccactcatatctattcactttctagttctatcttcatcacccactcaaaatgatttgtcacattttatcaaaaaaaaaaaaaacttttatcactattattctattatatgcttcaaatatatccatatactgtatagtttttgattttttatatatacaagtacttcttataatttaatacaataaaattataaacaatgtatagaaatatatttttttattatttttacatttttgatttgtaacacgtcttttttgtttttttacattttt

SEQ ID NO: 359289 - DNA, 1074 bp, Cannabis indica
ggctcaacagatgagtaagaacgttccatactagggtatagcctctataccacatacactacgtacctctctgtacgagtgttggtagggtttgtttcataccctgagtacctctgagtgatgtaccacacacactcagtacctctctgtacttatgctggtatcacagtactctaagataacatttgttataccaatacactctataccttaactgtacaagtgttggtagtgcaacaaacacttaagcatgcatatacacataacatatacatacattcagatattgatatcacacattatattcagctcttaccttctttccagattcaagtgtgctggccgatctgaacggaaagtcttgtgctagacggaggccctaatcacattatgaaaccaggtaagttacaagattaaaaccctaatcctgggaaaccaaaaaccataaccctaggttctgctatactccctagaggttactcaaactctagatttagggagacacccaaccacggcactgaaaaggacaaaaatcgaggaaatgaagtgtttgggaaaccctgccaaaaccggctagagaggtctggcaaaaccggctagccagtttgcaccagttctccccaaacctttcacctcttgctcaattttccaccaaatgccaccaaactttccagagtacctaaacaatgcatatacagcatattccagccagtaattcacagaaaaactcaatgaaaaaaattatgccattacagatcaaagctttaaactcaaagctcaaacttccacaaaacctaaaccaaccatcaataccagctgctaggacctaacaccaactcaaattaagcttagaattcgaaccctaagcaaacctaaccctaacagcccccatttcacaaaatcacaagttcaaactaaactttaaagcttcaaaacataagactatggttctagggttacctttgcttgatcctccttgaatcccttactgcaaacaccaatatccagcaatgaatccccctatccttggctggttcgaagagagagagagagatagagagagagagagagaga

SEQ ID NO: 359290 - DNA, 594 bp, Cannabis indica
tgtttttctcaactatattgatcaatatgtattttgctactttggttaatttggtcccttttatttcttgttgagattgataacatatataattaaaataagtggtttgcttaaattttacagaaaattggaaagatcaactactactactgctgctgctatgaggttataagatattgggatattgttgtacgtgtctactatagctagctacttccatatctcttcttccggccggtactaaatttctgagtacttattatcattctcttataattatatctttagaatttcaagttttattttactttctaattaagcaacaagttattgttattaattagtatctaattaattaattaccaggtagtagctttccaatgcctatatgttttatgcatataaatattctattagtatctattaatcttttgtttttatcgctttaattcctcttttgtgtgttttttgtttttcaaatatttacttggttatatatatgtgtgtgttaaatgagatggcatgaagctaattgagacttgagttagccaattaaatgaaaagaaaataaaaacagtacgaggcaaaaaggat

SEQ ID NO: 359291 - DNA, 598 bp, Cannabis indica
tttcggtggtcgggttagaacccataacccgaaaataaaaaaatatttttttattaaaaatttatactttaaattactttactgctgcctgacgtgcctagtgcctaacttaaactgcctattcgtattcttctatagtattagtaaatactattttaaaatattaatcatgttaaatgaatcaatgaatgacagaatgagagtctcagcctattcgtattcttcttcaatcgtcactgatagtctaaactaatatcatattatcagtaagtattcagtgagtatatcactatcacacacacacacacatcacagtatatcactcacccacacatcacgggcacacccaccgtcccacacccacacgactcaccatcccacacccaccgtccacaccagtcgactgactcgactcgtccgactcacccacaccaatcgatcaccaccacgcaacttcttcttctccaagaccggcgatggcgagtcgacgactgactggttctcttcgccgcgctcagcccaataggacccgaacctgattacacccaacccaaaaaataactgatccaaacccgactacacccgtacacccgaacac

SEQ ID NO: 359292 - DNA, 920 bp, Cannabis indica
agattgtgtaaagatctgggtccaagtccggatctcggtccgggtttgggtccaagtctgcgtccgggttcgggtcccggttcttgggttttgggtcccgagttccaggtcctgggtttaggttcgggtctcgggtcccgggttcgcgctcgggtctcggatcccaagttcgggttcgagtccgggtctcgggtcccgggtctcgggttcgtgtctcgggtctcgggttcgggtctctggtcccgggttcaggtcgcgtgttcaagtctcgggtcccgagtcccaagtctcgggtctcaggtctcgagttcgggttcgggcctaggttcaatttatattaatatttagttggattgggttcaatctcgaatgctttgttttaaaaattatattaatatttcaatttattaacatttagataagtatataacttagttagttaattagaagatttgttattgttatacccgaaattcggctggaggacacgtgtaaaggtaaagggaatgtgaatcgatgcaatatctttttatggaataactcattaattgcgtaagtattagagtatatttgtaactcgctaattgtaaggtcctaggcaaagaatcaatgttcgaactggcacttagtgtattaatgagaaaccatatgttgctaaaggagaatagcgaggcaccagagaaaagtaacacataccttagcttacgataagcaaaccaagtgtaaaagttggatcggctcgaagaataagaatgcgagatgaccatctcgctacgaggaagcttcctatagtttcatccaactagcaggagtgaggctcataaccctagcaagtcaaaagattcctgtatacccgcgatcgaagtaagacatatcttgtcgacctcagaaagaagaatggttccagctcgccattgaga

SEQ ID NO: 359293 - DNA, 673 bp, Cannabis indica
gccataacatagtgaaaattacataaactagacatagtccaatttttgaattaaaattgatgaactaaaaatcaattaactgagtcttacaagcagtttgtctcaactagtatggggaccatgggcttatataaccgagcttccaataagcagatctagaatttaccaactaaattctctaacttattaattcctcgttgaaccactatagaacttggaattgcactctcagttatatagaacgctctatatgttccacgatatagatatgctattaattatacattgttataatctcaataattaatcaccctctatagatgatttacaatgcatagggataaaatcaccattacaccctttcaatgtattttatccttaaaacacttatccctctataaacgatattttagtgaactaatgtaatcactaaaatatgcgctctatcatttatctctatttagccaagctcgaaggaaatcatcgtttcaattctatgtccggatagaagctatagattccatatctatgattagcactccaactcaattgtactatcgtgttcccaaaatgtatgtatcaccaagacctaacggtgttggtctccttcttgttgattggaatctcctacagtcttacacactatgatttagataccacttgatgtgtgtgg

SEQ ID NO: 359294 - DNA, 530 bp, Cannabis indica
ttttttttttgctaaattttttctaaaacttaattttttgaaattttttatatttttacgtttaaatttatttttgttttcttaacatttttacaatgttttataaaaacaacactaaaataataagaatattacataaaaataacggcaaaataatattcaaacagccttaaagcaccaacaaaaaaataacatataaataacaaaaaattaataagtacaacataaaaataaattaaaagactaaattttttataaataaaatcataaaaattgtaaaaatattaaaattccgtacaactatatttttataaaatatgtaatttctgtacaaattgtactaagacttataaaatagggtcaagatgcaaaatgaccctaaatctaacaattaagttaataaatgtctcttttttaaaaaaattaacaaaatgtccttttagctaaaaaatttgataataaaattacaattgtaaccttgaataattaagtgtttggtatagttattttacacaatagtatatcgtttt

SEQ ID NO: 359295 - DNA, 630 bp, Cannabis indica
cataaaaatgaggattactctttggaagaaatctaaaaacatattcgaatcgaggaggaatcgatatgtagggataagcttgtggaggggtctaatgaagagacttccaaagcaaatgcaacttccaaagttcctataataagaacaagggaaataccaaaaagggtaataccttgggtccaaagtctaaaccaaaccaattcaaaggtggaaaaagtctatgttttgtgtgtggcaaacttgggcactatgctaaggattgtacgcatagaaaagactttaaggaacccaaagtaaatgctatcgaagaggatatcattgctactagtgagggaatagtgaaattatgcaccaatgatgtaactttcaatgttagcaataataaagtatctagttccacttatatgattgatcatgattctttatttttgtggcatcttagattagctcatatcagttttttctactatgaaaagagttaaaaaatgtggtatgattgattgtgatataagaaattatggtaaatatgaaacttgtgtaaaagcaaagatggtcaaaaaaccttttccaaatgttgaaagaaattcaaaattgttagatttaattcataatgatttatgtgaattaaat

SEQ ID NO: 359296 - DNA, 561 bp, Cannabis indica
atatactatagtgtaaaataaatttattaaaaacttaaattataatatacacaaataatttaaatattcctttttatgccttcatttcaacgttctcaagtattttttgttcatccacaatagttgtttgttcctaaaacaaagaaatcatagtaatttttttaatatgtaataaaattaaattgtttgtatatacgataactcattgaaaaaataaacctctgagctatataaatatgccaaaatcttaatctaatattatagtagcaagaatttattttttgtttcttatttcttaatccaatcacagaataaatatataccatagtgcaaaataaaaatactaaaatcttaatctaatattacagtagcaagagtttattctttattacctattccttaatatatcatttcacaaaataaatatatactatagtgtaaaataaatataccaaaaacttaaatcataatatacacaaataatttaaatgttctttattatatctgtatttcaacattctcttgtattttttgttcctccacaatagttgtttgttccta

SEQ ID NO: 359297 - DNA, 795 bp, Cannabis indica
taatcaccatctcattagtagactttctagcactaatgcaagtctagaaacctgatttggtgtagtctaagagtattaaaatagcacccttatcgacttacatatagttcctcttctttgatcttaagatttacttgattatcttccaatgttcctttccttgattaatctgataccaactcatttctcccactcaacagcacgtgtctggtctaatgcatagcaaagcatatctgagacctctcactgtcgatcctaaggaattctttccttggcctttatcttttctagaatagttgaaacttttccttaaataaataaaatctatgtctagaagtcaagaagcttctatagattgctattagaaaaatgttgtagcatcttactgaagtatgctgcttgcactagagtaagtaaaattaccaggcatacgacaagccacaggtttagataaactcaaacctttaatactacgattaagaagttttgttaagtccgttgaatagacttattttcaaaaattcctttcttgtccttgtaatagaaaacttttcggttattctatatgaatagttttaaccatagttctcttggctttactttttagttccttattctaactatccattacttgtttaaactaacaatggatttcatcacaagtatcttccaagtcataacaaggtgagttccttgaaaccctcccactacgacgaggtaccgtgactttctgtctaagaacataagtggtattgacctcatcggttatgtcaatacaacagaggcagtgagacc

SEQ ID NO: 359298 - DNA, 520 bp, Cannabis indica
ttgctaacagtgaccggtgatagccggtggtttttatcatactgaacgcaaaaataaaatatatgcttttccatcattgcaatggatggattggaccccttttttttaaaaaatgttatagtagtcttatgattttttaaaaaatgttatagtagtcttatgaggtgtgtaatattacaactaaaatattctctctctcaaatgtagaaggaatgggtgcatcggtggaccttttttaggagtgtattgtagaaatatctaattacatttatatattttaaggtacttctacaatatattctattaaaatgggtacgatgcacccctatttatattttacaaaattttaaaaaatttagaatcatttataatatagaaagcaatacttaaatagtttattttacatgcgtatataataaaagaattccatgtgcaacaaacaatttgaattcatgttaaatctttttaaatttttcaaaattttgcaaatatcttaaataattataatatacacgaatat

SEQ ID NO: 359299 - DNA, 710 bp, Cannabis indica
taacagggtgagttccttgaaaccctcccactacgataaggtaccggaactttttgtctaagaacacaagtggtattgtccttttcggttttgtcaagacagcagaggcagtggaaccatcatatatcaaataagatgatagaacactttggaatcaagaaaaaagatatcttactactttgctactttgttttcagactaagtcattttcttagaaaaatagtatttattgaaacaaaaactttcttatcttaatgacaacaggatggtccaccactaatcacttagaatagctatcaaacatgcaaactttagttaacagttctaactttcttcaggtcacgattaggacatccatgaatctagtaatggtttacactaagtacacaaccatttcatcattttgaaattttcctatcactagggtatatccctagaaggacttaggcaactgctagtaactaatcataaacctttcattatcatcaatatgtaaactgaatttctagggaggtaagtttgaatacaatttgaagttcaacttaatgatctttgaactgcatatccaaatatttctccatccctatctgttcgcaagatctttaaccacttaccttaatggtttttcaccattgctagaaattcatgaaatttcttaatcatttcaaatttctttgcataaggtataatctagagtgatcgtattaaga

SEQ ID NO: 359300 - DNA, 661 bp, Cannabis indica
ttatttagggcgtaaaacccaacagttttttggggcatgtggtaagtaaggatggcattctaatggatccggtgaagattgaagcggtacgagactggcctcgacctaagtcaacaaatgaagttagaagtttcctgggattggtagggtattacagaaggtttgttgagggctttgcaaaggtttctacgcccttaatagaattgactcgaaagaattataagtttatttggactgataagtgtgaaagtagtttccaggaactgaaacaaagattaattaccactcctgtgttaaccttaccggtaagtgatgaaaaatttgtgatttattgtgatgcatccaaacaggggttaggttgtgttcttatgcaatctggaaaggtgattgcttatgcatccaggcaactgaaaaagtatgagcagcggtatcctactcatgatattgagctagcaacggttgtttttgcactaaagtttggcatcattatctttatggcaaaaagtgtgagatctacaccgatataaaagcctcaagtactttttcacttagaaggtttaaacatgaggcaatggcgatggttagaactggtcaaagattatgattgcgagattctctaccaccctagaaaagcaactgtggtagcggatgctctaagtcg

SEQ ID NO: 359301 - DNA, 589 bp, Cannabis indica
acttcataattgaagctttttagccggcttgggtcttgaatcccgtactagtgcccatgtcgaacaagaagtggcgaatctgtattgatttcatatacctcaacaaggcgtgccctaaagactgttttccacttcgaagaatcgaacagcttgtagatgcaacaacagggcacaaaatattaagcttcacggactcttactcgggctacaatcaaatcaaaatgcatccaccagaccaagaacatacaagtttctgaacagatatggatctctattgctacaaagtcatcttgtttggtctaaaaaacgctggggctacgtaccaaagattggtaaacaaaatttttaaagatcagatcgggcaaaatatggaagtatacgtggatgatatgctcgtaaaatccagaaaggctggtggcacatagatgacctcgacgaatgcttcaaagtcctcagaaaatacaacatgaaactaaatcccttaaagtgttccttcggagtcagctcgggaaagtttctaggcttcatcgtcaatgcccaaggaattgaagctaatctagaaaagtttcaagccctcctggatatgaac

SEQ ID NO: 359302 - DNA, 614 bp, Cannabis indica
tcatttttgacatgggaaactcactcgaaaatgagagttttgagtctctcatttctacagaacaacaacatcttcgagaactggtgaccagctttgccaaaacataaaaaatgattaagtgatgtcaaaataccccttaggcatcttaaagttcattacttggacatttttccacttacccagtgcccaggttgacgtcatatgtcaacctgggcgttgggaggtcaacttgggcgctggatatcaacctgggtactaggttatgaaccatttttagtaaaacagccataactcatttgatttgattgacacaattcaacttttatttcaaagataattcaatgcttaatcaagtcgtgtctcacacttcaactgcaattttaaagctattgacctcaaattttaccccaagagagttatgaaaataagctatgggttactcgtagcgggttttgctgggctccgaaaaatgactatcaccttgagaagctaattttcaccattagatcatcatctacggtcaaaaacatctaagttgtatttttctcctattttgtgggccttattcgcctataaaaggagagctcccttagttcatttttcacattcagaaa

SEQ ID NO: 359303 - DNA, 568 bp, Cannabis indica
gacagcaaggaaaggaggctttttcgtccatgacttggcaaggtatttgttggggtcgagaactacttacacagggactaaggcttaaggttggcaacagattagatgtgcatctgatccatggattcctggtacttctatttttacacctactttttattcaggacatccacataatacggtttccaactacataacagctgtagcagattagaatttagacttgttacaaatagacttttcatccgtggatgttgctaacatcttgaaaatccttttgtctttctctgctactactgatttatggatttggaacaatactactttgggtgaatacactgtccaaagtggctaccactttgcttgttccttggaaaaccaacaccgtgctacatcagaacagtcatggtggaaagcattttggggtctaaatttgccatccaaagtacggatctttgcaaggagggtcattcaacattcaatccctgtggctgcagctttgtttcaaagaaaaattatcacctctgctgcttgtagcctgtaacgccctaatgctaaggcacgctac

SEQ ID NO: 359304 - DNA, 923 bp, Cannabis indica
acagagtcatattgtcccatggttctaggcaatcaaaccacgaagtccatggcaatgctttcccatttccattccggaagattcaatggctgtagcaaccctgcaggcctttgatgttcagccttcacttgctgacaagtcaaacaccttgctccgtatccagccatatcgttcatcatacttggccaccagaacatggcctagaaatcttggtacatctttgttgatcctggatgaaatgagtaaggagtcatatgagactcatttaagatctctcttttaatgtcatcatccatcgacacacaaacacgattcataaactgtatcattctcgtatcatccattgtaaaattactagtctttcctgtcgaaaccctatctcgagatttcacttactctggatcttacaattgtgcttctttaattttctccaaaagagtagattacggggtaatattagccaactaccccacaacaaactcaatcttggctcaggtcatctcatctactaactgcctagaaatttgcttcacggtattcatctaactctgtcctttactactcagggcatcagctactacgttggccttcccaggatgataaagaatctcaaaaacataatccttcaccaacactagccagcgtctctatctgatatacaagtgtctctcggtgaaaaagtaatttagacttttgtgatcagtgtatatctcacatttctcgccatataagtaatgtctccaaattattagcgcaaatactactgctgggagttctaaatcgtgagtagggtaccactgctcgtactcctttaactgtcgtgaagcatagctattacctttccagcttgcataagaacacagcctagaccctgtctcgaggcatcgcaataaacacaaacttttccttatctgaaggaagag

SEQ ID NO: 359305 - DNA, 701 bp, Cannabis indica
ctccttcaattgtcggtgcgcaagcaataaccctcttgaactgtatcaaaacataatctaatccttgtttattggtgtcgcagtgattcacaatcttctcctcacggactgacaacgttagcactggtgcaataggtaacttttatttcaattcttttcatttaattccactaaagacatagacatctctcaacaactattccacgacatcctgttaattccagaaaacctctaacatcactgtaaatttgagattagcaaaactcgtatttcttatatttagcataaagcttatgcttccaagaacgttgcaacaccatcaaaagatgcatatcatatacctcctttaagtcgaaagaaatcacaatattattaataaagacagctacgaagtcattgaatatgaaaagctattttaggaatgtccttccttcgagccttcaactggtaataaccagatcgaagaccgatcttagagaagatggttctttcttaaaattaatcaacataacatctatccttgacaaaggatactcgttcatcaccgttaattggtttaatctcccagcagtcaatactcactcatatggtgtcatccttcttcctcataaataaaactactcaaactagaaatttcaaacctaatatttcctgtaacggaatatttacccttttcaatcctacagttaccatccaattca

SEQ ID NO: 359306 - DNA, 563 bp, Cannabis indica
gcccttctttctttttctttcatacgcgatgtcaccatctgtgagatctttgcacccgacttttgtccaggaaatccttctgagcctttcttgttgacagatgtccggagggggcctctttccagcggttaggggacccccattcccttttttgatttagggtttggtatggggcctaattgctggaattttaactctttttcagaatcaaaaatgtctgcatccggcttaaaatcttccaagaaggggggtaagcgtctggctaccctagaggacgtcatgctgggtcccgttgcccaggaggggtacaaacctcgggctacgggatgggaggcggctgagcttcactccactctaacttgccctcaccagctggagaacatcgtggaggtggctggaattaagccctcgacatccgggacgtaccaccggccgccccgagatgcggagacgcccaaccataactacggaggcttcggggcttggagccagacgcacctgatgtccggggccatgcttccccttcaagattattttattaactttcttgtatttgtcggcct

SEQ ID NO: 359307 - DNA, 545 bp, Cannabis indica
tttttatatttttataatggtcggtcgattttcaaattataaccatgaaaatcaaaaatcgaattctagatttttttttgcgtaaaaaactgacggttgctcactcctagtagaaaatataatcaattttattataacacctctatattgagttattatttaattttatttaaaaaaatcagttcatgatattatttagtactatttaaaaaaaaaatataaagtctaatttattaatatttaacaaaataaaaaatctaaccgataactttttcaaaactgaaaatctacaataatatttatcttaatttaagtgctcaaatcattacattaatttacaatcccatttcatttcattggtatatatataaaagtattgatattatgtttgaaaaaaatacataatattataatatttaaataattaagtctttgaaatatacttcatgatccataaattattacaattttaaatagggtaaataccattttggaccttctgttttacaaaagttattaattggaccttgtattttgttaaatga

SEQ ID NO: 359308 - DNA, 969 bp, Cannabis indica
ttacggtttgggtttctaaagttatttctccggtagtttctatgtaggttgttatacgattttttgttacgatttaggttgcagcgctaggaatttttatgtagaattctgtaaaaatgcaaattaaaaaaactattttgaagtgtaaaaataaaaaaaaccccttaataatatatgttgcataatttttcactacaaaatagtgataatattttagtcacaacaacaaaaatttgtgactaaatgtaacttttagtcacaaccaaaatattatttgtgattaaacatagtagatataatttgtcactaatttagttatagtcaaaataagtattgtgactaaaaactcattttttttttataaacaactaaaaactcaaatagccacaacaaattgtaatttttatgactaatacttttagccataaacgttttagtcacaacgtaaaaatgacaatttataattagttacaattaattttttatttttaatcatatgttttattcaaaaaaaatagattttttttatagtgttcatacggatagtttatatttttacaatcttaatataattattgtgagtatggaaataatataatattaattatttaaataaataaaagatacaaattaaaatactttagaaaatataatttcttttattgaaggagcatttcattaaaaggcaaaaagctaaagatatcatgtagaaaatagtgaattgaattgtgtatgtacttcgtagaatagtatatttttatatacaaaattaagagactaaatgtgaaactactaaatacgagtttccctaatttttttacgactaatattctaacaaatatcataaactaaactaggagacatcatttaaaggaactaataaccaatataattggtgcttaatacattttcttgttagactttatttgggcttacattaaatttgattggttttattaaaacttgggt

SEQ ID NO: 359309 - DNA, 753 bp, Cannabis indica
agtattccaatatccattcttaactgtgtaccctccagaattgttgtaatgccatattaatctatctaaaggttagaaagatttgggaatggtcaaaatctgtctagcctcgtcagacaaaaaaagctcctcaataagaataatattccaatcaccaatggaaaacttaagatcacggaccctcgaaataagaggatggcctttgaaggagtatgagagtgaagtcgtaagtttaggaatccatacttgagaacgaatatccatagaatgaccttccctaataagccaccacccaccctccacaaatagttgcctaccccaaggaatactcttccaaatattgtaagaccttttgtaagtttcatccacttgtaaaaactcaccataagaaaagtacaaacctttcatcaccatagcaacgcgagacccaggaacataataaagtctctaagcttgtttggcccggagagctatattgaagatgaaaaaatcccaaaaaatcatatccccatccatcttatgccaacataatctctctcaagtacaccaatgcatctttctatcatcatcatctcctccccaccaaaatcgagcacaaagtcagtgaagctcgtcaattgacttttcttatgtattcgcattggctataaagagctggaagtggaaacagactgccaaaaggtggctttgctccttgaaaagaatgaactttgcattgcagaatttggaatggtgttgcaagatatttacaat

SEQ ID NO: 359310 - DNA, 570 bp, Cannabis indica
aatttatttaaaaaaaacttaattcaggactcagaccccagactcggattccttgggacttggacctggacctagacccgggacccaggacccgggacccaggacccgggacggagacccggaccatgactcgggacccagacccagaccttgactcaggacctggacctggaccctaactcgagaccaaaaccaggacccggacccgagacccagacccgaacctagatcccaaccaggacccagaactcgagacccgggaccggaccgggactcaacctgaacccgaacctgggactgcgaccgggaccaggatcgggatcgagaccaggacccggactcgggacccggacccaagaccctaactcgaacccaaactcggacccggacctaaactggaccgagacccaacccgtgtggtgttggggtagagtttattaaaaatatattatctttatctattaatacatgtcaataccaaaacatagtattgtatttaataatactaatacaaaattaaaatgaaatataaaattataagttaatattaaaaattcttaaaaaaaaaaa

SEQ ID NO: 359311 - DNA, 758 bp, Cannabis indica
atgatatcttatctaagttcaatattggtccagtccgatgtattctctacacatctgatactagcatattttactaatgccttagaaaggacataacacttatccaaggtgtaagtaaactttatcgctgattattacgtcagtgtaaatccactgcactgatgaatcatgggacttaagctttgaaatatataatcacaattatcttccattgtgatgacatcactgtaattgtgaataacaatatgttctagatttatcagaaattgtatattaaaccataaacatgaaaataacatgttaacttaaatgacttctaatcttctattgatagcaaataagattatattgaaatgagttttatttagggcataaaatcccaacaaactcccacttgcactaacataaaattagaagtgcattttcaatcaatccattctctcgatatccatatcaagtatagtgtgtttgactatacccaagtaacgggaactgtaaggctgtggtaagcaacaactttctccaccattacttccttcgtgttcataaaatgttatgcaacatcacttttctgtatgtattactcatttggggatactgaattctttatagtttattaagtgttgggaatattttaccaggatctagatttactaacaagtatgttgaattaacatcctaagtatgaattctctaaaacaatgaaataaacacataagggttaagaaaaccttacattgattgtagcagaatataat

SEQ ID NO: 359312 - DNA, 800 bp, Cannabis indica
agtaaaaatcaaaatacaaaactacataaaaaatcagaaattaattccatgaaaaaatatgaaaaaattgtgagttgtagggatggtatacgttgcacacccatccgcgcacgctcactgggtgcacagccgagtttcctcggtgcaggaggctgctggcaagattttcacgcgtgcaggaagggatttcagacatccctgagtgtgctgcttcagacagaggctgtccgaacacgctgctgaccaagtgaagctcggttccacgagcttgagggtgtgtgatcaccctatcttttttcaaaaacttcaaaaaatcataactaattcaaataaaatcgaaattaagttctgtaaaaatttaaattgcttaattgttttcaaactacccaacaaaaatacttgtggaaacgaaaaatcaattatttttcataaaatttcagaagcatcaatcaatcatcatataacacacagatcaacatgaaaccatccaaatcacacacaaatcgttttaagtccaaatttcttaaaagtaaatcaattaccatggctctaatacaagttgttggaaatattttaccaggatcttagatttactaacaagtatgttagttaacatcctaaatatgaacttctaaaacgataagaaataaacacgtataaagtgtaagaaaccttatagtggttgtagcggaaaataatgtctccttccactcagatctctaacccttgtatcctttctgttgcagagtatcaccaagatctgagcccgattgtccttctcttgaatctggattcttcac

SEQ ID NO: 359313 - DNA, 637 bp, Cannabis indica
ccaaaaatatcacaacgattttagttagcaatattggcggacttaatgagataagttgattttaaaaatactagagtattttagagtactaggagttgaccaaatactctagaattaaagattccttagtggctaaaaaatgataagacaactattaataataagattattattattattattattatcagtttaatatatattatatttggaaaaaaaaacataaacagaaacattctctccctttaatttattttctttaattttcaacctgaaacctaataattcaagctccgatggtagtgggacagtaaatcatcgaagagggaaagcttaaggtaaggattggatttgttttaagttaaaaatgattggttttatatagtggctttgtgatttagagtggttatggaaattctaacttcatagaattgttcttgggtagctatggaactagttttgatgtttacttgttgaatttgaggtaattttgagttagaaattgagtttggaactttttaaagcttaagtctgagctttaatggcatttttcgtttaagggctcgattttaatttctgttacgtaagaattgttgtatatatggtatatatgtgccatgtgaagtttggagtaatt

SEQ ID NO: 359314 - DNA, 688 bp, Cannabis indica
aaaatcgccgtacggttttggcagtttttagtggttttttggtttggcggttttggacaatttttaatagttttagacggtttttggcaattttggacagtttttggcgattttagaagatttttggcaattttatagtttaaccatttttttatttcaaaaactaaaatcaaccgccatgtcaaaaaaaactgtaaccgaaaccgattgccaaattcagtgatgacgttgaacccaaaattcggttacggtctggtcagtttcgatttttcagtttttatgaacacccctaccagacgtgaattatataggggaattaaatgcagcatggaggaagcaactttgaatggatccgaaaagacaagtcaaaggcattaaacccattctttggtgattacactctaatctatgagctttgtgacgactacataatgaactatcacatcaattaaggaaggttagggcttatctcacttaacacctagctaaaacctatgcaacctaccatacagacatacataccctactatttgaacctaggaacttgtgcaagccatgcttcaacacttgcaacaatagtgacctttttgctccttttatgaagctataaataccccaactatattctgagaaatgagttagaaaaaatagtgtaaaacatcctctgtaagaaaaactactatattaa

SEQ ID NO: 359315 - DNA, 613 bp, Cannabis indica
aaagaaattgaaattattataaaattaaaagtattataattaaactaaagttataattaacaattaataataaataatattatttttttctataaataatatttaaattaaatattttttaataaaatatttattaaataacaccaataaaattaattatataattaaaagaaaaacaaaaattataattaagtatagggttatttacaaaaatatgggaaagtaaagataaattttaatttatatatatatgacataaaatcttaattacactaaatataattttttttttttaaaaaaaaacattacatatatgggaaaatatcatcaggaatgccataaaaaactttaaaatttgtgttttttttttagttttttctttttttaaaaaaattaaaaaacaactaaataaataaaaaataagacctcaactagtagatgctgtctttttttttttttttcagaaaattaaacctatttttttagggaaaaaaacaaaaaaatacaaaaaaggaaaaaaaattacaaaaatactttgggccggcccattaaacatttatacagtccatatacaaatatttacaaaaataccacatgcactaagccttcagct

SEQ ID NO: 359316 - DNA, 557 bp, Cannabis indica
agtacacaatgttggactttttcttcttcccagactaaggctccgctgacagcgttctcggagatggccaagtacaataacaagtcctctccgtgaacttgctttgatagaatcggaggtttggccatatgttcttttagtttttaaaatgcctcctcacattcttcagtccactcaaatttgtgacaattctttaaaatgttgaggaagggaatgtacttgtctattgttcgggaaatgaattggcccagggcggcaacttttccagtcaagctttgcacatctttatgcttcctgggggaaggcatgttcagtacagcttgaattttttcaggatttgcctctattcccctttggctgatgatgaatcccgaaaatttccctgatttgacctcgaaagtgcacttctttgggttaagtttcatcccatacctccggactacttcgaagcattcttcgaggtcgtccgcatgactctcgcatgctttagacttgaccaacatgtcgtccacgtaaacttccatatttcgtcccagaaggcctttgaacatccggtt

SEQ ID NO: 359317 - DNA, 947 bp, Cannabis indica
ataggtttttggttttctttagataacacaaaactctccctattgccttccaatgatccacacttggattactaataaacctactaagtttactcaccgcaaatgatatatcaggccttatacattgggcaacgtaaataaagctccttatagcacttgcatactccaactgagccaccgctctaccactatttttaactagtggttcactatgatcgaatgttgtgttggcctatttagtctttagatggctaaatttattcaacactttcacaatatagtgtgcttgccctaaagcaaaacctccactatgccttgtaactttgatacccaaaatagtatccacttctccaaggtctttcattttaaaggttgaggaaagaaacctcttagtttcttctattcctttcatgttatcactaaggattaacatgtcatccatatacagacaaacaattatcacataaattttacaagtttttgaatacaaacacttgtctccattgttatgcctaaatctattagaaagaatagcattgtcaaacttgacatgtttcgaagcttgctttaatccatataaggatttcttcaacttacacactttatgttcattgtttggtaagacaaacccttcgagttgttccatatagacctcctcatcgaggtcaccatttaggaatgctatttttacatccatttggtgaacatacaagttgtgtaatgaagccaatgcaaacaacactcttaagtatgaaaataatcaataccctcatttttcctaaaacctttagctattaacctagctttaaaagtttgtatagagccatcagtgtgatatttcttcctatatatccacttacacccaatttctttgcatccttgtggaagattcacaatatcataggtgtcattggagagaattgagtccatctcatcatcaaccgctt

SEQ ID NO: 359318 - DNA, 510 bp, Cannabis indica
aaaataaattggtatatgcaaaaataaattttttcaaagaatactcttgaaattagtaaatatatgaatattttagaaactctagtaacaacaagaaaattctaaaaattaaccatattaaatcaagtttaatatttcaatattttcaaactggagtgttgactttgttaatgggattggattgggcttgttatattagggtgcatgttaaagttatttttttattgtttatcgctaggtgttgaataactctaatgtatacaataatgagctatgagttattttttctaacattaaggtgttattgttagtgatggacccaaaatttcgctatgtgagagtttaattgtcataaaaaaatatttaaatttatttaattttgtgggagcctttttaactttttaagtataatggggctgcaaccccacaccatcaatagtgagtttgtcacaagttgttgtttaaattttaggggcatgtctttctcatgttagtcataattttaatgtt

SEQ ID NO: 359319 - DNA, 477 bp, Cannabis indica
aaatctgtttatattgaaatgagttttatttagggcacaaaacccaacaataagtgcatcaagaattgagaatccactccatgttcattgaagattctgagatggagaacaattctcaatctgtggagcagtcgtcactatcttccatgactgcacctgaatccttcctgtggtgatgctgcttatcctttatatctccattgtgagattttttgaagccttattgctccttgtatttcttgaaatttttttgcaagtgtccagactttccacagaactaacacttccttgtttccttctctctggacttcgatcttaattgagagtgacagtgtttactatttgaacttcctttcttgaacgatctttctcttgccaagtacacttcttctttcttgtattccttctccaattgtagttcgaaatcttttaacttaagtgcagcaagaacatcctccaatacaatcatgtctctgc

SEQ ID NO: 359320 - DNA, 796 bp, Cannabis indica
tcagtccggccgctatggtccactccaaagcggccggcaatgggataaaaggggacaagaaccttactaaggctttgtttgagaatattagcatcaaaaaaattgttattattattattattattatttgatgatctgaagaaatagaccactggattatgaattgggttctccatcaagtccaacatcgacagccaaagccgccgatgaggagttttctccgatggcttcaccatactcctctctttttcctttattatcaccatcttctctctgtcttaagtatgacacttcactatatttcatttcaattttataatgaaatgttaaggttatgtttggtaggaaggagaaagtcccatattatatggagaattaaaaagaagaaatattagtattgtgttgtatatttaaaattattattttattatttttaatatggttttattatattatttttttgtaaactgataaaaactttaagggtacattgcttaaatatttaaaataattgaaataaggagagttctatttgcaaattgaaaaccataaaataataaatacacctaattattaaaaaaatatataaacttaaataattttaaaaaaattcttttaatatttttataaattttttctcatattattttatgttaatttcatatttattttgattttattttcataattttttctaactcgggtatatttcttttattttcttaagaaaatttcatataattttttattttaatttttttgtcataatatttaaaatataatttatttttgtttg

SEQ ID NO: 359321 - DNA, 625 bp, Cannabis indica
attgagatgtagcttaacgatccttttgatgtgcagatatcctcttagcgattttccttttgaattttatgacgctttgatgtatgaacgttgcctttgcggtggtatgacttattattttaatttggtgttaatattcttcattttgtattttgctgatgttttatgttattcgcttgatgtaaatttaacattcatccatatactacatcccctagtttaagtcttagttagtgtcactaaaacttagactttggagcagcttgactgagtacgtcgagtttggctgatcgtaacattgttgaataaatgttatatttagttacgattgaacgtaattctaaagacttgattaatgatttgaaaagtcagactaaacaacatagctctggctatttgatctatggttgagcctgactcttgtccttgagtttataaatgaatagatgtgttgggcgtagcccttatcacttagtttgtaagtgaatatttggattgagtgtagtttctatcaattactttataagtgaatagttgggttgagcgtagctcatatcacttatttcataagtgaatagttgggttgagcgtagctcctatttcttattttataagtgaatagtta

SEQ ID NO: 359322 - DNA, 923 bp, Cannabis indica
gtactcatccacacgatgagggcctaacttttcgagaaatgctaaagggtatctgtttggagggtaaaattcaagcacaagaaaaaggcccaaatagaataaaataaaaacatcaaaaggcccaaaacagaacgaacacacaaaggcccaagatctaaatacgtcagaaaggcctaacaccgtgcgacccatacaataaatctcaagggatagatacggacagggagcactaaacaacgaagcggagaagtaaacgccgacggaaattggaggaggagggaaacagaagaatctgtcgacgaaatacgggccgaatgtaggatgcattacaaataagaacccaatggggacccccaactaatctatcgacgggagatttacctaaaatataataagaaaaggaacaccagaacagcaccccaataaggacaaacacctccgacggaaggaaactcaatttgcctcagacgagagttccgacggggacaagagacactggatacaaaggaagagataaacatttctgagaggatgtaatatcgtcggaccataagaaagcaataatagaatagctgctagttaaaacgtggacacgtagcaaaatggaaggaacatagagaaaaaacacgtgtcaagagtagagtaggtagatgatgggttacccatgcaatcaaaagaacgtaccatataaataaaaaggaaccacgtaaagaaaaggggattaggaactgaaaaagaaagatcccacaaaataacaaatagtgactgtttttgaccaaaacagtatctatagtacttaacactcttatgagatattatattgttattggtgcaactcaatattgggtctcacttgttttactttaattaataaatattataaaaaaattactaaccaattataagatgatacttcatcgtaa

SEQ ID NO: 359323 - DNA, 525 bp, Cannabis indica
atttacaattaacataaaaaattgctaaaaaaaattaaggtaacttaaacaagtaaccaacatcatgggttactaaaattattttttttttatttttccttttaaattttggttaattatctcttcataaagtataaaataaattaaaaggttgctctttattttaattatcttttttaatgatagtaaaaaaatttatacttctcaaatgttaaaatgatcaccttaaaaaataaatcacaataatatcattttcgaactaaaataattagtagagtaattcgaaaatatttttaaaataatagaattgattgagaaagaaaaagaaaacaattataataaaattatagaaagtgagaaacttatatattttgttccttcacacgaggaaagagaaaaaaaaatactagatggacggacagatcaagaaatagaataagagatgagagattattttgatttagcggtataacaataccttatttggatcaattaaattgttttagttattttcaatattatttt

SEQ ID NO: 359324 - DNA, 881 bp, Cannabis indica
atattttttttttgcacattttttgtatttatattatttttgttgtacatttatgaaaatagctctaaaaatttttgagatgcatgccattgctaatccttgtgaattttgataaaattgttccaattctaattggagtactttcatcattcaatgatgcatccaaatttaatttaaatgtgccaagtggtggagtaattcattttgatgttgatgtacaaatagaattctcttttaaactggcagctcgctagatattactgaatttatcaaagaggacttgaattctagaaactatagtttgaggataactaaattggtggccatgaactacttgattttgttctccctaaatatacgaagatgccacaagaaataatttaaagtctgattgtgataaaacttgtgatggtttaatgattattaattgaaaagaaacttctatggagatattttttaatacattgaaatttaataatttacacaccttctaaaaactattacacacaaaaaatagcatggttattggtatcaaaattgtaaccacataccggacagttagaatgggcaataatatttcttttcttcaaaccaatattagtaggaagtatgtcatggaaacttttccaaacaaagtttaaaatcttttaggtaaatccatcctccaaaacctcttccaccaaactaaaaacacatccttagaaggagatggttcagacaaatcaaaagtagaggctacaacataaccacttttaacggagtaagcaccatccaacgtaaaatagcaaaaccaagaatcatgaaagtcctaattactacaaattctaattgattaatctcaacagattatttctaagctctgaacagaatttaaaatcaaa

SEQ ID NO: 359325 - DNA, 708 bp, Cannabis indica
ttttttactaatataatgtataggattagtcatgctctttctatgtgtttctagttagtaaaaatattattgatttatttttatgtttatccttttattacattattgcttgatgtataatgtcaattctaggctctacataagattaaattatttcttttatctataaaaatttgtatactcaaaatataatgaattttaatgttacattatttgtgtcaactttgtgaatcaaatgtataaaataactaaagaagcatatggatgactcttgaaacatttccctctttatcatttattacattttatttgctttattttaatatttattacaaaaacaaaaatcacaatctcattggttactattgtcactctttattaaccttttgtatttatttttctactaacgtttttttttctttttctataatcatctttttgtggaatcgattacccaatctatattttaattgccgctaaattttgggtgctaaaatgagagtgagggggagaatcacgagagtgggaggggttctttgggttttggggttcatagattgagaagaagaggaagaggaagaggagtctatccatggttctagagagagaaaagaagaaagaaagggaaagaattgtaattttgtaatttattttatttttaaaaaaaatttaaatatttttataatatttaaataattaatattatgt

SEQ ID NO: 359326 - DNA, 544 bp, Cannabis indica
tttttttgaagttttaataaataaaatatagtaaaaagaattaagtagggaaagtataaatataatttttttaatcaaaatataatgtcaagttgaaaagaaaatttagtatttggtctaacatttccaataaaaaatgcatttatctaaatatctattgagccttaagtcatacctggttggactggtaagggtccacttaactaattcggcgagatttttatagaaaattacactacatacttcttttaatttaatgcttttaatttttcctctctttttcaaaatttattatgtttatatcttttttcaatcaatctactaattttacccctatcactttacgataattttcattttttttaatcaaaattttgtcttaacttttctacaaacttacacatctatctacaaagaatataaatctattatatttgaaattatgtcttaattatgtgagggtgcgaagataatttaagtacaatattcataaaaaaatagagcaatttgcggcgaaacccacttatgttttaatttttataca

SEQ ID NO: 359327 - DNA, 499 bp, Cannabis indica
ataattaatgtgtaatattttaagttttaggtgttgtccctgattttgcacaatatacgtggaccaaccagacaaggatacgtggatacaaaggtcttaacactcaaattaatagctaagtctttataaagaaaggaattatctgggatttgcctcccgaaaaaaggcatacgaagtcctctatactcccggaggccaaggtggcatcgaagcatctccgggagatgtcaggcttcctctgaacagtcaactcgcatttaatgccgcatgggaggaggcatgttggaactgccacacgcaataaagtctgacgacacaacccccgatctgcacctacaacggctatgatcacttaagtctaatgacggctacactatgaagaatcacatcagtcaaaatgcaataaggaaaatccacataaaatccctacaacacctagggatttgaccatgcattacccatggtatattcattgggaatacccaactttattgatagt

SEQ ID NO: 359328 - DNA, 787 bp, Cannabis indica
aaaaatctgaatgatctcgattagtgttgaactcattcaaattggatagtatatgagaactttggataactatatgagatgttttagacgtagtgaattatcgaattgctactcttatattttaagatcaacaattgcacaatataattgttatcccaaattttgacctgtatgacgtgcaatcaaaattgtaacatgtagcaagataggttattataagattgtatctcgtcggcacattaacattgaatagaggggtatttcctttaagggcgagttatcgtttagtcgatagggagacaacaacctgatagagaagcttataggatgcttattatattaaaggatcgatatatacttcaccaatatatatatatattttgacaaagtaaatgattcagcgggacagttgtttctttagtttccacaaccacgacgatgacatgctcaatccaaatccactattagttcaggatcccacaaaattcaatttttataatgttcttttcaattttgaaattgattttaattaattaaactattttaaatttatatgatagtatattaattgaattttttattatggaaaaattcttatacaatttttttttgaaattttataacacaaataatcttctcaagatactttattttgaagacgattttcagagcctaagtatactttaagtaatacttcccgcgtccttccataagtgttagccgaagcaaatgcaagacaccatcacaatatgataattttgagatgaatcatgctaggaatgtgacc

SEQ ID NO: 359329 - DNA, 828 bp, Cannabis indica
gtattataatatcttaactaagatcaatatcggtccagtccaatgtatacttcatacattcgaaactagtatacttttccaatgttatggaaagaacataacacttatgtaacgcccgtacttttataaaaatattaattttatttacaagcgttaaacgcggaaaattataatgtcgcatttttatttaatacttgaaaatattcacaactggccagttttcgtacacaagacataataaataataaaataattgcaacataaatttaatagcgtaaataaataaacagagtgccctagactgcctgcagttatatgaccctaagcaagttcacacacacaagcgtccaaagttccactcgccaccggcattctagacttttagttactttggtctgcacatggtaatttaataagggtgagctactaaactcagtaaggaaatgtgtgtcaggtagtcacataaataaaaataaaattaactaaaatgcacatgcacacatttagacagatagcaaaacataaacttaattatatcactagtcactaataactaggttctaagctaaatcacataataatgattacgcccgagtccaattttggcaaataaactcgagctattggactaaatggcggagggctgggttcagtaaaatcgtacccactactaaatggccccctatctaccatatagacccaacagtcaagtatttaaccattatcttctcggtcaaaccatgtcacataaactataatctatctaatttaaataatggcaaactactatacattatttaaataacataacaatcataattaaataat

SEQ ID NO: 359330 - DNA, 509 bp, Cannabis indica
gaaaaaagattagaagctcataactaaattgaaataaaaattacaaagaataaacatactttacatgctcttcaaaatataaaaatagtagaaagatgtgtggaatggtgtatgagatgaatagtgaaagagaagagtgaagagtatttaggagtgaagcgtatttaggggtgaagagatgtgtaatgaaaagatgtcttgaaatggtcttccaacatcctatttataggcaaaattgggagattaaattaattaaaatataataaataaataaattaatttaattagcattgggaagagaatggataaataaagtatgtgtacgagtattgagaaaataaaatatttgtttggatggaaaagtagtgaaaagatagggtaaaaataaggttaattagtaattttttcccccgaactttgacatgtactaaatcgtgccccctgaacttttttggcagttaaaaattacccccgaactattgagattgttaaatttaaggacttttgtc

SEQ ID NO: 359331 - DNA, 439 bp, Cannabis indica
aaggttcatggaggcatggggtttcgagatattcgggattttaatgtctcgttacttgcgaaacaagggtggcggctgttgtcttgtgaggaatctctagctacgaaagtttttaaagctagatatttcccctctggttcattccttactgctactttaggaagtaacccaagttacatatggcggagtgtgttggaagcccaggctttggttcgatctggcgcaaggcgtttgattggtgatggtactcgggttagcattctaaatgacccttggcttatggatgagattaatccgtacattgagactgttagcccgtgtctctatgggcaaatggtgagttctctaatgcacattgacaagctggaatgggatcaggaggtgctcttggatgttttaaatgaacgggacaaaaagttggtttggcgtattcctattt

SEQ ID NO: 359332 - DNA, 749 bp, Cannabis indica
ctaactccccctcatttaggcattcgtcgagatcttctaatcgacgaattctaatcttgtgaactatcttctcaaatgttaatgtgggtaatgactttgtgaataagttttgaagattgacacttgattgaatttgttgaacactactatgcattctcttgaaatgtttaaaaaaatttggagaaatgtattttaattctatctccttcaatgtactctcaatttagttgagcaatacaagcagtattattttcatatagaactgcttgtgttgatacttctttattgagtgtaatccatatgtttactgaatatgttatgtcaagaatctaactcacacacattctctacttgtttataaagtgcaagtatgttaacatgatttaaagttgtctcgttaaaaaccttgtcaagaaaactcagtgggataaaacctgaactacaaaaaaaagaatgcaatatatatttcatattcataattatttgcaagttgcctcgttaaaaatcttgttagggaaacccagtgggacaaaacttgaactaagaaaaaaaagagtgcaacatgaatatgtgtccccctcatgcacatatgatctacaattattttagtgataatatatctcataagattaatgttatcacttttaaaatatcaccgtacattacctatgatgatatattttctataactgttcccgagtatttatggacttctaaattatgaacgaggggttcgtggaacatcaata

SEQ ID NO: 359333 - DNA, 728 bp, Cannabis indica
gcaactgtggatgacttaatagagatcaacctcgggaccgaggatgatccaaagcccgtgtttgtcagtgctttattatctgaagaagagttaccacagtacatacaagtccttcgcgagaacaaagatgtatttgcttggttataccgagacatgccggggttgaaccgaaaggttgctgtgcacaggttggcagtatcaaaagatgctacccctgttaaacaatctcaaagaaggattcgaccagaattacttcccaaagtcgaggcagaaattgacaagttaagagactgccggtttattcgggaagttcagtatcctacttggcttgcaaacatcgtcatagtgatgaagaaaaatgggcaactccgcatatgcgtggattaccgagatcttaatcgggcttgcccaaaagatgaattcccactccccatcactgagttattgatagacgctaccactggttttgatgccttatcattcatggatggattttctgggtacaaccaaatcaaaatggcacacgaggacgaagagctcactgcttttcggacaccaaaaggcatattttgttatacagttatgccatttggcctcaagaatgcaggggcaacctaccaaagagcaatgaccacaatttttgaagacatgatgcacaatactgtcgaatgttatgtcgacgatctagtggtcaaaacaaaagaaaggacaaatcatcttgatgattt

SEQ ID NO: 359334 - DNA, 574 bp, Cannabis indica
tagtgcatattggattggatgacatccttatattaatattatctacataatttaggaagtttacgcgatactcttaaattggaagtttcttttttttttttttatttatatatatatatatattttatggataattttttttatttatttacatttttacgaattctattttttcttacaggttttcactttttttttctaagaaaaacgttgcttccccgtagcagtaatgtgaaaacaatattctgaaacaacgaaaaaacaacactttttattattgtaaaaaaaattacgttattttcccgattagcaataaaaataacataaaaataacaatctatattttttataaaaaaataaaaataaaatccgtaaaaatatatataaaaaaaagaattttttgtagctaaaccctcttaactattatttcacttgcacttaaccctccaagctcaaattttattggtaaagccctccaaactactgaattgttaacaaatttaaggtgtcatctatttttcacagttaactgtcaacatggactgcttatgtgtatactcttgtacatgtgaca

SEQ ID NO: 359335 - DNA, 752 bp, Cannabis indica
gtccatccaaagcaaccccatctcagaataattatcagcatattggcagcacgtgtatttcttggcactgaaaaatcaaacgaacacatttattacattataatgccactacataatttatcttcaattaaattctaaacataaaatctgtcaaatataggaaacactatcacttataagtttagtcacaagtagacatcaaatagtcaaaaacaaccaacaaattacatcctcaaaaatagtcattttgtgtctacttatacaacaaaattttctagaagcatagttagtgagatttaagcttcaaaagaatttcatgatacctaaatgaaattattgcataaaattatttagcatattaatacaaattctaaaatgagaatacacacaaataattggataacgaaaaaaaacatacacttgatgagcatgattcttcactgcaaactaagaaaaacgagcagtgataagcaagtcataaagttgcttgtcactgtttttattaatattagaaactaatttacactatgagtaagtttagaattaataaatggctccacctaaaaaataatccacacctcttataatagaagtatcaagattaaatgaaaaagagtacactttcaaattataaccaaaataattagaaaagaaacattcaataatcaatggttcctgaaatgcactaatcatgaagatgagataatttgtcttatgtatgaaactagttttcttcccttcaaccacaattg

SEQ ID NO: 359336 - DNA, 914 bp, Cannabis indica
gtatatataaatatatatttagtgtattttgactttgaaacaattcaagaactttaacaagatacttacattgggacttgggcagagactcatgcttgaagcttgggcagagactcgtgctgataacgtgttataaaataatataaagtagatgagaagaaagaagaagaagatgaagagagaagagaaagtgaatgagaatttctgagttgtttattccaatggggtgaacccctatttatacaaatacaagagtgagatattaagaaactaagaaaaagaggaatgttgattacaattaatggtaataaataaaagatttggacatccacataatattaatatttataacattcttcatttagtctaattataatagtttcgacattatattagtttttctacataaggtgccatatttaattattttttgagtaaataccactatgtgttttgcaaaaattatcaattggctttctatattgttaaatgacaaaatgaagcctatattttctaaaatgataaaaataagaccctaagcttaattttcaacaattttattttttaatataaccaattttaagacattttttaacacgaacagatagagaaaatataactagttttgtcataatatcattagattatattagattataattaagttttattttgacaaaaaatcagttcagggtcctatttatacaattttaaaaaatacaggatctattttatcatttaccaaaacagatggtccaattagtattttttgtaaaacacacagggtctaaaatggtatttactcttatttgtgtttacatttttaatgcttattagttttttaaatatttttacaaacccatagggcattttacaaaaatactggatttggggtaatatttttcaattttact

SEQ ID NO: 359337 - DNA, 676 bp, Cannabis indica
ttgaaaaatataatcatgattatattctactatgattatgacactataatcatgtataaatatatatatgttctggacttaatagaatttatacattaaacaaaatcatgaaataaatcatgtgaaccatgcaacataaaacgatttcttatcttatattaattagtaaatatgattatattgaaatggattttatttagggtagaaaacccaataaagatgtctatagccacaggagtaaggccaaagaaaaaactctggaacaacatgcttaagagatagccggacaatttggaagacttctacgagagagccaacaaatacatcctagtgatcagttggaaatactttaccaggatctagatttactaacaagtatatttcattaacatcctaatatgaatttctaaaacaatgaaataaacacataagggtttaagaaaatcttacactgggcgcagcggaatataatgacaccttccgttcagatctctatcttgttgattggattcttcaaaatcttccacactatgattgagataacacttgatgtgtctgggcactcactctatcactcaaggctgaataattgaagaacaaaagagaggatgtggtttcaatttcgctataggaggaggcttaaaattttactgaatgaatgtgatgtatcatcatc

SEQ ID NO: 359338 - DNA, 823 bp, Cannabis indica
agtgtatctaaacttgccactgataacaatgtgctgattgaattttactcaaatttttgtttgttgaaggacaaggtaacaaagaacgtgctgcttcacggagtgcttaaggacggattgtatcagttggattcacccttcactaaatcaagtcattcacaccagaagtctaaccttatttcagcttttaccatttctgtcgactcaaatgtaactcagtctcaggctgatagtcttttaatttcccaaatggatgtgtggcatagaagattaggtcacccttcaatcaagattttaaaccatgttctagagtctgttaatgtaagtgtgccaaaaatgaaatgaaaaccttttgcgatgcttgtcaatatggtaaagcacacgctcttcctttccgttcagctaatactcgtgctaaatctgtgttggatcttatccataccgacttatggagccctgcacccattgcttctaacataaatcaccattactacatccactttgtggatgattatagccgttatacctggctgcatcctctcaaactaaagtctgatgcccttactgcatttatacaatttaaggctttagttgagaaccaatttgacaagaaaataaagagccttagatgagactgtgggggtgaatacaagccatttgtcgatctggtgcaaactcacggtattgagtttcaacagccctgtccacacacctcagcccaaaattgacgtggtgaacgcaagcaccgtcacattgtcgagatgggacttactgttgggtttatgccctaaataaaactcaatttcaatgtaatccattttat

SEQ ID NO: 359339 - DNA, 896 bp, Cannabis indica
agtttgtttatacaccaattttgtaaggtgaaacttttggacgacacatgtagtaagtcctactaattgggatgtcgcagttgtgcaccacacgattatgaggttccctggcccccaacggttagatcaccaagttgtaatcactagctaaagaaacatgctgagtacgaaaccctaagtgggtgaagggtatgccctcacccacgcatgtgtctataaatgcccatattttttatgtacaaaaggtgaacattttttacttataaaatctctgccaagattcctagaatgctttcttcatcttaagagaaacaaaaagaatataaagttagcattataaacacttataatactcaaatactcaccgacaaggctaatacaatggactaggaattattaatgtctgaaccacgtaaaaaccatttgtctattatttattattttgtattttttttaagctctaattaatcggtttttgaaaatctcagcaaacaattaaaaaataaaattttaatttctttaaatagataattttgtaaagaaaaaatatatatatatatttacattgttgaccatcaccaccctttccacaattacactttataaatttttaatttcaaaatttgttaaaattaatgctcaaaataagaatatttatatttgttaaaattctatgtaattttttattattttttctttttagattcatgtgttcaattttattttttattatttgctttaagagcactcagaacaagagaggtataataactaaaaggtaaaataaaatagctaagagtttaaaattgagctgcatctaaggctgagcatcggtcagtttggccggtttttttttatataaaaatccataattcggttttcggtctggattggtg

SEQ ID NO: 359340 - DNA, 507 bp, Cannabis indica
ttatttttgtcattgattttttttttttggtgatttatgatgggcaatgttgtcaaaggaataaattgtatcattaatgtttgttatatgtgagtagatgttagatttagggtcgaaaatggccagatctgagttttgggcaaaaaaatggtttttttatcaggtccgatggtggtctgatgctttcctgttgttaaaatgagtaaagattgaagacgaatgtccgagggttgtccgatggtagcccgatgatatggtccgatggggtccgatggtcacctgatgctactttttttatgtacaaaaacataaaaaaattggtagcagatatggtccaatggtagtccaatagtggtccgatggtggtccgatgtaatgctactttttttatgtacaaaaacataaaaaaaaattggtagcaaatatggtccgatggtggtccgatggtcacctgaagctaacttttttgtacaaaaacataaaaaaaaaaaaataaaaaaattaaag

SEQ ID NO: 359341 - DNA, 648 bp, Cannabis indica
aaataatttccaacatttttctcttcaaatttccgccccttacagtgatagagtacatgcccacacatagcaagtaagtactcaatcatagtgtgtaagactgtgaagaatacaacatctgaaggagaatcgtgctcaaatcttgatagtactatgcgacagaaaggaacaggggttagagatctaagtggaagaagtcatttaattccgctgcaaccaatgtaaggtttcttgaactttatatgtatttaaattccattattttagaaattcatatttaagatgttaaacaacatacatggtagttattatcctatttttcgcactatgatgtggcagtatgaactggtgacacgtgtttgttattatttatgcttgacacgagaaatgttctaaacagacttcgagtaatacatctgcaggtacaaagtatgcttgaccgagcaaagcaagggtagatgatccagacaacaaatgaagtcatttctccgagccgtgcaccaagacttaaatacttcaggattgatatcgtgaagctcaagcacaaaagcaatccctacaatcatgggatcgaatcaaagggatatggcaagcttttttaatcccctatttcatgtattctaattatgtaatatatgttcttaccaa

SEQ ID NO: 359342 - DNA, 978 bp, Cannabis indica
cttattgaatgggtaaccctacctgtttgctttactttatatatgcctttgaaaaatgttcagtaatggagaaatgtctcatacttggaccattctccacagatatgtattatcataaagggacttgctttggggaatagatgtggatctaggagtttcttttcaccatttttttttttttggttagaatatattataattctgtttttaattattgtaatttcaaattaatttaatgggagcatataatatgttaataatatagtttgtaattattttatttttggcttgttggaatattggggagatagaagaagtctagaattacttagaaaaaaaaatcatttcctacctaacatgatgaaaagattcaattgcatgtgctcattgctatttttattttgataaatgcctaattgtgctgtccatttctctttccatccaattaaactacccccaccaattaaaaaattgacaccatctttttttagtgtaagtataatgttattacaatcaattaataggattcttgagttcaaacttatgtccttttttttttccattcttccctcactattaagctagccttagtggcgttgacaccatctaaatataccgttaatccttctcgttattttattcaacacatttactcatttttattattttttttaataatgaacataccattaaaataaataaatagagtatgcaaaaaagataaaccaaactatccaaataataaatttttaatctaccagaattaagtacaacttatccatgagatgatatgggatagaaatatttcattaaagctggatagcaaacttaaatatcaaaataatagtatataagaatattttatttatggaaataaatttttatttaagaaaatgattttccatttaaggaaataaaataaataattgattttctaataaatgaatattttatattcattgaatctggacaaaatca

SEQ ID NO: 359343 - DNA, 954 bp, Cannabis indica
gggtatatatggcgtcgattcctagctaataatcgacgccatatacggcttaggaaccgacaccatatatacccgaattttagttttttttaatttaatttaatttattcaaattatatatttattaatttatatattattttatttaattcaaatttaaattacatatatacttttttaaaaggaaaattaaatattatttaaattaattttagaattggccaaaatacataattttattttatagaagtaattaaatattacacaaatattgtaaaattagtccaagtattaacaagttaataaatctaactacaagttaacctaaaaaataactcatggaagaaaaattcttaggcgtttcagcatcaatcgtcatcgtgaatcaccgccatccactgttctatccactctcgctgtattggtaacaatttattttttggattgtattattgcttatccccaaactgttaaaaaaagtaaaaatttatattagtagtttatatatatgtatattatttgttattataataaatactataatcaataattaaaacttacagctttttgatcttgtacgtaatgattggggtttgcacgtgtgacgatgtcagtcatgtatttcaaaacataaaaactaaattcttggtttttaagttgtcttggacaattttctattgaaattccttgccacgggccaagatactcatgtgtttcccctatatattcgaatgcacggtttgaaaaattatattagcatttcaattcattagttaattaaactttgttacataaatagtcattaaattattaccttcccaacatttgattaatttgttcaggaacttggtggccacgtatagggtctaaatatgaataattttctttggcgtaacgacctttagcatccaatgcgaactagaaaattatattgggatataagtaagatagtat

SEQ ID NO: 359344 - DNA, 476 bp, Cannabis indica
aaccttcatgttacctcggttttctgcattttactcagctcttgcctgtaatttaacgtatagttattgttagcaatttgagaaaaaaaatattaagtaaataagaaaaaatattaaaactttcaattaatacatgttgtttcgggtctttccagtatgcgataacctctgcccacacctccggtgtcaccatatatggacgtgatcccctgttctcttcttcctcctcatatttttcaatattcttcttccatgccttcttggtgtctgatctccagtcacctaatccttttgacatagatttggtgacgtaatccacgaacataggattattagttgacaactcaaatttgggttgaaaaaaaataccaaagtcatatatattgtattttttatataatgatttcgtttcatgtattattaaaaaaattaaaatattaccactattctatcccatatagtctgaatgagtgtag

SEQ ID NO: 359345 - DNA, 607 bp, Cannabis indica
tttgaaaataaaaaataacattttaatattttctaattttaagttattttaagttttctgaaaacggttttttaaaaaatttagccaaacattcctattagtttctaagagttgttttctgtttttaaaaacggtttttaagttatgaagtgaaataatcttaaaagtttctaaatttaagtgctataaattacatacatacttttaatgtaataaataattaaacatctttatttgttgttgttaatttatagtgtaccctttaaaataagtgtttcggtacaccctcaattcttttaagaattcaaaagagcttttcagtttaattgttctttttatttgtatatgttgtagttatttagaattatttgtaattttttaaaaaaattaaatgatttacaatactaaaaataggattaaaatatttacacttgtgtcacataattgtttgaattttattttcggtattataaactattctaatgtttttgaaaatttacattgaaatagctaggacacagggccgtctcaaatattttggaggccctgttctaattttaaaaaataggcccctaacaaaaaaatataatttgcaaatattattttt

SEQ ID NO: 359346 - DNA, 597 bp, Cannabis indica
tagttcatctaattgtaacaaattaattaaatatcattaaaaaaaaaaaattatttaaaaatttattataagaaaagaattttaatttgtgtaaaaagaaatttaatttttgtaaaaaaataaattttattgtaaatattatgattaaatagcttaattgttaaaataattagagtatgaatttaaatataaataaacaaattatttataaatattaattgctaaaagaggtcttgttaaatatttaattaattattttaagaaaatagttaattataattaattaattctaaaaaaggaatgtttacctattagtaacttgctattacaggtcaaaaaaaatgtaaccatatagttacaacaaaaatgtatccattgaatagtcaccctaaaaaaaatatatatatactatttagtacatctacactttttataaccggttcactataaaaatattagttactctaaaattttatattatttaatgggtagataatttagtaaaattataatttttgtataggattcaaaaaatcaacttaatataatttatttatttggtaatttatttttaaaaattaatttttatatatatga

SEQ ID NO: 359347 - DNA, 769 bp, Cannabis indica
aaatgtttgactctttatttaattattagaaaatgtctttacatgctttttaaggcataatccctaacaatttataccctaaaagcaagtaattaatacgattataagataaataatacattaattataatagtataattattaaatatgttaaaattccttattcacatggagaactgataatcttgtaagaacgtacaagagaattaagatttacaagattatatgatacgaataaaataagtcgatagtgtattaaattaatgggaatctttaatatagaactactaagtaccgtttactatacactatacttctagtgtgtgtgattttgattcggataacatatgtggatgacatatagtaaatgtgttgtgtataatttgattatgcatgactgagttgatatgtaataaacatcttttattaacgtattgtttatcatgaatgtaacaaccagtcaatcagggacgccacgtgtgtgtgtgttaggctatttttagcctatattttggatcaactttatgtctgctttttactgttttaggacgaaattacgcttgttttctatattttcaagttcttcggaataatagaggtctccggaattaaaagagcaataaaagatgagcggagccaagaaaaacgccaattttaagcctgacgcacttctggccgcggctagatcacagtcgtcgcggccataaagtcacaacagaatgcccaattttctaagctccactcgtcgcggcgagatacaccctcgccg

SEQ ID NO: 359348 - DNA, 1382 bp, Cannabis indica
gtaaggctgtgaagaatctagattcaagagaaggacattcgggctcaaatcttggtgatactctgctacagagtatacaagggttagagatctgagtggaaggagacatcattatatttcgctgcaaccactgtaaggtttcttatactttatatgtgtttatttcatatcgttttagaagttcatatttagaatgttaaataacatacttgttagtaaatctaagatcctggtaaaataattccaacaataagtgcatttggagttaagaatccactccctgttcattgaggaatctgagatagagaacaattctccatctgtgaagcagtcatcactatcccttgtgattacagcagaatccttcacatggtgatgatgcatgttttccttcctatctccattgtgagatttgttgaagcctttttgctccctgtacttcttgcaaaatctttgcaagtgtctagaccttccacaaaagtaacactttcgagtttccttctctctagactttgatcttgattaagagtgatggtgtttactcttcgaacttactttcttgggtgattttcctcttgttagttacacttcttctttcttggatttctttttcaattgtaatttgaaatcttttgacttaagtgcagcaagaacatccttcaatgcaatcacgtctctcctattcttgatggttgccttgacttcttgattttaaattggaagcaatctcaactagatgatggccttgctttcttcatcaaccttgtgatttatattagccaaacctataataatctcattaaatttatcaatattatcatctaaagaaagggaaaaaatcattctaaaaccatttctagcaaattaatcttgctagcaattgatggcttttagttcttccaacttgttctaaactcctttcgtaatcttctctgcgatgtgtttttttcaaacactgttggacagatacacgatgattgtatagtacgctatctcctccaattctgctttttcctctagttttttctcggccaaaattttctcatctccaagaactttggataccttctagtgcactaggattattttctaactttctttccatagcgcaaagtctcctattatatcgaatgtctccaattcaaatctcgccattaatgacactaaatttttttcaagaattgcagcgtaaagaatcttgattctgtgttcttgatcgattaccaagctctgatttgtgggaaaattacaagtgtagaatcaaatcaactaaacattaaacaatcaaagaattagcactgacaggattcacaaatcacgaacaataatcaaaagaaaaaaaatagggatgaacagagtatgaataaccagaaactaattaa

SEQ ID NO: 359349 - DNA, 972 bp, Cannabis indica
agagcctctattgaattcgaaataatcctcctcttttcttcttcatatttttgaaatccctatagtgagttgaggaattgtccacacaattcaagcctatactcaggcttttgtggaagattgtgaagaattccaataatagaagaagatcaaggtttaggtcttgatcatactttgtgacaaaaaggatcaagggttagagatctaaacggaaggaggcattatattctgctgccaccaatataaggttttctataaacttcatatatgtttatttcattgttttaggaaattcatatttagaatgttaaattatagctctataatcaacatacatgttaataaatctagatctcggtaaaataagttccaacaacaacttatatcaataagctgcttgaaagattctcaatagagaattctaagaaaggacagtttgttggggttttttccctaaataaaatctatttcaatataattagatttactaattaataaaagatcagaaatcattttttgttgcatggttcacatgatttctttcatgattatatgtttaatgtataatttctataaaatctagaacatatagttattcatcattatagtgctgtcaacatagtggaatataatcatgattatatgtttcaaagtttaggtcccataatttttcaataaactagactaggctgacatgataatcagcgatagagcttacttacaccttggataagtgttatgtcctttcacaagcattggcaaagtattctaggattagatgtatggagtatatatacatcgaactggatcaatatttaactaggataagatatcataaacttaccgttatatctatctaagtcaataccggttagttgatcttaggtcaatagatcttcatccggatatgtttaggtttgatctgaattgtataatttatgttcttagagttgttcgtgaaagctaaccaat

SEQ ID NO: 359350 - DNA, 569 bp, Cannabis indica
tttcttagatctcttataatttccgtgccaaatctattacgaaaataggctcataatcgttaacgaaaatctacgttaacagtttggtgctttcattgagagcctacgtaataaaagctcaaaaaaatccctcctaaccaaagaaggaatttcttctccatggctgataatggggaaaacgaaaacactcatcctgaagagactaatcgtcgtcctgggaaagagccaatgggctcacggaggccacccaattcatcaacaacgcattctacacgatcaacacgttcaagaagaaaccaacgtggtgatgatgaaaacccaaaaacttgttgggattttatgccctgaataaaacccattttaatataatctgtttttttataaatagaatattataagtcatttatgtttacatgtagttttcatgtttatggtttaatgtatgcaaattctgttaagtccataacatatagttattcacaattacagtgatgtcaacacagtggaaggtaattgtgattatatgcttcaaaagataatgtcccatgattcatcagtgcactggattt

SEQ ID NO: 359351 - DNA, 1040 bp, Cannabis indica
tacctcaatcatagattggaagactgtgaaggatcacatccaactgaaggatattcgggcttatttcttgattatactctgcaaaagaaaggaatcaagggttagagatctgagtggaaggagacatattattccgatgcaatccctgtaaggtttcttaactttttatatgttttatttatcgttttagaagttcatatttaggttgttaattcaacatacttgtgagtagatccaagatccttgtaaaataaattccaacaaaaatatgttaagttatgttgatttaagcatgttttggtaggtagtttgttgtttgagaaagctttgagttttagaactgaagttttgctctttaatggtgaaattcgattctgagtatgggtaggttttgatcccttggaaaatgtttattggggtgtatgatgcaggcctggaaagtttggttgggttttgaaacaatttaattagcgttagaagttttttggtttttctaggtaaaaccggttacccgaattttgcagcagggaaacccgaaaattcagcttgtggtttcgcgtcagtttcaggtttctagttcgtttattccttgctactttagggtattgccatattaagttgcagttgatagggttttttgttttaaacctaggtcccgggtgtgatttagcgagtcacttattcgtgttattatcgatgtgatttaggagcctctaattcgtcgagcagttgttccactcaagttgactggcacacctgaattcagaattgaggtaagattagtataatatcatgcatatgttattacatgtttattgtacatgtcattgcctgttagattacattgatagtagtaattatatacttagagttgtgctgattactgataaatgtatgttggctaaaatattgatcgatgttgtcacatcaatatggcaagagtatgactagaatattgagtataggctcacattatggtcgatagtattgttgtatgagcgttctagactcagtaccgtgtgggacgatggggattaggg

SEQ ID NO: 359352 - DNA, 688 bp, Cannabis indica
ggttcgggttatcgggcctcgggttttggaaatgtgtaaccgaacccggttttcgggtgctcgggtacatcgggtatcgggtcaggtgtagtcgggttcgggtcttattgggctgagcctgaatatttaatttatgggctgaaataaaattttatttttaaaaatgtcttttttttttatttttaacattgtttgggccttttagataatattattataatatgatattatgattattttaataaaaattatataataataatttattatacaaaatttaataaaatgatttatatataaaacaaaagttataaaatcatataattgtatcctatcagataatcaatgatatgttcatattacataaaaaaaaaaataaacagcccagtaacaactaacaagtgcccagcccaatcaatctattaagtcacggtggtcaccacatctcgggttacgggttacaacccgatcaaaaaatacaatatttcccatacccgaacccgaaacccgtgtggggtatttttgggttgaacccgaccaaaccacacgggtttttaggtttttggtttttttttggcggcgggtcggggcgggtggtcgggttttcgggtttgcgagtcttaatgttcagcccaaactggtgttatagccaatagtaaagaccctcgaagccacaagagaagcaaac

SEQ ID NO: 359353 - DNA, 536 bp, Cannabis indica
taacataaaacaagtagtgcatttcaattaatctattgtcttgatatcaagatcaagtgtagtgtatttgactaaacccaaattacaggaactgtaagtctgtggtaagcaactgctttctccgccaatacttcgtatgtgttcataaaacattatgcaatatcattttctatatgcattactcctctagggatactgaattctttactgcatataaagtgcatctgaatatacagaagacatgtctctaattctatccaaaatggaatagagataacaccattaagcactttcttcagtttgaataactttctagtgctttagaaaacaacaaagttatttagcttcactgatggagcttaaaatattatagatggatttttacatccttctagaataattcctccactccaagagttaccaccatctctaatattttgagttggtgtagatataaggattttaatatacacttctatgtattttgcgtaagtcattcgaatagacttagccaaaactacctatcttatcctcat

SEQ ID NO: 359354 - DNA, 776 bp, Cannabis indica
tcgtcaaacgcgagattcactgcagcacgcagttcatcctaatcatgatgcagagtgttgttatgactctgcatgagtccgagcgtagcacgaagattttccaattcggttgcgtctccgatggtcatctgggcgttggttccaggcagaacagtcgtgttatgaatgccctgactgtgtgcggaactgttattccctgtctctcgcacaccaggcggagttttagtaataggagctgtttcacaattccccatgcgtctgtccaggattgacaataggtggaacccttgaactccctgggtccctcaatgtcggatccaacgtctgtgaatttgctgggtcagacaggcctctacgagtatgtaccatcgtgttgagtgtcaaaaagagcgatctgtgatcctactctcaatgaaagcacgaaaatgttgacttcgcttttagccaacgacaatgagtctttttacaagagataaaggatatgtcgtaatgaatatataataaagcaataataagacacaggaattttatagaggttcagccccgagcagtttggtaatagcctaatcctcgttatttgtattgacttaagaagaaggaagaagattccttttcttatagctcttacaacagtatctctgtatatataattcttagataataatatagtcttagcttagctacgtatcgactttcaatctatcggtccccttacccagtgaacattcctcactatatatagggctgggaaacttgaggaggaagagtttcctctc

SEQ ID NO: 359355 - DNA, 579 bp, Cannabis indica
atttggtccccaatattatgctagagagacagaactagcccttggcgagcctcatgtaacttgggagaagatctcgagttggctagacttagagaggatgtctaccaagtcagccaaactgaagaaccacatgctgttggctgcaatgcattcgaaggtttgttcgttttcttttctttctgtaattttatatataacatatatatataaacgttaataataatataatatattaatatattaataataataataataataataataataacagtataataatattattattataatatatattaataataatttttattaatggttatcctatcgtttctgagccactaagaatttccacttctaaggcattaaaccaaattctgcacactcttaattgttacaatatctacattatcaacttatcacaatattcccattaattctatcaattaaatctgttgtgacaatctagcccccgatcgagtctctaaggtcgccgaacatgaaaatactttttttttccactatataactcatattgcattcacacattctatataaaatctccgaaattta

SEQ ID NO: 359356 - DNA, 731 bp, Cannabis indica
atatttgtaatatgttgtttattaaaattgtttggaaatagaatgataatgatttattttgtttactttatcaggagtgtaatcagaatgtttaaattaactaaattatccttttgagttaaactaagtatatgttagttcttttctaagacatattttaaaggataaaattatcattagatatttaagggtaaatattattttaaaccttgtgttttgtaaaagttattaattggactctccgttttgttaaaggacaaaatggaccttgtattttctaaaatggtacaaatagatgaattaattttttgtcaaaataaaatttaattataattcaatctaaaagtgctatgacaaaactgtttacattttctgtatctgttcgtataaggaattgtcttcaagttggttacattaaattataaagttgtcaaaaattaagcttagggtcctatttttactattatagaaaatacatggtccattttgtcatttaacaaaacacagagtctaaaatggtatttaccctatatttaatgttaaaataaataaataaataaataaaagtcattacctttgatgaaatttcttagacaattagtgagaaaaatattctctttcttttatccctcatttaatcaagttatctctttcctaatgttaataaattgaggtgaaatttggtaacacttttgttttaaatttttaatcacaaaaataaaagtaaattt

SEQ ID NO: 359357 - DNA, 745 bp, Cannabis indica
taccttttaattcggctaataacatggctcctactgcttttgacttaattcatttggatatttggggtccttttcacaaaaccaacatagaaggttattgatattttcttactattgttgatgatcacactagatttacttgggtttatatgcttaaaaataaatctgatgtcaacattattatacctcaattttatgcttatatactcaattaattttctatttccactaaaggcatacgatgtgataatgcgaaagaactaaacttgccatcttttttttacaattaaaggtattcttccttatcactcttgtgtagaaagaccacaacaaaattctgttgttgaacgcaagcatcaacatataccgaatgctgcccgctctcttgctcttcaatctcgttcatctcttgggtattggagtacgttattttattaatacaactatttacttgttaaatcacacaccatctgttttacttaaccttaagtcttcttttgagttgttgtataacaggttaccttcttatgatcatctccgtacctttggttgccttgcctatgctttcacgttggacagctcaaggcacaaattttctctgagatctcaggcttgtgcattcattggatacccagtaggtatgaaagcttataccctacttgaccttaaaacacatcaaatatttcactatagagatgttatttttatgaacatatttttttctcttaaaaatacatgttctaat

SEQ ID NO: 359358 - DNA, 1246 bp, Cannabis indica
tatctttattatattatttaatttggtgttgtctaaattcgtccaacaacatttggcgccgtccgtgggaaaagatattctgttgatttcggaggaaaatcgtcatggatagaaactagaaaaatggagataacaacactggatcaatcaatgttggaacaatgaacgttccactccaaggtaatggaacgatagctgttgtgttggattatgttttaccaggatctagacttactaccatgtatgttatttaacatcctaaatatgaatttctaaaacaatgtaattaaaacacatataaagtttgagaaaccttacattgggtgcagcagaattaaatgtctcattctgctcaaatctctaacccttgtatcctttctgtagtagagtatcaccaagatttgagcccgattctccttctcttgaattggattcttcacagccttacacactatgattgagttcaacttgatgtgtgtgggcacttactctatcactatagggttcgaaataatgaagagagaaagagagaggaagggttcgaataagatatagaagattgctcaaaaatttgactgaaggcaagtgtgttcatcatcttttaatttgagggcatcactatcaatttataggaatctaacaggtttaggtttgaattatttggcattaaaaaaataataaaataactggtaaaataagccataagtggccggccatggatgtggaccctcactttgtaattttgctatttttcaactatttattttattttctcaaaaaggccatttttaaaattcaaccacttaaatgccaaaaccatttatttaaaattaaaattaattatcaaataaaattgtcatttaacatatttattaattagacgtaataaagtctcttaattaacaaataaatcctagaatctcttttcttcataatcaagccctagcttagtgaaaattcataaactagacatagtctaatttagaattataattgattaattaaaatcaatcaactaagtcttacaagcagtattgtcttaactagtatggggaccatgggcctatacaaccgagtttccaataagcagaactagaatttaccaagtaatttccttaacttattaattcctcattgcatccaccatagaacttggaattgcattctcaattatatagaacgctctatatgttccacaatatagatacgctataaacatttaaccatcgttctaatctcaataatc

SEQ ID NO: 359359 - DNA, 539 bp, Cannabis indica
tgaatctttctctattttagcacaattattttttactttaagtgtaatctgtgttatatgcgatatttgatgcgacattgtgcgatatttgtgcgatttactttacagtgcattataaatgttcagtgtttaatatattttttttgcgacattaagcgattttgtgcgattttgttggcactctctttataaattttcacttgtattgttttatttgttttggcgactttatgcgattcttgtgcgatttttgtgcgattttgttggaagtctcattaattttcacttgtattgttttatattttttggcgactgtatgcgattactgtgcgattttgtgcgatttacgatgacattagcttatatagttttctatgtttatgtaatagatttttggcgatatagtgcgattactgtgcgattttgttgcgatttcggttattattgtgcgattaatttgcgatttttatgtgacatatttgcgatttgacgtgatattcactttttgcagatggttgttcttcaaattttatatcctc

SEQ ID NO: 359360 - DNA, 1169 bp, Cannabis indica
gtcttttgcatgttgagattttacgagcatatcgtcaacatatacttccatggtgttcccaataagatctacgaacatcatatttacaagtctttcatatgtcacacctgcgtttatcaaaccaaaaggcattactttataacaaaataggcctcgatcagtaatgaacaaggtatgctcctggtctggttcatacatcgggatttgattatatcccgagtatccgtccataaagcgaagaagttcgtgacctgcagtggcatcaacaagttggtcaatgctaggaagtgggaagttgtctttgggacaggctttatttaaatctgtaaagtcaacgcatgtgcgccatgagccgttaggcttgggcacaagtacgggattcgctaaccaattggggtagaacgactcccgtataaagccgcaggctaggaggcggtcgacttcttcttttagcgcttggtacctcgcggggtccattttgcggcgcttctgtcggacacctcgcacttcggggtcaatgttcaagcgatgacacatgacctgcggagatattccgaccatatctgaatgtttccaagcaaaaacatcaagattttgtttgagaaaagtcgttagttgttctcgctgctgaaaagtcaatttagaaccaattttcaaaactttactattatctatggggtctataggtacctcaatagtgtcttccgcggcttgggccgctgcggcatgatcgaggatccttggatccagatctggtccatccgtgtgcggcacctcttcgatcctaaggacctcctggcgaggaggtggtgcctccaataaatagatgacatttattgacttcttctccgcgagcttgactgctgcattgtagcattctcgcgagtctgactggactcctcgcacagagcctactccagcgggagtagggaacttcattgtgagatgatagatcgatgttacgatcttcatctccttcaagattggtcgaccaatcacggcattgtatgccgaatactggtcaattaccgcgaagtcagccattgacttggctgttacgggggcggttcccaaggtaatcgagagtttaatcatccctttcagtgcgatgatgtcgccggtaaaaccgtatatactcgacgttacaggtcgcagatccttctcatgca

SEQ ID NO: 359361 - DNA, 511 bp, Cannabis indica
gagtcttgtcttatgacatggtatgatttttctctgttgtggtattgatctgtcctaagtttattctgcttttgttctgttcttaagagaagagagtatgggttcacgaggcaagactgtggtagatttggaagaacaagatgatcaaggaatggttgaggagagagctgcgggaggactattttatgatgatgataatgacgacgatctctctgaaatagatgaccgatggctgttagtaggtcgttttctcacgtcaagaagtatcgattttcaagctatgcaacacaagatggccaccctttggcaaccgggcagaggattatatgtaaaagaattggaaccaaatctatttctttttcaattctatcacgatgtggacattgatcgagtgatggaaggcagtccgtggactttcgatagagtcccactcatttttgaacgtgttaaaccaggggaaaatccaagaagagtacaacttaatcacctgactttttgggtgcagcttcat

SEQ ID NO: 359362 - DNA, 808 bp, Cannabis indica
aagttgttgccgctggttctaaggaagctgactcgctgaagaggcacaatgcccagctccaggagaacatgaagagactgaaacaagaggcggctagaaaggacaaagagcttgaagaccttcgcaagtctaaggagcaggctgagctcgaggccaagaactctcaggcgaagatcgaggagatggctcgcgacttagaggtcgagaaggagaatgggaagaaacagtatgatcaggcagtttctgattatatttacaccactctttctaaaatcccagacttcgacttctctatcctcggagcagaagccgctgagatggccgaggcttttcgcgccatgtcgcctactcaaactcaaggtggtggagggaatcttcctgaggaggccgaggttgcggatgctgaggaagtcgagaacgaggccgttagcaaagtcgcggatgaaactgctcctgctgctccagatgcttgacttttctcttctatgtttaaactgttatgctttttgaatttgctagtttagtttttatgcggtacaggggtactcgcactctgtactcagacaaatttgcaattttactttggacaaatttatatcctcgcggggataattatcctttaacattttcgcagtacacgggtactcgtgtttttaatatatatatatatatatatatgcgactttaattacagcttggtgtaataagtagaaatatttacaagtcttgacaaaatttgaaaatttaacaaacatgaggcatttcctttatataatcaatagtacattctggcatatataccccccta

SEQ ID NO: 359363 - DNA, 537 bp, Cannabis indica
atgttgttggaaaacttgattcggaggcctcgggatcaaagaaaaaagatgattccaaaaggctgcctaatgacaagaaacccaacaagtatatccctctttataccaaatacatcgagctcaatgaaactcaggaaaagatctacctcgaaccccaagggatcgaccctgaatattcaaacaattgtgggtgaatgttggggattgaccctggacatcaaaacccgtttttatcaaaaccaaatgttcctggaagattgataaaataaacagttgaactggggaagttcttttgagattaatgatggtaaatcacattgctgaaggaatattttaaattccagttgtgaataaaataatcatttctttcaagcaagtaattacaaaatgtaaaccctttaaaattacttgaggggcatatacgtatgattaaccgaaattgatctagaaatacataatacaatgcaaacccatagtttcaaaaaagcaataaaattttttgaaaactttttttagggtctcgaccaaacctttttg

SEQ ID NO: 359364 - DNA, 1037 bp, Cannabis indica
aaactatcacaaacattcttctcaacatgcatgacatcaatattgtgtttaagaatatttgaacaccaatagtcaagctcgtagaagatgctttttttccgccaattatgattttctgcaactcgcctacgtttcacaccaccaaagagctcatgatttccagggaggtggggtgggagtttgtttacttgttctaatacttcttcacaagtaaaacgtcttggaggaggtcttctctcaatttgtccgtcaaattgagtatcccttctcattcgatggttatttggcaaaaatcttctatgacccacgtaagatgtcttaccaattactcgaatagaagatgtatcttcattgcaagtaggacaagctttatatccctgaccactccaaccagacaaataactacgagcaggaaaatcattcactgtccacaaaagagctgcacgcaacttgaagacagtgttggttcgacaatctctcgtatctactccgttaacccacaactccttcaactcatccaccaagggtcttaaaaatacgtctatgtccattccgggtgatttatctccaggaataagaatggtcaacataaaattattatctttcatacataaccaaggtggaagattatagttcgccaaaactacaggccacatactgtaagcttggctcatattgccaaatggattaaagccatcggcagctaaaccgagacgaacatttcgaggttcactagcaaaatcaggatgtttggcatcaaagtccttccacgctgcaccatccacagggtgtcgcatcacaccctcatcttttgatttaccactgtggtgccataccatgtattttgccgtatgccttgaagtatacagtcttttcagtcgcggaattaacggaaagtaacgcatcaccttatgaggcaccttttttgctcctaaattttctgaagttatccatctactagtgccacagactggacatgaatcttcatttgcatgttcattgtaaaataaacagcaattgtgcttgcacacatgaat

SEQ ID NO: 359365 - DNA, 1153 bp, Cannabis indica
agtgagctcacattttatttagctcttactagaattggtcactctaaatattaagctcttactttcttcctttttttttttctatgtataaaagtcattaactaattattacacttaaaaaaaaactattcttagagcatttctaatagaagttgtctattgaaatagttttgctgcacatacaatatacaatgtggttcaactttaattttaagacaaattttaagaatatagatattgagtgttgtccaaaatagacaatggctatgttatcttttgttccttttttttaggaaacaattatttttatcaaaaaatttcattaatttaatatttaaaatatgatatgtgggagcatagtagtaacttttggaataatcaattattagattactttttgtaaaaaatatactaattcttatatagatgagaaaaaataaaaaaaaaatattttgagatgatgtgttaaatgattcttaaatcttataacatacaaaatataattattaaataattttataatatatagatgtgtaattaaattgattattgtcaatatttaatgtacaggaagtttgggtgctcatgtgtttacaaagtatacgtgtacaagccggagagaaaggaggagccaccattgtttggaaaagtgatatttaaaaaatcatcaataccagctatggttatgggaaatcgaaaccaagttaagtttgtggtcgataacaagcctcttcgatgtaaaaggtttcacgaccgtggaagtagtgcaaggtgcaacaacaacaacgtcaacaacaacatttacgatgatgacgacaacatcaacaataaaaattacaataacaattgaacccaacattcaacaataaaaaacaaactgtaatttaagtttatcaggagtaaaaaaattaataaagttaaggttgagaacttaatttgttattttgggtacgtaatcttatgctcacactactacaatgttggtaggctgttttttcacctatttataaaaagggaagctaaagggtgtgaaaatacccgttttgttcgaaattaacatttagatacggttttttaataaaaactataggtataaaatgttagatatattttaccaggatctacatttactaacaagtatgttttattaaca

SEQ ID NO: 359366 - DNA, 840 bp, Cannabis indica
ttgaaaagaaaacaacaatattattatcacaatagattagtataggagaggaaatagaatcaactagtcgtatctctaaaatcaaattctttaaccataaagcttgcaaagatgccccataacatacgacaaattcaacatatatagtagatgatgtgattaaagtctatttaacactttttcaagaaatagcagcaccaacaaaagtgaaaatatagccagaagttgactttaaatcatctacacaaccaccaaatctgaatgtgaataactaacagcttgaaaattgtcgacatgcttatacacaagcataaaactcttcgttctttgcaaatatctcaaaactttcttggctgcaacccaatgatcatggccaggatcagataaatatctcctaagaacatcgaccataaagcaatgtcaggtctagtgcaaacctaagcatacatcaaactccctactacacttgcatatgggatattcttcattgcttctctttttaagtcgttcttgggacaatgttgcttagtaaattgtcccttttagaataggaacagacccaggcttacaaaaaatttatgttgaaccttcttgaggacacgattaatgtacactttcttgagataagtcaagaaattttcgattcttatcacgatgaatctcaatctccaaaagatgtctctccaagatccttcatataaaaaatgggagacattaaatttttggtctcatttagtaatgacaaattactgctggcaagtaaaatattgtccacataaagaacaagaaaaatatgatgactcccactgatcttcatataaatacactagtcaaacttgt

SEQ ID NO: 359367 - DNA, 542 bp, Cannabis indica
gggtgataagaatctcacaatcgtaatccttcactaattccaaccaacgcctctgtctcatattcaaatctttctgagtaaagaagtatttgagacttttatggtcggtataaatttcaaacctttctacataaaggtaatgtcgccagatcttcaaggaaaatactagcgcggccaattctaaatcatgtgtcgggtatcgctgttcataatctttcaactaacgggaggcataagcgataacccaatcgacttgcatcaatacacaccccagaccctgtctggatgcatcgcaataaaccacgaacttttccttgttagaagacaaagctagcactggggctgtaatcaatctctgttttagctcctgaaaattagccttacatttgtctcaccatacaaatcgctgattctttttagtaagtgttggaaattattttaccaagatctagatttactaccaagtgtgttttgttagcatcctaatatgaattctaaaacaatgaaataaacacataagtgtttaagaaaaccttacattg

SEQ ID NO: 359368 - DNA, 476 bp, Cannabis indica
aaataacatctccaaattttcaagacaaaaattaccacgacaagttttaggtcatgcgtagggtaattcttctcatgtggtttcaattgtcgagaagcataggcaatcaccttgccattttgcatgaggacacctcctaaaccagtacctgaagcatcagtgccaaaagcatagcaatctgagagaaattctctacaaagcaagcaatgatagtagcctgctaacccaagaaaactttgaactttagtgacattctctttcccattgtagaatagagtctatcttcgcaagatcaacagtgataccatcttcagaaatttcatggcccaagaatttgacttctgtcatccagaagtcacacttctttttcttaacatataattgatgatctctaaatgtttgtaatactattgtcaagtgttcagcatgatcctcacttgtcttagaatacaccaagatatcatcaatgaatacca

SEQ ID NO: 359369 - DNA, 1178 bp, Cannabis indica
agactgggataggacccggaccttgatgggggacttagacctcggcgtcggaacccagacctagatcggaactaaggactcgaacccgaactagaccataaccaagccctgaaacttaagctcggacctagtccggccccggatccacactaggactgagactcgaacacgaaccccaacctgaacacgggactcgatcccagacccagaataagcccctgaccgagactgggattcagaccttgtcatggacacgaacccaaacccgaaaccgaataccaacccagacccaaacagggatcgaaacatgggacctggactcagacgcagacccagacgaagacctagacccgatcatgggacctttactcagacctagacccagtctgggaaccgaaaaacccctacccggactaagactaagactcggaccccaaccccaacctagacttgaccctgactcggaatcgatgccggacaagaataagaattggaactgtgtttaggacccaaacctaagaccaaaactgaacacaaaccatagcccaaactcggacaagaacttggaccgagaccttgactaggtttgggacctggacctgggacccgaacctggatcgggacatggacctggccttgtcctaaaccctcactgggacccaaaccagcatctacaccctaacaaggaaccgaacccgaactcggccaaagactgggaccgaaacctggaccaaaaccaggaccgggacctggactcaaaccaagactgtgggacccaaacccgaaccttgaccaagactaggacctaggaatcggacttagataggggacctagacaatggacctaggcccgagagcccaaataaaaatcagaattcgggactcaaaccggaaccaggacctgcccttgacctgggaattcgacgttggaccaaaacccggacaaaaaacctaccccgaacccaaactaggacaggaacctagacacgaacaaggaccaaaactaaacccgaaaccgaatccaaaattggactcgaactcgggacccaaactcaaacccacacctagaatcagacgcaaaactagacttggacccagacccaaactcgaaaccagaacaggatcagaaccaaggacttagacccaaaactaaatccagactcagatcgggattggaa

SEQ ID NO: 359370 - DNA, 513 bp, Cannabis indica
agaaatcaccaacgttcttcccaaacccatagagacagggctcgtacagaccctaatgggggaaatacgacaaaccacactcaggggaaagaacagagcatgaagaagcaagtgtgacctcagggcgttcaaggacccacagttgatcaactcgaagaggagaaagtactcgacgagttaatgatagagaaagtatgggaaccagtaaattagtgagtctctcaaggacgaagtctatgagctagacgaggtccgtgagtaggatgtcgtctgtgagtaaaacgaggtctgctagtaattactttcaatcggatctgcgaaagcacttgaatcggaagaaacctgatcttcaccaacaactcagtccaaagcaagagtatcctatccaattgcgaatagacgagttggagggtaagttcaggagatatcaaatgcaagaattagggagacaatctagatacgacttagacaaggagcttgagccataccacccagatatcatgaatacccctt

SEQ ID NO: 359371 - DNA, 935 bp, Cannabis indica
tgggttcgctcggcggaccttgacatcacttgatgcttagcttgtgggatggcggcatatgagtgaagtgcacctgccttggggcagcaggcagcagcagcataggcgctcagcaacattgggggatgttagctgagcttggctacgtgatgggcttagatggacgtgactttgcatgggattgcatgcaaacggttactcagacagtgtgcatggtgacacacgtgaatgacggttatcggaagttacttatgtctatccaaaggcatgcacgtgggcttaagtgatctgttggaggacagatgcattgaatctaggcgagggcttggatggatgacacgcgggtgttagttagtttgcatagattatgctgatgtgtaatgtgctggtgtgtccagcatggccaaggcagttggggatgtcaaccacaacctattattgtgtaatatagcaggctttgggcgcttgagtcatcggtgtgttatgtccagcgtgaacaatgtgtaatccttgatattgtgtgaataacaaggttgggaaaagggttggcaaagtacgatggcaagaagaaagatggtaatggtgggaataaccagaaaggatcacaaccgaatgctaagaaaggtgtggggtgtttcatctgcagtggtcctcacacggcgagggaatgtcctagtagggagaagttaaatgccctgatggcacaagacggaagaagcggtagtgagcaagaaacaacttctaggatgaatcctttacaacttctcaatgcaatcactacggagaagtcgaatttgttcaagggcttgatgtatgtgaaagcatttgttaatggaagagaagtcacggccatggttgactcgggtgcaacaaataattttgtggcacagaaggaagcaaccagacttggtttggaagtgattgggagttcaact

SEQ ID NO: 359372 - DNA, 666 bp, Cannabis indica
aattagaagcaaaagaagcaaaataagcctggagaattgcaaacagatgaaaatgaaagaggtacaaaaagaattatatatttataataacaaagccaacgtaccatgaagtgacagtccaagctccttgaaagcgtctcttttggactcctaagattgagaaaatcccaatcagggggaagaagagtttgaagtttccgataataggcgattccatatgcttgagcagattcatatcccgcctcccctgctacgaccgacaaggtctcaatggcatggctcgaagaggcagtggtgggggttgcctcgggacgaggaacagtggcgttgggaacattggaggaggaacttgctcttagatctagttgtcaaaaacctcaagatcgatgagcttagctaatgatttctttttatgggcaatggtcttcctttgtctcttgggggggaccacttcggcagctgtagagacccaggaattggttgcccttttcttccctttccggtccatgatacctttgttggaattaattttaccaggatcttagatctactcacaagtatgttgatttaacaacctaaaaatgaacttctaaaacgataaacaaaacacataaaagttaagaataacttatagtgatggcagcgaaattaagtgtctccttccac

SEQ ID NO: 359373 - DNA, 530 bp, Cannabis indica
tttgaactgaaggactcagactagctatgacttgaatcacatccatgagttggtccaaccgtgcttgcacagaaggatctattgctatagggacttgactgactatccctctatcgaggggttgtagattctggtgcgacagggtttggccgaccatactctgagagagtgtttggtgaaggtgttgggttttgtgccctaaataaaactcatttcaatataattagatttactaattaacaaagaccagaaattattctatgttgcatcattcacatgatttatttcatgattatatttaatgtataaattctattaagcccagaacataaataaatatatatatatatttgttcatgattatagtgtcgtcagcacagtggaatataatcatgattatatgttcaaaagtttaattcacatgatttgtcagttcattagatttagactgacatgataatcggcgataaggtatacttacaccttggataagtgttatgtcctttccagggcattggcaaagtttagca

SEQ ID NO: 359374 - DNA, 494 bp, Cannabis indica
aaaaaatattaaaattctcttcatatttatttttactacagtgatcgtcggagttgtcactcgtgccggaaaaatcacaggagttcgttgttggcaccgaaaaagtcatcgaagtagttgctggtgccgaaaaagtcgccggagttgccgccggtaccaaaaaagtcgttcgaattaacattttcgccggtaaaatcaccagaaaaatcaccgagaaatttcttggtgattttaccggcgacaatatcaatttcgacgactattccagagtttgttgtcggtgttgaaaaaagttgtcgaagtagctgccggtgtcggaaaagttgccagagttactgtcgatgttgaaaaagtcgtcagaattggcattgtcgccggcaaaatcaccgaaaaaatcaccaagaaatcggtttcttcactaagaaattagtttcttcatcaaggaacacacaacaataataaagattatgaaaacaaaacaaaaatgatataca

SEQ ID NO: 359375 - DNA, 972 bp, Cannabis indica
aaaaattaaaaatcaatatgcgttaatgagtgtagagagagataagagagtggacctgcaaacgttttcagatgaagtggtgatgggcaatggtgtgtaccaaaatcacatgggcctgagcctttgatgatcatctccttggtgggcctgcctttgtctcccattagtattgcacatttctcatccaatccaagtaaacatgcttaaaacagacatacacggaaaatgaaaaagattgcagtggaagagaaaaggaagttagtgtgactaatatattggattcgatgtaataacatcctttccttgagaaacacacacccatattatatgggaaatttacattatgtactaacttttcttcatttattacaaaaatattgtgacacgcttacatttacgtttttactgtttttttttttttaattcggcagtatactgctattagttgtaggtttgtatatattatatggttataggtatcttcatagggtttagcctctatattttttttaaaaataatactttaaaaagtgatttgacgtgttgtgtcactttttgtgatattttttattttatcttttttgggttttattatttttataaaatattttcaaatccactctcccataatctctgttcatcttcttcttcttcttccacatgtgggtagtttgatatttcttttcaaaaattttcagttattacattttcttctcaagcttccctcttaattgtcccccattttttgttccttttttttctatataatactactcctcctcaatctaaatggcaattacacgttcatcctcatcatcctctattgctaaaaattctccaaaacaaccccataaaatgaaacccaaaccaacaataggtaagaaaaattagaaagataatcctcctagccctacttctcttgttgcccctaaaagaaaactacttgctggaacttccaagaacactcgagga

SEQ ID NO: 359376 - DNA, 604 bp, Cannabis indica
gccctgcgcctaggttgacatttttcaacctatgccattttatatggagtttctctagaacacttctgaccatcttcttcatttttaaaaaatattaagattcaactatattcgagaaccaaacagaatttttgaagcagtaaaattgggacctagcgccaaggttaacacctagagctaggcccaacgcctaagttgacatattgtcaacctgggtagtttatgatctcctcctcattgaagcttctaatcctttccacaaaaacttgactcaagaaaatatatgtgtttatatatgtatatattcctcttgagcaaattagtaaacacacacacacacacacacacacatatatatatattcagcaagcaaactagtgaataataaatccaaaatagttgtcgactcatttttaggtgtggtttatgttgtttttcagcaagcaaaccagcaaataatgaaggtatttatattattttttagttgttttagggtttattttttctctttgttgtagtagatatttggatttttttttctctaatctatgtcctttgtcttatttttaatttttttttgtttttttttttattttagtttagt

SEQ ID NO: 359377 - DNA, 808 bp, Cannabis indica
atgcaacaggcattaaacacagaaaccttataagctatctaaaccatatagctactctcgttctgtatcaaaattcagttctatctcactatagcataattgacactcaattctcagatcttgcatcaaaatcatagacatttaattggtgatcaggcaattaaaaatagttaagcacgaatgaaatagaatacatagaaattggggggaaaataaatcacattaataccataaagaaatatcaaacaatatccatctaatcctaattaagtgtttagctactcatgtttatgaaagtaaaatcacacatattaactttaagaaaagagaagaaaagaatgctgaaaatcctatgaaaaatgcctccagtattgcagttgatctctgaaatttgtgctctatattctgctgtttatttccctccaaatttcctccccaaaaatattgaagtccacttcttttatagccaaaaaataataaaataagataaaaatggctgatgaaaaaaaaaactattctccttaagattagaaaacctattctgcttaggattagaagaggaggtgagttttctactgcgttgactgacagtattttggtcataactctctcgatattgcttagaattagaagattcaagatgttccggaaagataaaagatagatctagaactttcatgttttgaatttttctaaaatctaatcagaatatagccgaattcaagcttgaagtttcagctttattttcttgcacaattttctctatattaaatatcatctttttgtgagatatttttatctttttttc

SEQ ID NO: 359378 - DNA, 601 bp, Cannabis indica
ttccagagctcctatgcataaacaataaaacccagccagtatttcacagagcaaatcaacaaatctcaagtttccattaaagctcaaagctttgaactcaatattcaaagttgcataaaacttaaaccaatcaaccaaaccagcaattaggaactaaaatcaactcaaaaggaccctaaaattcaaaccctaagcatatgaaaatttaacagccactaagcctaaaaatctcatactccttcatccatgaatttcaagaaacaaagagggatatgactaaagcttaccttggttaatttctctttgaattccttgatgaaaacacagaattccagccacaaaatccctttgcttctgctggtttcgaagagagagagggaaggaaaagagagttcttgattttttgacttttctttattttctttctttttcctaaaatgcataaaggattgatttctattctttgctgaatatttagagtgctaggtgtcacaaaactaggctgccacctatcccaccatttaaccaaatgtctaaaatgccctttaacccaatactaaggtttttctaaagctagggataaaatggtcaaaatccataa

SEQ ID NO: 359379 - DNA, 791 bp, Cannabis indica
cctgcaaaaacaattgggacctgaataattggcaagagtattatgggccttaccgaacaaccccaagaaccacaaccggaccactcgccatttttcaatggctatacgattgtgtaggcaaatggtcccggtggaaacgttattcccatcccacaggagtaacgacttaccatccaaaaataaaccaaggctttattacaagaagcgactggatcaaaattgacgaactccgggaatgagtctcaaatatgaatggcagcttatcaaaagaaggtggctaaacacttcaacccgaaggtcaaagatcgaaaattcactattagtgatctagtcctaagaagggtcttcccagctactcaagaacccggagtgggggtacttgagcctaattgggaaggaccatattaagttgataatgaaatcggcttcgggacctacaagctaaaaaaatggatggaacaatggtacctagggcctggaacgctgatcacctccgaaagtattaccaatagccgaaaagataaaagtttatgctttgtaaagaaaatttgtaccagacaagtatatacaacccctaaattaaaatttgtaaaactgagtgacctaaaacaaattttcatgtcactcaggttggtagtaaggcatacaacacagacaaatgtaaaacaggctaaaagtttaacaaagttaaaaaagcagaatatgtattcaagcataaatgtaaagtgttcaaacctaaagaaaagctctaaaaaaaaagataagggcctggggacgggccttaagtgtct

SEQ ID NO: 359380 - DNA, 641 bp, Cannabis indica
aactcatctatttaccccacataaataaacacttaatcacatagaatttaaagcatggcatcacataacacataaatactctagatgcttacatactgcctagaatggaaagcagcaagcaaatgatcacataagcagtaaagtatttactctcaacacttacttcaccatgagtcgaacttgtctctgacgatgaatgtacatgttcagccggtctacaggaagtttaaaaaccttggcgctctgataccaaactgtaacgccctaactcttaggcacgctacccaaaatgattaaggaaccctaatcccctaaattcgaatctctaataaaataagtgtgggaaattaaactttaaacttaaacagagtgaaaataaacttgtattaattttaactttactaagcaaagttacatgttttgggatcccaaaaatatttgacaacatattacaagtctttacactagccggcctatgcggcaaaatagagttacaacagttcaacaatggtagaccccaacctgcttggtctagtgtggcccgaacatgtacatacatcctccagctcccgcactcattgctaatcaaagacaaatttaccctttcctgcacagtagagcacccgtgagccaagcccagc

SEQ ID NO: 359381 - DNA, 751 bp, Cannabis indica
aacataggctaattataacctaacacacgcctcatgggaaagcctgtggtgaaaaaccagtacttgcgatggactggacaatgggaagaagtgcttgtgggacacaaagtgtatgtacttctggaggcaatacaagccaatcttcataggatacccttgcataggtcaactcatataagtacaaaatttcctccggggctggggcgatctgaccccaggacctacaaaatataaaccacttggagagtagcctttatgcgattggcagaagctggaaaggaggaattctagctttgacacaaaattgtgtgaattagttttgagtggaaggtgggctccataggagatatgggcctaactccatgctccataacaatctacgctggtgattcttcaaggatgaacatccggtgcaagatgagtcttgaaatgtttcgtacacctccatcaacaaagtatgtctccagtaggccataatttctcaactggtttggcctttggtctatttcctagatggaatcattgagtacaagaggagctggagatgaaacgcgggccttacctttgccttttcatcgttgtttggtccgaacaacttcagaaggtcgctcatctgaagctgggtctttgagatcaacatttacaggaggtacgtccatggggatgcctcaagaatctcctcatgattcacgagtgctaagtggaaattgttatcatcaccaaacactgaaaaaaagtggaagaaaaatcc

SEQ ID NO: 359382 - DNA, 533 bp, Cannabis indica
tgcagcagtagaatataattctgttactacagagtcaaaccagaactgacaaaatataaaaataattgcagaaaattaaatcacttgacaaaagagatttgtacgtggtatcagtgttctttcaaacactactagtgcatggggacacgcccaaagaatgaaatcaattagtaaagtatcaaagattacaatataaattgacttaaacaaatttagactccctctagtgatttgtcgcaaccctttgtaatccaccttgctaatttgatctctgaaacacaccaagtagtgaactcccttcaactattggcgtgtgcttacttcctcccgaagtaaggcttaaacaaatcttctctcgaagatatatgctcacttcctcccgaaatgagacttggaaaagtcttctcccaaagacccacgcttgttcaaagcttctcttcaacctattctaagaatagtatgagatcataataagaaaaccaaaacctagttgaacactttaggtttttacaaatgaaacactcttctcacaa

SEQ ID NO: 359383 - DNA, 563 bp, Cannabis indica
aaattgctaaaaggcactagtgcctaggtgtcatactggtattggtataattaaatatcaagtcaaatataacttaagaaaatatattttagggaatatcgctaaccaatcgtaggatgcttcccataaaaagtagggttgagcaaaaaattcaagaaatcgaccaaactgagtacaccgaccgtccaaacatcgaaaaaatcgaaaattgaaaaaactgcctttgcacggtcggttttagtgtcaatggcaaaccgaccgattaaactgagaaccgaccgaacatatatattatacactatacatatataatataattatttttgtacatatttaatgtacaattttattaaactagttttacttcttatcttttttattttttgtctcaattattcattgttttattttattataatttgatgtatttacgtattatatacatacatttataaaataatacgagttttttaatataactcattaccatattagtagtactaataatttgagcaaattcaaaaaaaaaaattattttatatcatttatttaactaagaaagt

SEQ ID NO: 359384 - DNA, 510 bp, Cannabis indica
aacggagaggtacctacggaagttccaaaaccctaacagaaggtatttttaccgctaaaatttttacttaggtatttatctgcaactttgagataaacttaggtatttacgccgcaaattactcaaaaacttaagaataaaatttaaaaaaaaaaaagaagagagtctcaactcactcttgtcagctagcaaaaagaattgaaagactgactttttctctaggtacacgcgtaccaatcttattaaaaaggtttcggtattggcagcattaaattattgaaggtcatttagataaatattttaaaaagtgcgtacggtgagataaatatttcttttaaaaaaagggatattggcggctaaaccacctgaactttacggtttgtaacacttaaccacaaaaaccgaatttttggcggctaaactcctaaactctggttccgttttggtctgcacgacctccgtcccaaaatcacagttaaatgccacagtagattgtccacgtgtacacac

SEQ ID NO: 359385 - DNA, 770 bp, Cannabis indica
attcagggaccatggacctataaacctaaactccaataaacttgattatttattgaatctcatcaatcaaataatcatatttagtaattccataattactccacaataaatatgaaattggactcttagtaattatagaattatatttaccgagttttactgtagtgtccattgatataatcaactgtagtgattaaccctctttgtgttggttcgtaattagtttttgtcaaattactgttttacccttataattacttatttatcctttagtatcgttaattcaatagtgaaagtataatatagatccaatctaaatttgtacacaacttttcaattaacatgtaaagggaaccaatattcaatttattaggaaagtcaggattttataattgtagaacaggttctcagccatccatattattagatttccaaaatagaagttgtaagaatcatcttctttgagaaactttaacgagtaaatcatagaaactaataacatgaatatgagttcgtgattacttaggatttaggtcgatctattattgatcatccttatgacctatttgtttcaatacctaaaaaattatttctaattttgttgcatgtgtgactattttttcttatacgcgtgataaataactgtttagattttattttcgacactataaattatttagaattttatgaaaatctataggtggtcttaaataactacaatgtacatgatcatgaaaaaaaaataaaaaattcttctggatatcgaaaca

SEQ ID NO: 359386 - DNA, 929 bp, Cannabis indica
aagggttagaaatctgaacggaaggagtcatattattctgctacacccaatgtaaggtttactaaactttatatgtgttatttcatcgttttagaaagttcatatttagggtgttaatcaacatacttgtgagtagatctaagatctcggtaaaattatttccaacaaagccgtctttggaatgtcctcctctcagattctcaactgatgatagtccgatcggtgatcaatctttgaaaagaccgtcttctcctaaagttgataaaaaagatcatcaatcctaggtaaaggatacttgttcttgattgttagtttatttaattctcggtagtcaatgcacatacgcaaggatccatctttcttcttgacaaaaagtacaggagctccccagggtgacacactaggccgttaaaaccctatgttaagcaacccctgaagttgaattttcaattctttaagttctgctagagccattctgtaaggggccttagaaaccggttatgctccaagtgctaagtcaataataaaatcaatttctctctgcgacggtaaacccggaagttcattcgaaaaacatctaaaaattctcgaacaaccttgatgtcttctggccgaattgactcaggtcgagtggtatcaaataccacgaccagaacccctagacatccatctcgtaacaattccttgattgttagtactgaaattactgggatccaagatccctgaactggcccaacaaaaacaaatggttcctcaccctctgtttgaaagataaccatcttccacttacaatcaatactggctgagtacttggataagacatccattcccattataatatcgaaattcgctaaatccatttctattaagtcagcacttaactccatatccttaattctgatcggcatagacctaatccaccttttgga

SEQ ID NO: 359387 - DNA, 733 bp, Cannabis indica
  modified_base (631)..(631): a, c, t, g, unknown or other
tatattattttcatatctcgatcattcaaaattattgttattattatatttcacttgttgtcttattgtatctcacttattttcatcattgtatctcactcgttgtcatcactgtataacatcccttgtcattaccgttgttcacttgtagttgtcactattgtatttcccaaatctatatcttaatcctagatttcatctcaaatttttaacatttttaaggcattggagaaaatttttaatatcgctattggtccaactaagtatcgggtcccatatagtttaatataatagcttttagggagtatcgctagccaattacaacaaaacatgtcgagaaggtgctaggcaccactggtgcctaataacaatactcaaaaacaaataataattaatcctaactaactcaaaaaaatataattgattaacaataaaatagttaatttgtttctattaaaatctataatttactgggtaacttttctccaaagcaattatctcaaccttcattttcctattcataatcatccctgtaaattctctattggggcagagcaaggcattcctgagcaattaattatcatgagaggactcatttattttaaaaataaataaaaaaaacaaattaacntaaaaaaatataaaattacttaatatattattttttttaactttttttaaaaaattttaactaatttgagttgtctcttgtggtttctctggtgatttttat

SEQ ID NO: 359388 - DNA, 896 bp, Cannabis indica
aagaagaagaaagaaaaggaaaataaagatgctaattaaggatgatcaagttatgtgttataaaaaaaatcacttgcatatgttaataagaaaaaaaaaatgcaaaagggaagttatttaggttgtttgaccatatttttagttgtataaataataaatattaaaatgcgatcgaacgatgggatcaacggaagagacagagtgatggagagagatgatacgaacaaaaaattattttttaagcaaacgaaaagtatcaatgacaacgagagaaagagacaatatgatgagcattgttgtgattttagatctggaacttaattatacaaatagttaaaatttatttttctagtagtgattaatagtcacgagtgaacctgtatagaggcaagcgtggacaactcttaatagagttagttccagattactaatatatgaatagggatcttaacatatgacagcttaagtcatagcacaagactctctatattaaaagattcttttttttattatcccttaatatatataatgtaataaatattttttctatgatgtacataataaatattcataagagtaaatatgcacttacaaaaagaatataaaaaattgataaaatcttgtaatcttaatagccatgattttaaatttcttgtctatttaagaacaaaatttatgaaaatattgatcgataattttttttgttttttaataaaagacttaattttaatctttacccccaaatcgctatgtgtaaaaataaaatatcatatataggataataaatgagatttttacacctcatgtcaaaattgacatcttttttacatttttatcaatacacggttttttaaacttttttaacttttacatttttcaattttacttttctaaaa

SEQ ID NO: 359389 - DNA, 684 bp, Cannabis indica
ccgagactaggactcgaacccgaacctagacagggacccaaacccacacaattaccaagaccttgacctagaattaggataaggacctgggaaacagaactaggaccaggacctagtacacgactcagacccgaacttaaacctaggaccaagctcgtgacccggcactagaaatggaaaaagactgggacccaagactgggatccgaatatgaaccacgggattggacaaaaaccgtagtcggggtctggatttgggacccaagccgggacccaaacccttacaaggacctgaacccacacctggaactgaacccagtctataacccaaaagtggatccgaacccgtaccctgttacccaaaattggaaccaaaaccgtaggttgatcgggactagaactaggacttggactcggaatcattattgaaatttgacctagatctagaaccgtagccggaccaggacccggactccaaataagacctagacccgaattggaagccggacccggatccaaaccaaatcaaggactcgagacccgagcctgaacttgaactcagaccaaaacatggaaccagactagggacacagaactagggtcgggacctagaaccgcacccttgtctagatcccaaacccaaactcagaaattggacctgggacctgaaccagaactagaccga

SEQ ID NO: 359390 - DNA, 1082 bp, Cannabis indica
aaaagataatcttaatatattattattgtttaaacatataggtcgggattccgagtatcaaaatatgacttaaaagtatcttattagcatatgtatatgtatatattttttttttacaaattcacgatcaggcaactcaaaacacggactcaaaataataaaagaccgaaaccctccaggttgcactgccgcgatatgtacaatcttcgtcgagctccatctcactgttcctccagcttcgcttttcctttacctacaccaggtaccaaactgatgagtcaacagactcagtaagataggcaagacatatatatacaattaatgcaatgccggctttctgcttaagccgccatgagctcaataattgagctcaccaaatgaataagaacgttcttaagggaagtacgacctctgtaccaaatgaaccatagtaccaactctgtactcgtgttggtagagtcatcaatgtactcccgggaattactaagtgttgtaccacttgcacgacgtaccccctggtactcgtgttggtaacactttaatcacactgatagcctacactatactaacactcttaaaatcatataaacatttagtgttagtagtgtagatagttaaaacaagcatatattcatatatacattcttatgctatcttacctcgttccgtgctcaagtgtgccggtcagcctgagtgaaaacgcagctcgacgctttacagggccctaaaccataacgttcaaaattcgatgagagacacgctaaaactcttatcggggatttaaaatcaaactaaggataaccctatcgataaataggaggctaacaccttaaataacacaaaaacaaggaaaactagggttcgggaaaaagccccaaccagcagactagtttccaaccggaagtctggttcctagcaccaaccggtcgaccggttgctacaggcccccaggaactggaattccggttctgagctaggaacccgaaaattgctcccctaattccaaaacaaccccaaacttaaccaaactctccagaatacctgtaaacactatagtgaagcatattcaagcaccaattcac

SEQ ID NO: 359391 - DNA, 743 bp, Cannabis indica
tccctttaaatcaacttctttgcccttgacattatcaatatccttggacttattgcctttactacctgcaacaacattagaagcatccttatcatcaaactcatcctcattatcagcaccatcagcacgatcttcacccaactcatcaccaccattagactcattttcaatattctctgattctagtaatcctttctcatcatcatcatcaacatcattagaattagggtcatcaatattatcagatgtcttcacctatttaacaatagtaaaacaactaaaaaaacatgaaagaaaccaaccctaatataaccaggatttaagaaagccaaaactataaaaaaaaaatacctcaacagaagggcgttcgtaaatgaaaataactttttttttaatatcttgaacaaaagacaagaaagacttgaagttaaggtcaacaaaagacctcaacgctataaaatcattggtcaacgattcctgactggatataacttcttccaacttatcttttaagatatataaaaaccttaaaaatatttttttttggtaatatgaaccaatctcaaaggttggtttgaatggagcatgatcatctatagattcatccaaaaataaagccatccaatttgagagttttcctttatttcatcagtatcgatctgaccatgtctaacaaggtccgacttcttctctctacacaccgttctgctaagtgttccaggtgttgtaagttgggacaagat

SEQ ID NO: 359392 - DNA, 797 bp, Cannabis indica
atatcaaccaaaaatcttttctattctaaaatttgtattcaaataattgttctattactaaaattaatgcctaaaaattaatgcaattcaaattctaaataaataaataaatagatctaaaatacatatgtataaataataaaataaaataaatatatataatacctaagggtgatggtggtgactcggtggtggacagtggtcgtcactaaatgagagaggaggagagatgggacgaagaggagagagagaaggagggacagagagtgaatagtggtggtcgcttagaggtggacagtggtggagcttcgataggcaaaaggaaatgagcacaaagcgaatgtgatttgtgggcactaattgcggggacggaggctcaatggtggtctggagcccaagacaccgtagtggaggtggtcgtcgaacgagagggggagagagtaggcggagagtgggaagaggaggagagagaggttccgtgcggttggtgaaatgaatagagtactaaaatgaaaaaaaaaatgggttttattctaaacccgctatagtgggggtgagcaaaaaatccaagaaactgaccaaaccgagtaaaccgaccgtccgaacaccgaaaaaattgaaaacctaaaaaaccgccttcgattaaaaccgtcttaacatggtcggttttagtgtcaatggcaaaccgaccgattaaaccgagaactgaccgaacatatgtacatatttaatatacaattttattaaactaattttacttatatttttttatttaaagtctcaattattcattattt

SEQ ID NO: 359393 - DNA, 579 bp, Cannabis indica
ggtggaaaattgtactccccctttcttttttcatccgcatttttaataatagtaacactttattttgtcttgcatgttggaattattttaccgggatctagatttactaccatgtatgttgtttaacatcttaatatgaattctctaaaacaatgaaataaacacatataaaagttgagaaaccttacagtgggtgcggaactaaatgactcgttccgctcatatctctaacccttgcatcctttctgtcgcagagtatcaccaagatctaagcccgattctccttcttgttgattggattcttcacagtcttacatactatgattgaggaccaacttgatgtgtgtgggcactcactctattactcaagctattaaaatatgaagaaaagaagaagagaatgtggtttcggctatggtagtgaaggaggctttgaaatttttactgaaaggaatgagatgcatcatcttttctcttaagccatcactacctatttataggaaaccacttagggttagcttagatttaattagcatttaaatattataaaaataaagtggcaaatcccatacaaagtgg

SEQ ID NO: 359394 - DNA, 472 bp, Cannabis indica
ttttttttttttgataaatataaatttttttagaactataataggtaacaacatcacatgaatagtgattcttttagagacataattttttatattttatagtttaaaaagaaaataatacaagaaaaatatttttttttaagatatgtggaatggggtaaaaaaatattaatagaaaaaaaaattataactacaataactttaaatttgaatttcaatgtcaaaaaatgtatagatatatatggtttatttgacacaacttttagaaaaactaaaaactaacttattgaaaaatttatggagaaattatagctaaaagctaaagctcttacgacctaactaataataaaagatcaactacaataaattattttttactaaaaatctatttaattgtttgctatatattacaaaaagaactatattttttttgaacgaaaaaaatatttaaaataaataaaatttaattttc

SEQ ID NO: 359395 - DNA, 890 bp, Cannabis indica
aggctgcatggtacatcatagtataaggagttatgtatagacgaggcttttccatgccattgcttaggtgtgtcacacaagaagaagctccacgactttcgtctgaagtacatgatggattttgtggcaaccatgctgccaggccgagtatatctaagaaaattctaaggcaaggttacttttggccgacaatgattgaagattctaaggcctacgttaaaaattatgataaatgccagagattttcaaagatacctcgagcaccgcccaacgagctaactcaaatgcaaagtccttgggctttcgccatttgggaaatcgacctgattggacagttacccaaaggcaaaggttgagtgcagtacgcagtggttgcagctgattactttaccaagtggacggagaccgagccattagcaaccatcacgtccaaaaaagtgcaagatttcattgtgaagaacataatttgccggttcggatagccgtacaagataatctcagataatggcaaataatttgacagtcaatcattcactgatttctgtgcaaatcatgggatcattaaaagtttctccgtagttgcgcatccccaagcaaatggtcaagttgaagtagtcaacaagacattgaaggacacccttaagaagagacttgaggatggcaaaggaagttggctggaggaacttgctgaagttctatggtcgtactgcacaattgagaagacaacaaccgaacagactccatttgcaatggcatatggatatgaagctatgctgcctgtagaacttgaaccaccatcccacagaagattaacatatagccaagaggcctataagaaacattattttctgtagtgacaaattatgtccagttgcattccagttgcgtct

SEQ ID NO: 359396 - DNA, 637 bp, Cannabis indica
ttcttttgatttttcttgtccttggctgactccttagagttatccttcctctttgaactagaggctcctagattattagtcgtggtcgagatagtgcttgttgagacattgttgggtttgcttcttgagccagtcttcaacaacttcatctccttactggcttcttttttccgaataaatacttgagccctttcattaaaatcaataatgtttcttactgggggaccgtgtagatcatcccattgctcacctccagtagtggagagatctatagtgatccctgcctgaagagaaataagctgggtagtatcatctaggttcctcaccctcgcagcagctgtgctaaaacgacttaagtaggcgttaagcgtctcgcccggctgttgctttcgggtcacctatcccttgcgacctggaattattttttgaagtccttagacaattgttcccaagaggtgattgaatgatgagtaaatttattgaaccagctgctcgctgctccaactagtgatgtggggaacaaaatacaacgtaaattgttctaacattgcttgcttacatgatagtattgatattattcaaatacgagactggatctgtggtcccatcatatgacgagactgttgggttttatgcc

SEQ ID NO: 359397 - DNA, 826 bp, Cannabis indica
ggtagcagatttggtccgatgggtggtccgatgggtccgataggtggcccgatgggtggtccgatggtgtggtccgatgggtggtccgatggtgtaaatgggggtattttagggatatcataaaaattgtcatatcttacaaatattagtgaaaattttttttaaccaaatgtaagcataaaaaatcaaatttcccttttcatttagtcatctttaggtgaaattttatcattcatcctataaccatattgagctatcattcatctttaagagaacacaaagctctcctataactagtgatcaatctcaatcaaattcatgcttcaaaatatcactttgaagttgtatatattaagttatttaattttttttaggggtattcgtagtgcgagtaatgtaaaatttttgctattttttaaaccaaactgtatatgtaatttttacaaatttttaaactgcgaccgcaccataatacctcaatacaatgcaaaaataaaataaaataaaataatgtagtgttgaacaatttaaattatcgccaaataaatgtaacactatgtaaaattttaaaaacacaatatcttattaaaattctaacgagaaatacacctaataaaaatacaacaaagttttaaactaatatatattcaaacaatcttttaacacataaaataaaaaattatgtaaaaagtttaaaatctcatcatgatacttattaatgtataatgtaacgtccccgcttcaagcttccattgggcccttacacccacggaataatagctcttatacacgagttcgtcactctggctgcttcctggattgatga

SEQ ID NO: 359398 - DNA, 480 bp, Cannabis indica
gtaaccatgtacgcatatagtaaccaaagaggtaaccacttatcataaaaaggataaccagttaccttatactgtttaatctatattttttttttaaaaaaaaattcaaaaaataactttttttgttttgagaaaattatggtggcttttagtaacacttttgttttttaattttaaaacagaaaaataaaagtagattttttgtttttaaaattcacataaatttgattttaaattaaaaaaacaaaaaacaaaaagttttaaccgaacgtacgctttaatttaaattgctaaatttttgattaaaaaaacaaaaaactacttttaaaattattactgaacagcccctgtattttacaaacttatactttaaaaaagggtaagttgaaaatacctctttattaatcaattaataaatttacctctagttttatatttatttgaacatacctctttttatatgtattgtacctaaaatac

SEQ ID NO: 359399 - DNA, 663 bp, Cannabis indica
cctcctgggaagttttcccaggaagcgtgcgagtgaggacaaagcacgctgaaaacactcgtgttggtctgtagggtcagtcatcaatccaggaagcagccagagtggcgtacttgtgtataagagccattagttccgtgggtggaaggacctaatggaggcttgaagcggggacgttacaaccaagatatcctctccttctataggaggaggttgtaatctttggttgccccgggtattgggtggatttgtctagttttgtccatttaccttgtcgcttcacatactgttgaaagtaaccatgcgagatatggctttctatctcattttttaactgacgacattcatccgttgtatgcccaatgtccttgtaaaatctacagaattttgttgcatcccgtttgtgcctcacatgtctcatgggctcaggcttgcgaatgcaaccctgtggtcactgtccgagaaagatattttcccgagtttcaattaagctcggtataaatagtataaattggcacgtacttatcgtgctttttctgttttatcttcggataattccttggagtcatcttttctctttgtgctaaagcctcctagattgtcagccttccttgagacgatgcttgccgagatagtgctgggtttatttctcgagccagtctt

SEQ ID NO: 359400 - DNA, 403 bp, Cannabis indica
cagtagaacaactaaaaaacacccgtagaacaccagtgaaaacttaacacaatatactgtagtatgaaagttatagaaaaacgggctaataggggcataagtacccaaagttttaagtttgtaagtggcataatcccaatgtttatttttagccgacataagtactcacatgtttgtaaaactgtaatttttcttctaatctcgtcagtacaaactctgttattttcttaaataggccacatataaggtcgagattctagatcattgggtctagataaaaatatatagtatcatttacttccaaatgctcatttaataaatttaaaacaaaagtctgtactgaacaaaactggaagaaaattaacagttttacaaaacattgggtacttatgccaactaaaaa

SEQ ID NO: 359401 - DNA, 896 bp, Cannabis indica
attcatatttaggatgttaaatttcatacatggcagtaaatctagatcttggtaaaatatagtccaacatattactctagggtggagtagtgattttggagaagtgtaaaaacctatctgaagtctctaagtctaccaaagagactgaatgttaaagttgcaggaaagatacttattcagcctatggaaagttttatacagtttttggcattgtaccaacaatttattaaaactagtgttacttcctgactaacgcagaagtagttgccaaaaagtaaagaatcaagtatccctagaggagtagacatagagaggaatttcacaatatcaaggattttgtaatgaagtaaatgtaatggtggaggaaagggtgtattgaatacaacctgtgagatcctattacggagataatactacatactacacttgatctggatttcaaggtgttgagattaactgaaatgcactttttgtttatattagtgcaagtgggagttttttgggttttgtcccctaaataaaacccatttcaatataatcagatttactaattaataaagatcagaaatcgcattttatgttgcattgttcacatgatttattttgtgattgataaatgtaaaaattctactaagtccagaatatatgtatttgttcatgattatagtgtcgtcagcacagtggagtataatcatgattgtatgttcaaaagtttaattctctaatttgtcagttcactagatttagattggcatgataatctgcgataagtatatttacaccttggataagtgttacgtcctttccagggcattggtaaagtttaccaatatcatatttatggagtatacattggaagggatcgatattgatcttagataagatatcacaaactt

SEQ ID NO: 359402 - DNA, 1293 bp, Cannabis indica
ctcggttgcacagaaaaaaaaattgagccagagaatcaacactagcaaatttcagccagcccgagctacgttctggtttggtgaggtaaattgaatttttttttttggttgaattgcatacttggtgggtgtagttggactgctagtatatgctatattcaaatggtgttaaacattatccttatgattcacgggtggtcaccgagtgtgataatgttggtttggaagatttgaattggaatttggtggaatttttgaatattgggctgagaaagattggtaaatctgagaaaagtagtgattgtgcaattggggttgtaatttggaatttttttttcagtgtggttttgaatgctttactgttctctaccgtgtttgtatgatggtgattcttagtgaaatggtgttgaattggcagtggtaatgttagaaatagtgcaagtttgaactgatttgtggtgttggataaattagacattggaagagttccacaggggaagtatcatggccaagtactacatggattgtgtgtaaggtgtcaaaatttacttggtgtggtgtgggttggcaaaagtagtagtttttgaacaagagtgggttggagacagtgaagtacattgtaagagatcttattgtgttgaggggcagcagtgagtaagacagcaaagaagaaattcattgtgttggggtagtgtgcaagtgaaaagaaaagaaaatgcccaaagttaagaagaccgccaacaagaataaaaagaaatcactgcatgaaattcctaagtttcattgcccggcagctgagacaaagtatcacgagaaggtggacaatcgggaattttatatggagcgtggattagtagccgatattgaggatattgatgagttgcccgaatgggtcagtgcaacgattcataagcgagattggggactttttgtccaacaaagagagcaggcggtcatggaagttgtcaaggaattttacgccaacttcctatcccaagaatggcccactgtagtggtggtgcgtgaagtcccagtctcattttcagctgcagcaatcaacgacctgtttgggttaaactctgtcgagtgccaatactccgcgcaaaaagggcaggtgagcgacgagactgtgggtgacatgatgccgatgctcgctaagccaggatctgaatggagttttgataattatggcaatcttcgatttcggcgcactgatttggagcacgagttgaaatgttggtatacattcgtgcaaactgctctctgccctacttcacatgattcgaccgtcag

SEQ ID NO: 359403 - DNA, 758 bp, Cannabis indica
aaaaatgctccaaacacgattaaaacttaattaaaattatactaaacttaatctaaaattaatactaaaagtaacttaacaatcagtcaaccggttaggggagacctgtaggaaccgttcgatcaattggtccccaggaaaccccacaaaactagaattttggttggggaaccggtctaccggttggggcattttagggaacccttatttttcccgttttacgatatttagtgtattgccatgttatccgtcgataggaaaatttttagtttcaagtttatgtccctggaaagtgatttagcgtgtcattcactagttttgcaaataatgtattttaggggcctgtaaatcgtcaggcagctattccactcaggttggctagcacacctgaatttgggaacgaggtaaaattagtacaatgatatgcatatgtgtttatatttttagcatacatgttcaataagcctattagattatattatactagcaatatcattatatttaatattatattggatatcgatacatgtatgttggcttctattcgacaatatcacatcggtacaattagagtatgactagcgtattgagtataggctgatattatagtcgataatactgtactacttgatagtacacatcggtacgactagagtatgactagcgtatcgagtataggctgatattatggtcactagtactgttgtttgaacgttcttgactcagcaccgttttggacatggggatagggttacggt

SEQ ID NO: 359404 - DNA, 559 bp, Cannabis indica
tatcattttttctccccgagcctcgtattcgccagatacatgatttaccactagctgtgagtcactgcagatctcgatgtgctcggccttcatctccttcgctagtttgagtccagcaattagggcttcgtattcggcctcgttgttggaggctttgaatccgaatttgaccgctgcatgcaggtgttgcccccaggtgtgacaagggcaattcctgcgccggatagctgatctgtggccgacccatccacatgcagcttccaggtcggcttgttttcagtgttgctcggctgtggtgttgactcgagatcgccttctgggatgctttcagtttttcctgtgcattccaccacaaagtcggccaaggcttggcctttgatagctgttcggggttggaaattgatttcgtactgacccaattccaccacccacttgagtaaccgtccagaggcatctggcttttgcagtatttgtcgtagtggttggtcggtgtacacccgaacaggatgagcttgaaagtaaggtcttagctttcttgttgctaagatgaggcagtagg

SEQ ID NO: 359405 - DNA, 810 bp, Cannabis indica
acaaccaacttgaagacaatgacttaataacaaaaagataacaaaaatgttaaacagtttgtcatagctactttagatcagtattataataaactttattttgaaaaaaaatcaattcagaggcctatttgtactattttagaaaatacagggtccattttgccatttaataaaacacagggtccaattggtaacttttgtaaaacagagggtccaaaatggtatttacccgaaaataaataatattaattttgaaacaaataaaatatatataacctataaatttaacatatagtgttaattatttaaatacattaaaataaagaattataaaaaaagatactttttataagaaaaaatatttaagtgatttttttaataattattttaaacttgataaagattgaaaaatgcaaaaatataatttaatttgcactcacttaaaaaaaaaatataactaattgggtaaaattaagttcatcaatcacccacatagaaaataaattatgctaactttgtgacaaacaaaaataaaagatatttaatgtataattatatcatctacaatagtttataaaccatgtgggacttttgtaaaatgactctcatattactaaaagcataaaaaatgtagaaaaatgagaaaataaaaatatattcaacaaaattaataatgtaaaataaaatctaaaaatatatattattttattagaataaaaaacttaaggattttttagatttaaatattttacaaagattaaatagtgcaaaaatatgtaaaaaataaataatattaattttgaaacaaat

SEQ ID NO: 359406 - DNA, 604 bp, Cannabis indica
ggcctgcttagggacatagctcctgcagtttccttgagtttgttgtagtttgccttttctttcaataaaatctttacttaacaaataaaaaaaattaattgtgaaagtggcaaggtcttagatccgaaaacctatatatccccacacctaaaaaagaaatttcatatgcaataatagcaacaaaaaaggaaaaataaatatattaaaaggggggaaaacataatttgaaaagaaattaaaagaaaatataaaaaaactcaacttttttcagttttaacaaaaaaaaaagtaacaatattacaaaaatactttagctggccaaataaacaaatatgtaacctgaataaaaaaaaattacaccaataccacttacacacacctttaacccatgatccacatgctttctgggcaactatcatgcaaccatcgtgcaactacgcagcaaccaaggcaactgaaacgaaaattcaactagaaagagaaccaccattaattctggcgaattcacctgagaagacaaccagaatcaatcaaaacaatggttgttttgaattcatagaaaaaagtgtagaaaaactacaacgaaacaaaaattcaactagaa

SEQ ID NO: 359407 - DNA, 550 bp, Cannabis indica
ctggaccgatatgtaataatatctttcattaacatttcatttaccatgaacgaattattcatgtcacaatgatgatcattggtagatatgtctgaatcctgagtattcatgaactcatgtttgtgtttattgggttctttgattcacttgttaaagtttctcagagaagatgattcttacaacttttgttttgggaatccaataacatgagtggctgtgaacatgatatactataatagaatctaagctttcataaatgattgaatattagttcccttatagtgttaattctggaagtgctaacagttggacccaaatctataataagttatagattaactgttcaaattgaactaatagtacataaagaattcaagaaataattacaagggttaaataatatttttgaccaactctaattatgaattaataattagagaacaagctacttgtaatgattatatcaatggactactagtaataattctataaatataattttatattgtcaaagagtgcaattttatatttatagtggagtaataatgaa

SEQ ID NO: 359408 - DNA, 669 bp, Cannabis indica
gaagtgaaaatctgtcattggaagaagttcaagctctccttatgtcccatgaatcaagacttgaaagacactcctcggcttggatatctcaacaaaaatggctgcaaatctgactttgggggcaagaactgggggtaacagatacttcaacaatgctggaaaaggccaaaacacagaacatgctaacaaacctggtacccgtggctatggattcagatctgtcaaccataataggcctttgtgtcaagtgtgcatgcagtttggacacacatcagccacctgtcactataggtttgacagaaattgggtcactcccaaggctccccaccctcagccccaagctaatcttgctgagcaaattattgactatgatcctcaagctttcattgctcaaacagttcctgactttggtgatgatgatggctggtatgtggatacaggtgcaacaaatcacattgctcagtctactgataatcttgagtctgtcatcccttattctggccaagaaaccgtagctgttgctaatggtaaaagattacttatttctaacattggtacagctactcttccatccaaatcttgtcctttaaatcttaattctgttttacaaattcctactatcactaaaaacttagttagtgtttccaaactcactaatgataataatgt

SEQ ID NO: 359409 - DNA, 690 bp, Cannabis indica
agacaatatctctcaagtaaaattcttcgaccctttgcccagtgaatatgcatcagtatttatagggctatgagcttagagatgaagtatttcccttctcattacaatagatataagcagaaggattgcacaataaatactgaatacaccaattgtgggatttggatagcttcccatatctctacaatttgatgcccaagttatagagatttccttgatgactcacgatgcgaaagctgaattcgctaagtgttggtcgttctgcgcggattactgattgctttgcctcgagcatgcatatgaggtatcttgttcggactatatcttgcgagcagatactcggagtcgattccacgtgtcaccatcatgtgaagccacgtcagagtgcaaaaatttggataacagtaatagcgtatgcttctcggcagttaaaagactacgagcagaggtatcctactcacgatctagaagtcccagtatactggtatttgcgctaaagatttggcggcattacttatatggcgagaaatgtgagatatacattgatcataaaagtctgaaatacttcttcacctagagagacctaaacatgagacagagacgctggctggagttggtgaaggattacgattgtgtgatcctttatcaccctaggaaggccaatgttgttgccgatgccttgagtagaaa

SEQ ID NO: 359410 - DNA, 894 bp, Cannabis indica
tataaattataattgatttgattcataaaaaaataactataaattattatttggaaacaaccttatagttagaagattttcttttaagcatatgatttttcaaaaaatatatacatatatatactttttggtcgatgatatttagtttttttttttctttgaaaataattattaacttaaaaaataattaaaaaaaaagaaaaaaaaataaataaaaaggtttaatgactggaagagaattagcaacaattttattaaattataaacagatatttttatattttaaatttttataatcactaattaataaatcataatttaaaaataccatataagttcatagtatttagtgttagatattaattaaaaaaattataaatatgttaagttgattaattactgttatttctctatcttttcttagcacctataaaaggtgaattgtaatcgaaacttttttttttatatgctgaatgaaatggcaagagattgcttaaggagatttgtcttgtctcgaaaaggacccaatctaatactggtgctttcattgccttcttcttcttccttgcaagatgaaaaatgaggagattgcacaattgtttcagaatatgaccagagatttcgatctctaaatggaacaacgagctgcatcacagatggaggagctcaaggccttactcgatgagcatctctctcacttatcacctcctctttcaccaggtacaggtggtgagaatagtgcagccctagtcacggctcgagcaaccagtcaatgttccgatgttgagcttggtatcaagatgttaattctcttctcaacactctcaacaagtatgttatttaacaacctaaatatgaacttctaaaacgattataaataaacacatataaagt

SEQ ID NO: 359411 - DNA, 629 bp, Cannabis indica
acgcgcacgcatagctgagaatatttctgccacagtgctcatcatttcagtagttggtgggggaggcaccgtcgattgagtttgagggattggtttctttcctttgcccttgagccttttacccacgcctctttgatagtcagatctttggcctagaactgtttccaaaacgtcaaactgataaccagtatcagattcagattcagtaccagtatcgctctggattgtcgttcaagtcttttcctatcaagctccttgatcagttcctcctatttaaatcaaaattattagaatatataattaatataaaatataaattttaataataaatcattttattcacttacataatcttttgcagctaattcattaacgaaagtgccagacggctttttcacatggatctccttccatgcttcaactacatgctctccaggaggacccccctatacgaacataaacaattaaattagtttattataagagaaaaatattattaacaattaaagaattaatacataccattccgtggcgtatggaagccaacgattttgtgccttgcgttgttggatatttcattagttgccgattcgatttatttttagttgaacgattcaaaaatgcctcgc

SEQ ID NO: 359412 - DNA, 689 bp, Cannabis indica
aaatgcatcctgataaatctcctagtcgtgtactgggttttatcagaagttctgggatatcgttagtaaggatatcattcggttagttcaacacttctttactttcggtgaatttcctaatcatttgaaagaaacgaatattgtgcttatcccgaagaagtctaaacccgaaagcatgagtgatctaagaccaattgctttgtgtaatgtggcttataagattgtttctaaggtgctggccaatcggttgaaaattgttcttcctaatgttatttctgaaactcaaagtgccttcttacctggaagactgataactgataatatcttaatttctttcgaggtgatgcattatttgaaaaggaagcaaatgtggaaggaggggtttatggcacttaagttggacatgagcaaggcttatgatcgggtggagggctttttacaggctatattgaagagattgggatttgatgagcatgtggtgaagttggtaatgcagtgtgttagttctgtctcctacacaatcacatcggggggtcatgaaattgggcctataattcctacaagaggtctttgacagggtgatcccctttcaccctatcttttcattctgtgtgcagaaggattctcggctttgataagagactatgaacgttggggaagattcgggggtgcaaggttgctcgaggggc

SEQ ID NO: 359413 - DNA, 736 bp, Cannabis indica
aatattgatgtgacagctttaaggtcatataaggctgttcggcccaacatgacattgaaggctgatggaacatccaatatcaaaaattgtgccattacggttatgctcttcggagcttgtccaacagtgagcggtaggcaaattttccctagaggtgcgacagtctggccggagaaactatatacaagctgaagaaagggggttaaatctttgagttggagccctattttttcatatggtattttgaacaagatatttgcagaggctccattatctatcatagttcaggccgttttgtttgctatatgtacttccacgacaaagggatcattgtgcgggaaatgaactttgacagaatcctcttcattgaacgttatggtgggttcccctacccatggtaattttggcttcctttcttcgacggtcaggaccagttctttttgctcgtgctataaggttccggcatacctttcccaggctttgcctgaaactctagctatgtgcgagcctctaataatgacttgtaaatgcccatccaccggtggtggcagtaaatcttgattattttctgtctgagcggccctctgattttgatcggtcttaacatattttcgcaggtgtgggttattctttttaatcaaaaatttaatttctcacttcaaattgttgcattcgttggtgtcatggccataatctccataaaaaatgtcaaaacttggacatgtccctcttactt

SEQ ID NO: 359414 - DNA, 1020 bp, Cannabis indica
ccggtcgaccggttgccacaggtcccccagaactggaattccggttctgtgctgggaacccaaaaaattctccccatgacctcaaaatcaagccaaactctaccaaactttccagtatacctgaacaatgaatttaaaacataattcaacaagaaaatctcagaacaaaccattaaaattcaacttgccattaatgatcaaagctttgagttcaaaactcaaacttgcataaaatcaacaccacatactaaaaccagctgctaggactcttaatcaactcaaattaagtctaaaattcaaaccctaagcaaaactaaacctaacagccccttactaacaaaatcatatcttgaaacaaaagagaacttaactaaaactcataaactcaagagataagggtttttagggtttaccttacaacccttacttacaaaaaccttgaatccttgctaaatctcagagaaatgggaaagaaaagttggtccttgcccttgctttgtctcagccgaaagaaagagagagaaagtttcaagagaaaaactctattttctaatttccttcttttcttaatttcttaatctgaaactatagatttaggggctccatggagacgaactatctcctttacatatagttctgcatactgatccattgaataggtaactttcactggcaaaaagtgagctgattttgtgaatctgtctactatgacccataccgaatcatacattcccgtagttctaggcaatccagttacaaaatccattggaatgtcctcccacttcctctcaggaaggactaaaggttgcaataaccctgccggcctctgatattgagccttgatttgctggcaggttaagcatttggacacgtagtccaccacatctcttttcatcccataccaccaaatatagggtttcaaatcctgatacattttggtggttcccaggtgaattgaatagggtgtggtgtgagcttcatctaatatctcattcttaagctcattaacaccaggaacac

SEQ ID NO: 359415 - DNA, 638 bp, Cannabis indica
aaaacacataattaagattaatataaacctaaagggaaaaaacataaatgggcaaaatggttattttgccctcacccgctaaaatggcataaaaggggtactaagggtattttgggaaaactctacattcccgactaatcccgacattccaaatgtctaaataaactgccccaacatactaaaatactaaattgtgattctactgagccatacaccgcgttccttgttgccgggcaccgaaaatgtaaaattatgaaatttcactatatgacataaaaatgcattcagaatatataattatttaaatatccataaataatttcataattaaatcttaattaattgctaatttccaaattaaactaagcggtctttacataaaagttggcactctatgactacaacttgaatccagtgccagtaccaaggtattggaacgaggtgcatctactatgatactaccaataaagcagctgtcttcaaaacaacttgcttcacaatacgattcacttttcaaagattaagtgaatcgatcgcctcttaaaccaattagatgcgatgaagttgtctctaggttaaaaggtctatcgctaaggtattgttggaaattattttaccacgatcttagatctactcac

SEQ ID NO: 359416 - DNA, 643 bp, Cannabis indica
tggtaaaataatttccaatacccgactcatatggttataaagatataatacattaaagttaactttcgagtttagtaaatataaaatacgggcgttacaaacatcaatcaatcatctaataacacacagatcaacatgaaaccatccaaatcacacacaaatcattttaagtctaaatttctttaaagtaaattagttaccatggctctgaggccagttgttgaaatttattttatcagtatcttagatttactaacaagtatgttgtttaacatcctaaatatgaacttctaaaatgataatgaacacatataaagtttaggaaacattacattggttgcagcagaataatatatctccttccactcagatgtctaacccttgtatcctttctgtcacagagtatcaacaggatcttagtccgaatgtccttctcttcaatttggattcttcacgatcttccaaaatatgattgaggtaccacttgatgtgtgtgggcactactctatcacttaagatattcgaaattagaagaagaaaagagagagagagggggtcggttatagaaggatagtgagtggctcaattttctgaaggcaatctcttgaaccacttgaaaaacttattttggtgcgagccatca

SEQ ID NO: 359417 - DNA, 1108 bp, Cannabis indica
actcgcactcggtcccaacagattccgacatatcaccgccctcccctcacttttgctctcagggatagagctcaaaaacttgcccggttgtcgggggaagaccggaatattacccagttgacctctgaggataactttgtgaggtacgggctctatccccaggactttgttcctaagtccgtgacggggaagaagaggaaatctggtgctggacggaccgaacgagctcatcaggagaatgaactcattcaacttaagcgcgaagctaagttgaagggaggtgcaagggccaagcagtatgctcaagagcccttgaatcctgaagatgaagttgaggaagagcaggtgacccactgaagaggaagaagaaactcccggccctgctcaggcctgttggacatgcgattcgcataagggagtccatttcacctgttcggacatcccctcccgtgcttggaaaagggaaagccgttatgtctgaaataagagcaatgtcaagtgatgatggacttctgagtcttgttcgggcagtcaccttgcatattactttgtcttatttttgagcttcttgatttttatgcctcatatctgtttcttctaactatgttgtttcttgttctgtacatacatgtctcggcagatgcttgatgctctgaagaagagaatgggcggaagctctagtgcctctcctccggccaagaggtctaagggcggtgaggggtcctcatataaggaaaagaggcctgctggagaggtcattgatctttcagaggagctaactgctgcaaaaccccctccacccccaaacgactgccaagtaccaaggagtctggaccaccgaaggttgggtctgaactggtcaggagtgtttgccggtgcttctagaggccaagaagggcaaggaggtgctggcctattacatgaaccgactggtttctgaggtcagtgagcaaatggatggtgctgacaatgactcttctttggaattgtctggtgggcagagttttgaaggagttcactagggtaagtcttttttgatacttcccttaaatcttccatacttagctcaaatgctaaagttttttctttgtgcaggccggtctgaagt

SEQ ID NO: 359418 - DNA, 520 bp, Cannabis indica
tgggtccgccgctaatacatttttatacaaaaaaaaataaataacatttaatagcagaagtccgccggtattagtcctattagtagcgacagatttgctccgctgctaataaccaaaattcttgtagtggcatgacatgcaccataggacttatggaggatgggttaatgatattgctagggctcattatgtaagttattattttaagtttttctttaatatatcaattgtaactaattaattatttctctattaaaatgtaggaaaaattatgtgaagaaagaacaactcagacacaaaatactttacctggagatgctccaatagatgatatcgagattgttactaaagtagttggaaaacggcgtgattgcattaaaggggtaggacgcaagttgaagagcactcctgctagtcagtagtcccgtgatccgtaaggggaaataccgggtaagttgtgcaatcccacatcgcctggggaaggtctaatgtgatgattctgaggctatgtaggtatggg

SEQ ID NO: 359419 - DNA, 996 bp, Cannabis indica
tcctcatcagcaggaacgggagtgaggactatgtcgggaggcacagtatattcctctgcctcaggttggatccctgagtcaaagctaggagccggagtattgacccttctgggcttcttggtagactcaacctccaccatcttgcccttgcgcttccaatccagagaggctagaatctcgccttcttcatcctcttcaccctccctatcctcatcgatcaagacgatttggcctaagggaacgctcgacgaagacctccctggggttaccgtcaggtcaggtgcctgaggcaaggcaggttcgggactgtaagtctgggcaagggttgccaaaagctcgtccattggcctagcggttttaggaaacaaacaaacaagtgtcaaaatgatcacaagaaattatgcgcacaaggacaaagcagtaaaactaatcctacccagggaatctaattcagccctagcaaagtcctgcactacaatactagcttcatcatccccaagaaagctatccaaggagaaaaccacctggaagacagataggctgaatgatccaaaaggatatgtgcgggaggcccagaccccatccgagaccggccttaaaaatgacctaggtttgaaaaataaaagcccttggcatgatcaccccatcgggtaggaggcatcttaaatccaaggagacgttcatcaaactctataggtctacatcgagaataatcttgagcagaagggacacaatgaataactaagggtgacttaccagatcctggggtgctagcatcaggagccctagtgttgggaaccgggagcagcaacttgggccgagacggcactcggtctttgccagcctctacccggagagtcctcccggtagcggtttgagccttaatgtaagctagctcttgttccctcctaaagagatacttttggtatcggtcctccgctgaggcgataatgtccgccagagtaccttttcggcatcaggggtgcgaatgttggg

SEQ ID NO: 359420 - DNA, 617 bp, Cannabis indica
tttatattaatattttggactccaacccctaagctagatattagaatctggacccaaactctaatccccaacccagacacttgcaaggacctcggaccccgctctgctctagacctggaccccaaacactagacctaagtcccatacccaaaccctggatcccgaccctatccttgattcggaccacaaatcctgaccctaacccaaactcggacctaaagccagacttgcaccccgaacctgccttaaataaaatcaataaataaaaataaaaataaaaattacacattggttatagaacataaaaaacaaaattttaaaaatatatatatatattttttttatttttgtaattaaaaaatttaaaaacaaaaaatataaccaagcataaaaaaacaaatgtaatttttttctttacaaaaatatataattaggggaccatgtcccctagctcagtcgttgttagttacaccaaatgtagacaacatgatttttataaagaagaaaacaaaccagaaataaaactgtagaaccataactttaaccattattattaaggactttgtcctctgtgagtatttgtgctatcctgattttattctgggcttaaaaaaaag

SEQ ID NO: 359421 - DNA, 574 bp, Cannabis indica
gggagtgaatgaggcaggtgatgatagcacatatttgggtttgccaaatattgtgggtcgtaataaaacggccttacttgggttcttgaaggataaaatgcgtaaaaggattcaaggttgggaaggaagattgctttctagagcaaggaaggagttgctaataaaaattgtggctcaatctcttcctagttatgcaatgaatgtgtttttgctacctgtggaaacttgcaatgagatggagcaattgatgtgtaagttttggtggcgatcgtcgaagaacaacaaaggaatccattggaaaaagtgggatagattgacggtacataagtctaaaggtggtatgggatttcgcaacttgcatgactttaacttgagtttgctttgtaaacaggatggagattgtttagtcgtctggactcacttgtcagcaagatttttaaagctaggtactactgtaatggtaccttcttaaatgctgagttggggagcaagtccaagtttcgtgtggcgtaaatatttatgaaactcaagagatcgttcgaaaaggggcgtagatgcagagttggtgatggtt

SEQ ID NO: 359422 - DNA, 520 bp, Cannabis indica
tttatttttttttctaaacaatagttcatttttttaatatttactattatggaacaattcttatactataaaaattttaaagtttgtgataattgtggtggaaagtcttaaacttttatttgttaatatatattgatggctgtattacataaaatataacagtgaacaataaaataacacatgcaataataataataatcaaataaaaagtttgttaagtaaaaattaataataaattttgtcacataaaaaaaatacattataaatagatgaaaaattttatactaaaagaatatctgaacgatttcgatttaccatcgatctcatccaaattttatagtttatcacaactttaattatacggtgctttaaatgtactataaacgatcgaattgctacccttgtaaagacatgatttttttattatttattattaatttaacttttaaattaatttaattaatgatttaaaaattttattttaaacaatcatgtatggaatatactataaaaattttaa

SEQ ID NO: 359423 - DNA, 558 bp, Cannabis indica
cccatcgggcccgacgaaaaaatatgcagaaaatcagcaaaaatccagttttcacatgcagcaaacatttaaacagaaaaaacagcaacaatccacagatcaagcatcaaaataacattctaaactaaatataacaacaacaaacaagattacacaaacaaaaaaaattacccattgcttgtagaatgttgctctttgtatgatgctccctccaaattttaaagaaaataggtagataagcttgtagtggaatataatatagtgtaatgaagttaagaaaatgagtagtgagtgaagagaaaaaaaaatttatggtgggtagtaatggggagttcggctcgagtgaaatgggatgagaataagagagaggggagaggggtaatgtaatgtgggggtaaaattgggttttagaaaaacttatcctattttacaaatgttacgtaatattagtttaggatactaaatttttgaatttattaagcatggaattttaaatttcccaaaaacaatcagtgagaaataaataaaataaattgttttctttttatttattttttt

SEQ ID NO: 359424 - DNA, 680 bp, Cannabis indica
aatcactaaataaaaatatatagaaagagcatgactaagtctatacatatatttagtatataatagcatacatagtagtatagatggatgaagaacaataatagcatatataacgcatgtggaggctggcagagagagaagctgctagcgggtcccacgcgtgtggaaagtagacggcttggcaggagagggacagagaccacgcgcccttgtctggagtgggaagcacgcgcccgtctgggccgtaagatcaacacacggacgacccagattgaggagcttgctgacgcgcgagtgggcttctatcaggatccgaaatttgatctttttgttaaaaaaaaatatatattatttttttcactccaattattcactttgaaaatacaataataatattaattcctacaaaagaaaaagataataaattaaatttaaattaaatattttcaaaataaaaatatatctcgtaaatttcatatgaaaatattaatttattttaaactttaagcttattaagtatattttttcccattaatcacaaccccaactagcttattgctagtccctagcaattcaagcggagaaaaataataatcgacttgtttaaacaagtcaaacaaagcaaaactatccaagcattttcaaaatattggtagggagtcaaaaatttctatcaatgt

SEQ ID NO: 359425 - DNA, 636 bp, Cannabis indica
tcgttccccctataggagtttgcgcgagctccttttttatgagcttggagagagggttggcgatctccaactgatgttccacaggtcccaggctgtgtccctatactttcctcagtttccttaggttgcctcccctgagagttttgagaatatctttgggttgtctcttgccccttcgtttacgagttacgaggtttgcctcgtggatctttgtctctaaagttaggttgattttgggaactattctcctgtgcttccctgactacgactatttcacgctctagttcagcattacggcagttcgcttcctccaatcggcacctaagatggcaattttctaactcaacaataggtatgtacctggttgggtcgtaggcaccatcctcatcaaccttgttaggaagagactggctgttgtttatcctaggcctttcaagcctgagtccccaatacttggttttcccggagctagtagcctgttcaggtgatgaatcaaaagatccctgaggactcagtggctcttttccaggacgatgattgattccttcaagaggattatcttctttgttgtcatccattacatttatgttaggaggcttttttctgagttttttttcacgaaggctctcaatgaaa

SEQ ID NO: 359426 - DNA, 549 bp, Cannabis indica
gtgaaacgaaagtatttgcatagcctttgtgacatttagattattgcttaatgttgattatatgttaatctatctcagagattattagataacatgtgatttaggacctaaaagatctgaaaagagttaggtttatttttataatctttcattcacattgagaaagagaatagttattagcatttacagctgggtaattaaatcaacaggattcttttccctaatttctcatccttgattaaacacctttattgctttctttaattttcttatttttctttatttcaaaatctagcaaaattatttatctaccaaatagaatcataagtctaatttagtggtattcagttcaattccctgtggttcgacctcacctgtgtgagtttactactttattacgcacacttccatattgtttataattttcgtaacaagtttttggcgccgttgccggggaattgtttaaaaattgatattgcataaaatttgattaaattctactttgattaattttttttgcttatttctaatctatttctcttagattgt

SEQ ID NO: 359427 - DNA, 863 bp, Cannabis indica
aaaacaaactagctttaccaacatttaagtgacttggttataaaaaagaaagaaaatttaagtgacttgttatgcatgttcatagtatattttatgagtaatttaattttggaatcacttaaattgcacacaattaattgaaactcaaattagtgcttaaacgataactaattaagatgaaagttatattttacgagtaaagctttggactcactcaaattacacccattgaggtggtgtcattagattagtttgcaaccacatatataatttattaaagagatgagatatttatgtataaaatatactatttttgatgtattatttcaaagattgaataattaaataaaaataagatggacaagaaaaaagatgatatattgttgttggatatatagaagtgacattttgttttaataaatttaagttgtgtaacttaatttgagtgtatttgaaacattactcatcatatcattttcaaagttgtaatgatcaagttttatagcttgctctgtatcttagaagtaaaacaaggtgagttcaactataatggcatgatgacaaaacttgttcttgtatttttgttatttttttattctttgtattcatcttgaatcttctaagatggagaaagagattaaaggaaagaagcaacattaatgttgattgggtccatgagaaaaaacaagataatacattatgaaaggagataataaaagagattgaagtgatgtgatacatttttctatttttgtaatattatagttggatttttgtaattaagtattgttgggttttgtgccctaaataaaaccctttataatctgattagttatcaatataagaaatttgaagtgatttat

SEQ ID NO: 359428 - DNA, 670 bp, Cannabis indica
acactatgattgaggactaacttgctatgggtgggtatgcactcaatcactaaggctccaaaatattttgtgaagaacacttaagaattcaaaaattagaaagaagaagaagaagtctcaaaacattagttgtctgacagaatgaaaactaggtttaaaagcattagttggataatgagactattcttttctttttatactaattcacttagggttacggttgaattatatgaagaaaaaaaatgataaaataatggctaaaacaaagaataagtggccgaccatatgtgggccccactaattgtacttttgtcatttttttatctatttatctattatttcacaaatgccatatttttttaattttaatcctataaatgtcaaaactatttatttaataattataagtaatgatcaaataaaattgtcatttatattagagtaatttgcggcataacctctttaagtggccaagtttttgcaactaactcccaattctaaaattttggtggtaaaatctcctaaactcgtgttttgttagcagattaacacttccatctatttttagctgttaactgccatggtggaatgtctacgtgtacacaatgtacacgtggcacaattttattggtccacgtaaacaaatatttaaaaaaaaaattaattattt

SEQ ID NO: 359429 - DNA, 567 bp, Cannabis indica
gtttaaaaatatttcgttaaagattatgactcgattacttttgtttataaatgaatcaagtgtttttattttaaaataatgagatctcaagcttcggttattttcaataaatcagtttattgtctttattataaatggtttcaaatggactaataagtgtgacgtctcaagaaatcaggacgttacaaacacaggcctagtccaccttagcctaggaccaaccttgtcaaactaccactccccatctcgaaataagatctcggaaacaacaaatacctcaaatccaaaagactgtcaaagaaaatgcaagtgagtcgtcgaccacccaaccgaccccaacaaccctgtgaccacaaagaaaactaccgaaaaaagagagcaaaactcacgaaatggaaaagaaccttcacttgtaaaacccaaagaagcatgtccatccttactgtccagccagagccaagaccaagccaaaaacggtcgaagagctctggtcggaggaagaaaaaacaagggggaaaagaagaaaaccctagcagagcctaatcattattactataactacatttt

SEQ ID NO: 359430 - DNA, 644 bp, Cannabis indica
aaatggtaattttatttgataattacttttagttattaaataaataattttgacatttaaaaatttgaaattagaaaatatgacattaataaaagaaaagatgaattgttgaataaaatggtaaaattataactagtgggacccacatcccatggtccgccacttaaggagaaatttagccatttatttatcattttttaatttgatataattcaaacttaaccctagaagaattcttataaatagatagtgataggatcttaatttgacactgatacataagcctctcagtcaaatttgtcagattaacaaagagccatctctctctttatttcgaatccctctctctctttttctcttcataaattttgtccctatagtgatagagtacatgcccactcatattaagttaagtactcaaacaaagtgcggaagattgtgaagaatccaacacctgaaggagctccaagcttagatcttgttaatactctgcgatagaaaggaaaaagggttagaaatctgagtggaatgagacatattattccgctgccaccaatgtaagatttcttaaactttatatgtgtttaatttcattattttagaaaattcatgttcagggtgttagattataggatataatcaac

SEQ ID NO: 359431 - DNA, 904 bp, Cannabis indica
ctaccagtttaaaacaacctcttcagttgatcagtaagcagattttgatgttaaagagatagtgagactgcatggtgtaccagagtctatagtttcggatagagatccaaagtttacctacaagttttggcagagtttgcaatgggctatgggtacaaaactaaaaatttagtacaccattccatcctcagacagatggacagtccgaaaggacgattcggatattggaagatatgttacgagcctatgttatggatttcgaaggctcttggagtaagtatctaccgttaatagagttctcgtacaataacagttatcagagtcctatagggatggctacctatgaactgttatacggaagaaagtgtagatctcccatccaccgggatgagataggggagaagaaatacctaggtccagaatcagtacagcggaccaatgaggcaattgagaaaattaaagctagaatgcttgcctctcagagtagacaaaagagttatgaagatctgaaacacaaaaatgttgaattccaagtaggggatcgcgtgtttttacgactatctcaaatgaagaggattaaacatttcgagagaagaggcaagctgtgctctagattttcaggacctttcgagattctcgaaatggttggacaagtggcgtatcgattagctttgcctccagctctttcgacagttcacaacgtatttcatgtctctatgctgagaaaatatgtttcataccctgctcatatacttagttatgagaatcttgagctgcaaccagatatatcttatgaagaacagccagttcagatccttgatggaacggaaaagtccttcggaataagaccatagctttggtccaagtactctagagaaacaacaaggtggaggaagccacctgg

SEQ ID NO: 359432 - DNA, 605 bp, Cannabis indica
ctatataatcaatcttccaataaagagctactagaattttaccatgtaaattctctaacttataattcctccttgcgcaattatagattcagaattgctctcttaattatatagaacgctctatatattccacgatatagatacgctatgaattatccagtgttataatcctaataatcaatgatcctctatagatgatctatatcgagtagggataaatatatcgttacacccttcaatgtattttatccttaaaacacttagttacctataaatgatatttcagtaaactaatataattactgaaatgagtactcaaccatttatctctattaagccaagctttgaaggaaatcatcatttcacttctatgtctagatagaagctataaattttgtattagtgctcccactcagaagagaaacactgccgaacaagaggaagaacgagaggtggccggtgaggcgtatgttccacaaccatacgctcgtgaggatgagggtcaaccacaaacatatgctgaggaatttatttctctcaacgagccagcgctcctgtacaatttcgatgaccatgcggcccttgatcaacaagtatatctctgc

SEQ ID NO: 359433 - DNA, 662 bp, Cannabis indica
tccttgagtaaagggcttccacttagagccaggttaatttggggtagtcggttcttaatccattcatataaatgacctagtcagattaggctctcaatttcatctttcaggttcttgcattcattggtactatggccaatgtcgttgtgatactcacacctcttgctggcgtcccttcgagaactatccttatacaggggaggaggcttccggtaatgtgtattttgccaggtggcaaagtataactggtcctgcgtgtctgtaagctccatgtattgagtatactgaggggtgtatccccttcgttgttgctatcctcattccggttgctaccctttgaggacctcttgctttgggagctctgaggagatcttgttaggctggtggcaggcgcggactaagatggagcttgaccattcatcctgaggggttgcccatgggtgtcccaaagtgtgatgttgtgggagccaaggctaggctctgattatatcctagggtagcggagaactgtatgtcgctcatttgaggagtggccagaggcatggctcccgagagttgaactctggggcatatcctgacactccggtcgagtagtatcctctgtaagccactatttgggcttcttccaaattgatgtacttttggaccctcttttggaaatc

SEQ ID NO: 359434 - DNA, 548 bp, Cannabis indica
cttattttcttacaagtttgttatgttgtatttttggatttaattaccaatttattggtcaatatcgttgtcatctcatttggttttaacaatttttagggctgaattttgtctaaataatcgttagggtttagacagaatataggttttcgagcttctccaatttaccaacttctgatttgataaattccttccaggaattaggattgctttcttcttgcagcaatgtcccaatctggttcagaagtttatcgtccagaagatttagaaatagagtatcccactgaacttgccaccctgtacgatcccaaaacttcaaaacccaaatccaaattggagataaatgatttaaaaattagggaacaattagtgagaatccaccaagatgatattgccagtcgccacaggcgcttcttacaagagattacagaaggcaaacgccgtttcttgcgagatgctgcttggcctgaacctcctagtgtgtcctctattcctttagctgagcctctgtttttacccaaggtcacaattgcttttgaaccaggtga

SEQ ID NO: 359435 - DNA, 520 bp, Cannabis indica
cttttgaaccaggtgacttggaatttgaaataatgtctcctaagccacgtaaatcaaagactccccaagaccccaacgtcactttcgaggtagagttaatagagacgaaggtgcgagccatcgcaggttatgtaggtgattcactgcggacttgtggtattgaatacaagcgagactgtcgagttaggtcggtgcgagtcggcgagttcagttgttacccaccagagcaacttacttgcgaaacctctcagggaaccagtagcgagaccagtacaagtggctcgactggtataggcgcttggatccttgagcacatcaaggctggagctataatccccctgcgagactactttaaagacttcataaaccacctcgggcttgccccatttcaactaaatcccgtctcctacagaatcctcgcaagtttgagggttctgtacaaaatcctgaattgggagtaccccaccccctggaaatagagtatctctactctttaaggctgttccaacgaggaagaatg

SEQ ID NO: 359436 - DNA, 681 bp, Cannabis indica
atattctatattcatcccgtaatgatataaatcctttatcctaaaaaaatttcctacttatatatgctaagtaaaggcaacttaaacttagagttgaattagtactttaatggtggtccaagctagaataattactaattgaatatttggtataaatttatatttttgactttaaattttagaatccaaatagaaatttaatttcagttttaggaatacattgaatactacaatataactttcacaagttgttaatatctattttctatcaatggatccaaatagtatgttgaatgcatgtaaagtgagttttatattctgtgactagtttaatccgcttgaacgattctaagaactctttgttgtaaatagacttagggatcatcaaaagaccacaccaacaacaatacatctatagcattttcatcttgtgtgtagttgttttgacaagatcattctctgtaaagagaaaacatgtcaatatccacttggaagtatgtttatttgtattcaaacatatggatgtacattcaatggtggatatgagttatcattaaactcctagatgatctctctagaatataccttatgcaaaattttttgaaatatatgaaaattttcataaatttctagcaatggtgaaatccattaaggtaagtggttaaagatcttgcaaactga

SEQ ID NO: 359437 - DNA, 647 bp, Cannabis indica
tatcacatctggtaacacaagtactgttataattctcaatggatacatggagtgaatgttcgaagaggaagatataccatttcttgacacatgcccgtaaagaccactccattggaatcaccgctcacttctccttcccaaattactctacctctctcactaaagccctcctccttcaaccatttctcaaggttttctccttcttcccattcctaatttactctccctctcttttcgccttttaatttcaatttcttctctgctttttgcataaatctttcataaatctttgattacatctcagatggctcccactcaatagtagatgtctggttaattgtacttttaacctcttactattgttttgagggatatctagttgtgacttattatcttagtctgaaactataagtttctttaagactaagtcatcaacatagcaatctagtatttgaagtgtaaaatacttgctagagattaagcaatcaaattgagataccataaaatgctatgaggattagaaatctttgctcaagtcattcgaatagactatgcaagatttgtatcttattctcataattctgatagtattctatccacagaatggttagatttactttctcagtagtgttcttaagtcctatcac

SEQ ID NO: 359438 - DNA, 1210 bp, Cannabis indica
gtagtttagccgccaaaaattcagtttttgtggttaagtgttacaaaccgtaaagttcaggtggtttagccgccaatatcccattactaatatataatattactaagatatttttaagttaataaataaaataatattttgagatttaatatcaattagacaattactttagtttgatcatccgttgagtagactcttagagtcttggtgctgctgattggtgaggtgagtagcgtgtgatactgatatcaaaatatcaatatatcatatattaccaatcaataaatcagccacaaggcccgccaatcatcacatttcacctaggcacctattaggctattagtattacagtcaatcaatacgttacacacgccagtcattacatttaatgtaattaaatcattaatatattatcatacaaatattaaattatcaatattatagtgtgaaagtaaaacttaaaagtccaatatatcactaatttttttttttgaaatttgatatattgagaagaggaaacaagccaaagtatttccatgacagttaataattaattattatatttttttgaataattaattattatatataaatatatataaatggagatatatcggggcagatagtactttccccgaccccgccttgctttcaactcgggtatgtaaaatcaactccgtccccacctttgatccccgctaagttggggaatccccgcctcattaggggaaggtccccacgggtccttgtggtgtttatgtgcaatcctactcctggcgggatggtacatctttagcaaggagcgataagtgaaaggtgttatagctttatgcctatataaaacctcatgtttcttatatattattatttaacaacaacataagtataaattgattatttaattaaatatattgtttacatgtttattgttatgattatttatttaatatattcatctattatagtgacgtagtcacattagaaataatcatgattgtatgtttaaaataagtagtccaaagattagtcagtatatcactactagaaaaatgagttttagtgacacacattgtgtaactctaaaactatatagtgacacttcaacgcgcgtcactaatgagggtgactggaaagacagtttttagtgacacttcacacgtgtcactgaacccttttacattcattttttgcgcgtcactataggcggtaa

SEQ ID NO: 359439 - DNA, 726 bp, Cannabis indica
ttagtttacactgtactcttttttttttttgatcaagtttttcagcaagatttttaatgagacagtttttatggacatccaatggggagtgttatgaaatattatttatggatgtctaaatcaccatattaattatcaccattaatgcttgattatattttcctttattacatattaatttagtttctcattcatttagtcaatacttttgtataaatagagattcaccacattggaataaacaattaagaaattctcattcattttctatttatctcttcatcattttcttcttttcttcttatctatattatattattttataacaatattataaaaaaccccaaaataaaattggtacaatatagtataaaaactaaaacaatcatataaactattgtattactttgggagaataaaagtttctttcttaaataaattgtactaaatatatgttagtaaagaagatattgaatggaatatataattattatacaaagcatatatatatatgggtgcacttttaatgggtattactatgaatgggtaatattagaaaattttgagttttaatgattaaattttccatttaattagaaaaatttctcatttttacattatatgggccgagattggtccatcagctgaaaaaaaaataataaaaaacagttttttggcaaaaaagtgataaaaaaaagttgaatttgacttaaatattttacatat

SEQ ID NO: 359440 - DNA, 787 bp, Cannabis indica
gaagaagtcgactgctaccaccgcatacttagcttcctcctcacctagtgggtaatgccccaattaggtcgatcccccatatagcaaatgggtagggcgaggtcatcattctaagttcaattggcggtacgcgaggtatatgtgaaaactctgacatttatcacatttcttgagaaactcatgtgtgtccttattgatcgttggccagtaatatccttgtctaatgatctttttagacaaactttgccaacccgcatgatccccacagaagccttcatgaatttccctaatgatttcgtttgcttctgcgataggaacacaccgaagtaggggcattgaataccctcttctatatagtttgccttcgatgattgtgtaacgaggcactgtatacaacaatttttgcgcctcgtttttgtcatttggaaattgtccgtagagtaaatagttaataataggcgtcatccatgttggagagctatctatcatctcgacggcttcagtttcacatatacttggctcgctcaccatttctaccgaaaccatatttagttcatccagatcattctgcaaggccagttttgctaaggcatcagcgttggagttttgttctctcagaatttgttcgattttaaagtaatcgaatctttccaagtgcttccgaactttctctaaatacttcgccattctcaagcctctagcttggtattctccgatgacttggtttacgatcagctgcgaatcaccatgacaaatgagatttttgactttcaaggcctctgctatc

SEQ ID NO: 359441 - DNA, 490 bp, Cannabis indica
aatgggaagaattagggttcccaaaaatgtccaaacctgtagaccggttctacaaccggaattccggttctggaaaattcttaaaagccccaaccggtcgaccggttgctgatggcttccctgaaccggaattccggttcagtgcaggaatttttcaaaaattcactactcattcaatttaaacccaaaccctaccaaaccttcctgacctgttctaaataccccaaagaataatccgaaagcatcaaaacaatcctgaatgcatagaatcaaaaatcaccatgtgagctccaagctttgagttcaaaactcaagcttgactaaaactcactaacatgcatcacaacctgtttaaatctactcaaatatgcatatctaaacttctacaaacaacagaaataaaccgcaacaagcacaacaacaaaactcatcaactttccatagaaatttttgagttaaaaagatccaaactgttggatattattttacc

SEQ ID NO: 359442 - DNA, 551 bp, Cannabis indica
gatgttaatgaaacatacatggtagtaaatctagatcctagtaaaatatccaaacaatatataatatataaggagactattgaaattttggaaaaagattactttattaagcaatgatggaaaggcatactcacttatattggggaaagatttataaattgagatgcaatctaatggacatatactcaagtgattggtgaatgttagattacaaagtaggttgagggtaaaatgagttttagagcgattaactaagtatgaagataatgatgattgtaaggaagcaatagtagcatacgaatcatggaataaaactttagtggtaataatgggaaaagaatataagagccttagatgttgatgaattaataccatcggcgagagactgactacaagttggagtggtagttcataccaagaggttgtcaataaaacaaagaatatacttgaaatatgtatatttctgggtgtgttaaaaagagaattttgagatttctacctaacaccgatacgaagctttgagatcaaagaatgatctttgattaattgtt

SEQ ID NO: 359443 - DNA, 542 bp, Cannabis indica
tattttgtagttacttttatattctaagttaattttgagtttatgtgtctatatttttatgcataattatttttaagttgtttttaagtttatgtgccgttaattttatgtataattatttttaaattgatttgggtttaagtacatttatttttatatataattatttttaatttatttttggttgttttcattttcaagttgttatttcgttgctaattagttgttgctttgagaaaagaagcccaacacgctcaagtgcactttgtccaaaattgacacgtggcagccactggcacgttctgacgctattaatattgcgtgcgtcagcaaactttgatggttttaacccctcactcgcgtgtgagcctcactcgcctgcatagtctacttgtgtattttactttctccttttgcaagtgggctttgtctctaaccgtatatttgtaaataaaaatctttgtaaattgtatttttgaaatcaataaatagcataaatgtttattttctccttataattgtattaatgtttattttgggta

SEQ ID NO: 359444 - DNA, 553 bp, Cannabis indica
gtctttcctgggtcatattgttcagaggaatgggattatagctgtatcaaacaggattgaatcagtgaagaattggccgaggccaaagtctgtaacggaggtttgaagttttctcggtgtagcaagatattatcgacattttctcaagggattctctcaaatttctatgcctctaaccgaatggactaaaaaaaatcaatgatttgtgtggtcagataagtgcgaaataagttttcaggagttgaagtaacgtttgataacagctccagtgttagctttgccatcagaataagagaaattcgtagtttattgtgacgcatcccgacaaagtctgggatgtgctctgatgcaagctgacagagtcatagtttatgcctctcgtcaactgaaagattatgagcagcgctatccaattcatgacttagaagttaccgctgtggtttttgctctaaagatatggcggcattatctttatggtaaaaaaatgtgagatttatactgaccacaagagtctcaagtactttttcacccagaaggatttgaacatgagaca

SEQ ID NO: 359445 - DNA, 640 bp, Cannabis indica
acaattctaacctaaacctagagggcattctataaatagaaagtgatggcttcaggaaacatataattttgcacattgtttcgttcagagaaaagccaagccgccccttctctctcttttcctctctacaatttcgaaactcttgagtgaatgagtagtgcccacacacatcaagtggtacctcaatcatagtatgtaagactgtggaaaatcagaatcgcaaatggaactagaaccgaactagcactaggaccaggaccaggacctaaacccaaacccgaacccagatcaaaacctagacagagacctaaacgcgaaccgagactaggacttgaacacaaacctagaccgggaaccaaacccacacaataactgggacctggaccgagaatcaggatagggacctgggaaacagaactaggacggggacctagtacccaaacttgaacctaggacccagctcgttactgggcaccagaaatagaactagactgggacccgagattgggatctggatgtagacccagggtctggacaaaacccgtagtcggtgtctggatttgagacccagccctggacccgaaccctgacaacactactacaaaaaggagtatcttcgtcagttttttagtgacatata

SEQ ID NO: 359446 - DNA, 548 bp, Cannabis indica
gggaagaatcacaaatacgcatggcaccataccagaagaaagtggcaaaatatttcaactccaaagtcaagaacaaaaaatttgccattggtgatctggtcctaagaagggtcttcccagcctcctaagaatcaggagtgggggtactcagaccagattgggaaggcccgtacgaagttgaagatgaaataagctttgggacttataaattgaagcgaatggacgaatcgatagtacccagagcctggaatgctgttcatctccaaaaatactatcagtaatcaggaattcagtatttaatttcatctttgtactttgtaagttaacctgtagcgaacaaagatatatgcattatcctgggtaaatctaacctaagtgacctaaaaattcctttttaagtcacttaacggggtactaaggcataaacatacacaaagataggcaaaaatcaaaaataaaaagggacgataaatagataaatacaagtactttcttaaaatataagttgtccaaaaaagataggcttggggaaaggctataaaaatgtc

SEQ ID NO: 359447 - DNA, 674 bp, Cannabis indica
ttgatcttgacccaatcttcaggtggggggaccaacccagagtatcagcaacctgtcaaaacttgagcaaactggatccataatcagcgtaacaatacttaatagaatcaatgtaatgtttcaagctacccatattgttattatgaaccttgtcgtttcgagccctccaaatcgtgtcaaccacgatagaagcataaaggaataacccatccgtatccactcctttggtcctaaggttccaaagaaaactaaccctgtcccacatacgggccccatattctacaacaggcataactccccagggggaagatctccaaaggtgggacaccagatcgcaatagagaaataaatgctccatagtttcatcaccattaccacaaaaggggcaggtaatttcatcaataaccattctcttagaaaggatagccctaacaggtagcgtattcgagagatactccaccaaaggactttgtgacgctccagaacttttgaactccacagcttgttccacaaattcggagctacattacacaacggagcccgtttcatagcttggataagataggccgatttggtagagaatcgaccattagagttcttaatccagatccatctatccctaccccgaccactcggtttatcacccctcaggatactattaactgtatccctgt

SEQ ID NO: 359448 - DNA, 503 bp, Cannabis indica
gctcggttggttgccaaggggtagaaccaacagaaggggattgattacactgatacatttgctccagttaccaaacttatgactattaaatgtgtcattgctcttgctgcaattaagggctggcatttgcaccaattggatgtaaacaatgcttttttgcatggtgatctcaaggaggatgtttacatgactcttcctcaaggttacaaacctaaggaggagcatcctcacaatcctatatgcaagctaaagaaatcactatatggtttaaagcaggcttcaaggcaatggtttgccaaattctccactgccttgtttgatgagggatttaatcactcggctacagaccattcattgttcattaagcattttggtagccatttcatattcttgttcgtctatgttgatgatgtaatacttgtaagcaatgaccttcaagaattggaagctctaaaaatcagattaaatgcccgattcaaactgaaagatttgggaaatctcaa

SEQ ID NO: 359449 - DNA, 1078 bp, Cannabis indica
tcctaatggtggagatagtgtgtagtatatttttggaagaaggaaagtgggttctctgtatatatatagccttgtgaacatgaagtttaggggggaactcaaacttttttaaaaatcgtttgaaagtatattaaacttggggagcatatttcttgttgcctttaaataatttctttcaaagtctttgctgaactatacctatatacaacaagtattgtcaatcagaagcaatccaatcaaattaaaataatattttattgtgatattattgaaaagttaatagtacaacaaataaacatgtgacacaaatgaataaacacacttacagcccgtttggtttggtgtaattatcattagaatgaaattaaatttattattttttattttatgtccaaataaacatgtgggcccaaatgaataaacacactagacactattttttttctctctttaatgatttcttactttttatgtttatttattttaatcatatgaaaaaaattattattaaaataattattattcatattaataattagctttcattatttttatgtattttatttaataataaataaaataattagtttttttaataatgaaaaataattcaaaatttgatttcaatattcattaatatatttttcgtcagaaaaaagattacattaatatatctttcgtcaaaaaaaaagattataataattttttttaatattatacaaatatagaaaaacaaaactttaatgttgtcaatacactaattatttgattcaattgtcatacaagtcaaataataaaaaatttgattacaatattcattacaaaataaccaaacacagtaatagtattccgagacacgaaatatgtattaaagttaggtgtagtgtattggagtcgccagttttgtaacaaaatcactaactgataccaaactacggttctacttagtggtgccgatgaacactcgcaacactgacactatcactgcaggtgtttaggggtcacgtgacacaaagtctgtaatcaagtaaggtgtagtgtatcggagtcgccagtttcgtaaagaaatcactaaccg

SEQ ID NO: 359450 - DNA, 697 bp, Cannabis indica
aagcttttttctctctcattctcatttctccattcagtttgagcagcattttagggtttgcattttcttcatcttcttctttttcttcttctccagtgggtgtcgaagccattgtcgttggtgtgctctgtttttagcttcgattttcagttgtcgtgagtgaagtgtgctctgtttttagtcattttcgagatcatcttcaaagttaagtgaggtatgtgataaattctttaataaattttgttgtaatatgtttagttttagtgattaagttcggtattgagatgtttgtggattttattttttttttcttgatgattttgcatgatcggttggattttttcgggtttattgttgtttttgggatgatcggttgggtttttagggtgtgtttggtgttttggtgttttttatcattgttctatttagttaatttttgttttaagtttgagtttgtgttgattttgttgatttctctgttaattttccttaaatcttcatgaacttctagggtttttttatgcttgtttttgtgttgaatctattttagagatagagtatttgttgttattttttgtgtttgttttgggttttttcattttcattcattttagtattggaggttgcttataaaatataaccggttattttttgtgcaacatatttgaatttttaggttaatagtattatttgtttt

SEQ ID NO: 359451 - DNA, 525 bp, Cannabis indica
agaaccaagccatcatcatacttaattcactgtcagaaacttacaaagaagtaaaacatcaattaagtatggaaggacctctatcactcttgatgaggttatctctgccttgaaatcaaaggacttagagatgaagacagaaagaaatggtggttctaatggagaactaaatctgagtagaggaagacctactcaaaggaagccttggcatgggaaaggaaggagtcaaagtcacagcaggggtccaaacaaaggatagaacaaaggaagacctaactctaaagggccacaagacacagaaggatgctaaaactgtgggaaacctggacacttcaagaaagactgctatttctggaacaaaaatagaaagaacaaattcaatgggcaaagaaatgactacaattttgaatccaaaaaccctaaaaatagaacaaatcaccaaaatgcaaattggagtggctgttatgaagatggggaagtttatattgcaggatcatcttttaaagatgattggatacttgactc

SEQ ID NO: 359452 - DNA, 640 bp, Cannabis indica
tatatgtgtttatttcatcgtttcagaaagttcatatttagggtattaataaacatacttgtgagtagatctaagatcctcgtaaaataaatttccaacagtggcagcaggaatgcctaaggtcattccatccaacggtcagccgtaggcacgcctacacgaaaaccgaagagtttcgtgacgtggtactataaataggataaaatgaaataattacagtcgttatttttcgaaactttcgatgggacaaccaaaagtcaccaccttgtgacaacctttcacgtgtctctcgcatatagtttccctcatgaccgcagctgcaagtcgtgaaactaggggcatgtgttatagtgagatttttctcacctagaaactcgagaccagactcctgtttggaggacacatgtactcaattttcccaagaaaatctgagatgtcaatgagagactcctcgagtttaaacctcgcctgagctagactcagcgagatgatgcgaatatgaccaagtctaatcgcattcgtgtgactcgcattatgtaggaccaaggaacgaatttaactcgcatgtaccaggatatatgcgagtatcctctcgatcctcctgcgaaaacatagagatcgactctctatgatgcgagct

SEQ ID NO: 359453 - DNA, 637 bp, Cannabis indica
tgtccataggttctcacgatgattagacaaaacccaacagtgacgctcaccaactcactcgttgccaaggtagcatgtgaggcaagatgccaacaccaagctgacgtgccaacgcttctatcatgccgcattcgatactttccaaacagtctccctcatcgcccaaggactcccatacatccatgaaccaatcctcaaagcgccatgcctccacgcatgttagcaggccctcaagacaagccaccaaactagtagcatacgttagacctctgtctcattctagcatggtgcattcgacccatgcacgcatgtaaactagcccacgaatgactacccctgtcatctcatgttgagactcctggccaaggcacaccacgtctcttagaggcttaggccacgtcccgtacaagcaacacaccggcaagctagtggaaatgtacctgttaacgtctaacaacatcttagacgcactacaagctctgccgataatgtccatgagtattctaactcgtggagacatatgagtcctgttatagtgagaatttctcacctagaaactcgagaccacgctcccataaaaatgacacatggactcactctcctcaaggagagcggagatgtcagtaggagacctctt

SEQ ID NO: 359454 - DNA, 570 bp, Cannabis indica
ttaaaagatatacttttaaaattatatcaaaaatatatttttataaaaaatatttaactcaaactcattttttttttgacaattttttttttaattttaattcaataaaataattacagcctatataatattaaaataaataaaaattaattaaagacaaaattaaacataaaattaatttcttttaataatactctttaaagtacacctaatatatataagtatatatttatatttatcttactcgcgcatgcatagtgtagagctgtcattcatacacgtcatcttaacttatacacattaatttatggatactaatcctaggtatcaaattaattaataattttgttttaagtattaatattatgtgtcaggctataatcaattattgagattcttgtgttaagttaagttgcttcttaattaatgaaaaaaaaaaatagattcttctgtcaaaactaatgtctcattaaattctaattaaaaagaactttgctcactgatagtgaatttgtgattaggcaaaatggcctaattttatattacttcagaaatagattttgtgtttca

SEQ ID NO: 359455 - DNA, 807 bp, Cannabis indica
gaaataatccctttttattttttaacatgatcaaaaggaaaatttcaaatgaattaaaaaaagtaatttgtgatcaaacttcttaaactacagagtttgacacgattaattgtcttattgaaattttgagagcaaaattttttaaattacataatcgttttgccacattatacatgtggcattattttattagtcaattagaatatttttttaataaaagtgtatataatcataaattatatttattagtcaaactattttgtatttaaagtttagacattatagtgtttaacttaataatttttattgtatttgaatattgaagttgaagtttaaaatctatacaatattactacttttctttattattttattcaaatattactcaattacatttatcttagggaaattctataatgcaccttcttaaaagggatacatcgatacatctctatctattatagtatccaaaataattttttagtcaatttttttctcatattcatgtaagttatagttatttaagatatcctgcaaaattttaaaaaaattagaaaagtttaacatgtcgaaaattacgttcaagtaatgtgttgcacgcgcaactattttattttatacgcgtgtaaaacagactattcgaacattattttttatattgtaaattattctgaatttctcaaaattttgtaaaatatattaaataactttaacgtacatgaatatgaaaaaaataattagactaaaaaaaattactgaatgccaaaacaagtagagggtgtatcaatacatctcttctaaggttct

SEQ ID NO: 359456 - DNA, 674 bp, Cannabis indica
agagtccttttcgtggtgtcactcaaagaaacacatgatcacccacttcaaacacaatgtctctccgcttctggtctgcataagatttctgtctgctctgagctatgatcattctagccctgatcttctgaatagcttcattggtgtgtagaactgcatctggccctaggagcttgttcttccccaactcatcccaatgcagtggagacctgtattttcttccatacaacatctcataaaggtgctaacccgatagtagactgatagttgttgttgtaagaaaattcaatcaaaggcaggtatttgccccatgatccttgaaaatctatcacacatgccctcaacatatcttccaggatctgatttgttctctcagtctggacatctgtctctggatgacatgcggtactaaacttcaatcgagttcctatcgctctctgtaagctttcccaaaaagatgaagtaaaccaagcatctcgatcacaaataatagaatacggtaccccatgtaatctcacagtcataatctcattcacataaagtgtgacagtcagtagtcccatgatccgtaaggggaaataccgggtaagctgtacaatcccacaccgcctggggaaggtcaagtgggatgattcagagactgtgtaggtatgggactacacagttgaagagag

SEQ ID NO: 359457 - DNA, 642 bp, Cannabis indica
aaccagtcactgagacagccaatttccgtatttgataggttgaggaagactcatgatctcagaaatgatctgaacaggaggagaggagtggacgatcagcttgatacaccaatcgtgcagcccgaagcctatgctcaaattctcgctcagaaagatgctaatgtgactcagaccggccaagaggccgaacaggttagtccgcccgtgcaggcacagctggacgaactaaaaaatatgttccaaggcctggtcggtcagaggaacaacgatctcgagttggaccaagcacgtggaacccctttctcccccgagatcaatatcctggagttgccccacaagtttaagatgccaacctggaagatgtatactggaaaggaagatcctttgtcccacctcaagtatttccagatgcaaatggacttgcaaggagtacgaggagatgtatgttgcagaatttttcctaccaccctctctgaagccgcccaacaatggtatttcaagttggcgaccagaaagttcatgtaacgccctaaaataattaggcacgctacccaaaaatgcttatgaaaccctaatcccctaatcgggattactaaccaaaatagcgtagaatttaaacttttatattaaacagaatgaaaa

SEQ ID NO: 359458 - DNA, 758 bp, Cannabis indica
attaaaattgaattagcaacataattaattttgaaataaatgaaattaatttttattggattattttaaaattaatttttaaaaaaatacacttagtttaaagaaaatattctagatagtgatttctagtaactaatttatattttttaatatttaattaagtagaaaaatatatttaagttgaaaatttatttgataccaacttaaattaaaatatttttcttagatattaaattagaattaataattaagttgattttatcctagatacttaattatttgtttctattttaatatatttaattaaataaaaaaattatatttaagttggaaatttttaatttcagatcaagtgaaattagaataatttttagaatatgtttaatattattttaattatcatttttcccacataaattttgagatacatttattttaaatgtagatattttgaaaatttttaattttgaaaattagattaaagttataaaaataaatttgttaattaattttagatcaaattaaatcaagtaatattttcattaatgatttaattaaaataaatagactaaaatatattatattttaattagaaaatcaataattagtttatgaaatgtctaaataattattttctaggtagatttttagtatttttctagacatatttaattaaatagaaaattaatatttaagttgattttattcaagacacttaaatatttgatatttctattaagaaatttaattaaatagaa

SEQ ID NO: 359459 - DNA, 543 bp, Cannabis indica
aactaagcggtctttacatatgtcgaaaagtcttcctgacaaaggtgatggtcaggcagcgagttcctttggtgatagcgcagcataaggtagtttcgttggagaagagaccatgagtatgtggtccttagtttgtggggagaattattggagtatgcaatgagagtcccacattggctaggaataggaagaattatgggtatataaggatggacactactctattagtatgaggcattttgggaaggtgcccaaaattaaaaccgtgagggcttaggcttgaagcggacaatatcacacaaatgtggaagtcaaggtgagatagcggtccgacaaggtgaaagaacggggcccaacaaatagtaaaaaagtcattccactatatgatattccaataaataaaataacaattaaaatttaaaatttttgtcttgttaacttatgacactaccaaatgatgccctttatgatatgaaacttgttaaaagtaccccttaatataagggaaattttactttttggccttaataatacaagccatat

SEQ ID NO: 359460 - DNA, 776 bp, Cannabis indica
acggattccgggcccacccttccaatgatggggtggtcccttataatcggcaaactcatgttaaggagtatcgccaccgcttcttcttctcctccaggttccgagctgtggagcacccggagcttctcacagagtgggccaggattctcccgtatgagcggaccgcgcctattcaggtttttctccggagggcccaggtctttgcgacttacgactaggcggaccttgacgtcaggggcctagtcacgacggagaactgccggaaggccaagcttatcctgccgcaccaatcagtggaggaatctaacctttctaaggttatctgtcccaatgtgagggtccctaccgcggagaagacttccgggatgaaatcatcgccactgcggagaagaagtatcaggactatctctaccagaaggcccaggagaaggcttattccagggcccatgcagcttctgggaggccccttcgcgtggggagcccggtcgagaggagaagccagacgattgctgggaggcccctttgcattgggagcccagctgagaggagggctcccaggccaaagcctacggtttaggtgccgaacaccggggctcctaacgccagtactttcggctctggtaagtctcctttagcagtacattatgttccttctgttagcgaatatgccagtcttaggcctgtagggttcgatgagcgtctccataggtttaggatgccctcaacccggtcgggagaccatatgaaggattattatttttccaacttaggagatt

SEQ ID NO: 359461 - DNA, 1192 bp, Cannabis indica
aataatttccaacagtttcctcagggaagtttctgggattcataatcaatgtgaggggcattgaagaaaatccttagaaaatcaaggctttgattgatatgccatcactaaccaagcctaaagaagtccaagccctaacaggaaggatagttgcacttaacagattcatttcgaagtcaactgataagtgtttaccatttttcaatgtattgcgaggcaacaagaaatttgaatggacagaggaattcaaggaggcctttcaaagcgataaaagcatttgacgacacctcttgttttgggaaaacccgtaagttgagagacattactcctctattttagctgtcttagaagacgcgattagtgcaacaataatatgagaagaaggaaagcaccagtaatctgtttactatgtcagtaaaaggctattgcaagttacgaccttacttccaagcacacccaattaaagtgttaattgatcaacccttgggacaagttttatctaaataagacgcttctggaagattgataaaatggtcaattgagctgggccagtttgacataacttatcaccctcaaacatccatcaagggccaagctttggcaaatttttaaatagaaggaataactcaaaaagaaaacccgtttgttcagcaagacgcagacacttggaagttatttgtggatggtgcatccaacgaacaaggctcaggtgtaggagagatgttaattttgccagaaggctttaagtttcattatgctttgagatttcatttgatgcatcaaacaatgaggctgagtatgaggccttgatcgctagtttgaggatagttgaggcattgaaggtcaagaatctcatgtgtcatagtgattcacaactgattgtaaattaggttctcgaggagtaccaggctaagggcctgaaaattgctaagtatctagagaaggtttgaaagaacttaggaagattcgattattttaaaatagagcgaatgccaagaaaacagaactctaatgtcgatgccttagcaaaactggcttcgcagagcgatttggatgaactaaactttgttctggtggagatgctaaacgagttgagtatatgtgaaaaggaagacatcgagatgatagatagctcacatacatggatgactcctatagtgaactatctactcgatgggcaacttccaactga

SEQ ID NO: 359462 - DNA, 550 bp, Cannabis indica
aattgtgccattatagttatactcttcggagcttgccctatagtgaggggtaggaaaattttccctagaggtgcaacgctttggccagagaaaccatacacgggctggagacaggggttaagtctttgagttggagccccatcttttcatatagtgtcttgaataagatgttcgtagaggctccattatctgtcatggtttgggccaccatcttgttggctatctggactaccaagaccaacgggtcgttgtgcgggaaactaatcttgacagcatcttcatcactaaatgttatggagggctcccctgcccgtggtattttaggtttcctttctttgacggccagaactacttcttcttgctcatgctgtactgttcgggcatacttttcccgggctttgcctgaatctttagctatgtgcggacctccaataatgacttacagatgtccatctactagtggtggtagtaaatcttggttgttatcgcccctttgattttgaccgaccttgacatatttttgcacatgcggattattctttcttatcag

SEQ ID NO: 359463 - DNA, 369 bp, Cannabis indica
atcataactaattcaataaaaaatccaaattgagttctagtaaaagccttaattttataaattttctgtctactttctacttaactattttgagaacgaattaaaaatatttttacaacatatattaccgatttccaaacaatcatacaaataaacacataaaccatcatgaaaccatccaaatcaacacaaacatcgttttaattcatatttcatgaaagtaaatcattactatggctctaaagcaagttgttggaacatatgttaccaggatctagaattactaccatgcatgtttttaacatcctaatatgaatttttaaaacaatgtaattttaacacatagaagttatgagaaaccttacagtt

SEQ ID NO: 359464 - DNA, 747 bp, Cannabis indica
agagagagagaggaaagatttgagaaagacaatgcattgataagctcgatcgaactagcttatatacacatgttacacatgaggtagttagatacaactaggctaactaacttaacaagtaactacttaactaactctctaacttaacatgtaccaatatatattatatatgagtacactcttaatgagtattactcatgaataagcattattaagaaaatttgagtttttatgcttacttttactatctaattaaaagaaatatttcctttttacattatatggttaaagttattctttcggactaagagagataaaaaaaaaattgagattgagttagagagaaggataaaataatgctgaatataagaataattttgggtaaatagcggcataagtacccaaagttttatgtttgtaagcgacataaacccaatgtttatttttagcggcataagtaccctatgtttgtaaaactgtaattttttctttaattttgtcagtacagactctattattgtcttaaatagggcacatataaagcttgaattctagatcattgggtctaaataggaatatgcactatcaattacttctaaatattattttaataaatttaaaatagactctgtattgacgaatttggaagaaaattacagttttataaaaattgggtgcttatgtcgctaaaaataaacattgagtttatgccgctgttaattataaatttaaaactttgggtactta

SEQ ID NO: 359465 - DNA, 1406 bp, Cannabis indica
gattttttcaatctttttcagcaaaaatgtcttcttctgcatcctgctctaaatcttcgaagaagggagaaaaacgtctggccactctggaggaggtcatgaagggccctgtggcccaagaagggcacaaattccgtaccaacgggtgggaagcggctgagcttcgctctaccctgacctgccctcaccagctggaacagatcgtggtggtggcaggcatcaagcctaccacctccgggaccttccaccggccgcgtcgggacgaggagacgcccaaccataactacgggggctttggagcctggagccagacgcacctgatgttcggggccatgcttcctcaagactatttcattaatttccttgtatttgtcttccttgtgccatatcaacttattccccaagcttaccgcctgctttcaggcttgttcattttttatgctgcccggagctggggttcgcccaatccagcaaaaattttgtatttttatgaacttgtttccatccctaaaaagggagataaacttaaggacgacttttacggtccccgggcccatcctttgaatgagggcccggtccctcacaaccagcagaagcacgtgaaggagtatcgtcaccgcttcttcttctcctccagtttccaggtcgtggatcatccagagcttctcacggagtgggttaggctccccccttacatgcggaccgaacccactcaaatatttcttcaacgggccaagaccttcgccacatacgacaagaaggcccttgatgtcggggagctggtcacgacagagcactgtcggaaggccaagctgatcctggggcaccagtcggtggatgactataatatttccaaagtcatctgcccgaacgtgagggctccggccgcggagaaggtgctccgaggtgaaattatcgccatggcggaggacaagtaccagaagtacctcttcaagagggaataggagctggcttacattaaggccgaggcgatcgctggaagggcccttcgtattggggctccgttggagcggaggacccctagacacaagcccgtggtcccagtaccaaatactggggctcccgatgccagcacttcgggttctggtaagtcccctttaatgatacactatgttcctcccgtccgtgagtatacccgccttaggcctatagggttcgatgaacggctccgtaggtttaggatgccctccacccggtgggggaatcattccaaggagtattatttctcccacttaggccattatttaggtcggtcccggatgggttctggacctccgacgcccacttcccttcggtaccattaagctcatttatcctctagttggttctgtcctcggacaacttctcgggagtgatgaagctagtgctatgattcaggactttgc

SEQ ID NO: 359466 - DNA, 528 bp, Cannabis indica
ttagtttattttggcttaatcttatttttggtatgcttttgttgaaattttgttgagatttttggatttttaagtttcaatatgttttggaatttttgtcttctgttgactaagctcagagctcgacaagaattcaccaagagctcgctgagttttgtatttggtatgttatataaaatgtttgtagagattttttgattgttgaggtagaatttattttggggttttatatatgtttattataagattacatttttgaattgcttaattcataactctgatgacttatgctgtctatttgtttattttattttgagtgtatgaatctgttagtgagcttttgtcaagctcggtgactaggaatgtcaagtgggccgggtcagattctgcctggcacagacccaacccggtccgataacactttaccctaatctagtctggtagaattaacatttttagcctggcaggtcaagcccgacccgtttaactcgaattgggcttgacctattttattttttttttaatttt

SEQ ID NO: 359467 - DNA, 685 bp, Cannabis indica
tcattgttagatgcagaaaattcaaaacgtaaagcagcgtctaccttaaaattgttgggactgattagtaggattctgccaccagaaccttcactatttgaagccccatcaacgtacaacgtccatacttctccatttcacatagtagtgtcaatcttgtcgtctatgagtgccacttcggtgcttgggaattctaggataaaatctgccaaggcttgccccttgattgcagtcctcagtttatacctgatgtcgaactggcttaactctactgcccatttcaacaacctccctgacgtctctggttttgctaagacttgcctcaaagggtagtttgttaaaacttcaatactgtgagcctggaaataaggtcgcaattttctcgacgatattaccagggcgaacgccaatttttccatttgaggatagcccgtctcagcatccagtaagcgtttactgacatagtacactaggtattgtcgtccttgatcttcgcgtattagtaccgaactaatcgcatattctgacactgctaagtaaatggataggacttcgccggtcatgggctttgataggattgggggttgccccaaatgtgtttttaatgcttgaaaagcctcctcgcatttttcggtcctttggaaattcttatttccttttaaaatctgaaaaaaaactctttgca

SEQ ID NO: 359468 - DNA, 507 bp, Cannabis indica
agtgaatttccagcccaaaaatatagtgttgaagtgaattaataacaaggctactgtggacgggggtcacaaagatagtctaggtagtactccaactactattatactttattaaagtattagagaacgtgcttaccaacctttctcggtttatactaagatgaccatccgattcaatccgacttttttttttctcatctgatccaatcaatttaaatctcaaaatttaatccaatccaatccaatccaattacttaaaaatatacatatacatactattcttacaagtgtaatgtagctaaaaattttaaataattaaaacaataacatttctaagtaataaaatagaacaaaatatcatgagaataaatacacaaaacaatcaagtagtacaaatttaacatacaaaaaattctaataaatatatattatatttttcaatattttttattatataataattttttaatatatataaatgtaattagattggatcggtttttaatt

SEQ ID NO: 359469 - DNA, 1135 bp, Cannabis indica
tgtattgtgttcgagggacacaagttgtctggaaacttattagtgttgcctatggggcaatttgatgtaattcttggtatggattggttgtctaaataccaagctattgtggattgttcacgtaaaagagtgactcttttaacccctagtggtgatttcattgtttatcgagccaacatgagtgcagtgagacaaaatcctatcttaagggcatgtttaggtggaaagagaaacttagagtgttatgggaatctgtttgcgatcgatgatgagtctaggaatttagaccagttcccttggatatcagtggttagtggttttccggatgtgtttccagaggatttaccagggttaccacctgatagggagatcgagttttgcattgatttgattcccggagctcaaccagtttctattgcgccttatcgcatggcacctgcagagttggctgaattgaaaaaacaattaggggagttaatggataagggttacatcagacatagtacttctccatggggagctccagtcttgtttgccaagaaagctgatgggactttgcgactttgtgtcgactatagaaagctgaatcagatgacaattaaaaacaaatatcctctaccgaggattgatgaattatttgatcaacttggtggttcaaagttcttttcaaagattgatttgaggtcaggctaccatcaattgaggattagggaagaagatatccctaagactgctttcaggacacggtatggacactttgagtttttggtaatgccatttgggttaacgaatgcacctgctgcatttatggatcttatgaatagagtctttagacctttcttggataagtttgtggtggtatttattgatgatatcttggtgtattctaagacacgtgaggatcatgctgaacacttgacaacagtattacagacattgagagatcatcaattatacgctaagaaagagaagtgtgaattttggatgactgaagtcaagttcttgggccatgtaatttctcaagatggtatcaccgttgatcctgcaaagatagactctattctacagtgggaaagaccaaagaatgtcactgaagttcgaagttttcttgggttggcaggctactaccgtcgct

SEQ ID NO: 359470 - DNA, 833 bp, Cannabis indica
agtagtttttggtttttttttttttttttgaaaatgaaagccatcatttattaaacgaataactctgttaccaaactcggtaactatagagattgttagatttaaagacttttgtctaattttagtaaaaaaattctaacacgatgaaagttcaaagggcatgattgagtacatatcaatgttcgaggggcatgatttggtagatatcaaagtctagagagcatggtttagtacatgaacaataactgaaacagtaaaattgaatgaaattagacaaaagtctttaaatttaacaatttcaatagtccagggggaatttttaacagccaaaaaagttcagagggcatgatttggtacatgtcaaagttcgaggggaaaaaaaaatgctaattagcctttttaatttggtgttgtcatgttattcagttttgctagctttggcggtaatttttatattgggaagatattttttcaatatgatggggtaatgtttgatttcgttacttatagttttattgtctaaatttctgggcgcagttttttcctatgtggctcgtgattagtttttgcagctcatggtttggcaaaacatgccattcggttaaacaatgagctatcctggttcgaggaggtgtcatcgtcggttgtggattgctgctttattatttttgtgtgactctattcaccacgttaaaaaaaaaatccaaacagacataaacttgatatacacaagaaaaataatattttattctttaaaaatattcacaataaattaagaatattttgacaactaatattaccaaaaaaaaaaaaaaaaaaactaaacaacatca

SEQ ID NO: 359471 - DNA, 594 bp, Cannabis indica
aactaccctttgaggcaagtcttagcgaagccagaggcatcgggaaggttgttaaagtggtcagtagaggtaagccagttcgacattaagtacaaaccgagatccgtgatcaaggggcaggccttggtagacttcattctcgagtttccaagtacttaggtggctctcgtagaagaaaaaactgatactgtcataccaaatggagaaggatggactttgtaagtcgacggagcttctaatagcgaaggctccggtggtggaatcatacttatcagttcgaacaattttaaggtacatgctgctttacgatttgaattttctgcatcaacaatgaagccgagtacgaggctttgatcgtaggattaaagctcgcccttgaaatgaagatagaatacttacaggcttttagcgactcccaaatcatcgtgtgccaggtaaacggagaatatctggctagaggcgggcgtctggctaagtacctcgccatagtatgtgagttgctgcagaagtttaagaaagtagttgtctcccgagtaccgcgtgctcaatactcacacggagacgctttggcccgcttggcctcaactagagaag

SEQ ID NO: 359472 - DNA, 1087 bp, Cannabis indica
tatatgtcatatatatataaattaggctttcaaatctcatatttaatatttttatttgtttaggtagttttatttgtcactagtaccgaaaaagtcactggagtttgctgctggtgttggaaaaattaccggagtagctgttggtgtcagaaaagtcgtcggagttgctgccgacatcagaaaatttgttagaattgacattgtcgccggaaaaatcactaaaaaaatcaccaagtaactactttcttggtgattttctggtgacaatgccaattctgacgacttttctgacactggcagctactccaacgactttttcggcatcgacagcaaacttcggaaaaattatcagaattggcatagtcgccggaaaaattaccaagaaactatgatttttccagtgatttttccaacgacaatgccaattctgacgacttttccgacaccgacagctactccggtgactttttcggtactgacagcaaactacagaaaatttgtcaaaattggcattgttgtttcttgatgaagaaaccagtttcttggtgatttttccggtgatttttccagcgataatgccaattctgatgactttttcggcaccgacagtaacatcgacgactttcccgacgtcgacagcagctttgacgacttttttggcaccgttagcaaactcacgtgtcttttccggcaccagtgacaactccggtgatcactgtaatttcatttgttttatttttttaaaaaaaaatgtgaatgaaattttaatatcttttatggtaattcaatctcatatatgttaagtttttatttcaaataccatatttttttctattaaatttccttaccatatttatctaaactagcattatttttaccatatttatggaattaccccatatatatatctatatatattcatggcttcggctacagtatatatataactaaaaacgtgacccaacacgttacacggtggatgtctctaaatatgacacatgttttgtttgtagctttagaaaatattttattgttttttctttttttttggaaagaacttagaaaagttcattgcaataaaaagttg

SEQ ID NO: 359473 - DNA, 584 bp, Cannabis indica
tctcgttcaatccgagctccagcggcctccccatgtgcgccaagtgtcgtctcctccttccatctgctattttaaattgttttgaaatgcaatttcaaaatacattataattttatattcctttgcatttatttggctcatttttctatttctctcagccaataaattgtacattgtatattttaccattctacccttctcatatctcacctacctcatttaggccagaaatttctagaaaatattaaaataattaatttattaattattttaattcactcactttggctataaatagggaagagatgagacctctttagacaatcttgagcgttcttttagtgtaatttttagagtaaagaaactatagcaaaatttctcttcccttttcttctcatatttctttatgagaatgattagcataatggcctaatcttccttggaaggttagggatgattccatatgtaaagtgaggttattttgtatctttgattcacttgtaatatttatttgagcaatgcaagttcttatttcacttttattttcttgttcttcatccatctatactactatatatgctatt

SEQ ID NO: 359474 - DNA, 723 bp, Cannabis indica
taaaataatttccaacaccaatacccacagtaccaggcgcaggagggtatagacaatacctccaaaaatttgcgtcaatggccagcctaagtaagtcgcacctcttcgcaggctgagacaagatatgatttgccctatccctcagttggagggaagggattgattgacatacctaacatcccaagcaagaaagtaactatgggagtacctcccgatctttgacaccgccttgttgttggtgttgccaaaccactagtagcctaactcgctaaagtaaaagtatctggactcgccctgcagaagaatagaattcaactcaaagttgaattgcacctcgtaaggtgagggtgttggccatccaagctccatgtaaagaaaaaagagcgttgaaaggtacttgatacctttcagagtgatctgggttgaacacaacttaaagaagtttgctatgtccttgaagtagggattcaagggcagtgccgctccttgatcaatgtgattacctgactaggccatctagttgtacgccaaacaatgcactaactgatccctagtgggtctgtcacatcgaactcctctcacaagtcctccttccttgatctcatcaagtttcttggttgacagagaagatggaggagatatccatcattgttgttggtccccataatccaggtgttgggttttatgccgtaaataaaactctttacaatctgattagttatc

SEQ ID NO: 359475 - DNA, 735 bp, Cannabis indica
tatcttttgaagtcaatatcacttagttgatcttaggttaatagatcttaatcctgagatagataggttctggcttaaagatattatttgtgttctttaacttgttcgttaaagctgaccaattggatcgacccaatgcatatatcttaggaacatggtagtacaactaagtgggagcgctaatcatagatatgaaatctatagcttctttaacttctagaagtgaaacgataattttcttcgagtttgacttaacacgataaatgattgaagccacattttagtaattatattagtttactgaaatattattagattttgaaaaaattcaaaacataaaagttctagatctctcttttatctttctgtaacatcttgaattgtccaattctgagcaatatcgagagagttatggccaaagtactatcagtcaacgtaacagaaaaatcaccgtcgaaacgaagccatgtagtgaaactccaacacgtgccgcggcccagcccttgtggggccacggttcgcaccccgaaactgtacaaaaatcatctttttctctcacgtgagttttagtggttttccaattcgaataggcatttaacatgtacgtttttatattttttagtccctgaaagcctatataaagggtgaactggagttgatttcaaaaagaaattaaaaaagtaaaatgagtacgaatttcagagacagaagtcaatactggaggcattctgcaga

SEQ ID NO: 359476 - DNA, 939 bp, Cannabis indica
atggggtgtgggctggctagctaaggctggttttattttttttttttaaattaagacccaacctcggcgggtccaattgaaacagccgagatagggtactgttgtaccttacatagggaatcaccgaaattgaggtgtcgagattgtccaattttttagtagtgtatattaattaataatattatattaaatttaattgatttttaccaaaaaaaaaatgctcaatgcgatcttttcaataaaaaaaataattaatgagcatatatacgtttgataattagcctatatattatttgctcttttatagctcactagcattatattttttagcagctaaaatatttgtagtgacataatatgcattaaacatattaatttggttttatattttatcgtcactaagtaattagttggtatatataaaaccaacaatctcaatagttcaggggcaattttaaacaacctaaaaagtcaaggggcaagaattgggaaaaggcaaaagtcaagggggcaaaaatcataattagcctaataataaatgtaagtataaattttttaggactaatattttattcattgaaactctttaacatttaccaaccaaacattttgtcacaaattgaggatttttaatactaaataattttagtcaccaaaatttagtgctcccgccacaactattaatttgacactaaagttttagtgactaagtacaattttagtcaataaaaatagcaaacagtgaataaaaattagtcgttgattcctttggttccatttaaatattattttatgactaaatatgtctgcgactaaatattagtcataaaagctaactattagtgactaagttgattaagtcacaaaaaatttagtcgctgaaaacttattttcttgtagtatgactattttattttgaaatagaaggaaacaccattc

SEQ ID NO: 359477 - DNA, 497 bp, Cannabis indica
taaatcatgtaatttaaatctataaaaaaaaacttaatgtatttttaaaatgcaatatattgacaacaaaacactattcacttacttactggaactgtttgtgtactatattcttaaaattactgatatttatctttaaatcttattaattgaaactagtttatttagttgttaaacaattctacgtggatcaatatgtaataatgaaatcactattaaagacaattactgtacaccaacaaagtaacagtaaagaacgaagttaaatcctagctttgtttgacaacataaaaaaaaaaacataaaataaacatcataccacatatctctaacgaaatgaaagttggcaaatgaggaaaaggcaaataattataataactaataattttctaataatgttttcatggcgcatcttctctttctccaaaatccttatttggttacacaatccgggagtagcgtctgtaggttttttaggatgagattgatcgatccaa

SEQ ID NO: 359478 - DNA, 671 bp, Cannabis indica
aaaaaattattacccaagaaagcggatattacgtatatgcccccaaaatcaaaggtggacgacgtcgatcctccctcaaaaaccttcttcaaacattctaacaacaacccccactacaaaaaactgctacttttaatgacaattttttaatgacaatataatttttttgtgattaaatgtgactcttagtcacaacaaaatgttacttgtgactaaaacatagtatttagttattacaagttgtcactaatttagttttagtcacaaaaaatattagactaaacatacatttagtctaaacaaattgtaatttttgtgactaatacttttagccacgaaccttttagtcacaacataggaataataatttataattagtcacaatattttcacttttagtcacaaattttgttgtgattaaaagtaaaattttttgtaatgcccctaaccattgccacaacaaaacccgtagaggatctggcgaggcgtggtaggatgttaataaaattatatatcatgtcaacaaaagtacagtagaaaatagaacttaaatattatttaaaaaaaattatatatcggtataacaaaaaattcatatactatacaccaaaatatatatacaaaaaataataataataaaaatatagattactaatatatatatgtatgta

SEQ ID NO: 359479 - DNA, 698 bp, Cannabis indica
ataaaatagattacattgaaatggagtttatttagggcataaaacccaacatgttaaactttgaaggatcatgggtaaagtaccttcccctgatcgagttctcgtacaacaaaagctatcaggcaacaatcgggatggctccttatgaactattatatggaagaaaatgcagatcacctattcactgggatgaactaggtgaaagaaagttcttggaacctgaagttattcagagaacaagtgaggcagttgataaaatttgagcgcgaatgctcgcagacagaagagctacgcatatccaaagtgtagggatattgatttttcaggtcggagatatggtatctctctgagtgtcgcctatgaaaggcactaaacactttggtaagaaagagaaactgagcccgaggttcatcggaccttttgagatccttgagaggaaagggcaattagcgtacaagttggctatgcccccagccctggctgttgtacatgatgtgttccatattttgatgcttcagaagtatgtctcagacctgtcccatatgttgagttatgaaccttggaacttcagccaaatctttcacacgaggaacaaccagtgcaagtattagataggagagaaaaagtattgagaaacaagacaagtgcactgatcaaagtattatggaaaagcagtaaagtagaagaggcaacctggg

SEQ ID NO: 359480 - DNA, 648 bp, Cannabis indica
ctacttgattgcgtgcacttgcgtagtgatcataattttcgtaacaagtttttggcgccgttgccggggaattgtttaaagattaatattacacaaaattatactaacttctactttggtttatttttcttgcgaattactaatcttttttttcttgcaatattttctttatctaattcaggaatcctaagtgtatgcgccgtcaaggacaagcagtcatattaccagttgatcctgaaatcgagaaaacttgtaggagaaacagaaagaacaagaggcaagaaagagtttcagcaactgctgaaacaccagaaatcatggctgaaaatgctaataatgctaataatggaggcaacaacggtaataatggaggtgtcgttgaagatgaagctaatggtcgtagcttgagagattatattctccatgttctcacaggggttcagtcatgtatcaggccaccggcagtggaggctaacaactttgaaatcaagcctgccatactccaaatggtgcagtcttcagtccagtttggtggactcccttctgaagattccaatctgcatctatcaaacttcatagagttgtgccagactttcaaagtaaatggggttagtgatgacgccacccgattgagactgtttcctttct

SEQ ID NO: 359481 - DNA, 614 bp, Cannabis indica
agttcccatgtgaccagttggttgattgggactctatgttaccgacttagaaagacccctgtagcgggttgttcagagtgacaggcttctctgattcgttgagacagattagctttccgttgttcgtgctcaactcgttggctctcgagatttcgccaattttccactaacaagttttgaaattgctcatgtttcttgtcaagagagtctcggggtcttcaacttgatgattagcctcctcggggtcttccaactcccgtgtcgctctccaggtggaatctgctcattgattccgaaactaggagcatttggtggcattgggtgacaagttgtggatatgcttttgtggcctccacctggcacctgagatgcaggagtagtcccagttccagcttcagtaactagcatgccctcacttgtctggccagttgttcgggctcctctttcaatacttaagagtgtattacaaccatttgtgagtgacttccttgagttgtgactctcaatgaaagtacaaaaatattgactaagaaatctagacagagatttctaggccacacctgctcactagattggtgagaatgagatatatgttaagtataaataaagagaca

SEQ ID NO: 359482 - DNA, 736 bp, Cannabis indica
agtcaccatatccaaatcacacacaaatcgtttaagtctgaatttctcgagagtaaatcaattaccatggctctgaggccagctgttggaattattttaccaagatctgaaatttactaacaagtatgttatttaacatcctaaatatgaacttataaaatgatatgaaataaacacatataaagtataagaaatcttacagtggttgcagcagaatataatgtctccttccactcagatctctaacccttgtatccttttcgtagcagagtatcaccaagatctgagtcctaatctccttctcttgcatctagattcttcacagcgttacacactatgattgagtactacttcatgtgtgtgggaactcactcttttaactatgtggcttcgatttagaaaagaggaaaagagagagaggtttcggctagggtagaggagtggaggctcaaaattttatctgaaggaatgagatgcatcatcttttccctaaagccatcactaccaatttataggaaaacacctaaggttaggttagatttatttggcattaaaatattgaaaaaataaatggtaaattgctatataagtggccggccatgatatggattgggccccactttgcaattttgccattttgtcatttttccatcttattttctcaaaaatgccaattttccaatttaaccacttaaatgccaattctaattatttaataaaaaaaattaattattaa

SEQ ID NO: 359483 - DNA, 556 bp, Cannabis indica
tcctttgctacagtgaactaagcagatcacaatctgactgaaccactataatttttcgtcttactgatattttccacttttgttgattgttctcacattcccagtcgagtactcgccattctaggtcgaatactcgcacttgtcgtttctctgaaaattctcttttgtattaatcaaataatatattttggtgtggcgaaattcactcgacaacaaagtgagttacatacattgaaagtgtacacgaaaatgttccaatcttctaagaaggttcaagctattgtgcatagattttgttatgtattgaagagcaatatttttttaagaaacattgctttgttgttaatttgacatatatcttgcacgagatattaaacattataattttatttaagttatttatatattttagtacagtgaataacaactattattatatttttaatttatacactaagtatttatataattatgtttgtcttcttttttttgaggaaaaaaataataattgttagtagttttttttagctattaacaatatttagctacgatataa

SEQ ID NO: 359484 - DNA, 498 bp, Cannabis indica
ataactaataatattttttttttaatttttaattgtatcactttttaataacgtaaaaaaaaactagcataaaatttagtatacgtgcctcgcacgtaactttttactagtatataaatatgtatatattaatttgcttaaattataaattttcaatttcatatagtacttataaattatataaatggaataagtattaagtacgtacaatcatagttatctgataattaataattaataatcatcatatgagattttcaagttacgtacgtacgtaaataatatttaaaaatcagtgaaattatacttcatgcataaatatatatagatcattaatttttatttatttatttattttttaaaaaaagcaacgtaaaaaaaattatttggacctcaaaaatttataaatacatctcatttcaataatttttatctatattattacataaaatatatatctttattaattattatattagtttattttttaattttttt

SEQ ID NO: 359485 - DNA, 1018 bp, Cannabis indica
gggcataaaacccaacagccttttccaccatttcagcataggtggttttgtcatcagtagtaatcatgagatcatgtctaatctttgcattcaatccatccagatacatttcctttttactaaaatcagttggcactatacccgatgcaaacctcgccaaccggtcaaactacgtcgtgtactctgtaacactcatattttctttctgagtcaggtgggtgaactctttcctcttggcacttccgacggcttaattgttgtacttggcattgaaaagtttctggaacttttctcaggtaattgtagtaacatcatgtatcatggacaccatgtcccaccacactagcgcatcttcttgaaactgaaaagtggcatagaccactctatcattcccggtgaggcccatgaaattcaatatcctgatgatcacagttagccactgctcgactttcataacatcaagacctcccagaaaaactggaggtacttgcttacagaacctttcatacagagattccatctgattcgttgccacaaccggttcggcttgcacaactggggcgggtgccactggtatctctacaacaggcactgtaggagctgttggaaatatattaccaggatctagatttactaccaagtatgtttcattaacatcctaatatgaattcttaaacaatgaaataaacacatataaagtttcgtaaaccttacattgggtgcagcggaatataatgactccttccgttcagatctctagcccttgattcctttctgtagcagagcatcaccaagatctgaacatggatctcttactctccttcctttgatgttgattctccttcttgttgtttggattctcctatagtcttacacactatgattgagataccacttgatgtgtgtgggcactactctatcacttagggaatttcgaaatttgaagagaagaaaagagagagaggggcggctatggcttttttctaaagaaacaatgtgcaagtcatagtttcctgaa

SEQ ID NO: 359486 - DNA, 505 bp, Cannabis indica
ggtttgctaatattgattatatcttccttggaacacatatcattgaacgttaattttattgtatttacacttatttcacacacacccagataagctttcattaagcaggtggaaaaagttttgtaggataaattttttggaagattagtaaggttttgaagagccaaaaatatgattatttggcaagagagtgggaaggacaacacagatgctaggtggatcgtctctgctgaacaaattgaatcaaatgagcagtgtattgattaaaaaaatggtgacatttaaagagaagaggttttttcatttttatactttaaaatagttattttttttttttttgtcatttttagggaattctatatagaaacccttattgcaactagcgctgcaacttaaattgcaacaaaaaattgtacaaaaatttttgttgcaaatagcgaaaccactctattattaacactgttaaatttaatagaatatttttatattcttaaaatattttatt

SEQ ID NO: 359487 - DNA, 644 bp, Cannabis indica
gggcataaaacccaacaaaataagtctaaatgactacaagtcatggatgaggggatggattcactgtggaagaacaagacttgggtagttgtgctaaagtcggagaagaaaaaaattgtgggagtgcaaatcgattctcaaggtgaaagagggaattaatgagaatgaactagtgaggttcaaagccaggttagtggctaaaggctttacttaggtagatggtatagactacactgaaatcttctcacctgtggtaaagtacaagacaataaggttgatgctatttttagcaggtcaaatagagttcgagattgaacaacttcatgctaagacgccttttctgaatggattcttagatgaaaagatctacatgaagcaaccgcctgggttttaggtggaagggaaatgagttaaattagagtgcaagcttaatagattcctttatggtttgaaacagttcccaaggcaaaaaaataaaagatttgatatgtatatgcatcaaattgggttcaaacgatccatttacaatcactgcttatattttaagaatctgaagcaatctacaaccgtgtttttatttttctatgtagatgatatgctcatcatgagaaaagataaatatgtgatcaaaagtatcaaagcca

SEQ ID NO: 359488 - DNA, 514 bp, Cannabis indica
ttttatagttgtttcaatgttttatgctttaaataaaatcatattttagtgtaaggttatttgttatcaatattcaaaaattatattttgactttgtcataggttttgttcacatatgtgccaaataaagttccaatatataaaaaatatctcgggactaaaaatatttaaagtatataatcataattattttttattaccatgtcactataatcaatatcaatatatatatctattctacataaagtgtgcctatataactaaattcttggtttatgagaaattaatgggtgactttttatttatatttaataaaataataaaatattatttttatataataaaataaaaataaaataaatctcattaatatttgaactgatatttgatactaatcatttatctataagaacaaaaccaatgaagaaaattttaacaaaaaaaaaaatgaacgaagaaaaaaaagtgtcataaacattattgaataattacaattgccaacacaagaatttca

SEQ ID NO: 359489 - DNA, 633 bp, Cannabis indica
ttttttttttaaataattatacagtattagtcatgtctcttgacatgtttgttgtctctctacattagagtgattctcaatttttgtgtgtaattgtttactggtgattgtttgattgatcttctctgtaatggcttcatctagtggagtgaacaaggatatggaacaaaaatggaaaaatatatgtcttgatgatgaggaagataacgaggtggtttatgaagaggaggatgtggaagaactcgagtttgacgatcggtggtgccttgtcggtcgattgctaacggggaaagtgtcggacttcatgatatttcaaaatattatggcggatttatggaaaccggggaaaggaatgtatgtcaagatcattgaacagaatcgattcctcttccaattttttcatgaaatcgatattcaaagagtgttaacgggaagcccatggacgtatgatcgaaagcagttaattattgagcggctgaaaaagggtgataatccgagaacaattgcactaaataagctggatatttgggtgcaaatccatgaccttcaatctggattcaaaactgcaagggcggtacaacaagcagggaactatatgggcgtttatctggaatcggatccgaaaaattttca

SEQ ID NO: 359490 - DNA, 1082 bp, Cannabis indica
acatggatttttggaccatatttattaatttaaattatgagaagagtttacattatactttttaaatagatgttttagtagagtatttatctgcttcgacttatgacttatgaaagagtttttaagtaaaatttatgtttttataattgtatgcgttatggttatttaagaccactgataaatttttaaatttttttgaataatttataatatcgaaaaataaaatttatatattttattacacgactattttctaatatttgtggtaaataattttttaaatttaattttcagtattgatatttatttagagttttctaaaataattataaataattttaaataactataatatatacatgcgatcatataaaaattaaattatttttttaaataccaaaggcagataaaaaaatctactaaaacaaccctagaattctaccataccacataaatttttaaaactatatatataaagtggaaaattgacaaaataaaaagacacattagtcaaattattactcatccattatgatattttgctaaccaacatatttgctattacttacgtatgggctaccctttttctggatttaattagtctatcaccataatattgccacactttgtcttttataaaactaatcaatataattaaaggaaattaaaataaataaaaatccgtcgacttagtatgaacatattatttattgaattagctcttcttaatctcaactgtcagaattagggggtgaacatccgatctaatctaacattttttttcctcatccgatccaattaaattagtaattggatttggaaaatcatcatcagatccaatccaattagacctcaagatccaatctaattactaattagattggatcaattttttaattgaattatccaattacatagctaaattttaatattaagttaaaaatatgaagaaaaaaaatacgtaaaaactaagaatctgtttggctgtattttcagttttcagtttttaaaattgtaattttaaatgtgagaatagaaaagttttttgtcattttaaaatttaatggtgtttggcacaaatt

SEQ ID NO: 359491 - DNA, 645 bp, Cannabis indica
caattcaagctcaggtggtaagcgctaccagtaaaaaccaaaagcaagggaatgggaagaaaggaaagtttactagctaatccgaacaagctcctcgagagaatcatgcaaactacactacattcactattctgattgaagatatagaaagtgtatacatggcacctcagtcgctggccccctataagaagcccgggcccatgaagaaagatgccaacaaaagggacatgacaaagttttgtcgattcctcggagactacggccacgacactaatgaatgctacaacttgaagcgggaaattgaattcctaataagggaaaacaatccgcacctgcaaaagtatgttaagaccgaccaaggtcagaggaacgacaacaaccaagatttgctacctccgctagtagatggacatctgcaagtcattgttggaggccctcaaattgcaggagatttagacaaagctcaggagaggtacgctcgaacagtgcagcacgagcaagaagaaatcatccaggccgtggaagaaaggaagcctaaagttccacgagcaggagagccgaccataaccttcaacgatgaatgcgctatcaaaattagatttctgcacaacgacccgctggtcgtggaagtccagatagccaata

SEQ ID NO: 359492 - DNA, 735 bp, Cannabis indica
gcacaaaacccaacaggttccccaagtcaggcatccgcgtctccccgccttgggcaacttcctattgggcaatacttttccccttgcttaaactctcgctagaggtattctccttttttaccttagttaagggaaggttatagcattcttgtgctattctttgattccctttgaggcaccctaccccattctttgttgggaacttgacgaacaaatgaaaaactaatgtgacagctttcaagtcatataagaccggtcggcctaacatgacgttgaaggctgatggaacatcaattatcaaaaattgtgccatcacagttatgctcctcagagcttgtcccgcagtgaggggtagacggatttgccccagaggtacaacactctgaccaaagaaaccatacacaagttgggtacaggggattaaatcttcaagttggagccccatcttctcatatgttgtcttaaacagaatatttaaggaggctccactgtctatcatggttcgagccactgtcttgtcttctatctttacttccacgaccaagagatcgttgtgtgggaagttgacgtgaataacatctacttcagtgaaggttatagtgggttcccatacccgtggtatttttggctttctttcttctctgccgaaattgtttccttttattcatgttgtaaggctcgggcatacttttcctgagctttgcctgagtctccagctggatgtgggcccccaat

SEQ ID NO: 359493 - DNA, 615 bp, Cannabis indica
tgtgttttgatgcaagctgacaaagtcatagcctatgcctctcgtcaactgaaggattatgaacagcactaccgaacacatgatttagagcttgctactgtggtttttggtctaaagatatggagacattatctttatggtgaaaaatgcgagatttatactggtcataaaagtctcaagtactttttcacccagaaagacttaaacatgaggcagaggaggtggctagaacttgttaaagactatgactgtgagattttgtatcatcctaggaaagctaatgttgtggcttatgcactaagtaaaagaggtcccgacaggttttcaccactgttttgatagcccctcaactagcttctgagataattagtgcaaggattgagtttatagttggaaaattgcattacttgacactcaagtctgacttgctagaaagaatcagaaaggcacaattcgaggattctgagctagtcaagattcgagatgaggtgatggctggtcggcctaaagactttttgatctcgaatagtggaatgttactgcataaagctcgagtttgtgttcctagtatcgatgagcttaagaaaaaatccttgatgaagctcacaccacacc

SEQ ID NO: 359494 - DNA, 593 bp, Cannabis indica
aaagcctaccaaactgtagatcaacaactgccaaacatcattcccctgggtgatatggacgaagatccaatgatgaatacttctaagactgcaaatggtcagccgcccaatccccgattacgagttccactcgtgggccaagcagtaggcgggcataccttgtctagtaattcatcaagagaagtcatacttgatggttccaacaagataaatggtgccattcccccatcaaccctgcgaatcaatcgttgaggcaggtaggcacttgtgtattcgaaaggttgggggcgacccatgacctaaggaatgatctgaacagaaggaggggagtagacgatcagaatgttatgacaatctcgcagcttggaacccatactcaaattcccactcagaaagatgctgatgtaattcaaattgaccagaatgccgagcaggttagccaagccgtacatgctcagctagacgaactaaaaatatgtttcacggcatggctggacaaagaaacaatgatcttgagctagaccgagcacacggaactcctttctcacctgagatcaatctcctgtcgtcgcccacaagtttaaaatgccaac

SEQ ID NO: 359495 - DNA, 608 bp, Cannabis indica
cactatacttatatgcatgacatgtatataaaattatatatatatatatatttataatattatataagaagcatcatacaatgaagggtagaagacctaccaattgccatgtgagacatgtcccaaaaggagacaaagatgtaagattttggacctattcacatgcctatttaattatacatgatatatattcaaaattgacatgcttactatatatgtatataattatatgtatatatatacatgatccctttgtatttaggtctttacctaattataaaaggtttaatgcatgtacgccccaactctctccaaccatcttcaagtttgtctatcttaattttttcaatttttactattttagaaaagaaaatagtccttgacttgtgcatggtatatatactcctcttatctaagtactaaaattgagttaaatcacaaaaggatcataattatatataaagtaatttaggtatgtacgtaaatacttaagtttcactctctgttataaataagtgggtaaatggcggcataaatacccaaagtttcaagtttgtaagtggaataatcccaatatttatttttagcagtataagtacccaatgttt

SEQ ID NO: 359496 - DNA, 1020 bp, Cannabis indica
acaacaaccagtggtggcactgtcaactactgaatcagaattcatggccaccactgaagctttcaaggaagctatatggttacaaggaatactgcaagagctgctactgctcaaagacaaagggacagtctattcggatagtctgtcatctattcacttgtgcaagaatcccgtataccatgagaaaagcaagcacattgacattagattgtattggattcgagagaagattgaggacagggttctggaattggaaaaggtgcacacaagtgacaaccctgctgacatgggaacaaaggttcttacattcagtaaactgatgcattgtctcagtttgctgaacattggttcttgctgaacatttcgagatatcacatcatcaaggcttcagtgaaaagactctgataaattgctttagagaatcaaggtggaaatttgtggaaattgatcctctaaaccaacttattatccaactcatttaaaccaactaacttaactaactttcggttatgttagttagttagttggtgctatccttgtttgagttgggactatatataagtctagtcttttcacttctaaaaaaaggggagaacagaaggaagacagagagagaataagagagaagattagagagatttgcttagggttctaagctgagagttctgttcttgaagagggtcaagaacaaggggtgtactcgggttgatagagagaaaactgtgactgttttctctggtgtgtatcgagtaccatctgagctgtgattgctctggttattgtaattgtactgttgctctcttattcacatattaatgaagattggtgatgtttctcagctggagtatggccagggatcatattgatctctaggaccggaaccaggataaaatcgtgtgttgttctttgtttgatttcggatttgattcattgtggagattaattggtttatgttcattttactgtcaaagtgttgagatcattgcagattttatgattgaatcctcaaggttatttccg

SEQ ID NO: 359497 - DNA, 971 bp, Cannabis indica
gtgaatacgccgggaacgtctaggacttaaatttggatcccttgattgactggtttaaccattttgttggtcccaccttagctccctttacctcagaaataacaagccactttgctgccggactgactgagcttccaatgaagagatatgcggcctgtgcttctactaatcccatctaccagatccaggacgtgagtgcagcccttaccgcggtaagttcccatttgttagagatattttcgagcttcttttctttctgatgcctgatattacgtattcattattttttttgttggttaatagattgctacagagaccagtcacctctcgaagacattaattgaccatgggtataccatgtccaagttcgggggcatggaggaggccatgaagagtcttcaggagtcagaggcgcagaagagagttatccgagaggaagctcagtagaaagaggcctttatggagcggagccactaggaggcactgaaggctaaggacgaggtgttgaaggccaaggatgcgatcgtggccacagtgaggcgggaccttcgggattctaaggaggtagtgcaggaatttaccgccaagttgaagtctctagaggagctgcaccaagcgaatttgcaaacgaccgccgacctaactattgaagtgaaggggcttcatgagtttaaggagcaggctcaaaaggaggcggccaaggcgaagagagatgctctctaggccccagtcacttgtcagcactgcaagaagcgcttcgatgatggagtcttcatggcctggcaatccaacggtcagaatcttaatctcagcttttatcccaagcatgaaaaggttctgtctcgcttctgggagaagaagaagaggctggatgcagtgttggaggagcgaagcggtcctcgtcttccttcgtcgggccgattaagtcatttgcttatatccttcgttattattagtatctaatttttttg

SEQ ID NO: 359498 - DNA, 459 bp, Cannabis indica
ttagaaagttcatatttacggtgttaataaacatacttgtgagtagatctaagatcctggtaaaataatttccaacattttgtccaagcactgggtgcagatccggatcccagactggttccatttcttgtgccgggtcacgagctgggtcctaggttcaagttcaggtctgggtcgggtactaggtcccggtccttgttttgtttccaacgtccatatctttattctgggtctaggttccagttattgtgtgggtttcagtcccggtcaaggttacgattcgagtcctaggctcagttcgggtttaggtctctttcttggttttgatcttggttcgggtttgggtttaggtcccgagtgcgggtccaacttaaggactgggtcaggatctcgatccagatctaggtcaagcatttcgatccttgtctgggtcttggtccgagtctaagttcgtatccg

SEQ ID NO: 359499 - DNA, 621 bp, Cannabis indica
aaaatcctgcaatgttctcatccatagaatatcagtttactttgaaaattatcgcaattataaactaagcaacgaataatgtacttcaataacctttattatcaatgattagtgtaattcaatacaatgaaacaaaataaccttgattaccattaattccataatccttcccaaaatagacaaaatcaaccatattaattcattattaatgtccctatttctaaaatattacaaattcctttattgtacttatcccaaaaaagcaatttttatacatatttatttatggtaaaactttattataatcaaatcaatctatattgaattgaaattacttaaaataatccaatttagttattatgacataattattcctattttaatttctaaaagacaagttgtaaacttccaaaaattgtatcattttaagttaccataaaaatatttataatgattttttcctatacgacatagattacaaaccaaattccataaaatttgacttcccaaatacatctgaacacaataaattcgcatttgatagttagtattcccacctcctttgtgacagtcagtaatcccgtgatccgtaaggggaaacaccgggtaagctgtgcaatc

SEQ ID NO: 359500 - DNA, 1035 bp, Cannabis indica
cgaatgaagcaaggatcaccttgataaaatgaagtcagaggaaactcgcaggaaaaaggtcaacgacacggatggcatgcaagtctttagacgggtttaatggtgatctttaacgaagaagtttaacaatttttctcaaactttctgaaatggtgcaagggtggttccttttccttattttatacccatgataatgatttcaaaatagaatttatccaatcgacgtagattcgaagcggacgtgaaaaagataggtcagtttaattctgatgtacctcgaaatcgcacaaccgcaaaaattagagggaatgcgtcttttcaaaatagagagcatgacgaaataaccttgtaatcattaaaaatcactttttattaaaagaaatttttaaagggtcaaccgttatacccgaagttcggcaagcacatcagaagagaacacgtgtcgagctgggaaagactcaaacacgcaaatgacaagtatgcctagcatggaacaactctttggaaatataattcgtagagtatgtttataagtcagttggctgataagtcttctgcgagagagaaacatacgaactgctagcttgtgtattgacgagaaaccatgtgggtgcagacgttcatgacgagacctcaacctcgctgcgtgaaatagaaagcgccaacactaaaaatacttagcgtatattatacaatatataaactaagtgtaaatagtttgacgagccaagatagcaaacaacgaggtgtttttcttgcaggaagatcctctcaacgctagagaagtatagttataagaattatgataatattagtctcgagaagctaaaatgacaagaagttgctcgctatcaaagtgaccttggctccctctgaagcaaaggaatccctatgagatacggcttaccgtatatatttcattatgcattcatctctgttgtcgagtgaatttcgcaacaccaaaatatattatttaattaatatcaaaagagaattttcagagaaacgacaagtgcgagtattcgacctagaatg

SEQ ID NO: 359501 - DNA, 518 bp, Cannabis indica
ttagtatcctttaaattagttttatgtgggcaaggacaatatgcccttttagtgttttgtctttatgtggatcaattaattgatttattattgattttaaataattggtcttggctgaaataagtaattaaactacttttttttttactcatttttacaaattgagaaaaatcaaagaaaaagaaaaattctattttcctctcaaactctccccctctttcggcctccttgagcagcaaggaatctggggttttccttggtgattcaaactattttcttcagatttagtaatctctaattgttggtaaggttcttataactttcttctatgtttcttcaatttttttaaggaaaaatggatagttgcatgcttggtttttgttgttgttgctgctgggtttatgggatgttttctgtggttttatatgtttaaattaattggattaaagtaggtttgattcatgctagatggattaaccaagtttggatctttttaactcaaaaactatgatttctat

SEQ ID NO: 359502 - DNA, 662 bp, Cannabis indica
acctgcacgctgcggtcaagtttggattcaaggcatctaacaacgaagccgaatacgaggctctaatcgctgaacttaagctagcccgggaaatgaaggtcgaacacattgaaatctgcagtgattcacagctggtggtaaatcatgtatccggcgaatacgaggctcagggagaaaagatgatagcatatctgagaaaagtacacgacctgctcgcacaattcaaaagctacggtctcagacaaattccaagagaagaaaatacaactgaagacgtgttagcccgattggcaagcagcaatgtaagtgacaaggcaaacttggtccctatccagttccttgaagagcctagcatcactggcacggaagaaattgaaatgaacgacacatccgcaaactgaatgacgccaatagcaacctattttaactcaggagaactcccagataaccgaaatgaagctcgaaaaatgagaaggaaggcagcacggtatatcatagtagaatgggtcatgtacagaagaggattctcgatgccattactcagatgtgtcatacaagacgaagttgcacgactcctatctgatgttcacgacggattctgtggaaatcacgccgctagacagagcttatccaagaaaattctaaggtaaggctacttctgg

SEQ ID NO: 359503 - DNA, 518 bp, Cannabis indica
aatctttatccttccttgattgatgtgattcttcataatggagccgtcactagcccatttgattagcgtgtaatcgttgtaaacgagacttacgttgtcttacacgtcctcttatggttgttcccagacactttccccatgctgcattaaatgcgaggtgattgttcgaatatgtccacctcctcccagagatactttattgtatttctagctcccagaggggaaggacatgctttttgtacttctccgggagctcactccccgaactacacttgttcgtctgtatacgactcagctaattcttgggtgaggtatccttttggtccacgtgtcatacgcagctgtggccatgtattttgggaaatattatattatattggacataaaatatcatatgaacactataataaatattatttttttatttatttttttaccacgtaattacattaagagtaaatatcattttagaccttgtgttttgcaaaagttactaatctctgttttgttaaatgaca

SEQ ID NO: 359504 - DNA, 598 bp, Cannabis indica
aagagaagaaattagacccaaggaccataagcagattctttatagggtacactgaaaagtctaaaggttacaagttttattgtccatctcatagcacaagaattatggaatcaagaaatgcaaaatttcttgaaaatgccttgattagtgggagtgatcaatcaaaggacttaggtcctgagaaagatccttcagaaccttccacttcaaaagcaagattaataatggtcaacacccctatagttcaaacgaatgttaaacaaccattaccaatcattgaagatccacaagttggtaatgataatctagtagatcaagatattcaagagttgcctgcaactgttgaacaacctgctgaaccagttgctgctctccaagagcctgttggtgaagtcaaagatttacaaaggctatgttgtgtatttattagaatctgatattggaattggaaatgatctagaaacgtttttacaagctacgaatagtagagaattaaaattgtggtacaatgccatggatgatgaaataaattttatgaagtgtaacaaagtctgagaacttgtaaagttgcctattggggagagagccattggatgta

SEQ ID NO: 359505 - DNA, 840 bp, Cannabis indica
tttgtccttgataaatttcaccgattaggttcgggttatgaaggatgaaatttaagcgtgtatgtgggtctattaactttgatgggtgttaagaaaaactaagcttttggctcaatgaggggtgactattgaaaatcaaaattttttcgggttagcttgaaaggctcaatcgtccaaaaatggcctaaataatttccaagttgtaaagctagctaggatttcgccccaagaattacgctaaccaattctagatgcttatactttcccaaggtgttagctattcttgaaagtcaaagtatggtgggataacaaaatagcctttaaacttagcattttcaacacacaaaaatcagggcacatcacaaatgaaaggaaatggttattctcagttacacactaacacaacataacacaaacatgatcatataatattactaacatgaccttaactacaaaatgttgctacacaaacaactaaagacagcaataaagataaccaatttaaacaaaaacacacataacaacaacaacaacaacaacacataactaataacatttaacaaaacaacttgaactatcacacatatttacagtaatcaaattggttaaggaaagaagaaaactccctcaagaatcagactcttcatcgacagagcccctctcttcaccatcaatctaatgccaaggcgaaagaatctgatctagaaaatttgggtatcccaggataactttgcgcacgttggtctgcagcgcacgcttcacccacatgtctcttttcctttcatactcccagtttatagatatattttttttgtaacccaatactcccagttgttgtag

SEQ ID NO: 359506 - DNA, 776 bp, Cannabis indica
agaccgagacctactacccgaccaagacccgaacttgaacctaggacccagctcgtgacctggcaccagaaattgaactagactgggacccgagattgggatcgggatttggacctagggcttggacaaaaaccatagtcggtgtctagatttgggacccagccttggacccgaacccacacccagaactgaacccagtcccaaacccaaaagtggacccgaacccgtaccctgtgacccaaaattggaaccaaaaccggaagttgaccgggaccggaactaggacttggacttggaatcataattgaaattggaccatggttcgcacaaaagtcttgaactgcttgccattatctgaaactattttgtacaacattccgaaccggcaaattatgttcttcacaataaagtcttgaactttctttggtgtaatggttgcgagtggtttagcttccatccacttagtagagtaatcaactgctaccactgcatattgcactcctcctttaactttgggtaattgtccgatcaagttaattccccaaatggcaaaggtccacgaactctacatctgagttcactcattaggtgtagctcgaggtatctttgaaaatctctggcatttgtcacacttcttaacataggcttttgaatcttcaatcagcgttggtcagaagtaaccttgccttagaattttcttagataagctttgcccggaggtatgattttcacaaaatccgtcgtgcacctcagataggggtcgtggagcttcttct

SEQ ID NO: 359507 - DNA, 726 bp, Cannabis indica
ggttagctggttttacccagaaaaccaacaaagcttcaaaccctcaccaaatcatttcgaaatccaaccaaactttccagacctacatttcacaccccaataaacataatccaattgataaaacaactccccatacacaaaaatgaatttcaccgttaaagcttcaagattgagttctaaaactcaaagcttggttaaacctatgtacaacccctaattcatgcttaaaaaaccatatctgaacataataccatcacagaaaacaacaacaatcaataacagcaaccacaactctttaaaatcaaaatcatgcaaagattcacaacttgaagcttaagaactaaggaggaagttgcttagagacttaccttgaattgaaatcacgaagaacttgcttgaaatccctagaagaagtaacaaatccacaaaccctagctggttctaagggaaaacctgttggaaattattctaccaggatctagatttactaccatctatgtttcattaatatcctaatatgaattctaaaacaatgaaataaacacatataaattttaggaaaccttacattgggtgcagcgaaatattgactccttccgttcagatctctagctcttgactcctttctgtagcagagcatcaccaagatctgaacctggatctctttctctccttcctttgatgcttattctcctccttgttgtttggaatctcctacagtcttac

SEQ ID NO: 359508 - DNA, 979 bp, Cannabis indica
attcaagtgtgctggccgacttgaacgggaagtctcgtgctagatggatgccctaatcacattatgaaaccgggtaagttacatgatcaaaaccctaatcccgagaaacccagatccataaccctaggttctgttataccccctagaggttactcaaactctgaaattagggaaacacccaaccacggcactgaaatggatgaaaatcaaggaaatgaagtgtttgggggatcctgccaaaaccggctagccggtttgcaccagttctccccaacctttcacctcttgctcaattttccaccaaatgccaccaaactttccagagtacctaaacaatgcatatacaacatattccagccagtaattcacagaaaaactcaacgaaacaaattacgccattaaagatcgaagctttgaactcaaagctcaaacttgcacaaaacctaatccaagcatcaataccagctgctaggacctaaaaccaactcaaatgaaccttaaaattctaaccctaaacaaacctaaccctaacaacccccaattcccaaaatcacaaactcaaccaaaacttaaattcaagaactaaggtaaagagatgctagggcttaccttggcttgatttccccttgaattccttgctgaaaacactaagaatcagcaaccaattctccttgctatagctggttcgaagagagagagagaggaaggaaagagaggtttctttgatttttttgtattttcttttgttttctctaaatggaatgaaggttagggaaaatcaatttcccttgctgaaattcacttttctaggtgtcaaataactaggcagccacctatccttagctttacaaaaagttcaaattgccctttgacttaaacttagggtatttccaaatctaggggtaaaatggtcaaactccataacctcacttaatcccgatattttactttctctaaaatatttcccactaagaaataa

SEQ ID NO: 359509 - DNA, 733 bp, Cannabis indica
ctctctctctcaaacccttttctttttcaattttgatttttgaagaaattgcttggatttggccttgaattgaagctttgagtttgtagatttttgagcttgttcttggattgagtttgaggtaactttctctggttttaatctgagatttattgctgaaattatttgttgaaaagcatgaaaatattttgtggttgtggtattgaatttgtgatgcatgttcttggttgttggggttgtcttgagcatgctttaagctttaaattcataagtttgtttgggttaggtttggacagaaattagaggatttgattagtgtaattttctgttgttgagctctgaaatttattgtttgaagttggagttcaagttcttgttaatggaaatttgcttgagatgtagcttaagctttggagctttggttggatgttgttgattaatgttagaattgatgttgttagctctctattgtgatgatttttatctgtaagaagttaattttgggtatggtttgattaaaggttcgaatatatggtaaagtggacatgtttagacattaaaatctagttttctgggtttttcaaacctagtggtcgcggccagatttatggtcgccgcggccataaaacccagcagagagccatctttttcccgattttgttttggccataacttttgactcgggactccattttagacgttctttatatcgttggaaagctcgttctgagat

SEQ ID NO: 359510 - DNA, 680 bp, Cannabis indica
ccaacatttctcagcacactttcacccatacaacgaggatccatatcatggatttgcacccaaatatccagggtattaagcgataaactcaccggatcttcccattcctttagccgttctatgataagaggcatacgatcaaacatccacgggctaccatctatcacccttttgatatcaacttcatgataaaattgaaagataaataaattgggttgaagttttttaacaaacatacccatacccggttgccataacgatgaaagtgtgttttgcattgcatcataatcaaacgatcttgaagataagaacttcccaactaagcaccatcgcgaatcaatcccttcatcatcaccaatactgttgatcgccaaatcctcttcctcctcttcagcaatctgaatattcaacacctctctgtctatatccccccatattccatgtattagaagccatgacaaacagccactcactgaataatcaaactaacaagtcgacagaacactcttctcaccactatcaacagaacaccatgtcatacgacatgacttcgcaatttgatgatcactttaatttgtaacttattaattattattttattatcaattaataattatttttattattaattattgttttattatgaattatgaattatgaattattgttttatttttatt

SEQ ID NO: 359511 - DNA, 604 bp, Cannabis indica
ttggaataatttaagttttttgtttttttttttttttttgttagacttatcaatttgttattagttaaaaagtatatatttatgaaaaaaggaaattataaattttatgagttttaatactttttgtacaaaaacatgacctttttttttcaaaaaggttcttttataagaaattgaaagaaaaagtaaaatataaagaaaatcaagtaagggtaactaggtacccttatggtaattagagagataactagttaccataagagagtaactagtttctatactgttttttccatatatatttgagtaatttacggcaaaattttttatattttaatttttatattcttaactttcttatctttttatttagtggtaaaaccccccttatgttttaatttttatacacttaacctccttatctttttcttttggtggcaaaatccccttaagtttactttttttttacaaatttaaagttttagttagatactaccgttaattactaactagattactactactgtatcgatttcgagattttactgttacctatacacaagtgtatacagtggtcattcagttgatatttgacggtaatatttaa

SEQ ID NO: 359512 - DNA, 706 bp, Cannabis indica
tgatcaatgatcctctctatatagatgatctacactgtaaagggattagattaccgtaataccctacaatgtattttatccttaaaacacttaaccctgtataaatcagatttcgaagcattaattgcgtcagagcatttattagctgaaaatcatagggacgccccagtccagcctcacatcgagtcgtgaacaaacgcgcccaacgcgtgtcacccattcaaacgtaaagacagcttggatgaagtctacacgcaactttggaagtcccatacagacttgggggcaaatgttatcccaatttttgcactctgacgtggcatcactcgatggtgacacgaggaatcgactccgggtatctactcgcaaggcacaggccaaacaggacacttcatggattcactcagatgaagtcctttaaactgagcagtaggcaattcgcacagaacgccaacacttagcgaattcagctttcgcatcgtgagtcatcaaggaaatccctataactttgggatcagattacagagatatgtcaagctatccaaatcccatgatcagtgtattctgtatttattatgcagtctttctgcttatatcaattgtaacgagaagggaaagacttcctctccaactcatagctctataaatagtgatgcatattcactgggcaaagggtcgaaaacattttggttgagagattttgtct

SEQ ID NO: 359513 - DNA, 717 bp, Cannabis indica
tattcctaataattcatccaacctattggaattagtataaaaggaaggctatggtgtcattatccaacgaatgcctccaaagctaaacacgtagttttctctctaggtttatgggacctcttccttttcttcttcttcaatttgaaatccattgtcttcttcacaaactaaaattaacccattagtgattgagaacatgcccacacataacaagttggtcctcaatcatagtatgtaagactatgaagaatccaaacaacaagaaggggaatcgggttcagatcttggtgatactctgctacagaaaggacacaagggttagagatctgagcgggaggagtcatttaattcctctgcaaccactataaggtttctaaaaaaaaaaatctaaaatcggctgcacatcacacacgcgcgcggacaccgagttttacacggtcaggtgcgtgttcagatactgaatgtccgaagaaacacgcatggagttgtctaatttccccattccacgtgcggaaaggctgcgtgcagcctccagtgccgagttttcttgaccagctctttcttggtgtacgcgcgcagatggtatgcaatgcataccatctgcaccaaatccattttttatttcaattttttcatttttcatgctttttcatggaattaatttcaattttttttgtgtagtttttgaatttagatttttatttttcatatttcaaa

SEQ ID NO: 359514 - DNA, 701 bp, Cannabis indica
cacaagccataggtttagataaactcaaacctatgatactagaatcaggaagttttgttaagtccatcgaatagacttattatcaaaaaattcctttcttgcccttgtactagaaaacctttggttactccatttgaatgattttaaccatagttctcttggctttgcttcttagttccttattttgacaatccattacttgtctaaactaacaatggattttagtcacaagtgtctcccaagtcttaatagggtgagttccttgaaaccatcccactacgacaaggtaccgtgactttctgtctagaaacataagtggtattaacctcattagttgtgtgaagataatagaggcagtgggaccatcttatatagaataagatgatagaacattttagaatcaaatagtatctcctctaatttgttaatttcttttcatatttagtcatattcttagaaaagtagtatttattgaaacaaacactttcttatcttaatgaccataggatggtccacccctaatcacttagaatagccatcaaacatgcaaacttaagttaacagttctagctttcttaagttcatgatcaggacatcgataaatctagtaatagtgtacactaagtacataaccattttatcattatgaaattttcctatcactagagtatttccctagaaggacttaggcaactgctagt

SEQ ID NO: 359515 - DNA, 701 bp, Cannabis indica
ttgatgttgaataaaatagattacattgaaatggcgttttatttagggcataaaacccaacagcaatgcccatcgtcgtctcctcctttgttgcgtgcgaccgagagaaatagatagaagttttatatgtacagctgtgagagagtgttttgaattaggtttttctcattagggttagaaccttttctatacataccccaattaattattttattatttatttatttaaaataaagtaaaatctgatacaatatttaatttcactccaattaataattttattatttatttatttaaaataaagtaaaatttgatacaatatttaattggaaaattttatttacaccacaaaaacctctaaagacacctcattttaataatatttattttaaataaaatttatatatttaattgtactagtttttttaacttttttattccaattcataatttaaaaaatataactattaaataaaataaattatattttaaatattatgaaaaaaaaattataatgaaattttacttagaaaaaaataaaaaaataatctatacatgatttagaaaaaaataatagaaaataaaatacaaagtaagtaattgaaattaacaaaaataaatagtgaggaaaaaatttagaaaaattaataattaagtagtaattttgtaaaattaattaagtatatatttttttaattaat

SEQ ID NO: 359516 - DNA, 797 bp, Cannabis indica
ccaaggaccaaaaaatgcgaggaggcttttcaagccttaaaaacacttttggggcaatccctaatcctatcaaagcccatgaccggcgaggtcctatccatttacctagcagtgtcagaatatgtgattagtttggtactaatacgcgaagatcaaggatgaaaatacctggtgtttaatgtcagtaaaaaattgctggatgccgagacccgctatcctcaaatggaaaaattggcgttctccctggtaatatcgtcaagaaagttgcgaccttatttccaagctcacagtattgaagttttaatgaactaccctttgaggcaagtcctagcaaaaccagagacgtcgggaagattgttgaaatgggcagtagagttaagccaattcgacatcaagtataaaccgaggactgcgatcaaggggcaagccttggcagattttatcctcgagttcgcaagcaccgaagtggcactcatagacgacaaggttgacactgctatgcccaatggagaagtatggaagttgtacgttgatggggcttcaaatagcgaaggttctggtggcggaatcctgctaatcagtcccagcaattttaaggtacacaccactttacgctttgaattttctacatctaacaatgaagccgaatatgagtctttaatcacaggattgaagcttgctctcaagatgagaatcgagtatctacaggctttcagcgattcccaaatcgtagtatgccaggtgaatagagaatatctggccagaggagggagattggttaagtatttagccatagt

SEQ ID NO: 359517 - DNA, 510 bp, Cannabis indica
attccatctgggtaattgtggatcgatatacaaagtcagctcactttttaccagtgtaggctacgtatacagtggatcaatatgccgatctatatgttaaagagataattcaacttcatggtgttggaaagtcgatagtcttatatcgagatccaaagtttacatccaagttttgtgagagtttacagcgagccatgggtactaaattaaagttcaatacaacttttcatcgtcagattcaaaagtaaatattcatttagtacttaaagtggtcacctgacctggtactttattggtagtattttcttaaatgttctccattctagtaccgtggtattagaacgagttgcattttttcgtcatacttacctaacttgtatgctgcggagtcgagaacttcgaccacttgatatggtccttcctagttaggtccaagtacacctgccgtactgtctttggtgttcaagaatacccttcttaggaccatatctcccacgaagaatttctgag

SEQ ID NO: 359518 - DNA, 377 bp, Cannabis indica
gatccgggacttgatgcttggacacgacccgtagtcagtgtctgtatataggacattgacctgaacccgaacccaaactcgaactcaaactaagacccgaacacataccatgacctagacccacactcgggaaccaaaaccgaaacttgaactggaactggaccgggatctttgaatgggaccgggacttggacctagatcgaacccggaaccggaccaacccttagaccctaaccgagaccgaaacccagacctgaaccttgccccagacccaaaatcaggacccgaacccaaacttggacccaaactcgacccgaacttgtaccccgtgacctgaaacttgaaccgaaactagaagcggatcgggacccaggaac

SEQ ID NO: 359519 - DNA, 569 bp, Cannabis indica
ccccaaataacataaaaacgagaaaatctggggttcctgaaaatcacccaaccggcagaccggttgtccaaccggaattccggttctggaaattttcaaaaccccatccggaattccggatgcacaaccggaattccggttcctcgcagactaaaataaaaaattcataactccatcaattcgaacccaaaacatatcaaatattccagacctgttctagacacccctaggaacaattccaaagcactaaaaccgagcttcaaccacagaaactcatttcaccattggaggttcaagattgagttctaaactcaaaacttgactaatccctccaaacagccactaaatcatgcatatctcaacatatttcaacataataaaactccagaacatacatctaaaccgcagtaacaattacagcaacaaacttcatcatctttctttaaaaactctagctttgaactaaaaactaccaacttgaatcaaagcaaacaacatgcatcaaactagctctaaaccattcaaaataacaagattaatcctctgtaaacaacaacaaaatcacagca

SEQ ID NO: 359520 - DNA, 709 bp, Cannabis indica
tctctctctctctctctcattctggatttctccttcgttttcttcgtcttttctcgctcctattcttctcctttttggatttgagattttttttttcaatctgggtttgttactttgtttcttccatgaatttgagatgcatgtatttgcttgtttgagtttatgtgatatgggtttgtttaattttcttttaggtattttcagatttgggtttggagcttcatatgtatatatgtgtgtttgcttatttgtttgttcgttagattgggttttgtttaaattttatttctgtgtgatttgggtttgaaaataagttacagtgatggtgttggtgagtagtggtggtttcggtacctgtattgatggtggtggtgttttggtctgtggatggtgatggtggtggtgatgttatgaacaaatgaaagaaaaaggaaaagaaaaagaaagggaaaaaaagaaagaaaaaaaagaaaattatttttttatttataattttttttaattttaaattaattttattttattcttttaatttttttaaataattttttacgtggaccaataaaattgtgccacgtgtaaaccgcgtccagtctaacatgtcacttaacacttagaatggacaaaaatattaaattgctaacagaataggaatattaggagttttaccacccaaattggggttttgccgccatttaccctgttggaa

SEQ ID NO: 359521 - DNA, 1586 bp, Cannabis indica
gtcaaaataaagtttaattataatccgatctaaaagtgctatgacaaaactgtttacattttttgtatctgttcgtattaagcattgtcttcaagttggttgtattaaaaaaaaaagttgtcaaaaattaagctcagggtcttatttttactattttagaaaatacagggtccattttgtcatttaacaaaacacagggtccaatctgtaacttttgcaaaacacagggtccaaaatagtatttaccctaatatttatatttatgctttctcaaaacttaatagaatattatatgtaattgttaataaactaaacataataataatgtgagcatctttaaactaaaattaaagtataatattaaataaaattaatatatgccaacaactggccagttgtgtgcatacttgggctctcgtgcagatggtgtgcattgcataccatctgtgccaaatgcaagtttttgctattttttttattttcatgattttttttcaaggaattaatttcaaattttttttgtgtatttttgtatttatatttttatttttctaaatctcaaatctaattattgatttgaaattaattaatttcatatattagtaaattttgaacctgaaaatggataaaatttatttattttttgttttaatttggttatcttatttttaaaatttgattattttatcttatttttaaatgtaaggtcagatattttatattttatttatattatttaaataatttttataaatgcccttatttgaaatttaaaataaaatatattttaataaaataatctagaaaattttgaaaatttaatcagatatttttgtcaacttttaaatttttattattttatttaaattaaattataaaattagataaataatatttatttatcattttattttattagacatttaattttattttatttttaaaaataagtatttaatttaatttaattatttttgaaaataatattttttatttttttttaaattaatttaattatttaattaatttaaattaaataaatcttatatctaactatccaatttgttgcatgtgtgtgttttatatattatttattattaaaacttgttttataaaacctattattatttaatctagattgctatggttaacttcttgacagatccaatgatctgatttaaaccacagtccaattgtcaataggtcaaataaataatttgtaacaggtaaattttgcaatcttctttcatctatgtagaaacctagtaacatgataggatccatccaaatcaatgtgtgtatgtgcctatatgtttgctttgggcctagatgcatatagggagcccatttaatttttgataattaaaatgaactaggttgctaaaataaaattgtcacttatgatagattttatttaggcctaattagtattgggcttattcgatgaataacaattatttaattaggattcaatttctctccttttgggccatgtgtgagcgatagggggccatagtagtgggtatgacatactgaacacaatcctccctcacatgaataactctaaatgtgaaggcccatttgcc

SEQ ID NO: 359522 - DNA, 545 bp, Cannabis indica
agacctccaaccttcttaggcttatagaccctgtcgaagcaatcatccccgagctaataccataagatttcccttaccacaagaaaacccgactaattgcattaatatctctttaaaaaaattagaatcaagaagatttggctccaataagtgtgaatggaaatgaacaccgagttgatgagtgtaattcgttcgacaaaagacaaaattctaatactccatcttcgtatctacgcaaccatcttcgtatctgaatgtttttttttttttttgtttttgactaagaggtaacatataataatggaaatgttgctcttgtatttttcttcttcttcttttttttttgaagaacaaaataattacacaagagctccttaataagatttgtctatagaaaaacgtatcccttaaagcaacatccaatcaaaccctagtaccatgtccaaaataattatagtaatttctaagaatcaataaaaattcaaaggttgttttctcaaatctcaccactcacaaaaatatgaacacttaaacttggcaaattt

SEQ ID NO: 359523 - DNA, 747 bp, Cannabis indica
agggcatcagccactacattggctttccaagatggtaaaggatctcacaatcgtaatccttaaccaactctaaccaacgcctctgtctcatattcaaatctttctgagtaaagaaataattgagacttttatggtcagtataaatttcacatctctctccttagagataatgccgccatatcttcaaagcaaacactaccgcgagaatttttaggtcatgagttgggtaccgctgttcataatctttcaactgacgagaggcataggcaataacccgatcgacctgcatcagtacacaccccagaccctgtctggaagcatcacaataaaccacgaacttctccttgtcagaaggttggggtaacactggagctgtgattaacctctgtttcagctcctgaaaacttgcttcacacttatctttccatacaaaatgttgattctttttagtgagctcggttaagggtgttgaaattttagagaatccttcaacgaactgacgataataaccagctagacccaagaagcttcaaatttttttcactgtttttggtcttggccaatccctgacgaattctatctttcttggatccaccttgatcccatctttgctaacaatgtgcccaaggaaggacacctgagataggcaaaattcgcacttcttgaactttgcatataacttatgttctcgaagtcattgtagaaccatccgaagatgttgctcatgctcctcttctgattgagagt

SEQ ID NO: 359524 - DNA, 999 bp, Cannabis indica
tctgacaccacccggagatgttttgttgccatcttgccctccgggagcatatgagacttacatgccttctccaggaggcacgtccaagttaatcctttgctttatgaagacttagctgttttattcaaatgctaaatcctttccatccacgtgtcattgtctggttggtccacgtatattgggcaaaatcaagggcaacatttacccccaagccttgtttaattgggaagtgaacaaggcttgctttagatgcctccagttgcctcctcagtttccaggcacatgctttgggcgggtgatggtgtatttaatggccctcattactgcagctattcactttttgcaggcgtcgattcgtttcttgtccatttattgatacggcgcattaatgggtgtcagacgggtactcaagcgtttctaccgccttgacgacgatcccatctgaccgttggatctatagaatgcgaacagattgcttccccagccgtttgattgtggctgatcacagctgtctctcgcatgccttggcctataaaagccaaccttctccctttatttggttactttcagcatttcacaaaattttctcaagttttccagagagaaacagaaacctttaaacaccatagatttcttacttcttttccttcgtcgttgccaatcaactctttaccgtcgatcaacaccaacgcccaattcccaagctttatgtaagtccttcgcattttgtgctttagttcattatttgtttacatggcatgcttttactattcatccactttttctgggttgaatgttgcgtttctgggaattttttgttttgagtttctatactacgcattagattcctccctttttgcttttgaattgcttcctttaatcgtgtttttgtcgaggacccatctttgtcccatgtaataacactcaggggtttagagtagacttcgtcttctcgtattttttttttacccctttttccttttctttgcttattcgtaa

SEQ ID NO: 359525 - DNA, 615 bp, Cannabis indica
tttaggtagacttcgtcttctcgatttttttttttacccctttttccttttctttgcttattcgtaatgtcaccatctgtgggattcttgcacccgattcttgtccaggaaaaccttctcaggctttctttttgacaagtgtccggagggggcctctttccagcggttaggggacccccatttccttttttgaattagggtttggtttggggcctgactgctggattttttcaatctttttcagaactaagatgtctgcatccggttctaaatcttcaaagaaggaagcgaaatgcttggctaccctggaggaagttatgaagggtccagtggcgcaggaggggcacaaatctcatgccaacgggtgggaagcagctgagcttcattctaccctgacctgccctcaccagctggaacatatcgtggtggtggaaagtatcaagcctgcgacctccgggacttaccaccggccgccccaggatgcggagacgcccaaccataactatgggggcttcggtgcctggagccaaacgcacttgatgccggggccatgcttccccttcaagctaatattaattttctggtatttgtgggccttgcaccataccaacttat

SEQ ID NO: 359526 - DNA, 494 bp, Cannabis indica
tagttatttagtattatctcccacgtaatttaaatgcaacatacggattgtccacgtttcatgaacagttatacttgaattaatcccataaagataactaccaacctatactcctataaatagaggcagattccatgagaaaaaggacgacaaatttgagagagaaggacttgtggagtgtgtagattttattattattcaaaatcagatattgtattctaaactctaaaaatattcctaataagaaggacttgtggagtgtgtagattttaactacaaaaccacgttaaaatatctggagttattatatcttttattacttattaatttttgtagaatatttattaataaaagactatttaattttgattaacgaaaatttgcgttaataagtaactaattaaatactatttaaaataaataatatatcatacaattaaaatatataaaaaataataattaaatatatctagtatgttgttgggttttatgcc

SEQ ID NO: 359527 - DNA, 672 bp, Cannabis indica
ggaagttgattgatgtgtgatagaaaaagaaaaaaagagaaagaagagagtggaagttgattgatgtgtgatggggatgacacatgtgtctgtgcatgagaatggtgtgtaagtggtattattgtaataaaataaagatggtaagtaaaaatgttgatgtaggcgtgtaggagtaaaacagtaataaaatgtgcaaaacagatttttggtgtaaaaatttctttattttattgatggatgtacttataataatacaacttccaaaaatatttaacttaagagtacattttcgcttctaatattaatcagatgatgaattggactactggagaaagtcattttttgacgaaatcggccttcaacaaccttacatatgaagattaaataaatttaatacatttaatactgcacttcaagtattgatgcaggtatgtatatgtgtatatatataaacaaagataatttgtgttcaaatatcttaaacttttaaatttgacaaagatcaaatcttaaattaaaaaaataatagttaaactcgacccctactttctttaatcttttgttttgtactttattttgatcagtgtatgtatagtaaaattcattagtctacttattattaataaataaaaaattaaaatcagaaaataaaaaataaaagagtattttttt

SEQ ID NO: 359528 - DNA, 626 bp, Cannabis indica
ttttttcctttctttctatttcttcttcctctgaaaatcctatctcattctctctctccctctttccccatttgttcatcttcttcttcctcttcttcttaacactatcaacctaaatcgtctgcgaattgttgtgatatttttaacatgcaagtatacgtatcataaacaagtaataaattcacaaagagtgatgtcgatcccataagaattgtagttaagtgctttaaaattaaatttttacttctatttggttatatcaaattagagagaaaaataaaactagaaaacaataaaaacaataaaaacacaaagcaagtaaattaatatgtaaattaaggatgattaaaagttaggattttcgatttcaattgcatctattcattataagttcaacatgattcaattcataataccaaattctatgcaatagcaggtttactaaagttttttatagttttctcaaatatataaaatctcaatttcatgcaaattttctactctcatgataaattaaacacgaaaaaggctttaagcatagatttcctataagccatccaaaccatataggtactctcgttcgatattgttgcgaaaattattaattactacgcaagtgcacgcaa

SEQ ID NO: 359529 - DNA, 718 bp, Cannabis indica
tatctaaaccatataggtactctcgtcctatatcgaaattcagctctatttcactatagcataattaacactcacttctcaaatttcgcatcaaaatcatagacagttaattggtgatcaagcaattaaaagtaattaagcacgaatgaaatagaatacatagaaactggggagaaaataaatcctattaatatcataaagtaatatcaaacaatatccatccaactctaatgaagagtttagctactcatgtttatgaaagtacaatcacacatattaactttaagaaaacagaagaaaatagagcagaaaagaatgttgaaagccctttgaaaaatgcctccagaattgacttctgtctctaaaatttgtactcctttttccctccaaattgcctccctaaaactattgaagtccacttcttttatagccaaaatatgataaaataagataaaaatcgttgaagaaaaaaaaactattctccttaggattagaagaggaggtgagttttctgttgtgtcgactgatagtattttggccataactctctcgatattcctcggaattagacaattcaagatgttccggaaagataaaagagagatatagaactttcatatcagaacatagtcgaactcaggcttgaatttttagctttattttcttgcacaattttctccattttaaatatcatctttttgtgagatattttatcttt

SEQ ID NO: 359530 - DNA, 709 bp, Cannabis indica
gttcgggttcgagtcctagtctcggttcaggtttaggtctctatgtgggttttgatctgggttcgggtttgggtttaggtccttgtccttgtcctagtcctagtttggttctagttccatttgtgattctgagttcgagtttgggttttagttcaggtcggagttcgggtcctggtctgagtttgggttcgggtctggatttcaatctaggtccggatttcaggctcccggtgtgggttcgcctcctgggtcttagtctaggttgggtccgagtccaaagttccaatcccgttctgagtgtagattaaattttgggtcgaagtccttggttctgatccttgtctagctttgagtttgggtccgagcccgggtctagctttgggtctgattctaggtgtgggaatttgagttctggtcccagtctgtccccgggtttgtgcctaggtctggaccacgatctggctctagttttgggtccaggtccatgttcggataacgagtgcgagtccaagtttgggtctgggtcaggatctcggtccagatctaggtcctgcatttcgatcccattccgtgtcttggtccgagtccaggttcgtatccagatccctatcaaggtccaagtctgtgtttgggatcaggtcccagatttaggtccaggtccgggtctcagtttcggtctggttacacgaccgtgtccgggcccgagttc

SEQ ID NO: 359531 - DNA, 1334 bp, Cannabis indica
atataggctacactttatatagaatagatatagattatttatatagaattacttttttaataggtattactcatttaatgggtaactaaataaatttaactatatatattaattttaaaaatattaaactattagattttggtccaatagtgaataataaaagaaaattttaatgttatatttaatttagttacttaattaaagaaaatatcaaaaataaatctttttatactatatcaaaaatatatttataaaaaaaatatttaagtcaaatattattagaaaaatttgagtaacagtcaatatatatatatatggaacacttcttaatgtatatatttctaaagaatacatttgaattgtaaaaaagaggttttacaaaaaaaaattgtatttgggataaaaatttgcatttatactgcccataacaaaaattatatttgtactgtttagggtttttttttttttttccttttaatactataaacaccgaaaaaaatgaggcttctatcttccacccctacaaacagaactaccatagcaataccaaaacagttggaaaacaactattaattttgacgagatgaagcagaaacattaaaaccattaatactggggctgtcagtttttctaatgttgtttttgagttgttccactattgtttcgaatgtttaacaaatattagtttcaaattacacaagttaaaacaaccactaaatatttgtttaaggtaatcagaatgaaagaatcatgggcagtaatagtcttacctcccattgaaagggtaaaatctggaagaccaaaaaaaaaaaagaggatcaaagtttactggcaaaataaacaacttaacaaatgcatcaaaatgtggggagttggggcacaacaggaaaaaatacaggagaaggcataaaaaataaaaagatgcagaacaactaaaaaataacagtggaccacacacgaaggaaaactgaacatgtattggagcataagatactaaagaaaataatttacatataaatttcattatttttctattacaattaaaaatagagtagtacaataacactaaaaaaaattgataaagaaaagaaaaaaaataacagtagaacaaaattaaaataataataaaataataacaaaataaaccaaaaacataaaagggtaagttggagaaagagggtgacttgtaagtacggtagagatgggagacaacactttgagaccaaagagattgaagaacatgaacttagtgggagtttttgaaagatttctacaagaagcccatcacagagcaattatgcaagccttacttcgggaggaagtaagcactcaca

SEQ ID NO: 359532 - DNA, 869 bp, Cannabis indica
aataaataatataaatgataattttatttgtatgattaattataattatttaataattaatttaggcatttattggattgaaagtgcaaaaagtagtatttatgaaaaatagataaatggttgagaaaaatggcaaaaatctaactagtgatggacacacataaggggccgaccacttaaccctatttttaatctatttttatcattttttattccaaataattcaatcctaaccctaatagaatcaatataaaaagaagagtaaggtctcactatccaattatgtagctttaaacctagtttttattttgacagacaactagtattttaagacttagcggaggagatataatgacaatggagacacttagcgtataatgtacagtatacaaactaagtacaacagatgggtgagcaaaagtgagagatagcgaggcgtctacctcgttgtaagaaggcatgcacgcgaaaaagatcatctcgccaccagtaactgtagttgccagatttacagtaaaagcgttatcaatcttggaaatatatatgacgagctccagctcgctatcatgattaactctactctattcccagcgaggcattccaatacgatatggcttacaatatatttaatacacattcgttttaatccagtaaaagcgggatattcacagttgtgaaatttaaataaaaaccgcatttacttagcgtgatatgtaatcagatcccatttcaagggataatcgttgtaaaaagtgtggtcaactttgtaaataaactgcctactatgtgattataaatagtggcaggttggatcaaaaaaagagggacgaaaaaaaatcatacaaaaaaggccctgaaaaactatcaga

SEQ ID NO: 359533 - DNA, 605 bp, Cannabis indica
aaaaaataaaaaaaaaaatacatgccatatgttaaattttagatatgaaataacaaatatttttagtaacctataaaaataactgacataatgaattttattggttacttcttttttagttaacaaaatataaaatagacaataaagtaacttttgattccgaacatttattcgataatagtgaaaaaatctctctttctatatatcaaaaggattatctcaaaatatagatgatactggtactagtcttgagctcaaacgagtagcggtatagttaaaattattttttaattgcttccttataagttattttagaatacaatttaattatttttatttattgaataacaaataatttttagtaaaccataaaatgtggttggtatatttattttttagtaaagtttgttttttattttttatttttaatgtaactcatagatactatttggttttctcacaaattattttatgaactattaaattttttatataaaataagaatatttagaatatatattgtaaaatctgatgatagataagaaaagacttttcaataacttataaggtattttttttgaaaagcaaaactataaagttgattg

SEQ ID NO: 359534 - DNA, 527 bp, Cannabis indica
atctgcgttaacagtttggtgctttcattgagagcctctgtgaaaaggctcagaaaaaaccctcccttatttggaagaaaacaaccttctacatggctgaaaatccaaaaaatgttaacaccccgcatgacaaagccaaccatcattttggagaagagcccatgggctccagaagatctaccaatccgctgtccagaaggaccacccattccaggagggctcaacatgagggtggccccagggggcggaccacacattcccagaaaactcaacccgacgttggtcttagtacgcgaacaacatgctcgaggagaactcagcgtgggaatcatcagaaccacgggacgagggatgaagagctcaatcgtggaggtgcccagtctgtgggagaaaaaacttatgaaacggaaagtcgtcgcctgagacgccatctggagaggcgcagcataggcacgccaagttgaacgtgaagcagcttaccgaggcggcatggggacgaaggctcaaaatcaacctgaacctggagt

SEQ ID NO: 359535 - DNA, 1024 bp, Cannabis indica
cattcctaagtatagatgtaaagaccgcttagcttcaatttagaaattagtagataattagggcttaattataaaaattatttattagtattgtatttacgatgatttatttgaatttagaatgtatttttatgtcatatatagaaatttcataaattttgtatgttttgtgcccaacaatattagaacggggtgtttggctattagaatcacatcctagtatttttagtatagcaggacaataaagttagatattgggaatgtcgggaatagtcgggattttagaatttctcgaaataccctaagtgaccttttatgacttgtagtgtgggaggggcaaaatggtcattttgccccatttagccttttttccttatgtgaaaggaattaaataatacaatcagtttttataaattattttgctgaaaatgattttaataaaacctatgttacttcattatttgacaaaaaatagaaaattatcaacaaaaaaaatctcattttctctcaattctctctctccttcgaaccaacctagaaccagctagggttgggtttctctgcagcatttcaagcagattatagcaggtttttagtgaatccaagctaaggtaacctttatgcaactcctttagtttcttgatttttaagaaagtgaagttttgcataattgatgattttgctactgttcttgttgtggttgtttgtttttgttttcagaggtttaattatgttagattaggttgttttaagcttgtgttgatggatgttagtaggtttaaccaagttttgagttttagaactcaacttggagctttaatggtggaatttgattctgagcttgtgaaagtgttttgttgctatgaatatgttctatgtggtctaaatagctgttggattttgtgccctaaataaaacccatttcaatataatcagatttacttattaataaagataagaaatcacattttatgttgcatggtacacatggtttatttcatgattatatttaatgtataaattc

SEQ ID NO: 359536 - DNA, 844 bp, Cannabis indica
gtacccaatagattaaagaacaagaatttcaaagaaaagttaaaactcaagaagtttgaaattttctcaagttagggcaaaaaatttcatgaagcttagaataaacaagatgaaagacaggcattatgcagttcagaaagcaagcattatggactgtaaaaacgcatgaaatcatgacaaataagaatcgcagagtttctgaacctagggtttcctaaatatttttctacagcaaagtcgaaggtgcattcgaaaaataaacatgcaaaaataagcataaaggaaatcgagaacttactcaagagtcagatatctggattcaagcaacgtcaaaccaacgagcagtttcgatgaaggcacttcagcaaacttgaaaccagaaaaaacctctcttttcgctctgagctcacttagcaaagaaggatggtgaaaatgagtttatatgccaatgctctttggtatttataggaaagtcacgaaaaagggttaatcatttcaaagaaacctcaaacacctcgtttccccctaaaagcgaatatgggaagtaaaaaataaaaaataatcaagtgcagccgtcaaccgtggtgagagaaaatcaaattttgaaatattaattgtcagagcattaattagccgaaaaccgaaaggacgcccagtcaacctcacattgagtctcggacagacgcgcacgacatgtgtccccatctaaaggcagaagcagctcggatgaagtctacacgtaacttcgaaagtcccgtacagacttggggggcaaatgttattccaatttttgcactctgacgtggcatcacacgatggtgacacgtggaatcaactttgagta

SEQ ID NO: 359537 - DNA, 764 bp, Cannabis indica
tatctttttaagtattcaaagttggaaagattgtttttttgctaaatcatttttgtcttttgctttgtgctatagcatctattctacataaccaagaaaaagaagacttttttaaggtatttaaagttttttcttaattgggctctttctaaagtatttaatgtataataggagaaagagggttattggcattggctccaccacaccaagggatagatggtgagtggagtgaccggtttggtgtaatagtttgcagatggaatgagaggaataacagaccaaacactggaaagtggcaattggaagaagagatggagctgttgttctgagtatggtgaagatgcaccaccttgtagaacaggttgtcatgtttcctatgatgatggctacactttgtattaatacataatcatatgaatgagaacataaagatttgtatttgatcaaagcttctgtggtagcaattggaaacaaagtcaaattatagattatgatccttgtcatgtgattattactttccacagccataataggtactagagagcttaaatcctacaaaatctaagaccaaaaaagctagactggaggatcggccctaagaatatataagcttaaggcgaattatatctcgggaccctaaaatactatattgaaaaaaaaatgtcatgaaattcgagccctataacattgtataatactataatatgtcatacacttcaactaactaagactatgaatatttttgtttacaatacacttaattt

SEQ ID NO: 359538 - DNA, 601 bp, Cannabis indica
taagatgctcaggagtatcaaaaagtcgtgggcagaagcgttccgaatgccccatgagaccacaaataaagcagaacgttgggacgttttcatccgaaaaatggcgtagaaggagcacccatcacgtttcttaaaattcatacgtcttttcaagggtgaatcgagagaaatagtgacacggatccgcagaaattcacgccaaatgcctgtgaatttgttggggtcagattcgagaaacttaccaacgtaattaccagcatctttggccattttcatggtcgagaaaccggcctgaagatcatgaatctgaacccatagatcaagtgtgttgagcggcacagccctaggattgtcaccttcgttgagacgcttgattatgagttgttttcgatcgtaagtccacggactgcctttgataactcgttgaatatcgatctcatgatagaattgaaacaaaaaacaattttgatcaagttgtttagcgtacatacctctgtcgggtttccacaaatctgccataatgttatgaaagatacgaaaatcaaagatctttccagttaacagccgcccaacgagataccatggactgtcaatgtgctga

SEQ ID NO: 359539 - DNA, 803 bp, Cannabis indica
tgagctcaggttcactccggttcagcttttgcctttcctttacctacacatgaaagtagaactgtgagtcgacagactcagtaagaaaagtatataacatatcatataatttccgactttatttaggcgcccatacacctatttacaaggcttaatagatgagtacgaacgtttcatactagggtatagccactataccacatacactacgtacctcgatgtacgagtgttggtagggtttgtttcataccctgagtacgactgagtgatataccacgcactcctagtacctctccgtacttatgctggtatcacggtactctcagataacattcactataccaatgcactgtataccataactgtataagtgttggtagtgcaactaccattttaagcatgcatatacatacactcagatatctatatcacacagtatatacagttcttaccttctttcaaaattcaagtgtgatgggcgatctgaacgaaaagtctcgtgctagatggatgccctaatcacattaatcaaaacataggtgagtgacacgctaaaccacttttcggggacttaaactttgaaactaagagtttccctatcgataaataacatggaaatacactaaatatctcaaaaataggaaaaactagggttccaaaaactgccccaactggcagaccggttcccaaccggaagtccgattccaagacacaaaccggtcgaccggttgctacaggtccccaagaactgaaattccggttttgtgccgggaactcgaaaaatgctcccatgacctcaaaat

SEQ ID NO: 359540 - DNA, 739 bp, Cannabis indica
gtttagtgtcctgctctgataccgattgaaaaaccaattttttacaaatgccaataattatactaaatttcagtaaaaacactactgtaacagtctgcagcatcagaatataattctatcactgcataacacaattttgcagaaacaaatcagaaataaatagtgcagaatttaaaaacttgacctaagagaattgtacgtgatatcaatgttctttcaaacactactagtccacgggaccacgctcaaagaatgaaatcaattagtaatgtatcaaagtttacaaaagtaattgacttaaacaaatttagactctctctagtgatttgccgcaaccctttgtaatctgatctcttaaacacaccaagtagtgaactcccttcagctattgatgtgtgcttatttcctcccgaagtaaggcttaaacaaatcttatcccgaagatgtatgctcacttcctcccaaaatgagatttggaaaagtcttctcccgaagacctacacttgttcaaagcttctcttcaacctattctatgaataatatgagatcataataagaaaactaaaacgtagttgaacactctaggtttttacaaatgaaacactcttctcacaaggaaaaatatgaaaatatgagactagaagagataaaatcgtttggctgctttctaggtcctatttatataacataccaaccctagagacagccacaaaaacgatttcccagctatacaaaactt

SEQ ID NO: 359541 - DNA, 992 bp, Cannabis indica
cattttttatcatattttattccaaataattcaaccctaaccctaagagaagtagtataaaaggaaaagaaagtctcattatccaactaatgcttcaaaggcaagaaaatctagctttctttctctctaggtttccgagacttcttcttcttcctttcttctctattttctaaatctttagccttcttcacaaaacaaaattaagccattagtcattgagtacatgctaagaaataacaagttagtgctcaatcatagtatgtaagattgtgaagaatccaaacaacaagaaggagaatcgagcttagatcttggtgatgctctgctacagaaaggatacaagggttagagatctgagcggaatgaatcatttaattccgctgcaagcactgcaaggtttctcataccttttatgtgttttttaatcgttttagaaattcatattaggatgttaaaaatatacttgttagtaaatctagatcctggtgaaatatattccaacaactggccttagagccatggtaattgatttactttcaagtaatatggatttaaaacgatgtgtgggtgatttggatgtgattcatgttgatctatgtatttattgatgattgattgatgatcgcgaaatttttacgtaaaataattggattttcgttctagaattattttattggatattatgaaaaaaattaagaaatttaattttttacagaactcgatttctattttattggaattagttatgaatttttgaaaatcaagaaaaaatcaagaggtgtgtcaactccatgcgagcgcggatgcccatgtttctcgggtgcacgcgcttcaaacatggctcatgttcgagttttcttggtctgatgggtgagatttgtctgaatgggggctatgcgcatgcgaaaatactgctggaagcatccgtgtgcgtgaaatcagccccagtcctcatgttgcatgcgcccgaatggtatgcaatgcataccatc

SEQ ID NO: 359542 - DNA, 490 bp, Cannabis indica
aaatatgatcgcccaaaaccacgtcttaaaacgggtagaaaaacacatcacccgcacagagacaatcgtcaaacaacaatcacaagatacgatcattgaaaagttgacgaacaagattcaacagacgcatgacgaactcatggccatcataaaatcaaactctgttccaatgtcattattcttggctaaagaagcagaaatgaaagccctcaaaacccagtatgaatctctaaaaaagcaattttttcaacgagaatcataccctacggggcctcagtcaacactctttggagcaaatacaccaccagtaccatggcagttctcaaccatgccaaacacctctccaacatcattcttctcagtctcttcgcaagaagactcacttctccgacttagacgaatgcttgacaaaaatcaacaacaaaaaaccaaaaaggggaagaaaaaggaaagcctagacaattctcctccacgagcatccttcctatcc

SEQ ID NO: 359543 - DNA, 710 bp, Cannabis indica
gatggttggagttggtgacttgatactcgtgaaaattattcagttaaaagtgtatataaattcttgcaaaaaatttaagggtgcttggtgccgagatgccaatactgatttttggttttattgttcaagatgttaggaatttaattttagttttatcttttgttaagttatgttttattcaatgatctgcaaataagttggctcattgcttagcaagagactcttgtttctctataggttgtgtgcttcaatcggaagattgttcctctgaaatgcgttctattattttgaacgaatttattaattaataaatctgcttatttattcaaaaaaaaaaaaatcacttaattaacaaaaaatgcataaaaaaaaggtaagaaaatcaacggcaagattattttataagtgaattcaaaataagaagtttaaatgacatatcaattatttaataagtaaaaaatgcataaattttatgtaagaaggggcatattattataaaaatacttataaaggactaaataataaattattttatatagaaaaaaataattgagtattggggtcgatcagctgccccatcataaaaccaatgtaacagtgcccctaaaaattggatgagaaataaataaattaatattataaaagggaaatttgatattatatgcttaaaattaatttatccactaaaaatatgctagcatattttgcat

SEQ ID NO: 359544 - DNA, 863 bp, Cannabis indica
aaccaggtcatactgctgcaatttgccattataggttcgacaagaactttgtgactccaagaactggtgattcgaaagtatttctcacagaaatagaagatcaagacaatcctcaagcttactcatctcatactgtgcctgaatttcttgatgattacgattggtacgcggacacaggagccaccaatcatgtagctcaaggcatggaaccacttgactctgaatcaccatacttgagtcctgatgctcttactgtaggtaatggaaagcaacttccaatctctcatgttggtaatacctctctcacctcttctcatctccctttaagattgaattctgtccttaaagtacctaatattactaagaatcttgttagtgtcttacaacttacccaagataaccatgtattcttagaatttcactccacctgttgttttgtcaaggacaaggccacagggactgttttgctcaaggggagggttaaaaacgggctatacacactgtctcaccgatcatttagcacaccagatgtccatctgcagtgtcaagttgccactaccaatcctagatctactactctttctcttactgattgtacatcagctaaagaaacatcttgtaataacatagctgatacatcaactattacttcttgtaatgattcctctattaataaaatcagtgcttttgagactaattctcttactcctcatatggctcttgttgctaataaaaccagcattaatcaatggcatgataaattgggacaccctgccccaaaaatacttgccaaaatattagcacaaatgaatatttctccaaacttaaaagacctgaaattttgtgaagcctgtaaacaggga

SEQ ID NO: 359545 - DNA, 1232 bp, Cannabis indica
aagcagcagaacacaaatgaaaactacgccatgcgacggtcttcgccaaaatcattccacagaaatcaaatactttaccaaaaactctaccctaacatgcaagtgaacatcaaaagtaaaatgtatccaaaaaacttacgtaaaggtcgtgaactggaagttgataatgatcgacggtagaatgcagattggcaacgacaaagaaacaacagtaagaaatctatggtttctgaaattttctcaatggagtttcttgggacgaaatagcgaaatagtgaaagtaacccaatgaaggaaaaatattggcttttatagaccagaaggggtgcaaggcagctgtgatcagacaccatcatacggtgggaatcgtaatcgattcgtattctagaaatctaacggctgagatacatgggtgccagagcggttgaaaacatttgagtacttttctgacactcggattaaatgtgctggtttctcaatggacgggaagcgaatcgttgcctgcaaaaggaaataaatattaatgatggccatcataaatgcaacccacgcgcttaaggcacgtgccgttagaccaacaagctaaccggaggcattaagcaagcctcacttaccctttgctaaatgaggcttgggggatagaggttgcccttattttttcccaaattacgtggacgcagataaatgtgacacgtggatctggaagaaccatcactcatgaaaactaactaagtcttcgacagaaaaaaggacacctcagagaaggtgcctcccggaaaagagcataaggcccatctttatgctccgggaggctagagtcatgctaaggcagttctgggaggtaaagagattactcgtacaatcacttcacatttaatgccgcatgggtgaagacgtattgaagcctccataaacgacatgacagatgacttaaccccccttttacgacgattacactacaatcgataagtctagtgacgaatacattatgagaaatcacatcagccaagagtagataaaagattatatccacctaactcctaagatacctacggtataggtcatgtatttcctattttgtatctgctaggaatatgtgcccctatgaagctaacacagaaagacaagcgatccatttctaggaatcccccagaaaaacactataaataccccacaaacagattgaaaaggggtcgaacgattttgtttaaggaatcaaagagagaaaatag

SEQ ID NO: 359546 - DNA, 680 bp, Cannabis indica
gttaaaaaataattaatttacaaaaaaaaaaaaaaaaactttcaaaatatttttattttaacaagatttactatttcataaatagttatattataaaactaaataaagaatatatttacaacaaaaatacttaaaatagtttgtagtacttaaagtacatacccaaattattcttttaggagtaaaaatatttaaattataatatttgtactaaattgtttgattagcatcaaagatattcaaattcatatgtttatagatcttaagtaactaaattatttcattaataactataaaaaaaaattacaaaaatacggatttacagtatttttaatattttcaaggactaatttccttatttttttatataaatacaaacaattattttatgatttttttgtagtaaccattattttatggttgttctcacgttgttgctacaatatactatgttcccgcaagttgaatataatgttatctttcggaaaaaaaaagaaaggtaagtaagaaaaactgaaaaaacatatggaaaaatgtaaaaaaaaaaaaagaaaaaaaaaatgaaaaattacaattttgagtattttgtgcaaaacttctattattttttaggtgccttacattgtagtgtcaaatctgttaataatttaagtactttaacaataaaaaaaaaataacaa

SEQ ID NO: 359547 - DNA, 621 bp, Cannabis indica
tctattattttattgttgcctaagctaaatactaatgaatattatttattttaaattacattttaaataaaatgtaaaaaaattacattaaaataattaaaagaattataaaagtgagatcgaacccgcgcgaagcacggcttagttccctagttaatttataaaggaaataaattcttaagggcaaaatagtaatttatgaaatttgttttgtttaactatgaattgtataattaatagtgtttaactatttaattttattggattaaactatatcatttagttaaatataatattactcttaaataatattaaagagataaatatattattttagaaaaaaattatatttattttaatccttgtgaaataagagaataatgagaattaatcaattattatttattaaaaaaataaataataaatcttatttatggcaaaattaagaaaataatttttaggccttaaaatatggtcattatataaaggcccgtgattaatttagtttaattattttattgttaaaaataatttagattaaatttactaattatcttttaataattaattaaatgaattattagataattatttattaaaaagataataattaaaataaaa

SEQ ID NO: 359548 - DNA, 1528 bp, Cannabis indica
agatcgctgcagagactggtcgcctctccaagactttgatagatcatgggtacgtcatgtccgagtttaggggcatggacgaggccatgaagagtctgagagacctggcggctgagaggaaggcgttccgggaggaggcccagtagagggaggcacagtcggagaggaggcccagcagagggaggcacaatcggagaggaggcatcaggaggcgttaaaggtcaaggcggaggagctgaagattcaggatgaggctacggccaaggcaaggcgtgagctgagggaagccaaggaggctgtcaaggagctgactgccaggctaaagtctatggaggagctgcatcaggaggacttgcagtcgacggccaatttgaccgttgaggtgaaggagctcagggattttaaagattaggccctgaagaaggctaaaagagatgagcttttagcccccgtcgtctgcaagcattgcactaaacgcttcaatgacggcgttttcatggcttggcaaactaatggccaaaacctcaaactcgacttctatcccaagcttgaggaagtccttcctcgcttctgggagaaaagaaaaggctcgatgccttgcttgaggagcgcagggggcctcgtcttctaccctgcattgattaagccaacaatcatccgttactactatcactatcttttttttcttttttacatttacagtttttctttaaggggagacaattttaaggcccgtcctcaggcccttaatattttttagagcctgttattgggtctgaacatttttatatttatgcttaaatacatattttgctttaattttgctaaacttttggcctgttttacatttgtccatgtagtatgccttactgcccccttgagtggcatgaaattttttttttaaagacactcagctttacgaatataaatttggaggttgcatatactttttggtacaaatttacttgatgaagcctaagtttacattttctaactattggtaatactttcggaggtgatcagcgttccaggccctaggcaccatggttccgtccattcttttgagcttgtaggtcccggagccgatttcatcctcgattttgtatggtccttcccaattaggcccaagtaccctcactccgggttctagagtggctgggaagattcgtcttaggaccagatcatgaatagagaattttctacttttaacttttgagttaaagtacttagtcactttcttttggtaagccgccattcgtatttgagactcatcccggagttcgtcaatctgatccaacgcttcctgtaataaagctttgtttgttgttggatcataagttgttctcctgtgggatgggaatagcgtttccaccgggaccattgcctcacaaccgtatgccattgaaaatggcgagtggctggttgtggttcttggggttgtccggtaggcccataacactcttgggaattcttcgagccaattgtttttgcaggccaacaactttttctttagagtgaccttcaggat

SEQ ID NO: 359549 - DNA, 558 bp, Cannabis indica
aactgaccaaaaaaaaaaacaagtacaaatgttgtttccagcgtgtcacagtataaatgtaataaaatgggaaaaatcagtagtgggtgtaaattttccttctcttttggaccccgcctgcctcgtcagcgccagttgggcaccatttgtctgaactacttgcatcagcgcctatgtggcgcctctacttccttcagcagcacggccacgtggcgctgccccattggttccgcctacttcagccatcagctttctctcctttctctgaagcccaagggtccatcaatcaaccttttcctccctttcacgccagaccccatacctatcatacttattcaattaattgaaatatcaaatcatgattttgtcaataacaataacaattaacaaaataatgataattattaattttagaagtagaaaaactataacaaaaatttctctcactttcttttatattttttctagaattttatcggaataatgagcataatgacataatcttccattctatatgcaatgtgagattatttgtatcttaatttcatttttagttat

SEQ ID NO: 359550 - DNA, 573 bp, Cannabis indica
gataaaactggtttcagttatattcattgtttatcatttatgtattgttatgatttttcattagatcaaactagtttcactggattcacaagttcgaattgagtttcagaggttttgagggttctataatggggattcttcattttatgatgttattgtatcatttttatattataattttttgtattgtgttttttcagtatgatgttgataaaacttgttttttttttattttctgctttaattgaaataattagtttcttttaatgttgatgaaaacggtttttaaaatttatatcatttttacattatattttgtttgcattgtatttttttcattatgtttatgaaactggcttttattctgcatcttttaatgaagaataatttgcggcataacctccttaagtggctacatttttataactaaccccaaattctaaaattttggtggtaaaaccgtctaaactcatgttctgttagcagtttaacatttccattcatttttagctgttaactgccatggtggaatgtctacgtggacacagtgtacatgtgtcacaattttattgg

SEQ ID NO: 359551 - DNA, 538 bp, Cannabis indica
gatatggctaaggcttttgatcgggttaattggcactatttggagagtatcatgtttcattttaattttcctcctagatttgtttgtctaatcatgaaatgcatttctactacctctctttcttttctgattaatggttctgtttatggatctattcagccttctaggggccttaggcagggtgatcctctatctccctatctctttattctctgtgctgaaggcctttctgctcttcttaggacgaagcaagatgctggtttgcttactggcattgctatctctaggaatgctccttcattatcccacatgttttttgctgatgatagccttattttttgcactgctaatcgtacttcttgtttagctcttcaacaagtttttaatgtctattctaggacttcgggtcagactattaatttttccaagtcctctattctcttttcctctaatactcagcctgatattcgtactgttttcttcactgcttttaatcttgaagataggccctttatatgtaaatatttgggccttcctc

SEQ ID NO: 359552 - DNA, 936 bp, Cannabis indica
ctttcttgccctttacttcaaattatgtcatgaacaagttgacattcgactttcacgagttgatcaacaaccttcaaacatttaacaatttgctgcacaaaggaggaaacaaagctcctagttctagtaatgctacggctggtacaacaaagcctgaggcaaacattgcctccacttcaaaacccgcaaagaagaagaaatgaaagaatagcaagaagcctcttaaagctgttaacacggttaataagaataaaaaggctgctaatccaaaagcaaaggataaaggaaagttcttctattgcaacgaaaagggttattggaatcccaatgtcctaagcttttggcaaagaaaggtatttttaactttgttgtaaatttatgtgttttagagaattattatcccattcggttattaattctagatctacaaaccatgactatcttcttcttatttcatatccagctgcttaaacttggattgatatcctagcaagttgacatggatagttgggcaaaagggtgaagattttccaagttaaagatgaagcttgtcttttagttaatttttgaattaattgttttagttatcgaacaatttagtttcaattattagtatggaaattttatttcttatttcatgttattgcagacaattcattatgacatttttgagaatattaacaaaattttctctttaagaggatttcattatgaattgctttatgaaattgagttttatattctttaacttatatgccaataccattttatgtttatatgtttatcatgctttatgtgttttgtattttattactgatacaaaatatatggtattttaatctttgaaaatagataatatcacataaacacttagattttaaatcaacatttataaataattgtcatttcttaagcaattattaagattttgtttaa

SEQ ID NO: 359553 - DNA, 908 bp, Cannabis indica
caaaattatataaataaataaatatagattatcaaaataatatagttgaaatggaaataactgctttttttttataaaatataaattcatatatagttaatattgatagtcataaactttattatttttttcttataaaaaaattaaactatttgaaaatgggtagtaattaattaataaatcaacaatcatataaaataaaaactactaaattgacacaaatacaattagttgaaaattattatttataagagactatttgagaagtcttaccgttaatcttctattacaatctcttagtcaactttcacacctgaaaacacacatcaaaatagttttttttccaattttttttcacgacaatattcattatgcttgcaacatcatccctgtaaatttttgaaattttttgaatagcttatagtgccgaaaatatatttgaagttttttgaacacgcttggtaaactaaaatatctggaactctattttcggtactgtaaattatacggaatttttcaaaaatttatagggatgatactgtaactataacgaataccgctatgaaaaataatttgaaaaaaatatttcggcatgtgatttcaaacgtggaaaatgactaaaaggttgtaattagcactcctctatttataatccacagtataatacaacaataatttgtaaagccatctccaatgacaaattaaaaaccctaaatttaatgtagtttttttcaccaaaaatctccaacccaactcttaaaatattcttattttagtgggaagtctacaatgtcccactaataatgggacactgtagaccactacattttacttttatctttttttttttttactttttttacttttttaaaattaaaataatcctttttaaaaataaataataataa

SEQ ID NO: 359554 - DNA, 1108 bp, Cannabis indica
aatagagttgggtggcaaagacatgaactaactcttaactcgctccctaagcgagaattggaacagtctcaggcgaatggcatcatcactaactcggttcaccttgaatgtttgacataactccacgaagttagatagatgcatgtttagatcttctaagggcaatccaccaaactggactgaagattgtaccatttggagtatggctagccttatttcaaaattgttagcttctacggcgagtggtcatatacaagactaaacccccatcaatgttggaagaacatagccctcatactacaatcaggtggattatgaccgttttcctagtcttccacgacacccccattgttgtcgtttgtggccatcacctcttattggtcaacccttaatgcaactctttctaacctcttgttctttctattctttctataggtcttctcaatctcagaatcaataggcactcttgaacgtggtccttgacgtcgcataaaccaaaagcacccgagataggataagaaaaattgagacaaaatagttagcaagaagtaaggaagaaatcaaagtagaatttagtctaatttctataatatcaatttttaaacaattttccagcaatagcaccaaaaacttgttacgaaaattataaactacgcaagtgcacataataaagtagtattcacacaggtgaggtcgatcccacgggaaattgaactaaataccactaaattagacttatttttctatttggcaaacaataatattgaagaagataaaagaaaagaaaaacaagaaaataaattaaagcaataaaaatatttaatcaaggaagggaaatgaatcttgttgtttcagttactcaattattaatgctaattactattcctctttctttaagtgaatgacagattataaaattaacctaactcttttaagatcttttaggtcctaaatcatatgttatctattgcatctctgagatagactaacatacaatccgcattaaacaataatatcaatgtcacataggctatgcaaatactttcattttacatcaaaacctagcttatcaaattttagcattgtcaatactcacttttcaaatttt

SEQ ID NO: 359555 - DNA, 1187 bp, Cannabis indica
taaactaagcggtctttacagttcacagacatgatgacgttcacttgaattcaggaacgaggtaagaatagcatagaacatattgtatatatgcgaatgtatgtatgtgtgatatatatgcatgcttgttgtgattcgtacactaccaatacttgtacggtagcggtacagagtgcattggtagtataatgtctaaagagtacgttacggtgttaccgacacaagtacagaaaggtacagggtgtgtgtggtacaacacttagtggtactcggggtacaagataaacctaccaatactcgtacattattgctacgtagtgtatgtggtacagtggctgtaccctagtaaagaacgttcttactcgtttgttaagccttgtaaataggtgtacgggcgcctagatacaagtcgacactatattatttgtgacatgcttttcttactgagtctgtcgactcacagttgctatttccatgtataggtaaaagaaaggcaaaagctaaacaagtttgagccccgagctaggatgatgtttgtacatgtcatggcgacgcgacctggagtgttcggtctcgggtttattttgtagtcgttgtgcgaccagatttaaatatattttgataatgttgtaaaagtttaaatacgagatcctgacttttgtaaataaatgtataaaaaattataaagtttagcaattaaatctaaagttttaattagacacgatttttaagaaaaatcttttgaatagtaaagttgacactgtaattgaaaaatcactatagcgcctaagtaccaggacgttacatgtatagtcgagcttgtcacataacggagataattggatgggagaccaaatttgcaaacagaaatgtagtttgggaggtttaggaaaaaaaaaaaaagtttagatggttagttgttataaagcgtgaagtttgcgaggtttagctacaaataactcttaagtttttaacattaatttaaactataacctttttatccatgaaatacacacattatacatttattttttcaaataaattacatgaacaccgaaaactaaccataataataaaaaaataataaataaagatcgatttggatgtgttaacatgaccaaaccgatgaaattattggacaagttaaactttttttttttcttttttcattggacgagttacaatta

SEQ ID NO: 359556 - DNA, 589 bp, Cannabis indica
aggtcaggtagcttatcggttggctttgcctcctactttgtttggggttcataacgtgttccatgtctcgatgcttcgaaagtatttatcagatgcaactcatgtcttaagttatgaagacattgagcttcagaccgacctatcatatgaagagcaaccagtgcagattttagacagaaaagaaaaggtgttgcggaacaagattattccgctagttaaagtgttgtggcggaacagcgaggttgaagaagcaacttcggagttagagtcacagatgcgggaattgtatcccgagcttctcaggtaaatttcaaggaagaaattcctataaggcggggatagttgtaatatcccggaaaataaataatatttagataggcatgttttattaaatatgtaattattttggaaacgaagtaagattatcttacttgggataattattgagaatttatttaataaatattgggcccgtcgattttggttagaaatatcacgacaattaaggaagaattattttgagaatatttcggattaggttagaattttattagaacttcgggttgatggattagtgaaattaccaaaa

SEQ ID NO: 359557 - DNA, 812 bp, Cannabis indica
cccaacatggccattttgctctttcagtcgatgctgcccttgatattaatcatcttaaaacaggtcgaggagctacacttcacaacagttagaaccaacaaattgcaagtttttctatctcaaaatggggtgcctcttcacccctttttgctgaagcccaagctttgttagaaggtcatctttagtgtactgcaatcaagctccctttggcctccattgaatcagattgcttacaattaatctcaaaggttaagagctattggaaggacaattctgctttgtccaatgttgttgacttgattcgggaatccttatcctcatttcctaatgtttctttctaccacatttcgaggaaaaataatggtgcaacccatcgaaatgctagagaagcttcacggcaaaataagaatcgggtttggagcatctagcttctctttcgtgctttgtaactgtctcgtggtttcctttagtctttctttttacgatttagtaacttcaaaaaaaaaaaaaataaccgatggtgggcaatctgatcattacaatttgcgctagtatatgaaaaaacacatccaatttactatccacgttagatattctcttacaagaaaatatgagtagacttttttttaatatttgtgtacatgataaaataatctaatattttctatagtaatatctgctagggaaaaaaaaaagggaaagataaaaccatatttggaattccactgttggataaattcccatactattgtcccataaataaagttacaaggaaaaataaattagatctatttacaaagcctcaacagacc

SEQ ID NO: 359558 - DNA, 514 bp, Cannabis indica
actataccaacgcactctgtaccataaccgtacaagtgttggtagtgcaattaacaacttaagcatgcctatacacataacatatacgtacactcagatattcatatgacacattatattcagttcttaccttctttccgaattcaagtgtgatggccgacctgaacggaaatcttgtgctagatgggtgccctaatcacattttaaaacgtggtaagttacatgattaaaaccctaatcccgggaaacccaaaaccttaaccctaggttctgttatgctttctatatgttattctaactctagaaatggggaaacacccaagcaaggcaccgcaaagacgaaaattgcgaaaatgagatgcccggggaaccctgccaaaaccggctagccggtttttgagactctgcaaaccggctagcaccagagttcccaaaacctttcattctttgctcaattctccaccaattgcaatgaaaccttctagagtacctaataagggtatacacaatatat

SEQ ID NO: 359559 - DNA, 530 bp, Cannabis indica
gtgcatcttgtttttcggtagcccatcacaaaagaactccacaattaagcgtgcttgacttgggacaatttcaggatggataacctcctgggaagttttcccaagaagtgtgcgagtgaggacaaagcacactggaaacactcgtgacatgaagcagacagagtgacgtactcgtgtataagagccatcattctatgggtgtaagaacccaatagagacttgaagcggggacattacaccaatcaggcccttaatgctttattttttaatttaattaggatgttgcttttggaatcaattgattttatagaatttgtaatcttttttattaaccatagttagaacgtggtattcatttaaaagtaaaagaaattatgttattttgaacagtttgggctttcataattattacaagactatgggccttaattagtagtaaataatgttagtattgatcgagggaaatttacaaaaatactggaatttgggttaatttttacaaaaatactgtcacacggaaatattttcaa

SEQ ID NO: 359560 - DNA, 556 bp, Cannabis indica
ctctttttttagttaaaaaaaattggaaaattaggagaaaaaaatatggagttctttgaacatattttagattttattaaaaattgatgagagttagctttagttgtaaataaacactcatatttatgttttttataaaaaataaataataaataattaaacattatatgtttaaactcaatacattttattgaaaaaattcattgaggatgaacaatgatagtgaaaaattaaaatgaaatttgtgtacatgtaacatatgaatcggaaaaataattatatttttactgtttgagtctgccatgggaaaatcatccttgcactgattaattgttaaatttatattagtattatacgatatcataataatataaaatctatgatagtaaattagaaaaaaaagcgtaaacaaggtgagtactcataataaaaagagacaattaagatttaaaaaagcacaaaagagatataggcttattgttataaatattaataattatgtggacgttcaaatcttttatttattaccattaattgtaatcaacattcctctttt

SEQ ID NO: 359561 - DNA, 546 bp, Cannabis indica
ttttttaagtagaaagtgtgcaccactaaaattaagttattattatcctcaaacttcttttatagaaatatttaaatgctacaaatattatcaccatgtaaagagtttcacagtaaactttcatttactacttcttgtttgtattttaaatttaatgagaacatgaaaatgaacttcaaaatatgtacaaaaaaaaaaaatgaacttcaaaaaatttcactttctaatatttaggttcaaacaaaccaaaaaagaaaagaagaacaaggtaaacttaaaaatagtttaatattatctaacaaaaaaaagcttaattttataaaagtcaaaacatttaccaacatattgaaaatgtgcctaaaaaaagataagaattgctaaagcattagtgtctactaattttctgtgtattattttactattagtataattaaatgtcaaattttattttcctcacttataactcataacaatactctaacaaaatttatcaaaattggtttaataaaaaaatatatactttaattttttttttctttgtctttt

SEQ ID NO: 359562 - DNA, 1065 bp, Cannabis indica
gggcacaaaacccaacagtattccctttaaatctcggcctagtgaagatgttcttacttggttgaaagactcttatgggatttacacagttaggagcgcttacaagttacttcagcaacttagtggtgacttcactcttgatgtctcggctgaagacaatttttggaaaaagttatggcaacttaaaactcccccgaaaatgaaaaattttgtgtggcgtgcggctaaaggttgccttcctataatatctcaactgttgtcaaaaaaagggaacgttacttcggcctgtcctatttgcagtatggatgtcgaaaccactcttcatgcccttgtttcttgtccagctgctgttgctgtatggaaccgtgtggggataggaactttgttgcatcagcaaatgtccttccttgactggtgtatagagcggtttacaatgttgaatacagaccagtcttgcgtgcttgtggcagtctgttgggcactttggaatgctaggattgacaaggtctggcaaaacaagttcgtaggagtgaagagcattgttgttttggctacaaactaccttaatcaatggtgtattgctcaaaaatcaagcaatgaattgcttttctttgggtacatcccaggaaatggtgctgagcaatggaatgccccaattaatggacgatagtattaaggttaatgtcgacgcagcggtgtttagtgattcctcatcttatggggttagctttgtggcaagagattgtggtggcttcctggtggaagggggtataaagcttttccatggttcaactacgctggaagtggctgaagttgttggtgttcgagaggccttaagttggatcaaagaccatccgtggaccaatgtcaccttggaaaccgactgtctctcgattgtttaagctatgcgaagctctatgtccatggtttcaatgtttggcaaagtgattagcggatgtaaaactttatttcatgctttgcgtaatgtttccttttattttgtaaagcgatcagcaaatatagttgctcactcttttgctacagctgctatatcccatcctgatc

SEQ ID NO: 359563 - DNA, 709 bp, Cannabis indica
ttgtgatttgaaattcaaaaatctaaaatttagtgaaaaaatccaaaaaaaatttgatttttgggtgaaaacaccctggctgcccagaagaggctgcacctcgcgtggaatgtgatgcctgcagggtgatttggctgagattcttcggcacttacagggtcaggcatgggcagattgcagtgtgtgtcgtgtctgaaggctaggcatcagtgagcatcagacaaggtttgtctgaggcacgcgcgcgcatgagcaccttgtccaagtgactgtgcatgcggtgctcgaccctcgacactctttggaccccgattttcaaatcaacatatctcccttgtttttcatcagaattgagttctgtaaaaacgaaaaattgcttaatttttcacaaggaatccaaataaaatattttcatggaaaaattttgtaattcacataacatcatcaaacaacacataaaccaacatgaacacatccaaatcagcacaaaaactatattcatcgttttaaatccatattacatgaaagtaaatcattaccatggctctgaggccagttgttgggaatatttcaccaggatctagatttactaacaagtatattgattaacatcctaaatatgaattctctaaaacattgaaaataaacacataagggttaagaaaactttactgttatacccgactttcggtaagcacatcagaggagg

SEQ ID NO: 359564 - DNA, 603 bp, Cannabis indica
gggatgatgcagccagtgttaagattcgggactttgctagggccgaattagagagtcagggtaggactagcttgattgctttttaagtgttcactgctttcacagacattctaaaacttgacttttttctcttgttgcagcaactgaccccatggaggcgatcttggctacccttgtttgagcccacagtcctgatgtttcccctcctcctacttcttcccagatggtcagccctgggaaagcttcttctagcgcccctccgaacactattgacttagtggacgagggggaggtacttcttgaggaagctgaagaaggtgaagaagagcaagggctcttcctaaggaagttgaagaaagtgaagaagagcaagaggttgctctggtgcgcaagcgcaaaggcaagattgtagctgaggagtcttctaaatgcccgcagagggtggacactccggtcgcgagtcatgactccgggatacccccccgaggcggaggagtatacagtgcctcatggcattatgctgactccagtcccccggagatgaggagaggcaagagctttggatagccaagtataatatgcccttgacgagtacacccgggg

SEQ ID NO: 359565 - DNA, 484 bp, Cannabis indica
ttttcttctattttaagatcacacattttcttttaattttaagttacataatgtttgttttaaattttgcaaaacttatatcttgtttctctaaattttctataagtaaataataagtattattttgttatgacttaaatatacctaattatattttactaaccaaatataatagcacacatattactttaataaaacaaatcattcgcatgatcatacattagatacaatctaaataaaaaaacacaaaactaaattttaaataaaactaatatttacgtgcctcggcacgtaacttttaactagtagagaaatatatagcgaagctataaaggtttcatattactaattaaatagaacataataagttaagactgaccaaatgacaattatttttaattaattaattaagacaatcaccatatagtatgcattatatatatatactagttgagataatatttcttgtaagactcatataatt

SEQ ID NO: 359566 - DNA, 642 bp, Cannabis indica
attagaatgacaatcttcaaaataaaaataatataaaaatttaaaaattaacacacactttataacactagctctcaataaaactaaaacattaaaaaacaacaaaaattctaagaaataaactagccaaaggtattaccctttggctagtaacaacaaactagcaccctaaaaaaagttgaaaaaaatatcacacaaattatgtttttttttaaaaaaattatccgtaattctttgtaattgcaggctccctccacaaaataacctacaaaataacaaaaaataaaactatattaccacacaatataatgaaaaagataatgagaaataacaatagtaaaccaatccatatttaatataaggacttaaacttgaaatacttatatgttaaaagagaaaatgtcgtttaaatagaaatcatgggcacaaacaggatcgcttctctttccaaatgaccataccacaaaactaccttaaacacatagggacaagccataaaaaaatggcacaaaaactataaaaggcacataagtcgtaaaaagtattaaaactatcaagaaaaatagtgcaaaaacccatgtggtctcataaataattttaaacatatattaatactatttgaatagctagtaaaaagaaaca

SEQ ID NO: 359567 - DNA, 727 bp, Cannabis indica
gttttcgtgttgtgtttgaatcctcaaaatgctccattgaaaatgtttcaaccaatgaagttattttccttggagtaaggaaggataatgtgtatgttattgatgttgattcttttgatagtaaaaataaatgtttaaccgttatgaatgataattcttggttgtggcatagaagattaggacatgctagtatggattctatttcaaaattggttagaaaagatcttgttattggtttgccatctattccgtttgttaaagataaactttgtgatgcatgccaatttggaaaacaaattaaaacatcttttcattccaagaaagaaatttcaactactagacctttgcaattgcttcatattgatttatttggtccttctagaattgctagtcttggtggtaaatactatgcatttgtaattgttgatgatttttcaagatttacttgggttattttcttgactcttaaaagtgatgttttggaaaactttgtcaaattttgtaaaaatgtgcaaaatgaaaaaggatattctattacctccgttaggagtgaccatggtggtgagtttgacaatgatgccttagaattgttttgtgatgatcatggttttaaccataacttttcggcaccaagaactccacaacaaaatggagttgtcgaaaggaagaatagaacaattcaagaaatggctaggtcaatgctaaatgaaatttcattaccaaaata

SEQ ID NO: 359568 - DNA, 942 bp, Cannabis indica
ggcgagacccactccagctagggtgtttgccattacgctggctgatgcagaagccagcccttcagtggtgacaggtcagctctcagttcataactctttttacaccgtgttgtttgattatggggccacacattcttatgtggcagccagaatctttagtaaattggatagaccgcatgatagttatgaatcagggtttggaacccttttacctggcgtagagttagttatcgccaaaaggtgagttagttatctccaaaaggtggattaggtctatgccgatcagaatagacggtagagagttaagtgctgacctaatagaaatgagcttagtagattttgatattattctaagaatggatttcctatttaaatactcagccagtattgactgcaagaggaaagtgaagaaccgtttgtttttgtcggttcggttcggggatctcggatcccggtgattttggccctgtcagctagggaattactgcatggcggttgtttagggtttctggccgtggtggtggacaccactcaccattcggccaaacgacatcaaggtggttcgggaatttctagatgtttttcccgaagaacttccgggtttaccacctcaacgagagattgattttgttattgatttggcaccggcagtggaaccggtttccaaggctccttatagaatggctccagctgagcttaaagaatataagattcaacttcaagggttacttgacatagggtttattcggcctagtgtgtcgccctggggagctccggtattgttcgtcaggaagaaagatgggtctatgagaatgtgcatcgactatcgagagttaaacaagctaacagtgaagaataaatatccattacctaggatcgatgatcttttcgatcaacttcaggggaagacggtctctccaagattgatctccgatcgggtta

SEQ ID NO: 359569 - DNA, 444 bp, Cannabis indica
tgagtaatacccattaagaaatgatccatatatatattgggcaagactatggtaggacctagcaaaagttccttactggtagggaactttttttgaccattgattttagatcatgtggttattatgatgtaaggtttatactcttacgataggactgcttgtgtacaattacaactttatacatattataataatatttatttttttttaagaaaattatattaataattaaaaataattttattttaaattattattattatttttttataaaattaattttaattatttttatattggtatttatgtttaaaaataattttactatcatagtcttgcccatatatatataactttagtgtaataatactttataacttgattccttgagccaacatatattgtaggaaagaactctcaatttttttagttatttaaattttt

SEQ ID NO: 359570 - DNA, 553 bp, Cannabis indica
aattgataaggtgaaccaaaacatacacaaatgaatgaaaaatacttttgttcttattgatgttgaataaaatggattacattgaaattgagttttatttagggcataaaacccaacaagttctagctctaggtaggataccctctcaatttctctttatttttctagtgaaagttaagttttaacaagcaatatgttggttttttgttgtttatagtagggtttgagctttgagctcaaacttgggtctttaatggtgaagttgagcaacctgacaaagcgacaatatttaaacaaacctttggtcaaccgtacccaagggtctcaagtgtaacaacttggaaaaatgttgagtcttaagttgaacatttaactataatagactcactattaagtttcatacagagtttctaagggaaccacttatgagactaaggttgtagatgcctacaaggcaggcccggccctgggcagaggcgggctaggcctgtgcctagggcccacccagcccagggcccaaatttttttttcctcttttaaagttatacatttt

SEQ ID NO: 359571 - DNA, 517 bp, Cannabis indica
gagaagaaagaaactcacagtttcaatttcaaattaactatccttttcatcgaaaaaaatcagcaaaggcatgtgccttgtccattttattcactcaatcttatttggtcaataagaaaatatcctaaaaaaagaaacaaaaccaaaaatacagcaaaacagaacatttcattaccatacatacatatattacgaatcacttctttgggagggaagatgtggataagggtgttatcccaatttttgcaattggtggcacgtggagtctacttggaacatctgctcggaaagcacagtccgagcaggatgcctcactggcatgcccagatcaaagtattcagtaatctgcacagaatggccaaacacttagcgaattcaactttcgcatcgtgactcatcagcacaatccctataactcagggatcaatttacgtggatatggcatacacacaatcccgctatcagtgtatttagcctcaatcccacgatccttgcattcagcattgatcccacgatc

SEQ ID NO: 359572 - DNA, 607 bp, Cannabis indica
aaccatgcaacataaaatgttattattgatctttattaacttgtaaatctgattatattgaaatggaatttatttagggcacaaaacccaacagtagtgactcaaccactgatcagaaaataaagacaccatctgcacatggtggctcatacctaaacaagaggctccgagggaaccagggtcgaggtaatcattagggtggctttgaaacccgatatacttaccctgaatgttccaattgtataaagcaccattaaggtgcgtgtagaaggcgaggatgtttccagtgtcggttgccaggacactacaaaagagattgcccacagcttaagaaggaagaatagaataatgcagcgaaactcgctccaacaagggtgtttgcattaactcaggcagatgcagaagctagcccctcaatggtaacagttcagctctcggtcaacaactcttacttctctgttttatttgactctggggccactcattcttatgtggcagctagaatcttgtgtaagttgggtagaccacatgatagttatgatacagggtttggaaccctactgcttggtggagaattagttatctccaaaaggtggattaggtctat

SEQ ID NO: 359573 - DNA, 510 bp, Cannabis indica
ctccgtgtactgggtgtattgaggggtgtacccccttttctgtcgcttgtcctctgtccgtttgctaccttttgaggaccttttgctccgagaaccttgagaaggtccagctaggcttgccgcatgagcggagtgagtaaggacatgtccgctcatcccagaaggattcccatagtgcgaagatgcgagagccaacgcctggctctgattgtatcctggggtagcagaaaattgtataccgctcattggtggagtagccgaaggtagggttcctgggagttggactccgggcacgtatcctcctactccggtcggataatatcccccataagccactattttggcctcttctaagttgatgtacttttggactctcttctggaaatcttggaggtttgaagccccttcttgttgtaattcgttccagaatggagtccctgtacggatccctgcttgaagaagtgcaagctgttgtccgtcatcaactttcttagtcttcgaggcctcttc

SEQ ID NO: 359574 - DNA, 659 bp, Cannabis indica
ttgggattcaattccaagttcaattaaatgatctttgagctgcatatttatatattctctacccctatcagttcacatgatatttaagatcttacccaattagttttgagccaatgatagaaattctaaaaacttctcaaaagtttctaacttcttacgcataaggtaaatatgcctatatctagagtaatcatcaatgaaagtgacaaagtacttacaaccacctttggcttttatattcagtggtccacaatgatctgaatgtactattcctagtggttcttggcacgctgtccatttgcagagaaagaacgttttatcattttgccttctgcgcgagattcacaaactggtaatttacctaagatgatattattcagtggaccaccttcttggaatatctttcaccaggacttagatttactaacaagtatgtttttagcatcctaaatatgaacttctaaaaaaaatgataataaacacataaaagatatgagaaaccttacattggttgcagcgaaattaaataactccttcccctcagatctctaacccttgtatcctttctgtcacagagtatcaccaagatctgagcccgaaactccttcagttgtttggattcttcatagtcttacacactatgattgaggactaacttg

SEQ ID NO: 359575 - DNA, 907 bp, Cannabis indica
gacctttggttgtcccattgagggtttcaaaaaatgacggctgtaattatttcactttatcacatttatggtgccacgtcacaaaactcttcggttttcgtgtaggcgtggtcatggctggccgttagatagggcgaccttaagcattcttgctgccacgtgtcgtaatcccaatttatgagggatatgagtatttaaactctttgatacgaaataacttcctcatttctccctctcgtccttaacccccttttccctcctttactgagattcgaagaaattcccatattctatccaaattcttgcttcttcctcttaaatctctttagtttcagaagtgatcgagaccaactgcagggaaaatcaccaaaactaaaggttagtttcgaatttatttgcatttttggtttctgcttaaaagggaaaactgatttttctgggtttttgcattttgaggggtttgaaaatgcatgcttgtaggaaacgtacatagggctatgtttttctgtgtagaactgggtaatcccaaaagaaaatagacttgaaatttccatagccgtgaactttaggaagaatgtttaaataatcgcacttttcctatctgtttatttctttaatacatgcgggtattcagatgaacacttcgaatactcgcatgcctgcttgccctaggtttcacagagactttatcacttctagttgttgtttagaacctaggattttatactctgtatattttgttgcggggacattggttaagtctttcaaatggtgggcgtatcgcaatattccaatgctcatacgtgcgaccgtatgttccttgaggtactacgatacacccagccatttgcgacatacgccagtgtcccaatataagcgtattctttggctagtagatttgctcgaa

SEQ ID NO: 359576 - DNA, 856 bp, Cannabis indica
gagctttaatggtggtttttgtttctgagcacgtagtgaggttttattgctttagatatgttctttgggggtataaatagcaggtctggagagtttggtagagcttggggttgatttgaaagaaatatgaaattttgaatttttcatgctctgaaccggaattccagttcagggggacctgtaggaactagaattccggttggtccccaagaaacctcacagaaccagaattctggttgggaaccagtctaccggttggggcagttttgggaaccctagtttttcccatttttgagatgtttagggtattgccatgttattcatcgatagggaaacttttagtttcaagtttaagtccccagaaagtgatttagcgtgtcacttatctatgttgtgattgattttatttaggagcctgtaattcaccgagctattattccactcaggttggccggcacacctgaattcaaaccgaggtaatattagtataacagtatgcatatgtatttacatgtttagtgtgcatgttagtaagcctgttagattacaatagatatgtttgttggcttttgtactatctgacagtatcacatcgttacgcctagagtatgactagcttaccgagtataggctgatattatggtcaaaagtaccgtactacttgacagtatcacatcggtacgcctagagtatgactagcgtatcgagtataggctgatattatgatcaatagtaccgtcgtacgaacgttctagactcagtaccgtgtgggacacggggattagggttatgattgtgtgtatgggcgccaggttataacccgggttatttgtatgttatatgttatgcttttctt

SEQ ID NO: 359577 - DNA, 550 bp, Cannabis indica
ttttattaaattatttacgtacttcattataccaataaataggatactttgggtagtgttaatatttctcttgcaatcttacattaatataaggaaaagcacataaaaaatgtaggtaggatcggtccaggcataagcagattagatttgtgcctaaggcttatttattttaagggcctaaataaaaaaaatatcttctaaaaaattgaatcttacaaatatattagaatttggattaatttgtacaaaaatactattatacggaaatcttttcaaaaatactgtatttttataaaataacagtgaaaaacaaaacagaataactaaaaacaatagtagaacaactaaaaaataatcgtagaacaacagtgaaaatttaacaaagtacacagtacacagtatttttttaaaaaaaaaaaattgccccacaatataaaagtaaaaaaattataaattttagtatgtggtgattaatccctttaaaaaatatatatttttttaatttttaaaagggtaaataccattttggactctgtgttttgtaaaagtt

SEQ ID NO: 359578 - DNA, 517 bp, Cannabis indica
attgttcttggttgggggaaattccatctccaatccactctgttatagttatggattctattcaataataataatagtgttttctcaaaaaaaaaaaaatatatacagttttacacatgttgcgcttttagaatagtttattcgttcttacgtgttatctcttttggacttgtcgcgtcgtgtcgtgtttaagtactctatattttttgtgcactgtcgcactcaagctcatattttttgtgtcgtgtcatgccaattcgtagtattgtatcatgtcgtgcccaaatttatattttttcgtatctagtcatgctcgtcaggggcggacgtactttacgagatagggtggccctgcccccctgaaatttcaaaaaaaaatcaatcaataatatataagtatagctaaattcaattaactactgttataaataaatattaatttagatatgtataacgaatcaatataatgtaccgtcatatatatatatatatttagcaatttattattatctttagc

SEQ ID NO: 359579 - DNA, 839 bp, Cannabis indica
ctcaatgttaatcgaaagcaagatgattcaatccaattacgaatcattgagttggaagataaatttaggagataccaagatgggaaatatgggatactgcctggttatgacttggatgaagaacccaagcctttccatccagaaattatgaactctgaacttccccagggatttaaaaaccctcacgtcttattgtacgacaggacttcgaacccaatcacccacctcaaaaatttcaataccataatgcgagcttgcaatgtctcgaataatttactgtgtattgtattccccacgtcactgactggagcaacgaggagttggttcaataagtttacccatcattcaattacctcttgggaacagctgtctaaggatttcaagaaacaatttcaggcagcaagagatagacgacctaaagcatcctcgcttactaacgtaaagcagtaaccagccgagtcacttaaggcttacctaagtcatttcagtactactgctgctaaagttagaaacttgaacgacaatattcaacttactgctcttcaagtagggatcacgactgacctgtcaacagctggaggcgagctgtgggatgatttacaaggtcgcccggtgaggaacatcagtgggttcaatggaagatctcaagtgttcatacagaaagaggaagtgaggaacgagatgaaattgttaaagactggcttgggaagtaaacccagcactatctcaacaaagactgaaaacctaggtggctctaacaccaagagaaaagataactttagggaatcagccaaagataaacgaaatagaaaaagcacgataagtatgtgccgatttac

SEQ ID NO: 359580 - DNA, 535 bp, Cannabis indica
agtaataagaaaacaacatcaaactttcaaactacatgaaaaaataattacaaattaaaattttcaaacttttagatatttatactgcaatttaacttaatataatatccttaaattatgatcatttaattttatatacgtaattatagctattactgtaggtggtattaagtttattaaaattatttaaaagaaaaaaaaacacaaatttgtaacaaatttattaaattcaaaatataattaagaaatatgaactctacaatattttttttaatcttatagaaaaagaatataaaattttgactagttactcatattattaaaaaatactgtataaaaaatatcaattaaaatcttattacatcttaattactcaattatcataaatcaaaaaacatatattttttttctcatatataatttgaaatatatacatatatatatggagaaggtttcaatggttacattaaatatgtaaccatgatgattacattaaataaggaaaccatgatggttacatttatttttagtcgtt

SEQ ID NO: 359581 - DNA, 1410 bp, Cannabis indica
aaacaaagaaaaggaaaaaagggtaaaaatcgagaagacaaagccctctctgaacccttgaaggtcatcacgtgaagaaaagatgggtccttgacaaaaaaaaatacgtagactagaaataactcgaacaccagaaaagaggaatctaacgtgttacacagaaactcaagatagaaattccaaaaactcaaacatcaaacccagaaaaagcagatgaacagtaaagcaggcgatgtacacaaacaataaactaaagtacaagattcgaagaacttacataaagcttgagagctgggcgttggtgttgatcgacggtaaaaagttgattggcagcgacgaaggaaaagaagtcagaaatctatggtgtttggaggtttctggttctctctggaaaacttgagaaagtttggcgaaattctgaaagtaaccaaatgaaatgagaagggtggtttttataggccaaaactcatgtgaaacagctgtgatcagctaccatcgaacggctgggaaggcacacgattcgaattcccaagatctaacggttggattggatcgtcatcgagacagtggaaacgcttgagtgtccgcctgacacccattaatgcaccgtatcaatcaatggacaaagaaccaatcgacgcctccaaaaagtgaatcgctgcagtaatggtgatcattaaatgcaccctcacgcgccccaagcacttgccaggaaaccaaggagccaaccggaggcatctgacaattaaacaaggcttggggggtcaatgttgccccttgttttgcccaatatacgtggaccaaccagacaaggacacgcggacacaaagggtttagcacttaaattaaatagctaattttgtataaagcaaagcattattttaggtatgattcccggagaaggcatgcaaggtctcatatgctctcgaagagcaagatggcatcaaagcatctcagggtggtgtcaggtttcctctgagcagtcatctcgcatttaatgtcgcatgggaggaggcgtattggaactgccacacgcaataaagtctgacgacacaacccccgatctgtacctacaaggctatgaccaataaagtctagcgacggctactctgtgaaaaatcacatcaatcagtcaaaagggattaaggactgcactcataaaatccctaaggcaccaagggattagatcatgcattacccatggtatattcattgggaacatacaaccttactgatagttacagaaatgcatgtaccttaattctggggatcaccccacaaaaacactataaataccccccaaagctcattaaagaggggtcgagaattctgggttgcataagtgctagaagagtaaaaactcaccaagaacattctctgtattaaatacgatcataaatacacagactc

SEQ ID NO: 359582 - DNA, 528 bp, Cannabis indica
gacctactaaccaaagtttaattcaacagtggaacccactacaaattgtcttatattattattattgttattattatcactataattattcttttacaatcatgaactaaaaaaaaaaaaaaaaataaataaataataataataataataatttagagtttctatatggtacactttttgaaaatgagtgtatttatcctattgtattttttatattagaataattatgattttaattttgttatacagtgtgtatgtttaattatttaagatatttttaaaaatttaaaaatattaagaataattaaaaaaaaattttttttaaaaaaaatactcttttttttttaatatttatttacaatgttacgatttaaaatttttaattataaaagtacgatgtaaaattttaaaattacgaaaaataaactttgctcgataaaaagtaaaaaaaaacgagaaatcaacctcaatgacaattataaatcaactataaataaactataaaacaataaaaaataactagaaaaa

SEQ ID NO: 359583 - DNA, 721 bp, Cannabis indica
tctggctactgtgtcttccttggggactccctaatctcttggaaatcaaaaaagcagtctaccgtctctcgttcttcagctgaagcagaataccgggcaatggccaatgccacttgcgagatcacctgcctgttagctcttctttgggacttcggcattcaccacaaagatcccgccattctttattgcgataatacacctgccatctacatctccgagaaccctgtattccatgaaagaacaaaacacatcgagattgactgccatgttgtccgagagaaggtccatgaaggcacattgaagctaatacatgtgaccaccaaaaacaacatagccgatatttttaccaaagctctttttcccacttatttccataatcttgtaaccaagatgaacttaaggaacttgtacagttcatcttgaagggggggtattaaatttgctttgtctttattctggcccattaccggcccaatgggcttccttaatactgtgtatatatatacacttctttgtacaaaacccttcaaacaacattcattttttcgtatagccttttcggctaaatataatacaaagataagagaaatgttttctctaatatatgtagtattaactttttgttagagattttataacaatgaaagaaaatcaagatttattgcaactctattgtaaaataatacaagggactaaaataagagattgattaaatatatgt

SEQ ID NO: 359584 - DNA, 894 bp, Cannabis indica
accgaccaaccactacggcaaatactgcaaaagccagatgcctctgggcgattactcatgtgggcggtggaattgggggcagtacgaaatcaatttcaaacctcgaacagctaacaaaggccaagctttggccgaatttgtggtggaatgcacaggaaaaattgaaagcatcccagaaggcgatcccgagccaacaccacagccgaacagcactgaaaacaagccgacctggaagcttcatgtggatggatctgccacagatcagctatccggcacaggaattgcccttgtcacacctagggggcaacacctgcatgcaacggtcaaatttagattcaaagcctccaacaatgaggccgaatacgaagccctaatcgctggactcaaactagcgaaggaaatgaaagccgagcacatcgagatctgcagtgactcacagctagtggttaatcatgtatctggcgaatacgaggctcggggagaaaaaatgatagcatatctgagcaaaatacatgatctgctcgcacaattcaaaagctatagcctcaagcagattccaagagaggaaaatacaactgcagatgcgctagcccgtttggcgagcagcaatataagtgacaaggcgaacctggtcccgatccagtttcttgaagagcctagcatcacaggcacggaagaaatcgaaatgatcgacacatctccgaactggatgacgccaatagcagcctatctcaactctggggaactcccagataaccgaaatgaagctcggaaaatgagaagaaaggcagcacggtacatcatcgtagacgggatcatgtacagaagaggattctcaatgccattactcaggtgcgtcacaccaaatgaagctgcacggcttctatatgaagt

SEQ ID NO: 359585 - DNA, 317 bp, Cannabis indica
ccaagcatttgggggaaactgagctccctaaccttcatttgacccgaccgagttgccctaactcctggttatattgcctggcgtccatctagtctgaacaaccagcgtaaccaagagctagcaaggtcagatcatgatcaacgagaacttactaatgctgcttatttggaaattaaaaacatgcgcttattctactattaggcaactaatatgcttcctaacaggctttacttaaaacatactattaatataagctattaacgcaataaaagcttactgaaccgtggaacgagctaactgctgatgatgattgtaca

SEQ ID NO: 359586 - DNA, 595 bp, Cannabis indica
ttttttttttaatgaatttctaaaatatgaggattgtcattatactttgagttagatcattattattaggtattaataatgtaatgccctaattcttaggcgcgctacagtgattttccaaatcatatactaccttgctaatcaagggttttctttgataatcgtgtcaaatcaaaacttgaataaaattaataaactttataaacatacatatatatatatattatataaccgggatcccgtgctaaaaacttttataaacattttgaaaatatatttttatttttcaaacttgtcgcatagcgactacaaaatatatcccttagatgcctcaagaccgaacactccagattgccccgccttgacatgtacaatcactacccgagctcggaactcactccgattcagcttctgcctttctcttacctacacaagaaagtagattttgtgagccaatagactcagtaagaaaagcattcaacaaaatatacataatcgacctttgtctaggcgcccatacacctatccacgaggcttaccaaatgattaagaacgttcttaatggttggtgctattgaccatgatatcacccact

SEQ ID NO: 359587 - DNA, 500 bp, Cannabis indica
ccgtaaatttgaaaaaaaaaatcaaaaaaatagtacataagataatttcccaattttaaaatgatcttaattaaaaaataaatattttcattctaataaatataatatagtactatatagtatatttcattaaaatactacaaatatttatatcaaattttaataaaataatattttattaaattaataaaataattaggttaaaatattaatttacatacatatttctttatttttaaaatatttttattttattatttttggtatatattatattaaagtatgatacattatttatttaattgtcttatatattatatatgatatattgatattttctacaaaaatttatatttaatttttttattcaaatatttattatgttaaatttatgttataattatttattattaaaatatatttaaatttgattggtctttatttatttttttattttttttaaaaaaattatagcaaatgatctcaaatcatagtactat

SEQ ID NO: 359588 - DNA, 823 bp, Cannabis indica
tcgtaaattcatgagtgattttaatcactttgtcaaaaaaaaaaataataacaataaacaattaaataactagacaacaaactgaaaatatatatatacaaaaattgattttttaactttatttggcaataaaaatataattacacaaacaactttaatcaaatcaatcagacatcaacaaaatactgtcgacattcttgaaaaaaaacataaacacaacacacataagcttaatatatttttgaacagctaataacaatcaatacacaactgtataacaatacaaaaataatcttaatatatgtactcataaaaatattaaacatacatattcatatatactttattttctcctaattgaacaattaaataacaacaaataaaaaaaaacaactctagtaattaaaaaattaaatatacatcaacacattacgtcaactcataaaaaaactaataagcaatacaagtaactaaaaaaaattaaaaaagcaaatacaaagtactaggacatcaattaaaaaaaaaattaactcgtaaaattaaataagcatatactcatttttttgggtgggtaaacaacttaataataactaaaaaacaactagataacattcctaaggaaaactagataacagtactagttaaatatgtaaattaattggatattaacaaatagtgtagacaacctgaaagaaactaacaaataacaaaaatatatatatatatataaatatgagtatgctcttaatgggtattacccatgtatgggtattttattcttgaccattcgatcaaatatttaatggttgatatttataatcat

SEQ ID NO: 359589 - DNA, 611 bp, Cannabis indica
tgtacacttgtatatatgtgacaataaaacttcaaattcaatacaatggtaatttaattgatatttaatggtaatatctaactgatgcctcaaatttacaaagaaaaataaaacataaaagaattttgctaaaaaaaaaaaaattaagtgtataaaatcaaaacgtaatatcttttaagaataatgtaaaaagaaaatgtatagaaatatatgtatacataaagttgttatttttttatctttattttgatctataataatatatgatcttttacaacataacattgatatatgacttttacatgcaaattttgattcataataaaataagattgtgttaattagttttcatatgctattacattaggctttaatgcaaatgatataatagagaatcttgatattgaccaacactgcaatttgattcaccgaatattattgtagggacacgattttgtcctgtgatgtactttcacgaaatgtattccgtggtacattagatgagtctcagggtacattagatgagtgttagggtacgaaactattttttaacgctaattatccctagatcaatctcagccctcagattaaataactccctcatctaacgg

SEQ ID NO: 359590 - DNA, 854 bp, Cannabis indica
aagacatgtacagtcttcatcagaggaagctcgactcacggttcagaaagctcgtacttgtttagtattatatgtgattattaaagcatgttaggaagcatattagattatggttatttatattaaatatgttgcttaaaattcatacgagcgtcagggaaatcaaattccccagaattcccgtggtcgcggtcgaggctgtggaagaattcaaggtgatcatcctataaatccaccacaagctccttcggattaggagcagaggtttacggagatgcaagatcaaatctgtcaacaagaataagaaattttgagattaaggcagtagggtcctcctaccatgcctccacaacaagctcaggtcgttgtagctccaacggtgccagcagaataacatgttactagaaactgtatggagtcgatatacgaaaggttccataagcaaggacttccactgtttttgggaggttcagatgtaatgaaggttgagcagtggctcactgagattgagcaaattttgaatttcataggggtggttggaaatgatcgggtaacttgtgccacattctgttcccggaagatgctctcgtgtggtacgagttagtgtccctcactcgggacgtcactgtaatgacctgggaagagttccgagagttattcaacgccaagtattacaatgaagcaatctgcagtgctaagtagaaagaattcactgagttggtgcaaacttaggggatgttagttactgagtatacaacaaagtttgactgtaacgtccccgattcaagcctccattaggtcctcacacccacggaatgaatgtctcttatacacgagtacgtcactctggctgc

SEQ ID NO: 359591 - DNA, 624 bp, Cannabis indica
acgttagtgaggaacttgctgcggcggttcctcatagaaggcagggtgccttgggccccaggtgggtaagccctccgtccaaggtaactgaggcgcgccttcggtctctcgaccaacatggatacctgagcgacttggactgctacattcccgcctacaacagttgtgcaacaaaccctgaaaaggggatgtgcgcctggtcaggtgcccatggtcagcaaggagcgttgacgcctttgcatcaatacttcaaaaatgtggcggacttcttcggcctctgcccggcccaattcactcctaagggcatcaagtatctgtctgccctcttcatcctctatgcctcccggaaatggggtatgccctctccctacgaggttgcttggtactttgatttgaagtccacccccaagcaaggcaggttggggtacttctatttctctcaaccagggcttcaagtggttgacgagcatggacgatacgaccatcaacaggattgggcgcttcactgatgagtacttcatgggggatggcacgcgcatcactcgcactcggttccagcagatccagttgagctttgaagataactttgtgaggtacgggctctatcccaagactttactccta

SEQ ID NO: 359592 - DNA, 562 bp, Cannabis indica
tccattttgaagttatgctatttcaagattatgttgttttcttttttataaatgaataaaaagtaaaaatgaaaaaactccaattcttttcaaaattgattgtataatttttattattattttgaaaaatagcttgtcttttcttggtgtgaaaagtcttttaaaagaggtgaattagttacataaatatgtgattttcttatactgaatattttgtatttactttgtatttttaaggaaagaatttaaatttaaaatattgagatatttttaatcatatttttaattttattagtttaactttgaattaaaataaaaataataatgtagatattaagagacaattccgtttaatcaggcacacagtgattcaccatgatatctcactttggattttattgtacatatataatcatatccaaatggcacaccaatgtagcgacaatagctaaaaaaaaaaaccctcaaagatcaaaatcccaaatcccatttcaaaatttttttaaaaaatacattacctaattttgaaaaaaaaaataaataaacatacatgtattatact

SEQ ID NO: 359593 - DNA, 982 bp, Cannabis indica
agtatatctataactcgctgattgtaaagtcttaggcgagacacagatgtacaactattaattcacatattaacgaaaaaaccattttgtatatgaagatatgatcacaaggacgacatcattaatccaaagcgaggcaccaacctcgctacgtatgaagaaaaataagcgagacatgttaactgttagaatacttatcgtataatgtacattatacaaaccaagcataacaattggatgaactcaaactaatgaatagcgaggcatccatctcgctataaagagacatactcatggtacttacactaatcagctccaaacatctttcaataagatccactactccattgagttagcactctcagatagaagctgacattcaaatgatgttgactgctgaagttcaccttgtcaccaagaattgcgattgtcagatggagcgttatgtcttcaagcacaaaaatgacgagatttacattatcaacctcgaaaagacatgagaaaagctctagcttgctaccagggttattgttgctatgttcccagcgagatgtcccagaacgatacgctttacaacatatttaatacacgtatgcattgacctggtaaaagcggaccaatcacaactttgtgattttcaaataataaccgcatttattttacgtgggacgtaaacaaatcctaccattttaggggattatttttgtaagatatcagtccgatttgtaattaactgtgctcctatgtaactataaacaggggcaggttacgttgaaaaagggacggaaaatccttaagaaaaaaagccctagaattgtatcagaaatatctaataagatagactcgtggactatgcagaattttaacagcaaaaccacgtaaaatgttttgtgctctttattttttactcactgctattattttctctgcaaatccatcacaatttaggctttaattgttggaatttattttaccaggatct

SEQ ID NO: 359594 - DNA, 566 bp, Cannabis indica
aaaaaaatattgaccaaaattatatgcaaggtacctttttttactatttttacaaataaagggtacttaataaacatttttgatattagaaggtaccaaagctttattttaataaaatacagggtaccaaataagtatattccctattaaataatacaacatacattgtattaaaaaaatttgtcgtaataattaatacaatacattgctttatccaaagacagtgttatttattatttaatacaatacgacccttatacggcgtactaaatgagccctcaatgaactcaatacacaataagctcctagagacatattaaagagtcattcttttatgggaaacccaataaaacaaaaaaaaaaatcaaaacaatttgttttttatatatattttacgaaaatatagataacaacaaccaacaacttatataacaactaatggaataatttaaatttgaataaaaatgtacatagcaattcacatagaaactattagagtaattattagagcagctcaaatgaaaaattttaaaaaaataataaaaagaataatatatgaaataatt

SEQ ID NO: 359595 - DNA, 469 bp, Cannabis indica
gtcttccgaagatcgtcacgacatgtacaatcatcatcagcgatgtaacgctctgaacctcagggacgccacgtgtgtgcttttacaatcttattatcactaacctattagtttaggaaaagtgtggtttaattaagatctttaattcaacttaaaataaaaactttctttaacaatactgtcgtaatttggggatcccctgctaataagatttctatataacaaatttcaaaatcattattatcaaaactaaagttacatttccaaacataaaagaaaagaagtcgatctagcttcccggaagccaagacaccatggctgatatgtacactgctagaagacatctggctcatggctgaacacaacttttaacctttttacctgcaccatgaagcacccgtgagtcacaatgactcaacaagaaaagctattaaatcaaaagcaataaaatgcaagtattcttatcata

SEQ ID NO: 359596 - DNA, 272 bp, Cannabis indica
ctatagcttctatatggacatagaagtgaaatgataatttcatccgagattggctaaacagagataaatggttgagtactcatttcagtgattatgttagttcactgaaatatcatttataggtggctaagtgttttaaggataaaatacattaaagggcgtaacagtaaattaatctttagacagtgtaaatcaactatgaaggatcattgattattgagattataacaatggataaatgaggaattaataaattagtaaatttacttggt

SEQ ID NO: 359597 - DNA, 729 bp, Cannabis indica
caaagtcctccttgcgcttgttgccattaataattggcaactatatcaaatggacattaataatgccttcctccatggtgatctcaatgaggaagtttatatggcacttccgcccggttacaaacatcaaggagacctccctcccaatgccgtatgcaagttacataaaagcatctatggcctcaaacaagcctctcgacaatggtatgccaaacttagttctactttggtaagtcaaggattcaaacaatcctcttccgatcactccctttttattagatcttctaacaacatttttcttgctgtcttagtttatgttgatgacattttaattgctagcaataattctagcgatgctgaattatttaaaagacagcttgactccaaatttaaactcaaagatcttggtcctttgcggttctttcttggactagaggttgggcgatccaccaatggtatttcggtctcccaaagaccattcattttacaacttttaaatgatacaggttacattggtgccaaacccgtctccaccccgatggaaccaaacactcagctcagcaaggacataggggagttactttctgaacctaccacctatagaagtttgattggaaaactcatttacttaacaataactagacctgatatttcttttgctgttaacaggttaagtcaattcctttctgccccgcggcaaccccatcttcatgccgctcaacgcatcct

SEQ ID NO: 359598 - DNA, 1216 bp, Cannabis indica
ttattttaatgtcaaataaattcaacctaaccctaggttgttgactataaataggtagtgatggcttcaggaaaaagatgatgcatctcattccttcagagaaaactcgaagccttcttcctaaacctagtcgccaccttctctctttctttctctcttctgaaaacggaacactatagtgagtgagtgagtgcccatacacatcaagtggtacctcaatcatagtgtggaagattgtaaagaatccatattcaagagaaagacattcgggctcagatcttggtaatactctacgacagaaaggatacaagggttagagatctgagtggaaggagacattacattccgctgcaaccactgtaaggtttattatactttatatgtgtttatttcatatcattttagaagttcatatttaggatgttaaactacatacttgttaataaatctaagatcctggtaaaatatttcaaacaactggtatcagagccatgataattgatttactttcaagaaatttggacttaaaacgatttgtgtgtgatttggatggtttcatgttgatctatgtgttacatgatgattgattgatgcttgtgaaatttataaaaaataattgaattttcatttctaaaatgttggatagtttggaaaaaattaagcaattcatttgttttacagaacttaatttcgattttatttgaattagttatgaatttttgaaaattgggaaatatcagggtgactcacccccttacgtgcacggatcaccaaatttctcggacgcgtgcggcttcagacacgcttttgtccgagatttatctgtctgtaggcgggaatgtctgaacctgggcgcgcgcggagaggttgcatgtagcctcctgcgccgtgctttctcggtcaggctgcccgtatgtgcgtgcggacgatatgcactgttgggattttaggccctaattaaaacccattacaatctaatctaatttcttatcaataagagattagaagtgatttatgttaaaatgtagttttcatgtttgtggtttaatatatgtacaaaatctgttaagtctagaacatatatccattcacaattgcagtgatgtcaacacagtggaatgtgattgtgattatatgattcgaaaagactaagtccctgtttcatcagtgctttggattttacactttatgtgataatcagcgatgaagtgtactt

SEQ ID NO: 359599 - DNA, 1100 bp, Cannabis indica
aactctccgccaggtaatagggttccaaaccctgattcataactatcatgcggtctatctaatttactaaagattctggctaccacataagaataagtggccccagagtcaaacagcatggagaaataagagttattgaccgagagctgacctgttactacttaagggctggcttctgcatcagcctgagatatcgcgaacaccctggctggagtgggtttcgctgcagtctttggtgcttcagttctgagttggggacaatccctcttgtaatgccctgacatgccacattgaaagcacccctgccctttacactcccccagatgctgccttttaaaactggggcactctgggtaagtgtatcgtgtctcagaattaccctacctattgcctcgaccctggttccctcggaacatcttgttctgacctgagccactggttgcagcagatgcctttcttttttgatccatggccgaaccactacctcccctgctgaaacctggtgcaggaggggtaggagccacgccaacagccggagttccaccagtctcaatcatacatcccactgcaccctcagctcgtagtgctttatccaccatttctgcataagtggttctgtcgtcagtagtaatcatcaagtcatgtctgatcttcgcatttaacccatccagatacttctctttcttactgaaatcggttggcacaattcccgaggccaaccttgccaaacggtcaaactgcgttgtgtattcagtaacactcatattttctttctgagtcaaatgagtgaattcttttctcttggcacttctgacagcctcattatagtacttggcattgaataactcgtagaatttctcccaggtcatagttgtcacatcatgaatcatggacaccatgtcccacagaactaaagcgtctttttgaaattgaaaagtggcacagaccactatatcatttccagtgacggccataaaattcaagatcctggtgatcacagttggccattgctcggctttcatgacatcgggacctcccaaaaatactaaaggtgcttgcttacggaacctttcatacaagggttccatccggttcattgc

SEQ ID NO: 359600 - DNA, 569 bp, Cannabis indica
aattggaaattttaaaataaaaataaggattgttaattttaagaaattggaaacttgaaaatgaaaataaagattgctaattttaagaaattgaaaattttgaaatgaaaaaataattgttagtttaaataataagttgaaaattttaaaataataattttatttaatttttaaatgttagtaaatacttttacttagtaataattagttttcaaattttaattatagatttggtatacttgcaaatataccataactttggtatactagcaaactaaatatagaaaaattgttctagactttatttgcaagtatagtgaagttatggttttaattgagctatgaatcccaaagtaataaggttaatttaacactattcataattttgaaattgacaataaaaatttataagtggtaaaataaaatagcacaaaatattctaagatagcataaaatgaaattcttatcttgatttgattcttcggttattataaaccaaagtaggctagaacaattgtgtttgtattatcacctagtgataattttttttcacgcgcataattttcttt

SEQ ID NO: 359601 - DNA, 1290 bp, Cannabis indica
gatgatgatgatgatgatgatgatgatgatgatgatgataataataataataataataatagaaaactttacaaaaaatattgacttttggcccaaatctttacaaaatactgccacacagcagaaattatttttatactgtcttggccaattttttttcttttattactgtaaacacaaaaaaaaaaatgaaggcctccatcttccacacccacggacagaaccaccacaggaacaccagaacaatcagattacaaccattaattccggtgagattgagaaaaaaaaaatgaaatcgacgtcaaataaataaatcatgataaaacaaactgtaaaataatactaaaacaaaatcaaacaaaagaaaggaaaacaatgattaagaaaaaaacaaaaaaaaaatgttgcacagccttaatacccaatgcaatagcaattatatttgcaagcccaatcttaaaaaatcagaacaaaaaaactactaaaacaacacaaaaacaaatgtaaaacaataagcagatataaccacttagaaaaacataaaagaaccacacacctcaaaaatttttttctagtgagctcgtcaaatgtatttttaggagaaccaaaataaaaaataaccacaaaataaccatagagaaggaagaagaaatgtattttatagcctccatcttccacactcacggatagaaccaccacaacaccacgagaacacccagaaaataatcattaattccagcaagatggagcaagaacagtgaaatcgacgttaaaaaaataaattatggaaaacaacactaaaacaaacaaaaagaaaactaaaaaataaacacagtatactgcggtatgaaacttataaaaatacacagtaaaagtaaaaaatatcgcctggcattatttttataaaaaaatggcaaaagttagtataccatgtaaattttcttaatatgtatttactaataaattttaaattctaatcattctaattaatttttttatatgtttatgtgtaaagtattagtgaaaagttatataaaaataaaggaactataaaaaatatatatatagtttagtaattaacttattaattgtaaaaaaatagtggaaacgtggagcccgtaatcgaacccgtataagacaacagtctgactcatttatgaaaaatgggtcatcccgaataaaacacaatagagtccgagcatggcacaaagttatagtcttgcaggccgtgtcgagcttaccaattagtaatttttccccccggaaccttttgacatgtactaaatcgtg

SEQ ID NO: 359602 - DNA, 634 bp, Cannabis indica
aactaaatcaattgtcaatcaagcatttatgcctctttattatccacaaaagtatgatacgatttgataagaagatcaatgcctcatgggtcggacttcaccaaatgagcccataattaatgtattatctgtatttaccccatcaatggacaaggtttacatactagaataacaacattataaatataagaaaactcattcttgctaagggttagaatctcattccttgagtgctcggaaaaattctaaggttcaaacacatgtataaatcaaaaggcttttccattcttatcataataatattgatttgtagaatgaaggtcattaatctttgaaccacgtaaaaactgagggttcattcttcgtttattatatttctttagctttattatattttattggttactaaaaatatcagtaatcaatagtgacagatgaaataaaaaaatcaagtatttaagtgtataaattttaaaaataaaatatttatggtgcaaatattcctttagaaaaatatatattcttatctctattcattttgtgtgtgttttttaaggtggtgtttggtaacactttttaatcagttttctattttaaaattgaaaaataaaaatattttttaaaaaaacatgtt

SEQ ID NO: 359603 - DNA, 501 bp, Cannabis indica
gtaatgggttttatttagggcacaaaacccaacacaaagcgccaaggtttttttaaacttcatgtagactagccgaacatgtacaatcatcgtcaaagataagctcaactcgtggtgcagtaagtgttgagagtaaacgctttactgcttatgtgattatttatttaccgctttccattttaggcagtatgtgagcatctagagtatttatgtgatatatgatgccatgcttagaatgttaaatgataaatgtttatttaaatgaaatggaatagtttagttaggatttaaaggcaataagtgcgtaagtgtggtaatggtgcctgactcgccagggttgttgattattggactgtttgtaaaatggaccctccataatcatctagaccacagggcgagctagtagagccttgtgtagaccaaaccaatccactgacactgcttgcgcctccgctaaatcctagggataatgcgggggttggcaatgctaatccgcctgct

SEQ ID NO: 359604 - DNA, 938 bp, Cannabis indica
tgaccatcataggcgggcctcatatcacaggtgactccagaaagtcgcaggagcgatatccaaaggaagccaaggagaagccgctcaccaacgtgaacaatctcagcgagcgaccagagaagttttcaaaagagaatgcgatgacatcacgttcatggaaagtgatgcgagatgggtccatcacccgcattctgacgcattggtcatcgttgccaatattggcggagataacgtccaccgtatactcgtggacaatagaagttcagtgaatctcttgaacttccaagcctttaaacaaatggggttgcatgagaaggatctgcgacctattgcgtcgagtatatactgttttacaggcgacgtcatcgcattgaaaggcatgatcaaactcacgattaccttgggaaccgcccctgtagtagccaagtcgatggttgacttcgcggtaatcgaccaatattcggcatacaatgccgtgattggtcggaaaattttgcaagagatgaagatcgtgacgtcgatctatcatctcacaatgaagttccctactcccgctggagtaggttctgtgcgaggagtccagtcagactcgcgagaatgcaacaatgcagcagtcaagctcctagagaagaaatcggttaatgtcatctatctgttagaggcaccacctcctcgctaggaggtccttattatagaagaagtgtcgcttaaagattgaccggatttggatcctaggatcctcgattatgctgcaaccgctcaagccgcggaagacactattgagatatggttggaatatctccgcaggtcatgtgtcattgcttgaacattgaccctaaagtgtgatgtgtccgaaagaagcgccgcaaaatggaccctgcgaggtaccaagcgctaaaagaagaagtcgaccgcctcctagcatgcagcttcatacg

SEQ ID NO: 359605 - DNA, 767 bp, Cannabis indica
ggcataaaacccaacagtacgatggtggtacagactcgcagaggtgtggttgatccagcaaatccacaagaggtggatcctacattgcgaaaccaagggaacacaatggttctgccaaccgtaagtcccagacaaccatcaactgcgggtcacagtgtgacaactttggtgagggaaatcgcacctggcgtgcaagagactgggaataccagttcagcaaccagccagggcattcataacacagctattttgcccgttacgaatgttcaaacaaccattggagatgacactgaaatccagaacctctgtgttgctcttggaatcatgcaaggtcataccaacaccttgcaccatgatcaggaagaactccgagctgcggtaaatctcgcgtttgaagagtagaggcgcatgttttccgaatggagggacaaggagatggaaacgttgagggctcaacaagcagtcattgacgaccgtagtcgacaggccactgtgttgataggaaaagcttatcagactgctggaaaacagcctataaccgtcatccccttgggcaaaattgatgaagatccagcgatgaatacctctcagactataaacggtcagccgcaaattccccggtaacaggttccacctgtgggccaagtggtaggtgggcagaccttgtctagtaattcatcaggagaagttatacccaacaattccaaccaagttaatggtcctggtcagtaaattggccaaaccaatcagtcactgaggcagccagg

SEQ ID NO: 359606 - DNA, 499 bp, Cannabis indica
ggtgaaaaccgaggaacctcccattacattcacggaggaagatgagaaaaacatgagatatcctcacatcgatccattggtgataaccattcagctcgccaataaaaagatcaagagagtgttaatagacaatgggaactcggtaaatatcctttataaggagaccctaaagaaaaatggagctcaaaaagccaaattaaggccttgtatggtgaacctttttggattcccctgggacagtatcgccagccttggcataatcgagctcgcattaactttaggcaaggtgcctttatctgctactgttatgcaagacttcttagtcattgacctaccctcagcttacaacatattgttgggtcgtctagcactgatcggactaggggcagtcagttcgatcaagcacctatccttgaagtttcaaatgccagatcgtgtgggactggtgcgtggcgaccaaatgttggctcgcaattgctatcgcataaagttatagcat

SEQ ID NO: 359607 - DNA, 540 bp, Cannabis indica
ttaggcagcacacgttttttttgtttttcttctgagttctttcaccacttgtcctcaattcttgtacatactttctttaaacacccgaggacctgaaacaaaagaatcaagcctcaaaatagtcctaaaactataaacaaagagtgaatactaaccaaaaatatgatccgaaactttgactaattctagcctaacatgaacatgatgaaaagacgattagattgctgccacttttcacgcagtgcaatctcagcagcagtgctagtatcagtgatagcatctggttcgtctttccttattgcatagtccatgttagtgcaagctaggtggagaagaactcgttccttcaagattttgaagttgtcactcctaagctcagggatttcacttgtgatttcagcgtatttagaggttgaaatagctacaagaataggtttataaatttagatgttaaaagaaaattgaggctttaataaattcatgttttaccaatgtataaacatgatgaagatgaaaattttattaaatctaaaattgcct

SEQ ID NO: 359608 - DNA, 1085 bp, Cannabis indica
agatctgaaatttaccaagtaaatttcctaacttattaattcctcctgaatccactatagatttgaaattgcactcctgattacatagaatgctctatataccaaaaaatagatgcaatttgaattacctattatttcaatccaaataattaaagatcctctataaatgatctacatcgagtatggataaatttaccgtcctaccctttaatgtattttatccttaaaatactttagctacctgtaaatgatatttcaataaactaatataattactgaaatgaatgctcaatcatttatcacattaagtaaagctagcaggaaatcatcgtttcacttctaaatagttatagaagctatagatttcatatctatggttagcgctctcactcaattatactaccatgtttccaagatatatttaagccaaaacctaactatctcaggattaagatccattgatctaagatcaactaagtgatattgacttagaaagatataacggtaagtttatgatatcttatctaatgacaatatccgtccagtctgatgtatactccatacatttgatcctaacatacttttttaatgccctagaaaggacataccatatatcaatgtaagtaaaatttatcgatgattatcccatcaataaaaatccagtgtactgacaaatcatgagacttagaactttaaaacatataatcatgattattttccactgtgtagaaaatattataatcatgaataactatatgttctggatttaataaaatttatacatcaaacatataatcatgaaagtaatcagtgaaccatgcaacataaaatgatttttgatattttattaattagtaaatttgattctattgaaatggattttatttagggcataaaatcccaacaaactcccacttgcactaatataaaactaaaagtgcatttaaattaaactcaacaccttgatgtccaaatcaagggtaatatgtagtattatctttgtaataagatctgataggttgtattcaatatcaatcttctccaccattacatctctttaggcacaaaatcctagatattgtgaa

SEQ ID NO: 359609 - DNA, 713 bp, Cannabis indica
gagctttagatcctcctttctgtggtcctccaataaaattttcaaatgtctgaaggttgttgattaactcgtgaaagtcaagttccaacttgttcatgacatagtttgaagtgaagggcataaaggctggagtcagactgtttaagatcaaactcacttgagttgtctggtctataatagctacatgattctcatcttcctagaagtaactagtcatcttgagaaggtcatcacgcatgctctgatgaggtttcatctgtgcgttgatgatattcttagttgcctcaaagagagcttgaattgatgccatctcgaatagtgtagttaactggttcatgatttctgcagccgtgagagtgttagcaaaccttgtcttcaaggtgtcaaccatgctagacagcatgaagtatcgagctttgttgttggcattctgccaacgctcgaacttctcccttactgcctcagttacattctcaccaagctgctcaggagccacttcaatcaatatgaatagggcattctcaccaatgagagcaatgttaatgttctctatccatttgataaagttagatccattcaccttattatcagtcagcatagggttggtcattgtcatgttggatactacaaataacaataaatggaaatccagtaaggttcaacaaaaaatcacattcagaaattattagcacttagtaagtaggaatgacaag

SEQ ID NO: 359610 - DNA, 791 bp, Cannabis indica
ctaaatcctttgtgtgaaattgtgtatgaatgaaagacttaagggatgagatgccttcagtatcattttcattaataacgatgccatcaacatataccattaacaaaatgataccaacatttgattttgtagaatacagaatgatttgaattacttttcaacaaactaaatttctcaacaagcttactagacttaccaaaccaagcacgaggactttgtttcaatccatataaagatttgcgaagacgataaactcatcctaactccccttgagcaacaaacccaggtggttgctccatatacactttttcctcaagatttcaagaaaaacatttttaatatcaaggagatgcaaaggccaataatgtgtagctgccatggaaatgaacaatcgaacagatgtgagtttagcaacaggagaaaaagtattacaattatcttctccatatgtttgagcataacccttggcaataagacaaccttttaagcgagcaatcgttctatcttgattgaatttagccgtaaacacccatttgcaccctataacccgttttcttaaaggtaaattaaccaagtcccaagtaccatttgcaactaaagcatttatttatttttatcattgcagcaagtcaaccaagatgagacattgcttcacgaacatttttaggaatagtgatagaatcaaaagaagtaataatcctaggtttttgtgactgatgtcacaattttttctacagtttttttcgtttttatttttgtttactgcttgtttaccatggttttcctccgcc

SEQ ID NO: 359611 - DNA, 530 bp, Cannabis indica
gagaaagttatgaatttttgaagattggatgccatggctgacgaagctaggtgcacgcgtgcaccaggtgcttcggataaggagcatgcactcgcggattcagacaagatttgtctaaaatcctcggtcaggacctcctgcacaactccgtgtgcaccctgcacgtccgcccgaggacaccctgcacacgccgaggattctcggcagggttccctacgtccgcgcgcgtccaggcccttttgcagccaccacaatttttgcgatttttgtgggattttccccaaaaatcagatttttggggaatttttttttcaacttcgttttttccaattttcaaaccctaaatttaaaataaaatattatttttaaaaatatttgaacttaaatatcatattttaaattaataatatttattttttaataattattattaattttgatattttgaggtttaaatttaaaaattgattattttattttttaaattaaggtcagatttaaaaatttgttaatttctttaatatttatat

SEQ ID NO: 359612 - DNA, 508 bp, Cannabis indica
atatttttttttcttgattccaaactgttatatcatcttattttataagatggttctactgcctttgttgtcttggtacaaccgaagaagtcaataccatttagtgttcttagatagaaagtcacaataccttgttgtagtgggagggtttcaaggaactcaccatattatgacttaggagacacttgtgattaaaatctattgttagtttaaacaagtaatggaaagttagaataagaactaagaagcaaagccaagagaactattgttaaaaccattcatattgagtaacaaaaggttttctattacaaggacaagaaagaaaatcttgttagtagctcttcaatggacttaacaaaacttcatattcctagtattaaaggtttgagtttatctaaacatgtggcttgtggtatgcctggtaatttacttactctagtgcaagcaacttactttagtaagatgctggagcatttttctaatggcaatctatagaagcttctcgact

SEQ ID NO: 359613 - DNA, 724 bp, Cannabis indica
agctaaaaacgcacataaattagatccaaaacataggctaaaaatagttttgatcatgaacatgtatatatatatatactatatacatgcatgcatgcatgtaattaattatacgttaaatagttttgatcgatatttttgcacgttttcaaataatataatgtgtacagtacagtgttattaattaataacgatatacctatatatatacggatcaacaattatatgaattcagttataataaagctcaattaattaaactactccctcacgcgatctatatatcactataatttttttattttggcatcataggaattttaaattttaaaataattgattccctacaaataaatatataaaatatatatatttttttatttatgatcatgctgactgatcttgccgactataataaagtaactattgatatatatatttatttatatagtattattataatataataataataataattagtttggtatattaattgattatagtctatttattttttggtagctcccttcatttaaatttatatttatatatatatatataattacttggttgtattactgtgagttaggtgaagtaggtgaagaattaacgataatagagtaagtgctcaacaagaaaaaacagagccaagaacgaaaaaaataagcaattataagttgagtgtaattaataatatctgatatatatatacatatatata

SEQ ID NO: 359614 - DNA, 654 bp, Cannabis indica
acccaattacaacataaaaaccattaaattcactcaactcaaacttaaacaacttctaacttaacactagaacaagctctgaacctagaataataccacaaccccgaaatcacaaaaaccctattccaagactcaacctaaaccttaaaaatcatagagagagaagtaaagagcttacctcaaaacatgaacaacttctacccttggttgattcagctaacactgactaaattgggagagaaacttgtgattttttaactaggttcttaggtcttcgaaagggagagagagagataagcttcagtgtgattcttttcctatttttgagtattaacatcaattaactaaaataacattttatttaataatatcaactagtattacaccctatttcagcctagagaatctataaaagacaaaataatatttttttcttgtgaaatgactattttgtcccttcactaaaacacttgagttaaataaagcctaaggatattttggtcactttctagctaccccaactaaactgacaacttcaccttctaaactaatctgatataatcccaatataattcttcatttgtcatcgtgacactttctgaccaatcctgtgacaatcagtagtcccgtgatccgtaaggggaaacaccgggt

SEQ ID NO: 359615 - DNA, 968 bp, Cannabis indica
ggagtatgtgattggtaccttgatcatacgtcaatattctgtgggaaggtggctcgagttcgatgggcagcatagcttcataaccgtacgccattgcgaatggtgtctgtccggttgccattttttcagttgtacggtatgaccataggacttcaggaagctcttctggccagtttcctttggcatcttcaagttttttcttcagtgtatccttcaaggttttgttgactgcctcaacttgaccgtttgcctgaggatgcgccactgcggagaaacttttgatgataccatggttcgcacagaaatcagtaaaggattggctgtcgaactgcttgccattatctgagactattttgtacggtagtccgaaccgacatattatgttcttcttaataaagtctttaactttctttgacataatggttgcgagtgattcggcttcagtccacttagtaaagtaatcaaccgctaccactgcatactgcactccacctttacccttgggtaattgtccgattaggtcaattcccaaaatggcaaagggccacagactttgcatctgtgttaattcggtgggtggagctcttggtatctctagcatttgtcacacttcttaacgtaggcttttgaatcttcaatcattgtcggccagaagtaaccttgccttagaattttcttggataagctttgtacggcggcatgatttccatagaatccgtcgtgtacttgagataggagtcgtgtagcttcttcttgagtgacacatctgagcaatggcatcgagaatcctcttatgtacatgactccctctactatgatatacaatgtagctttccttctcatttttcgagcttcatttcggttatctgggagtttcccaaactcgaggtaggtcgctattggtgtcatccagtttgggaatgtatcaatcatttcgatttcttttgtgccagtgatgctaggctctt

SEQ ID NO: 359616 - DNA, 698 bp, Cannabis indica
tcttcgttatttctgatgacagagaaaatttccaaaaaacttttctggaaatttgattgtgaacagcccaagttgacaaaatatcaacccgggcacttggcccactgccgagtgtcaacttgagtaatgggtctagtttttgccaccaaatgactctgtttgattcccgaaagcacttatatcttaatctttgatgaaaatggagaatatgaccagaatacttctcagaaaactccttggaaatggcctaggttgctaaagtgtcaacctgggcgttgtgcccaacaccaggtcaacctgggcgctggttcccagttttgacccccagatgactccttttgtttcccaaaaggactcaaatcttaatttttgataaaaacagagaatatgcctagaagaattcatctgaactgtcgttggaagtgggccaggttaacaaagtgtcaatctaggcgctaggcccaatgcttaggtcaacttgggcactgagtccctattttggcctctaggtcgatctgttcctttcccgaaagtacttatttccttgttttggatgaagacaaagaaaattctctagatacttcttcaatattatggttggaaacgtcctaggttgacaatatgtcaacctaagtgctgggtgcctggggcaccaggtgctttgggtgcttaaaactgaaagtgctccgattctgatg

SEQ ID NO: 359617 - DNA, 721 bp, Cannabis indica
gccactgccaccgtcccaatcgagtaaaagaggtattttttttatattttttaatttatcttagaaatatgccttaatttgtggataaatttgtggttaaactgaaattgttatttagtatgtgttttttgtgataaattgtgcaagaaaaatctgggaaaattatgagttttggggtaaactcttttttcctgatgttgtgttttttgcgacattatgcaatttatatgcgattttcgccaaggtcaatacatttaggagatgtttagcaatttttaggcggcattttgcgatgtttgtgcgatgtatggggtatggaataggttgtgcgattttgcgatgaatgtgcgatgttaactgacagaaacttgatttgttagttgttttgttctgcatttttttagcgatattatgcgattaatgtgcgatatttatgcgactctaattgacagtggcctattttttgctgtctttatgcgattttaggcgatgtttgtgcgattaatatgcgatataatctaattaatctttttaaatgtagatggctcctgaacttattctcccattgtcagagcactttccaaggcgtataacatacagagggaactgatactttgcttcaataaaggctaaatttgaagcttttaacttgactctgaaggtgaaggagacgccctttggtgtttttcggaatgccagtgaattgaaattcagtggggtt

SEQ ID NO: 359618 - DNA, 584 bp, Cannabis indica
tcctaaactcaaatagattttagagaattttttttatctaaatgtgtaatcaatttttaaaagaatctattatattggatattgtaaattttttagttatgtaactattatctactataatatatgtaaataatttttaattgtgtttgtttaaacttaaatgtataaattgggtgactttgtggtgattttggttttgatttctaagaagcatcaagagcattatcgtaagtaattactatactatattttcttagttatataattatttagttactagttatatatgtgtaagttaattattactattacaatttaactttaattgaaactttttatattacatttaatattttaggttgtggttcgttattagaaaacaaaataaaatttcagtgatcattaattactttctagagatacgttattggcttatttatttttactaataattaaaatattataggagtttgaatatattagatattcatttataggaaagtaggttctgagacatactatatttttgtgaacgaagaattaatatatgcatattagaagagtttgaatatctttaatattca

SEQ ID NO: 359619 - DNA, 689 bp, Cannabis indica
acatacgtgttgctctcacacgtctaattacaataaggccttagaatggttcatctcggttatagttaccgagtccaacctgattatgtcttaagaacataatcctagaatctcattacatttaacatggcatgacatttacacacatatatcgctagggtaataaccctaggctattaaaccgttcctattagggtaataaccctaatcctagttactaaacaatcatacatatcactttcaatataagtgccactgcgcattctctatttgctaaccactgtcttacctgttgtccagcaatggtagagatttcaaatctccgagtgctcctgatcaggtgtcggtaatcctagtcacataaatttgggattttcgcaactagggttaacccctgatttcaaactcataaaataatttcatggcatttaaaactcagataataacatatagctcggaacgagctttccaacgatataaagaactcccaaatcggagttcgaaatcacaggatatgcatttccaaagtttccactcaaatggcccagaaaatcgagggcatgccgcggcatgcccaagccatgccgcggcacccgggacaaaacccaggttccaccaacaaggggcgggccgcggcatgctcaacccatgccgcggcacctggattgaaaacccagaaatcagcaagc

SEQ ID NO: 359620 - DNA, 669 bp, Cannabis indica
cgtagaagccatattctttctctctctctctctgacgatatactttctgtctaaattaataaactgactttgtgctccaatttctacgaggaaggcctccttttatatatagaaaagaatacatatgtatatgctagctgcaataaattacaatgtgttagaatttatttcttaaaaagaaaatagtaataatcaaaagtagttgatatttttttgtgtaataattttgagttctcttctacatatatagctaactaaaaataagcctatattccttacaaaaataaataaataaataaaataaaataagcctatatttgtcctgcatgtaaaatagagggaccaaaaataaaacaaattaattaataaatgtattatctattatatatatagttatataacagacaatatgatacgtataattaaaagatgtaaattaagtacggatcaataattatgattcccaactaattccatcccttataaccctaacgtggcagtatatgtgattcatctattggacctggaaataaacgaaatgcctttttttattatttattaattcttctcaactgcttctgctggaccacatttattttcttcattttcgacaaatttatttatttcaattctcttctatttttatatatatatatttttttgattgaa

SEQ ID NO: 359621 - DNA, 649 bp, Cannabis indica
ctccccttgatttgtattgacttaagaacaaagaatatagtgattcttctcttagagctcttacaatgaaatctctgagtatactctcttagatcactttttcgactctttgcccactgagaatatatcactatttatagggatagatgtttgagggaaggtttcccttttgttcacaatctctataattagtaagattacacattacatatatagagtacactgattgagggatttggacagcttgccatatctctgtgatatgatcccagatttatagggattgcttttatgctttgcaatgcaaatgctgaagttgctaagtgttggcatgctattcggactgtccaccgctcggctaggaggacttcgtccgtgcaggcatttgtggtgttgttttcagaacatctttttcgagcagatatggggagttgattccatgtttcaccggcgtgtgatgctatgtcatagtgcaaaaattgggataacaaattacatgtttaagattgatcaccttttgcatgctgtatgataccaattaaaattcttaaaagtgagttttgggaatgctaaaattggataaacgagattttgatgtaaaacgaaagtatttgcatagccttagtgacattgagattattgtttaatg

SEQ ID NO: 359622 - DNA, 825 bp, Cannabis indica
atccagttcggagatgtgtcgttcatttcgatttctttcgtgccggtgatggtaggctctttaagaaactggatcgggaccaggttcgccttgtcacttatattactgcacgctaattgggcgagcgcatctgctgttgtattttcctctcttggaatctgcttgaggctatagcttttgaattgtgcgagctgatcatgtattttgctcagatatgctatcactttttctccccgagcctcgtattcgccagatacatgatttaccactagttgtgagtcactacagatctcgatgtgctaggccttcatctccttcgatagttgagtccagcaattaggacttcgtattcagcctccttgttggaggctttgaatccgaatttgactgctgcatgcaggtgttgcccccaggtgtgacaagggcaattcatgcgtcggatagctgatctgtggccgatccatccacatgcagcttccaggtcggcttgttttcagtgctgctcggctgtggtgttgactcaagatcgccttctaggctgcttttagtttttcctgtgcattctaccacgaagttggccaaggcttggcctttgatagctgttcggggttggaagttgatttcgtactgccccaattccaccgcccacttgagtaatcgcccaaaggcatctggctttcgcagtatttcccatagtggttggtaggtgtacacccgaacaggatgagcttgaaagtaaggtcttagctttcttgttgctaagacgaggcagtaggcgagcttttctatcaacggatatcggcctcggcctcgatgagtctttta

SEQ ID NO: 359623 - DNA, 556 bp, Cannabis indica
attagttatccagacttgtaacatgcccaaacactggattggacaaattagcctgtctaatccaatccagtcctgcgtaccaaacgggcccttaaagtatagataaacctacaaaacaccaagaaaagataaatgaggtaaagatttaacttataaaaaataaactaaatttagaaaccaaagtttcaatatatcaattcaaataagaagaaagacttaactgtgatattcattgtttctccaataatttttaaagtctatatatctatacacttaaaaaaataaataacacaataaacataacataacaaaaatacaccaacaaactcataacttgtaagaatactatctcactctcttttaagtaggacaaaaaaaagtggtgaaaaagatagttttgaaaaaatacaaattgttaagaagagatactataagaaaaataaaaccttataaaatataattcatgaaatagataaaatttctaaattaacataaatcaaaatgagtaaataatttttttttttagtagaaatgcgtctatatcatagattcaaat

SEQ ID NO: 359624 - DNA, 1430 bp, Cannabis indica
gatcctggtaaaataacttccaacagtatcttccagctggtttcttccctcggacagttatctcggggatgatgaagccagtgtcatgattcgagactttgctagggctgaattagagagtcagggtaagactagttttattgcttttctgctaagtgtatgatgttctcgtgaatgtcctaacacttattattttttattgcagcagccaggcccatggacgatctcttggcgactcttgctgaggcctacagttctaacgcttctccacctccggctgcttcccagttggttactcccgggaggtcttcctccaacgccccttcaggcacaatcgtcttggtggacgaggaggaggaagttgaagaaggtgaagtggaggattcagccgcccttgagcgcaagcgaaagggcaagatggtggaggtggagcaatctaagcggacccggagtggggacactcctgcgccaagcaacgactccgggattccttccgaggcggaggaatacactgtgcctcacgacatagagttgactgtggttcttgtggatgaggagaggcagaatctctgagtggccaaacacaattacgcccacgacgagtacagtcaggggcatgctgaggtggaggccttgaagaagattcttcgggaggagcagcagaatactctccaggaggaagccttccggaattcgtgtgacttgaacatggatctgttgacggactggttcaactgctttgttgggcccaccttggctccttttgcctcggagatgaccaaccagtttgtctcccacttggcgcaattcccgcctaaaagatatgctgcttgcgcctctctgaactctatctaccaggtccaagacatcagctctgccatggccgcagtgagtacttcgtatcttactccatcccttaatattttatctaaggcatctggtctcacacttgtctcttttttcagattactgctgagaccggccgcctctccaagactttaattgaccatggcttcgtcatgtccgaattcgagggcatagacgaggccatgaggatccttcgggacttgtctgccgaaaggcgggcattccaggaggaggctcaacagagggaggcccttgcggaggcaaagcttcgagaggaggccaagcagagggaggccgaagtggaggcgagacaccaggaggcgctcaaggcggagggcgaggccgtggctatggccagacgcgagcttcgggaggccaaggaagccatggatgagctcctgacccctgtctcctgcaagcattgcgccaagtgctttgacgacgacgtctatatggcctggcagtcaaatggccaaagtattaagcttgacttctatcccaagcctgaagaggctcttgctaaattcctgaagaagaagaaaaggcttgatgctttgcttgaa

SEQ ID NO: 359625 - DNA, 782 bp, Cannabis indica
ggtgtgtactgatgcaggctgattgggttattgcctatgcctctcatcaattgaaggattatgaatagtggtacccgactcgtgacctagaacttaccgcggtagtgtttgctttgatgatatggagacattatctctacggagagaaatgtgaaattcatactgaccataaaagtctcaaatatttctttacttagaaagatttgaatatgagacagaggtgttggttagagttagttaaggattatgattgtgagattctttaccatcctgggaaagcaattgtattggctgatggcctgagcagaaagggtcccaggcaggtagctagcttggttcaaatttcacctcagttagcaaaagatatggtcagatcaagcatcgagtttgttgtaggaaaacttcataacttgacgcttcagtctgatctgtttgaacgtattaaagctgctcaactaactgatccagagttagtaaagatcagagaagagatttcagctagtcaagccaaagactttgtagtgtcagatagtgggatgttgttgtttaagagcagggtttgtgttccttgtagtgcaaaacttagaaatgaaattcttgaagaggctcataccaccccatattccttgcatcctggcaccaacaagatgtatcaacatcttaaaccctacttctggtggagcggaataaagaagaatgtggtagaattcgtatcaagatgcctaacctgtcagcagatcaaggctgaacattagagaccagcagggttgttgcagcctcta

SEQ ID NO: 359626 - DNA, 631 bp, Cannabis indica
ctagttccatttgcgattctgagttcgagtttgtgttttagttcgagtcggagttcgagtccttgtctgagcttggcttcgggtccgaatttcaatctaagtccagatcaggctccgggtgtgggttcgcgtcctgggtctaggttgggtccgagtctcaagtccttggttttgatctgtgtccgggtctagctttgcgtctgattctaggtgtcgttgtttgagttctggtctgattctgtgtccgagtttgtgtccaggtcttgatgtgggtccagatctaggtctagcattttgatcccagtctgggtattggtccgactccaggttcgtacccggatccctatctaagtccaagtctgtgtttgggatcgagtcctaaattaagaaccaggtcggggtctcaattttggtatgggtacacgaccgtctccaggctcgagttccagtgtcaatttgggtctgaggctaggtctgggcccgggtcctggacacggtccttgccttgttttagggtcctagttcgacaattcttgttcaagttctaatttggggtcccacgtgtaggtttgtgttagggtttggttcttcgtcttggttctgctcctagtctgagtcccagatctagaca

SEQ ID NO: 359627 - DNA, 1013 bp, Cannabis indica
tgattaaccctccaaacagccactaaatcaagcataattcaacctattccaacataattaaaccacagaaaacaccactcaacaatagcagcaaccacagcaacaaaaatcatcaatttactttgaaaaccatagcttttgaaccaaaattcccaaacttgaacaagggtaactagcatgcattaaaacctatctaatctcacttaattaaacattttaatcacacaaaacaacaacaacaactaacagcagcaacaataccaaaaaccatacatgccacaatcatcttttcataattttcaacaaatttaaagagggaaagagtaagagctaacctagcttggttagaacacaaaaagagcttgaattcataaagaaaaagccaagaatccttgctgctcaaggacgccgaaagagagagaggcttgagagaaaaatttttttttttctttgaattttcttctttttctacttttagaataaaatgaaataacacgataacactaatccttatttcagccaacatatacaaataacatactaaaacccaattactaagtccactaaaggacaaaatatcattggagcaaaatgaccatttttcccctccacactaaaataacataaaggggtactaaaggctattttgggaaaattctaaattcccgaccaatcccgacattcccaatgtctataaccgccctgctatactaacatgctaagttgtgattctactgagtcaaacaccgacttccatgttgccgggcaccagaaatgaaaaatatgaaatttcactatatgacataaaatgcatttcagaattctaaaataacagcataaataattatttaaatatctataaataattttcataattaagtcataattaactgctaatttacaaattaaactaagtgatctttacagcaagactgtggcacttgtgaaagtactgtggaggaacagtaaagttgaagagacaacctgggaactcgagacggatatgcagcaga

SEQ ID NO: 359628 - DNA, 355 bp, Cannabis indica
atgatgaaattcaagccttcagtgaaattttcctaagccatttcttctattattttcgaaccaaacttttctctttctctcttcatattttcatacctttagtgataaagtaagtgcctgcacacatcaagtggtattcaatcatagtgtgtaaggctgtgaagaatctagattaaagagaaggacattcgggctcagatctttgtgataccctgctacagacaggatacaagggttagagatctgagtagaaggagtcattattattccgctgcacccactgtaaggtttctgaaactatagatgtgtttatttacattgttatgatggtttatgtgcttattttatgatagtt

SEQ ID NO: 359629 - DNA, 684 bp, Cannabis indica
cattctatttatacaagtatactgcaaaatggttttttgattaactaagtctagtataaaattactccactaaagaatttaaaagcatacatgtgatcttttatctacttttttgataaaaatgggcatgttttaggtgatgcagtctttcttacaatgttgaaaatcaatgaaaacagaacaaatcaatcttcctataattcaatgacaaaaaagaaaaatatcacaaaaagactacataaaaacaagagtggcaacaaaaaaaaaaaatcaccctttttaacaaagtaaaattgagaaaataattgttgttaagtatcattgagttaattttactaaaacaaattccagtgtttgatgtgactaacccccaacaagtaatatagcaaatgtgaaaatacaaatgcaaagaaatgtgtagttgaaagtgttcgtaaaggttcctatgaaatttgcaacagacttgttatgttttctcgaaatagactacgataagaaacatgaagcatatgcattcaattaaatcaatacatttcattgatggtaaaattaagcgtgatattcaatctaatttaacctaactgttttatattttttttttattcatatatagaaaatcaacttatacctcagaatgcagagtgaagagagagagagagagcaagagctgtagaaaaattattt

SEQ ID NO: 359630 - DNA, 556 bp, Cannabis indica
ccagcagggttgttgcagcctctaaccttacctgagtggaagtgggaagatatcacaatggactcggtggttgggttacctagaaccacgggtttgtttgattctatttgggttgtgaaagaacgatttacgaaatttgctcattttctacctgtgaaaacagccttttcagtggatcagtatgcagatttgtatgttaaagagatagtgaggctgcattgtgtgccaaaatccatagttttagatagagatccgaagtttacttcaaagttttggcagagtttgcaacgggctataggtactaaactaaaatttagtacaactttccatcctcagactaatggacagtccgaaaggaccattcagatactggaagatatgttacgacctatgttatggattttgagggctcctggagtaagtacctatcgttgatagagttttcgtacaataacaactaccaaagtacgatagggatggctccttatgaactgttacatggcagaaagtgtagatctcccactcactgggatgagacaggggagaggaaatatct

SEQ ID NO: 359631 - DNA, 626 bp, Cannabis indica
gtacgttatagctatttgagatatcttaacaaaatttttagaaatttggaataatttacgatatagaaaacaatattcaaatagtctattttacacgcgtataaaataaaatagtcacgcgtgcaacacactacttaaacgcaatttttggcgtgttaaactttttcgaatttcttaaaattttgcaggatgtcttaaataagtataatttacatgaccatgagaaaaaatttgattaaaaaattatttcggatactaaaagagataaagatatatcagtgtattccttttaaacggtgcattataaaaatttcccattattaattattactcataagtcctaacaaaagattccgtacaattggattctttaataataagaaataatagtaataataataaaagccggcgccaccatcgacggaccacgtgtcacccaagccaattatcttacccacctaatttctcacccgacccctgttaaatctttttaaattttaattccatatctctattctaaagtgtgcctatataactgaattcttggtttatgagaaattcatggtgtgacttattatttatatttaataaaataataaaatagtatttatatataataaaataat

SEQ ID NO: 359632 - DNA, 592 bp, Cannabis indica
aaattgtttcctttccattccattccatttcattacctccaatcaaacgccaccatagtgtctatttctttcacaaacttttttattagcatgtttagtatttaggtaattaaataatcttaaaaatgtaaaaaaattaaatttatagtatttttattaatgaattttatttttattattatttgagctgtcaaaataaaaatgcatatatatttaatatgaaaataattattgaataaagaaaacagtggtttcaatgaaaaaaaaaatagaaaaaatagggtttgttctcggtaaaaggttctacaaagaacaatgtcctcggtatgtgtcagttgggtcaaaatagaagccaactaccgagaacatctctaacttttaccgacaacaaatgttctcgggatagccttcaccgagaacattatttgtgtcctcaatcattatattgttctttcaaacgacgagtctctaacgaggacattgtcacgaggacatgtccttgttcactacaaaaaatagctacttttaatgacaatttttttagtcataacataattaaattttttgtgactaaatgtgacttttggtcaca

SEQ ID NO: 359633 - DNA, 227 bp, Cannabis indica
acttattatgtgtgggcatgcactcaatcactaatggctgaattttgttttgtgaagaaaagctatggtattttcgaattagaagaagaagaaggaagaggtctcataaacctagagagaaaactaggtttttcagctttagaggcattagttggataatgagaacatagccttccttttatactaatttccaatagggttaggattgaattatttggaataaaaat

SEQ ID NO: 359634 - DNA, 691 bp, Cannabis indica
aaaacatatttaaattattttctaaggttttcaataaattgataaataatgtcccgtttaggcgagagtcaaagatatcatttgttgaatagagtagttagctcatctaaaattaatggacactattttagtaactttttattcgatcaaaataagaatctgacattgtcccgtctaggcgagagttaaggtcattcttatttcatgatcttctaccattgtttcatattttgtaaccccaattttttccagttaatattagggtgatcgttactaagaataaaagaattacaataatacttatcttttaaaaatctatagtattaaattgtctaatgaataaactgttgggttttgcgccctaaataaaactcatttcaatataatcagattactaattaataaagatcagaaatcattttatgttgcatggttcacatgatttatttcataattatgtttaatgtgtaaatttaattaagtccataatatatatatttattcatgattatagtgtcgtcactacagtagaatataatatgattatatgttcagaaatttcattcccatgatttgtcggttcattggatttagagtgacatgataatcggtgataaggtatacttactgttgagaatattttaccaggatctaaatttactaacaagtatgttgaattaacattctaaat

SEQ ID NO: 359635 - DNA, 593 bp, Cannabis indica
tcaggagcaacacatcactgtacctcaaatgacagcaatctctcacaaaaatctgactttaatggtcaagatcaagtttacatgggcaatggtgcagggttgaacattgagaacattggtaagaaactctttctgtctattgataaatccaagatcttaactcttaataatcttttacatgttccaaagataaccaaaaatcttatcagtgtttcaaaatttgcttctgataataacgtcttttttgagtttcaccctgacttttgtcttgtcaaggatcgggagacacaccaagtgctgctggaggctactcttgaagctggcctatacgtgtttccccctcttctacccacattcaagtctcaacaggcttctgttcctgctactcactctctttcaaacatttcttgtaataatgttcagtccactaataacactattgttaacagttcgttatttcatttgtggcattctcgtcttggccaccctgccattaaaacagttcagcaaataatgcataagtgtaatatcacaaatagcaataaaaatgtttttgatttttgttcatcttgctgtctaggcaaaatacacaa

SEQ ID NO: 359636 - DNA, 773 bp, Cannabis indica
cagtctgggaagtattcatcgctgtatcttcatctgtctcacccaggggaatgacattcggaggttgctgacctacagtatggtaggcttttcggaggctagccgactacaattttcaatctctgtatggtgagcccttaatgcctccatctctctatctctccactctgtaaacatacgcctttgttcttcgaatgcaagatttaccgtagtgtggagttcatcctgatcatgatgtagggcatttttatgaccctgcatgagtctgagagcgtcgcagagattttgtaaatcaatagcatctctgatggtcgtctgggtgttggttccagatagaatagttgtgttacgaatgccctggttgggtgcggaactgttattcccattctcttgcacaccaggcgcgatttcatctataggagttcttacaccattccccacgtttgccggctgtccaggattaatagctggcggaacccttgtgtttttagggttctgcaatgcaggacccaccgtctgtgaatttgctggatcagtcaggcctctacgagtctgcaccattgtatttatggttagattttgaataaagagcaattcttgattctgctctcaatgaaagcacccaaatgttgacctcgcttttagccaacgacaacgagtctgatttattaagcgataagtgatttatagcaatcgatatataataaagcaatataaagacacaagaattttataaaagttcagccccgagtagttcggtaatagcctaatcc

SEQ ID NO: 359637 - DNA, 614 bp, Cannabis indica
acaaagacttagctattaatttaagtgctaaaatcttttgtgtccacgtgtccctgtctggttggtccacgtatattgggcaaaatcggaggcaacaaatttgaaaataaaatttattttgcatcattagtattaatgctcaagaaatattataaaacttacttaactttagctagtcccaaattaaataaaattaattaaatattagttaggtccagtgtgttgtacccactactattactccccttactctcacacaaggcctaaaagagaggaacttaatattttcataaaaaaatgtttttaattgaataagcctaatactaactggccttacataaaacaatcacaggtgatatgttatttttagcaacgtagtccattcaaatatctagaaataaattggcttcctatacgcatctaagcccaaaagtaaaacatataggctcatacatacaaaatgatttggatgggccttatcatgtttctaggtttatcgcagatgaaagaaattgccaaatttgcttgcgttacaaattatttatttgctctgttgacaattgcactatgattaaaattaaatcattgaatttgtcaacaagttaattatagca

SEQ ID NO: 359638 - DNA, 577 bp, Cannabis indica
gggtagctctattccagcaaggggcctgacaagaaactaaaacaagaatcactcaactctgtaaaagtacttaaagcaatcacattcacacataaaagtaacatgaatcttttaactcaacctcaaaagtatgataagtacaagatcctaaactaattatcatccaaaagcataaacatgatttgtcaaataggaatgaaacaagattaaatgcaagaaaagaacaactcaacaatattgtacaaaaatgagaataaaagagattagacaatgcaaactcccagggattttctgagtgagtcaaagcgacttgagtctagggccttagtgaaatatcagccaattgtttctcagtatcaacatattctaactataaagttttattttcaacaagttccctaataaagtgatgccttatatcaatgtgttttgttcgagaatgttgaacatgatttttggaaatatttattgcactagtgttatcacaaaaaatagttaaaactctcaatttaaatccatagtcaatcaacatttattttaaccataacaattgagtacaacaactaccagcagcaat

SEQ ID NO: 359639 - DNA, 838 bp, Cannabis indica
ctcacacaaattaccttataattgtcacacatttatcgccacaggtatgtttgaaatctagcaaaatattcacttacctttgggttagtcaatataagcatcaattacaaacacacaaccatcctaatatttaaataaattaatctacacaaaagaggtcactttggcgacatattgtttcaattaatttactcaaaatattagtcattaaccaacaccaaaatttgaattaaattgtttaaaccaaaatatactccaacatatatatatataccaaaagaaaaatctaactaaatccaattaatgatgcaaattaaaaaaaaatatgggccgagctttcaaatcctgaagccaaacgaatccattgcaagccaaaaacaataacatcaaaacgtatatatataaaaaaaaaaaaacgaatcagtattcacaagtttttttttttttttagtatatatatatatataattgaaggagatagccgcacggtacactattgtaccacactgaaggacaaccatttaatatataccaaaaagacgaataatacacatcaatggggattatcattatatataccgcatacataaaattgattctcaaagtatatatatagtgatcgacaaatcatgcaatgttaaaaaaaaaacaaattacatatatcacatcaaatatatatgaaccctaatatttaaaatccccaaatttcataaacaaaaatcatcatatctttaattaattcaacaaaggtggctctggtaccacttgttagggtttataaaacacttaagaaatatataaatcacagatctaaacatattcataaagtgctttaata

SEQ ID NO: 359640 - DNA, 743 bp, Cannabis indica
aagtaaaagtttaattttaacgtacttaactacactccctgtgggatcgaccacactcctagtgagtttactacttaaaacgatacgtacacttgcgtgtgcaaaatatcgcaacattcatcgttttaggattgttcatatttaagttgttagattatagaattataatcaacttacaagttagtaaataaattctggtaaaataattttcatcaactcgcctcagagccatgatcatctatttacttttatgaaatatggattaaaatgatttatgtattgtttgtaattgatttggatgttcatgtttggtttatgtgatgataatgatgtttgaataataattgaaaattttcgatgataattttattgtaggattgaaattattttagaaagattcattgtgaacttttaagggaattaagcttttacggaacccaatttggcttaaaattgagtaagttatggagttttcaaattttagggtgtggctgtgttggaatatattaccagaacctagatttgctaacaagtatgcttattaacatcctaaatatgaatttctaaaacaatgaaacttaaacacatataaattttgagaaaccttacattggttgcagcggaatagaatgaattatttcactcagatctttaacccttgttcctttctgtcgcagagtattatcaagatctgagcccgattctccttcagttgtttggattcttcacagtcttacacacta

SEQ ID NO: 359641 - DNA, 1910 bp, Cannabis indica
ggtccccaagtcgaggatccacatcttaggcaccccaccccgttctttgttgggaacttaaggcatgaatggaatattgatgtagcaacctttaagtcatataaatttggtcggcctaacatgacattaaatgctaatggaatgtcacaaaacgtacaatattaggacactacgaagcatgcctcaacagtgcccaaggggtaggcaaattttccctagaggtgcgacaccttggccggagaaaccataaacgggctggagatagggagttaaatctttgagttggagccccatcttttcatacgttgtcttgaataagatgttggaagaggctccattgtctatcatggttcgggccaccatcttgttggctatctggacttccacaaccaatgggtcgatgtgtgggaaatcgatcttgatagcgtcttcatcactaaacgttattgtgggctcccctacccgtggtattttttatttcctttcttcgacggccaggattacttcgtcttgctcatgttgtactgttcgggcatacctttcccgggctttgcctgaatctccagctatgtgcggacctccaataatgacttgcagatgtccatctactggtggtggtagtaaatcttggttgttatcgcccctttaattttgatcggccttgacatacttttgtacgtgtgaattattttttcttatcaggaattcaatttcctgcttcagattgttgcattcattggtgtcatggccataatccccaagaaaacggaaaaactttgtcatatctctcttgcttacatcttttttcatgggtgcgggcttcttgtacgggaataatgactgagtagccatgtacacgctttctatatcttctgtcaggacagaaaatgcagtaaacttggtaggaatctccctgggagcttgttcggttttactagcaaacttcccctttttcccattttcttgcctattgttgttgttgggccgtttaccacccgagcttgaagtgcttgggtattggaggagctggacaaatatcctagcagagggagcttttggctggctaggtttttgctcaacttctgcttgctgaatggcttcttcaagcttaatgaaaccttctgcacgaccaaggaagtcactcatagaatctagtggtccgttcttcctgatgtccttccaaagttctccaagaacttcaatgccccctagtatcgcggacagctttccgtctttggtcacctgtgcaaccttagttacctccgtcatgaatctgctaatgtaggctcggagaggttctcctggtctttgcttcacttcgactaggtctcctaagtgcaatggaagttagcgagaataggagaattgtgcatggaatattgaggagaaatccttccatgagttgaactttccgggcgccaacttgaaataccatcgtgggtggcctctaagagggtggcaggaaaaactctgcaacatacatctcctcgtgctccttgcaggtccatttgcatttcgaagtacttgaggtgggataaggtgtaatgccctaaataattaggtacgctacccaagttatttacgaaaccctaatcccctaaacgagattactaatcaaaatagcgcagaatttaaacttttgcaataaacagaatgaaaataaaacttgtaataatttaaactttacaacagttgggatcccaaaaacatttacaaactttattacaagtctctttcagttagccggcctaagcggcaaaatagagtttcaaaaattcaacactgtagccccaaacccgcttggtctagtgtggccaaaacataatacattcctcgtccagctcctacactcactgactgatcaaacacagctttaccctttccctgcacagtagagcaccccgtgagcc

SEQ ID NO: 359642 - DNA, 605 bp, Cannabis indica
agctcaaatggtaaacgttctaacaacaataactagcaagggaatgggaagaagggaaagttcaccagcaaaaccgagcaggctcctcgagaaaatcaagcaaagtacattgcatttaccatcttgactaaggatataggaagtgtcaacatggccactcagtctctagccccgtataagaagcccgggcccatgaagaaagatgtcagcaagagagacatgacaaagttttgtcgattccacacagactacagccacgacactaacgaatgcaacaattgaattcctgataaggaaaaataacccacacttacagaagtatgtcaagaccgatcagaatcagaggaacgacaatgatcaagacatactatctccacctgtagacggacatctgcaagtcatcattggaggcccgcacatagctggagattcgggcaaagctcaggagaggtatgcacgaacagcacagcacgagcaagaagaagttatcctcgccgtagaactaaggaagcccaaaatcccacgggcaggaggtcctaccatcaccttcaacgatgaggatgctgtcaaaattaggtttccacacaacgacccgttggttgtgg

SEQ ID NO: 359643 - DNA, 867 bp, Cannabis indica
tttcctatttaattaattttaaagaatcatttatttattacaaaaaataaataattactatattgccaattcaaaataaattttctttcgaacatctatataccgctctttatccctactattgacagtgtttcaaggtggcgattcagggaccatggacctataattctaagctccaataaactagattattgattgagttccatcaaccaaataatttcttgatcattaattctatgattactccactataaatatggaattgcactcttagtaattatggaattatatttactgagtttaactgcagtgtccattgatataatcaattcttatgattatccctcgatgtgttggttcataattagttttggtcaaaatagcattttacctttctaattacttctttaccttagttccattggttcactggtggaagtataattcaagattctatatgaatttgtgcacaacattccagttctagaattaacacttaaagagaatcaacattcgatccattaagaaagttaagattccataattgtatatcatcttcccagccattcgtgttattagattcccaaaatagaagttttaagaatcatcttctctgagaaactttaacgagtgaatcaaagaaactaataacatgaataagagttcatgataactcacgatttaggccgatatactattgaccattgttatgatatgaattaggtctttatgattaatgacatgttgataaagatagctttattcatatcggtatttgtcatatataatctctattatatacaatacttaattttgatgtttcactacatccgtaattcaaaccaagactacttgcaccgaagaacg

SEQ ID NO: 359644 - DNA, 1022 bp, Cannabis indica
attacttatttcgtacattacttggttcacgtgtttatttcattgatcatatgtttgatatataaattttaataaatccttatcatattaatattcatgattatagtggtgtttagaaagtaattatgattatatgatataaactattttagtcccgtaatttatcagtgcactggatttacactgacgtgataatcaacgatgtgatttacttgcacttctataagtataatatcttttccatttcataacaaagtaagtctgtatcggatgtattagctatacatcagactagactaatattgacagtagaaaagatatcataatcttacccgcttacccgtaggactagcccatacttacatcttgagaacacggtagtgcaattgagtgggagctttaatcatagatatggaatttatagcttctataaactcttagaagtaaaacgatggtttccttaaaacttggataaacgagtttaaatggtggagtactcatttcagtaattatataatttactggaatatcatttacaagtagctaagtattttaaggataaaatacattgaggggtcgataattttgtcgctaattgatgtggactatctatagaggatcattgattgtttaaattaaaataatggatactcatagtgtatctattcttggtaaatatagcattctatgtaattaagagtgcaattctgaatttatagtggagtcaggaggaattattaagatagagaattagtaaattctaaaactgcttattaggagcttatttatataaatccacgatccccacactatctgagataatattgtcttatagactcaattaattggtttcttaaaccaattagaattctaaagaatactttatcttatttatgaattttactaaacaagggcttatttgagaagaaaagtaaagagatggtttatgttaactcagaaatttggatagagattcctaagccacactcgcttgctagattggcgagaataaaatatttgtt

SEQ ID NO: 359645 - DNA, 794 bp, Cannabis indica
tgtttattgtgcaattgcttacttttgcttgatcaccattagtaggtactagctaatcttaattttggaaaaaataggattagtggaatttcttgaatgatgcatgaatatcactttggaaaaatgtggtttgtaaatggcataggaatacgttatttaccttgtatgacttgaaggaattgtgcttaaattggtattcttaaaattaattgggcatatgaatatgttaattaattagagaatcaagccataaatactttagaaaaaggattatgatattttaaactcctagttgacatcatcaatttacaacaaactcatttgcacaattatattaactttgcatttttaggtcaatttaatatttctagcttgttttttttctcatagtttgtgtttattaatttttacatattttcaacactttattttattcttgtttaaatcaatttgtgagtaattagttttataaattaatttcaaattttcaatccctgtggagacgatactcgattaatcactttattacttgttacgattgcgtgcacttgcgtatgcaatttttcacaacaagcgctaatcatatatgcgaaatctatagtttctataaatacatagaagtaaaacgatgatttccttcgagcttggctaaacaagattaaatggtagagtactcatttcagtaattatattaggttattgaaatatcatttacaaggagctaagtgttttaaagataaaaatacattgaagggtagaacgataaatttgtccctactcgatatagatcatct

SEQ ID NO: 359646 - DNA, 614 bp, Cannabis indica
aaatatttttatagtttttttatttatataaaaatattaatttaagtattaataatttaaatattgtaaatttttaacgtttttattgaatgagaggtagatattttaaaatattatttattttgttgcagcgcttcattaaattaatgaatcatgatttgttatcttttttattactattattatttataatattaattgtttgtatcaattttttaagttagaataatattattattttaattgatgaatatttttgtctcttctctttcctagtgccatattttttaaactcaattaagatgtatatatacataaactaattaagatgtatattcaaagtaattatgaaataaaaaaaattacaactattataagtaaatagataaaaaataatcaaatctatagaaaaaaaaatattaatttttggatatttatgtaaagttgatcaattgaatatatatatttatatataaatatataaaattaattgagtaaggtattcaattgcccctacaaagagaaatattaattttagacaaatcagtgtgaataaaaaaatattttacttgtagtattttcttaatgaaatataatatatattgtgtttactt

SEQ ID NO: 359647 - DNA, 863 bp, Cannabis indica
tagtagtctttacctcattcagttgcagatttttcgtcaactctgaaatttggatgttagtcactatttcgctaatatatttaattgtgcttctaatttatgaacacgtgatcaaaaacagtgttgtaatgtactctctcattttgtttttttttttttttgcatctaatgcctcaggtttaattatgataagttttggtgggttttagtaaatgtttttctttttctggtttgtattaatagctagaacatggagaaattaataagattggcattcctttttgtcgcagcatgtacaaagcaacataattataataatgctttaagttgcttttatttttttgagaaaaggggtaaagttttattcaacttgaaataatatcatcccttacaattgaaagcaaatttgatggagcagaaaactcatcaaacatacaatctgacataaaacaggattgccttgcaagacaatgagcagccctatttgcagatcgtttaacaaaagaaataaaaacattttgtaactcagataacaaaagacgacagtcttgaacaatcaaaccaaactgagatggcatttgaactgatccattaatagcctgaacagtgactaacgaatcagtttcaacttccacatcagttacattcatcctcttgatccaactcaagacttctttcatacccaccacttcagcaatctcaggagaaaccgcacccaatttactcccagaagccgcaagaatgagtttcccagccgagtctctaactatgaagccaaagccaaatcgagtctcactttcaaagattgccccgtcgacattgatcttgagcttagtaaaaagtggttttgtccaatgctcctt

SEQ ID NO: 359648 - DNA, 883 bp, Cannabis indica
aatagaaaagattacattgaaattaatagagttttatttagggcacaaagcgtgacatgactttcttcagtattacaatgatgagaatgtgtgttagagacttgcaaagtgatgagaagaaaagagagagaggttaatgccttattatttctgagctcttaagtgcatgtgtagaattaatgaaatcatgtccctttcatgtagggttaagaccctttatatagtattagaattttacaatttgttagtcaaaatacataacacacaaaaaaaaaaaactaatccctagaaaatagggtagttatactctgacaaagctttcctacttttgtaggcagttcaagttgttttgaagttgtaggtgtgttgtggacgatttggagtcttctagaaggcctatgggaaaagtacaattgttagagcataatacgtgcattgaccgacctaccatatttggaggctgcccggtatatgggatgtcacgcttggctggccagctcgaggtttggccagggtcttgccaatgcttatgtatctctgtcttttctggggattttgatatctggatgaaattttttcagaaaccttaaagatgtggatcttgtaagtctccatggtcttcttgtttgagtctatgttgcaaccttgagatcttgaaggatagggggctgcacaatacttagcatgaccgtttagtgctgacctgtcttccacgtgtctgctgcttttgaccacgtggagctgctatgtctggtggagaaaaaattttggataataaggtctatcatttagttttttttattagtcaagtgactcatcattttttttaaattattaggctggtaacgctttttttaaagtgtttataactttgtgtattaaa

SEQ ID NO: 359649 - DNA, 929 bp, Cannabis indica
ttcctcactatttatagggctggaaacttgaggaggaagagtttcctctctcgttacaatgcgcataaacaaaaagatcgtgtgatcaatgctgaatgcaaggatcgtgggattgaggctgaatacactgataatgggatcgtgtgtatgccacatccacgtaagttgatccctgagttgtagggattgagctggtgactcatgatgcgttaagctaaatttgttaagtatggatcattctgcacggctcgttaagtattccattctggatatgccagcgaggcatcctactcggcatattgctccgaacagatgctccaagtagagtccacgtgtcaccattctcgtgatgccacgtcagagtgccaaatttagtataacagatgtaaagtgttcaaaatagtataaaattactttttgtttgtattatgttaaaaatatattttattttatcaaaacaatcacaggaatagtggttatgttgattgatttttagggcttttcacatcacatactgaaatttttaatttttttttatttttttactgtgaggcaaaatttttttctaaaatattgtatttttttttcaaaaatactgtataagttttatactatgtactgtgttaagtttttacggttgttccacgattgttttttagttgttccactgttgttttaattgttctgttttgttgttttacaattgttttataaaaaaatagtatttttgtaaaaaattccgtgtgacagtaaaattgtaaacttttacaaaattctagaggctgtttggctttatagtttaaaaactgttttctgtttttaaaactgaaaacagtttttaaaactgaaaacagtttttaaaaacctattaggagtcgtttggcaaaaatttttaaaaaactagttttttaaaaaattagtagttttaa

SEQ ID NO: 359650 - DNA, 809 bp, Cannabis indica
gaactgtgcgtggaattttgaggggaaggctttccacaaattaaatcttcctggtgatagcttgaagtaccattattggaaagtgtagcagggaacattctacaccgcacgccacctcgtacccttgcagacccatctgcatctcaaaatatttaagatgtgataagggtcttctttccttgcatacatcttccatgtcgacatcttgaatttaaggggtagttcaaggtctttgatctttggggagaagggtgatccgcgtgctcggtccagctcgaaattaatgacttttgggtcggtcaagccttgtaccatctttttcaattaatccaattgtgcttgcacaaatggataaactgtttcagcctgttgaccgacctgtgtcacatcaggatctcttagagctgggtcctggatgcggatacctagtaggacagttggttggacgtactgttcgtccagaccccttcttctgttcaggtcagccctgaggtcatgggctgcacccaatttgttaaataccgaggtaccaggtggtctcggtgtctgacttgtttggccggtgggttggctagaattttcagtctggatgaagttattgttgggctttgtgccctaaataaaactctatttcaatgtaatcttttctattcaattatcaataaagaaacaaatttattttctttacttatttagtatgttatttggttcatgtgatcatttatatgtttatttgatttataaattcattcaaatccttatcacattgatattcttgtttattgtgtcgtcaacacagtggaaagtaa

SEQ ID NO: 359651 - DNA, 607 bp, Cannabis indica
atataattactgaaatgaggcctcaatcatttatctctatttagtcaagctcgaaggaaatcatcgtttcacttctaaatacctatagaagctatagcttccatatatatgatcagcgctcccactcaattgaactatcatgtccttaatctgtatgtccgagaagatccaattggtcgactttaacgaacaaattgaagaacataaataatacaactaagattgaacctagccatatcaggattaagatccatagacctaagatcaactattgatattgacttagaaagatataacggtaagcttatgatatcttatctaagatcaatatcggtcccttccaatgtatactccatatatctgatactgataaactttgcgaatgccctggaaaggacataacgcttaccttatcactgattattataccagtctaaatccagaaactgtaaaattgaatgaaattagacaaaactccttaaatctaacaatcttaatagttcaggtgaaatttttagcggtcaaaaaagttcagggggtatgatttggtatatgtcaaaattcgggaaaaaaaatactaattagccggaaaaaaaaatattagaaa

SEQ ID NO: 359652 - DNA, 962 bp, Cannabis indica
acattgtccttgttcaaaatatcaatggcatttcttcttcctttgatagcagccgagaggaagaaaaacttcgaacacttatcaccttccttaagccaagtcactctggctcgttgtttccagtagatcgctttcctttccagagattcattcagcactcgacggatctccctctcctgattccagtagctggcaccagcagggagactttgtagagtattgagttcttgttcaagatctttaatggccacatccaactttcgaaactgggtccgattccaattcagaagggctacccgagtggcacccacctttttaaaaatgcgagcaggggcccaattgtgtttgaccgaattccaagcatgggctactaccagattacttctagcgtcacgggtccagccctcttcaaatttgaaacatctcttgaatttgggttccatgccctccgaaagaagacagagggggcgatggtccgagttgctagtttgggcagaatagagaatagccttcgggaataattgaaaccaggccccattcgcaagacctttatccagagcagatttcacatggtgccggccagaccgatggttatcccacgtcagagagtctccttgaataggcatattgataagacctctaccctcaataagattagaaataatcggaatgaagggatcccgaccagaggagccttctctctcagaaccacttaggacaaaattagtatctcccaaaattagccaaggcccaccaaatctatcccctaatttcaagaactcagtccagaatattttcttagcattcatatagggaggaccatagacacacgaaagcagccacgggtttgagggagggtcagagtaaactatccccgagatatgattgcacgagcaagaaatacactcaaaactaaccccgacttccaagccagaatgattcctcccgcattactaatagaa

SEQ ID NO: 359653 - DNA, 177 bp, Cannabis indica
attcatggctaacatcttcagtgtcatgctcaattccactgttactcatgtcagagacatcttcttcacatttctttttcacaaaactcatgaaatgaaaaaattatcttcatctttggacaaatttgctatataggttctatgttttcattttacgatataagtgtggtggagagt

SEQ ID NO: 359654 - DNA, 520 bp, Cannabis indica
attaatactttgtcacacttaattatttataacttaattatttaatctacatattatattatataaaataatataacagatctaagatcctagtaaaataatttccaacaataagtccccttatcaactaacttaactaactccaaaaagtgtaacaaatctgaaagtgccacatggcacattgtgacttatgttaaaaatattactgtatttttgtaaaaacttcgcgtagcagtataaatgtaatactgcccccaaaattcaatatttttgtaaattttcctatttctaactatggtgccattacgacaacattcattgtacagtaacaaagaatcatgttcatttgttaaataaataaatgttctttgaattgtattattactaatcacaatacacattagaacttgattataaaaaatgagcatctccaatggtaaaatcctttaaggatgctaaaaatttacacatcatttgaaaatataatattttattttatttttcttcttcatcatttttg

SEQ ID NO: 359655 - DNA, 889 bp, Cannabis indica
cacctactcaatttatatatataatgaataaaataaaaaaaataaatgaacaattaaagttatatcaactatttgtatacataatattttagagaaagaacaagattgaaatttagattatatatttaaaatgcatgtatcattttctataaaatacctttacttgttatttgatatccaccactgttctttgatgtagactactcttgaattcattcttgtaaaattattataaaatggtggctcatgtactagatatgaatgtgagaagaagaagagatttagtaatacctaaatatctatgagagaaggaaaaagagaataataatactaattatttatttgaaggtctttaaaaaattttagtttcctactttttttttattgttaaaaaaataaataaaaaaaaatgtgtgtgtcttgctaagttactattaatgaaaaaaaatgacttaaaaaaaaatgaaaacaaattatttcttttagagaatatatatagtaaataaagtaggtacgtatctgacagattatttattatattcaactatttctatattttttttaaaaaaattatttaactttaattgggctaccatatattacatattaagatacacattaattaaaataaaaattacatataaaaagtaggttactataatcttaggggggccatggcctctatagtcattaacatacatccacccctagttttagtcacaataaaatttataactaaaaataaaataaaatgtggttaattttaaattattattatcgtgttgtgattgaaaggtttgtggctaaaagtattagttacaaaaattataaattgttgtgattaaatgtatttttagtcacaatatttgatgtgactaaaactaaatta

SEQ ID NO: 359656 - DNA, 491 bp, Cannabis indica
atttaacttatgaaatgactattctaccccttcaccacacattatgttaaaacataacttaaggacattatggtcattttctaactaatctcgccaaaccgacaacttaaaattctaaactagtccagaataaattctaatttcaattcaattcatcttatattgtcatgacatctttgaccactccgtcaaatttccacggtcgtcgggtccgaaaacattttatttcaaaaatagtatctactatatccacttaatccaataaaatctctctaattaatatattacgctttatttgttcctttaatcgtatttcactaattaactcgtaattagcttaagtaggattataatcctattctaatgcccacttaatcatatatttaataaatgctaataatgatttttccctctgaactttgacatgtaccaaatcatgccccctgaactttaaagtcattaaaaatgccccttgaactattgagattgtt

SEQ ID NO: 359657 - DNA, 511 bp, Cannabis indica
ctgtaaagatgatataactgtaagaaaaaaaaataaaaaataaaaaatcattaaaaaaaagctacggatgtttgctaaagaaaaaaaagtatataatgatgcatagttaaaaaagaattgttagtaatttacaaaaaaaaaaaaatgaattgttagtgatggataatttagttttattattaaaaaatcattaaaaaaagctacgcatattttttaaaataaaacattaaaaaatcaattaaaaaagttacgaatcatttagttttataaaaacaataaatttagtattaagtttgtaatattttgaagtataccattatttttatttgttttattttttagaaaaataattagtaatttagttatgattaaaaaaattatataaatgagagaattaaggagagaatagaaagttacatttagaataaatttagagtgacacgtcatcgttttatacttctcgcttcttaatataaatttatttttaataataaatcattttatttttaat

SEQ ID NO: 359658 - DNA, 775 bp, Cannabis indica
cacctgtgtgagtttactacttgattgcgtatacttgcgtagtgattataaatttagcatcaagaagttggccaagccgagaaggatggagaaacattttctccattaagatcacgtatgaaggagttgttttgaggaacttgagtcatgtagcagccaacaggagtggttcgaggttgatgaaaatattgagccccatactcagaagatgggtcattataagatggttcagaaataatttggttagtgggaggccgtgggcttggaggaggggctaaggaaacagggtgagtgacatgagggcgaagacgagttctagtgctggctatgtaaaaagggttggaagttatgcggattttggctcccaaggtgtgatcatattgaagcggtggtggggcagaagaggaatcacattttgctagaaactcaggacaatgatttacgatatggttaaggcggccatagaaatggcaaaagtcaggtagattttcgaatcgaaattctaaccaaactggggatgccataccttgaaagtgaaagcctgtgccacggggaagaggttgagtaacatcgatctcaattctaacccgaagataaggaccccaggtttccttgagagaggcagtgtcaacctctataaaccggcctaaaatctcccccagttttctagcaagagcccgggaacgtttgaggaagggaatacccgaaacttggatccaaaacggagttgaagtgagcatatccgttgtgacaaccgagccagcttcaagggggg

SEQ ID NO: 359659 - DNA, 608 bp, Cannabis indica
ataaatcacttcaaatttcttatattgataactaatcagattgtaaagggttttatttagggtacaaaacccaacacgagagccacgggcgtgagcagccattcaaacaggggctgtgtccgagaattctcggtcagctccttgtctgaatgagcggctgtccgagcgtctcctatggcttgcgcgcgtgtgtgtgcattcaaaacccgatatttttgttcaaattcaaaaaatcataactaattcataaaaaatctaaattaagttctgtaaaagcctaaatttattaatttttcgtctactttccagaaaaataattccagatcgaactaaaaaatacttcagtaacatacattgcaatttctaaactatgatcacataagcacataaaccacatgaaaaccatccaaatcaatacaaatcatcgttttaattcatatttcatgaaaataaatcattaccgtggctctgaggccagttgttggattatgttttaccaggatctagatttactaaccagtatgtttcattaacatcctaatatgaatttctaaaacaataaaaatttaacacatataaagtttcagaaaaccttacattggtgcagc

SEQ ID NO: 359660 - DNA, 543 bp, Cannabis indica
gattgtactcatccactgtcagctttaattatgtcagtaccttcagaaaaagtcggaggttgcagcttcacaaaccgttcaaacacggaatctctgtgcagtatcataaacccctggttacccaccactggcacaggtgctggtggtaacacttgctcaacaggggcagccggtaccggttgccttaatcgacgtaactcttcctcttgacgaagtatgatacctcgcatttcatggaacatctactgccagtcagtaggaggattagcattgccaacccccgtattatccctcgagttctgcggaggtgcaagcgttgccgatggattggtttggtctacaccatgctctacttgctcgccctctggtgtagatgattgcggagggtccctttttacaagtacccctgtaatcaacaaccccagcgagttaagcaccaataccacacttatgcacttattaccttaaaccctaactcaactatttacttcatataattaaacacttaacatatagcattttaagcatggcatcatatatcac

SEQ ID NO: 359661 - DNA, 565 bp, Cannabis indica
actactcttcaatcccattatttcaccaaaaaaaaaaaaaagaaaggccaaattgaaagttgagcataaattaagaacctgctatatatgtgcaataagataaactaaagcatgagaagtattagaaatttattatgttgatgaaaaagaaaaatctcatatatacgactaactaaaaaacgtacagtgtgccacgattgattattcattggggcttcggtcgctggctcccctgtcatcaggtcaccaacttccttgaccttccggcactgggcaggcgtcagccctcatacatggtcttacgacggtcgctcaacggataaaagttactctagggataacaggctgattttctccaagagctccgatgtttgatcattttctgcttgcattcgtctgggggctgttgagagttcaaatttgagggcaatttgtgctcaactgagttttagagggcagttcgaagaggaaggcaagcagtctatgattctccctttcgataaaggggtctccgccagaaaagaagggatttcgtaaatcaaacaacagtagttggaggagccca

SEQ ID NO: 359662 - DNA, 617 bp, Cannabis indica
ttctgtttatctcagtgccctatttgcctatgaccaagtgccaggtcaactcctattactatgtcactcaaaatgtaattaaatggcatttccacgtgtgcactattgtacacgtggtccacctacattggtctacatactatattaatttaaaaattattttaaattaaaaaataaattattagttttacaaataaaactaattataaaattaattacaaaatcccactcactcaaatcgtccatgccatgaaacccaactgaagacagtcgcgagcccaggttggaatcaaatcgccccctgacggaaatgtgattgatctagtcttcttggaggatttaggcagaaaatgttgaatattcttgacgcctccgcatcttcgtctcactccgtattttaatttctctgaaccacgacagccactccattcgtctcctgctccgacaagcttccgactgtcgttctccccagtgaaagaccccaagcagtcgagttctgcaactgaatgcagattggaaccattgttttttccagtcgacacccacgacattcattcctgaccattgaactctcctcaatttcttctacccaaatttcagttcactataaaaaaaaa

SEQ ID NO: 359663 - DNA, 664 bp, Cannabis indica
tcttggttgtacgtcaatctcctgtgagatggtggctcgagttctacaggcagcatagcttcataaccatatgccatggcaaatggagtctgtccggttatcgttttctcagttgttcgatatgaccatagaacttcaagaagttcttccagccaatttcctttttcatcttcgagtcttttctttagtgtatccttcaaggtcttgttgacggcttcaacttgaccatacgcttgaggatgtgccactgtggagaaacttttgatgataccatggttcgcacaaaaattagtgaaggattggctgtcaaactacttgccattatccaaaactattttgtacggcaatccgaaccggcagattatgttcttcacaataaagtgttgaactttctttgatgtaatagttgcgagtggttcgacttccgtccacatagtgagtaatcaactgctaccactgcatactacactcttcctttgcctttcggtagttgtccgatcaggtcaattccccaaatggcaaagggccacagactttgcatctcagttaactcgttgggcggagctcgaggtatctttgaaaatctctggcatttgtcacatttcttaacataggcctttgaatcttcaatcattgtttggcaaaaataaccttgccttagaat

SEQ ID NO: 359664 - DNA, 754 bp, Cannabis indica
ttcaagcgacggacgtcttaacttgttcttcctgtccagccacaagatgatggctcgcactaaacagacaatgcgtaaactcaacacgtctaaccctcacgtggcccagcacgctacattacccagtgccgaacaggatccacccatctaggaggagggagatcatgaaggggacgctgaagtccaagagatagaggaatagggaaatgtccgtcctggcagcccttccgaggtagaagaagaggaggaggctgcacctcttaattttggaggatacaacgaggtcggggagccagtagaggcggacgatgatgtcctagttgaaggagtggactacgtcactgaggagcttactgttgcagttcctcaaaggaggcaaagtgccttgggtcccaagtgggtgagccctccatccaaggtcactgaggcacgcttacgggatctcaaccagtgcgactatctgggcgagctggaatggtatgttcctgcctcaaacaaccgagccacaaaccctaatagggggatgtgtgcctggttaggcgctcattccaaacaaggggcactgctgcctttgcccccgtactttaggaaggtggaaacttcttctgtctctgtccgacccaattcactcccaagggcatcaagtatctgtctgccatgttcattctctacgccacccagaagtggggtatgacttctcctcatgaggttagctggtttttgacttgaagtctactcccaagtaaggcaggtc

SEQ ID NO: 359665 - DNA, 802 bp, Cannabis indica
tttccattgagaaagctggaggctgcttcaagaacatcgttcctgacaacatgccagttggctttgtagaagtgagaattgaaaccgtccgggccaggggctttgtcaaggggaagttggaagaaagctttctctatttcgtccagggaaaagccctcgctcaagagggacttgtcagagtcagagagagagcgactaattccttccaaaacggtatccatatcagaatcggtggggctggaggaggtaaataactggtcaaaatgggactcaatttctcgaataattccttcctcatcagagaccatgccaccatttgccgtatggagttggtgaattttattcgtttttttcctctgagaggcaaatcggtggaagaactttgtgttcttgtctccctgagccagccattgagtacgagaacgctatttccagtaagcttcctctttgtagagtaacgcatcgagccgggattggagatcttttatggtctcgatagtgcgattgtcccaaataggattggatcgggctaattcgagctctttctcaagcttactgatttgctttttgaagttgaaatttttttttatggttccaagagttgagcttttgagcgcacaaagattgagcggcgataagattaggtatagcttcctccgtggttggggggggggaagtccaagactgatccaaaattctatcccagttcgggtcctgaagccacacattctcaaaaagaaaccttttgctatgggagcttggccccgttcccgggctaggggaagtgattaattccaacgct

SEQ ID NO: 359666 - DNA, 1431 bp, Cannabis indica
gaccctgcatgactccaagagcagcacggaggttctggatttcagtgtcatctccaatggttgttcgaacattggtagcgggcagaacgacagttttatgaatgccctagtaggctgctaaactggattcctagtctcttgcacactaggcacaatttcaatcataggagtcgtcacaccgcgacctacagttgatggttgttcaggatttgtagttggtggaacccttgtattccctgggttttgcattgcaggatccactgtctgtggattcgttggatcaaccacacctctgcgagtctgtacaaccattgtatttgcgattagatttgagataaagagcgattctcgattcatctctcagtgaaagcaccaaaatgttgacctcgcttttagccaacgacagtgagtctaatttgtaagcgagaagtagtataatatgagtgtaatataataaagcaaatgaagacacgagaattttatagaggttaagccccaagcagttcggtaatagcctaatcctcgtagtttgtattgacttaagaacaaggaaaatggttccttttcttagagctcttacaataatatctctgaatatgaattcttatataagtttttcgaccttttgcccagtgaatatgaatcactatttatagggctttaagcttggtagggaagtatttcccttcttattacaattgatataagtggaaagattgcattgtaaatacaaaatacactaatcaagggattcggacaacttgccttatctctgtgatctgatcccaaagttataggaatttcttcgatgactcacgctgcgaaagctgaatttgataagtgttggcgtgctacgcggattgctcactgcccggctaagagggctttgtccgatcgaatgtatgtggtgccttgctcgacatatttcttgggagcaggtacatggagttgattccacgtgtcaccatcgtgtgatgccacatcagagtgccaaaattgggataacagttttaacaaatttctttcatcttgaatccatggatcatgatcttcatccttcttctcaccttctttagtcaagactgccattagctggtgaccagccttcctgtgctgcagctctatgcgatagcattcgcgagctagcatttgatcaccctgcactactcccacactcattggcatttcaaattttagagataagtgctaaattgaagtaactacccctagtccaattaaggctggtcgacccagcagtatgttgtaagctgatggcaggtcgacaaccaaaaagtcttgcattatcgtggtggataaagatgcttcgcccaatgttaatgggagctcgattattccttcactgacgatactgtcgcctgcaaatccgcaaatatttaccatgcaaggccttaatttagctttttcaagccc

SEQ ID NO: 359667 - DNA, 771 bp, Cannabis indica
cataaccgcttcttaaattcatcatatacccgccccaatccgtgtttaaattaaagtagggatgggttgggtggggattatttggcgagagaatatttcccatcagttacccattcatatatatatatgagcatttaaactcgtatttgccctcgaaattcgacccctacccctaccctattaaaggtgggtacctgcggtattcgaatccgcgggtaccctattgttattagaccttaatgccacaatttataaatagttagtggctagatgttgtgaaaattgtatacgcaagtgtacgcaatcgtaacaagtaataaagtgataaatcgagtatcgtctccacagggattgaaaattggaaattgatttataaaactaattactcacaaattggtttcaacaaaaaaaataaaataaaataaaataaagtgatgagaatatgtaaaaaaaaaattaacaaacacaaactatgaataaaacaagctagaactattagattgacctaaaaaatgcaaagttgatataatggtgctaatgagtattgttgtaaattgataatgtcaactaggaatttaaaatgtcataatcctttttccaaagtgtttatggtttgattctctaattaattaacatattcctatgcccaattaattttaagaataccaatttaagcacaattccttcaagtcatacaaggtaaataacacattcctatgctatttacaaatcacactttttcaagttgatattcatgcatcattcaagcaa

SEQ ID NO: 359668 - DNA, 843 bp, Cannabis indica
aagcgaagtcaacattttggtgctttcattgagaggagaatcacagatcgctctttcaatattagacacgatggtagaaactcgtagaggcctatctgacccagcaagctcacagacactggatccgacattacaggacccaaagagttcaagggttccacccgttgtcaatcttggacagacgggaagcgtggtgaatggtgggacaactcctgttattgaaactgcgcctggtgtgctagagactgggaataacagttccgcacacagccagggcattcataacacgactattccactaggcatcaacgcccaaacaaccatcgaagacgcaaccgaattgcaaaatctccgcgctgcgctcggactcatgcagggtcacagtaatactctgcatcatgatcaggaggaattacgtgccacagtaaacctcgcgtttgacgaacagaggtgtatgttcgtcgaatagagggacaaagagatggaggcattaagggctcaccatgcagaaatcgaagatcatagtcggcaagctactgtgctgatacaaagagcctatcagactgtaggccagtaaacgccaagcgtcattcccatgagagaaacggaggatgacccgacaatgaatgcctcccagacaaccaacggtcagccgtccgatccccggtcacgagttccactcgtgggccaagaggtaggcgagcagaccttgtccgggaatccatcaggaggagccatgctcgacggatccactcagaataatggagccaatccacctgtcaaccaatcgaactaatcgctaaggcagccaggttctctgtgttcgataggctgggaacaacc

SEQ ID NO: 359669 - DNA, 628 bp, Cannabis indica
taaaattagtttattttttttaactttgactaattatgtttcttttcatggttgttatattatttagttttatatttattttttgtttgattctaattagctacaggttggtaagaaactcaaactaaaatatttatgtaatgtgacaccatttctgatatgagatagcaacaaacaacccaaataaaaaaatctcaaagtaattatgaaaaaattaaatgtggtcattacaaacaaaaaataaaatgaaagaacaaatgaacaattaaataataacgaataaataactaaataacaatctaaaaaaaataaacaaacaaacaaataaacttaaatgcaactacaaattacttgtacatcaattcaaaattatatgtgcacaacaagaaaaggaaatatatatatatacttatttagaataaattaatttaatattctacttcggtaatattttattttttaaaatttctatggagtagtaataaggttgttagtggtggtataaaatactcatatatatatatatatgaatgtaaatatataaaattcaaaataaaactagcactataatatatattttttaaaattaataagtgttataatataatataatataatataaagtaga

SEQ ID NO: 359670 - DNA, 634 bp, Cannabis indica
aagtatcgacttgtgcttaaaggcagtgtgggaagtaagagtcaaatacccctgactaagggattataaatagtgagcctctagtagcagatcaaatacaagtagggggtataggagaaataatagtcatggacagagtaaggtctgttcggcatggtttgccaattatatatagtatccttacctcgataacttggctgattagtacattttaagattggtatagttgacctattattaaaagtcaacagaaagtaaatagttgagctacgataacccatggtaaggttgaacttattttaaagggaatattagtgcgctttctgtgttttaatacatatatggtatagtcttaagtagataatcggtattgggatgtatttgtgaagagatttgaaagttttagaggtaaaattaagaagatgggataggttttgcgaactggagaggaatgcaatatacatgcataaatatggaatgaaaaaaaaatatgtggtaattttaaatatgaagaagtgaggtgatacctagagggttagtataataaaggaagcaatcattgaacatatatgtcagcattacagatttaaacttcaccactatatcgatgcaataccaaagtagacaaaagtta

SEQ ID NO: 359671 - DNA, 568 bp, Cannabis indica
aagtaaaagtttaattttaacgtacttaactacactccctgtgggatcgacctcactcctagtgagtctactactttaaacgatacgtacacttgcgtgtgcaaaaatatcgcaacattaggatgataaccaaaatatttattcttttagctaaattagattgtctattttgagttttcaaaagttgtaaattattctttcaataataaattaaacatcaacttttaatttaaatattaacataatctatattagaaattgatacacatttctacaatactaaattaagtctagaattttctatacatttgtagaaaaatatactctaaacttttagataattgtagaataatttagaattttctagacatgtagaaatccaatagaacataggcatttctagaaaactttagtctagaagtttctagttatgcatgcttaagaaatatgtagaaatgtatggataaaatccttgaactagaaagatctagaagaaataattctagccataaagtgtaaggggtgagcaactataaataccccatcaaacttccaaattgtaaccaag

SEQ ID NO: 359672 - DNA, 898 bp, Cannabis indica
ttgctctggacacatgatgtggatgtaacttttgcttttcatataatatcagtcattttcattgttatcttaagtttcctaactttcacgcttttacttttaccgctttttatggtgcacctcacactcaaaataaactgcacacttggcaattaatagatcgacttggctctcatgctcggctctagctgtggctcattatgggcgatttcaatgactacctgtctctttctgacaaaatcgggggtaatatgtctcgtgctccatccgtgcaatttcaatcttttattgacagtcatgaacttcaccctctcaccccgttaggtaatcttttcacttggactaatcgccaaaagcaaccaaatcatactcaggaacggttggactggtgcctatctaataatgcttgggatgctatatttcctgattcccaactaaatcatggcgatttttttggttctgaccatcggcctctcattcttaccttgcaatatatgaacggtcatcgtaactaaaaaccccgcttcatttttgacaagctttggatgaccgaaccgggatttgaggattgccttcgcgatgcttggaccgagactaacctgactcctcactccaatcctttaattggccttaaggaaagactcacaacatgctcctctcgcctcacgctttggaagcaatccttaggccccccgctagctacccaaattcgtaatgttcaatctcaactcaaaattattaactctttgccccaacctatgaatgatcaattagatcagggtaggaagcttgaagcagagttgggtagcttactgcaaagagaggaaatttattggcagcaacgctctcgagttacttggctccaacttggtgataaaaataccagatacttccatcg

SEQ ID NO: 359673 - DNA, 1136 bp, Cannabis indica
acacaaaattctaccaaaatttgacttttgtttcaatgaaaaatgatttttgattcaaaagatatgaagaaaacaagtttgaggcactggggtatgcattgcataaccctgcgagcgggaaatggggtgtctgaccgggggatgaggctgtatgcatcctacttggccgagggagctcggcgtgacacggcttcagacaacccgtatgtttgtttccccggtgaggttgtctgaaaccccgtggaaatgcggcggtcccttaggtgcgcgcgcgtgtatgtgcatcaacttgagatattttcattcaaattcaaaaaaatcataactaattcgtaaaaaatccaaattaggttctgtaaaagccaaaatttactattttttttgtctactttccagtaaaaataattctaggtcgaaataaaaaaatatttttacaaaatacattgcgatttctactctcatcatataagcatataaaccatcatgtgaccatccaaatcaatacaaaatatctttttaattaatatttcatgaaagtaaatcattaccatggttttgaggccagttgttgaaacatattctaccaggatctagatttactaccatgtatattatttaacatcctaaatatgaatatctaaaacaatgtaaataaacacatatacagtttcagaaaaccttacattcggttcaacagaatattaatggctccttccactcagatctctaacccttgtatcctgtctgtagcagagtatcaccaagatctgagcccgaatgtccttctcttgattttggattcttcacagctttacgcactatgattgagataccacttgatgtgtgtgggcactcactctatcactcaaggtatgaaaatatgatgaagaaggaagagagaggtggttcgaatatagaaggaacagatggctcaatttttcatataatcaagaaaatttcatcatctttaaagtgtgagccatcactatttatttataggaaaccacttaggtttaggttaggatttattaggcattaaaataatagaaaattaagtggaaattaccatttaggtggccgaccatagtaatgagcccacttggaaatttttctacttttgactaatctttccttta

SEQ ID NO: 359674 - DNA, 592 bp, Cannabis indica
gaaaactaagcccaaggtttatactcaagaaggtcgagtaagtagcatatcgactagccttaccacctgtgttatagatgttcataatgtatttcatatttcaatgctgaagaaatatgtttccgacccgactcatgtcttgagttatgaagccctagaactatagtctaacttatcctataaggaacaaccagttcaaaacctcgataggaaagaaaaagttcttcgaaataaagccatagctttgttcaaggtactctagaagaacaataaggtggaagaaactacccgggaattagaggctagtgtgagggtttcgagagttatttaggttagattttgaggacaaaatccttttaacagaggtataattgtaatgaccgaatgttagattatggattagtaaaggcgataagcattaattattggtattttatacgtatattatatgattttatatttgttgtgggcccatttttagaaataagcattagagttataacttcttaattctggagattttattaaactctaagagtattatttatgctaaatatgaattatgcaatttttgtgatttttgcttggcgac

SEQ ID NO: 359675 - DNA, 511 bp, Cannabis indica
attaaagagaaaataccaaaattaaagagagactccttctctttccctcttccccttcgacctgcaccaaaccaaggagaaatcagctggttctttgcttctttttttggaaattcagtagagatttaagggtctttgaagctaaggtaagccctagtaatatccctctttatttcttgaattttatgggtgattgaatatgttatatctaggtttagtggctattaggttttcatatgcttagggttcgaattttagggtcctttagagttgattttaactcctagctactggttttaatgggtgttgttggttttatgcaactttgagctttgatttcaaagctttgagctttagtggcaacttgagtttaattggtttgttctgtgaaatactggctggaatttattggttatgcccttattaggtactctggagggtttcatggcatttggtggagaattgagcaacaaatgaagggctttgggaaaactggtgcaaaccggctagc

SEQ ID NO: 359676 - DNA, 502 bp, Cannabis indica
gaagctgagatctttttcccagcatcaggaaattcctcggtactagaaagaggtcggtgcaaaagtcttctggcgtaggtttgtttcttgggttggttggattctctgatagaaatcacgccaacttccttcatctgcatccatgccaaccttccttgaaattctttatcagcctgaggtggaccttttaaatcgcccacaagatcaatccagatcctttgtggggatcgcccatggcaggctatagggttcccatagtttggattcgtcggaaactcctcagccttggaatccattgtttccggctccaattgaggcttgaagtctgtatgaacaaatggaaactgattggtgcatctgggtattatgaatttggaaggatgaacttttaaactcagaatggacattttggcagaaaagaaatgaaccattctgaaaatggatctcactaaagagccagaggtttgtgaaatatgataagcttgagccgcccttttataca

SEQ ID NO: 359677 - DNA, 814 bp, Cannabis indica
ataaagtttataaatatttttgggatcccaactgtttaaaagtttaaaagtattacaagttttattttcattctgtttaatttaaaagtttaaattctgtgctattttgattagtaatcctgattaggggattagggttccataagtattttgggtagcgtgcctaattatttagggcgttacactacccgacttcaccaaaaaatgacatctctgagaattggtgaacgactttaccaaaactaagaaaatggctaagtgatgtcaacatatcacctagaaatcaaaaaagacaagtttgagacattttttttcacttacacaacgtccaagttgatgccaggatgtcaacctgaacctaggatgtcaacctaggcactacatttcaacttgggcattgggtgttgaacaacctttagtaaaacggccataaatccctcaattttaatttgatggatacgatttaacttgtattttagagctctttcaaatctatttcaagtcatgtttaacacccatatcgcaattctgaagatttcaagcccaaaactcgtgcccaagataagtgcaattttttccatatatttcccgttaacgatccgacagacaagattcagactccaaaaatcggcaattttcatcaagattcaattctcaccgttagatcatcattaatggccaagatcagcccaaagggaatttttcatattttttgtattagtttattgatattttaataagacttcattccatataaaaggagagctcctctagctcatttttgttgggttttatgccctaaataaaactcttt

SEQ ID NO: 359678 - DNA, 716 bp, Cannabis indica
atggctagattgatcacatgggtaagtttagaaccttatttcatagtgggaaatattttagagaaaataaattatcgggattgagcggggttatgggatttgaccattttacccctagttttagaaataccctagttttaagttaaggggcattttagtcatttgctattaagtagaataggtggctgcccctttagttaacacttagcattctctttaaaattcagcaaggaattagtgagtgattcccttttcatttgaaaaataaatttagaaaataaaaagagaaaatcaagatagacctctctctctctcttgctttcggctgggacaaaccaagggaatttgtggttgattgttgaatttcagcaaggatttcagagaagaaaatcaatctaaggtaagttccaatgaaacccttcttagatttcaagttttttaagttaggttgaaatggtgattttgattatgaggggctgttaggttttaaaatgcttagggtttgaattctaagtctattttgagttgattttgaactctggttattaactttgagctgtggtgagggtagtgagcaagcttgagctttgaagctcaaggtttgagcttcaatggcataatttgatttagtggtcttttctgtgaattgttggttggaaaatgttgtgtatgcattctataggtatactagagagtttggtaaggtttgggattga

SEQ ID NO: 359679 - DNA, 389 bp, Cannabis indica
acacaaaaaattaataattaaatgtataatcttgggaaaaaatagtgattactttcagaattaaaaaaaaatataattttaagtactttgtgtaaaaaaaaattaaaatagggtaaatttcgtaaatatttaagtttaactctcagttttaaataaatgcttaagttttaattttttatggtattaatatttaaattataattctaaaatttctgtaagtacttggttgttgattgttaagtaatcttgattggtctaggtcataaattattatttttaaaaaaatagtttaaatataccaatgaaaaaaataacacgtgaataatgacttgacatttaatggtaaggtacccaccaaatttcaaaaatataacttaggctaccaaaaa

SEQ ID NO: 359680 - DNA, 726 bp, Cannabis indica
gaaatggagttttcaaatgtgagattcattatgttttctcattcccatctcgtgccccaactccagctccaatctctctctttctcatttgagttctctctctcgctcaatgattttttttttttgcaaacagtggtggtggtctagtgggatggtggtgcttcgatgtgcttttggtggtatgatgggttgttgtggtggcggtatttattgttgttgggttgttgtgacggtctgaagggttatggtggtctaaaggtttatggttttttttaatctttttttattattttgcttcagttcatagccggagcgataaactaatttgcgtcagtgctttactatttgctttggttatgaattgaagaaaaaatcttttagcgtctgttactaagtgaagtgaaaaataagactatttgcatctacagttagagcatcggttacacaaaccgatgcaaattctttatgtgtcacttaaaaactggaacaaaatgccatttttgtagtagtgtagtgaagttgaattgacttatcgaaattccaacacccatttcagagttcctagagtcaacttgggcacaaggctagggacccctcctaggtcaactgcaatgactcgagactactcaactccgagatgttatctttcttgtcgcgtgttaaacattgatgtccacatcactaaggaatattttgttgggttttatgccctaaataaaactcttt

SEQ ID NO: 359681 - DNA, 471 bp, Cannabis indica
ttctacaggtctgaagcttcttgcaggaccccaaagcaggatctatgtctgtatccccgccttgagctagacttcattgccctatgcagggctcatcttctagacttctagtgggcatcttctcctttttggccttagataaggccaggttgtaataatgatgggtagactgttggtctcccatcacacataccaccccgtgccttgttgggaatttgagacacaagtggtagatagacattagcacctttaggtcattgagggctagtcagccaatcatggcgttgaaagccgaaggaacgtcgagcacgataaattgcgccatcagtgttcttgttgttagattctctccaactgtgaggggtaatctgataaatctaataggtgcgataccttggccaaaaaaaaaaccatacatcactgttgggttttatgccctaaataaaactctttacaatctgattagttatc

SEQ ID NO: 359682 - DNA, 514 bp, Cannabis indica
gtatacgtgcctcacacgtaattttttgttagtatatatatgtatattgtagttggtccaatacaataagtagggagaatacatgtgtcgaaattacccaaaaaataatggtacaaatcattattgtaaatacgtgtgtcgtgctactccgacttatattttttgtactatttaaaatgtaggtcgtgctgtggcgaatcatagaaatataagtcgtgtcatgtaacaattttataggataggcccgtcacgacccacaaatccagtaatttcgtactgtgctcggattcaggtcgtactttatttgtggcggcctttttttcttaaattaatataccaacctattttttttgtacgggctcaaatttgtactctatatttttctaatttttattaaaattgatgaactagatactaaaatatatgtattttttatagttttaattagtttattatgtatcttttctaataatagttacaaataattatataaaaaataattataatttttttt

SEQ ID NO: 359683 - DNA, 676 bp, Cannabis indica
taaaaaaaaataaattaattatggtgtagctttcaagagttaatttgagccatttgattaaatcaagggctataaattactatccttatgataggtaaaatacttaatccctactataatagcctcctttagatatatgtgatatatattgtgaatggatggtattttattgtgaatgtatgtgaggtgattgatcgttaacttttagttaaaaaaatgggcgtaagtctcattttttttaagataataatgtaagccaatattaggacataggatttttttcatataaatttattttttgtaatttatttttatgtaattttttcatcgatgtaatgcttaattgcatgtgagctcgagttctaaggagtcccagccatgcaccacgacacaaccactgcatgtagcttggattttttgaccttggccatgcgcacgatagacacttggtttttcgcttgtaattgtcggaatcaaggaatctcggtatgtgttacaaaaaattatatacaaatatgcaagtgcacgtaatcaagcagtactcacacaggtgaggtcgatcctacagggaattgaactgaataccactaaattagacttatatttctatttggtaaccaataaatttgaagaaaataaaattacgcaaataaaagtatttaatcaatgatgagaa

SEQ ID NO: 359684 - DNA, 631 bp, Cannabis indica
tctttctctcttcacgaactcacgaaccaggcgacccatctcatctctgtcgacccatcacaaaccaggaaccaacaaaaccagtaaaacccaaacccatctccgtcgacccatctccaccacgaaaccaacaaacccaagaaccggcgaaccaaacccacgaaccaggcgaaccaggcaaacccaaaccgaggtatgttgctctcaaattcgacccaaacccacagtgaatggtcaacccaaacccaagcacgaaccgccatcgccaccacgagaaggaaccgtcggcgccaccaccaagttcagtcaaaggtaaggttttttttttgaaaaaaaaaatatttttcatagatttggatgccaattattacatgttgttgagattagtgaaatttttgtagattttgtgctctttcttgtgatagattgtagatgttagatatgtttcaatggtgtctgtgttttttacattggtatcgatgaaatatcaataggatatcgatatatttggatgtttgtttgtttgtttaaacaatgttatcgatgctatatagataggttatcgatataatattgacgaaacatgaaagtagtttgacaattagaattgtctgtgttgttaatgtatatc

SEQ ID NO: 359685 - DNA, 618 bp, Cannabis indica
ttgtgttagtgatttgcgactcaattcatttttcctcaagtagatccaaaggacaattttaaaagttcttggttttcttcttgattataaaactcccttctttgagtcgatatgttcacttcaactagcagcattgcttttgagccaaatgctaccgagaaaggagtgtgtgtcgtagctatcttctcggtacttctatgggcccagagcacctgaggtagctcttcaacccatctacctttagcagcgtctagcttcttcttgatagtatcctttcgggttttattaacagcttccacttgtccatttgcttgaggtctggatgttaacgagaagcttttgataattttattcctttcacagaattcaatgaacaagtcgccatcaaatttggttccattatcgaatactatcttcatgggaattccaaacctatagataatgttcttgacaacaaagtcaaggactttcttgcaggttatggagatgaggggctcggcctctgtccatttactgaagaaggcgacggctatgcatacttagccctcctcgcccagtgggtaatgcctcaattatgtcaatcccccatatagcaaatgggtagggcgaggtcatcat

SEQ ID NO: 359686 - DNA, 605 bp, Cannabis indica
aatttttaaattttaaaaataagccctttatctcgtaactttaggctcagttttcacctagaaaaattccgaattatgatataactatttctacaaaatttatagatctttgaattatctttccaacgccactggaatcacctcaatcggagctctaaaactctagatatgatcattttactaaaacagtttttaatcctgcgaatttatccaaacctacgaatttttttaacattaattccattataatgttatttaatgcacttcatacaataaattaaacccactacacataattttaccttgacttttactataatttcaactatgtttagaaatctatcaatactattttaagcaatagtctctattcactattagtagaaataaataaatacttattctcacacaaattgtatatcaaataaaatttaaaatatatgtatatttttaccgggtattacacacattatgattgaggtaccacttgatgtgtgtgggcacttactctatcactcaaggttcgaaattattgaagaataaaaaagagaatcggtttcggctataatgaatagaaagaggctcagttttcatctgacaaagtt

SEQ ID NO: 359687 - DNA, 555 bp, Cannabis indica
ctgctggaaccttaattctttttacagaatcgaaacatgtctgcttctggctcaaagtcatctaagaagagcggtaagcgcctggctaccctcgaggaggtctcgctgggtcctgttgcccaggaggggtacaagtctcgggcaaccggatgggaggcggccgagcttcactccactctaacttgtccccatcagctggaaaacatcgtggaggtagctggaatcaagccttccacatccgggacctaccaccggccacctcgtgatgcggagacgcccaatcataactacggcggcttcggggcctggagccagacgcatttgatggccggggccatgcttcctctccaagactattttgttaattttttagtttttgtcggccttgcgccataccaacttattccccaagcataccgcctgctttcaggcttatttattttttactccgcccggggatggggctctcccagcccggcggagatattgtatttttacgaacttgtttctgtccccaagaagggggacaaacttaaggacggtttttacgggttc

SEQ ID NO: 359688 - DNA, 836 bp, Cannabis indica
ttttaattaatcacgatttccataaatctcgttgattagcaacgagctgcacagtatgtttaaaaatcacgtaatactcctatgctagttagggtgttacaatatagttggtatagttataaacaggataagataaataaagctcaattcataaatgcaattcatttcaaaatagaaaactttattaaaaattctccaaaattagaaggaattgtctgtaacaatatgaaaaaatagggaataaaatcccaaactaaaaattgaaatccaaattgttcttaaactaaaacaattaattcaaaattaaaaagaagattccgagcttcatcttcatcttggactatcttcatcttcatcttggactatctccacccttctgtccaactatccgattcaacttgctaagatagcatccgagttcaagcagttgtggctgaaataagaagaaaataaataaacatggttagtaggtccataattaataatccaagtggataataattcactaaaacacatcagtttataggaaaagaaataccttgtttctttgctagcaatttagggcattggggtttccagtggcctttttcattgcaatagaagcattttccttttggtgcatcaccaggattagcagcctttttctttttaactgtttttacagcttgaacaggctttttgctattcttccatttcttcttgttcttgggtttggaagtagaggcaaggtttgcctcagccttactcgctccattatcatttccagaattaggagttttagaccctttcttttgtggtcctccaatcaaattttcaaatgtctgaaggtcgttaac

SEQ ID NO: 359689 - DNA, 619 bp, Cannabis indica
aaaaaaaaatatatattatcaaattatgcatataaggattttttttttgaacttttttttttcagaactgacattggtgggaataaaaaggaaattattattgttattataatacttggttcagttatctttctgaagaaaaagggagggtttattggttaggatcatgaaatgtagatccatagttaattcttttatgagaatctttgaatgaaagtaagattaattttgattttgctatcaacaaaatcagtttgatttgaatttaggtgggtaagtttgagcatttatattaggcacttgactatattaatattaatgtggcacgttgtgagtgttagcagttttttatattatttattaaataaaaatatataaaatttaagctttaaaaatatatatatactagggctgtacatcggtcggtttgggcggtttatcctatatattttctaacccaatttaaagttcgggttgctaaaatttaagtgcaacccgcccaaatttaaaaaaaaaaaattctataaaccgaccaacggtttgggcggttggtcgggttaacccgcccaaaccggtccttaattttttttttttttttttagttttaaagttcaaaatt

SEQ ID NO: 359690 - DNA, 640 bp, Cannabis indica
atgtggcacctgcccctgttgctggggccgaaatagtgtaacgggaaatagaatggaacccctatgtgaaaggttcaggaagcaggcacctctgatttttcattgaggtccggacgtcatgaaagccgagcagtggctgacggtgattacaagaatattgaactttatgggagttaccgggaatgacagggtggtgtgtgcaacctttcagttctaagaagacgctctagtctggtgggacatggtgtcctagattcacgacgtcacaactatgacctgggaaaggttccaggaactcttcaacgcgaaatactataatgaggtcgttagaagtgccaaaagaaaagagttcacccacctgacccagaaggaaaatatgagtgtgattgagtacactacgcagtttgaccggttggcaaggttggcctcgggaatcgtgccaaccgacttcagtaaaaaagaaaagtatttggatggattaaatgtgaagatcaagcatgaccttatgatcaccaaaaacaacaagaccacctatgctcagatggtggaaaaagcactgcgagctgagggcgcacttggatgtatgtcggagtcgggtaggactccagtgagtggcggggctcctacccctcctgcatca

SEQ ID NO: 359691 - DNA, 800 bp, Cannabis indica
atccccacttattacctgattaacacagaatataaatataaaccaaaattacttactattagacttatcgagatattacaggcactgaaatctgatacacttacccagagtgccccagctgtaaaaagcgccatcttggggagtgtaaagggcaggggtgctttcagtgtggtatgccagggcattacaagagggattgtccccaactaagaactgaagcaccaaagactatagcgaaacccagtccagcaagggtgttagtgataactcaggctgatgcagaagccaacccctcagtggtaacaggtcaggtctcggtcaacaacttttatttctctatgttgtttgactctagggccactcattcctatgtggtggccataatttttagtaaattcgatagatcgcttgatagctatgaaacaaggtttggaaccctactgtctggcggagagttagttatctcgaaaaggtggattaggtctatgccgatcggaatagaggatagagagttaagtgctgacttaatagaaatgaatttagaagattttgatattatactgggaatggatttcttgtccaagtattcagccaatattgattgtaaaaggaagatggtaatcttccaaccagaaggcgaagaaccgtttgtctttgttggatcggttcagggatctcgaatcccgataatttcagtactaacagccaaggaattgttacgagagggttgtctacggtttttggtcgtggtattggataccactcggcctgactctgttcggccagaacacatcaaggtg

SEQ ID NO: 359692 - DNA, 439 bp, Cannabis indica
acagggaagaaagtcaagaggctcagaactgataatgggcttgaatactgttctgagttgtttagttctttctgcaagcagaatgggattgcaagacacaaaactgtgccaagaaacccacagcagaatggcctagctgaaagactagacagaaccatcttagaaagagtaagatgcatgataatctactctcgtgtgcctaaaagtttttgggctgaagctgttgtgactgcctgctacttgattaacaggtgtcctccagctgcaatccaagccaacacaccaatagaattatggtctggacaccttgcaaactatgggaatctaaagacatttggttgcatagcctatgcacatgtcatacaaggaaaactcgatcccagggcaaagaagtgtatctttttaggttatactgagggtgtaaatgttggaaattatt

SEQ ID NO: 359693 - DNA, 592 bp, Cannabis indica
ttaattaattaaatattaaaaaatataattagttactagaaataactatctagaatttatctcattaaactaagtgttattctaaaattaatttgaaaaatttaatgaaaacaaattccatgtattttaaaaataattatgttgctaatttaattttaatttggttaaactaatctaattagcctactaccattatttaaataagacaaatgggtcttcacaattggggtggttcgtgtgaggaaatactggattcagtatgttgtacccactactatgccccctaactctcacacaatgtccaaaggagagaaattcaatcattaaataaataattgttattcattgaataaccccaagtattgggctaaataaaactatcttatgttatattttattttagcaacctagtccatttaattaactaaacttaaatgggcttcctatatgcatctacgcccaaaagtaaatatataggcttacacatgtcaaatgatttggatggaccctatcatgtttctaggtttatcacagatgaaagaaattataaaatttacatattacaaattatttatatgatctcttgacaatt

SEQ ID NO: 359694 - DNA, 506 bp, Cannabis indica
aaaaacgtgaaaaaaaaagttttatttgagaaggagcccagtggtcgcgacctggtgattcctgggttgcgacctatttttcaagtcgcgaccctggtcgcgacctggacttttacagaaactcctgaaattttttggttccagtggtcacgactagcctttggccaagtcgcgactaccctattttctagagaaggcttaaatacgatcgtaagctagtcgcgactagccctaggccaagtcgcgacttgctcacgtaattttctataaaatccaatttttccccctcattcaaccctacatcaaaattcaaaatttcaaaaaccctctcagccgactttaccccttttcctctcaaaaatccaaaacttcttcaccaaatttcaaattctttcatctcaaatccaatttcctaatcccaatccatcctaaaacctaatttctttcatcaatctacactttccatcaaaaacaacccaaatattcatcaatttcaccccaaatcc

SEQ ID NO: 359695 - DNA, 585 bp, Cannabis indica
agatcctggtaaaataattcccaacactgggtcccttacgttttttcttgggattggagataggtcagtcttcctctggaatatctgtctcccaacgaccttttacccttcaacttttaactgacacaggttttttaggagcatcttctgctcccacaccaatggaatccaacattcggctctcatccgatgttggaaaaccacttgaaaatcccaaaacctaccacagcctcattggtaaacttctttacttaactattacacgacctgatatctcttttgtcgtcaataaactaagtcaaattttatccaatccaagggttcccacctcactgctgctcacagaatattacaatatctcaagggtaccactggacaaggactattcttttactcagcatcttctactaacctatctgctcatgctgaaactgatatgtcaaacaaagactttcatcttaaattttttcagatgctgattgggcctcttgttgtgacactagaaggtctgtttctggttactgtgtctttcttggcagatctctcatctcttagaaatcaaaaaagcagtccaccatttctcgt

SEQ ID NO: 359696 - DNA, 908 bp, Cannabis indica
gacttgaattttaccttagtgtagttaccacaaagtttgttgaaattttggttgccggaagcatgaaacaacaattcctttaatacaaaccggtgataacacacacatctttgctagagttcacttgagacctcattatatctcgcttgtgcaccgttaatggccatgtgcaacatccatttcatggactctctagagaataactcccaattctcataagaggcggcaccacctctagtccatataggtggaaattagtgtctcacaacttctctttagacacatcattccattaaaaaacctttcggttttaaccctccaaattttaccattagtactctttcatagatgggacaagttgagtactactttttcactctattgacttgttattacctattgaacttaagactagatttttactagtgttaagataggttaccatcaatgagtaaaactctaagggagtttaggtcccatccctcgaaatttcatgctttaatcttgtacggagattaagcgatttgttataaccacacacttttcgattccaagcgaatcttgctagccaaaattagcgtccattattacatgaccactcttctccttaggagtgttcataaaaaccgaaaaaccaaaaccgaccagaccgtaatcaaatttttggttcacgtcatcaccgaatttggcagtcggtttcggttacggtttttttgacatggcggtcggtttcggcctttaaaataaaaaaatggttaaaccaaaaaaactaccaaaatcgccataaacggccaaaaactgcccaaaaccgccaaaaaccgtccaaaaccaccaaatcgaaaaccattaaaaattgccaaaaattgtacggcagttttatatggttataatttctaaacggtcggtta

SEQ ID NO: 359697 - DNA, 613 bp, Cannabis indica
atatttatgatgcatatggtactcttgaagaacttgagatcctaactcatgcaattgaaaggtttgaatttcaaattactcgtacataaatatattttcttcttttgtctctatatatatagactaattattaataggataatttttatataaaaatatttaattttatacattatttttttttttatatttttgacgtttttctatttttttttcttttcaagttggggaaacatattataatgttgtaacaacgtgaaaattatgttccatatttttgcaaaaaaaattgtaagagaaaaaaaaactattgatctttaaaaacgtaaatttttgttttttttgtttttttttctttagtgtttataaaataattaagtatatatgttttaattgtaggtgggatataattgtgtagaaaaactgaatcaggaatatatgcaaacattttataaagatgttttgaattgttatgaagagtttgagcaactgctagaaaaggaagaaacatacagagttcattatgcaaaagaagcggtatacatcattatttgaattaaataattttattattttgttaattatatcgttaatcggttatttatttatttaa

SEQ ID NO: 359698 - DNA, 711 bp, Cannabis indica
tactaataaaattctaacttaatccaggatattctcaaaataattctttcattaatgtcatgacattactaaccacatcgctaaattctcacaattgccgagcccgaaaatatcgtatttcattaaataatttctcaataattaacctaagtaagatcataatcttacttcgtttccaaaataattacatatttaataaaatatgtctatttaaatattatttatgggatattacaactatcccccacttataggaatttcgtcctcgaaatttacctgaaaagctcgggatacaactctcgcatctgcgactctaactcccaagtcgcttcttcaatcttgctgttccgccacagcactttaactagcggaatagtcttgttccgcagcaccttttctttcctgtctaaaatctgtattggttgttcttcatatgacaggtcggtttgaagctcaatgtcttcataacttaagacatgagttgtatctgatacatatttccgaagcatcgagacatggaacacatatgaaccccagataaagcaggaggtaaagccaaccgataagctacctgacctactttctcaagaatttcaaacggaccaataaatctgggactcaactttcctttcttcccaaactttcgaattcctttcattggggacacccgaaggaaaacaaaatccctaacctggaattcaacatttctac

SEQ ID NO: 359699 - DNA, 801 bp, Cannabis indica
cgtaaatcgaccaaatcgactgacgtacacccctagtcacgtgggttatcaacctagtgtagggtgctgaacaacctccactaaaacgaccataactccctaaatattgatctgattgactcgatttaacttgtgtttcgaagctattttaatactctattgtcatgtttcacactccaattaaaattctgaagttatcaactctaaattgtgtcctcatgagagttacgaatttaagctacaacttactcaaagtgggtcctacagacgcgactcaagctcccgaaattgacaaccgaccttcagagtcaatttcactgttcaaaaatagcctaaatgtatttttccatattttttagaatattttattattattttaataggacctccttccctatgaaaggagagctcctctaatccatttttcacattcagaaaattacccataaggtaagagcatctctctctagtttctctatctagaaattagagcttccaaacttagctaattttcttgtaattcttctgagaaataaaaattcgaagtagacgtagctccattactatcgcgacacggggagtgcaataatagaaatttcgtgtgctctctattttacttagttacttctaactttcatctcgactatacatactagcgagttgactatttttgtaatactcggaattaagaaatggattagcaaaaccctaactagataattatgtataattgaggaattatattattatatagttcaatatatgtgattttatatgaattttaatatattaaagaccccg

SEQ ID NO: 359700 - DNA, 619 bp, Cannabis indica
ccatcaatcaaatcctatcaaccgttgtcttcctccactattccatttccttgttcatttttattttgttttttatttttcattttgtcatttccgttttcgtctctgctagggcaaaaccaaagttctttcatttccattttctttttcattttccattttctttttccattttccattttcgtttgaggtggtgaaacccatactgtacatttttcactgtggtgtacattactcgaagtctgccattgttggagttgttacaggggggtgtcgacggtgggttttacactttgtccgttctactttacatacatttcgttattcacagaaaaaaacatacatttttcaagggaatatggtgtttttctattttcgtgtacttaatatcttccattttgtatcaggtgtcgacggtgaggtgttgaagggagtgtgcatttctttgttgagttatttctttctctctctctctctctggttttgtgttgaatgtagtttgcatttctttctctctgtctcctcccgtgcatgtcctgggttgttagtgtggaatgtactgtaatttaggggtttatttaggcattttgatttaggtatttttggaatgtgttagttg

SEQ ID NO: 359701 - DNA, 983 bp, Cannabis indica
tgttgtattatagttgtttaacagttttttttccttttctggttattagtgattgcggagcatttgtggctgcatttgtcgagttcttcatccatggaaaatatgttcctggtgattttgacattgaagtttatcgtactcgacttgctgccctcttcttctcgtacgatcaaaggaaaaatgatgaaagtattgatagcgaggaagcaaagcaagtcttccaaggcttctaaattgaaaaaatagggtcattttttagtgaaaatgtgttgttcttggttgattttcttttcagacaatttttagttcttttatgtttgtaggtattatatttgttttatattatggaactggttataaatttttaggatatttgacattcaccattataatatgttctttttttatgttttgtatcagcatcagtgttatgttttttcaattaattatatttttttataaaggcgtacaactatagagaaactattatgcaactatatacaaactaatttcagtgttcagcatacttgtaatttaaattgtgtcatgttacctcaatgtatttcttactgttatggaacttctttcttctcattattaatcaacttttataaattcatatctgactttttaaaatttgttatattgaaattcttttcgtaataaaacattaacaagtgtcaaaattgtcatgaaactattatgcaactactattaaactatttaaactttgccaaatcatagcagtatatcaaatataacatatcatcctgtgtaaattctcatagagacttaaataatttaaataattcagctgtatctattttattgcttgattgttgcatgtctttcggttgtgatcgtgttgaccacatttgctgcatctgttctgtttttttgtatcccaatctgctataaatcttcttttccttggtcttctagatcttattttctggttcagtggtagaacaaggatatctttt

SEQ ID NO: 359702 - DNA, 1430 bp, Cannabis indica
atcatgaaagaattttttagttgctgcctatttaaatcaggaggctgcaatccactcactaagtaatttacaaaattagcataccaaggagtgtttgcttgagctacaacaaccagctactcatccggaaaagtttcttgaatttgcatttcggcttgcctttcaccacctgttttcaaccgagataagtggtcagccacttggttcttcatcctttttctatcttgaatttctaaatcaaactcttgaagaagtaacacccaacgaatgagtcttggctttgcatctttcttggcaattagatatttgatggctgaatggtcggtgtagacaatcaccttcgttcccacaagataagatcagaacttgtcaaaagcaaatactacagccaacaactcctttttggtggttgaatagtgaatttgagcatcgatgagagtcttgcttgcatagtaaatagaatgaaagatctttcctcttcgctgcccaagtaccacatcaatggcaaaatcactagcatcacacatcaactcaaatgataaagaccaatctagagctacaatgattggggctgtcaccaatgcctttttcaaagtcacaaaagcatcatgacattccttggtgaactcaaatagtcagttttgttccaacaatgaacaaaaaggctttgaaatctttgaaaatccttgatgaatcttctatagaaccttgcatgtccaagaaagcttctaatacccttgactgtggtaggaggcagtagcttttcaatgacttctaacttagccttgtccacctcaataccattgtgagaaaccttgtgacccaaaactatgccttcttttaccataaaatggcctttctcccaattcaatattacgtttgtttcttcacacctcttcaacactttctccaagttagctaaacaaatgtctaaagattccccaaatactagaaaatcatccataaagatctcaagaatgctttttgccatatttgaaaaaattgccatcatacacctttggaaagtggcgggagcattgcatagtccaaatggcatcctcctaaaagcaaaggtgccatatggacaagtgaaggttattttttcttggtcttctggcactatagaaatttgattgtagcccgaataaccatcaagaaagcaatagaacttcttacccgccaactgatccaacatttggtcaataaaatgacagcaggaaatgatccttctgagtggaattattcaacttttgatagtccatgcacaccctccaaccaatcacagttctagtagggatcaattcattattcttattagccaccagcgtgactcctcctttcttaggcacacattgaatagggctcacccatgaactatctaaaattgggtacacaataccataatccagccactttatcacttcttttcg

SEQ ID NO: 359703 - DNA, 534 bp, Cannabis indica
aatgtaaaatatatgataaactaataaataattcgtgctttgtgatgaatatttaaaaaaaattaattatataaaataaattataatttttatttaatgacaattaagtaataaattgtatcaaattttaatttaattttttatataattttgtattaaaaattaggtgggtaaaaacggatgaatccaactcgtatttaccaaatcttattattataatggaagtcaaacacgattttacaaatcaaataatgagcgataaatactattgttgctcctaaattcgcccaatatacgtggaccagtcgagaggggacacgtggatcagataacttgggaagatttgctaagtctttttatgccaccaagaagcgctattcgcatggggtctcggaggatacacccggagtacaagggtactccgggaagctagcatagcatgaaggcactccggggatgtgtcaggacccctcccgagaaaatcaagtcgcatttatgctgcatgggaggaagcgtgttgggactgtaacacgc

SEQ ID NO: 359704 - DNA, 706 bp, Cannabis indica
ttggtgataccatggttcgcacaaaagtcagtgaaggattggttgtcaaactacttgccattatccgtaactattttgtacagcaatccgaaccgacagattatgttcttcaaaataaatttttgaactttctttgatgtaatggttgcgagtggttcggcttccgtccacttagtgaaataatcaaccgctaccactgcatactgcactcctcctttgcctttgggtaattgtccgatcaggtgaattccccaaatggcaaagggccacggactttccatctgagttaactcgttgggtggagcctgaggtatcattgataatctctggcatttgtcacatttcttaaaattggcctttgaatcttcaatcattgttggccaaaaataaccttgccttagaactttcttagataaactctatccggcagcatgatttccacataatccgtcgtgcacctcagataggagtcgtgcagcttcttcttaagtaacacatctaagcaacggcatagagaatcctcttctgtacataattccctctacgatgatataccgtgcggccttccttcgcatctttcgagcttcatttcgattatctgggagttccccaatgttgaggtaggcggctatcagtgtcatccagtttggggaagtatcaatcatttcaatctcttccgtgccagtaatgctaggctcttcaagga

SEQ ID NO: 359705 - DNA, 546 bp, Cannabis indica
atatcctccacattataatatttcaattaattaaattatcataaatttctcatggcaaacctccccgaaatatattagttaggctgatattaattaatatattatcgaaatagtaatgaaatcattatttttttaaaaaaaattatttgagtattaatactctttaaggttaggcattcaatccaatctaatatttttctgctcacccgatccaatccaattagtagttgaatttagaaaatcattatccgatccaatccaattagatctcaaaatctaatccaattcaattactaattggaatggatcaatttttttacttagatatccaatcacacacttaatttttaatattgacataaaaatataataaaaaagacataaaaactaaatatcatcctttatttaagcttaatactctataaaaaaatattattgttacaagtgtaatgcaactaaaataagtaaaacaacaacattaccaagtaataaatagaacaaaatatcattaaaataaatagacaaaacaaccaaatgttacaaatt

SEQ ID NO: 359706 - DNA, 590 bp, Cannabis indica
cttagaaagatacaacggtaagactataatatcttactaagatcaatatcggtccaagttcaatgtatactccatacatccgatactagcatactttgccaatattatagaaagaacataacacttatctaaggtgtaagtaagctttatcgctgactatcacatcagtgtaaatccagtgcactgatgaatcatgtgacattaacttttgaagcatataatcacaattaccttccactgtgttgatattactgtaattatgaataactatatgttgtggacttaacagaaattgtatacattaaaccataaaaatgaaaactacatgtaaatataaatgacttctaatcttctattgataacaaatcagattatattgaaatagattttatttagggcataaaatcccaacaagactagccttacaaacggacagaagtgttttcagtgtgttttgtcctcactagcacgcttcttgtgaaaacttgccaagagatcacccatattgaaattacctaggtcaagcatgcttaactgtggagttcttttgagatgggctaccataaaataagatgcaccttcttgatata

SEQ ID NO: 359707 - DNA, 577 bp, Cannabis indica
gaggcattaaaaagcaaagttggcgtccaaccttgcaaatttgtctttacaaaaaaaaaagtgccactaggagcaaaaccattgtcttggccaaagggccatttcctaaaagaaagaaaagggagataaataaaccaagtctacatgctgggagacttggacagatcttcctcttcttcttcgacctcgtcgtcttcttcctccatcttggtcctctcgcaaagagcttgagtttcctcttccttctcctccaagaagctggtatccatgtcatggttccaaagccaggcccgatatacagcgcgaacaccaactttatcgcaccgttctacagtctcgatttctttcttagcaagtttttcaacaagcttctcctcaaactcatcgacttggactttaatagtcttctcggcgtcctccttcgtcttcttggcttccactttagccttctcggattccttctgttgggattttattgttggaattattttaccaagatctagatttactaccatgtatgttttattaacatcctaatatgaattctaaaacaatgaaataaacacataagagttta

SEQ ID NO: 359708 - DNA, 570 bp, Cannabis indica
gtaaatatgattatattgaaatgaattttatttagggcataaaacccaacaaataagaatccaacgatgttccagtaggcgagagtcaaggttattcttattttatcaatgtcttcattatttcagtgttgtaaacactagtccaagttgtcatcgtagagatgagtcaactaaattttgtatccacacacttatctatcgagatttaacactattatgttgtctaacggatgataatctattgaggatatcccgttaaaacaacaaatcaaattagaccaacaatgaagatttgaaattgatactacaataattaataatagaaaatacaatgcatgttcaatatgaattaatgcacacaatttaaaaattattaaacatttagcaggtaataaagacatgtgaaataaaaaataatcacatcttaaataatttctaagattttcaactaggtgacatacagtgtcctggtaggcgagactcaaagatatcatcagttgaatagagtagttagcttatctaaaatggacatcattttagcaaccttttattcgatcaaataagaatcca

SEQ ID NO: 359709 - DNA, 885 bp, Cannabis indica
gattcagagattgaggcagcagggtcctcctgccgtgcctcctcaagttgctcaggccgttgcagttccagcggtgccagcagaaaaacctgttgttggcaaccgtatggagccgttgtatgaaaggttccggaagcaggcacctccagtgtttctgggaggtcctgatgtaatgaaggctgagcagtggctcacagtgatcgagcgtatcctcaactttatgggagtggttggtaatgatcgggtgacatgcgccactttccagtttcaggaggacgccctcgtgtggtgggaattgataaccctcacccgggacgtcacagttatgacctgggaagagttcaaggagttgtttaactctaaatattacaatgaagctgtccgcagtgcaaagcggaaagagttcaccgaattggttcaaaccgagggaatgtctgttactgagtatactactaagtttgaccgtctggccaagctcgctgtgggaatcgtgccaactgacttcagcaagaaagagaaatatttggccggtttgagtgcgaagattaggcacgatttggtgattactactaccgaggcaaccacatatgcagaaatggttgaaaaggctttgagagccgagggtgcagtgaaatttcttcaggagccccgggtgactccgagtgttggtggaacccccactgttcctactcctgtttatggtagggatggtggtgactccaccactgatcagaaaaggaaagttatcccagcatctagtggttcagggcaaagcaagcggttccgtgggaaccaaggcagaggtggacgccagggttactcttaccccgagtgtccacggtgcaagaaacatcatccgggagagtgtaaccggaagacatgctt

SEQ ID NO: 359710 - DNA, 609 bp, Cannabis indica
tggaacagactccaaactgaaagaacaatcaggatacacaatgtagccgccttcgcaaaggagtgagccactacattagctgatcgcttaataaaagaaacagatacattgtttaaacttagcaagcaaattcttacaatttttaataaccaacccaaacaacgaaatcatctctgtcgaacaatgaatggcttgcaccacattaaggcaatttgtttcgacatacacatctctccacctacggtccttgatccagcttaaggcctctcggatgccaatggcttcagcaagcacaggttcaacttggccaaagaataatctggtgcgaccttcaacgagtagtcctgacccattcccaacaaccaacccgataccatatttctcaccattgttgaatatcgctgcatctacattaatcttgacactattaccatgaggagtggtccaacgctcaacaacgtctctagcccgaagtaaaggccatgacgattccaattcggaactttgagcgcatctccattggtcaagataacggtttggaaacgcaacaatatcaaccggattgaagcctttccctttccaaactaactcatttcttgcaccccatat

SEQ ID NO: 359711 - DNA, 560 bp, Cannabis indica
ttatttatatacatgtttatcatgcatgtagttgcgtcaaaataacatattagggtatcagtgaggtgtacatagagttgcacagagataccaacagatatatgttaggcaaatcaataagtcatcagattaacatatcagcaaatcaatgaggtgtacatagagttgcaccgagataccaacaaatatgtgctagggttttagagagtatgagttattgttatctctttgatgcgactagagtgttaagtataggcttatattatggtcaatcgtactttatcaagaatgttcctgacctagtcttagacctgtaggtaggtgtatgggcgcctggttacaggttgattatggttgtacatcgatcggtttgggcggtttatcctatatattttctaacccaatctaaagttcgggttgctaaaatttaagtacaacccacccaattaaaaaaaaaaatctgtaaactgaccaacggtttgggcagtttggtcgggttaacccgcccaaaccggccaattttttttttggtttcaaagtcaaagtcaataaaattaaaa

SEQ ID NO: 359712 - DNA, 569 bp, Cannabis indica
cctgatctgctacagtgaaacctgattctaatgcagaaaatcaggaatttttttaagaaagttttgtacagctcagaaattgtttttgtggttgtctctagggttgctatattctataaataggacatagagagcggccaaacgtttttatcttttctagtctcatattttcatatcattctttgtgagaagagtgtttcatttgtaaaaacttagagtgttctactaggttttggttttcttataatgatctcatactattcttagaataggttgaagagaagctttgaacaagcgtgtgtagtcgggagaagacttttccaagtctcctttcgggaagaagtgagcatatatcttcaagagaagatttgtttaagccttacttcgggaagaagtaagcacacaccaatagctgaagggagttcactacgtggtgtgtttcagagatcagattagcaaggtggattacaaagggttgcggcaaatcactagagggagtctaaatttgtttaagtcaattgctttgtaatctttgatactttactaattgatttcattctctgggcgtg

SEQ ID NO: 359713 - DNA, 569 bp, Cannabis indica
gctatcatcatttctccccaagcttcatattctccaaatacgtgatttaccaccacttgtgaatcactgcaaatttcaatgtgctcggctctcatctctcgggctaactttaggccagcgattagagcttcatactcggcttcgttattagatgctttaaatgcaaacttgactacagcatgcaggtgttgcccccgggcgtgagaagagcaatacctgcaccagatagctgatttgtagccgacctgtctacgtgtagtttccaagtcggcttatcttcattgttatttggttgaggtgcttgtaccggctcagggttgctttctgctacacctttttctttgcctgtgcattctaccacaaagttcgctaaggcttggcctttaattgttgttcggggttggatagtaatctcgtactaacgcaactccaccgcccacttgagtatccgtctagagacgtccgacttttgcaatatttggcgtaatggttggtcagtgtacatccgaagaggatgagcttgaaaatagggccttaactttctgttgctagaataaggcagtaagcga

SEQ ID NO: 359714 - DNA, 589 bp, Cannabis indica
tttagtattcaaaataaatttttagtcaattattttttcattataattatttaagatatcttgcgaaatttagaaaaatttaatacgccgaaaactgtgttcaaacagtgtgttgcacgagagactattttattttatacgcgtgtaaaatagactatttgaatattattttctatattataaattattccgaatttttcaaaattttgtaggatatcttaaatagttataacatacatgaatataaaaagaaattagactaaaaaattcttcaggatgacaaaacaagtaaatggtgcattagtacatcccttctaagagggtgcattgtagaatcacccaaaaatatatattttagggtgtttacgatgcacttcctaaataaaggtgcaacaatgcatcccctattatttctttagttcatttttttcacatcatagtaatttaaaatagcttgcaaaaataatttttacatgatgaaatgtcttgtctcttgacatggttttaaggtgaaaggtttgttccttggtaaggttggtgtggtgttctgttcttgttggtgtctttgtctggtgtttggctcctaggc

SEQ ID NO: 359715 - DNA, 293 bp, Cannabis indica
ttacatctttctaagtcaatatcaccggttgattttaggttaatagatctaatcctgagatggttaggttcgatctcaattgtattatttatgttcatagagttgttcgtgaaagctaaccaatagttcgagcgaatacttacattttgggaacatgatagtataattgagtaggagcgctaaatatagatattgaatctataacttctataagtatttagaagtgaaacgatgcttttctttgagcttggcttaatagagataaatgattgagatctcattttagtaattat

SEQ ID NO: 359716 - DNA, 835 bp, Cannabis indica
attatattgaaattagttttatttagggcataaaacccaacacatgcaggctggaaaagtctgtattaaaagataattagacaaggatattactggccaatgatcaataaggagacacacaagtttttcaagaaatgtgataagtgtcaaaggctttcacatatatcttgcgtaccgccaacataacttagaatgatgacctcgccctacccatttactatatgaggggatggacctaattggggcattacccactgagtgaggaggagctaagtatgcggtagtagtaatcgaattcttcactaaatggatggaagttaagcccctcgtttccataacctgcaagaaagtccttaactttgacgtcaagaacattatttgtaggtttggaactcccatgaagatagtatctaataatggaacccaatttgatggcgacatgttcactgaatctgcgagaggaataaaattatcaaaagcttctcgtcagtatcaggcctcaggcaaatggacaagtggaagctgttaataaaacgttaaaggatactatcaggaagaagctagacactgccaaaggcagatgggttgatgagctacctcaggtactctgggcccacagaaatacctagaagacagctacgggacacactcctttcttgctagcatttggctcagaagcaatgctgcctgttgaagtgaacatatcgactcatagaagagagttatataatcaagaagagaaccaggaacttttaaaatttccttggatctacttgaggaaaaatgactgagttgcaaatcaccaacgcaatataccaacaccgagttataagat

SEQ ID NO: 359717 - DNA, 595 bp, Cannabis indica
aaactatagattttggtacaccatgtaatcttaccatctccttgacgtacaaatctgcatactgatctactgtaaaggtcgtcttaactggtagaaaatgtgcagacttcgtgaatcgatctaccacaacccaaattgaatcgaataagcctgtggtcctaggtaatccaaccacaaagtccatggtgatatcctcccacttccactcaggaagtgtcaaaggctgcaacaaaactgccaatctctgatgttcagccttgatctgttgacaagttaggcatcgcgatacgaattctaccacattcttcttcattatgctccagcagaagtagggtttaagatcttgatacatcttggtggtgccgggatgcaaggagtatggagtggtatgagcctcctcaagaatttcatttctaagttccacactacttggaacacaaactctggtcttaaacaatagcatcctactatctgacactgtaaaatctctagcttgaccagataaaacctcttccctgatcttcactaattctagatcaattaactaagcagctttaattcgttctaatagatcagattgtagcgtcaagttatg

SEQ ID NO: 359718 - DNA, 759 bp, Cannabis indica
tattatagtaagataattatttgaaaaaaaaatgtagtatctacatatttttattttattttttagtttttagtaaataaaaaaaaagtaatataagtatcatcaaatttttgatggaaatgacaatagaggtcatgttgcttttcttttggagtgaataatttcgtgacaaatggcactactacttctccatccctaatccatgcttctaacaagctacaaactctatctttatcacaaggaaattcggctggtttatcacttcatttcccttttttatgggcttcaaaattttgtctgtcttgagctagcgctatgtcaacaccacattttgaacctttccatggttgatgtgtttggtcgttttggttggacggcttggtcaaatggaaaacagttgttgcagtatttctcgatttagctataagctctacaaaattgtatatggcatggtttcaatgtgtaagcgatattcatccaacatgcctttgatacacattttgactagatccttttcagacatggtctccgcataatcaagagcttccctaaaattttgaaagtaattaacgagtctttctccaaaattttatctttctcctaataagtcagctatgctccatttatcttcaatcgtaaagaacactttgcacaaaattgagagaccatgtcgtcccaactccttatactccctaatggcaaacttgcataccaagagtatgctcgattagtgagaaactttgaaaattctcggcttct

SEQ ID NO: 359719 - DNA, 503 bp, Cannabis indica
tattagatttaattttattattattatttaattaataattaagtaataagaactctaatacaactctaaacaaacatgaatttcatattacttaactagtatatgtatggagaaagtttcaatgattacactaaatatataactatcatggttatatttttttagccattacattactattgaatagttgtgattaatttagaaattaaataataattaacttagaacttaatagtcacctaacaatttatttccttatataattttaatgaagattaattatattttaaaatttaattaattataattattaattaatttttcgtaatttattattaaataagaatctttcagtaatttttttgcccttaaattattaaaatctttatagcaaaactctttataatttaaaattatacactatataattcctaattaaaattttattatacctataactttaatttaaaattattacacttaatttaaatatttaaaaagta

SEQ ID NO: 359720 - DNA, 877 bp, Cannabis indica
agatttggagcactaatatatttctcatagggtctatattcctttttgggagctaaggtataataattgtgtgttaataatgtttcgttagttgaaaaaggtctatatttaacctatatctattatcatagaacactctaaatattttacatgaaaattaggatttcgtgggtagcatacattaattctcagagtcactcctgcaatcaagctagattctccacattcgaggtaaggaaattaagtagaaaaacataagttttctgtatgtaataacattcatagaaagagtgggaatagtaaaagagaagttaactaaggtcttctgcctaactctttattgtctgttatttaatgtactgtataatatatatttaaataatatgtttataagattcatgttatttatgtatgtttacagtattagagcatggccattgctaaaggtatatatttaaataatatgtttataagattcatgttatttaagtatgtatgtaaatagtgtggtataagattcacattatttaattatgattgttatgttatttaaataatgtatagtagttttgcattatttaaattagatagattatagtttatgtgacatggtttgaccgagaggatggttaaatacttgactggttggtctatatggtagatagggggccattttgtagtgggtacgattttactgaacccagccctccaccatttagtccaatagttcgagtttattgccaaagtcagactctggcgtaatcattattatgtgacttagcttagaaactagttattagttactagtgatcaaattaaatttatgaattgttatttgtctaaatatgcgaattttagttgtgttttatttttattt

SEQ ID NO: 359721 - DNA, 596 bp, Cannabis indica
tgggacccagccctggacccgaacccttacaacgacccgaacccacaaccggacccgaacccagtcccaaattcaaaagttgactcgaatccgtaccctgtgatccaaaattggaatcaaaacgggaagttgacgcggacgggaactaggacgtggacttggaatcataacttaaatttgacatagatccagaaccgtaaacggaccaggacccagactccaaataagacctagactcgaattgggacccggacccgaatcccaacccaaacctggactcggaacccaaacctgaacctgaacctgaactaagacccaaacatggaaccagactaggaacacagaactagggtcgtgaccgagaaccgcaccccagtcttgatcccaaactaaaactcagaaatgggacctaggacgtgaacgagaaccaaaccgagacccgtgacagtgatctagttcttgactcgggattcgggtagcggggcatggaacagaccagtattcggtgtctagatctgggactcagactaggaccaaaacccagacgaagaaccaaacctgaacccataccaagacctgggacccaaaattagaac

SEQ ID NO: 359722 - DNA, 458 bp, Cannabis indica
aattcatacattatatatatataatcatgaaataaatcatgtgaaccatgcaacataaaatattatttctgatctttattaataagtaaatctgattatatggaaatgggttttatttagggcacaaaacccaacaccatcttcattacatcatactgtcggcaagttgatgctttagtctgataattctgtattgcattgcctaatcaggcaagcccgtgccataacctgacacccacatataacataattacatcacttaatcagatgagcccgtacctacgctcggtactcatatgtcactgacgcccgtacgtatgtctgatacattataaggaagaaaccctacataggttttaatctatgtcataacctgacaatttttttatcactaacgtccgtatcaacacgttgccaggaggaaaccctacaacggtttcattctatgccataacttg

SEQ ID NO: 359723 - DNA, 591 bp, Cannabis indica
aaaaatgggctcaaatggttgagaaatggtggagaaatgggctggcggaggtggtggttggtgaggattttttcttcgctggtggctactgggctggtctctactgggtttggttcgtgaggaagaaggagaagacgatgcatagggttatttatataaccctacgccgtcggttgttatagaataaccgacggcatagagtacacatgtcaaatttcacgtgtaccctatgtcgtcggttattctataacaaccgacggcatagggtcacacaaccaaaccctatgtcgtttgattctataccgcctctaaatggtataatccaattttatatctacggtttttataaaaaaaaaacgcctctaaaggtaaattttcaataggcgggtattttcagaccttttagcttccctttttataaaatgggttgaaaaaagggaagctaaagacccattttatagtagtggggaaagacattcatcacttctagacgttcttcacaaatataggataaatttacaagagaaactctccaattgtatgatcaataaatttaacacacaattatacgtattgttttaacaagtaata

SEQ ID NO: 359724 - DNA, 755 bp, Cannabis indica
tagtacttttgtaggtgctttccatttcaatggaaaatctctagtactaactttgtattggcacctaacatgctaacttgtatattccaggtaggatgatcccaactactccatactcggtggtaaatcaccctttggcaggatgatgggttatcatacccataggtaaagacaaggggaatgtcgcacgtggctgaagattgtatcaattagaaggacatagtcattcatgaggatgctttgtttggatttttgtttttaataaagttgtttctaccattatcgttgttggtcctctttccattgttaaagccatttttattattactctcctgaccatgggagccttggccactaatgcttgctccgttcttgtttcccttagcttgattgaggcctttggcgttccactcagcctcttctagtttaataaactcatcagctctatcaaggaagtctcatagtatgtgttggtttccgcctcgtatccttccacatccgacttcccacaagggtgcaacccatgatgacggcccgcttgccatctgttgtcgagtgaatttcgcaacaccaaaatgtattatttaattaatataaaaagagaattttcagggaagtgacaagtgccagtattcgacctagaatggcgagcactcgactgggaatgcaagaacaatcaacaaggctggaaaaatatcaataagacaaagaattatagtggttcagtcagattgtgatctgcttagtccactgta

SEQ ID NO: 359725 - DNA, 1046 bp, Cannabis indica
gtaaatgcagtatacttagcaggattctcccagggagcttgtccagtcttgctagtgagctttccctttttccattcccttgcctattattgttgttggaccgtttacaacttgagcttgaattgctcgggtaatgggggagttggacggatgtcctagtagaaggagcttttgactggctaggttattgttccccttctgtttgctgaatggcctcttcaagtttgataaaaccttttacacagtcaagaaaatcactcatcgggtctactagtctattctttcttatgtccttccaaagttcgccaagaacttcaatgccccccagtatcgcggacaactttcgatcttcggttactcgtgcaaccttagtcgcctctgtcatgaatcccctgatgtaggctcggagaggctcccccggtcggtctttctttgttttacttcgaccagatctcctaggtgtaatggaagttggcgagaggaggataattgtgcatggaactctgaggagaaagccttccatgagttgaacttttcaggtgccagcttaaaataccattgttgggcggcttctgaaagggtggcaggaaaaaccctacaacatacgtctcctcgtactccctgcaagtccatttgcatctcaaaatacttaaggtggaataagggatcttccttcctagtatacatcttcaaagttggcatcttaaatttgtggggcaattcgaggatattaatcaaggggaggaaaggggttccacgtgctcgatccaacttgagatcattgttcctctgaccggccaggccttggaacatattttttagttcgtccaactatgcctgcacgactggactaacctattcgggctcttggccgacttgagtcacatcagcatctctttgagcgagattttgaccgcaggttctgggtcgcacaattggcgcatcatgctgatcgtccactcctctcctcctattccgatcaattctgagatgatgagtcgttcccagtctatcaaatacggaaatgcctggctgcctcagtgact

SEQ ID NO: 359726 - DNA, 843 bp, Cannabis indica
tcggagatgttgttgtctgcaaaaatgagagactcgaaactctttattttcgagtgactttcccatgtcaaaaatgagaaatgcaaagttgtgaatttgacttcttgatttcatggatcttagttattgtaaaaaaaaaaacttagatggacgatcgaaatgtaatcaaaatcagataaagtcagcgcaccaagccatttgtcaacctgggcacttggtacccattcttgagctcccgagatctcattatgatacttctaaggcttatgaacttgaggttgaggtcacctaccagatttttaaccattctagattcagtggttgaatcagatatgtcatttgagtaattgaaggtagcttcccatgtttattgtcaacctcggcattgggccctatttctaaggactcaggcatgtggttttctcctcgtgtttgcttgaatattcattatttctgatgaacgaaaaatgccaggaacactttttgttgaacttgatcagaaatagcccaggttgacaatatgtcaacctgggcgctgggccaagtgccaagtgccaagtgtcaacctgggtgttggatcccagttatggcccttcagaagtttcgtttggtcataaaaaaaataagttgaatcttattcttttataaaaatttagaagatgatcagaagagttctcggaaaatatcatcgaaatagacacaggttgacaaaatgtcaacttgggcgctaggccagcccaaagtgtcaacgtgggcgttgggccttgctttggcacccaggaagtgttgtttcttcctgaaggacctatttccctatttttgtatgagacaagaagatgcaaa

SEQ ID NO: 359727 - DNA, 893 bp, Cannabis indica
atataacacaatgaatgagttttttagggtagatatggtatgagtgtaattatttgtttgtttgtttttttttttttgataaatgatagcgtaattatttgttgggttggagcatgttgaatgaattatttgagttattttatttaattagtttttgtatgtgagtttttatcttagttgttttacggaactggttttttgtctcaaatttttaactagttgataaatataaccagtttatttatttgtgtttatttattttattacggaaccagttctttttcgtatttatgcctcaatattttttagaattaattcacgtttttttttaaattataatcagttttatgaggtattttgttgtagaactagttttgtttttaatttatgttttagtgttttaagaattgattttctctttattattttaattgtaatcggtttgaattattgtgtgttacttgtttgtattcatcatgttatataagcggtttgagttatttcgtattatttatttttattcattataacactgttatagaaccggttctattaattataactagtttgagttattctgtgttgtttgtttttattcattatgttacaaaaccggttatatttcaattataaccaatttaagttatttgtttttttattcattatgttatagatccggttctatttttattagttatttctgagacatctactcgtggtgacttttccagtgacttttatggccacggtgacttttcggggacggtggcaataactttttcgatgacttttttggcaccaacgatttttctgacaacttttctgacgaaacttatattgttttaaaaatatagaatttttcactttttttaataaaaatatggcataaaaaa

SEQ ID NO: 359728 - DNA, 379 bp, Cannabis indica
ctcaaggatgaggtataggactcgcaagcccctagctgatctcctcatatttctcttacttcgcctttgcatggaaacttgatcacctgatggtaagactaagtgactgccttcattgcatggatccatggtcggccgaggatgacattataggctgatggacaatccacaattaggaatttgaccaacttgtttattccattagcgtagacagaaattgaacgaaacttcgagcgacggcactttcccctaagaatcctaccagagtaacttgtgtctcttgggcctttaaatcttcaatgtccatttccttcaaaacctcagcactaagatatggttgagcttccggtgtctacaagcatttgcttcatacgaacgt

SEQ ID NO: 359729 - DNA, 633 bp, Cannabis indica
agggggagacaaaggaggaatggatccttctccccaaaacagcaactgatgtactctgttggtttccagtttctgtaattgtttaagcttttatgtattgtacgtgtttgtagtaaaattttgaatttggtttactttgaagtactaatgtgactttcctctttaattaattttggaattaaaacttaagtaaataatttagacatgactaataagttcaaaatgaaaatagacttcttatattataatactaacatttacattaacgtaatagtaaaacgatagagcaaagttcttgaatctcattaaatgacataacagaaagttgtccaacaaccatatgagatgagttttaaaataataacaatatatatatatatataaaatacaactaaatgaaactcaacggatgttcaatcaagttgtataacttgagggaacttccgttgagttgcaaggctaatatctcggtacggggacttgggtcgcgaaggacttccccttagagtattgtttgatggttcttcttttggattgattgggtaatggggtatggagacctcggtgtagtcgagaatgttgtccatgatattttctaatttttctcttgaagtgtttgttgggttttatgcc

SEQ ID NO: 359730 - DNA, 707 bp, Cannabis indica
gaaaaaatattgaaaaaacacatatagaagtagagaatttagaaagatgaagaatgtatgctctaaaaaacaaaagaataaaaaaaataaaaaaaaaaaaacataaccagaaatagcagccaatcagataaaaatatggaaatatactcatttagtaccctatcttttctcttaaaacacatttggtaccttgtgttttcgataatacttatttagtaccttatattttgaaataatacatatttagtatcctaaagtaaaatttaatcaatataattttattaatttagtcaaacggttgtcatttatatgtaattaaataattaaatttgaatctagaatttgtaaaattgaagataatttaattatattaataaaattttatcaaaaaattttgagtttaagatactaaatatatgtatgtttttaaaatacagggtattaaataaatattattgaaaatacaggataccaaacttgtatttaaatagaacatacggtaccaaatatatatacatatataagtttagagttatttagtagtgttgcttaattaataaaaagaatattttaggaattttgatatgaaaaacacaaattttgtaattgtaccttgtactattaatttattatatttatattatggaaaaggttttaatggttacatttttattgtaaccatcatggttacatttttttaagccatt

SEQ ID NO: 359731 - DNA, 562 bp, Cannabis indica
tttttttgtccgaatttcaatgatttgtaatttatatgatattaaattaattactatattaaatatagggttattaaacctaaaagaatattatataggccagcgattccatgtactatagcggaatggcactgggatatgtatgtaagagcatcaaggagacactaaatttagtgttacattatcactaaatttaaatttggtatcaaaaattatttctactccaaccacaacaccaaaaattaaactaaaaaaaatattttttattattatattaattttgtaataaaataaaaacataatatcatattaattatgttcaattttaaaaattatttttattgtttaatttaaaaaaaatataataaatttttacttaaattataattaaaagaaaaaataatttatgatattcacatttaaatttacacaaaaaaaatattataaggtgcttttacaatgtattcttctaaataaaagagtcacgcaacagaaagtttgaattttattttcggcatgttaaatttttttaaattttccaggatgttttaaataactataa

SEQ ID NO: 359732 - DNA, 572 bp, Cannabis indica
tcttcgtctccttcttttatgttcttagttttttttagatgtatgttcttaagtttagggttttgtttatattttaaaggttttatttttattttaattactcattttaatttttacacttcaagttttgaaaatatggctgttgcccctgattttgcccaatatacgtggaccaaccaaacagggacacatggacacgaaggtcttaacactcgaattatcagctaagcctttataaagacttgcgttatccgggagttacctcctggagaaggcatacaaagtcttctatgctcccggaggcctaagtgatatcaaagcacctcagggagatgtcagacttcctctaagcagtcatctcgcatttaatgccgcatgggaggaagcgtgttggaactgccacacgcaataaagtctgacgacacaacccccgatctgcacctacaaagctatgatcacttaagtctaatgacggctacactgtgaagaatcacatcagtcaaaaggcaataaggacaatccacataaaatccctacagcacctagggatttgaccatgcattacccatggt

SEQ ID NO: 359733 - DNA, 594 bp, Cannabis indica
atatttatttgttgattttttttacatttgagtcctttaagttttgaattttgtagttctggtctataagttttttagtatcgcgataggagcagtggtttttgggtttgttatcacggacgccattttgatttggggtgtgaattataatataattaaatataatgtctatatgttaaataagtgattcttgtcatcgtgtgcataataatgggactaattaatggtcaataaataagatatatttattattaataattgccaacgtttaatgtagaattgttaatatgtattgttttttactttaacagtctaaaacaaaaaaaagttgggagtaaacattgagactctttcaaaaaaaaagttatctagaatttgggtgcccgtattgggtctgtatcagtttttagttatgttttctttttaacaaacttttccttttcaactgctaatctctttcactcaaactgctattctcaccaatcttttttaaaaatttctaccacataaccgttccctccatgctacttctccttgccggcaccaagattccccttcactgactttctccgatcaccaccatggattcaataa

SEQ ID NO: 359734 - DNA, 626 bp, Cannabis indica
ggtggtccatttagactgcaagttggaaggccttctggagcccatgggctcttttccaggacggtgatgagtttcttcatgttgtgtgttaacgttctccgtgttatcagccatgaaggagattttttttttatatgtaaggagggttttttctagagcttttacacgaaggctcttaatgaaagcaccaaactattaacacagatttttgttaaccagatatgagccttaacggtgataaatttgcacagaaaaataaaaacaatataaaaaagtatgaacacaaaggattttttacgtggttttgcaattaaaattctgcatagtccacgagtcattcttattagatttctaatattgttctagggcttttctcttatgattttttcgtctctttttcaatctaacttgcctctatttataagtacatagtcagacagttaattatagagttgactgaaatatttacaacaattatcccttgaaatcgtggggtttaattacatataacgtaagataaatgcggttaatattcgaatatcacacagctatgattagttcgcttttactgggtcaagataatcgtgtattaaacacgttataaatcataacgttctgggatgtct

SEQ ID NO: 359735 - DNA, 998 bp, Cannabis indica
gaggtagtagaccttctagtatccttgcttgatgcataatcagcatccacatatcctttcaatgtcactttctctgaaactctcttataagtcaatccaatatccgatgtccctctcaaatatctcaacaaccatttgagtgccctccaatggtttattctaggatttgacatgaacatactcaatatgcttaaagcatgagcaatgttaggtcttgtgctaaccatgacatacatgagacatcccaaagtcattgcatatggaatttcttccatttcttctttctcttctactgtcatagggctttcttccttggttaatacaaactgtcctccaagaggtactgaagtgctcttagaatcttgcatctttaactttgttaggatctgctcaatgtaattcttttgcttcaaatgcatgactccatcactcttggatctatgaacttctagaccaagtatcttctttacttgtcccaattctttcatgtcaaattccgccttaagtttatctttaattcctttgattactgccttgtctttgcccattattaacatatcatctacatagagaagaagatacacaactgttgactcttctaggtacttgaaaaataaacagtgatcaaacttggaccttgtgaaaccaatctcttgaacatagctgtcaaatcatttgttccattgtcgtggtgattgcttaaggtcgtataaggacttttccaacttacaaaccatctcttttccatcttgttctacctgaaatccaggtggttgctccatgtatatctcttcttctagataaccatttagaaacacagtttaaacatcaagctgctccacttctaaaccttgttgagttaccattgacaacataagtctaatggtcttatacttcactacaggtgagaacaccttggtgtaatctatcccttccacctaagtgaaacttttggcaactaatcttgccttaaaccttactggctcatcctctgtcac

SEQ ID NO: 359736 - DNA, 1093 bp, Cannabis indica
tttgacttatacttatctttcatttatcttcgcagatatgacttttttgaagtccgcacctgtcctgaagatcaagccgaagggtggagcaacgacgacctcgcccgttgtcgcccaaaagaggaagagcgatgcgatggctacccttgccacagactcttccaagaagctggccaagaccgcacaggacaaggggaagaaagtcgtaatcgatccacctgttcgagctcgcgacttcttagccatgcaggagaagttcctggccgagatcccttctgaggagcttgttacgcgctctgctgagttggccgcgcagtcgatgaccctgttcataaaagctgctgccactccttcgaaggaagccgactcgctgaagaggcaaaatgcccagtttcaggagaacataaaaaggctgaagcaagaagcggctaggaaggagaaggagcttgaagaacttaacaaggctaaggagcaggcggagctcgaggtcaagaactcgcgggcgacgatcgaggagatgactcgcgatttggaggctgagaaagagaacgggaagaaacaatatgatcaggcagtgtctgattacatttacaccactctttccaaagttccagacttcgacttctctctcctcggagcagaagccgctgagatggccgaggcttttcgtgccatgtcgcctactcagacccaaggtggtggagggaaccttcctgatgaggtcgagggtgcggatgctgaagaagtcgagaacgaggtcatcagcaaagtcgcggatgagactgctcctgttgctccagatgtctaattttcctctatgttatgctttttaattttacttctctctttttctttatatgcggtacaagggtactcgcgcttttgtacttagacaaatttccttttattttggacaaatttatatcctcgcggggataattatcctttaacattttcgcagtacatgggtactcgcgttttctatatatatatttgcgactttaattacagcttggtgtaataagtagaaatatttacaagtctgataaaattttgaaaatttaacaatcaatttcattcatataatcaatag

SEQ ID NO: 359737 - DNA, 713 bp, Cannabis indica
aatcatgagagaacgatcgaagtgccagggctggccttccataacccttcaacggtcaccctcacaaccaaactgaaccaggaacattccgaagtgatattcagaaaaggagaaagggcatcaggcaatccaaacatctttcattgctttttgaatccaatcggctttcaagggtttgggggataagatcttaacaaccaagcagaaagaattggattgaggttcagggtgaatagatacatggtcaaagtcgtggatgagggcttcttcctcagtgagttgaagggattgggtatcagggagagtggacatagtgatgaacaaatatggcataaaacacagggcagggaaagagaaagaagtggatatgtggtaaactgaactaagacaacttaacctaaatagaaaagaaaaagagaataatacctaaagtgaatagggcatggaaggaggggggtgctaaatccatcctaactgacggaggtctagatcgtcttctgcccagaatcagagcaatgattcgtctccacctgagaatggcgtctgcaattgaatgcttgaagggatgagggagaaagggaggaccataggaattctggacatgcaataaatgaggttctcggtaatgagaaattggaggttgcattaaagaattgtaatgattaatggaagatattaaatgaaatagcattaattaagaagtgagaggagga

SEQ ID NO: 359738 - DNA, 359 bp, Cannabis indica
tccaatttgtaacttttgcaaaacacagggtccaaaatggtatttacccattaaataatgaaaatatttaactattaatttgtcaaattattttttttatttcaatttctaattttaaatttacttttgtttaactatttttttttatagttattattttttctaaaatataaatgttactactctatgttaaaaaagttttagtttagcttaatttcttattttattatttttaccaaaatttcagcaacataacagcctaaaaattataaatacaaaattttgaaaacctaagaaaaatataaccaaacattccaaaacagtatatgcacaaaaaaaaaaaaaaaaaaaaaataacc

SEQ ID NO: 359739 - DNA, 730 bp, Cannabis indica
gtcaaccgagctcagagagatcctcctgcagaagaacgagagcagcatgaagacattgtaccgccacgtattgatgggcctctcgacctagccatgcaatacacgcatgatcagctgaattatctgattcagcagaacatgcacatgccaaattacattgcccaaaggagcatttttgatgagcagttggtggcccaatttaacacgctaatcacgaggatgaatgtcggtgtggaagaacccaactattttgcaatgccgccccgcttccacccttatgatcagccacctccaccaaaccccttctgatggggctcaggtaagtctctctcaaccacagttttattttcacacattggggacaatgtgcatctttagtttggggggagagatttaattttattttagtttggggacaatgtgcatcttaagtttattttagtttttttcgtttcacttttagttagtctttggtatctgtagtattggtgtggatagctaacttcgaagattgattgaaccacttttattcacttgtgcaatggattgaaatcttaaccgtgtgcttgagtcataaatctttgaattaaattggatgtgtattagaaggttgttcatgtagatgtaaaacatttattgttgacgtgtatcacttttgttctatttggattgtggaatgttgacttgacatggaatagaatttgtttgacatactctcttgaagcgaaat

SEQ ID NO: 359740 - DNA, 578 bp, Cannabis indica
ttgggatccagatctggacctagggcttggacaaaacccgtagacggtgcctggatttaggacctagccctggacccaaaccctgacaaagaccataacccacacccagacttgaacccagtcccaaacccaaaagtggacacgaacccgtaccctgtgacccaaaattggaatcaaaacccgaagtacaccgggactggaactaggacttggactttgaatcataactgaaatttgacctatatccagaaccgtaaccgaaccaagactcggacaccaaataggacgtagacgagaattaggagccggacccagattccaacccaaacctagactcgggacccgaacccaaacctgaactcaaacccaaacatggaaccagactagggacacagaaccagggttggaacctagaaccgtaccccagtctcgatcccgaacccaaactccgaaacgggacctgggacctgaacgagaacaagaccgagacccgtgaaagctatccagatgttgactcgggatttgggtaacggggactggatcagatgaatagtcggtgtctagatctaggactcaga

SEQ ID NO: 359741 - DNA, 505 bp, Cannabis indica
agttgtggctattttgttgaattctggtgttgcatctcactggtggggtgaaattttattagctgtttgttatgttctgaatagagctcctaaatctaagagcaaaattttaccttatgagatcttgaaaaataggcaaccaaatgtgttttattttagaacctctggatgtttagcttatgttaggatttctgatcctaagagaataaaactagctaggagagcctatgaatgtgtatttattggatatgcggtgaatagcaaagcatatagattctatgatctgaatgcacatgttatagtgtaatctaatgatgctgatttctatgaacatagtttccctttaaattaagaaatagtgagggtgcatctactaacaatgttcctacaattaggaataatgagcacattgagagtagtgaaatagaacctagaagaagcaagagagctagagtaagaaaagactttggtgcagatttttgtgcttacaccttagaggaggatc

SEQ ID NO: 359742 - DNA, 727 bp, Cannabis indica
agtttgaggggcatgatttggtagatatcaaagtttggggtgcatggtttagtatataaacaatcgctgaaatagtaaaattgaataaaattagataaaagtccttaaatccaacaatcttaatagttcagggtagggctgagcataaaatctagaaaactgaaataatcattcaaaccgacctaccgaacaccactggaactgaaaccggcggaaccgaaaactaaaaaaaccaccaacggtttaaatcgccaatggtcggtttttttttttttttttgatagtaaaccaactaataaaaccaaaaccgaccgaaataacttatacattatataattttttttaaaattttttactttgtttatgtattgttatattatatactaataatatataatatttgtctttttagcagaagtgcatgataaggaagaaaaaccagcaaaattttccctcattcctcgaaattgcttggcaaattaaaaatctgcccagctttaatttattttttgttaaatgttcagccactgctctgagtagcaaaatcaagcatccattatgtcagtcaaagcaagcacattaactcactttatgaatttgaaagaattcccaatcccccaattcatatttgaatatttatttattaattataaatgagatacggaataatgaaactcaaaaccaatacatcaaccattaatattatttcaaaaacaaaataaaacta

SEQ ID NO: 359743 - DNA, 504 bp, Cannabis indica
actcaaactgaaatttaaaaaagaaaaattaagaaaacagtatatgggataattcccttaagtttaatttaacggtaataattataattctagaacttactatttgataatttgattcgtctaaattattatttgttttaaattaatttaaattaccaataaaaaaacgagacgtataattaaggctaattaggattttttccctctgaactttaacatgtaccaaatcatgccccttgaacttttaaggtcattgaaaatgccccctgaactattgagattgttggatttaaggacttttttctaattttagtaaaaaaagtctaacatggatgaaaattcagggggcataatttagtacatgtcaaaattcgatgggcatgatttggtaaatatcaaagtctggggaacatggtttagtacataaacaattactgaaatagtaaaattgaataaaattagacaaaagtgcttaaatctaacagtgtcaatagttcatgggat

SEQ ID NO: 359744 - DNA, 1614 bp, Cannabis indica
gaaattaagaagagttaagaagaagaagaagatggttttggtttgtgaataaggatatttaattagatggttgaagagggattgtatttatagatggattattatatgattttttttttattattattattggtttattttattgagaaaattctactttatagcccatttaattctacgatgttgtggtttaaaaatagaacattgacttgttgactattacaagtgaaactttcttataacaaaaaataattaaataaataaataaaacaacatatagacgtataataagttatgaagcaacctaaggcgaactccaaataaacggcaaattacatatattatgtcttgcaacatttgtctttttgtttatattatatatatttaatcaatatttacatacgtttatatcattagatgtatttataaaattaagaatttaattttagaaaaatttataatgtactaaattaggatttttatcccttaaactttaatatatattaaattatgttccttgaatttttctggccgtcaaaaattgcccatgacctattaagattgtaagatttaaggacttttgtttaatttaattcaattttactatttcagtgattgtttatgtactaaaccatgctccttcgactttgatatctatcaaatcatgcccttcaaactttaagatatactaaatcatgccccttaaactttcatcaatgttagactttttttactaaaattagacaaaagtccttaaatctaacaatctcaataattcgggggcatttttaacgaccttaaaagttcaggaggtatgatttggtacatgtcaaagtcaggggagtaaaaatcttaattaacctttttttataaagtgatatactgatgtatttttatttatttcggtatatgacatatttgtttaatctcgttataaaaaaatcttacttttggtcacaacaaaatttgtgactaaaagtaaaaaattgtgactaattataaaatatcattcttatgatgtgattacaagatccgtagctaaaggtattagtcacaaaaattacaatttgttgttactaaatgtgtttttagtcacaatacttattgtgactaaaactaagtgaagtaatagatactagttaataaatgaatacaaattaaatactttttactatagtagaataaaagacatttttttttataataatttatatttggggaattactctatttactgttttttaacttttttttttttttctaaatttacagcttgggtttttaaagtagttacaacgctagttgtaataggggtttttatacgattttttgttgcaatttagattgtagcggtagttgcaatagggatttctatgtaaaatttcaataaaaacgtaaaaaaaaaaaagaaaaaaaacaatttaaagtataaaataaaaaacccctttatattttcacttttaatttttttaattattaaattaaaaaagacaaaacttattaaatttatattcatttatcaactattatttaccgcgtcacttgtttcatgataaaattaaatagaatatgataaaagaatcgtatgtaaaagttatatttcaagaaatatta

SEQ ID NO: 359745 - DNA, 1040 bp, Cannabis indica
actagttgagataatactacttgcagactcggtaattgattttaataatcaatataattctaaacttagactatgtcttaataatgaatttcactaagcaagggcttaatgtgaagaaaagttattttagtgttaatttattgattaagagagtttgtatggtctaataaataaataatataaatggaaattttatttgataattaattataattattaaagatacaaattagaccctatgttttgtcaaatgacaaaatggatcttgtagtttccaaaatagtaaaaagaggactctgagcttaatttttgacaatattttttttaatataaccaacttgaagacatttccaaacactaatagatacacaaaatgtaaatagttttgtcatacaacatttagatcagattattattaaactatattttgacaaaaaatcagttcagggtcctatttgtactattttggaaagtatagggtctattttgtcatttaacaaaatagagcatccaattagtaacttttgcaaaacacagggtccaaaatagtatttacccttagaagaattatacattatatcattttacttatcataattgtaaaaataatgttatcaatatttaaataacctacatatttttgtagaaatttgaaaaatgcttaatttgagatattttgacatataatttagataattattatttgtttattattttattgttaaactaatgactacctaaccatatctattttaaaattggtttactttgttattttgatcttattaaattataagatcaaaaaattatattaaaaatagggtaaatactattttggattctgtattttacaaaaagttatcaattggaccctgtgttttgttaaatgacaaaatagaccctgtattttccaaaatagtaaaaaaggaccctaagcttaattttgatagctttttttttttttaatataaccaatttgaagtacaatgcctaatacaaacatacacaaaaaatgtaaacagttttgtcatagcactttt

SEQ ID NO: 359746 - DNA, 529 bp, Cannabis indica
ctcagctatctcaccaaaccaatccctaatatgggaattatattccaaaagcacttcacttaatccacaatcagtttgcgaaagtggggggagtatctctacttctttgaccgtcattttaaaccatgtgttttgtgaaagcttccaattggacttctgttttgttaaataataaaataaatcttatattttttaaaatagtaaaaataggatcctgaactcaatttacagcagttttattttttaatataattattttgaagataatttctaacacgaacaaatacaggaaatgtaaccaattttataataacatctctagatcatattattattattattattattattattattattttttttttgtagtgttagatcagattattattaagttttattttgaccaaaaatcagttcagaatcctatttgtataattttgaaaaatacaatgtttatttggtcatttaacaaaacacaggatccaaaatagtatttacctaattaaaacacatgatccaaaatagt

SEQ ID NO: 359747 - DNA, 659 bp, Cannabis indica
tctaaatatcattcttttgctttccttcaggataaggttgcttctgttcttagaggttggtcttccaaatgtttttctagggcgggtaaggaggttcttttgaaagccgtgattcaagctattccagcttatgcaatggcttgcttcaggttacctattaaacttggtaagggtattgaggctataatggccagattttggtggggctagggtatccaggaaaattcattgaaaatcttggaaggttttgtgtcaatcaaaatttctaggtggcctgggttttcgatcacttgttcatttcaatcaggcttatgcttcctaagcaggcttggcgaatccttaaaaatcgcacttccctccttagtttggttcttaaggctcgttaactttccccactcttctattcttgaggctgtccctggtcataatccttcttatacatggaaaagtattttatggggtagagattttatggcttcggggctcatttggaaagtaggcaatggaagttgtattagaactctggatgatcattggattcccaaccacaaaaataggttttttaatagcaatgactctctctcctcttgcttgttgtcctactttattaatgactcaggagcttgggatgtagctaaattaagatcctattttgatga

SEQ ID NO: 359748 - DNA, 638 bp, Cannabis indica
atttttgaatattcaattaaatcgaataagatgtttgatggggtgttaaaaaaatttaatacatctaacattcaatcaaactaattagtattttcgatttagtttggataaataattaaattttatgttattatacataaagtatatatgcatatattaaatttaacattaaaattttactttttattctttatttttattggatggattgacatattggatttaaaatataagatggatctaatccgatccaaaaacggctaggtttaaaatattaaaaaaacttaaattaaactaatagatatatatgaaatacatcaaatggatagaaccgatctgatatattggatcgattggatgattgaaactaattagatcagatcagatgataaaatataaggaaatttgctgtaaaagtcctcaaaatgttcactttgttacagataagtcgccaacctaaaaaattgacggtaataatccctaaggtcactattttcgtaagtccgttggtactcaatttaacagacctgttaaatactgacaagaatgccacgtgtttaaatattattgggccaactcataattttaattaaaaaataatttaaataataaataaattattaaaaaaactttaatat

SEQ ID NO: 359749 - DNA, 689 bp, Cannabis indica
ggttgtaccgcagggaacacaccaaggggtgcagtaggagtattagctccagttgctcccgccggcgatgcccaacacatccccggtctgccacccagacccaacgggagagcagccatgatctccggaggaccccatattagaggaaccacccgcaaagaactaaagcggtacgcgggggccgtaaaacacaatgaggtttgggaggttactcaactcccagctcaaaggccccggctgatggatcaacccatcacgttcacggaagaagacgccaagacggtgcgcttccctcatcatgatccgttggtcattgagacccccatcgccaataaagtggtggccagagtcttgattgacaacggaagttccgtgaacctacttttcaaggaggccttcattgcaataggcctgacggaccgagacctctcacccagcggttcccaactcacagggtttaacggaacaacgcttatcccaatgggaaaagtgaggcttcccgtcactttgtgcccggacaccccccaaagcacgttcaaatactgcacttttgtggtggtggactgcccgaccgcttataacgcgatcctcggccgaccggccctggtagattttggcgcagtcacatccattcggcacctgtgcttaaagttccctacccaggaagctggaatagggacggtgagagg

SEQ ID NO: 359750 - DNA, 497 bp, Cannabis indica
ttaaccatagtccgatcaagcctagcctccatccacgcagaagtgtctctacttttttcccaagtaaacttgtgaccaagcaagtcaaggtcacacaaaccacaatgacgaaccgtctcttgaaacccctccaatagccaactcggataagttcttccccttatcttttctgaattatgtaggatgttgttaaaatcccccataatacaccaagcttcttgaaaccttgcatggagagtacgcaacaactcccaagaattttgcctaagcctacggttcggctccccataaaaaccagtaaaacaaaatttagcttggccttcaaagtgtacaaaacagtccacatggttcactgaaaaggaatcaataaccacttcttcctcatttttccacaataaagccaaaccaccacttctaccttgggcctcaacaacaaaacacccttcaaacccgaacttcctactcaacacatcaactttctccttattacttaaagt

SEQ ID NO: 359751 - DNA, 631 bp, Cannabis indica
atgttctagaaagaacataacacatatccaaggagtaagtatactttatcgccgattatcacatcaatgtaaatccaatgcactgctgaatcaaggaacattatcacaattaccttccagtgtgttgacatcactctaattgtgaataactatatattctggactaaacagattttgtacacatgaaaccataaacataaaaactacatgtctaacataaatgacttctaatcttctattgataacaaattagattagactaaatgggttttatttagggcataaaatcccaacaataacacattaaacaagtaatgaaatcaaatttgtttctttattgataattgaatagtaaagattgcattgaaatagagttttatttagggcacaaagcccaacaaatagatcctggtaaaatatttccaataactggcctcagagccatggtaatgatttactttcatgaaatatagatttaaaacaatgaatattgtttgtgtgttgatttggatgtgctcgtgttggtttatgtgataatttcatgattgaatgtgatttacaaaatttttccatgaaaataatttattttacggactgaaaataatttgtttggattccttgtgaaagattt

SEQ ID NO: 359752 - DNA, 1456 bp, Cannabis indica
gtagatacgcgtcagtgacatgataagtaccaagcataggtacgagtttgtttgattaggcgatgcaatatattggtgccaagttatgtgacacaggctcacttgattaggtgatgcaattgtatgatatatgggtgctaggctatggcacgggcttgcctgattaggcaatgcaatacacgattatcctatttaagcatcgacttgcctaattaggcaacatgatgttataaagatggttactttatgaggtaacacacatatatatataatttatatgattaaatgaattctattattggtataatggttttgtattaccaaatatctgcataccgatgtttattcgtggcagatgctagtagtaatttggatttcatcttatgaacaatgtgtaatggtttgattcttattgtgtatagataacaatattcgaataataaactatatgattattattattacttttcttgttgagtccttgtgactcacgagtgctatgtggtgcatgtaaagacaaataaaaactagatcaaaaatgaggtgacagtcttctccagcaatgtacatattgacctcatcgacctgcgcgccgagttgccaggagttgttttgtgctggctgtatctactgtgtactttgattttgtatttaaattgttgtcgtatatatttctttagcaaaactttttataacatggattccctgaacactctttttatgccattataatgtccgtttttgtccgtttttagtgttttattttggtcaagtttttaatattatcacggtttttaataattaattaatctattagtattaaactaacttataaaatcacacacatgacgtccctatagattagggcgttacacagatcaaaaggagttcgagttcttgaaggttaagatagattcattcgtgaaggtggaatgcatcaagcttgcgacatacaattagagagaatatttttatgcataagtcaaaaacttcgtatttttgagatcttactaataaattttatctctggacattaggggtgtgcagaaagtcatccaatccaattccaaccgaccgatccatgttagaatactgtaaactcagaatatagccctaattaattcatgagaatcaaacaatagaatatagattagcggaagcgtaccagagtccatagaatcgatctttgattggtatgatcttccaattttgcatcaaaaccttttaaaccttattttcttgatgatggggattcaagaactctggaaaaatactgatacgatgcaaaatggggaccattacccgttatattaccaacagacaaacctgttggcaatatttttgactatttctatttggcccctcatcaatatagaaattgtctaattggtatccacatattaaaatcatgacaatcatgcccttaagtcataaacttattccaaaatagaccaca

SEQ ID NO: 359753 - DNA, 889 bp, Cannabis indica
aaagagtaagtcagacagatgcgcagatgtgttagagcttattcatactgatatatgtgggccttttgttccacctgctatgggtggttgtaaatattttatcaccttcattgatgatttttcccgatatggccatgttgagctcattcgtgaaaaatctaattctttagatgctttcaagattttcaagacaaatgttgagcttcaaaagggattaaagttgtcaatttcgatagaggtagagagtattatgggcgctatgatgaaactggaaggaaccccaggccttttgccaaatacttgctggaatgtggtattgatgcaagatatacaatgccagggacaccccaacaaaatggaattgctgaaaggaggaatcgtacacttcttgacatggttatatcttgaattaagtgcttagcaagtctgtcccaaatacaccatacgagttgtggtcaggcaagaaactgagtttgcgtcattttcatgtttggggatgtaaagctgaagtaaggccctacaacccacaatctaagaagcttgatctgaagactattagtggctattttgtaggctacactattggttcgaggggttctaggttctattatccttctcacaccaccagggtgatagaatcagatagagttgtctattttgaagatgaatttggttcaagtcaagggtcaagagaaattgtattcagggaagaacgtatttatgtccctatgcatgttgcttccgcttccgcttccgcttccgctcctactaatgatcctgtgattgaacaattccaacagaagctcatgatgaacctcagaatcatatgcaagatgaaaatcctaatattgagggtggtgaagttgtgttgagaagatcagagagagct

SEQ ID NO: 359754 - DNA, 525 bp, Cannabis indica
tttacaattatgttccaatacatttgggaaaaaattattttaatagaaaattgtaaaaaagtcaacaaaaatattaaatttttatcaaaagcatataaaaattatattaaatatatcaagaaaagtatacaaaattattaattatattaatgagtggcaaaagagtaaataaaaaagtattgtggtgtaaaatttggttcatgttatattttgttttaaatttggcacaacttttaacatgtaccaaatttaaatcacattgtacattactattggagtcaattttatgaacataagctaaaaatacatatacatcacatttataacactccattagagatgctataagaatgtatttggtaatcattatttaaatcctatgttggtataatctattttcaaaagaataattagtaattttactctctaactttcaataatactgattctgcctctaaaatttatgacttgttaaaaatctcctaaacctttatgtttatagaaatttagtcattttgttaggtt

SEQ ID NO: 359755 - DNA, 912 bp, Cannabis indica
actcagcaaatgatgctacaaaaacaccacaatcactggaaaaaaattaaaacaagaaaaacaaaaacagacactatgagaacactagtaaaaatcaaagtcacataacaaaaacataacaatacaaacaagcagtgaaaaatattgaacattatacataaaacttacgctgtgacctgctcggataaaccatcaacagcaacaatcgggaacggttccatcgtgctaaacttagattcattgcgaaggcctttgaagtctaacattgagaaataatatggtaaaataacagaaaaaggcttgcaagcctctttggcagcagtcatataccttccagaaggaccagaacgcaatgaattgtacagatatatccgccgctcagctatgtttagacgaccacaaatccaatgatcctgtaattttacattgataggcataacaacatgatcaaccaaatgccaaggagtggcacataatatcttaccaccttgaatgtactgggccacattgtgagaaagagacaacaccgatatatcgttgtttttctcaacaaacttctcatacaaacttgttatgctagaacaaaaaaggcaatcagttgtggtgactttgattttcggctcggctgagtacattattttcttacgaagataatagaaaataatgtcaatgtgctgaacaaaaaaaataataaaaaatcattcaaacttataaaaaaactaacagaacaacacttaaaaacagacaataattaaaataaacaacaaaaacatataaataaaaaaaaacttacagaattggtaaggaaacaattagggtaggcaaggttgtgaaaccacatcttgttgctaatgtcctcaaccccaaaacgaaatggcagaaatattgtgtccttacccttacaatacacat

SEQ ID NO: 359756 - DNA, 528 bp, Cannabis indica
atccttgtgactataaaatagtccacccatagtctctttagaatttctgacaaacaagcaaacttccattcgcgcttctagtttgccttcattctttcttaagacacgagcagggccccctaaatccgataatggcgtaaactgggtatataaccattccatagttcgacaggtgtcttagggactactttagatggattaacatttaaaatgtcattagccgtctgtattgcatatccctagaaggacattgagagagttgaatagcttagcatagaactaaccatttctaaaagtatgcaatttcttctttccgcaactctattttgctgtggagtgctatgggtagtatactgtgattcaattccaagttcaattaaatgatctttgaattgcatatccatatactctcaactccgattagttcgtaagatctttaatgttttacctagtttgttttgagccaaagcatgaaattcttgaaacttttcatacttttcagatttcttttgcattaggtaaagaaaa

SEQ ID NO: 359757 - DNA, 513 bp, Cannabis indica
ttttttaaaattaattaattaatctaaaaaaacaaatccaatgagactcatcatttgcagcacctctcgctgttcttacacagtgatcgacacttgtaataacaagacgatatcttctcttgaaaaattcatgtcccccaatttatttaaatgataaatttaaaattagttatttattacataaataaataattactattttactaatttaaaatagatttttcttctccactttattttgcatcatccatactattgacagtgttatatagtgacgattcagagtcacatacctataatactaaactccaataaattagattatttattgaatcttattaattaaataattttatatattaattccattattatttcactataaatatagaatttaacttttaataattatagaattatatttagtgagtttaatatagtgtgtctattgatataataaatatcagtgattagtacatgtattggtccataattagaattggctaaattacc

SEQ ID NO: 359758 - DNA, 476 bp, Cannabis indica
gagagagatgaagtgagttatcaaacttagagctttatggcttaagtgagacttagggctttagggttaagttaaggctctttatataggagagctttaacctttactagcagataaaataagagatatttacataataaatgtaaatacaaaagactaaaatgcccttttaaaataggtaatttgtatctactttcgtgggctgttaaggccaaattcccagtctagcttgcagcccacgtgtaaggctgtgcaccaaagtcttgccaggtccaattctggccggccataggatcggctacgggtagtcggccagcctccttgaggtggctgtgttggcatttattttaccaggatcttagatctactcacaagtatgttgtttaacaccctaaatatgaactttctaaaaccataattaaacacatataaagttaagaaaaccttaaattgatggcagcggaataatgtctcct

SEQ ID NO: 359759 - DNA, 568 bp, Cannabis indica
gaagaggatgaggagaatgctgacttatgttatgatggcttcattgttggacaaccaattcatgagcaggttatgggaattcatcgtaaccaattccttgttgaactcatttaattgttagaaaaaggatctcgacgttcacgatcccccccgccaccgtgtttggatcaaatctcgccccaagagtcggaaacttgtcactgattacgacaaggaaattacagagaagataataagtatatattaatcctaaattgagttctactaatgagtgagtatatataattcacatactaattgcttcaatatatgcgtgcattaggatcaattaaaggataagcttactcagggaccaattcaggtccagggccaaaacgatatcttgacgcaggcgctcgggacaccagagcatcctggacgtgtaagggctgctcggtatgctagtacttgaaatgttgtttatttagtgacacaaataaaatcgtagctaatttgcattttatgatttgcaggttcctgaccagggcatctaaactgttcgagaggaagaaaagggaagtgtctgatg

SEQ ID NO: 359760 - DNA, 617 bp, Cannabis indica
cctcggtcaagttgtctgaaaaacgcgtgaggatgcgagtgatgccctcgtgcacgcgcgtctatgcaacccgatttcagatattttcaacataccaaattcaaaaaatcataactaattcataaaaaaattcaaattaggttctgtaaaatcctatatttattaattttttgtctactttctaataaaaatatttccagaacgaaataaaaaaatatttttacaacatacattgtgatttccaaacaatcatcatataagcacataaaccatcatgaaatcatccaaatcaacataaaacatccttttaattcagatttcatgaaaggaaatcattaccgtggctctgaggctacttgttagaatgtgctttaccaggatctagatttactaccatttatattatttaacatcctaaatatgaatttctaaaacaatgtaaataaacacatataaagtttaggaaaccttacagcgggtgcagcagaatattaatggctccttccactcagatctctaacccttgtatcctgtctgtagcagggtatcaccaagatttgagcccaaatgtccttctcttgattttggattctttacagccttacacactatgattg

SEQ ID NO: 359761 - DNA, 578 bp, Cannabis indica
attcccaacaactggcctcatagccatggtaatgatttacttttatgaaatatggatttaaaacaatgtttgtgttgatttggatgtgttcatgttggtttatatgcatatttgatgattgtatggaaatcacaattttatgatgataaataattttagtttcgttctggaattatttttcctagaaagtaaataaaaatttaacaaatttaacctttacaaaactcaatatgaatcttttatgaattaattatgattttttgaatttgagtaaaaatatcacgtgcgcgcgcggaacagctaggcaagcacgcgtcttcagacaagtgcctgaccgaggttactcagacaaggccttgtctgaaggccttttcacgccgagatccctctgcaaatagaggctacatgcagccttctccctcgcttgtttcccctcttacgcgcgcgtagaggtatgcaatgcatacccctgtgcccaaaatttgttttgtgatattttgactttcaaaaattattttttagtgaaacaaattcaaattttggtagaattttgtgtagaatctaaattttcaaataaa

SEQ ID NO: 359762 - DNA, 561 bp, Cannabis indica
tggttcaagaagaaaattgcagagggtgatgctgccacatcaaatgcagaaaagaaaagtgatgaagaatgggacgcagaagcattattcgcactggaggaagaagaactagctttgacagcttctgttccaggaaagatcgactacaataatgattggatagtcgagtctgtctgctcaaatcatatgacaggagatgaagagaagctgcaagacatgacaaaatataaaggtggtcgcatagtggtgacagccaacaactcaagattactgatcgcgcacatcagtaaaacaatattcacgtagagatttagcccaaaagaagtatcactccaggatgtctaccacgtacttgggatgaagaaaaatttactattagtgtcgtaacttacgacgacaggcaaccatgtcgtattcgaccctcaagatgtcaacacctaccaagatcttaaaatctctagaacaccgatgatgggaggacgacgcttagagtctatctatgtaatgttagcagaatctgcttatgtagacaagactcggaagaatgaaacaacagatttg

SEQ ID NO: 359763 - DNA, 588 bp, Cannabis indica
taaattaatttacaaaagcacacttcacatcttactcattaagacattattataatatatatatatgtgtgtgtgatttgttataaaataatatagaatattataaaatagataagaagaaaagaagaagaagaagatgatgataaagagataaagagaaaaagaatgagaatttcttagttgtttattctaatggggtgaacccctatttatacaaaagtattgactaaaggaatgagaaattaaattaatatgtaataaaggaaaatacaaccaaacattaatggtgttaattaatatggttatttggacatccataaataatattttataatactctcccttggatgttcataataattgcctcaataaaaaccttgctgaaaaacttggtcaaaagaaaaaaagtacagtgtaaactaactctcccttatttaggtatttgtggagatcttctaatagactaattccaatcttgtatgtcgtcttctcaaatgttaatggtggtaataactttgtgaataaatctgcaagattgatacttgattaaatttgttgaatgccaatatgcattttcttgaaacgtat

SEQ ID NO: 359764 - DNA, 734 bp, Cannabis indica
caatataaattacatgtcttcaacgctgatggcttagttatttgggcttgtcatttttatcatttatttttactccaaatctgaaaaataacataaaaattaaagtaaattaaatatttccaattaaaataaatttaccaattaaataaagaaatatttaatttatattaatgatatgcataaataaaggcttataatgtaccaatttgagcctttatcaactggatgggcctagagtttatgaaaaccgtctttaaacttgtccccttttttggggactgatagaagttcataaaactacagaatctcagccagactgggcgcggccaatttcctggcaacataaaaaatatacaagcttgataacaggcggtaggcttgtggaataagttggtagggtgaaagatcaacgaagaccaaaaaatcaatgaagtaattcttaagcgaaagcatggcgccggacatcaagtgggtctggctccacgccccgaagtcgttgtagttatgattaggcatctcttcgtccctagggagacggtggtagacccccaagctggagggcttgattctagaaaaagtaataattttttccaggtggtgggcacaagtcagtgtcgaatgtagctcatcaactccccagccattagggcgacatgcaaactttttgtagactactgggcccatcattacttcatccaaagtggccaactgtttggttttatgccttaaataaa

SEQ ID NO: 359765 - DNA, 713 bp, Cannabis indica
acactactagagaccgcctcctctgtatagagatagctcccgaaggaatctcaacaaaagatgcgagtaccacaatgacattggacacagcaccaatgaatgcaaaaaccttaaagatgagatcgagaacttgattcgattgggtcatctctatgagtggatcaacaaccgtctcccccatctcaacccggttctggcagggggacctttgccccaagggacgtcagggggtacgcctggagcgttagtgccagtcgctcccccaggagaacctcagcagactcccggcctaccatcgagacccaatggaagagtagctatgatctctggagggccccatatcggagggaccactcgaaagaaattaaagcgctacgctgggggcgttaaacacagcgaggtttgggaagttactcagctcccagctcaaaggcccgactaatggatcaaccaattacattcacggaagaagacgcaaagatggtgcgttttcctcaccataaccccctggtcatagagactcccatcgccaacaagattgtggctagaatactgatcgacaatgggagttctgtgaatttattgtttaaagaagccttcacggcgataggcctcacggaccgggatctttcaccaagcaattcccaactcacgggatttaatggaactacacttatcccaatgggaaaagtgaggttgccagtcaccttgtg

SEQ ID NO: 359766 - DNA, 518 bp, Cannabis indica
tcaacggtcaaaaatatcttattttttactttcccctatttttgtgggcctccttcacctataaaaggagagctcccttaggtcatttttcacattgagaaaactaccaacaaggtcagagcttctctctctagactttctatctctagaatatggagcttctgaaacttagtctattgcgataattaccatctcgtgagaaataaaaactcgaaataaatgtagccccattactatcgtgatatagggggtgagctactataaatttgttgtgtctttcttataaatatttaacaacttaatcatttttgccaatctagcgagcgggtgtggcttagaagtctagtccatatttttgagtcaacatattcatcaccactttgagcttaaatattaataggtttgcacacattagtgtgaataaacctccccaatgatctcgaccctatgtcacaagaatggtaaaccaataagtgtttatcccaaaacaccacttaacactcgcgtaagacaatcta

SEQ ID NO: 359767 - DNA, 524 bp, Cannabis indica
cttgcattttgtggattctaatatcttaataatcttattttacacatcttatttgaaaatcattttcatactcactcatctttaatcttaagtattttagttacttgtcttttattttattttgcaaaactaaaatcccatcaaatatttggagctaggttagaatattcttattttgtttgaaatagtttcttttgatgttagtcaactcccatgggttcgaccttgcacttacatgaacactatattccgaaacgattcgtgcacttgcgagtataaatattaaaacactcacgattcgtgcacttacatgttcttttaaagtgcaaaattgaaatcagtcaagaatgtaatgtcaccaagcacacggatttttcagcaaaaataagtgaactttttcaaaccatgctattcacctactatcacattgactcaaaacaaaaacgaaaaaaaaacattaaaattaaaagtagaaaaaaaacaaaataaaattgcaagttcaccccccaaaactaaagtgacac

SEQ ID NO: 359768 - DNA, 641 bp, Cannabis indica
agcgtaacacgtaggtctatgtttaataaatgatagatgcagtgatatcaataattatgtgattctgattattatgcatattgttatttttactatcttgttgggccttggctcataggtgctttactgtgcaggaaagggtaaatctgttgttgatcaggcattgagggctttgcgatgtattgtatatgttcaggccaagctagaccacaagggttgggtctactgttaaatgccaaaatattacatattttatagtgtaaaaatacaaaataaaattaattttgtataatattttcatgaataaagttatatatttttatattgaaattattttatttaagattaattttatctttgtttataaataaaaattagtatttatggcataatagagaaaaagaaataaaaagataaaaagaaaatacattatttttatttaaagaaatacaaattaattaaattttaaataaatattttcattaaaattattgtgatatattttatgttgaaaatattttgtttggatttaattttgtttgtgtttgaagaagaaaatagcgtttgtgaaaagaatggaaaagaaataaaaaagatgataaaatgaagcccaaagtgcatgaaaatgacatttttaaaag

SEQ ID NO: 359769 - DNA, 634 bp, Cannabis indica
aaacaaataaataatattcttagaaaaaaaatatatttatcatgtgatggaaatgtgcacattcttaaacctaattattaaaaaataaaataataaaattacatataaatattaaataattagtatcagtacaaatttcattcatctaatttaatcatcacacatatattatatatctatataattataattatatttaaagttttaatataattacataaatttaacattagtaatatgatggtcacctccaaaagggtgagaagtggaaaaggattggtagggtaaaatagactttcgttagtatggaattagctttcaagtgattttatattggaaaagtaaatccttagtttaggtgaattgtaattcctttggaatgggctttcaagttctaataaaaaagggttgagatgcaaaatggccctaaatttggtaactaagttagtaaatgtccacttttttaaaaaagtaagaaaaatgccaaatctaataagttagctaataaaaattataaaaatacatttatcacatatttttttaaaatatatatataataataaaattaagttacataatttttttagtattgcatattattatattgtaacaaaaataaataaatatattagat

SEQ ID NO: 359770 - DNA, 513 bp, Cannabis indica
aaatattatttaaaaaaaaagtatatatcgtataacaaaatatacatataccattcaccatagcatatatacaaaaaataataataataaaaatatatattgctaatatatatgtatactatactaaccaaattatataccacttttaaaatatatataccatgataacaaaattatatactgtcattgtatataataatgttgactggatttttagccaaccgacgcggagtcgtaataaatgagatttaaaccaaaataacaataataaatgcagttaataacaccagaattcgcaatgaatataaataaaaaaacagcggaatttaaagagattcagccctgaatgtcggtaatagcctactccccttgagttttattattaatttgagttacaaaagtcaagaacaagctcttgattgcaaagaataagaagtgtttaattgtgtttcagattgcggatccccctcccagatcatgggtgaccccttatgatcttggagtaccatcatt

SEQ ID NO: 359771 - DNA, 909 bp, Cannabis indica
agatttttgaatcttttcaaaaatgttagaacctggatttaacattttgatattctttttaatgttttcaggttccttagtgaaacaaataatttcagactcttttaaagacagctcagattcacaacattttaattttttttcttccagatcattaatgttgttacacaagtctttattatctttaaccagggaacgatagcacatatttccaaccacttaccaaacattactttgtaagattcagccatagagttcttatcaatttctaactcatctgattcggatccagcttcctccttgttgtcatcgatcaaggtattattcaagcaaatgatttttcttttatcctgcaaatttcttgacaaaacacttgttaaagcaacctttttattttcactatcttcagaatcatcatcactccaagtaacattaaaaccttttttattctttttcaaggtattggcacattcagattgaatatgaccatacccttcgcattccctgcattgaatacccttttggttattgggaacaaaagatttagatgcatcgttaccttttggagtatttgagaaattctttttatttctaatatttttcatgtacttttgaaaatttcttgttaacaaagccatttcatcatcactctcattatcggaaaaacattttcaaaaacattaaatgcaatacctttgcttttctcactcaagaaattttgcttaccctttttcttgatttgttgatttaactcaaaagttcttaaagaacccatgagtccctcaaccttcattttgccaaaatcttttgcctcttccattgctagcagttttgtgtcaggaagcacacgaataattttccgaaccaagacagattcatctaatttttctcccaaggcaaaaaactcat

SEQ ID NO: 359772 - DNA, 1068 bp, Cannabis indica
acccgaagcccgaaaacccaaactcaaaaatctgaaaacccgaaaaacccgacccgtgtgcagccctagtatgggtaccatgggcctatataaccgagcttccaataagcagatctagaacttaccaagtaaattctctaacttattaattcctccttgcaccactatagaatttggaattgcactctcaattatatagaacgctctatatattccatgatatagatatgctataagattatccatttgttattatcccaataatcaatgatcctctatagatgatttacatagaatatggattaatttaacgttacacttttcaatgtattttattcttaaaatacttagctacctataaatgatattttagtgagctaatataatcactaaaatgagtactcagccatttatctctgttcagccaagctcgaaggaaatcatcatttgacttctatatttggatagaaactatatattccgtatctatgattaacgctcccactcaattgaactaccatgtccttaacctatatgtcacgggaagaaccatttggtcgactttaacaaatagattcaagaacacaaataaagcaactgaactacaacctaaccatctcaggattgggatcatttgatctaggatcaactaggtgttattgaattgaatagatattacagtaagtttatcatatctcattcaagttcaacgtcaatcccttccaatgcatactccatgcatccaacccaagcttactttaaccaatgccttggaaaggacatagcacttctccaaggtgcaagtaaactacattctagattatcctatcagttaaaccctatgtactgataaatcataagaatacatttaatcacataatcttgaatactttctattgtgctgatgacaaaataaacaagaatatcaatctgataaggatttggatgaatttataaatcaaataaacatataaatgatcacatgaaccaaatgacatactaaatcagtaatgaaaatgaatatgtttctttattgataattgaatagaaaagattacattgaaatag

SEQ ID NO: 359773 - DNA, 847 bp, Cannabis indica
atcactacgtcaaaaaaaaaatagtctaaaatatataatttttttaaacaatgaatatatcattgaacaaaaacagacaacaataaaaaaaaaaaaaaaaaaactaaagcatcccagagacaataaggaaagttgtttaaccacacaagttgtttatccatctaaaaggcatgcaccgctaatccatgtgcagcgcattggccgtccgatgaacatgaattagggatacccttagaaatctggataacaaacttgccaaatcatctagtaaagatcataatattgccttttactaaaagcagacacaactataaggaaatcagtttcaactatatgaacagtatagcctagagaaaaaatccaatccagagccatcacaatcgcaatacactcagcttgaaccactaaaaagtaacctaatattagttttgaaagacatgctattatatttccatctgaattttgaagtatagctttaatatcaatagttgttgagtttttatcaatggatgcatcaacattcaatttaaatttttcttttgaaggaggaacccaactactagcataattacatctgacattattataaacggaatttttatgccatccttgaatgtgttccttaaatattcctttattcgaactacaataatattcaacgatttagactctgaatgtttatggtttaattctacagataaagtatggactttgagtactctgaatgttttctttctattgaggttaagtataagtttagaaagaattaattaatgattgatctcaattaagaaggaccaattgaaaataggcatgcttaggtcatatttgttggatatattttacc

SEQ ID NO: 359774 - DNA, 550 bp, Cannabis indica
gatattatcgaataaattttttaaattgagtcacaaactaagtcactttctttaagacgtttgcaacactatcaaagaatgtacaagtagtcaaaatttatcgatcatccccaagataaaacagtacagtcgtactgtatcaaaagcccactgtactataaagaactgtcgaatacaccctaaaatttatgatatcgcagatggacttttatagtgaaaactgtgtctattttttcgatataaaaaagatgtattcttctcatcagttcaatcacattatattgatgaatggattgaaataatataacgagaagaaagaacgttctctgaatcgtgaagtgtagttggttggttgaacgtgtcccattaattgatacgattaattaatcagtttcaattaaatacgtttttcaattaaattaaaaattaaaaaaataataaaaattattatttgattaaatataattttttgtaaaaataataaaatgttacgccacaccacacctgttggaaaattattttaccaagatcttagatctactcacaagta

SEQ ID NO: 359775 - DNA, 646 bp, Cannabis indica
gcacacaaaaaagtcgcacaactcatcttaccatccatttctcttcctctctctaatcttaaaccccccattttactctgaaaaaaaaacccattactctgaaacaaaaaccccattttctcttctcctttcctctctcagtccttgaattcagccttcatagccatgaaaactcaggctccgaaaaactcaggtacggctgtattatgaatcattaacgttttatgtattttgttcgtattttgtttttctctctttttaatattaaaactatattttatatataattattttctctctgtaatttttttgtgcgtgtattatatatttctacacgttttgtcctgattttaatctataaaaacttgttaatcagtgtaagacccattttctcaggttccagctttcacgtgggttttggctagtttagttgtttgtttttcatctaaagaggtagagtattattattattagaattattatttagattagctttttaaatttgtgtgtgtgttttttttgttaaatttttctatgaaattgattattatttatgttcatttatataaatgaaattaattttggggctatttttaaaaatatgagaaaaaattattaatgttatgataaatatggcataaaaagt

SEQ ID NO: 359776 - DNA, 653 bp, Cannabis indica
aaaaataaaagtatattctgtaagtttatttttcattttattgattttatttacgtcgggtctaagtccatagtcggattcgggtttaggtcagagatcgagtcgtcagggccgtgaggggatttgggtctggatctgatcgaactccaaaatattgattaagaaaagcaaaaactgtttaaaaaaatattgaaagtgactctttttatttttaaaattttgattctcaattaaaaaattgaatattaaaaacagttttatagaacatatattttaaaaatatttttactttttcaattttaaaaatagaaaactgattaaaaaagtgttactatagattatgaaatttaattaataataattagctaaaataatagtttacaatccaatcacgacatctctcccgttgtaaacacgatcagaattaaaattaaaaacaacgagtcaaataatcaattgtctaatttccaaattatttgacaaaaaaaattaaaataaagtgagatgaaaaagattgaagcatcacaattaatcttgagaatacttatattctgttttattcaccgcttagaagagacaacagttgaaattattgcagcaggttcattcaacctcgaactcaactattgtgtaaggtacgtaagtgaactact

SEQ ID NO: 359777 - DNA, 537 bp, Cannabis indica
ggtatcacctaaaataaaccagggaccaccaaacctatccccaatttccattagctcagcctaaaaaattttcttagcatgaaggtaaggagggccatacacacacgagaggagccaagggtgtgaaggaggatccgagtaaacaagactagagatatggttatgagaacaagagatacactcaaaattgaaaccaactttccacgccaatataatacccccaccagtaccaataggaagcaaattaacattaaaataaaagtgcagggattttagagtatgtaccagggggtagcatccactttaagctcagttagaaaaacaaaatcaagagagtgcgatctgatcagggacttcagttcccaaactgtagaggtctgcccctaaccctctacagttccaggtaatgcctctcatggctccagtggaggagatttgacattctcctccacaggggtatgagagtgagcagacaagctggagccagattcttcaatcaaaaaagaaccaaccagagggttcttcataattccatca

SEQ ID NO: 359778 - DNA, 684 bp, Cannabis indica
aattcaagttcaaatggtaaacggttcagcaacaataataggcaagggaatgggaaaaagggaaaggtcactggtaaaatcaaacaagctccccaggagaatcctgctaagtatactgcatttactgtcctgatagaggatgtagaaagtgtttatatggccactcagtcataaaccccgtacaagaagcccacacccatgaaaaaatgatgtcagcaaaagagacatgaccattttttttcattttcatggagactacggccacaaaaccaatgaatgcaacaatctgaagcgagaaatcgaaatcctgataaggaaaaacaacccacacgtaatgaagtatgtcaaggccgatcaaaatcagaggggcgataacaaccaagacttactaccaccacctgtagatggacatctgcaagtcgttgtcagaggcccgcacataactagagattcaggcaaagttcgggagaggtatgcccaaacagtacagcccgagcaagaagaagtaatcctggccgtaaaagagagaaagccaaaaatccaacaggcaagagagcccaccataacatccaatgatgaggatgttgtcaaaatcaggttttcgcacaacgacccgttggtcgtggaagtctagatagccaacaagatggtggccagaactatgatagataatggagcgtcttc

SEQ ID NO: 359779 - DNA, 1237 bp, Cannabis indica
agatcgacgggagggtatctctggttccttcttcctttctctctgggtccctggtacacagaaatgcttttttggtcctctcaatcctgagggccaagactccctttttggagtttacccctctgcggacgtgtccctttcgggaaatctgagcggacctttcgcggatcctgcatctttttctttttccgcggggtggaagcaggatttttccgctggttcccttcagagggataccgtatggggctaggctctctggacttatgcttctgggtgcttggtaaggactctttcggtgtttctccaagtcctgcagggatggctttagggtgtacgtggatccctactgcctccatggctttctgcatggcgaccatcacctttttcatccttttcatttgttcttttggggtcgtgatttcaactttatgatcagcagccttttgtctcaagagcactagttctgtgtaactaccttcgtcgtagccgtcgtactcgtcgaagttttctatgtattcgtcgtcgttggtctctcctcctacctcggagcccacattgactctggaggccacttcctcctcttcagggttttgggcatcttgagaaggacggggctgacgtgtattgcgagtctccaccattgttgctttatcttacaagactattgtctatttgcagatgcttccttcagctctcaatgaaagcaccaaaatgttgaccgaggtttttggcaaccaacttaataatatataagagaaagttgtaggaagtttaatgcatgagatttttacgtggttggggcattaatgagcattagtccacgagtcttttttatttatgagagtatttattacagagaatgttccttgtagtttttctctctttaattctcataaacccagaattcttgacccctgtcttagtgtgtttggggggtatttataatgtttttctggagtgatccctaaaaccgaactacttgtctttctgggtagtttgagtaggggcacatattcccagcagatacaaaatgggaaatgcatggcctacaccctaggtatcttaggggttaggtggatatactcctttatctcatcttgactgatgtgatcccttataaagtagtcgtcacttggcttattaatcatagcgtaatagctgcagcagagggttacaccgccaaacttaatgcttatggcagttttcaaaacgtcttcttccatgcggcattaaatgc

SEQ ID NO: 359780 - DNA, 621 bp, Cannabis indica
aagaagccaaggctacaacaaaggagaactcaagagatgattattgggtggttctattattttagttttgtttttaagttttattcgctacaattttttttttggaatcggatgattgtataataattttaagtttatattttttttttttgtattaacattttggatactcaactaagatgtagactttttttcattaaattttaatcagatgattctttgatgaataaataatggtaataaaaaaaattaaacttaggacagaattttaaaagggttataacccaacccaaaccaacccaacccaacccgatgcatagtttgttgggttgggttgtacagaaaagaagttttgaatgggttagaaatttctaggccggcgtaattgggttggctcattaaaatactttcaacccggccaacccaacccgtgcacagccctattccttttatagtgtaaagaccgcttagtttaaatttggaaattagcagataattagggtttaattatgaaaattatttattgatatttaaataattatttatgttgctatatttgaattcataatgcattttatatgtcatatagtgaaattttataattttgcattttcggtgtcc

SEQ ID NO: 359781 - DNA, 632 bp, Cannabis indica
taataagcaggcctgagcagggagatagaggttaagagagtcgttgccacatcttcttcctatccccaatactgttcttcccatacaccaccgtaaggcagaagtctacagtcaaactattcaccttgaccctacaatgtaaaagttgtgaccactcttctagtatagcaatattcaccaacgttttttttagccaaatcaaaagaaaacaaacatcaattatatgacttgtatttattcaaaatatatataaggagatgatttttgtccagttatagtacaacgaaaaatgctctcctacagaaaagaataagagctagaaatctgaacggaatgagtcattatattctactgccaccaatgtaaggttttctaaaatttacatgtgtttatttcatcgtattaaaaattcatatttagggtgtaagattatagtattataatcaacatacatattagtaaatctagattctagtaaaataactttcaacaaatcattgcttcaaaaatcttaattttatttacttcatgttatgcttaaggtgtttaaggttgaaaaacggtgtttttgcaaatgtcagttgtatataagaaaatataaaaactgtaagcgtttgcagcagcagaaagta

SEQ ID NO: 359782 - DNA, 723 bp, Cannabis indica
gattgtgaaatcttgtatcaccccgggaaggcaaatgttgtggcagatgccctgagtcggaaaggacctgatcagactttcaacatggtaatgatttctcctcagttagccttggatatgtctagggcaaatattgagtttgtgactgggaaattgcataatctaacgttgcaatcagacttattggaaaggattaaaaaggcacaactagaagaccctaaagtgcttaaaactcaagaagatgtcttagcgggcaaagctaaggacttttcaatttctaacagtgggatgttgttgtttaaagctcgagtgtgtgttctaggtaacattgagcttaagaaagaaattctggatgaaactcacactaccccttactcactacatccgggaacaaccaagatgtatcaagatttgaagccttatttctggtggtacagagtgaaaagggatttggtggattatgtgaccaaatacctaacctgccagcaaattaaagcgaaacagcatcgactagcaggattacttcagccattatcacttccagaatggaagtggaaggatatcgcgatggattttgtggctagtttgcccaggactacaggaatgcacgactcagtttgggttgtagtggataactttacaaagtcagtgttggaattaatatttatccaggatcttagatctactcacaagtatgttgatttaacaacctaatattgaact

SEQ ID NO: 359783 - DNA, 523 bp, Cannabis indica
ctaaacatacataataatgacaaaagtggtccaaaataacttcacatgcatatactatgcatataccatgcatataataggggtccctcagctttaattttatatatcttttcttgtgccaaatttcaagtatatcacacgaaagtgataaatggcatcttaattgttgacctaaattttatatatatatatatatataaatatatatataccatcctcaacggtcggttaccatggctatataaaattatataattacatatatttctttaatggctttaattagccccactgatgaaaactttctataaaggtatataattttttatatataaatattattaaagcaactcatcctcattaatcatataaataacgaaaacgtatgacaaaaaccaaagacaacctgtaataattgaacaaattaagtatatcattaactttttttcttttaaaaaaaagaagtctaataatggagaacataaacattatactcaacgacagcatctccattagaaggatt

SEQ ID NO: 359784 - DNA, 801 bp, Cannabis indica
aaaattaaataatttaatattaaaaagtaaccaatatttaaaactaatagccgatctaatccgcacttttgcatattggattagattatatttgagctattgtgcagattgaattggatcaaaaaaaataaaattcgcacttagtgcagattggatgcactatgagaaaaataatgcgaattgaattggatgaacacctataataacatctgagttagtcgagtgggtttcatgaattgagcaaccttattcacagcttacaagtaagcttaacaattgaaggactcagtcactgtaaagaccgcttagtttaatttggaaattagcagctaatcacgtttaattatgaaattatttatagctatttaaataattatttatactgttattattgaattcagagatgcatttttatgtcatttagtagttctcataattttgcattttcggtgctcgatattttggaactcggtgtttggctcagtaaaaaatcacaacttagtatgttagtagtttagggcggtttattagacgttagaaatgtcgggaatggccgggaatttagaatttcccaaaaatacccctttagtgtttatttatgtgaatttagtgtggagggacaaaatggtctttttgccccattattattttgtcttctagtgattttaataattgaaaaatatatgtgtaattggttgttatttggctgaagtaaaagtgttaagtgccttaaaattccactttattcatattttcaacacttgaaaaaaaatgaaaaaatttcaaaagctctctctctct

SEQ ID NO: 359785 - DNA, 837 bp, Cannabis indica
tgacagcaaaagagaaagaagagatggaagaaattccatatgcaatggctttggggtgtctcatgtatgtcatggttagcacaagacctgacattgctcatgtttaaagcatattgagtaggttcatgtcaaatcctgggataaaccattagagggtactcaaatggttgttgagatatttgagagggacatcggatattggattgacttacaagagagtttcagagaaagtaacattgaaaggatatgtggatgttgattatgcatcaagcaaggatactaaaaggtctactacctcttatgtgtttcaaactaatggagattgtattagttggaaatcacaactccaatctgtagtagcactttcaactacatagacagaattcatggcgaccacagaggcattcaaagaagcaatttggctacaaggaattctaaaagagttgaagcttctagttggaaaggcaagggtatattctgacagtcaatcttcaattcatttgtgcaagaatccagtgtaccatgagaagacaaaatacattgatattcagttgttttggataaggaagaagatagaagaagaagtaatcgaattggagaaagtgaagtcaatagagaaccctgttgatattggcactaaggtgttacctgttggtaagttcaagcattgcttggagttactcaaccttagttgctaagtagctacacatgaaagcattaccacctccattggacagatatgcttagcttgttggggcttggagaaataaagtggaatttgtggtattattccttaaacccccaacaacttttgagttagttagttagtctttaact

SEQ ID NO: 359786 - DNA, 628 bp, Cannabis indica
ttatcccctatccctctcttcttatctctttcttcatacccatcagaccccaatcggggtccccatcggacccgtcggacccccatttacagcacatgcatcggagccgttggacccaaaagtttttccagtacatgcatcagacccccatcggggtcccatcgaacccgtcggacccaaaaactaaattttttcgcacatgcattggaccccatcgggccatcgtcttccccaaactgcgatttctccaaatcgcagatttgaaccttggacattgttgggcactgttcgggtctcctccgtgacgcggtgatgagggtcggaatggtgtggtctcggtcggggtggtcagtcggagtgggttgtgtggggggttgtgtgatgtgggtttgggcgaaggcggtgatgagggtcggaatggtgggtgtgggtcttggtcggagtgggttgtgtggggggttgtgtgatgtgggttcgggcaaagaggaagaggagagagagtttgagggaaggagagagaaagggtttgagtttttgagaggggttatttttggggttttggaaaagtggtcatatgttttcaatgttgaaaagtattagtttagggaaaaaattatcccctaatgca

SEQ ID NO: 359787 - DNA, 666 bp, Cannabis indica
gtttgtctacaactccataatttgtcgatttggcatcccttacaagctcatctcagataatggaaagcagttcgattgtaaagagatgccacaattatgtgacgatttgggaattaaaaaagcattctctgccgttgcttacccgcaaagcaacggacaaactgaagctgtcaacaaaataataaaacacaccatcaaaggaaaactcgaagagcgtaagggggtatggccagacgagcttccgcaggttctatggtcatacaacacaactcctcgatctacgactggcgagactcgtttctcgctttcctatggatacaaggccatggtaccagtcgagattggtgcaggttccttacgaagagacgttttcaacatttcacaaaacgaagaaaaacagtcgctctacctcgacctactggaagaaaagcgcgatcaggctcacgtgaaaaacgcgacttaccagcgatgaaccacaagatatttcaattccaaggtcaagacaagagtcctgggagtaggagacttggtcctccaaagagtaatgccaaacaccaagaacccagcacatggggtcttcggggataattgggaaggaccatatctcatcgcagaaaagattggtgacgctacgtaccgactcgcagaactcgatggtactgcgat

SEQ ID NO: 359788 - DNA, 1064 bp, Cannabis indica
ataatgatttttttttttgaattaattgcataattatattaagaaccaaagaagttaaatctcgcaatcattacaaattaaggtacctgggacggaggacgaatttattataccagttacattaccgctaaaagctcatttaactatattgtgggcagcaaagttacataatctagaaataaacaaaaaattacagccaatcaaaaggttcgagagcgttttacaaatacatagttagtaatacccccaaacagaagaagtttacctttagacgttattgactcaccgtctcatacgtctactctctatgatcacaaaagaatgctttccacgtatcgctgacttccagactaataaacaagttgcagtttctccaatgataggtcagaaaagttgaggatattgagccacccacagaattgactccttatgactccctcgccaacggccatcacacacattaagtcgctaccaacattaacatcacagttgattttcgacccaatcatcgtggcgggggagaccaaggaggaggcgtgcaaatcaccggtgcaggaaacaaacaaaggctaaaatcaaacaggcaacatcccacacaggtgtataaaattagttttttgaagttacagattgctctgtgagggtaattagaaggcagattaagcttagtcttaaggttagagtccattgttgtatcttttcgaaggttacttccagagtgaaaaatataatgactattataaacagtctttgaattgttgggttattgctttatagtgtgtatcgttcaaaggtttttgaaataaaattttcttccttagcgccaaaatataaatatataacactaagttacaaatctaaaaagaacaaatgaagataaacattaactaaaataataatttaataatcaaattgatcacttgaggatcttagccttgaagaatatcaataagtattttgagaatcttgatatattcttgagatgtttgatattgttggtgagctatttttacataatccttgtttgctcattttgaaaataattgcgtatattaggatcaact

SEQ ID NO: 359789 - DNA, 423 bp, Cannabis indica
caaatgcagtatttttgtaaaatgcccttattattttgtattgtgagttgtgacttagtgttttgtcctcatgctatacggaaataaaatggaccaataacaagttaaaaaaaattaattgtacaaaacttttgttgaataacgtgtagagaattatttaatgacttgtttgaataatatttaagtgggaccatcacccaaagattgaagtgatgtaggagggacacgtgtaattgtgatgggattgttgggagggcaaactgggccttattcatgggctatatgccctttaatctttagttctagtttttcttattatttattttgagaataacaatgtacatactataattattgcagaagtaaattaaattaaaggaaatttacgtataaatttttatataatttacatatatactcaaa

SEQ ID NO: 359790 - DNA, 579 bp, Cannabis indica
ttgggaacttaaggcatgaatgaaatatcgacgtaacagccgttaagtcatacaaagctggtcggcctaacatgacgttaaaggttgatggaacgtccaataccaaaaattgtgccattatagttatgctcgtcggagcttgcccaatattgaggggtaggcaaattttccctagaggtgcgactccttggccggagaaaccatacatgggctgtagacaggtggttaaatctttgagttggagccccatcttttcatacgttgtcttgaataagatagtggaagaagctccattgtctatcatggttcggaccaccatgttgttggctatctggaattccacgaccaacgggtcattgtgcgaaaatctgatcttgatagcatcttcatcaataaatgttatggtgggctcccctgcccgtgggatcttcggcttccttccttctacggccagaactacttcttcttgttcatgttgtactgttcgggcatacctcttctgcgcattgcctgaatctccagctatgagcagacctccaataatgacttgcagatgtccatctactggtggtggtagca

SEQ ID NO: 359791 - DNA, 444 bp, Cannabis indica
agtaactctaaagaagagtcattgtcagcaccggccagttgctcactaacctcaggaactaaccagttcatgtagtgcgtgagcatctccttgcccttcttggcctctggaagcactggcaaaggtggagtaggaggtcgcatctactcggatccacccttgatcagctcggatccaccttttggttgctcaggcctgtccgagcttcctccccgagaatccttggacttagaaacttttggagtggaagggttcgcagcagttagctcctcgaaaagattaataacctccccagcaggcgccttttccttggtaggggtcatctcaccatccctggacttcttggttcggggagatgcgcttgagcatcctccaactctcttcttcagagcctcaagcatcttttgagacatgtctgtacggaacaaaaacaacatggttaga

SEQ ID NO: 359792 - DNA, 610 bp, Cannabis indica
caagcccaacatcccttgtaactaaaccttcagccctttcagctctgtaggtaccatccgatacgaagctttagatacaagttctgctcccaatattaaataaattcaaagtcaatctcttccttcattggtaaccctgggagctcctctggaaaggcatctagaaactctcaaaccatgagattatgtttgtaacgccctaatctatagggacgtcacgtgtatgattttataaattaatttaatactaatagataattaattaatcaaaatcatgataatattaaaaaaacttgactaaaataaattactaaaaatagacattataatggcctaaaaagcgtgttctagggatccctattataaaagttttacaaaagaactatatacgacgatgcctcaaacacataaaattaaaatacacaatagataaagcacaaaacaactcccagcaacccaggacataggccgctgaggtcaatgtgtacattgctagagaaggcagtcacctcatggcagctctaacttttccttgcccttacttgcaccacatagcacctgtgagtcacaagcactcaataaaaaaacaataataataatcatatagttt

SEQ ID NO: 359793 - DNA, 839 bp, Cannabis indica
aaaaacagcaacgggcaaactccattctcgctagtattcgactcggaagcaatgttacctattgaagtgaacatatcgactcatagacgagagttttataatcaaagaagaaaaccaagaacttctaaagtaatctttggatctacttgatgaaaaacgaactaagtcgcaagtcactaatgcagcgtatcaataccgagctacaagatacttcaacaaaaagtcaagaaaggctattcaacattggagacttggtgctaaggcgagcatttacaaacacgagagatgcgtctgcaggagtgttcaacccgaaatgggtgggtccatatgtaatcaaagtagtagtaggaattaaagtttagaaattggctcggctaaatggctcgctaataaagaactactggaacatggaacatatgcgaccctactaccagtaaatgaatgatgtaactcacatggctgatgtaatattttaaacttcagtcatgaataaagagaatcacaatatttaagtaaatataaagtcttactctttaaaattacttaaggggtatttatgtatgattaatcagaattcatctagatttacatgatataatgcaaacccacgactttaattttttttttaaagtttttggtcaaaactttctgacgagaaggggatcaaaccatcataactttttgatttaaacatgtctaacgagaaaggaaaatcaaaagttataaatgagatataactcataaactaaagtacaaagctgaatattaacggttcgcacaagataggaaagtattaaaggggacatctgttgggttttatgccctaaataaaactcttt

SEQ ID NO: 359794 - DNA, 513 bp, Cannabis indica
ataaaagggtttagtgtgaaaccatatcccggtttttaacttagaaccagaataaaaagtgttccactaaaacacatacacactcgtgaatatcagatgattacatgacctgctaacctcgacagattatgaactcgcaagcgcacgaatctttattgtagttagagattatgaagaatgaggtcgaacccatgggaattgcgtgagatcaaagaaaatacttatttaatctaagttattataactctaacctagtttcgaaaatggtgaggtttttggtagcaaagtaaaataaaatattttaacggtaaaaataacagtaacaaatattttcagtgatatttggggatattattaacggttcagaatccacttaagtgtatataaagatatttatgtttatattaattctcataatttaattagtaatcaaaccaattaattttctaaaaaaaaatagattttccttcgctttaaaattataatttctaagcattaaatgtgaaacaattt

SEQ ID NO: 359795 - DNA, 808 bp, Cannabis indica
tacaggatctataggtacctcaatagtgtcttccgcggcatgggttgcggcagtgtgatcgaggattcttggatccaagtctggttcatctatgtgcggcacctcctcgattctgaggatctcctggcgaggaggtggtgcctccaacaggtagataacatttaccgtctttttttctatcgaagttatgatcttcatctcctttaggatcggtcgacaaatcacggcgttatatgcagagtactggtcgattactgcgaagtcagccattgacttggctgtcatcggggcggttcccaaagtgattgggagtttgatcattccttttattgttatgacgtcgcctgtaaaaccatagatgctcgacgtcacaggtcgcaggtccttctcctgcaaccccatttgtttgaatgcttggaagttcaacagattcactgaactcccattgtcgacgagtatgcgatggacattatccccgccaatattggcgattatgactagtgcatcagaatgcgggtgatggacccatctcgcatcactctccataaaggtgatgtcatcgcattccttcttaaatagtttctcgggccgctcactaagattgttgacattggtgaacggcttttctttagcttctctggcataccgctcttgtgacttgcgagagtctcctgcgatatggggtcctccaataatagttaggatgttgcgaggtgttctgaagccactcgcattttggttttctcctttgtcatccgcttggggatgactttcctcgcccttcttatacttgtcgaactttcctctc

SEQ ID NO: 359796 - DNA, 607 bp, Cannabis indica
cacttcctaaaaaccaaaaaagcaagacaatagtaactgagatcgatgtcaaacctatcaatcattttcttagatcatgacatggggatcatccatgagcgatcattggtcatcatactctatgttattagtcatttgcctgctgctatcatctgcatgacatactttgcccattcgtcacgtatttcattgatttctttgttagtgtaagaggatgatatgttccttttaaactgcaacaaacgaaacaaatcattaatttaataggtcataataaaagtacttaaaaactttaatatttgtgaaaataattagtgtctttacctctgtttccaattttcgtgtaggattattttcagtcatgaatgatttaataaatctcatgctataatacccacactggatgccatctggttgctctggacatctgtactcagtgaagcttattgctactgaccgtcggtttcttttctcaaggtagtacctctcaagagcactacacataaataatataaagttaatacatacattaatggaaattagagcaatatgtttagagctttgaactactagaacatacgtttgaacacatcttttaatatcttga

SEQ ID NO: 359797 - DNA, 778 bp, Cannabis indica
aaagccatggagacgacagggattcacgtacaccctaaggccatcccagcaggactcaaagatacatcggaataatcctcaccgagcactcaaaaacccaagaccagggcaccaaatcctatacagtacccttccaaggaaaaccatgggaaaaatcccacttcaatccctgggagaaagaaaaaggttcaggatccacagaaagtccgctcagattttccgaaaaggaaaggtccgcagaggggcaagctccctaaagcgagtcttggccctcaagatcgagaggaccgaaaaagcgtatctatgcactaggagcctggagagagaggaaagaaagaacggagataccctccaattgacctaagacaaaaaatcaacaaaaagcacgatgatctacgagatcacctaaacaaaaagaaacacgcaccagcggtctctgcgggaaaactaaatgaaggaattctggctgagttggcaacgctgcgcaaagacattgctagggtgtcccggaggcaataaggggacgactcagatttcgattgcgaggactgggagccatgcgcccgacacatattagaggcagagctccccaagaattttaagattcttgagatggcagcatataccggagactcagaccctagtgatcatttatcccgcttcaagcgggtgatgacaatcatgagggtcagcaatgatgccaagtgtctatgctttccgctaacattaagtggttccgctgaggaatggttcaaaagttagaaccaggatcagtgga

SEQ ID NO: 359798 - DNA, 931 bp, Cannabis indica
acctagtttattcaattttagcactccaatactcacttttcaaatttgtattgagatcataaagcatgcctaaggtgatcaatctcaaacatggaactaagcacaaacatgaataaatacacaatcaagaaataaggaatagaaattaacattaactcatggcataaaatcaatcagcattaaccatctccccaaataggagtttagttcataatatccataataacatccataatcaaatctaaaacagaaattaagagtttaaggaagaacgagttggtgattccgctccgaatctccacaattgcttcctctacctccttttttcccttttgggtccaatttaggcctcccttcattctaaaacatgatccccttaaatagaaattagggttgctacctctgaatggtgaaagtcaaatactgcccaaaattcccttgttttgcccatagtcgcgactacataaagcctagttgtgaccactatgcatatttaattttcgggctctctgtaaaacacctagtcgcgaccatgaaaaagggtcgtgaccatggaaaatggtggtcacgactactaaagcaaattgacagcttcaatatctttcagtaaaatatgcataactttcacatacaaactccaaatgagttgattctagatgcgttggaaagaataaaaagaaataaaaaacttctctgttttgactttttccaaaatatgttcagaaaacagtcaaattaaggcttgaagtttcagctttattttcttgcaaaattttctctattctatagattgttgttttctgaaatttgatcaattgatatattccaagtgtgaaatttgaaaccaacgaaaacaagcgtaattctattccaaaaagaataacaaagaaggaaaataactataaaaagtgacccaaaacgtaggctaaaa

SEQ ID NO: 359799 - DNA, 658 bp, Cannabis indica
cctatatcaacaaagtgcatcttattttctggaagtctatcacagaagaactccacagggtaagctcttgggaagtttttccaagaagcgtgcgagtgaagacaaagcacactgaaaacactcggttgttctgcaggaccagtcatcagtccaagaaacattcagagtgacattttcaattttctctcatgtaaagtgcacatctaattaattctatatgctttgttctagcatgaaagcgagagccctatattcacatttgatactcaagcaagatatatatcactttctacttctttgaactccatgaaatcaaattgtcaccaatatgtctagacagcatatccaacaccatgagtcacaaaaggcttcaacattttgagatgttttacttttttcattttgtattggatttggacacttctttttatttctttctttcttaaatctatttatttatattctgattattttcttacactcattaattttttcttaaaatctcaccctacacatcttgaaaaattgtgaaatttcatacggaggaagcaaagactgttgtccatcacttttctattagtcacatttagagaaaatatagttttcaagcactaacaattattttaatcgaagtagtgaaaatctcacatttctgata

SEQ ID NO: 359800 - DNA, 553 bp, Cannabis indica
aaacaagatggaggcacaattgcatacccttacgcgcgcggatggaaggatctgaccgagggacgaggctgcatgcagcctcagatgctgagcaagctcggtgtgagtagccatccagacagggctgtgttcgagaattctcagtcagctccggtcagaatgagcttgctgtctaggcgtgtaccagtgtccgcgcgcgcaaacgtgtgcatccgatttcagatattttcacccaaattcaaaaaatcataacttattcataaaaaatcaaaattaggttctgtaaaaacttaaattcattagtttttcatctactttccagtaaaaatatttccagatcgaaataagaaatagttttacaacatatactacgatttgcaaacaatcatcatataagcaaataaaccatcatgaaaccatccaaatcagtacaaaatatcattttagttcatatttcatgaaagtaaattattaccatggatctaaggccaattgttggattatgttttaccaagatctagtttactacaatgtatattatttaacatcctaa

SEQ ID NO: 359801 - DNA, 510 bp, Cannabis indica
ggctaagaaggaaatatcctccagccacaacacagacaagggaataaacattcccaagtaggaaacttcccaaggcaaggatgaagatgtggatcctcaacttggggaccccaagcagcaatgttggacctgtggaagaattagaagagatcgagatcgatccagttatcccggccagaaagctaaaaatttgaaagggtttgttgctcgaagtaaaatcagaatttataaaatttctgagagcaaacctggatgtttttccctggtcacatgcggatatggtcggaatcgatccttctattatttttcacgtcttgaatatcgatcctaacatctggccagttcagcagaaacaaagattgctggataaagaacgagcagtagccctgaaagatcaagttgaaaagttgcacaacaaaaacttcatcattgaagccttttacccgacttgggttgcgaaccccgtactcgtgcctaagccgaacaagaaatggcgagtctgtattgact

SEQ ID NO: 359802 - DNA, 589 bp, Cannabis indica
aaagaacaaaacctgatatccaacttcaacccagaacctgatatccaacttcaaacgcagaaaacaaatttaccctatctctatcaactcactattttccttccctgttcatcatcgattttcaaaattcagaaaataaatttatataaacaaataaaatctcaaatccaaataaatccatacatatctaaaacctaaaaattacaaacaagccaataaatttcagattcaaacttgttgcattaaaacaattctttacaattacacagactatacttagattttttttttgacaatgagactatacttagatttatacacaaataaatagcaacatttcatcatatgttcatcattattcaatattctatttacagaagaaaaaatggccaagaaaatcaagcaaccaatacatctataatcttttcttctatttagccaaacccatatccagatctggcctattctgtgatagatctcgtcttctcgcaagaggagcttggggatggcgattctgccattgaatccggcaaggagacaagagagggagaagttgagcagagataaactcgagctgcggggttaggat

SEQ ID NO: 359803 - DNA, 698 bp, Cannabis indica
tgcttgttttctgaactgcgtaacgtctgtctttcatcttgcttattataagcttcatgaactttttttccctaactcgagaaaatttctaacttcttgagttctgacttttctttgaacattctcgttctttaatctgttgagtactcctggtcggcatatttgcctgtttatcgtttgatattccgaccaaacactcatcttgtgtgttgtcttttgtagatgaactcaggtgagtcttgggagaaggaacatcggattgaccatgacctgcttcaacttttacacaaggatcatcctcgtctttgtttttgcccaccttcctctagtgaaggacattctccaaaccctgtacccagccatagaatgatggctcatacgaagaaaacaacgagtttggatgacgcatctgaccctctagtggctcggtacgccactttgctcagtgccgaacaggatcttgccgtccagatggagggggaccatgaagggcacggtgaggttcagcagattgaggagcaggacgatgtacgtcctggcagttcctgtgaggcagaggaagaggcagaggttgaaccgccaaactacggggagtacaacgaggctggggagccaatcgatcgtgacggagacatcctggttgagggcgtggattacgtagtgaggaacttgctactgcgattcctcatagaaggcaa

SEQ ID NO: 359804 - DNA, 612 bp, Cannabis indica
ctgagtcatccccttttacctccgggagaccctagcaatgtctttgcgcagcgttgccaactcagccagaattccttcttttagtgttcccccagagaccgctggtgcatgtttctttttgtctaggtaatctcgtagatcaccgtgtttttcgttgattttttgtcttaggtcaattggatggtatctccggtttttccttcctctctctccgggctcctagtgcatggatacgctttttcggtcctcttgatcctgagggccaacacttactttagggagcttgcccctctgcaaaccttttcctttaaggaaatctgagcggactttctgcgaatcctgtacccttttctttctctgagggattgaagtgggatttttcccatagttttcctcagaagggtaccgtatagggccttgttccctggtcttgggtttctgagtgctttgtgaggattcttccggtgtttctttgagtcctgctgggatggccttatggtgtatgtgaatccctgccgtctccatggctttttgcatggcgaccatcacctcttgcatttttctatttttctctttttgggctgcgatctcggcttcatgatcagcagcctt

SEQ ID NO: 359805 - DNA, 585 bp, Cannabis indica
gaaaagcctaccaaactgtcgggtagcaacccccgagtctcatccccctgggtgaaacagacaaagatccaggatgaatacttctcagactataaatggtcagccgccaaatctcctgtcacaggttccaccggtgggccaagcagtaagtgggcagaccttgtctagtaattcatcaagagaagtcatacccgatggttccaaccaggccaacggtgccattccacctgtcaaccaagtaaatcaatcactgagacagccaggtgtttttgtattcaaaaggttagggatgacccattatctcagaaacgatatgagcagaaggagaggagtagatgatcaacttcgcacgacgattgtacagcccagaacccgttcttaaattcccgctcagaaagatactgacgtgactcaaattggccaaaatgtcgaacaggttagtccagctatgcaagcacaactagacgaactaaagagtatgttcgaaggcatggccgaggagagaaacaatgatctcgagctggacggagcacgtggaacccctttctctctcgagatcaatctcttggcgttgccccacaagtt

SEQ ID NO: 359806 - DNA, 781 bp, Cannabis indica
ctaattaaataaagcttcagcctttttctaaattagatttactaaaactaaatattttcccaaatctaaactagttcaatccttttattttattttaatatgttatgaatacttgatcttaactaaatctttccttatttgggattgtgaaggttatgctcactctaggttttcactaagcaataaatcaatttttaatgatatgaaagaaatattttttttatcagaaattaatatttaggtgaattctttactattttcacttttatctgaagaatatatgatattaatttatgatgctaaaaataatattcaaatattcatttgtacagattgattatttgaaatttattttaacttcataaactatttcaaaaaaaaattataaatactttctaacatttaaatgccttattacaagtttttattgtattttttatgaaaataaaataccataattattcctgttctctttgtttttgtttcattgtcgaattcgagtaaataaaagaagaaataccttaatagaagagagccactaaagagaagaaacaaaaatttattatcttgattagaagggcttagtgtagatttaatatgcattcttgaaccccaaatttcttcattttttattactatacttattatactcttgctatattatttaagatgggtattttaaatctttcaaatttagccctttggtattagttctctgcctactaaatcccaaatacaaatgatgttggcaattataatattaacttacattttgtttaca

SEQ ID NO: 359807 - DNA, 827 bp, Cannabis indica
aaattcctcctaaaatataaaagttatgtaattatgtttcttttgttaggttctatttcttttactattaaaattaatatttttaccttgtcaactttcactaaataaaattttggctcatttattaaaaataaataatttaaaaaattataatattttattaattttaaaaaataaaaaaaaactattgaaaaacatgataaaattattaaattattaaaaaaattaagtttacttaaattttttaaattattttaaaaaatatatattttcaaacattattctatttaggaacacatgtcttaaatcttaaactaaaattactaaaaaatctaataaataataggtaaatactattttggattatatgttttgtaaaaattatcaattgaaccctttgttatgtcaaatgacaaaatagattccaaaatagtaaaaaagggacactcaactcaattttcaataattttattttttaatataacaaactttaagacaatttttaatactaacagatatagaaaatataatcatatttatcataacatctctagatcagattactattaagttttattttgacaaaaaatcagttcagggtcctatttatacaattttagaaaatacatggtctattttgtcatttaacaaaacagagggttcaattagtgtaacttttgcaaaatatagagtccaaaatagtatttacccataaataataaaaaaattaaaatttttagaagaaaaaatcaagcttatttatatttgtaaactcacatcttaaaaataatgaaaaataattacaaattcaataaaaatataaaaat

SEQ ID NO: 359808 - DNA, 591 bp, Cannabis indica
tgactagagacaaagaattggaaaaaacctctttaatttagattccgcatgaaagagcccaattaagtccaaacaaaagggccaaggtctccgcttgtaatacagagatacttcctgaaaacataacaaaccagaaaacaccacaataaaaacctatgagtagaagttaaagacaaaaactaccacaagagacgcaacccaaaaaaacgataaaatcaacaatgcaaagaaagaataaaggaaaaactagccaaagggataaccctttggctagtgaaagaacaccataaaacataaacaaacattattctcaaaaggggcaaaacatataagtctttatacattctagcctgatacaagtgcactccagaactagcctaccaatgtctaactaatcaatctaaaaatgcctatccacattatataaatactaccaagtactgctcaatcacttagctaaaacttgttacgtcagacctaacccttttagcaattaagatattaaagaccctacgtcatctgaaacatgcaaaaccagacctaatactattcaaacataaaatcgccccatgtataacgtttcgaaacctg

SEQ ID NO: 359809 - DNA, 1069 bp, Cannabis indica
cacttatgaattttaaggcaatgcattcaaataaataatcataaaactattatgcttcctaatcacataacttactaaacaagttaaggcttattgaatagtgagtcgagattatctctgacgatgattgtacatggcctgatggtctttgatgaataacttgccggctctgataccaaaattgtaacgccgtaatggttaggtatgctacaatgatcttttgattactgtgaactcctttgctaatcaaagggttttctcaaaaatcgtgataaattaaaactttttgaataatattaaactttaataactataattatataatcatagaaataggtcaggatcctgcttttaaacttgttcacatgttcaaaataaactttacaactatgtcccacaacgattacaaaataagcctaagtcatcctgagattgaattctccaagtcgtaccatacttacatgtacaatcatccttgagctttggacttattcctgctcagccttagcctttattttacctacacatgcaagcaataactatgagtcgacaaacttagtaagaaaaacatataacatataatatattaccatcttgtatctaggcactcatacacctatccacaaggcttaacaaatgattaagaatgttcttaactaaggtacgaccactataccacatgcactacgtactcctactgtactagtattggtagggtttaaactgtacccgagtaccactaagtgttgtaccacatgcactacgtacctaactgtactagtgttggtaagactgaattatactcttaaacatcgtaggttgtaccacatgcactcaatacttgttggtagcatatgaatcatataaacaacatgcatagaacatacatacacatatacatatacattctatgctagtcttactttgtttccaaattcaagcatgctggtcaacttgaatggaaatttacgcactgaatggaggctctatgtcacaatcacacaaaatggataaataaccttctaaaacctttttagggatctaaactcgaaactaaaagtttccctat

SEQ ID NO: 359810 - DNA, 578 bp, Cannabis indica
agaattgctggaccacagtttatcgttgcatgtaccctattgaaaggtaaaatcttaattaatttttattttattaaatttgaacaagtttaattattttttctaatgctcatatgaataaatataggtacttgtcaaagttgaaatcatacgttcgaaacagaagcaaaccagaaggttgtattgccgaaggatatttagctgatgaatgtttgacattttgctcaagatacatggaaagtgtggagacaaaatttaatcgtaagcctagaaattatagtaatatggaagccaatgaagaattgcttcctattttccaaatgacaggtcgacctttgggaaaagcatatactaagagtttaaacgaggatactaaaactaaggcacatcgatatgtgctattcaattgtaatgtcgtagattcattcattgagtaagtatattatttgtcatatctcaaataataaaatcttattgttcatatcatatataattatatgtataataataattcattttgtagggaacatcgtaatattattgcacaagaaaattttcgtcaaagaacgatgactata

SEQ ID NO: 359811 - DNA, 833 bp, Cannabis indica
aaaggttgctaaaatagtgtccattttattagagctgactactctattcaactaatgttatctttgactctcgactaccaggacactgtatttcattatgttggaaaccttggaaaataataaatatgtttagtttttggtatttttacaaacatatttactttacttgttattttctgaacttgtgtatcaatttattgaaccaatgatttatttgtgtttattgatatttgtagtgtcaaaatgtacaacccacaccccaatcctcatctagaatatgcttttaggaatgaacttcaaagtgtgaagatggctcctagtcagagtatcacttcacacttgctcatgatgaacatgaaattccaaaaagcagttacgctgggaattgttttatctagagagaagaaggttcattttattctcaacagcttatcacctgagtttaaccaatttgttttaaacaattggaactcgtctgacatagacaagttgaacgctgaattgcgtgcttatgaacggatattatcacttgcatggatatccttctccagtaaggcaaataagggtaaaaggaaagctgaagatattgagaataattcctccaacaatcctactacttcaggctcagttgagaagaatagagaaagtgattccacttccttagaatatccttcacaacagattgaaccagcaataagaacaatccaaaaacagttaagcagtgattccaatgctttaggttttgaatcatgtgttttagagaataacaaatccatctggattcttgattctggatctacaaaccatgtctgttgttcattgtaattgcttga

SEQ ID NO: 359812 - DNA, 622 bp, Cannabis indica
ttttttatatatacaatttattgtcaatcatcataaaattactttagttgctgctatgcttttgtagtgttatattttatttcaatttattaattgttgagtttatatctattctcattaattatagtgcctaagtagtaagtttaacattttttttttatttatagaagcttcttatatatactttaattaatctcataatcctccacacaagcacctttaatattttctataatcacttgagctcatttcaagtgattcataagttttattttaatgtcatatgatctcattctgtcaattatttatttatttttgctaaagtttctctcaattattagcgaaacatgtctcataatggttttaacttttccttttttataaagcaaaaaaatacttttccttttttgtatttagagtaatttgcggcataaatatttaagttttatgccgagtagcagataaatacttaagtcctatttttttgcagtaaaaatatcttccgtcactactctggaacttccgtaggtacctctccgttatgtgccaggttagtgtccacgtgtcactcgttcattgatccacatcattaattttttttatttattatttaaatgtttaa

SEQ ID NO: 359813 - DNA, 945 bp, Cannabis indica
aatatcaacttcattaaattaactttctgagtacaaaatctctagcatagcaacaggagcattagacacagacatacgacgaccggaccgtgacatcctagcaacaacatgtgctaggcggtttgctaatcgtttaacaaaataaattttaacaaaaggcaaagaaagcataagtgaaatacaatcttgaaccaaattcccaaagataaaaaagaaaagagagttgagtgtctgcggatggcttggatggagactaagctgtctgactccagctcaacattttgtcatccttgacgtttgatccagcttagtgcttctttgatacccataacctccacaacctcaggggcgaaggcaccgctaagacaatgagctttagcatcaatgagagatcctgagtcgtttcttgcaaccatttcatagccatattggttatcactagcaaaaattgcagcatcaacgttgatcttgattgtatttatatccggtttagtccaaagctcagctccatcatcacaattacaagagtaaatgtaagacaaagaagtgttatcttgagctttgcgccagtgatcaagagctatgcgagctgatgttacaacatttgcaatagtaagcaccttatctttccaaacaattaaatttcttgctttccataaggaccaacataccatagagagggaacaaacccggtcatcatcaagacagttaaaaagactttccaaccaactagcaaatgagagatcaagagagaccccagttggtagacccatgtgattccaacaagagagggcaaaattgcaagaaaggaggatatgagagattgtttcaggtgtagcatgacagatggggcaaagtgaggggatatcaacatgtttcgtttttgagattgacacatgtcggaagagtcccagaagtagcgcgccagagaaaatttctaacttt

SEQ ID NO: 359814 - DNA, 1235 bp, Cannabis indica
aaaggtgtaataccttgttcaagttatggtgatccccactaatctacactcaaggttgtgagtgagtgtatatatatattcttctcttgctatatatatatatatattatattttacatatgtgttcttattttcttctacctttcttatatatataatatatatgtaatatatatagtgtatatatatatgtattgtaacatatatttaatcaatctcttttattgtccttgtatatatcttagtttatcttccattgtaataaaatctctaacagttccatctcatgctctttagataacagttgatactcgttcccttatatacttttattttattatatattattcgagtaatttgcggtgtaaatacttaaatttaattttcgattacaaataaatacttatgtttaattttttgcagtaataatacctaagttaaatttttagaacttctgtaggtacctaaccgttaaatgtaaagtcaatatccatgtatcattttcttattagtatatttacaaaaatttaatgacttgaaccaaaaaattgtcatggagtcattggcttaacatttaatgtttaggtacctatagaagtttaggcattataccgttaaaaattaaacttgaatatttatttataaccaaaaattaaacttaagtatttacaccgcaaattaatatcattattccctctccttcaacataaatataaattgtacttgtagtctcatgttaatttaattgggaaatttgaatttccatacctacataactttataatttttttcttaaatgcatacttattaaaatttgtaatgtatgactattttaccaattttccaaaactacccctcccatttgtaaatgctcagccgactctcacccaccatcaaccccaacccgaaccaccctcacccacgaaaaccctcacccacgatcaaccccaacccgaaccaccctcacccacggtcgtcgaccaccctcacccacgatcaaccccaacccgaaccaccctcacccacgaaaaccccaacccgaaccaccctcacccacgaatcccaaccccaacccgaacgacggtcgaagcccaggtcaccgccggtcccacgaatcccaggccccccatcaccgacggtcgaagcccacgaatcccaggccccctcttcaccgccggtccatcaaatcgaaaacaaaaaaaaaaggaaaaaaagccccaggtccgatggtcgga

SEQ ID NO: 359815 - DNA, 1133 bp, Cannabis indica
ttaaatatttaaataacttaggtattttttgtgaaaatctaaacaatgcttaattggagatattttgatatataattaggataattattatttatttattattttatttctaaaataatgatagcctagccatatctattttaaaattggtttattttcttattttaattttatgaaattataagattagaaaatgatattgaaaatatttatttggttattttcaaatcattatcttattagatatttaatttaatttgataaaataatttaaataaatctaaatattttaaaattagtttattttttaattttgaagagatatttaaggttgtttttaacaaccctaaattttcaaaatagttggttagttaaaataataatttaattatattaatatcttatttcacatattgttacatggacattgtttgttttatttaaattattttttcaaaacgtttttttaacaaatctattatttatttgatctaaattgctatgattaacttgttgacagatttaatgatctgattataatcattgtccaattatcaatagatcttataaatgtgtttatgaagtaataactactggtactttggggtcttctcttctcgctctctctcccgcttattcgccgatcggttagtgttgtgattttgattaggtcgatttggttcttgatcggtttcgtttggagtttggattaatatttagggtttcttttggttaattgcaattacgcctggtatgaatccttcacaagtttcattattattgattaataattagaattagatctaatctttatgatcatcaaaatgaacataaatggttgaaaccttgacttaatttccgtactaggcattctccacgagaagtaggagtactcattatcttcatcgctgaaagtagtattgatcattgattcatttaaggtttgacctacttatattcaattgaattttcaggttgtgttgattaactgcggcctttcatccttatgggtttggaatattattcttttatctctccctttgttcgtcagttcaaatttctttctatctccattattttaggttgcttttacagtgaacgattggtgttcgttcttttgttttaaatttact

SEQ ID NO: 359816 - DNA, 481 bp, Cannabis indica
gcacaaaacccaacagtttctagttccggaaaagtcatcggagtttattgctagtgtcgaaaaagtcgatggagacgctgtcagtgccaaaaaagtcgccgaagttgctgccgaagtcagaaaagttcctggaatcggtattgtcaccataaaaattaacaaaaaaattgtctgagttatcaccataaccggagttcgatgccggagtcgtcaccggagttagacattagaatttgactaataaaaaccagttacgtttatctgctagtaaaaaatatgaacaatgaaactaatttcttaaaataataaaaaaacataacatttaaacatagaagggctcgtttggtacgccgtattgtaatgtattgtattgtattgtgttggattgtattgtattgtattagtattatttaatataatacaatgtttggtattaacttgtattaattgattgtgtgaagttataatgtatttttaatac

SEQ ID NO: 359817 - DNA, 461 bp, Cannabis indica
tgccttcctatgtaactataaatagggtaaggatacactgaataagggacagaaagtcctttagagaaagaaccctagttttgtatcagagaaatctaataagatagactcgtggactatgcagaattttaacggcaaaatcacgtaaaaaagctttgtgttattttttcttcttttactactattatttttgtgcaaattaatcacgaaataggctttaatatcattaacgaaaatctacgttaataagaatattctattaagtaataggacattctgttaaagttaacacagtaaaccaaaaaatactattaaactaaaaattctgttacatagccccattttatatagatagatagatatttaattctgaatataattatatatatttattaatatttaaacgtagttaatgttggaatttattttaccaggatcttagatctactcacaagtatgtt

SEQ ID NO: 359818 - DNA, 509 bp, Cannabis indica
ttcaactggctgggttttcaggcttggagcactcaatttggctgctggaggagttttttgacagcaacaggtgacaacttaagggatagagttgtggtctctttgttggctgctgctgtttattttatttggttgaataggaacaaatgtgtacatgatgatagttcttacatggtgacttacattgttaaagagattaaaaagatagctaaatacagattgtatagctataggcaaaataagatagataccactagtcaaaggttaattaatagaattctagcctaagactgtttttttttcttgccaggttgccaagccttgttaggctgttgattgtatgttgcttgttgattaatgagaattttctcctttgatcaaaaaaaaagtagagaaaaaatataaaaatatactacttattatatatactaggttgatgttacgtgcaatgcacgtataattagttttttttaattagatttaggtgatatgttaagtgcaatacatgt

SEQ ID NO: 359819 - DNA, 614 bp, Cannabis indica
tttttcatgagatgcaatgcactttgattatcacagtgcattgttacatcctctgaattgatgctaagttcatttgacaatcccttgagccaaattgcctctttaatagcctctgttgcagccatatattctgcttctgtagaagatagagcaacaaccttttgtaggttggatttccaactaacacagcccccatagacagtgaaaacaaaccctgttaatgactttctagtgtctaaacaccctgcataatctgaatcaacataaccagttaccaactccttgtatctgctagtgccatcataggttaaccctgtgttcagtgttccttttatatatctcattacccacttcaaagcagtccagtgagcattccctgggttggaaacaaatctgctggtcatgctcattgcatgagctaaatcaagccttgtacacaccattgagtacatcaagctccctacacaactagcatagggaattaatcaatttctctttctctgcatctgtaactgatgactgtgagttagacagcttaaagtgctgagctagaggagttgaaactattttggagttgtccattccaaacttatttaacactttctgtagataac

SEQ ID NO: 359820 - DNA, 605 bp, Cannabis indica
tcacatggagagtatcttgaagtgataggggcaaaattggtacaatatttaaaaaagaggtaaaaatgatagactttaaaaaagagggtaaaaataaaagagtacaatataaaaaggatatggagtgtaatttcctcttttaaaaaaatgttaccacattcatttttttctagtgattgaaagtaaatgtgtaattactaattattagggtgataattatatagtctaataattacattatcttttaaagtataaaagtgtattttgatattagatggtaattatacataaatttctaatattttatttggcaaaaaaattagtaattttataagaaaataatattttcttttgtagataatatttaaaacagaaagttcatagtaattacactttcttacgggattatgagaattaaagagtgtaattagaactccttaattatctctaattacaaagttacaatgtaattacatatttagacaaatatatcaaatcgtgtaattacttttaaatacacataaattacacaatgattctctaaatgcgctttaaaaaaaaaaaaaaaaacaaaaaaaaacaaaaaaaaaaaacaaaaaagtaag

SEQ ID NO: 359821 - DNA, 795 bp, Cannabis indica
gataacatatgtactttacgaattttttccatgaaaataatgttattttcattctaaaaatgtttgatttggattccatgtgaaaaattaagcaattttggttttttacagaaatcgaatttccggataaaaattgaaaaaaattatgaaatgaaaattcagagttcaatagcgtcgagattgggtgcttacgcgcacgagcatctcggacaaaaaattgtatgcgcatgcagaaggggggacattttctgtgtgaggcacggtcgcacgcgcacattcagacacgattcttgtgtccacacctgaatctgcccgtgtgagatgctgcaggtgccaagttctcccgcacgtcccaccctgcacctcctccttgcgtgcgtaggaggctgcacgcagcctcatcgtgggcaaccaagttgttttccacaaaaagtacaatttttgtatttttttcacaattttaatttttttttattttcaaaccccaaatatcaatataaaatattatttttaatatttaaacttaactattaattttaatagattattattaatttcttttattttgaggtttaaatttataaaattattttattttttgaaattatggttagattttaaaaatttgtaaatttctttaatatttatatattatttaattataaaaactagatattttaatattgggcatattttaaattaaatgatagccatatcttttaatttcaaatattatattaaattaatcttatgtgataaattaaataattattaaatttgaaattaacctagata

SEQ ID NO: 359822 - DNA, 551 bp, Cannabis indica
tgggcgggttattcggtttggacagtttacaaatttttttgtacaaccctaccttaaattattttggcaagttggtcctcaaactttattttttggaaaattggtccccaaacttttattttcttaaaaacataaagtcctcactcttaaatgatggtattttatttatttttgtattaattttaaataattttatattaatatattatcaaattaaataaatatattttttatttatatgtattgtttttcaaatatgtcaaaataagaataagaaaagaatatttgaaaaagactaaataataataataataatatattttttataaacttccaaagtaaattatattttaaaatttatttttaacgtatgctccgcagcgaactcataaaattttaccaccgctaatgcaaaattttaaaaattagtaaatatatatataattaaaaaactattaaaattataataccacatattcataaatcaacaataaaatatactataaatacttgttgaccgaggttttcggcaactaataaaatatgattat

SEQ ID NO: 359823 - DNA, 499 bp, Cannabis indica
tgcagaactgttattcccagtctcttgcacaccaggtgcgatttcatctatagcagtcgttaaattgtgaccgacgtttgcccgctgtctaggattaatagctggaggaacccttttgtttcctgggttctgcgacgtaggatccaccgtctgtgaattggctggatccccttgacccctacgagtctgcaccaccattgtatttgttgaagagcgattcttgatccttctctcaatgaaagcaccaaaatgttgacctcgcttttagccaatgacaatgagtcttatttagtaagtgataagtgatttatagaaatcgatatatagtaaaacaaatataaagacgcaagtattttatagaggtttagccccgagcagttcggtaatagcctaatccttgttatttgtattgactcaagaacaaggagaaagattcctttcactactacaaaaacaccctttagaggcggtttttaagccctttaggcgtcggttttcg

SEQ ID NO: 359824 - DNA, 542 bp, Cannabis indica
taaagccaaaaaagcaagaccccgcgaaaatgatttgaggaatcacatcaacgatcgcgttagcggaagagaatcctctagtgataagacttaatgtcttgaacgtaaagttgaagagttgatgaagatcactgaaaagatctctaggaaacaaagtggtgtcgtattcgactctgaggaagaggatacagagccttgtgtgaagagaattattgatgcaccattgccggagcatttcaggatgcccatgatggaacggtatgaaggatgaacggaccccaaggaccatttttccaaatacaatcacatcatgcaagtcaccaaggctagtgatgacgctaaatgtttatgtttttcattaacattaagtaagtccatagaggactagtggaagaggttgtctccaggatctatccacaactggagagacctacaagtaatgttcaggaaacagtttatagtagccaaggattatgatttgaaagctagctccttgacaagcgtcaagcaacaataaggagaaagtttgaagaagttcatcc

SEQ ID NO: 359825 - DNA, 745 bp, Cannabis indica
ccagtgcactgatgaatcatgggacattaacttttgaagcatataatcacaattaccttccactgtattaacatcactgtaattgtgaataactatatgttctggacttaacaaaaattgtatacattaaaccacaaacatgaaaactacatataaagataaatgacttctaatcttctattgataacaaattagattatattgaaatgagttttatttagcgcatgaaattctaacacttacacccctacttcaaagacattaccgctaggggtgcacaaaatataggccaaaccattcaacccggtcaacccaacccattttttgtagtaaagggttatgctaagagtaggccatggctcattgagttgaaaaatgataggccatataattatgggttggttatgggttggacacattttaactctatataacccaaaccaacccatttcttgaaagatgttccaaatttgagacaactttcatacataaaatatatattacattcacaaaatatatacaaatatatattttacgttttcatacataaataaattatattgggataaccttagaacatgaattaaccaaaacacatcactaacatgtagtctatagttaccttactacttctaccaacaagcctaatgtgagaatcagtcactattattaactttgccacccacacaatgataccactaccatcttagttttttttaaaacactatattacacacacacacac

SEQ ID NO: 359826 - DNA, 678 bp, Cannabis indica
cactatcactttattgccaatcaagtatggtcgaaattacacacaaacactatagccaacatctccttttctatagtagcataatttaattgggcatcattcaaagttcggcttgcataatagatagttctgaataccttgtcaacccgttgtcccaacactgctccaataggataatcactggcatcacacatgatttcaaaaggtaactcccaatctagtgtagtcacaaccggtgctgagattaacttctccttgagaattggaaatgcttcaagacaatcattcccaaattcaaaaggtactccactagggagaagattagataaaggtttggcaattttggagaaatctttgataaacctcctataaaacccggcatgacacaagaagcttcgaactcccttaactgaaactggagggggcaagttctcaattgtagataccttggctctgtcaacctcaataccattctttgaaatcttatgccccaacactattccttctttaaccatgaagtgacatttttcccagttcagcaccgaattagaatcttcacaccttgttaaaatcaattccaagttgcttagacattgactaagcgatgaaccgaatccaaaaaaatcatccataaacacctcgatgcacttctctattaaatctgaaaatatggccatc

SEQ ID NO: 359827 - DNA, 518 bp, Cannabis indica
tatttcacaaatagtcaaaaaaattataaaaatacagttgtacgaaattttaaatattttttcgattattatgattttatttacagaaaatacagttattttatgttttactcttggtcatttgttgttgattttttattatttgtatgttatttttttgttgttatttagaagttatttcctattacttttatattattttcgtgttatttttataaataatcataataattgtaaaaaaaatctttaaacgtaaaaatgtaattttttttataaaaaataatgtcgtacgtaattattctaaaataaaataaaggttaatttcacaaatgcacaaaagcaacaaaaatacggtttcatagaattttaaacatttttaagatttttttgattttatttacataaaaaatagttttttatgttgaaattttattcatttgttgttaattttttgttatatatatgttattttttgttgtttttttgttgttatttccatgttacttttatgttatttt

SEQ ID NO: 359828 - DNA, 1230 bp, Cannabis indica
gtcctagaggtgcaactccttgaccggagaaaccatagacaggctggaggcatggagtcagatccttgagctggagccccatcttctcgtaagcagtcttgaacaaaatgtttgaagaagctccattatcgatcatggttctagccacaattttgtttgctatctggacttccacgaccagcgggtcgttgtgcgggaatctgatctggacagcatcttcatcgttgaaagttatggttggctctcctgctcgtggaactttgggcttcctctcttccacggccaggatgacttcttcttgctcgtactgagctgttcgggcatatctctctcgagctttgcccgtatctccagcgatgtgtgggcctccaataatgacttgcaagtgtccatctatcggtggaggtaacagatcctggttgttctgaccttggttggccttgacatacttctgtaagtgcgggttgtttttcttgatcagatattctatttcccgcttcaggttgtagcattcgttggtgtcgtggccgtagtctccgtggaaccgacaaaatttcgtcatgtcccttttgttggtatctttcttcatgggcccaggcttcttgtacggaattaacgactgagttgccatatacacactctctatatcttcagttagaatagtgaatgcagtgtgtttggcatgatcacggggagtctggccggatttctcggtgaactttcctttcttcccgtttccttgctagtggttgttgcttgaacgcttgccacttgaactgctggaatagttgggaagttgggggatgttccagtgggaggagccttcattttgcccggcttttgctcaccttctgctcgttgaatggcttcttcgagcttgatgaagccttcggctaggtcaaggaaatcactcattgagtcgaccggttcgttctttcttatatccttccatagttcaccaatgacttcaatggccccaagtatcgtggataactttccatcctcggttacccgcgataccttggtcgcttccgtcatgaatctgctgatgtatgcccggagtcgctcgcctggtcgctgctttacttcgaccaaatctcccagatgcaattggagctgacgtgaggaggagaattgtgcatggaatttcgaagagaaggttttccatgaactaaactttcaaggagccaacttgaaataccattgctttgcggcttctgacagagtggc

SEQ ID NO: 359829 - DNA, 1025 bp, Cannabis indica
taagagttaatattcttttactcgtagtgtagatttaatttatgtaatcatattgagattttgacgcttatggtttagatcaattttatgtaaaattaagtcttttattaaaacatgctttctacattgatttgaaccatataaaccaacatatacgtcatatgcattgtaactgcacgatacatcgtacatgaagagacgggacccgacactatcaatttgcccataaaagatattagcatgccactattaaccataaatatataccaactgggtactcccgtggggggaaattgcagcgacctcctcgccgataatatagcaatatgagaggattttcatgttattactagtggagtgttctatcccttaatgtttccttggaacgaaatttttcaggatcgaggagatgggtcgccgaaaggaggtttcaggagggtaggacaaactgttgtggtggtggtagctatatttttgggtcttagtggtagtggtggctgatagaaagagagagaagagaggaaaggagagagggaaagataggttaggaaaataatgagtaaggtattttgggtatattagtgtaaatataggggtgttcatctgatccaatctgcatttttttagtcaaatagcattcaatctgcactaaatgcggattttatattttggatccaatttgatctgcataacagtttaaatccaatctaatccgcaattgtgcggaatgaatcggttatttttgttagttatttttttaatgataaattatttaatatttcataaaaacaataaaaaaaaaagacgactattgtttcttaatcttcaataataatatatttctatcttcatttatatataaatcaaaccaatatacatatatgtcaatatatatatacttatctttagatttatactaaaatatatatgtattcatttctaaaataaataagttagtatatgtatttaaaaatttatgtgtatgtgatgtgaataagaataatttttctggtatttttttatta

SEQ ID NO: 359830 - DNA, 738 bp, Cannabis indica
gctcatgcagaaaacgttcaacacgcgttggtggagtgtgagtttgctaaagctgcttggaatcgcagcatggtcgacatcgaggctggggctgcaacattcaacagctggctgttggggatcttcggcagagggcacgaaagtaaaatggaggaagtggctgtggtgaattgggctatttggcgcgcgcggaatgaatttatttggcaaaagaagagttggtctgcatcaaatattattgcatcagctagaaacatgcgtgatcactataaatttgctcaaggaaggaagaatctttcgttgtctccgctgcatgatggggggcgaaatcttgagtgttgcattgcacttgacttaaacaagatcaaagttaatgttgatggagctttatttgaacaagaggggcgctttggcatgggctgtgtagctcagaatcatcatggtactatgatagaagcattcatgaaggggaagattggctgtgttcaacccgaaattgctgagatatataataggcattaaaaaagctttgagttggattgcaactcattcgtgggatagagtgatgttggaaacagatagcttggtgtgtgtccaagcgatttagagcggtatttttatgccttcacagtttggtcttattgttcaagatgtttcgaattttgcttttgactttatcttttattgatttgtgttttgtaaaacgatccgcaaataagttggctcattgcttggcaa

SEQ ID NO: 359831 - DNA, 566 bp, Cannabis indica
gacccaaattcaattatccactctttcatagcactcaagatggctgatctagatcatcatcaagacaaaatccacttccatcatcaacaatcataacaccagatccgtatattgtaacatcaaatcagaacaaggtttcataggaagaagctctagtgaaactaatctcaagtctgaattgtagagagaccaattatgaagcatacttcgagaaagctcattaggatagcacaagtccaagtcactatcgaacactatgaactcatcaattttgtcggcagaggtcttgtaaaaagtaggtagaagatagtcatttgtaaaaagcaggttcactgacaaccaaaaataagaggacatggacgaaaggaaggagctagtgtcggccattagagagagaaagtttagtgttggttttatagacttgttctcgggtagtcatgggactagttctgatgtttacttgttaaatttgaggtgattttgagttacaaattgagtttagaactttttaaagcttaggtccgagatttaatggtgttttctgtttaagggctcgattttaattt

SEQ ID NO: 359832 - DNA, 917 bp, Cannabis indica
gatttctagaattttttagggcaaactctataaatgcatcaaaccatacttgaaattgcagtgtgtctctctcctcacgcatccatgatttatccataacaaaaatcctaagaaaaaaatctcagtatgtagtaactaattataactagttactacttacataatgtaactaattaggtttctcacaattattttatgttaatttatatataactataattattgttttagtttagttcatgctattaagttgcataagttgtaattaactaactagggtagtgtttagttgattggaattaatgaatccgggaatggaatgactttttctaaagtgaatccatttctttgtttggtttggcatttataattagaaagcttattcctttggaattataattcatgtggagataggatttgtcttctcaaaacaaaatgaggtgaaaagtgattcatttccaatattatttagattatgtcaaatgtacttttttttttaaaatgtaaaaaaaattttactattagagttttactaatttgagcttttaaagttagacacaaataattatatagaatatatgtgatgattaaattatataaacatgtatataattatatgtgttatgccacctagttttttgcaaactaattatttgtgttatgcatatttcttttaatatttatgcttttttttagataaatttatcttaattctaccaaaattttggcagcataacaactataattggacgttcccaaaaattttaaatatgcatgaaaataaaaaacaaaagaaataaaacaatacaaaacaaacaaaaataacattaacaatataaaatttatccacccatccgattgtagtacatgttttcgcagaacctaattcactatagttgaatatttaagatattcaa

SEQ ID NO: 359833 - DNA, 1146 bp, Cannabis indica
ttacttggttcagtagcaaagttgtaagtccatttgttacctactccatgaacacataaataaacagattgaatcctttattgatggtggcaaatgatgattacaacaataagaagagagacttgctctctgctagtttgaggtgctcaggtgtgggagcaacagactatgatatggctatgggtgggttgtgacagggataagggagcaagttggagggaaagaaatttaaattttgtacttataatacagaagaataaagttgatactgaaacagatattttgtagctacagactgagattttataattataaaccaaaaaacgagtaaaaaacaataatgtacgaaaaataaaaaacacacacggttcttacacgtaatatcaaaaattcttgtagattgttactagttcacggtatcgtgcccagaaataagattcattagctatatctcaaaaaaaaaaaagtttttgacttatggataaatagactcactcttactatatgtcataagtttgatgtatttcatcttgacaaatgaaccttatttcctaacctgagtggatgactctactcttagtaagtcgtacagaaagaattgattctcaagctcacaggcagaagttgtgatatctgagtagagtaagaatatatatccaaccagtttttatcaagcaggtagctcacatgcatcaacgagggaatgtgagttggtaatttcagagatatatcttgtatatctccaagcttgcaagtcacggcataatcgctacattcatgggatggattcgcatcttcagagaagaaaaacaattagtttaagtttcttacttttcttatcgtaattatgggaattaaactagtttttcattttatttcttattgatttagggaaactaatttcatgtaattaacccctgtgaataatagactcatctcactattagggacactaattttatagagagagaatactcaagaaagaaatctcaatctaagagtacattactcagagatcactgtaagagctttcgagaggaatcaaggcatccttgttcatcttctcacaagttgatacaacaaaaatagaagtaggctattaccaactataagggatcgaacttctataaatctagtatttttttt

SEQ ID NO: 359834 - DNA, 575 bp, Cannabis indica
aaagctaatatgaaattgtaattaggtgcaattgaaggtttacatagtgttacatttatttgactacataattacactgtaactgtgtaattaaaagtaattgagagacttcaaactctctaattctcatacactctctaaaaacttttcattttaaatattaagtactaaaattaatattattattttcttatgtaattactaactattttgcaaaacaagatattagaaattcataagtaattgacatctcatatctaaatacatcttatattttaaaatatgatgtaattattatgctgtgtgttgacctcagatttgaccaacaggcatcagagtcgtatttattactgatgtttacctcgtgttacacaataagaataaaaaagtaaaagagacacaagattttatagaggatcgaccccctgagttagcgggtaatgatctactctcctttgtattaataccaaagataataccactcagatcacaagagttgtggaatctgaagtggctatcttaaaattacaatgtgagaatcaagctggcaaatctcaagagagagagagagagag

SEQ ID NO: 359835 - DNA, 684 bp, Cannabis indica
ttcaattcaaaaaaaaaaaagaatgtccaaaaattataatatttcataattagacattgtactacaccaaaatttcatggggtcataattattggaaattggaaaatgtaattgggacttcatagttatagtgtagttacatggtcaattttaaattgactaattatcttaaattataccaagatttaaatagagtggtttttcaaatacacccttaatctttattaaaaatataaatacatattttttttattgtatcataataatataatatataaagaatgttacatcttataataactaattaataataataagtgtggtaaataaaagggaaattttcacaaatacattttttttttgtatgtttaatctacaactttacaatttaaaatttttatttacaaaaatacgtttgtaagaaattaaaattataaaatacactttcttcagtaaaaagtaagaaaataattaaaaaacaacgagaaatcaacttcacgagaactataaataaagtataaaacaaccaaaaaaataatataataacaactataagtaaactataaaaaaaaatagtttatggattttactaaagatgtatttttataaataaaaaagctcaaagcgtaaaaaagaaaatttttccgtattaatatatttttataattttttttccatattttt

SEQ ID NO: 359836 - DNA, 1124 bp, Cannabis indica
tgaatgtgtgaaaaaaaataagtgatctcaacccgcattaaaactataaaatcgcagttgttagaatggtcagcatccttacgaatgctgaccaccccatttttatgcgagtagagatgcgagtaagtcgcgcatcctgggccaagtgatatatctccagaaatggctgggagaaactcagttactcaaggggcatgcgttctcaagcatgaccctgaaattactgagttactcccaccgttccgagactacctatcagccaaggagtacgctcatttgaatattaacgcatgtcgcaaatggctgggtgtatcacagtatctcaaggggcatataaccgcgtatatgaccattagaatactgtgacacacccaccatttggaaaagcgattaatactctcgcaattcaactcacagcatataaaatcctaaaagatctagccaataatcagaagtaaataagttctgtcagtgtgcgagtattcaaactgttcatccgaatacccgcgagtattcaaagtatgaaacagcgcctatttaaatatttcttatacagtatgcggttattccaatttacaggtcatttttcataggattacccagtttttacccaaaaaacgtaacctcatacatatcccttacagacatacattcctaaaaagcctcacaataccaaaacccagaaaaaacactctttctcgaacacagaaagcaaaaaatacaatggaactcgaaactaacctttagttttggcaagttgttcctgcggttgctctcgattacttctgagattgaggatgctttagaagaacggtagaaatctgggcaaaatgtgaaaacggttttgaagtctctgtaagggagggaagaaggaagttaagaaacaagagggaaaaatggggaatttgattcgtatcaaagggtttaaatacccatatccctcactaattgggatcacgacacgtggcaaccggaatgcctaaggtcgcccaatccaacggccaacgatggccacgcctacacgaaaaccgaggagtttttgtgacgtggcaccataaatgcaataaaaggtaataattacagccgtcatttttcgaaaccctcgatgggacaaccaaaaggtc

SEQ ID NO: 359837 - DNA, 550 bp, Cannabis indica
tcacaattctagttctgattctgtgttcgggtttggttccaggttcgggtctgggtccaagttgggtcagggtctgagtcttagtccgagtacgggtttttctgatctcggtctaggtctaggtctcagtccatgtctaggtttgggtcatggatctgggtcccaggtttgggtccgtgtctacgtctgggtccagctcccgtgttacgatgccagtctgggtatgggtcggtatttgagtctgggtctagttcgtatccatgtccaggtctgaatcccagtttatgtcaggggcttggtctgggtctgggttcgactcctgagttcgggtttgggttcaagttctagtgtcagtcctagtttgggtctgggactgggtccaagcctgagttccgaggctgggttctggtttagtttcgggtcccagtctaggtccaggtcctggtcacggccccagtcctattctagggtactagtcacgatctggatcaagttttagttttaggtcccaggtctgggtttgggtccatgtcctggtccagcttcaggt

SEQ ID NO: 359838 - DNA, 626 bp, Cannabis indica
attacttattaagcatacaaattcaaatttccctagtgtaatagggtaggtgtatgtagaacttttttagggtcatgaaataagagtaccataccaccctgctggtggtcatccctttttattggcacaactatattatatatatatagggatatgattttgtcccgtgattgtactttcacggaatgcattccgtgatgtacgacagccgtcaaatgaggaacttatttgatctgacggctgagattgatctaggggtaattagggttaaaaagtagaaacgtaccctaacactcatttaatgtaccccgagacctatctaatgtaccacggaatacattccgtgaaagtacatcacggggcaaaatcgtgtccctatatatataaaaaaactaaatagaatttgtcctttccctccccttgaattatgatatttgaacatttttttgttacaaaatttttgtagaactaataaaattattgtaaatatcaccctttatctacattcaactcatttctttaaataatttattaatatagtactaacatgatgacaatataactaagagtttaaacaaaaaagaaaaaaggtaaatagtggcataagtacccaaaattttaggttt

SEQ ID NO: 359839 - DNA, 1703 bp, Cannabis indica
aatcaaaatacatggcagatacaacccaaaaacaactcttgataactcggcacgcaggctagtagggtcaacatgtacatggttggagaagactgtcacctcatggctgctttagctttttctttacctttacctacaccacatagcactcattagtcacaaagactcagcaagaaaagtaataaaagataatacatggaataaccaattattaatttcactattatggaatgattgaataataacattcaaaagtggataacataactagccatatgcatggaaataaaagcaatcatgtattggattgcctaattaggcaattccatatcataatttggcatcatatatgatgtcggtgcatcaactaatcagatgagctcgtgccacaatctagcaccaatgtatcactttgtctaaccagacgagcctgtgccacaacctggcaccaatatatcacatctcttaaccaggcgagcttgtgccatatccaggcacctatatgtcactgctgcttgtgcctaatcaggatcgctaacaggaagaaatctaataatagttccagtctgtgccatagcttggcacctatatgtcactgccgcccgtacctaattaggatcgtcgacagaaagaaacctaacaatgttttcagtttatagtcatgactttaaaacggttgcctcacatgcacaacttgaatactcgtgtccacatatcacattgcctactaaggcaaattcatgccataacctggcattcatagatcgctttatatcacattgcctaattaggcaagcccatgccatagtctggcatccatatatcatatcacataatcaggtgcgcttgtatatcacattgcctaatcatgcaagcccattccatagtttggcattcttatgccgcattgcacaatcaggcaaactcatatcatagtctagaattcttattctgcattacacaaccaagaaaaatcatgccatagtctaacattcatatatcacgtcacctaatcaagtgagcttgtatattgcattcacattattattgcctaatcaaacaatcgataattacgaaacctgtcatgccatgtagtatattatacttttcttacttttgattcaaattcatgtatgtcagccaacccaagtggagaaacctccttgatgatctcggccctatgtcacaacaacggtaaaccaataagtgtatatctcaaaacactgcttaacactcgtgtaagataatctaaagtttttttatcaaatatcgtggtacaaatacactaaaataaaacatatattttggctctaaaacatacaccatattatagagctcattacaagcttcaaaatggtatatagaacgtctaaaatagacacccgagtgaaaagttatgacaaaaatacagttcctgacttctccgaaattcctagaaacggtaaaccgactgggaaacgataaactggttgcaccaaccggtggaccgatttggcagtaacatagaacaaaaatcccaatttttgcactcaccgaaacatcaccgaaacctatacaaatcattccaaacttcactaggcacatatataccataaatacaacaatccttaccgaaaataatattaagcccttaaatggaaaataccattaaaaaaagttccaaacttaatttctaactctaaatcacctcaaattcaacaagt

SEQ ID NO: 359840 - DNA, 710 bp, Cannabis indica
gagtcggcgtagcagcttgcggcactcttcttgataggagcaggcattccagggatacgctgaatgagggcttccatctcggctagcttgcgggccaaacccggatctgcaattggggatgcgctaaccgtctggcgggctgcctcagttgttgtaacctgttgctccaaggtggtgggctgtctaccatcaccggaggaggggaggttaaccccttgagctgtctgcccattgtctgaaattgtctgggcttctggtgtcgttaaggttacctgtccacctgcattaatagaagagtttggtgtattagtgacaatggttggagtttgttggttccttaccaaggctggcggatccatctgactcgatccgccaatagaggagttgggagtgaggctccccaaggactgcatcggactgattggaactcgaaagcgggatggaggtggcggagggtcggtcatgttctgggatgacaaggtctccatcctcaccaacaggtctgcgttttcagcttgcagcttttctagttgctcacggtctttagccgcttgctctcgatctttggctgcttgctctcgctccttggctgcctcggcagtgaggatagcgatctgggaagctaggtctggagtctcagttacgtcggccatggtgctcaaggtgaacctttggagtctttgtcgaatgaacgattgctaggttcccac

SEQ ID NO: 359841 - DNA, 801 bp, Cannabis indica
aacattgtttgaagaaccaatgtatcttgttgggaggaaagtattatgaccagggatccaaggttcaaaggcacattttacttgaattaaaaaaatactaaaaatccaaagtatgattaaaattacaaaaaaatataagaaatgaaatagtaattgtgatgtttatttttttgataacaaaaatttacaaatttttaattgtggtaaattaagtttacaaattcataactaaaatttataaatttataaccatataagcaaattttgtaaataatatttacagattaaaaacaaagttataacaaacttttatcagtatttttataattaattttaaatatggtaaattgtgaaaagaatatatttttaattccttttaaaaataccctaattaagatacatcttccatcaaaatacaagaaaaattgatacttttgttatatatatatatataatatatatatatatatataaatacttcttaatgggtattaccaatgagtaataaacaaatttaactataaatattaattttaaaaatattaaaccattagatcttggtccgatagcgaataataaaagagaaatttgaatttctatgcttaatttagctacttaattaaaaaaaatatcaaaaaatacatcttttttacactatataaaatatatttatatgtaaaatatttaagtcgaattcaattttttatatcatcttttttgccaaaaaattttttttttattatttttttttcagctaatacacccaatctcagccccatataatgtaaaaatgagaaattt

SEQ ID NO: 359842 - DNA, 669 bp, Cannabis indica
ctccattattctgattggatctgtcaggtatggctcctcctgatgaattcccgaacaaggtctgcctgcctacctcttggcccacgagtggaactcgtgaccgaggattggacggctgaccattggttgtctgggaggcattcatcgttgggtcatcctccgtttctcctaggggaatgacgtttggcgtttgctggcctacagtctggtaggctcttcgtatcagcacggtagcttgccgactacaatcttcgatctctgcatggtgagcccttaatgcctccatctctttgtctctccattcagcgaacatatgcctctgctcatcaaatgcgagatttactgcggcacgcagttcatcctgatcatgatgcagagtgttgctatgaccctgcatgagcccgagcgcagcacggagagtttgcaattcggttgcgtctctgatggttgtttgggcgttgattcctgcggaatagtcatgttacgaatgccctggctgtgtgtggaagtgttattcccagtctcttgcacaccaggcatagtttcagtaacaggagctgtctcaccattcaccacgcttcccgtctctccaggattgacagcgggcgaaacccttgaactccctgggtcctgcaatgtcagatccagcgtctgtgaatttgctgggtc

SEQ ID NO: 359843 - DNA, 1223 bp, Cannabis indica
tatatttgcttattaaattggcactaacacttccagctgcaacaacttcagtagaaaggcattctcagctatgaacattgtaaaaaatcaaatgcgcaaaaaaataggagatcaatggttgaatgatagtttgatagtatattttaaaaatgatatattcaatgctattgacaacgagcttattatttattattttcaaaatatgaaaactcgatgaggacaacttaaaagatatgagctcaaaaattgatatattttactaagattttaagatattgagtatgttatatattttgaacatcgttttagattaatttttttttatttaaagatttttagtgcttgatatttaacatatttttagttgaaaattgaaacattgaattgtgtttttcttaatatttacttatttttttggaatatttttatatatgaaaaaaaaattacgtccatcttccaattaaaacatgggtctgccactgtgtatttttgtttttttctgatcagaaattatgtcattcaatttatttcactctgtacattaagttaaggttttgatctctataaagtaaagtaggaccaattaaaaattgacatgaatagatcactatgcatgtaattttcataccacattatcatgattgatctacatgttgatatgtggccattgatggatttagttgtgattaatacaacaaaaatcgttttgaacctatgttgatatagttaatggacgagattgtacatatctacggttatgatgacaaaattatgagctcaataaggttaacacatttatatatatatatatacatatgtggtccagtgggggatttttagaaatttatttatttagagacacaattgtatatataaaaatgtgtgttgagtcatcatataaatgagtcaaattaatgtggtctattttagaataaaatttatgacataagggcatgattgtcatgattttaatatgtggatactattgagataatttctgatttgatgagagatcaaattaaaaatagtaaataaagactagttactgttttattagtcattaataacaggtaatggtccctaatttgcatcgtatctttttactattgtatccccatcaccaagagactgagcatgtttggtattgttttctgttttttgttttcaaaaaattgtttttagaaatgagaacaaaaatagtttttgaagtttttaaaaacaag

SEQ ID NO: 359844 - DNA, 626 bp, Cannabis indica
tatattatataattattgagaatatttttgaacgttggtataattttgaaattttataataatagtaaacaaaattgttgaatttacaattttaagattgaagcaagaatatagctctttgaattggtgcaactgttcttaaattcttgagtgctttagtatatattatttattattttatctcatagaatgcatgcttatacttagtacatattatttattactttatctctcatattatgtacaagtacatatatgaaacaaaaaaatggaatgaaattacttttaaacgtctttttcatattatttattgattttcttttgttttttctttaaaaaaaaagtttcaagagtttattaaactacaataaactaaagcatgtatattatgtaacgatcatattcatctggaccacataattaattttttattatcactgtgaatctcatagtgaagtgaagaatgagaaaatgatgaatatatgtgttgatgagcacattgaatataaattagaaccaaaacatataatttcattcaaacaaatgatttaaaatttagggagattattgtgaaccttatggtcaaagatcaaaattgattttgagataagtttcatgttatgttt

SEQ ID NO: 359845 - DNA, 604 bp, Cannabis indica
tggctgtcacggagcatgatgtaagtgccgtactgattagagaggaaacaacattcaacatccggtctattacatcagtgaaagactcattgaggttgaaggccgatatccattgatagagaaaactcacttactgcctgagtctagcaacaagaaagctaaggccctacttttaagctcacccagttcgggtatacactgacaaccgttacgccatatattgcaaaaacccgatgcctctagacggttactcaaatgggcagtggagttgggccaatattagattatcttccaaccccgaacaacaattaagggccaagccttagcagacttggtagtagaattcacgggcaaggaagaaagcgtatcagaaaacaaccccgagccagtaaaactacctcagccaagtaacagtgaacacaagccaacttggaaactacgtgtggacgggtcagctacaaatcaactattcggtgcaggaattgctcttttcacacctttgggcaacccctgcacgctgctgttatagtgagatttctctcacctagtgtgacagtcagtagtcccgtgatccgtaaggggaaataccgggtaagctgtgcaa

SEQ ID NO: 359846 - DNA, 1324 bp, Cannabis indica
aattttttttctcttgataaataaagttacatctaaattccttaagtgttaacatgattttcttcagtacttcatctagcattttgtgctaaatactatgacaatggcattgtataattcaacataccaccttcaatctcaaaaattagacacaaattgatgtattactgtgtatgaaatcattaacaagatttccaaatctggaaaccaaaatttcaccatacctttgcaacatcaagacattggcagtccatagctgcaactgctacttgctcatatagagtccattctgtgataagatacacaaagttaccaattagtcgaattgaagactgtggatggatttccagcttattaataatagtatgcaactctaaacttattttcattcttcaaacataagcaagaagtaggatctaagactccgttgaccaaagtcataataactacacaaaccacatactaattaacgtaagaagtcaatttcttgtgttgtatactaaaacgggataacctaaacccggcgaagatcccaagaacccgaaattggcaaggtaaacagataaacgactgttttaaattcaaaactaaaactaaaaacaaagaagtccctaaagataaattcaagcgtttcactatctagctcaattcacactcgtgcccaaatttgatccagtatcaacggccgaagaaaatccacaaaaaccatgactcagttaaattcacataaattcaaacacaccaaaatttctacagaactaaactgcttccaatccgtagtaattagtgtgcttatcaatccaaggaattgaaaatcaagctgcgaataataagaagaaaaaaaatcgacctatatttgatatcagataaaggaatactgaccttcggaaccaagactggatcgcttcctatggtcgttcaagatcgacaaaccatgctttaaaactttctcggaacgccgaaccttgagctttctgaccaaacagaggtactcccaagctcctccaccaccattatcgacctggttctcaagcctttccaactgggtttgctctgttttgctcaccatctttgccaattcacaaggtacgaagaagcaaagtgaaatctctctctttctctctttcgagtggccggtttgtggatctctattgaaaagagaagagaagaagaggggtagaagggccatttccttttttttttttaactttcggcccatttactcgtagtcgggaaatttacaaatcatactatatttttcctatttatttcaattatactgtgatacggccgtaatttcttttttactgtacatttttatact

SEQ ID NO: 359847 - DNA, 1290 bp, Cannabis indica
agggcattttttgccaaaatcctttcttggaaaggacgcctccattgattctggcagttgtatggtttcaaagatcattatgaatcgcctattcatattctgcacgatccccggccgttagatttctcaatctttggctttcttgtcactgaacttcgtgtataaaaggacggctcatgtttctcatttttcacaacccttctagctttttagtgaaatccattttcagaatggattacttccttcctgccaaaatatctcttctaagttcagaagtttattctcccagactcataatacccagatgcaccaaccaatttccattcgttcctacaaacttcaagcctcaaccggagccaaaaacgatggattccagggatgaggagcttccgaccaatccaaaccaggggaaccctttgacctaccatggccgatcctcacaagtgatcccaaagggtatagatcttgtgagcgatctcaaagatcctcctcagtctggtgaagaattccagaggaagattggcatggtttcaagtggatctgggaaggaagttggcgtggtttctatcagagaatccagccaactcaagaccctaacctgtgccaagagatctttgcgtcagcctcttttcagtgttgagaaatttcttgaggctgtcaaatagatctcgacttcaggaaatgggatcttctaatgatgaggggaaggaggtctgtcaaaaatcaaggctctctacgtgtagccggtctttctcaagctatgtgtagacattatttttctgagctgtatgcagatgctctttcttgagttagtaatctaccaaactttataacttttgagcagttgtcaatttgccttacaattgctgttataatctaccttaagcaaacttaaatatactttaaggatttatcactttgtatattttaatttgctcgcatgaatagttatattatctatccattttttaggtttaagtacttttatcaaggcgtcgtgatgcctcgtttagtactttcctagcttgcgagaaccgttagtattcagttttatacgcgagttataacttttgattttcatctcccgtcagataggttataaattaaaaattatagttgtttgattccttctttgtcaaaaaggtttgattaaggtgttataacgattcgacccctttctcgtcaaaaaagtttggtcaggtagttataacggttcgactccactttcgtcaaagaggtttagtcgagaacctttgaatttcaaaaaaaaattgaaatggcaggtttgca

SEQ ID NO: 359848 - DNA, 649 bp, Cannabis indica
gtcagtttgatggtcgatttcggtttatcggtttttatgaacacccctacctccttcttctaattggtgttccactgtgtatgattctattgttgttgtgttgttttcgagcattgccacattctcttgatagggtgttgttgtggttgtgatatttgggattgcagcaggtgttgtgttgttgttctgttggttgacacataatggatatgtggggaaatatgtttctttgatcttcaattgcaagtaaaagtagaggctggcatcgttgaatatttttatcggtggtattccttcttttgcttggtactgtatttgcagtgttgttctagtgctttcgcaccccaatgaagtaagtagtattcataatagctcttcatacttgcaatcttttggtataaattgtccactagcctcatacttgacataattatgttcttcttcccattgtccattgctcgttatcagaactggtatagattccatgacttgtcattgttcacaatatttcatttacgtgacctttttttttatattaaaacaacagtaaaataacactacaaaataatgcacacatgtcattttctggtgttcttatttattattgtggtgatccctataattagcaatgaatttgtgttaataacgc

SEQ ID NO: 359849 - DNA, 722 bp, Cannabis indica
ctatccagttcctcgaagagccaagcatcactggcatggatgaaatcgaaatgattgatatatccccaaactggatgacaccaatagcggcctacctcgagtttgggaaactcccagataaccgaaatgaagctcgaaaaatgagaaggaaagcttcacggtatatcatagtagagggagtcatgtacagaagaggattctcgatgccattgctcagatgtgtcactaaagaagaagctatcaagaagtgtgacaaatgcaagagattttcaaagataccaagagctccacccaacgagttaacacagatgcaaagtccgtggccctttgtcatttgggggattgacctgatcggacaattacctgaaggtaaaggtggagtgcagtatgcagtggtcactactacaaaaatgccttttagtgacactatttagtgacacacataaaaatgcacgtcactaaagagttagaagtaatttttagtgacacgcacaattagactctaaacattcagtgttagtctcttataatatgtgtcactaaacatatagagtgtcactaaatagtaaaactctgtttttttttattttattaatttaaaaaatgataacatatagtgacacgctaaaagtgaatggctaaatgtatcccaacacacatggtgtgtcactatatccaaaaaaaattttttaatgaatatacagctgtaattaataaaaaaa

SEQ ID NO: 359850 - DNA, 497 bp, Cannabis indica
ttcggggactgttgctaaaaaaattaagtaactatttaaaaccgtcgggaaaaatttagaatttctgacagtttaaaatcgcagtaaacaaaatcggcaatattttttaataaaatgcgatttttaatggacccttataggcgacggtacgtgaatacaagcaaacatttgtatggttgtcttatttttttacaatataaataacaacaataaaaaacatcataatttttattttagaaattataacccacatacaaaaatgagtgaaatttaggaacagaacaaaattattcatctacagtattatatataaatttcagatgtactcaaattagaaatgtaaaaagaaaataaaatttgtattagagataaactaaaaatttaggtgtgggacaaaaacataattaactactgttaatagtaggtagatccccatgtaaaaagaaaattaaagaaaaaacagttgttaatacaaataaaattgatgggacaaaaaa

SEQ ID NO: 359851 - DNA, 953 bp, Cannabis indica
cattgggcacaacaccaatgaatttaaaaatctcaaggtatgagattgaaaacctaatccgattggggcatctctatgaatggatcaagaatcggctgcctcaccttaatccgggtcaggcaacaggggctttgccatagggaacacaagggggtgcaacagcagtattggctccaattgctcccaccggcgatgcccaacatatccccggtctgccacccagacctaatgggagagtggccatgatttcaagaggaccccacattggacgaactacccggaaagaaatgaagcggtacgcgagagccgtgaagcacaatgaggtttgggaggttacttaactcccagctcaaagacccctgctgatggatcaacccatcacgttcacggaagaagatgccaagacggtgcgcgtcccccaccatgatctgttggtcatcgagacccccatcgccaataaagtagtggccagagtcttgattgaaaatgggagttccgtgaatctacttttcaaggacgccttcactacaatgggcctggcgaaccgagacctctcaccagtggttcctaactcatagggtttaacggaacgacgctcatcccaatggggaaagtgagacttcctatcaccttgtgcccggacaccccccagagcacattcaaatactgcactttcgtggtggtggactgcccgaccgcctacaatgcaatcctcggccgactagccctggtagatttcggcgcagtcacgtccatacgacatttgtgcttaaatttccctacccaggaagctggaatagaaacagtgagaggaaatcagggggaggcaaggcaatgttacaaagttacaacccacctgcccgtactgatggcccgggaaaccattaagccagaaatggctggagaagatgagttggatccccgagtggggtccgaaaaaattgtagaaccaa

SEQ ID NO: 359852 - DNA, 765 bp, Cannabis indica
ttagttttggattgttgttgctgctgtgattatgtgttgttttcagaagtttaagcatgcttgattgagtggaatgaatctaattttgatgcctacttggttgattttaagctagtttagaattttggctcaaaactataatttttggtaaattgaggaattggttgctgtgattgttaactgtgcttgggtttggtttctggggttataatatggttgtttatggtgaattaaagcaggtttgatgcatgtttattagatttaaccaagtttgagttttgaactcaaagcttggagctttaatggtagtttgtgtatttttgcatgaagctttgttttgttgctttagaaatgtttattagggtctaattagcaggtttggaaagtttggttgagtttggaaacgttttggttggggatttgatttttgtaggttttctgggtaaaaccggctaaccggttttacactaactgtaaaaccggttacccgaattttgcagtagggtgtgaaaaccggtttttctcaacttgtcgtttcgtgctagtttcaggttttcaggcaatttgttccctgctagtttggggtatttttgtattaagttgcagtaggttaagtttggttttaaaacctttgtcccggttgtgatttagtgagtcacttaagtgttgtgattgttatggtttaggagcctgtaaatcgccgtgcagttcgttccactcacgttgaccggcacacctgaattcggaattgaggtaagattagta

SEQ ID NO: 359853 - DNA, 602 bp, Cannabis indica
aaaacaatcaatttttaaatttaaacctcaaaaatcaaaatatcaaaattaataataatctattgaaaaaaatattattaatttaaaatatgatatttaagttcaaatatatagttaaaaataatattttattttaaatttagggtttgaaaattggaaaaatcagatttttggagaaaatcccatgaaaatcgaaattttgggttgccagcccattaggctgcacgtgaagcccgaggaggctgcacgagaggccttacacgcacagacaagagggtctgcagggtcggatgtgcggctcatctcggcgcctacaacatttttgtgggcggattgcatcgtttgggctggtgcagttgtctgaacgcacgtgtcttcagacagcatctgcgcgcatcacctcggcttgtccgagttcctggtgcgatcgatgcacccctctcgaaaaccatgacacccaatcttccaaaattcatatcttttccaatttttatcggaatcgagtttcgtaaaaatgaaaattgcttaattttttacaaggaatccaaataaaatattttcaaaaacagaaaaaaatagttttcatggaaaaaaattcgtac

SEQ ID NO: 359854 - DNA, 782 bp, Cannabis indica
aataaatggatcagaacatcaactgccaaacaaccaaaaccctaatttgaattatttcccccattgaaaaccaaattacatagacaaattacagaattgaaatacacttaattgaatgagtgaagtaataatagtggcagcggtatcagtttcgagttggtacctgaggctgaggaaaatgtgcaattggagacgaattatcgagctattctcttggcttttctcatctatcccggcaaggcaactgagtatttgttcgtgaaatagcgtaaattgaaggactgttatgtcttttcaccaacgcttagtgttagtgggctttttccttttttttttagaagaaaacttaaaaaaatattgaaatttaactttttacaaaaatattgtcacacataaatcttttcaaaaatactatatttttataaaataatagaggaacacaaaataaaacaactaaaaacaacagtaaaacaactaaaaaacaataatagaataataataaaaaattaacacagtacataggataaaacttacacagtatttttgaaaaagctacaatatttttgaaaaaaattccaccccacagtataaaagtaaaaaagttagaaatttaagtacgtggtgtaattattccttagaaaatgtgttagtgggcctaaggtgatatgacctagtttctcaagtctacaaaacttacggatccaaattccaaaaggggtaatttgaaaaatgtctcttttattaatcaattaacaaaatttacctctaattttatatttatt

SEQ ID NO: 359855 - DNA, 764 bp, Cannabis indica
atagcctaatcctcgttatttgaatttactctagaacaaggagaaagattccttttcttatagctcttacaacagtatctctgaataagaattcttagataatatatttagggtaaggtctcgactaaactgtttcccaccctttgcccagtgaacatgtatcactatttattgggctgtaaacttggacaggaagtatttcccttctcgttacaatggatataaacagaaaagatcgtgggattgacgcagtatacactgatcgtggtattgtgtgtatgccatatctctgtaatctgatccccgagttattggaattttcttgatgactcataatgcgaaagctggattcgctaagtgttgattcctctacgcggatcgctgatcggtttgcttcaagtatgccagcgaggcatcctgctcgggatatactctctgagctgatactcaaggttgatttcacgtgtcaccatcttgtgatgccacgtcagagtgcaaaaattgggataacatttgcccccaaatctgtacgggacttccgaagttgcgtgtagactttatccgagctgcttctgcctttggatggggacacgtgttgggtgcgtctgtttgagactcgatgtgaggaggactgggcgtcccttcggttttcggctaattaatgctctgacatataatatttcaaaatccgattttctctcaccacggttgacggctgcacttgattattttttatttcccatattcgcttttaggggggaacc

SEQ ID NO: 359856 - DNA, 1166 bp, Cannabis indica
agaattatctatatatatatttttttaattttttttcttcaaatttacagtttgagtaattgtggtagtttctctaataatttttatataggttgctatgtaaattttagttgcgatttaagttgctcggttagttaccgtagtaatttttgtgtaaaatttcgtaaaaatactaaaaaaaaaaactattttaaagtgtaaaaaaaaatctctttatttttgaattatatacgttataaggaattttatggatcaactcaaatattgggttataaatacaggccagacattttaacacggcacgagtttggaaggcatgaacacgactagatacaaaaaaatatgagtttaggcatgacacaatatgacacaaaaaatatgtgtttaagtataacacggcacggaaagcacaaaaaatacgacacgtaagcacaagtaggctaactcgaaaaatacaggatgcgacaagtttaaaaagcacaacaagacatattaaaaaactttaaaatttattaataataatacatatgtattttattaattataaataaattaaaataattaaaaaaaataaacataatattaaatattataattctataattaaaaatataaaattaaaattatatatattaaagatcgttggtaaagtgaagtgtccattaggaattgttgtagtcggttaaatttttgctacaaattattagttggctttagttgagtatataaaatatttttgtcttgcttaccttcaatcaatgaaaagagagcaccattacatttcattctctctaattttcattctctctaatctcttctttctctaaaactaatatggtatcaaagccacctgattaatgagctctttgctttcacttcttcttgttcatcttgtcttgctcgtactctgttcttccatggcacgaggatgagataatcaaactcccagcaatcgtaatcaaaatgttgaagactttaatcattttccagcacttgatgagaataaaagatttctaatgattaatccacgctgatgcgtattatttatcacaataaatttactaatttttatttttactattgtcaattactttaatataacggtaaatatagattgatctcacgagaactattatcaatttattattcaaaaattagtaataaga

SEQ ID NO: 359857 - DNA, 703 bp, Cannabis indica
tgaaatctcaactcaattcatatttcttattactattgacttttactttgatttaggctaagctttcttcaatcgatgaaataacgctgcgtgatttgttctgcattttcttcattcttgatggaaataatatgattttttcaaagaaagaaaaagattgatttgtccttttttgattaattttgaaagaaactgccgagtaaactcgagagttttgtcagtgtgagtagtcgactgttacagagattgtccacaactaccaatattaatgcatttaatttacacacacaagacttgtgcttcataaaaatgttaatttcggataatgcagttattatgatattaattaaaacaacgtacgtaagatttttttttgtataatttatgaaccaacactaatttaatatataaaaaagttaaaatatttgaatttccttttctttttgtcctaaattagtggtccaaattcttaaagatagattcatcaatttttgttgttatttttatgtattttaaaatgaaaataatttaacaacctaaatgatacgaattgaaaaggttgaactttgaagacctatttagacacaaaattttagaaaatgatgtcagttttgcaatttcaacactggatttgaagatgaattacgtactcagagtcagagactcaacttctggagctagcatcacatttatgaagttgaaa

SEQ ID NO: 359858 - DNA, 534 bp, Cannabis indica
aaggttttactcgtcctcgagtaaaacactaaataaacattaaacaattcaatatccaaaacatgagtaattttcaagtagcttcaataacatgattatgaaaattttcacttttgcatataatcttgaatttcagttcaattacacccttgacatacttcaatttattttcaattagcatgaaactatagaatacaattaactaacaattaaactactttttgcatgccaatggcaatcatcaatccactaaccataaaacttcttatgcttgcaatacttactattctccattaatatagattaatgcacaacaactaagaatcaaaaggtctttttaggcttgtagtgttaggcttaggtaagggtagttgaaatgatcatttaggctttcttataccgtaagtttttccaatcatgtctctccaaaatatttttcacacaattctaataccttattttttttttctaattacatgagagacttttttttttttttttcctaacaagattgcaataactatatatttatct

SEQ ID NO: 359859 - DNA, 510 bp, Cannabis indica
tttttaatttttttaatatcataattttaaaattaataatattcaatgtagtaataatcattgaaatttgaaagcataatagtgatttaaataaaaacaaaaattactattatactttgtaatagtaattaaaaaaaatattatttgtcctaaataaatcttcacaattaatgaaaattctcctcaggttaaactatcaaaacattcaaatttaatttaaaataatatttaaaatttaactaactctaaatatcaaactttgaaagtaatttttggatttactcggttagtaaaaaatgtttattaaggaatatataaaaaaaaaaaaaaaagagaatataatttttattaaaaaactcctaatgttaaatttgataaattttaaaataattataaaatataattaaatactttaattgattcaataaaacttcttataaaattttaggaaaaaggaaaaaaattacaaaatactatgggccggcccatcaaacatttatacaatccaca

SEQ ID NO: 359860 - DNA, 684 bp, Cannabis indica
tattaaaaaatatatattaaatatttgtaaaaactaaatttatgggaacaagtttgagtatatttttttctgaaaaaaactagatttgtttaagtaaatataacatttttttagtttaatttctaacttaattcaaaataatttatgtttttatagaactttcaattatttttctttattttttaagatatgattataaatataaataagcttgattttttcttcaaaaaatttaagtttgttttaaattatttattagctagattttcaataattttggtttgattttttaagatatgtgtttataaataaaataaagtatgaaatatcttttttttgaaataatttaagttttttaaataaactaaatatttgttatttgattaaatatttttattaagttgttttaataatttttatcaattataattttttattatttttaataaaaaagaaaattttactgtactgatgggataaaaatactaattttttaacagtaaaagaaacaaaacataataaaaagacataattatgtaacaatactaattattctatttttaataacatataaagccatctctaataagaaatgttaaatttgaccaatattttccacaaaaaaatatctctctaaactcttaaaatggagatattcctatcactatgatagaattttcctat

SEQ ID NO: 359861 - DNA, 574 bp, Cannabis indica
tggggtcctgagaaaaccctaactttggggtagtgcctatttcttatctattgttgatgattattctaggaaggtttgtgtttatctgttaaagcataaaaatgaggcttttcaaaaatttgtacattggaaattacttgttgaaaacctaactaaccggaaatttaaaaccctaaggacaaataatggcctagaattttgtaatgatgagtttacaggttactgtcaagacaatggaatccaaaggcacaggacagtgaggaaaacccctcagcaaaatggtgttgttgagagaatgaacagaaccatattgaacaaagcaaggtgcatgcttttcaatgtcgggctcgcaaatggattttggggagaagcagttgtaactcctacatacctaatcaatagaagtccctctagtgcaattgaaggtaaaacccctgaagaaaggtggactggtaaaccacctgacttgtctaatttgaaagtttacgggatgtgcagcttatgcacatcaaagtgtaggcaagttagagcctaggactctaaaatgtgtgtttctgggttactccgagggtgt

SEQ ID NO: 359862 - DNA, 887 bp, Cannabis indica
ttcacttgttattgaaataccgagctactttttgttgatgggctatcaactttaagtttgatgtggttcgcttctcttcgatttcattaagtgattcggccaggagtacgtgattgatatcatggttgtacgtcaatctcatgtggatgttggctcgacttctacagtcaaagccatggcaaatggagtttgtccagttgctgttttctcagttgttcgatatgaccataaaacttcaggaagttcttccggccaatttcctttggcatcttcgagtatattctttagtgtatccttcaaggtcttgttgagtacttcaacttgaccattcgcttgaggatgtgccactgcagagaaacttttgattataccatggttcgcacaaaaatcagtgaaggattggctgtaaaactgcgtgacattatccgaaactatttggtacggcaatccgaaccggcagattatgttcttcacaataaagtcttgaactttccttgatgtaattgttgtaagtggttcggcttccgtccacctagtgaaataatcaacagctaccactgcatactgcactcctccttttcctttgggtaattttccgatcaggtcaattccccaaatggcgaagggccacggactttgcatttgagttaacttgttgggcggagcctgaggtatcttcaaaaatctctagcatttgtcacatttcttaacataggcctttgaatcttcaatcattgttggccagaaccttgccttagaattttcttagataaactctactcgacagcatgatttccacagaatccgtcgtgcacctcagataggagtcgtgcggcttcttcttgagtaacacatctgagcaacggcatagagaatcctcttatgta

SEQ ID NO: 359863 - DNA, 614 bp, Cannabis indica
attgggcgggttgcacttagattgttgtaacccgatctttacattgggttgaataaaatatagcataaactgaccaaactgaccgatgtacaccctaatgccaactacgaagtaaaaattagtaagggtttgctagttgaaataaaattagctttaataaaaattttaagagcaaatgtcgacatatttttgtctggtcacatgaagatatggtcaggatcgatctaactgtaatgtctcatgccctgaacattgatccaaactttcatcccatccagcaaaaaagaagattaattgataaagaatgcacgcaagcattaaaggaagaggtagaaaggcttcagattaacaaattcataattgaagctttatacctgacctgggtagctaaccccatactagttcccaagcagaacaaaaaatggtgagtatgcattgatttcacaaatggtgagtatgcattgatttcaccatcctctacaaggtgtgcccaaaagattgctttccacttccaagaatcgaccagcttgtggatgctacagccggccataaaatcctaagctttatagacgcctactcagggtataatcagataatatgcatccgcctaacca

SEQ ID NO: 359864 - DNA, 433 bp, Cannabis indica
aaaatctattttaggtaccatgacgtattatggggttattgaaaaaatatgggagctcaattattttgcgttctgaattctactttttaaatgttcttgggttaacaacaatgttggagtaaaaactgacgagcttggttttactttggttgatttaagtaagagaggaagcaagaatgataaactcatcatggctagccaagcaatacaagttttttacatttctgatctggctaatgataaatggtgtgttattttatcgacactagagaggacgttcttagagaatgaagaggatgaagagaatgttgatttatgttatgatgatttcattgttgggcaaccaattcatgaacaagttgtgcaaattgactgtaaccttgaggaaggcaatgttgaatacattagaaacgatatcaatgagggaatatgg

SEQ ID NO: 359865 - DNA, 560 bp, Cannabis indica
gatatgaaccctaaaaaccaacatcctccttgtccttctcctcgttcttcacccttgtacttttttatcttgaattttctctctgtacttgattttattttctatataagtgtctaacaatggtagccacccttaatgatagatactttcttcttttaaataaagcaagggtacaaaaagagttttaccaaaattcaatttctccacacccactaatttggaccaatagacttcagctgacatcacttaaagttccatgccatctaggcactaagtaaatgaggaaagtccagctgtcttgaactttatattgggaatattttaccaggatctaaatttactaacaagtatgttgattaacatcctaaatattaatatctctaaaataatgaaattaaacacttaagagtttagaaaaaccttacattggttgcagcggaatataatgactccttccgctcagatctctacctcttgtttctttctgtcgcaaagtattatcaaaattagaggccgaatctcttggattggttaccaccgtcttactcactatgattgag

SEQ ID NO: 359866 - DNA, 715 bp, Cannabis indica
aattaaaaatatactaaatttaatctaaaattaatactcaaaatacctaacattagaatggatcgagagacatacacaaaatgaatttttgcactcacgaaggccactacgaattcttagtcatgccatttgatctgacaaatgcaccgtcaactttccaagcagccatgagtcaagcctttaggctacttttaaggggatgtgttattgtatttttttgatgatattcctgtgtatagctccaatgaggatgcacatgtggaacacttgaggcaagtactacagttgctacgacaacacaaattctttgcaaaggcaagtaagtgcagttttttcagcacacgattgagtatttgggacatttggtatcttctcatggggttcaagctgatccttcgaagattacagccatggctcaatggccgcaaccacaatctatgaaacaactacgtggtttccttagtttaacaggatattaccactgttttgtgcaacattacgctaccattgctgtccctttgacggagcttttaaaaaaggataattttcaatggtcacttgctacagccacgacctttgaaaaactcaaaaaggctatgaccgagactcctgctctcaaacttcctgactttactaaataatttgttgtagagacactactaaaaaaatgatttttctcgatatttttaaatagttatttaaagtattcccgtca

SEQ ID NO: 359867 - DNA, 513 bp, Cannabis indica
atcgctaaggcaaccatgcttctgtgtttgaaaggttgggagcaacccatgatctaagaaatgatctgaacataagtaggggagtagactaatagaatattacgacgatcatgcagcctggaggccgtactcaaattcctgctcagatcgatgctgacgtaattcaaattgaccaaaatgccgagcaagttagcccaaccgtacaggctcagcttaacgaactaaaaaatatgttccacgacatagctagacaaagaaacaatgatcttgagctggactgagcacgcgaaactcctttctcaccagagatcaatctcctgccactaccccacaagttcaaaatgtcaacgtggaagatgtatactgggagagaagatcctctttcccatgtcaagtatttcaaaatgcaaatggatttgcaaggggtacggggagatgtatgctgcagaatcttccctaccactctgtcagaagccgctcagcaatggtatttcaagttggctcctggaaagt

SEQ ID NO: 359868 - DNA, 1148 bp, Cannabis indica
agtgttctgtataattgagactgctattcaatttcaaatctatagtggtgcaaggaggaattaataagttaggaaatttatttggtaaattctagatctacttattggaagcttggttatataggcccatggtcccctcactagttgagataatactgcttgcagacccagttaattgattttaattaatcaattatcattctaaaattagactatgtcttatttatgaattttcactaagcaagggcttaattgtgaagaaaagaggttttggggtctatttattaattgagagagtttgtatggtcaaatgaataaataaatattttatttgacaattaattataattattaaatgaatagttttggcatttataggattaaaattagaaatatggtataattgaaagaagaataactggttgaaataaagtggcaaaattgtaactagagattggtccttttagtggtcggcactctagtgatttttgcctatatttttttctttttaaatccatataattcaaacctaagccctagttgaaatactgaaaaaggaacatgatgttgtcatctcatccaacctatctaaacctagttttctaactctgtcagataactagtagatgagagactcctttcatagtgatttcgaatccttattattgttcttcatatatctttaagcctttagtgatagagtaccatgcccactcatagaaattcaagtactcaatcatagtgaggaaaacagtggttaaccaaactgaaggagagaagatctaggttcagatcttgataatgctctgctacataaatgaatcaaggtactgctacagaaggacaaacgatttaggttcagatcatagagtcatgttatttgtgataaaattgaaaaatcaattttggatcttaaaatatggcccacatgtgtagactcattctacacgtgtagggtgatgtataaaggtatgtgattaatttagtttaattattttattggttaaaataatttaaattaaattaaattaatgatcttttaattattgctacattcccgcccacaacaatcgtgccaaaaaccatgaaagggggatgtgggccttgttgggtgcccatggtcagcaaggagcgttgatgcccttgca

SEQ ID NO: 359869 - DNA, 682 bp, Cannabis indica
agttcttttgtgatggactactgaaaaacaagacgcaccttcttgatataggtagtaccaatcaatctatttaagccatcttcaactatatatatagtcccatacctacacagtatcagaattatcacacatgacctttcccaggcgatgtaggattgtataactcccggtctttctccttcgaatcacgggactttgaccgtaatagatgtttgattttcttttttttttaggtcaaaacagtaatggtgctctggttatttgttctcatttcaacttacatagatccatcacctcaaattaatctacgaaaagaaaagaaaacttctctggtaaatgtcattgtgcaggtggacgtcgaatctctaggttttttttttttttgaaaaatagtactaagatagggtgttttgggttttatttgcttaattagatttaagtgttcccttgtaaaaaaatatttaagttttcgttggagatttgttcatgggtgtatagaagacgggggctttattttgttttctggtggtcttcgaccttgacagacggcgactgtggctggtaatgggggtggggtaagagtcgtggctgggatggggtggggtgagggttgtggcggggtgaggggttgtggcttgggatgtgtgaataagacgaagaagaaaaaaagaaagaagaaaga

SEQ ID NO: 359870 - DNA, 773 bp, Cannabis indica
aatttctcaaaattttataggttatcttaaatagctataacgtacatgaatatgaaaaaaaaattagactaaaaaattcttctagatgccgaaacaagtcaagggtgcatcagtatattccttttaagggagtgtattgtagaatcaccctaaattgtcattgttacaacatgtaattattttttatttataaacttttgaatgacatatttgccttttttatttttaattaaaaaatatattatttttttaaaatgaaatatttaaaatttaacattctaaagagagttataagatcaaaatcaataccatacaattgattctcatttaaatatgtcatttaaagagtaacatgttactttatactatatttttttcatatttttaaatgttctcattaatttttttttttaaaaaaaagccacattgttacaaatttgtaccttaaaacccataaaataaaaattgcactcagtaattgcccaaggttcagaattggagggctcttctacctgctaagctgggtccatttgaacttaaaatcattaataatatatattttataattatatatttaatactttcaacacaagtgagattttctaattaattaaatagaactttaatatatatatttatatatatatacaaatttatattatccatataaattataatactctgctacagaaaggaatcaagggctagatatctgaacggaaggagtcatatatccgctgcacccaatgtaaaggttttcctaaaactttata

SEQ ID NO: 359871 - DNA, 758 bp, Cannabis indica
aatgcgagtactattgataatataattttaaactttcgccattccaagctcgtggaatcgcagtaccatcgagtgctgcgagtcggtatgtggcgtcacctattttttccgcgatgagatatggtccttcccaattatctccaaagaccccatgcgttgggttcttggtatttggcattactcttctaaggaccaagtctcctgctcgcaggacttttacttttaccttagagttaaagtatcttgcagttcgctgctggtaagccgcattttttaagtgcgcttgatcgcgtttttcttccagaagatcaaggtagagtaactgcttctcttcgttctgcgagatgttgaaaacatctctgcgtagggaacctgccccaatttcaactggcaccatggcctcgcacccgtaagaaagcgagaagggtgtttcgccagttgtggatcgaggagttgtattataagaccacaggacttgcggtaactcgtctggccaagtccctttgcgttcttctagtctccctttaatggtgtgttttattattttgttaacagcttcagtctgtccgttgctttgcgggtaagcaactgcggagaacgcctttttgattcctagatcgtcacatagttgtcgcatctctttacaatcgaactgttttccattgtctgaaatgagtttgtatggaataccaaatcgacaaattatggagttatagacaaactcgcgcaatttagttgctgtgatggttgcgagtgct

SEQ ID NO: 359872 - DNA, 932 bp, Cannabis indica
aacctggttatgccttgaacacataaccctaaatctcaatatattcatatattcaacatggcatagcatttaaacaacatatatcactagggtaataaccctaagctattatactgctcatgttggggtaataaccctaatcccaattactaattactcacatatatcatttctaatataaacgccaccgtgcataactctacgtgataactactgtcttacctggtgtcttgtaataatagagattttaaatccccaggtgctcctgaccaagtgccggtaatcctagtcacaattctaggatttacacaaatagggttaacccctaattccacatttataaaatatatacatggcattctaaatatagataatcacatagagctcaaaacgagctttccaacggtatatagaactcccaaaacggagtttgaatcacaaagttatgcattttcaaagttcgcacatgaatctgcctagaaacacgaaggcgggccgcggcatgcaaaagccatgccgcggcacctgggacgaactcccagattccattcaaaggggcgggccgcggcatgctaaaagtcatgccgcggcacctgggttccaaacccagaaaccagcaagctgaatcacgaatttcaacagcaaaacacatccaaatcataccaaatccacatacaactcaaagttattctccatgaattagcaagctcaaagataaggcattaaaatacatataatcatgcatcaaaaccaactatataccctgaaaattcagattaaatatcacacaataacaagcttctcccaagagcaaacaccatcaaaactcaagcttaataacatgagcttcaaacctattcaaccttatttctttccaaccacaatgcaccaaatagaaaatgaattcaactatgagaaaatccctaaaaatt

SEQ ID NO: 359873 - DNA, 974 bp, Cannabis indica
ataaataaaaataatatcataccataaaatttttacacaaatttggacacatatatatggaaataccattgatagttactgaataaatttaattataaaatattaattttaaaaatattaaatcattagattttgatcaaatgataaacaataaaaacaaaattttaaatttttatgcttaatttaactatttaattaagaaaatataaaaaaaaaaatatatctttttactttatatcaaaaatatatttatatacaaactatttaagttaacattctggttatcaattactttatattatttgttgaagacaatatttttcaacctttttttttagtttttcctacaatatatatatataaatatatattaaaaaatacatatttttgtgcaaacagatttttatgaaatgctagaatttatgcctttaaaagtttgtaaagacattttcattttaaatataagttatacaatttaaattctatttgattgttgttttgttgttgttaatatgtaatttatatattatttttatgtcgtttaaatattatttttgttttttttttttgaaaaaaagcgtatttcattaatagaatattagaccttatggtcattacataatatgtttaaagaaatggtagatagcggaatatcacctaataacttgcgggtaaacgcccacttagtcacattatggacaacaaaattacaagtcctgctattatgagaaaaaatacaactcgaaaagaaagaagagtgactattacaaaaaaagacatagtttccaataacccaatgagactccttcccattgagagcattgatgacctaccctcgagtcgctctctacgatgacaaacttggcatcaaaatccaaagcaacagaaatagccaagcagcatgtcaccgcttccccacaaagagcatcagaaaagtcaagacaagccgtatgaactcgaaccacctcgcctaa

SEQ ID NO: 359874 - DNA, 507 bp, Cannabis indica
aaaaaaaagcgattagaatctaaataaataaaagataacaaaaaacaacataactaaattgaaaaaaaaaatactaaatattatactcaccgagtcatgaaggcacctcccaagggtcaaaagatcataaaaccaccacttgtcctgtcctgaacactatcaatgcagacatctaaagaaggactaaaaagattcttcccttaaacaaacttcttcttcctaaaaaaagcaaccaaccaatatacttaatatcaaatatggaaaaattttaaaacaacccaaataacataataaaaacaagaaaacatacttattctaatccttaaacccatcacggaaccactcatcaaatgccttttgttgaagttcatgcggatgatcaaacaacccagaagtaaacggatatagacctttaacattatttttcttcttcttttcattactaccagaagacccaaaatcatttccgtaaggactctgtaaagccacactaggcttatgagccct

SEQ ID NO: 359875 - DNA, 527 bp, Cannabis indica
tattctcgccataattttattggcaatgggaatctctataaccagagggtcatggtgagggaaacacaccagtttggtgtcttcttctgtgaaggtattgggtaggtccatgagccggggcctttgcgctttgagttgggtgacttcccacacttcatcgtgtttcatggccccaacataacgctttagctcgtttctagtggttcctccgatatggggcccaccagagatcatggccactctcccatttggtcttggtggaaatctagggactttttgagggagtgctcctccgggggtacacagggtgctagttctctgggtataccccctagagctccttgaagtaacgggcctcctactggatctgggttgagatggggtagtcgattcttaatccactcctataaatggcctactcggattaggttctcaatttcgtctttcaagttcttgcattcattggtactgtggtcaatatcgttgtgatactcacgcctcttgctgggatccctttgggaactatc

SEQ ID NO: 359876 - DNA, 536 bp, Cannabis indica
cctcaaaacaataaatgaatctgacttctataatagaaataacaattaagactctttatgatacaacttatttgtattttaaaggacgtaattaaatactgatttacgtgaatcaataaaactagtgaagtcataacttaagtggttaaatttttaaagaatcggttcatctcaataaagtatgtatgaatataatctttagtatcttaaagataccctacctctttgtataaaaaataaagttgtgttaactttagttattttgatactacttaatgatcttgaaacaaacgcaatgcaaagtcttattcagactcttaggcatacattagtcttctaaaaattgaagcaaatgaacattcttaatttattctcattccagatcaatttacagatattgttggtttgagttgaatttatcaaacataaggataaaagtaacatgagatgaataatacataattttatttaatcaaaaatgttgtgactactctctaattaattaaaattaatatatgttatttatattctttatc

SEQ ID NO: 359877 - DNA, 578 bp, Cannabis indica
ttttatatgtttaagtgtgaaatctaagtttatagtgtgatatttttaaatttgttatatacttatattttttaaattaattaatatttatattgattataaatgtagaaaaaaagaaaaaaaaattgagtaaaataaaattattttagagtgtaatactggaaaagatatatatttatttatatatgtatatttatatactagatgaatgttacgtgccgagccacgtattgttagttttatttaaggtgttagttttttttagttatctataagtaaagtggtatgattttttaaacaatttattttataaaggtaaattgtggattaatgtatttaataagtaaaacataattgtgtctataaacgtatgatatgtacattgttattagtaaaaaaattacattaatttcaatatatcccaatatcattgtctcaccaagcataaacaaatagaatatcccaaagtttgcctttatgagcttccttctcataaaaggcaagtgctcaatctgttcgagccacatctaatcctacaatggcaaattccaaagaccaagttagaatatcaatcaata

SEQ ID NO: 359878 - DNA, 641 bp, Cannabis indica
ccacgatcgcctcagctgcctcagttttttcaacaacaacaacaaaattctcccaacatgtctgctggctcttcacaatcgcctcagttgcattacatgttcgggcttccctcacagtctcctcctatattttttttcggatgccgctggaggatctcagacacaacctatggttggcaatattggaggcttatcccaaaaacaattcctatatacggtcaatttgggtcattgttgcagcagcaacctgtgtatggtcaaatgggaggatctccacaacagcctatgtacggtcagtttttcaatgcgcagagtcagcaacaacagcaacaacctattttggttcgcccgcaggctcgaaaatttgcagagatcttacctacaccacagactggacaaccttattaccctaccctgccggctcaatcccgtgataatcttgatggttcaagacttagctcgaatgcaaataaatttttagagtatactgatttgaacaatgtgttgggttttatgccccaaataaaactccattttaatgtaatccattttattcaatatcaataaagaaacagaagtatttttcattaatttgtatattttggttcatcttatcagttgtttgtctatttgatttataa

SEQ ID NO: 359879 - DNA, 747 bp, Cannabis indica
ttagtaagatcccgccaccagaaccttcgctatttgaggctctgtcgacttacaacgtccatgtttctccattgatcatagcggtgtcgactttgtcgtctatgagtgccacttcggtgcttgggaattcgagaataaaatctgccaaggcttgccccttgatcgaagttcttggtttatacttgatgtcgaattgacttaactccattgcagatttcaacaacctcctcgacgtctctggttttgctaagacttgcctcaaagggtagtttgttaagacatcgataatgtgagcctggaaataaggtcacaattttctcgacgatattaccagggcgaacgccaattttttcatttgaggatagcgtgtctcagcacccagtaatcgtttactcacataatacaccggtattgtcgtccttgatcttcgcatattagtaccgaactaatcgcatattctgaccctgttaagtagataaataggacttcgccggtcatgggctttgataagattaggggtcccaaatgcgtttttaaggcttgaaaagcctcctcgcattttccggtccattggaacttcttatttccttttaaaatctgaaaaaactctttgcacttatcagaagatcgcgatataaagcgatttagagcggcaactttacctatgaggctttggacttcttttggcttagttggtgatggcatctccaccaacgccctaatattcgcggggtttgcttctattcc

SEQ ID NO: 359880 - DNA, 619 bp, Cannabis indica
gtttcttacgcccccaaaccgacctccctctctctctctttattcatcttttcaatttgtgagtttgttgagaaaaagcttgggttcaagcttgatttgtggccatctttggagcttgtgtgatttcgagatcttgaggttagtttctatctctttttgtttttaattgttgctaaagttgaagttaatttaagcatgattttgttgtagagatccttgtgatgcatgtgagttggaattagtttaatcttaatgctctatgcttgtttgtgttagaagattggagtagaatgctttgtgttgtgtttttgagataattttgaggttaggttggtgctttaatctttttatgcagctctgattttgttgttgtacgagatcagagaatgttggttaagtatttaagctcttaaagttgggattttggtaaatcttgctctagtttggagcctaagttgtatattgtttgaatctgaatttagatgcatttgagctgtgatttttgagctttaatatgtgtttttgccctctattatgttgggtattattgtggaatttaatatggggtttgagtatgtttttggcttagtttgggtgtgtttgagcatgtaattcgaag

SEQ ID NO: 359881 - DNA, 944 bp, Cannabis indica
ttttacaatattttatttatgtggcatttttttcatattaaaacaacagtaaaataacactacaaaacagtaatttgttgttgatttagtatttttttctctttgccagattttatggttttttcctggtgtttctatgattctagtgttgatttatccgtccccaaccacaaaggagaggtgctgttttgtgtttgttactgtttacagtataaaagtaaatatattgggatggacagtataaaagaaataaaaatgggcttggacagtaaaaatgtaaaatttgccgtgtcacagtatttttgaaaacatttggcaaaaaaacagtatttttgtaagtttcccatttgttattagtgtaatttattttagattccacatatttgaattgaatataaagataattttataaatacataaaaatagcaaaaaaatcacaaaaatacagctatatagaattttaaatatttttactgtttttaagattttatttatagaaaatacaatcttctgatatatttttatgttgtactcttgttattttattgttcattttttttatttgtatattaatgttgttttcctgttactttcatgtactttttttttaatattttaatagaatactgaaaaaaattaaaaaaaaataaaagtgtaaatatttgaccaaaaataatattttacataatttttatttaaataaataatataaaaaactgctaactgcttataatataccacatttgatatggtatcagacatgcatatatatatatatatgttatattatattatatatatgttatagggaaatttgattttatatacttaaaaaatcaaaaaattttattattaaaccaaaaacctaaaccctaaaaaattatgtcttttttttcaaaaccccaaaataccccctcacaattctctctctctgcatcatctct

SEQ ID NO: 359882 - DNA, 712 bp, Cannabis indica
ctttcttggttttgggaaggtataaaaaccttagatggaggacgaggtggtcctatggggttcgatttaggcaacgacgaaggctaggcaagggacacaggagactttaaactcgaagaggaacgagtgactctctttgaaatagactgagtgtgtgacgatgaagaagaagccattttagaaaggggagagctcttaccttgaaatgtgtgaggcttttgagtgagtggagacaatggaggagacgaagacaacaatggacttggaaagcaagtagaatcatcaaactccaactggtaagggataatggcacgacatggattggccatactagtcacgactgcaggtttgactgcaggttcgacaggaggtattgatggtggaatgagaatgcctttaggggacaccaccatgggagaaatattctccattatagatagagagatttgaggactacaatgattagggtttcttgagagtaaagtgaaagagcctattcacttttcttaggccgtaagtagagtatacctttgacaaagtttgaccatgaaaaggaaaaaaatgatatttatttaaaaaaaatttaacattgcaaaatcaaatatacacgaccaaatagactaattttcaccacacgttttggcagaaaaactgaaataaaacatagacatttggtattgtgagcataatgaactaacaactacaaatatgc

SEQ ID NO: 359883 - DNA, 761 bp, Cannabis indica
ctttaaaatattcttcagtcaaaattttcttatacattcaataccaaaaacatgaaaaatttaaacaaactaccctaaaataattagaggcccaaccatataataggtgctaaaagccttgtaaaggcgcccaaaagccataaataaatggcacaaaaaaaaaaaaaaatcaatataaaacaaacctataacaaaattaacagtatatcccattatatcaactcacccaaaaaagaacaaaatcaataacaaacaacaagatgaaatcaactatccaccatttcagccttcaacccaacacgacactgaccgagatctcccaggctcaaaactaaatttaaaaaatttaactcaaaaacttcatcacactgtgcaaacattcaagaaaaaattctaaaatctataggcctttcactaactcaaaatgaaactagcataaattcccaaacaaaccaactacaaacaatcttaatgaatctaaaactaaaggactagtgttatctagatacacatactatatgcatatacaatctgttgcacaaatatgaaaaataaaataaaataaactagaggaatagtgttactatgttttagaaatccgtttcctgcggagaaattggggtctcaaccaggaaaatttaagggattaaagattttgggtttgaaaagatatttcttaaattttaactcatatgaatatctaaaaggaatggaagatttaattcaaaaatatataaaaaaaaaaaaaaaaaaaactaaca

SEQ ID NO: 359884 - DNA, 514 bp, Cannabis indica
caaatttaatacatgaagttaaagaacgaaatcgttacaattgttaatagaaattatactttaaataattgcaatttctttatcttttttcaataaaataataatagtaatatttttaaaatttaaatgatgtagcattctcttcttctaataatttattttttctaattttttatttttttttttcgtaattatttatatttaacatttagtaatctataacaaaaagaaaataaaaagaagattaatattaatattatcttttacaagatattctttttttcttttaatttggtaaggagtaattatgagatttttaattactaattacattagtaatttaattagactatattattaagaaagaaaagtatatatataattatgatttataagaaccataatatatagtacaatgtataacatatgtataaatagatacaatcattaataattataagtaccaaatttaatacatgaagtaagttactcaaatttaatacatgaagttaaa

SEQ ID NO: 359885 - DNA, 920 bp, Cannabis indica
agaagaggggaagcactagcaaccaggttactatgttagtaagaggttactgcgggcacaatcgagatatccacctctcgaaaaagttgccctatgcctaattcatgcatctcacaaattaaggccttgcttctaggcacatccaataaaaggtgttaacagatcaacccctgagacaagttttgtcaaaaccaaatgcttctagaagattgataaaatggtctattgaacgggggtagttctgcataacttatcacccaagaacatccatcaagggccaagctttggcagacttcctcatagaagggataattccaaatgaaaatccacttgttcaacgagacacagacacttggaagttgtacgtggatggagcatccaataaacatggctcaggtgtaggggtgatactaatctcactagaaggctttaagtttcaccatgccttaagattttaatttgacacttcaaacaacaaggatgagtatgaagccttgatagttggttcgaaaatagctgaagtgttaagagtcaagaatctggtgtgttatagtgactcgcagttaaaattgaataaagttccaggcgaatactagcctaagggcttaaaatgacaaaatatttagagaaagttcggaagaacttggaaaaatttgaatatttgaaaatcgaacaaatttcaagagaacaaaactcttacgtcgataccttggcaaaacttgcctcgtagaacgaacttgatgaattgaattttgtaccagtggaggtgtgaaacgagccaggtatacgtgaaaaggaagaagtcgagatgattgatagctcgcctacttggatgacacccatagttgactatcttctcaatgggaaacttctagctgacaaaaacgaggcacaaaactcttgtattcagtgcctcgcta

SEQ ID NO: 359886 - DNA, 682 bp, Cannabis indica
aaaatgagaaaatggcaaaattacaaagtggggcccattatccattccatggccagccgctttgtatggattttaccatttattttttcattattttaatggtaaataaatctaacctaaccctaggtggtttcctataaaatttgagcctcctccctaaccctagccgaaaccatactccctctctcttcctctcttctaaactgagcatatagcagaagagtgagtgcccacacacatcaagtagtactcaatcatagtgtgtaaggctgtgaagaattcagtttcaagagaaggagattcggactcagatcttgttgatactctcctacagaaaggatacaagggttagagatttgagtggaaggagacattatattataattctaacacgacatcctttacaatttgctcctttattacatgttgctcagcctcctcaacaattaaggctagttcgaccactttcctatataaagtgtcgtgagcagtggtaatcatgaagtcccaactgattgtggcattcaatcctcatcgcgatgttataaatttttcctcaagcagactcttgaactcttccaagttatcacacttatatctcgagtttgttccactagatcccaccagacgcgggcatgatcttccagaaagttggaggttgcagcttcacaaaccgttcaaa

SEQ ID NO: 359887 - DNA, 596 bp, Cannabis indica
taaagccacacattcccaataaacatatcataggtaatgcatggtctaatccctagcttctgtaggggttttatgggtgtagtcctttatccttttttactgatgtgagtcctcataaagtagccgtcactaggctcattaatcatagcatagtagctacagagagggggttgtgctgtcagactttaagacgtatgacagttccaatacgcctcttcccatgtggcattaaatgcgaggtgactgctcagataggatctgacacctcccggagatgctttgttgtagccttgctctccgggagcatgtgagacttacatgccttctccgggaggcacgtctaaggtcaatcctgcgcttaaggagacttagctgatttattcaaacgctaaacccttcccatctacgtgtcatcctccggttggtccacgtattttgggcaaaagcaggggcaacatttaccccccaagccttgtttagtaatgaagtgaacaaggcttgcttagatgcttccggttgccttatcagcttcctggcacgtgctttgggcgcgtggtggtgtattaatgccatcattactgcagttatttgctttt

SEQ ID NO: 359888 - DNA, 535 bp, Cannabis indica
taatcacaaccattcaacaataatctaatggttaaaaataaatgtaattatgctggttacatatttgatgtaaacatttaaacctcccccatatatatttatgtatattttttcaataaatatccaccttttaaaactcaagctttcaaaagatgaaaattaagattacccacaaagtttttatggcttattattttttattaattttttatatgaatattgtgagcataaaattaaaaatgccgcacgtgaagcgtgagctaatttctagcattataaaatagcactcacttttaattttactccccatacaacgataattaactatgcactttatatacaataagagaatgataagtaatgaatttaaatttaagttataatatttttttttctaaaaaatacttttattatatagtcaaatctaatataacatagaattaacatatatatatatatatgggtatgtctctgaatgggtattacccataaatagattattttattattagcctattagatttaaatctaatga

SEQ ID NO: 359889 - DNA, 997 bp, Cannabis indica
aaactcgaagaggccgactgattcagcaaattcacagacgctggatcctacatcgcagaacccaggaaacacaagtgtttcgccagctgttaatcctggacagtcgacgaatgtggggaatggtgtgacagttcctatagatgaaatcgcgcctggtgtgcaagagactgggaataacagttctacacccaaccagggtattcataacacaactgtttcgccttgaaccaatgcccagatgaccatcggagatgccattgcattacaaaatctccgtgatgctctcggactcatgcagggtcataacaatactctacatcatgattaggacgaactacgcactgcagtaaatctcgtgttcgacgaacaaaggcatatgttcgccgaatggagagatagagagatggaggcattacgggctcaccatgcagagattaaaaatagtagtcggcagcctaccgtactgatacgaaaagcctaccaaactgtaggccagcaaccgccgaacatcattccccttggtgaaacaggcgaagatctagcgatgaatgcttctcataccgtaaatgtttagccgcccaatccccggtcacgagttccactcgtgggccaagcaataggcgggcagaccttgtctagtaattcatcgggagaagtcaaacctgatggttccaaccagataaatggtgtcattccacctgtcaaccaagcgaatcaatcgttgaggcaaccagacacctatgtactcgaaaggctgggtgcaacccaagacttaagaaatgatctgaacagaaggaggggagtagacgatcagaattatacgacaatctcgcatcccagaacccgtactcaaattcccgctcataaagatgctgatgtaattcgaccagaatgtcgagcaggtcagcccagccgtacaggctcagctagacgaactaaaaaatatgtttcacggcatggctggacaaggaaacaatgatcttgagctagaccgagc

SEQ ID NO: 359890 - DNA, 593 bp, Cannabis indica
ataacaattgaatgtaaaaaaaataaaattaagaataagtggtcggttcggacaagttaacccgaccaaaccgactaatttcattgggcaggttactattttcttttttcttaattggatggattgtacttaaatttttatgacctgatttttacattgggttgaataaaatgtagcataaaccaactaaaccgactgacatacacccctatttcttataagaatactattatgagagatttgggaaaaactttgtaaagacttctccgattataaagtttagtcaagcccgttacatgactcgatagttgaactcaaagctaggtctataactttgaagactaagaacgtaggtagcttagttctatcgaaccttataaaaatcgagagtttgcaatttttatccctatactttttatatttcaagtttgctatttgtttatatttatatttatttatgtgattgtatttagtaggggtgtacatcggtcgttttggtcgggttataatatatttttattaacccaatataaatattgggttacaaatatttaatcgtaacttgcccaattaaaaattagaaaaaagttcaa

SEQ ID NO: 359891 - DNA, 769 bp, Cannabis indica
ataaaccgaccgaaaaaatcaaagccgaccgttatacatataattaatttataaagttttttttctttatgtattgtagttagtaataatatataataatatattattattttattaatattaaagttaaaagaataagataattagtttttgaataattaatctatatggttatagttgtagaatgtagaataatgtgcttatagaataaattggatcatattttatagaaaaaaaagttcagtttgggcagtttaaaccgaccaaactgatgttcaaaacggtcgattttaagacaggttctggattggtcggtcgattttcagattgcatcaatccagatcgaaaaccaaattttaaatttttataaagaaaaaaactgactaaatcgaccgatgattgatgaagcaacataatagggtattggtgatgaatgggatcaagctttgctaaactaattaatttcagcattattttttaatgccttgagacaaatatgtgctttactttgtcaaagggacgtttgttagataatagtcctcttcgagacaggacaaatctcctaaaattgactcttcgagtcagtgccaaaccccatttgaaccaaagctctatttactcattccatatctcacaatagccttacaattacatatttatagtgattcacactctttaacaattactaataagcccctacactatttcataatgtaacactttcccacccttcaaaatcaccttgtccttaaggtggtaaaaataaaaa

SEQ ID NO: 359892 - DNA, 630 bp, Cannabis indica
aggggacgctgaggttcaggagagagaggagcagggtgatgttcgtcctggtagtccttccgaggaggaggaagaggaggaggctgcacccccaaaattttgggggatacaatgaggctggggaaccagttgacgcgaatggtgacgtcttggtcgagggcgtggattacgtcaccgaggaacttactgccggggtccctcagttgaggcagggtgcattgggcgccaagcgggtgagccctccgtccaaggttactcaggtgcatttacggggtctagaccagggcggctacctgggcgagctagactgttatgttcccgcctataacaatcgagctaccaaccctcagagggggatgtgtgcttggtcgggtgctcatgctaaacaagggtcactgctgcctttgcacccgtactttagaaaggtggcagacttcttccgtctttttccgacccaattcactcccaagggcatcaagtatctgtctaccctgttcattctctacgcctcccagaaagggaatatgccctctccccatgaggtcagctgtttttttgatttgaagtctactcccaagcaaggcaggtcaggatacttctacttctctaaaaatttcctttgagaatata

SEQ ID NO: 359893 - DNA, 504 bp, Cannabis indica
ataagtaaaaaaaaattataaaatatttataaaagttgagcaacaccgcgcgaagcgcggcttagttccctagtatatatataaagaaaagcattagagagttgaggtggcaatctatatgtgttttctatcctattctttattttcttaatttttatcatttatttattttttcaataataattttaactaaatatctattattattatcaatagagtaacccccattcacatatattattattaattaataatagtgtaacttataactacatatgagttagtattaatttagctatatatgagttacatatatgaaagaattgatgtgtaatatatatttataggtcaattagaatgtcataggttaaaacgtttcattttaaaagtttgtattaatttaattatgtatgagttacatatatgaaagaattgatgtgtaacatatgtgaaactaaaataaatatataattatttttttttgtaattatttttctttgtttt

SEQ ID NO: 359894 - DNA, 641 bp, Cannabis indica
tatgaataaaaattaagcttatgtaattaattcaatagtcaatcttgctttgaaaatatattttaaattctaaatctaaaatctattcatcaaattattatgtgaattttggaaaaattattgtaacaaaatatttatttcacataacaagatgaataatttttttttttcaaaatttgattttttagcaaaattgacccaagaattaaaaataaagcttaaaagagattcatatttgtataaattaaaatcaacctcaatcaagggtattatcataggaaaaggggatatcaccaaagggttttttttttttttttttgtttattttttttttttgaatgcataaatatatataaagtatttttcttgttttttttttactagaaaaacaataataaacatttttttgttttttttttataaaatatataatacaactactttagcatccaaacaacaatttttttttagttgaaaaataatctaccatttacaagcaaatgaaagaaataaccataggaactcaccaccccaaacttaatttatgcattgtcctcaatgtatcaaaaatacaaatatgaattgaaagttgaaagagttgagagtttaggatggtcatacctcatcttggagcaatgtca

SEQ ID NO: 359895 - DNA, 574 bp, Cannabis indica
gaagatggagatctcgttttattttggtttcagtataaagaaaaaaaaagtccaaggcagtataaaagttatttttgccgtgtggcagtattttttgtaaaaattgggtcaaaattcagtatttttgaaagtttcctaattttattttagcaacctagtccattttaattatcaaaattaaatgggctccctatatgcatctaggctcaaaacaaacatatatgcaaattaaatatctaataagataaatgatttgaaaataaccaaatagatattttcaatattattttgtaatcttataatttaaaaaaaaaattaaaataacaaaataaaccaatttttaaaataaatatggttaggcaattattattttaagattgaaataataaacaaataataattttccaaattatatgtcaaaatatctcaaattaaaccttttttaaatttctacaaaaatatgtaggttatttaaatacttaaaatactgtttataaatttttgataagtaaaatgatataaaatatcatatttttaacttataattgatgaacaattaaatatttcacaaatt

SEQ ID NO: 359896 - DNA, 501 bp, Cannabis indica
ttttaacaagttttttccttactcttacactcattagtgttcttttaagatcccaccctacacatctctaaaaatggtgaaagttcacgaggacgaagctaagatcgttgtgcatcacttttctattagacgcgttgagagaaaaagttgttctcatgcactaactttcattttaataaaaatagtgaaagtctcacatttctaatagtggtacccttttgtgaaatgtggttcggacccatctcggaatattttttgcccctagtcaaaatgaattcgtactactaacacgtgaatatgaagaattgttttgtgttaaatttttttaaaatgccccctaattcaaaaattgaaaatattctttttttcgcggtaaattttaacaagttttttctttactcttacaatcattagtgttctattgaaatctcaccctacacatctctaaaaatcgtgaaatttcacggggtcgaatttaagaccgttgtgcatcacttttct

SEQ ID NO: 359897 - DNA, 507 bp, Cannabis indica
aattaaataagctccagaaagaatctagttagttagaaataatatctaaaactaaaagtgtttccaaaaatttagttttagtgttgtagtaaaaatacaatacctttcttagatcataaataagaaatcctaaacatccaatctacacagattgtgcccaacccgaagaactaaaagttcgtagaatttttactcgttattttagtcccgatcacccgcactctctattcttcctttcgcatgacttttaaactataggagtcaatctctaataataataaaatagatcagtttgaactaaactataggagtcaatctctaataataataaaatagatcagtttgaactaaggcgtttggttgggaggaatgaaaatataggaataggaatgggaatgggaatgggaataggaatggaatggaataaaatttaaaatggataaaaaaattgataaaaaataattaaattttttttcttgttacattggaatggtcattccttccttt

SEQ ID NO: 359898 - DNA, 961 bp, Cannabis indica
gtgaggagcttgccgcggcggttcctcataaaaggaaaggtgccttgggcgccagatgggtaagtcctccgtctaagattacggaggtgcgtcttcaaacttttgaccagggcgggtacctaggcgagctggactgctacattcctgcccacaataatcgcgccacaaatcctgacaaggggttgtgcgcttggtcgggagcccacggtcagcaaggagtgttgatgcccttgcatacgtacttcaaggatgtggcggacttcttcggtctctgcccgacctaattcactcctaagggcattaagtatatttctgccctcttcgtcctctacgcttcccaaggatggggtactccttctcctcatgaggttgcctagttcttcgatttgaagtccacccccaaacaaggcaagttggggtactttcatttctctcagctaggcttcaagtggttgaccgacacgaatgacaaggccattagcaaaataaggcgttttgctgatgagtacttcatggtgaaggatgcgagcattacccagactcggtttcagtagattctggcatatcaccgtcctcccctcactcctgctcttagggatagagctctaaaacttgctcgattgccgggggaagaccggaatattatccagttgacatccgatgataatcttgtgaggtacgggctttatcctgaggactttactcctaagtccatggcggggaagaagaggaaatctggtgctggccggactgaacaagctcatgaggaggatgagctcgttcacctcaagcgcaaggctaagttgaagggtggtgccaaggccatgcaatatgctcaggagcctttgaatcttgaagatgaagctgaggaagagcaggtgactccactgaagaggaagaagaaactcccggcctcgcccaggcctgttgagcatgcaattcgcataagggatcccatttc

SEQ ID NO: 359899 - DNA, 526 bp, Cannabis indica
tcatattacattcacacatgcatataaatctacataatttataaattacgctattttacacacatataggagagtttaaaatttttttagctaagatatactagtaggatcataatcctaccttattatctgattaacctataatagaaatctaaacccaaattacttaacatttgacttattgggatattacatctgatgccgagggagaaccttccactggcgcctcatactgaagtaatggccaacatggagcaaccccccagtaccacaacagcatctggtccctggtattatgctggacagacagggccaggaatcggtgagcgagacattggagaacctcatgtagacctaggagaagatcttgaattagcatgacttatagaggcaatctgtccagtcggccaaactgaagaaccacgtgctattggttgcgatgcatttccacaaaaaatacacaaatttttgagatggatggatgaccaagagtacatcctcctatctcatcaggcagaattagact

SEQ ID NO: 359900 - DNA, 822 bp, Cannabis indica
tttttttttcttttgtactgtaaataccaaaaataaaaaatgaggtctccatcttccacatcaacagacagaactaccacaacaacaccagaacagccgaaaaccaccattaaatctggtgagatgaagcagaaatattaaaactattaatgttggggttgtcatggtttttctaatattgtttttgggttgttccactgttgtttagtatttttaacaaatgttagttttaaattacacaagttaaaccaaccactgaatatttgtttgagggtaactagaatgaaagaatcatgaaaagtaatagtcttaccttccattgaaatggtgaaatatagaagaccaaagaaaaagaggatggaagctggctggaaaaataaacaacataataaatgcagcaaatgtagggagctggggcacaataagagaacatacaagagaagacatcaaaaatgaaaagaagcagaacaactaaaaaacaacagtgaaacaatagaggaaaactaaacatatatttgagcatatgatactgaataaaataactttcatactaatttcattattttcctattactattaaaaatagagtagtacaataatatttgaaaaaatgtgataaaaaatgaaagaaaacaacctttaaaaaataattaaataatactaaaataaactagtaacaaacaaaatgtaagttggagaaagatggtggacttagaagtaaggtagagatggagcctacgctttgagaccaaagaaattgaatgacatgaacttagtaggagtttctaaaagatttctacaagaagttcatcacagagcaag

SEQ ID NO: 359901 - DNA, 924 bp, Cannabis indica
acaaataaacacattaaggtatagaaacccttacattgatggtagcggaataatatgactcattccgttcagatctctaacccttgatcctttctattgcagaatatgatcaagatctgatcttgaattctcctttttggtgacaattggactacatagtcactatgctgggtattgctttgaaatgtgtacgcaagttctcaacactaaagagcacaaaatttcatgaaaaaatccaagaaaaaatagcctctaaatgttcgaaaagtaaagagaagaagaagtgagattttaggggtttctattttagaaaatcatcatcatacaaagctctcttctctttctttttataggcttcacttagggttaggtttaaatgagatgagcttggaataaagacttgggctgaatcttactcttagtgtcgaatttacatatgggctttagagtaagatttttgccactttatttcaactaatgaaacaatgtgtctttttctatttttagcacttttctcatctaattatttaaatatcagttttattttaataattataaataattatcaaataaaatacaatttaaatatattttttaattagacccacaaagtatcttagttaacaaataaacttttatttctcttttcttctcaattacgttattccttagtaaaattcataaataaggcagtcattatttagaatcctcattgattaaataaattaattaattgagactacaaaataacatcatcacagttagtgtgaggaccatgggtttatgtaaaagttattaatgagaaaatttactattttggacgctgtgttttgcaaaagttattaattagaccctcgattttgttaaatgataaaatggaccatatattttccaaaatagtaaaaataggaccctgagcttaat

SEQ ID NO: 359902 - DNA, 643 bp, Cannabis indica
ttcaggtcaaacccgctcaaaatgttcagccgacgtgtccaatcccaaaaatgcggataacacaaactaaataagattcttaggaatttgaagttttttttgtcatgagttgtgtgttttgttttatttgtatcaattattaatatttttgtcctttttaaaaatcttttttacttttttcaataaatttctctcatttttttaactccattttctctttgaaactatttttcttaagtcttttctacattttttttaccatcttttttttcttgatttttttttttcaatttttttttttttttgtcttcttttttttaagtctttttttctatatttatttattaataaatatataaagtgtagaagactatacaagtatacatatgatgttaatcttttttgtgttgttatttattattttttataattttttgttaattattattttattttttatataaactttacatattcgtagataataatagaacaaaatcatatgagattcgtatttatgacgactgatgatattaacttcaataaatgaatctatactacactatgtgtttgtttaaacattaactttttaatattttttttttttgaattaataatgaaatttcattaaatcaaatcttcc

SEQ ID NO: 359903 - DNA, 734 bp, Cannabis indica
tctcatggggggccatgagaattggagagtgtaattggaacccctcaattactttcaattacacagttacaatgtaattacatggtcagacaaacatgtcaaattgtgtaattacctctaattacacacaaatctaattatattgtggctttccaaacgcacataaggacatgatccgaggaaaaataaaagctacgatcgagacaataaatatttttgtttacaaatcgtttaatagaatgtaaaaaaattactaaaaaaaccaagtaatggaatttttgaaacatatataaataaggtaaatagtgacataaatatcaggttttatgtttgtaagcggcataaacccaacgtttatttttagcgccataagtaaccaatgtttgtaaaattgtaatttttctctaattttgtcagtacagactctgttattgtcttaaacaagacacatataaaacctaaattttagatcattggatctagataaagttatgtatcagttacttccaaatgtttttttaataaattcaaaagagagtctgtactgacgaaattggaaggaaattacagttttacaaacattggctacttatgctgctaaaaataaatattaaatttatgccgcttacaaacttaaaacattgaatacttatggggcccgtttggtacgcaggattggactggattggactgaaaaggattggactggactggacaagattggattatgctga

SEQ ID NO: 359904 - DNA, 456 bp, Cannabis indica
tacatcaataaagttactcggaagagaatcaaacgaataactacgttcagcatttaaccatgaaagtcgggcaagaccatgagcgacacgattagcagaacgtttaacaaaacgtaaataaacattgattaaatctgaaaacattaattgattaacgtttttatttttatacttcaaaacagttttgtttttgtatttttacaaaattctatataaaaaatttctattgcaactaacgcgacctaaactgaaataaaaaatcatataaaaatcctattacaattagtgttgtatgcactttattagaaactcaaactgtaaattaaaaaaaaaaaaaattaaaaaaaaacagtatataaagtaatttccctatatattatttaattacctacaagaattttagagttttgattttcttttataggatttaaccgtgtgaataataataataataat

SEQ ID NO: 359905 - DNA, 521 bp, Cannabis indica
cctacgctttttatatcatagaagtagctgaactcttctaccagggagccctatgaacgtactccatatacatcgcgtaaaaggccagggcagtgcgataactattgggagttagttggaaaggtgatacatcatatcgtttaaggatggtcgtgatgaagggatggaaagggactgataccccacctcggcgaatgggtattgagattaccacatcctttgtgggaataatcgcaggattggtaaaaggaaggtgcgccctctgggtcggtttaggttgcaaaaatgcaattcgcagcaggtttagcctcgtaaaggtagtgaagtctgatttggtaactctcgaaatcatatcctcgcacgcgaaaggctcattcagttgggcgtcatcgaccgagttagtcccactcccttcagcctcttcttaatcctggcctgattcgcgagctggggccgtccagtcgtcgtccatctcctcgacctcgacgtcaggagcatgcctcgaatggataaggtagtcg

SEQ ID NO: 359906 - DNA, 623 bp, Cannabis indica
tgttaagtgcattaccttaaaattcgtaagtgtggtagtaagaatgtaagtaggtcgttgcctgacccggctgacttactaattgacaggttagtcttataggacggatacctggtgtaatatggagagtctgagtaaagtggccagggctagtaacggttggagagaatggagtccaagttgtccccgtaaccaaggtgaaatcccttggagggcttccgacgggagtgatggttatccgtcacaggctccgttggatttggagcaaaggtttgcaaaaatggaagctgtgattcaacgacatgaagaagagattcagaggttgaaacagcaaaggtctcctgtagtatctttaccacatatgccaatcatttttgattcggtattaccagcaaagcatggaatggctggtaatcaagtggaaccattgcatggaaagatttggatccaagaaccttcagactttcaaggagattcaaatatggagaacgcttcttgggctgaagccctgaggaaattattatgagacctcacgagattatggtagagggtcagaatatcacctccctaatcagattatggtggaagtggcaggagctccatgattgagcggaagaggaaac

SEQ ID NO: 359907 - DNA, 629 bp, Cannabis indica
tccaaaaaaaattaggcggggcggagcgaatatgatccaagatccaataagtatccaaatgtttcggatcagaggtgatccgtcgggttggagctccaactcgctccaactaaatggatctttttgacatgcctatcagcgggctatgggtaccaaactgaagttcaatagagctttccatcctcaaaccaatggacagtccgaaaggacaattcagatactacaagataggttacgagcctatgttatggattttgagggctcctggagtaagtatttaccactaacagagttttcgtataataatagttatcagagtacaatagggatggctccctatgaattgttgtatgacagaaagtgtagatctcccattcactgggatgaaacagtggagaaaaaatatttgggtccagaatcagtgcaacagactaatgaaacaatagagaaaattaacgccagaatgcttacctctcagagtatgcaaaagagttatgcagatccgaaacgcagaaatgtagagtttaaggtaggagatcatgtattcctataggtatctccgatgaagggaatcaagcgttttagaaaaagaggcaaattatgccttagatttacaagacctttcgaga

SEQ ID NO: 359908 - DNA, 681 bp, Cannabis indica
aattttgttataggtttgttttatattgaatttgttctattttgcgctattatttatggctttgcgccttacaaggctttagcacctattatatggttgggtccctaattatttagggtagtttgtttaaatttttacattttccggtattgaatgtataaaaaaattttgacacaataatattttaaagtttataagttatgcactatacagattttattagtcggaatgaaagaattattttggttaaggtatgatttaaagaatattttaaactgaaattaggtttaagagggtttactttaaacgctaattcctattaactatgttttggtttatattgtttaggaatattcagcataaaaggaaaggatcttgtaataaaaggaggtgggaacacgaatggtctaatgagaatatattgattcagatatatttgagaagtcaaattattatgaaattttggtttgttctcaatattatgggaatgtaccaaaattattatattatttatatttttaaagaaattattataatttagttgttactagccaaagggaatgtttctagtttttatagggagatctagttgcttagtcttggtggttggttgattctcttcaatttgattagttttctaattaaagttttattttgtttttttttttgtatgtttttttt

SEQ ID NO: 359909 - DNA, 585 bp, Cannabis indica
ataaattcatattttattattatgcatggacgtattagcgtaccacgtagtatctattatatatagatattagatgcaaatgcatcattataaaaggatagtgtaatacaacaatgtagcggcatgtttatctatgcaaggacatatcatgtgtatactatctactcatattatatttattttactgtcttgttgggctttagctcacaggtgctctaatgtgcaggtaaaggtaaagaggtgtcagatcaaccaagagttcaagggttttgaagatgaaatgtacatgtttcaaccaaggtagaccatgaggattgggtccaacatggaaattgtatagaaattctattttgccacttagatcgtcttgtatgtaaatgacttgtaatattttaataaaaaaaatttacgggatcctgaatatgtagttatattattttggctttaagttaaagataaatctaatttttaaaagttgttttatttaattagatttattttgtttttcattacttggcttattgtatttttttttatttttttttttttgaatggaagattggcaactttattaacttaaggaat

SEQ ID NO: 359910 - DNA, 787 bp, Cannabis indica
gttacacgtgaaactttggttccatgaatctgctgatgtatgctcgaagaagttcgcctggtctttgcttgacttcaaccaggtctcccagatgcaacggaagttggcgagaggacgagaattgtgcatggaattccgaagagaaggctttccatgaacagaactttccaggggccaacttgaaataccattgctgggcggcttctaacaagatagcaggaaagattctgcaacacacatctcctcgtaccccttgcaaatccatttgcattgtgaaatacttgaggtgggaaagaggatcttctcttcctgtgtacattttcaatgttggcattttaaacttttggggcaatgctagaagattgatttcgggagagaaaggagttccgcgtgctcggtccagctcgagatcattatttttctgtccaaccatgccttggaacatattttttagttcgtctagttgtgcatgtacggccgggctaacctgctcagcattctggtcgatttgaatcacatcagtatccttctaagcgggaatttgagcacgggctccaggctgcacgatcgtcgtgacaatctgatcatctattcctctccttctgttcaggtcactccttaggtcatgagtcatccccaacctttcgaatacagaagcgcctggctgttttagcaattcattcgcttggttgacaggcagaatggcaccgttaacttggttggaactatcaggtatgaccttttctgatgaattactagacaaggtctgcccgcctaccgctaggcc

SEQ ID NO: 359911 - DNA, 881 bp, Cannabis indica
tcggccgacttcaatggtaaattgaaaagaatcatctttatgattaaattactttttaaaaacaaggaaagcaaaacttttgggctttttattattttttatgcttccattaggtgatttgatagaaaatcgtattgatgcatgccactacatgtcactgacattctatctctttttttaaaaaaaaataataaaaaaatataggtacaatagaacctctatttaagattgttaaaaatctcatctcatttgaaagctgtattttaaaaatttgatattcttaaataaaaatttaaattttgtaattggaaacatgtttctgaaaatgtgattggttcagtgtttatcaacaatttttgaatgttaaaatattgaatttgtgattggtacagaatttgaaaatataatggcatgtttacttaaagtactgtatatttgatcaaaatgtagttgtttacattgtgaataataacgcaagcaaatacaattgtattaagtttgaataaaaataatacaaggcatttaagataagtaaaacttaagtctggttacaaacttgtctttacaaaaatgccaccaggggcaaaccattaagtcatgctcctaaactacggatgagaggggaagccgatgaactcaagaaagaccgtctgcacgtagattggaaaaagaccaactacacatagcttgagaaagaccaactacatgtagagagtcttaatctctgcacggacctcattcccctcatcattagaagatcacatttcctgaacccgagatctaattcccagccttaggaaatttctcaacactggagagaggcttacgcgaagatctcctggcacaggttagggacttgggttggctggattctctgatag

SEQ ID NO: 359912 - DNA, 622 bp, Cannabis indica
atcgaggggaagtctaaggacacagtcaaggcaagattggatatggaggaccttaaaatacgtcgtgagttgtggttatttgaagaccgtaacaggaatttgaggaaactacatgctagttacacacttactcttcttgaacgacgtgaattttccgaatttatcaagtctgtgcagttcccagacggatttgcttcaaatttagagaaaaatgtcaatgagactgaagacaaaatttctggtctgaagtctcacgattgtcgtgtcttgctacaacgcttgatgcccggtggcattaaaaagttcttgaagaaagtattctgtaaaacattgaatgttatagactttcagatcatgcaaaaaagtattctagacattctttgcaaattgaaaaccatttcccaccagcattttttgacataatggttcacttggtaatgcatttacctaaagaagcgatacttgggggaccagtgcacttcaggtagatgtatccaattgaacgagccatgtctgtttacaaacaatatgtcaaaaatcgttctcgaccgaaaggatctatttctgaagcttatgcagttaacaaagccttaaccttttgttcaatgtacttccaggaagt

SEQ ID NO: 359913 - DNA, 516 bp, Cannabis indica
gataacctatcgatatgtcatcgataacttgtttgaacaaacatacactagtgattaacatgcagaaaaacatccaaattcgcatacacaatctaaaacaatctaatcagaagaacatacacaaattcacatccaaatctatgaaaattctaatttttaataagaaaaaaacttacctttgactgttagtggttgtggtggcgacgattcgtggttgtggtggctacgaccgctgttcggtttcgacaacacgggtcgtggtggcggcgacggttcgtggtggtttcgactgatgcttggttgggttccaatgtcagccgtggtggtgtgggtcaagctcgagagcagagacagagagaaagagagaaagagactagtagatagagagagtgttgggtcggggtcgtgggtggatggccggagtggggtcgtggtcgtggagtgcgttgtagggtcgttgggtcgtcgtcgtggggcaacgtcgaagtcgaagagggaacgagagagagagagaga

SEQ ID NO: 359914 - DNA, 601 bp, Cannabis indica
gttgcttgtttgttttggatttacagaccttaccgtgttggatgcactgtctattggagcctagtgggatggtaccgaaggttgcttcggaccacattgtcaaggagaaatatttaaaagatggaaagttttccattaacatggatgaataactacacaaagattatcgttgggtattcatcgaagatatgaatgtggagaatgcattgctcccgtgtcccatagccgacgattcattgaaaacagtagatcaagttataaaatgttatgtagcatggccaaaagactatcttacacctgttggaatatatttgtgttaacatagatttttcgttaacgataataaagcctatttcgtgattaatttgcacagaaattatagaaaataaaagaagaaaatagaacatgaagctttttacgtggttttgcagttaaaaatctgcatagtccacgagtcaatcttattcagatttttctgatacaaactagggttcttttctctcaaggatctttcgtcccttttttagtacattctacccctatttatagtaacatagggtggcagtcccacaataatatttccccgaaattgtgggcttta

SEQ ID NO: 359915 - DNA, 790 bp, Cannabis indica
tctatggctgggtacagggtttgaagaatgtccttcactagaggaaggtgggttagaacgaagacgaggatgatcctcgtgcaggagttgaagcaggtcctggtcgatccgatgtccgttctcccaaaactcactcgagttcatctacaaaagacaacacacaagatgagtgtttggtcgaaatatcgaacgataaacaagcaaatatgccaaccaggagtacttaacagattaaagaatgagggtgcccaaagaaaagtcagaactgaagaagtcaaaaattttctcgagttagggcaaaaaagttcatgaaggttagataagcaagatgaaagacagacgttatgcagttcaaaaacaagctttatgactataaaatcacgcaaagacatgataaagaagaatcacaaaattttctgggcctagggtttcctagacattttctacagcaaaatcgaaggtgcattcaaaatataaacatgcaaagataagcgtaaagaaaatcagaaacttactcaagagtcagatgtttgagtttgagcaacgtcaatccaacaagcagtttgtacgaaggcacttcggcaactttgaagccaagaatctctcttttcgctctaaagcttgcttagcaaagaaggatgatgaaaatgagttatgtgccaatgctgtttgatatttataggcaagtcacgaaaagaggtaatcaactcaaagaaacctgagacgcctcggtttctctccttaaaagcgaataatgggaaataaaaaataatcaagtgcagccgtcacc

SEQ ID NO: 359916 - DNA, 491 bp, Cannabis indica
taaggacttttagtctaattttaataaaaaaaattctaacatggatgaaagttcaagggacatgatttagtacatatcaaagtttgaggggcatgatttagtagatatcaaagtttggggagcatgatttagtacataaacaatcactgaaacattaaaattgaatgaaattagacaaaagtccttaaatttaacaatctcaatagttcaggaggaatttttaacggcaaacaaagttcagggggcacgatttagtacatgtcaaagttcagggagaaaaattactaattagcctataaattattacagagctccatatcaattctctattatagataaccatttttttatatgattgaagttcattcttttaagtctcactccatatcttagctattacattaaggctaattagaatttttaccccttaaattttgatatgtatcaaatcatgccccttaaattttctagccgttaaaaattctctctga

SEQ ID NO: 359917 - DNA, 949 bp, Cannabis indica
ttaagtcaatacaactaacgaggattaggctattaccgaactgctcgtggctaaacctctataaaatttctgtgtcttattattattattattggtttactacatattcatatcacgacatatcatttatcacttatcaaaaagactcattatcgttggctaaaagcgaagtcaacattttggtggtttcattgagagcagaatcatagatcgctctttcgacacgatggtgcaaactcgtagaggcctgtccgacccagcaaactcacaaatgctggatccgatgttgtaggacccagggagttcgagggctccacccgctgtcaatcctggacagacgggaatcgtggtgaatgatggaacaacttctgttactgaaactgcgcctggtgtgcaagagaccggacacgacggttccgcgcacaaccaggacgttcataacatgactgttccaccaggcatcaacgcccagacgaccatcaaaaatgcaactgtattgcaaaacctccgtgctacgcttggactcatgcagggtcacaacaataccctgcatcacgatcaggaagaattacgtgtcgcagtaaacctcttgtttgacgaacagaggcgtatgtttgccgagtggagggacaaagagatgaaggcattaagagctcaccatgtagaaatcgaagatcgtagtcggcaagccactctgctgatacgaagagcctatcagactgtaagccagcaggcgccgagcatcattccccttggagaaactgaggatgacccaacggggaatgcttcccagacaaccaacggtcagccatccaatccctggtcacaaggtccactcgtgggccaagaggtaggcagacagagcttgttcaggaattaatcaggaggagtcatgctcgatggatccatgcaaaataatggaaccattccacttgccaaccaagcgaac

SEQ ID NO: 359918 - DNA, 617 bp, Cannabis indica
tcattatgttccgctgcaatcaatataaggttttcttaaacacttatgtgtttaatttcattgtttagagatattcatatttagaatgttaatcagcatacttgttagtaatctaaatcctggtaaaatattcccaacagatcaaacacgaccttatgttcacaactgatgataataccacccatgctgacatgttgggaaaagaactacgagctgagggcgcagttgagtgcatttaggaatcctaagggacttaggttgttggtggagccactactcctcctacctcttgttatggtaagagtggtagttacccgaccattgataagaaaagaaaggcaccatctgcacctagtgtcccaagtcaaaattagaggttctaagagaaccaaggtcgtggtaaccatcagggtggttttaaaacccgatacacttacctagaatattataagaagcatcatctaggtgagtgtaaagggcaaggatgttttcagtgtggtatgcctggacattataaaagagattgcccgtaacttaagatagaagaacaaaagatagaagcaaagcccgctccagcaagggtgtttgctcttgctcaggctgatgctgaagctagc

SEQ ID NO: 359919 - DNA, 567 bp, Cannabis indica
acatgtagttggtgagttaagcaagcttcattctgatgctctatcatatgtcaatgatttgcataggcatgtccattttctagaacgtatgcttaatgaatctgatgacactaactgtattagggcatctgaatgtcgcgatcatctttatcaccttgacaatcttaatgatcattttgatgacctttctctaaaaatgatttctgttaggactgaattgctccaagctttgtctgtaatatctagaaaggaagctgagctaaggtgcattcttgctgagcacgagagagatatggattttctttgttcccaattcaatagggatgtagagctcctaaaacatgagattcaagtatggtttcgtcattacttagatgcaaaacatccagtctcattgacagttcctagtcctaatgatcgtgttatccctttcagcaacacatttgaagttcctttatcagatccttttggtggcgctgaaccctctcactcttgatgatatttaaaagaaagttctttttttttctactgtttatttttttgttcaactttcatgtaccaagccta

SEQ ID NO: 359920 - DNA, 566 bp, Cannabis indica
tatacgctaagtgtcttcacaattaatatatctcatccagtaatcaaggttagtgcctcgtcttatacacctaaaattacatggtttcttgttgatgtgcaaggcaacagtttgtatatctttatctcgcataagactattcagtaagccgagttgtaaatatactctgtcaattatggtttaacgagttattccacctcaaatataattataatacgtgccttggtttgtattcttcccagcttgacacgtgttttcctctgatgtgttaaccaaatttcgggtataataataagtatagacatatattgtttaaatattaattcataacaaaataaataaaaaaaaatagctagctcgaatgtgtttcattcagataagtatatatatacatatatatatttagcgtatcatgactttgaaataattcaagatcacatataacaaactttattattccttagttagagactcgtgctgataacgtattgtgtaatattataatttaaagaagagataggaattttcttagtgttttattccaataggtgatctcctatttatac

SEQ ID NO: 359921 - DNA, 856 bp, Cannabis indica
attaattaataaaataaatctcatttagaaatatagactttgttattaattcattctatatagaaactaatactgcattgttattgaatttattctataaaaactatctgtactaaatttcgagtattattaaatagttcacgaacaaatcttctaattaaacaacaaaaatgtaagtgtgacttggcaatatacaattatagaagaggtacatatacgattgagtagatatagaagagatacatatacgataaaatatattgtattgtatgattaaatatatatatatatcatattttatgtatttaaatttaaattaaaatattatcatataaaaatatttacataattattatttttaaatacataaataatattataaaattaattaaaaatattatgttaaataataacatattttattaaaattaatagagaaaataaaaaatatttattacaccaaaaattttgttacataattacaatttatatataaaaaatatagaaaatacttatgagaattttgagccatttttgatattatttaaatttaaaaaataattgactgtaagttatagtacaatgtattttatttttgactaaaaatgaaaaggaaatatattaagataagaacattataacatatggtctgtatatcactatcaatatcttaactaattggttgaatttcctcaccaaggggaattgatgggaaagaaaaattagttattcgtttgacaaagaatacaatcattagagtaattgtttctctcactttttatgtttagtaaatcttatttttatttgtttttatagacataatgtatagtaattttacaaaaaaaaaaaaagtaac

SEQ ID NO: 359922 - DNA, 358 bp, Cannabis indica
cagcacctgctgctctagctaattgtccaccctttccaagtgtgatttctatgttatgtatggtcgtgcctaagggcatatcggttgaagtagattcttctttttgaccaatcaaaaccccttcccaaactgtacaagcttcttccaaagcatacgactttctagatgtagatgatgatatctatacatatggatcttctatctatcgtataattcttggggctataatgctagattgagcttagagtaagattttagggttgtttttgcctttgtttgagtttgaatttgttagacatagggactgtttagcttgatttgagctagatgaggtttaatcttcacttgagtatgcaat

SEQ ID NO: 359923 - DNA, 705 bp, Cannabis indica
gtaaaatatttccaacactctctagctgtaaatatgctaaggcagtttggagagctcaaaatctgaggttctattggcatgcgtgtacatcaatgcgaaatggagactacttgttacacctctcatcaatctataacaaattagagacggaacaacttttttgtacactttgggctatttggaaagaacgaaacaaggtggtacatggtagcatatcaagagctgcaaaggaccttgccatttatgctgttgtcttcttgcaaaactttcgaactgctcaacacaaaaatcctactgctgttgttaccgcaccagcaacggcatgctgcaacagcccccattctgtggtcccctcctgctccaggtgtcctcaaactcaacattgatgcagcagtcaactcctccactaatactactggtgttatggctgttctaagagatgtgaatggacatgtggtgactgcgctttcaatgcaaattatcgataacttcaaatctcatgaaatggaggcaaaatcacagtgtcaattgagctattcaacaacaattgccaatcacgcaaattgagatagatgcacttatgttatggtggtgaatgcattgcaagttcccttcaatccaaactcctccttttcaaatttaataattgatgttgtttgtcttttatcctttttccctaatgtaaatgtttcacatgtaaaacgt

SEQ ID NO: 359924 - DNA, 1079 bp, Cannabis indica
cataaaacccaacaataaatattatgcgtgattggtggattcattacgtgaaagtggaagcggaacgacaacagttactgtgttggttagtgtgtatacatctagatttatcgttactacgtagatttgtaaatgtatttagattattataattagtgttaacttaattatagatttttgaatgtatttagatgatattaattagcgttagttcaattattgtgactatacataattttaaatatatttacacgataatagcgttagtttaattgttgtgactatgcagatttgtacaaaatttaaaaattaatgcagggaaaaaattacaaaaaatctatttttcttccctatttttcaaatgtaacgactgaaataaatcgtccctaaaaaaaattaaaaaatgtaaccagactataaggcatggtttaaagtcgcctataactgggtaaaccgtcgcctatagtattaggcacggctcgaaactgtcgcctatacccaattataggcgacagtttcaaaccattgggaaactcacattagcgatggttttgaatcatcgcctattttgcccgatttacgacggttgaataagtgacggttatagaaactgacgggaatactttaaacgactatttaaaaatgtcaggaaaacccatttttgtagtagtttgtggaactatgtttatcaacagtaacagtagagctggtctcaagaggagtcataataataagtttataatcaaaataccatggctagcaaataagaactcatctgcgatcaccaaaacaactaaattctagtgtgaaaaaattttcttatttcaccaggacattaatggagtaaccttggccacattttgtggggatgcttcttaatggaatcttgattaaagtgacgatgattggtgagaagctttgtaatgaccgctctagtaatatgattagaaaaggcaattagcactaatttttattattttattattatttgtgaattaatttatttgtggatcccaatatttagaaataaatatttgagttataatttctcaattccggagattttattaaactctagg

SEQ ID NO: 359925 - DNA, 641 bp, Cannabis indica
atgtggttgtgtttgcaagttcgagacttgatcaatacataaaagcgtcaagggtgggggaatattcctttgctttcacctcttaaagaaggtgatggcttggagcgctggatcaaaccgaattcaggcatcaagctcaatgttgatgcagccactttcgatcgtgattccaaacatgggttcgggtgtgtggtgagggacaacaatggggagctgctttcagtcattgcaagcttcaaaaatggcaaagtttcacccgagctagctgagattatgggcattagagaggctttaagctggctcaagggtaacaactacacacgggcagtcattgaatctgacagcttggtctgtgttgaggcaattcgaagtgcagaaagatttgcttctggtctcggtttagttgtagaggagtgcaaaaagatgtttaaaagtttgtcaaatgtttcattattctttgttaagcgttttgcgaattgtgctgcgtattttattgcccggcattctatttctttaattgaacgtatgttcccaattaacagtgttcctgtggaattaatgtctattctgaagagcgattgctcaagttaataaagaacactttttatacaaaaaaaaaataaaataacaataataataat

SEQ ID NO: 359926 - DNA, 894 bp, Cannabis indica
catgaatttacagcattatatgagagtacacttagcatatctaaaatatatttttttttaaaataaataaattattaacaaaaatagaataggagaaaagcacgaagagtggctggctaataatactacaaagttaaaagttacaatacaaaattcggttgactccaataaaaaccaatctttatttactttttttcatattctaagcatatttagttataatattaattataataatatatgtacttttacataaagtagaatgattcacattcaatttaattaattatggattcttttcgtaagttcgggcaatacttcaaaaatttgataagaatgagagtaatttgtgatataaatatttaagtttaatattcgattgtaaataaatatttaagtttattttttactagtaataatacttaaattataattctggaacttctgtaggaacttgactactaagtgttaagtaaattatcacgtggcatttcctaattgatttaggtaataaatttttaatttttttaatttaaatataccaataaaaaataactgtatagtcagggccggccctgaaaatatatgagcccaagacaaattaaagtttgggaccctcaaaaatatattaaaaaaaatatcaaaacaagagtgttatgggatttgaacctatgacggacattatgtcatccacttcaaccaattaggctatgaatatttattacttataatgcacttaaattttacttaaataaagggaaacttacaaaaatactggaatttgggttaacttttacaaaaatactgccacacggaatttttttcaaaaatactgtgtttttataaaataccagtaaaacacaaagtagaacaactcaaaacaactgtagaaca

SEQ ID NO: 359927 - DNA, 544 bp, Cannabis indica
ggggtggagcagtggtttggagaagtgctaaacaaaccgcaatttcagactctgccatggatgcagaatacatagctactgcagaggctgctaaagaatttgtttggcttagaaagttcttcacaggactcggtattgttcctagaatggaaaaaccattggttttgctttctgataacattggatccatagccaacagtaaagagcctcgaaaccacaagagaagcaaacttatagaaaggaaatatcacatcatcagagagtatgtggtaagaagggatgtactgattttcttatattagtgcaagtgggagtttgttgggctttatgccctaaataaaactgtatttcaatataatctctatcatttaactatcaataaagagacaaaagtattttcatcacttatttaatgtatcatttagttcatgttatcatttatatgtttatttcatttataaattcatctaaacccttatcacattaatattcttgtttaatgtgttgtcagcacagtggaaagtaatcaagattatgtgattaa

SEQ ID NO: 359928 - DNA, 544 bp, Cannabis indica
gatagtgaagaagaaaagaactccattgccagtgaaagcacggatgaggataagcaggtactagctttcatggcccaaagctgtcactcaattgagtctgaagatgatgcaacctccacttcatcagaagctgacagcgtaggtagacaaaatgcatatgaggaaatatttgcccaaagggagtacatgactaaacagatcagaggtctaaaaagctccctagagcaagtggagactgaaaaaggcaagttagaggacatggtcaaaaacctcaacaaacgtcttgatgagaaggagaatgagatttataaactaactgatgatctgattataactaagcaagcactgcaattcattcccacaggcacagctgctatcaatcaaaccctacaacttcagaagccttatggtgaccgaacctccttaggttataagatgttgtataaacagggtaataacctgtcagttgagaattcactcccctcaaatgtcgatctgaccaaaaaggagatgggttaccagacatcccaaccaccattaacga

SEQ ID NO: 359929 - DNA, 516 bp, Cannabis indica
agaagaaaatacaactgcagacgcgctagctcgattggcaagcagcaatataagtgacaaggcaaacttggtccctatccagttccttgaagagcctagcatcactggcacggaagaaattgaaatgatcgacacatccccaaactgaatgacgccagtagcggcctacctcaactctggggaactcacagataatcgaaatgaagctcggaagatgagaagaaaggcagcacgatacatcatagtagaaggggccatgtacagaagaggattctcgatgccattgctcagatgtgtcacacaagatgaagctgcacggcttatatcttacgctcacaacggattctgtggaaatcatgcagctggacagagcttatctaagaaaattctaaggcaaggctacttctggccaacgatgattgaaaattcgagagcgtatgttaagaagtgcgacaaatgccaaaaaatttcaaagataccaagagctccaccgaacgagttgacacagatgcaaag

SEQ ID NO: 359930 - DNA, 612 bp, Cannabis indica
ttttttttgttatacctactttcaggttcctcctaagatttcagtgaagtttgaagactttgatattcctaaaaaaaaaatcctcctgaggtgtgtatttttgtttctgttttttttctaatacatttctgtttttgttacttatgtagtatattgtattttagctttatattttttttattgtttttgtgatatttttattggaactgttgcaggaatgggattacatatatgacctaaagaatctctttcttgcaaaagccgtctccactgcttcatacaaggttataaataatattaacaattgtctttcttctaagcagcttgaaatgttttaaaaaacttgctttggccatttcattaagcttcttgatttcaaagtgcaaccgcaagtttttcatgggttgttgttccgggaggttcagcagctaatgatgctgaattctgggttatgattcgtggtgttaggattaggtttagcattgaggaatttgcattgataactggtttagattgtgaaggtgattgtagtgtgttggattttaagcaagacgttaacagtctttgtatgaaatattgaccaacctcaacctctattactaaagaatctgt

SEQ ID NO: 359931 - DNA, 1137 bp, Cannabis indica
gtaatgggttttatttagggcacaaaacccaacaggctgttcatcctgattctcagggcgtgtctcattttccccagattgttcttcacaggccttttcctgtctcctggtttgtgagccacgagctctgcctcgtggtcttctcactccaggttcaggttgatttctacggcgccctattcgaggttgcctctcgttctaactcagcgtttcgacgctgtgcctcttctagacgacgtctcaggcggcaactttccatttcataagttctttctcccacagattgggcacctccacggttgagctcttcatccctcgtcttgggattctgaccattcccacgctgagttctccccgagtgcattatctacgtactaggaccaacgtcgggttgagttctccgaggaagtgtgatccgagcactaggaccatccttaggttgggccctcctggaatgggtggttcttctagactgcggattagtagatcttctagagcccatgggctcttttcgacaacgatggttagtttcctcatgtggggtgttattattctctagattttcagccataaaggaggaggtttttctttaagagaagggaaggctttttctgagcttattcacagaggctcttaatgaaagcaccaaactgttaacacagattttcgttaaccaaatttaagcctaacaatgataactcaacacataaataataaaatttatagaaaaaaaatatgaacaccgggttttttacgtggttttgcagttaaaattctacaaagtccacgagtcaatcttattcaaatttctgagtatttttttaagggcctcttggataagagttttttcgtcacttttttaagattgtttggcactatttatggctgcatagtaacagttattaattacaaagctgaccaaaatatgattacagtcattttccttgaaattgcgggatctgattacataatacaaaatgtaaatgcgatgtataattttgaaaattatatagttgtgattttcccgcttttactaggtcaagaatatcgtgtattaaacacgtctttaattattgaatctggagatgtctcgatggaaacttgattgtagtgatcccaatggcaagctggaaccat

SEQ ID NO: 359932 - DNA, 503 bp, Cannabis indica
caattttaactcatccgacatggataagctaaaagcagaattgcatgcttatgaacggagtttacctgcaaggaggccaccctccagttttgcagacttgagtaagaggaaaagaattaagtatggtgcttctaacaatgctgcttcttcaagtacaaataatgaaaaaattgatagtagtactcttcaatgttcaaattgtaatgagaagggacatcaggaagaacggtgtcccagacttctaaactattcaaatgaaggtaatgcttttgtttttgaataatgtgttttagagaatgacaaatccttttggattgttgattctggatctactaaccatgtttgttcttcattgcagctgcttgaaacttgggattaattaaatccaagggagttaaagctcaaagttggaaatggcgaattagtatcagttcaagccaaaggaaagcccgcctcaagtttcagagaatttttagtttagacaatgttttgttattccaaat

SEQ ID NO: 359933 - DNA, 523 bp, Cannabis indica
aagttgcatgggttgagccaatgcaacctttccctaaattcaagagaccttttgagtctttagagttgaaggaaagaaatttcaagcctccaaaaccttccatccaagaaccacccaagctagagctaaaacccttgccaagtcacatcaaatatgcctatatgagggacaatgaaatgctgccagtaattatttccacgtggttagaggctgaagctgaagtcttgttgttagaagtgttgaagaaacataaaagagcacttgggtggactatggtagacataaaaggaattagtccaacggttagcatgcacaagatactcttagaagctggctgtagtaactccattgaccatcaacgaaggttgaatcctttatgaaggaagtggtgcgaaaaaaagggataaagtggctggattatggtattatgtacccgatttcagatagttcatgggttagccctattcaatgtgtgccgaagaaaggtggaatcacggtggtggctaacaagaacaatgaattg

SEQ ID NO: 359934 - DNA, 846 bp, Cannabis indica
aaaatatactcaagtttattctcatagaatttagtttttacgaaaattgattttttaatatatttttttaatatctaaatgaattttttaataaaaataaataatttttatatagtttaattaattttaaaattttaatttatttttaaattttcttaaacattcaaaatgattttttcttaagatcaatattaattttttaagagttactaaaaaatattgaatctttcttatttttattttgatggagtacgatttgatagttgtcaaagtttaaggggtaaagttgctaattgacaaagacacgtcatcatttaaacggaataatggaacgaaacctaacagaaggactaaatgtaaagactgtttatattaataagttagattatcaagtaactagggtttatttatgagatttaattattaattatgatttgcatatttgcggagatttatttaatttcaacatgtataaattatgctatacatatgaatttctcatttttctgtaattgtgttcagtagcggtggaaagcgacgtgggccattagagagttacgttttgtatgatttagaatgttaatagcagggtaccattgttaggcattggaagtatcggggattagtcagggttggtaaatgactaaactacccttggatggtcttaaacatttgaactatatttaaggataaaaaggtcattttattagaaacctttttttttgtcttttgtggacattataggctgaatattaggattgattttaatgaagtaagatgagttttatttattagagaaagataatagaaaaacctagaaaacctcacacacacacacacacacac

SEQ ID NO: 359935 - DNA, 339 bp, Cannabis indica
attaattagactcaacaagtactcttaattaataaattaaccctaaatcctatttcttcacatcaagccataacacagtaaaattcacaaactatacatagtctaattttagaattaaaattgattaactcaaattaattaactgagtcttacaagcagtttgtctcaactagtatggggaccatgggcctatataaccaagctcccaataagcagatctacctctcagttacatggaacactctatatgttccacgataaagatacgttattaattatccattgttatgatcccaataatcaatgatcctgtatagatgatttacatatcatagggac

SEQ ID NO: 359936 - DNA, 442 bp, Cannabis indica
aatcacgtaatacgcctatgctagttagggtgttacagggaaattttactagttggaaggtacaattacaaccaatagtggctttgcctactactgaatctgaatatatagctactacagaagctattaaagaggccctatggctaaaaggacatatggaggagctgaagttaatggaaaaggtgcctataatctactccgatagccagagcaacatctatttgtgcaaaagccctattattcatgacaggacaaaacacattgacataaaatatcactttatcaggataaagttacacatggacaaatcgggatagatgaagttcctactgaagtgaatccagcagacatggacacaaaggttgtgtccttcaataagtttaagctttgcttaagcttattggggattgacacaggttggtaatgttgggttttgtgccct

SEQ ID NO: 359937 - DNA, 1051 bp, Cannabis indica
aatttaatgggccaattatagttttaagggtgctctcatgtgcctctaacataatatatgattattaaccatcccattatggtagtgaacaaatattgggcacatagttaatgattgtgtttatggtattaagctcatgattatattagtccacaataataattctaacattctcccacttggacaatataatcaaccaccataacattgtctatcacacataaggtaaccaattaagacgtacataatatcatatcgacaggatacatgtattatgtatgaattgaccttgaagacatttatccattaacaatcattaacaatcaaactaaacatgcatgaggtacgacaaaattgagattatgcgcattcatctcgttttgtacctgtcacttccttgaacaacaacatatatgtataagcatacatatgtaataacaataaagaagtgacttcagtatcataatgcatgttcttaacaaaacacaagccataagcaatccgtcaaaacaacatgctaccaaaaatacacatatgggtaagcctttcgttagtgggtctgctaacatgccagtgctaggcgtgtattcaatggaaataagagactctgtaactttctctttaacaaaatagtacttttgtcaatatgctttgagcgagaagtacttctagtgttcttagagaaagctactgttgcagaattaccacaatataatttcagcggcctcgcgataaaggctacaacatctagtgctgaaatgaaattctgcagccatatcgcttgacaagtagcctcataacacgccatatactctgcctccattgtggatgaagctgtgagtgtctgcttgacacttttccacgatacagctcctccagccatcatataaatgtagcctgaagtggaccctttatcgtccacacatcccacataatcggcgtcattgaacctaactatatccagagtttcagctagccgataagtcaacatatgatccttggtaccctgaagataccgcatgacctcttagccgctttccaatggctaagt

SEQ ID NO: 359938 - DNA, 555 bp, Cannabis indica
aatattttaatttgtcaaaaatattatatttatatgaatacaactaaagaatcattgaaataattattattgatgtaattttatagtggggttttggatatccaaaagaattttaagaaaattgcattgaaacatcaatgtaagaataacaatgaacatgattaatgttatttaaacacataagatatgtatttcttgttcatcattccctgcagagaatggtagaaattgaatttatttaattttaaggagtgttcatattttatatattagtcatgttattatatatatacatgcattgttattacttacaatttttatattagaaactgtaaaatttattttatatgacatattaaatatatattatttaagattaaattttgcataaatcttgaggattatgcataaactatattcatatattctttgaaatattacaaaagaaattgctaaataactttttatacttgttaaacgtcattctccaaaatgaatataataagtttaaatattcaaggacattatttactactctaatatttctagaaaaaa

SEQ ID NO: 359939 - DNA, 628 bp, Cannabis indica
tccatttgcgattctgagttcaagtttgtgtgtgagctcgggttagagttcgagtcctggtgtgagtttgggttggggtccggattttagtctaggtccaattcaagctctgagtgtgggttcgcgtcctgggtctaggtctatgttgggtccaagtcccaagttccaatcccgatctgagtctcgatttagttctcggtctaagtcctttgttgtgatcctggtctgcgttcgagtttgggtccgggtgcaggtccgggtctagcttttggtctgattataggtgtgggtgtttgagtttgggtttgagtctgtgtttgagtttgtgttcaggtctggacttcgatctgggcctaggttcgggtctaggtccaagttcgggtctcgagtgcgggtccaagttttggtctgggtcaaaatctcggtcaagatctaggcccagcatttcgatctcagtctggttcttggtctgagtctaggttcatatccggatccctatctagctccaagactttgtttgggattgggtcaaaatccgggtcttagtttcggtctgggtacaggaccgtgtccggtcccgagttccagtctcagtttgggtctgagactaggtctgtgttcggttcta

SEQ ID NO: 359940 - DNA, 554 bp, Cannabis indica
tacaacggctccatggttgccagaaacaggttgttctgctggcaccgctggaactgcaacggcctgagcagcttgctgaggaggtacgacaggaaggccctgctgcctgaacctctgaatttcttcatcctgctggcggattcgctcttgcatttctgcaaacctctgttcccaatccggaggagcttgtggtggatttacagggcgaccaccctgagctctaccatggctacgtccgcgaccacgtggattctggggattttgatttccgtgaccacctccggtctcaaccatgttaccctgacttcttgtatttcactaggcgtccattttataggacttagcctgcgaacccataagccaggcaggttagacagcgatcataaaacttaataccgctgttatgaacttaaaggcaacacactttaaataaataattataatttaatattcttcctagcatgttttaataatcatttaaaatactaaacaagtaggggcttactgaaccgtaaaccgagctttctctaatgaagattgtacatgtcttagca

SEQ ID NO: 359941 - DNA, 991 bp, Cannabis indica
atatccacctaactcctaagatacttacggtataggtcatgtatttcctattttgtatctgctggaaatatgtacccctatgaagctaacacagaaagataagtgatctattcctagggatcaccccagataaacactataaaccacaaacacactgaaaaaggggccgaacattctgggtttaaaggaatcaaagagagaaaatatgagagaaatccaccaagaacattctctgtaataaatactctcattaataaaaaggactcgtggactgaggctcattaatgccccaaccacgtaaaaatctcatgcattgaactttctacaactcttcctacatattatttaattggttgctgaaaacctcagtcaacagtaaactattcgaattttaaaaaaaaattatagtgatattgtaactataacgaacaccgctattaaaaaaaattaaaaaaagatattccaacatgtattttcaaacgcgaaaattgaccaaaaaattataataaaaaattaatgatagcactcattttaaatttatttcacttaattgattcttttgataaaaattacctattacattttcattttttattcaaatataattcttagcttttgctcatcaagttgtgtatgtgctttagaaccttcacggtacggttgtggttaaaattattctcaaaccgtgcggtgcagtttggtttttttgagaatcatggggttccatctcaaaaccaattagcaatgagtggagtagcccatgttcttatatatgactcaattctctaccatttattctatgtgggacaatgtccacaacattctccctgaagtatgatggtactatttttttgctcattaatcttgtaaccgtatcaaagagtggttaacataggttcattatttgttataggtgtcagattctagattatgatacaacttagtcccgtactaagggtataatggctctgataccatgttgagaatcgat

SEQ ID NO: 359942 - DNA, 588 bp, Cannabis indica
gatcagtgtattctgcgtttatcccacgattagtgtattctgcatttatcccaagatctttctgcttatatccattgtaacaagttcacaaccctatatatagtgatgcatgttcactaggcaaaaggtcacaagcagtttagtcgagactttaccatagagatattatctaagaattcgtattcagagatactgttgtaagagctataagaaaaggaacctttctcattgttcttaagtcaataaaaataacgaggattaggctattaccgaactgctcggggctaaacctttataaaattcttgtgtcattatattactttattatatatcggttgctataaatcacttatcgcttactaaataagactcattgtcgttggctaaaatcgaggtaaacattttggtgctttcattgagagaaaaatcaagaatcgtttttcattcaaaatctaaccacaaatacgatgatgcagacttgtaggggcctggccgatctagcaaaatcacagatggtggatcctgcattgcagaacccaggaaacacaagtctatttataggcagaagaatgaaaaagggtaatcatt

SEQ ID NO: 359943 - DNA, 815 bp, Cannabis indica
aagatgtacgttttaggttttttttttttttttttttaaaaaagtaaaaatgtatatatttaccgtttaattgacaaaaggtactccagaggaacgccagggctatatcgctctccattcatgtaagccgcaagttatacatgttcttttgtggtaatcttttgtagcttctaaataatgattctacatttttggttttggtgaaaggggtgaaatgcaagtcgcttttgcctgtttatccatgagcttgtattctgtaaaaccctcaaaacaatgttaaaacattcctgttaatagaaattgtgttcaaaagccagacagatgcacctcggttgtgtagtctttttttttgaaattggggaagggggagtcaaatgaaacgctatgcctacgagtaaatgtatgctctcttttgttatagagatttagcctcaatgtatcaatttttttgtcttgttgttgttgcttcattgccattttggggaatgattaggcagtggcttattcacgagtgtttgtagtggactgtctttggtttctttcttggcttattcacgagtgtttgtagtggactgtctttggtttctttctttaatgggactttttgatctacccagaaaaaaagttactctgatggtcaaaggatatctataccaaaaaatgtgccaaagtgtctttattttatgttaattttaatacttattttgattttattttcataaatttttctaattcatgtttatatattttttttaaaaaaaactttcaatataatttttatttaattttttttatttataatatttaaaatataa

SEQ ID NO: 359944 - DNA, 718 bp, Cannabis indica
actatacttttctttggtttgtttagtaagaacaacacaacacaagtggtcaagtagttaaattaatacttaaatacatatatataattactaaaggtgaccttagatttttctaagtcttctaatttggtcaagtacatcaattcctgaatatgaaggtcgactaatattacaaaataattgacttaggaaaaattgttttataggaaaattatgataggaatgtctctattttaagagtttagagagatattttttgtggaaaatattggacaaatttaacattttctataagagttggctttctatgttattaaaaatagaataattagtattctaatcctctaccctaatatataccacttgttaaaattttctctaaaaatataacggttaaataattatgtctttgtattaggttttgtttgttttaccgttaaaaaattaatatttttattaccccttaaactttgattaatgcaaaaaaaaaaaaaaaatcatttttattaaaaaatttaattttaaaaattattaaaaaaacttaataaaaatattaaaccaattaacaaatattaaatttatttaaaaaacttaaactattttgaaaaaaatacttcatatactttattttaatttataaacacatattttaaaaaatcaaactaaaattattaaaaatccaatgaatattttaaaaaaaactaagatttttttaaga

SEQ ID NO: 359945 - DNA, 1080 bp, Cannabis indica
tatagagacacaataaaaaagtaaataaataaaagtatgcaaattaaattcaagttaaataacaaaaaaatcaattgtaattaagttaccttgactttgtctgtcgaacaacgccccggtccatgacttttgaagtaaaacttctaacctggctctctgaggcggtaagttgaggcacgaggatcatgtcatgagtctcgaataggccagcctgcagcatcaaagttggtagtaatttttcccacattgccaagtgactcttgaattcattcggggaaatcgatctgaggctcgagtcaaatatgttcaacaaccaatgatccagatctacctctagtgtcacccaatgccttgcactatcgaagtagagggccatatatattctctccttattcttccaactggccaagtattgaccttcatcccctcgaatcaaatctaatatgccctcatcccacttatagttagcgtggtcatcacccgcaacttcccaccgagcaataactcctgctggaaaaatacacggcatgatgacacatctatttgggtagacctctggataaaagagttgtcgcctcctcatcaaatgacatatcacatccaaatgctaaaacatgaaaattaaatatgtcagagattaaataaaaagagttagataaagtctctaaaagcaaaagaagtaaaaaagtcttaaaaacttacatcgtccccaagccatgacctcggagtatgtagttcgaggaaccaaactgaatcgtgtctaccggtgaagcactctctttggtacttgttcccaatctggacgagtacccaactgtgaaaaatcctgagcagcttccgatcaaccactctaagtgggtccgcattcatgagtgtcaaagtagccctagacttatttttatttcagtgcactcatcgaaccatctaggccgctttctcttcctctagttctccacgagttctggagctgtctctaacacctgtacctcagaatcctgagtatccccgatgctggtgatattcgtcttctcaggtgttcaaacatgtcatcatcatccggtttgtaatcatttgggagaa

SEQ ID NO: 359946 - DNA, 512 bp, Cannabis indica
aaccaacaaaatgctaagttggaaaaagaggctgcagcggccagggcgacacaaggagcaaatcctcagaatcaacctgatcctgcggtaagaagaccacgaggcgaacctcgagattcgagaaccaggagacaggaaacaaaccaaggaaatccctaaaacacctaggaagagcaacctgggggtacaagggatgttccaatgataatcagacaaataatcaagagcaacaatgagacgttcctcaaggatcccaaggatttatgaaccaagggaacgaacaaaatgatgtactagaagcttctcgcatgaatgaggacgcgagatagcctaggcctgggaatcaggagattccccgtggtaacgagagaaaccctagaaaccaacccatgataatgttggaatttattttaccaggatcttagatctactcacaagtatgttgattaacacctaaatatgaacttctaaaacgataataaataaacacatgtcaagtatgagaaacctta

SEQ ID NO: 359947 - DNA, 667 bp, Cannabis indica
ttcgccatgagggctatgttccatttcttcccgttctcgaaaacccagaccaccagagttttttagggagacaaaactcttctcccaagaagggatatgcaacttgcttctgttcccattggagccccaaagaaagtccctgcaacatttgtctatagccgccgtgattttctgaggaagcataaacaaactcatccaataatttctgataccaagaagaaccgagtgaatcagctgagcccttcccgcaaaggaaagatttctactagcccaagtgtgaaggtgtttatgaagcttgtctataatcacaacacaatcatcagatcgccatttggttggtctaagcttcacaccaagatacttcaacggaaaagaaccctcctccatttgaataacattcatcagtctcctcttgcaagtagttgagatgcccccaaagtacactgaagacttagatttgttggcaaccaaacctgtagcatcgctaaacaagagaaaagcctttttcacaagctgaactgagttctcgttacccttgcaaaaaattaagagatcatctgcaaagcaaaggttgacaagacctaaggcaatgtttaaaaaaacgcaaatgagccttgaggcgcttttttttttttgtaaggttgaggcgtaagcctcgaggcgtatg

SEQ ID NO: 359948 - DNA, 650 bp, Cannabis indica
ttatgagcttccaccattgtttgataccttgtaagtcttactctttgcagccactcttggggtggacgttactaggaataaaaatacttacaaataatacttatctttcgagatttccacgacgtttaaattactaatgaatgttcatccattagggattattactcactaaaataggaactatgtagaaccaacaatggagatcgaatatccttataactaaagcttcattattttaaagattgtattttcatttgatacttattttaatctatttattttaatatatatttatttaattaaaattacttatttagataactctaaatataaattttgatttaatatttataaaattataccctaggaaaatctgaaaataaaagttattttccatctttagtattaatttttcaataaatattatgaaaattacataatttatgttggtccaaaattaattaaattaattttcaactcacatttaattttctttaaatatatatgacagaattcgaaatctaatgtattaaaaaaaataaattttcgaaattcataaaataaaataagactagaaaaattattctaatttatgttggtcgaaaattaaataaattaatttttaacatagatataattttcctatttaa

SEQ ID NO: 359949 - DNA, 564 bp, Cannabis indica
caaaatttaaattttgtttcattaaaaaacaatttctgaaacttaaaatatcacaaaaataaggcaacacaagggagcatgcattacatactccccgcgtgtgtgacaagggagatgtgtgagaggaacctcagcgtaggcatgcttcagataggatttgtctaagaaacctcggtggagagctttgtttgaagctcaatcatgactgaggtgcacttagctccgcacatgtaccctaggttagatattttatttttaaacttcaaaaaatcataactaattcaataaaaatccaaattgagttttataaaagcctaattttattagttttttatataatttctagaaaaaatactcccagtacaaaactaaatatgtatattgtcgaaaatttgtaaacattcatcaattaagcatataaaccaatatgaacacatccaaatcatcaaaattataattttaaatccatatttcatgaatgttaatcattaccatggctttgaggctagttgatagaagttattttaccaggatctagatttactaacaagtatgttgattata

SEQ ID NO: 359950 - DNA, 1043 bp, Cannabis indica
atatattacatctaatttataataataatattattatttttatttaatgtgtcacgttaattaactttaacgttttgtgacgttttccattttttttttcattttcttgcgttttaactacataaaaaatttcattatcttatcatataatttgagatatattttggttacctccaaaacttatttgtatataccttagtaattaattagttattttaaaattatattataatagtttataatttaaaatacatttaggtaaccttaaaaattattttcaaatataataagttgatatgcaatataacaaactatcacttttatatactaattattttatatacttttttttgttattttgaaagctaataaattatcgtataatataatatgatataatatatttaacaaaattctaaaataaatgttaattaatatttaaaaaaaattgtaaaatagtaactaattactatattagtaactaaatagtttttttttttttcagagaatagcaaaaaaaaaacatatacttccacatcttaaaatattcacattgaaaagtaaatcacaattttattttttttttagtaattaactgagtaacgacgtggttataaattattttaaagtttaacaaaaatagagagaatgagaaagaaagatgaaatagaggaatgtatggatataaggtattcagacatacccaaacaaaggaaagcgttattaatactttttttttttttggcaagaaaataaattcatgttattaatacttgaccaagttaattttttacaattagatcaaaaaaaaaaagtgtgaaatgtaaaaatccctaaatagtatatgttatagaacaacaatctttcaaccgttagtgacttttgtttaagttaaatctaacaattaaaattataagagaaaatacttaatttaaaaaattaatatatatatatatatgaagggtaaataccattttggaccctctgttttacaaaagttaacaattggaccctgtgttttgttaaatgacaaaatggatctt

SEQ ID NO: 359951 - DNA, 547 bp, Cannabis indica
ttaattttatactttaattagacaacacaaagtaaattataattaagaaacaaataataagataaatagaaaaataaatagacaaacaacgatttttaatcagaaagtaaaaacctagagcattgatttccctatttcaaactatgaatctcaatttaccgattatcccaatttatcctataatttgtagtttcaagaatcctaatgtaacctattaacctctctcgagcgatgatagatttaacttagaataactaacacaatatctctattcaatgttaatcaaataagcactcataaagcaatatgattctctttaaatgaaacacatagaattagtggaatctctcaatctcacacttttcctatgtcatgcaattctaagttcaattttagatttcatctctcaagtgtaaaacctaaaagctctatactaattaatagcgatcaagcattaagaagatgataattagcagaaaattgcataaacaaataacaaagaacaaatacggaaataatataaaaacttaaattcataatctaaaat

SEQ ID NO: 359952 - DNA, 601 bp, Cannabis indica
atggatgcatttggatgagtttttacaagttggagcttgtttggggaaacctggttcaaaccgaccaggcctgtaaaaccggctatcggttttggcaggatccccgaacaagccattttctcaattctcgtccattccagtgtcgtagttgggtgtttccctctttcctgagcttgtgtgatccgtagagagtataacagaacctagggttgtgggttcgggtttcccgaattagggttttaatcatgtgatttacccgatttcattacgtgatgagggcatccatttagcgcaagactttccgttcaggtcgaccaacacacttgaatctggaaagatgataagaactagatataatgtgtaatatgaatatgcgaatgtatgtatatgcttagtatatatgcatgcttatatgttgtgattcatacactaccaacacttgtacggctgcggtacaaagtgcattggtaaagtgtatgatgtatgaaagtacatcatggtgttaccaacacttgtacgggaaggtaaaaggtgtttgtggtacaacacttaatagtatccaaggtgcgatccataccctacctacactagtacgaaggta

SEQ ID NO: 359953 - DNA, 1357 bp, Cannabis indica
tatttaatatattacttttttaattataaatacattatacacactaaattttaaaaaaattaatatattaatataaatatagcctaaacattaaaaatttaaaattttttaaacctaaaaaaaaaaaaattcacactaacttttaaaataataaaattataattaattaaaatgcaaactctttctaatacattaatattatatatatatatattcaattattcaattttaattaaaatattatatatttgtttttttgaaaccatacaaaatatttttataatactttactattaaattcttttattattattaaaaaattgtatatgtttcctaattttaagttttaattttttattaaataattatgatagcattgatgctactgtatagcatccccataaatttctagaatgacattcttttcactccaatgatatagcatctcaccattttgccacatcatttatccacctaagcaagcattctcattttttctcattttttttaccattggagatgctctaatgagttatgcgtatttgctgaagggagtagaagaccagggaggacacatggcagctgcagaaaatcttgctttaggcggagtggacttttttcttgtttacttctcttttttttttttttttgtaaaggaaattcaactttatttaaccttcaaattcagcaaccacacatggaagcaaatcagttgggacattccccatactgaaaatacgatcaggatgtaatatagatgctctagcaaattcatgagcaactacattagctaaccagcaacagcatatgattcttcatcttcaagatgtactcatccaattcttagaggtgttggtcatgcatatgaaattgcattggatacctactttactttatttgttttaattttttttaccttcattttcatattctttaagataaaccaatttttatagatgatatccctattataccccttaaattaatgtaaatcatgtgttacacttaagtagagggtaaggatatattagacaacccactcataaaagtgggtagattttaatgaaataaaatatgaaggtatttttgatttatagatacaaaaaaagaggtattcctcaatttatccccttgaatagtggacatggcccaatagtaatagtttctcatttaaatgttaatgaccaacacctctaagaatgtacatagccaattcttgatttgaaagtttgtgaccagcaaccagggccagccctaggcataggcgggccaggcccgtgcctagggcccacatttttcgggggtccaaaataaaaaataaaaaaaattattagacttttatttaagtaaaatttaa

SEQ ID NO: 359954 - DNA, 662 bp, Cannabis indica
tcatcctgctccaccagaagtagggtttaagatcttggttcatcttggtggtgccaggatgcaaggagtatggagtggtatgagcctcttcaaaaatcacgtttctaagttccaacctatttggaacacaaaccctggtcttaaacaacaacattccactatctgacactgtaaaatctctagcttgaccagttgaaacctcttccttgatcttcactaattctggatcagttaactgagcagctttaattcgttctaacagatcagattgcagcgtcaagttatgaagtttgcctacaaccaactcaatgcttaatatgaccatgtcctatgctagctgaggtgaaatctgaatcatactagttacctgcccgggacccctccttctcagggcatcaaccactacattggccttcccaggatggtaaaggatttcacaatcataatccttaaccaactctaaccaatgcctctgtctcatattcaagtctttctgagtaaagaagtatttaaggctcttatggtcagtataaatttcacatctctctccgtagagataatgccgccaaatcttcaaagcaaacactaccgcggcaagttctagatcatgagtcgggtactactgttcatattctttaaactgacgagcgacataggcaata

SEQ ID NO: 359955 - DNA, 532 bp, Cannabis indica
atgattatttacttgatgtaattaagaattggtagtcctttgcttgttttggtggctgctggtttagtggctgccgtgagtcttttgtaggcttttgccctgtttggttgtattttgtttgttttttgaataaagtttcctacttttttaaaaaaaaaaaaaaagtgtaataaacatggtttattaattatcatttatcaacaaattaacccccaaaatatatcaagctatttaatagagctctcatttcaaacttatagtcatcatatttttcatgatcatgatgattttgttgaccttaaaatataaaaagacaaaagttgatttgtttagatatgtatattcctaaatgaaaaaaaaaagagtattgatattaagtaccagtagtgtttagtacttttttgatatatcacgttgcgattaactagcgaatactttttaaaagttattatattaaattatgtgggactcaatacttatagttgagatactgacacaaaagaaagtactaggcaccactaataccctttag

SEQ ID NO: 359956 - DNA, 486 bp, Cannabis indica
ccttgattttccaaaaacggtcaaaaaaactcagtggcagattaaacaaggaggagtcaaataaagtgtattttcacctaattctttttagatgtagtattttataaattaattagttttatacaactgtatataaaataacgaaaaatgctaagggtcaccttatagtgtcaagtactataaaatgtggcataatattattagtgtaaaataatattaggtctcaaatattttaatttaataaataatataaaaaagcgctaaccaattgtatggtgctacttcgatatggagttggacactataaaaacacatatataaagatacatatgaatatatatcatacaaaagtactcttcaaaaataatttatattactcatttttttttgtcactttttgccataaaatagataactaattaaatgggctattgggtttgggcatctcttttaattttctaacttcacaatttattattaggctta

SEQ ID NO: 359957 - DNA, 1021 bp, Cannabis indica
ggtaggggtcttggctattccaataccatgtgttatctaaccttatggacatttgtgccaaattatgagctgctgtattcccttgccgccgagtgtggtgaagggttacagtggggagcgaagataacatccgtcgaatagcattgattatggttccatagcttgaaagattttcatgagttgattgtaaatccgtgaggaggtttttacagtccacttctatatgttgaatgttgagtccattgtcacggctccatttaagaccttccaacaaaacccagccttctgctacttgaggttgcatttgtcccattcgattgaaggctgttgctgcaagtacttttccagtgtgatcacgaactagagccccacctcctgttctattctggtgagtagatactgcagcatccgtattgagtttgagggttcccactggtggtggttcccaagccaaaaggtttaggtctgtggtagattgggtctgtgtcctccgcttgtcttgagctgcttgataaaagtccaaatagtcttgagcttcttgttcaatgcgcattggccttgagtcttggttcctgaaaacagctgcatttcttgcattccaacacttccataacatacaaagaaaaaggttaaaggcatctttggaaaaattaagctgtatgtataaaatgatatctaacatgttcaagtgtttggtgtccttaatggcagagttgaaaaacgtacctgaccaagccttcttcataaatctgcactcaaacaaagcatgttgcaccgactcataatagagattacatctaggacaaattggagagctaaggcagtgcctatgataaagattttcagcagtaggaatggagttttgagcaagcctaaaaataaagtgcctaatcttagggggtattgggagactccagagggatttccacaaccgggtgagggtttccatgtttgaggaggaaggttgtgtcaagttgttggcttgttttgcaacatggtagccggttttaacagaatagtg

SEQ ID NO: 359958 - DNA, 723 bp, Cannabis indica
ttttttaatttgaaattcatatatttatttttaattacttttattttctacttaacacaataattgtagttagaaaagtacaaaatatttgagttatttaatcctacaataataaatacaactaataatataataatggtgtaagtggtaaaattattgtatatcaagtaccatgacatgagttcaatcctttcaaaagatatgatttctttttaatttaagattttaaattaatgtagaaatttttgatttttttttaatttttttttctatatagttcattttttttaatatttactaatatggaacaattcttatactataaattttttaaagtttataattattgtggtggaaaatcttaaacttttatttgttaatatatattgatagttgtattacataaagtataatagtgaacaataaaataacacatgcaatataataataataataataataataataataataataataataataataataataataataataataatcaaataaaaagtttgtcaaataaaaattgtgtaataaattttgtcaaataaaaaaaaaatacattataaataaatgaaaaattttgtaactaaaaaaatatctaaacgatttcgatttaccatcgatctcatccaaattttattgtttatgaaaactttaattataaggtacttcaaatgtactataaacgatcgaattgctacccttgtaaag

SEQ ID NO: 359959 - DNA, 672 bp, Cannabis indica
tatacgtggaccaaccggacagggacacgtggatcagaacatcttaatgcttgaattatttgctaagcctttgtgatataaggcagcatccgagacatgcctcccggagaaggcatgctgagccccatacgctcccggatgcccaagtaatactaaggcatctccgcgaggtgtcaggcttcccctgagcagtcaattcgcatttaatgccgcatgggaggaagcgtgttgggactgctacacgcaataaagtctgacggcacaacccccaatctcagctgcgaagtaatgatcatttaagtctattgacggctacactgtgaagggtcacatcagtcgaaagacaataaggacattccacataaaagccctactgcacctagggacttgaccatgcattactcatggtatattcattgggaatacccatctttatggattttacagatacacatgtacaataatcctggggattaccccaccaaaaacactataaataccccctaaaagctcattaaatggggtcgagaattttgggttgcataagagcaagaagagtaaatactcaccaagaacattctctgtatttataagagtaaatactcaccaagaacattctctgtattaaatacatccataaataacacagactcgtggactaaggctcattaa

SEQ ID NO: 359960 - DNA, 524 bp, Cannabis indica
tttctcacaccgatcagtctaaacaaactttaaattctttcaagtcagttccgttaggggtaccgcaatctttgaaaaaccctcaacgaaccgacggtaatacccagctaaacccaaaaagcttctaacttcagtagccaattttggtgttggccaatcctgaacagcttcgatcttggccggatcaaccatgatcccatccttatccactatgtgccctaggaaagagacatgtgataaccagaactcacactttttgaacttagcgtacaggttgtgatctcgtaactgttgcaatactgatatgagatgtagttcgtgttcctcttctaatttagaataaactaaaatatcatcaataaacacgatcacacatctgttcaggcaatccttgaacacccgattcataaggtccataaatgtcactagggcattggtgagtctaaaagagatcaccagaaactcataatgtccatagcgagtacggaatgcagtctttgggatatcttcctctcgaattctca

SEQ ID NO: 359961 - DNA, 918 bp, Cannabis indica
atatatatatgatccaattaataaacaacactaattaatctcatctaagaacattaatattctattttcaaaatcaactccttcttttatccaaaattaagagaaacaattgggcacaactattataattaagttatagatactaaagacttgcagataattaccgtgaaaatataaaaagatccagcagtataataatatagtgtatatttatctaagccagaaataccataaaaattccatagctttaaccaagtaaaccaaaaacatttattcaaactagttcatatatactcagatttggtattgttggtctcatatgggctttcaagaagtagaaaacagatcaaaataagcaaaaaagaaaaatttcggtgtatgaaaaaaaagaggcaaatccaagtatgtgagttttaacaaattagctagcaaggtgagcttaaatcctggtcttgatctcttttatcttgattcattaggaaaagatctagagcaacaaccaccatatgagccttctccttgtctaaagaaaatctctaaaagtgtttcacatcatcacaatatcatagcataccaaatgattctattacattacctgagggagagaagtctgtccaggaaccaatgatatctaaatttgataacatcagtagtttttctgttgagaatattttaccagaatctagattaacaaacaagtatgttgattaacatcctaaatatgaatatctctaaaacaataaaattaaacacataagggtttaagaaaaaccttacattggttgcagtggaatataatgactccttccgcttagatctctaacacttgttcctttctgtgttgcagagtattatcaagatctgggcctggatctctttctctctttcgggtttggttaccatcgtcttactcactat

SEQ ID NO: 359962 - DNA, 553 bp, Cannabis indica
attgtattgttccattttgattttagttaggtccctcattctatttatggtgtgattgcttgatcatataaagaaaatttagtgtacctcccgctaccccaccccattattatgcaagctttatataataaattataaaaagttgaagaagaaaaaggttgaaagaagaaaatatatgtataaattctatcatttgtaattgtgttatctatttctgcaggtctttatctctttgtgcttattaagttagatttgtgttatatttttattatgggatcatgaaaattaggttgtttattatctatgttggattattaggttttgaattatgtttttttcatatatttttttcttttaaatgaaaccagcctaaatagtggctaaactggattggatccatggatggatccaatccaatccaataaaaaaccagttaaagcatctaatgaatggaaccgatctaatccaatacatccattgaatcggattggatgactaatccaatatccaataaataattggatcggatcggatgggatgggtccaaatccat

SEQ ID NO: 359963 - DNA, 981 bp, Cannabis indica
ataaaagattttgtataatgtactatacaaaacgtacaatatatgaataaaggattgtaacgactcaaacaatacaaagacccaaaatgtcaaaaataaaagcttttacttaaggtcatagaagtacttaagatctaataagtatgaagtccatactatttttctttcccaaaacacgatcttcaaaatcaacccaaggttaggtaatacgtcaacgcaaatagattttgacgctcactgctattgtaacgccctaaataattaggcacgctacccaaattatttattaaaccctaatcctctaaacgggattactaataaaaaatggcgcgaaatttaaactttaataacaataggaatgaaaataaatttgtaatactttaaactttataaactaaaagttacagatgttgggatcccaaaaacgtttacaaaatattattacaagtccttatctttcagccggcctaagcggcaaaacagagttttaaaaacacaacactggtagaccccaactcgcttggtctgatatggcccagacatgtacattcttcgtctagctcttgcactcatggttgatcagcaatagtcttaccttttcctgcacagtagagcacccgtgagccaagcccagtaagacagtataaaatatcaataacatgtttatcatactatataaacaataatgcaaatctcatatgcctgtatgtcacagacctgcatgttacgctcacacgcctatttatgtctacgtggcgtagacctacgtgttgcgctcacacgtctaaatacaataaggccttagaattctcggttctggttactaagtgcaacctgattatgccttgaacgcataatccttaatctcaatatatatattacataattaatggtgcgactgcactatttgtctatttgctataggcctgcgtgttacactcacacgcctatatatgtctatgtggcatagacctacgtgtt

SEQ ID NO: 359964 - DNA, 572 bp, Cannabis indica
attgtcttttatagatgacttgagttttggggaggcgaacactatatggactaggatctcgttcatcttttatacgaggaccaacctcatcttcgcgctagcttttcctcttcaagagatagactttctaactcatgctttgaagattgggaggtgagtagtgaaagttcacctactccagaacccgaggtgaaacatcacttttactctgagcagatcgcaggagaaggctacggacgatttatttgggagcttaggaaggggtggagatgttacttcccatccaactggacctatatcgtctggcgtggtgtcgctgacactattcttgtaggctgtccaatttctgctgccttcgtcattccaattgccactcctatcgtgactgttgcgcgacacacacaccattacccgtcaagaaggaggatgatggcccgcacaaaacatacgatgcagataattaatgcaactgaccctcacgtggcccggcatgccatatttttgagtgtcgaacagcacctgttcgctgcagaggaggaggactatgagggggatgttgaggtccaggagat

SEQ ID NO: 359965 - DNA, 515 bp, Cannabis indica
  modified_base (15)..(15): a, c, t, g, unknown or other
tttttaaggggggtncatttgtagaatttttttcaattactattttggattatttgaaatttttataaaagtttaccgattagattttctagtttgttaaataatgaattggactctatattttttcaaaataatacaaaataattctaagctcaatttaacaacttttttttttaacgtaatcagcttgaaaaataatttataacacgaacagatacgaaagaatataattaatcttatcatacattattcttaagttttattctaataaaaatcattttagggtaatgttttatacaattttaaaaaatagatagtctaacttgtcattttataaaacaaatggttcaatcaataagttttgcaaaatactgagtctaaaatagtattgggtgattctataatgcatccccttaaaagggatgtactgatgcacccttaacttgtttcggcatccagaagaattttttagtctaattttttttcatattcatgtacggtatagctatttaaga

SEQ ID NO: 359966 - DNA, 866 bp, Cannabis indica
ggatagggttatagtttggtgtatgggtgcttaactgtaatctgggttatatttatgattatgattatgcttttcttattgagtctgccggctcacagatattgtttgcatatgtaggtaaaggcaaggctaaagttgagcagctgtgagagcgagcggataaagattgtacatgtcggggtaattagacttagagcatacgatctttggaacagctggttgcattttgtatagttgctaggcgacaacttttgtgtttagtattttgaatcagttgtaaatattttaaacttgggatcccagatatataaaagttagtttattttaatattgttagtaaataagtaaagttttaattattcacaatttttaataaactcgttgattagcagcaaactgcacagtcaatataaaatcacgataacacgcctaaactagtatggtgttacaatttggtatcagagctgccatgttgtgttttgaagatcgtcacgacatgtacaatcatcatcagagataagctcgattcacagttcagtaaacctttattgctttagtattttattttattagtatgttataagaaaagcctgataggaagcatgttagtggcctaatagctaaataggcatatgttttaatttttaaaataagcagtaattagtaaattattcttgatcgcgatcttaggggtgagcataaaatccagaaaaccaaaaaaaccgttcaaaccgacctaccgaacacagttggaaccgaaatcgacgaaatcgaaaaccgaaaaaaccactaacagttaaaactgccattgaacgatcaatttttttttggtaataaaccggccaaaaaaaccgaaaccgaccgtt

SEQ ID NO: 359967 - DNA, 1198 bp, Cannabis indica
gaagataggccgacctggaaactacatgtagacggctcagctacagatcaactatctggtgcaggaatttcccttgtcacgcttgggggtcaacacctagacgctccagtcaagtttggatttaaagcatctaattatgaagctcaattgctggcctaaaactagcccgggagataaaagctgaacacattgaaatttgcagtgattcacagctggtggtaaatcatgtatccggagaatacgaggctcggggagaaaagatgatagcatatctgagcaaaatacatgatctgcttgcacaatttaaaagctatggtcttagacagattccaagggaagaaaacacaactgcagacgcgttagctcgattgggaagcagtaatgtaagtgacaaggcaaacttagttcctatccagttcctcgaagagcctagcatcactggcactgaagaaatcaaaatgattgatacttccccaaactagatgacaccaatagcatcctacctcaacactggaaaactcccagataatcggaaggaagctcaataaatgagaaggaaggctacacggtatatcatagtagagggaattatgtacaggaaaggattctcaatgccattgctcagatgtgctactcaagaagaagccgcacgactcctatctaaggtgcacgacgaattctgtggaaatcatgccgccggacaaagtttatctaagaaaattctaaggcaaggtgacttctggccaacgatgattgaagattcaaaagcctatgttaagaaatgtgacaaatgccagagattttcaaaaatacctcgagctctaactaacaagttaactcagatgcagagtccgtggcaatttgccatttggggaattgacatgatcagacaattacccaaaggcaaaggaggagtgcagtatgcagtggtagaggttgattacttcactaagtggatggaagctgaaccactcccaaccattacatcaaagaaagttcaagactttattgtgaagaacataatctgccggttcggactaccgtacaaaatagtttcagataatggcaagaagttcgacatccaatccttcattgacttttgtgcgaaccatggtatcatcaaaagtttctgtgcagtggcacatcctcaagcgaatggtcaagttgaagcagtcaacaagaccttaaaggatacact

SEQ ID NO: 359968 - DNA, 833 bp, Cannabis indica
agtagctcaattttttttaatttactatactttttacagtagaatatatatatatataaatgtttgagctatatttatcttatatatatatacctatttttactatatatcaaattataataagaaaattttaatattaagatgagttcacatggtgtgtctattctacaagtatatatatatacaatactctatatgaaaaaagaaaaaaaaaagtacatgtaaataccacaatgaaaatttaaaagtatttcattacatgtataaatatattacatgatttattggtgtatttatattgataaataatataattataataatcataaaaaaattattattttttcaaaaaaaaaaaacaattaagttgtattaatttttattctgaatatttttttaaaaagaaaaaaaaacttacaattttatataaatattaattgttattttattttatttcaaaatatatgtatggttttttttttcttttattcttaatgtggttaattattttataaacaaaaagttagtagattaattatgttaaaagtagtaatggtacatttgtaataacaatataatatcacaactaattatgaagtaaaaataactgagggtggtgcggcggctggccgtggtggtggggggcgtgtgactgaagatcttcatggagttaaggctatcccaaagatcatggatgttgattgtgttgaccatgttggtgatcatgatcccatgactttagggaagagtaaaaagaaagaaataattaaggaaagtgggagggagattatgcaatcggctatagatggaaattctgaatttatggaaagtga

SEQ ID NO: 359969 - DNA, 1136 bp, Cannabis indica
gggaaggaccatatcttatcgcagaaaaggttggtgatgcaacgtaccgactcgcagaactcgatggtactgcgatttgaagggcctggaatggcgagagcttaaaattttattatcaatagtactcgcattgtgtagtttatactcactatgtatttatacttagtcattttttataaaaaaatcctaagtatggggggtatataccactatgtactattgattagtaaaattatgaaagttatgaaatttctcaagtttctgaaattttctaccttaatacttattacaccaagctgtagttaaagtcgcaatcaagatattataaatagcaaaaaatgcgagtacccgtgtactgcgagaatgttatagataaagatccctgagaggatgtaaagtcgttcaaaagaaacataaacacaaatttgttcgagtacaaatcgtgagtacccttataccgcatatatatataaaaaaaaagtctaacataagtaaatattaaagaaagaagttaagcattgggagcagtaggggcagatccatctgcgactttgctgatagcttcgttctcgacttcctcgacgtccgcagcatcagcctcctcgggaaacaaatttcctccaccgccttgagtctgcgtaggcggcatggcttgaaaggcctcggccatctcagcagcttctgccccaagaattgagaaatcaaagtccggaattttggaaaggatagtgtaaatgtagtcagagaccgcctggtcatactgcttcttcccattatccttctcgacctccaagtcgcgagacatctcctcgaccttcgtctgagagttcttggcttcgatctcgacttgcgaaggtcttcgagctccttgtccttgtcagctgcatcctgttttagtttctttatgctctcctgaagctggacattctgcctcttcagcaattcagcttccttagaaccaccagtgacggctctcatgaacatggtcatcgattgcgaagccaactccacagagcgtggaacaagcttttcagaaggaatcctctccaccttggacatgaactcctcgcccgcgaacttctcctgcatgtcagaaagtcgcgggttcgaacagctagctcgatcatgaccttctt

SEQ ID NO: 359970 - DNA, 685 bp, Cannabis indica
caatttcttaagagaaaaaagaatgatatcataagtaaattatttataaaccattcatccaatgatatactatgtaagcaaattcgaaatgaataagctaagaggaataagtaaaggataatttcgatttaaaataagaattcaacgatgttccggtaggcgagagcaaaagttattcttattttataaagggaaatttgattttctatacttacatatacctaatattttattccgaaactaatacatatcaatattgaaaatatatgaccactttatctaaaacccaaaaatacccctctcaaatttcccatactttttttagtgaaaaaacataaaaaaaaaaaaaaaattggtagtccgatggtggtccgatggtcacctgatcctattttcctatgtagaaaaacataaaaaaaaaaaatggtagcagatctggttcgatgggtggtctgatgggtggtccgatgggtagtccgatgggtggtccgatggtgtaaatgggggtgatgtaaatgggggtattttagggatatcataaaagttgtcatatcctacaaatataagttattatttgtttaagaaaaaaaattttaaccaaatgtaagcataaaaatcaaaattccccttttataaatttcttcattgtttcatattgtaaatacttgtctaaggtgtcatctat

SEQ ID NO: 359971 - DNA, 527 bp, Cannabis indica
ttcaagaaaattctaaaggggtaagtattagggttctcacttatcttcttttcttctcttataaattttcttatttttttctttggtctactttgatctaggctctttaagccacaaaagatcttcaaaagtgagatatgatcaaagaaaaaataagagaatttgatgtctccatgtctgtcaaattcttcataaaagtatgagtctattttattttttaataaataaaagtatatttcatttattcttgttcactcacataaaactcatttctaccacaaaattaagaaactcacaaatttgtttttatgttggtatcttttaatattttgttaaccaacatgttagaaaacaaaataattaaatgttctagttataagagctaatcaaaattaaaattattaatttcgtttataatattcgagctattttttttagtatctacttatccttttatttgtaaatagatttaaaaagaaacaaaatcctttaaaaggttatatatattgggtgactattcaatggtt

SEQ ID NO: 359972 - DNA, 522 bp, Cannabis indica
taaatacaataaatgaagaacagtttcggcccaatttactaaatacagcaacttatgcgacatctatagtatgagttgcctattcataatctcgcataagctcgcaggcttaagatgcacacaagactagtcgagtctagaatgtttgcatcctgtttgagtcgcttatacgcacatcctgtacgaactcgataacttaggacatgcgagtccttatcgggttatggaggttgttaggtcatccggaccagctcgctgagtacaaaagcgatcttttcctcttcgcaggaagacctttatagtcctcgcatatatcttggcatatgcgagtcttaaaccgatcttcggtcctgctccatgcgatctactcgaatgcgactagacactgtcaaggtcacatcatcccgctaaaattattattggacgttagatcaaaatctaatagtttaatatttttaaaattaatattaatatatatctttttgtagtaattatcaatggtaatatccattgtaagaaaac

SEQ ID NO: 359973 - DNA, 575 bp, Cannabis indica
atagttaagttagttaaagactaactaactaactgaatgtaagttgggtgtttaaagaattagaccacaaatttcaccttatttcttcaagccccaacaagctaagcatatatgtccaatggaggtggtagtggtatcatgtgtagctacttagcaactaaggttgagtaagtccaagaaatgcttgaacttactatcatgtaacaacttagtgccaatatcaactaggttctcttctgacttcactttctccagctcgattacttcttcttcttcttcttctatcttctctcttatccaaaacaaccgaatatcaatgtgttttgtcttctcgtgataaactggattcttgcacaaataaatcgagggattggatgacaaaatatacccttgcctttccaactagaagcttcaactccttcaaaattccttgtagccatattgcttctttgaatgtctctatggtcgccataaattctgcctctgtagttgaaagtgctactatggattggagctgtgatttccaactaatgcaatctccattagtttgaaacacatatgaggtagtagacctc

SEQ ID NO: 359974 - DNA, 666 bp, Cannabis indica
atcttgttcttagctttctggaacatcttgaatcgtccaattctgagtaatatcgagagagttatggccaaaatactatcagtcgtcgcaataagaaatttctaagaaaaagaaaaataaaaagatagctaaaaaaaagatagcttttcaagtagagttgcgatttttttattttgttttttaaagatgagttatcttttcttttagtgagatatttcataatactatacatagaatcctaagtctaaggagatgcatctatcttttcaagcactataaatagaatcctaattctaaggagattcatctatcttttcaagcactataaataggacctcttaggctacgaatttatgaattctaaagcgacaaattagagagagcaaggaagcgacggagatcggcttcgaagtgttcttcattctagttcttttcttctctttctattcttattaatattatgatttccattataatgtctaatttagagtagttttcttttagttaagggttatttaaaaacctgaaacatgaattcttaattttattattaaatgttaatttctaatttccaccatatgaaattgcttctattttttctatgtcaatgctatgattattgttttaatcatgtttagattgtcactaaattatgttttactttaa

SEQ ID NO: 359975 - DNA, 524 bp, Cannabis indica
gttgtaaacttaattcggtcctttgcatactttccttttttacgtagatagtaaaaaatgatgtccaaatgctaaaaaaaaaatagacatgtcaaaaattcagaaaatgaagtatatatcaacaactcaaaaacaaccaaaaaacattatgaagaaaactatctactgacaattttacaaaaagaaataaaaattaaaaataataaacttgcagaattagttaaacattggccaggatatgcaagcttgtggaaccacatcttggttgcaacatcttccacgccaaaacgaaaaggggtaacaatcttatccttgcccttcaagtaaacattgtccttgtcatggctaagagataaaaaaaataataaaacataaatagtaaggtaaaaaaaacaaaataaacaaaaaacacaacaaaagtgctaaaatgaaacacttactgatctttctttgagcgccgaccttcaccaagccacaagtcaaaatcattctcgtctttatggtctacatcttctccaatttta

SEQ ID NO: 359976 - DNA, 767 bp, Cannabis indica
tattaccgaaaatagaaaaaaagtggaaaattctcgtttccaaaaattttagtgttttgcaagttttaaaaagagtaactttttggttgcttttgatgtaaataatatatctattagttactatttatttaaaaaaaattgtttcaagataatttttttctcacatacgtttagttacctattttaatcatataactttaaaattatgattttatttattaatttttaggctatattatgtgttattttattatttaagatactttgagcttacctttttgtttagcaattttaaaccatattttaaattatgagaaacatatatattgttttagatataaaaaaatatgaacaagataaaagtaacatttccctttcttttataaattattaacaaagaaggaactaaatattatatttgaacaaaagaagtataccatctaattttatgggttacaacaataaatattataatatttcacatttaaaagttttctaatatctaaataaatgtactctaaataagtaacactaacacatcttatagagcagagaagaggtcaaggttaaaaatttagtattttataagttattttagaaattagttggtatttgaaaattcgattttctagtaaaaaaactaaaagattatttctgattgtaattattttttccgacaacggtaagaaagtatatgcttctcattgcggtgatataatttttgagttcaaataattactggtgtaactaaaaaaaatattttaaac

SEQ ID NO: 359977 - DNA, 598 bp, Cannabis indica
aatgcaactaagtccactaaaggacaaaatacaaatggggcaaaatgaccattttgcccctcccacgcaaaaataacataaaagggtgctaagggtattttgagaaattctaaattcccgattaatcccgacatttccaatgtctaactaaactgccccgctataccaaaatactaagatatgattctactgagccatacaccgcgtttcaatgttgtcgggcaccaaaaatgcaaatttatgaaatttctatatgtgacatataaaatgcattctgaattgaaataaatcatcatacataatttatttaatatcagtaaataattttcataattaagccctatttatctgctaattttcaagtttaaactaagtggtctttacaactatccccccttaaaaggatttcatccccgaaatctaaccaaaataactctagatattgggttctcatgtctgattctaactcccaggtggcttcctacaccttgttgtttctccagagtattttgaccaaagatacagtcttattccaaaggactttatcctttctatcaaggatctgtactagctgttcctcatatgacatgtctggctg

SEQ ID NO: 359978 - DNA, 1033 bp, Cannabis indica
cttgattatgccttgacgcataacccttaatctcaatatgtaacacataattattagtgtcactgcaatatttgtctattttctatagacctgcatgttacgctcacatgcctatttatgtctacgtggcgtagacctacgggttgcactcacacatctatatacaataaggcatcagtagggtttatctcggttctggttaccgagcctaacctggttatgccatgctcgcataaccctattcatgaatatacgtaatccatgtattacgttctttcggtggtttatcctggtgatatataccaggtctaacccagttatgtcttatacacataattcttaacataaatgcgtgtattcaatacttactacaacatatataatcttagggtaataatcctaacttgcatacaatgtaatcactcatacgatacattttaatatactcagataacatttactaagactgtcaaccctaactcatgctttcactgaattcataatattctagggtaataaccctagaccgcattaaaattaaactcaaggtactagcttaccgagtctagtttaattatgccttaagcgcataatctataatctcaatatatacatgtatccgacatggcatagtatttacacaacatatatcactagagtaataaccctaggctattaaacagctcatattagggtaatattcctaatcccgcttacaattcctcacatatatcatattcaacataagcgccactgtgcatactctacatgcaaactactgtcttacctgctgtccagaaataacagagattccaaacccctgggtgctcctgatcaggtgccagtaatcctagtcacacaatcctggatttcaccaatagggttaatccccaatttcactttcacaaagtataaacatggcatttaaaacacagataatcaaatagatcttggaacgagctttccaacgatataaagaacgtcccaaatggagtcccgaatcaaaagttatggccaaaacaaaattgagaaa

SEQ ID NO: 359979 - DNA, 627 bp, Cannabis indica
aagctcaaccctctaaaatgtgcatttgaagtccaattaggaaagtttcttagactcattatcaactcaagaggtattaaagtgattcaaagatcaaggcattgtaagacatgaagtcaccatcgggataaaagacgtgcaaagcctattaggacgaattgctgcacttagtagttttatctccaagtcaacaaacaagtgtgttcccttctttaatttgcttaaaggaagcaataagggattctaatggattgatgaatgcgagcaagccttccagactctcaaacattatctacccaagcctctcatcctatccaagccaataaatggtgaagaactatacatctacttggaaatcaccgagcatgcaaccaatactgctctagtgcatgaggaagaaagagtacaacaccatttctactacatcaacaaacgtctcattggggctgagtcaaggtatttgttaggttatttttagtattaaatttaaattaagtttagtatatttttaatttagttttaatcatgtttggagtatatttacactttttatattttattcttgcagatttaaaatagaagaagattagaaaatatcaaaggaataagatggaaaaaaagataaaa

SEQ ID NO: 359980 - DNA, 591 bp, Cannabis indica
atacattatatatataatcatgaaataaatcatgtgaaccatgcaacataaaaatgttatttctgatctttattaataagtaaatctgattatattgtaatgagttttatttagggcacaaaacccaactcgtcacacttagaagcactttcaaaatgacaggggtgagttatgttggcactttgctcgcaaccccgacaactagtaagacgagtatttccctcgagtgcgtggggaagagtttaacctaagcaatcaatttaaatctcttcgcacttgtgatcctattgaagactacttcaaaggaaatagtgactaaaaattttcagatgactgctctcgcagcacatcgttccaagatttgttgggttttgtgtcctaaataaaacccatttcaatataatcagatttactaattaataaagatcagaaattgcttttatgctacatggttcacatgatttattggatgattatgtttaatgtataaattgtattaagtcaagaacatatatataaatatgtatatatttgttcatgattatagtgtcgtcagaacagtggaatataatcataattatatgttcaaaa

SEQ ID NO: 359981 - DNA, 599 bp, Cannabis indica
ccatccaagaatccaagtttattctttacagatatggagagttgcattgctctactccaggaaacatagttatcttgcccagtaagaagttgtgagaagaggatgttacctgggttgtcgtcgtggtgaaggtagtatggattcgttggatcctcgagtggattcttttgattaatgaactgaaattcttgatttccatggctagtggaagctgatggattatctgcagatttcgacatgggttcttcactttccatttgagtcgtggaaggattttcattcgacatgaatgaaagacagaagaacagagatgaggcgcggtagaaaggtcgtcggagaagaacacaagaacacgacgccagtactggagaagaagaacggagtcgattggatcgcttcagggaaactatatctttccctgctctgataccataatgtggaaaagaaataaggtctgaatattatttgattgattgattaagaagaaaaacagaggagaagtataaatacagaagggacagagctaaaggcggtgcaaaacaaactcccaaccaccttaactaactccaacagccctaactaacattctgacattaagc

SEQ ID NO: 359982 - DNA, 822 bp, Cannabis indica
ttagaataatcaatccaaatgagaaagtgcgttgcaaatccggaagcatataattttgcaattatattgtttcttcatgcacagttttgtatataaataaattgtttgattaaaatgaaactatagctatatatgcatatgtgcaatgttatatgtatgctgaattaatataaagattgaacttatataaaatagaaaaatataaagattgaacttatataaaaaaaaaatatcaattatgtgtacctccaagctccaacaattgattttgataatctcaatctacagttctatatttacaaaataatagaacaagaatcaatatgaatatttggtcttcaaatctttcactaactctttagatggagttagtgaagaatcgaaaataacaacattttagagattagacggtaacttatatttatataggtaatactttttattaaaatatagaatgttttaatgttaatttgaaaataaaatttaatagtcaaattaaatagtgatattaattagaatatttagtcattaatcaaattattgactttgatatattaaattaattaaaattaataaatatattaataataatttaaaaacttataaaaattaaaaaatttgaacataactttaaataaaaaaattttaacaaaactaatatagatataccataatgttaaataatttgcttctaaattttaaaaaaataaaaataaaaaattaatagattttgaaatgaggactatttacaaacatactcttatgatttagggtcatttgctatatttttttgaaatgtaagacatacactaacatagtgct

SEQ ID NO: 359983 - DNA, 1338 bp, Cannabis indica
tttagctgccaatatcccaaaaagaaaatatttttaaaattattttgtttttttgttttttttttttaattttttaaatatttataactatttttcaaaattaatattacgtaggccactaaaaatttgccatgtgtataagtgtgtacacgtggacaatccactgtgatacttaactgtgatttttgaatggaggggtacagagtaaaataaaatggaagtttaggtaattttgccccccaaaaattaatttctgtggttaagtgttaaaaaatttaaagtcaagtagtttagccaccgatatcccatatataattaatatgtcaatatctactattgtaattaaaaatataaaaaatcttacaattatattttaataaaatgtgtcaagaatatatatatcaatgcaaaaaaaaaatatgagaataaaaaataaacaataattaaaatatggaaaactaaacaaaagactataaataaattgttggtaaaatttacaataacaactatcgtcggaaaagtcattggagtagatatcaacggtaaaaagtcgttagaaaagtcatggatgctgaaaaagtcaccaaaattgtcatcgttgttggaaaagtcaccgaaattagatgtcttagatctaaatttaaaaacaagagtattaaaaatgagcatgacattgtacaatttattagcaatatttattaaaaattattaaattgaattctataaaactcaatacttaatttactaataacaatataacacttaaaaggatgttaggcaacaataatatttattttaggatttctcattaaaaaagattcaacgttggcatgactatgagtagtgtgactgtgcatatttagtgtgtgcatatcataactttaaaaattaggagtgtgtgaggcataagtagttaagtacatgttgtttttgtgttgttgcaatttctttatttattttatttgattttttttttttctataaaacataccttcataaaactaaagtggtgatcacaccaccacccaaaacgttcaaaaatacctaaaaaccattagcatgggcttcccacaccagaagctggtgacaaaggtttacttgacaacctaatgtgttgtactaattgcaagagtttgagcaaaataaaaaacggaaagagaaatgttgaggattcgatatgagtcaattttttttacaagcatgcaatcttcaatggaagtgtgcctccactgttgcatagaccgatttggcgtggctacaaacagttcatctagtaagctttgcttgatgcaaccagtttacaattttcgtgaaaccttcacacaatgtccaaattct

SEQ ID NO: 359984 - DNA, 1167 bp, Cannabis indica
gttttttgtacagccctactgagaacaggaaggaagaaagatgaaaaaaaattgaaaaaaatttatttattttctttttaacatttttaatttatttttaatttttatttatattttcatatttttaaattagtttttttagttttttttaattatcaatatcaggtgcccaataaaatttccccatgcgtacacttgtgtgtacaagtttatttggcacttaacagtcaaaaactaatggaatgagtgctgaccaaaacgattgtagaagttggggactttagctagctataatttttccaatatgaagattagatcgtaccaaacttacaagtcgagaaagtttagctgtaaattacctttatttatatgttaaccattttttcttttaaataagagtttgtcggtttgggattgggtatgtgtaaatcaattatccccgacaaaaaccatgtttatatgaatgatatttagaattttcgccctcatcacctatttattattatgcccatgtgtgttatatatagtctctaaactattcacattgttataaattaattcttttgtcaagtttgtcacacgtgataaacaaaataataatgtggatatttataatattattatatcaatgctatgtgtgtaacttaaaataaaaataagtactttctaaaaaatcaataaattaaaaaatcaattaatgatcccttttaaattttatatcaatttatagcttttaaatgttgtctttttttctttttttgaccagctagcttttttaaggcttagatacggcttggtcgggattgtattttgctactacaattttgattttgttattgtgattaattttgtatatgtgatacaattttgagtgttttagtcttgtctgtgtgacatgattttattttatttaatttcgttgttggttcttctttgttcttcaatgactcgccatcaaatcattgttagtggctgggaataacaagttttctacgactgagaaggttgttagcagtgcagtaatataccttaaccaataattgagtgattaagctacgaggttgaatgaaattactgcaacagtttctactgttgtatcttctgattggtggatgaacaatataggtgttcttaaggttaattgtgctgctacaatatttttcattt

SEQ ID NO: 359985 - DNA, 785 bp, Cannabis indica
taatgaccgctctagtaatttggattagtaagggaaattagcactaatttttattattttattattatttatgaatttatttaattgtggaccccaatttcagggattttaactcaaggggtattatttagctcatatgtgattttattaaagatgttattttaagctttttctttggtttgagcttgtgtttttgagtaataggggctgttaggtttagttaggtttagggtttgaattctagggtttatttgagctggttttagtcgcttgtagcagtttttgttgaatggtttaagatttatgcaactttgagcattgagttcaaagctttgagctttaatggtaacttgcttttgaatggtttgttctgtgaaatactggctgggttttattgtttatacattgtataggagctctggaaggtttcatggcaattggtggcgatttgagcaacaaatgaaaggttttggaaaacctggtgcaaaccggctagccggtttgcagggccacaaaaaccggctagccggttttggcagggttccccgggcctttcattttctcaatttttgccttttcgatgcctcggttgggtgtttccccatttccagagttagaataacccattaagagcatagcagaacctagggtttttgttttgggtttcccgggattagggttttaatcatgtaacttacccggtttcaaaatgtgattagggcatccatctagcacgagatttccgttcaggtcggccagcacacttgaattcggaaaacaggtaa

SEQ ID NO: 359986 - DNA, 622 bp, Cannabis indica
gatcaacccattacattcacggaagaagacgcaaaaacagtgcgttttccccaccatgacccgttggtcatagagacccccattgccaataaggtggtggccagagtcctaattgcaatgggagttccgtgaatttgctgttcaaagaggccttcactgcaataggcctaacggaccgagacctctcaccaagcggttcccaactcatgtggttcaatggaacaacacttattccaatgggaaaagtgaggcttgcagtcaccttgtgcccggacacaccccagagcactttcaagtactgcacgttcgtggtggtggactgctcgacagcatacaacgcaatcctcggccgaccggccttggtggactttggcgcagtcacgtcaatgcggcacttgtgcttgaaattccaaacccaagaggctgggatagggacggtgaggggaaatgaaggagaggcgagacaatgctataacgttgctgcccacctgcccgtactgatggtctgagaaactattgagtcagaaatggctgaagaagacgagttggatccccgtgtgggatttgaaaaaatcgtagaaccatagaggacgtcgaggaagtatcagtgtgcaacctcgac

SEQ ID NO: 359987 - DNA, 561 bp, Cannabis indica
aacatgaaatgagaacatttttgggcaaagaatttgcatccaaataaaaagaaattattcataacattaaataatcattatttatatttacatatactttaaagaagcatataataatatgtttttttatttaataaaagtagatattttattaaatagctaaatacgctaatagtgtgaagagcagaaggatcgttgctaccaaagaagatacggtcagactaatatagagccacgagtcagacaatgttcggctttgttagtagaccgtttaacataacaaattttaatattatgcaaagaaagaaagtaggagatttttgcaatcttggacaagaagactaaagataaatggcatgtcaaccgaactttttagtgcttgaatggccactaaacagttagtttccacaacaacattgttccagcaaacttaatacttcttttataatcataatctctgccacagaagcatgcgaaccaccaagagagtaagttgcaaaagcttccatgtaaagcccgcttagttaatttgggaattttcagttaattatgattaattat

SEQ ID NO: 359988 - DNA, 521 bp, Cannabis indica
ttttttctattttatgaataagcttcatatatcgaaaacaaacaaaataagttcaaacagtagccacaaaagggactacttcccttaaaacaaccctcgagccacaacgattgactctaattagacatgtagtgtggtcccgtaggaaatttagctttgatacataggaattaattgtaattccagattcaagatcacacttaaacaaataaaaattaaatcaaaacaaacaaatcaagaacaaaaaaaaccagcgaacacatcaaaccagaaaaatataacacagatgaatctaatggctgaactttagtagttccatctggccattcaatgggatcatttagcactctaagcagcttctgttaagctagtaatgacatgatcttccttctccaaattttatagtctccagatccatcaaacttgtcaatatcaacttttatattgctcatgttagtaaattcagaaaagaaaataactttttgtgaaggaaaagaatcacagtttgaacattcaaactc

SEQ ID NO: 359989 - DNA, 513 bp, Cannabis indica
ttatcccaatttttgtcctcgtgacgtctcatactcgtggacagaacatgtgccacgtgacagtacagctcactaaaaggaaggggcaagtcaacatccgagcaaaaaaagaccttagcactcaaacaaggatcaagtgacagaccaactcactctcaggagctggccagccacccctggccggccccatggccggccggcccagggacaacatcatggccaggcaacctggccagcacaaaggcttggccgaccaaggattactctgtaggtcccacaagatactcatgcacgtggacatcaaaggtgggctgcgaattgggccccaaaagcccaacagaatagctaaataatatctagaattaaaggcatttaggtctttcataaatatctaactaactatacaattttcaaggaatttgaattgtaaacctagggtttaaagcttcctatataaaggtcttaacctctagctgaaaacctaagttgcttaagttgcctctaagctaaaaa

SEQ ID NO: 359990 - DNA, 712 bp, Cannabis indica
tcatttgacccgaccgaattgccctgactcctggtatttcgcctggggtccatctagtctgaacatcctgcgtaaccaacagttggcatatcagatcatgatcaacaagagcttactaatgccgcttaattttgaaattaaaaacatgcgcctattctactatcaggctactaacatgctttctaacaggcttttcttaaatcatactatttaaaataagctactaaagcaataaaagcttattgaaccgtagaacgagcttactgatgatgatgattgaatgtgaagattaaacatgacctgatgattactaccgacgacaaaaccacctatgctgaaatggtggaaaaagcactgggagctgagggcgcagttgggtgtatgactgagtcagctaggactccagtggttggcggggctcctaccgctcctgcatttggctatagcaggggtggtagtggctcagccatggaccagaaaaggaaagcacccactggaaccggtggctcaggtcagaacaagaggttccgggggaaccagggtcgaggcagtcgtcaaggtagttctgagacccgatatacctacccagagtgccctagttgtaaaaggcaccatctgggtgagtgtagagggcaggggtgctttcagtgtggcatgccaggacactacaagagggattgcccttagagtagaacagaagcaccaaaggctc

SEQ ID NO: 359991 - DNA, 942 bp, Cannabis indica
atttttatatatcaatacttattttattataaaataaagtttataattttttaagtttttaaatatttacaagtaatataaaaatatgcatatatacataaaaatttcttttattatttttacatttaaataaaaaaatataaaatatttacaaaaaaaatattattatactcaagtattgtcacacagacttctatataaattttattatataaaattacttatagtttttaagaaattttaatatgtaattttcaacaaaaataatatatctaattcaacatttaataatatgtatattgtaaaataaaaacaaactaaataaatatatagaaagaaagtactaataaatataagtaactatcgacaatataaatgagacacaaacaaaaaagaactaaaaaaaattaaacttacaaagttatgcataattaaacaaaaagttaaaattttaattaaagtgaacaaagacatgtacatattaattgataagtaaactgcaaagggaggtgtcaagcaccaaaagacgtggactattattattggtgtatttcaatatcgagtctcgtcaattttgatttaataaataatatgagaaaccactatttatatatataaaatattaataacatgtaattatatatagacaatataaataagacaaaaataataaagaactaaaaaacttaccaatttatgtataattaaacaaaagttaagattccaattaaaatgaataaagatatgtacttaataaggaaaatgtcaacatatccaactttcatgatattgaaaagaaaaaaaaatcattcataaaattaaaaagaaaaaatttagataaaaaacaaaaaatattttatgagaaaaaaaatatagtaaaaagaccattttaaaaaataatagaaaaaaatatcattcataaaaattaaaaataaaagaaaa

SEQ ID NO: 359992 - DNA, 526 bp, Cannabis indica
ctgttttctcacactaaatatttctcctcccccaaactaattatgtagcttatgatatcatggataaaatggtgaagaaaaattaatagtgtggttacaatttttggttcaatgggtgaaaaacataacgggtttaggctcaagagggttaactagggataaacattcttatggtaggcttgaaaggctcaaactatccaacaaatgcctaaatcatattccaattgaacactatcaaggatttcacctcaaaagaataagcatgcaagttctaagctatcctgtcaatcttaccacaaaccatagtaaaacaattataacaattttcacagatcgtcgaatttcattcatacacaggtttcacaagcatccaaactaatccaaagagttaaaagaattaagcacacagttattttacaatttcagatcacattacactaatcagcagtatacaactatcctctagcttattgccattccttaactaaaataaaaactaaaacagaaaattaaagtgcagaaaata

SEQ ID NO: 359993 - DNA, 772 bp, Cannabis indica
gtaaagcataaaaaatcaaatttccccttttatttttggtgatggtaaaggacaaatgtgtggatagtatggtagtagtagtactagaggagaggttggtgagagtaattaaagtattaactattaagaatagaagaaaggaagaaggaaagagttatagagaatttcttctttgattcaacaaaagaacaatttggttcccatttggagtttgactatatgtcctcttctctttctctcttatatttatttataagagtaataaatgcaaaccatcataatgttcatctttattcaatttttcaatttgtgttatttgggtggtagttattacaagagcattactcattcttcaatattattattatgtggtaataattttttttagagtaaatactattttaaattttgtattttgtaaagtttattagatttttttttattttgaattgatatttttattaaaataaaatttagttataattcgatttagagatactatgataaaactgattatattttcaatatccgtttgtgttaaaaattatctttaagttggttatatttaaaaaaattatcgaaatttgagttagctatcctatttttacaattttaaaaaatataaggtctatttgatcatttaataaaacagataattcaataaataatttttacaaaacataaaatttgaaatagtattttttttttataataattattaaattaaaatattagataatttttttaataaaaagattacaaattcatattt

SEQ ID NO: 359994 - DNA, 656 bp, Cannabis indica
tctcaaaaatgccaatttcctaattcaaccatttaaatgtgactctatcggccaaacattgcgttccaatgttgctgggtataaaatataaaaaacatgaaatttcgtatataacataaataacacacttaaaattcaaatatatcttcataaattcataaatcataactaaaaagtctaattctaaattaaactctaataatctgctcattctcatattaaaattaagcagcctttacaggtacactaacacaaaatttatttaaaacccaatctttctagacaggacaatcttagtttgtgtcatgtacaatattacaccattgtaccaaatattaatggcatgtttactaacaaataatggaaattaatggtaaggtaatcattcccttacatttgtttacttacatgattaaaattaagaaaggaagagcttgattaaagatgggataaaagaaagggaatacttctcccactaattttgtaaggaatgccattaagagtaatggattttatttatttttattttactttttaatattaaatatataatgataattttttcctttaaaatatgtcttacaaaataattatcatatactatagtttaactcataatggtaatttagttaatttaagcatttcgattacgtttc

SEQ ID NO: 359995 - DNA, 487 bp, Cannabis indica
atttctaaagcaataaaacaaaagcttcatgcatgaatacaaaaaccaccattgatgagtcaagcttgagttcaaaaactcaaagctttctcatcccacaaactagccaccaaaacctgcttaaatcaccttaaataaacataatataacatcagaaaacaaacccaaactcaaacaacaaccacaacagctaaatcaccattaaaaccaaagttttgagtttaaaattccaaacttgaacaaaatcaactaacaaccacaagaacatgttctatccactcaattaaacataattaaatccaagaaaacaacaacaaacacatacagcagctgcagcaagaaaaaccccaaagcatgcaaaaattctttttcttaaaactcaaggaaactagcaagagagttgcacaagtgttaccttaacttggattatgcttagaactgaaacaaaacactgaattgaatgagcaaaagcatgaaccctagctgg

SEQ ID NO: 359996 - DNA, 604 bp, Cannabis indica
acagcaaagaactatctaatcgattcaagttttaataaaaccaataaaattcaatgtaagcccaaataaaaagtctaacaattgcgacataaataccacatatataatttaaataaaaattaatttaaaattttaaaaatctatttttattagtaattaataaaaaattaatttagtttatttttatttatcgataattaataagtgttatacctaaatttcagctaccaacaagaagctgacacatgtaccataaaagaatatgaatcagatcaataattgtattattaaattacattattaaatgcaatttaaattactcgtttcaagaattataaatgatagaaatattcaaactcgctgccacataagcaaatgcgagataagaataacaactatgaacaggtaagactgacgagacaataaattcatctcgggataaatagagtacataataaaagttgttcaagatgagagagccaagagcttacagctcattgactcacacacttggaaataagagcttgcagctcattaacctacacattgggaataagagcttgtaactaattgactcacataacaaattcccataactaaaaca

SEQ ID NO: 359997 - DNA, 838 bp, Cannabis indica
caaacaagacaagagctagaaagtcccttccgaccagatgtttgaacagggagttagggggaaaatgttatcccacattttttccacctaacgtggcatgtccatgtatgctaaatatagagtacaggtggggtacagccctgctagtagcagaacagagcttccatgcaagatataaaaaaaaaaatcgtcaagcaacaatcgaatagagtaagtgagccctcaagaagttgtaccaacatccttgactggccaagagaagcctacaagccattcagggtgagcctataggccggccaggatatgtgcacaagctggccggccaagaagtgacttttggaccaaggaggcttccgttcgaccaagggaatctggtctctacaaggaaatgttgtacaaagctatcctcaacttgaaaaaagcttgcctccagacccaaagactagccttctcttggtagagctataatgacttgccagatcctgtatgccttgacctgccaaatcctgcaggccttgggtggttagacctcccctataggtctatggggggccaggattaacctggcatgactctatgtatagcctataacatggacatcaagtcatgagctgcgaattaggccctaaaagcccaacataatggctaaataatatctagattcaagggcactttagtcttttgtaagtatctatcaaactatacaaatatctaaggatttaaactgtaatctaaggttttaggcctcctatataaaggccttaaccctagcctagaaacctaagtcacctagcctccaaattgctctaagtctgaaagccctattctctctctctct

SEQ ID NO: 359998 - DNA, 1012 bp, Cannabis indica
ctttaaacaaaaaaaaaagaagtataggcagagcttcctaaggtacttggaagaattccttttacatatattttaacatagttgtgaaatctgttgaaaaggaaggaaatcaataattaatatgatttttttaattataggtaactcaaaactcttatctaggtaaaaagatagattttaaactcttttgcttacaacattatttgtaattttaaaactatatggttagtgatgaaatgttattgatttatcaactcagaacatagaattatgtaactgtgtattaaaatttgatgtaaatttcagtttgttgattttgaaatttgattctgaatttgtaaaatatttacaattcggtatgtattttttatagaaatttgttattgaaggagaggaaggaagatgtagaaaagctttataaaagcacttggagcaattgcggagactactgcacttttattggcaaaaataaaaaaggattacaaggtattaacattttttttctttgttaattctatgtatttgaattacatattaaattatatgaatttttatcattgagtaataaatatttacaggaatcagacattgctacaatatagggtcacaaattatattgactattgagcgacttagtagtaagtctccctttctttcattcaatgtgcatcataatgcaaagtttttaataaatttatttattcatagattcattaaaatacaaatcatgttgagcgccttagtggtagatttggctctctccattcaacatgcctcacattgtaatgattctaataaacttgatttattaatagatccattaaaagttgtttttgttagatatttatatgtataaactgaaatatatatgtttaagtataaagtgcagaattaatcaaacatatatacactatgaataaggatcgaaatacctccagcgattggttcttgagcttcaaatcccacataagcttgatctgcaaaaaaaaccgattgatgtgggtaatcgggc

SEQ ID NO: 359999 - DNA, 810 bp, Cannabis indica
gcgagacaggtttggaaactttcccctttatatcatctttaccttatgcatagaaataaagatataagagactttatgttatctggatatactgatctaaataatgatgatttttctttactgttgtgtactttatggtctatttgggaacttagaaataaaaagcttttcagaaatattcattcagatgcagcagaattagtgcaatgggccagtagctatttgcttcaatacaaggatgcacaggctaggaaaattgatgttgtaccagcttgccacttgcgcacctccacagaggaaactcaagccaaggaagggtcttaccaattgtacacagatgcaaccattaatgacaagaacagtaagattgggcttggagcagtggttaaggattggaatgttcaggtgacagctggagtttctttgcctttatcagctaaggctacacccatcatggctgaggctatggctctaagattgggcttaagctgtgctgcaatgtaagaatctcactttctactatttttacagattctaagcagctggccagcaagattcatagtcacaagaaggagctttctgcccttgcggatgttatagtggatattaagaattccttgtctcatttcccaaatgtttctgtttgctatactccaagagataacaatacccatgcacatcatatggcaaaggaagctttagggcttgatgaggaattagtttgaaaagatatttgtccaaacttaaacattgtaacttgatcttctctcttatctgttaagttacaatcgtcaaaaaaaaaaaaaaaaa

SEQ ID NO: 360000 - DNA, 914 bp, Cannabis indica
gttatgaactgaagcaaaaactttttttttagcttcagttcataactgaagcaaaaaaatctgtatttgcgtctacggttgtaatgtcggttacaccaactgaagcaaatactttatatgtcacttaaaaattgaagcaaaaagccatttttgtagtagtgaatccaccttgctaatctgatctctggaacacactaagtagtgaactccctttagctattgatgtgtgcttacttcctcccgaagtaaggcttaaacaaatcttctcccaaagatatatggtcacttcctcccgaaatgagacttggaaaagtcttctcccgaagacccacacttgtacaaagcttttcttcaacatattctatgaatagtatgagatcataataagaaaacccaaagctagttgaatactctaagattttacaaatgaaacactcctcacaaagaaatatatgaaaatatgagaatagaagagataaaaacatttggctgctctctaggtcctatttatagaacatagcaaccctagagacatccacaaaaatgatttcccagttgtacaaaactttcttaaaaaaaattcctaatttgcaacatcagaatcgggttttgcaacaacagatcaggaccagaaaggaaactttccaaatgaaactaagatcacgaatttggacttcaaacctgccaaataaagtttatttgatttgttctaataaaggcgaaaccgaaatcatccattagaaaaagggaagtcaagtttcccaaagttagacgactttccataagagaattctttttcttagaagaagtttcctaaaccaaaaagagaccagctaagaaggaatctttcctaagaagaaaagagtaattgaatgcataaaattaatgtaataaaaataatttaaatgctcaat

SEQ ID NO: 360001 - DNA, 467 bp, Cannabis indica
gtagaggttgactaagaggttgtaataggagtttgacggtagtacttctctatttattttcatttagaaagtaattaagtaaagtttttaattattcatgattttcaataaactcattgattagcaacgaactgtatatttaatataaaatcacgataacatgcctgtctaaactagtaggatgttatatttttcttccttttaaaaaataaaaaagatattaagagatttttttacttttttggtacgaaagataacttttaatgcaaattaatttcctttctctgaaagaactaataatttatgatcaaattcataaagacaaaatcaaacccaatattcaaaacgataatcaccacaaaattaaaattattttgtaagcaagtgtaccatattcaatgttatttaataatatacaccagtcaaatttgtacctgtgttaaataaatgtgtacataggtttttaa

SEQ ID NO: 360002 - DNA, 342 bp, Cannabis indica
tgaactttcatccatggtagactttttttacttaaaaattcaataatctcaatagtttaagggcatttttaacgtactttaaaagttcatgagacataatttagtacatatcaaatttcgggggataaaaattctaattagccaatataataatttttaaagagtatgagtggtagagcgagcccaacaatttagtgggggcaaaaaaagtttttttgaagcattaataaaaaaatataatttttattgaaaaataaaaattctataagaatagaaataaatacatgtaacagtaaaagcaaaaaaaatatataaattttatggggataaatataaaaaaaa

SEQ ID NO: 360003 - DNA, 568 bp, Cannabis indica
gcatgctgagcatgccgcggcccgcccctggttgctggaacctgggttttgtcccaggtgccgcggcatggcctgggcatgtcgcggcccgcccctcgtgtttttgggcagttttgagttgattttcgaaagttcgtaacttttgattccgaactccaatttgggagttctttatatcgttggaaagctcgttctgagctctgtatgattatctgagttgtaaattccatgcttgagttttatgagttaaaaattaggggttaaccctaagtgtgaattatcccggatttgtgtgactaggactaccgacacctgatcaggagcacccggggattcggaatctccttctatagctgaacaacaagtaagacagtagtttgcacgtagagtatgcgcagtggctcttatgtgaatatgatatgcatgaatgtttagtaaccgggattagggttattaccctaataggaacggtctgttagcctagggttattactctagtggaatatgtgtataatgccatgccacgttaaatgaaatgaaatttaaggattatgcgctcaaggcataa

SEQ ID NO: 360004 - DNA, 906 bp, Cannabis indica
taaagtggttaatatgtattaatcatgagataataaaataaacacattaacttaaaatattcagtgggagaataagtacatgtcaatgtaatctacgacctccattatttgtcaaaggagtatagactgcatcgagatggcttagattttgtccccctaaggaaggtatgtatctatactatttttcaaagttgatctcttaactacaataagaggaagtgatgtattttagtgcaatatcaaccattaaggcgacgttactaagttaagtcataaaatctgaaataatgggttactcttacaaagtgcaactaagcttcatagtggttagttgttaacttggcctaatagtggtactttatattttgaaaaaaaaaactaagatatttaggttttaaaataataaagatgagtattctctcataggctcaatgaaaatgattagatactgaccctaaggcgacgatcaattgtcaaagagttttatcgtggaataacttaaacaagattttatgtgttttacttgtatgtgatcatgcatcacgtttacagtaattttgaattgatacttattattcatgtataatgattatgttactttatttatttcagtcatgtctaccatgccaaatcccctcactactttattagcacttgaaaaattgaatggtgaaaacttttataaatagaaatcgaatttgaatttaatgctagtttgtgagaattataaatttttcctaactaaggggtgttctgaggagcccactgccgatgccttgaaaaatgttcgggatagatatgatgcttagattcaatccaaaaataaggccaaatttttaatgcttgtaagcatggacgatattatgtgtaagacagatgaagatatagagaatgaattctctacag

SEQ ID NO: 360005 - DNA, 872 bp, Cannabis indica
tttcaaatcatgctatctacctactttcaaattgactcatattaagcaaattgactcacaataataaaaactaaaaattaaaaattaaaagacataaaacttaaaaacaaaaaactaaaaataaaaatttaagtcaccccccaaactaaagtgacacattgcccccaatgtgacattaaagaaaaaggaaaggaaacttacctgggcggcacatcaacaagcggttgacgcccgtaataagcgtcatgcaagacaacttgaaaattgttgttgtacttgccttcaagcttggcaagcgatgagtttgaatcaaagtcagtaccaacaacataagactttggatgatgagcttggggagaagcctttcgtagcttgtataggatataatatgtgttgatgaactatatggatccattggtggtttattagtcaatatcattgatgaagtcgaatcaatgatgccatgttcttccttatcctccaatgtcacagtatctacactttcatctaacaacccttcttcttgttgctcactctccacttggctatccataccctcacttgtgatttcatattcaatgatttcttgatcatggatgaattcattctcttccatgatttcattcactccacgacattcattatttaccaagtaagaatctgatgtagccaaattttgagttaataccacttcaaaaggatcttgatcttcaattgtaggctcattatcttccttgtattcaaataatgacccttcttcattgtaccaataactctcataactttcatcattggagttattacattctgaatcatgagccattgaattatcacataaggatctcaccatgtcagttaagcgattaatctct

SEQ ID NO: 360006 - DNA, 509 bp, Cannabis indica
gtggtttggtagtcgtgagctttggttcgaacaagtggttatcttagatgattttcctgaactgcatgagtttttaaaacttaggaaatgggtaaacacggtcaccaacttgtctgctcctcatcccatcttagttcgagaattctatgccaacctagataggactgttattgctgagggtcatccagggtgtgtgagtgcctttgttaggggtcatagagttccttttggtccatccactattgcatctttattgaaagttgagtccatcaggaaaccaacatatgggaaacacttcaatccagatcaaactttgatgggtagagtgctaactggcagggatgactatatttgggagaaacaggaaatcctggtcactcatctgactccattctatagggttcttcatcgggtagccttgtacaattggtttcctaattctcatttgtccgctgttacacttgagattggcaagttcttgtatgctgtaggcactaatgtgtccattg

SEQ ID NO: 360007 - DNA, 996 bp, Cannabis indica
attctcgtgctagatggatgccctaatcacattaattgtaacacagataagtgactcgctaaatcattttccggggacttaaacttgaactaaaagttcctctatcgataaacaacatggcaataccctaaatatctcaaaattgggaaaaactagggttctaaaaattcccccaaccagcagaccggtcccaaccggaagtccatttcctgaacaccaaccggtcgaccggttggtacaggtcccccagaaccggtcgaccggttctgtgctgggaacacaaaaaccaacccccttaattcaattcaatcccaaactttcctaaaacttccagggtacctatacaatgcataaacaacaatttccaaccagaatttcatagaacaaaccaataaatctcaaattgccattaaagctcaaagcttgagtttcaacactcaagcttacttaaaactaacaccaagcatcaaagttaactaccagaacccttaatcaaccaatattgagcataaaaacctaaccctaaccatttctaaacttaacagccaccataattcaaaatcatgcttgaaaccaaaataaactcaactaaaaactcgtaactcaaaaggtaaaggtttctagggtttacctcacttactacaaccttgaatccttgataatttccagagaaatggaagaaaatgattgcccttgccctggatttgcctcagccgaaagagaggaagagagaaagagagttctaggttgactctttctttaattttctatttcaaatgaaaagggagttaattgattaatcccttgctgagctgattagtttactaggtgtcacaaccctaggctgccacctactctccccttggtaatttactaaaattcccttagtcataaaactacggtattttcaagactaggggtaaaatggtcaaactccatatccccgctcaaccccgatattttattttctctataatatttcccactaagaaataa

SEQ ID NO: 360008 - DNA, 510 bp, Cannabis indica
tcaagcaaataaataagcgtggcaagattattttagcatcaaggggcaattattgaaaacattttattggattcacccaatttttgaaggattgtaatttaattttttgtttggagctaggaagagtggccatctcttctctccctttctctcttgttcttaccaacagaaattcatcacttcttttattcctctccttccatccatttctaccctctacataaacttacaaaaatactgaaattttgggtaacttttataaaaatactatcacacgaaaaagtttacaaaaatactgtgcttttataaaacaccagtcaaacacaaaacagtacaacttaaaacaccagtagaacacaagtgaaaacttaacacaatatactgcaatatgaaacttataaaaaaatacagcataaaagtaaaaaataccatctaacagtatttttgtaaaaaaatagcaaaagttagtatacaatgtaaataaaaaatacagtaaaaaagtaaaaaata

SEQ ID NO: 360009 - DNA, 1075 bp, Cannabis indica
aaaaagcagggttacgccatctgtcatatcgtttatgatagttttaatacgtcttctcccatacagcattaaatgcgaggtgatttttcaatagggtccagtacctcccggagcttccttagtatgcccccggcctccgggagcgtaaggatccttctcatgtctcctccgggagacaccttcccagaggcgctcctatgttgtctaagacttagtcgatttctttgaaagctggtcctctcagcttcttgtgtcatccttatccaggtccacgtattttgggcaaaatcaagggcaacaataactttttcaaaacacatggtccaaaatgttattcacccttattaattaaacttgatactgctcttaactttcccaaaacctcaatcaaaaaaatgtagtaattccctctcacatttaagtgcagagctcaaattctatgaaagtttcatgttggaactatttcaaattgaatgaagttttgataaaataagaaagtttcctagtgtatttaataggtggagtcccacatgggatctgtgccatcctttacaaggatatacaaggtgcaattatagcacttggtataagaccccaactatgtgtacattcctaaatagtgttgcgaacttagctacctagtccgcgactcaatctaaaatcttaatttcataatatcgttcttcttttgatttttttataaaaaaataccagttttacttttgtaaacaatatagttataagaagttgtcacaagtaaataacttttgtaacttttcaaatatttattacatatttacaaataagaattaattttaatttattaatttacggtaaattacaaatttcaagcactaacaattattttaatcgaaatagttaaaatcttattgttaacgcagattttcgttaactaaatttgagcctcacagtaaaattactgcatagtccacgtaaaaatacttgtgttcaaatctttatttctatagcttttatttttcttgtgtgaaatttctagtgtgaggctcaaatttagtaaacgaaaatctgcgttaacaatttggtgctctcattg

SEQ ID NO: 360010 - DNA, 512 bp, Cannabis indica
aaggcttcaagaatcatccatatgcttgtttagctattttgtacctttgattcactaagttgacacaaatgatgtaacattaaagttcattatattttgagtatacaagttcttaaaaataaaagaaataatttaatcttatgtagaacctagaaatgacattatacatcaagcaataatgcaataaaagattaaatataaaactaaacatcaatattatttttactaaatagtaacacatagaaagagcatgactaatcctatatatttttagtaaaaataatgacaaagagatagagatggagatggaggtgatagtgaaggaaatgaacattaatattacttttattaatttttagacacatagggagagcatgactaaacctatatatcatttaacaaaaagtaaataaaaatgaacataaaagatagaaatgagcaatactaccattactataatcactaaataaaatatatagaaagagcatgactaagtctatatatatatttag

SEQ ID NO: 360011 - DNA, 648 bp, Cannabis indica
tttgatggcttgggttgtgtttgggcaaggtttgagcttggagctcaagctttgctctttaatggtgatttgtatttttatggttgattcttgattttattgcatgaattcttttagttatggtgtaaataggtactctggaaggtttggtagcatttgggatcaaattgaggtgtttaggatgtttttcatgttgtgggacctgtaggaaccggaattttggttggtcgctaggaaaaccccacagaaccggtcttctgggttgggaaccggtcttctggttggagaaatttcgggaaccctagtttttcccatttttgcaatatttagggtattgccatgttatccatcgataggaaaccttttagtttcaattttaagtccccaaaaagtgattttgcatgtcactcatcagttttacgaataatgtgatttaggagcctgtaaatcgtcgagcagtagttccactcaggttgactggaacacctgaatttagaaacaaggtaagattagtataatgatacgtatatgtgtttacatatttagcgtacatatttattaagcttgttagattacatcgatagcggtatcaatacacatagagttatattggataccgattgatgtatgtttggcttagatactgat

SEQ ID NO: 360012 - DNA, 324 bp, Cannabis indica
atataattataataatttttttttagtgtgtaatgcgtatgtttagtttttagtttttattttaattatgtatatttttagttgcataactagttttttttaagattatttaacaaacaacatattcttttattaaaaaatatttaatttaaatactatttataaaaatatataataatatatttattgttaattatgattttagttttaacagtaatacttataattttataatacttttaatttttttaatataagataaaggctaattgagatttttgctccctaaactttaacatgtactaaatcatgccctctgaactt

SEQ ID NO: 360013 - DNA, 574 bp, Cannabis indica
ttcgatgatgatgtatatatatacacatgtatatgcatataaaattttgaaaacaaacatatgcataatcaaggcagagatatataatatgctttgataccaactgctagaaatttattgtataaaataaaatatatatatgtgtatataaagtgtagaataaacgaatatatacatgatataatgtaaggatcgaaatacctccagccattgatttttgagattcaatcctacacaagctttgatctgtgaaggaaactgagtaatgtgggtattcgggcttcctcactctctttagaaggaattttactgttatcaacagaatgaatgaggagctcggagaccgagaccatatatttataggtgagatactccatcagtatttgcgccacattaattgttagaatattttaacaattaatttaaagaattaaatcgggcaatgaatattgaaatctgactatatacatagaatattacgtaattaattttatccagattcaacgaatataaaatattcatttatcacaaaatcaatttttttattttattccataaatagaaatattctaat

SEQ ID NO: 360014 - DNA, 551 bp, Cannabis indica
aaaataaaataatcaatatcaatatatttaaaataattttaatattatgtttaaattcatagttgtacaagttaaattattataagtatatataggtttatttttcctaaattattactgaaaaaattatgtctttgaactattatcgatactagacattctccaaaactatttaggttactaaattgtgaccactctcttactttttgtcctacatggattttaatttatatttttttttaaaaaaaaactccaaagaatgactaaattataatgatattttaaatttaaactttggttttttttaattctttattttacaaaatatttaattgggtaagattgagttattcactcactgattcaatggaaagaataataagtgatatatttataagttacaggtctaacactaatcacatttttaagctatgtgagacttttttaaaaaaaataaaaataaacactctataatgaaaatctatattatatagaaatataaaaatacaaataattaaaggtgaatagaaatatccaaaatattagaaaaa

SEQ ID NO: 360015 - DNA, 562 bp, Cannabis indica
taggttctctataaattgattgcagttgttcaaaggttatgaaaattaatgataatttctttcaatttatgtatgcttgattatcgacgtattataagaaacccaattaaaaccctcaacacaccaaacatcattgtacggtattacaagaaacacaatcgatcctgcaatttgaaataacaaaaggtttgttagggaacactaccaaaaaaatataaaaaccaaaaatgaagaaatttaatataatcgacaacctatcgacatctcatcgatattccatcgataagaagtgtcatgatttcgagcagtgaaaaaaatcgacaaagtgtcgataatctatcggtataatgtcatgacattgaggcatttgagaaactcaacaaaactgtcgacatatcgttgatatcatatcgataaagattggcttcaagaacctattgaaaatctatcgaataacattcgagaaaggtcatccctaacgttggaaaatctgcttctagaatctttcgagaacttatcgataaccattcgagaaaaataatgtcatgacatgacattgagg

SEQ ID NO: 360016 - DNA, 663 bp, Cannabis indica
ttttaaagtttaagtcccatgatttgttagtacattggatttactctaatatgataattagcgataaagtttacttccaaccttggataagtgttatgcccttttcaaagcattagcaaagtatgctagtattagatgtatggagtatacatcaaattggaccaatattgacattagataagatatcataaacttaccgtgatatatttctaagtcaatatcacataattgatcttaggtcaatagatcttaatcttaaaatggttaattctgacttaaatgtattgtttgtattctttaacttgttcgttaaagttgactaattagaccggtccaatacttacatcttgagaatatgggagtacaattgagtgaaaacgctaatcatggatatagaatatatatcttatataactattagaagtgaaacgatgatttccttcgagcttggcttaacacgataaatgattgagatctcattttagtaattatattagtttactgaaatatcattcacaactagataagtattttaaggataaaatacattgaagggtagaatggtaaatttgtccctactcgatgtagatcatctatagaggatctttgactatttggattgaaataatgtataattcaaatcgcatctatttttggtaatag

SEQ ID NO: 360017 - DNA, 903 bp, Cannabis indica
actttgatgatgcacctttgggaaatgtttttcctgttgtagttcttcaaaagatcttgaagaatcataatgttatgagctattgatctcccttgtatgaaagctccttgattttcattcactaaggttggaaggacttgagcaagtcttgaacaaagaagcttcgagatgcatttatagactgttgaacaacaagcaattggcctatagtctatagcttttgagggagagtcaacctttggaataagtgtaagcattgtagcatgaagatcccttggcatacttcctgtttgaaagaagctttccacagctttagtgaagtcttctcccaattctggccacattttcttgaaaaaacctgctccaaaaccgtccggccctggagattttgaatcgggaatgctgaagaaggctttcttgatctccttgctagtaaacggctttatcattctaatttgttgctctatgttgagacaattcccctgattcatacaatcattcctgagagtcaatgtcggcttatcactagaacccatgtagtttcggaagtggttaacaaagtgtttgaccacttcagggaacttgtcaacgacttccccttgttcgtttgtattttaatgctaattaaatctaacctaaccctaagtggtttcctataaataagaagtgatggcttaagggaaaagatgatgatacatctcataccttcagtaaaattttgagcctcctttcctatagcatagccgaaaccctatctctctctttctctcttcatattttcataacttgagtgatagagtgagtgcccacacacatcaagttggtccacaatcatagtatttaagactgtgaagaatccaaacacaaggaacaagaaggagaatcgggctcagatcttggtga

SEQ ID NO: 360018 - DNA, 1157 bp, Cannabis indica
gtaaattttttcaaattgaaaaaaaatcctaaaatgtaaatgtaaaataaactaaaaaaaaataaaactaattaagttagaaacaaaaacatgaaatatgggtttggataataatatgacatatcaaataccataaaaagtattaaatatgaaaaaatgccataaaagagtggcaaacctataaatgccatatttttgtaacttttttacaaaatcccatatttcatgtaattttcactttaaaaattattaaaataatattatattattatttaatatatattaaattactaatgataaaaaaaggaaatatgaaaatgtgattgttaggttattttttttttcttcatattagtagtaaacatccattttatagcattctattgaagaagctgttattaaagtgacaggaatggaacacataatttgggatagtagtttttttcccatctatcaacaagtaaaactgtgcataattcctagtcatatgatgtttggtttattgtaatggtaattgtaatgatgatgaatagatgtattatattgtttgcttttcccttttaacttttgtaatccattacaatataatgcttattacaatattgagtattgtaatgatgattacataccaaaactaatactaaaaccaatgtaattcccattacaattacactccattacaaagaaaaaaaaataatattttaataaaaatacagtaaaaaaagtcaaagtgtagattactcgtgttcttaaatattttataattttataataaaagtaataaagttattttagtcaatacatattttcttttattatattcttataccaaaccaaatataataattctgattagaatgttcattacaactacaaaccaaacattgtaatcaattcctattgtcattcttattctattacattatcattaccattaccattaccattatattatattatattatatcaaaccaaacaccaccttaccatttttcttaaattattgtctcgtttgcattattcattgttcatgaaataattcactaaaagataaaaattgattctatcaagattgtgttatattttgggtttatattcggcgacacaaaaactttaaagacacccacctcacctcaccatcgcaaacaaaaataaca

SEQ ID NO: 360019 - DNA, 707 bp, Cannabis indica
tttttttaacaaaaaatagacttctaccgcatctaaaataaattggttaagaggtaaatactattttggaccttatgctttgtaaaagtaacaaatttgagcctctattctatcaaattataaaatagaccctatattttccaaaatggtaaaaataggaccctaaattcaattttcaagaattttatttcttaatataaccaatctattatctatttgatctaaattgctataattaacatgttgacagatcgaatgatctgattttaatcatagtccaattgttaatagatcttataaataatttttaacaggtaaattttgtaattactttcatttgtgtaatgttggaatgtattttaccaggatctagatttactaacaattatgtttttaacatcctaatataaatttctaaaactaagaaaataaacacataaaaggtatgagaaaccttacagtggtggcagcagaattaaatgactcattccactgagatttctaacccttgtatccattatgtagcagagtatccccaagatctgagcccgattctccttcttgttgtttggattcttcagagtcttacatactatgattgaggactcacttgctgtgtgtgggcatgcactcaatcactaatggctgaatattggtttgtgaagaatagctatggatttcgaaattaagagaagtaggaagaggtc

SEQ ID NO: 360020 - DNA, 735 bp, Cannabis indica
gtggtatttatgtaattttttttgtttaggctgtatatttatttatttggccagctgaaagtattttcgtaatattgttattcaaaatttaattcatcttaggcccatatattttcagggtcgaccctgctggtgcaagatacactttggagttgttatatggctcaaattgacaatgtatagagttgatgtggatgtctcgtgatgcatttgttcttttgtgcaatcattttagacaaagagaatgaattaaagatagtaagcatgtatcaattgaagaaaagatagcaatatttttaactatcatagcacataataagcgatttattgtcatgaagcgaagatttcaacactcttcacaaattgttcacaagtattttgatgaggtttttgaagcaatgatgcattttgcaaaagagatgatagtacccacaattgattttgattcaaatattccaactactcaaaaaaatattagaaaatttttcaaggtattgaatttttaaatcatgattgtataagtaaaatatgtgtcgtaaaatatttcaacttataaatttattgcaggggcaattggtgcacttgatggaacactagtgcatgctgtaatcccacttgataaacaaactgcttatagaggaagaggaaagggtaactgctaccaaaatgttctagcaatatgtgacttcaacatggtctttacttatgtttatgcaggatgggaaggagtagcac

SEQ ID NO: 360021 - DNA, 1147 bp, Cannabis indica
agatcctggtaaaataaattccaacagaaatgcctccaaattcactgccttctctgtcctaactgacaacctaaagacaaattacatggaaacccagtctgtggtcccgtacgaaaaacctgctcccatgaaaaaggatataagcaagtgggatttgccaaatttttccattttcatggtgactatggccacgacacaaatgagtgcaacaacctgaagtgggaaattgaattcctgatagggaaaaataacccgcatgtgtaaaagtacgtcaaggctaatcagaatcagtaggccgcccaagcagacaacaaccaagacctactaatgcaaccaccagtgaatgagcatttacaagtcattattggggcccacacatcgctggagattcgagcaaagctcgagagaggcatgcccgaactttatagcacggacaaaaggaagtagtttcggctgtaaaagaaaggaagccaaaaatgccacgggtaggggaacccactataaccttcactgaagaagatgctatccacgttcgcttcccgcacaataatcctttaagtggggaagtaccgatagtgaataaaataatggcctggactatgatagacaatggagcttctacaaacatcttgttcaaaacaccatacgaaaagataggactccaactcaaagatctgatcctctgtacccaaccggtgtatggtttctccagccgaagtgttgcaccattggggaaaattcgtctacccctcactgttggacaagctccgaggagcataactgtgatggtacaatttttgataattgatgttccatcagcttttaatgtcatgttaggccgaccaaccttatatgacctaaaggctgtcacatcaattttccattcatgcatcaagttcccaacaaagaatgcggtagggtgcccaaagggaaatcaacaagttgcacgggaatgttatcaccttgcctggaccaaggccaagaaggaagaatcctctggctaaagttcagacaggaggaaaagcattgccaaatagggagctgcccaacgcggggacgaagatgtggatccccgacttcgggaaccaaatacaaatgttgggctggtggaagaattggaagaaatagaaatcgaccaaattttccc

SEQ ID NO: 360022 - DNA, 736 bp, Cannabis indica
gtttggctggttattaccgtcggttcgtagaagggttctctaaaatttcaacaaccttaaccgagctcactaaaaacaatcagcgatttgtgtaaacgaacaagtgtgaagccaactttcaagagctgaaacagaggttaatcatagctacagtgttagccctaccttctgataaggaaaagttcgtgatttattgtgatgcatccaaacagggtctagggtgtgtactgatgcaagccgatcgggtcatcgcctatgcctaccttcaattgaaggaatatgaacagcgatacccaactcatgatttagaacttgccgcggtagtgtttgcattgaaaatttggcagcattatctctatggagagaaatgcgaaatttatactgaccataagagcctcaaatacttctttactcagaaagatttgaatatgagacagagacgttggttagagttggttaaggattatgactgtaaaatcttttaccatcatgggaaggccaatgtagtggttgatgccctgagcaagaagggtcccgagtaggtaactattatgattcagatttcacctcagttagcagaggacatggtcagatcaagcatcaagtttattgtaggcaaacttcataacttgacgctgcaatccgatctgctagaatgaattaaagttgctcagttaactgatccagacttaatgaagatcaaggaagaggttttagctggtcaagccagagattt

SEQ ID NO: 360023 - DNA, 1028 bp, Cannabis indica
caagttgtctatgtcccaggtataccaagttgaattgctatatttgtaattagtatttagtacataaaaagaagaggaaaattccaaaatttatggcttttttatattataatttttttttggctaaaaattggttagttttttttgaaaaaaaagttattttttttagggaaaaattgaaggaaaagtaaaaaaaaaaatataatgagaaaatcagataacagtaatcaggtatcataagaggtaactagatactttatgttattttttttttcattatttttaattttttttttaaattttctcataaaataattattgtttgagaaaaagtttatattttttgtaaactatactttaaaaaccatataaatgaaaattccctaaaaagaatcgtttttcttacatctttcgaaagtcggccctctaatcttactttgcatcagaaataatccctcaggtgtaaaattaggaaaattacgaaggtataatttttttttacatttttataaatttgtgatattgttaaagggaaaaatatgttgttgaaatattataatatattttcgcaatgtataaacaataatctttcttagtatagcctaaaaataacggtctataagaaaaaaaaatcagtaaaaaaaaattattttgtaaaaatataaatttatttgtagttttccatattcataaaatgattcctaaaacaatatgtcaaagaatatgtatttaacaagctagattttgtaacaagtttgttattcagattttaaggagtgtctgtaatttatttttgttgaacaattaatgtagctgcacataaattagttacatattttttgggataaatagacaacttgtttagttatatatttttggaataattacataaggcactattttttataaaatatttacatttttacattcaaagaatgttttttttttacatttttacggttttccaaaaaataacacgaaaacaacataaaatcaacaagaaaataacataaaagtaacatgaaaat

SEQ ID NO: 360024 - DNA, 755 bp, Cannabis indica
gattgtattgaaatgggttttatttagggcataaaattccaacaaactcccacttgcactaacataaaaaaagtagtgcatttcaatcaatcaattgtcttgatatcaagatcaagtgtagtgtatttgactaaacccaaattattggaactgtaagtctgtggtaagcaactgctttctccaccattatttcctttgtgttcataaacattgtgcaacatcattttctatatgcattactcttctagggatactgaattctttactgcttattaagtggatctgattaaacagaagacatgtctctaattctatccattatggaatagagataactgttaacgcagatttttgctaaccaaatttgagcctcatgattatgattcaacacaaaaataataaaaactatagaaaaataaaaatatgaacaccaaatttttacgtgattttgcggttcaaattctgcatagtccacgagtcaatcttattcagatttctgagtatattttttttagggtcctctcgtataagagttttttcctcccttttttgagattatctgccactatttataattggatagtgccagttaattacaagactgaccaaaatgtaattatagttattgtcccttaaatcatgggatctgattacatattactaaatgtaaacacggtgcatgattttgaaagtcataccactgtgattttctggcttttactaggtcagtaattatcgtgtattaaacacgtctt

SEQ ID NO: 360025 - DNA, 604 bp, Cannabis indica
tggccttaagattggtctgtttctttcgctggaagaacttgtttcccaatttttgaagaagacaaagaagatgcacgagttaaattttcggtttgatacttggaagtggctaaggttaacgaattgtcaacctgggtcctgggtgcccaggcaccaggtgctctaggtgcttaaaaatgaaagttcttcgaatctaattttgatgcctcaaatatttttgtggtatgtctagtttttgtcttagtgcaaattttgatccattttccctaagaaaatcctagaaactgaaaccctagttggattttaaacttgggagctgggtgaaaccctaggcccccgggttgatttttgaggtgttgttttgtgtgtttttagcttgtgggccccagacttggatgcttgatgtattcatggcaaaaatagtgaaagatagtgagttagaaacaacttggtgggatccaaacacccattctggtgttctcaaagtaaaccttggcgtagggctagggactgttgggttttgtgccctaaagaaaacccatttcaatataatcagatttacttattaataaagatcgaaaataacattttatgttgcatggtt

SEQ ID NO: 360026 - DNA, 588 bp, Cannabis indica
ttataacaaaactcttcataatttaaagttatacacatataatttcataattaaaattttattatacctataactttaatttaaaattattacacttaatattttagttttgtttatttaaatgtttaaaaagtaaaaaagtgaaataggttgaatgtgttttccaaaaaaaaaaaggctaaactcctccatcattttttttataaggagtcatttactcaaaaaaccaaaccagggttaaaaaaacaaagtgaagctcccctagaaaataaagcaacctcaaactcgaatagaaaaactcatccctccttgtttcaacttgttttgtacataattgaaggaacctttcacttgaagacccttcgctagtaatctcatatgcctatcaatctcgaaatagattaaaactagaatgagattgttggggatatttacttagaagggaggaagagcaacccattttgatatgcaactccttcatttacaagtgtgtggagagagagagtgtaacgccctaaataattaggcacgctacccaaaatacttataaagccctaatcccctaaccgggattactaattaaaatag

SEQ ID NO: 360027 - DNA, 668 bp, Cannabis indica
tccaattggatgataattatcaggtgtgtctacatattcccaactttattctttttcatgcaatccatgccggctgaccgttgttttcgttacgaacttgtcattgcctatttataggttaatgggtcatcattaataccgtcaccaatgaccatattgatttcaccaattaatccataacgagcttgttttgtggaaaccctcccactatgacgaggagccatgaccttctgaacaggaacatttatggtagattcatcagttgtaacaacttgtgttagttaaaccaagggagtgggattatcctctacttgagtagaagacagtggaacattagatggagttatttccaaaagcatttcctctaacactactttactttgtgacttgaagttctttatatactcatcttaaagaaaagtggtgtttgtagaaacaaacactttatcatccttgcgaatataaagtagtccacccctagtctccttagactttccaacaaacatgcaaactttagtttgcgcttctagtttgccttctttctttcttaagacatgagcaacgcacccccaaattctgtattagcgtaaactagctatacaaccattccatagttctacgggtgtcttagggattggtttagatggaacaacatttaaaatgtcatt

SEQ ID NO: 360028 - DNA, 868 bp, Cannabis indica
tggaagctcttttggccatacccctttacgctcttcgagtgttcccttaatggtatgcttaattatcttattcactgcctctatttgtccattgctttgtggataagcaactgctcaaaatgcctttttaattcccaactcatcacacagctggcgcattttcttacagtcgaactgctttccattatctaaaatcaacttgtaaggtatgtcgaatctgcagatgatggaattgtacacaaactctcgcagtttaacagctgtaatagtcgcaagggcttttgcttcatcccacttagtaaagtagtcaactacgactacagagtattttactccacccttccctttgggtaattctccaattaaatctatgccccagactgcaaaaggccagggaatcgttatagagttcagtcgacttggtggttggttggcatacgtggctatccgttgacatttgtcacactttttagcaaagtttaaggcgtctagtcgcagtgttggccagtaatacccttgccgcattatttttaaagcaagggcattacccccggcgtggtttccacagatgccaccatgcacttcgcagagtatatagtcgcactcagctccatctatacatttgagcaacggttggctgaaacttctgcgataaagcctgccatcatatatgacatatcgatcagctcgataccgcagttttttggcctctgttttatcttcgaggaggacttctttttccaagtaatccattatcggggtcatctaggtgacttctctgactgtatctacctccatcaccttgctccgactgaccattggatgagttagcactattgggttttgtgccctaaataaaacccattac

SEQ ID NO: 360029 - DNA, 673 bp, Cannabis indica
taaaagacgatatatatatatatatatatataggttgggtaagattcacactactttatttacgttgtggcagagattttctagaatttggcgcaatattcaataattataaaatgaaaaaatcattacatatatatttttccacaaaagaaacaataatattgattatacattgacttgtaaaaaaaataactatatattgatgaggagaggtgtggttgcaataaacttagattccgtttggaatttgagattggacaagaaagaattgaattagattaaatttgatttaataagattggattatgctcaaagcaattttatattaagattaagaatagattggattattttatttatttatttatttaaaaaaattaaattaaaataaaaatataataataatagtaaataaaaataaataattccaaacaaaaaaataaaaaagaataataaaatgattaaattataaaataaaataaaataatatatcatatatatgtaatcaaatatatatcttaaatatattataaaataatttatcatatttatatttaataaataattacaatagtaaaataacaatatttataaaataatataaagttatttatagtatataataatttaacaactaatttaatataaatattaattttctaaattaatgata

SEQ ID NO: 360030 - DNA, 510 bp, Cannabis indica
tttatttttataaaacaaatcattcaaataattatactattttaattattaattaaaataaaatactaaaatattaaataaaactaatactacgtggcttggcacgtaacaatcacctagtgtatatatatatgtatatatagcatatagcagctagttccttaattaagcacatgcacaaatatatgattataatatatataaatatatatatatatatatatatatattcttacccaataatagatttataaaatctcatctaagtcgatcgatcgatcaataaaaaattggtggaaggagtatagaaattgatagctactctagaaattggttttttttttttttaaagattaaaaaaagaattgaactcactacacatatacatatatattttttatttttatcttatactaaatatataacataaaagtattttttttaaatattgcgtattcaaaatatatatttaataaatatatttttattattttttttttacttaatttt

SEQ ID NO: 360031 - DNA, 910 bp, Cannabis indica
tgagtgagggcttgaataaatatttagtcaaaaactaataaaaataatgataaatgtatctttcaaattttcatcttcaacaaaataaaataatactgttgacaaaaataaataaaatattgtcaatggtattattttattttttaaaaaagtattatttttttttattatttgtatttggaacaacttttaaaatgggcttgattagaataagagtaggctcatgaatatattgagtgagggcttttgtgaattggactttaataaattgagcaaagtgaattaatatatgtatatatctacatataaaaaatttgatgtatatatttgagtgagggctttagcccacacatgggctaaagtccctccgtccctgactatacttttgagattattaccaaaaataagcttagtgaataattatatttttttagcacattaacatgatcatactcttacaaaattaagaaaaataaaaagaaaaagttttaaaaagctatctacacacttttgtgtttttctttatataaaataaagaaaaaatatgaaataaaaatagttacaaaaatcaataaataaataagttgaaaaaaaaaacaatctcatcaaaactctaattaaatagataaatagtacaataataattataggatgacaccttatttaacgtgtattttcctttatatagatatataaatatacatataaattttaagacaaataaaataaaaaaacattatttatttataacgcatatttaaagagaaaaatcatataaaaaataatataaaattctcataaaattttaaaataaaatgaaatatatatatatatatatatgggtgactattcaatggttacatttttattgtaaccatatggttacatttttctttaacctgtaatagca

SEQ ID NO: 360032 - DNA, 383 bp, Cannabis indica
tcagctactcaatgaaagcaccaaaatatttaccaagatttttagaaactaattaataagagacttaaggaattgcaaagtattaaataatagataaatagatatttttatgtggttcgggcattaatgatccttaatccatgagtcagtagtattagccttcttttgcaaatgtttgagtattacaagtgtttacaatggtaatctctgtattcccattatttctctctaagaagaaagctctctaggaaattcagcagagtttttgtaagtgaaaaattgttccccatttgttcataaaaaatggaggtatttataggcccatgggtgggtgagggcataccctcttaccccactagggttccttactcagcacgcaaatg

SEQ ID NO: 360033 - DNA, 669 bp, Cannabis indica
gcttttcatctaatgcttcaagctcggctagacggactagtacattttcatctgggtctattagttgagtaccaattcttaatgaaggtatttgaacctccaaaggtaacactgcctcagacccaaacaccaagttataaggtgtgcaaccagtcgcggtccttaccgtggttctataagcccataaagcttctaggaggcgttcatgccaatccctcttattctttgtcgctgtcttcttcatgattttgcataacactttgttaaatgcttctgcttgaccatttgaagacgggttgtaactagctgagaaactgtgcttgaatttgtacttgttcatcaacttgaccattgccttacatttgaaataaagggcattgtcggagataatttttgaaggaaccccgtatcgataaattacgtgggtccttataaaatcagcgacatcttctgctcgtacttcttttagtggtacggcttcggcccatttggagaagtaatctgtgatggccaaaatatatttatgggctttggaagagggtggcgtaaaaggaccaatgacgtccattccccatgtttcgaaaggccatgacagtatagaaggatggagtggttgagggggttggtggatgaaatctccacgtaattggcatgacttacaacatttag

SEQ ID NO: 360034 - DNA, 651 bp, Cannabis indica
atcattgtgcaactgtgttcgttttgttctttaccaaatgttttgtacaagtataggtgcccccaagtgactgagcagatttttgactcttggtcacttgttttcgcaagtatgctttttgtctgttcggggctttggatacgaccaaaccttttgtacacatttaatcataaatttataacattctaatgaactcgactcaatttgaattgaaataagcatctttattcatttattcgtcggaaatatgtctgttactgtagtaacttacatcgaagctattatttgatctgatctgatctttagcttagcataaacaaaagaaattggagaaaataaaattgtactttcaaaggtggtcgtccaacctgagtacgttgtaattttatccaaacctttgggcggggtctgctcagaaggtcattcacttaagagtaagtggtcatccgtgttaggttttgtgccctgaataaaaccaatttcaatataatcagatttacttattaataaagatcagaaatcatttttatgttgcatggttcacatgatttatttcatgtttatatttaatgtatgaattctattaagtccagaacatatgtatttgttcttgattacagtgttgtcagcacagtggaatataatcatgat

SEQ ID NO: 360035 - DNA, 646 bp, Cannabis indica
aattttttcgaatttcttaaaattttgcaggatgtcttaaataactataacgtacatgactatgagaaaaaatttgaccaaaaaattatttcggatgctaaaacagataggggtgcatcaatatatccattttaagggggtgcattgtagaattttctaaaactattttcctaaaaacatagataatatatttgactagaatacctcgaataaattgtgaaaatttgttgtatgcttgctgagcaattgtttataccaaaatgtgatacattttatatttatcaactcgcaagtgcacgatttttatattgtagtgtagagattatgaagaataagatcgaattcatgaaaattgcgtgagatcgaagaaaatacttatttaatataaattattaaaactctaacctagttcaaaaaatgatgagatttttgctaacaaaataaaataaagtatttaacggtaaaaataacagtaacagatattttcagtgatatttggaaataatattacgggttcataatccacttaagtatataaaaataattatgtttatattgattctcataatttaattagtaattaaagcaattattttctagcaaaaagtagatttttcttcactttaaaattataatttctaagcat

SEQ ID NO: 360036 - DNA, 512 bp, Cannabis indica
ttttttttcacatttttcacgatattaatttttacagaaaagaaaatactaaaacaaattaaaatagaaaaataaaaaacacaattgtcttaaattaactaaaaataactgtaaaacttggggtgcctctcaagagcgctgttattaatgtcatatagccagacactaatttcttatttgagaagtgcctagaggatggcggacttggcttgatcaatctaaccacctaagtagagctttagacgctcatcatttactttgaaagttcccgatttttcactagtcacatcaatagatccataaggaaaaacttttaccacggtgaacagaccagacatcttgacttcaacttgcctagaaaaagcttcagccttgaattaaagagcttgctaaattggttgaaactctttcttaatgagatttctgtcatgccatttcttgggtctaagagagaataatcactcattgtatatttggtataaatttaagtctgactttaaattttagattcc

SEQ ID NO: 360037 - DNA, 892 bp, Cannabis indica
acaattttccacactatgattgaatattgacttgatatgtgtgagcatatactctctccactatagggcacgaattcaagaggggagaaaagaagggaattcaaaaattatagaagctctcttatttgtctaacgaagtgatttcttgtgattagcctctagcaaataagagcctataattatctatttatactatacctattagggttaagttaggatttaaatatatggattaaaaaaaataaaatggctttaaattgatccctagtggttgaaccccttgtgggcccgactagttttaattttgccactttattaaataacatatatttctttcttaaatatcatattttaactctaactttacaaatatcaattttatctatttaacaattataattaattattaaataaaattatcatttaatttattcattaattagacctatcaaactcccttaattaataaataatcctaaaatctcctttcttctctattaagctcttgcttagtgaaaattcacaaataagacatagtctaatttagaattctaattgattaattaaaagtaattaactgagtctacaagccaacattatctcaactagtgcggggaccatgagcttatataatcaagctcccaataagtagttccagaatttaccaagtaaattctctatcttattaattcctcttactccactataaatttaaaattgcactcctaattatatagaacactttatttattccaaatatatacgctattaattattcattgtttctatccaaataatcatgatcctttataggaaaatttttaccgttctactcttcaatatattttatccttaaaatacttagctccttgtaaatgatattttagtaaac

SEQ ID NO: 360038 - DNA, 730 bp, Cannabis indica
attatattgaaatgatttttatttagggcataaaatccaacaggtgcattacaatatttcaccatcacacgccctgaaatatcctacattgtcaacaaagtgtgccaatttatggcacatcctctcaatacacattggaatgcagtaaagcgaattttaaggtacgtaagtggtactatgtctctcggcttgaccttcagacccctcactgcacttgaaataacaacatttagtgatgctgattgggccagtgacccagacgatcgacggtccacttcaggctattcaatattttttggttcgaacttgattgcctgacaatgtaagaagcagcaaacggtctctcggtctagtactgaagctgaataccgaagtgtggctcaagctatgtctgaacttacatggttacattctctgttttcagagttacatatacgactgcctagacctcctacactatggtgtgacaacctaagtatagtccttctaactactaatcttgttctccatgctaggactaagcacattgagttggatttgtattttgttcaagagaaaatctcacaatagttggttcgagttcaacatgttcctgccacggatcaagttgcagatggatttactaagcctatatccagttctcgttttgacattttctgtcacaaacttggtcttgatgtatgcaccaattccaagtttggggggagtgtaaaggagtttaattctgtta

SEQ ID NO: 360039 - DNA, 610 bp, Cannabis indica
tgtgatgccatgtcagagtgtaaaaaattgaaataacaaacagtataatgatccatattatgtatcgccacaagtatatcaatatgatccctactatgatagttacacttcacaatagggggatcattaaaatacattatatggcaaaataaattacatattgaatctttactcgcccccgagtaaaactaagactcaaactaaagaaaaaacaaagcagtagataactaaactttccagcgattgaactgctaccaccacctacacaacttcaagcaatcaataaccagaatttcaactcgctaactctaagaactaatttggatgtaaaatttagaagtatgcaattcatacaaacacaaaacatcgcatttgacgctcatatcacaaccattctacactttccgacattccactaacacatgatcaataagtttggatgacatccctttctccactaatgttgacaactttttctttggaatcaataggtctttttcgcttatcacaacgtggcttaggtacatgggtagatgacaagtcatttaagctaaattataccataaacacaattaaccaaacaagcacccacacttatccatttttttct

SEQ ID NO: 360040 - DNA, 693 bp, Cannabis indica
ttctctttttttttttttatctaatttatatattattttattacaaatataaatataacaattgagtaatacaacgttcatgataaatatttatatctttcatgatagaaatataactaaaaaattctcttttgtttttaaggccacccaactttgacaggaaaatgagttgctcaataagattaatttctatcataccaataagtaataattagtcatatgcatatcacatcataccaataagtaataattagcacatcatgtctatcaaatttatagttggtgccacagtttcaactctattattgctctatatgcataatatagctatatataccgtatgatatgattaatagaacatgcactagatagtaggtatatatgaatgggaaatttgaattaatatgcttaaattacttaataatttttcccatgcaaagttagtaaaattggttatatatgaccactttaccaattttcctaaactacccctctcatttgaaaccctctctcttcctctctcttcgtctctctcagccaaacaacccaacacccaaaacaacccatttcagccaccacggttagcacacagcccaactcgcaacccactccgacgaactcgcaacccactccgacgtactcgcaacccactccgacgaactcgcaacccatctcagcccccttctctcttca

SEQ ID NO: 360041 - DNA, 635 bp, Cannabis indica
aatatgtgtagaaacaaagaaataaacttaatgttcaaaaatagtaactaggataaaattacagggatgatttgaaatgcacaattgatccaaagaatgccttcctagtcatgcataatttattgttttgcctcaaataacaagtaagcaagttttagaatttttttcaaacaaccttccacatttcacaattagcatacataaaccaattcaattgctagaaatttacttattatgattccatagtcttttaaatcacaaaattaaaattagtcaagaatgtaatatcaccaaacacgctagtttttcaaaaaataaataaaatttccaaatcatgctatttacgtactttcaaattgactcatatttagaaaaatttactcaaacaacacacaaaaaaaaaaaaaaaaacaactgaaatgactaacatgaaactaaaaatttaaagttcaccttaattgacacattgtccccaatgtgacaccaaagaataggaaaaatagaacttacttggggtgcctcccaagagaactgtcgttaactgttgggttttatgccctaaataaaactcatttcaatataatcagatttgtttattaatatagatcagaaataacatttaatgttgcatggtt

SEQ ID NO: 360042 - DNA, 750 bp, Cannabis indica
cacgtgcctatttatgtctacgtggcatatacctacgtgttgctctcacacgtctatatacaataaggcctcagtaggatttaccttgtttctggttaccgagcctaacctggttatgccttgcttgcataaccctattcatgtatatacgtaatccatgtcttacgttctttcggtggtttatcctggtgatatataccaggtctaactgttaggctatttttagcatacgttttgggtcactttttatagttgttttccttctttattattatatttggaatagaattacacttgttttctttggtttcaggtttctcacttggaatgtataaattgatcaaatttcggaaaacagcaatctataaaatagagaaaattctgcaagaaaataaagctgaaacttcaagcttaaatttgactatgttataatcatattttggaaaaaggaaaaacataaaaggtttggatttctttttcttctttccaacgcatcttgaatcaactcatttggactttgtatgtgaaagttatgcacattttactcaaagatgctgaagctgtcaaattttgctctagtagtcgcgaccaccactttccatggtcgcgactacgagccaaacagcaagttttttttttcggtattttgcctatggtcgcgactaggctttatatggtcgcgactaggggcaaaaaacgagatttttgggcagtttttgactttttcaaaggtagcaaccctaatttcta

SEQ ID NO: 360043 - DNA, 605 bp, Cannabis indica
taacaggctgcaaccattacttcttatggtcaatctaaggttctcgccctacaagaggagcacaacaagcaaggagcagcctcactccaacttgaacttgatgccctccgccaagaatactcccagaagattcgtgatctagaaacttctgttgaaagggttactgctgagaaggagcgtttcaggggtgagcttgaaagcgagaatgaggttcatgccaaggttgtcgaggaaaacaaaattaatgtcaaggagtgtgaaaagctagctgcggaggtgaaacagatcggagacctctccaccgatgttttcttcaaattttggctaaacaacaagaaggctgactttagttatctgggtaagaacatggaaagtatgttatcttattgtcgcaatcgtgaggaggcagaagctagggagaaggcgcacgcagcttgcattcaggccgattcatacctcaactttggggttgaggcaacagatgacagtctccttaatgacttacttgatggttcctattgatgtatttctactgttatagattttatgcccactagtactcttcagagattcatgactgttcgggcagtctttaatcctgtaac

SEQ ID NO: 360044 - DNA, 1164 bp, Cannabis indica
atttacatattaaatcgtttcaatacaaaaaactaaaatgccccttaaacataggtctttttcatccactttattgggctgtaaaggcccaattcactatccagcttgtagtccacgtgtaaggctgcgtaccagaattctgctaggtccaatcttggcttgctaggcacttgcaggatgtaggttggctagccttttggtgtcggctaggagtggccaactagtccttgaggtggctggtctgtcacttgttagtcgtttgagtgtagggatccctgtttgctagggtgctaacttgacctccttgttggtgatatgtactgctacgtgatgttgatattttccacgtaagcatgccatgtcatgtgggcaaaaatcctgataacgttttcccccaagtccctgtacggatgtctgtgaagatacagacttaccagccgagtcggaactactatagccttagccaagtagatgttgctgcatcattaacctttgaaatgtctactcttaattgtttgatctctttagttgcggtaaattaactgctttgcatttctacatgtctctttgttgagtatatgtggcaagtgaaggagtggtcccacaaaatctattaaagtcttttttggggaaactcctcttcatttgttcacctttcactctctcactagaaagtaacttttgaagaagctctcttctttcgagaggctgaacccacatggcatcattctcctggtgttttttgcattgtttcgatgatccaagcttcccatcttcttcatcaacaatttttagttgtgggtaagcttttattctcaccattcacttgatttagtagatttttctataagtgcatgaaccttgttctttgctttgaatatctttgaattcccacattagattgtaatccttttggtatttaatctgtatggtagtcttaatatttgtaatgtgtgatttcttgatgaaaaagatctgattccgacctttgttgtgattcttggctctttgagtcacaaagaacacaaagaacgtgtttgagttcttaaaaaaacacatgttctaatctcgtacaccttctttctagccaaggaggtcttgttcaagacctggctagccaagggaggccaccatggagttgttgtaaattattttaccaggatc

SEQ ID NO: 360045 - DNA, 760 bp, Cannabis indica
tttgatattatactgggaatggatttcttgtccaagtactcagctagtattgattgtaagaggaagatggtaatcttccaaccagaaggcgaagaaccatttatttttgttggattggttcagggatctcggatcctagtaatttcagtactaacagtcagggaaatgttatgagagggatgtctagggtttctggccgtggtattggataccactcagcttgactctgtttggccataagacataaggtggttcaggtacctggagcagaaccggtttccaaggccccttatagaatggctccagcagaacttaaagaattgaaaattcaactccatgggttgcttgacatagggttttcacggcctagtatgtcacccttcagagctccaatactgtttgttaagaagaaagatgggtctttgcgaatgtgcattgactactgggaattgaataagctaacaatgaataataagtatcctttacctaggatcgacgatatcttcgatcaacttcaggggaagactgtcttttgaaagattgatattcgatcgggctatcatcagttgagaatccgagaagaggacattccaaagacggctttccgtactaggtatcgacattatgaatttctggttatgtcctttggactaactaatgttcccgcaacttttatggacctgatgaatagggtattcaagaatttccttgatatttgtgttattatatttatcgacgacatccttgtgtactctcaatc

SEQ ID NO: 360046 - DNA, 894 bp, Cannabis indica
ttttttattaattaattataatttgttaaaaaaaaaatgtctctcttaacattcacggttagttccgccactgataataaaaacttgaaaaatgttacttttcacaccctattcaatgagtatatatcaatagataattttttaaaaaaaattgagtaataacaactttgcctatgataattaatcgttatgattatgaaagatcgatccaacaaaatataaataaattagaatttagaaatacccattactaaatatatatagagtatccctcactataaacaaaacttttcctactactaaggtattaataatttaatctctaattttattagtttaattatatattaattaatgtatttatgttatatgtttatatttgtatatggctaataagatcaatatcgatacacacaagacagactgttacccaactggaatattcagatattattttatgagggaattcttgttatttcgtgacactttctttgatcaaaaaaagaagaagactatataatttattttattttatgataaattaatttttttttatagaagataattaattaatattaattagtttattaccaaatatattatgcatggatggcctagatcgacagcttcttcgaagaagcttggtaagtactctactaccacctaggaacacgttcacacgtgtgcatcaataataagaactctcacgtgcacacattaattctaaattttatgttttattaattttaaacgttcgtttggtggtacgtcctattatactgtattatattttataatattatattgaattatattttatacatttttgggtatataccattttagaccctgtattttgcaaaagttatagattggaccctgtgttttgttaaa

SEQ ID NO: 360047 - DNA, 552 bp, Cannabis indica
actcaaaatttttctcaactatatgtgttaacaacaatttcttcacaagtttggaaagtgcataaaataactctaaaaatcacaacttggtaacaaaacatagcaaacaatttaactcaaaccgcaattttacaatcatgctcaaaaaattttgaaaaaatttgacttaaaaattcaacaagacaattaaaattttccaaatgaacgctcaccagagctcactaatcccaactcaaaattagacagtgtcctcaatgttacaaaatatgaaatgaaaaagatagggaaaggagtacacctgattgacgatatgcatggggcgagagcagagataacctgataatggcaacgcaaaacaaacatagaaaaggaaaacacaaaaacaggaataaaattacttactaaaaacataaaaataaaacctgattcgttattggtagacagaagtgatctcctcaggtaagtctaccaactacatgtttgtactatccaatatcgaaaatgaactttcttttatccttcgtctcaaaaattgatgcattggtgacattt

SEQ ID NO: 360048 - DNA, 1135 bp, Cannabis indica
cacaaaaagtaaagttaattagtatattataaataaaaaacacgcttacatattgggatgtttgatatagaaactatgtgatatgatggaattcagatcatttggtatgtcaccgttgcctgaatccaagtgcaccatcgtctgcgtacttggctggatgagtacaagcatccagtgaaacatcttcctgcacgaacaaatatgtgtaaaactgttaatatatacataataataaattctatgaagagttataaacactgaaattatttattttaaatctacatatatagattattatatgaggcaataagccatttgtttgaattagttatcataatcattcaagtcactagtgcttgacaacaattactatcagcccctgcatcggtgggaatcgcacttagattcagaaatttatatactcgattcagcccaccaatgtccaacaatgtttctttcatgtacctgataaaaattaataattaataaccgtcgttgtcaaaagaatattatcaagtttattactaagagttagaaattatacttgcaccaaactcctattggttgggctcccaagtattgcatggtgcacaattcatgaatatcacttttaacaagcaaaatagagtcatcttcgaccccaaatagctcattatacacttggaattggattatggatgacttgagacaccttttgatgaagttccaaaaggtaatgattgaggaagcttagtgtggttggacataacgaccatgaccttttgtgttacttggcctctcagggaattttggaggctgtgttggatgaccgagtaaatcttcagaggcttttttacttctcttcacgggtttcttctaaagtttcttggttggtggttgtgtctatatatatgaaaaaaaaacagtaaagttagcaatgtcattaatgaataaacataataagttaagtaaataaattgaaacataccaaatgttttccaacaggtgtaagatagtctttccaccatgctacataacattttataacttgagctactgttgtcaatgaattgtcggctatgggacgcatgagcagtgcattatctacattggcttcttcgataaatacccgacgataatctttgtgtaggtattc

SEQ ID NO: 360049 - DNA, 364 bp, Cannabis indica
aggtatcgagcgagatgtggcagaagaagatgagttggatccccgtgtgggatccgaaaaaattgtagaacctatggatgacgttgaggaagtggaagtatgcgtccttgaccctactaagatccttcggctgggaaagagcctaaaaccagaggaaaaaggaaaaataattaaagcactaaggtcatccaccgatgtctttgcatggtaccaaggagacatgaccagcataagtcccctcgatccagtaaaggatgaagctctggagaaagaagttgacaaagctactaactagtggcatgatccgggatgtgtattatcccgaatggttggtccaatccggtgttggtgcctaaaccaaatg

SEQ ID NO: 360050 - DNA, 573 bp, Cannabis indica
tcaaatttactgtttgggttgctacattagtttttccggtggtttcaatatgggttgctatgtagattttggttgcaatttaggttgctatgatatcaattttaaatagtaaaaattacccaaaatatggaaaaaaatttaagagtttacttttttatggcataaataaataaagctaagtggttattaggtttttttttttttttttacatatttatatggtttttttatgccataattttgtaaaaaaaaaataaaaatctcatatttgtaaaacaacaataagttttgctgaaaagtcgccgacaccagaaaagtcaccggaaaaatcacggtcactggaaaagtcgtcggaaaagtcaccggaaaagtcaacgtgaccggaaagtcaacaaaaaagtcaacgtcgtcggaaaagtcaacgtcactagaaaagtcaccaaagtaaatgtcttatatataactaaaaatataaccggttatatgaataaaaactaataactcaaatcggttataattgaaatataacccgttctgtaacataataaataaatgtaaataacataaaaataa

SEQ ID NO: 360051 - DNA, 509 bp, Cannabis indica
tttttataatttttcaataataatattagatgtaccaatataaatgtgttacatgtacaagagtgtataaataaacaatttatgttgacaattaactgtggaaaatagatgttatcttaaatttgctaacagcttagtagtttggaaggttttaccaccaaaatttgagattagagggttaaatgaaaatagaatgatagttgaaagggtttaactgcaaataactcttctcaataaacttattctctcttttgatgtaaaatgctataggaagtatttgtttgtgatgatagagagcgactttgagacaatgatcaacacgcttaagggaactacaattggtaactatgtaattcaatgtaaaatgctttcaaactttttgactaattgtaattttttatatattttcagactctgtaactttgcagcccataatgtgacaaaatggacttttgtcggtaatgtcactgatatggtagatctggcttcagggccggccctgactttta

SEQ ID NO: 360052 - DNA, 620 bp, Cannabis indica
gatcatttcaatttgtaaactaaattgtcatttctattttccttgaagccttcaggttgagacatatagacttgctcactcgattctccattcagatcaacaattttaccaaccatttgatgcaactctgaatcaaaatacgcaactaaatccataataattccgaatgaatctttagtgaaaataagtgagaaagttccaatgtaatcaatacactctttgagtaaagccttttgtcactaaacgtgatttacacctttcaatctatcccattttatccttttaggtcttaaaaatccatttgcaacctattggtttgaaaccatcaggtaaaagaactaacttccatacattatttttgtccatgaacttaatctcatcatccatagcttttatcaattttgaagaatgtggactattaagtgcttcactataagtgacagaatccataaaatgatcaatatcatattctctttctccaaggtaaaccaaattatcatgacactttgttgactttcttttttcttttgagatctccatagaggaggtacttctggaatacctctatttgttgatgatcattttgaatgactacatattccacaattggatttctccga

SEQ ID NO: 360053 - DNA, 666 bp, Cannabis indica
atctaagaagactataaattaccttagtaaacctactattacataaatattggtaacaggaagtatatcatattaggccatacaattaaaatcgaagccctaactttattcagtattaatttcctttttgatttaattgcttcttaatttcattgtttctttaatgtttataaatttaattttgaattaaccaaatagaagtaattaaaaatttaattttaaagtacttaactacaatccatgtgggatcgacctcactctttgtgagtctattacttgtttacgatacgtacacttgcttgttgaaaataccaaaatattagtatcatcagagcttgaacaattcaatcactcacctaaagaagatggctcactgagttttctggtgattggaaattggggaagaagtagagatttttacaaatcctaagtctcatttcatgtttaaattgttatttatatattttctgggttatgatttttgtgattatatatatatttgtttgggtgcactcttaatgtgtattacctatgaatgggtaaaattcgaaaattttgagtttttatacttaattgttctatctaattaaacaaatctttcatttttatatcacatgggctgagattgttccatcggtaaaaaaaaattttaaaaaaagtttttta

SEQ ID NO: 360054 - DNA, 751 bp, Cannabis indica
taattctgtcataaaacatcgaaaaacgactctaattgtgacccgaaacatagattaaaaatagcctaacagctgggggcacatagatgacctagacgaatgcttcaaagtcctcaggaaatacaacatgaaactcaatcccttaaagtgctcctttggagtcagcttgggtaagtttctgggctttattgtcaacgcccaaggaattgaagccaatcaagagaagattcaagccctcctagacatgaaatcaccaacaagaaccaaggaagtacaaagtttgactggtcggatcgccgtactcagcagatttgtttcaaaatcaacagacaagtgtgttccgttcttcaacttcctgcaaggaaacaagaaatttgagtggacagaggaatgagaaaaagcttttcaagagctaaaaatgcaactcgcaaaacctcccatattctcgaaacctctggatggagaagaaatggggatatacttagctatcatggaggatgctgtaagtgccgtgctgattagagaggaaaacaacatacaacatccagtctattacattagtaaaagactcattgaggctgatggcccatacccattaatagagaaactcacttactacctgattctagaaacaaggaagtttagaccctgtttccaagctcatcctattcgggtgtacactgaccaaccgttacgccaaatattacaaaagtcggacacctctggacggttactcaagtggacagtagaa

SEQ ID NO: 360055 - DNA, 1148 bp, Cannabis indica
atatgcgtagtttagttttcaacttatttatttttccaaacacaacttatagttttcttttaaaaaagttgaaaaatctcacaaaattttcaaaatagaatgaaaaaatataaaattccacctaactctttgtgttaaaaatttattagttaagatattaataaacctacatattaaaaaatattgtgacaaaataaaaaatattatttatattttacatgtacaacacttaaaagagtatttaaacaaagtgactttttttttggtaaataagaatacttttatttataaatttaaaaagttgtgtaaataatatatttatatgtataaaaagtattgaattagttcatcttgtattataaataaatattttattatatatatctgtgttaattttaaagaaaactataaacaaagaaaaattatatataatttataaaaaaaaataattattaaagatgtataattatttatatgataaattttttatttttatatattaaataaacacttaaaacttattgagtaagacataagtcaatcatccttaaaagaaaaatatttcttagatgagtaaattatggcaaaattcttaatagtttcactttgtttacaattaatccttaaaaaccatattttggtagcaaaacccctaaaagtacgataccgttagtaatttaccatttttatccaaatttagttgttaactgccatggtggattatacacatgaacataatgtatacgtgacccaattttattggtccacataaataactatattaaaaaaataaaattaaaaaaataaaattaaaaagatatatattttttttcttactgtatcatatttttactaaaatatataattttcttctaatatattttttcttttttttctattttgccttctctctctcttcctatattttttttttcttttgtctaatgttgttgataattttgtgtataaatgtctctatttggatattattgtgttctttattttcaaatttaaagaaagataatggctgtggagaaataaatttagggttttcaggtttgattttggggattgagattttgtgtatatatatatgtgtgtttgcttattggatttagatatgtttaaatttggtttaagtttggttt

SEQ ID NO: 360056 - DNA, 585 bp, Cannabis indica
taaaataattctcttatctaaacattttatatagaaatattctatcactaatagttttatataaatctcgcagtttttaacctttaaaaaaagataatgttacgacaatcccttttatagttctcatcctacattcatttttgtagagaaggtattttaacggcaccataaaataaaatataaaaacttttataaataataattaaatacacaaattaaaatattatattttagatatatcactcaatataagtataataaatatatgtacaaataaagattataaaagttaaacaataccgcgcaaagcgcggcttagttacctagtatattataaaagaactgaagttaaagtacagaataaattttaataaagatgaaaaaaaaaattatgacatatatttttctcttttcatattttccaactccaagtaagtaatgtagataagccactaaggttactggtgaaggagagatgagaaaaagagagaagtcatggattcgaacttaagactttgaagctattaagctattaactgattgtaaaatactattactctacactcaaaaaaaaaaaacaaaaaa

SEQ ID NO: 360057 - DNA, 763 bp, Cannabis indica
aggaaggcacagcttatcccatgctttgagatggagaccttggttccctttttcaaatccccaccaaaaattcctgactaaaccatctatcctcgtgaccatacgactagagagtttcgtggtctgtatggcataactcacccatatatttcttgagtgttttataaatcctaacaagtggtagcagagccatcttttgctaaattgatttgaagacctgatgattttgtttatgaaattttagagatttcgaaaattaaagttttattttttgtttgaataattcagccgatatattatttttatatatcaaattctcttttggtttatatacgatatgtgatttgtactgtgtttaatatttttatggtttctgtatatatatatcgtaaatttaaatatatgtttcgatttatgtatttgttcagtaccatcatatcggcttcaatcgtgtattctagtgcatgtccgattattttttttaaaaatatgcgctaagttgtgttttaaatatatatatatatatatatatagggtaatattatggtaggacctagcaaaagttccccaccggtagggaatttttttttaaccgttgattttagatcttgtggttattatgaagtaaggtatatactcttactataggactgcttgtatacaattaaaactttatacatattataataatatttaataatatattatttaaaaataaaataatattaataattaaaaaattattaattttatttttaattat

SEQ ID NO: 360058 - DNA, 1070 bp, Cannabis indica
taaaggcaactaaagcagttattactctataacaattagattagagcacatcaacttttattgaacaaaggctacaacagtcctgaccacatcaatatagctagtaaagtccttatccgtacagttgtccacgcatggacttggggggtaaatgttatcccaatttttgttctcatgatgtggcatgcctacatagaaaaaatcagtgccatgtggcaatacatcttaccaataggaaggccaagttagcacctgaacaaatagagaccccggcactcaaacgggcatcaagtgacagactagctccccttaagagctggccagccagtcttgggactacaccatggccagccagcctagcctccacagggacctagccaactaggaggtgctctgcaggttttactgtgcccttctacacatggacagcaagtcatggctgcaaattgggccctaaaagcccaacaaaatggctgaataatatctagattcaatggcaatttagtcttttgtaattatataacaatctattcaaacatctagggatttaaactacaatctagggttttaggcctcctatataaatgccttaaccttagcctagaaacctaagttgcatctaagcctgtaacctgcctccaagttctaagtgtctaacaaactctctctctctcttcctcactccctctctcacacgcctacactagcatcatctcaacacttgagtttttccattattgattcataccttgtattccaaagggtgttatagcagattccacctatagtgatctggatagtattaacctcagtattaatacaactaaaaggagagtaggtcttacgtgctatcacaagggggccaaacctctataacaaatcttttgtctattatttttcattcttatttttccaaacatgtggcaagtatcagatctatacgaccctactatacgttgatcactttttgagttcaacaacaacgaaggccaaaattgaattttttccatcagaagtcaattattatacattctaaaactgtcatgtggattaaaataccaaaaatatta

SEQ ID NO: 360059 - DNA, 319 bp, Cannabis indica
cccatttgagagacaaaataaaagaaaattgctaaaaattattattggtacctagtactttccttggtgtcataacactataggtataattaagtatcgagtctcatataaattaaaaaaatagcttttaaaaaatattgttagctatttatagggcgccacctataaaattgtgttggacagtagtgttaaaattattattgtggactaatataatcatgaacttaatacaataaatacaatcattaactatgtggctaatatttgttttctaccataatgggatagttaataattatatattatgttagaggcacat

SEQ ID NO: 360060 - DNA, 588 bp, Cannabis indica
tattttgtcaactaatttgtcaaaaaaaaaatttacaatctcctcctttgatactttagataattaaaaatatttttaattaaaaaaaaacctagcaaaacaaaattagtaaaacaaatatataaactctccctgagaagcacaacattaaacaaaaaaaaaattaactttaactaaagtttaacacaaacataaatattaactctcccgagacagttgagtatacaacccaaattaaaattcaaattactcaatccttttgtttatctataagggtcaaaaagaaaccaaagcaagttcaaacaaaacacaaaaagagaaataaataaagagaaaataaattggtataaataatgagatgaaaggaaaccaatttaaaattgaaaaaaaaaaagaaactaaaataaataactaacctttaccccttaaaaaagaaaatcacctttttttttagcacatgaaaagtaaaataaaaaaaaaataaaaaaaaaagagaaacaaataagcaattaaactaagagttcccaaaaaatattaattaacatatgaagaatcaatcatgatcaacaattaaatttcaagagaaaa

SEQ ID NO: 360061 - DNA, 658 bp, Cannabis indica
gacaatggtaatcagaaacagtagcagtagatgcgtgtaaacctttaaccactaaaagagagtctgtttctaagatgtgagcagtcaattgattatccatcagccattttaaagcattcaaaagagccaaagcttccattatttcaggccgaaaaacacccggaattgactttgaaaaagcagccacaatatctccattagagttccttaacacagctccacaactagtacgttggttggacttgtctactgccgcatccgtatttaacttgagcttacctgaaggaggattgagccacgacgcatcaaatgttgcagtcgaccgagagggagaagacaaggaaggagccttagacatctgggcagattgatactcctctatatatgacagaacaaaatagagaaccatatcatatggcttggttttatttccatgcttttctctattcctttcatttcaaatataccacaagattgtgataaattgttcaagtgtagagtcagaccagagagtagaaaaatgaagaaagcattcctttaaagacatactgctaaggaatatattgtcaagtgagaaaggggagtctttccaaattttcctaggcctgtggcaatagaacaaagcatgtataattataaaaaattaaataatttagat

SEQ ID NO: 360062 - DNA, 822 bp, Cannabis indica
agatgcatctcgaataaagttatttataataattaaaaactattgaaaatataaattctttttaaatgagttaaatattatagtagagtagactttcattcatttatagcaaaacttaattttttattcatatatatttaaattaaatatttttatagagttaataagtataatactcacatagtttgtaaataatgttgaactcttataaaaattaaaaaatatacatcacttagaagatatattataaaaatgatcataaaatgatatctcatttgatttgtgttttttcttatatatagaaaaaaaattgtctagttttatttaaaataatttagtttgaatacttttttgagctaacaaaaatatagaatagtatatataaaattcttaaattaaaattaatttataataaattgtatattattatgtattacataatagattgtatattagataaaaaataaaaaacttgttgacctcgcttttagccaacgacaatgagtctaattttgtaagcgacaagtagtttaatacgattgaaatatggtaaagtaaataaagaaacaagaattttataaaggttcagccctgagcagttcggtaatagcctaattctcgttatttgtattgacttaagaacaaggagagtagttctttttcttagagctcttacaacagtatctctgaatatgaattcttagacaaaatcttttgaccctttgcctagtgaatatgcatcactatttatagggttataagcttggagaggaagtattttccttctcgttcaattgatataagtagaaagattgcatagta

SEQ ID NO: 360063 - DNA, 822 bp, Cannabis indica
aagagctaaaaagacaacttgcaaaacctctcgtactctcaaaacccctggacggagaacaattaggaatatacctagttgttatagaatatgctgtgagtgccgtgttgattaaagaagagaacaacattcagcatccacactattatattagcaaaagactcattgaagttgaaggatgttacccattgatagaaagcttacttactacctaatcttaccaacaaggaagctaagactttatttccaggctcatcttgttcgggtatacactgacaaaccattatgccaagtattgcaaaaactcgacgcttctagacggttactcaaatgggcagtagagttgggtcagtacgaaataatctttcaaccccgaacaacagtcaaaggataggccttggtagactttgtagttgagtgtgccgacaaaaaagaaagtagctgcttaaaggacaacccggagccagtacaagaatccataccaaacaacaacgaagacaaacctacctagaaattgcacgtggacgggtcaactacagatcaactatcttgtgcagggattgcccttatcacacctgggggacaatatctgcatagagtagttaaatttggattcaaagcttctaacaatgaagcagagtacgatgccctcattactggcttgaaacttgcttgggagctacacgctaaacacatcgagatctgtagtgattcacaattggtagtgaatcatgtgtcgggagagtacgaggcccagggggagaaaatgatagcttatttaagaaaaatacaggatatgcttgcacaattcaagggttatac

SEQ ID NO: 360064 - DNA, 1267 bp, Cannabis indica
tgaaattattaaacaatttaaatgatgactgtagtaaaattgtttgaacaaaatttatctctgttcaatcagtcacaaaattcgacagaacagaaatatactgcagaaagtaaaatgcagaaaattaaaatgacacacaacattttatacgtggtatcaaaaactcttttgaatttctcttagcccacgggaccacacccagaggaagaaatttattagatgaatttcaagtgtttataaaccaaattgacttatacaaataaaaactccctctttgaatttgtcgcaactgttgtaatcaattcttctaatcaaatttttgaagtgtcgagaccttgaactctcttcaattcgtagtacttggacacttcatctcgaagagtgtctcacgtgcaatcttcctctcaaagagtgtttaacttgcaatcttcctcccgaagaatgacgcacttgcaatttcctcatgaagagtgactaacttgcaatcttccttccaaagagtgactaactcgcaatcttcctcccgaagagtgactcacatgcactttttcatcttgaaaaggtgactcacgaacaagacttctcccaaaccttgattaacaatatccaaggtgttcaacctacacaattttagtaagaaacaatacatagtagcacaataataaaatactaagaacttgttggactcaagttcttcacacaacaaagaaaatactctctaactttgaaaagtaatttagaattgatacaccaagagagctaactaataccagcaacttaagggtgtattttatacactttacaaactctctaggtcttggtcaagcaaccacgaaacgatcaggtcattaaataaaaatcttcccaaaaaggaaagccaaaatctatttaaacacacagtcaatctgttcaaacaggtacagtgaacttggatagtttttttagcaaaatttccataaataaataagacaactttgactacatttatacccatagttatgcacggtttcttggtcaagaaatcagattaaaaggaataaaatatgaataagaatttccttaaaaagtaaagaataagatcaaatattatataaaaggaaaacttatatttaattcacacaaagtcaaaaagaaataggatttgattttgaaagccttttcacacaagaaaaagaaactatattttcgaatttaatgaataaatatatagaaacaatttcaaaaataccataagtattatttttgtctattttatcaaatatgccaa

SEQ ID NO: 360065 - DNA, 639 bp, Cannabis indica
tacaatcctaatagtcaaagttcctttatagatgatctacattgaaaacggataaatttaccattctacccttcaatgtattttatccttaaaacacttagctacatataaatgatatttacgtaaactaatataattaatgaaatgaggcctcaaccatttatttctattcagccaagcttgaaaaaaatcatcgtttcacttctaaatacttataaaagctatagattccatatctatgattagcgctcccactcaattgaactaccatgatcccaagatgtaaatatttgccagaaccatcggttagcttccacgaacaacataaagaacataaataatacaaagctaatcctaatcatatcaggattaagatccatagacctgagatcaactagtgatattgacttagaaagatataacggtaaatttatgatatgttgtctaagattaatatcgttccaatccaatgtatactccatacacccgatactggtaatgtcttgaaaggacataacacttatccaaggtgtaagcataccttattgctcattatcatgtcagtctaaatctactgaacttacaaattatgagaatttaactcttgaacatgtaatcatgattatattccactgtgct

SEQ ID NO: 360066 - DNA, 768 bp, Cannabis indica
tctctcactagatgaaccattaaatgtatcatgatgtcgaaaaaagatggcgaaaatttttctgaggctacacaatgttttgactacatcttcatgtaatgcatctaatttatccatttattttttccttttggacaaagtgaaacaagaaggaggcaaatataatcgttcaactttcttttcaaatgccaaagattgtcagatacccatttcaacaagatttaaatgactatttaaaccatccttagttttgtcgggaatatcaagtagggtactaataatactctcacacacatttttttttttcaatattcatgacatctaagaaatgtcgcaccagtaaacttttccaatatggaagacaaaagaagatttgctttctttgaaaacaaccatttatcttctcatattttgttgtgtcttttcatacttaaaatcaactagttctacttcttggagaatttatttccctggcagtggcaaaggagtcatatctccttcttcagtaccattgaatctttcttcttccatctatcaggatgatttgtaggcaagtaccatttatgacccatataacacatcttgtgtctattttccaagtgacgagcaatgtgttagtgcaaaaaattaaacaacctttgtaaccttttgtgcttaagcctgataaattaatgtaagctaaaaaatcattaatagtccataataaaactgcttttagattaaataaatatttttttaaaaccatcatatgcctgaacactatctcat

SEQ ID NO: 360067 - DNA, 934 bp, Cannabis indica
gaggaggatcaaagtacccagtggtggctgtctacttcttcacaaagtggacagaggctgaacctttggtttccataacctggaagagagttctcaactttgtcgtcaagaacataatttgtacgtttggaatacccattaagatagtatttgataatggaacatagtttgatggtgaattattcactgattctgcgagaggaacaagattattgagagcttctcatcagtgtcaaggccttaggcaaatgggcaagtagatgttgttaataaaaccttgaaggatactatcaaaaagaagttggacgctgccaataaaaccctggttcaactttatgtgatcgaggcaatagtaggaaccggggcttacaagttagctcggcttaacgactcgctaataaagaaccactggaacgtggaacatatgcgatcctactaccagtagactgatgttgtaatctcaatttttgaggtaatattttgaacttaaattattaataaagttgaatcaattttttaagtaattacaaagtttcattctttaaaattacttgaggggcatatatatgtgtgtgcgtatgattaaccggaattcatatgatacattattgcaaacccactacactttaaaatttttaaattttaaaagtttttgattaaaaaacttttctcgcaagaaagaaaattcaaaggtagcagttgtaaatgagagataactcataaaacaacattaagctacatgcgaagctgaatgctaatggctcgcattttataggaaagtattaaacgatacacaagatgccttgaaaaaatactttaacctaatatatgaatagaaggcctaactattcatataagcaatcaaaaatatacaaagtgatgaatcattaaaagtatatttaagtttgcttaaaataaattataactgtttatg

SEQ ID NO: 360068 - DNA, 643 bp, Cannabis indica
attttctctacaacttctttttctcttctagctatcttttgcatgcaagaagcgctagaagatttgatttagcgattgctcgtcatccgcaaagaactttttttaaacaccgctccccttctattggaccagcaaagttcttccgtaggggaaacatttgatttttgcggttaactgcgaccactgcattaactggctctagagcttttagataggctttcatgacaagccactcaccccttctgattcggcaagtaagtgcactaaccccctatctgaatttttggcatttcacatttagagcaagaggtttttgcttacgttggggctaggactgttcatgtaacaccctaactagcataggcgtattacgtgattttttaaacatactgtgcagctcattggtaatcaacgaggtttatggtaatcgtgattaattaaaatttttgctttttaattaaacttatagaatatttatacaaaatactcgggatcccgattaaaaaaccttttaaaaaattttactgttaatacaaaatacttgtcgcctagcgactaattacaaaaaataagccttactgtcccgatgatcgtacgctccaggcctaaccgcccccgacatgtacaatcttcataggctcgt

SEQ ID NO: 360069 - DNA, 528 bp, Cannabis indica
aaccatgcaacattaaatgttatttctgacctatattaataagtaaatatgattatattgaaatgagtttaatttagggcataaaacccaacacgccagtgttccaatataagcgtattctttggctaccagatttgctcgaaacggtgggtgtttcccagtaacttcagggtcatgctcgtgaacgcatgccccttcagtcactgggattctcccagccgttttttgaggcacatcgccagctgaagattcgtgccatattcgcaggttgtgattagttaggttcctcgaaacggtaggtgtttccatgtcacttcagggtcatgcccgaaaacgcatgtcgcttaggttactaggatacacccagccggtttttgagatatccttctattcgcacacctgacatttcatgtcttggtgggctgattggtttttgcaagaattcaaatcatccccctaagacgattttatattttatatgcgggtgggtcacttactttgtttttgcacattcaccacgctgaaaag

SEQ ID NO: 360070 - DNA, 508 bp, Cannabis indica
aaaaaattaataaaaaaaattattaaattttttctcatcatgcattggaatggtctttcttccatttcaaaatggaataatcattccaccaaatggtagaaaagctacttcattgtaatagcgcattccaatactttaatatgcaaccaaacaaaagaatggaatagagattgttttctttcctttccattcttcattacctccaaccaaacgccacctaaattatcaataacccttcttccccgtgtaccttatattatcatcatattaatagcaaattagcaacactacgtaaatgttcatcattaataattgttaaaatgatttgcatggtattttttttttttttgtaataagatttgcattaattgtatatataaatacatacatatatatatactagcaaaaaattacgtgcgaggcacgtatactaaattttatgttagtttttttctacgttattaaaaagtgatacaattaaaaataaaatatatatattattagttat

SEQ ID NO: 360071 - DNA, 780 bp, Cannabis indica
attacaattacatataaataaatattttaactaaaaaattaatgtaaattattttaacaaaaaatatatatataaatggtatttatataattattaaataaaattaatatacggtatataataaaattattaatcaaaagattatatagaggatacaaaaggaaatagttaaaggccatgcgaaaaatcaataaacaagatgcgtaaatggctaaaatcaaagctgaaatcaagaatatttcagccataaagatacaataaatagtgcattcacacaataaatccagctataattatggctaggtagtaaaactatttaaatatggaaaacatacataattaaataaaattaaattaaaaatgaatctaaaaagtaaatgtcatatttattttaataaaagtagattttaaaaggtaaaaataaatcataattaacaacattaaacacagtttaatcaccaaaaatttgttacaagtgactaaaaatacacaaattatcactgttaggctaaaattagtctaaatttcgggtcatattttcggttagttttcactcttgtttctagttttagggctattttacgcttgattcttttgtttcaggtccttgggcgtttaaagaaagtatgtacaagaattgaggacgcgtggtgaaagaatcgagaagaaataccaaatattgtgtcactgcctgttccagtcgtgacgggaaacatggtagtcgcgacgggaactggcagaaagttttccaagaattcgctgcttaaccccgtcgcgacg

SEQ ID NO: 360072 - DNA, 588 bp, Cannabis indica
attcttattttgatcgaagaaaatgttgctagtagatgagctgacaactctattcaagatatctttgactctcgcctaccgggacactgtatcagtttgttagaaaccttagaaattatttaagattatgtcttttgtattttcacatgtctttgttatttgttaaatgcttaataatttctgaattgtgtgtgcatttatattgaaccatgttgttttctgttattaattgtagttgaaaattttgtgtaaaataagaataactttgactcccgcatactgggacatcgttggattcttattttaatcgaaattaacttaatttttcctcttagtttattcatttagaatttgcttacataggtcattctgttttctcttatgaaattgaatggcgcatatgattatattctcgacattctatcccgaaatgatataaatcctcgatcttgtagaatctcctacttgtatatgtttactttaggcaaattcaatttggagttagattagtagtggtggtctaagctagaataatcactcattgtatatttggtataaatttaagtctttgactttaaattttacatt

SEQ ID NO: 360073 - DNA, 890 bp, Cannabis indica
atcaaactgggaatattaaaatacggaattttagactcaagcccattactcaacaacccagaagacccacaaactaaagcttcttgttcaatcgttttaacaccttcttcgccattactgttcttaaaagcagaagcaatcatcaattcaaacatggggttgggattgggaggccaagcaagtttgggacccaagtaagaagaaagtattcttatggaatgaaaccttttgaacacctaaaattgcaagtataaaaaatcattcaaatgaaaattgcagataaagcgaagcagaaggaatacctaatgctcatcatgtccatggccatggccatggtgttacatgaaaagttatagggactaattagcaactgttagtattgcctagttagtataaatatgtaatactattacacaaatagggagcaatgaatggaatgagagaaaattaggattattcctattggagtttcgcactgactcgaagagtgcaattcgatacaatcagtaattgtatcattggtgctttcattaagagaatatcagagagagatttcagtgagagatcggtactatgactgataaagagcttgttgaattcgttagatccatgatgagttctatggaactgcgtatggagcaacgtttcaaggctcaattaaagaaattagatgccatgtttgaacgctactgtccatcgacagaggcactgctggattcctcatctcaggcgccatccacttctacggagaacgacgatcacgttcgcaactctgacgaactagtgagagtagccattccattggagattactcctgcagccacacacataatcggcgactccccaagcatcaacatcgttggtagctgataagggctcaaattgataca

SEQ ID NO: 360074 - DNA, 1440 bp, Cannabis indica
gcttatccaacagtgaggggtagacaaatttgtcctagagtaccactccttggccagggaaaccatagacaggcaggagacacggggctggatccttgagctggagtcccatcttttcataagcggtcttgaataagatattggaagaggctctattatcaatcatggttctggtcacaatcttattagctatgtggacctctacgaccaacaggtcattgtgtggaaatctgattttgacagcatcttcgtcaatgaaggttatggtaggccctcctgctcgtggaatttcgggctttcctttcttctacggccaggacaacttcctcttgctcgtgctgcgccgttcgggcatagctctcccgagctttgcccgaatctccagctatgtgcgagccaccaataatgacttacagatgtccgtctaccggtggaggtagcaagtcctggttattgtcgttcctctgattctgatcggtcttgacatacttctgtaaatgcaggttgtttttccttatcaagaattcaatttcccgctttagattgttgcatcgtttgtgtcgtggtcgtagtctccgtggaaatgacaaaactttgtcatctctctcttgctgacatctttcttcatgggtgcgagcttcttgtacggggctagtgactgggtggccatgtaaacactttctacgtcttcagtgaagatggtaaatgcagtgtactttgcttgattctcccggggagcttgctcggtttttttggtgaacttccccttcttcccattcccttgcttgttgttgttgttgttggaacgtttaccatttgagtttgaattacttaggtaatgggggagttgggcagacgttcgagtggaaggagcctttgacttgccaggcttttgctcaccttctcctcgttgaatagtgttagagtattagttgtatattagttgtaaaagaattagatatttagtagtttcctattttgttggtagtttcctattttagtctcctagatttgtatataaatatgtactattctatgaaatacatacacaattcgattcactattttctacatggtatcagagctttgtgattcgaaattagttttcataaaaaaaaaattagggtttgagtttatggttctttttcgaaaatctttttggagtgtgaatttattctcaccgctgactcagtcgtgttgcccagccaccgatctacaaaaccccgaagtccggtcgccggattcctcacgcatggggctcacgtgcagcttgaagtttctgtgcgtcttcccacgcgccagcgcgtggaggcgcgtgtgcaggtgtcttcgacgacgttcttttgctggttctttcctttgttcttctaagtccactcgcatctgcttaaggttgtaattcggtcttttcttgccttcttcgtgtttgggtgttcattc

SEQ ID NO: 360075 - DNA, 755 bp, Cannabis indica
aaatttttggtctattatctaaatttttcaaataactctctaagacactcagttatttctcaaagcaatgacaaccctctcaatggcaccattctcatgttatttgaaaaacattatttttggaaatgtcaatatataattttactaaattttagtaaaacacaaatataacagtctctagcaacaaattgcaattctatcacagcaaaacacaaatttgcaaaatcaaaccagaactagaaataaataaatgcagaatttaaaataacttgacataaaagaattatacttggtataagttttctttcaaacactcttagtccacgggaccacgtctagagaatgaaattaattaattagtaaagtctcaaataattacaaatacaattgacttaaagaagtttagactccctctaaatttttgccgcaatcctttgcaattcacttcacaaatctgatttcaaaacaccaccaaacaacgaactccctttgtctttgatgagtgagtacatactttctcccgaagtaaggcttgaactagtcttctccctaagacacttctcttgttcaatcaagttcttcaaccgatcctaagagcagtataagaacaataacataaacactaaaacctagctgaacaactaggttctcacaaaaagaactctctccttacaaataagaaaatatacaaaaaaaaaaaaaaaaaaaaaactagattaggtaaatcgtttagctactctctaggttctatttat

SEQ ID NO: 360076 - DNA, 668 bp, Cannabis indica
agattaaatgtaaaataaaaagtgaaaaaagttagtaaagaagttgaaaattttccctttaaaaaaatgaaaacaaattaaggaaaagaaaccaaaaacaagatttaatacttttgagtttttatgttgaatttattttagttttatttttctttatactattaattttcaaaagttaaaaatataatagataaatggcatacgactctgctggggatcgaacccagaatctctggttccgagaccagcgccttatccattgggccacagagtcatttgatgtattgttatgcaaagataaacattaataactgttgtttattattattttttttcttcttcaaattatgttaccaattatttaaatgtgtattttgtaatacatgttagaggcattagtccaatttaatccatactattttgtttacaattcatcaaattcgtactaagtgtagatttaatatttttgatccaatcaacaaaaatgtggattgagttagttattttggaattgttactttttaatatttattaaaaaaatattcccacataaataacaataaaataaaataaattagtgttgttatatacctccaacaactaattaaataaataaaacaaaaactaataattaaaggaagaaaaaaattgtatgtataaaaaatgtt

SEQ ID NO: 360077 - DNA, 562 bp, Cannabis indica
ataaacatgaaaactacatgtaaacagaaatgacttctaatctttcattgataacaaatcagattagattgaaatggattttatttagggcataaaatcccaacacccatcagcaaaaagtagctcggtattttaaccaacaagtggaagcacaaaaattctttgtgggagatatggtcttaagaagaatattttggaacaccaaagacagtacagcaggtgtgctcggaccaaactaggaaggaccatatcaagtggtcgaagttctagaatcaagggcatacaagttgggtaagtatgatgaaaaatgaaactcattctagtaccaggctattggaacggagaacatttaagaaaatactaccaattaaagtaccaggtcggatgaccatatcaagtatgaaataaaagaacattttcaattaaatgaataaccttctgggcggaccacacctaaagatttggataaaattttcaagtacttaggtcagatgaccacctttgaaagtatgatttttattttctacaatttgttttgttcatgttaagctaaagatcatat

SEQ ID NO: 360078 - DNA, 669 bp, Cannabis indica
cttgaagctaccattggcaccctgtcggtagaattgaatagccttcaagaggaaaggggagttcttcggactgtcttccgtcggctggaagaagagaagaagactaaggaggagacgcttacagctgatgtggcaagactggaagagaaagttcaccctcaggcgaatttcgattacttaggcgaagccaaagacaggtatctcgagtactgcgcttcccaagtggcttatggtgaacccgaggcgactgcttctacctctagccagaatgttgatgttccttctactcagacaatagatcctccagctcctaccggcccagaagacccgaaccgagagcctgggacactccagctatttaaataattctcattttagctttcttttttatatctatcttcttcggccataacgcctttttgtaagacatcatgaccggccaagcagtctttaaacttggaatgatttttcattttacaaccaacaggctgaccgggctgcttttaatctcggtattacgtgcttttgttatctttaatgaatttcattctctatttataatcatcatgcaattgtgtttgttttatctttaccaaatgctttgtacaggtataggtgccccccaagggaccgagcagacttatgactcttggtcacttgtttttttac

SEQ ID NO: 360079 - DNA, 579 bp, Cannabis indica
atttttagtttcgtattggaagtatttttctagaaagtagatgaaaaattaatcaacttttacggatctcaatttggagtaaaattgagttagatatgatttttcaaaaattggttattggtcgagatacctactagcgtgcgcggattagacacgatttgtctgaaaacctcgctcaagcacgctcagacatccctcttgcgcgcgcagaccccccctttttggcccccattctctcggccaggtctgagtgatgtggcatgacttgcatccaaacttgatcttatcatatcttgagttttaaaaaattattttttaatgattcaaatgccaaaatttattaattttttatatagaattcaaattttaatttaaaaaccaaaatatcagaataaaaataaattttatttattttttaaatgataaaggttgtttttagattataggaggtttacaaatttgaaaattaattattttatttggatttattaattttaattataagatcagatatttagatattttattaataaaatatgaaatgattttattttgacattaaaatattaataaaattta

SEQ ID NO: 360080 - DNA, 685 bp, Cannabis indica
tgtagttttgtatttagattttatttttcatatttcaaatctaattattagaattaaattaattaatattttttttaaattatttaagatattagtgatatttgaaccttgaaaataagtaaaaatctatcattttgcttagtttgttatcttatttataaaatttgattattttatcttatttttaaatttaagatcagatattttattttttaaattatttaattaatttttattttaaaatgaccttatttgaaatttaaaataagattattttaattaagaaattttaaattttaacaagatattttgctaattttcaaattttgttatttttaatttaaattaaattataaaattagataaatgatatttatttatcattttatttttattgaatatttaattttattttaataacatgaaatttgaaaagttgttagcaaatttttgaaatagatatctaggtttgttgaaaacttaatttttcaaatttataggtttaatttttgaaattaattatttaatttaatttgaaattttcgaaaattatattttattatttaatttgtttcgaaattaattaatttaaattaaataaatcctatatccaactatccaatgtgttgcatgtgggtgtgttatattgtttattattaaaaaaagttttataaaacctattatt

SEQ ID NO: 360081 - DNA, 596 bp, Cannabis indica
taaattttaataactaattatttataaaatttttaaataataataatttatttaaaaactaattatttatatttattttaatttagaaagtaaatttatttttatataaataataaataactcaaaaatttaaaaattaaaaatttaaaaattagtaatttaatgaataaaacttttatttaaatatattttaattgttttattttaaattttatattgtaatatgtaaaataaatttttttataataataattgttttcattaaaaagtatagtaattttatagttttttaatagcttaataaataatttaaatattacaaattaaaaagattaattagaagaatttatttattgtttaatttaaattaaaattacaattgaatgagtaaaatttttatttaaattttaaaaaaatatatgttattgtatttttaaggtggtataaaaaataaaataataatgaaaaaaatagaaaatggtaacttttaataaatttgttttataaagattaatatataaatttaggaattaagtatatatattagtttaaattttgataactaatttttatgtttttaaataataataataatt

SEQ ID NO: 360082 - DNA, 509 bp, Cannabis indica
ggaccgagcagacttatgactcttggtcacttgtttttttactggtataatttttcatctgttcggggtcttgggttcgaccagaccttttgtacgcaatggatggtaaattagcaacatgttagtaatttcgtctcaatttgaattttgaaataaacatctttattcatttattgatcgaaaatgtgtttgttactgtagtaacttacatcagagctattgatctaatctgatcttttagcttaacatgaaaataaaaaaaatcagaaattataaattgtactttaaatggtggtcatccgacctgagtactttttcatttttgtcgaaacctttaagcgtagtctgcttagtaggccattcacttacaagtaaatgttctttcagtacttagtatggtcgtccgacctggtactttattggtagtattttcttaaatattccccattccaataccgtggtactagaacaagttgcattttttcatcatacttacctaatttttatgc

SEQ ID NO: 360083 - DNA, 827 bp, Cannabis indica
atatttttgtcaattaaatatgccaaaaatagaattaacaattattattgctattgttgggccaattcgtaagaaagcaaggaagataaggaaatatctcccactgcagcagtaagacagtggtaataaattaaattatgtatgattcttttcttcttcttagatcattgatttttttattttattttttcgatcggggtgtttcatgaatttaagaggaaaataaaaattgctctcgctatagcttgatatctgtttttgtcttttggtatagtctgaaatgaaatctcaaaaggagagacttttcagtttgcaatggggggattaaggttgccactaacatttttttagatgagaacaaaatgaggagatgtggatttgagaaagtttacatggtatgatagtattatgataaaattctctaatatgtattatgtatattgcaataatttattagctaaattaaaatctattatcacactaatttttatttttagggtacactgagtgattaacaaaaaatagtcatgaaaagattaattgaaaatttgggacaatgagtagaataatttaagaatgaggccatattaatgggcaaacttcagcacaaaaatcttataaggctattagaattctacttgaaaacagaagaaaaaattctcgtctacgaatatgtgacaaataaaagccttgatttctttttattgagtatgctccttaatatattaagtgtgaaaatatgtcgaatttttaaaagttctataattcatattagtttttgttttaatgtgatttgtgttataaaataatataatataatataaagt

SEQ ID NO: 360084 - DNA, 488 bp, Cannabis indica
agaaatttttacaattaaaaatacaaaatattatggaaataatatgacaattggtaataatcttttgaaaaaattatggaaatgattttttttatgtatatatttatggaaattgatttatgttaattagcaaatgaaaaatatttttttagcagggtattcttgttcatcttgatcgagcctaattaatttaacaatgaatgaagaagaccaacaacctaaacatccttctcaaacattaataataataaaaaggacctatcattattttgagggaatgtctctaccttttcccctaaaaatgaataatattgaaatgtaataatcagagaagaaaaaaaattcaacaacatcatcatcataatcttttcaagcctttagaatgcatttaatttgaatgatattaatatcaatatactaggatttaattagaaaaataaaagaaatgaaaatggggaataatcaggctggccctgggcataagcggg

SEQ ID NO: 360085 - DNA, 741 bp, Cannabis indica
aaagctgtttctgatcagccatgagtatcggagttggacggtgcatgtacatgctcgggccacactagaccaagggggttaaggtctaccagtgatgcattttgaactctgttttgccgcttaggtcggctagtgaaaacggacttgtaatagtgttttgtaaagtatttttgggatcccgaaacatgtaacttttagtttgtaaagtttaaattattacaattttattttcattccaattataattaaagtttaattttcatgctaattttattagtaatcccatttaggggattaaagtttcttaagtatcttgggtagcgtgcctaatagttagggcgttacaatttagtatcagagcgctaaggtttttaaacatcctttagactggctgaatctgtacattcaacatcagtgacaagcttgactcatggtgcagtaagtgttgagagtaaatactttactacttatgtgatcatttatttaccgctttccatttttatgcagtatgcgagcgtctagaatatttatatgtgaaatgatgccatgccttaaatgttataagattaagtgtttatttatatggagttaatagttgagttagggtttaaggcaataagtgaataagtgtggtattggcgcttaacttgctggggttgttgattacaaggtactagtaatggaccctctgcaatcatctagaccacagggcgagcaagtagagcctgggattgaccaaac

SEQ ID NO: 360086 - DNA, 589 bp, Cannabis indica
agagttatcgagttgaaattctggttattaattgcttgaagttatgcaggtggtagtagcagttcaatcatttgaaagtttagttatctattgcattgtttttttttatagtttgagtcttagctttactcgggggcgagtaaagatccagtttggaggaatttgttaggttatttttagcctatatttttgatcaactttatgttcgcttttcgttgttttaggacggaattatgcttgttttctatgttctcaggttcctctgagtaatggaggcctcgggatgcaaaagtgcaatagaaagcaagcgaagccaagaaaaatgccattttttagtttgacacacttctggccgcggctacatcagtgtggccgtggctatagagtccagaccacatgcaccatcttcgatgctccaattgccgcagcgagatacaccctcaccgcggccataaggcccattatagaagcacggtttttagaagtttatctggccgcggcgagatcccgtacggtcaggggtaaaatcgtccaacgaaccctaaaaattagttataaatagaaaactgcgattggaaatcaggggaag

SEQ ID NO: 360087 - DNA, 744 bp, Cannabis indica
gaattttttgtgccctctccctgagtcccaaagtgaaaggaggtcaacagtacgaaggaatctactgtaaccgagtatggatggtctccatgtccgtcacgaagtagtactcatccacaaaatgctctattgtgctgacttcagggtctacagtacccttcagccatttctcgtccagtttggagaagtagaaatactccgacctactctgcttgggagttgtcttcaaattgaagagccaattggtgtcgagtggagatggctcaccccatccttgagaagcatagaggatgaacatggtggataagtacttgatggcctttggtgtgaactgagtcgggcagagatggtaatagtctgtaatccccttgaagtacggatgcaagggtagcattgcaccctaattagtatgagcactcgaccagacatagtatgcctgccttgggctggtttcccggtgatttggagaagggaagaagcattcaacacctcctagatatccatccttctccaaattcctcaactaagcctgggttactatggacggaggaggcacccccgagctctaaaggcaccttgcctcctttgacaaactgcctcgatgtactcctcagtgatgtaatcatcaccttcttccagtacgtcaccagcctcgtgttggaaattattttaccaggatcttagatctactcacaagtatgtatattaacatcctaaatacgaactttctaaaacgataaaata

SEQ ID NO: 360088 - DNA, 528 bp, Cannabis indica
ggttggaggttgtgccgtcagactttattgcgtgtagcagtcccaacacgcttcctcccatgcggcatttaatgcgacttgattgctcaggagaaacctgacacgtcgcggagacgccttagcgttatatgagcttccgggagcatattgagttccacgcgccttctcgggatctgcctccgggacgttaccttatggcataaagacttagcaaatactgtgaattgcttgatccacgtgtccctgtctgattggtccacgtatattgggcaaaatgaggggcaacacatacaatatataataagaaacgtatatataaaggaaaatttgactaaatatgcttacataacattaaattgttttccctacacttataattaccaatatttgtaatctaggccaactttaatgttatccccaaattatcctccccatttacatcacatcggactagaaataaataatacataaaaagcaattgggtttgatgggggtccgatagtggcccgaggctacccattttttttt

SEQ ID NO: 360089 - DNA, 887 bp, Cannabis indica
tttatcattttttattctaaataaatcaactctaacagaaattagtataaaaagaaaagaaagtctcattatccaattaatacttcaaaggctttaaagctagttttctttctctttgataactaggtttatgagacttcttcttctaattttgaattcctgtagctttcttcactatcaaattcgagccttagtgattgagtgtgtgtccacccatagtaagttagtcctcaatcatagtgtgtaagattgtgaagaatccaaacaacagaaggagtgtcgggctcagatcttggtgatactctgctacagaaaggatacaagagttagagatctgagcgaaaagagtcatttaattctgttgcaaccaatgcaaggtttctcatgccttttatgtgtttattttatatcattttagaagttcatgtttaggatattaaaaactatacttgttagtaaatctagatcttggtaaaacattgtctatgctggagctcgtggattgccaccatctatgatgatgagaaagagagaggatggtggggagcgaaggtcagagagagatggtttgaaaatgtataaatttgaaaattttcagatttgaaaatgcgttatattagagcgaggaaaaacatgttatttaaaaaattttagatttaaactaattgctgacggttagaaaccgtgacctataacactataggcgacaattttaaaccatagcctttactataaacgacagtttaaaatcgtcgcttatagtattggtcacgatttttaaccgtcaacaattctcctgtaaaaaaatttacaatttttaaggcacgcttaaaaattatcaaaaatgcctcaggagtgtttaaaatcgttaggaatatctatttttt

SEQ ID NO: 360090 - DNA, 681 bp, Cannabis indica
cgttagtttaaggagcaggtagtatcaactttaataaagttgcaattaaatacatgttttaaataattttaggctgttgtgtatttatttatgtctaatacatctctatctgtctccgcatattgaaaaaaaattaatcttaatttttttttataatcaagttatttaagacatttatttcgagaaatttaaaataatgtacaatataaaaaaaatgtaaataacggcataagtactcaaaattttgagtttgtaagtagcataaactcaatgatttttttagtagcataagtacccaatatttgtaaaactgtaattttaaatttattaaaagaagatttgaaagtaaccgatactacatatttccgtctagaccaaataatttaaaatatgggtcttaaatgtgccttgtttaaaacaataacagaatctatgctgattaaactgaaagaaaattacagttttataaacattaggtacttataccactaaaaaaaatcattgggtttatactacttataaactcaaaactctaggtacttatgtcactatttaccctataaaaaaaaatgttcaaacagtttgtttcacatgcatataaaataaaaaaactatatttttagtgtattaaacattttcaatttttttaaaattttgtaaaatactttaaataattacatt

SEQ ID NO: 360091 - DNA, 660 bp, Cannabis indica
agtttggaaaccttgtgagtaccccatgttgaaccctgaaccttgtggcctaaactgatgttgatactgagactgctggcctgattggggtgtgaaactataagaggaagactgagactagttggtcctgggctgtccatgaaaaggagtagagtctacatagctccctatgggtccgtcttgagatgcttgaaatctttgttgtcgttgtgggcaatctttcttcttatggccttgttgaccacaactaaaatacacgtatggtccactatgagtctttccaaatgaaccactactagtgctacccccactaaattgttgtccttgcccttgattcttcttagtcatctttcggtcatttccttttcctctgcttgtgttcttcctctcattttcttctacatgagcctcagtttgcaacgttactatcacacacttaattaggttatcaaatgtcaaataggctattagaccacgtatcgtaggcctcaaatgatgcatgaactgttcaatcaccaagggttggtcaacaacaccagaatatgcataagaggataactttacaaactttatgtaaaactcattcacagtcataccccattatcttaaaacatcaaatactctaattagagctctcttgtgagatggactaaaatactg

SEQ ID NO: 360092 - DNA, 728 bp, Cannabis indica
gccactttagcctatggaagggggtgaaacaaacgatggagccttaggcaactcagggtacatagggcccctgcccttagaggtagcagtaacaacagtcgagaccaagacatgggtggaggcaatgagagaagtaagagggtttgtgacaacttggctcaagactacaggcaagatggtaatttgggtgttggtacttgaagagatagatatagggtggcaagctgtggggggtattaactaaagtcgtattggaaatactagggacaaggaattggtcaacaacatttcaaggccttagctggaagtgttagcaagtgatggctgttcttcaaaagggatggagttggatagttcaaaaatgcttttttttataggcagatttagcaagagccctaagagaatctttttttttgtgcttttaaaactataaataaaattacttttaaaacttatatacattaatgtttataattttgatattggaggaggtttcaattgttacatcaaatacgtaatcatcatggttacattttgttatcccaaatttggcactctgacgtggcatcacgagaatggtgacacgtggactccacttggagcatctgctcggaacgatatgccgagcaggatgcctcgctggcacgatccagaaatggaaatattcaaacgtgccgtgcagaatgatcaacacttaccgaattcagcttaacgcatcatgagtcacc

SEQ ID NO: 360093 - DNA, 626 bp, Cannabis indica
atattgttactttacctaatggccatcagattcacataaacaaatctggcactgtaaaaatatctaataaactaatgctgaccgatgtattatatattctagaatgtaagttcaatttattttctgttaatgcttatcttgaacattgtcataataaactcacatttacttttactcaatgtttgatttaggatccctccttgacttctacgattgggatagctaagaatcttggacaactcgatcataagcggctatatttgggctcactatccctaatcacaagtgactcttttgttctactttttggatcggtatttttgaatttttggtggcctcttttttttttttttgtcttactatcctcgtatcacaagtgacattttttgacttttggctcttggatcagttttgttttagatttttcgtgggcttctttttttttttcctttacatcgatgagtttattttttgtttgggttggatagtcattagtaggattttttttgtttatttttcggcactgataccatgttagaatttgggaatagatgaaggggttccatctcaaactaattggcttgggaggagtagcctattcctcttatatattctattatctttcc

SEQ ID NO: 360094 - DNA, 499 bp, Cannabis indica
tttagttttcaaagaaaaatgatgaaatttgttgctgcacttattgttgatgcttgatgtagttttcagaagttattatatgcatatttaggtagatttgagctggtttgaatgcatgttagttagatttaaccaagtttgagttttaaactcaaagcttggagcttcaatggtgattttcgattctgtgttttctgggctttgttgatgcttttaaaatgttctttggggtatttagaaaaggtctggaaggtttggtatgaattgggtttgatttgaaagagttgtgggattttgagtgtttcctgcaaggaaccggaaatccagttgtgcaactggaattccggataggtttcaggaattccaagaactggaattccggttgcagaaccggtctgccggttggggggtttttaggaaccctagtttttctcgtttttatgttattttgggtattgccatgctttttatcgatagggaaacttttagtttctagttt

SEQ ID NO: 360095 - DNA, 1024 bp, Cannabis indica
aaaactattaaatcaaatctacacaatttcctgtgggatatattaaaagaatttaatttaacatattaattaaataaatataataaatccccgtagggtaagattattatgtccacataattaattataattgttgttgaaggaattttacaacaccaaaataaataatagaaataataatggtaataataatatgatgaataagtgcaagtattcaacctagaatggcgagtactcgaactgggaacacaaatacttaacaaaaaatggaaatacaaaggacacgagggaatatagtggttcagtcagatcatggtctgcttagtccactattgcaattattcagtatgtgtgtcatttcacgtggatcactccttcatatacaaagaaagtttcctatcatttacacaaggattgcattcattgtcgatccgttcatacattgatttacaataattaggctaaaaaacgtaaacattaataaatgaagaacagtttctattcactaaatacagcaatgtatccaacttctaatgtgcgagttggatgttcatattcttgcataagctcatggatttagaatatactcaacacttagttgagtctaagatgtctgcgttcttgtatagttgcatttacggacatcgtataacgagctgatagaaccaagacatgcgagtctatatcggtttatcgaggttgttggatcatcgggaccagctcgcatcatagagaatcgatctctatgttttcgcaggaggatcgagaggatactcacacatatcttggtatatgcaggttaaatccgttccttggtcctacataaagcgagcaacacgaatgcgattagacttggtcatatccgcatcatcccgctgagtatagttcaggcgaggtttaaactcgaggagtctctcattgacatctcaactttccttggggaaattgagtacacgtgtcctccaaacaggagtctggtctcgagtttctaggtgagaaaaatctcactataacacatgcccct

SEQ ID NO: 360096 - DNA, 1349 bp, Cannabis indica
gagagtcaaagaaacgaaaacttacaaaatacttattatatgagatcttacggtgttaagtgctttcaacaaataaccatccataaaggagacgaagtctagcgtcttgaggttatattgaaaacaactaaccattataagaccaacaatggagatcgaatatctctttgattaaagctcattatttaaaataatgtatttttaattaatcatttattttaatctatatattttaataatgaatattacttaatttaagttgatccaaaattaattttcaactttaatataattttcaaacaataattttgaaaatccatttataaatgaatataaaattttgaaattatataaaatataataaaataaatttctggaaaatatctaatttaagttgttttaaaataacaaaattttcaacttaaattattttttaaaatttaattaaatatcaaattaagtatcttgaactaatcaccttaattttaaaaatattccatttaagttgatccaaaaataacaaattttcaacttaaaaaaatatttaaagaacatttgaataactaattttctagaaaattttacttaattattgatttcaaaaatattctaatttaagttgatccaaaattagtcataataactgattttcaacttaaatatatttttatgaaaaattaaataattaagtatctagaataatctaattagttataacttcttaatttaattaaatacagaaaaatacatatagttgtatcttgaaaaaattcatcaaactaaatgtgtttttcttaaattaatttcaaaataatctgatgaaaaattaatttcatatatttcgaaattaattatgttgctaatcaattttattaggttaaactagtttaattaacctattacagttatttaaataaggcaaatgggcattcacaattggagttgttcatgtgagggagagttgggttcagtatgtcgtacacactactaatggccccctaactctcacacaaggcccaaaggagagaaatttaaccttaaatgaataactgttattaattgaatagacccaaatactaattgggcctaaataaaatctatcaaaagtgatcattttatttagcaacctaattcattttaattacaaaaattaaatgggctcctatatgcatctaagcccaaaagtaaacatataggctcacacatgcacattgatttggatggatcctattatgttactaggttcatacacagatgaaagaagattgcataatttacctgttgcaaattatttatttgatctattgacaattgaaatatttgttaaaatcaaattattggatctgtca

SEQ ID NO: 360097 - DNA, 517 bp, Cannabis indica
gattaaaggtaagaaaagtaaattgaactgcatagtacgttgtattgtaatacaattagtattgttgtgaaaatattaatgttgagatatggttaatattgttatataatgaaaagattgattggttatgtattgataatgttatgatattatggatgtgatatacgggcttacctgattaggtgatgtgatactctgtgcgacgtatcgagcgtaggtacgggtgttagtgatatgaaaaaaattgccagattatgccatagagtaaaactattgcagggtttcctactaggttatggcatggagtgaaaccgttgcagggtttcctgccagtttatggcatcgaatgacgcccgtactgttgggttttatgccctatataaaactcatttcaatataatcagatttatttattaatatagatcagaaataacatttaacgttgcatggttcacatgatttatttcatgattatatgtacataatgtatgaattaatctgaaacccttttcacata

SEQ ID NO: 360098 - DNA, 653 bp, Cannabis indica
acaaaattattattattaatattataccagtaatattattatttataaaatccaaacctacccttttatatatttatttatttttgatgaattattaattaatatttcttataaatatgcttcaaagacttggttatatataataatatatatgatttagtgtcggttctcctagattacgtatgtatatatagttatacgtaccatattagtaattatgtagaataatttgaaagcaaatattttcatttgacaaaactaatatgatcagaaattaataataaatcaacgaattatgatttccttaactagaagaaataaagaaacacttaagggactactatatgcagtgtttattgaatcacatccaatatttttaagcctaatcaaataccagataaaaatatattggaagttaaattttaccaccgatccgatccgatctaatcaatttcagtcatccaatcgatccaacatctattggatgttggattggatcggttctataccaatagatgtatctcatatatatttattggtttaatttaggtttatctaatattttagacttagtattttttatatcgggtcagatccatctaatattttagattgagtatatatacaaagaaaaaagagtaaaattttaatgt

SEQ ID NO: 360099 - DNA, 636 bp, Cannabis indica
cttcatattctgctacattattggtgcatatagatagaatatggaaagaataaggtatcaggcctcctgacggtgtcacaaagacaattccagcacctgccccactacttcttgctgccccatcaaaatataattgccatgatgaagtatcaactgtgaagacgtcttcgtcaggaagatcttcttgcaactccatatcatctggaattgggtcaactgtcagaaaatcagccaaagcttgtccttttattgctctttgcaggacaaagttgatttcaaattctgacagcatcatcgtccagacaacacgggcttggataggatatatcttagagggtcagcttttgacactaaagtcaaaggatgtgagagcaaatagtgtcgtagttttgtgacggcaaaaattaaagccagacacactttcttgattggagggtagttttgttctgcccctactaaagttctacttaagtagtaaagagcaacttcttttccctcctcattgttttgtgccagcatggctcccaaggagcggtcaagtgaagtgatatataatatcaatggctttcctaagagtggagctctcaacactcgtgggtgcagcaggtactttttaatgctttcaaaagcattttg

SEQ ID NO: 360100 - DNA, 751 bp, Cannabis indica
ttgctgcttaggtcggctaagggcaaaaatacctgtaatattttgtgaatttattttttttgggatcccaaagcatttaaattttagttgtaaagttaaaataattacaatttcatttttattttgttttgtttaaagttttacttcccacgctaattttgttagtaatcccgtttaggggattagggtttcttaattatttttggtagcgtgccgaattgttagggcgttgcacggttggtcttctttctttgggaagttggacctccaaggtgttgtatttggattgtgcagactcagtcttggttatgaactcaaactacccttcttgagctgcctttcaattttgattgccatatgcaccaaatcttgcagttccacataatggtgtagttcaactgtattagcaatctcccgatctagcccattcaaaaaccctaccattgttgcctctcgaacctctttcacattggctctaatcatagccatctccgtctccttgtaatactcatcaatactttgtatcctttacgaagaccttgcaacttgaggtacaagtctcgataatagtgagatggtaaaaaattccccctcatcaccctcttcatagcctcctgagagtcaatcactcattctccattgtacctcgtgttgatgcacaactgatcccaccaaagaatagcatagtcagtaaattcaatggcagcaagttttaccttttttttgtttcagaatagttgtgacaatcaaa

SEQ ID NO: 360101 - DNA, 976 bp, Cannabis indica
aactaggaactaaaagtttccctatcgataaaaagcatggaaatacccccaaaaacataaaaacgagaaaaactagggttcctgaattttccgcaaccggtagaccggttgcccaaccaaaattccagttttgggaaatttcagaaccccatccggaattccggatgtacaaccggaattccggttcctcgcaggcaacaacttcaaaatttcataactcatacaaatccaacccaaatcacctcaaaccttccagacctattccatataacccaaataacatttctaaggcattaaatccacccagaaagtacagaaatgaaaagtgccattaaagcccaagctttgagttctaaactcaaacttggttaaaatcaactaacatgcatccatactagattaaacctacataatcatgcataaataaccctctgaaaacaactacaacttcaacaacatcacagcaacagaattaagccatttctctttgaaaaccataatttttgagctaaaaatcacacaacttaaacaagatagcaagcatgcattaaaacctagataatccattcattttagacctaattaagcttctgaaaacaacatataaacacagcaacaacagccacccaaaaactagcatgcaacctaccatttcactttaaaaacttcaagaaacataagagaaagatgaagaaagcttactaacaattagagatcactaaatctgctcaaaatgagcttgaatcaccaagaaaaactccacttccttgctgctcaaggagggccgaaaagagagagagcttgagagaacaaattttgcttttctttctaaatttttctaactttgattttgaaatgagaaaatgagattaaatgacacctattcctatttacttcagccaacaattaaagaaaataaacacatataatccatttactaagtccactaaaggacaaaatatcattggggcaaaaa

SEQ ID NO: 360102 - DNA, 671 bp, Cannabis indica
agattaactgtcacgagtcattttatggtataactgagcaatatggcactatggaaaatagggcaagtcacattgacacgagctgagatttagaacccatcaacccctttgatatattcaagattacacgctgtagggattttagtggatattatggtccttctaccccttcttctagtgatagcttgccttctagtgactttggtaaatcccttagcggaaaatcgtactcctcccctcctttttcatctgcctttttaataatagtaacactttattttattttgcaaacatgggaagtttagaagatatcctggattggaagggaaagaagaggggaaccaacccgggagtttccacaaatgctgaggttgtacctccctaaacgcaaaggaaaaccactgcccacaagaaaaagtcattggccgaacctattgatctcaaggtctctgataccaaaacccaagaacaaattcctcctccagtcgctcccaacaccaacgctcctcgtcctgagaaagccttgttaggctttgtgccctaaataaaactctatttcaatataatcttttctattcaattatcaataaagaaacagatttaatttcattacttgtttaatttgttatttggttcatgtgatatcaataaagaaacagatttaatttcat

SEQ ID NO: 360103 - DNA, 635 bp, Cannabis indica
aacattaaatgttatttctgatctttattaataagtaaatctgattatgttgaaatgggttttatttagggcacaaaacccaacactttccagggcattggttaaagtaagcttgggtttgatgtatggagtatgcatcggaagggaccgatattaaacttggattagatatgataaatttatcgtaatatctattcaattcaatatcacgtagttgatcctagatcaaatgatcttaatcctgacatggttaggatcgatctcaagagtgttatttgtgttctttgatttgttagttaagcctaccttttagtccgggtaatacgtacatttaaataaggtcaaattatttaaaaaatatatttaatttaaaaaatttaatatctgaccttaaatttaaaaaataagataaaatataatcaaatttaaaaataagataaaaaatcaagcaaaaagatagatttttacttgttttcaaattcaaattacactaatatctaagattaattttaaaaaattcaaattaatttatttctgatattagatttgaaaattgaaaaataaaaatctaaatacaaaactacacaaaaaatcggaagttaattccatgaaatagcatgaaaaatcgaagacaa

SEQ ID NO: 360104 - DNA, 818 bp, Cannabis indica
tcatcatctaacttagacggcttctcactacctttaataggtttgtacaaatctttacaattgagcaaatctttcatcaattgcttccaagcgaaatagtttgataagttcaattttatcattccatccgactcatccatttttcaacacaagaattcaacaccaatcaaccttggctctgatatcacttgttgggaaaacctattgcaattaaccacaatattttccctctttgtatgtcaaaatgaaatacttatcaaataccacaataagggattatcaaatatcaaccaaaacaccacaagcaatataaaatacacaaatcgagaataaaagtgagacactaagatttttacgtgaaaacccaatggggaaaaatcacgggaccgtagtctgcttaaatcatccactatcactaaagtttaataatgggattacaaatttcttctctagtaaaactaaaggctcacaacaacatcaagattaaacaatcttggatcaccaatacaatcatcatcatcatttcaaacgatagatacacaaatagaaaaaatttgggtctcaccaagtaggtattatagaagagcaccttagagaggacaatcgccaatcggaaccgataggtttgaagagaaccttgcaaggattctgtaacgccctaaataattaggcacgctacccaaaatgcttatggaatcctaatcccctaattcgggattactaatcataaatagcgcagaatttaaacttttaaattaatcggaatttaaacttttaaaccgttgggatcccaaaaatatttacaaacttattacaag

SEQ ID NO: 360105 - DNA, 522 bp, Cannabis indica
tcttacaccattataatgggtaagttgtgttttaaccattttgttagactttatgtagtttgctttcgttatatgtgtcgtatttgttggaactggtgttttttggtctgaaatggatgagatctggcagatctggttttctgtcgaaatctgggttttccagatgttatcgacgatttatcaatagaatgtcgatggtatgtcgatattctaccaagaaaggtcactgatgaccattatcgacatgttgtcgacggtttgtcgatagcatgtcgatgaaaaacaaattaacatacacaagttatttgagaagttgtcaacattttgtcgatagtacgtcgacattaagtcgaccaatagtgtcgacaatatatcgatgcaatgtcgatgtattgtcaattttgaattgaaaattgaaaaaaaccataaataaaacataaaataacataaaagttcattaaaataacataaaataacattaaaataaaagttcataaaaaaaaacattaaataaaaactcac

SEQ ID NO: 360106 - DNA, 1376 bp, Cannabis indica
tgatcttgcatttccgcgaatctcttctcccaatctggcggagcttgaggtgggttcacatgtcgaccaccctaaaacctgccacgacctctgataactatatggtatagagttatttgttatgcttttaaacttgaattattgtgagaagagtagtgaaaatgtgtttgtttgcttaattttaattagttttagcttcgttctctattttgtaagctagcttgtaagtcttgtaaaaattgttaatgttagttgtgttttttctaattaaacgtggttgtttgttgttgaaaaacaagaattaagttgttaggaaaaacaaaaggaagcaaggatgaagtgggaataaaagcttaaattggggcaaattgctgaagcaatgctgaaacgaattcaacattctggcagtgacgtgggaacacgaaatttagctatccacatcagcaggagcgtgtttgttactaaaaatcaaaccagctaaatgatgtgtaggaggaggactaaacctagtgcgccaaggtgcaaaagggattgggcttctatttttagggtatcaatttgtaccctatctaaccaacaacaaaaagaaaaaaaaatgccaagtacacaccatcttctttctaacgtgggcagctgccattttttgaaggagaaataattacagaaggaaagtacagcagaggaaggaaagagagggggacctagcttttgtgtttgattttctttcaccctctcttaatatttttctttctcttcttcttttcttgtttcctgtacttagacattaaaaacattgttgaactttaaaaaatgggcagcagccatgaaagataactttttagcttggattttagtttttgatttgaatatgtgctagacttttgaggctttaatggctatgaacttctatgttgggtatgataaatctttaagcttactgtaatatttttgcctttgttcattcaagtgactttttcattttatttgattgttatatcttggccatgaataacaattcactaagctagatcttgttccagaggggctagatctagtacttcaacttggatggagcaagagaaattttagatttaggtttttctttgtaagtagaataggaatatttcatttaccttgcataacttaagaattgatgtttgaatagtgttctgcttgctggtttgatatagaaatatattgagctaagtggtagaccttaatttgtgagttttggaaaattctcacaagcctagaggaatttatgttatctctgtgcaaaatgctggaataatgcagaaccgaggctataacaactgggaaaaaacctgactagaagggattagctattcaagccactttttaccatattatatttt

SEQ ID NO: 360107 - DNA, 375 bp, Cannabis indica
cattaacttttgaagcatataatcacaattaccttccactgtgttgacatcattgcaattatgaataactttatgttctggacttaacagaaattgtatacattaaaccataaacatgaaaattacatgtaaacattcatgacttctaatctactattgataacaaatcagattgtattgaaatgagttttatttatggcataaaatctcaacacaaatacacatatgggctttcaagttagatttttgccactttatttcaactaatgaaacaaaagtgtcttttttaattttaacacttttgtcatctaattatttaaataccaattttattttatttgataattattaaaataaattcatatttttcctttt

SEQ ID NO: 360108 - DNA, 496 bp, Cannabis indica
agtagcatgtaattctgtaaaagaaaattgaatagagtcaatgcatttattcacatctaaagtgagattattatgaaccttctcatttcgagtacgccagacggtgtcgatcacaagtgaggcatacaggaaaacctcctccacatcaatccccttatgtttcaagtcccaagtgaatttgacccagtcccacatccggttaccagtgtcacagatcggataaataccccaaggagaggatcgccagatatggaaagctacatcacaagtaagaaataaatattccatagttttctcctccctcccacaccaagggcatctcgcctcctcgatatgaaatcttttcctaattacagacctgacagagagggcgttggagagaatgcaccaccaaagtactttatgccgctctaaaactatactgttccaaagcttattccaaagtgagggagcaatctcacaaaagggggctctttccaaggcctgagtaagataa

SEQ ID NO: 360109 - DNA, 527 bp, Cannabis indica
taccatggaaccaatttatacttacatcttgggaactcggcagttcaattcagtgggagtgttaatcacggaaatagacatctatagcttttatgtctagaagtaaaacgatagtttccaaagagcttggattaacgcactaaataatagaggcctcatttcagtaattagtccttaaatatcatttacaagtagctaagtattttaaggataaaatatattgaagggtaaaacagtaattttgtccctactcattgtaaatcatctatagaggatcaataattattgtgattgaaatcatagataattcgtagcgtatctaaatttggtatatagagcgttctatgtaatcaagagtacaatttcaaatctgtagtagagtcaggaggaattaataagatagaaaatttactcgataaattttagatctacttattaggagctttgttacataggaccatcgttcccatagtatctaggataatatcatcttgtagactccattaattaatttaataagtcaatta

SEQ ID NO: 360110 - DNA, 894 bp, Cannabis indica
ggaattatcccatatactattttctaaacttttttgtttcaaatttacagtttgggtttctaaagtggttgcagcgctagttgcaataagggtttctatacgattttttgttgcgatttaggttgcagtgctagttgcaataggggtttctatatagaattccgtaaaaatgcaaaaaaaaaatatttaaaagtgtaaaaatgaaattaagttgtctttgaataagttcgagtctaggtccgggttcgagtctaagtcccaagagatgtgagtcttgaattaatttttttttttttaaaataaattgaaatcgggtcggatcagatccgatccagaaaaaattaggcgggtcagagcggatctgatccgagatccgataagtatccgaatgtttcggatcagaggtgatccgtcgggccggaactccaatccgctccaactaaatggattttttttgatatgcctaaaatgaaaaatacccaaaaacttaatacaattaaagatataattttatataaaataaatattattaaaataaggtctctttgaaattttttaagtgtaaataaaattttcttacaattaattattataggatgattctacaatgcaccttcttaaaagagatgtattgatgcacccttaacttatttcggcattcaaaaaaaatttagtctaattttttttttcatattcatgtatgttatagctatttaagatatcctacaaaattttgagaaattcagaataatttacaatataaaaaaataatattcaaacagttgattttacacgcgtataaaacaaaatagtcacgcgtgcaatacactgtttgaacatagttttcggtgttttaaacttttttaaatttcttaaaattttgcaggatgtctt

SEQ ID NO: 360111 - DNA, 781 bp, Cannabis indica
tttgttaattaatttcaaaatttcaaggactaatcaaaagtgttcaaggtcctaattaaattgggaatgcttgaagaacagatacaagtgcctaagaatgtcaaaattgatgtccatatggtagtttcaagcgaaatgggcttggttcatgtcatcaagtcaactccacacaagtgtaaagttgactgggggcagatgttaacccgaaaaatttccctagtgacatggacataaatgtttgacacgtggcataaaggatgatgtcacggagttgagtagacctgaattatagcagtcaacttgggaggggattttagccctacgcccaggttgactttgggatctctaggatataagtttgaacttcaataacttgaatcaaacccaggagctaaaattacacgaacttgcaactcagaagccaccctgggcagttagggttgcacttggcgacaagttgacatcctcaactatggttttaattcttgggaccttcttagtgcaaaatggtcaaaaatttcattgggacatgaactagacatgccacatatgtatttgaggcatcagaatcaaaatccaagcaagttgatttttgagcacccaaagccctggggcctcgagcatccagctcaagttgacaacctatcaatctaagtgccttccaagtttccgattagagatccaacttttgaatcttctttgtcttcatcaaaaacagggtaataggtccttttagaggaaacataacaattcttgggtacaaataacagggcccaacgcc

SEQ ID NO: 360112 - DNA, 723 bp, Cannabis indica
aaaataatttccaacacagcctcagaaagatcaatgacctccacagtaggcctcttttgcttagtagaggacccctcaccgcccttagacttcttggccaaaggagaggcactagagctttcgcctattctcttcctaagagcgtcgagcatcttccgagacatgtctatacagaacaaaaacaacatggttagaaaacagacaccagaaacaagatgaagtaatatgcaagatgactgcccgaacaagactcagaagtcagtcatcacctgacactggtcttgtttcagacataacagcttacccttttccgaacatgggaggggatggtcgaacaggtgaaatggactcccttatgtgaatcgcatgttcaacaggcctgagcggggccgggagtttcttcttccttttcagtggagtcacctgctcttcctcagcctcatcttcaggattcaagggctcctgagcatactacttggcccttgcaccacccttcaacttagcctcgcgcttcagttgaatcaactgatcctctggatgagctcgttcggtccgactagcaccagatttcctgttcttccctatcacggacttaggagtaaagtccttgggatagagcccgtacctcacaaagttatcatcggaggtcaactggataatatgctggtcttcccctggaaaccgagcaagtttttgagctctatcccttagagcaagagtgag

SEQ ID NO: 360113 - DNA, 921 bp, Cannabis indica
atacttgtgagtagatctaagttgctggtaaaataacttccaacacatggtgccttaaggattggtccatggacgtgtgggagtccttgggtgatgagggagactatttggacagtatcgaatggatgcttgcgagcatgacacggtgggagttgttcgagagacagaagtgtgcacgaagcacacggtcgcacgaaaaatgagcccattgttactcggatggttagaaggctaaccttggcttagagaagtcaaggtgtcgcacgggtgttccgctgcctaaaaaggtgagcccgtgacaattggtatcagagccaagttcatctcagtgggaggtgaacctggttggcctatcctaaagaggatgtaggtgggtggacggatcgagatggtccgaatgttggaacaagacgtcgttgatccagtaagtcttttaaagaggatcagtaggttgagatggtgctgagattgggttgctttttttcatgtgaatactggacatcctagagaggagacaatgatggttgcttcgatttaagttcagagatgctataaagacaactaccacgtgcaattgtagaaaagcgcaacggaatgtttgaaactcgttggcgtagtaaaagattcagtggatagtccatactgtatgcttggtatgctaggccaagtttgcctaagtgacattgtaagtcgcatgaggcgcttttgttaaaaaggaagcttgttggcaggagtgtggaagtaatgtagggaccatcagattcttgttcgtcacgacagaggtcgagagttgaagactgagatggtttagattgggatagacatggaattcttcagttgctacatggtgtgtcaagagggacgcacatggagaccaaggcgggcagatgccgcaagtgttcgcatgcgagttttatttga

SEQ ID NO: 360114 - DNA, 741 bp, Cannabis indica
tgggggttatgtcgtcagactttattgcgtgtggcagttccaacaggcctcctcccatgcggcattaaatacgagatgactgctcagaggaagcctgacatctcctggagatgcttcgatgctaccttgatctccgggagcatagaaaacctcgtatgcctttctccgggaggcacctctaggataatgcctttctttataaagacttagctattaatttgagtgttaaaacctttgtgtccacgtgtccctgtctggttggtccacgtatattgggcaaaatcaggggcaacatttacccccaagccttgtttaattatgaaatgaacaaggcttgttcagatgcctccgggtggctcctcggtttcctggcacgtgcctcgagtgcgtgaaggtgtatttaatgatcatcattactgcagcgattcactttttgcaggcctcgattcgtttcatgctcattaattgatacgacgcattaatgggtgtcagacggacactcaaacgtttccaccgccttgatgacaaaccaaatcagccgttggatcttgggaattcaactcgtgtgccttcccaaccgcacgattggtaggtgatcacgcctattccacatgcacttcggcctataaaaaccaccattctcccttcatttggttactttcagactttcaccaaatttcttcaaattttccagagagaaagaaaccctcaaaccttcaaaccttcaaacaccataggttt

SEQ ID NO: 360115 - DNA, 614 bp, Cannabis indica
tattattattatttaaatataaaaattataattaatttttttaaatattttatttttgtttaattttaaaataataatgttaaatgtactaatataaatatgtcatttatacaagaatatacacataattaaccgaatagccaaaatttaaacttgaagagttatatgcaagtaaaacgaaaatttaaccgcctcttaacagaataataactaatcttaacagaataataactaatcttcttacatcttttaaagttctttcttcaattctaatatataatatcttatagggtgattctacaatgcacccccttaaaatggatatacagatacacccttgatttgtttcggcatccagaagatttttttcatattcatgtacgttatagctatttaagataacctacaaaattttgaaaaatttcgaatcatttacaatatagaaaacaatgataaaacaatctattttacacgcgtataaaataaaatagtcacgcgtgcaatacactgtttgaacgtagtttttggcgtgttaaaattttccaaatttctttaaattttgaaggatatcttaaataactataacatacatgaccatgagaaaaaaatttgac

SEQ ID NO: 360116 - DNA, 484 bp, Cannabis indica
tttttgaggagataactttggaccacacacctcaatttagtatggaaattcaaatttctcttataatattcattagaggattgttattctgcaccagtattacttagtactacctaaaagtagtgctttgcgattgattaacgatattccataaaaattattatatttagggccagtttggcacaactgtgctgtgggaaaaagcagctgtagctgtgctgcagggaaaagcagctgtgcagaactgtagaaaaaaattgatatgaatgtttggtaaattataaattttaaagtgttaggaattgttaaaattctattataataatgataatattttaatctaattcattataatcacaaatatatatatatataaaataaatatgttatataaaatttttattttttttttcctatagtataaatttatatgcatttgataaaaataattttttaatatttttaaattatatttttatcattt

SEQ ID NO: 360117 - DNA, 1337 bp, Cannabis indica
aatcatgtgaaccatgcaacattcaatgttatttctgatctatattaataagtaactctgattatattgaaatgagttttatttagggcataaaacccaacatatactaatcttaccttatttctgaattcaggtgtaccggccaacctaagtggaacaactgctcgacggtttacaggcccctaaatcacattattcgtaaaactggtgagtgacacgctaaattacttttcgtggtcttaaacttgaaactaaaagttttcctatcgatggataacatggcaataccttaaatattgcaaaaaacaggaaaaactagggttccctaaaatgccccaaccggtagaccgcttccctaactagaatttcggtttcgtggggtttcctggggaccaactggaattctgaaccggatttccagttcagtgcagaaaccaccaaaaaccacctacacgcttcaattcaaacccaaaaacctcacaataacttccagatcacctaattataccataacaaacataatcaatgcaataacatcaagcaataaatccaggattcaaaaacaccattaaagagcaaagcttgagttcttaaagtcaaagcttgctcaaaaaaactcaaagcttactcaaacaacacaacaacccacaaacctagctcaaatcaacctatttatccttaatttattttcagaatacaattacaaacactacttacagtcacagaaccctaacttaaaaaaatcatgcataaactcaactatgaacataagaaaaccaaaggaaaaagtgctaagggttttaccttcaattggattcaccaagaactagctaggatcttaagaatcaagttgatgaaaccctaatttttactggtttcaagagagctcgagagaaagagagagaaggagagagaaggtgttgaatttttggtatttttctaatttttgttgaatggaataatagtcttcttttcgttaaggaggtctatttcaggctcatgatgaccttgtttcaagcctccactccttgatttgaattatccttcaagagtttgaagaagcttgattcattcccggccagaccttagtgaagatccttacccttctgctgaagagctattctccccaacaaagatccactctattttagaaaatcagattataaaacataagtaaactcactaaaatacaaaactcaaatggccaaaaagaccatttttcccttacaaacaccaacaagcacacttgccacctaggggtattttggtcatttctaaaatcttgactatttctgaaattcctaatgtctaactatattgtgttgggttttgtgccc

SEQ ID NO: 360118 - DNA, 539 bp, Cannabis indica
ggtcaataagtctagtagtgtggtatggaattatgttcaacatatgatcaatttaaaataatataatatccttattagtcctcaatttcactaatatcgtgatgcttaataaataagccagtgaaatcaaccattaaacatgcttaagattatgccaacaaaatattattatcattaagcaaataaatttaaaagacaataatcacaataagatatgaactccatgctttcaattcaatcattctcgagaatataacaaagcataattgaaagcataaacatccaataataaaaaattattggcccactaagtagttcacaacatcaataagtaaattacatataaatgtaatctcaaacgatagaataaaaaactcccactaacccaaaggagcaaaagattataaaatgcccatatcaacaagatgcatattaaacaatatgacatttaatcttctagttagatgatctgctaaaatcgacttggtcttacaatattcgatcacaatgtctcccttcttgaccaagtctctaacagt

SEQ ID NO: 360119 - DNA, 766 bp, Cannabis indica
ttgttgcttgataaccaaagaaagcactttgttcaaatgaaaaaaaatacctccttctatgtgttttgagcttcaaagactggacattcaataattaattcaacattacaatttacatgtatgaaaaagatggaaaagcagttaaaaaggtgacataagaacatatttattaagcagcaagtttatagatgtaaaggacctgttagagttcacaaagaaaggaattaaagcatttaggaaagctgtcaggaatgagaaccacaatatatctaagtatatttgatctacactagaacaaaatgttcttcagtaggacttcacaaaactgatatagatcaatgataggaatatccttgtagttctttttttatttagtttttttaaagaaaaaaattacccttgcactcaattgtcgtcgattatcatgcttgaccatctccataaatgctgtctccagctcctctgctctggaaaaacagagaaccataaactgtgatacacacaccagcagtgtataaagtcaaaaccagaaaaatacataaagaaatatggagggaaatagagagattttcttgaaaaagtaaaatgcccaggatattcgagagacctggtttttctccaagagctaccactcaattacaaatcaaaaacatgaccccttctcacactctcctctctattttaattccctaaggtggcgtttggtaacactttttttaatcagttttctgtttttaaaagtcgaaaagtgaaaatatttttcaaa

SEQ ID NO: 360120 - DNA, 840 bp, Cannabis indica
gaggtttcttcggaagataaaccagttcgaactttcggctttgcaaggcagatttcttgagttcacgatcaacatgataaaaatccttcacagtggccgaaaaaatttgaaagaaatcaaacatattaaaaaccaattataaatagactattttaaaaaaaggaaaccaattataaaaagtaaaaggtacctcaggattgttaaaaccctcaaaaacaagttctgaataactcccggttttttttcttgtaagtactctcccaatttagcattcgaggatatgtatttgcaatcctcttgcagtaattaggagacaggcttgggagtatctcgaacaaccaaatgaggaaagcaaatggaaacccttgaaatttaaaagaatagaacttatccttttcttctttgactttctcaatcttataatagatattgtcactgtccttaaaggccaaattcatgtagtggaaagtcctatcccactgcagtttaccaaatgcgatattccttagctctgacaaatcgccatcgacaaaaccaaaaaactcattgtcgactctcttaccattctcatacccatacaaataatgactcaacagaaaaacaatcgccatcttcacagtgtcaacgtcatcatcgaattcttcagacaaaaaccttgccctaacttgctcttgaatgactttaatagtcaagtcaggaaacatcttcttcttgaacaacatcttttgtttgaactcgttcaagtcagatgacccttccggacttaaccccgtgatcaagacaaactcctccaaaccaaaacggacaactctgtcccggattaagaaccacttctctaaa

SEQ ID NO: 360121 - DNA, 543 bp, Cannabis indica
caggtcgaggtacttctatttctctcaacgaggcttcaagtggttgacgggcacggacgatacggccatcagcaaaatcgagcgttttgtttatgagtacttcatggtggatggcacgggcatcactcgcactcggttccagcatattccgatatatcaccgccctcccctcactcttgctcttagggatagagctcaaaaactcgcccgacttctgggggaagaccagaatattatccagttgacctctgaggatacgtttttgtgaggtgcgggctctatccgagggacttcaatcctatattcgtgacggggaagaaaaggaaattcggtgctagccggaccgaacgagctcattcggaggatgagttgattcaactgaagcacgaggctaagttgaagggaggtgcaagggtcaagcagtatgctcaggagcccttgtatcctgaagatgaggctgacgaagagcaggtgactgttgggttttatgccctaaataaaactcaaattcaatgtaatttgtattattcaatatcaataaag

SEQ ID NO: 360122 - DNA, 542 bp, Cannabis indica
catttgctccccatgcccctgttcggacgtttgtacggatagagacttttctgctttagtcttgattgtaggagcctttactggactactttttttatccaactattggactcttcgaatggcttgtctttatgacaaaaaggaactttattttcaatcattatggggatttgtgtaacgactgcacacttccccatatttgaactcttggtcttcttttcccatgcatagctatttttgtggaaaaataacttctcattaagtttcttgggggaaaaataatccagaacttatataaggttaatttcctcttatatttcattttatttacaactcctcatttcacattcactctctcctgtctctctataagaaaaagattttttttttccatattttttcaaagacagatgcccagagcaccaccattctctgtaatttttgatttttttgacgattcgattgttgctcgagcatccataacaattttcttcagtgggtaagtgtaacaccctaactaccttaggcgtattacgtgattt

SEQ ID NO: 360123 - DNA, 824 bp, Cannabis indica
gtggcctgtaattatttttaaaaaacaaaaaaaaaaagaaaaaaaacacaaaagagataatagaataatgaaagaaaaaaaaaaagtagtgagggagtattaaaaaatggtcaactggtattttattttgcgataggggtattagaaagagttaggcagtattgacaaaaactaacatatcatttttgataattagatccactttttgtagtttatgtataaattcttagatattaaccattatgataataattactaaaataatttagttataaatattaattttgaaaacatcaaactattagattttaatccaacaataaataacaataaaagaaaaattggaatttttatatttaagttagctacttaattaaaaaaaaaacatcttcaaatttttttcacaatctttcaaaagaaaaattcacaatatatcaaaaatatatttatattaaaaatattatatcaaactcaatccttttcgttgaataactcttatttttattttttttccacccatgaaataatcccatctcataatatagtataataatgaaagactttgtaattagattaaaaaaatgaagtataaaaactcaaataagtgaagtataataatgaaagactttgtaattagattaaatgcactcttatatataagcagcacattatataaataagggaaatttacatatatactgtttttggacacaaactttacaaaaatactgggacacggcaaaaacaacttttttactgccccaaccaattttctttacttttgtactgcctaagcccaacaacttaacatttatactgtgaac

SEQ ID NO: 360124 - DNA, 990 bp, Cannabis indica
cctactttaactaccactagaactgacctattttatgtataatgtaaaaaattaaggcatatatatataatataaagttgccaaagtaactatttatataattatatatatactcatactagacaattttcaaaatatctaattaccaggactagtctcctattaatcgcttgaattgttggttcttctctagtatataattagtactttactttgtcaatattagtaataatactaaagatatagatatagatacgttaagcatgtctttagggctatgaataatttggttaaatagactatttcaaccatttattaatttgtattgtttaaaattgataaagacacctctttgaattatatgaaatagcattctatctaccaaaaaagaaaaatgatatagacactatacttggagtgttttttttttttttaagaggaatttttagttaaaatagttaaagaaaaaaaaggtttaaaaagtaagtatttttttattaaaataatattaaaaaaatttaacaaaaaatagggagtttcttccctatccattctttattatactgagtcattttttgtatggttgtcgctcatttttcaagtcccacactctctataaatagtgtatgtagagagcataattaaagatgctcacgtgggtcagttaattatgctatattttattcaacccaatgtaaagattggattacaaaaatttaagtgcaacctgtccgattaaaaaaaatagtaactcgctcaatgaaatttgtcggtttggtcaagttaacccgtcaaaacagaccacaaatatatatatatatatatatatatatattttacctttttttttattcaattgttatattttagttaattgtaataatgagacaaatatatatagaatgaattcaaagtttaaatcaactaccataaaaatatattagtttgaaatttatatttttaaatagtcatataaattgtatgatatat

SEQ ID NO: 360125 - DNA, 1200 bp, Cannabis indica
tcacagatctagtttgggagtaatcgctggtagatctcgtattactcatagaccgcgtcctacccatagactttgtatttaagtggcttgaaaatttacttgttcccatactttcctgatcattagctcattgagtactctctcctcttcgagttgatcggctatgggttctggatcgccttaaagtcacacttacttctttatgctctgttctttcctccaacgagcgctttgtcatatttccctcttcaaggtacgtactagtcctcactttatgggcttgggaagaacgttggtgattcttagtaggtgatctccgttctctcgactgagttccaagatcctcctcattttcatgagggatttctcgttcatcaatttccagttgtctcctttctggttgttcatcccgattctcagggggtgtctcattttccccgagttgttcttcctgggccttttcctatctcctggttcatgagccacgaggtctgccttgtggtcttctcactccaagttcaggttaattttgagcgttcgtcccctgcgccgccctagccgaggttgcctctcgttctaactcagtgtttcgacgctgcacctcttctagacgacgtctcaggtggcggctttccatttcataagttctttctcccacaaattgggtacctccacggttgagctcttcatccctcgccctgggattctgaccattcccacgatgagttctcctcgagcacaatatccgcgtactatgatcaacatcgggttgagttcttcatggatgtgtggtctgagcactgggaccatcctcaggttgagccctccttgatcaggtggtccttctagactgcggattagtagatcttatagagcccatgggctcttttctagaacgatggttagtttcctcatgtggggtgataatattctctagattttcagcataaaggagaaggtttttctttaaaagaagggaaggttttttatgggctttttcacagaggctctcaatgaaagcaccaaactgttaacgcatattttcgttaaccaaatttgagcctcacgatgataattgaacacaaaaaaaataaaagcaatagaaaaataatatatgaacatatggatttttgcgtggtttcgcagttaaaattctacatactccacgagtcaatcttattatgatttctgagtactttt

SEQ ID NO: 360126 - DNA, 1043 bp, Cannabis indica
aattttaataataatataataataatataatattaataatataataatataatattaataaaaactttattattaatagttatcttattatttcttagccaccaagaaacttctatttctaggataattagccaactccgagtaccccaaaatactctggtatatctaaaatcaacttatcccaataatctcatcaatatttctaactaaaactgttgtgacatttttggcctccaatcgggtctttagggtcgccgaacatgaaaatatttttattttacaaataactcatattatatccacgtatttcaaataaatctccgcaattaacaaattacgcttatttatccacttatccgatcttcagggtccccggacctaaaaatatttatattccacatatagcttatattacattcacacatgctatataaatctccgtaattaataaattacgcttatttactcacttatagaaaaatttaaattttatgctgaaatagattagtggatcataatcccacttattacctaattaacccataatataaatataaaccctaattatttaccatttggcttatcgggatattacaattgtacttggaggtgtttgcgtgtgacttttatttgatccatatggaagcgccaagacagttgagtgggatgcgttggcttgttaaagtgccagaggacgtaagtcacacaaaggcatcgatagagatgcagagttgtggaatgaatgcatcaaagaagccagtagggctaagaaggtcgagcgcaagcgttgagatggcgctagagtttgtgtggaggttagaaggtcgtgccagtgagacttagtagtcatgtgaggctgcgaaggtcaacaacggtgctagagtttgcatgaaggccagagggctgcatcattggaaattagtgcatcgtgggagctagaagggtgtgatgcaagtgtgaatcagtttgatggttgagcgggcattgcatgcatatgcaaatcgacgggggtgctatatgagatagttgactcgagagtcaca

SEQ ID NO: 360127 - DNA, 630 bp, Cannabis indica
gtgattttagagttatcattcttaaattatgtgatatttgggatttttcttaaataaataaaaaaaaatctgaaagaaaaatatgagttattatatttaaaaaaaaatagctaataacgaaaaaaaaattgtttggttttaaaaaataaaaaagtaattttagagttatttctataaaattattatgagtaatataaaatatataagaagaaaaagagagaaagagaaacttaaacaaaaaaaaattagtagtttattccaatagagtgaaccgttatttatacaaaaatattgactaaattaataaaaaaaaccaaaatcaatagaataaaaaaaaatataatcaaatatttataataataattaatttgataatttacacatccattaataatattttataacatctagattattgttcaataatgttatgggtgtctagatatttggtaccacgttttatctaaatacaaattaagtattatgtgatttcaataatatttatttggtatcttgtattttaatatcatacatatttagtactctaaattaaattttttttattaaaattttatcaatatataattaagcagtctaaaattttatgaattctgaattcaaatttaatta

SEQ ID NO: 360128 - DNA, 543 bp, Cannabis indica
agagtttaataaaatctccagaattgaggaattataactctaatattgatttctaaatattgggttcacaaataattaatttcataaataatcataaaaataacataattttttgctaattgcctttactaatccaaattactgaagtattcattacaagaattgtgcatggaattccgaagagaaggttttccatgaactaaacttttcaggagccaacttgaaataccattgctgtgcggcttctgacagagtggcaggaaagattctgcagcatacatctcctcgtaccccttgcaaatccatttgcgtttcaaagtacttgagatgggaaaggggatcttctctccccgtgtacattttccacgtcggcatcttaaacttgtggggcagtgggaggagattggatctctgggcaagaaatgagttccgcgtgctcggtctagctcaagatcattatttctttgtccaacccatgtcgtgaaacatatttttttagttcgcctagctgagcctatacggttgggctgacctgctcggcat

SEQ ID NO: 360129 - DNA, 540 bp, Cannabis indica
ataaaattgataaaatattacaaaatttaaataaaaaattaatctaaaaatacgaaaattaatatttattgcaaaactaaataaaaccaaataaaagttactaaaataaactaaaaatacttgagaacaaagctaatttaatggacaaaaagagctaagtaactctattttcatagagttatcattaatcatagattaatttgattacaatcatgagatggttaatctctagcttaattgtattgcacgaccgaccccaaccataatcctgacctggaccctgacccagacctgaccttggacccggctccggacccatcctcgatctcgaacctggtcctgactgtggccccagttcgagtcatggctttgacactggatctagacccgacttaagtaaaatcaacaaatgaaaatgaaaataaaacttacagaatacacctttattataaaaaaaaaaaaaattgaaaaataaaagtggtaatagaacacatttttgtttataaaaaaatttacttttaatttttgttgtattaaaaa

SEQ ID NO: 360130 - DNA, 855 bp, Cannabis indica
ttcccttcttcaacatcttgaagaagtgtcagcaattttaatggtccgatgagtgcgaggaggcattcaagaagctgaaagagcacatggccaaacctccaattctgtcgaagcccgttctcagagaggacttgctcctatacttagccgtctccgagcacgcggtcagcgcaaccttagtccgggaagaggagaaaacttagcatcccgtatactatgtaagcaagcgcatgataggagcgaagacgcgatacccagtcattgaaaaactaattttttgcctcctgatgtcctcgagaaaattgagaccctacttccaagctcatccaatcaaggtattgaccaaccatccgctccgccaagtcctacaaaagccagaggcgtccggaaggctcctcaaatgagcaatggagttaagccagtttgacctacactacgtcccacgcatttccataaaagggcaagcgctagcggacttcatcatagagtgcaatgaagctgaagctaccgcagacatgcccgcaccattagtcccagcgtggaaagtacttgtagacggagcctccaacgagaatggatccggagcaggggttgcaatgatatccccaagtggacttcgactccaagcagccctacggttcgacttctcagcttccaacaacgagcccgaatatgaagccttgatagtagggctgagattagcaaagactgtgggggctaaaagaatagaagtctacagcgactcccaactggtagtgaaccaggtgtcgggagaatatcagacgcgcggagaaagaatggtcgcgtatgcggtgatagtctgggaactgctccacgagttcacggactataaaa

SEQ ID NO: 360131 - DNA, 697 bp, Cannabis indica
aacatacaagtttccgaacagacatgggtctctagtgctacaaagtcatgccgtttggtctaaaaaatgccggagctacataccaaagattggtcaacaagatgtttaaagaccagatcggcaggaatatggaagtgtacgtggatgacatgatcgtcaaatccagaaaggctgggggcacatagacgacctggacgaatgtttcaaagtcctcaggaaatagaacatgaaactaaatccctgaaaatgctcctttggagtcagctcgggaaagtttctaggcttcatcgtcaatgcccgaggaattgaagccaatccagaaaaaatccaagccctcctggatatgaactcgccaacaaaaacaaaagaggtgcaaagcctaactggtcgaatcgccgcacttagcagattcgtgtaaaaatcaacgaacaaatgtgttccattcttcaaaatcctgcgaggaaacaaaaagttcgaattgacagaagaatctgaaagagcctttcaagatttaaaggcacagctcgcaaaacctcccgtactttctaaacctctagacggtgaggagctggggatatacctagcggttacggagcatgtcgtgagtgccgtgctgatcagaaaagagaacagcgtgcagcactcggtctattacatcagtaaaagactcatcaaagctgaaggccgatatccgttg

SEQ ID NO: 360132 - DNA, 746 bp, Cannabis indica
aattttaaaatttgctaaccatatcattatttttttttcaaatttgttatttttgaaatatattttattaattaaatgataagatttgataaatgttagttttaacatttgatcttattagatatattttattaaaaattaattttggcaaaaataacatgaaattagaaaaattgattagtttaggtttgaatagaaattttagggtttctaaccataaaacttttcaaacttattttattttattttttaataaaattggtaatttcctaaccataaaatatcttttttttcaaatagtttattttgtaatatttaatttattaaattataagattaagaatataatattaggaatatctaaattttaaaattaaaaatattatattatattatcttattagaaatttaatgaatttaatttttttttttaataaacttgaaattttaaaatttgttagatatttgaatttaagttagaatttaagatatttaggagatttgttaggttttttgaatttttttaaatattctctaacaacctaaattttaaattctagttaagatatgttttaaattttaagtttttaattttaaaatagagatatcttagcctagtttccagttaactgttacttgtttggtttgtaatgttttgattatttatttatttattcaaaaaaaatttaacaaacctattatttattatatctaaatttttatgattaacttgttgacagatccaa

SEQ ID NO: 360133 - DNA, 633 bp, Cannabis indica
aactccatttgccatggcatatggatatgaagctatgctgcccgtagaactcgagtcgccatcccatagaagattaacgtacaaccaagaagtaaatcatgtactcctggctgaatcgcttgatgaaatcgaagagaagcaaaccacagaaaacttaaagttgatagcccatcaacagtaggttggtatttcaataaacaagtgaaggctcagaaattctgtgtgggagatatggtccgaagaagagtatttctaaacaccaaaagcagtacagcaggtgtgctcggacctaactgggaaggaccatatcaggtggtcgaagttctcgaattcggagcatacaaattgggtaagtatgatgaaaaaatgcaacttgtcctagtaccacggtattggaatggggaacatttaagaaaatactaccaataaagtaccaggtcggatgaccatattaagtactgaaagagcatttacttttaagtgaatggcctgttggccggactacgcccaatggttccgataaaaatgaaaaagtacttaggtcggatgaccaccatttaaagtaaaatttctaatttctgcaatttgttttacttcattttaagctaaaagatcagattagatcaaatagct

SEQ ID NO: 360134 - DNA, 792 bp, Cannabis indica
ctggtcatatagttatcaaccgtcattgggaaaatgctgattgcaatctcttcagtgactattttgcagagaatcctcgatttgtagagtcgatgtttcggtgacgatttcggatgggtcgttctttattccttcgtattttcaatgcaataacaatgcatggcgactactttgtccaacgaagaaatggtattggtaaactcgaattatcgggtttacaaaaggtaacagctgtatttcgaatgttggcatatggtgtactagcagatgctactgatgagtacattaaaataggtgaatatacagttttagaaagtttgaaacgattttgtcgtgctgttgtggaggtgtttggaagtcgctattaggggtgttcataaaatagccgattcaatccaatccgcacgatccaatctaatccgcaaagtgtggatatccgcacttgtgcggattggatgttgattgacatgttaaagtaactgatcaaatccaatccacacatatttataataaaattaaaaaaattatatatacaaataacattttaatataaagaaaatagtaatttaaaagtctaatacatataatacaattatattgcaaaatttaatagataaaatgtatattctatcttatatattatttctacatacatttaaataaaatttaaatattttttttatatatatactatctttttttctttcctttgaattttgttatttgttattttatttatttaatgtgttgttggtagacataaaataactataatttgtttttaattttgtt

SEQ ID NO: 360135 - DNA, 699 bp, Cannabis indica
ttattttaaattattaatgtttaatttttttaggagttaattgaatttttcggtggtccaacaaagtcctcctcttttatcagtagttttccaagtgatcttattctcggcatataattatttaattggataagtttatgtaatataatatagaatttgtgtaaattaattagactcaattaacaattgattcatattttaaatttattttttacgattaggttcttggtgttgattgaagagcgtaaaagtagctagctttatttgagaaaggcataatcactaaaattttaaaattctttatttggtgaacttcgaatatcttaaatattcatatgtaataaagtaggttctgcgattaattgtactgttatcggatgggtagaatatgcatgttagatgagtttgaatatcttaaacttttatttgtagtgaagtagattttgcaaatacgtgtactggggttgaatcgcaactactacaatatagccttttagtgacactatttagtgacatgcacaaaagtgtgggtcactaaagagttaagagtaatttttagtgacatgcataattagactctaaatatttggggttagtctcttgtaatgtgtctcactaaaaatatggagtgttactattgagtaaaatccaaaattatttaatttttattactttaaaaaatattactctatagtgaca

SEQ ID NO: 360136 - DNA, 1617 bp, Cannabis indica
gcgacaagtaatttaatacgaataaaatataataaagcaaataaagacacaggaattttatagaggttcaaccccgagtagttcggtaatagcctaatcctcgttatttgtattgacttaagaataaggagaataattcattttcttagagctcttaaaatagtatctctgaatatgaattcttagataaaatgttttgaccatttgcccagtgagtatagatcactatttatagggctataagcttgggagggaagtctttcccttctggttataattgatatgagtagaaagattgcatagtaaatacagaatacaccaatcgtgggatttggacagcttgtcatatctctgttaatctgatcccaaagttatagggactttttcgaggactcacgatgcaaaagttgagtttgctaagtgttggcatgttgcgcggattactcactgcccggctaagaggacttcctccgagaaaatgtgtgtggtgtcttgttcggcatatttcttgcgagcaggtacccagagttgaatccacgtgtcaccatcgtgtgatgccacgtcagagtacaaaaattgggataacatttgccccctaagtctgtacgggacttccgaagttgcgtgtagacttcatccgagctgtctgtgcgtttggatgggtgacacgtgttaggtgcgtctgttcgcgattcgatgagaggctgactaggcgtctcttcgatttttggctaataaattctctgacgcaattaatgcttcgaaattcgatcttctctcaccacgtttgacggttacacttgattacttttgatttccaatattcactttggggggaaccgaggcgtctgaggaaatgattaccccttttcgctgtttttcctataaatatgatggagcattgttcacaaactcattttcaccaatcttctctgttaagcaagttcagagcaaaaaagagaaaattttcacttcgagtttgccgcgagactttcacaagaaccattcaagcagcttcgcttagagtgaatccagacgtcgatcagtgagtaagttttcgattccttctacgtttactttgcacatttaatttctaaatgcaatcttaaccttgctgtagaagataggtagaaaacccttggttcaggaactctgggatttttctttgcaatgatttatgcgacttcactatgcatgatgcttgctttctgactgcacaatgtctgtcttttaccttgcttattcaaagcttcgtgaaatttttactctaactctcgaaaatttcgaacttctgagttttgacttttcgtcgaatatttatattctttaatctgttgagtactcctagtcggcatatttgcctgtttactgtacgatatcccgaccaaacactcatctcgcgtgttgtcttttatagatgaacccaggtgaattttggagaagtgaacaccgaatcgaccaggatttgcttcaactcttgtacgaggatcaccatcgtctttgttctagtccgccctcttcaagcgacggacatcttaaatcactcttcccgtccagccacaggatgatggctcgcactaaacagacaatgtgtaaagtcaacgcgtctgaccctca

SEQ ID NO: 360137 - DNA, 648 bp, Cannabis indica
gtagaacaaatttttctttttagtcgaaaagtgtagtaatattatgttttgatattgatctaaagttctaaattacaagtctaggatcctacaagaggaagttcttcaagcttggtacatggatgacaatgatgaagatcaatgactcttaaatagttatttaagattattttagtcttttatgctagtttttttatataaggctttcttattagttgtattcttttatttttaacttttggcaattgaatgaaactctaattttttttggcatttttttattctttatttgttattcttctctttacaaataattatcatggtatcagagcaaggtttatgagagtgaatttcttaagcgtaatcacagctttcgtggatccaactctgcggtgagttggctaggggtcgcaaggggcaacgcgccccctgcccggggttcggggcaaagtcccgaaagtttttgtaggtgttcgtacaatttttatatgcacaacatccatacaattcgacattccaattttcagtattgatttcttcaagttttttattgattcgcatagcagttttgggtattgattaccacagtacaattttgaattttcatcagttttgtatttggaaatttcgcaattttgttcgtttttt

SEQ ID NO: 360138 - DNA, 731 bp, Cannabis indica
aaaaatattactctatagtgacaaaccaaacttgattgggtataaatatttatcgacgcacctagcgcgtcactatatagatatcgtgtcactaaatggtaactctcataatttctatatttttttttaaaaaaatataatattgatctatagtaacacgccaagtgtgattgggtaaacatgtcccaacgtgccaagcgcgtcactaaaaagtaattatttattttattttttttaaaaataaattatttattcctcttctaaaataataataataaatatatgtaaaataatttataaatacagctggattttttggctgtacttaaataagtaaaaacataaaataaaataaataaaaaagaacaacctctctttctcttaatggtatgaaagcttaaaagccctaaatcatttcagattaaaagaaagaaaaaaaactctttaagtccttattctgcaatccctctctcttcctcgcgtctttgggtcttcatcatcggcctcagccaaccttcgatgaacctgcaacctaaaccctattttctctctaccttggcttctccgcctaccacgtcagcggttcaacctccagatttgagataatggctcatgtctcaacctttgcctttacttctctccaccttgtcttctctttgcctcccccagtcgtgggtgctaataagtcgctgctggtatatggctttttatttttttcttttctttatttt

SEQ ID NO: 360139 - DNA, 713 bp, Cannabis indica
cacatcggtatttgcgcaaataattttcttaaaggtatttttataataaaattaattttaggtatatattaaaaaagcccctttttcttttaatgaaattacttaagtggtagctaacatagattggatggatgcaatccaatccaacaaaaaaccagtcaatgtatccaaaaattggaaccgatccaattcaatacatccattgaatcggatcggatcaaatgactcaattcgattagattggatcgaatgataaaatttaatatccaataaataattggattggatcagttgggtccaaatccaatatgatccaatgaactatactcttattaaaaaaaaaaaaaatctttcttttatgttttttgttagagtaatttgcggcataaatacctaagtttaattcttagttgtaaataaatacctaagttataattctggaacttttgtaggtacctgactgttaattgttaagtaaattgccacgtggcaattcttaattggtccaaatcattaaatttttatttttttaaaaaaaaattaattaaaatataccaataagaaaatgacacgtggataacaattcggtatctatagagttccaaaaatataacttaagtattattaccgtcaaaaattaaacttaaatatttatttacaattgaaagttaaacttagatatttatgtggtaaattattatattttttttttt

SEQ ID NO: 360140 - DNA, 769 bp, Cannabis indica
ggtgtaataccttgttcaagtcatgctgatccccactaatctacacttaaagttgtgagtgagtgtatatatatatatattattctcttgttgtatatataaatatattatataacagtgttgtatcttcttctaccttttcttctatataatatatatattgtatattatgtgttgtaacatatctttaatctctttcttgatccttgtattatattgcaatagaattgtaatatcttgattttcttccattgtaataatatctctaacaatttctagttaagagagtgtggctttaataaaatgtataaattattaaaagcgtatatatatatcattaattaattttaaaataaaaaattatcgtgaaattaagatttaaatatatatatatttatatatagatgtgattatatttagatgtaatatttatttttaaatatatatataattaagttaatgttttttatataaaatatctatataatttttattttaaatatatataataatattacaaagaaaaccaaaacactccgttaaactaagaattttgttacatagccacacattatatagaatagatatatggatgtgtcaattatatattggatattaacttttacgatcaaatctgattaatttcagtcatccaatcgatctcatatccattagatactgaatcggatcagttctatctattagatgtatttcatgcaaactaaatgaagatgtaaattactttgcttcgtttctttgttattttact

SEQ ID NO: 360141 - DNA, 792 bp, Cannabis indica
tttattttttatttcccatatttgcttttaaggagggaaactgaggcatctgaggttcctttgaaatgattacctcttcccatgacttgcctataattatcaaccaacattgccacataaactcattttcaccatccttccttgctaagtgagttcagagcgaaaagagaggttcttggcttcaagtttactgaagtgccttcatcgaaactgcttgttggattgacgttgctcgaacccagatatctgactcttgagtaagttttcgatttcctttatgcttatttttgcatgtttacatttcgaatgcaccttcgactttgctgtagaaaatatttaggaaaccctaggttcagaaactctgcgattcttctttgtcatagcttcatgtgattttacagtccataatgcttgttttttgaactacataacgtctgtctttcatcttgcttattctaagcttcatgaaattttttgccctaactcgagaaaatttcaaacttcttgagttttgacttttctttgaacattcttgttcttgaatctgttgagtactcctggtcggcatatttgcttgtttatcgttcgatattccgaccaaacactcatcttgtgtgttgtcttttttgtagatgaacccaggtgagttttgggagagcgaacatcggatcgaccaggacctgcttcaacttttgcacgaggatcatcctcgtcttcgttctagcccaccttcttctagtgaaggacattctccaaatcttatacccagccatagaatgatgactcgtacaa

SEQ ID NO: 360142 - DNA, 720 bp, Cannabis indica
taaaaggttactgggggcaaaatggagatatccgcctcttaaaaaacttgccctatgcctaattcacgcatctcgcaaattgaggccctactttcaggcacatccagtaaaggtgttaactgatcaactcctgagacaagttttatcaaaactagatgcctctggaagattgataaaatggtctatcgtactggggcagttcgacataacttatcacccaaggacatccatcaagggccaagctttggtagatttcttgatagaaggataactctagatgaaaatccacttgttcagcgagatgcggacacttggaagttgtacgtggatggggcatccaatgagcatggctcgggtgcaggggtgatattgatttctccagaaggctttaagtttcactctgccctaagatttcaattcgacacttcaaacaatgaggctgagtatgaagccttgatagctggtttgagagtggctgaagtgttaaaagtcaagaatcgggtatgttacagtgactcgcagttaattgtgaaccaagttttaggcaaaaaccaggcaaagggattaaaaatggcaaaatacctagagaacgttcggaagaacttggaaaagtttgattatttcaaaatcgatcaaagtcctagagaataaaactctaatgtcgacgccttagcaaaactggcctcgcagaacgaacttgtgttggaaattattttatca

SEQ ID NO: 360143 - DNA, 472 bp, Cannabis indica
cagcactaaagaaggagtgaaagagatccaggttcagatattgataattctctggaaatttggacttaaaatgattggtttgtgttttggatggtatcatgttattttgagtgttgtttgatgattgattgatatttgtgaattttcgtgaaaaataattgaatatctgtttttagaattatttttattggatagtatggaaaaaattaagcaaattgcttttttacagaactaaattttgatttaatttgaattagttatgattttttaaagtttcaaaaaatatcagggtggtgcaactagccacgcgcacgcatgaggggcatccctccgacagcacgcgcgaagacaagactttgtctgaaaaccacacgtccgcgtgcggaataggctgcatgcagccttctgtgccggcgtcccttggtttagcaccctgttgcgcgcccatggatagtatgcaatgcatactgtc

SEQ ID NO: 360144 - DNA, 822 bp, Cannabis indica
atataatcaaacaaatattgtatattgtgactcaatttttttttattttattatttttttgtagtaattaaacataaatttggctcaatttgaatgtataaatatctacattttcaagtgctgatctatgtatatatacgtatagttttatatgcaagtggccatatataaaaatagaatatattgtgttaatgggaataaaaaaagtattgctttaattaatcatcattcattggtttcctcttcattttaaattattattttatacttaattagtactcctcctaatggctctaaatttctttcattgtaatacatgcatgtgcactgagtgcaagtggcaacactttgataaattattaggacttgtgatatttatattatttgacccatcaatatgtagggtttaaacattattggaatgtatataatgtagggttttaaatggttcataattaattaacaatttataattgattaattaataaaaagtaataatgtaatatacatatcactactaaaaaaaaaatctttagcattcatatgttaattactgaatgagtttgttgctaaaagaaaattgttagtcacgtttttttatgtttgaatgagactgtgtgctaatacagggtcgaccttgagaatatatgagctaaggccaattaaattttggaactttcactttaaaaaatatataaaaaaaaagtattaaaaaaatagtagtgtataggacctataccattatagtaatgtgtcatacactccaaacaaacaagttattgtttacaatacagttaattttacttaaataaaacctaataa

SEQ ID NO: 360145 - DNA, 917 bp, Cannabis indica
tctcagcttcaatctttgtaggagggaagaacttggataggaattttagggccaattcctcccaagtgttgatagagtgagttggcaaagagataaaccaacttttggcttgtcctttagtgagaatgggaacaaccttagcctgatggcgtcatcgctaactccgttcatcttgaatgtctagcacagttcttcgaagttggcgaggtgcatgtttgggtcaactgacggcagtcctccaaacggactgaagattggaccatctgcagtatggctggcttgatttcaaaagtgttggcgtcaacagcaggtagccttatacaggatcgggcccctgtcaagttaggaagcaagtaatcccccattctacggtcattgttgttgtgtccattagcctggtcttctacgcctcctctgttgttcccattgttgccattgttggcgttgtcagccatgactccttcttgttcaatctcaagtgccgctctttccaatttcctccttattatgtttcttctgcaagtcttttctatctcagggtcaacaggtaatctggcaattggaccttgacttctcataaactattgaacctgaaagacttgaacatagacacatacaactattatacacactactacacatcaaaagtatggatgcaaacatatcaagaaacagtataccaagttggaaacctacgagaatgggatctactagaatttttctaagatatcatagtgttatctcccacagaaagaatcaaatctggaaggtcgaagaaaagaagattgactgcagcttgggaaataaaaaaaaaatagaacaagtgcagcaagtgtggacaaaagggacacaacaaaaaaatgttgggttttgtgccctaaataaaaccttttagaatctgattagttatcaatata

SEQ ID NO: 360146 - DNA, 306 bp, Cannabis indica
tttagtagttgccgaaaatctcggtcaacaaatattaatttgtaaatttatgctctaataaaatattaatatgtaaattttaaattttgatattttaatattttttttattagtaaaattaactattttataatattttttacatagaaaaataaattaatatccaaatacaaaataaagtcctgaaaaaagaccattgataaatctataaaaaaaaaacttataatatgatttcaaaactattatcatcaccgtacctcattgttgggtattattttaccaagatcttagatctactcacaagta

SEQ ID NO: 360147 - DNA, 624 bp, Cannabis indica
aaataccgaaattcgaaaaataggagcataaattctcaaatgtctaaacttcacagttttataattttattgctacccaatttaatggtcttgaatggagactaagtcaaagaataagaaaaagacagattaaaatttgggtttgattcatttaattatgatttaatttttattctgatgtgtgtgttaagttctgaattcgaattttattgtgtgtatttttaatgtttgagatttagtgttttaccggagttttactgtttgagtttgcgtttatgagatctgtttttatttatttatttatttttatagattttgagaacttgaaatttgatgtcgtttctattgattattgggattgagagtttattttttcatacaggaattaaagtttatcttttcgtttcattgattgaaaaatattagtacaaagtttatggaatgaaaattttgaatatatgaaaatagaattaaaagatagtatttgaatagagaatcaaagttgttaatctccttacaaaaaaaaaaaaattattcttaatctgtaaagataatatggctagaagaagatggaaatatgatttttatttcatttaatatgtatatagtttttttttttctttt

SEQ ID NO: 360148 - DNA, 748 bp, Cannabis indica
atcaacaacttcacccaacatgatgacgaatctctttacgaagcctgggagagattcaaggacttattgaggaagtgcccaaaccatgagattgaaaagtggttacaagtgcataacttctatactggattactgaacaacacccgaacactgatagatgctgccgctggtggagctttcatgaggaaaagtgctaatgaggcctttgaagtacttcaaaagaaggccataactaatcaacattggtcaacagagagagacccaaccagaaaggttgaaggtatgcaagaagttgatgcaataaccaagttgacagcccaagtggaggcattaacaaagttggtgactgcacaagccaaacaagctcaagttgtctgcaagttgtgtggaggacctcatactactgacacctggcctatagatgtcgacagtttgccaatggagcaagcccacgccattggaaactatcagaataattatggtcgtcagcagaacttccagaagcaatttcctaatcagcaacaacaagggttttatcctcagcaaagccaacatcaacaacaacaggactctagtgtagggtctaatcctcaattagacatgttgatacaattcatgacagagattaagtcatccattaaggtcttggaaaacaaagtggagcagttggcttctcaaaacactaacaggactcaaggtaacttgcctagcactactgaagtcaatccaaaggagaattgtaatgcaa

SEQ ID NO: 360149 - DNA, 809 bp, Cannabis indica
atactccttttgacaaggactaagtatggtgcacccctcggggtgaggttcgcaaaccaaccattcacaacggcacctacagaacacgcttccactgaagccaagtccctctggacaagtcgatccagaaacttcacacgtcaactctatggcgcaccatcctcctgatggcaatcgagcaagacacctatcgtaggataaaattcagtgcgtcccacctagacgaggctcgcaagccaactgcacccaatgcagcaccaagtgcactcttgcacaaaatctcttcgcgaagttctcaacattggccctccggccctaccgcacacccacgacttcatgcaaaaggccccactgacccactgcatacttgctcctctgagttcctacttgtgtcggctcccaaaactgtgtcacaagtctatctcctaaaatcaaccctgcatcctctgatgactcgctaattttcgacaattttgatgacacccaatcttactcttaagacttgaagtcatcccaatctgctatctcccatcggcatatgttctctgaaccatttcgcttacagtgtcccatacaacaccagtgtccccataaacacaaaacatgcccataacatgccgcaaactagctcagtcttgatctcagtctacgcccctgcatattgtctatctgcagcttgcagcaatcatgcaagtcttcacactgaacaacccatctgttgtagtgtttcctctggattcacacaccaaaactgaacaagtaccctgattcttcaaacacatcaattagtgggatcccccacttcaact

SEQ ID NO: 360150 - DNA, 632 bp, Cannabis indica
aaacttctaatttctgtcactgttttcggtctaagccaatccctaacagattctatttttccttgatctaccttgatcccattctttgctaacaatgtgccctatgaaggacactagagatagccaaaattcacatttcttgaatttggcataaagcttgtgttcccgaagtcgttgcagaaccattcggagatgtagctcatgatcctctttagattgagagtacacaaggatatcatcgataaacacaatcacacagatatcgaggaaatcgttgaataccctattcatcaaatccataaatgccgcatgagcattggttagtccaaacgacataaccaggaattcataatgtccatacctagtacagaaagtcgtctttggaatgtcctcctctcggattctcaactgatgataccccgatcggagatcaatctttgagaagaccgtcttcccctgaagttgatcgaaaaggtcatcgatcctaggtaatggatatattattcttaattgttagcttatttaactcccgatagtcgatgcacattctcagagacccaaccttcttcttgacaaataataccggagctcccgagggtgacacactaagccgaacaaaccctatgtcaagc

SEQ ID NO: 360151 - DNA, 1281 bp, Cannabis indica
tatttttctctcaaggatttttcctcttctttttctgtacattctgcccctatttataatgacatagggtggcagttaattacattcaaatactaatcccataacaatattttcctgaaattatgggctttaattacgccccacgtaaataaatgcagttattatttgaaaatcatacagctgtgatttaaaccgcttttaatgagtcaacgctgacgtagattaaaatacgctgcaaagtgtatctcgccggggcatctcgctaggtacttgaatactaagtaggaacaataaccctggtagcgagctggagcttttcccatgtctttccgaggttgataatgtaaattccgtcgtttctgtgcttgaaggcataacgctccatctgacaatcgcagttcttggtgacaaggtgaacttcagcagccaacatcatttgaatatcaacttttttctgagaaggttgacacgacagagcagtgaagctcattgaaagatgtttggagctgattaatgaagtacaaggagtatgccttcctatagcgagaaggatgcctcgctattcgccatccatgtacttcaagctactacacttagttagtataatgcatattatacgctaggtgttctaacaacctattcgcctcatcaacaccttttacacatagcgaggttgatgcctcgctatgtattttcgatgccatccttacgattatctctaacgtggaatggtttctcgtcaatatatgaatcaatagtttttacatctgtctcgcttaagactatacagttagcgagttatagatatgttctattaactccgcatttaatgagttatttcatttgatatcttttaatatagttgccattatatatgttgattagtatcctccaaggttgacacgtgtcatcctcttattgccccttaaaaagttttttccagtgaaaagtactttttaaataattaccgatggtaattttgtcacaatccattttgaaaaaatgcatgcctttgattttggcaattttatggtttcgaggcacatcatgagcattaaataaccatcttttccacttcttccgtatttctactcgttggatcatttatttcttaattctatggagatcaaccctgaaaaaacgagtttttgcaaatgccaataattattacaggaatatacaaaatataaaattgtatacatctgcagcagcagaatgtaattctgttactgcagaaaccagttttgcagagacaaaccagaacaggtagaatataaaaat

SEQ ID NO: 360152 - DNA, 1476 bp, Cannabis indica
gtacatcatttctcatttaatgccctgactgttcctttctttgtaaagttcccatccgttagatttgattttccttgattgaacagtggccaccttttaggtataaatttgaaattgtgcattatttttccattttttttagctttcaaaccttcgatctttcgacaaaatctcaaatttacatgccctcattatctctcacattctttctgcgtatttcttctggttgtatctctcttcctagaaatcatcaagacccaacttttcgacctttggatattcaatcgcgaagttcttccctacctagaatttctcatcaagacagtaagtgactgttggattatatttcaccaagacctagatttactaacaagtatatttttaacattctaaatatgaacttctaaaacgatggaaattaaagacatataaagtatgagaaacattccattggtttcagcataattaaatgactcctttcgctcagatctctaacccttgttcctttctgtcgcagagtattatcaagatcttagcgcgacactccttcagttgattggattcttctcagtcttacacactatgattgaggactaacttgctatgggtgggcatgcattgcactcaatcgctaaggctcgaattttaatggtgaagaacactatagaattttgaaattgtagagaaaaaagaagaagaaaaagtctcaaaacactagttgtctgacagaatgaaaactaggtttagaagaattagttggataatgagaccattcttttatttttatactaattcacttagggttaggattgaattatttggaataaaaaatgataaaataatagcaaaaataggagcatagtggccagccatatgtgggcccaacactagttacatttttgtcatttttcttaaccatttatgtattatttcacaaatgccatattttgctatactaatcctataaatgccaaaacaatttattttataattaaaattaattatcaaataaaattatcatttatattacttattaattagactccacaaagtctcttaattaacaaataaaccctaaaatcctatttctttacaatcaagccttatcttagtgaaaaattcataaactagacatggtctaattttaaaattataattgattaactaaaatcaattaactgggtcttacaagcagtttgtctcaactagtatggggaccatgggcctatataactgagcttgcaataagcagatctagaattcatcaagtaaattctctaacttattattcctccttgcaccactatagatttagaattgcactctcaattatatagaacgctctataagtttcacgatatagatacgctaagagattatctatttgttataatcctaatgatcaattatcctctatagatgatctacattgagtagggaaaaatttaccgtgacactcttcaatgtattttatcc

SEQ ID NO: 360153 - DNA, 616 bp, Cannabis indica
tgtaagactatgaagaatccaattcaactgaaggagaattgggctcgaatcttggtgatactctgctacagaaaggataaaagggttagagatctgagcgaaaggagtcatttaattccgctgtaactaatgtaaggtttcttaaactttatatgtgtttaaattatattgttttagaaattcatatttaagatgttaaataacatacatggtagtaaatctagatcgtggtaaaataatccccaaaaactggcctcagagccatggtaatgaaagtatggatttaaaacgatgtttgtgttgatttggatggtttcatgttggtttatgtaaataattgatgattgtatggaaatcgcaatttccgttcataaatatactttttttcgttctgaaaatatttttactggaaagtagacgaaaaattaataaatttagacttttacaaaactcaatttggattttttatgaattagttatgattttttgaatttggatgaaaatatctgaaactgagcaacacttgcgcacgcggattgggagactcactccgacaagaggcctttgttgggtcttatgccctaaataaaactctttacaatctgattagtaatca

SEQ ID NO: 360154 - DNA, 1017 bp, Cannabis indica
cccaaactgaaacctgaacacgtactgggacctagacttagacccaaactcgggataccaaaaccgaacctgaacatggacctaggtcggaacctaggatccggacctagataggggacttgggccccaaacctgaacctttaccaagacctggaccaaggatcgggacctagatgggggcccctttgacaaaaaattgggcctagaactgggaccgagatcaaaaactgaaccatagactcgagacacgggacccgacgctagatcaagactcggacctaaactcgaattcagaccagaaccaatattgtgacttgggacctaaaccaagaccaggacctggacccagactgggtcctggaccctgacccagacctagaccaaaaaactgggacctaaaccaagaccaggacgtggacccagaccgggtcccgcaccctgacccaaaccgaactaggactaggactaggacctaaactcaaacctgaccaaaataaaatcaagacaaagacccaaactcgaatcgaggctaggactcaaacccgaacctagactgggacccaatcccagaccagaattgggacctagacccagaatcaggatagggacctgggcaacggaactaggaccgaaacctagtacccgaccccagacctggacatgaacctaggacccagctcatgacatggcacccaaaatggaaccagaccaagacccgagatcgagatttggatctagagtcagggcttggattgaacccatagtcagtgtatggatctgggacacaacgccggactcgaacccaaaccacccgaaccaaaactcagacctgaacctaatcctagacccaaacctggactcgaaaccgtaccttgtgacccaaaattgaactgaaatcggaagttgaccttgacccaaaaatgggaccagaaccaagacttggacctagaacagtaaccaaacctcgacctagacctaaaactataaccggaccaagacccagactcaaacttagac

SEQ ID NO: 360155 - DNA, 569 bp, Cannabis indica
acaaaaatcttcatttttctcaccccaaaagtaatgggtgagtgttttttaatacaaaatattgttggtttttattatattgcatggatctacacattattcgttatattatgtcatttttgtgatctgaattgcaagtagagttcgtacccaaacactggttttttctgggtttttcaaatttttgcgatttttgtacaccattgtgcgatattttgtgcgatgccaatagaaatcagaggttagagatgactttcattctttttggcaacattcaacgacgaccttgcaattttgtgcgattataatagttttgcaatttgtgtgagatatttttacatcattatgcgataatatttttgtctttttttaatatttccttgttgtgttttttgtgcgacattgtgcgatattattttgtgtttgtgcgatattgtttttttcttgtgtgacattatgcgattattgtgcgacattgtttcattttttatttttttctcgtccttgcttaaactgaatattttcttagaatcatcaatgcgattctacattaatacagaatgaacgag

SEQ ID NO: 360156 - DNA, 779 bp, Cannabis indica
aacaccagtaaaacaatagtagaacaccagtgaaaacttaacacagtatactgcagtatgaaacttataaaaaaacacagtaaaaagtaaaaaataccacctgacagtatttttgtaaaaaaatgacaaaagttagtataccatgtaaattttcctttttatatatattgtacccaaaatgctctgacataagagagttacatggagaatatcttaaagtgaaaatgacaaaattagtacaatagtttaaaaaaagaggtaaaagtaatagactttaaaaaagaaggataaaaataaaagaagtgcaatataaaaaaggtataaagtctaattttctctaaagtacgggtataaattcagctgaaacttttacatagtttgagcataaatcatagaaagaagttgcaaattcttaaaagatgataaaaacaaactttgtattataactctccatattatcattcttaattagtaaattgagttactaattgtatttgaatgtaattaaatggtaggtatgaaaatatatttgttgggggacctatttctatcattattagagtatataaatcatataaaatcaattggtaactagttatagctaaaattttactgtttcagttaggggtgggcatcattcaatccaatctaattgaactgaaccgattcaatccaatccaattacaaaaagttggatatccaattacaattggattagattggatgctaaaagttggattctaattggattggattggttattggatgtcaatctcaaa

SEQ ID NO: 360157 - DNA, 1167 bp, Cannabis indica
attatttcctatgttgtgactaaaaggtccgtaacaaaaagtattagtcacaaaaattacaaatttgttgtaactaaatgtatttttagtcacaatacttgttgtgactaaaactaaattcgtgacaacttgtatctaaaaattatattttagtcacaagtaacattttgttgtgacaaaaattcacgtttagtcacaaaaaaattgtattgtgactaaaagtaacaattttttgtagtgagtattgtttcgataatgaatagtattcctttatatgtagaaaaacactttattattctttaaaatttgagataaaatagctatctctgatttttttttatcattttttttcacctttctcttcattttgaagaaaagagtattataactcatcttatgtgagtgctcttagcactatataaaaaaagttatttttagtgataatataattttttttgtgacactaatttatttttagtcacaacaaatattgtgactaaaaatacatttatttacaataaattgtattttttatgactaatatttctttagtcatagactttttagtcacaatatataataaaagtcacattcttggtttgatgtgagagttcaagacaaaaagagaagaagaagaaagatcaatttggagacttttccaaccctacatatagctattggaatttggagaagggaaatttgaatttgtatgcttgcatttaattaaaatttgtcctcaaaactcataataccccatatttaaaatatatgaccattttttctattatgcccaaaataccctctgttttttccttcaccccctatcacttcttctctctttccctctctcttcttttctctaacctgcccgaagctacacaaagggagtcaatttttgctcctctattctcatcctcactacactagcaccacactgcacaaggctcaccacaagctcaccacataatttctctcatttttggacgagcatcatacactaacttatgggtaattttttttttgtttgaacaatcttgtttgttgttgttatatttagtttagaatgttattttgatgcttgatctgtagattgttgctgttatttggctgttttttctgataaagtttgctgcctgtgaaatctggatttgttctggttttctgcta

SEQ ID NO: 360158 - DNA, 955 bp, Cannabis indica
tcagcatcagcaagattgggcgtgggcgttttgcttatgagtacttcatggtggatggcacgagcatcagtcgcactcggttccaacagattccaacatatcaccgtcctccgctactcttgctcttagggatagagctcaaaaacttgctcgactgcccggggaagaacggaatattatccaattgacctccgaggataactttgtgaagtacgggctctatcccaaggagttcattcctaagtccgtgacggggaagaagaggaaatctggtgctagacggaccgaacgagctcatcaggagaatgaactcattcaactcaagcgtgaagctaagttgaagggaggtgcaatggccaagcagtatgctcaagagcccttgaatcctgaagatgaagtcgaggaagagcaggtgactctactgaagaggaagaagaaacttccggccccgcccaggcctgttgaacatgcaattcgcataagggagcccatttcacctgttcggccatcccttcccatgttcagaaaagggaaagttgttatgtctgaaataagagcgatgtcaggtgatgatggacttctgagttttgtttgggcagacaccttatatgtcactttgtcttatttttgagcttcttgatttttatgcctcatgtttctgatgtttgttttctctaaccatattgtttttcattatgtgcagacatgtctcggcagatgcttgacgctctgaagaagagaatgggcgaagctctagcgcctctcctccggccaagaagtctagaggcggtgaggggtcctcttctaaggaaaagaggtctgctgaggaggtcatcgatctttccgaggagctaactgctgcaaacccctctaccacaaaagctgctaagtccaaggagtctcggggaggaagcttggacaggtctgagccaccgaagggtgggtctgagctggt

SEQ ID NO: 360159 - DNA, 702 bp, Cannabis indica
atgttagttttatttaaggtttgattctttttttagattttgataactaaagaggtatgattatttaaataatttgttttataaaagtaaacttgtgtcagtgtatttggtaaaatataattgtgtctataaacttatgatatgtacattgttattaacaataaaaattacgctaatctcaatattatatctattctagttttgatacaaattaatctaattactctgttctcaatccaagttcccaactttatataagtagacttttaaattgaattcagattgtagtccaataagctcaattatctcaaaatcatactttaccaacaaaagagcaaaatagcgagtaatgtcaaacatggagcccactttatataatctacttgacgctctgggatgtcgatggatacccaatatttcaaacttgaagaagataaaagttcagtttattcattcaaagaagagcacaacctatagaaaaaatctctaactatgaaatctcaaaatctattcaacaccagaactaataacaataactcaaaaacaattcctactaactgaattgttttacaagaattagcatttctatgtactacttactagatcagaatacatatctctgaaattaacatgatgtttcaagatttaatctttgtggtgctccaaaaaaatatgtaagtcataatcaaatacttgaaagcc

SEQ ID NO: 360160 - DNA, 677 bp, Cannabis indica
ttggatatccaattgtgatcggatcggagtcggattgttaatttttaaatatccaattggatcggatcggatggtggatggggtgtctaaaaatccaatacatccaacatccaatcgaactaattagtattttcatttagtttggatgagtaattagattttatattgttatacgtcaaatttatatgtatatatgaaaattaacattaaagttttactctttttttcttggattggatggatccagtctgatccaatacatactggatctaaaatattggatggatccaatccaatccaaaaaatactaggtttaaaatagtggaaaaacccaaattaaataaataaatatatataaaatacatccaatggatagaaccgatccaatccaacatccaatggatgttggatcgattggatgatgaaattaattggatcggatcggatggtaaaatctaacatccaatatatgattggatcggatttggataggcctaaaaacattggatgtgatccaatgaacacccctaggtaagcacataaaacgtggtcaagttattagaatatttttattatggaaattattttctaattaagaaaatgattttctatttaaggaaataaataaataattgattttctgataaatgaatattttatattcattaaatctggac

SEQ ID NO: 360161 - DNA, 1084 bp, Cannabis indica
gtaatgggttttatttagggcataaaatcccaacaattttatcctgagtttttctccaatgatcaagagtaatagaagttgaaacaatgctttcatcaacaaaagaagttttttgtttccaaacaatgttatttctagcttttcaaagagcccaacaacacatgactgcacgacacattttttcctcattaaaaggtttaacaatcagctctagccagctaccaaaggagctgctgggatcaactatagaagccgtaccttgttgtaaccatcaagcttgtgcaaaggagcatgacattagagcatggttgatggattcgggtgtagaagaacagactgagcaaatagaagaaacattaacatgctttacaacaagttggaggcaagtaggaagacaactagtgagcgttaaagaaagttctttacctttggaggtattttcaagtgccaaagacgatgccaaaacccagaattgttggcactactatactcattttgttgattctggagcaaattataagcgcttttgacagagaagctcccagaatgctcttccttccaagaccaagaatctcttgtggcatttgaactgagaggattacccaagattagagaaatatctcagccattcaagatgttgcatatgctttcagcatcccatcttcgtgacccaaggtgaaacaaattaagagctaacacttttattgatgaggcctgaatgtgtttagtaaaatagtgatcttctgtaatgaccgctctagtaatatggattagaaaaggcaattagcactaatttttattattttattattatttgtgaattaaatttaaatgtggaccccaatatttagaaataaatattagagttataatttctcaatttcggagattttattaaactctaggggtattatctagcttatatgtgtaatatgttatttttgtaatttttgttcggcgacaacggaaaatgcgatggatggctagattgatcacatgggtaagtttagaaccttatttcatagtgggaaatattttagagaaaatattttatcgagattgagcggggttatggaattgacca

SEQ ID NO: 360162 - DNA, 580 bp, Cannabis indica
cgattatgagatatttggatagttgatttttttttttttttgaaaatggaagcttcattcaaggttaattaattggcgaaagtcgtagtctaacacataaaaatcaaaatctcactaagagatgatcctctattttttaaaaggttaattagtaatttttttcgctaaactttgacatatattaaattctgcttcttgaattttttttgccgttaaaaattccccataaactattgagattgttaaatttaagtacttttgtctattttcatttaattttactgttttagtgattatttatgtactaaattatgcttcctaaactttgatatctaccaaatcatgccccttaaattttaatatgtactaaatcatgccctttgaactttcatccatgttagaatttttgtactaatattagacaaatttcaatagttcaggggaatttttaacgctaaaaaaaatttaggggcataatttaatacatgtcaaagttcgaacggaaaaattactaattagccattttaaaatagtaaaaatagtatcgtaaactaatttttgataattttttaatataatt

SEQ ID NO: 360163 - DNA, 593 bp, Cannabis indica
tttactcgtgttcttcgcatagaaactacctcttcagctcctcttaatagcgtcttgctgagttgtaagaattctacagggggaaaaaactctactctaagtggatacaaaggaggtaattcacaaggacctgataatcgaacaccagattctgggagcatcatgtgcaactattctaagaaaccaagtcataccaagtttgagtgtaggaagttacagttcaaaaatcgacaacaacacactactaatattgcaagcactagtgatgcatctgacaaatcagtccttatttctgctaatgaattcgccaagttctcaaggtatcatgaaacacttaagtcttcatctccttctgtcactgtgattaccgatttaggtaactctaatgcatgtcttctttcttctttccaaatcctcaaaatgggtcattgattgtggtgccacagatcagatgacaggtacttccagtctcttttcaacttttcagtagttccacgtctattgttaccttagctggtggatcaccatcttctattcttagatttggcactgttattcctacacctctgctcactttgtcatctgtcttacat

SEQ ID NO: 360164 - DNA, 738 bp, Cannabis indica
taccctagtgatagaaaattttagaatgatggaatagttgtgtacttagtacaaaccattactagattcatggatgtcccaatcgtaaccttaagaaaagctagaactgttaactaaggtttgcatgtttgataggtattctaagtgattagggtggaccatcctatggtcgttaagataagaaaatgtttgttttaacaaatactacttctttaagaaaatgactaagtctgaaaacaaagtagcaaagtagaggagatatttttatgattccaaagtgttcaatcatcttattatatataagatggtcccacttcctctgttgtcttaacacaatcgatgaggacaataccatttagtattcttagacagaaagtcacggtaccttgttgtagtgggagggttttaaggaactcaccctgttatgacttggaagacacttgtgataaaacccattgttaatttaaataagtaatgaaaagtctgaataaggaactaaaaagtaaagccaagagaactatgtttaaaaccattaatatggagtagcacaaagttttctattacaaggacaagaaaggaaattttgaaaataagtctattcaatggacttaacaaaacttcatggccctagtattaaaggtttgagtttatctaaacctatgacttgtggtatgtctggtaattttacttactccagtgcaagcaacttactttaataagatgctggagcatttttct

SEQ ID NO: 360165 - DNA, 586 bp, Cannabis indica
gttcgaacaagagagagaatggatagataaacttgatttttcttctagtttgatttttttagtaaaagtgagataacataaggggtaccttgggaaattctaaaatcctgaccattcccgacattcccaatgtctaactatactaccccactatactaaaataatactaagatgtgattctaatagccaaacaccgcgttccaatgttgtcgggcactaaatatgcaaaattatgaaatttctatatatgacatataaaatgcattctaaattcaaataaatcaccataaattaataatttaaaattaataaataatttccataattaaaccctaattatatactaatttccaaatttaagttaagcggtctttacagtagtagtgcttgcttatgtcgattgggatgttcaagactagttgcttgtatcctagctcctctcgtcaacgtcatagagcttactaactcgaatggttggatgtgaatcaggtggttagatatggcacacttttgaaaagtatttcatgttagaaattattttaccaggatctagatttactaacaagtatgttggattaacaaccta

SEQ ID NO: 360166 - DNA, 763 bp, Cannabis indica
cgcaaaaagcctcagccatttctgcggcttctgctccaaggatcgagaagtcaaagtctggaactttggaaagactagtgtagatgagttccgagaccgcctggtcatactgcttttttccgttctccttctcagtttccaagtcgcgagacatctcttcgattttcgtcttggcctcaagctcgacttgctccttggccttgcgaagttcctctagctctttgaccttagaagacgcatcttgtttcagcttcttaatgtcttcttgaagttgagcaatatgtttcttcgcgagttcaacctccttggaccctgcagcaaaagccttcgaaaacgtggccatgaactgcgaagctaactccgcagcgcgaggtagcagctcctctgaagatgccttgtcaatcttcgacaagaactcatcgctgacaaacctctcctgaaggtacagcacatgacgagctcgagtcgctgggtcgatcacaaccttcttccctttctcttgaatacccttagcaggcctcttggaggagtctgtgacaggagtaacaaccacatcgctcttcctcttctgggacgtaataggagaggtcgctgctgtcccaggcttcagtttgcggttgagcataggagcggactttaggaaagtcatttctgcaattacaaaaggaaaaaacaagggttatactaataaggataaaattctaacaccctaagtttgcgtatgcaataaaatacctgatgatggtcgaggagtttgcttgga

SEQ ID NO: 360167 - DNA, 274 bp, Cannabis indica
aacataaaagggtactaaggggcattttgggaaaactctaaattcctgactaatctcgacactccctctcaattgtactaccatgttccccaaatcaaagaacataaatagcgctcttgagatcgaacctaaatccagtgaactaaaaaaaccagggaattaaacttttgaacatataaccatgattatattccactgtcctgacagcactataatcatgaacaagtacatatgttctagacttaatagaatttatacatgaaataaatcatgt

SEQ ID NO: 360168 - DNA, 722 bp, Cannabis indica
acccataatcataaatatatatacacacttttataattatagggacacgattttgtcccgtgatgtaatttcatagaatgtattccgtggtacaatattagatgggtctcagggtacattatataggtctcagtgtacgttatccttttttaagtctaattatcctatagatcaaccccagccctcagatcaaataacggaatatattacatcacggcacaaaatcgtgttcctataattataaatatattaattttaaaatattaaatttaagaaattaattaataagtgccatatatatatatatcaaccgttaaattttaatttaatgactaataataaaagagcaatttaagtttctatacttacaaaaaatgctcaaactcaaactcaacttttttggtgtcttaattaactaatggaacaaccttaaccatgtaaaaatgaatgatttttattttagttagattagaaatattaaacataaaaactgatggaattttcgtaataaaaattcatggttagtgcatacttattaaaagtatattcatatatatatatatataattattataaaaaaatatttagagacaagtaaaagtacggcaaaactccatattaatagagcattgctatcagggccggtcctgaaatttagtgggccataaggaaaaaaaatatttttgggtcctatttaaaaaaaaaatgtggtattttcaaaa

SEQ ID NO: 360169 - DNA, 579 bp, Cannabis indica
taatttaattacgtgcttaatagaattatattattatatagtatgcatgtgttgtcttttcaggtgtgttctaacaggttggcacagtatagtcacaaccgggtatttcgggccgaaccgggttcgggcccgaaatgcaaattggattgaattaattggcattatattcgatattatgaaatctgaaatttatttgggaattaattgagtgtgaaatagcaattttgaccttgaaaatgtgtatgtgtgattaattggccctaagggcattttggtcatttgaccacttattattgtattttgaaaatgggattttattaagaaaatcaaagtaattttctagttatttccttctcacaccggaaccctctccctctccaaaaccctctcaatttttgagacttgaatttggtgtgttctagcttggattaagagtgttgattgggaagaattgtgttgaagattgggattaagcttgtgcaaggaattaaggtagcttcttgctgatttatttgaaattaaatgctgaaattctgggtaaaaaagcatgtctttgagttttgaatgttcttgttgcat

SEQ ID NO: 360170 - DNA, 774 bp, Cannabis indica
agatatttctattttaaaataaagcatttaaaaaatatctagacttgaattcaaatttagttgttagaaaatatttgaaaatattaaaatataacaaactctaaaatatcttaaattcaaatatctaactaatttttaaatatctagtttatttaaataatttaaattcattaaataactaataagataatataatatcttaatttaaaaaattgagatatttccaatataatatttcaaatctaataatttaactaattaaatttaacaaaataaaaaaatttgaaaataggatatttttatggttaagatattatcaattttatttaaagaataaataaaatatcctaaaattaaaaattttatgattagaaaatcctaaaatatctattcaaacaaaattaacaacttttcaaaaatttcatgttattttaacaaacaatataaatttaattaagataaatatctaataagataaactgtcaaaaaactaacattttttttaatcttataatttaaattaataaaatatattttaaaaacagcaatttttgtttttaaaaatttgatatggttaacaattttgaaattttagctagattatttttaagttttattaatactttaatgtcaaaataagatcattttaaattttattaataaaatatgtaaatatatgatcttataattaaaataataaaactaaataaaaataaatcaaattttaaaataaccataaaggcaagtttgtggaaaaattaatttttcaaattc

SEQ ID NO: 360171 - DNA, 1073 bp, Cannabis indica
aacaaacataaagcaaagaaaatacaaagtcccactaaaacattatatcctcaagcaatactatacccatatgagcagtgtgcccatggaagaccttgggtggtaatccttttgtgagtggatccgctatcatggagtttgtcctaatgtgctctatggacatttgtccactctgcacactttctttcacaactaggaactttatgtcaatatgctttaacttggataagctcctactgttattggaatacagcactgctgattttttgtcacaaaatattttgagtggtctttctacattctctaaaatacacagcctagtgacaaagtttctctgccattccctgatttgatgcctcataacatgctacgaattttgctgccatattggaagtgtcttttttgacacttttccaggatatagctcctccagctaatagaaaaatatagcctgatgtagaccttctgttatcttagcatccagcaaagtcagaattagaataccctatgacctccaaatgatctgacttcttgtatgtgagcatgtaatctttttttctctaaatatacctcataaccctctcggctgctatccaatggtccataccagggttgcttaaatatctacgtaacatcccaacaatataagtaatatctagacgcgtacatacctgaagatacattaaactcccaatagctaatgcatagggaattttcttttattttctgaatttcaaggttgcttttagggcattgtctaagactgaatttgtctcctttagcaacaggggtatcacatggtctacaatcttgcatgccaaaccttttgagtactttactgatatagctcttttgtgataatccaagaattccccgagaacgatatcgatgtatctgaattcctaaaacaaaagaggcatcaccaagatttttcatctcaaattgctttgatagaaatctcttggtttcgtgcaataagcatatatcattagtggcaagcaatatgtcatcgacatatagaactagaattatatatttactcccactaaacttgtgatatacacaatcatcaa

SEQ ID NO: 360172 - DNA, 308 bp, Cannabis indica
atgtgcgcgggcagttattatctgttgtgcttttgatttgtgagcagttatcaattctgttttgcataaacagttataatatgttttaagtaaacttcaatatacgtttaagattttttttaaggcatcttggtgtctcgtttaatactttcccacaaaaagcgagtcgttagtattcagctttgcatgtagcttatgagttatatctcatttacaacttttaattttcctttctcatcagccaggttctttaataaaaaaactttaaaaattttgaaaaattttaaactagtgggtttgcaatatat

SEQ ID NO: 360173 - DNA, 490 bp, Cannabis indica
taaaataatttccaacattatgtccaaagtagcaatgagggatgttgaggaggaattggcaaagaaactacaggattgcagtggtgattctgatgatgggtatgatgagtttgttatgtacatgccagatattgacatgccagaatttgacatggaagatgttgatggaggaagtgatgaagatactgattctagtgtccaaattattgagacactggatgatagtgaatctgaaaatgaaggcctaacagataaggcccatttacaccccaatacccaaacaaatgcccaaaacagctttgaaacaccatccaaaccagaaaaagtccaaagtagtaaaacatcagcacaaaccagatcccaaagacaaggcaaaactggccagttaaatccctgcacatcacccaaaaccaggtcccaaataacatccaaaacaccaccccaaaccaagaaaaaaaaaagtttccagacacaactgttccaatcaccc

SEQ ID NO: 360174 - DNA, 938 bp, Cannabis indica
caaatatttgttcatctttttttttttaaaaaaaaaataatattttccggttctctgtctttcattctttctctttgtctctcttttttctgcagggtaacgaatctggccttagttagtgttatcccaatttttgctcaacgtgacatgtctacatggtcaagataaatgccacgtgggagtacaacttgtcaaaaagaaggccaaacaacaattcagctgacaggagctccgagtacttaggagggacgaagaaatgacgaatcaaccaccctaagggattggtggccagccctatggccagcataggtcggccagcctccaaatattatagggtcgaccagcctgcacttggcaggcctttggtgtgcaaccttcatctgtggacagcaagctaagttgcgatttgggcttcaactcacaaaaatagggggaaatattagctacttccctatttttgagggataattaagccatttaatgtttgttatttaattatgtaataaggctatattttcttatttttaagagatattagtggttaatcttcatgtaagctctactatataaagagcatgagtctaaccttaatttttctaagtattaagttttaagtctataagctctcaaactctaagtttgaaactcgaactctcatttctcttctctctcgcatgccctaggcactctctctcacttgagatttccaacatgattctcacattgtaatcttaagagagtcacttcagattccacaacttttgtgatctaagtggtattatccctagtattaatacaaccaaaatgagagtaggtcattacccgctaactaagggggtcgaacctttataaaaatcttgcgtctcttttacgtttttgttcttattgtgtaatacgtggtaaacatcagtaataaatacgactctgctgtcggttgg

SEQ ID NO: 360175 - DNA, 404 bp, Cannabis indica
actgatgattgaatattaattacaaattttctaagaaagattttatttttgttctggaagtatttttttggaaagttgggaaaaggttaatcaatttaggctttgacataattcaatttggatttaattgaatttgttactattttttaaagtttgaaaatatcttggctagggttttcaaccacatgcgtgcggattcgagtgatgctcgatcgaagcagcatttgactgagaaacatcggtcaagtaggctgcattgcagcctgtttcctcggttgaagccccattccgcgcgtgggtatgtctaaaatctatttcttagtaggataaatatttgagataaatagaataccgagtttgagcgggattataacttttgaccatttttgttggaaattatttta

SEQ ID NO: 360176 - DNA, 1045 bp, Cannabis indica
aaatgatagaaggatcaattccgtatatcctcatgtgaccaggcaaagacgtcgaagtttgctctaagaaattttatcaattctgattttacttcaagcaacaaaccttttacgatctttagctttctggccgggatatctggatcgatctcgatctcttctaattcttctacaggtccaacattattgcttgggcccccaagttgaggatccacatcttcatccccgccttgggaagctccctacttggaaatgttttttcccttgtctctgctctggctggaggatacttccttcatagccatggccattgcaaggttataacattcccgagcagtctgttggtttcctctcagacaccctacaccattctttgttggaaacttcaggcacgagtggaatatcgatgtgacaacctttaagtcatacaatgctggacagcctagcattacgttaaaggatgaagggacatctaatcccaggaattgtgccatgatagtcatgctcgtcggagcttgcccaacagtgaggggtaaccgaatttgtcctagaggtgcgactccttggccggagaaaccatagaaaggcaggagacatagggttagatccttgagctggagtcccatctttacataggcagttttgaacaagatattggaagaggctccattatcaatcatttttttggccaccattttgttagctatctagacctccacaaccaacgggtcgttgtgtggaaacctgattttgacagcgtcttcatcgttgaaggtgatggtaggccctccttccggtgggattttaggcttcctttcttctacggccaggatcacttcttcttgctcgtgttgtgctattctggcatacctctcctgagctttgcccgaatctccagctatgtgcgggcctccaatgatgacttacagatttctgtttatcggtggacgtagcaagtgttggttattgtcattactctaattttgatcagttttgacatacttctgtaactgcgggttgttttccttataaggaattcaatttc

SEQ ID NO: 360177 - DNA, 497 bp, Cannabis indica
ggaggcaagcttttcggcctggcttcgcaaagcatctggtgttggttgcccatcctcacccaaacaagttcctccaagtcaacaaataaagacggctgacccccagtgatgtaagtcacaaactcaatctcattcggtcggggacataacatgaagtaaactttcaactgaaaaataaaacaaatatattaatataatatatggaaattaacatgaattaaacataaagcgtaagaaacttacatttctagcacataatctgatcacttcgtccttcccgagtgtcgtgttcggcttactctcctagttcaccattctcgaaaagtgatgcaacttcttcactgcatactcgtcgcgtagctccacgattgcctcgtatgtccaatattacaacgctccagtatagccgtaagatgagtattttgtctccttctgagtaactcccttttcaatctttttcagcatcttattttacacatccacgtagtctttattac

SEQ ID NO: 360178 - DNA, 365 bp, Cannabis indica
ggactattcggttcggttccttttctcttaccgagtctgtgacagacaggattgtaatttagaccatccccaatagaataagtaaattttgtgtttaggtcgtcgtttgctagcaaattttttaatcagttttttgtttttaaaattgaaaaagtaaaaatatttttcaataacatgttctacaaaacttttttactttacaattctttaattgagaatcaaaattttaaaaacaaaagaaaatcactttcaatatttttttaaacagtttttttttctctcaatcaatattttgaacttcgatcaaactcggacccaaatactcccacggccctagcgctgaacccgtcctctgaccataaccc

SEQ ID NO: 360179 - DNA, 544 bp, Cannabis indica
aattaaaaaggaaagctgcgaaatgccttaaaaaacgtgataagcttaatttgggtctaaattgagtccactttgatgagaagcacaaatctttgttctccttcagtgttgactgcggtcgcctcttgttttaaaactctattgaataagttgttgagttcttctttgaatctcttggctcgcgccgtcgtcaccaggccaactagaactttacttatatcttttgccttagtgttctcatcatatatatttttttcacaatggtatattaggttaggattagggtatatttttcatacaatccaaattttattattttattttctaaatgttatacagtagtacccaaaatatatataccataatgcaaaatgtatatgtcacatactaaaaattaatatttcatcaatttttttatctcagtacaaacaattgatatattataacttttctttctctaatttagcatgaaatatatgattcatactcatatatacacaataactagttttatacgttaatgttgttggaaatattttactag

SEQ ID NO: 360180 - DNA, 1356 bp, Cannabis indica
taatgatacatatatatatgcacactatgtaatagcaacacattataaattcaaataaaaattaaatctaattatattatattttttaaatttaaatttagacatgcataataaaaaaaaatatgaacctaattttatatacacttttaagtaaggagagttttcttttttattaatttttttggcttaagtttatgtttttttacagaaaaaattaaaaaaaaaaattagagtaacaagttatccccatagaataactagttaccttatatcatttttctcataaaatatattttttttactaaaaaaattctttataaaagagacataaaatgtgtaaaaaataattatataagtttattttaataaataataaaataaagaattaaatttagatattttaagaaaaataattaataaatttattcataaaataattaattatttgattgaataatgttagcgctttttttttttagattaggaggggggtttcgaacttgagacctcttctatatgaggagaataatgttagtttcaaccattaattttaacaaaaaaaaatttaaaataacaattttcgttagataatcatattttatacattgaaatttttacatgatagatcaaaaatttgaaaaaattacaaaaatatgttagcatggaacttttttaatttttaccgtatgacttttttttatttacaaaaatacgtacttttagtaaactattcaatattcttttttaattgttttgtagttgatttatagttgtcatgagtttgttctcccgttatttttaattttttttatagtttatttatagttgttgcgaagcgaggttgatttcttgttatcttttagttattttcttactttttgctgaaaaaattatatttttataattttgaaacttaaaatggtatttttataagtaaaaattttagaccgtaaaattgtaaataaaatatatatataaaaatagaagtttacaataatatatatatatatatattgcatctaatttgcaataataacgttactattattactgtcgcgttacgttgccaaaattgacgtttttgaccttttttgatgttttttcgtattttttttattttcctgcatttttaaaagtaactttttgattattaatagtgttgataagaaaccatttagttacctttatataaaattttttattttcatatcatataatttaagatacattttggtcactctcgaaaaacttatttgtatacaaatttatgattaattagttatttttaaattatattatgatagattataatttaaaatgatttaggtaaccttaaaaaatattttcgaaactaat

SEQ ID NO: 360181 - DNA, 535 bp, Cannabis indica
aaaatccatttctttcatgcgagcatacttgaagaacaacacaaccaacctagcacggtgtttctcaacatcaaatatggaatgaattggtttatatcaatgaattactcagcaaacgatgccacaaaacaaccacagtcactggaaaacaccataaaacaacatcagaaaaaaaaaaaggaaaataccaagaaaaaaaacaaaataacacttaataacaaaaactttagacaacttactttaaggttttttgaggtaaaccataaaccttaaccacatcgaaaaggtctaaagaaaccagtttgttatcctttttaaactcatcaaacaaagcaaatagcaccgaaaatggctgtcaagctttcatagcagcactatcttttacagcaatcgacaaagagttgtacatgtgcatacacctttcctcaacattcaaacgagcaagagtccaatgtgattcagactccatatggatgataaatgaaacatgatcgcacaaatgccaaggtgcaccacacaaaatctttttacctct

SEQ ID NO: 360182 - DNA, 846 bp, Cannabis indica
acattattcgcaaaactgatgagtgagatgctaaatcactttctgaggacttgaacttgaaactaaaagttttcctatcgataaataacatggcaataccctaaatatcgcaaaaatggaaaaaactagggttcccaaaactgccccaattggtagaccggtctttacaattatcccccgttaaaaggattttgtcctcgaaatctaacctgaacaactctggatactaagtcctcatgtctgactctaactcccaggtgccttcctccaccttactgtttctccagagtaccttaaccaaagctatggtcttgttccgaaggacattatctatactgtctaagatctgaactagttgttctttgtaagataagtctgattttagcccaagattttcataactcaacacataagcagggttcgaaacatacttttgtagcttggaaacatgaaatacattgcgcactgcaaaaagagctggaggcaaagctaaacggtatgccacttgtccaaccttttggagaatcttgaaagttcctataaacctagggcataatttgcctcttttcccaaaacatttgatcctattcatcggagacaccgtaggaacacatgatctcctacctgaaactctacatttctgcgttttggatctgtataactctttttcctactctgagaggcaagcattccggccttaatcatttctattgcttcattagtccattgcactgattccggacccaaatatttcatctctcctgtttcatccaagtgaatgggagatctacactttctgccatataacaattcatagggagccatccctattgtactttaataact

SEQ ID NO: 360183 - DNA, 686 bp, Cannabis indica
attcccatttccattcccatttctatattttcattcctcccaaccaaacgcctcctaaatatgtaagtttgtgcatactgctagtctagtctgacccatatttatttgtgttttttaaaaaacgggccatatcgtgtatcatgtcgtcccacaaaaaatatggaccgtgccgtgtcgtgtcgtgtcaacatttttaaagggtagaagcggcccgtaaggaggaaattacgttgtataactattttacttattttaatttttacttttatttttatattttttaagatatacccacttttattgatgatgttcctattagatcccttaaattaatgtaaattatatgttagatctaagtagaaagtgagagtatattagacaacttacttatcaaagtaggtatattttaataaaatgtaatatgaaggtatttttaattaatgatacaaaaaagaagtattcttcaacttatctcgcctgtaagctcgatatttttgtgtcgtgttcagatttgtactgtgttttgttcgtgctagcccgtaaacaggccaactcacttttcggacttaaattcgtactttactttttcaaatatatatatatatatatatactagacaaaaaactacgtgcgaggcacgtataaatttatgcttaggtttttctatgttatttgaaagtgagatt

SEQ ID NO: 360184 - DNA, 886 bp, Cannabis indica
ttttttttttaaaaaaattaagtagcatatagtttctgatattagaatattaagttttacaataaaataaataaatgtaatgcatctcaactcttcgtgatatttatgagttaatggaagtggtagtaacaggtataagaaaattgtaacattgggtattcttacctccaaaaataaagataaggtattgaagtgtataaaatctcaaacattaggtatttatgccgcaatttatccaataaaaatttaagactttccaccacaataatcataaacttttaaaattttgtaatataaaaattgtttcatattaataaatcttaaaaaaatttaaattattgtttagaaagaaaaaaaaagaagaaattcaaattattaaattaatttaaaagtttaaattaaaaataacaaaataaatcatgcattttcaaatgattaaactcatgtcattgtacttgatgtaagataactttaccacttagacaagtttgatgggagtgttattggttgcttgtcaggtttgggcttagggttaggatgaggtggaggagagagagttaaaattttagtgagttaatattagatcgtagctactgtctatctacggtgcccaacaatttttgtttttttaattaataaaaaaatgtattgattgattacttctttttatgtgggtcccccaataacaatttatgttgcttccgttgatgatggtcttacaccatgattatattgttggctgtattatttattgtagtattaaataacttgaatattttatacttttcttgctacaattattgttgagtggaaaataaaattaattaaaagttaatatataaattcaaaattaaaaaataaattaattaaaatttataaatattca

SEQ ID NO: 360185 - DNA, 1144 bp, Cannabis indica
aatagtagttgtttaattaaggttaaattcctctcctttgggctttgtgtgagagttagtgggccattagtagtgggtacaacatactgaacccaaccctgcctcacatgaacaactccaattgtgaaggcccatttgccttatttgaataactgcagtaggttaattacactagtataacctaataaaattgattagtaacataattaattttaaaatatatgaaattaatttttcatcgaattattttgaaattaatttaagaaaaacacacttagtttaatgaaacatattcaagataaactatatgtatttttctgtatttaattaaataaaagaagttataactaattagattcttctagatacttaattatttgaattttcatagaaaatatattttagttgaaattagtttttcaaactaattttggatcaacttaaattagaatattttgaaattaataattaagtagaattttctaggaaattagttattcacatattatttaaaaatatttttaagttgaaaatctgttaattttagatcaacttaaatagggatattttttcaaattaaggtgattagttcaagatacttaatttattatttaattaaattttggcaaattatttaagttgaaaattttattattttagaacaacttaaattcgatatttttcaggaatttattttattatattttaacataatttcaaaattttatatgtatttataaatagattttcgaaattattttttttggaaattaaattaaagttgaaaactaatttttttaattaattttggaccaacttaaattaagtaattttcattattaaaatttatagattaaaataaatgattagttaaaaatacattatttaaataatgagctttaatcaaaaagatattcaatctccattgttggtcttaaaatggttaattgcttcaatataacctcgagacgctagacttcgttcccctcatggatggttattcgttgaagcatttaacaccgtaagatctcgtatgataagtattttgtaagtttctgtttctattagactctcacctacgcagattacttagaaataaacttacagagtatgaaataatggtggaagctcataaaatgagaat

SEQ ID NO: 360186 - DNA, 711 bp, Cannabis indica
ataaataacacaaataattcatgaaaaatacaaaatcgaccaaaaatctaatctatctattttgtaacaatttataatccataaccaatcatagaatataaacttaaatttttctgagcaacctaagtattcttctaattaatttaacaaataaaccaaataattcataataaatcaaataattgctagaaaattatgaaactttaccaaacaccctaaaataatatgtagaatctaaatctacaaaaaaaaagggggaaaaaaacacatcagaactgcccagaacacggtcaccggcgttacgccggtgtagtcgtcttctccgacgacgacgagtatcaaactccttctacagcccgtttcgatgcatctttgcaattggaaaatgttcccaaggatcccagaacctcaaagacgccaaataccactgatatttcatctcaaaatggtcggtttaggattttcttctccaaacacggtacgccggcaaaaatggtgtccaaactgtaatttcgcgttctggactacttcgaaccgtttctctacgtccaatctagtccttagggtctcctaaactcaaacatgacattccaagaactcacaacacgaagaaaccttgtcaaatccaaaatcgttaaagacaacaaacttgaacggaataatagtggatttcgaaacctactatcttagcgtgtttggtcacgaccatta

SEQ ID NO: 360187 - DNA, 636 bp, Cannabis indica
gtcttgtcgtcagtggtgatcatcaagtcgtgtttgatcctattcccgaggctaacctcaccaaccggtcgaactgagtagtatactctgtcacgctcatattctcccgctgggtcaggtgggcgaactctttcctcttggcgcttctgaccgcctcgttataatacttggcgttgaagagttcctggaacctttcccaggtcatggtagtgacgtcatggatctgagacaccatgtcccaccagacaagagcatcttcctggaactggaaggtggcacacaccactctgtcattcctggtgacacccataaaattcagaattttggtgatcaccattagccactgttcggccttcatcacatctggacctcccagaaagaccggaggtgcttgcttccgaaacctttcatacaaaggttccattctgttagccgccacaactatttcggcctgagcagcaggggcaggtgccactggaactactggcacaggcactgcaggagccccctgctgcctcaatctctgaatctctaagtcttgctcttcaattctcgcttgcatttcagtaaacctaacttcccaattctgggctccctgatcggcttgggcagcctgggcagcctgtggcgggttct

SEQ ID NO: 360188 - DNA, 683 bp, Cannabis indica
tttgagtatctctaagttttttttattattctctgttttgtctaagtgtgggctgagtgcaaatattgttggtatatttgtcacatttctggtttctatattactctcattgcctgatgtcgttggtttgtttcgtttagtgtgccgtattatgtggtggcaaatattcaatttgggcgcgtacgttttccttggcaaaaatcaaatttttaaaaaaaatcatcattatttttgcctggtcagttgtgtcagggtgcctatacttaaggcctacggaaagtgatcagtctcactctttcactttcctctcagaaaccctaagctctgcaacattcaaatttctttctctctatcatggagaataccacacccattgcagtaccccctgttgctatgtttgttccatccatggcatcgactggtgatcctacagtggctcctacagtcgagactgcactgcctaatccctgtcgtgacattgtcctctaccagtcggaggttggtggttctgcacatccccccagtcctgagtcgactccgtctccaccctcacctccggtcagtcagaaacctcgtacgtttctaggtaaggctcctcctctctctaaaaaggttcgaccttcactgtcgtctccttccccacctgtgtccaaaacaagtcactcgttcttcatcgagtcacc

SEQ ID NO: 360189 - DNA, 470 bp, Cannabis indica
ggacaatgtttcagccttccttctttgcatttctctccacggcaaggagccaattgcaactcccgattgtaaggccacaagtttcatatcatctgtcactttatgccgcctatatcatacacaagataaaattctttaggctttctcctgcccgttgcttgatgttgatgatggagcccatctctatgtcataatcacaagcggcaataaactatttcctaaaggcagactgtaattccttctaggaattaatcaatccaggagcaacctcttccaacagtcttcagcagatttggtaagggtcagagagaagcacaaacacttggcatcctcactgactcttgccaccaggatcatcttattgtactcggctaaatgagttttaagatcagtttcccatcgaacaccttaatttggggcatcttgaaatttttcaggagcagagcttttgtgtgttgggttttatgccc

SEQ ID NO: 360190 - DNA, 748 bp, Cannabis indica
tgccgcacgttccacctacttggggtgccaaataggcggcccgtgacactcagcatagagagactaacatcctcatcagatcaccaaaaatgtacggaaaagccgctatagccttcgtcttcgttatccttctgataatctcttactccatttcaataggcaccgtcgacctcagatcatacttcacagatttgtgcaccacaaacaacaaatcgtcgtcgacaaccatctcgaaacgccgaacgtaactccaaagatctactgacgagattcaaacacctagatccaggatagattcaaacagttttcacatttaaagagagagaaataaaaaaaagataccgattgaaaagagagatcgtcggaggccatttggccctgtgatcgcacgggttcgcctgaggagagacgggttcgtctgaggagtaacgggttcgcgtgtgttgaggtcgcctgcctgaatcgcaccttgaaaaaatagagagggagagagtggctgaatcgcaaaaaatagaaagggagggagggactgtttgtttttttttttttgatgcagagggagggagcggctgttataggagtagattagggttttatattaagttaagagagagacaaagagatatatatagtattaattttaaattttaatatcaaatttttttaagaataatattagaattttttttatactctatatttaatataatataaaaaattaatatttacttattatttctttcaaaaa

SEQ ID NO: 360191 - DNA, 973 bp, Cannabis indica
taggcaactactaggtctaggtttagaattatttggcatcactttctttttgataactctgaggtatttgaagagttttcattgggtttcctaggttctaattaggggtttaaacgcatagaaacagtccttgaacgcccagaacgaaagtcaccattttcatgcacattcatccacgttcttgaacaatcttggattcaaacgtgttagagtcatttctgggttgaaataagattgtgtttaagcttaagagactcctagaagatgtttggacgtaaagaatgaaagctttaaggccctaaacaaaaatcaccattgttggactccatttttaacagtataccggcaatgaagaagaaaacaacttttgatcgtattctttggtgacttatggtcggcttgagattctaagcactgtaggaagcttcaccaatcaaaataatgcgtgaaaagcaactgtataaggagttggagcttgccgtcgccggagaagaggattacgccggcgtaactctagcgaccacgatctggacagatttaaggtgttttaaccatatttttttgtggattttgattctacatattattttagggtgtttggtaaagtttcataattttcttgcaattatttgatttattatgaattatttggtttatttgttaaattaattagtaaaaatacttagattactcaaaaaaatctaagtttattttatatgattagttatgagatataaactgctacaaaattgataaatttgaattttagtcaattttgaatttttcatgaattatttgtgttatttttaaacttaattattaaaaatacttaggtagctcaaaaaattcaaattaaattatctgtggcttattatagattataaacgatgttagaatggttagatttggttttttgatcatttttgtatttttcataattttttttagttaatacttaaaataattatgaaaa

SEQ ID NO: 360192 - DNA, 620 bp, Cannabis indica
ccttctgcctcttcttcctcctcgcctgattcgcgagctggggccatccagtcgtcatccatctcctcgacctcaacgtcaggggcatgccttgagagaataagataatcgcgggctgacaccgtagactcgctgtctcgaatatcaatggcccctggttcagcgagctcctgcaccattttctcgatgtccgcagaagacttcggacctaattctatacctacagtaggtgcgatctcctcttctgagatcgaagtcgggataaaattatcttccccctggtcctcatcaccatcgaatgcattgcctcccgagccgagcagctgactatccgacaggtcgctcatctgaaagatagaagatcttttcagcgtggtgaatgtgtgaaaaacaaaataagtgatctcacccgcatataaactataaaatcgcatttgatagaatggtccgcattctcgcgaatactgaccatcccatcaatatgcgagcagagtgaatactaaatatgcgaatagagaaacatcccaataaatggttaggagtgtcctggtaacctcagcgacatgcgtctttcggcatgaccctgaggtgacaaggagacactgttggaaatttatttt

SEQ ID NO: 360193 - DNA, 517 bp, Cannabis indica
atagattcaattccaatcgacctaatagaatcagatatccatttatgattggattggatcagatgtaaattttaaaaatccaataggatcgaattggttgttggataagacatctgatccaatagataaccgaatgaaccgatctaattaccatccaatggtcatcaatttatatttatatacttttgaaatatatttataattttatatatttaatatatttatttaaaaaatatattatttgattttattcttattatgcacctgcacacatgagattaaagataaaaactttagatctaaagtattaattctcatttcctaaacaataataaaattatcaatgcgtattgaatatgttttatttttgcccagttttattatgggatcatgaaaattatgttggactaaagtaatatttattatgtatattaaattattaggtttaaattatgtttgcacttttaatgggtattacccatgaacgggtaatataaaaaaattgagtttttatgct

SEQ ID NO: 360194 - DNA, 701 bp, Cannabis indica
attccaaaaccatacttattgtccctatcaaagagtgatgtatctacattgatcttgattgtgttttctgcgagtttagtccatgactcagcaccatcatcgatgtttcccagacatattgatgacaacgaaattttatcctgagctttattccagtgatcaagagctacttgtgcacaagtaagcacgtcattaacagaggagtgtttctttttccaaacaaccttgttcctagccttctagattgcccagctatacatggcaataagacaaatcatatcagcttcagcttgcttaaagatggtctccaaccaattgccgaaagaaccgccaggatcaaaaactactggagttgcacattgactccagcaatcaaatgcaaacgggcaagagatgaggacatgtctgatggtttcaggttgtagattacagacagggcaggtgactgaatatcgacatgcttaatcactagttagacacaagttggtaatgtacatgtaacggctctccataaaaagtttttgacttttgggggaaccttcaactgccatagttgccgccagaagtctgagtttgcaaccatctcttcggtacacttttgttgttgaagcatgttataagcacttttgactgagaactcgcccgttctttccccctcccaagacatgtatcaatggagacatttgagcttagtgggatgc

SEQ ID NO: 360195 - DNA, 953 bp, Cannabis indica
tgagtaagacgcgatctatgaaaaggataagattttctagcaattactcccaaccagatctgtgagagcacttgaattggaagaaacctgaccttcaccaacaacttggtccaaagctagaggatccaatccaattgcaaataaatgagctggaggacgaagttcaggagatatcaagtgggggaattcaggaaactatctggatacgactctgacgaggaacttgagccgtatcaccctgatattatgaataccccttttccttcgggattcaaaaacctgcatgtctcgtcttatgacagaaccacaaatccggtctcgtatttgaataaatttaacacaatcatgcgagcgagaaatgtgacaaacaatttatgctatattttgttccccacctcgcttgttggagcagtgagtagctggtttagcaagtttactcatcattcaataacttcctgggagcagccgtccagggatttcaagaagcaatgttaagctgctacggataggcgacccaaagcagcctcattaaccaatataaagcagcagcctaacgagacacttaaggcgtacgtaagtattttagcacggctgccgctagggttagaaatttgggtgacaacacactagttatagcccttcaggcaacaatctctactgatccattaactagacggggcaagttgtgggatgatttacaaggacgtccagtgagaggcatcactgagttcaacgaaagggctcaagtgtttgtccagaaggaagaagcctgaaaggaaataaacttgttgaaaataagctcgagaggcaaacccagcaatgtttcaacatgtactgcttccacgagaatagatagctcgagggcttttgggccgaagagaaaggacagaagtaaggaaccgtcgaaggacagaaagaaacaaaagaagcataaaaaatacgtgctagtgtat

SEQ ID NO: 360196 - DNA, 538 bp, Cannabis indica
atttactataatataatattattatgatttattgatttttattaaattttacattctttatttaccatattaccattatttaaataataaaagaataaaaaataataatttttctatattcgcaataaaatattaaataatcatttatataatcaattatttttttttccccatattttacatcttgtgcattggagctcaactataaatagtggactaaatatagcaaaaactcactttttgtgtcaaatttagcacaaattttaagggataggttgcaaaatgactctaaatttagaaactaagttagtaaaatgtctatttttaaaaaaaaaaaaaaattagcaaaatggccaaatataataaattagcttataaaaattataaaaatacatttactacatattaattattcttttaaaaaataaatatatataataagtaaattaagttatataattttttttaatatattgtaacaaaaacgaattaatatattaaattattaaatattgttgctccagaattcgcccaaaat

SEQ ID NO: 360197 - DNA, 680 bp, Cannabis indica
gatcctggtaaaataaatttcaacaaaggagtcatattattccgctacacccaatgtaaggtttctaatactttgtatgtgtttatttcataatcgttttagaagttcatatttagggtgtttatcagcatacttgtgagtagatctaagatcctgttaaaataatttcgagcagattcaagtggaaaattaaagctctttccaaggcgcatctaagtgtgtctcaaaccccaccgcaattctaaagtttcgggcatcaaaattggctcacgagctagtgaaggatttccaaggaaattttgtgcgaatatttctattatttattgtaatttaattggacttccttcactataataaaaggagagctcccctagctcaattttcacactttacttccccactacatggttagaacttctctctcttcacactttctctctctagaaattgtgaattgaagctagacttagtcatgttttcttgagttctcttgtaaggcaaatgactttttgtgataataaaagctctaagtagacgcaactgcattatcttcacgataaggggagtgaatgttgggttttatgccctaaataaaactccatttcaatgtaatctttatcttataaatatcaataaagaaacagatatatttttcatcactttgtgtgtcatttggttca

SEQ ID NO: 360198 - DNA, 569 bp, Cannabis indica
cctaattttagaggtcatgcgccttgtttttgctcctgctaacaagattagaaatcgaactaggccaattgtaaactcccaggcaagtgttcacatcttcaagcacttgtttggcgaagatgcagctgaaaaaatcatggccatgagtttctaactcagcatcacagaccagacacaatgtgttctgcaatgaaaccagtctactcagaaagtctctagtgagcagttgtgagttaacctaccagtaaataaatctgtgcttaggcaccaataagttattccaaatagcactagcatacttagctttagacccctctaacagcaggttataaaactttttggctctgaactttgtacctgtcacagcaagcctcaacttggcttcatctgtgttgtcacgaagattcagcaactattcttgaaataccagatggtatcacgattttttgggaagctccaaatgtcattgtcttccaaatagataaagtttatccactttacccacaaacaatcttgtttgttagataaagcccaaagaaatttcaccattagagccttgttccattttt

SEQ ID NO: 360199 - DNA, 725 bp, Cannabis indica
tcgcttgtgattcaggaatagtgagtcaaaagtgctgccggtccaaaaagatgagccaaaattaaaaccgcttatgattcgttgtgccaatagtaccgcgaccatccaagattagtgagcaaaaactagtcatcttcaaaaaatgttagaatcccacattattactaagtgtagaaatataacaccatatataaaatgcataaaatactccttttattgctaattaaattttaagatggatttaaccctatacatcttattttacaatttcttacacttagagaaaaaagaaaaaaaaggttttgtcttcggtttttgtcgcttgattatcgcttatatggaaactcaagaatactttttcattattcacgagtaactattttttgaaagtgtacgtattagagttagtcccacattgttaatgtgtgaaaataaattgtcttatataaaataaatgtgctactcctttcatggacaattagttttgaaatagaatcctatgcatcttattgcaaattcatttaaaaaaagataattacataaaaacacaatttttatatttttacgtttaattttttttatatattttcacggttttcgatataaacaacatgaaaaataataataaaattacataaaaataatataaaaataacatcaaaacaacaataaaaaataggctaattaggatttttgtccccctcgaactttgtacatgtaccaaa

SEQ ID NO: 360200 - DNA, 410 bp, Cannabis indica
aataaaaaaaaataaaaattattaaaatgaggcatctttagaaattttttggtataaataaaatttccctaaatagtattttggtttaatttatttttagaatgctaatgagaataagtagagtattttaaaatatttctactcaaaactattttggtaaaggaaggtataaaagaagggtgtaaagggagtggagtcgtgtggggcactcaacttttaataaattaattttttgtatagttttctttatatatttttttcaccacaaaataaaaattttcattattgcatcatatatttttatttttgtatttgtaaaattataatttatatttttagttcacatattttcatatttattctataaaaaatttatttttattctcgtatatttatttatgttcccaaaa

SEQ ID NO: 360201 - DNA, 646 bp, Cannabis indica
aaaataggatcattgttggcaagatttttattttttgccgttttcaatttgatcccgcaattcgatgctatcacaccatactaaaggtagcccttttctatggtagtgcatcctcttcataactcgtaattacaaagtttcagcttactcaaaatatggctttcacacgtcagtatgggtaactctattccagcaaagggcctgacaagaaacttaaacaagaatcgctcaactctgtataagtactttttgtaatcccaatcacaataaaaaaagtaacatgaatcttttaacttaccctcaaaagtatgagagtacaagatcctaaactaattctcatccaaaagcataaaaatattttgtcaaccaagaaaaaaacaaggatagatgcaagaaaagaactaaacaattttgtacaaattcgagaacaaaagaaattagacaatgcaaactcccaagaattttctaagggagtcaaagcgacttgagtctaggtccttggtgaaaatatcagccaattgttttttagtatcaacatattctaattggaatgtttggttttcaacaagttcactacgaaaatgatcccttatatcaatgtgttttgttcgagaatgttgaacagaatttttggaaatatttatgg

SEQ ID NO: 360202 - DNA, 1703 bp, Cannabis indica
aataataaggatttattcctctactaaactgtgcctcctaaacattttaggacattaaaaattctcttcaaattattgaaattgttgaattcaaggatttccgttcaattttactaacgggggcctggtgtagacaaatgtttggagggcacaatttgatagatgttacaatttaaggggtaattcggtaaatgttaaaatttaaggggtaatttgttagatatcaaagtttggggtacgatttgatacatagacaatcgccatgttaagcatctgttaataaaattaaataaatttggtaaaaatccttgaaactaataatataaattggttgttaaaaaaatttaatagcttctacatgggaaaaatattgctaattaatcttaaaaaaatgataaaatctaggagtactgaagaggtgagagcgtctctcatatggtatatatatatacgttctgaagaaccgactcaaaatgttttatgtatataatataataaaaaaatatatataatataataaataaataaacaaatatatataatataactaacctttttctccatcaccatcaacactctctctctttctttttctctttctctcttttcaagcttcaaagaagccagaaccaccatcaccaccaccctccgacaaaaaatctccgaccaccacccggaccaatcgaaagcccaagtgccggcaacctcacccccaagtggtgctgcttctttcgccgccgttagctcgggatcgcaagtcaaagtttgagggtttaaactttaaatggatttttcggttacctccggtgtccgtttgacgagccgtcttcaccactaaactcagctcgtcgatgagaacaacctacactaagctatcttgcccaactcgctacttttaccggtgacctttttgtagctttgcccctttctggcaactttttggcgacatcgtgtactattttgacaaacggttggcataggtgtgatctactcgtcgaggtggtcgttttgatatacactacccctattttcaacgatatttttggtacaccaatttttaccgtcaccgattgttaatgtgcaccgtttaggtgaggcttcggaacctcaaattttaaatatagtcatattatatgtcgttggactcgattttgaatgtagaatgcaatgatgataattatttagccatttaatggtataggtgagagtaatatctaagattggactaaacaattagagctcgggacttgagagctaagatcgtcttttggaccaaagcttaacgacttgggagaggtagggactcaacttgattattggacttgatttttatatgtattgcataaaattagacatattctaaatttttatgatttgcaaattgtttaaaaaattgaaaacatgtcttcatatttttatggattgttttggagcactaagtgccaaatatatatttttgtacaaatatttatgcaggttatgatttttgagtttatataaaatacatccattatactgccagattttctataaaataaaaatgaatatgttctttggttatgcttattatttgtgtgctttggttatactgatgagagtcatgttgatcatgttcagtgcatattgttgttttacgacctagtctctgtgtcatcataggtagatcaggcgtgcactcacctgtaggtgaaagacctagaatc

SEQ ID NO: 360203 - DNA, 815 bp, Cannabis indica
atcacacaagttgagatataaaaatgaaatttctcttatgtgtctatttggtgattgtgaacctctaagctactaagaagcagtaagaagaaaaaaaatggagagatgcgatggatgacgaaatcgattcaattaaaaaaaaatgacacatgggagccagctactcttccacaaggatacaagccaattggtgtaaattgggtgtacaaggaaaagaagaatgctaaagccgaggtggagagatataaagcaagattggtggcaaaaggctatagtcaaagggaaggcatcgactatgatgaggtatttgctccagttgctcgtcttgaaaccgttagattaataatttctttagcagcccaaaatagatggaagatccaccaaatggatgtaaagtctgcgttcttaaatggtttccttgaggaagaagtctacatcgagcaaccattgggctatgaagtaaaagggcatgaaggaaaagttttgaagttaaagaaggctttatatggcctaaaacaagcgccgagagcttggaacactcaaattgacaagcacttccaagacaagaatttcaccaagtgtccatatgagcatgcattctatatcaaaattaagaatgaagatattttgattgtatgcttgtatgtggatgacttgatcttccttggaagcaactcaagtatgcttgaggagttaaagaaagatatggcaaaggagttcgaggtgacatatattgggctcatgtcttattacctcggtattgaggtaaagcaagaagacgaaggcattttcatcactcaagaaggctatgctaa

SEQ ID NO: 360204 - DNA, 764 bp, Cannabis indica
caattggattggattggatgatgctcacccttatttagtggaatgtctaatttctttctaaaataaataaaaaaatatttcaatacaaaataatattccttaaatcaaacgccaaattatatttgttcaagatgaaaatacttttattagtttagagtcttgttaaaaaacctttagtatagagtcttgttcaaataactttgtttttgcaatgttcgaatagccatttccgttttaatttttcctgcaaatcttgcttttctcttctataagtattttttttttttgaattttttagaactttagaataatgtaacttgctaaaaataaagttcaaataatatattgcacatattataaatgaattatatactttgtagatgattcgctgcaaagtttataagtgtgtaaaataaactgtttgattctatactttatgtattgtaaattattctaaattattcaaaattttgtaaaatgtcttaaataattagaacaatcatatataaaaaattgagtttgcaactatttttttatgtattaccaatcactcacaatatagatggtatatataatttttttaaataaatttaaggataaatactattttaaactatatattttgcaaaagttaataattggatcttttattttgtcaaataaaaaattgaatattgtattttccaatgtgaattgatttttgtcaaaataaaacttaatagtaaatcaatttagacaaaagatgttatgacaaaactaattac

SEQ ID NO: 360205 - DNA, 862 bp, Cannabis indica
actgtcaaatagtatggtactatcgaccataataccagcctatactcggtacgctagtcatactctagccgtaccgatgtgatactgtcggatagtacgaagccaacatacatatctaatgtaatctaacaggcttcctaacatgcaagctaaacatgtaaatacatatgcatactgttatactaatcttacctcgactctgaattcaggtgtgccggtcaacctgagtggaataatctgctcgtggaattacaggaatttcggttctgggaaaattcctggaagccaaccggaatttcagttcttacagacctccctaaaccggaatttcggttcagtgcaggaatgggtcaaaatttcatatctcgaccaaaacaaccccaaaccacatgagactctctagacctgttctaaatatcctaaaggtcaatatcaaagcaataaaacacagcttcatgcacaattacaaaaatcaccattgatgagtcaagcttgacttcaaaacctcaaagcttgctcatcccaaaaactagctatcaaaacctgctcaattcaccttatataaccataatataacatcagaaaataaacccaaacacaaacaacaactacagcagctaaatcaacatttcaccgttaaaaccaaagtgttaagttcaaactccaaacttacttaaaaccatctaacaaccacaaaaacctgcttaaatcttcatattaaaatataattaaactttagaaatcaacaacaaacataaacaacagccacatccacataatcaacaagcatgcaaaaacacacattttcttaaacttcaagaaaacaaagaggaggttgttcaaagattacctcaacttgaat

SEQ ID NO: 360206 - DNA, 1150 bp, Cannabis indica
ttttttagaaaacttttgattagtaaatgaatgcactgtaagtagaaaatcactgcagcgtgcctagagattagggcatcacaattttggtatcagagccgtcatgttgtttaccgaagaccgtcaagatatgtacaatcatcgttagagacaagctcaactcatggttttgtaagcctttacttgtttagtaaattatgtgactagataagcatgatggaagcatgttagtaatatgttagtcatttaaatgcattgcctaaaatccatgaattcggtatttggattatatatgtctaacctacctaacttatgggttcgcaagccaagtcttatataatatggatgcccaacaaaacacgaggagttaatgtaatatggtcgaactcaaaggcaagaaatcaccccaaggccaagaagaacaaagccagccccaagtccaaggacaggaaggctaaaggcaagtgtttccaatgtggcgtattgggacactggaagaaaaaatgtaacaagtatctctcagagcttaagaaagataaatatgatttatttgttcttgaagttaacttagtggaagatgataaatccttatggattgttgattcttgagccactaatcatatttattcttctatgcaaatacttgaatagtcaagggaactagtcgatggggaggtgactatgcgcgtggggaatggagcacaagtgtctttcaaaggtgttgttaaagtccatttgaaattcaataataaatttttgttattgaataatatttattttattcctgaatgtatcaggaacataatttctttatctcttttacatgatcaatttttcaatattgattttattaatattgagattattatttttaagagcggtacgcctatttgttctgcaaaacatagtaacaaactttatgttctcaagccaagtgagcaattaattttaaataatgaattgtttagagtagcattgtcttaatcgaataagacgcaaaaagttttcgttgatgatgaaatatatctctggcatctacgtttaggtcatataagcctagacagataactagttaacaaaggatggtcctttgagagaactaaaaattggaacgcttttggtatgcaaatcttgtctagaaggcaagatg

SEQ ID NO: 360207 - DNA, 592 bp, Cannabis indica
aaatgtttaaaattccgtgaaaccatatttttgtaatttttttgttgtttttgtgtatttataaaatatccctttaaaaagagggaaaaaaaatccatttcccctcctaaaactaatatataataaagtaataatgtctatatacttttttttacaagaataatctatatatctatataaaagagaagtatgaggcggtgacgtggtggtctaaaatctctccaaagctatttttcttttttctcctttattctctcaattttttaatattttattaaagcataaatttacaaattaatattttactattattttaataaattttctataaaaatatttatcttaaattaattattttttaaacaacccataataataaatataaattaaattaataatattaaattaaataattattcaattatatgtattcataactatatatgtgtgaagtttttttttttactttgcagaatataggaaaagtgtttttcttttataaaaaaaaattattatgaattgaacaaaaaaaaaaagtgtgagattatgtagaagaagaaacaggtgtgagattatgaatcaaattttttca

SEQ ID NO: 360208 - DNA, 463 bp, Cannabis indica
tttttatagattttgagaatttgaaatttgatgttgtttctattgattattggaattgagaatttgatttttcatacgaaaattaaagtttgcattttcatttcattgatctaaaaatattagtagaaagtttatggaataaaatttttgaatatatgaaaatagagttgaaaaacaatattatttaaatcgagaatcaaagtttattagttaatctccttaacaaagtaaagtttattgttaatatttaaagataatatggctagaagaagatggaaaaattaattttatttcatttaatatgtatataatttttttttttttctaaaagaattattagtttggtcaatactatatttacacgtgacactttattaacaactaacagaacgatttcttcttctacataatctcacatctatttttttttttgtttcaactcataatgtttgattcataataa

SEQ ID NO: 360209 - DNA, 568 bp, Cannabis indica
ctctgagctggcggttgaccatgagggtgtggtggtttgaatcgaagcaccgtggacatggtgatactgcgttgtggcgctgctttcgtgtcataggagtactgcggtactccatgtgcctcacacaaggtggtaataatatctgcaagcccaagtccacctccacaagcaccctctaccatcatatcaaaagtcactctaactatgtcccccacattcaggttataacccttcatgatggcataaacaaatctaagcctgtcgatctgagcatcaaaataatgtttgtttgggaccaaccttgcactaaaaaagtatagccatgccttgttcgggttgaattcacaccgaaacagctgatacggttctccatcatattcatgaaacctaaggcctggataacctagggtttcagctatgtcctcataattcaagcttttgctcgaatttgctactttagttgttgttcttttggggtgaaggtcggtaagtcatagacagcatggatggcggctgtggaaactagtactctaaccccctaactttgaccttatcatcctctctttct

SEQ ID NO: 360210 - DNA, 774 bp, Cannabis indica
gtcacaaaaaacttataccgtcggttataaaatgaagcataggtgtagataaggaaaaattgtatattttcatgcaattttccctacctacattttcagatttcaaaatcattttatataacattaaaactatatatatgatcgatcaataactataaaattaactataactaaatacataatacaaaaatgttaaaataataattagaaaacttatataaaatttttataacttgtaatcaattatatgatcaataatgagtaaactaactattaactaattatataatactaaaattgttaatagaaacaatcatagaacttatattccatgtatcataaaaactaactataaactaattacataatgtaaaaaagttaataacaataatcataaaacttatatccatatttgtaccataacaaaaagtggtaaccttgtactcaatcaataaccaaagacttcacaatttcagcctactcatctcactgtattgatctctttgtttacatgattcaaaatcaattaatcatttcaaaaaggtaccatgtacctttatattgtatactcatcagctaaatgagagacttagtaaaattttccaattctctttctcgtacgacaatgcacaatatacaaaattcaacttgttcatatataatacaaatttcaacaaacattgtatattaattatacaaacaaaaactttagtcacatccctagtagctaccaaagtttaactagttgtaataaacggttaaatcttgaaattt

SEQ ID NO: 360211 - DNA, 660 bp, Cannabis indica
aaagcacacatgtggcatccttaagaatcaaggtgttacacaagtatgttgagagaaagtatcatctactaagaaatatagtagagagatgtgatgtgagagtcttgaagattgcgttggaacataacctcgcagatgcattcacgaagacaatactagcaaaatatttatgggtcatataacttatatgggattaagggagatgcccaatttacttttaggacaattgggagattgttaggatttatgccctgaaaaccatataaaaacatttttgattataaataagagttgaatattttcatatatacttgtttgttaattaatatttaatatttaataatttatatataaatatcgaaaaaattccttattcatatatgaggctgtaacttgtagttgtatggagaattaagatcacttagctatgaataaaacagtcaacagcatattaaagtttaagaatctttaattaacagttgctagtaggttcactgatatccattttggagcaagtaatctcgatttggattactgatgtagaatgacatctaagtgaatgtactgtatataataaaaactatatatgataaggaccagtatgaataaagctatctttatcaaacttaccgtttactttaaagacctaattcatatcat

SEQ ID NO: 360212 - DNA, 632 bp, Cannabis indica
tcatctgattaggtgatgcaattatatgatatatgggtgcaagtcttcgccacgggctcaccctattaggtgatgcagttatgcgatatatgagtgtcaggctatggcacgggcttgactgattaggcaatgcaatagaggattattatactaaagtatcgacttgcttgattaggcaatgtgatgtaatgaagatggttactttatgaggtaacatatatataatttataatattaaatgaatatgatttgtattattggtacaatggttttgtattaccagatatctgtatattgatgcttattcatagcagatgccagtactgatttagattttatattatgaacaatgtgtgatggtttgattttgattgtgtataaatgataatatctgaataataaactatatgattattattattgcttttcttgctgagtcattgtgactcacgagtgctatgtggtgcacgtaaggggaaggaaaagttagagctatcatgaggtgactaccttctccaacaacctacatattgacctcatcgacctgcataccgagttgctacgatttgttttgagctggttgtatctgctgtgtattttgattttgtgtttaaatggttgttgtatatatt

SEQ ID NO: 360213 - DNA, 885 bp, Cannabis indica
aaagataagtttcaataaaatagaaaaattgaaattcactaggctcatataaaggttcagccaaggtggtttagtcaagctaattttttatctttttttttattcaattttaattcaaaacctaaccctaaaagctaccttataaatagaatatgttggctcttatttttagatgatgataaccataaccctaaccctaattatgactctctttgtcagacaaaatagaaaataagctgagccaccatcatattcaaattcctctctttttcttcttgaaaatttagaaccctacagtcattgagtaattacccacacaattcaaggaaatattcaagatagtgtggaagattgtatagatttttgtcacctgaaggagaatccaggttcagatcttgatcatactctgcaatagaaaagatcaagggttagagtaaacaaaatgagtcatattatttcactgccatattatttcgcttccatcaatgtaaagttttctacaacttttatgtgttttttttcattattttaaggaattcatatttaggatgttatattataaaattataatcaacatacatgttagtaaatctaaatcttggtaaaataatttccaacacaaatcctccccttcctgaagacggtcaagttttgcctgaaagaccatatggcaggaatgaccaattcctaatgcagggcaacaattcaagaagggagactcgaagtgactttgttccaccactgaacagtaatttcaggtaggtggatccaccaaactcaagaaagtggtacgatcaacctctcatttgttaaggtttatgccctgaaaattctgtaaagatatttttgattattaaataaagagtaaacatttgatatatgtgt

SEQ ID NO: 360214 - DNA, 621 bp, Cannabis indica
tatttttattttgagggggtacgatttgatgattgtcaaagtttagaaggcaaagttgctaattgataaaaatacataattatttaaacggaataatgagacggaacttaagagaagaattaaatttttataaaagtaaaagtttagggaaatttttaacaagccgtatattttaagagccaaaattaatattgtcaaaagttcaaaagacaaaattactaattataaaaaaaaattattttattcttttatttgatggcatcttacataagaataaatgtgagataaataaatagaaatgaaatattaaacatttcgaatgattattttttttttaattttttcctcaaaaacttaatggcattttatattagaataaatgtgagataaataaataaaaataaagtattaaacattccgaatgattattttttttcccaaatacttaatatgttcaattaacaaacataatattagtgagaaaaaaaatttcataaacatatttaaatacaacaaataaactccatagcaaatattgaatattagttagtcgtttagtattttgtgacaatatcaaatttgttataaatattaataattatgtggatgtccaaatctttt

SEQ ID NO: 360215 - DNA, 507 bp, Cannabis indica
aataaaaaaatgaaaaaaaaataaaggaataatagatagatatatttggagtgattttttagttaatatctatattaaaatatattcattagagagattttaccggccatgtcacattttatattaattaatatttatgaaactaataaaacattaaagaaaagagagaattaaagaaaaaacaaataatactcattagaaagtgccatatatatcaccgcctcatacttctcttttatatatatagatatgtaaaatgcaaaaatataactatgtatcttaaaaaaaagagtaaacacgagacaccttggtacttggtagctatatgagactaataacttaacaacacaagtcatatgaaatgaataaaagaattgcaatgtaattttgttattcttttcttgacacaccaaagcgacttgtatgcataaaggaaaagaaacatactttttttatcactgatccactttttcattcttatttagagtgcgaatacctatcatcaaa

SEQ ID NO: 360216 - DNA, 472 bp, Cannabis indica
tattcaaatgagttttatttagggcataaaacccaacattataaacatgcatgcgaaacatgtaatcatatatggaaaacatggaaataccccaaatatcgtaaaaatcagaaaagctagggtgtctaaactgccccaactggtagagcggttcctaactcgaagaccaattctgtggggtctttcaacggatgaacaagaattccagttccgacaggtccatactcaatcggtcaactagtttagtacaagactcccaaaaaccttctaaacaactcaatttgacaccaaatcatcctaaactttccagagtacctaataaggccacaataaacataatccaagcacaagaactgaataaaaaactcctaaaaaaatcaccatgagagagaaaaatttgagctcttaaaacagctcacaatcacaacaaaacatcctccaaatacaaaatcaaacatctctaaaacctaca

SEQ ID NO: 360217 - DNA, 677 bp, Cannabis indica
tccactgtgctgacgacacaataaataagaatataaatgtgataaggatttggatgaatttataaatcaaatagacatataaatgataacatgaaccaaatgacacacaaataaatgatgaaaatacttgtgtttctttattgatatttaaaagatagagattacattgaaatagagttttatttagggcataaaacacaacaataggctcatcatgcacagtcttaactttggatcctctaaccccatctttttcaatgtgtctttgtagagaatattgcctgaacttccattatctaccaacactcttttcacccttttattggcgagctggactgttatcacgaggggatcaacatgtggatatcacacatgttttgtatcttcttcggagaagataattggtggttcattcaacttctctttctttaatggttcaggagcgaatgccgattgttcactttttacttcatttatatatcttttttgggcactgttactgtttctcgcgagatgaggccctccagaaattaccaagatatcatcgccttcaaaaggaggaggttgcaatctcaaattgttcgggttattagggtttttaggctggttatgcgcatttccttaatatctcacatactgcctaaagtatccttgcgagatcaaactttctatctcat

SEQ ID NO: 360218 - DNA, 666 bp, Cannabis indica
aaaacaaagctttatttaaaaaagaattgtacaaataatagaagattataatttatattttgtcttgctatttatggtataagttttatactttaaacttatataaaattaattataaattaataaaattatatatttttttggtcaattattgaaaggaccgcgaaacgcgcggttacgttacctagttatgtatattattgcagagcacccttggattcgaaatgcataacagtaccaaatgatactacttcagtcttccgtacttttctttttggtctatccatggcatcgataacaaagagttcaattcaagatgatgaagacgaaaatatactcatgtcttaattaataatcatttactgttatgtatatttatattttatcaccctttgttttatttgtattaatattgattatttcacaacattctatttcgtttgcagcatttatttcaacttcaactttttatttattcatacatgtatgtgtgtttttctacttaattaattaatttctgtacaattacaacaaacaaatgttttcagttctcttgttcaaaatataaataaataaattttcaacctagctagctatataagtaccaataacccaactaattactactcttccttcattcttcaaagaatataaaacatcatatta

SEQ ID NO: 360219 - DNA, 588 bp, Cannabis indica
taaaacatcatattattagaacttaaaaaagcacgcattaaatttggtttctgaatgttagctaacataattttcacttaatttagttagttaattgttttcttttcagttctgttttctgttttcgtatatagctttgtttagctcttgcattgtccacttgtattgtattgtgcttataaataaagggtctctcaattatgagagataatcgtttcttcacaagttttctctcttcttcttcttcttcttcttcttcttactttctctgattttaccatcttcctaagcttgctctagttaagattctaattggtattagtctcctccaatagaatcctcgagcaatacctccacttcttcaaatcatgctaatcctggtaaaagtggagctacatcacttaatctctaatgttatccatgaaaagcaccgattattcagtttaacagaactataaaaattagtaaaatgccaagtaggaccagtgccaaaaataatatagcagtcaaacatgtttgaattaaaatttagaagtgctacattaacatcatctttctaataaaaataaaccccctcctagacctacc

SEQ ID NO: 360220 - DNA, 846 bp, Cannabis indica
aataatccaaacaccatgtgaactccctagacttagaatattgaccaacttaccatagccagaggcagttgactcatgtaagatgcaacttccacaagatcagatagtgcaaactccaatggagttgcgaagatgagcaaaggtgtgagcatccagagccttggtgaataaatcagcaagttgagcacctgtagacacatgagtaatagtcaacaatttagattcaaccatatgtcgaatgaaatgataacgtatgtctatatgttttgtacgtgagtgctgaactgggtttttggaaatgttaatggcacttgtactatcacaatataggaccaatgagttctgtggaaacccataatcagtaaccattttattaagccagatcagttgagtacaacagcttccagctgcgatatactcagcttctgcagtggagagggaaatggaattttgttttttgcttaaccatgacacaaggttatttcccaagtaaaaacaccctcccgacgtacttttcctatcatctaagctcccagcccaatcggagtcactgtatccaacaatggacatgttggtatctctggagtaccacaagccaaactctgaagttccagataggtatttaaagatacgcttaacagcagacagatgagactgtttgggattagcttgatatcgagcacacaagcctacactaaagcaaatatcaggtctactggctgtcaagtaaagaagactacctatcatccctctatatagggtgggatcaacagactcaccagactcgtctctgctaagtttggtagtagtacttaaaggggtaggggcatgtttagtgtgatctaa

SEQ ID NO: 360221 - DNA, 500 bp, Cannabis indica
agttataaattaactgttcacatcaaataaatagtacataaggagtcaagagataattagaaggataaaacaataattttgactaactctaattattaactaataattggagggcaaactacttatattgattatatcaatagactacaagtaagaattttgtaaatataattctatattgtcaaagagtgtaattccatatttatagtggagtaataatagaattaataaacagattattctattgatgagatcgaaaataatcaagtgtttattaaagcttcaaaatataggtgcatggtccctaagtcacctttatacaacactgtacacggggagattttatttgatgagtaaatttgagtgtgaattaattcctatgagaaataaattcttaaggggaaagtagtaatttatagaaattattattttaaataattacgacaattatgaactgtgtaattaaatagtatttaactagttaagtataatattattca

SEQ ID NO: 360222 - DNA, 547 bp, Cannabis indica
gttaggggtgtttatcaaaccgcgcatactgcacatattgctcgtgctgtaccatattgcataaaaaatgcgatttgaaattttttgcggtacagttgtggtttgtatttttgtcaaaccgcacggtgcgatgcggtttgcaattctgaatttaataattacggttcaaactgcaacgcactatatattacaaagttatcaatttttacaatatgatttttattcatttttcataaaagaacatatatatgtaatatatgtatatattacattattttttagcgataatttaatataatgatttggttattagtatatatgttatgatgtaaaattttaataagttttttttttggtattgttaaaattttattagattgatttttagatttttattataatgtttaatactaatgatagcgtaaatcattcaaaccgcaccacatcatatatattgtatttttgcgattttaagatctcgcggtgtggttgaggtttgagaaattaaaaaaaatatatatgcggtttgatttaaaaaaaaaaaaaa

SEQ ID NO: 360223 - DNA, 776 bp, Cannabis indica
aaaaacaaaatcattgagatcagataatacatattttctttacaatgaaaataaaaattaaattaatgaaaaacaagagtacgtatgtatatatatttatatatatatatgctttggaaaacaaaatacacagacagagtatatgcttgtcctttcaaaaagaatgagtatatagtatgtgtatatatatatatatatggttgttttcactgattattatctttattattattatggcagatatctatcttgtgcagagggcaattcccctcaatttttattttcttttcttttattttttattgttattattaaatttgtctttacaaagaaatgataatttttcatttaatacttgttgtttataaatttatttaaaatagggaaaaaatgtataatgttaaagtatatttgatattatttttttaatttaaattaatagtatgaaattggcaaacatgcaagaaaacgctattaaaaattacaaataataataaacgatattctctcaaatatatatgggttactatctattaaaatttttaaataaatattattaaagaaaaattataaatggataataatattaactatctgtagctgtagcttacctcctcctcctccttcttcttcttcttcttattattattattattattattcgcagcttatcttattattgattcctatcacataggatcttggcactaaacaattatatatggctttatcaacatacataatagtccactctgtaagttttgcagtaacaattt

SEQ ID NO: 360224 - DNA, 846 bp, Cannabis indica
ttttatagtttttagaaattcattaaagattagaaatcatatttttgtcataacttttcattcaggtgtctgttttggaaattctatataccgtttcgaagcttccgacaagctctatgatatgatgtatgttaaatataagttttattttagtgtatttaaaccgcaaggtttgatagaaaatcctaaattatcttacgcgagtgttaagtagtattttgggataaacacttattaatttattattgttatgacatagggctcaggattaccaattgttctccaagaaggtcaaccaacatacctgaaccgaaacttgaggtaataaaagtataatgtaccccatggcatgatagattctgaaattatcgattgtttgattaggcaatggtaatataatgatactatggacataatatatgagctcacctgattaggtgatgcgatatacctggcgacgtaccaggcataggtacgggcgtaagtgacatatgatgagtaccgattgtaggtacgggctcacctgattaggtgatgtaatattcttggagacgtatcggtcgtaggtacaggcgttagtgatatgaaattgcctggttatggcatagattaaaaccattgttagttttcttcctgacaatatcaggcgtaggtacgggcatcagtgacatatgacaagtaccgggcataggcacgggctcgtctgattagacgatgcgatatattagtgccaagttgtggcaagggctcacctgattaggtggtacaatgatattatatatgatattgcattatgatacgggcttacctgattagacaatgcaaatattgttggaattattttac

SEQ ID NO: 360225 - DNA, 515 bp, Cannabis indica
ttactgtgtttttttataagtttcatactgcagtatactgtattaagttttcactagtgttctactggtattttttagttgttctactgttgttttaggttgttctgtttagtgttttactagtgttttataaaaatacagtatttttgaaaacttttccgtatgacaatatttttataaaagttaacccaaagagaaatttgattttttatccttacattaagggaaatttttttccttaagcctaaaataccttatattagtaaaataggacaatatttatttaattcccacattactccctcatttaaatctgactcaacacttgactatgaacccagcccccccccccccaatcggacccaacccatcggacacagcccccccatcggacccagctccatcggacccagcacagcccccatcggacccaacccagccctcatcggacccagcccagcccatcggacccatcgggtcttcgtcttccccaaccattcacgcctgaatcggac

SEQ ID NO: 360226 - DNA, 508 bp, Cannabis indica
ttaaagaaaaaaattagtttaaaaaatattgaaagtgtatttttttttgtttttaaaattttgattctcaattaaaaaattgaaaagcaaaaacagttttatagaacaagtttttaaaaatattttcacttttctaattttaaaaacaaaaactgaattaaaaagtattacaccttaattaattaacccaacataaaaaaaaaaaaaaatcagattcgttgtgtgattcatattttgaaacgtggccgcatgcttatgaggacacgtggatatgtgattcaattggaagtttgatttgataagagcataaaacgaaggctttacgcaattaattaaggatgaaattataaaggaattctttttatttattttaaaaaattaagggtgtgtttggaagtaactgtgtaattactagataggctaattactagagatggaaattggtcggttaatgtacggggaatgcaatccccgcccccatccccgttacctatttatacccccatcc

SEQ ID NO: 360227 - DNA, 529 bp, Cannabis indica
ttttgtaaaatgccctattaaaaatgctaaatagtttaattagtaattgattactaattaccagttttattaataccggccatatgtcctttatgccatttacagcatgtaaatttgagcattttgagaacattctcttcggttctaaaaactcccatcacctccaaatcacttattttctatttgtagccaattaagagatgtaattaataaccatggggtgtgaatgtttgaattttaaaatggttttaaacacactacaagaaatgtcacttttgccagcacattttggtgctggcaaaagttggtattgcactggtaaaatagaatttacttatgatgtgttggcaaaagggggttggcaaatcaatgtggtattagaacttttgccagcataccagcgcatagatttgctggtaaaagttagattttagccactgcaaatgtacgctggtaaaactttgatctctttgccagcgcagtttgcaaaatgcgctggtaaaagtaacttttaccagcgcagtagcga

SEQ ID NO: 360228 - DNA, 661 bp, Cannabis indica
aaaaatgatatctaaaagttttctaaaaatttgatatttttaagatcacatatcatttaactaagagaacaaaattttaatttttgaaatcgaatgaataagtagaaagttatgcgtgttttagagccgataaaatgggactttgcccctactctgttttcggtctaccgtttttcacaaaaacaatagaccgcttaaaaaatggcagatcctttttcccaagattcctttttgaaaagtgtgctaacgggtataaatggctagtttttgttcattcactataaaaattcatttttcactcaaaaatttaggttggttgagcctttattccatatatcaaacatattcaagtgattttaagagcttctaagtttaaaattcaataaaacacttttcacacacttatttggcccaaaaatttgtatttatttctcctaagtgtgtttgataatcactctaggttcttcattgtatcatcatacatctagagtgagtttgcttgtaattctaagcatatttccaaattgtgattgaggtgaggtgctgcgaaaattatgaacaatacgcaagtgcacataatcaagtagtaaactcacgcaggtgaggtcgaaccacagggaattgaactgaataccaataaattagacttatgattctattt

SEQ ID NO: 360229 - DNA, 511 bp, Cannabis indica
cccttagcgtttcaattattttttccttttcctccggctctagactttttcctagccggaggaccttggtggggtcgaggtcacataccgatacttcctcgacgtcctccataggttctacaattttttcagatcccacacggggatcaactcatcttctttcgccattcctggctcaataacttcgcgaaccattaatatgggtaggtgggcagcaacattgtaacactgcctggcctctccctggttttacctcatggtccctatcccagcctcctaagtagggaaccttagacacagtccgccactacaaacgtgcagtatctaaaagtgctttggggtgtgtctgggcacaaggtgactagcaacctcacttttcccattgggataagtgttgtcccattgaatcccgtgagctgggaaccactcggtgagagattttggtccgtgaggcctattgccgtgaaggcttccttaaataataaattcacagaactcccattgtcaatta

SEQ ID NO: 360230 - DNA, 708 bp, Cannabis indica
aagtattttcactcaaaaaaaaaaatattattagttttatgtatatatttaaaaaattccctaaggtatttatttttatttgggcccctaaaatgagtaggtcctaggcgcgggcctagcccgtctatgcttagggctgaccttgcttatgaattgtgtatgaatttatattagacctcaatttattttctgttattaattattgtagtttcaattttgaatcttcattgttggtctaacttgacttgttatttttaatggaacaaatctcgaaacattgtcatccgttaaacaacataacagtgttagatatcgacatataaatttttgtaaatgcgacatctagctgtctcatccaaagaggaaactaagactagtgtttacaatatgaaacaatgaagaagtttataaaataagagtaactttgactcttacctaaaagggacattgttggtatcttattttaatcaaaattattctttatttttcctcttagctttttcattagaaactgcttagatagcacatgattggataacaaaaattataaatcatctgtttttgatgtcactctatttttttttctataagtataagtggcacagatgactagattctaaacatttctatcctgtaaaatgatataaaatttctcgatcttaaagtaatctcctactgtatatgtcttctaataggtgtacttaaaaa

SEQ ID NO: 360231 - DNA, 548 bp, Cannabis indica
aaaaaaaaataaaaatatatcataccaattatcttataaatttaattgaattataaatttttaagagttggaaaaaatgtagggagaatagaaggtacatttaattagacttaattagaaagattcagtacaaaaaacaaaataaaaaggagaacaatgtaagcctttttcaaataaaaaaaatgttagcaacgatagaaaatgggaaatacgtgagtattttgtagactaattgaatgatgtcaaaaaattttctggtggatgatcttgtctcacagtattctcacaaaaggaaaaacttgcacacatataccctgacatcaattcaacgtgcccactatgctctacagcatcggaaaactctctacacttgttatggcattgtgttttcgccaggggcatctggtttggatgcaattggcaaatgagaacatcaactgtaaattttacgttttgggacgagtggttgaaatggttctccatccctcaacatagacaaggtatacaacaattagactctttcttgggtggggcagccatcatatttg

SEQ ID NO: 360232 - DNA, 949 bp, Cannabis indica
tttctgatactcttatgtgtttaactttctatcgttttagaagttcatatttaggttgttaaatcaacatacttgtgagtagatctaagttcctggtaaaataacttccaacatacggatcaacacacgtaatagtaatcatatttgaaatggaataacttgttaaaagtgaaattgacagagtatatttataactcggttgactgaatggtcttaggcgagataagatataaaaactgttaatgtgtgcattaacgagaaaccatgcaacttcaagtgtacaaggcgaggcatcaaccttgctacgcattagaagatgaggattatatcaaccttgtgaagacgtgggaaaagctccagctcgctaccagggtggtttttgccatgttcctagcgagacgacctagatgatacgatctacagcatatgaaatatacatttaccttgacctagtaaaagcgggctaatcacagctatgtgattttcatatattaaccacattcatattacgtgggatgtaatcgaatcccctatttttaggggataagtgttgttaagattacagtcaactctgtaattaactgcctactatgttattataaatagaggcaagttatactgaaaaggggactaaaaaataatcataagaagaaaggccctgaaaaaccaacaaaaatctaataagattgactcgtggactatgcagaattttaagtgccaaaaccacctaaaaaacctttgtgttcattttcttttctttactgtttttattaatctgtgcaactttatcatttaggctcgaatttggttaacaaaaatctgtgttagcaagatctaattatctgattttattcatagtctaattatcaatagatcaaataaaaaatttgtaacaggtaaattttgtaatttctttcatctgtgataaacctagtaacatgatagggcc

SEQ ID NO: 360233 - DNA, 653 bp, Cannabis indica
attaagcaaattaactcacacaaaaaattaattttagagctaaaaaaaataaaaaatttaagttcaacgctcaaactaaagtgacacattgtcctcaatgtgacatttaaaactaaagggaagggaacttacctgagcgccatgtcagtatggcggtggtggtggtggtaggtagcatccacatcttgcatccatgagagcccttgtgtcaaacaaagaaaattgccccgcaacgttgcaattattaaagttgttcttaaattgagagtcaccttcataattcccacacaacagtcttttcatacgtcgtcgaacaattcaaaatcattctttagacttccctttagtcttattggtaatgacttctcgaccatcttttacaacttccagtcgacaacaagtaggaatttcagttgtggcaaatactttgaaagtttcttcttctttttgaacacgcagcttcaacttccccttttgtacatcaattaatgctcttcccgttgctaggaatggtctccccaaaatgataggaatattctcatcttcctccatgtcaagtattaagaaatcagcagggaagatgaacttaccaacctttaccaaaacatcttcaattataccccgaggatgagtcaaagaacgatctgccatct

SEQ ID NO: 360234 - DNA, 762 bp, Cannabis indica
tttaatttgggtttatccaatattttagacctagtatttttttgatcggatcagatccatccaatattttaggtccagtatgtattggattggactagatctatccaatccaagaaaaaaagaataaaattttaatgttaattttcatatatacatatagatttgacgtattttcatctatacatatagacttgacgtataacaatataaaatctaattacttatctaaactaaatgaaaatacaatttagttcgattggatgttggatgtattggatttttagacaccccatccaccatccgatccgatccaattggatattcaaaaataacatccaatctgatccgatcacaattagatattcaatgtttggcggtcaattgtaattagatcggtcggttctcattagattggatcgatttatgcacacccctatatgctagtatcaaattcaaatgttttgcaccttgtttggaatattaattctatatttatgtagacaatttttaaaggatttaaaaataaataaatgttgaccacacaaaatttttattatcagtaatgttataatacttttatgagtaataatacataaaatattacatttagtcacagtatattttggttaaccatattttgttgaaaggagattttttttctaaggaacaattaagacaatttatttggggataagttaagaatttttttttttttttattctattatcaaaaacactcttatattatatttattaaaaagta

SEQ ID NO: 360235 - DNA, 542 bp, Cannabis indica
agtaataacaaattgaagaagatattaaatatttattatgatagtattaagaaagatcaatcaatcaagtttgctgtcaataattttaatatgattataaaaataaatatttagaaacttatatggtgataatatattggggttgaatataattttatctctagcaattggttagtagttttccatattatttattaaattaaattatgtggacctgatattaaaatgtactaaaaacagtatacttgtgtgtaacttagctattttttttttctatgagatgcttgcccgattcaccctctctcgtcccatcatcctcttctattttcttagagagtaagtgatgctttccttcaattttgcattgccagcctgtagttaattgaattcaataagaaaaaaagatttaaagcattgaggccatgtaaaaagaagcctattagatcgaacaagacttaggctcaaaaataataaaaaagacagcttaaaagcccataaaaaattagatagtaaagataaaattgcagagaaagtccaagccc

SEQ ID NO: 360236 - DNA, 610 bp, Cannabis indica
atgatattttgataactggttctgattcaactcaagtttctgctcttgttactgaattaaacaggtgttttgctctcaaagatctcggcacactcaactattttcttggtataaaagctgtaccaactgctactggtatgattctttctcaaaagaaatatttgcaggaacttctctgtaaagccgagatgcaaggagcaaaaacacatcgcactcccatgaacaatggcttaaaactttccaactatggaagtgaaccagttgctgatgcctctctgtatagatcaattgttggtgccttgcaatatgccacaatcactcgacctgacatagcctttagtgtcaacaaagtatgtcaatttatgcacaatccattgcagtcacattggattgctgtaaaacgcatattgagatacttagctagcacattagactttggtctgcagctcacaagagtgtctgattttcatcttcaagcttattgtgatgctgattgggcatctgatccggatgataggcgatctactactggtttttgtgtctttttaggataaaatctcatctcctggcagtctaaaaagcagcccacaatctccaaatcctcaactga

SEQ ID NO: 360237 - DNA, 628 bp, Cannabis indica
atataatatatagatattaaataaaaaaaagaaaaaaaaattcttgaaattgtttcggtcaaataagtacatatataaatatatatatatttagtgtatcgtgaccttaaaacaactcaagaactttgacaaaatatttaccttgtagcttggacagagactggtgctgataacgtgctataaaataatatgaaatagataagaagaaaataagaagaagaagaaagaaagagaaattgaatcagaatttttcagttatttattcaaatgggtgaactcctatttatacaaaagtattgattgaagaaatagaaaattaaattaataggtaataaaggaaaatacaatcaattattaatggtgataattaatatggtgatttgtacatttataaataatatttaacaaaaaaactactttttaaaagggaaatttgaatttccatgcttaaataacccataaattattcccttaaactaatactatacataattaattatatatgatactttttgtatttttcccataataccctccccacctacatctacccactccaatctttttctcatcaattcaacaaacaaaatccccacccgaaagctgccacaaccaccaaatttttttt

SEQ ID NO: 360238 - DNA, 564 bp, Cannabis indica
agagagagagagagagaaacgtgaaagagtgagtgagtgataatacatatatatagattaataaagatttaaatttaacattacatattttagtttttttttaaaatgtatgtatttaagatattttattagttgattaattatatatttttcttaattaattaattcaacaatattaatttataaacggaataaaaaattaaaaagtgggataattaaggatatattaaatattaggagtagttatatagtaccatgtcacaatagcctttttataacttctgttagactataatatagtatatgaaataagcatatacaaacgatatgaaatgcggaaaataaactgtaatcatatcgataatatatgcaatgaaaggatcgatatacctccagccattgatctttgagcttcaatccctacgatagcttcggtattagagttcgggcttcctcgctctctcaactctctttagatggaatttgctgaatgaattcagaatgagtgagaagctcggggaccgagaccctatatttataggtgagatactccatcagtatctg

SEQ ID NO: 360239 - DNA, 674 bp, Cannabis indica
aaaaaaaaaaaaaagaagctattacatactttaaaatatgcttagatataaagtgataattatatattttgtcaaaaaaaaaaaatggtaattacaataatttttattgttcttgttgaggagtgctaccaccatcactctcatattttagttttgtatctaaaaatacatgtcaaataatttttttatagcaatatttgttatggctataatatcaaaatttttaaaattttcttgttaaaaataaaaaaaaattattaataatttataaatattgacaacaaaattttttatattggccctgaaatttagtgggccatgagaaaaaaaatatatttttgagcccttaattaaaaaaaatgtggtatttttcaaaatgagtaaaatatatataattttaaaaggggaaaatattttttgaacccctggacaaagtgagccctagacacagaccccgcctatgcctagggtcgggcttggacgtatgcatatgtaaggttgggtggcgctgattttctataaattcaatatatacatataatgataataatatataacaaaaattagttgcatatatgggccagtttagcagtggggaaaagcatatgtagttgtgatgtcggaaaaaacagttgtagcagtgctgtaggaaaaagctgagttgagtgtttggt

SEQ ID NO: 360240 - DNA, 494 bp, Cannabis indica
acatgcaaaatgacaagtaagaacagatgtgagagtgtagcaattatcaacatatctgaacccttgtaaaatgcattgtttattactgttaagaacaaagtaatgatcattgttaaaattgacggtatacccttgatcacaaatctgactaatgctaagtaaataagcttttagtccctcaataagcataatatttttcaaccttggtaacccttcaaaattgagagttcccataacaatgacattttctgtgggcccttacgcccacagaatgatggctcttatacatgactgcatcactctagttgtttcctggactgacgactggtcccacggaccaatccaagtgtttctaacatgctttgctctgactcgcacgcttcatggggaaatttcttaaatgaaaccaccccaagtcaaggacactcaaccatggagtttcgtcatggtgagctaccaaaacaagatgcttcttgctaacataggtagtccca

SEQ ID NO: 360241 - DNA, 290 bp, Cannabis indica
attaatcaaaatcaattagctgagtcttacaagtactattgtctcaacaagtatggggatcatgggcctatatatccgagcttgcaataagccgaccctgaacttaccacgtaatttcactgacttattaattccttgttgcatccacgcatagaacttggaagtgcactctgagttatatagatttctctatatgttcaacgatatagatacactatcaattatccattgatataatcccaaaaatcaattatcctctatagatgatttacattgtatagggattaaat

SEQ ID NO: 360242 - DNA, 558 bp, Cannabis indica
gttgagagaggaagagagaggctgagatgggatttgaaatgtgaggggtagttttgggaaatcaataaagtagtcatatatgaccaattttaataactatgcatttaggggaaaaattatagggtattttaatatggaaattcaaatttcccttatattattagagttagtggcatattgttaatgtgtaaaaatataccatataactactccttccattactaattaattttgagatgaaactctatgcaccttatcccaaatataaacatatatgtttatgcttggatatagtaattatatttaattaataaaagtgatattgttttggatgttttgtagtttatatggagttaatgtatgaataatttgcatattgcaacaaggttatgtttggttgtttttatgttttattgtagttgttttttatttgttgtacaattattttttgatttatgtacatatgttatagtgtatatttttagtttatttttgacaattttttttttttgttgcaagtgtatttaatttatgtgcatttgttttttgttttttttt

SEQ ID NO: 360243 - DNA, 583 bp, Cannabis indica
taaaataatttccaacatcaccaccatccctaccacacacaggagtaggaatagtgggggttccaccaacactcggagtcacttggggctcttgaaggaatttcacagcacccttgactctcaaagcttttttaaccatttcaatatatgtggttgcttcattggtggagatcactagatcatgcctgatcttcacatttaaaccggccaaatacttttctttcttcctaaagtcagtcggcacgattcccacagcgagcttggccaaatgatcaaacttggtagtatactcagtaaccgacatcccctcgatttgcaccatctcagtgaactcttttcgcttagcactgcggacggcttcattgtaatatttagagttaaacaactccttaaattcttcccaggtcataattgtgacgtcccgagtgagggttatcaactcccaccacacgaggacgtcctcccgtaactgaaaagtggcgcaggtcacccgatcattaccaaccactcccataaaatttagaattcgttcaatcactgtgagccactactcagccttcatcacatcgggacctcccagaaa

SEQ ID NO: 360244 - DNA, 232 bp, Cannabis indica
aggtcattctgtttatgtggaggtggctgccttccatgttggcacctattatggttccaactctgattattgttacgaggagggttgttgcggttataattggaattcgagttgcggtactgattcttaaaattttttccattaggcttcaaaactgctggtgtggatttcttagtgttgttgttcgaaacaacaagcacttcatctttctggtcttgttttcttgcttcct

SEQ ID NO: 360245 - DNA, 578 bp, Cannabis indica
tgctcattcaattaactagctataaaaatcttatcaaaacactctgtaaaaacataatttagcttcagcaaacataaatcaacaacaacaacaagaacagccactaaacttgcaaaaacatgcatgattcactatctttaaaattaagaaaccaaaagagagttgctagagccttaccttgagttaaaaccacaaagaatttgcttgaaatccctagatgaagtagcaaaatccatcctagctgggttctaagggaaaaacgagagagagagagagagatagatatatatatcttttcaattttcttattttttagaaaaatggataaaatgggataaaatgatggtttaattaaatcacttcagccaaaataaacattaaaaatctgatttctcattaacataaaattcactaaaagacaaaacatacaaatgagtaaaaagaccactttgcccttcccacagtaaaaggcataaaagggtacttaggggtattttgggaaactctaaaatcccgcctattccccgacattccactactagaaaaataggttttagtgatacacattgagtgactct

SEQ ID NO: 360246 - DNA, 1086 bp, Cannabis indica
ttgagcggggttatggaatttgaccattttacccctaatcttgaaaataccctagttttaagctaaagggcattttagtcatttgttaaaggggagagttaggtggctgcctaattatatgacacctatcaatgttaatttcagccaaggtttaatttagttaaaccattgcttcatttttgaaagaattaatgaaaataagaggaataaaccaaaaaattaagaaagctctctcttcccttcctctctcttcgaaccagcccagaaccaaggaagttgttgctgatttttagtgtttacagcaaggattcaaaggaaatcaagccaaggtaaaccctagatactttctatctatgttttctcaagattttaattggtttcaagtagtgattttgcaagttagtggctattagggttaggttgtttgatagttcgaattctagggttcatttgagttggtttcagcttctagcagctggttttgatgtatggaattatttttgctcaaatttgagctttgaactcaaagctttggtctttaatggcataaatttatttagtgtgtttttctgtgaattattggttggaatatattgtgtataccctaatttggtactctggaaggtttggttgtatttggtggagttttgagcaagaaatggagtttttgcgtgacctggtgtaaaccgggtagccggttttaccagtacctgtaaaaccggttagccgatttttgcagggtttctcgaatgttccattttctcaattctcatgcattccagtgccgtagttggatgtttctctatttcttgagttagtgtaatccatagaatgtataacataacctagagtggtgggttcgggtttcatggattagggttttcgatcatgtgatttacctggtttcattatgcgattaggacatccattttgcacaagactttccgttcaggtcggccagcacacttgaatctgtaaagaaggcaagaactgtatataatgtgtgatatggatgtgcgaatgtatgtatatgtttagtgtatatgcatgcttatatgttgtaattcatacactgccaacacttgt

SEQ ID NO: 360247 - DNA, 767 bp, Cannabis indica
gtgtgtgtgacgtgttgataggttttaaaagtaaaagtggtaggttttgaaatttaaataaagatagaaaagatatttttattattatcatcattagttaaatatctaataaatgtttgttccactttttgaggatttaggtgtagtcgaatctagggtctgttgagtgatatgaattggcgtaggatatatgtatatatatatatggattcataggataaagagaggagtagtgtgtcaatttaattatatcaataatcttgactaaatgtatgttttggtgattttcgtaaaaacgagaggggaaccatgaagtcttggtaattatctaaataagtttatgatcacacattctactggggttattaataaggttcgactacgtaatattcaagagacgactaagggaaatactctgctatctatactctttcaccctaagttttcaaggatcaaagtagcaatcatactcttttctttcgagatttattaagagactagtgacgggataacaagccttaattagcagcgggatttgaggtaaggaaattaggtagtttttcatattgaactgcataatttaaattatttgtgtattaaaatattatttgtgatgtattatattattatgagtgtgtatatggtactgagaatgtgtggtatggacacaatatgagtttgtgaatcaatgtacattatggtgtgtattcttgtatattatggttgtcatgatttgtatgtatggtatgttgtgtgctaacgtctca

SEQ ID NO: 360248 - DNA, 553 bp, Cannabis indica
tagaaaaataggttttagtgatacacattgagtgactctcaactcatttagtgacacttcaccacgcgtcactaatgagggcgactggaaagactaatttttagtgacacttcacgcgtgtcactaaacccttatacagtcactcactgcgcgtcactataggctatttaaagtactaaattttgtcagactagaaaaagtaatagctacacacaaaaagtgtcactatattctttttttcttttattttattcttcattactattttagaggtatagtgacacagaaaaagtgccacatactatttttttatttttcatttaattttataattttctttttacaaataaattgcaatttatgagattgagcttcatctactttatcttaaacaacaattaccaattatatttatatgtttatatgtgtaaatgttttattattggtacaaattctataattttttaaactcttcatagagttattattacataaacactagaaagtatttctatgtttatgaataattgttaattataaaacaattattaag

SEQ ID NO: 360249 - DNA, 910 bp, Cannabis indica
gtgacgtctcgggaaatcggggcgttacaaaacaattttgtaaatcataaaaattggaatatgtctaatgttatacaacgcatataaaaatcaagtccaataatcaagttgagtccctacctctcccgagtcgttaatttttttttccaaaagacgatcgtaagctcttaagtcccgagctccacttatttagtccaaacttacatattactctcacctaccaccaaatggttaaataattatcattatcacattctacattcaaaaccgagtccaacgacatataatatgactatatttaaaatttggggttccgaagcctcacctaagcggtgcacattaacaatcggtggcggtaaaaattggtgtaccggaaatgtcgccgaaaataggagtagtatatatcaaaacgaccacctcgacgagtagatcacacccatgccaaccgtttgtcaaaacggtacacgatgtcaccggaaagtcgccggaaaggggcggagctacaaaaatgtcaccggaaaaagtagtgaaccgggaaaaatggtttagtgtaggttgttctcctcgacgagctgagtttagtggtgaagacgattcgtcaaacggacgccggaggtgaccggaaaatccgttcaaagtttgaaatcccaaactttgacttgcgatcccgagtcaacggcggcgagaggagcggcgccgcttggggggtgaggtcgccggcacttggctttcgatttgtccggcgcgttgggtcgggcggtggccggaggtgggtcgccggagtgtggtggttatggaggtttatgggttttatttttgtattttaaagagagagaaagagagaaagatagatagagagagggggacgaaggggttcagtatatattcaaaataattttttcttttttac

SEQ ID NO: 360250 - DNA, 866 bp, Cannabis indica
catggtcatcactttttctcactcattaattctagttgatcattcttattattaattgagcattgctattagacactagtggtgcttagtacctttgcgacatgtcgcgttgcaattagatagcgatactccctaaaagctattatattaaattatatatgaaatccgatacttagttagaccaatagcgttattaacacataaaagggtgctaaacactactggtaccctttagcatttctcttattaattagtatacgatttaatgcgtagaaagaagtacaattcattaatcaccaacatagttttttctttgtcgtttacagggttctcatcctctgtgtgttgtctgcaataaccacttggtgtttgactatgaagaagacttggtgtattgtcctgcatgtcgtgcccgcatgtacaaataatcctcatcaagataaattaaattacgcttttaatttgtacatttaaattgcacactgtaatcttaatcatgcatgcacttaaatatgatgtgtttcgatagattaataataaatttaaaagtatgttttaatatagcaatgttcaattaaactataatttatgatgtcgtttgttaatacttttttaattagtttttaatttttaaaattaaaaaagtgaaaacaattttttttatcaatgttttaaactttgactcagacccaaactcggccctagccctagtgctgaacctagcactcgatccggacccgaccccggacccagactcgacttaaataaaatcaaaaaataaaataaaaataaatttcacagaatacacttttatttactgtttttaaaattaaaaaacaaaatggttatagaacgcatttttgttt

SEQ ID NO: 360251 - DNA, 593 bp, Cannabis indica
atgattaaaagggaccgggccctcattcaaaggatgggcccggagaccgtaaaaactgtccttaaacttatctccctttttagggatggaaacgagttcataaaaatatagaatttctgccggactgggagagccccagctccggacagaataaaaaatgaataagcctgaaagctggcggtaagcttgaggaatgagttggtatagcgcaaggccgacaaatacaaggaaattaataaagtaatcttgaaggggaagcatggccccggccatcaaatgcgtctgggtccaggctccgaagcccccgtagttatggttgggcgtctccgcgtcccggggcggccggtggtaagtcccggaggtcgcaggcttgatacctgccaccaccacaatgtgttccagctgatgagggcagatcagggtggaatgaagctcagcagcttcccacccgttggcacgagacctgtgcccttcttgggccaccggacccttcatgacctcctccagggtggctagacacatagctcctttatttgaagatttaaagccggatgcagacattttagttctaaaaaagattgaaaaaatccagc

SEQ ID NO: 360252 - DNA, 1015 bp, Cannabis indica
ttttttgtctctattccattttggatagaattagagatacgtcttctgtatatttggatgcacttaataagcggtaaagaattcagtatccctagatgagtgatacatatagaaaaataatgttgcataatgttttatgaacacagaaggaagtaatggtggagaacgcagttgcttaccataggcttatagttcctgtaatttgggtttaattaaatacactacacttgatctcgaatcaagacaatagattaattgtaatgtacttcttgttttatgttagtacaagtgggagtttgttggaattttatgcgctaaataaaacctatttcaatataatctgatttgttatcaatagaagattagaaatcattatatgtctacatgtagttttcatgtttatggtttattatacaatttttgttaaaaccagaacatatagttattcacaattacagagatgttaacatagtggaaggtaattgtgattatatgcttcaaaagataatgtcccatgatttatcagtgcactcaatttacattgatgtgacagtcagcgataaagcttacttacaccttgaacaagtgttatattctttctagaacattggcaaagtatgttagtattggatgtatggagtatacatctgtctgggaccgatattgatcttgaaagatattataatcttgcagttgtatctttctatgtcaatatcactggttgatcttagatcaaaagatcttaatcctgacatggttaggttcgatctcaagagtgttatttgtgttcttagaattgttagctaaagcctaccatttggtttgggtcacacatatagcttaggaacatgatagtataatttagtgggagcgctaatcataaatatggaatctatagcttctatgtggacatagaagtgaaacgatgatttccttcgagcttagcttaatagagataaatagaagagctcttattttagtaattatattagtttactgaaatatcatttataag

SEQ ID NO: 360253 - DNA, 577 bp, Cannabis indica
gagaactctatcaatggtaggtaattactttaagagcctttgaaatccataacacaggctcgtaacatatcttctagtatttgaattgtcctttcggattgtccatcagtctaaggatggaaagttttacagaatttcagtttagtacccttagtctgttacaaactctgccaaaattttgaagtaaacttcggatctctatccgaaactatggactttggcacaccatgcagtctcactatctctttaacgtacaaatctgcatactgatccactggaaaggttgttttaacaggtagaaaatgagcagagttcgtgaatcgatctaccacgacccaaattgaatcaaacaaacccgtggttctgggtaacccaaccacgaagtctattgtgatatcttcccacttccactcaggtagtgataaaggctgtaacaaccctgttggtctttgatgttcaactttgatctgctgacaagttaggcatcgcgatacgaattctaccacattcctcttcattccgctccactagaagtaggatttaagatcttgatacatcttggtggtgccgggatgta

SEQ ID NO: 360254 - DNA, 748 bp, Cannabis indica
ctagagagagaagcaccttatgggtagttttctaaaagtgaaaaatgagctaagggagctctcctcttataaaaggaggcccacaaaaatagggaaacaatatgaattagaaaattttgaccgtagatgatgatctaacaatgaaaattagcttatgctggtaatgaccattttttagagcccggcgggacccgctccaggtaacctacaattatttttgtaaatcccttagggtgaaatttgacaatgatagatttagaattggggttggattgtgagccataacttgatagagcattgaattaactttgaagctcaagttgaattgtgtcaatcagattaatatttagtgacttatagctgttttactgaaggcagttcatgaccaagggccgaagttgacatccagtgccgaagttgacatcccaatgcctggttgacatatgacgtgaacctggacgttggttaagtgtaaaaacatcatagggatgtactttaagatgctttagtgatattttgacatcacttaacatgtttttgtgttctggcaaagttggtcaccagttctcggagatgttgtcgttatgcagaaataagagactcgaaactcttcatttctgaaagagtttcccatgttggaaatgagaaatgtgaagttgtgaattcgacttcttcgatttcatggatattagttattgtaaaaaattagacggatggtcaaaacaaaatcagaatttgataagtagaa

SEQ ID NO: 360255 - DNA, 579 bp, Cannabis indica
atcctacacagtacccccgagacttacctgttatgacgcaagtactcggggaacgatctcggcatcttagaggctttggccatctccccagactgaagggagttggggccaaaagagcacctgccacgcatccttcagcccaaccgactgttacaatggaacagtacgaggctttacagaaaaaagtggaggaagcggagcagacaactcaacatacgaggcagcagtatgagacacaacaactctacctcagacgattccaagatcagtttgagtatctttctcgagctgtgccgggtttcaacttgcctcccatggatcttccaccattgcccactcctggtgctggatcgtcggctgctgctggtgctggatcgtcatcgcagcctcccgagactcagagaaacaacgatgacgacattacccgcctatagaactgtactttttttattatccggttcgaacatttaacattttgtttatatactgattttagtagtaatataattaatgttggtttatcttttaatgtaaattatgttggtttattttgttaatataatattataattatttaaa

SEQ ID NO: 360256 - DNA, 1021 bp, Cannabis indica
aaaccgctcaaaccgctcaagcctccctcatcgcatcgcaaaaaaatgcagtttgaaattcttcgcggtacggttgcagtttgaatttttcccaaaccgcgctgtacgatgcggtttgcggttttgaattattaaatcgcgatacaaaccgcaccgcaccacatgttttaaaatttcaatttttatatttatttaattaagtccatacatctgagcccaacccaagcccataaatcttagggcaagatcaataactcttcacaaaccctctcttcttaacaacaaacccaagtccatccatgtgtattgaaatttagagttggaagtttgtgtttgttttatttttaataaagtatgttagttgtacatttatattgtttttggaatttaattagtttcaagtttattattttgatttaggtgtgttgttgaaactttaaaaagattattgacttattattgttgttataacttttattagtctcaagtttgttgtattttcttaagttttttggaataattatattaatgatagtttaattatcaaaaaaaaaatgtgatagctcaaactgcagaaaccgcaccgcatcattttttgtggtgcggttttttagtatcgcggtgcgggtgcggtttgaaaaattggaaaaactgcatgtgtggattgatttaaaaaactggttaaaaaccgcaccacccgcaccgcgaacacccctagtacaatggtaaatatggatcaaacccataagcactatgatcaatttattattcaaaaattagaactgacatagattctatttttcatcaaaattaataaaacatttgacattacatttaattgaaaattatcactctacttagaaatctaaactattaggtgagaagtaattataagatgataatagaataatgcaaaattttaattagttgtacacctaataagaattcacaatatttatagcataaatagaaaaataaaaacaatttaatatgagagaaatcaagaacaatatttattatc

SEQ ID NO: 360257 - DNA, 771 bp, Cannabis indica
ctcttccacatcttcttcatggcctgcgtcttcaactacattttcatttctctctgcagcttcttgatctggttccatctccacctcaaactgagatttctcttcattctcctttgctgcagcactcccagcttttgctgcagcatcaccattttgtgaactgatcaaatctttgtacatagttttcacatcaaacaccacatctctgctaataaaatttttttgatgattgccatcttcaatgctccaaactttgtaccttttcacccttctgggtacccaaggaagatgcatttcctatctctgggttcaagtttgccttgtttaatgtgagcatatgccaaacaaccaaagatccttagatgatcataacttggagagccccccatccagacttccagtggagtttcgaactcaatggctgatatgaaggactactattaattagatagcatgctgttacagcagtttctgcccaaaatttcttaggcagacatacatatataaccatacatctaaccatttcaaggattgttctattcattctcttagcaagtccattttgctgagggtttcttggaacagttagatgcctcccaatgccattttctttgcaaaactgattgaattgttcttttcagaactccaatccattgtctgtcctcaccttcttaattttcctctcagtttaagtttcaagcataactttcagctctttaaacttgttaagtgattcatatttatttctcaagataaaaagccatacatgtc

SEQ ID NO: 360258 - DNA, 685 bp, Cannabis indica
accaagagaccgtaagtttacgttctcacttggggggcacccataccatacaatgcatcgaactagcacgaagaacttatgcagagatttgaacacttagtataagctattaaacctgcctctatgtcaagtgcaagcaaactttaggttggcataaagaaaagtatatctggatacttatatgtcaaggcaagaagaagatagcccggattaaagatcacctggtcggtcacatatccataataaaatactttagggctaaacaatggttatgttcaaaaatagagtgcctataggacaaaagtaagaacaaaaatccctgaaggtgaaaaataagtagtgttcaaaagtaaaaggccagtaatacatacagaacatgaaactaatatgtctatgaaaataaaatcataaattcaaaataaagataaaatagttctaattgtgtgcaggagcgggtggagttgagttagaagttgcaagctgactggccctttggtcagcagcttggtcgaccacttcctatgtaggtgtgccagccataacctcatcaaagaggcctgatgaaaactcctcaggctggacaatggttaggttagtttgcatcctgctctcatacaattctctccccttggccagtttctttcagtaaagaagctcccatgtaggagaggtcaacattggggtt

SEQ ID NO: 360259 - DNA, 799 bp, Cannabis indica
caagcagtaagtgagtgtaaagtgtccttaaaacttacatgaagtttgaagactgggggttggtgttgatcgccggtaaagggaagactggcaacggtgaaggaaaagaagcaattaatctatggcgtctgaaatttttcctctctgtagaagctctgagaaaatttgatgaaatagtgaaagtaaccaaatgaaatgagaaggctggcttttataggccagaacgggtgtgagacagttgtgatcgaccatcatcgtacggtcagaatagcaatcgattcgcattctactgatctgacggttgggacaagcattcatcaaggaggtaggaaacgtttgagtactcgactgacacccatttaatgcgccgtatcattaaatggataggaaacgaatcgtcgcctgtaaaaagtgaataacttcagtaatgatggtcataaatgtatcaacacgcacccagggcacgtgccaggaagttaataagacaaccggaggcacctaagcaagcctcgtttactttctaccaaactaggcttgggggtaaatgttgccctttattttgtctaaaatacgtggaccaacctgactgtgacacgtggattgaagaagcaagactttgagataattcgactaagtctccttaatcaaaacgatcagcatttaacatgcctcctagagaaggcatgaaggtttcacatactcccggagagcaaggctataacgaagcatctccgggaggtatcacatcctatctgaacagtcaccttgcatttaatgccacatgggagaaggcgtattg

SEQ ID NO: 360260 - DNA, 632 bp, Cannabis indica
aaaatataaaaaactttgtacaaaaagtctatactgtcgtataaaaaaaaacacatacacagtaaaaaagataaaaatgccgcatgacagtataaatataataaattggaaaaagttagtaatctatgtaaattttcctattgtaatatgtttaggttaactaataataataataataaaatgctaaaatatcattaaatcaacaaatatctaacttttgaattttaaaagtaataagccctgtacctcgtaactttaggcttagttttgacctaactttcgaattatgacatgactatttctacaaaatatctagatttttgaattatctttctaacgccactgtaatcacctaaatccgagctctagaactctagatatgatttttagtaaatcagtttttaatcctacgaatttatccaaacctacgaattttttaacattaattctataataatgttatttgatatcacttatacaattaattaaacccacgaaatatattataaaacctgatggaccttcatattgggctttaattaaacgattacctactttgtaaaaataccataatattttactttcgtagttaatacaactttaactctctagaaaattggtacaactactct

SEQ ID NO: 360261 - DNA, 549 bp, Cannabis indica
caaatcacccatttacaccccattaagaaatggtaaggtgtagtttatttgaatttcaaaatatgttatcttaaaacactataaatagaggtctttaattcacttgtgaaaaaataattttgtgagtttctatcaaagagagtaccttgctagaagctataagcttgataattcaagaaacctatttccatttctttcttccttaagtgcttgtggtagggagaaataagcttttagacaaaggtgtaaaaccttgttcaagttttgtgattctcctacttgacacttggtattagtggtgttgagattgttctcacatctataaatatatactctatttatattgtgtttttataatcttctcttcaacttcttttctatatttatgtgtatattttatctagaattataacattattttatcaatattactgttattgtattttttttattttgtagtgttgtatttttgacatttggtctttctattgaagcacctataaatttttcaacaatcaaaaagcttacaatttcctactttgcttcaat

SEQ ID NO: 360262 - DNA, 866 bp, Cannabis indica
ggattgaattttgtcatttataaagtgtataagtgatgtaaaataaagtgggaatggtttgtaatggtttgtagaattgtttgcaaaagctgacaaatttggtaactagtaactagttattgtttttttcagctttaattgttgaacgttttttactatagagatgccttttaacaactctcatagcctccaaatcacccatttaatcacatttacatcccattaaaaaatggtaaggtgtaggttatttgaatttcaaaatatgttatcttaaaacactataaatagaggtctttggttcacttgtgaaaaaacaattttgtgagtttctacaaagagagtacattgctagaaactataagcttgataatttcaaaaagctatttccatttctttcttccctaagtgtttgtggtagggagaaatgagcttttggacaaaggtgtaaaatcttgttcaagttttgtgattcccctacttggcacttggtgttagtgatgttgagattctcacatctataaatatataatctatatatattattgtgtttttataatcttctcctcatcttcttttctatatatgtgtatattttgtctagagttataatattattttatcaatattattgttctttgtatttttttatttttgagtttgtattttgacattggtctgtctattgaagcacctataaaatttccaacaatcaaaagtttatcctttcctggtaagaaatcaacttgtgataatacaagggtaagaattatgatattttgtgatttactattttttatatagtaaaatatatatgctgagatacagattttttatgttattctatgtgagatatacataatatatac

SEQ ID NO: 360263 - DNA, 558 bp, Cannabis indica
aagcctgaagcatccggaagactcctcaagtgggcgatggagctaagtcaattcaacttgcactacgtcccccggatttctataaaaggccaagccttggcagacttcattactgaatgcaacgaagccgaggcaacagcaaatacgccggtaccaccaatccccacctggagggtatttgtagatggagcttctaatgagaacggttcaggagccggagtggctatgatatcaccaactggactgtgactccaggcgactccaggcagccctccgatttgacttcacagcttcaaacaacgaggccgaatatgaagccctgatagcagggctgaaattggcaaaagctgtaggagccaaaagagtggaagtctacagtgactcccaactggtcgtaaaccaggtatccggagaataccaaacccgcggcgagcggatggccgcgtacgtaacaatagtccgagaactgctccacgagttcacggactacaaaatagaaagaatcccccgagaaaagaacgctcatgcggactgtctggctaagttagcctcggacag

SEQ ID NO: 360264 - DNA, 672 bp, Cannabis indica
aaaaactcggatataatatcaatgtatatttaggaccattgattgacgatttaatagaatttatagtgagaatgatattcaggcctatgatgatatgatcttaaaaaagaattttttaatctgaaagtagtgttattatggactgatagcgatattctagcttacagtacaaaatgttacgaaagttgtccaatttgttgcactaatatatgggcttctcccttgaaaaatgaacataagatgtgttatataggacatagacggttgcctacagatcatcctgatagatagaagaagagtcattagatggtattgaagagggagatatggctcatttgccactgtcagggaaataaattctttaagaagtagaactagtagattttaagtatgaaaagacgcaaaaaaataagaaagtaaatagttgtatacactatgacgtcgattatgtttgaccctatagcgttgcttgaatcatcgtatattggtaacgaaaacttgtgggcttttctagttgactgaagcctttgatgagcaggcccagcccaactagggttttgtagctaagtcccctccctaactctataaatacatattgtctcatcacaattgtataccttttgataatcagagaaaataaactgcttctgatttagagatctagggaggaag

SEQ ID NO: 360265 - DNA, 877 bp, Cannabis indica
ccggggattgggcggctgaccataagtagtctgggagtattcatcgttgggtcctcttttgtttctcccaggggaatgacgttcggctgttgctgacctacagttttgtaggctctgtgtattagcacggtggcttggcgactacgatcttcaatctctgcatggtgagcccttaatgcctccatctctttatctctccattcatcgaacatacgcctttgttggtcgaacgcgagatttactgcagcacgtattttgtcctgatcatgatgcagagtgttgttatgaccctgcatgagtccgagcgcatcacggagatttcgtgatttggtgacgtctccaatggtcatctgggcattggttccaggcgaaacagtcgtattatggatgccctggttgggtgcggaactgttattcccagtctcttgcataccaggcgcaattccattaataggaactatttcaccattccccacgcctcccgtctgtccgggattaacagcaggcggaaccttagaactctctaggttctgtgatgtaggatctagtgtctgtgaattagctggattagacagacctctacgagtttgcaccatcgtattggtggttggatgtcgaataaagagagatttgtgatccttctctcaatgaaagcaccaaaatgttgacttcgcttttagccaacgacaatgagtctattttataagcgataaatgatatgtagtaacagatatatgataaaccaataataagacacaagaattttatagaggttcagccccgagcagtttggtaatagcctaatcctcgttatttgtattgacttaagatcaaggagaagattccttttctatagctcttacaataatatctttga

SEQ ID NO: 360266 - DNA, 569 bp, Cannabis indica
tgaacatgcaatttgcataagggagcccacttcacctattcggccatctcccacctttgctggaaacggaaggttgtcatgtttgagataagatcaatgtcaggtgatgacggacttctgagtctctgcgcgggcggtcaccttgcattttactttacttttgagcttcctgattttcatgccttgtgttttttatggctattttttaaccattctgtttttgttctgtgcagacatgtctcggcagatgatcgaagctctaaggaaaagaatgggcggaagctctagcgcctctcctccggctaagaagtctaagggcggtgaggggtcctcggagaagagaccttctggagaggtcattgaccttttcgaggagctgactcctgcaaacccttctacccccaaatctgccaagtccaaggagtctcgaccaccaacggttgggtctgaacttgtcaggagtactcctgagcgggtgcaggcaccaactccacctttgcccgtgcttctagaggccaaaacgggcaagaagatgcttcccactatatgaatcggctggttcccgaggt

SEQ ID NO: 360267 - DNA, 530 bp, Cannabis indica
accaatcaaactaaaaatatagtttttttttaaaaaaaactatgtaaaacattaaaaagaaaatctgcatttaagattcataaaaaataaaaacttaattgaattaccataaaaaatattaaaattcgcttcatatttatttatttattttaaataaaacaaatgaaactatagtgatggtcggagttatcactcgtgccgaaaaagtcaccagagtttgctaccggcaccgaaaaagttgtcagagtagctgtcggtatcggaaaaatcgtcaaagttgccaccagcgctaaaaaagtcgtcggaattagcattgtcaccgaaaacatcacaagaaaaattacgaataaattggtttcttgatgaagaaaccagtttcttggtgaatttttccggtaattttaccggcgataatgccaattccgacaactattctggagtttgctatcagtgccagaaagtcgccggaatagttgccggtgtcagaaaattcgccagagttactaccggcgtcaaaaaagtcgtcagaa

SEQ ID NO: 360268 - DNA, 648 bp, Cannabis indica
atctctgtggcgattgagttaggattcaagtttattataattgagagtgactcgagactagctatcaatgcgctcaatgggaaggagtcccattgcgcacttgagaactatgtctccttttgtactaggtactcttcttcttttattagttgtaactttatgaatgttagtagatattgtaactatattgcccataatgtggctaagtgggcgtttacccaccagatgtatggttgtattccggtctcctctgtgctagagaacctgttttgtaatgaccgtgaggtctagttatctttgtgttatttaatgcattaatacgcttattttcaaaaaaaaaaaacctccattgttgtacaaaaaacgcaaaaacaacatacattcaaaagcccaacgcgttcagaagagaagaatcgaagagaaggacatctggaaatcattgaaactcacccatgagcgaatcagagaaagaattgaaggtaatacaatttcttcatgaacatcttcctatcttttattctatataattgagaatgtgttataaattgaggaaaacaggaataaattgaaatgataataaaattttggtaaatctgaacaaaaaaacaacaacagtttgcataaaaaaaatattaatgcatataatta

SEQ ID NO: 360269 - DNA, 465 bp, Cannabis indica
tggataatcataacgtatatatcttggtacatgtagagcgttctatataattgagagtttaataaataatataaataattaataaaatactataaaaggaacatgatgctctcatctaatccaactaatgccttcaaccaaatcaaacctagttttctctgtcagacaactagtagatgagagacaccttctataatgattcaaaccctccttcattgttcttcaacctattcggcccatagtgacagagtgcaatgcccacacatagtaagtcaagtactctattatagtgcggaagacggtagtaacaaaacccggaggagagaaggagatctaggctcggatcttgataatactttacgatagaaaggaacaagggttagagatctgagcggaaggagacatattattctgttgcaatcaatgtaaggtttttttaaaatcttatgtgtttaattttattat

SEQ ID NO: 360270 - DNA, 832 bp, Cannabis indica
gacacaggtcctaacaccgatctccatcttgtactgccgtaattattaacgggacacgccacctgactatctcaatatcagatagactttcgatacaagacaccatatagatcttcaatcgcgaggtcatcacattgagggtatcttccaaacatcgcaaatgcatcccactatcccagcgcttgaacatttggctctgataccacttgttgggccccgttcttccaccttgttggtgcactacctcaccttgtctcccattagtatgatattgtccgctttgggcctaagccctaacggtttttttttgggcaccttcccaaaatgtctcatactaatggagtagtgtccatccttatatacccgtaattcttcacattcctaaccaatgtgggactttggttgcattctcaacatcgacggtttcggtggtcttctattttggaaaacaaataaattgttcgtctctaatatgggattttctattttttttttcctaatacaatatttcattatagcataaaccacattaatattatatgtttgaaatgaataaattatattattattttttttaaaataaaatgtagaattttgattatgtattttaaagaaattgatatatggtataattttaaaatttgatgtaaaatagaaattttgtggtgtaatttgaaaagggaaatttcactttttgcccttaataatataccccatatcaaaatttataccctcccttaatttgtacaaatttagtccattgattacatgaacttcccatttacccttttttttccaaaaaaaataaattggtaaaaactgaaattggtct

SEQ ID NO: 360271 - DNA, 571 bp, Cannabis indica
aaataataatatatataaactaatataaatttttattttttttacagtttggagataaaacaacattacaatccaaaaactgaattattaccaatacaacgacaaaagatagaacagttgatggcggtgattcacgaaggcttggatgattgatgttgaaaggcctaagaatttttcttccctagcttatttttttaggttaacttgtagttagatttattaacttgttaatacttggactaattttataatatttgtgtaatatttaattgtaatttatttaattgcttctatgaaataaaattaggtatattggctaatcataaaattaattcaaataatatttaatttaccattttgaaaaataaatatttaatttaactttaaattaaataatataatatataaattaataaatataatttaattaactgaaaaaaataaatattacagatttggcgtcggttgttaaggagtatatgacgtcagttattggggggcgatatgggcgttcagttatgctctatgaaccgacgccatacgtaaccctactggcgtcagttactataaa

SEQ ID NO: 360272 - DNA, 600 bp, Cannabis indica
gcctattcgaggtataatcaaatcaaaatgcatctaaccaagaacatataagtttccgaacagatatgggtttatactgttataaggtcatgccatttggtctcaagaacgccgaagttacataaaaaaaattgttaaaccaaatgttcaaagaccagatcgaacaaaatattgaagtatatgtggatgacatgcgtatcaaatccaagaaggcttcgtcaacgaatgctttaaagtcctcaggaaatataacatgaaactcaatcccttaaagtgctcctttgaagtcagctcgggtaagtttttgggctttattgttaatgcccgaggtagtgaagccaatccaaaaaaaaagttgaagccctcctggatatgaaaacgcctacaaaaagcaaagaagttcaaagtttaactggtcggattgccgcacatagtagatttgtttcaaagttaacaaacaagtgtgttccattcttcaacatcctgtgatgaaacaaaaaatttgaatggatggaatgttgggttttatgccctaaataaaactcatttcatataataagatttacttattaataaagatcagaaataacattttatgtt

SEQ ID NO: 360273 - DNA, 1099 bp, Cannabis indica
aaaaccagcagcccaaccacgaaaattcagcacaacttcaatccatttcacttcaaaatcacaaccaaacttctaaatcaacaagtaaggttgctagcaatcaataaggaattaaaattcatgtttcaaataccaatttccaacaataaactcaaacttttagattgcataaaacacataattcatccttcaaactagcaatactcaagctcaagaacttgagctaagaaatccatcaaactcaactattttccagcagccacatatcaaaataacatggattcaagctagaaaaataccctataatcacaatccaagctcaacaaacatgaatcccaaccaaatcatgcaattactcactcaatttactaagattaaaatcaaaatcaagcacatgcaacctcaagagaagaacaactcaaaatatgcttttaccccaataatttcagcaagaattacaacactaaatctcaaatatactcagcaagaaattacctcaatcccaagcttaaaattcttccaaatcaagctccaaaatcaagtaacaccaagcaattcacaccaaaaagctagaattttcaagatagggttagggtgagagagagaaaagcaaccaaaaattcatttactttcctcaaaaatcaattttgtcaaacatagtaattaaaggtcaaatgaccaaaatgcccttagggacaaaaattcatctcacatacacataagtgtaaacatgtcatttcatacccaaatattttcaaataaaaattcagattatctcatatcaaataaaatgccaaataaacaaatcgaatttgcatttcaggcccgaacccggttcgtcccaaaataccctgttgtgactataccacgccaacctgtcagaacacacctgaaaagacaacacaggtatactgtataataatatagttccatttagcgcgtaattaaattaattttatcattctacctttctcgggtcacaattactaaaatgcccctggctcaccaacgggtcttgacatgttaaaattcatattaattcacatatattgaaatatataataatatagttcctcaatttattcataattatctaatt

SEQ ID NO: 360274 - DNA, 745 bp, Cannabis indica
aaaatagtacttcaacctattgtcctctatgacaatctctataatagtactcggattcttctatttcagcatgtactattaaccatgtaactgactataagcttctactagcgtatctctcgcatacataagttccttctcccggcacctccaagccttcttataactcatcttgatgttatagtcctgaaacatatctctctgtatgtcttttgccttgtacttagttccgtctaatctaaacttgttcttaataaggtggccaacaacccatggtgctgcttgacggttatcagcatgtctagaatctaggttacatgtgtgttcattgtaaaatacaatgacctcaaacatgtcacaacatgccttcttcctccccctcactctccatttgcaatttgaatccctacaagttgcgtaaaaaacatcggtgccagacttcttcatcatgaagtcaaaatttattttcaatgtaaatcttcccactacatttttcaattcagtcttgtttgtgtaacacttgccaatgtatatttcccatgaaggtgcaccgctaaaagaagttgtataaatattattttcctctatgctttcccttgtccacacaataggtttgaattttgtacaaacttcaaaatcagatggtacagtactacgaggaggacctggccggctgctactagtgcctgggatttagtgagtttcactacgaggggttcttctttcttgctctatcctctggttc

SEQ ID NO: 360275 - DNA, 617 bp, Cannabis indica
gagccaatgaagactataactgctaaaaaagcactagactttgttatcaaaaacatagtgtgtcgatatggtttgcctcataagatagtctaagacaacgggaagcagtttgactacgaagaatttaccgacttctgcaaccaacacagagtcatcaaaatcttgttcgtgggagcaagaccgcaaacaaatggacaactagaagccgttaataaaatcctaaaggccaccctaaagaagaagctgctggcctacaaaaacaattggcctaaagaatttccaagagtgttatgggcctaccggaccaccccaagaaccacaactggccattcaccattttcaatggcgtacggttgtgaggccatggtcccggtggaaacactgttcccatcccataggaggacgacttacaatctgacaacaaacaaggctttataacaagaggcactggatcaaatcgacgaactccaggatgagtctcaaatacaaatggcagcttatcaaaagaaggtggctaaacacttcaactcaaaagtgagaaacaggaaattcactattgttgatctagtcctaagaagggtcttcctagctacttaggaacccagagtgggggtact

SEQ ID NO: 360276 - DNA, 1182 bp, Cannabis indica
ttgctcaatatcatgccagtctaaatccagtgaactgaaaaatcagggaataaactttcgaacatataattaagattatattccactgtgctgacagcactataatgattaacaacttctgtaatgaccgctttagtaatttggattagtaaaggcaattagcactaatttttattattttattattatttgtgaattaatttaattgtggaccccaatatttagaaataaatattagagttataatttctcaattccggagattttattaaactctaggggtattatttagcttatatgtgaaatatgttatttttgtaatttttgctcggcgacaacggaaaatgcgatggatggctagattgatcacatgggtaagtttagaaccttatttcttagtgggaaatattttagagaaaataaattatcgggattgagcggggttatggaatttgaccattttacccctagctttagaaaaaccttagttttaggtttaagggcattttagtcatttttatttggtaaaggataggtggctgcccttagtgattgacacctagcaagttaattttcagcaaaggattaattaaaatccttttgtctcatttgaagaaaaatcaagaaagaattaaaaaggaaaaaaaagaaaaattagagagaggtttctctctttccttctttcggctgaagcaaccagaagagatcaccccttttcttcaccatttttctggaattcaactagggaatcaagcactcttgaagctatggtaaaaccctagaaccctagagcatgttttttaagctttttctttggtttgagtatgtgaaattgtaaatcaggggctgttagggttagagttatttagggttcaaattttagggttcatttgagttaatttaagttcctagcagctggtttggttgattggtttaagttttgtgcaactttgaacattgagttcaaagctttgagctttaatggcaaattgagatttagtgatgtgttctgtgaaatactagctggattatattgtttatgcattgtataggagctctggaaggtttcattgcatttggaggagaattgagcaaaaaatgaaggttttgggaaacctggtgtaaagccggtttgcagtgccacaaaaaccggctagccggttttggcagggttcccgggcc

SEQ ID NO: 360277 - DNA, 592 bp, Cannabis indica
ataggaataggcactagggagacgaccgctataataatgtcgttttatagtttctgttgttgataaaattggagctgagtttaatattggataatttttttttaatataaaatggactttatatttttttatccattgaattttatgtatttcatgtatatttattggtttaattcgtatttatctaatattttagatttgatatttattggatgagattggatttatctagtattttagatctagtatctactgaattggatccatccaatttaaggaaaaaaaaagtaaaattttaatgttaattttcatatatacatatattcttttacgtatatatgcattttagttagttaaacatatatttataaataaaagtgatatttataaacataaaataagcttagatataatggtaaaggatgaggtcatgagttctaatcttaatgaaaacatgtttattttagtatttttattttactgtttgaacatctaccaataatacttatatttaatgtcttaattattgaactcaatatttttattcttactttttttttactttatactatatttaatactaaaatataaa

SEQ ID NO: 360278 - DNA, 634 bp, Cannabis indica
gtagggtatgaatcataccccgacaagtgttaagtgttgtaccgcatacaccgtgtaccttcccgtactagtattggtaacaccatgatgtactcttcagacatcgtacactttaccaatacactctgtaccactaccgtacaagtgttggtagtgtatgaatcataacaagcatggatatatatatttcacacatacatacattcgcatatatatcatatgttctacactattcttacctctttttcgaattcaaatgagttggccgacctgagcggaaagtctcgtgctagatggatgctcttagcttcaaagttacttgaatccttggttgaaatcccaaaaaataagatgaaaagatgatggttccttctattttgggttggtcgaacaaagagagagagagaaatgaaatttcttttattttgattttttcctattttctttatttcacaaaatgaataaattaattcatttggctgaaaaacaactaagtggccagctgccacttcctaaaatagccacctaagctcccctgacaaaatgactaaaatgcccttcggtgccttaaataaagccaattcaagcctaggggtaaaatggtcaaaaactctaaactctgtcaaagtattct

SEQ ID NO: 360279 - DNA, 563 bp, Cannabis indica
cctgaaggagaatcgtgcttagatcttgataatactctgcgatagaaaggaacaagagttagagatttgagtgggatgagacatatattccgctacaatcaatgcaaggttacttgaactttatatgcgtttatttatattgttttagaaaaactatatttagggtgttaataaatatacttattagtaaatctagatactggtaaaatatattctaacagaataactatatgtttaggatttaatagaatttatacattaaacttacaatcaatgaaaagaaaacatgtagacccatgcaacataaaatgatttttagatcttttattatgtccatatcgagtgtactacatagtattatctttttaataggatctgacaggttgtattcaatacaaactttctccaccattatatatccttagtcacaaaattcttgatattgtgaaattcctttctatatgtctactcctcttgggatactggattctttactatttggcaattatttctgtgttagtcaggaagtagcactaataattaatccatgactggaataatgc

SEQ ID NO: 360280 - DNA, 587 bp, Cannabis indica
tcagaaatgatttgaacagaaggagacgagtagacgatcagcttggcacgccgttagtgcaacccggatgtcgtgctcaaattcccacttagaaagatactgacgtgactcaaatcggcaaaaatgccgaataggttagtccatctgtggaggcacatctagacgaactaaagagtatgtgccaaggcatggccggacagagaaacaatgatctcgagttggaccgagcatgtggaactcctttctctctcgagatcaatctcctggcgttaccccataagtttaaaatgccaacctggaaaacgtagactggaagagaagatcgtctttcccacctcaagtatttcaagatgcaaatagatatgcagggggtatgaggtgacgtatgttgcagaatatttcctgctaccctctcagaagccgcccaacaatggtatttcaagctggcccctggaaagttcaactcatggaaggccttctccatgtaattccatgcgcaattctcctcttctcaccaacttccattgcatctaggagacctggtagaagtcaagcaaagaccaggtgagcctctccgagcatacatc

SEQ ID NO: 360281 - DNA, 952 bp, Cannabis indica
tttggaaacaatttggttagggtttgcagctttttggtttttctgggtaaaactggctaacttgtaaaaccggttacccgaattttgcagcagggaaacccgaaaattcagcttgtcgtttcgcgtcagtttcaggtttctagttggttgattccctgctagtttagggtattgccatattaagttgcagtagatagggttttggttttaaacctaagtcccggttgtgatttagcgagtcacttattcgttttgttatcgatgtgatttaggagcctataattccccgagcagttgttccactcaggttgaccggcacacctgaattcggaattgaggtaagattagtataatatcatgcatatgttattacatgtttagcgtacatgttgtttatgcctgttagattacattgatagcagtaatagtatacatagagttgtactgattactgataaatgtatgttggctaaaatactgatcgatgctgtcacatcaatatggctagagtatgactagcatattgagtataggctgacattatggtcgatagtattgtcgtatgaacgttctagactcagtaccgtgtgggacacggggattagggttatgatcgggtgtatgggcgccaggttataacccgggttatttgtatgttatatgttatgcttttcttactgagtctgtcgactcacagtgctatcttcatgtgtaggtaagggcaaggctaaagctgaggagccgtgagaacgagcaggtgaagattgtacatgtcggggcggttaggcctggagcgtacgatctttgggacatcgaggcttttgctgtatagtcgctgggcgacaaacttttgtttatgtgtatagtaaacttttaaaaagtattttgtaaacgggatcccgaaattttatatattcaatactttaagtttctaattaaataagcaaatttt

SEQ ID NO: 360282 - DNA, 859 bp, Cannabis indica
aagttagaatttatgggcaatattataattgctatttatattaaacattgtacatttagttatagacatcaagaaatctgaatggactgtgcatgtatgttatttagtggtaacccatttaacagggtagacagattagaaagatgacaatatgagttaaatagttgatattccctagtggaatatagaacatgagtagttaatggaagcatcgatctaaataattcaaataacaaaatcttttgtttagaagtgatctaccgttagcaaaggtgggacaatttatgagtgttgtctggaatcctagatgaattgaaggtggtgattgtgtactaattttgagattatgtaggcgtgggactaccaatgttagcaagaatcatcttattttggtagctcaccatgaaggaactccatggtcgagtgtccttgacttggggtagtttcatttaggaaatttccccatgaagcatgtgagttagagcaaagcacgttagaaacacttggataattagattggtccgtgggaccagtcgtcagtccaagaaacaactagagtgatgcactagtgtataagagtcatcattccgtgggcgtaagggcccaatggaggcttgaagcggggatgttaccggggtaacgtataaaataatatcaggaagaatagtggtatcactaaggtaaagaagattacctgaattacttaaggtgacacgataatgatggagagtactttataattgactggatagtcaatgtgatttataaggagaccattgaaattctaggaaatgattactttattaagcaattatggaaaggcatactcaccaagaatggggaaaagcttatgaattga

SEQ ID NO: 360283 - DNA, 778 bp, Cannabis indica
ggagtaaaaaggtcctccaaaggcagcacccggacggaggaaaagcgacaaaaaagggggtacactccccaatatacccagtacacggagttaacggactctcaagaacgtgtgtactttgctactaggccaaataaacactaccggagaccacctcctctatacaaagaacgttcccggagggaccccaacaagagttgcgagtaccataacgacattgggcacagcaccaatgaatgcaaatttctcaaagacgagatcgaaaacttaatccgattgggacacctctaccagtggatcaagaatcggttgcctcatctcaacccgagtcaggcggccggggctttgccacagggaacactagggggtgcgacaggagtattggctccaggttttccccccagagatgcccagcgtatccccggcctgccacccagacctaatgggagagtggccatgatctcgggagggccccatatcggaggaactacccgtaaggaactgaagtggtatgcaggtgccatgaaacacaatgaggtttgggaagttactcaactcccagctcaaaggccccgactgatggaccaactcatcacattcaggaaagaagacgctaagacggtgcgttttccccaccatgacccgttggtcatagagacccccattgccaataaattggtggccagagtcctaattgacaacgggagttccgttaatttgcttttcaaagtggcctttactgcaatggcctgacggaccgagacctctcaccgaatgg

SEQ ID NO: 360284 - DNA, 688 bp, Cannabis indica
ttaggagtggttcgactttcgtccacttagtgaagtaatcaaccgctaccactgcatactgactcctcccttacccttgggtaattgtccgataaggtcaatttcccaaatggcaaagggctacggactctacatctgacttgacttgttaggtggagctcgaggtatctttgaaaatctctggcatttgtcacatttcttaacataggcctttgaatcttcaatcatcgtaggccagaaataaccttaccttagaattttcttagatagactctgctcggcgacatgatttccacagaatccgtcgtgcacctcagataggagtcgtgcagcttcttcttcagtaacacatcagagcaatggcattgagaatcctcttttgtacataattccctctactatgatatattgtgcagccttccttctcatttttcgagcttcattccgattatctaggagtttcccagtgttgaggtaggcggctattggagtcatcctgtttggggaagtgtcaatcattttgatttcttctgtgccagtgatgctaggctcttcgaggaactggataggaaccaagttcgccttgtcacttacattactacttgcgaatcgagctaacgcgtctgcagttgtgttttcttcccttggaatttgtttaagccgtagcttttgaattgtgtgagcagat

SEQ ID NO: 360285 - DNA, 519 bp, Cannabis indica
taatatataaagatatatttttgttattgtagatccatttttctagaaattatattcttattttttttaaaacaataatgttcattgtaattatagtatgtattttttttttatctatttttgaaaatttaaaataatttatagtgttaaaaatagaatttaaaataaaaaattgtaaaaatattttttctttttatatgcatgtaagattttatattctatatcataaattatttaaaattttctaaaaatatgtcacacataattatatttttaaaatgtacaatggcatataaaaaaattggatataatttctgaaaatagcaaactttttgcacttacctaaagaaactcttaatattttagtatcattttttattaaaataaataaaaaatggtaggtttatttgaaacgttgtattaggtcgtattgtattgcattgaattatgtaccatattttatataatattatcttaaattttatttatactaaaatattatatatttaagtatctata

SEQ ID NO: 360286 - DNA, 708 bp, Cannabis indica
cttgaactttctttgatgtgatggttgcgagtggttcggcctcagtccacttagtaaagtaatcaaccactaccactacatactgcactccacctttacctttaggtaattgtccgatcaggtcaatcccccaaatggcaaagggccacgaactttgcatcagtgttaactcgttgggttgaggtcttggtatctttgaaaatctcaggcatttgtcacacttcttaacataggcttttgaatcttaaatcttgtcggccagaagtaaccttgccttagaattttcttgggtaagctttgtccggtgccatgatttccatagaatctgtcgtgtacttcggataggagttgtgcagcttcttattgagtgaaacatctgagcaatggcatcgataatcctcttctgtacatgactcgttctactatgatgtaccgtgcaactttccttctcattttccgagcttcatttcggttatctgatagttcccagactcaaggtaggccgctattggtgtcatccagtttggggatgtatcaatcatttcgatttcttccgtgcaagtgatgctaggctcttcgaggaattggataggaaccaagtttgccttgtcactcacattgctgcttgccaatcgagctcacacgtctgcatttgtattttcttctcttggaatttgtctaagaccatagcttttgaattgtgcgagc

SEQ ID NO: 360287 - DNA, 941 bp, Cannabis indica
ctcccgagaatttcagctgtctctctgcgagttgcgtcaagtgcaggtcgagctggtctatctgcgaagacaaaaaagagcgagttagcataagatctcaaagtaattcagaaaatgtagaagacatgcgacgtactaggtctgcgattaaaatcagttctaatccctgggactttgaagatgtagaaccattttgatttccagtctcccatattcgacaccattccttctaccccattaatttcagaagtcgcccatttgctaaagcagtagaaaccgttatgaaggcctacgctttttatatcgtagaagtagctgaactcttctaccgaggaagccctatgaacgtactccatatacatcgcgtaaaaggccagggtaatgcgataactattgggagttagttggaaaggtgatacatcatatcgtttaaggatggccgcgatgaagggatggaaagggactgatactccacatcggagaatgggtattgagattaccacattctctgtgaggaataatcgcaggattggtaaaaggaaggtgcgccctctgggtcagttttggtcgcaaaaaagcaagtcgcagcaggtttagcctcgtaaaggtagtgaagtctgatttggtaactctcgaaatcagatcctcgcacgcaaaaggctcgttcagctgggcgtcatcgaccgagtcagtcccgctcccttcagcctcttcttcatcctcgcctgattcgcgatctggggcggtccattcgtcgtcaatctcctcgacctcgacgtcaggagcatgcctcgaatggataagatagtcgcgggctgacaccgtagactcgttgtctcgaatatcaatggtcccaggttcagcgagttcctgcaccattctctcgatgtccgcagaagacatcgggcctagctctataggtgcgacctcctcttctgaaa

SEQ ID NO: 360288 - DNA, 504 bp, Cannabis indica
acttgttatgtgtgggcatgcactcaatcactaatggctgaattttggtttgtgaagaaggctatggtatttcgaatattcaagaggaaaaagaagaaggaagaggtctcatcagaaagctaggtttttagctttggaggcattagttggatgatgagaccttagctatccttttatactaatttccataggattggggttgatttatttaaataaaaaattgataaaaaaaatggagcataaaaccctcaagtgggcgtccatgatatgggccccacacaagtttggtttttaccatttttctcaataattttatctatttttcacaaattaataccacttttgcaacttcaaccctataaatgccaaaactatttatttaataattaaaataattatcaaataaaataatcatttatcatatttataattagactccacaaagtctcttaattaataaattaaccctaaaatacaaattcttcacaattaagccataacata

SEQ ID NO: 360289 - DNA, 638 bp, Cannabis indica
taataataataataatatgagacaaaacaagaaacctaaaaataaataaataaaaaagtcaagagaggatctgagtggtttagttgatctaattcaccaaactcaataaggaaaaaacaaactcatatagctaggggacctctcttctattaatttttatatcttatacatatatttgttactttatttattttgttattgtaaatattaatttagttaataaaaaaggaatagttttgatgaaaatattaaaaggaaataatattcttaaaacaaatatgataatatctcacattatcattccttaattatcattaactcattttaaactgttcttaaagtgaatctttatgttgagtgtaattttttttaccactcacgaggattcaagatatgacgacacaaatcaaaattaattaagtattttttgggtgcttatttaaaacatgcaaaatcttgaattttttttagaataatatctatatataatatagaaaatagtgtttaaaaaatatatttatacacatataaaataataaaaaatatatatataacagattgtttaattttatattcggcatattaaaatttttgaattttttaaaattttacaaaaaaaattaaataactataatata

SEQ ID NO: 360290 - DNA, 800 bp, Cannabis indica
atgattgcagaaatgataaaaaagaaatttctgtcaatcaaaagaaatcacagaccaaatgacattatgatagacatgattgatgattttggagtgtcaatgagctaccaaaaagcatggagagcaagagagaaagctttggagttggcaagaggaaggcaagatgaatcttatcaacaactaccaaaatacctgcacatgctaaaagtagtaaatcctggaacaattgcacaattggaaaccgataagaaggatcgtttcaaatatttgtatctagcttttgcaaactccatagaaggttggaaacattgcaggccagtcattgtaaccgacggaacatttttaaaaacatcatttggaggaaccctattcacagcctctacaatggatgcaaacaacaacatattcattctagcatttgggataggagactcagaaaatgactgctcttgggaatggttcttcacaaaactaagggaaacattcggagatagagaaggtacgctatcgaaaaaactggttccctttaatgtaaatccatctaaaaatttaacttcatagctactgatctcagacaaaaagataacaaaatctagaaactggtttccacaaaaaaaaaaaaatattaggcttccaaaaaaagaaacaaaaaaaattgattaggcttccaaaacatacctattgatcttgtaaaaactggtttccgtgaacaagtttgacaataatatcagacaggcataaaagtatagagaaggcggtgatcaatgtctacccaaaccacttccacggagcatgcatct

SEQ ID NO: 360291 - DNA, 1185 bp, Cannabis indica
atcaataattcctctagctcggtattatttgactctgtggatatatatttataggtggtagttaaagtgttaagtaagctggataggccctgggataatcttgaattagggtttagaaccttagtgcctaaagggaagttggttattttcaaaaggcgaattaaattcttattggttaaggcatttaaagttaagcgctgatctcatagagctatattagcagattggacgtcattctgagaattaaaacctttttaacttaagggtgaggagccttttgtttttgtaggatccgtttagggttttcggataccgatcatttcaattttaaaaggctaagaatttactgcacagtagatgtgtaggatttttagcagttaagtttgactctagcagacccgaaacatttgggcctatggatgttagagtagtaagagaattcttggatgtgtttcccgaggagttaccgggattgtcaccgcaacaggaaatagattttattattgacttggcacatggagcagagtctgtttcaaaggcatcgtatagctctggtaaacttaagaagttgaagttacaagttcagaggatactggatctagggttttcccagcctagtgtgtcaccctgaggagctctagttttatttgtgaaaaataatgatagatcccttcaaatgtattttgattatcgaaaattaaacaatctgacaatcaagaacaagtatctattatttagaattgatgattagtttaaaataattttaaggaaaccaatttcctccaagtttggttatgctcgggttatcatcagttaagaactggttgagatctagaacagttttaaagttagaagttttcttgtagtaattgagtattatcaacgttttgtggaaggactttccaaaatctcagtgccaatgacagaactcaccaaaagaatcaagttttcaagaattaaagcagcaattgattagaacaccaatgttagcttggccagtggatcaagggaagtttgtggtatattgtgatgcatccatgtaggatctggggtgagttttgatgtaagttgacagggttattgcctatgcttctcgccagctgaaagagtataagcaacattacccaacaccaaatttagaactcgctgttaggggtgggcatccgatccaatccaacctttttt

SEQ ID NO: 360292 - DNA, 891 bp, Cannabis indica
tagttatgttttatcgaatcatatggtgagtgattttgagttcttttttttttttggggctctggattttattgtgcagctgtggaagtcttttgtttttggttagttttatgtgtttatggagtttttttttcttttttaggttgggatggttattttcacaatctatatcaagaagtttgttatagatcttttctggattgaatatagatacaataatgtgttacataatgatgagagttctttaatttgctttttcagtttttgcaaatagtttcaaatttgtatttataatttggcttctgttttgtttgcattaataatgtgttacagtctttctaatttgtatttataatgtgttacagtctttctaatttggcttctgttttgtttgcatttattacccaaaacttggaaatggttaatattttctgcaaattctctatgagtttttttcttttttccaattgctagtttctatttttttctgttaattttttttttatttcattaattttttgcagctatgggaatactactttaagcctgaagataaattgattgggaagattactttttatcctaattcgaaagtagattttattgaggtcattaagaagaaattaacctcagaacaacttgttctttttagggaaacatgttttggtcattttctagatatgtcaacagtttcgatgcaagctcaattgattcatgcatcattgtatagggaagtacatcaaaataatgagcgtgagatttggtttaggtttggcaatgacactgttagatttagtgttgctgaatttggtcttatttctggtttaaaatgcactggtgacagggattattccaagtatgttaacaatactaatgagtttgctgagagat

SEQ ID NO: 360293 - DNA, 639 bp, Cannabis indica
aattttgggtcccaggtctaggtctgggttcgggtttggttcttcgtctgggttctggtcctagtctgaatcccagatctagacaccgactactggtctgttctaggccaggttacccgaatcacgagtcaagatctggatcactgtcacaggtctcggtttggttctggtttaggtcctaggtcccatttatgagtttgggttcaggatcgagactcaggtgctgttctaggtcccgaccctggttctatgtccctagtctggttccatgtttgggtctaagttcatgttcgggttcgggtccggctcccaaattggggtctaggtctgatttggagtccgggtccttgtccggttacggttctggatctaggtccaatttcagttatgattccaagtcgaagtcatagttcctgtcccggtcaactttcggttttggttccaattttgggtcacagggtacgggttcgggtccacttttgggtatgggattgggttcatgtccgagtgagggttcgatccttgtcagggttcgggtccagggcttggtcccaaaccgagacaccgactacaggttttgtccaagccttgggtccagatccggatcccaatctcgggtcccagtctggttccatttct

SEQ ID NO: 360294 - DNA, 719 bp, Cannabis indica
taattgattaatgttaatgaactagcaaaaaaactttgttcagcattttattcatcaaattaaatacaattacattaatgtgaactaagctgaaagaagaagtagtagttgcaaatttttgttttcatcaaagcttaggtgaagtgatccccactacattaatgccctatttgactattagtgtagggaccataccttagtgacggacctcttaacctagagacaacttcgttgcatctcatcagtttaagaggcgatcgattcactttctcatggtgaagtgaatctcactgtgaaaccggttgtttgaagacaattgctttattggtattgttgtcgcatttgcaccctattgacctcacttttagccaacgacagtgagtcttatttagtaagcgatacgtaatttatagcaatcgatatatagtaaagcagtgtaaagacacaagaatttgatagaggtttagccccgagcagttcggtaatagcctaatcctcgttatttgtattgactcaagaacaaggagaaaggttccttttcttatagctcttacaacaatatctctgaatatgaattcttagatagtatctcttaggtaaaaatctttcgaccctttgcccagtgagtattcatcactatttatagggctatgaacttggagatgaagtatttcccttctcgttacaatggatataagcagaaagattgtatgataaat

SEQ ID NO: 360295 - DNA, 1020 bp, Cannabis indica
tatttatttatttgaaaagaaacattaataaaaaaaaatacatacaccacgtgatcaaagtcaaaatctttctactatttaggatcattatccatgtgcagctcatttatgaaacagtgtggttttagcgtatatttgaaggcgccactgcaaacgatagtgccatactatatcacactgtattaaataacttatgtagtatggttagatctagcataagggagatcgctgtaactaggggtggacctacatagaagcgaagggacggattcagagccagacacttaaaaaattatcgtatacattaagaccacaattctattatgctttctttttttgtttaagatttgtttttaaactttcaattataaagtttttatttatgtatgcgtaataagaaaaaaaaatcttacaaaaatatttaattttgttttgtcatatttatattttttttcggtcacactttttttgttatatatttttactgtactaagttttaaaaatactgtgttttagtttcaaaaattaaaaaaataatgtagtttcaaaaaaataactctaaaacaacttaaacaaaaacacatagaaacaaactaataaaacaacaaaaaatataattacaaagacaacgaaaaagaacaaaatagtaatctattgcaatatgcaaaacaatatcaactcctcaatataattttgtattacgatttttttacttaattttaacaacttcatttatctttttgtactactacattgttttttatgaaatttgttgttatgactccatactttcaacttttttttttctctttttctttttgagttagtaacaatttaaataataatttattttttacaagttaaataaataattacattaataatagaaataataaaatttttcattttaaaatagagtatataatataattagtaatatataattaatatgtcaatatctactactactgcacattgtgtcaaataaaaaaaaatcttattattgtattttaataaaat

SEQ ID NO: 360296 - DNA, 892 bp, Cannabis indica
atacccagatgcaccaaccatttgacatttgttcctacagtcttcaagcctcaaccggagccgaaaacgatggattcaagggttgaggagcttctgaccaatccaaaccaagggaaccccgtgacctgccatggctgatccttacaagtgatcccagagggtatagatcttgtgagcaatctcaaagatcctcctcaaggtggtgaagaattctagaggatgattggcatggtttcaggttgatctgggaaggaagttggcatggtttctatcagagaatccagccaacccgagatcctaacgtatgccaagagatctttgcgtcaacctctccccaatgttgagaaatttcctgaggctgggaaatagatctcgacttcaggaaatgggatctcctaatgatgaggggaatgaggcctgtgcagagatcaaggctctctacgtgtagctggtctttctcaagctacgtgtagtcggtctttcttcgagctacgtgtagagggtctttctcaagctatatgcagacggtctttctcgagttcatcagcttcccctctcatcctttgttttggagaatgacttaatggtttggctctagtggcatttttgtaaagacaagtttgtaaccagtcttaggtttttcttatcttaaatgccttgtactgttttcattcgaacttaatacaattgtatttgcttgcatttttattcacaatgtaaacaactatattttgatcgaatgtacaacacttttgggtttttccattgcttgtaatcttcttgtttaagtagttagtaatctatccaactttatgattttcgagcggttgtcaattctgcctcgcaattgcagttataatctaccttaagcaaacttaaatatactttaagg

SEQ ID NO: 360297 - DNA, 1139 bp, Cannabis indica
gaaagaacatagcacttatccaaggtgcaagtaaactatgtcgtagattcacatatcaggtaaaccctgtgtaatgataaatctaggaatatatatttaatcacataatcttaattactttccactgtgctaacaacacagtaaacaagaatataaatgtgatatgggtttggatgaatttataaatcaaataaacaagtaaatgataacatgaaccaaatgacacacaaagtgatgaaaaatacttctgtttctttattgataattaaaggatacaaattacattgaaacagaattttatttacggcataaaacccaacaatttgttaacgcagattttcattaattaaattaatgcatatttcgtgatggagttgcacagaaataatagtaggaaaaggaaaagaaataatacaaagcatttttttacgtggttttgcagttgaaattctgcatagtccacgagtctatcttattagatttctgatacaaaactagggctttttctctaaaggattttttatccctttatcagtgtatcctgctcctatttatagttgcataggagggtagttaattacaaattaaactgatatcctacaacaataatcccctaaagttgtcagatttgattatgtcccacgtaaaataaatgcagttattatttgaaattcacacaactgtgattggtccgcttttatcgggtcaatccatacatgcattaaatacgttgcaaatgtatcgtgctgggacatctcactgagaacatagcaataataacagtggcagcaagctgaagcttttcccatgtctttctgaggttgataatgtaaatctcgtcataattgcgattgaagacataacattccatcgaacaatcgcagttcttggtgacaagatgaacttcagcagtcaacatcatttgaatgtcagtttctatatgagagagctgactcgacggagtagtgaatctcattgaaagatgtttgaagctgattagtgaaggtaccatgagtatgccctcctatagcgagatgaatgtctcactattcgctgttcaagttcattcaattgttatacttagtttgtataatgtatattatacactaagtctttttaacagtcaacatgtctcgtct

SEQ ID NO: 360298 - DNA, 633 bp, Cannabis indica
gcagcaactgaaaacagtgaagcgaactatcaaggagctgtaccaacatgtctagccagacaagagaaccctataggatggccaggtgagcttgtatggccaaccaggatctgtgcacaagctttgcagccaaaaggtgacttttagactaagggagcttttgttcgaccaagggaacctgacctctacaaggaaaaggtgtacaaagctggccttcacttaccgaaggctggcctcctcttagtaaagcttctaggaacatgacctactagaccctagcagaaacatgacctgctagaccctagcaggagcatggctggtgagacctcatcctgtaggtgtatggtcggctaggattgacttgacaagattatgctgtatagcgtgatacatgcactgcaagtaaactatgaattaggcccttaacaacccaataaaatagatggaaagtatttatgtttaagggcattttagtcttttgcaattaatcaatttaatatacaaatatttaaggattttagctgtaaattagggtttacgctgtcctatataaagggccttaactctaacctaaaagacctaagtctaattctagtctctaagtctgaaaccctagtctctcttcctctctct

SEQ ID NO: 360299 - DNA, 883 bp, Cannabis indica
acatattaataataataaattttagaattttttaatatgtcgtgttgtgttttttgagcttgtcgcgtgtcgtatttttcagactagtctattcgtgcatgcttaggtgtcgtgcatttcgtgcttctcgtcctgtgtcgtgcatttcatgcttctcgtcccgtgtcgtgcttaagcacatattttcatgccttgttgtgccaatttatagtatcgtgtcatgtcatgtccaagtccatattttttcgtgccttctgagctcgtgtcagtttcgtgtcatgtcaaaaaactcgacccgtatttacaacactacataaggttagtggcatccatattcactcaattaagattactagctatttattttaggtgtggcaatctgtgttgtctcgtgtcatacacattcgtattatgtaggttgacatgcatattttattgatcaaccttagacccatatatatttcatgtcaagaaatctagccttaacccgacatgtcgtgttctcgtgtcgacctatcatgtctgtgtgttgaatatacttatagttacaatatacattgatcaacatcagggtcggccccaggcataggcgggctaggcccgcgcctaggacccactcattttaggggctcaaataaaaaaatacttttaaaaaaatatatattttttaaataatttttaaaaataccatttatctttattgtaaaggcttaatttttttttttttgcttatgactcattttaactgagagccgatccaaattagcataagtagtatcacgtatttaatttatatatatttttttaattatatcaaactcatttaaataatatactaaataaaaatatatcaacaaataaataatatttattaattatttta

SEQ ID NO: 360300 - DNA, 521 bp, Cannabis indica
taataaaaatataaaattttgagaaaatagaaaaggttaatgaaataaaatgtagagtgccacctaacctctctaatgctttcctttatatatagatatagatatagattagtttccaacattacaaacttaaattgatttaaaaaaaaagttacaaacttaaatactaattaaatactaatcaatttaatatccaatccaatacatcatatccttccattgaaaaatatttattgcacagctaaaatctcaaattagcttcaataaaatgaagacaataaatattatttattggtctaccattaattataaatcctccttaatttaacacctaagaccatctccaatgggagatgtaaaatttgtgctatatttgacacaaaaagtagttttgtagtaaatttacaccaaattttagctttgtgctccaatgtacaattgtaaaattttaatgtaaaatttaatagtagaaattacactatatatggaaaaattacttagcattaatgctaaggggttat

SEQ ID NO: 360301 - DNA, 771 bp, Cannabis indica
aactcatattataaaatttaaatgtagaaaaaatattaaattacattaaaattaaaatattacacattatttattattcaatataccaattattataaaaaacataacttaaaaaattataaaaatgatactaaaatactagaaaaatacaaacacatattataaaatataaaatattaataaaaaaaatacataatatacaaacacttagagcaatgtaaatttgtatttatttaacttttaaatttaattttatttatgatttaatttaatttaattaacaataaaaaataaatctacatttttaataaaagttaaaaaaattatattaattaaagctgaaaaaaaattatagaaaacccctatggagtcggttatttataaaaactgactccatagggtccctatggcgtcaattatttcagaataaccgacgccatagggtacctatggcgacgaatattatttcatactcctttagcgtcaccccgatcagcgtcggtagcgaattttgccaaaatcgacgctgaacggccttaaaaaccgcctctaaagcccatatttgtagtatatttttatcaattacatttaagtaagaacagtgtaatacctgttcttattaaagtgtatcatctgctatgctgttaaaatgtaagcctgtgtattttttctatcataatgtacgaataaaataacaacaaaatatatatatatatgtaggttacgttggtgtttgatgtataatggagactgtactggaatacaaaaccg

SEQ ID NO: 360302 - DNA, 852 bp, Cannabis indica
tgtgggttgctatgtaaattttacttgcaatttaaattatttcgttggttgctatgtaaatttccgtaaaaatacaacagaaaaaaaaaaaattgtgttgaaactgtaaaaatgaagatcttacaaaactacctaattttttttccatttttatatttttactatcatttatatatatatatatttacatatttactatatcaaattttcaaaaatactgtgttaaaattttaaaattataaaaatactattcttcagtaaaataaaaaaaaacaactagacatctaaaaatcaattttagaataacttaacaaacaacatgaaaacaattataaaacaacaaaaagtcaactataaaattacagaaaaataataaaatattgaattaattgtaatatgcaaaacagtatcaattcctcgacatatttttgaattacgaaatttctttttttttatttaattttgacaatttgatttatctttttaaactactaaattatttttttatggaatgtattgttataattttatactttcaactttttttctcttttttctctctcttcctttctgagttagtgccagttaaaatgacgatttattttttagaagttaagtatataattacattaataattgaataaatatttttttataattttaaaatgggatatataatataattaattagtatatcaacaccattacacattgtgtcaattaaaacaaaaccaaacaatttatcattgtcttttaaaaaaaatgtatcagaaaataaattacatctaaatagtaacacacatacaaaaaaaaaaattgttaggaataaactaaaaatatacaccataaaaa

SEQ ID NO: 360303 - DNA, 656 bp, Cannabis indica
cggtccccgagctcctcactcattctaaattcattcagcaaattccatctgaagagagttgagagagcgaggaagtccgaactccaataccgaagctatcgcagggattgaaactcaaagatcaatggctggaggtatatcgatctatcattgcatatattatcgatatggttacattttattttccgcatttcatattgtatgtatatgatatattacatatactatattatagtctaacagttggtatcacagcagttttatctctgtcttgattgtatttaagtttcattcatatatatatatatattcatattcggtgcttatatatatatattcatatatagtttatatatttatatatattttcttcttttcatttcattacgtatatatatagtatatatatatgttcatatattcattatattatattatttatatacctaaatgctatatataaatatatacatatacatttatatatatacatacggtacatttttattttctgtatatatatatatgtatatatgtttatacatgcattatacattctgaatcaatacattcatatattaatatagattgttctaaccatgaaaactcattttgaaaaacaaagaaatctcaaaaaatttctggaaaaagttttt

SEQ ID NO: 360304 - DNA, 532 bp, Cannabis indica
acacatcttaaatgtcggtagagctttactgtttcaatctcatttatcttaaccttattagagttatgtcataaataatgttgtttatctcataaatcaaactccatctatgttacttaagaaaaagacttcctttgaagttctctatcaaaaagctcctacctatgaacaccttaaagtttttaggcatcttgcttttgcttctaccgtagaaaccaaatgacataaactatctccaagatctcgtccttatgtctttattggttatccacctggtatgaaagcttatactctcttgaacattgaaactcaagagaatattcactctagagatgtttattttcatgaagatatatttccacttttggacactaactctcatacttcaataaatgaattattctcacattctttactgccctctacaggaccatctcaaaatccatctgaggagcatgaatctgttcctgaccatgatgctaattcatctcataaaagggcattcctcgaagtgtgattgacatcaacacac

SEQ ID NO: 360305 - DNA, 942 bp, Cannabis indica
tcccccaaagtttgggggtgcaacatcctcctcttcctcctcctcggagggactaccaggacagacatcgcctaactcctctatctcctggacctcaacgtccccttcatgatccccctcctcctgcacaggtggatcctgttcggtgttgggcatggtggcatgctgggctacgtgaggatcgaatgcgttggctttacgcattgtttgtttaatacgagccatcattctttggctggatgggaaagttaaatcaaaatgtccatcgcttgaagagggcggactagagcaaagacgaggatgatcctcatgtagaagttgaagcaagtcctggtcgatttggtgttcgcttccccaaaactcacctgggttcatctacaacagacaacatgtgagatgagtgtttggtcaggatatcgaacattaaacaggaaaatatgccaaccaggagtactcaacagattaaagaatacaaatattcgacaaaaagtcaaaactcagaagttcaaaatttcgtgagttagggcaaaaaatttcatgaagcttagaataagaaagatgaaagacaagcattatgcatcccaaaaagcaagcattatgaacgatgaagtcgcatgaattgtcacaaaggaaaattgcagagtttgtaaacttagggtttcctacatatctacaacaaagttaaagttgcattcaaaaattaaatgtgcaaagtaaacgtaaaagaaatcggaaacttactcaaggatcgaatgtctggattcaacttacgcaaagctgaacgagcagttcttgtgaacagcaaactcgaagctaaaaacctctcttttcgctctgaacttacttagcaaagaaggttggtaaaaatgagtttgtgaacaaacgctcaatggtatttataggcaaacaacgaaaagggtaatcatttcgaaaaacctcaga

SEQ ID NO: 360306 - DNA, 710 bp, Cannabis indica
tagatgcataaagtaaaatgtctttcgacttgaattttaccttggtgtagttaccataaagtttgttgaaattttggttgtcatagcattgaactactattcctttaatacaaactggtgataacacacacatctttgctagagttcacttgagctcaaattatatctctcttgtgcaccgttaatggccatgtgcaacatctatttcatgaactctttagagagtaactcccaattctcataagaggcggcactacctctagtccatataggtggaaattagtgtctcataacttctttttagacacatctttccattaaaaaacccttgcggttttaaccctccaaattttaccattagtacacattcatagataggacaagttgagtactttatttcactctattgacttgttattacctaactaaagactagatttttactagttttaagataggttaccatcaatgagtaaaactctaagggagtttaggtcccatccctcaaaattcatgctttaaccctgtacggagattaagcgatttgttatgaccacacacttttcgattccaattgaatcttgctagtcaaaattagtgtctatttttacatgaccactaaacaaaatataaacataaaatagagaatatagagacgaagagaagaattacaactcaaagcaataagctacacatgaaacacaatatat

SEQ ID NO: 360307 - DNA, 600 bp, Cannabis indica
tggcacttaacagctaaaaaatggacggaaagggctaagtgctgacagaacttggatttagggagttttaccgcaaaaattttagaattgggggttagttgcaaaaacttccatactttaggaggttttgccgcaaataaccctaaaatatatatataaatacacatactacaaaattcattataaatagtaaattaacatttaaatcattagcttaaaattaataattttctaaaatttaactttgcattaataaaataataaatttgagatgtaattaatttaaattagttatttaaaataaaataattaatcaattagttgtaataaactaatttaaaaaaaaaataattagtacgtctataacctctataaaagtggcaatatttttgggcttccacgttttgaattaccaaaaagtcctcaattctcactcttagtttattatgttgaggttgtttatatacaatacatgtggtatgattgttttatttttacttttaactaaattatttattatgttgaatgatttagtttgatttattaataaaattaaattttattcaaaaaaaaaatatatacttatacaaaacatgtttt

SEQ ID NO: 360308 - DNA, 687 bp, Cannabis indica
aatttaatttttcttattgaagagtattaatagagtttagttcatgtctcgtaaagttttttttttttctttttgatatgttatttcattgtgctattatgttaatttataatttatttatttatttttctttcatttgtgagatagaaattttagtctaatataaactttagttatttttttttataaaaatgttaaattattgtactcttctattaatattaatgaagactttacacaatatggattttaactttgttttacttaaatatggcattggcagctttaagtttggcaattttttatggctatttttttttttatttttttattatttaaactattttatggtattactatgccatgtatataaaaatttatttttcaaaatccatatttaatctttagataaattgtccaccaatgatccttatcaagaagctgtatttttcatcaataaactggttttttaattaagaaactagttttttcaataaaatattagttttgattacatagaagtaaaatttatatatgacttttaaagttttttacccatatggccacgatcgataggaacgaaactcatcaaagatccttcatcaagaaattgaattttttatcaagaaactagtttcttcagcaggaaattaatttttttattaggaaactagttttgattatata

SEQ ID NO: 360309 - DNA, 616 bp, Cannabis indica
atatataaaaatttaaataatttttaaaaataactcttaatattttttttttaaatttttttcctcgcattattttatattaatttcaataattattttgagttcattatcataattttttctaactcatatatatatatatattctttttttctaaaaaatttcatgtaattttttattttaattttttgtcataatatttaaaataataatttattttatttgataggtatattttttaagaatatgagttagaagaaaaaagttaaaaaaatttagtataattaaagatataaattttatataaaataaaaattattaaaatagagtgtctttaaaaatttttgaggtgtaaataaaattttcctaaaataatttacgtaatttaatttactcataaaattttttttatataatatccaaacgcttcgaaaatattttttatcaaaaaaaacctctatatactcgttatcaaaatataaaaataaattaaaattttttacttaatttatacttttagctataacaaatgtagaagcttacccaaataagaattaaaaacacgattcaagaaaatttcgagtttgattagtttgagatttaaaaattgtgtttt

SEQ ID NO: 360310 - DNA, 707 bp, Cannabis indica
ttgaattaaatatctaataagataaatgatttgaaaataaccaaagagatattttcaatatcattatctaatcttataatttaattaaattaaaataataaaataaacaaattttaaaatagatatggttaggaaataattattttaataataaaatgataaacaaataatagttatcttaattatatatcgaaatatctcaaattaagcattttttatttaaaatttctacaaaaatatctaggttatttaaatatttaaaatactatttataaatttctgataagtatttttctaacttataatttataaaaaattaaatatttcactaaataaccaattttgaatttgaaaatattatggttagaatatctaggttactttcaaatttattaattatttaatttatcttataagataattttaatataatatttcaaattaaaagaataaagttatcttttaatttaaaatattgccaatattaaaatatctaatcttatatttaaatattatataaatattaaagaaattaacaaaattttaaaatctgattacaatttaaaaataaaataattaatttttaagtttaaatctcaaaatatcaaaaattaataataatctattaaaaaaataaatattataaatttaaaattgatatttaagtttaaatatattaaaaataatattttattttaattttttgt

SEQ ID NO: 360311 - DNA, 662 bp, Cannabis indica
caatcaatgatcctctatagacgttttacattgagtagggaaaaattacctttttaccctttaatgtattttatcattaaaacacttagctaattgtaaatgatattttaacaaactaatgtaattagtgaaatgagcgttctatcatttatcatgtttagcgaagctcaaaggaaaccatcatttcacttctaaataattgtagaagctataaatttcatatctataattaacctcccactcaattgcactaccgaattcctaagatgtaagtatgggctagtcctacaggtaagcaggtaatgaacaagtcaaagaacccatataatatagttaagctagaacctaaccatttcaagattgagatcatttgacctaagatcaactaagtgacatcgacttagaaaagacttaacaatatatttatgatatatttcctactttcaatattggtcaagtttgatgtatagacaatacatccaatacaagtttactttcttaataccctgaaaagcacatttcacttatccaaatataagtaaactacatcgtaaattatcaccagtactacaatgataaatcctggaactaaacagtttgaagcatataatcatgattatttttcactatgttgacaatactataatcacgaataacaatat

SEQ ID NO: 360312 - DNA, 1104 bp, Cannabis indica
tagtggcagccaagaccaaatcaaagcaatcacagatgtgcatcaatttgtccaacacaaatacaagatctcagatggcgtatgagttgatttggtccaccacggagtagagtcacatggagcaatgaggtttgggggcgtttcaacacaccaaagcacaactttattctgtggttggctgtgtagaatcgccttagaaccaaggatagattgcagcgttttttcagctgctagatgacccgaattgcagcctgtgcttactgctgctacccgagacacatggtcatttattttttcaggtgtcccttctcagcatgctgtctacaacacgttaaagagtggctgtcttggggagcctgaaccaatgacttaccgcagctgctcaaatggatacacaaggcaaaaattagcaagtttaggaagaatgttcttgcagcagctattgcccatttagtttattccatttggcattcccaaaatgaccaaatatggaataatcatatagaaggtaaagatgtaatcgtacaaaaagtcaaacaaagtgttaaacatagaatagaattattttggccaaaaagaattggtccaaaagatagagattggttttattcattgtaaaaagatagagattgatcatgaggtctttaacataaagactctctttctttgtaaatgattgtacaaaagtgttgtggatcaataatgaactcgttgatttatcaaaaaaaaaaaaaaaaaaaaaatagcacaaaagccataaaaggcatccaaaccataaaaaaattgtgcaaaaacaaaactaataaagtactaacaaaacataagtataaaaataaaatagatatttgaagtatataaataatttcaaaaatttgaattgtaaaaacaatactaatataatctctatatataactatcatttaaaaataataaaagaaaacaaggatattacacaaactaatctaaacaatttaatataaaaataataggaaattctatttgcaccatataaaatgataagtatactccaatatttaaaaaattaagtttaaaataatttttaaaaatcactcttaatattttttgaaggtttttttttttaca

SEQ ID NO: 360313 - DNA, 1036 bp, Cannabis indica
ctcctgaacttgtcctccagctcgtatatccacaattggattagatcctcttgctttggaccaagctgttggcaaaggtcaagtttcttctgattcaagtgctctcgcagatctggttgggagtaattgctggcagatcttgtcttactcataaatcgtgtcctactcatagaatttgtctttgagtggcttacggatttactagttcccatactttctcgatcgttagctcgttgagtactttctcctcttcgatttgatcgactatcggttctggattgccttaaagtcacaattgcttcttcacgctctgttccttcctcccgatttgtcgtatttcccccattacggcatgtatgagtcctcgctctatgggttcgggaagaacgttggtaatttctagcaggtgatctctgttctctcggttcagtcccaagatcctcctcattttcatgagggatttctcattcaccagtttccagttgtctcccatttggctgttcgtcctgattttcaaagggtgtctcattttccctgggtcggtcttcccgagccgtttcctgtctcctggttcgtgagccacgaggtctgcctcgtggtcttctcactccaggttcaagttgattttgggtattcgtaccctgtgccgcccttgctgaggcagcctcacattctaactcagtgtttcgatgttgcacctcttccaaacggcgtctcaggcgatgactttctgtttcataagttctttctccgacagattgggcacctcgacgattgagctcttcatccctcgtcccgggattctaaccattcccacgctgagttcttctctagtgtgttgtccgcgtactaggaccaacgtagtgtcgagttctctgggaacttgtggtccgtgcgctggggccaccctcgggttgaaccgtcctggagcgagtggtccttttggactgcatgttggtaggtcttcttaagcccatgggctctttcccaaaacgatgattggtttcctcatctggggtgttaacattttctggat

SEQ ID NO: 360314 - DNA, 676 bp, Cannabis indica
ggtataattacaagagtttattgttgagtcatactactttcactttgtctaaatatggtaactttgatctcagtttgattcttgttgatcagctcaaaaatgcatacatcacttttctgaagagagttgtctcttgcaaatgtagcccatccagaagaaaacctatgctctgattgcttattaatagttaaattcacatgccaatattcctcaccaacccaaagactcacaatttgtgcctttttctcaaaccaagagtttgcaatagccactggaatatactgcacaaataagaattaatatagtgaattatctaaaaaaaaaagcaattttgatacagagatgtcattataataatgtatatgaatgagcaacattttctacataccattgttggacgtccacgcacttgagatgatctcaatttcacttcgaagtaaggattgtttgagcaaaatttgctggctgcttcagaaactatgccaaatcctgaagatgaaagcatcttattattaagggttatttgcggcaaaaccccctaaaataggcaggtttttgcaactgacccccaattctaaaattttggtggtaaaacctcctaaacccaacttctgttagcagttaaccctttccgtccatttttgggtgttaaatgacaggttggaatgtctacgtg

SEQ ID NO: 360315 - DNA, 603 bp, Cannabis indica
aaacttaagaactgctctttgaccataaggccttgcagactggacaatcgtgtcctgcatatttccaagttgttacacttagttattgtaatgtggaaaatacgttaagtgtttaacaaactattcgcctcgtcaatatttcttataagtagcgaggtggacatcttgctatatgtagtgaagttgctttgaataacttcacttagtcctttaaaataaacaaatcttgtctttggatctgtgtattctaggtgagctggtgtctcgtcaatacagttattaatagtttatatccttgccttgcttaaaactatacagttagcgagttatgaatatactctattaattctatatttaatgagttattcctttttgcattaaatgatataatgttattatatcaagtggttcatattccactaattgacatgtgtcaccctctaaagtgtagccaaatttgggtataacaagattgaattgaaaaatatagtattattaaaagaagaataagtggttgaaataaacccttttatgtggttggccttagatttatttttgcccaatattttttttaattcatataattcaaccttaagccctagt

SEQ ID NO: 360316 - DNA, 500 bp, Cannabis indica
tcctccctaaataggagtttagttcaaaacattcataattaacattgaaacagaaaatagcatagaagaattaaagagaagagaaagaactagttgaagcaattgatctgggtcgccacaagctgctcttctagcctcctcctttgtttctagggctccaaatctgaataatccttaattttcacgagctccctcaatttaaaccaagtctcatctttaaaattcgtgacattacgaaactgcccaaaaatctcgtcactcgggtcctcgtcgcgactagcaatgcccccgttgcgacggggttaagcttcgttttcttcaaaatcttctctgccagttcccgtcgcgactggaatgttgcccgtcgcgactgaattaggcaatgacacgaaatttggtttttcttctcgattctttcaccgcgcgtcctcaattcttgtacatactttctttaaacacccgaggacctgaaacaaaagaatcaagcgtaaaatagccct

SEQ ID NO: 360317 - DNA, 632 bp, Cannabis indica
tttttaaaaaaatttaaaataaatttaacaaacatgttaaactaatttttgaaagagaaagtagagtttagtagagttctttatggatttgggttttttttttttttttgaaccaaattaatattgatacctaaatttaatttggtttggtctaatgtttatttattattgttttttataaatttaatcacacatgatacccaacatacctaattatcaaaatcaatccagttttttaatgaaaaaaacaaacaatacagaaattaagatttggtagctgataagtgaaatataaacccctgcaattaaatcacttacacatgaacaattaatttaatttatatatatatatatatatatatataagatttggtttgaattaattgaataaaatttgaaactatagattgaacaacccaagaatttaggttgaggatatggcccaaaaaaaattattattatttaagttagggaaccaaaatataatttattaaaatatatatttacaacccatacataatttattttttatttatttatttattattttttgttaaggaaggtatgtgtaatattatttcttatttattttttttgacatataaaatgtgtaatattctttgtttacttat

SEQ ID NO: 360318 - DNA, 794 bp, Cannabis indica
aatcatcctcgtcaccaactggcatagttgtaccttcatatgtcctcctccaatatcctattgtgtaatatggcaagcatagtgcgtacatgctaatactttgctcctaagatgcaacacatgcatgaggacaaggaaacttcatgcactggaaaaagccgcaagtgcaagtctgttcctgcaagtccactacgccaccggtctgaattgttcctccagggtgaacctgcaacatgtgaggtccacatgagtcaatgttcaaataccttgatttttcaaaatgcaatgccaagtcctcctccatttctggtgctaggggtttcgtccacttgtcagctttttcttttcgtgtagcaaaccacttttgaacttttgacctcagtaatgctacagtagcagttatcgggaagcctcttgcatccttagttgtgttgttgaagctctcagcccagttgcttgtcattacattataacgtacccctagaaagtatgaccaaacccatttttcaaatccaattttctcaagatattgtgcaaccgcaacattcattgtccgaatgttcttaagttctctatgaaactctgattttaaatacgtgtaggcacacgtgtaaatgtgattcgtgaatgcgtcagtcttaaacttgtggttgacgttcataataatgtggtggtagcatgcaccgtggtgtgcaccagggaacacaatctccaaagcacgaacaatgctttgatgcctatctgaaacaaaggctaagttctcaacatcaccaatcgtttctttcaattttctc

SEQ ID NO: 360319 - DNA, 614 bp, Cannabis indica
tcaatcaatatccaatccgcacaagtgcggattttgaattttccaatccaatccaatccgcaaagtgcggatattttatgaacacccctaatcaaagtttaaggggtagaattttgtatatgttaaaatttgggagacatgatttggtacatagacaattgttgtgttaataaaattgaacagaattggacaaaattccttaaatctaaccatttcaataattcggaaaaaaattctaacgagctgaaaaaattgaggaacacaagtactagatagtcatttgtattttaattaagggtgcgcttggatagccacaatgtaattagatttgtgtgtattggaggtaattacacaatttgacatgtttgtctgaccatgtaattacactgtaactgtgtaattggaagtaattgaggggttccaattacactctccaattctcatggccccccatgagaattggatgtaattacactgtgtaattactaaaaactttccatattaaacattagatactaaaaaatattattttcccatgtaattactaactattttgccaaacaagatattagaaattcatatgtaattaccacctcatatccaaacacaccttg

SEQ ID NO: 360320 - DNA, 511 bp, Cannabis indica
tacagttgcatcctggttgattcctagttaataatgggcgattcagctttttaaaacgcaataacaagatctagttctaattaagaaacgacatgttacgtataagaccgttttttattttttggtattgccttatagttgcattatcattttataatagtttacaaattatggaggaatttcagttgacgggtaccaacaaatagtagttatacaaggtaagatttatgtaaatagttacaaattagttttacaatagttggaaattgatctgattaaaataaaactgatgaaaatgcataaggatcacagcaatgttaatttgagttaagaaccatgtttttgcaagttgatttacaattgcatcatcatttgataatagttttattcattttttgtaggaattttttttggacagtagaaaaagagaaaacacttggacaaatagttagtttctgaaataaatttaaacgttttttaatagtttcatttcagttttattatagtttaa

SEQ ID NO: 360321 - DNA, 774 bp, Cannabis indica
tcagggtggaatgaagctcagctccctccaatcctgtggcccgagatttatacccctcctgggcaacgggacccagcgaaacgtcttcgagggtagccagacgcttaccgctcttcttggacgactttgaaccggacgcagacatgttttgattctaaaaaaagagttaagattccagcaattaggccccataccaaaccctaaatcaaaataagggaatgggggtcccctaaccgctggaaagaggccccctccagacttctgtcagccagaaaaccttagaaggatttcctggacaaaagtcgggtgcaatgaactcacagaagacgacattgcgcgtaaaagaaaaagaaagggcagaaaatcgagaaaaacaaagtcttctctatgccctagaagaccagtacacgaggagcgtatggccctttgcaaaaaataacaacaagtacgtgacaagggtaaccctaatgctagagaaggagaatctagacttgttacgtgaaaaacttaaaagaacaccttcccagaaacttcaaataccaaacccaaaaaaacatacagataagtaaagcatgccatgaacgcaaacagtaaagcaagggatgcgagaaacttacagtgaagtgttgaaactgggggttctgttgtcaatcaaacaaaggaaaggtagattgacagtggtgaatggtggttaacagggaaatttgtaaagtatttgaaggttttctcttggtctgaggattttttctctctgggaaactcgagcaaagttgg

SEQ ID NO: 360322 - DNA, 637 bp, Cannabis indica
atgcccaatatctttatgaaatttacaatatttgttaggatctcttttgctcctaaaattcctcataggctcgggtttgctgaaggctaccttctgctcatgtgcgaggtaaatattttcccgagtttcattaagctcgatataaatagtatacactggcatgtatttgtcatgcttcatttgtttctttctatcctttgacggttccctaattccgtcctttcttttcggaccagaagcccccgagttatcaattctcgtggaagcagtccctgttgaaacattgctaggtttacctctcgagcctatttttaacaagttcatttccttttgggcttcttccttctggataaacacatgaactcagtgatgtttcttaccagacatccttgtaaatcatcccacaactcgcccccggtgattaatggattagtggagatccctgcctgaagggttgtaagttgcgtgctatcatccaagtttctaaccctagcggcagtcgtgctaaaatgacttaagtacgccttaagtgtttcatcaggctgctgctttatattggttagcaaggccattcaggttgcctatccctagtggcttgaaattgcttcttgaaatccctggaaaactgctcccagga

SEQ ID NO: 360323 - DNA, 599 bp, Cannabis indica
attataatttgggattttgtgtgcatgctatcattttactatgttgctctccatatgcaatatatacatatttaataattaatcgtgttcatgagtatactatggatcatatatatggacctaacataccaaaatctcttgtcatgattatagttattttcttactcttcgactttcatcatcaagagaatcatatataaatcaaatagtggtcctcatcactactttatgtttctttgacttcattttctttgtcttacgtatcatgggaatggtgtgcacgtatatgatataacatcatgttctttgggttaagatagtactgtaagtaaacgatgaaccatgcttgcatttaaatttaaagtttattttttaaggtcaaatttaattacttaattagaaattagtcatattattaaggctaattagtaatttttccccccaaactttgacatgtaccaaatcatgccccctgaacttttttggtcgttaaaaaaattccccctgaactattgagattgttagattaaaggacttttgtctaattttagtaaaaaattttaacatggatgaaagatcaaggggcatgatttagtaca

SEQ ID NO: 360324 - DNA, 634 bp, Cannabis indica
tttgaatttttataattttaatttattcatatttacttattttattcagttaatatgtaagaattatattaaagtaatttataattcacatacttagcttcaagtttttttatactttatattttattaatatggtgtagaaactatgaaagatataagtaacagagttaattcgttttacttattcaaatgtttgtttataaaatactaagtaatttgcggtataaatacttaaatttaattctcggttaaatggttgcaaataaatacttaagtttaattttttgtagtaataatatctaagttatatttctagaattagggatattcattgaatcagatccaatagatttggaccaaaccaatccaatccaattatttattggatattaatttttgtcatccgatccaatctaatcgaatttcgtcatccaatctgatctgatcatgtattggattggatcggttccaacctttagatgcattgactggttttttattggattggattagatccatccaatctattttaactaccgtttaagttgattttattaaatatatatatatatatatataaaaaatataatttaaaacttaataatctaacatacataataaacattagtttagt

SEQ ID NO: 360325 - DNA, 462 bp, Cannabis indica
ttaacacgtaataactatctagtatagatatataaattgatcatcgtaaaatattatttttttggttgaaaagatcttagaattatttatttattattattatcaagtcctggggcaagaataataatattatatactcataaaaaaatcaggatgctaaaaaaaatcattgaatcgccaaaacatggcatttataaggaaaaatctagctagctaccatcaattaattatgacggtgaaattggtaaatataattaaattgcattatgatatacaaaacaagttaaaatcattgtaaagaattgatcgtattctcttgtgatatatctaagtaattaaagtattgttttgtactacgtgaaaattatatgaaatatgagatttcataacaaagttagaaaaatatggcatttttaagtttgtcactcttctatggcattttttttacattttaagattttt

SEQ ID NO: 360326 - DNA, 358 bp, Cannabis indica
ccacccagcccaggggcctaattttttttttatttattttaaaattatacattttttttatcaattttgaaaaataccacattttttctaacataagggcctaaatttttttttctctatggcccactttgtttcagggccggccctgatggcacatgtatactatgtttaactagaaggaaagaatgttgggaaattggaatgatggagagtttaaagagagagaggggtgatggatagaataaattgttattttctttaaagttattttgtcaaaaggaaagtattaaggatgtatataaaatttaaaggtaatattactaaattatttagaaaaatttacatcaaaaatataaaa

SEQ ID NO: 360327 - DNA, 635 bp, Cannabis indica
taatggaactatattattatatagtatgcatgtgttgtcttttcagatgtgttctgacaggttggcgcggtatagtcataatcgggaatttcgggccgaatcgggttcgggcccgaaatacaaattggattgatttaattggcattttttatttgttaagtgataatctgaaatttatttggaaataattgggtatgaaattactagaacacccttatgagggtggatatgtgtgctttgggccctaagggcattttggtcatttgacctctaattactatgtttggaaaagtgatttttgagggaattgataatttattttctggttgcttctccctctcacccgaaccctctttctttcccctaaccctctcaaagattttcaaagcttaattggtgtgaattgcttgatgttggagttggtttaagcttggtatttgggaatttagcttgattgtggtttaaatttgaggtagttcttctccctactcttcaattgttaatttgtagctgaatatagaattgaaaagcatgttcttttaagctttgagtgttctttgttgcatgttaagtggattggtgttaattttgttgaaattaagagtttgtgttgttgtatgctttattgttgagtt

SEQ ID NO: 360328 - DNA, 614 bp, Cannabis indica
ggggtatatagcccactttgtactattgattaacttgttctttttaaaagttaaatttttcaaaaattcattttaccttagtgttttttacaccaagctgtaaataaaaccgcaattgaaataacaaaagacgcgagtacccgtgtactgtgaatatgataacataaataaatatcatcgaaatgatatatgtgcttcgaaatattaaagacaataaagataaatttgtctaagtacaaatcgcaagtacccgcgtaccgcttaaagaagtttggcaaaataaaatattcataaagtaagtaaactaagcattgggggcagggcagttagagcagtggattcatctgcgactttactggcagcctcgtcagtgacttcttcagtattcgcagcatcagtgtcctcgagaaaaagatttccccacgtccttgggtctgcgtaggtgacatagctcgaaaagccttagccatctcagccgcctctgccccaaggatcgagaagtcgaagtctggaatcttggaaagagttgtatatatatagtcagagaccgcttggtcatactgcttctttccattctccttctcgacctccaagtcgcgagacatctcctcaat

SEQ ID NO: 360329 - DNA, 642 bp, Cannabis indica
tatcaaatgaaaatacaactcttttaaaataatgagctttagttataagaatattcgatctccactgttggtcctacatggttaattattttcaatataacctcgagacgctagacttcgtctcccttatggatggttatttgttgaagcatttaacaccgtaacgatctcttatgataagtattttgtaagttttcgtctctattatcggcataaatttaccctcctcgcgagaatgacttgtctatagagagcttgccgtattgaaggtggctcgcaatattatagtactcgcagtaccgaaagaaaggatcttgcaatattaactgaaagagacctcgctatattgagaaaggcacacctcgcatatttaataaagtcgcaatatcaacaggaaaaggtgcgaacacgcaccaatcaacagaagtcaacagtcaagcattcaaggatcattcatgacaaacgttacacatattttataacagttgtaattaattcgattaataagcctattattattatcattattattattttgtaaaggtcttattatgaccattatttgtaactgatgtctactacctataagtaggggcttccccctccattcaaagggggctgatctgaataaagaaacagagc

SEQ ID NO: 360330 - DNA, 640 bp, Cannabis indica
gactatttggctagggttaactttgaggaccgctcaaaaaatttgtcactcaattggtgtgatgtgattttattatatatatataaaaaaaaataaataaaaaattgtgggtttttccttccacatcttttttctagataaaatgtttaatttgaaattttatgcataataaggactaaaattggtccactaatttaaaactttaataaatttataaaatgggttaatttttagtaaaacccaattttaccccccaattacatcacatcggcctgaccttcaggagcccagaaatgagctaaaatcgtgtaccatcgggcacacatcggactggcatcggaccccatcgggcccgaccttcaaaagcccaaaaattgagctaaatgtgtgtaccatcagacacacatcagacaggcatcggcccccatcggaccgacttccaaaaaacccaaaatgaagtaattttgtgtaccatcggacacacatcggacgggcatcgggccccatcgcacccgacctaaaaaatccatttttgacagaaaactcataccaatttcaactctattaactaacaaatctcatcctaaatctaaccttaactaacagtttttacagaaaattgcaacatattaatctattt

SEQ ID NO: 360331 - DNA, 684 bp, Cannabis indica
gtagcgtgccttagcattagggcgttacactaaacttactaaacttactttttaaattttactaaacttaccaaccaacttattaatttaaataaaatcgaatataaaacaaataaagacacattattaaaaacatacattttacaaaagaacttttgtgtacaccttctctaaagtactaaaaatcttttgttcaatctgaaaacaaaaagtataacatattattaattacagaaattaattaaaaaatgctacaaaataacacaatacaatatatatatcactgtatacaatatatatacacattaatatatactatatattttatatatacatatatataaataaaaaaatatagatcttatatccatatatttagaacatctatacattcataatacgtatatatataaataaaacatatatatgtaaagattaaaatttctatatgcacaagtaaaaaaatatacctaaacatataaaccctaaaattttccatataaatatataaatttatacacagatgtatgtataaatttgtacccaaatatgtatatttaaataaatacagatatatactaattattctatatttatattattatattattacatacacaaattaataatatatatacacagatatttaaaaataaatacccaaattaatttataaaccctaat

SEQ ID NO: 360332 - DNA, 815 bp, Cannabis indica
gtttttgtacaagagtagggattgaaaatctgattgatggttacacttggcagccatctatatgcaagagttctttttgttagtaagctacctctaccaaactatagatttgatctggatgataagcgtccacagagggaggtatttttcataattttttttgggattttttcaataatatacttaaaatacaaattaattacaaaaatccgttaataaatctcaattacaataataccttgacacatcattaaaaaatacctcaattctaaactaatatgcctgaaacgaaaaataattccaaattctgttttttttaaaaaaaatttcttatgttttcaaaagtaacattttggttacttataatgtcgataagaaactaattagttacttttacaaaaaaaaaaaaaaaaaaacttaattttttgtatcatatactttgagatacaatttagttacctctaaaacttatttgtaaacatcttaataatcaaatatttattttaagttgtattatggtatcttattatgtaaaatacatttgggtaaccttaaagtctatttttgaaacgaatgagttatcatgtaatataataagctactatttttatataccatttactctgtatacatttttgttactttgaaatctatgtgtttaattttagattatattacattcttttattgtttaaatactttcacattactttttttttcttttataataatatttatgttaccttcaagtctatttaataaactaataagtcacaataaagtagatgtaaagtccttttttggcaagttaggtg

SEQ ID NO: 360333 - DNA, 649 bp, Cannabis indica
aaaaataatgaatagcatcaatactacaacatagtatccatgcaaatttcaataacatcatcttctctccaatagtatagcatcttaatattttgccacataatatgtctacctcaccaagcatcatctaaagttttaccatgctctaatgatatgtgtacctaaaatatactccaaaatattacaccctatgaagtattattgcttggtgctaagcactttttataggtgtcgtctcacaattacatcattactcttaatgaaagggtagtgattcttttaataactcttttcaaagtagctttcacaacacaattgacattaaaaaaatgtctacttttactaattactctaatataaacaagtcaatcacttttttcagagtactcgatcgaaagtattaataaacaatgtaaagtagcttctcgaaaatggttgagaagtttaattgtatcaaattttttgaatgtagagggatttcaatgagaaatgtaaatccggtaagagaaggagaaggtgttgttcaagcttcttgccataattttggattgactgaaaaaaaaaaattggttcatgttcataatcataatcatagtatagatagacctttcatttataatatatatatatttttttaaaaaaatagatt

SEQ ID NO: 360334 - DNA, 754 bp, Cannabis indica
agatcctggtaaaataaattccaacaaacatcagatggaaatcaccaaccctctcttcaggttcatcagaaagaaactcgcgcaaacctttatacggagaataaggtgaatcaaaccttaaaaggaagagcaaggtgtaacaccctaactagcataggcgtgttagcgtgatttttaatgtactgtgcaactcgttgctaattaacgaggttattggaaaatacgtgaataattaaaattttgctttttaatttaaaatagaacaaataacttttataaacttctgggattctgtttacaaaatactgttacaaaagtttactacataattacaaaatacttgtcgcctagcgacaaaactcagaacccctggtgtcccgaggattgtacactccaggcctaaccgcatcgacaagtacaatcttcacctgctcgctttcacggctcctcagctttagctttgcccttacttacacatagcaataacactgtgagtcgacagactcagtaagaaaagcataacataataaacatactactattccgggttataatcaggcgcccatacacctaaccataacccaaactgaatcaggatcgatcttgacaagtatgactaactgcgaatttagcctatactcagtactctaatcgcactaatgtggtagcagttaaaccatactatccgatagcctagcatatatctaatggcatctcggtgcaactctatgtacacctactgttgccctgatat

SEQ ID NO: 360335 - DNA, 690 bp, Cannabis indica
gcttttgccattgccgcatcttgatcagtaagaatagttttggttttttccctgacatagcttctacaaatgtgtcaaataaccacataaatgtttcagtagtttcatcatataacaatgcagccccaaatatagtggtttgtttatgatgatttaccccaacaaacatagcaaaaggtcgacaatcatgattttttctgtaggttgtgtcaaagctaacaacatcaccaaagttataatatgattccttcattcgtgcatccgcccaaaatatatttgttaacaaatcatcttcatccgcttgcaatgcataataaaaattaggatcttttgacttcatcttttgaagatattcaagaacaccacctgtatctcctgcacgcatttgaattgttcttttagtgcgtatgtaatttcgacaatcatccaaaataaatccaagattttcgtgtcctactggctttaggagcaattcctgaattctcagccatttcaattttagatgcttgagcaggggttattcttctttgtgacttatgtaagtgactcatattagggcttgaagtcacatgtgtatgctctgcattaaattcaataacttgattttttccaaattgatgaagttttatcttcatcctcgccaaacaacaaaatcttgttgtagcacgatgacatttcacattatcattc

SEQ ID NO: 360336 - DNA, 631 bp, Cannabis indica
aaattttaccatccatccgacagcagtatatgtatttgcagaacctacttcactaaagatgaatatttaagatattcaaactcatctaacatgcatattattccacccattgatccgactgcaatacaatatatcgcagaacctgctaaattactagttagtaactaactatagtatactaaatatcatttgtaactgactagtaattaattttactctaaattactaactatataataactaacgctcctcacgcatccataatttatccataacaaaaattaacaaaaaaatcttgacaacaaagtttaagagaaacttatatcaaataattttatcctaattctactaaaatttcgcaacataacgactacaattgaacattctcaaaaactttaaagttattaataacaacaaaaaataatctaaaacaagaaaaaataagtaatgatgagttagatgatttctaatcatcattgtctttcccattaatatttgaatttgatttttatgagtcaagtgtgctctaggataatagaatttaggattctagttctagaaaaataattatctttactttagtttaagttttatgatacatctgtaacgccccgatttcccgagacgtcac

SEQ ID NO: 360337 - DNA, 575 bp, Cannabis indica
atattgcaaacccactccacttaaaatttaaaaattttaaagtaattgattgaagttgtctatatacaatgtaaagtcgacctttcttgtcagaagagaaagtcaaaagtagcagttataaatgagatttaactcataaagacaacactaagctacaatggctcgcattttataggaatatattaaacgaggtaccaagataccttgaaaaaatacttgacctaaggaatgaatagaaggcctaactattcatacaagcaatcaaaaatatacaaattaattcacaagatgaattataattatttacgtgaagcagaactgataaactgctcgcgaataaaaaatatggcagacgataactgctcgcatgcatagtagattattaactacttaaatagtatcaaaaggaaaaataagatcaatggaaatgcttacttggaatatcttaagtttgataaaaatataattgtttaagttgtgaataaaaacgcaaacaagcaaatatattaagttcaaaggtaaggatgcgaggcaataaataaaagataaaataaaagcaaagttggtcatccaac

SEQ ID NO: 360338 - DNA, 521 bp, Cannabis indica
gagaatttttaaaggccaaaaaattcagggggcatgatttgttacatgtcaaagttcgggaaaaaaaaatttaattagccaaatatatatacttagaatttaaagtgtaggggacttatttttttttttaggatggggtgtatttgttttctacatagtataaaatattaaatatggatacaaatttatatttttatagcattaaatataaattaaagtaaaaaaaaaaaaacaaacagacaaagaataaaaaagttgttcaaaaagtaaacattaaatattaaaaatgaaaatatccttattctctatatattatgatgtatataaattagcttaaccattagcattgtgctataaatatatattataattaactaaaaattatatatacaccccttacatctatgtgggtttgccaattgtatttatatgctactcatggttttttttttttttctttctaatatttgtataatttttatataggctgaaagagaccctactcctatccatcgtgctgc

SEQ ID NO: 360339 - DNA, 807 bp, Cannabis indica
ggtcctgtttcggttttgttccaatttctgtctcgggtccgagtttttgtttgagtcctagtctggaaatggttccaggtttgggtcttggtacgattccaagatctacacaccgactacgggttgggtccaagccccgagtcgtgggtcaagatcctgatcccaatctattgtcccagtctcgtttcgattcgaatcctgcatcccgttctgtgtccgtgtctgggttcgggtctgggatcgagatcggggtcaggtcttgggtcccagtcctagtccttggttccgattctggctctaattttgagtttgggtccccaatctaggtctggttcctaattctaggtctgagtctcctatcccagtctgggtccttggtccgggtttcggtccaagtccgtgtcggggttcaagttcgtgtcctgagtctgatccgagttttgattcgggtctgcgtcccagtccggcctgggtctaggtcctagtcagattccagttcctggactcaaatccaaactcggactcggacccaagtttggggtacgggtctacgatcaggtcaatttcccaaatggcaaaaggccaaggactttgcatctgagttaactcgttgggcggagctcgaggtatctttgaaaatctttgttatttatcacattttttaacgtaggcctttgaatcttcgatcattttcggccagaaataaccttaccttagaattttcttagataaactctgcccggtggtgtggtttccacaaaatccatcgtgcacttcagacaaaattcgtgcagcttcttcttgggt

SEQ ID NO: 360340 - DNA, 828 bp, Cannabis indica
ttttggaaagaacataacacttatccaaagtgtaaatacacttcatcgctgattatcacatcagtgtaaatctagtgcactgttgaatcagggacattgtcttttgaagcatataatcacaatcacattccactgtgtcactgtaattgtgaatgactatatattctggacttaatagattttgtatatattaaaccataaacatgaaaactacatgtaaacataaatgacttctaattttttattgataacaaatcagattagattgaaatgggttttatttaaggcataaaatcccaacagtaagatatcttgcaaaattaaaggatgtttaagagatttagtatgaatagaatttgagccaacttttagaatgggaagggtagagccattaccaacaattaattttgccttgcctttataatctgtggaattgcttaagttgtttgagttattggtcatgtggtgggtggcaccactgtctatatacgaagcaaaggacaaatctggtgtagtcgaggtttgtgacaggtgagcttgagggttttcagttggggtggtggaagttgaggctccattttcagtaggtggtctagtgaagttgatgtcgaatttgtgatagcatttcacaacagtatgacatgtgtttccacagagttgacagattggtctgttggttcctctgcccctaccaccatagctgttgttgttagttcttcctcctcggtatgatttgtaggaaattattttaccactccttccgttcagatatccagcccttgattcccttctgtagcagaccattatcaatatccgaacctggatctc

SEQ ID NO: 360341 - DNA, 606 bp, Cannabis indica
gtttggttttgtgtaatgtaaaaactaattaaaataagagaattaattgctaaaaagcattagtggtgcctagcaccattctcggtgtcataccgctattgatgtaattaagtatatatcgggtctcatataatttaagaaaatagttcttaagaaatatcgctaaccaatcgtgggacgtcacctagggttgtaaatcggtcggtttgtgcggtttatcctgtatattttttaacccaatctaaatttcgggttgctaaaatttaagtgcaatccgtccaatttaaaaagaaaaaaaaatctataaaccggccaacggtttgggcggttggttggtttggtcgggttaacccgcctaaaccggccaaactttttttttttaattttaaagtcaaaatcaataaaaattaaaaagataaattaaaaatatcacattccaccaaagtacaacaccatatatatgactttaaaactaataattaagtatataactttatattattatatatttaatcatttatgttatatataataaaaactaaaaagttaaaaaaaaaaaattaaaggtgcaaaatcgggtttcggtttaattgggcgggttggacc

SEQ ID NO: 360342 - DNA, 510 bp, Cannabis indica
atatatatttatcatatttattagattttttttttgtatgttgaatttgtaacacttgattgttttgtgtatttatttttatgatattttgttctattttattatttagaaatatcgttgttttaattatttaaaacttttggctacattacactaataagaatagtatgtttatgaagtattaagcttaaataaaaagtgatacttagtttttacgtatttttctttatatttttaagttaatattaaaattttagtgtgtaattggatatccaattaaaaaaccgaaccaatccaattagtaattggattggattggattttgaggtttaattgattggatcggatgatgttccaaatccaattactaattggactgggtcggatgacgaaaaaaaaggttggattggatcagatgcccacccctacatactagtgtgtaataactaaaacaaagcataaaaattgatagaaccaatttatttttggggaattaccttatatactgtt

SEQ ID NO: 360343 - DNA, 536 bp, Cannabis indica
aagtaataaaattaaatctgtttctttattcataattgagtagaaaagattacattgaaatagagttttatttagggcacaaagcccaacacaatgcttcccacaggtctcaatgaaagcactaaaatattgaccgaggtttccggcaactaaatgaatatgtaataatgagagcttagggataattaatgcaggtagtttttacgtggttcgggcattaatgagtcgtggtctacgagtctctgttattaatgatagagtatttcttacaaagaatgttttcgtgtcttttttctgatccccctattaattttagtgaggggtattcatagcaatttgtgggaagaagaaaaggagtaacttgtctttaagtgccaactatgtgatacgaaccacaccaacagttgtgatgaaacctgataccaattatggtagcctataagaattctcaaaattcagatgtggaaacgcgacccaatgcttagttaagcatgaaccttggtatgaaggaagacgccacaaacggtgatggaaat

SEQ ID NO: 360344 - DNA, 627 bp, Cannabis indica
tagagatgagtattagtgatgatttctgttaagataagcaaagttgtgttaattattaaatggtatagtacttttatgagttaaggtagaatataataataataagaagaagaagaagaaaaagaaaattgttgcattctagacacttgaatttaattataatcaaagaatgtgaaggttactgtttgggtgattataaagtttgaactaaataaattaaagagttaattggataataatgatcttaaaatataatacttgttatttagaaattaaataattatgtgagtaattaagttatatgtaaatagataatgtttaaaaattagatatttggttggtttgtatcatataggtctagccatttatttattatgtaaataattagaatatttcaaatcatggtttttatttgaaaagtatatagaagtagttttagttaaatgatgtcaaagaaagtaaatagaattcggtgatgtagttaagatatacatatagttcagttgaagtttttatttgaaagtaattaaaattttcatagaatagtggaaaatatttttttaataggttcatttacttagtggcagctgaaggttatgataggagaaataagaatttattattgag

SEQ ID NO: 360345 - DNA, 774 bp, Cannabis indica
aataacagtataataatatttaaatagctataaataattttataattaaacgtgattaactgctaatttccaaattaaactaagtggtctttacagttaccccccaagttatcgagcaaacttatgcctcttggtcacttatatttcacatgttcgatttttgtctattcggcttttgggttcgaacagaccctttgtacacatttgaatggtaaattcataaattgctaaaataattgacacaattagaatgataattaatatctttattcatttattggtcggaataattttgttaccattgtaacctatatttattgaattatgaaagctattacatcatctaattgatctttagctaatttaaacataaaacaattgcacttcttaaaactatactttaaagatggtcattcgacctgagtactagttattttatccaaacttttgagcgggatctgcccaaaaggtcatctacttaagagtaaatgttctagcattgtgtacttaaagtagtcatcagaccttgtacacttacttgtagtatttccttaaatgttccccattccaataccttggtactacaacgagctccatatttttgtcataccgtcctagattatatgctctagagtctatgactttgaccacctgatataatccttctagttaggtccaagcatgtcagtcgtgttgtcttttgtgttcaggaatactcttctaaggaccatatctcccacaaaaaaatttattgccctcacttgcttgttgaag

SEQ ID NO: 360346 - DNA, 558 bp, Cannabis indica
ataaagctaataaattcaaaaataatttaaaacttaataaattaattaaaaacttaagaactaaaccaatttttagtaaaaaaaatgtgaaaaataactctaatttctaaagttatcaccagtgccgaacaagattcggccgtcccgatggaggaggatcgtgagggatatgctgaggttcaggaggttgaggagctggacgatgcgcgtccgggcagtccttccgaggcaaagggagaggaagaggttgaacccccaaataacagggagtacaacgaggctgggcagccagtcgatgctgacggagacgtcctggttgagggcgtggactatgtcagtgaggagcttgcttcggcggttcctcataggaggcagggtgccttgggcgccaggtgggtaagtcctccatccaagattacggaggcgcgccttcgaactctcgactaggacggtacttgggcgagctggactactacattcccaccacgacatcgtgccacaaccctgacaggggatgtgcgcttggtcggggtcccatggccagcgaagggcgctgat

SEQ ID NO: 360347 - DNA, 691 bp, Cannabis indica
ggacttttgccgcaaatttcccactcatttattagagaacaacctaattactcgaattggtcttggtagttattgatatcatttccactgttacggattgcttagtggtggcggttgaagggattcacagtcaattaataatgactttattttggtttatttagtttacagttttgctagagttttatgttttttttagagcatgttttcaatgagagtgatgttcttactgagatcatttgcagtcaattaataataaccttattttggtttagtttcatagttttgctagaatttcatgttcttttttagagtggattttcagtgggagtgatgttcctactgaggtcatctgcagttaattaataatgacatcattttggtttagttaattcatagttttgttagagttttgtgttcttttctagaacgggctttcaatgagagtgatgttcctattagagccatttgcaatcaattaataatgacctcattttaatttagttagttcatagttttactaaaattttatgttctttttttagagtaggtttttaataagagtgatgttcctactaggtcacagggccggccctgggcataggcgggctaggcctgtgcctagggcccacctatcccaggggcccaaaaaaaataattaccttttaaaattataccatttttttattga

SEQ ID NO: 360348 - DNA, 818 bp, Cannabis indica
atagggcgagcaagtagagcccggggctgccgaaccgatccatcgacactacctccacctccgcagaattcgggggaatatgcgggggctggtaatgctaatcttcctgctgactggtagctgatgttccaagaaatgtgaagtgtcatacttcgtcaagaagaagagttgcaacgtttaaggcaacgttaccaccagcacatgtgccagtggtgggtaaccaagggtatattatgtcgcatcgagattctgtgattgagcgattcgtgaagctacaacctccgacttttctgggaggtattgatataattaaggctgaccagtggatgagtactgtttcccgtatccttgataatatgggggtgacgggaactgagagggtgaatcgtgcggcctttatgcttcaagaccatgcccgcgtctggtgggacatagtgggtcagacccgggatgttagtgtgaggacatgggtagaattcaagaaactttttgaagaaaagttttataatgttgctatgaggacttcacatcaggaagattttgtgaagttgactcagagaaagaggtctgtggttgagtatactctggagtttgatgtccaaatgtccaaatgagctagtgatctagtgcccatagatttcaccaggaagcaaaaatatgttcgaggactgaatgctacaataaatcgggacttgaaaattaccacatcacatgacactctgtataagagagtggtagacttggtcttaattgctaaggaggccgagtagcaagtaatgaaagagcaggcggcaaaaggatgtcatcacggcatcaaa

SEQ ID NO: 360349 - DNA, 651 bp, Cannabis indica
ggaataatattatcatacctcgttacacttatcaagagaacccatgtataaatcataataatgcattttcttccaacgttgataaagtggtagattgttgtagggtagcgtctcattctacacaatctaatatattcatgttataattttcttccaatataattatgaatacaatatatctattagtactcacagttatgttagttggaagataccatcttcttgcttttccacaagttttggtcctcttgtcattggttaataaagtagagaccatagtcagaaactatataatgaaacaaaattaatataaataatgaaaccatcaaacaccttactcataatataatcattacattaattaccgttatttctacttcttttccagggccaaggtatcgaaaatctaatcataaaagatgaatgtcactattccttacaatcacttgcctatacatgaaaaatgggcatacatgaaaataaataaatttagggtgcgtttggtaacatttttttaatcagttttttatttttaaaagtagaaaagtgaaaatatttttcaaaatcatgttctataaaactgtttttagttttcaattttttaattaagaatctaaattttaaaaacaaaaaaattacttttaaaatttt

SEQ ID NO: 360350 - DNA, 912 bp, Cannabis indica
gaatgaacaacaaacccataaatatttttttatactttcaaaaataaaaaattatatttaatcatctaacttacattaattaagaaataatttatttattattttattacataaaaataaattaaaaatagaagtttgcttatacatgtataagtgtatataagatatttaatttttttttttaaagaaaaaaaaaaaaaaaaaaagtaaatttgcggcataacctccttaagtgtttaagtttttgtaactaactaacccaattctaaaattttggtagtaaaagcctctaaattcaagctctgttagtacttagccctttccattcatttttagttattaactgtcatggtggaatgtccacgtctacacagtgtacacgtggcacaattttattggtccgcgtaaataaatatttaaaaaataaaaaaaaattaatattttaataataaaaataaaaaatatatttttctttaaaaattaaaaaaaacaatttttaaaaaaaaacctaaattctttttcttttcttttctttcttcttcttcgtctatcttgatgcactcctcctcctccttcttcttcttcttctaacatcaccaccatcaacctcaacaaaatcacaactgcccaccaccaccacctcaacattttttttcaaatccaaacacaatcaaagaaacctaaacattaaatacttgccacaatctaagatccaaatttcaccaaaacaaacaaacccaaatcaaatccacataaaaaaatctcaaatccaaacacattgatctctcctgcgaacagcccaggtgaccatgctggtgtagggacgaagcaaggttttgtttctcaagcgattcgatcgagctccgtgacataaagctggttcgcggcggactgagaggggacgtcgaaggc

SEQ ID NO: 360351 - DNA, 1355 bp, Cannabis indica
aatataaagtttgtcgtgtcccagtatttttgaaaacatttggtaaaaaagcagtatttttgtaagtttccccatatttttgtccttgtaattatctaattaataatagattaattttcttattctttaataaattcatgtgaaaaatgttttgaccaaaaatgattttcctttctgatcaaaattatcagtcaaaagttcttgttatttggagttcttcctttcactgttcttagtgaatgctcttgtacgctattttctcttttttatatatgctaactttatttcaatgtagctacaatctcgcttataaattatcctcagttgatacatttagatgattattttttctttaatgtaattgtgtatatttatttcgacttaattctcaatgtcggcattttgtattttggactagctcgttcacatgttgatgtgtctaagcttaagcttgatttttatctcgaccaaatttttgatgtttaatttaataggttcctttcctaatgatcgagatactatgggggttgctcggggtgttaggggtatgtcgatcttccagttcgctaggtcatttatcagattgaccaccttttttgtattcacgtattttggtatatccccctttgtttttaactaatctgtcccaaacataatttacttatacatcatgccttagtatctcggtttttccttatgtctttctttggacttgagcttataaggactttgtttttacttgtctcttgggccctttcggttcttttaggtttgcgagcctttagttggcccatgaaaatcttgttagggtctatgccttaaaaaacctataaagtatgtggtatagtttctctaaatgaaaagatctccgcaaacgtcatttctagaaagttgttcactcgtggttgccaatcctgaaaggagtcttgtggaatgatagtcaagtcggaatggagttcccaaatgactatcatgtccactccgggtctagttctcaagatacctagttgttacacctaagattcggctgccacctcaatgaaggtcacgtgtcaagataaagggaatgtgaatcgatgccattgcttttatggaataactcattaattacgtaagtatcagagtatatttgtaacccgctgactttaaggtcttaggcgaggaatcaatgtacaaactggcacttagtatattagcgagaaaccatatgtcactaaatgtgaatagcgaggcaccaaagaaagcgacatgtatcaatcatggagatgcttagcgtacaataaacaaactaagtgtaaaagtcagatcggctcaagaacacgtaagcgaggtgaccatctcgttatgggaagact

SEQ ID NO: 360352 - DNA, 553 bp, Cannabis indica
atattttcaggttcagcgaccctaaaaatccgataagtggataaataagtgtaatttgttaattacagagatttatttgaaatacgtggatataatatgagttatttgtgaactaaaaatattttcaggtttggcgatcttggagacccgataggagggcaaaaatgtcacaacagttttagttagagatattgatgggattatcgggataagttgattttagaaatattgaggtattttaggatactcgaagttggccaaataccttagaagtagagatttcttaatggctaaaaaataataagattactattaataatcaaatttttattaatattatattatatttttagtttattattaataatatattattattattatataagtttcagttcgtacgtatattatatatatattaagtttaacatatataacagtaaagaaagaacgaacgaaactcgcgttctcttttcttcgtcaaaactttctcctcctatatccattttcttcactttttaacccaaaacctagcgatctaagctctggtagt

SEQ ID NO: 360353 - DNA, 538 bp, Cannabis indica
accagtgtactgagcaaatttaggaactgctctttgaccataaagcctcgcaaactagacaatcatgtcctacatgctcccaagttgttacacttagttattataatgtggattatacgctagatgtttcagcagccgactcgcctcgtcaatacttccttacatgtaacgaggtagatgtctcgatatgcattgtccatagttccctcgggattatgccttccgaggcaagatggtttctcgttaatacataaattgatagtttgtgtatccttatctcacctaagactatacattcagcgggttatgaatatactctattaattttatagttaatgagttattctattttacatttaatgatataatcatcattatatctgttggttcatattccacgagattgacacgtgtcactttctgaagtacagccgaatttcgggtataacaattatcccttaaaaagttcttttttaataaaaagtacattttaaatgattacaaagggtattttggtcttaacccaatttgaaaaatt

SEQ ID NO: 360354 - DNA, 960 bp, Cannabis indica
acttatccaaggtgcaagtaattatgttgtagattatcctatcagttaaaccatgtgtactgataaatcataggaatatatttaatcacataatcttgattacttttcactgtgttgacaacagaataaacaagaatatcagtgtgataaggatttggatgaatttataaaccaaataagtatataaatgatcacatgaaccaaataacacattaaatctgtttctttattgataattgaatagaaaagattacattgaaatagcaattcatttagggcacaaagcccaaaaactaaaatatcatttatacgtagctaagtgttttaaggataaaatacattgaagggtagagcgataaatttgtccctgttcgatgtagatcatttatagaggatctttaactatttggattgtaacaatagataattcataatgtatctatatcttggtacatatagagtgttctatataattaagagtgtaatttcgaatctatagtggcgcaaggaggatttaataagttagagaatttacttagtgacttctagctctacttatttgaagcttgattatataggcccatagtccccacactagttgagataatactttttgcagactcaattaattggttttaatcaattatacctataaaattagactgtcttatttatgaattttcactaagcaagggcttaattgtgaagaaaataggttttggggtttaattgttaattaagagactttgtatggtttaactaataaataaaataaatggccattttatttgataatagataaatagtttgacatttataggattgaaattagaaaatacggcattattgaaagaaggataagaggttgaaataaagtggcaaaattgtaactagtgaggcccatatagtgtggccgacccacttaagtgtattttttgcccattattttattctttttta

SEQ ID NO: 360355 - DNA, 675 bp, Cannabis indica
aagcaaatatgccgaccatactcaacagattaaagaacgattatgtttgaagaaaagtcagaactcaagaagtcaaaaaatttctcgacttagggcaaaaaagttcatgaagcttagaataagcaagatgaaagatagacgttacgcagtgcagaaacaagtgttatgactgtaaaattgcacgaagacatgatagagaagaattgcagaggcttctgggcctagggtttcctaaacatttttctacagcaaagtagaggatgcatttaacatataaagatgcaaaaataagcataaacgaaaccagagacttactcgacggtcagatgtctgggtgcgagcaacgtcaattcaacaagcagtttgtatgaaggcgcttcggcaactttgaagtcaagaatctctcttttcgctctgaagcttacttagcaaagaaaggtgatgaaaatgagtttatgtgccaatgatgtttggtatttacaggcaagtcacgaaaagagataatcgtctcaaagaaacctttgacgcctcagtttccctccttaaaagcaaatatgagaaatcgaaaataatcaagtgcaactgtcagccgtggagagagaaaattggatttcaaaatattaagtgtcagagcatttattaaccgaaaactaaagggacacccagtcagcctca

SEQ ID NO: 360356 - DNA, 694 bp, Cannabis indica
tgagtgttttggttaagtagcttcgtattaagtcggcagcctcttgggtgcgacgatcttggtcgtcttggcgcctcctcatctcacaagcatgatcttccagccaagattggaattctctcctttagttagcgagactttgagtcaaggccactcgagcttgattttgcgcttggtgcgcagtttggaactggccttgcatctggcttatcgcgtctcgaagctaatccatcttggggtcaattccctcgatgtctgcatggcgttcattctgtggcgtaaagacgccagggctgcggccaatctgagcttggccagcaccatctgtaggtgggacaaaatttctagtattacctcttccggtggcgccatcagtagcgtcacctcctgcgacaatggcattggtggtacgcccagtagttgtctagccattgactacagtttgacaagtttctccatggccagcagttggagcggtggtggtagtgccgccattccccgggacgcgggggtcgttcgtccatcgtttccggcgaggttgcgttactgatggaacttggtgggcgactttccatctcttcgtcaggtcgctcttgagatcttcgggttaacaccattttttcggttgaaaacttaaacgattttggctaaagctctcaatgaaaacaccaaaaactgttgactggatttttta

SEQ ID NO: 360357 - DNA, 515 bp, Cannabis indica
ttgactttttgagaagcactcatcaaagagcggcttccgcccatagagagtggcatatgccctcacaaatgggtctttgtcatgaacgccctcaagcttggcgagatattgaattgatgagcgcaaatgttcaacttttcttgaattcgatgaatgcacatgatggatgccaaggtaccatgccaatggtggaggaggaggtaatggccaaaaaggatcctcataaacatagtattccattaccatgggctctttgacttgaggaatgcaaaaatgctcttgctgaattttttcaaaaactgggcagttttgctgtgataatgctacagcattatgagcagcaataaatgttgaccaacttggaatgcttgcttccttatcttttatttcactactttggattgaagtgagctcttgtaattgctcaaaattttccccaagtatctccaactcatcaccactcctcaaaatgacattttcattttcttctttctcccttgaattttccatatcaa

SEQ ID NO: 360358 - DNA, 838 bp, Cannabis indica
ccacctttccctttgggtaattcttcgaataagtcgatgccccacattgcaaagggccaaggacttgtgatggagtgcaagtggctcggaggttggttgacatacatggttatacgctgacacttatcacatttcttggcgaagttgaaagcgtcttgtcgcagcgtcgaccagaaataccttgccgcatgatttttaaggcaagagaattacctccagtatggtttctgcaaataccactgtgcacttcacggaggatataatcgcactcctccccattaatgcatttgagtagcggttagttgaagcttctgcgataaagtcttccatcataaatgacatatcgagcagctcgatatcgcagttttcttgcttttattttgtcttcaggcaagacctccttttccaagtaattcaatatcggagtcatccatgtaactcctctggcaatgtctatctccattacttcatctcgactcaccgttggatgagttaatacatcgacaggatttacatcgagcaattcagcttctcttcttgaggccaagcgggccaaagcgtctgctcgtgagttatgagcacgcggtactcgagagacaatcacttttttgaatttctacaacaactcccatgttatggcgaggtacttagccaaacgcctgcctctgaccagatattctccatttatctgacatacgacgatttgggagtcgctaaaagcctataagtactcgatcttcatctctagggcgagctttattcctgcgatcaaagcctcatattcgacttcattgttagatgcagaaaattcaaatcgtaaggcagcgtgtaccttaaa

SEQ ID NO: 360359 - DNA, 961 bp, Cannabis indica
tagaaagaaataccttgtttctttgctagaaacttagggcattggggtttccagtggcctttttcattgcaatagaagcattttccttttggcttatctccgggattagcaacctttttctttttaactattttcacagcttgaacaggcttcttgctattcttctacttcttcttgttgttgggtttggaagtagaggcaatgtttgcctcagccttagtcgccccattagcattgctagaactaggagctttagatcctcctttctgtggtccttcaatcaaattttcaaatgtctgaaggtttttgattaactcatgaaagtcaagctccaacttgttcatgacatagtttgaagtgaatggcagaaatgctggagtcaaactgttcaagatcagactcacttgagttgtttgatccatagcagctccatgattctcaccttcttggaagtaactcgtcatctggagaaggtgatcatgcacgctctgatgaggtctcatccgtgcattgatgaaattctctgtcgcctcaaagtgagcttgaattgatgccatcccgaatagttcagttaacttgttcaagatatgtgcagccgtgagagtgtttgcaaaccttgtttttaaggtgacaaccatgctggacaacataaagtatcgagctttgttattggcattttgccaacgctcgaacttttctttcactaccttggttgcattctcacccggctgctcaggagcctcttcagttaacacaaacagggcattttcaccaatgagagcaatgtgaatgttctctctccatttggtaaagttagatccattcagcttattatcagtcaacagtgacaccatggggttggtcattgtcatgttggatactacaaataacaataaatagaaatcaagtaaggttcaacacaaaatcacattcagaaattattagcacttagcaagtagga

SEQ ID NO: 360360 - DNA, 696 bp, Cannabis indica
tattttaataaatcattaatgaaaaatctactagatttaagttgctctaaaattaattaaaaaattaattttcaactttaatatatttttcaaaaaaaaaaaaattcaaaaatatctgcattatatataatgcattttgaaatttatgggaaacgattaaataaataaaataaaatatatttgtaaaattattcttaagttgttctgaaattaaaattttcaacttaaatataattttctatctaaataaatatcctcaaagtaactaacatttaagtgtcttgataaaatctacttaaatatttaattttttatttaattaaatgtatatattaaatataggaaataaataattaagtatctagaaaaaaatcaactgaattattaattctaatgtaatatttaaggaaaatattctaatttaagttgctctaaaattaattaaaataattaattttcaacttaaacatatttttttattaagtcaatatcagaaaatataatcagttaatagaaataaccctctagaatatatctcattaaaataagtgtttttttaaaattaattttaaaataatctaatgaaaataaatttcatatattttaaaactaattatgtttctaattaaaatttaattaggttagactaatataattaacctaatacaattatttaaataaggcaaatgggccttc

SEQ ID NO: 360361 - DNA, 525 bp, Cannabis indica
atgttattcaactaattttagccgttttgtttgtgtcagaacctttttcttattgttgttgttgtataatgccttcaacttagaaagaagaaaaactatgttgtttgtgttggatgtgatgtgaaaatggttcgagtttctaaattttaacaattaggttgtgtttggaacattgagttggattgaataatttttataaggtggctttgttatgacattgaagataaaatattgaaaaaattaatcaaatattctaaataattcctagtatatgataacttgggatttttgtattcaatttaatctccatttacatgcatccccattcaatggtaaaacaaaactcattctttcttctatgcttgtttgtttttttcccatctaattctaatataagggaaatttcattatttgcccttaataatataacctgtatcaaaatttatacccttttataatttgtacaaatttattcctctaattttaaaagattcctaaaatgccccctaaattaaactttccctc

SEQ ID NO: 360362 - DNA, 545 bp, Cannabis indica
tccataaagctacaattctgttattatagtttcgtagcagaattattaagaatgttgctctacacataacgatccaatatatcatcaacaaaccgatgtcattcaacagaccatatgtcttctataaattacataaactacatgtaagctaaagatcgtttaaggtcttcttacacatgcgagctagccagtatacaggcttagaagcacacaagttaacatactctcaggaatgagctacatgcatatcactataaaagaaacatttagtaatccatccaactaaagaaataggaataaaatttactatcaaaatcactctttctaagaataactcgagaacaaaaatcgcttaatccaattctcatatatatttttcttttactcgcttaatcgatcatataccatttgtaatgctcccgcttcaagcctccattggacccttacacccacagaatgaatgactcttatacacgagtacgctactctggctacaggtagtaccaatcaatccatttaagccctcttcaactgtgtagtcccat

SEQ ID NO: 360363 - DNA, 612 bp, Cannabis indica
aagtgttttatcaacatttccccttttgtaatcatgagaaagcaaaaattcagttagacgctcataccaagcacgtggtgcttgtttcaaaccatacaaagctttgtctaatctataaacataatcaggaaaatgaggatcctcaaaccttttatgttgttcaacatacactccttcctttgaaaaaaccattcaaaaatgcagatttgacatctatttgatacaatttaaaagcaagaatgcaagttatggaaaggagtaacctgatagatttcagtcttgctactggagtaaatgtttcatcaaagtcaataccctcaacctgagtgtatccttgggcaaccaaccttgccttgtttcgaatgatagtcccgaactcatcgctcttatttttgaagatccagttggttccaatgatgttcacagatggcggtcttggaatcattttacagactttgtttcgaacaaagtgatgtagctcatcctgcattgcaagaaaccaatcttcatccgttagtgcttcttttacagattttggttctaaagaagaaacaaaacataagaattgaattatattagcatattctcttcttgtaaccatgctctcatcca

SEQ ID NO: 360364 - DNA, 599 bp, Cannabis indica
cgttgctgaggctcccccgacccaggtaagtcgatcgcctctctctctctctcagccctcttctctatctctctctctcatccctcttctctctcgatgatgatgatgcaggtccaggtccgccgtcgatgaggaccaccgagccattggtcgttgacgaggacaccgagccattggccgaggaccactgagccctattctctttgcctgataccccctctctctcatctagggttttcaaaatttttctttgcaatcttgttaatagatctgtgtatgtgtttttggactaaaattttgtgtatatatgtgtgtttgtttatttgttgggtggtgttttgttttgattttttttgttgtgatttggatttgaaaataggcagtggtggtggttttggcaccagtaggtggtggtgattttagaaatggtgggtggtggtttcggtggctgtgaatggtggtggtggtggtgggcatctgtggtggatgatggtggtggtggtgatgatatttttgaagaggagtgatggtggtggtaagatagagaaagagagagagaaagagatgaatgagttacagagagaaaaagaaagaaaagg

SEQ ID NO: 360365 - DNA, 553 bp, Cannabis indica
ttacaacagtatctctaaatatgtattcttagataatatctttagggtatagtctcgactgaactgtttgcgaccttttgcccagtgaacatgcatcactatttatagggctatgaacttggagaggaaatgtttcccctctcgttacaatggatataaggaaaaagattgcaggatccatacagtgtacactgatcgtgggatatatgcgaaatacattgatcatgggataaatgcagagtacactgatcgtgggatcgtgggtatgccatatctctgtaatctgatccccaagttatagggatttcgttgatgactcacaatgcgaaagctgaattcgctaagtgttggctgctctgcgcagattgctgattgttttgctctgggcatgccagcgaggcatcctgctatgactgttccctcaaagcagatactccaagtggattccacgtgtcaccattatgcgatgccacgtcagagtgtaaaaattgggataacaaattttaccctatttttatcatttttttattcctaataattcaaccctaaccct

SEQ ID NO: 360366 - DNA, 636 bp, Cannabis indica
ataggtagacatggtgtgtggaaaaaattatgaatgtgagaatgagatgtgtgaccaattagaggaaaaattgattcataaaacacaacatctcaagaatgatatatttgttttgtctcaatatcaagaagggtatatgctttcattccttgggggtaaccaatgaaaattgaagcacgacttctaggtgaaaatttgtgcctagtagacgggagagtagatgcataagctagacatccaaaacaccttagatggtcatattgaggtggtttgttatggagtttctcatatgaggtgcaaccttgaaatagagtagaaggagttctattcattaagtatgttgcggtataaatgagatatgaccaataaggaaggggtaagttggattgaaaacaaagagctctagctatattcaaaatgtgttggtgttttctttccacaacggaattttggtgtggtctttccacacaagaatggtaatgaataatgcctttggtagcataaaaagagtgcatattgagttctttgggcattgtcagatctaatagcttttatggatttttgaatatgtgtgcaaatcatgttgtaaaaatgtggggaatgatagattgaacatcggattatattttaaagcat

SEQ ID NO: 360367 - DNA, 1222 bp, Cannabis indica
gatttttagttttacaataataaattattaataaactcataatttcataaaataataaagtagtaattttaattaatttttaaaaataatttataattttttttctaattattagttgtaattattatttccaattttataaaaaataaatataatttttttagaaacttgccataaaaaggttattagattattaccttattaatttttttagttctcatcaatgggtattacccattaagaagtgttccatatatatatgtattaaaaaagttaatgtacatgcaattttttttcacataaaagaaattattaactaatataccaaataaataaaaaaatttaaacttaattatgtttatcacccactctctcctcacataatttaagtaagtactatatatcgatcattgtttgatttattttatgtatagaacaaatctattagaaataatattaataatgattacaagtaagatacggtgatgacatcaactttaaatacagtggtaacgagatatacggtgatgatagttgttttgatattatatgatgagttttctatagatttattgccttctttctattaatttagatatctattttgtgtaaggattatttagtttttaattttcttcactataatgtacatttaaaaaaattgcgtgattttatatttacattagaaattttatgatatttttttttaaattatttagagttttcgatataaatttattatttttttaataaacatatatttttctttttaaaaaaaatgcataaaaataaattcaaaattatttgataccgattttattgtttaattaatatttatataataatttaattaccgcacgcgaagcgcggactatttactagtactaataaatgtaaatgtagctatgtaagatattatgttaaaaataaacatgatataataatataatttttctattttaaaggaataattagatttttaacgtatgaaaaaaaaaattaaataataaactaaatttaaatgagaattatatttattgcccgtaaaatataaatacagacattatattttgaaaataaaaaattattaacttatttagattttaagtttttttgtaagatgttctttcaaaatacttaaatatttaagaataaatttaatttaagcctttgttataaatattaataattatatggatgtccaaatcttttatttattacc

SEQ ID NO: 360368 - DNA, 574 bp, Cannabis indica
aatgatccaatccaataacaaactgaccgatccaatatcaatcgatccccaaaaattggatatccaatcatgattggtttggatcagatgatatttttgaaaatccaatattggatcggtcggttcttgaatgacatgtaaatccaatggatctaaccgactgatccaatccaataaccatccaatatcatccaatattaaaataaaaaatatatattataaatttattatattttaatacatatattaaaagcgtttataaagaaaataaactctaaatctcatcagatccccctctctctcacctcatactcgctgacgacgacgaccatctcctccctaagtcgccgatgacatcttcaccaacagagggacctatttttactattttagaaaatacagagtgcattttgtcatttaacaaaatagagggtccaattggtaatttttacaaaacacagagtccaaaatggtatttaccctagggtgattctacgatgcacccctttaaaagggatgtactgatgcaccctctacttggcatctagaagaattgggtaaataccattttgga

SEQ ID NO: 360369 - DNA, 532 bp, Cannabis indica
ccgagatttttcacacttagggtgaaccccacatacataaaattcaataatggcatctaaaatttagatataatacagagctcggaacgagctttccaacaatataaagaactcccaaatcgaagttcagaaacaaaagttatgaattttcaaagttcggcacaaaattgcccaaaatcacgagggcgggccgcggcatgcccaaaccatgccgcgacacctgggaaaaaacccaggttccaccaacacgggtcggctgcggcatgcttcagagcatgccgcggcacctgggttccaaacccagaaaccagcaagcatgaacacgattttcagcgagaaattccaatcctttcatccacaaatctcaagcaaacttgtaaattaacatgtagagttgctaacacataataaaggtcaaaatacacaactcatgcataaaattctcagtataaaaaccctcaattttagatacatatataatgtaaaaacatgcctaaactctccatgattcaagctcaaaagcttgagcttc

SEQ ID NO: 360370 - DNA, 458 bp, Cannabis indica
gtcataatgaattctttttaaattgttcgatgtagattttttaccctgagtaattgaattatttattatgtttccaataaaaggtgtgcaggcatgggaatggaaaagatcaatttgtaataattgtgagtttttgaaaaatggagattactattacaattaaatagtatgaaaaattaattctcattatttggaaagatttgaagagttgccttttatttctttctcatcggacacacactttcaatgcacaaccaatataaatacaaacttagtattatacaaactaaaaatacctccgaaaacacacacaaaaaaattattgattctgttattgtcatattcatcatttataattttaattcactattgaaaaaccgtgtttttgcaaatgtcagttgtatatacgaaaatataaaaactgtaagcgtttgcagcagcagaaagtaattctgcta

SEQ ID NO: 360371 - DNA, 974 bp, Cannabis indica
aaggagaatcgagctcagattttggtgatactctactatagaaaggatacaagtgttagagatctgagtggatggagttatttaatttcgctgcaaccactgtaaggtttctcttaccttttatgtgtttattttatatcgttttagaagtttatgtttaggatgttaaaaaatatacttgttagtaaatctagatcctggtaaaatatattctaacaatactggacccaaccctccctcacatgaacaattcaaactgtgaagacccattttccttatttaaataatttttaggctaattatatttgtttaacctaattaaaattgattagcaacataattaatttttcattagattattttaaaattaatttagaaaaactcatgtagtttaaagaaaagaatctacatagtaaattttagtaactaatttatgttttctaatattaaattaagtagaaaaatatatttaagtaaaaaattaatttattaattaattttagaccaacttaaattagaatacttttcatagtatattttattttattttaataatcatattttgatgtaaatttagttttaaatgtagatattttaaaattttttaatattgaaaattagattaagttaaaaattaatttgttaattaatttaatatcaacttaaatcaagtaatttttgtggacctcgcttttagccaacgacagtaagtctaatttagtaagcgataagtagtttataacgattgacatataataaagcaatataaagacacatgaattttatagaggttcagccccaagcagttcggtaatagcctaatcttcattatttgtattaactcaagaacaaggagaaaggttccatttcttatagctcttacaacaatatctctgaatatgaattcttagacaatatctctcaagtaaaaatcctttgaacctttgcccagtgaatatgcatcaatatttata

SEQ ID NO: 360372 - DNA, 426 bp, Cannabis indica
aattgtaataagtaaaataatattaactcttcaatatatttttgtattacgaacctttttacttagttttgataatttgatttatcttattgtactattacattatttttttttcataaaatttattgttacaactttaatctttcaatatttttttttttattttcctttttaagttagtgatagttaaagaataactataaactgaaaaaataaaataaaataacaaaacaaatgcacatatatacaataaaaatgttatctagaataaactaaaaatatacacgataaaaggcacacaaactaaacaacaactatacaaagaagacacataaaaacaacataaaaataactatagaacacctaaacaacaacataaaaataactatgaaaataacaaaagacaactataaatcaacagaaaaa

SEQ ID NO: 360373 - DNA, 499 bp, Cannabis indica
tattgtatatgttcttcaaatttatatctatatatatagtgggtaacatgcaacaatcaaaaggtttgtagagaagtgaaaaagttgtaacttaattttttttatttatgttagtgataaatatgtaataattgtaaataggttatgaataagtgaaaagttgtaattatatttttattattattgttattaattacacattatcaaaatgaatataaaatagatgaaaatgtaaaattttaacaaagaagaaaaaattgattgaaaggattatagagtgccaccttaactgcttgatgctttcctttatatatattgatgatattgattgtgacagtatgtatttgattgaatcaacttaaattttaaagttgacacaagaaaggaaaacctactataaatattatattttaaaaaataaatgataataaagaaaggcaattaatatttaaaataataagaagaaacccatttttataaaaaaaaaactaattaatag

SEQ ID NO: 360374 - DNA, 596 bp, Cannabis indica
agcgcttctctctgctttccttgtccgtggtggaaaagttagcttctgagatgaaggacttcttcaaagggaaagatgccattctcaagctgctgaaggagttgaagactttgctgtcctctgctgatctgctgctcattgatgctgaggagaagctcatcaaagacccaagagtccggaagtggcttgatgatctcaaggacaccatctatgatgcagacgacttggtttacaagatcaacactgaagcatggcgaaatgaactggaactagaaggtggtggtcctcatgaatctcatagcagctgccgttgtactagtaaggtactgataaatcaatgaatttgatttctctaattatttattatgattagctttgtcattagattagttagagaatattttactctatttacttgaattattagagtgattattgtaggagtctttttcaatatatcagaatataatacaattgctcactctttctctaccaatattcaggcactcatgagattcatctcatcaactcctttaacttcttttgataagaacataaaacctgagatagagaagacacttgagaaattgaagctt

SEQ ID NO: 360375 - DNA, 946 bp, Cannabis indica
tggccttaccagggtgataaaggatctcacgatcataattcttcagcaactctagccaacttctctgtctcatattcagatttgtttcataatatgtgtgcacgttttggatgtatacatttatgtatttcttttttattaatatacaaatttatattttttactgtttaattatttttttttttatttacttgtttttattttttctacgtgtcgaagcacgttagcttttactagtatatatatatagtattatttttaagtattttaaagtcatatcatttaatatcatggttatttatattaatttgttaaattattttattttaagttacgttgattttttataggttattgtgagttgttggtatacacaatttgttgtatagtatatttattttgagtaaattacagcttaaccctcaatattttctgttcgctaactaataactctcaaaatataaattttggcagcaaaacacccaaactagcattatgttacctttaccataattagttataaagaatgaatttgattttcattgatattaaaatgtttattcaattaaattacaatgacaaatatatatgtttatatagagagtaaagtcgattcagctcataaccaactaaactgaatataactaacagtaacaacatataactaacataactaacatgactaacttagcctcttaagtcttataagccccctcaagatgaaatgtaaaggtttttgatattcatcttggagacaatattgtggaaatgagtgggaagagaggtttcgtgaggatgtcagctatgttagacttggatgcaatgtgattcattttgatggtaccattgttgaccttttcttgggtgtggtgactgtcgatttctacgtgtttagtacgctcatggtagacggggttttatgatatgtaaatggctgcattgttgt

SEQ ID NO: 360376 - DNA, 678 bp, Cannabis indica
tatgaattaagttattattaaaagttttaattaaaccacattttgttaaattgttagtttattattataaactattagtaaaagcacacatatgttgcctttacgggttagggcattacagcatggtatcaaaacgaccaatgtttacagatcctaaagactagtttgatatgtatattggctgcgatgactcgttcgactcatgacatagtaagagataattgttagttgattattagattatttgctaattgattaaattatctatttatttgaatgtgcaagctattagactagcatgataggttataaataataattgttatgtatgtgtatgtatagaaatgcttattagcattggttttgtgttggaagattctaaatgatggaaagttatggttgcatgcagtggcggacccagaatttaaagtgagggggggcgtaaataaatttaaaaagaaaatataaagtgtagttagtggggtttgaacctttaccctctaacctatttaccaactaccttaaccattacaccaaggttactattatgtctataaatatcatcttttaatacaaatatatgttgtaactaattaaaatacatatacatttttttctcgtatttttttttcagggggggtcgactgcccccctcgctacaatgtgggtccgcctatg

SEQ ID NO: 360377 - DNA, 691 bp, Cannabis indica
agtctacaaaaagttcacctgtcactccaatggttgggaagcagataagctacattcgacacaaacttgcgcccaccagttggaaaagatcattacttttgttggaattaaaccttccatctcaggggtttaccatcgtctctcgagggatgaagagacgcctaatcataactacaatggcttcggggcgtggagccaaacccacttgatgtccggggctgtgcttccgctccaggactactttattgattttttggtcttcgttggcctttcaccctaccaacttataccacaagcttaccgcctgctatcaggcttgtatattttttacgttgcctggaactaggccccacccaatccggttaagatttaatatttttatgaactcctaccagtaaggggacaagtttaaagatagtttttataaactcaggcccacccagctaatgagggtgttgggctttatgcactaaataaaaatctatttcaatgtaatcttttctgttcaattatcaataaagaaacatatttaatttcattacttgtttaatgtgttatttagttcatgtaatcatctatttacttatttgattaataaatttatccaaacccttatcacactaatattcttgtttattgtgttgtcaacacagtagaaaataaaaaagattgagtgattaaatgtattcct

SEQ ID NO: 360378 - DNA, 418 bp, Cannabis indica
gccaacacacttcttcgatcatcaggacaacatgcccaatcggcatccgaatatccagtaatagcaagtctatctaaaactttgatgtgtagtctatggtacatagtacccttaagataccttaaaactctcttggcagctgtccaatgtgctgaagtgggggcctgtagaaactgacttaacttgttgacagggaaagagaggtcaggccttgtgtgtgtgagatatgaaggcctccaataaggctcctgtactcagttggatttgagagtgctttcccatctgactttgacagtggtttgcctactgtcattggtgtagaactcggtttcaaatgcagcatttcagttctggttagaagttctttaacatatttaccttgattgagatagagacctgtctcatctctgtgaacttc

SEQ ID NO: 360379 - DNA, 822 bp, Cannabis indica
tcaagtttttgcattcattagtgtcaaagtcgtagtctccatggaaccaataaaactttgtcatgtcccgtttgttgacatctttcttcatgggcacgggcttcttatatggggccagcgactgagttgccatatacacactttctatatctttagtcaaaatagtgaatgcagtgtacttgacttgattctcccggggagcttgttcagatttgctagtgaactttcctttcttcccattctcttgcttgtggttgttgttggaacgtttaccacttgagcttcaattatttgggtaatgggcctttgacttgccaggattttgctcaccttctgctcgttgaacgacttcttcgagcttgatgaagccttcggctcggtcaagaaaatcactcattgagtctaccgacccgttcttccttatatccttccaaagtttgccgaggacttcaacgcccccctgtatcgcggataactttccatcttcagttacccgtgaaactttggtcgcctccgtcatgaatctgctgatatatgcccggagaggcttgcctggtctttgcttaactttgaccaagtttcctagatgcaatggaagttggcgtgaggaggaggattgagcatggaattcaaaagagaaggttttccatgaacaaaaattttcaggggccaacttgaaataccattgctgagcggcttctgacagtgtagcaggaacaattctgcaacatacatctcctcgtaccacttgcaaatccatatttatttcaaagtacttaagatgggaaaggggatcttctctccctgtgtacatcttccatg

SEQ ID NO: 360380 - DNA, 659 bp, Cannabis indica
taattatgaagattaaataacatgaataaataaaaaaaaacaaatagaatgagatattataatattcaagaaatggttgaagattaatctacattctcaataatcattcttaattcctaataatgaatgttatttcaaatttccaatcaaattcttaatcccacagataacgttgaaggagtcgattatcctaatctccctattgcatgtaatcaaagtgaaacgctcaataattaactcttttacataagcaataaatccacgaactatgcaatttatttaacttagataaagcttcaagttcaatggagatagattaatctaggcaataaagtaatgaagcatataattcatttaatttaggttatattcttcatcacaattaaaaatatctttgataatattagaaattgcaatttatcacaaacactaattagaaccctagactattaggtgaatagtaatcctaagatgaaattagattaaagtaaaacgtaatttagtgatcatctaaataagattaaaatatcaatcgcgacattgaatatagaagaatagaagctatcttttttaatgaatcaagtgtgtttcattactcaaagctctttgtacaaacaaacaacattctccatgaataggagtgttgagttttatgccct

SEQ ID NO: 360381 - DNA, 841 bp, Cannabis indica
aagtttagacaataaaactataacatcctcaagtagcacacccagctcattaaagaagacccttcctttgtttacagctgtgaccagagacaacgaatcaaacctctttcattgggatttcgcatggaagagcccaattaagtccaaccaaaagtgccaaggtcttggcttgtaaaacagaaatacgacctgaaaacacaataaaactaaaaaaataccacaatgaaaagatataagtagaaaacacaatcaccatttaatcttctgaaaatataatagcccctaagcctactgaacttgaattattcaatattgatgcatcaaccataagtattgtgtggctctgttcttcttgaggaagtctaggtagaattttcgagctattaatcctatttctttgaagagtaaggctactgtgcttggctccatcacgagcagatacaataatttcataataactgtcaacccaattaacaatctgttgtggttatcttgattgttaaccatgagtaattttatttctctccgtccatatggtccaagcactaataatattttttttaaaacaattccctttctaccacctcagaagcatatagtatcacatttttaaaattaattacctctctcacttcatgtagaaatttaaaatcttggagtttctaaatttcttgtgcaaagtgggacaccaaaaaatagcatgagcattagactctcctccaaaactacataggtcaccagggccggccagagggtggggcggccggggcatacgccccaggccccactatttttgtaatacccggtaaaaatatacatatattttaaattttatttgtta

SEQ ID NO: 360382 - DNA, 557 bp, Cannabis indica
aaccaagggcaagaaccaatttttttttctttccatttttctgagttttcagcaaggattcaaagggggaaatcaacctaaggtaagccctaatgatcctcttctctaattttcaagttttgatttagttgaagtagtgaaattgtgttataggagctgttagggtttgatatttgtttggttcgaattatagggttagtatgagttgagtttagcccataatagctggttttgaggtttatggttggttttatgcaaccttgaacattgagttcaaagctttaagctttaatggcaatttgagatttggtgatttgttctgtgaaattttggttgggttttattgtttatgcattgaataggagctctggaaggtttcatggcaattggtgaagaattgagcaaggaatgaatggctttgggaatgcttgtgcaaaccggctagggccacaaaaaccggctagccggttttggcagggtttcccaggcctttcatattctcaatttttgccttttcaatgcctcggttgggtgtttccccatttccagagttagaa

SEQ ID NO: 360383 - DNA, 513 bp, Cannabis indica
cactatgagctgctggaaacaaggaattgaggaagcaaaatcataaaccctagctggttctaggatggccgaaagagagaaagagagagttttgagagagataatgatttttgtgtttcttttgatttttcaataaaaaatgagcagataccatattaatcaacttatttcagctaacataacttaaaataaatcaaataatcacttaatactacactaaaggacaaaagcttttggggcaaaatgaccattttgcccctcccacactaataggattaaaaagcacttaagggtatttttgggaaattctaaattcccgaacaatcccgacattcccaatgtctaacaatactgtcccgctataataaaatactaaaatgtgattctactgagccatacaccgtgttccatgttgtcgggcacagaacatgcaaaaatataaaatttcactatatgacatataaaatgcattctgaattcaaataaatcagcataattaattatttaaatatc

SEQ ID NO: 360384 - DNA, 1483 bp, Cannabis indica
aatacctcataaaaccggttatttttttttaaaaaaaaaagtggggagcaaatgtctcggatataataaaaatagaaccggttatacaacataatgaataaaaataaataacacacaataactcaaaccggttataactaaaatataattggttctgtaacacaatgaataaaaataaaaaaacacaaaataactcaaaccagttataattaaaatagaaccggttctataatagtgttataatgaataaaaatcaataacacgaaataactcaaaactgattataattacaatagatccggttataaaatataatgaatataaacaagtaacacacaataatttaaaccgattacaattaaagaataaaggagaaattagttactaaaacactgaaacataaattaaaaacaaaactagttctacaataaaaaacatcttaacacataatacctcataaaaccgattataatattttttaaaaggcgaggatcaatttgaaaaaaatactgaggcataaatatgaaaagaaccaactccatcacaaaataaataacacacaataactaaaaatataactggttagatgaataaaaactaataactcaaaccggttataactaaaatataaccggttctgtaacataataaatacatataaataatataaaataaatcaaaccagttataattaaactagaactggttctataacaatgttataaagaataaaaacaaataacacgaaagaactcaaacttgttataaataaaatagaaccggttatataacataatgaatacaaacaagtaatacgcaataactcaaactgattacaattaaaaataaagaagaaatcagttcctaaaatactgaaatataaattaaagacaaaactagtttcataataaaatgcttcataacacataatacctcataaaaccggctattatttttttttttaaaaaaaaattggggatcaaatgtctcgaatataataataatagaaccggttctataagaaattaataaaaataaataacacaaaataactcagaccgattataattaaaatataaccggttctgtaacataatgaataaaaatatgtaacacaaaataacttaaaccaattataattaaaatagaactgtttctataacagtgttataatgaaaaaaaatcaataacacgaaataactcaaaaccgactataactaaaatagaaccggttatataacataatgaatacaaatgagtaacacacaataatttaaaccaattacaattaagaaaataaaggggaacttagttcctaaacactgaaacataaattaaaaataaaactagttctacaataaaaaagctcttaacacataatacctcataaaaccgattataatattttttttaaaaggttgaaggatcaatttgaaaaaaatactgaggcataaatatgaaaaaaaaccaattccataacaaa

SEQ ID NO: 360385 - DNA, 502 bp, Cannabis indica
atactacaatcagattcaataatacatacatacattcacatacattaaatttagccaagccaatgtcatatcatatcattagaaaaaatatgttgattgatatatataataaatgtatataattatggtattgcggtctatctcatgtagcttttgaccatcacgcgtgaacagagaaatttaaagatttgttcctctaattacaggtgtcacaatttaatctcatgacaattacttgtatctaccctttgtatattatgactactcataatataatacctatatcttaattcccctaatggtaatgctaaattctttagtttatttaattcccctaatggtaatgtatatgcttaattaattaattttgtgtttgaaatatctaatattctatagaaaattggaacgtatataatgtaaaaaaaaaaaaatgttaataattacaactttaaccctaatctttaacatcaccttccttaaatttttgggaaaaaacaaaaaa

SEQ ID NO: 360386 - DNA, 793 bp, Cannabis indica
tagaattatggaatggtcatatacccagtttacgccattactcatgtcttaagaaagaaagatggcaaactagaaaagcgaactgaggtttgcatgtttgttacaaaattctaaggagattaggggtggagtattttatagtcacaaggatgatatagtattcgtttccacaaattccactttccttgaagatgactatattaagaattttaagccacaaagcaaagtagtattggaagaaatgctgttagatataactacaaccaatgttccatcgtcttctactcaagtagaggataatcccactaccttggttgaaccaacgcaagttgatacaattgagaaatctacaacaaatgttcatgttcaaaaggtcatgactcctcgtcgtggtgggagggtttccacaaaaccagctcataatggcttggatagtaaaatcaatatggttgttggtgatggtattgatgacgatccattaacctaaaaacattcaatggcaagacccaaattgaaacaatagccagctggcatggattccgtgaaaaagaataaactttgggaatatgtagatgcacttgatgattatcatccaattcgatgtaactggtctacaagaagaaaagaggtgttggtggcgaagtccaaacattttaagctagaccggtcgcgaaaggttatatccaaagagaaggtgtggactatgaggatacttttagtctcgtcgccatgctcaaatccatcagaattcttctctccatagctcctgctttcgattatgaaatctggcaaa

SEQ ID NO: 360387 - DNA, 676 bp, Cannabis indica
aatgagttttatttaggtcataaaactcaacaattttgtatacattttatgttatcaagagtcatttaagtaattaaacttttctttattgaagtgatattttgtataccatattttatatatatataattgataagtcttgatatgatttttattgatgagaatgtgattattattttattcatattttccctctattctttttctttaattatttatcaattattaaatacaaaatgtgtctaccatttatcctacagaaaaatctaatgcatgcaacaatacgaaaaaatttgatttttaagtttaagaagctattgagtgaaggctctttgtactgtctacaaaatttaaaaattgtgacaaccacaggtgagtataggctactttcaaatgactataaaatttttatttttggttacaacttcagtagagagactagaaggagaaatagttaacattctgatcaatgagtttcaattcataactccaaatttgactcatttacgtgttaatgataacacaatactctcaggtattcatttaattattaacttttattgatatttaagaaatttatttaactttcatctttataatattccatctttttattattttatattatatatagatattattggaatgattatgtggtgtcggtgatattgagatt

SEQ ID NO: 360388 - DNA, 706 bp, Cannabis indica
gatgatctcatcatgcatctgaccctttctataatggtgcgatgattcatcattcgttctgctacaccattatgttgaggagttctaagtaccgtggtttcatgttaaatttaatgtttagagcaataatttctaaactcatgagaagtgtattcgccttcattgtctattctgagacactttaacaactttccagtttctctttcaaccataacatgggactgttgaaaaatccaaacacctagtcttttgtctttagcatatagacctacacttttctcgatgcatcatttatgaaagtcacaaaaattggctcctcccaacgattcaacttctatgggaccatacacgtcagagtaaactcgctccagtacctcatttttcttagcagaggaactcttaaatgaaactctatgttactttccaaataagcaatatgttcacaaggatccgatatagtacctttctcctaaagaatgaacttcttctttgcgagtagttgcgaaccctattcactcatatggccaagtcgtttgtgccataaatttggagaagtgccatttgctacattaatattattgttgcaagccttcccataagtcttgtacaatgaacaacataaattttctctcacaacgatcattgaccctttacagagtttccaattctttttgccgaattaactttcgtacccttgctcatctaa

SEQ ID NO: 360389 - DNA, 525 bp, Cannabis indica
gtaatgggttttatttagggcacaaaactcaacaatcgtaacctaaatataaactaattacatatgcaaaagataacaatattcatgataaaacttgttactcatgtattatatcaaaagtagtaaccttaaatacttaatctataatcaaaggcttcacaaattcagctcactcatcccgtactacattgatctctccgttactatagggagcgtctaacttgaactataaaacaaaagataaaaaaacattaatcattatattaaatgtataattaaactacaaactaaataaagaagtgttattcatgtttacatgatttttcaaaaaaacttgcaggattaacagctgtcatgaaactagatctgaatagttttcataacataataaccacattgtactccatccggctgctgtcgacacgtgtattggtttatttttactggacccttatttcgtatatttttttagatcctgtacatgtccacagcagtgaacaaaaaagaaattaattaatgaattga

SEQ ID NO: 360390 - DNA, 773 bp, Cannabis indica
agatcctggtaaaataaattccaacagtctatatataccaagttctattcttcatttcactcacttctctattttatacattactttacactctcattcatctaacattctcaattataatctactaaaatttttgcaatggattcagcaagttctcctgattcttttgagaatatgagtgttacttatatcataatttcagaatgtaatgacgattccgatgaaatttttttaaatgaatacttagctgcgggtacctcatgaaggcgaggaagaaaaacagcccacattgactgaggtcgtgtagaaggacacgaatgcttgttccgtgactacttttatgatgaatcggtttatacagaatatcaggttcgaagaagatttagaatgcggtagacatgtttttctacgcatagtgcaagctctagaacatcattcagagtattttcagacgagatttgatgcaatcggtagaaaagggctttcgccactacagaagtgtatcgttgctatgcgaatgttgccatacggagcaccaaccaattacgttgatgagtatgttcgaattggtgaaaccactgctattaaatatctacttaattttgttcgtggagtgaatgaaatttttgcggtagaatatttgagacgacccaacatcggtgacattcaccgcttacttgaaatgggagagaggcgtggttttccaggcatgttgggaagcattgattgtatgcattagaaatggaaaaattgcccagttgcatggaaagggc

SEQ ID NO: 360391 - DNA, 974 bp, Cannabis indica
ttcttcacagtcttacacactatgattgaggacttacttgatatgtgtgggcatgcactcaatccctaaggcttgaaattgtttgtgaagagaggctatagtagttcaaaattatgagaagaagaagaaggaagaggtctcatgaacctagagagaaaactaggttcttagcttaagaggcattagttggataatgagaccataaccttccttttatactaatttccactagggttagggttgaattatttggaataaaaaattgataaaaatagagtaaaataaccatctagtggccgcccacatagtgggtcctacactagtttagtttttgccattttttctcaactattttatctatctttcacaaataccaccttttgtattttcaaccctataaatcccaaaactatttatttaataataaaataattatcaaataaaattttcatttataatatttattaattagagtccataaagtctcttaatttataaattaaccctaaaatactatttcttcacaatcaagccatatcttagtgaaaaattcataaactagaaatagtctaattttagaattataattgattaactaaaatcaattaacggagtcttacaaacagtttgtctcaactagtatggggaccatgggcctatataaccgagcttccaataagcagatctagaatttaccaagtaaatcaactatagaacttagaattgcactctcagttatatagaacgctctatatattccaaaatatagatacactattaattatcaattgttataatcccaataatcaatgatcctctatagatgatctacattgcatagggattaatttaccgttacacccttcaatgtattttatcattaaaaacacttagccacaaataaataaaaatttcagtgaactaatatgtaaagcccgcttagttaatttggaaattagcagtatttatgttaa

SEQ ID NO: 360392 - DNA, 815 bp, Cannabis indica
ttttttcatatatatacaaaaaatacaattaaattacaaaaatacttcagctgcacggaacgaaaatacaatccatcaattaaatattaccaaaataccattttttctactactccagctggacggaacgaaacaaacaacctcacgcacacaaccttcaatcgaccaactcagcaacccaacacaactgaaacaaaaccaactagaaagagaactaccattaattccggtgacttcacttgagaagacgactaaaatcaatcaaaacatgtgctatttcgaattcataaaaaaaaagtgcagaaaaactactacaaaactaaaattcaactagaaatccgattgaattcacataaaactaatgtcctgactttaattttcagattcatgaaatacatatctcaaaaagttaaaatggagttcccaaataatccaactcaagtataatccaaaaaaaaaaaattacatcaatactatagttaaatgtttatctcagtgtatttttcgttattttcaagatttccaatggtaaatttgttcatattaaatcacaaatagacatgtagatagagttacgtacgtgaaaatactgttctaatttttaatgtttcataacagttgcataaatattttgctaacaattgtttctccatatattactattaaggtacaagtaattatagatcagtgataaaaaaatacagacaaatagtttcttatagatacacattcacatttaatatttctagttgcaattaagttgcacgttagttgaataataatttttctactacaatatcataatattataaaaa

SEQ ID NO: 360393 - DNA, 600 bp, Cannabis indica
gtacaataaatttgtacaattcacattctattcaataatcaaatatacttttgtcttgattataagtgtgtccgtactaggggtgttcaacaaaatttacaaaccgcccaacccgaataaaccgcccaaaccaaaccgaataaaccgacaaaaaatacaacccgaaataatacaatgaaaatccaaaccgcccaatgaatatattgggtggtttacaaattattctaaaccgcccaattaacccgaataaaccgaattaaaccgatttatatatttttatagaagtgtatatattatatcacataaattacatttattagttaaactattttgtatttaaagtttagacattttagtgtttaacttaaaacttagactttatagttaataatttttattgtatttggatattgaagttaaagtttaaaatctctaccatattttattacttttttttaattattttattcaattattttatgtttactcaattatatttatcttatattaaggttcttaaaattaatttaaactatagtattttttaacttgaaatataaataatatatttttattttttaaaaatctaattatttgaat

SEQ ID NO: 360394 - DNA, 421 bp, Cannabis indica
ttcctagcttttcttcaaagttaggtgaaattgagagagagaggttatgggattcaaacctagaaattgtgattttccaattaacaaaaatctgatgtttcccttttgttgaaaatagaataggcaaatgaccaaaatgccccaaggcataaataatgtcataaacaattattaagggagcgtttggtacgaggtgttcaaaataatttgattatagggaatattatggaggagaatatgattataaggaaaatgtgcaaactgtgtttagttttgtagggtaatatgtaatcatattcctgttaattaaattaaactgtttggttgagtacaggaatcttatatattattttaaaaaattaaaataaaatatttttatatatttatttaatgttaattatatataaaaataaaatattat

SEQ ID NO: 360395 - DNA, 844 bp, Cannabis indica
gggaagacgtattgaaaccaccataaacgatatgacagatggcataacccctctttttcagctattccgctatgattaataaggctagtgacaactactttatgaggaatcacatcaatttagaggagataaaagattatatccacctaacccctaagatacctacggtataggtcatgtatttcctattttgtatctgttgagaatatgtgcccctattaagcctgcacagaaagacaagtgattcattcctagggatcaccctagaaaaatactataaataccccacaaacacactgagacaagggtcgaggattctaggtagataaaaggaatcaaagagagaaaataggagagaaattcaccaagaacattctctgtaataaatactctcataaataacaaagactcgtggagtaaggctctttaatgccccaaccacgtaaaaatctcatgcattaaattccctacaacgtttcctatatattatttaattggttgccaaaaacctcggtcaacattttggtgctcccattgagagctgaaggaagcgtcttcaaacagacaacaatcttataaaaagaagcagcaatcgtggaaactcgcaacacccatcagccccatcctcctcaaaatgctcaaaatcccgaagacgaggaagtggcctcaagagtcaacgtggattctgaggagcgagaggaggcaaacgatgacgagtacgaggaaaactttgacgagtatgacgcctacgacgaaggcagttacacagagctgctgctgtaaaggcaaaaaactgctgatcatgaaactgagatcacagcccaaaaagaacaaaataaaaaga

SEQ ID NO: 360396 - DNA, 466 bp, Cannabis indica
aaaaaaaattacaattttatgttaagtgctcattcatatataattatctatttaatttgttttttttcaagcaccgcaattttgtgttgtggccaattagtaatttttttccgaactttaacatatactaatttcttgaatttttttggctgttaaaatttttactgaactatcgaaattgttagatttaaggacttttgtctaatttcattcaattttactgtttcattgattgtttatgtactaaaccatgctccccagactttgatatctaccaaatcatacctctcaaactttaatatgtactaaatcatgcccctaaactttcatccatgttagaatttgttttactaaaattagataaaagtcattaaatctatttttaaattactttttatatatattttttaaatttattgagttgctccagtaattgctagatagattgttatgtgaattttcgtaa

SEQ ID NO: 360397 - DNA, 428 bp, Cannabis indica
aatcagaatcaataccctgcgaccttcaaatgatctgattttctatgtgtgagcatgtaattctttgttctctgcatataccacataaccctcttggctgctatccaatggtccataccaggattgcttaaatatctgcctaacatcccaacaatgtaagtaatatctggatgcgtacatacttgaagatacattagactcccaacaattgatgcatagggaatctttttcatttcctgaattttaaggctacttttagggcattgactaagactgaatgtgtctcctttagcaataggggtatcacctggtctacaatcttgcatgccaaaccttttgattactttatcgatatagctcttttgtgataatccaagaatatcccaagaacgatctcgatgtatctgaattcctaaaacaaaagaggc

SEQ ID NO: 360398 - DNA, 669 bp, Cannabis indica
aattattcacgattttcaataaagtaattgattagcaatgagctgcaccattaagttaaaaatcacgttaacacgcctaaactagtagggtgttacaatttggtattagagccgccaggttatcttctgaagattgtcatgacatgtacaatcatcatcagcgatgagcttgactcacgcttcaataagccttaatttctttattagtttattttaacattatgttttaagaaaagccttataggaagcatgttattagtatgatagttgaataggtgcatattttaatttccaaaataagcggtatccagtaagttattcttgatcgcgatctaactagactagctcttggattctcaggctgttctaatagaatggatgccaggtaaaacactaggagccaaggtaactcggtcggatctagtggctatctaggagcccagattcccctaaatgttcgtggccaaggcagaggccctagaggtagggcacgctgtcggagagatgataacccgccgtaagcttcttaggaatgggcaaacaggtttgcaacaatgcaatccagatttaacgaacaagaggcagaaatcagatgcttgaggcagcaagtgttggaattattttactaggattcagatttactaagaagtatgttattaacatcctaaa

SEQ ID NO: 360399 - DNA, 516 bp, Cannabis indica
tgggcatagcttggtaccatttaggtagccatgcaatctgtggccgcgaacaatggtggaaaccatagttttccacagtgtgaaattgtttctgtctaattttagagagaacggctgatttagtgtagtaggttgctgagatagagtgtttgggagctgtgatgcaaatgcaccatttttgtttgtgctgacagctgagggggtctgggaaccttcttcgataggttgctgatcctggggtgtagccattgatagagatcaaagattggctctgataccaacttgaatttaggaaaaaatattggatgtgtaattactcagcccattttgtaatgagtcagagtattgccttttatagatatggtaagttgttacagtgtgggctgtgagcaacggctctttgacaggtggcatggtgctgaaatcaataaagattacaaagggaatatactaacagaattcctaatgattgctccctaatatttggaccacaaggacatggatgacacctgtcca

SEQ ID NO: 360400 - DNA, 593 bp, Cannabis indica
aaactataaaagtcgcattcagcaagaaagtcagactctgtgcgaaaactgacccttctatcgatatgcgagaagaaatgtaactatctttgggcgagtaattcacgcatcctcggttgtgcggtatacctccagaaacggctgggcgtttcccagtgactcaagaagtatgcattttcgagcataaccctgaagttactgggagacacccaccgtttcgagacaacctaccaaccaaaaagtacgatcattcgagcattaacgcacgtcaacaaatggctgggcgtatcacagtatctcaagggacatataatcgcgtatatggccattagaatactgtgacacacccaccatttgaaatggcaattaatactcttaccactcagcccgcgacatgaaaagatcctaaaaggtctaatcaacagttaaacagaaataagtttggaaacatgcgattattcaagttgttcaaccgaaccctcgcgagtattcaaattgttcatccgaatgtccgcgagcattcgaagacgtgaatcagtagtgatcagttttttgcggttatgtcaatttacaggccctacactatgaatgtt

SEQ ID NO: 360401 - DNA, 484 bp, Cannabis indica
ttgaataatttatattaaatatcaaaaaatccattattcatatatgagattgtggcttgtagctatacacagaactaagaccacttagctataaattaaatagttagtaacatattaaagttatggaatctttaatcaacagttgctagtacagttcactgatgcccattctacagtgtaaataatcttggttcgaattatagatgtagtatgacatcaaagtaaatgtgtcttattaatatgtcttttatcataaagacctaattcatatcataataataatcaatagtagatcggcctaaatccagagttatcatgaactcatgttcatgttattagtttctttgattcactcgttagagtttctcagaagataattcttacaactcctgttttgagaatctaataatgtggatggctgggaacatgatcaggggcggatccacaaccaagaaaagggtggccattgttgggttttatgccc

SEQ ID NO: 360402 - DNA, 510 bp, Cannabis indica
taatatttcagaactcttatggacgccgattttcacgaagttggaggtttgctttcccttaatgcaatccacacaagtatcaaagtcagtaaaatctaaggaattgagcaccacatctttcactaactttttaattctatcaatggagatatatcccaatatgtggtaccctattatacaggaatcatcgatctttaagtaccattgtgaacatgtataacatcattagttgtatcagaaaaaattactaactagttatgagtatttgtgccagtttcatattttcttaggttaaaacacaaaattatttacgttttatttgtattttattaattttaacaatattttatgaattttatgaaatttaatatgctaaataaaatatccaacttatcttactgttggaatatttttgaaatatatctagtatttaaattatacaaatattaattaattgtactaataataaaattaaaaaaataaatataaattaatataattaatgtatga

SEQ ID NO: 360403 - DNA, 396 bp, Cannabis indica
  modified_base (30)..(30): a, c, t, g, unknown or other
ctatatgattgagagtgcaattccgagttnatgagtggatgcaaattaaataattagttttggcatgtaaatggttaaaattggaaaattgtcgtttttgagaaaatggaaatgaaaattgtcaaaattgcaaaaatacccaagtggggcccattaacccatggtcggccactttatgaggtttttccaagtaatattttcattattttaatgcttagtaattcctaacctaaacctagtggttacctataaatagatagtgatggctcacacctaaagagaatgaactgagatgaatttttgccttcagaaaaaattgagcctcctatcctattgtctatagccaaacctctctctccctcttttcttcttcaattttttgaaaccttgagtgat

SEQ ID NO: 360404 - DNA, 567 bp, Cannabis indica
cacaatggtatattaggttaggattagggtattttcatacaatccaaattttattattttattttctaaatactacactgtagtacacaaaatatatataccataatataaaatgtatataccacaactaaaaattaatatttcattaattttttttatcttagtacaaacaattgatatattataatttttatctctctaagttagcatgaaatatatgattcatattcacacatacacaataactagttttatacgttgatatatcaacacttgttaataaaaagagaacaaccaaaaaacaagcattcattcaatagtatatgcacatccatgtttgactaaaaaatgtaacatattatgtaattaatataccatactccaattataattgaaaaataaattgatgtacaacgaaaaatccaatatattaaattaaattatactggacaattccatgtctttatcaaacagttttatttttgtgtttataatttattttgaatgaataaaacataataatatatactttatatatagttaagggtatttttgttggaaattatt

SEQ ID NO: 360405 - DNA, 799 bp, Cannabis indica
ttagaagttcatgtttaggatgtcaaaaacatacttgttactaaatctagatcctagtaaaatatattccagcaggcccatgatcccctcactagttgaaataatactacttgcagactcatttgattggttttacttaatcaattataattctaaaattagactatgtcttatttatgaattttcactaagcaagggcttaattgtgaagaaaagaagttttggggttaatttattaattaagagactttgtatgatctaatgaataaataatataaatgataattttatttgatatttaattataattattaaataaataattttggcatttatagaattgaattggaaaatatggtataatttaaagaagaataaatggttgaaaaaagtggcaaaatattaactagagattggtcatttgtatggtcagccctagtgttgatttttgcccaatattttattcttttttaatccatataatttagctctaagccttagttgaaacacaataaaacgaacatgatgtattaatcttatcctcttgtcaacttgagtattcaacctaccaaatctagtttttattctatgacaactagtagatgagaatgttgggttatgtgtcctaaataaaacccatttcaatataatcagatttgctagttaataaagatcagaaatcacttttatgttggatggttcacatgacttatttcatgattatatttaatgtataaattttattaagtccagaacatatataaatatgtatatatttgttcatgattatagtgtcgtc

SEQ ID NO: 360406 - DNA, 918 bp, Cannabis indica
gttttgagacttcttattattcttttctctcttctaattcaaaattcttagtcttcttcactatcaaaatttgagccttaatgatagagtacatgcccacgcataacaagttggtactcaatcatagtgtttaagattgtgaagaattcaatcaactaaaggagaatcaggcgcagatcttggtgatactctactacagaaaggatacaagagttagagatctgagcggaaagagtcatttaattctgctacaaccaatgtaagatttcttgaactttatatgtgtttaaattccattgttttacaaattcatatttaggatgttaaacaacatacatggtagtaaatctagatcctaggtaaaataatctccaatatatatgtatatttatagatatataaataattaaataaacatataaatttattatattacaaacactgtgcgtggttttctaattatgcaatataattaaaaattgaggtatttaataaaagtgtaaaattaaacaacaattaaaagataagattatatcaatataactaagattgtgaaatctaataaaaataaaatatagtagtcaataattattattatatatattttataattaacaaaaatgtatgagaaaatgtgaataagtatttttttttcacattttgtaataatttatataaagtatataaaattgtaaattttcttaaaatattcttaatcagaaatttgactgtaaataattaattttaaatttggtataccaaatggttttatctaaacaaatacactgttatatatgtaaatacactgttatatatgttaataaaataagagaaatgagcattgttcaaaagaaaaaaataaattgttcaaaaaaaaaagagaaaaaataaagggaaacttacaaaaatattgctttt

SEQ ID NO: 360407 - DNA, 533 bp, Cannabis indica
gaatattaaataccacccttatcgactaacatatagttcctcctttgatcttaagatttatttaattgtcttccaaagttcttttcatggattaaactgatgctgctcataactcccactcaataggaggtgtctggtctaatgcatacaagcatacatgagacctctcattattgaagcttaaggaattctttccgtggcaaatatccttcctgtaatagttaaaactttttcttagataaataaaatctatgtcaaggagtcaaaagacttcctttagagttagccattagaaaaatgttctagcatcttactaaagtaagttgcttgcactagattaagtaaattactaagcataccacaagccacaggtttaataatctcaaacctgtgatacttggattaggaagtttttttaagtccattgaatagacttattattagaatttaccttcttgtccttgtaatagaaaacttttggttactcaatatgaatggttttaaccatagttctcttggctttgcttctcagt

SEQ ID NO: 360408 - DNA, 640 bp, Cannabis indica
taataaacatatatgaactacaaataaattcccataatatgtatttattaataataacaaaatctcactacataaaccctaattattaataatccaaggtataatcatatgcggtctttacaacttactcccccgttaaaaggatttccgccctcgaaatctacttgaacaattctggatactgacgccctcatatcagtctccagttccccagtggcttcttccactttactattcctccagagtgctttaaccaacgctatggttttagatcgaaggaccttttccttcctatccagaatttgcactgggtgttcatcatatgatagatcaggttgtaattccaatgtctcataactcagaacatgcattggatcagacacatactttcttagcatagaaacatgaaatacattttgcacaactgacaacgatgggggtaaagctaatcgataagccacttgccccaccttttcaagtatttcaaaaggtccaataaatctaaaacttagcttgcctttctttccaaaacgcctgactcccttcattggtgacacacgcaagaaaacatgatctccacgttgaaatgctacatcccgtcgcttgggatctgcataacttttctgcctgctttgagaag

SEQ ID NO: 360409 - DNA, 536 bp, Cannabis indica
tagtgtgtaagactgtgaagaatccaacacataaagtagaattgggctcaaatcttgattataatctgcaataaaatggaacaagggttagagatctgagtgaacggagacattattccattgcaatcaatgtaaggtttcttaaatttatatgtgtttaaattccattattttagaaaatttatatctagtgtgttaatcaacatacatgttagtaaatctagatcctgataaaataatcctcaacaatttgcccctaagtccctatgcaaatgtctgtacggatagggacataccagccatgttggtactgtcaagactgccgtatcctttatagagtaaatgttgttgtgtttttagccttttgaaacatgtgtcgttcactttctgatctcgtttgttgtagaaaaaataaatgcttcaattgtctttttaatgtgtaggtgaagtaagtgaaaaaagggtcctgcatgaatgcatgacactatttcttgctttgtacattctttgattcctacgttagattgttgtccttt

SEQ ID NO: 360410 - DNA, 557 bp, Cannabis indica
cctgcccaaaagattgtttccccttgctaaggatcgaccagatggtggacgccaccttcagattcaagctattatctttcatggacacaaacgtagaaaaaatccaagctctcctgagcatcccttcccccaagaaacacaaagatgtccagagtctaaccggaaaggttgctggcctgagccgatttatctcccggtccacagacaaatgcattcccttcttcaacatcttgaagaaatgtcaaaaattggaatggtccgacgactgctaggaggcattcaaaaaacttaaagagcacattgttggaattattttaccaggattttagatctactcacaagaatgttgattaacaacctaaatatgaacttctaaaacgattatacgtaaacacatataaagtatgagaaaacttacattgggtgcagcggaataatatgtctccttccacttagatctctaacccttgtatcctttctgttgtagagtattatcaagatctaagcccgaatgtccttctttgttgaaactggattcttcacagtcttccacacta

SEQ ID NO: 360411 - DNA, 1292 bp, Cannabis indica
actaagcgggctttacaatacaactcaggctcctcgccagagtcgtatcctgatgatttccctaattcctccacttgatatctcctgaacttgtccttcagctcgtttatccgcaattggattggatcctcttgctttggaccaagttgttggaaaaggtcaggtttcttccgatttaagtgctctcgcagatccagttgggagtaattgctggcaaacctcgtcttactcacagatcgcgtcctactcataaactttatctttgaatggctcgcagatttactagttcccatgctttttcgatcattagctcgttgagtactttctcctcttcgagttgattgactatgggttcttgaccgcctcgaggtcccacttgcttcttcaccctctgctctttccccctgagagcggtttgtcgtatttcccccattagggtctgtacgagtccttgctctatgggtttgggaagaacgctagtgatttctagtaggtgacctctgttctcctggttgagtcccaagatcctcctcattaccatgagggatttctcgttcatcagttttcggttgtctcccatccggctgttcgtcctgattttcggagggtatctcgttttccctgggttgtccttcccgggcattttcttgtctcctgattcgtgagccaggaggtctgcctcgtggtcttctcactccaggttcaggttgattttgagcgttcgtcccccgtgtcgccctaaccgaggctgcatcacgctctaactcagcatttcgatgttgtgcctcttccagacggcgtctcaatcagcagttttccgtttcataagttccttctcccatagactgggtacctccatgattgagctcttcatccctcgtctcgaggttctgaccgctcccacgatgagttctccttgagcgtgttgtccgcgtactaggaccaacatcgggttgggttctccgggaacgtgtggtccgtgtactagggccaccctcaagttgagtcctcctggaacgggtggtccgtctggatcgcgggtcggtagacctcctagagcccatgggctctttcccagaacgatgattagtttcctaatgtggagtgttaacattttctggatttttcagccatgaaggaggtggtttttcttcaaaagaagggagggtttttctgagctttttcacagaggctctgttaacgtagatttttgttaactaaatttgagcctcacagtagtgatttcacacagaaaatataaaagctataaaaataaaaatatgaacacaggg

SEQ ID NO: 360412 - DNA, 699 bp, Cannabis indica
tcaccattgctaaccttgtcaaacccatattcaccatggcttccctcagtattcccatcttgttcttctaacataagtgcctgaaaagtgttccccgttcttactgcattaggcatcctttgttccttatttctgtccaatctcgggcctgtaagaattttagtaaaaccatcagtatcaacctcaggaagtttctgctttcggttatcattcttgaccacccactgttgcttggagggagcaacagttttttttacattccccagccgaatgaccaatcccagaacattgagaacatgtaatcggcctccactcatacttaacactcactgaagtagcaaagccatgctcatttttgaattctatcatgtttgggaggtgttggtccatttgcacttcgattagtactctagcatagttcagcctctcccgatctttagtaacagagtcctccataagaggcttaccaatctgcccaacaattttaaagagagacctttggccccaatatttcagttcaagatcttcaagttgcacccaaattggtacgcacttgacatcctctttcttgaaattaatattagggtcccaaggtttcaaaattacaggtcttcgattaaagaatacatagcccccattcatgacctgatctctgaattcaagagaggtaaatcggataataaaaattccatgagacaa

SEQ ID NO: 360413 - DNA, 1166 bp, Cannabis indica
actttatatgtgtttatttataatcgttttagaagttcatatttacggtgttaattaacatacttgtcagtagatctaagatcttggtaaaataatttccaacactttcttcttcacaaacagtaccggagcaccccaaggtgagtatcttggtctaatgaatcccagatttagtaactcttgcagttgtatttttaattatttcaattttgttggagccatttgatacggtgcttttgacactggatccactcctcgaaccgactcaataacaaatttaatctcttgggtaggtggcaatcaaggtaaatcttctggaaagacgtcaaggaactcgcacaccaatcttgtattctcaggtccagatgtcataggttggctggtatccactgaagtgactatgaatcccaaacaacctcttctcatcaggtccaaagcttttaagagtgttatccttggtatgcgtgtcccttgaactttacccacaaacactgctgggttagcactatcaaactcaaacaccaccatcttccgcttgcagtcgatcttgccccatacttagacagaaaatccattcccaggaatatatcaaaatcagacagttgcaattctattagattggcagttaattcacaaccgtcaatccagaaggacaaagaccgaatcaacctagtggatactataaggtctctcaaaggtagcacggtaccaaaccacgaagcataaatatcacatggcttatagaaactttcaattactctactcgacacataagagtgggtagctcctgagtcaaataacacagtataagaacaaccatttatagacaactgacttgtcattactgtcggactagcatcaacgtcagcctgagtcatggtaaaaattcatcctggagagtagtattcttcttaggttgctctttcttggcctgaggacaatctctgatgaagtggcccaccatgccacactggaaacatgccttggcccgacattcaccctgatggtgtttcttacatttaggacactcaggataagatcagaatgaagatctgcggccttgacggccacctctgtttcccttgagtcaatttcacaaagtcttccatgtgtgatgtcctcacggcgatgttataaaatttttcctcaaacaaactcttgaattc

SEQ ID NO: 360414 - DNA, 888 bp, Cannabis indica
aactccttgcaagtgtctgacagtaaaagaaaaacattcatagcataactcggcaagacctgagcaatagatttcagcaatacctcatttcccacacaagataagatacgcccttcccacccttgaattctcttccgaagcttatccttaaggaaaccaagaatagcattcttattcctcccaaccgaacacggcagacccaggtaataaccattttcatcggcctcataaatctccaacatagcacaaatggaatcttgcacctcaattctagtattattgctgaaaaacacagaagacttggagaaattgattctttgccctgaagccacctcgtaagtatgcagcaactccttcacactgtacgtttcttcctcggttgccttgcagtaaatgtagctgtcatcagcaaagagcatatgagagattaccggcgcaccttgaacaattttacaccccgtgagtaagccactttgttcataactccgtaacaaactagaaaaacctccagcacaaagaataaacaaatatggtgataaaggatcccttggcgcaaccctctttgagcaacaataggccccaactcctttctgccatgtgaaatggtataggaaacagaacatacacattgcataactaaattaatccagcaaccatcaaaacccatccttaccatcatcgcccggagataaccccactcaagcttatcataggctttgctaacatctagctcgagtgccattataccatccctttctcttcgtttcctctttaggtgatgcataatctcgtaaggaatcatatgatgttatccaaaatcaaccggccttgcaaaaatgcactttgagtagcagatatgataaatggcataacactcttaagtctatt

SEQ ID NO: 360415 - DNA, 616 bp, Cannabis indica
aatacccctagagtttaataaaatctctggaattgagaattataactctaatgcctatctctaatattggggtccacaaataattaaattcataaataattataaaaataacagaaattagtgttaattgcctttactaatgcaaattactaaagcggtcattacacatatccacttggggaagatcatcaagtgttcttagctgcaaggtataagagatgaagatcttcacattacttattaaattagctattctatttggattctagttcttatctgaaaaaacttggattctagtatgtgaaatgaaacaatcgaaagtaaataccatttcagaaatagctcgtacacggaaatctttcacatccttcccgcatggtgttttcaggctgtcccaaatgaatgccttactcgccaacatgcctatgtcacacatgaaccagtgcggagttttagttttgcatatgatcgggacacacctacatatgaaaggggcagaaattagttattaccataaaattattataattaactaaatgattaaaaaaaactgaagggtcattactgttgggattttatgccctaaataaaacccatttcaatctaatatgatttg

SEQ ID NO: 360416 - DNA, 507 bp, Cannabis indica
tacagagccatgtgagaggggtagggtgttcaagcttcccccatattttaattatttaaaggctaattaagatttttcctcccaaattttgatatgtaccaaatcatgttttctgaacttttaagtttattaaaaatacccctaaactattgagattgttgaatttaaggacttttgtccaattttagtaaaaaaattctaacatgaatgagagttcagggggcataatttaatacgtgtcaaaattcgaggacatgatttcgtagatatgaaagtctgaggagcatgatttagtacataaacaatcactgaaatattaaaattgaatgaaattagacaaaagttcttaaatcaaacaatctcaatagattatgggaaatttttaatagtcaaaaaaagttcaggaaacatgatttagaacatgtcaacgtttaggaggtaaaaattctaattaaccttatttaaaatacacatataaattaacttttatatatcaatatatatttt

SEQ ID NO: 360417 - DNA, 723 bp, Cannabis indica
gaatcagtgcatttcgggatactgacgtattcttcgctaaacctgttgataaaatgttccagaggttcgtcgaggcgctggtgtattaacattaagtccgtatccaccttggcggttcgcacacttatcgcgaaattggcctggaatcttaggatgagatcctggtaagaatttactgtgccggatggtaagttgtggaaccaacgcagagcgggtcctctcaatccttgcgtgaaggtcttgcacttgatcgcctccaagtcctctagtgggacggagacagttaacattttttgctcaaactgacatacgtattccgaggggtctcctgtcccattatactctggtaatttaggggccacgtaacgctgaggggcttacgcgcaggatgtggtttccgaagggtgaaagggttgacccctccattcgagcccattcgctgtgtactcccatctggctttttgcttccaatgctatcaatttgttccacatcatttcctgtagtctctccgtctctttactcgccgctgatagatttccagcaactgttggatccatagttcgctttcggggtgttgtacggagcgcttccgcttcagttatctcttccacctcgtccctggtccttctgggctgatccctgtggggaactgggcttcttgagtcgctaagtttcctttttctcccatttcttcatgcatgcatcgggtatggttgcctgag

SEQ ID NO: 360418 - DNA, 928 bp, Cannabis indica
taacctttttagtggatcagtatgcggatttgtacgttaaagagatagtaagattacatggtgtaccaaagtccatagtttcggataaagatccaaaatttacctctaaattctggcagagtttgcaacgggctatgggtaccaaactgaagttcagtacaactttccatcctcagactaatgaacagtccgaaaggataattcagatactggaagatatgttacgagcctgtgttatggattttgagggctcctggagtaagtacctaccattgatagaattctcgtacaataatagttatcaaagtacgatagggatggctccctatgaactattatatggtagaaaatgtagatctcccattcattggcatgaaacaggggagaagaaatacctaggtccagaatccgtacaacggactaatgaagcaattgagaagattaaacctaaaatgcttacctctcagagcaggcaaaagagttatgcagatccgaaacgcagaaatgtagagtttcaagtaggggatcatgtgttcctacgagtgtctccaatgaaagggatcaagcgtttctagaaaagaggcaaattatgccctacatttacaaaacctttcaagattctcgagaaggttggacaaatggcatatcgattagctttgcctccagctctttcagcagttcataacgtattccatgtctctatgctaaggaagtacgtttcaaaccctgctcatgttcttagctatgaaaatcttgagttgcaactggatatgtcatatgagcaacagccagttcagatccttgacagaaaagataaggttcttcgaaacaagaccatagctctggtcaaagtactctggagaaatagcaaggtggaagaagccacctgggagttagaatctgatatgagagctcaatatccagagtt

SEQ ID NO: 360419 - DNA, 609 bp, Cannabis indica
acttctagacatagattttatttatctaagaaagagtttcaaatattcaagaaaagataaaggccgaggaaagaattccttaggatcaacagttagaggtctcaggtatgctttcaaatgcattagaccagacacctgctgttgagtgggagtattgagtaggtatcagattcatctaggaaaggaacattggaagacagtcaaatgaatcttaagatcaagaagagatactatatgttagtcgataagggttgtattttaatactcttagactacaccaaatcaggtttctagacttgtgttattgctaaaaagtctactaatgagatggtgattactctggagtggagcaatgattttgaaaaagtgtaaaaacctgtatgaagcctttaactctaccagtgagactgaatgttaaagttacaggaaagaaactttttcagtctatggaaagtgctatacagtttttggcattgtactaataatttattaactactagtgttactaccagaataacacaaatatagttgccaaaaagtaaagaatctagtatccctaaaggagtagacatatagagaggaatttcacaatatcaaggattttttgat

SEQ ID NO: 360420 - DNA, 607 bp, Cannabis indica
tcgaaacatcccatgttttgattgattctggtcatctcaggtgaattcgccggaattaatggtggttcttttgctggttgaattttttgtttcggttgcgttgggttgttgtgtagttgcgcgatagttgcccaggaagcatagattctgggttgaaggtgtgtaagtggtattcgtgtaattttttttatttggactgtatatttgtttatttggctagctggaagtatttttgtaatattgttacttttttttgattaaaattgaaaaaaaaaaatcccttttataattcgacaagaattttttacatttatactcttttcttaatttttttttcttttttactgttttttacttattaaaacttcaaaaaaggctttttctttttgtcttttttaaatatttttagtcaattttagctctcttttttcttttcattttctaactcagttgcttacttttttttttcttctcttctctctctatttttctttttctttttttcttaatttctctttgtgtctcttttttttttaattttttttcttcaaactaatttttttattctttgttatatatataaatgtatataataagtgtatatttt

SEQ ID NO: 360421 - DNA, 677 bp, Cannabis indica
ttcttcaattttttcatgtacctctcaaaagggtacatccatctcataaacacttcaggcaaatgtaagaccaaatgatcatgatatcaaaaacgctcgaggaaaaatcaactcaaacttacacaatatcaaaacacggtctttttgtgcttcctccatatctttaatgtttatagttcttgaacatacttgcctaaaaaagttacataattcagctatagttgtcgatatatctttcgggagaaacttgcggacacaaactgccaataatctttgtataattagatgacaatcgtgagactttaatccaagaatatttgataaatcattgttcactttcttcttcaaatttgagcaaaatccatcgggaaacttcacgtctttgataaattgaaaaattttcaatttttcatcaactttgagaacgtaaagggcgtgtaacttcatcaacttaccattgtcatcttcataaatccacatccattcctttattcctaatttcttcaaatcatgcctcgcgttagttgtattctttgatttatcgttgtccaagattgtgcccaacagactgtcacacacattcttctcaacatgcatcacatcaatattgtgttttaaagtgtttgtacacccaataatcaagctcatagaagatacttttttcctccaattttgat

SEQ ID NO: 360422 - DNA, 645 bp, Cannabis indica
aaaataaagtggtcattcaacacattagcattgaattgatgattgtcgatcttatcacaaaaggcttgccacttcataaattcaaagatcaggtagagaatatggagcttggttcctttatgtaatttgtacaaataaagttattattaatgaaactcttattttgatattttctcatatttatgtgcattttagttttatatttgagaaaattttagaggacctgaataataaacatgaggtttagggtttattcgcttaagtacattgttaaatagtaaatatattgtaaacatgaaagacaacactcgactcataatgaggacatatcgctatgattcatcatatgtttattatataatgaggaacgttatgtttaaatgttttagtctaaatattgactaactgggagaatattagaatatttttacttaaggaataaaataaaattaattaattttgagataaataaatattttatattcatttaatttggacaaaattaattacgtggtattctatatatagtcagattttaatattcattacgtgatttgatttttcaattaattgtcaaaatattttgacaattaatgtagcgcagatactcataaagtatctcacctataaatatagggtctcggt

SEQ ID NO: 360423 - DNA, 946 bp, Cannabis indica
tttgatgtgaattcattgttcattgaatctaactaattgtatatgtttgcaattgtcgacgttggaccttttgttcaatgagaataagtcaaagaatgtgacttttgtggatttcggaattgatagtaaagatcgtgggcttcctcaacaagacaatgaccgagatttcagtgtatatgtgatgaagtacatggaggctgcgactaatgaggaagaagtagttgatcaggtatacccctgtttatttagttcagaatgtactacccaagtttcattgagattaatgttatgtaattgaaatttaattcagtgttctactgtcaacttgatcagagttaattacattttataagttttggtttttgtttatgtatttttccacagtttcacccgattgaggcatgtttggaaatctctgcgaggataataaatgatgaacaaaatgaacttcgttcaaaagtggttgaagatcgaagggctgtacaagacagctcatttgcatcatcctcagcccctttgcgtactccgtcaaagtctccaggcgatcctcggttcagtacggtgaagtctcgccacgcaaacatgtatcctccctcaaaagcctcccctaggtttcggtctaccaaggctaagatttcatatggtgaatagtccgtaaaaaaacttgagttattattaggttgtgttattattaggttgtttagtttggatttcggaacatttggatttagacatttgtttttattagtttacgtttggaactggttatgatgttgacagacttgtgtttattttagttttcacaacaaattaactttgacattgaccaatacttagcaaaatctttgtactcattaaagtttaaaacttagttctcacaccatattaagtttgacattgaacccatacttgagaaatatttgtcattactgttgaaaactacatc

SEQ ID NO: 360424 - DNA, 567 bp, Cannabis indica
gtctctgcaagaagttctcagtgctgtcccaattaccatctcaaatgacatgaaccaaactttaattcaaccgtttacgagccaagaagtgtatgatgctcttaaatcaacgagtcctgataagagtcccggttgtgatggaatgtctgccatgttctaccaaaattattggaatattgtaggcacttcagtaactaatctggtgcttggtgttcttaacgaaggtctagacatgagggatctcaacaagtctattattacactgattccaaaagtgcctaacccaagttcaatgacggattatcaaccgataagtttgtgtaatgttatctataaacttatttccaagacaatcatcatcagattcaagaaggtgctcccatttgttatctctgaaacacaatcagcttttctctccaaaagattaattacggataacatcttgattgctttcgaactcattcatcatattcgtcacaagactcaaggaagaattggatattccgcactcaagttagacatgagtgaggcgtttgatagggttgaatggcaataccttgaggctat

SEQ ID NO: 360425 - DNA, 728 bp, Cannabis indica
aagcaccaaaatgttgacctcgcttttagccaacgacaatgagcctaatttaataagggataagtgatttatagcaatcgatatataataaagcaatgtaaagacacaggaatattatagaggttcagccccgagcaattcagtaatagcctaatcctcgttacttgtattgacttaagaagaaggagaaagattccttttcttatagctcttacaacaagatctctgaatatataattcttagataatatatttagggtatagtctcaactgaactgtttctgactgatcctttgcccattgaacatgcatcactatttatagggctagtaagcttggagaggaagtctttcccatttcgttacaatgtgtataaacagaaagatcgtggaatcaatgctgagtacaaagatcatgggattgatgttgaatacacttatcgtgggatcgtgtgtatgccatatccctgtaatctgatccccaagttcaagggattttgttgatgactcacaatgcgaaagctaaatttgctaagtgttggttgctctgtgcggattgttgattgctttgctctaggcatgccagcgatgcatcctgctcggactattccctccgaccagatactccaagtggattctatgtgtcaccattatgtgatggcacgtcaaattgcgaaaattgaaataacagaatccaaataaaatattttcagaacgaaaataaaatta

SEQ ID NO: 360426 - DNA, 1108 bp, Cannabis indica
tctttgtactctcttcctttcctttttttgtacttagatctgaaattttcgtactactcccttttcttcaagtgcagccaccattttcttgttatcctctcttctcttttgctccccaattagggtactaaagtttaccctaattagaaatccaagtcatggtccacttgcccttcatttttcacatattagttgagtcattgtccgtattttcaccacctaagcaccttttattcttcattaatgccaactggattgtttgccaaaatacacttactaggctggcaaattgctacgcaatgattgctatagcaatgccagtcagcaataagttgctatagcaatgccagtcagcaataagtctttttctgctctttttccttcttgtcccaaatatttccaaatactcattttcgcatttttctgcttaatacacataaaaacaataacatatgtctatttaacacttattaacacacacacatccatttattacaaagacacaacaaactaaacataattacataatatagacactaattactctattatttagtttagaattcaagtttaaagataataaaaataactctaaatcttagagttatcaatcattatcatcattaacttgaaagatattatttatcaaaatctatgataatatataaaatataatatatattatatatggtgtaatgtaaatatttttacactttttaatatttgttttggctaatacaagtttcgtagttaagtgaatattctgcaccatactatacggtgcagtacaaataatactagtttcataattaagccaatattcaatttactcctaataatcattaaataattacctcaataatacttaaatctaatttatatttttccataggcatcccttaaataatattcaaaaaagttttgatttatcataaaaaaataaaacaaaattatcgtaacaatattcattattattattgtcggtaaattaattaaatattatagtgacatataagtgcagtgtagggacatattttttattaatacttttattattattgcttggctctctttctttttttttctttattattattattattattat

SEQ ID NO: 360427 - DNA, 1068 bp, Cannabis indica
taaattaaagtattaacgaacaaagttgagcgattttatttcagtttcttgtcaggccccttgctggaatagagctacccatactgaggtgtgaaagtcatcttttgagtgagctagaactttataattaagagttataaagaggatgcactactatagaaaagggctaccttcagtatggtgtgatagcatccagttgcgggatcaaattaaaaaaggtaaaaaataaaatcttaccaaggacaatgatcatatttttactgtacacactaatatctaacaagtgtgtacaagtttgtaagtctcctctaaccaaaaaaaaaaatcttagttcacattttatgtaagttgtctattttttctcaacatctggtaagtatggtttgtatttaagacactaaattcttatcatctttgaaagcataaaatggttattgtttcctttttatgaaacctgaaaagatgcatgcattagaataacttgatttttgtataaaatattttagtttcttgttttttttttattttgaaaaaaatgatatttaaaaaaaaaaaaggagtcgtgtgacttcacttttgggataagaaaaattggtcatttatctttttttatggtaagtatcaacatgtgctttatttgataaatttttgatgagtttcttcttaagatttaatttcttattctttgtattttgcttatttgttgatcataattgatgtttcagatcttaattttttttgagaaattttggtttctttttgtctttggcccttatagataaacgaaaaggaggagtatttggggttttaattttgattgtatactcaaatatctagggggagttgaagtttgtgtttgtgttcgactttggtcaaagttagccttttattttggtttaatattgtgcttctcagggggagtttatatggttgttttgctaactttgttttgtaggttctggtttattaaaaatattttaaatatctaaagtgccaaaggggaagattgttaagtcctttatagcaatttagttgtcaaatattttttaattaatgtgtatttttatt

SEQ ID NO: 360428 - DNA, 829 bp, Cannabis indica
ttatcatcgaaggtcaactagataatattcatgtcttccctcggcagccgggcaagtttctgagctctatccctaagagcaagagtgaggggaggacggtgatatgtcagaatctgctgaaactgagtccgagtaatgctcgaatccttcaccatgaagtactcatcagcaaaatgccctatcttgctgatggccttggcatccgtgtcggtcagccacttgaagtatggctgagagaaatcgaagtaccccaaagaaccaggcaacctcgtggggagaaggagcaccccatccttgggaagcgtagagaacgaagagggcgaataaatacttaatgcccttaggagtgatctgggccgagcagagaccaaagaagtctgccacctccttgaagtacttgtgcaagggcatcagcgccccttgctggccgtgggcccccaaccaggcacacatcccctcgtcagggtttgtggcacgattatcgtgggcgggaatgtagcagtcctgctcgcccaggtacctgccctggtcaagagttcgaaggcacgcctccgtaatcttggacggaggacttacccacctgcgcccaaggaaccctgcctactatgaggaatcgccgcagcaagctcctcactgacgtagtccacgccctcaaccaggacatctccatcagcatcgactggctgcccaacctcgttgtactctccgaaatttaggggttcaacctcttcctctccctccgcctgttgggttttgtgccctaaataaaacccatttcaatataatcagatttacttaataataaagatcagaaataacattttatgtt

SEQ ID NO: 360429 - DNA, 920 bp, Cannabis indica
gaagcatgcaatttatttaatgttgtaattcaacaacacatcaattcaacatgaacaacacaaatccaaatctataatcaacataagaatcatgaaactaaatgtagaaaaataaagaccagaatttttatccaggttcggccaaattcaatgcctacttcctgctaccccctttggtattcatctcattcatatcaagatcaaagttacaatcatagcatgtatgatacacagcctcaaagtttcacaagagaaatccccgattctctcacttagacactccaagaaactcaacttggacagtgcctcactcaagcattttcactctgtttcttcactctccaaacagtcccttactctctctgattttctctaactctcttaatgagctcacatgcctttatctataggcttacaagataacaaacagaccaactaactaacctaactacccgaacagtgaggactgtgaacataacagaaataactaacttctccaacaaacttggagctgaatttagacaacttgattctttatttggattactaaaacctacgtttaacttagataaagcattgagatttatggagatagactaatctaggcaacaaatcaatgaagcatataattcatttaacctaggttctattcttcattaaaaattgtaattaatcaaaaacacttagaatcctagactattaggtgaatagtaatcctaagatgacggtagattaaagtaaaacctactttagcggatgtctaaacaagattaaaataataatcataacattgaacatagaaaaatagaagcaatttgataataaaaactaaaaattaacattcaataatgaatttaagaattcatgtttcagattttaaaataacatttaactaaagaaaactactcagaactagacat

SEQ ID NO: 360430 - DNA, 595 bp, Cannabis indica
atgatttggtacatgtcaaaaatggaaggggggggggggaattactaattagctttaaaataaaactggttctataacagtgttatactgaataacaataaataacatgaaataactcaaaccagttataattaaattgaatcggttctataacatatgaatacaaataaataatacagagtaactcaaataagttataattaaaaaaaataaagagaaaatcaattcctaaaatacttatacataaattaaaatccaaactagttcaacaacaaattgagtaaaaacgaataacacataatacctcaaaaattggtaataattaaaaaaaaaatgtgagaatcaattccaaaaatattgagacataaatctaaagtgaatcggttacataacaaaataagtacaaatacactgttaattctatttttggcatatttaattgacaaaaatattttattattcattgtatattttcggctggtatacattaatatggtttcctatttggtgtattcaaacttgaaaggaaagttgtctagctttcctatttttggaaaaaaggtaaaaatggtaagtttggttacccatttcgttt

SEQ ID NO: 360431 - DNA, 1137 bp, Cannabis indica
tagaaaatgtgcagacttagtaagtcgatccatccacaaccccaaatagaatcgtacattcccgtggctctaggtagcccaaccacaaaatcccatggtgatatcttcccacttcagctcaggaagagtcagaggctgcaacaaccctacaaatctttagtgttcagccttaatctgctgacaagtcaagcaccgaatacaaattctaccacatctttcttcatcccgcaacaccagtagaaaggtttcaaatcttaatacaatttggtagtgctaggatgcaatgaataacgagtggtatgagcttcttcgagaatctcatttctaagttccatactgcttggaacacaaactttggttccaaacaataacatccaattacctaacactataaaatctttagcttgaccagctaaaacttcttctcagatcttcaccaattctaaattagttaactgagccactttaattatgtctaacagatcagattgcaatgtcaaattattaggtttgcctacaacaaactcaaaacttgatctgaccatatcagttgctagcttgggtgaaatcaaaatcatgttggatactttcccaaggcctttcctacaaagggcatctgccaccatattggccttctcaagatggtcaatgatttcacaatcatagtccttgaccaactccaaccatcgtctctgcctcatattcaaatttttctgagtaaagaaatatttaaggctcttgtgatcagtgtaaatctcacacttttctccgtagagtttcgccaaatctttaaagcaaaaattatcacggcaagttctaaatcatgagttgggtataactgttcatactcttttaactgacaagaagcgtaagagattacccgatcaacttgcatcaaaacacatcctagaccctgtctggatgcatcatagtaaaccacaaacttctctttatcagatggtagggctaacactggagctgtaatcaacctctgtatcaattcctggaagcttgcttcacacttatctgtccatagaaaccattgattgtttttagtgagttcgattaaaggtgttgagatcttagaaaaccccttaacaaaccgacgataataaccagcaaaacccagaaaacttc

SEQ ID NO: 360432 - DNA, 678 bp, Cannabis indica
ataaatcacttcaaatttcttatattgataactaatcatattgtaatgggttttatttagggcacaaatcccaacactgtagggtgcgcaggcctaattaaagaaccacgcgttgttgattgtgatgtattcgctcagtagaaacgcgaattcctgagatggatggatgaccaaaaatacatccttcgatctcaccaggcggaagtagatcaccgcaatcaggaggctagtgatcttataagacagttcaatcaaataaccgataggagaggccaggatctccttagggatccacttcaaggtatattgctaccaagttcctcataaactaggacagatcttcccttgctagagggagtgttgtgatatttttcacacgcaagtacacgtatcatttacaagtagtagactcaccaagagtgaggtcgatcccacgaggattgtagttaagtacattaaaattaaacttttacttctatttggttaaataaaaagtaagaataggttaaagctagaaaataataaaacagtgaaaggagaaacaatttaaggaaattaacaattaataaaaactaggacttcgatttcaattgtatcaattgaatatgacttaatatgattatcttcctattatcaatttttatgcaatagcaggtttactaaggtaatttatagtct

SEQ ID NO: 360433 - DNA, 1162 bp, Cannabis indica
aatcatgtatctagagaatatgaggctcgaagagaaaagatgatagcatatctaagaaaaatacattatctgctcgcacaattcaaaagctacggtctcagacaaattccaagggaagaaaacacaactgcagacgcgttagctcgattggcaagcagcaatgtaagtgacaaggcaaacttggttcatatccagttcctcgaagagactaacatcactggcacggaagaaattgaaatgattgatacttccccaaattggatgacaccaatagcagcctacctcgactctgggaaactcccagataatcgaaatgaagcccggaaaatgagaaggaaagctgcacggtatatcatagtagacggaattatgtacataagaggattctcaataccattgctgagatgtgttactcaagaagaggctgcacaactcctatccgaggtgcatgatggattctgtggaaatcatgccgccgggcaaaccttatctaagaaaattctaaggcaaggttacttctggccaatgatgatcgaagattcataatcctatgttaagaagtgtgacaaatgatagagattttcaaagatacctcgagctccacctaacgagttaactcagatgcagagtccgtggccctttgccatttggggaattgacctgatttgacaattacccaaaggtaaaggaggagtgcaatatgcagtggtagcagttgattactttgctaagtggacggaagccgaaccactcgtaaccattacatctaagaaagttcaagacttcattgtgaagaacataatctgccggttcggactgccatacaagatagtttcagataatggcaagcagttcgacagccaatccttcactgacttttgtgcgaaccatggtatcttcaaaagtttctccgagtggtacatcctcaagagaatggtcaagttgaagcagtcaacaagatcttgaaggatacactgaagaaaaaactcgaagatgccaaaggaaattggccagaagagcttcttgaagttctatggtcatatcggacaactaagaaaatggcaaccggacagacaccattcgcattggcgtacggatatgaagctatgctgcctgtagaactcgagccaccttcccacagaagattgatgtacaatcaaga

SEQ ID NO: 360434 - DNA, 984 bp, Cannabis indica
tgttaaaaatcattatcaaatctagaatatgttagaatgttttacaatgttctaagaaatttgtaagaaaaatcaagaacactctagaaagttttagagaaaacttagaatcactagaactaagattagataattctagagttgtttagaaaatagtaagaagtaattaattagctagtaaattagaaaaatctagaaatctttagatacatcctttgtagcctataaatataagtgaggtgtgtgcttaagatgcaagtttgagcaagagagttcaagtgtgagaaaaagagtctaaagtgtgtgagttcttaataagtgtctaaagacaaagtatcccaaaagtgtgagttatacacaagtgtgtagtaaaggtgtctagtgataaaataaaagagtgagtgcttagtgtgtattgtggtcaagttaaagtgttcaagtcttggtgtaattgcttttacaataataaagtaattacgtttttcacgtgttgtggtgtccaacagttaatagtgcagttacataccttacagagtagttgaatgctcaagctatgaggttaaacttactgcagtttttactgttgtgtcttctaaacagttgatgaaatagaatataactatttttaaggttaattgtcatgttgcaattatttatttgtgaaatagtgtgggaattagacgattgattatttagttcgtttttttaattctaatcctacttgtgtatgttctattgaattccagactattatttaataaaatttcatgctttattaaaaaaaaatagatatatacattgatttcttatttatttttaatcctctttgaaaatgataagatttttactagttaggaatttttactgatttgggacatttattttttatttttgtatttgttttatttttaagtaataaatttaaagttgaaagaaagttccataagaaaatattggaaaattatatagcacatactcaaaaaa

SEQ ID NO: 360435 - DNA, 845 bp, Cannabis indica
ttttaaaaatatattaattattaataagttttactgtggacctgcacacattgatttaatattttatataatatttgcatttgatgtattggacttctttattaacacttttgcttattaagttagacttttgttatatttttactatgggattatgaaaattaggttgaatttgaattaaactattatttattattggattattgggctttaaattatgttttttcatatatatatatatatattttttttattttcaatgaaatcagcctaaatagtggctaaaatggattagatccattggatggatccaatccaatctaataaaaaatcagttaaagcatccaatggatgaaccgatctaatccaatacatccattggatcgaatcggatcggatgactcaattcaattggattggatcggatggcaaaatccaatatccaataaataattggattggatcggatgggtccaaatctattggatgagatccaatgagcacctcgggtggacatggagcctccttcaacattcttttcacatcaacatatgaaaaaaagaggctccaactcgctgacttggcaccctgcagtcaagtgatgtatgacctttttggccaagacatcacacccatcaggtatatcaagttacccctcactgttggaaaaaatccaactactagaactctgatggtgcagttcgtcgtaatcgacattccctcggcttccaacgccatgatgggctggtcacaagccctatacgacttgaaggtggtaaaatccatctaccacctttgcctgaaattcctaacaacggaagaggtaggtgttggaaatattttac

SEQ ID NO: 360436 - DNA, 687 bp, Cannabis indica
tgtaacaccctaactatcttaggcatgttagagtgatttttaactgactgtgcagctcgttgctaatcaacgaggttatcaaaaattgtaattaattaaaatttagcttatttaattaaaaacataaaatatcatatatataaaattctcggatctcattaagaaaagtatctacaaaagtttcactgtacataaacgaaagtctgtcgcctagcgactatacaaaataagcatgatgtcccaaatatcgtacgctccaggactagccgccctgacatgtacaatctccatctgctcgctctcacagctgctcagccttgaccttacccttaccaacacacgaaaataacaactgtgagtcaacagactcagtaagaatagcataacacaaaacataataaaatcccggattataatcaggtgcccatacacccaaccataaccctatcctcgtatcccacacagtactgagcctagaagattcatacggcaatactatcaaccataatatcagtctatactcaatatgtcagtcatactccagccatattgatgtgatagcatcgatcagtattttagccaatatatatttattagtattcagtacaatcctatatatactgatactactatcaatgtactctatcaggcataaacaacatgtatgctaaacatgtaaatacatat

SEQ ID NO: 360437 - DNA, 793 bp, Cannabis indica
gttccaaaataccgggcactggaaatgcaaagtatgaaaactactgaatgacataaacatgcatttctgaattccataaataacagtataataaattatttaaatagctataaataatttcataattaatcaagattaactgctaatttccaaattaaactaagcgggctttacatttatgtcttacatattgtagacctctagttcacaaaataaatcccaacttcttaattgcactgttaagacctccaaaatctaaaaccaacttacattcgagtacagaccatctacttttagttaagtaagatcatatatgctaaaatatcgtaagtgcattagtaaccctttaaaacgagttcaaccctaacataggttaggtagcccaattatttatttatcatttactatttaaccataggttaatcatgtaatctcataatatatcaatcaaccaagttgtcggggtaaggatactatatacataattggcaaatcatgccgaacagaccttactctgttcatcgttattatacctcctacaccccacttgtatctgatttgctactagagactcactttttataattatttagccagggctctttgactcgtacttcctaaactacctttaaaaataagtccatacttcacttaagcatcttcattccatatctgaatgcaatcatgttatcaatatatacatccctttctctttccttataagttcctcacttccaattagataaactttagttattttccaaacaatggctattgtcttattccatcttag

SEQ ID NO: 360438 - DNA, 602 bp, Cannabis indica
tactttgtcactcaaaatgtaattaaatggcatttctacgtgtgcactattggacacgtggtccacctacattggtctacatactatattaatttaaaaattattttaaattaaaaaataaattattagttttacaaataaagactaattataaaattaattacaaaatcccactcactcaaatcgtccatgccatgaaacccaagtgaagacagtcgcgagcccaggttggaatcaaatcgccccccgacgaaaaatgtgattgatctagtcttcttggaggatttaggcagaaaatgttgaatattcttgacgcctccgcatcttcgtctcactctgtattttaatttctctgaaccacaacagccactccatttgactcctgcttcgacaagcttccgactgtcgttctccccagtgaaagaccccaagtagtcgagttcaacaactgaatggagattggaaccattgctttttccagtcgacacccacgacattcattcctcaccattgaactctcctcaatttcttctacccaaattttatttcactataaaaaaaaaactcttacttttagtcacaacaaaatttgtgactaatga

SEQ ID NO: 360439 - DNA, 571 bp, Cannabis indica
ctagaatattgtgaatccagtgaaaacataagttagggttaacactcttagtaaatgttacctgagtatataaaaatgtattatatgagtgattacatagtgtgcaagttagggttataaccctgagattatatatgttgtagtaaatattgaacaaacgcatgtattttaagagttatgtgtataagacataattgggttattgttacgaaaattatgaacaatacgcaagtgcacgtaatcaagtagtaaactcacgcaggtgaggtcgaaccacaaggaattgaactgaataccactaaattagacttatgattctatttggtagataaataattttgatagattttgaaataaagaaaaacaagaaaattaaagaaagcaataaaggtatttaatcaaggatgagaaattagggaaaagaatcctgttgatttaattacccagctgttaatgctaattactattctctttctcaatgttaatgaatgattataaaaataaacctaactcttttcagatcttttaggtcctaaatcacatgttatctaatcatctctgagatagatta

SEQ ID NO: 360440 - DNA, 915 bp, Cannabis indica
ttcttatttacacactaaacatttataaggattaaagacacccataatttattatttttataaaatataaattatatattttattttacactaaaaaatatataaaatataatatatatttttttaaaatattatttttcatcatgctcacattctcgaaaaatacttatgtagaataaaaaataaaatatattttaaatattaagagaaaaaattaaaaataattatataaaaattttattagaaaatataaaaagatatacattattaataaaatggtaataccaaaaaaaaaaataaaaactaaatagctattgaaattaacacaatagtatggaaaagaaaatttaaaaattattaagagtaacttttcaattaatttaagtttattttattttaattttaaagttgtatttataaatttatgggacacaaataaaatatcccttacctccaaatagattttattttatttttgaaagaggtaaaaataagaaaagtcactattaatctttgaatggaaaaaggaaataaaaatcttcaattaattttagggtgcgtttgaaagtaagtgtgtaattattttgcattatggttactagtctagtaattacactccatagtaactacattatatttcaaaatataatgtgcgtttagatatcaaatggtaattacatgtgaatttctattattatatttggcaagacggttggtaattacataataaattaatattgtaattattaccattttgtaacaaatattaaaaataataaattttattaataacatttatagtaaaatctacttcataaaataaacgtaaactttatagcaattttgtaataaaaatttaaataatttttactttattatgactattgtatgtttttgtattctatatatcttgag

SEQ ID NO: 360441 - DNA, 632 bp, Cannabis indica
atgaaagccgagcaatggctagcagtgattgctagaatctttaactttatgggcgtcactggtaatgattgagtggtctatgccactttctagtttcaagaaaatgcactggtctggtgggacatagtgttcatgattcacgatgttacgacaatgacctgggaaaagttccaggaacttttcaatgctaagtactacaatgaagcagtcagaattgctaagagaaaggaattcactcaactgactcagaaagaaaatatgagtgttactgagtatacaacaatttgaccatttggcgaggttggccgtgggaatttggccgactgatttcagtaagaaagagaaatacctggatgggttaaacgtgaagattagacatgacttgatgatcactaatgatgacagaaccacttatgctgaaatggtggataaggcattgcgagatgagggcgcagtgggatgtatggttgagtctggtgggactccggctgttggcagggctcctgcccctcctgcatcaggttttagcaagggtggtagtagttcagccatagatcagaaaagaaaggcatccactgcaacttgtggcttaggtcagaacaagaggtttcgggggaaccagggtcgaggca

SEQ ID NO: 360442 - DNA, 610 bp, Cannabis indica
aagccaatgtagtggctgatgccctgagctgaaagggtgccgggcaggtagctaacatgattcaaatttcatctcagttagcaaaagatatggtcagatcaagcatcgagtttgttgtaggaaaacttcataaattgacgttgcaatctgatctgttagaacgtattaaaggagctcaactaactgattcagagttcgtaaaagtcagagaagaggtttcggctggtaaagctaaagacttcaaagtgtcagatagaggaatattgttgtttaagaccacagtctgtattcctaatagtgtggaacttagaaatgaatttctcaaaaaggctcataccactccatattccctacatcccggcaccaccaggatgtatcaagatcttaaaccttacttcaggtggagcggaatgtagaagaatgtggtcgaattcgtatcgagatgcttaacctgtcagcagatcaaggctgaacatcagagaccggcagggttattgcagcctttaaccctacctgaatggaaatgggaagatatcatgatggactttgtggttgagttacctagaagcacgggtttgtttgattctatttgggttgtggtggatcgatt

SEQ ID NO: 360443 - DNA, 509 bp, Cannabis indica
atttaaataatttataattttatgtagaataaatataataatgtataatagtgtcggtttaaaatcaacactaaaaaatttattttatatgttgttgatttaattatgaaccaaggctaatggtataagtactcgatttaaaaccgataacaaaagagcattttgtagtaataatatataactgtattgacttttacatatatatgtatgaaactatcattaattattcacaaagtgatctattacctttcaccagagatacttaacacaacaaacaacaaaaaaacggtaacaaattttacaaaattgtattatattacaaaattttttacttttagtcacaataaaatttgtgactaaaagtaaaaaagttgtgactaatattataaatcattgtgtttaaaaaatccgtgactaaaggtactattcacaaaattcaaaatttcttatgactaaatgtatttttagtcacaatatttgttgtgactaaaagtaaattagtgataact

SEQ ID NO: 360444 - DNA, 776 bp, Cannabis indica
taaaatagaaaaacaaaaaataaacgcatgagacccttctctctatatattatatttattttattatatatatatataaatattaagaaaaaaaaacctaaaatcataacctctctcttatatttattttattccatatataaaaaatagtaaaaataaagagagtaatttacggtataaataactccaattacaaataaatacagatatttctaccccaaattagtgaaaaacaaaaccctaaatcagacatctctcttatatttattttagaataattagcatatttgcccctgaactttcaacactacctagttttgcctcttaaaatatacggcttgttaaaaattctccctaaaatataacacttatataattatgccccttctgttaggttctgttatctttaccgttaaaaattagcatttttactccctaaattttaattaatatgaaattttgctcccttttatttaaaaaataattttaaaaattataatattcgattaattttgaaaaaataataaaaattattaaaaaaaacttgacaaaatattaaattaattaaaaaaatattaattttacttaagaaaattatattattcttataaaatatttttaaactttattttatttataaacacatatcttaaaaaatcaaacaaaaattattaacaatctaataaattatttaaataaactaagatttattgaaaaagaaaatcaaacttatttatatttataaattcatatcttaataaataaataaaaataat

SEQ ID NO: 360445 - DNA, 690 bp, Cannabis indica
ccagctccctgcatcatatattgaccctttccaaagaaaagctctacatatagattcaatctcatttattaccttctttggaagcttgagaatctcgcaccaataggagtgtataggtgaaagcactgaattgatgaggacaacccttctagcaaaagacaggtgtctagtgctccatgatctgattcttgctgtcattttctctgatagaattgagcattcatgtttcgaaatccgttatgacaaataggaataccgagatatctgaacggagtttgatgttttgagaaacctgatgcctccagtactctagtgacatctgattctatcatattgcagcaatagatggcagattttgctttgttaggttgcagccccgaggtagctgagaagagcttcaatccttgtagcaaaaggatgatgctcttataatcacctttacaaaaaagtagcacatcatctgcaaaacttagatgattgagctttagagtgtcacatcgctcatgaaaagagaaatctgctttattcccaactttcttcaaaatgcgagtcagatattccatgccaatgacaaataataaaggagaaaggggatcaccttgtcttaatcctctcttagattcaaaaaacccgtgaagggatccattaaaaaaaagagagaattttggagttctgacacagttcattaca

SEQ ID NO: 360446 - DNA, 521 bp, Cannabis indica
atcacctttgatagttgcccacctaattaaggataaattcgcaactgacgactcagatcatttgacctatgatataaggaaagatatgtacacagattttgagatccaaatgagttatgaaaaggcttggaagtgtctagagaaggcactacgcctagttcggggtacacttgaagattcatactcaaaattatctggttacttgcacatactaaagttaagaaatccaggtaccatcacgaattttgtggtagaggatggtcgcttcaagtattgtttcttcttgctgggtccttatagatgcgggtttaggttttttcgacctattgtatgtgttgatgggtctttcttgaagactaggtatggtgggcaaatattgtgtgcagtggcactggatgcagtcaaccatatttttcaaatagctttcgctttagttgatagcaaaaaccacaacacttggacctattttatgataaaattgaaagatgcaattaatgatgttgagaacttagccttcatgt

SEQ ID NO: 360447 - DNA, 875 bp, Cannabis indica
tacaaattaggtaagtatgatgacaaaatgcaactcgtttaagtaccacagtattagaatggggaacatttaagaaaatactaccaataaagtaccaggttggatgaccacactaagtattgaaggaaaatttacttttaagtgaatggcctgctgggcggactacgctcaaagttttcgacaaaaaaaaagtactcaagtcgaatgaccactatttaaagtaccatttcatatttctgcagtttgttttatttcatgttaagctaaaagatcacattagatcaaatagctccgatgtaagttactatggtaacaaacacagtttcgatcaataaatgaataaagatgtttatttcaaaattcaaattgagtcgaaattattgacatgttgttaatttaccatccaattcgtacaaaaggtttggtcgaaccaaaaatcccgaacagataaaaagtatacttgtgataaacaagtaaccaagagtcataagtctgctcggtcacttggagggcacctatacctgtacgaagcatttggcaaagataaaacagccacaattgcacgatgattataaacagagaatgaaatccactaaagataacaaaagcacgtaataccgggattaaaagctgcccgctaaccctgttgtttgtaaaatgaaaaataattccaagtttaaagaccccttggccggtcatgatgtcttaaaaaagggccttatagccgaataagatatatataaacaaaaaagtacttaaaaagctggagtcccaggtgttggaaattattttaccaggatctagatttactaccaagtatgtttgattaacatcccaatatgaattctaaaacaatgaaataaacacataagagt

SEQ ID NO: 360448 - DNA, 612 bp, Cannabis indica
taataaaaaaaataataagaaaagaggagatgtaaaaaaatgcataataaaaaatagcttaaaaatgtatctatgtcatcaacatctctgatgaaaaaatttgaagataatgctgaggtggacaagttagagtatctccaataagagataatacctatggttaccaaaagtacatacatcatcttaaaatattacctttttttaatctctcacccacataaaatttgacatattttcatacaaatattactctaataattggcaactttaaaaattgttcatcatgtctcacatatcaccttttaagtagtgataaagtaaccttttctttttcaaagaaaataataagtatatgacacatgctaatggtcaaatataaacaataacattgatagagtgggtttgaaaatgctgaccacattatatatgtggaaaagaccactccacggacaactcccgttggagatctcttagttggcataatataaaatgttagaaaattttatcatacactaccttaaaaggatgcactgatacatctttatttgttttagtatccgaaataattttagtcaaattttttctcatagccatgtaaattatagttattta

SEQ ID NO: 360449 - DNA, 559 bp, Cannabis indica
aagacccaggacgcgaacccacacccggagcctgatatgcacctagacaaaaatctggacccgaacccaaactctgaccaggactcgaactccgacccaaactcaaacccaaactcgaactcagaatcgcatattcaattagagccgaactaggactaggacttggattaggacttaaacccaaacccaaacccacatcaaaacccagaccgagacctaaacccgaactgaggctaggactcgaacacgaacatagaccgggacccacacccacacaataatcgggaccgggacctagaataaggatagggacttgggaaaaagtactaacatcggtacctagtacccgacccagacccgaacatgaacctaggaccaagctcgtgacccggcaccataaatggaaccagactgggacccgagattggtatccagatctggacctagggcttggacaaaacccatagtcggtgtctggatttaggacccaagcctggacccgaaccctgacaaggacccgaactcacacccggacctgaacccagtcccaaacccaaaa

SEQ ID NO: 360450 - DNA, 444 bp, Cannabis indica
tttttttttttgagaaaatagaaataaaaattgtcaaaattgcaaaataccaaagtggggcccattaaccctatggccgaccacttaatggtgattttccaattaatattttcattattttaatgtccaataattcctaacctaaacctagtggttacctataaatacatagtgatggctcacacgtaaagagattggaaatcagagaaattttttgccttcagaaaaattgagcctttcatactattgtctatagccgaaacctcttctccctattttcttcttcaaattttcgaacctttgagtgatagagtgagtgcccacacacatcaagtggtatctcaatcatagtctgaaagattgtgaagaatccaaactgaagagaaggacattcgggctcaaatcttagtgatactctgctacaaaaaggatataagggttaga

SEQ ID NO: 360451 - DNA, 524 bp, Cannabis indica
ttaaaagagatatatagtataatttcctctattataattaacaactcttctatatagcaatacttttcttattaaaggatttattggcaaatcttaatcaaaagtcgtaaattaaaataattagaaaagtaaaagcttccatgaatgaagtctctcatagatactttaaaaagtagattttttataaaatttaaagaactaaactaaaagagttttttgtgattaaattctcacaactatcactccacttgcacttaactaagcttaaattttaacggtaaaattttccaaattactaaactgcttgcaaatctaaagtgacttctattttcttacagttagttgccaatatagattgcgtatgtgtacacttgtgtacatgtgtcaaatttatattggtatacctaatattattattttaaaaatatataaattatttcaaaatttataatattttttatttttaaaattttttttttattttttataattttatttattttaaaatgaattttgaaaataat

SEQ ID NO: 360452 - DNA, 764 bp, Cannabis indica
agcactcggtggtcactcacttctcccacaccatccaccttaccacagttgaacccccagccacatccgaagaaaacacctttcccacctgctccttcccactagccttctccgccatcaccgcacccacaaccggctcactaaccaaaggtgcaaaagaaggcaagagcacctcctcagacaccataggatcaccactcagcctacccaactcagtctcggtcacctccgattgacccccagcaaccatgggagcctttgctttcgtattggccatggacgccatttcctcatcacgttccctagcctctaaaactgaggtaggagctaactcctcaggtgtggggccagagtaacgaacacggcttctctcaacagccgaaacaatctttgaggcttctcccatcgtcataatcggcctattggagggggaagtctctcgctttttttggtacctagtccgatcacgtggcggagaactcggagcacacatccacgaaccatacctcccactatcaaaattaggattaaccccaccaaagtcccgcaaaggacaatccaatgccttatgcccgatgattccacagtcaaaacaaaagtcgggtaaatgttcgtattgaaatagaagtgaaacctcattaccttgatcatcgatcgccacacgcaatccacgcttcagaggctccgtaatgttaatgcgcaccctcactttcatggtaccattaataatcttaatgtcttctaacttaccaatcctctccccc

SEQ ID NO: 360453 - DNA, 531 bp, Cannabis indica
gataactaatcagattgtaaagagttttatttagggcataaaacccaacagatacttggtcctgccaatatgatgtcgtcaacataaacaagtagtgcaacaaatgattcaccgtgccctctagtaaaaagggtgtaatctgcctttgattgaacgaaaccttcttgaagtagtgtttgagagcttgcgataccattgtcttgatgattgcttcaatccatagattgatttgttgagtttgcataccaagttagaatttggttctactgaatccagtagcttgagaccttttgggagttccatgtagacttcttcatgaagatctccgttgaggaaggcgttgtccacatcaatttgtaatgtgtgccattgttggatggtggcaatggcgagtagtagcttgaatgtaaccattttagctacaggtgagaaagtgtcgaagaagtctagtctttcttgctgcgtgtatccttaagcaacgagacgtgccttgcatcgctcaacagatccatcactattgtatttaatttt

SEQ ID NO: 360454 - DNA, 442 bp, Cannabis indica
gcagacatgtctcagaagatgcttgatcctctgaagaggagagttgaaggaagctcaagagcatctcctctggcaaagaaatccaggggcgatgaggggaccccttccaaagaaaaggtgactgtcgaggaggttatcgacctttccgaggaactaactgttgcgaacccctccactccaaaagttgctaagtccaaggattctcgaggaggatgtttggacaggcctgagcaaccaaaaggtggatccgagctgatcaagggtggatccgagcagatgcggactcctactcctcctttgtcagtgcttccagaggccaagaaaggcaaggagattctcgcccactacatgaagtggttggttcctgaggttagtgagcaactggccgttgctgacaacgactcttctttggagctactaatgggaggagtcttgaaggaat

SEQ ID NO: 360455 - DNA, 873 bp, Cannabis indica
attctttatttattattgccaactaaacttagttagtcacaaaatatttagtttttcgtgacttaaattttagttgtttaaagtttacttttttggttgttgaaagtgcatattggtacttatgtgaccaatatatcaatcccttatgtgactaattttaatatattttgtaactaaattttagtcatagaaaataacattatttgtgactaaataaattagtcactaaatctcttctacgaccgacattcagcgactaaatggtgactaaaaataattagtcacgaaaaattttgggtgactaaataatgagttttaatgaccaaaaaactagtcggggaaaatgggttttttttgtagtcttaaataaaagttttggcatttaagtggttagcattggaagaatgacatttttgagaaaataaggaaaaattgttaaaagtggcaaaattccaagtgggggcccacatatccatggttgaccacttataaggtattttccatttaatttttccattattttaatgcctaataaatcctaacctaaacctaggtggttgtctataaatatatagtgatggctaacacttaaagatgataaaaattcacctttagtaaaaatttcctgagccatctttccttctattttcgaatcaccatcctcttttcctctcttcatattttcataccttgagtgatagagtaagtgcccacacacatcaagttgtatctcaatcatagtgtgtaaggctgtgaagaacccagaatcaagagaaggacattcgagctcagatcttgatgataccctgctacagacatgatacaaggggttagagatctgagtggaaggagccattaatattccgctgcatc

SEQ ID NO: 360456 - DNA, 761 bp, Cannabis indica
tttttttataatatatagtgatcttatagtagtgtttggagacaattatctacaacgttcagactttcgataccttggaccaaaggcttgggttgaatcatcggtaaaaataaatacatctttaaatgtgatatctcagtcaatagtatggaatgagcaatatttagttttttagtaggttattactatgatttctctattcttgacggaggaagaaaggagaaggagtgggggttgctccaccatttggtatcttccatgtcgattattggttagttcttatttgattttatattattctaataccttcccaagaataattgtacataatgttgatctcaacatatttctaattttcaaatagaaagaatctttaccgtatcgtgacttaccattacatgaagtttagaaggaaatggattactacaacatattcatgggaaatcttgatttctgcaaagaagtaatgttttattgctgagtcttttctttttacatcctaatcctattcctattgcatatattttatttgttgtaattctaaacgttcttgtagatatacattccgattttatcgtcaagccactattgccttgcttgagttattatatttctaaagaaggtagaagtgtgggactcacttgctgatgaaaaatctccagttcgacaatcttataagattaaagaaatagtaagtattgaattcattgtatggaaaacgagagatttataattttattgcttaatttttgtattgtaaa

SEQ ID NO: 360457 - DNA, 560 bp, Cannabis indica
aatattttcaagatcgagaatcaacctgctctccaacagatttgtcttccatcatcttgaatgaatacaaggcctattttagatataatctattcacaaatgatttagtcatatacagactttcaagtttcaaccacacacatgcgactgtattttcttttgcaacctttctctaagcattatctctaatgttcaaaatgatcgcactatgagcctttgcaagagtctctttcttgtctttttaagatatcagttctggaagagtcttctctcctagcagagcctcatacaatccttgatgaaccaacagtgtcttcatcttcattctctataatccaaagtcattcgtaccaataaacttttgacatcgtatttcgcggcagccatgattaaaaacaaagctctaatacaagtttattgtgtgaaatggaacaatcaatgacttatgattcagtttatagtaccaacaaacatgcaacacgatcaaaaaaacaatataccaagaaatctcaagaattcaagataatgaattaagcaatttgttgtgcaagaacacagct

SEQ ID NO: 360458 - DNA, 552 bp, Cannabis indica
ttggcctactcttttcaaagatgctaatgacgtttttgaaggcatgtgatcgttgttagagaacggggaacatttccagaagaaacaaaatacctttgacaggtatcttggaggtggagttgtttgatgtctggggaatagatttcatgggcccttttcaatcttcattcagcaatttgtacattttattggctgtggattatgtatcgaaatgggttgaagttgcaacagcaccggctaatgatggtaaaacagtcttgtctttccttcagaaatacatattcactcgttttggaactccccgagcaatcattagcgatgaaggaagtcacttttgcaataaacagtttgaagctttacaatccaaatatggattttgccatagaacaactctaccttaccactcacagagtaatggccaagctgaaatttccaaccgggagatcaagatgatattggagaaaacggtgcaaagatcaaggaaagattggtcacgaaagttagatgatgcactatgggcatacagattagcttttaaaacacctatcggca

SEQ ID NO: 360459 - DNA, 863 bp, Cannabis indica
tatagttattcatgattatagtttgtctacaaagtgaaaaataattatgattatatgcttcaaagtatttaatcccatgatttatcagtgcactgaatttatactgacgtgataatcagcgataaagtttacttacacaatgatgtgaggaatgtcttttgcagggcattagtaaagcatactagtatcaaatatattggatatacattggattggaccgacattgatagtggaaaagatattataaacttaatgttatgtcttttctaagtcaataccacttagttaatcttagatcaaaatatcttaatcctgcgatggttaggttctggcttaactgaaatgatgattttcttagagcttcgcttaacagacataaatgaaagagctcttatttgagtaattatattagtttactaaaatatcatttatacaaaactaagtgttttaaagataaaatacattaaaggatagaacgataaatttgtccatactcgatgtagatcatctatagaggatctttgattatttggattgaaacaatagataattcatagcgaatccgttttttggtgaatagagcattctatgtaatcaggagtgcaattccaaatctatagtgggggtcatgaggaattaataagttagagaatttacttgataaattttaaactacttatgttgagataatattatcttgtagactcaattaaatgattttaattaatcaattagaattttgaataaaatgtttgtaaattttcattaagaaaggctatttgagaagaaaaaaggatttatgatttgtttattaattaagagactttgtaaagtctaatcaataaataagttaaatgacaatt

SEQ ID NO: 360460 - DNA, 1099 bp, Cannabis indica
gtcccgtacagacttggggggcaaatgttatcctaatttttgcactctgacgtggcatcacatgatggtgacacatggaatcgactctgaatatctgctcgtagaatatagtctgaacaggatgccttgtatgcatgctcgaagcaaagcgatcaacaatctgcgtagagcgaccaacacttagcgaattcagctttcgcatcgtgagtcatcaaagaaatccctataacttggggatcagattgcagaaaatttgtcaagctgtccaaatcccacgatcaatgtattctgtatgtattatgcaatatttctgcttatatccattgtaacgagaagggaaatacttcctgtccaagctcataaccctataaatagtgatgcatgttcactgggcaaagggtggagagattttacttaagagatattatctaagaattcatattcagagatattgttgtaagagctataagaaaatgaacatttctctttgttcttgagttaatacaaataacgaggattaggttattaccgaactgctcggggctgaacctctataaaattctcgtgtctttatattgctttactatatatcaatcgttataaactacttgtcgcttactaaattagactcactgtcgttggctaaaagcgaggtcaacatacctgatttggattgatggagagctccaaatctatttattatttcaagtcatttattgccaattgtgaaccctgtatttttacaatatttttgtttgtatcaaaatgttttagcaactattataaaacgaaatgcaactattttcataaaactaaccatgttgaagcagtcttttttgaagtgatctttcttttttaccgtcaaatgaaattcctacaatattgataaacaccatatgaaatgataatacaactataaagcaacctaaaaaaatgaaacatacttatacgtaactagctgtagattaattcgaattttcttttcttattgtgtttgtaaattaatatattccatattggaaatcaaaaatcaacaaaaatgcaactgtatataccttagatctattattcatgactccttttttttttttggtttttt

SEQ ID NO: 360461 - DNA, 596 bp, Cannabis indica
ttttatgattgcgtacgctataactatttagaactacttgtaaatttttaaaaaattttgaatagttaaaatgttgaacaataaagtttgaatagttacttatcatgcgtataagaaagaataatcgtgcgtacaacaaaatatgtaaatcttgtttcgatattataaactacttggaattttttgaaaattagcaagtagtaccactactacaaatatcagaattcgcgacaatcctaaaaatgatttttttcgaggaccgtcgctaaaaaaattaagtaactgtttaaaaccgtcgggaaaaatttagtattctcgacggtttaaaatcgtagtaaacaaaataggtgacattttttcataaaatttaatgttttataatggacccttataccgtcgggtataagggtccattaaaaatacgtcacctacttctcgccacatttcccacgtgtccacctactttttttttattttcctacatgcccacttatttcttctcacctatttttcttccatttcccacaccctaaaccgaaaatccttaataactctccaaaaccccacccactatgcctccgcaccatcaccctcct

SEQ ID NO: 360462 - DNA, 713 bp, Cannabis indica
catttaagtgattagaattggaaaaatgacatttttgagaaaataggaaaagattgttgtaaaatggcaaaaattccaaagtggggcccatatccctggccggccacttatatggtattttccatttaatttcttcattaatttaatgccttataaatcctaacctaaacctaggtggttgcctataaatagatagtgatggctcacacttaaaagatgatgaaatttcaccttcagtaaaaaatttcctgagccatccttccttctattttcgaatcactttctctcttccttcttcatacttttcataccttgagtgatagagtgagtgcccacgcacatcaagtggtatctcaatcatagtgtgtaaggctgtgaagaatccagaattaagagaaggacattcaggctcagatcttggtgatactctgctacagacaggatacaagggttagatatctgagttgaaggagccattaatattcccctgcacccactgtaagattttctgaaactttatatgtgtttatttacattgttttagaaattcatatttaggatgttaaataacatacattgtagtaaatctagatcatggtaaaacatattccaacagacaagcctaagccaccattttatactctaaatccagtcacaggaaggccaaaggttgggaaatataacagttgagagtgaggcagaagatgaaaaga

SEQ ID NO: 360463 - DNA, 304 bp, Cannabis indica
taaaaacttaacggagattaacatctccttaactttcaaatccataatttatcttatttataattttcttttttttttttgttttaaaattctcaaaccctatatcttgcaccaaacaattgagaggttatggagacggctgcgtgaagcctacctctgctccaattcttcttctcttcatctcaatcctaaaatataaaaaaaagcaattgatcgtgaaactcttgggaaagaagaaatcaatggcctcttcgtttgcaacaatgatcgtgaaactcttggggaaagaagaaatcccaattga

SEQ ID NO: 360464 - DNA, 603 bp, Cannabis indica
cctagttgaaacactataaaaggaacgtgattgtaacaccctaactattttaggcatgttatcttgatttttaacttactgttcaactcgttactaattgacgaggtaattgaaaatcgtgattaattaaaattttgcttagttaaataaaaacataaaatagcttacatatataatttcaggatcccgtttacaaaagtttcactgtacatatataaattaaagtctatcgcctagcaattaaaaaaaataagccctgatgtcccaaagattgtacactccaggactaaccgccccgacatgtacaatgtccatctgcccgctctcacagctgcgagacttccgtaccggcatggacgggcaaggggcaggagggttcgaaggaagccatctttgtgtgagagctagataattttgttggattttattttaccaggatcttagatctactcacaagtatgttgtttaaataccctaaatatgaactttctaaaacgataaattaaacacatataaagttaagaaaaccttacattgatgcagcggaactaatgtctccttccgctcagatctctaaccctcgaatcctttctgtagcagagt

SEQ ID NO: 360465 - DNA, 540 bp, Cannabis indica
caccattgttgatgatcattctaggtacacatgggttagtttcattaaaaccaaatccgaagcacaaacagccattcctaggttcttgcagcttatcaagacacaatatggggttcaaattaaagggattaggtctgataatgctaaggaacttcaattccctgagttgtttagttccttaggcatagttcattatcactcttgtgttcaaaggccccaacaaaattcagtagtggagaggaaacatcaacacttattgaatgttgctagggccttgcttttccaatcctatatacctctttcttattgggatgaatgtgtagggactgctgcctacctaattaatcgaatccctacaccaaatctcaagtttaaaaccccttttgaagtccttaaatcaaaaaaaccagcatatgatcatttgagaacttttggttgtcttgcctatgcttcaacacttatcacttctaggtctaagttctcacctagggatgttccttgcatctttttgggttatcctattggtatgaaagcttataa

SEQ ID NO: 360466 - DNA, 696 bp, Cannabis indica
ttttttatcctctcttttaaaatctttaatacctcttttttcaatcattctactaatattacccttatcacttcacgataattttcattcttctctaattaaaattttgctcaaacttttccataaacctacacatccatctacaaagaacacaaatctattatgtttgaaattatgtcttaattatgtaagtgtgtgaggataatttgtgtacaatattcataaaaagatgtatatttgaattaaattttatttagaggtaaatttggttaatgtataaaaaatagtattcttcatcttcttatatttttacggcgctatataaaaacaacacgaaaacaacaaaaagttatacaaaagtaacagaaaaaatatctaaataatttttaaaaaaattaataataataataataacatacaaataataaaaaattaccaacaaattaacaagaatacaacataaaaatatgtcaaaaaattgtattttggataaatgaaattataaaaatcataaaaaagtttaaaattttgtaaaactatatttttataattttttaattatttttgtgtatctgtaaaataataccttaatttttttttttttgaagacttatttaacaaaatttcctttgataacaagttatttaagggataattacaccacatattgaaatttctaatttttttacttttata

SEQ ID NO: 360467 - DNA, 812 bp, Cannabis indica
tgtaatttttcaacaatattttacagataattatataaaaataataattaaaattattagaatttaaatgtttattaatgaatatttaaatttttatatcacactcaataaataaattaatatataattttaataataaaattataatatttaatgttatagttaagttttattattattttaataaatatatattattttataattattaaattataaggggtttttttttccaattctatgttgtgcttttcagacttgtcgtgtgacgcgttttgggactagtttattagtttgctaaaaggtcgtgtctttcgtgttgtgcttaattatatattttttattgttgtattatgctaatttataacaagtttaacaatgtatcttgttgtacctaaccctataaatatatatatatatatattttttatctaatcttgttcatacttttcgagctcgtacgagtttaatgtcgtatcaaaaatttcaacttgtatctaaaacactaattgggaattaattcgggaaggtgaagctggagcaatgaaaaggtatcaatgatcaatattttctctataagactttttattgaaccatcttttggttcgaaatgtcaacgttgaaaagatatgacgtatgccattttataatattttagtatttttcttttctgttgaaaaaagaaaaaaaaaaatcccttgtagtgtaatgaatcacaccaccatgattcatttcatattcctaatatttatacattatatatatatatataggcagccgattttgtgcccatatatgcaaaacacggattg

SEQ ID NO: 360468 - DNA, 726 bp, Cannabis indica
aataataataataattggagaacacaaaagatccattcaagtttgttatttactctaaatatatgcacaactaatttattatgagatgtcataaaatatggatgaaaattgttaagtaaacttgtgaaattatataataagtatacatcagtgtaaaacataaataaagcaaaattgaaggttaaattacaatcaatcgtaaatataaactaaataaaaatgaactactctagactccacatctataaaatttacttaaatgattgtaagtgcctttacaaaaatattatagcgaaaataagagttcaataaactacaatatacactgtaaattcacaaaatttaaattaatataataaagaggaatagaaaatcagagtctccgaatctttattagaatttttaagataagcaataaatttttaacatcatcaaaatattaaatttttttataagtagtaaaatttaattttaacaaaatacaattgaacaataataatatatataattacttttaatcatataaatatctaggcctgcacatgggttgggttgggcggtttttgggcggtttggcggtttttttatttggcggttttttaaaatcacaacccatacccgcccaataaaagtttgggttgggcggttttttagggggcggttttatgcggttttttgggcggtttgggttgcttaaaaattaaaacttccaaagtatattgtcac

SEQ ID NO: 360469 - DNA, 546 bp, Cannabis indica
agagttttatttagggcataaaacccaacacttgcttactgcgagcaagcgaaaaaggcaaaagaggaagtcgaggtatcaggagaagttatcaaagaaggaccatccaagtctcctactatgcaggcttggtttttaataattcacctttttttatttttaggaaaatggccataaggtcgagacaatggtttgccctttgtggcacttttgtaaagaaaatttgtaaggttggcggccaactttgcttttattttatcttttatttaatgccacgtacttttatatttgaacttgatatatttgtttgtttgtattttcattcacaatttaaactataatattttgatcaaatttaaaatactttaagcctttccattgctcgtattttccctcaatcttgtttaagtagttagtaatctactatgtgcgcgagcagttattatctactatgctttcgatttgcgagcaattgcaaattctgcttcacataaacagttataatctgttttaagaaaaattaaatatacttttaatgattcatca

SEQ ID NO: 360470 - DNA, 675 bp, Cannabis indica
aaaaataattttggaaaaagagtgggcggtttcctctttgtgtttgtgggctggtggttacccaatttttgaaattggtttccttttgtggttctctctcacatgattatttaaaccacctccttttgtcatttaatctcaccaccaacctgattcctagtgccttgtgtttttgttctttgtttttcttccttctttcagaaattcatggctaagactaaaaacctagggcatccaagaacaatggtggaatctgaacaagccccctcaaatgctcctcttgttgcctgctgctgcaactgcttcgaacccaagagattcattgcttcctcagcgtgaatctcagcccgtgaagccaaagccaaaaagaattcctaaacaagtggttcaaaaatctgtgcgaccctacaaatgttggacttcatcgtcttaatcgtcgaagggatctcctccacctgctactgtatcgcctcctgctagaacagagaagtgagttgctgcatcaactcaaataggcccttccacttgcactcttgcccagcaagcatctatcgagaaggaacttcgcacgaaacaaagtcatgacaaaccagctcctccagccaagaagcttaagatgaatcccccttcggtttcttcaagttctgaagaagaagaacctatggaggtctcctc

SEQ ID NO: 360471 - DNA, 556 bp, Cannabis indica
tttaaaaaaaaattcatcatcttcattaattatttcatagtgattacatgattaaaatctagagtaacatcactactcctgataacacgatcagcaactaaataggatgctcgagctaagaaatgagcaacactattcgcagaacgtctaataaaattgacataaacatctcgcaagtcatttaacaacatcttacaatcagaaataatactcccaaagtatgaaaccataggaatagagctgcgtaacgcttgcaccacaataagactcagtttcaatgacaaccttcctcctatctttctgtttaacacaattcagtgccttcttaacacccaaagcttctaccatttcgggttgcaacacccctgaccgacagtaagtaaaggcttccaccaattcgccagtttcatccctaattacccctgcaaagctataagttgcagttcttgaaaaaatgacagcatctacattaatcttcagggtgttttcagctggttgttggaaatattttaccaggatctagatttactactgtgtatgtttcattaacatccta

SEQ ID NO: 360472 - DNA, 1285 bp, Cannabis indica
ctgggaggtactgatataatcaaagctggaacaatggatgagtactatcaccgcatccttgcgtaacgcggggttgacaggaacagagaaagtaaactgcgctgcctttatgttacaagatcatgcccacatttggtgggatatagtgggacagacttgagatataagtgtgatgacttggaaagagttcaagagtttgtttaagggaaaaatttataatatcgctgtgaggactgaatgccgacaattagttgggacttgatgattacctctgctcacgacactttattatgagaaagtgttcgaattagccttgatagttgaggaggttgagcaacatgtgattaaggaacagactacaaaggacgccgccacggcatcgagttctcttgttagttgtaatatcaataaggggacttgaaccctgatcacaaacggaaggtagaagcttccaaagcatcagggagtagtagaaagtttcacggaaatagaggtggtcgtcaaggtcatggatcctctttcagatcatatttagaatgtccaaaatgcaagaagcaccatcagggtgaatgtcgggccaagcctgtgtaccatatttggtatggattatatgaatccgatgttccaggattacatggacagatgtgtgattgtgtttattgatgacatattgatttattctgaatcagaagaggaatatgagttgcatcttagatcagtattgcagcgattacgagatcacaagttgtacgctaagttcaaaaagtgtgaattttggttgtctcgtgtctctttcttagggcacatagtggataaggatgggatcatggtagatccagccaagatcgaagttgttcgggatttgccaacaccaaaattggctactaaagttagtagtttattgggttttgttgggtattatcgttggtttgttgagggttgcttaaagatttttaaacccttaacaaagctgacctgaatgaatctgaagtttgtttggactgattggtgtgagaaaagttttctagagttaaagcagtgcttaattactgctccagtgttaactcttccttcagataaggaaaatttgttgtttattgcgatgcctcgagacagggtctaggctgtgttcttatgcaagctggaaaggtaatagctatgcttcacgacagttaaaggagtacgagcagtggtaccctactcacgatttagaactcccagcagtagtatttgcgctaataatttggagacattacttatatggcgagaaatgtgagatatacac

SEQ ID NO: 360473 - DNA, 950 bp, Cannabis indica
gaccattttacccctagtcttggaaaatacctaagtttaaccttaagggcatttaagtctttttaaggaatagtgtggtggctgcctagggaagtgacaagtggcttttaatttcagcaaggaattagctagagaaaatccatttctctttggaagaaaaataaaaaaaaattggaattcactctcttgaaccctctctctttccctctttcggctgggaccaaaaccaaaggagaatcaccttaattcaatagttttttttttgggatttcagcaaggaattcaaggaggttgatcaaaggtaactctagttcttctttagttgtatttttctaggttttcattgattttaagttatgtttttcctagatagtggctgttagagtgtgatgtttgtttagtccgaatgttagggttcatttgagttaatctaagttcatagcagctggttttaaggtttattgttggttctatgcaactttgagctttgagtttaaagttttaagctttaatggcaacttgagtattgatggattgttctgtgaaattctggttagaaatggttgtttatgcattgtataggtaccctggagagtttggttaagtttggttgagttttgagttcaaggggagatttttcgggttcccagcacagaaccggaattccggttctgggggacctgtggcaaccggtcgaccggttggtgacccagaaccggacttccggttgggaaccggtctgccggttgggggaatttttggaaccctaattttgcccaattttgagatatttagagtattgccttgttgtttatcgatagggaaacttttggtttcaaatttaagtccccggaaagtgatttagcgagtcactcatctgtgttacaattaatgtgattagggcatccatctagcacgagcatttccgttcaggtcggccagcacacttg

SEQ ID NO: 360474 - DNA, 522 bp, Cannabis indica
ctctctgctaggttttggccgcagcgaccaaaaatccagccacggccaatcggttcaaaaaccccagaaaaccaatttttaaggtctaaaaataccacttttccatattttgaacctcaaccaaaatatacccaaaaccattcataaactcaaattttaaatcaaaataaaccaaactaactttgataccaaactagagcatcaaacctagcccaaatcaataccaaagatacacaaaaaggaaatatcatgaaacctcaccataatcaccaagttgaacaccaatcatcaaagcattcaaaccataatatttgaccaaaaaattaaagttaaaacgcagaattcaaacctcattttcaaccctaaaaaatcacacacaacattcaagttgcaatccatatggtctcaatagctcaaacacatcaaaaattaccaatatcaccactaatttcgccaacatgcatcaaatctcaaataaaaatcaagaacatcaaacctaaactcaaagaatattaacatacc

SEQ ID NO: 360475 - DNA, 647 bp, Cannabis indica
tattacattcacacatgctatataaatctccgtaattaacaaattacgattatttactcacttatagcaaaatttaaattttatactgaaatagattagtaagatcataatcccactaattacctgattaacccatagtataaatataaactctaattatttaccattaggcttatcgggatattacaaccatcccctccttataaaatttcgtcctcgaaatttatttaaacaattcaggatattacccccatatttatgattctaattctcaaattgctgcttctatcttgctgtttttctatagcactttcctaactagtgggattgtctcatttcatagtacttcctttttctagcccaaaacttggacaagatgtttttcccatataataaatttgtctgaagtttaacatcatcacaactcaaaatacgggtcgagtctaatacatattttctcagcttggagacatgaaatcggacaacgcaagagttaaggctaactaataggctacctggcctacttactccagtgaacaggtatctagtatttctctcgtaccacacttattaaggtacctaaccagtggtacatttaattatcagttttaaataaacacctcatcaggaaagagattattctaaga

SEQ ID NO: 360476 - DNA, 590 bp, Cannabis indica
actatcggtgcaggaattacccttgtcacacttggggggcaccacctgcatggtgtagtcaaatttagatttaaggcatccaacaatgatgctaaatatgaagcccttatcgccgacctaagacttgctcgggaattgcaagccgaatatattgagatttgcattgactcatagttagtggtaaatcatgtatctagggagtatgaggctcgggggaaaaagatgatagcatatctaagtaaaatacgtgatttgctttcacaattcaaagctatgccctcaagaaaattccaagagaagaaaacacaatcgctgatgcacctgcccgacttgtgagcagcaacataaatgataaagcaaatctgatccccgtcaaatttcttgaaaaacccattatcaccgtcacggaggagattgaaatgattgatacatccccaaattggatgacgccaatagcagcttacctcaacactggggaactccaagataacaggaatgaaacttggaaaatgaggagaaaggctgcattgtacatcattgaagagggagttatgtatagaagaggattctccatgccactactcaggtgt

SEQ ID NO: 360477 - DNA, 614 bp, Cannabis indica
accaccaaaactgcgccattagtcaaatgaaacacttctactggttctcctaaactaatgtatggaggcatagttttaatatatccaaaatgcgtctttattttaagcctcaacaagtgaagaatcctatagttctgctggattgggttgtgggaagccaaacatgtgaggatgctaaattgaattcatcttcctatgtgtgtggagaaaatattgattgttactattccaacaatggttagtggatatcaatgccgtttgtaacgtgcgtgccaagatggcacgttacaagttaggcgatgtccacaagttggccaaatggtggtcaagtgatggcgcatgttggtgtgcatgttggtagcatgctgatgcttagtttgtatgacagtggcattttcgtaaatatcttcaatattgtccggattgggacgggatttggtattcgctatttatttgggtctacaaatataatgttacaatcgaattggagaaactctgtgatttggtatttggtttggccatatgtctacagagccaaaatcatgtatgttcttggtagaaggctaaaagcttagaatgctctttaaggggggaccctagtgtcagctctccac

SEQ ID NO: 360478 - DNA, 529 bp, Cannabis indica
tttccacatgactaacaataagaattttatgtttgatttcaggaaatcaaatgatggtagagttattcttggaaataatcaaacctgtgacattcaagggtctggatctattaatttcaagatgtatgatggcatggtcagaaccctaagtgaagtaagatatgttcctgacttggctaggaacttaatttcactaagtgttctagatgacctaggtattgtgagtaaggttgaagctggacaaatgaaaattagtaggggagccctaactatcatgaaagggcacaaagaaggaggcctatactatctaaagggcacactagtggttccatgtaactttactgctcacaacaacagtggtaattctaatgtcatgacctggcacagaaggctaggccatatcagtgagaaaggcctgcaattaagtgaacagaaacttctaagtaaggacaaggtaagtaagcttgatttttgtgaatgttgtgttcttggaaaacatcataaactgaaattttccacaggcacacac

SEQ ID NO: 360479 - DNA, 1224 bp, Cannabis indica
atatatgccccttaagtaattttaaaggctttacgctttataattacttgtttgagagaaatgattaatttattcacaactgaagttcaaaatatttcatcagcaatgtgacttacaatcattaatctcataagaacttccccagttcaattgtttattttatcaatcttctaggagcatctggttttgataaaacgggttttgatgttcagggtcaatccctcacatactcccataattgtttcaatatctagggttaatccctgacatatctcagggttccaggtgaagtaatcctggtcttgtctttgactgctactggttgacgaccagctttccttgtggcagcttgatatggcaaccatagtgggtcaatatctactcacgtcgcaattttattattattagtatttttaaaattgctttaccggagtaactgccccttgtattcttgtgacttgctccctctcgagataaccgaggtgtcccttcctcgtacaggggagggttataacccttggttgcttgagttattgggcagggacattgtcctgcccctttacatatcattgaaagtgtccttgcgatatgagaccttctatctcatctttcagttggcaacactcttccgtggtatgaccaatatctccatgatattcacaccgtttagttggatcccttttatgcctcacatatttcataggttttggctcgctaaaaacgatttcctgtacatgcgagaggtagatattttcctaagtttcattgagctcggtatcttcagcataaagagggatatatttgatgtgtttcttatccttgggcaaccttttggaatcgtcttctctctttgatcttgaggcttccgaatcaaattctccaacaatatcatgccctggttgtcttctgggcttcgtgactttatgccttctgaacttattctccaactcgtccattcgcaaatggaatgaaaccttttgctttggactgagttattgacgaagatcaggcttcttcaagttcagatgccctggtagatcactcatgtcgtgactgcggtcgaacattgctattcctcttaagttttgatttaccttattctccccataagggatggcgcgagtttcttttttatgaacctgaagagagggttggcgatttccgtccgatgttccacatatctcaggttgtgtccccaaattttccttagtttcctcaggttgc

SEQ ID NO: 360480 - DNA, 761 bp, Cannabis indica
ttggggggtaaatgttgcccctgaatttgcctaaaatacgtggaccaatgcgataatgacacgtagatctgaagaatatggctttgacataatatgactaagtccttgtaaaccttgagggtcggctaaagagacacctcccagagaaggtgtgaggaaaccacgcactcccagagggcaaagctatagcaaagcactttcgagagatatcagacccaatctgaacagtcatctcgcatttaatgccgcatgggaaaatgtgtattggtactgtcataaatattaaagtctgacggtgtaacctcccttctgcagctattacgctatgattaataagcctactgacggctactttatgagggatcacatcagtcaagaagggataaaggagtatatctatctaatccctgaaatacctaaggaacagaccatgcatttcctattttgcatgggctaggaatacaggcccctactgaagttacacacaaatatatatgggacaactctagggattatcctagggaaaagactataaatacccccccaaatacattaaggcacgggtcgagaattctgggtttcataagaactaaatagaaaagtcaccaagaacattctctgtaataaatactctcataaatacaaaagactcgtggactaaggctcattaatgccccaaccacgtaaaaatcttgttcattaaacttcttacagctttcttatatattattatattggttgccgaaaacctaggtcaacaa

SEQ ID NO: 360481 - DNA, 575 bp, Cannabis indica
gaagaagatggagaataaaataatgctaaaagacctctacagaatgcctccagtattgacttctgtctctaaaattcgtactcttttttccctctaaattgcttgcctcaaatcaactccagttcaccctttatataggctttcagggactaaaaagatataaaaatgaacatgttaaatgccttttgaaattaggaaaccaccaaattttagtgagaaaaaaatacgatttttgggcaatttaggggggcgggccgcggctccacaagtgctgggccgcagcccgtgttggagtttcactagatggcttcgtttctacggtgatttttctgctgcgtcgactgatagtattttggccataactctcttgatatattctcgaaattggatgattcaagttgttccggaaagataaaagagagatctagaatttttatgttttgacctttttcaaaatctaatcagaagatagtcgaatctaggcttgaagtttcaactttattttcttgtacaattttctctattttatatatcatctttttgtgagatttttttatcttttttccatcttattc

SEQ ID NO: 360482 - DNA, 1431 bp, Cannabis indica
tggatgccaaagtcacgaagaagtgccaacagccaggtgatctcacaagtggcctgagccatgcctcacttcacaacctacttcatcctcttggcccaatagaggagatccatatggctacacagtcagcggtaccgtatcacaaacttcttccctttcaaagagtcatgaaagaaggacatgaacaaattatgtcgctaccacaaaaattacggtcatgacactaatgagtgtagtcagttgcgggacgagattaaatttctcatcagacaaaaatatgatgctcttcagcagtatgtaccacctgaagctccaactgggggcaatgcacctctttagcttgcgccagttacaggcaggctagagattgtgattgaaggccctcacctagctagaaattcaaggaaggccttagaaaggtatgaaagatcactttaacatgagccaagagctaaagtcctagaggttgcagagcatcttccaaagtctcaacgctacgaatgtgaacatatccccttcagagaatcagactcctttcatgttagctaccctcacaacgatcctttagttgtcgagctactataatggtggctagattgatgattgacgacaaagcatcatcaaacatcctattcaagcaagctctaattagaatgggtttgaacttagaagacttggaaccatgtgaacaacttatgtatggtttcagtggagccggcatcgctccatgtggcaagatcaaactttcactcactgtcgacattgtcccaagaagaccaccatcatggttatgatcatagtggtggatgtgaagtctccgaacaatgtgatgctcgaaatgtcaaccctctacgaccttcgagccatctcatcagtataccatttgtccgtcaagttcccaacggtaactggtatcggttgtctccttggtaatcaagaaactcttcgcgagtgttattattgcaatttgttatcactcaccaagaagacctcctctggttctatggcttcagaggggacgaacaagacctcctctgctgctacggcaccagggggacgagcaagacctcttctacgaaagctgaagagacaacaaagacctttatagtccaaactatagaaagacagaaacaacatctaaagccacttaaagttgcccaagacaaggacgacattaacccctattttggggaaattggctcatgagttagtctgaccgaggaactcaaagaacttcccctcaacacagtagacccaatcaaggttatcaagattggaacaaacctgacggaggtcttgagtaaaatgctcatggcttgcttcaggagaaatcaaaaatactggaatttgggttaacttttacaaaaatattatcacacgaaaatcttttcaaaaatactgtatttttataaaacacaagtagaacacaaa

SEQ ID NO: 360483 - DNA, 1530 bp, Cannabis indica
accatagttcccacaaatccatgaaacaccaatcttgtcctctcgaatgactaggaaaaacaacaatctagccaatccaaacccaaaagcttcaaaagcactattcactttcctataattttctcattctaccaatcaccataatcccaaacctcaaaaaccctaatttcaccgatccaagtgtaccaaaatgcatcaaaacaaacacagtttccagctccaacctaaacatcaaaaacacactcctaaacaccaaaaaacaacttaaagaaacaaaaccctaaaatcaactccgaactgtaatcaaaacaccaagtcacaaccacaaagctaacgaaaatgaaaaatatcaaaacctgctgcggattttgattttccttagcatcatcatcgctatcgtctccggtagcggtatcaacatcggtagcacgagcagctttgtttttcttctgctttcgcctccgacgacggcgctcgctctcccgagacttcttgggagcatttgagatggtggagtttgaatcaaggcctccgccgccattggaaacgacgccgtttggttgggggagagtctccaccgtcattgccgagtggggattgaggcgaagattggatgctcgattttcgttttttctcaggcgagagttcgaagtgagaagacgaaccagaaatctaaggggtttatatatggctccctattcacacgtgtgaaggagttcattttgcacgtgagagccttgtgtgtggggtttgtaagtaactgtaagaaatttagggaatattattttaggcaagttaatgcactcccttaaaataaatacattgatgtacatttatctgttttagcactcgaaataattttttagtcaattttttttctcatggtcatgtacgttataattatttaagacatcctgcaaaattttaagaaatttagaaaagtttaacacgccgaaaactacgttaaaacagtgtatttctcgcatgactattttattttatacgtgtgtaaaataaactgtttgaacattgttttttatattgtaaattattcagaatttctcaaaattttgtaggttatcttaaatagctgtaacgtacatgaatatgaaaaaaaattagactaaaaaattcttctggatgccgaaacaagtcaagggtgtattagtacatcccttttaagggggtgcattgtagaatcacccattattttattggaaaattttaccatgcatcctactgaatcgatgtattttttatctgttttgatattcgaaataacttttagttaaattctattttgtagtcatgtatgttatagttatttaagatattttgtaaaattttaagaaattcgtaaaaatttaacacgccgaaaataaagttcaaatagtgtggtgtacgagtgactattttattttataggagtgcggcataaactgtttgaatattgttttctgtattgtatattattctgaatttcttaaaattttgtatgatatcttaaataactataacgtacacgaatat

SEQ ID NO: 360484 - DNA, 717 bp, Cannabis indica
agcacaggcacgagtaagactgcaagtcccttaaggaagaggtccatgagcaggacgaggtccatgagcagaacgaggtccataagtaggacatagtccgtgagtagaatgaggtccgctaacaattataaccaactggatctgcgagaacacttgaaccagaaaaaacctgatcttcgccaacaactcggtccaaagcaaggggatccaatctaattttgaatagatgagttggaggataatttcaggaggtatcaagtcggggagtaaggaaaataatctggatatgactcagatgaagaactcgagccataccatctagatatcatgaatactccttttccccagggatttaaaacgccccacatctcgtcatatgatgggaccactgatccggtctcgcatttgaataatttcaacactataatatgagctagcaatgttacaaacaatctacgttgtattttgttttccacctcagtagttggagcagcaagcagctggttcaataaatttactcatcattctatcacttctagggaacaactgtctaaggacttcaaaaagcaattccaagccgcaagggataggcgacccgaagcgtcttcactcaccaacataaagcaacagcctggaaagacgcttaaggtgcccttaagttgttttagcagggctgctacaagagttagaaatttggatgatagtacccagcttact

SEQ ID NO: 360485 - DNA, 427 bp, Cannabis indica
agaggagatattttttcttgattccaaaagtgttctatcatcttattcaaataagatggccccgctacctcttttatcttaacccaaccaaagaggacaataacatttagattcttagacagatagtcacggtacctcgtcgtagtggaagggtttcaaggaaatcactctgttatgacttggaagacacttgtgataaattccattgttagtttaacaagtaatggattgtcagaataaggaactaagaagtaaagacaagataggaaattttgaaaagaagcctattcaatggacttaaaaaaaagttcctattcctagtattataggtctgaatttatcgaaacctacggcttgtggtatggctggtgatttaactactcaagtggtagcaacttactttagtaagatgctggagcatttttct

SEQ ID NO: 360486 - DNA, 1220 bp, Cannabis indica
tattcatttctgatagatattcaattagagaacttttcatttccactaactaacatatacctatctcaataccttgtaaatctttacttattatcacatctcttccccttgatagtctcaagaatgactatcatttctgcattttaatatgaatctttctagcatactttgttctcactggtatgcttttcgagatgactccctagaagattgcccatcttgagattacccaagttaagtatacttaactccaaggtaagctcatggtgggttatcataaagtatatgcttctttgtcgttcctacttgtatttcttgttttcattctttcgctaattatatccaatttcctgaattttagctaataaaaattaatcaatgatcatttcttgattttaaagcttcgtatctttgttaggtaaaaatcccaaatttctccttttaacacacccaaaaatatacatacctcaaatatattccatgttttattgacaaccccttggtatgaactaccactccaacttgtaatgaatctctcatcgatggtgttgattcatcaacatctaaggctcttatattattttcccgttattaccattaaggttttactccatgattcatacactactattactttcttgcaatcatcactatcttcatattcagttaatcactctaaagtcattttacctaaattatgtagttcattgtttaatagactatctactttgtgatccaacattcaccaatcactcgaattcatgtccattagattgcatctcaatttataagaccttttcccgatctgggtgagtatgcctttccatcattgcttaataaggtaatcgtttcccagtatttcaatagtctccttatataccagaatgaccatccagtcaaatataaaagtatttttcatcattactgtatcaccatatgtaatctaggtaattttccttatcttagtgataccactactctccctgatgttcttttatacgttaccttggtaacgtccccgcttcaagcctctattgagccccttacacccacaaaataatggctcttatacatgagtgcgtcactttaactgcttcctagactgacgactggccctagagaccaatccaagcgtttccaacgtggtttgctctaactcccatgttgggttttatgccctaaaaaaaactctatttcaatgtaatccattttattcaaca

SEQ ID NO: 360487 - DNA, 767 bp, Cannabis indica
cgtaagatagaatggccttgactctcgcctaaatgggacaacgtcagattctagtcttgatcgaataaaggttgctagaatagtatccattttaaatgagttgactactctattcaatgaatgatatctttgactctcgcctaaacgggacactgtatcagtttattggaaaccttggaaattatttagatatgtttgttttgtattttcacatgtctttcttacttgctaaatgtatgataatttctgaatgtgtatgaatttatattgaatcatgttgttttctgttattaatattgtagtataatttcgaatcttcattgttggtctaacttagcttgttgtttttaatgagacaaatccaaaaggattgtcatccgttagacaaacataatagtgttagatctcgacagataagtacttgtaatgcaacatctagttgtacatccaaagataacaacttatactagtgtttacaatatgaaacaatgaagaaatttataaaataagaataatttcaactctcgcctaaacgagacatcgttggattcttatttaatttaaaattatcctttaattttttctcttagttttttcatttagaatttacttaaatagtatgtcactggatagatggtttataaatcatctgcttatgatgtcattctattttcttctatgaaattgaatggcgcaaatgactatattcctgacattctatctcaaaatgatataaattctcgctcttagaattctcctacttgtat

SEQ ID NO: 360488 - DNA, 658 bp, Cannabis indica
gcataaaacccaacagatccatgacttgtaagactcctttctcgctctcctatggattcgaggccatgataccaatcgaggttggggcaggttccctacgaagagatgttcttaacattatacagaacgaagagaaacagttacttcacctcgaccttttaaaacaaaagtgcgatcaggctcacctaaaaaatgcggcttatcagcagcgaaccgcgcggtatttcaactctaaggtcaagaagagaattatgcgagtaggagatttggttcttcgaaaagtaatgccaaacatgaaaaactcagcacatggggttttcagagacaattgggaaggaccatacctcatcgcagaaaaaattggtaacgtaacatatcgacttgcagaactcgatggaactgtaattcgaatagcctggaatggcgaaagtttaaaattttattatcaatagtactggcattgtatcgtttgtagtcgctatgtatttatacttagtcaatttacctagataaatattctaagtacagggggtatataacccactcactttgtactattacttaatctatcatagagttatgaattttttcgagattttaaagtttttctaccttagtatttattacaccaagctgtaattaaaccacaatcgagatg

SEQ ID NO: 360489 - DNA, 544 bp, Cannabis indica
tgtgtaaatttttagaaaatttacaatagtttataataaatatatatatatatatatttgatctcagggttggagttgatttaaaagtaattagggttaaaaaatggtaacgtaccctaagatttattattaagtaccctgagattcatctaatgttctccgtacatcacggaatatattttgtgaaaagtacatcacggaacaaaatcgtgtccctatatatattattgcacgtggagtacttttttttaattaaactagtgatgagtaactgtttaaatttaatttctaaaattgtataatctattcagaattttttaaaaatttacaagtagttctaataactacaacgtacacaatcataaaaaaaattaaactaaaagaatttttaaataccgaaacaaataaaaaatctaccacaatagtactttagaagggtctactaattctatatataaactattaatgtatagttataatatattatattatacttatacgagcaagattatagtaggacttagcaaaagttccctaccggtag

SEQ ID NO: 360490 - DNA, 1104 bp, Cannabis indica
tctaaaatttaaagtcaaagacttgaatttatactaaatatacatgagtaattattctagcttgtatcaacactactaatctaactctaagtttaggttgccttaagtaagcatatacaagtaggagatatctaagatcgaggatttatattatttcaggatagaattttgggaatgtagtcatttgcgccattcaatttcatagaaaaaaaatgaatgacatcataagcaaatgatttataatcatttctcatccaatgatatactatttaagtaaattctaaataaaaaaaataagaggaaaataaaggataattttgattaaaataagaacccaacgctatcccgtttaggcaagagtcaaagatattcttattttacaaatttcttcattgtttcatattgtaaacactaatctaacttgtcatctttggatgtacaactagatgttgcctttataaatacttatctatcgagatctaacactattatgtttgtctaacggataacaatcctttgagatttgtcccattaaaacaacaaactaagttagaccaacaatgaagactcgaaatttatactacaataattaataacagaaaacaacatgatggttcaatataaattcatacacaattcagaaattattaagcatttagcaagtaacaaaaacatgtaaaaatacaaaaattataatatcttaaataatttccaaggttttcgacaaactgatacaatgtccagtaggcgagagtcaaagatatcattcattgaatatagtattcagctaatctaaaatggacaccattctagcaaccttttatttgatcaaaataataatccaacgttatcccggtaggcgagaatcaaggttattcttattttatgagcttccactattgtttcatactttgtaaatttatctctaagtagtcactataggggagagtctaatagagataaaaacttacaaaatacttatctttcgagatctttacgatgttaaatgttcaatgtaaaaccatccataagggggacgaagtctagcgtctcgaggtcccattgaaatatcaaccatgtaagaccaacaatggagatcgaata

SEQ ID NO: 360491 - DNA, 796 bp, Cannabis indica
tagatagtatctccgaagccttcagaactatttgtttgaatgagatatccatagagaggttattcaacatagtaacacgcaattccttccaaattttcttaaaaccacgacataggaacacagcatgactgtttgaatccacactgaaaccacatattggacaattagtatgatcaaccactttccttttctgaagccccacatacgtagggagagcatcatgaaacccacgccaagcaaatattaaaactttcttaggcaaagaagttttccaaaaccctttccaccatactgcgaaccaactcttagaaggggaaggatcaaattgatccaactgcgacgccacaaagtatccacttttcactgaataagtcccgtcagctgtatagtgccacatccaagaatccgctttcagaaatttactaattggtaaagaacaaatactctgttgatcagccacattaaacaactccctcaccatttgcatattccaaccactccttgactcgttaatcaaatcacgaaccaacaaatttggattatctagagtagaacaataaggcctaaaagtggctggccgtggtagccaagggtccttaaaaactagtatcgtgtcacccgttccaactcgcttacgcaatcctttaattaacagagaccttccccaaattatgctccgccaaacataactaggtgcctgcccaactgcatccaaaaccaaagaaaactcgtagattaaaatattacactcacaataccacccataataacatactattaaacataagatcaacaa

SEQ ID NO: 360492 - DNA, 565 bp, Cannabis indica
agagagagagaaagagaagaatgtgtttctgtattattgatttgaatgaattattacacacactgataaataagtctgtatttatatataacagatgaaagaagccaattaattacagagttagttgcatgacagcagagcaaactaacaaaacaaataaatgaacaatataagtgtgagattttgagtattactgctagtccttggagcggtggtacaaatataaagagtaacaaaaagaatttaatatcacaccaagaaaaaatcatttagcgaaattttatgatttttttaatttcaatgcaaaaatacacaagatcttacttcttactattataaaagtatcttaatcatatgattgttagaataacatgattacataatttttttttcatataattttgactcagccagaaaaaccttttaattattctttcatttgtccaaagcacaacctagaagcactcaccctaattttagtatgtcaataatttctattaaatctaaattggaaaaaaagaaaatccaataaaaaaaaaggtacatgtgcatcaacaccaatcta

SEQ ID NO: 360493 - DNA, 501 bp, Cannabis indica
atgttacaaaaagatgacaactaatatacattgtcatatgttacatattattagtttattacacatatttaatctatatattatattattataaataatataacaatcccccactagattaaatattatctctttagtaacaaacttgtaattttgtaacatttatttaatcaatcaaaaatattatatcaaaatataacattcccccactttgattgactaaatacacacttttaaagaagtcttgcttaggtgcattaggtaaaatgtctttcgacttgaattttaccttagtgtagttaccacaaagtttgatgaaattttggttgccgtagcattgaaccattattcctttaatacaaaccggtgataacacacacaccctcgctaatgctcacttgagaccgcatgtctcgctcttgcaccgttaatggccatgtgcaaaattccaattcatggactctctagagaataactcccaattctcataagaggcggcac

SEQ ID NO: 360494 - DNA, 1163 bp, Cannabis indica
ccaggttaggtaaaagtcccagtctgggtcttagtccaagttcgggtcccaggtcttaggtctcagtcctagtcaaggtctcggtctaggttctggtctcaggtctcaagtccaggtcctagtcaaagttccagttttgattccgggtctgagtttggttcctggttcgggtctgggtcaaggttggggttggggcccgagtcttagtcctagtctgtgtacgggtttttcgaatctgggtctgggtccaggtctgatttggggtccaagtttgggtccttggtttgggtcccaagttcaggtttgggtctgcatctgggtccgggtccaagtcctgtgttttgatcccggtttgggcctgggtctgggtcggtattcgggtctaacttcgtgtcaatatccaagtctgaactcccaagtttaggtcgaagagcgtggtcgtgggtcgtgggatcgaagtcccgagttcgggttcgagttcaggttcgagtctcagtcctagtcgtgggtcccgggactaggtctgggactagatccgagcttgagttccagggctgggttctggtctagttctgggtcgcagtccaggtccaggtcttgctcacggtcccggtcttgttctagggtcctagtcatgttctggttcaagttccagttttgggtcgcaggtctaggtcagggtctgagtccttgtctagctttgggtccttgtttgagtcccaaatcaagacagagactatgggtcttgtccaagccccggttctcggatcccgagacaagatctggatcccaatcacgggtcctagtctggttttggttcatgtccatggtcttggtctgggtttgggtctaggttcaggaccgagactagggtccagttctgggtctcgatcccagttctaggttccgagtcctattcaatgtttgggtcttgagttcaggtctaggttcaggtcttgagtcccggttcgggtttggattcaggtttttgacccaattcccgagtgggtctgtgttcgagtccgtgtactagtctggttatagttttgggtctgggtctaggtcttggtcttggtcctgttcttgggtcctgattcgcttctagtttcgttcatgtttcatgtcacggggtacgggttcgggtcgagtttggatccgagtct

SEQ ID NO: 360495 - DNA, 497 bp, Cannabis indica
gacatttttgcatggtcacatgaagacatggtcagtattgatccttctatgatttcacatgccctaaacattgaactgaacttccgtcccttttagcaaaaaagaagattgttggacaaagaacgagcacaagcattaaaagaagaggtagaaaagctacgcaataaccacttcatcattgagcctttctacctggcctgggtagctaaccccgtactggtacccaagcccaaaaaatggcgagtatatattgacttcactgacctcaacaaggcgtgccccaaagactgttttccacttccaagaatagatcagctcgtggacgcaacagctagacacaagatcctaagctttatcgatgcttattcagggtataatcaaatcaaaatgcatccaccagaccaagaacatacaagtttccaaacagatatgggtctatactattataaggtcatgccatttggcctaaagaacgctggagctacctaccaaagatt

SEQ ID NO: 360496 - DNA, 453 bp, Cannabis indica
ggcatttggtaacacttttgttttatattattttaattacaaaaataaaagttaaatttgtatttttaaaaaatgaaaatgtgttctataactattttttgtattttaattttaaaaacaaaaaataaaagcgtgtttaataacttttattttcattttttttttattttattaagtcaggtttagattcaggtctaggactggggccggggccgtggtcgagtctgggaatgaggtcggggctgaagtccgggtcccaaagttcaggttggggtcgaagtctaaaatattaattaagaaaaaaattgtttaaaaaaattttgaaagtaattttttttattttcaaaatttttaaaattttgattcttatttaaaaaaattgataagtgaaaatagttttatcgaacataattctgaaaaatattttcactattctaattaaaaaacaaaaaa

SEQ ID NO: 360497 - DNA, 552 bp, Cannabis indica
cagctccaaagacagctcattgttcgccccagacagttgatcactcccttcagaaagtgatcagttcaaataatactggagcatatccttacccctcttggcctccgtgctcagtgccacgaccgttgaaggggtcctagtctaatcagacctttcgagctcccccctctggaactttttgacttcgagaccttctggactggaaggtccataacaggccgctccttagaaaggtcaatgacctcttcgactggcgccttctctttggacggagtctcgtcgcctttagatcttttggccagaggagactggcccgagctgtcccgaactctcttcttcaatgcctggagtaccttctgagacatttctgcacagataaaacaacacagttaagaggaaatataaggtatgtaaaagcatagtgcaaaagaagtaagtgcaagttaaaaataccctgcacgtgggcaggagcattttcccaaacaagcaataacgggacatctgttgggttttatgcactaaataaaactctttacaatctgattagttatc

SEQ ID NO: 360498 - DNA, 531 bp, Cannabis indica
agttgagatgcaaaatactctcaacaacccggaataccagaatccgtgggatttaaatttggatcccctgtcggactggttcggtcgcttcctcgggcccaccttagctccctttgccgcagagatgactggcgagtttgcgtctcagccactccctcactgtggtaagtgttctgtagttcgctttttccctttattgttttcttctttcggggattcttacttacacttgtattattattatttttttttagtcttgctgcagaagccggtcgtctccccaagaacataatcaaccatggtttcaatcctgtccgattttggggacatagacgaagtcaggaagattcttcaggaatcttactgctgagtggcggctttatcaggaggctgctgagccccgggaggccgctgccaaagctaatgaggaagaggccaaggcggagggaagcgcaaggcggaggacaatgatccgggaggaggccctgcggagagataggctggaggccacgcaccaggaggagctgagga

SEQ ID NO: 360499 - DNA, 596 bp, Cannabis indica
ggttcgggtccacttttgggtttgggactgggttcaagttcgggtgtgcgttcgaatccttatcaggattcgggtccagggctgggtcccaaatccagacaccgactacgggttttgtcgaagccctgggtccagatccagatcccaatctcggatcccagtctggttccatttctggtgcatggtcaaaagctgggtcctaggttcaagttcgggtctgggtcaggtactaggtctcgggcctatttcagtttcccaggtccctatactgattctgggtccaggtcccagttattgtgccggtttgggtcccggtctaggtctgggttcgagtcttggtgtcggttcgggtttaggtctctttctggattttggtctgggttcgggttttggtttaggtcctcgtactggtccttgttacggttttggatctaggtccaatttcaattatgattccaagtccaaatcctagttcgagtcccagtctggaccccaatcttggtctaggttcgagtccaggtccaagttcgagtcccgcgtgcgggtccaagtttggttctgggtcaggatctcggtccagatctaggtccagcatt

SEQ ID NO: 360500 - DNA, 646 bp, Cannabis indica
gaatcagttttgtgggtggcggcgaaaaggttacacttctctgacccactcacgggagaagctgcggcctgtcttttagccttggagacggcagtctcattgcatcatccttttattttagtggagagtgattcaaagattgttatcaaaaacctaaaaggggatgactctatttggaggattgagaactatgtgcgtcattgcaagctcctctctacttttatgactaattgtaatttttcttatatagctagaaactgtaactacgcggcccataatgtggccaaatgggcgtttgccaacaacgttacgggcatggtagagatatctactatacctcttaatatcttttgtaatgaccgtgaagtataacttcaatcttatttacgcatttttcaaaaaaaaaataaactatttcagattttgatatttttaaggtaaatttttttgttacaaaaagtaattatttttactgtacttttaaataaaaataatattaacaataaattttttaaatattaagaaacaagaatataggggtggcaaccaaaatccaaacccaaacaatttatatctattcttttttatataaagtgtgtctatataacagaattcttgatttttgagaaattcataggtgactttt

SEQ ID NO: 360501 - DNA, 520 bp, Cannabis indica
tgattccatagcacttcatttcttgccttccaaacaaatacaccaagcttgcaagtatagtcttcaccatacttttctagctgctgaaaatcgtttggtgttatggcaagcttgcagcaactggtgaatatttctagctggtgtattctatttcagaattttcttcatctcttgcagaaagcttcggctgtaatcacactaaaaaaacaagtgggcaatggtctcttcttctttactgcagaatacacactttgcatccatggtagtcatgaatttgcttaatctctcccttgtatttagtctgtcccaaagtaccaaccaaagaatgaatctatgcttgggaacaataagcgatcccaaacaagattactccaaggcaatttatcatattcagcaaacaacaagttatatccttgttgaatcttgtatttctgcacaacaaaactggttagtgaaacctgttgctgaattttgttcttgacagccactattttcctccatgcccagctacaatccgagg

SEQ ID NO: 360502 - DNA, 650 bp, Cannabis indica
ttttttttttggattaagtggaattttttgaattttaatttgagtagatagatgcttaataataatgttgatcatcatttatatgaaggggtgtggtgtgggacatgtgaatttgctaaagattgcaatttgcttttttattttgtaactttgctagaaacttctctcaaggatattatgtgaaacacctaaaaattttgtaagttgactgattaatagctgatttgactgaactacttagctaagtacaaccattttgttctaaaaaaaatatataataattccatttatttgttacttaaatatatgtacttgagatgattaacaagaccctccatattatcttttgtcatttgttttaaaatttcttttatgttttgttgccttttagaattttgattttgcaaatcttagaaagtgcacaagactcctctttagaactgcacaatcctagtaaccttttttcatttcttttattttctttactttctaaactatatgtatagatatatatatttcattccaaaattgcccaaaacattttcagcattatcaataagtaattaattcttgtgaaaattacatgaaatatgagatttcataacaaagttagaaaaatatggcatttttaagtttgccactcttctatg

SEQ ID NO: 360503 - DNA, 501 bp, Cannabis indica
attattctctgtcctggcatctgctgatgttgctgaatggaaaatcttgattttttcaggcattgaattgattgagatggatggattacaattggttttagcaagttgaacatggtcaaataaattttgtcctctgtccatcaacgtggaggatcttggttctatgttggatttggtatatatgaaaagatgtacagcaccttgaggtgagctttcttgaatgtagtcttatgtttgaaatgataattgtctcattctgtaatataatataaacttctttcttttccttatttttaagtcttttacttgtttgcaatgcaaatattttgaaagtaattttacaaatgtacaaattaattttaaattatcattatttttttaaaaaaagaatttatgtctttgtagtattttctatatagtatcgaaaaaaaaaggatatttatgttttaatttgtaaaaatattatttatgataacaagtttatttcctcaaaaaaaaaaa

SEQ ID NO: 360504 - DNA, 701 bp, Cannabis indica
cccactaattacctgattaacccatagtataaatataaactctaattatttaccattaggcttatcgggatattacagtactgtaattgaaagaaatcattgtagcgtgccttagcagtatggcattacagccccagtttaattgactattttatcaatcttccaaaagcatctggttttgataaaacttgtcttagcggttgattgattaacaccttaatcagatgtgtctggaagtaaggccttcatatgtgagatgcaaggattaggcataaggcatgttcttcaaaagggggatacctctattctgcccccagtaaccttttactaacatagtaaataggttgctggtgctttccatctcttacactattgctggactaatcccattttctaagacaaccaagtagaggagtaatgtttctccagttattggtttcaccaaaactagaggtgtcgacaaatgcctttttaagcttttaaaggcctcgcactcttctgtccactcaaactttttgttgcctcggaatacattgaaaaacggtaagcacttatcagttgatttcaaaatgaatctgttaagagctgccattctccctgttaaggcctggacttacttcagtttagttggtgatggcatctctatcaaagccttgattttctcaggatttgcttcaatgcccctcgcgttgactatgaat

SEQ ID NO: 360505 - DNA, 1054 bp, Cannabis indica
ggaggattttttcggtggtagggggtttagggttgagaaaaagatgtgattttgaatatgtgtgattttcccccttttaaacccgtctgaccattctcgccgcggccactgggctataccccaaaaaatatgtatatattttttatgaacagtacaaaaatttagagaaaaccaaaatctggttaccagttcactaaactaaactaaaaaagaacaaaatagtaataacaattaaaagaaaacaaaatacgaaagttcaactaaaacattaagaaaatttttgggttgcctcccaaatagcgctgtctttatcgtcatacagctagacgttgactgagttctttaaagaggtgccagaatcatggcggacttggcttggtcaaattgacctcccaagtagagttttaaccactgcccgttaactttaaaagtctcggggctttcacctttcagttctatccctccataaggaaacgccttgaccattgtaaatggtcctgaccaccttcactttagcttaccaggaaacaatttcaatcttgaattgaaaagtaaaacttgctgcccaggttgaaactccttcctcactaagctttgctcgtggcacttctttgttctttccttgtagatctttgcattctcgtatgcctcatttctaaactcctccagttcattcagctgtagcaatcttttctctcctgtagctttcaagtccatgttgagggtcttcatagctgaaaaggccttatgttccaattccaccggcagatgacaagctttcccaaacaccaaccgatacggtgacatcccgatcggtgtcttaaatgctgttctataagcccatagtgcatcatctaactttcgtgactagtcttttcttgatctatgcactgttttctccagaatcatctttatctcccggttagaaatttcaccttggccattactttgtggatggtacggtagagcagttctgtgatggacgccatatctcgagaggagtgctttaaactgtttgttgcagaagtgactcccttcatcgcttatgattgct

SEQ ID NO: 360506 - DNA, 648 bp, Cannabis indica
attatttttatttttattattgtgtataaaaataattaattactatggaaattttgaccttataagattgaattttcttgggtaaaataatttatttgttcattaattataattttgagatttgttgagataaataccttaaacacggcaaacataacatgtagtatataaatatagagtttttgaagcaataattagcatcataaaccttaaaacatcaatggttaaaaatagctagttatatatatgaatgaccatagtataattcttgtgtggaggaaggcggttccgggaaatacgcgttggagtgttcattcaatgagtcagttgttggttgattgtgtgcagactgttgcccctgagatccagtattctgttgacggtttgggcaccgtcgataatcatggcctgatgagcgacaaatgcgacaatgtcttgagtttcttgggatctgctccccgttcggtccttcccttgaatttcccgtaccctttgttctcacaacttcagggtctttaataatgttggggttgttacgatatcttccaggttgtggcgtctctccttctggattggaagtcatctcaaattcttccttaaacattagagttagccgttcaatctcttcctttgcacgcgtgtacgaat

SEQ ID NO: 360507 - DNA, 584 bp, Cannabis indica
ttcactatagttgactagaaccgatcttggtcaaagttactcgttggttataaatcatcactatcgggtatcaatcatcgttgcaagtccatttccataatgactggggcattttaggaaggctcgtgcgatcctttatgcatccccaatcgtctcgttgtgactactagtggattcactataattgactaaaaaccgatcctggtcaaaagttactcgtgggttacaaatcatcactatcggttatcaatcatcgttgcaagtcaatttccataatgactaggggcattttaggaaggtcacatgcgatttttttattcatccccgatcatcccgacgtagactactagtggattcactatagttgactagtaaccgtatcttgatcaaaagttctcgttggtgcgatccgttattcattcttggtcatcccggcgtgactactagtagattcactatagttgactagaaccgatcttggtcaaagttactcattggttacaaatcatcactatcagttatcaatcgtcattgaaagtctatttccataatgattaggagcgttttagaaaaacacgtgggat

SEQ ID NO: 360508 - DNA, 822 bp, Cannabis indica
ttgtcttttcaggtgtgttctgacaggttggcgcggtatagtcacaaccgggtatttcgggccgaaccgggttcgggcccgaaatgcaaattggattgaattaattggcattatatttgatattatgaaatctgaaattatttgggaattaattgagtgtgaaatggcaattttgcccttgaaaatgtgtatgtatgattaattggccctaagggcattttggtcatttgaccccttattattgtatttggaaaatgggattttattaagaaaatcaaagtaattttctggttatttccttctctcacctgaaccctctccctctctcaaaccctctcaatttttgagacttgaatttggtgtgttctagcttggattaagagtgttgattgggaagaattgtgttgaagattgggattaagcttgtgcaaggaattaaggtagcttcttgctgatttatttgaaattaaatgctgaaattcttagggtaaaaagcatgttctttgagttttgaatgttcttgttgcatgatgagtgaattgatgttaatcttgtggaaattgagcttctatttgttatatgctttgttgttgagcttgggcagagattgtatggaatttctaggttggattttcatgttaaaatggtgttatgctgctggatttttattaggtttgtgttgggttgagttcatgttcttgaacttgagattttgatgagttagcatgatttttgagtcatttatgtaatctgaattttttgatttgatgcatgagatatgtgtttttgatcctctgagatatgctagcagctctatttcat

SEQ ID NO: 360509 - DNA, 570 bp, Cannabis indica
atgttctagatttaacagaaattgtatattgaaccataaacataaaataacatgtaaacttaaatgacttctgttatactcgaaattcggctacacttcagaagttgacacgtgtctaatatatggaatatgaatcagttctgaataatataattaatattattcaaataaatacatattaaataactcgttataataaaataaaggttaaatagataatattcaaaactcgttagttttatagtcaaaaacgagacaagaataataactattgatttgagattaatgagacatatgcatgcctcggaatatacaaataaaaaggggatattcatctgcccgagcaaaataaatgtatcaacataaactgcttcacattatgtatagcgagaagatcacttcgcattacaaaagccacaaagaggacataacgagatggaaaccttcccaacgctttttcttatcaatatgaacaaggaagataactcaaattagagaatatgcagtagaacctctatccaagaatacacttgggaccaagtaaattatattctaattgggaggttataa

SEQ ID NO: 360510 - DNA, 511 bp, Cannabis indica
ttttttaaatattttaacatgtatattttaattattttttgtttttttttaaattattttttctaaaagaattattagtttggccaatactatatttacatgtggcactttattgatcaattaacagaacgataaattaagtgttaagtttagaaatttgagaatatcaatgggaaatacaatgatgacatcaattttatatgattggaatataaaaataatgcatatgaaaaaatttgattcataatctaacacctgtttcttcttctacataatctaacacctctttttcttttgttcaattcacaataattttttctataaaaaaatatttttcttatattctgcaaagtaaaaaaaaacttcacacatatacatagttatgaatgatatatataaataattgaataattatttaatttaatttatatttattattatgcgttttttaaaaaataattaatttaagatagatattttatagaattttttttaaaataatagtaaaata

SEQ ID NO: 360511 - DNA, 597 bp, Cannabis indica
ggtccgggtccgggttcgggttctggttcggctctcggtcccgggtttgggtccgggtccggggtttgggtagggtgtccgggtctgggtccgggtccgggtctcgggtttgggttcgagttcgggttcgggtcccgagttcgggtctgggtccgggtctgggttccaagttcgggtcatttattatgtattaaataataaaacttaaattgtattaaaaaatttggtcgtaataattaaaataatacattgctttatccaaacatagtgttatttattatttaatacaatacgatctttatataacgtacaaaacagaaagtctaattaattatttttgcaaaacacagagtttaaaatagtatttacccataaaaagggtaaataccatcaagctatagattccatttattgcaaaatttgacgaatttattttattgttttactcacaactttatatcactttttaataattaggctaattagtaattttttttcctgaactttgacatataccaaattatgtcccctaaactttttttgtcgttaaaaattctccatgaactattgagattgttaaatttaaggacttttgtc

SEQ ID NO: 360512 - DNA, 726 bp, Cannabis indica
gtcattttccaaaccccgaaaataccaacaccgctaaaacctaacatatataccccgaataaattctaaattataaaatgcgactctctataggcccaacgccgctttccacagcttccgagcacagtcacagaaattgagaaattacataaatagcatgataaatatatatgcactcaaataaattcccataatcataatattattgataataataaaatctcatacataaactttaattattaaataattcaacgtattattcgtatgcggtctttacaacattagtaaaattgaacggaattgaattgaagttcttgaatccaacaatattaatagttcgggagaaatttttaacgacttgaaaaaatttggagacacaatttatgaatacatgtcaaagttcaggactaaaatcatagtttagccttaattatatgatgagttcgatattttaataatttcatttttttcttgattggaataagaaaattaatttaatctggcctggtatatacattaatttgattaatattcaaaccggtactcgatgtagaaattgaatattagaactaaagtataattaaaacatattacttgaccacaactctctttagctctcttttttcttcccttagatttaattctttgcttaaataaaaagaattaataattacataaggcactattttttgtgaaaatgttacctttttacgtttaaagaat

SEQ ID NO: 360513 - DNA, 1041 bp, Cannabis indica
ttattgatgttgaataaaatggattacattgaaatggagttttatttagggcataaaacccaacaactggaagggtacaccattaaacaaatactaagaaaagagaatgctaccgttgatgccttgacaagattggcaacaaaggctaacctcgtgccaatagaacacctatccgaaccaagcatcaacaccaaagaagaagtactcgtacttgatacgactcaatcatggatgaccccatagcagcttacttagaacaaggtacacttcctattgacaaaaacgaagaaaagaagatgagaagaaaggccgctcggtacctaatcattgatggtgtcatgtataggagagggttctcaatgcccttattacgatgtgtacatcaagaccaagaccaaagactaatggagaaggtccgtgaaggtttttattgtaatcatgttgggggaaaagtttatccaagaaaatactacgacaaggattcttttggccaaccatgatagaagactccatggagtatgttcgaaggtgtgaaaaatgtcaaaagtttgcaaaaataccaggggctccacctaacaaactaacacaaatatagagtccatggcctttcgctatatgggatatagacttgatcgatcagttacctaagggcaaaggagaagtgcaatatgcgatagtagaggtcgactatttcactaagtggacagaagtcgaaccactagcaaccataacatccaagaaggtgcttgactttgtagtcaagaacattatatgtgttggaaatattttaccaggatctagatttactaccaagtatgtttcattaacatccaaaaagaaatccaaaaaaaatgaaataaacacatataaagtttagtaaaccttacattgggtgcagcggaataatatgactccttccattcagatctctagcccttgattcctttctgtagcagagcataatcaagatctgaatctagatctctttctctccttcctttgatgctggttctccttcttgttgtttggattctcctacag

SEQ ID NO: 360514 - DNA, 984 bp, Cannabis indica
catgttcaaatctttctgagtaaagaagtacttgagacttttgtgatcagtataaatttcacacctttcaccgtaaagatagtgtcaccaaattttcaaagcaaacaccactcctgtaagttccaggtcatgagttggataacgctactcataatattttagttgtcgtgaggcataagctatgaccttgtctgcttgcattagcacacaacccaaacactgtctatatgcatcacaatagactacaaatttctcttgatcagacggtagggctaagactggagctgtaatcaaccgttgttttaactcttgaaaactttcttcacatttatctgacgacacaaacctttgactctttctggttaattcagataatggcattgcaatcttggagaacccttccataaaacgtcgatagtaacccgctaaaccgaggaaacttcgaacttcagtaactattttcggtctaggccaattcttcactgcctcaattttcgctaggtctaccataatcccatcttttctgaaaatgtgtcccagaaaagatacttgtgatagccaaaactcacactttttgaactttgcatagagttttatgatctctgagccgttgcagaaccatacaaagatgctgctcttgttttgcttctaacggagagtacacaaggatatcatcgataaacacaattacaaagttatcgaggaaatccttcaataccctattcatgagatccataaaggctaccagagcatttgtcaatccgaatgacataaccaagaactcataatggccatacctagttcagaaaggtgtctttggaatatgttcttcccggattctcaactgatgataaccatatctctaatcaatcttagagaataccgtcttaccctaaagttgatcaaacagatcgtcaattctaggcaaagggtatttgtttttaatagttaacttgtttagttcctggtagtcaatacacattc

SEQ ID NO: 360515 - DNA, 860 bp, Cannabis indica
tcagggggaatttttaacggccataaaagttctgggggcatgatttggtacatgtcttgattgctaggagtaggtatttattcaatacaattttttttcctaacccgatccaatttaattagtagtcggatttaaaaaattatcattcgatccaatctaactagacttcaaaaatcaaaatcatataccttcacaatctaattactaattgtaactaaaaattattaaaaaaaaacatataaaaactaaaccatacattacatcttagagatcttttaaaaatttctttaattaataaggtgtaacaggatcaattggataataaagacacaactacaaaaaactcttttaatgtccttttttcatgtccaacaaaattattgttggacatgaaaaagttttagggagttttctagtctaacattgttggactagaaattttttttatcatgtccaacaatatcggactagaaaactagtaatggacatgatatatattttttatttttctaaaattggatttattttcatgtccaattctattggactagaaaatattcttgggagttttctagtctagcataaatggacttgagtttaatttgaattactaattaataaatttaaaacttaaattaaattatttattaatttattaatttaataattaaattattactaaatttaattaatattatatatatatgtaaattttgaatttttagaaatttatatttattgattatttaaaatttaaaataatatatattgtgtccattaatgttggactagaaatattcttctagtccaacgatgttggactagaaaaataccctttttatgtcccaggctattatgtc

SEQ ID NO: 360516 - DNA, 1394 bp, Cannabis indica
atgccgaatggaatgaatgataccaatatagtctaaatttcccaagaaaaagaaacctgatcaaatgagcgagttacgtcctatttatctttgtaatgttattgctaagatcatcactaaagttctttccaacagaatgaagtgtttattatcaaaggttatttctttaaatcaaagtgcgtttattcctgggcgtttgattactgataatatcatggtgtcatttgaaattttgcattacctgaaaaagaaagcaagttggtaaagacggttatatggctcttaaattagatctaagcaaggcttatgataaagttgattggcactttttgtgtgctatgctgaaacaaatggggtttgcagacaaatgggttagacttatttatgggtgtttatcttcggtgaatatcagattgttactactggacatactttggggccgattgttccaagtagggggctaagacaaggtgatcctatttctccatatttgttccttatttgtgctgaaagcttatctgctattattagaagatttgaggaaaaaaaagtggattcatgggattaaagtagctaacggtgctcctttggtgtctcatatgctatttgctgacgatagcttcctcttttgtaagtccactaatggggaagttagtagagtgcttcatctgttacaactttttgctatggctactggtcagcaagtgaattttgacaagtcctctgtgttctttagcacgaatacttcgtcttcaattagacaagctatatgtactcgaatgggtatttaggaggcggcggagcatagtaaatacttgggattaccaagtaactgtgggtaggaataaaaatgttgtttacttgaaggacaaattgcataaaaagattcaaacatgagacaacaagttcctctcaagagcgggcaaagaagtcctcattaagtcaatagttcaagctcttcctgcttacaccatgaatgtctttctcatttctgttggaatttgtaatgatattgagcggtctatcagtcaattctggtggagatcttcatcaaaaaaggtattcattggatgaaatatgacaagctgtcggctcataaagtcaatggtggtttgggtttttgtgactttagagattttaatttagctttgcttgccaagcaagggtggagacttctcactggtggtgatagcttgatgggaaaaattttcaaagctaggtacttctcctctgggtctttcctcacggctacacttgggtctaatccaagttacatttggaggagtgtatttgaagctcaagacttagttcgggcaggagttggaaagcttgttggtgatggctctacaacgaatgtttttatcggatccttggttgattgatgatttgaatcc

SEQ ID NO: 360517 - DNA, 591 bp, Cannabis indica
catataataagttatttcttactgcaaggccttatgcttttttctcttacttcaggcttgaatgttaataaggagaaatcagcattgtattgctcgggcatgacagatagagagatccaaagagtattagatatgtatggtttcactaaacaaagtgatccattcaaataccttggagtccctatctgtgcaaggaagatcaatgcttcggattgccgtagcctagctcaaaaaatggctgctcgaatcaaggtatggggaactcaaaacctttcttttgctgacagattagttcttatgaattcagttcttatctcaattcatatttactggagtcaaatgatgataattccaaagaaagtaataacagagattgaaaccatatgtagaagtttcctgtggactgggaaagatatgatgacaggggctggaagcatttcttgggagaatatttgcacccctaagaaagaaggtggtcttggcataatgaacatagctacatggaacattgcagccatagttaaacatgttggttgtagctaataagaaagacaacctatgggttaaatgggtgcattgtgtgtacatcaa

SEQ ID NO: 360518 - DNA, 625 bp, Cannabis indica
ataataccaaaatctcaattttcgcactcactgaaacactaccaaaacttatccaaatcactccgagcttcacaaggtgcatatatgccataaatattaccatccttatgtaacagaaattaaaatcgagcccttaaatgaaaaacaccattaacgttcggactaagctttaaaaagttccaaactcgatttctaactcaaaatcacctcaaattcaacaagtaaacatataaactagtctcatagttactaaagaacaattctacaaagtcataatctctataacctttttaaatcataaagcccctatataaaaccaattgttttttaaacttaaaacgaaattaaaccataccttaagcttttccttttcaaagatttgctatcctgctactaccggagcttagatcactaggtttcgggttgaaaatcgaagaaaatggatataggaggagaaggttttgtcgaaaggagagaacgagagtttccttcgttcgttgttcgttctgtttatttactcacttatagcaaaatttaaattttatactgaaatatgttcgtacaaaaatatcaaaaaatatctctttttacactatatcaaaaatatgttcatacaaaaatattt

SEQ ID NO: 360519 - DNA, 685 bp, Cannabis indica
cacaattcattaaactcatttgaacaaaactcaaggccattttcagtcctcaataccttaattttgcttcctgtttgattttccagcagccttttcaaagtgtcaaatgtaggtagtgcttcatccttgcctttcaatagatgaatccacactatgctactgaaataatcaaccatgcttatgaaatagtgagcacctcctttagtttgaattctagagggtccccaaaggtctgaatgcacatagccaagcttttcactggtgttttgctcagccttaggaaatttcagtctgcatgcttttcctaacacacattcatcacaaaactcaagtccttctaccaatttcttcttaaacaaaccttgcttattcaactcctcaagtcctctttgactaacatgtcctaatctgagatgccaaagcttgacatgactcagcttttctgaatttacagcaggtgcagcactccctgttatagtgttgatatccaaaaaaaatataaaccattcttaaatgttcccttgaacacagtttttgacccttggtcaattttcattactccattctcaattttgacaacaaaacctaatatagcaaacattccaatagaaagaaggtttcttttaagatctggcacatacctcacatgctccagacttttcatgattccatcatgattcttcaa

SEQ ID NO: 360520 - DNA, 717 bp, Cannabis indica
taatttaaactacaccattttttagcttgaaatataaataatatattttttatttttttttaaaaaatttaattacttcaattctagaaactaacaatatcaattataaaaaaaataaaaaaaagaagaacggtttggacgggttaacccgaccaaaccgacaaaattattggacgggttgaactttttctaaatttttattgggcgggttacgattaaatatttgcaacccgatatttatattgggttaataaaaatatgctataacccgaccaaaccaaccgacgtatacagaaacttttgacaaatctcgcaatcgaaggcattccaaacagaaggggtcaaaaaaaaaaaaactaaaggcaaaataaccgaagccttagaggtttcacacaataatttttttagataaatatatgtaaataaatataagagtaatttgcggcataacctccttaagtggccaggttcttgcaactaacccccaattctaaaattttggtggtaaaacctcctaaactagtgttctgttagcacttagccctttccatccatttttggctgttaactgccatggtggaatgtccacgtgtatacaatgtacacgtggcacaattttattggttcacgtaaataaatattataaaaaaataaaaaaataattaatttcaaaaataaaaataaaaaaaaactacattttctttaaaattaaaaatt

SEQ ID NO: 360521 - DNA, 797 bp, Cannabis indica
gcgattaaagcctcatattcggcttcattgttagatgaaaaatattcaaagcgtaaagcagcgtgtaccttaaaattgctgggactgattagtaggattccgccaccagaaccttcgctatttgaagccccatcgacgtacaatgtccatacttctccattgggcatagcaatgtcaaccttgtcgtctatgagtgccacttcggtgcttgagaactcgaggataaaatctgccaaggcttgccccttcatcgcagtcctcggtttatagttgatgtcgaattggcttaactctattgcccatttcaataacctccctgacgtctctagtttcggtaatacttgcctcaaagggtagtttgttaaaacttcaatactgtgagcttggaaataaggtcgcaactttctcgacgatattaccacggcaaacgccaatttttccatttgaggatagcggttctcggcgtccagcaagcgtttactgacatagtacatcgggtattatcgtccttgatcttcgcgtgttagtaccgaactaatcgcatattctgacactgctaggtaaatggataggacctcgccagtcatgggctttgataggattgggagttgccccaaatgtgtttttaaggcttgaaaagcctcctcacattttttcggtccattggaatttcttattgccttttaaaatctgaaaaaactctttgcatttatcagaagatcgcgatataaagcgatttagagtcggggattttacctgtaaggcttttggacttcttttggcttagttggtgatgg

SEQ ID NO: 360522 - DNA, 643 bp, Cannabis indica
gaacttccattgtccacaagtatgcaatggacattatctcctccaatattagcaacgatgaccagtgtgtcggaatgcaggtggtggacccatctggcatcgctttccatgaatgtgatatcatcacattcccttttgaacagcttttctggtcgctcactcaaactgttcacgttggtgagcggcttctctttggcttctttcgcatatcgctcctgtgatttcctagaatctcctgcaatatggggtccgccaataatagtcaagatattgcgaggagtccttgaaccactcacattgtgattttcttctttgtcatccactcagggatgactttcctcattcttcttatacttttgaacttaccccgcctgattaactcttcaatttcatcctgcaaaaaccaacattccagagtagtgtgaccaatatccctgtggtacttatataatttcttcgggtctcttttgtcgtggtttcccctgattgggggaggctttttgaagaccccgttcttctctttgatggcgtagatatggtcctgaggtactgccaactctgtataattcacaaaacatggaccacccttcctcttcagagaggactccttctttggaggggacttggccaactttggacttcg

SEQ ID NO: 360523 - DNA, 686 bp, Cannabis indica
tgtctttatcttattaaattgttttatacggactatcctatgtgacatctcgggaaatcggggtgttacacactactcatcgaggatgattcatctctttcatgatcataaagtgagctcatgcttgagcaccaagcacacaagaaataacccactacacctcaacaatggtttatctcactcacagaagataacttcaacagagaaacttcaaattttttcaccccagtcgtaaagagatcaacgctggagggcaagagtagtcaagctcagacagtgtcaatgaaattccaaacatcgtggcaatgaaggtaatggttaataaccaagcatcaccaactgttctaatcaaaatagatcctaaaaagagtgggtcactccctaagagatatgaggccatgcaagcagcttatgtatggttttaggtgagccgacattgctccctgtggtagaatcagatcaccactcatagttgaaagtgcctcgtggcaaacatcattatgactaccttcatagtgatcgacatcaagtctccttggaaagtcaacacctagcgacctttaagccatctcactcgtctaccacttgtctgttaagttctcgacagcaactggttcgaccgtctccttggcaaccaaagagtagaatgcaaattttacaacgcatcgttgacattcacctaaaag

SEQ ID NO: 360524 - DNA, 626 bp, Cannabis indica
ataaataaaatacctactctcacacaaattgtataacaaataaaatttaaaatatatgtatatttttactgggtattacattccaccctccttcaagaaatttcgtcctcgaaatttaactaccaaatacatgaaatttaagtattgttattcccttatacattacttaaataacaaaacatactccatcacaataacttacatatacgtgctttaaatacataagttttgcaataacatgctcgtaattttataaaaaattattctcttatgaacatccttacatgtcattaagagttaaactatttattctctaatgaacatccttatatgtcacttgagaacacattatacaatacaaaaataacaaacaacaaagagtagggtagaagaacttatgcaaacttctctttaattgttcccattctttcattgaatgttaatttttttttttacttaatttcctccataaagctacaattccgttattatagttacgtagcataattattaagaatgttgccctacacataacgatccaatatatcatcaacaaaccgatgtcattcaaacagaccacatgtcttctataaattacatgaactacatgtaagctaaagatcgtt

SEQ ID NO: 360525 - DNA, 594 bp, Cannabis indica
tcatggtgttggacatggcagcatcttggaggcgactgacttagcccaatagtaagcataagccatcttcagaccggtatgcacagagaaaaaacattagaatttgagctaagtaaagaaggataaagggaaactggaagaaagactcacccttgtaaactccttcaggactcctcccatcaccagctctagggaaagctcattgtcagctccggccagctgctcattcacctcagagactgaccgagtcacgtagtgggtgagcatatctttgcctctcttagtctccagatgcagcactggaggtggggcaggggccctgatttgttcagctccactcctgaccagctcggatctacccttcggctgttcaggtctgtccgagttccctcctcgagaatttttggacttagtcacttttggggtagaagggtccacgatggtatgctcctcggagaggtcaataactgcttcggccggtgccctttctctggacagggttgtctcactgctcctagatctcttggccggaggagataggcccgagcttcctcccactctcttctttaagcttcaagcatcttctgagacatg

SEQ ID NO: 360526 - DNA, 756 bp, Cannabis indica
aaaatgttaaccgattagcccttgagacaagttttatcaaaaccagattcttctggaagattgataaaatggtcgattgaactggggcagttcgatataacataccaacctcgaacatccatcaagggtcaagttttagctgacttcttgatagaaggtataactccagtagaaatcccacttgatcagtgagacgtggaaacctggaagttatatgtggatggcgcatccaacgaacagggttcgggtgtaggggtgatattaatatcgccagaaggctttaagtttcactaagctttgagattccaatttgacgcatcaaataactaggctgaatatgaagccttgattgccggtttaaagataggagaggccttgaaagtcaaaatctcatttgtcatagtgattcgcagctgatcgtgaactaggtccttggggaatactaggccaaaggcttgaaaatggcaaagtatttggagaaagttcggaagaacttggagagattctattactttaaaatcgaacaaattctaagagaacgaaactccaacgccgatgccttagcaaagctggcctcgcagaatgacctggatgaactaaatctggttccagtagaaatgctaagcgagccaagtatatgtgaatctgaagacgtcgagatgatagatagctctctaacatggatgacgcacattatcaactatttactcgacgggaaacttccaaatgacaaaaacgaggtgcgaaaactattgt

SEQ ID NO: 360527 - DNA, 592 bp, Cannabis indica
tcatagtggttttgacaagatcattctctgcaaggagttaatatgcctatatccactgaaattaagttcatctcattcacagataaataaaaagtgctacgtttttaaccttttgaaataatttatcttgactgtctaatcttattcattgtagtaaacttactgctttaattgtctctttgctgtgtagcttgttgtgtaggtgaagtaagtgaagaaaggatcccacatgtaatatataagtgcttttgggggggaaatgcccttttcactttttaaattttacttctctcactaaaaaattacatttgaagaacgtcctccttctctttagagggccaagcccatcaagcaccactctcataatttttgtgttgtttcggccatccaagctttccacattcatcctcagcgatttctagtagtgggtaagctttctatttctgcaatttcacttgatttagttaatttttccatagttgcattaaaattattctttgctttgaacatccattgatttttacattagattgttctccttttcatattttaatctgcatgatagcctttgctggaaatattttatcaggat

SEQ ID NO: 360528 - DNA, 541 bp, Cannabis indica
aactaagcggtctttacaataatggtggagtaggttaatgctaaatacaacctatcagaccatattacatagataatgcaaaatactaaatttgatgaagacatcaagtatatcagattaaattgaaatgtacatttggttttatattagtgaaagtaggagtttgttgggattttatgccctaaataaaactcaattttattataatcttatttactttcaataaagcttagaaatcatgtcttgacctagtcatatgatttgttcacatgttttatacatgattataggtttaatatgaaacttttataaaattttgaatgtatagttattcacaattatagtattatcatcacagtagaaagtaattgtgattatattcttcaaattatttagtcccacgatttatcagtgcaccgaatttacactgacattataatcagctataaggtttacttacacttagctgagtggaatggcttttccaaggcttagtaaagtaaataaggattggatgtatcgactatacatcggactggac

SEQ ID NO: 360529 - DNA, 726 bp, Cannabis indica
tagctgatttaagaggatctaagccaaggtaaagttttaagcaaatccctctttagtttcttgattttaaagaaaatggattatgtcacgttttttgagattttggttactgttcttgctgctggtgtttagttatgttttcagtagttaaattacgtttatataggttgatttgaacatgttttggtaggtagtttgttgattgagcaagctttgagttttagaactcaagcttgactctttaatggtgttgttcaattctaagctttgattgttattttattgcttgggttatgtttattggggtataataagcaggtttagaagggttatgatcgggtgtatgggcaccaggttgttagagtataggctgacattatggtcgatagtattgtcgtatgaacgttctagactcagtaccgtgtgggacacggggattagggttatgatcgggtgtatgagagccaagttataacccgggttatttatatgtttacgttatgcttttcttaatgagtctgtcgactcacagtgctatttccatgtgtaggtaagggcaaggctaaacctgaggagccatgaggacgagcaggtgaagattgtacttgtcggggcgattaggcctggagcgtacgatcttaagggacatcacggcttttgctgacagtcgctaggcgacaaaacttttgtattaaactagcaaacttttataaatacattttgtaa

SEQ ID NO: 360530 - DNA, 410 bp, Cannabis indica
acataggttgtttatccaaaaaactacggagaaaacatggagaattcagttgtatgtagattcaaaacgaacaatgagtctaaagtacaatcaattcaccattcaagcagctgagccgatggaagattaggaagaagttttactatactctttttagtttttctaataatattatatattaagactttatttaataattttttttctattttaagatcgcacattttttttaaatttttgttaaataatatttgctttaaattttgtaaaatacatctattgtttctctaaattttctataagtaaataataaatattattttcatatattgttatgacttatatatacacaattatattttactaaccaaatataataacacaactatttttttttttttattttgaat

SEQ ID NO: 360531 - DNA, 412 bp, Cannabis indica
gggcacaaaacccaacagtaatcaattcaaacttttctccattattacataacattaatcacaaaatccttaatattgtgaaattcctctctatatgtctactcctctagggatactggattctttactttttggcaactacttatgtgttagtcaagaagtaacactagtagtttattaattattggtacaatgccaaaaatagtatagaactttccatagactggataagtatctttcctgcaactttagcattcagtctccctggtagagttagacactctatatcagtttttacacttctccaaaatcactattccacccctagagtaatcaccatcttatcagtaaaatttctagcacaagtctagaaacctgatttggtgtagtctaagggtattaaattaccacc

SEQ ID NO: 360532 - DNA, 520 bp, Cannabis indica
ttttaataagtaccctatatattaatacacgatttgtatgtttatatgtcatcttttttttaaaatatatatatatatatctttttcaattgaaactcaaatgttgtttcatatacttcaatattatttatctttaattaataaataaaataaatataaacaaaagacttaaactaaaattattaaaatatatataataattaataattaaccacttggggttagctcaagtggccataggtgggtgtgtgagtgttggaggtcctgggttcgagtcccaggtaaaacatgatgtaatatataaacgcttgaatcaaaaaaaaaaatataataattaataattattatttgtatcaattataaagttttgtattattattattattattattattattattattattattattattagacatcaatctatatacagtagaacctctatttaagtaatactctgttctaagaataacctctaatttgttaataaaaaaatcaagtcccgatttgggccagt

SEQ ID NO: 360533 - DNA, 453 bp, Cannabis indica
caatcaaattaaaaatatagtttttttaaagagaatctgaatttaagattcataaaaaaaataaaaacttaattgaatataaaaaatattaaaattctacatatttattttttaaaaacataaaacaaatgaaactacaataattgccggagttgtcactcgtgccggaaaagtcataagagtttgatgtcggcactggaaaagtcatcggagtagctgtcgatgccggaaaagttatcggagttgacgtcggcgatgaaaaagtcatcaaaattagcattgtcgccggaaaaatcactaaaaaactggtttcttgatgaagaaccagtttggaattttccggtaattttaccagcgacaatgccaattacgacaactatttcgaagtttgctgtcggtgctgaaaaagtcgtcagagtagctgcaggtgtcggaaaagtcgccggagttact

SEQ ID NO: 360534 - DNA, 640 bp, Cannabis indica
gggtattaatagttttactttttgattgataaatatttataactctctctttctctttttatatctaaacctaaaacatcaacaactagggatatttatggattggttgatttagtttgtaaagttgttcttaaatatcaacatttcgtcaaaaaaaatatacattaactaaatgtaaaatacttacacggatttttttggtttgaactgctaccaatattttgaaaaccatgactgaaccagaaaattttaaacagtccgaattgactaaatcatttacaccggattcatttagtctagtttcaaatagtttgatttagattagttggggtttggaactacggattgagcattatataaacacccctatcaaaaataatatcctcagattgatctttctttttttttaccacccatctctctttctctttaatcaaatgaacagatctcaaatcaatctttccattcttcttctttttttttctctatttttttcgatatttaaaagtacaatattggttcttcctccatagctccaacgattgccggatcagttgacttctttgattcattcaatgcctatgtggcgtgctgccccatggcacacccacactagggccattttgtaacatgagcatgc

SEQ ID NO: 360535 - DNA, 517 bp, Cannabis indica
aatgctggacctagatctggaccgagatcctgacccattcccaaacttggaccagcacccaggacccaaacatggacttggacctgaaccaagacccagatcggggtccaaacctgtacacaaacccggacacaaactcgcacctgaactcaaacacccacacctagaatcggaaccaaagctagacccggacccgaacccaaaataggatcagaaccaaggacttagacccagaactgaatacagactcaaatcgggattggaacttgggactcggacccaacctagaccaggacccagacgcgaacccacacctggagcctgatctggacctagactgaaattcgaacgaaacccaaactcaggccaaaactagaactcggacccgaactcaaacctaaactcgaactcagaatctcaaatcgaacaagaatcgaacaaggactaggaccaggaccagcacgcccaaacccgaatccagatcaaaacgtagacagagacctaaacccgaaccgag

SEQ ID NO: 360536 - DNA, 599 bp, Cannabis indica
cttggctttggagcttggaattgaggtattctccagctgaagtgatttggaatttagagttgcatgttcttgatgtgggttgaatttttggtgattcttggtgtagaatggcatgattttagttgttaagcatggattctaattataggatattttctactgctgaagcatgtatttatgagttgttttcttggctggaagttatttaaaattgtaggagattgaagctcttattcaagagcttgatgttgccatgaacatgtttgaattctatgatttttatgcaaactaaattgtgggattttggatgcatgagatatatgtttttgaccctataatgtttgctagctgctgtaagtagtaaattgagattttggttgtgaaaagcaagcttgagttcatggaactcaagcttggtgctttaatggcactttttgattcttagtgaaattattgtgtttaagttgtggaatatgtttattatgacatataatgatgctctggaaagtttggtagtgtttggggaagatttgagtaagttttgggggtttaaagattgaaaattttcgtgttctctgcccagacaaccggaattccgg

SEQ ID NO: 360537 - DNA, 646 bp, Cannabis indica
gccgagttgccaggagttgttttgggttgtatctgctgtgtattttgattttgtgttttgaattgttatcgtacatagtcttttgtaaaccttttataacagggatccccagaacacgttttttatgcccttataacattattagtattttattttagtcaagtttttaatattatcatggtttttaattattaattaatttattagtattatactagtttgtataatcacacacgtggcgtccctatgggatagggtgttacaacttggtattagagcagccatggttttaaaggtcttgaagactggtcaaatatgtacatttactgcgaagataagtcgactcgtggtatagtaagtgtttatattatttactattagattatctacttaaattattataaagtatgtcgacaaaagtagcatagtgataattatcataagaatatatgtatgatatatgcatattgatattaatatttgtctgagttctaaatggttagaagatgtggactaaatgtgtgatattgatttgctatgtgtgggcatgacactctattactatgggtgaatttgatgaagaacaatgaaggagggttcaaaatcactatagaaggtgtctctcatctactagttgttagagaat

SEQ ID NO: 360538 - DNA, 620 bp, Cannabis indica
aattttttttattagatttataaatattaattaattaaaagatatttagtatcctaaattttctttaattttctattttttttaataaaaattaagataaaaaataaaaaaatcattataatatatttttccccatttaaagtatatatcgttttcctatttagtcgtataactcaactgaaaaaaaatcaatcaccctattcacatttttttgtttcttattttttcttcaaattattatctttattatctttaacaaaaaaaaaaaaaaatcaaatttatatatctatataccaatatatcaatataaaggatcaatcaatcaatatatataaaggagaagtatgaggcgatgacatgacattctaaaatcactctaaaattacttttctcttctctccttaattctctcaattttaatatttaattctattttctctaattttctctctttttattctattttctaataataaaaatattaaatatctaagctatgaatattaacgaattaaaaaaacttccgtggcataaaaaatctaacacaacacagtgcattcatacattttttattattcttttaatataaaataaataataacctaaacacctaaacctaa

SEQ ID NO: 360539 - DNA, 587 bp, Cannabis indica
aattgaccattttacccctagctttagaaataccctagttttaagtctaagggcattttagacattttgtttaatggtggattaggtggctgccatgagtgtgtgacacctagcacattacttttcagcaagatttaattagaaaccctttgagaaattaagagataaagaagaaaaattggaaaattggattatctcttgaactctctctctcttgctttcggctgggacaaaccaaggaccaaaaccagaattttcatcttgtttttctgggatttagcaaggaatcaaggaggatttaaccaaggtaactttagttgctctctagttatgttttttctcaaattttgcttagtttcaagaggtgatttgttaggttagtggctgttaggtttagaaatgatttgggtttagttgttatgctcaatattgattgatttaaggttctagctgctggttttgatgcttgataatgattctaagcaagcttgagttttgaaactcaagctttgagctttaatggcataatttgatttgttggtttgttctgtgatttattggttggaaatggatgtttatgcattgta

SEQ ID NO: 360540 - DNA, 702 bp, Cannabis indica
taaactatattatatggtatttattttgtaagacatattttaaaggacaaaattggcattatctatctaatattaaaaaattaaattaaaataattaaaatccattacccttaatggcattccttacaaaattggtgggggaagttctccctttcttttctcccttatttaatcaagttctctctttcctaattttaataatgcaagtaaacaaatgtaagggaatgattaccttactattgattcccataacttattagtaaacatgccaagtgtaaaatctcaccgcatttaacattttaatgttccattagactggttcaaacaatcttatttcatacggatcggatatgaaataaaagaaatatgtgtgtaacagaccatttgaatcttatttttgacataccaaataaattattttgaacttctcaaaaaatttcatgatgtcttaaaattggggcatgatttggtttggtacatgtcaaattttatgggacacaatgttaaaatttgagggcataatttaatatatgaataatcatcacgtcaagaggagtttgttagtcaaattgaacaaaatttgacataattcattgttggaaaatcttttatcaggatctagatttactaacaagtatgtttttaacattctaaatatgaatttctaatatgataaaaataaacatataaaaggtatgagaa

SEQ ID NO: 360541 - DNA, 1181 bp, Cannabis indica
ggcatgcccaaaagattgtttttaacttcccaagatcgaccagctagtggatgtaacaactgggcacgagcttatgtcatttatggacacatattctggatataaccagataaaaatgtacgtcccagttcaagaacatacaagcttcgtaaccagcatgggactctattgttataaagtcatgccgttcagactgaagaaggctggggcaacataccagcgactagtaaacaaaatgttcgcaagccaaatagggcaaaacatggaggtttacgtcgatgatatgttggtgaaatcaataaagagtaaggatcatacctcagacctcgcggaatgctttaaaatattaaaaaagtataacatgaagctaaacccaaaaaatgttcctttggagtctcctcgggaaagtttttgggattcatagttaacgcgaggggtattgaggcaaatcctgaaaaaaatcaaggcattaatagacatgccatccccgacaaagcctaaggaagtacaggccctgacaggaagaatggcggcacttaacagattcatttcgaagtcaactgataagtgtgtgccgttcttcaacatattgcgaggcaacaaaaagttcgagtggacaaaagagtacgaagaggcctttcaaagcataaaaaggcatctcgcaacgcctccagttttggcaaaaccaataactggagatacgttatttctttatttagccatctcggaagatgcgattagtgcagctatagtgtgagaagagggcaagcactagcaacctatttactacgtaagcaaaaggttactaggggcagaattcagatatctccatctagaaaaactcgcgttatgcctagtccatgtgtcttgcaaactacggacatacttctatggtagttctacataacataccatccttgaacatccatcaagggccaagctttagctgacctcttgatagaaggtataactccagaagaaatcccacttgatcagcgagatgtagaaacctcaaagttatatatggatggggcatccaacgaatagggtttgggtgcagatgtaatattaatatcgccggaaggctttaaaaataactatgctctaaggttctaatttgacgcatcaaataacgaggctgaatatgaagccttgattgctggcttaaagatagcagaggc

SEQ ID NO: 360542 - DNA, 528 bp, Cannabis indica
tggtaaaatatttccaataattggcctctgagccattgtaatgatttatgttgaccgaggttttcggcaacccattaagtaatatataagaaatctttaggaagtttaatgcatgagatttttacgtggttggggcattaatgagccttagtccacgagtgttttttatttatgagagtatttattacagagaatgttcttgatagtttttccctcttttgttcgtatgaaaccctaaattctcgaccgccgtcttaatgtgtttggggggtatttatagtgtttttgtggggtgatccctagaaccgagctacatgtctttctatattttttcagtaggggcacacattcccaaaaaatataaactgggaaatacatagtctatactctaggtatattaggggttaggtggatataaccctttatccctacttgacttatgttattcctcataaagtagccgtcactaggcttattaatcatagcgtaatagctgtagaagagaggttacgccatcagacttaatac

SEQ ID NO: 360543 - DNA, 499 bp, Cannabis indica
atgataggattcaaattttataaaatatagttgttaaaaattatattaatactctttatatgagagaaatgagatggtgtgtttgaattctaagtgtgatcacctaaacactatataaaagattctgatgtgctcatttggatgagaagttttcaataaaaaaaaaaaaacgcacattgttataaaatcccaaggcttgatgattcctaacgctatttcctagagagttctgcctgtttggtacgcaagactggattggattagacagattaatttatctaatccagtgtttgggtatgttaaaagtctggataacgaatccagctaatcttatctgtctgggattatttatcccatctagcagggtgggataaataatcccatgcaggtgtaggttttttttaatagtttttttttttcattttaattttattaatatattttaaatttaataagaatttaaattaaaaaattatcacacatttatttataaattttt

SEQ ID NO: 360544 - DNA, 600 bp, Cannabis indica
gaatagaaatgtgaataaaaatggaaatgggaatgggccagggaacgggaatgggaatgggaatggaccgaggaatgggaattggggttttggggttttggcatttggggttttgggctttgggaatgggaatgggaataggatagggaatgggaatggcaatgggaataggaatgggaatgggtcggggaatgggaatgggatagaggatgtgaatgggaatgggaattgaccagagcatgggaatgggaatcggaattggaatgggttagggaatggaaattggaatgcgaatgggatttggaatgaggatgggaatgggaatgggctagggaatgggaatggggatgggatgggaacgggaatgagaatgggaatgggccagggaatgggaatgggaatgcgaataggaatggcaatgggctggggaatgagaatgagaataggaatgtgaatgtaaatgggaatgagaatgggaatgggctgggatttgggttttgaggttttgagttttgggtttggggtttagggttgcaatttaggggttagaggttagggttagagggtagggtttggggtcaggggtcagggttcagggtt

SEQ ID NO: 360545 - DNA, 1047 bp, Cannabis indica
ttatttagtatacattgcctatataataaattctctctcacactctctcgtttttcataccattaatatcgaaggccctgcatctctccctctacttgctctctatttgacagattgggttgaatactttatttgtataatactttattccttattttattgtatcatagatgtttactaacagatttatctatatatatatatatatttaactttttcaaaattttagttgttgactttgataatagaaatacaacatggttgtggacttgtggtgcttagagatcatctttaatgtgactcccaataagcagttcaagcaatactggcatcacagatatcatgcatgcctacaaatcctcacagaatgttttaagagtttgagggcaggtgccttcactatttttttttgtttgcttattgtattgctagtttctttgttgttcatttaatttagtttgtattgggtactttattttattttttttgttcgtaactctcattcattgagtctgttgttttaatgttcatggacaaagtacaattcaaggattattgtaattgaaatttttatgattgacattgtaattttttatgtaatgaataaatttgtataatgttatttaaatatagctttgaataatttatttttattatataatttaaatgaacatactctaaattaaaaaaaaaatataaataatttttatgactaaatattagtcactaaataattaatttgtataattctttatttattattgccaactaaactacacagtttacttttttggttgttgaaagtgcatattggtatttacgtgaccaatatattaatcttattgtgacattttaatatatttggtaactaaattttagtcatagaaaataacattatttgagactaaatatattagtcacgaaatctcttctacgaccgactttcagagactaaatagtgactaaaaataattagtcgcaaaacattttgggtgactaaaaaatgagttttaatgaccaaaaaactagtcggtgaaaattggtttt

SEQ ID NO: 360546 - DNA, 688 bp, Cannabis indica
taaattctagatctgcttattaaaagctcagtttatataggcccatagtccacgtacttagttgagacaaactgtttgtaagactcagttaattgaatttaattaatcaattataattctaaagttagactttgtctagtttatgaattttcactaagttatggcttgattgtaaagaaatagatttttaggattttttattaattaagagactttatggagtctaattaataaataatataaatcacaatttatttgataattattttaattattaaataaataattttggcatttataggattgaaagtgcaaaagtggtacgtgtaaaaaatagataaatgattgagaaaaagtggcaaaaatctaattagtgatggatccttataggggcggccactagagcctatttttgctctatttttatcatttttttattccaaataattcaatcctaaccctagtagaattaatataaaaagaagagtaaggtctcactatcaaaactaatgcttctaaagctttaaacctagttttcattctatctgacaactagagttttgagactttttcttcttcttttctctcttctaattcgaaattctttgtcttcttcactatcaaattcgagccttagtaattgagtgcatgcccacccatagcaagttagtcctcaattatagtgtat

SEQ ID NO: 360547 - DNA, 896 bp, Cannabis indica
cttacattgattgcagcggaatacaatgactcattccgctcagatctctaaccattgatcctttctgtcgcagagtattatcaagatttgagccttgatctctttctctccttcgggttggttaccaccatcttacccactatgattgagtacttgacttgctatgtgtagacatgacactctatcactaagggcgaattcatgaagaacaatggagggttcgaaaaatgtatagaatagaatgtgtctctcatctactagttattagagaatgaaaactaggtttgattaggttgaagtgaatagttgttctatgagatgagagcatcgtgttccttttataatgtttcaactaggacttaggtttgaattatatgaattaaaaaaaataataaaatattgggcaaaaattactagagtggccggccacttaaagaccattctctagttataattttgccactttatttcaactagttattcttctttcaataataccatatttctaatttcaatcctataaatgccaaaactatttatttaataattataattaattatcaaataaaattttcatttatattatttattaattagactatacaaagtctcttaattaataaataaatcccaaaacctcttctcttcacaattaagcctttgcttagtgaaaatccataaataagacgtagtctaattttagaattataattgatcaattaaaatcaattgactgagtctgcaagaagtattatctcgactagtgaggaaccatgggcctatataaccgagcttacaataagtagaactaaaatttaccaagtaaatttcctaacttattaattcttccttgcgccactataaatttgaaattaaattgcactctcaattatata

SEQ ID NO: 360548 - DNA, 511 bp, Cannabis indica
tagacctcatgatcattacaaaagatattaacaggtatagtagatatctctaccaagtaccatgcccgtaacattgttggcaaacgccatttggccacattatgggccgcgtagttacagtttctagaaatactaaaaaaattacaattagtcataaaagtagagatgagcataccctttcaaaaatatatatcattaataaatttccctcctgtacgaaagatacatttaaaaaagggatttttacacttggtgtcttttttttttgtcatttttttacatttttgtctttattagcttatttaaatatttttaaaaaaattatttttcaatattatattttaaaaagtttgataattacacaaatacctatgcatgcttatgtcatatgttttctacaatattacactccatctcttccactttcttctctttcatctccaatattacactccatctcttccaccttcttctctttcattcattttttttttaatttttcttttatttt

SEQ ID NO: 360549 - DNA, 870 bp, Cannabis indica
cgtccaaaggcgtctggtttttgtaatacttgacataatggttggtcagtgtatacccgaacacgatgagcctgaaagtaaggccttagctttcttgttgctaggattaggaaataggtgagcatttctatcaatgggtaccggccttaagcttcaatgattcttttgctaatgtagtagaccggatgttggatattgttctcttccctgatcagtacggcacttagagcatgttccatgacaaccaagtatattcccaactcttctccgtccagaggttttgagagtacaggaggttttacgaattgcatttttagattttgaaaggattttttttgcattccttcgtccattcaaattacttatttcctcgcaggatgttgaagaatgggacacacttgtctgttgactttgaaacaaatctgctgagtgcggcaatccgaccagttaaactttgaacttccttggtttttgttgtcgatttcatatccaggagggcttgaattttctctaaattggcttcaattccttgggcattaacaataaagcccagaaacttacccaagataactccaaaagagcactttaggggattgagtttcatgttgtatttgttgaggactttgaagtattcgtctagatcatctatatccccccagcattcttggatttgacgaggatgtcatccacgtatacttccatatttcgtccgatctggcccttgaacattttattgaccaatctttggtatgcagctccgacattcttgagaccaaatggcatgactttttaacaatatagacccatatctattcagaaacttgtatgttcttggtccggtggatgcatcttgatttgattgtaccccga

SEQ ID NO: 360550 - DNA, 476 bp, Cannabis indica
ttttttaaaaaaatattaagagtaatttttaaaaatcatttaagtttatatttttttaataataaagattcatcattttatgaggtgtaaatagaactcccctcggaactgtgagcgttggattgtacctgtgttaaacaagattaaagttaatgttgatggggctttatttgaacaagagggccggtttggagtgggctatgtagctagaaatcatcatggaaccatagtagaagctttcaagaagggaaaggttgggtatgtccaacttgaaattgctaaaatcataggcatcaaagaagcgttgagttggattgtgactcatccttgggacagtgtagtgttggaaacggatagtttggtgtgtccaagcggtccaaagtaaagtctttatgtcctcacagtttggtcttattgttcaagatgttaggaatttacttttagctttatcttttgttgagttatgttttgttaaa

SEQ ID NO: 360551 - DNA, 582 bp, Cannabis indica
ataaaatagattacattgaaatggagttttatttagggcataaaacccaacaatagatacctgccccgaacccgccccgatatgatatatgtatatatttaagtatttaaaatcataactactacaattaaaataacttcatgctttaagctttttattgattatactctttttttttactatacatactattccacttaagtttattgttttactaagtttttatgattattttttttaaattctctttgagacatcattttttttttcaaaaatatatatgtaatgggtacccaataagaatccttcccccatcgggtaatccccgccccgcccccgctttaatttaaacgggtattggggcgggtatgagggtgaatttaagaaacaggtatgggggtgggggaccaattcccgcacccgccccgcccctacatcccttgatacgatacaaatttgggaccaatacctgttattaataactgatgaaacgataactaaacctttttgactattttaaatttggcccctcatcaaattagaaattgtccttatggtacctattggattttgtgccctaaa

SEQ ID NO: 360552 - DNA, 538 bp, Cannabis indica
aattccgatgaaaattgaaaaagatgtgaaggttttaaaatcgggattgaatggtgtcgagctggtgctcatgcacaccaggcgtctcggacaaacacgatccacgcgcgcggacaaaggggttgatgtttgtctgaaggcgtgtcacgcccgtgtcttgagacacgggatcctgcgtgcacgccgagggtcaccctgggcctcccgaggtttccctcacagacaccctgcaactcttcctcatgcgcccgcatccgaccctttttgcggcctctcgaggctgcacatgcagcctacctggcagcacgacatgagtgatttcacccaaaaatccgaatttcatgggattttttctcaaattttggatttttgcaattttcaaaccctaatatctaattaaaatattattttttatcatttaaacctaaatattattttttaaaattaataatatttattttttttagaatattattgttttgatattttgaggtttaaatttaaaaattgattattttaattttttaaattatggtca

SEQ ID NO: 360553 - DNA, 698 bp, Cannabis indica
agttacagagttgtattctgtaactacagaaaaactattttcagtactaatttcattattccgcatttaattaatctcttaattaaataattaaactggaaatattaaaatacggaatttcagacacatagtgatagagtgtcatgcccagacgtagcaagtcaagtactcaattatagtgcggaagatggtggtaaccaacccgaaggagagaaagagatttaggctcagatcttgttattattctgcgacagaaaggaacaagggttaaagatctgagcggaaggagtcatattatttcgctgcaatcaatgtaagattttctaaaatcttatgtgtttaattcatcgtattagagatattcatatttatgatgttaattcaacatacttgttagtaaacctagatcttggtaaaattattcccaacaaatgggaactatggtcttagttttttagtgcatgatagatctagaaatctagtttctactggtgcgtcgagcttcaatggttcagtctctccccatttgatcgagatcattggaataagtgaggtgctaaactatttgaagaggtttcaattctcataagcagtggtggaatcagatagccttgtggtcatacaagctatcagtaactctacagcaattgttaggtttcatgccctaaataaaactctttacaatctgattagttatc

SEQ ID NO: 360554 - DNA, 853 bp, Cannabis indica
tagtaaatacaaaattagtaatcaaaaataaatagttaagtgtcatttttttaaagcagttaagtgcgattattaatatgcatcaccgcaaatattttcatgaaaactaaaatgtctcattactataattaataaaaagcctaaatcatgtagttattttagttgtagttgttataattttaaaacttaaatatatacatatatcatatcggggcaagttcgaggcgggtatctattagggctgtacaaaaaatttttgtaaaccgcccaacccgaataacccgcccaaaccaaaccgacaaaaccgataaaaaatacaaaccgacataactcgacaaaattctaaaccgcccaatcagttaattgggcgggttgaaaattgacccaaaccgcccaattaaaccgcccaacccgatttaacccgatttttactttcttttttattttatatatattatataatatatacatataataatatataatatatattaaaaaaaaatgtccaaaactctaaaaattctttctcagtccgcctctctctctggttaccttcatctcagcccgcctctctcgatcgttaccttcatctccagatttggttttgcatttggatttggacaactttcatagatttatatatatatatatatatatatagtttggatttggtaaacaaaggtcgagttttggatatatggagttggattcagtgacatcacatgcgtgccttttggaaatctttcattgtttacacaaagtatctgcacgaatctactagtttatactttatggacacccaacttcaagtctttgatttcttaattgttgttgtaagttgttcatatatttc

SEQ ID NO: 360555 - DNA, 584 bp, Cannabis indica
tgaaattctttacggtgcagtcagagtttgattttttttttaaaactgtgcagtgcagtttgcggtcttgaattgttaatatacggttcaaaccggaccgcactgcatattataaaaataccaatttttatatttatttaggtccaatatgtgaatgtccaactcaaagcccattaattattgtattgttgaaacttaaaagttttttcatatttattttcaagccttatggtatttttaacaagtgctgctcaagctttgttgtatttgtgatagtttaattatttagcaataatctaaactgcagaaaccgcaaaaaccgcaccgcactattttttgcagtgcggttcttgcggtgttttagttttgtggtgcgggtgcggtttgagaaattagaaataccgcatgtgcgggttggtttaaaaaaaatggtcaaaaaccgcactacctgcaccgcgaacactccgaagtttaatatatcgagtgagaagaaaaaaatagagcaacaataatattggtgcgaaaactgtgaagatttatatgaaagaactttaaaataataataataataattcaaattaaaa

SEQ ID NO: 360556 - DNA, 726 bp, Cannabis indica
ataaaacataaatcaacatgaatcacatccaaatcacacatacatcgttttaaatccatatttattgaaattaaaccaattaccatggctctgaggctagttgttggaatatctattaccaggacctaatttactattaagtatatttttaaaatcctaaatatgaatgtctagaacgatgaaaataaacacataaaaggtatgagaaaccttatattggttgcagcagaattaaatgactccttccgataagatctctaacccttgtatcctttctgtcgcacagtatcaccaagatctgagcccgaaactccttctattgtttggattcttcagagtcttatacactatgattgaggactaacttgctatgggtgggcacacactgaatcactaaaggcatgaatgtcatttgtgaagaacactaaagattttgaaaattagagaagaaaagaagaagaagaagtctcttaaacctagagagaaagaaacctaggtttattgcctttgaagcattagttggataatgagactttcttttctttttataatacttctcttaaggttagggttgatttatttggaataagaaaatgataaaatggagcaaaaaagggacccagtggcaggcaattagtgtgcccaacattagttagatttttgtcatttttctcaactattttctatctttcacaaataccacttttgcactttaaaccctataaa

SEQ ID NO: 360557 - DNA, 570 bp, Cannabis indica
agagaaatttggattttcaaaatcttattgagagcttaattagccaaaaaccgaagggactcccagtcagcttcacattgagtctcgaatggtcgtgctcgacacgtgtcctcatccaacggcaaagccagctcagtataagtctacacgcaacctcgaaggtcccgtacagacttgggggacaaatgttatcccaaatttggcactctaacatggcatcacgagaatggtgacacgtggactcggaacgctatgccgagcaggatgcctcgctggcacatccaaaatggaatattcaacaagccgtgcagaatgatcaacacttagcgaattcagcttaacgcatcatgagtcaccagctcaatccctacaactcagggatcaacttacgtggatgtggcatacacacgatcccactatcggtgtattcagcctcaatcccacgatccttgcattcaacattgatcacacgatctttctatttatgtgcattgtaacgagagaggaaactcttcctcctcaagtttctagccctataaatagtgagaaatgttcactgggcaaaagacc

SEQ ID NO: 360558 - DNA, 532 bp, Cannabis indica
atcagacaatcaaatgaaaataaaaaaaaaaaatgaaaacacacacaaaatagaaaaaaaaaatactaatcacaaatataatcaaaacaacacaccatgcataccaataatttaaaaacaaaatataagtgtaagtttcgaacctagaaacaaaataataaaaaagtaactcaaaataaaaaatttgtaataacatcataaaatagagcaatcccattagagaactctcaaaatatgtaaaccaattttgaacaataatttaaaaaaaaactactaacaaaaataatcaaaaacaacacataacaataatttaagaacataatataaatgtgtgtgaaaaccagttttaaatttaagaaaaaaaaaaatttaaaagaaacttaaaatacaaaaaaatcataaaatgaagcaatcccattagaaaaccctcaaaacatgtgaaacagtttcgacactataaaaaatcatataagtctatgaaaccagtttttgaccctagaaatttttatcttacaccctaaaaacttctaaa

SEQ ID NO: 360559 - DNA, 966 bp, Cannabis indica
gcaaaagccaaggccaagaccaagagagcccttcgctctctcctaatagcggtttcggtgccactttcactgacagcatccatcattttctttttcgggtcgggtcaacgttaccgggccattgcaaagcccttttggttcccaccgttgtggttcatacacctcgcatcgttgggctcgtcatctttaatgggcttttcggcctggttgttttgggccgacggtgggttccatgctcaacccgattcgttgcctctgtacatcgctcaagtttctctgggcctcgtttgggacccacttgtgcttgtgatgggccaaacttggcttggtttggtttttggtttgatacattttgggactctctttgcttgttaccgtacattccgacgtgtcaatccatttgctaaggatcttgctaagccttgtttggcttgggcgttttatctcacacttgtcaattttaaacttatttatctttgagtttttttttattatatatatgattgttattttaggttttttaattttgaagagcattacctcattttcattgagggtatatgaatagaattgaactgtgtatgaaattagaataggaatatatgtatggttatgaaatgaatgattttatttggtggttgaatttttgaaattaattagtgttggaaattggaatgatgttatatgtcttttttatagaaatataatggacaagtgatgtattaaaatggtatttagcatttttgtatttatattttagcatttatattatattttattgttgatttatgaaaggtattatagttttaataattttttaattatatatttattgattatttaaattttacattaacgatggtatattttcataggttcgccgcgaaacataaattaaaaataagttttaaaatataatttacttttgtcgtttataaaaaaataatattattatttaagcatttt

SEQ ID NO: 360560 - DNA, 1036 bp, Cannabis indica
gtgtaagagaatatattaggtttgattttattagttaatgatggtacactattttttttattaattcaaattatataattataaaatggggacaatgaatttgggctaagagattataattatgattttttatttttttaaatatgaggctatatggggacgcacattgtatgtatgcaaaagtgtatacccacacgctatgcgcgtcactaaagccacatgttcacgtggctttagtgacgcgcataacgtgttcgtaaaggttttgctcacacgcgtggcacgtctctataggccattattttttttttaattttgataaaattacaaattttgacactccatagttttagtgacccacattttaggtgataaacattaaatatttagagtcatttggtgtgggtcactaaaaaccactcttaactttttagtgacccacacttttatgcgtgttactatatagtgtcactaaaagcctaatttgtagtagtgactcgataacctcttgggaatagttttctaaagacttcaagagacagttccaggcagcaagagataggcgacccaaagcgttttctcttaccaacataaatcagtaaccgggtgagacacttaatgcctacctaagtcatttcagcacggctgctacaagggttagaaacttcaactatagtatccagcttagtgctcttcaagcagggattacgactgatctctcgactgctggaggcaagctgtgggataacttgcatggtcgccctgtgaaaaacatcagcgagttcaatgagagagctcaggtgtttgttcaaaaagaggaagcaaggaaatagatgaagttgttaaagactggctcgagaaataaatccagcattatctcgacaaaggctgacaatccatgaggctctagtacaaagaggaaagatgactctaaggaatcagccaaagacaagaaaatatagaagaagcacgacaagtacatgccaatgtacactatttataccaagcttaatgaaactcgagaaaatatctatct

SEQ ID NO: 360561 - DNA, 978 bp, Cannabis indica
accatgggtaatgcatggtcaaatccctagatgctgtagggcttttatgtggaatgtcgttattgacttttgactgacgtgactcttcacagtgtagccgtcaatagacttaaatgatcattacttcggaggtgcaaattgggggttatgccgtcagactttattgcgtgtaacagtcctaacacgtttcctcccatggggctttaaatgcgaaatgactgctcaggggaagcctgacgcctcgcggagctgctttgatgttacttaggcttccgggagcatagggggctcagtatgccttctccgggaggcacgtcccggacgctgccttctttcttaaagatagcaaataattcaagtattaagatgttttgatccacgtgtccctgtctggttggtccacgtatatttggcaaaatcaggggcaacaattaggaacacagactctggtgttaaacaacaacattccactgtctgacactgtaaagtctttagcttgaccagccgaaacctcttctctgacttttactaactctggatcaattagctgagcagttttaacttgttctaacagatcagattgcagcgtcaagttatgaagtttgcctacaacaaactcgatgcttgatctgaccatatcttctgctaactgagacttacattggctttcccaggatgataaaggatctcacaatcgtaatccttaaccaactcgaaccaacgcctctgtctcatattcaaatctttctgagtaaagaaatatttgagacttttatggtcagtgtaaatttcacacctctcttcatagagataatgccgccaaatctttaaagcaaacactactgcggaaagttctaagtcatgagtcaggtattgctgttcataatctttcaactgatggaggcataggcaatacctgatcggcctgcatcagaaacgcaccccagaccctgtctggatgcatcacagtaaaactac

SEQ ID NO: 360562 - DNA, 754 bp, Cannabis indica
aatacaattaaatataacaataataattctaattaaccaaaaaaactattaattacaccattatcataattctaataaacctatctgttactaaacaaaatgtttacccaattttttttttacaaacacaatatttacattattactcactaattcaataacaaacattactaaaataaattacattattagtaagtacctaaatattaatctaatatttttttacagacaatatatatttttttttaaaaaagggaaactttattcaaaaagacaagctaatacaaacaaggcacaaggccaacatcacacggcagcagctaaaaacaatagaagcaaccacccacaacctattacattcataaaatacatatttttactacaatatttagaaaaatgaaatataacccagaaatagacagaaccaacaaaaacctaaaacaaatcagatccatggcgagcttcaaacgctgtcaccacgaactgtgatcgctgcacagaaaaataaacactgtcaccacaagagagaacgagagagagacgcacgcaaaaaaaaaaatagaaaaaaacctatctatcttgggtgatctcaaaactttggctgatgggaaacaaaggcggctggcggaggttcgtgcacgaaggagaatgagagagggcgactaagtgagctgaggagtgtgcgattgagagaactgaggaggagaagggtggtcgatggtggtcagagccccaccgtgctgggaagagagaa

SEQ ID NO: 360563 - DNA, 568 bp, Cannabis indica
gggcttggataaaaacccgtagtgggtctggatttgggaccctgcccttgacccgaaccctgacaaggacccgaagccacacccggacctgaacccagccccaaacccaaaagtggacttgaacctgtaccatgtgacacaaaattggaaccaaaactggaagttgaccgagattggaactaggacttggacttggaatcataactaaaattggacctaaatccagaaccgtaacccgaccaagacccagactccaaatcggacctagacgagaataaggagccggatgcggattccaacagaaccctagactcaggaaccgaacccaaacctgaactcagacccaaacatggaaccagactaggaacaaagaaccagggttgggacctagaaccgcaccccagtcttgatcccaaatccaaactcagaaacgggacctgggacctgaactagaacaagaccgaggcccgtgacagttatgcagatcttgacttgggattcaggtgacgaggactagatcagacgaatagtcggtgtcttgatctgggactcagactaggaccagaac

SEQ ID NO: 360564 - DNA, 1251 bp, Cannabis indica
tcagctactccattctgttgtggcgtatttgcacatgtgaattgatagcgtatgcgacattcttgaagatactcagaaaatttatttgaggtatattcgccaccgttgtttgttcggaggcatcgaattttcttctcgacttcttcttacactatttctttaaactctttaaattttgaaaaaattttagatttttcttgcataaagaaaactcatacgtaccttgagaagtcgtcgatgaatgtaaccatgtaccgcataccgctgattgatggttgtttgactcgcccaaacacgtcaaaatggactagctctagtggtgctttagctttgaactttgaatcttcatacggtaattgatgcaccttaccgtattggcagccagcacatacggtctctgtcctgacctcgaattgaggaagacccttcaacatagacttcttcatcatcaccttgagtttatgatagctgacatgccctagccttgcatgccacaaatctgttgtttcattctttcgagtcttgtctacataagcagattctgcgcacattacatagacagactctaagcgtcgtcctctcatcatcggtgttccagagatttcaagatcttggtagatcttgacatcttgagggcagaacaggacatggtggcttgtcgccataagttgcaccactgatagtaaatttttcttcatcccaagtacattgtagacatcctggagtgataattaattataattattaaataaataattttggcatttataggattggattggaaaatatggtattattgaaagaataataagtggttgaaataaagtggaaaaattctaactagaaactggtccattatagtgtacggccatgaagtgtactttgcccaatattttattctattttaatccttataatttagtgtaaaccctagttgaaacactataagaggagcatgatgctctcactcatccacttgatgccttcaaccaaatcaaacctagttttctatgtcagacaactagtagatgagagagttccttagtgattttacctccttcattgttcttcaccattcgaacccatagtgaaagagtgtcatgcccacacatagcaagtcaagtactcaatcatagtcagtaagacggtggtaaccaaactcgaaggaggaaagagattcaggttcaaatcatgataatgctctgcgacagaaatgaataaagggctagagatcttgaacggaaggagtca

SEQ ID NO: 360565 - DNA, 901 bp, Cannabis indica
atttaatttatcatataagatatgttgcccttgattttgcccaaaatatgtggacctggataaggatgacacgtggagctgagaggaccagctcttaaagaaattaagtaagtcttagacaacagaggggtgtctctgggaaggtgtctcgtggaggggacatgagaaggatcttcatgctcccggaggccaaggacatactaaggcagttccgggaggtacatgactattgaacaatcacctcgcatttaatgctgcacgggggaagacgtattgaaactaccataaacgagatgacagtttgtgtaaccccctttttcatctattacgctatgattaataaggctagtgacgactattttatgaggaatcacatcagtcaagaggggataaaagattatatccacctaacccctaagataactatggtataggccatgtatttcctattctgtatctgcttcgaatatctgcccctattaagcctgaacagaaagacaagtgattcactcctagggatcccccgagaaaaacactataaataccccacaaacatactaagaaaggggtcgaggaattctgggtgaaaaaggaatcaaagagagaaaataggagtgacgttcaccaagaacattctctataataaatactctgactaataaaaaagactcgtggactaaggctcgttaatgccccaaccacgtaacaattccattcattaaacttcctacagctttcttatatattatttaattggttgtctaaaacctcagtcaacattttggtgctttaattgagagctaaaggaagcgtcttcaaaccaacaatcttataaattgaagcaacaatggtggaaactcgcaacacacgtcagccccgtcgtcctcaagatgctcaaaat

SEQ ID NO: 360566 - DNA, 563 bp, Cannabis indica
cctcaggaaccaaccggttcatatagtgggcaagcatctccttgcctttcttggcctctagaagcaccagcaaaggtggactaggggtctgcatctgctcgggtccactcttgatcaactcagacccacctttcggtttttcaggcccgtccgaactccctctttgagagtccttaaacttagaaacttttggagtagaggggtttccaaccattagatcctcagaaagatcaataacctccccagcaggcgtcttttccttagaagaggtcccctcaccgcctctacacttcttggccggacgagatgcgctagagcttctgccaattctcttcttcagagcatcaagaatcttatgagacatgtctgcacagaacaaaaacaacatggttagagaaaacagacatcaaaaacataaagcataatcgttaagaagcttaaaaacaagatggagtaatatgcaaggtgattgcccgagcaagcctcgaaagtccatcatcatctgacattgctcttacttgagacataacaactttcccttttctgagcacgggagaaggcgg

SEQ ID NO: 360567 - DNA, 652 bp, Cannabis indica
tgctcattgaactcactggtgcatgagttgaatggaaatctgggcagtctgtgcattactcatctcacatatgcccatgcatcactcatgaggtttgctcttagcaattagcttcccaactccaacaaaatcatggtgtctcaaaatgtggcctcttttctctttcgtatcacctcgggggcatccatcaatctggcttcttatatcttgggccagattgtttctcttaggagaggtaaaaagcgtactcataagcttgtttttcctaatttaatctttaagattctttcctctcaggaggatgtggcctattctcatgagacacttgagcctcccctcactggcaccatattttaaccctcggagtactttgatggagcttttcccaagcgtcctaaagttggtgctattgtagctgttgcaagttcgagttctgctcctgcagatgtccatgaggtcaagcatgaggttcaacaggtgaacaatcgtcttgctgccatggaggaggttcagcaagagatgtccaagcagctgtcctcattgatcaagctctatggggcataagtttctctttcattttcatttttttttgttattggacatattctcatgtttttgtctttggcccgtagataaacaaaaagggggagta

SEQ ID NO: 360568 - DNA, 746 bp, Cannabis indica
gaaaaaaattcctaaaagtaattaataataaataataaaattaaatctaaattccattataagttataaaaatatagcaaaagacataatctaagaaagaataaaatatagaattaatataggaaatgtagggaatgtaaatgaaaaaaaaaacgaagaaaaaaaaaagagatattacaaagaatatgggaaaaaaattctacatagaatgtcactttaacaattgaaactaatatggccttacaatctctcacaaatatttttttcctccaatgaatgcattaggtacggttcttcggtggtccactcggttagagctagctccttgaatcacttttctatcacctataaatttatgataaaatttctcattaaactgtgcactaaccaaccatcatgtaaaacacattatattctaagatagatgagcaaagaattacaagagtataatagttaaatgcttcatcatacacataagttagtacccaaaaattacatcaatttgtaagtttttactccaaattaaccaaaacaataagagagcataatcaaaaaatgacatacctattttcttcatccaattcaaggactttgtaagaagctccctacttgacacttgcttaacctcttattatatttgatgaattggattgtgttaaacaccatttgaagtactttcttgctcattttcgttggtgcccacaaccaggcccattggttagatcaaatatatgaatttattacta

SEQ ID NO: 360569 - DNA, 1030 bp, Cannabis indica
aaaaaagatcatatctgaaattgagaatgtgtgcaggaacttcttgtggagcaaggtaaaagtgaagggtcgggcagtgttgcttggaggtgtttgtgtaagcctaaggcagcatgtggtttaggttttatgagcacttcagattagaatggggcagcccttttcaaacatgtttggtctattgcaaataaaaaagataacctttggataaggtggatccatagtgtttacatcaagaaggaggagtggtgggagcataaagctcccccgaatagcagctggtattggcgcaaaataactgaggcaagagataaagtgaagcagctgatgaacatcaacactttcacctcaaaccagtactcaatagcagaaggctataagctgattcaaggaaattttgagcactatttctgctgcaagggcagctggagtaggcttaatgtgcccaagcatagcttcattgtctggttaacaatgcaaaaccgattgaaaaccaaagatagacttgctaaatttggaataacagatgatgaaaactgctccttatgcagttcgaataaaagagacagtaaaccacctcttttttgcctgcagattttctcaagaagtgctacagcaggtgaaactttggcttgattggagggttgcttcgagtagtctacaggccctagttcgaagagttgatagagggaagtattccaagtttaggaagcaagtgtattatgatgcaattacagcctcggtatactctctttggcaaaacagaaatgctcaaatctggaattcacacatgcacactgtcggttccttgatccagtagattaatggatattgaagcacagaatagcgagtgtaatgccgaaaaaagtagttgagaaagatagagtttggtttcgcaatctttaagaatcatttgtcatatcacacataattgtatagattatacaaaaggccttgattaaggtgttgttagtttttaaatgttgtaattggttgtttgtgcaatgaaatttctgattcatcaaaaaaa

SEQ ID NO: 360570 - DNA, 660 bp, Cannabis indica
gataaaatattgcatagtgatactgataattgatatcctcaatatatgttttattttgttttgtatgatacagtgcaatgaatgagtgagtgccagatgcaaagtgggatcatggttgcttgttagatttggactccaatttgtatattgttttaatgcttgtgttgttttggaataatattttttaaaacttataagttatatttgatttgtgttgtattatgttgtgttttagagtttggacttttaactaaacattataatttgtatggttggacttgtaaaatgtagaatgatgtgttagagtttctttaatgtgcttataaaataagttttattaaattttacacaaaaacaattggtttggtcggttaaaaccgaccaaactgcggttcagattggtcggttttaaggatgtttctggattggtcggtcggttttcagattgaaccaatccaaactgaaaaccaaaattcggatttttatttgtaaaaaaatcgaccaaaccgaccgatgctcagccctaggcaaaagtagttcaaaggtggttctgttgggttttgtacccttaataaaatccattaatatctaatctgattagttatcaatttaagagatttgaagtgatttatatttggtggaaattattttaccaggatc

SEQ ID NO: 360571 - DNA, 682 bp, Cannabis indica
tggctcacacttaaagttgatgaaatttcttgtcttcagaaaattgagcctcctacctatagccgaacctataccctctcttttcttcttcaaatttttataccttgagtgatagagtgagtgcccacacacatcaagtggtatctcaatcatagtgtgtaaaactgtgaagaatccaatcaacaagaaggagaatcgggcttaagaaggagagaaagagatccatgttcagatcttgataatgctctgctacagaaaggaatcaagggctagagatctgaatggaaggagtcattatattccacttcaatcaatgtaaggtttcttaaacccttatgtgtttatttcattgttttagaaaatcatattaggatgttattgaaacatacttgttagtaaatctagatcctggtaaaatattcctaacagaaaccgtccagctggagaggcaagtatggtggaagggctagaattggagatgaagttatggcatcacagacttggatatatcagtgaataaggcctcgaagaactgcacaaataagatataattgaaaatttaaattcttgtgccttatcattttatgaagcatgtgttttacggaaacaacataagctaaaattcactatggtaaggcacacgactaaaaagatactcaaatatatgcatgttgatctttgg

SEQ ID NO: 360572 - DNA, 523 bp, Cannabis indica
tcttatttaaggcatcaaagatatataataaaatgcactcttaccttgaagtaatggccataaattcttatgttcacttgtgctcttcccattcatttaatgttcacatcaaagaaagacaaagtgtgcaagagtttgatgaacactactcttacattctctcaataaactagccacacccacttcagctctctctattttcaccaatcaagagcgcatcccttttatgaggaattataggccattcgggcctacatgcccaatttggagaaaattagttgtcttggcccaataagctaaccaaagatgttttatagtgtgtctatgggccccgagcatgttagtatgttatgtccattccattatggcccgatggtaataccatgcattaccgattatatatagttatcattatttgctaatactgacattgagtgagcgacacttaattatgtcagtctacataaaatgtaatcaaacttgtctcgtgtatagaaacacaggttcatcaaactgtctcgat

SEQ ID NO: 360573 - DNA, 591 bp, Cannabis indica
ctgagtccaagagatcgaggggcaggaagatatacgtcctggcggtccctccgaggcaaaggaagaggcagaggttgaacccccaaattacagggagtacaacgaggctggggagtcaggcgatgctgatggagacatcctagttgagggcatggactacgtcagtgaggagcttgctgcggcagttcctcctagaaggcagggtgccttgggcgccaggtgggtaagcccttcgtccaagattacaaaggcacgccttcgaactcttgaccacggtggaaatctgggcgagctggactgctacagtcccgcccacaacaatcgtgccacaaaccctaaaaaggggatgtgcgcctggttgggtgcccatggtcagcaaggagcgttgagcctttgcatcaatacttcaaaagtggcggacttctttagcctctgctcggcacaattcactcctacgggcatcaagtatctgtctgccctcttcgtcctatatgcctcccagaaatgaggtatgccctctcccaatgaggttgcttggttcgttgatttgaagtccacccccaagcaaggcaggtcggggtacttctactt

SEQ ID NO: 360574 - DNA, 559 bp, Cannabis indica
gataactaatcagattgtaaagagttttatttagggcataaaccaaccacttttttggttagagatgtgtagatcatatcagcaatgtcgtgaaacaaaatctcagaagagttagtaaaaatataatgataaaattgcgtacctttctagactctcctaatgctccggcagtagaataatgcatgtgagacagactcttccgacattccacaacggtcacagcccgaggaagtaatgattttcctatgagctagatttttggcagtggggagggttgaatttgtagctcggaaggcaaagtgtttcaccttggcagggaggaaaaggtgccacaggtttttccaccaaggcgagggggaggaggaagaggggatatctggggggtgtggaagagaggctgagatggtaacccgattttgcagaatagaccccagattgggaatgttcccaaatgtgctcatcggggcaggggttgaggggaagggggatggagaggattttctcaaccacatgaggtggaaagcatctttgcaagctatttaatgttgggttttatgcc

SEQ ID NO: 360575 - DNA, 549 bp, Cannabis indica
aaatgggaggggtatttgtgggatattagtaatgtagttatatatgaccaattttaataattatgtatttaggaaaaaaaaattaaggtattgtaagcatggaattttaaatttcccatattttttaagtattttttttgtttaatatagcataaaataagattcaataaattaatacactattgctcaaaaaaaattaatatactaggtcaacaatgtattttttttttagaaaaagaggtaaatgatagatttttttttattattatagtaactcaattttttttttcaatttgccatactttttacaatcgaatatatatagataaatgtttgaactaatatttatcttatatatacctatttttactatatatcaaattataataaaaaaatagtaatattaggatgagtaaatcacatgatatgtgtctattctactagtatatatatatgggtgcacttttaatgggtattacccatgaatgggtaaaattaaaaaaaaaatagtttttatgtataatttttctatttaattaaaaaaaatct

SEQ ID NO: 360576 - DNA, 498 bp, Cannabis indica
atattttgtaaatgactagcttttgaagtattttgtaatcgagatcccaaaatattttgtatgtaatattataagttttaattaaatagcaaaattttaattaatcacgattttcattaacatcgttgattaggaacgagctggacagtatgtttaaatcacgttaacacgcctatgctagttagggtgttacatagagtcacagatgttggagcagcatcccaagttgttcaggtaaattttaaggatgaaatttctataaagaaagaatagttgtaataaactataaatctaattttaataattaggaaagattttataaaatatgaaataataagtgttatgggtataatgggtaggattatgatcttactactgatgaataagaataatttataaattataaagattttattggaatatgtagatataatatatgctattagtgaaataaaatatttttaggtccgacaactgtggagacctgattggtggcca

SEQ ID NO: 360577 - DNA, 746 bp, Cannabis indica
tgtgattatttcgttttcgcgcagaagctttagaacgaaagaacttactattttgatcaccagctttaagccataactgtttagatctttgtcgccaaaaaacctccctttggttaagaacagcaaaaagctcctttttagcctcatagaataatctcttcccgtcctcatcacgtcgcttcttatattgcttcaacaaccaattgcattgcttgatgcgagaagaaaacttgccaaacacatcttttccccattgctgaagagcagtaccacattcctgtattttctgaccaatatcttgccccgctaatgaagaccaattacgcctaaccacatcttcacagtcaggatgactaacccagaaattttcaaacttgaaagatctcgcctgaacaatagtctcacgaaaaagaacatccagtagaaggggactatgatccggaggagaaatctcaagattaaacaatttagatgaagagaaattatgtaaccaagaattactcaccatagctttgtccaatcgggcttctatccaatgagcagtgtctctactcttctcccacgtaaaaggatggccacacagatccaaatcaatcagcccacattactgaaccacctcctgaaatccgtcaataagccacgacgggtaaggcaatccaccgaacttctcaccctgacaaagcacattgttgaaatctcccattaaacaccaaggagcagcagactgttgggttttgtgccttaaa

SEQ ID NO: 360578 - DNA, 726 bp, Cannabis indica
ttcaaaatcttaatgtcgacctccaaagcgctaattttagtgagagcagccgtcttcgcagcaacagccgcttcataattcttcttgtagcgagaatagcccttggccaaactctccctctccctatcagtttgtggggcgaacttcatagcatgggcacatctcaaagccgtctagcaaaaatagaagtacgtatgagtaatagtaagtaaagcataaactaaaacggatcgaggcacatgcaaagagtaaaatacctttattcccgagatggcagtatcctttaaaatagaatcacgcccgtgggagatgtagaagtcatcatcaggttttctgacggcgtccaggagagttttgaaataattctcagccgattcttcgaacggaacatccttcttgatccggaaggcaggaatctcgtcccattcagccgacacccgcgggggtgactgggtagaggcggggagcctcggccggaagaaaaggatgtagggtgagttaaagcaggagaaagggcaagctgggaagtcgacggcacgccgaggagagaggcagaggtccgagcaggagaagaggatggaagccccgaattaagacccggcgtagccgtcgggagggtctcaggctgagagaaaccttcccgatcaggaggccctagattggaggctcccgttggggccaacccccggaattgccttcaccttcgcccacgcccgacgagacctc

SEQ ID NO: 360579 - DNA, 616 bp, Cannabis indica
ggtatttctaactttgttataaactcatgagttttagagaattattattcccttgggttattaattctagatctactaacaatgtttatttccttcttattttagctccagctgcttaaacttggcttgctatcctagcgagttgagtcagatgtttggacagaagggtggagattgtccaagttgaaaatgaagcttgtcttttattttattttctaattaattgttttggctaatgaaaaatttagtttcaattattagtatggaattttattccctatttcatattattacagacaattcattatgacttttttttagaatatcaatcaaattttatttttatgaaatttttattatgaattgcttttatgaaatttagctttatatttactttaactttattacaataacgtattatattgatatgtttatcatgttttatgtgtttcctggtttattaatcatccaaaatctatggtatttttaatctttaaaaagagataataccacataaacacttcaaatttacattcaatgtttatgaataattatcatttcttaagcaattattaagattttgtttaataaaaagatcttttgatcttataggggt

SEQ ID NO: 360580 - DNA, 478 bp, Cannabis indica
gatttaatagaacttatattttaaacgtataattatgtataaaacatttgaacaaatcatatggcaaggtcaagatatgaattctgatctttactgaaagtacataagatcacaataaaattaatttttatttagggcataaaatcccaatacttttgtcaacaaacatttatctttaattattgaaagaaaaaagttaactattgattttgttgtggaataggtgtgagacttaagaatttaataaggtaaactcctctttatttctataattttgttactgaattttggatcaaattgaaaagaaactgatggaaaaatagaatttcattatttctaaaatgtttttgttgataatagttctcaaaggaagattttattattgttaccttctattttaatgaaaatactcttttaattagtaatttttggatttggaatcaaactattttgacctaatttttgttgggttttatgc

SEQ ID NO: 360581 - DNA, 878 bp, Cannabis indica
ctataaatggttgttcttatactgtattgtttgattcgggagctacccactcttatgtgtcaagtagagtaattgaaaatttcgataaaccatgtgatatttatgcttcggggtttggtacccttttaccttcgggagaccttatagtatccactaggtggattcggtccttgtccttctggattgacggttgtgaattaaccgccaatctaatagaattgcaactgtctgattttgatataatcctgggaatggattttctgtctaagtatggggcaacgattgactgcaagcggaagatggtggtgtttgagcctgatagtgccaacccaacagtgtttgtgggtaaagttcagggggcacgcataccaagaataacacttttgaaagctaaggacctgatgagcagaggttgtctgggattcatagttactgcagtggataccagccaacctgtgacatctggacctgagagtacaagattggtatgcgagtttcttgacgtctttccagaagatctaccgggattgccacctacccgggagattgaatttgtaattgagttggttccgggagcggaaccagtatcaaaggcaccgtatcgaatggctccagcagaattaaaagaatgaagatacaactacaagaattactgaatctgggattcattaggccgagttactctccttggggtgctccggtattatttgtgaagaagaaagacgggtctctgcgaatgtgtattgattaccgagagttgaataagcttaccatcaagaacaaatatcctttacctcgaattgatgatctttttgatcaactgaaagggaagatggtcttctccaagatcgatcttcgctcaggctatcatcagctga

SEQ ID NO: 360582 - DNA, 606 bp, Cannabis indica
ccaaataaatggcgaataccaagtcccgtcccgttccggataatatttaagatatttacgaaaatgccactgcatacaaactaagcatcagcatgcaccacaacatgcgtcaccatttgaccaccacttggccaacttgtgggcatcacttagcttgtaacgtgccatcttagcatgcacgttacactctcccccccttcaacatgtcgatgccctcatcgacggaccgtaggcaaatcttcctgatctcgactgctaagcttactccaagcttctcctaaatcctaagtctgtacttgtccctctaccttcgtagaaccaccatctttgtgacgatcttgctcgcccactcttggacttgatcaaagaccttgtgccactgtcgctattcagaaccacccatggagtagtgcctccgcgctagaatacttcccccaacatgaactcctccgagtccatcacaacgtccttccagtcaaccaagtagccctttcaacactgaccctaaagctaccacatcctctgattgtagctcactcaccaatcgtccaattcatactccttttcacaaggactaaatatggtgcacccctcggggtgaggttc

SEQ ID NO: 360583 - DNA, 506 bp, Cannabis indica
tacctaatactatattatactatactatgtccttgtttaacatattttttttcgataattgtataattatattgataaaaataaagtatatgactataacatacaagttttaacgggggttttaacggctacgtgtctatggcacatcattcacaatactatataataagaaaggaaaataacttgtttatgtcgttttctactcttttttatcttttatgatttttttttacaaattatcttctgttattggcatcttaaggtgctcaatgacataatgatgtggtacacaataattggctagcaatttatttaacctttggccaatttttttttaatatttttataaatgatctttatactatatttttttataattgattttttgcattattattgctatatagtaccttaaggtactcaataccatactaatatgatacataatatctgtttagcagttttttaaaccttttattaaattaaaatttgtgggaactgatatt

SEQ ID NO: 360584 - DNA, 537 bp, Cannabis indica
actctcagttagaagaggagcatgagcaacatctccggatggttctgcagtgactttgggaacataagttgtatgccaaattcaagaagtgaaaattttggctatctcaggtgtcttttcttggaccattgttagtaagatgggatcaaagtggatccgggaaagatagaatccgtcagggattggccaagaccgaaaatagtgacagaagttagaagtttctttggtctggctggctactatcgtcggttcgttgaaaggtgttctgaaatttcaacacccttaatcgaactcaccaaaaagaatcagcgttttgtatggacggatgagtgtgaatcaagttttcaggagctgaagcagaggttaattacagctccagtgttagctgtgccttctaacaaagacaagtttgtagtttattgtgatgcatccagacatggtcatgggtgtcttctgatgtaggtcgatcgggttattgcctatgcccctcatcagttgaaagattatgaacagtgatacccaactcatgacctagaa

SEQ ID NO: 360585 - DNA, 610 bp, Cannabis indica
gaagccttatacgttaaaatttattttgtccatattcgccacgtggcaaccactgctgcgttctgacgctacagtttgtgagcgtcaggcaagtctgaatgctttgtccctcactcgcgtgtgagtctcactcgcccacatagccacatgtgtgccacacatctccttgcgcatctgggggagtttttcaagtgtatttttgtaaataagaaactttaaaaatagtatatttgaaattaataaacaatataaatgtttatttttgcttattatagtataaatgtttatttaaggtaattttaacccaaaatagaaaaaatccctttatttattgaacttgctcttactggccctaaatatgtaattgtttttagaaattgagttttttttttagttttaacaaaaaataataataataaaaatattgtacaaatacctcttacacacaccttcaacttaagacctgtacttcctgagcaaccttcggacattcgcagcaacccaacgcaaccgaaacgaaaatccaacaagaaagagaaccataattattaattctagcgacttcacctgagaagacaaccagaattaatcaaaacagaggctgttttaa

SEQ ID NO: 360586 - DNA, 522 bp, Cannabis indica
aaggatcacaattgataatatgtaatttaagtgagttattacatatggaagttatggaatcaatggtataaatttctagttgttagaaactattacaatactcaattatatcatttaaataggtattgagacattgagaaaagatttgactcggagaggagttacaaaaactaaatattgagttttctggaaacagttgtttttatagttatttttcgaacttctggaaccaattttttgaaaacgtccataaatgtacatgaattgattgagcatgtttccaattctcttatccaacatttttagtccattaaacactaattaaagtattggtaacaaccatgtcgtgaaaagactttgatttttatatgtgatcctcaaaatactataagtagaggtcttgagtttattttgtaagacaacaagtttctatcaagagagcacgttgctggaaattctttaggcttgataaatccagaaagttatttcttattttctttttctctaagtgcttgtggtagg

SEQ ID NO: 360587 - DNA, 662 bp, Cannabis indica
tttattgtgtttacgttttttagtttaattgttgtaattcaatgtgtaaacggattgacaatgaatgcaatctttgtataactaattggacacttgctttgtatataaatgggtgatctgcaatgaaatgagacctaggaaaactcttgctacagtggactaagcagaccgtgatctgactaaaccactataatcctctgtcttcctgttgttttccagttttctgttaagcattcacgttctcagttcgagtactcaccattataggttgaatactcgcaattgttcttcaagcaatttcttcttatcaataatattattacatacttttggtgttgcgaattttgctcaacaacaagaacattacaagaaatagaaataggaagtatttcttgttctaagtaatagaggttgtcttgtcttttagctatcccaattgctgaacgtttgacatgtgaaacatttacattagggaaaaaggataaaagactaataacatcaaccattaaatctaaaaaagatgaatttggattgaagggagctttcaatgcatttgccaccatgagtgcatatgtctcgatttgcataattggtatttgttgttgaatagcccaattgagactgtggaagagtgctttggcttccatttcatgggatttgaa

SEQ ID NO: 360588 - DNA, 1087 bp, Cannabis indica
agacctaaacacattgaagttgacatcgatttcattgtgacaaagcttgaacaagagttggacataagatatataccttcatctgaccaagttgcagatttgctaacaaaaatattgtcaagttcaaggttctatttcttaatagacaaacttggattgatgaactcactcctgcatttgagatgggatgtgaagaaatgaaccttatttctctcgatggtattaatgtggtcttacatcggatatgtggctcactcttagtaggcagcagtaggtagatatactgtaataattataatgatgaggcaatcatgggctttatgggagatttcccttttctattagtgttgttttacagctataattgagcatttggctcctctattgtatttagtcttttgaccttgcctataaatagaatttactaaggctctcatcaattgagctgtaatttttttaccatcaatttgcttttattttctctatacaattaaaaataaactataaaataattaaaaagttatttattatttaattggcgaggtataattttgtaaatataaaaaaattcaaaatgtaaaaatgaaattttttctatattaacatatgtttgttatttttttttttttcaaatttttagtctaataactttttcttcattgtatgtgctgcaaataaaaagtgaaaaatttattatacacgtatataaatctattctatataaaatgtagctatataacagaattattggtttatgagaaattattgggttactttttttaaataaaaaaaataacaaattattagatgttgccaagtagggtcagcatgcatgtatttagtttaaacctaaatataattaatccacctaattagtttcttttttttattaaaaattattttcaaattttgatatttagaattagttaaattttaaatattattttaaattaaatttgaatgttttgatagtttaacctgataagcatttttgttaattccaaagataaatttaggacgaataataattttttttaattactattaaaaataataatagtatttttgtttttatttaaatcactat

SEQ ID NO: 360589 - DNA, 1222 bp, Cannabis indica
actttcaatctttctcttcatttgcatcccctttagaccaaaactattactccaaagtccattcttatcgtataaactttatcactgaagctataatccttcattccaaattctttctctatctcatcaaatacaaagttcttgtggtctccaagaccattgagcctcttagctaaaattaacatcatcctctcgatcatttttttcttttctcttagccaagatataccaagctatcatcacctccactaccaccattataattatcttttcaacattgccctataccaccatacatcatcatcaagatttgggtcatcacaaagtgatttggtttgcacgtggctgaaatataagaaaggatttcaagatttggagcactaatatatttctcatagggtttatattcctttttcgggagctaaggtataataattgtgtgttaatagttgaaaaaggtctatatttaacctatatctattatcatagaacactctaaatattttacatgaaaattaggatttcgtgggtcaagcatacattaattctcagagtcactcctgcaatcaagctagattctccacattcgaggtaaggaaattaagtagaaaaacataagttttctgtatgtaataacattcataggaagagtgggaatagtaaaagagaagttaactaaggtcttctgcctgactctttattgtttgttatttaatgtactgtataatatatatttaaataatatgtttataagattcatgttatttatgtatgtttacagtattagagcatggccattgctaaaggtatatatttaaataatatgtttataagattcatgttatttaagtatgtatgtaaatagtgtgtttataagattcacattatttaaactagttatgttgtttggataatggacggtacaatggattcgcattatttaaacaatgatatgattatggtatgattatgatatgattatgatatagttatgatatgattattatatagttatgatatgattatgatatgattatgatatgattatgatatgattatgatattgttatgatatgattattatatagttatgaaataattatgatatggttatggtatgattataatatgattatgatatgattaggatataattgtgatacactatttaaatcatatatagtagttaaacattatttaaattagatttattgtagattat

SEQ ID NO: 360590 - DNA, 545 bp, Cannabis indica
aacttaaatattttgtatataaacatatttttgatattgtaaaaagagatatttttttatatattttttaatttagtagctaaattaagcatagaaattcaaatttctcttttattatttgtcattggataatctaatagcttaataattttaaaattaatatttatagttaaatttgtttagtaattgttaacgtcgattttcgttaaccaacaaatgagcctaaactttataaatataatcttagaaggataatagtcaataacaataataaataataaacaaaaaggtttatacatggttttaaatttaattcttcaccgcctacgagtccatcttattatcaggatttgatgagtttatagagtacaaatgatataatattttgtatattctctcagctttcagagattgaccgtcccctgatttgggaattcttccccgattttgtatattctctcagcttttagagattgaccgaaatattaaagtcaagttagaatgtatttttaagtttgatttaaagtttgtttaagcttgatttg

SEQ ID NO: 360591 - DNA, 581 bp, Cannabis indica
tcaggggcaacatttaccccccaagccttgtttatttgaaaaatgaaacaaggcttgttcaagtgcctccggttgactcctcggtttcctggcacgagctttgagcgcgtgagggtgtatttaatgatggcttttaatgcagtgattcactttttgcaggggtcgattcgtttcgcgcccattgattgatacggcgcattaatggtgtcagacggatactcaagcgtttccaccgcctttattgtaaatcaatctggtccgttgatctttgagcatttgaatcgtgcgcttcccccaccgttcgatcggtaggtgatgacgcctgttcctcatgcatttttgcctataaaagccaccaccttttcttcatttcagttacttcccatttcttgccaactttgctcaaatttcctagatcaagtcctttaaacactttgcaattttcccagttcttcctcgctcgttgctacaagtccttcttgtctttactcgactcacagcaggacccccagtttcaacacttcatcgtaagttttttgcatcctttgctttattgttgaatggcatgctattacttatct

SEQ ID NO: 360592 - DNA, 1124 bp, Cannabis indica
aaattaaaatataaaggggtttcgctgcaaatttttcaaatttaattgtatgatttggattttgtaagtatatgagttgctcatatataaaataaattataatataaaaattaatatttttataatatataatatgtagcagtttaaaccacaattattaaatttaaaacaacaaaccgaactgtattgcataattttagcaaaaacacaaactgtaattgcactgtaacaaactttaaactataatttttatacgatgtgatgtggtgtaggtagtttgtgcggcgtcaactaaacaccctaccacaaagtttgctaaccacaaacttgaaatccttcatcaaattattgcgatgcaccacttggcctatatttttataaggaaaaaatcttgttcgttcaattaagacatctacaattgtttctttcccccttttctttcttattttgaataggtaattcttattaggttcattagcaacaccattagtggccacgcacgccaatgttttttttggtttggtcagtatctccattctctctccctcgttctctctaaaaggaagcatgtatcacatggtaatatggggaaaaccaaatttcggtgaccatagaattcttaagaaactaatggtttgtttatattatataggaataatgacaattttttttatcgaaatcaggaataatgacatttgtaagtgcaaatttaaaaattgctttttattttcacttaataattccgccatttatatttatagagcttatttaaaagttactatatcaaattgatgtgttagtatatggtgttaattatcaatattaatacaaatactagaataattaaactctattttaaaaagttgaatgttaagaaaagtaataattatactaaaaaaatattatataataattaatgaaaaattataacaaatgatcctaaattatagtactatataagcaaatgttcttatttcaaaacttgtagagaaatgactctttttatattatttattgtttatattatcttttgccacataaaacgaattaataatttttttagaattagaagcaaattaataatttatattatcttttgccacataaattttttaatttttttt

SEQ ID NO: 360593 - DNA, 587 bp, Cannabis indica
aaaaaaaagcatacaaaaatcattcaaggcatttgagtagaacttacaatcttggatattatttccctgaaccaaggcatttgtaataaggacgactcacattagggccttttgttgttatattctttattagatatcctttcctgcatggacaaataagctccatgatactagacaactgttgtaatgttgagtattcagtgttacaaaaaatactaatattttagataacaagagcacgagaacaattagtaattaactgaaccacaactaccatcagatgaattggaagccattagataaagttttatttcagcttcaatccaaaatagcagctcaattaaaggaaagcaaaagaaaataccaatattatagataacaataatacgacaattactcaaagcaaccacaaactagtacaacaaaacagctaaaaacaaacaaagtatcacctaaactagccccatgatcctatgtttaacattcttccgcttgttttcatgctatgaatgcggttcgtcaagtttcaagttctcatcgtgagcatttatttatatttaagttaggatttttgagtcgtagcctct

SEQ ID NO: 360594 - DNA, 751 bp, Cannabis indica
cctttgcatgcttacactttgaatgtaacttcgttgtagaaagaacactttagggaaccctagggtttgaaacttctgcgactcttcttttccatatccttgtgttagctttcagccgtaaggcttattttagaactgcattgcgtctgttttccattttgcttattccaagcttcatgaacttttttgccctaactcaagaaaaactttctgacttcttgagtttagacttttctttgaacatggtcgttctttaatctgttgggtactcctggtcggcatatttgcttgtttttcgtttgatactccgtccaacactcatcttgcgtgttgtcttttgtagatgaacccaggtgagtcttgggagcccgagcatcaaatcgaccaggagctgcttcaacttctgcacgaagtccaccctcgtcttcgtgccaactctccttctagagaaggagattcttctgatcccgtacccagccataggatgatggctcgtacgaagaaaactacgcgtctggctgacgcttctgatccccaggtggctcggctcgccactctgcccgacgccgaacaggatttggcggtcccaatggaggaggaccgtgagggggacgccgaagtccaggaggttgaggagctggacgaggcgcgtccgggcagtcctcccgttgctgagggagaggaagagatcgaaccccctaactatggggagtacaatgaggctgtgcaaccagttgatgctgacagggac

SEQ ID NO: 360595 - DNA, 838 bp, Cannabis indica
ggctatcaggacttccacgaccaccgggtaattgtgacgaaaatctaactttgacagcgtcttcattgttgaaagttatggtaggccctcctgctcgtggaactttgggcttcctttcttccacgaccaggataacttcttcttatttgtgctgcgttgttcaggcatacctctcccgagctttgccgaatctttagcaatatgcgggcctccaatgatgacttgcagatgtccatctaccggtggagctagtaacttttggttattgtcgttcctctgaccctgatgggtcttgacatacttctgcaagtgtgggttgtttttccttattaggaattcaatttcccgctttaggttgttgcattccttagtgtcatggccatagtatctgtggaatcgacaaaactttgtcatgtctctcttgctgacatctttcttcatgggctcggacttcgtatatggggccagcgactgagttgccatgtaaacactttctacgtcttcagtgaagatagtgaatgcagtgtactctgcttgattctcccggggagtttgttcggatttgccggcgaactttcccttcttcccattcccttgcctgtggttgttgttggaacgtttaccacttgagtttgaattatttgggtaatgggggagttgggcacacgttccagtagaagcagcttttgacttgccaggcttttgctcaccttccgctcgttgaatggcttcttcgagcttgatgaagccttcgacacggtcaagaaaatcactcattgagtctaccggcccattctttcttatatccttccaaagttcaccgaggacttcaatgccc

SEQ ID NO: 360596 - DNA, 654 bp, Cannabis indica
tacaaaatatagtttcgggcataaaggatagaggcacagagtcgaacctctgatgggaaaaagcccacttggccacattatgggccataaaattacatcgtctactaacaaattcaaacatacatccaataaagaaaggggaggtgattttacaaaaagagacgtagttatcaagcctccaccgggaatcctttccattaagagcattaatcaccaccctcgaatcactctccagaataagaaacttgacaccacgaactttagcttcctgaagggccagacagcacgccattgcttccccacagagaccattagaaaattccagcttagaagtaaccacccaaatcaccttgccaacgtgatcccttgcaaccacagccgcacacatgctatccaaccccactctgatgtcgcaattcagcttcaaccaatcttccggggggcgccaaacttccgtcggacacagtatggggtaagggagcaagtaagcatgatgatctgcaaaagaaaactgaatagtgtcaatacatttaacaatatctgctggacaattattatgtaccttatcattccgagtctgccatattgtgtcaatgatcagcgatgcatagagaaaaagcttcctgttcatttatgccttttttgcttaggtcc

SEQ ID NO: 360597 - DNA, 645 bp, Cannabis indica
tggagctgtcgggtgaaccgtgaagtttggacttcagcagggttctatgggaaaattcaaaggcttggaagagaggatgtattagcctttctaatgcgcatctcagccatttttaataaagaagagtttgaatttttcttggttctttcatggaatctgtggtatgttcgcaactccgtcaatcatggggtcaaaagcctcaaccgaatgctattttggagtggtgcagtaagtttcttagtgaatttcgtcaaagtactacacctaacagagaccgggtctgtagagagaattctcgttgggtaccgccagcagcggatgtcttcaaagtaaatgtagatgctggtgtgaagcagggagcgggtgcagcaaatattagcctggttgtgcgtgatcatgccggagttgttcaatcggctgctgcaaactgttatgttgcaggaaatgacacctcttcaggccgaattgcaggccatagcaggcgggttacaagctgggctgcagtgttctctgccggctttttctgtagaatcggattgcctccaagctgtgaagttggtgatgcaggaaagaagaaggatgcagggatgttgatggacttgttgctcatattaaaagttaatgcaaaaagtgtaaagggttaga

SEQ ID NO: 360598 - DNA, 1076 bp, Cannabis indica
tgtttttcttttttctggtttgcattaatagctagaacatggagaaattaataagattgtcattcctttttgtcgcagcatgtacaaagcacattaattataataatgatttaagttgcttttatttttatttaacataagacgaaattataaattttatggcttcttaattatattgtatgtgctaaaatataactttttcttttaatgagtgtttttataagaaaattgaaaaacattgaaaagctaaattaaaaggtaaaattagtaatgtcgaaaatttaaaaagtaaaattactaattatttttaaaataattattaggtgagggccctagcagctgtgaaataaccatgagctcataagagaataagagaatgaagaagagaaaaatcgtagatgtacaacagcaaaaacccactcatatttttttagatttaatgggatttattttattatatataaataaaaagtgacccatgaatttctcataaactattttatttttaataataaattattttatttttaatataaataaaaagtcacccatcaatttctcataaaccaagaattatgttatatagacacactttatatagaatagatatataacaacacaaaaaaaattatatgtaggtttgttatttattaatatgaaaataagaagaaactaaaaaaaataagcaaacaaaattcaaaaaaaaaaatacaagagaaaaaatacataaaaatagaagaatttttttttttttaaaaaaaaaggggtgatatatatactgttgacctcagatttggcctaccaacaggcgagtcgaatttagtactgatgatttgccacgtattactcaattataactgaaaagtaaatagacacataatttgatagaggttcgaccccctttcgttatcgagtaacgacctacttcccttttacttgtattgataccaaatataataccacttagatcactatagtaatgggatctaaagtagctctcttaagattagaaactgagaaccatagttggcaaatctcaagtgagaatagagcagtgggcgtgagagagagagaga

SEQ ID NO: 360599 - DNA, 465 bp, Cannabis indica
aatctgttacttggaccttactccatcgtttattcgatactgtacctcttttgccgtggttagttatgggtgattttaatgattatctctccttaaatgacaggaactcctctcttaatccccctcctcatggtatgcattctttccatgcatttctcgataaacataatcatattcctatacctcatgttgggcctaaatttacttggaagcatggttctatccttgagcgtctggattggtgtacctcaaaccagctttggcgagacctttttcctcatggtactctcttccatcaggggttctatggttcggatcatagagttttgaagatcatgtttcaagaccctcattttgctgctcaaagatctaatcgttttcattttgaaaatcattggctgaaagacccctcgttttcgaaccttcttacttcctcctgggctaactctaggacctctgtttcat

SEQ ID NO: 360600 - DNA, 101 bp, Cannabis indica
aaaaaataaatgagaaaaggaagcaaaggtggccgaccaagcaatgtggaaacaagccttccacttttccaactttccttttccattattcctagtttccc

SEQ ID NO: 360601 - DNA, 538 bp, Cannabis indica
tatggctgcttctagtgcacactacaagccaaaaaggagaaaggacctaaatgccccttttcctaaataaaataattataaccccccaagggcaaaatggtcaaatactaaaccccgaaaattctaacgcctcttatagccaacgataataccccgataatattctaaactacaaaagatacaattttctaaaggcccaacgtcactttccacagcttccgaacacaatcacagaaattgagtaatttacattaaatagcataataacgtaaatgatattaaatatatttccaaaatatacatttcataattattaattaatctcatacataaaccttaattatttgataattcaaagtattaatcatatgcggtctttacattaaatttaaaatttagaataaaactctagataaaatttaatttaatatttgtaaaattaaacttagatggttaagaaaataaaataaattatttccatcttagtattaattttccaacaaatattaagaaaattacttaatttaagttgtattaa

SEQ ID NO: 360602 - DNA, 507 bp, Cannabis indica
atattaattttgcaacaaactaaagtgaaagaaataataatctataaatagtctctaagtggaacaccacattcatttctaaataatgtggtaaacttttttaaaataactcactaaagagtgaaatcaataaaattttaaaaagaaaagtaaataaataatgtaaaaaataagaaaaaagatcaattagaatagaactcatagaactgtcttatgtttcttctttatatagatatatataggggtgttcatccaatccaatcctcactattttatttatagtgcatccgatccgatccgcactaaatgcggattttattttttagatctaatccaattcgcacaatagctcaaattcaatctgtaaaagtatagattggatcggttatttttgattggttactttttaatattaaattatttaatatttatggaaaaatattttttttcacataactagcaacaaaataaaataaattataaatattttatgtctccaacaacaca

SEQ ID NO: 360603 - DNA, 573 bp, Cannabis indica
aataaaataactcaaacaaaaaacattcattcaacatgctccaactcaccaaataattaattacacacataccatatttaccccaaaaatactcattcattatcttatatatctggttctattttaattattaccggtttgagttatttcttgtatttatttttattcattataacattgttatagaaccagatctattttaattataaatagtttaaattattttgtattatttatttttattcattatgttacagaaccgattatatttcaattataaccagtttgagttattttgtgttatttgtttttattccttatgtaatagaaccagttctatttttgtttatatctgtgacatttacttttagtgagttttttcaacgacggtgatttttccggcgacggtaactttttcggtgtcactaactttttcagctactttcccgatgttagcggcttttccggcgtcttttccagttgttaggctatttttagcctatgttttggatccaatttatgtgcgtttttagctgtgttgggacggaattacgcttgttttctatgttttca

SEQ ID NO: 360604 - DNA, 952 bp, Cannabis indica
tgtacaatcatcatcagcagttagctcgttctacggttcagtaagcttttattgctttagtagcttattttaattattatgaattaagaaaatcctgttaggaagcatgttagtagcctgatagtagaataggcgcatgtttttaattttcatattaagcggcattagtaagctctcgttgatcatgacctgatatgccaactcttggtttcgcaagctgttcagactagatggacgccaggcgaaataccaggagtcagggcaactcggtcgggtcaaatgaaggtcagggagctcaatttcccccaaatgcttggggccgaggtagaggtcccaggggcaaggctcgtggtcagggtgatgttaacccgccacatgctgcccaggctgcctaagctactttggaagcccagaattgggaaaataggtttgcagaaatgcaagcctgaattgaggaacaagacagtgaaattcagcgattaagacagcagggtgctcctgcagtgcctgttccagaagttccagtggcacctgcccctgttgtccaggccgaacaagtgttagcggtgaatagaatggaacctctgtatgaaaggttccgcaacaaggaaccttcggtttttttgggaggtccggacgtcatgaaagtcgagtagtggctaactgtgatcaccaagatattgaattttatgggtgtcaccaggaatgacagagtggtgtgggccacttttcagtttcaggaggacgcattggtgtggtgggacatggtgtccatgatacacgatgtcaccacaatgacctgggaaaagttccaggaacttttcaatgcgaagtactataatgaggccgtgagaagtgccaagaggaagcaatttactcacctgacccagaaagagaacatgagcgttactgagtatacaacgcagtttgatcggttggtgaggttggcctc

SEQ ID NO: 360605 - DNA, 677 bp, Cannabis indica
ctatccattggatgtatttcatttatatttattggtttaatttgagtttatccaatattttagacctagtattttttggatcggatcggatccatccaatattttaggcccagtatgtattggattaaactggatccatccaatccaaaaaaaaaagagtaaaatttgaatgttaatttttatatatacatatagattttacttataacaatgtaaaatctaattactcatcaaaactaaataaaaatactaattagtttgattggatgttggatgtattggatttttggacactccatccaccattcgatccgatccaattggatatttaaaaataacatccaatccgatccaatcacaattagatatccaatgtttggcgatcggttgtaattggaccgatcgattcttattggattggatcgatttatgcacaccctccatagtttgaatactcgctagtctggataaagtaattgcatattctcgttataatattttattcggtattgtctaaattcctccaccactaaataataaaataaaatgaattcgagtaaggagtcgatctgaagtaaaaacagaaattcttcaaaaaataataataaaaaaaaagagtgggttaaaagtagctaaatcgagaacgtaacatttctcaaatttttgaatggcgctgc

SEQ ID NO: 360606 - DNA, 870 bp, Cannabis indica
ttttaggcccttagcttggtattccccgagaaccagattgacagtcagttgtgagtcactatgacatatgagattcttgaccttcaacgccccggctattctcaagctggagatcaaggcttatactcagccaagttatttgacgcgtcgaattgaaatctcaaagcataatgaaacttaaagccttctggtgaaattaatattacccctgcacctgagccctactcgttggatccaccatccacgtaacttccaagtgtccgcatctcggtgaacaggtaaattttcttctagagttattcattcaattaagaagtctgccaaggcttggccattgatggatgttcgagggtggtatgttatgtcatactgcctcagttcgattgaccattttatcaatcttccagaagcgtctggttttgataaaacttgtctcaagggttgatcagtttacacttttattgggtggacctagaagtaaggtcgtaacttgcgagacacttggattaggcataaataattttttcaagaggggggtaccttgactctgtccttagtaaccttttactgacatagtaaataggtttctggtgcttatcctcttctcgcactatcgttgcactcattgcatttttcaagatagccagatagaggagtaacatttctccagttattggtttcgctaaaactagaggcgtcgctaaatgccttttgatgttctgaaaggcttcttgacattcttctgtccactcaaatttcttgttgcctcgtcatacattgaagaatggcaaacacttattagttgagttcgaaatgaatctattaagtacagccatccttcctattagggcttgtacttctttaggcttt

SEQ ID NO: 360607 - DNA, 1142 bp, Cannabis indica
acattcttgttagtaaatctagatcctgataaaatattttcaacaagattttgagtcaataataaatattaaaacacataaaaaaatatgttaaacatataaatatacttcggtattaacatacaagctatagaatacaaagctcaatttcataaaaaagcaactcataatgaaatccttttaaagagaaaattttgaataaatactctcaaaaatatcaaaataaattgtctgcaatgataggaaatagggaataaaatccccaaactaataattgaactaaatggtgagaaaaaaaaaacaattaaaaaataaagacgagcttcatcttcaagcttggataatctccaccattctgtctaactatatgtctcaactcactaggataacaatccaagtctaagtagttggagctgaaataagaagaatataaacatggttagtagatctagaatttataacctaaggggataataattctctaaaacacatgaatttataacaaagttagaataccttatttctttgccaaaaatttaggacatttagtttccggtggcccttttcattgcaataaaagcattttcctttctccgttgcctttggattagcaacttttttaccccttattagatgtattaatagctttaagaggcttcttgcgattcttcctattattcttgtttgtcttagattttgtcgtaccaaccatagcattgctagaacttatagctttgcttcctcctttttgtggtcctccaatcaaattttcaaatgtctaaaggttgtatattaaatcgtgaaagtcaaaagtcaaattgttcatgatataatttaaagtaaagggcagaaaagctggagttaaactattcatgatcaaactcacttgagtttcttgatcaatgatagctccataattctcagcttcttggaaataactagccattagagtaggtaatcacacacattctgatgaggtttaatccgtgcatttatgaagttcttgctcgcttcaaaacgagcttgatcagacgccttcctaaatagtttagttaacttgttcatgatctctgcagctgtgagagtgtttgcaaaccttgtcttcaaggtatcaaccatgctagacaacataaagtaacgag

SEQ ID NO: 360608 - DNA, 1167 bp, Cannabis indica
catcggagtcggaatcaatatttttaggattaggaagttccttctcatcatcatcatcatcatcatcatcatcatcagaatcttgagttactaattcatcagatgactttccctgattcaaacaacacaaatgcaacttaaataaaacagtaaagaaactaaaaacaaagcatgaaaaaacagaaacaataaactatgattaaatacctcatcagaaggacgacgatgaatggcattaaccttctgctgaatatccttaattacagtcattacagacttgaaattaagatcaacaaaacacctcaaggatatgaagtcttcagccaatgatgcttgattcgaaatgaccatctccaacttagatttcatcaaatcaatatcctctgaatcagatttctttgaagatgaaccactctcaaatgtttgcttcgatataccacggtcatcaatagattcatcaagaaataaaccttcaagttgaagcttctgcctctcttcatcagtaggacatatgtttttgatctttaactgaacatcataatcaaacagaatataaaaatgaaaaaaaacaattaaataaccaaaatattaacaaaagcacaaaacaaaaaaaaacagtaaagaaactgaattttaccttgttcaacggcaaatcaaaaatcttgcccttcaagtctctaagagttggatttttggtcacaatggtgttgctccaattcagaatccttggaatcctagatgaaactcttttacagaaagtgtttaccatggcaggacaacattcataaaaccaaacagtaaacacccacggacatcccaaagccctataccaaccatcatactggcctcccttctctgccttcctatttttcattataatcccatgctgaattctacctttgaatgaatcaatagtcaattcaaaggattccctaccccaacaatactcatcccaacgaccgctatcaacaacatctagatcaaacctagatacttctttatcaggagtattactaagaagaaaacattgaataaaatacaacacaaccagtttcaatccaagagactcatccaaaccccacctactacccaaaaaagcatcctcaatagctttatggtcaatggtttttacaccacggaaacaaatctcaaccaactgatttgatt

SEQ ID NO: 360609 - DNA, 953 bp, Cannabis indica
tttttttaaaaaaaatatagtatggtttagtagagatagtaaaaaggagtaaaagaaacaaataaaataaaataatattactaacctatgattgaaatgaaacttatatattaaggagcccagcagatctgaagtgaagcacaagttaaactgaaagaacctgtcaataccaaacaaaataataataaatagaatatttgccaaaaattttaaaaaaaattacaaaaatagttaacacaaacttttatttttaaaaattttttatttataaaaatacattttcaatcaaaataataaactatattttgtagtttatttataaaaatatgttttctaatttttttcgttattttataatttatttatagttgtgaaatttaatttcttgttttttttttaaataaaatgcatttttacaattttaaaattttacgaaattatttatataataaaaaattttaagcagtaaaattctaaataaaacataaaataaatatttttgaaaatttccttatgtaaccaaaactacatctttacttcaatcacatattctgcacagtaaattcatttttttattattaaaaagaaaaagaaaggaatagttagtgaaattactcaagccagatttatggtcaactcatcaactggttcacgcttgctgcgttgacttgaccactgattagtggttaaaaatacacttttatttattttaaatgataaaataaattgagttttaattgatattttcatgaaattattgtaatatattttataaatgaaaatatttgattttgattcaatttatgtctttcttgtaggaattaaagtgtatttttgttgaaagaaagaggaaggagcaaagttgaaaagaaatgaagaaaaaaaatggcatttttgttgaagtccaaagcaacccaacccaaaaaggttaagcctagcccatgaagctcatc

SEQ ID NO: 360610 - DNA, 847 bp, Cannabis indica
atatgaaatgcggaaaataaactttaatcatatcaacaaaatactgttggaattttataccttaaataaaactcatttcaatataatcttatttgttatcaataaaaggttagaagtcatttatgtttacatatatttttcatgcttatggtttgatataaaatttctgttaaatccagaatatatagttattcacaattatagtgatgtcaacacaatggaaggtaattgtgattatatgcttcaaaaatttatgaaccatgatttatcagtgtactgaatttacattgatatgatagttagcgataaaatttacttacacattggataagtgttatgtcatttccagtgcattggcaaagtatgctagtatcggatgtatagagtatagtatacatttgactggaccgatattgaacttggtaaagacattataaactcattgatgtatctctccaagtcaataacattagttgatcttagatcaagagatcttaatcctgatatggttacgtttgatctcaagagtgttatgtatgttcttagaggtgttcgttaaagcttactaattagttcaggtaacacatacatcttgggaacctgatagtacaattgtgtgggagtactaatcatatatacagaatctatagcttctatctagacatagaagtgaaatgataattttcttcgagcttggcttaatagagataaatggaagagctcttatttcattaattatattagtttactgaaatatcatttataagaagctaagtgttttaaggataaaatacattgaggggtagaacggtaaactggttcctactcgatgtaaatcatttataga

SEQ ID NO: 360611 - DNA, 957 bp, Cannabis indica
tagaccatcatcaggtaacatattacgtgtattaactagtgccttgaaatttatttatacctaacttttatttgtcctcgcagaagtgacattcttgaagtccgccccagtccgcaaccgcaagccaaaatctggaacagtggcaacttcccttatcgttcctcagaagaggaagagcgatgtggtggttacccctgtcgcggattcttccaagaggccagctaagggcatacaagagaaagcgaagaaggtcgtgattgacccagctgtcccagcccgcaacatactgactctccaagaaaagttcgtaagcgatgactttcaatcgaagatcgacaagactcctgctgaggagctgctgcctcgctctacggagttggcttcgcagttcattgccatgttctcgaagatccaaggaggttgagctcgtgaagagacagaatgttcagcttcaggaggacattaagaagttgaaacaagatgcgacttccaagtataaagagcttgaggagctttggaaggccaaggagcaagtcgagctcgaggctaagagcactcagacgaaaatcgaggagatgtctcgcaatttggaggtcgagaaggagaatgggaagaagcagtatgaccaggcggtctcggactacatatgcaccactctctccaaaattccagactttgacttttcaattctcggagcagaagccgctgaaatggctgagccctttcgcgccatgtcgcccacacaaactctgttgggttttatgccctaactaaaactccatttcaatgtaatccattttatttaacatcaataaagaaacagaaatatttttcattcatttgtgtatgttttggttcataatatcaattgcttgtctatttgatttataaattcatttcaaacccttttcacatacttgatcctgtttattgtgttctcaacacattggaaagtaa

SEQ ID NO: 360612 - DNA, 1055 bp, Cannabis indica
tcaaaagttatgacaaaaacaagtttggtgcacaggggtatgcaatgcatacccctgcgcgcgcagaagtgaatacctgaccgagacaggaggctgcgtgcagcctctatggtcgagaaaactcggcgtgaggggttgggcgaagcttcggacatgcccttgtctgaaggggttttgtccgagcgagccgcactttgtcccctatgcgcgcgtatgtgcaaccgatttcaaatattttcatccaaattcaaaaagtcataactaattcataaaaaattcaaattgagttctataaaagcctaaattcattagttttttgtctactttccagtaaaaatattttaagaacgaaaacaaaacatattttacaacttacattgtgatttccatacaatcatcaaataggcacataaaccatcatgaaaccatccaaatcaacacaaacatcgttttaaatccatatttcatgaaagtagatcattaccatggctctgaggccaattgttggattatattttacccgaatctagaattactaccatgtatgttatttaacatcctaaatatgactccttccgctcaaatctctaaaccttgtatcctttctgtagccgagtatcaccaagatctgagcacgattctccttgtcttgaatttccattcttcacagtcctacacactatgattgaggacttacttgatatgtgtgagctgttagaattattttacaaggatctagatttactaacaagtatgttattaacatcctaaatatgaacttctaaaacgatatgagataaacacatataaagtatcgaaaaccttacagtttttgcagcgggatataatgtctccttccacttagatctctaacccttgtatcctttctgtagtagggtatcaccaagatctgagtccgaatctccttctcttgcacaaccttacacactatgattgagtaccacttgatgtgtgtgggcactcactctattcactatgaggcttcggttttgaggagaggaagagagagatagagtttcggctagggtagtgaa

SEQ ID NO: 360613 - DNA, 603 bp, Cannabis indica
gcaaagcatgaagcgtacattgtaaggggtaaacgttttcatacaaagtcaagagatgatgctcgagaggttcaaaatagtggtatacgtatcgtcgcagaaactatgcactttgcaagtgcaaaagatagaaaccctgttttaggtactatgacgtattacggggtcattgaagaaatatgggagctcaattattttgcgttccgaattccactttttaagtgttcttgggttgacaacaacgttggagtaaaaactgacgagcttggttttactttggttgatttaagtaagagaggaagcaagaatgatccattcatcatggctagccaagcagctcaagttttttacatttctgatccggctaatgataaatggtctattgttttatcgacaccagagaggaggttcttagagactgaagaggatgaggagaatgctgacttatgttacgatgacttcattgttggacaaccaattcatgagcaacttatgggaattgatcgtaacattgaggaagacgacgctgaatacattagaaacgatatcaatgagggaatatgggtcaattgtgattcaggcaaacataaacaaaaaaagaaa

SEQ ID NO: 360614 - DNA, 519 bp, Cannabis indica
tctacactaatttaattatattttcatgacagtaaattcaaaagatgtatttccattttatgttatttttcgttgtgtttttagaagaagaaaacaattattctacaaaattcttaaagttcttcaaatctagggatcattagctcattaccgtatctttcactttgtggtgtttaagtgtatattttgttttaagttgtatatgtatctcttattattttttttttgttttgtattggagttaggcatcattctaacagtattttgtttaacaatattctataatagttattaaattaaataatgtttcatctgattctcttaaaataccttctacaattagtcgttaattgtaaacagatattaaaccctattgctaatattcatatttattttgtttcacaatctatctatatctatatataaaggaaagcattagagaggttaggtggcactctacattttatttcattaaccttttctattttctcaaaattttatatttttattaattttgta

SEQ ID NO: 360615 - DNA, 595 bp, Cannabis indica
agaacctgaacaagaatcgccgaactaggaccctagaaagagactaggaccgtgactaagacccggacccagacctataaccgaacacagacctaacctcagaaccaaactgagattggaactcgggcccagacacggtcgtgtaccaagaccggaactgagacctggacctggacctaaatctaggaccctatcccaaacgcaaacttggacgtagatagggatctggatacgaaccaagactcagagcaagaccaagactgggatccgaattcttgacctagatctggaccaagatcctaatccagaccaaagctttaacccccactcaggaccccaacttggacctggacccaaaccgagacccagatcggggtccagacttgcacacaaaccgagacacaaactcagacccgaactcaaacccacacctagaatcagacccaaagctagacccggacccggacctaaactcgaacccaaacaaggatcagaacgaaggacttagacctagaactaaatccaaactcagatcgggattttaacttgggactatgacccaacctagagcaagacccaggacgcgaacccacac

SEQ ID NO: 360616 - DNA, 640 bp, Cannabis indica
ttatatgtgtttatttcattcttttagaattcatattaggatgttaatgaaacatacttggtagtaaatctagatcctggtaaatatttttccaatagtttagagttgacttcaacactcaagtttacaactgaggttagaggtttctggaattaacaggatgctgtagaatatttgttgagggatgtttacactcttagtggaattaagtcaagagaattgaaacagaggttaattattgtatcgctgttaacattgccagtcagtgaggagaaatttgtaatttagtgagacacttctaaacaaggattagattatattttaatacagtcaaggagagttattgtttgtgcttttaaacgattaaagaagtgtgagtaatagtattccagctatgatattaaattgatagcagtggcttccgccttggaagttttgcacttttatctgtttggaaaaaatgcgaagtatataaggatcataggagcctcaaatactttatcatttggaaagatttaattaggaggcagcgacgatggttagagttgattgaaaattataacactagtgatcctttatgtaacaccctaactaacttaggcgtattacgtgattttcaaacatactgtgcagctcgttg

SEQ ID NO: 360617 - DNA, 771 bp, Cannabis indica
atagaaccagaactcaaaaaattattgattgttgcaactgtaaacatgaaatagaatttcctctagctctaaccgataccattttgccattaccaactttaagtttcaactcttcagattttaaatgattccagttttcaaacaattgcaatgaacaacatacatggttagtagatcaagaatcaataatctagatggatttgtcattctctaaaacacatggttcaaaaactaaagcattaccattgttcttagtgttcagaagtctgggacaatttgatttaaaatgttccttctgtttacaatcaaaacattgaataatatgtttgcttaactgttcttggattgttttcattgttggtttaatttgttgtgaaagataatctgaggaagtagaatcactttttctttatttctcaactgagcctaaagtagtaggattgttggaggaattattctcaatatcttcagctttccttttgcccttatctgcattactggagaaggacctccatgcaagtgacaatgtccgttcataagcacgcaattcagcatccaacttgtctatgtcggacgagttccagttgttaacaatgaattggttaaactcatgtgataagctatcgagaacaaaatgaattctttgctctccagataaacaattcccagcatagctgctttctggaatttcatgttcattatgagcaagtgtgaagtgataatctgaccaggaatcatcttcatactttggagttcattcctaaaggcata

SEQ ID NO: 360618 - DNA, 650 bp, Cannabis indica
gagggtagtgggcactcgaggagatcgttcgtcaattttggcctccaaagcacgtatctgatcctctattgcagtatactgatcagtggttagttgaatgatgccctcggatgctactgcatgcgtaataggcgaaaaatgtcctgtcgtagccaccggtgtggatgcttccccaacatgtggagcagcagtctcagggaataagttgagaggtgttacgtgtccgtcccacgccgccgttgatagtatccacgggaggtaccctatttcccggcagtgggacattcatcatcccaatgttgattaattcgttgttcagacctccatttttctgatttctagccattgtgattttccttctaaatcagcaaagtatttcgttcccacagacggagccaaatgttgttgaaggaattttacaacaccaaaaatagattataatgataatagtaaatatgtaataagtgcgagtactcgacctagaacagtgagtattcaaatcaggaacacaaatacttagtaaaagactggaaaataatgagaacaagaggaatatagtggttcagtcagatctctgtctgctaagtccactgttgcaaagattttgtcccttttatttcacggcgaatcactcctttatatacaaagca

SEQ ID NO: 360619 - DNA, 613 bp, Cannabis indica
tgggaattgagacaactgatatgaaattcgatcgtcaaaaggtgtttgggtatctcactagtgataatgatgtgaaactctccaacacaatgaatatgtctcaactcacttatcaccatgttgttcttatgagattttccctatccaattgcttcccttgctccaatccagtaaatgtttcaaatgaacttgccttctttttgtaaaaagtttctattggtgttaaaattgatttggcttacatgatttgggagtaaattatttctcttagaaagggcaactaacctagactcaatcttatttttcctcacttgatttataagattttgtctaaccaagaggagttggttcttgagaatgaaaccatagaaatccctactgttggtactactttcaaagtcccacagaaacctcctcaaggaaaatctgctaagaaaaaggctaggcctacttcccctggtactactgatgaacttgctgcggcatctgcctccacttttgcttctacagaaatggcttaattcaatttgtgtttgggaagaatggagacaagtcaagccttacttctcaggaggatggacaaaatcataaaattctttcgatccaatgatga

SEQ ID NO: 360620 - DNA, 591 bp, Cannabis indica
gtaaattggtgcttgagtttcattgtagttttagtattatactgttctgggaagtttgaacaagtttggaggagattttgtgtggtttttgagcaaagaaccattttcccatttttgtctgcttagaaactagttaactggttttacaggtgctgtaaaaccggtcaaccggttttgctagcagggggaaattttggtttaagcctcgaaactggctttttgctcggggtatttttctaaacctagattagggtaatttagcaatatttggattgtccaaatcacatgggagttagatgtacggttatggagattaggatttgattccggagtttggataagttgtctatcagattttgttgttgtggcataggacccgggattgtcaagcgtaattccactcaggtcggcccgcacacctaatttctagattgaggtaagaaaagtgttatgcatcacttagggttaagtgattgataattgtattgtatagtctcgattatgatcgagatccagaataattatttattaagcctcagttatgactgggggttggaaattgtcattaccgttacgagtaattactcttga

SEQ ID NO: 360621 - DNA, 598 bp, Cannabis indica
cataggaatatgttaattaattagagaatcaaatcataaatactttggaaaaaggattatgagattttaaattcctagttgacatcatcaatttgcaacaatactcatttgcaccattatatcaactttgcattttttaggtcaatttaatagttctagcttgttttattcatagtttgtgtttgttaatttttttttttacatattctaatcactttattttattttattttttttgttgaaaccaatttgtgagtaattagttctataaatcaatttccaattttcaatccctgtggagacgatactcgatttatcactttattacttgttacgattgcgtatacttgcgtacacaatttttcacaacaatatgactatattaaaaaagtaaagcacaactaatcaacaaagtgatctttaactataagtaatgttactgtaaaaacaacttgaaatgttcaaatcctcaaaaaaaaaaaaattaagaaaactctaaatccttatatttttaagcttttcatcattttgggtatttatgaaaatatcccaaaaataaaataaacacaataaaaaataaaaaagtgatctttattga

SEQ ID NO: 360622 - DNA, 1364 bp, Cannabis indica
acatcatttatttattgatagtagggtcacaaatgttctacgttctagtagttctttattagccagccatcaagtcaagccaatttatatactccaactccaactactgctttgatgacatatggacccttccagttcgggtcgaacactcctgctgatgcatctctcgtatttgcaaagactgtcttaatatagagtctccaacattgaataggcttttcttgacttttttgttgaagtatcttgtgactcggtgttggtatgcggcgttggtgatttgcgactcaactcgttttttctcaagtagatccaacgacaattttaaaagttcatggttttcttcttgattataaaactctcttctgtgagtcggtatgttcacttcaacaggcagcattgcttccgagccaaatgctagtgagaaaggagtgtgtctcgtggctgtcttctcgatagttctgtgggcctagagtacctgaggtagcttgtcaacccatcagcctttggcagcgtctaacttcatcttgatagtatcctttagggttttattgacgatttttacttgtccatttgcctgaggcctggatactgacgagaagcttttaataattgtattcctctcgcagaattcagtgaacaagtcgccatcgaattgtgttccattatttgatctatcttcatgggaattccaaacctatagataatgttcttgacaacaaagtaagggactttgttgcaggttatggagacgaggggctcgacctccgtccatttagtgaagaagttgactgctactactgcttacttagctccacctcgcccagcgggtaatgccacaattagatcgatcccccattagcgaatgggtagggcgaggtcatcattctaagttctgttggcggtacgcgtggtatatgtgaaaacctttgacacttatcacaattcttgacaaacttatgtgtgtccttattaaacgttggccagtaatatctttgtctaatgatctttctagacagactttgccaacccgcatgatccccacagaagccttcatgagtttctctaatgattttgtttgcttctgcggggagaacacaccaaagtagggttattgaataccctcttttatatagtttgccttcgatcattgtgtagcaaggcactgaatacaatagttttcgcgcctcgtttttgtcatttggaagtcgcccatcgagtaaataattaataataggtatcatccatgttggagagttatctatcatctcgatgtcttcagtttcacatatacttggcttgctcagcatctctaccagaacaagatttagttcatccaggtcattctgcgaggccagctttgctaa

SEQ ID NO: 360623 - DNA, 576 bp, Cannabis indica
tcatcgcacctacggtccaaccagtcgggagagagttaatagattccttttctagagcgattcatccttcccgaacgcagcatacaactctccactttccaattggttgttttttcattaattgctacttcatcaatcttactgattagtgtacctattatatttgcttctcctgatggttggtcgggtaataaaaattttcggattacatatggacaaatattcttatctgccgatctgttcaatgctggaatccgccctattattaatgttggcatttcggtttccagagtacgatctgcggctcaaattaaagtcatgaaacaagtagccgacaaattaaaattagaattggcacaattcgcagaatattagattccaatgatccttgagtataattcgattaaattctgaataatcaggaatactgttttctttttcttttttaccaaaaaaatctgcttcttttctctggcttgctcttccaaatcaaattttggcctgcggtaatggttttaggatttcatctactaaattctttttttttctatgaaagcaagagatggaaagtgttgt

SEQ ID NO: 360624 - DNA, 786 bp, Cannabis indica
ataattctattatgtatgtttttatatagtttaatatgtgtatacaagtatatatatatatataatcattgaattttagtttcggtcattttgctttgaattttttcgtttcttttttggtatttatttcgaattctatatacattcactatattcatatagtattatagatcgatctaagcatagagaaaacttttgaaaaaattaaaatgtaaaaaaaaaaaatctctgtaaaaccttttcggacccgactagacttttgtgatattaaagtctaattttattgtttaaatgtctaaaacctacttgaatcccttaaattatgcatttggattcatttagaattgattttgggttttttggacgtcgggattcattttttcgactgggtttgaggtcgggtccgtgcgacccgcgtgcagtaaaacgggtcaaaacgacccggacgaaggtaggagatgaccgaaaaacgacatgtcgttttcacatactgtggaaaatgacgtgtcgttttcccttacgtgttcagcccaaatccttcaaacaaaacgacgtgtcgttttccacattctatggaaacgacatgtcgttttccctttaaattcagccgctgaaccctctcaaaaacgacgtgtcgttttttcctatagcaaaaaacgacatgtcgtttacaggcagtgattttcaataaataaataaaaggaaaaattccaaatttttataaattttttatttatttggaatattaattagtttcctattttgtgttaatttagtccataaatt

SEQ ID NO: 360625 - DNA, 850 bp, Cannabis indica
aacaaaacacaatttaaaataatataaaataatcacaacaacatttatcaatataaaagtttaccacccatcttattgcagtacatgtattcacagaacctacttcactacggatgaatatttaagatattcaaactcatccaacatgtatattattccacccattgatccggcgcattacaatatattacaggacctacttaactacaaatgaaatattaagatattcaaactctactaagcattcatcattaatttataataaaagttgataaatgtatacatcgagctaccttgaaaccgatcaacaccaaataagtctcatccttgcaaattgacctcacaacctacaacataaagaaatactacaaaattaccaatttctttatttagctacttactagctatataatttatgagtaactatagttactaactagttactaatgagtaactagttagtaataaaaatgtatgaatatgaatgaaaattaataacttgctaagtagttgtaactaactattcactagctactaaaaaaataaaaagacatgaataaaattgaaaatagaaaaaaaaaattgatacaaaatagagttaatttctaaatttttgtttctaaactaatttttgagaaattaatttctaaacttttattttaatactctcctatttcattctcattcacaatatttaacaaaacttatagtttaaaatactccatatataaaatactctcctatatcacatttctcattcacaatatatatacacacaatacacattcaatacaatacaataaaatacatatttaataatatagaaaaccctaaaaaatttataaaataa

SEQ ID NO: 360626 - DNA, 605 bp, Cannabis indica
ttttcttttcagctattttgaatcaaaaatattcaacttaattctgccctaaatattaaacgttgtaatgtattgtataaggaaaaaattaggtttctccttccgaaatttatagttatagaagaagattgtctttatgacaggcccgccggtgttccttggacatgaatgcggcttggttggggtagtgttttgttattacgattcaattcatgctattgtgattagtcttgtttttgtgacattgttttagatattttaatgttatctctgtgacataattttgagtattttagtcttatttgtgtaacatggttttgttgtcagttcttctatgttcttcgatatcttgtcatcaaattgctattagtagttgaaaataacaaattttctgttactgaatggattgttagttgtgcagttacgtactatgcacaatagtttagtgctcaagctaagaggttgaatgaacatgccgcaacattttttactgtttgtgttttttgagcggtagataaaattgaatataagtgtttttaaaattatctataatgctgcaatctttttcatttgatttttatttttagttttttgtcaaacgattt

SEQ ID NO: 360627 - DNA, 857 bp, Cannabis indica
agaccctgtattttctaaaatagtacaaataggaccctgaattaatttttgtcaaaataaagtttaattataatccgatctaaaagtgctataacaaaactttttatattttttgtatttgttcgtattaggaattgtcttcaagttggttgtatttaaaaaaaaaaaacttgtcaaaaaattaagctcagggtcttatttttaccattttagaaaatacagggtccattttgtcatttaacaaaatacaaagtctaatctgtaatttttgcaaaacacatgtccaaaatagtatttacccttaaaaatgaaaaaataaacatataatttaatataataatttttaaaaaataatcgttaactaattatagaatggcacttctagagaattgttatgcacgtgtccgaaagcaatactccttaatttatactatattttgcactctatattataataacaaagtgtcaattttttaaggttaattttgtttttattttttaataattaatcataacattataattttatgagttttttttgcgactaaacttcctcaattatcattttatttacacttaaacctcaaaactttaatggctaaaaacccgccaacctctattgtcgtctaacaagagtaattatgtgccagcatggattactcccacactataaaataaaactctaacaagtgttgcattcatattcgtccatataattatactaggtgaaatgtacgtgccgagccacgtattgctagtttcatttaggattttggtctttttaagattttgaatgtattttatttttaaagattacaaattttttgtttgaaaaaattaaatatttatatttgaaa

SEQ ID NO: 360628 - DNA, 844 bp, Cannabis indica
actgtcacacggaaattttttcaaaaatactgtatttttataaaacaccagtaaaacacaaagcataacaactgaaaacaacagtagaacaccggtaaaacaccagtagaacaccagtgaaaacttaacacagtatactgcagtatgaaacttttaaaaaaacacagtaaaaaattaaaaaataccgcctgacagtatttttgtaaaaaaatagcaaaagttagtataccatgtaaatttcccatagatattgacatataaattatatattacctattctattatatacccattttaaaatcataagattttattatttttattattaacgtaactatttatttaccttctaaaaaatgaattgtcattttaattgttagtaactcaaaaaggaagagagagaaaaaaaatgctaaaagtataaaattgtaacaacaaatttcatgaaagaataatgtagtaataaaaaaaattaagttatcaaaactaagtaaaaaaaaatcttaatacaaaaacattctgatgagttgatattattttgcatattgcaattaggtagtcaatgtattttgttatttttgttcttttgtagttttttatagttattttcatgttgtttattaagttattttagagttgttttttagttgtcttagttatttattttttttattgaaatataatatttttataattttgaaacgttagcacaatatttttgaatacttggtacagtaaaaatgtaaaagtaaatatgattgtaaaaaaatgtaaaaaatagaaaaaaaaaaaaaggggggtatttttgtaagatcctctactttatatgtgtgtgaaataaatt

SEQ ID NO: 360629 - DNA, 745 bp, Cannabis indica
tgaaccgttagtaaatttaaggtatcctccatttatattaatgccagcatagattgcttatgtggatactcttgtacatgtgttactttaatataagtatacctaatctaattatttaaaaattaataaagaataataagttataaaattattaaaacaaataaatatttgttctttttcattttattattattttttaatttctattagtgtgattggatctaaaaataggtttcagagtggtggatggtggtgcctaggggtgttcatcaaactgcccaaaccgctcaaaccgcccaaaccgcactgcaccgcccgcaccgcaccacaccgcaaaaaaaaaatgcggtttgaaattctttgcggtgcggtcgcggtttgaatttttcctaaaccgcgcggtgcggtgcggtttgcggttttgaattgttaatatgcggttcaaaccgcaccgcaccgcatattataaaaataccaatttttatatttatttaggtccaatatgtgaatattcaacttaaagtctactattctttacaaaaaaaaaaaaaaaccttaaagtctactaattattgtattgttgacaatttgacacttaattttttttttcatatttattttcaagtcttatggtattttgacaagttttgctcaaagtttgttgtatttgtgatagtttaattatttagtgatagtccaaaccgcataaaccacaaaaatcgcaccacaccgcactattttttgc

SEQ ID NO: 360630 - DNA, 602 bp, Cannabis indica
attatttatttaagatgatatttagtttctattttattatatataatttttttggtatgtatacatattttaatagtattatatataattttgttagcataatatatattttttgagtattaatttagtattgttattacttctttgtggtatataaatttattactatagtatattaattttcaataatattatatatcaaatactgttatatatatatttaatgatctaatatatttattcgtttatgttacaatataataatatgcaatactaaaaaaattatataatttaattaaattattataatttttttttaaaaaaagtaaatgtatttttataatttttattagttaatttattatattttgctattttttatttttttttaaaatgacatttattaacttaatttctaaatttatggtcattttgtatctaagctctacttttaactcttcataaaaaacctaatgaaatcataataagaaaagttaataaaataaaagagatttttacaaaaataatagattttgagcaaaatgttacaattttactgtcacacgattttttttttacaaaaatactatcttttttataaa

SEQ ID NO: 360631 - DNA, 1083 bp, Cannabis indica
tttgttttttgttttttttttaacttgaggcatatttgtcttttatcttctatggattatgaaggcataatgaaaatttgagagaatattagtttaatttaaatttaaaagcttttttcaactattttaaattatttatttatttttttattttgccttaatggatacccaatgagttccccataatcgataggtattctcataccccgaatccgctggttattagacggggatggaggcataaataagtagcggggatgggagagaagatttaatttcccatacattaacctcccaatttctatctgtatgggtgagcaagtgctccacgctatcctcttgtgttagggtttcgaattcagtctcatcgttcaaatcaaccaattcaactaaaatagaggcataacttctcgaaggaactctgtgctgctgcttaatcttagatctaggcagctatgtttagaggaaaggggagtaaagaagaagagattgggtgaattgggttgtacaaagatggaggacgatatggtctatatgttgcttcagagagtggaagctacataggagattgatgtttggactagtgctttgcaagccgtcatcacagagttgcaatgacaaaatatattttaaatttattttattctttgaaattatttttttaaatattttttttttgggattttctttatttttacatttaaaagaattttttttttcatttatacggaaaacactgttgtgatattttgcacatgcaagtgcacgtatcgtgacaagtagtaaactcaccaagagtgaagtcgatcccacaaggattgtagttacgtacgttaaaattaaacttctagttctatttggttgaataaaaattgagaaaagattaaaattagaaaataaaaacagtgcaagaataaacaattaaactaataaggaaattaacagttaataaaaactagggcttggacttcaattatttctattgatcatgacctaatatgattatctccctattatcaatttctatgccatagcagatttactaaggtaatttatagtcttctcagatatataaatctcaat

SEQ ID NO: 360632 - DNA, 739 bp, Cannabis indica
tacgtgctaatcactgtcttacctgttgtcccgcaaaggcagagattccaaatccccaggtgctcctgaccaggtgccggtaatcctagtcacacacaatccgggattttcacaaatagggttaacccctgatttcacattcataaaataaattcatggcatttcaaatacagataatcacatagagctcgaaaagagctttccaacggtataaagaactcccaaaacggagtcccgagtcaaaagttatggccaaaacaaaattcagcatttccgatgaactccaaccggaattccggttggagcagccctgaaccaaccggaattccggttgtctgggcagagaacacgaaatttctcaatctttaaacccccaaaactcactcaaatcatccccaaacactaccaaactttccagagcatcattatatgtcataataaacatattccacaacttaaacacaataatttcactaagaatcaaaaagtgccattaaagcaccaagcttgagttccatgcttgcttttcaccattaaaatctcaatttactacttacagcagctagcaaacattatagggtcaaaaacatatatctcatgcatccaaaatcccaccatttagtttgcataaaaatcatagaattcaaacatgttcatggcaacatcaagctcttgaataagagcttcaatctcctacaatttaaataactcccagccaagaaaacaactcataaataca

SEQ ID NO: 360633 - DNA, 633 bp, Cannabis indica
gttttgaacttgtttgggttaccgagtgcaaaccagttaattatatcaggggtagggttccagaatagtttaatttgtggttcgcgttattttcagagccttagatggtcatttccttgataattagggtatttttataataattaccaatagcaaaactgttaattagtagtgagtttgggttctcggattaggattttgacatgtcacttacctgtttacgtaaatatgacttagggcatccatctaacacagggttttccgttcaagtcggccgactcacttgaattcagaaacaaagtaagaataatagcacataacatgttatatatgtgattgtatatatgtgatatatgcatgcttaatgtgattcgtatactaccaacactagtactgtagcggtactgagtgcattggtatagcgtacaatgtttaaagagtacagtacagtgttaccaacactagtacgggcgggtacggagtttatgcggtgtaacacttagtggtactcagggtacaggataaatcctaccaacacttgtacagtagcagtacatagtgcatgtggtacagtggtagtactctagtaaagaatattcttacttatcagataagctttgtggataggtgtat

SEQ ID NO: 360634 - DNA, 910 bp, Cannabis indica
tcactcctgttcagccttcgcctttcctttacctacacttgaaagtagcaaatgtgagtcaacacttagtaaaaaaagcattcaacaataatatatctttgacttgtatctaggcgcccatacacctatccacaaggcttatcagattagtaagaacgttttttactaaggtacgacctttgtaccacatgaacttcttaccgctattgtacttgtgttggtagggtttgccccgtaccccgagtacccctaagtgttgtatcacatacactccgtacctgtttgtactagtgttggtaagtccgtaatgtactctttaaacatcgtacacaataccaatacgctcattaccactaccatactagtgttggtagtgtatgaatcacaatgagcatgtatatatcacacatacacataatcacatatataacttgttatatgctattcttaccttatttttgaattcaagtgagttggctgacctgaacagaagacctcgtgctggatggatgtcctaagtcacatttacataaacgggtaaataacatgccaaattcctaattcgagaacccaaactcactactaagggttctacgattgcaaattataacaataccctaattattaagaaaataaccatctaaggctctaaaaataacatgatctgacaaaacaaactgttcaagaatcctgcccctgatccaattaaccgattttacagggcctataaaaccggttaaccggttttcaccaggtaatccatacaagttctaacaatgccctatttgtgtccaaacctcactaaaaacttctagaatacctgtaccaacctcaaataatattttccaagcaataacagtaagaaacatacacaaagtccaaacatgccattaatgacccaagtttgagt

SEQ ID NO: 360635 - DNA, 645 bp, Cannabis indica
gtaattattatacccgaaatttgactatgtaccaaaagctgacaagtgttttacaaaaggaatataaataagctcaaagaatatagtaattaaattatattattaaatgtgatttaaaattactcgtttcaattacattataagttgatagaagcattcaactcgctgactacatgagcatgaatgagaaaagaataaacaactattaacatatttaatagaggagataatacgtctgtctcgagataaatagagtatacaataaaagtgtgcaagacgagaaatcaaggagtttacagctcgctaaccctcatacttaaaaataaaagcttgcaactcatcgattcacgcaatcgtacatggagaagaacatatctatctatctcgctcttaataccacctcgcaaataactttacaatatgaagagcaatgtgaggagaagaatgtctacacttaatattttttcctttaaaaagacaaaaaagaaggataactcatttttagcaaagaagcaaccttcttagtcagcataactgctttaaggataaagacaatgagtagttgggtagttgtcagatattatcccatatgtaaataaataaaaacgtggggaaatgtccaccttttattagcagttgtagatg

SEQ ID NO: 360636 - DNA, 1282 bp, Cannabis indica
aatgaaattcattaaggataataaaagcacgttataccgggattaaaagctgtccggttagcccattgtccaaaaaatgaaaaataattccaagttaaaagaccgcttggctggtcgtgatgtcttagaaatggccctgaggccgaataagatatatcaaataaaaagataaaaagagaagtgtttaagcagctggagtcccaggttcttggtgtggttcttctgggccaactagaacaggaggatctgttgtttgaacatgaggtgcatcagcggcctgaccggaggttgaagcacccgccttggttctgccataagccacttgggacgcccagtactcaaggtacatgtctttaacatcgcccgagtagtcgaaattggcccgaggattagccttccaaaaatcaaagaagaacccgagaccggctatctcaaagacattgaccttctccttcaacctgtccacctcggtcgaaagctccccctccttggcttccttttcctccttcattggatgaagaactgctcgaggagaagtcctctcatcctgaagactgttcacctcaacagataaggtctcgatggtctcctcaaaacggtcagcagcttcgagatccttagtcagcacagtgattttcttccgagcagcaaacactccttattggcttcacctagttccaaccgaatagctccgacttctaccctggcttcttcaacatccttcctggccaagtccgcctacgcccttagggcgtcggacagagccgcattctaggaagtagcagacttagctcgggagtaagtgtaagccaacttcataccagcctgcacaaaggaaaaaccttagcatattgagctaagtatggaaaattagagggaagtatccaaaaagactcaccctggtgaactccttcaagactacgcacaccagcaattccaaagaagagtcattgttaacaccagccagttgctcactgaccttaggaaccagctggttcatgtaatgggccagcatctccttacccgttttggtatctggaagcactgacaaaggttgagtaggcgcccgcacccgttcaggattactcctgacaatttcagacccaaccattggtcgtccaatttccttggacttgacaattttaagggtagaggggtttgcagcagtcagctcctctgaaagatcaatgaccttagaggacccctcaccgcccttagacttcttggccggaggagaggtgaaagagcttccgcccattctcttcttcagagcctcaaacat

SEQ ID NO: 360637 - DNA, 605 bp, Cannabis indica
ggtgtaagtaagctttatcgctgactctcacatcagtgtaaattaagtgcactgatgaatcaagggaacattatcttttgaaacatataatcgcaattaccttccactgtgttgacatcactgtaattgtgaataactatatgttctggatttaacaaattttgtacacattaaaccataaagataaaaactacatgtaaacataaatgacttctaatcttctattgataacaaatcagattagattgaaatgagttttatttagggcataaaatcccaacaggccaaccattagtaggagtacccatggccagccagagtacaacacttcctctcctaggggagcgaggatcccagaggtcaatcttcaaccgataaggaccgggagtgggtggaaacacccaaaatagctgttcaagaagtgaagccgataacttcaggcatcaagatccaccaaacttcaaaaattggtgcgatctacccccgtaaacacataatatctaatatctgatcttataatttaaaatatgttaaataccaaaatatctaatcttataattaaataatgtataagtaataaagaaattaacaaatttttaaatctg

SEQ ID NO: 360638 - DNA, 1150 bp, Cannabis indica
tatgtgattatttgatgattgaatatgtattacgaaatttttccatgaaaataattttattttctttctgaaaatattttatttggattctttgtgaaaaattaagcaattttagtttttacggaactcgatttcaatgaaaaacgaaggagatatggtggtttgaagtttctggtcgctcgacaccacaagcaccagctgcacgcagaaattcggacaaggtgcttgtccgtgcgtgtctgaagcctggcgccttgtctgaaggcccacccaacatcaccatgttaccgcatacgaaggctgcattgtagactcacgcgcgcgtggacgaggctgccagcagcctcctgcgcgcggatgaggctgcacgcagcctctgtgtgcaccccctgggcagcaaccgagttttcaccaaaaaatccgatttttgtgggatttttccccaaattacgaatttttgcaattttcaaatcccaattttaaaataaaatattatttttaatatatttaaacttaaatatcaattttaaattaataatatttaatttttaatagattattattaattttttatattttgaggtttaaatttaaaaattgattattttatttttaaattatatttagattttaaaaatttgttaatttctttaatatttatatattatttaattataagataagatattaatattggacatgttgcccctgattttgtccaaaatacgtggaccaaccggattgtgacacgtagactgaagaggttaaactttgggataattcgactaagtctctttaatcaaagggatccgcatttaacatgcctcccggagaatgcatgagagtttcacatactcccggagagcaaagctacaacaaagcatctccaggaggtgtcaaatcctatctgaacaatcacctcgcatttaatgtcgcatgggagaaggcgtattgaaactgccatatttcttaaagtctggcggcgtaaccccccttctgcagctactacgctatgattaatgagcctagtgacggctactttatgaaggataaaggactacgtccattaaacccctaaaaagcctaaggattagaccatgcatttcctatgatgtatccattgggaatgtgtgcctttactgaaaattac

SEQ ID NO: 360639 - DNA, 1028 bp, Cannabis indica
ggctaccccgaagaggttaagggatgtagagtgtggtgtgtagaacctggattcaagaagtgcttgattagtagagatgttgttttcaaggaagatgaaatggccatgaaaaccaagagcatttccaaagatagtgaaactgtattagatgagaatgtccagattgaggtggagcaggttgctcccatagcaccaactaatgttgctctagatggaactgaggcaatagaaagggaagacaatgaagatcaacagaaactaagcagctatcaattagctaaagatagagagagaagatagagaaaagcccctgatcgttttgattatgttgaattcattgtatatgcacttatgattgcagaagaagttgacagtttagaacccactagctttcaagaatctatgagaagtaaagatgctgcagcacggctgcaggccatccaagaaaagatgcagtctcttaggaagaatagaacatggattgttgtgaagaaaccaaagttctacaagttggtaggatgtaaatggctttcaagcataaagaaggttcagggaatgagcttaacagattcaaggcaaggttagttgccaaggggttcactcagaaagaaggcatcgattacaatgagattttctctccagtggtcaagcaagcttcaatcagagccatgatggcaaaggcagcaagcatggacctagagattgaacagatggatgaaaggacgactttctaacatgggaaattagaagaggaaacctatatgcaatagcctgagggttttgacaatgggaacccagatgaggtttgcttactcgagaagtctctttatggcctcaagcaggcatctaagcaatggaacttgaggtttgacacttatatgcagaatattggatacactaaaagcaagtatgactcatgtgtgtatttcaataatcaaacctattttctactctatgttgatgatatactgatctttagcaaagcaaagttagagattgacaagctaaaaggaaactcagtgatgagt

SEQ ID NO: 360640 - DNA, 1157 bp, Cannabis indica
attattatgatgatattgtattatactgtagatttttttcaaataaataaaaatatatattttttaattatatcatatatgatactattactaaccctgatcttgatcccaaatcataatctacctaattcaattaggacttgacctcagaactgaatcccaactccaaccttagaccctggatcccgaccatgagcttgacactgctctaaccttgggacttgaccccagacttggacccaaacgtcaaatcacaaccttaaacactaatcaggacccaacaccaaaccacgaccttggaccttgatcttgagcttagcttaaacccttggtccagaccctgaccctgactttgacccgaaatctagaccctcgccttggtcgagatttggagcctagacttggactcaaacatgtgacgacgacctggaccgtaaacctagaacagattcctaacgttggacttagactaaaacttataactcaaccctaactcgggatctaagacgcagatcatcagttggagcattttgtataaaaaatcacattatatataggattttgccgctagttacagatggcctcaaaatctgcaaaactataaatatttaagtgaaatttttagcgcaacagcaaatatttaccgtataactaaaattgatattataagtagttttgttgtaagtaaaataaatttaaatacttaatgttggagaatgagtgtaagaaagatgttacttcataaagaagtggtatcgttaatctcaagaccgatcttgaaatttagtgggtcttagaaaaaaataattttaggcatatatttaaaaaatatatatataatatttttcaaaattaataaaaaatgtataattttaaaacgaaaaaaatacttttggtctttagacacatgcctaacttgtctatactaggatcgggctaattaacctcctattacaatctcttaatcaacctctctacttaataatacacttaataatacatttgagaatgttttttattttttttaataagattgttcattatggttacaattcctttcggtttatatgactttgccaaatcattagttaagacaagtctctttccacgttgtttcattgtttaagaacattatcactttgattgacatgattaac

SEQ ID NO: 360641 - DNA, 870 bp, Cannabis indica
tgggattatttatcccaccctgctggatgggataaataatcccagacagatgaggttaactggattagttatccagacttgtcatgcccaaacactggattggacaaattagcctgtctaatccaatctagtcatgcgtaccaaacgggccctatattctaaatagtatgtagtattaattacttttaaatctttttttaataaattcaaaacagagtctatattcactaaattaaataaaaattacagttttactaatttagaatatttatgtcactaaaaatttaagtatttatggagtaattttctttttatttaatatggtgctttatattattataaaataatttagcatagttgattaaactcaatatctatatttaattgttaatttatataatagaatttgacacaaaatatatataacatggccaaattttgactacaacaaatatgtcacattttttattcactcatttaccaatataatttacaaggttaaacattttattatttaataatttgggtaaattgcggcataaatacttaatgtttcagattttatacacttaaatacctaatgtttatttttggaggcaaaaatacctaatgttacaattctcttacaccgttactaccacttccgttaacttatcataaatatagacacgtggagggctcaaatgcattacatttattaaatttattttaaaatttaatattcttaatatcaaaactaaatactacttgtttttttttaaaaaaaaaaaaaagaaagaaagatgcaatactaaattaccatagctgagtgaaccagtagcagtatatggaacatgattatacgattgaagtgtcaatatcaagtgaaaa

SEQ ID NO: 360642 - DNA, 746 bp, Cannabis indica
gggcataaaacctaacatatccattgttacaatcctattagtcaatgatcctttatagatgaacttcatcgaaaagggaaaattttttcgttctacctttcaatgtattctatccttaaaacacttagctacctataaaggatattttagtaaactaatataattaatgaaatgagatctcaatcatttatctctattcatccaagctcaagggaaatcatcgtttcacttctaaattatagaaattgtagattccatatctatgatcagcgctcccactcaattaaactaccatgttcccaagatgtaaatatctgccaaagccataagttagcttccatgaacaacttgaagaacataaataatacaactaagttgaacctaagtataccaggattaagattcatcgacctaagatcaaccattgatgttgacttagaaagatataacagtaagtttatgatatcttttctaagatcaatattggtcccttccaatgtatactctatacatccagtactagtaaactttgtcaatgccctagaaaggacataacacttacccttatcgtcgattatcatgtcagtctaaatccagtgaattgacaaatcatggtgttgacctcgcttttagccaatgacagtcagtctaatttaataagcgataagtagtttataattattgaaagacaataaagcaatataaagacacaggaattttatagaggttcagccccaaacagttcg

SEQ ID NO: 360643 - DNA, 822 bp, Cannabis indica
agagagtccaaaaaatacatcaacttcgaagaggcccaaatagtggcttatgggggatgctatcccactggagtagcggaatatgtgcccagagtccaactcccgagaaccctacattcgactacaccaccaatgagcggtatacaattctccgctacccctggatataattagagtcaggcattggctcccgcatcttcgcactatgggaatccttctgggatgagtggacatgtcctgtctcactccgctcctgtggcaagcctagctagaccttctcaaggttctaggagcaagaggtcctcaaaaggtagcaaccggacggaggacaagcaatagaaaagggggtacacccccccatacactcagtacacggagctgatagactcccaagaacgtgtgtattttgccaccatgcaaaatatacactaccggagaccgcctcctctatatagagatagctcccgaagggatcccaacaaaagacgcgagtaccacaacgacattggacacaacaccaatgaatgcaaaaaccttaaagatgagatagagaacttgattcgattaggtcatctctatgagtggatcaagaacctgttggaaattattttactaggatcttagatctactcacaagtatgttgattaacaccctaaatatggactttctaaaacgatgaaataaacacatataaagtttagtaaacattacattcggtgcagcagaatataatgactccttccgttcaaatacctagcccttgattactttctgtagcagagcattatcaatacctgaacctggatctctttctctgattc

SEQ ID NO: 360644 - DNA, 857 bp, Cannabis indica
tacacaataatatgtggaatatcatttccaaagcatcaacaaagtatactagtatcagatgtattggctatatattggactggaccgatattgatagtgaaaagatatcataaacttattgtaatatcttttttaagtcaatgtcacttagttgatctttaatcaaaagatcttaatccttatatgattaagttctagcttaaatgtattacatatgttctttgacgtgttcgttaaagctgaccacttagatcggtccaatacttacatcttgggaacatggtagtgcaattgagtgggaacgctaattataaatatagactctatagcttctataactatttaaaagtgaaacgataagtttcttagagcttggctaatagacataaatgaaagagctcttatttcagtatttatattagtttatcaaaatatcatttataagaagctaagtattttaaagataaaatacattgaagggtaaaacagtaaatttatcgatactcgatgtaaatcatctataaaagatctttgattatttagattgaaacaatggataatttatagtgtatttattattggtgaatagagtgttctatgtaatcaggagtgtaattccgaatctatagtggagtcaggaggaattaataagatagagaatttattgataaattctagaactacttattgggagcttgattatataggcccatggtccacacactacttgagataatattgtcttgtagactcaataattgattttagttaatcgattagaatttcgaataagactatgcctatttatgagtttcactaagcaagggcttcattgagaagaaaaagagaatttaggg

SEQ ID NO: 360645 - DNA, 531 bp, Cannabis indica
gagcttcttcagttaacacaaacatgggtttttcacctaagagatccatattaaggtgctctttccattcgacaaaattagcttcagagagcttgttgtcagtcaacagtgacacaattaggttgttaatagtcatattgaaaactacaaatatcaataaataaaaatcaaataaggcctaaataatttccaaggtttccaacaaactgatacagtgtcccgttaagacaagagtcaaagatattattcattgaatagagtagtctgctcatctaaaatggataccattctagcaaccttctattcgatcaagataagaatctggcgttgtcctgtttaggcaagagtcaaggccattctatcttatgagcttctactattatttcataatttgaaagccctactcttaacaaccattattggggtgatcgttactaagagtaaaagacttacaataatacttatcttttgagattctacgatgttaaattgctaatgaacgaacatatattagggatgaatctcactaaa

SEQ ID NO: 360646 - DNA, 483 bp, Cannabis indica
aacaataatcccctaaaattatgggatttgattacgtccccgtaaaataaatacggtttttatttgaaaatcacacagatgtgattggtctgcttttacagggtcaatgcatacatgtattaaatacattgtaaagcgtatcattctgggacatctcgctagaagcatatcgacaataaccctggtagcgagccagagcttttcccatgtctttttgaggtttataatgtaaatctcatcgtttatgctattgaagacataacgctccatctaaaaatcacagttcttggtgacaaggtgaacttcagcggtcaacattatttaaatgtcagcttctatctgagagagctgactcgaaggagctgtggatcttattgaaagatatctagagctaattagtgaaggtaccatgagtgtgccttcctatagcgagatggatgcctcgccattcgtagttttggattcgttcggctgttatgctta

SEQ ID NO: 360647 - DNA, 442 bp, Cannabis indica
gatgttgtatggtttctcgttaacgcacaaggtaacagttcgtatatctttatctcgcttaagaccttacagttagcaagttgtaaatatactctgtcagtttcgcatttaatgagttattctattttcaaatataattatcattatatttgttgattcgtattcccccagtttgacacgtgtcctcctctgaagtgctaaccgaatttcgagtataacagatattattttgaatttcaaattaaaagtaatattctttttattttataatggattaaaggatttttaatataggtatatatatgatatatacataatacagatataaaatttttttaggagataaaaaatatatgatatatttatctatcctaaaaaccctaaaggttgaacacacactctctctctctctctctctttctattcggctgagacaatcaag

SEQ ID NO: 360648 - DNA, 622 bp, Cannabis indica
gatgatgtttggtcggaatatcaaacgttaaaaacaagaaaatatgccgacaaggagtactcaacagattaaagaataagaatgttcaacgaagagccaaaactcaggaaatttgaaattttccagaattagggcaaaaaatttcatgaagcttagaataagcaagatgaaagacaggcattaagcattttagaatgcaaacattatggactgtgaaatcgcatgaaccaatgacaaaggagaatcacagagtttctaaagttagggtttcctacatatcttctacaacaaagtcgaaggtggattcaaaaagtaaacataaaggaagtggagaacttactcaaggaatcagatgtcaggattcaggtaacgtcaaaccaaatgagtagtttcgatgaaggcacttcaacaaacttgaagccacaaacctctcttttcgctctgaacttacttagcaaagaaggatggtgaaaatgaatttgtgtacaaatgctcgttggtatttatatgcaagcaacggaaaggggtaatcatttcaaaagaacctcagacgcctcggttcccccttacaagcaaatatgggaaatcaaaaataatcgagtgcagccgtcaacgtggttag

SEQ ID NO: 360649 - DNA, 814 bp, Cannabis indica
ttagaaattcatatttagaatgttaaacaacatacatggtagtaaatctagatcctagtaaaaaccataatccaacagttccatctcaaaaaaccaattggaaatgggaagagtagctcattctctaacactcaccaacgaactatgtttgttcgacggaggggttgttggatctccatctgagtgacgaaagcatcacaggaagttgagtgtcacattttggtgggaaggcttttgactatgacatggtaagaagggtgaatcgatcagggtattgattgacaagtgacttttatgtgtaaactaacactggtggctttcttgaagaataaatttgggtttataaagatgataagcgtgttttatttcaccataaatttgattaattgtgattataattatgaatttgtataatatttagttttgttttatgtgaagagattgaatactttgtgtatgaacttgggttcataaatctaggtttattataatccgtttagttttgtctttggttaaggagaaaagaggagtgctaaggagactctctatcctactatcttttgcactctctttgatgtaatgacatatgtcattttaagtaaggtttgtttttgtttaatatttagttataatattctaatgttattacaattgtgtcattctaattaaattattttataataactaattatttattataatctaatacttcattaactttttatttttacttaattacaatatatttagaagaaaaaaattaccacattaaaaaatattaaaaaaaaatacaatatatatttaaattatacat

SEQ ID NO: 360650 - DNA, 710 bp, Cannabis indica
caagttaacctaaaaaaataacctacggaagaaaaattcttgggcctttcagcatcaatcatcaacgtgaatcaccgccatcaaccgttctatccactgtcgctgtattggtaacaattgagtttttgtatcgtattgtcgcttatcccaaactgttaaaaaaaagtaaaaatttatattagtttatatatgtgtatattatatatttgttattataataaatactataattaataattaaaacttacagctttttgatcttgtatgtaacagttggggtttgcagatgagacgatgtcagtcatatatttcaaaatataaaaaccacattcttggtttttaggttgtcttggacaatttgctagtgatatttcttgccacgggccaagattgtcacgacccgagccctaggctgtggcagatatgtaatatccataacttgggtggtcaaatgtcacactttgacccttgtaggaagataaagcttataaatgatccttttatttatattacaaaatactaatttagaagatatggattaactcctatattaataagaaaatattagtaacaaaatcaggaccactcatcagtataaaagaacaataatatccccacagttatgtaatcaccaaataaatagattaaataagtcaataaaatactaaaataatacctagcatccatcattcctcatttctaactagtac

SEQ ID NO: 360651 - DNA, 618 bp, Cannabis indica
ttgtctattttaggacaaagatggtatcttttgccttgacaacttttgtattcacaaatcttatcttgaaaaattttgtcttaccaatttttatcttttttctatttaattaatttgaaaaaattatttatttattacaaaaataaataattactattttgccaattcaaaatagatttttctaaacatctttataaaactctttatccctacccttgacagtattttaaggtggcgattcgtggaccatggacctataatataagctccaataaattagattatttattgagtctcatcaaccaaataatctcttatttattaattctatgattactccactataaatatggaattgtactcttagtaattatagaattatatttattgagtttaacaatagttttcattgatgttatacccgaaattcggttgccatctcagtggaggacacgtgtcaagagaaagggaatatggatcagtgcaatcgctttttatggaataactcattaattacgtaagtatcagggtatatttgtaacctgctgactgtaaggtcttaggcgaggaattaatatacaaactggtgcttagtatattagcgagaaaccatatctc

SEQ ID NO: 360652 - DNA, 867 bp, Cannabis indica
gaagctagtgcactcttgatctgcgatgtgcatcttaatctggttttaaacggcgtacgcatccatgaaggacagtagcttgaatccagaggtggcgtccaccatctggtcgatccttggcaaggggaaacaatcttttgggcaggctttgctaagatcggtaaagtctatacaaacccgccatgttccgttgggctttggcaccagtaccgaattggctagccattctgggtagtacacatctcgaatcatgccactcgttagtagtttgtccacctctttttctaaggcttcagccttcactgagtcgaggggacgtcgcttctgttggaccggtggcatgtccggatcgacattaaggacgtgggttatgacgtggggacttatgccgttcatgtcttcttgacaccacgcaaaaacgtctgtggcgccctcagtgtctttattatcttttctttttcctccggttctaggctcttccatagccggaggactttggtggagtcgaggtcgcacactgacacttccttgacgtcctccatgggttctacaattttttttttcggatcccacacggggatgcaactcatcttcttccgccgtttctggctcaataatttcacagaccattaggacgggttggtgggcagcaacgttgtaacactgcctggcctcccctcggtttcctctcacggttcctatcccagcttcttgagttggaaacttcaggcacaagtgtcatattgacatgactgcaccaaaatccaccagggccggtcggccgaggattgcattatacgctgtcgggcagtccaccaccataaatgtgtagtatttgaaagtgctttggggtgtgtccgggcacaa

SEQ ID NO: 360653 - DNA, 543 bp, Cannabis indica
cttgatcaacctttttgacaaagaagggatcaaagaactataatttttggtttataacctatctgacaggaaaggaaaattaaaagttatagctcgcatataaactgtatagaaacgattctcgcaagctaggaaagtacaaaacgaggcatcacgatgccttgataaaagtacttgaacctagaaaatagatagagtatataactattcatacaggcaaattaaaaatatacaaagtgatagaatcattaaagggtatttaagttttctcaaggaacaattgacaactcctcgaaaatctacactttggtagattactaactacttaaacaagaagattacgagtaatggaaaaatccgaaagtactgtacatttgatcaaaatatagttgtttacattgtgaataaaaatgcaagcaaacacaattgtattaagttgaaatgaaaatggtacaaggcatttaagataaggaaaaacctaaaactagttacacctttgcctttaaaaaaatgccactaggggcaaaccattaagtcatcttc

SEQ ID NO: 360654 - DNA, 596 bp, Cannabis indica
cttttttaatctatataattcagccctaagccctagttgaaacattataaaaggaacatgatgctctcactcatccaactaatgtcaacttgactattcaaccaacctaaatgagagagtttgtaacgtccccatttcaagcctatattggatccttacacccaaggaataatgactcttatacacgagtacaccactctggctgcttcctggattgacgactgaccctacagaccaacacgagtgtttctaacgtgctttgtcctcacttgcacgcttcctgggaaaacttcgcaggaggtcacccatcctgaaattaccccaggccaagcacgcttaaccgtggagttctttcgtgatgggctaccgaaaaataagatgttgatataggtagtaccaatcaatccatttaagccctattcaactgtgtagtcccatacctacatagtctctgaatcatcccacttgaccttccccaggcggtgtggaattgcacagctgacccggtatttgtcgggttttatgccctaaataaaactcaattcaatataatcagatttacttactaataaagatcagaaataacatttaatgtt

SEQ ID NO: 360655 - DNA, 749 bp, Cannabis indica
aaaaagttcagtgggcacgatttagtacatgtcaaagttacaaagaaaaaattaactaattagccttaaatatatatatatatatatatatatatatacagtaaatctatagtaggagttagtagttttacccaatattacaggaaagtaaattgaagctatgagaatttaaataaaagaaactgtatagagttataattatggaatataataggttttattaaggtagtgtttagttagaaataatgaaagcataggaatgaaaatgagaataaaaataagaataaaatgaaataaaataaaaaacgtataaaaaattttgataaaaaattattaaatttttatatttgttcatgttacattaaagggtctttccttttattctaaaatggaatagttattccacgaaaatagagtaaaagcatttcattataatgacatttcaatactttaaagaatggaataaaaattattttattttcattctattccattttattactttcaacaaaacgcaacttaaacttttttaggcaaagcttgaactctttgaaaaaaaaattaaaaaagtaattcgataatatttagtagtttggcacataatatgtgacagtcagtagtcccgtgatccgtaaggggaaataccgggtaagctatgcaatcccacatcgcctggggaaggtcaagtgggatgattctgagactgtgtaggtaagggactacacagttaaagagagcttaaatggatt

SEQ ID NO: 360656 - DNA, 675 bp, Cannabis indica
ttatggaaacaacaaggtggccataaatgctttagaaaggagaatagtggagctggataaaatagaggggagtaacttgtggaatcaatcttgcagaggaaaggagaaatcttaaaagggagtggcagcaatatatagttgaagaagaaaggagtctatggctgaaatcgaaatgtaaatggacaaaagaaggggatgcaaacacaagaatgttaaataatttattaaatgcaaggaaggcaaggaacactacatcaagaattgaaagaatggatggctcgatacttgacaaggaggaagaaatagtaactgaattagttgatttcttctccaaattatatacatccgagaggagaccgggatggggagttgaaggtattgaatggaaacaaatatcagaatcattagctacagatttagaaagacccttcgaagaagttgaaataaagaagcaattttcagttgtgaaggtaacaaagcacctggcccggatggatttagtttggcattttttcagtcaaattgggaactcataaagaatgagctcttggaagtcttcaaggtttttgaaagagagggcagaattgagggaagcattaatgagactttcatttgtcttatacaaaaacttaatagttgtttggtaaaagatttcaggcctatcagtcttacaac

SEQ ID NO: 360657 - DNA, 627 bp, Cannabis indica
tatttccatgtgtaggtaaggacaatgctaaagctgaggacccgtgagaacgagcaggtgaagattttacatgtcggggtggttaggcctggagcgtacgatcttaggggatatcaaggcttttgctcacagtcgctaagcgacaaaacttttgtatatgtgtatagcaaacttttataaatgtattttataaacatgatcccgggattttatatgtgtaatactttaagtttctaattaaataataaatttttaattaataacgatttgcaataacctcgttgattagcaacgagttgcacagtacattaaaaatcacgctaatacgcctatattagttagggtgttacagagaaaatttctcaacaataaataatgaaagaaaggataaaaataaaaataagaagatgtgtgtatatatatacacatatatatatatataatatcaactttgggataaaccaaccagccaaagctcctatctacaaaaaaaaaattaaaaggtcaatttaatcttacactacctcaaaattcgatggaaacataagacaatagaaaaaaaaataataaagacaaagagccaatgcaaaaaactcctaaaccaaaaatttacaaagcaaaacccta

SEQ ID NO: 360658 - DNA, 545 bp, Cannabis indica
agtcaatatcaatggttgatcttaggtctatggatcttaatcctgatatggttaggttcaacttagttgtgttacttatgttcttcaagttgttcgtggaagctaacttatggttatagaggatatttacatcttgggaacatggtagttcaattgagtgggagcattgatcatagatatagaatctatagcttctataagtatctagaagtgaaacgaagatttctgttgtgatattttacacacgcaagtacacgtatcgtttacaagtaatagactcaccaagagtgaggtcgatcccacaagaattgtagttaagtacgttaaaattaaacttttacttctatttggttaaataaaattaaaaataggttaaaactagaaaataaaaaaacagtgaaaggagaaacaatttaaggaaattaatagttaataaaatttagggcttcgattttaattgtatctattgaatatggcttaatatgattatcttcctatcatcaatttttatgcaaaagcaggtttactaaggtaatttatagtct

SEQ ID NO: 360659 - DNA, 468 bp, Cannabis indica
gggttcatcagcagagaaatcagaaccagacgcagaccaacacaatcgaagcaacaaggctctagtgggagttctggtcttcagacagatttattgctacagtttatgacaaagactagatcatccattaaagactcacaaactcagatggggcagttggcaactcagatagcaacccgtccttaggggaacttgcctagtacaacagaggtcaatccaaaagaaaactgtaaggcaattaccctgagaagcgggaagaagtatgaagggcctgatgggggacaaccagtagaagaggagattaaaaatcaactggcaccaacatcaacagaaaagaggactactgaaagtctcgcaccaaaacaagtgtctccaccaatcagtatagatcatcatgtgaagattctgtatccgcagagactcagaaagaccaatctagacaagcagttttcaaaatttctagaggtc

SEQ ID NO: 360660 - DNA, 528 bp, Cannabis indica
ttttctacacatgcttaaatcatgtatgtctagttgactttgaattttcagatttctttgtagataaataaatttttttagcattagagatgatcatgcatgtgtgtataatattattttattttatttttttattgtaagtgtatatgttttgttgtttgtagtatatcatttatttaagatgatatttagtttttattttattatatataaatttttttggtatgtatacatgttttaatagtggtatatataattttgttagcatgatacatattttttgagtattagtttaatattgttatattttttgtggcatataattttataactgcggtatattaattttcaatgatacaatatataaaatactattgtatatatatttaatgatctaatatatttatttgtttttgttacaatataataatatgcaatactaaaaaaattatataatttaatttaattatttatattttttttttaaaaaaaaagtaataaatatgtagtaaatgtattttataattt

SEQ ID NO: 360661 - DNA, 518 bp, Cannabis indica
aaaggtatgtgttttttttttttgattttttagaaagagtttagattgtttctgaaatattattgtttagctttaagaattttgttgtgaaaatgggattcgggtccgtgatcggactgtgaaaatggtgaaaatgggactgtgtggccattcggatctggggaagatggttgtccgattgttccatctggtccgatggtccgatggttcattgggctcgggtccgatggttagatgataggaccgatggggctggttttggggtgatgggccgattcttgtgcatggaccgatgggtccgatgggccctctatcgggccaatcggacccatcggtccaaagtttttttttggctttcgtatttttaaggtgggccgatgtatagtgtatggaccgatgggtccgatgggtaccaaatcgggccaatcggaccaatcggacccgatataattttttttttttttaatattaatgatttagtaattgttttaggtattaatttattattaattattgtt

SEQ ID NO: 360662 - DNA, 913 bp, Cannabis indica
ttcaatgttgccttagaccttagccctgctgactttcaccttaggccaacattgccatggtgttatcttagtacctgagtcctgcagactttcacccacttcatctgttgagtgaaccgtgagggtctctcccccacttcatctgttcgcgtcctcaacaacatgcccacatgtggatgcctgaccgccccaactcttcatgcacaccatgtcatctaaaagtgcatcccgcaggatgtgactcacaagtcaactatctcatatagcacccccatcgatttccatatgcatgcaaagtccgctcaaccatccaactgattaacacttgcatcacgcccttctggctcccacaatgtactaagttctaatgatgcagccctctggccttcatgcgaactctagcacccttctcgacctccgtaggcttacatgactactaagtctcactggcgcagccctctggcctccagtcaaactctagcgccatctcaacactttcgctcggtcttctcagccctactgcttcttagatgccttcattccacaactctgcatctcaatcgatgcctttgtgtgacttaagccctctggcgcttttacaagcccacacatcccactcaactgcctcagcgcttccatatggatcaaataaaagtcacatgcaaacacttccaaatacaaccatcctttgacgattgcggcctttgcccccttagtctccatgtgcgtccctcttgacacacatatgtagcaactaaagcatcccatgtctatctcaaattgaaccatttcaatcatcaactctcgaccactgtcgtgactaacaagaatctgacggtccctgcactacttccacacccctgccaataagtttccttttaaacaaaagcgcctcctgcggcttacgatgtca

SEQ ID NO: 360663 - DNA, 763 bp, Cannabis indica
ttgcggtgcgatttttgcagttttttagtgttgtggtgcaggtgcggttaagaaaattgaaaaaactgcatgtgcgggttggtttgaaaaaattgttaaaaaccgcaccacccgcaccgcgaacacccctaacgagcccagttaaccactaacataagagatatcaaagaattgttatgcatcactttactcagattctctacatgataaccattgctaatttgacttgagagatttgtagtgggtccataaaaaagtagataaaggtaataaaatcagtacaaatagctaaaggatcaccgagatcaaattcacaaagttttcagcactgtaaaagagttgaacatccccacaaagcgtgattagtggtttcctcttgggcatcgcacaaggggcgaagacaaccagtcaacataccatgcttactcaaattaaacttggaaggtattcaattgtttacaatttaccaagaaaactgtggggtttatagcgttgtgcaggtgctgttattattggacagtttgttatagctgtcagtttattcagttgagttagttaagtcggttgtactcttgttttctcagcctatgtatataaaggctttagttttgtaattctgtaacagggagagagacagaaagattgagttgtgagttgagagtacttttgttaagagcatgagagttaaaactcacgtctctcgagtgattactgtgttaggagcaagactccattgagtacagtgttgttggaaattatttta

SEQ ID NO: 360664 - DNA, 332 bp, Cannabis indica
attagttttggcatttaaatggttagaattagaaaagtggtatttttgagaaaataaaggaaagattgtcaaaaataaaaaaattcccaagtgggccccacttactatggctggccatttaattggtattttccacttaatttttctattattttaatacctaataaatcctaacctaaacctagtggttgcctataaatagatagtgatggctcacacttagatgatgatgaaatttcttgccttcaggaaaaattgagccatctactccttctatattcgaaccacctctctcttcattcttcatcttatttttcataccttgagtgata

SEQ ID NO: 360665 - DNA, 687 bp, Cannabis indica
gtagggtttgtttcgtaccctaactaccactaattgatataccacacacaccctgtactttcccgtacttgtgttagttacactgtaatgtactccttaacaatatacactataccaatgcactctgtaccatatccgtacaagtgttggtagtctaacaaacatataagcatgtatatacacttaacatatacatacattagcatattcatattacacattatacgcagttcttaccttctttctagattcaagttagttggccgacctgaacggatagtctcgtgctggatggatgccctaatcacatattaaaactgggtaaatcagatgtccaaaaccctaattcaagaaacccaaaccttcaacttaaggttttgttattatcattagggactaaattaacctaggaaacagggaaacacccaactaaggcacttaaatagacaagaattgaaaaaatgagttgttcggggaatctatcaaaactggttaaccggatttacagggcctagcaaaccggttaattggtttgcaccaggtttccccaaacaacctccaacttcctcaaaaattatccaaatgccacccaaccttccagagtacctaaacaaggcatacacaaaatattccaaccaataaaactcagaaaaacacactgaaccacaatatgccattaaagaccta

SEQ ID NO: 360666 - DNA, 525 bp, Cannabis indica
catctacaagtcatcattggaggtttgcacatagctggagattcaggcacatcccaggagaggtatgccccgaacagtacagcacgagcaagaagaagtatcctggccgtagaagaaaggaagtcgaagatcccacgggcaggggagcccaccataacattcaatgatgaagatgttgtcaagatcatatttccgcaaatgacccgttggtcgtggaagttaagataaccaacaagatggtggctcgaaccatgataggcaatggagcctcttccaacaccttattcaagaccacatatgaaaagataggactccaactcaaagagttaaccccctgtctccagcctgtgtatggtttctccggccatggagtcgcacctctagggaaaatttgcctacccctcactattcgacaagctctgacaagcataactataatggcacaatttttggtattggacgtttcatgttaggccgaccagctttgtatgacttaaagcctgttacgtcgatatttcattcatg

SEQ ID NO: 360667 - DNA, 805 bp, Cannabis indica
ctcctcttctgactgagagtatacaaggatgtcattgataaacattatgacgcagttatcgaggaaatccttgaataccctattcatgagaaccataaaggccgtaggagcattagtcaatccgaatgaaattaccaaaaactcataatttccatatcttgttcggaacgcagtctttggtatatcttcttcccggattcagagttgatgataatcggatcgtaggtcgatcttcgaaaacactgtctttccttgaagttgatcaagtaaatcgtcaattttgggtaacgggtacttattcttgattgtcaactgatttagttcccgataataaatacacattttgagggaaccatctttcttttcacaaatagaaccagagctccccagggcgacacactgggtcgggtaaacccaatatcaagcatcccctaaagttgtagcttcagctccttgagttctgttggagccattctatattgagctatagaaactagttcagatccaggtgccaaatcaatcacaaaatcaatttctcgttgcggcagcaatcccggcaactcctcgggaaacacgtcgagaaaatctttaaccagtgtgactacctcaggcccaaatgtttcggttctgctagagtaaatcaccattactaaaaatcctacaaatccactgagtagtagatccctagctcttagtactgaaataaccgggatcaaagacccctgaactgatccaacataaacaaatggatcttcacattctggttacaatctatactggtcgaatacttggatagaaaatccat

SEQ ID NO: 360668 - DNA, 556 bp, Cannabis indica
cacgctaactacaatgcaatcatatatattcttgtcattctacatatttcttcttcatcacataattttatttatattaatttatttatgcaattatttatagagagttgccaatcgaaacaataggaacaataaactgtgtacatatataatatataatagactgtctaattatttagtggtttagtataatatatagactgtgtacatattttttaattaatttttttatttttaaaattaaaataataacctttcaaaaaaaaaattaaataataaaatattttttaaaatcatattttataaaattatttttactttctaaatttttgattgagaattaaaattttatacttctaattttttttttaaataattttttttcttaattaatattttggactctgaccccaacccaaacaaactccaaaactcggacccagcccccgatcccaacttcagacctgaacccaataaaataaaaataaaatatacaaaatacttttattttttgtttttaaaaattaaaaatcaaaagtagttataaaatatattt

SEQ ID NO: 360669 - DNA, 624 bp, Cannabis indica
aaatttgaattattaagcccttgctacatcatgatattgaaacatcacatcaaaccctctgaagctacagatttggtgtatctacctaaaatagtaacggataactcatacccataatatacctttacaaattctacgatggtattttagtgggtgtagttttagtttgtatggaaatgtgagcaagagaattacatgtgacgcatgtaaaattaagtgcagaaaatttttatattacttaagagtgtgtttgaaaataattttgtaattaccgagtcaattaattacattatattttaaaatatacacggaaaactaatatattttagtggttaatatttaaaataaaaaagtttttagtaattacatagtataattgcactcaattcttatgagtagctatgaaaattagaaagtataattggaatccctcaattacctaattataatgtagttacatggtcagacaaatatgtcaaatggtgtaattacctcaaattacacacaaatctaatgacactgtgactttccaaatacgccttaaaagttgaagaacttacactacatacctcttttaacttgatatttttaattttctctctttttcaaaatctattatgttta

SEQ ID NO: 360670 - DNA, 484 bp, Cannabis indica
ggctacaatcaaatcaaaatgcatccaccagaccaagaacatacaagtttttaaacagatatgggtctatattgctacaaagtaaggtcgtttggtctggaaaatgcttgagctacataccaaagattagtaaacaaaatgtttaaagaccagatcaggcaaaatatggaagtgtacgtggatgatatgctcgtcaaatccagaaaggctggggggcacatagacaacctggacaaatgctttaatgtcctcagagagtacaatatgaaactaaatcccttaaagtgttcctttggaataagctcgggaaagtttctaggcttcatggtcaatgcccgaaaaaattgaagctaatctagagaagattcaagccctcctggatatgaactcgccaataaaaaccaaagaagtgcaaagcttgactggttggatcgccgcgctcagtagaattatttcaaaatcaacagataagtgtgtcccattc

SEQ ID NO: 360671 - DNA, 488 bp, Cannabis indica
tctccacaggaattgcaaacaaagtttgatgtaaaaccaactaattacaacttaaagtaagaggaattaacatgcaaatggttgagtaacaattcaaaactaaaaatgacatgaattaaacttgctagaattaaaattactgctgctagaaaaattggctgcaagataaaaattgtaatatggtaaaaatggcttgaatagctaattccttctaatgagatttttccccaggtgttatagcatcagttcagcattactccagcattctgcacagagataacaaaaattcctctagggttgtgagaattttccaacactcacaaatttacttctactatttagctcaatatattcctatatcaaaccagcaaacagaaccgtatttaagcattaattttataagttatgcaaggtaaatgaaatattcctattccacttacaaagaaaagcctaaatctaggtttttacttgctccattcaagttgaac

SEQ ID NO: 360672 - DNA, 810 bp, Cannabis indica
atcttagagaataccatcttgccttgaagttgatcaaatagatcgtcaattcaaggtaaaggatatttgtttttaatagttaatttgttcagttcccgatagtcgatacacattcgaagggtcccatattttttctttacaaatagaactggagttccccaaggagacacacttggtcgggtgaaccctagatccagcattccctgaagttgtatcttcagctcttttaattctgtaggtgccattcggtaaggtgcctttgaaacaggttgtgccccaggtattagatcaatgataaaatctatcttccgctatggtggtaaccctggtaattcctcagtaaacacgtccaggaattccttaaccactttaacctcttcaggtccaaataacacaggtttactagaatcaactacaactgctaggaatcctacccacccactgtgtagtaaatccatagctttcaatgctgagattcttgggacacgagaaccttgaactgaaccaacaaaaacaaatggttcctcattcttcggttggaaagttaccattttccgtttacaatcaatactagcagagtacttggacaaaaaatccattccaagtatgatatcaaactcggccaatggtaactccacaagatcagcgctcaattctctgtcttcaactctaattaacactgatctaacccactttcttgaaataatcaattccccattaggcaatagggttccaaatcccatttcaaaaacatcactaggtctacccagcttattaagaactctcaatgctacatatgatcgtgtagca

SEQ ID NO: 360673 - DNA, 561 bp, Cannabis indica
atacttagctgtctccgagaatgtagtcagcgcggccctagtacgggaggaagaaaaaactcaacagaaggtgtactatgtcagcaagcgcatgataggagtggagacgcgatacccggtaatcgaaaaactagtttttttgtctcctaatggcctctagaaagctaagaccttacttccaagctcacccaatcaaggcattaaccaaccacccgctccggcaagtcctacaaaagcagaggcgtctggaaggctcctcaaatgggcaatggagctaagccaatttgacctacactacattccacacatttccataaaagggcaggcattagcagacttcatcacggagtgccacgaagcagaagctaacgctaacgtacccacaccgccagtttcggcatgaaaggtatttgtggatggcgcctccaacgagaacgggttcggagcaggggtcgcaatgatatccccgaatggacttcgactccaagcagccctacggttcgaattctcagcttctaacaatgaggccaaatcgaaagccctgatagcagggttgagatt

SEQ ID NO: 360674 - DNA, 570 bp, Cannabis indica
taacagttttttgtagtgaaatattgtacatttatatgtacatagatatcatgatatgcaccaaacatatatgaaaatatgatatatatatataaaaattgaatataatactatatattatacaatactatttaatacattataccaaacataccctcaattgatttattattcaccattaaactaaaattaccataattattttgttgtactatgtaggagtcaattgtcctcaagcgagtttttgctactccggaactattattcctcatctgtttactcatcaacttgattcttgttcagataattactttggcttcttaggcttgctttatacagggccggccctgggcctaggcggactaggcccgtgcctagggcccactccaacctagggcccaaaaccagccatataatgccttttaaaaaaaaaaaaggcccagcaacactttttcggcccagtccattccagcccaatacaccaccacccaccaaccaaccctccattcttcacgtgtagaaaaaaaaaaaaactgaaaagtcactctcatgactcatctctctctctct

SEQ ID NO: 360675 - DNA, 898 bp, Cannabis indica
accagctggagcacattgttgtggtggcaggcatcaagcccgcgacttccgagacttaccaccggccgccccgagacgcggagacgcccaatcacaattacggaggcttcagagcttggagccaaacgcacttgatgaccgcagccatgcttccccttcaggattactttattaattttcttgtatttgtcggccttgcaccataccaactcattcctcaagcttaccgcttgctttcaggcttatttattttttactctgcccggggctggggctctcccagtccggcttaaggacggcttttacggttttcaggcccatcctttgaatgagggcccggtccccttcaaccagcaaaaacacgtcaaggagtatcgtcaccgcttcttcttctcctttgggttccaggctgtggaacatccggagcttctcacggagtgggttaggatccctccttatgcgcggactgaacctactcagctcctccttcaacgggccaagaccttcgccacgtatgacaagacggcccttgacgtcagcgggttggtcacgacggagagctgtcggaaggccaagctgatcctggggcatcaatcggtggatgaatccaacctttccaaggttatctgcccgaatctaagggtttcagctgtggagaaggtactccaggaggacatcattgccacggcggaagataagtaccagaagccctcttctaaaaggctcaggagcaggcttacactaaggcccaggcggccgccgggaggccccttcgtatcgggagcccggtgaagagaaggacctccagatcaaggcctacagtccaggttccgaatacgggggctcctgatgccagcacttctggttcttgtaagtcccctttaacgatacattacgt

SEQ ID NO: 360676 - DNA, 656 bp, Cannabis indica
caggctcacccaatcaaagtattaaccaaccacccgctccgacaggtcctacaaaaactggaagcgtccgggggacttctcaaatgggctatggaattaagccaatttgatctacattacattccacgcacctccataaaaggacaagcactagcggacttcatcacagagtgccacgaagcagaggctaacacgtccatgcccacaacacaagtcacagcatggaaagtatttttggatggcacctccaacgaaaatggatccggagcaggggtagcaatgatatccccaaacgtacttcgaccccaggcagccctgcagtttgaattcacaacttctaacaatgaggctgaatacgaagccctgatagcaggactgagattaggaaaagccatgggggccaaaagagtagaagtctacagtgattcatacctggtagtgaaccaggtattgggggaacctcagacgcgcggagaaaatatggctgcatacgtagcaatagtccaggaactgctccacgagttcacggactacaaattagagagaatccccagagaaaagaacgctcacgcaaattgtttagctaagttagcttcagacaatgaaattgagaaactgggggtagtacctgttgaacgccttgcggagccaagcat

SEQ ID NO: 360677 - DNA, 686 bp, Cannabis indica
ttttttcacatcatacattgttttagattcggggggagctctagatctgtttgttacagatctacatttcatgaatctggatttcgatattagggaaagttgttttgatcgaataaaacagaaaataaatgtgtaatttcagtttcctcacagttttttctgatttttttttcgtcattttctgtttagatcattgcatgtcttcttttacaattgatttcgccggaattaatggtggtatttccctcgttttggtttcattttggttgtgttgctgatttgaacgatcgaggtctgttcttcttgatcgttccttccttgcggctgaaggtttagagcatgtggtatttttttaaatatttgtatgtgggatgtataaatgtttaaagggccggtccatagtatatttgtaattttttttcctttttgtatttccctattttttcccttaattataattattaattgatttttcttaatttattattaaataaggatcttttagcaattttttttgttcttaatttattaaaatttttatagcaactctttataatttaaaattatatacatataatttcataattaaaattttattacacttataactttaatttaaaattattacacttaattatttagtttttttttatttaaatattgaaaaagtaaaaagtgaaataggt

SEQ ID NO: 360678 - DNA, 530 bp, Cannabis indica
ttaatcgtgtaaggctaaataaaaaaaaatcgttaaaacaagaatcgttaaaccaagaattgccgttagataggcacttttaatatataaagatatagccacatttaatataagataaaagatatgagagatatgtagaacaacactttctgttatatagccacatttaataacataaatatattttttggggtaactgcagtaggtagcagcaacgtcacaatagtaattttttaagaaaaataaacactttttatattttattaatatttataaagaaaaaaataatagaacggtatttttttttagatgtgtggattgagcataaaagatgataatagatatgttttttaatacatgcaatgagtttaaatttaaattgcaatgtaaaacaatactttatattatatagggatattgacggctaaactacctgaactttacagtttgtaacacttaaccacaaaaactgaaattttagcggttaaactacctaaactcccattccgttttgctctgtatacctccgt

SEQ ID NO: 360679 - DNA, 950 bp, Cannabis indica
tttcaatacacatgtatgggcttgggtttgttgctaagatgagagggtttgtgaagagttatggattttgtcctaagatttatgggcttgggttgggctcatatgtatgggcttaattaaataaatataaaaattgaaattttaaaacatgcggtgcggtacggtttgaatcgcggtttaataattcaaaaccgcaaaccgcaccgcaccgcgcggtttgggaaaaattcaaaccgcaaccacaccgcgaagaatttcaaactgcattttttttgcggtgcgggcgatttgagcggtttgatgtacacccctaattatatgtgaagaaaatattaaggtttgcatggggctctgaggtctattatttcggatagggattcgaagtttacttctatattttgggaaagtctctatcaagccatgggtacaaagctaaagttcagtacatctttccattcctagatagatggtcagttcgagagcataatccaaatattggaagatatgttacgagcctatgtaatggattttgaaagctcccagagttgatatttgtcacgaatagaatttttttacaacaatagctatcagaatactatagtgatggctttctatgagatgttgtatgacaaaaagtgtagatctctgattcactggtatgaaacgggagaaaagaaatacttgggttcgaatcagtacaacggaccaacgaggcaatagaaaagatcaatgccagaatgctcgcctctcaaagtaggcaaaagagatatgcatatccgaaacacagaaatgtagagtttcaagtaggagatcatgtattcctacgagtatctctgataaagggcaagttatgccctagatttatagggctttttgagattctcgagaaggttggactagttgcgtatcgtctagccttgcctctagcactatcaacaattcataatgta

SEQ ID NO: 360680 - DNA, 888 bp, Cannabis indica
gattaactttatttgtgaaatccgaggaatgtgtgactaagattactgacgcttgctcaggaacccctgaggatttggaatctccacatttgtgggacgtcaggtaagacagtagttagcacgtagaacgttatgcgcggtgacgcttatgttgaatattatatttgggattcattagaaatcggaattaggattattaccctaagtgagcagttttttgggctaggattattaccctaataattcttaaggtttaaatgttatgccatgctatatatattgaaattaagaattatgcgttcaatgcataatttggttggactcggtaattagaacagtgatgaactgttctaaggccttattgtaattagacgtgttagcgtagcacgtaggtctatgccagacatatatagacgtgtgagcgtaacacacatgtctatgctaaataaataattagtgtaatggcatgattataatgtatgtgaaatatataattgtgattaatgatatttatactgtcttgctcggcttgactcacgggtgctctactgtacaggaaatagtaaatctgttacttatcagccatgagtgcgagggcttggcgatgcttgtacatgtccgggccacactagaccaagcgagttggggtctattagtgatgtattttgtaatcctgattttgtcgcttaggtcgacacgtaaaagagacttgtaatattttgtaaaaatatttacgggatcctagagcatgtatcttttaattatttataaagttaaaagttattacaagtttaatttttgacctcacctgtgtcagtactacttgattatgttcacttacgtagttattcatatttttcgtaacaagaacacatttttatttttcaa

SEQ ID NO: 360681 - DNA, 703 bp, Cannabis indica
atataaaatattttaaaaaataagtaaagtatttgttatataacaacactatacaatgtcatataaaaaaaatattctaattttggattttgaaaatagaaaaaactcttatagttaaagcaaaagtaataccaaaatttaagagtttcctatatatagatataaatacactagaaaaacagctaattttagtgaaaaaattttagtcacaatataacttttttatgactaaatgtaacttttagtcacaacaaaaactacttcggactaaaacatagtatttagatacaagttgtcacttatttacttttagtcacaacaagtactgtgactaaaagcacatgtagtcacaacaaattgtaatttttgtgactaatatctttagctacagaccttttagtcacaacataggaatgttaatttatatttagtcacaacttttttacttttagttacaaatttttttgtgactaaaagtaagattttttgtagacattttgttttacaaaaaatactgattggatcatttattttgttaaacgataaatcacctctattttccaaaatgatataaaataatactctgaccacaattttcgtgattttaaaaacttaaccaatttgaagccgatttctaacacgaatagataaaaaaaacttaaccatcaatctggtcataaacctctaaattagattattatta

SEQ ID NO: 360682 - DNA, 808 bp, Cannabis indica
agaatttgaatttgaagaggtaagatataaataaatatcatgatgagtatatatgtttgtagaacattaaagaattaaataatttaaaataattttgcaaaatttgtaaaatattttcaacaaacatactaatatactatgatatcgatctatatatgatcatatacagtgtaacatctaagcttaactatatcaatatttttaaataaaagatcacaacacatatcataaagaaaatagtagcagtaattttgaaaagtggctggatatatataatttcttccagtgaatgacagatcaactcggtctctgtatattattgcaagctcaacatgatcctataattcccaaccaaccactacaaaagaaagcataataaattagatgagatcaattaattaattattcccatttaaaccattgaaacagattatgtaacaaaaaacagagtatgacttctatattcaaataaacagagtacgtaccttgttgttgtggagttcgaacttgactttgagcttgagtacaagttggccttttcggaagtcgggttgtagaggtctccaattaatttttgtcaccaagtttcagaatttcgtaacccttttctcatctcatcaatgatgaaaaaggttacgaaattctaaaacttggtcacaaaaataacaatgctttactagatccgtaggtttttaaatgttgaaaaggcttattactgttaattaggttatataggcactacaagaatcaagacttttctagactcatttcaataaaaacgactagaatagagataattagggatttg

SEQ ID NO: 360683 - DNA, 510 bp, Cannabis indica
aacctttgtgttcttacttttttctttactatttctatattctgtgcaaatttatcataactcaggctcaaatatggttaacgaaaatctgcgttaacatttgtaatcttattcttctacctttctcatataatatatatagtgtatatatattgtatattatgtattgtaacatttacttaatctatttattaatttttatactatattgcaatgaaattgtaatgtcttaattttattccattataatattatccctaacggttggagctagtgtagctgcagccgtgtgtttgtattggtgttctacctttgttgtaatgtatttgctcgggtttgattaaagtttctttttgttaaaaaaaatctaatatagtcattttgttataaattttgaaatgaaactatttactaactagtctattatttattgccatatgctatcatttcctaataatttaatagccaaataaatctccctcccctcccctttaaaaaaagaaaagaaaa

SEQ ID NO: 360684 - DNA, 524 bp, Cannabis indica
aagcaaaaaagatagatttttacctaattcaaattaaaattaaaattaacactaatgtcttaaattaattttaaaaaatccaattaatttaattatgataattagatttgaaatattaaaagtaaaaaataaaaatacaaaactacacaaaaaatcggaagttaattccatgaaacagcatgaaaaatcgaagaaaacgaaaaaaaaattgtaagtcgtacggacagtatgcattgcattctgtccacattgaatactgtccacacgtacacgaggggcaatctgaccgagaagacacggcgcaagaggctgcatgcagcctctcctcgcgcgcatcccagtctttagacagggtcaccctatcctgaccgagagaactcgaacacaaggctgtctgaagccacacgcgtccgaggaattagggtgatccgcgcgcgtagagagagtgatgcacccctgatatttttcaatttttaaaaattcataactgattgaaataaaatcgaaattaagttctgcaaaaa

SEQ ID NO: 360685 - DNA, 672 bp, Cannabis indica
ggcattggcagccaaaatggcagaatggagaggataacttgtcataacacaagaaattgcacaaggggtgagtcatgccaaatgatcatcttggccttggaactttgttgagcctgtagagggcaaaatagattcattaaaaaaaaaatctttaatgctagcattcgaatgcttattgtgtaaaggatatatattttcgtaaaatatgatattaggataatgaaaaatgtcttgagactcaacatctaataaagtataagctttcataccatgaggtgaggatagccaataaaaatacaagccttagctctaggagaaaacttatggcacttagcatcaagagtagatgcataagcaaggcatccaaaaaccttaagatgatcataagtgggctgcttattatgtcaaaattcgaaaggagatttcattttaagcaacctagaaggagtacgattaataagataaacaatcgtattaacaatataactccaataaggtaaggataaatgtgattaaaaaagaagagcccgggccacatttaaaatatgttgatgtttccgttcaaccattgaattttgttggggccgatcaacacaagagtgaaagttgttgacgccattcgaagcataaaaggcagtaaggttaaattccttggcattgtcggagcgaatg

SEQ ID NO: 360686 - DNA, 268 bp, Cannabis indica
aaaaaaaaatataataatacaacactacatatgtaaaaaaaattaaataacaataataaaatatttttagcttaataaatagtaatctctatatttagccaagcattattcatcgagctaaaaatatgcataatagctagctcacttgatgaaagttcaaaattatagctttttctttataatttgaagattgagctactttagctcatctactagagcagctccaaggagactacatataatgctatatgtcgtgtatatgtcttcc

SEQ ID NO: 360687 - DNA, 595 bp, Cannabis indica
tgcctacctaatctcataatagaacactttaaaaaagttgttctagtaattctttcatctattttggtattataaaaaatattttattctattatttaaatgatcatgtatgttatagctatttaagattatttgtaagtttttaaaaacttctgaataagattcaaatattttattacacacttcactgcttcttttatacatgtagtttaaaatatgtatttttagcattataaaactattcaattagaattttaattgtaaagtccttagtggcatatttagtaaatatgacaaaattaattatgtgtagtatttttaaaataaaattgagatcttgttttgcgtaaaaagatttaaaatcaaaatattatacttgttctaataaatattagtatttttatataagtatataatatcttcaaatttatatttatgaaaattatatttatttaaattttgttagctgatttattgattaagaaattgtgtatatttgcagattaaatgatactattgttttattatttattttaggaaactttgttcaaatctttcaccataagaatatcaccttttctcgacgcaattcatg

SEQ ID NO: 360688 - DNA, 780 bp, Cannabis indica
ctctaaagaatgcctccaatattgcagttgatctctccaatttgtactctatattctctgtttatttccctctgaaatcgcttcctcaaagcaattctcttctttcctttatataggcattgagggcctaaaaggatagataaaacgcacatgtttaaattcctatttggattcgaattcgggaacctccagaacccacgatatttttgctgcagaaacagaggcgggccacggcatgctaaagctgtgtcgcgacccgtgtggccttccagagataatttttttgattctccacgtaagcgggccgcggcacactaaagctgggccgcggcccgtgtgctccattgctccatattccacgtgatttatcttttcctgggcttgaatttgatttttttccaccttgatattttttatgcgatattctatttttttctattgatattttctaactctttatatattttaaatttgtaaaattaaaagataaaagacgtaaaaatgctccaaacatgatttaaactaaataaaaaatatgctaaaattaatctaaatttaatactaaaattaacctaacaatgagtcgtatcactagaaaaataatcagtcaaattcaaactagatctctcagctgaagttggagaaatattttcaaattgtaactgtaacaaaactaaaaaaaataaacgactcaaagtgaataaatatgtaattcaaacaaaagaaagaaaaaaaataaaaaaaaaaaaaacaaaaaaaaaaccaaaaaaagaacaaaac

SEQ ID NO: 360689 - DNA, 718 bp, Cannabis indica
cttcattacattcggtgatgaagtctgctagtgcttgcccctttatggaaatacggggtacgtagtgtaagtcgaattgacttaactccattgcccatttgaggagccttccggacgcctctggcttttgtaggacttgtcggagtgggtgattggtcaacaccttgattgggtgagcttggaagtagggtcttaacttcctcgaggccattaggaggcaaaagaccaatttttcaatgacggggtatcgcgtctccgcccctatcatgcgcttgctgacgtagtacacgggatgctgagttttctcctcttcccggactaaggctacgctgaccacgtgctcggagacggccaagtacaggaacaagtcctctccgacaacaggttttgacaggattgggggcttagccatgtgctctttcaattttttgaatgcctcctcgcacttgtcagaccattcaaacttctggcacttcttcagaatgttgaagaagggaatgcacttatctgtggaccgggagataaaatggctcagggcagcaacctttccggttaggctctgcacgtctttgtgtttcttgggggatggcaagctcagaagggcctgaattttttctggatttgcctcaatccctctctgattgacaatgaagcccaaaaacttccctgacttaactccgaaagtgcatttctttgggttgagcttcattccgtatct

SEQ ID NO: 360690 - DNA, 515 bp, Cannabis indica
cggtcctagtcttgttctagggtcctggttcgccgattcttgtttaggttctaattttgggtcccaagtctaggtctgggttggggtttggttcttcgtgtgggttcgggtcatagtctgagtcccaaatctagacaccgaatactagtctgttctaggccccgttacctaaatcccgagtcaagatctggatcattgtcacgggtgtcggtttgcttctgattcaggtctcaggtcccatttctaagtttgggttcgagatcgagactggggtgcggttcttggtcccgaccctagttttgtgtccctagtctggttccatgtttgggtctgagttcaagttcggattcgggtctcgagtctacgattgggttgggatccgggtccggcttccaattcgggtctaggtcggatttgtactgcgggactttgtccaattacagttctgaatttaggtccaatttcaaatatgattccgagtccaagtcctagttccagtctcggtcaacttctgg

SEQ ID NO: 360691 - DNA, 669 bp, Cannabis indica
actcaagcttggctaaaccattaacatgcattcaaacctgcttgaatctactcaaacatgcataataaaacctctgaaaacaacactaaacaattacaacaactacagccacgaaattcatcaaattaccttgaaaatcatagtttttgagctaaaattccaaactagctaaaaaccaaccaaacatgcatcaataccagtttcatttcactcaatcaagcatgcttaaacttctgaaaacaacacataatcacagcagcaacaaccaaccaaaactaagcatgcaacctatcatttctcttcaaaaattccaagaaacatagaagaaagatatagaaaccttaccaacaattagagatcactaaatctggttaaaattagcttgaaataccaaggaaaatgcccagcttcttgctgctcaaagagggccgaaatagagagagagtttgaggaaaaaagaattttgcttttctttaatttttcttctttttttttctaacttttgaataaatgagataaagaaagggtttttcctaacactactacaaaccaagcttttagaggcactttttttcagcaaatattaaagaaccgacgtcatagggttggaattttttagaagggattttgacaccacctatggcgtcagttttttggaaataaccgacg

SEQ ID NO: 360692 - DNA, 746 bp, Cannabis indica
gtccatgagtactccaactcatggagacatatgagtccccttgcggtcctcatatgcccgctctactagcctcactgactagtagtagctcgcttaacaccaaggtgcaagggggtggtggagagctgacagcagggtccccctttaaagagcgatctgaacttttagccttctaccaggaacatacatgattttggctctgtagacatacgaacaaaccgtataccaaatcacatttttttcaattcgattgcaccattgtatttgtagatccaaataaatggcgaataccaagtcccgtcccgttccggacaatattgaggatatttacaaaaatgccactgccatacaaactaagcatcagaatgccaccaacatgcacaccaacatgcgtcactacttcaccaccacatggccagcttgtgggcatcacctagcttgtgatgtgccatcttggcatgcacgttacattctcccccactttaacatgtcgatgccctcatcgacggactgtaggcaaatcttcctgatcttgactcctaagcttactccaagcttctcttgaatcttaagtctgcccttgtccctctacctctgtagaaccaccctcttggtgacgatatctctcgcccatacttagacttgatcaaagaacttgtgccactgtcgctatttgatatctcccatggagtagtgcctccgcactagaatacttcccccaacatgaactcctctaagtccatcac

SEQ ID NO: 360693 - DNA, 864 bp, Cannabis indica
attgttttatttttttttctaatgtatttagttagaagaattgttcaaccttaaatggtttatgtctctcactttttctgtttctaattagttgttttttagttttaattagttattatacagttcttattttagggttcttaatttttttttaaaaaaaaagtttagatcattgggttaggtcttacatttatcaattgtatttgaattttaatttggagttattttagttgcatatttattaagttttacaattattttatttttttagttgttatatttgttgttttgatgttgtttagtacatgatatacttacagttttttataactattaattgtgtttttatcagttcattgctttattaactttgtcatcctaatatttttcggtgggtgataagacctctgatgttgttgataagttgaagcttccaaagaaaaatatatattgtcaaggtttataatttttttttttttatttgtcttgtttaaaatattctctgactgcagttcattcatttaaaaaatatatatattttttatagtagaaagttgttttataatttgtttaatgttgttttgacattgttttaattgctacaggacttgatttctagtgatgatgaacttcaaagttgatcagaatgaagttaattagttgcatgcattattaaaagtgtacaagaaaatgttccaaagtctttcaagaagggtgaagttactgtgcatgaattaatgattgagaagtgtctttcgttttagttgtctgtgcacaagagtaagattttttaagaaactttgcttttatattttttttaaacttttctctagttaactttatatatatcttgtacgagatatt

SEQ ID NO: 360694 - DNA, 996 bp, Cannabis indica
ttttatttaagacacttaaatataagatattttttttgagagatttaattaaatagaaaaatatatttatgttaaaaattaatttatttattaattttagatcaacataaattaaaataatttttccaagtttattttattttattttgtaattcaaaaatgtatttttaaatacattagatttcgaattatgattagagatacatatttatagaaaaatagatttaagttaaaaattaattttaattaattttggatcaacgtaaattaagtaattttcataatatttatagaaaattaatactaaggaggaaaaataaatttttattttcagatctatccatgtatgtatataattttataaatattaaattaaaatttgtatttagagttatctaaattaataattttaattaaataaatatattaatatttaaatacatatcaaatgaaaatatgatcctttaaataatgagttttactacaaggatattcgatctccattattagttctacatagttattattttgatgagattcatccctaatagatgttcattcattagtaatttaacgctgtagaatctcgaaagataaatattattgtaagtcttttattcttgttaacgatcaccccaatagtgattgctaagagtagggcttacaaagtaacaatagtagaagctcataagatagaatgacattgactctcgcctaaacgggacaacgccaaattcttatcttgatcgaataaaaggttgctagaatggtattcattttagaaaagctgactactttatttaataaatgatatctttgactctcgcctaaatgggacactgtatcaatttattggaaaccttagaagttatttaagatatgattgttctgtattttcacatgtctttcttacttattaaatgtataataaattttgaattgtgtatgaatttatattgaaccaatttgttttctgttattatattgtagtttaat

SEQ ID NO: 360695 - DNA, 546 bp, Cannabis indica
atttgttattataaatcatttatggcttataaaatagactcgttgtcgttggctaaaagcgaggtcaacattttggtgctttcattgagagaaggatcatgaattgctctttattcaacatccaattgtcaatacgatggtgcaaactcgtaggggcctaactgatctagaaaattcacagacactggatcctgcataggagaacgtaggaagcataagggttccgcctgctgataatcttggacagccggcgaacgtggggaatggtgaaacggttcctattgatgaaattgcgcctggtgtgcaagagactgggaataacagttccgcacaaaagaagggcattcataacacaactatttcgcctagaaccaatgcccagacaactatcggagatgccactaaattacaaaatctctgtgacgcgctcggactcatgcagggtcataataataccctacatcatgatcaagatgaactacgcgctgcagtaaatctggcattcgacgaacaaagccgtatgttcgccgaatggagagataaaga

SEQ ID NO: 360696 - DNA, 1577 bp, Cannabis indica
gtttggaattttaaagataggtgcttgatcaaactaactgccctagtccgatcagtgctggacgacccaataatatgttgtaagccgagggcaggtcgacaaccaagaagtattgcataacagtagcagttaaaggtgcctcgcctaaagttaatgcgagctcaattatgccaaggcaagcgatgctatctccggtgaatccgcaaagattcaccatacaaggccttaatttggccttttcaagccccattttctttagagtctccttataaatgatatttaccgagctcccattgtctattaacactatcttgatcctcttattggcgagttgaatggttatgaccaacggatcgacgtgagggtatctcacgttcttctcgtcttcctctgtgaatgtaatggggggttcctcagttttcaccttcttggaaggtcctaggggaaagatcgactactcgttctttatctccttcacatatcttatctaggcgttattgctttcccctacgatatgcggccctcctaaaataaccaggatgtcctctccttccacaggaataggttgtaacccctagttgtttgggttattaggctgactgggctagttgtatccctggccctatcttttcacatactctttaaaatggcctcgagcaatgagactctttatctcatctttcaattggcaacattcgtcgatcgtatgcccaatatctttatggaatttacaatatttgtcaggatctcttttgctccttgaattcctcataggctcgggtttgccgaaggctaccttctgctcatgtgcgaggtaaatattttcccgagtttcattaagctcagtgtaagtagtatacactggcatgtatttgtcatgttctcttttgtttctttctatcctttgacggctccctaattctgtcctttatttttggaccagaagtccccgagttattaattctcgtggaaggagtccttgtagaaacattgctgggtttacctcctgagcttgttttcaacaagttcatttcctttcgggcttcttccttccagacaaacacctgagccctcttgttgaacttagtgatgcttcttaccggacgtccttgtaaatcatcccacaatttgcccccggttgttaatggatcagtggagatccccgcctgaagggctgtaagttgcgtgctgtcatccaaatttctaaccctagtagtagccgtgctaaaaccacttaagtatgccttaagcgtttcgctaggctgctgctttatattggttagcgaggccacttcggggtgcctatccctagtggcctgaaattgcttcttaaaatccttggacaactgctcccaggaagttattgaatgacgagtaaacttgttaaaccagctactcgctgctccaacaagcgaggtggggaacaaaatacagcttgtttgtcatgttactcgctcgcattattgtgttaaagttattcaaatgcgagaccagatccgtggttctgtcataggacgagacatgcaaatttttgaatcccgaaggaaaaggggtattcataatatatgggtgatacg

SEQ ID NO: 360697 - DNA, 924 bp, Cannabis indica
ctctcctctactgaaaagtattaatacataagcttacaaggtgagtgtgctagctaggaaataaattattattattctttaccctatcatattttaactttatttgtaatgtatgtaggttcttaaattatacatattttgataagttggttcttaaattttattttttaacagttagtctctaaaatttattttttaaaaaacataaaatcctattttatttatttatttattaattttcaattaattttatattaatatattatcaaattaaataaatatattatatatatatattaatatattaatatattttttatttatatatatatttttaaatatttcaaaataagaagaagaaaagaacaattaaaaatgctaaaaaataatattatttttctataataaactactgaagtaagttatattttattattttatttttattcttgttgcttcgtggcgtaacttatgtaaattttacctatcgttcatgcaaaatttaaataatcaataaatatattacaattaaaaaattattaaaattataatactacatatttataaatcaacaataaaatatgctataaatactaaaacataaaaactgagaagactaaaattctctctagccgagtgatctattgtttatacttttttttatatgttaaatattttcttaaaaaataaatattatacttatggaacacttgttaatggatattacccatgaatggttactaaacaaatttaactatcaatattaattttaaaaatatcaaactatcgaattttgatctaataatgatttatgaaatcacaaatttgaatttctatgcttaatttaactacttattaaaaaaaatatatcaaaaaatatctctttttacactatatcaaaaatatgttcatacaaaaatattt

SEQ ID NO: 360698 - DNA, 500 bp, Cannabis indica
aaaaaaaaaagactttacagaaacaccactacaaaaagataattcccgccagtttttaagtgtcatttaaagaatttatgtcggtttagaaaactgacgtatataccatagtcgtaaatagttttttattagggtcatttttaaaatgacgcaaaaaaaaattatctttatttaaaaatcgacacaaaatatgcactcttttttttaatcttctacacgtcggtttagaaatgacgcaaatttttttgtggtatttccaaactgtcacgaaaagacttataccgtcgattcaaaaaagacacataaattgttgaaatacttttcttcacctattgcgtcggttataaaatagagcataaatgtaggtaagggaaaattacaaattttcatgtaatttttacaattttccttgtctccattatcaaaatttaaaataattatgattttatgtaatagtaaatacataatacaaaaaatgttaaaatgtgttatgtaattca

SEQ ID NO: 360699 - DNA, 633 bp, Cannabis indica
tcatgatcatgataccacaaatcccaagtctgttactggcttctgactcgttttgggtgattctgatatttcttgaaagagtaagaaataaacctaatctaagaaataaacctaatcttggattgcaaatatattcgacgattatggagacatgtgttggcagagtttgaattgtcctgggttatgccaaggtctgtttcacaattgatagcgtccaagctaaccggaagcaaacgtagattaaagctttggaaaatagtgatcttagcaacaatctgggccgtatggttagaaagaaatgccagaatctttgaagggattactaaatcagaagcggatgtgtgggagcaaattaaattttggacagctactttggtctttagaaccaaacattttgaggatttatcatttttagatttatgtagagaatggaagacaattgtataggggctgtaggtggttttgtttagcttttctctcttctgaggcaaagcaggggagtactcttgccttaaaatttctgttttgttattaattgtaaccatggttttcctccaccacaagtgaggcttttaatatatatcgggaaggatcctgtctaagacaagaggatctcttctctttttcaaaaaa

SEQ ID NO: 360700 - DNA, 1399 bp, Cannabis indica
gatggggaccatccagttgggttcttgcccaaccgttattatggcctcttttactttgatgcttggctctgccaagcgttccacgggtaccacccccagcccttcgatttcactatctgaagctaacttagccagacagtccgcgtgagcgttcttttcccgggggattctttctactttgtagtccgtgaactcgtggagcagctcccggactattgttacatatgcggccattcgctcgccgcgtgtttgatactctcccgatatctgatttacgaccagctgggagtcgctgtagacttctactcttttggcccctacggccttcgctaatctcagccctgctatcaaggcctcatattcggcctcgttgtttgaagctgagaagtcgaaccgtagggctgcctggagtcgaagtccggtcggagatatcattcgcaacccccgctccggatccattttcattggaggctccgtccacaaacactctccatgctgggactgatggtgtgggtatgttcgcggtagcttcggcttcattacactccgtgatgaagtctgccaacgcctgtccctttatggaaatgcggggaatgtagtgcaagtcaaattggcttagctccattgcccatttgaggagccttccggacgcctctggcttttgtaggacttgccgaagtgggtggttggtcaataccttgattgggtgagcttggaagtagggtctcaactttctcgaggccattaggaggcaaaaaactagtttttcaatgactaggtactgcttctccgctcctatcatgcgcttactgacatagtacacgggatgctgagtttttttcctcttcccggactaaggttgcgttgaccgcgtgctcggagacagccaagtataggaacaagtcttctccgagaacgggctttgacaggattggaggcttggccatgtgctcttttagttttttgaatgcctcctcgcactcgtcagaccattcaaatttctgacacttcttcaagatgttgaagaagggaatacacttgtttgtggaacgggagataaaacggctcagggcagcaacctttccggttaggctctgcacatctttatgtttctttgggaatgacatgctcaggagaaacttccctgacttaaccccgaaagtgcacttcttcgggttgagtttcattccgtatctccagaccatttcaaaacattcttctaactcgtccgcgtggctagtgcatgcttttgacttgactagcatgtcgtccacgtataactccatatttcgccccaggaggcctttgaacatctggttcaccattctttgataagttgcaccagcatttttcagtccaaaaggcatgactaggcaacagtatacccccttatcggtcc

SEQ ID NO: 360701 - DNA, 935 bp, Cannabis indica
aattaattaattatttttaaattatattactggtaaattataatttaaaacacatttaggtaactttaaaaattatttttgaaactaatgaattaccatttaatataacaagctactatttttatatacttttttgttattttgaaagctaattagttatcatataatataatataattcaattaacgtaattctaaaattaatgttaactaatgaagattttaaaaaaaaattatataaaacagtaactatcactatattaataactaaatagttttttttttctaaaaataaaacatatacttctcatattttgaaatgttcacattgaagatctagtagatcacaattatatttttttaagagagagagagagaggaagatagaaagaaataaatgtaataaatgagagtattaaaacatacttaaataaataaaatgttatttgatacatgaccaaatttatttttgacaattagatcaaagataagtataaaattctctttttattatttatttagtgtatagttttcaatttaatactttatacgcttattttaatatttatctgtttatattttgctactagctagtactttctagttatacttgttataatatagctagcatattataaatatatttataaatgtatttgttaggtgggacataaattgtatggataaacttgagccagaatatttaaagacatattataaggtaatgttggaatcttatgaagaatttgaaaaggagcttaaaaaggaagaattatacaaacttgagtatgcaaaagaagaggtatatatatacatatatatatatatatatatatatttcagttctatcttcacaaaattttatgatataaatataattatattttaatttttacagatgaaaagaattattggagcttattttgaagaagctcg

SEQ ID NO: 360702 - DNA, 1077 bp, Cannabis indica
ggcaccggccagggaggttattgacctttctgaggagctaactgttgcgagcccctctactccaaaagtttctaagtctaaatattctcgaggaggaaactcagacaagcctgagcaatcaaaaggtgggttcgagctggccaagagtggatccgagcagatgcgggctcctactccacctttgtcaatgcttccaaaggccaagaaagaaaaggagatgcttgcccattacatgaaccggttggttcctgaagtgagtgagcaactggccagtgctaacaacaaatcttctctggaattgctaatgggaggagtcttgaagaaattcacaagggtaagtttttcttgacagttccgtccaatcctttttacttgtcttagattctaaagtttttttttctgtgcaggctggtctgaagttcgcttagacttactcccgagctaagtctgccgcctccaagaacgttgctctgtccaacaccatgagggcagagatggacatggccaggaaggatgctaatgatgtcagggtggagctcggagctgtttggatgtagttgggtgaggtcaacaagaagcctttactgctgagaagaaagtagctgagttgactaaggacctcgagcccgaccagcttgaggctaccattggctccctatcggcacaagtgaatagccttcaagaggagaggggagttcgttcagactgtcttccatcggcactaagaggagaagaagacccaggaggaggagcttacagctgagattgagaagtacaagtcggggatggcgaagcaggaagaaaaaatgcatgccttaaacaaagctggtctcgagattttttatgacttttggaaggctaaccctcaggcgaatttcaattacctgggcgaggccaaaggcatgtgtctcgagtattgtgcttctcaagtggcttatggtgagcctgatgtgactgcttcttcctctggccagaatgttgatgtacctcccgttcaaacaacagatcctccagctcctaccggcccagaagatctgaaccgagagcttgggactccagctgtttaaatacttctgt

SEQ ID NO: 360703 - DNA, 832 bp, Cannabis indica
gatagcagagtaatacctgtttatggctgcgctctgcggttgttatatttcctttctcaaaagagacaatgtcatgcttgtgttggtcactctgttcacctttgcaacaccatgagagtttaaatgatgcctgtttcataaaaaaatgtggttttaatggtgtactttggagagaatagtgatgttgggtcttatatattgttgtattaatttttagagtaatttgcggtgaaaatacccaagtttaactcggagttgcagataaatacctaacaaaaatttttggcggtaaaaataccttctgttaaggtattggaacttccgtaggtacctgactgttaagccggtaagtgtccagctgtcattctcttattggtccacatcattaattaatattttaattaaaaattcatttaagaatttaagaattaaataaaaaaaatattttaaaatcaaataaaaataataatatatattaaaattcgtattttaaatagataaataaaaacatacaatgattaaaattaaattaaaagtaataaaaatgtaaaaatcacaaacccaaaaaattcaaacttccatcacaacaaaatcaaaataaaattaattcaaaatcaaattcattaacctgattccaaattccaaattaaacagaaactaatatacaaaatcattcttcatacatataaatctaacaaactcagacaaaattaaaacctaaaaccaagaaaaaatacaaacttagacataaaaatcataaacctataaacgcaaacccagcactatgaagaacaaataaatatgaactctgaaagttcatccaaaatccgaa

SEQ ID NO: 360704 - DNA, 514 bp, Cannabis indica
ttagtaaaattgaatggaattggatagaagttattgtatccaataatctcaatagttcgggagagatttttaaccgcgcaaaaaattcaagacataatttaatatatgtcaaagtttaaggataattttttttaaataataataataaaaataaacaataatacaactataaataagttataaaacaaaaaaaaaaaataataatttaataattttgttattcaaaaaacaaataatttaataagtttactgaaaatatatttttataaataaaaaaatcaaaattaaaaataaaaaaaaaatttgatttttcttctttgaaagatcatatactttggaaaagaaatgcaactcaaaatacttgtttgtcaacattacattacattgcacgggaagaaaatattccgtgagaactgaatacacaatgcttattgaatcaataaaatcttacaactctcaataaatgacatgaaaaacctcaaagaaaaacaccatatatatatactaggtgatt

SEQ ID NO: 360705 - DNA, 1006 bp, Cannabis indica
acgatcactctagattttaccttatgcaaagaaatttaaaatatttaagaaaattcataaatttttagcaattgtgaaaaaccattaatgtaagtggttaataatctcgcgaactgataggggtggagaaatatttagtggatatgcagttgaaagatcattaagttgaattttgaattgtattcaaacttacctccctagaaatttgatttgcatattgatgatagtataaggtttatgattagttactagttgttgcttgagtccttctagggaataccctatgataggaaaattttagaatgatggaatagttgtgtacttagtgtacacccttactagattcatggatgtcctgatcgtggccttaagaaaagctagaactgttatactaaggcttgcatatttaatagctattctaagtgattaggggtggaccatcctattgtcattaatataagaaagtgtttgtttcaactaatactgcttttctacgaatatgactaagtctgaaaaacaaagtagcaaagtagaggagataagatgatctcactgcctctgttgtattgacacaaccgatgaggataataccacttatgttcttagacagaaagtcacggtaccttatcgaagtgggagggtttcaaggaactcaccctgttatgacttggaagacacttgtgatgaaatccattgttagtttaaagaagtaatggattgtcagaataaggaaataagaagtaaagccaatagaactatggttaaaaccattcatatggagcaaccaaaagtttactattacaaggacaagaaatgaaattctaaaaataagtctattcaatggacttaacaaaactttctcttcctattatttaaggtttgagtttatctaaacctacgacttgtggtatgcctggtaatttacttactctagtgcaagcaacttactttagtaagttgctagagcatttttcttctaatggcaatctatagaagcttctcgact

SEQ ID NO: 360706 - DNA, 1256 bp, Cannabis indica
cgacagactttatagtacagttaaacttttgtaaatgctttggtaaacgggatcccggatttatgtatgtattatattttatgtttttaattaattaagaaaaaattttaattgatcacgattagtactaaactcgttgattagcaacgagctgcatggtcatttaaaaatcatgttaacatgcctaaaatagctagggtgttacaatttggtatcagatccgccaggttgtcttccgaagatcgtcatgacatgtataatcatcatcaactatcagctcgtctcattcagtaagcttttattgctttcgtagtttactttaatcgtatgatttaagaaaagcttgttaggaagcatgttagtagcctgataactaaataggcacgtgttttaaatttccaaaataagcggcaattagtaagttattcttgatcacgatctgaccagactagctcttggttacgcgggttgttctagtagtatggacgccaggcgaaacactaggattcagggtaactcagtcagatccagtggcggtcagggagttcagattcccccaaacgtttgtggttgaggcagaggccctagaggcagggcacgcggttgaggtgatgttaacccacctcaggtgtcctaggaatggtgaaacaggtttacaacaatgcaagccagaatcaacaaacaagagaaagagatcagacgctagaggcagtagggtgctcctgcaatgccggctctagaaatgcaggtagctcctgcccctgttgtgtaagcaagaccggttgccgtagtaaaccgtatggaaccactatatggaaggttctacaagaaggcacctttagtcattttgagcagtggctaacagttattaccagaattttgaatttcatgagcgtcactgtcaatgacagagtggcctgtgccacattctagtttcaagaagatgccctagtgtggtgggacatggtgtccctaacccatgatgttaccacaatgacctgggagaagttcaaggaactgttcaatgcgaaatactataatgaagcagtcacaagtgcaaagaagaaaggaatttactcagctgactcagaaagaaaatatgagtgttactggatacacaactcagtttgaccgcttggaaagattggcttcgggatcttgccaaccaaatttagtaagaaagagaaatacctggacgggttgaatttgtagataagacatgacctaatgatcactactgatgataacaccaccta

SEQ ID NO: 360707 - DNA, 607 bp, Cannabis indica
tatgaaaagatggggctccagctaactgatttggcaccctggacacaagtaatccatggcttctttggcgaaggcattgcacccatagggtacatccgattgcccttgactgttggagaaaatccaacaacgagaactccgatggcgcagtttgtcgtattcgacgtatccttggattttaatgccatgataggtcaacacatcctatatgactgaaaggcggtgacatccatctaccacctttgcttgaaattcccaacaaggcatgggataggatgattaaggggagaccaacagtttgcccgtcattattacaactttgccttgtccaaagcaaagaaagagaagatgcccaccaagagctttgaagaagagcccaacaaaggccaatgaagtccatcccaaagtggggatgcaaccatagatcctcacttttgggatcctacaaatagcttaggacctgtagaagagctggaggaagtggaggacgatctcacttctctagcttgaagattgaagaccgggaattatttagcgctagaaataaaatcagtactgataaaatttctaagggcaaacctgggcctctttgcatggtcacatggag

SEQ ID NO: 360708 - DNA, 645 bp, Cannabis indica
acaaactctttcaactcaaccaaatcagaagaaatcttctgttgggaagtatgcagcaaatcaatcttcatctccaaaccatcaaacttttcaaagaaaaccatcaagcttgacagaaatatcactctcaatcccaaaaggttgttccggaacaggaatactcttgtaagaattgtagtcagtgtcaaacttgaagctactcaattttaaagctttgaactcagtagtagtgggtctcatatttgatagttccagctaaggaaaaaaataagaaaaggaaaaatttcaataggagtgtgtattaataataataaaaaaaaacaagtaataaaaaaccaacaaacagcaaaaagaaataccttgtctttggaaacatcaaaaatagtagtcttcaagactttaaagtcgactgactgttacaagtccactgaataatccttggaatatgagaattttctttttggcaatacttacctttcatgcacttataacactcataaaaccaaacttgaaatacatgaggacaaccaatcaaagtgtaaaaaacactcggcctcttccctgaactcttcgcctttctaacactttcaacccaactgtcaagcttcccttcaaggaccaaatagtcaattcaaaagaactccg

SEQ ID NO: 360709 - DNA, 542 bp, Cannabis indica
gcaggagtattagctcccagttgctcccccccgagatgctcaggatattcttggcctaccacctagacctaacgggagagtggctatgatctcgggaggaccccacatcagagggaccacgcgcaaggagctgaagcagtacgcaggggctgtgaaacacgatgaggtttgggaagttactcaactcccagctcaaaggccccggctgatggatcaacccatcacattcacggaagaagacgctaagacggtgcgttttcctcaccatgacatgttggtcatagagacccccattgccaataaggtggtggccagattcctgatcgacaacgggaatttcgtgaatttgctgttcaaagaggcctttactgactggccttggtggactttggtgtagtcacatcaatacggcacttgtgcctgaaattcccaacccaggaagctgggatagggacggtgagaggaaatcaaggggaggtgaggcaatgctataacgttgctacccacctacccatgctgatggtccgagaaactactgagcc

SEQ ID NO: 360710 - DNA, 640 bp, Cannabis indica
acatacaaacaaaaaaaaaaaattatcaaaagtaaattaaaaatatacattataaaaaatacacaagaataaaaaaaattgaaaaataactattcaacaaaaaataattatggaaaccacctaaaataattaaaaaatatataaaaatagcaaaataaaatgcacatacatacaataaaaatattgtttggaataaacggaaaaatatatacgataaaagacgtacataaactaaacaacaactatattaaaaaaaacacaaaaatagcaggaaaaataactataaaatatcttgttgacttcgcttttagccaacgacaatgaatttttttaataagagataaacgacatgtcgtaatgggaatatatataagaaagcaataataagacgaaagaattttatagagtttcagccccgggcagttcggtaatagcctaatcctcgttatttgtattgacttaagaacaaggtagaagtctccttttcttatagctcttacaacaatatctctgaatatatagttcgtagataataatatagccttagcttaactgcgtatcggcttatcagtttttcggtcctttgcccagtgaacattcctcgctatttataggactgggaaacttgaggaggaagagt

SEQ ID NO: 360711 - DNA, 713 bp, Cannabis indica
acatttagattattgcttaatgctgatttcatgttagtttaattaagagattaattagagagcatgagatttagaacctagaagatctgaaaagagctaggttaattcataatctgtcattcacttcaagagaaggatagcatttaaacattaacattggtaacttaacaacaggattcgtctccctattttcttatcttgattaatcttcctttgttagttttaattttctgaattgttttatttaattcataaaaagtattcttttaccagatagaatcaatagtataatttagtagtaattagtccaattccctgtggttcgacctcacctgtgtgagtgtactacttgattgcgtatacttgcgtagtgattataaatttagcaacaagtttcaatacgtcttctcccatgcggcactaaatgcgaggtgactgttcaaatggggtctggtatctcccagaggtgctttgccatagctctgtcctccgggagtacgtggaacccaatcacaagtacgaggggtttggagcctggagccagacccatctcatgtccggggccatgctccctcttcaagattattttatcaactttcttgtttttgtcggccttgcgccttatcaactaattccacaagcttatcgcctgctcttaggcttgtttattttttatgtagccagaggcgaggcttcacctagcccggctgaaa

SEQ ID NO: 360712 - DNA, 825 bp, Cannabis indica
ttggattgctacggaatcccccaaaaatttcgcctttggatctcacagtgtatctccactaccacgctaaacatctgtctcaatggagggcaagttgggagaattaatccttcttgtgggcttcggcaaggcgacccactctccccctacctttttatttgggcagcagaagtgctttctagattacttcatgatgcccttaatcggggggtcatccagggaattactcttagtaggggaggtccggtcctctcccatattttctttgcggacgacctaattctggtagggcgagcaaatctttcagaggtgaatggattctggagttgcttagagaatttttgctcatggtctggccaacaggtgaataaactcaaaacgtctattttctttagtaaaaacaccccgataagattacggggtgaaatcaaggaggcgttgggaattaattaccctgaaggatgcattaaatatttagggttgcccctttttcgatcaaggcagaaagatgctgatttcaatttcatccttgacaacctcacgacaaagcttcagggatggaaagcaaaaattttatccaaagctgggcgagctactctaattaagtctgtgggattgtctatgcctatgtatgctatgcaaaccacgaaactctcaactcgaatggttaataagattgatggtttgatttagagatttttggtgggggtttgagaaaggaaatcacgggatccatcttaaggcttgggataaactttgtcttcctaaatctctgggtgggcttggattccggaaaactaaagagatgaatcaggcctttctggc

SEQ ID NO: 360713 - DNA, 853 bp, Cannabis indica
acctttatggcgagaaatgtgagatatacaatgatcataagagtctgaaatacttctttacccagaaggacttgaatatgaggcagagacgttggtcaaagttggtcaaggattatgattgtgagatcctttatcaccctggtaaggccaacgtggttgctgatgccttgagtaggaaaggtcagagtcagttgagtactatgaagcaaatctcccaacagctagctagtgaaatgactcgagctaagattgagttggttgtggggcaattggctaatattactctgcaatccactcttttagagagaataaaagaagcacaaaagcaagattcagaattgataaaaacccgagctagggtttcggctgggaaggctagatttctcagtggatgaaacgggaatgttaagattcgggaatcgagtttgtgtgcccatggatgagaacatcaagaaagagatcatggatgagtctcatacgactccttattcagttcatccagggtcaacgaagatgtatcaagacctgaaagccatgttctggtggccaggcatgaagaatgacattgctgaatatgttacaaagtgccttacgtgtcagcaagtgaaggctgaacatcagcgacctgcagggttgttgcaaccactgaatataccagagtggaaatgggaagatatagctatggacttcgtggtaggtatgcctagaaccacgggacaatttgactctgtatgggtcatagtggacaggttcacaaagtctgctcactttttacctgttcagacgaatttctccatcgatcagtatgctgagttgtaggttaaagaaattgtacgtcttcatggtgtcccaa

SEQ ID NO: 360714 - DNA, 1149 bp, Cannabis indica
gagaattttaatattttttataaaaatttaattgaatttttatttctttatgaatcttaaattcaaatttctttttaatattttatatggttttttttcttaaaaaaaccatatttttagtttgattggttagataatgttatacttagtggcatttactttttatgccatatatatcataaccttaataatttttttcccatatttttgaaaatagccctatataatagggaaatttatataaatactgttttttgaccaaaagttttcaaatatactgggacacggtaaacataacttttttactgtccaagccggttttcttttcttttcttttatactgcgcaagcccaataactttacttttatactgtaaacagtaaaaaaaacacaaaaaacgggacctccttcctggttggggacgggccggaatcggagataaccaagaaaaaaccattaaatccggcgaagagtaacccctgctaaatctaaggacagtcaaagaacgaacaacaagatttacagaagttttttttttttcaaaaacagaggtaaacacaacaaaacccaaattaaattaattcttaaaaactaacaaaaaaaaaaaaaacaaacaaacaaacccagatttagatctgaagttaaaaaaaacgaaaaaaaataatgtgatgttgttaaatttatgatgcaaattgataaatcagggttgttctaatgttgatttggcgtttctaacacaaaatgattgctaactatacttgagaaactactacaattgttcattcaaaaaattagggttgttctaatgttgttttggcgttattaatacataatcattgctaattatatggatcatagaaataatagataaaaacactaataataaaaagtgtacattattttgtatggttgttttactgttgttttaatatgaaaaaaaggccaagtaaatgaaatattgtgaaaaatgacaggacatggaatctataccagttctcataaagagcaatggacaatgggaaaaagaacataattatttcaaaaatgtggcaatgctcaaaaacaacacaacaatacttgaaaaaaacacagcaacaacagaatcatacacattaaaacaccaatcagaagaaggaggagagtcaaaaa

SEQ ID NO: 360715 - DNA, 646 bp, Cannabis indica
ccaaggggcagggggacaatccaaagatatactcagaactctcaggagatgaaacctgaggaaactgaggaaaatctggagacacagcttgagatacatggaacatcggacgaaaactgccaaccctctcttaagtctcataagaaagaaactcacataaacccttagagggagaaaaaggtgaatcaaaccttgagaggaagggcaaggtccgaccgcagtcacgacaagagtgatctatgagaacatgtgaacttgaagaagcctgaccttcgtcaacgactcggttcaaagcaaaagaattcattccatttgcgaatgaacgagttggagaataagttcagaggccatcaagtcacgaaacttagaagacaaccggggcattgtactgttggagaacttgattcgggagcctcaggatcaaagagaaaagacgattccaaaaggctaccccaggataagaaacccaacagatatatccctctttatgctgaatataccgagctcaattaaactcgggaaaatatctacctcgcacatgtacaggatgttggaatatattttactaggatctagatttactaccatgtatgttatttaacatcctaatatgaatttttaaaataatgtaaataaacacatataa

SEQ ID NO: 360716 - DNA, 506 bp, Cannabis indica
tgaagttttttatgtttttctttctccaccaaaatttgcaacaactttaatttattacctttggcgggttaagaatgaagtcttttgtaattgtacagaggatataaaataatgttaaagagagaattttattgttttggccaaaagtgtaagtgctattgatagtttgaaaatttataacagtatatatatagatacttgtttgtattgtatataaaaggtgctggttggattggatgtaatttgttttagtcaatgaaattttttttggttaaaaaaaatcttaaaaaagagataatattgatgtattaatgatcttatttatttttgtataattaaataatatcactagggttggaatctgatccaattcaattagtaattggatttgaaaaatcatcatccgatccaatccaattattggattgaatcgattttctaattagatatccaattatacacttaaattttaatattaacttcaaatatgaagaaaaatacataaa

SEQ ID NO: 360717 - DNA, 513 bp, Cannabis indica
aaaggataaataagtaattaaaagggtaaaataatattttgaccaaaactaattacgaaccaatacatggagagctaatcactagaaatgattatatcaatagacactgcagttaaactcagtaaataaaattttatgattacgaagagtgcaattctatatttatagtagagtaatcatagaattaataaataagagattatttgattgatgagacaataaataatctagtttattgtagcttagaattataggtccatggtccccaaattgccaccttgaaactgtaaggctttgtgccctaaataaaactctatttcaatataatcttttctattcaattatcgataaagaaacaaatttattctcattacttatttagtatgatttttggttcatgtgatcatttatatgtttatttgatttataaattcatccaaatccttatcacattgatattattgtttattgtgttgtcagcatagtggaaagtaatcaagattatgtgattaa

SEQ ID NO: 360718 - DNA, 1170 bp, Cannabis indica
taatattcatcatataactgactgaaatataataaaatagatgaatagatattcataaatatgttcttgtacaatttgatgacaataaaaatcaatcgaatatcgatatagattttgacaaatatttgtaaataatttttatttgtaaaaagtattatatttatgtgaatacaactacagaatcagtaaaataattattattggtgcaattttatagtggattttgaatacccaaaaaaaatgtaaagaaaattacattaaaacatcaatgtataagaataataattaacatgacttatgttatttacacatatcagacatgtatttcttattgatcattgcctatagagaattgtaagaattgaattaatttaattttaaaaagtgttcatatactatatattagtcatgttgttatacatatgtagtgttattacataaaatgtttatattattgcatatgacatattttaaagatcaaattttacatacatcttaaagattatacaaaatctatattcatatattctttgaaatattataaaagaaattagttaattattttgtatacttttatggatgaacaattaacaattttttaagaaatgtataataatgttctacttgttcaacaccattcctgaatgtgaatgcaataattttaaataatcatggatattatttatcactcaaatatttctaaaagaaatttgaaacaactagaagatgaaatgccacgcacaatcaaagtgcatgaatttgatatcttagtttttgcactatgatgtggcagtgactagaggatacgtgtcttacatttcctacctgggcaaaagaaagtactcctagtagcctacaaaggttgatataaagatttgtgttgttagcatatagcaagatgtccaagcagagtaatcaaggtacatctgagcaacgtacaatcacttgatcaactcgcacacactcgagagcatatgtgagtttacaattttagagataagcatcgtcacttccaagacacgaagataatccctacattcgtgggattaggtcagagaataaaggcaatatgccttggtttccaattctttgtattgtaattatagaattaatgtacattcttattttatttattatagattaagggaaaccattcttcatgtaataagc

SEQ ID NO: 360719 - DNA, 555 bp, Cannabis indica
ttaaattagaatatttttcttggatattaactagaattaataattaagttgattttattcaagatacttcaaaagattaaatcaaataataaaatatatttaagttgaaatttaattttgattaattttagactaatttaaattaaaatattttggatactaaactagaattaataattaagttgatttgtttaagatattttattatttgtttctattttaatacatttaattaaataaaaagaaattatatttaagttggatttttttttttaatttcatatcaacttaaattagaataatttttaaagtatattttattttacgttaataatcactcgaggttaaatgaacttgctgcaataatttttactgttgtgtcttctgagcggtggatgaaacagaatacaagtgttcttaagcagggttgaccctaggctaatgcgggctaggcccgtgcctagggcccactcattttaggggcccaaataaaaaaataccttttaaaaaatatacatattatttttaataatttttaaaaataacatttatctt

SEQ ID NO: 360720 - DNA, 516 bp, Cannabis indica
aaaaattacaagataaaaaattcttagagagttgattacaagcaaacaaatagttaataatgttccaattggactggacacctttaatcacatttataacaacttctgaaccactctcaacaaggataaaatcacgcttcctgtaagcagcagtttccaaagcaagctgacacgccgctccctcgccaatcaaaggatctgtgaagttgaggaagttggccgcaccccacaaaactgtccccaaatgatctctagccaaagcaactatgcacattgactcaccaccaaccttaacatcacagttaattttgatcaaagcaagtaggcagcataatttgtaaaacaattagagatagagtcaatagcagttttaatgttactcggagaatagttatgaactttatcattttgggttctccatatagtatccacaacgatcgaggcataaagaaactgttgggaagtattttaccaggatcttagatctactcataagtatgttgtttaacaccctaa

SEQ ID NO: 360721 - DNA, 806 bp, Cannabis indica
tttgttattaattcttagtttaaaatgaacttcttagcaatgattttgattttatatctttatgtttctccatgttgcctaatgagtgtttattggtgaaaaatatatgcttaatgaatgttctccactccattaagaaactttgctaaaaatagatttcattgcttctttatgatattcatttattcattcatggcatactgtactaccatttaaattatgtgcattccatagtttaatttatgtctaaaattaatattgtagctgaactcttattgtacataatgtaatcgctagaaatattgattttattattctaataaaacatcttaaggatcaactaaaatactctttaaagagcaatttgttcaacatgtatatgttgtttagaaattgtaagtaattaataaataacatgactttattataactttatcgatgacttgtgaattattaatgattaattatgaattctcaataatcattaaaattaaaggttgttgtgaataaaaattaatcaaatacttgaggtgtaagtttgagaaaataaataatcttttttagaaactaggttcgtagatcgatcgcttccactgatcaagtcaattcttaattccacagttctaatattgtgagatagataataaaatatgtaactcttaaaccttatagcttttctgatgaaatggtctttatggtatttaggcctagatcttttctttgataattgtactctaactatatacgagtatttataaaatgtgtacatgtcatcaagtcagttttcaaccttatcacaactcaaa

SEQ ID NO: 360722 - DNA, 660 bp, Cannabis indica
ctggtcattataaactcccctttggggcgagaatataacacacgcatgatctaccgtcatgaagttaacaataaagaaaaaaatacatatcaattaagaatttattacctttgggcaaataattaaaatatacacatttaatattaactcacttcatggaatgtgaactaatatatataactactacctttgggcaagtaattacacatatagccaaccaaaataaatattttctataacatatgaaatttggtgataaaataatcattaaaaaattaataattttcaaccaaatttccaaaaagagatatattaattgcttgtaatatattgataataaaaaataaagtgtccaccataacacattatttttgcatcaaacaatcaagttttataaattttagaacaacaaataatggaaaaatgtgaaagaaagaatattggtggagattacatagtcaagataaatcaaataagagagtgactatgtcatatggaacgagaagaaactccaaaaaatttctatgatttacggatttcgaaaaatcatcaaaaattattttaataatttttaactgcataattatcattaaaataataataattattaaacggagtcaaaaaattaattaaaaatcaccaaaaaatcaaaaattaaat
